United States Patent Application Publication US 2007/0042381 A1 - sequence listing, part 3

SEQ ID NO: 85246 - RNA, 22 nt, Human
ugucuaaaugcaauggauuucc

SEQ ID NO: 85247 - RNA, 22 nt, Human
ugucuaacccaguggcaggagg

SEQ ID NO: 85248 - RNA, 22 nt, Human
ugucuaaugaauuaauuaauua

SEQ ID NO: 85249 - RNA, 22 nt, Human
ugucuacaaacguguacacauu

SEQ ID NO: 85250 - RNA, 22 nt, Human
ugucuacugcugacacuaacag

SEQ ID NO: 85251 - RNA, 22 nt, Human
ugucuagacauuagcuucagcu

SEQ ID NO: 85252 - RNA, 22 nt, Human
ugucuagggagcugcucaggcu

SEQ ID NO: 85253 - RNA, 22 nt, Human
ugucuagggcgagaauguguag

SEQ ID NO: 85254 - RNA, 22 nt, Human
ugucuaggucuagguuggcaau

SEQ ID NO: 85255 - RNA, 22 nt, Human
ugucuauaccugauacagaguu

SEQ ID NO: 85256 - RNA, 22 nt, Human
ugucuauagccugauuuguugg

SEQ ID NO: 85257 - RNA, 23 nt, Human
ugucuaugagaaguucaggcuag

SEQ ID NO: 85258 - RNA, 22 nt, Human
ugucuauuuuuacuggaccaug

SEQ ID NO: 85259 - RNA, 21 nt, Human
ugucucaaucagaagucauua

SEQ ID NO: 85260 - RNA, 22 nt, Human
ugucucagaggcaggaagagcc

SEQ ID NO: 85261 - RNA, 22 nt, Human
ugucucagauacgccaucaagg

SEQ ID NO: 85262 - RNA, 22 nt, Human
ugucucaggcccaagccaguaa

SEQ ID NO: 85263 - RNA, 22 nt, Human
ugucucagggcagcagcagggg

SEQ ID NO: 85264 - RNA, 22 nt, Human
ugucucaguauacgaaacacuu

SEQ ID NO: 85265 - RNA, 19 nt, Human
ugucucagugucccuuccu

SEQ ID NO: 85266 - RNA, 22 nt, Human
ugucucaguucccuucucugga

SEQ ID NO: 85267 - RNA, 18 nt, Human
ugucucaguucugcuaug

SEQ ID NO: 85268 - RNA, 20 nt, Human
ugucuccagggcugagugga

SEQ ID NO: 85269 - RNA, 23 nt, Human
ugucuccaucucauuacuugggg

SEQ ID NO: 85270 - RNA, 22 nt, Human
ugucuccauggugaagcagggu

SEQ ID NO: 85271 - RNA, 22 nt, Human
ugucuccuacugccuguggauc

SEQ ID NO: 85272 - RNA, 19 nt, Human
ugucuccuccccgccgucu

SEQ ID NO: 85273 - RNA, 22 nt, Human
ugucuccugagagcuggacaga

SEQ ID NO: 85274 - RNA, 21 nt, Human
ugucuccuguuggcacauggc

SEQ ID NO: 85275 - RNA, 22 nt, Human
ugucucuccugaugaucuggug

SEQ ID NO: 85276 - RNA, 22 nt, Human
ugucucugugacuccuuccgcc

SEQ ID NO: 85277 - RNA, 22 nt, Human
ugucucuucagcccauggcuuc

SEQ ID NO: 85278 - RNA, 18 nt, Human
ugucucuucuuauguggg

SEQ ID NO: 85279 - RNA, 22 nt, Human
ugucugaagcagccagugcugu

SEQ ID NO: 85280 - RNA, 22 nt, Human
ugucugaaggcagguggagaac

SEQ ID NO: 85281 - RNA, 22 nt, Human
ugucugaaggccugaccuacau

SEQ ID NO: 85282 - RNA, 22 nt, Human
ugucugaauucaagaaauucaa

SEQ ID NO: 85283 - RNA, 22 nt, Human
ugucugaauuuuggaaucaagu

SEQ ID NO: 85284 - RNA, 22 nt, Human
ugucugagcaccugugcugaac

SEQ ID NO: 85285 - RNA, 22 nt, Human
ugucugaggaagucagcccuuu

SEQ ID NO: 85286 - RNA, 22 nt, Human
ugucugagugugccugggcauu

SEQ ID NO: 85287 - RNA, 22 nt, Human
ugucugcaaaguccagcacagg

SEQ ID NO: 85288 - RNA, 22 nt, Human
ugucugcagugccacaguggga

SEQ ID NO: 85289 - RNA, 22 nt, Human
ugucugccugucucugugcaaa

SEQ ID NO: 85290 - RNA, 22 nt, Human
ugucugcuacuugguucuacca

SEQ ID NO: 85291 - RNA, 20 nt, Human
ugucugcugagcugcugccc

SEQ ID NO: 85292 - RNA, 19 nt, Human
ugucugcugaugacucuau

SEQ ID NO: 85293 - RNA, 22 nt, Human
ugucuggacagagauucucaau

SEQ ID NO: 85294 - RNA, 23 nt, Human
ugucuggagccugagcaggugcu

SEQ ID NO: 85295 - RNA, 20 nt, Human
ugucuggauguuuaagcaga

SEQ ID NO: 85296 - RNA, 22 nt, Human
ugucuggcauaguugcucccug

SEQ ID NO: 85297 - RNA, 22 nt, Human
ugucugucaucagggauauccu

SEQ ID NO: 85298 - RNA, 22 nt, Human
ugucuguccccugccuugaggg

SEQ ID NO: 85299 - RNA, 22 nt, Human
ugucuguccugcuuccuuggac

SEQ ID NO: 85300 - RNA, 22 nt, Human
ugucugucuuuagugagauugc

SEQ ID NO: 85301 - RNA, 22 nt, Human
ugucuuaauaugugcauucugu

SEQ ID NO: 85302 - RNA, 22 nt, Human
ugucuuacagcaaucuguucug

SEQ ID NO: 85303 - RNA, 23 nt, Human
ugucuuaucuagcuucuagaggc

SEQ ID NO: 85304 - RNA, 22 nt, Human
ugucuucaaauauugaaauccu

SEQ ID NO: 85305 - RNA, 22 nt, Human
ugucuucacaugauaagccauu

SEQ ID NO: 85306 - RNA, 22 nt, Human
ugucuucagaauuaagaguaug

SEQ ID NO: 85307 - RNA, 22 nt, Human
ugucuucagcagucaucugggg

SEQ ID NO: 85308 - RNA, 22 nt, Human
ugucuucaggaguaaauaucau

SEQ ID NO: 85309 - RNA, 22 nt, Human
ugucuucaucuccaugcacaga

SEQ ID NO: 85310 - RNA, 22 nt, Human
ugucuugauugaagagauagaa

SEQ ID NO: 85311 - RNA, 22 nt, Human
ugucuuggccacuaggagugcc

SEQ ID NO: 85312 - RNA, 22 nt, Human
ucugggugugguaucuuagcca

SEQ ID NO: 85313 - RNA, 22 nt, Human
ucuggguuauuaugauggcuac

SEQ ID NO: 85314 - RNA, 22 nt, Human
ucugguaaccuuuaucccuccu

SEQ ID NO: 85315 - RNA, 22 nt, Human
ucugguaacucagaagaaagga

SEQ ID NO: 85316 - RNA, 22 nt, Human
ucuggucccugugucaccucuc

SEQ ID NO: 85317 - RNA, 22 nt, Human
ucugguccugaagucaacuuca

SEQ ID NO: 85318 - RNA, 22 nt, Human
ucuggucuccaggagugguggu

SEQ ID NO: 85319 - RNA, 22 nt, Human
ucugguuucccaguuccuccgu

SEQ ID NO: 85320 - RNA, 22 nt, Human
ucuguaaacacccguaagcuuu

SEQ ID NO: 85321 - RNA, 22 nt, Human
ucuguaaaucuacuaagagcuc

SEQ ID NO: 85322 - RNA, 22 nt, Human
ucuguaaucagaguagcagaua

SEQ ID NO: 85323 - RNA, 22 nt, Human
ucuguacaaaggcuauuuggag

SEQ ID NO: 85324 - RNA, 22 nt, Human
ucuguacacuucagcaugcauc

SEQ ID NO: 85325 - RNA, 22 nt, Human
ucuguagcaagugagaggcauu

SEQ ID NO: 85326 - RNA, 23 nt, Human
ucuguaggcagcaugccacucuc

SEQ ID NO: 85327 - RNA, 22 nt, Human
ucuguaggcuuacgcggcuucu

SEQ ID NO: 85328 - RNA, 22 nt, Human
ucuguagguuaaaaguagacaa

SEQ ID NO: 85329 - RNA, 22 nt, Human
ucuguagucugugccauagcug

SEQ ID NO: 85330 - RNA, 22 nt, Human
ucuguaucguaaucaugucugg

SEQ ID NO: 85331 - RNA, 22 nt, Human
ucuguauugagaaagccggaca

SEQ ID NO: 85332 - RNA, 22 nt, Human
ucugucaaaugggcauaaggau

SEQ ID NO: 85333 - RNA, 22 nt, Human
ucugucaacaugucaaagggcu

SEQ ID NO: 85334 - RNA, 22 nt, Human
ucugucacaauuugcuuacucu

SEQ ID NO: 85335 - RNA, 22 nt, Human
ucugucaccauucagcuugaau

SEQ ID NO: 85336 - RNA, 22 nt, Human
ucugucacccagagugcagugg

SEQ ID NO: 85337 - RNA, 22 nt, Human
ucugucacccgagcaggcgaga

SEQ ID NO: 85338 - RNA, 22 nt, Human
ucugucaccgagggcauccaaa

SEQ ID NO: 85339 - RNA, 19 nt, Human
ucugucacuggggguauuc

SEQ ID NO: 85340 - RNA, 21 nt, Human
ucugucagaaaagcugaggcu

SEQ ID NO: 85341 - RNA, 22 nt, Human
ucugucauugcaauaaaauuuc

SEQ ID NO: 85342 - RNA, 22 nt, Human
ucugucauuucauucauaugaa

SEQ ID NO: 85343 - RNA, 23 nt, Human
ucuguccacgcgaggcccuugcu

SEQ ID NO: 85344 - RNA, 22 nt, Human
ucuguccagcucuggggcucac

SEQ ID NO: 85345 - RNA, 22 nt, Human
ucuguccaggcuuacuauauau

SEQ ID NO: 85346 - RNA, 22 nt, Human
ucuguccaggucagccuacauu

SEQ ID NO: 85347 - RNA, 22 nt, Human
ucuguccauuuacagauaugca

SEQ ID NO: 85348 - RNA, 22 nt, Human
ucuguccauuuuccauuuuggc

SEQ ID NO: 85349 - RNA, 18 nt, Human
ucuguccuuccauucuuc

SEQ ID NO: 85350 - RNA, 22 nt, Human
ucugucucaaguucuugcacuc

SEQ ID NO: 85351 - RNA, 22 nt, Human
ucugucuccucugaggugccag

SEQ ID NO: 85352 - RNA, 18 nt, Human
ucugucucuguccuugcu

SEQ ID NO: 85353 - RNA, 22 nt, Human
ucugucucuuuguucugugagu

SEQ ID NO: 85354 - RNA, 22 nt, Human
ucugucugacuaccaugaggca

SEQ ID NO: 85355 - RNA, 22 nt, Human
ucugucugagggagugacauuu

SEQ ID NO: 85356 - RNA, 22 nt, Human
ucugucugguccaggaagaugu

SEQ ID NO: 85357 - RNA, 22 nt, Human
ucugucuguaguuuuacaugau

SEQ ID NO: 85358 - RNA, 17 nt, Human
ucugucugugguccacu

SEQ ID NO: 85359 - RNA, 21 nt, Human
ucugucuuccucagccuaagg

SEQ ID NO: 85360 - RNA, 22 nt, Human
ucugucuucuucauugccuaua

SEQ ID NO: 85361 - RNA, 22 nt, Human
ucugucuuugagaucucagccu

SEQ ID NO: 85362 - RNA, 22 nt, Human
ucugugaaaucacccagguuua

SEQ ID NO: 85363 - RNA, 22 nt, Human
ucugugaagcucugaacagcag

SEQ ID NO: 85364 - RNA, 22 nt, Human
ucugugagaaccagugccaggg

SEQ ID NO: 85365 - RNA, 22 nt, Human
ucugugauaguuuuucagcuau

SEQ ID NO: 85366 - RNA, 22 nt, Human
ucugugcaauaguuuguuuuac

SEQ ID NO: 85367 - RNA, 22 nt, Human
ucugugcaggaagucauuauga

SEQ ID NO: 85368 - RNA, 22 nt, Human
ucugugcagggaccccaagagu

SEQ ID NO: 85369 - RNA, 20 nt, Human
ucugugcaguggaggggcag

SEQ ID NO: 85370 - RNA, 22 nt, Human
uccuugagaggacagagccaua

SEQ ID NO: 85371 - RNA, 22 nt, Human
uccuugagauuaauuaaucacc

SEQ ID NO: 85372 - RNA, 23 nt, Human
uccuugagugucccccaagaguc

SEQ ID NO: 85373 - RNA, 22 nt, Human
uccuugcacauuaucugggaaa

SEQ ID NO: 85374 - RNA, 22 nt, Human
uccuugcagacaucucucuuca

SEQ ID NO: 85375 - RNA, 22 nt, Human
uccuugcagcaggaacccacuu

SEQ ID NO: 85376 - RNA, 21 nt, Human
uccuugcuauuuuccucagcu

SEQ ID NO: 85377 - RNA, 22 nt, Human
uccuuggagcucuccaagggau

SEQ ID NO: 85378 - RNA, 22 nt, Human
uccuuggagucaugauggaggu

SEQ ID NO: 85379 - RNA, 22 nt, Human
uccuuggcaagacacagcacag

SEQ ID NO: 85380 - RNA, 22 nt, Human
uccuuggcaagcugcaauggga

SEQ ID NO: 85381 - RNA, 22 nt, Human
uccuuggccuaaggagaagagg

SEQ ID NO: 85382 - RNA, 22 nt, Human
uccuuggccuggguggggucuc

SEQ ID NO: 85383 - RNA, 22 nt, Human
uccuuggcuuucuggagcuucu

SEQ ID NO: 85384 - RNA, 22 nt, Human
uccuugggucagugagugaggu

SEQ ID NO: 85385 - RNA, 22 nt, Human
uccuuguaaaggagcucuaaca

SEQ ID NO: 85386 - RNA, 22 nt, Human
uccuuuaucugcucagaaagua

SEQ ID NO: 85387 - RNA, 22 nt, Human
uccuuuaugugaguuguuuccc

SEQ ID NO: 85388 - RNA, 22 nt, Human
uccuuuccaugcuucuagaggc

SEQ ID NO: 85389 - RNA, 22 nt, Human
uccuuucuaucuuggguaucua

SEQ ID NO: 85390 - RNA, 22 nt, Human
uccuuucuccgggggacuguug

SEQ ID NO: 85391 - RNA, 22 nt, Human
uccuuucuuuucuaugggccca

SEQ ID NO: 85392 - RNA, 19 nt, Human
uccuuugaauaucaguuga

SEQ ID NO: 85393 - RNA, 22 nt, Human
uccuuuggagcuugacugguag

SEQ ID NO: 85394 - RNA, 22 nt, Human
uccuuugguaguuuucuuaaag

SEQ ID NO: 85395 - RNA, 22 nt, Human
uccuuuuuaagucguuguggua

SEQ ID NO: 85396 - RNA, 22 nt, Human
uccuuuuuauaguuagagaaac

SEQ ID NO: 85397 - RNA, 22 nt, Human
uccuuuuucucacacaacgaac

SEQ ID NO: 85398 - RNA, 22 nt, Human
ucgaaauaauuuagaauauaga

SEQ ID NO: 85399 - RNA, 22 nt, Human
ucgaagguuauugucuuuacgu

SEQ ID NO: 85400 - RNA, 22 nt, Human
ucgauagaaaagagcugcaggg

SEQ ID NO: 85401 - RNA, 22 nt, Human
ucgauuuguuugggggagaagu

SEQ ID NO: 85402 - RNA, 22 nt, Human
ucgcgcccccaagcgucauugg

SEQ ID NO: 85403 - RNA, 22 nt, Human
ucggagaguucaugaagacccg

SEQ ID NO: 85404 - RNA, 22 nt, Human
ucggagaguuggaaguagcaga

SEQ ID NO: 85405 - RNA, 22 nt, Human
ucggagcgucacuggcuggagg

SEQ ID NO: 85406 - RNA, 20 nt, Human
ucggcuggacacugugcacu

SEQ ID NO: 85407 - RNA, 22 nt, Human
ucgggacgguggcauuugugcc

SEQ ID NO: 85408 - RNA, 22 nt, Human
ucgggcucgcucuccuagcgga

SEQ ID NO: 85409 - RNA, 22 nt, Human
ucgggguagacgccagcucgga

SEQ ID NO: 85410 - RNA, 22 nt, Human
ucggugcgcgaggcgcgguccc

SEQ ID NO: 85411 - RNA, 22 nt, Human
ucgugaggcucugcaucgcaca

SEQ ID NO: 85412 - RNA, 22 nt, Human
ucguggaugcgcagggcggccu

SEQ ID NO: 85413 - RNA, 22 nt, Human
ucgugucagaucagagguuccu

SEQ ID NO: 85414 - RNA, 22 nt, Human
ucguuuuagguggacauugugu

SEQ ID NO: 85415 - RNA, 23 nt, Human
ucuaaaauucaucauuuacguuc

SEQ ID NO: 85416 - RNA, 22 nt, Human
ucuaaacacuaagucuugaugc

SEQ ID NO: 85417 - RNA, 22 nt, Human
ucuaaacauuaugauaguagag

SEQ ID NO: 85418 - RNA, 22 nt, Human
ucuaaacauugguauggagcag

SEQ ID NO: 85419 - RNA, 22 nt, Human
ucuaaacuaggguuaaaggaaa

SEQ ID NO: 85420 - RNA, 22 nt, Human
ucuaaagacacuuuuuacaggg

SEQ ID NO: 85421 - RNA, 22 nt, Human
ugugcucuugucugugacuaac

SEQ ID NO: 85422 - RNA, 22 nt, Human
ugugcugagugaucccauuccu

SEQ ID NO: 85423 - RNA, 22 nt, Human
ugugcugcugugaauaagaccu

SEQ ID NO: 85424 - RNA, 22 nt, Human
ugugcugggagauagagggagg

SEQ ID NO: 85425 - RNA, 22 nt, Human
ugugcugguacaugugaggaug

SEQ ID NO: 85426 - RNA, 22 nt, Human
ugugcuucaucacuucucaguu

SEQ ID NO: 85427 - RNA, 22 nt, Human
ugugcuucuugcagcuccugua

SEQ ID NO: 85428 - RNA, 22 nt, Human
uguggaaagucaaguuccagga

SEQ ID NO: 85429 - RNA, 22 nt, Human
uguggaacaccuagaaugggua

SEQ ID NO: 85430 - RNA, 22 nt, Human
uguggaagaacacuggccaggc

SEQ ID NO: 85431 - RNA, 22 nt, Human
uguggaaugcuccuaagugaau

SEQ ID NO: 85432 - RNA, 22 nt, Human
uguggaauguccucagcauccu

SEQ ID NO: 85433 - RNA, 22 nt, Human
uguggacuagagaauucuguug

SEQ ID NO: 85434 - RNA, 22 nt, Human
uguggacuaguguuuggauuuu

SEQ ID NO: 85435 - RNA, 22 nt, Human
uguggacugugcugccacagug

SEQ ID NO: 85436 - RNA, 22 nt, Human
uguggagaagaaggccacugca

SEQ ID NO: 85437 - RNA, 22 nt, Human
uguggagacuauagccauaaca

SEQ ID NO: 85438 - RNA, 22 nt, Human
uguggagaugugagcaagggga

SEQ ID NO: 85439 - RNA, 22 nt, Human
uguggagcagcgucacagccuu

SEQ ID NO: 85440 - RNA, 22 nt, Human
uguggaguggucugaaggcucc

SEQ ID NO: 85441 - RNA, 22 nt, Human
uguggauaaugcacuauccaua

SEQ ID NO: 85442 - RNA, 22 nt, Human
uguggcacauacacaggagggc

SEQ ID NO: 85443 - RNA, 22 nt, Human
uguggcagaacugggacucaaa

SEQ ID NO: 85444 - RNA, 22 nt, Human
uguggcagacaagauucuaugu

SEQ ID NO: 85445 - RNA, 22 nt, Human
uguggcagcuggagguggagaa

SEQ ID NO: 85446 - RNA, 22 nt, Human
uguggcaggaagagcuucugag

SEQ ID NO: 85447 - RNA, 20 nt, Human
uguggcaggaugagggcgga

SEQ ID NO: 85448 - RNA, 22 nt, Human
uguggcaggaugcggaagaugc

SEQ ID NO: 85449 - RNA, 22 nt, Human
uguggcaggcauucugaggcug

SEQ ID NO: 85450 - RNA, 22 nt, Human
uguggcagucucacuggagggc

SEQ ID NO: 85451 - RNA, 22 nt, Human
uguggcauacacaugagguggu

SEQ ID NO: 85452 - RNA, 22 nt, Human
uguggccagccacaggcauggu

SEQ ID NO: 85453 - RNA, 22 nt, Human
uguggccagggggccauguccc

SEQ ID NO: 85454 - RNA, 22 nt, Human
uguggccucaaggcugcccuca

SEQ ID NO: 85455 - RNA, 22 nt, Human
uguggccuccccacuucugggg

SEQ ID NO: 85456 - RNA, 22 nt, Human
uguggccucuaagcucacgaag

SEQ ID NO: 85457 - RNA, 22 nt, Human
uguggccugauuuugcaucucu

SEQ ID NO: 85458 - RNA, 22 nt, Human
uguggccugggaaaugaguguu

SEQ ID NO: 85459 - RNA, 19 nt, Human
uguggccuggggacaggcc

SEQ ID NO: 85460 - RNA, 22 nt, Human
uguggcuccacuccacauuaau

SEQ ID NO: 85461 - RNA, 22 nt, Human
uguggcucggccagcugcugaa

SEQ ID NO: 85462 - RNA, 22 nt, Human
uguggcucucagauccuccaau

SEQ ID NO: 85463 - RNA, 22 nt, Human
uguggcucugccuggcaguauu

SEQ ID NO: 85464 - RNA, 22 nt, Human
uguggcugacuccuggucccca

SEQ ID NO: 85465 - RNA, 22 nt, Human
uguggcugcaaaggaaggcugc

SEQ ID NO: 85466 - RNA, 22 nt, Human
uguggcugcagacacuggagcc

SEQ ID NO: 85467 - RNA, 22 nt, Human
uguggcugggaagaagguaacu

SEQ ID NO: 85468 - RNA, 22 nt, Human
uguggcuguggaugcuuuccag

SEQ ID NO: 85469 - RNA, 22 nt, Human
uguggcuuaagaaugccuuuaa

SEQ ID NO: 85470 - RNA, 22 nt, Human
uguggcuuccacgauggucacc

SEQ ID NO: 85471 - RNA, 22 nt, Human
ugugggacagggacagcaagag

SEQ ID NO: 85472 - RNA, 22 nt, Human
ugugggaggauucagaauuggg

SEQ ID NO: 85473 - RNA, 22 nt, Human
ugugggaugguuuugccagaau

SEQ ID NO: 85474 - RNA, 22 nt, Human
ugugggcagcuggagcuguuca

SEQ ID NO: 85475 - RNA, 22 nt, Human
ugugggcccuaggcaccuuguc

SEQ ID NO: 85476 - RNA, 20 nt, Human
ugugggcccuuggcuggcaa

SEQ ID NO: 85477 - RNA, 22 nt, Human
ugugggcucccccucacucugu

SEQ ID NO: 85478 - RNA, 19 nt, Human
uguggggagucagggggcu

SEQ ID NO: 85479 - RNA, 22 nt, Human
uguggggcugugguguucuucu

SEQ ID NO: 85480 - RNA, 22 nt, Human
ugugggugaugaauuuguucuu

SEQ ID NO: 85481 - RNA, 22 nt, Human
uguggguguucucacuuagaua

SEQ ID NO: 85482 - RNA, 22 nt, Human
ugugguagagggcagaugggca

SEQ ID NO: 85483 - RNA, 22 nt, Human
ugugguagucucagggcaguau

SEQ ID NO: 85484 - RNA, 22 nt, Human
uguggucuccugucuuggccuu

SEQ ID NO: 85485 - RNA, 22 nt, Human
uguggucuuggaagaaguugcu

SEQ ID NO: 85486 - RNA, 22 nt, Human
ucugugcaguucuugucuugac

SEQ ID NO: 85487 - RNA, 20 nt, Human
ucugugcaguuuaggaaggc

SEQ ID NO: 85488 - RNA, 22 nt, Human
ucugugcauccuuaacgccugc

SEQ ID NO: 85489 - RNA, 22 nt, Human
ucugugcauuguaacaacuaaa

SEQ ID NO: 85490 - RNA, 22 nt, Human
ucugugccaagcuuauaucugu

SEQ ID NO: 85491 - RNA, 22 nt, Human
ucugugcccucggugcugggcc

SEQ ID NO: 85492 - RNA, 22 nt, Human
ucugugccucaucugguucagg

SEQ ID NO: 85493 - RNA, 22 nt, Human
ucugugccuuuaagaagcucau

SEQ ID NO: 85494 - RNA, 22 nt, Human
ucugugcuaaugcuucacaaua

SEQ ID NO: 85495 - RNA, 22 nt, Human
ucugugcuagcacgcagcaagg

SEQ ID NO: 85496 - RNA, 22 nt, Human
ucugugcucaugcaugugaauu

SEQ ID NO: 85497 - RNA, 22 nt, Human
ucugugcucauucagucauuca

SEQ ID NO: 85498 - RNA, 21 nt, Human
ucugugcugccgucaacaucc

SEQ ID NO: 85499 - RNA, 22 nt, Human
ucugugcuuaacuacucacccc

SEQ ID NO: 85500 - RNA, 22 nt, Human
ucugugcuuucccugccuucuu

SEQ ID NO: 85501 - RNA, 21 nt, Human
ucugugcuuuuuuggcuccua

SEQ ID NO: 85502 - RNA, 22 nt, Human
ucuguggaagauuccaggcguu

SEQ ID NO: 85503 - RNA, 19 nt, Human
ucuguggcaccugggaggg

SEQ ID NO: 85504 - RNA, 22 nt, Human
ucuguggcacgauugcacugca

SEQ ID NO: 85505 - RNA, 20 nt, Human
ucuguggcagguggcgcuug

SEQ ID NO: 85506 - RNA, 22 nt, Human
ucuguggcaugaggaaauaggc

SEQ ID NO: 85507 - RNA, 22 nt, Human
ucuguggcccaagugauggcug

SEQ ID NO: 85508 - RNA, 19 nt, Human
ucuguggccuucccugaug

SEQ ID NO: 85509 - RNA, 22 nt, Human
ucuguggcugguaauugcaugu

SEQ ID NO: 85510 - RNA, 22 nt, Human
ucuguggcugucuuuccagagg

SEQ ID NO: 85511 - RNA, 22 nt, Human
ucuguggcugugcugggccaga

SEQ ID NO: 85512 - RNA, 22 nt, Human
ucuguggcuugggccugccugu

SEQ ID NO: 85513 - RNA, 22 nt, Human
ucuguguaagaccagugcuggg

SEQ ID NO: 85514 - RNA, 22 nt, Human
ucuguguacgcaggcgugcgcg

SEQ ID NO: 85515 - RNA, 22 nt, Human
ucugugucagaagauaucaugg

SEQ ID NO: 85516 - RNA, 22 nt, Human
ucugugucagcagcacucagcc

SEQ ID NO: 85517 - RNA, 22 nt, Human
ucugugucucaaucccaugcug

SEQ ID NO: 85518 - RNA, 22 nt, Human
ucugugucuguuacuucacugc

SEQ ID NO: 85519 - RNA, 22 nt, Human
ucugugugaccauaagccagcu

SEQ ID NO: 85520 - RNA, 22 nt, Human
ucugugugcccuaaagccugcu

SEQ ID NO: 85521 - RNA, 22 nt, Human
ucugugugugccuguuaauauu

SEQ ID NO: 85522 - RNA, 22 nt, Human
ucuguuaaaaguggaauaauag

SEQ ID NO: 85523 - RNA, 22 nt, Human
ucuguuagagagguaguucuug

SEQ ID NO: 85524 - RNA, 22 nt, Human
ucuguuauauagauaaugugug

SEQ ID NO: 85525 - RNA, 22 nt, Human
ucuguuaugcauaagcaucagu

SEQ ID NO: 85526 - RNA, 22 nt, Human
ucuguuauggaaguuuccuuuu

SEQ ID NO: 85527 - RNA, 17 nt, Human
ucuguucaagugagagg

SEQ ID NO: 85528 - RNA, 22 nt, Human
ucuguucaguugauguaguuuu

SEQ ID NO: 85529 - RNA, 22 nt, Human
ucuguucaguuguaccuucccc

SEQ ID NO: 85530 - RNA, 22 nt, Human
uccugucucaguguauuugcag

SEQ ID NO: 85531 - RNA, 22 nt, Human
uccugucugucuuuggucccuu

SEQ ID NO: 85532 - RNA, 22 nt, Human
uccugugaccagcuuccaugcu

SEQ ID NO: 85533 - RNA, 22 nt, Human
uccugugaguagauaguauugu

SEQ ID NO: 85534 - RNA, 22 nt, Human
uccuguggagaggacuggaggu

SEQ ID NO: 85535 - RNA, 18 nt, Human
uccuguggcccagaguuu

SEQ ID NO: 85536 - RNA, 22 nt, Human
uccugugggcucucggccucca

SEQ ID NO: 85537 - RNA, 22 nt, Human
uccuguggggaaaagccuaucu

SEQ ID NO: 85538 - RNA, 22 nt, Human
uccuguggucuggaaggaaugg

SEQ ID NO: 85539 - RNA, 22 nt, Human
uccugugugucagaugcacagu

SEQ ID NO: 85540 - RNA, 22 nt, Human
uccuguguucuagguauggucu

SEQ ID NO: 85541 - RNA, 22 nt, Human
uccuguuaguguuagacuuccc

SEQ ID NO: 85542 - RNA, 22 nt, Human
uccuguuguucgccugcgaugg

SEQ ID NO: 85543 - RNA, 22 nt, Human
uccuguuucaacccuuacacug

SEQ ID NO: 85544 - RNA, 22 nt, Human
uccuuaaauauuuacuguuaac

SEQ ID NO: 85545 - RNA, 22 nt, Human
uccuuaaaugugaucuagauuu

SEQ ID NO: 85546 - RNA, 22 nt, Human
uccuuaauauggaagaguucuc

SEQ ID NO: 85547 - RNA, 22 nt, Human
uccuuacacuggggaaggugua

SEQ ID NO: 85548 - RNA, 22 nt, Human
uccuuacagguuacagaaagca

SEQ ID NO: 85549 - RNA, 22 nt, Human
uccuuagagacaagaccaguuu

SEQ ID NO: 85550 - RNA, 22 nt, Human
uccuuagcaacacuguuauaau

SEQ ID NO: 85551 - RNA, 22 nt, Human
uccuuagccggagcagcucauc

SEQ ID NO: 85552 - RNA, 18 nt, Human
uccuuagcugagcuuguc

SEQ ID NO: 85553 - RNA, 22 nt, Human
uccuuagcuuacaagucuucug

SEQ ID NO: 85554 - RNA, 22 nt, Human
uccuuauaucuauaguuuugca

SEQ ID NO: 85555 - RNA, 22 nt, Human
uccuuauaucuucagagaagca

SEQ ID NO: 85556 - RNA, 22 nt, Human
uccuucaacuuuuuacuugccc

SEQ ID NO: 85557 - RNA, 22 nt, Human
uccuucaccuuagcccuccuag

SEQ ID NO: 85558 - RNA, 22 nt, Human
uccuucagauuccugcuucugg

SEQ ID NO: 85559 - RNA, 22 nt, Human
uccuucagggcugaccacaggc

SEQ ID NO: 85560 - RNA, 17 nt, Human
uccuucagugccucugc

SEQ ID NO: 85561 - RNA, 22 nt, Human
uccuucagugucccgcucaggu

SEQ ID NO: 85562 - RNA, 22 nt, Human
uccuucaguuaucacaguacug

SEQ ID NO: 85563 - RNA, 19 nt, Human
uccuuccccccagcacaga

SEQ ID NO: 85564 - RNA, 22 nt, Human
uccuuccugcaggccaaguccu

SEQ ID NO: 85565 - RNA, 23 nt, Human
uccuuccuuugagaggcuccauc

SEQ ID NO: 85566 - RNA, 22 nt, Human
uccuucuaccagcuggauaccu

SEQ ID NO: 85567 - RNA, 22 nt, Human
uccuucuauuuguuuauguggc

SEQ ID NO: 85568 - RNA, 19 nt, Human
uccuucuccggccaccccg

SEQ ID NO: 85569 - RNA, 22 nt, Human
uccuucuccuccuugagugaca

SEQ ID NO: 85570 - RNA, 20 nt, Human
uccuugaaagugggguauau

SEQ ID NO: 85571 - RNA, 22 nt, Human
uccuugaacagagggccugggu

SEQ ID NO: 85572 - RNA, 22 nt, Human
uccuugaagcaacgugcagaca

SEQ ID NO: 85573 - RNA, 22 nt, Human
uccuuggagguguucaucugcc

SEQ ID NO: 85574 - RNA, 22 nt, Human
uccuuggcacacucggaucuga

SEQ ID NO: 85575 - RNA, 22 nt, Human
uccuuggcagcagggagcauga

SEQ ID NO: 85576 - RNA, 22 nt, Human
uccuugggaaacaucauguaau

SEQ ID NO: 85577 - RNA, 22 nt, Human
uccuuggggacgcugacaucgu

SEQ ID NO: 85578 - RNA, 19 nt, Human
uccuugugacugugugaaa

SEQ ID NO: 85579 - RNA, 22 nt, Human
uccuuguugcugcagucaccug

SEQ ID NO: 85580 - RNA, 22 nt, Human
uccuuuaaagaacugugcuuuu

SEQ ID NO: 85581 - RNA, 22 nt, Human
uccuuuaacuaguuaccauguu

SEQ ID NO: 85582 - RNA, 18 nt, Human
uccuuucaccccuucucu

SEQ ID NO: 85583 - RNA, 22 nt, Human
uccuuuccagccucaccucagc

SEQ ID NO: 85584 - RNA, 22 nt, Human
uccuuucccuuuccauccuggc

SEQ ID NO: 85585 - RNA, 22 nt, Human
uccuuucucccagguuaguugu

SEQ ID NO: 85586 - RNA, 22 nt, Human
uccuuucuccuuccgacuucau

SEQ ID NO: 85587 - RNA, 22 nt, Human
uccuuucugggccucagugacu

SEQ ID NO: 85588 - RNA, 22 nt, Human
uccuuucugugcugucaggucc

SEQ ID NO: 85589 - RNA, 19 nt, Human
uccuuucuguuccugagau

SEQ ID NO: 85590 - RNA, 22 nt, Human
uccuuugguuguagacaggaau

SEQ ID NO: 85591 - RNA, 22 nt, Human
uccuuuguggaaauacuugugg

SEQ ID NO: 85592 - RNA, 22 nt, Human
uccuuuguuaaggagguuuguu

SEQ ID NO: 85593 - RNA, 22 nt, Human
uccuuuguucgggugugcuguc

SEQ ID NO: 85594 - RNA, 22 nt, Human
uccuuuucucuaguaagcuuua

SEQ ID NO: 85595 - RNA, 22 nt, Human
uccuuuuugguccaaggugacc

SEQ ID NO: 85596 - RNA, 22 nt, Human
ucgaaauacuguuuccccuuua

SEQ ID NO: 85597 - RNA, 22 nt, Human
ucgaacucauagucguagcugu

SEQ ID NO: 85598 - RNA, 22 nt, Human
ucgaggcagugcgcuggcuguu

SEQ ID NO: 85599 - RNA, 19 nt, Human
ucgagucaagacacuaggc

SEQ ID NO: 85600 - RNA, 21 nt, Human
uguggucuuuuaguuccauca

SEQ ID NO: 85601 - RNA, 22 nt, Human
uguggugugucucacaaaugca

SEQ ID NO: 85602 - RNA, 22 nt, Human
ugugguuuuucaguugcuggag

SEQ ID NO: 85603 - RNA, 22 nt, Human
uguguaaaagauuaguuuacua

SEQ ID NO: 85604 - RNA, 22 nt, Human
uguguaaagcuuguuccagaaa

SEQ ID NO: 85605 - RNA, 22 nt, Human
uguguaacaaucuacacuuagg

SEQ ID NO: 85606 - RNA, 21 nt, Human
uguguaauuuuuuaaauggcc

SEQ ID NO: 85607 - RNA, 22 nt, Human
uguguacacaugacaggcaccc

SEQ ID NO: 85608 - RNA, 22 nt, Human
uguguacaggacagaaaggagg

SEQ ID NO: 85609 - RNA, 22 nt, Human
uguguacauugccuuuuaaagg

SEQ ID NO: 85610 - RNA, 22 nt, Human
uguguacucaauugagccauuu

SEQ ID NO: 85611 - RNA, 22 nt, Human
uguguacuugaaagggcagguc

SEQ ID NO: 85612 - RNA, 22 nt, Human
uguguacuugcugaucuuaucu

SEQ ID NO: 85613 - RNA, 22 nt, Human
uguguagaaagaucuccaagau

SEQ ID NO: 85614 - RNA, 22 nt, Human
uguguagugauuuucuuccaac

SEQ ID NO: 85615 - RNA, 22 nt, Human
uguguauaacucuuaauucauu

SEQ ID NO: 85616 - RNA, 22 nt, Human
uguguauaagugagaaugcugu

SEQ ID NO: 85617 - RNA, 22 nt, Human
uguguauaauuagaccauuuac

SEQ ID NO: 85618 - RNA, 22 nt, Human
uguguauacauacauacacacg

SEQ ID NO: 85619 - RNA, 22 nt, Human
uguguaugcauacacacauaga

SEQ ID NO: 85620 - RNA, 22 nt, Human
uguguauguaagcaugugcaua

SEQ ID NO: 85621 - RNA, 22 nt, Human
uguguauguuuugagguugcua

SEQ ID NO: 85622 - RNA, 22 nt, Human
ugugucaaauuguuuuacacag

SEQ ID NO: 85623 - RNA, 22 nt, Human
ugugucaaccuguggccgggug

SEQ ID NO: 85624 - RNA, 21 nt, Human
ugugucacuaacuagaggcua

SEQ ID NO: 85625 - RNA, 22 nt, Human
ugugucagaaaucagugccucg

SEQ ID NO: 85626 - RNA, 22 nt, Human
ugugucagaaguacuuuuggaa

SEQ ID NO: 85627 - RNA, 22 nt, Human
ugugucagauuuaggcucaaac

SEQ ID NO: 85628 - RNA, 22 nt, Human
ugugucagcaggggagggaacu

SEQ ID NO: 85629 - RNA, 21 nt, Human
ugugucagucuuuggaagcaa

SEQ ID NO: 85630 - RNA, 23 nt, Human
ugugucauaaaauuaaaacuuca

SEQ ID NO: 85631 - RNA, 22 nt, Human
ugugucauauuaguauugagag

SEQ ID NO: 85632 - RNA, 22 nt, Human
ugugucaugugugaggcucccu

SEQ ID NO: 85633 - RNA, 22 nt, Human
uguguccaacccagggacaagu

SEQ ID NO: 85634 - RNA, 22 nt, Human
uguguccacgcacuggcaugau

SEQ ID NO: 85635 - RNA, 22 nt, Human
uguguccaucugacaggagagg

SEQ ID NO: 85636 - RNA, 22 nt, Human
ugugucccuuggaaccucagcu

SEQ ID NO: 85637 - RNA, 22 nt, Human
uguguccucaugagguuugcag

SEQ ID NO: 85638 - RNA, 22 nt, Human
uguguccucauguggcagagag

SEQ ID NO: 85639 - RNA, 22 nt, Human
uguugcgaugaagagcuucacg

SEQ ID NO: 85640 - RNA, 22 nt, Human
uguugcuacucucccugggagg

SEQ ID NO: 85641 - RNA, 22 nt, Human
uguuggaaaggccaggcugugg

SEQ ID NO: 85642 - RNA, 22 nt, Human
uguuggaauaagugcuugaagg

SEQ ID NO: 85643 - RNA, 19 nt, Human
uguuggaggugcugaauua

SEQ ID NO: 85644 - RNA, 22 nt, Human
uguuggcacuaucucauguuuu

SEQ ID NO: 85645 - RNA, 22 nt, Human
uguuggcagugcuacagucagu

SEQ ID NO: 85646 - RNA, 22 nt, Human
uguuguacucaacagaugaauu

SEQ ID NO: 85647 - RNA, 22 nt, Human
uguuguagcuugacagcagcca

SEQ ID NO: 85648 - RNA, 21 nt, Human
uguuguuuuauggcuaugaau

SEQ ID NO: 85649 - RNA, 22 nt, Human
uguuguuuucucauggagaaua

SEQ ID NO: 85650 - RNA, 22 nt, Human
uguuuaaauagaacauacugca

SEQ ID NO: 85651 - RNA, 22 nt, Human
uguuuaacuaguuuucacacuu

SEQ ID NO: 85652 - RNA, 21 nt, Human
uguuuaaguacuccuuucugg

SEQ ID NO: 85653 - RNA, 22 nt, Human
uguuuaauaauucuaugauagu

SEQ ID NO: 85654 - RNA, 22 nt, Human
uguuuacaaggaguuuauauug

SEQ ID NO: 85655 - RNA, 22 nt, Human
uguuuacacaauagucucucuc

SEQ ID NO: 85656 - RNA, 22 nt, Human
uguuuacagcacugcacacugc

SEQ ID NO: 85657 - RNA, 22 nt, Human
uguuuacauauuuggucucaga

SEQ ID NO: 85658 - RNA, 22 nt, Human
uguuuacuaugauguaaccuau

SEQ ID NO: 85659 - RNA, 21 nt, Human
uguuuacucccugcaagcacg

SEQ ID NO: 85660 - RNA, 22 nt, Human
uguuuagaugcaaagucucaca

SEQ ID NO: 85661 - RNA, 22 nt, Human
uguuuauagggucugucacuug

SEQ ID NO: 85662 - RNA, 22 nt, Human
uguuuauucauggcuaaugaaa

SEQ ID NO: 85663 - RNA, 22 nt, Human
uguuuauuuucaggauggauug

SEQ ID NO: 85664 - RNA, 22 nt, Human
uguuucaacuguuaagauaugc

SEQ ID NO: 85665 - RNA, 22 nt, Human
uguuucaaguuugcucaaagga

SEQ ID NO: 85666 - RNA, 22 nt, Human
uguuucacugaaagccuuacua

SEQ ID NO: 85667 - RNA, 22 nt, Human
uguuucaggaccuaucuuuuag

SEQ ID NO: 85668 - RNA, 22 nt, Human
uguuucaguccacuuaggcagc

SEQ ID NO: 85669 - RNA, 22 nt, Human
uguuucagucccuguguucaau

SEQ ID NO: 85670 - RNA, 22 nt, Human
uguuuccuaagugucucugaag

SEQ ID NO: 85671 - RNA, 22 nt, Human
uguuucuagagaaaauauuuac

SEQ ID NO: 85672 - RNA, 22 nt, Human
uguuucuaggucaauaauuuuu

SEQ ID NO: 85673 - RNA, 22 nt, Human
uguuucuguaugaucaauauug

SEQ ID NO: 85674 - RNA, 19 nt, Human
uguuucuuccuccaucuga

SEQ ID NO: 85675 - RNA, 22 nt, Human
uguuucuugauaaagcagaaaa

SEQ ID NO: 85676 - RNA, 22 nt, Human
uguuucuugggugcucacauca

SEQ ID NO: 85677 - RNA, 22 nt, Human
uguuugaaaaguggagauuuau

SEQ ID NO: 85678 - RNA, 22 nt, Human
uguuugaacugaauaacauagu

SEQ ID NO: 85679 - RNA, 22 nt, Human
uguuugaauaacuuggauauau

SEQ ID NO: 85680 - RNA, 22 nt, Human
uguuugaugacgacauuguaga

SEQ ID NO: 85681 - RNA, 22 nt, Human
uguuugcaaccccuugugagaa

SEQ ID NO: 85682 - RNA, 22 nt, Human
uguuugcauuguuaauucaguc

SEQ ID NO: 85683 - RNA, 22 nt, Human
uguuugcuguuuucuccaauga

SEQ ID NO: 85684 - RNA, 22 nt, Human
uguuugguuccagagggccucu

SEQ ID NO: 85685 - RNA, 17 nt, Human
uguuugguugauuggug

SEQ ID NO: 85686 - RNA, 22 nt, Human
uguuuguacucaaagccaugag

SEQ ID NO: 85687 - RNA, 22 nt, Human
uguuuuaagggucaacugucac

SEQ ID NO: 85688 - RNA, 22 nt, Human
uguuuucagucauauagcaggu

SEQ ID NO: 85689 - RNA, 22 nt, Human
uguuuucaugguuaugugucua

SEQ ID NO: 85690 - RNA, 22 nt, Human
uguuuuccuccugguuucugcc

SEQ ID NO: 85691 - RNA, 21 nt, Human
uguuuucuaaagggcggauca

SEQ ID NO: 85692 - RNA, 22 nt, Human
uguuuucugaugguuaaugagu

SEQ ID NO: 85693 - RNA, 22 nt, Human
uguuuucuguguagagaucaca

SEQ ID NO: 85694 - RNA, 23 nt, Human
uguuuucuuguccugguauaauu

SEQ ID NO: 85695 - RNA, 22 nt, Human
uguuuuguagcuaauagcuauu

SEQ ID NO: 85696 - RNA, 22 nt, Human
uguuuuguucacugcauugucc

SEQ ID NO: 85697 - RNA, 22 nt, Human
uguuuuuaaaauguccugguua

SEQ ID NO: 85698 - RNA, 22 nt, Human
uguuuuuacugugauccagaaa

SEQ ID NO: 85699 - RNA, 22 nt, Human
uguuuuuaucucuguguacaac

SEQ ID NO: 85700 - RNA, 22 nt, Human
uguuuuuccaugugcagaacaa

SEQ ID NO: 85701 - RNA, 22 nt, Human
uguuuuugucuccuugucugcu

SEQ ID NO: 85702 - RNA, 22 nt, Human
uguuuuuuccuuaugcaaucug

SEQ ID NO: 85703 - RNA, 22 nt, Human
uguuuuuuuauauaccugaagu

SEQ ID NO: 85704 - RNA, 22 nt, Human
uuaaaacugcaaauccuacuga

SEQ ID NO: 85705 - RNA, 22 nt, Human
uuaaaagagcagcccagcauau

SEQ ID NO: 85706 - RNA, 22 nt, Human
uuaaaaggcaucauaggugaau

SEQ ID NO: 85707 - RNA, 22 nt, Human
uuaaaagggauguuaucuguaa

SEQ ID NO: 85708 - RNA, 23 nt, Human
uuaaaaguggagagagaagcugg

SEQ ID NO: 85709 - RNA, 22 nt, Human
uuaaaaucacagucacccagua

SEQ ID NO: 85710 - RNA, 22 nt, Human
uuaaaaugaauauugauuagca

SEQ ID NO: 85711 - RNA, 21 nt, Human
uuaaaaugaggaagugguggc

SEQ ID NO: 85712 - RNA, 22 nt, Human
uuaaaauuauggcccauuugga

SEQ ID NO: 85713 - RNA, 22 nt, Human
uuaaaauuuccccaccauguau

SEQ ID NO: 85714 - RNA, 22 nt, Human
uuaaacacacugagauuuaugu

SEQ ID NO: 85715 - RNA, 22 nt, Human
ucuucaguauuuggauaacauu

SEQ ID NO: 85716 - RNA, 22 nt, Human
ucuucagugaauggcaagaucu

SEQ ID NO: 85717 - RNA, 22 nt, Human
ucuucagugcauguuaccuaua

SEQ ID NO: 85718 - RNA, 22 nt, Human
ucuucauacaauuucagacauc

SEQ ID NO: 85719 - RNA, 18 nt, Human
ucuucaucuccugagcug

SEQ ID NO: 85720 - RNA, 22 nt, Human
ucuucaugaaauugauugcuua

SEQ ID NO: 85721 - RNA, 22 nt, Human
ucuucaugcaccucacagcuag

SEQ ID NO: 85722 - RNA, 23 nt, Human
ucuucaugcccaggccuuggugc

SEQ ID NO: 85723 - RNA, 23 nt, Human
ucuucauggccaucugguucuuc

SEQ ID NO: 85724 - RNA, 22 nt, Human
ucuucaugucuugccugauaua

SEQ ID NO: 85725 - RNA, 22 nt, Human
ucuucauguuaguuggguuuuc

SEQ ID NO: 85726 - RNA, 22 nt, Human
ucuucauuuuauagcaucugug

SEQ ID NO: 85727 - RNA, 22 nt, Human
ucuuccaaaugaauaugguuuu

SEQ ID NO: 85728 - RNA, 22 nt, Human
ucuuccaagguugcacacuauc

SEQ ID NO: 85729 - RNA, 22 nt, Human
ucuuccaauaccuagauuuugg

SEQ ID NO: 85730 - RNA, 22 nt, Human
ucuuccagcuguaggaccuagg

SEQ ID NO: 85731 - RNA, 18 nt, Human
ucuuccagcuucuggagg

SEQ ID NO: 85732 - RNA, 22 nt, Human
ucuuccaggcccugccacagcu

SEQ ID NO: 85733 - RNA, 22 nt, Human
ucuuccaggcuagaguuguugc

SEQ ID NO: 85734 - RNA, 22 nt, Human
ucuucccaaugcaaaguaggac

SEQ ID NO: 85735 - RNA, 22 nt, Human
ucuucccagaccuuacauguga

SEQ ID NO: 85736 - RNA, 22 nt, Human
ucuuccuagaaggaagaaaucu

SEQ ID NO: 85737 - RNA, 22 nt, Human
ucuuccuaugccaacauucugu

SEQ ID NO: 85738 - RNA, 22 nt, Human
ucuuccucaugaauucucguau

SEQ ID NO: 85739 - RNA, 21 nt, Human
ucuuccuccacagcgugccac

SEQ ID NO: 85740 - RNA, 23 nt, Human
ucuuccugaacuaucaggcacau

SEQ ID NO: 85741 - RNA, 22 nt, Human
ucuuccuugccuugcuucauca

SEQ ID NO: 85742 - RNA, 22 nt, Human
ucuucuacuauaauaauuuucu

SEQ ID NO: 85743 - RNA, 22 nt, Human
ucuucucauagcuaguucuucc

SEQ ID NO: 85744 - RNA, 22 nt, Human
ucuucuccagugcuucugcaca

SEQ ID NO: 85745 - RNA, 22 nt, Human
ucuucucuacaccagcagcccc

SEQ ID NO: 85746 - RNA, 17 nt, Human
ucuucucuuccagucuu

SEQ ID NO: 85747 - RNA, 22 nt, Human
ucuucugaagguaggaagcauu

SEQ ID NO: 85748 - RNA, 22 nt, Human
uuacacugacagcugaaaagca

SEQ ID NO: 85749 - RNA, 22 nt, Human
uuacacuuaggguuugucagag

SEQ ID NO: 85750 - RNA, 22 nt, Human
uuacacuuaucuagagccaugg

SEQ ID NO: 85751 - RNA, 22 nt, Human
uuacacuucugaaagccuaggu

SEQ ID NO: 85752 - RNA, 22 nt, Human
uuacacuugaaaacaggauuua

SEQ ID NO: 85753 - RNA, 22 nt, Human
uuacacuuuaaauccagcuugu

SEQ ID NO: 85754 - RNA, 22 nt, Human
uuacacuuuugacaaaccugag

SEQ ID NO: 85755 - RNA, 22 nt, Human
uuacagaaaagggcuuuaagag

SEQ ID NO: 85756 - RNA, 22 nt, Human
uuacagaaaggaaggacugacu

SEQ ID NO: 85757 - RNA, 20 nt, Human
uuacagaaaugauguuauuu

SEQ ID NO: 85758 - RNA, 22 nt, Human
uuacagaagagaaagaauucag

SEQ ID NO: 85759 - RNA, 21 nt, Human
uuacagaauccaugggaaguc

SEQ ID NO: 85760 - RNA, 22 nt, Human
uuacagacaaacuguguuaagu

SEQ ID NO: 85761 - RNA, 22 nt, Human
uuacagagccucauuuuagaga

SEQ ID NO: 85762 - RNA, 22 nt, Human
uuacagagcucauuucuaaggg

SEQ ID NO: 85763 - RNA, 17 nt, Human
uuacagagguaauuaag

SEQ ID NO: 85764 - RNA, 22 nt, Human
uuacagaugggguugcaauaaa

SEQ ID NO: 85765 - RNA, 22 nt, Human
uuacagauguaggaacugaagu

SEQ ID NO: 85766 - RNA, 19 nt, Human
uuacagauguggaaauuga

SEQ ID NO: 85767 - RNA, 22 nt, Human
uuacagauguuucaggaauacu

SEQ ID NO: 85768 - RNA, 22 nt, Human
uuacagauucaagcucuuugaa

SEQ ID NO: 85769 - RNA, 22 nt, Human
uuacagcacagugcuuuuacug

SEQ ID NO: 85770 - RNA, 17 nt, Human
uuacagcagcaauagag

SEQ ID NO: 85771 - RNA, 22 nt, Human
uuacagcagcagggacagacua

SEQ ID NO: 85772 - RNA, 22 nt, Human
uuacagcuuacauuuuaccuug

SEQ ID NO: 85773 - RNA, 21 nt, Human
uuacagguaacacuuccuuuc

SEQ ID NO: 85774 - RNA, 22 nt, Human
uuacagguacuugcugcugaaa

SEQ ID NO: 85775 - RNA, 22 nt, Human
uuacaggucaguuugacugaau

SEQ ID NO: 85776 - RNA, 21 nt, Human
uuacaggucauccaagucacc

SEQ ID NO: 85777 - RNA, 22 nt, Human
uuacaguacagaaaauaacaga

SEQ ID NO: 85778 - RNA, 22 nt, Human
uuacaguaugaucaacuuuuca

SEQ ID NO: 85779 - RNA, 22 nt, Human
uuacagugagggugacauuuac

SEQ ID NO: 85780 - RNA, 22 nt, Human
uuacagugcucuucaagacuuc

SEQ ID NO: 85781 - RNA, 20 nt, Human
uuacagugggaccuuccuga

SEQ ID NO: 85782 - RNA, 22 nt, Human
uuacaguuagguguguaguggu

SEQ ID NO: 85783 - RNA, 22 nt, Human
uuacaguuuaccaagaauauug

SEQ ID NO: 85784 - RNA, 22 nt, Human
uuacauaccucauagacucagg

SEQ ID NO: 85785 - RNA, 22 nt, Human
uuacauauuauccaaaacugcu

SEQ ID NO: 85786 - RNA, 22 nt, Human
uuacaucagcaagaguguaugu

SEQ ID NO: 85787 - RNA, 22 nt, Human
uuacaucauggaggguauugaa

SEQ ID NO: 85788 - RNA, 22 nt, Human
uuacaugagguuaauuaagcau

SEQ ID NO: 85789 - RNA, 22 nt, Human
uuacaugcuuagagaugcaugc

SEQ ID NO: 85790 - RNA, 22 nt, Human
uuacaugggccauuuagacaug

SEQ ID NO: 85791 - RNA, 22 nt, Human
uuacaugggcuugugaguccuu

SEQ ID NO: 85792 - RNA, 21 nt, Human
uuacaugguuuaucauaugga

SEQ ID NO: 85793 - RNA, 22 nt, Human
uuacauguaaucuaaaauaauu

SEQ ID NO: 85794 - RNA, 23 nt, Human
uuacaugugugcacacauucugg

SEQ ID NO: 85795 - RNA, 22 nt, Human
uuacauguuuacggauacacuu

SEQ ID NO: 85796 - RNA, 22 nt, Human
uuacauguuuauggggguacau

SEQ ID NO: 85797 - RNA, 22 nt, Human
uuacauuaagccaauggauucu

SEQ ID NO: 85798 - RNA, 22 nt, Human
uuacauucuuaucucaguuauu

SEQ ID NO: 85799 - RNA, 22 nt, Human
uuacauuucccccuuggaggcu

SEQ ID NO: 85800 - RNA, 22 nt, Human
uuacauuuuaguuaaccuguga

SEQ ID NO: 85801 - RNA, 22 nt, Human
uuaccaauucagacaucucuuc

SEQ ID NO: 85802 - RNA, 22 nt, Human
uuaccacaaaacaguuagaagu

SEQ ID NO: 85803 - RNA, 22 nt, Human
uuaccaguuuugccauuugcua

SEQ ID NO: 85804 - RNA, 22 nt, Human
uuaccauaguacuaucaguuua

SEQ ID NO: 85805 - RNA, 22 nt, Human
uuaccauucaaguucucuccuu

SEQ ID NO: 85806 - RNA, 22 nt, Human
uuacccagugaagccgaggcag

SEQ ID NO: 85807 - RNA, 22 nt, Human
uuacccagugugguuuauagca

SEQ ID NO: 85808 - RNA, 22 nt, Human
uuaccugugucaguauaugaga

SEQ ID NO: 85809 - RNA, 22 nt, Human
uuaccuugaagagcuugagggc

SEQ ID NO: 85810 - RNA, 22 nt, Human
uuacuagccaugugugagaaga

SEQ ID NO: 85811 - RNA, 22 nt, Human
uuacuagcugagggaacuuggg

SEQ ID NO: 85812 - RNA, 19 nt, Human
uuacucacauuuagauucc

SEQ ID NO: 85813 - RNA, 22 nt, Human
uuacucagucucccauacauug

SEQ ID NO: 85814 - RNA, 22 nt, Human
uuacucuuaauggcaacaacug

SEQ ID NO: 85815 - RNA, 22 nt, Human
uuacugaaauaaugaaacacau

SEQ ID NO: 85816 - RNA, 22 nt, Human
uuacugcaacauaauguagucu

SEQ ID NO: 85817 - RNA, 22 nt, Human
uuacugcacgugggacauauau

SEQ ID NO: 85818 - RNA, 22 nt, Human
uuacuguaugagugugguaguc

SEQ ID NO: 85819 - RNA, 22 nt, Human
uuacuguuuugguaccucauug

SEQ ID NO: 85820 - RNA, 22 nt, Human
uuacuuaaaaauucuaagcccc

SEQ ID NO: 85821 - RNA, 22 nt, Human
uuacuuacaaaggcaaaggaag

SEQ ID NO: 85822 - RNA, 22 nt, Human
uuacuucagauuguggaaggca

SEQ ID NO: 85823 - RNA, 19 nt, Human
uuacuucaggagugaaauu

SEQ ID NO: 85824 - RNA, 22 nt, Human
uuacuucuuacaaaagaaauau

SEQ ID NO: 85825 - RNA, 22 nt, Human
uuacuucuugucucaugccuau

SEQ ID NO: 85826 - RNA, 22 nt, Human
uuacuugacauaaaugaguuua

SEQ ID NO: 85827 - RNA, 22 nt, Human
uuacuugaugauguauaaaguc

SEQ ID NO: 85828 - RNA, 21 nt, Human
uuacuuuagaaauugccuuuu

SEQ ID NO: 85829 - RNA, 22 nt, Human
uuacuuugaugaucaaugagcg

SEQ ID NO: 85830 - RNA, 22 nt, Human
uuacuuuggauggucaagaaag

SEQ ID NO: 85831 - RNA, 22 nt, Human
uuacuuuggcaaacuccugccc

SEQ ID NO: 85832 - RNA, 22 nt, Human
uuacuuuggguccugcuuauaa

SEQ ID NO: 85833 - RNA, 22 nt, Human
uuacuuuucuauucgauaugug

SEQ ID NO: 85834 - RNA, 22 nt, Human
uuagaaaaauguucaguaguuu

SEQ ID NO: 85835 - RNA, 22 nt, Human
uuagaaaacauaagugguaaag

SEQ ID NO: 85836 - RNA, 22 nt, Human
uuagaaaauggaggugggaggg

SEQ ID NO: 85837 - RNA, 22 nt, Human
uuagaaaauuugcuucuuugga

SEQ ID NO: 85838 - RNA, 22 nt, Human
uuagaaacaaaauaguuauuug

SEQ ID NO: 85839 - RNA, 20 nt, Human
uuagaaagagcgugauaaga

SEQ ID NO: 85840 - RNA, 22 nt, Human
uuagaaaggagcuuauuucuuu

SEQ ID NO: 85841 - RNA, 22 nt, Human
uuagaaagguuuugcucugaaa

SEQ ID NO: 85842 - RNA, 22 nt, Human
uuagaaauauggugcugccgcc

SEQ ID NO: 85843 - RNA, 22 nt, Human
uuagaaaugucacagaucugau

SEQ ID NO: 85844 - RNA, 22 nt, Human
uuagaacaaagccaccagguga

SEQ ID NO: 85845 - RNA, 22 nt, Human
uuagaacaauauucucccuaca

SEQ ID NO: 85846 - RNA, 21 nt, Human
uuagaacacuugcucuuggaa

SEQ ID NO: 85847 - RNA, 19 nt, Human
ucuccaguugcuuucaggg

SEQ ID NO: 85848 - RNA, 19 nt, Human
ucuccaguuuauucuucca

SEQ ID NO: 85849 - RNA, 22 nt, Human
ucuccauacuugccuuuggccu

SEQ ID NO: 85850 - RNA, 22 nt, Human
ucuccauggauuuggaaaugau

SEQ ID NO: 85851 - RNA, 22 nt, Human
ucucccacgguacaggauaaac

SEQ ID NO: 85852 - RNA, 22 nt, Human
ucucccagaggaucccagugga

SEQ ID NO: 85853 - RNA, 22 nt, Human
ucucccaggugggugccuggag

SEQ ID NO: 85854 - RNA, 22 nt, Human
ucuccccaaccauggcacucac

SEQ ID NO: 85855 - RNA, 22 nt, Human
ucuccccaguauggauucucug

SEQ ID NO: 85856 - RNA, 22 nt, Human
ucuccccuagugcauuaaagug

SEQ ID NO: 85857 - RNA, 22 nt, Human
uuagaaucagaagagagguauu

SEQ ID NO: 85858 - RNA, 22 nt, Human
uuagaaucagguguuauaauca

SEQ ID NO: 85859 - RNA, 22 nt, Human
uuagaauccaugguugcagugg

SEQ ID NO: 85860 - RNA, 22 nt, Human
uuagacaagggcuccuuaaaag

SEQ ID NO: 85861 - RNA, 22 nt, Human
uuagacaggauguaugaaagcu

SEQ ID NO: 85862 - RNA, 22 nt, Human
uuagacauagaauauugucuag

SEQ ID NO: 85863 - RNA, 22 nt, Human
uuagacaucagugcuucucagc

SEQ ID NO: 85864 - RNA, 21 nt, Human
uuagacuuggguuuuuccugg

SEQ ID NO: 85865 - RNA, 22 nt, Human
uuagagaaauucugguaaugua

SEQ ID NO: 85866 - RNA, 22 nt, Human
uuagagaagaugaaccaucguu

SEQ ID NO: 85867 - RNA, 22 nt, Human
uuagagaagcuguaauuauuca

SEQ ID NO: 85868 - RNA, 23 nt, Human
uuagagaugauuaaaaaaucuug

SEQ ID NO: 85869 - RNA, 22 nt, Human
uuagagaugucccaaaaugaag

SEQ ID NO: 85870 - RNA, 22 nt, Human
uuagagauuugucugauaguag

SEQ ID NO: 85871 - RNA, 17 nt, Human
uuagagcuacauguuga

SEQ ID NO: 85872 - RNA, 22 nt, Human
uuagagcuucccaauuaaaacg

SEQ ID NO: 85873 - RNA, 22 nt, Human
uuagaggcaugauucaguaaag

SEQ ID NO: 85874 - RNA, 22 nt, Human
uuagaguguagcaggaagaggc

SEQ ID NO: 85875 - RNA, 20 nt, Human
uuagaguuagcuguuaugca

SEQ ID NO: 85876 - RNA, 22 nt, Human
uuagaguuaggauuugucuuua

SEQ ID NO: 85877 - RNA, 22 nt, Human
uuagaguucagcaugacuuuga

SEQ ID NO: 85878 - RNA, 22 nt, Human
uuagauaacaguagaauaucaa

SEQ ID NO: 85879 - RNA, 22 nt, Human
uuagauacauucucauuuguuu

SEQ ID NO: 85880 - RNA, 22 nt, Human
uuagaugugcaggacuuuuauc

SEQ ID NO: 85881 - RNA, 22 nt, Human
uuagauguggacuuauguuauu

SEQ ID NO: 85882 - RNA, 22 nt, Human
uuagcaaaccuggacuacagau

SEQ ID NO: 85883 - RNA, 22 nt, Human
uuagcaaacucuguuagauucu

SEQ ID NO: 85884 - RNA, 22 nt, Human
uuagcaaaguuugccaucuagu

SEQ ID NO: 85885 - RNA, 22 nt, Human
uuagcaacacccauuugugugc

SEQ ID NO: 85886 - RNA, 22 nt, Human
uuagcaagaaagauugcagcac

SEQ ID NO: 85887 - RNA, 22 nt, Human
uuagcaagauaacaguaauuuu

SEQ ID NO: 85888 - RNA, 22 nt, Human
uuagcaauccuaggcuggauca

SEQ ID NO: 85889 - RNA, 22 nt, Human
uuagcacuggauuucaucagaa

SEQ ID NO: 85890 - RNA, 22 nt, Human
uuagcaggaagaguuggcugga

SEQ ID NO: 85891 - RNA, 22 nt, Human
uuagcaguucauugauuaucgu

SEQ ID NO: 85892 - RNA, 22 nt, Human
uuagcauucugccuccuauauc

SEQ ID NO: 85893 - RNA, 22 nt, Human
uuagcauuucuggaaucacaag

SEQ ID NO: 85894 - RNA, 22 nt, Human
uuagcauuuucugggcugaaau

SEQ ID NO: 85895 - RNA, 22 nt, Human
uuagccaaacaggugaaauuga

SEQ ID NO: 85896 - RNA, 19 nt, Human
uuagccauccacagugaaa

SEQ ID NO: 85897 - RNA, 22 nt, Human
uuagccaugcccuagaagagga

SEQ ID NO: 85898 - RNA, 22 nt, Human
uuagccauuuuauacaagugua

SEQ ID NO: 85899 - RNA, 22 nt, Human
uuagcugacugugugauuuggc

SEQ ID NO: 85900 - RNA, 22 nt, Human
uuagcugagauuaagugaacuu

SEQ ID NO: 85901 - RNA, 22 nt, Human
uuagcugcauuaucaaaguuau

SEQ ID NO: 85902 - RNA, 22 nt, Human
uuagcugcugauuaaauauguu

SEQ ID NO: 85903 - RNA, 22 nt, Human
uuagcuuuagagccauuacugg

SEQ ID NO: 85904 - RNA, 22 nt, Human
uuagcuuuccuacuaauaaaua

SEQ ID NO: 85905 - RNA, 20 nt, Human
uuagcuuuggcaauagugac

SEQ ID NO: 85906 - RNA, 22 nt, Human
uuaggaaacaguagccuuugcu

SEQ ID NO: 85907 - RNA, 22 nt, Human
uuaggaaacgcugcuauugacu

SEQ ID NO: 85908 - RNA, 22 nt, Human
uuaggaaagcauuguguaaaag

SEQ ID NO: 85909 - RNA, 22 nt, Human
uuaggaaaggaacauugaaacg

SEQ ID NO: 85910 - RNA, 22 nt, Human
uuaggaaauuaugguuucagau

SEQ ID NO: 85911 - RNA, 22 nt, Human
uuaggaacuucugucucagugu

SEQ ID NO: 85912 - RNA, 22 nt, Human
uuaggaagaaggaggcaguauu

SEQ ID NO: 85913 - RNA, 22 nt, Human
uuaggaaguguguccagaagcg

SEQ ID NO: 85914 - RNA, 22 nt, Human
uuaggaaucaaauuccgaaagg

SEQ ID NO: 85915 - RNA, 22 nt, Human
uuaggaguccagaugucuuggg

SEQ ID NO: 85916 - RNA, 23 nt, Human
uuaggcacuuaguagggccagag

SEQ ID NO: 85917 - RNA, 22 nt, Human
uuaggcauccugucccuggauu

SEQ ID NO: 85918 - RNA, 22 nt, Human
uuaggcaugcaagauuaagcuc

SEQ ID NO: 85919 - RNA, 22 nt, Human
uuagggaagcauggaggagaug

SEQ ID NO: 85920 - RNA, 22 nt, Human
uuagggaaggcugcugucagcu

SEQ ID NO: 85921 - RNA, 22 nt, Human
uuagggacagcucuguagguga

SEQ ID NO: 85922 - RNA, 22 nt, Human
uuagggagcucaguccucagau

SEQ ID NO: 85923 - RNA, 19 nt, Human
uuagguauuauugcuuucc

SEQ ID NO: 85924 - RNA, 22 nt, Human
uuaggucuguuuauaaaacagu

SEQ ID NO: 85925 - RNA, 22 nt, Human
uuaguacauucacugugguagg

SEQ ID NO: 85926 - RNA, 22 nt, Human
uuaguacauugauucauuaugu

SEQ ID NO: 85927 - RNA, 22 nt, Human
uuaguacugauagggucaauca

SEQ ID NO: 85928 - RNA, 22 nt, Human
uuaguaggagagcuuguucauu

SEQ ID NO: 85929 - RNA, 22 nt, Human
uuaguauuaggaucauauuuga

SEQ ID NO: 85930 - RNA, 22 nt, Human
uuagucacuucuuccuucauca

SEQ ID NO: 85931 - RNA, 22 nt, Human
uuagucaggaccuuuugguuuc

SEQ ID NO: 85932 - RNA, 22 nt, Human
uuagucuucucauaguaaaacu

SEQ ID NO: 85933 - RNA, 22 nt, Human
uuagugaaaagaaaaugagugg

SEQ ID NO: 85934 - RNA, 17 nt, Human
uuaguguaucuguuuug

SEQ ID NO: 85935 - RNA, 22 nt, Human
uuagugugcauggaugccucaa

SEQ ID NO: 85936 - RNA, 22 nt, Human
uuaguguguccaguucugaaaa

SEQ ID NO: 85937 - RNA, 22 nt, Human
uuaguguguuaaugaguauauc

SEQ ID NO: 85938 - RNA, 22 nt, Human
uuaguguguuauauaccaagcu

SEQ ID NO: 85939 - RNA, 22 nt, Human
uuaguuaaaauucugcugacau

SEQ ID NO: 85940 - RNA, 22 nt, Human
uuaguuagaauaauacaaguaa

SEQ ID NO: 85941 - RNA, 22 nt, Human
uuaguucuugggugaacuuuug

SEQ ID NO: 85942 - RNA, 22 nt, Human
uuaguuuccuguggugugaagu

SEQ ID NO: 85943 - RNA, 22 nt, Human
uuaguuuucccaucuuuauggu

SEQ ID NO: 85944 - RNA, 22 nt, Human
uuauaacuuuggauaugacaag

SEQ ID NO: 85945 - RNA, 22 nt, Human
uuauacacugcagaaccagcau

SEQ ID NO: 85946 - RNA, 22 nt, Human
uuauacagcauugcuagugaug

SEQ ID NO: 85947 - RNA, 22 nt, Human
uuauacaguuuauacuuagaau

SEQ ID NO: 85948 - RNA, 22 nt, Human
uuauagaacgguucugugcaaa

SEQ ID NO: 85949 - RNA, 22 nt, Human
uuauagaauguuuccaaugccu

SEQ ID NO: 85950 - RNA, 22 nt, Human
uuauagcagcaugauuuacaau

SEQ ID NO: 85951 - RNA, 22 nt, Human
uuauagcaggugacuaaugagu

SEQ ID NO: 85952 - RNA, 22 nt, Human
uuauaggccaucuaaguaauuu

SEQ ID NO: 85953 - RNA, 22 nt, Human
uuauaggcuuaguucugugugu

SEQ ID NO: 85954 - RNA, 22 nt, Human
uuauaguauuagguacucaaca

SEQ ID NO: 85955 - RNA, 22 nt, Human
uuauauaaagauaacuuuucuu

SEQ ID NO: 85956 - RNA, 22 nt, Human
uuauccaacaugacuuaugucc

SEQ ID NO: 85957 - RNA, 22 nt, Human
uuauccuggauuauauauguga

SEQ ID NO: 85958 - RNA, 22 nt, Human
uuauccugguggccccuaaauc

SEQ ID NO: 85959 - RNA, 22 nt, Human
uuaucguacgcuucagaaauuu

SEQ ID NO: 85960 - RNA, 22 nt, Human
uuaucuacguauuuaaacucuu

SEQ ID NO: 85961 - RNA, 22 nt, Human
ucuggagaguccugcucacguc

SEQ ID NO: 85962 - RNA, 22 nt, Human
ucuggagccacaaaccucagcu

SEQ ID NO: 85963 - RNA, 21 nt, Human
ucuggagcccuaagcugagaa

SEQ ID NO: 85964 - RNA, 22 nt, Human
ucuggagcuggagggcaaggca

SEQ ID NO: 85965 - RNA, 22 nt, Human
ucuggagcuuguuucagauggu

SEQ ID NO: 85966 - RNA, 22 nt, Human
ucuggggauggucuacuuucug

SEQ ID NO: 85967 - RNA, 22 nt, Human
ucuggggucaccuggggugcuu

SEQ ID NO: 85968 - RNA, 19 nt, Human
ucugggguguggccuggca

SEQ ID NO: 85969 - RNA, 22 nt, Human
ucuggguaaucagggcugggag

SEQ ID NO: 85970 - RNA, 19 nt, Human
ucuggguauuuggaagaug

SEQ ID NO: 85971 - RNA, 22 nt, Human
ucugggucacugugggagggca

SEQ ID NO: 85972 - RNA, 22 nt, Human
ucuggguccccgaggaaggaga

SEQ ID NO: 85973 - RNA, 22 nt, Human
ucugggucuaucccaugccuuu

SEQ ID NO: 85974 - RNA, 22 nt, Human
ucugggucuaugaucucacuuc

SEQ ID NO: 85975 - RNA, 22 nt, Human
ucugggucuauuccuacuguga

SEQ ID NO: 85976 - RNA, 22 nt, Human
ucugggucuuaguuuucuugau

SEQ ID NO: 85977 - RNA, 21 nt, Human
ucugggugcuaguguuugcuu

SEQ ID NO: 85978 - RNA, 22 nt, Human
ucuggguggcagugauggcgug

SEQ ID NO: 85979 - RNA, 22 nt, Human
ucuggguggugucuuccaagac

SEQ ID NO: 85980 - RNA, 22 nt, Human
ucuggguucuugaugcuaccuu

SEQ ID NO: 85981 - RNA, 17 nt, Human
ucuggguuuaaauccca

SEQ ID NO: 85982 - RNA, 22 nt, Human
ucugguaauaggcaauagcuug

SEQ ID NO: 85983 - RNA, 22 nt, Human
ucuggucaucggaaagaucaaa

SEQ ID NO: 85984 - RNA, 20 nt, Human
ucugguccaggucuucaugg

SEQ ID NO: 85985 - RNA, 22 nt, Human
ucugguccccauuccagguggg

SEQ ID NO: 85986 - RNA, 22 nt, Human
ucuggugguauacaucuaggag

SEQ ID NO: 85987 - RNA, 22 nt, Human
ucugguggugggccacaagcau

SEQ ID NO: 85988 - RNA, 22 nt, Human
ucuggugucaggcuguccucgg

SEQ ID NO: 85989 - RNA, 22 nt, Human
ucuggugucaguauucuuugaa

SEQ ID NO: 85990 - RNA, 22 nt, Human
ucuguaaaacuucuuuguaaau

SEQ ID NO: 85991 - RNA, 22 nt, Human
ucuguaaagacuccaaaagcca

SEQ ID NO: 85992 - RNA, 20 nt, Human
ucuguaaagacuccagaagc

SEQ ID NO: 85993 - RNA, 22 nt, Human
ucuguaaagucuguguaaaguc

SEQ ID NO: 85994 - RNA, 22 nt, Human
ucuguaaauccugcucagcaac

SEQ ID NO: 85995 - RNA, 22 nt, Human
ucuguaaucaagauauuugaga

SEQ ID NO: 85996 - RNA, 20 nt, Human
ucuguaauuaugccaucacu

SEQ ID NO: 85997 - RNA, 23 nt, Human
ucuguacaauugagaagagaaca

SEQ ID NO: 85998 - RNA, 22 nt, Human
ucuguacaccaggggccauucu

SEQ ID NO: 85999 - RNA, 20 nt, Human
ucuguacacucaucuucugc

SEQ ID NO: 86000 - RNA, 22 nt, Human
ucuguaccucacaugcaccauc

SEQ ID NO: 86001 - RNA, 21 nt, Human
ucuguacuuugcuuccaugcu

SEQ ID NO: 86002 - RNA, 22 nt, Human
ucuguacuuuuauuuuggcacu

SEQ ID NO: 86003 - RNA, 22 nt, Human
ucuguagagacgaauguguuau

SEQ ID NO: 86004 - RNA, 22 nt, Human
ucuguagcuucuugagaggcca

SEQ ID NO: 86005 - RNA, 22 nt, Human
ucuguaggguaguaguggagau

SEQ ID NO: 86006 - RNA, 22 nt, Human
ucuguaguagguuguaguucuu

SEQ ID NO: 86007 - RNA, 22 nt, Human
ucuguauaaaguaccgguggca

SEQ ID NO: 86008 - RNA, 22 nt, Human
ucuguaucacccguucccagaa

SEQ ID NO: 86009 - RNA, 22 nt, Human
ucugucaaaugagcaaguaacu

SEQ ID NO: 86010 - RNA, 22 nt, Human
ucugucacauacacuuuucagg

SEQ ID NO: 86011 - RNA, 22 nt, Human
ucugucacuauuggccagaaca

SEQ ID NO: 86012 - RNA, 22 nt, Human
ucugucacucuagagauggcag

SEQ ID NO: 86013 - RNA, 22 nt, Human
ucugucacuuuuauuuacugaa

SEQ ID NO: 86014 - RNA, 22 nt, Human
ucugucagccccucagcuguca

SEQ ID NO: 86015 - RNA, 19 nt, Human
ucugucagugcaucaccuc

SEQ ID NO: 86016 - RNA, 22 nt, Human
ucugucauaaacacacacaagc

SEQ ID NO: 86017 - RNA, 22 nt, Human
ucugucaucuguucagugcuca

SEQ ID NO: 86018 - RNA, 22 nt, Human
ucugucauguuuccauuacaug

SEQ ID NO: 86019 - RNA, 22 nt, Human
ucugucauuucaauaugguuaa

SEQ ID NO: 86020 - RNA, 22 nt, Human
ucugucauuuuguaucuacaug

SEQ ID NO: 86021 - RNA, 22 nt, Human
ucuguccaagacaccauagugg

SEQ ID NO: 86022 - RNA, 22 nt, Human
ucuguccagagguccuggagac

SEQ ID NO: 86023 - RNA, 22 nt, Human
ucuguccaugcuuuucucucac

SEQ ID NO: 86024 - RNA, 22 nt, Human
ucuguccauuuggaguuggaag

SEQ ID NO: 86025 - RNA, 22 nt, Human
ucuguccuccacacuguaaguu

SEQ ID NO: 86026 - RNA, 22 nt, Human
ucuguccuccggagcucccagu

SEQ ID NO: 86027 - RNA, 20 nt, Human
ucuguccuuucugcuaaggc

SEQ ID NO: 86028 - RNA, 20 nt, Human
ucugucucugagcuagacuu

SEQ ID NO: 86029 - RNA, 22 nt, Human
ucugucugacaggguaugaacu

SEQ ID NO: 86030 - RNA, 22 nt, Human
ucugucugaggaguuuuugacc

SEQ ID NO: 86031 - RNA, 22 nt, Human
ucugucugcgcuugcccuggug

SEQ ID NO: 86032 - RNA, 22 nt, Human
ucugucugggugccucgaguac

SEQ ID NO: 86033 - RNA, 21 nt, Human
ucugucugguuuuagaguggc

SEQ ID NO: 86034 - RNA, 23 nt, Human
ucugucuguguaugugcagaaag

SEQ ID NO: 86035 - RNA, 17 nt, Human
ucugucuugacugucac

SEQ ID NO: 86036 - RNA, 22 nt, Human
ucugucuuuagaggccugugcu

SEQ ID NO: 86037 - RNA, 22 nt, Human
ucugugaacaucacauugacag

SEQ ID NO: 86038 - RNA, 22 nt, Human
ucugugacauugaacaucuaca

SEQ ID NO: 86039 - RNA, 22 nt, Human
ucugugacucauaucuguagau

SEQ ID NO: 86040 - RNA, 22 nt, Human
ucugugauagguggcauaguga

SEQ ID NO: 86041 - RNA, 17 nt, Human
ucugugauaguguagau

SEQ ID NO: 86042 - RNA, 22 nt, Human
ucugugcaagaccaacuuucaa

SEQ ID NO: 86043 - RNA, 22 nt, Human
ucugugcacaauaggcauuuuu

SEQ ID NO: 86044 - RNA, 20 nt, Human
ucugugcaccugcuacaagg

SEQ ID NO: 86045 - RNA, 22 nt, Human
ucugugcacuaacauuccuggu

SEQ ID NO: 86046 - RNA, 22 nt, Human
ucugugcagaacucacagaagg

SEQ ID NO: 86047 - RNA, 22 nt, Human
ucugugcagaaucaaggagcuu

SEQ ID NO: 86048 - RNA, 22 nt, Human
ucugugcagacauggggaagcc

SEQ ID NO: 86049 - RNA, 15 nt, Human
ucugugcagcaaggg

SEQ ID NO: 86050 - RNA, 20 nt, Human
ucugugcauugccugcuggu

SEQ ID NO: 86051 - RNA, 22 nt, Human
ucugugcauuucaggaccugaa

SEQ ID NO: 86052 - RNA, 22 nt, Human
ucugugccaccucuccaguguc

SEQ ID NO: 86053 - RNA, 23 nt, Human
ucugugccaguuuccaugucugu

SEQ ID NO: 86054 - RNA, 22 nt, Human
ucugugccaugcccgucuacca

SEQ ID NO: 86055 - RNA, 22 nt, Human
ucugugcuaauuuauccuuccu

SEQ ID NO: 86056 - RNA, 22 nt, Human
ucugugcugagcucugagaugu

SEQ ID NO: 86057 - RNA, 22 nt, Human
ucugugcugcaggagucugcau

SEQ ID NO: 86058 - RNA, 22 nt, Human
ucuguggaguugaggaagguug

SEQ ID NO: 86059 - RNA, 18 nt, Human
ucuguggcagcagugcac

SEQ ID NO: 86060 - RNA, 22 nt, Human
ucuguggccuccuuccacuuac

SEQ ID NO: 86061 - RNA, 22 nt, Human
ucuguggcuaucauacugaagg

SEQ ID NO: 86062 - RNA, 22 nt, Human
ucuguggcuuccuauuucuugg

SEQ ID NO: 86063 - RNA, 22 nt, Human
ucuguggcuucuauuuaacuuu

SEQ ID NO: 86064 - RNA, 22 nt, Human
ucuguggcuuucguguaagaug

SEQ ID NO: 86065 - RNA, 22 nt, Human
ucuguggcuuucuuauguugua

SEQ ID NO: 86066 - RNA, 22 nt, Human
ucugugggggugucuuaaccua

SEQ ID NO: 86067 - RNA, 22 nt, Human
ucuguggguagagugaguacuu

SEQ ID NO: 86068 - RNA, 22 nt, Human
ucuguguauaggguugugcgcu

SEQ ID NO: 86069 - RNA, 22 nt, Human
ucugugucccuucuaauuucag

SEQ ID NO: 86070 - RNA, 23 nt, Human
ucuguguccuccuggaccacaga

SEQ ID NO: 86071 - RNA, 22 nt, Human
ucugugucugguugggccagua

SEQ ID NO: 86072 - RNA, 18 nt, Human
ucuguguucugucauugc

SEQ ID NO: 86073 - RNA, 22 nt, Human
ucuguguugauaauuuuggaga

SEQ ID NO: 86074 - RNA, 22 nt, Human
ucuguguuuaaaagauaugucc

SEQ ID NO: 86075 - RNA, 22 nt, Human
ucuguguuuuacuccaauuaua

SEQ ID NO: 86076 - RNA, 22 nt, Human
ugaggugguccaaagacuguuu

SEQ ID NO: 86077 - RNA, 22 nt, Human
ugaggugguuacuguggugcuc

SEQ ID NO: 86078 - RNA, 22 nt, Human
ugaggugguuuguaucacuggg

SEQ ID NO: 86079 - RNA, 22 nt, Human
ugagguucaguucuuggccaca

SEQ ID NO: 86080 - RNA, 22 nt, Human
ugaguaaaagugaaucuuaugu

SEQ ID NO: 86081 - RNA, 22 nt, Human
ugaguaaagggccagauaguaa

SEQ ID NO: 86082 - RNA, 22 nt, Human
ugaguaacacaguaugcuuaca

SEQ ID NO: 86083 - RNA, 18 nt, Human
ucugcacuccugagagag

SEQ ID NO: 86084 - RNA, 22 nt, Human
ucugcagaaacugugacuaugu

SEQ ID NO: 86085 - RNA, 22 nt, Human
ucugcagaagaauuaaggacag

SEQ ID NO: 86086 - RNA, 22 nt, Human
ucugcagaagccauggccuugc

SEQ ID NO: 86087 - RNA, 22 nt, Human
ucugcagaaguggcugggccac

SEQ ID NO: 86088 - RNA, 22 nt, Human
ucugcagagguaauuuacagau

SEQ ID NO: 86089 - RNA, 22 nt, Human
ucugcagcacuuaauguuucgu

SEQ ID NO: 86090 - RNA, 20 nt, Human
ucugcagcacuugacaaugu

SEQ ID NO: 86091 - RNA, 22 nt, Human
ucugcagcuucuugccagagag

SEQ ID NO: 86092 - RNA, 22 nt, Human
ucugcagcuugcacaggcaggc

SEQ ID NO: 86093 - RNA, 22 nt, Human
ucugcagcuuuccccugauuua

SEQ ID NO: 86094 - RNA, 22 nt, Human
ucugcaggacugaggccuguuu

SEQ ID NO: 86095 - RNA, 22 nt, Human
ucugcaggaucagagccagagg

SEQ ID NO: 86096 - RNA, 22 nt, Human
ucugcaggauggaugcucagaa

SEQ ID NO: 86097 - RNA, 22 nt, Human
ucugcaggcauuuuugguuguc

SEQ ID NO: 86098 - RNA, 22 nt, Human
ucugcaggcuuggaguggcagc

SEQ ID NO: 86099 - RNA, 22 nt, Human
ucugcagggcccuuggcuccug

SEQ ID NO: 86100 - RNA, 22 nt, Human
ucugcagguaagcguucuugga

SEQ ID NO: 86101 - RNA, 19 nt, Human
ucugcauggcaggaagaga

SEQ ID NO: 86102 - RNA, 22 nt, Human
ucugcauugucccagaagugac

SEQ ID NO: 86103 - RNA, 22 nt, Human
ucugccacaugagggcacagca

SEQ ID NO: 86104 - RNA, 22 nt, Human
ucugccaccuucauccuccacu

SEQ ID NO: 86105 - RNA, 20 nt, Human
ucugccacgucuggugacug

SEQ ID NO: 86106 - RNA, 22 nt, Human
ucugccacuagugguuaccuua

SEQ ID NO: 86107 - RNA, 20 nt, Human
ucugccacuuuuucugucac

SEQ ID NO: 86108 - RNA, 22 nt, Human
ucugccagcccugugagucuug

SEQ ID NO: 86109 - RNA, 22 nt, Human
ucugccagguggggagaggcca

SEQ ID NO: 86110 - RNA, 22 nt, Human
ucugccagugccagaguacaua

SEQ ID NO: 86111 - RNA, 22 nt, Human
ucugccaguuagaaacugguua

SEQ ID NO: 86112 - RNA, 22 nt, Human
ucugccaugcuaacuucaguau

SEQ ID NO: 86113 - RNA, 22 nt, Human
ucugcccaccagcgguugcaua

SEQ ID NO: 86114 - RNA, 22 nt, Human
ucugcccacugcucugcugccc

SEQ ID NO: 86115 - RNA, 22 nt, Human
ucugcccagccagacccaaggu

SEQ ID NO: 86116 - RNA, 22 nt, Human
ucugcccagcuaaaaaugggag

SEQ ID NO: 86117 - RNA, 22 nt, Human
ucugcccagggacccacaggga

SEQ ID NO: 86118 - RNA, 19 nt, Human
ucugcccaguugucugccc

SEQ ID NO: 86119 - RNA, 22 nt, Human
ucugcccaguuugugcucaggu

SEQ ID NO: 86120 - RNA, 22 nt, Human
ucugcccauucuuagagucuag

SEQ ID NO: 86121 - RNA, 22 nt, Human
ucugccccugcugggcacagag

SEQ ID NO: 86122 - RNA, 22 nt, Human
ucugcccuaauucagugcuuag

SEQ ID NO: 86123 - RNA, 22 nt, Human
ucugcccucaggguaaugauca

SEQ ID NO: 86124 - RNA, 18 nt, Human
ucugcccugccauucacu

SEQ ID NO: 86125 - RNA, 22 nt, Human
ucugcccuuggcucucuuguug

SEQ ID NO: 86126 - RNA, 22 nt, Human
ucugccgugcgaggucccacca

SEQ ID NO: 86127 - RNA, 22 nt, Human
ucugccuccugcuugucccgac

SEQ ID NO: 86128 - RNA, 22 nt, Human
ucugccucgcuaacagcagcca

SEQ ID NO: 86129 - RNA, 22 nt, Human
ucugccucuuucaggccuggca

SEQ ID NO: 86130 - RNA, 22 nt, Human
ucugccugcugccugggggcuc

SEQ ID NO: 86131 - RNA, 22 nt, Human
ucugccuggcucauggcaguga

SEQ ID NO: 86132 - RNA, 22 nt, Human
ucugccugugcuguguuuucau

SEQ ID NO: 86133 - RNA, 22 nt, Human
ucugccugugguggaggaaguu

SEQ ID NO: 86134 - RNA, 22 nt, Human
ucugccuguugagccuaaggcc

SEQ ID NO: 86135 - RNA, 20 nt, Human
ucugccuuaugaccuucgcc

SEQ ID NO: 86136 - RNA, 22 nt, Human
ucugccuugccgaauuccaggc

SEQ ID NO: 86137 - RNA, 22 nt, Human
ucugccuuucucaagggcaaaa

SEQ ID NO: 86138 - RNA, 22 nt, Human
ucugcguccaucugccugcuug

SEQ ID NO: 86139 - RNA, 22 nt, Human
ucugcucagccgaucugcuccg

SEQ ID NO: 86140 - RNA, 22 nt, Human
ucugcucagggagggucacuac

SEQ ID NO: 86141 - RNA, 22 nt, Human
ucugcucagguuaccuagcuag

SEQ ID NO: 86142 - RNA, 22 nt, Human
ucugcucuaguugcuuccugcc

SEQ ID NO: 86143 - RNA, 22 nt, Human
ucugcucuccauacuuccgcac

SEQ ID NO: 86144 - RNA, 22 nt, Human
ucugcucugagagggccaucag

SEQ ID NO: 86145 - RNA, 17 nt, Human
ucugcucugccaaucca

SEQ ID NO: 86146 - RNA, 22 nt, Human
ucugcucugggccagcuauuaa

SEQ ID NO: 86147 - RNA, 22 nt, Human
ucugcucuguacugcacuggcc

SEQ ID NO: 86148 - RNA, 22 nt, Human
ucugcucuguggcuucagcuaa

SEQ ID NO: 86149 - RNA, 22 nt, Human
ucugcugaacuugcugcccaga

SEQ ID NO: 86150 - RNA, 22 nt, Human
ucugcugacauuuaugaauaga

SEQ ID NO: 86151 - RNA, 22 nt, Human
ucugcugcagcaggauucucug

SEQ ID NO: 86152 - RNA, 22 nt, Human
ucugcugccaccuuguggugag

SEQ ID NO: 86153 - RNA, 22 nt, Human
ucugcugccaugcagagcagua

SEQ ID NO: 86154 - RNA, 22 nt, Human
ucugcugccucgguguggguac

SEQ ID NO: 86155 - RNA, 22 nt, Human
ucugcugcugcagcuacacuau

SEQ ID NO: 86156 - RNA, 22 nt, Human
ucugcuggccuuagcaggucua

SEQ ID NO: 86157 - RNA, 22 nt, Human
ucugcuggugaugaccucauaa

SEQ ID NO: 86158 - RNA, 22 nt, Human
ucugcuguaaagaauuucugcc

SEQ ID NO: 86159 - RNA, 22 nt, Human
ucugcuucugugaaggcagucu

SEQ ID NO: 86160 - RNA, 22 nt, Human
ucugcuuuagugcaaagucuua

SEQ ID NO: 86161 - RNA, 22 nt, Human
ucugcuuuauuacacuagccaa

SEQ ID NO: 86162 - RNA, 22 nt, Human
ucugcuuucuugcgcagaugug

SEQ ID NO: 86163 - RNA, 22 nt, Human
ucugcuuugaccuucuugaugc

SEQ ID NO: 86164 - RNA, 22 nt, Human
ucugcuuugcugccuccugauc

SEQ ID NO: 86165 - RNA, 22 nt, Human
ucuggaagcuggaguccaggaa

SEQ ID NO: 86166 - RNA, 22 nt, Human
ucuggaagguuggcucccaguu

SEQ ID NO: 86167 - RNA, 22 nt, Human
ucuggaagugauguucauagug

SEQ ID NO: 86168 - RNA, 22 nt, Human
ucuggaauaggacaaaaccaaa

SEQ ID NO: 86169 - RNA, 22 nt, Human
ucuggaauagguccugaguauu

SEQ ID NO: 86170 - RNA, 22 nt, Human
ucuggaaugauuuccuuccccu

SEQ ID NO: 86171 - RNA, 22 nt, Human
ucuggacuaacagcagccucag

SEQ ID NO: 86172 - RNA, 22 nt, Human
ucuggacuauaggcugccaagu

SEQ ID NO: 86173 - RNA, 20 nt, Human
ucuggacucuaagguauauu

SEQ ID NO: 86174 - RNA, 20 nt, Human
ucuggacugucagacaggga

SEQ ID NO: 86175 - RNA, 22 nt, Human
ucuggacuugaaucagaguaga

SEQ ID NO: 86176 - RNA, 22 nt, Human
ucuggacuuucggugcaagagu

SEQ ID NO: 86177 - RNA, 22 nt, Human
ucuggagaaaguugaguuugug

SEQ ID NO: 86178 - RNA, 22 nt, Human
ucuggagaacuugcaagaggau

SEQ ID NO: 86179 - RNA, 22 nt, Human
ucuggagaagcagugagaguca

SEQ ID NO: 86180 - RNA, 22 nt, Human
ucuggagauaagcagcaaugaa

SEQ ID NO: 86181 - RNA, 22 nt, Human
ucuggagcaacagagcaggaca

SEQ ID NO: 86182 - RNA, 22 nt, Human
ucuggagccuuggaugggaaag

SEQ ID NO: 86183 - RNA, 22 nt, Human
ucuggagcgaggucccugucug

SEQ ID NO: 86184 - RNA, 21 nt, Human
ucuggagcugcaggcugggca

SEQ ID NO: 86185 - RNA, 22 nt, Human
ucuucuuuggaugaaagaauau

SEQ ID NO: 86186 - RNA, 21 nt, Human
ucuugaaaauuguagcaguuu

SEQ ID NO: 86187 - RNA, 22 nt, Human
ucuugaaacauaugaguaagug

SEQ ID NO: 86188 - RNA, 22 nt, Human
ucuugaagucacacagaaagug

SEQ ID NO: 86189 - RNA, 22 nt, Human
ucuugacauucaaucauguaua

SEQ ID NO: 86190 - RNA, 22 nt, Human
ucuugagaagcggcugucucag

SEQ ID NO: 86191 - RNA, 22 nt, Human
ucuugagagauauacuacugaa

SEQ ID NO: 86192 - RNA, 22 nt, Human
ucuugaggucaucaucugaaac

SEQ ID NO: 86193 - RNA, 22 nt, Human
ucuugagugcgcuuggguguuc

SEQ ID NO: 86194 - RNA, 22 nt, Human
ucuugauuacaaauaacaucau

SEQ ID NO: 86195 - RNA, 22 nt, Human
ucuugcacuucaugaauauguu

SEQ ID NO: 86196 - RNA, 22 nt, Human
ucuugcagaaauaaguuuaaau

SEQ ID NO: 86197 - RNA, 19 nt, Human
ucuugcagccccagcaggc

SEQ ID NO: 86198 - RNA, 22 nt, Human
ugauuagauugagucaaccuug

SEQ ID NO: 86199 - RNA, 23 nt, Human
ugauuaggucuacucuuggcucc

SEQ ID NO: 86200 - RNA, 22 nt, Human
ugauuauauucuaacuucauaa

SEQ ID NO: 86201 - RNA, 22 nt, Human
ugauucaaauauuguguaugau

SEQ ID NO: 86202 - RNA, 17 nt, Human
ugauucaacuagaaacu

SEQ ID NO: 86203 - RNA, 22 nt, Human
ugauucaagauugguuagcugu

SEQ ID NO: 86204 - RNA, 18 nt, Human
ugauucaaguugcccucc

SEQ ID NO: 86205 - RNA, 22 nt, Human
ugauucaauuaucugaugcuuu

SEQ ID NO: 86206 - RNA, 22 nt, Human
ugauucaguacuuucucuaacu

SEQ ID NO: 86207 - RNA, 22 nt, Human
ugauucauauguaacaucccug

SEQ ID NO: 86208 - RNA, 22 nt, Human
ugauuccacucugaggaucgua

SEQ ID NO: 86209 - RNA, 22 nt, Human
ugauucuagguccauuauuugc

SEQ ID NO: 86210 - RNA, 22 nt, Human
ugauucucauuaucuuggggug

SEQ ID NO: 86211 - RNA, 22 nt, Human
ugauucucuuagaugauguguu

SEQ ID NO: 86212 - RNA, 22 nt, Human
ugauucucuuguaagcuauguu

SEQ ID NO: 86213 - RNA, 22 nt, Human
ugauucugagggagcauucugc

SEQ ID NO: 86214 - RNA, 22 nt, Human
ugauucugccacguacuggcug

SEQ ID NO: 86215 - RNA, 22 nt, Human
ugauucuguaaacaugucuuua

SEQ ID NO: 86216 - RNA, 22 nt, Human
ugauucugucuccuucacuccg

SEQ ID NO: 86217 - RNA, 22 nt, Human
ugauucuuuggagagcuauaua

SEQ ID NO: 86218 - RNA, 22 nt, Human
ugauugaagaggugaggaaguu

SEQ ID NO: 86219 - RNA, 22 nt, Human
ugauugaagcuagaacaaccau

SEQ ID NO: 86220 - RNA, 21 nt, Human
ugauugauauuugcaaacaga

SEQ ID NO: 86221 - RNA, 22 nt, Human
ugauugcugaauuuuaggaacu

SEQ ID NO: 86222 - RNA, 22 nt, Human
ugauuguauagggguuauuaau

SEQ ID NO: 86223 - RNA, 22 nt, Human
ugauuuacccguaacuauuucu

SEQ ID NO: 86224 - RNA, 22 nt, Human
ugauuuacuucuggauaaaucc

SEQ ID NO: 86225 - RNA, 19 nt, Human
ugauuuagggauccggcac

SEQ ID NO: 86226 - RNA, 22 nt, Human
ugauuuaugaccaaguuagaau

SEQ ID NO: 86227 - RNA, 22 nt, Human
ugauuuccaauaaggagaaugu

SEQ ID NO: 86228 - RNA, 21 nt, Human
ugauuuccagaaaauuggccc

SEQ ID NO: 86229 - RNA, 23 nt, Human
ugauuuccagugagucaguggga

SEQ ID NO: 86230 - RNA, 22 nt, Human
ugauuuccaugaagcugaaggc

SEQ ID NO: 86231 - RNA, 22 nt, Human
ugauuuccccagucuugcugcu

SEQ ID NO: 86232 - RNA, 22 nt, Human
ugauuuccuagcugacaugaaa

SEQ ID NO: 86233 - RNA, 22 nt, Human
ugauuuccuaggucuggagaag

SEQ ID NO: 86234 - RNA, 22 nt, Human
ugauuucucauauuguucaaaa

SEQ ID NO: 86235 - RNA, 20 nt, Human
ugauuucucuucuauuccuu

SEQ ID NO: 86236 - RNA, 21 nt, Human
ugauuucugccaaguucacua

SEQ ID NO: 86237 - RNA, 22 nt, Human
ugauuugaauuuuaaaacacug

SEQ ID NO: 86238 - RNA, 22 nt, Human
ugauuugagguacauaaaucca

SEQ ID NO: 86239 - RNA, 22 nt, Human
ugauuuguuuagugccaaguuu

SEQ ID NO: 86240 - RNA, 22 nt, Human
ugauuuucaugggugaucuuug

SEQ ID NO: 86241 - RNA, 22 nt, Human
ugauuuucuccauuguaaauuc

SEQ ID NO: 86242 - RNA, 22 nt, Human
ugauuuugucauguuucugaua

SEQ ID NO: 86243 - RNA, 22 nt, Human
ugcaaaaugacuucugaaaaga

SEQ ID NO: 86244 - RNA, 22 nt, Human
ugcaaacaacuguuuaaugcug

SEQ ID NO: 86245 - RNA, 22 nt, Human
ugcaaacaauuuccuauaaagu

SEQ ID NO: 86246 - RNA, 20 nt, Human
ugcaaacacagaguguauga

SEQ ID NO: 86247 - RNA, 22 nt, Human
ugcaaacaggcauuucacaaac

SEQ ID NO: 86248 - RNA, 22 nt, Human
ugcaaacaguuaagaugcaggc

SEQ ID NO: 86249 - RNA, 22 nt, Human
ugcaaacauccgacugaaagcc

SEQ ID NO: 86250 - RNA, 22 nt, Human
ugcaaacuauugguagagaugg

SEQ ID NO: 86251 - RNA, 23 nt, Human
ugcaaagaaaucugggucauugu

SEQ ID NO: 86252 - RNA, 22 nt, Human
ugcaaagaacuaagcagccuua

SEQ ID NO: 86253 - RNA, 22 nt, Human
ugcaaagaagccacagucccag

SEQ ID NO: 86254 - RNA, 22 nt, Human
ugcaaagaugaaauauuaaagg

SEQ ID NO: 86255 - RNA, 22 nt, Human
ugcaaagccacaaugaaaucag

SEQ ID NO: 86256 - RNA, 22 nt, Human
ugcaaagggcuuugcauacaga

SEQ ID NO: 86257 - RNA, 22 nt, Human
ugcaaauaaauuucuguucauu

SEQ ID NO: 86258 - RNA, 23 nt, Human
ugcaaauaccaugcuguccuguc

SEQ ID NO: 86259 - RNA, 22 nt, Human
ugcaaauagccugaugaaagaa

SEQ ID NO: 86260 - RNA, 22 nt, Human
ugcaaauauuccaugcuguuca

SEQ ID NO: 86261 - RNA, 22 nt, Human
ugcaaauauuuccuuauagcca

SEQ ID NO: 86262 - RNA, 22 nt, Human
ugcaaauccuguuuggaguaag

SEQ ID NO: 86263 - RNA, 19 nt, Human
ugcaaaugcuguugagaau

SEQ ID NO: 86264 - RNA, 22 nt, Human
ugcaaaugggcaucuccaagug

SEQ ID NO: 86265 - RNA, 19 nt, Human
ugcaaauucuaaaaacuga

SEQ ID NO: 86266 - RNA, 22 nt, Human
ugcaaauuggugaggaccacuu

SEQ ID NO: 86267 - RNA, 22 nt, Human
ugcaaauuuauauggugacugc

SEQ ID NO: 86268 - RNA, 22 nt, Human
ugcaaauuucuuuaguacauaa

SEQ ID NO: 86269 - RNA, 22 nt, Human
ugcaaauuugagcagacuguuc

SEQ ID NO: 86270 - RNA, 22 nt, Human
ugcaacaaggccucauuucuug

SEQ ID NO: 86271 - RNA, 22 nt, Human
ugcaacaggcugugacauggaa

SEQ ID NO: 86272 - RNA, 22 nt, Human
ugcaacuaggagguucuuagcu

SEQ ID NO: 86273 - RNA, 17 nt, Human
ugcaagaagauuaggaa

SEQ ID NO: 86274 - RNA, 22 nt, Human
ugcaagacuccucacuuucucu

SEQ ID NO: 86275 - RNA, 22 nt, Human
ugcaagagacagacaugacuca

SEQ ID NO: 86276 - RNA, 22 nt, Human
ugcaagagacauggguugugug

SEQ ID NO: 86277 - RNA, 22 nt, Human
ugcaagagauucaaaccauaaa

SEQ ID NO: 86278 - RNA, 22 nt, Human
ugcaagagcagaaagaacugag

SEQ ID NO: 86279 - RNA, 22 nt, Human
ugcaagaggguguucaguuugu

SEQ ID NO: 86280 - RNA, 22 nt, Human
ugcaagcuuggcugauguugau

SEQ ID NO: 86281 - RNA, 20 nt, Human
ugcaaggaagcaggcaagug

SEQ ID NO: 86282 - RNA, 22 nt, Human
ugcaaggcagcaccagcucuug

SEQ ID NO: 86283 - RNA, 22 nt, Human
ugcaaggcccagacaagagcuc

SEQ ID NO: 86284 - RNA, 22 nt, Human
ugcaaggcugcagagggugcua

SEQ ID NO: 86285 - RNA, 19 nt, Human
ugcaagugucuuggacaag

SEQ ID NO: 86286 - RNA, 22 nt, Human
ugcaauaacccaguaucuguga

SEQ ID NO: 86287 - RNA, 22 nt, Human
ugcaauaaguuguguuaucacu

SEQ ID NO: 86288 - RNA, 22 nt, Human
ugcaauacauacuuagacccag

SEQ ID NO: 86289 - RNA, 22 nt, Human
ugcaauacucaucauuggagau

SEQ ID NO: 86290 - RNA, 22 nt, Human
ugcaaucagguaccauuugauu

SEQ ID NO: 86291 - RNA, 20 nt, Human
ugcaauguccauguuccagg

SEQ ID NO: 86292 - RNA, 22 nt, Human
ugcaauuaugggcaauuuuuaa

SEQ ID NO: 86293 - RNA, 22 nt, Human
ugcaauuucaaauaucagaaag

SEQ ID NO: 86294 - RNA, 22 nt, Human
uucuaccucaguuucccacuua

SEQ ID NO: 86295 - RNA, 22 nt, Human
uucuacuucugacacuguuugu

SEQ ID NO: 86296 - RNA, 22 nt, Human
uucuacuuucucugucauuaaa

SEQ ID NO: 86297 - RNA, 22 nt, Human
uucuacuuuggacauaaaggac

SEQ ID NO: 86298 - RNA, 16 nt, Human
uucuagaaaagaaggu

SEQ ID NO: 86299 - RNA, 22 nt, Human
uucuagaaauccguaagugaau

SEQ ID NO: 86300 - RNA, 22 nt, Human
uucuagagaacucgagugccuu

SEQ ID NO: 86301 - RNA, 22 nt, Human
uucuagaggggagauacuagua

SEQ ID NO: 86302 - RNA, 22 nt, Human
uucuagaugauaaaccagcagc

SEQ ID NO: 86303 - RNA, 22 nt, Human
uucuagcaugccuuuuagcaca

SEQ ID NO: 86304 - RNA, 22 nt, Human
uucuagcuguugcuguuuauag

SEQ ID NO: 86305 - RNA, 22 nt, Human
uucuagcuuuuugcaccaaggu

SEQ ID NO: 86306 - RNA, 22 nt, Human
uucuaggacccugcgugagaac

SEQ ID NO: 86307 - RNA, 22 nt, Human
uucuaguccuagaaacuacaug

SEQ ID NO: 86308 - RNA, 22 nt, Human
uucuagucuauggcuagauagu

SEQ ID NO: 86309 - RNA, 22 nt, Human
uucuaguucccacauaguugcc

SEQ ID NO: 86310 - RNA, 22 nt, Human
uucuaguucccucuggaaugua

SEQ ID NO: 86311 - RNA, 22 nt, Human
uucuaguucuuaggaacagaca

SEQ ID NO: 86312 - RNA, 20 nt, Human
uucuaguuuggaguuauuaa

SEQ ID NO: 86313 - RNA, 22 nt, Human
uucuaguuuugccacaggauac

SEQ ID NO: 86314 - RNA, 22 nt, Human
uucuauaagacucauauuucuu

SEQ ID NO: 86315 - RNA, 22 nt, Human
uucuauacaaagauuucucaca

SEQ ID NO: 86316 - RNA, 19 nt, Human
uucuaugauuaacaugaga

SEQ ID NO: 86317 - RNA, 20 nt, Human
uucuauggaccaguauauuu

SEQ ID NO: 86318 - RNA, 22 nt, Human
uucuauugacauucacuguaac

SEQ ID NO: 86319 - RNA, 22 nt, Human
uucuauugcacacaaauaauua

SEQ ID NO: 86320 - RNA, 22 nt, Human
uucuauugggaagugugagagu

SEQ ID NO: 86321 - RNA, 22 nt, Human
uucuauugggcagcauugcuuc

SEQ ID NO: 86322 - RNA, 22 nt, Human
uucuauuucuuaaucuuggcug

SEQ ID NO: 86323 - RNA, 22 nt, Human
uucuauuuuuguggaacuguag

SEQ ID NO: 86324 - RNA, 22 nt, Human
uucucacaaauccauccaggag

SEQ ID NO: 86325 - RNA, 22 nt, Human
uucucacaguaccuaacaugua

SEQ ID NO: 86326 - RNA, 22 nt, Human
uucucagaaaauguagagaaaa

SEQ ID NO: 86327 - RNA, 22 nt, Human
uucucagagugaccaagucuuu

SEQ ID NO: 86328 - RNA, 22 nt, Human
uucucagauauuuguauggaac

SEQ ID NO: 86329 - RNA, 22 nt, Human
uucucagauccaucagaagucc

SEQ ID NO: 86330 - RNA, 22 nt, Human
ucuucaaagaauuuuaguaauu

SEQ ID NO: 86331 - RNA, 22 nt, Human
ucuucaaauccuacagugucug

SEQ ID NO: 86332 - RNA, 22 nt, Human
ucuucaaaugaguguggauuau

SEQ ID NO: 86333 - RNA, 22 nt, Human
ucuucaaugcauucucuuguuu

SEQ ID NO: 86334 - RNA, 22 nt, Human
ucuucaauuagauuuaccaauu

SEQ ID NO: 86335 - RNA, 23 nt, Human
ucuucacagggcuucccaugugc

SEQ ID NO: 86336 - RNA, 22 nt, Human
ucuucacauauuccuugagcua

SEQ ID NO: 86337 - RNA, 22 nt, Human
ucuucacauggaacaugaagcu

SEQ ID NO: 86338 - RNA, 22 nt, Human
ucuucacauuuuagugguuugu

SEQ ID NO: 86339 - RNA, 22 nt, Human
ucuucacugugaauuuguucuu

SEQ ID NO: 86340 - RNA, 22 nt, Human
ucuucagacuguuguucuuuug

SEQ ID NO: 86341 - RNA, 22 nt, Human
ucuucagagauguaacauaugg

SEQ ID NO: 86342 - RNA, 22 nt, Human
ucuucagagugagcagugucau

SEQ ID NO: 86343 - RNA, 20 nt, Human
ucuucagaugcuuuuggagu

SEQ ID NO: 86344 - RNA, 22 nt, Human
ucuucagauugcacugagcaag

SEQ ID NO: 86345 - RNA, 22 nt, Human
ucuucagcaacuccccaaucug

SEQ ID NO: 86346 - RNA, 22 nt, Human
ucuucagcuguagucauuguuc

SEQ ID NO: 86347 - RNA, 22 nt, Human
ucuucaggcucuggcugccuuu

SEQ ID NO: 86348 - RNA, 22 nt, Human
ucuucagguagugaguggggug

SEQ ID NO: 86349 - RNA, 22 nt, Human
ucuucagucaauccagauguuu

SEQ ID NO: 86350 - RNA, 23 nt, Human
ucuucagugagaccagcaaggcc

SEQ ID NO: 86351 - RNA, 22 nt, Human
ucuucagugcaccugaugucuu

SEQ ID NO: 86352 - RNA, 22 nt, Human
ucuucaguuguaaaaguguugg

SEQ ID NO: 86353 - RNA, 22 nt, Human
ucuucaguugucauacugccuu

SEQ ID NO: 86354 - RNA, 22 nt, Human
ucuucaugaccucuguguuuua

SEQ ID NO: 86355 - RNA, 22 nt, Human
ucuucaugccaaaugaguuuug

SEQ ID NO: 86356 - RNA, 22 nt, Human
ucuucauguauacucaugguac

SEQ ID NO: 86357 - RNA, 22 nt, Human
ucuucauguauuugacaaccau

SEQ ID NO: 86358 - RNA, 22 nt, Human
ucuucauuccguagauauuuau

SEQ ID NO: 86359 - RNA, 22 nt, Human
ucuucauuuuacaggcagaccu

SEQ ID NO: 86360 - RNA, 22 nt, Human
ucuuccagaaguguuuucagaa

SEQ ID NO: 86361 - RNA, 22 nt, Human
ucuuccagaaugcauucucuuu

SEQ ID NO: 86362 - RNA, 22 nt, Human
ucuuccagauacuuccugacuu

SEQ ID NO: 86363 - RNA, 22 nt, Human
ucuuccagaugcagaugcuucu

SEQ ID NO: 86364 - RNA, 22 nt, Human
ucuuccagcccuucuaauggua

SEQ ID NO: 86365 - RNA, 22 nt, Human
ucuuccagcuucuagaggaugc

SEQ ID NO: 86366 - RNA, 20 nt, Human
ucuuccagcuucugguagaa

SEQ ID NO: 86367 - RNA, 22 nt, Human
ucuuccagcuucugguggcugc

SEQ ID NO: 86368 - RNA, 22 nt, Human
ucuuccagucuguaggacuagg

SEQ ID NO: 86369 - RNA, 22 nt, Human
ucuucccagaggaggugccagc

SEQ ID NO: 86370 - RNA, 22 nt, Human
ucuucccuaaucaccaucuuca

SEQ ID NO: 86371 - RNA, 22 nt, Human
ucuuccucccuacagagcucag

SEQ ID NO: 86372 - RNA, 22 nt, Human
ucuuccucuagaucugaggccc

SEQ ID NO: 86373 - RNA, 22 nt, Human
ucuuccugaaacccuguuccag

SEQ ID NO: 86374 - RNA, 22 nt, Human
ucuuccuucuuugaugacaagg

SEQ ID NO: 86375 - RNA, 22 nt, Human
ucuuccuuuuguaccuucugaa

SEQ ID NO: 86376 - RNA, 22 nt, Human
ucuucgcuuacuguguaaggag

SEQ ID NO: 86377 - RNA, 22 nt, Human
ucuucuaguaggccaagaagcu

SEQ ID NO: 86378 - RNA, 22 nt, Human
ucuucucaguuucucuaggaug

SEQ ID NO: 86379 - RNA, 22 nt, Human
ucuucucccagggucgcccaag

SEQ ID NO: 86380 - RNA, 22 nt, Human
ucuucucccaucggccgcaggg

SEQ ID NO: 86381 - RNA, 22 nt, Human
ucuucucccaucuccaggcagg

SEQ ID NO: 86382 - RNA, 22 nt, Human
ucuucuccuuugccauguguuu

SEQ ID NO: 86383 - RNA, 22 nt, Human
ucuucucucauguaggagggaa

SEQ ID NO: 86384 - RNA, 22 nt, Human
ucuucuguccuaagucaaagca

SEQ ID NO: 86385 - RNA, 22 nt, Human
ucuucuuccucauuuauacaua

SEQ ID NO: 86386 - RNA, 22 nt, Human
ucuucuuccuccacagggccca

SEQ ID NO: 86387 - RNA, 22 nt, Human
ucuucuuugaaucauagugacc

SEQ ID NO: 86388 - RNA, 22 nt, Human
ucuucuuuuauuucaagggugu

SEQ ID NO: 86389 - RNA, 21 nt, Human
ucuugaaaaguuagauucucu

SEQ ID NO: 86390 - RNA, 22 nt, Human
ucuugaaaauugagguugaagg

SEQ ID NO: 86391 - RNA, 22 nt, Human
ucuugaaagcauuuucuucauc

SEQ ID NO: 86392 - RNA, 22 nt, Human
ucuugaagucuuaugguuuaaa

SEQ ID NO: 86393 - RNA, 22 nt, Human
ucuugaauuguacucccauaag

SEQ ID NO: 86394 - RNA, 22 nt, Human
ucuugacaacuauacuacuuac

SEQ ID NO: 86395 - RNA, 22 nt, Human
ucuugagaaauaauuaaacaug

SEQ ID NO: 86396 - RNA, 20 nt, Human
ucuugagaacaauuucuggc

SEQ ID NO: 86397 - RNA, 22 nt, Human
ucuugagucuaaucugaacuuu

SEQ ID NO: 86398 - RNA, 22 nt, Human
ucuugauuaauaccuuagcccu

SEQ ID NO: 86399 - RNA, 22 nt, Human
ucuugauugguuguauagcuac

SEQ ID NO: 86400 - RNA, 22 nt, Human
ucuugauuguuuucugaccuua

SEQ ID NO: 86401 - RNA, 22 nt, Human
ucuugauuugaauugcaguugu

SEQ ID NO: 86402 - RNA, 22 nt, Human
ucuugauuuugugaauaaguug

SEQ ID NO: 86403 - RNA, 22 nt, Human
ugagaggcagaauggugccugc

SEQ ID NO: 86404 - RNA, 22 nt, Human
ugagaggccccagcucuuggcc

SEQ ID NO: 86405 - RNA, 22 nt, Human
ugagagggcccagagcacacca

SEQ ID NO: 86406 - RNA, 22 nt, Human
ugagagugguucagcucagaag

SEQ ID NO: 86407 - RNA, 18 nt, Human
ugagagugugugcucuug

SEQ ID NO: 86408 - RNA, 22 nt, Human
ugagaguuccuccucuuuccac

SEQ ID NO: 86409 - RNA, 22 nt, Human
ugagaguuuugacgcuuguaac

SEQ ID NO: 86410 - RNA, 21 nt, Human
ugagauaaauuuccuuacuac

SEQ ID NO: 86411 - RNA, 22 nt, Human
ugagauaacaaaauuaucuuca

SEQ ID NO: 86412 - RNA, 22 nt, Human
ugagauaauuaaaucaaaaccu

SEQ ID NO: 86413 - RNA, 22 nt, Human
ugagauaguauguagcaccuga

SEQ ID NO: 86414 - RNA, 22 nt, Human
ugagauccccaggaaggacaac

SEQ ID NO: 86415 - RNA, 22 nt, Human
ugagaucucugccuauauggau

SEQ ID NO: 86416 - RNA, 22 nt, Human
ugagaucugugcauguuaguua

SEQ ID NO: 86417 - RNA, 22 nt, Human
ugagaucuucgcucuucacaga

SEQ ID NO: 86418 - RNA, 22 nt, Human
ugagaugcaggagaugggacug

SEQ ID NO: 86419 - RNA, 21 nt, Human
ugagaugcuagaaggcaggga

SEQ ID NO: 86420 - RNA, 22 nt, Human
ugagaugcugggaacaaggaag

SEQ ID NO: 86421 - RNA, 22 nt, Human
ugagauggaaggugaggcagua

SEQ ID NO: 86422 - RNA, 22 nt, Human
ugagauggagccacugcacucu

SEQ ID NO: 86423 - RNA, 22 nt, Human
ugagauggaguuuuggggauau

SEQ ID NO: 86424 - RNA, 22 nt, Human
ugagaugggaugugcacuuggc

SEQ ID NO: 86425 - RNA, 22 nt, Human
ugagauggggagggcugcagaa

SEQ ID NO: 86426 - RNA, 22 nt, Human
ugagauggguggggagcucagg

SEQ ID NO: 86427 - RNA, 19 nt, Human
ugagauuucuuaggugauu

SEQ ID NO: 86428 - RNA, 22 nt, Human
ugagauuuggguuguuuaacau

SEQ ID NO: 86429 - RNA, 22 nt, Human
ugagauuuucagcaucacuuca

SEQ ID NO: 86430 - RNA, 22 nt, Human
ugagcaaggagcagucuuucuu

SEQ ID NO: 86431 - RNA, 22 nt, Human
ugagcaauuaacagagucuaaa

SEQ ID NO: 86432 - RNA, 22 nt, Human
ugagcacagcuuucacuagaaa

SEQ ID NO: 86433 - RNA, 22 nt, Human
ugagcaccuacuguauuccagg

SEQ ID NO: 86434 - RNA, 22 nt, Human
ugagcaccuggaccagauucug

SEQ ID NO: 86435 - RNA, 22 nt, Human
ugagcacuuuaaaauauuccca

SEQ ID NO: 86436 - RNA, 22 nt, Human
ugagcagaggaggcugccaacu

SEQ ID NO: 86437 - RNA, 18 nt, Human
ugagcagaguaaggcuuu

SEQ ID NO: 86438 - RNA, 22 nt, Human
ugagcagcaggaucuucuggua

SEQ ID NO: 86439 - RNA, 22 nt, Human
ugagcagcuuguuccgaguguu

SEQ ID NO: 86440 - RNA, 22 nt, Human
ugagcaggacugaccggccuua

SEQ ID NO: 86441 - RNA, 22 nt, Human
ugagcaggcaaacaaugguuau

SEQ ID NO: 86442 - RNA, 22 nt, Human
ugagcaggcgcagcaggagguc

SEQ ID NO: 86443 - RNA, 22 nt, Human
ugagcaggucaagacuccagcu

SEQ ID NO: 86444 - RNA, 21 nt, Human
ugagcaggugcagggaagugg

SEQ ID NO: 86445 - RNA, 22 nt, Human
uucucaggaacucagugucagc

SEQ ID NO: 86446 - RNA, 22 nt, Human
uucucaggccccugccuggacu

SEQ ID NO: 86447 - RNA, 22 nt, Human
uucucaggccuuugggauggga

SEQ ID NO: 86448 - RNA, 22 nt, Human
uucucagggcccuguguuagcu

SEQ ID NO: 86449 - RNA, 22 nt, Human
uucucaguaugugacgaggacc

SEQ ID NO: 86450 - RNA, 22 nt, Human
uucucauacaggaucucuuauu

SEQ ID NO: 86451 - RNA, 18 nt, Human
uucucauaccucacuuag

SEQ ID NO: 86452 - RNA, 22 nt, Human
uucucauagaugcuauagacag

SEQ ID NO: 86453 - RNA, 21 nt, Human
uucucaugggauaaguacaug

SEQ ID NO: 86454 - RNA, 22 nt, Human
uucucauggugucuuuauacau

SEQ ID NO: 86455 - RNA, 19 nt, Human
uucucauuccuuuccacuu

SEQ ID NO: 86456 - RNA, 22 nt, Human
uucucauucugacucaguguag

SEQ ID NO: 86457 - RNA, 22 nt, Human
uucuccaaggauacaguccugu

SEQ ID NO: 86458 - RNA, 20 nt, Human
uucuccacaggguggaggag

SEQ ID NO: 86459 - RNA, 22 nt, Human
uucuccacccacucuuuuguug

SEQ ID NO: 86460 - RNA, 22 nt, Human
uucuccagacaacagaggguga

SEQ ID NO: 86461 - RNA, 22 nt, Human
uucuccagacacaaaaucuaag

SEQ ID NO: 86462 - RNA, 22 nt, Human
uucuccagacccuccugcagac

SEQ ID NO: 86463 - RNA, 19 nt, Human
uucuccagccugaccugag

SEQ ID NO: 86464 - RNA, 21 nt, Human
uucuccagggggagcucucuc

SEQ ID NO: 86465 - RNA, 22 nt, Human
uucuccaguuauauuauguuaa

SEQ ID NO: 86466 - RNA, 22 nt, Human
uucuccauuuaacuuccuuaug

SEQ ID NO: 86467 - RNA, 22 nt, Human
uucuccucacugcagccuuuca

SEQ ID NO: 86468 - RNA, 22 nt, Human
uucuccucagcaaggcagcuuu

SEQ ID NO: 86469 - RNA, 22 nt, Human
uucuccucugcaaugacuggca

SEQ ID NO: 86470 - RNA, 22 nt, Human
uucuccugaguucccaggucua

SEQ ID NO: 86471 - RNA, 22 nt, Human
uucuccugcccuuggacuucca

SEQ ID NO: 86472 - RNA, 22 nt, Human
uucuccuuauucauaguugucu

SEQ ID NO: 86473 - RNA, 22 nt, Human
uucucuaagccuuaguuucuuc

SEQ ID NO: 86474 - RNA, 22 nt, Human
uucucuaagcuggcugaggucu

SEQ ID NO: 86475 - RNA, 22 nt, Human
uucucuaggaguucugggauca

SEQ ID NO: 86476 - RNA, 22 nt, Human
uucucuagugcaaauuguuuga

SEQ ID NO: 86477 - RNA, 22 nt, Human
uucucucugagagcaucuggaa

SEQ ID NO: 86478 - RNA, 22 nt, Human
uucucucuggaccugggaugcg

SEQ ID NO: 86479 - RNA, 22 nt, Human
uucucucuguggucccauuuug

SEQ ID NO: 86480 - RNA, 22 nt, Human
uucucucuguuauggauuuuac

SEQ ID NO: 86481 - RNA, 22 nt, Human
uucucugaaggccaugcucacu

SEQ ID NO: 86482 - RNA, 22 nt, Human
uucucugaagguuguggaacua

SEQ ID NO: 86483 - RNA, 22 nt, Human
uucucugcagcuccuggcuggg

SEQ ID NO: 86484 - RNA, 22 nt, Human
uucucugcucucacauacagaa

SEQ ID NO: 86485 - RNA, 22 nt, Human
uucucuggaacugaaacaagau

SEQ ID NO: 86486 - RNA, 22 nt, Human
uucucuggaaggcucuacggga

SEQ ID NO: 86487 - RNA, 19 nt, Human
uucucuggacuagaugcug

SEQ ID NO: 86488 - RNA, 22 nt, Human
uucucuggccugaggcgaggcc

SEQ ID NO: 86489 - RNA, 22 nt, Human
uucucuggcgcgcugugcuaug

SEQ ID NO: 86490 - RNA, 22 nt, Human
uucucuggcgguguguuuuccu

SEQ ID NO: 86491 - RNA, 22 nt, Human
uucucugggcuuuucggauccg

SEQ ID NO: 86492 - RNA, 22 nt, Human
uucucuggggacuugguuggag

SEQ ID NO: 86493 - RNA, 22 nt, Human
uucucuggguuaggggaacuau

SEQ ID NO: 86494 - RNA, 18 nt, Human
uucucugguggauguuau

SEQ ID NO: 86495 - RNA, 19 nt, Human
uucucugugcuagacucug

SEQ ID NO: 86496 - RNA, 22 nt, Human
uucucuguggauugggugagag

SEQ ID NO: 86497 - RNA, 22 nt, Human
uucucuuagcuguaaagucaau

SEQ ID NO: 86498 - RNA, 22 nt, Human
uucucuuaguauugcuaguuua

SEQ ID NO: 86499 - RNA, 22 nt, Human
uucucuucuguucagugcccaa

SEQ ID NO: 86500 - RNA, 23 nt, Human
uucucuuuagauuuacauuacuc

SEQ ID NO: 86501 - RNA, 22 nt, Human
uucucuuucugcugggcuggaa

SEQ ID NO: 86502 - RNA, 22 nt, Human
uucucuuuugugaugugagaug

SEQ ID NO: 86503 - RNA, 22 nt, Human
uucugaaccauugagcacugcc

SEQ ID NO: 86504 - RNA, 22 nt, Human
uucugaagggcuaagugucuau

SEQ ID NO: 86505 - RNA, 22 nt, Human
uucugaauggcaagcauuaggc

SEQ ID NO: 86506 - RNA, 22 nt, Human
uucugaauuucuguguaucuua

SEQ ID NO: 86507 - RNA, 17 nt, Human
uucugacccuagagcuc

SEQ ID NO: 86508 - RNA, 22 nt, Human
uucugagaaggcuguggacaca

SEQ ID NO: 86509 - RNA, 22 nt, Human
uucugagaaugcuucuggaauc

SEQ ID NO: 86510 - RNA, 22 nt, Human
uucugagacaauugagagucua

SEQ ID NO: 86511 - RNA, 22 nt, Human
uucugagagagccucucauguu

SEQ ID NO: 86512 - RNA, 23 nt, Human
uucuuacaaggcuggcccacuug

SEQ ID NO: 86513 - RNA, 22 nt, Human
uucuuacaaguaugacguagca

SEQ ID NO: 86514 - RNA, 22 nt, Human
uucuuacaaguauuccaggucc

SEQ ID NO: 86515 - RNA, 22 nt, Human
uucuuacauuagucugugcuuu

SEQ ID NO: 86516 - RNA, 22 nt, Human
uucuuaguucaacuaaaauuua

SEQ ID NO: 86517 - RNA, 22 nt, Human
uucuuauaagauaggccucagg

SEQ ID NO: 86518 - RNA, 22 nt, Human
uucuuauuuuccugaggaagaa

SEQ ID NO: 86519 - RNA, 22 nt, Human
uucuucaaagaugucuguugga

SEQ ID NO: 86520 - RNA, 22 nt, Human
uucuucaaugugcccuguuuuc

SEQ ID NO: 86521 - RNA, 22 nt, Human
uucuucagauccuacaagucug

SEQ ID NO: 86522 - RNA, 22 nt, Human
uucuucagauggugagaccucc

SEQ ID NO: 86523 - RNA, 21 nt, Human
uucuucaggccaaugcucauu

SEQ ID NO: 86524 - RNA, 22 nt, Human
uucuucagucccacuagccaca

SEQ ID NO: 86525 - RNA, 22 nt, Human
uucuucagugacaaaggcaaaa

SEQ ID NO: 86526 - RNA, 21 nt, Human
uucuucaugaugauuaauggc

SEQ ID NO: 86527 - RNA, 22 nt, Human
uucuucaugcuguugcugcuug

SEQ ID NO: 86528 - RNA, 21 nt, Human
uucuuccuaaauacagaucuc

SEQ ID NO: 86529 - RNA, 22 nt, Human
uucuuccucagcagggcugccu

SEQ ID NO: 86530 - RNA, 22 nt, Human
uucuuccuugguuuccuggaua

SEQ ID NO: 86531 - RNA, 22 nt, Human
uucuucuaaaugugcuuauuaa

SEQ ID NO: 86532 - RNA, 19 nt, Human
uucuucuaccucuaccacu

SEQ ID NO: 86533 - RNA, 23 nt, Human
uucuucucaauuaguugauucag

SEQ ID NO: 86534 - RNA, 22 nt, Human
uucuucucagggucccacaugg

SEQ ID NO: 86535 - RNA, 22 nt, Human
uucuucuccuaaggagaguccu

SEQ ID NO: 86536 - RNA, 22 nt, Human
uucuucucucauagauuaaggu

SEQ ID NO: 86537 - RNA, 22 nt, Human
uucuucuguuggcagagcauac

SEQ ID NO: 86538 - RNA, 22 nt, Human
uucuucuucuggcugcaccugg

SEQ ID NO: 86539 - RNA, 20 nt, Human
uucuugauuugauccugguu

SEQ ID NO: 86540 - RNA, 22 nt, Human
uucuuggccaccagaucucacu

SEQ ID NO: 86541 - RNA, 22 nt, Human
uucuugggaauuuuuccaacac

SEQ ID NO: 86542 - RNA, 22 nt, Human
uucuugggugugaccagucuga

SEQ ID NO: 86543 - RNA, 22 nt, Human
uucuuguuccaugaaagacaga

SEQ ID NO: 86544 - RNA, 22 nt, Human
uucuuguucugguucuguuagc

SEQ ID NO: 86545 - RNA, 22 nt, Human
uucuuguuuugcccaaguugua

SEQ ID NO: 86546 - RNA, 22 nt, Human
uucuuuaaaugaauucucugua

SEQ ID NO: 86547 - RNA, 22 nt, Human
uucuuucagaacacaagugauu

SEQ ID NO: 86548 - RNA, 20 nt, Human
uucuuucaucuacacguugu

SEQ ID NO: 86549 - RNA, 22 nt, Human
uucuuuccccauggaguucgga

SEQ ID NO: 86550 - RNA, 22 nt, Human
uucuuucccuuccagcagcucc

SEQ ID NO: 86551 - RNA, 22 nt, Human
uucuuuccucccagccuuugga

SEQ ID NO: 86552 - RNA, 22 nt, Human
uucuuucugaauacaguugagu

SEQ ID NO: 86553 - RNA, 22 nt, Human
uucuuucugggaagaguucaga

SEQ ID NO: 86554 - RNA, 22 nt, Human
uucuuucugggguccuucggcu

SEQ ID NO: 86555 - RNA, 22 nt, Human
uucuuucuuggggaacacacuc

SEQ ID NO: 86556 - RNA, 22 nt, Human
uucuuugaauagauguucccag

SEQ ID NO: 86557 - RNA, 22 nt, Human
uucuuugaguuaguacagucca

SEQ ID NO: 86558 - RNA, 22 nt, Human
uucuuuggcauuuccuguaugu

SEQ ID NO: 86559 - RNA, 22 nt, Human
uucuuuggcugccagucuggag

SEQ ID NO: 86560 - RNA, 22 nt, Human
uucuuugggcucagagagggag

SEQ ID NO: 86561 - RNA, 22 nt, Human
ugccaauuagagacauccaucu

SEQ ID NO: 86562 - RNA, 22 nt, Human
ugccacacaauuacugcugcua

SEQ ID NO: 86563 - RNA, 22 nt, Human
ugccacaccaacaucuuucagc

SEQ ID NO: 86564 - RNA, 22 nt, Human
ugccacagagacuuucauugua

SEQ ID NO: 86565 - RNA, 22 nt, Human
ugccacaggcaaucccugcacg

SEQ ID NO: 86566 - RNA, 22 nt, Human
ugccacaggguccucaggccag

SEQ ID NO: 86567 - RNA, 22 nt, Human
ugccaccaggagaaccagugca

SEQ ID NO: 86568 - RNA, 22 nt, Human
ugccaccccucugcacccucag

SEQ ID NO: 86569 - RNA, 22 nt, Human
ugccacccuggcggcagccugc

SEQ ID NO: 86570 - RNA, 22 nt, Human
ugccaccuggacaaccuuaugc

SEQ ID NO: 86571 - RNA, 22 nt, Human
ugccacugggcaugcagauguc

SEQ ID NO: 86572 - RNA, 22 nt, Human
ugccagaacagcucaucuggcc

SEQ ID NO: 86573 - RNA, 19 nt, Human
ugccagagauacucccaga

SEQ ID NO: 86574 - RNA, 23 nt, Human
ugccagaggcagucacaguggug

SEQ ID NO: 86575 - RNA, 22 nt, Human
ugccagaguuacaugaggguca

SEQ ID NO: 86576 - RNA, 22 nt, Human
ugccagcacaaguuaagagauc

SEQ ID NO: 86577 - RNA, 19 nt, Human
ugccagcauuaggcugaag

SEQ ID NO: 86578 - RNA, 22 nt, Human
ugccagcccaccuuggggccuc

SEQ ID NO: 86579 - RNA, 22 nt, Human
ugccagccuggccugagucuuu

SEQ ID NO: 86580 - RNA, 17 nt, Human
ugccagccugucccagg

SEQ ID NO: 86581 - RNA, 22 nt, Human
ugccagcuagagaagcuagaaa

SEQ ID NO: 86582 - RNA, 19 nt, Human
ugccagcucacaggagcuc

SEQ ID NO: 86583 - RNA, 22 nt, Human
ugccaggagagugcaugcaggg

SEQ ID NO: 86584 - RNA, 22 nt, Human
ugccaggaggggacaccuccuc

SEQ ID NO: 86585 - RNA, 22 nt, Human
ugccaggauauaagagugcgau

SEQ ID NO: 86586 - RNA, 22 nt, Human
ugccaggcauauggccucuuug

SEQ ID NO: 86587 - RNA, 22 nt, Human
ugccaggcauguaguagacuug

SEQ ID NO: 86588 - RNA, 22 nt, Human
ugccaggccacguagcuucaag

SEQ ID NO: 86589 - RNA, 22 nt, Human
ugccaggcccugugcuggaugc

SEQ ID NO: 86590 - RNA, 22 nt, Human
ugccaggcuguccugggccugg

SEQ ID NO: 86591 - RNA, 23 nt, Human
ugccagggcccugugugcaaugc

SEQ ID NO: 86592 - RNA, 22 nt, Human
ugccagucucacccuggguccu

SEQ ID NO: 86593 - RNA, 22 nt, Human
ugccagugaaacauggaagaau

SEQ ID NO: 86594 - RNA, 22 nt, Human
ugccagugcuugugucugagca

SEQ ID NO: 86595 - RNA, 22 nt, Human
ugccauacuauaaggcugucaa

SEQ ID NO: 86596 - RNA, 22 nt, Human
ugccauagcaaugguaagcuga

SEQ ID NO: 86597 - RNA, 22 nt, Human
ugccauauuauugagcauauua

SEQ ID NO: 86598 - RNA, 22 nt, Human
ugccauauugcaaagugucugc

SEQ ID NO: 86599 - RNA, 21 nt, Human
ugccaucucugugggaccagg

SEQ ID NO: 86600 - RNA, 22 nt, Human
ugccaucugcacccaccugccc

SEQ ID NO: 86601 - RNA, 22 nt, Human
ugccaugcccaccucccuucug

SEQ ID NO: 86602 - RNA, 22 nt, Human
ugccauuuacugagauuagaag

SEQ ID NO: 86603 - RNA, 22 nt, Human
ugccauuucucaaauaugacua

SEQ ID NO: 86604 - RNA, 21 nt, Human
ugccauuuuaaccaagugugc

SEQ ID NO: 86605 - RNA, 22 nt, Human
ugcccaaguccuccaccgaggu

SEQ ID NO: 86606 - RNA, 22 nt, Human
ugcccacaccugggggaggcug

SEQ ID NO: 86607 - RNA, 22 nt, Human
ugcccacaucugcuuauuucau

SEQ ID NO: 86608 - RNA, 22 nt, Human
ugcccaccuuuacugugauuua

SEQ ID NO: 86609 - RNA, 22 nt, Human
ugcccacuggauaaugcaaacu

SEQ ID NO: 86610 - RNA, 22 nt, Human
ugcccagcagggagcuaccugg

SEQ ID NO: 86611 - RNA, 22 nt, Human
ugcccagccccuaucccuggga

SEQ ID NO: 86612 - RNA, 22 nt, Human
ugcccagcgcccacauucuguc

SEQ ID NO: 86613 - RNA, 22 nt, Human
ugcccagcuauuccuuucuuag

SEQ ID NO: 86614 - RNA, 22 nt, Human
ugcccagcuucuuacuuuuaaa

SEQ ID NO: 86615 - RNA, 19 nt, Human
ugcccaggccagguugggc

SEQ ID NO: 86616 - RNA, 22 nt, Human
ugcccagggauaagccuagaga

SEQ ID NO: 86617 - RNA, 22 nt, Human
ugcccagucuccgggccagccc

SEQ ID NO: 86618 - RNA, 21 nt, Human
ugcccaugagcagaagucacc

SEQ ID NO: 86619 - RNA, 22 nt, Human
ugccccaggugcugagguugga

SEQ ID NO: 86620 - RNA, 22 nt, Human
ugccccucagggaacggguauc

SEQ ID NO: 86621 - RNA, 22 nt, Human
ugaagccauuacuguguuaggg

SEQ ID NO: 86622 - RNA, 22 nt, Human
ugaagcuacaaaagauuauugc

SEQ ID NO: 86623 - RNA, 22 nt, Human
ugaagcuagcaggaagagcagg

SEQ ID NO: 86624 - RNA, 22 nt, Human
ugaagcuaguauuaacucagau

SEQ ID NO: 86625 - RNA, 22 nt, Human
ugaagcuauugguaaggaagug

SEQ ID NO: 86626 - RNA, 22 nt, Human
ugaagcuguaggcaugggcagc

SEQ ID NO: 86627 - RNA, 22 nt, Human
ugaagcugugggcaguggagcc

SEQ ID NO: 86628 - RNA, 22 nt, Human
ugaaggaaugaguauacuguuu

SEQ ID NO: 86629 - RNA, 22 nt, Human
ugaaggaauggaggaucagagc

SEQ ID NO: 86630 - RNA, 21 nt, Human
ugaaggagaggaccgagugcu

SEQ ID NO: 86631 - RNA, 22 nt, Human
ugaaggcacaguuuaaccagua

SEQ ID NO: 86632 - RNA, 22 nt, Human
ugaaggcacguggguggauacu

SEQ ID NO: 86633 - RNA, 22 nt, Human
ugaaggcagugauuuuguuugg

SEQ ID NO: 86634 - RNA, 22 nt, Human
ugaaggcauugaugaaggaauc

SEQ ID NO: 86635 - RNA, 22 nt, Human
ugaaggccacuuccugugagcu

SEQ ID NO: 86636 - RNA, 22 nt, Human
ugaaggccagggauuugcagcc

SEQ ID NO: 86637 - RNA, 22 nt, Human
ugaaggcccagccacagaaugg

SEQ ID NO: 86638 - RNA, 22 nt, Human
ugaaggcuguuggauggggaag

SEQ ID NO: 86639 - RNA, 22 nt, Human
ugaaggcuuucuccccucuggu

SEQ ID NO: 86640 - RNA, 22 nt, Human
ugaaggugaccugacaguggcu

SEQ ID NO: 86641 - RNA, 20 nt, Human
ugaaggugacuccuuucuug

SEQ ID NO: 86642 - RNA, 22 nt, Human
ugaagguggaagggugguucug

SEQ ID NO: 86643 - RNA, 22 nt, Human
ugaagguggggcuuaggaaucu

SEQ ID NO: 86644 - RNA, 22 nt, Human
ugaaguauccaucuuguucuag

SEQ ID NO: 86645 - RNA, 22 nt, Human
ugaagucagggauuccaugaag

SEQ ID NO: 86646 - RNA, 22 nt, Human
ugaagucucuguuuucucauuu

SEQ ID NO: 86647 - RNA, 22 nt, Human
ugaaguggacccuggacagacc

SEQ ID NO: 86648 - RNA, 22 nt, Human
ugaaguuagaacuaugaggaua

SEQ ID NO: 86649 - RNA, 22 nt, Human
ugaaguucacugagaguucacc

SEQ ID NO: 86650 - RNA, 22 nt, Human
ugaaguuuaagguuagauaagu

SEQ ID NO: 86651 - RNA, 22 nt, Human
ugaaguuuaauuuuggacauga

SEQ ID NO: 86652 - RNA, 22 nt, Human
ugaaguuucacgcgucauucaa

SEQ ID NO: 86653 - RNA, 22 nt, Human
ugaauaaacuaugaggaggaau

SEQ ID NO: 86654 - RNA, 22 nt, Human
ugaauaagaauuauuauaauga

SEQ ID NO: 86655 - RNA, 22 nt, Human
ugaauaauccacagucauucau

SEQ ID NO: 86656 - RNA, 22 nt, Human
ugaauaaucuuggguauuaaua

SEQ ID NO: 86657 - RNA, 22 nt, Human
ugaauaauuaugggaguccuaa

SEQ ID NO: 86658 - RNA, 19 nt, Human
ugaauacagagauacagaa

SEQ ID NO: 86659 - RNA, 22 nt, Human
ugaauacuauuucauaaugugg

SEQ ID NO: 86660 - RNA, 22 nt, Human
ugaauagagcugcaguggacau

SEQ ID NO: 86661 - RNA, 22 nt, Human
ugaauagauggugacaguauga

SEQ ID NO: 86662 - RNA, 21 nt, Human
ugaauagggccagaaccaaag

SEQ ID NO: 86663 - RNA, 22 nt, Human
ugaauaguaagagaauauuugc

SEQ ID NO: 86664 - RNA, 22 nt, Human
ugaauaguucuacuacuugaca

SEQ ID NO: 86665 - RNA, 22 nt, Human
ugaauauguuccucacaaguuc

SEQ ID NO: 86666 - RNA, 23 nt, Human
ugaaucaauuaugggauucaaug

SEQ ID NO: 86667 - RNA, 22 nt, Human
ugaaucaugccacugagcuccc

SEQ ID NO: 86668 - RNA, 22 nt, Human
ugaaucauggauaaauagcuua

SEQ ID NO: 86669 - RNA, 22 nt, Human
ugaauccuaguugaagauaagg

SEQ ID NO: 86670 - RNA, 22 nt, Human
ugaaucuauguugccccauaau

SEQ ID NO: 86671 - RNA, 22 nt, Human
ugaaucuggaucuaugaucaau

SEQ ID NO: 86672 - RNA, 22 nt, Human
ugaaugaacuaaaucauaguuc

SEQ ID NO: 86673 - RNA, 22 nt, Human
ugaaugaauccuaacaaagaca

SEQ ID NO: 86674 - RNA, 21 nt, Human
ugagcaggugcugcuuuuaug

SEQ ID NO: 86675 - RNA, 22 nt, Human
ugagcauuaccugaggccacug

SEQ ID NO: 86676 - RNA, 22 nt, Human
ugagcauuggaucaaaugacuu

SEQ ID NO: 86677 - RNA, 22 nt, Human
ugagccaagaucaugccguugu

SEQ ID NO: 86678 - RNA, 22 nt, Human
ugagccaagcagcuucccaggg

SEQ ID NO: 86679 - RNA, 22 nt, Human
ugagccagcaggccuccagugg

SEQ ID NO: 86680 - RNA, 22 nt, Human
ugagccagccuugcagcugugc

SEQ ID NO: 86681 - RNA, 22 nt, Human
ugagccagcuccuugccuguca

SEQ ID NO: 86682 - RNA, 22 nt, Human
ugagccaggcacugcuccugga

SEQ ID NO: 86683 - RNA, 20 nt, Human
ugagccaggcuaggaagggc

SEQ ID NO: 86684 - RNA, 22 nt, Human
ugagccaggcucaagugauccu

SEQ ID NO: 86685 - RNA, 22 nt, Human
ugagccaggguuuccggcugcu

SEQ ID NO: 86686 - RNA, 22 nt, Human
ugagccaguggaagauggcagu

SEQ ID NO: 86687 - RNA, 22 nt, Human
ugagcccaggaggcagagguug

SEQ ID NO: 86688 - RNA, 23 nt, Human
ugagcccaguuuucccucuugcc

SEQ ID NO: 86689 - RNA, 22 nt, Human
ugagcccugaccuagccuggcc

SEQ ID NO: 86690 - RNA, 20 nt, Human
ugagccugcuguaggaggcc

SEQ ID NO: 86691 - RNA, 22 nt, Human
ugagccugggcuuucucuggag

SEQ ID NO: 86692 - RNA, 22 nt, Human
ugagccuggguggucgaggcug

SEQ ID NO: 86693 - RNA, 22 nt, Human
ugagccugguugcagugucugg

SEQ ID NO: 86694 - RNA, 22 nt, Human
ugagccuguggggugacaacca

SEQ ID NO: 86695 - RNA, 20 nt, Human
ugagccuugaggagugacug

SEQ ID NO: 86696 - RNA, 22 nt, Human
ugagcucaagcaauucacccgc

SEQ ID NO: 86697 - RNA, 22 nt, Human
ugagcucuaagauccccucaag

SEQ ID NO: 86698 - RNA, 22 nt, Human
ugagcucucagggacagacuau

SEQ ID NO: 86699 - RNA, 22 nt, Human
ugagcugauggcaucccuguuu

SEQ ID NO: 86700 - RNA, 22 nt, Human
ugagcugcaagaaaauuucagu

SEQ ID NO: 86701 - RNA, 22 nt, Human
ugagcugcagugagcugagaug

SEQ ID NO: 86702 - RNA, 19 nt, Human
ugagcugcugcugcccauc

SEQ ID NO: 86703 - RNA, 22 nt, Human
ugagcuggaggacaggagggua

SEQ ID NO: 86704 - RNA, 22 nt, Human
ugagcuggagucgugagcaaag

SEQ ID NO: 86705 - RNA, 22 nt, Human
ugagcuggagucuguggcuccu

SEQ ID NO: 86706 - RNA, 22 nt, Human
ugagcuggauccaacuccguuu

SEQ ID NO: 86707 - RNA, 19 nt, Human
ugagcuggcugagccucuc

SEQ ID NO: 86708 - RNA, 22 nt, Human
ugagcugggaguggugaugagg

SEQ ID NO: 86709 - RNA, 22 nt, Human
ugagcugguucuugaggcauga

SEQ ID NO: 86710 - RNA, 22 nt, Human
ugagcuguacuccuccccaggg

SEQ ID NO: 86711 - RNA, 22 nt, Human
ugagcuguauauuguuuuaaua

SEQ ID NO: 86712 - RNA, 22 nt, Human
ugagcugugucuuggugagagu

SEQ ID NO: 86713 - RNA, 22 nt, Human
ugagcugugugacauugagcca

SEQ ID NO: 86714 - RNA, 22 nt, Human
ugagcuuacgugggaacagacu

SEQ ID NO: 86715 - RNA, 22 nt, Human
ugagcuuacuucuguacacaga

SEQ ID NO: 86716 - RNA, 22 nt, Human
ugagcuucaaaguuggaucuga

SEQ ID NO: 86717 - RNA, 17 nt, Human
ugagcuucaaucaggug

SEQ ID NO: 86718 - RNA, 22 nt, Human
ugagcuuccucccugcauccau

SEQ ID NO: 86719 - RNA, 22 nt, Human
ugagcuuucauguaugaaaaga

SEQ ID NO: 86720 - RNA, 22 nt, Human
ugagcuuuguuguuaguauauu

SEQ ID NO: 86721 - RNA, 22 nt, Human
ugaggaaagaaaggcaugcaug

SEQ ID NO: 86722 - RNA, 22 nt, Human
ugaggaagaacaagaauuuaga

SEQ ID NO: 86723 - RNA, 22 nt, Human
ugaggaagccaaacagcuacac

SEQ ID NO: 86724 - RNA, 22 nt, Human
ugaggaaggaauugagguuuua

SEQ ID NO: 86725 - RNA, 22 nt, Human
ugaggaagggcacacggacccu

SEQ ID NO: 86726 - RNA, 23 nt, Human
ugaggaaguaauuguaaaggucu

SEQ ID NO: 86727 - RNA, 22 nt, Human
ugaggaaugcugagcagaggaa

SEQ ID NO: 86728 - RNA, 22 nt, Human
ugaggacaaucccuaacucaga

SEQ ID NO: 86729 - RNA, 19 nt, Human
ugaggagcagcugguugau

SEQ ID NO: 86730 - RNA, 22 nt, Human
uggccagguguggguucucaga

SEQ ID NO: 86731 - RNA, 22 nt, Human
uggccagucuuagcugugccug

SEQ ID NO: 86732 - RNA, 22 nt, Human
uggccagugucggaggccagga

SEQ ID NO: 86733 - RNA, 22 nt, Human
uggccagugugugcugccggcu

SEQ ID NO: 86734 - RNA, 22 nt, Human
uggccaguguuggcuagggaca

SEQ ID NO: 86735 - RNA, 22 nt, Human
uggccaguugaagacaaugcuc

SEQ ID NO: 86736 - RNA, 22 nt, Human
uggcccaaagcagcccagcagg

SEQ ID NO: 86737 - RNA, 22 nt, Human
uggcccaagucugcuagaagag

SEQ ID NO: 86738 - RNA, 19 nt, Human
uggcccagaugguccuggg

SEQ ID NO: 86739 - RNA, 22 nt, Human
uggcccagcacuccaaguaggg

SEQ ID NO: 86740 - RNA, 22 nt, Human
uggcccaggaggccagagggca

SEQ ID NO: 86741 - RNA, 22 nt, Human
uggccccacagggccuuuucag

SEQ ID NO: 86742 - RNA, 22 nt, Human
uggccccaucaagggaugaguu

SEQ ID NO: 86743 - RNA, 22 nt, Human
uggccccccagagcuggaggac

SEQ ID NO: 86744 - RNA, 22 nt, Human
uggccccuggcacacggaggau

SEQ ID NO: 86745 - RNA, 22 nt, Human
uggcccucugcaagauucugga

SEQ ID NO: 86746 - RNA, 22 nt, Human
uggcccugaaggccuugagcau

SEQ ID NO: 86747 - RNA, 22 nt, Human
uggcccugaaucaaggccagca

SEQ ID NO: 86748 - RNA, 22 nt, Human
uggcccugaggggcugugcccc

SEQ ID NO: 86749 - RNA, 22 nt, Human
uggcccugcagaacuagccugg

SEQ ID NO: 86750 - RNA, 22 nt, Human
uggcccugccacucacugcuga

SEQ ID NO: 86751 - RNA, 22 nt, Human
uggcccugcccucuucaucuuu

SEQ ID NO: 86752 - RNA, 22 nt, Human
uggcccugccgcacuauccuca

SEQ ID NO: 86753 - RNA, 22 nt, Human
uggcccugcuggacacgccugc

SEQ ID NO: 86754 - RNA, 21 nt, Human
uggcccuggccacggcugcca

SEQ ID NO: 86755 - RNA, 22 nt, Human
uggcccuggguggaauguccca

SEQ ID NO: 86756 - RNA, 22 nt, Human
uggcccuuguucaaauauguca

SEQ ID NO: 86757 - RNA, 22 nt, Human
uggccucaaucuguccuccagc

SEQ ID NO: 86758 - RNA, 22 nt, Human
uggccucagauuauugcacagu

SEQ ID NO: 86759 - RNA, 22 nt, Human
uggccucucuaccaggcagccu

SEQ ID NO: 86760 - RNA, 22 nt, Human
uggccucugcacugggcucccc

SEQ ID NO: 86761 - RNA, 22 nt, Human
uggccucuggcugaggacuaac

SEQ ID NO: 86762 - RNA, 22 nt, Human
uggccucuuaaggaugacacaa

SEQ ID NO: 86763 - RNA, 22 nt, Human
uggccucuuaggacauccucua

SEQ ID NO: 86764 - RNA, 22 nt, Human
uggccugaguugucugcaggcc

SEQ ID NO: 86765 - RNA, 22 nt, Human
uggccugcaagcuaaaaaucua

SEQ ID NO: 86766 - RNA, 22 nt, Human
uggccugcagaggcuguggggc

SEQ ID NO: 86767 - RNA, 22 nt, Human
uggccugcagcucucagggaag

SEQ ID NO: 86768 - RNA, 22 nt, Human
uggccugccacugccacgccac

SEQ ID NO: 86769 - RNA, 22 nt, Human
uggccugcccagagcagcucug

SEQ ID NO: 86770 - RNA, 22 nt, Human
ugguacaauggcaucuaucuau

SEQ ID NO: 86771 - RNA, 22 nt, Human
ugguacaauuaaaauaauuuug

SEQ ID NO: 86772 - RNA, 17 nt, Human
ugguacaggcugaggga

SEQ ID NO: 86773 - RNA, 22 nt, Human
ugguacauggguagguaucucu

SEQ ID NO: 86774 - RNA, 22 nt, Human
ugguaccagcuguguguucacu

SEQ ID NO: 86775 - RNA, 22 nt, Human
ugguaccauguugcuuugauuu

SEQ ID NO: 86776 - RNA, 22 nt, Human
ugguagcaacaucucaguggcu

SEQ ID NO: 86777 - RNA, 22 nt, Human
ugguaggagggaaaugcggguu

SEQ ID NO: 86778 - RNA, 22 nt, Human
ugguauaaguaaucauaauugc

SEQ ID NO: 86779 - RNA, 22 nt, Human
ugguauaauacaguaaguguug

SEQ ID NO: 86780 - RNA, 22 nt, Human
ugguauaugcauggagguauca

SEQ ID NO: 86781 - RNA, 22 nt, Human
ugguaucaaacaauuaauuaga

SEQ ID NO: 86782 - RNA, 22 nt, Human
ugguaugaccguggugcaagca

SEQ ID NO: 86783 - RNA, 22 nt, Human
ugguauguaauaaguguucuaa

SEQ ID NO: 86784 - RNA, 22 nt, Human
ugguauuucagcuuuuguaucu

SEQ ID NO: 86785 - RNA, 22 nt, Human
ugguauuugucauucgaguucu

SEQ ID NO: 86786 - RNA, 22 nt, Human
uggucaaaaacucucaguggac

SEQ ID NO: 86787 - RNA, 22 nt, Human
uggucaaaaaggccuagacaca

SEQ ID NO: 86788 - RNA, 22 nt, Human
uggucaaaagaaagcucagaac

SEQ ID NO: 86789 - RNA, 22 nt, Human
uggucaaaagcuacuaugaaug

SEQ ID NO: 86790 - RNA, 22 nt, Human
uggucaaaugccaaucuguagu

SEQ ID NO: 86791 - RNA, 22 nt, Human
uggucaaauuuagucucuggaa

SEQ ID NO: 86792 - RNA, 22 nt, Human
uggucaagauuacacacuggug

SEQ ID NO: 86793 - RNA, 22 nt, Human
uggucagagaaguagggacaau

SEQ ID NO: 86794 - RNA, 22 nt, Human
uggucagcguuugucagagcag

SEQ ID NO: 86795 - RNA, 23 nt, Human
uggucagugccuugcauguggga

SEQ ID NO: 86796 - RNA, 22 nt, Human
uggucauguaguagagacagcu

SEQ ID NO: 86797 - RNA, 22 nt, Human
uggucauuuuuauuucaguugc

SEQ ID NO: 86798 - RNA, 22 nt, Human
ugguccagacauuucugaggua

SEQ ID NO: 86799 - RNA, 22 nt, Human
ugguccagaugccuuggcuuua

SEQ ID NO: 86800 - RNA, 20 nt, Human
ugguccaggaccuggugucc

SEQ ID NO: 86801 - RNA, 22 nt, Human
uggucccuagcacagcuguccu

SEQ ID NO: 86802 - RNA, 22 nt, Human
uggucccuaggaaagcaguguu

SEQ ID NO: 86803 - RNA, 22 nt, Human
uggucccugaucuaaugucuca

SEQ ID NO: 86804 - RNA, 22 nt, Human
uggucccuuucuacugagcaca

SEQ ID NO: 86805 - RNA, 20 nt, Human
ugguccucacagguccuccc

SEQ ID NO: 86806 - RNA, 22 nt, Human
ugguccugagcaccagccugac

SEQ ID NO: 86807 - RNA, 23 nt, Human
ugguccugccaacggugccccuc

SEQ ID NO: 86808 - RNA, 22 nt, Human
ugguccuggagaguguuccaua

SEQ ID NO: 86809 - RNA, 22 nt, Human
ugguccuggugcaagugcauuu

SEQ ID NO: 86810 - RNA, 23 nt, Human
ugguccugguugaggugggcccc

SEQ ID NO: 86811 - RNA, 20 nt, Human
ugguccugucccacccacuc

SEQ ID NO: 86812 - RNA, 22 nt, Human
ugguccuguguucuuccugccu

SEQ ID NO: 86813 - RNA, 22 nt, Human
ugguccuucguggugcaguucu

SEQ ID NO: 86814 - RNA, 22 nt, Human
ugguccuucucugccugcagug

SEQ ID NO: 86815 - RNA, 22 nt, Human
ugguccuucuugaagagugagu

SEQ ID NO: 86816 - RNA, 22 nt, Human
ugguccuuguaggcauuugagc

SEQ ID NO: 86817 - RNA, 22 nt, Human
uggucuaaauauggcucuaaau

SEQ ID NO: 86818 - RNA, 19 nt, Human
uggucuaaaugugugcccc

SEQ ID NO: 86819 - RNA, 22 nt, Human
uggucuaagagccuaacugcug

SEQ ID NO: 86820 - RNA, 23 nt, Human
uggucucagccugugagagcuga

SEQ ID NO: 86821 - RNA, 22 nt, Human
uggucucucuccugcaacaacu

SEQ ID NO: 86822 - RNA, 22 nt, Human
uggucucugagccuuccugugg

SEQ ID NO: 86823 - RNA, 22 nt, Human
uggucucugugcucgggcaugg

SEQ ID NO: 86824 - RNA, 22 nt, Human
uggucugaacuaagacaguagu

SEQ ID NO: 86825 - RNA, 22 nt, Human
uggucugacuacaauaggaaga

SEQ ID NO: 86826 - RNA, 22 nt, Human
uggucugacuugcuuuggacag

SEQ ID NO: 86827 - RNA, 23 nt, Human
uggucugacuuguagcugugaga

SEQ ID NO: 86828 - RNA, 22 nt, Human
uggucugauauuuuuucuuacc

SEQ ID NO: 86829 - RNA, 22 nt, Human
uggucugauuucuuucuggagu

SEQ ID NO: 86830 - RNA, 20 nt, Human
uggucuggagccagugagga

SEQ ID NO: 86831 - RNA, 22 nt, Human
uggucugguuauuucuuaauga

SEQ ID NO: 86832 - RNA, 22 nt, Human
uggucuuagcuggaaggaggga

SEQ ID NO: 86833 - RNA, 22 nt, Human
uggucuucuuuguugcuauuau

SEQ ID NO: 86834 - RNA, 22 nt, Human
uggucuuuaagguagcugucau

SEQ ID NO: 86835 - RNA, 22 nt, Human
uggugacacgaaguuugcuauc

SEQ ID NO: 86836 - RNA, 22 nt, Human
uggugagagcagaccuucuuuu

SEQ ID NO: 86837 - RNA, 22 nt, Human
uggugagaugcagcaacagaca

SEQ ID NO: 86838 - RNA, 22 nt, Human
uggugaggaagaccugcuccug

SEQ ID NO: 86839 - RNA, 22 nt, Human
uggggguguccuggugcacaca

SEQ ID NO: 86840 - RNA, 22 nt, Human
uggggucagcaggccuggccug

SEQ ID NO: 86841 - RNA, 22 nt, Human
uggggucccacucagcuccccu

SEQ ID NO: 86842 - RNA, 22 nt, Human
uggggugggcaugcgcuguccu

SEQ ID NO: 86843 - RNA, 22 nt, Human
ugggguggugggaaccaaguag

SEQ ID NO: 86844 - RNA, 22 nt, Human
uggguaaaaugaguuaggagaa

SEQ ID NO: 86845 - RNA, 22 nt, Human
uggguaaacaauguuugccuaa

SEQ ID NO: 86846 - RNA, 22 nt, Human
uggguagcagggcugagcugug

SEQ ID NO: 86847 - RNA, 22 nt, Human
uggguaggaccagaaaugcacu

SEQ ID NO: 86848 - RNA, 22 nt, Human
uggguaggccaggaagcagugu

SEQ ID NO: 86849 - RNA, 22 nt, Human
ugggucacaaaggccagaugau

SEQ ID NO: 86850 - RNA, 22 nt, Human
ugggucaccacuucagaggaga

SEQ ID NO: 86851 - RNA, 22 nt, Human
ugggucaggcugggaguccuga

SEQ ID NO: 86852 - RNA, 22 nt, Human
ugggucaguuugggggccagcc

SEQ ID NO: 86853 - RNA, 22 nt, Human
uggguccaguguccuggcuaug

SEQ ID NO: 86854 - RNA, 22 nt, Human
ugggucccucuggaguaguaca

SEQ ID NO: 86855 - RNA, 22 nt, Human
uggguccucugagagggcagcg

SEQ ID NO: 86856 - RNA, 20 nt, Human
uggguccugcacauucucca

SEQ ID NO: 86857 - RNA, 22 nt, Human
uggguccugcacugcaagcacc

SEQ ID NO: 86858 - RNA, 20 nt, Human
uggguccugcuucuuccuga

SEQ ID NO: 86859 - RNA, 22 nt, Human
uggguccuggaaggcgacaggu

SEQ ID NO: 86860 - RNA, 22 nt, Human
uggguccuggcuuugucagggu

SEQ ID NO: 86861 - RNA, 20 nt, Human
uggguccugugggagaagaa

SEQ ID NO: 86862 - RNA, 20 nt, Human
ugggucugcuuggcuucagu

SEQ ID NO: 86863 - RNA, 22 nt, Human
ugggucuguagggcuguccaau

SEQ ID NO: 86864 - RNA, 22 nt, Human
ugggugaaaauuuugguggcac

SEQ ID NO: 86865 - RNA, 22 nt, Human
ugggugaccccagaagaggauc

SEQ ID NO: 86866 - RNA, 22 nt, Human
ugggugaggaugaugaggcagc

SEQ ID NO: 86867 - RNA, 22 nt, Human
ugggugcaggucuugugccagg

SEQ ID NO: 86868 - RNA, 22 nt, Human
ugggugcaugugagcacgugca

SEQ ID NO: 86869 - RNA, 22 nt, Human
ugggugccaaccucugguggcc

SEQ ID NO: 86870 - RNA, 20 nt, Human
ugggugccugccacggggcc

SEQ ID NO: 86871 - RNA, 22 nt, Human
ugggugcucugcuucccugcac

SEQ ID NO: 86872 - RNA, 17 nt, Human
ugggugcugggaugagg

SEQ ID NO: 86873 - RNA, 22 nt, Human
uggguggcacuucuggggucca

SEQ ID NO: 86874 - RNA, 22 nt, Human
uggguggcagcuucagcauguu

SEQ ID NO: 86875 - RNA, 22 nt, Human
ugggugguuuaugaguggguuu

SEQ ID NO: 86876 - RNA, 22 nt, Human
uggguuaaaaguugaaugaauu

SEQ ID NO: 86877 - RNA, 22 nt, Human
uggguucccugacagcgaugcu

SEQ ID NO: 86878 - RNA, 22 nt, Human
uggguucuuaaagggcuagguu

SEQ ID NO: 86879 - RNA, 22 nt, Human
uggguucuuucacuucucaguu

SEQ ID NO: 86880 - RNA, 22 nt, Human
uggguuuaaacucaacucuaaa

SEQ ID NO: 86881 - RNA, 22 nt, Human
ugguaaaauauuacaaggcacu

SEQ ID NO: 86882 - RNA, 22 nt, Human
ugguaaagaaaugucagggcag

SEQ ID NO: 86883 - RNA, 22 nt, Human
ugguaaagaaggcuagaucuga

SEQ ID NO: 86884 - RNA, 19 nt, Human
ugguaaagacuguccccca

SEQ ID NO: 86885 - RNA, 20 nt, Human
ugguaaaggagggcuggagg

SEQ ID NO: 86886 - RNA, 22 nt, Human
ugguaaagugcucuaacuucau

SEQ ID NO: 86887 - RNA, 22 nt, Human
ugguaaaguguacugaauauga

SEQ ID NO: 86888 - RNA, 22 nt, Human
ugguaaauauguccauucucuu

SEQ ID NO: 86889 - RNA, 22 nt, Human
ugguaaaugucuaacaaucacu

SEQ ID NO: 86890 - RNA, 22 nt, Human
ugguaaauuauuuuuauauccc

SEQ ID NO: 86891 - RNA, 22 nt, Human
ugguaaggacuuaguuaucaau

SEQ ID NO: 86892 - RNA, 22 nt, Human
ugguaagguuccagaucuagaa

SEQ ID NO: 86893 - RNA, 22 nt, Human
ugguaagguucuacaguguuga

SEQ ID NO: 86894 - RNA, 22 nt, Human
ugguaauuauggauacuuaaau

SEQ ID NO: 86895 - RNA, 22 nt, Human
ugguaauugagaugucuuuucu

SEQ ID NO: 86896 - RNA, 22 nt, Human
ugguacaaaaguaauugcguga

SEQ ID NO: 86897 - RNA, 22 nt, Human
ugguacaacuguauuaggcaaa

SEQ ID NO: 86898 - RNA, 22 nt, Human
ugguacaagauguucuaacuga

SEQ ID NO: 86899 - RNA, 22 nt, Human
ugguacaaggguugggagacag

SEQ ID NO: 86900 - RNA, 22 nt, Human
ugguacauaaauggauguuuuc

SEQ ID NO: 86901 - RNA, 22 nt, Human
ugguaccaugacaaaugucagg

SEQ ID NO: 86902 - RNA, 22 nt, Human
ugguaccugaaugaagggagga

SEQ ID NO: 86903 - RNA, 22 nt, Human
ugguacugagaauagcgucuac

SEQ ID NO: 86904 - RNA, 22 nt, Human
ugguaggauagugacuuauaug

SEQ ID NO: 86905 - RNA, 22 nt, Human
ugguagugacucccccagggcu

SEQ ID NO: 86906 - RNA, 22 nt, Human
ugguauauuuugcucuauggug

SEQ ID NO: 86907 - RNA, 22 nt, Human
ugguaucagagccaucuguauu

SEQ ID NO: 86908 - RNA, 22 nt, Human
ugguaucguguuggcacucagu

SEQ ID NO: 86909 - RNA, 22 nt, Human
ugguauggucaaagccugugua

SEQ ID NO: 86910 - RNA, 22 nt, Human
ugguauguaaauuguaacucaa

SEQ ID NO: 86911 - RNA, 22 nt, Human
ugguauucuuucuguagaucau

SEQ ID NO: 86912 - RNA, 22 nt, Human
ugguauuuaauauaugagaguu

SEQ ID NO: 86913 - RNA, 22 nt, Human
uggucaaagaccaggaaaugcu

SEQ ID NO: 86914 - RNA, 22 nt, Human
uggucaaguuaagauaagguga

SEQ ID NO: 86915 - RNA, 22 nt, Human
uggucagaacucagcgugcuug

SEQ ID NO: 86916 - RNA, 22 nt, Human
uggucagaaggaagggcuccua

SEQ ID NO: 86917 - RNA, 22 nt, Human
uggucagaugcugaguggaucu

SEQ ID NO: 86918 - RNA, 22 nt, Human
uuaaggcugauaagucagauau

SEQ ID NO: 86919 - RNA, 22 nt, Human
uuaaggcuguggggauuacugc

SEQ ID NO: 86920 - RNA, 22 nt, Human
uuaagggccauuauggaugggu

SEQ ID NO: 86921 - RNA, 22 nt, Human
uuaagguagucagccucugugu

SEQ ID NO: 86922 - RNA, 17 nt, Human
uuaagguggaucagcac

SEQ ID NO: 86923 - RNA, 22 nt, Human
uuaaguaagaccuuaugucuug

SEQ ID NO: 86924 - RNA, 22 nt, Human
uuaaguacaggguuagugacgg

SEQ ID NO: 86925 - RNA, 22 nt, Human
uuaaguauauccauuugacugg

SEQ ID NO: 86926 - RNA, 22 nt, Human
uuaagucacuggacuugccuag

SEQ ID NO: 86927 - RNA, 22 nt, Human
uuaagucacuuaucuaaagaca

SEQ ID NO: 86928 - RNA, 22 nt, Human
uuaagucauuucugauuauaga

SEQ ID NO: 86929 - RNA, 22 nt, Human
uuaagugagcuugaauaaucuu

SEQ ID NO: 86930 - RNA, 22 nt, Human
uuaaguguagugcuaagggcag

SEQ ID NO: 86931 - RNA, 22 nt, Human
uuaagugucauaauuuccaaga

SEQ ID NO: 86932 - RNA, 22 nt, Human
uuaaguguuuaguaagagaugu

SEQ ID NO: 86933 - RNA, 22 nt, Human
uuaaguugugaauaauccaguc

SEQ ID NO: 86934 - RNA, 18 nt, Human
uuaaguuuuacugcuuua

SEQ ID NO: 86935 - RNA, 22 nt, Human
uuaauaaacaggugcagcugaa

SEQ ID NO: 86936 - RNA, 22 nt, Human
uuaauacaacuguugucacugg

SEQ ID NO: 86937 - RNA, 22 nt, Human
uuaauacaagcauaugcacaca

SEQ ID NO: 86938 - RNA, 22 nt, Human
uuaauacacuauaugaucacau

SEQ ID NO: 86939 - RNA, 22 nt, Human
uuaauagauuugauuuuaaagg

SEQ ID NO: 86940 - RNA, 22 nt, Human
uuaauagugcuaaaccauugac

SEQ ID NO: 86941 - RNA, 22 nt, Human
uuaauauguugaaauuuauuag

SEQ ID NO: 86942 - RNA, 22 nt, Human
uuaaucaaauuuacaacccagu

SEQ ID NO: 86943 - RNA, 22 nt, Human
uuaaucacagcucugccaugag

SEQ ID NO: 86944 - RNA, 22 nt, Human
uuaaugaaacauugacuaugau

SEQ ID NO: 86945 - RNA, 22 nt, Human
uuaaugaccuggaagaagugau

SEQ ID NO: 86946 - RNA, 22 nt, Human
uuaaugauuuggaacccuuuaa

SEQ ID NO: 86947 - RNA, 22 nt, Human
uuaaugcagaaaucaaacugac

SEQ ID NO: 86948 - RNA, 22 nt, Human
ugggcaggagagaagcuaaaga

SEQ ID NO: 86949 - RNA, 22 nt, Human
ugggcaggugcuauuuuccaug

SEQ ID NO: 86950 - RNA, 22 nt, Human
ugggcagucaucagcacaccgg

SEQ ID NO: 86951 - RNA, 22 nt, Human
ugggcaguugcuccucagaccc

SEQ ID NO: 86952 - RNA, 22 nt, Human
ugggcaucguucccuuggcuau

SEQ ID NO: 86953 - RNA, 22 nt, Human
ugggcaugaguggacagagaag

SEQ ID NO: 86954 - RNA, 22 nt, Human
ugggccaccugcuuuuuugcau

SEQ ID NO: 86955 - RNA, 22 nt, Human
ugggccagaaguaugcauguuu

SEQ ID NO: 86956 - RNA, 22 nt, Human
ugggccagauccauggcaauaa

SEQ ID NO: 86957 - RNA, 22 nt, Human
ugggccagcugaagugccgccc

SEQ ID NO: 86958 - RNA, 22 nt, Human
ugggccaggauuucaagacccu

SEQ ID NO: 86959 - RNA, 22 nt, Human
ugggcccaagagagucuccaac

SEQ ID NO: 86960 - RNA, 22 nt, Human
ugggcccaagugcaaugcagug

SEQ ID NO: 86961 - RNA, 22 nt, Human
ugggcccaucauugcugugggc

SEQ ID NO: 86962 - RNA, 22 nt, Human
ugggccccuugguuuccugagc

SEQ ID NO: 86963 - RNA, 21 nt, Human
ugggccucaaguggguggcag

SEQ ID NO: 86964 - RNA, 22 nt, Human
ugggccucaccuucuuggcagc

SEQ ID NO: 86965 - RNA, 21 nt, Human
ugggccucaggcagcugugac

SEQ ID NO: 86966 - RNA, 22 nt, Human
ugggccuccaauuccagcggga

SEQ ID NO: 86967 - RNA, 22 nt, Human
ugggccuccugcccuggccuag

SEQ ID NO: 86968 - RNA, 22 nt, Human
ugggccuccuuuccauucagag

SEQ ID NO: 86969 - RNA, 23 nt, Human
ugggccucuccacccuuuucugu

SEQ ID NO: 86970 - RNA, 22 nt, Human
ugggccucugccacgcuccccc

SEQ ID NO: 86971 - RNA, 20 nt, Human
ugggccucuggugccucugg

SEQ ID NO: 86972 - RNA, 20 nt, Human
ugggccugagccugugggcu

SEQ ID NO: 86973 - RNA, 22 nt, Human
ugggccugauuuaucaucuuca

SEQ ID NO: 86974 - RNA, 19 nt, Human
ugggccugcaucugggucu

SEQ ID NO: 86975 - RNA, 22 nt, Human
ugggccuggacaaggccacuag

SEQ ID NO: 86976 - RNA, 23 nt, Human
ugggccuggccucccaguccagc

SEQ ID NO: 86977 - RNA, 22 nt, Human
ugggccugggcuccuguccucu

SEQ ID NO: 86978 - RNA, 22 nt, Human
ugggccuggggcagcccaaauc

SEQ ID NO: 86979 - RNA, 22 nt, Human
ugggccugugaugcugggcuau

SEQ ID NO: 86980 - RNA, 22 nt, Human
ugggccuguggggaucuugaag

SEQ ID NO: 86981 - RNA, 22 nt, Human
ugggccuguugggguugaguua

SEQ ID NO: 86982 - RNA, 22 nt, Human
ugggcgaggcccagggcugcgu

SEQ ID NO: 86983 - RNA, 21 nt, Human
ugggcgcuugaccucugcacu

SEQ ID NO: 86984 - RNA, 22 nt, Human
ugggcgggcaggagcgcaccug

SEQ ID NO: 86985 - RNA, 22 nt, Human
ugggcuaauucuuugauuguuu

SEQ ID NO: 86986 - RNA, 22 nt, Human
ugggcuauuaggaccaggccau

SEQ ID NO: 86987 - RNA, 22 nt, Human
ugggcucaagugaugcuccugu

SEQ ID NO: 86988 - RNA, 22 nt, Human
ugggcucagccucagucugugg

SEQ ID NO: 86989 - RNA, 22 nt, Human
ugggcucagugggagaaagggc

SEQ ID NO: 86990 - RNA, 22 nt, Human
ugggcucauguuuauacauauc

SEQ ID NO: 86991 - RNA, 22 nt, Human
ugggcucauguuucuuugagga

SEQ ID NO: 86992 - RNA, 19 nt, Human
ugggcucauucaggugguu

SEQ ID NO: 86993 - RNA, 22 nt, Human
ugggcuccaauuuguccuuuca

SEQ ID NO: 86994 - RNA, 22 nt, Human
ugggcuccguugccuggggcag

SEQ ID NO: 86995 - RNA, 22 nt, Human
ugggcuccucgucacucgcugu

SEQ ID NO: 86996 - RNA, 22 nt, Human
ugggcuccuugggagcaaguga

SEQ ID NO: 86997 - RNA, 22 nt, Human
ugggcucucacacauguucuga

SEQ ID NO: 86998 - RNA, 22 nt, Human
ugggcucucucaccuggaggcu

SEQ ID NO: 86999 - RNA, 22 nt, Human
ugggcucucuuuaccucauaac

SEQ ID NO: 87000 - RNA, 22 nt, Human
ugggcucuggaauugaguggcc

SEQ ID NO: 87001 - RNA, 22 nt, Human
ugggcugcacugcucuuuaucg

SEQ ID NO: 87002 - RNA, 22 nt, Human
ugggcugcagagcccggccuuc

SEQ ID NO: 87003 - RNA, 22 nt, Human
ugggcugcccaagguggccaug

SEQ ID NO: 87004 - RNA, 22 nt, Human
ugggcugccggcaggcucugcc

SEQ ID NO: 87005 - RNA, 22 nt, Human
ugggcugcugcggugcucuugg

SEQ ID NO: 87006 - RNA, 22 nt, Human
ugggcuggcugaacuucaaccu

SEQ ID NO: 87007 - RNA, 22 nt, Human
ugggcuuccuggagccugugcu

SEQ ID NO: 87008 - RNA, 23 nt, Human
ugggcuucugagaaagcaccuaa

SEQ ID NO: 87009 - RNA, 22 nt, Human
ugggcuucugauguugagugcu

SEQ ID NO: 87010 - RNA, 22 nt, Human
ugggcuucuggaguggggcaga

SEQ ID NO: 87011 - RNA, 22 nt, Human
ugggcuuugagcucggucaccu

SEQ ID NO: 87012 - RNA, 22 nt, Human
uggggaaaagcguuaggaguuc

SEQ ID NO: 87013 - RNA, 22 nt, Human
uggggaaaaugcuuguagucag

SEQ ID NO: 87014 - RNA, 22 nt, Human
uggggaaacuauuuccuugucc

SEQ ID NO: 87015 - RNA, 22 nt, Human
uggggaagcacuuugaacuuaa

SEQ ID NO: 87016 - RNA, 17 nt, Human
uggggaagcucagauuu

SEQ ID NO: 87017 - RNA, 22 nt, Human
uggggacccggacuccuggguc

SEQ ID NO: 87018 - RNA, 22 nt, Human
uggggagaggaauuugaaugau

SEQ ID NO: 87019 - RNA, 23 nt, Human
uggggagaguuacccuggaagcg

SEQ ID NO: 87020 - RNA, 22 nt, Human
uggggaggaagucagauuucag

SEQ ID NO: 87021 - RNA, 22 nt, Human
uggggaucauaaauugauggag

SEQ ID NO: 87022 - RNA, 16 nt, Human
uggggauggggaagag

SEQ ID NO: 87023 - RNA, 22 nt, Human
uggggcacuuaugaugugccac

SEQ ID NO: 87024 - RNA, 22 nt, Human
uggggcagccacauagacaaca

SEQ ID NO: 87025 - RNA, 22 nt, Human
uggggcagggaugggaaacuau

SEQ ID NO: 87026 - RNA, 22 nt, Human
uggggcaugugaaccuggaugu

SEQ ID NO: 87027 - RNA, 22 nt, Human
uggggccaagaaggucucaugu

SEQ ID NO: 87028 - RNA, 23 nt, Human
uggggccaagugaggaagggucu

SEQ ID NO: 87029 - RNA, 22 nt, Human
uggggccugaaagguucucgcc

SEQ ID NO: 87030 - RNA, 22 nt, Human
uggggccugcacaggcugaaug

SEQ ID NO: 87031 - RNA, 22 nt, Human
uggggcuaaacacgccuggccu

SEQ ID NO: 87032 - RNA, 22 nt, Human
uggggcucaccuaggcuggaag

SEQ ID NO: 87033 - RNA, 22 nt, Human
uuacaugcagagggaagggaga

SEQ ID NO: 87034 - RNA, 22 nt, Human
uuacaugcaggucagacugcau

SEQ ID NO: 87035 - RNA, 22 nt, Human
uuacaugguaaacacucuuuua

SEQ ID NO: 87036 - RNA, 22 nt, Human
uuacauguacugguuugacuua

SEQ ID NO: 87037 - RNA, 22 nt, Human
uuacauguggugugaagaagag

SEQ ID NO: 87038 - RNA, 22 nt, Human
uuacauguuuaugugguacaug

SEQ ID NO: 87039 - RNA, 22 nt, Human
uuacauucaauuucuagaggua

SEQ ID NO: 87040 - RNA, 22 nt, Human
uuacauucccagugugcagcau

SEQ ID NO: 87041 - RNA, 22 nt, Human
uuacauucuuggaaucuuguuu

SEQ ID NO: 87042 - RNA, 22 nt, Human
uuacauuuggcuauguccucua

SEQ ID NO: 87043 - RNA, 22 nt, Human
uuacauuuugggguaaggauaa

SEQ ID NO: 87044 - RNA, 22 nt, Human
uuaccaaugugcuuuugcuaca

SEQ ID NO: 87045 - RNA, 22 nt, Human
uuaccagaugggggacuaugag

SEQ ID NO: 87046 - RNA, 22 nt, Human
uuaccauaaaguuuaucuuucu

SEQ ID NO: 87047 - RNA, 22 nt, Human
uuaccugagcggauuuguugca

SEQ ID NO: 87048 - RNA, 22 nt, Human
uuaccugcaacucccaugguga

SEQ ID NO: 87049 - RNA, 22 nt, Human
uuaccuguaaaacugcgauaua

SEQ ID NO: 87050 - RNA, 22 nt, Human
uuacuaaggacucuaaguucua

SEQ ID NO: 87051 - RNA, 23 nt, Human
uuacuacacaaguaacgauuccc

SEQ ID NO: 87052 - RNA, 18 nt, Human
uuacuacagcacuuucuu

SEQ ID NO: 87053 - RNA, 22 nt, Human
uuacuaggccaguuuucacuuu

SEQ ID NO: 87054 - RNA, 22 nt, Human
uuacuaguauaugucaagcaac

SEQ ID NO: 87055 - RNA, 22 nt, Human
uuacuaguggagaaacugaggc

SEQ ID NO: 87056 - RNA, 22 nt, Human
uuacuauaugcguggcaggugc

SEQ ID NO: 87057 - RNA, 22 nt, Human
uguacagacuguauuuacaagu

SEQ ID NO: 87058 - RNA, 22 nt, Human
uguacagauaucaggagugagg

SEQ ID NO: 87059 - RNA, 22 nt, Human
uguacaggaggccacauuggaa

SEQ ID NO: 87060 - RNA, 22 nt, Human
uguacagggugcagcgagcgga

SEQ ID NO: 87061 - RNA, 22 nt, Human
uguacaguacauguguagugau

SEQ ID NO: 87062 - RNA, 22 nt, Human
uguacagugccaugcaguuugc

SEQ ID NO: 87063 - RNA, 22 nt, Human
uguacauagaucuugaaaauua

SEQ ID NO: 87064 - RNA, 22 nt, Human
uguacaugugucuguauaucuu

SEQ ID NO: 87065 - RNA, 22 nt, Human
uguaccaagacaaaucagaaac

SEQ ID NO: 87066 - RNA, 22 nt, Human
uguaccagaugucuaaagccau

SEQ ID NO: 87067 - RNA, 22 nt, Human
uguaccauaauguguauuuuaa

SEQ ID NO: 87068 - RNA, 22 nt, Human
uguaccuggagagcucuuggcc

SEQ ID NO: 87069 - RNA, 19 nt, Human
uguaccugggucauggugc

SEQ ID NO: 87070 - RNA, 22 nt, Human
uguacuguauucaucuuuaacu

SEQ ID NO: 87071 - RNA, 22 nt, Human
uguacuugaacuugacuguaga

SEQ ID NO: 87072 - RNA, 22 nt, Human
uguagaaccuguuuauuauaga

SEQ ID NO: 87073 - RNA, 22 nt, Human
uguagaggaggaaacugaggcu

SEQ ID NO: 87074 - RNA, 22 nt, Human
uguagaugagucagggugcacc

SEQ ID NO: 87075 - RNA, 22 nt, Human
uguagaugagucagggugcaug

SEQ ID NO: 87076 - RNA, 19 nt, Human
uguagcuagugucuaucca

SEQ ID NO: 87077 - RNA, 22 nt, Human
uguagcuauagaggcuguaccu

SEQ ID NO: 87078 - RNA, 18 nt, Human
uguagcuggaggccaggc

SEQ ID NO: 87079 - RNA, 22 nt, Human
uguagcuucagucugaucucau

SEQ ID NO: 87080 - RNA, 22 nt, Human
uguagcuuuauauuguguuggg

SEQ ID NO: 87081 - RNA, 22 nt, Human
uguaggaaaaacaaugaucugc

SEQ ID NO: 87082 - RNA, 20 nt, Human
uguaggaaggacccugucug

SEQ ID NO: 87083 - RNA, 22 nt, Human
uguaggaauggauucuagaagg

SEQ ID NO: 87084 - RNA, 22 nt, Human
uguaggacauguacuuguaaca

SEQ ID NO: 87085 - RNA, 22 nt, Human
uguaggaguccaaucaggagac

SEQ ID NO: 87086 - RNA, 22 nt, Human
uguaggauuuucaccagaccuu

SEQ ID NO: 87087 - RNA, 22 nt, Human
uguaggcacauguauauauccc

SEQ ID NO: 87088 - RNA, 22 nt, Human
uguaggcauauucauagaguug

SEQ ID NO: 87089 - RNA, 23 nt, Human
uguaggcuaagucccauaaauca

SEQ ID NO: 87090 - RNA, 22 nt, Human
uguaggucacagucccuauccc

SEQ ID NO: 87091 - RNA, 22 nt, Human
uguaggucucagugucugagcu

SEQ ID NO: 87092 - RNA, 22 nt, Human
uguaguaagugcgcaauaaaua

SEQ ID NO: 87093 - RNA, 22 nt, Human
uguaguguuucucagauauuug

SEQ ID NO: 87094 - RNA, 22 nt, Human
uguauaaaccauggacagcuuu

SEQ ID NO: 87095 - RNA, 22 nt, Human
uguauaaauuuaaauuccugcu

SEQ ID NO: 87096 - RNA, 22 nt, Human
uguauacaaauuggaaucagau

SEQ ID NO: 87097 - RNA, 22 nt, Human
uguauacaagucguguaaacuu

SEQ ID NO: 87098 - RNA, 21 nt, Human
uguauacacacauauauguac

SEQ ID NO: 87099 - RNA, 22 nt, Human
uguauacacguaccuuuucuuu

SEQ ID NO: 87100 - RNA, 22 nt, Human
uguauacacuaugcuauauggu

SEQ ID NO: 87101 - RNA, 22 nt, Human
uguauacauguguguucacgca

SEQ ID NO: 87102 - RNA, 22 nt, Human
uguauacauguguucaugcaug

SEQ ID NO: 87103 - RNA, 22 nt, Human
uguauacauuuaacuagauaga

SEQ ID NO: 87104 - RNA, 22 nt, Human
uguauaguuucuuaguuacuga

SEQ ID NO: 87105 - RNA, 22 nt, Human
uguauauaagcauuuacuuguu

SEQ ID NO: 87106 - RNA, 22 nt, Human
uguauaugcacuuuccuuaucc

SEQ ID NO: 87107 - RNA, 22 nt, Human
uguauaugugauguacauguac

SEQ ID NO: 87108 - RNA, 22 nt, Human
uguauauucugccuaaaagcuu

SEQ ID NO: 87109 - RNA, 22 nt, Human
uguauauuguucugucucuuca

SEQ ID NO: 87110 - RNA, 22 nt, Human
uguaucaaaccaaauuaauucu

SEQ ID NO: 87111 - RNA, 22 nt, Human
uguaucuuagugugaaaauauu

SEQ ID NO: 87112 - RNA, 22 nt, Human
uguaugaaagaacaagggcuua

SEQ ID NO: 87113 - RNA, 23 nt, Human
uguaugaauaugccacaguuuaa

SEQ ID NO: 87114 - RNA, 22 nt, Human
uguaugaauauguauuuucaua

SEQ ID NO: 87115 - RNA, 22 nt, Human
uguaugaaugggaaaaggaaac

SEQ ID NO: 87116 - RNA, 22 nt, Human
uguaugaggcauacaucaggca

SEQ ID NO: 87117 - RNA, 22 nt, Human
uguaugcaaauuuauuagcaca

SEQ ID NO: 87118 - RNA, 22 nt, Human
uguaugcacauauauagguaca

SEQ ID NO: 87119 - RNA, 22 nt, Human
uguaugcaccauuguauuaccu

SEQ ID NO: 87120 - RNA, 22 nt, Human
uguaugcagcaaaacaauuagu

SEQ ID NO: 87121 - RNA, 17 nt, Human
uguaugcauaaaauuua

SEQ ID NO: 87122 - RNA, 17 nt, Human
uguaugcauaugcuuuu

SEQ ID NO: 87123 - RNA, 22 nt, Human
uguaugcuugaguguguauacu

SEQ ID NO: 87124 - RNA, 22 nt, Human
uguaugcuuugguuguuucucu

SEQ ID NO: 87125 - RNA, 22 nt, Human
uguauguaaaguuuguaauaga

SEQ ID NO: 87126 - RNA, 22 nt, Human
uguauguauguauguauuuggg

SEQ ID NO: 87127 - RNA, 22 nt, Human
uguauguggcuacuuuucuugc

SEQ ID NO: 87128 - RNA, 22 nt, Human
uguauguguauguacauaugca

SEQ ID NO: 87129 - RNA, 22 nt, Human
uguauguguccuaauucaagca

SEQ ID NO: 87130 - RNA, 22 nt, Human
uguauguuucuaaaugauugcu

SEQ ID NO: 87131 - RNA, 22 nt, Human
uguauuagagcauauaauuuga

SEQ ID NO: 87132 - RNA, 22 nt, Human
uguauuaggagauuccauguuu

SEQ ID NO: 87133 - RNA, 22 nt, Human
uguauucagugauuucacaaua

SEQ ID NO: 87134 - RNA, 22 nt, Human
uguauucuaaauacaucuuacc

SEQ ID NO: 87135 - RNA, 22 nt, Human
uguauugaggauucauuuuugu

SEQ ID NO: 87136 - RNA, 22 nt, Human
uguauuuaagcuuuaccuaaaa

SEQ ID NO: 87137 - RNA, 22 nt, Human
uguauuuaguccagucucucau

SEQ ID NO: 87138 - RNA, 22 nt, Human
uguauuuauauuagaaugguug

SEQ ID NO: 87139 - RNA, 22 nt, Human
uguauuucaauuuuagcaccaa

SEQ ID NO: 87140 - RNA, 20 nt, Human
uguauuucaugcauuccugg

SEQ ID NO: 87141 - RNA, 22 nt, Human
uguauuucugcuuucucuagua

SEQ ID NO: 87142 - RNA, 22 nt, Human
uguauuugaguuaugaaagaga

SEQ ID NO: 87143 - RNA, 22 nt, Human
uguauuugguguauuuaaugag

SEQ ID NO: 87144 - RNA, 22 nt, Human
uguauuugugauaacgaccuga

SEQ ID NO: 87145 - RNA, 22 nt, Human
uguauuuguuguuaaauggaga

SEQ ID NO: 87146 - RNA, 22 nt, Human
uguauuuuuaggaaugcgcuau

SEQ ID NO: 87147 - RNA, 22 nt, Human
ugucaaaaauaagagagauugu

SEQ ID NO: 87148 - RNA, 22 nt, Human
ugucaaagcaaggauuaaaugu

SEQ ID NO: 87149 - RNA, 22 nt, Human
ugucaaauaguagaaagauggc

SEQ ID NO: 87150 - RNA, 22 nt, Human
ugucaacaacagcauuuucuau

SEQ ID NO: 87151 - RNA, 22 nt, Human
ugucaacacaccuaucucaauu

SEQ ID NO: 87152 - RNA, 22 nt, Human
ugucaacaccaaagccucccag

SEQ ID NO: 87153 - RNA, 22 nt, Human
ugucaacagauacuagagagcu

SEQ ID NO: 87154 - RNA, 22 nt, Human
ugucaacagaucucaaagcugg

SEQ ID NO: 87155 - RNA, 22 nt, Human
ugucaacauuuaucaaguuauu

SEQ ID NO: 87156 - RNA, 23 nt, Human
ugucaaguauagcaggcccuccc

SEQ ID NO: 87157 - RNA, 22 nt, Human
ugucaauaguuuugaguucucu

SEQ ID NO: 87158 - RNA, 22 nt, Human
ugucaaugaagucauccuugug

SEQ ID NO: 87159 - RNA, 22 nt, Human
ugucacaaaaaucaguaauugc

SEQ ID NO: 87160 - RNA, 22 nt, Human
ugucacaaggccaugaaaagaa

SEQ ID NO: 87161 - RNA, 22 nt, Human
ugucacagagcaacuauuucuu

SEQ ID NO: 87162 - RNA, 21 nt, Human
ugucacagauucucagcuugc

SEQ ID NO: 87163 - RNA, 22 nt, Human
ugucacagugcacagcuaagaa

SEQ ID NO: 87164 - RNA, 22 nt, Human
ugucacauaggcaaaauguuuu

SEQ ID NO: 87165 - RNA, 22 nt, Human
ugucacauguuuaauguggacu

SEQ ID NO: 87166 - RNA, 17 nt, Human
uuauugcagugcugaag

SEQ ID NO: 87167 - RNA, 22 nt, Human
uuauugcauagauuaugccaua

SEQ ID NO: 87168 - RNA, 22 nt, Human
uuauugccugauugaggucauu

SEQ ID NO: 87169 - RNA, 22 nt, Human
uuauugcuagugucauuucaca

SEQ ID NO: 87170 - RNA, 22 nt, Human
uuauugcuaugaugauguguag

SEQ ID NO: 87171 - RNA, 22 nt, Human
uuauugggucccaacaaguugc

SEQ ID NO: 87172 - RNA, 17 nt, Human
uuauugucaagguucca

SEQ ID NO: 87173 - RNA, 22 nt, Human
uuauugugucuugguuuaucuu

SEQ ID NO: 87174 - RNA, 22 nt, Human
uuauuguuagugagacuguaga

SEQ ID NO: 87175 - RNA, 22 nt, Human
uuauuguuuaaagccauguaaa

SEQ ID NO: 87176 - RNA, 22 nt, Human
uuauuguuuacuaguuugcaga

SEQ ID NO: 87177 - RNA, 22 nt, Human
uuauuguuuggguauaauuuga

SEQ ID NO: 87178 - RNA, 22 nt, Human
uuauuuaaaauguagguuggga

SEQ ID NO: 87179 - RNA, 22 nt, Human
uuauuuauggcacuguuggugg

SEQ ID NO: 87180 - RNA, 22 nt, Human
uuauuucauguaaaauuuaugu

SEQ ID NO: 87181 - RNA, 22 nt, Human
uuauuucccugaggguugcagg

SEQ ID NO: 87182 - RNA, 22 nt, Human
uuauuugaaucuggcuagagaa

SEQ ID NO: 87183 - RNA, 22 nt, Human
uuauuugauuaguaaaccugua

SEQ ID NO: 87184 - RNA, 22 nt, Human
uuauuuggauuuagcuuaucaa

SEQ ID NO: 87185 - RNA, 22 nt, Human
uuauuuguaaagguccauagua

SEQ ID NO: 87186 - RNA, 22 nt, Human
uuauuuguaaggcagggccagu

SEQ ID NO: 87187 - RNA, 22 nt, Human
uuauuuugagagaaugugugcu

SEQ ID NO: 87188 - RNA, 22 nt, Human
uuauuuugccacaggugaccuu

SEQ ID NO: 87189 - RNA, 22 nt, Human
uucaaaagacucagauguagcg

SEQ ID NO: 87190 - RNA, 22 nt, Human
uucaaaagcgguccaggaagau

SEQ ID NO: 87191 - RNA, 22 nt, Human
uucaaaauccgggaggcgcccc

SEQ ID NO: 87192 - RNA, 22 nt, Human
uucaaaaugcacaaagggcuag

SEQ ID NO: 87193 - RNA, 22 nt, Human
uucaaacaaaacucuuuccuau

SEQ ID NO: 87194 - RNA, 22 nt, Human
uucaaacaguugcacaacuuau

SEQ ID NO: 87195 - RNA, 22 nt, Human
uucaaacucuugcucugcuagu

SEQ ID NO: 87196 - RNA, 21 nt, Human
uucaaagagugggcauuguca

SEQ ID NO: 87197 - RNA, 23 nt, Human
uucaaagaucuucugaaaucugu

SEQ ID NO: 87198 - RNA, 22 nt, Human
uucaaagauuagcauacgcaau

SEQ ID NO: 87199 - RNA, 22 nt, Human
uucaaagauuuucccaaagcuc

SEQ ID NO: 87200 - RNA, 23 nt, Human
uucaaagcuuaagcucuuuccac

SEQ ID NO: 87201 - RNA, 17 nt, Human
uucaaagcuuaucaagg

SEQ ID NO: 87202 - RNA, 22 nt, Human
uucaaaguaaaaauguguucac

SEQ ID NO: 87203 - RNA, 22 nt, Human
uucaaagugcauguuccucaga

SEQ ID NO: 87204 - RNA, 22 nt, Human
uucaaauacauucuuugccacu

SEQ ID NO: 87205 - RNA, 22 nt, Human
uucaaaucccugcuccacuauu

SEQ ID NO: 87206 - RNA, 22 nt, Human
uucaaauccugcuuaugcuacc

SEQ ID NO: 87207 - RNA, 22 nt, Human
uucaaaugauggcaguccuggc

SEQ ID NO: 87208 - RNA, 22 nt, Human
uucaaaugguuagacuguuagc

SEQ ID NO: 87209 - RNA, 22 nt, Human
uucaacaaauauuuauugagcu

SEQ ID NO: 87210 - RNA, 22 nt, Human
uucaacaaugaaagcuaaggaa

SEQ ID NO: 87211 - RNA, 22 nt, Human
uucaacagcuuccaaagugugu

SEQ ID NO: 87212 - RNA, 22 nt, Human
uucaacaucuuggagcuggaac

SEQ ID NO: 87213 - RNA, 22 nt, Human
uucaacauuuaucaguuuauca

SEQ ID NO: 87214 - RNA, 22 nt, Human
uucaacccaaguucuccauuuu

SEQ ID NO: 87215 - RNA, 22 nt, Human
uucaacuagaggugauuuugcc

SEQ ID NO: 87216 - RNA, 22 nt, Human
uucaacuuuaggcaaagaaaac

SEQ ID NO: 87217 - RNA, 22 nt, Human
uucaagaaucuuccugaccacu

SEQ ID NO: 87218 - RNA, 22 nt, Human
uucaagauaauaggaaugaaaa

SEQ ID NO: 87219 - RNA, 22 nt, Human
uucaagaugacccagucacacg

SEQ ID NO: 87220 - RNA, 22 nt, Human
uucaagaugccagggacgcggc

SEQ ID NO: 87221 - RNA, 22 nt, Human
uucaagauggcugcaaauacuu

SEQ ID NO: 87222 - RNA, 22 nt, Human
uucaagaugucuucacaauagu

SEQ ID NO: 87223 - RNA, 22 nt, Human
uucaagcagggauuggugaugg

SEQ ID NO: 87224 - RNA, 22 nt, Human
uucaaguagcuaaauuagcugc

SEQ ID NO: 87225 - RNA, 22 nt, Human
uucaaguauauuuaacaucgua

SEQ ID NO: 87226 - RNA, 22 nt, Human
uucaagucaaggaaagaggucu

SEQ ID NO: 87227 - RNA, 21 nt, Human
uucaagucucuaggacuucuc

SEQ ID NO: 87228 - RNA, 22 nt, Human
uucaagucuguuucauugcaug

SEQ ID NO: 87229 - RNA, 22 nt, Human
uucaagugaggcugucuuuaga

SEQ ID NO: 87230 - RNA, 22 nt, Human
uucaaguuagagauauauuuag

SEQ ID NO: 87231 - RNA, 22 nt, Human
uucaaguucuaguguucacuuc

SEQ ID NO: 87232 - RNA, 20 nt, Human
uucaaguugggucucuggcu

SEQ ID NO: 87233 - RNA, 22 nt, Human
uucaaguuuucagaauagccac

SEQ ID NO: 87234 - RNA, 22 nt, Human
uucaaguuuuuaaaggcaguua

SEQ ID NO: 87235 - RNA, 21 nt, Human
uucaauacuauuucaauaguc

SEQ ID NO: 87236 - RNA, 22 nt, Human
uucaaucauuagaaucucaggc

SEQ ID NO: 87237 - RNA, 22 nt, Human
uucaaucauuuuuacauagucc

SEQ ID NO: 87238 - RNA, 22 nt, Human
uucaaugcauauagauauagaa

SEQ ID NO: 87239 - RNA, 22 nt, Human
uucaaugccuagaacuuagcau

SEQ ID NO: 87240 - RNA, 22 nt, Human
uucaaugucuauguacauuuua

SEQ ID NO: 87241 - RNA, 22 nt, Human
uucaauguuucuuaucaaguug

SEQ ID NO: 87242 - RNA, 22 nt, Human
uucaauuuagugauguuguugg

SEQ ID NO: 87243 - RNA, 22 nt, Human
uucaauuuugcagaggaaugca

SEQ ID NO: 87244 - RNA, 22 nt, Human
uucacaaaaaugcugaacaguu

SEQ ID NO: 87245 - RNA, 22 nt, Human
uucacaaacaccagaauggcua

SEQ ID NO: 87246 - RNA, 22 nt, Human
uucacaaagcugguuccuucug

SEQ ID NO: 87247 - RNA, 22 nt, Human
uucacaacugccauagccagug

SEQ ID NO: 87248 - RNA, 19 nt, Human
uucacaagugaugucucuc

SEQ ID NO: 87249 - RNA, 22 nt, Human
uucacaauagcuggcaucaucu

SEQ ID NO: 87250 - RNA, 22 nt, Human
uucacaauaggagcaugcaaau

SEQ ID NO: 87251 - RNA, 22 nt, Human
uucacacagcaacuguaugaau

SEQ ID NO: 87252 - RNA, 22 nt, Human
uucacagaagaggucacauuuc

SEQ ID NO: 87253 - RNA, 22 nt, Human
uucacagaauugucuugacugg

SEQ ID NO: 87254 - RNA, 22 nt, Human
uucacagacauugcagacugaa

SEQ ID NO: 87255 - RNA, 22 nt, Human
uucacagacuuuccauagauug

SEQ ID NO: 87256 - RNA, 22 nt, Human
uucacagagaguaugcagagaa

SEQ ID NO: 87257 - RNA, 22 nt, Human
uucacagagcacugccaaguac

SEQ ID NO: 87258 - RNA, 22 nt, Human
uucacagagcuuguucauggcc

SEQ ID NO: 87259 - RNA, 18 nt, Human
uucacagauccacaggaa

SEQ ID NO: 87260 - RNA, 22 nt, Human
uucacagaugagaaaauugagg

SEQ ID NO: 87261 - RNA, 21 nt, Human
uucacagaugggaaaacugag

SEQ ID NO: 87262 - RNA, 22 nt, Human
uucacagauguauuggaacucc

SEQ ID NO: 87263 - RNA, 22 nt, Human
uucacagauugacuggauuccu

SEQ ID NO: 87264 - RNA, 22 nt, Human
uucacagcuaagagcuaaguaa

SEQ ID NO: 87265 - RNA, 22 nt, Human
ugucuaguuuuagcuuuuggag

SEQ ID NO: 87266 - RNA, 22 nt, Human
ugucuauucaauauccauuucu

SEQ ID NO: 87267 - RNA, 21 nt, Human
ugucucaagaaaggccucucc

SEQ ID NO: 87268 - RNA, 22 nt, Human
ugucucaagguuacucuaugau

SEQ ID NO: 87269 - RNA, 22 nt, Human
ugucucagguacaugcguccug

SEQ ID NO: 87270 - RNA, 22 nt, Human
ugucuccaacucacuguauacu

SEQ ID NO: 87271 - RNA, 22 nt, Human
ugucuccaggggcaggccagcc

SEQ ID NO: 87272 - RNA, 22 nt, Human
ugucuccauuuucaaguagcag

SEQ ID NO: 87273 - RNA, 19 nt, Human
ugucuccucaugcaagugu

SEQ ID NO: 87274 - RNA, 22 nt, Human
ugucuccugcaggggugugggc

SEQ ID NO: 87275 - RNA, 22 nt, Human
uuccucagcuguuugggcucau

SEQ ID NO: 87276 - RNA, 22 nt, Human
uuccucaggcugcuuucacaua

SEQ ID NO: 87277 - RNA, 22 nt, Human
uuccucagugcccccauacggu

SEQ ID NO: 87278 - RNA, 22 nt, Human
uuccuccuacgcuuaucacuuu

SEQ ID NO: 87279 - RNA, 22 nt, Human
uuccucuccucacaugagucac

SEQ ID NO: 87280 - RNA, 22 nt, Human
uuccucuggggccaggccaaca

SEQ ID NO: 87281 - RNA, 22 nt, Human
uuccugaagucaaagaucuaaa

SEQ ID NO: 87282 - RNA, 22 nt, Human
uuccugaggugauucuaaugug

SEQ ID NO: 87283 - RNA, 22 nt, Human
uuccugauaaugagauuuuccc

SEQ ID NO: 87284 - RNA, 22 nt, Human
uuccugcaaaacuacuaguagc

SEQ ID NO: 87285 - RNA, 22 nt, Human
uuccugccccugagagcuccca

SEQ ID NO: 87286 - RNA, 22 nt, Human
uuccugcccugccugugccacu

SEQ ID NO: 87287 - RNA, 22 nt, Human
uuccuggcacacuccugaaugu

SEQ ID NO: 87288 - RNA, 22 nt, Human
uuccuggcaccaccacuucuag

SEQ ID NO: 87289 - RNA, 22 nt, Human
uuccuggcacccuuguuagccu

SEQ ID NO: 87290 - RNA, 22 nt, Human
uuccuggcagaggccccgacag

SEQ ID NO: 87291 - RNA, 22 nt, Human
uuccuggccucucucugagcag

SEQ ID NO: 87292 - RNA, 22 nt, Human
uuccuggcgccacggagccggu

SEQ ID NO: 87293 - RNA, 20 nt, Human
uuccuggcucuaggaccuug

SEQ ID NO: 87294 - RNA, 22 nt, Human
uuccuggcucucuguugcacag

SEQ ID NO: 87295 - RNA, 22 nt, Human
uuccuggcuggcgguuuuggug

SEQ ID NO: 87296 - RNA, 22 nt, Human
uuccuggcuugucacaucuacg

SEQ ID NO: 87297 - RNA, 22 nt, Human
uuccuggcuuuugggcuaauuc

SEQ ID NO: 87298 - RNA, 22 nt, Human
uuccugggcaggacgagagucu

SEQ ID NO: 87299 - RNA, 22 nt, Human
uuccugggcucuggcuggccua

SEQ ID NO: 87300 - RNA, 22 nt, Human
uuccugggcuuuccccucuggu

SEQ ID NO: 87301 - RNA, 21 nt, Human
uuccuggggaaggagcugccu

SEQ ID NO: 87302 - RNA, 22 nt, Human
uuccuggggacuuaccgucauu

SEQ ID NO: 87303 - RNA, 22 nt, Human
uuccuggggcuuagcaauggag

SEQ ID NO: 87304 - RNA, 22 nt, Human
uuccuggggugaagauauuuuu

SEQ ID NO: 87305 - RNA, 22 nt, Human
uuccuggguucccucucauucu

SEQ ID NO: 87306 - RNA, 22 nt, Human
uuccuggucugugccauucaga

SEQ ID NO: 87307 - RNA, 22 nt, Human
uuccugguuggauucugauuaa

SEQ ID NO: 87308 - RNA, 22 nt, Human
uuccugguuuauaccuguauca

SEQ ID NO: 87309 - RNA, 20 nt, Human
uuccuguaaccggcagcugc

SEQ ID NO: 87310 - RNA, 22 nt, Human
uuccuguaucugcuucuuacua

SEQ ID NO: 87311 - RNA, 22 nt, Human
uuccuguaugucagugaagagc

SEQ ID NO: 87312 - RNA, 22 nt, Human
uuccugugaagaucugggugcu

SEQ ID NO: 87313 - RNA, 22 nt, Human
uuccugugccucaggucucagc

SEQ ID NO: 87314 - RNA, 22 nt, Human
uuccugugcuuaauucucacug

SEQ ID NO: 87315 - RNA, 22 nt, Human
uuccugugcuuauucuucucug

SEQ ID NO: 87316 - RNA, 22 nt, Human
uuccugugguguuucccagaca

SEQ ID NO: 87317 - RNA, 22 nt, Human
uuccugugucccgggcacccug

SEQ ID NO: 87318 - RNA, 22 nt, Human
uuccugugugcucucauuuagu

SEQ ID NO: 87319 - RNA, 22 nt, Human
uuccuguucaggaaaguugugu

SEQ ID NO: 87320 - RNA, 22 nt, Human
uuccuuaauaucccuuuuggaa

SEQ ID NO: 87321 - RNA, 22 nt, Human
uuccuuacauucauauggcuuc

SEQ ID NO: 87322 - RNA, 22 nt, Human
uuccuuagacagagguggucau

SEQ ID NO: 87323 - RNA, 22 nt, Human
uuccuuagauccuucaaucacg

SEQ ID NO: 87324 - RNA, 22 nt, Human
uuccuuagcagaccugguaucc

SEQ ID NO: 87325 - RNA, 22 nt, Human
uuccuuagcugucccuggaaau

SEQ ID NO: 87326 - RNA, 19 nt, Human
uguuuucaagugggauuau

SEQ ID NO: 87327 - RNA, 22 nt, Human
uguuuucacaaugaugucagau

SEQ ID NO: 87328 - RNA, 22 nt, Human
uguuuucauggagaugguggcg

SEQ ID NO: 87329 - RNA, 22 nt, Human
uguuuucauuugauguaacaaa

SEQ ID NO: 87330 - RNA, 22 nt, Human
uguuuucugauucucguguggu

SEQ ID NO: 87331 - RNA, 22 nt, Human
uguuuucuuccuaauugcucau

SEQ ID NO: 87332 - RNA, 22 nt, Human
uguuuuggaacaaaagcuauuc

SEQ ID NO: 87333 - RNA, 22 nt, Human
uguuuuguccuuuucuauauac

SEQ ID NO: 87334 - RNA, 22 nt, Human
uguuuuguuagcacucugggaa

SEQ ID NO: 87335 - RNA, 17 nt, Human
uguuuuuucccuguucu

SEQ ID NO: 87336 - RNA, 22 nt, Human
uuaaaaauauguagggcccgau

SEQ ID NO: 87337 - RNA, 22 nt, Human
uuaaaagucugaugauuuacau

SEQ ID NO: 87338 - RNA, 22 nt, Human
uuaaaauagccagugccccucu

SEQ ID NO: 87339 - RNA, 22 nt, Human
uuaaaauccaguguugguggau

SEQ ID NO: 87340 - RNA, 22 nt, Human
uuaaaaucuaaagcaguugucu

SEQ ID NO: 87341 - RNA, 22 nt, Human
uuaaaauguacaggggaaagug

SEQ ID NO: 87342 - RNA, 23 nt, Human
uuaaaauguggucucucccuagu

SEQ ID NO: 87343 - RNA, 22 nt, Human
uuaaacaccacagcagucccua

SEQ ID NO: 87344 - RNA, 22 nt, Human
uuaaacagguuuuugaauggcc

SEQ ID NO: 87345 - RNA, 22 nt, Human
uuaaaccauaguuuaacauaag

SEQ ID NO: 87346 - RNA, 22 nt, Human
uuaaacuauagcuugaugugaa

SEQ ID NO: 87347 - RNA, 22 nt, Human
uuaaacugcagacucaguguuc

SEQ ID NO: 87348 - RNA, 22 nt, Human
uuaaagaauagugccccuauug

SEQ ID NO: 87349 - RNA, 22 nt, Human
uuaaagaggcaugggaauguau

SEQ ID NO: 87350 - RNA, 22 nt, Human
uuaaagagguaguuagguuuaa

SEQ ID NO: 87351 - RNA, 22 nt, Human
uuaaagaugcagcuuuagagaa

SEQ ID NO: 87352 - RNA, 22 nt, Human
uuaaagauucugaggcugauua

SEQ ID NO: 87353 - RNA, 22 nt, Human
uuaaagcaaaaacuaggaugga

SEQ ID NO: 87354 - RNA, 22 nt, Human
uuaaagcaaguagaagccugag

SEQ ID NO: 87355 - RNA, 22 nt, Human
uuaaagcaucacacuauuaauu

SEQ ID NO: 87356 - RNA, 22 nt, Human
uuaaagcauccugucagucugu

SEQ ID NO: 87357 - RNA, 22 nt, Human
uuaaagccaucuagauuuugag

SEQ ID NO: 87358 - RNA, 21 nt, Human
uuaaagcuaugguagugggcu

SEQ ID NO: 87359 - RNA, 17 nt, Human
uuaaaggaugcucucuc

SEQ ID NO: 87360 - RNA, 22 nt, Human
uuaaaguaaucugugugaauuu

SEQ ID NO: 87361 - RNA, 22 nt, Human
uuaaaguuucagaaacuugguc

SEQ ID NO: 87362 - RNA, 22 nt, Human
uuaaauagcucuuguagaagaa

SEQ ID NO: 87363 - RNA, 22 nt, Human
uuaaaugaacgagauaugcaac

SEQ ID NO: 87364 - RNA, 22 nt, Human
uuaaaugcucacauaaagguag

SEQ ID NO: 87365 - RNA, 22 nt, Human
uuaaauggggaugaguagaugg

SEQ ID NO: 87366 - RNA, 22 nt, Human
uuaaaugucaauagauugcuug

SEQ ID NO: 87367 - RNA, 22 nt, Human
uuaaaugugauuucauuuaugu

SEQ ID NO: 87368 - RNA, 22 nt, Human
uuaaaugugccuaaaccuguaa

SEQ ID NO: 87369 - RNA, 22 nt, Human
uuaaauguuuaaucuaacuuga

SEQ ID NO: 87370 - RNA, 22 nt, Human
uuaaauuauugagggauuguca

SEQ ID NO: 87371 - RNA, 22 nt, Human
uuaaauuuuagaaacagacucu

SEQ ID NO: 87372 - RNA, 22 nt, Human
uuaacacaucccugcucuaccc

SEQ ID NO: 87373 - RNA, 22 nt, Human
uuaacacuaucugucauaauua

SEQ ID NO: 87374 - RNA, 22 nt, Human
uuaacacuugaacucuacaugu

SEQ ID NO: 87375 - RNA, 23 nt, Human
uuaacaggaucucgggcaagagg

SEQ ID NO: 87376 - RNA, 22 nt, Human
uuaacaguaaagaauugugcaa

SEQ ID NO: 87377 - RNA, 22 nt, Human
uuaacauuuaguguaccccugu

SEQ ID NO: 87378 - RNA, 22 nt, Human
uuaaccagguccuuugaaaaca

SEQ ID NO: 87379 - RNA, 22 nt, Human
uuaaccuguuaugcccccagag

SEQ ID NO: 87380 - RNA, 22 nt, Human
uuaacgaauugugcauaauucc

SEQ ID NO: 87381 - RNA, 22 nt, Human
uuaacuauuauuagcaucuuug

SEQ ID NO: 87382 - RNA, 22 nt, Human
uuaacucucccuccuuacaucc

SEQ ID NO: 87383 - RNA, 22 nt, Human
uuaacugagaggaucugaguag

SEQ ID NO: 87384 - RNA, 22 nt, Human
uuacaguuacugguacuguuaa

SEQ ID NO: 87385 - RNA, 22 nt, Human
uuacaguuagaaucugaugaaa

SEQ ID NO: 87386 - RNA, 22 nt, Human
uuacaguuuacauaagaauugu

SEQ ID NO: 87387 - RNA, 22 nt, Human
uuacaguuuauccaggaagagc

SEQ ID NO: 87388 - RNA, 22 nt, Human
uuacauaaaaguucacguaggc

SEQ ID NO: 87389 - RNA, 22 nt, Human
uuacauacuuacuagaucuaug

SEQ ID NO: 87390 - RNA, 22 nt, Human
uuacaucacuuuacuuaauaau

SEQ ID NO: 87391 - RNA, 22 nt, Human
uuacaucagaaucacccaggaa

SEQ ID NO: 87392 - RNA, 22 nt, Human
uuacaucauugagacauacaua

SEQ ID NO: 87393 - RNA, 22 nt, Human
uuacaucuaaacugugaacaau

SEQ ID NO: 87394 - RNA, 19 nt, Human
uuacaucugcaacacuggu

SEQ ID NO: 87395 - RNA, 19 nt, Human
uuacaugacauaugaagga

SEQ ID NO: 87396 - RNA, 22 nt, Human
uuacaugguuuauuuaccuaag

SEQ ID NO: 87397 - RNA, 22 nt, Human
uuacauguggagucugauugca

SEQ ID NO: 87398 - RNA, 22 nt, Human
uuacauucaaggaacucauucu

SEQ ID NO: 87399 - RNA, 22 nt, Human
uuacauucagaaagauuugagu

SEQ ID NO: 87400 - RNA, 22 nt, Human
uuacauucauugaagugauuca

SEQ ID NO: 87401 - RNA, 22 nt, Human
uuacauuguccagaaauuauug

SEQ ID NO: 87402 - RNA, 22 nt, Human
uuaccaagcucugcauguuaag

SEQ ID NO: 87403 - RNA, 22 nt, Human
uuaccacacuuauuuacauugg

SEQ ID NO: 87404 - RNA, 22 nt, Human
uuaccacagugcaugacuucug

SEQ ID NO: 87405 - RNA, 22 nt, Human
uuaccauuauuagguggacuug

SEQ ID NO: 87406 - RNA, 22 nt, Human
uuaccauuccaugacaucagga

SEQ ID NO: 87407 - RNA, 22 nt, Human
uuaccauuuuauaaguuaaagu

SEQ ID NO: 87408 - RNA, 22 nt, Human
uuacccagcccugcccagaugu

SEQ ID NO: 87409 - RNA, 22 nt, Human
uuacccaggaaagaaaugguau

SEQ ID NO: 87410 - RNA, 22 nt, Human
uuacccagggaccaagagaaac

SEQ ID NO: 87411 - RNA, 22 nt, Human
uuaccuaaaauagcucaauuua

SEQ ID NO: 87412 - RNA, 22 nt, Human
uuaccugguguuuaugguccau

SEQ ID NO: 87413 - RNA, 22 nt, Human
uuaccuguguguuugauacaua

SEQ ID NO: 87414 - RNA, 22 nt, Human
uuacgaauguuagauugcaucu

SEQ ID NO: 87415 - RNA, 22 nt, Human
uuacgaguuugcaauuuuaaau

SEQ ID NO: 87416 - RNA, 22 nt, Human
uuacuaagagaaguaaauauuu

SEQ ID NO: 87417 - RNA, 22 nt, Human
uuacuaaguuuuaugcaacuua

SEQ ID NO: 87418 - RNA, 22 nt, Human
uuacuacagagagagcuccagu

SEQ ID NO: 87419 - RNA, 20 nt, Human
uuacucauaggaccacaagc

SEQ ID NO: 87420 - RNA, 22 nt, Human
uuacucauugcuggaucuagaa

SEQ ID NO: 87421 - RNA, 22 nt, Human
uuacugaaaguauacauuucug

SEQ ID NO: 87422 - RNA, 22 nt, Human
uuacugaacccuacuuuuacag

SEQ ID NO: 87423 - RNA, 22 nt, Human
uuacugaggguguaucuuagug

SEQ ID NO: 87424 - RNA, 22 nt, Human
uuacugaucccccaggugaccc

SEQ ID NO: 87425 - RNA, 21 nt, Human
uuacuggcagcagaaaccuga

SEQ ID NO: 87426 - RNA, 22 nt, Human
uuacuguaaaggucacauggug

SEQ ID NO: 87427 - RNA, 22 nt, Human
uuacuguacuagugagacuagg

SEQ ID NO: 87428 - RNA, 22 nt, Human
uuacuguuccucucucaaagag

SEQ ID NO: 87429 - RNA, 22 nt, Human
uuacuguugguguauccauagc

SEQ ID NO: 87430 - RNA, 22 nt, Human
uuacuuacagacaguagacucu

SEQ ID NO: 87431 - RNA, 21 nt, Human
uuacuucugcuuguuauuguc

SEQ ID NO: 87432 - RNA, 22 nt, Human
uuacuugaaaaccaccaguauu

SEQ ID NO: 87433 - RNA, 22 nt, Human
uuacuugaaaggaaauuaaggu

SEQ ID NO: 87434 - RNA, 19 nt, Human
uuacuuggcaaagucaguc

SEQ ID NO: 87435 - RNA, 22 nt, Human
uuacuugguguucugcccagga

SEQ ID NO: 87436 - RNA, 22 nt, Human
uuacuuuaagggugucuuauua

SEQ ID NO: 87437 - RNA, 22 nt, Human
uuacuuuagaaauagucaucaa

SEQ ID NO: 87438 - RNA, 22 nt, Human
uuacuuuagggauguuuugcuu

SEQ ID NO: 87439 - RNA, 22 nt, Human
uuacuuuaugugauggauuagu

SEQ ID NO: 87440 - RNA, 21 nt, Human
uuacuuuugcaccaaccuaau

SEQ ID NO: 87441 - RNA, 23 nt, Human
uuacuuuugcaccaaccuaauau

SEQ ID NO: 87442 - RNA, 21 nt, Human
uuacuuuugcagcaaccuaau

SEQ ID NO: 87443 - RNA, 22 nt, Human
uuagaaaaaacgucuucuagug

SEQ ID NO: 87444 - RNA, 22 nt, Human
uguggggcucccuggcagccug

SEQ ID NO: 87445 - RNA, 22 nt, Human
uguggggguacacguacacaug

SEQ ID NO: 87446 - RNA, 22 nt, Human
uguggguggagugauauuagcu

SEQ ID NO: 87447 - RNA, 22 nt, Human
uguggucccaaggcaacuggaa

SEQ ID NO: 87448 - RNA, 22 nt, Human
ugugguccucucaacugaaggu

SEQ ID NO: 87449 - RNA, 22 nt, Human
uguggugccgagagucuggacg

SEQ ID NO: 87450 - RNA, 22 nt, Human
ugugguggggucugguauucca

SEQ ID NO: 87451 - RNA, 19 nt, Human
uguguaaagucugugguca

SEQ ID NO: 87452 - RNA, 22 nt, Human
uguguaaauggacugugaauua

SEQ ID NO: 87453 - RNA, 22 nt, Human
uguguaaauggcaucucucagc

SEQ ID NO: 87454 - RNA, 22 nt, Human
uguguaaauuauuuuuaaugau

SEQ ID NO: 87455 - RNA, 17 nt, Human
uguguaaguugcauaga

SEQ ID NO: 87456 - RNA, 22 nt, Human
uguguacaagccugaguacaga

SEQ ID NO: 87457 - RNA, 22 nt, Human
uguguagcuuucuucugugggg

SEQ ID NO: 87458 - RNA, 22 nt, Human
uguguaggauuuccuggagccu

SEQ ID NO: 87459 - RNA, 20 nt, Human
uguguauaaauauauguuuc

SEQ ID NO: 87460 - RNA, 22 nt, Human
uguguauacgaguaugaauaug

SEQ ID NO: 87461 - RNA, 23 nt, Human
uguguauguaucuaugcauaggu

SEQ ID NO: 87462 - RNA, 21 nt, Human
uguguauguccaaugcccuac

SEQ ID NO: 87463 - RNA, 22 nt, Human
uguguaugucuguaugcacaca

SEQ ID NO: 87464 - RNA, 22 nt, Human
uguguauucagcaagcgaaaca

SEQ ID NO: 87465 - RNA, 22 nt, Human
ugugucaacaacagccuuggau

SEQ ID NO: 87466 - RNA, 22 nt, Human
ugugucagaaggcaauggggau

SEQ ID NO: 87467 - RNA, 22 nt, Human
ugugucagcauccuuugggaca

SEQ ID NO: 87468 - RNA, 22 nt, Human
ugugucaggagauagcaaaggg

SEQ ID NO: 87469 - RNA, 22 nt, Human
ugugucaggccuuaucgguggc

SEQ ID NO: 87470 - RNA, 22 nt, Human
ugugucauugccaugaaaaggc

SEQ ID NO: 87471 - RNA, 20 nt, Human
uguguccaucaucugggcac

SEQ ID NO: 87472 - RNA, 22 nt, Human
uguguccauucaggcacugacc

SEQ ID NO: 87473 - RNA, 22 nt, Human
uguguccuacugaggagcuccu

SEQ ID NO: 87474 - RNA, 22 nt, Human
uguguccuccagggagauguaa

SEQ ID NO: 87475 - RNA, 22 nt, Human
uguguccugguguuaauuuuau

SEQ ID NO: 87476 - RNA, 22 nt, Human
uguguccuguccccuugcugcu

SEQ ID NO: 87477 - RNA, 23 nt, Human
uguguccuuaacuguauauacua

SEQ ID NO: 87478 - RNA, 22 nt, Human
uguguccuuccaguuuuuccug

SEQ ID NO: 87479 - RNA, 22 nt, Human
ugugucuaggcucaugcuugcu

SEQ ID NO: 87480 - RNA, 22 nt, Human
ugugucucaagucagagcauca

SEQ ID NO: 87481 - RNA, 22 nt, Human
ugugucugcacugaguccucac

SEQ ID NO: 87482 - RNA, 22 nt, Human
ugugucugcccuuaguacaucu

SEQ ID NO: 87483 - RNA, 22 nt, Human
ugugucuggauagguaauggau

SEQ ID NO: 87484 - RNA, 22 nt, Human
ugugucuguuuugcucaccauu

SEQ ID NO: 87485 - RNA, 22 nt, Human
ugugucuuaaguuccaagacau

SEQ ID NO: 87486 - RNA, 22 nt, Human
ugugucuuacauaauuacaugu

SEQ ID NO: 87487 - RNA, 22 nt, Human
ugugugaagcacucugggugau

SEQ ID NO: 87488 - RNA, 22 nt, Human
ugugugaauagcaguggcuggu

SEQ ID NO: 87489 - RNA, 22 nt, Human
ugugugaauuacgcguguccug

SEQ ID NO: 87490 - RNA, 22 nt, Human
ugugugauuccacuuauauggg

SEQ ID NO: 87491 - RNA, 22 nt, Human
ugugugauugcacuuauaugag

SEQ ID NO: 87492 - RNA, 22 nt, Human
ugugugcaagugacauuagaaa

SEQ ID NO: 87493 - RNA, 22 nt, Human
ugucagugucugagguuuuaua

SEQ ID NO: 87494 - RNA, 22 nt, Human
ugucaguuaaaugagguacaag

SEQ ID NO: 87495 - RNA, 22 nt, Human
ugucaguucaauuauaguaauu

SEQ ID NO: 87496 - RNA, 22 nt, Human
ugucaguucugguuggcuccca

SEQ ID NO: 87497 - RNA, 22 nt, Human
ugucauaaucaguuuugcaugu

SEQ ID NO: 87498 - RNA, 22 nt, Human
ugucauauccuccuuaaaggug

SEQ ID NO: 87499 - RNA, 22 nt, Human
ugucaucuucaucauaaguaaa

SEQ ID NO: 87500 - RNA, 22 nt, Human
ugucaucuuggucuggaauaag

SEQ ID NO: 87501 - RNA, 22 nt, Human
ugucaugcagguuuguuauaga

SEQ ID NO: 87502 - RNA, 22 nt, Human
ugucaugccauuuaaaauguuu

SEQ ID NO: 87503 - RNA, 22 nt, Human
ugucauggagcuuauauuccag

SEQ ID NO: 87504 - RNA, 22 nt, Human
ugucauggcacuagaguggggu

SEQ ID NO: 87505 - RNA, 17 nt, Human
ugucauggcuaugguug

SEQ ID NO: 87506 - RNA, 22 nt, Human
ugucaugggguuguuuuguaca

SEQ ID NO: 87507 - RNA, 22 nt, Human
ugucauguaaagaguaaauggu

SEQ ID NO: 87508 - RNA, 22 nt, Human
ugucauguaaccuuucugagcc

SEQ ID NO: 87509 - RNA, 22 nt, Human
ugucauguagcauuuuaugucu

SEQ ID NO: 87510 - RNA, 22 nt, Human
ugucaugucuguaaauacacca

SEQ ID NO: 87511 - RNA, 22 nt, Human
ugucauuaugaggauuacaaua

SEQ ID NO: 87512 - RNA, 22 nt, Human
ugucauuauuugccuacugacu

SEQ ID NO: 87513 - RNA, 22 nt, Human
ugucauugguacaaauugauug

SEQ ID NO: 87514 - RNA, 20 nt, Human
ugucauuguuucuaggaccu

SEQ ID NO: 87515 - RNA, 22 nt, Human
ugucauuuaauagauaugaugg

SEQ ID NO: 87516 - RNA, 22 nt, Human
ugucauuuauucucuuauucua

SEQ ID NO: 87517 - RNA, 22 nt, Human
ugucauuucacaauaucacuca

SEQ ID NO: 87518 - RNA, 22 nt, Human
ugucauuuuauguauguggucu

SEQ ID NO: 87519 - RNA, 22 nt, Human
ugucauuuucauccuaaggagc

SEQ ID NO: 87520 - RNA, 22 nt, Human
ugucauuuucuaaucuguuguc

SEQ ID NO: 87521 - RNA, 22 nt, Human
ugucauuuucugguuaguuaau

SEQ ID NO: 87522 - RNA, 22 nt, Human
ugucauuuugucucacugcuau

SEQ ID NO: 87523 - RNA, 22 nt, Human
uguccaggaauugacccugcaa

SEQ ID NO: 87524 - RNA, 22 nt, Human
uguccagggauggggucaggga

SEQ ID NO: 87525 - RNA, 22 nt, Human
uguccagguuagcuucaaacac

SEQ ID NO: 87526 - RNA, 22 nt, Human
uguccagugauucucaugagcc

SEQ ID NO: 87527 - RNA, 22 nt, Human
uguccauaccuuuaccugugua

SEQ ID NO: 87528 - RNA, 22 nt, Human
uguccauggauagagcugcucg

SEQ ID NO: 87529 - RNA, 18 nt, Human
uguccauguuguuccuga

SEQ ID NO: 87530 - RNA, 17 nt, Human
uguccauuugccuggag

SEQ ID NO: 87531 - RNA, 19 nt, Human
ugucccagacuccgugucu

SEQ ID NO: 87532 - RNA, 22 nt, Human
ugucccagauacuggacauaga

SEQ ID NO: 87533 - RNA, 22 nt, Human
ugucccagcacuuugggagucu

SEQ ID NO: 87534 - RNA, 22 nt, Human
ugucccaggcugaaguacagug

SEQ ID NO: 87535 - RNA, 22 nt, Human
ugucccagguccuagaugacca

SEQ ID NO: 87536 - RNA, 22 nt, Human
ugucccaguucccaggguugcu

SEQ ID NO: 87537 - RNA, 22 nt, Human
ugucccaguuggguauugaauu

SEQ ID NO: 87538 - RNA, 22 nt, Human
ugucccaguuuugcagguuaga

SEQ ID NO: 87539 - RNA, 22 nt, Human
uguccccagcacucacucucca

SEQ ID NO: 87540 - RNA, 20 nt, Human
uguccccuagaucccagcuc

SEQ ID NO: 87541 - RNA, 22 nt, Human
ugucccuggaacuauggcucca

SEQ ID NO: 87542 - RNA, 22 nt, Human
uguccuagaguacauuccacug

SEQ ID NO: 87543 - RNA, 22 nt, Human
uguccuagauccagcugugcug

SEQ ID NO: 87544 - RNA, 22 nt, Human
uggagauguaaagcaaggcuua

SEQ ID NO: 87545 - RNA, 22 nt, Human
uggagcagaggcugagguuggg

SEQ ID NO: 87546 - RNA, 22 nt, Human
uggagcagcacaagaaagggga

SEQ ID NO: 87547 - RNA, 22 nt, Human
uggagcagccaugaugacagag

SEQ ID NO: 87548 - RNA, 22 nt, Human
uggagcaggaaacaucuagagg

SEQ ID NO: 87549 - RNA, 18 nt, Human
uggagcaggaagccuggc

SEQ ID NO: 87550 - RNA, 22 nt, Human
uggagcaggacggggaguggua

SEQ ID NO: 87551 - RNA, 22 nt, Human
uggagccaaaaagggaaggaga

SEQ ID NO: 87552 - RNA, 22 nt, Human
uggagccacucacuaucugagu

SEQ ID NO: 87553 - RNA, 22 nt, Human
uggagccauaacccuuucguac

SEQ ID NO: 87554 - RNA, 22 nt, Human
uggagcccagacacuggcauug

SEQ ID NO: 87555 - RNA, 22 nt, Human
uggagccuguguuucugcccag

SEQ ID NO: 87556 - RNA, 22 nt, Human
uggagcucagcgggugguuucu

SEQ ID NO: 87557 - RNA, 20 nt, Human
uggagcuccagcguccaugu

SEQ ID NO: 87558 - RNA, 22 nt, Human
uggagcucuggaaguucuaagc

SEQ ID NO: 87559 - RNA, 22 nt, Human
uggagcugaacuuugaggccag

SEQ ID NO: 87560 - RNA, 23 nt, Human
uggagcugacagucagagggagg

SEQ ID NO: 87561 - RNA, 22 nt, Human
uggagcugacucacaccagcua

SEQ ID NO: 87562 - RNA, 22 nt, Human
uggagcugaggggaaugcugag

SEQ ID NO: 87563 - RNA, 22 nt, Human
uggagcuggaagaauguagacg

SEQ ID NO: 87564 - RNA, 22 nt, Human
uggagcuggaagacagugauau

SEQ ID NO: 87565 - RNA, 22 nt, Human
uggagcuggaauuucugggccu

SEQ ID NO: 87566 - RNA, 22 nt, Human
uggagcuggcuuguggaaguug

SEQ ID NO: 87567 - RNA, 23 nt, Human
uggagcugggauuugauuugauu

SEQ ID NO: 87568 - RNA, 22 nt, Human
uggagcugggguuugaaucugg

SEQ ID NO: 87569 - RNA, 22 nt, Human
uggagcugguucuggggaagcu

SEQ ID NO: 87570 - RNA, 20 nt, Human
uggagcuguaaucuugucug

SEQ ID NO: 87571 - RNA, 22 nt, Human
uggagcugucacucagaaccaa

SEQ ID NO: 87572 - RNA, 20 nt, Human
uggagcugugguaaggagca

SEQ ID NO: 87573 - RNA, 18 nt, Human
uggaggaaaaaucucaug

SEQ ID NO: 87574 - RNA, 22 nt, Human
uggaggaaaauuacuggggucu

SEQ ID NO: 87575 - RNA, 22 nt, Human
uggaggaaucagggcuuaggcu

SEQ ID NO: 87576 - RNA, 22 nt, Human
uggaggagaccauuccacucag

SEQ ID NO: 87577 - RNA, 19 nt, Human
uggaggagaggaaaaguca

SEQ ID NO: 87578 - RNA, 22 nt, Human
uggaggaggaugcauuuguugu

SEQ ID NO: 87579 - RNA, 22 nt, Human
uggaggaugagugugggcucug

SEQ ID NO: 87580 - RNA, 22 nt, Human
uggaggcaacugaagauguagu

SEQ ID NO: 87581 - RNA, 22 nt, Human
uggaggcaccacuggcugcccg

SEQ ID NO: 87582 - RNA, 20 nt, Human
uggaggcagagccagaggga

SEQ ID NO: 87583 - RNA, 22 nt, Human
uggaggcagccgugaaccaccu

SEQ ID NO: 87584 - RNA, 22 nt, Human
uggaggcaguuuaagucugaga

SEQ ID NO: 87585 - RNA, 16 nt, Human
uggaggcaucuggccc

SEQ ID NO: 87586 - RNA, 22 nt, Human
uggaggccagagguacugggac

SEQ ID NO: 87587 - RNA, 22 nt, Human
uggaggcccacacuggguagau

SEQ ID NO: 87588 - RNA, 19 nt, Human
uggagggguuugaaugugg

SEQ ID NO: 87589 - RNA, 22 nt, Human
uggaggucgcgcgggugcugca

SEQ ID NO: 87590 - RNA, 22 nt, Human
uggaggucuccugguauugacc

SEQ ID NO: 87591 - RNA, 22 nt, Human
uggaggucucugucugggcagg

SEQ ID NO: 87592 - RNA, 22 nt, Human
uggagguggaguuggaaacuga

SEQ ID NO: 87593 - RNA, 22 nt, Human
uggagguguggagucaaaggga

SEQ ID NO: 87594 - RNA, 22 nt, Human
uggaguaagagccaccagccaa

SEQ ID NO: 87595 - RNA, 22 nt, Human
uggaguaaguaugccuuggugg

SEQ ID NO: 87596 - RNA, 22 nt, Human
uggagucacuuccauaugggaa

SEQ ID NO: 87597 - RNA, 22 nt, Human
uggagucagcuagaccuguguu

SEQ ID NO: 87598 - RNA, 22 nt, Human
uggaguccccgagaggccugca

SEQ ID NO: 87599 - RNA, 22 nt, Human
uggauaaaaucuguaaggcuca

SEQ ID NO: 87600 - RNA, 22 nt, Human
uggaucaugugaugucaggagu

SEQ ID NO: 87601 - RNA, 22 nt, Human
uggauccagcugcuccuaugag

SEQ ID NO: 87602 - RNA, 22 nt, Human
uggaucucggcaaugcgggacu

SEQ ID NO: 87603 - RNA, 22 nt, Human
uuguugcauaaaguaggaaaua

SEQ ID NO: 87604 - RNA, 22 nt, Human
uuguugcauuucaaguaugaga

SEQ ID NO: 87605 - RNA, 22 nt, Human
uuguugccaaauguaaaauaug

SEQ ID NO: 87606 - RNA, 22 nt, Human
uuguuguagacgcgaagugacu

SEQ ID NO: 87607 - RNA, 22 nt, Human
uuguuuaaaagaaaucauagaa

SEQ ID NO: 87608 - RNA, 22 nt, Human
uuguuuaagccacccaaucugu

SEQ ID NO: 87609 - RNA, 22 nt, Human
uuguuuaauaucgugaaguacu

SEQ ID NO: 87610 - RNA, 22 nt, Human
uuguuuacaaguuacucagucu

SEQ ID NO: 87611 - RNA, 23 nt, Human
uuguuuaccguaggacuuuuaac

SEQ ID NO: 87612 - RNA, 22 nt, Human
uuguuuacuaagaaccugguca

SEQ ID NO: 87613 - RNA, 22 nt, Human
uuguuuauguaauuggcacacu

SEQ ID NO: 87614 - RNA, 22 nt, Human
uuguuucaaauauuucagaaua

SEQ ID NO: 87615 - RNA, 22 nt, Human
uuguuucaugaguguaaaggga

SEQ ID NO: 87616 - RNA, 22 nt, Human
uuguuucuccagucuaggaaaa

SEQ ID NO: 87617 - RNA, 22 nt, Human
uuguuucuccuggugccugaua

SEQ ID NO: 87618 - RNA, 22 nt, Human
uuguuucucuggucuugaguga

SEQ ID NO: 87619 - RNA, 20 nt, Human
uuguuucugcuauuuucuaa

SEQ ID NO: 87620 - RNA, 22 nt, Human
uuguuucuucauuuagaagcuu

SEQ ID NO: 87621 - RNA, 22 nt, Human
uuguuugcccacaacuauuaag

SEQ ID NO: 87622 - RNA, 22 nt, Human
uuguuuggaacuuggugccacc

SEQ ID NO: 87623 - RNA, 18 nt, Human
uuguuuuaagacucuguc

SEQ ID NO: 87624 - RNA, 22 nt, Human
uuguuuuaagccagucugccua

SEQ ID NO: 87625 - RNA, 22 nt, Human
uuguuuuaaugagggagguuga

SEQ ID NO: 87626 - RNA, 22 nt, Human
uuguuuuccugggauaccaacc

SEQ ID NO: 87627 - RNA, 22 nt, Human
uuguuuucuuguauauagccuc

SEQ ID NO: 87628 - RNA, 22 nt, Human
uuguuuugcuaaagggucauca

SEQ ID NO: 87629 - RNA, 22 nt, Human
uuguuuuggagaugagcuaaaa

SEQ ID NO: 87630 - RNA, 23 nt, Human
uuguuuuuagagguggcaugaga

SEQ ID NO: 87631 - RNA, 22 nt, Human
uuuaaaaggcagcuucuuuugu

SEQ ID NO: 87632 - RNA, 22 nt, Human
uuuaaaagggguauuaagucca

SEQ ID NO: 87633 - RNA, 22 nt, Human
uuuaaacauaucuguugaggga

SEQ ID NO: 87634 - RNA, 22 nt, Human
uuuaaacaucuuguugccuuaa

SEQ ID NO: 87635 - RNA, 17 nt, Human
uuuaaacuacuacaagg

SEQ ID NO: 87636 - RNA, 22 nt, Human
uuuaaagagaaugugaaggagu

SEQ ID NO: 87637 - RNA, 22 nt, Human
uuuaaauaggacuccugggggu

SEQ ID NO: 87638 - RNA, 22 nt, Human
uuuaaauguucaugauacugaa

SEQ ID NO: 87639 - RNA, 22 nt, Human
uuuaaauuauaguuaaugucug

SEQ ID NO: 87640 - RNA, 22 nt, Human
uuuaaauucugucugccgcuua

SEQ ID NO: 87641 - RNA, 22 nt, Human
uuuaacauguucaagaaacaua

SEQ ID NO: 87642 - RNA, 22 nt, Human
uuuaaccagaaagguacucauc

SEQ ID NO: 87643 - RNA, 22 nt, Human
uuuaagacccacagggaaguug

SEQ ID NO: 87644 - RNA, 22 nt, Human
uuuaagaugguauuuuauaaag

SEQ ID NO: 87645 - RNA, 19 nt, Human
uuuaagcaauaguaucuug

SEQ ID NO: 87646 - RNA, 22 nt, Human
uuuaagcuaaugucauaauuag

SEQ ID NO: 87647 - RNA, 22 nt, Human
uuuaaggaaaaaauguacuuag

SEQ ID NO: 87648 - RNA, 22 nt, Human
uuuaaggaggggcucacguggg

SEQ ID NO: 87649 - RNA, 21 nt, Human
uuuaaggccagcaggagguga

SEQ ID NO: 87650 - RNA, 22 nt, Human
uuuaagugaugaaaugcagaua

SEQ ID NO: 87651 - RNA, 15 nt, Human
uuuaauauggaguua

SEQ ID NO: 87652 - RNA, 22 nt, Human
uuuaauauuucuuuccugaagc

SEQ ID NO: 87653 - RNA, 22 nt, Human
uuucaguugcagugguugucua

SEQ ID NO: 87654 - RNA, 22 nt, Human
uuucaguuucauggcacagcua

SEQ ID NO: 87655 - RNA, 22 nt, Human
uuucaguuugaaggaaaggcca

SEQ ID NO: 87656 - RNA, 23 nt, Human
uuucaguuuggaccagccccgac

SEQ ID NO: 87657 - RNA, 22 nt, Human
uuucauaaacaguagaagacua

SEQ ID NO: 87658 - RNA, 22 nt, Human
uuucauaaugucacagucaaaa

SEQ ID NO: 87659 - RNA, 23 nt, Human
uuucauaugguguggaugaagaa

SEQ ID NO: 87660 - RNA, 22 nt, Human
uuucaucugugcugccaagacu

SEQ ID NO: 87661 - RNA, 22 nt, Human
uuucaucuugauucuauauggc

SEQ ID NO: 87662 - RNA, 22 nt, Human
uuucaugagauuccuccacauc

SEQ ID NO: 87663 - RNA, 22 nt, Human
uuucauguaaucauuuaggugg

SEQ ID NO: 87664 - RNA, 22 nt, Human
uuucaugucugaauucuuuagu

SEQ ID NO: 87665 - RNA, 23 nt, Human
uuucauguuggcaugacugacuu

SEQ ID NO: 87666 - RNA, 19 nt, Human
uuucauguuuuuggugaga

SEQ ID NO: 87667 - RNA, 22 nt, Human
uuucauucagcacccugaggug

SEQ ID NO: 87668 - RNA, 22 nt, Human
uuucauucauuauacaguagag

SEQ ID NO: 87669 - RNA, 22 nt, Human
uuucauugaacuaaagaaucug

SEQ ID NO: 87670 - RNA, 22 nt, Human
uuucauugccauaaggugggau

SEQ ID NO: 87671 - RNA, 22 nt, Human
uuucauugccuuuggaaggucu

SEQ ID NO: 87672 - RNA, 22 nt, Human
uuucauuggcucccugaugaau

SEQ ID NO: 87673 - RNA, 22 nt, Human
uuuccaaaaguuuguucugugc

SEQ ID NO: 87674 - RNA, 22 nt, Human
uuuccaaaaugaaucuaaugca

SEQ ID NO: 87675 - RNA, 22 nt, Human
uuuccaaacccagcgagcuaca

SEQ ID NO: 87676 - RNA, 22 nt, Human
uuuccaaaggaguaccacgcau

SEQ ID NO: 87677 - RNA, 22 nt, Human
uuuccaaaguugccauaagcuu

SEQ ID NO: 87678 - RNA, 18 nt, Human
uuuccaagaagagagcuc

SEQ ID NO: 87679 - RNA, 22 nt, Human
uuuccaauaaagugucauuguu

SEQ ID NO: 87680 - RNA, 22 nt, Human
uuuccaauaaggucaccuuccu

SEQ ID NO: 87681 - RNA, 22 nt, Human
uuuccacccagagcauuuguuu

SEQ ID NO: 87682 - RNA, 22 nt, Human
uuuccacuccuauugcaucuca

SEQ ID NO: 87683 - RNA, 22 nt, Human
uuuccacugggcacggggccag

SEQ ID NO: 87684 - RNA, 22 nt, Human
uuuccagaaauaccauuuggug

SEQ ID NO: 87685 - RNA, 22 nt, Human
uuuccagagcaugucugcucag

SEQ ID NO: 87686 - RNA, 22 nt, Human
uuuccagagggugcucagggcg

SEQ ID NO: 87687 - RNA, 22 nt, Human
uuuccaggaaguaaggauaauc

SEQ ID NO: 87688 - RNA, 22 nt, Human
uuuccaggagaaagagagccuu

SEQ ID NO: 87689 - RNA, 22 nt, Human
uuuccagguauuaauacuguau

SEQ ID NO: 87690 - RNA, 22 nt, Human
uuuccagucccuggauuuaacc

SEQ ID NO: 87691 - RNA, 22 nt, Human
uuuccagugauggggucuggcu

SEQ ID NO: 87692 - RNA, 22 nt, Human
uuuccauauuuaaucaaaauaa

SEQ ID NO: 87693 - RNA, 22 nt, Human
uuuccauguguacuggccagaa

SEQ ID NO: 87694 - RNA, 22 nt, Human
uuucccaaguguaaacauggca

SEQ ID NO: 87695 - RNA, 22 nt, Human
uuucccaaugaguccuugagca

SEQ ID NO: 87696 - RNA, 23 nt, Human
uuucccacccucucucauugcug

SEQ ID NO: 87697 - RNA, 21 nt, Human
uuucccagcagagauagcugg

SEQ ID NO: 87698 - RNA, 19 nt, Human
uuucccagcccuugcugug

SEQ ID NO: 87699 - RNA, 22 nt, Human
uuucccaggcccucagggcugc

SEQ ID NO: 87700 - RNA, 22 nt, Human
uuucccaucuuagcagauuaaa

SEQ ID NO: 87701 - RNA, 17 nt, Human
uuucccuccuuccacuc

SEQ ID NO: 87702 - RNA, 22 nt, Human
uuucccucucaucucuauuauu

SEQ ID NO: 87703 - RNA, 22 nt, Human
uuucccuucuuuccugaguaau

SEQ ID NO: 87704 - RNA, 22 nt, Human
uuucccuuguuccuuccucuga

SEQ ID NO: 87705 - RNA, 19 nt, Human
uuuccuaaaaagcugugcu

SEQ ID NO: 87706 - RNA, 22 nt, Human
uuuccuaacacaaugcaugaga

SEQ ID NO: 87707 - RNA, 22 nt, Human
uuuccuacugcccuauacacac

SEQ ID NO: 87708 - RNA, 22 nt, Human
uuuccucacacagaagaucuug

SEQ ID NO: 87709 - RNA, 22 nt, Human
uuuccucacuucaugagaguuu

SEQ ID NO: 87710 - RNA, 22 nt, Human
uuuccucauuuaucugcuggga

SEQ ID NO: 87711 - RNA, 22 nt, Human
uuuccucugacugcuccccugc

SEQ ID NO: 87712 - RNA, 22 nt, Human
uuugacaacagcaaaugucaca

SEQ ID NO: 87713 - RNA, 22 nt, Human
uuugacaacguuguugugagga

SEQ ID NO: 87714 - RNA, 22 nt, Human
uuugacaacugugcaguuugua

SEQ ID NO: 87715 - RNA, 22 nt, Human
uuugacaauuagguagaaaaag

SEQ ID NO: 87716 - RNA, 22 nt, Human
uuugacaccaggagagaaaaca

SEQ ID NO: 87717 - RNA, 22 nt, Human
uuugacacugggagugugggug

SEQ ID NO: 87718 - RNA, 22 nt, Human
uuugacagaaaguuauuauuuu

SEQ ID NO: 87719 - RNA, 22 nt, Human
uuugacagacauuuacuacauu

SEQ ID NO: 87720 - RNA, 19 nt, Human
uuugacagaguuugagcau

SEQ ID NO: 87721 - RNA, 22 nt, Human
uuugacagauccuuaacucagc

SEQ ID NO: 87722 - RNA, 22 nt, Human
uuugacagcauauccucauauu

SEQ ID NO: 87723 - RNA, 22 nt, Human
uuugacagggugaugagguggu

SEQ ID NO: 87724 - RNA, 22 nt, Human
uuugacaguacucuguaggauc

SEQ ID NO: 87725 - RNA, 22 nt, Human
uuugacaguccccugauguuug

SEQ ID NO: 87726 - RNA, 22 nt, Human
uuugacagugacgccuguauga

SEQ ID NO: 87727 - RNA, 20 nt, Human
uuugacauauacaguucagg

SEQ ID NO: 87728 - RNA, 22 nt, Human
uuugacaucaauacccuagaau

SEQ ID NO: 87729 - RNA, 22 nt, Human
uuugacauuggcuuauucuguu

SEQ ID NO: 87730 - RNA, 20 nt, Human
uuugacucaggccuuuagcc

SEQ ID NO: 87731 - RNA, 22 nt, Human
uuugacucauuaaagucuccgu

SEQ ID NO: 87732 - RNA, 22 nt, Human
uuugacuccacuccuaacuccu

SEQ ID NO: 87733 - RNA, 19 nt, Human
uuugacuccucauuuuuau

SEQ ID NO: 87734 - RNA, 21 nt, Human
uuugacuccucauuuuuauau

SEQ ID NO: 87735 - RNA, 22 nt, Human
uuugagaaaaccagaaagaucu

SEQ ID NO: 87736 - RNA, 22 nt, Human
uuugagaacccuguauuuuaag

SEQ ID NO: 87737 - RNA, 22 nt, Human
uuugagaagaguuugagguauu

SEQ ID NO: 87738 - RNA, 22 nt, Human
uuugagaagauaggggaauacu

SEQ ID NO: 87739 - RNA, 22 nt, Human
uuugagaagcauggcuguauuc

SEQ ID NO: 87740 - RNA, 22 nt, Human
uuugagaagcugucuugggcuc

SEQ ID NO: 87741 - RNA, 22 nt, Human
uuugagauggagucuugcucug

SEQ ID NO: 87742 - RNA, 22 nt, Human
uuugaggaagaucggagggaaa

SEQ ID NO: 87743 - RNA, 22 nt, Human
uuugaguagugagacuaggcag

SEQ ID NO: 87744 - RNA, 22 nt, Human
uuugauaacagugaauaucaug

SEQ ID NO: 87745 - RNA, 22 nt, Human
uuugauaguugauuaaauucca

SEQ ID NO: 87746 - RNA, 22 nt, Human
uuugaucaugaagaggauaaac

SEQ ID NO: 87747 - RNA, 22 nt, Human
uuugaucucccagacuaaggag

SEQ ID NO: 87748 - RNA, 22 nt, Human
uuuguaaaggccugaauuucag

SEQ ID NO: 87749 - RNA, 22 nt, Human
uuuguaaauagcaguacucaug

SEQ ID NO: 87750 - RNA, 22 nt, Human
uuuguaaccuaaagcaccagau

SEQ ID NO: 87751 - RNA, 22 nt, Human
uuuguaagcaaaaaguccauuc

SEQ ID NO: 87752 - RNA, 22 nt, Human
uuuguaaggaauauucuuggug

SEQ ID NO: 87753 - RNA, 22 nt, Human
uuuguaaggcuaaauaauauuc

SEQ ID NO: 87754 - RNA, 22 nt, Human
uuuguacaauuagcagaggcua

SEQ ID NO: 87755 - RNA, 22 nt, Human
uuuguacacaggauguuauaau

SEQ ID NO: 87756 - RNA, 22 nt, Human
uuuguacacaggucauucaggg

SEQ ID NO: 87757 - RNA, 22 nt, Human
uuuguacacugucuacuaugaa

SEQ ID NO: 87758 - RNA, 22 nt, Human
uuuguacaggugcaggcauuug

SEQ ID NO: 87759 - RNA, 22 nt, Human
uuuguacauucaaaugucccau

SEQ ID NO: 87760 - RNA, 22 nt, Human
uuuguaccugugggaauacaga

SEQ ID NO: 87761 - RNA, 23 nt, Human
uuuguacugcauuaugagacaca

SEQ ID NO: 87762 - RNA, 22 nt, Human
uuuguagaacuguagaacaaug

SEQ ID NO: 87763 - RNA, 22 nt, Human
uuuguagaauaauaucuuucug

SEQ ID NO: 87764 - RNA, 22 nt, Human
uuuguagacuaccaguaauugu

SEQ ID NO: 87765 - RNA, 22 nt, Human
uuuguagauuuucucuccagua

SEQ ID NO: 87766 - RNA, 22 nt, Human
uuuguauaaauuggagcaaugu

SEQ ID NO: 87767 - RNA, 22 nt, Human
uuuguaugaacugguauguagg

SEQ ID NO: 87768 - RNA, 22 nt, Human
uuuguauuacaaagucacagua

SEQ ID NO: 87769 - RNA, 22 nt, Human
uuugucaaagaucagaugcuuu

SEQ ID NO: 87770 - RNA, 20 nt, Human
uuugucaacugcauccagca

SEQ ID NO: 87771 - RNA, 22 nt, Human
uuugucaccaguggcuuuggua

SEQ ID NO: 87772 - RNA, 22 nt, Human
uuugucauauagacuauuguga

SEQ ID NO: 87773 - RNA, 22 nt, Human
uuugucauguuuuguaaugucu

SEQ ID NO: 87774 - RNA, 22 nt, Human
uuugucauuucccugauuaaag

SEQ ID NO: 87775 - RNA, 22 nt, Human
uuuguccuauaauccucuuaca

SEQ ID NO: 87776 - RNA, 22 nt, Human
uuugucuuauccaaucucucag

SEQ ID NO: 87777 - RNA, 22 nt, Human
uuugucuucauccuucgagcug

SEQ ID NO: 87778 - RNA, 22 nt, Human
uuugucuuggccucaguuuucu

SEQ ID NO: 87779 - RNA, 22 nt, Human
uuugucuuuccccuccucauug

SEQ ID NO: 87780 - RNA, 23 nt, Human
uuugugaaaguguugagaggaga

SEQ ID NO: 87781 - RNA, 22 nt, Human
uuugugaacuuaggcaauuagg

SEQ ID NO: 87782 - RNA, 22 nt, Human
uuugugaauaagagaaugacag

SEQ ID NO: 87783 - RNA, 22 nt, Human
uuugugaauggaauccacagac

SEQ ID NO: 87784 - RNA, 22 nt, Human
uuugugcaagacaugcuaagag

SEQ ID NO: 87785 - RNA, 22 nt, Human
uuugugcaagagggccaccuua

SEQ ID NO: 87786 - RNA, 19 nt, Human
uuugugcagcaacauuaau

SEQ ID NO: 87787 - RNA, 22 nt, Human
uuugugcauggguauggccaau

SEQ ID NO: 87788 - RNA, 22 nt, Human
uuugugcauucaaguaggagcc

SEQ ID NO: 87789 - RNA, 22 nt, Human
uuuguggcaggagcggagaccg

SEQ ID NO: 87790 - RNA, 22 nt, Human
uuuguguaccuuguacauuugu

SEQ ID NO: 87791 - RNA, 22 nt, Human
uuugugugcuugguauugaaga

SEQ ID NO: 87792 - RNA, 22 nt, Human
uuuguguggcguuggccggcgg

SEQ ID NO: 87793 - RNA, 22 nt, Human
uuugugugugcucacauagaug

SEQ ID NO: 87794 - RNA, 22 nt, Human
uuuguguuguacuucugugcau

SEQ ID NO: 87795 - RNA, 22 nt, Human
uuuguguuuaauacaaggaccu

SEQ ID NO: 87796 - RNA, 22 nt, Human
uuuguucacauuuaggacucuc

SEQ ID NO: 87797 - RNA, 22 nt, Human
uuuguucaccuagcaaacuuuu

SEQ ID NO: 87798 - RNA, 23 nt, Human
uuuguucacuccugggaaagaca

SEQ ID NO: 87799 - RNA, 22 nt, Human
uuuguucacugagcaaugauua

SEQ ID NO: 87800 - RNA, 22 nt, Human
uuuguucaugccuauauucuca

SEQ ID NO: 87801 - RNA, 22 nt, Human
uuuguucauuaguacaguugua

SEQ ID NO: 87802 - RNA, 17 nt, Human
uuuguucguuaguccgg

SEQ ID NO: 87803 - RNA, 22 nt, Human
uuuguucugaagcaaguaggga

SEQ ID NO: 87804 - RNA, 22 nt, Human
uuuguucuugcaacaguuauua

SEQ ID NO: 87805 - RNA, 22 nt, Human
uuuguugggagaaacauuauuu

SEQ ID NO: 87806 - RNA, 18 nt, Human
uuuguuggguugccuuua

SEQ ID NO: 87807 - RNA, 22 nt, Human
uuuguuuacucauucauugaug

SEQ ID NO: 87808 - RNA, 22 nt, Human
uuuguuuagagaauugaagcag

SEQ ID NO: 87809 - RNA, 22 nt, Human
uuuguuuagaugguaaaucagu

SEQ ID NO: 87810 - RNA, 22 nt, Human
uuuguuuaucaaggucuagcau

SEQ ID NO: 87811 - RNA, 22 nt, Human
uuuguuucgcagccucucucug

SEQ ID NO: 87812 - RNA, 22 nt, Human
uuuguuugccacacaaaacagu

SEQ ID NO: 87813 - RNA, 22 nt, Human
uuuuaaacuauagcuggaugcu

SEQ ID NO: 87814 - RNA, 22 nt, Human
uuuuaaacugcagaauuuagaa

SEQ ID NO: 87815 - RNA, 22 nt, Human
uuuuaaaggauacucuugucua

SEQ ID NO: 87816 - RNA, 22 nt, Human
uuuuaaugggcgacuauuaugg

SEQ ID NO: 87817 - RNA, 22 nt, Human
uuuuaaugugcucugcaaugau

SEQ ID NO: 87818 - RNA, 22 nt, Human
uuuuaauuuugcaaaucuggug

SEQ ID NO: 87819 - RNA, 22 nt, Human
uuuuacaagcugagucguuaaa

SEQ ID NO: 87820 - RNA, 22 nt, Human
uuuuacaccuguuaacucuaag

SEQ ID NO: 87821 - RNA, 22 nt, Human
uuuuacauugggaaaugccucu

SEQ ID NO: 87822 - RNA, 22 nt, Human
uuuuaccugaaccacacaguau

SEQ ID NO: 87823 - RNA, 22 nt, Human
uuuuagaaauacugauuuagug

SEQ ID NO: 87824 - RNA, 22 nt, Human
uuuuagaagugccuauccuaug

SEQ ID NO: 87825 - RNA, 22 nt, Human
uuuuagaaucagguugucuggg

SEQ ID NO: 87826 - RNA, 22 nt, Human
uuuuagacuccaucugauucag

SEQ ID NO: 87827 - RNA, 22 nt, Human
uuuuagacuuguauguaaagcc

SEQ ID NO: 87828 - RNA, 22 nt, Human
uuuuagauugggaaauguaaag

SEQ ID NO: 87829 - RNA, 20 nt, Human
uuuuagcagaaagaaagcuc

SEQ ID NO: 87830 - RNA, 22 nt, Human
uuuuaguuguaguuggugagga

SEQ ID NO: 87831 - RNA, 22 nt, Human
uuuuaguuuggauuucuaaagc

SEQ ID NO: 87832 - RNA, 22 nt, Human
uuuuauaaagagagucaguugg

SEQ ID NO: 87833 - RNA, 22 nt, Human
uuuuauaagcaagaaagggaaa

SEQ ID NO: 87834 - RNA, 22 nt, Human
uuuuaucagcagggauaacaag

SEQ ID NO: 87835 - RNA, 22 nt, Human
uuuuaucugcuucauuaguuga

SEQ ID NO: 87836 - RNA, 22 nt, Human
uuuuaucugugacaucuggcag

SEQ ID NO: 87837 - RNA, 22 nt, Human
uuuuaugcaaguuaugauuaaa

SEQ ID NO: 87838 - RNA, 22 nt, Human
uuuuauuaucuuugaaugggac

SEQ ID NO: 87839 - RNA, 22 nt, Human
uuuuauucaaauaguucacacu

SEQ ID NO: 87840 - RNA, 22 nt, Human
uuuuauucauagggauggagag

SEQ ID NO: 87841 - RNA, 23 nt, Human
uuuuauugauauguagcuguugu

SEQ ID NO: 87842 - RNA, 21 nt, Human
uuuuauugaugaauggccacu

SEQ ID NO: 87843 - RNA, 22 nt, Human
uuuucaccauagacacuggucc

SEQ ID NO: 87844 - RNA, 22 nt, Human
uuuucagaggccuaagagguuu

SEQ ID NO: 87845 - RNA, 22 nt, Human
uuuucaggugcaguaaucauau

SEQ ID NO: 87846 - RNA, 22 nt, Human
uuuucaguggcuugcauauguu

SEQ ID NO: 87847 - RNA, 22 nt, Human
uuuucaguugugcucucuaguu

SEQ ID NO: 87848 - RNA, 22 nt, Human
uuuucaguuuuccagguagccg

SEQ ID NO: 87849 - RNA, 22 nt, Human
uuuucaugaggaaauacugccc

SEQ ID NO: 87850 - RNA, 22 nt, Human
uuuucauggccaccgcaaguga

SEQ ID NO: 87851 - RNA, 22 nt, Human
uuuucauuuacauuagggaaga

SEQ ID NO: 87852 - RNA, 19 nt, Human
uuuuccacagaaauauguu

SEQ ID NO: 87853 - RNA, 22 nt, Human
uuuuccacagcaccauaagauu

SEQ ID NO: 87854 - RNA, 22 nt, Human
uuuucccagagcuguccucaag

SEQ ID NO: 87855 - RNA, 22 nt, Human
acagugagcgguagugauugcu

SEQ ID NO: 87856 - RNA, 22 nt, Human
acagugauaaaauuucacaugu

SEQ ID NO: 87857 - RNA, 22 nt, Human
acagugaugagccggcugaggc

SEQ ID NO: 87858 - RNA, 22 nt, Human
acagugauucugcaaaccauau

SEQ ID NO: 87859 - RNA, 22 nt, Human
acagugcacauccugagugauu

SEQ ID NO: 87860 - RNA, 22 nt, Human
acagugcagggcgggaagaagg

SEQ ID NO: 87861 - RNA, 22 nt, Human
acagugcagggugggaagaagg

SEQ ID NO: 87862 - RNA, 22 nt, Human
acagugcaggucucaacaauua

SEQ ID NO: 87863 - RNA, 22 nt, Human
acagugcgggcugcgguggguc

SEQ ID NO: 87864 - RNA, 22 nt, Human
acagugcuucugauaugaugcc

SEQ ID NO: 87865 - RNA, 22 nt, Human
acaguggaaaugugggagggga

SEQ ID NO: 87866 - RNA, 20 nt, Human
acaguggaaauugaugucug

SEQ ID NO: 87867 - RNA, 22 nt, Human
acaguggaauggugggccugca

SEQ ID NO: 87868 - RNA, 22 nt, Human
acaguggaugugauguccaggu

SEQ ID NO: 87869 - RNA, 22 nt, Human
acaguggcagucguguucucua

SEQ ID NO: 87870 - RNA, 22 nt, Human
acagugggacagugacggggga

SEQ ID NO: 87871 - RNA, 22 nt, Human
acaguguacuaaauaguaagag

SEQ ID NO: 87872 - RNA, 22 nt, Human
acccugccugacaacagaggau

SEQ ID NO: 87873 - RNA, 22 nt, Human
acccugcuuggccccacuucua

SEQ ID NO: 87874 - RNA, 22 nt, Human
acccugcuuuaugccguccucu

SEQ ID NO: 87875 - RNA, 22 nt, Human
acccugggaacuggaaacugga

SEQ ID NO: 87876 - RNA, 22 nt, Human
acccugggaccuggagguggau

SEQ ID NO: 87877 - RNA, 22 nt, Human
acccugggcuuggccugcucag

SEQ ID NO: 87878 - RNA, 22 nt, Human
acccugggugagaggcaaacag

SEQ ID NO: 87879 - RNA, 22 nt, Human
acccuggguucccgcagcacca

SEQ ID NO: 87880 - RNA, 18 nt, Human
acccuuuccaaacugcag

SEQ ID NO: 87881 - RNA, 22 nt, Human
acccuuucuuacucacacgcuc

SEQ ID NO: 87882 - RNA, 22 nt, Human
acccuuugucaagcacagaaga

SEQ ID NO: 87883 - RNA, 21 nt, Human
acccuuuguuuaugaaucagc

SEQ ID NO: 87884 - RNA, 22 nt, Human
accggguaggugucaacucuga

SEQ ID NO: 87885 - RNA, 21 nt, Human
accgucaguacuaguauugac

SEQ ID NO: 87886 - RNA, 22 nt, Human
accuaagaaauccagagauuuc

SEQ ID NO: 87887 - RNA, 22 nt, Human
accuaauaaagguaaauucugu

SEQ ID NO: 87888 - RNA, 22 nt, Human
accuacauacggaaauauuuac

SEQ ID NO: 87889 - RNA, 22 nt, Human
accuacauggcuuuaaguaagu

SEQ ID NO: 87890 - RNA, 23 nt, Human
accuagaaauacguuuuacaugg

SEQ ID NO: 87891 - RNA, 21 nt, Human
accucaagcaacaaccaaggu

SEQ ID NO: 87892 - RNA, 22 nt, Human
accucaaggaaaaucuagacag

SEQ ID NO: 87893 - RNA, 22 nt, Human
accucagagaccucucaggugc

SEQ ID NO: 87894 - RNA, 22 nt, Human
accucagaggccagggaucuag

SEQ ID NO: 87895 - RNA, 22 nt, Human
accucagagggauguuacaggc

SEQ ID NO: 87896 - RNA, 22 nt, Human
accucaggauguggacacagaa

SEQ ID NO: 87897 - RNA, 22 nt, Human
accuccagcuuuuuagagacau

SEQ ID NO: 87898 - RNA, 16 nt, Human
accuccagucaagggu

SEQ ID NO: 87899 - RNA, 22 nt, Human
accuccauggcucaguuucaga

SEQ ID NO: 87900 - RNA, 22 nt, Human
accuccccacaugguagugagu

SEQ ID NO: 87901 - RNA, 18 nt, Human
accuccccauuuucugaa

SEQ ID NO: 87902 - RNA, 22 nt, Human
accuccccucaccaaucugguu

SEQ ID NO: 87903 - RNA, 22 nt, Human
accuccccugacucgaaaccca

SEQ ID NO: 87904 - RNA, 22 nt, Human
accucccucgccguccacucug

SEQ ID NO: 87905 - RNA, 20 nt, Human
accucccucuguggguggga

SEQ ID NO: 87906 - RNA, 22 nt, Human
accuccuccaaggagccauagg

SEQ ID NO: 87907 - RNA, 22 nt, Human
accucugccaagaugugcuccc

SEQ ID NO: 87908 - RNA, 22 nt, Human
accucuggacacugcauccuuc

SEQ ID NO: 87909 - RNA, 22 nt, Human
accucuggccuucaggcaucau

SEQ ID NO: 87910 - RNA, 22 nt, Human
accugaauugucauaucuuauu

SEQ ID NO: 87911 - RNA, 22 nt, Human
accugaauuugaaauguuuauu

SEQ ID NO: 87912 - RNA, 22 nt, Human
accugagaaugggggcaugugu

SEQ ID NO: 87913 - RNA, 22 nt, Human
accugagagcuauaagguuuua

SEQ ID NO: 87914 - RNA, 22 nt, Human
accugaggacuggaugguagaa

SEQ ID NO: 87915 - RNA, 22 nt, Human
accugaggcuguuagucuaggu

SEQ ID NO: 87916 - RNA, 22 nt, Human
accugagggcccaaacuuggua

SEQ ID NO: 87917 - RNA, 22 nt, Human
accugcaagcauuacacuucua

SEQ ID NO: 87918 - RNA, 22 nt, Human
accugcacagccccagaaugcc

SEQ ID NO: 87919 - RNA, 22 nt, Human
accugcagcuaaagauguaggg

SEQ ID NO: 87920 - RNA, 22 nt, Human
accugcaggcacaggugugcgc

SEQ ID NO: 87921 - RNA, 22 nt, Human
accugcaggggugcucucuggg

SEQ ID NO: 87922 - RNA, 22 nt, Human
accugcagguguuuccacacuu

SEQ ID NO: 87923 - RNA, 22 nt, Human
accugcaguggccacuccuaau

SEQ ID NO: 87924 - RNA, 20 nt, Human
accugccacagagaaaggua

SEQ ID NO: 87925 - RNA, 22 nt, Human
accugccagaauccaagccaca

SEQ ID NO: 87926 - RNA, 22 nt, Human
accugccagaaugcuaguccug

SEQ ID NO: 87927 - RNA, 22 nt, Human
accugcccacacuuccuuccca

SEQ ID NO: 87928 - RNA, 22 nt, Human
accugcccacauauauauguau

SEQ ID NO: 87929 - RNA, 22 nt, Human
accugcccacuucccaugacau

SEQ ID NO: 87930 - RNA, 22 nt, Human
accugcccagacucagauccua

SEQ ID NO: 87931 - RNA, 22 nt, Human
accugcccuggaggaagauauu

SEQ ID NO: 87932 - RNA, 22 nt, Human
accugccuaucagcugccugcu

SEQ ID NO: 87933 - RNA, 22 nt, Human
accugccuauggagccacaugg

SEQ ID NO: 87934 - RNA, 22 nt, Human
accugcuagaagcaaaugucug

SEQ ID NO: 87935 - RNA, 23 nt, Human
accugcuccaugucaccuucacu

SEQ ID NO: 87936 - RNA, 22 nt, Human
accugcugaggagggggaauua

SEQ ID NO: 87937 - RNA, 22 nt, Human
accugcuuuguaguguuugcug

SEQ ID NO: 87938 - RNA, 22 nt, Human
accuggacaccugcugucaucu

SEQ ID NO: 87939 - RNA, 22 nt, Human
accuggacuugaauccugacuu

SEQ ID NO: 87940 - RNA, 22 nt, Human
accuggagaaagccucucccug

SEQ ID NO: 87941 - RNA, 22 nt, Human
accuggaggcagagguugcagu

SEQ ID NO: 87942 - RNA, 22 nt, Human
accuggagucauuugaggagua

SEQ ID NO: 87943 - RNA, 22 nt, Human
accuggcacacacuggggagug

SEQ ID NO: 87944 - RNA, 22 nt, Human
accuggcacauucuaccacagu

SEQ ID NO: 87945 - RNA, 22 nt, Human
accuggcacuacaggcaccugu

SEQ ID NO: 87946 - RNA, 20 nt, Human
accuggcucucaggagcaac

SEQ ID NO: 87947 - RNA, 23 nt, Human
accuggcugcucaaccugcaggg

SEQ ID NO: 87948 - RNA, 22 nt, Human
accuggcuuccaaucuaggagc

SEQ ID NO: 87949 - RNA, 22 nt, Human
accugggaaagccguggaaagg

SEQ ID NO: 87950 - RNA, 22 nt, Human
accugggaguaugcagugguga

SEQ ID NO: 87951 - RNA, 22 nt, Human
accugguaaccugccugacuaa

SEQ ID NO: 87952 - RNA, 22 nt, Human
accugguuugucucaucaccac

SEQ ID NO: 87953 - RNA, 22 nt, Human
accugucaacccaucaccuagg

SEQ ID NO: 87954 - RNA, 22 nt, Human
accugucaucccggcugcaccg

SEQ ID NO: 87955 - RNA, 22 nt, Human
accugucugggcuacauuugca

SEQ ID NO: 87956 - RNA, 22 nt, Human
accugugucuccucuguguucu

SEQ ID NO: 87957 - RNA, 22 nt, Human
accuguuuucagaaaaugcaga

SEQ ID NO: 87958 - RNA, 22 nt, Human
accuuaaaugugacauagucua

SEQ ID NO: 87959 - RNA, 22 nt, Human
accuuagcuguuaaaacuaagu

SEQ ID NO: 87960 - RNA, 22 nt, Human
accuuauuaaaaugaugaugua

SEQ ID NO: 87961 - RNA, 22 nt, Human
accuuauucuugcccuuagaug

SEQ ID NO: 87962 - RNA, 22 nt, Human
accuuauuuggaaauauaauua

SEQ ID NO: 87963 - RNA, 22 nt, Human
accuucaaacuagauagaaguu

SEQ ID NO: 87964 - RNA, 22 nt, Human
acaugcaagcagccgugcagau

SEQ ID NO: 87965 - RNA, 22 nt, Human
acaugcaauauugagacuuucu

SEQ ID NO: 87966 - RNA, 22 nt, Human
acaugcacacgauucagucugg

SEQ ID NO: 87967 - RNA, 22 nt, Human
acaugcacccaguuacacucuc

SEQ ID NO: 87968 - RNA, 22 nt, Human
acaugcagaauucuuagagagc

SEQ ID NO: 87969 - RNA, 22 nt, Human
acaugcaggaaaaugcacagau

SEQ ID NO: 87970 - RNA, 20 nt, Human
acaugcaguggucauuucag

SEQ ID NO: 87971 - RNA, 22 nt, Human
acaugcauaaacuacuucuuau

SEQ ID NO: 87972 - RNA, 22 nt, Human
acaugcauacaagcacauguag

SEQ ID NO: 87973 - RNA, 22 nt, Human
acaugcauacugcugccaacgc

SEQ ID NO: 87974 - RNA, 19 nt, Human
acaugcauauggacaguug

SEQ ID NO: 87975 - RNA, 22 nt, Human
acaugcaucuccaggcucauuu

SEQ ID NO: 87976 - RNA, 22 nt, Human
acaugcaucucugggacacaug

SEQ ID NO: 87977 - RNA, 22 nt, Human
acaugcaugcuuuggugggugu

SEQ ID NO: 87978 - RNA, 22 nt, Human
acaugcaugugaauauggacac

SEQ ID NO: 87979 - RNA, 22 nt, Human
acaugcauguuguguagggggg

SEQ ID NO: 87980 - RNA, 22 nt, Human
acaugccaagauccucgucuuu

SEQ ID NO: 87981 - RNA, 22 nt, Human
acaugccagcacugcuuuucag

SEQ ID NO: 87982 - RNA, 22 nt, Human
acaugccagccucagcagcagu

SEQ ID NO: 87983 - RNA, 22 nt, Human
acaugcuaauggagaugccaag

SEQ ID NO: 87984 - RNA, 22 nt, Human
acaugcuaauugcaaagucuug

SEQ ID NO: 87985 - RNA, 22 nt, Human
acaugcuacacagagcuccucg

SEQ ID NO: 87986 - RNA, 22 nt, Human
acaugcucuccaaggacagagc

SEQ ID NO: 87987 - RNA, 22 nt, Human
acagggcugaggcuggcuucuu

SEQ ID NO: 87988 - RNA, 22 nt, Human
acagggcuggcguugggacaga

SEQ ID NO: 87989 - RNA, 22 nt, Human
acagggcuuagaaaucuguugc

SEQ ID NO: 87990 - RNA, 21 nt, Human
acagggcuucagggaggguua

SEQ ID NO: 87991 - RNA, 19 nt, Human
acagggcuuggccugacau

SEQ ID NO: 87992 - RNA, 22 nt, Human
acaggggaccuaggacccucgg

SEQ ID NO: 87993 - RNA, 22 nt, Human
acaggggcaggcaggacccuuu

SEQ ID NO: 87994 - RNA, 19 nt, Human
acaggggccuuuccagggu

SEQ ID NO: 87995 - RNA, 22 nt, Human
acagggggucccauggccugga

SEQ ID NO: 87996 - RNA, 22 nt, Human
acagggugacuuugugacagau

SEQ ID NO: 87997 - RNA, 22 nt, Human
acaggguugaagagcauaaagu

SEQ ID NO: 87998 - RNA, 22 nt, Human
acaggguuguggccuuaaaggc

SEQ ID NO: 87999 - RNA, 22 nt, Human
acagguacaagggauuaggaug

SEQ ID NO: 88000 - RNA, 22 nt, Human
acagguaccggucagauuacgg

SEQ ID NO: 88001 - RNA, 22 nt, Human
acaggucuggucugggugggac

SEQ ID NO: 88002 - RNA, 22 nt, Human
acaggucugugugcacagugcu

SEQ ID NO: 88003 - RNA, 22 nt, Human
acaggugaccugcucauaugaa

SEQ ID NO: 88004 - RNA, 18 nt, Human
acaggugauaucuugaga

SEQ ID NO: 88005 - RNA, 22 nt, Human
acaggugcaugcuaccaugucu

SEQ ID NO: 88006 - RNA, 22 nt, Human
acagguggagugguuagcaggc

SEQ ID NO: 88007 - RNA, 22 nt, Human
acaggugggcuuaagagucggc

SEQ ID NO: 88008 - RNA, 22 nt, Human
acagguguccaacauuuaccuu

SEQ ID NO: 88009 - RNA, 22 nt, Human
acagguguugacucacaggccc

SEQ ID NO: 88010 - RNA, 20 nt, Human
acagguucauucugugugac

SEQ ID NO: 88011 - RNA, 22 nt, Human
acagguuuagcucuuaguaguc

SEQ ID NO: 88012 - RNA, 22 nt, Human
acaguaaacaaugcagcaaauu

SEQ ID NO: 88013 - RNA, 18 nt, Human
acaguaaagaaaggaauu

SEQ ID NO: 88014 - RNA, 22 nt, Human
acaguaaagccuucugguugac

SEQ ID NO: 88015 - RNA, 22 nt, Human
acaguaacaccuacucuguccc

SEQ ID NO: 88016 - RNA, 17 nt, Human
acaguaacuauguuaug

SEQ ID NO: 88017 - RNA, 22 nt, Human
acaguaacucuuuuacccuccu

SEQ ID NO: 88018 - RNA, 22 nt, Human
acaguaauauugaugcucguca

SEQ ID NO: 88019 - RNA, 22 nt, Human
acaguaaucugggaacuuguua

SEQ ID NO: 88020 - RNA, 22 nt, Human
acaguaaugauaaccagcauuu

SEQ ID NO: 88021 - RNA, 22 nt, Human
acaguaaugauucugagucucu

SEQ ID NO: 88022 - RNA, 22 nt, Human
acaguacaaaacccaccagagg

SEQ ID NO: 88023 - RNA, 22 nt, Human
acaguacagcugaaacuuuagu

SEQ ID NO: 88024 - RNA, 22 nt, Human
acaguacauagaucucuacccu

SEQ ID NO: 88025 - RNA, 22 nt, Human
acaguaccaggccaaaccauga

SEQ ID NO: 88026 - RNA, 22 nt, Human
acaguaccugcucucaagcaaa

SEQ ID NO: 88027 - RNA, 22 nt, Human
acaguacugaguacugaguugg

SEQ ID NO: 88028 - RNA, 22 nt, Human
acaguacuguguuaacugaacc

SEQ ID NO: 88029 - RNA, 22 nt, Human
acaguagaaacaggcaggcaga

SEQ ID NO: 88030 - RNA, 22 nt, Human
acaguagauggcucagagacag

SEQ ID NO: 88031 - RNA, 22 nt, Human
acaguagauugguaugauguca

SEQ ID NO: 88032 - RNA, 22 nt, Human
acaguaggaauagauguagaua

SEQ ID NO: 88033 - RNA, 22 nt, Human
acaguaguccuuuauuuugguu

SEQ ID NO: 88034 - RNA, 22 nt, Human
acaguagugcucaaucaguguu

SEQ ID NO: 88035 - RNA, 22 nt, Human
acaguauaacuccaugccaccc

SEQ ID NO: 88036 - RNA, 22 nt, Human
acagucaaucagaacagcaugu

SEQ ID NO: 88037 - RNA, 19 nt, Human
acagucagggaauaaagac

SEQ ID NO: 88038 - RNA, 20 nt, Human
acagucagggaauagaaaaa

SEQ ID NO: 88039 - RNA, 22 nt, Human
acagucagggcuuacucaggga

SEQ ID NO: 88040 - RNA, 22 nt, Human
acagucauuagauacaaugucu

SEQ ID NO: 88041 - RNA, 20 nt, Human
acaguccugcacugguguuu

SEQ ID NO: 88042 - RNA, 22 nt, Human
acaguccuguugucaaagcaau

SEQ ID NO: 88043 - RNA, 22 nt, Human
acagucuggaggcugcuucauu

SEQ ID NO: 88044 - RNA, 22 nt, Human
acagucuggcagguguugaaag

SEQ ID NO: 88045 - RNA, 22 nt, Human
acagucuucccuuauuccacuc

SEQ ID NO: 88046 - RNA, 22 nt, Human
acagucuuucuacauucugugc

SEQ ID NO: 88047 - RNA, 22 nt, Human
acagugaaaaguagcuaacaca

SEQ ID NO: 88048 - RNA, 22 nt, Human
acagugaauccaaauuccuacc

SEQ ID NO: 88049 - RNA, 22 nt, Human
acagugacguuuauuugagacg

SEQ ID NO: 88050 - RNA, 22 nt, Human
acagugagauccaagggcaggc

SEQ ID NO: 88051 - RNA, 22 nt, Human
acagugaggacagggacugugu

SEQ ID NO: 88052 - RNA, 22 nt, Human
acagugaugggggugcaggaag

SEQ ID NO: 88053 - RNA, 22 nt, Human
acagugauugggguaucugcag

SEQ ID NO: 88054 - RNA, 22 nt, Human
acagugauuucauccuucuggg

SEQ ID NO: 88055 - RNA, 22 nt, Human
acagugauuucugcaagggcuc

SEQ ID NO: 88056 - RNA, 22 nt, Human
acagugauuuuaggauagaugg

SEQ ID NO: 88057 - RNA, 22 nt, Human
acagugcucaugugacauggug

SEQ ID NO: 88058 - RNA, 22 nt, Human
acagugcugaacgacauggaag

SEQ ID NO: 88059 - RNA, 22 nt, Human
acagugcugaucuagacugacc

SEQ ID NO: 88060 - RNA, 18 nt, Human
acagugcugucacugcuu

SEQ ID NO: 88061 - RNA, 22 nt, Human
acaguggaaagaaacgaauuag

SEQ ID NO: 88062 - RNA, 22 nt, Human
acaguggagaaggcaugaggcu

SEQ ID NO: 88063 - RNA, 22 nt, Human
acaguggaggccauaugguccu

SEQ ID NO: 88064 - RNA, 22 nt, Human
acaguggaugacauccuuuugc

SEQ ID NO: 88065 - RNA, 22 nt, Human
acaguggcaguauuagggcaga

SEQ ID NO: 88066 - RNA, 22 nt, Human
acaguggcuuuugugucugcag

SEQ ID NO: 88067 - RNA, 22 nt, Human
acaguggggucuuaauagaaca

SEQ ID NO: 88068 - RNA, 22 nt, Human
acagugguaggauaacuguuuu

SEQ ID NO: 88069 - RNA, 22 nt, Human
acaguggugagugacugauagg

SEQ ID NO: 88070 - RNA, 18 nt, Human
acagugguuugaugugcu

SEQ ID NO: 88071 - RNA, 22 nt, Human
acaguguaauaugggagucagu

SEQ ID NO: 88072 - RNA, 20 nt, Human
acaguguaauauucacauuc

SEQ ID NO: 88073 - RNA, 22 nt, Human
acucaggcuacaacgcguggcu

SEQ ID NO: 88074 - RNA, 22 nt, Human
acucaggcuacaggggcagaag

SEQ ID NO: 88075 - RNA, 19 nt, Human
acucaggcuuccucugagg

SEQ ID NO: 88076 - RNA, 22 nt, Human
acucaguggcacuuuggaauuu

SEQ ID NO: 88077 - RNA, 22 nt, Human
acucaguuaucauguguccaca

SEQ ID NO: 88078 - RNA, 22 nt, Human
acucauauacuguuguuuuuaa

SEQ ID NO: 88079 - RNA, 22 nt, Human
acucaucagauuagauuagggc

SEQ ID NO: 88080 - RNA, 22 nt, Human
acucaucuucccuccuggaggg

SEQ ID NO: 88081 - RNA, 22 nt, Human
acucauuuuauaacacuguagu

SEQ ID NO: 88082 - RNA, 22 nt, Human
acuccaaaaccugcggcuuggu

SEQ ID NO: 88083 - RNA, 22 nt, Human
acuccaaggccacaugcauucc

SEQ ID NO: 88084 - RNA, 22 nt, Human
acuccacaccacgggggccgcc

SEQ ID NO: 88085 - RNA, 22 nt, Human
acuccaggcaucugcuucugcu

SEQ ID NO: 88086 - RNA, 22 nt, Human
acuccagggcuucuaugauggu

SEQ ID NO: 88087 - RNA, 20 nt, Human
acuccagguggcaugaggac

SEQ ID NO: 88088 - RNA, 22 nt, Human
acuccagguguguuggacucua

SEQ ID NO: 88089 - RNA, 22 nt, Human
acucccagguugccuggcaggc

SEQ ID NO: 88090 - RNA, 22 nt, Human
acuccccaaaacuaaccaugca

SEQ ID NO: 88091 - RNA, 21 nt, Human
acucccugcauaagugauuua

SEQ ID NO: 88092 - RNA, 22 nt, Human
acucccuguacuugccucucuu

SEQ ID NO: 88093 - RNA, 22 nt, Human
acuccgggagccaggagaggcu

SEQ ID NO: 88094 - RNA, 22 nt, Human
acuccucagccagcaucaggga

SEQ ID NO: 88095 - RNA, 22 nt, Human
acuccuggggauccauuccuuu

SEQ ID NO: 88096 - RNA, 22 nt, Human
acuccugggugcugaccagcgu

SEQ ID NO: 88097 - RNA, 22 nt, Human
acuccugugagguagguggcaa

SEQ ID NO: 88098 - RNA, 22 nt, Human
acuccugugggcauggcacccc

SEQ ID NO: 88099 - RNA, 22 nt, Human
acuccuguguggcugggagguu

SEQ ID NO: 88100 - RNA, 22 nt, Human
acucgcggcggacggcggccag

SEQ ID NO: 88101 - RNA, 23 nt, Human
acucguggaauucucugcgaucg

SEQ ID NO: 88102 - RNA, 22 nt, Human
acaguucaagacaucaguauga

SEQ ID NO: 88103 - RNA, 22 nt, Human
acaguucaagucuuagacaaca

SEQ ID NO: 88104 - RNA, 21 nt, Human
acaguucaugauaacuccauc

SEQ ID NO: 88105 - RNA, 22 nt, Human
acaguucccgucuugcacagcu

SEQ ID NO: 88106 - RNA, 22 nt, Human
acaguucuagcuuuuacauuuu

SEQ ID NO: 88107 - RNA, 21 nt, Human
acaguucugccggcaucuuuc

SEQ ID NO: 88108 - RNA, 22 nt, Human
acaguucuguccuagacuucgu

SEQ ID NO: 88109 - RNA, 22 nt, Human
acaguuguuuuccagauauguu

SEQ ID NO: 88110 - RNA, 22 nt, Human
acaguuuacagggauuugagcu

SEQ ID NO: 88111 - RNA, 22 nt, Human
acaguuuauaaaaauaaugagg

SEQ ID NO: 88112 - RNA, 22 nt, Human
acaguuuaucgauucaccuacc

SEQ ID NO: 88113 - RNA, 21 nt, Human
acaguuuauuagaguaagugc

SEQ ID NO: 88114 - RNA, 22 nt, Human
acaguuugaauaauuuagauag

SEQ ID NO: 88115 - RNA, 22 nt, Human
acaguuuggcaaaugucccaca

SEQ ID NO: 88116 - RNA, 22 nt, Human
acaguuuguguuggccaugggc

SEQ ID NO: 88117 - RNA, 22 nt, Human
acauaacaaucauaggacauag

SEQ ID NO: 88118 - RNA, 22 nt, Human
acauaacacucuucucuaguga

SEQ ID NO: 88119 - RNA, 22 nt, Human
acauaagugcacaauaaauauu

SEQ ID NO: 88120 - RNA, 22 nt, Human
acauaauaaaaauaacagcuca

SEQ ID NO: 88121 - RNA, 22 nt, Human
acauaauagcauuucuaauuug

SEQ ID NO: 88122 - RNA, 22 nt, Human
acauacaaauagagcuguagua

SEQ ID NO: 88123 - RNA, 22 nt, Human
acauacauaugacaacuuuccu

SEQ ID NO: 88124 - RNA, 22 nt, Human
acauacaucaaguaucacaaga

SEQ ID NO: 88125 - RNA, 23 nt, Human
acauacauggagauaaagugaug

SEQ ID NO: 88126 - RNA, 22 nt, Human
acauacauggauucauggauuc

SEQ ID NO: 88127 - RNA, 22 nt, Human
acauacauggugcuuucuuggu

SEQ ID NO: 88128 - RNA, 22 nt, Human
acauacaugguucucagcccuu

SEQ ID NO: 88129 - RNA, 22 nt, Human
acauaccaucuccuggaaagcu

SEQ ID NO: 88130 - RNA, 22 nt, Human
acauacuuagaguaaacaagua

SEQ ID NO: 88131 - RNA, 22 nt, Human
acauagaaauuuauuucuuaca

SEQ ID NO: 88132 - RNA, 23 nt, Human
acauagaacagaauauauuugug

SEQ ID NO: 88133 - RNA, 22 nt, Human
acauagaacuucccagugagca

SEQ ID NO: 88134 - RNA, 22 nt, Human
acauagaacuucgaugucuuuu

SEQ ID NO: 88135 - RNA, 22 nt, Human
acauagaguucaauuuucaguc

SEQ ID NO: 88136 - RNA, 22 nt, Human
acauagcaagugcucaauaaau

SEQ ID NO: 88137 - RNA, 22 nt, Human
acauagcagaggacugagcaga

SEQ ID NO: 88138 - RNA, 22 nt, Human
acauaggcagagcuuuaaagcu

SEQ ID NO: 88139 - RNA, 22 nt, Human
acauaguucagagcagcagacc

SEQ ID NO: 88140 - RNA, 22 nt, Human
acauauaugcgugggcucaugg

SEQ ID NO: 88141 - RNA, 22 nt, Human
acauauaugcugggacugugac

SEQ ID NO: 88142 - RNA, 20 nt, Human
acauaucaugguagaguccu

SEQ ID NO: 88143 - RNA, 22 nt, Human
acauauguguuguacaugcaug

SEQ ID NO: 88144 - RNA, 22 nt, Human
acauauuaacugcacuacacua

SEQ ID NO: 88145 - RNA, 23 nt, Human
acauauugaaugcugagaauuuu

SEQ ID NO: 88146 - RNA, 22 nt, Human
acauauuggcuuagcucuguga

SEQ ID NO: 88147 - RNA, 22 nt, Human
acaucacagagcccagauaaag

SEQ ID NO: 88148 - RNA, 21 nt, Human
acaucagaguugugaagguag

SEQ ID NO: 88149 - RNA, 22 nt, Human
acaucaguccaccacugcaguu

SEQ ID NO: 88150 - RNA, 22 nt, Human
acaucaucgugcacauacauaa

SEQ ID NO: 88151 - RNA, 22 nt, Human
acaucaugagagacuuaaauug

SEQ ID NO: 88152 - RNA, 22 nt, Human
acaucauuguccguugucauga

SEQ ID NO: 88153 - RNA, 22 nt, Human
acaucauuuucuucaguguuug

SEQ ID NO: 88154 - RNA, 22 nt, Human
acauccacuauccuugcuuguu

SEQ ID NO: 88155 - RNA, 22 nt, Human
acauccagaucucagcauggcu

SEQ ID NO: 88156 - RNA, 21 nt, Human
acauccaggguccucacugcc

SEQ ID NO: 88157 - RNA, 22 nt, Human
acauccauguuguaauguuccu

SEQ ID NO: 88158 - RNA, 22 nt, Human
acauccugaagucagucauuug

SEQ ID NO: 88159 - RNA, 22 nt, Human
acauccuugauuauguaaggau

SEQ ID NO: 88160 - RNA, 22 nt, Human
acaucgagucugaguugcuaug

SEQ ID NO: 88161 - RNA, 22 nt, Human
acaucgauggucagccgaggag

SEQ ID NO: 88162 - RNA, 22 nt, Human
acaucguguaucacugaaccuu

SEQ ID NO: 88163 - RNA, 22 nt, Human
acaucucaugaaugauaaauca

SEQ ID NO: 88164 - RNA, 22 nt, Human
acaucucuggguccuccaugca

SEQ ID NO: 88165 - RNA, 22 nt, Human
acaucugaggagaccagccucu

SEQ ID NO: 88166 - RNA, 22 nt, Human
acaucugauuacaugagaauau

SEQ ID NO: 88167 - RNA, 22 nt, Human
acaucuggaaaguuacuugaga

SEQ ID NO: 88168 - RNA, 22 nt, Human
acaucuguaaucuagucaaccc

SEQ ID NO: 88169 - RNA, 22 nt, Human
acaucuguuuaacgaaggcauu

SEQ ID NO: 88170 - RNA, 22 nt, Human
acaucuucacugguuucuggaa

SEQ ID NO: 88171 - RNA, 22 nt, Human
acaucuuuauacuaguccuuga

SEQ ID NO: 88172 - RNA, 22 nt, Human
acaucuuuguuucuuaguguau

SEQ ID NO: 88173 - RNA, 22 nt, Human
acaugaaaacugguuccuucag

SEQ ID NO: 88174 - RNA, 22 nt, Human
acaugaaaagacuaucugauua

SEQ ID NO: 88175 - RNA, 22 nt, Human
acaugaaaccugagucuaacuc

SEQ ID NO: 88176 - RNA, 22 nt, Human
acaugaaacuguugcauuagaa

SEQ ID NO: 88177 - RNA, 22 nt, Human
acaugaaaguuauucugaguug

SEQ ID NO: 88178 - RNA, 22 nt, Human
acaugaacacugcuugccacau

SEQ ID NO: 88179 - RNA, 20 nt, Human
acaugaacagggcuacagca

SEQ ID NO: 88180 - RNA, 22 nt, Human
acaugaauauaugaaguucaac

SEQ ID NO: 88181 - RNA, 22 nt, Human
acaugaaugaagacuuuacaau

SEQ ID NO: 88182 - RNA, 22 nt, Human
acugccugugucccuucagugc

SEQ ID NO: 88183 - RNA, 22 nt, Human
acugccuucugcucaggguuca

SEQ ID NO: 88184 - RNA, 22 nt, Human
acugccuugaaagauuguugag

SEQ ID NO: 88185 - RNA, 20 nt, Human
acugccuuuagguauccuug

SEQ ID NO: 88186 - RNA, 22 nt, Human
acugcguggggagcugugacua

SEQ ID NO: 88187 - RNA, 22 nt, Human
acugcuauugaugucacacuuu

SEQ ID NO: 88188 - RNA, 22 nt, Human
acugcucaaggaucugguaggg

SEQ ID NO: 88189 - RNA, 22 nt, Human
acugcugagagcaaucccaaac

SEQ ID NO: 88190 - RNA, 22 nt, Human
acugcugagcacacaagagugu

SEQ ID NO: 88191 - RNA, 22 nt, Human
acugcugauuuuaggacuguua

SEQ ID NO: 88192 - RNA, 23 nt, Human
acugcugucuuugaagugcuuga

SEQ ID NO: 88193 - RNA, 22 nt, Human
acugcuuacccggccugacuuc

SEQ ID NO: 88194 - RNA, 22 nt, Human
acugcuucacugcgucuuaucu

SEQ ID NO: 88195 - RNA, 23 nt, Human
acugcuuuauucaugaggcucuc

SEQ ID NO: 88196 - RNA, 22 nt, Human
acugcuuuugaucucuucugua

SEQ ID NO: 88197 - RNA, 22 nt, Human
acuggaaaauucaaaugggguc

SEQ ID NO: 88198 - RNA, 22 nt, Human
acuggaaaguauucuuucacug

SEQ ID NO: 88199 - RNA, 21 nt, Human
acuggaagugggucaggaagu

SEQ ID NO: 88200 - RNA, 22 nt, Human
acuggacagguucaugguuuua

SEQ ID NO: 88201 - RNA, 22 nt, Human
acuggaggauuccuggaaggcg

SEQ ID NO: 88202 - RNA, 22 nt, Human
acuggaggccccucccagugaa

SEQ ID NO: 88203 - RNA, 20 nt, Human
acuggaguacccuagagaag

SEQ ID NO: 88204 - RNA, 22 nt, Human
acuggaucagaaucugauuuuu

SEQ ID NO: 88205 - RNA, 22 nt, Human
acuggcacaagaagagucgugg

SEQ ID NO: 88206 - RNA, 22 nt, Human
acuggcagagguuggacaccau

SEQ ID NO: 88207 - RNA, 19 nt, Human
acuggcagggcugcggugg

SEQ ID NO: 88208 - RNA, 22 nt, Human
acuggcaguuugagaaugcauu

SEQ ID NO: 88209 - RNA, 21 nt, Human
acuggccaccacuggcagggg

SEQ ID NO: 88210 - RNA, 22 nt, Human
acuggccagaacuaagucacau

SEQ ID NO: 88211 - RNA, 22 nt, Human
acuggccaggcgaaccacacug

SEQ ID NO: 88212 - RNA, 22 nt, Human
acuggccagguucaaaauacag

SEQ ID NO: 88213 - RNA, 22 nt, Human
acuggcugauauggcuaggaag

SEQ ID NO: 88214 - RNA, 22 nt, Human
acuggcugccuccaaagugugc

SEQ ID NO: 88215 - RNA, 20 nt, Human
acuggcugccuggaaugcgc

SEQ ID NO: 88216 - RNA, 22 nt, Human
acuggcugcguuccugugagac

SEQ ID NO: 88217 - RNA, 22 nt, Human
acuggcuggaguugccaaggcu

SEQ ID NO: 88218 - RNA, 22 nt, Human
acuggcuggccgcgcucuucgc

SEQ ID NO: 88219 - RNA, 21 nt, Human
acuggcugguggcuaagaauc

SEQ ID NO: 88220 - RNA, 22 nt, Human
acuggcuguguaaccucaggca

SEQ ID NO: 88221 - RNA, 18 nt, Human
acuggcuuuagcaucaga

SEQ ID NO: 88222 - RNA, 22 nt, Human
acugggaagagagaauucuguc

SEQ ID NO: 88223 - RNA, 23 nt, Human
acugggaaguuuggagagacgca

SEQ ID NO: 88224 - RNA, 22 nt, Human
acugggacuguaugugcuggac

SEQ ID NO: 88225 - RNA, 22 nt, Human
acugggagagcgaccagauucu

SEQ ID NO: 88226 - RNA, 22 nt, Human
acugggagucaugaggaaggag

SEQ ID NO: 88227 - RNA, 22 nt, Human
acugggauuacaggugggaguc

SEQ ID NO: 88228 - RNA, 22 nt, Human
acugggcaauaaauucagagaa

SEQ ID NO: 88229 - RNA, 22 nt, Human
acugggcagggaaggagaccga

SEQ ID NO: 88230 - RNA, 23 nt, Human
acugggccagcuacuuagcacug

SEQ ID NO: 88231 - RNA, 22 nt, Human
acugggcccagugguguggcug

SEQ ID NO: 88232 - RNA, 22 nt, Human
acugggcccauauacucagucu

SEQ ID NO: 88233 - RNA, 22 nt, Human
acugggccuugccauggcagcc

SEQ ID NO: 88234 - RNA, 22 nt, Human
acugggccuugugugucucauc

SEQ ID NO: 88235 - RNA, 22 nt, Human
acugggcucaagugauuguccu

SEQ ID NO: 88236 - RNA, 22 nt, Human
acugggcuccagaugugauacg

SEQ ID NO: 88237 - RNA, 23 nt, Human
acugggcugaaauuaaagguguc

SEQ ID NO: 88238 - RNA, 23 nt, Human
acugggcugaaauuuuucauggc

SEQ ID NO: 88239 - RNA, 22 nt, Human
acugggcugcuugagugccuuc

SEQ ID NO: 88240 - RNA, 22 nt, Human
acugggcugguuaguuuuacua

SEQ ID NO: 88241 - RNA, 22 nt, Human
acugggcuuaugcuguggagua

SEQ ID NO: 88242 - RNA, 22 nt, Human
acugggcuuauuucuugugaac

SEQ ID NO: 88243 - RNA, 22 nt, Human
acugggcuucacuuggcacauc

SEQ ID NO: 88244 - RNA, 23 nt, Human
acugggucuaucuccagagaaga

SEQ ID NO: 88245 - RNA, 22 nt, Human
acuggguguaaaggacuuaagc

SEQ ID NO: 88246 - RNA, 22 nt, Human
acugguaaauuaugcgacuuug

SEQ ID NO: 88247 - RNA, 22 nt, Human
acugguacucagcuggcacuca

SEQ ID NO: 88248 - RNA, 22 nt, Human
acugguggcccucaguguucuc

SEQ ID NO: 88249 - RNA, 22 nt, Human
acugguugaagaaaagcuagua

SEQ ID NO: 88250 - RNA, 22 nt, Human
acugguuugucuauugucauuc

SEQ ID NO: 88251 - RNA, 22 nt, Human
acugguuuuggaaaucaguaca

SEQ ID NO: 88252 - RNA, 22 nt, Human
accuuuauggagaacuugggau

SEQ ID NO: 88253 - RNA, 22 nt, Human
accuuucugcaaguucugggac

SEQ ID NO: 88254 - RNA, 21 nt, Human
accuuuggaaagacccuggga

SEQ ID NO: 88255 - RNA, 22 nt, Human
accuuuggauaaucuuuguguu

SEQ ID NO: 88256 - RNA, 22 nt, Human
accuuuuauguaaauauauguu

SEQ ID NO: 88257 - RNA, 22 nt, Human
acgaaggaaugugcuugagcau

SEQ ID NO: 88258 - RNA, 22 nt, Human
acgaauaagagauaaagcaagg

SEQ ID NO: 88259 - RNA, 22 nt, Human
acgaugaugaaagagaacauuc

SEQ ID NO: 88260 - RNA, 22 nt, Human
acgcaguuuguggacauuuuuu

SEQ ID NO: 88261 - RNA, 22 nt, Human
acgcaugguaaauccacugacu

SEQ ID NO: 88262 - RNA, 22 nt, Human
acgcuuuuacuauuuugagcuc

SEQ ID NO: 88263 - RNA, 22 nt, Human
acggaaaacccugagcaaacuu

SEQ ID NO: 88264 - RNA, 22 nt, Human
acggaguauuuacaagaggaaa

SEQ ID NO: 88265 - RNA, 20 nt, Human
acgggcugggacccaugcac

SEQ ID NO: 88266 - RNA, 22 nt, Human
acggggcuagagaagguuucuu

SEQ ID NO: 88267 - RNA, 22 nt, Human
acgggugguaaugagaaaagga

SEQ ID NO: 88268 - RNA, 22 nt, Human
acgucaucguugucaucgucau

SEQ ID NO: 88269 - RNA, 22 nt, Human
acgugugugacauugggaacgu

SEQ ID NO: 88270 - RNA, 22 nt, Human
acuaaaaacuacugccaauagc

SEQ ID NO: 88271 - RNA, 22 nt, Human
acuaaaacaguggcuaguagac

SEQ ID NO: 88272 - RNA, 22 nt, Human
acuaaagaagccaaaguuuucu

SEQ ID NO: 88273 - RNA, 22 nt, Human
acuaaaguaucuccuauuucau

SEQ ID NO: 88274 - RNA, 22 nt, Human
acuaaauaguuuugacagaaca

SEQ ID NO: 88275 - RNA, 22 nt, Human
acuaaaugaacuauuaauacuu

SEQ ID NO: 88276 - RNA, 22 nt, Human
acuaacauuuguguaugucuug

SEQ ID NO: 88277 - RNA, 22 nt, Human
acuaacuucugagaaccaauug

SEQ ID NO: 88278 - RNA, 22 nt, Human
acuaagaccuaaaauugugaau

SEQ ID NO: 88279 - RNA, 21 nt, Human
acuaagagaucucugucucau

SEQ ID NO: 88280 - RNA, 22 nt, Human
acuaagaugcaggaaaugcuag

SEQ ID NO: 88281 - RNA, 22 nt, Human
acuaaggaauaugacaaacuca

SEQ ID NO: 88282 - RNA, 23 nt, Human
acuaaggcuucuuuaagacagag

SEQ ID NO: 88283 - RNA, 22 nt, Human
acuaaguaguuuguuccucuuu

SEQ ID NO: 88284 - RNA, 22 nt, Human
acuacaauacucuuaguaaaag

SEQ ID NO: 88285 - RNA, 22 nt, Human
acuacauuucucaguaccugaa

SEQ ID NO: 88286 - RNA, 22 nt, Human
acuacugaauauuaguucugaa

SEQ ID NO: 88287 - RNA, 22 nt, Human
acuagaaaguuuccagaguuau

SEQ ID NO: 88288 - RNA, 22 nt, Human
acuagaaauuacucagaauaaa

SEQ ID NO: 88289 - RNA, 22 nt, Human
acuagaaccagaggaggcaggu

SEQ ID NO: 88290 - RNA, 22 nt, Human
acuagacugggccagucaaauu

SEQ ID NO: 88291 - RNA, 22 nt, Human
agaauucugacaauagaauugg

SEQ ID NO: 88292 - RNA, 22 nt, Human
agaauucuggaguugggaggaa

SEQ ID NO: 88293 - RNA, 21 nt, Human
agaauucuuaaguauucuaau

SEQ ID NO: 88294 - RNA, 23 nt, Human
agaauuguaaauagaauauaccu

SEQ ID NO: 88295 - RNA, 22 nt, Human
agaauuguugggguaauaaaag

SEQ ID NO: 88296 - RNA, 22 nt, Human
agaauuuagcuccuuggucaua

SEQ ID NO: 88297 - RNA, 22 nt, Human
agaauuuaugacaacgauagcc

SEQ ID NO: 88298 - RNA, 22 nt, Human
agaauuucaaaaggaagccagc

SEQ ID NO: 88299 - RNA, 23 nt, Human
agaauuucuaacucuagcucugu

SEQ ID NO: 88300 - RNA, 22 nt, Human
agaauuuguaaaagauaagaca

SEQ ID NO: 88301 - RNA, 23 nt, Human
agacaaaagccucagucuuaggc

SEQ ID NO: 88302 - RNA, 20 nt, Human
agacaaaaugacuucaugca

SEQ ID NO: 88303 - RNA, 23 nt, Human
agacaaacuuccuucacugcacc

SEQ ID NO: 88304 - RNA, 22 nt, Human
agacaaagacagcaucucaggu

SEQ ID NO: 88305 - RNA, 22 nt, Human
agacaaaugaacaaauauguga

SEQ ID NO: 88306 - RNA, 22 nt, Human
agacaacuagaaaacuagacag

SEQ ID NO: 88307 - RNA, 21 nt, Human
agacaacugugacuauucccu

SEQ ID NO: 88308 - RNA, 22 nt, Human
agacaaggcaaggcggccagau

SEQ ID NO: 88309 - RNA, 22 nt, Human
agacaaguucugugggucaccu

SEQ ID NO: 88310 - RNA, 22 nt, Human
agacaauacauuuauucccuuu

SEQ ID NO: 88311 - RNA, 21 nt, Human
agacaaugcuguaaaauucag

SEQ ID NO: 88312 - RNA, 22 nt, Human
agacaauguuuggucuacacuu

SEQ ID NO: 88313 - RNA, 22 nt, Human
agacaauuucaaaguaauauua

SEQ ID NO: 88314 - RNA, 22 nt, Human
agacacagaugguaccugagcc

SEQ ID NO: 88315 - RNA, 22 nt, Human
agacacagauuuuggaaaagau

SEQ ID NO: 88316 - RNA, 22 nt, Human
agacacagcuaccauaauacca

SEQ ID NO: 88317 - RNA, 21 nt, Human
agacacagggguugcuggggu

SEQ ID NO: 88318 - RNA, 22 nt, Human
agacacaguuugggauggguug

SEQ ID NO: 88319 - RNA, 22 nt, Human
agacaccuaauagaugaauuca

SEQ ID NO: 88320 - RNA, 22 nt, Human
agacacugagcauuuuccuagc

SEQ ID NO: 88321 - RNA, 22 nt, Human
agacacugauguucagcucaau

SEQ ID NO: 88322 - RNA, 19 nt, Human
agacacuggauggaaaaug

SEQ ID NO: 88323 - RNA, 22 nt, Human
agacacuguucucacaugcuug

SEQ ID NO: 88324 - RNA, 22 nt, Human
agacacuuauuuagugggaguu

SEQ ID NO: 88325 - RNA, 22 nt, Human
agacacuuucagaaguguuugc

SEQ ID NO: 88326 - RNA, 22 nt, Human
agacagaaauaggagaaaccag

SEQ ID NO: 88327 - RNA, 22 nt, Human
agacagacacaugguaacagau

SEQ ID NO: 88328 - RNA, 22 nt, Human
agacagacguagugugagagua

SEQ ID NO: 88329 - RNA, 21 nt, Human
agacagacugccugacccacg

SEQ ID NO: 88330 - RNA, 22 nt, Human
agacagacuuugaucuggaugu

SEQ ID NO: 88331 - RNA, 19 nt, Human
agacagagcucaguggguu

SEQ ID NO: 88332 - RNA, 22 nt, Human
agacagcaauaugggagacgga

SEQ ID NO: 88333 - RNA, 22 nt, Human
agacagcacuuuuguauggggg

SEQ ID NO: 88334 - RNA, 22 nt, Human
agacagcagaaacuagagcacu

SEQ ID NO: 88335 - RNA, 22 nt, Human
agacagcagggagcaggauuca

SEQ ID NO: 88336 - RNA, 22 nt, Human
agacagcgaggacagaggggug

SEQ ID NO: 88337 - RNA, 22 nt, Human
agacagcucuggguuccacacu

SEQ ID NO: 88338 - RNA, 22 nt, Human
agacagcugcucgcagagcuau

SEQ ID NO: 88339 - RNA, 22 nt, Human
agacagcugggaguguccuucu

SEQ ID NO: 88340 - RNA, 22 nt, Human
agacaggacacaagcugcauaa

SEQ ID NO: 88341 - RNA, 20 nt, Human
agacaggagcccccauucag

SEQ ID NO: 88342 - RNA, 22 nt, Human
agacaggcuuggaaaaaaccuc

SEQ ID NO: 88343 - RNA, 22 nt, Human
agacaggcuuugcuguauauca

SEQ ID NO: 88344 - RNA, 22 nt, Human
agacagggucuugaucagagcu

SEQ ID NO: 88345 - RNA, 21 nt, Human
agacaguaacucuucuacucc

SEQ ID NO: 88346 - RNA, 22 nt, Human
agacaguaauaaaauagguaag

SEQ ID NO: 88347 - RNA, 22 nt, Human
agacagugacuuagugaccaga

SEQ ID NO: 88348 - RNA, 22 nt, Human
agacagugagaaugaguugaaa

SEQ ID NO: 88349 - RNA, 22 nt, Human
agacauaagcgagcaucacagg

SEQ ID NO: 88350 - RNA, 22 nt, Human
agacauagggaggcauauaaau

SEQ ID NO: 88351 - RNA, 22 nt, Human
agacaucagcuugugugcaggg

SEQ ID NO: 88352 - RNA, 23 nt, Human
agacaucaggaugguggcuggga

SEQ ID NO: 88353 - RNA, 22 nt, Human
agacauccuggggagggcaaug

SEQ ID NO: 88354 - RNA, 22 nt, Human
agacaugacagauaguugcuag

SEQ ID NO: 88355 - RNA, 22 nt, Human
agacaugagaaacccaccagag

SEQ ID NO: 88356 - RNA, 22 nt, Human
agacauggagaaggagccagug

SEQ ID NO: 88357 - RNA, 20 nt, Human
agacaugguagugauucagg

SEQ ID NO: 88358 - RNA, 22 nt, Human
agacauuuauucacacauuuau

SEQ ID NO: 88359 - RNA, 22 nt, Human
agacauuuauugaacaccuagc

SEQ ID NO: 88360 - RNA, 22 nt, Human
agacauuuuaacaucuggguuu

SEQ ID NO: 88361 - RNA, 23 nt, Human
agacauuuuaauaaggacuuuuu

SEQ ID NO: 88362 - RNA, 22 nt, Human
agacauuuuacauucuuccauu

SEQ ID NO: 88363 - RNA, 22 nt, Human
agacauuuugcauucccugaag

SEQ ID NO: 88364 - RNA, 22 nt, Human
agaccaagaaaggaugaggauc

SEQ ID NO: 88365 - RNA, 22 nt, Human
agaccaagacuauaaugagagg

SEQ ID NO: 88366 - RNA, 22 nt, Human
agaccaggaaggccuacagaua

SEQ ID NO: 88367 - RNA, 22 nt, Human
agaccagggguugaguccuagc

SEQ ID NO: 88368 - RNA, 22 nt, Human
agaccaggucuuuauggcucca

SEQ ID NO: 88369 - RNA, 22 nt, Human
agaccaugggcuccugggacau

SEQ ID NO: 88370 - RNA, 22 nt, Human
agagcuguuuauugaugucaca

SEQ ID NO: 88371 - RNA, 22 nt, Human
agaggaaaaugaguuccagaau

SEQ ID NO: 88372 - RNA, 22 nt, Human
agaggaaguaaucaggaccugc

SEQ ID NO: 88373 - RNA, 22 nt, Human
agaggaauggagacuaaacgcu

SEQ ID NO: 88374 - RNA, 22 nt, Human
agaggacagacggaaagugcca

SEQ ID NO: 88375 - RNA, 22 nt, Human
agaggagcuuuuggaaaaggcc

SEQ ID NO: 88376 - RNA, 20 nt, Human
agaggaggauuauuuuauuc

SEQ ID NO: 88377 - RNA, 22 nt, Human
agaggaggcuggguccagauaa

SEQ ID NO: 88378 - RNA, 22 nt, Human
agaggagguccuuuucugaugu

SEQ ID NO: 88379 - RNA, 22 nt, Human
agaggauccuaagaagauauga

SEQ ID NO: 88380 - RNA, 22 nt, Human
agaggaugauuuuaaggacacu

SEQ ID NO: 88381 - RNA, 22 nt, Human
agaggauucacugcagaagaca

SEQ ID NO: 88382 - RNA, 22 nt, Human
agaggauugaucaaacacugca

SEQ ID NO: 88383 - RNA, 22 nt, Human
agaggcaacauggggaacagau

SEQ ID NO: 88384 - RNA, 22 nt, Human
agaggcaagggaccuuucuggg

SEQ ID NO: 88385 - RNA, 22 nt, Human
agaggcaaugaaagcagucucu

SEQ ID NO: 88386 - RNA, 22 nt, Human
agaggcacccgcgcgcggccau

SEQ ID NO: 88387 - RNA, 22 nt, Human
agaggcacuaagggaagagcag

SEQ ID NO: 88388 - RNA, 22 nt, Human
agaggcacuccagccacugguc

SEQ ID NO: 88389 - RNA, 17 nt, Human
agaggcagauacuugga

SEQ ID NO: 88390 - RNA, 23 nt, Human
agaggcaggaguggcuugcccgg

SEQ ID NO: 88391 - RNA, 21 nt, Human
agaggcaggcauuaaguacac

SEQ ID NO: 88392 - RNA, 22 nt, Human
agaggcaguauacaauccgagc

SEQ ID NO: 88393 - RNA, 19 nt, Human
agaggcagucuccaacagg

SEQ ID NO: 88394 - RNA, 22 nt, Human
agaggccaaagaaucuacaaga

SEQ ID NO: 88395 - RNA, 22 nt, Human
agaggccaggcagcccaaggug

SEQ ID NO: 88396 - RNA, 22 nt, Human
agaggccaugcuagaggccugg

SEQ ID NO: 88397 - RNA, 22 nt, Human
agaggccccaggugagcaugcc

SEQ ID NO: 88398 - RNA, 22 nt, Human
agaggcccucucucuccugaug

SEQ ID NO: 88399 - RNA, 22 nt, Human
agaggccuaaccaagauguccu

SEQ ID NO: 88400 - RNA, 22 nt, Human
agagccucugucauggagagaa

SEQ ID NO: 88401 - RNA, 22 nt, Human
agagccugaggccaggaaaaug

SEQ ID NO: 88402 - RNA, 22 nt, Human
agagccugcaguggagaccuug

SEQ ID NO: 88403 - RNA, 22 nt, Human
agagccugcaucaggcuugggg

SEQ ID NO: 88404 - RNA, 22 nt, Human
agagccugcuaccucauuccag

SEQ ID NO: 88405 - RNA, 22 nt, Human
agagccuggaccugggcucuga

SEQ ID NO: 88406 - RNA, 22 nt, Human
agagccuguaacaucuuucuua

SEQ ID NO: 88407 - RNA, 22 nt, Human
agagccuguacuuuucugugaa

SEQ ID NO: 88408 - RNA, 22 nt, Human
agagccugucaauuguaaagag

SEQ ID NO: 88409 - RNA, 22 nt, Human
agagccugugauugucaucacc

SEQ ID NO: 88410 - RNA, 22 nt, Human
agagccuugaagaucuggaaaa

SEQ ID NO: 88411 - RNA, 22 nt, Human
agauauguuacugcaucauggg

SEQ ID NO: 88412 - RNA, 22 nt, Human
agauauuaccagcagucuaugc

SEQ ID NO: 88413 - RNA, 22 nt, Human
agauauucuagaaccuaguaga

SEQ ID NO: 88414 - RNA, 22 nt, Human
agauauugugcauacugcuguu

SEQ ID NO: 88415 - RNA, 22 nt, Human
agauauuuugugugauguuuca

SEQ ID NO: 88416 - RNA, 22 nt, Human
agaucaaagccaugagagauuu

SEQ ID NO: 88417 - RNA, 22 nt, Human
agaucaaggacaugaagaggcu

SEQ ID NO: 88418 - RNA, 22 nt, Human
agaucaaggugucagcaggcuu

SEQ ID NO: 88419 - RNA, 22 nt, Human
agaucacagcccccagaugcca

SEQ ID NO: 88420 - RNA, 22 nt, Human
agaucagacacggcuugugacg

SEQ ID NO: 88421 - RNA, 22 nt, Human
agaucagacuuugugacuagga

SEQ ID NO: 88422 - RNA, 22 nt, Human
agaucauauuguaacuuuauug

SEQ ID NO: 88423 - RNA, 22 nt, Human
agaucauuaaccaccuguucug

SEQ ID NO: 88424 - RNA, 22 nt, Human
agaucauuuggcagaagcaacg

SEQ ID NO: 88425 - RNA, 22 nt, Human
agauccauuuuggugucaacuc

SEQ ID NO: 88426 - RNA, 21 nt, Human
agauccuggggucuggggagg

SEQ ID NO: 88427 - RNA, 22 nt, Human
agaucgauuucauauccucuua

SEQ ID NO: 88428 - RNA, 22 nt, Human
agaucggcuuugcagaccucau

SEQ ID NO: 88429 - RNA, 22 nt, Human
agaucucaccucuguguauuau

SEQ ID NO: 88430 - RNA, 22 nt, Human
agaucugaccuaaccccaccac

SEQ ID NO: 88431 - RNA, 22 nt, Human
agaucugaggguccaagggagg

SEQ ID NO: 88432 - RNA, 22 nt, Human
agaugacagccaaggagaugaa

SEQ ID NO: 88433 - RNA, 23 nt, Human
agaugagccaacaccuccaugcc

SEQ ID NO: 88434 - RNA, 21 nt, Human
agaugaggauacugaggccua

SEQ ID NO: 88435 - RNA, 22 nt, Human
agaugaguaaauggagucuucc

SEQ ID NO: 88436 - RNA, 22 nt, Human
agaugagugagagcaucaacuu

SEQ ID NO: 88437 - RNA, 22 nt, Human
agaugauuaugauagcacuguu

SEQ ID NO: 88438 - RNA, 22 nt, Human
agaugcaaccucugcuuaacaa

SEQ ID NO: 88439 - RNA, 22 nt, Human
agaugcagacuugguucaggca

SEQ ID NO: 88440 - RNA, 22 nt, Human
agaugcagaguugcuuaagcau

SEQ ID NO: 88441 - RNA, 22 nt, Human
agaugcagauuuggauucagga

SEQ ID NO: 88442 - RNA, 22 nt, Human
agaugcagugguuaacaauaca

SEQ ID NO: 88443 - RNA, 22 nt, Human
agaugccagcuuacacugggaa

SEQ ID NO: 88444 - RNA, 22 nt, Human
agaugccuaaaucugggcaagg

SEQ ID NO: 88445 - RNA, 21 nt, Human
agaugcugaugcugcaggucc

SEQ ID NO: 88446 - RNA, 22 nt, Human
agaugcugcuccacaggccagg

SEQ ID NO: 88447 - RNA, 17 nt, Human
agaugcuggccacaugu

SEQ ID NO: 88448 - RNA, 22 nt, Human
agaugcuggggccccucggaug

SEQ ID NO: 88449 - RNA, 22 nt, Human
agaugcugugaggaagcuagga

SEQ ID NO: 88450 - RNA, 21 nt, Human
agaugcugugcuccaggagca

SEQ ID NO: 88451 - RNA, 22 nt, Human
agauggagucucacucuuguug

SEQ ID NO: 88452 - RNA, 22 nt, Human
agauggaguuaguaccagaguc

SEQ ID NO: 88453 - RNA, 19 nt, Human
agauggcaaaaugcaaaga

SEQ ID NO: 88454 - RNA, 17 nt, Human
agauggccucuaagauu

SEQ ID NO: 88455 - RNA, 21 nt, Human
agauggcucccaggucucugg

SEQ ID NO: 88456 - RNA, 22 nt, Human
agauggcugauggcaggagcca

SEQ ID NO: 88457 - RNA, 22 nt, Human
agauggcugggccccaccccag

SEQ ID NO: 88458 - RNA, 22 nt, Human
agauggcugggcucguccgcag

SEQ ID NO: 88459 - RNA, 20 nt, Human
agauggcugucauuucuguc

SEQ ID NO: 88460 - RNA, 22 nt, Human
agauggcuuccuucucacugug

SEQ ID NO: 88461 - RNA, 22 nt, Human
agauggggcagaauggagccau

SEQ ID NO: 88462 - RNA, 22 nt, Human
agauggggcugaaaguuccaau

SEQ ID NO: 88463 - RNA, 22 nt, Human
agaugggugccuucuuucuuua

SEQ ID NO: 88464 - RNA, 22 nt, Human
agaugguagacuauggaacgua

SEQ ID NO: 88465 - RNA, 22 nt, Human
agauggucaaggauacuguuca

SEQ ID NO: 88466 - RNA, 22 nt, Human
agauggucugguuauuuuuagu

SEQ ID NO: 88467 - RNA, 22 nt, Human
agauggugagggcagaaguaac

SEQ ID NO: 88468 - RNA, 22 nt, Human
agaugguggacuaucugacuug

SEQ ID NO: 88469 - RNA, 22 nt, Human
agaugguguuuccccaggugga

SEQ ID NO: 88470 - RNA, 22 nt, Human
agaugguuuugucuuuaugauu

SEQ ID NO: 88471 - RNA, 22 nt, Human
agauguaccagguauuacagga

SEQ ID NO: 88472 - RNA, 22 nt, Human
agaugucagcaggguugguuuc

SEQ ID NO: 88473 - RNA, 19 nt, Human
agaugucuauuugacuauc

SEQ ID NO: 88474 - RNA, 22 nt, Human
agaugugacugggcaaguuacu

SEQ ID NO: 88475 - RNA, 22 nt, Human
agaugugagaaucaagugacca

SEQ ID NO: 88476 - RNA, 22 nt, Human
agauguggaaagaaguuagaag

SEQ ID NO: 88477 - RNA, 22 nt, Human
agauguguuucuaguuccugca

SEQ ID NO: 88478 - RNA, 22 nt, Human
agauguuuauaacucaugagug

SEQ ID NO: 88479 - RNA, 22 nt, Human
agauguuuuagaguuugacuug

SEQ ID NO: 88480 - RNA, 20 nt, Human
agauguuuugaagucuugga

SEQ ID NO: 88481 - RNA, 22 nt, Human
agauucaaagugaagaacuuaa

SEQ ID NO: 88482 - RNA, 22 nt, Human
agauucagaaaauucucuguuc

SEQ ID NO: 88483 - RNA, 22 nt, Human
agauucaggcaugucuucauuu

SEQ ID NO: 88484 - RNA, 22 nt, Human
agauucauuaggagacauucag

SEQ ID NO: 88485 - RNA, 22 nt, Human
agauuccucagucaugaagccu

SEQ ID NO: 88486 - RNA, 22 nt, Human
agauucucgguccgggcagccc

SEQ ID NO: 88487 - RNA, 22 nt, Human
agauugaauaaccaccuuuuuc

SEQ ID NO: 88488 - RNA, 22 nt, Human
agauugucauugacgaugagca

SEQ ID NO: 88489 - RNA, 23 nt, Human
agauuguuauucccaguucaugu

SEQ ID NO: 88490 - RNA, 22 nt, Human
agauuuaaagcaguauucgcaa

SEQ ID NO: 88491 - RNA, 22 nt, Human
agauuuacaaaggauuugcuuu

SEQ ID NO: 88492 - RNA, 19 nt, Human
agauuuaccucauauaguu

SEQ ID NO: 88493 - RNA, 20 nt, Human
agauuuaccuuugagccuuc

SEQ ID NO: 88494 - RNA, 22 nt, Human
agauuuacugagaacugauuac

SEQ ID NO: 88495 - RNA, 22 nt, Human
agauuuacuggagucuuuggug

SEQ ID NO: 88496 - RNA, 22 nt, Human
agauuuagugguggaauuuugg

SEQ ID NO: 88497 - RNA, 22 nt, Human
agauuucccacuccauguauug

SEQ ID NO: 88498 - RNA, 22 nt, Human
agauuuccuaugguaauuauag

SEQ ID NO: 88499 - RNA, 22 nt, Human
agauuuccucuuuuguaaagug

SEQ ID NO: 88500 - RNA, 22 nt, Human
agauuuccugcacugccuuuga

SEQ ID NO: 88501 - RNA, 22 nt, Human
agauuucugucaccuucuaugc

SEQ ID NO: 88502 - RNA, 22 nt, Human
agauuugauaaaaguagcaguu

SEQ ID NO: 88503 - RNA, 22 nt, Human
agauuugcggcuuuacuuugca

SEQ ID NO: 88504 - RNA, 22 nt, Human
agauuuguauagaugugguuga

SEQ ID NO: 88505 - RNA, 22 nt, Human
agauuugucagcucagucuuua

SEQ ID NO: 88506 - RNA, 22 nt, Human
agauuuuaguguagaggacuug

SEQ ID NO: 88507 - RNA, 22 nt, Human
agauuuuauagauaauuuccca

SEQ ID NO: 88508 - RNA, 22 nt, Human
agcaaaagauagauuaacaaga

SEQ ID NO: 88509 - RNA, 22 nt, Human
aggcugcaggucugggucaugu

SEQ ID NO: 88510 - RNA, 22 nt, Human
aggcugcagugcagguaggauu

SEQ ID NO: 88511 - RNA, 22 nt, Human
aggcugcccugccgccaguggg

SEQ ID NO: 88512 - RNA, 22 nt, Human
aggcugccuagguucaacaccu

SEQ ID NO: 88513 - RNA, 22 nt, Human
aggcugccucugcaggaucccu

SEQ ID NO: 88514 - RNA, 22 nt, Human
aggcugccuggcugugagugaa

SEQ ID NO: 88515 - RNA, 22 nt, Human
aggcugcugccuuggagagugu

SEQ ID NO: 88516 - RNA, 22 nt, Human
aggcugcuggcaggcguggacg

SEQ ID NO: 88517 - RNA, 22 nt, Human
aggcugcuucaauggauaagau

SEQ ID NO: 88518 - RNA, 22 nt, Human
aggcugcuucuuguccuuggca

SEQ ID NO: 88519 - RNA, 22 nt, Human
aggcugcuuucauggccgcccc

SEQ ID NO: 88520 - RNA, 22 nt, Human
aggcuggaaaucacuagauucc

SEQ ID NO: 88521 - RNA, 22 nt, Human
aggcuggacccgacaccugccc

SEQ ID NO: 88522 - RNA, 19 nt, Human
aggcuggagacaccaggcc

SEQ ID NO: 88523 - RNA, 22 nt, Human
aggcuggagacccgccaagaaa

SEQ ID NO: 88524 - RNA, 22 nt, Human
aggcuggagguuuguugcggcu

SEQ ID NO: 88525 - RNA, 19 nt, Human
aggcuggaugcccaucuua

SEQ ID NO: 88526 - RNA, 22 nt, Human
aggcuggccuauuucuuuaucg

SEQ ID NO: 88527 - RNA, 22 nt, Human
aggcuggcggugacugcucuga

SEQ ID NO: 88528 - RNA, 22 nt, Human
aggcuggcgucaggggcuguac

SEQ ID NO: 88529 - RNA, 22 nt, Human
aggcuggcuuugguagcauggu

SEQ ID NO: 88530 - RNA, 22 nt, Human
aggcugggaaauguagucuucc

SEQ ID NO: 88531 - RNA, 22 nt, Human
aggcugggaaauguauuccagc

SEQ ID NO: 88532 - RNA, 22 nt, Human
aggcugggcuccgcccaacucc

SEQ ID NO: 88533 - RNA, 20 nt, Human
aggcugggguguuuugccca

SEQ ID NO: 88534 - RNA, 22 nt, Human
aggcuggugcuuccuagggcag

SEQ ID NO: 88535 - RNA, 20 nt, Human
aggcugucauuucuggcagg

SEQ ID NO: 88536 - RNA, 21 nt, Human
aggcuguccuuugccagcccu

SEQ ID NO: 88537 - RNA, 22 nt, Human
aggcugucuuccucccucuugg

SEQ ID NO: 88538 - RNA, 19 nt, Human
aggcugugagggaggacuc

SEQ ID NO: 88539 - RNA, 22 nt, Human
aggcugugaguaguucuuguug

SEQ ID NO: 88540 - RNA, 22 nt, Human
aggcugugaucucaugauuugu

SEQ ID NO: 88541 - RNA, 22 nt, Human
aggcugugggacaguuaggaga

SEQ ID NO: 88542 - RNA, 22 nt, Human
aggcuguggugcugaaggaggg

SEQ ID NO: 88543 - RNA, 22 nt, Human
aggcuguggugggcuuugagcc

SEQ ID NO: 88544 - RNA, 22 nt, Human
aggcuguguaaagugcuuuccc

SEQ ID NO: 88545 - RNA, 22 nt, Human
aggcuguguucugcccucuccc

SEQ ID NO: 88546 - RNA, 22 nt, Human
aggcuguugagccccagcaagu

SEQ ID NO: 88547 - RNA, 22 nt, Human
aggcuuaaccugaucacaugag

SEQ ID NO: 88548 - RNA, 22 nt, Human
aggcuuaaugaguuaaaucacu

SEQ ID NO: 88549 - RNA, 22 nt, Human
aggcuuauagcuuauauuuaag

SEQ ID NO: 88550 - RNA, 22 nt, Human
aggcuuauuaauaugauucugc

SEQ ID NO: 88551 - RNA, 20 nt, Human
aggcuucaaccauacaccuu

SEQ ID NO: 88552 - RNA, 22 nt, Human
aggcuucaaggaccugagggaa

SEQ ID NO: 88553 - RNA, 22 nt, Human
aggcuucaagguucuuggcagg

SEQ ID NO: 88554 - RNA, 22 nt, Human
aggcuucaccugcaccugagcu

SEQ ID NO: 88555 - RNA, 19 nt, Human
aggcuucaggccacaugcu

SEQ ID NO: 88556 - RNA, 22 nt, Human
aggcuucagggcuuuugagggu

SEQ ID NO: 88557 - RNA, 23 nt, Human
aggcuucauccauauuuauugcc

SEQ ID NO: 88558 - RNA, 19 nt, Human
aggcuucauccugggcagc

SEQ ID NO: 88559 - RNA, 22 nt, Human
aggcuucuaggaaacuuucugg

SEQ ID NO: 88560 - RNA, 22 nt, Human
aggcuucuaggguuggcagcgg

SEQ ID NO: 88561 - RNA, 22 nt, Human
aggcuucuccacauaaaguuac

SEQ ID NO: 88562 - RNA, 22 nt, Human
aggcuucugcuguauuaacacu

SEQ ID NO: 88563 - RNA, 22 nt, Human
aggcuucugggauucccuuggu

SEQ ID NO: 88564 - RNA, 22 nt, Human
aggcuucugugagcucauacaa

SEQ ID NO: 88565 - RNA, 22 nt, Human
agcccugcauaaaucaguuggu

SEQ ID NO: 88566 - RNA, 16 nt, Human
agcccugccguguacu

SEQ ID NO: 88567 - RNA, 23 nt, Human
agcccugcugagacccagcuccc

SEQ ID NO: 88568 - RNA, 22 nt, Human
agcccugcugccugaauuagcu

SEQ ID NO: 88569 - RNA, 22 nt, Human
agcccuggaagccacaguccua

SEQ ID NO: 88570 - RNA, 22 nt, Human
agcccuggcccggcugugcuuu

SEQ ID NO: 88571 - RNA, 22 nt, Human
agcccugggaggccagcuugua

SEQ ID NO: 88572 - RNA, 22 nt, Human
agcccuggggcuggugcuuacc

SEQ ID NO: 88573 - RNA, 22 nt, Human
agcccugguagccugcugccau

SEQ ID NO: 88574 - RNA, 22 nt, Human
agcccugucucucacuccaggu

SEQ ID NO: 88575 - RNA, 22 nt, Human
agcccuguuuaugccacaucau

SEQ ID NO: 88576 - RNA, 21 nt, Human
agcccuuaggacauaagagag

SEQ ID NO: 88577 - RNA, 22 nt, Human
agcccuucaaccugccuacucc

SEQ ID NO: 88578 - RNA, 22 nt, Human
agccgagcucugagcagggccu

SEQ ID NO: 88579 - RNA, 22 nt, Human
agccuaggguucugaugucacu

SEQ ID NO: 88580 - RNA, 22 nt, Human
agccuauuccaggaugagcuca

SEQ ID NO: 88581 - RNA, 22 nt, Human
agccucagggcucugcgcagac

SEQ ID NO: 88582 - RNA, 22 nt, Human
agccucagugucaccaucuacc

SEQ ID NO: 88583 - RNA, 22 nt, Human
agccuccaucccaugcacaaag

SEQ ID NO: 88584 - RNA, 22 nt, Human
agccucccuaugcaccuucagg

SEQ ID NO: 88585 - RNA, 22 nt, Human
agccucuccagagccuggcaga

SEQ ID NO: 88586 - RNA, 22 nt, Human
agccucucuguuagucacuggg

SEQ ID NO: 88587 - RNA, 22 nt, Human
agccucucuuaucccuucaaag

SEQ ID NO: 88588 - RNA, 22 nt, Human
agccucugacugucagcaaggu

SEQ ID NO: 88589 - RNA, 22 nt, Human
agccucugauggcucccaagga

SEQ ID NO: 88590 - RNA, 22 nt, Human
agccucugcacgggcacgggug

SEQ ID NO: 88591 - RNA, 22 nt, Human
agccucugggggagcugggagc

SEQ ID NO: 88592 - RNA, 22 nt, Human
agccucugucaagcuuuucaaa

SEQ ID NO: 88593 - RNA, 22 nt, Human
agccucuuauucuccaggacuu

SEQ ID NO: 88594 - RNA, 23 nt, Human
agccucuuuucuccugcccugca

SEQ ID NO: 88595 - RNA, 22 nt, Human
agccugagagccaagcugugca

SEQ ID NO: 88596 - RNA, 22 nt, Human
agccugcuuccucagggaacaa

SEQ ID NO: 88597 - RNA, 22 nt, Human
agccuggaagaaccugaagucu

SEQ ID NO: 88598 - RNA, 22 nt, Human
agccuggagaggcgccauacac

SEQ ID NO: 88599 - RNA, 22 nt, Human
agccuggagcuugaguuaugag

SEQ ID NO: 88600 - RNA, 22 nt, Human
agccuggaguucccaggagaag

SEQ ID NO: 88601 - RNA, 22 nt, Human
agccuggauucgugcauccaca

SEQ ID NO: 88602 - RNA, 22 nt, Human
agccuggccacucagggccuga

SEQ ID NO: 88603 - RNA, 21 nt, Human
agccuggcccagggggaggcu

SEQ ID NO: 88604 - RNA, 22 nt, Human
agccuggcuuagcucucucacu

SEQ ID NO: 88605 - RNA, 17 nt, Human
agccugggaaggaguga

SEQ ID NO: 88606 - RNA, 22 nt, Human
agccugggcaacaacacagcga

SEQ ID NO: 88607 - RNA, 22 nt, Human
agccugggcaacuccauucacu

SEQ ID NO: 88608 - RNA, 22 nt, Human
agccugggcccugccucuucuc

SEQ ID NO: 88609 - RNA, 22 nt, Human
agccuggggcacuucuccaaac

SEQ ID NO: 88610 - RNA, 22 nt, Human
agccuguccagaggacagggcu

SEQ ID NO: 88611 - RNA, 22 nt, Human
agccugugacauugacuaugaa

SEQ ID NO: 88612 - RNA, 22 nt, Human
agccuguguccucaucugcagc

SEQ ID NO: 88613 - RNA, 22 nt, Human
agccuuagauaaaugcuagcuc

SEQ ID NO: 88614 - RNA, 22 nt, Human
agccuucuaggaugucaucugc

SEQ ID NO: 88615 - RNA, 22 nt, Human
agccuucucugaaauucuguuu

SEQ ID NO: 88616 - RNA, 22 nt, Human
agccuugaaccaauuguuuagc

SEQ ID NO: 88617 - RNA, 22 nt, Human
agccuugaguucaagugcuggc

SEQ ID NO: 88618 - RNA, 22 nt, Human
agccacaugagugagccaucuu

SEQ ID NO: 88619 - RNA, 22 nt, Human
agccacccauucccgagcccua

SEQ ID NO: 88620 - RNA, 20 nt, Human
agccaccucauuucccuacc

SEQ ID NO: 88621 - RNA, 22 nt, Human
agccaccucuaucuugggcucc

SEQ ID NO: 88622 - RNA, 22 nt, Human
agccaccucugugcaggccucg

SEQ ID NO: 88623 - RNA, 22 nt, Human
agccaccuucuccaaggccuag

SEQ ID NO: 88624 - RNA, 22 nt, Human
agccacucagugcuguauugac

SEQ ID NO: 88625 - RNA, 22 nt, Human
agccacugcccuuagccauuug

SEQ ID NO: 88626 - RNA, 22 nt, Human
agccacuggccugggcagcucu

SEQ ID NO: 88627 - RNA, 22 nt, Human
agccacugguaaacugguagga

SEQ ID NO: 88628 - RNA, 22 nt, Human
agccacuguaaggggaauugcc

SEQ ID NO: 88629 - RNA, 19 nt, Human
agccagaacuaguguuucu

SEQ ID NO: 88630 - RNA, 20 nt, Human
agccagaagaaggcuggaga

SEQ ID NO: 88631 - RNA, 22 nt, Human
agccagagaguguuggagaugu

SEQ ID NO: 88632 - RNA, 22 nt, Human
agccagagauccaucccuagga

SEQ ID NO: 88633 - RNA, 22 nt, Human
agccagagcagggaauuggaca

SEQ ID NO: 88634 - RNA, 22 nt, Human
agccagagcugaugucauucuc

SEQ ID NO: 88635 - RNA, 22 nt, Human
agccagaguugaaugugagucu

SEQ ID NO: 88636 - RNA, 23 nt, Human
agccagauuucuuugcagggcag

SEQ ID NO: 88637 - RNA, 22 nt, Human
agccagcaggaacgucuagguu

SEQ ID NO: 88638 - RNA, 19 nt, Human
agccagcaggccucugagc

SEQ ID NO: 88639 - RNA, 22 nt, Human
agccagcagggcuuagaggaca

SEQ ID NO: 88640 - RNA, 22 nt, Human
agccagcaucuugcuucuugag

SEQ ID NO: 88641 - RNA, 20 nt, Human
agccagccacuuccugcucc

SEQ ID NO: 88642 - RNA, 22 nt, Human
agccagccgggggaccacagug

SEQ ID NO: 88643 - RNA, 22 nt, Human
agccagcuaccggggcuccugg

SEQ ID NO: 88644 - RNA, 22 nt, Human
agccagcugccuuucacaucug

SEQ ID NO: 88645 - RNA, 22 nt, Human
agccagcuguccucccuuuccu

SEQ ID NO: 88646 - RNA, 22 nt, Human
agccaggacaucucuagcugcu

SEQ ID NO: 88647 - RNA, 21 nt, Human
agccaggcaagcacccccacu

SEQ ID NO: 88648 - RNA, 17 nt, Human
agccaggcauaugaagu

SEQ ID NO: 88649 - RNA, 22 nt, Human
agccaggccuuagggagaggca

SEQ ID NO: 88650 - RNA, 22 nt, Human
agccaggcggggcagguuuccu

SEQ ID NO: 88651 - RNA, 22 nt, Human
agccaggcuaaaugagccauga

SEQ ID NO: 88652 - RNA, 20 nt, Human
agccaggcucaagcuccccc

SEQ ID NO: 88653 - RNA, 22 nt, Human
agccaggcucaaggccugcucc

SEQ ID NO: 88654 - RNA, 22 nt, Human
agccagggaagaggccuaccuc

SEQ ID NO: 88655 - RNA, 22 nt, Human
agccagggaaggauaacaagaa

SEQ ID NO: 88656 - RNA, 22 nt, Human
agccagggaggauuacacccca

SEQ ID NO: 88657 - RNA, 23 nt, Human
agccagggcacugguggagauug

SEQ ID NO: 88658 - RNA, 22 nt, Human
agccagggcugcgagcagacag

SEQ ID NO: 88659 - RNA, 23 nt, Human
agccaggggaucuugggcccugg

SEQ ID NO: 88660 - RNA, 22 nt, Human
agccaggggauucaucagggac

SEQ ID NO: 88661 - RNA, 22 nt, Human
agccagugcaacagcagugaag

SEQ ID NO: 88662 - RNA, 22 nt, Human
agccagugccagucaugccugc

SEQ ID NO: 88663 - RNA, 22 nt, Human
agccaguguuaagugacugguu

SEQ ID NO: 88664 - RNA, 22 nt, Human
agccaguuuaagcaggaggggu

SEQ ID NO: 88665 - RNA, 21 nt, Human
agccauccugaauggugccau

SEQ ID NO: 88666 - RNA, 22 nt, Human
agccaugcaccuuacucuugcu

SEQ ID NO: 88667 - RNA, 22 nt, Human
agccaugucacauauggucauc

SEQ ID NO: 88668 - RNA, 22 nt, Human
agccaugugucuuuauucuguu

SEQ ID NO: 88669 - RNA, 22 nt, Human
agcccaaaccugcgagcagagc

SEQ ID NO: 88670 - RNA, 22 nt, Human
agcccaagcauaggagggaggc

SEQ ID NO: 88671 - RNA, 22 nt, Human
agcccagagccucuccuaaagg

SEQ ID NO: 88672 - RNA, 22 nt, Human
agcccagagggguuugaggacu

SEQ ID NO: 88673 - RNA, 22 nt, Human
agcccagcaaagggagguucag

SEQ ID NO: 88674 - RNA, 22 nt, Human
agcccagcaguaagauuagaga

SEQ ID NO: 88675 - RNA, 22 nt, Human
agcccagcuccuccacagaaua

SEQ ID NO: 88676 - RNA, 22 nt, Human
agcccagcugcuauguaccugg

SEQ ID NO: 88677 - RNA, 22 nt, Human
agcccagcuuccuucugucucu

SEQ ID NO: 88678 - RNA, 22 nt, Human
agcccagcuuugaaccauauca

SEQ ID NO: 88679 - RNA, 22 nt, Human
agcccaggcagagggaugcuug

SEQ ID NO: 88680 - RNA, 22 nt, Human
agcccagggacagggcggaugu

SEQ ID NO: 88681 - RNA, 22 nt, Human
agcccagggcuaauaggaacca

SEQ ID NO: 88682 - RNA, 22 nt, Human
agcccagguucuaaagccaaac

SEQ ID NO: 88683 - RNA, 22 nt, Human
agcccagugggccgaggcgggg

SEQ ID NO: 88684 - RNA, 22 nt, Human
agcccuggaccuuagcccccac

SEQ ID NO: 88685 - RNA, 22 nt, Human
agcccugggcaccugugagggg

SEQ ID NO: 88686 - RNA, 22 nt, Human
agcccuggggcuggucuuggaa

SEQ ID NO: 88687 - RNA, 22 nt, Human
agcccuggggugcagaaccaug

SEQ ID NO: 88688 - RNA, 22 nt, Human
agcccuguagauuuaggagagu

SEQ ID NO: 88689 - RNA, 22 nt, Human
agcccuguucuguuuuaguagc

SEQ ID NO: 88690 - RNA, 22 nt, Human
agcccuuaguacauuucucaag

SEQ ID NO: 88691 - RNA, 22 nt, Human
agcccuugcagacugucagcau

SEQ ID NO: 88692 - RNA, 22 nt, Human
agcccuugguauuuuccgaucc

SEQ ID NO: 88693 - RNA, 22 nt, Human
agccggccauguggucuugugc

SEQ ID NO: 88694 - RNA, 22 nt, Human
agccuaaugcuuuucccaaagu

SEQ ID NO: 88695 - RNA, 22 nt, Human
agccuagaagaaguggcuacuu

SEQ ID NO: 88696 - RNA, 22 nt, Human
agccuaggagguuggggcugca

SEQ ID NO: 88697 - RNA, 22 nt, Human
agccuaggggguccugggccac

SEQ ID NO: 88698 - RNA, 22 nt, Human
agccuaggucugggucuagcag

SEQ ID NO: 88699 - RNA, 22 nt, Human
agccuagguuuccgauucucuu

SEQ ID NO: 88700 - RNA, 22 nt, Human
agccuauucaucugaucuugaa

SEQ ID NO: 88701 - RNA, 22 nt, Human
agccucagcacgcagcucugug

SEQ ID NO: 88702 - RNA, 22 nt, Human
agccucaguuucaggccuccuc

SEQ ID NO: 88703 - RNA, 22 nt, Human
agccuccaaaugucaggucccg

SEQ ID NO: 88704 - RNA, 22 nt, Human
agccucucacugucacccuccc

SEQ ID NO: 88705 - RNA, 22 nt, Human
agccucucagagugcugggauu

SEQ ID NO: 88706 - RNA, 22 nt, Human
agccucucugaugugacagcua

SEQ ID NO: 88707 - RNA, 22 nt, Human
agccucugugacucacagguca

SEQ ID NO: 88708 - RNA, 21 nt, Human
agccugaaucccaccaguuca

SEQ ID NO: 88709 - RNA, 22 nt, Human
agccugagcugccugccgccuc

SEQ ID NO: 88710 - RNA, 22 nt, Human
agccugauuuugauaauuauau

SEQ ID NO: 88711 - RNA, 22 nt, Human
agccugcaggaugggcagcacc

SEQ ID NO: 88712 - RNA, 22 nt, Human
agccugccucagacucaggaua

SEQ ID NO: 88713 - RNA, 22 nt, Human
agccuggacagcuacggagaac

SEQ ID NO: 88714 - RNA, 22 nt, Human
agccuggaggaggaguugagca

SEQ ID NO: 88715 - RNA, 22 nt, Human
agccuggaggccaggagacagu

SEQ ID NO: 88716 - RNA, 18 nt, Human
agccuggaggguugaagu

SEQ ID NO: 88717 - RNA, 22 nt, Human
agccuggagguaaugaggaaac

SEQ ID NO: 88718 - RNA, 22 nt, Human
agccuggauccuaggcucagcu

SEQ ID NO: 88719 - RNA, 23 nt, Human
agccuggcaccugcagaucggag

SEQ ID NO: 88720 - RNA, 22 nt, Human
agccuggcggucgucggucagg

SEQ ID NO: 88721 - RNA, 22 nt, Human
agccuggcugggaagagccucu

SEQ ID NO: 88722 - RNA, 22 nt, Human
agccuggcuguaaccucauggu

SEQ ID NO: 88723 - RNA, 22 nt, Human
agccugggggcgcagaaaccgg

SEQ ID NO: 88724 - RNA, 22 nt, Human
agccugguguggggcugcagag

SEQ ID NO: 88725 - RNA, 22 nt, Human
agccugucugucuccaaagcug

SEQ ID NO: 88726 - RNA, 22 nt, Human
agccugugaaaucucugccacu

SEQ ID NO: 88727 - RNA, 22 nt, Human
aaacuucuugcugcauuuucug

SEQ ID NO: 88728 - RNA, 22 nt, Human
aaacuugaacccagcucaggcu

SEQ ID NO: 88729 - RNA, 22 nt, Human
aaacuugaggcaaugaaggugu

SEQ ID NO: 88730 - RNA, 20 nt, Human
aaacuugauggcauagaaua

SEQ ID NO: 88731 - RNA, 22 nt, Human
aaacuugcgucaugucaugaaa

SEQ ID NO: 88732 - RNA, 22 nt, Human
aaacuuguucucuugugccuau

SEQ ID NO: 88733 - RNA, 22 nt, Human
aaacuuucauguaucucuuuca

SEQ ID NO: 88734 - RNA, 22 nt, Human
aaacuuuuccugcucuuguccu

SEQ ID NO: 88735 - RNA, 22 nt, Human
aaacuuuuuauucuaaugucua

SEQ ID NO: 88736 - RNA, 22 nt, Human
aaacuuuuucuuagguaugucu

SEQ ID NO: 88737 - RNA, 21 nt, Human
aaagaaaucucccauugguag

SEQ ID NO: 88738 - RNA, 22 nt, Human
aaagaacaaauuagcuguuuua

SEQ ID NO: 88739 - RNA, 21 nt, Human
aaagaacaggcagauguucuu

SEQ ID NO: 88740 - RNA, 22 nt, Human
aaagaacuaaugugcaagguuu

SEQ ID NO: 88741 - RNA, 22 nt, Human
aaagaacuaccuguaugauauu

SEQ ID NO: 88742 - RNA, 22 nt, Human
aaagaagcauaggcuagacuuc

SEQ ID NO: 88743 - RNA, 22 nt, Human
aaagaaggaccuggaggaggau

SEQ ID NO: 88744 - RNA, 22 nt, Human
aaagaaggggucuacauccaau

SEQ ID NO: 88745 - RNA, 22 nt, Human
aaagaauacccugggucauaaa

SEQ ID NO: 88746 - RNA, 22 nt, Human
aaagaauacuccuuuugccuug

SEQ ID NO: 88747 - RNA, 22 nt, Human
aaagaaucagaagucucaaaca

SEQ ID NO: 88748 - RNA, 22 nt, Human
aaagaaucguguguaguuugaa

SEQ ID NO: 88749 - RNA, 22 nt, Human
aaagacacaaauguagaccaaa

SEQ ID NO: 88750 - RNA, 22 nt, Human
aaagacacauaugcuuaaccca

SEQ ID NO: 88751 - RNA, 22 nt, Human
aaagacagauggcaaggaugau

SEQ ID NO: 88752 - RNA, 22 nt, Human
aaagacauuagauuaacguaca

SEQ ID NO: 88753 - RNA, 22 nt, Human
aaagacuaaaugaaugagcuca

SEQ ID NO: 88754 - RNA, 22 nt, Human
aaagacuagcauuuauauguac

SEQ ID NO: 88755 - RNA, 22 nt, Human
aaagacucaauuguucccuaau

SEQ ID NO: 88756 - RNA, 22 nt, Human
aaagacugaggggaaagugaug

SEQ ID NO: 88757 - RNA, 22 nt, Human
aaagacuuggcuuaugauuugc

SEQ ID NO: 88758 - RNA, 22 nt, Human
aaagacuugggugaaguaauuu

SEQ ID NO: 88759 - RNA, 22 nt, Human
aaagacuuuagguuagaggcau

SEQ ID NO: 88760 - RNA, 22 nt, Human
aaagacuuucaccuagcaaaga

SEQ ID NO: 88761 - RNA, 22 nt, Human
aaagagaaacuuagaagccuga

SEQ ID NO: 88762 - RNA, 22 nt, Human
aaagagacaccaaagacucuag

SEQ ID NO: 88763 - RNA, 22 nt, Human
aaagagccagcuaccucaguuu

SEQ ID NO: 88764 - RNA, 20 nt, Human
aaagagcccuuggagcaggc

SEQ ID NO: 88765 - RNA, 22 nt, Human
aaagagccgcugaugucagccc

SEQ ID NO: 88766 - RNA, 22 nt, Human
aaagagcucuuacucuagugua

SEQ ID NO: 88767 - RNA, 22 nt, Human
aaagagcugggacuuaaagugc

SEQ ID NO: 88768 - RNA, 22 nt, Human
aaagagcuuuagaaaucucaga

SEQ ID NO: 88769 - RNA, 22 nt, Human
aaagagcuuuccacacuaguca

SEQ ID NO: 88770 - RNA, 22 nt, Human
aaagaggcaaucaauguagcaa

SEQ ID NO: 88771 - RNA, 22 nt, Human
aaagagggacaggcgcagacac

SEQ ID NO: 88772 - RNA, 22 nt, Human
aaagaggggacuguuaauucca

SEQ ID NO: 88773 - RNA, 22 nt, Human
aaagagucguguuccagguuug

SEQ ID NO: 88774 - RNA, 22 nt, Human
aaagaguuacacaguuucagaa

SEQ ID NO: 88775 - RNA, 22 nt, Human
aaagaguucuuguagcuuugag

SEQ ID NO: 88776 - RNA, 22 nt, Human
aaagaucagucugaagcaacau

SEQ ID NO: 88777 - RNA, 22 nt, Human
aaagaucauucucugguccaga

SEQ ID NO: 88778 - RNA, 19 nt, Human
aaagaucugggauugagac

SEQ ID NO: 88779 - RNA, 22 nt, Human
aaagaucuguguuaacucaagg

SEQ ID NO: 88780 - RNA, 22 nt, Human
aaagaugaccguaugucagagc

SEQ ID NO: 88781 - RNA, 22 nt, Human
aaagaugaucuacaaguucauu

SEQ ID NO: 88782 - RNA, 22 nt, Human
aaagauggcccaugaucucuug

SEQ ID NO: 88783 - RNA, 22 nt, Human
aaagauguccaaguaaaguuaa

SEQ ID NO: 88784 - RNA, 19 nt, Human
aaagauguccuuuugggcu

SEQ ID NO: 88785 - RNA, 22 nt, Human
aaagauguguaagaaauaaaca

SEQ ID NO: 88786 - RNA, 22 nt, Human
aaagauguuaauagcaccauuu

SEQ ID NO: 88787 - RNA, 23 nt, Human
aaagauguucccaaaguucacgu

SEQ ID NO: 88788 - RNA, 21 nt, Human
aaagauguuucuuuuccucac

SEQ ID NO: 88789 - RNA, 22 nt, Human
aaagauguuuuauaaguuaugg

SEQ ID NO: 88790 - RNA, 22 nt, Human
aaagauuaagguauuguuagcu

SEQ ID NO: 88791 - RNA, 22 nt, Human
aaagauuccuuuauucuccaag

SEQ ID NO: 88792 - RNA, 22 nt, Human
aaagauucgagcgauguauaaa

SEQ ID NO: 88793 - RNA, 22 nt, Human
aaagauuuaagaauaauuugug

SEQ ID NO: 88794 - RNA, 22 nt, Human
aaagauuucacaucccaagccu

SEQ ID NO: 88795 - RNA, 22 nt, Human
aaagauuugaguucugcuuaua

SEQ ID NO: 88796 - RNA, 22 nt, Human
aaagcaagaugcauccgucaag

SEQ ID NO: 88797 - RNA, 22 nt, Human
aaagcaagucucuacaaaguac

SEQ ID NO: 88798 - RNA, 22 nt, Human
aaagcaauaguaaugguaauag

SEQ ID NO: 88799 - RNA, 22 nt, Human
aaagcaaugaugguagacacgu

SEQ ID NO: 88800 - RNA, 22 nt, Human
aaagcaauugugguuuuuguca

SEQ ID NO: 88801 - RNA, 22 nt, Human
aaagcacuucaggagcaguuug

SEQ ID NO: 88802 - RNA, 22 nt, Human
aaagcagaggugauaugacuua

SEQ ID NO: 88803 - RNA, 22 nt, Human
aaagcagagguugcagugagcu

SEQ ID NO: 88804 - RNA, 22 nt, Human
aaagcagcaacagcuguuagaa

SEQ ID NO: 88805 - RNA, 22 nt, Human
aaagcagcagcaccugcauuuc

SEQ ID NO: 88806 - RNA, 22 nt, Human
aaagcagccacagagagagcgu

SEQ ID NO: 88807 - RNA, 22 nt, Human
aaagcagcugcucuggccuuga

SEQ ID NO: 88808 - RNA, 22 nt, Human
aaagcaggcagcaggcuggauu

SEQ ID NO: 88809 - RNA, 22 nt, Human
aaagcagggaugaggcuagagg

SEQ ID NO: 88810 - RNA, 22 nt, Human
aaagcagugcaccuuaauugau

SEQ ID NO: 88811 - RNA, 22 nt, Human
aaagcaucagaucugacacuuc

SEQ ID NO: 88812 - RNA, 22 nt, Human
aaagcaugcuacuuuauauagg

SEQ ID NO: 88813 - RNA, 22 nt, Human
aaagcauggcaugaagaacaug

SEQ ID NO: 88814 - RNA, 22 nt, Human
aaagcaugguuaaagacagugg

SEQ ID NO: 88815 - RNA, 22 nt, Human
aaagccacugcauguguaguau

SEQ ID NO: 88816 - RNA, 22 nt, Human
aaagccagagcaagcugucaca

SEQ ID NO: 88817 - RNA, 22 nt, Human
aaagccagaguguguuagagac

SEQ ID NO: 88818 - RNA, 22 nt, Human
aaagccagcucugagcugcacc

SEQ ID NO: 88819 - RNA, 22 nt, Human
aaagccagugguaugagagaaa

SEQ ID NO: 88820 - RNA, 22 nt, Human
aaagccaguucuuuuauauugg

SEQ ID NO: 88821 - RNA, 22 nt, Human
aaagccaguuucuggaaguacc

SEQ ID NO: 88822 - RNA, 22 nt, Human
aaagccaguuugucucuuuaaa

SEQ ID NO: 88823 - RNA, 22 nt, Human
aaagccuggguuccucacuauc

SEQ ID NO: 88824 - RNA, 22 nt, Human
aaagccuucaaguagauguaag

SEQ ID NO: 88825 - RNA, 22 nt, Human
aaagccuugcccgucacuggga

SEQ ID NO: 88826 - RNA, 22 nt, Human
aaagcuagaaggaaauuuuaug

SEQ ID NO: 88827 - RNA, 22 nt, Human
aaagcuauucaacacgaacaug

SEQ ID NO: 88828 - RNA, 22 nt, Human
aaagcuauuuauuacagagaau

SEQ ID NO: 88829 - RNA, 22 nt, Human
aaagcuauuuguuaugagagaa

SEQ ID NO: 88830 - RNA, 22 nt, Human
aaagcucugggaaugcuuaucu

SEQ ID NO: 88831 - RNA, 22 nt, Human
aaagcucuuaaugagauuaucc

SEQ ID NO: 88832 - RNA, 22 nt, Human
aaagcugcccagcugccuguuu

SEQ ID NO: 88833 - RNA, 22 nt, Human
aaagcugcccuacacggaagca

SEQ ID NO: 88834 - RNA, 22 nt, Human
aaagcugcccuugugaaacaag

SEQ ID NO: 88835 - RNA, 22 nt, Human
aaagcuggccucucaggcuuua

SEQ ID NO: 88836 - RNA, 22 nt, Human
aaaguggccauccucugcaucg

SEQ ID NO: 88837 - RNA, 21 nt, Human
aaagugguaaggauuauuuug

SEQ ID NO: 88838 - RNA, 22 nt, Human
aaaguggucugcaucccuucug

SEQ ID NO: 88839 - RNA, 22 nt, Human
aaaguguaggcuucaaagaggg

SEQ ID NO: 88840 - RNA, 22 nt, Human
aaaguguggcacaagucacauc

SEQ ID NO: 88841 - RNA, 21 nt, Human
aaaguguguggggaagaagga

SEQ ID NO: 88842 - RNA, 22 nt, Human
aaaguguuaugagaacuaagug

SEQ ID NO: 88843 - RNA, 21 nt, Human
aaaguguucagaccaguucug

SEQ ID NO: 88844 - RNA, 22 nt, Human
aaaguguugaagaaaauguuca

SEQ ID NO: 88845 - RNA, 22 nt, Human
aaaguguuuuugagcuguaguu

SEQ ID NO: 88846 - RNA, 22 nt, Human
aaaguuacacaucuaguaagug

SEQ ID NO: 88847 - RNA, 22 nt, Human
aaaguuacuaucacaaugaaau

SEQ ID NO: 88848 - RNA, 22 nt, Human
aaaguuagacagcaucauuucu

SEQ ID NO: 88849 - RNA, 22 nt, Human
aaaguuaguaaaaugggauaua

SEQ ID NO: 88850 - RNA, 22 nt, Human
aaaguucacuauguagcagcgu

SEQ ID NO: 88851 - RNA, 22 nt, Human
aaaguucuauuggauagugcug

SEQ ID NO: 88852 - RNA, 22 nt, Human
aaaguucugagacugauggcua

SEQ ID NO: 88853 - RNA, 22 nt, Human
aaaguucuggcauuuucugucu

SEQ ID NO: 88854 - RNA, 22 nt, Human
aaaguucuguagugcacugacu

SEQ ID NO: 88855 - RNA, 22 nt, Human
aaaguucuuucucuuauuuggu

SEQ ID NO: 88856 - RNA, 22 nt, Human
aaaguugaguaggguuugggcc

SEQ ID NO: 88857 - RNA, 22 nt, Human
aaaguuggauuucauccucaug

SEQ ID NO: 88858 - RNA, 22 nt, Human
aaaguuguucaguaagaaacuc

SEQ ID NO: 88859 - RNA, 22 nt, Human
aaaguuguuuccuaaggucuaa

SEQ ID NO: 88860 - RNA, 23 nt, Human
aaaguuugaagcaacaguaguug

SEQ ID NO: 88861 - RNA, 22 nt, Human
aaaguuuggauccagcaaaaga

SEQ ID NO: 88862 - RNA, 22 nt, Human
aaaguuugucacuuggcuagaa

SEQ ID NO: 88863 - RNA, 22 nt, Human
aaaguuuguuauaugauaagga

SEQ ID NO: 88864 - RNA, 22 nt, Human
aaaguuuucugccuucauuaga

SEQ ID NO: 88865 - RNA, 22 nt, Human
aaaguuuuuaagcaagacccuu

SEQ ID NO: 88866 - RNA, 22 nt, Human
aaauaaaggaacuguuuuccca

SEQ ID NO: 88867 - RNA, 22 nt, Human
aaauaagaaauucuucuuugca

SEQ ID NO: 88868 - RNA, 22 nt, Human
aaauaaguuagcagauuccagu

SEQ ID NO: 88869 - RNA, 22 nt, Human
aaauaauugaguuggucaauau

SEQ ID NO: 88870 - RNA, 21 nt, Human
aaauacagaaacuuguuuuca

SEQ ID NO: 88871 - RNA, 22 nt, Human
aaauacagaguugcuuaaaagc

SEQ ID NO: 88872 - RNA, 22 nt, Human
aaauacagauuccagggucuua

SEQ ID NO: 88873 - RNA, 22 nt, Human
aaauacauuagacggagaguua

SEQ ID NO: 88874 - RNA, 23 nt, Human
aaauaccugaauuagauauuauc

SEQ ID NO: 88875 - RNA, 22 nt, Human
aaauacgugcacauacauacau

SEQ ID NO: 88876 - RNA, 22 nt, Human
aaauacuagaauucagaguuga

SEQ ID NO: 88877 - RNA, 22 nt, Human
aaauacuauugaccaggucucu

SEQ ID NO: 88878 - RNA, 22 nt, Human
aaauacucucaauaaagaaagu

SEQ ID NO: 88879 - RNA, 22 nt, Human
aaauacugguuuuggagaugcu

SEQ ID NO: 88880 - RNA, 22 nt, Human
aaauacuguagauaauagaguu

SEQ ID NO: 88881 - RNA, 22 nt, Human
aaauacugugaauaaagguuuu

SEQ ID NO: 88882 - RNA, 22 nt, Human
aaauagacacaugcguucauau

SEQ ID NO: 88883 - RNA, 22 nt, Human
aaauagacacuuggacagacaa

SEQ ID NO: 88884 - RNA, 22 nt, Human
aaauagauuuccuagcauugga

SEQ ID NO: 88885 - RNA, 22 nt, Human
aaauagcauuguauuuagcuga

SEQ ID NO: 88886 - RNA, 22 nt, Human
aaauagcuacaugaucucuagg

SEQ ID NO: 88887 - RNA, 22 nt, Human
aaauagcuuuucauaauucuca

SEQ ID NO: 88888 - RNA, 23 nt, Human
aaauaggaguaucuggaucauga

SEQ ID NO: 88889 - RNA, 22 nt, Human
aaauaguuagcccugcauauau

SEQ ID NO: 88890 - RNA, 22 nt, Human
aaagcugggggcccuggucuag

SEQ ID NO: 88891 - RNA, 22 nt, Human
aaagcuuaagguagguacagag

SEQ ID NO: 88892 - RNA, 22 nt, Human
aaagcuuuguaaauaaacaggu

SEQ ID NO: 88893 - RNA, 22 nt, Human
aaaggaagugccacucuucuuc

SEQ ID NO: 88894 - RNA, 20 nt, Human
aaaggaauauaugaaguaua

SEQ ID NO: 88895 - RNA, 22 nt, Human
aaaggaaugagcuucuguuagg

SEQ ID NO: 88896 - RNA, 22 nt, Human
aaaggacuagguguugccaaaa

SEQ ID NO: 88897 - RNA, 22 nt, Human
aaaggacuggauauuaaagagu

SEQ ID NO: 88898 - RNA, 22 nt, Human
aaaggagaguagguuacuccau

SEQ ID NO: 88899 - RNA, 22 nt, Human
aaaggaggaauggagagaugcu

SEQ ID NO: 88900 - RNA, 22 nt, Human
aaaggauuaaauaaaugugcug

SEQ ID NO: 88901 - RNA, 22 nt, Human
aaaggcacaaauucagcauuuu

SEQ ID NO: 88902 - RNA, 22 nt, Human
aaaggcacagaagggaaaccaa

SEQ ID NO: 88903 - RNA, 22 nt, Human
aaaggcacuagaaguuaccuuu

SEQ ID NO: 88904 - RNA, 18 nt, Human
aaaggcagauuacuggga

SEQ ID NO: 88905 - RNA, 23 nt, Human
aaaggcaggccuaggacauauug

SEQ ID NO: 88906 - RNA, 18 nt, Human
aaaggcauauauagaagu

SEQ ID NO: 88907 - RNA, 22 nt, Human
aaaggcauggaacagauucucc

SEQ ID NO: 88908 - RNA, 22 nt, Human
aaaggcaugugcaacuacaaau

SEQ ID NO: 88909 - RNA, 22 nt, Human
aaaggcauuuuaauucuaaaga

SEQ ID NO: 88910 - RNA, 21 nt, Human
aaaggccauaaucacggagca

SEQ ID NO: 88911 - RNA, 22 nt, Human
aaaggccaugguuggaguguuu

SEQ ID NO: 88912 - RNA, 22 nt, Human
aaaggccauuacuugcuuuuag

SEQ ID NO: 88913 - RNA, 22 nt, Human
aaaggcuaguggauucauugau

SEQ ID NO: 88914 - RNA, 23 nt, Human
aaaggcuaucaaaguuuugcuga

SEQ ID NO: 88915 - RNA, 22 nt, Human
aaaggcuauugcugauaauguu

SEQ ID NO: 88916 - RNA, 22 nt, Human
aaaggcucuaacaaggagagag

SEQ ID NO: 88917 - RNA, 22 nt, Human
aaaggcuugguucuuugaugac

SEQ ID NO: 88918 - RNA, 22 nt, Human
aaagggcuuuauaucagugugu

SEQ ID NO: 88919 - RNA, 22 nt, Human
aaagguaacaguuauaaccagg

SEQ ID NO: 88920 - RNA, 22 nt, Human
aaagguaucauguccauacagu

SEQ ID NO: 88921 - RNA, 22 nt, Human
aaagguaugauacugugacaug

SEQ ID NO: 88922 - RNA, 22 nt, Human
aaaggucagacuuaggcugggc

SEQ ID NO: 88923 - RNA, 22 nt, Human
aaaggucuucucaaacauccca

SEQ ID NO: 88924 - RNA, 22 nt, Human
aaaggucuugucuugacagagu

SEQ ID NO: 88925 - RNA, 22 nt, Human
aaaggugccucuuacaaggcuu

SEQ ID NO: 88926 - RNA, 22 nt, Human
aaagguuaauguugucauguua

SEQ ID NO: 88927 - RNA, 22 nt, Human
aaagguuagacagcucugcaua

SEQ ID NO: 88928 - RNA, 22 nt, Human
aaagguuuauugcuaugguugu

SEQ ID NO: 88929 - RNA, 22 nt, Human
aaagguuuccgagcuuuaauuu

SEQ ID NO: 88930 - RNA, 22 nt, Human
aaagguuuuauucugagcucug

SEQ ID NO: 88931 - RNA, 22 nt, Human
aaagguuuucuaggguugaggg

SEQ ID NO: 88932 - RNA, 22 nt, Human
aaagguuuuucagcagggagau

SEQ ID NO: 88933 - RNA, 22 nt, Human
aaaguaagaccaagugaucauu

SEQ ID NO: 88934 - RNA, 22 nt, Human
aaaguacaggaaagccuagcca

SEQ ID NO: 88935 - RNA, 22 nt, Human
aaaguacuaaugaauauuuugc

SEQ ID NO: 88936 - RNA, 22 nt, Human
aaaguacugggauuacaggucu

SEQ ID NO: 88937 - RNA, 22 nt, Human
aaaguacuuugggcuauguuug

SEQ ID NO: 88938 - RNA, 22 nt, Human
aaaguagaggcauugaucaggu

SEQ ID NO: 88939 - RNA, 22 nt, Human
aaaguagauuucucauggcgaa

SEQ ID NO: 88940 - RNA, 22 nt, Human
aaaguagcuuaguugauauuuc

SEQ ID NO: 88941 - RNA, 22 nt, Human
aaaguauauaugcacuuuagaa

SEQ ID NO: 88942 - RNA, 22 nt, Human
aaaguauguuguggcuuuuaaa

SEQ ID NO: 88943 - RNA, 22 nt, Human
aaaguauucuugacuguuuuuc

SEQ ID NO: 88944 - RNA, 22 nt, Human
aaagucacauagcaucacuucu

SEQ ID NO: 88945 - RNA, 22 nt, Human
aagaauuggucacaugcuacaa

SEQ ID NO: 88946 - RNA, 22 nt, Human
aagacaacagagaugacagacu

SEQ ID NO: 88947 - RNA, 22 nt, Human
aagacaagcaucaaaucaggca

SEQ ID NO: 88948 - RNA, 22 nt, Human
aagacaaucuaaggggaauggu

SEQ ID NO: 88949 - RNA, 22 nt, Human
aagacacaauguagcccagcac

SEQ ID NO: 88950 - RNA, 22 nt, Human
aagacacuaagcuuucaggaua

SEQ ID NO: 88951 - RNA, 22 nt, Human
aagacacucauuaucacugguu

SEQ ID NO: 88952 - RNA, 22 nt, Human
aagacacugggggcugcagcca

SEQ ID NO: 88953 - RNA, 22 nt, Human
aagacacuuucuaaauagaagu

SEQ ID NO: 88954 - RNA, 17 nt, Human
aagacagaagccaugag

SEQ ID NO: 88955 - RNA, 22 nt, Human
aagacagaugcaaccugcuagc

SEQ ID NO: 88956 - RNA, 22 nt, Human
aagacaggaacauagcaaaucc

SEQ ID NO: 88957 - RNA, 22 nt, Human
aagacauaaaacagucagcgaa

SEQ ID NO: 88958 - RNA, 22 nt, Human
aagacaucagugaugacauuug

SEQ ID NO: 88959 - RNA, 22 nt, Human
aagacaugcaauuagcaaggaa

SEQ ID NO: 88960 - RNA, 22 nt, Human
aagacauugcaugauaaugcug

SEQ ID NO: 88961 - RNA, 22 nt, Human
aagacauuuaugaaaagugcug

SEQ ID NO: 88962 - RNA, 22 nt, Human
aagacauuuauuugaaucaauu

SEQ ID NO: 88963 - RNA, 22 nt, Human
aagacauuuugaaauuggaagc

SEQ ID NO: 88964 - RNA, 22 nt, Human
aagaccaucacagagacacuug

SEQ ID NO: 88965 - RNA, 22 nt, Human
aagacccuaccccuggagagga

SEQ ID NO: 88966 - RNA, 22 nt, Human
aagaccuaaaauucccucagau

SEQ ID NO: 88967 - RNA, 22 nt, Human
aagaccuugucuaaacauguag

SEQ ID NO: 88968 - RNA, 22 nt, Human
aagacuauaccaucuuaguuac

SEQ ID NO: 88969 - RNA, 22 nt, Human
aagacucaaggaacaacacagu

SEQ ID NO: 88970 - RNA, 22 nt, Human
aagacugaguucaaaucacagc

SEQ ID NO: 88971 - RNA, 22 nt, Human
aagacuguaugagacaauauaa

SEQ ID NO: 88972 - RNA, 22 nt, Human
aagacugucugggacaagauga

SEQ ID NO: 88973 - RNA, 22 nt, Human
aagacugucuuuucugagugac

SEQ ID NO: 88974 - RNA, 22 nt, Human
aagacuuucccucaucagaacg

SEQ ID NO: 88975 - RNA, 22 nt, Human
aagagaacagucaccaugcaca

SEQ ID NO: 88976 - RNA, 22 nt, Human
aagagacaagaauuccaacgcu

SEQ ID NO: 88977 - RNA, 22 nt, Human
aagagacaaugacacuugggag

SEQ ID NO: 88978 - RNA, 22 nt, Human
aagagacuauggugucuaugaa

SEQ ID NO: 88979 - RNA, 22 nt, Human
aagagacuuguccgaaguugua

SEQ ID NO: 88980 - RNA, 22 nt, Human
aagagacuuugcagugucccua

SEQ ID NO: 88981 - RNA, 22 nt, Human
aagagagaacacagcuugggca

SEQ ID NO: 88982 - RNA, 22 nt, Human
aagagagacaauagguagcauu

SEQ ID NO: 88983 - RNA, 22 nt, Human
aagagagagcauucuucuguua

SEQ ID NO: 88984 - RNA, 20 nt, Human
aagagaggaaguuauacuag

SEQ ID NO: 88985 - RNA, 22 nt, Human
aagagagucagucugagcacca

SEQ ID NO: 88986 - RNA, 22 nt, Human
aagagaugcuuuacaucggaug

SEQ ID NO: 88987 - RNA, 22 nt, Human
aagagauuucuguaaaauguaa

SEQ ID NO: 88988 - RNA, 22 nt, Human
aagagcagauuccuaguggagc

SEQ ID NO: 88989 - RNA, 22 nt, Human
aagagcaggcugcuguggagua

SEQ ID NO: 88990 - RNA, 22 nt, Human
aagagcaguguuuuacucagcu

SEQ ID NO: 88991 - RNA, 22 nt, Human
aagagccagcuagugaagaggc

SEQ ID NO: 88992 - RNA, 22 nt, Human
aagagccaggacagauccagcu

SEQ ID NO: 88993 - RNA, 22 nt, Human
aagagccauauaugcagcuaga

SEQ ID NO: 88994 - RNA, 22 nt, Human
aagagccuggcugcuaggcuca

SEQ ID NO: 88995 - RNA, 22 nt, Human
aagagcugauuaagucaugagg

SEQ ID NO: 88996 - RNA, 22 nt, Human
aagagcuggaagugaagauaac

SEQ ID NO: 88997 - RNA, 22 nt, Human
aagagcuggagcugcuacagga

SEQ ID NO: 88998 - RNA, 22 nt, Human
aagagcuggauggaaucuggga

SEQ ID NO: 88999 - RNA, 22 nt, Human
aagagcuggauugugcugcaga

SEQ ID NO: 89000 - RNA, 22 nt, Human
aagagcuggcccaaucugagca

SEQ ID NO: 89001 - RNA, 22 nt, Human
aagagcuguugucugcuuacug

SEQ ID NO: 89002 - RNA, 22 nt, Human
aagaggaaaugauugacuauau

SEQ ID NO: 89003 - RNA, 22 nt, Human
aagaggaacugggggcugaguc

SEQ ID NO: 89004 - RNA, 21 nt, Human
aagaggaagcauuauggcaua

SEQ ID NO: 89005 - RNA, 22 nt, Human
aagaggaauggguguguuuaug

SEQ ID NO: 89006 - RNA, 22 nt, Human
aagaggacuugugaagauguac

SEQ ID NO: 89007 - RNA, 22 nt, Human
aagaggagacuucagcaacuug

SEQ ID NO: 89008 - RNA, 22 nt, Human
aagaggagggcagauucaaggc

SEQ ID NO: 89009 - RNA, 22 nt, Human
aagaggcauaaaauuuauaugg

SEQ ID NO: 89010 - RNA, 22 nt, Human
aagaggccuggaggcagaggug

SEQ ID NO: 89011 - RNA, 22 nt, Human
aagaggcugaaugagaaaguac

SEQ ID NO: 89012 - RNA, 18 nt, Human
aagaggcuguucuguggg

SEQ ID NO: 89013 - RNA, 19 nt, Human
aagagggaaagugcuaugc

SEQ ID NO: 89014 - RNA, 22 nt, Human
aagagggaagucaccuggaggu

SEQ ID NO: 89015 - RNA, 22 nt, Human
aagagguaaccauagcaaccac

SEQ ID NO: 89016 - RNA, 17 nt, Human
aagagguaacuguacua

SEQ ID NO: 89017 - RNA, 21 nt, Human
aagaggucaaauuauaaaugg

SEQ ID NO: 89018 - RNA, 22 nt, Human
aagaggucacacuagguccuag

SEQ ID NO: 89019 - RNA, 22 nt, Human
aagaggugagaagcuacacuua

SEQ ID NO: 89020 - RNA, 22 nt, Human
aagagguggaacagcaauucgu

SEQ ID NO: 89021 - RNA, 22 nt, Human
aagagguuauuguucccagcuu

SEQ ID NO: 89022 - RNA, 22 nt, Human
aagagguucuaauuuaacuauc

SEQ ID NO: 89023 - RNA, 22 nt, Human
aagagguucuccuuggaguggg

SEQ ID NO: 89024 - RNA, 22 nt, Human
aagagguugucugugaugaguu

SEQ ID NO: 89025 - RNA, 22 nt, Human
aagagguuucaugauuuucuua

SEQ ID NO: 89026 - RNA, 22 nt, Human
aagaguaaagcaaagcacuugu

SEQ ID NO: 89027 - RNA, 22 nt, Human
aagaguaaauucaggacuuuaa

SEQ ID NO: 89028 - RNA, 22 nt, Human
aagaguauagcuuuaggauuga

SEQ ID NO: 89029 - RNA, 22 nt, Human
aagagucauagagacauugauu

SEQ ID NO: 89030 - RNA, 22 nt, Human
aagagucccaaaaugauucuua

SEQ ID NO: 89031 - RNA, 20 nt, Human
aagagucuuuacugagcuaa

SEQ ID NO: 89032 - RNA, 21 nt, Human
aagaguggcugaggaggugau

SEQ ID NO: 89033 - RNA, 22 nt, Human
aagagugugagguugugcuuuu

SEQ ID NO: 89034 - RNA, 22 nt, Human
aagaguuauauaauguguaguu

SEQ ID NO: 89035 - RNA, 22 nt, Human
aagaguuuccaguuguggcuca

SEQ ID NO: 89036 - RNA, 22 nt, Human
aagaguuucuuuauuaaccuuu

SEQ ID NO: 89037 - RNA, 22 nt, Human
aagaguuugggcaagucauaaa

SEQ ID NO: 89038 - RNA, 22 nt, Human
aagaguuuucuauaaucuuggc

SEQ ID NO: 89039 - RNA, 22 nt, Human
aagauaaugugucugucuuugc

SEQ ID NO: 89040 - RNA, 22 nt, Human
aacauguaucgcuuuuuaauau

SEQ ID NO: 89041 - RNA, 22 nt, Human
aacaugucuggguauucacaag

SEQ ID NO: 89042 - RNA, 22 nt, Human
aacauguugcuuuaauaauauu

SEQ ID NO: 89043 - RNA, 22 nt, Human
aacauuaauuacagucaaacau

SEQ ID NO: 89044 - RNA, 21 nt, Human
aacauuaguaauuugacuuuu

SEQ ID NO: 89045 - RNA, 16 nt, Human
aacauucauaugagug

SEQ ID NO: 89046 - RNA, 22 nt, Human
aacauucuauuuugcuaaaaca

SEQ ID NO: 89047 - RNA, 22 nt, Human
aacauucugguucuaaaaaccu

SEQ ID NO: 89048 - RNA, 22 nt, Human
aacauucugucaauugaugacc

SEQ ID NO: 89049 - RNA, 22 nt, Human
aacauucuuaagauuugugucu

SEQ ID NO: 89050 - RNA, 22 nt, Human
aacauucuucaaauaucacucu

SEQ ID NO: 89051 - RNA, 22 nt, Human
aacauucuuuagcucuuccugc

SEQ ID NO: 89052 - RNA, 22 nt, Human
aacauugaguuagggagcguau

SEQ ID NO: 89053 - RNA, 22 nt, Human
aacauugaguucuacuuccauu

SEQ ID NO: 89054 - RNA, 22 nt, Human
aacccuggggcugcucugccug

SEQ ID NO: 89055 - RNA, 22 nt, Human
aaccggagugauucccaccucu

SEQ ID NO: 89056 - RNA, 22 nt, Human
aaccguuuuaccauuuguaacu

SEQ ID NO: 89057 - RNA, 22 nt, Human
aaccuaagugcuguugaacguu

SEQ ID NO: 89058 - RNA, 23 nt, Human
aaccuagacuacuuacuaugugg

SEQ ID NO: 89059 - RNA, 22 nt, Human
aaccuaugaacucuuggugugc

SEQ ID NO: 89060 - RNA, 22 nt, Human
aaccucaaacucuugggcuuaa

SEQ ID NO: 89061 - RNA, 22 nt, Human
aaccucuuugugaaugucauga

SEQ ID NO: 89062 - RNA, 23 nt, Human
aaccugaacuagggucuugcaua

SEQ ID NO: 89063 - RNA, 22 nt, Human
aaccugaauuuaauugaaauga

SEQ ID NO: 89064 - RNA, 22 nt, Human
aaccugagcgcguugcuuucua

SEQ ID NO: 89065 - RNA, 22 nt, Human
aaccugagucuuuugauuugcu

SEQ ID NO: 89066 - RNA, 22 nt, Human
aaccuggcccuaaucccaguag

SEQ ID NO: 89067 - RNA, 22 nt, Human
aaccuggcugcaaagaagggga

SEQ ID NO: 89068 - RNA, 22 nt, Human
aaccuguaaauccaaacaaucu

SEQ ID NO: 89069 - RNA, 22 nt, Human
aaccuucacuugcuucauuuga

SEQ ID NO: 89070 - RNA, 22 nt, Human
aaccuugaauacuuaaauacau

SEQ ID NO: 89071 - RNA, 22 nt, Human
aaccuugagggaugagguagug

SEQ ID NO: 89072 - RNA, 22 nt, Human
aacggcuguggcuggcggcagc

SEQ ID NO: 89073 - RNA, 22 nt, Human
aacgucauugauugaugguagu

SEQ ID NO: 89074 - RNA, 23 nt, Human
aacguccucaacaggauugcacc

SEQ ID NO: 89075 - RNA, 22 nt, Human
aacguuuuaucgugugcucuuc

SEQ ID NO: 89076 - RNA, 18 nt, Human
aacuaaagaucuuuaagc

SEQ ID NO: 89077 - RNA, 22 nt, Human
aacuaaaguaaccaaggauauc

SEQ ID NO: 89078 - RNA, 22 nt, Human
aacuaaaucuggcauuuagagc

SEQ ID NO: 89079 - RNA, 21 nt, Human
aacuaaggaacugaaaaaugg

SEQ ID NO: 89080 - RNA, 21 nt, Human
aacuacaguuguuccuucauu

SEQ ID NO: 89081 - RNA, 22 nt, Human
aacuacauuguccuuucugaag

SEQ ID NO: 89082 - RNA, 23 nt, Human
aacuaccacaacucuugagaugc

SEQ ID NO: 89083 - RNA, 22 nt, Human
aacuacuauucuuuuccaaacu

SEQ ID NO: 89084 - RNA, 22 nt, Human
aacuagaaccacuuguauuucc

SEQ ID NO: 89085 - RNA, 22 nt, Human
aacuagcagcuaagacauaauu

SEQ ID NO: 89086 - RNA, 22 nt, Human
aacuaguuuagcuuuuuaagac

SEQ ID NO: 89087 - RNA, 22 nt, Human
aacuaguuuuagcucuagcaac

SEQ ID NO: 89088 - RNA, 22 nt, Human
aacuauacucuguaaaugugcu

SEQ ID NO: 89089 - RNA, 22 nt, Human
aacuaucacaaacagagugucu

SEQ ID NO: 89090 - RNA, 21 nt, Human
aacuauggaggaaauaagucc

SEQ ID NO: 89091 - RNA, 22 nt, Human
aacuaugguauucugauguuuc

SEQ ID NO: 89092 - RNA, 22 nt, Human
aacuauguuaauaaguuucauu

SEQ ID NO: 89093 - RNA, 22 nt, Human
aacuauucuguggacucuuaua

SEQ ID NO: 89094 - RNA, 22 nt, Human
aacucacacaaguauugccugc

SEQ ID NO: 89095 - RNA, 22 nt, Human
aacucacagcuguuuggauuag

SEQ ID NO: 89096 - RNA, 22 nt, Human
aacucagaauagggugcagggc

SEQ ID NO: 89097 - RNA, 22 nt, Human
aacucagauaugauagcaggag

SEQ ID NO: 89098 - RNA, 22 nt, Human
aacucagucauaaagcgaaugc

SEQ ID NO: 89099 - RNA, 22 nt, Human
aacucaguguguuucuuaguau

SEQ ID NO: 89100 - RNA, 22 nt, Human
aacucaguuacauauuagaaua

SEQ ID NO: 89101 - RNA, 22 nt, Human
aacuccagcucacacagugacc

SEQ ID NO: 89102 - RNA, 22 nt, Human
aacuccuaugacccacugaacu

SEQ ID NO: 89103 - RNA, 22 nt, Human
aacuccuuaaugcauuucagag

SEQ ID NO: 89104 - RNA, 22 nt, Human
aacucuagugcuccuuggagga

SEQ ID NO: 89105 - RNA, 22 nt, Human
aacucugcagugacuuauaaag

SEQ ID NO: 89106 - RNA, 22 nt, Human
aacucugccagguuucaggagc

SEQ ID NO: 89107 - RNA, 22 nt, Human
aacucugcuuauaguuugucca

SEQ ID NO: 89108 - RNA, 22 nt, Human
aacucuuuggucucaggaaagg

SEQ ID NO: 89109 - RNA, 22 nt, Human
aacucuuuuuuuaaguguagcc

SEQ ID NO: 89110 - RNA, 22 nt, Human
aacugaaacuuaggaaguaauc

SEQ ID NO: 89111 - RNA, 22 nt, Human
aacugaacagaacucagagauu

SEQ ID NO: 89112 - RNA, 20 nt, Human
aacugagaguucaggaggag

SEQ ID NO: 89113 - RNA, 22 nt, Human
aacugagccccugcacuuguga

SEQ ID NO: 89114 - RNA, 22 nt, Human
aacugcaaaauaaucaaguugu

SEQ ID NO: 89115 - RNA, 22 nt, Human
aacugcaagaguaaaugucuag

SEQ ID NO: 89116 - RNA, 22 nt, Human
aacugcaaguggggcuugucau

SEQ ID NO: 89117 - RNA, 22 nt, Human
aacugcaauaacuugugcacca

SEQ ID NO: 89118 - RNA, 22 nt, Human
aacugcagagaacaucuggguu

SEQ ID NO: 89119 - RNA, 22 nt, Human
aacugcaguuacuuuugcacca

SEQ ID NO: 89120 - RNA, 22 nt, Human
aacugcauuuaacaaauacucu

SEQ ID NO: 89121 - RNA, 22 nt, Human
aacugcuaacugguuugauacu

SEQ ID NO: 89122 - RNA, 22 nt, Human
aacugcuuugugagcuuucugg

SEQ ID NO: 89123 - RNA, 22 nt, Human
aacugcuuuuugaucucaggag

SEQ ID NO: 89124 - RNA, 22 nt, Human
aacuggaauagcacaggaaaag

SEQ ID NO: 89125 - RNA, 22 nt, Human
aacuggaucaguugagggaggc

SEQ ID NO: 89126 - RNA, 22 nt, Human
aacuggauuaacuggcucaaau

SEQ ID NO: 89127 - RNA, 22 nt, Human
aacuggauuuugaugagcaguu

SEQ ID NO: 89128 - RNA, 22 nt, Human
aacugguagcugauuaaguaua

SEQ ID NO: 89129 - RNA, 21 nt, Human
aacugguucaauucaacuaga

SEQ ID NO: 89130 - RNA, 22 nt, Human
aacuguaagagaauaaaugugu

SEQ ID NO: 89131 - RNA, 22 nt, Human
aacuguaauuuuuacauaguaa

SEQ ID NO: 89132 - RNA, 22 nt, Human
aacuguagcaaagaacagcucu

SEQ ID NO: 89133 - RNA, 22 nt, Human
aacugucuugccuacucagcau

SEQ ID NO: 89134 - RNA, 22 nt, Human
aacugugggagaaggcgaugug

SEQ ID NO: 89135 - RNA, 22 nt, Human
aacugugggaugcauuaauuca

SEQ ID NO: 89136 - RNA, 22 nt, Human
aacuguguccuuagcucucacu

SEQ ID NO: 89137 - RNA, 22 nt, Human
aacuguuggaggauuauuuugc

SEQ ID NO: 89138 - RNA, 22 nt, Human
aacuguuucagaaauauuguug

SEQ ID NO: 89139 - RNA, 22 nt, Human
aacuguuuuucacgugucucau

SEQ ID NO: 89140 - RNA, 22 nt, Human
aacuguuuuuuacuagaggacu

SEQ ID NO: 89141 - RNA, 22 nt, Human
aacuuaaacccacucauguaga

SEQ ID NO: 89142 - RNA, 22 nt, Human
aacuuauugaacauucucgaau

SEQ ID NO: 89143 - RNA, 22 nt, Human
aacuucaagcuucgucccuucg

SEQ ID NO: 89144 - RNA, 22 nt, Human
aacuucagagcugugugguuug

SEQ ID NO: 89145 - RNA, 22 nt, Human
aacuucauggguucaaagcugg

SEQ ID NO: 89146 - RNA, 22 nt, Human
aacuuccaggccuugaauuauu

SEQ ID NO: 89147 - RNA, 22 nt, Human
aacuuccuucuaguucauaugu

SEQ ID NO: 89148 - RNA, 22 nt, Human
aacuucuaaucuguacaguuuu

SEQ ID NO: 89149 - RNA, 22 nt, Human
aacuucugggcuguccaaaacu

SEQ ID NO: 89150 - RNA, 22 nt, Human
aacuugaaccacagaagcugcc

SEQ ID NO: 89151 - RNA, 22 nt, Human
aacuugaauucugccauucaga

SEQ ID NO: 89152 - RNA, 22 nt, Human
aacuugcuucaacuuauuucac

SEQ ID NO: 89153 - RNA, 22 nt, Human
aacuuggcuaccagcguuaaau

SEQ ID NO: 89154 - RNA, 22 nt, Human
aacuuguaaugaaaggcaauag

SEQ ID NO: 89155 - RNA, 20 nt, Human
aacuuguucuaccuguuuca

SEQ ID NO: 89156 - RNA, 22 nt, Human
aacuuuaaagaggaggcuuggg

SEQ ID NO: 89157 - RNA, 22 nt, Human
aacugcauuagcuaacgugagu

SEQ ID NO: 89158 - RNA, 22 nt, Human
aacugcauucagaaagcucacu

SEQ ID NO: 89159 - RNA, 22 nt, Human
aacugcauuguacuaaacuugu

SEQ ID NO: 89160 - RNA, 22 nt, Human
aacugcucauuugagaguaugc

SEQ ID NO: 89161 - RNA, 22 nt, Human
aacugcuguggccuaguacuua

SEQ ID NO: 89162 - RNA, 21 nt, Human
aacugcuucccaucuuagggc

SEQ ID NO: 89163 - RNA, 22 nt, Human
aaguguuuccgggagacuuggu

SEQ ID NO: 89164 - RNA, 22 nt, Human
aaguuacacagaguuggaggcu

SEQ ID NO: 89165 - RNA, 22 nt, Human
aaguuacaguuacagaauggag

SEQ ID NO: 89166 - RNA, 22 nt, Human
aaguuagaaauaagggcucucc

SEQ ID NO: 89167 - RNA, 23 nt, Human
aaguuaguuucaauaaagcaauu

SEQ ID NO: 89168 - RNA, 22 nt, Human
aaguuauugcagcaauccaagu

SEQ ID NO: 89169 - RNA, 22 nt, Human
aaguuauuuuucaagauccuuu

SEQ ID NO: 89170 - RNA, 22 nt, Human
aaguucaagagugacauauuag

SEQ ID NO: 89171 - RNA, 22 nt, Human
aaguucaagaucaagguuccag

SEQ ID NO: 89172 - RNA, 22 nt, Human
aaguucaaggaagccuccaguu

SEQ ID NO: 89173 - RNA, 22 nt, Human
aaguucacagaagauuccaauu

SEQ ID NO: 89174 - RNA, 22 nt, Human
aaguuccugggccaaguccagg

SEQ ID NO: 89175 - RNA, 22 nt, Human
aaguuccuuagccuuagggcuu

SEQ ID NO: 89176 - RNA, 22 nt, Human
aaguucguaggugagcugcugc

SEQ ID NO: 89177 - RNA, 22 nt, Human
aaguucuaacaggaggucucuu

SEQ ID NO: 89178 - RNA, 22 nt, Human
aaguucuaaggugcauuauucu

SEQ ID NO: 89179 - RNA, 22 nt, Human
aaguucuaugaaucuacuccaa

SEQ ID NO: 89180 - RNA, 22 nt, Human
aaguucuauugucacuuuauua

SEQ ID NO: 89181 - RNA, 22 nt, Human
aaguucugggguaaugagaauu

SEQ ID NO: 89182 - RNA, 23 nt, Human
aaguucuuagguugauacuaaug

SEQ ID NO: 89183 - RNA, 23 nt, Human
aaguucuuuuagaugucuucgug

SEQ ID NO: 89184 - RNA, 22 nt, Human
aaguugauagcauguuaagcuc

SEQ ID NO: 89185 - RNA, 20 nt, Human
aaguugcagagaguugucuu

SEQ ID NO: 89186 - RNA, 21 nt, Human
aaguugucucuuuugguuccu

SEQ ID NO: 89187 - RNA, 22 nt, Human
aaguuguuguugagguggguaa

SEQ ID NO: 89188 - RNA, 22 nt, Human
aaguuuaagguggaaguggugg

SEQ ID NO: 89189 - RNA, 22 nt, Human
aaguuuaggccaaauuagauuu

SEQ ID NO: 89190 - RNA, 22 nt, Human
aaguuuaguauuagggaaaagu

SEQ ID NO: 89191 - RNA, 22 nt, Human
aaguuucaugauguaauuauug

SEQ ID NO: 89192 - RNA, 22 nt, Human
aaguuucuggaccuuaccugcu

SEQ ID NO: 89193 - RNA, 22 nt, Human
aaguuugagagccuuuaguaua

SEQ ID NO: 89194 - RNA, 20 nt, Human
aaguuugccccaggaaauug

SEQ ID NO: 89195 - RNA, 20 nt, Human
aaguuuggagucaggagacc

SEQ ID NO: 89196 - RNA, 22 nt, Human
aaguacuucuagauggauaauc

SEQ ID NO: 89197 - RNA, 22 nt, Human
aaguacuuuaggauauguaacu

SEQ ID NO: 89198 - RNA, 21 nt, Human
aaguagaagggagaaggguua

SEQ ID NO: 89199 - RNA, 23 nt, Human
aaguagauaacacuguucugaga

SEQ ID NO: 89200 - RNA, 22 nt, Human
aaguagugugcuccagcgguga

SEQ ID NO: 89201 - RNA, 22 nt, Human
aaguaguugucccugaggaacg

SEQ ID NO: 89202 - RNA, 22 nt, Human
aaguauacugaagguauccagg

SEQ ID NO: 89203 - RNA, 22 nt, Human
aaguauacuuaggcauaauggu

SEQ ID NO: 89204 - RNA, 22 nt, Human
aaguaugcaaaucgucuuagaa

SEQ ID NO: 89205 - RNA, 22 nt, Human
aaguaugugauacauguuaauu

SEQ ID NO: 89206 - RNA, 22 nt, Human
aaguauucuacaaagaaauuga

SEQ ID NO: 89207 - RNA, 22 nt, Human
aaguauucuggcagucauucag

SEQ ID NO: 89208 - RNA, 22 nt, Human
aagucaagauaaaggugcuggc

SEQ ID NO: 89209 - RNA, 22 nt, Human
aagucaaguacuacaggaaaca

SEQ ID NO: 89210 - RNA, 22 nt, Human
aagucaaucacaugcacacuga

SEQ ID NO: 89211 - RNA, 22 nt, Human
aagucacaaagugcuguacaug

SEQ ID NO: 89212 - RNA, 22 nt, Human
aagucacauucugagguauugg

SEQ ID NO: 89213 - RNA, 22 nt, Human
aagucacuggcaaaagcugcag

SEQ ID NO: 89214 - RNA, 22 nt, Human
aagucacugugaaaggugaagc

SEQ ID NO: 89215 - RNA, 22 nt, Human
aagucacuugauuguugacaga

SEQ ID NO: 89216 - RNA, 22 nt, Human
aagucagaaauuauucaggaau

SEQ ID NO: 89217 - RNA, 22 nt, Human
aagucagagaugccaaagauua

SEQ ID NO: 89218 - RNA, 22 nt, Human
aagucaugaguccucuucugug

SEQ ID NO: 89219 - RNA, 22 nt, Human
aagucauguggaagaauaaccu

SEQ ID NO: 89220 - RNA, 22 nt, Human
aaguccaagaggaaagguuucc

SEQ ID NO: 89221 - RNA, 21 nt, Human
aaguccaauaccuaaggcucc

SEQ ID NO: 89222 - RNA, 23 nt, Human
aaguccagaaggagaacugggag

SEQ ID NO: 89223 - RNA, 22 nt, Human
aaguccauagguuucaugaggg

SEQ ID NO: 89224 - RNA, 22 nt, Human
aaguccauaguuugcauuaggg

SEQ ID NO: 89225 - RNA, 22 nt, Human
aagucccuuuaaucagugccuu

SEQ ID NO: 89226 - RNA, 22 nt, Human
aaguccuaaacacacacaaggc

SEQ ID NO: 89227 - RNA, 22 nt, Human
aaguccuaauuuuaggaggaga

SEQ ID NO: 89228 - RNA, 22 nt, Human
aaguccugaaacuucuuucuga

SEQ ID NO: 89229 - RNA, 22 nt, Human
aaguccugaagacacagaaaag

SEQ ID NO: 89230 - RNA, 22 nt, Human
aaguccugggcauuugaacagg

SEQ ID NO: 89231 - RNA, 22 nt, Human
aaguccugggugagaacugucc

SEQ ID NO: 89232 - RNA, 22 nt, Human
aaguccuuauguggaggggcua

SEQ ID NO: 89233 - RNA, 22 nt, Human
aaguccuucccaagcauguacc

SEQ ID NO: 89234 - RNA, 22 nt, Human
aaguccuucuuuauaugagagu

SEQ ID NO: 89235 - RNA, 22 nt, Human
aaguccuuggagaauagaaagg

SEQ ID NO: 89236 - RNA, 22 nt, Human
aagucguggcaggcuugcacga

SEQ ID NO: 89237 - RNA, 22 nt, Human
aagucuaaguuuguaacuugga

SEQ ID NO: 89238 - RNA, 22 nt, Human
aagucucauccguguagcucca

SEQ ID NO: 89239 - RNA, 22 nt, Human
aagucucucauggcugacagca

SEQ ID NO: 89240 - RNA, 22 nt, Human
aagucucugauguguguuaggu

SEQ ID NO: 89241 - RNA, 22 nt, Human
aagucucuggcaaaugaucuug

SEQ ID NO: 89242 - RNA, 22 nt, Human
aagucucugguugcuugcaugg

SEQ ID NO: 89243 - RNA, 22 nt, Human
aagucucuuuggguacuuuauu

SEQ ID NO: 89244 - RNA, 22 nt, Human
aagucugagagaaacucucuca

SEQ ID NO: 89245 - RNA, 22 nt, Human
aagucugaucauuucuucuaua

SEQ ID NO: 89246 - RNA, 22 nt, Human
aagugaagaaauacaugagaau

SEQ ID NO: 89247 - RNA, 22 nt, Human
aagugaauagccuauuuacuag

SEQ ID NO: 89248 - RNA, 22 nt, Human
aagugaauguuugguagcagug

SEQ ID NO: 89249 - RNA, 22 nt, Human
aagugacacauggcacuucuau

SEQ ID NO: 89250 - RNA, 22 nt, Human
aagugaggccuaggcacugggu

SEQ ID NO: 89251 - RNA, 22 nt, Human
aagugagguuucugcuuucaga

SEQ ID NO: 89252 - RNA, 22 nt, Human
aagugaguggccuggagaggug

SEQ ID NO: 89253 - RNA, 22 nt, Human
aagugaguucagcauucacucg

SEQ ID NO: 89254 - RNA, 22 nt, Human
aagugauaccuaggaaaucaag

SEQ ID NO: 89255 - RNA, 22 nt, Human
aagugauacguguuuauuucca

SEQ ID NO: 89256 - RNA, 22 nt, Human
aagugauucugauguguuucuu

SEQ ID NO: 89257 - RNA, 22 nt, Human
aagugauuuguacaaaaugucg

SEQ ID NO: 89258 - RNA, 23 nt, Human
aagugcaagugaaaggcacaguu

SEQ ID NO: 89259 - RNA, 22 nt, Human
aagugcaggucucagcuacucu

SEQ ID NO: 89260 - RNA, 22 nt, Human
aagugcauacacuaguuaauug

SEQ ID NO: 89261 - RNA, 22 nt, Human
aagugcauaguaauggagucaa

SEQ ID NO: 89262 - RNA, 22 nt, Human
aagugcaucacuacucauuaca

SEQ ID NO: 89263 - RNA, 22 nt, Human
aagugcaugguauggucuccau

SEQ ID NO: 89264 - RNA, 22 nt, Human
aagugcauuagauagaaugaug

SEQ ID NO: 89265 - RNA, 22 nt, Human
aagugccaucauagcauggcug

SEQ ID NO: 89266 - RNA, 22 nt, Human
aagugccugggcaacauagcaa

SEQ ID NO: 89267 - RNA, 23 nt, Human
aagugcuaaguacuguaaucauc

SEQ ID NO: 89268 - RNA, 22 nt, Human
aagugcugaaugaagacacaaa

SEQ ID NO: 89269 - RNA, 22 nt, Human
aagugcugagacuacaggcaug

SEQ ID NO: 89270 - RNA, 22 nt, Human
aagugcuuaaaaggguggucua

SEQ ID NO: 89271 - RNA, 22 nt, Human
aagugcuuggauugcagguaug

SEQ ID NO: 89272 - RNA, 22 nt, Human
aagucagaauaauguuucuuuu

SEQ ID NO: 89273 - RNA, 22 nt, Human
aagucagacagcugagcugccu

SEQ ID NO: 89274 - RNA, 22 nt, Human
aagucagaccuuguugauagcu

SEQ ID NO: 89275 - RNA, 22 nt, Human
aagucagagaucaaggugucua

SEQ ID NO: 89276 - RNA, 22 nt, Human
aagucagagcaacugagacauu

SEQ ID NO: 89277 - RNA, 22 nt, Human
aagucagauaggugaguccaaa

SEQ ID NO: 89278 - RNA, 21 nt, Human
aagucagucaguucuauacua

SEQ ID NO: 89279 - RNA, 22 nt, Human
aagucagugaaaaggcaucauc

SEQ ID NO: 89280 - RNA, 22 nt, Human
aagucaucuugagucuaagauu

SEQ ID NO: 89281 - RNA, 22 nt, Human
aaguccagacuccuuugcgugg

SEQ ID NO: 89282 - RNA, 22 nt, Human
aaguccagcagugcuuguugau

SEQ ID NO: 89283 - RNA, 22 nt, Human
aaguccagcauuuggguagauu

SEQ ID NO: 89284 - RNA, 22 nt, Human
aaguccagcucuaaauaucuga

SEQ ID NO: 89285 - RNA, 22 nt, Human
aaguccaugaucaagauguggc

SEQ ID NO: 89286 - RNA, 22 nt, Human
aaguccauucuuccagccagcu

SEQ ID NO: 89287 - RNA, 22 nt, Human
aagucccaucugccuccaugua

SEQ ID NO: 89288 - RNA, 20 nt, Human
aagucccuaagucucuggcc

SEQ ID NO: 89289 - RNA, 22 nt, Human
aaguccugagaccagaaaaugg

SEQ ID NO: 89290 - RNA, 22 nt, Human
aaguccugccagcaaauguaua

SEQ ID NO: 89291 - RNA, 22 nt, Human
aaguccuugaagaaacaguucu

SEQ ID NO: 89292 - RNA, 22 nt, Human
aaguccuuuauccuaaaagguc

SEQ ID NO: 89293 - RNA, 22 nt, Human
aagucuaggacaggaagucuau

SEQ ID NO: 89294 - RNA, 22 nt, Human
aagucuaguauccuucuugacu

SEQ ID NO: 89295 - RNA, 22 nt, Human
aagucucuaagacugugccauc

SEQ ID NO: 89296 - RNA, 22 nt, Human
aagucucugacucacacaaugu

SEQ ID NO: 89297 - RNA, 22 nt, Human
aagucucuggugaugcaggaaa

SEQ ID NO: 89298 - RNA, 22 nt, Human
aagucucuuaguaauauccaac

SEQ ID NO: 89299 - RNA, 22 nt, Human
aagucucuuccucugccaaaga

SEQ ID NO: 89300 - RNA, 22 nt, Human
aagucucuuuaccucuccaggc

SEQ ID NO: 89301 - RNA, 22 nt, Human
aagucugacuagaaucucuccc

SEQ ID NO: 89302 - RNA, 22 nt, Human
aagucugccuaaccuucauguu

SEQ ID NO: 89303 - RNA, 22 nt, Human
aagucugggccuccuucccaga

SEQ ID NO: 89304 - RNA, 22 nt, Human
aagucuggggagaaaaggcuaa

SEQ ID NO: 89305 - RNA, 22 nt, Human
aagucuguuugagugucacacu

SEQ ID NO: 89306 - RNA, 22 nt, Human
aagucuuaaccaaauaaauguu

SEQ ID NO: 89307 - RNA, 22 nt, Human
aagucuuacauaauaguuugga

SEQ ID NO: 89308 - RNA, 22 nt, Human
aagucuuaggcauuuuauuucu

SEQ ID NO: 89309 - RNA, 22 nt, Human
aaguuuggggagaauuucauuu

SEQ ID NO: 89310 - RNA, 22 nt, Human
aaguuuguucauucauucaucc

SEQ ID NO: 89311 - RNA, 21 nt, Human
aaguuuguucuuguauagucu

SEQ ID NO: 89312 - RNA, 22 nt, Human
aaguuuguuuuagucuaaugau

SEQ ID NO: 89313 - RNA, 22 nt, Human
aaguuuuauuggaacauagcca

SEQ ID NO: 89314 - RNA, 22 nt, Human
aaguuuugaaauacugaagugu

SEQ ID NO: 89315 - RNA, 21 nt, Human
aauaaaacaguuggugucaau

SEQ ID NO: 89316 - RNA, 22 nt, Human
aauaaacaaaucuuuccugugg

SEQ ID NO: 89317 - RNA, 22 nt, Human
aauaaagacucagaggcccagg

SEQ ID NO: 89318 - RNA, 22 nt, Human
aauaaaguguauucuuugucau

SEQ ID NO: 89319 - RNA, 22 nt, Human
aauaaaugaacaaagcagguug

SEQ ID NO: 89320 - RNA, 22 nt, Human
aauaacagaaacuugagcauca

SEQ ID NO: 89321 - RNA, 22 nt, Human
aauaacuucaguucuuacauua

SEQ ID NO: 89322 - RNA, 22 nt, Human
aauaagaaagagucagcuucag

SEQ ID NO: 89323 - RNA, 22 nt, Human
aauaagacacacaacugucaag

SEQ ID NO: 89324 - RNA, 22 nt, Human
aauaagaugugcuugaguuugg

SEQ ID NO: 89325 - RNA, 19 nt, Human
aauaagcuuggguaaaacu

SEQ ID NO: 89326 - RNA, 22 nt, Human
aauaagugaguuuagcaaguuu

SEQ ID NO: 89327 - RNA, 22 nt, Human
aauaauaagauacuaagggagu

SEQ ID NO: 89328 - RNA, 22 nt, Human
aauaaucucacuuuauguggaa

SEQ ID NO: 89329 - RNA, 22 nt, Human
aauaaugagacagcuuauuuaa

SEQ ID NO: 89330 - RNA, 22 nt, Human
aauaaugucugcuauuuuaaaa

SEQ ID NO: 89331 - RNA, 22 nt, Human
aauaauguugacgauagucuua

SEQ ID NO: 89332 - RNA, 22 nt, Human
aauaauuauuugagagcagacc

SEQ ID NO: 89333 - RNA, 22 nt, Human
aauaauugucaacuaugcuaca

SEQ ID NO: 89334 - RNA, 22 nt, Human
aauacaaucaaauucacuagca

SEQ ID NO: 89335 - RNA, 22 nt, Human
aauacagaggcuuccaguaaaa

SEQ ID NO: 89336 - RNA, 22 nt, Human
aauacagaggggucacaauuca

SEQ ID NO: 89337 - RNA, 22 nt, Human
aauacaguaauuuugaugaguu

SEQ ID NO: 89338 - RNA, 22 nt, Human
aauacagucuuacuagaaaauc

SEQ ID NO: 89339 - RNA, 22 nt, Human
aauacauaauaaguuuugucug

SEQ ID NO: 89340 - RNA, 22 nt, Human
aauacauguuuucuacuauucu

SEQ ID NO: 89341 - RNA, 22 nt, Human
aauaccaugauaauuaauucau

SEQ ID NO: 89342 - RNA, 17 nt, Human
aauaccugccaauucua

SEQ ID NO: 89343 - RNA, 22 nt, Human
aauaccuuuccugccauucacu

SEQ ID NO: 89344 - RNA, 22 nt, Human
aauacgugguuacucuauagag

SEQ ID NO: 89345 - RNA, 22 nt, Human
aauacugaauuaguugagacaa

SEQ ID NO: 89346 - RNA, 22 nt, Human
aauacugagaucccacaaagca

SEQ ID NO: 89347 - RNA, 22 nt, Human
aauacugcauacaguuucucau

SEQ ID NO: 89348 - RNA, 22 nt, Human
aauacugucuuucacagauauu

SEQ ID NO: 89349 - RNA, 22 nt, Human
aauacuuaugugaccucauuuu

SEQ ID NO: 89350 - RNA, 17 nt, Human
aauacuuccaacuagug

SEQ ID NO: 89351 - RNA, 22 nt, Human
aauacuugucagaugaauaaga

SEQ ID NO: 89352 - RNA, 22 nt, Human
aauacuuuccuauauaaggugc

SEQ ID NO: 89353 - RNA, 22 nt, Human
aauacuuugccaaguucgaaga

SEQ ID NO: 89354 - RNA, 22 nt, Human
aauacuuuugaacugaaaggca

SEQ ID NO: 89355 - RNA, 22 nt, Human
aauagaauguaaucuaauacau

SEQ ID NO: 89356 - RNA, 22 nt, Human
aauagagucaguucuacauucu

SEQ ID NO: 89357 - RNA, 19 nt, Human
aauagauuaauuauccucu

SEQ ID NO: 89358 - RNA, 22 nt, Human
aauagauucaugguuaagagca

SEQ ID NO: 89359 - RNA, 22 nt, Human
aauagcaaacacugguaaaguu

SEQ ID NO: 89360 - RNA, 22 nt, Human
aauagcaguuaaaaaucagccc

SEQ ID NO: 89361 - RNA, 22 nt, Human
aauagccaaagugcauuuauga

SEQ ID NO: 89362 - RNA, 20 nt, Human
aauagcugagggcaagagua

SEQ ID NO: 89363 - RNA, 21 nt, Human
aauagcugaggucacccagcc

SEQ ID NO: 89364 - RNA, 22 nt, Human
aauagcuuaugggauagauguu

SEQ ID NO: 89365 - RNA, 22 nt, Human
aauagcuuauugacagugaauu

SEQ ID NO: 89366 - RNA, 22 nt, Human
aauagcuuucucaugacuucac

SEQ ID NO: 89367 - RNA, 22 nt, Human
aauagcuuuggucaccaucugg

SEQ ID NO: 89368 - RNA, 22 nt, Human
aauagcuuuuguaugaugaaau

SEQ ID NO: 89369 - RNA, 22 nt, Human
aauaggaagucacaucaaggga

SEQ ID NO: 89370 - RNA, 22 nt, Human
aauaggcaguuggauaugcaag

SEQ ID NO: 89371 - RNA, 22 nt, Human
aauaguccugauuuaaucuggg

SEQ ID NO: 89372 - RNA, 22 nt, Human
aauagugaacaggaacaugcuu

SEQ ID NO: 89373 - RNA, 22 nt, Human
aauagugcuuuuguacauagga

SEQ ID NO: 89374 - RNA, 22 nt, Human
aauaguuguaguaucuaucucg

SEQ ID NO: 89375 - RNA, 22 nt, Human
aauauagcauuguaugacugug

SEQ ID NO: 89376 - RNA, 22 nt, Human
aauauaguucugguauuguuaa

SEQ ID NO: 89377 - RNA, 22 nt, Human
aauaucaacaguguccuucuaa

SEQ ID NO: 89378 - RNA, 23 nt, Human
aauaucaaggugauguucccaga

SEQ ID NO: 89379 - RNA, 22 nt, Human
aauaucaucucucuuuucugca

SEQ ID NO: 89380 - RNA, 22 nt, Human
aauauccagguagaugucuucu

SEQ ID NO: 89381 - RNA, 22 nt, Human
acagacuggagcccuuuugccc

SEQ ID NO: 89382 - RNA, 22 nt, Human
acagacugggguggggaauagg

SEQ ID NO: 89383 - RNA, 22 nt, Human
acagacugucaugacacuauau

SEQ ID NO: 89384 - RNA, 22 nt, Human
acagacugucccaccacaugga

SEQ ID NO: 89385 - RNA, 22 nt, Human
acagagaaacuaaggaguuugg

SEQ ID NO: 89386 - RNA, 22 nt, Human
acagagaaagugggcugaagau

SEQ ID NO: 89387 - RNA, 22 nt, Human
acagagacaauauuuguaaagu

SEQ ID NO: 89388 - RNA, 23 nt, Human
acagagacaaugguuucaucuug

SEQ ID NO: 89389 - RNA, 22 nt, Human
acagagacacggaagcuaaaga

SEQ ID NO: 89390 - RNA, 22 nt, Human
acagagacaggcagacagucuu

SEQ ID NO: 89391 - RNA, 22 nt, Human
acagagacuaagcuuuucauca

SEQ ID NO: 89392 - RNA, 20 nt, Human
acagagacugagacacuugc

SEQ ID NO: 89393 - RNA, 22 nt, Human
acagagacugggaugccugccu

SEQ ID NO: 89394 - RNA, 22 nt, Human
acagagagggagugauaaaucc

SEQ ID NO: 89395 - RNA, 20 nt, Human
acagagauccucucuuuauc

SEQ ID NO: 89396 - RNA, 22 nt, Human
acagagcaacuuuauuucaugg

SEQ ID NO: 89397 - RNA, 22 nt, Human
acagagcacauagauuggaguu

SEQ ID NO: 89398 - RNA, 17 nt, Human
acagagcacaucaagau

SEQ ID NO: 89399 - RNA, 22 nt, Human
acagagcaguucuggagcuggc

SEQ ID NO: 89400 - RNA, 22 nt, Human
acagagcaugauggaagaucga

SEQ ID NO: 89401 - RNA, 22 nt, Human
acagagccacuuuggugccuac

SEQ ID NO: 89402 - RNA, 22 nt, Human
acagagcuaaauuucaauccca

SEQ ID NO: 89403 - RNA, 22 nt, Human
acagagcuuaggaugacuccca

SEQ ID NO: 89404 - RNA, 22 nt, Human
acagagcuucccagccugagca

SEQ ID NO: 89405 - RNA, 22 nt, Human
acagaggaaggcugagcugccc

SEQ ID NO: 89406 - RNA, 22 nt, Human
acagaggcagugugagauacug

SEQ ID NO: 89407 - RNA, 21 nt, Human
acagaggcauacagcuuaagg

SEQ ID NO: 89408 - RNA, 22 nt, Human
acagagggggccuuggagugca

SEQ ID NO: 89409 - RNA, 22 nt, Human
acagagguaggacaugagauau

SEQ ID NO: 89410 - RNA, 22 nt, Human
acagaguacagacaaaggucag

SEQ ID NO: 89411 - RNA, 22 nt, Human
acagaguagcucaagaagauug

SEQ ID NO: 89412 - RNA, 22 nt, Human
acagagucauucauuguccagu

SEQ ID NO: 89413 - RNA, 22 nt, Human
acagagucucaaaccuacaaag

SEQ ID NO: 89414 - RNA, 22 nt, Human
acagaguguuuuuaaguauauu

SEQ ID NO: 89415 - RNA, 22 nt, Human
acagaguuaaaguggaguuuaa

SEQ ID NO: 89416 - RNA, 22 nt, Human
acagaguuaauggauaggcagg

SEQ ID NO: 89417 - RNA, 22 nt, Human
acagauaaauuuauaggagugu

SEQ ID NO: 89418 - RNA, 22 nt, Human
acagauaauuuaauuaaugcau

SEQ ID NO: 89419 - RNA, 22 nt, Human
acagauacaaauauacaaauac

SEQ ID NO: 89420 - RNA, 22 nt, Human
acagauagaugauaauggcuuu

SEQ ID NO: 89421 - RNA, 22 nt, Human
acagauauaugauuguguaaau

SEQ ID NO: 89422 - RNA, 22 nt, Human
acagauauguuggguucuuguu

SEQ ID NO: 89423 - RNA, 22 nt, Human
acagauauuaugguuucuccuu

SEQ ID NO: 89424 - RNA, 22 nt, Human
acagauauuuggggaaagacgu

SEQ ID NO: 89425 - RNA, 22 nt, Human
acagaugagaagcugcauucaa

SEQ ID NO: 89426 - RNA, 22 nt, Human
acagaugagacuccaggaccuu

SEQ ID NO: 89427 - RNA, 22 nt, Human
acagaugaggaaacagggucag

SEQ ID NO: 89428 - RNA, 22 nt, Human
acagaugaggaauuuauuuggu

SEQ ID NO: 89429 - RNA, 22 nt, Human
acagaugagguguuuggagagc

SEQ ID NO: 89430 - RNA, 22 nt, Human
acagaugaugugcacagauaga

SEQ ID NO: 89431 - RNA, 22 nt, Human
acagauggagcuacuagguaaa

SEQ ID NO: 89432 - RNA, 22 nt, Human
acagauguaaucuauucacauu

SEQ ID NO: 89433 - RNA, 22 nt, Human
acagauguaccuuagugauggg

SEQ ID NO: 89434 - RNA, 22 nt, Human
acagauguggaguuugcaugau

SEQ ID NO: 89435 - RNA, 22 nt, Human
acagauguuagcaaugaugaug

SEQ ID NO: 89436 - RNA, 22 nt, Human
acagauuuauugaagcugcugc

SEQ ID NO: 89437 - RNA, 22 nt, Human
acagauuugacugguaccuggc

SEQ ID NO: 89438 - RNA, 22 nt, Human
acagauuugaucugagaacaaa

SEQ ID NO: 89439 - RNA, 22 nt, Human
acagauuuguucuuuugggcua

SEQ ID NO: 89440 - RNA, 22 nt, Human
acagauuuuaaauuuguaguug

SEQ ID NO: 89441 - RNA, 22 nt, Human
acagauuuugguauuugcaaug

SEQ ID NO: 89442 - RNA, 22 nt, Human
acagauuuuucagcuccugugu

SEQ ID NO: 89443 - RNA, 22 nt, Human
acagcaagaccccuagcauggu

SEQ ID NO: 89444 - RNA, 22 nt, Human
acagcaaucugagagacauagu

SEQ ID NO: 89445 - RNA, 22 nt, Human
acagcacaaucugagucccaga

SEQ ID NO: 89446 - RNA, 22 nt, Human
acagcacuuauucagcacagug

SEQ ID NO: 89447 - RNA, 22 nt, Human
acagcacuuggguuuuccuguu

SEQ ID NO: 89448 - RNA, 22 nt, Human
acagcagacagucggcuuccug

SEQ ID NO: 89449 - RNA, 22 nt, Human
acagcagaccacuacuaguagg

SEQ ID NO: 89450 - RNA, 22 nt, Human
acagcagagaacuuuagagggu

SEQ ID NO: 89451 - RNA, 21 nt, Human
acagcagagaucaagacuaag

SEQ ID NO: 89452 - RNA, 22 nt, Human
acagcagaggaaaagucugaua

SEQ ID NO: 89453 - RNA, 22 nt, Human
acagcagagugugagauagcca

SEQ ID NO: 89454 - RNA, 22 nt, Human
acagcagcaauagcagugacau

SEQ ID NO: 89455 - RNA, 22 nt, Human
acagcagccagccacugugagc

SEQ ID NO: 89456 - RNA, 20 nt, Human
acagcagccuugcuagaaac

SEQ ID NO: 89457 - RNA, 22 nt, Human
acagcagcgucaacuuaaaauu

SEQ ID NO: 89458 - RNA, 22 nt, Human
acagcagcuugcgugucugguc

SEQ ID NO: 89459 - RNA, 22 nt, Human
acaagcagaagguggggucuua

SEQ ID NO: 89460 - RNA, 22 nt, Human
acaagcaguaaaggccacaguc

SEQ ID NO: 89461 - RNA, 22 nt, Human
acaagcuuccaggugaugcuga

SEQ ID NO: 89462 - RNA, 22 nt, Human
acaaggaacaagcauguaguuu

SEQ ID NO: 89463 - RNA, 22 nt, Human
acaaggcuguuggucacaaacc

SEQ ID NO: 89464 - RNA, 22 nt, Human
acaaggcuuauaguugcuuuuu

SEQ ID NO: 89465 - RNA, 22 nt, Human
acaaggcuuuggaggguucuua

SEQ ID NO: 89466 - RNA, 22 nt, Human
acaagguaucaucuuggaagca

SEQ ID NO: 89467 - RNA, 22 nt, Human
acaagguauccacauuaaaugu

SEQ ID NO: 89468 - RNA, 22 nt, Human
acaaguauuuaagguuaguaua

SEQ ID NO: 89469 - RNA, 22 nt, Human
acaagugugugcaguuuguaaa

SEQ ID NO: 89470 - RNA, 22 nt, Human
acaaguguugcauuuugccauu

SEQ ID NO: 89471 - RNA, 22 nt, Human
acaaguuaccaaaaaagauuca

SEQ ID NO: 89472 - RNA, 22 nt, Human
acaaguuagguuuuaauccaaa

SEQ ID NO: 89473 - RNA, 22 nt, Human
acaaguucauggugcuuuccug

SEQ ID NO: 89474 - RNA, 22 nt, Human
acaaguuucauuguuuagaacc

SEQ ID NO: 89475 - RNA, 22 nt, Human
acaauaacuucuguuuccuugc

SEQ ID NO: 89476 - RNA, 22 nt, Human
acaauaauguauugccaaaagu

SEQ ID NO: 89477 - RNA, 22 nt, Human
acaauagaguucucauaggaca

SEQ ID NO: 89478 - RNA, 20 nt, Human
acaauagauuugagcaaagu

SEQ ID NO: 89479 - RNA, 22 nt, Human
acaauauaguccaugagcaugc

SEQ ID NO: 89480 - RNA, 22 nt, Human
acaauauuguacccagaaguuu

SEQ ID NO: 89481 - RNA, 22 nt, Human
acaaucagcacugaguuuaucu

SEQ ID NO: 89482 - RNA, 22 nt, Human
acaaucaguauuuagacccagg

SEQ ID NO: 89483 - RNA, 22 nt, Human
acaaucauuccguucacaacag

SEQ ID NO: 89484 - RNA, 22 nt, Human
acaaucauuggcuucauuacaa

SEQ ID NO: 89485 - RNA, 18 nt, Human
acaaucugaaaccuguca

SEQ ID NO: 89486 - RNA, 22 nt, Human
acaaugaacacacaaggaauuc

SEQ ID NO: 89487 - RNA, 22 nt, Human
acaaugaaccaaauuuaccaau

SEQ ID NO: 89488 - RNA, 22 nt, Human
acaaugaguuugauguaguuug

SEQ ID NO: 89489 - RNA, 22 nt, Human
acaaugcauaccuagcagcuca

SEQ ID NO: 89490 - RNA, 22 nt, Human
aauucaguugacagcuaaugcc

SEQ ID NO: 89491 - RNA, 22 nt, Human
aauucauccaugaacaauucca

SEQ ID NO: 89492 - RNA, 22 nt, Human
aauuccaaaucaacuagucuag

SEQ ID NO: 89493 - RNA, 20 nt, Human
aauuccagcaugauauuuau

SEQ ID NO: 89494 - RNA, 22 nt, Human
aauuccagcuaggaaaagcuuc

SEQ ID NO: 89495 - RNA, 22 nt, Human
aauuccaggaugcaggaggugc

SEQ ID NO: 89496 - RNA, 22 nt, Human
aauuccaggguuagcucauuug

SEQ ID NO: 89497 - RNA, 22 nt, Human
aauuccauaucugugauuauua

SEQ ID NO: 89498 - RNA, 22 nt, Human
aauucccacuauaugccaagca

SEQ ID NO: 89499 - RNA, 22 nt, Human
aauucccauuugcagaaaauca

SEQ ID NO: 89500 - RNA, 22 nt, Human
aauucuacauugguucacauuu

SEQ ID NO: 89501 - RNA, 22 nt, Human
aauucuagcccaggcaaaacua

SEQ ID NO: 89502 - RNA, 22 nt, Human
aauucuauaggcaagcuauuuu

SEQ ID NO: 89503 - RNA, 22 nt, Human
aauucugaaagauuccuuauuc

SEQ ID NO: 89504 - RNA, 22 nt, Human
aauucugaggagggaagaggaa

SEQ ID NO: 89505 - RNA, 22 nt, Human
aauucugaugagucagagaaag

SEQ ID NO: 89506 - RNA, 22 nt, Human
aauucuuaaucccauaaaguga

SEQ ID NO: 89507 - RNA, 22 nt, Human
aauugaacaaguaauagaagag

SEQ ID NO: 89508 - RNA, 20 nt, Human
aauugaagcagaggagaggc

SEQ ID NO: 89509 - RNA, 22 nt, Human
aauugagugcagccagcccagu

SEQ ID NO: 89510 - RNA, 18 nt, Human
aauugcauuuguuuccuu

SEQ ID NO: 89511 - RNA, 22 nt, Human
aauugcccauauuugagaauga

SEQ ID NO: 89512 - RNA, 22 nt, Human
aauugcccuuacaguaaucaga

SEQ ID NO: 89513 - RNA, 22 nt, Human
aauugcuaaagauuauguuuuc

SEQ ID NO: 89514 - RNA, 22 nt, Human
aauugcuuagagaauccaggua

SEQ ID NO: 89515 - RNA, 22 nt, Human
aauugcuuaguugcaacuaugc

SEQ ID NO: 89516 - RNA, 22 nt, Human
aauugcuuaugccaggugagag

SEQ ID NO: 89517 - RNA, 22 nt, Human
aauugcuucccaagggaggucu

SEQ ID NO: 89518 - RNA, 22 nt, Human
aauugcuugaugacuaguaauu

SEQ ID NO: 89519 - RNA, 22 nt, Human
aauugcuuuugggggcaguuac

SEQ ID NO: 89520 - RNA, 22 nt, Human
aauuggaaaaugcuacauauca

SEQ ID NO: 89521 - RNA, 22 nt, Human
aauuggcaagcaaguuauccag

SEQ ID NO: 89522 - RNA, 22 nt, Human
aauuggcauagcauacaauuca

SEQ ID NO: 89523 - RNA, 22 nt, Human
aauuggcuuccauuuucuguuu

SEQ ID NO: 89524 - RNA, 22 nt, Human
aauuguaacuacauugagaaca

SEQ ID NO: 89525 - RNA, 22 nt, Human
aauuguacauaaaccauuuggc

SEQ ID NO: 89526 - RNA, 22 nt, Human
aauuguacauauuuaugagcga

SEQ ID NO: 89527 - RNA, 22 nt, Human
aauugucuugaaagcaacacuu

SEQ ID NO: 89528 - RNA, 22 nt, Human
aauugucuuuaucacaguucaa

SEQ ID NO: 89529 - RNA, 22 nt, Human
aauuuaagagcauagcuccaac

SEQ ID NO: 89530 - RNA, 22 nt, Human
aauuuaaucaaguucugcucug

SEQ ID NO: 89531 - RNA, 21 nt, Human
aauuuagucaacagacugugg

SEQ ID NO: 89532 - RNA, 19 nt, Human
aauuuaguucuuguuuaga

SEQ ID NO: 89533 - RNA, 22 nt, Human
aauuuauuauauccuaggggaa

SEQ ID NO: 89534 - RNA, 22 nt, Human
aauuucaaacuaauaggaacca

SEQ ID NO: 89535 - RNA, 22 nt, Human
aauuucaaagcucacuggcaua

SEQ ID NO: 89536 - RNA, 22 nt, Human
aauuucaagucuugaagaagua

SEQ ID NO: 89537 - RNA, 22 nt, Human
aauuucacagcuggucuauggg

SEQ ID NO: 89538 - RNA, 22 nt, Human
aauuucacuguggagcacauuu

SEQ ID NO: 89539 - RNA, 22 nt, Human
aauuucagaacuaucugggagu

SEQ ID NO: 89540 - RNA, 22 nt, Human
aauuucagauauuaaagaauga

SEQ ID NO: 89541 - RNA, 22 nt, Human
aauuuccagaccccauccacag

SEQ ID NO: 89542 - RNA, 22 nt, Human
aauuucuaauugaaucucucuu

SEQ ID NO: 89543 - RNA, 22 nt, Human
aauuugaugaguuuguaagucu

SEQ ID NO: 89544 - RNA, 22 nt, Human
aauuuggagcuuuguuucuaga

SEQ ID NO: 89545 - RNA, 22 nt, Human
aauuuggggagguucagacucu

SEQ ID NO: 89546 - RNA, 22 nt, Human
aauuuggugucuuaguuucccu

SEQ ID NO: 89547 - RNA, 22 nt, Human
aauuuguacaaaauguuuauaa

SEQ ID NO: 89548 - RNA, 22 nt, Human
aauuuguauaaaaugguguuuu

SEQ ID NO: 89549 - RNA, 22 nt, Human
aauuuguguuaguccacguuca

SEQ ID NO: 89550 - RNA, 22 nt, Human
aauuuguguuauaccugcuccu

SEQ ID NO: 89551 - RNA, 22 nt, Human
aauuuguuauaacuugggcuga

SEQ ID NO: 89552 - RNA, 22 nt, Human
aauuuuaagcauaugacugguu

SEQ ID NO: 89553 - RNA, 22 nt, Human
aauuuuaucucuaagcaggcuu

SEQ ID NO: 89554 - RNA, 22 nt, Human
aauuuuauuaacuggauguagc

SEQ ID NO: 89555 - RNA, 22 nt, Human
aauuuucugccuagcaaaaacu

SEQ ID NO: 89556 - RNA, 22 nt, Human
acaaaaagggagaugagguaga

SEQ ID NO: 89557 - RNA, 21 nt, Human
acaaaagaagcugccuuuuaa

SEQ ID NO: 89558 - RNA, 22 nt, Human
acaaaagaauaagaugagucau

SEQ ID NO: 89559 - RNA, 22 nt, Human
acaaaagcacugcagaguaagc

SEQ ID NO: 89560 - RNA, 22 nt, Human
acaaaauagaguucuccccugg

SEQ ID NO: 89561 - RNA, 22 nt, Human
acaaaaucaaaggagugauuca

SEQ ID NO: 89562 - RNA, 22 nt, Human
acaaaauuaccuaguuauuuuc

SEQ ID NO: 89563 - RNA, 22 nt, Human
acaaacuaaaauucuuuauuga

SEQ ID NO: 89564 - RNA, 22 nt, Human
acaaagaaggaauuggucuuua

SEQ ID NO: 89565 - RNA, 22 nt, Human
acaaaggcagagaauucaacau

SEQ ID NO: 89566 - RNA, 22 nt, Human
acaaaggcagccaaucaucugc

SEQ ID NO: 89567 - RNA, 22 nt, Human
acaaagggggacugcagagggu

SEQ ID NO: 89568 - RNA, 22 nt, Human
acaaagguggaccauguggcuu

SEQ ID NO: 89569 - RNA, 23 nt, Human
acaaaguaauuccugcuuccaaa

SEQ ID NO: 89570 - RNA, 22 nt, Human
acaaaguagucaaaguagauga

SEQ ID NO: 89571 - RNA, 22 nt, Human
acaaagucacaauaauuaaccu

SEQ ID NO: 89572 - RNA, 22 nt, Human
acaaagucuuuuacaacaguca

SEQ ID NO: 89573 - RNA, 22 nt, Human
acaaagugaaaagcaucgaauu

SEQ ID NO: 89574 - RNA, 22 nt, Human
acaaagugaauugcaucgaguu

SEQ ID NO: 89575 - RNA, 22 nt, Human
acaaaguguuuucugaaggccu

SEQ ID NO: 89576 - RNA, 22 nt, Human
acagcagcuugucuguucuuua

SEQ ID NO: 89577 - RNA, 22 nt, Human
acagcaggcccauacuggaagg

SEQ ID NO: 89578 - RNA, 17 nt, Human
acagcagggaaguguug

SEQ ID NO: 89579 - RNA, 22 nt, Human
acagcagggggagcuguuggac

SEQ ID NO: 89580 - RNA, 22 nt, Human
acagcagggguggaauaaacgu

SEQ ID NO: 89581 - RNA, 19 nt, Human
acagcagguguggggauaa

SEQ ID NO: 89582 - RNA, 22 nt, Human
acagcagugcacagagaacccu

SEQ ID NO: 89583 - RNA, 22 nt, Human
acagcaguggugcacugagcca

SEQ ID NO: 89584 - RNA, 22 nt, Human
acagcauaaucacuucuuucuu

SEQ ID NO: 89585 - RNA, 22 nt, Human
acagcaucccugaagauaacca

SEQ ID NO: 89586 - RNA, 22 nt, Human
acagcaugagagaugaacauuc

SEQ ID NO: 89587 - RNA, 22 nt, Human
acagcauugcuccaucucaaga

SEQ ID NO: 89588 - RNA, 22 nt, Human
acagcauuuaaagaaaaugaac

SEQ ID NO: 89589 - RNA, 22 nt, Human
acagccaagucuucuauuucag

SEQ ID NO: 89590 - RNA, 22 nt, Human
acagccagaggugguccugggu

SEQ ID NO: 89591 - RNA, 22 nt, Human
acagccagaucugagagaucuu

SEQ ID NO: 89592 - RNA, 21 nt, Human
acagccaggaacaugaggggc

SEQ ID NO: 89593 - RNA, 22 nt, Human
acagccaggaggaacucaguga

SEQ ID NO: 89594 - RNA, 22 nt, Human
acagccaggcccagcacgcagg

SEQ ID NO: 89595 - RNA, 22 nt, Human
acagccagguaaaggcauggca

SEQ ID NO: 89596 - RNA, 22 nt, Human
acagccaguccucccacagggu

SEQ ID NO: 89597 - RNA, 22 nt, Human
acagccagugacuggacaagcu

SEQ ID NO: 89598 - RNA, 22 nt, Human
acagcccagcucuuucucugca

SEQ ID NO: 89599 - RNA, 22 nt, Human
ugucacauccauuuugcaagua

SEQ ID NO: 89600 - RNA, 22 nt, Human
ugucacaugacacaaauaucua

SEQ ID NO: 89601 - RNA, 22 nt, Human
ugucacauugaauaugauuuau

SEQ ID NO: 89602 - RNA, 22 nt, Human
ugucaccaccggaagaaacugc

SEQ ID NO: 89603 - RNA, 22 nt, Human
ugucaccagcugcuccucagga

SEQ ID NO: 89604 - RNA, 22 nt, Human
ugucaccaugccagcuucugcc

SEQ ID NO: 89605 - RNA, 22 nt, Human
ugucaccuggaaaucacucuaa

SEQ ID NO: 89606 - RNA, 22 nt, Human
ugucaccuugcagggcuggggc

SEQ ID NO: 89607 - RNA, 22 nt, Human
ugucacuuugccuucuggacuu

SEQ ID NO: 89608 - RNA, 22 nt, Human
ugucagaggcucagggucucag

SEQ ID NO: 89609 - RNA, 20 nt, Human
ugucagcaauuaggagaaaa

SEQ ID NO: 89610 - RNA, 22 nt, Human
ugucagcaauucuggcuuacuc

SEQ ID NO: 89611 - RNA, 22 nt, Human
ugucagcacaucuguaaucaca

SEQ ID NO: 89612 - RNA, 22 nt, Human
ugucagcaccauggguagugau

SEQ ID NO: 89613 - RNA, 22 nt, Human
ugucagcagaaaucuggucugc

SEQ ID NO: 89614 - RNA, 22 nt, Human
ugucagcaggacauuaaaagcu

SEQ ID NO: 89615 - RNA, 21 nt, Human
ugucagcucccuguccugugu

SEQ ID NO: 89616 - RNA, 22 nt, Human
ugucagcuggagauggcauggg

SEQ ID NO: 89617 - RNA, 22 nt, Human
ugucagggcaugcgguccagcc

SEQ ID NO: 89618 - RNA, 22 nt, Human
ugucagggcuggacacagcugc

SEQ ID NO: 89619 - RNA, 22 nt, Human
ugucaggucuaaaaugggucuc

SEQ ID NO: 89620 - RNA, 22 nt, Human
ugucaggugacacacuaggagc

SEQ ID NO: 89621 - RNA, 22 nt, Human
ugucagugaaaaauugugauag

SEQ ID NO: 89622 - RNA, 22 nt, Human
ugucagugaguuggguccugag

SEQ ID NO: 89623 - RNA, 19 nt, Human
ugucagugauacaugcuuu

SEQ ID NO: 89624 - RNA, 20 nt, Human
ugucagugccugaggcacag

SEQ ID NO: 89625 - RNA, 22 nt, Human
ugucaguggaccuggagaggcc

SEQ ID NO: 89626 - RNA, 22 nt, Human
ugucaguggucauaguagaaaa

SEQ ID NO: 89627 - RNA, 22 nt, Human
ugucaguguaacucuuauagca

SEQ ID NO: 89628 - RNA, 22 nt, Human
ugucagugucuaugaagaauuu

SEQ ID NO: 89629 - RNA, 22 nt, Human
ugucagugugcaccgggaggcc

SEQ ID NO: 89630 - RNA, 21 nt, Human
ugucaguucauguauaggcca

SEQ ID NO: 89631 - RNA, 22 nt, Human
ugucaguuuaguugaagaaaga

SEQ ID NO: 89632 - RNA, 22 nt, Human
ugucauaaguguuugcacccag

SEQ ID NO: 89633 - RNA, 22 nt, Human
ugucauauagauauuagacagg

SEQ ID NO: 89634 - RNA, 21 nt, Human
ugucauauuucaauacaguuu

SEQ ID NO: 89635 - RNA, 22 nt, Human
ugucaucauuugagagaagaaa

SEQ ID NO: 89636 - RNA, 22 nt, Human
ugucaucuacccguuaggcuuu

SEQ ID NO: 89637 - RNA, 22 nt, Human
ugucaucucacugauauagaug

SEQ ID NO: 89638 - RNA, 22 nt, Human
ugucaucucuugcaggaagccu

SEQ ID NO: 89639 - RNA, 22 nt, Human
ugucaucugauauuacuuauag

SEQ ID NO: 89640 - RNA, 18 nt, Human
ugucaucuguuuaaaacc

SEQ ID NO: 89641 - RNA, 22 nt, Human
ugucaucuucacugggucacaa

SEQ ID NO: 89642 - RNA, 22 nt, Human
ugucaucuuuuuaaagaagaga

SEQ ID NO: 89643 - RNA, 22 nt, Human
ugucaugaugugcacaccacag

SEQ ID NO: 89644 - RNA, 22 nt, Human
ugucauggacagauuagaugag

SEQ ID NO: 89645 - RNA, 22 nt, Human
ugucauggaggccuccccuaaa

SEQ ID NO: 89646 - RNA, 22 nt, Human
ugucauggcacugguaggagug

SEQ ID NO: 89647 - RNA, 22 nt, Human
ugucauggcguuguggggacua

SEQ ID NO: 89648 - RNA, 22 nt, Human
ugucaugggucuaaacauugau

SEQ ID NO: 89649 - RNA, 22 nt, Human
ugucauggucuguaaggagccc

SEQ ID NO: 89650 - RNA, 22 nt, Human
ugucauggugcuauuuaauuag

SEQ ID NO: 89651 - RNA, 22 nt, Human
ugucauguauaagacacugugu

SEQ ID NO: 89652 - RNA, 22 nt, Human
ugucauguggcaauuaaagcag

SEQ ID NO: 89653 - RNA, 22 nt, Human
ugucauuaaaaugcuucucaaa

SEQ ID NO: 89654 - RNA, 22 nt, Human
ugucauucauuuaaguauguuu

SEQ ID NO: 89655 - RNA, 22 nt, Human
ugucauuccuucaauguagaua

SEQ ID NO: 89656 - RNA, 18 nt, Human
ugucauugccagggaagc

SEQ ID NO: 89657 - RNA, 22 nt, Human
ugucauuuaaagcuuuccagau

SEQ ID NO: 89658 - RNA, 22 nt, Human
ugucauuuacuccauacccuca

SEQ ID NO: 89659 - RNA, 22 nt, Human
ugucauuuauuuugcugucugu

SEQ ID NO: 89660 - RNA, 22 nt, Human
ugucauuuuagugcaucacuca

SEQ ID NO: 89661 - RNA, 22 nt, Human
uguccaagaacagacugccagg

SEQ ID NO: 89662 - RNA, 22 nt, Human
uguccaccgguccugugauggg

SEQ ID NO: 89663 - RNA, 22 nt, Human
uguccagaucaaugcccacaug

SEQ ID NO: 89664 - RNA, 22 nt, Human
uguccagcggccuggcugcuga

SEQ ID NO: 89665 - RNA, 22 nt, Human
uguccaggacccuauucucacu

SEQ ID NO: 89666 - RNA, 22 nt, Human
uguccaggaguaaaaagaccug

SEQ ID NO: 89667 - RNA, 22 nt, Human
uuacaguuucuaguaauacuug

SEQ ID NO: 89668 - RNA, 22 nt, Human
uuacauaacgguaugaaaaaug

SEQ ID NO: 89669 - RNA, 22 nt, Human
uuacauaacuuuaaaaugccgu

SEQ ID NO: 89670 - RNA, 22 nt, Human
uuacauagguauguuugcuuug

SEQ ID NO: 89671 - RNA, 22 nt, Human
uuacauaguuaaauaguacagc

SEQ ID NO: 89672 - RNA, 22 nt, Human
uuacauauugucuauuguucaa

SEQ ID NO: 89673 - RNA, 22 nt, Human
uuacaucagaaggaaacagcgu

SEQ ID NO: 89674 - RNA, 22 nt, Human
uuacaucauguaacuggauaua

SEQ ID NO: 89675 - RNA, 17 nt, Human
uuacauccuucugaauu

SEQ ID NO: 89676 - RNA, 22 nt, Human
uuacaugacaaagcuuuggcuc

SEQ ID NO: 89677 - RNA, 22 nt, Human
uuacaugacucaauagaagggc

SEQ ID NO: 89678 - RNA, 22 nt, Human
uuacaugacugcccuugucagg

SEQ ID NO: 89679 - RNA, 22 nt, Human
uuacauggauguaaaaaaguua

SEQ ID NO: 89680 - RNA, 22 nt, Human
uuacaugguuguuggaaaugcu

SEQ ID NO: 89681 - RNA, 22 nt, Human
uuacauguacaaacaauucuua

SEQ ID NO: 89682 - RNA, 22 nt, Human
uuacauguauuuuggaaaaagu

SEQ ID NO: 89683 - RNA, 22 nt, Human
uuacauguucucauacacagag

SEQ ID NO: 89684 - RNA, 22 nt, Human
uuacauuagacccacuuucaug

SEQ ID NO: 89685 - RNA, 22 nt, Human
uuacauuaggucaagcugccaa

SEQ ID NO: 89686 - RNA, 21 nt, Human
uuacauucagaggaguggaag

SEQ ID NO: 89687 - RNA, 22 nt, Human
uuacauuuugcacagauguccc

SEQ ID NO: 89688 - RNA, 22 nt, Human
uuaccaaaucccgugcacauuc

SEQ ID NO: 89689 - RNA, 22 nt, Human
uuaccaaaugaaauagagauuu

SEQ ID NO: 89690 - RNA, 21 nt, Human
uuaccaauggcuucucuuucc

SEQ ID NO: 89691 - RNA, 22 nt, Human
uuaccacagugccugucuaaug

SEQ ID NO: 89692 - RNA, 22 nt, Human
uuaccaccuguaucacauuuuu

SEQ ID NO: 89693 - RNA, 22 nt, Human
uuaccauagaaacuuccuuuuu

SEQ ID NO: 89694 - RNA, 22 nt, Human
uuacccagagcacuugagcuuu

SEQ ID NO: 89695 - RNA, 22 nt, Human
uuaccuguuuuacaugcacaac

SEQ ID NO: 89696 - RNA, 22 nt, Human
uuaccuuguaaaacauauuccu

SEQ ID NO: 89697 - RNA, 22 nt, Human
uuaccuuuuaggcaagcaucuu

SEQ ID NO: 89698 - RNA, 22 nt, Human
uuacgaucauuucuaaaauaaa

SEQ ID NO: 89699 - RNA, 22 nt, Human
uuacgcagcugcuccaggaagc

SEQ ID NO: 89700 - RNA, 21 nt, Human
uuacuaaacaaaacaugcagg

SEQ ID NO: 89701 - RNA, 22 nt, Human
uuacuacaagauucuguuuuau

SEQ ID NO: 89702 - RNA, 22 nt, Human
uuacuacauuguaacacaguac

SEQ ID NO: 89703 - RNA, 22 nt, Human
uuacuacugcuuuacuacuggg

SEQ ID NO: 89704 - RNA, 22 nt, Human
uuacuauaguccagcccuuuuu

SEQ ID NO: 89705 - RNA, 20 nt, Human
uuacucaguuccugccaugc

SEQ ID NO: 89706 - RNA, 22 nt, Human
uuacucugaauguuucuacuga

SEQ ID NO: 89707 - RNA, 22 nt, Human
uuacugaaaauucuucaggauu

SEQ ID NO: 89708 - RNA, 22 nt, Human
uuacugaagguggauagugagu

SEQ ID NO: 89709 - RNA, 22 nt, Human
uuacugaggagcauaucugagu

SEQ ID NO: 89710 - RNA, 22 nt, Human
uuacugauacacauaagaauuu

SEQ ID NO: 89711 - RNA, 22 nt, Human
uuacugauggaacagagauaga

SEQ ID NO: 89712 - RNA, 22 nt, Human
uuacugaugguggagcugguau

SEQ ID NO: 89713 - RNA, 22 nt, Human
uuacugauuuuugggcccuacc

SEQ ID NO: 89714 - RNA, 22 nt, Human
uuacugcuaauucuguagguuu

SEQ ID NO: 89715 - RNA, 22 nt, Human
uuacuguagcuugacauauguc

SEQ ID NO: 89716 - RNA, 22 nt, Human
uuacuguguuuggcuuuagaug

SEQ ID NO: 89717 - RNA, 18 nt, Human
uuacuguuaucaaaacag

SEQ ID NO: 89718 - RNA, 22 nt, Human
uuacuuaaacagaaaugcagaa

SEQ ID NO: 89719 - RNA, 22 nt, Human
uuacuucuuuggccuucagcca

SEQ ID NO: 89720 - RNA, 22 nt, Human
uuacuugaaaugugauaagaga

SEQ ID NO: 89721 - RNA, 22 nt, Human
uuacuugauagggggauggggu

SEQ ID NO: 89722 - RNA, 22 nt, Human
uuacuugauguaugaugaguag

SEQ ID NO: 89723 - RNA, 20 nt, Human
uuacuugucucagcauggag

SEQ ID NO: 89724 - RNA, 22 nt, Human
uuacuuuagaucauacugugug

SEQ ID NO: 89725 - RNA, 22 nt, Human
uuacuuuauagaacacuggggg

SEQ ID NO: 89726 - RNA, 22 nt, Human
uuacuuuaucuccuagauucca

SEQ ID NO: 89727 - RNA, 22 nt, Human
uuacuuuccagcucuagcuuca

SEQ ID NO: 89728 - RNA, 18 nt, Human
uuacuuuguauagccuag

SEQ ID NO: 89729 - RNA, 22 nt, Human
uuacuuuguuugcacuucaccu

SEQ ID NO: 89730 - RNA, 22 nt, Human
uuacuuuugcaccaaacuaaua

SEQ ID NO: 89731 - RNA, 22 nt, Human
uuagaaacucaacucugggaau

SEQ ID NO: 89732 - RNA, 22 nt, Human
uuagaaagaacuuuagauauca

SEQ ID NO: 89733 - RNA, 21 nt, Human
uuagaaagcucacuacaguua

SEQ ID NO: 89734 - RNA, 22 nt, Human
uuagaaaggggugaaucaaugg

SEQ ID NO: 89735 - RNA, 22 nt, Human
uuagaaaucaccucugaagauc

SEQ ID NO: 89736 - RNA, 22 nt, Human
uuagaaaugauuucaccucuuu

SEQ ID NO: 89737 - RNA, 22 nt, Human
uuagaaaugcacccaagaccua

SEQ ID NO: 89738 - RNA, 22 nt, Human
uuagaaccagcauuuguccugg

SEQ ID NO: 89739 - RNA, 22 nt, Human
uuagaaccaggaacucuaauau

SEQ ID NO: 89740 - RNA, 22 nt, Human
uuagaacugaagaagauuaagg

SEQ ID NO: 89741 - RNA, 22 nt, Human
uuagaacuuuucaacuccauuc

SEQ ID NO: 89742 - RNA, 19 nt, Human
uuagaagccauagguacag

SEQ ID NO: 89743 - RNA, 22 nt, Human
uuagaagugggccuauaguccu

SEQ ID NO: 89744 - RNA, 22 nt, Human
uuagaaucuaacauucuuaucu

SEQ ID NO: 89745 - RNA, 22 nt, Human
uuagaaucuuguaucagaaguu

SEQ ID NO: 89746 - RNA, 22 nt, Human
uuauuugccagaauuucucuug

SEQ ID NO: 89747 - RNA, 22 nt, Human
uuauuugguuauuguaauuggg

SEQ ID NO: 89748 - RNA, 22 nt, Human
uuauuuuaccuuccucugagcu

SEQ ID NO: 89749 - RNA, 22 nt, Human
uuauuuucuccucagaaagugg

SEQ ID NO: 89750 - RNA, 22 nt, Human
uuauuuuguagcucugaucuuu

SEQ ID NO: 89751 - RNA, 17 nt, Human
uuauuuuuugggcugag

SEQ ID NO: 89752 - RNA, 22 nt, Human
uucaaaaagguauguucaaguc

SEQ ID NO: 89753 - RNA, 23 nt, Human
uucaaaacuggaaaaucagaugc

SEQ ID NO: 89754 - RNA, 22 nt, Human
uucaaaauuguucuaagcucug

SEQ ID NO: 89755 - RNA, 22 nt, Human
uucaaacaaaacuguucccaua

SEQ ID NO: 89756 - RNA, 22 nt, Human
uucaaacagaugacucugcucu

SEQ ID NO: 89757 - RNA, 22 nt, Human
uucaaacauucaaauaaaccgg

SEQ ID NO: 89758 - RNA, 22 nt, Human
uucaaaccuaucuaagaaauag

SEQ ID NO: 89759 - RNA, 22 nt, Human
uucaaacuaugacuucagcuac

SEQ ID NO: 89760 - RNA, 22 nt, Human
uucaaacugaggagaggauggc

SEQ ID NO: 89761 - RNA, 22 nt, Human
uucaaacuuaaggagcagcaga

SEQ ID NO: 89762 - RNA, 20 nt, Human
uucaaagacccucaggucca

SEQ ID NO: 89763 - RNA, 22 nt, Human
uucaaagauaauguagcauuuu

SEQ ID NO: 89764 - RNA, 22 nt, Human
uucaaagcagagggucaauaca

SEQ ID NO: 89765 - RNA, 22 nt, Human
uucaaaggaaaggcagugucaa

SEQ ID NO: 89766 - RNA, 22 nt, Human
uucaaaggcaggauagcagcug

SEQ ID NO: 89767 - RNA, 22 nt, Human
uucaaagucagccaucuggcua

SEQ ID NO: 89768 - RNA, 22 nt, Human
uucaaaguccugucagguagcc

SEQ ID NO: 89769 - RNA, 22 nt, Human
uucaaagugcuuuuaaccuuua

SEQ ID NO: 89770 - RNA, 22 nt, Human
uucaaagugugaccugacaagc

SEQ ID NO: 89771 - RNA, 21 nt, Human
uucaaaguuugccuaaagauu

SEQ ID NO: 89772 - RNA, 22 nt, Human
uucaaauccuagcccuguggcc

SEQ ID NO: 89773 - RNA, 22 nt, Human
uucaaaugcaaguuacuacuuu

SEQ ID NO: 89774 - RNA, 22 nt, Human
uucaaauuaccacauuugcuua

SEQ ID NO: 89775 - RNA, 22 nt, Human
uucaaauuugguaugcaagcca

SEQ ID NO: 89776 - RNA, 22 nt, Human
uugauacauagcacaguuuagg

SEQ ID NO: 89777 - RNA, 22 nt, Human
uugauacaugcucuagaguuga

SEQ ID NO: 89778 - RNA, 22 nt, Human
uugauacccaaguguuaugggu

SEQ ID NO: 89779 - RNA, 22 nt, Human
uugauagguuuuauguauaguu

SEQ ID NO: 89780 - RNA, 22 nt, Human
uugauauuuugcacgcuuggua

SEQ ID NO: 89781 - RNA, 22 nt, Human
uugaucagguugcuguggugua

SEQ ID NO: 89782 - RNA, 22 nt, Human
uugaucuugugauaguucaacu

SEQ ID NO: 89783 - RNA, 22 nt, Human
uugaucuuuauaauaguuuuga

SEQ ID NO: 89784 - RNA, 22 nt, Human
uugaugaugcacauuuauaauu

SEQ ID NO: 89785 - RNA, 22 nt, Human
uugaugauguuucugccuugcc

SEQ ID NO: 89786 - RNA, 22 nt, Human
uugauggacagggaccacuguc

SEQ ID NO: 89787 - RNA, 22 nt, Human
uugauguagaaccaagaucuuu

SEQ ID NO: 89788 - RNA, 22 nt, Human
uugauucaaaggggacaagugg

SEQ ID NO: 89789 - RNA, 20 nt, Human
uugauucaagggcugaugga

SEQ ID NO: 89790 - RNA, 22 nt, Human
uugauucagaaaaagauggaga

SEQ ID NO: 89791 - RNA, 22 nt, Human
uugauucauuuauugagugccu

SEQ ID NO: 89792 - RNA, 22 nt, Human
uugauucuggugacugauggaa

SEQ ID NO: 89793 - RNA, 23 nt, Human
uugauuuagcugggauugcaugc

SEQ ID NO: 89794 - RNA, 22 nt, Human
uugauuuauagaauguucaagc

SEQ ID NO: 89795 - RNA, 22 nt, Human
uugauuucaaaauauaugcuug

SEQ ID NO: 89796 - RNA, 23 nt, Human
uugauuucaaaugcagagaacac

SEQ ID NO: 89797 - RNA, 22 nt, Human
uugauuugauugaugaacuaag

SEQ ID NO: 89798 - RNA, 22 nt, Human
uugauuugggaauggucuggca

SEQ ID NO: 89799 - RNA, 22 nt, Human
uugauuuguaggaauggagacc

SEQ ID NO: 89800 - RNA, 21 nt, Human
uugauuuuaggaaguuuguca

SEQ ID NO: 89801 - RNA, 22 nt, Human
uugauuuucaauucauugacaa

SEQ ID NO: 89802 - RNA, 22 nt, Human
uugcaaaaccauccuaaguaaa

SEQ ID NO: 89803 - RNA, 22 nt, Human
uugcaaagacuggcuuaacagu

SEQ ID NO: 89804 - RNA, 22 nt, Human
uugcaaaggggaauaaagcaau

SEQ ID NO: 89805 - RNA, 22 nt, Human
uugcaaauaauagccugaaacu

SEQ ID NO: 89806 - RNA, 22 nt, Human
uugcaaaucucuuguguuuggu

SEQ ID NO: 89807 - RNA, 22 nt, Human
uugcaaaugugaguuuagacug

SEQ ID NO: 89808 - RNA, 22 nt, Human
uugcaacaucugaacauuuauc

SEQ ID NO: 89809 - RNA, 22 nt, Human
uugcaagaaauaaucgaauaga

SEQ ID NO: 89810 - RNA, 22 nt, Human
uugcaagauguuaccauuguua

SEQ ID NO: 89811 - RNA, 22 nt, Human
uugcaaggguguuuugaggugu

SEQ ID NO: 89812 - RNA, 22 nt, Human
uugcaaguuccuuaugagaauc

SEQ ID NO: 89813 - RNA, 22 nt, Human
uugcaauuaacauaugucaacu

SEQ ID NO: 89814 - RNA, 22 nt, Human
uugcaauugcuauggagagcgu

SEQ ID NO: 89815 - RNA, 22 nt, Human
uugcacagaaugacaauaugua

SEQ ID NO: 89816 - RNA, 22 nt, Human
uugcacagugguuuagagccug

SEQ ID NO: 89817 - RNA, 23 nt, Human
uugcacaguguauacacauauuu

SEQ ID NO: 89818 - RNA, 22 nt, Human
uugcacaguuugaagaugacuc

SEQ ID NO: 89819 - RNA, 22 nt, Human
uugcacauguugguucuugaaa

SEQ ID NO: 89820 - RNA, 22 nt, Human
uugcaccaaaugaguuaaaauu

SEQ ID NO: 89821 - RNA, 21 nt, Human
uugcaccaugauaaauucaga

SEQ ID NO: 89822 - RNA, 22 nt, Human
uugcaccauuucacuuccauua

SEQ ID NO: 89823 - RNA, 22 nt, Human
uugcaccccuugauugagccuu

SEQ ID NO: 89824 - RNA, 22 nt, Human
uugcacuagacacauuucaagu

SEQ ID NO: 89825 - RNA, 22 nt, Human
uugcacucaccacauuucaggu

SEQ ID NO: 89826 - RNA, 22 nt, Human
uugcacuccagcccgagcaaca

SEQ ID NO: 89827 - RNA, 22 nt, Human
uugcacuuuauagaaacuuuug

SEQ ID NO: 89828 - RNA, 22 nt, Human
uugcagaacuuaaagacagagu

SEQ ID NO: 89829 - RNA, 22 nt, Human
uugcagaagccuguuguuccug

SEQ ID NO: 89830 - RNA, 22 nt, Human
uugcagacuuacuucgagaaau

SEQ ID NO: 89831 - RNA, 22 nt, Human
uugcagagagguuaggaacuca

SEQ ID NO: 89832 - RNA, 22 nt, Human
uugcagagccaugaggcuggcu

SEQ ID NO: 89833 - RNA, 22 nt, Human
uugcagagugguugugaggauu

SEQ ID NO: 89834 - RNA, 22 nt, Human
uugcagcuccauuuuaauggcu

SEQ ID NO: 89835 - RNA, 22 nt, Human
uugcagcucucugaagguugca

SEQ ID NO: 89836 - RNA, 22 nt, Human
uugcagcugcaguaaauguuca

SEQ ID NO: 89837 - RNA, 22 nt, Human
uugcagcuggugguggccgugu

SEQ ID NO: 89838 - RNA, 22 nt, Human
uugcagcuuagugauguuaucu

SEQ ID NO: 89839 - RNA, 22 nt, Human
uugcagcuucuaccacuguuuc

SEQ ID NO: 89840 - RNA, 22 nt, Human
uugcaggacaaugauggucccu

SEQ ID NO: 89841 - RNA, 22 nt, Human
uugcagggauaaaacaagugaa

SEQ ID NO: 89842 - RNA, 23 nt, Human
uugcagggauggaguucaaaaug

SEQ ID NO: 89843 - RNA, 22 nt, Human
uugcagggcaggaccauggaca

SEQ ID NO: 89844 - RNA, 22 nt, Human
uugcagggcuggaacauggaau

SEQ ID NO: 89845 - RNA, 22 nt, Human
uugcaggggaaggagcagagcu

SEQ ID NO: 89846 - RNA, 22 nt, Human
uugcaggggagaggaacaaaca

SEQ ID NO: 89847 - RNA, 22 nt, Human
uugcaggguccuguggcucucc

SEQ ID NO: 89848 - RNA, 22 nt, Human
uugcagucacacucuaaaguag

SEQ ID NO: 89849 - RNA, 22 nt, Human
uugcaguuaaaaaucauuaguu

SEQ ID NO: 89850 - RNA, 22 nt, Human
uugcaguuguugccuucccuga

SEQ ID NO: 89851 - RNA, 22 nt, Human
uugcaguuguuuagaauaugug

SEQ ID NO: 89852 - RNA, 22 nt, Human
uugcaguuucuggaugccuucu

SEQ ID NO: 89853 - RNA, 22 nt, Human
uugcaguuugcuuuuaauggga

SEQ ID NO: 89854 - RNA, 22 nt, Human
uugcauaaaugcuuaaaauuug

SEQ ID NO: 89855 - RNA, 22 nt, Human
uugcauaacagccauuaaagua

SEQ ID NO: 89856 - RNA, 23 nt, Human
uugcauagacauccucauagauu

SEQ ID NO: 89857 - RNA, 22 nt, Human
uugcauauccuccaacacaugg

SEQ ID NO: 89858 - RNA, 22 nt, Human
uugcaucagaaaauaugggaag

SEQ ID NO: 89859 - RNA, 22 nt, Human
uugcaucagcaggcauaauugg

SEQ ID NO: 89860 - RNA, 23 nt, Human
uugcauccugacgucuauuuucu

SEQ ID NO: 89861 - RNA, 22 nt, Human
uucagaaugauuacauucuggu

SEQ ID NO: 89862 - RNA, 22 nt, Human
uucagacaaauuugaggaagcu

SEQ ID NO: 89863 - RNA, 19 nt, Human
uucagacagacuagguaua

SEQ ID NO: 89864 - RNA, 22 nt, Human
uucagacaguaagaaagagguu

SEQ ID NO: 89865 - RNA, 23 nt, Human
uucagacugccuucagcauuguc

SEQ ID NO: 89866 - RNA, 22 nt, Human
uucagagagaccaaguggcgug

SEQ ID NO: 89867 - RNA, 22 nt, Human
uucagagaguccaguaugcagu

SEQ ID NO: 89868 - RNA, 20 nt, Human
uucagagauagggucuuuaa

SEQ ID NO: 89869 - RNA, 22 nt, Human
uucagagaugacaccugguguu

SEQ ID NO: 89870 - RNA, 22 nt, Human
uucagagcaucucuaaagccag

SEQ ID NO: 89871 - RNA, 22 nt, Human
uucagagccacuucaagucuaa

SEQ ID NO: 89872 - RNA, 22 nt, Human
uucagagcccaaauggagauua

SEQ ID NO: 89873 - RNA, 22 nt, Human
uucagagcuggugucuacagcu

SEQ ID NO: 89874 - RNA, 22 nt, Human
uucagagcuuagaauggacuac

SEQ ID NO: 89875 - RNA, 22 nt, Human
uucagagggcuugcuauguaca

SEQ ID NO: 89876 - RNA, 22 nt, Human
uucagaggguuuuagggucaga

SEQ ID NO: 89877 - RNA, 22 nt, Human
uucagagguaagggucucagaa

SEQ ID NO: 89878 - RNA, 22 nt, Human
uucagaguacacagagaucuuc

SEQ ID NO: 89879 - RNA, 20 nt, Human
uucagagucagcaaaugcag

SEQ ID NO: 89880 - RNA, 22 nt, Human
uucagagucagggaucucagag

SEQ ID NO: 89881 - RNA, 18 nt, Human
uucagagucuggugagga

SEQ ID NO: 89882 - RNA, 22 nt, Human
uucagagugguaugaagugaug

SEQ ID NO: 89883 - RNA, 22 nt, Human
uucagauaaacuacaaauaauu

SEQ ID NO: 89884 - RNA, 22 nt, Human
uucagauaucauuaauuuagua

SEQ ID NO: 89885 - RNA, 23 nt, Human
uuggaauauauuguuugacauag

SEQ ID NO: 89886 - RNA, 20 nt, Human
uuggaaucaccuggagaggu

SEQ ID NO: 89887 - RNA, 22 nt, Human
uuggaauccugccucugcuacu

SEQ ID NO: 89888 - RNA, 21 nt, Human
uuggaaucucuucaucucugc

SEQ ID NO: 89889 - RNA, 22 nt, Human
uuggaaucugcaauuuaacaaa

SEQ ID NO: 89890 - RNA, 22 nt, Human
uuggaauuaauauuuguauaca

SEQ ID NO: 89891 - RNA, 22 nt, Human
uuggaauucaaguuguagcuua

SEQ ID NO: 89892 - RNA, 21 nt, Human
uuggaauuugggagcuaugug

SEQ ID NO: 89893 - RNA, 22 nt, Human
uuggaauuuuccagguacagug

SEQ ID NO: 89894 - RNA, 22 nt, Human
uuggacaguaaauugugcuuaa

SEQ ID NO: 89895 - RNA, 22 nt, Human
uuggaccaauuccugauauuuu

SEQ ID NO: 89896 - RNA, 22 nt, Human
uuggaccauugaccugaucuac

SEQ ID NO: 89897 - RNA, 22 nt, Human
uuggacuccucuuuccucuugg

SEQ ID NO: 89898 - RNA, 22 nt, Human
uuggacucugggauucuggauu

SEQ ID NO: 89899 - RNA, 22 nt, Human
uuggacugaaucuuucucacac

SEQ ID NO: 89900 - RNA, 22 nt, Human
uuggagccaugcccagcucucu

SEQ ID NO: 89901 - RNA, 22 nt, Human
uuggaggaaagaagguugauau

SEQ ID NO: 89902 - RNA, 22 nt, Human
uuggaggaaauugcuuuugugg

SEQ ID NO: 89903 - RNA, 22 nt, Human
uuggaggauaaggauauugauu

SEQ ID NO: 89904 - RNA, 22 nt, Human
uuggaggauugcucucagccca

SEQ ID NO: 89905 - RNA, 22 nt, Human
uuggaggcaaugggaaggaggc

SEQ ID NO: 89906 - RNA, 22 nt, Human
uuggagggucuuccacagccau

SEQ ID NO: 89907 - RNA, 22 nt, Human
uuggagguuauuaacacuggcc

SEQ ID NO: 89908 - RNA, 22 nt, Human
uuggagucauauggaauucaca

SEQ ID NO: 89909 - RNA, 22 nt, Human
uuggagucauuggccuggguga

SEQ ID NO: 89910 - RNA, 22 nt, Human
uuggaguccuugcugcuucacu

SEQ ID NO: 89911 - RNA, 22 nt, Human
uuggaucagaugauaucuuugu

SEQ ID NO: 89912 - RNA, 22 nt, Human
uuggaucuuaugaagguggcau

SEQ ID NO: 89913 - RNA, 19 nt, Human
uuggaugcuaccagguacc

SEQ ID NO: 89914 - RNA, 22 nt, Human
uuggaugggcauuaggaaaguc

SEQ ID NO: 89915 - RNA, 23 nt, Human
uuggcaaagccuaugaaguccuc

SEQ ID NO: 89916 - RNA, 22 nt, Human
uuggcaauucaccaaggcucgc

SEQ ID NO: 89917 - RNA, 22 nt, Human
uuggcacucucccugcacuggu

SEQ ID NO: 89918 - RNA, 22 nt, Human
uuggcacuucacgagacagcua

SEQ ID NO: 89919 - RNA, 22 nt, Human
uuggcacuuugaaugagcucag

SEQ ID NO: 89920 - RNA, 22 nt, Human
uuggcagacuggguccugggga

SEQ ID NO: 89921 - RNA, 22 nt, Human
uuggcagagaguaugcugaaga

SEQ ID NO: 89922 - RNA, 22 nt, Human
uuggcagagccccagccuugga

SEQ ID NO: 89923 - RNA, 22 nt, Human
uuggcagaggggccaccugccc

SEQ ID NO: 89924 - RNA, 22 nt, Human
uuggcagcagaguguggugcuc

SEQ ID NO: 89925 - RNA, 22 nt, Human
uuggcagcccugacccaauggg

SEQ ID NO: 89926 - RNA, 22 nt, Human
uuggcagcucuugauggcaccc

SEQ ID NO: 89927 - RNA, 22 nt, Human
uuggcagcuguuggaccuugac

SEQ ID NO: 89928 - RNA, 20 nt, Human
uuggcagcuucaggguacua

SEQ ID NO: 89929 - RNA, 22 nt, Human
uuggcagggccaggcucucucu

SEQ ID NO: 89930 - RNA, 22 nt, Human
uuggcagugaugcagcuuguuc

SEQ ID NO: 89931 - RNA, 22 nt, Human
uuggccaaaaaagucauuagaa

SEQ ID NO: 89932 - RNA, 22 nt, Human
uuggccaaggaaguagcaacgg

SEQ ID NO: 89933 - RNA, 22 nt, Human
uuggccaagggaucgagguugg

SEQ ID NO: 89934 - RNA, 22 nt, Human
uuggccaagggcucuuuaggcu

SEQ ID NO: 89935 - RNA, 22 nt, Human
uuggccagaucugaggauacug

SEQ ID NO: 89936 - RNA, 22 nt, Human
uuggcccagggucagcggcgcu

SEQ ID NO: 89937 - RNA, 22 nt, Human
uuggcccuuuaugggaugggca

SEQ ID NO: 89938 - RNA, 22 nt, Human
uuggccuaccugggaaugcugg

SEQ ID NO: 89939 - RNA, 22 nt, Human
uuggccuuuaaacuggacuuuc

SEQ ID NO: 89940 - RNA, 21 nt, Human
uuggccuuugucucagacacu

SEQ ID NO: 89941 - RNA, 22 nt, Human
uuggcgcccaggacgccgccgc

SEQ ID NO: 89942 - RNA, 22 nt, Human
uuggcuaugcuuguguucaguu

SEQ ID NO: 89943 - RNA, 22 nt, Human
uuggcucaaaacuuagauucca

SEQ ID NO: 89944 - RNA, 22 nt, Human
uuggcucacaaggacgguugcu

SEQ ID NO: 89945 - RNA, 22 nt, Human
uuggcucacaugauuauggagg

SEQ ID NO: 89946 - RNA, 22 nt, Human
uuggcucaggcuuucauuguaa

SEQ ID NO: 89947 - RNA, 22 nt, Human
uuggcucaugcuguuuugugca

SEQ ID NO: 89948 - RNA, 22 nt, Human
uuggcucccacuaacuccagca

SEQ ID NO: 89949 - RNA, 22 nt, Human
uuggcucuaggaaccaaaguga

SEQ ID NO: 89950 - RNA, 22 nt, Human
uuggcucugaaacccaagcucu

SEQ ID NO: 89951 - RNA, 22 nt, Human
uuggcucuggaacuauuucuga

SEQ ID NO: 89952 - RNA, 22 nt, Human
uuggcugaaagccaugagaccg

SEQ ID NO: 89953 - RNA, 22 nt, Human
uuggcugaagguuaagugcugg

SEQ ID NO: 89954 - RNA, 22 nt, Human
uuggcugaaugaggucaccuuu

SEQ ID NO: 89955 - RNA, 22 nt, Human
uuggcugagagaggaaaagggc

SEQ ID NO: 89956 - RNA, 22 nt, Human
uuggcugagagcugcucugcag

SEQ ID NO: 89957 - RNA, 22 nt, Human
uuggcugcuauuuccauauuua

SEQ ID NO: 89958 - RNA, 22 nt, Human
uuggcugguaagccaaaugaaa

SEQ ID NO: 89959 - RNA, 22 nt, Human
uuggcuguauguacaucuguua

SEQ ID NO: 89960 - RNA, 22 nt, Human
uuggcugugcagaucuugccua

SEQ ID NO: 89961 - RNA, 22 nt, Human
uuggcuguuuuauaggucaguu

SEQ ID NO: 89962 - RNA, 22 nt, Human
uuggcuuccaggaucucagcag

SEQ ID NO: 89963 - RNA, 22 nt, Human
uuggcuucccagagcuuacgcu

SEQ ID NO: 89964 - RNA, 22 nt, Human
uuggcuucucuuaacccuaaag

SEQ ID NO: 89965 - RNA, 22 nt, Human
uuggcuucuggcagucuggacg

SEQ ID NO: 89966 - RNA, 18 nt, Human
uuggcuucuuuccuuccu

SEQ ID NO: 89967 - RNA, 22 nt, Human
uuggcuuggagaguugaaaugu

SEQ ID NO: 89968 - RNA, 18 nt, Human
uuggcuuugagaacuggu

SEQ ID NO: 89969 - RNA, 22 nt, Human
uugggaaacaguauagcuaaca

SEQ ID NO: 89970 - RNA, 22 nt, Human
uugggaaagggauuaugaguag

SEQ ID NO: 89971 - RNA, 22 nt, Human
uugggacagaaaaggagaagau

SEQ ID NO: 89972 - RNA, 22 nt, Human
uugggagcuuggacuuagugug

SEQ ID NO: 89973 - RNA, 22 nt, Human
uugggaggucauaaaucuguuc

SEQ ID NO: 89974 - RNA, 22 nt, Human
uugggauacaucuugcugagcc

SEQ ID NO: 89975 - RNA, 22 nt, Human
uugggcaguagccucuuggugu

SEQ ID NO: 89976 - RNA, 22 nt, Human
uugggccaaauagcuauuuacu

SEQ ID NO: 89977 - RNA, 22 nt, Human
uugggccaaggcagaucuccaa

SEQ ID NO: 89978 - RNA, 22 nt, Human
uucauuaaguauaaaauguggu

SEQ ID NO: 89979 - RNA, 22 nt, Human
uucauuaguucugaagaugucu

SEQ ID NO: 89980 - RNA, 22 nt, Human
uucauucauguauugucuaugg

SEQ ID NO: 89981 - RNA, 19 nt, Human
uucauucucuuauuguugu

SEQ ID NO: 89982 - RNA, 22 nt, Human
uucauucuguuuggaaaggugg

SEQ ID NO: 89983 - RNA, 22 nt, Human
uucauucuugucuuuguauagu

SEQ ID NO: 89984 - RNA, 22 nt, Human
uucauucuuugaaucugaggua

SEQ ID NO: 89985 - RNA, 22 nt, Human
uucauugaaauacagucuugac

SEQ ID NO: 89986 - RNA, 22 nt, Human
uucauugaaauuaagcccaacu

SEQ ID NO: 89987 - RNA, 21 nt, Human
uucauugaacuauuuguggag

SEQ ID NO: 89988 - RNA, 22 nt, Human
uucauugaagcacaagugaucu

SEQ ID NO: 89989 - RNA, 22 nt, Human
uucauugacugguucguuaagu

SEQ ID NO: 89990 - RNA, 22 nt, Human
uucauugaguauagggguauac

SEQ ID NO: 89991 - RNA, 22 nt, Human
uucauugagugguuuauucuaa

SEQ ID NO: 89992 - RNA, 22 nt, Human
uucauugugaacacauucugcc

SEQ ID NO: 89993 - RNA, 22 nt, Human
uucauuugcacuggauuacugg

SEQ ID NO: 89994 - RNA, 22 nt, Human
uuggcccuggggccagcuucga

SEQ ID NO: 89995 - RNA, 22 nt, Human
uuggccuuaaccucucugugcc

SEQ ID NO: 89996 - RNA, 19 nt, Human
uuggccuuguuucauaucu

SEQ ID NO: 89997 - RNA, 22 nt, Human
uuggcgucuuuuccauggaaag

SEQ ID NO: 89998 - RNA, 20 nt, Human
uuggcucagauuuuuauggg

SEQ ID NO: 89999 - RNA, 22 nt, Human
uuggcucagcaucuuggugcca

SEQ ID NO: 90000 - RNA, 22 nt, Human
uuggcucagcugggacuguuga

SEQ ID NO: 90001 - RNA, 17 nt, Human
uuggcucuauugccucu

SEQ ID NO: 90002 - RNA, 22 nt, Human
uuggcugaccagaaccugcccc

SEQ ID NO: 90003 - RNA, 22 nt, Human
uuggcugaugcaagagcuuccu

SEQ ID NO: 90004 - RNA, 22 nt, Human
uuggcugcuaauggcugacagc

SEQ ID NO: 90005 - RNA, 22 nt, Human
uuggcugcuagaugguguuaga

SEQ ID NO: 90006 - RNA, 22 nt, Human
uuggcugcucagugauaugaga

SEQ ID NO: 90007 - RNA, 22 nt, Human
uuggcugcuggucuuuggauau

SEQ ID NO: 90008 - RNA, 22 nt, Human
uuggcugcuuuacucugacggg

SEQ ID NO: 90009 - RNA, 22 nt, Human
uuggcugguuucaagaaggcau

SEQ ID NO: 90010 - RNA, 22 nt, Human
uuggcugugaaagcuucucaaa

SEQ ID NO: 90011 - RNA, 22 nt, Human
uuggcuucuuuagucaguuugg

SEQ ID NO: 90012 - RNA, 22 nt, Human
uuggcuuucagaaucccuaucu

SEQ ID NO: 90013 - RNA, 22 nt, Human
uuggcuuucucuguaucugaau

SEQ ID NO: 90014 - RNA, 22 nt, Human
uuggcuuuuaugcagcuuaggu

SEQ ID NO: 90015 - RNA, 22 nt, Human
uugggaaauauggauuguuauu

SEQ ID NO: 90016 - RNA, 22 nt, Human
uugggaagaaacauguccauca

SEQ ID NO: 90017 - RNA, 22 nt, Human
uucuucaauuauuggaaagaaa

SEQ ID NO: 90018 - RNA, 22 nt, Human
uucuucagagaguagaagcaag

SEQ ID NO: 90019 - RNA, 22 nt, Human
uucuucagcccauaucuuccag

SEQ ID NO: 90020 - RNA, 22 nt, Human
uucuucaggaagagccuggacu

SEQ ID NO: 90021 - RNA, 21 nt, Human
uucuucaguuuaauauaaaau

SEQ ID NO: 90022 - RNA, 22 nt, Human
uucuucauggguucuuuuagga

SEQ ID NO: 90023 - RNA, 22 nt, Human
uucuucccagccagcacagccc

SEQ ID NO: 90024 - RNA, 22 nt, Human
uucuuccucacacucucaccca

SEQ ID NO: 90025 - RNA, 22 nt, Human
uucuucucggcugucagauagu

SEQ ID NO: 90026 - RNA, 20 nt, Human
uucuucucuaguuaucuuca

SEQ ID NO: 90027 - RNA, 22 nt, Human
uucuucugaaacauaaucaaua

SEQ ID NO: 90028 - RNA, 22 nt, Human
uucuucugacacugaugcugua

SEQ ID NO: 90029 - RNA, 22 nt, Human
uucuucuuaauguccugggaac

SEQ ID NO: 90030 - RNA, 22 nt, Human
uucuucuucauuucugacgaug

SEQ ID NO: 90031 - RNA, 22 nt, Human
uucuucuugaaacuuuagguug

SEQ ID NO: 90032 - RNA, 22 nt, Human
uucuugaaaauagccauguaca

SEQ ID NO: 90033 - RNA, 22 nt, Human
uucuugaugcuuguuuaaaggu

SEQ ID NO: 90034 - RNA, 22 nt, Human
uucuugauuagucucaugccaa

SEQ ID NO: 90035 - RNA, 22 nt, Human
uucuugcaggucacucacugag

SEQ ID NO: 90036 - RNA, 22 nt, Human
uucuugcaucacucugcuguuc

SEQ ID NO: 90037 - RNA, 22 nt, Human
uucuugcucaaugucuguuuaa

SEQ ID NO: 90038 - RNA, 22 nt, Human
uucuuggaaacugauuccuugu

SEQ ID NO: 90039 - RNA, 22 nt, Human
uucuuggcacagaugagauucu

SEQ ID NO: 90040 - RNA, 22 nt, Human
uucuuggcuguucauggucagg

SEQ ID NO: 90041 - RNA, 22 nt, Human
uucuuguaauuuggagaaauga

SEQ ID NO: 90042 - RNA, 22 nt, Human
uucuuguauauaaaaaucauuu

SEQ ID NO: 90043 - RNA, 22 nt, Human
uucuuguucuccucauuuagag

SEQ ID NO: 90044 - RNA, 20 nt, Human
uucuuuacgaccuuucugca

SEQ ID NO: 90045 - RNA, 22 nt, Human
uucuuuaucaguuacucauagg

SEQ ID NO: 90046 - RNA, 22 nt, Human
uucuuuauccuauuuguaggug

SEQ ID NO: 90047 - RNA, 22 nt, Human
uucuuuaugcuucuguuuaggc

SEQ ID NO: 90048 - RNA, 22 nt, Human
uucuuuauggaauggugauagu

SEQ ID NO: 90049 - RNA, 22 nt, Human
uucuuucccagaagauauguuu

SEQ ID NO: 90050 - RNA, 22 nt, Human
uucuuucccaguagaugugaaa

SEQ ID NO: 90051 - RNA, 22 nt, Human
uucuuucucaacaugaauguuu

SEQ ID NO: 90052 - RNA, 22 nt, Human
uucuuucucuguaaaaggaaaa

SEQ ID NO: 90053 - RNA, 22 nt, Human
uucuuugaaauacuguuuugcc

SEQ ID NO: 90054 - RNA, 19 nt, Human
uucuuugaguucuucugag

SEQ ID NO: 90055 - RNA, 23 nt, Human
uucuuuggaauugggcugcaagg

SEQ ID NO: 90056 - RNA, 22 nt, Human
uucuuugggcaauugcuggccc

SEQ ID NO: 90057 - RNA, 19 nt, Human
uucuuuggugguggugacc

SEQ ID NO: 90058 - RNA, 22 nt, Human
uucuuugguguuacccagcuca

SEQ ID NO: 90059 - RNA, 22 nt, Human
uucuuuguaaagccacaguccu

SEQ ID NO: 90060 - RNA, 22 nt, Human
uucuuuguuguacuuuccuaca

SEQ ID NO: 90061 - RNA, 22 nt, Human
uucuuuguuugauaaguaugcu

SEQ ID NO: 90062 - RNA, 22 nt, Human
uucuuuuaaaagagagcagaaa

SEQ ID NO: 90063 - RNA, 22 nt, Human
uucuuuuaauguucugaaguuu

SEQ ID NO: 90064 - RNA, 22 nt, Human
uucuuuuagaauuuccuaaggu

SEQ ID NO: 90065 - RNA, 22 nt, Human
uucuuuucaagaggggcaagga

SEQ ID NO: 90066 - RNA, 18 nt, Human
uucuuuucaugugaucuc

SEQ ID NO: 90067 - RNA, 22 nt, Human
uucuuuuccuacacagcgauuu

SEQ ID NO: 90068 - RNA, 22 nt, Human
uucuuuuuaaaguguguaugca

SEQ ID NO: 90069 - RNA, 22 nt, Human
uugaaaaccgugggaggcugaa

SEQ ID NO: 90070 - RNA, 22 nt, Human
uugaaaauaucacaggagcagc

SEQ ID NO: 90071 - RNA, 22 nt, Human
uugaaacauauacaaaguggug

SEQ ID NO: 90072 - RNA, 22 nt, Human
uugaaacucaucuuagugaugu

SEQ ID NO: 90073 - RNA, 22 nt, Human
uugaaacugucagcuuuuacgc

SEQ ID NO: 90074 - RNA, 22 nt, Human
uugaaacuuuaguaaacuaagg

SEQ ID NO: 90075 - RNA, 22 nt, Human
uugaaagacauuauuuauauau

SEQ ID NO: 90076 - RNA, 22 nt, Human
uugaaagaggcaaaguuugauc

SEQ ID NO: 90077 - RNA, 22 nt, Human
uugaaagauagugaagccagcc

SEQ ID NO: 90078 - RNA, 22 nt, Human
uugaaaggccuguuuauccagc

SEQ ID NO: 90079 - RNA, 22 nt, Human
uugaaaggguuaaagugguaaa

SEQ ID NO: 90080 - RNA, 22 nt, Human
uugaaaggugaacaugaugcac

SEQ ID NO: 90081 - RNA, 22 nt, Human
uugaaaguagcagcugcauaug

SEQ ID NO: 90082 - RNA, 22 nt, Human
uugaaaguccuucuugaguuac

SEQ ID NO: 90083 - RNA, 22 nt, Human
uugaaagugccaaguccuagug

SEQ ID NO: 90084 - RNA, 22 nt, Human
uugaaaguuaggauuuagcugg

SEQ ID NO: 90085 - RNA, 22 nt, Human
uugaaaguuaucuagauucuga

SEQ ID NO: 90086 - RNA, 22 nt, Human
uugaaauaucaaguuauuagug

SEQ ID NO: 90087 - RNA, 22 nt, Human
uugaaauauggauugaccuuga

SEQ ID NO: 90088 - RNA, 22 nt, Human
uugaaaucuuccacagcccaag

SEQ ID NO: 90089 - RNA, 22 nt, Human
uugaaaugcucuuuggaaucua

SEQ ID NO: 90090 - RNA, 22 nt, Human
uugaaauguaguccugccuuca

SEQ ID NO: 90091 - RNA, 22 nt, Human
uugaaauuggguguggcuguca

SEQ ID NO: 90092 - RNA, 22 nt, Human
uugaaccaggaacaauuagcuc

SEQ ID NO: 90093 - RNA, 22 nt, Human
uugaacucuggacccaugccag

SEQ ID NO: 90094 - RNA, 22 nt, Human
uugaacuguaagcaugucugcc

SEQ ID NO: 90095 - RNA, 22 nt, Human
uugaagaaauuauuuuauauag

SEQ ID NO: 90096 - RNA, 22 nt, Human
uugaagagaaucagaagguuga

SEQ ID NO: 90097 - RNA, 22 nt, Human
uugaagagucuuucuuuccccc

SEQ ID NO: 90098 - RNA, 22 nt, Human
uugaagagugccuuccagacau

SEQ ID NO: 90099 - RNA, 22 nt, Human
uugaagaugguagcaauuuccu

SEQ ID NO: 90100 - RNA, 22 nt, Human
uugaagcaaauucugugcagua

SEQ ID NO: 90101 - RNA, 22 nt, Human
uugaagcagcucaggaggcuua

SEQ ID NO: 90102 - RNA, 22 nt, Human
uugaagcaggaaaauuucuauu

SEQ ID NO: 90103 - RNA, 22 nt, Human
uuugagaacuuugguauuuucc

SEQ ID NO: 90104 - RNA, 22 nt, Human
uuugagaagcaucugguccacu

SEQ ID NO: 90105 - RNA, 22 nt, Human
uuugagaaggugacaaauucua

SEQ ID NO: 90106 - RNA, 22 nt, Human
uuugagaaugguaaguggaucg

SEQ ID NO: 90107 - RNA, 20 nt, Human
uuugagaccagucugcccaa

SEQ ID NO: 90108 - RNA, 22 nt, Human
uuugagcagcagaugcacuuag

SEQ ID NO: 90109 - RNA, 22 nt, Human
uuugagcuaugggcuuggauuu

SEQ ID NO: 90110 - RNA, 22 nt, Human
uuugagcuuguagcauugcuau

SEQ ID NO: 90111 - RNA, 18 nt, Human
uuugaggaaauguccuga

SEQ ID NO: 90112 - RNA, 22 nt, Human
uuugauauccuauacaaguaaa

SEQ ID NO: 90113 - RNA, 22 nt, Human
uuugauaucuugguauacagau

SEQ ID NO: 90114 - RNA, 22 nt, Human
uuugauuccuggggcagggcug

SEQ ID NO: 90115 - RNA, 21 nt, Human
uuugauucuuccucuccccag

SEQ ID NO: 90116 - RNA, 20 nt, Human
uuugauugccccucugacuu

SEQ ID NO: 90117 - RNA, 22 nt, Human
uuugauuuacuauaagcagcac

SEQ ID NO: 90118 - RNA, 22 nt, Human
uuugcaaaaugaggugaagagu

SEQ ID NO: 90119 - RNA, 22 nt, Human
uuugcaaacacuuaagaagaga

SEQ ID NO: 90120 - RNA, 22 nt, Human
uuugcaaaccggagcucugcaa

SEQ ID NO: 90121 - RNA, 22 nt, Human
uuugcaaauaccaugaaacuug

SEQ ID NO: 90122 - RNA, 22 nt, Human
uuugcaaauuagccacccuguu

SEQ ID NO: 90123 - RNA, 23 nt, Human
uuugcaaauuggacacaaccaca

SEQ ID NO: 90124 - RNA, 22 nt, Human
uuugcaaugugaaauuaaagaa

SEQ ID NO: 90125 - RNA, 22 nt, Human
uuugcacacacaauaacaaaug

SEQ ID NO: 90126 - RNA, 22 nt, Human
uuugcacuuaaauuuacaacac

SEQ ID NO: 90127 - RNA, 22 nt, Human
uuugcagaguaccugaagagga

SEQ ID NO: 90128 - RNA, 22 nt, Human
uuugcagcaaggagagagcauu

SEQ ID NO: 90129 - RNA, 22 nt, Human
uuugcagcuaagcacaguaauu

SEQ ID NO: 90130 - RNA, 20 nt, Human
uuugcaggaaggaaauaggu

SEQ ID NO: 90131 - RNA, 19 nt, Human
uuugcagugguuccuuugu

SEQ ID NO: 90132 - RNA, 22 nt, Human
uugaccuggaaggugcuuccug

SEQ ID NO: 90133 - RNA, 22 nt, Human
uugacguccucgauggggaacu

SEQ ID NO: 90134 - RNA, 22 nt, Human
uugacuguuaagacuuggcucu

SEQ ID NO: 90135 - RNA, 22 nt, Human
uugagaaaagcuguguaaggau

SEQ ID NO: 90136 - RNA, 22 nt, Human
uugagaaaauaguucgaauguu

SEQ ID NO: 90137 - RNA, 22 nt, Human
uugagaaacaucuaaucuuugu

SEQ ID NO: 90138 - RNA, 22 nt, Human
uugagaaacucuggguuagaau

SEQ ID NO: 90139 - RNA, 23 nt, Human
uugagaacaggugugagaauggc

SEQ ID NO: 90140 - RNA, 22 nt, Human
uugagaacuacuuuauuauucu

SEQ ID NO: 90141 - RNA, 22 nt, Human
uugagaagaggcuuuguaggaa

SEQ ID NO: 90142 - RNA, 22 nt, Human
uugagacacuuugggcaucacu

SEQ ID NO: 90143 - RNA, 22 nt, Human
uugagacugagucucgcccugu

SEQ ID NO: 90144 - RNA, 22 nt, Human
uugagaggcuguugacauucug

SEQ ID NO: 90145 - RNA, 22 nt, Human
uugagauggagcuucacucuug

SEQ ID NO: 90146 - RNA, 22 nt, Human
uugagcaaagcagccauucauu

SEQ ID NO: 90147 - RNA, 22 nt, Human
uugagcaaguguacgagcaggc

SEQ ID NO: 90148 - RNA, 22 nt, Human
uugagcaaugucacugaggcuu

SEQ ID NO: 90149 - RNA, 22 nt, Human
uugagcugccuggcuguggcuc

SEQ ID NO: 90150 - RNA, 22 nt, Human
uugaggaaaggaauuuauuuua

SEQ ID NO: 90151 - RNA, 22 nt, Human
uugaggacagugcuuggggccc

SEQ ID NO: 90152 - RNA, 22 nt, Human
uugaggaggaacugugaggcaa

SEQ ID NO: 90153 - RNA, 21 nt, Human
uugaggagugagaguggguuu

SEQ ID NO: 90154 - RNA, 22 nt, Human
uugaggaguuaggauguuuaua

SEQ ID NO: 90155 - RNA, 23 nt, Human
uugaggcaaacucuuuucugaaa

SEQ ID NO: 90156 - RNA, 22 nt, Human
uugaggcagggcaugguggccc

SEQ ID NO: 90157 - RNA, 22 nt, Human
uugagggacagaggugcugucu

SEQ ID NO: 90158 - RNA, 22 nt, Human
uugagggagaaaguuggaguag

SEQ ID NO: 90159 - RNA, 22 nt, Human
uugagggauuuacagagguggg

SEQ ID NO: 90160 - RNA, 22 nt, Human
uugagggucuggaucugcugcu

SEQ ID NO: 90161 - RNA, 22 nt, Human
uugagguaaagcuacuaguuag

SEQ ID NO: 90162 - RNA, 22 nt, Human
uugagguaguacuuauuauugg

SEQ ID NO: 90163 - RNA, 22 nt, Human
uugagguauauucacauauauc

SEQ ID NO: 90164 - RNA, 22 nt, Human
uugagguaucugucuuuaauug

SEQ ID NO: 90165 - RNA, 22 nt, Human
uugaggucauauauauuuggca

SEQ ID NO: 90166 - RNA, 22 nt, Human
uugaggucccugccuugccuuc

SEQ ID NO: 90167 - RNA, 22 nt, Human
uugaggucucuacagaagagug

SEQ ID NO: 90168 - RNA, 22 nt, Human
uugaggucuggcaguagcguug

SEQ ID NO: 90169 - RNA, 22 nt, Human
uugaggucuucagcugacaccu

SEQ ID NO: 90170 - RNA, 22 nt, Human
uugaggucuugaguacugggga

SEQ ID NO: 90171 - RNA, 22 nt, Human
uugaguacaaacucagccugag

SEQ ID NO: 90172 - RNA, 22 nt, Human
uugaguguacuuuagucaucug

SEQ ID NO: 90173 - RNA, 22 nt, Human
uugaucaaaucagcuacugagg

SEQ ID NO: 90174 - RNA, 22 nt, Human
uugaucaagugggaaauaguaa

SEQ ID NO: 90175 - RNA, 22 nt, Human
uugaucccuggaaauugaaaug

SEQ ID NO: 90176 - RNA, 22 nt, Human
uugaucugccucauucuuguuc

SEQ ID NO: 90177 - RNA, 22 nt, Human
uugaugaguuauccauuugacu

SEQ ID NO: 90178 - RNA, 22 nt, Human
uugaugcacuauguaacuuaca

SEQ ID NO: 90179 - RNA, 22 nt, Human
uugauggcugugauuuacucag

SEQ ID NO: 90180 - RNA, 22 nt, Human
uugauguaaaagccuugguggc

SEQ ID NO: 90181 - RNA, 22 nt, Human
uugauguaaagugauucauggg

SEQ ID NO: 90182 - RNA, 22 nt, Human
uugauguaauacuuugcaacca

SEQ ID NO: 90183 - RNA, 22 nt, Human
uugauguagccuaagacagaac

SEQ ID NO: 90184 - RNA, 22 nt, Human
uugauuaaucccaugugaguag

SEQ ID NO: 90185 - RNA, 22 nt, Human
uugauuacaaaguagauacauu

SEQ ID NO: 90186 - RNA, 22 nt, Human
uugauuacuauguguugaaagc

SEQ ID NO: 90187 - RNA, 22 nt, Human
uugauuagugaaacaugccuag

SEQ ID NO: 90188 - RNA, 22 nt, Human
uugauucaaccacuuaauaauc

SEQ ID NO: 90189 - RNA, 22 nt, Human
uugauucauauagauaugcgug

SEQ ID NO: 90190 - RNA, 22 nt, Human
uugauucauggacaggccaggu

SEQ ID NO: 90191 - RNA, 22 nt, Human
uugauucuaaaauaggaggaaa

SEQ ID NO: 90192 - RNA, 22 nt, Human
uugauucuacuuaaaacauaug

SEQ ID NO: 90193 - RNA, 22 nt, Human
uugauucuaugagguaagcuau

SEQ ID NO: 90194 - RNA, 22 nt, Human
uugauucugauccugucuggag

SEQ ID NO: 90195 - RNA, 22 nt, Human
uugauucugauccuuugcuagc

SEQ ID NO: 90196 - RNA, 22 nt, Human
uugauucugaugaaaguccauu

SEQ ID NO: 90197 - RNA, 22 nt, Human
uugauucuuagcuggugauaau

SEQ ID NO: 90198 - RNA, 23 nt, Human
uugauucuuucagggaccuagau

SEQ ID NO: 90199 - RNA, 22 nt, Human
uugauucuuugagaccgugaua

SEQ ID NO: 90200 - RNA, 22 nt, Human
uugauuugauuguaauggcucu

SEQ ID NO: 90201 - RNA, 22 nt, Human
uugauuuuaaaauagugacacu

SEQ ID NO: 90202 - RNA, 22 nt, Human
uugauuuugccugaucugagag

SEQ ID NO: 90203 - RNA, 22 nt, Human
uugauuuuuccagcuucuagag

SEQ ID NO: 90204 - RNA, 22 nt, Human
uugcaaaaacugcaauuacuuu

SEQ ID NO: 90205 - RNA, 22 nt, Human
uugcaaaaucauuucucaggau

SEQ ID NO: 90206 - RNA, 22 nt, Human
uugcaaagagucauguaaguca

SEQ ID NO: 90207 - RNA, 22 nt, Human
uugcaaagugucaugcaaagua

SEQ ID NO: 90208 - RNA, 22 nt, Human
uugcaaaguucccuacacaugu

SEQ ID NO: 90209 - RNA, 20 nt, Human
uugcaaauaucgugggucag

SEQ ID NO: 90210 - RNA, 22 nt, Human
uugcaaaucagaaguauagauu

SEQ ID NO: 90211 - RNA, 22 nt, Human
uugcaaaugugguuagggcuuu

SEQ ID NO: 90212 - RNA, 22 nt, Human
gaaugaacaaggauguucaucc

SEQ ID NO: 90213 - RNA, 22 nt, Human
gaaugaguagaguauaaacaaa

SEQ ID NO: 90214 - RNA, 22 nt, Human
gaaugaguauucuuuauaggau

SEQ ID NO: 90215 - RNA, 22 nt, Human
gaaugcaaauauauggaucagu

SEQ ID NO: 90216 - RNA, 22 nt, Human
gaaugcacucacccaucacuca

SEQ ID NO: 90217 - RNA, 22 nt, Human
gaaugcagugacggaggcuuac

SEQ ID NO: 90218 - RNA, 22 nt, Human
gaaugcauucucuuagcaucua

SEQ ID NO: 90219 - RNA, 22 nt, Human
gaaugcuacuugacucagcuca

SEQ ID NO: 90220 - RNA, 22 nt, Human
gaauggcauugucagccuuuau

SEQ ID NO: 90221 - RNA, 21 nt, Human
gaauggcucgcgcgccacacu

SEQ ID NO: 90222 - RNA, 19 nt, Human
gaaugggaaugggaaagcu

SEQ ID NO: 90223 - RNA, 19 nt, Human
gaauggguucuguagggag

SEQ ID NO: 90224 - RNA, 22 nt, Human
gaauguaagugggcagaagaca

SEQ ID NO: 90225 - RNA, 22 nt, Human
gaaugucuauguaaccgagggg

SEQ ID NO: 90226 - RNA, 19 nt, Human
gaaugucuccuacuucuga

SEQ ID NO: 90227 - RNA, 21 nt, Human
gaaugucugccuucacaauga

SEQ ID NO: 90228 - RNA, 22 nt, Human
gaaugucuuauugcucguugua

SEQ ID NO: 90229 - RNA, 22 nt, Human
gaaugucuucaaaacuagacug

SEQ ID NO: 90230 - RNA, 22 nt, Human
gaaugugugacucuauugagca

SEQ ID NO: 90231 - RNA, 22 nt, Human
gaauguuaaugcacuucuagcu

SEQ ID NO: 90232 - RNA, 22 nt, Human
gaauguuauguauccagucaca

SEQ ID NO: 90233 - RNA, 22 nt, Human
gaauguuauugaacuacgagcu

SEQ ID NO: 90234 - RNA, 20 nt, Human
gaauguuucacuugcuccau

SEQ ID NO: 90235 - RNA, 22 nt, Human
gaauguuuuucauuggugacuc

SEQ ID NO: 90236 - RNA, 22 nt, Human
gaauuaacuggcaguuagugcu

SEQ ID NO: 90237 - RNA, 22 nt, Human
gaauuacagaguuguuaaguca

SEQ ID NO: 90238 - RNA, 22 nt, Human
gaauuacauaauaaaaugagag

SEQ ID NO: 90239 - RNA, 22 nt, Human
gaauuacauuuguguuacugca

SEQ ID NO: 90240 - RNA, 22 nt, Human
gaauuagacaugcuuugcuuuu

SEQ ID NO: 90241 - RNA, 22 nt, Human
gaauuaggugcauguuuacaaa

SEQ ID NO: 90242 - RNA, 22 nt, Human
gaauucaagugcaaugguauau

SEQ ID NO: 90243 - RNA, 22 nt, Human
gaauucaguuaucuaauucaag

SEQ ID NO: 90244 - RNA, 22 nt, Human
gaauucauuagggaagcuaucu

SEQ ID NO: 90245 - RNA, 22 nt, Human
gaauucuaggguaaauauccua

SEQ ID NO: 90246 - RNA, 22 nt, Human
gaauucuagucacacacauuca

SEQ ID NO: 90247 - RNA, 22 nt, Human
gaauucuucugucuuuaacuga

SEQ ID NO: 90248 - RNA, 22 nt, Human
cccagacauugcagggacuggu

SEQ ID NO: 90249 - RNA, 22 nt, Human
cccagacuccucuggcuggugg

SEQ ID NO: 90250 - RNA, 22 nt, Human
cccagagaucuacugagcccag

SEQ ID NO: 90251 - RNA, 22 nt, Human
cccagagcauaacguaucuuga

SEQ ID NO: 90252 - RNA, 22 nt, Human
cccagagcaugugcugccuuug

SEQ ID NO: 90253 - RNA, 22 nt, Human
cccagagccgcuccccuacuuc

SEQ ID NO: 90254 - RNA, 22 nt, Human
cccagagccucauucuguuggg

SEQ ID NO: 90255 - RNA, 22 nt, Human
cccagaggaggcaaagcucugu

SEQ ID NO: 90256 - RNA, 22 nt, Human
cccagaggcugaguugggagca

SEQ ID NO: 90257 - RNA, 22 nt, Human
cccagagggcugaggauaugaa

SEQ ID NO: 90258 - RNA, 22 nt, Human
cccagaggguggagguugcagu

SEQ ID NO: 90259 - RNA, 22 nt, Human
cccagaggucugaaaagguuga

SEQ ID NO: 90260 - RNA, 22 nt, Human
cccagaggugcuucagaggugc

SEQ ID NO: 90261 - RNA, 22 nt, Human
cccagagguuccuuagggacca

SEQ ID NO: 90262 - RNA, 22 nt, Human
cccagaguggacgguggccccu

SEQ ID NO: 90263 - RNA, 22 nt, Human
cccagcagauggcuaugugcua

SEQ ID NO: 90264 - RNA, 22 nt, Human
cccagcagggucucugugucua

SEQ ID NO: 90265 - RNA, 22 nt, Human
cccagcaguacccaagcccuug

SEQ ID NO: 90266 - RNA, 22 nt, Human
cccagcauggagugaggacuca

SEQ ID NO: 90267 - RNA, 22 nt, Human
cccagcauuucugggcugcacu

SEQ ID NO: 90268 - RNA, 22 nt, Human
cccagcccccgagugucuggaa

SEQ ID NO: 90269 - RNA, 20 nt, Human
cccagcccgggccgcgcucg

SEQ ID NO: 90270 - RNA, 22 nt, Human
cccagccucagcuuuacuucca

SEQ ID NO: 90271 - RNA, 22 nt, Human
cccagccucugggcucacccaa

SEQ ID NO: 90272 - RNA, 22 nt, Human
cccagccugugacagccguccu

SEQ ID NO: 90273 - RNA, 22 nt, Human
cccagccuuugcuuccugguuc

SEQ ID NO: 90274 - RNA, 22 nt, Human
cccagcucaagcagagagcuaa

SEQ ID NO: 90275 - RNA, 22 nt, Human
cccagcucucgcacuuacuagc

SEQ ID NO: 90276 - RNA, 19 nt, Human
cccagcucucguggugugc

SEQ ID NO: 90277 - RNA, 22 nt, Human
cccagcucucucaguucugcuu

SEQ ID NO: 90278 - RNA, 22 nt, Human
cccagcucuggaagguggggga

SEQ ID NO: 90279 - RNA, 22 nt, Human
cccagcugauuuuugcagagau

SEQ ID NO: 90280 - RNA, 23 nt, Human
cccagcuggaaguuagaggacca

SEQ ID NO: 90281 - RNA, 19 nt, Human
cccagcuguucuuccacca

SEQ ID NO: 90282 - RNA, 22 nt, Human
cccagcuugcucaccauuccca

SEQ ID NO: 90283 - RNA, 22 nt, Human
cccaggaaagaauuuagagcca

SEQ ID NO: 90284 - RNA, 22 nt, Human
cccaggaaaugggcucuugccu

SEQ ID NO: 90285 - RNA, 22 nt, Human
cccaggaaccuaccagcucgag

SEQ ID NO: 90286 - RNA, 22 nt, Human
cccaggaacuccagagcuccuc

SEQ ID NO: 90287 - RNA, 22 nt, Human
cccaggaagcggagauugcaga

SEQ ID NO: 90288 - RNA, 22 nt, Human
cccaggaauuggaggcugcagu

SEQ ID NO: 90289 - RNA, 22 nt, Human
cccaggaccgcgcggcugagcg

SEQ ID NO: 90290 - RNA, 22 nt, Human
cccaggagagaggggauaaagc

SEQ ID NO: 90291 - RNA, 19 nt, Human
cccaggagcaguauugaug

SEQ ID NO: 90292 - RNA, 22 nt, Human
cccaggagccaucugucuuggc

SEQ ID NO: 90293 - RNA, 22 nt, Human
cccaggaggcagagauagcagu

SEQ ID NO: 90294 - RNA, 22 nt, Human
cccaggaggcagauguugcagu

SEQ ID NO: 90295 - RNA, 22 nt, Human
cccaggaggucgaagcugcagu

SEQ ID NO: 90296 - RNA, 22 nt, Human
cccaggagguggaguucacagu

SEQ ID NO: 90297 - RNA, 21 nt, Human
cccaggaguccuauuuaaaug

SEQ ID NO: 90298 - RNA, 23 nt, Human
cccaggaguuucacugcaaaggu

SEQ ID NO: 90299 - RNA, 22 nt, Human
cccaggcagagagcuggugagc

SEQ ID NO: 90300 - RNA, 22 nt, Human
cccaggcagccccagaagcuug

SEQ ID NO: 90301 - RNA, 22 nt, Human
cccaggcaggagugugguggcu

SEQ ID NO: 90302 - RNA, 22 nt, Human
cccaggcagggacgugcucugg

SEQ ID NO: 90303 - RNA, 22 nt, Human
cccaggccccagggcuugucag

SEQ ID NO: 90304 - RNA, 22 nt, Human
cccaggccuggucugggccagu

SEQ ID NO: 90305 - RNA, 23 nt, Human
cccaggcuacaaauuaugcucug

SEQ ID NO: 90306 - RNA, 22 nt, Human
cccaggcucacuguccgcuucc

SEQ ID NO: 90307 - RNA, 22 nt, Human
cccaggcucuuaugugacuugc

SEQ ID NO: 90308 - RNA, 22 nt, Human
cccaggcuggaauuccaggccu

SEQ ID NO: 90309 - RNA, 22 nt, Human
cccagggaagccauuucugacu

SEQ ID NO: 90310 - RNA, 22 nt, Human
cccagggaaugacucuggccuu

SEQ ID NO: 90311 - RNA, 22 nt, Human
cccagggacagcuagguggggc

SEQ ID NO: 90312 - RNA, 22 nt, Human
cccagggcuugagucauccaug

SEQ ID NO: 90313 - RNA, 20 nt, Human
cccagggguuguggugagga

SEQ ID NO: 90314 - RNA, 22 nt, Human
cccaggguaaucaugugaagcc

SEQ ID NO: 90315 - RNA, 22 nt, Human
cccagguagugagaaauggagg

SEQ ID NO: 90316 - RNA, 21 nt, Human
cccaggucguggucuucccag

SEQ ID NO: 90317 - RNA, 22 nt, Human
cccaggucuccuucuuuagcug

SEQ ID NO: 90318 - RNA, 23 nt, Human
cccagguguggaggcgguggcag

SEQ ID NO: 90319 - RNA, 19 nt, Human
cccaguccuuguccugggc

SEQ ID NO: 90320 - RNA, 20 nt, Human
cccagugaagcauggaagag

SEQ ID NO: 90321 - RNA, 22 nt, Human
cccuuccuccucgccugucaga

SEQ ID NO: 90322 - RNA, 22 nt, Human
cccuuccuggaguacccucugu

SEQ ID NO: 90323 - RNA, 22 nt, Human
cccuuccuugugacuggugggg

SEQ ID NO: 90324 - RNA, 21 nt, Human
cccuucugcuccagcuuugcc

SEQ ID NO: 90325 - RNA, 22 nt, Human
cccuucuguaaaugcugacugg

SEQ ID NO: 90326 - RNA, 21 nt, Human
cccuucuugggucaaaguaua

SEQ ID NO: 90327 - RNA, 22 nt, Human
cccuuggggaugcugugucugg

SEQ ID NO: 90328 - RNA, 22 nt, Human
cccuugggugccagccacaagu

SEQ ID NO: 90329 - RNA, 22 nt, Human
cccuuuaaggaaaggaaggaug

SEQ ID NO: 90330 - RNA, 22 nt, Human
cccuuuaaguccuggaacaaag

SEQ ID NO: 90331 - RNA, 22 nt, Human
cccuuuccauggcucuccuagg

SEQ ID NO: 90332 - RNA, 22 nt, Human
cccuuucccuucuggcucaggg

SEQ ID NO: 90333 - RNA, 22 nt, Human
cccuuucuuccgugacuucugc

SEQ ID NO: 90334 - RNA, 22 nt, Human
cccuuuggcauuuccaggauau

SEQ ID NO: 90335 - RNA, 22 nt, Human
cccuuuggguuccccaagccug

SEQ ID NO: 90336 - RNA, 22 nt, Human
cccuuuuuuaugucaagcauug

SEQ ID NO: 90337 - RNA, 22 nt, Human
ccgaggacauugggcuucuguu

SEQ ID NO: 90338 - RNA, 22 nt, Human
ccgcgccacccauucccacuga

SEQ ID NO: 90339 - RNA, 22 nt, Human
ccggcucggcgaccaggcugaa

SEQ ID NO: 90340 - RNA, 22 nt, Human
ccgggagguggagauugcggug

SEQ ID NO: 90341 - RNA, 22 nt, Human
ccgggcgggggcucucgucacc

SEQ ID NO: 90342 - RNA, 22 nt, Human
ccgggggacuacugggaaacug

SEQ ID NO: 90343 - RNA, 22 nt, Human
ccgucugcagccuccaggaguu

SEQ ID NO: 90344 - RNA, 21 nt, Human
ccgugcucggcuauggaccac

SEQ ID NO: 90345 - RNA, 22 nt, Human
ccgugugcacgcgccggugcug

SEQ ID NO: 90346 - RNA, 22 nt, Human
ccuaaacagaacaaagaggcag

SEQ ID NO: 90347 - RNA, 22 nt, Human
ccuaaagaauuuucauagagcu

SEQ ID NO: 90348 - RNA, 19 nt, Human
ccuaaaguuugaacccugg

SEQ ID NO: 90349 - RNA, 22 nt, Human
ccuaacuucacuucauugaagu

SEQ ID NO: 90350 - RNA, 22 nt, Human
ccuaagauuggugugcacugug

SEQ ID NO: 90351 - RNA, 22 nt, Human
ccuaaguauuuucaguguuaac

SEQ ID NO: 90352 - RNA, 18 nt, Human
ccuaauaugagggguccu

SEQ ID NO: 90353 - RNA, 22 nt, Human
ccuacacaucucaccucacagg

SEQ ID NO: 90354 - RNA, 22 nt, Human
ccuacacaugaaugcgagaaau

SEQ ID NO: 90355 - RNA, 22 nt, Human
ccuacagacaaaccagugacua

SEQ ID NO: 90356 - RNA, 19 nt, Human
ccuacaugaguaagcuugg

SEQ ID NO: 90357 - RNA, 19 nt, Human
ccuacuuguuugagggaag

SEQ ID NO: 90358 - RNA, 22 nt, Human
ccuagaauguacuuaauagaug

SEQ ID NO: 90359 - RNA, 22 nt, Human
ccuagaauuauaaacuuauuag

SEQ ID NO: 90360 - RNA, 22 nt, Human
ccuagagugauugagagcauca

SEQ ID NO: 90361 - RNA, 23 nt, Human
ccuagauucaaagcuuauaauuc

SEQ ID NO: 90362 - RNA, 22 nt, Human
ccuagcagggaagcagugagga

SEQ ID NO: 90363 - RNA, 22 nt, Human
ccuagccccagauaucucacac

SEQ ID NO: 90364 - RNA, 18 nt, Human
ccuagccuccaagcucau

SEQ ID NO: 90365 - RNA, 22 nt, Human
gacagguaccggucagacuacg

SEQ ID NO: 90366 - RNA, 22 nt, Human
gacagguauuugagagcuggga

SEQ ID NO: 90367 - RNA, 22 nt, Human
gacaggugaaacagcaagguaa

SEQ ID NO: 90368 - RNA, 22 nt, Human
gacagguggguaccuuuaugga

SEQ ID NO: 90369 - RNA, 22 nt, Human
gacagguggguucucguaucug

SEQ ID NO: 90370 - RNA, 22 nt, Human
gacaguaaaugcagucuagcac

SEQ ID NO: 90371 - RNA, 22 nt, Human
gacaguaagguggcuucuucuu

SEQ ID NO: 90372 - RNA, 22 nt, Human
gacaguaguaaagcuaggacca

SEQ ID NO: 90373 - RNA, 22 nt, Human
gacaguauccagguggugaaga

SEQ ID NO: 90374 - RNA, 22 nt, Human
gacagucccccagcagcaaacc

SEQ ID NO: 90375 - RNA, 22 nt, Human
gacagucuggccuaaaggguua

SEQ ID NO: 90376 - RNA, 22 nt, Human
gacagugaacagguucccacug

SEQ ID NO: 90377 - RNA, 22 nt, Human
gacagugagagucuacacccuc

SEQ ID NO: 90378 - RNA, 22 nt, Human
gacagugaguaccucaaaggcc

SEQ ID NO: 90379 - RNA, 22 nt, Human
gacaguuaggacaacugacuuc

SEQ ID NO: 90380 - RNA, 22 nt, Human
gacaguuuagguucaaaucuca

SEQ ID NO: 90381 - RNA, 22 nt, Human
gacaguuuugcugaaauugagc

SEQ ID NO: 90382 - RNA, 22 nt, Human
gacauaaaauggaauucuguug

SEQ ID NO: 90383 - RNA, 22 nt, Human
gacauaaaauucaauaauuugu

SEQ ID NO: 90384 - RNA, 22 nt, Human
gacauaaaccuugagauauuaa

SEQ ID NO: 90385 - RNA, 22 nt, Human
gacauaaaugaaguuugacuau

SEQ ID NO: 90386 - RNA, 22 nt, Human
gacauaauccuccucaccuacu

SEQ ID NO: 90387 - RNA, 22 nt, Human
gacauacagcccucucccuggu

SEQ ID NO: 90388 - RNA, 22 nt, Human
gacauagucucugucuucaugg

SEQ ID NO: 90389 - RNA, 17 nt, Human
gacaucaguacuuacag

SEQ ID NO: 90390 - RNA, 22 nt, Human
gacaucauaucaggaggcaugu

SEQ ID NO: 90391 - RNA, 22 nt, Human
gacauccaucauuuccuguuga

SEQ ID NO: 90392 - RNA, 22 nt, Human
gacaucuggaggagaugaaugg

SEQ ID NO: 90393 - RNA, 22 nt, Human
gacaugaauguuauacuuuauu

SEQ ID NO: 90394 - RNA, 22 nt, Human
gacaugcaaugcagugguaagu

SEQ ID NO: 90395 - RNA, 22 nt, Human
gacaugcaguucucaaggguag

SEQ ID NO: 90396 - RNA, 22 nt, Human
gacaugcugaauaacuauauga

SEQ ID NO: 90397 - RNA, 22 nt, Human
gacauggcuucuaggaagcuuu

SEQ ID NO: 90398 - RNA, 22 nt, Human
gacaugugagagcucgguuuuc

SEQ ID NO: 90399 - RNA, 22 nt, Human
gacaugugcugucucuuaaauu

SEQ ID NO: 90400 - RNA, 22 nt, Human
gacauguugaagaauauuugga

SEQ ID NO: 90401 - RNA, 22 nt, Human
gacauuaaaugucuuaguugcc

SEQ ID NO: 90402 - RNA, 22 nt, Human
gacauuaauuucuuugguaauu

SEQ ID NO: 90403 - RNA, 22 nt, Human
gacauuagacuaauguagcauu

SEQ ID NO: 90404 - RNA, 22 nt, Human
gacauucaaguuugcaguuagg

SEQ ID NO: 90405 - RNA, 22 nt, Human
gacauucacagguaaacauucc

SEQ ID NO: 90406 - RNA, 22 nt, Human
gacauucauugaugucuuccuc

SEQ ID NO: 90407 - RNA, 19 nt, Human
gacauuccugacacuggcu

SEQ ID NO: 90408 - RNA, 22 nt, Human
gacauucugucaauguugacuc

SEQ ID NO: 90409 - RNA, 22 nt, Human
gacauugaaaauaauguguaga

SEQ ID NO: 90410 - RNA, 22 nt, Human
gacauugaacaaguuuccugac

SEQ ID NO: 90411 - RNA, 22 nt, Human
gacauuggcuguucauugggau

SEQ ID NO: 90412 - RNA, 20 nt, Human
gacauuguaauuaaugauga

SEQ ID NO: 90413 - RNA, 22 nt, Human
gacauugugguuauuaaauguu

SEQ ID NO: 90414 - RNA, 22 nt, Human
gacauuuaaauugcaggcagcc

SEQ ID NO: 90415 - RNA, 22 nt, Human
gacauuuagguagcuuccaguu

SEQ ID NO: 90416 - RNA, 22 nt, Human
gacauuuauuagaaaacuauca

SEQ ID NO: 90417 - RNA, 22 nt, Human
gaccaagauacagcaucauaga

SEQ ID NO: 90418 - RNA, 22 nt, Human
gaccaaggaagaggggagccag

SEQ ID NO: 90419 - RNA, 22 nt, Human
gaccacacuuuggaaaucacga

SEQ ID NO: 90420 - RNA, 22 nt, Human
gaccacagaagccuugauaggg

SEQ ID NO: 90421 - RNA, 22 nt, Human
gaccacugaaugcacuucuaau

SEQ ID NO: 90422 - RNA, 22 nt, Human
gaccacuggcgcugcgagaccc

SEQ ID NO: 90423 - RNA, 22 nt, Human
gaccagaaucuggacucugauu

SEQ ID NO: 90424 - RNA, 22 nt, Human
gaccagcuacuuguacaguuca

SEQ ID NO: 90425 - RNA, 22 nt, Human
gaccagcugauaaggcauauaa

SEQ ID NO: 90426 - RNA, 22 nt, Human
gaccagcugguccuguccuggg

SEQ ID NO: 90427 - RNA, 22 nt, Human
gaccagcuggugaaaaccaauu

SEQ ID NO: 90428 - RNA, 22 nt, Human
gaccaggcuguuccagucuaac

SEQ ID NO: 90429 - RNA, 22 nt, Human
gaccauuagcugcuauucagua

SEQ ID NO: 90430 - RNA, 22 nt, Human
ccuggaagagcugaaucaggca

SEQ ID NO: 90431 - RNA, 22 nt, Human
ccuggaaggugaugguacagca

SEQ ID NO: 90432 - RNA, 21 nt, Human
ccuggacuaaaaccaggccac

SEQ ID NO: 90433 - RNA, 22 nt, Human
ccuggacuugauauucucuuuc

SEQ ID NO: 90434 - RNA, 22 nt, Human
ccuggagaccagaggauacuuc

SEQ ID NO: 90435 - RNA, 22 nt, Human
ccuggagacccacuucugccaa

SEQ ID NO: 90436 - RNA, 22 nt, Human
ccuggagcaaaaaucuaaggag

SEQ ID NO: 90437 - RNA, 22 nt, Human
ccuggagcacauggcaggaggc

SEQ ID NO: 90438 - RNA, 22 nt, Human
ccuggagcacucucccuggcug

SEQ ID NO: 90439 - RNA, 22 nt, Human
ccuggagcaucaggaggaaggg

SEQ ID NO: 90440 - RNA, 20 nt, Human
ccuggagccuggaaggaguc

SEQ ID NO: 90441 - RNA, 22 nt, Human
ccuggagcucacugggagccgg

SEQ ID NO: 90442 - RNA, 22 nt, Human
ccuggagcuuggucacgcugcg

SEQ ID NO: 90443 - RNA, 22 nt, Human
ccuggagcuuuuccauccugga

SEQ ID NO: 90444 - RNA, 22 nt, Human
ccuggaggggaccaggaccagg

SEQ ID NO: 90445 - RNA, 18 nt, Human
ccuggaggucuucggggu

SEQ ID NO: 90446 - RNA, 22 nt, Human
ccuggagguggagguugcagug

SEQ ID NO: 90447 - RNA, 22 nt, Human
ccuggaguaccguggccaucca

SEQ ID NO: 90448 - RNA, 19 nt, Human
ccuggagucgcgcugccuc

SEQ ID NO: 90449 - RNA, 22 nt, Human
ccuggagugacagguguagccu

SEQ ID NO: 90450 - RNA, 22 nt, Human
ccuggagugggguccgugcaug

SEQ ID NO: 90451 - RNA, 18 nt, Human
ccuggaguguguuaggcu

SEQ ID NO: 90452 - RNA, 22 nt, Human
ccuggaucagagccagagaagc

SEQ ID NO: 90453 - RNA, 16 nt, Human
ccuggauccccugugg

SEQ ID NO: 90454 - RNA, 22 nt, Human
ccuggaucuaaggaagcuggga

SEQ ID NO: 90455 - RNA, 22 nt, Human
ccuggaucuccucuauucauau

SEQ ID NO: 90456 - RNA, 22 nt, Human
ccuggcacauagcaaccccucc

SEQ ID NO: 90457 - RNA, 22 nt, Human
ccuggcacaucuaacucacucu

SEQ ID NO: 90458 - RNA, 22 nt, Human
ccuggcaccuguguuuucugga

SEQ ID NO: 90459 - RNA, 22 nt, Human
ccuggcaccuucacagacuacu

SEQ ID NO: 90460 - RNA, 22 nt, Human
ccuggcacgaagggcugagguu

SEQ ID NO: 90461 - RNA, 21 nt, Human
ccuggcacuggccugcugagc

SEQ ID NO: 90462 - RNA, 22 nt, Human
ccuggcagaaagaguuacaccu

SEQ ID NO: 90463 - RNA, 23 nt, Human
ccuggcagcaaacgaggagguua

SEQ ID NO: 90464 - RNA, 22 nt, Human
ccuggcagcauugguagagauu

SEQ ID NO: 90465 - RNA, 22 nt, Human
ccuggcagcuccguggccuucc

SEQ ID NO: 90466 - RNA, 22 nt, Human
ccuggcagcuguuuggcuuggc

SEQ ID NO: 90467 - RNA, 20 nt, Human
ccuggcaggcggguuacuua

SEQ ID NO: 90468 - RNA, 22 nt, Human
ccuggcaggcuggggacagugc

SEQ ID NO: 90469 - RNA, 22 nt, Human
ccuggcagggcugcaguaaugg

SEQ ID NO: 90470 - RNA, 22 nt, Human
ccuggcaguucaucaaauggca

SEQ ID NO: 90471 - RNA, 22 nt, Human
ccuggccacagggcucugcauu

SEQ ID NO: 90472 - RNA, 22 nt, Human
ccuggccagcgccggcugcucg

SEQ ID NO: 90473 - RNA, 22 nt, Human
ccuggccagcuaauugcccauc

SEQ ID NO: 90474 - RNA, 22 nt, Human
ccuggccaggcuccaaguacug

SEQ ID NO: 90475 - RNA, 22 nt, Human
ccuggccagggucugggcugcu

SEQ ID NO: 90476 - RNA, 22 nt, Human
ccuggcccacauggcuucuccc

SEQ ID NO: 90477 - RNA, 19 nt, Human
ccuggcccugcugcgcggg

SEQ ID NO: 90478 - RNA, 21 nt, Human
ccuggcuccagaacuuccggu

SEQ ID NO: 90479 - RNA, 22 nt, Human
ccuggcucccugcacagggcuc

SEQ ID NO: 90480 - RNA, 22 nt, Human
ccuggcuccugccucugcaggg

SEQ ID NO: 90481 - RNA, 22 nt, Human
ccuggcucgcugaccucagggg

SEQ ID NO: 90482 - RNA, 22 nt, Human
ccuggcucuagaggccacuccu

SEQ ID NO: 90483 - RNA, 22 nt, Human
ccuggcucucugcagauccugg

SEQ ID NO: 90484 - RNA, 22 nt, Human
ccuggcucugagguaugccugg

SEQ ID NO: 90485 - RNA, 22 nt, Human
ccuggcucugcagccacuccag

SEQ ID NO: 90486 - RNA, 22 nt, Human
ccuggcucugcgugcagcuccg

SEQ ID NO: 90487 - RNA, 22 nt, Human
ccuggcucugguucccucagcu

SEQ ID NO: 90488 - RNA, 21 nt, Human
ccuggcucuguguuuauuaug

SEQ ID NO: 90489 - RNA, 22 nt, Human
ccuggcucuucagagguuccua

SEQ ID NO: 90490 - RNA, 22 nt, Human
ccuggcucuucgggaguuuguu

SEQ ID NO: 90491 - RNA, 22 nt, Human
ccuggcugaggggccaaggacc

SEQ ID NO: 90492 - RNA, 22 nt, Human
ccuggcugcccauggacccucu

SEQ ID NO: 90493 - RNA, 22 nt, Human
ccuggcugccuuguguugaucu

SEQ ID NO: 90494 - RNA, 19 nt, Human
ccuggcugcugugggaugc

SEQ ID NO: 90495 - RNA, 22 nt, Human
ccuggcuggcaagaucgugaag

SEQ ID NO: 90496 - RNA, 22 nt, Human
ccuggcugggguagaagugagg

SEQ ID NO: 90497 - RNA, 22 nt, Human
ccuggcugguugucugauucua

SEQ ID NO: 90498 - RNA, 19 nt, Human
ccuggcugugaagccugca

SEQ ID NO: 90499 - RNA, 23 nt, Human
ccuggcuguggauuugggccugc

SEQ ID NO: 90500 - RNA, 22 nt, Human
ccuggcugugugaccuuggcaa

SEQ ID NO: 90501 - RNA, 21 nt, Human
ccugagggugguugugaagau

SEQ ID NO: 90502 - RNA, 20 nt, Human
ccugaggguuuguguucuuu

SEQ ID NO: 90503 - RNA, 22 nt, Human
ccugagguggcugcagcacugc

SEQ ID NO: 90504 - RNA, 19 nt, Human
ccugaggugggguggaagg

SEQ ID NO: 90505 - RNA, 22 nt, Human
ccugaguaacauggugagaacc

SEQ ID NO: 90506 - RNA, 22 nt, Human
ccugaguccccucauucacucu

SEQ ID NO: 90507 - RNA, 22 nt, Human
ccugagugaauucccucacugu

SEQ ID NO: 90508 - RNA, 17 nt, Human
ccugagugggagaggaa

SEQ ID NO: 90509 - RNA, 22 nt, Human
ccugauuagggucuuucaaaug

SEQ ID NO: 90510 - RNA, 22 nt, Human
ccugcacagccggaccccugcu

SEQ ID NO: 90511 - RNA, 22 nt, Human
ccugcacagccuuggcugacac

SEQ ID NO: 90512 - RNA, 22 nt, Human
ccugcaccacaaggcuucagag

SEQ ID NO: 90513 - RNA, 22 nt, Human
ccugcaccacacucacugcuca

SEQ ID NO: 90514 - RNA, 22 nt, Human
ccugcagaccacacucaguccu

SEQ ID NO: 90515 - RNA, 22 nt, Human
ccugcagagcaggagaggcauc

SEQ ID NO: 90516 - RNA, 22 nt, Human
ccugcagcccuucaaaggcuga

SEQ ID NO: 90517 - RNA, 23 nt, Human
ccugcagcugcuggggcuccacc

SEQ ID NO: 90518 - RNA, 22 nt, Human
ccugcaggcugcaggccaguuc

SEQ ID NO: 90519 - RNA, 22 nt, Human
ccugcagucuacccaaugugug

SEQ ID NO: 90520 - RNA, 22 nt, Human
ccugcauccgaaagugaucaua

SEQ ID NO: 90521 - RNA, 22 nt, Human
ccugccacuucuugcuauggag

SEQ ID NO: 90522 - RNA, 22 nt, Human
ccugccagcccccauagagaca

SEQ ID NO: 90523 - RNA, 22 nt, Human
ccugccagcugugggccagccu

SEQ ID NO: 90524 - RNA, 22 nt, Human
ccugccagggccagaggccagc

SEQ ID NO: 90525 - RNA, 18 nt, Human
ccugccagucuggagcag

SEQ ID NO: 90526 - RNA, 22 nt, Human
ccugccaucagaaacacucaaa

SEQ ID NO: 90527 - RNA, 22 nt, Human
ccugccaugguagacuuccagg

SEQ ID NO: 90528 - RNA, 22 nt, Human
ccugcccagagccccuuucacu

SEQ ID NO: 90529 - RNA, 22 nt, Human
ccugcccaggagucucucugug

SEQ ID NO: 90530 - RNA, 22 nt, Human
ccugccccucaaggccuggugc

SEQ ID NO: 90531 - RNA, 22 nt, Human
ccugcccuaugaccagcuucac

SEQ ID NO: 90532 - RNA, 22 nt, Human
ccugccuauguaagugguuucu

SEQ ID NO: 90533 - RNA, 22 nt, Human
ccugccucccagagguccucua

SEQ ID NO: 90534 - RNA, 17 nt, Human
ccugccugagccauagc

SEQ ID NO: 90535 - RNA, 19 nt, Human
ccugccugagcugucccuc

SEQ ID NO: 90536 - RNA, 22 nt, Human
ccugccugauuccaggauggcu

SEQ ID NO: 90537 - RNA, 22 nt, Human
ccugccugcaaaaugggacaag

SEQ ID NO: 90538 - RNA, 22 nt, Human
ccugccugcaccuucucugggg

SEQ ID NO: 90539 - RNA, 22 nt, Human
ccugccuggagcugagugugga

SEQ ID NO: 90540 - RNA, 22 nt, Human
cgaaaauagaucuguuucccag

SEQ ID NO: 90541 - RNA, 21 nt, Human
cgaaguuugggcagagggguc

SEQ ID NO: 90542 - RNA, 22 nt, Human
cgacagcagaagaagcaagcca

SEQ ID NO: 90543 - RNA, 21 nt, Human
cgacaggagaggcagccagcc

SEQ ID NO: 90544 - RNA, 22 nt, Human
cgacccuacagacagugcugag

SEQ ID NO: 90545 - RNA, 22 nt, Human
cgacgggcucgguccgcuuccu

SEQ ID NO: 90546 - RNA, 22 nt, Human
cgagagccggaaggggcggugc

SEQ ID NO: 90547 - RNA, 22 nt, Human
cgagaggcuggacagggcuggg

SEQ ID NO: 90548 - RNA, 22 nt, Human
cgagaguuagcuaggagucaca

SEQ ID NO: 90549 - RNA, 22 nt, Human
cgagauccuucagagcgcggac

SEQ ID NO: 90550 - RNA, 22 nt, Human
cgagcagaagccugguggucug

SEQ ID NO: 90551 - RNA, 22 nt, Human
cgagcagaauggagggugccga

SEQ ID NO: 90552 - RNA, 22 nt, Human
cgagcagagcagagacgucugg

SEQ ID NO: 90553 - RNA, 22 nt, Human
cgagcaugaugacggcuguggc

SEQ ID NO: 90554 - RNA, 22 nt, Human
cgaggaaauauuuacaacugau

SEQ ID NO: 90555 - RNA, 22 nt, Human
cgaggccaccgugguuuccgag

SEQ ID NO: 90556 - RNA, 22 nt, Human
cgagguaguggcggccgcggcc

SEQ ID NO: 90557 - RNA, 22 nt, Human
cgagguauagggaggguaucuc

SEQ ID NO: 90558 - RNA, 22 nt, Human
cgagugucugcuaugggcugag

SEQ ID NO: 90559 - RNA, 22 nt, Human
cgaugcuggaaugacagcugcu

SEQ ID NO: 90560 - RNA, 20 nt, Human
cgauucaguggaguuugaaa

SEQ ID NO: 90561 - RNA, 22 nt, Human
cgauuuccgcuugaucugaucu

SEQ ID NO: 90562 - RNA, 22 nt, Human
cgcaacucagcaacuuaacugc

SEQ ID NO: 90563 - RNA, 22 nt, Human
cgcaauuaauucgggccacagu

SEQ ID NO: 90564 - RNA, 22 nt, Human
cgcaccacugaauuccagccug

SEQ ID NO: 90565 - RNA, 22 nt, Human
cgcagagggcaggcagugcugg

SEQ ID NO: 90566 - RNA, 20 nt, Human
cgcagcaguggaaguggaau

SEQ ID NO: 90567 - RNA, 22 nt, Human
cgcagccccaacaaaugggaca

SEQ ID NO: 90568 - RNA, 22 nt, Human
cgcagcuggauaucaugugccu

SEQ ID NO: 90569 - RNA, 22 nt, Human
cgcagcuucagggccaggaggg

SEQ ID NO: 90570 - RNA, 22 nt, Human
cgcaggcacagaguggacagcg

SEQ ID NO: 90571 - RNA, 22 nt, Human
cgcaggcugcagccaagaagag

SEQ ID NO: 90572 - RNA, 22 nt, Human
cgcaggcuggcgcggaguggca

SEQ ID NO: 90573 - RNA, 22 nt, Human
cgcaggugaaagaggcugggca

SEQ ID NO: 90574 - RNA, 22 nt, Human
cgccaggcuugguagcucaugc

SEQ ID NO: 90575 - RNA, 22 nt, Human
cgccccagaugcaagacaaaga

SEQ ID NO: 90576 - RNA, 22 nt, Human
cgccuucacaaggacaguauau

SEQ ID NO: 90577 - RNA, 22 nt, Human
cgccuucaggcccuuuuuguug

SEQ ID NO: 90578 - RNA, 22 nt, Human
cgcucuggagaauaguagcuuu

SEQ ID NO: 90579 - RNA, 22 nt, Human
cgcugauaaacgucacguuccc

SEQ ID NO: 90580 - RNA, 22 nt, Human
cgcugcagaagcguguucagga

SEQ ID NO: 90581 - RNA, 22 nt, Human
cgcugcagacgcgcuggcgaaa

SEQ ID NO: 90582 - RNA, 22 nt, Human
cgcugcagcuggcugcagggaa

SEQ ID NO: 90583 - RNA, 22 nt, Human
cgcugcaguuuauguguuccug

SEQ ID NO: 90584 - RNA, 22 nt, Human
cgcugccaggauccccugccgg

SEQ ID NO: 90585 - RNA, 22 nt, Human
cgcugggcagguccacuuguua

SEQ ID NO: 90586 - RNA, 22 nt, Human
cgcugggugcagugauuggcau

SEQ ID NO: 90587 - RNA, 22 nt, Human
cgcuucucuacucccagccagu

SEQ ID NO: 90588 - RNA, 21 nt, Human
cggaaaggacuagggcucaga

SEQ ID NO: 90589 - RNA, 22 nt, Human
cggagaggaccugcaacucgcu

SEQ ID NO: 90590 - RNA, 22 nt, Human
cggagaggugggggcagcaucu

SEQ ID NO: 90591 - RNA, 22 nt, Human
cggagcagaaggcgccgccggc

SEQ ID NO: 90592 - RNA, 21 nt, Human
cggagcugggcagggcauccc

SEQ ID NO: 90593 - RNA, 22 nt, Human
cggcagagcuuccugcucagcg

SEQ ID NO: 90594 - RNA, 22 nt, Human
cggcagcgguuggagguuguag

SEQ ID NO: 90595 - RNA, 22 nt, Human
cggcagugggcgccaggucucc

SEQ ID NO: 90596 - RNA, 22 nt, Human
cggccaggcacaguggcccacg

SEQ ID NO: 90597 - RNA, 22 nt, Human
cggccgcagcagugucggccca

SEQ ID NO: 90598 - RNA, 22 nt, Human
cggcgcaggcagaccgcgggcu

SEQ ID NO: 90599 - RNA, 22 nt, Human
cggcucagacuucccaagaaca

SEQ ID NO: 90600 - RNA, 21 nt, Human
cggcucagugccugcuccuuc

SEQ ID NO: 90601 - RNA, 22 nt, Human
cggcuccuccgcccuugcucac

SEQ ID NO: 90602 - RNA, 22 nt, Human
cggcugagacggccauagacac

SEQ ID NO: 90603 - RNA, 23 nt, Human
cggcugcucggccgaguccucgg

SEQ ID NO: 90604 - RNA, 22 nt, Human
cggcuggagcugagaaaggagc

SEQ ID NO: 90605 - RNA, 22 nt, Human
cggcuggagcuuugaaccugau

SEQ ID NO: 90606 - RNA, 22 nt, Human
cggcuucaguaauuccaugucc

SEQ ID NO: 90607 - RNA, 21 nt, Human
cggcuucauuuucuucugguu

SEQ ID NO: 90608 - RNA, 22 nt, Human
cggcuucucgggucggauuccg

SEQ ID NO: 90609 - RNA, 22 nt, Human
cggcuucugcccauucaguccu

SEQ ID NO: 90610 - RNA, 18 nt, Human
cggcuucugucaccuugc

SEQ ID NO: 90611 - RNA, 22 nt, Human
cggcuucuucgaggugucugcg

SEQ ID NO: 90612 - RNA, 22 nt, Human
cgggaagguggagguugcagug

SEQ ID NO: 90613 - RNA, 22 nt, Human
cgggcacugccuuuguugauuu

SEQ ID NO: 90614 - RNA, 22 nt, Human
ccuggcuguuugagcggggaau

SEQ ID NO: 90615 - RNA, 22 nt, Human
ccuggcuuccauauggcacaua

SEQ ID NO: 90616 - RNA, 22 nt, Human
ccuggcuucucugcauuguucu

SEQ ID NO: 90617 - RNA, 22 nt, Human
ccugggaagaccggcagugggg

SEQ ID NO: 90618 - RNA, 20 nt, Human
ccugggaaggcagccccagc

SEQ ID NO: 90619 - RNA, 22 nt, Human
ccugggaaggggaagagaauuc

SEQ ID NO: 90620 - RNA, 22 nt, Human
ccugggaaguuguggcugcagu

SEQ ID NO: 90621 - RNA, 22 nt, Human
ccugggaccucgcgggaagcgg

SEQ ID NO: 90622 - RNA, 21 nt, Human
ccugggagaauuggguguggc

SEQ ID NO: 90623 - RNA, 17 nt, Human
ccugggaggaguuauga

SEQ ID NO: 90624 - RNA, 19 nt, Human
ccugggaggcggagguugc

SEQ ID NO: 90625 - RNA, 22 nt, Human
ccugggaggcggagguugcagg

SEQ ID NO: 90626 - RNA, 22 nt, Human
ccugggagguggauguugcggu

SEQ ID NO: 90627 - RNA, 19 nt, Human
ccugggagucagcugaagg

SEQ ID NO: 90628 - RNA, 22 nt, Human
ccugggagugcacagguuucgu

SEQ ID NO: 90629 - RNA, 22 nt, Human
ccugggagugucagacuugcuu

SEQ ID NO: 90630 - RNA, 22 nt, Human
ccugggcaacauagugagaccc

SEQ ID NO: 90631 - RNA, 22 nt, Human
ccugggcaacauagugagaccu

SEQ ID NO: 90632 - RNA, 22 nt, Human
ccugggccuugaccucgugggc

SEQ ID NO: 90633 - RNA, 20 nt, Human
ccugggcucaaagcauccuc

SEQ ID NO: 90634 - RNA, 22 nt, Human
ccugggcucaagugauccuccu

SEQ ID NO: 90635 - RNA, 22 nt, Human
ccugggcucaagugaugguccc

SEQ ID NO: 90636 - RNA, 20 nt, Human
ccugggcuccaggagccccg

SEQ ID NO: 90637 - RNA, 22 nt, Human
ccugggcucgcgcacuucaccc

SEQ ID NO: 90638 - RNA, 22 nt, Human
ccugggcucugucagaauuggg

SEQ ID NO: 90639 - RNA, 22 nt, Human
ccugggcugcucauggggauga

SEQ ID NO: 90640 - RNA, 22 nt, Human
ccugggcugggcgucucauggg

SEQ ID NO: 90641 - RNA, 22 nt, Human
ccugggcuuucaaaaccagccu

SEQ ID NO: 90642 - RNA, 22 nt, Human
ccugggcuuucggcggcuuccu

SEQ ID NO: 90643 - RNA, 22 nt, Human
ccugggcuuugcuggcaaggcc

SEQ ID NO: 90644 - RNA, 22 nt, Human
ccuggggagaagagcuuccccc

SEQ ID NO: 90645 - RNA, 22 nt, Human
ccuggggagagaaagcccagcc

SEQ ID NO: 90646 - RNA, 20 nt, Human
ccugggguacacuggcaugu

SEQ ID NO: 90647 - RNA, 22 nt, Human
ccuggggucacuugcagccgca

SEQ ID NO: 90648 - RNA, 22 nt, Human
ccugggucaccaggcccaggca

SEQ ID NO: 90649 - RNA, 22 nt, Human
ccugggagagccaucuguggcc

SEQ ID NO: 90650 - RNA, 22 nt, Human
ccugggagccaagccucugugu

SEQ ID NO: 90651 - RNA, 22 nt, Human
ccugggaggcugugggucugcu

SEQ ID NO: 90652 - RNA, 22 nt, Human
ccugggagggcaagugcugaug

SEQ ID NO: 90653 - RNA, 22 nt, Human
ccugggagguggagguugcagc

SEQ ID NO: 90654 - RNA, 22 nt, Human
ccugggagguggagguugcagu

SEQ ID NO: 90655 - RNA, 22 nt, Human
ccugggagugugccaucucugu

SEQ ID NO: 90656 - RNA, 22 nt, Human
ccugggcaaaugccagagacaa

SEQ ID NO: 90657 - RNA, 22 nt, Human
ccugggcaaauuauguuacuca

SEQ ID NO: 90658 - RNA, 22 nt, Human
ccugggcaggccggacgcuggg

SEQ ID NO: 90659 - RNA, 22 nt, Human
ccugggcccucaccgccggugg

SEQ ID NO: 90660 - RNA, 22 nt, Human
ccugggcucaccaugccuugga

SEQ ID NO: 90661 - RNA, 22 nt, Human
ccugggcucugaggagggaguc

SEQ ID NO: 90662 - RNA, 22 nt, Human
ccugggcugcaugauggcauuu

SEQ ID NO: 90663 - RNA, 22 nt, Human
ccugggcuguaccugugcgcgg

SEQ ID NO: 90664 - RNA, 21 nt, Human
ccugggcugugguuuggagac

SEQ ID NO: 90665 - RNA, 22 nt, Human
ccugggcuugcaucugugcugg

SEQ ID NO: 90666 - RNA, 22 nt, Human
ccuggggaaucuugcaggggaa

SEQ ID NO: 90667 - RNA, 22 nt, Human
ccuggggaccugccucagcccu

SEQ ID NO: 90668 - RNA, 22 nt, Human
ccuggggcuuucuuuguaucau

SEQ ID NO: 90669 - RNA, 22 nt, Human
ccuggguacccuuggcggccuu

SEQ ID NO: 90670 - RNA, 22 nt, Human
ccuggguacgcagggcuccucu

SEQ ID NO: 90671 - RNA, 22 nt, Human
ccuggguccacccugugaagua

SEQ ID NO: 90672 - RNA, 19 nt, Human
ccuggguccacucagacua

SEQ ID NO: 90673 - RNA, 22 nt, Human
ccugggucuccuccugcuggcu

SEQ ID NO: 90674 - RNA, 19 nt, Human
ccugggucugcagcauuca

SEQ ID NO: 90675 - RNA, 22 nt, Human
ccugggucuugguucaugcucu

SEQ ID NO: 90676 - RNA, 22 nt, Human
ccugggugacagagugagaccu

SEQ ID NO: 90677 - RNA, 21 nt, Human
ccugggugggaccccucuucc

SEQ ID NO: 90678 - RNA, 22 nt, Human
ccugggugucaugggcagcugg

SEQ ID NO: 90679 - RNA, 22 nt, Human
ccuggguuaguaucuguuucca

SEQ ID NO: 90680 - RNA, 22 nt, Human
ccuggguuauuuuggucuagug

SEQ ID NO: 90681 - RNA, 22 nt, Human
ccuggucagagcagucaggauc

SEQ ID NO: 90682 - RNA, 22 nt, Human
ccuggucagguaacugggcuga

SEQ ID NO: 90683 - RNA, 22 nt, Human
ccuggucccauugcggcugccu

SEQ ID NO: 90684 - RNA, 22 nt, Human
ccuggugaauguucauggacug

SEQ ID NO: 90685 - RNA, 22 nt, Human
ccuggugcugcuaucaggggua

SEQ ID NO: 90686 - RNA, 22 nt, Human
ccugguggccuucagcccacaa

SEQ ID NO: 90687 - RNA, 22 nt, Human
ccugguggcuucuggguggacg

SEQ ID NO: 90688 - RNA, 22 nt, Human
ccuggugggcaggagugagacc

SEQ ID NO: 90689 - RNA, 20 nt, Human
ccugguguauuuccuggggu

SEQ ID NO: 90690 - RNA, 22 nt, Human
ccugguguggcugucacagagg

SEQ ID NO: 90691 - RNA, 22 nt, Human
ccugguguuaucauaggucaug

SEQ ID NO: 90692 - RNA, 22 nt, Human
ccugguguugccaaucugugcc

SEQ ID NO: 90693 - RNA, 22 nt, Human
ccugguuugggugccagugagu

SEQ ID NO: 90694 - RNA, 22 nt, Human
ccuguacaagagccaucuggau

SEQ ID NO: 90695 - RNA, 22 nt, Human
ccuguacacaauuccgaggaua

SEQ ID NO: 90696 - RNA, 22 nt, Human
ccuguacauggccaucuuuacc

SEQ ID NO: 90697 - RNA, 22 nt, Human
ccuguacauuagcugugaauug

SEQ ID NO: 90698 - RNA, 22 nt, Human
ccuguauggcuauuccuuggac

SEQ ID NO: 90699 - RNA, 22 nt, Human
ccuguauuagguagacaacuau

SEQ ID NO: 90700 - RNA, 22 nt, Human
ccuguauuauuuguaugugcug

SEQ ID NO: 90701 - RNA, 22 nt, Human
ccuguauucaauuuugugugau

SEQ ID NO: 90702 - RNA, 22 nt, Human
ccugucacgaugacugcacucu

SEQ ID NO: 90703 - RNA, 18 nt, Human
ccugucacguccaggccu

SEQ ID NO: 90704 - RNA, 22 nt, Human
ccugucacuguugcagccagcu

SEQ ID NO: 90705 - RNA, 22 nt, Human
ccugucagaugaaguaauugug

SEQ ID NO: 90706 - RNA, 22 nt, Human
ccugucagcugauggcuaugua

SEQ ID NO: 90707 - RNA, 22 nt, Human
ccugucaggguuugccucagaa

SEQ ID NO: 90708 - RNA, 22 nt, Human
ccugucauaauguccgauguca

SEQ ID NO: 90709 - RNA, 22 nt, Human
ccugucucuuucaaucugagag

SEQ ID NO: 90710 - RNA, 22 nt, Human
ccugucugaaggcagggggaug

SEQ ID NO: 90711 - RNA, 22 nt, Human
ccugucugagccagggugggca

SEQ ID NO: 90712 - RNA, 22 nt, Human
ccugucugcaagggguggaucc

SEQ ID NO: 90713 - RNA, 22 nt, Human
ccugucuggccaccagggcgau

SEQ ID NO: 90714 - RNA, 22 nt, Human
ccugucuggggacucccugggu

SEQ ID NO: 90715 - RNA, 22 nt, Human
ccugucuguaucgguucagagu

SEQ ID NO: 90716 - RNA, 22 nt, Human
ccugucuguccucucaugagcc

SEQ ID NO: 90717 - RNA, 22 nt, Human
ccugucuguccuuugcauucuu

SEQ ID NO: 90718 - RNA, 23 nt, Human
ccugucugugcuggguggacaca

SEQ ID NO: 90719 - RNA, 22 nt, Human
ccugucuguucugacuggucag

SEQ ID NO: 90720 - RNA, 22 nt, Human
ccugucuuagggaaagacugga

SEQ ID NO: 90721 - RNA, 17 nt, Human
ccugucuuguuucugcc

SEQ ID NO: 90722 - RNA, 22 nt, Human
ccugugaauccaucauuauuuc

SEQ ID NO: 90723 - RNA, 23 nt, Human
ccugugacacuguuugugguaag

SEQ ID NO: 90724 - RNA, 19 nt, Human
ccugugacuaucuuuguaa

SEQ ID NO: 90725 - RNA, 19 nt, Human
ccugugagaggacaggugu

SEQ ID NO: 90726 - RNA, 22 nt, Human
ccugugagucaaccccuccuug

SEQ ID NO: 90727 - RNA, 22 nt, Human
ccugugcagcccuugccaguuu

SEQ ID NO: 90728 - RNA, 21 nt, Human
ccugugccagucuauguguuc

SEQ ID NO: 90729 - RNA, 22 nt, Human
ccugugccauccugagcauccc

SEQ ID NO: 90730 - RNA, 22 nt, Human
ccugugcuucagcuggaggagg

SEQ ID NO: 90731 - RNA, 22 nt, Human
ccugugcuuuaggccucaaacu

SEQ ID NO: 90732 - RNA, 22 nt, Human
gagggagaaggacuaucaggcu

SEQ ID NO: 90733 - RNA, 22 nt, Human
gagggagagugauggaccauug

SEQ ID NO: 90734 - RNA, 22 nt, Human
gagggagccgccacagacuggg

SEQ ID NO: 90735 - RNA, 22 nt, Human
gagggagcuaugaauagaagaa

SEQ ID NO: 90736 - RNA, 22 nt, Human
gagggagcuugauggauguuug

SEQ ID NO: 90737 - RNA, 22 nt, Human
gagggagggacuagcauucucu

SEQ ID NO: 90738 - RNA, 22 nt, Human
gagggaguaacguacuacagug

SEQ ID NO: 90739 - RNA, 22 nt, Human
gagggagucugugcaaagaauu

SEQ ID NO: 90740 - RNA, 22 nt, Human
gagggauggugugagaggcuca

SEQ ID NO: 90741 - RNA, 22 nt, Human
gagggaugucaggggaccuugg

SEQ ID NO: 90742 - RNA, 22 nt, Human
gagggcaaaacagagaagaugu

SEQ ID NO: 90743 - RNA, 22 nt, Human
gagggcagagacagugauucac

SEQ ID NO: 90744 - RNA, 20 nt, Human
gagggcaggcacccauuuca

SEQ ID NO: 90745 - RNA, 22 nt, Human
gagggcauaguuaaauaggagg

SEQ ID NO: 90746 - RNA, 22 nt, Human
gagggccacguucagggcucuc

SEQ ID NO: 90747 - RNA, 22 nt, Human
gagggccaggcggagacaggcg

SEQ ID NO: 90748 - RNA, 22 nt, Human
gagggcucugaaaggaggucac

SEQ ID NO: 90749 - RNA, 23 nt, Human
gagggcucugagugcuugggcca

SEQ ID NO: 90750 - RNA, 22 nt, Human
gagggcugauaaaugcgcaugg

SEQ ID NO: 90751 - RNA, 22 nt, Human
gagggcugaugcuuacuuauuu

SEQ ID NO: 90752 - RNA, 22 nt, Human
gagggcugauguugccaccuca

SEQ ID NO: 90753 - RNA, 22 nt, Human
gagggcugcaaugagacagaga

SEQ ID NO: 90754 - RNA, 22 nt, Human
gagggcugcuggaaaaaugcag

SEQ ID NO: 90755 - RNA, 22 nt, Human
gagggcuguggggcaugaccag

SEQ ID NO: 90756 - RNA, 22 nt, Human
gaggggaaaguucugcacaagg

SEQ ID NO: 90757 - RNA, 16 nt, Human
gaggggagcaguaggc

SEQ ID NO: 90758 - RNA, 22 nt, Human
gagugccuuccccaugcuuugg

SEQ ID NO: 90759 - RNA, 22 nt, Human
gagugcguguuuggggaugugg

SEQ ID NO: 90760 - RNA, 22 nt, Human
gagugcugagcccacuuccuug

SEQ ID NO: 90761 - RNA, 22 nt, Human
gagugcugcuaaugcaagggug

SEQ ID NO: 90762 - RNA, 22 nt, Human
gagugcugcuugggauagugag

SEQ ID NO: 90763 - RNA, 22 nt, Human
gagugcuugcauauuuauuguc

SEQ ID NO: 90764 - RNA, 22 nt, Human
gagugcuuugucuuguaauucu

SEQ ID NO: 90765 - RNA, 22 nt, Human
gaguggcuauugauccgugaug

SEQ ID NO: 90766 - RNA, 22 nt, Human
gaguggcucccuggguuuggca

SEQ ID NO: 90767 - RNA, 22 nt, Human
gaguggcuccuuacaaguucca

SEQ ID NO: 90768 - RNA, 22 nt, Human
gaguggcugaguaagaggggag

SEQ ID NO: 90769 - RNA, 15 nt, Human
gaguggcuggugaaa

SEQ ID NO: 90770 - RNA, 20 nt, Human
gagugggccauggagugaga

SEQ ID NO: 90771 - RNA, 21 nt, Human
gagugggcugagauggggcug

SEQ ID NO: 90772 - RNA, 23 nt, Human
gaguggggagaaauugguuaaac

SEQ ID NO: 90773 - RNA, 22 nt, Human
gaguggggcccacugcugggug

SEQ ID NO: 90774 - RNA, 22 nt, Human
gaguggggcguggauccagcgu

SEQ ID NO: 90775 - RNA, 22 nt, Human
gaguggggucugggcaucaguc

SEQ ID NO: 90776 - RNA, 22 nt, Human
gagugggugacagaaggaggua

SEQ ID NO: 90777 - RNA, 22 nt, Human
gagugguaguuucuagaggugu

SEQ ID NO: 90778 - RNA, 22 nt, Human
gagugucacaggguaauuguuu

SEQ ID NO: 90779 - RNA, 21 nt, Human
gagugucagcaagagguuugg

SEQ ID NO: 90780 - RNA, 22 nt, Human
gagugucagcagggcagagcac

SEQ ID NO: 90781 - RNA, 22 nt, Human
gagugucagugccuggcuuguu

SEQ ID NO: 90782 - RNA, 22 nt, Human
gagugucagugcuuggggcuac

SEQ ID NO: 90783 - RNA, 22 nt, Human
gagugugguaugcucugaggcu

SEQ ID NO: 90784 - RNA, 22 nt, Human
gaguguguucuuuaugcuguga

SEQ ID NO: 90785 - RNA, 22 nt, Human
gaguguucccacaccccaguug

SEQ ID NO: 90786 - RNA, 22 nt, Human
gaguguuuuacucaaagaaaga

SEQ ID NO: 90787 - RNA, 22 nt, Human
gaguuaaaggaaaauaacuuua

SEQ ID NO: 90788 - RNA, 22 nt, Human
gaguuaaaguaccuuuguaugu

SEQ ID NO: 90789 - RNA, 22 nt, Human
gaguuaaugaggccaagggcag

SEQ ID NO: 90790 - RNA, 22 nt, Human
gaguuauaaccuaguuuaacug

SEQ ID NO: 90791 - RNA, 22 nt, Human
gaguuauuaauggcugaguuug

SEQ ID NO: 90792 - RNA, 19 nt, Human
gaguuauugccagggcaug

SEQ ID NO: 90793 - RNA, 22 nt, Human
gaguuauuucagaaggaaagau

SEQ ID NO: 90794 - RNA, 22 nt, Human
gaguuauuuugagcagaugguu

SEQ ID NO: 90795 - RNA, 22 nt, Human
gaguucaguguuucuaguagug

SEQ ID NO: 90796 - RNA, 22 nt, Human
gaguucuaaaggcagaacauaa

SEQ ID NO: 90797 - RNA, 22 nt, Human
gaguucuguuacgugucaccaa

SEQ ID NO: 90798 - RNA, 22 nt, Human
gaguucuuaggcaaacaacucu

SEQ ID NO: 90799 - RNA, 22 nt, Human
gaguucuucuauauaguaugag

SEQ ID NO: 90800 - RNA, 22 nt, Human
gaguuggcuacucucugaggcu

SEQ ID NO: 90801 - RNA, 22 nt, Human
gaguuggcuguucgaagguagc

SEQ ID NO: 90802 - RNA, 22 nt, Human
gaguuuaaauaacacauuucca

SEQ ID NO: 90803 - RNA, 22 nt, Human
gaguuuagccaauuuggucccc

SEQ ID NO: 90804 - RNA, 18 nt, Human
gaguuuagguuguagaau

SEQ ID NO: 90805 - RNA, 22 nt, Human
gaguuuauugucuuccaggcuu

SEQ ID NO: 90806 - RNA, 22 nt, Human
gaguuuggguggaaggagggua

SEQ ID NO: 90807 - RNA, 22 nt, Human
gaguuugugggaauggaguauu

SEQ ID NO: 90808 - RNA, 22 nt, Human
gaguuuuaaccucagcucucug

SEQ ID NO: 90809 - RNA, 22 nt, Human
gaguuuuuccaaggucacauga

SEQ ID NO: 90810 - RNA, 21 nt, Human
gauaaaaugggccuugguccu

SEQ ID NO: 90811 - RNA, 22 nt, Human
gauaaacauucuugcacaugug

SEQ ID NO: 90812 - RNA, 22 nt, Human
gauaaagggggaccaaaugacu

SEQ ID NO: 90813 - RNA, 22 nt, Human
gauaaauuaucagggguuuaaa

SEQ ID NO: 90814 - RNA, 22 nt, Human
gauaaauugcacuuuuucuuac

SEQ ID NO: 90815 - RNA, 22 nt, Human
gauaacaauaugaaguagauau

SEQ ID NO: 90816 - RNA, 22 nt, Human
gauaacauuuugaagugcuagu

SEQ ID NO: 90817 - RNA, 22 nt, Human
gauaagcacuauauaaguauuu

SEQ ID NO: 90818 - RNA, 22 nt, Human
gauaagcagcagccguuauagg

SEQ ID NO: 90819 - RNA, 22 nt, Human
gauaauccaagauugccucacu

SEQ ID NO: 90820 - RNA, 22 nt, Human
gauaauuuaagucuugggggcu

SEQ ID NO: 90821 - RNA, 22 nt, Human
gauaauuugauaccucaaucag

SEQ ID NO: 90822 - RNA, 22 nt, Human
gauaauuuuagucugaaaauug

SEQ ID NO: 90823 - RNA, 22 nt, Human
gauacaaaauauaaauggagag

SEQ ID NO: 90824 - RNA, 20 nt, Human
gauacacagcacagagggcc

SEQ ID NO: 90825 - RNA, 15 nt, Human
gauacacaugacugg

SEQ ID NO: 90826 - RNA, 22 nt, Human
gauacacaugcaugugcaugua

SEQ ID NO: 90827 - RNA, 22 nt, Human
gauacauuccauuucuacuuaa

SEQ ID NO: 90828 - RNA, 22 nt, Human
gauacauugaggguggaggacc

SEQ ID NO: 90829 - RNA, 22 nt, Human
gauacuugaggagaucaccaca

SEQ ID NO: 90830 - RNA, 22 nt, Human
gauagaaagaauauagauucca

SEQ ID NO: 90831 - RNA, 22 nt, Human
gauagagacuauaaugcucuuu

SEQ ID NO: 90832 - RNA, 22 nt, Human
gauagauaaaacuauauuuuca

SEQ ID NO: 90833 - RNA, 22 nt, Human
gauagcagcucuggggucagac

SEQ ID NO: 90834 - RNA, 23 nt, Human
gauaggcugguuaguguaucugu

SEQ ID NO: 90835 - RNA, 22 nt, Human
gauauacauagguuucuaugca

SEQ ID NO: 90836 - RNA, 22 nt, Human
gauaucaugggaagguguacuu

SEQ ID NO: 90837 - RNA, 22 nt, Human
gauauguaccaccucuuaaaag

SEQ ID NO: 90838 - RNA, 22 nt, Human
gauauucaaguggaauuauucu

SEQ ID NO: 90839 - RNA, 22 nt, Human
gauauuccugaaggacaggguu

SEQ ID NO: 90840 - RNA, 22 nt, Human
gauauucuaccugcugaccaag

SEQ ID NO: 90841 - RNA, 22 nt, Human
gauauugcaccucuaauacauu

SEQ ID NO: 90842 - RNA, 22 nt, Human
gauauugugaugaugucuuugg

SEQ ID NO: 90843 - RNA, 22 nt, Human
gauauuuucgcagggagaauuc

SEQ ID NO: 90844 - RNA, 22 nt, Human
gaucaacaacuuuugaauagcu

SEQ ID NO: 90845 - RNA, 22 nt, Human
gaucaaccacgccggguugcca

SEQ ID NO: 90846 - RNA, 22 nt, Human
gaucaaggcaguagggccagcu

SEQ ID NO: 90847 - RNA, 22 nt, Human
gaucaaugguguaacuuguccu

SEQ ID NO: 90848 - RNA, 22 nt, Human
gaucaccaguuguagguauuuu

SEQ ID NO: 90849 - RNA, 23 nt, Human
ccuguggcaaguagaugagauga

SEQ ID NO: 90850 - RNA, 22 nt, Human
ccuguggcacaugcagggauuc

SEQ ID NO: 90851 - RNA, 19 nt, Human
ccuguggcagaguggaaac

SEQ ID NO: 90852 - RNA, 22 nt, Human
ccuguggcugccacuuggguga

SEQ ID NO: 90853 - RNA, 22 nt, Human
ccuguggcugguaguaucguuu

SEQ ID NO: 90854 - RNA, 22 nt, Human
ccugugggagguucugugaguc

SEQ ID NO: 90855 - RNA, 22 nt, Human
ccugugggcuugaguguagggu

SEQ ID NO: 90856 - RNA, 22 nt, Human
ccuguggggccaucucagucac

SEQ ID NO: 90857 - RNA, 21 nt, Human
ccuguggucuggagggagcac

SEQ ID NO: 90858 - RNA, 21 nt, Human
ccuguggugccagaucgccag

SEQ ID NO: 90859 - RNA, 22 nt, Human
ccugugucaccggaacggagga

SEQ ID NO: 90860 - RNA, 22 nt, Human
ccugugucagccccugccucca

SEQ ID NO: 90861 - RNA, 22 nt, Human
ccugugucuuccccacuggugu

SEQ ID NO: 90862 - RNA, 22 nt, Human
ccugugucuuugccucaggguc

SEQ ID NO: 90863 - RNA, 22 nt, Human
ccugugugcacacgaggccaug

SEQ ID NO: 90864 - RNA, 22 nt, Human
ccugugugcugaugacgacaga

SEQ ID NO: 90865 - RNA, 22 nt, Human
ccuguguggccaggcuggaguc

SEQ ID NO: 90866 - RNA, 19 nt, Human
ccugugugggguagagauc

SEQ ID NO: 90867 - RNA, 22 nt, Human
cuccugggagcuguggcagagc

SEQ ID NO: 90868 - RNA, 21 nt, Human
cuccugggcuaagauauagug

SEQ ID NO: 90869 - RNA, 22 nt, Human
cuccugggcuaugucugcuugg

SEQ ID NO: 90870 - RNA, 22 nt, Human
cuccuggugacucccagauaaa

SEQ ID NO: 90871 - RNA, 23 nt, Human
cuccuggugcugcuaucaggggu

SEQ ID NO: 90872 - RNA, 22 nt, Human
cuccuggugcuggggcugccgc

SEQ ID NO: 90873 - RNA, 22 nt, Human
cuccugucaauaggcuccuggc

SEQ ID NO: 90874 - RNA, 22 nt, Human
cuaguagacagaaauguccagu

SEQ ID NO: 90875 - RNA, 22 nt, Human
cuagucacgucuuucaguuacc

SEQ ID NO: 90876 - RNA, 22 nt, Human
cuagucucuggaggucagggcu

SEQ ID NO: 90877 - RNA, 22 nt, Human
cuagugaaauuugcaaguaauu

SEQ ID NO: 90878 - RNA, 22 nt, Human
cuaguguuuauuaacauaauuc

SEQ ID NO: 90879 - RNA, 22 nt, Human
cuaguguuuauuaaucaugagg

SEQ ID NO: 90880 - RNA, 22 nt, Human
cuaguguuuggaagucauagcc

SEQ ID NO: 90881 - RNA, 22 nt, Human
cuauaacuggguauuagacuac

SEQ ID NO: 90882 - RNA, 22 nt, Human
cuauauuuggugagggaugucu

SEQ ID NO: 90883 - RNA, 22 nt, Human
cuaucauuuuacaugguuggug

SEQ ID NO: 90884 - RNA, 22 nt, Human
cuauccauauccugggcauggc

SEQ ID NO: 90885 - RNA, 22 nt, Human
cuaucuuuuguucauuuugagu

SEQ ID NO: 90886 - RNA, 22 nt, Human
cuaugaccccagcaugaauaag

SEQ ID NO: 90887 - RNA, 22 nt, Human
cuaugcagaauuuagugacuua

SEQ ID NO: 90888 - RNA, 22 nt, Human
cuauggucuggaccgagguccu

SEQ ID NO: 90889 - RNA, 22 nt, Human
cuauggugauagaaaucagaau

SEQ ID NO: 90890 - RNA, 22 nt, Human
cuauguuuaucuguauuucugu

SEQ ID NO: 90891 - RNA, 22 nt, Human
cuauuaaacacuacugugcacu

SEQ ID NO: 90892 - RNA, 22 nt, Human
cuauuaaauacucuucaaauug

SEQ ID NO: 90893 - RNA, 22 nt, Human
cuauuacugacuucuguauuua

SEQ ID NO: 90894 - RNA, 22 nt, Human
cuauuagguuggugcaaaagua

SEQ ID NO: 90895 - RNA, 22 nt, Human
cuauuauuagcaaaagguggau

SEQ ID NO: 90896 - RNA, 22 nt, Human
cuauuauuauccuaauuucugu

SEQ ID NO: 90897 - RNA, 22 nt, Human
cuauuauuuccucaucuauaaa

SEQ ID NO: 90898 - RNA, 22 nt, Human
cuauucaauuuugcuauuguag

SEQ ID NO: 90899 - RNA, 22 nt, Human
cuauucagguguccauuaaucc

SEQ ID NO: 90900 - RNA, 22 nt, Human
cuauucaguaagccaaaaccau

SEQ ID NO: 90901 - RNA, 22 nt, Human
cuauucugcuugaaauuauucu

SEQ ID NO: 90902 - RNA, 22 nt, Human
cuauucuguguauuuacuggcu

SEQ ID NO: 90903 - RNA, 22 nt, Human
cuauugaaaguguacaauucaa

SEQ ID NO: 90904 - RNA, 21 nt, Human
cuauuggaaaagaaaauauuu

SEQ ID NO: 90905 - RNA, 22 nt, Human
cuauuguuucuaugcucugagg

SEQ ID NO: 90906 - RNA, 22 nt, Human
cuauuuauguccaaguguuuua

SEQ ID NO: 90907 - RNA, 15 nt, Human
cuauuucauccuucu

SEQ ID NO: 90908 - RNA, 22 nt, Human
cuauuucuaaaccuauaaguga

SEQ ID NO: 90909 - RNA, 23 nt, Human
cuauuucucauaguucaggucuu

SEQ ID NO: 90910 - RNA, 22 nt, Human
cuauuuggauguuagccucagu

SEQ ID NO: 90911 - RNA, 22 nt, Human
cuauuuggccaagcugcccaca

SEQ ID NO: 90912 - RNA, 22 nt, Human
cuauuuucccauaugguugaca

SEQ ID NO: 90913 - RNA, 22 nt, Human
cucaaagacaaaaaucugaggu

SEQ ID NO: 90914 - RNA, 22 nt, Human
cucaaauaccucuccaugugac

SEQ ID NO: 90915 - RNA, 22 nt, Human
cucaaauauaagcuaaaugugg

SEQ ID NO: 90916 - RNA, 22 nt, Human
cucaacagcucugccauacucc

SEQ ID NO: 90917 - RNA, 23 nt, Human
cucaacauccauucuugcccuuc

SEQ ID NO: 90918 - RNA, 22 nt, Human
cucaagaaggaugagcuauugc

SEQ ID NO: 90919 - RNA, 22 nt, Human
cucaagaucaucaauauaccaa

SEQ ID NO: 90920 - RNA, 22 nt, Human
cucaagaugucagggcaccugc

SEQ ID NO: 90921 - RNA, 22 nt, Human
cucaaggaaagucuggagaaga

SEQ ID NO: 90922 - RNA, 20 nt, Human
cucaaguaagguuauaaggu

SEQ ID NO: 90923 - RNA, 22 nt, Human
cucaagucagaaauaaaagcau

SEQ ID NO: 90924 - RNA, 22 nt, Human
cucaagucugaguacuggcucu

SEQ ID NO: 90925 - RNA, 22 nt, Human
cucaagucugauggguuagguu

SEQ ID NO: 90926 - RNA, 22 nt, Human
cucacacugugccaaauccuuu

SEQ ID NO: 90927 - RNA, 22 nt, Human
cucacagauauuugcuucaggu

SEQ ID NO: 90928 - RNA, 22 nt, Human
cucacagauguucuccuuuagg

SEQ ID NO: 90929 - RNA, 22 nt, Human
cucacagcagcucugcgagaua

SEQ ID NO: 90930 - RNA, 22 nt, Human
cucacagcugcuucaggaucca

SEQ ID NO: 90931 - RNA, 22 nt, Human
cucacaggagaaagucaugguc

SEQ ID NO: 90932 - RNA, 22 nt, Human
cucacaggucaugugguggcuu

SEQ ID NO: 90933 - RNA, 20 nt, Human
cucacagucaaugcagaggu

SEQ ID NO: 90934 - RNA, 22 nt, Human
cucacaguuggcucauuaauga

SEQ ID NO: 90935 - RNA, 22 nt, Human
cucaccacagagccuguccagc

SEQ ID NO: 90936 - RNA, 22 nt, Human
cucacugugccuuuucccaaac

SEQ ID NO: 90937 - RNA, 22 nt, Human
cucacuuagcagguuaauauca

SEQ ID NO: 90938 - RNA, 22 nt, Human
cucagaaacggagcugccauuu

SEQ ID NO: 90939 - RNA, 22 nt, Human
cucagaaaggguugcugagggc

SEQ ID NO: 90940 - RNA, 22 nt, Human
cucagaaaggugccauuuaugu

SEQ ID NO: 90941 - RNA, 22 nt, Human
cucagaaagugacaggggggug

SEQ ID NO: 90942 - RNA, 22 nt, Human
cucagaaauuacaaaagggaca

SEQ ID NO: 90943 - RNA, 22 nt, Human
cucagaagaaucagcagcuauu

SEQ ID NO: 90944 - RNA, 22 nt, Human
cucagaauuacaucccauuuua

SEQ ID NO: 90945 - RNA, 22 nt, Human
cucagaauuuagggcucugagg

SEQ ID NO: 90946 - RNA, 21 nt, Human
cucagacagggaggcucuggg

SEQ ID NO: 90947 - RNA, 22 nt, Human
cucagacuagccuguaccgaca

SEQ ID NO: 90948 - RNA, 22 nt, Human
cucagacuggagccccaaggac

SEQ ID NO: 90949 - RNA, 21 nt, Human
cucagagaaaugucugggagc

SEQ ID NO: 90950 - RNA, 22 nt, Human
cucagagaagucuuugcuaaac

SEQ ID NO: 90951 - RNA, 22 nt, Human
cucagagagacaaugugggaca

SEQ ID NO: 90952 - RNA, 17 nt, Human
cucagagaggguaagua

SEQ ID NO: 90953 - RNA, 22 nt, Human
cucagagcccaggguacacccg

SEQ ID NO: 90954 - RNA, 22 nt, Human
cucagagcucagcuuuguuagu

SEQ ID NO: 90955 - RNA, 22 nt, Human
cucagagcucgugggaccuugg

SEQ ID NO: 90956 - RNA, 22 nt, Human
cucagagcugaggccagggaca

SEQ ID NO: 90957 - RNA, 22 nt, Human
cucagaggaggcagggugugcc

SEQ ID NO: 90958 - RNA, 22 nt, Human
cucagaggcaagcaaggagcug

SEQ ID NO: 90959 - RNA, 23 nt, Human
cucagaggccuguccaggguggu

SEQ ID NO: 90960 - RNA, 22 nt, Human
cucagagggucuccuccagaau

SEQ ID NO: 90961 - RNA, 22 nt, Human
cucagaggguugaaggugcucu

SEQ ID NO: 90962 - RNA, 22 nt, Human
cucagaguccccacaucugggu

SEQ ID NO: 90963 - RNA, 22 nt, Human
cucagagucccuucccucgugg

SEQ ID NO: 90964 - RNA, 22 nt, Human
cucagcaagacccccaccgugu

SEQ ID NO: 90965 - RNA, 22 nt, Human
cucagcaccccgacaggacauu

SEQ ID NO: 90966 - RNA, 22 nt, Human
cucagcacuuuggaaggcugau

SEQ ID NO: 90967 - RNA, 19 nt, Human
cucagcacuuuuacacagg

SEQ ID NO: 90968 - RNA, 23 nt, Human
cucagcagccugcugcagauaag

SEQ ID NO: 90969 - RNA, 17 nt, Human
cucagcagggcucacuu

SEQ ID NO: 90970 - RNA, 23 nt, Human
cucagcaggucaggccccuuccu

SEQ ID NO: 90971 - RNA, 22 nt, Human
cucagcaggucuuggguagggg

SEQ ID NO: 90972 - RNA, 22 nt, Human
cucagcaguaaacguccggaac

SEQ ID NO: 90973 - RNA, 22 nt, Human
cucagcccagcccaggaccagg

SEQ ID NO: 90974 - RNA, 22 nt, Human
cucagccugugaagagcagagg

SEQ ID NO: 90975 - RNA, 16 nt, Human
cucagcuaaggagagg

SEQ ID NO: 90976 - RNA, 17 nt, Human
cucccccccacgugucc

SEQ ID NO: 90977 - RNA, 22 nt, Human
cuccccuuccgccagcucuuga

SEQ ID NO: 90978 - RNA, 22 nt, Human
cucccucacacccuugcccaga

SEQ ID NO: 90979 - RNA, 22 nt, Human
cucccucaccaugacccgcugu

SEQ ID NO: 90980 - RNA, 22 nt, Human
cucccugaccuggauuccaggc

SEQ ID NO: 90981 - RNA, 22 nt, Human
cucccugaggacaggcccuguc

SEQ ID NO: 90982 - RNA, 22 nt, Human
cucccuggaggcccagaccugg

SEQ ID NO: 90983 - RNA, 22 nt, Human
cucccuggaggugagcuggcac

SEQ ID NO: 90984 - RNA, 22 nt, Human
cucccuggcuuuguccugaggc

SEQ ID NO: 90985 - RNA, 22 nt, Human
cucccuugcuucuggcauuuug

SEQ ID NO: 90986 - RNA, 22 nt, Human
cuccgaacaguggcuccaaggc

SEQ ID NO: 90987 - RNA, 22 nt, Human
cuccgcuuguguauaccuccaa

SEQ ID NO: 90988 - RNA, 22 nt, Human
cuccuacacauagaugcuuuca

SEQ ID NO: 90989 - RNA, 22 nt, Human
cuccuacauaacccagcgaacu

SEQ ID NO: 90990 - RNA, 19 nt, Human
cuccucagucccagagguc

SEQ ID NO: 90991 - RNA, 22 nt, Human
cucaggacuuucaaauagaaau

SEQ ID NO: 90992 - RNA, 22 nt, Human
cucaggagaugacagaagguau

SEQ ID NO: 90993 - RNA, 22 nt, Human
cucaggaggaugacugccuugg

SEQ ID NO: 90994 - RNA, 22 nt, Human
cucaggaggccauucucaaggu

SEQ ID NO: 90995 - RNA, 22 nt, Human
cucaggauagcugcgcagccug

SEQ ID NO: 90996 - RNA, 22 nt, Human
cucaggaugcaauuccaucaag

SEQ ID NO: 90997 - RNA, 22 nt, Human
cucaggauguacuacagaaggc

SEQ ID NO: 90998 - RNA, 22 nt, Human
cucaggaugucggugacuauug

SEQ ID NO: 90999 - RNA, 22 nt, Human
cucaggccugaguggcaguccc

SEQ ID NO: 91000 - RNA, 18 nt, Human
cucaggccuuucccugug

SEQ ID NO: 91001 - RNA, 22 nt, Human
cucaggcuaagaaggccaagug

SEQ ID NO: 91002 - RNA, 22 nt, Human
cucaggcucauaucccaucagc

SEQ ID NO: 91003 - RNA, 22 nt, Human
cucaggcuccagacuuccgucc

SEQ ID NO: 91004 - RNA, 22 nt, Human
cucaggcucuguacucccuuug

SEQ ID NO: 91005 - RNA, 22 nt, Human
cucaggcugcccugacagcccc

SEQ ID NO: 91006 - RNA, 22 nt, Human
cucaggcugugccaccugugug

SEQ ID NO: 91007 - RNA, 22 nt, Human
cucagggacuuggauccuggcc

SEQ ID NO: 91008 - RNA, 22 nt, Human
cucagggagguccugugcugaa

SEQ ID NO: 91009 - RNA, 22 nt, Human
cucagggaguagcacaugugga

SEQ ID NO: 91010 - RNA, 23 nt, Human
cucagggauagaaaggaagacag

SEQ ID NO: 91011 - RNA, 22 nt, Human
cucagggcaguauggcugagag

SEQ ID NO: 91012 - RNA, 22 nt, Human
cucagggcggcgggcagcccag

SEQ ID NO: 91013 - RNA, 22 nt, Human
cucagggcuggaaagccaggaa

SEQ ID NO: 91014 - RNA, 22 nt, Human
cucaggggaccuggcuccgagu

SEQ ID NO: 91015 - RNA, 22 nt, Human
cucaggguaaugaaagacgaau

SEQ ID NO: 91016 - RNA, 22 nt, Human
cucaggucacaggauggccagg

SEQ ID NO: 91017 - RNA, 22 nt, Human
cucaggucgcuauuucucuuac

SEQ ID NO: 91018 - RNA, 22 nt, Human
cucagucaguuuuugugagaga

SEQ ID NO: 91019 - RNA, 22 nt, Human
cucagucucuugggcugugaag

SEQ ID NO: 91020 - RNA, 19 nt, Human
cucagucuggcucugccug

SEQ ID NO: 91021 - RNA, 22 nt, Human
cucagugcaaccaaagugaucu

SEQ ID NO: 91022 - RNA, 22 nt, Human
cucagugcuacgguuaccauau

SEQ ID NO: 91023 - RNA, 22 nt, Human
cucagugcuuuggauccuggau

SEQ ID NO: 91024 - RNA, 20 nt, Human
cucaguguauucugggugcu

SEQ ID NO: 91025 - RNA, 22 nt, Human
cucagugucacguuuugccuua

SEQ ID NO: 91026 - RNA, 22 nt, Human
cucaguguuaaauauaagguau

SEQ ID NO: 91027 - RNA, 20 nt, Human
cucaguuuccucauggcuca

SEQ ID NO: 91028 - RNA, 22 nt, Human
cucaguuuccucuucuguugaa

SEQ ID NO: 91029 - RNA, 22 nt, Human
cucaguuucuucauauuguagg

SEQ ID NO: 91030 - RNA, 22 nt, Human
cucauaaaagcuuuguuuacac

SEQ ID NO: 91031 - RNA, 22 nt, Human
cucauacucccagccagcuguc

SEQ ID NO: 91032 - RNA, 22 nt, Human
cucauauauuucugcauucaau

SEQ ID NO: 91033 - RNA, 22 nt, Human
cucaucuaggauaaagcaucuu

SEQ ID NO: 91034 - RNA, 20 nt, Human
cucaucucugagccuccugg

SEQ ID NO: 91035 - RNA, 22 nt, Human
cucaucugauaaaucacucuua

SEQ ID NO: 91036 - RNA, 22 nt, Human
cucauguaagagagcauuaguu

SEQ ID NO: 91037 - RNA, 22 nt, Human
cucaugucuucacccauucuaa

SEQ ID NO: 91038 - RNA, 20 nt, Human
cucauguggcaccaggcacu

SEQ ID NO: 91039 - RNA, 22 nt, Human
cucaugugucugguaggagcuu

SEQ ID NO: 91040 - RNA, 22 nt, Human
cucauuaaaggaaaucaccugc

SEQ ID NO: 91041 - RNA, 22 nt, Human
cucauugauucagugcugcucu

SEQ ID NO: 91042 - RNA, 22 nt, Human
cucauuuauuucucccaaaaca

SEQ ID NO: 91043 - RNA, 22 nt, Human
cuccaaauacagucaucuuggg

SEQ ID NO: 91044 - RNA, 23 nt, Human
cuccaaauacucccaauuguuuu

SEQ ID NO: 91045 - RNA, 22 nt, Human
cuccaaggaagccccaagggau

SEQ ID NO: 91046 - RNA, 18 nt, Human
cuccaaggucucuggcuu

SEQ ID NO: 91047 - RNA, 22 nt, Human
cuccaaguauguuaaaaucuaa

SEQ ID NO: 91048 - RNA, 19 nt, Human
cuccaagugccaaggacag

SEQ ID NO: 91049 - RNA, 19 nt, Human
cuccaaguuaagagggagg

SEQ ID NO: 91050 - RNA, 22 nt, Human
cuccacagagaugcugauugua

SEQ ID NO: 91051 - RNA, 22 nt, Human
cuccacagguguacuguaccuu

SEQ ID NO: 91052 - RNA, 22 nt, Human
cuccacucaacaagcccagugu

SEQ ID NO: 91053 - RNA, 22 nt, Human
cuccacucaccgaggcagagca

SEQ ID NO: 91054 - RNA, 22 nt, Human
cuccacucaggugcuuaaguug

SEQ ID NO: 91055 - RNA, 22 nt, Human
cuccagaaauucaacagcaaau

SEQ ID NO: 91056 - RNA, 22 nt, Human
cuccagaagacccauccucaug

SEQ ID NO: 91057 - RNA, 22 nt, Human
cuccagaauuguccauuggaaa

SEQ ID NO: 91058 - RNA, 22 nt, Human
cuccagacagaucuucuagcag

SEQ ID NO: 91059 - RNA, 20 nt, Human
cuccagacuacagaagagcc

SEQ ID NO: 91060 - RNA, 22 nt, Human
cuccagagagaaaggaggccgc

SEQ ID NO: 91061 - RNA, 22 nt, Human
cuccagagaguccagcucuggg

SEQ ID NO: 91062 - RNA, 22 nt, Human
cuccagagauacacggucuugc

SEQ ID NO: 91063 - RNA, 22 nt, Human
cuccagaggaaagcacauagug

SEQ ID NO: 91064 - RNA, 22 nt, Human
cuccagagguccccgcggcacu

SEQ ID NO: 91065 - RNA, 22 nt, Human
cuccagauuccguuuauucagg

SEQ ID NO: 91066 - RNA, 22 nt, Human
cuccagauucuggaugacuggg

SEQ ID NO: 91067 - RNA, 22 nt, Human
cuccagccucaucuccuggcug

SEQ ID NO: 91068 - RNA, 22 nt, Human
cuccagcucgcgagcucugcuc

SEQ ID NO: 91069 - RNA, 22 nt, Human
cuccagcucuuaacugcggaag

SEQ ID NO: 91070 - RNA, 22 nt, Human
cuccaggaaaauagggaaugag

SEQ ID NO: 91071 - RNA, 22 nt, Human
cuccaggacaugacuuucuugc

SEQ ID NO: 91072 - RNA, 22 nt, Human
cuccaggacugaggacagagcu

SEQ ID NO: 91073 - RNA, 22 nt, Human
cuccaggcccacggccgcggcc

SEQ ID NO: 91074 - RNA, 22 nt, Human
cuccaggcccacgucgaggagg

SEQ ID NO: 91075 - RNA, 22 nt, Human
cuccaggcgccgcuuuugcagu

SEQ ID NO: 91076 - RNA, 22 nt, Human
cuccaggcgcuuaccaagcgcu

SEQ ID NO: 91077 - RNA, 22 nt, Human
cuccaggcuggggugcagguug

SEQ ID NO: 91078 - RNA, 22 nt, Human
cuccagggaaaggggcguccgc

SEQ ID NO: 91079 - RNA, 22 nt, Human
cuccagggagcuguggagguuu

SEQ ID NO: 91080 - RNA, 22 nt, Human
cuccagggagcuuggaaagacc

SEQ ID NO: 91081 - RNA, 20 nt, Human
cuccaggggaagagccuucc

SEQ ID NO: 91082 - RNA, 22 nt, Human
cuccagguaguuauuucaagaa

SEQ ID NO: 91083 - RNA, 22 nt, Human
cuccagguauuacuguuuuccc

SEQ ID NO: 91084 - RNA, 22 nt, Human
cuccagguuuuacaaggucuau

SEQ ID NO: 91085 - RNA, 22 nt, Human
uguggcauggcagaagggcaca

SEQ ID NO: 91086 - RNA, 22 nt, Human
uguggcaugguugcaaggacaa

SEQ ID NO: 91087 - RNA, 22 nt, Human
uguggcauuccaagacgcuuaa

SEQ ID NO: 91088 - RNA, 22 nt, Human
uguggcauugaauaaccuugga

SEQ ID NO: 91089 - RNA, 22 nt, Human
uguggccaaaauaaaaugaggu

SEQ ID NO: 91090 - RNA, 22 nt, Human
uguggccagcagguggcugugu

SEQ ID NO: 91091 - RNA, 22 nt, Human
uguggccaggaaaaggagaugg

SEQ ID NO: 91092 - RNA, 19 nt, Human
uguggccaugguucagcug

SEQ ID NO: 91093 - RNA, 22 nt, Human
uguggcccagaugagugugcua

SEQ ID NO: 91094 - RNA, 22 nt, Human
uguggccuuauuuguauggggg

SEQ ID NO: 91095 - RNA, 17 nt, Human
uguggccuucugagcuu

SEQ ID NO: 91096 - RNA, 22 nt, Human
uguggccuugcagccuggaggu

SEQ ID NO: 91097 - RNA, 22 nt, Human
uguggcucugcccccugguaag

SEQ ID NO: 91098 - RNA, 22 nt, Human
uguggcugaucaaagcgcucag

SEQ ID NO: 91099 - RNA, 22 nt, Human
uguggcugcaggcgauggagga

SEQ ID NO: 91100 - RNA, 22 nt, Human
uguggcugccacccugaagccg

SEQ ID NO: 91101 - RNA, 22 nt, Human
uguggcugggcuaauaggcaaa

SEQ ID NO: 91102 - RNA, 22 nt, Human
uguggcuggucuccgagcgucg

SEQ ID NO: 91103 - RNA, 22 nt, Human
uguggcuguguccaccugcugc

SEQ ID NO: 91104 - RNA, 22 nt, Human
uguggcuuuugcuagcuuugca

SEQ ID NO: 91105 - RNA, 22 nt, Human
ugugggaagagcaguggcagca

SEQ ID NO: 91106 - RNA, 22 nt, Human
ugugggaaucagccaggggggc

SEQ ID NO: 91107 - RNA, 22 nt, Human
ugugggaaugacgaggaagagg

SEQ ID NO: 91108 - RNA, 22 nt, Human
ugugggaaugcugaugggaucu

SEQ ID NO: 91109 - RNA, 22 nt, Human
ugugggacagggacagugauau

SEQ ID NO: 91110 - RNA, 22 nt, Human
ugugggaccucagagggucccc

SEQ ID NO: 91111 - RNA, 22 nt, Human
ugugggaggaacacagccagaa

SEQ ID NO: 91112 - RNA, 22 nt, Human
ugugggaggaauuagaauggga

SEQ ID NO: 91113 - RNA, 22 nt, Human
ugugggaggucuggaaggcucc

SEQ ID NO: 91114 - RNA, 22 nt, Human
ugugggcagauacacagacacg

SEQ ID NO: 91115 - RNA, 22 nt, Human
uguggggacccaugccaugggc

SEQ ID NO: 91116 - RNA, 22 nt, Human
uguggggaccuggcugccaccc

SEQ ID NO: 91117 - RNA, 22 nt, Human
uguggggaggcugcagugcugc

SEQ ID NO: 91118 - RNA, 22 nt, Human
uguggggaucuucuagcuuuuc

SEQ ID NO: 91119 - RNA, 22 nt, Human
ugugggguagcaguuuccgugu

SEQ ID NO: 91120 - RNA, 22 nt, Human
uguggggugugguccaggcauc

SEQ ID NO: 91121 - RNA, 22 nt, Human
ugugggucuuccaaagaagggc

SEQ ID NO: 91122 - RNA, 22 nt, Human
uguggguuuaagaggcagcaug

SEQ ID NO: 91123 - RNA, 22 nt, Human
uguggucagcuacuggucaucu

SEQ ID NO: 91124 - RNA, 22 nt, Human
uguggucuccccagugccagcu

SEQ ID NO: 91125 - RNA, 22 nt, Human
uguggucucguuauguugccca

SEQ ID NO: 91126 - RNA, 22 nt, Human
uguggugagaaacugguagauu

SEQ ID NO: 91127 - RNA, 18 nt, Human
ugugguggagcugccuuc

SEQ ID NO: 91128 - RNA, 22 nt, Human
ugugguggcuauucuggucuca

SEQ ID NO: 91129 - RNA, 22 nt, Human
uguggugguaaugagccagaug

SEQ ID NO: 91130 - RNA, 22 nt, Human
ugugguuuacuguggcgcugcu

SEQ ID NO: 91131 - RNA, 19 nt, Human
ugugguuucccggcggccu

SEQ ID NO: 91132 - RNA, 22 nt, Human
uggcuaagauuuaaauguuugc

SEQ ID NO: 91133 - RNA, 22 nt, Human
uggcuaagcuggggaggccugg

SEQ ID NO: 91134 - RNA, 22 nt, Human
uggcuaauggcauuuccugggu

SEQ ID NO: 91135 - RNA, 22 nt, Human
uggcuacaguggcauaucaaau

SEQ ID NO: 91136 - RNA, 22 nt, Human
uggcuacucaacauguacucau

SEQ ID NO: 91137 - RNA, 23 nt, Human
uggcuacuuuaugagguugagga

SEQ ID NO: 91138 - RNA, 22 nt, Human
uggcuagaauuggguucacagg

SEQ ID NO: 91139 - RNA, 22 nt, Human
uggcuagcccuuguggggagag

SEQ ID NO: 91140 - RNA, 22 nt, Human
uggcuaggaccucugcggagca

SEQ ID NO: 91141 - RNA, 22 nt, Human
uggcuaguaggugaguagugcu

SEQ ID NO: 91142 - RNA, 22 nt, Human
uggcuaugcaaaccugaggcug

SEQ ID NO: 91143 - RNA, 22 nt, Human
uggcuaugguauugauggguuu

SEQ ID NO: 91144 - RNA, 22 nt, Human
uggcucaccuucagaauauacc

SEQ ID NO: 91145 - RNA, 22 nt, Human
uggcucagaggggaagugguuu

SEQ ID NO: 91146 - RNA, 22 nt, Human
uggcucagcauucacuggucuu

SEQ ID NO: 91147 - RNA, 23 nt, Human
uggcucagcuaguuuuccauuuc

SEQ ID NO: 91148 - RNA, 22 nt, Human
uggcucaggagggaucuuugcu

SEQ ID NO: 91149 - RNA, 22 nt, Human
uggcucaggauaauuuucccaa

SEQ ID NO: 91150 - RNA, 22 nt, Human
uggcucagugaagagauaacuu

SEQ ID NO: 91151 - RNA, 22 nt, Human
uggcucagugcauucacaguaa

SEQ ID NO: 91152 - RNA, 22 nt, Human
uggcucaguuaggucagaaaca

SEQ ID NO: 91153 - RNA, 22 nt, Human
uggcucaguuccaucaucugga

SEQ ID NO: 91154 - RNA, 22 nt, Human
uggcucauauugagugauuucu

SEQ ID NO: 91155 - RNA, 22 nt, Human
uggcucaucuuuuuagacuuau

SEQ ID NO: 91156 - RNA, 22 nt, Human
uggcucauucuggggaagucag

SEQ ID NO: 91157 - RNA, 22 nt, Human
uggcucauucuuuagaauauac

SEQ ID NO: 91158 - RNA, 22 nt, Human
uggcuccaaaaacaaaugacau

SEQ ID NO: 91159 - RNA, 22 nt, Human
uggcuccaaaucaacugcuguu

SEQ ID NO: 91160 - RNA, 23 nt, Human
uggcuccaggagaagccagaagc

SEQ ID NO: 91161 - RNA, 22 nt, Human
uggcucccgcagacccugugcu

SEQ ID NO: 91162 - RNA, 22 nt, Human
uggcuccuaggauggugccugg

SEQ ID NO: 91163 - RNA, 22 nt, Human
uggcuccuuccgcagcaugccu

SEQ ID NO: 91164 - RNA, 22 nt, Human
uggcuccuuuccagccugguuu

SEQ ID NO: 91165 - RNA, 21 nt, Human
uggcucgauuuauagcauuuc

SEQ ID NO: 91166 - RNA, 22 nt, Human
uggcucucaggccugcugcguu

SEQ ID NO: 91167 - RNA, 20 nt, Human
uggcucucucuaguaagugg

SEQ ID NO: 91168 - RNA, 22 nt, Human
uggcucugaccagguagaggag

SEQ ID NO: 91169 - RNA, 22 nt, Human
uggcucugagacacaggcucuc

SEQ ID NO: 91170 - RNA, 23 nt, Human
uggcucugagagguucagaugcu

SEQ ID NO: 91171 - RNA, 21 nt, Human
uggcucugagccucauggcug

SEQ ID NO: 91172 - RNA, 22 nt, Human
uggcucugccaccuuucccuaa

SEQ ID NO: 91173 - RNA, 22 nt, Human
uggcucugccacuaacuuggua

SEQ ID NO: 91174 - RNA, 18 nt, Human
uggcucuggacuugcucc

SEQ ID NO: 91175 - RNA, 22 nt, Human
uggcucuggggacaguaagucc

SEQ ID NO: 91176 - RNA, 19 nt, Human
uggcucugucgaaggcaca

SEQ ID NO: 91177 - RNA, 22 nt, Human
uggcucugucgccguuuggaau

SEQ ID NO: 91178 - RNA, 22 nt, Human
uggcucuguggucuuagcaugc

SEQ ID NO: 91179 - RNA, 22 nt, Human
uggcucugugucucccagcagc

SEQ ID NO: 91180 - RNA, 22 nt, Human
uggcucuguugcucgcaguuuu

SEQ ID NO: 91181 - RNA, 22 nt, Human
uggcugaaagccuggccugcca

SEQ ID NO: 91182 - RNA, 22 nt, Human
uggcugaacuaaugugcuguuu

SEQ ID NO: 91183 - RNA, 22 nt, Human
uggcugaaucugcagcaggaag

SEQ ID NO: 91184 - RNA, 22 nt, Human
uggcugacaaauaggugcaguu

SEQ ID NO: 91185 - RNA, 21 nt, Human
uggcugacucuuccuaucauu

SEQ ID NO: 91186 - RNA, 22 nt, Human
uggcugagaccuucccaaauuc

SEQ ID NO: 91187 - RNA, 23 nt, Human
uggcugagcccacuaucuuggcc

SEQ ID NO: 91188 - RNA, 19 nt, Human
uggcugagcuggacugagg

SEQ ID NO: 91189 - RNA, 22 nt, Human
uggcugaggcuggagugcagug

SEQ ID NO: 91190 - RNA, 22 nt, Human
uggcugaggcuuuucuuaaaga

SEQ ID NO: 91191 - RNA, 22 nt, Human
uggcugagggggcaguucagga

SEQ ID NO: 91192 - RNA, 22 nt, Human
uggcugagggggcucugcucag

SEQ ID NO: 91193 - RNA, 22 nt, Human
uggcugaguaaguugugauaug

SEQ ID NO: 91194 - RNA, 22 nt, Human
uggcugaguuacgaacagagca

SEQ ID NO: 91195 - RNA, 22 nt, Human
uggcugaguuccuggcacacgg

SEQ ID NO: 91196 - RNA, 20 nt, Human
uggcugcacaccaggacagg

SEQ ID NO: 91197 - RNA, 22 nt, Human
uggcugcaguucacaggagcaa

SEQ ID NO: 91198 - RNA, 22 nt, Human
uggcugcaguugggcccucaga

SEQ ID NO: 91199 - RNA, 22 nt, Human
uggcugccaauggcuuggaaag

SEQ ID NO: 91200 - RNA, 22 nt, Human
uggcugccagcuccucgccuug

SEQ ID NO: 91201 - RNA, 22 nt, Human
ugggauggcauccugggccuug

SEQ ID NO: 91202 - RNA, 21 nt, Human
ugggaugggucugggaccagc

SEQ ID NO: 91203 - RNA, 22 nt, Human
ugggaugucuuuaggggaagag

SEQ ID NO: 91204 - RNA, 22 nt, Human
ugggauucaccaugggcuucag

SEQ ID NO: 91205 - RNA, 22 nt, Human
ugggcaaagucacauacaugau

SEQ ID NO: 91206 - RNA, 22 nt, Human
ugggcaaaugcuuuuuagucaa

SEQ ID NO: 91207 - RNA, 22 nt, Human
ugggcaagcucuggguggacac

SEQ ID NO: 91208 - RNA, 21 nt, Human
ugggcaaguuuggggguccuc

SEQ ID NO: 91209 - RNA, 22 nt, Human
ugggcaccuagcaacccuucuc

SEQ ID NO: 91210 - RNA, 22 nt, Human
ugggcaccugaggccuggcagg

SEQ ID NO: 91211 - RNA, 22 nt, Human
ugggcacuauggcucugugcac

SEQ ID NO: 91212 - RNA, 22 nt, Human
ugggcacucaggcugaggccgu

SEQ ID NO: 91213 - RNA, 22 nt, Human
ugggcacuguagcuggugcugg

SEQ ID NO: 91214 - RNA, 22 nt, Human
ugggcagacauugaguuuguuc

SEQ ID NO: 91215 - RNA, 22 nt, Human
ugggcagacgcuguuggaaggc

SEQ ID NO: 91216 - RNA, 22 nt, Human
ugggcagacgggagcuugccuu

SEQ ID NO: 91217 - RNA, 22 nt, Human
ugggcagacugagcccuguccc

SEQ ID NO: 91218 - RNA, 22 nt, Human
ugggcagagaguagaggcaacg

SEQ ID NO: 91219 - RNA, 22 nt, Human
ugggcagagaucuggaucaaac

SEQ ID NO: 91220 - RNA, 22 nt, Human
ugggcagagucauacaggagac

SEQ ID NO: 91221 - RNA, 22 nt, Human
ugggcagauguggcucuccuug

SEQ ID NO: 91222 - RNA, 22 nt, Human
ugggcagcagcaaagccagacu

SEQ ID NO: 91223 - RNA, 23 nt, Human
ugggcagcuucugcaugcccacc

SEQ ID NO: 91224 - RNA, 22 nt, Human
ugggcagggagcuggaaccaca

SEQ ID NO: 91225 - RNA, 22 nt, Human
ugggcagggaucucuuuugcaa

SEQ ID NO: 91226 - RNA, 22 nt, Human
ugggcagggucucuguuaucag

SEQ ID NO: 91227 - RNA, 22 nt, Human
ugggcagguuguuauuugacau

SEQ ID NO: 91228 - RNA, 22 nt, Human
ugggcagugagaaaggucaggu

SEQ ID NO: 91229 - RNA, 23 nt, Human
ugggcaucuccucugugccaggc

SEQ ID NO: 91230 - RNA, 22 nt, Human
ugggccacagcucacacaucca

SEQ ID NO: 91231 - RNA, 22 nt, Human
ugggccacauuccaaaccagcu

SEQ ID NO: 91232 - RNA, 22 nt, Human
ugggccacgugacccuuacccu

SEQ ID NO: 91233 - RNA, 23 nt, Human
ugggccacuauagaaaucucuca

SEQ ID NO: 91234 - RNA, 22 nt, Human
ugggccacucuucccugggucu

SEQ ID NO: 91235 - RNA, 22 nt, Human
ugggccacugcuccaaguagcu

SEQ ID NO: 91236 - RNA, 22 nt, Human
ugggccacugcugcggaaggcg

SEQ ID NO: 91237 - RNA, 22 nt, Human
ugggccacuugaaaguggaugu

SEQ ID NO: 91238 - RNA, 22 nt, Human
ugggccagagaguaagaaaggu

SEQ ID NO: 91239 - RNA, 22 nt, Human
ugggccagaggcauggagcuau

SEQ ID NO: 91240 - RNA, 22 nt, Human
ugggccagggcacccaguccag

SEQ ID NO: 91241 - RNA, 22 nt, Human
ugugaggguuuuaagggaauga

SEQ ID NO: 91242 - RNA, 22 nt, Human
ugugagugacaguucccuuggu

SEQ ID NO: 91243 - RNA, 22 nt, Human
ugugaucaggugaucaugugag

SEQ ID NO: 91244 - RNA, 22 nt, Human
ugugaucugccuuggaucugca

SEQ ID NO: 91245 - RNA, 22 nt, Human
ugugaugcuggagugcgaauau

SEQ ID NO: 91246 - RNA, 22 nt, Human
ugugauuacugaauagaaaaua

SEQ ID NO: 91247 - RNA, 22 nt, Human
ugugauucaagaaaguaaaaug

SEQ ID NO: 91248 - RNA, 22 nt, Human
ugugauucucagaagagggaag

SEQ ID NO: 91249 - RNA, 22 nt, Human
ugugauuucacuggugacaugu

SEQ ID NO: 91250 - RNA, 22 nt, Human
ugugcaacuccuuccacagaca

SEQ ID NO: 91251 - RNA, 22 nt, Human
ugugcaauaaucauagugauuu

SEQ ID NO: 91252 - RNA, 22 nt, Human
ugugcacauauacucauauucc

SEQ ID NO: 91253 - RNA, 22 nt, Human
ugugcacauucuaggacuagua

SEQ ID NO: 91254 - RNA, 22 nt, Human
ugugcagagcccacaggcagcu

SEQ ID NO: 91255 - RNA, 22 nt, Human
ugugcaguuucuauguugucca

SEQ ID NO: 91256 - RNA, 22 nt, Human
ugugcauguauugauuuguacc

SEQ ID NO: 91257 - RNA, 22 nt, Human
ugugcauguucucauuucuaac

SEQ ID NO: 91258 - RNA, 22 nt, Human
ugugccaagacuauauugugcu

SEQ ID NO: 91259 - RNA, 22 nt, Human
ugugccaggcacuugcccaggc

SEQ ID NO: 91260 - RNA, 21 nt, Human
ugugccagggauggggagccc

SEQ ID NO: 91261 - RNA, 22 nt, Human
ugugccagucauccagaugugu

SEQ ID NO: 91262 - RNA, 22 nt, Human
ugugccauugagagguuucaga

SEQ ID NO: 91263 - RNA, 22 nt, Human
ugugccauuucuauucugcagc

SEQ ID NO: 91264 - RNA, 22 nt, Human
ugugcccaucucccagcuugac

SEQ ID NO: 91265 - RNA, 22 nt, Human
ugugccucacccugcucuuggc

SEQ ID NO: 91266 - RNA, 18 nt, Human
ugugccucugcaggacgu

SEQ ID NO: 91267 - RNA, 22 nt, Human
ugugccugagucucggcccacc

SEQ ID NO: 91268 - RNA, 22 nt, Human
ugugccugauggucacguggcc

SEQ ID NO: 91269 - RNA, 22 nt, Human
ugugccuggaucucugugacaa

SEQ ID NO: 91270 - RNA, 22 nt, Human
ugugccuggcccagugguguca

SEQ ID NO: 91271 - RNA, 20 nt, Human
ugugccuggcuuuguccuga

SEQ ID NO: 91272 - RNA, 22 nt, Human
ugugccuguugguguagacaua

SEQ ID NO: 91273 - RNA, 22 nt, Human
ugugccuucccucugcugauuu

SEQ ID NO: 91274 - RNA, 22 nt, Human
ugugcgcgugcacgcauacuug

SEQ ID NO: 91275 - RNA, 22 nt, Human
ugugcguggauuccuguacuca

SEQ ID NO: 91276 - RNA, 22 nt, Human
ugugcgugggcacacacauaug

SEQ ID NO: 91277 - RNA, 22 nt, Human
ugugcucacucuaaauuaagau

SEQ ID NO: 91278 - RNA, 22 nt, Human
ugugcuccaucauccauaaucu

SEQ ID NO: 91279 - RNA, 22 nt, Human
ugugcucuaccucagugucauu

SEQ ID NO: 91280 - RNA, 22 nt, Human
ugugcucuugggcaauagcugc

SEQ ID NO: 91281 - RNA, 22 nt, Human
ugugcugacaagaucagaaggu

SEQ ID NO: 91282 - RNA, 22 nt, Human
ugugcugucaguaucaagggau

SEQ ID NO: 91283 - RNA, 22 nt, Human
ugugcugugggacucaggcucc

SEQ ID NO: 91284 - RNA, 22 nt, Human
ugugcuucagguugucgccacg

SEQ ID NO: 91285 - RNA, 22 nt, Human
ugugcuucucacaucacuguug

SEQ ID NO: 91286 - RNA, 22 nt, Human
ugugcuucucuuucucacuuaa

SEQ ID NO: 91287 - RNA, 22 nt, Human
ugugcuuugguuuuacaggaug

SEQ ID NO: 91288 - RNA, 22 nt, Human
ugugcuuuucucugcuccugga

SEQ ID NO: 91289 - RNA, 22 nt, Human
uguggaaaaaccacaaguuugg

SEQ ID NO: 91290 - RNA, 19 nt, Human
uguggaaaaaggagacauu

SEQ ID NO: 91291 - RNA, 22 nt, Human
uguggaaaagccccacaggacu

SEQ ID NO: 91292 - RNA, 22 nt, Human
uguggaaaguggucuaagcaca

SEQ ID NO: 91293 - RNA, 22 nt, Human
uguggaagaacuucuugcuugg

SEQ ID NO: 91294 - RNA, 22 nt, Human
uguggaagugccaaugacaaau

SEQ ID NO: 91295 - RNA, 22 nt, Human
uguggaauauuagauuagguug

SEQ ID NO: 91296 - RNA, 22 nt, Human
uguggacgucauuaaagcagug

SEQ ID NO: 91297 - RNA, 22 nt, Human
uguggacucgcauggcugaggc

SEQ ID NO: 91298 - RNA, 22 nt, Human
uguggagcacuguuccuggcau

SEQ ID NO: 91299 - RNA, 22 nt, Human
uguggagcucagaaguagcagu

SEQ ID NO: 91300 - RNA, 20 nt, Human
uguggaugagguaaggauag

SEQ ID NO: 91301 - RNA, 22 nt, Human
uguggcacuuacauccuaguuu

SEQ ID NO: 91302 - RNA, 22 nt, Human
uguggcagauacagaagaucaa

SEQ ID NO: 91303 - RNA, 21 nt, Human
uguggcagauguugggaggca

SEQ ID NO: 91304 - RNA, 22 nt, Human
uguggcagggauacugaggcag

SEQ ID NO: 91305 - RNA, 22 nt, Human
uguggcagggcgugacauuugg

SEQ ID NO: 91306 - RNA, 22 nt, Human
uguggccaggccccugauggug

SEQ ID NO: 91307 - RNA, 22 nt, Human
uguggccuccuguuccugggua

SEQ ID NO: 91308 - RNA, 23 nt, Human
uguggccugcagcucugguuugg

SEQ ID NO: 91309 - RNA, 22 nt, Human
uguggccuggaaggggcugcuc

SEQ ID NO: 91310 - RNA, 22 nt, Human
uguggcgagaacauuggaccau

SEQ ID NO: 91311 - RNA, 22 nt, Human
uguggcucuccuccugcugccc

SEQ ID NO: 91312 - RNA, 23 nt, Human
uguggcugagaaauugacaacuu

SEQ ID NO: 91313 - RNA, 19 nt, Human
uguggcugagcacuccuua

SEQ ID NO: 91314 - RNA, 21 nt, Human
uguggcugccucuggcccugg

SEQ ID NO: 91315 - RNA, 22 nt, Human
uguggcugcucaggugcagacc

SEQ ID NO: 91316 - RNA, 22 nt, Human
uguggcugugccgucacacgug

SEQ ID NO: 91317 - RNA, 22 nt, Human
uguggcugugguuuucauaaau

SEQ ID NO: 91318 - RNA, 22 nt, Human
ugugggaaaugggaguggaaga

SEQ ID NO: 91319 - RNA, 22 nt, Human
ugugggcaggagcacaagucag

SEQ ID NO: 91320 - RNA, 22 nt, Human
ugugggcccagauucugaggcu

SEQ ID NO: 91321 - RNA, 22 nt, Human
ugugggccugggaaggugacac

SEQ ID NO: 91322 - RNA, 20 nt, Human
ugugggccugugaagcggcg

SEQ ID NO: 91323 - RNA, 22 nt, Human
uguggggacugaguggaggcuu

SEQ ID NO: 91324 - RNA, 22 nt, Human
uguggggccaaagcccagccac

SEQ ID NO: 91325 - RNA, 22 nt, Human
uguggggcugucaggcaacugg

SEQ ID NO: 91326 - RNA, 22 nt, Human
uguggggcuuacaaaggcagau

SEQ ID NO: 91327 - RNA, 22 nt, Human
ugugggucauaguaucguguua

SEQ ID NO: 91328 - RNA, 22 nt, Human
uguggguccuccugugugcccg

SEQ ID NO: 91329 - RNA, 22 nt, Human
ugugggugguaaaauacaauga

SEQ ID NO: 91330 - RNA, 22 nt, Human
uguggguuuguaguuaaguucu

SEQ ID NO: 91331 - RNA, 19 nt, Human
uguggucucuguucucagg

SEQ ID NO: 91332 - RNA, 22 nt, Human
ugugguugaagguuauuacuua

SEQ ID NO: 91333 - RNA, 20 nt, Human
ugugguuuuugccaguugaa

SEQ ID NO: 91334 - RNA, 22 nt, Human
uguguaaaaucugauuaauacu

SEQ ID NO: 91335 - RNA, 22 nt, Human
uguguaaaaugagccuaaaguc

SEQ ID NO: 91336 - RNA, 22 nt, Human
uguguaaauuuauuuacauaaa

SEQ ID NO: 91337 - RNA, 22 nt, Human
uguguacaaacuaacaacauau

SEQ ID NO: 91338 - RNA, 23 nt, Human
uguguacacaauagaugagguuu

SEQ ID NO: 91339 - RNA, 22 nt, Human
uguguacacaaugauugcagag

SEQ ID NO: 91340 - RNA, 22 nt, Human
uguguacacagauaguaauggc

SEQ ID NO: 91341 - RNA, 22 nt, Human
uguguacacgagagguuauaua

SEQ ID NO: 91342 - RNA, 23 nt, Human
uguguacauacauauguacacac

SEQ ID NO: 91343 - RNA, 20 nt, Human
uguguagcaggugcugugcc

SEQ ID NO: 91344 - RNA, 22 nt, Human
uguguagcucauauuaguguua

SEQ ID NO: 91345 - RNA, 22 nt, Human
uguguauaaacaagagucugug

SEQ ID NO: 91346 - RNA, 22 nt, Human
uguguauacaacuuauaggagc

SEQ ID NO: 91347 - RNA, 22 nt, Human
uucacagcuccuuuuacucaac

SEQ ID NO: 91348 - RNA, 18 nt, Human
uucacaggaaaugucuuu

SEQ ID NO: 91349 - RNA, 22 nt, Human
uucacaggaauguaggggucuu

SEQ ID NO: 91350 - RNA, 18 nt, Human
uguuaggaagggcacaca

SEQ ID NO: 91351 - RNA, 22 nt, Human
uuugacaguguuggggcaggcu

SEQ ID NO: 91352 - RNA, 22 nt, Human
uuugacaucuaagaauucuuac

SEQ ID NO: 91353 - RNA, 22 nt, Human
uuugacaugaaguagcuuauaa

SEQ ID NO: 91354 - RNA, 22 nt, Human
uuugacauggaauaacucauuu

SEQ ID NO: 91355 - RNA, 22 nt, Human
uuugacauuauccuguuacugg

SEQ ID NO: 91356 - RNA, 22 nt, Human
uuugacucaagcccucauguua

SEQ ID NO: 91357 - RNA, 22 nt, Human
uuugacucagcaaauucacagg

SEQ ID NO: 91358 - RNA, 22 nt, Human
uuugacuccagagcccauuuuu

SEQ ID NO: 91359 - RNA, 22 nt, Human
uuugacucccaaacugugauuu

SEQ ID NO: 91360 - RNA, 22 nt, Human
uuugacucuagucauagaagug

SEQ ID NO: 91361 - RNA, 22 nt, Human
uuugacucuucuagcaagugug

SEQ ID NO: 91362 - RNA, 22 nt, Human
uuugacucuugucucuuguuag

SEQ ID NO: 91363 - RNA, 22 nt, Human
uuugacuuugggcucuaacuca

SEQ ID NO: 91364 - RNA, 22 nt, Human
uuugagaaacagacgaaagaca

SEQ ID NO: 91365 - RNA, 22 nt, Human
uuugagaaaggggauuuaauuc

SEQ ID NO: 91366 - RNA, 22 nt, Human
uuugagaaguaauucaagacau

SEQ ID NO: 91367 - RNA, 21 nt, Human
uuugagaauuggucagagugc

SEQ ID NO: 91368 - RNA, 22 nt, Human
uuugaguuuuaccuguauuacu

SEQ ID NO: 91369 - RNA, 22 nt, Human
uuugauaauacacaagagaaag

SEQ ID NO: 91370 - RNA, 22 nt, Human
uuugauacuuugugcaauuucu

SEQ ID NO: 91371 - RNA, 22 nt, Human
uuugauagggaaguaagaauga

SEQ ID NO: 91372 - RNA, 19 nt, Human
uuugauaucugaauuaugc

SEQ ID NO: 91373 - RNA, 22 nt, Human
uuugaucagcaagauaaauaga

SEQ ID NO: 91374 - RNA, 22 nt, Human
uuugauccguugcuggugagga

SEQ ID NO: 91375 - RNA, 22 nt, Human
uuugaucuaugcgugguuuccc

SEQ ID NO: 91376 - RNA, 22 nt, Human
uuugaugcuaagauuuaauaaa

SEQ ID NO: 91377 - RNA, 22 nt, Human
uuugauucuaaguucugucaac

SEQ ID NO: 91378 - RNA, 22 nt, Human
uuugauucucaauugcccucug

SEQ ID NO: 91379 - RNA, 20 nt, Human
uuugauuucacaaggccagu

SEQ ID NO: 91380 - RNA, 22 nt, Human
uuugcaaaauuauucccagcau

SEQ ID NO: 91381 - RNA, 18 nt, Human
uuugcaaaggaaguaugg

SEQ ID NO: 91382 - RNA, 22 nt, Human
uuugcaaauaaauaagugcucg

SEQ ID NO: 91383 - RNA, 22 nt, Human
uuugcaaaugcucugcagagcu

SEQ ID NO: 91384 - RNA, 22 nt, Human
uuugcaacagacucaucauuga

SEQ ID NO: 91385 - RNA, 22 nt, Human
uuugcaaguaucaaacauguca

SEQ ID NO: 91386 - RNA, 22 nt, Human
uuugcacagccuuucuggcugc

SEQ ID NO: 91387 - RNA, 22 nt, Human
uuugcagagugcagaagcaucu

SEQ ID NO: 91388 - RNA, 22 nt, Human
uuugcagccacagugccuugua

SEQ ID NO: 91389 - RNA, 22 nt, Human
uuugcaguagacaucuuauuuu

SEQ ID NO: 91390 - RNA, 22 nt, Human
uuugcagucaaauuugcuaaau

SEQ ID NO: 91391 - RNA, 22 nt, Human
uuugcagugauucuugcaguga

SEQ ID NO: 91392 - RNA, 22 nt, Human
uuugcaguguucaucaguauuu

SEQ ID NO: 91393 - RNA, 22 nt, Human
uuugcaguuucauugcugaaau

SEQ ID NO: 91394 - RNA, 22 nt, Human
uuugcauuacuugacuuuaguu

SEQ ID NO: 91395 - RNA, 22 nt, Human
uuugcauuccugccugcauuca

SEQ ID NO: 91396 - RNA, 22 nt, Human
uuugcauuguaauauuuaguuc

SEQ ID NO: 91397 - RNA, 22 nt, Human
uuugcauuguuucaaaagugaa

SEQ ID NO: 91398 - RNA, 22 nt, Human
uuugcauuuugauaagaucacu

SEQ ID NO: 91399 - RNA, 22 nt, Human
uuugcuaaugccucugaaauca

SEQ ID NO: 91400 - RNA, 22 nt, Human
uuuccagucucugccuccaagg

SEQ ID NO: 91401 - RNA, 22 nt, Human
uuuccagugagcaaauguagaa

SEQ ID NO: 91402 - RNA, 22 nt, Human
uuuccagugggccccuugaaau

SEQ ID NO: 91403 - RNA, 22 nt, Human
uuuccaguuguucuagaaagcu

SEQ ID NO: 91404 - RNA, 22 nt, Human
uuuccauauucugcgucugcca

SEQ ID NO: 91405 - RNA, 22 nt, Human
uuuccauauuuggucuuuggga

SEQ ID NO: 91406 - RNA, 22 nt, Human
uuuccauguuggugaaaugagg

SEQ ID NO: 91407 - RNA, 22 nt, Human
uuucccaagaccauagauggaa

SEQ ID NO: 91408 - RNA, 22 nt, Human
uuucccacacaguccacugcag

SEQ ID NO: 91409 - RNA, 22 nt, Human
uuucccagagguaugaauaagu

SEQ ID NO: 91410 - RNA, 22 nt, Human
uuucccagccuccuuugcagcu

SEQ ID NO: 91411 - RNA, 21 nt, Human
uuucccagcugaaaauaaaug

SEQ ID NO: 91412 - RNA, 19 nt, Human
uuucccagucccaggagug

SEQ ID NO: 91413 - RNA, 22 nt, Human
uuucccuuugcacucuacaauu

SEQ ID NO: 91414 - RNA, 22 nt, Human
uuuccuaaggcucauuuuaaaa

SEQ ID NO: 91415 - RNA, 22 nt, Human
uuuccuaagguagugauaauuu

SEQ ID NO: 91416 - RNA, 20 nt, Human
uuuccuaagugguuugcuga

SEQ ID NO: 91417 - RNA, 22 nt, Human
uuuccuagagucucuagaagaa

SEQ ID NO: 91418 - RNA, 22 nt, Human
uuuccuaugauauucuaugugu

SEQ ID NO: 91419 - RNA, 22 nt, Human
uuuccucacucaugucaucagu

SEQ ID NO: 91420 - RNA, 22 nt, Human
uuuccuccuagccuccagccgc

SEQ ID NO: 91421 - RNA, 22 nt, Human
uuuccucuuauacaguguuuau

SEQ ID NO: 91422 - RNA, 22 nt, Human
uuuccugagucagagacaccag

SEQ ID NO: 91423 - RNA, 22 nt, Human
uuuccugucuuuugugaaggau

SEQ ID NO: 91424 - RNA, 22 nt, Human
uuuccugugacuaaucuggaca

SEQ ID NO: 91425 - RNA, 22 nt, Human
uuuccuguucuaguuguugcca

SEQ ID NO: 91426 - RNA, 22 nt, Human
uuuccuguugccaucaagaaug

SEQ ID NO: 91427 - RNA, 22 nt, Human
uuuccuuaaaucuguuucuagu

SEQ ID NO: 91428 - RNA, 22 nt, Human
uuuccuucucagggagcuucaa

SEQ ID NO: 91429 - RNA, 22 nt, Human
uuuccuugcacauugguuucca

SEQ ID NO: 91430 - RNA, 22 nt, Human
uuuccuuuccaaaauucugccu

SEQ ID NO: 91431 - RNA, 22 nt, Human
uuuccuuucugguuuggucaua

SEQ ID NO: 91432 - RNA, 22 nt, Human
uuuccuuugcccaauacauguc

SEQ ID NO: 91433 - RNA, 22 nt, Human
uuuccuuugugcaggccuuggg

SEQ ID NO: 91434 - RNA, 22 nt, Human
uuuccuuuuaagcagucggccu

SEQ ID NO: 91435 - RNA, 22 nt, Human
uuucgagggccuuaaguauucc

SEQ ID NO: 91436 - RNA, 21 nt, Human
uuucgcauguguuaacuguga

SEQ ID NO: 91437 - RNA, 22 nt, Human
uuucuaaaugguggcugcauug

SEQ ID NO: 91438 - RNA, 22 nt, Human
uuucuaacguagacagggaggu

SEQ ID NO: 91439 - RNA, 21 nt, Human
uuucuaaggaggaagaaaaga

SEQ ID NO: 91440 - RNA, 22 nt, Human
uuucuaaggccagagacugcug

SEQ ID NO: 91441 - RNA, 21 nt, Human
uuucuaagugcuugguuuggg

SEQ ID NO: 91442 - RNA, 22 nt, Human
uuucuaauucuaacuggcagag

SEQ ID NO: 91443 - RNA, 22 nt, Human
uuucuacaacacuucugaaucu

SEQ ID NO: 91444 - RNA, 22 nt, Human
uuucuacagaagauacacugcu

SEQ ID NO: 91445 - RNA, 22 nt, Human
uuucuacagguugauggguuug

SEQ ID NO: 91446 - RNA, 22 nt, Human
uuucuacaugucaauccaaacc

SEQ ID NO: 91447 - RNA, 22 nt, Human
uuucuacaugucaguaacugau

SEQ ID NO: 91448 - RNA, 22 nt, Human
uuucuacuaagaaaguugauua

SEQ ID NO: 91449 - RNA, 22 nt, Human
uuucuacuuuggaaugcacuga

SEQ ID NO: 91450 - RNA, 22 nt, Human
uuucuagaaaccaagauauugu

SEQ ID NO: 91451 - RNA, 22 nt, Human
uuucuagaaaguucauguguuu

SEQ ID NO: 91452 - RNA, 17 nt, Human
uuucuagcugugaaccc

SEQ ID NO: 91453 - RNA, 22 nt, Human
uuucuaggcacagugucuuccc

SEQ ID NO: 91454 - RNA, 22 nt, Human
uuucuagggcucuugucuucug

SEQ ID NO: 91455 - RNA, 22 nt, Human
uuucuagucagccauaucuagu

SEQ ID NO: 91456 - RNA, 22 nt, Human
uuucuagucucgaucucuuaau

SEQ ID NO: 91457 - RNA, 22 nt, Human
uuucuauaaucuaccaugccag

SEQ ID NO: 91458 - RNA, 22 nt, Human
uuucuauucuggaucuguggca

SEQ ID NO: 91459 - RNA, 22 nt, Human
uuucuauuguaagucuccuaua

SEQ ID NO: 91460 - RNA, 22 nt, Human
uuucuauuuacagugcuaggua

SEQ ID NO: 91461 - RNA, 22 nt, Human
uuucucaaccucaacacuauuu

SEQ ID NO: 91462 - RNA, 22 nt, Human
uuucucaaggugucauguauuu

SEQ ID NO: 91463 - RNA, 22 nt, Human
uuucucaaguucagauauuuga

SEQ ID NO: 91464 - RNA, 22 nt, Human
uuucucagcucagcaucugggu

SEQ ID NO: 91465 - RNA, 19 nt, Human
uuucucaggaaguuugugu

SEQ ID NO: 91466 - RNA, 22 nt, Human
uuucucaguaauguccuggaau

SEQ ID NO: 91467 - RNA, 22 nt, Human
uuucucaguucucugcaaggag

SEQ ID NO: 91468 - RNA, 22 nt, Human
uuuuccaaauuagaaguagaga

SEQ ID NO: 91469 - RNA, 22 nt, Human
uuuuccaccuucuagagauugu

SEQ ID NO: 91470 - RNA, 20 nt, Human
uuuuccacuccucaaaacag

SEQ ID NO: 91471 - RNA, 22 nt, Human
uuuuccagagcugucucuugca

SEQ ID NO: 91472 - RNA, 21 nt, Human
uuuucccacugaaagcuccca

SEQ ID NO: 91473 - RNA, 22 nt, Human
uuuuccucaccuaacucaaggu

SEQ ID NO: 91474 - RNA, 22 nt, Human
uuuuccucugcagagcaguuag

SEQ ID NO: 91475 - RNA, 19 nt, Human
uuuuccugccucauuguuu

SEQ ID NO: 91476 - RNA, 22 nt, Human
uuuuccugccugucucuagagg

SEQ ID NO: 91477 - RNA, 22 nt, Human
uuuuccuggggcuucuggacuc

SEQ ID NO: 91478 - RNA, 22 nt, Human
uuuuccuguccaggcaauuauu

SEQ ID NO: 91479 - RNA, 18 nt, Human
uuuuccuuccaccuugaa

SEQ ID NO: 91480 - RNA, 20 nt, Human
uuuuccuucugaguauguug

SEQ ID NO: 91481 - RNA, 20 nt, Human
uuuuccuuguugccgcugcu

SEQ ID NO: 91482 - RNA, 22 nt, Human
uuuuccuuuggaagaugcauau

SEQ ID NO: 91483 - RNA, 22 nt, Human
uuuucuaaaauauccaggacag

SEQ ID NO: 91484 - RNA, 21 nt, Human
uuuucuccagcugugauuuua

SEQ ID NO: 91485 - RNA, 22 nt, Human
uuuucuccuuucuaggucacau

SEQ ID NO: 91486 - RNA, 22 nt, Human
uuuucucuuguuaauguacuga

SEQ ID NO: 91487 - RNA, 22 nt, Human
uuuucugcggugugaauggccu

SEQ ID NO: 91488 - RNA, 21 nt, Human
uuuucuggaguaugucuccuc

SEQ ID NO: 91489 - RNA, 22 nt, Human
uuuucuguggucagagcuugag

SEQ ID NO: 91490 - RNA, 22 nt, Human
uuuucuuaggugcuccaaguag

SEQ ID NO: 91491 - RNA, 22 nt, Human
uuuucuuuaaucugguggggug

SEQ ID NO: 91492 - RNA, 22 nt, Human
uuuugaaagaguccugcuacag

SEQ ID NO: 91493 - RNA, 22 nt, Human
uuuugaaagggugauuuggcuu

SEQ ID NO: 91494 - RNA, 22 nt, Human
uuuugcaauauguuccugaaua

SEQ ID NO: 91495 - RNA, 22 nt, Human
uuuugcaaugagaugcuuguca

SEQ ID NO: 91496 - RNA, 22 nt, Human
uuuugcagaaugggaagguagu

SEQ ID NO: 91497 - RNA, 22 nt, Human
uuuugcagccacaucugaccug

SEQ ID NO: 91498 - RNA, 22 nt, Human
uuuugcaucuggugaagaccag

SEQ ID NO: 91499 - RNA, 22 nt, Human
uuuugcccuugcuagaucacug

SEQ ID NO: 91500 - RNA, 22 nt, Human
uuuugccgaagguaucugagau

SEQ ID NO: 91501 - RNA, 22 nt, Human
uuuugccuaagaaucucucuga

SEQ ID NO: 91502 - RNA, 22 nt, Human
uuuugccuaggguugacccguu

SEQ ID NO: 91503 - RNA, 22 nt, Human
uuuugccugcacuguauauaua

SEQ ID NO: 91504 - RNA, 22 nt, Human
uuuugcuugagugcacaaaaug

SEQ ID NO: 91505 - RNA, 22 nt, Human
uuuugcuuuuguaacacagugu

SEQ ID NO: 91506 - RNA, 22 nt, Human
uuuuggaacacagacauuagaa

SEQ ID NO: 91507 - RNA, 22 nt, Human
uuuuggaaccaacagugcaccu

SEQ ID NO: 91508 - RNA, 22 nt, Human
uuuuggaauuuauacaguaaug

SEQ ID NO: 91509 - RNA, 22 nt, Human
gcaugcuuuuauaucuguuuaa

SEQ ID NO: 91510 - RNA, 22 nt, Human
gcauggagaagugggaacaggu

SEQ ID NO: 91511 - RNA, 22 nt, Human
gcauggcaagaucaggagacca

SEQ ID NO: 91512 - RNA, 22 nt, Human
gcauggcagaacaccucgcccg

SEQ ID NO: 91513 - RNA, 22 nt, Human
gcauggccaggaaagguagaaa

SEQ ID NO: 91514 - RNA, 22 nt, Human
gcauggccuugcuguaguggua

SEQ ID NO: 91515 - RNA, 22 nt, Human
gcauggcucuggccucagugug

SEQ ID NO: 91516 - RNA, 22 nt, Human
gcaugguggagucugagcaggg

SEQ ID NO: 91517 - RNA, 22 nt, Human
gcaugucaugucauguaggaau

SEQ ID NO: 91518 - RNA, 22 nt, Human
gcauguggcccaaggaggcugu

SEQ ID NO: 91519 - RNA, 22 nt, Human
gcaugugggaacacuuaggcac

SEQ ID NO: 91520 - RNA, 22 nt, Human
gcauguggugggcuggccacuc

SEQ ID NO: 91521 - RNA, 20 nt, Human
gcauguguauggaaggggga

SEQ ID NO: 91522 - RNA, 22 nt, Human
gcauguguuauuucucuguggg

SEQ ID NO: 91523 - RNA, 22 nt, Human
gcauguguuauuuuauguauga

SEQ ID NO: 91524 - RNA, 22 nt, Human
gcauguuauguaucugcccagc

SEQ ID NO: 91525 - RNA, 22 nt, Human
gcauguuuugcaacaagugacc

SEQ ID NO: 91526 - RNA, 21 nt, Human
gcauuaaaagcaguuguuggu

SEQ ID NO: 91527 - RNA, 22 nt, Human
gcauuacacauagacauucguu

SEQ ID NO: 91528 - RNA, 22 nt, Human
gcauuacaggaauuuguuacug

SEQ ID NO: 91529 - RNA, 22 nt, Human
gcauuacaggcuguaagaugca

SEQ ID NO: 91530 - RNA, 20 nt, Human
gcauuagaguacuauaugcu

SEQ ID NO: 91531 - RNA, 22 nt, Human
gcauuauuaauagcugcaugag

SEQ ID NO: 91532 - RNA, 22 nt, Human
gcauucaggguucacggucaac

SEQ ID NO: 91533 - RNA, 18 nt, Human
gcauucaguagugaacaa

SEQ ID NO: 91534 - RNA, 22 nt, Human
gcauuccuacaggcugcuauga

SEQ ID NO: 91535 - RNA, 22 nt, Human
gcauuccuugguuuaaaacaag

SEQ ID NO: 91536 - RNA, 22 nt, Human
gcauucucucucuaaauguugu

SEQ ID NO: 91537 - RNA, 22 nt, Human
cucugcaggcacccaggguggg

SEQ ID NO: 91538 - RNA, 22 nt, Human
cucugcaggccuugaguguggu

SEQ ID NO: 91539 - RNA, 22 nt, Human
cucugcaggggaggcaugcacu

SEQ ID NO: 91540 - RNA, 22 nt, Human
cucugcaucaggcauuauggau

SEQ ID NO: 91541 - RNA, 22 nt, Human
cucugcaugccacaugagugac

SEQ ID NO: 91542 - RNA, 22 nt, Human
cucugcaugccuugcucagaca

SEQ ID NO: 91543 - RNA, 22 nt, Human
cucugccagccaaaauuuauga

SEQ ID NO: 91544 - RNA, 22 nt, Human
cucugccagccaaagucaucac

SEQ ID NO: 91545 - RNA, 19 nt, Human
cucugccauuugcugccug

SEQ ID NO: 91546 - RNA, 21 nt, Human
cucugcccagggccuccugcc

SEQ ID NO: 91547 - RNA, 22 nt, Human
cucugcccagugcccacaggag

SEQ ID NO: 91548 - RNA, 22 nt, Human
cucugcccgugccuuucccagu

SEQ ID NO: 91549 - RNA, 19 nt, Human
cucugccucccuccugggu

SEQ ID NO: 91550 - RNA, 18 nt, Human
cucugcuaaugggcagcu

SEQ ID NO: 91551 - RNA, 22 nt, Human
cucugcuacuguuaaaccauuu

SEQ ID NO: 91552 - RNA, 22 nt, Human
cucugcugcaggaaggcgugca

SEQ ID NO: 91553 - RNA, 22 nt, Human
cucugcugcccaggccugcuag

SEQ ID NO: 91554 - RNA, 20 nt, Human
cucugcugcgcaucccacuu

SEQ ID NO: 91555 - RNA, 22 nt, Human
cucugcuguuuuguauacaggc

SEQ ID NO: 91556 - RNA, 22 nt, Human
cucugcuuggaacagggguuug

SEQ ID NO: 91557 - RNA, 20 nt, Human
cucugcuuuccaccuuucag

SEQ ID NO: 91558 - RNA, 22 nt, Human
cucuggaaauggccauagucau

SEQ ID NO: 91559 - RNA, 22 nt, Human
cucuggaauguuuacaugcccu

SEQ ID NO: 91560 - RNA, 22 nt, Human
cucuggaauuaaggaagccugu

SEQ ID NO: 91561 - RNA, 22 nt, Human
cucuggacagcccuccaggaag

SEQ ID NO: 91562 - RNA, 22 nt, Human
cucuggagaacgcuauggaucu

SEQ ID NO: 91563 - RNA, 19 nt, Human
cucuggagcagacacugga

SEQ ID NO: 91564 - RNA, 22 nt, Human
cucuggagcauuucaccuacau

SEQ ID NO: 91565 - RNA, 22 nt, Human
cucuggagguggagguugcagu

SEQ ID NO: 91566 - RNA, 21 nt, Human
cucuggagucaagagcuucca

SEQ ID NO: 91567 - RNA, 22 nt, Human
cucuggaguccuguaucacucc

SEQ ID NO: 91568 - RNA, 22 nt, Human
cucuggaguggguggccgggag

SEQ ID NO: 91569 - RNA, 22 nt, Human
cucuggaguuagugaucugggc

SEQ ID NO: 91570 - RNA, 22 nt, Human
cucuggcaauugcugcugacuc

SEQ ID NO: 91571 - RNA, 19 nt, Human
cucuggccucuggaugcug

SEQ ID NO: 91572 - RNA, 22 nt, Human
cucuggccugcagauccaugcu

SEQ ID NO: 91573 - RNA, 22 nt, Human
cucuggcuccauuucccuaugu

SEQ ID NO: 91574 - RNA, 22 nt, Human
cucuggcucugacaguugaucc

SEQ ID NO: 91575 - RNA, 22 nt, Human
cucuggcuggcugggccucagu

SEQ ID NO: 91576 - RNA, 19 nt, Human
cucuggcuuccaaagcauc

SEQ ID NO: 91577 - RNA, 22 nt, Human
cucuggcuucuaccuugcaguu

SEQ ID NO: 91578 - RNA, 22 nt, Human
cucugggaaguagauuuggccu

SEQ ID NO: 91579 - RNA, 22 nt, Human
cucugggaaguggagacuucag

SEQ ID NO: 91580 - RNA, 21 nt, Human
cucugggacauuucuuagcag

SEQ ID NO: 91581 - RNA, 22 nt, Human
cucugggaccacgugacucugc

SEQ ID NO: 91582 - RNA, 22 nt, Human
cucugggaguggccacuucuca

SEQ ID NO: 91583 - RNA, 22 nt, Human
cucugggcaaagaugccucauc

SEQ ID NO: 91584 - RNA, 22 nt, Human
cucugggcaccaaagagcagcu

SEQ ID NO: 91585 - RNA, 22 nt, Human
cucugggcaggacgccaggccu

SEQ ID NO: 91586 - RNA, 20 nt, Human
cucugggcugcguugcaaac

SEQ ID NO: 91587 - RNA, 22 nt, Human
cucugggcuuguugaccugcac

SEQ ID NO: 91588 - RNA, 22 nt, Human
cucuggggaaauggauauguac

SEQ ID NO: 91589 - RNA, 17 nt, Human
cucuggggacaguucua

SEQ ID NO: 91590 - RNA, 22 nt, Human
cucuggguccuggggcuacaag

SEQ ID NO: 91591 - RNA, 17 nt, Human
cucugggugccugugug

SEQ ID NO: 91592 - RNA, 22 nt, Human
cucugggugucauggccucagc

SEQ ID NO: 91593 - RNA, 22 nt, Human
cucuggguguuaaugucagugu

SEQ ID NO: 91594 - RNA, 22 nt, Human
cucuggguucacugaggcucug

SEQ ID NO: 91595 - RNA, 22 nt, Human
cucuggucagugaauuccuagu

SEQ ID NO: 91596 - RNA, 21 nt, Human
cucugguccugucuggcaggc

SEQ ID NO: 91597 - RNA, 22 nt, Human
cucuggugucuccccuaagcua

SEQ ID NO: 91598 - RNA, 21 nt, Human
cucugguuugcauuggauuau

SEQ ID NO: 91599 - RNA, 22 nt, Human
cucuguaccuggcauagcaacc

SEQ ID NO: 91600 - RNA, 22 nt, Human
cucuguaccuuaaaagggcuuu

SEQ ID NO: 91601 - RNA, 22 nt, Human
cucuguccugguuuauacuggc

SEQ ID NO: 91602 - RNA, 22 nt, Human
cucugugccagucugcacucgg

SEQ ID NO: 91603 - RNA, 22 nt, Human
cucugugcucccaugcuaguaa

SEQ ID NO: 91604 - RNA, 22 nt, Human
cucugugggaagcuggguguga

SEQ ID NO: 91605 - RNA, 22 nt, Human
cucugugggaggaggaguaggc

SEQ ID NO: 91606 - RNA, 22 nt, Human
cucugugggccagagaggcccc

SEQ ID NO: 91607 - RNA, 22 nt, Human
cucuguguauccaaguucaggu

SEQ ID NO: 91608 - RNA, 22 nt, Human
cucugugucugaagcccuauuu

SEQ ID NO: 91609 - RNA, 22 nt, Human
cucuguguucagccuagcagaa

SEQ ID NO: 91610 - RNA, 18 nt, Human
cucuguguuggugugaag

SEQ ID NO: 91611 - RNA, 22 nt, Human
cucuguugucaguggaagcagc

SEQ ID NO: 91612 - RNA, 22 nt, Human
cucuguuucucagccuauuucc

SEQ ID NO: 91613 - RNA, 22 nt, Human
cucuguuuuucaauaguucuug

SEQ ID NO: 91614 - RNA, 22 nt, Human
cucuuaaagcuuccaguuucaa

SEQ ID NO: 91615 - RNA, 22 nt, Human
cucuuacaagcucccgauauaa

SEQ ID NO: 91616 - RNA, 22 nt, Human
cucuuagagaguuguugaucag

SEQ ID NO: 91617 - RNA, 22 nt, Human
cucuuagcugcuguucuuugag

SEQ ID NO: 91618 - RNA, 22 nt, Human
cucuuauugaugaaggugcuaa

SEQ ID NO: 91619 - RNA, 22 nt, Human
cugaggaugguguggucuucuc

SEQ ID NO: 91620 - RNA, 22 nt, Human
cugaggcaccuacagucucggg

SEQ ID NO: 91621 - RNA, 22 nt, Human
cugaggcacuaacaaggacaag

SEQ ID NO: 91622 - RNA, 22 nt, Human
cugaggcagagaaugaguuugu

SEQ ID NO: 91623 - RNA, 22 nt, Human
cugaggcagagagaacccgggc

SEQ ID NO: 91624 - RNA, 22 nt, Human
cugaggcaguuuaauuuuugaa

SEQ ID NO: 91625 - RNA, 22 nt, Human
cugaggcaucauggagaacagu

SEQ ID NO: 91626 - RNA, 22 nt, Human
cugaggcaugggaaguugggug

SEQ ID NO: 91627 - RNA, 22 nt, Human
cugaggcauguuacaggacaua

SEQ ID NO: 91628 - RNA, 22 nt, Human
cugaggccagaacccgacccug

SEQ ID NO: 91629 - RNA, 22 nt, Human
cugaggccagcugcagagcucu

SEQ ID NO: 91630 - RNA, 18 nt, Human
cugaggcccagagagggc

SEQ ID NO: 91631 - RNA, 19 nt, Human
cugaggcccauguaccaug

SEQ ID NO: 91632 - RNA, 22 nt, Human
cugaggccucucccacuccagc

SEQ ID NO: 91633 - RNA, 22 nt, Human
cugaggccucuuuccuuggcuu

SEQ ID NO: 91634 - RNA, 22 nt, Human
cugaggccugggggcguggacg

SEQ ID NO: 91635 - RNA, 22 nt, Human
cugaggcucugggugucacugu

SEQ ID NO: 91636 - RNA, 22 nt, Human
cugaggcuggggaagggaagug

SEQ ID NO: 91637 - RNA, 22 nt, Human
cugaggcuucucuaguucagcu

SEQ ID NO: 91638 - RNA, 22 nt, Human
cugagggaagggguacauggcu

SEQ ID NO: 91639 - RNA, 22 nt, Human
cugagggagaagucacgggcag

SEQ ID NO: 91640 - RNA, 22 nt, Human
cugagggagaagugaucucuac

SEQ ID NO: 91641 - RNA, 22 nt, Human
cugagggaggagaauugcuuga

SEQ ID NO: 91642 - RNA, 22 nt, Human
cugagggagggacuuugagacu

SEQ ID NO: 91643 - RNA, 22 nt, Human
cugagggaugggcugggccgcc

SEQ ID NO: 91644 - RNA, 22 nt, Human
cugagggcaccgacagagugga

SEQ ID NO: 91645 - RNA, 18 nt, Human
cugagggcagccccuggg

SEQ ID NO: 91646 - RNA, 22 nt, Human
cugagggcagugaugaagguga

SEQ ID NO: 91647 - RNA, 22 nt, Human
cugagggccuucuaugcugagc

SEQ ID NO: 91648 - RNA, 20 nt, Human
cugaggggucugacuuggac

SEQ ID NO: 91649 - RNA, 22 nt, Human
cugagggugcuauucuugccuu

SEQ ID NO: 91650 - RNA, 22 nt, Human
cugagguaaaauuucuauuuug

SEQ ID NO: 91651 - RNA, 23 nt, Human
gcauucugaugguucucugugau

SEQ ID NO: 91652 - RNA, 22 nt, Human
gcauucuugagguguggacuca

SEQ ID NO: 91653 - RNA, 22 nt, Human
gcauucuugguggagugcuaaa

SEQ ID NO: 91654 - RNA, 22 nt, Human
gcauucuuuuuaggagguuccu

SEQ ID NO: 91655 - RNA, 22 nt, Human
gcauugaaauggcaaaaagaga

SEQ ID NO: 91656 - RNA, 22 nt, Human
gcauugaagaucuuagacuagg

SEQ ID NO: 91657 - RNA, 22 nt, Human
gcauugcaacugacagaucauu

SEQ ID NO: 91658 - RNA, 22 nt, Human
gcauugguucaagguugugcag

SEQ ID NO: 91659 - RNA, 22 nt, Human
gcauugucaaaagugguaugac

SEQ ID NO: 91660 - RNA, 22 nt, Human
gcauuuacauggagcuaucuaa

SEQ ID NO: 91661 - RNA, 22 nt, Human
gcauuucagagaaaaucugcuu

SEQ ID NO: 91662 - RNA, 22 nt, Human
gcauuucaugccguggaagucc

SEQ ID NO: 91663 - RNA, 22 nt, Human
gcauuucauguaagucagacca

SEQ ID NO: 91664 - RNA, 22 nt, Human
gcauuuggaacuugguugagau

SEQ ID NO: 91665 - RNA, 22 nt, Human
gcauuuguuccgcuuugucauc

SEQ ID NO: 91666 - RNA, 22 nt, Human
gcauuuguugaguugccagcua

SEQ ID NO: 91667 - RNA, 22 nt, Human
gcauuuuucaucccucuugggu

SEQ ID NO: 91668 - RNA, 22 nt, Human
gcauuuuucucuccuauaggag

SEQ ID NO: 91669 - RNA, 22 nt, Human
gccaaacuacaaguuaaauuuu

SEQ ID NO: 91670 - RNA, 22 nt, Human
gccaaagcagucuugccucugc

SEQ ID NO: 91671 - RNA, 22 nt, Human
gccaaaguccacuugcuuucug

SEQ ID NO: 91672 - RNA, 22 nt, Human
gccaaaguccuccagccaugca

SEQ ID NO: 91673 - RNA, 22 nt, Human
gccaaauaccauuaaccagaaa

SEQ ID NO: 91674 - RNA, 22 nt, Human
gccaaauacuggaaucauagaa

SEQ ID NO: 91675 - RNA, 22 nt, Human
gccaaauaugguggacaguuug

SEQ ID NO: 91676 - RNA, 22 nt, Human
gccaaaucuggauuuagcaaga

SEQ ID NO: 91677 - RNA, 22 nt, Human
gccaacuggcugaucucaaagc

SEQ ID NO: 91678 - RNA, 20 nt, Human
gccaagaauaugcccgacuc

SEQ ID NO: 91679 - RNA, 22 nt, Human
gccaagaaugcgacagccguca

SEQ ID NO: 91680 - RNA, 22 nt, Human
gccaagccugggaagagcccau

SEQ ID NO: 91681 - RNA, 22 nt, Human
gccaagcuuugcaggaguguug

SEQ ID NO: 91682 - RNA, 22 nt, Human
gccaaggauaccagcugugaga

SEQ ID NO: 91683 - RNA, 22 nt, Human
gccaaggcugaggcccugggcu

SEQ ID NO: 91684 - RNA, 21 nt, Human
gccaaggggguagcuauuccu

SEQ ID NO: 91685 - RNA, 23 nt, Human
gccaaguagggggaaagcccgug

SEQ ID NO: 91686 - RNA, 22 nt, Human
gccaaugacagucucaguucug

SEQ ID NO: 91687 - RNA, 22 nt, Human
gccaauuuaucuuacucgugcu

SEQ ID NO: 91688 - RNA, 22 nt, Human
gccaauuuccugagguaaagcu

SEQ ID NO: 91689 - RNA, 22 nt, Human
gccacaggcuccagcaucagua

SEQ ID NO: 91690 - RNA, 22 nt, Human
gccacagggauuguuuugugag

SEQ ID NO: 91691 - RNA, 22 nt, Human
gccacagggcgagcggaggcca

SEQ ID NO: 91692 - RNA, 22 nt, Human
gccacagguacuaugggagaga

SEQ ID NO: 91693 - RNA, 22 nt, Human
gccacagguaggaaccuaccuc

SEQ ID NO: 91694 - RNA, 22 nt, Human
gccacaggugggcucugggaaa

SEQ ID NO: 91695 - RNA, 20 nt, Human
gccacaguuuucucacugca

SEQ ID NO: 91696 - RNA, 22 nt, Human
gccacauagaggaggauauuaa

SEQ ID NO: 91697 - RNA, 22 nt, Human
gccacaugcaauugcagcacgu

SEQ ID NO: 91698 - RNA, 19 nt, Human
gccacauucuuccaggugu

SEQ ID NO: 91699 - RNA, 22 nt, Human
gccaccaggagcccaguccaaa

SEQ ID NO: 91700 - RNA, 22 nt, Human
gccaccagggggcuccagugag

SEQ ID NO: 91701 - RNA, 22 nt, Human
gccaccagguucuggguuaagc

SEQ ID NO: 91702 - RNA, 22 nt, Human
gccaccaugucuggcugaguuu

SEQ ID NO: 91703 - RNA, 21 nt, Human
gccaccucaaucuucuagcgc

SEQ ID NO: 91704 - RNA, 22 nt, Human
gccaccucggcuuucucugcuc

SEQ ID NO: 91705 - RNA, 21 nt, Human
gccaccucgucucggagcagc

SEQ ID NO: 91706 - RNA, 22 nt, Human
gccacguagaagugccgcgaga

SEQ ID NO: 91707 - RNA, 22 nt, Human
gccacguugccacccgggugac

SEQ ID NO: 91708 - RNA, 22 nt, Human
gccacuauuuucccaccuuucu

SEQ ID NO: 91709 - RNA, 22 nt, Human
gccacugcacuccagcccaggc

SEQ ID NO: 91710 - RNA, 21 nt, Human
gccacugcacuccagccuggg

SEQ ID NO: 91711 - RNA, 20 nt, Human
gccacugugcuuacacugcu

SEQ ID NO: 91712 - RNA, 22 nt, Human
gccacuguuccaccaucuugau

SEQ ID NO: 91713 - RNA, 22 nt, Human
gccagaagcacaugagagguga

SEQ ID NO: 91714 - RNA, 22 nt, Human
gccagacacuccccugggcagg

SEQ ID NO: 91715 - RNA, 22 nt, Human
gccagagccacuuuugggugau

SEQ ID NO: 91716 - RNA, 22 nt, Human
gccagaggaacgcugcgcgccc

SEQ ID NO: 91717 - RNA, 22 nt, Human
gccagagucuucugacccugug

SEQ ID NO: 91718 - RNA, 22 nt, Human
gccagagugauguaacauauau

SEQ ID NO: 91719 - RNA, 22 nt, Human
gccagaugccguaaagaugggc

SEQ ID NO: 91720 - RNA, 22 nt, Human
gccagauuuacagauuugcccu

SEQ ID NO: 91721 - RNA, 22 nt, Human
gccagcaaguaucaccaaagcc

SEQ ID NO: 91722 - RNA, 22 nt, Human
gccagcagcccagaaggacuuu

SEQ ID NO: 91723 - RNA, 22 nt, Human
gccagcagcucuugggcgggca

SEQ ID NO: 91724 - RNA, 22 nt, Human
gccagcagcugugggguggcca

SEQ ID NO: 91725 - RNA, 22 nt, Human
gccagcagggcggagccaucua

SEQ ID NO: 91726 - RNA, 22 nt, Human
gccagcagguggagagaucaag

SEQ ID NO: 91727 - RNA, 22 nt, Human
gccagcauaguaagcagucauc

SEQ ID NO: 91728 - RNA, 20 nt, Human
cuggaagccuuuccagagca

SEQ ID NO: 91729 - RNA, 22 nt, Human
cuggaagcgucggaggaagggc

SEQ ID NO: 91730 - RNA, 22 nt, Human
cuggaaggagaaggaggcugug

SEQ ID NO: 91731 - RNA, 22 nt, Human
cuggaaggggcagucuuugggc

SEQ ID NO: 91732 - RNA, 22 nt, Human
cuggaagggggacagccacaca

SEQ ID NO: 91733 - RNA, 22 nt, Human
cuggaaggucuguccccacugc

SEQ ID NO: 91734 - RNA, 22 nt, Human
cuggaagguucuuugugugccu

SEQ ID NO: 91735 - RNA, 23 nt, Human
cuggaagugcuuuuauagcuuug

SEQ ID NO: 91736 - RNA, 22 nt, Human
cuggaagugggguuggcuugaa

SEQ ID NO: 91737 - RNA, 22 nt, Human
cuggaaguuuccuuccugguca

SEQ ID NO: 91738 - RNA, 22 nt, Human
cuggaaucuuuggagaaugugg

SEQ ID NO: 91739 - RNA, 22 nt, Human
cuggaaugcugguaaaauagca

SEQ ID NO: 91740 - RNA, 22 nt, Human
cuggaaugggagucagacagag

SEQ ID NO: 91741 - RNA, 22 nt, Human
cuggaauguagagacagcuuag

SEQ ID NO: 91742 - RNA, 22 nt, Human
cuggacaggaagaauugggagc

SEQ ID NO: 91743 - RNA, 22 nt, Human
cuggacaucagugugccuggcu

SEQ ID NO: 91744 - RNA, 22 nt, Human
cuggacccuguuucccuagguc

SEQ ID NO: 91745 - RNA, 22 nt, Human
cuggacucacuauggcuucaga

SEQ ID NO: 91746 - RNA, 22 nt, Human
cuggacucauccauagagguga

SEQ ID NO: 91747 - RNA, 21 nt, Human
cuggacugaggagacagucgc

SEQ ID NO: 91748 - RNA, 22 nt, Human
cuggacuuacuugcugaggacu

SEQ ID NO: 91749 - RNA, 22 nt, Human
cuggagaagagguaguauguag

SEQ ID NO: 91750 - RNA, 17 nt, Human
cuggagaagccugugga

SEQ ID NO: 91751 - RNA, 22 nt, Human
cuggagaauucuaugaaauauu

SEQ ID NO: 91752 - RNA, 22 nt, Human
cuggagaccucuccugagagug

SEQ ID NO: 91753 - RNA, 22 nt, Human
cuggagagaccgaaagaggcug

SEQ ID NO: 91754 - RNA, 22 nt, Human
cuggagagauccuccugaaaaa

SEQ ID NO: 91755 - RNA, 22 nt, Human
cuggagaggccccaagauauuu

SEQ ID NO: 91756 - RNA, 22 nt, Human
cuggagaggcugggaacagguu

SEQ ID NO: 91757 - RNA, 22 nt, Human
cuggagagggagcuguuggaag

SEQ ID NO: 91758 - RNA, 22 nt, Human
cuggagauaagcagucccaggc

SEQ ID NO: 91759 - RNA, 22 nt, Human
cuggagauuaaguucucagcca

SEQ ID NO: 91760 - RNA, 22 nt, Human
cuggagcagcagguggccaggg

SEQ ID NO: 91761 - RNA, 22 nt, Human
cuggagccacugggucuuguau

SEQ ID NO: 91762 - RNA, 22 nt, Human
cuggagccccaggcugugcaga

SEQ ID NO: 91763 - RNA, 22 nt, Human
cuggagccuagguugaccuggg

SEQ ID NO: 91764 - RNA, 22 nt, Human
cuggagccuucaccaggggaaa

SEQ ID NO: 91765 - RNA, 22 nt, Human
cuggagcuaauaauccaucuga

SEQ ID NO: 91766 - RNA, 22 nt, Human
cuggagcucuguguguuccuga

SEQ ID NO: 91767 - RNA, 22 nt, Human
cuggagcucuucugagugugcu

SEQ ID NO: 91768 - RNA, 22 nt, Human
cuggagcugguauagggacaaa

SEQ ID NO: 91769 - RNA, 22 nt, Human
cuggaggaauaauggcaucuug

SEQ ID NO: 91770 - RNA, 22 nt, Human
cuggaggagcauggacuggagu

SEQ ID NO: 91771 - RNA, 22 nt, Human
cuggaggcaaagcagaggcaug

SEQ ID NO: 91772 - RNA, 22 nt, Human
cuggaggcuggcuuccccuggc

SEQ ID NO: 91773 - RNA, 22 nt, Human
cuggagggaguuaggacccgga

SEQ ID NO: 91774 - RNA, 22 nt, Human
cuggaggggcuggcaugguagc

SEQ ID NO: 91775 - RNA, 19 nt, Human
cuggagguagaggguuagu

SEQ ID NO: 91776 - RNA, 22 nt, Human
cuggaggucauguaauauggaa

SEQ ID NO: 91777 - RNA, 22 nt, Human
cuggagguuggguccaggccag

SEQ ID NO: 91778 - RNA, 18 nt, Human
cuggagucacagugggga

SEQ ID NO: 91779 - RNA, 22 nt, Human
cuggaguccugcauuugcucuu

SEQ ID NO: 91780 - RNA, 22 nt, Human
cuggagucggcgccccaacaga

SEQ ID NO: 91781 - RNA, 22 nt, Human
cuggagucuccccaggagcgug

SEQ ID NO: 91782 - RNA, 22 nt, Human
cuggagugcaaugaacaagguc

SEQ ID NO: 91783 - RNA, 22 nt, Human
cuggaguguaaagagcauagaa

SEQ ID NO: 91784 - RNA, 22 nt, Human
cuggaguguuauggucaaguca

SEQ ID NO: 91785 - RNA, 20 nt, Human
cugcaagcagguuauuccag

SEQ ID NO: 91786 - RNA, 22 nt, Human
cugcaagccaagcugagagccu

SEQ ID NO: 91787 - RNA, 22 nt, Human
cugcaaggcugaauucagcuga

SEQ ID NO: 91788 - RNA, 22 nt, Human
cugcaagggaucuucagguagc

SEQ ID NO: 91789 - RNA, 23 nt, Human
cugcaagguacaagaugcuggau

SEQ ID NO: 91790 - RNA, 22 nt, Human
cugcacaaauuaaucaguuaau

SEQ ID NO: 91791 - RNA, 22 nt, Human
cugcacacaucgcacugcccgu

SEQ ID NO: 91792 - RNA, 22 nt, Human
cugcacagcugggcaagauaua

SEQ ID NO: 91793 - RNA, 22 nt, Human
cugcacagucauuuccucucaa

SEQ ID NO: 91794 - RNA, 22 nt, Human
cugcacaguuugauuucuugcu

SEQ ID NO: 91795 - RNA, 22 nt, Human
cugcacauguucaucaugacaa

SEQ ID NO: 91796 - RNA, 22 nt, Human
cugcaccaucuggagcaccucc

SEQ ID NO: 91797 - RNA, 22 nt, Human
cugcacugcugaucccaggucu

SEQ ID NO: 91798 - RNA, 21 nt, Human
cugcacugugauuuaaaaugu

SEQ ID NO: 91799 - RNA, 18 nt, Human
cugcacuguggguagcuc

SEQ ID NO: 91800 - RNA, 22 nt, Human
cugcagaacaauuccugcuguu

SEQ ID NO: 91801 - RNA, 22 nt, Human
cugcagaccucugagguccaug

SEQ ID NO: 91802 - RNA, 22 nt, Human
cugcagagaguaacugaaauau

SEQ ID NO: 91803 - RNA, 22 nt, Human
cugcagagagugccgggcagcc

SEQ ID NO: 91804 - RNA, 22 nt, Human
cugcagagaugaagaagguggc

SEQ ID NO: 91805 - RNA, 22 nt, Human
cugcagagcauaaaucugaaua

SEQ ID NO: 91806 - RNA, 22 nt, Human
cugcagagggguugaagggucc

SEQ ID NO: 91807 - RNA, 22 nt, Human
cugcagaggucuugcugauggu

SEQ ID NO: 91808 - RNA, 22 nt, Human
cugcagaugggcgauggggccu

SEQ ID NO: 91809 - RNA, 21 nt, Human
cugcagcaaaacuuugcuccu

SEQ ID NO: 91810 - RNA, 22 nt, Human
cugcagcaguacucagcagcca

SEQ ID NO: 91811 - RNA, 23 nt, Human
cugcagccgcguggggacgugga

SEQ ID NO: 91812 - RNA, 22 nt, Human
cugcagccuccugggguacaug

SEQ ID NO: 91813 - RNA, 22 nt, Human
cugcagcuaaggaaugugguug

SEQ ID NO: 91814 - RNA, 22 nt, Human
cugcagcuauauuuucccacag

SEQ ID NO: 91815 - RNA, 22 nt, Human
cugcagcugcaguucugagaga

SEQ ID NO: 91816 - RNA, 22 nt, Human
cugcagcuggcucaugggauau

SEQ ID NO: 91817 - RNA, 22 nt, Human
cugcagcuguagaggacagugg

SEQ ID NO: 91818 - RNA, 22 nt, Human
cugcagcugucucuacugggca

SEQ ID NO: 91819 - RNA, 22 nt, Human
cugcagcuuucgcuccaucagc

SEQ ID NO: 91820 - RNA, 21 nt, Human
cugcaggaugcugaagccagg

SEQ ID NO: 91821 - RNA, 22 nt, Human
cugcaggcccccuuccuggagu

SEQ ID NO: 91822 - RNA, 22 nt, Human
cugcaggcucgaagacacggau

SEQ ID NO: 91823 - RNA, 22 nt, Human
cugcaggcuuccagggcugugg

SEQ ID NO: 91824 - RNA, 22 nt, Human
cugcagggagguuccuuguucu

SEQ ID NO: 91825 - RNA, 22 nt, Human
cugcaggggaccaaagucugac

SEQ ID NO: 91826 - RNA, 22 nt, Human
cugcaggggcuggaguuggcuu

SEQ ID NO: 91827 - RNA, 21 nt, Human
cugcaggugcugccaucaggg

SEQ ID NO: 91828 - RNA, 22 nt, Human
cugcagguuuauuuucuuaccu

SEQ ID NO: 91829 - RNA, 20 nt, Human
cugcaguccccucugaauca

SEQ ID NO: 91830 - RNA, 22 nt, Human
cugcaguucuucuccucaaggc

SEQ ID NO: 91831 - RNA, 22 nt, Human
cugcaguugggugacccaauau

SEQ ID NO: 91832 - RNA, 23 nt, Human
cugcauauggagguuagcaacuc

SEQ ID NO: 91833 - RNA, 22 nt, Human
cugcaucacuggccaagggugu

SEQ ID NO: 91834 - RNA, 22 nt, Human
cugcaucaguggauaugauggu

SEQ ID NO: 91835 - RNA, 20 nt, Human
cugcaucaugguuaagaaca

SEQ ID NO: 91836 - RNA, 22 nt, Human
cugcaucucugugccagagggc

SEQ ID NO: 91837 - RNA, 22 nt, Human
cuggcauguguuuggcuccugu

SEQ ID NO: 91838 - RNA, 22 nt, Human
cuggcauucuuguuucuggaaa

SEQ ID NO: 91839 - RNA, 22 nt, Human
cuggccaagcacuggggucaaa

SEQ ID NO: 91840 - RNA, 22 nt, Human
cuggccaccaagagcuugcuca

SEQ ID NO: 91841 - RNA, 22 nt, Human
cuggccacugcgggccucugcc

SEQ ID NO: 91842 - RNA, 22 nt, Human
cuggccacuggagguggcaccc

SEQ ID NO: 91843 - RNA, 22 nt, Human
cuggccagaagcaccuuuggcg

SEQ ID NO: 91844 - RNA, 22 nt, Human
cuggccagacuacacaugugug

SEQ ID NO: 91845 - RNA, 22 nt, Human
cuggccagcauggcugaaguac

SEQ ID NO: 91846 - RNA, 22 nt, Human
cuggccagcauuuuugcuuuag

SEQ ID NO: 91847 - RNA, 22 nt, Human
cuggccaggcucucacgugguc

SEQ ID NO: 91848 - RNA, 22 nt, Human
cuggccagguuuugaacaguug

SEQ ID NO: 91849 - RNA, 22 nt, Human
cuggcccaggagagcaggcauu

SEQ ID NO: 91850 - RNA, 21 nt, Human
cuggcccagggaucugcauuu

SEQ ID NO: 91851 - RNA, 23 nt, Human
cuggcccaggugagagguuggug

SEQ ID NO: 91852 - RNA, 22 nt, Human
cuggccccaucuggagucugag

SEQ ID NO: 91853 - RNA, 22 nt, Human
cuggcccccacaccugucaggg

SEQ ID NO: 91854 - RNA, 22 nt, Human
cuggccccuguggcuaaaauca

SEQ ID NO: 91855 - RNA, 22 nt, Human
cuggcccuaugagccuccugau

SEQ ID NO: 91856 - RNA, 21 nt, Human
cuggccgaccccucugugcuc

SEQ ID NO: 91857 - RNA, 22 nt, Human
cuggccucauagccaagcugug

SEQ ID NO: 91858 - RNA, 22 nt, Human
cuggccucucugagcagggagc

SEQ ID NO: 91859 - RNA, 22 nt, Human
cuggccugagaaugcuacccuu

SEQ ID NO: 91860 - RNA, 22 nt, Human
cuggccugaucucaugcugucc

SEQ ID NO: 91861 - RNA, 22 nt, Human
cuggccugcagaucccaggguc

SEQ ID NO: 91862 - RNA, 22 nt, Human
cuggccuggagccucugggugg

SEQ ID NO: 91863 - RNA, 22 nt, Human
cuggccuggcagggagggcaug

SEQ ID NO: 91864 - RNA, 22 nt, Human
cuggccuggcaggggaccucua

SEQ ID NO: 91865 - RNA, 22 nt, Human
cuggccuggucuggccucucca

SEQ ID NO: 91866 - RNA, 22 nt, Human
cuggccuuguuccuccccaagu

SEQ ID NO: 91867 - RNA, 22 nt, Human
cuggccuuucgugagagcuggg

SEQ ID NO: 91868 - RNA, 22 nt, Human
cuggcgugaagguggccaugag

SEQ ID NO: 91869 - RNA, 22 nt, Human
cuggcuaaagagcaagaagaug

SEQ ID NO: 91870 - RNA, 22 nt, Human
cuggcuagcaccucagcucaga

SEQ ID NO: 91871 - RNA, 22 nt, Human
cuggcuaugugguuagacauaa

SEQ ID NO: 91872 - RNA, 22 nt, Human
cuggcucaauaaauauuagcug

SEQ ID NO: 91873 - RNA, 22 nt, Human
cuggcucacuagcccugcccug

SEQ ID NO: 91874 - RNA, 22 nt, Human
cuggcucagacagcugugcagu

SEQ ID NO: 91875 - RNA, 22 nt, Human
cuggcucauccagguguugcuc

SEQ ID NO: 91876 - RNA, 22 nt, Human
cuggcuccaccccaggaggaug

SEQ ID NO: 91877 - RNA, 22 nt, Human
cuggcucccguuguccuugaag

SEQ ID NO: 91878 - RNA, 22 nt, Human
cuggcucccucucccugaguca

SEQ ID NO: 91879 - RNA, 22 nt, Human
cuggcucccuggacauggggcc

SEQ ID NO: 91880 - RNA, 22 nt, Human
cuggcucuaucuccaaggcugg

SEQ ID NO: 91881 - RNA, 22 nt, Human
cuggcucucugauuucacauuc

SEQ ID NO: 91882 - RNA, 22 nt, Human
cuggcucuucuggguucugugu

SEQ ID NO: 91883 - RNA, 22 nt, Human
cuggcucuugcgacucagcuug

SEQ ID NO: 91884 - RNA, 22 nt, Human
cuggcucuuuccuagcuaggcu

SEQ ID NO: 91885 - RNA, 22 nt, Human
cuggcugaauccuagucucaua

SEQ ID NO: 91886 - RNA, 22 nt, Human
cuggcugaggucaccaguagcu

SEQ ID NO: 91887 - RNA, 22 nt, Human
cuggcugauuuucucacuucuc

SEQ ID NO: 91888 - RNA, 22 nt, Human
cuggcugcaggaaggagugggc

SEQ ID NO: 91889 - RNA, 22 nt, Human
cuggcugccuggagugagggag

SEQ ID NO: 91890 - RNA, 22 nt, Human
cuggcuggaacgccgaggcggc

SEQ ID NO: 91891 - RNA, 22 nt, Human
cuggcuggacuugugcauguca

SEQ ID NO: 91892 - RNA, 22 nt, Human
cuggcuggagcaggcaucuugu

SEQ ID NO: 91893 - RNA, 22 nt, Human
cuggcuggagcuguuguaggcu

SEQ ID NO: 91894 - RNA, 22 nt, Human
cuggcugguaauggaacgacag

SEQ ID NO: 91895 - RNA, 22 nt, Human
cuggcuggucaucagcaguacg

SEQ ID NO: 91896 - RNA, 22 nt, Human
cuggcugguuacuauuucuggu

SEQ ID NO: 91897 - RNA, 22 nt, Human
cuggcugguucccugcuccagg

SEQ ID NO: 91898 - RNA, 22 nt, Human
cuggcuguaugcuggccucaga

SEQ ID NO: 91899 - RNA, 22 nt, Human
cuggcugucuucugggagcugu

SEQ ID NO: 91900 - RNA, 22 nt, Human
cuggcugucuuggaggaaggag

SEQ ID NO: 91901 - RNA, 22 nt, Human
cuggcugugcugcaggcuuugg

SEQ ID NO: 91902 - RNA, 22 nt, Human
cugccugccuggagacagaugg

SEQ ID NO: 91903 - RNA, 18 nt, Human
cugccugcucuccagcuu

SEQ ID NO: 91904 - RNA, 22 nt, Human
cugccugcugacauucuuuaua

SEQ ID NO: 91905 - RNA, 22 nt, Human
cugccugcuucugagccagagg

SEQ ID NO: 91906 - RNA, 22 nt, Human
cugccuggagcauucugaaggu

SEQ ID NO: 91907 - RNA, 22 nt, Human
cugccuggcauagucuggucga

SEQ ID NO: 91908 - RNA, 22 nt, Human
cugccugggccaugcccagucc

SEQ ID NO: 91909 - RNA, 22 nt, Human
cugccuggguucaaguccuguu

SEQ ID NO: 91910 - RNA, 22 nt, Human
cugccuggugcggugcccaccc

SEQ ID NO: 91911 - RNA, 22 nt, Human
cugccuguaacuuucugaagca

SEQ ID NO: 91912 - RNA, 22 nt, Human
cugccuguggacacccuggagg

SEQ ID NO: 91913 - RNA, 22 nt, Human
cugccuguuuccucuugcuccc

SEQ ID NO: 91914 - RNA, 22 nt, Human
cugccuugaaaaugaagcuuua

SEQ ID NO: 91915 - RNA, 22 nt, Human
cugccuugaggagguuguggga

SEQ ID NO: 91916 - RNA, 22 nt, Human
cugccuugucuuguuuucaggg

SEQ ID NO: 91917 - RNA, 22 nt, Human
cugccuuugugaucaguucuuu

SEQ ID NO: 91918 - RNA, 22 nt, Human
cugcgcagcaaucagagaggag

SEQ ID NO: 91919 - RNA, 22 nt, Human
cugcggcucugcgggcagcugg

SEQ ID NO: 91920 - RNA, 22 nt, Human
cugcggcuggggacagcuguug

SEQ ID NO: 91921 - RNA, 22 nt, Human
cugcggugggcugggcuguccc

SEQ ID NO: 91922 - RNA, 22 nt, Human
cugcgugguaggacucaguucu

SEQ ID NO: 91923 - RNA, 22 nt, Human
cugcuagcccgccggccagcga

SEQ ID NO: 91924 - RNA, 22 nt, Human
cugcuaggguucagcagugccu

SEQ ID NO: 91925 - RNA, 18 nt, Human
cugcuccagucuggccag

SEQ ID NO: 91926 - RNA, 22 nt, Human
cugcuccuggucauccuccacu

SEQ ID NO: 91927 - RNA, 22 nt, Human
cugcuccugugggccaguggcc

SEQ ID NO: 91928 - RNA, 22 nt, Human
cugcucuagagagcauuaguca

SEQ ID NO: 91929 - RNA, 22 nt, Human
cugcucuauguccucacccagg

SEQ ID NO: 91930 - RNA, 19 nt, Human
cugcucuccuugacuugga

SEQ ID NO: 91931 - RNA, 22 nt, Human
cugcucugcaaggcacagugau

SEQ ID NO: 91932 - RNA, 22 nt, Human
cugcucuguuucuuagcugggu

SEQ ID NO: 91933 - RNA, 22 nt, Human
cugcucuucccacucacuccca

SEQ ID NO: 91934 - RNA, 22 nt, Human
cugcugacaaaauaaaaugcuc

SEQ ID NO: 91935 - RNA, 22 nt, Human
cugcugacuuacacuguuuauu

SEQ ID NO: 91936 - RNA, 22 nt, Human
cugcugagaaaagacugaggga

SEQ ID NO: 91937 - RNA, 22 nt, Human
cugcugagagccacguggcaca

SEQ ID NO: 91938 - RNA, 22 nt, Human
cugcugagagccccagcugaga

SEQ ID NO: 91939 - RNA, 22 nt, Human
cugcugagagcugaaggcugua

SEQ ID NO: 91940 - RNA, 22 nt, Human
cugcugagaugccaggagcucu

SEQ ID NO: 91941 - RNA, 22 nt, Human
cugcugagguggagauugcagu

SEQ ID NO: 91942 - RNA, 22 nt, Human
cugcugaucgaaucagucaccc

SEQ ID NO: 91943 - RNA, 22 nt, Human
cugcugcaggaugggcacucug

SEQ ID NO: 91944 - RNA, 18 nt, Human
cugcugcaggcacucagg

SEQ ID NO: 91945 - RNA, 22 nt, Human
cugcugccccugagcucagccu

SEQ ID NO: 91946 - RNA, 22 nt, Human
cugggagugaaaggagggcugc

SEQ ID NO: 91947 - RNA, 22 nt, Human
cugggcacacucugcuccagcu

SEQ ID NO: 91948 - RNA, 22 nt, Human
cugggcacagacccccugggcc

SEQ ID NO: 91949 - RNA, 22 nt, Human
cugggcacagcguugggcucuu

SEQ ID NO: 91950 - RNA, 22 nt, Human
cugggcaccaggcaugacaggg

SEQ ID NO: 91951 - RNA, 23 nt, Human
cugggcacccaguaccuaggccc

SEQ ID NO: 91952 - RNA, 22 nt, Human
cugggcagcuaccaccacugcu

SEQ ID NO: 91953 - RNA, 22 nt, Human
cugggcagcuccauaccaccca

SEQ ID NO: 91954 - RNA, 22 nt, Human
cugggcaggagggcucuaugga

SEQ ID NO: 91955 - RNA, 22 nt, Human
cugggcagguauacaaaaaaug

SEQ ID NO: 91956 - RNA, 22 nt, Human
cugggcaguaugaauauucaaa

SEQ ID NO: 91957 - RNA, 22 nt, Human
cugggcaguuuacauuccuacc

SEQ ID NO: 91958 - RNA, 22 nt, Human
cugggcaguuuuacaucauugc

SEQ ID NO: 91959 - RNA, 22 nt, Human
cugggcauauacgugcaaguca

SEQ ID NO: 91960 - RNA, 22 nt, Human
cugggccacaagccugugugau

SEQ ID NO: 91961 - RNA, 22 nt, Human
cugggccacuuccucaggggaa

SEQ ID NO: 91962 - RNA, 19 nt, Human
cugggccagaaucagcuca

SEQ ID NO: 91963 - RNA, 22 nt, Human
cugggccagcaacugcaaugga

SEQ ID NO: 91964 - RNA, 22 nt, Human
cugggccagucucggccgcucu

SEQ ID NO: 91965 - RNA, 22 nt, Human
cugggccaucucucugcaagug

SEQ ID NO: 91966 - RNA, 22 nt, Human
cugggcccacgagggcucuggg

SEQ ID NO: 91967 - RNA, 22 nt, Human
cugggccuagaggaagcugaca

SEQ ID NO: 91968 - RNA, 22 nt, Human
cugggccuaggauggaagggcc

SEQ ID NO: 91969 - RNA, 23 nt, Human
cugggccuauggucugaauccaa

SEQ ID NO: 91970 - RNA, 22 nt, Human
cugggccucaaucucagaguuu

SEQ ID NO: 91971 - RNA, 22 nt, Human
cugggccucacacccaccaaau

SEQ ID NO: 91972 - RNA, 22 nt, Human
cugggccucauccagccacaac

SEQ ID NO: 91973 - RNA, 22 nt, Human
cugggccucaugcacagagaug

SEQ ID NO: 91974 - RNA, 22 nt, Human
cugggccuccacgggccaucac

SEQ ID NO: 91975 - RNA, 22 nt, Human
cugggccuccucugcccaagcu

SEQ ID NO: 91976 - RNA, 22 nt, Human
cugggccucucagcucccgcgg

SEQ ID NO: 91977 - RNA, 22 nt, Human
cugggccugagcucugaagagu

SEQ ID NO: 91978 - RNA, 19 nt, Human
cugggccugcaugguuguu

SEQ ID NO: 91979 - RNA, 22 nt, Human
cugggccuggagcccacgagcc

SEQ ID NO: 91980 - RNA, 22 nt, Human
cugggccuggcguuccaggcug

SEQ ID NO: 91981 - RNA, 22 nt, Human
cugggccugguagggcuugaaa

SEQ ID NO: 91982 - RNA, 22 nt, Human
cugggccugucagggcuuuuug

SEQ ID NO: 91983 - RNA, 22 nt, Human
cugggccuucauugcucuccca

SEQ ID NO: 91984 - RNA, 22 nt, Human
cugggccuuggauugacacugu

SEQ ID NO: 91985 - RNA, 22 nt, Human
cugggcgugucuuccagcuggc

SEQ ID NO: 91986 - RNA, 22 nt, Human
cugggcuagaaggaccaggaug

SEQ ID NO: 91987 - RNA, 22 nt, Human
cugggcucaaauccuaucucca

SEQ ID NO: 91988 - RNA, 22 nt, Human
cugggcucaagaagucuucccu

SEQ ID NO: 91989 - RNA, 20 nt, Human
cugggcucaagugagccucc

SEQ ID NO: 91990 - RNA, 22 nt, Human
cugggcucagcccaugcugucc

SEQ ID NO: 91991 - RNA, 22 nt, Human
cugggcucaguggcucauggcu

SEQ ID NO: 91992 - RNA, 21 nt, Human
cugggcucaugguguuacaga

SEQ ID NO: 91993 - RNA, 18 nt, Human
cugggcucgagagauccu

SEQ ID NO: 91994 - RNA, 22 nt, Human
cugggcucuggggucccggugc

SEQ ID NO: 91995 - RNA, 22 nt, Human
cugggcugagccugggcugugu

SEQ ID NO: 91996 - RNA, 22 nt, Human
cugggcugagcuguggaaacuc

SEQ ID NO: 91997 - RNA, 22 nt, Human
cugggcugcagcgggagcgacg

SEQ ID NO: 91998 - RNA, 23 nt, Human
cugggcugcuugagucccuggcu

SEQ ID NO: 91999 - RNA, 22 nt, Human
cugggcugcuugcugaaggggu

SEQ ID NO: 92000 - RNA, 22 nt, Human
cugggcugucaguuuuguuuua

SEQ ID NO: 92001 - RNA, 23 nt, Human
cugggcuguccugaggucaccuc

SEQ ID NO: 92002 - RNA, 22 nt, Human
cugggcuguuuguucuggucuc

SEQ ID NO: 92003 - RNA, 22 nt, Human
cugggcuuaggaccuggugcgg

SEQ ID NO: 92004 - RNA, 22 nt, Human
cugggcuugcacugcagcgaga

SEQ ID NO: 92005 - RNA, 22 nt, Human
cugggcuuucaggcccuaaggc

SEQ ID NO: 92006 - RNA, 22 nt, Human
cuggggaccagugucuguuugu

SEQ ID NO: 92007 - RNA, 22 nt, Human
cuggggacgucgggcaguguuc

SEQ ID NO: 92008 - RNA, 22 nt, Human
cuggggcaucugacagauaaau

SEQ ID NO: 92009 - RNA, 22 nt, Human
cuggggccacaacggcgcacgc

SEQ ID NO: 92010 - RNA, 22 nt, Human
cuggggcuggugaggcaggcuc

SEQ ID NO: 92011 - RNA, 22 nt, Human
cuggggcuucaaugcuucggug

SEQ ID NO: 92012 - RNA, 22 nt, Human
cugggggccuuacggaacucca

SEQ ID NO: 92013 - RNA, 22 nt, Human
cuggggggcuacugacagagga

SEQ ID NO: 92014 - RNA, 22 nt, Human
cugggggugagcagcagcgacg

SEQ ID NO: 92015 - RNA, 22 nt, Human
cugggguaucugccacaacucu

SEQ ID NO: 92016 - RNA, 22 nt, Human
cuggggugaaggauuaccugag

SEQ ID NO: 92017 - RNA, 22 nt, Human
cugggguggaggagcuccccug

SEQ ID NO: 92018 - RNA, 22 nt, Human
cuggguaaguuccuaaggcuca

SEQ ID NO: 92019 - RNA, 22 nt, Human
cuggaacaguguuggagcuuga

SEQ ID NO: 92020 - RNA, 22 nt, Human
cuggaacccaggccuggaagcc

SEQ ID NO: 92021 - RNA, 22 nt, Human
cuggaagaccccccaggacuca

SEQ ID NO: 92022 - RNA, 22 nt, Human
cuggaagaguaauauaaauuag

SEQ ID NO: 92023 - RNA, 22 nt, Human
cuggaagaguccuaaacagaua

SEQ ID NO: 92024 - RNA, 22 nt, Human
cuggaaggcagagguugcagug

SEQ ID NO: 92025 - RNA, 22 nt, Human
cuggaagggaaaucucuuggca

SEQ ID NO: 92026 - RNA, 22 nt, Human
cuggaagggucagagugaugag

SEQ ID NO: 92027 - RNA, 18 nt, Human
cuggaaguuagucuuugg

SEQ ID NO: 92028 - RNA, 22 nt, Human
cuggaauaaacgaucuucagca

SEQ ID NO: 92029 - RNA, 19 nt, Human
cuggaaugagaacaugccc

SEQ ID NO: 92030 - RNA, 22 nt, Human
cuggaaugauugaaaaggaaug

SEQ ID NO: 92031 - RNA, 22 nt, Human
cuggaaugccucccugucagag

SEQ ID NO: 92032 - RNA, 22 nt, Human
cuggaaugggaaucaggaaaga

SEQ ID NO: 92033 - RNA, 20 nt, Human
cuggaauggguguggguuag

SEQ ID NO: 92034 - RNA, 22 nt, Human
cuggaauguaugggaacccaaa

SEQ ID NO: 92035 - RNA, 22 nt, Human
cuggaauguauguaucuuaaga

SEQ ID NO: 92036 - RNA, 19 nt, Human
cuggaauguggcuggugca

SEQ ID NO: 92037 - RNA, 22 nt, Human
cuggacaaccacucagccucag

SEQ ID NO: 92038 - RNA, 22 nt, Human
cuggacacaaacaucuccucug

SEQ ID NO: 92039 - RNA, 22 nt, Human
cuggacacacuggagucuggca

SEQ ID NO: 92040 - RNA, 22 nt, Human
cuggacacuggggaugcgcagu

SEQ ID NO: 92041 - RNA, 22 nt, Human
cuggacagaaaccaguccuggg

SEQ ID NO: 92042 - RNA, 22 nt, Human
cuggacagaaagggcugcugug

SEQ ID NO: 92043 - RNA, 22 nt, Human
cuggacauuucgcacccuucca

SEQ ID NO: 92044 - RNA, 22 nt, Human
cuggaccagaaaggacauggcu

SEQ ID NO: 92045 - RNA, 19 nt, Human
cuggaccuggaggcccgga

SEQ ID NO: 92046 - RNA, 22 nt, Human
cuggacuucucuucaaagacag

SEQ ID NO: 92047 - RNA, 20 nt, Human
cuggacuugcugcucaccug

SEQ ID NO: 92048 - RNA, 22 nt, Human
cuggacuuggggaggcuagauu

SEQ ID NO: 92049 - RNA, 22 nt, Human
cuggagaacuaguuaaacacgu

SEQ ID NO: 92050 - RNA, 22 nt, Human
cuggagaaguacugagacauuu

SEQ ID NO: 92051 - RNA, 22 nt, Human
cuggagagagaaaaagccuuaa

SEQ ID NO: 92052 - RNA, 22 nt, Human
cuggagaguaaucucuguguua

SEQ ID NO: 92053 - RNA, 22 nt, Human
cuggagcaggcuugucccagcu

SEQ ID NO: 92054 - RNA, 22 nt, Human
cuggagcagguuuaggaguccc

SEQ ID NO: 92055 - RNA, 22 nt, Human
cugucuuugguccugucuguua

SEQ ID NO: 92056 - RNA, 22 nt, Human
cugugaaucuugauguuauuuc

SEQ ID NO: 92057 - RNA, 22 nt, Human
cugugaaugcuaguaagagugc

SEQ ID NO: 92058 - RNA, 22 nt, Human
cugugaauguuauaucucaaug

SEQ ID NO: 92059 - RNA, 22 nt, Human
cugugaauugcaacaauugcaa

SEQ ID NO: 92060 - RNA, 22 nt, Human
cugugacagggaucagaaugca

SEQ ID NO: 92061 - RNA, 22 nt, Human
cugugacccaguuccuggcacc

SEQ ID NO: 92062 - RNA, 22 nt, Human
cugugacuagaccugcaggaga

SEQ ID NO: 92063 - RNA, 18 nt, Human
cugugacuccuagaucuc

SEQ ID NO: 92064 - RNA, 22 nt, Human
cugugacuuccacuacugauca

SEQ ID NO: 92065 - RNA, 22 nt, Human
cugugagauguuucugguuaga

SEQ ID NO: 92066 - RNA, 22 nt, Human
cugugaggcggaaaggacucuc

SEQ ID NO: 92067 - RNA, 22 nt, Human
cugugagggccagagucagggc

SEQ ID NO: 92068 - RNA, 22 nt, Human
cugugagggucacagccaugcc

SEQ ID NO: 92069 - RNA, 22 nt, Human
cugugaugacaggcagggccaa

SEQ ID NO: 92070 - RNA, 22 nt, Human
cugugcacacgugcccaacagu

SEQ ID NO: 92071 - RNA, 22 nt, Human
cugugcagcuggcuuccuggaa

SEQ ID NO: 92072 - RNA, 22 nt, Human
cugugcagcuuggcuucaggcc

SEQ ID NO: 92073 - RNA, 22 nt, Human
cugugcaguggcagcguguggg

SEQ ID NO: 92074 - RNA, 22 nt, Human
cugugcaguggggcucuggguu

SEQ ID NO: 92075 - RNA, 22 nt, Human
cugugcauguguucucugguaa

SEQ ID NO: 92076 - RNA, 22 nt, Human
cugugccaggcccagcugacuu

SEQ ID NO: 92077 - RNA, 22 nt, Human
cugugccaucuuuuugcuaccu

SEQ ID NO: 92078 - RNA, 22 nt, Human
cugugcccauaaucugguauuu

SEQ ID NO: 92079 - RNA, 22 nt, Human
cugugcccggcccagggcccug

SEQ ID NO: 92080 - RNA, 22 nt, Human
cugugcccucuuugcuggccuu

SEQ ID NO: 92081 - RNA, 22 nt, Human
cugugcccuguggcuggcaccu

SEQ ID NO: 92082 - RNA, 22 nt, Human
cugugcccuuuguccucgucuc

SEQ ID NO: 92083 - RNA, 22 nt, Human
cugugccuccagucucgcuucu

SEQ ID NO: 92084 - RNA, 22 nt, Human
cugugccuucuacuucacucua

SEQ ID NO: 92085 - RNA, 22 nt, Human
cugugcucuggcaucgcugcaa

SEQ ID NO: 92086 - RNA, 22 nt, Human
cugugcugcagacgcaguagcu

SEQ ID NO: 92087 - RNA, 23 nt, Human
cugugcugggucccaucuugggc

SEQ ID NO: 92088 - RNA, 22 nt, Human
cugugcugggugugcuuaugau

SEQ ID NO: 92089 - RNA, 22 nt, Human
cugugcuuagccaucacauuca

SEQ ID NO: 92090 - RNA, 22 nt, Human
cugugcuuccaggauggcagcu

SEQ ID NO: 92091 - RNA, 22 nt, Human
cuguggaaaauuuguauguaau

SEQ ID NO: 92092 - RNA, 22 nt, Human
cuguggaaagagccuuuggagg

SEQ ID NO: 92093 - RNA, 22 nt, Human
cuguggaaauaaacaaugcuaa

SEQ ID NO: 92094 - RNA, 22 nt, Human
cuguggaaucaucaggucuuac

SEQ ID NO: 92095 - RNA, 20 nt, Human
cuguggaauuuuaccaugcg

SEQ ID NO: 92096 - RNA, 22 nt, Human
cuguggagaugcagaccaggcc

SEQ ID NO: 92097 - RNA, 22 nt, Human
cuguggagcagggcagggucac

SEQ ID NO: 92098 - RNA, 22 nt, Human
cuguggaguccuggggaaugga

SEQ ID NO: 92099 - RNA, 23 nt, Human
cuguggaucuagagggggcccua

SEQ ID NO: 92100 - RNA, 22 nt, Human
cuguggcaccaauacauuuuuc

SEQ ID NO: 92101 - RNA, 22 nt, Human
cuguggcacucaagaagccucc

SEQ ID NO: 92102 - RNA, 22 nt, Human
cuguggcagaggugacaccucu

SEQ ID NO: 92103 - RNA, 20 nt, Human
cuguggcaucuugaaggagg

SEQ ID NO: 92104 - RNA, 22 nt, Human
cuguggcauugccgaggcuggc

SEQ ID NO: 92105 - RNA, 22 nt, Human
cuguggcauugugaggacugca

SEQ ID NO: 92106 - RNA, 17 nt, Human
cuguggccaccuggaug

SEQ ID NO: 92107 - RNA, 22 nt, Human
cuguggccagagcgccguugac

SEQ ID NO: 92108 - RNA, 15 nt, Human
cuguggcuaaccuaa

SEQ ID NO: 92109 - RNA, 22 nt, Human
cuguggcuaggaagcuguggga

SEQ ID NO: 92110 - RNA, 22 nt, Human
cuguggcucaaaaucccaugau

SEQ ID NO: 92111 - RNA, 22 nt, Human
cuguggcuccagugaaccaaug

SEQ ID NO: 92112 - RNA, 16 nt, Human
cuguggcucccagguu

SEQ ID NO: 92113 - RNA, 22 nt, Human
cuguggcucuuuaguugagcac

SEQ ID NO: 92114 - RNA, 19 nt, Human
cuguggcugaccucuggcc

SEQ ID NO: 92115 - RNA, 22 nt, Human
cuguggcugcgccaucgaaaac

SEQ ID NO: 92116 - RNA, 22 nt, Human
cuguggcuggaauaauaaaugu

SEQ ID NO: 92117 - RNA, 22 nt, Human
cuguggcuguauuuggccagag

SEQ ID NO: 92118 - RNA, 22 nt, Human
cuguggcuuugcagggcuuguu

SEQ ID NO: 92119 - RNA, 22 nt, Human
cuguggcuuugugucuauugua

SEQ ID NO: 92120 - RNA, 21 nt, Human
cugugggaccaagcacuggga

SEQ ID NO: 92121 - RNA, 22 nt, Human
cugugggagcacuggggaccga

SEQ ID NO: 92122 - RNA, 22 nt, Human
cugugggagcagcaccaaggac

SEQ ID NO: 92123 - RNA, 22 nt, Human
cugugggagggaaggcgcggcc

SEQ ID NO: 92124 - RNA, 22 nt, Human
cugugggccuagucuggccuag

SEQ ID NO: 92125 - RNA, 19 nt, Human
cugugggcggaggaggggc

SEQ ID NO: 92126 - RNA, 22 nt, Human
cuguguacccacgugggcaccc

SEQ ID NO: 92127 - RNA, 22 nt, Human
cuguguagccucaugugggcuu

SEQ ID NO: 92128 - RNA, 22 nt, Human
cuguguauugaaaaaggguuaa

SEQ ID NO: 92129 - RNA, 19 nt, Human
cugugucacauuuaugaaa

SEQ ID NO: 92130 - RNA, 22 nt, Human
cuguguccaauggccuuagcag

SEQ ID NO: 92131 - RNA, 22 nt, Human
cugugucccacacgagguguau

SEQ ID NO: 92132 - RNA, 22 nt, Human
cugugucccccucagccaggug

SEQ ID NO: 92133 - RNA, 22 nt, Human
cugugucuaaucaggucaguca

SEQ ID NO: 92134 - RNA, 22 nt, Human
cugugucucccaaggaggguca

SEQ ID NO: 92135 - RNA, 22 nt, Human
cugugucugccugggauccauu

SEQ ID NO: 92136 - RNA, 22 nt, Human
cugugucuucaauguacuggga

SEQ ID NO: 92137 - RNA, 22 nt, Human
cugugugcagggcacaauggaa

SEQ ID NO: 92138 - RNA, 22 nt, Human
cugugugccuccugugaucagg

SEQ ID NO: 92139 - RNA, 22 nt, Human
cuggggcugcagcgaucuucau

SEQ ID NO: 92140 - RNA, 22 nt, Human
cuggggcugcggacgggagccc

SEQ ID NO: 92141 - RNA, 19 nt, Human
cuggggcuuugguacugcc

SEQ ID NO: 92142 - RNA, 22 nt, Human
cugggggcaagcagacagcugu

SEQ ID NO: 92143 - RNA, 22 nt, Human
cugggggcaauggucagagugu

SEQ ID NO: 92144 - RNA, 22 nt, Human
cugggggcagcaagaagccaug

SEQ ID NO: 92145 - RNA, 22 nt, Human
cuggggggagcugcguccagca

SEQ ID NO: 92146 - RNA, 22 nt, Human
cuggggucagggaucagagagc

SEQ ID NO: 92147 - RNA, 22 nt, Human
cugggguccuugccauguguca

SEQ ID NO: 92148 - RNA, 22 nt, Human
cuggggugagcagaaacagggg

SEQ ID NO: 92149 - RNA, 22 nt, Human
cugggguggagauuggcaaucu

SEQ ID NO: 92150 - RNA, 22 nt, Human
cugggguggugcaggccucaug

SEQ ID NO: 92151 - RNA, 22 nt, Human
cuggguaccucaccgcugcugc

SEQ ID NO: 92152 - RNA, 22 nt, Human
cuggguagaagauuccucagga

SEQ ID NO: 92153 - RNA, 22 nt, Human
cugggucaaggaaugcuggugg

SEQ ID NO: 92154 - RNA, 22 nt, Human
cugggucaguggcaagcugggu

SEQ ID NO: 92155 - RNA, 22 nt, Human
cuggguccccucagugacacug

SEQ ID NO: 92156 - RNA, 22 nt, Human
cuggguccuggugcugaguucu

SEQ ID NO: 92157 - RNA, 19 nt, Human
cuggguccuguucuuuuac

SEQ ID NO: 92158 - RNA, 22 nt, Human
cugggucuaaaaauucucagau

SEQ ID NO: 92159 - RNA, 22 nt, Human
cugggucuggaggccaagggug

SEQ ID NO: 92160 - RNA, 22 nt, Human
cugggucuggccacaggaagua

SEQ ID NO: 92161 - RNA, 22 nt, Human
cugggucugucacuagauaaau

SEQ ID NO: 92162 - RNA, 22 nt, Human
cugggugaauuugaaggaaagg

SEQ ID NO: 92163 - RNA, 22 nt, Human
cugggugagcuggccagagggu

SEQ ID NO: 92164 - RNA, 22 nt, Human
gcuguuagucaguggaugcccc

SEQ ID NO: 92165 - RNA, 22 nt, Human
gcuguucaaaagccacaguuac

SEQ ID NO: 92166 - RNA, 22 nt, Human
gcuguucaagacuaggaaauuu

SEQ ID NO: 92167 - RNA, 22 nt, Human
gcuguucagaugcgauucagga

SEQ ID NO: 92168 - RNA, 22 nt, Human
gcuguucagggcacucaugggc

SEQ ID NO: 92169 - RNA, 22 nt, Human
gcuguucuguccccauggguaa

SEQ ID NO: 92170 - RNA, 22 nt, Human
gcuguucuuucagcccagggcu

SEQ ID NO: 92171 - RNA, 22 nt, Human
gcuguuggcgaggagcucagcu

SEQ ID NO: 92172 - RNA, 22 nt, Human
gcuguuggggccagcaggucau

SEQ ID NO: 92173 - RNA, 22 nt, Human
gcuguuuccauuuaagugaauc

SEQ ID NO: 92174 - RNA, 22 nt, Human
gcuguuucggguggagguggag

SEQ ID NO: 92175 - RNA, 22 nt, Human
gcuguuucugugguguauagcc

SEQ ID NO: 92176 - RNA, 22 nt, Human
gcuguuucuuuggcaaacugau

SEQ ID NO: 92177 - RNA, 22 nt, Human
gcuuaaacccaggaaguugugg

SEQ ID NO: 92178 - RNA, 22 nt, Human
gcuuacaaacaacagaaauuaa

SEQ ID NO: 92179 - RNA, 22 nt, Human
gcuuacagauaaugaggagacu

SEQ ID NO: 92180 - RNA, 22 nt, Human
gcuuagaacauguggauugcaa

SEQ ID NO: 92181 - RNA, 22 nt, Human
gcuuagaagauugacccugguu

SEQ ID NO: 92182 - RNA, 16 nt, Human
gcuuagugagagcaac

SEQ ID NO: 92183 - RNA, 22 nt, Human
gcuuauguuuugccauugaaga

SEQ ID NO: 92184 - RNA, 22 nt, Human
gcuuauuagguuauuucaagga

SEQ ID NO: 92185 - RNA, 20 nt, Human
gcuucaaagccauccuuuua

SEQ ID NO: 92186 - RNA, 22 nt, Human
gcuucaaauuaaggugaauccc

SEQ ID NO: 92187 - RNA, 22 nt, Human
gcuucacaacuucuuaauucuu

SEQ ID NO: 92188 - RNA, 22 nt, Human
gcuucacagaaucaauaguugg

SEQ ID NO: 92189 - RNA, 22 nt, Human
gcuucagaaaugaacacugucu

SEQ ID NO: 92190 - RNA, 22 nt, Human
gcuucagauuccucuucuguaa

SEQ ID NO: 92191 - RNA, 22 nt, Human
gcuucagcccaucccaguacau

SEQ ID NO: 92192 - RNA, 22 nt, Human
gcuucagccgggcacuuaauga

SEQ ID NO: 92193 - RNA, 22 nt, Human
gcuucaggcugaauuccuccua

SEQ ID NO: 92194 - RNA, 22 nt, Human
gcuucaggguuaugcaagagug

SEQ ID NO: 92195 - RNA, 22 nt, Human
gcuucauagcauucauugccug

SEQ ID NO: 92196 - RNA, 22 nt, Human
gcuucaugggugugcaaccugu

SEQ ID NO: 92197 - RNA, 22 nt, Human
gcuucauuucucucuguagacc

SEQ ID NO: 92198 - RNA, 22 nt, Human
gcuucauuuugcccucuggugg

SEQ ID NO: 92199 - RNA, 22 nt, Human
gcuuccaaaucuguucaaaaug

SEQ ID NO: 92200 - RNA, 22 nt, Human
gcuuccaagcgguagauagcau

SEQ ID NO: 92201 - RNA, 22 nt, Human
gcuuccaaugcuucuaucacau

SEQ ID NO: 92202 - RNA, 22 nt, Human
gcuuccagaaugacuaggaugu

SEQ ID NO: 92203 - RNA, 20 nt, Human
gcuuccagaggaggccccgu

SEQ ID NO: 92204 - RNA, 20 nt, Human
gcuuccaggagggcugauau

SEQ ID NO: 92205 - RNA, 22 nt, Human
gcuuccagggcucagucacugc

SEQ ID NO: 92206 - RNA, 22 nt, Human
gcuuccaggggcugugggcuga

SEQ ID NO: 92207 - RNA, 22 nt, Human
gcuuccaguaaguugcugccau

SEQ ID NO: 92208 - RNA, 23 nt, Human
gcuuccauucuaguuugcugugc

SEQ ID NO: 92209 - RNA, 23 nt, Human
gcuucccagacaauacugcuucc

SEQ ID NO: 92210 - RNA, 22 nt, Human
gcuucccagcagaggaaagacu

SEQ ID NO: 92211 - RNA, 22 nt, Human
gcuucccaggcgccugaccuuu

SEQ ID NO: 92212 - RNA, 22 nt, Human
gcuucccauuauggaaacucuu

SEQ ID NO: 92213 - RNA, 22 nt, Human
gcuuccugaguacacccucauc

SEQ ID NO: 92214 - RNA, 22 nt, Human
gcuuccugggacaggcuaugug

SEQ ID NO: 92215 - RNA, 22 nt, Human
gcuuccuuauuguugccauagu

SEQ ID NO: 92216 - RNA, 22 nt, Human
gcuuccuugguccuggucuaag

SEQ ID NO: 92217 - RNA, 22 nt, Human
gcuucgcugcuagcuaguuggu

SEQ ID NO: 92218 - RNA, 22 nt, Human
gcuucuauuauuuggagcugag

SEQ ID NO: 92219 - RNA, 22 nt, Human
gcuucucaauucucacccucca

SEQ ID NO: 92220 - RNA, 18 nt, Human
gcuucucauuucuaagca

SEQ ID NO: 92221 - RNA, 22 nt, Human
gcuucucucaggagcaucagcc

SEQ ID NO: 92222 - RNA, 22 nt, Human
gcuucucuucgccuagguccuu

SEQ ID NO: 92223 - RNA, 22 nt, Human
gcuucugcagccaaagaagccg

SEQ ID NO: 92224 - RNA, 22 nt, Human
gcuucugcaggguccucgcugu

SEQ ID NO: 92225 - RNA, 23 nt, Human
gcuucugccauuugcuagcugug

SEQ ID NO: 92226 - RNA, 22 nt, Human
gcuucugcgccuagccucaggu

SEQ ID NO: 92227 - RNA, 22 nt, Human
gcuucuggaagcauaugcaaga

SEQ ID NO: 92228 - RNA, 22 nt, Human
gcuucugggguucuggcaugcu

SEQ ID NO: 92229 - RNA, 22 nt, Human
gcuucuguggugaggucaccuu

SEQ ID NO: 92230 - RNA, 22 nt, Human
gcuucuguuaacuuauguuccc

SEQ ID NO: 92231 - RNA, 22 nt, Human
gcuucuguucaaggauauaagg

SEQ ID NO: 92232 - RNA, 22 nt, Human
gcuugaaaaugacucuugugaa

SEQ ID NO: 92233 - RNA, 22 nt, Human
gcuugaaaauucauagguauuu

SEQ ID NO: 92234 - RNA, 22 nt, Human
gcuugcauuuggaauagauuaa

SEQ ID NO: 92235 - RNA, 23 nt, Human
gcuugccugguguguggcugacc

SEQ ID NO: 92236 - RNA, 22 nt, Human
gcuugcucuuuagccauggcca

SEQ ID NO: 92237 - RNA, 19 nt, Human
gcuugcugcuagguaggga

SEQ ID NO: 92238 - RNA, 22 nt, Human
gcuugcuuauuugcccuucucc

SEQ ID NO: 92239 - RNA, 20 nt, Human
gcuuggaagccaccuguauu

SEQ ID NO: 92240 - RNA, 20 nt, Human
gcuuggaccuucugcucugu

SEQ ID NO: 92241 - RNA, 22 nt, Human
gcuuggagaugggggaugagcc

SEQ ID NO: 92242 - RNA, 20 nt, Human
gcuuggcauaggccacuuga

SEQ ID NO: 92243 - RNA, 22 nt, Human
gcuuggcauugaccauuaucau

SEQ ID NO: 92244 - RNA, 22 nt, Human
gcuuggcauuugcugggagcug

SEQ ID NO: 92245 - RNA, 22 nt, Human
gcuuggccagcagccgggaugc

SEQ ID NO: 92246 - RNA, 22 nt, Human
gcuuggcccugccgccuggguc

SEQ ID NO: 92247 - RNA, 22 nt, Human
gcuuggcugccuuuggauguug

SEQ ID NO: 92248 - RNA, 22 nt, Human
gcuuggcuggaaauagguugag

SEQ ID NO: 92249 - RNA, 22 nt, Human
gcuugggaagggcccuguguac

SEQ ID NO: 92250 - RNA, 19 nt, Human
gcuugggagagggagcuaa

SEQ ID NO: 92251 - RNA, 17 nt, Human
gcuugggcugccuguug

SEQ ID NO: 92252 - RNA, 22 nt, Human
gcuuggggagcucaguguccuu

SEQ ID NO: 92253 - RNA, 22 nt, Human
gcuuuaaauggcuugcccaagu

SEQ ID NO: 92254 - RNA, 20 nt, Human
gcuuuaagccaaaaugugaa

SEQ ID NO: 92255 - RNA, 22 nt, Human
gcuuuaaugaagucacgcaaag

SEQ ID NO: 92256 - RNA, 22 nt, Human
gcuuuacacagcugguucuugu

SEQ ID NO: 92257 - RNA, 22 nt, Human
gcuuuacugucuggaaaguuug

SEQ ID NO: 92258 - RNA, 22 nt, Human
gcuuuagaaauaucacugugga

SEQ ID NO: 92259 - RNA, 22 nt, Human
gcuuuagagaagaaagguugcu

SEQ ID NO: 92260 - RNA, 21 nt, Human
gcuuuagauuuagugagccag

SEQ ID NO: 92261 - RNA, 22 nt, Human
gcuuuaguuugucacuggcauu

SEQ ID NO: 92262 - RNA, 22 nt, Human
gcuuuaugcuacgauuucuagu

SEQ ID NO: 92263 - RNA, 18 nt, Human
gcuuuauuucuuggggaa

SEQ ID NO: 92264 - RNA, 20 nt, Human
gcuuucaagcuugucauugu

SEQ ID NO: 92265 - RNA, 22 nt, Human
gcuuucaaggaauuugguauuu

SEQ ID NO: 92266 - RNA, 22 nt, Human
gcuuucaugaaaauaaucuacu

SEQ ID NO: 92267 - RNA, 22 nt, Human
gcuuucccugcccucagaagga

SEQ ID NO: 92268 - RNA, 22 nt, Human
gcuuucuaaucuauuuccuuac

SEQ ID NO: 92269 - RNA, 22 nt, Human
gcuuucugauugcgaaaacaaa

SEQ ID NO: 92270 - RNA, 22 nt, Human
gcuuucugcucuguaaaauggg

SEQ ID NO: 92271 - RNA, 22 nt, Human
cuuauaaaguccaucugaacaa

SEQ ID NO: 92272 - RNA, 22 nt, Human
cuuauacagaucaagggaaaag

SEQ ID NO: 92273 - RNA, 22 nt, Human
cuuuuaaugggagcaguauuug

SEQ ID NO: 92274 - RNA, 22 nt, Human
cuuuuacaguggaccugccauu

SEQ ID NO: 92275 - RNA, 22 nt, Human
cuguacaucucugaggacagua

SEQ ID NO: 92276 - RNA, 18 nt, Human
cuguaccacccugagggc

SEQ ID NO: 92277 - RNA, 22 nt, Human
cuguacucaagguaaaccagga

SEQ ID NO: 92278 - RNA, 20 nt, Human
cuguagagcacaaguggagg

SEQ ID NO: 92279 - RNA, 22 nt, Human
cuguagcagcugaccuggcuaa

SEQ ID NO: 92280 - RNA, 22 nt, Human
cuguagcaguguuccagcauug

SEQ ID NO: 92281 - RNA, 23 nt, Human
cuguagcuaaaagcugggauuug

SEQ ID NO: 92282 - RNA, 22 nt, Human
cuguagcugggccucggcagug

SEQ ID NO: 92283 - RNA, 22 nt, Human
cuguauaacaucuuuuguuucc

SEQ ID NO: 92284 - RNA, 22 nt, Human
cuguauauaauguaugcauggg

SEQ ID NO: 92285 - RNA, 22 nt, Human
cuguauaucaugguuuugcagu

SEQ ID NO: 92286 - RNA, 22 nt, Human
cuguaugaggaucagacuggac

SEQ ID NO: 92287 - RNA, 22 nt, Human
cuguaugauuccauuucuauaa

SEQ ID NO: 92288 - RNA, 22 nt, Human
cuguaugucuugugaauuguag

SEQ ID NO: 92289 - RNA, 22 nt, Human
cuguaugugaaaaugucaagug

SEQ ID NO: 92290 - RNA, 22 nt, Human
cuguauguuggguaagcauugc

SEQ ID NO: 92291 - RNA, 22 nt, Human
cuguauuagccaggugcacaag

SEQ ID NO: 92292 - RNA, 22 nt, Human
cuguauuaguccauuugagcug

SEQ ID NO: 92293 - RNA, 22 nt, Human
cuguauucugggcagggaagga

SEQ ID NO: 92294 - RNA, 22 nt, Human
cuguauuucccacauucucuau

SEQ ID NO: 92295 - RNA, 22 nt, Human
cuguauuucuuggacaguugcu

SEQ ID NO: 92296 - RNA, 22 nt, Human
cuguauuuucaugccuacguac

SEQ ID NO: 92297 - RNA, 22 nt, Human
cugucaacacgggugugcgugc

SEQ ID NO: 92298 - RNA, 22 nt, Human
cugucacagguucaaacucccc

SEQ ID NO: 92299 - RNA, 22 nt, Human
cugucaccucugcccuuugccc

SEQ ID NO: 92300 - RNA, 22 nt, Human
cugucagagauggggagucaga

SEQ ID NO: 92301 - RNA, 22 nt, Human
cugucaggaagcugggcaucca

SEQ ID NO: 92302 - RNA, 22 nt, Human
cugucagguuggucucagagcu

SEQ ID NO: 92303 - RNA, 22 nt, Human
cugucagguuucccggcucacg

SEQ ID NO: 92304 - RNA, 22 nt, Human
cugucauuuaagacauucugga

SEQ ID NO: 92305 - RNA, 22 nt, Human
cugucauuugucugcucccucu

SEQ ID NO: 92306 - RNA, 22 nt, Human
cugucauuuuuuuagaacaccu

SEQ ID NO: 92307 - RNA, 22 nt, Human
cuguccaccuuugauaggcucu

SEQ ID NO: 92308 - RNA, 22 nt, Human
cuguccagaaagggggcaacaa

SEQ ID NO: 92309 - RNA, 22 nt, Human
cuguccagcgacuaggggaugg

SEQ ID NO: 92310 - RNA, 23 nt, Human
cuguccaggauucuugagagaac

SEQ ID NO: 92311 - RNA, 18 nt, Human
cuguccaguagacucugc

SEQ ID NO: 92312 - RNA, 22 nt, Human
cuguccauauucaagggguagg

SEQ ID NO: 92313 - RNA, 19 nt, Human
cugucccagacucugcucu

SEQ ID NO: 92314 - RNA, 22 nt, Human
cugucccauccuuacucuaccc

SEQ ID NO: 92315 - RNA, 22 nt, Human
cuguccccgcgaguccagagcu

SEQ ID NO: 92316 - RNA, 22 nt, Human
cugucccucaguucugggcaaa

SEQ ID NO: 92317 - RNA, 22 nt, Human
cuguccuaugaguacucacuag

SEQ ID NO: 92318 - RNA, 21 nt, Human
cuguccucagauguggacgag

SEQ ID NO: 92319 - RNA, 22 nt, Human
cuguccuccagacgacaguccc

SEQ ID NO: 92320 - RNA, 22 nt, Human
cuguccucuguccucagcagga

SEQ ID NO: 92321 - RNA, 22 nt, Human
cuguccugauggugccacuggu

SEQ ID NO: 92322 - RNA, 23 nt, Human
cuguccugccauccacagcggcc

SEQ ID NO: 92323 - RNA, 22 nt, Human
cuguccuggugcuggggauccc

SEQ ID NO: 92324 - RNA, 22 nt, Human
cuguccuguagcuccaucaguc

SEQ ID NO: 92325 - RNA, 21 nt, Human
cugucgcaggucgccccaccc

SEQ ID NO: 92326 - RNA, 22 nt, Human
cugucguguucacuguggccua

SEQ ID NO: 92327 - RNA, 22 nt, Human
cugucuccagggcaggugcagg

SEQ ID NO: 92328 - RNA, 22 nt, Human
cugucuccuccacugcauggga

SEQ ID NO: 92329 - RNA, 22 nt, Human
cugucucugauaagcucgaggg

SEQ ID NO: 92330 - RNA, 22 nt, Human
cugucucugucuuaacucccag

SEQ ID NO: 92331 - RNA, 22 nt, Human
cugucugcuaugcuuguuguca

SEQ ID NO: 92332 - RNA, 22 nt, Human
cugucugcucauaauggagggc

SEQ ID NO: 92333 - RNA, 22 nt, Human
cugucuggugucccugucuaca

SEQ ID NO: 92334 - RNA, 22 nt, Human
cugucuguaucccuguugguaa

SEQ ID NO: 92335 - RNA, 22 nt, Human
cugucugucccgucaccgcccc

SEQ ID NO: 92336 - RNA, 22 nt, Human
cugucuguccugaguucaacca

SEQ ID NO: 92337 - RNA, 22 nt, Human
cugucuuuuacuaucauuuacu

SEQ ID NO: 92338 - RNA, 22 nt, Human
cugugaauuuaaagcacacauc

SEQ ID NO: 92339 - RNA, 22 nt, Human
cugugaauuuuccaauauuccg

SEQ ID NO: 92340 - RNA, 22 nt, Human
cugugacagagcuugagugaga

SEQ ID NO: 92341 - RNA, 22 nt, Human
cugugaccuccaggaaggggug

SEQ ID NO: 92342 - RNA, 22 nt, Human
cugugaccuuagcaagggaaau

SEQ ID NO: 92343 - RNA, 22 nt, Human
cugugacugcagcaccaaguaa

SEQ ID NO: 92344 - RNA, 22 nt, Human
cugugacugggugacaguccuc

SEQ ID NO: 92345 - RNA, 22 nt, Human
cugugacuugccaaaggucauu

SEQ ID NO: 92346 - RNA, 22 nt, Human
cugugagaaaggugauggaggu

SEQ ID NO: 92347 - RNA, 22 nt, Human
cugugagagugguggccuaggc

SEQ ID NO: 92348 - RNA, 22 nt, Human
cugugagauaugcauaugcucu

SEQ ID NO: 92349 - RNA, 22 nt, Human
cugugagggcagggaccagagg

SEQ ID NO: 92350 - RNA, 22 nt, Human
cugugauuguuaguuccuauac

SEQ ID NO: 92351 - RNA, 22 nt, Human
cugugcaagcccaagauaaaac

SEQ ID NO: 92352 - RNA, 18 nt, Human
cugugcagcaaacugagc

SEQ ID NO: 92353 - RNA, 22 nt, Human
cugugccacugcccugccacgc

SEQ ID NO: 92354 - RNA, 22 nt, Human
cugugccaggcccgggugggug

SEQ ID NO: 92355 - RNA, 22 nt, Human
cugugccauccuagggcugcug

SEQ ID NO: 92356 - RNA, 22 nt, Human
cugugcccagcucccugacugc

SEQ ID NO: 92357 - RNA, 22 nt, Human
cugugccuaagaugcaugucuc

SEQ ID NO: 92358 - RNA, 22 nt, Human
cugugccuccaaguggucucug

SEQ ID NO: 92359 - RNA, 22 nt, Human
cugugccuuuguagcugugccu

SEQ ID NO: 92360 - RNA, 22 nt, Human
cugugcguaaguagccaaaaua

SEQ ID NO: 92361 - RNA, 17 nt, Human
cugugcucgagugaugg

SEQ ID NO: 92362 - RNA, 22 nt, Human
cugugcugaacaauucugcauu

SEQ ID NO: 92363 - RNA, 22 nt, Human
cugugcugaggaugcaguuucu

SEQ ID NO: 92364 - RNA, 22 nt, Human
cugugcuggauucugaggcuac

SEQ ID NO: 92365 - RNA, 22 nt, Human
cugugcugguccagggagcugg

SEQ ID NO: 92366 - RNA, 22 nt, Human
cugugcuucagagucagugcug

SEQ ID NO: 92367 - RNA, 22 nt, Human
cugugcuugacagugggaagca

SEQ ID NO: 92368 - RNA, 22 nt, Human
cugugcuuguguucauuguuaa

SEQ ID NO: 92369 - RNA, 19 nt, Human
cugugcuuuaaacuccuau

SEQ ID NO: 92370 - RNA, 22 nt, Human
cugugcuuucaggccgcugugu

SEQ ID NO: 92371 - RNA, 22 nt, Human
cuguggaaggccuguccugaaa

SEQ ID NO: 92372 - RNA, 21 nt, Human
cuguggaagggaacuagaggg

SEQ ID NO: 92373 - RNA, 22 nt, Human
cuguggaagguuuagauaggua

SEQ ID NO: 92374 - RNA, 22 nt, Human
cuguggagcuuguggcaguggg

SEQ ID NO: 92375 - RNA, 22 nt, Human
cuguggagugcuuggcucagug

SEQ ID NO: 92376 - RNA, 22 nt, Human
cuguggaguggggaguacuggu

SEQ ID NO: 92377 - RNA, 22 nt, Human
cuguggauuuaggcagagcuga

SEQ ID NO: 92378 - RNA, 22 nt, Human
cuguggcaggugucuggggcag

SEQ ID NO: 92379 - RNA, 20 nt, Human
cuguggcaucugucauggug

SEQ ID NO: 92380 - RNA, 22 nt, Human
cuguggcauuaauaaaagugca

SEQ ID NO: 92381 - RNA, 22 nt, Human
cuguggcauuuagagguugcgu

SEQ ID NO: 92382 - RNA, 22 nt, Human
gaaaugaaacaggcuuuuaagg

SEQ ID NO: 92383 - RNA, 22 nt, Human
gaaaugguaaacauuuuaaugg

SEQ ID NO: 92384 - RNA, 22 nt, Human
gaaaugguagaguaggaagauu

SEQ ID NO: 92385 - RNA, 22 nt, Human
gaaauggugugcugugcaauga

SEQ ID NO: 92386 - RNA, 20 nt, Human
gaaauguacacauuaccaca

SEQ ID NO: 92387 - RNA, 22 nt, Human
gaaaugucaagauauguuugga

SEQ ID NO: 92388 - RNA, 22 nt, Human
gaaaugucauagucuucaagcc

SEQ ID NO: 92389 - RNA, 22 nt, Human
gaaaugugcagaauguguuaga

SEQ ID NO: 92390 - RNA, 22 nt, Human
gaaaugugugacaaguuucaau

SEQ ID NO: 92391 - RNA, 22 nt, Human
gaaauguguuguucauuucuaa

SEQ ID NO: 92392 - RNA, 21 nt, Human
cuguggccuggcuagcaccgu

SEQ ID NO: 92393 - RNA, 22 nt, Human
cuguggccuuuguuggaggucc

SEQ ID NO: 92394 - RNA, 22 nt, Human
cuguggcucaauugccuacuga

SEQ ID NO: 92395 - RNA, 22 nt, Human
cuguggcucagcacggggucag

SEQ ID NO: 92396 - RNA, 22 nt, Human
cuguggcugaguuccuuauguu

SEQ ID NO: 92397 - RNA, 22 nt, Human
cuguggcugcagaccuuaaaca

SEQ ID NO: 92398 - RNA, 22 nt, Human
cuguggcugcguaggucuggca

SEQ ID NO: 92399 - RNA, 22 nt, Human
cuguggcuggccugucugacau

SEQ ID NO: 92400 - RNA, 22 nt, Human
cuguggcugugaaacuucucag

SEQ ID NO: 92401 - RNA, 22 nt, Human
cuguggcuucagcauucagagc

SEQ ID NO: 92402 - RNA, 22 nt, Human
cuguggcuucuagguccccgau

SEQ ID NO: 92403 - RNA, 22 nt, Human
cuguggcuucugcuugggccuc

SEQ ID NO: 92404 - RNA, 22 nt, Human
cugugggaacacugaggacuuc

SEQ ID NO: 92405 - RNA, 18 nt, Human
cugugggaaggcuuucua

SEQ ID NO: 92406 - RNA, 23 nt, Human
cugugggaagucggggagcgcgc

SEQ ID NO: 92407 - RNA, 22 nt, Human
cugugggacucugaggaaaagc

SEQ ID NO: 92408 - RNA, 22 nt, Human
cugugggagaagcuagcacagg

SEQ ID NO: 92409 - RNA, 22 nt, Human
cugugggauucaugacauuaau

SEQ ID NO: 92410 - RNA, 20 nt, Human
cugugggccucacuuggggu

SEQ ID NO: 92411 - RNA, 22 nt, Human
cugugggcuccugcagcucagg

SEQ ID NO: 92412 - RNA, 18 nt, Human
cugugggcuggugcauga

SEQ ID NO: 92413 - RNA, 22 nt, Human
cuguggggaagauagaaccgac

SEQ ID NO: 92414 - RNA, 22 nt, Human
cuguggggagcugaucagauca

SEQ ID NO: 92415 - RNA, 22 nt, Human
cuguggucaugaguccuuccau

SEQ ID NO: 92416 - RNA, 20 nt, Human
cuguggugagcaggagagua

SEQ ID NO: 92417 - RNA, 22 nt, Human
cuguguagagcggcugcgagcg

SEQ ID NO: 92418 - RNA, 22 nt, Human
cuguguaguauuuguacacaua

SEQ ID NO: 92419 - RNA, 20 nt, Human
cuguguagugcucagguaag

SEQ ID NO: 92420 - RNA, 22 nt, Human
cuguguccuuuaaaaaagacac

SEQ ID NO: 92421 - RNA, 22 nt, Human
cuguguccuuuuaguugcugug

SEQ ID NO: 92422 - RNA, 22 nt, Human
cugugucggacgugggcagcag

SEQ ID NO: 92423 - RNA, 22 nt, Human
cugugucucuccuuacaagacu

SEQ ID NO: 92424 - RNA, 22 nt, Human
cugugucugaauaacucugugu

SEQ ID NO: 92425 - RNA, 22 nt, Human
cugugucuucacauuugugugc

SEQ ID NO: 92426 - RNA, 22 nt, Human
cugugucuuccucugcccaggc

SEQ ID NO: 92427 - RNA, 22 nt, Human
cugugucuuuccuacuuugugg

SEQ ID NO: 92428 - RNA, 22 nt, Human
cugugugagcaucacuucagau

SEQ ID NO: 92429 - RNA, 22 nt, Human
cugugugcauaguugugcucaa

SEQ ID NO: 92430 - RNA, 22 nt, Human
cugugugccuagaggguggccg

SEQ ID NO: 92431 - RNA, 22 nt, Human
cugugugcucggauggacucgu

SEQ ID NO: 92432 - RNA, 23 nt, Human
cugugugugccgaggguggccac

SEQ ID NO: 92433 - RNA, 22 nt, Human
cugugugugucugcagcauacu

SEQ ID NO: 92434 - RNA, 22 nt, Human
cuguguucagugcuacugaguu

SEQ ID NO: 92435 - RNA, 22 nt, Human
cuguguuugacaggcggucucc

SEQ ID NO: 92436 - RNA, 22 nt, Human
cuguguuuuuggucugaucuau

SEQ ID NO: 92437 - RNA, 22 nt, Human
cuguuaaaagcacugccauccu

SEQ ID NO: 92438 - RNA, 23 nt, Human
cuguuaaauuccuuaagagcagg

SEQ ID NO: 92439 - RNA, 22 nt, Human
cuguuaagcaacaugaguaagu

SEQ ID NO: 92440 - RNA, 22 nt, Human
cuguuaauggaggacuacagga

SEQ ID NO: 92441 - RNA, 22 nt, Human
cuguuacuggacgcacgcagcu

SEQ ID NO: 92442 - RNA, 16 nt, Human
cuguuacuugacuguu

SEQ ID NO: 92443 - RNA, 23 nt, Human
cuguuauauucuagggagcugca

SEQ ID NO: 92444 - RNA, 22 nt, Human
cuguuauucaagacaaaggcag

SEQ ID NO: 92445 - RNA, 22 nt, Human
cuguuauuugagaguguugaau

SEQ ID NO: 92446 - RNA, 22 nt, Human
cuguuauuugcuggaagaguuu

SEQ ID NO: 92447 - RNA, 22 nt, Human
cuguucacacacuuguacucuc

SEQ ID NO: 92448 - RNA, 22 nt, Human
cuguucacagaauccuccccug

SEQ ID NO: 92449 - RNA, 18 nt, Human
cuguucagcugaacuaca

SEQ ID NO: 92450 - RNA, 22 nt, Human
cuguucauguugaggcauaggg

SEQ ID NO: 92451 - RNA, 22 nt, Human
cuguuccagaucaggacaccgu

SEQ ID NO: 92452 - RNA, 18 nt, Human
cuguucuagaacuccugu

SEQ ID NO: 92453 - RNA, 22 nt, Human
cuguucucuggcgguggcuguu

SEQ ID NO: 92454 - RNA, 22 nt, Human
cuguucuucuaguccacugaca

SEQ ID NO: 92455 - RNA, 22 nt, Human
cuguucuuuaguuccacugcaa

SEQ ID NO: 92456 - RNA, 22 nt, Human
cuguugcucccagggagagggu

SEQ ID NO: 92457 - RNA, 22 nt, Human
cuguugcucugaacaggucuug

SEQ ID NO: 92458 - RNA, 19 nt, Human
cuguugcuggggcucucuu

SEQ ID NO: 92459 - RNA, 22 nt, Human
cuguugguguugauuaaauagu

SEQ ID NO: 92460 - RNA, 22 nt, Human
cuguuguaucauuuguucacau

SEQ ID NO: 92461 - RNA, 22 nt, Human
cuguugucuucauugucauauc

SEQ ID NO: 92462 - RNA, 22 nt, Human
cuguugugaaauguccaucaac

SEQ ID NO: 92463 - RNA, 22 nt, Human
cuguuguuccgggagcugcagc

SEQ ID NO: 92464 - RNA, 22 nt, Human
cuguuuaaugagguguaacaac

SEQ ID NO: 92465 - RNA, 22 nt, Human
cuguuuacuuauugguaaagag

SEQ ID NO: 92466 - RNA, 22 nt, Human
cuguuuauagcagagcaagccu

SEQ ID NO: 92467 - RNA, 22 nt, Human
cuguuuaugaagcugugguuua

SEQ ID NO: 92468 - RNA, 22 nt, Human
cuguuuauuacguaauuaauau

SEQ ID NO: 92469 - RNA, 22 nt, Human
cuguuuauucucaucuaaaaug

SEQ ID NO: 92470 - RNA, 22 nt, Human
cuguuuauugagcaaucugcca

SEQ ID NO: 92471 - RNA, 22 nt, Human
cuguuucaaaacuaguacaaca

SEQ ID NO: 92472 - RNA, 22 nt, Human
cuguuucaaaggguacugugag

SEQ ID NO: 92473 - RNA, 22 nt, Human
cuguuucaauuugaggaucagc

SEQ ID NO: 92474 - RNA, 22 nt, Human
cuguuucaccacuggcucuuug

SEQ ID NO: 92475 - RNA, 22 nt, Human
cuguuucagaacuucuuaaaaa

SEQ ID NO: 92476 - RNA, 22 nt, Human
cuguuucccuccagggggugga

SEQ ID NO: 92477 - RNA, 22 nt, Human
cuguuuccuaccguuuuucauu

SEQ ID NO: 92478 - RNA, 22 nt, Human
cuguuuccugucuucucacuau

SEQ ID NO: 92479 - RNA, 22 nt, Human
cuguuuguccaacuugucccga

SEQ ID NO: 92480 - RNA, 17 nt, Human
cuguuuguucugggagc

SEQ ID NO: 92481 - RNA, 22 nt, Human
cuguuuuucagaagguaaggga

SEQ ID NO: 92482 - RNA, 22 nt, Human
cuguuuuugugcugugucuccc

SEQ ID NO: 92483 - RNA, 22 nt, Human
cuuaaacugaaagcuacaagau

SEQ ID NO: 92484 - RNA, 18 nt, Human
cuuaaacuguccccagua

SEQ ID NO: 92485 - RNA, 22 nt, Human
cuuaaagaguauuuaauauaau

SEQ ID NO: 92486 - RNA, 22 nt, Human
cuuaaaggagguuuuguuucca

SEQ ID NO: 92487 - RNA, 22 nt, Human
cuuaaagucuauccuuucuaga

SEQ ID NO: 92488 - RNA, 22 nt, Human
cuuaaauucuuaaugcccucau

SEQ ID NO: 92489 - RNA, 22 nt, Human
cuuaaauuuucaucuacaagaa

SEQ ID NO: 92490 - RNA, 20 nt, Human
cuuaacaauggcucugauga

SEQ ID NO: 92491 - RNA, 23 nt, Human
gaagcagaugucugaguaggcag

SEQ ID NO: 92492 - RNA, 22 nt, Human
gaagcagccacggggagacaga

SEQ ID NO: 92493 - RNA, 20 nt, Human
gaagcagcuucauguagaca

SEQ ID NO: 92494 - RNA, 22 nt, Human
gaagcagggagcagucuuugca

SEQ ID NO: 92495 - RNA, 22 nt, Human
gaagcaguagcaacugugucuu

SEQ ID NO: 92496 - RNA, 22 nt, Human
gaagcaguauccugacagcacc

SEQ ID NO: 92497 - RNA, 22 nt, Human
gaagcagucagcagcaccuuug

SEQ ID NO: 92498 - RNA, 22 nt, Human
gaagcaucagcaauggcuggaa

SEQ ID NO: 92499 - RNA, 21 nt, Human
gaagccaagacaggaucaagg

SEQ ID NO: 92500 - RNA, 22 nt, Human
gaagccaaguccucgaguuuca

SEQ ID NO: 92501 - RNA, 22 nt, Human
gaagccaagugcaaaugccuua

SEQ ID NO: 92502 - RNA, 22 nt, Human
gaagccacagggaaggagaaca

SEQ ID NO: 92503 - RNA, 22 nt, Human
gaagccacccuccuuccagccc

SEQ ID NO: 92504 - RNA, 20 nt, Human
gaagccagaggggaaaggag

SEQ ID NO: 92505 - RNA, 22 nt, Human
gaagccagccuugucugccucu

SEQ ID NO: 92506 - RNA, 22 nt, Human
gaagcccacguuuggugaugua

SEQ ID NO: 92507 - RNA, 22 nt, Human
gaagccccaaacccucgccauc

SEQ ID NO: 92508 - RNA, 23 nt, Human
gaagcccucauugguucuccaga

SEQ ID NO: 92509 - RNA, 22 nt, Human
cuuacgugauaacuucucaaaa

SEQ ID NO: 92510 - RNA, 22 nt, Human
cuuagaaagaguuuucuccccu

SEQ ID NO: 92511 - RNA, 22 nt, Human
cuuagaaauaaugguuucaguu

SEQ ID NO: 92512 - RNA, 18 nt, Human
cuuagaacaucauuccuu

SEQ ID NO: 92513 - RNA, 22 nt, Human
cuuagaagugggcuauaauuag

SEQ ID NO: 92514 - RNA, 22 nt, Human
cuuagaaugucuacucuuacca

SEQ ID NO: 92515 - RNA, 22 nt, Human
cuuagaauuuugccuacuacaa

SEQ ID NO: 92516 - RNA, 22 nt, Human
cuuagagccuuacucuucuugu

SEQ ID NO: 92517 - RNA, 22 nt, Human
cuuagcagaauuccaagcuuga

SEQ ID NO: 92518 - RNA, 22 nt, Human
cuuagcagauaaaaaccuucag

SEQ ID NO: 92519 - RNA, 22 nt, Human
cuuagcaguggguaccagggcu

SEQ ID NO: 92520 - RNA, 22 nt, Human
cuuagcccugagaguucugagc

SEQ ID NO: 92521 - RNA, 22 nt, Human
cuuagcuagaggcaauuauguu

SEQ ID NO: 92522 - RNA, 22 nt, Human
cuuagcuagugcucagcuguca

SEQ ID NO: 92523 - RNA, 22 nt, Human
cuuagcuucucugcaucugugu

SEQ ID NO: 92524 - RNA, 22 nt, Human
cuuagcuuuaaaagugagaucu

SEQ ID NO: 92525 - RNA, 22 nt, Human
cuuagcuuuguccuaggucucu

SEQ ID NO: 92526 - RNA, 22 nt, Human
cuuagcuuuguuuaacacaggg

SEQ ID NO: 92527 - RNA, 22 nt, Human
cuuaggaaauauauacuaaacu

SEQ ID NO: 92528 - RNA, 22 nt, Human
cuuaggaacacuuacugguacu

SEQ ID NO: 92529 - RNA, 22 nt, Human
cuuaggaugaguuuuugcguuu

SEQ ID NO: 92530 - RNA, 22 nt, Human
cuuaggcaaccaggucaaugcu

SEQ ID NO: 92531 - RNA, 22 nt, Human
cuuaggcaagcagagcccaucc

SEQ ID NO: 92532 - RNA, 22 nt, Human
cuuaggcagacugcugaugcag

SEQ ID NO: 92533 - RNA, 22 nt, Human
cuuagggaauugggaggaugcc

SEQ ID NO: 92534 - RNA, 22 nt, Human
cuuaguuuagguaaacccagca

SEQ ID NO: 92535 - RNA, 17 nt, Human
cuuauacuuuacggaag

SEQ ID NO: 92536 - RNA, 22 nt, Human
cuuauagaauguuuuuauaugu

SEQ ID NO: 92537 - RNA, 22 nt, Human
cuuaucagauuaucugggcugu

SEQ ID NO: 92538 - RNA, 19 nt, Human
cuuaugcagcugagcuugg

SEQ ID NO: 92539 - RNA, 22 nt, Human
cuuauggccugcccacaguagu

SEQ ID NO: 92540 - RNA, 22 nt, Human
cuuauguaaacuacagauaaua

SEQ ID NO: 92541 - RNA, 22 nt, Human
cuuauguauauuuggaacguac

SEQ ID NO: 92542 - RNA, 22 nt, Human
cuuauucagcacuugcucugua

SEQ ID NO: 92543 - RNA, 23 nt, Human
cuuauucauucauguagcccauu

SEQ ID NO: 92544 - RNA, 22 nt, Human
cuuauucuacuccacaagcucu

SEQ ID NO: 92545 - RNA, 22 nt, Human
cuuauugaaagccccugugccu

SEQ ID NO: 92546 - RNA, 22 nt, Human
cuuauugugagaugcgauaauu

SEQ ID NO: 92547 - RNA, 22 nt, Human
cuuauuguucagauagagauga

SEQ ID NO: 92548 - RNA, 18 nt, Human
cuuauuguuuaaauggcc

SEQ ID NO: 92549 - RNA, 22 nt, Human
cuuauuuaaugaggguuagaau

SEQ ID NO: 92550 - RNA, 22 nt, Human
cuuauuuugcugaugacccagg

SEQ ID NO: 92551 - RNA, 22 nt, Human
cuucaaaucccccugaguuuga

SEQ ID NO: 92552 - RNA, 22 nt, Human
cuucaaaugugauuuuaauaac

SEQ ID NO: 92553 - RNA, 22 nt, Human
cuucaacuucccuagaugucau

SEQ ID NO: 92554 - RNA, 22 nt, Human
cuucaagagaaugcagggaugu

SEQ ID NO: 92555 - RNA, 22 nt, Human
cuucaagauccauagauauugc

SEQ ID NO: 92556 - RNA, 22 nt, Human
cuucaaguugggcggcgggcag

SEQ ID NO: 92557 - RNA, 22 nt, Human
cuucaauaccugcguugcuagu

SEQ ID NO: 92558 - RNA, 22 nt, Human
cuucaauugccaccagcuagca

SEQ ID NO: 92559 - RNA, 23 nt, Human
cuucacaaucaaaaucaguucug

SEQ ID NO: 92560 - RNA, 22 nt, Human
cuucacaaucaccuuuucggaa

SEQ ID NO: 92561 - RNA, 22 nt, Human
cuucacagagucccugauuguu

SEQ ID NO: 92562 - RNA, 22 nt, Human
cuucacagccaacaugggcaca

SEQ ID NO: 92563 - RNA, 22 nt, Human
cuucacaguaaauccagaagaa

SEQ ID NO: 92564 - RNA, 22 nt, Human
cuucacaucucccuaaaacagc

SEQ ID NO: 92565 - RNA, 22 nt, Human
cuucacauguuggaguccuuug

SEQ ID NO: 92566 - RNA, 22 nt, Human
cuucacauuugcgaaggccaaa

SEQ ID NO: 92567 - RNA, 22 nt, Human
cuucaccuccuccucugugggc

SEQ ID NO: 92568 - RNA, 22 nt, Human
cuucacuaaucacugaacucca

SEQ ID NO: 92569 - RNA, 22 nt, Human
cuucacugugcuucaagcagcu

SEQ ID NO: 92570 - RNA, 22 nt, Human
cuucacuugcucaucaugcuau

SEQ ID NO: 92571 - RNA, 22 nt, Human
cuucagaagccugcagccuuug

SEQ ID NO: 92572 - RNA, 22 nt, Human
cuucagaauuccucagccucag

SEQ ID NO: 92573 - RNA, 22 nt, Human
cuucagagaacuugaucgcugc

SEQ ID NO: 92574 - RNA, 22 nt, Human
cuucagagaguccagggacugc

SEQ ID NO: 92575 - RNA, 22 nt, Human
cuucagagugacucagcaucuu

SEQ ID NO: 92576 - RNA, 22 nt, Human
cuucagauccuaauuugucuuu

SEQ ID NO: 92577 - RNA, 21 nt, Human
cuucagcaaauacuuggcagg

SEQ ID NO: 92578 - RNA, 23 nt, Human
cuucagcagaaacauaaauucuc

SEQ ID NO: 92579 - RNA, 22 nt, Human
cuucagcagaugcaaaaccccu

SEQ ID NO: 92580 - RNA, 19 nt, Human
cuucagcaucuccggagcu

SEQ ID NO: 92581 - RNA, 22 nt, Human
cuucagcaucuuuuucuugggg

SEQ ID NO: 92582 - RNA, 22 nt, Human
cuucagcccagccuccgccucc

SEQ ID NO: 92583 - RNA, 22 nt, Human
cuucagcuaggaucccugcagc

SEQ ID NO: 92584 - RNA, 22 nt, Human
cuucagggguguuaguuuugug

SEQ ID NO: 92585 - RNA, 22 nt, Human
cuucagggugacgcaggcugca

SEQ ID NO: 92586 - RNA, 22 nt, Human
cuucagugacauuccuucccuc

SEQ ID NO: 92587 - RNA, 18 nt, Human
cuucaguggcugcucugc

SEQ ID NO: 92588 - RNA, 22 nt, Human
cuucaguguucccaucuguaaa

SEQ ID NO: 92589 - RNA, 22 nt, Human
cuucaguguugccagggccuag

SEQ ID NO: 92590 - RNA, 22 nt, Human
cuucaguucuaaaguagaaugu

SEQ ID NO: 92591 - RNA, 22 nt, Human
cuucauaauuaccuugucugcc

SEQ ID NO: 92592 - RNA, 22 nt, Human
cuucaugccuguuuuuaaauuu

SEQ ID NO: 92593 - RNA, 22 nt, Human
cuucaugucggcggcucucggg

SEQ ID NO: 92594 - RNA, 22 nt, Human
cuucauuggcuuccauagaugc

SEQ ID NO: 92595 - RNA, 22 nt, Human
cuucauuuggagaacugugcuu

SEQ ID NO: 92596 - RNA, 18 nt, Human
cuucauuuguagaguucc

SEQ ID NO: 92597 - RNA, 22 nt, Human
cuuccagagcugggcugaccuu

SEQ ID NO: 92598 - RNA, 22 nt, Human
cuuccagcuuguggcgcuuucc

SEQ ID NO: 92599 - RNA, 23 nt, Human
cuuccaguacugcacacucaagg

SEQ ID NO: 92600 - RNA, 22 nt, Human
gaaccuuuuuccaaguaaacaa

SEQ ID NO: 92601 - RNA, 22 nt, Human
gaacuaaaagcuaacaucaggc

SEQ ID NO: 92602 - RNA, 22 nt, Human
gaacuaaauuugacagacaaca

SEQ ID NO: 92603 - RNA, 22 nt, Human
gaacucauuagccugcuuucag

SEQ ID NO: 92604 - RNA, 22 nt, Human
gaacuccagaugacucaggaac

SEQ ID NO: 92605 - RNA, 22 nt, Human
gaacucuagguaaaugagauau

SEQ ID NO: 92606 - RNA, 22 nt, Human
gaacugaagacuuuuacuguac

SEQ ID NO: 92607 - RNA, 22 nt, Human
gaacugcauugugguauauguu

SEQ ID NO: 92608 - RNA, 22 nt, Human
gaacugggaaugcugucccauc

SEQ ID NO: 92609 - RNA, 22 nt, Human
gaacuggucuuuuagguuuucu

SEQ ID NO: 92610 - RNA, 22 nt, Human
gaacuguauaggagcaguguuu

SEQ ID NO: 92611 - RNA, 22 nt, Human
gaacuguucccucacaggcugg

SEQ ID NO: 92612 - RNA, 23 nt, Human
gaacuguugaugaauagaauaua

SEQ ID NO: 92613 - RNA, 22 nt, Human
gaacuuggaacuggggcuacug

SEQ ID NO: 92614 - RNA, 22 nt, Human
gaacuuuaaucccuugggcuua

SEQ ID NO: 92615 - RNA, 22 nt, Human
gaacuuuaccauuuagguaacu

SEQ ID NO: 92616 - RNA, 22 nt, Human
gaacuuuaucaaaaguuguuua

SEQ ID NO: 92617 - RNA, 22 nt, Human
gaacuuuauuccagaagaaagc

SEQ ID NO: 92618 - RNA, 18 nt, Human
gaacuuuuggcuuugugu

SEQ ID NO: 92619 - RNA, 22 nt, Human
gaagaaagaucaaauaguuucc

SEQ ID NO: 92620 - RNA, 22 nt, Human
gaagaaagggaauuaacuugag

SEQ ID NO: 92621 - RNA, 22 nt, Human
gaagaacacuucaugauucauu

SEQ ID NO: 92622 - RNA, 22 nt, Human
gaagaacgucuuauaaauucac

SEQ ID NO: 92623 - RNA, 22 nt, Human
gaagaacugacaaacuagauca

SEQ ID NO: 92624 - RNA, 22 nt, Human
gaagaagcaggaguguguagca

SEQ ID NO: 92625 - RNA, 19 nt, Human
gaagaagcuugagaaguag

SEQ ID NO: 92626 - RNA, 17 nt, Human
gaagaaggaaucuagaa

SEQ ID NO: 92627 - RNA, 22 nt, Human
gaagaagucauucugucuuuca

SEQ ID NO: 92628 - RNA, 22 nt, Human
gaagaauauucuugaucuuaga

SEQ ID NO: 92629 - RNA, 22 nt, Human
gaagaaucaagcaguaauuugu

SEQ ID NO: 92630 - RNA, 21 nt, Human
gaagacaaaugggaauagcug

SEQ ID NO: 92631 - RNA, 22 nt, Human
gaagacaauucuggguggagga

SEQ ID NO: 92632 - RNA, 21 nt, Human
gaagacacauaaccucucucc

SEQ ID NO: 92633 - RNA, 22 nt, Human
gaagacaucguguggacuaaca

SEQ ID NO: 92634 - RNA, 22 nt, Human
gaagacauuaagucuaugucac

SEQ ID NO: 92635 - RNA, 22 nt, Human
gaagacuacuguugcacucaua

SEQ ID NO: 92636 - RNA, 22 nt, Human
gaagagagaacauuacauaaac

SEQ ID NO: 92637 - RNA, 22 nt, Human
gaagagagagugggguucugcg

SEQ ID NO: 92638 - RNA, 22 nt, Human
gaagagcuauguccagggagca

SEQ ID NO: 92639 - RNA, 22 nt, Human
gaagagcugcaguuuccugggc

SEQ ID NO: 92640 - RNA, 22 nt, Human
gaagagcugcucagaacaugau

SEQ ID NO: 92641 - RNA, 22 nt, Human
gaagagcugugauucaggcuua

SEQ ID NO: 92642 - RNA, 22 nt, Human
gaagaggcuuuccuagggcaag

SEQ ID NO: 92643 - RNA, 22 nt, Human
gaagagguucaacguggucauc

SEQ ID NO: 92644 - RNA, 22 nt, Human
gaagaguauauuuagugaaauc

SEQ ID NO: 92645 - RNA, 22 nt, Human
gaagaucugcagccucaggcga

SEQ ID NO: 92646 - RNA, 22 nt, Human
ggcagcucugcuccacaugagu

SEQ ID NO: 92647 - RNA, 19 nt, Human
ggcagcucuugucuucugc

SEQ ID NO: 92648 - RNA, 21 nt, Human
ggcagcugaccgcgcggugca

SEQ ID NO: 92649 - RNA, 22 nt, Human
ggcagcugagcauggcuaccuu

SEQ ID NO: 92650 - RNA, 22 nt, Human
ggcagcugauuagcaucaagga

SEQ ID NO: 92651 - RNA, 23 nt, Human
ggcagcugggcagcacucauggg

SEQ ID NO: 92652 - RNA, 22 nt, Human
ggcagcuggggcagugcccugu

SEQ ID NO: 92653 - RNA, 22 nt, Human
ggcagcuguaagaugagugaau

SEQ ID NO: 92654 - RNA, 22 nt, Human
ggcagcuguuggcucucuagga

SEQ ID NO: 92655 - RNA, 22 nt, Human
ggcagcuguuuguccuccuguu

SEQ ID NO: 92656 - RNA, 22 nt, Human
ggcagcuuacguuuugcuagug

SEQ ID NO: 92657 - RNA, 22 nt, Human
ggcagcuucggacggcuuauaa

SEQ ID NO: 92658 - RNA, 22 nt, Human
ggcagcuuguccuucaggagag

SEQ ID NO: 92659 - RNA, 22 nt, Human
ggcagcuuugcccucacugucc

SEQ ID NO: 92660 - RNA, 22 nt, Human
ggcaggaaaacaaugagccagg

SEQ ID NO: 92661 - RNA, 22 nt, Human
ggcaggaacacagauggugccg

SEQ ID NO: 92662 - RNA, 20 nt, Human
ggcaggaccccaguggcauc

SEQ ID NO: 92663 - RNA, 20 nt, Human
ggcaggacccgguagggagc

SEQ ID NO: 92664 - RNA, 22 nt, Human
ggcaggacucucaggaccaagc

SEQ ID NO: 92665 - RNA, 18 nt, Human
ggcaggagcaagaauagg

SEQ ID NO: 92666 - RNA, 22 nt, Human
ggcaggagcucagguugguucc

SEQ ID NO: 92667 - RNA, 22 nt, Human
ggcaggcaacggaccacuaguc

SEQ ID NO: 92668 - RNA, 22 nt, Human
ggcaggcaaugaggaugggaag

SEQ ID NO: 92669 - RNA, 22 nt, Human
ggcaggcacauuugggggccgu

SEQ ID NO: 92670 - RNA, 22 nt, Human
ggcaggcacugugcuaggcgcu

SEQ ID NO: 92671 - RNA, 22 nt, Human
ggcaggcagaggcugagacagg

SEQ ID NO: 92672 - RNA, 22 nt, Human
ggcaggcagauggcugcaccaa

SEQ ID NO: 92673 - RNA, 22 nt, Human
ggcaggcagccuccauccacag

SEQ ID NO: 92674 - RNA, 22 nt, Human
ggcaggcaguguggugugaaac

SEQ ID NO: 92675 - RNA, 22 nt, Human
ggcaggcauggccacucccuag

SEQ ID NO: 92676 - RNA, 22 nt, Human
ggcaggcauggggucugccauu

SEQ ID NO: 92677 - RNA, 22 nt, Human
ggcaggccugagaggcagggcu

SEQ ID NO: 92678 - RNA, 22 nt, Human
ggcaggcuagcacugauguccu

SEQ ID NO: 92679 - RNA, 18 nt, Human
ggcaggcucucuggguca

SEQ ID NO: 92680 - RNA, 22 nt, Human
ggcaggcucuuggccuuaugag

SEQ ID NO: 92681 - RNA, 22 nt, Human
ggcaggcuggcuuuguuccagg

SEQ ID NO: 92682 - RNA, 22 nt, Human
ggcaggcugggagucaucagag

SEQ ID NO: 92683 - RNA, 22 nt, Human
ggcaggcuugauauggggggac

SEQ ID NO: 92684 - RNA, 20 nt, Human
ggcaggcuuuauauggaggg

SEQ ID NO: 92685 - RNA, 18 nt, Human
ggcagggaaaagauaggg

SEQ ID NO: 92686 - RNA, 22 nt, Human
ggcagggacaggauaggguuuu

SEQ ID NO: 92687 - RNA, 22 nt, Human
ggcagggacuauguuucaugga

SEQ ID NO: 92688 - RNA, 22 nt, Human
ggcagggaggaggugaaaguga

SEQ ID NO: 92689 - RNA, 22 nt, Human
ggcagggcagcgcugauuaggg

SEQ ID NO: 92690 - RNA, 22 nt, Human
ggcagggcaggaaagucaggaa

SEQ ID NO: 92691 - RNA, 18 nt, Human
ggcaggggugaaccacag

SEQ ID NO: 92692 - RNA, 17 nt, Human
ggcagggugcuggguau

SEQ ID NO: 92693 - RNA, 22 nt, Human
ggcagguagccuagaggagguu

SEQ ID NO: 92694 - RNA, 22 nt, Human
ggcaggugccaguuggcuuggg

SEQ ID NO: 92695 - RNA, 22 nt, Human
ggcaggugcuugucgaaggccu

SEQ ID NO: 92696 - RNA, 22 nt, Human
ggcagguggaaggucuccauuc

SEQ ID NO: 92697 - RNA, 22 nt, Human
ggcagguggcacugcugcuccc

SEQ ID NO: 92698 - RNA, 22 nt, Human
ggcaggugggaacccuccccac

SEQ ID NO: 92699 - RNA, 22 nt, Human
ggcaggugguaaggauuucaua

SEQ ID NO: 92700 - RNA, 22 nt, Human
ggcaggugugagcuguaaagga

SEQ ID NO: 92701 - RNA, 22 nt, Human
ggcagguguggaguguuauuuu

SEQ ID NO: 92702 - RNA, 22 nt, Human
ggcagguguuuuuauauuaaag

SEQ ID NO: 92703 - RNA, 21 nt, Human
ggcaguaagauuuacuuuaag

SEQ ID NO: 92704 - RNA, 21 nt, Human
ggcaguaagccaaauccauuu

SEQ ID NO: 92705 - RNA, 22 nt, Human
ggcagucccaggcugcauguug

SEQ ID NO: 92706 - RNA, 22 nt, Human
ggcagucuuucccuugagcucu

SEQ ID NO: 92707 - RNA, 22 nt, Human
ggcagugaaugaaacagaggcu

SEQ ID NO: 92708 - RNA, 22 nt, Human
ggcagugagcuggagggaagga

SEQ ID NO: 92709 - RNA, 22 nt, Human
gacaggugagaugaggaacacc

SEQ ID NO: 92710 - RNA, 20 nt, Human
gacaggugcuaaagaggggc

SEQ ID NO: 92711 - RNA, 22 nt, Human
gacaguaacugagagauguaau

SEQ ID NO: 92712 - RNA, 22 nt, Human
gacaguauuuaacuaguucauu

SEQ ID NO: 92713 - RNA, 22 nt, Human
gacagucugggcacacaugaaa

SEQ ID NO: 92714 - RNA, 19 nt, Human
gacagugcaguuguaguac

SEQ ID NO: 92715 - RNA, 22 nt, Human
gacagugcauuuccuggcaugg

SEQ ID NO: 92716 - RNA, 22 nt, Human
gacaguggagccacguugggag

SEQ ID NO: 92717 - RNA, 22 nt, Human
gacagugugaacaucuaauagu

SEQ ID NO: 92718 - RNA, 22 nt, Human
gacaguuacccccaaaagaauu

SEQ ID NO: 92719 - RNA, 22 nt, Human
gacauaauaaucugaccuagau

SEQ ID NO: 92720 - RNA, 22 nt, Human
gacauacagcauggucuaugaa

SEQ ID NO: 92721 - RNA, 22 nt, Human
gacaucaauucagcauuuuaag

SEQ ID NO: 92722 - RNA, 22 nt, Human
gacaucauggagaggauaaaua

SEQ ID NO: 92723 - RNA, 22 nt, Human
gacaucaugucacuaacugcua

SEQ ID NO: 92724 - RNA, 22 nt, Human
gacaucauguucugcuaauagu

SEQ ID NO: 92725 - RNA, 22 nt, Human
gacaucugaauuuagcaguuuu

SEQ ID NO: 92726 - RNA, 22 nt, Human
gacaugaaccuaccauaaugau

SEQ ID NO: 92727 - RNA, 22 nt, Human
gacaugggaugagaugaagcau

SEQ ID NO: 92728 - RNA, 22 nt, Human
gacauguaaauggcaauuaugg

SEQ ID NO: 92729 - RNA, 22 nt, Human
gacaugugucugcaaguugauc

SEQ ID NO: 92730 - RNA, 22 nt, Human
gacauucaacuuugaugauuau

SEQ ID NO: 92731 - RNA, 20 nt, Human
gacauucauaguuauuacca

SEQ ID NO: 92732 - RNA, 22 nt, Human
gacauugacaguccuccuuaua

SEQ ID NO: 92733 - RNA, 22 nt, Human
gacauuuaaggcagucacuuaa

SEQ ID NO: 92734 - RNA, 22 nt, Human
gacauuuagcuguuuugcauuu

SEQ ID NO: 92735 - RNA, 22 nt, Human
gacauuuguaugacacuuuaaa

SEQ ID NO: 92736 - RNA, 22 nt, Human
gacauuuguuccucuaagugac

SEQ ID NO: 92737 - RNA, 22 nt, Human
gaccaaggccaggccagggcgu

SEQ ID NO: 92738 - RNA, 22 nt, Human
gaccaaggcccucagugggagg

SEQ ID NO: 92739 - RNA, 22 nt, Human
gaccacagacuggaaagagggc

SEQ ID NO: 92740 - RNA, 22 nt, Human
gaccacagagcacggccugcuu

SEQ ID NO: 92741 - RNA, 22 nt, Human
gaccaccagagguccgugggua

SEQ ID NO: 92742 - RNA, 22 nt, Human
gaccacugaugacaugaggaga

SEQ ID NO: 92743 - RNA, 22 nt, Human
gaccacuggggugagggccauc

SEQ ID NO: 92744 - RNA, 20 nt, Human
gaccagaucccuuaccagcu

SEQ ID NO: 92745 - RNA, 22 nt, Human
gaccagcucucugaagaaagag

SEQ ID NO: 92746 - RNA, 17 nt, Human
gaccaggagaaaccagg

SEQ ID NO: 92747 - RNA, 22 nt, Human
gaccaggagauuugagcuaggc

SEQ ID NO: 92748 - RNA, 22 nt, Human
gaccaggcccaggugcaaggga

SEQ ID NO: 92749 - RNA, 22 nt, Human
gaccaggcuaguucagagcuuc

SEQ ID NO: 92750 - RNA, 22 nt, Human
gaccagucauuacucaugcccu

SEQ ID NO: 92751 - RNA, 22 nt, Human
gacccagccugguuuuuauagg

SEQ ID NO: 92752 - RNA, 22 nt, Human
gacccaggccuggggcuuaagg

SEQ ID NO: 92753 - RNA, 22 nt, Human
gacccaggggcagggagaaagu

SEQ ID NO: 92754 - RNA, 22 nt, Human
gaccccaaacccuguauucuuc

SEQ ID NO: 92755 - RNA, 22 nt, Human
gaccccaacccuagagucugac

SEQ ID NO: 92756 - RNA, 22 nt, Human
gaccccagaggaaggggcgccg

SEQ ID NO: 92757 - RNA, 22 nt, Human
gaccccaucuggcugccccagg

SEQ ID NO: 92758 - RNA, 22 nt, Human
gacccuccuacuacccuggaaa

SEQ ID NO: 92759 - RNA, 22 nt, Human
gacccugagcaaaagcaguucu

SEQ ID NO: 92760 - RNA, 22 nt, Human
gacccugauaggaguagaagaa

SEQ ID NO: 92761 - RNA, 22 nt, Human
gacccuggaacuuucagcagag

SEQ ID NO: 92762 - RNA, 22 nt, Human
gacccuggagccgucugaggca

SEQ ID NO: 92763 - RNA, 22 nt, Human
gacccuggaguuaguccugugu

SEQ ID NO: 92764 - RNA, 22 nt, Human
gacccuggcagauaccgucaca

SEQ ID NO: 92765 - RNA, 22 nt, Human
gagaggcaggcgcugcaauggu

SEQ ID NO: 92766 - RNA, 22 nt, Human
gagaggcauggaacagauucuu

SEQ ID NO: 92767 - RNA, 22 nt, Human
gagaggccaaaaucccugcccc

SEQ ID NO: 92768 - RNA, 22 nt, Human
gagaggcccuguggucccagcu

SEQ ID NO: 92769 - RNA, 22 nt, Human
gagaggccugggcccgugagcu

SEQ ID NO: 92770 - RNA, 22 nt, Human
gagaggcuaugagguucugugu

SEQ ID NO: 92771 - RNA, 22 nt, Human
gagaggcuccgccacugcucag

SEQ ID NO: 92772 - RNA, 22 nt, Human
gagaggcugcauaugcacacug

SEQ ID NO: 92773 - RNA, 22 nt, Human
gagaggcuggguuggagaucga

SEQ ID NO: 92774 - RNA, 22 nt, Human
gagaggcugugugccauuguug

SEQ ID NO: 92775 - RNA, 22 nt, Human
gagagggauacugaguuuuggu

SEQ ID NO: 92776 - RNA, 22 nt, Human
gagagguaauuugaagugcaaa

SEQ ID NO: 92777 - RNA, 22 nt, Human
gagaggucggggacacugcaaa

SEQ ID NO: 92778 - RNA, 22 nt, Human
gagaggugaaaggauaguuuga

SEQ ID NO: 92779 - RNA, 22 nt, Human
gagaggugaaggcugcccuggg

SEQ ID NO: 92780 - RNA, 22 nt, Human
gagaggugaauguggaugccac

SEQ ID NO: 92781 - RNA, 22 nt, Human
gagagguguguuucagauaaga

SEQ ID NO: 92782 - RNA, 22 nt, Human
gagagucacugucugcauuucc

SEQ ID NO: 92783 - RNA, 22 nt, Human
gagaguggauggagcugcgaag

SEQ ID NO: 92784 - RNA, 22 nt, Human
gagagugucgggggccccagga

SEQ ID NO: 92785 - RNA, 22 nt, Human
gagaguucuugccuggguauua

SEQ ID NO: 92786 - RNA, 22 nt, Human
gagauaaugaugcuaacccagu

SEQ ID NO: 92787 - RNA, 22 nt, Human
gagauccuguaggcagcuaaga

SEQ ID NO: 92788 - RNA, 22 nt, Human
gagaugagugggggaucucuca

SEQ ID NO: 92789 - RNA, 22 nt, Human
gagaugcaagcaagucuauuuu

SEQ ID NO: 92790 - RNA, 15 nt, Human
gagaugcucucaggg

SEQ ID NO: 92791 - RNA, 22 nt, Human
gagaugcugucaggcuaucugu

SEQ ID NO: 92792 - RNA, 22 nt, Human
gagauggcaggugugugggaca

SEQ ID NO: 92793 - RNA, 21 nt, Human
gagauggcccaguagcgggcc

SEQ ID NO: 92794 - RNA, 22 nt, Human
gagaugggcgagaagguggacu

SEQ ID NO: 92795 - RNA, 22 nt, Human
gagauguuaacuacauagcuac

SEQ ID NO: 92796 - RNA, 22 nt, Human
gagauuagaguuguuucauugu

SEQ ID NO: 92797 - RNA, 22 nt, Human
gagauucucagaaguacuagga

SEQ ID NO: 92798 - RNA, 22 nt, Human
gagauuuagagagacuuaaaca

SEQ ID NO: 92799 - RNA, 22 nt, Human
gagauuucaccccucuuaaccu

SEQ ID NO: 92800 - RNA, 22 nt, Human
gagauuuuucaacaagaauagg

SEQ ID NO: 92801 - RNA, 22 nt, Human
gagcaaacaaaacugaugugac

SEQ ID NO: 92802 - RNA, 22 nt, Human
gagcaaauggagcuugucuacu

SEQ ID NO: 92803 - RNA, 22 nt, Human
gagcaacacgcaguaguauacg

SEQ ID NO: 92804 - RNA, 22 nt, Human
gagcaacuucaauaguacuauu

SEQ ID NO: 92805 - RNA, 22 nt, Human
gagcaagacccuggguucucuc

SEQ ID NO: 92806 - RNA, 22 nt, Human
gagcaagguagcucucuggggc

SEQ ID NO: 92807 - RNA, 22 nt, Human
gagcacagauugauuuaaaaua

SEQ ID NO: 92808 - RNA, 22 nt, Human
gagcacagcagggcucugggug

SEQ ID NO: 92809 - RNA, 22 nt, Human
gagcacagcugucuugcaagcu

SEQ ID NO: 92810 - RNA, 22 nt, Human
gagcacaggcugcugugaacug

SEQ ID NO: 92811 - RNA, 22 nt, Human
gagcaccugcuaaaugacaguu

SEQ ID NO: 92812 - RNA, 22 nt, Human
gagcagacgcugcagucuuggg

SEQ ID NO: 92813 - RNA, 22 nt, Human
gagcagagcuucucaaaguaaa

SEQ ID NO: 92814 - RNA, 22 nt, Human
gagcagcacuugaggcauguca

SEQ ID NO: 92815 - RNA, 22 nt, Human
gagcagcagguggggcuggcuu

SEQ ID NO: 92816 - RNA, 16 nt, Human
gagcagccugggccuu

SEQ ID NO: 92817 - RNA, 22 nt, Human
gagcagcucaggcacuuagcca

SEQ ID NO: 92818 - RNA, 22 nt, Human
gacaugcaacaauuuggcauuu

SEQ ID NO: 92819 - RNA, 22 nt, Human
gacaugcuaauuacugguucaa

SEQ ID NO: 92820 - RNA, 22 nt, Human
gacauggauacuugauaagggg

SEQ ID NO: 92821 - RNA, 22 nt, Human
gacauguauuaguacauauggu

SEQ ID NO: 92822 - RNA, 22 nt, Human
gacauucacaguuuccgauggu

SEQ ID NO: 92823 - RNA, 22 nt, Human
gacauucagacucacauggagg

SEQ ID NO: 92824 - RNA, 22 nt, Human
gacauucagguguucaaugcca

SEQ ID NO: 92825 - RNA, 22 nt, Human
gacauugaaguauuuuugucga

SEQ ID NO: 92826 - RNA, 22 nt, Human
gacauuuaauaguauuguggga

SEQ ID NO: 92827 - RNA, 22 nt, Human
gacauuuacugaauacugauua

SEQ ID NO: 92828 - RNA, 22 nt, Human
gacauuuagaagucuaauggcc

SEQ ID NO: 92829 - RNA, 22 nt, Human
gacauuuagaaguuagauucaa

SEQ ID NO: 92830 - RNA, 22 nt, Human
gacauuuaugaaggagauaugc

SEQ ID NO: 92831 - RNA, 22 nt, Human
gacauuuauuggauuuuacgag

SEQ ID NO: 92832 - RNA, 22 nt, Human
gacauuucaaucucauuauggg

SEQ ID NO: 92833 - RNA, 22 nt, Human
gaccaaaugaaaggauggaugg

SEQ ID NO: 92834 - RNA, 22 nt, Human
gaccacagaggugugggagaga

SEQ ID NO: 92835 - RNA, 22 nt, Human
gaccacagauuccuaaguggca

SEQ ID NO: 92836 - RNA, 22 nt, Human
gaccacagcagugcaagaggag

SEQ ID NO: 92837 - RNA, 22 nt, Human
gaccacagcuacaagggcaagg

SEQ ID NO: 92838 - RNA, 21 nt, Human
gaccacagggaaggucuugca

SEQ ID NO: 92839 - RNA, 22 nt, Human
gaccagaaaucaacacagaaug

SEQ ID NO: 92840 - RNA, 22 nt, Human
gaccaggacacaguggcaaggu

SEQ ID NO: 92841 - RNA, 22 nt, Human
gaccaggcuuccccagaccuca

SEQ ID NO: 92842 - RNA, 22 nt, Human
gaccaucuguuuaaagcagugu

SEQ ID NO: 92843 - RNA, 22 nt, Human
gaccauuucaggggcagggacu

SEQ ID NO: 92844 - RNA, 22 nt, Human
gaccauuuccaccaugggcaca

SEQ ID NO: 92845 - RNA, 22 nt, Human
gaccauuucuaggaaucagacu

SEQ ID NO: 92846 - RNA, 22 nt, Human
gaccauuuuuacagagcauuca

SEQ ID NO: 92847 - RNA, 18 nt, Human
gacccagcagaugggcuu

SEQ ID NO: 92848 - RNA, 22 nt, Human
gacccagcuaaccaggugggga

SEQ ID NO: 92849 - RNA, 18 nt, Human
gacccaggaaagaguccu

SEQ ID NO: 92850 - RNA, 22 nt, Human
gacccaggaagcuacuucuggu

SEQ ID NO: 92851 - RNA, 22 nt, Human
gacccaggcccaaggcugccag

SEQ ID NO: 92852 - RNA, 22 nt, Human
gacccaggguggucaccugaaa

SEQ ID NO: 92853 - RNA, 22 nt, Human
gacccaggguuucugcacaggg

SEQ ID NO: 92854 - RNA, 22 nt, Human
gacccagucacacuugugcuuu

SEQ ID NO: 92855 - RNA, 22 nt, Human
gacccagugggggccugaucug

SEQ ID NO: 92856 - RNA, 22 nt, Human
gacccauauaggacccuccaaa

SEQ ID NO: 92857 - RNA, 22 nt, Human
gaccccaggcagaucagggggu

SEQ ID NO: 92858 - RNA, 18 nt, Human
gaccccgggaucugucga

SEQ ID NO: 92859 - RNA, 22 nt, Human
gacccggcuccaggcccagcag

SEQ ID NO: 92860 - RNA, 22 nt, Human
gacccguggcaggcugccugcu

SEQ ID NO: 92861 - RNA, 22 nt, Human
gacccuccugucuucuaaccaa

SEQ ID NO: 92862 - RNA, 22 nt, Human
gacccugacucuaaugcuuggc

SEQ ID NO: 92863 - RNA, 22 nt, Human
gacccuggcagguagccucaca

SEQ ID NO: 92864 - RNA, 22 nt, Human
gacccuggcugccgcggucugg

SEQ ID NO: 92865 - RNA, 22 nt, Human
gacccuggugggcacuggcacc

SEQ ID NO: 92866 - RNA, 22 nt, Human
gacccuuucacagcugcugggg

SEQ ID NO: 92867 - RNA, 22 nt, Human
gacccuuucugcaugcuuaucu

SEQ ID NO: 92868 - RNA, 22 nt, Human
gaccucaucugaacauaugcaa

SEQ ID NO: 92869 - RNA, 22 nt, Human
gaccuccagcggcccugcagag

SEQ ID NO: 92870 - RNA, 22 nt, Human
gaccuccguguacaccucccag

SEQ ID NO: 92871 - RNA, 22 nt, Human
gaccucucaggaaucucacaug

SEQ ID NO: 92872 - RNA, 22 nt, Human
gaccugaaagugugggcgaccu

SEQ ID NO: 92873 - RNA, 22 nt, Human
gaccugcccacucugaggacau

SEQ ID NO: 92874 - RNA, 22 nt, Human
gaccuggaggauccucuucuug

SEQ ID NO: 92875 - RNA, 23 nt, Human
gaccuggcuuugaaucuugacuc

SEQ ID NO: 92876 - RNA, 22 nt, Human
gaccugggguggaaggaaggca

SEQ ID NO: 92877 - RNA, 22 nt, Human
gaccuggugcagguggacagag

SEQ ID NO: 92878 - RNA, 22 nt, Human
gaccuucaguguguuucucaca

SEQ ID NO: 92879 - RNA, 22 nt, Human
gaccuucuugcuguguccuaac

SEQ ID NO: 92880 - RNA, 22 nt, Human
gaccuugguugagcuuccuaau

SEQ ID NO: 92881 - RNA, 22 nt, Human
gacgccucuucccugcugcacu

SEQ ID NO: 92882 - RNA, 22 nt, Human
gacggggcagccagcugguggc

SEQ ID NO: 92883 - RNA, 22 nt, Human
gacgugggucgccaucgauaug

SEQ ID NO: 92884 - RNA, 21 nt, Human
gagaaucaggaaggauugaug

SEQ ID NO: 92885 - RNA, 22 nt, Human
gagaaucucaggcacccagaag

SEQ ID NO: 92886 - RNA, 21 nt, Human
gagaaucuguuuucuugucuu

SEQ ID NO: 92887 - RNA, 22 nt, Human
gagaaugggaaugaaaguagca

SEQ ID NO: 92888 - RNA, 22 nt, Human
gagaauguggagccugugguug

SEQ ID NO: 92889 - RNA, 22 nt, Human
gagaauuugcuggcuucauugu

SEQ ID NO: 92890 - RNA, 22 nt, Human
gagacaauuucuaagaugcuuc

SEQ ID NO: 92891 - RNA, 22 nt, Human
gagacacaagaagacaugcaca

SEQ ID NO: 92892 - RNA, 22 nt, Human
gagacacacacaggagguggca

SEQ ID NO: 92893 - RNA, 22 nt, Human
gagacagaucucggcuccaugc

SEQ ID NO: 92894 - RNA, 20 nt, Human
gagacagcaaaagccucucc

SEQ ID NO: 92895 - RNA, 22 nt, Human
gagacaggccaggugguacuua

SEQ ID NO: 92896 - RNA, 22 nt, Human
gagacaucauaaugaaguuucc

SEQ ID NO: 92897 - RNA, 22 nt, Human
gagacccccugaguuauggccu

SEQ ID NO: 92898 - RNA, 22 nt, Human
gagaccugcagcuguagucugc

SEQ ID NO: 92899 - RNA, 22 nt, Human
gagacugaggucaccaggcugu

SEQ ID NO: 92900 - RNA, 22 nt, Human
gagacuuagagcuccuugaggg

SEQ ID NO: 92901 - RNA, 22 nt, Human
gagagaaaagggggaauugauu

SEQ ID NO: 92902 - RNA, 22 nt, Human
gagagacccagacaccaugcau

SEQ ID NO: 92903 - RNA, 22 nt, Human
gagagaccucagaaacaaucua

SEQ ID NO: 92904 - RNA, 22 nt, Human
gagagacugggcagggccggca

SEQ ID NO: 92905 - RNA, 22 nt, Human
gagagagaggugcugccaggca

SEQ ID NO: 92906 - RNA, 22 nt, Human
gagagauuaccacgcuuccuga

SEQ ID NO: 92907 - RNA, 22 nt, Human
gagagcaauggggacgggcagg

SEQ ID NO: 92908 - RNA, 22 nt, Human
gagagcccuacaaggcguuuug

SEQ ID NO: 92909 - RNA, 22 nt, Human
gagagcccugcauggcugauga

SEQ ID NO: 92910 - RNA, 21 nt, Human
gagagcuaacagugacagcuc

SEQ ID NO: 92911 - RNA, 22 nt, Human
gagagcuaggccacuggggcuu

SEQ ID NO: 92912 - RNA, 22 nt, Human
gagagcuauuuggcaagcauuu

SEQ ID NO: 92913 - RNA, 22 nt, Human
gagagcuccuucaggaagcuuc

SEQ ID NO: 92914 - RNA, 22 nt, Human
gagagcugauagaugagcuacu

SEQ ID NO: 92915 - RNA, 22 nt, Human
gagagcugcagccgagaggggg

SEQ ID NO: 92916 - RNA, 22 nt, Human
gagagcuggccagcuucaguau

SEQ ID NO: 92917 - RNA, 20 nt, Human
gagagcuggggaugaggcug

SEQ ID NO: 92918 - RNA, 22 nt, Human
gagagcugggggacuguggaug

SEQ ID NO: 92919 - RNA, 22 nt, Human
gagaggaaagaaccaaugaccc

SEQ ID NO: 92920 - RNA, 22 nt, Human
gagaggagacuuauccagauug

SEQ ID NO: 92921 - RNA, 22 nt, Human
gagaggccaccugacgagcagu

SEQ ID NO: 92922 - RNA, 22 nt, Human
gagaggccauggcugugcagug

SEQ ID NO: 92923 - RNA, 18 nt, Human
gagaggcccggcugugcc

SEQ ID NO: 92924 - RNA, 22 nt, Human
gagaggccugagaggcugcgga

SEQ ID NO: 92925 - RNA, 22 nt, Human
gagaggcuccaugaccccggca

SEQ ID NO: 92926 - RNA, 22 nt, Human
gagaggcugaaaucacaggagc

SEQ ID NO: 92927 - RNA, 22 nt, Human
gagcccugaacaacagcaggaa

SEQ ID NO: 92928 - RNA, 22 nt, Human
gagcccugagaguugugaggcc

SEQ ID NO: 92929 - RNA, 22 nt, Human
gagcccugcuuccaagggggca

SEQ ID NO: 92930 - RNA, 22 nt, Human
gagcccuguaggaaucucucaa

SEQ ID NO: 92931 - RNA, 22 nt, Human
gagcccuguucaggccuccuca

SEQ ID NO: 92932 - RNA, 22 nt, Human
gagcccuuuuccuagauacugu

SEQ ID NO: 92933 - RNA, 22 nt, Human
gagccuccuccuggugugccga

SEQ ID NO: 92934 - RNA, 22 nt, Human
gagccugaaauacaggucacug

SEQ ID NO: 92935 - RNA, 22 nt, Human
gagccugaugaaacaggcagac

SEQ ID NO: 92936 - RNA, 22 nt, Human
gagccugcaggccucggccuca

SEQ ID NO: 92937 - RNA, 22 nt, Human
gagccugugagccccaacucca

SEQ ID NO: 92938 - RNA, 22 nt, Human
gagccuuucuagauaauccagg

SEQ ID NO: 92939 - RNA, 22 nt, Human
gagcgauguggguauguagaag

SEQ ID NO: 92940 - RNA, 19 nt, Human
gagcgcagagggcagggga

SEQ ID NO: 92941 - RNA, 22 nt, Human
gagcgggaggaacggcucgggc

SEQ ID NO: 92942 - RNA, 22 nt, Human
gagcuaagaacugugccaggug

SEQ ID NO: 92943 - RNA, 22 nt, Human
gagcuaaggucacaagaagcag

SEQ ID NO: 92944 - RNA, 22 nt, Human
gagcuacacugauucauuuguu

SEQ ID NO: 92945 - RNA, 22 nt, Human
gagcuacagaguuugguguuca

SEQ ID NO: 92946 - RNA, 22 nt, Human
gagcuacaggcagcugagcccu

SEQ ID NO: 92947 - RNA, 22 nt, Human
gagcuacugaaauauugauuuu

SEQ ID NO: 92948 - RNA, 22 nt, Human
gagcuagacugggcucugaugu

SEQ ID NO: 92949 - RNA, 22 nt, Human
gagcuagagggagaagggcacu

SEQ ID NO: 92950 - RNA, 22 nt, Human
gagcuaggcuagggggagucgc

SEQ ID NO: 92951 - RNA, 22 nt, Human
gagcuauaauagagcuucagug

SEQ ID NO: 92952 - RNA, 22 nt, Human
gagcucagaggcgucuuugucc

SEQ ID NO: 92953 - RNA, 22 nt, Human
gagcucauucauucauugccug

SEQ ID NO: 92954 - RNA, 22 nt, Human
gagcuccagcaucucugccaaa

SEQ ID NO: 92955 - RNA, 22 nt, Human
gagcuccuauggucgguggcuc

SEQ ID NO: 92956 - RNA, 22 nt, Human
gagcuccucccaggguagcacu

SEQ ID NO: 92957 - RNA, 22 nt, Human
gagcuccugaaacguuccugcc

SEQ ID NO: 92958 - RNA, 22 nt, Human
gagcucuauguggcuggcaugu

SEQ ID NO: 92959 - RNA, 22 nt, Human
gagcucugguucaugaucuauu

SEQ ID NO: 92960 - RNA, 22 nt, Human
gagcucuguacacagagggugu

SEQ ID NO: 92961 - RNA, 22 nt, Human
gagcucuguguagccugagggu

SEQ ID NO: 92962 - RNA, 22 nt, Human
gagcucuuccuuucaggaggcc

SEQ ID NO: 92963 - RNA, 22 nt, Human
gagcucuugcuucuaguccagg

SEQ ID NO: 92964 - RNA, 22 nt, Human
gagcugaaauaugaagccaauu

SEQ ID NO: 92965 - RNA, 22 nt, Human
gagcugaacaucauggaaaggc

SEQ ID NO: 92966 - RNA, 22 nt, Human
gagcugaacgggaauuccccga

SEQ ID NO: 92967 - RNA, 22 nt, Human
gagcugaaguuuccauuuguac

SEQ ID NO: 92968 - RNA, 21 nt, Human
gagcugaauauguucuagggg

SEQ ID NO: 92969 - RNA, 22 nt, Human
gagcugaaucagagauauuauu

SEQ ID NO: 92970 - RNA, 22 nt, Human
gagcugaauuacggugagucau

SEQ ID NO: 92971 - RNA, 22 nt, Human
gagcugaauugcugccauuugc

SEQ ID NO: 92972 - RNA, 18 nt, Human
gagcugagaagaggaugc

SEQ ID NO: 92973 - RNA, 22 nt, Human
gagcugagacacacuuuggcaa

SEQ ID NO: 92974 - RNA, 22 nt, Human
gagcugagaucauguacacuag

SEQ ID NO: 92975 - RNA, 22 nt, Human
gagcugagcuuaacuccuugaa

SEQ ID NO: 92976 - RNA, 22 nt, Human
gagcugaggcucaggcuggcgu

SEQ ID NO: 92977 - RNA, 22 nt, Human
gagcugagggucuaggaggguu

SEQ ID NO: 92978 - RNA, 22 nt, Human
gagcugaggugauguggucguu

SEQ ID NO: 92979 - RNA, 22 nt, Human
gagcugaguaugaaggauguga

SEQ ID NO: 92980 - RNA, 22 nt, Human
gagcugaguguccuaggcaugg

SEQ ID NO: 92981 - RNA, 22 nt, Human
gagcugcacuggggguggaaug

SEQ ID NO: 92982 - RNA, 22 nt, Human
gagcugcagaagggguuuuccu

SEQ ID NO: 92983 - RNA, 22 nt, Human
gagcugcagacauagauaagcg

SEQ ID NO: 92984 - RNA, 22 nt, Human
gagcugcagaguaaccuuugca

SEQ ID NO: 92985 - RNA, 22 nt, Human
gagcugcaugcggaaaccuguu

SEQ ID NO: 92986 - RNA, 22 nt, Human
gagcugccuacauugccaagag

SEQ ID NO: 92987 - RNA, 22 nt, Human
gagcugcuugcccagaagcaga

SEQ ID NO: 92988 - RNA, 22 nt, Human
gagcuggaggaccaggacuggg

SEQ ID NO: 92989 - RNA, 22 nt, Human
gagcuggcaaugacuuguguau

SEQ ID NO: 92990 - RNA, 22 nt, Human
gagcuggcacagaaggaucuua

SEQ ID NO: 92991 - RNA, 22 nt, Human
gagcuggcaggaggcuccccga

SEQ ID NO: 92992 - RNA, 22 nt, Human
gagcugggccucagaacacagu

SEQ ID NO: 92993 - RNA, 22 nt, Human
gagcuggggcagcuuaggagug

SEQ ID NO: 92994 - RNA, 22 nt, Human
gagcuggggcggauacucagcu

SEQ ID NO: 92995 - RNA, 22 nt, Human
gagcuggucaguuucaggagag

SEQ ID NO: 92996 - RNA, 22 nt, Human
gagcuggucaguuucagggcca

SEQ ID NO: 92997 - RNA, 22 nt, Human
gagcuggugugugcccaagcac

SEQ ID NO: 92998 - RNA, 22 nt, Human
gagcuggugugugcccgagcac

SEQ ID NO: 92999 - RNA, 22 nt, Human
gagcuguccuaccaggaguccu

SEQ ID NO: 93000 - RNA, 22 nt, Human
gagcuguggucaacaggaaauu

SEQ ID NO: 93001 - RNA, 22 nt, Human
gagcuguguaugcaucauucug

SEQ ID NO: 93002 - RNA, 21 nt, Human
gagcuguuacucucucuggag

SEQ ID NO: 93003 - RNA, 22 nt, Human
gagcuguucugugauugaucua

SEQ ID NO: 93004 - RNA, 22 nt, Human
gaggcagcaucuauggugggaa

SEQ ID NO: 93005 - RNA, 22 nt, Human
gaggcagcaugguaccuuggag

SEQ ID NO: 93006 - RNA, 22 nt, Human
gaggcagcauucgcauagacag

SEQ ID NO: 93007 - RNA, 22 nt, Human
gaggcagccagagguucucauu

SEQ ID NO: 93008 - RNA, 22 nt, Human
gaggcagccucaguggaccucg

SEQ ID NO: 93009 - RNA, 22 nt, Human
gaggcagcgggucaggaccgug

SEQ ID NO: 93010 - RNA, 22 nt, Human
gaggcagcugggcuggugguuu

SEQ ID NO: 93011 - RNA, 22 nt, Human
gaggcagugcauugucuagggg

SEQ ID NO: 93012 - RNA, 22 nt, Human
gaggcaguguuuacugcccugu

SEQ ID NO: 93013 - RNA, 22 nt, Human
gaggcauaaaucacaguguuca

SEQ ID NO: 93014 - RNA, 22 nt, Human
gaggccaacuuuggagaacagg

SEQ ID NO: 93015 - RNA, 17 nt, Human
gaggccaaggcaggcgg

SEQ ID NO: 93016 - RNA, 22 nt, Human
gaggccaagggagaagaucucu

SEQ ID NO: 93017 - RNA, 22 nt, Human
gaggccaaguuggagaccaggu

SEQ ID NO: 93018 - RNA, 22 nt, Human
gaggccaaucaauagggcaaua

SEQ ID NO: 93019 - RNA, 22 nt, Human
gaggccacagcuaucagggaca

SEQ ID NO: 93020 - RNA, 21 nt, Human
gaggccacuaauaggggcaga

SEQ ID NO: 93021 - RNA, 22 nt, Human
gaggccacuuccuacuggagga

SEQ ID NO: 93022 - RNA, 22 nt, Human
gaggccagaaugagucucuggg

SEQ ID NO: 93023 - RNA, 22 nt, Human
gaggccagggaugcaaugagag

SEQ ID NO: 93024 - RNA, 22 nt, Human
gaggccaggggccuggagauga

SEQ ID NO: 93025 - RNA, 22 nt, Human
gaggccaggguaccaucaacau

SEQ ID NO: 93026 - RNA, 22 nt, Human
gaggccagugaaauguuauaaa

SEQ ID NO: 93027 - RNA, 22 nt, Human
gaggccagugugcuguguuuuc

SEQ ID NO: 93028 - RNA, 22 nt, Human
gaggccaugccuccugaucagu

SEQ ID NO: 93029 - RNA, 22 nt, Human
gaggcccagagagguugcauga

SEQ ID NO: 93030 - RNA, 22 nt, Human
gaggcccaguggagggccaugg

SEQ ID NO: 93031 - RNA, 19 nt, Human
gaggcccaugagggugcuc

SEQ ID NO: 93032 - RNA, 22 nt, Human
gaggcccuccagcugucagcug

SEQ ID NO: 93033 - RNA, 22 nt, Human
gaggcccucuugccacaaugaa

SEQ ID NO: 93034 - RNA, 22 nt, Human
gaggccuauaggcaagugcugc

SEQ ID NO: 93035 - RNA, 22 nt, Human
gaggccucaggcgugggaaggg

SEQ ID NO: 93036 - RNA, 22 nt, Human
gagcuuggugcugccuguuguc

SEQ ID NO: 93037 - RNA, 22 nt, Human
gagcuuuagcugagaccugcuu

SEQ ID NO: 93038 - RNA, 22 nt, Human
gagcuuuaggagaaggagguca

SEQ ID NO: 93039 - RNA, 22 nt, Human
gagcuuugcuggaagccugggg

SEQ ID NO: 93040 - RNA, 22 nt, Human
gagcuuuggggaagaauacaga

SEQ ID NO: 93041 - RNA, 22 nt, Human
gagcuuuguaaaaaacuugcac

SEQ ID NO: 93042 - RNA, 22 nt, Human
gagcuuugugcugguagguggu

SEQ ID NO: 93043 - RNA, 22 nt, Human
gagcuuuguuccgugguggcac

SEQ ID NO: 93044 - RNA, 22 nt, Human
gaggaaaagagacagguuauug

SEQ ID NO: 93045 - RNA, 22 nt, Human
gaggaaaaugcaacaggaaugc

SEQ ID NO: 93046 - RNA, 22 nt, Human
gaggaaaauggaguguaauuaa

SEQ ID NO: 93047 - RNA, 18 nt, Human
gaggaaacaaggcagagg

SEQ ID NO: 93048 - RNA, 22 nt, Human
gaggaaagaaccccagucaaua

SEQ ID NO: 93049 - RNA, 22 nt, Human
gaggaaagagucaaaucugaag

SEQ ID NO: 93050 - RNA, 22 nt, Human
gaggaaagcugguuuaaaguau

SEQ ID NO: 93051 - RNA, 22 nt, Human
gaggaaaucauuccagaaaagg

SEQ ID NO: 93052 - RNA, 22 nt, Human
gaggaaaucuuaggccccaacc

SEQ ID NO: 93053 - RNA, 21 nt, Human
gaggaaaugcucugguguuca

SEQ ID NO: 93054 - RNA, 22 nt, Human
gaggaacaagcugcuuuaucuu

SEQ ID NO: 93055 - RNA, 22 nt, Human
gaggaaccuccugaaaaguaua

SEQ ID NO: 93056 - RNA, 22 nt, Human
gaggaacugaguaccaugauuc

SEQ ID NO: 93057 - RNA, 22 nt, Human
gaggaagaagcaaaccagcuaa

SEQ ID NO: 93058 - RNA, 22 nt, Human
gaggaagaagggauuagaacuc

SEQ ID NO: 93059 - RNA, 22 nt, Human
gaggaagaauugguuauuggag

SEQ ID NO: 93060 - RNA, 22 nt, Human
gaggaagagagcucugccuugu

SEQ ID NO: 93061 - RNA, 22 nt, Human
gaggaagcauugacauaaucuc

SEQ ID NO: 93062 - RNA, 22 nt, Human
gaggaaggaaugcaguguaugc

SEQ ID NO: 93063 - RNA, 22 nt, Human
gaggaaggauuuaguuugaggg

SEQ ID NO: 93064 - RNA, 22 nt, Human
gaggaagggacuuuauuaucug

SEQ ID NO: 93065 - RNA, 22 nt, Human
gaggaagggcugccugccgggc

SEQ ID NO: 93066 - RNA, 22 nt, Human
gaggaagucucucuacaagaaa

SEQ ID NO: 93067 - RNA, 22 nt, Human
gaggaagugcguuaugccuuuu

SEQ ID NO: 93068 - RNA, 22 nt, Human
gaggaaugucagcacaggccuc

SEQ ID NO: 93069 - RNA, 22 nt, Human
gaggaauguuauuaaaggagcu

SEQ ID NO: 93070 - RNA, 22 nt, Human
gaggacacaugacuccagcagg

SEQ ID NO: 93071 - RNA, 22 nt, Human
gaggacagagccgccuggcaag

SEQ ID NO: 93072 - RNA, 22 nt, Human
gaggacagcuuagggcuuccug

SEQ ID NO: 93073 - RNA, 22 nt, Human
gaggacagugugaucugccagc

SEQ ID NO: 93074 - RNA, 22 nt, Human
gaggacuaacuuggcagacgca

SEQ ID NO: 93075 - RNA, 22 nt, Human
gaggacugcagaugggugcauc

SEQ ID NO: 93076 - RNA, 22 nt, Human
gaggagaaauuauccuuggugu

SEQ ID NO: 93077 - RNA, 22 nt, Human
gaggagaagcuaagaaacacag

SEQ ID NO: 93078 - RNA, 22 nt, Human
gaggagaagcuauuggaaggac

SEQ ID NO: 93079 - RNA, 22 nt, Human
gaggagacauauuuuugaagca

SEQ ID NO: 93080 - RNA, 22 nt, Human
gaggagagaagcuaacggugcu

SEQ ID NO: 93081 - RNA, 22 nt, Human
gaggagagaugguagauugggu

SEQ ID NO: 93082 - RNA, 22 nt, Human
gaggagcaagaaauagugccca

SEQ ID NO: 93083 - RNA, 22 nt, Human
gaggagcacaugaggcugaggg

SEQ ID NO: 93084 - RNA, 22 nt, Human
gaggagccaggaggucucccug

SEQ ID NO: 93085 - RNA, 22 nt, Human
gaggagccuggccccacaucca

SEQ ID NO: 93086 - RNA, 22 nt, Human
gaggagcucaugaaagcggugu

SEQ ID NO: 93087 - RNA, 22 nt, Human
gaggagcugcagggggagucua

SEQ ID NO: 93088 - RNA, 22 nt, Human
gaggagcugggcugagaggguc

SEQ ID NO: 93089 - RNA, 22 nt, Human
gaggagcuucagaggaaucuua

SEQ ID NO: 93090 - RNA, 22 nt, Human
gaggaggaaacccuguuccucu

SEQ ID NO: 93091 - RNA, 22 nt, Human
gaggaggaguauauauuagaau

SEQ ID NO: 93092 - RNA, 22 nt, Human
gaggaggcacuugagcagaugu

SEQ ID NO: 93093 - RNA, 22 nt, Human
gaggaggcagccuaucccuuag

SEQ ID NO: 93094 - RNA, 22 nt, Human
gaggaggcuggcgccgccugcc

SEQ ID NO: 93095 - RNA, 22 nt, Human
gaggaggcuuccgggaggcacg

SEQ ID NO: 93096 - RNA, 22 nt, Human
gaggagggagcuggaagcucuu

SEQ ID NO: 93097 - RNA, 22 nt, Human
gaggaggguuggccuuagguag

SEQ ID NO: 93098 - RNA, 22 nt, Human
gaggagguggaauuccaggaau

SEQ ID NO: 93099 - RNA, 22 nt, Human
gaggagguuccggguggagaag

SEQ ID NO: 93100 - RNA, 22 nt, Human
gaggagucuaguuuauggcuuc

SEQ ID NO: 93101 - RNA, 22 nt, Human
gaggauggauccgaccccuucc

SEQ ID NO: 93102 - RNA, 22 nt, Human
gaggcaagagaagccagcuuuc

SEQ ID NO: 93103 - RNA, 22 nt, Human
gaggcacaccagggagucuugu

SEQ ID NO: 93104 - RNA, 22 nt, Human
gaggcacaugacucaccaaugg

SEQ ID NO: 93105 - RNA, 22 nt, Human
gaggcaccagacauggccucau

SEQ ID NO: 93106 - RNA, 22 nt, Human
gaggcacugcugggccccugua

SEQ ID NO: 93107 - RNA, 22 nt, Human
gaggcagagaccuucaggaccu

SEQ ID NO: 93108 - RNA, 22 nt, Human
gaggcagagacuccaccuucag

SEQ ID NO: 93109 - RNA, 22 nt, Human
gaggcagcaaaauauaucauaa

SEQ ID NO: 93110 - RNA, 22 nt, Human
gaggcagcagaacauggaagag

SEQ ID NO: 93111 - RNA, 23 nt, Human
gaggcagcuccugcagugcccug

SEQ ID NO: 93112 - RNA, 22 nt, Human
gaggcagcugggauacaaggga

SEQ ID NO: 93113 - RNA, 22 nt, Human
gaggcagcuuaggguacugacu

SEQ ID NO: 93114 - RNA, 22 nt, Human
gaggcaggcacuguuaucagca

SEQ ID NO: 93115 - RNA, 22 nt, Human
gaggcaggcccugaaugaguca

SEQ ID NO: 93116 - RNA, 22 nt, Human
gaggcaggguguugauuacaga

SEQ ID NO: 93117 - RNA, 22 nt, Human
gaggcaguaauugugggcaaua

SEQ ID NO: 93118 - RNA, 19 nt, Human
gaggcaguagucaaagcuu

SEQ ID NO: 93119 - RNA, 22 nt, Human
gaggcaguggucugaugcaagg

SEQ ID NO: 93120 - RNA, 22 nt, Human
gaggcagugucgguggcaggau

SEQ ID NO: 93121 - RNA, 22 nt, Human
gaggcaguuccugagugacaag

SEQ ID NO: 93122 - RNA, 22 nt, Human
gaggcaguuugccaugccagga

SEQ ID NO: 93123 - RNA, 22 nt, Human
gaggcauaaguagaagagauug

SEQ ID NO: 93124 - RNA, 22 nt, Human
gaggcauggccugaggcuagga

SEQ ID NO: 93125 - RNA, 22 nt, Human
gaggccacagugucugggggcc

SEQ ID NO: 93126 - RNA, 22 nt, Human
gaggccacauuacuuggugggu

SEQ ID NO: 93127 - RNA, 22 nt, Human
gaggccacccuaugggucccag

SEQ ID NO: 93128 - RNA, 22 nt, Human
gaggccacgugcuuauguuucu

SEQ ID NO: 93129 - RNA, 22 nt, Human
gaggccagaguuccccgaguca

SEQ ID NO: 93130 - RNA, 22 nt, Human
gaggccagcgcgcagcacuuuu

SEQ ID NO: 93131 - RNA, 22 nt, Human
gaggccagcuacccaaggguca

SEQ ID NO: 93132 - RNA, 22 nt, Human
gaggccagcuaguccaggaagu

SEQ ID NO: 93133 - RNA, 22 nt, Human
gaggccaggggagucagcgucc

SEQ ID NO: 93134 - RNA, 22 nt, Human
gaggccauaagaaguucuuggg

SEQ ID NO: 93135 - RNA, 22 nt, Human
gaggcccacagggaguaccaag

SEQ ID NO: 93136 - RNA, 20 nt, Human
gaggcccagagaggugaagc

SEQ ID NO: 93137 - RNA, 22 nt, Human
gaggcccagcauucagggcagg

SEQ ID NO: 93138 - RNA, 22 nt, Human
gaggcccugaagacagcugggg

SEQ ID NO: 93139 - RNA, 22 nt, Human
gaggcccugguaggucagagug

SEQ ID NO: 93140 - RNA, 21 nt, Human
gaggccucagccucagcuccu

SEQ ID NO: 93141 - RNA, 22 nt, Human
gaggccucugucccaccaggga

SEQ ID NO: 93142 - RNA, 22 nt, Human
gaggccuggaauuccagccugg

SEQ ID NO: 93143 - RNA, 22 nt, Human
gauacacaaaagucuagugagg

SEQ ID NO: 93144 - RNA, 22 nt, Human
gauacacagggcuaagauggau

SEQ ID NO: 93145 - RNA, 22 nt, Human
gcaaacugauuuccaaguccgu

SEQ ID NO: 93146 - RNA, 22 nt, Human
gcaaacugcauucuauagcuug

SEQ ID NO: 93147 - RNA, 22 nt, Human
gcacagccagcaucugagggau

SEQ ID NO: 93148 - RNA, 22 nt, Human
gcacagcccugagcgcaugucu

SEQ ID NO: 93149 - RNA, 22 nt, Human
gcacagcucagcaugggaggac

SEQ ID NO: 93150 - RNA, 22 nt, Human
gcacagcucaguacucccucug

SEQ ID NO: 93151 - RNA, 22 nt, Human
gcacagcuccgcuuccucacac

SEQ ID NO: 93152 - RNA, 22 nt, Human
gcacaggaugauggguugaggg

SEQ ID NO: 93153 - RNA, 22 nt, Human
gcacaggccaugggaggacagc

SEQ ID NO: 93154 - RNA, 22 nt, Human
gcacagggagcaggucucuggu

SEQ ID NO: 93155 - RNA, 22 nt, Human
gcacagggcugccaggcggcuu

SEQ ID NO: 93156 - RNA, 17 nt, Human
gcacagugauauuauuu

SEQ ID NO: 93157 - RNA, 22 nt, Human
gcacagugcaccacuuugaaaa

SEQ ID NO: 93158 - RNA, 22 nt, Human
gcacaguggugaaagcaugggu

SEQ ID NO: 93159 - RNA, 22 nt, Human
gcacaguuaaagggucauguga

SEQ ID NO: 93160 - RNA, 22 nt, Human
gcacauacauauuagugucaca

SEQ ID NO: 93161 - RNA, 22 nt, Human
gcacaucuggagcucuguggaa

SEQ ID NO: 93162 - RNA, 22 nt, Human
gcacaugacuuugaggaaacca

SEQ ID NO: 93163 - RNA, 22 nt, Human
gcacaugguaggcauuugaugu

SEQ ID NO: 93164 - RNA, 18 nt, Human
gcacauguaagaguaaag

SEQ ID NO: 93165 - RNA, 17 nt, Human
gcacauguguucuuuua

SEQ ID NO: 93166 - RNA, 22 nt, Human
gcacauuuaacugagcucagga

SEQ ID NO: 93167 - RNA, 22 nt, Human
gcacauuugagacauccaggca

SEQ ID NO: 93168 - RNA, 22 nt, Human
gcaccaggaagcuguuauagca

SEQ ID NO: 93169 - RNA, 22 nt, Human
gcaccaggaggcccuucucauc

SEQ ID NO: 93170 - RNA, 22 nt, Human
gcaccaggcagcugagcaggcc

SEQ ID NO: 93171 - RNA, 22 nt, Human
gcaccaggcuuagagccccagg

SEQ ID NO: 93172 - RNA, 22 nt, Human
gcaccagggagggugugcuuca

SEQ ID NO: 93173 - RNA, 22 nt, Human
gcaccaggugcagccgggcccc

SEQ ID NO: 93174 - RNA, 22 nt, Human
gcaccaugauggagccucauua

SEQ ID NO: 93175 - RNA, 22 nt, Human
gcacccagagggcagggucucc

SEQ ID NO: 93176 - RNA, 22 nt, Human
gcacccagauagcaaggauuag

SEQ ID NO: 93177 - RNA, 22 nt, Human
gcacccaggcacuuuccuuucu

SEQ ID NO: 93178 - RNA, 22 nt, Human
gcacccaggccggcgacugcag

SEQ ID NO: 93179 - RNA, 22 nt, Human
gcacccaggcuugggcagcaac

SEQ ID NO: 93180 - RNA, 22 nt, Human
gcacccagggacuuggcuggcc

SEQ ID NO: 93181 - RNA, 22 nt, Human
gcacccagggcaggaagugagg

SEQ ID NO: 93182 - RNA, 22 nt, Human
gcacccaguuugucucaggguu

SEQ ID NO: 93183 - RNA, 22 nt, Human
gcacccaugcucuugucucagg

SEQ ID NO: 93184 - RNA, 22 nt, Human
gcacccauugugugcagcucug

SEQ ID NO: 93185 - RNA, 22 nt, Human
gcacccuagaguugccugagga

SEQ ID NO: 93186 - RNA, 22 nt, Human
gcacccucugagcuccgcuccg

SEQ ID NO: 93187 - RNA, 22 nt, Human
gcaccugccugggacugaagau

SEQ ID NO: 93188 - RNA, 22 nt, Human
gcaccugcuggggcugaugaga

SEQ ID NO: 93189 - RNA, 22 nt, Human
gcaccugcuggguguagaggcu

SEQ ID NO: 93190 - RNA, 22 nt, Human
gcaccuggcugcccagguggag

SEQ ID NO: 93191 - RNA, 22 nt, Human
gcaccugggguacacagcuaca

SEQ ID NO: 93192 - RNA, 22 nt, Human
gcaccuugggaagcgccaguug

SEQ ID NO: 93193 - RNA, 22 nt, Human
gcaccuuucuauauucaguggc

SEQ ID NO: 93194 - RNA, 22 nt, Human
gcacggcaagacggggccuccu

SEQ ID NO: 93195 - RNA, 22 nt, Human
gcacgugcacacauguguacaa

SEQ ID NO: 93196 - RNA, 22 nt, Human
gcacuaaaccaacauguaauaa

SEQ ID NO: 93197 - RNA, 22 nt, Human
gcacuagaaguacgccuuguaa

SEQ ID NO: 93198 - RNA, 22 nt, Human
gcacuaguguucuucaguaaua

SEQ ID NO: 93199 - RNA, 17 nt, Human
gcacucccccaccuccu

SEQ ID NO: 93200 - RNA, 22 nt, Human
gcacucuccuggcugccacagu

SEQ ID NO: 93201 - RNA, 22 nt, Human
gcacucugccaggucuccugau

SEQ ID NO: 93202 - RNA, 20 nt, Human
gcacugaaauucaauguuug

SEQ ID NO: 93203 - RNA, 17 nt, Human
gcacugaacaauccugu

SEQ ID NO: 93204 - RNA, 22 nt, Human
gcacugagcaccagccacagau

SEQ ID NO: 93205 - RNA, 22 nt, Human
gcacugagucugucaugcugca

SEQ ID NO: 93206 - RNA, 22 nt, Human
gcacugaugcaaaaaucacuca

SEQ ID NO: 93207 - RNA, 22 nt, Human
gcacugcagccucagauggugg

SEQ ID NO: 93208 - RNA, 22 nt, Human
gcacugccacauaaucucagca

SEQ ID NO: 93209 - RNA, 22 nt, Human
gcacugccuguguucaggguaa

SEQ ID NO: 93210 - RNA, 22 nt, Human
gcacuggaggguguaguugcug

SEQ ID NO: 93211 - RNA, 22 nt, Human
gcacuggauuuugaucugcaag

SEQ ID NO: 93212 - RNA, 22 nt, Human
gcacugggaaugagggcagcuu

SEQ ID NO: 93213 - RNA, 22 nt, Human
gcacugggaaugugagcagcug

SEQ ID NO: 93214 - RNA, 22 nt, Human
gcacugggagucuguggggguu

SEQ ID NO: 93215 - RNA, 22 nt, Human
gcacugggugugaggcagcguc

SEQ ID NO: 93216 - RNA, 22 nt, Human
gcacugguaucaccugagagcu

SEQ ID NO: 93217 - RNA, 22 nt, Human
gcacuggugugaaacaguagau

SEQ ID NO: 93218 - RNA, 22 nt, Human
gcacuguagugggggagaaaug

SEQ ID NO: 93219 - RNA, 22 nt, Human
gcacugugcuagguaucaggga

SEQ ID NO: 93220 - RNA, 20 nt, Human
gcacuguuacaaagcacacc

SEQ ID NO: 93221 - RNA, 22 nt, Human
gcacuguucucagagcauuaga

SEQ ID NO: 93222 - RNA, 22 nt, Human
gcacuuaggguauguacugggc

SEQ ID NO: 93223 - RNA, 22 nt, Human
gcacuucaccacuguccugguu

SEQ ID NO: 93224 - RNA, 22 nt, Human
gcacuucuauuuuuuucagugg

SEQ ID NO: 93225 - RNA, 22 nt, Human
gcacuucucgggggcgcugucu

SEQ ID NO: 93226 - RNA, 22 nt, Human
gcacuugaggacgacucagcug

SEQ ID NO: 93227 - RNA, 22 nt, Human
gcacuuggauauacaaaugaag

SEQ ID NO: 93228 - RNA, 22 nt, Human
gcacuuguuuuauguuccugag

SEQ ID NO: 93229 - RNA, 22 nt, Human
gcacuuuaaauguucacggaaa

SEQ ID NO: 93230 - RNA, 22 nt, Human
gcagaaauaugaugcauaaagg

SEQ ID NO: 93231 - RNA, 23 nt, Human
gcagaaauucucacacugaggcc

SEQ ID NO: 93232 - RNA, 22 nt, Human
gcagaacauggaaagagaacua

SEQ ID NO: 93233 - RNA, 22 nt, Human
gcagaaccauaaauucagguaa

SEQ ID NO: 93234 - RNA, 22 nt, Human
gcagaagcagaggagccuauga

SEQ ID NO: 93235 - RNA, 22 nt, Human
gcagaagggaauaaggagcuuu

SEQ ID NO: 93236 - RNA, 22 nt, Human
gcagaaggucuggcacuucagg

SEQ ID NO: 93237 - RNA, 21 nt, Human
gcagaaguggcuacaucucca

SEQ ID NO: 93238 - RNA, 22 nt, Human
gcagaaguuaaucgaaggccau

SEQ ID NO: 93239 - RNA, 22 nt, Human
gcagaauaauagaaaggcacac

SEQ ID NO: 93240 - RNA, 22 nt, Human
gcagaauguaggccuucagugu

SEQ ID NO: 93241 - RNA, 22 nt, Human
gcagaauucuacagaugauaaa

SEQ ID NO: 93242 - RNA, 22 nt, Human
gcagacacagggaaggcaagga

SEQ ID NO: 93243 - RNA, 22 nt, Human
gcagacacuugaggugggcuuu

SEQ ID NO: 93244 - RNA, 22 nt, Human
gcagacacuuuuauucugcaua

SEQ ID NO: 93245 - RNA, 22 nt, Human
gcagacagacugcagugauuuu

SEQ ID NO: 93246 - RNA, 23 nt, Human
gcagacagagcagacuaagacaa

SEQ ID NO: 93247 - RNA, 22 nt, Human
gcagacaggcccaguggaggga

SEQ ID NO: 93248 - RNA, 22 nt, Human
gcagacaggggcuuaggaaagg

SEQ ID NO: 93249 - RNA, 19 nt, Human
gcagacagguccagagagg

SEQ ID NO: 93250 - RNA, 22 nt, Human
gcagacaucaagcacaggccca

SEQ ID NO: 93251 - RNA, 22 nt, Human
gcagacaugaccaccaaccagg

SEQ ID NO: 93252 - RNA, 22 nt, Human
gcagaccagccccuggagcugc

SEQ ID NO: 93253 - RNA, 22 nt, Human
gcagaccucaggacaucauuag

SEQ ID NO: 93254 - RNA, 22 nt, Human
gcacaguauuuaguagaaugag

SEQ ID NO: 93255 - RNA, 22 nt, Human
gcacagugaugucagaauugga

SEQ ID NO: 93256 - RNA, 22 nt, Human
gcacaguugauuuaugcuggug

SEQ ID NO: 93257 - RNA, 22 nt, Human
gcacaguugugacaaccaucgc

SEQ ID NO: 93258 - RNA, 20 nt, Human
gcacaguuugggaaccaugg

SEQ ID NO: 93259 - RNA, 22 nt, Human
gcacauacccacugucaagcac

SEQ ID NO: 93260 - RNA, 22 nt, Human
gcacauacugcaaagauuacua

SEQ ID NO: 93261 - RNA, 22 nt, Human
gcacauccaaugauuguuuuga

SEQ ID NO: 93262 - RNA, 22 nt, Human
gcacaugagaagcuggcgaugc

SEQ ID NO: 93263 - RNA, 22 nt, Human
gcacaugaguuaagcuggggca

SEQ ID NO: 93264 - RNA, 22 nt, Human
gcacaugucuuauucacuguua

SEQ ID NO: 93265 - RNA, 22 nt, Human
gggggagaagauucugcugcuu

SEQ ID NO: 93266 - RNA, 22 nt, Human
gggggagcuacaggucccuugg

SEQ ID NO: 93267 - RNA, 22 nt, Human
gggggaggugaaugcaauaagg

SEQ ID NO: 93268 - RNA, 22 nt, Human
gggggcaggucuggaacuuuga

SEQ ID NO: 93269 - RNA, 22 nt, Human
gggggcaguaaccucaaagugu

SEQ ID NO: 93270 - RNA, 22 nt, Human
gggggcaguaaggauauggaaa

SEQ ID NO: 93271 - RNA, 20 nt, Human
gggggccagcagcagacgcc

SEQ ID NO: 93272 - RNA, 22 nt, Human
gggggccagucaucucccaaga

SEQ ID NO: 93273 - RNA, 23 nt, Human
gggggccguccuggggauuauag

SEQ ID NO: 93274 - RNA, 20 nt, Human
ggggggcuucagggccugug

SEQ ID NO: 93275 - RNA, 22 nt, Human
gggggugaggacaggagcacug

SEQ ID NO: 93276 - RNA, 22 nt, Human
gggguaggcaggugaucugauc

SEQ ID NO: 93277 - RNA, 22 nt, Human
gggguagggugauugugaagua

SEQ ID NO: 93278 - RNA, 21 nt, Human
gggguauaccuaugagauagu

SEQ ID NO: 93279 - RNA, 22 nt, Human
ggggucaagcucagaauccuag

SEQ ID NO: 93280 - RNA, 22 nt, Human
ggggugaguuagcgucggcuug

SEQ ID NO: 93281 - RNA, 22 nt, Human
ggggugcuagaguggggccacu

SEQ ID NO: 93282 - RNA, 22 nt, Human
gggguggccaaggacucugacc

SEQ ID NO: 93283 - RNA, 22 nt, Human
ggggugggagugccauccuuga

SEQ ID NO: 93284 - RNA, 22 nt, Human
ggggugugaguagagcugggga

SEQ ID NO: 93285 - RNA, 22 nt, Human
ggggugugucugacaaugguau

SEQ ID NO: 93286 - RNA, 22 nt, Human
gggguuaacaguauugcucaug

SEQ ID NO: 93287 - RNA, 22 nt, Human
gggguugaucacagaggggucu

SEQ ID NO: 93288 - RNA, 22 nt, Human
ggguaaugaacagguggcagag

SEQ ID NO: 93289 - RNA, 22 nt, Human
ggguacagagagaugagguaac

SEQ ID NO: 93290 - RNA, 20 nt, Human
ggguacagauaugcagugaa

SEQ ID NO: 93291 - RNA, 22 nt, Human
ggguacaguucuuccaguguca

SEQ ID NO: 93292 - RNA, 22 nt, Human
ggguauuaaaaugaaggagaaa

SEQ ID NO: 93293 - RNA, 22 nt, Human
gggucagagcaagacugggguc

SEQ ID NO: 93294 - RNA, 22 nt, Human
gggucagaguaagcaaggacaa

SEQ ID NO: 93295 - RNA, 22 nt, Human
gggucagcugcugggggcugac

SEQ ID NO: 93296 - RNA, 22 nt, Human
gggucaggaagaauucugccaa

SEQ ID NO: 93297 - RNA, 22 nt, Human
gggucagggcuggcugucguca

SEQ ID NO: 93298 - RNA, 22 nt, Human
ggguccaccugagcagcagccu

SEQ ID NO: 93299 - RNA, 22 nt, Human
ggguccagaguuuucccgcccu

SEQ ID NO: 93300 - RNA, 23 nt, Human
ggguccagccaauuccaaggaaa

SEQ ID NO: 93301 - RNA, 22 nt, Human
ggguccaggucuucaggcagag

SEQ ID NO: 93302 - RNA, 22 nt, Human
ggguccagguuuagucauuugu

SEQ ID NO: 93303 - RNA, 22 nt, Human
ggguccaguaguugguggccgu

SEQ ID NO: 93304 - RNA, 19 nt, Human
ggguccauggugucaagga

SEQ ID NO: 93305 - RNA, 19 nt, Human
gggucccacugcccgucug

SEQ ID NO: 93306 - RNA, 22 nt, Human
gggucccagcauaggggaagca

SEQ ID NO: 93307 - RNA, 22 nt, Human
gggucccaggucuggaaaagca

SEQ ID NO: 93308 - RNA, 18 nt, Human
ggguccccagcugcaggg

SEQ ID NO: 93309 - RNA, 22 nt, Human
gggucccuggaauuacuugaca

SEQ ID NO: 93310 - RNA, 20 nt, Human
ggguccugacuuggucuccu

SEQ ID NO: 93311 - RNA, 22 nt, Human
ggguccugcgugggcccaggac

SEQ ID NO: 93312 - RNA, 18 nt, Human
ggguccugugggagacag

SEQ ID NO: 93313 - RNA, 22 nt, Human
gggucucucagaaggcugcaau

SEQ ID NO: 93314 - RNA, 22 nt, Human
gggucucucaugcaguugcugu

SEQ ID NO: 93315 - RNA, 22 nt, Human
gggucugaccugggcacaccau

SEQ ID NO: 93316 - RNA, 22 nt, Human
gggucuggagauccgggugaag

SEQ ID NO: 93317 - RNA, 22 nt, Human
gggucugggcaggcgcuuccuc

SEQ ID NO: 93318 - RNA, 22 nt, Human
gggucuucugauauagguccag

SEQ ID NO: 93319 - RNA, 22 nt, Human
gggugacauagugauggggcau

SEQ ID NO: 93320 - RNA, 22 nt, Human
gggugagacagaaagagcaaaa

SEQ ID NO: 93321 - RNA, 19 nt, Human
gggugaggaagagcguugc

SEQ ID NO: 93322 - RNA, 22 nt, Human
gggugaggagcugccagucaug

SEQ ID NO: 93323 - RNA, 22 nt, Human
gggugcagcagagcuccucugu

SEQ ID NO: 93324 - RNA, 22 nt, Human
gggugcagugguucacgccugu

SEQ ID NO: 93325 - RNA, 22 nt, Human
gggugcccuggguaggucaguu

SEQ ID NO: 93326 - RNA, 23 nt, Human
gggugcugccuguagucaugcug

SEQ ID NO: 93327 - RNA, 21 nt, Human
gggugcuguggucaugcagga

SEQ ID NO: 93328 - RNA, 22 nt, Human
ggguggaagccagagaggucau

SEQ ID NO: 93329 - RNA, 22 nt, Human
ggguggagguggguuuugagau

SEQ ID NO: 93330 - RNA, 22 nt, Human
ggguggagugugaaaucuggcu

SEQ ID NO: 93331 - RNA, 22 nt, Human
ggguggcacugauaaugagacg

SEQ ID NO: 93332 - RNA, 22 nt, Human
ggguggcaucucucugagcugu

SEQ ID NO: 93333 - RNA, 22 nt, Human
ggguggccuucauagcucaggg

SEQ ID NO: 93334 - RNA, 22 nt, Human
ggguggcugacuguuuugugga

SEQ ID NO: 93335 - RNA, 22 nt, Human
ggguggcugagaacaggacccc

SEQ ID NO: 93336 - RNA, 21 nt, Human
gggugggaggacacagcaggc

SEQ ID NO: 93337 - RNA, 22 nt, Human
gggugggaugccgcugucucca

SEQ ID NO: 93338 - RNA, 22 nt, Human
gggugggauggcaggagccgcu

SEQ ID NO: 93339 - RNA, 22 nt, Human
gggugggccacugagcagcgug

SEQ ID NO: 93340 - RNA, 22 nt, Human
gggugggcccagcccagagaag

SEQ ID NO: 93341 - RNA, 22 nt, Human
gggugggccccagguaucugua

SEQ ID NO: 93342 - RNA, 22 nt, Human
ggguggggcccaggaaaucuau

SEQ ID NO: 93343 - RNA, 22 nt, Human
gggugggugguccgcagacaua

SEQ ID NO: 93344 - RNA, 21 nt, Human
ggguggucugcugaagaggga

SEQ ID NO: 93345 - RNA, 22 nt, Human
ggguggucuggcaggcuggaaa

SEQ ID NO: 93346 - RNA, 22 nt, Human
ggguguccuucuguggacucug

SEQ ID NO: 93347 - RNA, 21 nt, Human
ggguguggaaauuacauccug

SEQ ID NO: 93348 - RNA, 22 nt, Human
ggguguugauuuuacacuaaaa

SEQ ID NO: 93349 - RNA, 22 nt, Human
ggguuaaacaugcuauaugagu

SEQ ID NO: 93350 - RNA, 22 nt, Human
ggguuaaagagcccaauguaug

SEQ ID NO: 93351 - RNA, 22 nt, Human
ggguuaaagcaggaagcaucuu

SEQ ID NO: 93352 - RNA, 22 nt, Human
ggguuccuccaguuccuagagc

SEQ ID NO: 93353 - RNA, 19 nt, Human
ggguuguguggaagguauc

SEQ ID NO: 93354 - RNA, 22 nt, Human
ggguuucaugguucucacaaug

SEQ ID NO: 93355 - RNA, 19 nt, Human
gguaaaagugagcuucagg

SEQ ID NO: 93356 - RNA, 22 nt, Human
gguaaauuuuaugugaugaaac

SEQ ID NO: 93357 - RNA, 22 nt, Human
gguaacaaacuucugacuuaag

SEQ ID NO: 93358 - RNA, 22 nt, Human
gguaacaacccuacaaauccac

SEQ ID NO: 93359 - RNA, 22 nt, Human
gguaacugcaccuuuggccuga

SEQ ID NO: 93360 - RNA, 22 nt, Human
gguaacuuacagggccccuuua

SEQ ID NO: 93361 - RNA, 22 nt, Human
gguaacuugaguguguuguuca

SEQ ID NO: 93362 - RNA, 22 nt, Human
gguacaaaguuagauuuaacuu

SEQ ID NO: 93363 - RNA, 20 nt, Human
guauccccgcguggggaagg

SEQ ID NO: 93364 - RNA, 22 nt, Human
guauccuuugcggaaauuucua

SEQ ID NO: 93365 - RNA, 22 nt, Human
guaucuugacuccaugccucag

SEQ ID NO: 93366 - RNA, 22 nt, Human
guaucuuuaucccucguuggag

SEQ ID NO: 93367 - RNA, 22 nt, Human
guaucuuuugguggaaaaauaa

SEQ ID NO: 93368 - RNA, 22 nt, Human
guaugaaaauuguaaaguucuu

SEQ ID NO: 93369 - RNA, 22 nt, Human
guaugcaugcauguguauguac

SEQ ID NO: 93370 - RNA, 22 nt, Human
guaugcauuuggcauauugucc

SEQ ID NO: 93371 - RNA, 22 nt, Human
guaugcuuauuccuuguuguga

SEQ ID NO: 93372 - RNA, 22 nt, Human
guauggaucaccugaggucagc

SEQ ID NO: 93373 - RNA, 22 nt, Human
guaugguuuauagggaaauugu

SEQ ID NO: 93374 - RNA, 22 nt, Human
guauguauauauguguacacac

SEQ ID NO: 93375 - RNA, 22 nt, Human
guaugucaugagccuugugcgu

SEQ ID NO: 93376 - RNA, 22 nt, Human
guauguguaaguaugccaccuu

SEQ ID NO: 93377 - RNA, 22 nt, Human
guauuacauuuaguaauuaggc

SEQ ID NO: 93378 - RNA, 22 nt, Human
guauuagacugagaaauggagu

SEQ ID NO: 93379 - RNA, 22 nt, Human
guauuagcugccuuggagcuaa

SEQ ID NO: 93380 - RNA, 22 nt, Human
guauuagcuguuagcuacauca

SEQ ID NO: 93381 - RNA, 22 nt, Human
guauuaggaaauaugaagaaag

SEQ ID NO: 93382 - RNA, 22 nt, Human
guauuauuggguaguaugguaa

SEQ ID NO: 93383 - RNA, 22 nt, Human
guauuauugucaugaaauaaua

SEQ ID NO: 93384 - RNA, 22 nt, Human
guauucagaaggaugaucuagu

SEQ ID NO: 93385 - RNA, 22 nt, Human
guauucauuuauuuacucaucc

SEQ ID NO: 93386 - RNA, 17 nt, Human
guauucuuugccuucca

SEQ ID NO: 93387 - RNA, 21 nt, Human
guauugcagaguuaugugcuc

SEQ ID NO: 93388 - RNA, 22 nt, Human
guauugcauagaccugggauga

SEQ ID NO: 93389 - RNA, 22 nt, Human
guauugcauuuugaaugcaugg

SEQ ID NO: 93390 - RNA, 22 nt, Human
guauuuaauucugugcuucuag

SEQ ID NO: 93391 - RNA, 19 nt, Human
guauuucaggacaagacgu

SEQ ID NO: 93392 - RNA, 22 nt, Human
guauuucaguuccucuugugac

SEQ ID NO: 93393 - RNA, 22 nt, Human
guauuucccccagacucccugg

SEQ ID NO: 93394 - RNA, 22 nt, Human
guauuucccugaguucugugag

SEQ ID NO: 93395 - RNA, 22 nt, Human
guauuucuagaaugguagcacu

SEQ ID NO: 93396 - RNA, 22 nt, Human
guauuucugguaacugcugcua

SEQ ID NO: 93397 - RNA, 22 nt, Human
guauuucuuuacauaugcucau

SEQ ID NO: 93398 - RNA, 22 nt, Human
guauuugauacaugaaauggug

SEQ ID NO: 93399 - RNA, 22 nt, Human
guauuuguaguagcauagaauu

SEQ ID NO: 93400 - RNA, 22 nt, Human
gcagguguggauuugcauccag

SEQ ID NO: 93401 - RNA, 21 nt, Human
gcaggugugguaucagcuucc

SEQ ID NO: 93402 - RNA, 22 nt, Human
gcagguguucucagaggaggcu

SEQ ID NO: 93403 - RNA, 22 nt, Human
gcagguuauccaacuacaaugu

SEQ ID NO: 93404 - RNA, 22 nt, Human
gcaguaaaaaaggauaugugca

SEQ ID NO: 93405 - RNA, 16 nt, Human
gcaguaaaaugguuag

SEQ ID NO: 93406 - RNA, 22 nt, Human
gcaguaaauugagagucauguu

SEQ ID NO: 93407 - RNA, 22 nt, Human
gcaguaaguuaauagugcuggu

SEQ ID NO: 93408 - RNA, 22 nt, Human
gcaguacuuuaagggaugaagc

SEQ ID NO: 93409 - RNA, 22 nt, Human
gcaguacuuuaucacauggaau

SEQ ID NO: 93410 - RNA, 22 nt, Human
gcaguagcaguauccagaagca

SEQ ID NO: 93411 - RNA, 22 nt, Human
gcaguauaaguggauuaugucc

SEQ ID NO: 93412 - RNA, 22 nt, Human
gcaguauauggauuuuaaacau

SEQ ID NO: 93413 - RNA, 22 nt, Human
gcagucaaagauuggaccaauu

SEQ ID NO: 93414 - RNA, 22 nt, Human
gcagucaguguugacuacaugc

SEQ ID NO: 93415 - RNA, 22 nt, Human
gcagucauccagccuuuccacu

SEQ ID NO: 93416 - RNA, 22 nt, Human
gcaguccuccugccucagccuc

SEQ ID NO: 93417 - RNA, 22 nt, Human
gcaguccucucauuggccuccu

SEQ ID NO: 93418 - RNA, 22 nt, Human
gcaguccuuaggagaggaagua

SEQ ID NO: 93419 - RNA, 22 nt, Human
gcagugaaaaagugcacccugu

SEQ ID NO: 93420 - RNA, 22 nt, Human
gcagugaagauggcagguuggg

SEQ ID NO: 93421 - RNA, 22 nt, Human
gcagugacauaccuggagggca

SEQ ID NO: 93422 - RNA, 20 nt, Human
gcagugaucucaucggucug

SEQ ID NO: 93423 - RNA, 22 nt, Human
gcagugcaggacaaaucagugc

SEQ ID NO: 93424 - RNA, 22 nt, Human
gcagugcagugggacagggcgc

SEQ ID NO: 93425 - RNA, 22 nt, Human
gcagugcuaaguagcuggccca

SEQ ID NO: 93426 - RNA, 22 nt, Human
gcagugcugaucccauggcaga

SEQ ID NO: 93427 - RNA, 20 nt, Human
gcagugcuggugccucugcu

SEQ ID NO: 93428 - RNA, 22 nt, Human
gcagugcuugaagagguggcca

SEQ ID NO: 93429 - RNA, 22 nt, Human
gcagugcuugcucaggcuucau

SEQ ID NO: 93430 - RNA, 22 nt, Human
gcaguggcccagcuugcaggcu

SEQ ID NO: 93431 - RNA, 22 nt, Human
gcaguggcuaggagucuggcgu

SEQ ID NO: 93432 - RNA, 22 nt, Human
gcaguggggcaaucauagcuca

SEQ ID NO: 93433 - RNA, 22 nt, Human
gcagugucuuugaccuccaccc

SEQ ID NO: 93434 - RNA, 22 nt, Human
gcaguguggcguggggaccuaa

SEQ ID NO: 93435 - RNA, 22 nt, Human
gcagugugucucuuggcuuccu

SEQ ID NO: 93436 - RNA, 22 nt, Human
gcagugugucuggaguacaugg

SEQ ID NO: 93437 - RNA, 22 nt, Human
gcaguguguuucugagauaugg

SEQ ID NO: 93438 - RNA, 22 nt, Human
gcaguguuaaacaacugcugcu

SEQ ID NO: 93439 - RNA, 22 nt, Human
gcaguguuacuuggaguacuaa

SEQ ID NO: 93440 - RNA, 22 nt, Human
gcaguguucagugaagcaggag

SEQ ID NO: 93441 - RNA, 22 nt, Human
gcaguguugcuaggugcgguga

SEQ ID NO: 93442 - RNA, 22 nt, Human
gcaguguuuguguucucacaug

SEQ ID NO: 93443 - RNA, 22 nt, Human
gcaguuaccuauuuuguagaaa

SEQ ID NO: 93444 - RNA, 23 nt, Human
gcaguuaguccacuuugcagaga

SEQ ID NO: 93445 - RNA, 22 nt, Human
gcaguugcaggauuuguguugu

SEQ ID NO: 93446 - RNA, 22 nt, Human
gcaguuuaguagaugacauuau

SEQ ID NO: 93447 - RNA, 22 nt, Human
gcaguuuuagagcuuuaagaug

SEQ ID NO: 93448 - RNA, 22 nt, Human
gcaguuuuauuaugauggaaau

SEQ ID NO: 93449 - RNA, 22 nt, Human
gcauaacaaauaugcuuuaaau

SEQ ID NO: 93450 - RNA, 22 nt, Human
gcauaauauacaugcuugaucc

SEQ ID NO: 93451 - RNA, 22 nt, Human
gcauacaaagguuuacaacuga

SEQ ID NO: 93452 - RNA, 22 nt, Human
gcauacagagaggauguggcau

SEQ ID NO: 93453 - RNA, 22 nt, Human
gcauagcuguuaauuugguuuc

SEQ ID NO: 93454 - RNA, 22 nt, Human
gcauaggcacuuuccuccuccu

SEQ ID NO: 93455 - RNA, 22 nt, Human
gcauaguaggcugucaaaaaug

SEQ ID NO: 93456 - RNA, 22 nt, Human
gcauagucaguaggauucucaa

SEQ ID NO: 93457 - RNA, 22 nt, Human
gcauaucaugacuucuaucuua

SEQ ID NO: 93458 - RNA, 19 nt, Human
gcaucagagcagaaggggu

SEQ ID NO: 93459 - RNA, 22 nt, Human
gcaucauucuggcucuuuccau

SEQ ID NO: 93460 - RNA, 22 nt, Human
gcaucauuuucuucuuccugca

SEQ ID NO: 93461 - RNA, 23 nt, Human
gcauccagagcucaguccccuuu

SEQ ID NO: 93462 - RNA, 22 nt, Human
gcauccagagguagccacugug

SEQ ID NO: 93463 - RNA, 22 nt, Human
gcauccauucacucaacuuaga

SEQ ID NO: 93464 - RNA, 22 nt, Human
gcauccauuguuuauguguuuc

SEQ ID NO: 93465 - RNA, 22 nt, Human
gcaucccaaaucugaaagucca

SEQ ID NO: 93466 - RNA, 22 nt, Human
gcaucccucugaggggccaggc

SEQ ID NO: 93467 - RNA, 23 nt, Human
gcaucuuaaaaccuacauaugug

SEQ ID NO: 93468 - RNA, 23 nt, Human
gcaugaagugcuacgucuacagc

SEQ ID NO: 93469 - RNA, 22 nt, Human
gcaugauaccauagguuuugcc

SEQ ID NO: 93470 - RNA, 22 nt, Human
gcaugcaacucccaguucugcc

SEQ ID NO: 93471 - RNA, 22 nt, Human
gcaugcacacacuuucucacua

SEQ ID NO: 93472 - RNA, 22 nt, Human
gucauaaucacaguuuuaugca

SEQ ID NO: 93473 - RNA, 22 nt, Human
gucauauacacugcauguaauc

SEQ ID NO: 93474 - RNA, 20 nt, Human
gucaucgccggcagcaaaga

SEQ ID NO: 93475 - RNA, 22 nt, Human
gucaucuucucucagcccaggc

SEQ ID NO: 93476 - RNA, 22 nt, Human
gucaucuugcuguuuuagaucu

SEQ ID NO: 93477 - RNA, 22 nt, Human
gucauggaggauugugaguggu

SEQ ID NO: 93478 - RNA, 18 nt, Human
gucauggguaguuuagua

SEQ ID NO: 93479 - RNA, 22 nt, Human
gucaugugaaauuuggcaggcc

SEQ ID NO: 93480 - RNA, 22 nt, Human
gucauucaacugcacauuaggu

SEQ ID NO: 93481 - RNA, 22 nt, Human
gucauucagagaugcagguaga

SEQ ID NO: 93482 - RNA, 22 nt, Human
gucauuccuauccauuugauac

SEQ ID NO: 93483 - RNA, 22 nt, Human
gucauucucuggugugguuguu

SEQ ID NO: 93484 - RNA, 22 nt, Human
gucauucuuaacaacucaguag

SEQ ID NO: 93485 - RNA, 22 nt, Human
gucauugagucgucagagucuu

SEQ ID NO: 93486 - RNA, 22 nt, Human
guccaaaagagccagccgggcg

SEQ ID NO: 93487 - RNA, 22 nt, Human
guccaaauaaguugcaaaauag

SEQ ID NO: 93488 - RNA, 22 nt, Human
guccaaauuccacagauuucuc

SEQ ID NO: 93489 - RNA, 22 nt, Human
guccaagagaacugaaauagga

SEQ ID NO: 93490 - RNA, 22 nt, Human
guccaaggaugcaggaugcugu

SEQ ID NO: 93491 - RNA, 22 nt, Human
guccaaggauggggucucccag

SEQ ID NO: 93492 - RNA, 22 nt, Human
guccacagagggcugggcaggc

SEQ ID NO: 93493 - RNA, 23 nt, Human
guccagaacccaggcuggggugg

SEQ ID NO: 93494 - RNA, 22 nt, Human
guccagaauuacuacuguuuga

SEQ ID NO: 93495 - RNA, 21 nt, Human
guccagagagccggcuccuga

SEQ ID NO: 93496 - RNA, 22 nt, Human
guccagagaguaaaggggguaa

SEQ ID NO: 93497 - RNA, 22 nt, Human
guccagagggucaaguuucuug

SEQ ID NO: 93498 - RNA, 22 nt, Human
guccagagguccaggaucaagg

SEQ ID NO: 93499 - RNA, 20 nt, Human
guccagaguaaugugcugac

SEQ ID NO: 93500 - RNA, 22 nt, Human
guccagccacccuggaggcacg

SEQ ID NO: 93501 - RNA, 22 nt, Human
guccagccaggccugucucugg

SEQ ID NO: 93502 - RNA, 22 nt, Human
guccagcugaucuugacccagc

SEQ ID NO: 93503 - RNA, 22 nt, Human
guccaggaguuuccaauuaagc

SEQ ID NO: 93504 - RNA, 22 nt, Human
guccagggaaauagcgacaggg

SEQ ID NO: 93505 - RNA, 22 nt, Human
guccagggcuaaaucagguucc

SEQ ID NO: 93506 - RNA, 22 nt, Human
guccaggucuggacccugagcc

SEQ ID NO: 93507 - RNA, 22 nt, Human
guccagugacaaguagcuggcc

SEQ ID NO: 93508 - RNA, 19 nt, Human
guccaguguuuuccaguca

SEQ ID NO: 93509 - RNA, 22 nt, Human
guccaucuaaguauccagccug

SEQ ID NO: 93510 - RNA, 22 nt, Human
guccaugauucugugacacccu

SEQ ID NO: 93511 - RNA, 22 nt, Human
gucccacaccuugaggggucuu

SEQ ID NO: 93512 - RNA, 22 nt, Human
gucccagaaacauauugcuggu

SEQ ID NO: 93513 - RNA, 22 nt, Human
gucccagaggcuuuggccacag

SEQ ID NO: 93514 - RNA, 22 nt, Human
gucccagcuucccacuagcagc

SEQ ID NO: 93515 - RNA, 22 nt, Human
gucccaggcaggccacuggcag

SEQ ID NO: 93516 - RNA, 22 nt, Human
gcaggcaucucuguagccaggg

SEQ ID NO: 93517 - RNA, 22 nt, Human
gcaggcauggucgcugccaggu

SEQ ID NO: 93518 - RNA, 22 nt, Human
gcaggccacaguggagucucug

SEQ ID NO: 93519 - RNA, 22 nt, Human
gcaggcccuccucuagcaaggc

SEQ ID NO: 93520 - RNA, 18 nt, Human
gcaggcccuguuucuggg

SEQ ID NO: 93521 - RNA, 22 nt, Human
gcaggcccuuagccuugguggg

SEQ ID NO: 93522 - RNA, 22 nt, Human
gcaggccugcagguauggccgg

SEQ ID NO: 93523 - RNA, 22 nt, Human
gcaggccugggagucaucuugu

SEQ ID NO: 93524 - RNA, 22 nt, Human
gcaggccuguaaugaagggaca

SEQ ID NO: 93525 - RNA, 22 nt, Human
gcaggcggaucacuggaaguca

SEQ ID NO: 93526 - RNA, 22 nt, Human
gcaggcuaugucagggccgcuc

SEQ ID NO: 93527 - RNA, 22 nt, Human
gcaggcucagagcagauuagca

SEQ ID NO: 93528 - RNA, 22 nt, Human
gcaggcuccaacuggaggaguu

SEQ ID NO: 93529 - RNA, 22 nt, Human
gcaggcuccaggccggccccuu

SEQ ID NO: 93530 - RNA, 22 nt, Human
gcaggcugagaguccaagaagg

SEQ ID NO: 93531 - RNA, 22 nt, Human
gcaggcugauagaggauuccau

SEQ ID NO: 93532 - RNA, 22 nt, Human
gcaggcugcccucuuguguuga

SEQ ID NO: 93533 - RNA, 22 nt, Human
gcaggcuguagacaccaaacua

SEQ ID NO: 93534 - RNA, 22 nt, Human
gcaggcuuauggggagacagag

SEQ ID NO: 93535 - RNA, 22 nt, Human
gcaggcuucaagcacagcuuuu

SEQ ID NO: 93536 - RNA, 22 nt, Human
gcaggcuucccccacaccuacg

SEQ ID NO: 93537 - RNA, 22 nt, Human
gcagggaaguuguaauguaaug

SEQ ID NO: 93538 - RNA, 22 nt, Human
gcagggacaacugugcaccuga

SEQ ID NO: 93539 - RNA, 18 nt, Human
gcagggacacagggucac

SEQ ID NO: 93540 - RNA, 22 nt, Human
gcagggacaccuuugugaagcu

SEQ ID NO: 93541 - RNA, 22 nt, Human
gcagggaccuaugacgauggaa

SEQ ID NO: 93542 - RNA, 22 nt, Human
gcagggaccucacuacccccag

SEQ ID NO: 93543 - RNA, 22 nt, Human
gcagggacgccagggacagcaa

SEQ ID NO: 93544 - RNA, 22 nt, Human
gcagggagggccuuucaugaca

SEQ ID NO: 93545 - RNA, 20 nt, Human
gcagggcaagggauaugaaa

SEQ ID NO: 93546 - RNA, 22 nt, Human
gcagggcaaugaucccgagagg

SEQ ID NO: 93547 - RNA, 22 nt, Human
gcagggcacaaggacgcacagg

SEQ ID NO: 93548 - RNA, 22 nt, Human
gcagggcacagacagugccaag

SEQ ID NO: 93549 - RNA, 22 nt, Human
gcagggcagcucacugugguuc

SEQ ID NO: 93550 - RNA, 22 nt, Human
gcagggcagugugucugugggg

SEQ ID NO: 93551 - RNA, 22 nt, Human
gcagggcaucccugagcgggug

SEQ ID NO: 93552 - RNA, 22 nt, Human
gcagggccagugcagagaggaa

SEQ ID NO: 93553 - RNA, 22 nt, Human
gcagggccuuagcagcggcugc

SEQ ID NO: 93554 - RNA, 22 nt, Human
gcagggccuuggucaucuuuuu

SEQ ID NO: 93555 - RNA, 22 nt, Human
gcagggcuaauggggcaaguag

SEQ ID NO: 93556 - RNA, 22 nt, Human
gcagggcuauuggaaggagaug

SEQ ID NO: 93557 - RNA, 22 nt, Human
gcagggcucauucuaguacaau

SEQ ID NO: 93558 - RNA, 22 nt, Human
gcagggcucauugccaggcauu

SEQ ID NO: 93559 - RNA, 22 nt, Human
gcagggcugauggcuucccuca

SEQ ID NO: 93560 - RNA, 22 nt, Human
gcagggcugcagagggcacugu

SEQ ID NO: 93561 - RNA, 22 nt, Human
gcagggcugggauuugagccca

SEQ ID NO: 93562 - RNA, 22 nt, Human
gcagggcuggguccugucucau

SEQ ID NO: 93563 - RNA, 22 nt, Human
gcagggcuguggacacuuuggu

SEQ ID NO: 93564 - RNA, 22 nt, Human
gcagggcuuuuugaaacauggu

SEQ ID NO: 93565 - RNA, 22 nt, Human
gcaggggaguccacucuaugca

SEQ ID NO: 93566 - RNA, 22 nt, Human
gcaggggcaggagaucucaggc

SEQ ID NO: 93567 - RNA, 22 nt, Human
gcagggggucauucacgcuggc

SEQ ID NO: 93568 - RNA, 22 nt, Human
gcagggguagugucuuccugag

SEQ ID NO: 93569 - RNA, 16 nt, Human
gcagggguggguggag

SEQ ID NO: 93570 - RNA, 22 nt, Human
gcagggucgcucuaggagauca

SEQ ID NO: 93571 - RNA, 22 nt, Human
gcagggugauagugaggcucag

SEQ ID NO: 93572 - RNA, 22 nt, Human
gcagggugccgacuucagggau

SEQ ID NO: 93573 - RNA, 19 nt, Human
gcaggguggcagagcucuu

SEQ ID NO: 93574 - RNA, 22 nt, Human
gcaggguugguguccucugcgg

SEQ ID NO: 93575 - RNA, 22 nt, Human
gcagguaagagaggcuggcuuc

SEQ ID NO: 93576 - RNA, 20 nt, Human
gcaggucccuggcaugcaga

SEQ ID NO: 93577 - RNA, 22 nt, Human
gcaggucuagaagcugccucug

SEQ ID NO: 93578 - RNA, 22 nt, Human
gcaggucuaucaggcugcaggu

SEQ ID NO: 93579 - RNA, 22 nt, Human
gcaggucuggagggcacugggg

SEQ ID NO: 93580 - RNA, 19 nt, Human
gcaggugagccguggcucc

SEQ ID NO: 93581 - RNA, 22 nt, Human
guccuuggcuugaggcaccuca

SEQ ID NO: 93582 - RNA, 22 nt, Human
guccuuucuuaaauuccugcuu

SEQ ID NO: 93583 - RNA, 20 nt, Human
gucgaaaaagauaaacaggc

SEQ ID NO: 93584 - RNA, 22 nt, Human
gucgaucaccucguccuccgug

SEQ ID NO: 93585 - RNA, 22 nt, Human
gucggccacgcaggugcgguag

SEQ ID NO: 93586 - RNA, 22 nt, Human
gucguucucugccagggcguug

SEQ ID NO: 93587 - RNA, 22 nt, Human
gucuaaaccucaaaucaguguc

SEQ ID NO: 93588 - RNA, 22 nt, Human
gucuaaacuuagggaucgaaca

SEQ ID NO: 93589 - RNA, 22 nt, Human
gucuaacaagcauuaggaaccc

SEQ ID NO: 93590 - RNA, 22 nt, Human
gucuaauaacuuucagucauuu

SEQ ID NO: 93591 - RNA, 22 nt, Human
gucuacuuuuuaaucuuggcag

SEQ ID NO: 93592 - RNA, 22 nt, Human
gucuagagccugaugaggauga

SEQ ID NO: 93593 - RNA, 22 nt, Human
gucuagcaaugaugaugagcua

SEQ ID NO: 93594 - RNA, 22 nt, Human
gucuaugauauuuuguuauagc

SEQ ID NO: 93595 - RNA, 22 nt, Human
gucucagggcagcuggaggagg

SEQ ID NO: 93596 - RNA, 22 nt, Human
gucucagguauugaaugggaac

SEQ ID NO: 93597 - RNA, 22 nt, Human
gucucagguucgagccuccuua

SEQ ID NO: 93598 - RNA, 22 nt, Human
gucucaguaagaaaggcuccug

SEQ ID NO: 93599 - RNA, 22 nt, Human
gucuccacuaaaaacuuucacg

SEQ ID NO: 93600 - RNA, 22 nt, Human
gucuccaguguucaggugacug

SEQ ID NO: 93601 - RNA, 22 nt, Human
gucucccaaccccugugcccag

SEQ ID NO: 93602 - RNA, 22 nt, Human
gucucccaucguuugugaggaa

SEQ ID NO: 93603 - RNA, 22 nt, Human
gucucccaucucuguccuugug

SEQ ID NO: 93604 - RNA, 20 nt, Human
gucuccucuuugcauuccua

SEQ ID NO: 93605 - RNA, 22 nt, Human
gucuccuguccugcaggaugga

SEQ ID NO: 93606 - RNA, 22 nt, Human
gucucuagauugggagagagaa

SEQ ID NO: 93607 - RNA, 22 nt, Human
gucucuggcuuuaugcugguuu

SEQ ID NO: 93608 - RNA, 22 nt, Human
gucucugucauuucaccuuccc

SEQ ID NO: 93609 - RNA, 17 nt, Human
gucucugucuugcuuuu

SEQ ID NO: 93610 - RNA, 18 nt, Human
gucucugugggaauuggc

SEQ ID NO: 93611 - RNA, 22 nt, Human
gucucuuagaaucgcauauugu

SEQ ID NO: 93612 - RNA, 16 nt, Human
gucucuucccugcuga

SEQ ID NO: 93613 - RNA, 22 nt, Human
gucucuuguuaucauuucugag

SEQ ID NO: 93614 - RNA, 22 nt, Human
gucugaauacguacuugugaag

SEQ ID NO: 93615 - RNA, 22 nt, Human
gucugagaggaggcagccucgg

SEQ ID NO: 93616 - RNA, 22 nt, Human
gucugagcgcuggagcuugugu

SEQ ID NO: 93617 - RNA, 22 nt, Human
gucugagggagaaggaucuggg

SEQ ID NO: 93618 - RNA, 22 nt, Human
gucugaggguugugcuggagga

SEQ ID NO: 93619 - RNA, 22 nt, Human
gucugaggucauuagcucucuu

SEQ ID NO: 93620 - RNA, 22 nt, Human
gucugauaucagaaaaaguaaa

SEQ ID NO: 93621 - RNA, 22 nt, Human
gucugcacggggaggaugggcu

SEQ ID NO: 93622 - RNA, 22 nt, Human
gucugcacgugccagggagggg

SEQ ID NO: 93623 - RNA, 22 nt, Human
gucugcagagggaaggcuucag

SEQ ID NO: 93624 - RNA, 18 nt, Human
gucugccaacaacuauca

SEQ ID NO: 93625 - RNA, 22 nt, Human
gucugccauguggagaaagcca

SEQ ID NO: 93626 - RNA, 22 nt, Human
gucugccccacaggcucaguug

SEQ ID NO: 93627 - RNA, 22 nt, Human
gucugcccugcugaucucaccc

SEQ ID NO: 93628 - RNA, 22 nt, Human
gucugcccuuggcucagccaua

SEQ ID NO: 93629 - RNA, 22 nt, Human
gucugcuggcacgucacagaua

SEQ ID NO: 93630 - RNA, 22 nt, Human
gucugcuguucagagauguugc

SEQ ID NO: 93631 - RNA, 22 nt, Human
gucuggaagcucuaggggagaa

SEQ ID NO: 93632 - RNA, 22 nt, Human
gucuggacagcagcaccucggc

SEQ ID NO: 93633 - RNA, 21 nt, Human
gcagcagaggcuugacagaca

SEQ ID NO: 93634 - RNA, 22 nt, Human
gcagcagaguagacagagcccu

SEQ ID NO: 93635 - RNA, 22 nt, Human
gcagcagaugugggcccagagc

SEQ ID NO: 93636 - RNA, 22 nt, Human
gcagcagcagcaauuuucuguc

SEQ ID NO: 93637 - RNA, 22 nt, Human
gcagcagcccagggcucucaga

SEQ ID NO: 93638 - RNA, 22 nt, Human
gcagcagccgacauggauugca

SEQ ID NO: 93639 - RNA, 22 nt, Human
gcagcagcggggccccugcgcg

SEQ ID NO: 93640 - RNA, 22 nt, Human
gcagcagcucaguucugggagg

SEQ ID NO: 93641 - RNA, 22 nt, Human
gcagcagcugacagugggugcc

SEQ ID NO: 93642 - RNA, 22 nt, Human
gcagcaggacugccguuaaagu

SEQ ID NO: 93643 - RNA, 22 nt, Human
gcagcaggagaguaauagcggu

SEQ ID NO: 93644 - RNA, 22 nt, Human
gcagcaggauggccaauugcca

SEQ ID NO: 93645 - RNA, 22 nt, Human
gcagcaggcacggucucgacau

SEQ ID NO: 93646 - RNA, 22 nt, Human
gcagcaggcacuuaccguugcu

SEQ ID NO: 93647 - RNA, 22 nt, Human
gcagcagggugccagcuuugca

SEQ ID NO: 93648 - RNA, 22 nt, Human
gcagcagguccgcaucaucauc

SEQ ID NO: 93649 - RNA, 22 nt, Human
gcagcaguaggaaauaacacag

SEQ ID NO: 93650 - RNA, 22 nt, Human
gcagcagugcuuuggaauccug

SEQ ID NO: 93651 - RNA, 19 nt, Human
gcagcaguggaaggaaaaa

SEQ ID NO: 93652 - RNA, 22 nt, Human
gcagcaguggucuguagaagga

SEQ ID NO: 93653 - RNA, 22 nt, Human
gcagcauccccaggcagcaggg

SEQ ID NO: 93654 - RNA, 22 nt, Human
gcagcaucuagggcacuggccu

SEQ ID NO: 93655 - RNA, 22 nt, Human
gcagcauugcacuuuuguucuu

SEQ ID NO: 93656 - RNA, 22 nt, Human
gcagcauuucucaaaggguggu

SEQ ID NO: 93657 - RNA, 22 nt, Human
gcagccaagaccccaagaacug

SEQ ID NO: 93658 - RNA, 22 nt, Human
gcagccacuaguuuuccuguuu

SEQ ID NO: 93659 - RNA, 22 nt, Human
gcagccacucucauuccacgug

SEQ ID NO: 93660 - RNA, 22 nt, Human
gcagccagcaggaagcgggaga

SEQ ID NO: 93661 - RNA, 22 nt, Human
gcagccagccccucugaccucu

SEQ ID NO: 93662 - RNA, 21 nt, Human
gcagccaggacuuugggcugg

SEQ ID NO: 93663 - RNA, 22 nt, Human
gcagccagggagagaaccaggg

SEQ ID NO: 93664 - RNA, 22 nt, Human
gcagccagggcuaagcugggga

SEQ ID NO: 93665 - RNA, 22 nt, Human
gcagccaggggcugugaccugu

SEQ ID NO: 93666 - RNA, 22 nt, Human
gcagccaggguuaauuauauuu

SEQ ID NO: 93667 - RNA, 22 nt, Human
gcagccaguauccucugagauu

SEQ ID NO: 93668 - RNA, 17 nt, Human
gcagccagugcagcagg

SEQ ID NO: 93669 - RNA, 22 nt, Human
gcagcccaagccugagcauccu

SEQ ID NO: 93670 - RNA, 22 nt, Human
gcagcccacagcuggaggccua

SEQ ID NO: 93671 - RNA, 22 nt, Human
gcagcccaggagcaggcgaccc

SEQ ID NO: 93672 - RNA, 22 nt, Human
gcagcccaggcucgcucacugc

SEQ ID NO: 93673 - RNA, 22 nt, Human
gcagcccagguggaguaaucua

SEQ ID NO: 93674 - RNA, 22 nt, Human
gcagcccuaaccugucauagug

SEQ ID NO: 93675 - RNA, 22 nt, Human
gcagcccucuuggucacuaggc

SEQ ID NO: 93676 - RNA, 22 nt, Human
gcagcccuggccuggccuacuu

SEQ ID NO: 93677 - RNA, 20 nt, Human
gcagccucaacaggcacagc

SEQ ID NO: 93678 - RNA, 22 nt, Human
gcagccugaugaucuggguugu

SEQ ID NO: 93679 - RNA, 22 nt, Human
gcagccuguuguaccagccugu

SEQ ID NO: 93680 - RNA, 22 nt, Human
gcagccuuccugaccucuaccc

SEQ ID NO: 93681 - RNA, 22 nt, Human
gcagcguggggcugagucagcu

SEQ ID NO: 93682 - RNA, 22 nt, Human
gcagcuaccacccaggaaggac

SEQ ID NO: 93683 - RNA, 18 nt, Human
gcagcuagccaggggggc

SEQ ID NO: 93684 - RNA, 22 nt, Human
gcagcucccaucagggcacaga

SEQ ID NO: 93685 - RNA, 22 nt, Human
gcagcuccuccugggcuggaga

SEQ ID NO: 93686 - RNA, 22 nt, Human
gcagcugagcgugaggaagagu

SEQ ID NO: 93687 - RNA, 22 nt, Human
gcagcugauggaaguccuauug

SEQ ID NO: 93688 - RNA, 22 nt, Human
gcagcugcagacccucagugcu

SEQ ID NO: 93689 - RNA, 22 nt, Human
gcagcugcagagaccggguggg

SEQ ID NO: 93690 - RNA, 22 nt, Human
gccaggaaucacugcugaguaa

SEQ ID NO: 93691 - RNA, 22 nt, Human
gccaggagacuccauucauuug

SEQ ID NO: 93692 - RNA, 22 nt, Human
gccaggagagcuccuucagguu

SEQ ID NO: 93693 - RNA, 22 nt, Human
gccaggagcaugucauuguuga

SEQ ID NO: 93694 - RNA, 22 nt, Human
gccaggagccagcuucuuagca

SEQ ID NO: 93695 - RNA, 22 nt, Human
gccaggagggaaaggacaauuu

SEQ ID NO: 93696 - RNA, 22 nt, Human
gccaggaggggagaguguguca

SEQ ID NO: 93697 - RNA, 17 nt, Human
gccaggagguuugagcu

SEQ ID NO: 93698 - RNA, 22 nt, Human
gccaggagugucccacucauuu

SEQ ID NO: 93699 - RNA, 22 nt, Human
gccaggaguguguggcuauguu

SEQ ID NO: 93700 - RNA, 22 nt, Human
gccaggaguucagaugcauguu

SEQ ID NO: 93701 - RNA, 22 nt, Human
gccaggcauuauuccgaucccu

SEQ ID NO: 93702 - RNA, 22 nt, Human
gccaggcauucuagaaguagug

SEQ ID NO: 93703 - RNA, 22 nt, Human
gccaggccacucccggguccug

SEQ ID NO: 93704 - RNA, 19 nt, Human
gccaggccuggaccugcag

SEQ ID NO: 93705 - RNA, 22 nt, Human
gccaggcucagcagucaaccug

SEQ ID NO: 93706 - RNA, 22 nt, Human
gccaggcuccccggaucccugg

SEQ ID NO: 93707 - RNA, 22 nt, Human
gccaggcugaggcucuggaaga

SEQ ID NO: 93708 - RNA, 22 nt, Human
gccaggcugccuuaucucuagc

SEQ ID NO: 93709 - RNA, 22 nt, Human
gccaggcuggggggagaugucu

SEQ ID NO: 93710 - RNA, 22 nt, Human
gccaggcuggucuugaacuccu

SEQ ID NO: 93711 - RNA, 22 nt, Human
gccaggcuguggggaacuugaa

SEQ ID NO: 93712 - RNA, 22 nt, Human
gccagggugugcagggacagga

SEQ ID NO: 93713 - RNA, 22 nt, Human
gccaggguucaagcuauucucc

SEQ ID NO: 93714 - RNA, 22 nt, Human
gccaggguucgaauccguaugg

SEQ ID NO: 93715 - RNA, 22 nt, Human
gccaggucgucuccauguccaa

SEQ ID NO: 93716 - RNA, 22 nt, Human
gccaggucucauaaaugcagcu

SEQ ID NO: 93717 - RNA, 22 nt, Human
gccaggucuggguagcagagga

SEQ ID NO: 93718 - RNA, 19 nt, Human
gccaggucuuggguccagg

SEQ ID NO: 93719 - RNA, 22 nt, Human
gccaggugcaccugcccuggcc

SEQ ID NO: 93720 - RNA, 22 nt, Human
gccagguggcugagcagcugca

SEQ ID NO: 93721 - RNA, 22 nt, Human
gccagguguaguggccacaccu

SEQ ID NO: 93722 - RNA, 22 nt, Human
gccagguguccucacagugagg

SEQ ID NO: 93723 - RNA, 22 nt, Human
gccagguugcugacgacgaucu

SEQ ID NO: 93724 - RNA, 22 nt, Human
gccaguaaaacaaaggccaugu

SEQ ID NO: 93725 - RNA, 22 nt, Human
gccagucucccucaguccucug

SEQ ID NO: 93726 - RNA, 22 nt, Human
gccagucugcucccacaaguuc

SEQ ID NO: 93727 - RNA, 22 nt, Human
gccagugccucgccgcgcuccu

SEQ ID NO: 93728 - RNA, 22 nt, Human
gccaguggagacugaaacccau

SEQ ID NO: 93729 - RNA, 22 nt, Human
gccaguggcaugcggcagggac

SEQ ID NO: 93730 - RNA, 22 nt, Human
gccaguggcuugccaggcagga

SEQ ID NO: 93731 - RNA, 22 nt, Human
gccaguggguaguuggagcugg

SEQ ID NO: 93732 - RNA, 18 nt, Human
gccaguggguccaggugc

SEQ ID NO: 93733 - RNA, 22 nt, Human
gccagugugguguagucaugaa

SEQ ID NO: 93734 - RNA, 22 nt, Human
gccagugugucuugcaggcucc

SEQ ID NO: 93735 - RNA, 19 nt, Human
gccagugugugguacagug

SEQ ID NO: 93736 - RNA, 22 nt, Human
gccaguuuccaccuaggcaauu

SEQ ID NO: 93737 - RNA, 22 nt, Human
gccauauacccacugucuccau

SEQ ID NO: 93738 - RNA, 22 nt, Human
gccauauauauuuugcacuagg

SEQ ID NO: 93739 - RNA, 22 nt, Human
gccaucacauccaggcuaccuc

SEQ ID NO: 93740 - RNA, 23 nt, Human
gccaucacguucaaccaaagccu

SEQ ID NO: 93741 - RNA, 20 nt, Human
gccauccagccucccaggag

SEQ ID NO: 93742 - RNA, 22 nt, Human
gccaucuggcauugcagcaccu

SEQ ID NO: 93743 - RNA, 22 nt, Human
gccaugaggaacuguaagacaa

SEQ ID NO: 93744 - RNA, 23 nt, Human
gccaugaguucccuuucacuugu

SEQ ID NO: 93745 - RNA, 22 nt, Human
gccaugccugugucuccaggcc

SEQ ID NO: 93746 - RNA, 23 nt, Human
gccauggcugccccacaggccuc

SEQ ID NO: 93747 - RNA, 22 nt, Human
gccauguccugggcaucugcca

SEQ ID NO: 93748 - RNA, 22 nt, Human
gccauguucuugaaucuggguc

SEQ ID NO: 93749 - RNA, 22 nt, Human
gccaggcagagccccgugcagc

SEQ ID NO: 93750 - RNA, 22 nt, Human
gccaggcagcugggagggugcc

SEQ ID NO: 93751 - RNA, 18 nt, Human
gccaggcaggguggggaa

SEQ ID NO: 93752 - RNA, 22 nt, Human
gccaggcaguucaaguacacca

SEQ ID NO: 93753 - RNA, 22 nt, Human
gccaggcauguccucugcagaa

SEQ ID NO: 93754 - RNA, 22 nt, Human
gccaggccugcaagugcuggug

SEQ ID NO: 93755 - RNA, 22 nt, Human
gccaggcuaagaaaggugugau

SEQ ID NO: 93756 - RNA, 22 nt, Human
gccaggcugcuccagggaggcc

SEQ ID NO: 93757 - RNA, 22 nt, Human
gccaggcuggugucacaacucu

SEQ ID NO: 93758 - RNA, 22 nt, Human
gccagggaaacugcagaccagc

SEQ ID NO: 93759 - RNA, 17 nt, Human
gccagggagaggaagcc

SEQ ID NO: 93760 - RNA, 22 nt, Human
gccagggagucugggccacaga

SEQ ID NO: 93761 - RNA, 22 nt, Human
gccaggggacgcggagcgacga

SEQ ID NO: 93762 - RNA, 22 nt, Human
gccaggggugcccacccaagga

SEQ ID NO: 93763 - RNA, 22 nt, Human
gccagggugagggcugagaggu

SEQ ID NO: 93764 - RNA, 22 nt, Human
gccaggguggcagaaggcccca

SEQ ID NO: 93765 - RNA, 22 nt, Human
gccagguccaggguggagcgcu

SEQ ID NO: 93766 - RNA, 22 nt, Human
gccaggucuaagcaucagccac

SEQ ID NO: 93767 - RNA, 18 nt, Human
gccaggucucucugcuuc

SEQ ID NO: 93768 - RNA, 22 nt, Human
gccaggugagaggacugaggcu

SEQ ID NO: 93769 - RNA, 22 nt, Human
gccaggugcauauuagaagcau

SEQ ID NO: 93770 - RNA, 22 nt, Human
gccaggugcauggcugagucuc

SEQ ID NO: 93771 - RNA, 22 nt, Human
gccaggugcuaucccugcgcug

SEQ ID NO: 93772 - RNA, 22 nt, Human
gccagguggagguugcagugag

SEQ ID NO: 93773 - RNA, 22 nt, Human
gccaggugggagacagacagca

SEQ ID NO: 93774 - RNA, 22 nt, Human
gccagguggucuggcuccagag

SEQ ID NO: 93775 - RNA, 22 nt, Human
gccaguaagugguagagacuua

SEQ ID NO: 93776 - RNA, 22 nt, Human
gccaguaagugguagaguugag

SEQ ID NO: 93777 - RNA, 22 nt, Human
gccagucagcuggccaggcugg

SEQ ID NO: 93778 - RNA, 22 nt, Human
gccagucuucauauucauggug

SEQ ID NO: 93779 - RNA, 18 nt, Human
gccagugcccuggcucac

SEQ ID NO: 93780 - RNA, 22 nt, Human
gccagugcuuguggagcuggca

SEQ ID NO: 93781 - RNA, 22 nt, Human
gccagugguagaggggaggccg

SEQ ID NO: 93782 - RNA, 22 nt, Human
gccagugugcaagaggccacca

SEQ ID NO: 93783 - RNA, 22 nt, Human
gccaguguuuauagcagugagg

SEQ ID NO: 93784 - RNA, 21 nt, Human
gccaucaccaagcucuucccc

SEQ ID NO: 93785 - RNA, 22 nt, Human
gccaucucggagcuaucaaagg

SEQ ID NO: 93786 - RNA, 22 nt, Human
gccaucugcgcgguguccagcu

SEQ ID NO: 93787 - RNA, 23 nt, Human
gccaucugguauuuccugacuuc

SEQ ID NO: 93788 - RNA, 22 nt, Human
gccaucuucaacaucagaaguu

SEQ ID NO: 93789 - RNA, 22 nt, Human
gccaucuugagccaggaaguga

SEQ ID NO: 93790 - RNA, 22 nt, Human
gccaugaacucgggcauggaga

SEQ ID NO: 93791 - RNA, 20 nt, Human
gccaugaggggaggugacug

SEQ ID NO: 93792 - RNA, 22 nt, Human
gccaugaguaaacuggaaagcc

SEQ ID NO: 93793 - RNA, 22 nt, Human
gccaugcagcuuauuaaagugg

SEQ ID NO: 93794 - RNA, 19 nt, Human
gccaugggcuggcagcaga

SEQ ID NO: 93795 - RNA, 18 nt, Human
gccauguucuaugcuuac

SEQ ID NO: 93796 - RNA, 22 nt, Human
gccauguuuugguaaauaccau

SEQ ID NO: 93797 - RNA, 21 nt, Human
gccauuguuuucuaccuggag

SEQ ID NO: 93798 - RNA, 22 nt, Human
gccauuuucugucuuguuuauu

SEQ ID NO: 93799 - RNA, 22 nt, Human
gugcagagcaagggcugagggc

SEQ ID NO: 93800 - RNA, 22 nt, Human
gugcagcaaaguuugagauaua

SEQ ID NO: 93801 - RNA, 22 nt, Human
gugcagccauuugcaugcuucc

SEQ ID NO: 93802 - RNA, 22 nt, Human
gugcagcugaaggcuggccagc

SEQ ID NO: 93803 - RNA, 22 nt, Human
gugcagcugcaggagucagguc

SEQ ID NO: 93804 - RNA, 22 nt, Human
gugcagcugcuugccugguuag

SEQ ID NO: 93805 - RNA, 22 nt, Human
gugcagcugggcgcugaccuuc

SEQ ID NO: 93806 - RNA, 22 nt, Human
gugcaggacagcacaucuccug

SEQ ID NO: 93807 - RNA, 22 nt, Human
gugcaggagccagggguaggaa

SEQ ID NO: 93808 - RNA, 22 nt, Human
gugcaggaggaugacaacugca

SEQ ID NO: 93809 - RNA, 22 nt, Human
gugcaggagguaacauagcaaa

SEQ ID NO: 93810 - RNA, 22 nt, Human
gugcaggauguugggaaucagg

SEQ ID NO: 93811 - RNA, 22 nt, Human
gugcaggcauugggcuagccau

SEQ ID NO: 93812 - RNA, 17 nt, Human
gugcagggaugaaggau

SEQ ID NO: 93813 - RNA, 22 nt, Human
gugcagggcagguguccuucca

SEQ ID NO: 93814 - RNA, 22 nt, Human
gugcaggggaucagguugcagc

SEQ ID NO: 93815 - RNA, 22 nt, Human
gugcaggggccuccccuugcug

SEQ ID NO: 93816 - RNA, 22 nt, Human
gugcaggguagcgacggcagga

SEQ ID NO: 93817 - RNA, 22 nt, Human
gugcaggguccuaauuguuaag

SEQ ID NO: 93818 - RNA, 22 nt, Human
gugcagguggauuugggcucaa

SEQ ID NO: 93819 - RNA, 22 nt, Human
gugcagguuuaggaagcagcuc

SEQ ID NO: 93820 - RNA, 22 nt, Human
gugcaguguguaauccaggaac

SEQ ID NO: 93821 - RNA, 22 nt, Human
gugcaguucccaaggucacaca

SEQ ID NO: 93822 - RNA, 22 nt, Human
gugcaguucuuguaacaugcug

SEQ ID NO: 93823 - RNA, 22 nt, Human
gugcauauauaugggagggagc

SEQ ID NO: 93824 - RNA, 22 nt, Human
gugcauauaugcacauaugugu

SEQ ID NO: 93825 - RNA, 22 nt, Human
gugcauccacuagggcucuccc

SEQ ID NO: 93826 - RNA, 22 nt, Human
gugcaugaagacucagaaaguc

SEQ ID NO: 93827 - RNA, 22 nt, Human
gugcaugcaaauuacuguaaag

SEQ ID NO: 93828 - RNA, 22 nt, Human
gugcaugucuuuggaggccucc

SEQ ID NO: 93829 - RNA, 22 nt, Human
gugcaugugcguugacugucca

SEQ ID NO: 93830 - RNA, 22 nt, Human
gugcauuacauguaauaaaaua

SEQ ID NO: 93831 - RNA, 22 nt, Human
gugcauuaggcuggaauguuga

SEQ ID NO: 93832 - RNA, 22 nt, Human
gugcauuccaccgugcagguug

SEQ ID NO: 93833 - RNA, 22 nt, Human
gugcauuugacgaauacucacu

SEQ ID NO: 93834 - RNA, 22 nt, Human
gugccacauggccuaauagaga

SEQ ID NO: 93835 - RNA, 22 nt, Human
gugccagagaugacaggccugc

SEQ ID NO: 93836 - RNA, 22 nt, Human
gugccagcucuccccacaucug

SEQ ID NO: 93837 - RNA, 18 nt, Human
gugccaggaggcgcagcc

SEQ ID NO: 93838 - RNA, 22 nt, Human
gugccaggcccagggagcgggg

SEQ ID NO: 93839 - RNA, 22 nt, Human
gugcccacgaggccaggcuggu

SEQ ID NO: 93840 - RNA, 22 nt, Human
gugcccagcuccaccucacaga

SEQ ID NO: 93841 - RNA, 22 nt, Human
gugcccaggugucccugagaag

SEQ ID NO: 93842 - RNA, 22 nt, Human
gugcccuccugaagccaucaca

SEQ ID NO: 93843 - RNA, 22 nt, Human
gugcccugaucgcuaggcuccc

SEQ ID NO: 93844 - RNA, 22 nt, Human
gugcccugaugcaauugucuca

SEQ ID NO: 93845 - RNA, 22 nt, Human
gugcccugggccuucagggcca

SEQ ID NO: 93846 - RNA, 22 nt, Human
gugcccugucucuugucuccag

SEQ ID NO: 93847 - RNA, 22 nt, Human
gugcccuguugcacacuugagg

SEQ ID NO: 93848 - RNA, 22 nt, Human
gugcccuucagcuuugcugaaa

SEQ ID NO: 93849 - RNA, 22 nt, Human
gugccucccuguugacuagggu

SEQ ID NO: 93850 - RNA, 22 nt, Human
gugccuccuuaaauucugcacc

SEQ ID NO: 93851 - RNA, 22 nt, Human
gugccugccccacuccucagca

SEQ ID NO: 93852 - RNA, 22 nt, Human
gugccuggaaugcgccucggcg

SEQ ID NO: 93853 - RNA, 22 nt, Human
gugccuggacccucuuuccgga

SEQ ID NO: 93854 - RNA, 20 nt, Human
gugccuggagaagaggcugu

SEQ ID NO: 93855 - RNA, 22 nt, Human
gugccuggcacacagaaggcaa

SEQ ID NO: 93856 - RNA, 22 nt, Human
gugccugggacacagcagauac

SEQ ID NO: 93857 - RNA, 22 nt, Human
gugccuguaaguuguaugggcu

SEQ ID NO: 93858 - RNA, 22 nt, Human
gugccuguuucuuuugaauuca

SEQ ID NO: 93859 - RNA, 22 nt, Human
gugccuuaucugcacccucccc

SEQ ID NO: 93860 - RNA, 22 nt, Human
gugccuuugugucuaaaacagc

SEQ ID NO: 93861 - RNA, 22 nt, Human
gugcggaucgguguccuccaaa

SEQ ID NO: 93862 - RNA, 21 nt, Human
gugcggaugccgucauuguca

SEQ ID NO: 93863 - RNA, 22 nt, Human
gugcguccugggggcugggucg

SEQ ID NO: 93864 - RNA, 22 nt, Human
gugcgugugccuaucaauaaag

SEQ ID NO: 93865 - RNA, 22 nt, Human
gugcucacugugagacguccug

SEQ ID NO: 93866 - RNA, 22 nt, Human
gugcucagggccuggcugggga

SEQ ID NO: 93867 - RNA, 22 nt, Human
gugcucaucguggagccugagg

SEQ ID NO: 93868 - RNA, 22 nt, Human
gugcuccauugucuagaacugg

SEQ ID NO: 93869 - RNA, 22 nt, Human
gugcucuaggcuacagggaugc

SEQ ID NO: 93870 - RNA, 18 nt, Human
gugcucuaugucuguuau

SEQ ID NO: 93871 - RNA, 22 nt, Human
gugcucuauguugauuccuuga

SEQ ID NO: 93872 - RNA, 22 nt, Human
gugcucugaguuugcaugucag

SEQ ID NO: 93873 - RNA, 22 nt, Human
gugcucuguggauugaguugaa

SEQ ID NO: 93874 - RNA, 22 nt, Human
gugcucuguguauuaggauguc

SEQ ID NO: 93875 - RNA, 22 nt, Human
gugcugaauuugagaaacucug

SEQ ID NO: 93876 - RNA, 22 nt, Human
gugcugagcacaccuuggagca

SEQ ID NO: 93877 - RNA, 22 nt, Human
gugcugaggaaggaagacuuau

SEQ ID NO: 93878 - RNA, 22 nt, Human
gugcugaggagagggggugguc

SEQ ID NO: 93879 - RNA, 21 nt, Human
gugcugaggauacaguaguaa

SEQ ID NO: 93880 - RNA, 22 nt, Human
gugcugaggugggugggcagcc

SEQ ID NO: 93881 - RNA, 20 nt, Human
gugcugagugaaaugagauu

SEQ ID NO: 93882 - RNA, 22 nt, Human
gugcugagugcagagugcagag

SEQ ID NO: 93883 - RNA, 22 nt, Human
gugcugcagagucucgugccgc

SEQ ID NO: 93884 - RNA, 22 nt, Human
gugcugcaugacuugcuccuga

SEQ ID NO: 93885 - RNA, 22 nt, Human
gugcugccugccagcuucuggg

SEQ ID NO: 93886 - RNA, 21 nt, Human
gugcugcuagcgggacgggag

SEQ ID NO: 93887 - RNA, 22 nt, Human
gugcugcucacaucuggaggua

SEQ ID NO: 93888 - RNA, 20 nt, Human
gugcuggaguuaggaaaggu

SEQ ID NO: 93889 - RNA, 22 nt, Human
gugcuggcuggacauggagcac

SEQ ID NO: 93890 - RNA, 22 nt, Human
gugcuguaacaacagagugucu

SEQ ID NO: 93891 - RNA, 22 nt, Human
gugcugucguggaacugggcug

SEQ ID NO: 93892 - RNA, 22 nt, Human
gugcugugugauccaugcuggc

SEQ ID NO: 93893 - RNA, 22 nt, Human
gugcuguugccuggcugcacgg

SEQ ID NO: 93894 - RNA, 22 nt, Human
gugcuuaaccuaguuucuagua

SEQ ID NO: 93895 - RNA, 22 nt, Human
gugcuuaauacaugucaauaac

SEQ ID NO: 93896 - RNA, 22 nt, Human
gugcuucaaguucuuaauguuu

SEQ ID NO: 93897 - RNA, 20 nt, Human
gugcuucagaagccauugcu

SEQ ID NO: 93898 - RNA, 22 nt, Human
gugcuuccccaagccacagccu

SEQ ID NO: 93899 - RNA, 22 nt, Human
gugcuuccucagagguucccau

SEQ ID NO: 93900 - RNA, 22 nt, Human
gugcuuccucaguguuuaagga

SEQ ID NO: 93901 - RNA, 20 nt, Human
gugcuuccucgcaaguugca

SEQ ID NO: 93902 - RNA, 22 nt, Human
gugcuucucugcucuacccggc

SEQ ID NO: 93903 - RNA, 23 nt, Human
gugcuugaaagaugcagaauuaa

SEQ ID NO: 93904 - RNA, 22 nt, Human
gugcuuggcuuggugugaccug

SEQ ID NO: 93905 - RNA, 21 nt, Human
gugcuuuuccuuaauguucuu

SEQ ID NO: 93906 - RNA, 22 nt, Human
gugcuuuuuauaaggcagacug

SEQ ID NO: 93907 - RNA, 22 nt, Human
gugcuuuuucaaucagaaggga

SEQ ID NO: 93908 - RNA, 19 nt, Human
gcccaggggcccgaugcug

SEQ ID NO: 93909 - RNA, 22 nt, Human
gcccagggugcuuagaacccau

SEQ ID NO: 93910 - RNA, 22 nt, Human
gcccagucucuucuggcccugu

SEQ ID NO: 93911 - RNA, 22 nt, Human
gcccagugcccuagaaugcacu

SEQ ID NO: 93912 - RNA, 22 nt, Human
gcccaucaucacuguggaggcu

SEQ ID NO: 93913 - RNA, 22 nt, Human
gcccaugcucucaggcgggccu

SEQ ID NO: 93914 - RNA, 23 nt, Human
gcccaugcuguugggcccgagca

SEQ ID NO: 93915 - RNA, 22 nt, Human
gcccaugguuacuuuucuggcu

SEQ ID NO: 93916 - RNA, 22 nt, Human
gccccaccugcuaccuuccagc

SEQ ID NO: 93917 - RNA, 22 nt, Human
gccccaccuugagagcagaaac

SEQ ID NO: 93918 - RNA, 22 nt, Human
gccccagauggaggaagcuggg

SEQ ID NO: 93919 - RNA, 22 nt, Human
gccccagccugggaacuggagg

SEQ ID NO: 93920 - RNA, 22 nt, Human
gccccagcguggcuguguuagg

SEQ ID NO: 93921 - RNA, 22 nt, Human
gcccccacaggcgggcucgggu

SEQ ID NO: 93922 - RNA, 18 nt, Human
gcccccagaugcuacuga

SEQ ID NO: 93923 - RNA, 22 nt, Human
gcccccagcucucaagcucaaa

SEQ ID NO: 93924 - RNA, 22 nt, Human
gcccccaggcacuacaugugaa

SEQ ID NO: 93925 - RNA, 21 nt, Human
gcccccuggacuccucaucca

SEQ ID NO: 93926 - RNA, 22 nt, Human
gccccgucguggggccagggau

SEQ ID NO: 93927 - RNA, 22 nt, Human
gcccgcagagaucuuuaacaaa

SEQ ID NO: 93928 - RNA, 22 nt, Human
gcccggccaggaacagaguaua

SEQ ID NO: 93929 - RNA, 17 nt, Human
gcccgugggcuacggua

SEQ ID NO: 93930 - RNA, 22 nt, Human
gcccuagcgccagcucagcacc

SEQ ID NO: 93931 - RNA, 22 nt, Human
gcccuagggcuuuugggccugu

SEQ ID NO: 93932 - RNA, 22 nt, Human
gcccucagaggacagcugacuu

SEQ ID NO: 93933 - RNA, 22 nt, Human
gcccucagcaggaaagaucaac

SEQ ID NO: 93934 - RNA, 17 nt, Human
gcccucagcuuuaacca

SEQ ID NO: 93935 - RNA, 22 nt, Human
gcccucaggcagggagucuuuc

SEQ ID NO: 93936 - RNA, 15 nt, Human
gcccucaggcgacac

SEQ ID NO: 93937 - RNA, 20 nt, Human
gcccucagucuugucuuuau

SEQ ID NO: 93938 - RNA, 22 nt, Human
gcccuccugcaggggcuucugg

SEQ ID NO: 93939 - RNA, 22 nt, Human
gcccucgcuucuuccuaggggu

SEQ ID NO: 93940 - RNA, 20 nt, Human
gcccucugccucccucagcg

SEQ ID NO: 93941 - RNA, 22 nt, Human
gcccugacacuuugcagcugag

SEQ ID NO: 93942 - RNA, 22 nt, Human
gcccugagaagaagucggaggg

SEQ ID NO: 93943 - RNA, 22 nt, Human
gcccugagacugaagaacuguc

SEQ ID NO: 93944 - RNA, 19 nt, Human
gcccugagagcuuggguuc

SEQ ID NO: 93945 - RNA, 22 nt, Human
gcccugagccaccaaugccauu

SEQ ID NO: 93946 - RNA, 22 nt, Human
gcccugagccuaugagccucuc

SEQ ID NO: 93947 - RNA, 22 nt, Human
gcccugaggcaaaagaacaguc

SEQ ID NO: 93948 - RNA, 22 nt, Human
gcccugagugguaccugugggu

SEQ ID NO: 93949 - RNA, 22 nt, Human
gcccugaguugagccuuccaaa

SEQ ID NO: 93950 - RNA, 22 nt, Human
gcccugcaccccaauggcauga

SEQ ID NO: 93951 - RNA, 22 nt, Human
gcccugcccugagccguagacc

SEQ ID NO: 93952 - RNA, 22 nt, Human
gcccugccggguauuuugugcu

SEQ ID NO: 93953 - RNA, 22 nt, Human
gcccugccugccgguguggguc

SEQ ID NO: 93954 - RNA, 23 nt, Human
gcccugcuccuggcugggaggga

SEQ ID NO: 93955 - RNA, 22 nt, Human
gcccugcucuguuggucaccug

SEQ ID NO: 93956 - RNA, 22 nt, Human
gcccugcugucuucagaguaua

SEQ ID NO: 93957 - RNA, 22 nt, Human
gcccugcuguuuagagagcuac

SEQ ID NO: 93958 - RNA, 22 nt, Human
gcccuggagagggauauggcau

SEQ ID NO: 93959 - RNA, 22 nt, Human
gcccuggagcuagacuaggaca

SEQ ID NO: 93960 - RNA, 22 nt, Human
gcccugugagucaugcggcaga

SEQ ID NO: 93961 - RNA, 22 nt, Human
gcccugugauggagacuagagg

SEQ ID NO: 93962 - RNA, 22 nt, Human
gcccugugccagucacgcugug

SEQ ID NO: 93963 - RNA, 22 nt, Human
gcccuguggacagugagaagug

SEQ ID NO: 93964 - RNA, 22 nt, Human
gcccuguuauccagaugaggau

SEQ ID NO: 93965 - RNA, 22 nt, Human
gcccuguucuggacaggcacaa

SEQ ID NO: 93966 - RNA, 22 nt, Human
gcccuuaggcaagcagaagccc

SEQ ID NO: 93967 - RNA, 22 nt, Human
gcccuucacgaugguaucuuag

SEQ ID NO: 93968 - RNA, 22 nt, Human
gcccuuggcaaauucuccuuua

SEQ ID NO: 93969 - RNA, 22 nt, Human
gcccuuuguggucagaggccug

SEQ ID NO: 93970 - RNA, 22 nt, Human
gccgaacuugagggccaggcgg

SEQ ID NO: 93971 - RNA, 22 nt, Human
gccgaggcucugcccagcugcu

SEQ ID NO: 93972 - RNA, 22 nt, Human
gccggggcuggggagagacaug

SEQ ID NO: 93973 - RNA, 22 nt, Human
gccgugucaucugcggguggca

SEQ ID NO: 93974 - RNA, 22 nt, Human
gccguuagauaauaacaagcau

SEQ ID NO: 93975 - RNA, 22 nt, Human
gccuaacuuggcuuuguucacc

SEQ ID NO: 93976 - RNA, 22 nt, Human
gccuaagacugaggcuuuuguc

SEQ ID NO: 93977 - RNA, 22 nt, Human
gccuaauacaugaugauaggua

SEQ ID NO: 93978 - RNA, 22 nt, Human
gccuacaugcuuuuaguguuuc

SEQ ID NO: 93979 - RNA, 22 nt, Human
gccuagagaaaaagccucugca

SEQ ID NO: 93980 - RNA, 22 nt, Human
gccuaggaguggggauggcggu

SEQ ID NO: 93981 - RNA, 21 nt, Human
gccuagggagaugggacugcc

SEQ ID NO: 93982 - RNA, 22 nt, Human
gccuagggaugacaaauauucu

SEQ ID NO: 93983 - RNA, 22 nt, Human
gccucaaauguggagcacuauu

SEQ ID NO: 93984 - RNA, 22 nt, Human
gccucaagacauuuuuaauugc

SEQ ID NO: 93985 - RNA, 22 nt, Human
gccucagagcuacacacacgca

SEQ ID NO: 93986 - RNA, 20 nt, Human
gccucagccaacccaugggg

SEQ ID NO: 93987 - RNA, 22 nt, Human
gccucagcucccagcccaggcu

SEQ ID NO: 93988 - RNA, 22 nt, Human
gccucagggggagaggccagcu

SEQ ID NO: 93989 - RNA, 22 nt, Human
gccucaugagggaucugcccuc

SEQ ID NO: 93990 - RNA, 22 nt, Human
gccucauuacagccaggaagca

SEQ ID NO: 93991 - RNA, 22 nt, Human
gccuccaccccuggggagugga

SEQ ID NO: 93992 - RNA, 21 nt, Human
gccuccagccagauggccucc

SEQ ID NO: 93993 - RNA, 22 nt, Human
gccuccaggguagaggaggaag

SEQ ID NO: 93994 - RNA, 22 nt, Human
gccuccccaggggugucaugag

SEQ ID NO: 93995 - RNA, 22 nt, Human
gccucccugagucacccaagca

SEQ ID NO: 93996 - RNA, 22 nt, Human
gccucccuguagaggccagccu

SEQ ID NO: 93997 - RNA, 22 nt, Human
gccucccuguuuccugcuccaa

SEQ ID NO: 93998 - RNA, 23 nt, Human
gccuccuagcaguaaacauguua

SEQ ID NO: 93999 - RNA, 22 nt, Human
gccuccucacaauguacccacg

SEQ ID NO: 94000 - RNA, 22 nt, Human
gccuccuccuucccgagggucu

SEQ ID NO: 94001 - RNA, 22 nt, Human
guucuucaccaaggucagaggc

SEQ ID NO: 94002 - RNA, 22 nt, Human
guucuuccuggaaguggauuuc

SEQ ID NO: 94003 - RNA, 22 nt, Human
guucuugccagcauccucaggu

SEQ ID NO: 94004 - RNA, 22 nt, Human
guucuuuaaacugcugcucugu

SEQ ID NO: 94005 - RNA, 22 nt, Human
guucuuuaaguggagaaggaaa

SEQ ID NO: 94006 - RNA, 19 nt, Human
guucuuucauaguaagagc

SEQ ID NO: 94007 - RNA, 22 nt, Human
guugaaaaugacuuuauaccau

SEQ ID NO: 94008 - RNA, 22 nt, Human
guugaaauuugugauaauuuag

SEQ ID NO: 94009 - RNA, 22 nt, Human
guugaauacuugagaaauccau

SEQ ID NO: 94010 - RNA, 22 nt, Human
guugaauaucccguaucuuaaa

SEQ ID NO: 94011 - RNA, 22 nt, Human
guugagaguuaagcgggcuaau

SEQ ID NO: 94012 - RNA, 22 nt, Human
guugagcaaggccagagaagcc

SEQ ID NO: 94013 - RNA, 22 nt, Human
guugaggagcaagcaugugucu

SEQ ID NO: 94014 - RNA, 22 nt, Human
guugauuuagugagugagcagu

SEQ ID NO: 94015 - RNA, 22 nt, Human
guugcacacuggcuauaacaag

SEQ ID NO: 94016 - RNA, 22 nt, Human
guugcagauguggaacucgugc

SEQ ID NO: 94017 - RNA, 22 nt, Human
guuugcaaauuauguuaaaagu

SEQ ID NO: 94018 - RNA, 22 nt, Human
guuugccugccgacgcucucau

SEQ ID NO: 94019 - RNA, 22 nt, Human
guuugcugccaccaccgccaca

SEQ ID NO: 94020 - RNA, 22 nt, Human
guuugcugcccucuccuguccg

SEQ ID NO: 94021 - RNA, 22 nt, Human
guuuggaaguuaagugcagcag

SEQ ID NO: 94022 - RNA, 22 nt, Human
guuuggaccucugcuagaugga

SEQ ID NO: 94023 - RNA, 22 nt, Human
guuuggcaguguuauguagguu

SEQ ID NO: 94024 - RNA, 22 nt, Human
guuuggggucugcagagcggcg

SEQ ID NO: 94025 - RNA, 22 nt, Human
guuuggugugaguucauaccac

SEQ ID NO: 94026 - RNA, 22 nt, Human
guuuguaagcagucugcuugug

SEQ ID NO: 94027 - RNA, 22 nt, Human
guuuguaauuacugcagcaugg

SEQ ID NO: 94028 - RNA, 22 nt, Human
guuugucauuuguacuucuagc

SEQ ID NO: 94029 - RNA, 22 nt, Human
guuuguugauaugccccuuugu

SEQ ID NO: 94030 - RNA, 22 nt, Human
guuuguuuauacaaaagauccu

SEQ ID NO: 94031 - RNA, 23 nt, Human
guuuuacaggugagaaaauggag

SEQ ID NO: 94032 - RNA, 22 nt, Human
guuuuaguggguggccacugau

SEQ ID NO: 94033 - RNA, 22 nt, Human
guuuuauaauugcuucauaaga

SEQ ID NO: 94034 - RNA, 23 nt, Human
guuuucaacacaauaaauguaac

SEQ ID NO: 94035 - RNA, 21 nt, Human
guuuucaugauagagucugua

SEQ ID NO: 94036 - RNA, 22 nt, Human
guuuuccuacuguaucaucaaa

SEQ ID NO: 94037 - RNA, 22 nt, Human
guuuuccuguugaguaguauuc

SEQ ID NO: 94038 - RNA, 22 nt, Human
guuuucuaaguagguagcacca

SEQ ID NO: 94039 - RNA, 22 nt, Human
guuuucucaucuccucaauggu

SEQ ID NO: 94040 - RNA, 22 nt, Human
guuuucucuguguuuggaugau

SEQ ID NO: 94041 - RNA, 22 nt, Human
guuuugcucauuugguccaagg

SEQ ID NO: 94042 - RNA, 22 nt, Human
guuuuggcucuggcauguggaa

SEQ ID NO: 94043 - RNA, 22 nt, Human
guuuuguucuuguccagggaaa

SEQ ID NO: 94044 - RNA, 22 nt, Human
guuuuuccugcugacuuggguc

SEQ ID NO: 94045 - RNA, 22 nt, Human
guuuuuccuugcugaggacccg

SEQ ID NO: 94046 - RNA, 20 nt, Human
guuuuucuugggcgagcuau

SEQ ID NO: 94047 - RNA, 19 nt, Human
uaaaaacugaaggaagcag

SEQ ID NO: 94048 - RNA, 22 nt, Human
uaaaaagcagcugagauuuucu

SEQ ID NO: 94049 - RNA, 22 nt, Human
uaaaacacucagcaccuagcaa

SEQ ID NO: 94050 - RNA, 22 nt, Human
uaaaacagcagggcagagaagu

SEQ ID NO: 94051 - RNA, 22 nt, Human
uaaaacuagaccgugagucuaa

SEQ ID NO: 94052 - RNA, 21 nt, Human
uaaaacuguaacuuuguccug

SEQ ID NO: 94053 - RNA, 22 nt, Human
uaaaacuuugaaggugcucagu

SEQ ID NO: 94054 - RNA, 22 nt, Human
uaaaagaagcuucaaggccggc

SEQ ID NO: 94055 - RNA, 22 nt, Human
uaaaagaccacaaggugguaau

SEQ ID NO: 94056 - RNA, 22 nt, Human
uaaaagaucacuggcugcuuua

SEQ ID NO: 94057 - RNA, 22 nt, Human
uaaaagcugagauauccuguac

SEQ ID NO: 94058 - RNA, 22 nt, Human
uaaaaggcacuuggaugcugag

SEQ ID NO: 94059 - RNA, 22 nt, Human
uaaaaguuagcuaggacaaagu

SEQ ID NO: 94060 - RNA, 22 nt, Human
uaaaaucagccgaccauggugg

SEQ ID NO: 94061 - RNA, 22 nt, Human
uaaaaugcacagcaguugaaag

SEQ ID NO: 94062 - RNA, 22 nt, Human
uaaaauguguuucuguaugguu

SEQ ID NO: 94063 - RNA, 22 nt, Human
uaaaauguuugcaagagaccag

SEQ ID NO: 94064 - RNA, 22 nt, Human
uaaacacucacuucauagccau

SEQ ID NO: 94065 - RNA, 22 nt, Human
uaaacacugccuugguggguca

SEQ ID NO: 94066 - RNA, 22 nt, Human
uaaacagaaagcagauguacuu

SEQ ID NO: 94067 - RNA, 22 nt, Human
uaaacagaaugcguaagaagug

SEQ ID NO: 94068 - RNA, 16 nt, Human
uaaacagcagacaguu

SEQ ID NO: 94069 - RNA, 22 nt, Human
uaaacaucaccuucugcaguug

SEQ ID NO: 94070 - RNA, 22 nt, Human
uaaacaucuguagccuucaguc

SEQ ID NO: 94071 - RNA, 22 nt, Human
uaaacauggcuguuucaguuau

SEQ ID NO: 94072 - RNA, 22 nt, Human
uaaacauuuguuauucuuguuu

SEQ ID NO: 94073 - RNA, 18 nt, Human
uaaaccagaugacaguug

SEQ ID NO: 94074 - RNA, 22 nt, Human
uaaaccagguaaagaagcucuc

SEQ ID NO: 94075 - RNA, 22 nt, Human
uaaaccugcaacuauagccacc

SEQ ID NO: 94076 - RNA, 22 nt, Human
uaaaccuguaguugauguaauu

SEQ ID NO: 94077 - RNA, 22 nt, Human
uaaacuacccaugacaguuuca

SEQ ID NO: 94078 - RNA, 22 nt, Human
uaaacuacugggcaaggacagg

SEQ ID NO: 94079 - RNA, 22 nt, Human
uaaacugugaaaggcuuaacau

SEQ ID NO: 94080 - RNA, 22 nt, Human
uaaacuguguaauaugaugucu

SEQ ID NO: 94081 - RNA, 22 nt, Human
uaaagaauaauacccauggagc

SEQ ID NO: 94082 - RNA, 22 nt, Human
uaaagacacccagggagggacu

SEQ ID NO: 94083 - RNA, 22 nt, Human
uaaagacaugcaaagucuaauu

SEQ ID NO: 94084 - RNA, 22 nt, Human
uaaagagcacgcuuuucucucu

SEQ ID NO: 94085 - RNA, 22 nt, Human
uaaagaugcccacauugcaggu

SEQ ID NO: 94086 - RNA, 22 nt, Human
uaaagauggagaugaccuagga

SEQ ID NO: 94087 - RNA, 22 nt, Human
uaaagauguucucauuucauag

SEQ ID NO: 94088 - RNA, 22 nt, Human
uaaagauugcucaaaacuguga

SEQ ID NO: 94089 - RNA, 22 nt, Human
uaaagcaaggaauagaguaguc

SEQ ID NO: 94090 - RNA, 22 nt, Human
uaaagcaauuacucaguggcuu

SEQ ID NO: 94091 - RNA, 22 nt, Human
uaaagcaauuugagcaaguucu

SEQ ID NO: 94092 - RNA, 19 nt, Human
uaaagcacauagcaaaagu

SEQ ID NO: 94093 - RNA, 22 nt, Human
uaaagcacgucuauuuaaugau

SEQ ID NO: 94094 - RNA, 22 nt, Human
uaaagcauaaugaauaucuaga

SEQ ID NO: 94095 - RNA, 22 nt, Human
uaaagcauguacugugugcuag

SEQ ID NO: 94096 - RNA, 22 nt, Human
uaaagcauguguuagaagugca

SEQ ID NO: 94097 - RNA, 22 nt, Human
uaaagcauguuucaguaagguu

SEQ ID NO: 94098 - RNA, 22 nt, Human
uaaagccacgcuggaaaucagg

SEQ ID NO: 94099 - RNA, 21 nt, Human
uaaagcuagaaccuuagcuuu

SEQ ID NO: 94100 - RNA, 22 nt, Human
uaaagcuagaaggugcuguaca

SEQ ID NO: 94101 - RNA, 22 nt, Human
uaaaggaacagaggacucauuu

SEQ ID NO: 94102 - RNA, 22 nt, Human
uaaaggauaacuuucaagaauu

SEQ ID NO: 94103 - RNA, 22 nt, Human
uaaaggauuuuguauaauauaa

SEQ ID NO: 94104 - RNA, 22 nt, Human
uaaaggcaauucagcaagccac

SEQ ID NO: 94105 - RNA, 22 nt, Human
uaaaggcagccuaggaaguguu

SEQ ID NO: 94106 - RNA, 22 nt, Human
uaaaggcaguuggaguugagga

SEQ ID NO: 94107 - RNA, 22 nt, Human
uaaaggcucguauuguugugug

SEQ ID NO: 94108 - RNA, 21 nt, Human
uaaaggcuuuagaauggcaaa

SEQ ID NO: 94109 - RNA, 22 nt, Human
uaaaggcuuuuacaggagugca

SEQ ID NO: 94110 - RNA, 22 nt, Human
uaaaggcuuuuagugaugguaa

SEQ ID NO: 94111 - RNA, 22 nt, Human
uaaagguagcaugaaacugcaa

SEQ ID NO: 94112 - RNA, 22 nt, Human
uaaagguuauaaagguuagggg

SEQ ID NO: 94113 - RNA, 23 nt, Human
uaaagucacauauuagagugagc

SEQ ID NO: 94114 - RNA, 22 nt, Human
uaaagucagggagauugaggcu

SEQ ID NO: 94115 - RNA, 22 nt, Human
uaaaguccuugaaccggaugua

SEQ ID NO: 94116 - RNA, 22 nt, Human
uaaagugaguacaaaaugaggg

SEQ ID NO: 94117 - RNA, 22 nt, Human
uaaagugcagacucccggaaac

SEQ ID NO: 94118 - RNA, 22 nt, Human
uaaagugcccagggaaagcggg

SEQ ID NO: 94119 - RNA, 22 nt, Human
gcuacauaguaacccacaaauc

SEQ ID NO: 94120 - RNA, 20 nt, Human
gcuacugugggaaaauugug

SEQ ID NO: 94121 - RNA, 22 nt, Human
gcuagaauauuggguaggcaag

SEQ ID NO: 94122 - RNA, 22 nt, Human
gcuagagaccagaggccuugaa

SEQ ID NO: 94123 - RNA, 22 nt, Human
gcuagcaaguggcauagcaggg

SEQ ID NO: 94124 - RNA, 22 nt, Human
gcuaggagccgcugcacuaggu

SEQ ID NO: 94125 - RNA, 22 nt, Human
gcuaggaggcccugcacgcuua

SEQ ID NO: 94126 - RNA, 22 nt, Human
uaaagugucugccucagcucag

SEQ ID NO: 94127 - RNA, 22 nt, Human
uaaaguguguggguucuaaauu

SEQ ID NO: 94128 - RNA, 22 nt, Human
uaaaguguuguacaaauguaug

SEQ ID NO: 94129 - RNA, 19 nt, Human
uaaaguugaaaucaagucc

SEQ ID NO: 94130 - RNA, 22 nt, Human
uaaaguuggaccugauuuuauu

SEQ ID NO: 94131 - RNA, 22 nt, Human
uaaaguuuauuugaacaucucu

SEQ ID NO: 94132 - RNA, 21 nt, Human
uaaauaauaaguugcugagau

SEQ ID NO: 94133 - RNA, 22 nt, Human
uaaauacagucauuugagccau

SEQ ID NO: 94134 - RNA, 22 nt, Human
uaaauacugaguuggaguuggc

SEQ ID NO: 94135 - RNA, 22 nt, Human
uaaaucacauuuucuuuguguu

SEQ ID NO: 94136 - RNA, 22 nt, Human
uaaaucacccaucuccuaaucu

SEQ ID NO: 94137 - RNA, 22 nt, Human
uaaaucacuccuaauaaucagu

SEQ ID NO: 94138 - RNA, 22 nt, Human
uaaaucacucuucucucaccac

SEQ ID NO: 94139 - RNA, 22 nt, Human
uaaaucacuguacuuuauuccu

SEQ ID NO: 94140 - RNA, 22 nt, Human
uaaaucaguuucucuuauuggu

SEQ ID NO: 94141 - RNA, 22 nt, Human
uaaaucccuacaucuguguuuu

SEQ ID NO: 94142 - RNA, 18 nt, Human
uaaaucucucuuuaguca

SEQ ID NO: 94143 - RNA, 21 nt, Human
uaaaucucuguauucuucagu

SEQ ID NO: 94144 - RNA, 16 nt, Human
uaaaucugugaucaca

SEQ ID NO: 94145 - RNA, 22 nt, Human
uaaaucuuuaggaagcucaaac

SEQ ID NO: 94146 - RNA, 22 nt, Human
uaaaugaaaggguuuaauuuau

SEQ ID NO: 94147 - RNA, 22 nt, Human
uaaaugcaagggaaaggcaaga

SEQ ID NO: 94148 - RNA, 22 nt, Human
uaaaugcaaugugcuuuaccag

SEQ ID NO: 94149 - RNA, 22 nt, Human
uaaaugcucaauaaauguugcu

SEQ ID NO: 94150 - RNA, 22 nt, Human
uaaaugcucagaccuuauucca

SEQ ID NO: 94151 - RNA, 22 nt, Human
uaaaugguauccuugcugugcu

SEQ ID NO: 94152 - RNA, 22 nt, Human
uaaauguacugaggcaacagga

SEQ ID NO: 94153 - RNA, 22 nt, Human
uaaauguagucaaaggagccuc

SEQ ID NO: 94154 - RNA, 22 nt, Human
uaaaugugaccuucauuuuaua

SEQ ID NO: 94155 - RNA, 22 nt, Human
uaaaugugagugaugcggugaa

SEQ ID NO: 94156 - RNA, 22 nt, Human
uaaauguguuagucaugguuuu

SEQ ID NO: 94157 - RNA, 22 nt, Human
uaaauguuaugcccaucaucca

SEQ ID NO: 94158 - RNA, 22 nt, Human
uaaauguuggcauuggaggccg

SEQ ID NO: 94159 - RNA, 22 nt, Human
uaaauguuguaaguacaucuaa

SEQ ID NO: 94160 - RNA, 20 nt, Human
uaaauuagccuugaagauua

SEQ ID NO: 94161 - RNA, 22 nt, Human
uaaauuaugucacaugacucug

SEQ ID NO: 94162 - RNA, 22 nt, Human
uaaauucccaacucugcucuuc

SEQ ID NO: 94163 - RNA, 22 nt, Human
uaaauuuacccaaggaacaugu

SEQ ID NO: 94164 - RNA, 23 nt, Human
uaaauuucuugauucuuauguga

SEQ ID NO: 94165 - RNA, 22 nt, Human
uaacaaaguaccauagauuggg

SEQ ID NO: 94166 - RNA, 22 nt, Human
uaacaacugcugagguauuuga

SEQ ID NO: 94167 - RNA, 19 nt, Human
uaacaagcacucugcauuc

SEQ ID NO: 94168 - RNA, 22 nt, Human
uaacaagucauuuuaucagcag

SEQ ID NO: 94169 - RNA, 22 nt, Human
uaacaaguucugacagcauugu

SEQ ID NO: 94170 - RNA, 22 nt, Human
uaacaaguuucauuuauagaau

SEQ ID NO: 94171 - RNA, 22 nt, Human
uaacaauggaguuuugagaaag

SEQ ID NO: 94172 - RNA, 22 nt, Human
uaacacauaucuacaacaugug

SEQ ID NO: 94173 - RNA, 22 nt, Human
uaacacauauuucaagaguagu

SEQ ID NO: 94174 - RNA, 22 nt, Human
uaacacauuaguucuccuagau

SEQ ID NO: 94175 - RNA, 22 nt, Human
uaacacauuuuaagccauuuua

SEQ ID NO: 94176 - RNA, 21 nt, Human
uaacacauuuugguacuuugg

SEQ ID NO: 94177 - RNA, 22 nt, Human
uaacacuauccagauaugauaa

SEQ ID NO: 94178 - RNA, 22 nt, Human
uaacacugaaaaugaugcaugu

SEQ ID NO: 94179 - RNA, 22 nt, Human
uaacacugauuuguucucaggg

SEQ ID NO: 94180 - RNA, 22 nt, Human
uaacacugguuaucccugugca

SEQ ID NO: 94181 - RNA, 22 nt, Human
uaacacugugucugccauaucc

SEQ ID NO: 94182 - RNA, 20 nt, Human
uaacacuugcuuuuugacuu

SEQ ID NO: 94183 - RNA, 22 nt, Human
uaacagaaaggcucaggugcuc

SEQ ID NO: 94184 - RNA, 22 nt, Human
uaacagaaauaguaggugaggg

SEQ ID NO: 94185 - RNA, 22 nt, Human
uaacagaagaugaaacuucuuu

SEQ ID NO: 94186 - RNA, 20 nt, Human
uaacagaaguagaagugggu

SEQ ID NO: 94187 - RNA, 22 nt, Human
uaacagagguagaauucaaggu

SEQ ID NO: 94188 - RNA, 21 nt, Human
uaacagcagggaaauacgugc

SEQ ID NO: 94189 - RNA, 22 nt, Human
uaacagcucuguguggcuguaa

SEQ ID NO: 94190 - RNA, 20 nt, Human
uaacagggcccuagaaagag

SEQ ID NO: 94191 - RNA, 22 nt, Human
uaacaguaaaguaaguuagcuu

SEQ ID NO: 94192 - RNA, 22 nt, Human
uaacaguauagccuaacauuuc

SEQ ID NO: 94193 - RNA, 22 nt, Human
uaacauaacuuuuccuugaccc

SEQ ID NO: 94194 - RNA, 20 nt, Human
uaacauaguccagagaacga

SEQ ID NO: 94195 - RNA, 22 nt, Human
uaacaucaaacugcauuuucua

SEQ ID NO: 94196 - RNA, 22 nt, Human
uaacaucuuaacuggauacuuc

SEQ ID NO: 94197 - RNA, 18 nt, Human
uaacauguuuucauuaag

SEQ ID NO: 94198 - RNA, 22 nt, Human
uaacauuacggacaucugucag

SEQ ID NO: 94199 - RNA, 22 nt, Human
uaacauugaguccacuaaacag

SEQ ID NO: 94200 - RNA, 22 nt, Human
uaacauuguuaugaaucagguc

SEQ ID NO: 94201 - RNA, 22 nt, Human
uaacauuuaaauuuuucacaua

SEQ ID NO: 94202 - RNA, 22 nt, Human
uaacauuuagaaaguguccauu

SEQ ID NO: 94203 - RNA, 16 nt, Human
uaacauuuuuaaaagg

SEQ ID NO: 94204 - RNA, 22 nt, Human
uaaccauauuuuccauuaaguu

SEQ ID NO: 94205 - RNA, 22 nt, Human
uaacccaauaauugguggccuu

SEQ ID NO: 94206 - RNA, 22 nt, Human
uaaccuacaugagaacuuuaaa

SEQ ID NO: 94207 - RNA, 22 nt, Human
uaaccuacuaugauucugggaa

SEQ ID NO: 94208 - RNA, 17 nt, Human
uaaccucucugaaccug

SEQ ID NO: 94209 - RNA, 22 nt, Human
uaaccuggggcgguuucccaau

SEQ ID NO: 94210 - RNA, 22 nt, Human
uaaccuuuguucaauguaagau

SEQ ID NO: 94211 - RNA, 22 nt, Human
uaacuacuaauugaugauaaug

SEQ ID NO: 94212 - RNA, 22 nt, Human
uaacuagaauggcuauuuugag

SEQ ID NO: 94213 - RNA, 22 nt, Human
uaacuagauauagacuuucuac

SEQ ID NO: 94214 - RNA, 22 nt, Human
uaacuaggauuacaagcgugcg

SEQ ID NO: 94215 - RNA, 22 nt, Human
uaacucuagucccaggcaugaa

SEQ ID NO: 94216 - RNA, 22 nt, Human
uaacugauauugaaaaacauca

SEQ ID NO: 94217 - RNA, 22 nt, Human
uaacugcaaccuccaucuugug

SEQ ID NO: 94218 - RNA, 22 nt, Human
uaacugcaccaucaaauuagag

SEQ ID NO: 94219 - RNA, 22 nt, Human
uaacugguauaucaguguacac

SEQ ID NO: 94220 - RNA, 22 nt, Human
uaacuggugaguaggauuuaua

SEQ ID NO: 94221 - RNA, 22 nt, Human
uaacugguuaagggugaaaucc

SEQ ID NO: 94222 - RNA, 22 nt, Human
uaacugguuucauaucauuucc

SEQ ID NO: 94223 - RNA, 22 nt, Human
uaacuguuuuugaaauauaucu

SEQ ID NO: 94224 - RNA, 22 nt, Human
uaacuucagcgaguucucuuaa

SEQ ID NO: 94225 - RNA, 22 nt, Human
uaacuucucugagccucauucc

SEQ ID NO: 94226 - RNA, 22 nt, Human
uaacuucucugcuaucauagga

SEQ ID NO: 94227 - RNA, 22 nt, Human
uaacuucuggaaaugcaucugc

SEQ ID NO: 94228 - RNA, 22 nt, Human
uaacuugauaaguauucucugc

SEQ ID NO: 94229 - RNA, 22 nt, Human
uaacuuugaucacuugauaagg

SEQ ID NO: 94230 - RNA, 22 nt, Human
uaagaaacuauugucucugaac

SEQ ID NO: 94231 - RNA, 22 nt, Human
uaagaacaagcuggggguucca

SEQ ID NO: 94232 - RNA, 22 nt, Human
uaagaacagugacagccaacau

SEQ ID NO: 94233 - RNA, 22 nt, Human
uaagaacaucuguccccagauu

SEQ ID NO: 94234 - RNA, 22 nt, Human
uaagaaggguacaauaaggcau

SEQ ID NO: 94235 - RNA, 22 nt, Human
gccuuauuuuacuuggauucug

SEQ ID NO: 94236 - RNA, 21 nt, Human
gccuucacucccagaguuugu

SEQ ID NO: 94237 - RNA, 22 nt, Human
uaagaaucugcauuuuaacaag

SEQ ID NO: 94238 - RNA, 22 nt, Human
uaagaaugacaaccauaccauu

SEQ ID NO: 94239 - RNA, 22 nt, Human
uaagacaagccucgcauuugua

SEQ ID NO: 94240 - RNA, 22 nt, Human
uaagacacaugcguacaagaua

SEQ ID NO: 94241 - RNA, 22 nt, Human
uaagacauaccaaguuguguga

SEQ ID NO: 94242 - RNA, 22 nt, Human
uaagacuaguugaaugguuuuc

SEQ ID NO: 94243 - RNA, 22 nt, Human
uaagacugugagcucagagacu

SEQ ID NO: 94244 - RNA, 22 nt, Human
uaagacuuccaggaaaaggugg

SEQ ID NO: 94245 - RNA, 22 nt, Human
uaagagaaggaucuguuccagg

SEQ ID NO: 94246 - RNA, 22 nt, Human
uaagagaauguuguggcuaggu

SEQ ID NO: 94247 - RNA, 18 nt, Human
uaagagcagacuguaggc

SEQ ID NO: 94248 - RNA, 22 nt, Human
uaagagcagagguugaauaaau

SEQ ID NO: 94249 - RNA, 22 nt, Human
uaagagcuccaauauuuguggc

SEQ ID NO: 94250 - RNA, 22 nt, Human
uaagagcuuagcuaaggaugug

SEQ ID NO: 94251 - RNA, 22 nt, Human
uaagaggauauuuggccagaag

SEQ ID NO: 94252 - RNA, 22 nt, Human
uaagaguaagugauuaagaaga

SEQ ID NO: 94253 - RNA, 22 nt, Human
uaagaguuacugguuuagaacc

SEQ ID NO: 94254 - RNA, 22 nt, Human
uaagauaaggaacauucuguga

SEQ ID NO: 94255 - RNA, 22 nt, Human
uaagauaauaaguaugucuaug

SEQ ID NO: 94256 - RNA, 22 nt, Human
uaagauagaacucugaggcuac

SEQ ID NO: 94257 - RNA, 20 nt, Human
uaagaugagcuauaagaagu

SEQ ID NO: 94258 - RNA, 22 nt, Human
uaagaugagguagguaagacuu

SEQ ID NO: 94259 - RNA, 22 nt, Human
uaagaugaucaccaaaugcugg

SEQ ID NO: 94260 - RNA, 22 nt, Human
uaagaugggggaaagaaauagu

SEQ ID NO: 94261 - RNA, 22 nt, Human
uaagauguacuuuuguccucac

SEQ ID NO: 94262 - RNA, 22 nt, Human
uaagaugucuaagaggagaugc

SEQ ID NO: 94263 - RNA, 22 nt, Human
uaagauuacagugagaaauaaa

SEQ ID NO: 94264 - RNA, 22 nt, Human
uaagauuauacuuaaagagaaa

SEQ ID NO: 94265 - RNA, 22 nt, Human
uaagcaaaagucgagugugagc

SEQ ID NO: 94266 - RNA, 22 nt, Human
uaagcaaaguuuauaaggcucu

SEQ ID NO: 94267 - RNA, 22 nt, Human
uaagcaaauagcuagaucagag

SEQ ID NO: 94268 - RNA, 22 nt, Human
uaagcaagauuuauugaauuuu

SEQ ID NO: 94269 - RNA, 22 nt, Human
uaagcaaucuguaguuggaauc

SEQ ID NO: 94270 - RNA, 22 nt, Human
uaagcaaugcuguaguucaguc

SEQ ID NO: 94271 - RNA, 22 nt, Human
uaagcagagcccucuuuauuag

SEQ ID NO: 94272 - RNA, 22 nt, Human
uaagcaggugccuucugugacc

SEQ ID NO: 94273 - RNA, 22 nt, Human
uaagcauaagauacaugagaca

SEQ ID NO: 94274 - RNA, 22 nt, Human
uaagcauaguaccguagcagcu

SEQ ID NO: 94275 - RNA, 22 nt, Human
uaagccauacauuucagacucu

SEQ ID NO: 94276 - RNA, 22 nt, Human
uaagcccaggaaugcacuucag

SEQ ID NO: 94277 - RNA, 21 nt, Human
uaagcuaaacauucaguuaac

SEQ ID NO: 94278 - RNA, 22 nt, Human
uaagcuaacguccauggaaaug

SEQ ID NO: 94279 - RNA, 22 nt, Human
uaagcuggggcuaugcuaaaua

SEQ ID NO: 94280 - RNA, 22 nt, Human
uaagcugugggagauuggcaua

SEQ ID NO: 94281 - RNA, 21 nt, Human
uaaggaagagcauuuuagguc

SEQ ID NO: 94282 - RNA, 22 nt, Human
uaaggaagagcuugguaauagg

SEQ ID NO: 94283 - RNA, 22 nt, Human
uaaggacaaucagguuaguagc

SEQ ID NO: 94284 - RNA, 22 nt, Human
uaaggcaauggcauucuugaca

SEQ ID NO: 94285 - RNA, 22 nt, Human
uaaggcaccauaauauauuuaa

SEQ ID NO: 94286 - RNA, 22 nt, Human
uaaggcacgcauaagagggggc

SEQ ID NO: 94287 - RNA, 22 nt, Human
uaaggcagagguaccacuaggc

SEQ ID NO: 94288 - RNA, 22 nt, Human
uaaggcagcugagcuucuaaca

SEQ ID NO: 94289 - RNA, 22 nt, Human
uaaggcaggacuggauagcuau

SEQ ID NO: 94290 - RNA, 22 nt, Human
uaaggcagguaugguaccaggc

SEQ ID NO: 94291 - RNA, 22 nt, Human
uaaggcagugagaagaaacagg

SEQ ID NO: 94292 - RNA, 20 nt, Human
uaaggcaucaaguuugggua

SEQ ID NO: 94293 - RNA, 18 nt, Human
uaaggcauucuuauguga

SEQ ID NO: 94294 - RNA, 22 nt, Human
uaaggcuaggaauucucugaag

SEQ ID NO: 94295 - RNA, 22 nt, Human
uaaggcucauguaauuagagau

SEQ ID NO: 94296 - RNA, 22 nt, Human
uaaggcuguuaggaggauuaaa

SEQ ID NO: 94297 - RNA, 22 nt, Human
uaaggcuuuuaaagguucacca

SEQ ID NO: 94298 - RNA, 22 nt, Human
uaaggcuuuuguucagcguggg

SEQ ID NO: 94299 - RNA, 22 nt, Human
uaaggguucagaaugcaguggu

SEQ ID NO: 94300 - RNA, 22 nt, Human
uaagguuucuucagauacuagu

SEQ ID NO: 94301 - RNA, 22 nt, Human
uaagguuuggcugucucuuggu

SEQ ID NO: 94302 - RNA, 22 nt, Human
uaagguuuugagaccagaacgu

SEQ ID NO: 94303 - RNA, 22 nt, Human
uaaguaaauuuauaaugugauu

SEQ ID NO: 94304 - RNA, 22 nt, Human
uaaguaacugcauaauuaaauu

SEQ ID NO: 94305 - RNA, 22 nt, Human
uaaguaauugcagcaauuugcc

SEQ ID NO: 94306 - RNA, 22 nt, Human
uaaguacaaauguauacauaag

SEQ ID NO: 94307 - RNA, 22 nt, Human
uaaguagaugcaaaauggaguu

SEQ ID NO: 94308 - RNA, 22 nt, Human
uaaguagucagacauaccccau

SEQ ID NO: 94309 - RNA, 22 nt, Human
uaaguaguccugauuuaaccuu

SEQ ID NO: 94310 - RNA, 22 nt, Human
uaaguaguuccauccaaacagc

SEQ ID NO: 94311 - RNA, 22 nt, Human
uaagucauaagucaacaaagga

SEQ ID NO: 94312 - RNA, 22 nt, Human
uaagucaugauucuguguuacu

SEQ ID NO: 94313 - RNA, 18 nt, Human
uaagucauuugaaaugcc

SEQ ID NO: 94314 - RNA, 22 nt, Human
uaagucauuuggagccacugga

SEQ ID NO: 94315 - RNA, 22 nt, Human
uaaguccaaggguaugaguugg

SEQ ID NO: 94316 - RNA, 22 nt, Human
uaaguccacaggaguuguguuc

SEQ ID NO: 94317 - RNA, 22 nt, Human
uaaguccacaggcugacagcgg

SEQ ID NO: 94318 - RNA, 22 nt, Human
uaaguccacuauauccuucucu

SEQ ID NO: 94319 - RNA, 22 nt, Human
uaaguccuucaccuaauccuca

SEQ ID NO: 94320 - RNA, 22 nt, Human
uaagugaaauggugcaucaaau

SEQ ID NO: 94321 - RNA, 22 nt, Human
uaagugaauuguccgaggacac

SEQ ID NO: 94322 - RNA, 20 nt, Human
uaagugagaacaugugguau

SEQ ID NO: 94323 - RNA, 22 nt, Human
uaagugagcuagcagaagugac

SEQ ID NO: 94324 - RNA, 22 nt, Human
uaagugagggagcugggacuug

SEQ ID NO: 94325 - RNA, 22 nt, Human
uaagugaguucuugcuagauuu

SEQ ID NO: 94326 - RNA, 23 nt, Human
uaagugauaaagaguagagaugg

SEQ ID NO: 94327 - RNA, 22 nt, Human
uaagugcaucugaucuuucaug

SEQ ID NO: 94328 - RNA, 22 nt, Human
uaaguggguuuguaaugugccu

SEQ ID NO: 94329 - RNA, 22 nt, Human
uaagugguugcuuguuuucauu

SEQ ID NO: 94330 - RNA, 22 nt, Human
uaagugucccuauugugauuuu

SEQ ID NO: 94331 - RNA, 22 nt, Human
uaagugucuaaaaggcagaacu

SEQ ID NO: 94332 - RNA, 22 nt, Human
uaaguguugaucugagugcuaa

SEQ ID NO: 94333 - RNA, 22 nt, Human
uaaguguugguaauuacaauga

SEQ ID NO: 94334 - RNA, 22 nt, Human
uaaguguuucuccagugucuuu

SEQ ID NO: 94335 - RNA, 22 nt, Human
uaaguuacacuuaacuuacuag

SEQ ID NO: 94336 - RNA, 22 nt, Human
uaaguuagagguuaggcacuua

SEQ ID NO: 94337 - RNA, 22 nt, Human
uaaguuagcaaggccaagguaa

SEQ ID NO: 94338 - RNA, 22 nt, Human
uaaguucaaaucaucccaacuu

SEQ ID NO: 94339 - RNA, 22 nt, Human
uaaguuccuggaaggcaaggau

SEQ ID NO: 94340 - RNA, 22 nt, Human
uaaguucucagaagauuuugua

SEQ ID NO: 94341 - RNA, 22 nt, Human
uaaguucucugaaaugaaaaag

SEQ ID NO: 94342 - RNA, 22 nt, Human
uaaguucugaagauaggaaaug

SEQ ID NO: 94343 - RNA, 21 nt, Human
uaaguucugaucccuaucaac

SEQ ID NO: 94344 - RNA, 22 nt, Human
uaaguuuaagucauguuugaug

SEQ ID NO: 94345 - RNA, 22 nt, Human
uaaguuuagagagaauggggac

SEQ ID NO: 94346 - RNA, 22 nt, Human
uaaguuuauagauaaaugccua

SEQ ID NO: 94347 - RNA, 22 nt, Human
uaaguuucuacuugucgggucu

SEQ ID NO: 94348 - RNA, 22 nt, Human
gccuucaggugucccugugggc

SEQ ID NO: 94349 - RNA, 22 nt, Human
gccuucaguaacugagacggaa

SEQ ID NO: 94350 - RNA, 22 nt, Human
gccuuccaggcagggggagcag

SEQ ID NO: 94351 - RNA, 22 nt, Human
gccuucccaagacgccugaguu

SEQ ID NO: 94352 - RNA, 17 nt, Human
gccuuccuuccuccaca

SEQ ID NO: 94353 - RNA, 22 nt, Human
gccuuccuuuuaccaccagcca

SEQ ID NO: 94354 - RNA, 22 nt, Human
gccuucucccuaaccaaauccu

SEQ ID NO: 94355 - RNA, 17 nt, Human
gccuucucugcccucac

SEQ ID NO: 94356 - RNA, 22 nt, Human
gccuucugcgcucgugucuccg

SEQ ID NO: 94357 - RNA, 15 nt, Human
gccuugaaugugaau

SEQ ID NO: 94358 - RNA, 22 nt, Human
gccuugccucagccauggaaac

SEQ ID NO: 94359 - RNA, 22 nt, Human
gccuugcuuugcuucuggacag

SEQ ID NO: 94360 - RNA, 22 nt, Human
gccuuggacucggguggacuca

SEQ ID NO: 94361 - RNA, 23 nt, Human
gccuuggcgauccguggggcauc

SEQ ID NO: 94362 - RNA, 22 nt, Human
gccuuggcugaugugcgaauga

SEQ ID NO: 94363 - RNA, 22 nt, Human
gccuuggcuguuggagcuugau

SEQ ID NO: 94364 - RNA, 22 nt, Human
gccuuuaucuugggccaaguuu

SEQ ID NO: 94365 - RNA, 22 nt, Human
gccuuuaugucugaaaaucagc

SEQ ID NO: 94366 - RNA, 22 nt, Human
gccuuuauuguuuauucagugc

SEQ ID NO: 94367 - RNA, 18 nt, Human
gccuuugcacaagcagcu

SEQ ID NO: 94368 - RNA, 22 nt, Human
gccuuugcaccaucagugcaau

SEQ ID NO: 94369 - RNA, 22 nt, Human
gccuuuggagaugucauaggau

SEQ ID NO: 94370 - RNA, 21 nt, Human
gccuuugguuucuuguccugc

SEQ ID NO: 94371 - RNA, 22 nt, Human
gccuuuguaacucuuuuauugu

SEQ ID NO: 94372 - RNA, 22 nt, Human
gcgaaucucagcuggugcugcg

SEQ ID NO: 94373 - RNA, 22 nt, Human
gcgacagugcggccaccuucau

SEQ ID NO: 94374 - RNA, 22 nt, Human
gcgaggaggggugcugggcccc

SEQ ID NO: 94375 - RNA, 22 nt, Human
gcgaggcugggcccugcaggcg

SEQ ID NO: 94376 - RNA, 22 nt, Human
gcgcacauguucagauguguga

SEQ ID NO: 94377 - RNA, 22 nt, Human
gcgcacugggcgcacgcguagg

SEQ ID NO: 94378 - RNA, 22 nt, Human
gcgccuggcacacagcaagggc

SEQ ID NO: 94379 - RNA, 22 nt, Human
gcgcgggguacacgcgguggcc

SEQ ID NO: 94380 - RNA, 22 nt, Human
gcgcugccucugcucuccccac

SEQ ID NO: 94381 - RNA, 22 nt, Human
gcggaaaugcagggcuagggug

SEQ ID NO: 94382 - RNA, 22 nt, Human
gcggaagcgguagucacccucg

SEQ ID NO: 94383 - RNA, 22 nt, Human
gcggagaggcagagacuccgcg

SEQ ID NO: 94384 - RNA, 22 nt, Human
gcggccuuguggcggagcaggc

SEQ ID NO: 94385 - RNA, 22 nt, Human
gcgggcagggcacugguccccu

SEQ ID NO: 94386 - RNA, 22 nt, Human
gcgggcgcucaggcugcagcug

SEQ ID NO: 94387 - RNA, 19 nt, Human
gcgggcggcgccugcgagg

SEQ ID NO: 94388 - RNA, 22 nt, Human
gcguccagggaaggcccagcug

SEQ ID NO: 94389 - RNA, 22 nt, Human
gcgugcauggccguguguaugc

SEQ ID NO: 94390 - RNA, 22 nt, Human
gcguggagacaacucuggggug

SEQ ID NO: 94391 - RNA, 22 nt, Human
gcguggcuccuaacagaucuga

SEQ ID NO: 94392 - RNA, 22 nt, Human
gcguggugcugcccugcacaca

SEQ ID NO: 94393 - RNA, 22 nt, Human
gcgugugugauaugccucugca

SEQ ID NO: 94394 - RNA, 22 nt, Human
gcguuuguuuugcuggcgccag

SEQ ID NO: 94395 - RNA, 22 nt, Human
gcuaaaugaugggaaaucuggg

SEQ ID NO: 94396 - RNA, 22 nt, Human
gcuaacauugauucagugccug

SEQ ID NO: 94397 - RNA, 23 nt, Human
gcuaagaaccuggguacgcaacu

SEQ ID NO: 94398 - RNA, 15 nt, Human
gcuaaggcauuggua

SEQ ID NO: 94399 - RNA, 22 nt, Human
gcuaagugguuuucuucuccuc

SEQ ID NO: 94400 - RNA, 22 nt, Human
gcuaauaauuccuuugugaacu

SEQ ID NO: 94401 - RNA, 22 nt, Human
gcuacaaagugguaggagguca

SEQ ID NO: 94402 - RNA, 22 nt, Human
gcuacaggggucaguccuuugc

SEQ ID NO: 94403 - RNA, 22 nt, Human
gcuacaggugacagccucugca

SEQ ID NO: 94404 - RNA, 22 nt, Human
gcuacaguagauaaggacgguc

SEQ ID NO: 94405 - RNA, 22 nt, Human
gcuacuuugcagcuagcuagga

SEQ ID NO: 94406 - RNA, 22 nt, Human
gcuagaaacuguuuaaucucuu

SEQ ID NO: 94407 - RNA, 22 nt, Human
gcuagaaaucgacuucagaauu

SEQ ID NO: 94408 - RNA, 22 nt, Human
gcuagaggcaacaacuuuauag

SEQ ID NO: 94409 - RNA, 22 nt, Human
gcuagaucucucauaaauucca

SEQ ID NO: 94410 - RNA, 22 nt, Human
gcuagcagaaagcaggcugcuc

SEQ ID NO: 94411 - RNA, 22 nt, Human
gcuagcuuuauaaugcugggcg

SEQ ID NO: 94412 - RNA, 22 nt, Human
gcuaggaagcuggggagaaguc

SEQ ID NO: 94413 - RNA, 17 nt, Human
gcuaggagagggaggag

SEQ ID NO: 94414 - RNA, 22 nt, Human
gcuaggaggaagaaugugaauu

SEQ ID NO: 94415 - RNA, 22 nt, Human
gcuaggcucuuccaucagggca

SEQ ID NO: 94416 - RNA, 22 nt, Human
gcuagggagacuugugucauca

SEQ ID NO: 94417 - RNA, 19 nt, Human
gcuaggguugguggcgugc

SEQ ID NO: 94418 - RNA, 19 nt, Human
gcuaggugaccagcuggau

SEQ ID NO: 94419 - RNA, 22 nt, Human
gcuauacaaguguagaauagag

SEQ ID NO: 94420 - RNA, 21 nt, Human
gcuauacagaauggccagagg

SEQ ID NO: 94421 - RNA, 22 nt, Human
gcuaucuuucugcaccauaauu

SEQ ID NO: 94422 - RNA, 22 nt, Human
gcuaugaacaugagaaugcaaa

SEQ ID NO: 94423 - RNA, 22 nt, Human
gcuauguuagacauucucauuu

SEQ ID NO: 94424 - RNA, 22 nt, Human
gcuauucaucaauuguucuagc

SEQ ID NO: 94425 - RNA, 22 nt, Human
gcucaaagaauauucagaauga

SEQ ID NO: 94426 - RNA, 22 nt, Human
gcucaaagcacuuugcaaauau

SEQ ID NO: 94427 - RNA, 22 nt, Human
gcucaaaggccagguagcagca

SEQ ID NO: 94428 - RNA, 22 nt, Human
gcucaaagguugauagcugugc

SEQ ID NO: 94429 - RNA, 22 nt, Human
gcucaaauuucagacucaugaa

SEQ ID NO: 94430 - RNA, 22 nt, Human
gcucaagagagaugcaguucuu

SEQ ID NO: 94431 - RNA, 22 nt, Human
gcucaaggcaggcagacaugag

SEQ ID NO: 94432 - RNA, 22 nt, Human
gcucaaugcucaaugcugcaaa

SEQ ID NO: 94433 - RNA, 23 nt, Human
gcucacagaauguugaagggaau

SEQ ID NO: 94434 - RNA, 22 nt, Human
gcucacaggucuguggcuauug

SEQ ID NO: 94435 - RNA, 22 nt, Human
gcucacaucauaguaagcucau

SEQ ID NO: 94436 - RNA, 22 nt, Human
gcucaccuucguccagcagccg

SEQ ID NO: 94437 - RNA, 22 nt, Human
gcucacuaaauaacaggaagaa

SEQ ID NO: 94438 - RNA, 22 nt, Human
gcucacugcaaccucugcuucc

SEQ ID NO: 94439 - RNA, 22 nt, Human
gcucacugccugggcaacaaga

SEQ ID NO: 94440 - RNA, 22 nt, Human
gcucagagaaagauuagucccu

SEQ ID NO: 94441 - RNA, 22 nt, Human
gcucagagaaguuaaggaauuu

SEQ ID NO: 94442 - RNA, 22 nt, Human
gcucagagagaggcucaccauu

SEQ ID NO: 94443 - RNA, 22 nt, Human
gcucagagcacucagacucagc

SEQ ID NO: 94444 - RNA, 22 nt, Human
gcucagaggagcaucauaagga

SEQ ID NO: 94445 - RNA, 22 nt, Human
gcucagaggccacuguuggaaa

SEQ ID NO: 94446 - RNA, 23 nt, Human
gcucagaggugaaauguuuuggg

SEQ ID NO: 94447 - RNA, 22 nt, Human
gcucagagguuguucuuggguu

SEQ ID NO: 94448 - RNA, 23 nt, Human
gcucagagguuuuucucuggaug

SEQ ID NO: 94449 - RNA, 17 nt, Human
gcucagaguacacgugu

SEQ ID NO: 94450 - RNA, 22 nt, Human
gcucagaguggccuggcuaggg

SEQ ID NO: 94451 - RNA, 23 nt, Human
gcucagaugcccuaggagguggc

SEQ ID NO: 94452 - RNA, 22 nt, Human
gcucagcacuuucuccaaccac

SEQ ID NO: 94453 - RNA, 22 nt, Human
gcugagauuacgggcaugagcc

SEQ ID NO: 94454 - RNA, 22 nt, Human
gcugagccacccuugcuucccu

SEQ ID NO: 94455 - RNA, 22 nt, Human
gcugagccaugaggccucuugc

SEQ ID NO: 94456 - RNA, 22 nt, Human
gcugagcccucaucccuaguuu

SEQ ID NO: 94457 - RNA, 22 nt, Human
gcugagcuagcuaucucagucu

SEQ ID NO: 94458 - RNA, 22 nt, Human
gcugaggauugaagaguugcca

SEQ ID NO: 94459 - RNA, 22 nt, Human
gcugaggcaguccacccuugug

SEQ ID NO: 94460 - RNA, 22 nt, Human
gcugaggccaggccccaccgga

SEQ ID NO: 94461 - RNA, 22 nt, Human
gcugaggccccagggugauggg

SEQ ID NO: 94462 - RNA, 22 nt, Human
gcuggagaggaucccaaagcca

SEQ ID NO: 94463 - RNA, 22 nt, Human
gcuggagagugaggggagcaag

SEQ ID NO: 94464 - RNA, 22 nt, Human
gcuggagaugcuaugcagaggg

SEQ ID NO: 94465 - RNA, 22 nt, Human
gcuggagccuucugcucuguug

SEQ ID NO: 94466 - RNA, 22 nt, Human
gcuggaggcuggagugcagugg

SEQ ID NO: 94467 - RNA, 22 nt, Human
gcuggagggguaauaggauggg

SEQ ID NO: 94468 - RNA, 22 nt, Human
gcuggagguggugagaaaaggu

SEQ ID NO: 94469 - RNA, 22 nt, Human
gcuggagguuucaccugaguuu

SEQ ID NO: 94470 - RNA, 22 nt, Human
gcuggaguacaucuuuggcggc

SEQ ID NO: 94471 - RNA, 19 nt, Human
gcuggagucacuuuugaga

SEQ ID NO: 94472 - RNA, 22 nt, Human
gcuggagugagggaccauauuu

SEQ ID NO: 94473 - RNA, 22 nt, Human
gcuggagugaguauguguaguc

SEQ ID NO: 94474 - RNA, 22 nt, Human
gcuggaguuagaacuagccugg

SEQ ID NO: 94475 - RNA, 22 nt, Human
gcuggaguuaggugggcuugaa

SEQ ID NO: 94476 - RNA, 22 nt, Human
gcuggaguuggcaaggcaugua

SEQ ID NO: 94477 - RNA, 22 nt, Human
gcuggauccacaaauaacuuug

SEQ ID NO: 94478 - RNA, 22 nt, Human
gcuggauccugauucgucuuug

SEQ ID NO: 94479 - RNA, 22 nt, Human
gcuggcagaagagcugguucaa

SEQ ID NO: 94480 - RNA, 19 nt, Human
gcuggcagaauuuugaacc

SEQ ID NO: 94481 - RNA, 22 nt, Human
gcuggcagagagcuggugagga

SEQ ID NO: 94482 - RNA, 20 nt, Human
gcuggcagaugucuugagau

SEQ ID NO: 94483 - RNA, 22 nt, Human
gcuggcaggagaccauacccua

SEQ ID NO: 94484 - RNA, 22 nt, Human
gcuggcaggauaacuucuaagc

SEQ ID NO: 94485 - RNA, 22 nt, Human
gcuggcaggauagaagucuaau

SEQ ID NO: 94486 - RNA, 22 nt, Human
gcuggcagggugguugagagag

SEQ ID NO: 94487 - RNA, 22 nt, Human
gcuggcagucccaucagcuggg

SEQ ID NO: 94488 - RNA, 22 nt, Human
gcuggcaguguauuguuagcug

SEQ ID NO: 94489 - RNA, 22 nt, Human
gcuggcaucacuggcuucggug

SEQ ID NO: 94490 - RNA, 22 nt, Human
gcuggcauuacaggagagaacc

SEQ ID NO: 94491 - RNA, 22 nt, Human
gcuggccacacugcugauggag

SEQ ID NO: 94492 - RNA, 19 nt, Human
gcuggccacgccccaguug

SEQ ID NO: 94493 - RNA, 22 nt, Human
gcuggccaggaagagucucaga

SEQ ID NO: 94494 - RNA, 22 nt, Human
gcuggccauggccugcgccauc

SEQ ID NO: 94495 - RNA, 22 nt, Human
gcuggccucuggagaagggcuu

SEQ ID NO: 94496 - RNA, 22 nt, Human
gcuggccugcgagggcaggcug

SEQ ID NO: 94497 - RNA, 22 nt, Human
gcuggccugcugggcaccaccg

SEQ ID NO: 94498 - RNA, 22 nt, Human
gcuggccugggcagaggcuaug

SEQ ID NO: 94499 - RNA, 22 nt, Human
gcuggccugggcucaagaccag

SEQ ID NO: 94500 - RNA, 22 nt, Human
gcuggccuucugcagaguucug

SEQ ID NO: 94501 - RNA, 22 nt, Human
gcuggccuugugucugaggaag

SEQ ID NO: 94502 - RNA, 22 nt, Human
gcuggccuuugaggaagcugcg

SEQ ID NO: 94503 - RNA, 22 nt, Human
gcuggcuccucuguccucacgg

SEQ ID NO: 94504 - RNA, 22 nt, Human
gcuggcucugcacccaggccuc

SEQ ID NO: 94505 - RNA, 22 nt, Human
gcuggcucugugguaguuggca

SEQ ID NO: 94506 - RNA, 22 nt, Human
gcuggcugaaucuucugcaaua

SEQ ID NO: 94507 - RNA, 22 nt, Human
gcuggcugagcacugguuuaua

SEQ ID NO: 94508 - RNA, 22 nt, Human
gcuggcugaguucugucgucug

SEQ ID NO: 94509 - RNA, 22 nt, Human
gcuggcugcacaggggcucacu

SEQ ID NO: 94510 - RNA, 22 nt, Human
gcuggcugccaauuucagagcu

SEQ ID NO: 94511 - RNA, 22 nt, Human
gcuggcugccuuacuuugugga

SEQ ID NO: 94512 - RNA, 22 nt, Human
gcuggcugcuaggacagcuaca

SEQ ID NO: 94513 - RNA, 22 nt, Human
gcuggcuggaaugggagaagaa

SEQ ID NO: 94514 - RNA, 19 nt, Human
gcuggcuggaggagggaca

SEQ ID NO: 94515 - RNA, 22 nt, Human
gcuggcuggaggagggagguug

SEQ ID NO: 94516 - RNA, 22 nt, Human
gcuggcuggaggugaggaagaa

SEQ ID NO: 94517 - RNA, 22 nt, Human
gcuggcuggaguaaggagggag

SEQ ID NO: 94518 - RNA, 22 nt, Human
gcuggcuggcacguucgcacgu

SEQ ID NO: 94519 - RNA, 23 nt, Human
gcuggcuggcaguaaagguuguu

SEQ ID NO: 94520 - RNA, 22 nt, Human
gcuggcuggcgggugcguccuc

SEQ ID NO: 94521 - RNA, 22 nt, Human
gcuggcugggucccugagaggc

SEQ ID NO: 94522 - RNA, 22 nt, Human
gcuggcuguggcuuaagcaaac

SEQ ID NO: 94523 - RNA, 22 nt, Human
gcuggcuguguuccuucugcca

SEQ ID NO: 94524 - RNA, 22 nt, Human
gcuggcuguugaauaauggcau

SEQ ID NO: 94525 - RNA, 22 nt, Human
gcuggcuguuggagguaccugc

SEQ ID NO: 94526 - RNA, 17 nt, Human
gcuggcuucuccuugcu

SEQ ID NO: 94527 - RNA, 22 nt, Human
gcuggcuugacagaggccuggg

SEQ ID NO: 94528 - RNA, 22 nt, Human
gcuggcuugauaguuucugcuu

SEQ ID NO: 94529 - RNA, 22 nt, Human
gcuggcuuuauggggcuugugg

SEQ ID NO: 94530 - RNA, 21 nt, Human
gcuggcuuuauucugcguuug

SEQ ID NO: 94531 - RNA, 22 nt, Human
gcuggcuuugucaagggcagca

SEQ ID NO: 94532 - RNA, 22 nt, Human
gcuggcuuuguggucucuccuc

SEQ ID NO: 94533 - RNA, 22 nt, Human
gcuggcuuuugaagucuagcua

SEQ ID NO: 94534 - RNA, 22 nt, Human
gcugggaacacagccaugagag

SEQ ID NO: 94535 - RNA, 22 nt, Human
gcugggaagugcaagaucaagg

SEQ ID NO: 94536 - RNA, 22 nt, Human
gcugggacaggcuuggcccugu

SEQ ID NO: 94537 - RNA, 22 nt, Human
gcugggagcaaagccaugcaua

SEQ ID NO: 94538 - RNA, 22 nt, Human
gcugggagccguaccugucacg

SEQ ID NO: 94539 - RNA, 22 nt, Human
gcugggaggcagcaccuuuagc

SEQ ID NO: 94540 - RNA, 22 nt, Human
gcugggagugggcaagaugaga

SEQ ID NO: 94541 - RNA, 22 nt, Human
gcugggcaagugccuuggguuu

SEQ ID NO: 94542 - RNA, 22 nt, Human
gcugggcaaugccagagaggag

SEQ ID NO: 94543 - RNA, 22 nt, Human
gcugggccagccagacauguga

SEQ ID NO: 94544 - RNA, 22 nt, Human
gcugggccccaucccucgagca

SEQ ID NO: 94545 - RNA, 22 nt, Human
gcugggccccuugaaaggcguc

SEQ ID NO: 94546 - RNA, 22 nt, Human
gcugggcccugggugcccuagc

SEQ ID NO: 94547 - RNA, 22 nt, Human
gcugggccgaccugggcugcag

SEQ ID NO: 94548 - RNA, 22 nt, Human
gcugggccuuccgauucucaag

SEQ ID NO: 94549 - RNA, 22 nt, Human
gcugggcucauuugugugucug

SEQ ID NO: 94550 - RNA, 22 nt, Human
gcugggcuccacccucaacugu

SEQ ID NO: 94551 - RNA, 22 nt, Human
gcugggcucuuaucaccuguac

SEQ ID NO: 94552 - RNA, 22 nt, Human
gcugggcuggaaggccaaggca

SEQ ID NO: 94553 - RNA, 22 nt, Human
gcugggcuggccgccgagaucg

SEQ ID NO: 94554 - RNA, 23 nt, Human
gcugggcuuacucuuucagugag

SEQ ID NO: 94555 - RNA, 22 nt, Human
gcugggcuucaccuccagaguu

SEQ ID NO: 94556 - RNA, 22 nt, Human
gcugggcuucucaaugcugccu

SEQ ID NO: 94557 - RNA, 22 nt, Human
gcuggggaccagcugucucuga

SEQ ID NO: 94558 - RNA, 22 nt, Human
gcuggggacuccccaccauagc

SEQ ID NO: 94559 - RNA, 22 nt, Human
gcuggggagcaagaguagugag

SEQ ID NO: 94560 - RNA, 22 nt, Human
gcuggggaggcagcagagaaca

SEQ ID NO: 94561 - RNA, 22 nt, Human
gcuggggagggcgucaaggcca

SEQ ID NO: 94562 - RNA, 21 nt, Human
uacaagauagagguaauauau

SEQ ID NO: 94563 - RNA, 22 nt, Human
uacaagauuaaaacuuauacca

SEQ ID NO: 94564 - RNA, 22 nt, Human
uacaaggaaaaucuugaaguac

SEQ ID NO: 94565 - RNA, 22 nt, Human
uacaaggaggcuaaugaugaca

SEQ ID NO: 94566 - RNA, 22 nt, Human
uacaagguuguacuuucucucu

SEQ ID NO: 94567 - RNA, 20 nt, Human
uacaaguacauuauaguuau

SEQ ID NO: 94568 - RNA, 22 nt, Human
uacaaguauauucuagugauau

SEQ ID NO: 94569 - RNA, 22 nt, Human
uacaaguauguuuuaaaauguu

SEQ ID NO: 94570 - RNA, 22 nt, Human
uacaagucacuuccuuucuaaa

SEQ ID NO: 94571 - RNA, 21 nt, Human
uacaaguugcuuuugaagucc

SEQ ID NO: 94572 - RNA, 22 nt, Human
uacaauagggagguuuagggga

SEQ ID NO: 94573 - RNA, 22 nt, Human
uacaauagggcuuuuguuuaug

SEQ ID NO: 94574 - RNA, 22 nt, Human
uacaaucuuuauguugaguggu

SEQ ID NO: 94575 - RNA, 22 nt, Human
uacaaugaccauauuauguaag

SEQ ID NO: 94576 - RNA, 19 nt, Human
uacaaugauguuaccuuug

SEQ ID NO: 94577 - RNA, 22 nt, Human
uacaaugauuagcuaacuugcc

SEQ ID NO: 94578 - RNA, 17 nt, Human
uacaaugugauucaauc

SEQ ID NO: 94579 - RNA, 22 nt, Human
uacaauguuaaggaaagagaga

SEQ ID NO: 94580 - RNA, 22 nt, Human
uacaauguuccuagcaggaaag

SEQ ID NO: 94581 - RNA, 22 nt, Human
uacacaaaggcacucuguuguu

SEQ ID NO: 94582 - RNA, 22 nt, Human
uacacacaugcauuugccuuau

SEQ ID NO: 94583 - RNA, 22 nt, Human
uacacagaaccugguguacagu

SEQ ID NO: 94584 - RNA, 22 nt, Human
uacacagaagccagaaggccug

SEQ ID NO: 94585 - RNA, 22 nt, Human
uacacagagacucaaaagggca

SEQ ID NO: 94586 - RNA, 22 nt, Human
uacacagaggcugaugucuuag

SEQ ID NO: 94587 - RNA, 22 nt, Human
uacacagauaugugaucaauca

SEQ ID NO: 94588 - RNA, 22 nt, Human
uacacagauuuaaaagcaggga

SEQ ID NO: 94589 - RNA, 22 nt, Human
uacacaggcugccucuuugcau

SEQ ID NO: 94590 - RNA, 22 nt, Human
uacacagggaaaggucucagag

SEQ ID NO: 94591 - RNA, 22 nt, Human
uacacaguaaaugguaaauaca

SEQ ID NO: 94592 - RNA, 22 nt, Human
uacacauccauguuuugacuuu

SEQ ID NO: 94593 - RNA, 22 nt, Human
uacacaucccagacucccagga

SEQ ID NO: 94594 - RNA, 22 nt, Human
uacacaugcauguacuccagga

SEQ ID NO: 94595 - RNA, 22 nt, Human
uacacauucuagggcacaguua

SEQ ID NO: 94596 - RNA, 22 nt, Human
uacaccagauuauuuauaacau

SEQ ID NO: 94597 - RNA, 21 nt, Human
uacaccaguuuacacuuccuc

SEQ ID NO: 94598 - RNA, 22 nt, Human
uacacccacauugagcauggga

SEQ ID NO: 94599 - RNA, 22 nt, Human
uacacccagguaccgugauuuc

SEQ ID NO: 94600 - RNA, 22 nt, Human
uacacccuucuccugagugugu

SEQ ID NO: 94601 - RNA, 22 nt, Human
uacacuaaaucuucaucuuuua

SEQ ID NO: 94602 - RNA, 22 nt, Human
uacacuaauguuuuugcaaagc

SEQ ID NO: 94603 - RNA, 22 nt, Human
uacacucuuaggaauugguuau

SEQ ID NO: 94604 - RNA, 22 nt, Human
uacacugaagugucuugguaua

SEQ ID NO: 94605 - RNA, 22 nt, Human
uacacugugacaaucaugacag

SEQ ID NO: 94606 - RNA, 22 nt, Human
uacacuguguaaaaugcacuuu

SEQ ID NO: 94607 - RNA, 22 nt, Human
uacacuuauaacucugugugug

SEQ ID NO: 94608 - RNA, 22 nt, Human
uacagaaaaacuuggaggcuuu

SEQ ID NO: 94609 - RNA, 22 nt, Human
uacagaaauacagucaggccua

SEQ ID NO: 94610 - RNA, 22 nt, Human
uacagaagcugagacacugaga

SEQ ID NO: 94611 - RNA, 22 nt, Human
uacagaauaaagcgugaagcuu

SEQ ID NO: 94612 - RNA, 22 nt, Human
uacagacaaagagcaugcggua

SEQ ID NO: 94613 - RNA, 22 nt, Human
uacagacaguuuuucagauauu

SEQ ID NO: 94614 - RNA, 22 nt, Human
uacagagaacucauagaaagaa

SEQ ID NO: 94615 - RNA, 20 nt, Human
uacagagagcuagcucucug

SEQ ID NO: 94616 - RNA, 22 nt, Human
uacagaggguaauugaucaagg

SEQ ID NO: 94617 - RNA, 22 nt, Human
uacagaguauuuuuaauauggu

SEQ ID NO: 94618 - RNA, 22 nt, Human
uacagaguggugagaucuuuug

SEQ ID NO: 94619 - RNA, 22 nt, Human
uacagauaaaaaugcuguucuu

SEQ ID NO: 94620 - RNA, 22 nt, Human
uacagauaacugaaugcagacu

SEQ ID NO: 94621 - RNA, 22 nt, Human
uacagauauauagugugugccu

SEQ ID NO: 94622 - RNA, 22 nt, Human
uacagcauuaacaggcuguuua

SEQ ID NO: 94623 - RNA, 22 nt, Human
uacagcauugugucuucacuca

SEQ ID NO: 94624 - RNA, 22 nt, Human
uacagccacaggugacucucau

SEQ ID NO: 94625 - RNA, 22 nt, Human
uacagccaugguuaauuuaccu

SEQ ID NO: 94626 - RNA, 23 nt, Human
uacagccaugucgcugauuuaac

SEQ ID NO: 94627 - RNA, 22 nt, Human
uacagccugauuuggagccacu

SEQ ID NO: 94628 - RNA, 22 nt, Human
uacagccuucaucuuugccuug

SEQ ID NO: 94629 - RNA, 22 nt, Human
uacagcuguugguguuuccucu

SEQ ID NO: 94630 - RNA, 22 nt, Human
uacagcuuaaaaaagccaacuu

SEQ ID NO: 94631 - RNA, 22 nt, Human
uacagcuugaugagagcgcgag

SEQ ID NO: 94632 - RNA, 22 nt, Human
uacagcuuuagcaaauuaccua

SEQ ID NO: 94633 - RNA, 22 nt, Human
uacagcuuugggaaggccccau

SEQ ID NO: 94634 - RNA, 22 nt, Human
uacagcuuuucauauuuguguu

SEQ ID NO: 94635 - RNA, 22 nt, Human
uacaggaaggcucuggaggugc

SEQ ID NO: 94636 - RNA, 20 nt, Human
uacaggaaucaagacugcau

SEQ ID NO: 94637 - RNA, 22 nt, Human
uacaggagcacaaaagaguuga

SEQ ID NO: 94638 - RNA, 19 nt, Human
uacaggaggccugcaaucu

SEQ ID NO: 94639 - RNA, 22 nt, Human
uacaggcaugaaugaaaucugu

SEQ ID NO: 94640 - RNA, 22 nt, Human
uacaggcccauagucccugcuu

SEQ ID NO: 94641 - RNA, 22 nt, Human
uacagggaccaauaauaacuau

SEQ ID NO: 94642 - RNA, 22 nt, Human
uacaggguauucaaggguaguu

SEQ ID NO: 94643 - RNA, 22 nt, Human
uacaggucuaacuaaaugaauu

SEQ ID NO: 94644 - RNA, 22 nt, Human
uacaguaaagcugcuaugaauu

SEQ ID NO: 94645 - RNA, 22 nt, Human
uacaguaaaugugguagaaacu

SEQ ID NO: 94646 - RNA, 22 nt, Human
uacaguacacagguaccaagcu

SEQ ID NO: 94647 - RNA, 22 nt, Human
uacaguaccugccacguuguug

SEQ ID NO: 94648 - RNA, 22 nt, Human
uacaguagaauuuuuaguaacu

SEQ ID NO: 94649 - RNA, 22 nt, Human
uacaguagacaggaccacaggc

SEQ ID NO: 94650 - RNA, 22 nt, Human
uacaguagcuacucaauaacua

SEQ ID NO: 94651 - RNA, 22 nt, Human
uacaguaggauuuucagggucu

SEQ ID NO: 94652 - RNA, 22 nt, Human
uacaguauguucuugaauuugg

SEQ ID NO: 94653 - RNA, 22 nt, Human
uacaguauuaugagugauugaa

SEQ ID NO: 94654 - RNA, 22 nt, Human
uacaguauuugaagaauaugag

SEQ ID NO: 94655 - RNA, 22 nt, Human
uacagucuuuggaaagagauag

SEQ ID NO: 94656 - RNA, 22 nt, Human
uacagugacccuauuuccaaau

SEQ ID NO: 94657 - RNA, 22 nt, Human
uacagugaccuagaauaaauac

SEQ ID NO: 94658 - RNA, 22 nt, Human
uacagugcgggugcgggccucu

SEQ ID NO: 94659 - RNA, 22 nt, Human
uacagugucccuuuuucagaca

SEQ ID NO: 94660 - RNA, 22 nt, Human
uacagugucugcaacugcacac

SEQ ID NO: 94661 - RNA, 22 nt, Human
uacagugucuggauaucaaagg

SEQ ID NO: 94662 - RNA, 22 nt, Human
uacagugugaauaagcaggcau

SEQ ID NO: 94663 - RNA, 22 nt, Human
uacagugugacauuucuacaaa

SEQ ID NO: 94664 - RNA, 22 nt, Human
uacaguuacugcauuucuaaua

SEQ ID NO: 94665 - RNA, 22 nt, Human
uacaguuacuuugaaaauugau

SEQ ID NO: 94666 - RNA, 22 nt, Human
uacaguuauaugugauaaguaa

SEQ ID NO: 94667 - RNA, 22 nt, Human
uacaguuuacaugagaggaagc

SEQ ID NO: 94668 - RNA, 22 nt, Human
uacaguuucuguccuuguggag

SEQ ID NO: 94669 - RNA, 22 nt, Human
uacauacaagauguguuuaaaa

SEQ ID NO: 94670 - RNA, 22 nt, Human
uacauacacaaauauacuguuu

SEQ ID NO: 94671 - RNA, 22 nt, Human
gcuuccagaucccaugcucuua

SEQ ID NO: 94672 - RNA, 22 nt, Human
gcuuccagcaccagcagagggg

SEQ ID NO: 94673 - RNA, 22 nt, Human
gcuuccagggugggggauguuu

SEQ ID NO: 94674 - RNA, 22 nt, Human
gcuuccaggucauucucacccu

SEQ ID NO: 94675 - RNA, 22 nt, Human
gcuuccagugacuuuggucgug

SEQ ID NO: 94676 - RNA, 22 nt, Human
gcuuccauuugcuaggggauuu

SEQ ID NO: 94677 - RNA, 22 nt, Human
gcuucccaaugugcuaguuucu

SEQ ID NO: 94678 - RNA, 20 nt, Human
gcuucccaauucuugaucug

SEQ ID NO: 94679 - RNA, 22 nt, Human
gcuuccuacaugugucugcgag

SEQ ID NO: 94680 - RNA, 22 nt, Human
gcuuccuagaucugugguacuc

SEQ ID NO: 94681 - RNA, 22 nt, Human
gcuuccuccaucuggggcuugc

SEQ ID NO: 94682 - RNA, 18 nt, Human
gcuuccugaaagcugccc

SEQ ID NO: 94683 - RNA, 22 nt, Human
gcuuccugagaaacaaucugau

SEQ ID NO: 94684 - RNA, 22 nt, Human
gcuuccuggagggagagagcug

SEQ ID NO: 94685 - RNA, 22 nt, Human
gcuuccuguaggcagguccaag

SEQ ID NO: 94686 - RNA, 22 nt, Human
gcuuccuugggaaaauuagaug

SEQ ID NO: 94687 - RNA, 22 nt, Human
gcuucuagggaaggcagucaca

SEQ ID NO: 94688 - RNA, 23 nt, Human
gcuucuagucaauuucaccagga

SEQ ID NO: 94689 - RNA, 22 nt, Human
gcuucuauccuaccaugucuug

SEQ ID NO: 94690 - RNA, 22 nt, Human
gcuucucauguuuauuuuuaca

SEQ ID NO: 94691 - RNA, 22 nt, Human
gcuucucuuguccaagggcagg

SEQ ID NO: 94692 - RNA, 22 nt, Human
gcuucucuuucuccccuggcgg

SEQ ID NO: 94693 - RNA, 22 nt, Human
gcuucuggaggagcugggcuga

SEQ ID NO: 94694 - RNA, 22 nt, Human
gcuucuggcagugcagccacca

SEQ ID NO: 94695 - RNA, 22 nt, Human
gcuucugguagaauucaauaga

SEQ ID NO: 94696 - RNA, 22 nt, Human
gcuucuggugaggccucaggaa

SEQ ID NO: 94697 - RNA, 21 nt, Human
gcuucuguaucuagcaggaac

SEQ ID NO: 94698 - RNA, 22 nt, Human
gcuucugucuuagcuaccuccc

SEQ ID NO: 94699 - RNA, 22 nt, Human
gcuucuguggugcaucuuugcu

SEQ ID NO: 94700 - RNA, 19 nt, Human
gcuucuguuugggcuuaga

SEQ ID NO: 94701 - RNA, 20 nt, Human
gcuucuuuucuggcccauga

SEQ ID NO: 94702 - RNA, 22 nt, Human
gcuugaguuuugggacaaagcc

SEQ ID NO: 94703 - RNA, 22 nt, Human
gcuugcaagauagguuacuuaa

SEQ ID NO: 94704 - RNA, 22 nt, Human
gcuugccuggcauuucuggggc

SEQ ID NO: 94705 - RNA, 21 nt, Human
gcuugccuuccuaucuuuggc

SEQ ID NO: 94706 - RNA, 23 nt, Human
gcuugcucauucuaucacacagc

SEQ ID NO: 94707 - RNA, 22 nt, Human
uagagaaacagaaccaacaggg

SEQ ID NO: 94708 - RNA, 20 nt, Human
uagagagaggauauuaaagu

SEQ ID NO: 94709 - RNA, 16 nt, Human
uagagagggcagggag

SEQ ID NO: 94710 - RNA, 22 nt, Human
uagagauagcaguauugauucg

SEQ ID NO: 94711 - RNA, 22 nt, Human
uagagaugaauucugcagucuu

SEQ ID NO: 94712 - RNA, 22 nt, Human
uagagaugcccuagcugaagua

SEQ ID NO: 94713 - RNA, 22 nt, Human
uagagcagccuucagagcaguu

SEQ ID NO: 94714 - RNA, 23 nt, Human
uagagcauugcugaggccucccu

SEQ ID NO: 94715 - RNA, 22 nt, Human
uagagcuauacacugaguaaaa

SEQ ID NO: 94716 - RNA, 22 nt, Human
uagagcuggaauuugcagcaag

SEQ ID NO: 94717 - RNA, 22 nt, Human
uagagcugggcagugcucugag

SEQ ID NO: 94718 - RNA, 17 nt, Human
uagagcugguucaggag

SEQ ID NO: 94719 - RNA, 22 nt, Human
uagagcuguaucaaagagccuu

SEQ ID NO: 94720 - RNA, 22 nt, Human
uagagcuuagagaaugaguuug

SEQ ID NO: 94721 - RNA, 20 nt, Human
uagagcuuagguuuuauucu

SEQ ID NO: 94722 - RNA, 21 nt, Human
uagagcuuggcacagaguaga

SEQ ID NO: 94723 - RNA, 22 nt, Human
uagaggagaacacaaauuauag

SEQ ID NO: 94724 - RNA, 19 nt, Human
uagaggagaagggaagugg

SEQ ID NO: 94725 - RNA, 22 nt, Human
uagaggaugauccuuccuugcc

SEQ ID NO: 94726 - RNA, 22 nt, Human
uagaggauuuugcauuucauau

SEQ ID NO: 94727 - RNA, 22 nt, Human
uagaggcacagucuauguagag

SEQ ID NO: 94728 - RNA, 22 nt, Human
uagaggcauaagagggaagcag

SEQ ID NO: 94729 - RNA, 22 nt, Human
uagaggcauugcuuaauuucag

SEQ ID NO: 94730 - RNA, 22 nt, Human
uagaggcuccuguguguagguu

SEQ ID NO: 94731 - RNA, 22 nt, Human
uagagggcaggaguguccuacu

SEQ ID NO: 94732 - RNA, 22 nt, Human
uagaggggaaaaugcguauuaa

SEQ ID NO: 94733 - RNA, 18 nt, Human
uagaggggaagaccuuua

SEQ ID NO: 94734 - RNA, 22 nt, Human
uagaggggaaucugccuccucu

SEQ ID NO: 94735 - RNA, 20 nt, Human
uagaggggacaaucauugcc

SEQ ID NO: 94736 - RNA, 22 nt, Human
uagagguagaguuacauuaguc

SEQ ID NO: 94737 - RNA, 22 nt, Human
uagagguagauggucagccaau

SEQ ID NO: 94738 - RNA, 22 nt, Human
uagaggugagauuguggugcug

SEQ ID NO: 94739 - RNA, 22 nt, Human
uagagguguuguugauauagaa

SEQ ID NO: 94740 - RNA, 22 nt, Human
uagaguauauaggccuuugugu

SEQ ID NO: 94741 - RNA, 22 nt, Human
uagagucagagaaucauuacag

SEQ ID NO: 94742 - RNA, 22 nt, Human
uagaguccugugugcucugugg

SEQ ID NO: 94743 - RNA, 22 nt, Human
uagaguguccaacacauaggag

SEQ ID NO: 94744 - RNA, 21 nt, Human
uagagugucugugugggaauu

SEQ ID NO: 94745 - RNA, 18 nt, Human
uagaguuacuacaugauu

SEQ ID NO: 94746 - RNA, 22 nt, Human
uagauacacacacagucaugug

SEQ ID NO: 94747 - RNA, 19 nt, Human
uagauacugaugaacucca

SEQ ID NO: 94748 - RNA, 22 nt, Human
uagauaggugauuaggaaaagc

SEQ ID NO: 94749 - RNA, 22 nt, Human
uagaucauauacuugccaugac

SEQ ID NO: 94750 - RNA, 22 nt, Human
uagaucauuugaauugagguag

SEQ ID NO: 94751 - RNA, 22 nt, Human
uagaucugauacaauucaucug

SEQ ID NO: 94752 - RNA, 23 nt, Human
uagaucuucaucuaauucuguag

SEQ ID NO: 94753 - RNA, 22 nt, Human
uagaucuuguuacagauuuccu

SEQ ID NO: 94754 - RNA, 21 nt, Human
uagaugaaaucagaguauuuc

SEQ ID NO: 94755 - RNA, 22 nt, Human
uagaugauuuucagucaaagca

SEQ ID NO: 94756 - RNA, 22 nt, Human
uagaugcuacaauuuuguacuc

SEQ ID NO: 94757 - RNA, 22 nt, Human
uagauguaagcagaagaacagc

SEQ ID NO: 94758 - RNA, 22 nt, Human
uagauguuuugauauuugcuga

SEQ ID NO: 94759 - RNA, 17 nt, Human
uagauuaaacacggcca

SEQ ID NO: 94760 - RNA, 22 nt, Human
uagauuaagaugccaguuuuga

SEQ ID NO: 94761 - RNA, 22 nt, Human
uagauucuacugucacuuaguu

SEQ ID NO: 94762 - RNA, 22 nt, Human
uagauucucugcuggcugacau

SEQ ID NO: 94763 - RNA, 22 nt, Human
uagauucugacccucuuuuuac

SEQ ID NO: 94764 - RNA, 22 nt, Human
uagauucuggagagacagcagu

SEQ ID NO: 94765 - RNA, 22 nt, Human
uagauucuguaugucugcucuc

SEQ ID NO: 94766 - RNA, 22 nt, Human
uagauucugugagagucaaagu

SEQ ID NO: 94767 - RNA, 22 nt, Human
uagauucuuaguuucauagaau

SEQ ID NO: 94768 - RNA, 22 nt, Human
uagauucuuugcuagaucauug

SEQ ID NO: 94769 - RNA, 22 nt, Human
uagauugauugcaaagacaggc

SEQ ID NO: 94770 - RNA, 22 nt, Human
uagauuguucuuaacuuuauaa

SEQ ID NO: 94771 - RNA, 20 nt, Human
uagauuucauacuucucuuu

SEQ ID NO: 94772 - RNA, 22 nt, Human
uagauuucgcugcaucucaauc

SEQ ID NO: 94773 - RNA, 22 nt, Human
uagauuucucauucauagauug

SEQ ID NO: 94774 - RNA, 22 nt, Human
uagauuugugcaagaagggauu

SEQ ID NO: 94775 - RNA, 22 nt, Human
uagauuuugcauuucuaacaag

SEQ ID NO: 94776 - RNA, 22 nt, Human
uagauuuuuuggagacucucug

SEQ ID NO: 94777 - RNA, 22 nt, Human
uagcaaaaacugcaguuacuuu

SEQ ID NO: 94778 - RNA, 22 nt, Human
uagcaaaauguggauguaguug

SEQ ID NO: 94779 - RNA, 22 nt, Human
uagcaaaggaugacuauguacc

SEQ ID NO: 94780 - RNA, 22 nt, Human
uagcaaagguagaguuuugaga

SEQ ID NO: 94781 - RNA, 22 nt, Human
gcuggcucuacauuugagguca

SEQ ID NO: 94782 - RNA, 22 nt, Human
gcuggcugacagagauuuaaaa

SEQ ID NO: 94783 - RNA, 22 nt, Human
gcuggcugcagauuuuagaggu

SEQ ID NO: 94784 - RNA, 22 nt, Human
gcuggcugcuguugagacuugu

SEQ ID NO: 94785 - RNA, 22 nt, Human
gcuggcuggagugagcuacccu

SEQ ID NO: 94786 - RNA, 22 nt, Human
gcuggcuggcugugcaaaggca

SEQ ID NO: 94787 - RNA, 22 nt, Human
gcuggcuguaucaccuggccag

SEQ ID NO: 94788 - RNA, 21 nt, Human
gcuggcugucucuuacacggu

SEQ ID NO: 94789 - RNA, 22 nt, Human
gcuggcugugauuuugccaaca

SEQ ID NO: 94790 - RNA, 22 nt, Human
gcuggcuguguuucaucucuga

SEQ ID NO: 94791 - RNA, 22 nt, Human
gcuggcuuccaucagaggguga

SEQ ID NO: 94792 - RNA, 22 nt, Human
gcuggcuuccuucugcagcuag

SEQ ID NO: 94793 - RNA, 22 nt, Human
gcuggcuuuaucgucagacucc

SEQ ID NO: 94794 - RNA, 22 nt, Human
gcugggaaguggcagagcugga

SEQ ID NO: 94795 - RNA, 22 nt, Human
gcugggagacagacuuggaacc

SEQ ID NO: 94796 - RNA, 22 nt, Human
gcugggaggaauuuggggaaua

SEQ ID NO: 94797 - RNA, 22 nt, Human
gcugggagucgcgucuguggcc

SEQ ID NO: 94798 - RNA, 22 nt, Human
gcugggaguuugauuugacugg

SEQ ID NO: 94799 - RNA, 22 nt, Human
gcugggcagcaggcucuccggg

SEQ ID NO: 94800 - RNA, 22 nt, Human
gcugggcagcugaggccucuca

SEQ ID NO: 94801 - RNA, 22 nt, Human
gcugggcagugagugaguccuu

SEQ ID NO: 94802 - RNA, 21 nt, Human
gcugggccuguacuugcccug

SEQ ID NO: 94803 - RNA, 21 nt, Human
gcugggcuccagucugccgcu

SEQ ID NO: 94804 - RNA, 22 nt, Human
gcugggcucugucaugccuucc

SEQ ID NO: 94805 - RNA, 22 nt, Human
gcugggcugagcuagacuuggc

SEQ ID NO: 94806 - RNA, 22 nt, Human
gcugggcuguaguuugcugacc

SEQ ID NO: 94807 - RNA, 22 nt, Human
gcugggcuuguggccagcuggg

SEQ ID NO: 94808 - RNA, 19 nt, Human
gcuggggaauggauauuga

SEQ ID NO: 94809 - RNA, 18 nt, Human
gcugggguugagcucucc

SEQ ID NO: 94810 - RNA, 22 nt, Human
gcuggguauuuuaagaaaggaa

SEQ ID NO: 94811 - RNA, 22 nt, Human
gcugggucagaaucucccugug

SEQ ID NO: 94812 - RNA, 22 nt, Human
gcuggguccuaugcugguagag

SEQ ID NO: 94813 - RNA, 19 nt, Human
gcugggugaggucguugga

SEQ ID NO: 94814 - RNA, 22 nt, Human
gcuggguggaucggaggcucug

SEQ ID NO: 94815 - RNA, 19 nt, Human
gcugggugggguccacagc

SEQ ID NO: 94816 - RNA, 22 nt, Human
gcugguaggaagugcuccugcc

SEQ ID NO: 94817 - RNA, 22 nt, Human
gcugguccaauuaugaacuguu

SEQ ID NO: 94818 - RNA, 22 nt, Human
gcugguccauuggcacugcuca

SEQ ID NO: 94819 - RNA, 17 nt, Human
gcugguccuugguaacu

SEQ ID NO: 94820 - RNA, 22 nt, Human
gcuggugucuaaccuggcucuu

SEQ ID NO: 94821 - RNA, 22 nt, Human
ggacaguugguugggcucuugu

SEQ ID NO: 94822 - RNA, 22 nt, Human
ggacauagaggcccugcauggc

SEQ ID NO: 94823 - RNA, 22 nt, Human
ggacaucucuugccagggcugc

SEQ ID NO: 94824 - RNA, 22 nt, Human
ggacaucuugguugcuuccaag

SEQ ID NO: 94825 - RNA, 22 nt, Human
ggacaugaagcaaaaugggagg

SEQ ID NO: 94826 - RNA, 22 nt, Human
ggacaugauauuucaggaagac

SEQ ID NO: 94827 - RNA, 19 nt, Human
ggacauuugaguuguuuau

SEQ ID NO: 94828 - RNA, 22 nt, Human
ggacauuuuucuuccuacaaug

SEQ ID NO: 94829 - RNA, 22 nt, Human
ggaccacagugcauggccugua

SEQ ID NO: 94830 - RNA, 18 nt, Human
ggaccacaucaacuugaa

SEQ ID NO: 94831 - RNA, 22 nt, Human
ggaccacauugagagucauuaa

SEQ ID NO: 94832 - RNA, 22 nt, Human
ggaccagagcucgggcuucuca

SEQ ID NO: 94833 - RNA, 22 nt, Human
ggaccaggcaagcugaggcggg

SEQ ID NO: 94834 - RNA, 22 nt, Human
ggaccaggccagccucccugcg

SEQ ID NO: 94835 - RNA, 17 nt, Human
ggaccagggguugccau

SEQ ID NO: 94836 - RNA, 20 nt, Human
ggaccagguggggcgguggc

SEQ ID NO: 94837 - RNA, 22 nt, Human
ggacccugcagccacccgacau

SEQ ID NO: 94838 - RNA, 22 nt, Human
ggacccuggagacccacuggga

SEQ ID NO: 94839 - RNA, 22 nt, Human
ggacccugggcuugcuccuggg

SEQ ID NO: 94840 - RNA, 22 nt, Human
ggaccgguggcuuccucggguc

SEQ ID NO: 94841 - RNA, 22 nt, Human
ggaccugaacauaaaacgaggc

SEQ ID NO: 94842 - RNA, 22 nt, Human
ggaccugauguuuagucuuguu

SEQ ID NO: 94843 - RNA, 19 nt, Human
ggaccuggcaaucugcauu

SEQ ID NO: 94844 - RNA, 22 nt, Human
ggaccugugucuacagcaugug

SEQ ID NO: 94845 - RNA, 22 nt, Human
ggaccuuccuggcuccuggggu

SEQ ID NO: 94846 - RNA, 18 nt, Human
ggacuacaggcacaggga

SEQ ID NO: 94847 - RNA, 22 nt, Human
ggacucagcagccaggaguggc

SEQ ID NO: 94848 - RNA, 22 nt, Human
ggacucucaggcugucggcuuc

SEQ ID NO: 94849 - RNA, 22 nt, Human
ggacugaaaucuuuccauguca

SEQ ID NO: 94850 - RNA, 22 nt, Human
ggacugaauggaagauauaugg

SEQ ID NO: 94851 - RNA, 22 nt, Human
ggacugaggcccacuugaggga

SEQ ID NO: 94852 - RNA, 22 nt, Human
ggacuggccggcgcugaggccc

SEQ ID NO: 94853 - RNA, 22 nt, Human
ggacugggaaucagggagaugc

SEQ ID NO: 94854 - RNA, 22 nt, Human
ggacuggguaggagcccagggc

SEQ ID NO: 94855 - RNA, 22 nt, Human
ggacugggucacuaagauagua

SEQ ID NO: 94856 - RNA, 22 nt, Human
ggacuggucugagagggauuca

SEQ ID NO: 94857 - RNA, 22 nt, Human
ggacuucuggggacuguagauu

SEQ ID NO: 94858 - RNA, 22 nt, Human
ggacuugcaggggagacugcgu

SEQ ID NO: 94859 - RNA, 22 nt, Human
ggacuuuagcagcuggagagga

SEQ ID NO: 94860 - RNA, 22 nt, Human
ggagaaagaaauuuuugauugg

SEQ ID NO: 94861 - RNA, 22 nt, Human
ggagaaaguacagcaggcaaca

SEQ ID NO: 94862 - RNA, 18 nt, Human
ggagaagaacagaugugg

SEQ ID NO: 94863 - RNA, 22 nt, Human
ggagaagaggagcuggaagccu

SEQ ID NO: 94864 - RNA, 22 nt, Human
ggagaagccaggugauaagcaa

SEQ ID NO: 94865 - RNA, 22 nt, Human
ggagaagguggcucagcaaagg

SEQ ID NO: 94866 - RNA, 22 nt, Human
ggagaaugauauauagcucagu

SEQ ID NO: 94867 - RNA, 22 nt, Human
ggagaauggccaucuuuucaga

SEQ ID NO: 94868 - RNA, 22 nt, Human
ggagacacgggugcugaggacc

SEQ ID NO: 94869 - RNA, 22 nt, Human
ggagacagcaggaagaaauauc

SEQ ID NO: 94870 - RNA, 22 nt, Human
ggagacagugacuuagagacug

SEQ ID NO: 94871 - RNA, 22 nt, Human
ggagacagugguagggccuaag

SEQ ID NO: 94872 - RNA, 22 nt, Human
ggagacauauuccagagcuggg

SEQ ID NO: 94873 - RNA, 22 nt, Human
ggagacucaccccgcauucuag

SEQ ID NO: 94874 - RNA, 22 nt, Human
ggagagaaauugagguagcaag

SEQ ID NO: 94875 - RNA, 22 nt, Human
ggagagaacugaccugaaagga

SEQ ID NO: 94876 - RNA, 22 nt, Human
ggagagagaugccgccuugcuc

SEQ ID NO: 94877 - RNA, 22 nt, Human
ggagagauaggaguccuggacu

SEQ ID NO: 94878 - RNA, 22 nt, Human
ggagagcauucuuagucuguuu

SEQ ID NO: 94879 - RNA, 22 nt, Human
ggagagcugaagcauggacagg

SEQ ID NO: 94880 - RNA, 22 nt, Human
ggagagcugacaucaugauguu

SEQ ID NO: 94881 - RNA, 22 nt, Human
ggagagcugguauaugaagaca

SEQ ID NO: 94882 - RNA, 22 nt, Human
ggagaggagauuguggcauuuu

SEQ ID NO: 94883 - RNA, 22 nt, Human
ggagaggagcuauugggggcuc

SEQ ID NO: 94884 - RNA, 22 nt, Human
ggagaggauguuuuaguaacuu

SEQ ID NO: 94885 - RNA, 22 nt, Human
ggagaggcgaugagucacagcc

SEQ ID NO: 94886 - RNA, 22 nt, Human
ggagaggcuuccagagucgugc

SEQ ID NO: 94887 - RNA, 22 nt, Human
ggagagguuauccguguuaugu

SEQ ID NO: 94888 - RNA, 22 nt, Human
ggagagucugccgagccagccc

SEQ ID NO: 94889 - RNA, 22 nt, Human
ggagagucugcuggccacagug

SEQ ID NO: 94890 - RNA, 23 nt, Human
uagcuguggcguaaggcucagcu

SEQ ID NO: 94891 - RNA, 22 nt, Human
uagcuguguaugguuuacaaau

SEQ ID NO: 94892 - RNA, 22 nt, Human
uagcugugugaugggaaaccuu

SEQ ID NO: 94893 - RNA, 22 nt, Human
uagcuguucauguggcuuuaug

SEQ ID NO: 94894 - RNA, 22 nt, Human
uagcuguucccagcucugugua

SEQ ID NO: 94895 - RNA, 22 nt, Human
uagcuucaugcuucaccacgcu

SEQ ID NO: 94896 - RNA, 21 nt, Human
uagcuuccagcucaagcugag

SEQ ID NO: 94897 - RNA, 22 nt, Human
uagcuucuauacaacuucagca

SEQ ID NO: 94898 - RNA, 22 nt, Human
uagcuucucauaauuuaugcug

SEQ ID NO: 94899 - RNA, 22 nt, Human
uagcuuguacugcaguagagaa

SEQ ID NO: 94900 - RNA, 22 nt, Human
uagcuugucagugaauagcugu

SEQ ID NO: 94901 - RNA, 22 nt, Human
uagcuuuaagacauggugaaug

SEQ ID NO: 94902 - RNA, 22 nt, Human
uagcuuuacaaagugcugcacc

SEQ ID NO: 94903 - RNA, 22 nt, Human
uagcuuuaccauagaagaguau

SEQ ID NO: 94904 - RNA, 22 nt, Human
uagcuuuagaaauauucucaga

SEQ ID NO: 94905 - RNA, 22 nt, Human
uagcuuuaggcacguuugaauu

SEQ ID NO: 94906 - RNA, 22 nt, Human
uagcuuuccuuguugccugugc

SEQ ID NO: 94907 - RNA, 22 nt, Human
uagcuuugaaguuauuuaacag

SEQ ID NO: 94908 - RNA, 22 nt, Human
uagcuuuguauuaucagcauug

SEQ ID NO: 94909 - RNA, 22 nt, Human
uagcuuuguccuccacccucag

SEQ ID NO: 94910 - RNA, 22 nt, Human
uagcuuugugaaguuuacagac

SEQ ID NO: 94911 - RNA, 22 nt, Human
uagcuuuguuuaucaaggggca

SEQ ID NO: 94912 - RNA, 22 nt, Human
uaggaaaaauacagaauuauau

SEQ ID NO: 94913 - RNA, 22 nt, Human
uaggaaacaaaccugccucuuc

SEQ ID NO: 94914 - RNA, 22 nt, Human
uaggaaacaaagcuuagcagga

SEQ ID NO: 94915 - RNA, 22 nt, Human
uaggaaacaaaguaaugcaacu

SEQ ID NO: 94916 - RNA, 22 nt, Human
uaggaaacuaauacagucugga

SEQ ID NO: 94917 - RNA, 22 nt, Human
uaggaaacucucagcuggucau

SEQ ID NO: 94918 - RNA, 22 nt, Human
uaggaaagaaaugaguagugau

SEQ ID NO: 94919 - RNA, 22 nt, Human
uaggaaauaaauacuuaugguu

SEQ ID NO: 94920 - RNA, 18 nt, Human
uaggaaauagggcuguga

SEQ ID NO: 94921 - RNA, 20 nt, Human
uaggaaauauguuuuuaccc

SEQ ID NO: 94922 - RNA, 22 nt, Human
uaggaaauauugauuucaguca

SEQ ID NO: 94923 - RNA, 22 nt, Human
uaggaaauauuugaacauagga

SEQ ID NO: 94924 - RNA, 22 nt, Human
uaggaaauuaagucucuuuugu

SEQ ID NO: 94925 - RNA, 22 nt, Human
uaggaaauuagaacuuggaaac

SEQ ID NO: 94926 - RNA, 22 nt, Human
uaggaaauuucauuugaggucu

SEQ ID NO: 94927 - RNA, 22 nt, Human
uaggaaauuuuacuggucuggg

SEQ ID NO: 94928 - RNA, 22 nt, Human
uaggaacaaaagguuuuccuga

SEQ ID NO: 94929 - RNA, 22 nt, Human
uaggaacacacauguguagcug

SEQ ID NO: 94930 - RNA, 22 nt, Human
uaggaacaguccuagaaaucug

SEQ ID NO: 94931 - RNA, 22 nt, Human
uaggaacccgcagcaguccgag

SEQ ID NO: 94932 - RNA, 22 nt, Human
uaggaacuagacucaugacuca

SEQ ID NO: 94933 - RNA, 21 nt, Human
uaggaacuguucugagugguc

SEQ ID NO: 94934 - RNA, 22 nt, Human
uaggaagaaacuuucccugcag

SEQ ID NO: 94935 - RNA, 23 nt, Human
uaggaagacagcaaaagaaugga

SEQ ID NO: 94936 - RNA, 22 nt, Human
gcugguucaccuggcuccuccc

SEQ ID NO: 94937 - RNA, 22 nt, Human
gcuguacaggguuauccuuucc

SEQ ID NO: 94938 - RNA, 22 nt, Human
gcuguacaguuuacuagguggg

SEQ ID NO: 94939 - RNA, 22 nt, Human
gcuguacauucugcacaggccc

SEQ ID NO: 94940 - RNA, 22 nt, Human
gcuguacauucuguggguuugg

SEQ ID NO: 94941 - RNA, 22 nt, Human
gcuguacauuuguguacacuug

SEQ ID NO: 94942 - RNA, 22 nt, Human
gcuguaggaaugacauguaccu

SEQ ID NO: 94943 - RNA, 22 nt, Human
gcuguagggugucauaugaagc

SEQ ID NO: 94944 - RNA, 22 nt, Human
gcuguagguucagucuccaugc

SEQ ID NO: 94945 - RNA, 22 nt, Human
gcuguagguuuuuccaggaguu

SEQ ID NO: 94946 - RNA, 22 nt, Human
gcugucaagguagaaaacagag

SEQ ID NO: 94947 - RNA, 22 nt, Human
gcugucacaaauauuucucagc

SEQ ID NO: 94948 - RNA, 22 nt, Human
gcugucacaucaaggcacuaaa

SEQ ID NO: 94949 - RNA, 22 nt, Human
gcugucagaaggugaaggguaa

SEQ ID NO: 94950 - RNA, 23 nt, Human
gcugucaguuguuuuugucucua

SEQ ID NO: 94951 - RNA, 22 nt, Human
gcuguccaccuccagagccuua

SEQ ID NO: 94952 - RNA, 22 nt, Human
gcuguccagguuguggagcaac

SEQ ID NO: 94953 - RNA, 22 nt, Human
gcugucccaugguugcaagaug

SEQ ID NO: 94954 - RNA, 22 nt, Human
gcuguccucgucucucacgcaa

SEQ ID NO: 94955 - RNA, 18 nt, Human
gcugucugaggucugagg

SEQ ID NO: 94956 - RNA, 22 nt, Human
gcugucugaguaagagaauccu

SEQ ID NO: 94957 - RNA, 22 nt, Human
gcugucugccgcaggcugccac

SEQ ID NO: 94958 - RNA, 22 nt, Human
gcugucuggaggcucugaggga

SEQ ID NO: 94959 - RNA, 22 nt, Human
gcugucugucucugucccacca

SEQ ID NO: 94960 - RNA, 22 nt, Human
gcugucuguucgagcguguguu

SEQ ID NO: 94961 - RNA, 22 nt, Human
gcugucuuggaaaaggcaaaga

SEQ ID NO: 94962 - RNA, 22 nt, Human
gcugucuuggguagaaagaggu

SEQ ID NO: 94963 - RNA, 22 nt, Human
gcugugagcacugcugggugga

SEQ ID NO: 94964 - RNA, 22 nt, Human
gcugugagggcuucugaggcau

SEQ ID NO: 94965 - RNA, 22 nt, Human
gcugugagggucuagugaggug

SEQ ID NO: 94966 - RNA, 22 nt, Human
gcugugauguggagggugcuga

SEQ ID NO: 94967 - RNA, 22 nt, Human
gcugugauugucagucuucaau

SEQ ID NO: 94968 - RNA, 23 nt, Human
gcugugcacgagccacugccugu

SEQ ID NO: 94969 - RNA, 21 nt, Human
gcugugcagaggauggagugg

SEQ ID NO: 94970 - RNA, 21 nt, Human
gcugugcaggauugaaagcag

SEQ ID NO: 94971 - RNA, 22 nt, Human
gcugugcagguccccacugccu

SEQ ID NO: 94972 - RNA, 21 nt, Human
gcugugcaggugccccugcuc

SEQ ID NO: 94973 - RNA, 22 nt, Human
gcugugcaguaguagguacagu

SEQ ID NO: 94974 - RNA, 22 nt, Human
gcugugcagucuuuggugugcc

SEQ ID NO: 94975 - RNA, 22 nt, Human
gcugugcagugggaguucggug

SEQ ID NO: 94976 - RNA, 22 nt, Human
gcugugcauugagccugagagu

SEQ ID NO: 94977 - RNA, 22 nt, Human
gcugugcccagccauucuagau

SEQ ID NO: 94978 - RNA, 19 nt, Human
gcugugccucucuccugcu

SEQ ID NO: 94979 - RNA, 22 nt, Human
gcugugcugcgggaggauuccg

SEQ ID NO: 94980 - RNA, 22 nt, Human
gcugugcuggaaggggaccugc

SEQ ID NO: 94981 - RNA, 22 nt, Human
gcugugcuugcaugagugucug

SEQ ID NO: 94982 - RNA, 22 nt, Human
gcugugcuugggaagaaucucu

SEQ ID NO: 94983 - RNA, 22 nt, Human
gcugugcuuuugguagauccca

SEQ ID NO: 94984 - RNA, 22 nt, Human
gcuguggccgucagggaaaugg

SEQ ID NO: 94985 - RNA, 22 nt, Human
gcuguggcgauugguaucgauu

SEQ ID NO: 94986 - RNA, 22 nt, Human
gcuguggcucucacaagcaaau

SEQ ID NO: 94987 - RNA, 22 nt, Human
gcuguggcugaagaugcaggga

SEQ ID NO: 94988 - RNA, 22 nt, Human
gcuguggcugacauugcagaca

SEQ ID NO: 94989 - RNA, 22 nt, Human
gcuguggcugaccaccaggggg

SEQ ID NO: 94990 - RNA, 22 nt, Human
gcuguggcuugcagcuggggcu

SEQ ID NO: 94991 - RNA, 22 nt, Human
gcugugggacagguccagccag

SEQ ID NO: 94992 - RNA, 22 nt, Human
gcugugggccacacggcugagu

SEQ ID NO: 94993 - RNA, 22 nt, Human
gcuguggggagagaacacacaa

SEQ ID NO: 94994 - RNA, 22 nt, Human
gcuguggucugugagcuccaaa

SEQ ID NO: 94995 - RNA, 22 nt, Human
gcuguguccucacacagccuuu

SEQ ID NO: 94996 - RNA, 22 nt, Human
gcugugugaaaacugggccugg

SEQ ID NO: 94997 - RNA, 22 nt, Human
gcugugugacccuagccaguag

SEQ ID NO: 94998 - RNA, 19 nt, Human
gcugugugaccuugggcaa

SEQ ID NO: 94999 - RNA, 22 nt, Human
uaggcugggaagaaagauucuc

SEQ ID NO: 95000 - RNA, 22 nt, Human
uaggcugggccugccuuccagg

SEQ ID NO: 95001 - RNA, 22 nt, Human
uaggcugggcugagcuggacgg

SEQ ID NO: 95002 - RNA, 18 nt, Human
uaggcugggggcuguagu

SEQ ID NO: 95003 - RNA, 22 nt, Human
uagggaagcuccugauuccccu

SEQ ID NO: 95004 - RNA, 22 nt, Human
uagggacccucccugcucuaac

SEQ ID NO: 95005 - RNA, 22 nt, Human
uagggaccuuagaauuguaugu

SEQ ID NO: 95006 - RNA, 22 nt, Human
uagggacuaguuucaaggcuaa

SEQ ID NO: 95007 - RNA, 22 nt, Human
uagggagaaacaccaauuuauu

SEQ ID NO: 95008 - RNA, 22 nt, Human
uagggaggaggguuuucaaauc

SEQ ID NO: 95009 - RNA, 22 nt, Human
uagggagugcguagcagggugg

SEQ ID NO: 95010 - RNA, 22 nt, Human
uagggaugagcaacugguagug

SEQ ID NO: 95011 - RNA, 22 nt, Human
uagggaugauggagccuaugua

SEQ ID NO: 95012 - RNA, 22 nt, Human
uagggcagcugcaucaggcacu

SEQ ID NO: 95013 - RNA, 22 nt, Human
uagggcaguuucauguuaucuu

SEQ ID NO: 95014 - RNA, 22 nt, Human
uagggccagauaggcuucuuga

SEQ ID NO: 95015 - RNA, 22 nt, Human
uagggcuauucugaguaauaau

SEQ ID NO: 95016 - RNA, 22 nt, Human
uagggcucgggcacaggacagg

SEQ ID NO: 95017 - RNA, 18 nt, Human
uagggcucuagggaguga

SEQ ID NO: 95018 - RNA, 21 nt, Human
uagggcucucugugucaggug

SEQ ID NO: 95019 - RNA, 22 nt, Human
uagggcucugagaguucagccu

SEQ ID NO: 95020 - RNA, 22 nt, Human
uagggcugaggcaacaagggag

SEQ ID NO: 95021 - RNA, 22 nt, Human
uagggcugcagaacaauggccu

SEQ ID NO: 95022 - RNA, 22 nt, Human
uagggcuuugcgauggcuauuc

SEQ ID NO: 95023 - RNA, 22 nt, Human
uagggcuuugcucauccuaggu

SEQ ID NO: 95024 - RNA, 22 nt, Human
uaggggaaagcagaauccugga

SEQ ID NO: 95025 - RNA, 22 nt, Human
uaggggaagucucagaaugcag

SEQ ID NO: 95026 - RNA, 22 nt, Human
uaggggcuuguaauuuaauaga

SEQ ID NO: 95027 - RNA, 22 nt, Human
uagggggcuuugcugcuugaca

SEQ ID NO: 95028 - RNA, 22 nt, Human
uaggggugaggccaggcaucag

SEQ ID NO: 95029 - RNA, 22 nt, Human
uagggguggagcuaagaguccc

SEQ ID NO: 95030 - RNA, 22 nt, Human
uagggguguuucgagagagguu

SEQ ID NO: 95031 - RNA, 22 nt, Human
uagggucccagauaggagccag

SEQ ID NO: 95032 - RNA, 22 nt, Human
uagggugcaugacaagaucccu

SEQ ID NO: 95033 - RNA, 22 nt, Human
uagggugcuuaauacuagauuu

SEQ ID NO: 95034 - RNA, 22 nt, Human
uagggugguuagaaggaguaug

SEQ ID NO: 95035 - RNA, 23 nt, Human
uaggguguuaagucagugauuga

SEQ ID NO: 95036 - RNA, 22 nt, Human
uagguacaaggagggauucuug

SEQ ID NO: 95037 - RNA, 22 nt, Human
uagguacagcuaaaaauuaucu

SEQ ID NO: 95038 - RNA, 22 nt, Human
uagguagcuuuggcguuucuug

SEQ ID NO: 95039 - RNA, 22 nt, Human
uagguaguuacacagcaaugua

SEQ ID NO: 95040 - RNA, 22 nt, Human
uagguaguuuccuguuguuggg

SEQ ID NO: 95041 - RNA, 22 nt, Human
uaggucuguacccuguccuucu

SEQ ID NO: 95042 - RNA, 22 nt, Human
uaggugagguuacaagaguuca

SEQ ID NO: 95043 - RNA, 22 nt, Human
uaggugguuauaaauucaaggc

SEQ ID NO: 95044 - RNA, 17 nt, Human
uaggugguugcuggucu

SEQ ID NO: 95045 - RNA, 22 nt, Human
uaggugguugucugcuuuccua

SEQ ID NO: 95046 - RNA, 22 nt, Human
uaggugucugcucuuauuuaac

SEQ ID NO: 95047 - RNA, 22 nt, Human
uaggugucuguccugggcugug

SEQ ID NO: 95048 - RNA, 20 nt, Human
uaggugucuuugccagcuuu

SEQ ID NO: 95049 - RNA, 22 nt, Human
uagguucacuuagcugugggaa

SEQ ID NO: 95050 - RNA, 22 nt, Human
uagguucagagaacugaaaaua

SEQ ID NO: 95051 - RNA, 22 nt, Human
gcuucccaaacuuguggauaga

SEQ ID NO: 95052 - RNA, 22 nt, Human
gcuucccacagcuggacugggg

SEQ ID NO: 95053 - RNA, 22 nt, Human
gcuucccauaguggaauucggg

SEQ ID NO: 95054 - RNA, 22 nt, Human
gcuuccgcgauguccuaggugg

SEQ ID NO: 95055 - RNA, 22 nt, Human
gcuuccggagccaaaaggcccc

SEQ ID NO: 95056 - RNA, 22 nt, Human
gcuuccuagcauuagccauugc

SEQ ID NO: 95057 - RNA, 22 nt, Human
gcuuccucaccuucucuugcau

SEQ ID NO: 95058 - RNA, 22 nt, Human
gcuuccuccagggaggggccug

SEQ ID NO: 95059 - RNA, 22 nt, Human
gcuuccugucccucagccauga

SEQ ID NO: 95060 - RNA, 20 nt, Human
gcuuccuucccagcccccac

SEQ ID NO: 95061 - RNA, 22 nt, Human
gcuuccuuccuuacauuggugg

SEQ ID NO: 95062 - RNA, 22 nt, Human
gcuuccuucuaccacaucaugc

SEQ ID NO: 95063 - RNA, 22 nt, Human
gcuucgggguccaagcgcgugu

SEQ ID NO: 95064 - RNA, 22 nt, Human
gcuucuacccacgagaugcaaa

SEQ ID NO: 95065 - RNA, 22 nt, Human
gcuucuaugcuucaagagagag

SEQ ID NO: 95066 - RNA, 20 nt, Human
gcuucucagggcuucucuga

SEQ ID NO: 95067 - RNA, 15 nt, Human
gcuucuccagaugac

SEQ ID NO: 95068 - RNA, 22 nt, Human
gcuucucccuacagaugucagu

SEQ ID NO: 95069 - RNA, 22 nt, Human
gcuucucgggccugaugucguc

SEQ ID NO: 95070 - RNA, 22 nt, Human
gcuucucuggcuggucugccac

SEQ ID NO: 95071 - RNA, 22 nt, Human
gcuucugaggaaggcucagccu

SEQ ID NO: 95072 - RNA, 22 nt, Human
gcuucugaguucuugcuuaaua

SEQ ID NO: 95073 - RNA, 22 nt, Human
gcuucugcuguugaagccacca

SEQ ID NO: 95074 - RNA, 17 nt, Human
gcuucuggagcuucugu

SEQ ID NO: 95075 - RNA, 22 nt, Human
gcuucuggagucuucagaggaa

SEQ ID NO: 95076 - RNA, 22 nt, Human
gcuucuguauuuauuguccuuu

SEQ ID NO: 95077 - RNA, 22 nt, Human
gcuucugugagugcagaugcug

SEQ ID NO: 95078 - RNA, 22 nt, Human
gcuucuguggauuggcuggcuu

SEQ ID NO: 95079 - RNA, 22 nt, Human
gcuucuuuccuugggcuggaac

SEQ ID NO: 95080 - RNA, 22 nt, Human
gcuugagaacuucaacucagug

SEQ ID NO: 95081 - RNA, 22 nt, Human
gcuugcagcaggugcuuaggaa

SEQ ID NO: 95082 - RNA, 22 nt, Human
gcuugcaugauuggagugggug

SEQ ID NO: 95083 - RNA, 22 nt, Human
gcuugccuaucugguggucguu

SEQ ID NO: 95084 - RNA, 22 nt, Human
gcuugcucaacccccgucucuc

SEQ ID NO: 95085 - RNA, 22 nt, Human
gcuugcugaacaggaaccuggc

SEQ ID NO: 95086 - RNA, 19 nt, Human
gcuugcuuuaugaaggggg

SEQ ID NO: 95087 - RNA, 22 nt, Human
gcuugcuuuguaaauaucugug

SEQ ID NO: 95088 - RNA, 22 nt, Human
gcuuggaaguaggauugggaga

SEQ ID NO: 95089 - RNA, 22 nt, Human
gcuuggcagggccugcuggagc

SEQ ID NO: 95090 - RNA, 20 nt, Human
gcuuggcagguuuuguugcc

SEQ ID NO: 95091 - RNA, 22 nt, Human
gcuugggaaacguaguuccuag

SEQ ID NO: 95092 - RNA, 22 nt, Human
gcuugggacuggagaauagggu

SEQ ID NO: 95093 - RNA, 22 nt, Human
gcuugggagaggguccccagga

SEQ ID NO: 95094 - RNA, 22 nt, Human
gcuuggggucaugaggcugcug

SEQ ID NO: 95095 - RNA, 22 nt, Human
gcuugguuucuaacuuuucaua

SEQ ID NO: 95096 - RNA, 22 nt, Human
gcuugucugcugagccaccugu

SEQ ID NO: 95097 - RNA, 23 nt, Human
gcuuguguauacaggaggccacc

SEQ ID NO: 95098 - RNA, 22 nt, Human
gcuuuacaacaaauugaauaug

SEQ ID NO: 95099 - RNA, 22 nt, Human
gcuuuacugagaugacacaggg

SEQ ID NO: 95100 - RNA, 23 nt, Human
gcuuuauaguucucccaacauua

SEQ ID NO: 95101 - RNA, 22 nt, Human
gcuuuaugcaaaccugguacuu

SEQ ID NO: 95102 - RNA, 22 nt, Human
gcuuuaugggccaugcgguguc

SEQ ID NO: 95103 - RNA, 22 nt, Human
gcuuucagggucacugucaaca

SEQ ID NO: 95104 - RNA, 22 nt, Human
gcuuucuaggcagagaugacug

SEQ ID NO: 95105 - RNA, 20 nt, Human
gcuuucuaugagauggacug

SEQ ID NO: 95106 - RNA, 22 nt, Human
gcuuucugaagcaguguuucuc

SEQ ID NO: 95107 - RNA, 22 nt, Human
gcuuucugguucucaaagcacu

SEQ ID NO: 95108 - RNA, 22 nt, Human
ggaauucaguggccagacauga

SEQ ID NO: 95109 - RNA, 22 nt, Human
ggaauuuagauguuucucaacu

SEQ ID NO: 95110 - RNA, 22 nt, Human
ggacaaaccaauagacacuggc

SEQ ID NO: 95111 - RNA, 22 nt, Human
ggacaaagcucugcugccuccc

SEQ ID NO: 95112 - RNA, 22 nt, Human
ggacaaagggcuagccacaacu

SEQ ID NO: 95113 - RNA, 22 nt, Human
ggacaaagguagacagucucug

SEQ ID NO: 95114 - RNA, 22 nt, Human
ggacaagccucagacaaaacuc

SEQ ID NO: 95115 - RNA, 22 nt, Human
ggacaagccugugaguggguuu

SEQ ID NO: 95116 - RNA, 22 nt, Human
ggacacaagcuccggggcugca

SEQ ID NO: 95117 - RNA, 23 nt, Human
ggacacagagauaagugagacaa

SEQ ID NO: 95118 - RNA, 18 nt, Human
ggacacagauagguacag

SEQ ID NO: 95119 - RNA, 22 nt, Human
ggacacaggcagcugggugggu

SEQ ID NO: 95120 - RNA, 19 nt, Human
ggacacccuaucaauaccu

SEQ ID NO: 95121 - RNA, 17 nt, Human
ggacaccuggagucucc

SEQ ID NO: 95122 - RNA, 22 nt, Human
ggacacugaagaaucucagaug

SEQ ID NO: 95123 - RNA, 23 nt, Human
ggacacugugcagaugcuagugc

SEQ ID NO: 95124 - RNA, 22 nt, Human
ggacacuuugaguugaaggggu

SEQ ID NO: 95125 - RNA, 22 nt, Human
ggacagaaaccauaugagugua

SEQ ID NO: 95126 - RNA, 22 nt, Human
ggacagagggcaggagcccaga

SEQ ID NO: 95127 - RNA, 22 nt, Human
ggacaggagugaggcggguucc

SEQ ID NO: 95128 - RNA, 22 nt, Human
ggacaggccuggcacaguacug

SEQ ID NO: 95129 - RNA, 22 nt, Human
ggacaggcugcaucugagcaug

SEQ ID NO: 95130 - RNA, 22 nt, Human
ggacagggaucauuaucugagc

SEQ ID NO: 95131 - RNA, 19 nt, Human
ggacagggggagcuuuuau

SEQ ID NO: 95132 - RNA, 22 nt, Human
ggacaggugacugcccagagug

SEQ ID NO: 95133 - RNA, 22 nt, Human
ggacaguagucacuaaacuaga

SEQ ID NO: 95134 - RNA, 22 nt, Human
ggacagugaauguggggaugca

SEQ ID NO: 95135 - RNA, 20 nt, Human
ggacagugagacauaucuca

SEQ ID NO: 95136 - RNA, 19 nt, Human
ggacaucacucuaagccuu

SEQ ID NO: 95137 - RNA, 18 nt, Human
ggacaucaucaggugcuu

SEQ ID NO: 95138 - RNA, 22 nt, Human
ggacaucuguugugguagagga

SEQ ID NO: 95139 - RNA, 21 nt, Human
ggacaugaggcaggagaggcu

SEQ ID NO: 95140 - RNA, 22 nt, Human
ggacaugauuagcagggagagc

SEQ ID NO: 95141 - RNA, 22 nt, Human
ggacauugaagcuggaaaggga

SEQ ID NO: 95142 - RNA, 22 nt, Human
ggacauuucuauugagcuaaga

SEQ ID NO: 95143 - RNA, 22 nt, Human
ggaccagagaagugagcaccug

SEQ ID NO: 95144 - RNA, 22 nt, Human
ggaccagcuaucaaugccaggg

SEQ ID NO: 95145 - RNA, 20 nt, Human
ggaccagcugucugaggggc

SEQ ID NO: 95146 - RNA, 19 nt, Human
ggaccagcuuucaggaggc

SEQ ID NO: 95147 - RNA, 22 nt, Human
ggaccaggggcgcacucccugc

SEQ ID NO: 95148 - RNA, 22 nt, Human
ggaccaguuucaaacuguacca

SEQ ID NO: 95149 - RNA, 22 nt, Human
ggacccacagauucuucauucu

SEQ ID NO: 95150 - RNA, 23 nt, Human
ggacccacggucuuugaggcucu

SEQ ID NO: 95151 - RNA, 22 nt, Human
ggacccagguagggaggaagau

SEQ ID NO: 95152 - RNA, 22 nt, Human
ggacccugcguguauccacacu

SEQ ID NO: 95153 - RNA, 20 nt, Human
ggacccuggguucuucugag

SEQ ID NO: 95154 - RNA, 22 nt, Human
ggacccuuggcuucugcagauu

SEQ ID NO: 95155 - RNA, 20 nt, Human
ggacuacaauuugcagugug

SEQ ID NO: 95156 - RNA, 22 nt, Human
ggacucaggcugguguucggac

SEQ ID NO: 95157 - RNA, 21 nt, Human
ggacucuacacaggccaucuu

SEQ ID NO: 95158 - RNA, 20 nt, Human
ggacugaaaacacaaaccug

SEQ ID NO: 95159 - RNA, 22 nt, Human
ggacugaagugcugucuagugu

SEQ ID NO: 95160 - RNA, 22 nt, Human
ggacugggauucuggaucugcu

SEQ ID NO: 95161 - RNA, 22 nt, Human
ggacuguagacaucagccugua

SEQ ID NO: 95162 - RNA, 22 nt, Human
ggacuugccuuuaguuaaaaua

SEQ ID NO: 95163 - RNA, 21 nt, Human
ggacuuggaugguggcaguag

SEQ ID NO: 95164 - RNA, 22 nt, Human
ggacuuuagcuguaaugugugu

SEQ ID NO: 95165 - RNA, 22 nt, Human
ggagaaaauugaugaaguuggc

SEQ ID NO: 95166 - RNA, 22 nt, Human
ggagaaagaagacgaacauugu

SEQ ID NO: 95167 - RNA, 22 nt, Human
ggagaaagcuguaguggaaugu

SEQ ID NO: 95168 - RNA, 22 nt, Human
ggagccugugggaugagaugug

SEQ ID NO: 95169 - RNA, 20 nt, Human
ggagcuagagcugaaagacu

SEQ ID NO: 95170 - RNA, 22 nt, Human
ggagcucaccuuggagucucug

SEQ ID NO: 95171 - RNA, 22 nt, Human
ggagcucugugucucuccugcc

SEQ ID NO: 95172 - RNA, 22 nt, Human
ggagcucuuccagcuuguugcu

SEQ ID NO: 95173 - RNA, 22 nt, Human
ggagcugaaggggugggcucag

SEQ ID NO: 95174 - RNA, 22 nt, Human
ggagcugagcagcgauggcgga

SEQ ID NO: 95175 - RNA, 22 nt, Human
ggagcugaggaauagcuuugau

SEQ ID NO: 95176 - RNA, 22 nt, Human
ggagcugaggcugaggccucac

SEQ ID NO: 95177 - RNA, 22 nt, Human
ggagcugagguaacagugagug

SEQ ID NO: 95178 - RNA, 22 nt, Human
ggagcugaugacgucaccaugg

SEQ ID NO: 95179 - RNA, 22 nt, Human
ggagcugcauuuagggagccuu

SEQ ID NO: 95180 - RNA, 22 nt, Human
ggagcugcucagagccaguccc

SEQ ID NO: 95181 - RNA, 18 nt, Human
ggagcugggccugguucc

SEQ ID NO: 95182 - RNA, 21 nt, Human
ggagcuggggagcuggcccca

SEQ ID NO: 95183 - RNA, 22 nt, Human
ggagcugggguuggcaucuucc

SEQ ID NO: 95184 - RNA, 22 nt, Human
ggagcuggucagccuugagcau

SEQ ID NO: 95185 - RNA, 22 nt, Human
ggagcuguagaucagcuaaucu

SEQ ID NO: 95186 - RNA, 22 nt, Human
ggagcugugcugggugaucagg

SEQ ID NO: 95187 - RNA, 22 nt, Human
ggagcuguuauggcauaagcau

SEQ ID NO: 95188 - RNA, 22 nt, Human
ggagcuguucaggacugcuuca

SEQ ID NO: 95189 - RNA, 22 nt, Human
ggagcuguuggcagcuaucuug

SEQ ID NO: 95190 - RNA, 22 nt, Human
ggaggaaaugaaaggaggguuu

SEQ ID NO: 95191 - RNA, 22 nt, Human
ggaggaagcccucggugcccca

SEQ ID NO: 95192 - RNA, 22 nt, Human
ggaggaccauccugguuucacc

SEQ ID NO: 95193 - RNA, 22 nt, Human
ggaggacugagacacuccuggc

SEQ ID NO: 95194 - RNA, 22 nt, Human
ggaggaggggugacugaaugcu

SEQ ID NO: 95195 - RNA, 22 nt, Human
ggaggagggguuuacauuggaa

SEQ ID NO: 95196 - RNA, 23 nt, Human
ggaggaguucccagcccuccugg

SEQ ID NO: 95197 - RNA, 22 nt, Human
ggaggccaaggcaggcggauca

SEQ ID NO: 95198 - RNA, 22 nt, Human
ggaggccaaggcagguggauca

SEQ ID NO: 95199 - RNA, 22 nt, Human
ggaggccaccauggagucacuu

SEQ ID NO: 95200 - RNA, 22 nt, Human
ggaggccaccugaccugcuguu

SEQ ID NO: 95201 - RNA, 22 nt, Human
ggaggccagccugaggcugagg

SEQ ID NO: 95202 - RNA, 22 nt, Human
ggaggccaggaagagccgcccu

SEQ ID NO: 95203 - RNA, 22 nt, Human
ggaggccagggacccagucagc

SEQ ID NO: 95204 - RNA, 22 nt, Human
ggaggccaggugggagucaucu

SEQ ID NO: 95205 - RNA, 22 nt, Human
ggaggcccagagaggugaagug

SEQ ID NO: 95206 - RNA, 22 nt, Human
ggaggccuaagguacaguuugc

SEQ ID NO: 95207 - RNA, 22 nt, Human
ggaggccucaguaccuugcuuu

SEQ ID NO: 95208 - RNA, 22 nt, Human
ggaggccucaucuugccccgug

SEQ ID NO: 95209 - RNA, 22 nt, Human
ggaggccuugaggccaggagcu

SEQ ID NO: 95210 - RNA, 22 nt, Human
ggaggcggacacagguaguguu

SEQ ID NO: 95211 - RNA, 23 nt, Human
ggaggcucaaguaucacgggcag

SEQ ID NO: 95212 - RNA, 22 nt, Human
ggaggcucagugaggaaaugga

SEQ ID NO: 95213 - RNA, 22 nt, Human
ggaggcuccaugagcuccugca

SEQ ID NO: 95214 - RNA, 22 nt, Human
ggaggcucugcuccguguguuc

SEQ ID NO: 95215 - RNA, 22 nt, Human
ggaggcuugaugaucuuggaua

SEQ ID NO: 95216 - RNA, 22 nt, Human
ggagggacccacugcggugacc

SEQ ID NO: 95217 - RNA, 22 nt, Human
ggagaucuugcuugaaggcaug

SEQ ID NO: 95218 - RNA, 20 nt, Human
ggagaugcagcccaggugcc

SEQ ID NO: 95219 - RNA, 20 nt, Human
ggagaugccucucaguccau

SEQ ID NO: 95220 - RNA, 22 nt, Human
ggagauggcaagaaguuauuag

SEQ ID NO: 95221 - RNA, 22 nt, Human
ggagcacccugcucagccaagc

SEQ ID NO: 95222 - RNA, 22 nt, Human
ggagcagcacugauuagcgguu

SEQ ID NO: 95223 - RNA, 22 nt, Human
ggagcagcacugccacacagag

SEQ ID NO: 95224 - RNA, 22 nt, Human
ggagcagccgcgucucagggca

SEQ ID NO: 95225 - RNA, 22 nt, Human
ggagcagcuugcaugcucaggg

SEQ ID NO: 95226 - RNA, 22 nt, Human
ggagcaggagucucuugaauuu

SEQ ID NO: 95227 - RNA, 22 nt, Human
ggagcagggaauuacagcgcag

SEQ ID NO: 95228 - RNA, 22 nt, Human
ggagcaguggucauucagcugg

SEQ ID NO: 95229 - RNA, 22 nt, Human
ggagccagaaaugcugugguug

SEQ ID NO: 95230 - RNA, 22 nt, Human
ggagccagcagggugacacuga

SEQ ID NO: 95231 - RNA, 22 nt, Human
ggagccaggcaaucuguacuuu

SEQ ID NO: 95232 - RNA, 18 nt, Human
ggagcccagaggugaguu

SEQ ID NO: 95233 - RNA, 22 nt, Human
ggagcccugcccuaggcagcuc

SEQ ID NO: 95234 - RNA, 22 nt, Human
ggagcccuuggcaccuaguagg

SEQ ID NO: 95235 - RNA, 22 nt, Human
ggagccggagggccacuggcag

SEQ ID NO: 95236 - RNA, 22 nt, Human
ggagccuggcccggcccuuggc

SEQ ID NO: 95237 - RNA, 22 nt, Human
ggagccuguggccgucacgacu

SEQ ID NO: 95238 - RNA, 22 nt, Human
ggagcggagggagggccacugu

SEQ ID NO: 95239 - RNA, 22 nt, Human
ggagcggcagauggagugggag

SEQ ID NO: 95240 - RNA, 22 nt, Human
ggagcgugcacuccaggcccuu

SEQ ID NO: 95241 - RNA, 22 nt, Human
ggagcgugcagcaugagcucau

SEQ ID NO: 95242 - RNA, 22 nt, Human
ggagcuaguaguuucaugaguu

SEQ ID NO: 95243 - RNA, 22 nt, Human
ggagcucagaagugagugaguu

SEQ ID NO: 95244 - RNA, 22 nt, Human
ggagcucaggcccagcaaggcc

SEQ ID NO: 95245 - RNA, 22 nt, Human
ggagcucugaggaugcauuggu

SEQ ID NO: 95246 - RNA, 22 nt, Human
ggagcugagaguagucccuuuu

SEQ ID NO: 95247 - RNA, 22 nt, Human
ggagcugaggacacuacauuuu

SEQ ID NO: 95248 - RNA, 22 nt, Human
ggagcugaguucuucagccggg

SEQ ID NO: 95249 - RNA, 22 nt, Human
ggagcugcacgcucugaagccu

SEQ ID NO: 95250 - RNA, 23 nt, Human
ggagcugcuguugggggagcugc

SEQ ID NO: 95251 - RNA, 22 nt, Human
ggagcugcuucuugcugugggu

SEQ ID NO: 95252 - RNA, 22 nt, Human
ggagcugcuuugaucugaagaa

SEQ ID NO: 95253 - RNA, 22 nt, Human
ggagcuggcagcgcaacccaga

SEQ ID NO: 95254 - RNA, 22 nt, Human
ggagcuggccgccuaugugcag

SEQ ID NO: 95255 - RNA, 22 nt, Human
ggagcuguugauuguuugagga

SEQ ID NO: 95256 - RNA, 22 nt, Human
ggagcuguugcgcaugcgcucg

SEQ ID NO: 95257 - RNA, 16 nt, Human
ggaggaaggcauagug

SEQ ID NO: 95258 - RNA, 22 nt, Human
ggaggaagggcccaggcuuuau

SEQ ID NO: 95259 - RNA, 22 nt, Human
ggaggacacuggcucugccuuc

SEQ ID NO: 95260 - RNA, 22 nt, Human
ggaggacucaggucuggccaug

SEQ ID NO: 95261 - RNA, 22 nt, Human
ggaggagacaguaaaaagcacg

SEQ ID NO: 95262 - RNA, 22 nt, Human
ggaggagacccugugucaguuu

SEQ ID NO: 95263 - RNA, 22 nt, Human
ggaggagauuccccucucacuu

SEQ ID NO: 95264 - RNA, 22 nt, Human
ggaggagcccacucaaagggga

SEQ ID NO: 95265 - RNA, 22 nt, Human
ggaggaguguggggcacucugc

SEQ ID NO: 95266 - RNA, 22 nt, Human
ggaggaugagcuacgaggagcu

SEQ ID NO: 95267 - RNA, 22 nt, Human
ggaggcaaagcacuuugcuugg

SEQ ID NO: 95268 - RNA, 23 nt, Human
ggaggcacuuaggcagagcagag

SEQ ID NO: 95269 - RNA, 22 nt, Human
ggaggcagaacuucccgucagu

SEQ ID NO: 95270 - RNA, 22 nt, Human
ggaggcauuauggggaagacuu

SEQ ID NO: 95271 - RNA, 22 nt, Human
ggaggccaaagugugggcggcu

SEQ ID NO: 95272 - RNA, 22 nt, Human
ggaggccaaggaggagcuugcc

SEQ ID NO: 95273 - RNA, 22 nt, Human
ggaggccaaggagggcggauca

SEQ ID NO: 95274 - RNA, 22 nt, Human
ggaggccaaggcagguggaucg

SEQ ID NO: 95275 - RNA, 22 nt, Human
ggaggccaaggugggcggauca

SEQ ID NO: 95276 - RNA, 22 nt, Human
ggaggccaauuuucuaacugca

SEQ ID NO: 95277 - RNA, 22 nt, Human
ggaggccaggaugggaacucaa

SEQ ID NO: 95278 - RNA, 22 nt, Human
ggaggccaggguggguggaucg

SEQ ID NO: 95279 - RNA, 22 nt, Human
ggaggccaugaggcucuaggug

SEQ ID NO: 95280 - RNA, 22 nt, Human
ggaggccuagaaaagugguucu

SEQ ID NO: 95281 - RNA, 22 nt, Human
uauaauaugaggcaggagugau

SEQ ID NO: 95282 - RNA, 22 nt, Human
uauaauauuccuuguuguaggu

SEQ ID NO: 95283 - RNA, 22 nt, Human
uauaauuuggggaaaguggugu

SEQ ID NO: 95284 - RNA, 22 nt, Human
uauaauuuuagaagagauggaa

SEQ ID NO: 95285 - RNA, 22 nt, Human
uauaauuuuucuguggccaguu

SEQ ID NO: 95286 - RNA, 22 nt, Human
uauacaaguaaugcugaaugau

SEQ ID NO: 95287 - RNA, 22 nt, Human
uauacaaugaguacauucuggg

SEQ ID NO: 95288 - RNA, 22 nt, Human
uauacacacaugcuccggccuu

SEQ ID NO: 95289 - RNA, 17 nt, Human
uauacacagacagacug

SEQ ID NO: 95290 - RNA, 22 nt, Human
uauacacaggaaucugugaaaa

SEQ ID NO: 95291 - RNA, 22 nt, Human
uauacacuguuguugggagucu

SEQ ID NO: 95292 - RNA, 15 nt, Human
uauacagaaguucag

SEQ ID NO: 95293 - RNA, 21 nt, Human
uauacagaggggaacaggaga

SEQ ID NO: 95294 - RNA, 22 nt, Human
uauacagauuaacagauuuaaa

SEQ ID NO: 95295 - RNA, 22 nt, Human
uauacagcuauggcaagacaaa

SEQ ID NO: 95296 - RNA, 22 nt, Human
uauacagucuuuugcuauauuc

SEQ ID NO: 95297 - RNA, 21 nt, Human
uauacaugugugcauacgugu

SEQ ID NO: 95298 - RNA, 22 nt, Human
uauaccuuccacaaaacagcuu

SEQ ID NO: 95299 - RNA, 22 nt, Human
uauaccuugagcagggcggccc

SEQ ID NO: 95300 - RNA, 22 nt, Human
uauacuaugcuucugauccaau

SEQ ID NO: 95301 - RNA, 22 nt, Human
uauacuuaugcuaaaaaauguu

SEQ ID NO: 95302 - RNA, 22 nt, Human
uauacuucccugcagaguaaag

SEQ ID NO: 95303 - RNA, 22 nt, Human
uauagacuagcagcagaauuua

SEQ ID NO: 95304 - RNA, 22 nt, Human
uauagagcuuuggcauugauua

SEQ ID NO: 95305 - RNA, 22 nt, Human
uauagaggccaccaacaugaaa

SEQ ID NO: 95306 - RNA, 22 nt, Human
uauagcaaggacauaauaugcu

SEQ ID NO: 95307 - RNA, 22 nt, Human
uauagcacacaguuuauaaaag

SEQ ID NO: 95308 - RNA, 22 nt, Human
uauagccauuuccaguggcauc

SEQ ID NO: 95309 - RNA, 19 nt, Human
uauaggaagugugguuaag

SEQ ID NO: 95310 - RNA, 22 nt, Human
uauaggauugguucccauuuua

SEQ ID NO: 95311 - RNA, 21 nt, Human
uauaggcuuccauaugaaggg

SEQ ID NO: 95312 - RNA, 22 nt, Human
uauagguaugucgagaaaugaa

SEQ ID NO: 95313 - RNA, 22 nt, Human
uauaguaaaauuuucauuuaug

SEQ ID NO: 95314 - RNA, 22 nt, Human
uauaguacauggaaucuucaua

SEQ ID NO: 95315 - RNA, 21 nt, Human
uauaguguggauaugcugaug

SEQ ID NO: 95316 - RNA, 22 nt, Human
uauauaagauggguaggcuugu

SEQ ID NO: 95317 - RNA, 22 nt, Human
uauauaauuuucugccauaucc

SEQ ID NO: 95318 - RNA, 22 nt, Human
uauauacaagguagguuuaggu

SEQ ID NO: 95319 - RNA, 22 nt, Human
uauauacuaugcgauuccugcc

SEQ ID NO: 95320 - RNA, 22 nt, Human
uauauagaaaagcagauguugg

SEQ ID NO: 95321 - RNA, 20 nt, Human
uauauaggaaauauuguguu

SEQ ID NO: 95322 - RNA, 22 nt, Human
uauaucauggagauuaacauuc

SEQ ID NO: 95323 - RNA, 22 nt, Human
uauauccagaaaaucaguucau

SEQ ID NO: 95324 - RNA, 22 nt, Human
uauaucuggauggacugcagaa

SEQ ID NO: 95325 - RNA, 22 nt, Human
uauaugaugccaaauaaccugu

SEQ ID NO: 95326 - RNA, 22 nt, Human
ggcagagguagcuggaaccagg

SEQ ID NO: 95327 - RNA, 22 nt, Human
ggcagaggugacagugucuuuu

SEQ ID NO: 95328 - RNA, 22 nt, Human
ggcagagucagaggugguucug

SEQ ID NO: 95329 - RNA, 20 nt, Human
ggcagaugcagagcuaugca

SEQ ID NO: 95330 - RNA, 22 nt, Human
ggcagauggagaagcagcaggu

SEQ ID NO: 95331 - RNA, 23 nt, Human
ggcagauuugguuuguuuuaaua

SEQ ID NO: 95332 - RNA, 22 nt, Human
ggcagcaaaaagccugguugaa

SEQ ID NO: 95333 - RNA, 22 nt, Human
ggcagcaaacuggcuucaggcu

SEQ ID NO: 95334 - RNA, 22 nt, Human
ggcagcaaauauugucagcugu

SEQ ID NO: 95335 - RNA, 22 nt, Human
ggcagcaacgaggcuugauacc

SEQ ID NO: 95336 - RNA, 22 nt, Human
ggcagcaacucggagagaagag

SEQ ID NO: 95337 - RNA, 22 nt, Human
ggcagcaagagagguucagcuu

SEQ ID NO: 95338 - RNA, 22 nt, Human
ggcagcaaguaggauucuuauu

SEQ ID NO: 95339 - RNA, 22 nt, Human
ggcagcacgacaggaguggaag

SEQ ID NO: 95340 - RNA, 22 nt, Human
ggcagcaggagccaucugguag

SEQ ID NO: 95341 - RNA, 20 nt, Human
ggcagcaggaguuuccucuu

SEQ ID NO: 95342 - RNA, 22 nt, Human
ggcagcaucuugauauugguuu

SEQ ID NO: 95343 - RNA, 22 nt, Human
ggcagccaugcacgcugccugg

SEQ ID NO: 95344 - RNA, 22 nt, Human
ggcagccauggacacuggcuag

SEQ ID NO: 95345 - RNA, 22 nt, Human
ggcagccaugucccagggcuuc

SEQ ID NO: 95346 - RNA, 22 nt, Human
ggcagccaugugggcagcgagu

SEQ ID NO: 95347 - RNA, 22 nt, Human
ggcagccucagguuuucuuuga

SEQ ID NO: 95348 - RNA, 22 nt, Human
ggcagccuccagggcacuggug

SEQ ID NO: 95349 - RNA, 21 nt, Human
ggcagccucuguggaagggga

SEQ ID NO: 95350 - RNA, 21 nt, Human
ggcagccugacccccagagag

SEQ ID NO: 95351 - RNA, 19 nt, Human
ggcagccugcacgggcugc

SEQ ID NO: 95352 - RNA, 22 nt, Human
ggcagcucacgggcauggggug

SEQ ID NO: 95353 - RNA, 20 nt, Human
ggcagcucacuacuuucugu

SEQ ID NO: 95354 - RNA, 22 nt, Human
ggcagcuccuccuagucugccc

SEQ ID NO: 95355 - RNA, 22 nt, Human
ggcagcugaagaggaacuuugg

SEQ ID NO: 95356 - RNA, 22 nt, Human
ggcagcugcugcauuacguugu

SEQ ID NO: 95357 - RNA, 19 nt, Human
ggcagcuggacgcuguuca

SEQ ID NO: 95358 - RNA, 22 nt, Human
ggcagcugggucacaccgaucu

SEQ ID NO: 95359 - RNA, 22 nt, Human
ggcagcuggguuggccagaaac

SEQ ID NO: 95360 - RNA, 22 nt, Human
ggcagcugucucauucacaccu

SEQ ID NO: 95361 - RNA, 22 nt, Human
ggcagcugugaagugccucaca

SEQ ID NO: 95362 - RNA, 22 nt, Human
ggcagcuucuuaauauggagac

SEQ ID NO: 95363 - RNA, 22 nt, Human
ggcagcuugcccuggucucaac

SEQ ID NO: 95364 - RNA, 19 nt, Human
ggcagcuugggaagguagc

SEQ ID NO: 95365 - RNA, 22 nt, Human
ggcagcuuguccuggaggaugg

SEQ ID NO: 95366 - RNA, 22 nt, Human
ggcagcuuucaccugucuuccu

SEQ ID NO: 95367 - RNA, 22 nt, Human
ggcagcuuucucacccaugacc

SEQ ID NO: 95368 - RNA, 22 nt, Human
ggcaggaaaugggauaagggcu

SEQ ID NO: 95369 - RNA, 22 nt, Human
ggcaggaagcucauguggacug

SEQ ID NO: 95370 - RNA, 22 nt, Human
ggcaggacaggggaauguuugg

SEQ ID NO: 95371 - RNA, 22 nt, Human
ggcaggagaauggcgugaacuc

SEQ ID NO: 95372 - RNA, 22 nt, Human
ggcaggagauaaaauauuaguu

SEQ ID NO: 95373 - RNA, 22 nt, Human
ggcaggaggaagaguuagcacc

SEQ ID NO: 95374 - RNA, 22 nt, Human
ggcaggagggcggacaaugacc

SEQ ID NO: 95375 - RNA, 22 nt, Human
ggcaggaggugaguggcgggug

SEQ ID NO: 95376 - RNA, 22 nt, Human
ggcaggcaagucugcucuguga

SEQ ID NO: 95377 - RNA, 22 nt, Human
ggcaggcacugugauagauucu

SEQ ID NO: 95378 - RNA, 22 nt, Human
ggcaggcacuguguuuuguguu

SEQ ID NO: 95379 - RNA, 22 nt, Human
ggcaggcagaaaaauagaauau

SEQ ID NO: 95380 - RNA, 22 nt, Human
ggcaggcaggagcgugcuuggg

SEQ ID NO: 95381 - RNA, 22 nt, Human
ggcaggcaucaucaguugauca

SEQ ID NO: 95382 - RNA, 22 nt, Human
ggcaggcaucauguggucauua

SEQ ID NO: 95383 - RNA, 22 nt, Human
ggcaggcauuagagauucccag

SEQ ID NO: 95384 - RNA, 22 nt, Human
ggcaggcauugcaacauguaca

SEQ ID NO: 95385 - RNA, 22 nt, Human
ggcaggcuccguguuccauucc

SEQ ID NO: 95386 - RNA, 19 nt, Human
ggcaggcuggauagagagg

SEQ ID NO: 95387 - RNA, 22 nt, Human
ggcaggcuuucagcaucaaguc

SEQ ID NO: 95388 - RNA, 22 nt, Human
ggcaggcuuugagaaagagcau

SEQ ID NO: 95389 - RNA, 22 nt, Human
ggcagggcccugauuccugggg

SEQ ID NO: 95390 - RNA, 22 nt, Human
ggcagggcuugucucugugaug

SEQ ID NO: 95391 - RNA, 22 nt, Human
ggcaggggugaggccacucuga

SEQ ID NO: 95392 - RNA, 22 nt, Human
ggcaggguaugauuaccucuga

SEQ ID NO: 95393 - RNA, 22 nt, Human
ggcagggucuggacugaaagcu

SEQ ID NO: 95394 - RNA, 22 nt, Human
ggcagguacagcaagaggacaa

SEQ ID NO: 95395 - RNA, 22 nt, Human
ggcaggucaucaacuguaauuu

SEQ ID NO: 95396 - RNA, 22 nt, Human
ggcaggugaccuggccucccag

SEQ ID NO: 95397 - RNA, 22 nt, Human
ggcaggugacggggaugaguau

SEQ ID NO: 95398 - RNA, 22 nt, Human
ggcaggugcaccugagccaucu

SEQ ID NO: 95399 - RNA, 22 nt, Human
ggcaggugcgcauguugcauua

SEQ ID NO: 95400 - RNA, 17 nt, Human
ggcaggugcggggccgc

SEQ ID NO: 95401 - RNA, 22 nt, Human
ggcagguggacgugcuaaagcu

SEQ ID NO: 95402 - RNA, 22 nt, Human
ggcagguggccaagugucuaag

SEQ ID NO: 95403 - RNA, 21 nt, Human
ggcaggugggucucuguugcu

SEQ ID NO: 95404 - RNA, 22 nt, Human
ggcaguagccagggacuggcag

SEQ ID NO: 95405 - RNA, 19 nt, Human
ggcagucacggucaggagc

SEQ ID NO: 95406 - RNA, 22 nt, Human
ggcagucagugugguucauaaa

SEQ ID NO: 95407 - RNA, 22 nt, Human
ggcagucuaguguccuugggcc

SEQ ID NO: 95408 - RNA, 22 nt, Human
ggcagucuuaucagcauuggac

SEQ ID NO: 95409 - RNA, 22 nt, Human
ggcagugaaucugagagccugg

SEQ ID NO: 95410 - RNA, 19 nt, Human
ggcagugagaagacuccug

SEQ ID NO: 95411 - RNA, 22 nt, Human
ggcagugagucccggagaggcc

SEQ ID NO: 95412 - RNA, 21 nt, Human
ggcagugaugugaagugcauc

SEQ ID NO: 95413 - RNA, 22 nt, Human
ggcagugccacuaagcucugcu

SEQ ID NO: 95414 - RNA, 17 nt, Human
ggcaguggaggaagaga

SEQ ID NO: 95415 - RNA, 22 nt, Human
ggcaguggcagagcuuggucua

SEQ ID NO: 95416 - RNA, 22 nt, Human
ggcaguguccuugcagcucuac

SEQ ID NO: 95417 - RNA, 22 nt, Human
ggcauagaaugugcugugacaa

SEQ ID NO: 95418 - RNA, 22 nt, Human
ggcauccaaauaccaagaugua

SEQ ID NO: 95419 - RNA, 22 nt, Human
ggcaggugagagcucuuugaaa

SEQ ID NO: 95420 - RNA, 22 nt, Human
ggcaggugaggcaugugccugg

SEQ ID NO: 95421 - RNA, 22 nt, Human
ggcaggugaucuagagucaaua

SEQ ID NO: 95422 - RNA, 22 nt, Human
ggcaggugcuaagagagguaaa

SEQ ID NO: 95423 - RNA, 22 nt, Human
ggcaggugcucaaaaauauuug

SEQ ID NO: 95424 - RNA, 22 nt, Human
ggcaggugcucugugggccugg

SEQ ID NO: 95425 - RNA, 22 nt, Human
ggcaggugcugggagcaucuca

SEQ ID NO: 95426 - RNA, 20 nt, Human
ggcaggugcuguccccuccu

SEQ ID NO: 95427 - RNA, 22 nt, Human
ggcagguggauuuucuacucua

SEQ ID NO: 95428 - RNA, 22 nt, Human
ggcagguguggugaccagagau

SEQ ID NO: 95429 - RNA, 22 nt, Human
ggcagguuggaugcuguaguga

SEQ ID NO: 95430 - RNA, 22 nt, Human
ggcaguaugaguucaaauaauu

SEQ ID NO: 95431 - RNA, 22 nt, Human
ggcagucacaggggagacuggg

SEQ ID NO: 95432 - RNA, 22 nt, Human
ggcagucauuuaaucccugcau

SEQ ID NO: 95433 - RNA, 22 nt, Human
ggcagucccagcccagaggcgc

SEQ ID NO: 95434 - RNA, 19 nt, Human
ggcagucucaagcagcaca

SEQ ID NO: 95435 - RNA, 22 nt, Human
ucagaaguuaauauauaaauuu

SEQ ID NO: 95436 - RNA, 22 nt, Human
ucagaaguugaaggcucuuuuu

SEQ ID NO: 95437 - RNA, 22 nt, Human
ucagaauaaacaugggcauggg

SEQ ID NO: 95438 - RNA, 22 nt, Human
ucagaauaaguuaugaaaugaa

SEQ ID NO: 95439 - RNA, 22 nt, Human
ucagaaucuaaauaggcuccag

SEQ ID NO: 95440 - RNA, 22 nt, Human
ucagaaucucuggaggcuuggc

SEQ ID NO: 95441 - RNA, 21 nt, Human
ucagaaucugugagcuaucuc

SEQ ID NO: 95442 - RNA, 22 nt, Human
ucagaauuaagcucuuggucag

SEQ ID NO: 95443 - RNA, 23 nt, Human
ucagaauuccaguuucuuugaag

SEQ ID NO: 95444 - RNA, 22 nt, Human
ucagaauucugaagggcacaaa

SEQ ID NO: 95445 - RNA, 22 nt, Human
ucagaauugucuggggaauguu

SEQ ID NO: 95446 - RNA, 22 nt, Human
ucagaauuugauuccugggaua

SEQ ID NO: 95447 - RNA, 22 nt, Human
ucagaauuuucuggaauggagc

SEQ ID NO: 95448 - RNA, 22 nt, Human
ucagaauuuugguuugguuggu

SEQ ID NO: 95449 - RNA, 22 nt, Human
ucagacacagaugagacaagga

SEQ ID NO: 95450 - RNA, 22 nt, Human
ucagacagaggagcucgugcag

SEQ ID NO: 95451 - RNA, 22 nt, Human
ucagacaggccucuccagccuc

SEQ ID NO: 95452 - RNA, 22 nt, Human
ucagacagggcuucucaaacuu

SEQ ID NO: 95453 - RNA, 22 nt, Human
ucagacagugugaucagucucu

SEQ ID NO: 95454 - RNA, 22 nt, Human
ucagacaguuugcagugugccu

SEQ ID NO: 95455 - RNA, 22 nt, Human
ucagacauguuuuaagacuuau

SEQ ID NO: 95456 - RNA, 20 nt, Human
ucagacccggggaagggagc

SEQ ID NO: 95457 - RNA, 17 nt, Human
ucagacccugugucagg

SEQ ID NO: 95458 - RNA, 19 nt, Human
ucagacugaaaguuuagau

SEQ ID NO: 95459 - RNA, 22 nt, Human
ucagacuucaguuuuuaguugu

SEQ ID NO: 95460 - RNA, 22 nt, Human
ucagacuucuacuuugcagagc

SEQ ID NO: 95461 - RNA, 22 nt, Human
ucagacuuuaaaggcuaacagg

SEQ ID NO: 95462 - RNA, 22 nt, Human
ucagagaacuggcauguuuaga

SEQ ID NO: 95463 - RNA, 22 nt, Human
ucagagaagcugccaggcgagc

SEQ ID NO: 95464 - RNA, 22 nt, Human
ucagagaagcuuaagcuguaau

SEQ ID NO: 95465 - RNA, 22 nt, Human
ucagagaaggcaauuuuauggu

SEQ ID NO: 95466 - RNA, 22 nt, Human
ucagagaaguaggcuaauggug

SEQ ID NO: 95467 - RNA, 22 nt, Human
ucagagaauccguaagucacaa

SEQ ID NO: 95468 - RNA, 23 nt, Human
ucagagaaugguaugcuuuuccu

SEQ ID NO: 95469 - RNA, 22 nt, Human
ucagagacaccagagagcugug

SEQ ID NO: 95470 - RNA, 22 nt, Human
ucagagacaucagguuguagca

SEQ ID NO: 95471 - RNA, 22 nt, Human
ucagagagaaauaguuuuugac

SEQ ID NO: 95472 - RNA, 18 nt, Human
ucagagagcagcuuuauu

SEQ ID NO: 95473 - RNA, 22 nt, Human
ucagagagguuggugauaagaa

SEQ ID NO: 95474 - RNA, 22 nt, Human
ucagagagugcaaaauauagcu

SEQ ID NO: 95475 - RNA, 22 nt, Human
ucagagaguuagugucuuagcu

SEQ ID NO: 95476 - RNA, 22 nt, Human
ucagagaucuucaggaugggac

SEQ ID NO: 95477 - RNA, 22 nt, Human
ucagagauggaguuagcaguga

SEQ ID NO: 95478 - RNA, 22 nt, Human
ucagagcaaauuccugugagcc

SEQ ID NO: 95479 - RNA, 22 nt, Human
ucagagcaacuuuuccugcuuu

SEQ ID NO: 95480 - RNA, 22 nt, Human
ucagagcacuggugcuaccuug

SEQ ID NO: 95481 - RNA, 22 nt, Human
ucagagcauucgggugacaaau

SEQ ID NO: 95482 - RNA, 22 nt, Human
ucagagccaaucauggugcauu

SEQ ID NO: 95483 - RNA, 22 nt, Human
ucagagcccugcuccuccccaa

SEQ ID NO: 95484 - RNA, 22 nt, Human
ucagagcugggugcuucuuccu

SEQ ID NO: 95485 - RNA, 22 nt, Human
ucagagcuuaucucuugcugga

SEQ ID NO: 95486 - RNA, 22 nt, Human
ucagaggaaacaaucuuuagua

SEQ ID NO: 95487 - RNA, 22 nt, Human
ucagaggaacuggacuaaagcc

SEQ ID NO: 95488 - RNA, 22 nt, Human
ucagaggaagcaucaaguucuc

SEQ ID NO: 95489 - RNA, 22 nt, Human
ucagaggagcaaaagaggggau

SEQ ID NO: 95490 - RNA, 22 nt, Human
ucagaggagccaaaguucugag

SEQ ID NO: 95491 - RNA, 22 nt, Human
ucagaggaucaugucccuacuc

SEQ ID NO: 95492 - RNA, 22 nt, Human
ucagaggaugcuguucuuuaau

SEQ ID NO: 95493 - RNA, 21 nt, Human
ucagaggcacugagagcaaug

SEQ ID NO: 95494 - RNA, 22 nt, Human
ucagaggcaucauucauaguua

SEQ ID NO: 95495 - RNA, 22 nt, Human
ucagaggccaaacugagcaggg

SEQ ID NO: 95496 - RNA, 21 nt, Human
ucagagggcccuggaggcuca

SEQ ID NO: 95497 - RNA, 22 nt, Human
ucagaggucacacagcaaguuu

SEQ ID NO: 95498 - RNA, 22 nt, Human
ucagaggucagcagcuugccca

SEQ ID NO: 95499 - RNA, 22 nt, Human
ucagaggugcaagaaguucuga

SEQ ID NO: 95500 - RNA, 22 nt, Human
ucagagguggcaggggugucca

SEQ ID NO: 95501 - RNA, 22 nt, Human
ucagagguucuucucaguggcc

SEQ ID NO: 95502 - RNA, 23 nt, Human
ucagaguagcaauuuuucucucc

SEQ ID NO: 95503 - RNA, 20 nt, Human
ucagagucaucaaagauggu

SEQ ID NO: 95504 - RNA, 22 nt, Human
ucagaguccuuuggccugacag

SEQ ID NO: 95505 - RNA, 22 nt, Human
ucagagucuaugcaacagaauu

SEQ ID NO: 95506 - RNA, 22 nt, Human
ucagagucucccccaguuuggg

SEQ ID NO: 95507 - RNA, 22 nt, Human
ucagagucugugcauucugcua

SEQ ID NO: 95508 - RNA, 22 nt, Human
ucagagugaggcccagcaaucu

SEQ ID NO: 95509 - RNA, 22 nt, Human
ucagagugaggcgucaacauga

SEQ ID NO: 95510 - RNA, 22 nt, Human
ucagaguggugguuuugccuuc

SEQ ID NO: 95511 - RNA, 22 nt, Human
ucagagugugagacauauugga

SEQ ID NO: 95512 - RNA, 22 nt, Human
ucagaguucucuguccagauga

SEQ ID NO: 95513 - RNA, 22 nt, Human
ucagaguuucaggauacaaaua

SEQ ID NO: 95514 - RNA, 21 nt, Human
ucagauaccagacucaagggg

SEQ ID NO: 95515 - RNA, 22 nt, Human
ucagaucacaaaaguuucuauu

SEQ ID NO: 95516 - RNA, 22 nt, Human
ucagaucuggugaaguuauagu

SEQ ID NO: 95517 - RNA, 23 nt, Human
ucagaugaggaaugcauacuaau

SEQ ID NO: 95518 - RNA, 22 nt, Human
ucagaugagugcuuucagcugc

SEQ ID NO: 95519 - RNA, 22 nt, Human
ucagauggcauagguuggaauu

SEQ ID NO: 95520 - RNA, 22 nt, Human
ucagaugguacuaauuuaagga

SEQ ID NO: 95521 - RNA, 22 nt, Human
ucagauggucauucacuagggu

SEQ ID NO: 95522 - RNA, 22 nt, Human
ucagaugguuccaucauuuuuc

SEQ ID NO: 95523 - RNA, 22 nt, Human
ucagauguugaaaaggaaaagu

SEQ ID NO: 95524 - RNA, 22 nt, Human
ucagauuuagggugauuaccuu

SEQ ID NO: 95525 - RNA, 22 nt, Human
ucagauuucagcuaaagggaug

SEQ ID NO: 95526 - RNA, 22 nt, Human
ucagauuuuauuuuccuguuac

SEQ ID NO: 95527 - RNA, 20 nt, Human
ucagauuuugggucacugau

SEQ ID NO: 95528 - RNA, 22 nt, Human
ucagauuuuugagaugucuguu

SEQ ID NO: 95529 - RNA, 22 nt, Human
ucagcaaaggaccagcacaggc

SEQ ID NO: 95530 - RNA, 22 nt, Human
ucagcaagaagucauuuguagc

SEQ ID NO: 95531 - RNA, 22 nt, Human
ucagcaagcagggggauguuca

SEQ ID NO: 95532 - RNA, 22 nt, Human
ucagcacaggucuugcaaaaca

SEQ ID NO: 95533 - RNA, 22 nt, Human
ucagcacugauguuucagaaga

SEQ ID NO: 95534 - RNA, 22 nt, Human
ucagcacugucuauuagugaga

SEQ ID NO: 95535 - RNA, 22 nt, Human
ucagcagaccuguuauuuggau

SEQ ID NO: 95536 - RNA, 22 nt, Human
ucagcagaggggaaggcaucug

SEQ ID NO: 95537 - RNA, 22 nt, Human
ucagcagaguggaacauuguca

SEQ ID NO: 95538 - RNA, 19 nt, Human
ucagcagcacugugauuuc

SEQ ID NO: 95539 - RNA, 22 nt, Human
ggcuggaaguccaagaucaagg

SEQ ID NO: 95540 - RNA, 20 nt, Human
ggcuggaaguguggguuugg

SEQ ID NO: 95541 - RNA, 22 nt, Human
ggcuggaaugcaacuguguguu

SEQ ID NO: 95542 - RNA, 22 nt, Human
ggcuggacuuucugcugggcuc

SEQ ID NO: 95543 - RNA, 22 nt, Human
ggcuggacuuuuugcaggucau

SEQ ID NO: 95544 - RNA, 22 nt, Human
ggcucuggaaaguguccuugau

SEQ ID NO: 95545 - RNA, 22 nt, Human
ucagcagcagcucagcauguuu

SEQ ID NO: 95546 - RNA, 22 nt, Human
ucagcagccgcagcugacucag

SEQ ID NO: 95547 - RNA, 22 nt, Human
ucagcaggcacggacaggcugc

SEQ ID NO: 95548 - RNA, 22 nt, Human
ucagcaggcagugggucacaau

SEQ ID NO: 95549 - RNA, 22 nt, Human
ucagcaggcgguuccuuguggg

SEQ ID NO: 95550 - RNA, 22 nt, Human
ucagcagggccuccuugugcag

SEQ ID NO: 95551 - RNA, 22 nt, Human
ucagcaggugcuuuguuuacuc

SEQ ID NO: 95552 - RNA, 17 nt, Human
ucagcaguaaugguggg

SEQ ID NO: 95553 - RNA, 22 nt, Human
ucagcaguagagggggcacagu

SEQ ID NO: 95554 - RNA, 22 nt, Human
ucagcaguccuccaggaucaag

SEQ ID NO: 95555 - RNA, 22 nt, Human
ucagcaguguaguuuaucauuc

SEQ ID NO: 95556 - RNA, 22 nt, Human
ucagcagugucaguucccagag

SEQ ID NO: 95557 - RNA, 22 nt, Human
ucagcagugugcccagaggcug

SEQ ID NO: 95558 - RNA, 22 nt, Human
ucagcagugugcuuggaaugga

SEQ ID NO: 95559 - RNA, 22 nt, Human
ucagcaguuauuccccuacaga

SEQ ID NO: 95560 - RNA, 23 nt, Human
ucagcaucaccugggaacuuacu

SEQ ID NO: 95561 - RNA, 22 nt, Human
ucagcaucagguugucugaauu

SEQ ID NO: 95562 - RNA, 22 nt, Human
ucagcaucuucagcauggggaa

SEQ ID NO: 95563 - RNA, 22 nt, Human
ucagcauguucuuaggucacag

SEQ ID NO: 95564 - RNA, 19 nt, Human
ucagccaccagaagagaua

SEQ ID NO: 95565 - RNA, 22 nt, Human
ucagccacuacccaccuuaaca

SEQ ID NO: 95566 - RNA, 22 nt, Human
ucagccagaggcuucuugguuu

SEQ ID NO: 95567 - RNA, 22 nt, Human
ucagccagcaucagcuaagugc

SEQ ID NO: 95568 - RNA, 22 nt, Human
ucagccagcugugugcuucugc

SEQ ID NO: 95569 - RNA, 22 nt, Human
ucagccaggccaggcauucaca

SEQ ID NO: 95570 - RNA, 22 nt, Human
ucagccagggcagagcagguga

SEQ ID NO: 95571 - RNA, 22 nt, Human
ucagccagggggagagaaugga

SEQ ID NO: 95572 - RNA, 22 nt, Human
ucagccagguaauguggagaug

SEQ ID NO: 95573 - RNA, 22 nt, Human
ucagccaguuaaggcuuagaca

SEQ ID NO: 95574 - RNA, 22 nt, Human
ucagccaguugccccaguuagu

SEQ ID NO: 95575 - RNA, 22 nt, Human
ucagcccaccuucaggggaguu

SEQ ID NO: 95576 - RNA, 22 nt, Human
ucagcccagcccagcaagugca

SEQ ID NO: 95577 - RNA, 22 nt, Human
ucagcccaggagguugagacua

SEQ ID NO: 95578 - RNA, 20 nt, Human
ucagcccagggugagcaucu

SEQ ID NO: 95579 - RNA, 21 nt, Human
ucagcccaggugucuuugccc

SEQ ID NO: 95580 - RNA, 22 nt, Human
ucagcccaucacucacguauua

SEQ ID NO: 95581 - RNA, 22 nt, Human
ucagcccuagccucaguccagg

SEQ ID NO: 95582 - RNA, 20 nt, Human
ucagcccugaguccaggcug

SEQ ID NO: 95583 - RNA, 22 nt, Human
ucagcccugggacccagggaug

SEQ ID NO: 95584 - RNA, 22 nt, Human
ucagccuccuaauuuccuguga

SEQ ID NO: 95585 - RNA, 22 nt, Human
ucagccugcuccaagugcugcc

SEQ ID NO: 95586 - RNA, 22 nt, Human
ucagccuggcaggauggccugg

SEQ ID NO: 95587 - RNA, 22 nt, Human
ucagcuacagcaucucugcuuu

SEQ ID NO: 95588 - RNA, 22 nt, Human
ucagcuaggcacuucucacuga

SEQ ID NO: 95589 - RNA, 22 nt, Human
ucagcucaucugagugucagcg

SEQ ID NO: 95590 - RNA, 22 nt, Human
ucagcucggccuaggcccacgg

SEQ ID NO: 95591 - RNA, 22 nt, Human
ucagcucuaccugggagcuguc

SEQ ID NO: 95592 - RNA, 22 nt, Human
ucagcucucacagaucucaacc

SEQ ID NO: 95593 - RNA, 22 nt, Human
ucagcucugcacuccacugugg

SEQ ID NO: 95594 - RNA, 19 nt, Human
ucagcucuggggucagugg

SEQ ID NO: 95595 - RNA, 22 nt, Human
ucagcucugguucauguggucu

SEQ ID NO: 95596 - RNA, 22 nt, Human
ucagcucuuaacccucuggccu

SEQ ID NO: 95597 - RNA, 22 nt, Human
ucagcucuuccccccagccagg

SEQ ID NO: 95598 - RNA, 22 nt, Human
ucagcugaguucuagagcacuc

SEQ ID NO: 95599 - RNA, 22 nt, Human
ucagcugcacuguucugaccca

SEQ ID NO: 95600 - RNA, 22 nt, Human
ucagcuggagaugagaaccgaa

SEQ ID NO: 95601 - RNA, 18 nt, Human
ucagcuggggcugcagcc

SEQ ID NO: 95602 - RNA, 22 nt, Human
ucagcugggugaguguucugca

SEQ ID NO: 95603 - RNA, 22 nt, Human
ucagcuggugaauggacucauc

SEQ ID NO: 95604 - RNA, 22 nt, Human
ucagcugguguuucuucuccuu

SEQ ID NO: 95605 - RNA, 22 nt, Human
ucagcuguacugugccauagcu

SEQ ID NO: 95606 - RNA, 22 nt, Human
ucagcuguagguauggaugucc

SEQ ID NO: 95607 - RNA, 22 nt, Human
ucagcuguaucuugcugcacuu

SEQ ID NO: 95608 - RNA, 22 nt, Human
ucagcuguuaucacugucuguc

SEQ ID NO: 95609 - RNA, 23 nt, Human
ucagcuguucuuuucccugggac

SEQ ID NO: 95610 - RNA, 22 nt, Human
ucagcuguuuugaguuuaauug

SEQ ID NO: 95611 - RNA, 22 nt, Human
ucagcuucaaauuuggugaagu

SEQ ID NO: 95612 - RNA, 18 nt, Human
ucagcuuccagcauguuu

SEQ ID NO: 95613 - RNA, 22 nt, Human
ucagcuucuccaagugacaugg

SEQ ID NO: 95614 - RNA, 22 nt, Human
ucagcuuucucagaggccuaac

SEQ ID NO: 95615 - RNA, 22 nt, Human
ucagcuuucucuucuaucgaua

SEQ ID NO: 95616 - RNA, 22 nt, Human
ucagcuuugaucucaggcaauc

SEQ ID NO: 95617 - RNA, 22 nt, Human
ucagcuuugccaccagcuguaa

SEQ ID NO: 95618 - RNA, 22 nt, Human
ucaggaaaauacugcuuaucca

SEQ ID NO: 95619 - RNA, 22 nt, Human
ucaggaaaguguucucagagga

SEQ ID NO: 95620 - RNA, 22 nt, Human
ucaggaaauggcuucaugguuu

SEQ ID NO: 95621 - RNA, 22 nt, Human
ucaggaagacaaucuuuggcuc

SEQ ID NO: 95622 - RNA, 21 nt, Human
ucaggaagagccaguucaugc

SEQ ID NO: 95623 - RNA, 22 nt, Human
ucaggaaggcgccccaucagga

SEQ ID NO: 95624 - RNA, 22 nt, Human
ucaggaaguauaaucagauuca

SEQ ID NO: 95625 - RNA, 22 nt, Human
ucaggaagucucaauuagcuac

SEQ ID NO: 95626 - RNA, 22 nt, Human
ucaggaagugcugaggcugcuu

SEQ ID NO: 95627 - RNA, 22 nt, Human
ucaggaagugguaaaggauguu

SEQ ID NO: 95628 - RNA, 22 nt, Human
ucaggaauuuuguucuguaucc

SEQ ID NO: 95629 - RNA, 22 nt, Human
ucaggacagacuagacuagcgu

SEQ ID NO: 95630 - RNA, 22 nt, Human
ucaggacagggaucacaucauc

SEQ ID NO: 95631 - RNA, 22 nt, Human
ucaggacagguucgggugggua

SEQ ID NO: 95632 - RNA, 19 nt, Human
ucaggacugacuugaaguc

SEQ ID NO: 95633 - RNA, 22 nt, Human
ucaggagaaucagggcuguccu

SEQ ID NO: 95634 - RNA, 22 nt, Human
ucaggagacauucuuaaaguag

SEQ ID NO: 95635 - RNA, 22 nt, Human
ucaggagacuuaugucacagug

SEQ ID NO: 95636 - RNA, 22 nt, Human
ucaggagagaguuggguaggcu

SEQ ID NO: 95637 - RNA, 22 nt, Human
ucaggagauggucuuuauaggc

SEQ ID NO: 95638 - RNA, 22 nt, Human
ucaggagauguaaccuuagcug

SEQ ID NO: 95639 - RNA, 22 nt, Human
ucaggagcagggucuguuacca

SEQ ID NO: 95640 - RNA, 22 nt, Human
ucaggagcauauauugaugucu

SEQ ID NO: 95641 - RNA, 22 nt, Human
ucaggagccugaaagaggucua

SEQ ID NO: 95642 - RNA, 22 nt, Human
ucaggagcucaggcugauggaa

SEQ ID NO: 95643 - RNA, 22 nt, Human
ucaggagcugcacugggcccac

SEQ ID NO: 95644 - RNA, 22 nt, Human
ucaggaggcaaguagguauuga

SEQ ID NO: 95645 - RNA, 22 nt, Human
ucaggaggcucaagaccuggca

SEQ ID NO: 95646 - RNA, 22 nt, Human
ucaggaggucugcugcggggug

SEQ ID NO: 95647 - RNA, 22 nt, Human
ucaggagguugaccacggggca

SEQ ID NO: 95648 - RNA, 22 nt, Human
ucaggagugcagcaguuuggag

SEQ ID NO: 95649 - RNA, 22 nt, Human
ucaggagugccaguaccuuuug

SEQ ID NO: 95650 - RNA, 22 nt, Human
ucaggauaaaauguaauggcaa

SEQ ID NO: 95651 - RNA, 22 nt, Human
ucaggauaccucaguuuuagcu

SEQ ID NO: 95652 - RNA, 22 nt, Human
ucaggaucaggggccuuuccuu

SEQ ID NO: 95653 - RNA, 22 nt, Human
gggcaggaacaaaucaaaugau

SEQ ID NO: 95654 - RNA, 17 nt, Human
gggcagggacuccuggg

SEQ ID NO: 95655 - RNA, 22 nt, Human
gggcaggggucaguggccccaa

SEQ ID NO: 95656 - RNA, 22 nt, Human
gggcagguacuggguggugagc

SEQ ID NO: 95657 - RNA, 22 nt, Human
gggcagguauuuaucuucuauu

SEQ ID NO: 95658 - RNA, 22 nt, Human
ggcucuggagacauguggagag

SEQ ID NO: 95659 - RNA, 22 nt, Human
ggcucuggagcacagacgucug

SEQ ID NO: 95660 - RNA, 19 nt, Human
ggcucuggcggcuguagcc

SEQ ID NO: 95661 - RNA, 22 nt, Human
ggcucuggcguccaauggagcg

SEQ ID NO: 95662 - RNA, 22 nt, Human
ggcucuggcuccuggcuuugug

SEQ ID NO: 95663 - RNA, 22 nt, Human
ggcucugggaaauggucuuccu

SEQ ID NO: 95664 - RNA, 22 nt, Human
ggcucugggccagaguuggcuu

SEQ ID NO: 95665 - RNA, 22 nt, Human
ggcucugggugugaccuugggu

SEQ ID NO: 95666 - RNA, 22 nt, Human
ggcucugguggcaauugacugg

SEQ ID NO: 95667 - RNA, 22 nt, Human
ggcucuggugggaagguuagau

SEQ ID NO: 95668 - RNA, 22 nt, Human
ggcucuguaaguguugcaggua

SEQ ID NO: 95669 - RNA, 22 nt, Human
ggcucugugagaacaaaggcua

SEQ ID NO: 95670 - RNA, 23 nt, Human
ggcucugugcuaauugcugaaaa

SEQ ID NO: 95671 - RNA, 22 nt, Human
ggcucuguuuacuuucagaggc

SEQ ID NO: 95672 - RNA, 22 nt, Human
ggcucuucugguugucacauuu

SEQ ID NO: 95673 - RNA, 22 nt, Human
ggcucuucuguggcagccaagg

SEQ ID NO: 95674 - RNA, 22 nt, Human
ggcucuugaaauguggcuggcg

SEQ ID NO: 95675 - RNA, 22 nt, Human
ggcugagaaggagugggugagg

SEQ ID NO: 95676 - RNA, 23 nt, Human
ggcugagacuacaggcgcuugcc

SEQ ID NO: 95677 - RNA, 21 nt, Human
ggcugagauggcagaaucacc

SEQ ID NO: 95678 - RNA, 22 nt, Human
ggcugagccuggagcaucuggu

SEQ ID NO: 95679 - RNA, 22 nt, Human
ggcugagcggacuggggucccu

SEQ ID NO: 95680 - RNA, 22 nt, Human
ggcugaggguauagcuguccca

SEQ ID NO: 95681 - RNA, 22 nt, Human
ggcugaggguuaagaucagaca

SEQ ID NO: 95682 - RNA, 22 nt, Human
ggcugagucugugacccaugcg

SEQ ID NO: 95683 - RNA, 22 nt, Human
ggcugagugcugcuguucacga

SEQ ID NO: 95684 - RNA, 22 nt, Human
ggcugcaggcaggguauccacu

SEQ ID NO: 95685 - RNA, 22 nt, Human
ggcugcagggcagcuggugugg

SEQ ID NO: 95686 - RNA, 22 nt, Human
ggcugcaguugugugaaggccg

SEQ ID NO: 95687 - RNA, 22 nt, Human
ggcugccacccucggacuuccg

SEQ ID NO: 95688 - RNA, 22 nt, Human
ggcugccaggagggaggccagu

SEQ ID NO: 95689 - RNA, 20 nt, Human
ggcugcccacuccagaguac

SEQ ID NO: 95690 - RNA, 22 nt, Human
ggcugccucaaagcucaagcuc

SEQ ID NO: 95691 - RNA, 22 nt, Human
ggcugccuccacugcuuguccc

SEQ ID NO: 95692 - RNA, 22 nt, Human
ggcugccucccaggagaaucug

SEQ ID NO: 95693 - RNA, 22 nt, Human
ggcugccuccugcugggcugga

SEQ ID NO: 95694 - RNA, 22 nt, Human
ggcugccucuauuuaggaucaa

SEQ ID NO: 95695 - RNA, 22 nt, Human
ggcugccugccuccaagccggg

SEQ ID NO: 95696 - RNA, 19 nt, Human
ggcugccuggagcgagggc

SEQ ID NO: 95697 - RNA, 22 nt, Human
ggcugccuucauagaccauggg

SEQ ID NO: 95698 - RNA, 22 nt, Human
ggcugccuuuagaacggaugcu

SEQ ID NO: 95699 - RNA, 19 nt, Human
ggcugccuuuccuuaccag

SEQ ID NO: 95700 - RNA, 23 nt, Human
ggcugcgagugccugggccugug

SEQ ID NO: 95701 - RNA, 18 nt, Human
ggcugcucgcucuccccg

SEQ ID NO: 95702 - RNA, 19 nt, Human
ggcugcugaagagaauuac

SEQ ID NO: 95703 - RNA, 22 nt, Human
ggcugcugaaguguggcaaucu

SEQ ID NO: 95704 - RNA, 22 nt, Human
ggcugcugacuucauccagcuu

SEQ ID NO: 95705 - RNA, 22 nt, Human
ggcugcugcuguguaggccugu

SEQ ID NO: 95706 - RNA, 22 nt, Human
ggcugcugggaauaugccagcu

SEQ ID NO: 95707 - RNA, 22 nt, Human
ggcugcuguacugaugucaguu

SEQ ID NO: 95708 - RNA, 22 nt, Human
ggcugcuguuucagagacuguu

SEQ ID NO: 95709 - RNA, 23 nt, Human
ggcuggaagaaaacagaauuguu

SEQ ID NO: 95710 - RNA, 22 nt, Human
ggcuggaagagacugaggacac

SEQ ID NO: 95711 - RNA, 22 nt, Human
ggcuggaauagagacugacugg

SEQ ID NO: 95712 - RNA, 22 nt, Human
ggcuggacaugagcuuggcagu

SEQ ID NO: 95713 - RNA, 22 nt, Human
ggcuggaccaugcugccccuuc

SEQ ID NO: 95714 - RNA, 19 nt, Human
ggcuggagaaaggaaucag

SEQ ID NO: 95715 - RNA, 22 nt, Human
ggcuggagacaacguccugccc

SEQ ID NO: 95716 - RNA, 17 nt, Human
ggcuggagcagcucccc

SEQ ID NO: 95717 - RNA, 19 nt, Human
ggcuggcaagugacagugu

SEQ ID NO: 95718 - RNA, 22 nt, Human
ggcuggcacagagggcuggugu

SEQ ID NO: 95719 - RNA, 22 nt, Human
ggcuggcacgaagcccugcugg

SEQ ID NO: 95720 - RNA, 22 nt, Human
ggcuggcacucuguccaguguc

SEQ ID NO: 95721 - RNA, 22 nt, Human
ggcuggcacugaggagagcucu

SEQ ID NO: 95722 - RNA, 22 nt, Human
ggcuggcagaagugugcuggcu

SEQ ID NO: 95723 - RNA, 22 nt, Human
ggcuggcaggggaugucagaug

SEQ ID NO: 95724 - RNA, 22 nt, Human
ggcuggccucaggguccucgcu

SEQ ID NO: 95725 - RNA, 22 nt, Human
ggcuggcucagggcuugagaga

SEQ ID NO: 95726 - RNA, 22 nt, Human
ggcuggcucuuaccgacagcgu

SEQ ID NO: 95727 - RNA, 22 nt, Human
ggcuggcugauaaaggguugag

SEQ ID NO: 95728 - RNA, 22 nt, Human
ggcuggcugugcccuguacucu

SEQ ID NO: 95729 - RNA, 22 nt, Human
ggcuggcuuucucuccgcaccu

SEQ ID NO: 95730 - RNA, 22 nt, Human
ggcugggacgaugaggauuagu

SEQ ID NO: 95731 - RNA, 23 nt, Human
ggcugggagcuccgggugcacgu

SEQ ID NO: 95732 - RNA, 22 nt, Human
ggcugggccgcggcuacccaga

SEQ ID NO: 95733 - RNA, 22 nt, Human
ggcugggcuccgggagcaugcg

SEQ ID NO: 95734 - RNA, 22 nt, Human
ggcugggcugcugggucagagc

SEQ ID NO: 95735 - RNA, 22 nt, Human
ggcuggguacccuguuuccccu

SEQ ID NO: 95736 - RNA, 22 nt, Human
ggcugggucccagcugggagga

SEQ ID NO: 95737 - RNA, 22 nt, Human
ggcugguccuuucucuguccua

SEQ ID NO: 95738 - RNA, 22 nt, Human
ggcuggucuccaacccccgauc

SEQ ID NO: 95739 - RNA, 22 nt, Human
ggcugguggggaaagaggacca

SEQ ID NO: 95740 - RNA, 22 nt, Human
ggcugguuugacaaacugacaa

SEQ ID NO: 95741 - RNA, 22 nt, Human
ggcuguaccugccucuccucua

SEQ ID NO: 95742 - RNA, 22 nt, Human
ggcugucaauucauaggucaga

SEQ ID NO: 95743 - RNA, 19 nt, Human
ggcugucucggcccagcca

SEQ ID NO: 95744 - RNA, 22 nt, Human
ggcugucugugguggagcguug

SEQ ID NO: 95745 - RNA, 22 nt, Human
ggcugugaguuuguccuccaug

SEQ ID NO: 95746 - RNA, 22 nt, Human
ggcugugauugguggaugugaa

SEQ ID NO: 95747 - RNA, 22 nt, Human
ggcugugcgucauccggcugca

SEQ ID NO: 95748 - RNA, 22 nt, Human
ggcugugcuugguguccuugga

SEQ ID NO: 95749 - RNA, 21 nt, Human
ggcuguggagccaugacucac

SEQ ID NO: 95750 - RNA, 22 nt, Human
ggcuguggcagcuggaaguggu

SEQ ID NO: 95751 - RNA, 22 nt, Human
ggcuguggcauuaggugaggcc

SEQ ID NO: 95752 - RNA, 22 nt, Human
ggcugugggaugcauaggagcu

SEQ ID NO: 95753 - RNA, 22 nt, Human
ggcuguggggggagccugcccg

SEQ ID NO: 95754 - RNA, 19 nt, Human
ggcugugguggugccuugc

SEQ ID NO: 95755 - RNA, 21 nt, Human
ggcuguguucagggcaugcgg

SEQ ID NO: 95756 - RNA, 22 nt, Human
ggcuuaaaaggaaaaugagagu

SEQ ID NO: 95757 - RNA, 22 nt, Human
ggcuuaaagaauuaacagagau

SEQ ID NO: 95758 - RNA, 22 nt, Human
ggcuuaagauauuucugauucc

SEQ ID NO: 95759 - RNA, 20 nt, Human
ggcuuaaggaauucuuuucu

SEQ ID NO: 95760 - RNA, 22 nt, Human
ggcuuaaguccugaauuuaugc

SEQ ID NO: 95761 - RNA, 17 nt, Human
ggcuuacaggugccagc

SEQ ID NO: 95762 - RNA, 18 nt, Human
ggucaggggcggagagaa

SEQ ID NO: 95763 - RNA, 22 nt, Human
ggucaggggcugcucuacagag

SEQ ID NO: 95764 - RNA, 22 nt, Human
ggucagggggaucugugaggua

SEQ ID NO: 95765 - RNA, 22 nt, Human
ggucagguuuuuaggagugacc

SEQ ID NO: 95766 - RNA, 22 nt, Human
ggucagucucucccgaguguug

SEQ ID NO: 95767 - RNA, 22 nt, Human
ggucaucuguauguccucagcu

SEQ ID NO: 95768 - RNA, 22 nt, Human
ggucaucuguguauccucagug

SEQ ID NO: 95769 - RNA, 23 nt, Human
gguccacccgagccugcagcuuc

SEQ ID NO: 95770 - RNA, 22 nt, Human
gguccagucagauauucaugca

SEQ ID NO: 95771 - RNA, 22 nt, Human
gguccagucuuucccuucuaga

SEQ ID NO: 95772 - RNA, 22 nt, Human
gguccaugauaggaaguuccga

SEQ ID NO: 95773 - RNA, 22 nt, Human
ggucccaggaagugcggcggcg

SEQ ID NO: 95774 - RNA, 22 nt, Human
ggucccagguugacagggagac

SEQ ID NO: 95775 - RNA, 22 nt, Human
ggucccaugaaagagggaggcc

SEQ ID NO: 95776 - RNA, 22 nt, Human
ggucccugaagaggccuggggu

SEQ ID NO: 95777 - RNA, 23 nt, Human
ggucccugacagcgggcaaguug

SEQ ID NO: 95778 - RNA, 22 nt, Human
ggucccuggaaggccaagcuug

SEQ ID NO: 95779 - RNA, 22 nt, Human
gguccucugagcacgccaggca

SEQ ID NO: 95780 - RNA, 22 nt, Human
gguccuggaaauugacggaaag

SEQ ID NO: 95781 - RNA, 22 nt, Human
gguccuggcagcucugugucca

SEQ ID NO: 95782 - RNA, 22 nt, Human
gguccuugcuucgguccaguac

SEQ ID NO: 95783 - RNA, 22 nt, Human
gguccuugugucucuauggccc

SEQ ID NO: 95784 - RNA, 22 nt, Human
gguccuuugccaucucuccacc

SEQ ID NO: 95785 - RNA, 22 nt, Human
ggucggggauggccaggcuccc

SEQ ID NO: 95786 - RNA, 22 nt, Human
ggucgugaauugaaucaguggc

SEQ ID NO: 95787 - RNA, 22 nt, Human
ggucuacauugagagagcugcu

SEQ ID NO: 95788 - RNA, 22 nt, Human
ggucuagaggauguuccuuucc

SEQ ID NO: 95789 - RNA, 22 nt, Human
ggucucagacuggcaggcagug

SEQ ID NO: 95790 - RNA, 22 nt, Human
uccaaauauucggucuuucuga

SEQ ID NO: 95791 - RNA, 22 nt, Human
uccaaauucuauguucuuucca

SEQ ID NO: 95792 - RNA, 22 nt, Human
uccaacuaggcacacagcuggu

SEQ ID NO: 95793 - RNA, 22 nt, Human
uccaacuucugcaaucaguuug

SEQ ID NO: 95794 - RNA, 22 nt, Human
uccaagaacccaagcgaaugcc

SEQ ID NO: 95795 - RNA, 22 nt, Human
uccaagaaguuucguuaaaugu

SEQ ID NO: 95796 - RNA, 22 nt, Human
uccaagaaucacugacacagcu

SEQ ID NO: 95797 - RNA, 22 nt, Human
uccaagaguucaaggcuacagu

SEQ ID NO: 95798 - RNA, 22 nt, Human
uccaagaucaagguguuggcag

SEQ ID NO: 95799 - RNA, 22 nt, Human
uccaagaugguugguguggugg

SEQ ID NO: 95800 - RNA, 22 nt, Human
uccaagcacuguuaauuaaacu

SEQ ID NO: 95801 - RNA, 22 nt, Human
uccaagcauguggucaggagcc

SEQ ID NO: 95802 - RNA, 22 nt, Human
uccaagcuguauguuccuagag

SEQ ID NO: 95803 - RNA, 22 nt, Human
uccaaggacauuguucuaguug

SEQ ID NO: 95804 - RNA, 22 nt, Human
uccaaggaggcuuugacgucca

SEQ ID NO: 95805 - RNA, 22 nt, Human
uccaaggcauagacacagugcc

SEQ ID NO: 95806 - RNA, 22 nt, Human
uccaagggcaacaauggaacac

SEQ ID NO: 95807 - RNA, 22 nt, Human
uccaagggcaugcugaaauaag

SEQ ID NO: 95808 - RNA, 23 nt, Human
uccaagggcuacaaacacagacc

SEQ ID NO: 95809 - RNA, 22 nt, Human
uccaagggcucauggacacuuu

SEQ ID NO: 95810 - RNA, 22 nt, Human
uccaaggguucaugugcauuca

SEQ ID NO: 95811 - RNA, 22 nt, Human
uccaaguauaaauuagauacug

SEQ ID NO: 95812 - RNA, 22 nt, Human
uccaaguugauguuucuuaaau

SEQ ID NO: 95813 - RNA, 22 nt, Human
uccaauaacaucuaaaaacuua

SEQ ID NO: 95814 - RNA, 22 nt, Human
uccaauauggauaaaaggggcc

SEQ ID NO: 95815 - RNA, 22 nt, Human
uccaauauuucucacauaugga

SEQ ID NO: 95816 - RNA, 22 nt, Human
uccaauauuucucauauaugga

SEQ ID NO: 95817 - RNA, 22 nt, Human
uccaaucuaguaugauaaauga

SEQ ID NO: 95818 - RNA, 22 nt, Human
uccaauguuccugcuuucagcu

SEQ ID NO: 95819 - RNA, 20 nt, Human
uccaauuuaagaauuuagag

SEQ ID NO: 95820 - RNA, 19 nt, Human
uccaauuuguauguuuuca

SEQ ID NO: 95821 - RNA, 22 nt, Human
uccaauuuguuugaugauggaa

SEQ ID NO: 95822 - RNA, 22 nt, Human
uccaauuuuacgucuguauaaa

SEQ ID NO: 95823 - RNA, 21 nt, Human
uccacaaguuagaaggaaauu

SEQ ID NO: 95824 - RNA, 22 nt, Human
uccacagaauguaagauccaca

SEQ ID NO: 95825 - RNA, 22 nt, Human
uccacagacguguuauuaguug

SEQ ID NO: 95826 - RNA, 22 nt, Human
uccacagggauucacccaaaag

SEQ ID NO: 95827 - RNA, 19 nt, Human
uccacagugguugaacuag

SEQ ID NO: 95828 - RNA, 22 nt, Human
uccacauagucauuaauuucug

SEQ ID NO: 95829 - RNA, 22 nt, Human
uccacauucucuguuacagaua

SEQ ID NO: 95830 - RNA, 22 nt, Human
uccaccagccaggcccaggcug

SEQ ID NO: 95831 - RNA, 22 nt, Human
uccaccauguaacaagcucugu

SEQ ID NO: 95832 - RNA, 23 nt, Human
uccaccccagcugaggcuuagcc

SEQ ID NO: 95833 - RNA, 22 nt, Human
uccacccccagacagcugguga

SEQ ID NO: 95834 - RNA, 22 nt, Human
uccaccccugggaaugucaaua

SEQ ID NO: 95835 - RNA, 22 nt, Human
uccacccugcuuucuuaucucc

SEQ ID NO: 95836 - RNA, 22 nt, Human
uccaccugggcaacagugccuc

SEQ ID NO: 95837 - RNA, 19 nt, Human
uccaccuuucuucauuugg

SEQ ID NO: 95838 - RNA, 22 nt, Human
uccacgcugugugaccuugggc

SEQ ID NO: 95839 - RNA, 22 nt, Human
uccacuccuuaugccagacggu

SEQ ID NO: 95840 - RNA, 22 nt, Human
uccacugcuacaaccucccaga

SEQ ID NO: 95841 - RNA, 22 nt, Human
uccacugugcagcucugcugau

SEQ ID NO: 95842 - RNA, 22 nt, Human
uccacuucauccagggucacca

SEQ ID NO: 95843 - RNA, 21 nt, Human
uccagaaaagaggucauuagc

SEQ ID NO: 95844 - RNA, 19 nt, Human
uccagaacugcccuggccu

SEQ ID NO: 95845 - RNA, 22 nt, Human
uccagaccaaggaaggcugggc

SEQ ID NO: 95846 - RNA, 22 nt, Human
uccagacccaugacccugggga

SEQ ID NO: 95847 - RNA, 22 nt, Human
uccagacucacucaugugacua

SEQ ID NO: 95848 - RNA, 22 nt, Human
uccagacugcccugcacaugug

SEQ ID NO: 95849 - RNA, 22 nt, Human
uccagacugcuucuaggaugag

SEQ ID NO: 95850 - RNA, 22 nt, Human
uccagacuggggccaugucugc

SEQ ID NO: 95851 - RNA, 22 nt, Human
uccagagaggcauauuuacaag

SEQ ID NO: 95852 - RNA, 22 nt, Human
uccagagcaggugucuacacag

SEQ ID NO: 95853 - RNA, 22 nt, Human
uccagagccugggguuuguaac

SEQ ID NO: 95854 - RNA, 23 nt, Human
uccagagcucaugcucucaacca

SEQ ID NO: 95855 - RNA, 21 nt, Human
uccagaggaggacagacucag

SEQ ID NO: 95856 - RNA, 22 nt, Human
uccagaggcaaaaagguaugga

SEQ ID NO: 95857 - RNA, 22 nt, Human
uccagagguauguagagaguau

SEQ ID NO: 95858 - RNA, 22 nt, Human
uccagagugcugacgcagaccc

SEQ ID NO: 95859 - RNA, 23 nt, Human
uccagagugugagcuugccgugc

SEQ ID NO: 95860 - RNA, 22 nt, Human
uccagcacagaauuuccuagcu

SEQ ID NO: 95861 - RNA, 22 nt, Human
uccagcaccaccacagggaaga

SEQ ID NO: 95862 - RNA, 22 nt, Human
uccagcacucgcccagggcuug

SEQ ID NO: 95863 - RNA, 22 nt, Human
uccagcagaaaagagguaggga

SEQ ID NO: 95864 - RNA, 22 nt, Human
uccagcagccacaccucuggac

SEQ ID NO: 95865 - RNA, 22 nt, Human
uccagcagccugacuucccucu

SEQ ID NO: 95866 - RNA, 22 nt, Human
uccagcagguguuugccaacuu

SEQ ID NO: 95867 - RNA, 22 nt, Human
uccagcagguuggucaggugca

SEQ ID NO: 95868 - RNA, 19 nt, Human
uccagcagugcuugaaauc

SEQ ID NO: 95869 - RNA, 20 nt, Human
uccagcauauaaacuccucu

SEQ ID NO: 95870 - RNA, 22 nt, Human
uccagcauauauagagaaugag

SEQ ID NO: 95871 - RNA, 22 nt, Human
gggcauggugcugguguucaug

SEQ ID NO: 95872 - RNA, 22 nt, Human
gggccaaggggagcuggaaggg

SEQ ID NO: 95873 - RNA, 22 nt, Human
gggccacauugaagggugggua

SEQ ID NO: 95874 - RNA, 22 nt, Human
gggccacuggguccugcuggcc

SEQ ID NO: 95875 - RNA, 22 nt, Human
gggccacuucuagugccucaga

SEQ ID NO: 95876 - RNA, 22 nt, Human
gggccagacccuuggcgaucug

SEQ ID NO: 95877 - RNA, 22 nt, Human
gggccagagcuuggcagcuggg

SEQ ID NO: 95878 - RNA, 22 nt, Human
gggccagccuacugcuagaccc

SEQ ID NO: 95879 - RNA, 22 nt, Human
gggccaggaguggagauauggg

SEQ ID NO: 95880 - RNA, 22 nt, Human
gggccagguggaccccagccuc

SEQ ID NO: 95881 - RNA, 22 nt, Human
gggccaguagcaccugugugga

SEQ ID NO: 95882 - RNA, 22 nt, Human
gggccagugaacaaugagggaa

SEQ ID NO: 95883 - RNA, 22 nt, Human
gggccaugagagguucaucaac

SEQ ID NO: 95884 - RNA, 23 nt, Human
gggcccagcacaggaccuggcag

SEQ ID NO: 95885 - RNA, 22 nt, Human
gggcccagcacuggcugggauc

SEQ ID NO: 95886 - RNA, 22 nt, Human
gggccccacuggggcugccugc

SEQ ID NO: 95887 - RNA, 22 nt, Human
gggccccaguccucccacgugg

SEQ ID NO: 95888 - RNA, 22 nt, Human
gggccccugggaauucugugau

SEQ ID NO: 95889 - RNA, 22 nt, Human
gggcccugaucugugagcgcag

SEQ ID NO: 95890 - RNA, 22 nt, Human
gggcccugcguccggaagucug

SEQ ID NO: 95891 - RNA, 18 nt, Human
gggcccuggcguccgccc

SEQ ID NO: 95892 - RNA, 22 nt, Human
gggcccuggcuuuccuguucuu

SEQ ID NO: 95893 - RNA, 22 nt, Human
gggcccuggggccugauuugca

SEQ ID NO: 95894 - RNA, 22 nt, Human
gggccucagcucugcucugcaa

SEQ ID NO: 95895 - RNA, 22 nt, Human
gggccucaggccuugcucugug

SEQ ID NO: 95896 - RNA, 22 nt, Human
gggccucaugauggcucaggaa

SEQ ID NO: 95897 - RNA, 22 nt, Human
gggccugauuagcaggcuagcu

SEQ ID NO: 95898 - RNA, 22 nt, Human
gggccugccaggcuuucagcau

SEQ ID NO: 95899 - RNA, 21 nt, Human
gggccuggcugcgcaggacgg

SEQ ID NO: 95900 - RNA, 22 nt, Human
gggccuggggugacguaccccu

SEQ ID NO: 95901 - RNA, 22 nt, Human
gggccuggugcuucugacuccu

SEQ ID NO: 95902 - RNA, 22 nt, Human
gggccuguaugggucucagaua

SEQ ID NO: 95903 - RNA, 22 nt, Human
gggccugugcacaguucuguua

SEQ ID NO: 95904 - RNA, 22 nt, Human
gggccuguguguucaggagccu

SEQ ID NO: 95905 - RNA, 22 nt, Human
ggucucagcuggaguccuuggu

SEQ ID NO: 95906 - RNA, 22 nt, Human
ggucucagguagggccuaggaa

SEQ ID NO: 95907 - RNA, 22 nt, Human
ggucucaucuuucagcgucgag

SEQ ID NO: 95908 - RNA, 22 nt, Human
ggucucauguccuaugugcuua

SEQ ID NO: 95909 - RNA, 22 nt, Human
ggucuccugaccuuuagucccu

SEQ ID NO: 95910 - RNA, 22 nt, Human
ggucucugcagcucccggcccc

SEQ ID NO: 95911 - RNA, 22 nt, Human
ggucucuguugccuccaucaag

SEQ ID NO: 95912 - RNA, 22 nt, Human
ggucucuguuuggggcuggcaa

SEQ ID NO: 95913 - RNA, 22 nt, Human
ggucugagauauuuguucagcu

SEQ ID NO: 95914 - RNA, 22 nt, Human
ggucugcccuggguggaggcgc

SEQ ID NO: 95915 - RNA, 22 nt, Human
ggucuggacccuccuggagugg

SEQ ID NO: 95916 - RNA, 22 nt, Human
ggucuggaugcugagguuccca

SEQ ID NO: 95917 - RNA, 22 nt, Human
ggucuggccaauagacagcccc

SEQ ID NO: 95918 - RNA, 22 nt, Human
ggucuggccuccgggcaggugg

SEQ ID NO: 95919 - RNA, 22 nt, Human
ggucugugucauaggcugaguu

SEQ ID NO: 95920 - RNA, 17 nt, Human
ggucugugucuagggaa

SEQ ID NO: 95921 - RNA, 21 nt, Human
ggucuuccaaauaaggagaaa

SEQ ID NO: 95922 - RNA, 22 nt, Human
ggucuuccgagaggccugugcu

SEQ ID NO: 95923 - RNA, 18 nt, Human
ggucuuuaggucaguguc

SEQ ID NO: 95924 - RNA, 22 nt, Human
ggugaaauuccuuguggaaagu

SEQ ID NO: 95925 - RNA, 22 nt, Human
ggugaacauugaugugguuaca

SEQ ID NO: 95926 - RNA, 22 nt, Human
ggugaagggccuuaggagacag

SEQ ID NO: 95927 - RNA, 22 nt, Human
ggugaauaagcugaacacuugg

SEQ ID NO: 95928 - RNA, 19 nt, Human
ggugaccaccuggucagug

SEQ ID NO: 95929 - RNA, 22 nt, Human
ggugaccagggucaguagcuuu

SEQ ID NO: 95930 - RNA, 22 nt, Human
ggugagacuuuagaagagccag

SEQ ID NO: 95931 - RNA, 22 nt, Human
ggugagaggcagaggacagcuu

SEQ ID NO: 95932 - RNA, 15 nt, Human
ggugagaguaggauu

SEQ ID NO: 95933 - RNA, 22 nt, Human
ggugagcagcugucuguaugga

SEQ ID NO: 95934 - RNA, 22 nt, Human
ggugaggaaagauggugacagu

SEQ ID NO: 95935 - RNA, 22 nt, Human
ggugaggcagguggcugcugag

SEQ ID NO: 95936 - RNA, 22 nt, Human
ggugaggccuguacaaagcugc

SEQ ID NO: 95937 - RNA, 18 nt, Human
ggugagggagcuggaagc

SEQ ID NO: 95938 - RNA, 22 nt, Human
ggugaggguaaacuaaaacauc

SEQ ID NO: 95939 - RNA, 22 nt, Human
ggugaggguaaauauaggcaaa

SEQ ID NO: 95940 - RNA, 22 nt, Human
ggugagugucaaugguuagagu

SEQ ID NO: 95941 - RNA, 22 nt, Human
ggugauucugugaggggcugac

SEQ ID NO: 95942 - RNA, 22 nt, Human
ggugcaaagggccuagagagug

SEQ ID NO: 95943 - RNA, 22 nt, Human
ggugcagagcagugucagagca

SEQ ID NO: 95944 - RNA, 22 nt, Human
ggugcagaggagccagcugggg

SEQ ID NO: 95945 - RNA, 22 nt, Human
ggugcagaucuuucucuucagg

SEQ ID NO: 95946 - RNA, 22 nt, Human
ggugcagcaguuuguucagcuu

SEQ ID NO: 95947 - RNA, 21 nt, Human
ggugcagguaaugaugauaua

SEQ ID NO: 95948 - RNA, 22 nt, Human
ggugcauggaaagaguaaguaa

SEQ ID NO: 95949 - RNA, 22 nt, Human
ggugcaugugagaaagacuggg

SEQ ID NO: 95950 - RNA, 18 nt, Human
ggugccaagucugggauc

SEQ ID NO: 95951 - RNA, 22 nt, Human
ggugccacauaaauggagagag

SEQ ID NO: 95952 - RNA, 22 nt, Human
ggugcccaaggaagguugccgu

SEQ ID NO: 95953 - RNA, 22 nt, Human
ggugcccaccugucuuccugga

SEQ ID NO: 95954 - RNA, 22 nt, Human
ggugcccugccaggaugugcca

SEQ ID NO: 95955 - RNA, 22 nt, Human
ggugccguugaggaaguaacug

SEQ ID NO: 95956 - RNA, 22 nt, Human
ggugccuuccugccagccgcaa

SEQ ID NO: 95957 - RNA, 22 nt, Human
ggugcugaauaaauacuaguua

SEQ ID NO: 95958 - RNA, 20 nt, Human
ggugcugauaagaaagaagu

SEQ ID NO: 95959 - RNA, 22 nt, Human
ggugcugauauuguuuugguga

SEQ ID NO: 95960 - RNA, 22 nt, Human
ggugcugauguuauugaugcug

SEQ ID NO: 95961 - RNA, 22 nt, Human
ggugcugauucacugacuucug

SEQ ID NO: 95962 - RNA, 22 nt, Human
ggugcugccuauagucugaaac

SEQ ID NO: 95963 - RNA, 22 nt, Human
gguggaagccuucagaacagca

SEQ ID NO: 95964 - RNA, 22 nt, Human
gguggagcugugaguagaaucu

SEQ ID NO: 95965 - RNA, 22 nt, Human
gguggagcuguggacaggaagg

SEQ ID NO: 95966 - RNA, 19 nt, Human
gguggcagaacgugggucc

SEQ ID NO: 95967 - RNA, 22 nt, Human
gguggcagaauaauugaagguc

SEQ ID NO: 95968 - RNA, 22 nt, Human
gguggcagaggugcaucagccc

SEQ ID NO: 95969 - RNA, 22 nt, Human
gguggcagcauggucccagugu

SEQ ID NO: 95970 - RNA, 22 nt, Human
gguggcagugcuugcgggucua

SEQ ID NO: 95971 - RNA, 22 nt, Human
gguggccauggucagguagcgg

SEQ ID NO: 95972 - RNA, 22 nt, Human
gguggcccuaaccgcagccucc

SEQ ID NO: 95973 - RNA, 22 nt, Human
gguggccuagggcccagccugu

SEQ ID NO: 95974 - RNA, 22 nt, Human
gguggccuccagggcauaggug

SEQ ID NO: 95975 - RNA, 22 nt, Human
gguggccucugcaggccucgac

SEQ ID NO: 95976 - RNA, 18 nt, Human
gguggccuugacuucucu

SEQ ID NO: 95977 - RNA, 21 nt, Human
gguggccuuggugagagaccu

SEQ ID NO: 95978 - RNA, 22 nt, Human
gguggccuuucaguggaucagg

SEQ ID NO: 95979 - RNA, 22 nt, Human
gguggcggccacuucagcccug

SEQ ID NO: 95980 - RNA, 22 nt, Human
gggcuccuccucugacuguggc

SEQ ID NO: 95981 - RNA, 22 nt, Human
gggcuccuggcagucaugcuca

SEQ ID NO: 95982 - RNA, 19 nt, Human
gggcuccuugggccucucu

SEQ ID NO: 95983 - RNA, 22 nt, Human
gggcucucaugaguguguggua

SEQ ID NO: 95984 - RNA, 21 nt, Human
gggcucuccugaggccaugaa

SEQ ID NO: 95985 - RNA, 22 nt, Human
gggcucucuuuuuggccugccc

SEQ ID NO: 95986 - RNA, 20 nt, Human
gggcucugcauccaucagcc

SEQ ID NO: 95987 - RNA, 22 nt, Human
gggcucugccuggcugggagua

SEQ ID NO: 95988 - RNA, 22 nt, Human
gggcucuggaaaugggagcucc

SEQ ID NO: 95989 - RNA, 22 nt, Human
gggcucuggggucagacagccu

SEQ ID NO: 95990 - RNA, 22 nt, Human
gggcucuucucaggagcuaucu

SEQ ID NO: 95991 - RNA, 22 nt, Human
gggcugaaaggccgccucagau

SEQ ID NO: 95992 - RNA, 22 nt, Human
gggcugacaaccaucugacaag

SEQ ID NO: 95993 - RNA, 22 nt, Human
gggcugacaaucucuuuacuua

SEQ ID NO: 95994 - RNA, 22 nt, Human
gggcugacauauuuggugcucu

SEQ ID NO: 95995 - RNA, 22 nt, Human
gggcugaccaaugccuugcuuu

SEQ ID NO: 95996 - RNA, 22 nt, Human
gggcugacgaaggccaugugug

SEQ ID NO: 95997 - RNA, 22 nt, Human
gggcugagagcuggaaucugag

SEQ ID NO: 95998 - RNA, 22 nt, Human
gggcugagcacauacugacagc

SEQ ID NO: 95999 - RNA, 22 nt, Human
gggcugagccauuugaaccuug

SEQ ID NO: 96000 - RNA, 22 nt, Human
gggcugagucaucuggggccuc

SEQ ID NO: 96001 - RNA, 22 nt, Human
gggcugaugugacagaacucuc

SEQ ID NO: 96002 - RNA, 22 nt, Human
gggcugauucgauggggguaga

SEQ ID NO: 96003 - RNA, 22 nt, Human
gggcugcacagaucuucaaggg

SEQ ID NO: 96004 - RNA, 22 nt, Human
gggcugcacguauucugcucac

SEQ ID NO: 96005 - RNA, 22 nt, Human
gggcugcaucagcaggacccgg

SEQ ID NO: 96006 - RNA, 22 nt, Human
gggcugccugagcaucuccucc

SEQ ID NO: 96007 - RNA, 22 nt, Human
gggcugccuuuuaauucuuccc

SEQ ID NO: 96008 - RNA, 22 nt, Human
gggcugcugccaaucacagccu

SEQ ID NO: 96009 - RNA, 22 nt, Human
gggcuggaaaaacaacauacaa

SEQ ID NO: 96010 - RNA, 22 nt, Human
gggcuggaggugagcaggacag

SEQ ID NO: 96011 - RNA, 22 nt, Human
gggcuggaguugggaagacaaa

SEQ ID NO: 96012 - RNA, 22 nt, Human
gggcuggaucuccugcaggcag

SEQ ID NO: 96013 - RNA, 22 nt, Human
gggcuggauguuugaugacgaa

SEQ ID NO: 96014 - RNA, 22 nt, Human
gggcuggcaggaccugggcuga

SEQ ID NO: 96015 - RNA, 22 nt, Human
gggcuggcaucaguugccgaga

SEQ ID NO: 96016 - RNA, 22 nt, Human
gggcuggcaucgguugcugaga

SEQ ID NO: 96017 - RNA, 20 nt, Human
gggcuggcgcauggggaaag

SEQ ID NO: 96018 - RNA, 22 nt, Human
gggcuggcgggaaaggcaauuc

SEQ ID NO: 96019 - RNA, 22 nt, Human
gggcuggcugauuuuccucucu

SEQ ID NO: 96020 - RNA, 22 nt, Human
gggcuguaggagcuggaauggg

SEQ ID NO: 96021 - RNA, 22 nt, Human
gggcugucacgccccugcaccu

SEQ ID NO: 96022 - RNA, 22 nt, Human
gggccuucagccuuggacugag

SEQ ID NO: 96023 - RNA, 21 nt, Human
gggccuugagugugcgguggg

SEQ ID NO: 96024 - RNA, 21 nt, Human
gggcgaggccugauguggcuc

SEQ ID NO: 96025 - RNA, 22 nt, Human
gggcgcaucaccugaggucagg

SEQ ID NO: 96026 - RNA, 22 nt, Human
gggcggggcuuccguccuccac

SEQ ID NO: 96027 - RNA, 22 nt, Human
gggcuaaaugcagaaaugcaga

SEQ ID NO: 96028 - RNA, 22 nt, Human
gggcuaagcagagugggaacag

SEQ ID NO: 96029 - RNA, 22 nt, Human
gggcuaagcucgcccagggcca

SEQ ID NO: 96030 - RNA, 22 nt, Human
gggcuagcagauucuaccuaau

SEQ ID NO: 96031 - RNA, 22 nt, Human
gggcuaggcuuggccagcacug

SEQ ID NO: 96032 - RNA, 22 nt, Human
gggcuaggucugaucagagaag

SEQ ID NO: 96033 - RNA, 22 nt, Human
gggcucagagcauuuggguugg

SEQ ID NO: 96034 - RNA, 22 nt, Human
gggcucagaggaguggccuggg

SEQ ID NO: 96035 - RNA, 22 nt, Human
gggcucagccccauugaaccag

SEQ ID NO: 96036 - RNA, 22 nt, Human
gggcucagccuccucacuucga

SEQ ID NO: 96037 - RNA, 22 nt, Human
gggcucagucugcggcgcgcgg

SEQ ID NO: 96038 - RNA, 22 nt, Human
gggcucagucuggcguggaaug

SEQ ID NO: 96039 - RNA, 22 nt, Human
gggcucauggacagcucuccag

SEQ ID NO: 96040 - RNA, 22 nt, Human
gggcuccaaccccagugaacuc

SEQ ID NO: 96041 - RNA, 22 nt, Human
gggcuccacgcacgcgagaggu

SEQ ID NO: 96042 - RNA, 22 nt, Human
gggcuccagaguccauguucuu

SEQ ID NO: 96043 - RNA, 22 nt, Human
gggcuccagauugcagcgauca

SEQ ID NO: 96044 - RNA, 22 nt, Human
gggcuccagcagaggcagccgg

SEQ ID NO: 96045 - RNA, 22 nt, Human
gggcuccagcccgggaccaggu

SEQ ID NO: 96046 - RNA, 22 nt, Human
gggcuccaggagcccuaagaga

SEQ ID NO: 96047 - RNA, 23 nt, Human
gggcuccagucucugcucaguug

SEQ ID NO: 96048 - RNA, 22 nt, Human
gggcuccaucacaggcuccauc

SEQ ID NO: 96049 - RNA, 22 nt, Human
gggcuccaucggacuuggguuu

SEQ ID NO: 96050 - RNA, 22 nt, Human
gggcuccugccuccuggcaccu

SEQ ID NO: 96051 - RNA, 22 nt, Human
gggcucggcaucuguggacucu

SEQ ID NO: 96052 - RNA, 22 nt, Human
gggcucuaggccaagagucccg

SEQ ID NO: 96053 - RNA, 19 nt, Human
gggcucucgagcaaccaac

SEQ ID NO: 96054 - RNA, 22 nt, Human
gggcucucgauuagacccuggg

SEQ ID NO: 96055 - RNA, 21 nt, Human
gggcucugcccuccuggagcu

SEQ ID NO: 96056 - RNA, 22 nt, Human
gggcucuggacccaggcaagag

SEQ ID NO: 96057 - RNA, 22 nt, Human
gggcucuggauggagccugcag

SEQ ID NO: 96058 - RNA, 19 nt, Human
gggcucuggccucaguggg

SEQ ID NO: 96059 - RNA, 22 nt, Human
gggcucugguccugaacugaag

SEQ ID NO: 96060 - RNA, 22 nt, Human
gggcucuguccauuccuucaua

SEQ ID NO: 96061 - RNA, 22 nt, Human
gggcucuguggaugugagagcu

SEQ ID NO: 96062 - RNA, 22 nt, Human
gggcugaauuuguugcauguaa

SEQ ID NO: 96063 - RNA, 22 nt, Human
gggcugacuccuauuggaugaa

SEQ ID NO: 96064 - RNA, 22 nt, Human
gggcugagaaguugaucccaag

SEQ ID NO: 96065 - RNA, 22 nt, Human
gggcugagccacagcuuuuguu

SEQ ID NO: 96066 - RNA, 22 nt, Human
gggcugagcuaagcuggguuga

SEQ ID NO: 96067 - RNA, 22 nt, Human
gggcugaggcuaccacuggucu

SEQ ID NO: 96068 - RNA, 22 nt, Human
gggcugagggccaauuccuacu

SEQ ID NO: 96069 - RNA, 22 nt, Human
gggcugagugucccaggccgaa

SEQ ID NO: 96070 - RNA, 22 nt, Human
gggcugaucgcuugagcucagg

SEQ ID NO: 96071 - RNA, 22 nt, Human
gggcugcugcccaggaggcacc

SEQ ID NO: 96072 - RNA, 22 nt, Human
gggcugcuguagagaacauguu

SEQ ID NO: 96073 - RNA, 22 nt, Human
gggcugcuguguuccugaggca

SEQ ID NO: 96074 - RNA, 22 nt, Human
gggcugcuuauacugaugauaa

SEQ ID NO: 96075 - RNA, 22 nt, Human
gggcugcuugcuggagacagac

SEQ ID NO: 96076 - RNA, 22 nt, Human
gggcuggacaucuaagguagcu

SEQ ID NO: 96077 - RNA, 21 nt, Human
gggcuggacaugguggcucau

SEQ ID NO: 96078 - RNA, 22 nt, Human
gggcuggagaugcuuauggaga

SEQ ID NO: 96079 - RNA, 22 nt, Human
gggcuggagccuggcggugguu

SEQ ID NO: 96080 - RNA, 21 nt, Human
gggcuggaggaugggaagccc

SEQ ID NO: 96081 - RNA, 20 nt, Human
gggcuggauaauucuuugcu

SEQ ID NO: 96082 - RNA, 22 nt, Human
gggcuggaugggagccuuggcc

SEQ ID NO: 96083 - RNA, 22 nt, Human
gggcuggauuacugaacugagu

SEQ ID NO: 96084 - RNA, 22 nt, Human
gggcuggcuaagacuuuucugu

SEQ ID NO: 96085 - RNA, 22 nt, Human
gggcuggcucugucuagaaagg

SEQ ID NO: 96086 - RNA, 22 nt, Human
gggcugggaauggcuaaguaug

SEQ ID NO: 96087 - RNA, 16 nt, Human
gggcugggggauucug

SEQ ID NO: 96088 - RNA, 22 nt, Human
gggcuggugaggcugcccugca

SEQ ID NO: 96089 - RNA, 22 nt, Human
guauacuagauagacaguauca

SEQ ID NO: 96090 - RNA, 22 nt, Human
guauauaugugugaacauguau

SEQ ID NO: 96091 - RNA, 22 nt, Human
guauccuccccgcuggccuuca

SEQ ID NO: 96092 - RNA, 22 nt, Human
guaucuggugaggguuccccug

SEQ ID NO: 96093 - RNA, 22 nt, Human
guaucuguggauuuugguaucc

SEQ ID NO: 96094 - RNA, 22 nt, Human
guaugaaagcaucauuccugcu

SEQ ID NO: 96095 - RNA, 22 nt, Human
guaugaaggcgagagcccacua

SEQ ID NO: 96096 - RNA, 22 nt, Human
guaugaaguaagauauuguuca

SEQ ID NO: 96097 - RNA, 22 nt, Human
guaugaucaacuucauguccua

SEQ ID NO: 96098 - RNA, 22 nt, Human
guaugcaucgacucaagucuga

SEQ ID NO: 96099 - RNA, 22 nt, Human
guauggaaguauaaguuuugaa

SEQ ID NO: 96100 - RNA, 22 nt, Human
guauguauguauauguuuaaga

SEQ ID NO: 96101 - RNA, 22 nt, Human
guaugucuauaguuuuuaaaua

SEQ ID NO: 96102 - RNA, 22 nt, Human
guaugugagguugguuuccagg

SEQ ID NO: 96103 - RNA, 22 nt, Human
guaugugugcaaauguaaauau

SEQ ID NO: 96104 - RNA, 22 nt, Human
guauuagaagaaauuauaggua

SEQ ID NO: 96105 - RNA, 22 nt, Human
guauuagggccaaaggcaggaa

SEQ ID NO: 96106 - RNA, 22 nt, Human
guauuagucaauuacagugggg

SEQ ID NO: 96107 - RNA, 18 nt, Human
guauuaguuuucagagag

SEQ ID NO: 96108 - RNA, 22 nt, Human
guauuauuaaguguauuugacc

SEQ ID NO: 96109 - RNA, 22 nt, Human
guauucaaggauuuuguucuac

SEQ ID NO: 96110 - RNA, 22 nt, Human
guauucauauuaaacauaucaa

SEQ ID NO: 96111 - RNA, 22 nt, Human
guauuccuaagucaugacaaau

SEQ ID NO: 96112 - RNA, 22 nt, Human
guauuccugcaaauagcaguga

SEQ ID NO: 96113 - RNA, 22 nt, Human
guauuccuucagaagacguuua

SEQ ID NO: 96114 - RNA, 22 nt, Human
guauucucaggugguuccucga

SEQ ID NO: 96115 - RNA, 22 nt, Human
guauucugggccgauuacaaaa

SEQ ID NO: 96116 - RNA, 22 nt, Human
guauucuuauacucagugagcu

SEQ ID NO: 96117 - RNA, 22 nt, Human
guauugcauuguuucaagcugu

SEQ ID NO: 96118 - RNA, 22 nt, Human
guauuuaauuccauuaaguuag

SEQ ID NO: 96119 - RNA, 22 nt, Human
guauuuauaggggaaugagagu

SEQ ID NO: 96120 - RNA, 22 nt, Human
guauuucaucuugaaaaccagu

SEQ ID NO: 96121 - RNA, 22 nt, Human
guauuucuagaaccaaaagcca

SEQ ID NO: 96122 - RNA, 22 nt, Human
guauuucuaguuucuuccacag

SEQ ID NO: 96123 - RNA, 22 nt, Human
guauuugucuuguuggucucca

SEQ ID NO: 96124 - RNA, 22 nt, Human
guauuuucaagagcaguaguau

SEQ ID NO: 96125 - RNA, 22 nt, Human
guauuuuuagguaaggaaagua

SEQ ID NO: 96126 - RNA, 22 nt, Human
gucaaaaugagcuuuguuauug

SEQ ID NO: 96127 - RNA, 22 nt, Human
gucaaacagccuccuguucuaa

SEQ ID NO: 96128 - RNA, 22 nt, Human
gucaaaugcacagaaccauuaa

SEQ ID NO: 96129 - RNA, 22 nt, Human
gucaacaaagaaaauuguuaau

SEQ ID NO: 96130 - RNA, 22 nt, Human
gucaagcagaagauaauuuaaa

SEQ ID NO: 96131 - RNA, 22 nt, Human
gucaauauagaucaaugcacag

SEQ ID NO: 96132 - RNA, 22 nt, Human
gucaauaucuugguuguacuau

SEQ ID NO: 96133 - RNA, 17 nt, Human
gucaauauuguugacag

SEQ ID NO: 96134 - RNA, 22 nt, Human
gucacacagggccuccaaauca

SEQ ID NO: 96135 - RNA, 22 nt, Human
gucacagaucucuugagucaag

SEQ ID NO: 96136 - RNA, 22 nt, Human
gucacaggguccccauauggag

SEQ ID NO: 96137 - RNA, 22 nt, Human
gucacagguguggaggugcugg

SEQ ID NO: 96138 - RNA, 22 nt, Human
uccagugguacauggagacacu

SEQ ID NO: 96139 - RNA, 22 nt, Human
uccagugguaguaaagaggucu

SEQ ID NO: 96140 - RNA, 22 nt, Human
uccagugguggcucccggaccu

SEQ ID NO: 96141 - RNA, 22 nt, Human
uccagugguuugaaaggggugu

SEQ ID NO: 96142 - RNA, 22 nt, Human
uccagugucugagcccuuagcu

SEQ ID NO: 96143 - RNA, 22 nt, Human
uccaguguggucaaaggggaau

SEQ ID NO: 96144 - RNA, 21 nt, Human
uccaguugagacugaagaucu

SEQ ID NO: 96145 - RNA, 22 nt, Human
uccaguuuauuuuuggcagggu

SEQ ID NO: 96146 - RNA, 22 nt, Human
uccaguuuccaaucacugcacg

SEQ ID NO: 96147 - RNA, 16 nt, Human
uccaguuuucagcacu

SEQ ID NO: 96148 - RNA, 22 nt, Human
uccauaaaugaaauagaacgcu

SEQ ID NO: 96149 - RNA, 22 nt, Human
uccauaaauuuuaugaacauau

SEQ ID NO: 96150 - RNA, 19 nt, Human
uccauacaaacuguugaaa

SEQ ID NO: 96151 - RNA, 22 nt, Human
uccauacacauugaauuuuagu

SEQ ID NO: 96152 - RNA, 22 nt, Human
uccauacauaaaauguuuaaug

SEQ ID NO: 96153 - RNA, 22 nt, Human
uccauacauauccaaagagaag

SEQ ID NO: 96154 - RNA, 22 nt, Human
uccauacuaacagcauuuauca

SEQ ID NO: 96155 - RNA, 22 nt, Human
uccauacucagaaaguauugca

SEQ ID NO: 96156 - RNA, 22 nt, Human
uccauacuggaguccacaguuc

SEQ ID NO: 96157 - RNA, 22 nt, Human
uccauaguagaaaaugggacag

SEQ ID NO: 96158 - RNA, 22 nt, Human
uccauagugaauggguaaugca

SEQ ID NO: 96159 - RNA, 22 nt, Human
uccaucaccauuucugcgagcu

SEQ ID NO: 96160 - RNA, 22 nt, Human
uccaucauggcagcagcaguga

SEQ ID NO: 96161 - RNA, 22 nt, Human
uccauccacccugcauuauauu

SEQ ID NO: 96162 - RNA, 22 nt, Human
uccauccaggccagcaguaauc

SEQ ID NO: 96163 - RNA, 21 nt, Human
uccauccaucaguccagccag

SEQ ID NO: 96164 - RNA, 22 nt, Human
uccaucuggagacuuccugguc

SEQ ID NO: 96165 - RNA, 22 nt, Human
uccaucugguggcuuccuuuug

SEQ ID NO: 96166 - RNA, 22 nt, Human
uccaucuguuuacuauaaagau

SEQ ID NO: 96167 - RNA, 22 nt, Human
uccaugagacagauacuguaag

SEQ ID NO: 96168 - RNA, 23 nt, Human
uccaugagaugugggcuucuagu

SEQ ID NO: 96169 - RNA, 22 nt, Human
uccaugagcuagcuuuccaaag

SEQ ID NO: 96170 - RNA, 22 nt, Human
uccaugaggaccaaauucguag

SEQ ID NO: 96171 - RNA, 22 nt, Human
uccaugauuggucaucauagaa

SEQ ID NO: 96172 - RNA, 22 nt, Human
uccaugcagaggagcugguggc

SEQ ID NO: 96173 - RNA, 19 nt, Human
uccaugcccaggcaccaag

SEQ ID NO: 96174 - RNA, 19 nt, Human
uccauggcucuucauccuu

SEQ ID NO: 96175 - RNA, 22 nt, Human
uccaugguagguuucuuaaaga

SEQ ID NO: 96176 - RNA, 22 nt, Human
uccaugucuucaugugucuaac

SEQ ID NO: 96177 - RNA, 22 nt, Human
uccaugugacgguggcaguuuu

SEQ ID NO: 96178 - RNA, 22 nt, Human
uccauguguuuuccuguccaca

SEQ ID NO: 96179 - RNA, 22 nt, Human
uccauuaaaccuggauggaguu

SEQ ID NO: 96180 - RNA, 22 nt, Human
uccauuaacaccuguacguggc

SEQ ID NO: 96181 - RNA, 22 nt, Human
uccauuauacuucugauucaaa

SEQ ID NO: 96182 - RNA, 21 nt, Human
uccauuguuuucccaggguuu

SEQ ID NO: 96183 - RNA, 22 nt, Human
uccauuuagcuggcaaacaaug

SEQ ID NO: 96184 - RNA, 22 nt, Human
uccauuuucucuuccggaggug

SEQ ID NO: 96185 - RNA, 22 nt, Human
uccauuuuguagguaugcuaca

SEQ ID NO: 96186 - RNA, 22 nt, Human
ucccaaagguccgagcgggaau

SEQ ID NO: 96187 - RNA, 22 nt, Human
ucccaagacuauguucugugug

SEQ ID NO: 96188 - RNA, 22 nt, Human
ucccaagcuuagggcucucagu

SEQ ID NO: 96189 - RNA, 22 nt, Human
ucccaaggugcucggcaacagg

SEQ ID NO: 96190 - RNA, 22 nt, Human
ucccaaguacuaccaaucuaau

SEQ ID NO: 96191 - RNA, 22 nt, Human
ucccacagaugcuguccagagu

SEQ ID NO: 96192 - RNA, 22 nt, Human
ucccacaggggcucuguggguu

SEQ ID NO: 96193 - RNA, 22 nt, Human
ucccacagucucacaaugcaua

SEQ ID NO: 96194 - RNA, 22 nt, Human
ucccacauuacccugacugaca

SEQ ID NO: 96195 - RNA, 22 nt, Human
ucccacccccuccaaggaggaa

SEQ ID NO: 96196 - RNA, 22 nt, Human
ucccaccccggucaagggcuga

SEQ ID NO: 96197 - RNA, 21 nt, Human
ucccacucuaaauggacugaa

SEQ ID NO: 96198 - RNA, 22 nt, Human
gggggagcuguuauuggcaggg

SEQ ID NO: 96199 - RNA, 22 nt, Human
gggggcagaauguacucuuguc

SEQ ID NO: 96200 - RNA, 22 nt, Human
gggggccaucuucaaggaugug

SEQ ID NO: 96201 - RNA, 22 nt, Human
gggggcuaccgucucuggagcu

SEQ ID NO: 96202 - RNA, 23 nt, Human
gggggcugguugacucucugcag

SEQ ID NO: 96203 - RNA, 22 nt, Human
ggggggcuguucuggacaggaa

SEQ ID NO: 96204 - RNA, 22 nt, Human
gggggucccaagcugggcugcu

SEQ ID NO: 96205 - RNA, 22 nt, Human
gggggugagccugccaggccca

SEQ ID NO: 96206 - RNA, 22 nt, Human
gggguacuggcuggagccccac

SEQ ID NO: 96207 - RNA, 18 nt, Human
gggguagaguguccuauu

SEQ ID NO: 96208 - RNA, 22 nt, Human
gggguaggaagagaaaauagug

SEQ ID NO: 96209 - RNA, 22 nt, Human
gggguagggcgauugcugcuuu

SEQ ID NO: 96210 - RNA, 22 nt, Human
ggggucacacuguggugacugg

SEQ ID NO: 96211 - RNA, 22 nt, Human
ggggucccugcaccagcauguc

SEQ ID NO: 96212 - RNA, 22 nt, Human
ggggucggggcauagccacuua

SEQ ID NO: 96213 - RNA, 22 nt, Human
ggggucugcugcggagcagaga

SEQ ID NO: 96214 - RNA, 22 nt, Human
ggggugaagguuuucugaaagc

SEQ ID NO: 96215 - RNA, 22 nt, Human
ggggugagaucaaggaagcccu

SEQ ID NO: 96216 - RNA, 22 nt, Human
ggggugagcugggccugugccu

SEQ ID NO: 96217 - RNA, 22 nt, Human
ggggugagguuuauguucuggg

SEQ ID NO: 96218 - RNA, 22 nt, Human
gggguggauuucaggcgguguc

SEQ ID NO: 96219 - RNA, 22 nt, Human
gggguggcccuacccucuggaa

SEQ ID NO: 96220 - RNA, 19 nt, Human
gggguggcuggggcuccag

SEQ ID NO: 96221 - RNA, 21 nt, Human
gggguuggcaagagcagagac

SEQ ID NO: 96222 - RNA, 20 nt, Human
gggguuggcuggcacaggga

SEQ ID NO: 96223 - RNA, 22 nt, Human
ggguaaaggucgcccucaaggu

SEQ ID NO: 96224 - RNA, 21 nt, Human
ggguaaggaaaaugauucuuc

SEQ ID NO: 96225 - RNA, 22 nt, Human
ggguacaaagauuucauaagau

SEQ ID NO: 96226 - RNA, 22 nt, Human
ggguacagaaacugaggcuuag

SEQ ID NO: 96227 - RNA, 22 nt, Human
ggguaccaagcugcuugggggc

SEQ ID NO: 96228 - RNA, 22 nt, Human
ggguaggcaaagcaaugacguu

SEQ ID NO: 96229 - RNA, 22 nt, Human
ggguaggcagugcguccugccu

SEQ ID NO: 96230 - RNA, 22 nt, Human
ggguaggccagaagggccugga

SEQ ID NO: 96231 - RNA, 22 nt, Human
ggguaggcucugcaggcugggu

SEQ ID NO: 96232 - RNA, 21 nt, Human
ggguauaaaaugguaucucau

SEQ ID NO: 96233 - RNA, 22 nt, Human
ggguaugagauauaggugaaua

SEQ ID NO: 96234 - RNA, 22 nt, Human
gggucaaaugauaauugcuucu

SEQ ID NO: 96235 - RNA, 22 nt, Human
gggucaaggcuacauggagacc

SEQ ID NO: 96236 - RNA, 22 nt, Human
gggucagaguucaggucgaggg

SEQ ID NO: 96237 - RNA, 22 nt, Human
gggucagcucccuccccagggc

SEQ ID NO: 96238 - RNA, 22 nt, Human
gggucagggcugccugggcuca

SEQ ID NO: 96239 - RNA, 22 nt, Human
ggguccagacuaugaagaacuu

SEQ ID NO: 96240 - RNA, 23 nt, Human
ggguccagagaagccauuagggc

SEQ ID NO: 96241 - RNA, 22 nt, Human
ggguccagcuacaucagggugg

SEQ ID NO: 96242 - RNA, 22 nt, Human
ggguccaggcguggcccagaug

SEQ ID NO: 96243 - RNA, 22 nt, Human
gggucgagggucucgcccuucc

SEQ ID NO: 96244 - RNA, 22 nt, Human
gggucuccuaauggaggaugac

SEQ ID NO: 96245 - RNA, 22 nt, Human
gggucugaggaguaccauuguc

SEQ ID NO: 96246 - RNA, 22 nt, Human
gggucugagggccuuaccacuc

SEQ ID NO: 96247 - RNA, 22 nt, Human
gggucugccugcugugaaguca

SEQ ID NO: 96248 - RNA, 22 nt, Human
gggucuggacggcugcaggaag

SEQ ID NO: 96249 - RNA, 20 nt, Human
gggugaggauggagaauuug

SEQ ID NO: 96250 - RNA, 22 nt, Human
gggugcagagcuuaacuguagg

SEQ ID NO: 96251 - RNA, 22 nt, Human
gggugcagcuuugaaagcaugu

SEQ ID NO: 96252 - RNA, 18 nt, Human
gggugcaggcacugacug

SEQ ID NO: 96253 - RNA, 22 nt, Human
uccccaccuacacacugcuccu

SEQ ID NO: 96254 - RNA, 22 nt, Human
uccccacuccugggcagaugcg

SEQ ID NO: 96255 - RNA, 22 nt, Human
uccccacugggccuccucuuuc

SEQ ID NO: 96256 - RNA, 22 nt, Human
uccccagacagcgggaggccug

SEQ ID NO: 96257 - RNA, 19 nt, Human
uccccagcaccucugaguc

SEQ ID NO: 96258 - RNA, 22 nt, Human
uccccaggaaggcccuuccugg

SEQ ID NO: 96259 - RNA, 22 nt, Human
uccccaggaaucaggugguugc

SEQ ID NO: 96260 - RNA, 22 nt, Human
uccccauggguggggacacaua

SEQ ID NO: 96261 - RNA, 22 nt, Human
ucccccucauuaccucauucaa

SEQ ID NO: 96262 - RNA, 22 nt, Human
ucccccuccaauugccauguua

SEQ ID NO: 96263 - RNA, 21 nt, Human
uccccucacuugucuucugag

SEQ ID NO: 96264 - RNA, 22 nt, Human
uccccucuggaggcugcagggg

SEQ ID NO: 96265 - RNA, 22 nt, Human
uccccugcagaugagggcagug

SEQ ID NO: 96266 - RNA, 22 nt, Human
uccccugcagcgccugcuucua

SEQ ID NO: 96267 - RNA, 22 nt, Human
ucccgauucuuccuauacagga

SEQ ID NO: 96268 - RNA, 22 nt, Human
ucccgcaugccgccggugaaca

SEQ ID NO: 96269 - RNA, 22 nt, Human
ucccuacuguuagggacucagc

SEQ ID NO: 96270 - RNA, 22 nt, Human
ucccuaggaccccaccuuccgc

SEQ ID NO: 96271 - RNA, 22 nt, Human
ucccuaguagacccagaucauu

SEQ ID NO: 96272 - RNA, 22 nt, Human
ucccucacugguucugcauccc

SEQ ID NO: 96273 - RNA, 22 nt, Human
ucccucagagaccguggugcag

SEQ ID NO: 96274 - RNA, 22 nt, Human
ucccucagagggcaagcgcaga

SEQ ID NO: 96275 - RNA, 20 nt, Human
ucccucagcacuucuaccuc

SEQ ID NO: 96276 - RNA, 20 nt, Human
ucccucaggucauugggcug

SEQ ID NO: 96277 - RNA, 22 nt, Human
ucccucagucccuggacaggca

SEQ ID NO: 96278 - RNA, 22 nt, Human
ucccuccaggcagcuggguacu

SEQ ID NO: 96279 - RNA, 20 nt, Human
ucccucccuccagcucuggg

SEQ ID NO: 96280 - RNA, 22 nt, Human
ucccuccuggugaugaugcaaa

SEQ ID NO: 96281 - RNA, 22 nt, Human
ucccuccuuuaucaaaaagaga

SEQ ID NO: 96282 - RNA, 22 nt, Human
ucccucgaagagcuuauucuuu

SEQ ID NO: 96283 - RNA, 22 nt, Human
ucccucuacagggaagcgcuuu

SEQ ID NO: 96284 - RNA, 22 nt, Human
ucccucuggucuggacgccaua

SEQ ID NO: 96285 - RNA, 22 nt, Human
ucccucuguguugggcaugccu

SEQ ID NO: 96286 - RNA, 22 nt, Human
ucccugaagccagggaaggaag

SEQ ID NO: 96287 - RNA, 22 nt, Human
ucccugagcucacauggcagga

SEQ ID NO: 96288 - RNA, 21 nt, Human
ucccugaguucucugagcauc

SEQ ID NO: 96289 - RNA, 22 nt, Human
ucccugcagacguccugcgggu

SEQ ID NO: 96290 - RNA, 22 nt, Human
ucccugcagcaggugaucaaug

SEQ ID NO: 96291 - RNA, 22 nt, Human
ucccugcaggugugcaagcuga

SEQ ID NO: 96292 - RNA, 22 nt, Human
ucccugccaguccuggucugaa

SEQ ID NO: 96293 - RNA, 22 nt, Human
ucccugcccugccuucaugguu

SEQ ID NO: 96294 - RNA, 22 nt, Human
ucccugccugacagcacccacc

SEQ ID NO: 96295 - RNA, 22 nt, Human
ucccuggacaacagacuucacu

SEQ ID NO: 96296 - RNA, 22 nt, Human
ucccuggacagccuugccuggg

SEQ ID NO: 96297 - RNA, 23 nt, Human
ucccuggaggcagguccagggcc

SEQ ID NO: 96298 - RNA, 22 nt, Human
ucccuggcagcuaagggugguc

SEQ ID NO: 96299 - RNA, 22 nt, Human
ucccuggcuguguucaggugcg

SEQ ID NO: 96300 - RNA, 22 nt, Human
ucccugggacggccuuuuggag

SEQ ID NO: 96301 - RNA, 15 nt, Human
ucccugggagauggu

SEQ ID NO: 96302 - RNA, 22 nt, Human
ucccugggcacaaucugcuggc

SEQ ID NO: 96303 - RNA, 22 nt, Human
ucccugggccuccugcuaugca

SEQ ID NO: 96304 - RNA, 22 nt, Human
ucccuggggauguuggccugcc

SEQ ID NO: 96305 - RNA, 22 nt, Human
ucccugggguuccuccagccac

SEQ ID NO: 96306 - RNA, 22 nt, Human
ucccugggucauucucuggcac

SEQ ID NO: 96307 - RNA, 22 nt, Human
uccugugaagaauagcacucaa

SEQ ID NO: 96308 - RNA, 22 nt, Human
uccugugagcagcacagagaca

SEQ ID NO: 96309 - RNA, 22 nt, Human
uccugugauauuguuuguuaua

SEQ ID NO: 96310 - RNA, 22 nt, Human
uccugugccaucucuagagacu

SEQ ID NO: 96311 - RNA, 22 nt, Human
uccugugcuuuggaggauguuc

SEQ ID NO: 96312 - RNA, 22 nt, Human
uccuguggaagacaguguuggg

SEQ ID NO: 96313 - RNA, 17 nt, Human
uccugugggugcagcag

SEQ ID NO: 96314 - RNA, 22 nt, Human
uccugugguaugggagugaugu

SEQ ID NO: 96315 - RNA, 22 nt, Human
uccuguguaaauagaucugguu

SEQ ID NO: 96316 - RNA, 22 nt, Human
uccugugucaauuccucauucu

SEQ ID NO: 96317 - RNA, 22 nt, Human
uccugugugggcaggaugagaa

SEQ ID NO: 96318 - RNA, 22 nt, Human
uccuguguguggccuuucccag

SEQ ID NO: 96319 - RNA, 22 nt, Human
uccuguguuacugccuggagcg

SEQ ID NO: 96320 - RNA, 17 nt, Human
uccuguuuaucauugau

SEQ ID NO: 96321 - RNA, 22 nt, Human
uccuguuuccaauuuguugggu

SEQ ID NO: 96322 - RNA, 22 nt, Human
uccuguuuuuguaaucgacucu

SEQ ID NO: 96323 - RNA, 22 nt, Human
uccuuaaaugaacucugcauga

SEQ ID NO: 96324 - RNA, 22 nt, Human
uccuuaacaagauggcauuugu

SEQ ID NO: 96325 - RNA, 22 nt, Human
uccuuaauucugugcaauaugu

SEQ ID NO: 96326 - RNA, 22 nt, Human
uccuuacaacuuguuauuuuuc

SEQ ID NO: 96327 - RNA, 22 nt, Human
uccuuagagauacugucuugaa

SEQ ID NO: 96328 - RNA, 22 nt, Human
uccuuagagugguugugcuaug

SEQ ID NO: 96329 - RNA, 22 nt, Human
uccuuauaaaugaggcccuggg

SEQ ID NO: 96330 - RNA, 22 nt, Human
uccuuauaacaacaggagugga

SEQ ID NO: 96331 - RNA, 22 nt, Human
uccuuauauggcagacagcaga

SEQ ID NO: 96332 - RNA, 22 nt, Human
uccuucaaagcuccuagugagc

SEQ ID NO: 96333 - RNA, 22 nt, Human
uccuucaagaugccacagcuuu

SEQ ID NO: 96334 - RNA, 22 nt, Human
uccuucaaucacccagugggga

SEQ ID NO: 96335 - RNA, 19 nt, Human
uccuucacuucuuaccagg

SEQ ID NO: 96336 - RNA, 22 nt, Human
uccuucagaaccugugauggaa

SEQ ID NO: 96337 - RNA, 23 nt, Human
uccuucagagccucccuccaagc

SEQ ID NO: 96338 - RNA, 22 nt, Human
uccuucagccaugggcucucca

SEQ ID NO: 96339 - RNA, 22 nt, Human
uccuucagcugcuaggaaauga

SEQ ID NO: 96340 - RNA, 22 nt, Human
uccuucagcuuauuucuuagga

SEQ ID NO: 96341 - RNA, 20 nt, Human
uccuucaggcagggccuagu

SEQ ID NO: 96342 - RNA, 22 nt, Human
uccuucagggggccgccugcac

SEQ ID NO: 96343 - RNA, 22 nt, Human
uccuucaguucaauuaguccgu

SEQ ID NO: 96344 - RNA, 22 nt, Human
uccuuccaugguggggcugcuu

SEQ ID NO: 96345 - RNA, 22 nt, Human
uccuuccucggggacccagauc

SEQ ID NO: 96346 - RNA, 22 nt, Human
uccuuccugcucuaacauucag

SEQ ID NO: 96347 - RNA, 22 nt, Human
uccuucucugguuuuuacugua

SEQ ID NO: 96348 - RNA, 22 nt, Human
uccuucuggaggcucuaagggg

SEQ ID NO: 96349 - RNA, 22 nt, Human
uccuucuggaggcuguaaagga

SEQ ID NO: 96350 - RNA, 22 nt, Human
uccuugaaaagaaugucuccau

SEQ ID NO: 96351 - RNA, 22 nt, Human
uccuugaaaggggcugcagggc

SEQ ID NO: 96352 - RNA, 22 nt, Human
uccuugaagaaugauucuugga

SEQ ID NO: 96353 - RNA, 22 nt, Human
uccuugaagagugggcggucga

SEQ ID NO: 96354 - RNA, 22 nt, Human
uccuugaaugaagagaggugac

SEQ ID NO: 96355 - RNA, 22 nt, Human
uccuugaaugaauguucucucc

SEQ ID NO: 96356 - RNA, 22 nt, Human
uccuugaauugugccacuuacc

SEQ ID NO: 96357 - RNA, 19 nt, Human
uccuugacuguauucagag

SEQ ID NO: 96358 - RNA, 22 nt, Human
uccuugagagccacugucuugg

SEQ ID NO: 96359 - RNA, 22 nt, Human
uccuugagccguggccagggcc

SEQ ID NO: 96360 - RNA, 22 nt, Human
uccuugagccucccagacucag

SEQ ID NO: 96361 - RNA, 22 nt, Human
uccuugcaaauagcuuucugag

SEQ ID NO: 96362 - RNA, 22 nt, Human
uccuugcauaucugaaaauguu

SEQ ID NO: 96363 - RNA, 22 nt, Human
uccuuggagcccaggaguagca

SEQ ID NO: 96364 - RNA, 22 nt, Human
uccuuggaguaguuguucuuua

SEQ ID NO: 96365 - RNA, 17 nt, Human
uccuuggcaaccaguuc

SEQ ID NO: 96366 - RNA, 22 nt, Human
uccuuggcaugccgucuucucc

SEQ ID NO: 96367 - RNA, 22 nt, Human
uccuugggaaaucacuagcacu

SEQ ID NO: 96368 - RNA, 21 nt, Human
uccuugggcagugcccagcuu

SEQ ID NO: 96369 - RNA, 23 nt, Human
uccuugggccugcccagaguggu

SEQ ID NO: 96370 - RNA, 22 nt, Human
uccuuuaaacuccuuucaaguc

SEQ ID NO: 96371 - RNA, 23 nt, Human
uccuuuaaugcuggaauggcuag

SEQ ID NO: 96372 - RNA, 20 nt, Human
uccuuuccuccuucuaaaug

SEQ ID NO: 96373 - RNA, 22 nt, Human
uccuuucuucuucugcccaugg

SEQ ID NO: 96374 - RNA, 22 nt, Human
uccuuugacuucuugcagucca

SEQ ID NO: 96375 - RNA, 22 nt, Human
uccuuuggaacugacuccguua

SEQ ID NO: 96376 - RNA, 22 nt, Human
uccuuuggacacauuuuuuaua

SEQ ID NO: 96377 - RNA, 23 nt, Human
uccuuugucuuugcauagauggu

SEQ ID NO: 96378 - RNA, 22 nt, Human
uccuuuucccugaagguauuua

SEQ ID NO: 96379 - RNA, 22 nt, Human
uccuuuugcugggaucaucagg

SEQ ID NO: 96380 - RNA, 22 nt, Human
ucgaauggcaaggaaagaggcu

SEQ ID NO: 96381 - RNA, 21 nt, Human
ucgaccugcugggcucgggcu

SEQ ID NO: 96382 - RNA, 22 nt, Human
ucgagcucuggagccaaggaug

SEQ ID NO: 96383 - RNA, 22 nt, Human
ucgauaauaucuuacaugugcu

SEQ ID NO: 96384 - RNA, 22 nt, Human
gugaggucaccggccguugcca

SEQ ID NO: 96385 - RNA, 22 nt, Human
gugaggucauauagcgaacucc

SEQ ID NO: 96386 - RNA, 22 nt, Human
gugagguccuaauagacaucga

SEQ ID NO: 96387 - RNA, 19 nt, Human
gugaggucuuuccuuuugu

SEQ ID NO: 96388 - RNA, 22 nt, Human
gugaggucuuugggaggugauu

SEQ ID NO: 96389 - RNA, 22 nt, Human
gugaggugggcuggccagagac

SEQ ID NO: 96390 - RNA, 22 nt, Human
gugaggugguacaauauuaacu

SEQ ID NO: 96391 - RNA, 22 nt, Human
gugagucuuuggagacaguuca

SEQ ID NO: 96392 - RNA, 22 nt, Human
gugaguuacucugguucucauu

SEQ ID NO: 96393 - RNA, 22 nt, Human
gugauaaaauucaaauagcucu

SEQ ID NO: 96394 - RNA, 22 nt, Human
gugauccuauaaagugagcaca

SEQ ID NO: 96395 - RNA, 22 nt, Human
gugauggguaacuguuuaggga

SEQ ID NO: 96396 - RNA, 22 nt, Human
gugauguagcccuaauucugca

SEQ ID NO: 96397 - RNA, 22 nt, Human
gugauguggggaccguccuggc

SEQ ID NO: 96398 - RNA, 22 nt, Human
gugauucaaauguaacuaauua

SEQ ID NO: 96399 - RNA, 22 nt, Human
gugauucauccuggcauucauu

SEQ ID NO: 96400 - RNA, 22 nt, Human
gugauucuaaagcuuugagcag

SEQ ID NO: 96401 - RNA, 22 nt, Human
gugauucucauguuccugaagu

SEQ ID NO: 96402 - RNA, 23 nt, Human
gugauucucucugugugggcagg

SEQ ID NO: 96403 - RNA, 22 nt, Human
gugauucugaccuucagggagu

SEQ ID NO: 96404 - RNA, 22 nt, Human
gugauugcccagcaccauuguu

SEQ ID NO: 96405 - RNA, 22 nt, Human
gugauuucaaauauagagugag

SEQ ID NO: 96406 - RNA, 22 nt, Human
gugauuuucuccuccuagaagu

SEQ ID NO: 96407 - RNA, 22 nt, Human
gugcaaaaauaauugugguuuu

SEQ ID NO: 96408 - RNA, 22 nt, Human
gugcaaaaguaauugcgguuuu

SEQ ID NO: 96409 - RNA, 23 nt, Human
gugcaaagauauaccacauggcu

SEQ ID NO: 96410 - RNA, 22 nt, Human
gugcaaaugauucuaaugggua

SEQ ID NO: 96411 - RNA, 22 nt, Human
gugcaaccucgucagagcaccu

SEQ ID NO: 96412 - RNA, 22 nt, Human
gugcaagacuuccuaagcaaua

SEQ ID NO: 96413 - RNA, 22 nt, Human
gugcaagaggacaguaagggug

SEQ ID NO: 96414 - RNA, 22 nt, Human
gugcaagcaguacacucaaagc

SEQ ID NO: 96415 - RNA, 20 nt, Human
gugcaauggcucagucucag

SEQ ID NO: 96416 - RNA, 22 nt, Human
guagaggggugauucugugaga

SEQ ID NO: 96417 - RNA, 22 nt, Human
guagaguuuaaugaaaaaucug

SEQ ID NO: 96418 - RNA, 22 nt, Human
guagaucaugagaauguuuuug

SEQ ID NO: 96419 - RNA, 22 nt, Human
guagaucugccuuaaccuggga

SEQ ID NO: 96420 - RNA, 22 nt, Human
guagccagaucugcugugucug

SEQ ID NO: 96421 - RNA, 22 nt, Human
guagccauuggcaaugaagccu

SEQ ID NO: 96422 - RNA, 22 nt, Human
guagcccaccuggggagggcga

SEQ ID NO: 96423 - RNA, 22 nt, Human
guagcgguuaugucugcaggga

SEQ ID NO: 96424 - RNA, 22 nt, Human
guaggaaagggagugaagggaa

SEQ ID NO: 96425 - RNA, 22 nt, Human
guaggaagcucugaggcuaguu

SEQ ID NO: 96426 - RNA, 22 nt, Human
guaggagcucauggggccagga

SEQ ID NO: 96427 - RNA, 22 nt, Human
guaggcagaauaauuccuccuu

SEQ ID NO: 96428 - RNA, 22 nt, Human
guaggcagaccaguggaugggu

SEQ ID NO: 96429 - RNA, 22 nt, Human
guaggccagugugaaaccuggu

SEQ ID NO: 96430 - RNA, 22 nt, Human
guagggacuuguuuuacuagua

SEQ ID NO: 96431 - RNA, 22 nt, Human
guagggagcccagagcccagug

SEQ ID NO: 96432 - RNA, 22 nt, Human
guagggcauguaagucaccaua

SEQ ID NO: 96433 - RNA, 22 nt, Human
guaggggaugguucccuagaaa

SEQ ID NO: 96434 - RNA, 22 nt, Human
guaggguuggagagcacaacca

SEQ ID NO: 96435 - RNA, 22 nt, Human
guaggucuucugaaaaccaaaa

SEQ ID NO: 96436 - RNA, 22 nt, Human
guaggugagugggagaagaggc

SEQ ID NO: 96437 - RNA, 22 nt, Human
guaguaauaguacauuagaaug

SEQ ID NO: 96438 - RNA, 22 nt, Human
guagucuuggauuuuaaaaagu

SEQ ID NO: 96439 - RNA, 22 nt, Human
guaguuacccagaacacuggaa

SEQ ID NO: 96440 - RNA, 22 nt, Human
guaguuaguuaagaugaguuua

SEQ ID NO: 96441 - RNA, 22 nt, Human
guauacagauacuuagacgugc

SEQ ID NO: 96442 - RNA, 22 nt, Human
guauaguuccaagcauauuuug

SEQ ID NO: 96443 - RNA, 22 nt, Human
guauaguuugcgauuugugguu

SEQ ID NO: 96444 - RNA, 22 nt, Human
guauaucagacacucauaugua

SEQ ID NO: 96445 - RNA, 18 nt, Human
guauaucugcacauauac

SEQ ID NO: 96446 - RNA, 22 nt, Human
guauaucuucagaaauuauagg

SEQ ID NO: 96447 - RNA, 22 nt, Human
guauaugagcucuauguaaugg

SEQ ID NO: 96448 - RNA, 22 nt, Human
guauauguaugcguauacacac

SEQ ID NO: 96449 - RNA, 22 nt, Human
guauaugugugggccugcauau

SEQ ID NO: 96450 - RNA, 22 nt, Human
guauauuuugaucacccucuau

SEQ ID NO: 96451 - RNA, 21 nt, Human
guaucacauuugcaugcuuau

SEQ ID NO: 96452 - RNA, 22 nt, Human
guaucacuuuugagagugagaa

SEQ ID NO: 96453 - RNA, 22 nt, Human
guauccucaccuauacaaugga

SEQ ID NO: 96454 - RNA, 22 nt, Human
guaucuaugauccuuuauaucu

SEQ ID NO: 96455 - RNA, 22 nt, Human
guaucuuuccacaucuucagua

SEQ ID NO: 96456 - RNA, 22 nt, Human
guaucuuucccaccaaucacaa

SEQ ID NO: 96457 - RNA, 22 nt, Human
guaucuuugucuucauguugga

SEQ ID NO: 96458 - RNA, 22 nt, Human
guaugaaguuggacuguauaaa

SEQ ID NO: 96459 - RNA, 22 nt, Human
guauggaugugugaacugguua

SEQ ID NO: 96460 - RNA, 22 nt, Human
guauguauacauuguggaaugg

SEQ ID NO: 96461 - RNA, 21 nt, Human
guauguauggauaaugagagg

SEQ ID NO: 96462 - RNA, 22 nt, Human
guaugucaaaaucugcaugaua

SEQ ID NO: 96463 - RNA, 22 nt, Human
guaugucuuaggguucaguaac

SEQ ID NO: 96464 - RNA, 22 nt, Human
guaugugucuuagaacuuggga

SEQ ID NO: 96465 - RNA, 22 nt, Human
guauuacaaauaaauguuacug

SEQ ID NO: 96466 - RNA, 22 nt, Human
guauuaggaggaacacaggccu

SEQ ID NO: 96467 - RNA, 22 nt, Human
guauuaggugguggaauuguag

SEQ ID NO: 96468 - RNA, 22 nt, Human
guauuagguuggugcaaaagua

SEQ ID NO: 96469 - RNA, 22 nt, Human
guauuaguuaucuacugcugug

SEQ ID NO: 96470 - RNA, 22 nt, Human
guauuaugaaugccgaggcggc

SEQ ID NO: 96471 - RNA, 22 nt, Human
guauuauucucagcuuugggau

SEQ ID NO: 96472 - RNA, 22 nt, Human
guauucaagcgagcagaugucu

SEQ ID NO: 96473 - RNA, 22 nt, Human
guauucagggcuagucagagga

SEQ ID NO: 96474 - RNA, 22 nt, Human
guauuccauuaguguuaauauc

SEQ ID NO: 96475 - RNA, 20 nt, Human
guauucuguauucugcucag

SEQ ID NO: 96476 - RNA, 22 nt, Human
guauucuguuuacagugagcaa

SEQ ID NO: 96477 - RNA, 22 nt, Human
guauucuugguuaucaaaauac

SEQ ID NO: 96478 - RNA, 22 nt, Human
guauugcaauuacucuucuucu

SEQ ID NO: 96479 - RNA, 22 nt, Human
guauuguagcuacaauagacgu

SEQ ID NO: 96480 - RNA, 22 nt, Human
guauuuccauuagugugugcac

SEQ ID NO: 96481 - RNA, 22 nt, Human
guauuuccucgcuugugggauu

SEQ ID NO: 96482 - RNA, 22 nt, Human
guauuucuuuccauuauaguca

SEQ ID NO: 96483 - RNA, 22 nt, Human
guauuugaucauuagaaugauu

SEQ ID NO: 96484 - RNA, 22 nt, Human
guauuuggucuauuuggcaucc

SEQ ID NO: 96485 - RNA, 22 nt, Human
guauuuggugaugccuccaaac

SEQ ID NO: 96486 - RNA, 22 nt, Human
guauuuuacuuacgcaugacuu

SEQ ID NO: 96487 - RNA, 22 nt, Human
guauuuucaugauuucagacca

SEQ ID NO: 96488 - RNA, 22 nt, Human
guauuuuguuagggugugguau

SEQ ID NO: 96489 - RNA, 22 nt, Human
guauuuuuaguagagucggggu

SEQ ID NO: 96490 - RNA, 22 nt, Human
guauuuuucaguuaggagcuua

SEQ ID NO: 96491 - RNA, 22 nt, Human
gucaaaaaguagucauuucugu

SEQ ID NO: 96492 - RNA, 22 nt, Human
gucaaaacacuggggaauguug

SEQ ID NO: 96493 - RNA, 22 nt, Human
gucaaacauagggacuuugugg

SEQ ID NO: 96494 - RNA, 21 nt, Human
gucaaacuugcaccagugccc

SEQ ID NO: 96495 - RNA, 22 nt, Human
gucaaauaauuuucucaauagu

SEQ ID NO: 96496 - RNA, 17 nt, Human
gucaacaggauuucuuu

SEQ ID NO: 96497 - RNA, 22 nt, Human
gucaacaguauuaggacauuug

SEQ ID NO: 96498 - RNA, 22 nt, Human
gucaacauaggccucagugagg

SEQ ID NO: 96499 - RNA, 22 nt, Human
guagcugccuuucuggcccagg

SEQ ID NO: 96500 - RNA, 22 nt, Human
guagcuuacaucagaguugguu

SEQ ID NO: 96501 - RNA, 22 nt, Human
guagcuuaugaaaugugagggg

SEQ ID NO: 96502 - RNA, 22 nt, Human
guaggaaaguaaaugaaauaca

SEQ ID NO: 96503 - RNA, 22 nt, Human
guaggaauuuugugagcuuucc

SEQ ID NO: 96504 - RNA, 22 nt, Human
guaggagcauugaggguaugga

SEQ ID NO: 96505 - RNA, 22 nt, Human
guaggcagguggaggagugaag

SEQ ID NO: 96506 - RNA, 22 nt, Human
guaggcagucucucaggugauc

SEQ ID NO: 96507 - RNA, 22 nt, Human
guagggacaauauguuauuaga

SEQ ID NO: 96508 - RNA, 19 nt, Human
guagggacagugguucuga

SEQ ID NO: 96509 - RNA, 22 nt, Human
guagggacuguucucaccugag

SEQ ID NO: 96510 - RNA, 22 nt, Human
guagggcauagagauguuggca

SEQ ID NO: 96511 - RNA, 22 nt, Human
guagggcucaguaaauacuuug

SEQ ID NO: 96512 - RNA, 22 nt, Human
guaguaaagcggaaagggugau

SEQ ID NO: 96513 - RNA, 22 nt, Human
guaguaauuguuuuaagccacc

SEQ ID NO: 96514 - RNA, 22 nt, Human
guaguacagugagacaauguuu

SEQ ID NO: 96515 - RNA, 22 nt, Human
guaguauuuucugugauguagg

SEQ ID NO: 96516 - RNA, 22 nt, Human
guagucugaacaguaauuuugu

SEQ ID NO: 96517 - RNA, 22 nt, Human
guagucugagcaagcagugugu

SEQ ID NO: 96518 - RNA, 22 nt, Human
guagugcuuucaucuggagugu

SEQ ID NO: 96519 - RNA, 22 nt, Human
guaguggagucuccuguccugg

SEQ ID NO: 96520 - RNA, 22 nt, Human
guaguuauugcuguuuacuucu

SEQ ID NO: 96521 - RNA, 22 nt, Human
guaguucugcagugucaccuga

SEQ ID NO: 96522 - RNA, 22 nt, Human
guaguucuuucucaauguucaa

SEQ ID NO: 96523 - RNA, 22 nt, Human
guauaaaguauaagcuuguuuu

SEQ ID NO: 96524 - RNA, 20 nt, Human
guauaagauuucacacauua

SEQ ID NO: 96525 - RNA, 22 nt, Human
gugcuucacugaccuguuuuca

SEQ ID NO: 96526 - RNA, 22 nt, Human
gugcuuccaucuagagggucac

SEQ ID NO: 96527 - RNA, 22 nt, Human
gugcuucugccaacuaauuaac

SEQ ID NO: 96528 - RNA, 22 nt, Human
gugcuugcagugagaugagaug

SEQ ID NO: 96529 - RNA, 22 nt, Human
gugcuuuaaaaauaggagauga

SEQ ID NO: 96530 - RNA, 22 nt, Human
gugcuuuaaagacaguuaugcu

SEQ ID NO: 96531 - RNA, 22 nt, Human
gugcuuuaauaagauuucacuu

SEQ ID NO: 96532 - RNA, 22 nt, Human
gugcuuuaguucuugcaacugg

SEQ ID NO: 96533 - RNA, 22 nt, Human
gugcuuuauauguggguaucca

SEQ ID NO: 96534 - RNA, 23 nt, Human
gugcuuuaugaucugcugucccu

SEQ ID NO: 96535 - RNA, 22 nt, Human
gugcuuuuaaaggcaauuagua

SEQ ID NO: 96536 - RNA, 22 nt, Human
gugcuuuuaacuuuugaaagga

SEQ ID NO: 96537 - RNA, 22 nt, Human
gugcuuuuaauucuggugagua

SEQ ID NO: 96538 - RNA, 22 nt, Human
gugcuuuuccuuauuuggugcu

SEQ ID NO: 96539 - RNA, 22 nt, Human
guggaaauaguuugguuauaga

SEQ ID NO: 96540 - RNA, 22 nt, Human
guggaacauguccauauacauu

SEQ ID NO: 96541 - RNA, 22 nt, Human
guggaagggucacagccccuac

SEQ ID NO: 96542 - RNA, 22 nt, Human
guggaagguaaugcagcuuacu

SEQ ID NO: 96543 - RNA, 22 nt, Human
guggaaguagauuugagaaggu

SEQ ID NO: 96544 - RNA, 22 nt, Human
guggaauugcuggauaauauca

SEQ ID NO: 96545 - RNA, 22 nt, Human
guggacaugcauacauauguuu

SEQ ID NO: 96546 - RNA, 17 nt, Human
guggagacagaugccuc

SEQ ID NO: 96547 - RNA, 22 nt, Human
guggagacuucuacuagagacc

SEQ ID NO: 96548 - RNA, 22 nt, Human
guggagcaaucagagggucagu

SEQ ID NO: 96549 - RNA, 22 nt, Human
guggagcauaacacacuagccu

SEQ ID NO: 96550 - RNA, 22 nt, Human
guggagccaggggcuguaggua

SEQ ID NO: 96551 - RNA, 22 nt, Human
guggaggagaggcgccuugcgg

SEQ ID NO: 96552 - RNA, 22 nt, Human
guggagggugauugccggcugu

SEQ ID NO: 96553 - RNA, 22 nt, Human
guggaugauugacucuguagac

SEQ ID NO: 96554 - RNA, 22 nt, Human
guggauggagcagugacccagg

SEQ ID NO: 96555 - RNA, 22 nt, Human
guggauggauuuugaggaaugg

SEQ ID NO: 96556 - RNA, 22 nt, Human
guggauggcccugcacacaggu

SEQ ID NO: 96557 - RNA, 22 nt, Human
guggcaaggagcaugaaaaguc

SEQ ID NO: 96558 - RNA, 22 nt, Human
guggcacaaggcuuacacagca

SEQ ID NO: 96559 - RNA, 22 nt, Human
guggcacacaggagagagcuca

SEQ ID NO: 96560 - RNA, 22 nt, Human
guggcacaggguuguuggucau

SEQ ID NO: 96561 - RNA, 22 nt, Human
guggcacauugguagggucugu

SEQ ID NO: 96562 - RNA, 22 nt, Human
guggcacucaccuguaguuuca

SEQ ID NO: 96563 - RNA, 22 nt, Human
guggcagaaauauucuugcucu

SEQ ID NO: 96564 - RNA, 22 nt, Human
guggcagagaacaaggagaggu

SEQ ID NO: 96565 - RNA, 22 nt, Human
guggcagaggcugugaggaugc

SEQ ID NO: 96566 - RNA, 22 nt, Human
guggcagagugcgguucugacc

SEQ ID NO: 96567 - RNA, 22 nt, Human
guggcagcaaaugccuggacua

SEQ ID NO: 96568 - RNA, 22 nt, Human
guggcagccaugagaauauaac

SEQ ID NO: 96569 - RNA, 16 nt, Human
guggcagccccuucuc

SEQ ID NO: 96570 - RNA, 22 nt, Human
guggcagcggcccaggccgucu

SEQ ID NO: 96571 - RNA, 22 nt, Human
guggcagggagaagccauuggg

SEQ ID NO: 96572 - RNA, 22 nt, Human
guggcagggcaaugcucccucu

SEQ ID NO: 96573 - RNA, 22 nt, Human
guggcaguagacagugcaucua

SEQ ID NO: 96574 - RNA, 22 nt, Human
guggcagucgcugacagauaca

SEQ ID NO: 96575 - RNA, 22 nt, Human
guggcagucucaucuguggcuc

SEQ ID NO: 96576 - RNA, 22 nt, Human
guggcagugaggcaggagcagu

SEQ ID NO: 96577 - RNA, 22 nt, Human
guggcaucaagauuuagauuca

SEQ ID NO: 96578 - RNA, 22 nt, Human
guggcauugacauguaaacagu

SEQ ID NO: 96579 - RNA, 22 nt, Human
guggcauuugggagaugcgugg

SEQ ID NO: 96580 - RNA, 22 nt, Human
guggccaaaaggaagaagguua

SEQ ID NO: 96581 - RNA, 22 nt, Human
guggccaagaaaauagaugcau

SEQ ID NO: 96582 - RNA, 22 nt, Human
guggccaagaggggacuggaua

SEQ ID NO: 96583 - RNA, 22 nt, Human
guggccagaaccaggagaauga

SEQ ID NO: 96584 - RNA, 22 nt, Human
guggccagaagacugcaaugcu

SEQ ID NO: 96585 - RNA, 22 nt, Human
guggccagagauuaaauagagu

SEQ ID NO: 96586 - RNA, 22 nt, Human
guggccagaggauuuguucagu

SEQ ID NO: 96587 - RNA, 22 nt, Human
guggccagagugucauuuuauu

SEQ ID NO: 96588 - RNA, 22 nt, Human
guggccagcaagugcugccucu

SEQ ID NO: 96589 - RNA, 22 nt, Human
guggccagccccauggacaguu

SEQ ID NO: 96590 - RNA, 22 nt, Human
guggccaggucagggacuugug

SEQ ID NO: 96591 - RNA, 22 nt, Human
guggcccaggcuuggcgcuggc

SEQ ID NO: 96592 - RNA, 22 nt, Human
guggcccuauuugaggacccca

SEQ ID NO: 96593 - RNA, 22 nt, Human
guggcccugagcccuuugacag

SEQ ID NO: 96594 - RNA, 22 nt, Human
guggcccugucccaggccuccu

SEQ ID NO: 96595 - RNA, 22 nt, Human
guggcccugugaacagcgcagu

SEQ ID NO: 96596 - RNA, 22 nt, Human
guggcccuugaagcagcuucau

SEQ ID NO: 96597 - RNA, 22 nt, Human
guggccucuguuggcuccuagg

SEQ ID NO: 96598 - RNA, 21 nt, Human
guggccugauuaugaaugggu

SEQ ID NO: 96599 - RNA, 22 nt, Human
guggccugccagcagauggcgc

SEQ ID NO: 96600 - RNA, 22 nt, Human
guggccuggaaaggcuggucug

SEQ ID NO: 96601 - RNA, 22 nt, Human
guggccuggauagacuccaucu

SEQ ID NO: 96602 - RNA, 22 nt, Human
guggccuggcgagcuggcgcgg

SEQ ID NO: 96603 - RNA, 22 nt, Human
guggccuugcucacauguccag

SEQ ID NO: 96604 - RNA, 22 nt, Human
guggccuuuccugaagaaauga

SEQ ID NO: 96605 - RNA, 22 nt, Human
guggcuagaaaaauaugggugc

SEQ ID NO: 96606 - RNA, 22 nt, Human
guggcucacgucugucaucuca

SEQ ID NO: 96607 - RNA, 19 nt, Human
guggcucauguagugggcc

SEQ ID NO: 96608 - RNA, 22 nt, Human
guggcuccgcaggcuccauucu

SEQ ID NO: 96609 - RNA, 22 nt, Human
guggcucucgccagccugcggg

SEQ ID NO: 96610 - RNA, 22 nt, Human
guggcucuugcauggggucucu

SEQ ID NO: 96611 - RNA, 22 nt, Human
guggcugacaaccacuggagga

SEQ ID NO: 96612 - RNA, 22 nt, Human
guggcugcaguaguguaggguc

SEQ ID NO: 96613 - RNA, 19 nt, Human
guggcugccgaucgcggcu

SEQ ID NO: 96614 - RNA, 22 nt, Human
gucaacauuuacugcccuggcc

SEQ ID NO: 96615 - RNA, 22 nt, Human
gucaacuuaucucuuuaucugu

SEQ ID NO: 96616 - RNA, 22 nt, Human
gucaagucaugacucaaaggaa

SEQ ID NO: 96617 - RNA, 22 nt, Human
gucaaguuuauccgcucauuca

SEQ ID NO: 96618 - RNA, 19 nt, Human
gucaauaaaaguuaggggu

SEQ ID NO: 96619 - RNA, 22 nt, Human
gucaauaaguuuguaacuggau

SEQ ID NO: 96620 - RNA, 22 nt, Human
gucaauaauugauagauauugg

SEQ ID NO: 96621 - RNA, 22 nt, Human
gucaauaauuuuauggagagaa

SEQ ID NO: 96622 - RNA, 22 nt, Human
gucaauauauucugucucuuug

SEQ ID NO: 96623 - RNA, 22 nt, Human
gucaauaucgccaagugucucu

SEQ ID NO: 96624 - RNA, 22 nt, Human
gucaaucagaaaucauguuaca

SEQ ID NO: 96625 - RNA, 22 nt, Human
gucaaugcuuuaguuucuggua

SEQ ID NO: 96626 - RNA, 22 nt, Human
gucaauuagcuaaaauuuggua

SEQ ID NO: 96627 - RNA, 22 nt, Human
gucacaaagcgcgguggucggu

SEQ ID NO: 96628 - RNA, 21 nt, Human
gucacacaggccuggagcuga

SEQ ID NO: 96629 - RNA, 22 nt, Human
gucacacagguugaaaugcagu

SEQ ID NO: 96630 - RNA, 22 nt, Human
gucacacucaaaagcuaggaug

SEQ ID NO: 96631 - RNA, 22 nt, Human
gucacacucuucccuccacaug

SEQ ID NO: 96632 - RNA, 18 nt, Human
gucacagcagagaacugc

SEQ ID NO: 96633 - RNA, 22 nt, Human
gucacaguaucauguuugaaug

SEQ ID NO: 96634 - RNA, 22 nt, Human
gucacaguguaucucuucagcu

SEQ ID NO: 96635 - RNA, 19 nt, Human
gucacauuugucucccagg

SEQ ID NO: 96636 - RNA, 22 nt, Human
gucaccagugcuaagaggugga

SEQ ID NO: 96637 - RNA, 19 nt, Human
gucaccauuuccaaaugcc

SEQ ID NO: 96638 - RNA, 22 nt, Human
gucaccugaggggaggugacag

SEQ ID NO: 96639 - RNA, 22 nt, Human
gucacucaggcuggaguucagu

SEQ ID NO: 96640 - RNA, 22 nt, Human
gucacuuucacacuuuauugcu

SEQ ID NO: 96641 - RNA, 22 nt, Human
gucagaaaccagucaaacaaga

SEQ ID NO: 96642 - RNA, 22 nt, Human
gucagagagggcacgugcacac

SEQ ID NO: 96643 - RNA, 22 nt, Human
gucagagcacugaguugugggc

SEQ ID NO: 96644 - RNA, 22 nt, Human
gucagagcccccagcggcgcgg

SEQ ID NO: 96645 - RNA, 22 nt, Human
gucagaggaauggaugagugau

SEQ ID NO: 96646 - RNA, 22 nt, Human
gucagaggaggcugaguaggaa

SEQ ID NO: 96647 - RNA, 22 nt, Human
gucagcaaggugcaagcggcug

SEQ ID NO: 96648 - RNA, 22 nt, Human
gucagcaccucuuuggggagcu

SEQ ID NO: 96649 - RNA, 22 nt, Human
gucagcacuuuuccgaggcaga

SEQ ID NO: 96650 - RNA, 22 nt, Human
gucagcauugcagauauauggc

SEQ ID NO: 96651 - RNA, 22 nt, Human
gucagccugcacucagggagcg

SEQ ID NO: 96652 - RNA, 22 nt, Human
gucagcgugcucagccuauuau

SEQ ID NO: 96653 - RNA, 22 nt, Human
gucagcuaggcagcugcgaugg

SEQ ID NO: 96654 - RNA, 22 nt, Human
gucagcuaggcagcugugaugg

SEQ ID NO: 96655 - RNA, 22 nt, Human
gucaggacaggcucuggacuga

SEQ ID NO: 96656 - RNA, 22 nt, Human
gucaggaugggcagccaaacua

SEQ ID NO: 96657 - RNA, 22 nt, Human
gucaggcauuuaggaugaguuc

SEQ ID NO: 96658 - RNA, 22 nt, Human
gucaggcccuggcagccgugac

SEQ ID NO: 96659 - RNA, 21 nt, Human
gucagggauucaagugcucac

SEQ ID NO: 96660 - RNA, 22 nt, Human
gucagggcuccacucacccucc

SEQ ID NO: 96661 - RNA, 22 nt, Human
gucagucauauuguacagauau

SEQ ID NO: 96662 - RNA, 22 nt, Human
gucagucuccugccuuuuggac

SEQ ID NO: 96663 - RNA, 22 nt, Human
gucagugccaccagccacugcc

SEQ ID NO: 96664 - RNA, 22 nt, Human
gucagugcuugaagggcagaga

SEQ ID NO: 96665 - RNA, 22 nt, Human
gucaguguagcaggugcaagcc

SEQ ID NO: 96666 - RNA, 22 nt, Human
gucagugucuuaacagagauua

SEQ ID NO: 96667 - RNA, 22 nt, Human
gucauaaaauuuguggauuaga

SEQ ID NO: 96668 - RNA, 22 nt, Human
gucauagaggccuauauaauuu

SEQ ID NO: 96669 - RNA, 22 nt, Human
gucauauuauaaauguucuguu

SEQ ID NO: 96670 - RNA, 22 nt, Human
gucauauugaagaagacuggca

SEQ ID NO: 96671 - RNA, 22 nt, Human
gucauccagacuuugccucugc

SEQ ID NO: 96672 - RNA, 22 nt, Human
gucaucugugcuuuugguagga

SEQ ID NO: 96673 - RNA, 22 nt, Human
gucaucuuaaggacugcuauag

SEQ ID NO: 96674 - RNA, 19 nt, Human
gucaucuuuuaauaaugug

SEQ ID NO: 96675 - RNA, 22 nt, Human
gucaugaaauucuagagcuuga

SEQ ID NO: 96676 - RNA, 22 nt, Human
gucaugagaaaucuuugaaggu

SEQ ID NO: 96677 - RNA, 22 nt, Human
gucaugugacccaaccugagcc

SEQ ID NO: 96678 - RNA, 18 nt, Human
gucauugcaacauacugu

SEQ ID NO: 96679 - RNA, 22 nt, Human
gucauuuaucaucagaagucau

SEQ ID NO: 96680 - RNA, 22 nt, Human
gucauuucuguuucuucagugc

SEQ ID NO: 96681 - RNA, 22 nt, Human
gucauuuuugacuuugaaguga

SEQ ID NO: 96682 - RNA, 22 nt, Human
guccaaacaggucaaaauauua

SEQ ID NO: 96683 - RNA, 22 nt, Human
guccaaauuuuucacauguaga

SEQ ID NO: 96684 - RNA, 22 nt, Human
guccaagagucaagaagggggc

SEQ ID NO: 96685 - RNA, 18 nt, Human
guccacagauucuucacu

SEQ ID NO: 96686 - RNA, 22 nt, Human
guccacucccagugccugaggc

SEQ ID NO: 96687 - RNA, 22 nt, Human
guccagaagcagugcacaucac

SEQ ID NO: 96688 - RNA, 22 nt, Human
guccagagaagggaggggacuc

SEQ ID NO: 96689 - RNA, 22 nt, Human
guccagagaggcaggaggcuac

SEQ ID NO: 96690 - RNA, 22 nt, Human
guccagaguagucgaguauucu

SEQ ID NO: 96691 - RNA, 22 nt, Human
guccagaguauucaaguaacuu

SEQ ID NO: 96692 - RNA, 22 nt, Human
guccagcauuuaggcuugcuga

SEQ ID NO: 96693 - RNA, 22 nt, Human
guccagccacucaccuuccagc

SEQ ID NO: 96694 - RNA, 22 nt, Human
guccagccaggcugcagcaccc

SEQ ID NO: 96695 - RNA, 22 nt, Human
guccagccccugacucccaggc

SEQ ID NO: 96696 - RNA, 22 nt, Human
guccagcccgggcuccgccagc

SEQ ID NO: 96697 - RNA, 22 nt, Human
guccagcccuugcagcuucuuu

SEQ ID NO: 96698 - RNA, 22 nt, Human
guccagccugaagagugggggc

SEQ ID NO: 96699 - RNA, 19 nt, Human
guccagccuuugggucuua

SEQ ID NO: 96700 - RNA, 22 nt, Human
guccaggaagcaauaaauagaa

SEQ ID NO: 96701 - RNA, 22 nt, Human
guccaggagcucagggcuuauu

SEQ ID NO: 96702 - RNA, 22 nt, Human
guccaggcugcccaggguccug

SEQ ID NO: 96703 - RNA, 22 nt, Human
guccagggccccgagcaccagg

SEQ ID NO: 96704 - RNA, 22 nt, Human
guccagucucuuuccaagccca

SEQ ID NO: 96705 - RNA, 21 nt, Human
guccaguggaggaggacagga

SEQ ID NO: 96706 - RNA, 20 nt, Human
guccagugggccuucauuuc

SEQ ID NO: 96707 - RNA, 22 nt, Human
guccagugucuucuacauaaca

SEQ ID NO: 96708 - RNA, 22 nt, Human
guccauccagggucaccaugac

SEQ ID NO: 96709 - RNA, 22 nt, Human
guccaugacugugacucacaug

SEQ ID NO: 96710 - RNA, 22 nt, Human
guccauggcagagcccuucugc

SEQ ID NO: 96711 - RNA, 22 nt, Human
guccauuuuauucagagacuuu

SEQ ID NO: 96712 - RNA, 22 nt, Human
gucccagagagcacuaguccau

SEQ ID NO: 96713 - RNA, 22 nt, Human
gucccagaggacagggucacau

SEQ ID NO: 96714 - RNA, 22 nt, Human
gucccaggcagagucaggaggg

SEQ ID NO: 96715 - RNA, 22 nt, Human
gucccagggagguucagggcuu

SEQ ID NO: 96716 - RNA, 22 nt, Human
gucccaggggagcucucugauu

SEQ ID NO: 96717 - RNA, 22 nt, Human
gucccaggucccagcacaucug

SEQ ID NO: 96718 - RNA, 22 nt, Human
gucccaggugcccagugggcag

SEQ ID NO: 96719 - RNA, 22 nt, Human
gucccauuucaagaaauucaug

SEQ ID NO: 96720 - RNA, 22 nt, Human
guccccagaaaggugaggcagg

SEQ ID NO: 96721 - RNA, 22 nt, Human
guccccagcugugacgagagcc

SEQ ID NO: 96722 - RNA, 22 nt, Human
guccccucagccacccaugggg

SEQ ID NO: 96723 - RNA, 22 nt, Human
gucccucucaaauuuauaugcu

SEQ ID NO: 96724 - RNA, 22 nt, Human
gucccucugccugugguucucu

SEQ ID NO: 96725 - RNA, 22 nt, Human
gucaggauuugaacucaggucu

SEQ ID NO: 96726 - RNA, 22 nt, Human
gucaggauuuuaaaaucccagu

SEQ ID NO: 96727 - RNA, 22 nt, Human
gucaggcagccuggagauucag

SEQ ID NO: 96728 - RNA, 22 nt, Human
gucaggcuggggcugcugccag

SEQ ID NO: 96729 - RNA, 23 nt, Human
gucagggcuggggucagagugac

SEQ ID NO: 96730 - RNA, 23 nt, Human
gucagugcuuuaguucaggaugg

SEQ ID NO: 96731 - RNA, 22 nt, Human
gucagugugguugcuggcuugg

SEQ ID NO: 96732 - RNA, 22 nt, Human
gucaguguuauaaguuuagcca

SEQ ID NO: 96733 - RNA, 22 nt, Human
gucaguuacagccacggcgggu

SEQ ID NO: 96734 - RNA, 22 nt, Human
gucaguuauuuugagcaauugg

SEQ ID NO: 96735 - RNA, 22 nt, Human
gucauagguucaaaaggcagau

SEQ ID NO: 96736 - RNA, 22 nt, Human
gucauauuggcuccacuuccuc

SEQ ID NO: 96737 - RNA, 22 nt, Human
gucaucaucaggcagaugcugc

SEQ ID NO: 96738 - RNA, 22 nt, Human
gucauccaacaagaggcucuug

SEQ ID NO: 96739 - RNA, 21 nt, Human
gucauccaccucucgggcucu

SEQ ID NO: 96740 - RNA, 22 nt, Human
gucaucuuaucauuguugcugu

SEQ ID NO: 96741 - RNA, 22 nt, Human
gucaucuuccuaguguuaacua

SEQ ID NO: 96742 - RNA, 22 nt, Human
gucaucuuugcccugugcagga

SEQ ID NO: 96743 - RNA, 22 nt, Human
aaaugcagguucuugagccaag

SEQ ID NO: 96744 - RNA, 22 nt, Human
aaaugcauaucaaagacuugaa

SEQ ID NO: 96745 - RNA, 22 nt, Human
aaaugcauggcuguuuuaaagc

SEQ ID NO: 96746 - RNA, 22 nt, Human
aaaugcauucuguuuucacuag

SEQ ID NO: 96747 - RNA, 22 nt, Human
aaaugccagcacacgucugugg

SEQ ID NO: 96748 - RNA, 22 nt, Human
aaaugcuacauacacaucaggg

SEQ ID NO: 96749 - RNA, 22 nt, Human
aaaugcucuggggauaagacug

SEQ ID NO: 96750 - RNA, 18 nt, Human
aaaugcugcucaaauucc

SEQ ID NO: 96751 - RNA, 22 nt, Human
aaaugcuguaacugauauucug

SEQ ID NO: 96752 - RNA, 22 nt, Human
aaaugcuguagaucagugaguu

SEQ ID NO: 96753 - RNA, 22 nt, Human
aaaugcuguguuuuaacauaga

SEQ ID NO: 96754 - RNA, 22 nt, Human
aaaugcuuauuagugucacaaa

SEQ ID NO: 96755 - RNA, 22 nt, Human
aaaugcuucaccucauuaaacu

SEQ ID NO: 96756 - RNA, 22 nt, Human
aaaugcuugcucuugauuauuu

SEQ ID NO: 96757 - RNA, 22 nt, Human
aaauggaacugggcuacuaggu

SEQ ID NO: 96758 - RNA, 22 nt, Human
aaauggaagcuauuuaugauuc

SEQ ID NO: 96759 - RNA, 22 nt, Human
aaauggaguucuaaguauagua

SEQ ID NO: 96760 - RNA, 21 nt, Human
aaauggauagggcaauggaag

SEQ ID NO: 96761 - RNA, 22 nt, Human
aaauggaucuguggaauacauu

SEQ ID NO: 96762 - RNA, 22 nt, Human
aaauggcaauuuaguuuauuua

SEQ ID NO: 96763 - RNA, 18 nt, Human
aaauggcagaauggauag

SEQ ID NO: 96764 - RNA, 22 nt, Human
aaauggcauucagcaaccuuuc

SEQ ID NO: 96765 - RNA, 22 nt, Human
aaauggcuacaagaugugcucu

SEQ ID NO: 96766 - RNA, 22 nt, Human
aaauggcugacuaaauuaaauu

SEQ ID NO: 96767 - RNA, 16 nt, Human
aaauggcuuaggcuua

SEQ ID NO: 96768 - RNA, 22 nt, Human
aaaugggccuggaaagaggaug

SEQ ID NO: 96769 - RNA, 22 nt, Human
aaauggguuugauucucagcca

SEQ ID NO: 96770 - RNA, 22 nt, Human
aaaugguaugaaaagagauuuc

SEQ ID NO: 96771 - RNA, 22 nt, Human
aaaugguauuuacucuguauua

SEQ ID NO: 96772 - RNA, 22 nt, Human
aaaugguccauccuaaagaagu

SEQ ID NO: 96773 - RNA, 22 nt, Human
aaauggugagggaauugaacag

SEQ ID NO: 96774 - RNA, 22 nt, Human
aaauguaagucuuuguuucuua

SEQ ID NO: 96775 - RNA, 22 nt, Human
aaauguagaccuauagggaccu

SEQ ID NO: 96776 - RNA, 22 nt, Human
aaauguauugcauaggauauuu

SEQ ID NO: 96777 - RNA, 22 nt, Human
aaaugucaaagacguguuuuug

SEQ ID NO: 96778 - RNA, 22 nt, Human
aaaugucaggugguggauggcu

SEQ ID NO: 96779 - RNA, 22 nt, Human
aaaugucuguaugagaaagaga

SEQ ID NO: 96780 - RNA, 22 nt, Human
aaaugucuguuagucauaucau

SEQ ID NO: 96781 - RNA, 22 nt, Human
aaaugucuuugaguauuucugc

SEQ ID NO: 96782 - RNA, 22 nt, Human
aaaugucuuugaguuuuuauaa

SEQ ID NO: 96783 - RNA, 22 nt, Human
aaaugugagacugaguuuuccu

SEQ ID NO: 96784 - RNA, 22 nt, Human
aaaugugauacuguucuuuuua

SEQ ID NO: 96785 - RNA, 19 nt, Human
aaaugugaugguacaauuc

SEQ ID NO: 96786 - RNA, 19 nt, Human
aaaugugcacuguuuucca

SEQ ID NO: 96787 - RNA, 22 nt, Human
aaaugugucauauucaaaguca

SEQ ID NO: 96788 - RNA, 22 nt, Human
aaauguguguauguacauauau

SEQ ID NO: 96789 - RNA, 22 nt, Human
aaauguguuuagaugguuuauu

SEQ ID NO: 96790 - RNA, 22 nt, Human
aaauguucauuaagggccuguu

SEQ ID NO: 96791 - RNA, 22 nt, Human
aaauguucauuucucacucaca

SEQ ID NO: 96792 - RNA, 22 nt, Human
aaauguuccauuauuguguaau

SEQ ID NO: 96793 - RNA, 22 nt, Human
aaauguucugaaagacccgcuc

SEQ ID NO: 96794 - RNA, 22 nt, Human
aaauuaacuaucacuuuuguga

SEQ ID NO: 96795 - RNA, 22 nt, Human
aaauuaccauuguaaaguauuu

SEQ ID NO: 96796 - RNA, 22 nt, Human
aaauuacuuuacacuuucaucu

SEQ ID NO: 96797 - RNA, 18 nt, Human
aaauuagauggaccugug

SEQ ID NO: 96798 - RNA, 21 nt, Human
aaauuagcuucaaguucugca

SEQ ID NO: 96799 - RNA, 22 nt, Human
aaauuaguacauugcaaagucc

SEQ ID NO: 96800 - RNA, 22 nt, Human
aaauuaucaugggggagaaaca

SEQ ID NO: 96801 - RNA, 22 nt, Human
aaauuauuauaggcagagcuga

SEQ ID NO: 96802 - RNA, 22 nt, Human
aaauuauuaugccccucuauaa

SEQ ID NO: 96803 - RNA, 22 nt, Human
aaauuauucaaaaagcuguguu

SEQ ID NO: 96804 - RNA, 18 nt, Human
aaauuauucuuccuuuuc

SEQ ID NO: 96805 - RNA, 22 nt, Human
aaauuauugggucccaccccag

SEQ ID NO: 96806 - RNA, 21 nt, Human
aaauucaccuaguaaaacuuc

SEQ ID NO: 96807 - RNA, 22 nt, Human
aaaggcuacgggggccgugugc

SEQ ID NO: 96808 - RNA, 22 nt, Human
aaaggcuauuucagggucagua

SEQ ID NO: 96809 - RNA, 22 nt, Human
aaaggcucacgcaguuagugau

SEQ ID NO: 96810 - RNA, 22 nt, Human
aaaggcucauacagaaaauaca

SEQ ID NO: 96811 - RNA, 22 nt, Human
aaaggcucaugaaccaggcucg

SEQ ID NO: 96812 - RNA, 22 nt, Human
aaaggcucuauuguuuucauau

SEQ ID NO: 96813 - RNA, 22 nt, Human
aaaggcuuagacacagaacugu

SEQ ID NO: 96814 - RNA, 22 nt, Human
aaaggcuucuuugcuccauguc

SEQ ID NO: 96815 - RNA, 22 nt, Human
aaaggcuugagcauuuguugaa

SEQ ID NO: 96816 - RNA, 22 nt, Human
aaagggaaguugcacauguucc

SEQ ID NO: 96817 - RNA, 22 nt, Human
aaagggccuccgccugggcagg

SEQ ID NO: 96818 - RNA, 22 nt, Human
aaagguaaaguaucugcccaag

SEQ ID NO: 96819 - RNA, 22 nt, Human
aaaggucaaaaucgugacauug

SEQ ID NO: 96820 - RNA, 22 nt, Human
aaaggucaagcuggacucaggu

SEQ ID NO: 96821 - RNA, 23 nt, Human
aaaggucucugagccuugguuuc

SEQ ID NO: 96822 - RNA, 22 nt, Human
aaaggucuuuuuucuaacacca

SEQ ID NO: 96823 - RNA, 22 nt, Human
aaaggugacugcagcagcuauu

SEQ ID NO: 96824 - RNA, 22 nt, Human
aaagguuauuauuacuauuguc

SEQ ID NO: 96825 - RNA, 22 nt, Human
aaagguucuacuuuuaaagaau

SEQ ID NO: 96826 - RNA, 22 nt, Human
aaagguugaauucaggauccac

SEQ ID NO: 96827 - RNA, 22 nt, Human
aaagguuuauuuaaucagggag

SEQ ID NO: 96828 - RNA, 22 nt, Human
aaagguuuuauguuuuccacuu

SEQ ID NO: 96829 - RNA, 22 nt, Human
aaagguuuucugacccuuagua

SEQ ID NO: 96830 - RNA, 22 nt, Human
aaagguuuugcccuggguauuc

SEQ ID NO: 96831 - RNA, 22 nt, Human
aaagguuuugguaaggcuuuaa

SEQ ID NO: 96832 - RNA, 22 nt, Human
aaaguaauugcaguuucugcca

SEQ ID NO: 96833 - RNA, 22 nt, Human
aaaguacaaauguucuagccau

SEQ ID NO: 96834 - RNA, 22 nt, Human
aaaguacaauauugagauugau

SEQ ID NO: 96835 - RNA, 22 nt, Human
aaaguacagauggugagguugg

SEQ ID NO: 96836 - RNA, 22 nt, Human
aaaguacaugcaauucuucuga

SEQ ID NO: 96837 - RNA, 22 nt, Human
aaaguacauguuuggccauuug

SEQ ID NO: 96838 - RNA, 22 nt, Human
aaaguacccaagaacagaguga

SEQ ID NO: 96839 - RNA, 22 nt, Human
aaaguacuuacaguaugcuugg

SEQ ID NO: 96840 - RNA, 22 nt, Human
aaaguacuuggauuacaggcau

SEQ ID NO: 96841 - RNA, 22 nt, Human
aaaguagaacauuuucuuaucu

SEQ ID NO: 96842 - RNA, 22 nt, Human
aaaguagcccuucuggaauuua

SEQ ID NO: 96843 - RNA, 22 nt, Human
aaaguaguccuuggagcgaaau

SEQ ID NO: 96844 - RNA, 22 nt, Human
aaaguauauuuacuuacuguga

SEQ ID NO: 96845 - RNA, 22 nt, Human
aaaguaugauuggggauuauuu

SEQ ID NO: 96846 - RNA, 22 nt, Human
aaagucaagguuuagacuagag

SEQ ID NO: 96847 - RNA, 22 nt, Human
aaagucauccaaauuuuuaugu

SEQ ID NO: 96848 - RNA, 22 nt, Human
aaagucauggaaaaucuuggaa

SEQ ID NO: 96849 - RNA, 20 nt, Human
aaagucucaacagcugagaa

SEQ ID NO: 96850 - RNA, 22 nt, Human
aaagucugagcagaauuucuca

SEQ ID NO: 96851 - RNA, 22 nt, Human
aaagucuuaauguaaguuuagu

SEQ ID NO: 96852 - RNA, 22 nt, Human
aacaucucuguauuuuauagac

SEQ ID NO: 96853 - RNA, 22 nt, Human
aacaucugggcccugauuuugg

SEQ ID NO: 96854 - RNA, 22 nt, Human
aacaucuuguccuuagauuaaa

SEQ ID NO: 96855 - RNA, 22 nt, Human
aacaucuuuguaguguucuccu

SEQ ID NO: 96856 - RNA, 22 nt, Human
aacaugaaaaccuccacagcaa

SEQ ID NO: 96857 - RNA, 22 nt, Human
aacaugaaaacuaccugugauu

SEQ ID NO: 96858 - RNA, 22 nt, Human
aacaugaaacccaaacagaaua

SEQ ID NO: 96859 - RNA, 22 nt, Human
aacaugaaguuuucuauaguga

SEQ ID NO: 96860 - RNA, 22 nt, Human
aacaugagugauaaaauuaccu

SEQ ID NO: 96861 - RNA, 22 nt, Human
aacaugauaguauuuugaggug

SEQ ID NO: 96862 - RNA, 22 nt, Human
aacaugcaaagcuaugauguau

SEQ ID NO: 96863 - RNA, 22 nt, Human
aacaugcaaugucugaaaaucc

SEQ ID NO: 96864 - RNA, 18 nt, Human
aacaugcauuagaacugc

SEQ ID NO: 96865 - RNA, 22 nt, Human
aacaugcccgcuguaugccauu

SEQ ID NO: 96866 - RNA, 22 nt, Human
aacaugcuggguguuuuugaug

SEQ ID NO: 96867 - RNA, 19 nt, Human
aacauggaacuggagaggg

SEQ ID NO: 96868 - RNA, 22 nt, Human
aacauggcucaugagagauuug

SEQ ID NO: 96869 - RNA, 22 nt, Human
aacauguaaauaucauuguacu

SEQ ID NO: 96870 - RNA, 22 nt, Human
aacauguaaccagcauucaucu

SEQ ID NO: 96871 - RNA, 22 nt, Human
aacauguagcagaaacgacuaa

SEQ ID NO: 96872 - RNA, 22 nt, Human
aacauguauuuuccuuggcaac

SEQ ID NO: 96873 - RNA, 22 nt, Human
aacaugucuuuagagaaacauu

SEQ ID NO: 96874 - RNA, 22 nt, Human
aacaugugucuugcauuucuug

SEQ ID NO: 96875 - RNA, 22 nt, Human
aacauguugaguugaaaguagc

SEQ ID NO: 96876 - RNA, 22 nt, Human
aacauucaaguucugguuuaug

SEQ ID NO: 96877 - RNA, 22 nt, Human
aacauucuacuguacugcauug

SEQ ID NO: 96878 - RNA, 22 nt, Human
aacauuucauaacuugacuuuu

SEQ ID NO: 96879 - RNA, 22 nt, Human
aacauuucauuggaagcuaugu

SEQ ID NO: 96880 - RNA, 22 nt, Human
aacauuucuucugaaacugagu

SEQ ID NO: 96881 - RNA, 22 nt, Human
aacauuugcaugcuuuauuaga

SEQ ID NO: 96882 - RNA, 21 nt, Human
aacauuuggcuggcuuuugug

SEQ ID NO: 96883 - RNA, 22 nt, Human
aacauuugugaaguacuuagau

SEQ ID NO: 96884 - RNA, 20 nt, Human
aaccaacagaaucaugucuc

SEQ ID NO: 96885 - RNA, 22 nt, Human
aaccaacaggaguggggauugg

SEQ ID NO: 96886 - RNA, 22 nt, Human
aaccaacauaggaaugcagaga

SEQ ID NO: 96887 - RNA, 22 nt, Human
aaccaagcccauuacuuuacuu

SEQ ID NO: 96888 - RNA, 22 nt, Human
aaccaaguuuauuccaaguuac

SEQ ID NO: 96889 - RNA, 22 nt, Human
aaccagcuccagccuccauuca

SEQ ID NO: 96890 - RNA, 22 nt, Human
aaccagcucugcaaaaugucau

SEQ ID NO: 96891 - RNA, 22 nt, Human
aaccagcuuugauacgcauuau

SEQ ID NO: 96892 - RNA, 22 nt, Human
aaccaggaacuuuugugagagc

SEQ ID NO: 96893 - RNA, 22 nt, Human
aaccaggaagggcgcaaauuau

SEQ ID NO: 96894 - RNA, 20 nt, Human
aaccaggauagaccagggaa

SEQ ID NO: 96895 - RNA, 22 nt, Human
aaccaguacuuuacacagcucu

SEQ ID NO: 96896 - RNA, 22 nt, Human
aaccaguuuagucaugcuguaa

SEQ ID NO: 96897 - RNA, 22 nt, Human
aaccaugcuagcaucaaaaugu

SEQ ID NO: 96898 - RNA, 22 nt, Human
aaccauguacuuuauucuguuu

SEQ ID NO: 96899 - RNA, 22 nt, Human
aacccacaagcagcuguagccc

SEQ ID NO: 96900 - RNA, 22 nt, Human
aacccagccguguagcugccgc

SEQ ID NO: 96901 - RNA, 22 nt, Human
aacccaggagacggaguuugug

SEQ ID NO: 96902 - RNA, 22 nt, Human
aacccaggagccggagguugug

SEQ ID NO: 96903 - RNA, 22 nt, Human
aacccagggugaggggagucua

SEQ ID NO: 96904 - RNA, 22 nt, Human
aacccauuaauccuugcaagca

SEQ ID NO: 96905 - RNA, 22 nt, Human
aaccccaggcuggaggagucuc

SEQ ID NO: 96906 - RNA, 22 nt, Human
aacccgggagguggagguuaug

SEQ ID NO: 96907 - RNA, 22 nt, Human
aacccuggggcagcugcuaggg

SEQ ID NO: 96908 - RNA, 22 nt, Human
aaccucucugugcccugacuuu

SEQ ID NO: 96909 - RNA, 22 nt, Human
aaccugaagaaaauauuugcug

SEQ ID NO: 96910 - RNA, 22 nt, Human
aaccugagauacuggucuuuau

SEQ ID NO: 96911 - RNA, 22 nt, Human
aaccugcaguuuuuauucugag

SEQ ID NO: 96912 - RNA, 22 nt, Human
aaccuggagcacccucauaucu

SEQ ID NO: 96913 - RNA, 22 nt, Human
aaccuggaggcuguguagucuu

SEQ ID NO: 96914 - RNA, 22 nt, Human
aaccuguucccugguccuugac

SEQ ID NO: 96915 - RNA, 22 nt, Human
aaccuguuuucuucucaucuag

SEQ ID NO: 96916 - RNA, 22 nt, Human
aaccuguuuugguugcauuuca

SEQ ID NO: 96917 - RNA, 22 nt, Human
aaccuuccugaggaaagucuaa

SEQ ID NO: 96918 - RNA, 22 nt, Human
aaccuuuauuugguacuauucu

SEQ ID NO: 96919 - RNA, 22 nt, Human
aaccuuucaauuauccucaucu

SEQ ID NO: 96920 - RNA, 22 nt, Human
aaccuuugaggggagcucuuuc

SEQ ID NO: 96921 - RNA, 22 nt, Human
aacgcccgugguugccaaggua

SEQ ID NO: 96922 - RNA, 22 nt, Human
aacuaauacauuaauacaugug

SEQ ID NO: 96923 - RNA, 22 nt, Human
aacuacaggggguggcaggcgg

SEQ ID NO: 96924 - RNA, 22 nt, Human
aacuacaguaguuugcccuucu

SEQ ID NO: 96925 - RNA, 22 nt, Human
aacuacauuuuacagaagauga

SEQ ID NO: 96926 - RNA, 22 nt, Human
aaauagacaggcuuaaauagga

SEQ ID NO: 96927 - RNA, 22 nt, Human
aaauagauugcugaggcauuac

SEQ ID NO: 96928 - RNA, 22 nt, Human
aaauagcagccuuuaguuaaca

SEQ ID NO: 96929 - RNA, 22 nt, Human
aaauagcugaaaguuccuagau

SEQ ID NO: 96930 - RNA, 22 nt, Human
aaauagcuucuaagccuuuuga

SEQ ID NO: 96931 - RNA, 22 nt, Human
aaauaggggaccaggaaaggag

SEQ ID NO: 96932 - RNA, 22 nt, Human
aaauaguaaagugguagccauc

SEQ ID NO: 96933 - RNA, 22 nt, Human
aaauaguuguuuggaucaauaa

SEQ ID NO: 96934 - RNA, 22 nt, Human
aaauauaguaaaugcauaguuc

SEQ ID NO: 96935 - RNA, 22 nt, Human
aaauauagugacacuuauaguc

SEQ ID NO: 96936 - RNA, 22 nt, Human
aaauauccucagggcagaggug

SEQ ID NO: 96937 - RNA, 22 nt, Human
aaauaucuuaggaguauaugag

SEQ ID NO: 96938 - RNA, 22 nt, Human
aaauaugagaguaggaguuugg

SEQ ID NO: 96939 - RNA, 22 nt, Human
aaauaugauacucccuuuuagu

SEQ ID NO: 96940 - RNA, 22 nt, Human
aaauauguaagauuagcacuag

SEQ ID NO: 96941 - RNA, 22 nt, Human
aaauauguauggaguucaugaa

SEQ ID NO: 96942 - RNA, 22 nt, Human
aaauaugugaucagugaauaaa

SEQ ID NO: 96943 - RNA, 22 nt, Human
aaauauuguuuugguaagcuuc

SEQ ID NO: 96944 - RNA, 22 nt, Human
aaaucaacuugugacguuaggu

SEQ ID NO: 96945 - RNA, 22 nt, Human
aaaucaaggagggauuauauuu

SEQ ID NO: 96946 - RNA, 22 nt, Human
aaaucagaaaauauggagagga

SEQ ID NO: 96947 - RNA, 22 nt, Human
aaaucagaggucagcuguacca

SEQ ID NO: 96948 - RNA, 22 nt, Human
aaaucagagucugauuuuaagg

SEQ ID NO: 96949 - RNA, 22 nt, Human
aaaucaguaaauguucauuaac

SEQ ID NO: 96950 - RNA, 22 nt, Human
aaaucaguuaagaugaggccau

SEQ ID NO: 96951 - RNA, 22 nt, Human
aaaucaguuagugguaggauug

SEQ ID NO: 96952 - RNA, 22 nt, Human
aaaucaguucucccuuucuuca

SEQ ID NO: 96953 - RNA, 22 nt, Human
aaaucauagcccccauccgauu

SEQ ID NO: 96954 - RNA, 22 nt, Human
aaaucaugugcagagaucagga

SEQ ID NO: 96955 - RNA, 22 nt, Human
aaauccaguuugucauuuccca

SEQ ID NO: 96956 - RNA, 22 nt, Human
aaaucccacucagaaacugcca

SEQ ID NO: 96957 - RNA, 22 nt, Human
aaaucccagauaguaauguauu

SEQ ID NO: 96958 - RNA, 23 nt, Human
aaauccugccucuuguauuuauc

SEQ ID NO: 96959 - RNA, 22 nt, Human
aaauccuguccauuuaccagau

SEQ ID NO: 96960 - RNA, 22 nt, Human
aaauccuugauaguuugcccua

SEQ ID NO: 96961 - RNA, 22 nt, Human
aacugauuucaaguucaguuuc

SEQ ID NO: 96962 - RNA, 22 nt, Human
aacugcaacuucguaaagugag

SEQ ID NO: 96963 - RNA, 23 nt, Human
aacugcaagguugcugggaagua

SEQ ID NO: 96964 - RNA, 22 nt, Human
aacugcaauuacuuuugcacua

SEQ ID NO: 96965 - RNA, 22 nt, Human
aacugcaauuacuuuugcgcca

SEQ ID NO: 96966 - RNA, 22 nt, Human
aacugcauaauauaucaugcag

SEQ ID NO: 96967 - RNA, 22 nt, Human
aacugcauguguguggcaugau

SEQ ID NO: 96968 - RNA, 22 nt, Human
aacugcauuugcauaaguccau

SEQ ID NO: 96969 - RNA, 22 nt, Human
aacugcuggggaggccaaacuc

SEQ ID NO: 96970 - RNA, 21 nt, Human
aacugcuggucuuuucugucu

SEQ ID NO: 96971 - RNA, 22 nt, Human
aacugcuuccuuggcaggcaug

SEQ ID NO: 96972 - RNA, 22 nt, Human
aacugcuugaugaagcucccac

SEQ ID NO: 96973 - RNA, 22 nt, Human
aacuggaagagugaauauaacu

SEQ ID NO: 96974 - RNA, 22 nt, Human
aacuggaaggauugcagauguc

SEQ ID NO: 96975 - RNA, 22 nt, Human
aacuggaaugaaauuuacgaug

SEQ ID NO: 96976 - RNA, 19 nt, Human
aacuggauaauggccacau

SEQ ID NO: 96977 - RNA, 22 nt, Human
aacuguaagacaaaugacuucu

SEQ ID NO: 96978 - RNA, 22 nt, Human
aacuguaagugguuggaagaag

SEQ ID NO: 96979 - RNA, 19 nt, Human
aacuguaauuaauacccua

SEQ ID NO: 96980 - RNA, 22 nt, Human
aacuguacgauaauaaauuugu

SEQ ID NO: 96981 - RNA, 22 nt, Human
aacugugaggaugugcaaauuc

SEQ ID NO: 96982 - RNA, 22 nt, Human
aacuguggacuugagacugaug

SEQ ID NO: 96983 - RNA, 22 nt, Human
aacuguggccagggacuggagu

SEQ ID NO: 96984 - RNA, 22 nt, Human
aacuguucuuguguuugcuaug

SEQ ID NO: 96985 - RNA, 22 nt, Human
aacuguugucauauggucuuaa

SEQ ID NO: 96986 - RNA, 22 nt, Human
aacuguuuaccauacacaguga

SEQ ID NO: 96987 - RNA, 22 nt, Human
aacuguuuauguaaguaugcag

SEQ ID NO: 96988 - RNA, 23 nt, Human
aacuuaauacugggauaagaugc

SEQ ID NO: 96989 - RNA, 22 nt, Human
aacuuacaaggaugauagcugc

SEQ ID NO: 96990 - RNA, 22 nt, Human
aacuuagacuuguuucuuggua

SEQ ID NO: 96991 - RNA, 22 nt, Human
aacuuauacccagggcagaaau

SEQ ID NO: 96992 - RNA, 22 nt, Human
aacuuauuccauaggcucacug

SEQ ID NO: 96993 - RNA, 22 nt, Human
aacuucaaaugugacuuugcau

SEQ ID NO: 96994 - RNA, 18 nt, Human
aacuucaacuacaaugga

SEQ ID NO: 96995 - RNA, 22 nt, Human
aacuucaccuuuuugccacacu

SEQ ID NO: 96996 - RNA, 22 nt, Human
aacuucagggggcacauucaag

SEQ ID NO: 96997 - RNA, 22 nt, Human
aacuuccugacuucuaaugagu

SEQ ID NO: 96998 - RNA, 22 nt, Human
aacuucucagccugcaccuggc

SEQ ID NO: 96999 - RNA, 22 nt, Human
aacuucugaccucaagaacugu

SEQ ID NO: 97000 - RNA, 22 nt, Human
aacuucugcagaaaagugcaug

SEQ ID NO: 97001 - RNA, 22 nt, Human
aacuucuuugagcuccaguuuu

SEQ ID NO: 97002 - RNA, 22 nt, Human
aacuugaaaaccucaugaauug

SEQ ID NO: 97003 - RNA, 22 nt, Human
aacuugaacugaugaguguuag

SEQ ID NO: 97004 - RNA, 22 nt, Human
aacuuguaggacugcacuguag

SEQ ID NO: 97005 - RNA, 22 nt, Human
aacuuguuuagaagagguuacu

SEQ ID NO: 97006 - RNA, 20 nt, Human
aacuuguuuuguuuucuaau

SEQ ID NO: 97007 - RNA, 22 nt, Human
aacuuuacacugcuuuacauga

SEQ ID NO: 97008 - RNA, 22 nt, Human
aacuuuacuugaaagaacaugu

SEQ ID NO: 97009 - RNA, 22 nt, Human
aacuuuauuguuaggggcuaaa

SEQ ID NO: 97010 - RNA, 22 nt, Human
aacuuucuauagguugggauuu

SEQ ID NO: 97011 - RNA, 22 nt, Human
aacuuucucuggauggcuuccu

SEQ ID NO: 97012 - RNA, 22 nt, Human
aacuuucuuggaugucucaaca

SEQ ID NO: 97013 - RNA, 22 nt, Human
aacuuucuugugacauuugggg

SEQ ID NO: 97014 - RNA, 22 nt, Human
aacuuugagucauugccucuuu

SEQ ID NO: 97015 - RNA, 20 nt, Human
aacuuugcauuuuauucucc

SEQ ID NO: 97016 - RNA, 22 nt, Human
aacuuuguuuuauucacugcug

SEQ ID NO: 97017 - RNA, 22 nt, Human
aacuuuucauuccaaaggugcu

SEQ ID NO: 97018 - RNA, 22 nt, Human
aagaaaacaugaucuaauuuaa

SEQ ID NO: 97019 - RNA, 22 nt, Human
aagaaaagauguuugguuuuca

SEQ ID NO: 97020 - RNA, 22 nt, Human
aagaaaagguaaccgcuuaucu

SEQ ID NO: 97021 - RNA, 22 nt, Human
aagaaaccaacccugccagcac

SEQ ID NO: 97022 - RNA, 22 nt, Human
aagaaacuguugcgugacagcg

SEQ ID NO: 97023 - RNA, 22 nt, Human
aagaaagccaaaguucauaccu

SEQ ID NO: 97024 - RNA, 22 nt, Human
aagaaagggagaaggauggugu

SEQ ID NO: 97025 - RNA, 22 nt, Human
aagaaaguguggagagccuagc

SEQ ID NO: 97026 - RNA, 22 nt, Human
aagaaauacaugguuuuugagu

SEQ ID NO: 97027 - RNA, 22 nt, Human
aagaaaucauaucauuucuugg

SEQ ID NO: 97028 - RNA, 22 nt, Human
aagaaaugcugauguuggaugg

SEQ ID NO: 97029 - RNA, 22 nt, Human
aagaaauggcuucaucugagua

SEQ ID NO: 97030 - RNA, 22 nt, Human
aagaacaacugcuuuaaaagca

SEQ ID NO: 97031 - RNA, 22 nt, Human
aagaacagauucagccugaacu

SEQ ID NO: 97032 - RNA, 22 nt, Human
aagaacaguguccugggacucg

SEQ ID NO: 97033 - RNA, 22 nt, Human
aagaacaugaagucacaaaugc

SEQ ID NO: 97034 - RNA, 22 nt, Human
aagaacauggacugugggguua

SEQ ID NO: 97035 - RNA, 22 nt, Human
aagaacuagucuuacagccuca

SEQ ID NO: 97036 - RNA, 21 nt, Human
aagaacuauugagguacacag

SEQ ID NO: 97037 - RNA, 18 nt, Human
aagaacugagguccuaga

SEQ ID NO: 97038 - RNA, 23 nt, Human
aagaacugcgaauggagaaagua

SEQ ID NO: 97039 - RNA, 22 nt, Human
aagaacuuccuaauauauuuuc

SEQ ID NO: 97040 - RNA, 22 nt, Human
aagaacuugggcugagugaaag

SEQ ID NO: 97041 - RNA, 22 nt, Human
aagaacuuuaaagcacuuauga

SEQ ID NO: 97042 - RNA, 23 nt, Human
aagaacuuugguccugcagaguc

SEQ ID NO: 97043 - RNA, 22 nt, Human
aagaagagaaaugugcugcugg

SEQ ID NO: 97044 - RNA, 22 nt, Human
aagaagcuaagacuaucugggu

SEQ ID NO: 97045 - RNA, 22 nt, Human
aagaagcuauacauaauuuggg

SEQ ID NO: 97046 - RNA, 22 nt, Human
aaaugccugaaugguauuuggu

SEQ ID NO: 97047 - RNA, 22 nt, Human
aaaugccuguguaaauucuagc

SEQ ID NO: 97048 - RNA, 22 nt, Human
aaaugcuaaaugcagcaaguag

SEQ ID NO: 97049 - RNA, 22 nt, Human
aaaugcuacacaggaauucuca

SEQ ID NO: 97050 - RNA, 22 nt, Human
aaaugcuagaacauuuuaaagg

SEQ ID NO: 97051 - RNA, 22 nt, Human
aaaugcucugcaucugauagac

SEQ ID NO: 97052 - RNA, 22 nt, Human
aaaugcugggaaccauuggauc

SEQ ID NO: 97053 - RNA, 19 nt, Human
aaaugcuguggagggcucc

SEQ ID NO: 97054 - RNA, 22 nt, Human
aaaugcuugcaacaucccaggu

SEQ ID NO: 97055 - RNA, 22 nt, Human
aaaugcuuguauauuucuuggu

SEQ ID NO: 97056 - RNA, 22 nt, Human
aaauggaaaaugcuguuuuggu

SEQ ID NO: 97057 - RNA, 22 nt, Human
aaauggaauguguuuauaauuc

SEQ ID NO: 97058 - RNA, 22 nt, Human
aaauggcaaucagcagaagcua

SEQ ID NO: 97059 - RNA, 18 nt, Human
aaauggcacacagaccug

SEQ ID NO: 97060 - RNA, 20 nt, Human
aaauggcacaugggaagucc

SEQ ID NO: 97061 - RNA, 22 nt, Human
aaauggcagcccagagguaagg

SEQ ID NO: 97062 - RNA, 22 nt, Human
aaauggcaguagaaaagaaucc

SEQ ID NO: 97063 - RNA, 22 nt, Human
aaauggcagugucauaaggcuc

SEQ ID NO: 97064 - RNA, 20 nt, Human
aaauggccucagauaagcag

SEQ ID NO: 97065 - RNA, 23 nt, Human
aaauggcuugcccucucguuugg

SEQ ID NO: 97066 - RNA, 22 nt, Human
aaaugguaaugucuuucuguuu

SEQ ID NO: 97067 - RNA, 22 nt, Human
aaaugguaguagcauuccauau

SEQ ID NO: 97068 - RNA, 22 nt, Human
aaauggucacuggugaguguca

SEQ ID NO: 97069 - RNA, 22 nt, Human
aaaugguguuucuaaugcuaga

SEQ ID NO: 97070 - RNA, 22 nt, Human
aagauacuucacuugccgaaau

SEQ ID NO: 97071 - RNA, 22 nt, Human
aagauagaugucaucagcauau

SEQ ID NO: 97072 - RNA, 22 nt, Human
aagauauagauaaaacuaugca

SEQ ID NO: 97073 - RNA, 22 nt, Human
aagauauucaaagauuuauuag

SEQ ID NO: 97074 - RNA, 22 nt, Human
aagaucaaguguacuuuaugua

SEQ ID NO: 97075 - RNA, 22 nt, Human
aagaucaauguucauuaagaug

SEQ ID NO: 97076 - RNA, 14 nt, Human
aagaucaccuuccu

SEQ ID NO: 97077 - RNA, 22 nt, Human
aagaucaccuugacaugaaaag

SEQ ID NO: 97078 - RNA, 22 nt, Human
aagaucagcucccgagucugag

SEQ ID NO: 97079 - RNA, 23 nt, Human
aagauccauucaaauuauguauc

SEQ ID NO: 97080 - RNA, 22 nt, Human
aagauccugcuuuugcuucugu

SEQ ID NO: 97081 - RNA, 22 nt, Human
aagauccuucucacugcagugu

SEQ ID NO: 97082 - RNA, 22 nt, Human
aagauccuugguucugcuuucc

SEQ ID NO: 97083 - RNA, 22 nt, Human
aagaugacagaugcuuagaguc

SEQ ID NO: 97084 - RNA, 22 nt, Human
aagaugauaggacuugcuuaag

SEQ ID NO: 97085 - RNA, 22 nt, Human
aagaugaugcagacuuugaugu

SEQ ID NO: 97086 - RNA, 22 nt, Human
aagaugcacaauguggcaauua

SEQ ID NO: 97087 - RNA, 22 nt, Human
aagaugcuggcaggaauagcua

SEQ ID NO: 97088 - RNA, 22 nt, Human
aagaugcuuccacugcaguggc

SEQ ID NO: 97089 - RNA, 22 nt, Human
aagaugcuugcaaauuucugaa

SEQ ID NO: 97090 - RNA, 22 nt, Human
aagauggcaucuccuauagaug

SEQ ID NO: 97091 - RNA, 22 nt, Human
aagaugguguggucaaggacca

SEQ ID NO: 97092 - RNA, 22 nt, Human
aagaugguuauuucaucaccua

SEQ ID NO: 97093 - RNA, 22 nt, Human
aagauguaaaggcaauauaaag

SEQ ID NO: 97094 - RNA, 22 nt, Human
aagauguaucaguuaagucuuc

SEQ ID NO: 97095 - RNA, 23 nt, Human
aagauguauuuuuaccaaauguc

SEQ ID NO: 97096 - RNA, 22 nt, Human
aagaugugcaguucauggcagg

SEQ ID NO: 97097 - RNA, 22 nt, Human
aagaugugcauggguaugcaau

SEQ ID NO: 97098 - RNA, 22 nt, Human
aagauguuaggguggaagggau

SEQ ID NO: 97099 - RNA, 22 nt, Human
aagauguucuauuuucacuuuu

SEQ ID NO: 97100 - RNA, 22 nt, Human
aagauuaaaggggagacaagcu

SEQ ID NO: 97101 - RNA, 22 nt, Human
aagauuauggcagauaacaauu

SEQ ID NO: 97102 - RNA, 22 nt, Human
aagauucccagagaaguuccac

SEQ ID NO: 97103 - RNA, 22 nt, Human
aagauucuacaguagguacauu

SEQ ID NO: 97104 - RNA, 22 nt, Human
aagauucugaaagggguggggc

SEQ ID NO: 97105 - RNA, 22 nt, Human
aagauucuuauuagguaauuuu

SEQ ID NO: 97106 - RNA, 19 nt, Human
aagauugccuuguuccauu

SEQ ID NO: 97107 - RNA, 22 nt, Human
aagauuuaccacuuuauucaag

SEQ ID NO: 97108 - RNA, 22 nt, Human
aagauuuacuagcauaauagcu

SEQ ID NO: 97109 - RNA, 22 nt, Human
aagauuuauuagaugcuuaccu

SEQ ID NO: 97110 - RNA, 22 nt, Human
aagauuuguggauuuaaggaua

SEQ ID NO: 97111 - RNA, 22 nt, Human
aagauuuucagcuaauggugca

SEQ ID NO: 97112 - RNA, 22 nt, Human
aagcaaagacaguuugagugga

SEQ ID NO: 97113 - RNA, 22 nt, Human
aagcaaaggaaagcugacuuuu

SEQ ID NO: 97114 - RNA, 22 nt, Human
aagcaaagugcuuugccuccag

SEQ ID NO: 97115 - RNA, 22 nt, Human
aagcaaauucuggaggugaggu

SEQ ID NO: 97116 - RNA, 22 nt, Human
aagcaacugccuucaauauuua

SEQ ID NO: 97117 - RNA, 22 nt, Human
aagcaagcaagguguuacauau

SEQ ID NO: 97118 - RNA, 22 nt, Human
aagcaagccaaucuguuuuguu

SEQ ID NO: 97119 - RNA, 22 nt, Human
aagcaaguacaauagcaaguac

SEQ ID NO: 97120 - RNA, 22 nt, Human
aagcaaguagguauuugacaaa

SEQ ID NO: 97121 - RNA, 22 nt, Human
aagcaaguucucaucauuuaua

SEQ ID NO: 97122 - RNA, 22 nt, Human
aagcaauaaauaauuuuuagua

SEQ ID NO: 97123 - RNA, 22 nt, Human
aagcaauaaucccaaagugcug

SEQ ID NO: 97124 - RNA, 23 nt, Human
aagcaauaccaggugugggcccu

SEQ ID NO: 97125 - RNA, 22 nt, Human
aagcaauauacugauaugauua

SEQ ID NO: 97126 - RNA, 22 nt, Human
aagcaauguguuaaugaaugag

SEQ ID NO: 97127 - RNA, 22 nt, Human
aagcaauucacaguucacuuaa

SEQ ID NO: 97128 - RNA, 22 nt, Human
aagcaauugagugaaaccucuu

SEQ ID NO: 97129 - RNA, 22 nt, Human
aagcaauuguccugucucuaca

SEQ ID NO: 97130 - RNA, 22 nt, Human
aagcaauuugacaguacauauc

SEQ ID NO: 97131 - RNA, 22 nt, Human
aagcacagaccagaucuccagg

SEQ ID NO: 97132 - RNA, 22 nt, Human
aagcacagacucccucugagug

SEQ ID NO: 97133 - RNA, 22 nt, Human
aagcacagagagguaaaguaac

SEQ ID NO: 97134 - RNA, 22 nt, Human
aagcacagagaugggcacgccu

SEQ ID NO: 97135 - RNA, 22 nt, Human
aagcacaggaucuugaggagcg

SEQ ID NO: 97136 - RNA, 22 nt, Human
aagcacagggugucugcauuca

SEQ ID NO: 97137 - RNA, 22 nt, Human
aagcacagguugaggauuauuc

SEQ ID NO: 97138 - RNA, 22 nt, Human
aagcacaguaaaagcagauuuu

SEQ ID NO: 97139 - RNA, 22 nt, Human
aagcacagugccaaguucuauu

SEQ ID NO: 97140 - RNA, 22 nt, Human
aagcacaguucuuagaguuaca

SEQ ID NO: 97141 - RNA, 22 nt, Human
aagcacaugaaaaugugaagcu

SEQ ID NO: 97142 - RNA, 22 nt, Human
aagcacauuuggaaaacaugga

SEQ ID NO: 97143 - RNA, 22 nt, Human
aagcaccaaguucaacauuccc

SEQ ID NO: 97144 - RNA, 22 nt, Human
aagcaccugcaguugacaaaaa

SEQ ID NO: 97145 - RNA, 22 nt, Human
aagcacugggaggaggcugaga

SEQ ID NO: 97146 - RNA, 20 nt, Human
aagcacugugguggcaugga

SEQ ID NO: 97147 - RNA, 22 nt, Human
aagcacuuuagugagaauaagg

SEQ ID NO: 97148 - RNA, 22 nt, Human
aagcagaauagaggcccuuccc

SEQ ID NO: 97149 - RNA, 22 nt, Human
aagcagaauuucccacuaguug

SEQ ID NO: 97150 - RNA, 22 nt, Human
aagcagacagagaauggguuug

SEQ ID NO: 97151 - RNA, 22 nt, Human
aagcagagagcagaauuaaguu

SEQ ID NO: 97152 - RNA, 22 nt, Human
aagcagagccugagacagggau

SEQ ID NO: 97153 - RNA, 22 nt, Human
aagcagaggccacagagugggc

SEQ ID NO: 97154 - RNA, 22 nt, Human
aagcagaggguauggccagguu

SEQ ID NO: 97155 - RNA, 22 nt, Human
aagcagaguccccuucccaugg

SEQ ID NO: 97156 - RNA, 22 nt, Human
aagcagagugauauaaacaugg

SEQ ID NO: 97157 - RNA, 22 nt, Human
aagcagcaaguuuauuucuauc

SEQ ID NO: 97158 - RNA, 22 nt, Human
aagcagcacagcaaugacucua

SEQ ID NO: 97159 - RNA, 22 nt, Human
aagcagcagaccugauuuugaa

SEQ ID NO: 97160 - RNA, 22 nt, Human
aagcagcauugugguaggggag

SEQ ID NO: 97161 - RNA, 22 nt, Human
aagcagccucauuugugguaag

SEQ ID NO: 97162 - RNA, 22 nt, Human
aagcagccuggcaugaugcuuu

SEQ ID NO: 97163 - RNA, 21 nt, Human
aagcagcuuaauaaaguaugu

SEQ ID NO: 97164 - RNA, 22 nt, Human
aagcagcuucccuggcuccugg

SEQ ID NO: 97165 - RNA, 21 nt, Human
aagcaggaacuucaaagggac

SEQ ID NO: 97166 - RNA, 22 nt, Human
aagcaggaagcucagguccuug

SEQ ID NO: 97167 - RNA, 22 nt, Human
aagcaggauggagguugaguua

SEQ ID NO: 97168 - RNA, 22 nt, Human
aagcaggcaucuuggaggucaa

SEQ ID NO: 97169 - RNA, 22 nt, Human
aagcaggcaugggaggccaucc

SEQ ID NO: 97170 - RNA, 22 nt, Human
aagcaggcucacgccaggcagu

SEQ ID NO: 97171 - RNA, 22 nt, Human
aagcagguaaauauguuucccu

SEQ ID NO: 97172 - RNA, 22 nt, Human
aagcagguuacauacauuaucu

SEQ ID NO: 97173 - RNA, 22 nt, Human
aagcaguaugguauuuaaguca

SEQ ID NO: 97174 - RNA, 22 nt, Human
aagcagucuuggcuggguucag

SEQ ID NO: 97175 - RNA, 22 nt, Human
aagcaguguucccagcuggccc

SEQ ID NO: 97176 - RNA, 22 nt, Human
aagcaguuuagauaggcaaagg

SEQ ID NO: 97177 - RNA, 22 nt, Human
aacuuuaaggcuauaaauuaug

SEQ ID NO: 97178 - RNA, 22 nt, Human
aacuuuagaaaggaaggaagug

SEQ ID NO: 97179 - RNA, 22 nt, Human
aagauuucugcuuuuggaggca

SEQ ID NO: 97180 - RNA, 22 nt, Human
aagauuucuuacuuauugaugc

SEQ ID NO: 97181 - RNA, 22 nt, Human
aagcaaaacgugcucuaggagg

SEQ ID NO: 97182 - RNA, 22 nt, Human
aagcaaaagguuacacuucugg

SEQ ID NO: 97183 - RNA, 22 nt, Human
aagcaucucaccugcccccacg

SEQ ID NO: 97184 - RNA, 19 nt, Human
aagcaucuuugaaacuggg

SEQ ID NO: 97185 - RNA, 22 nt, Human
aagcauggcugagugcaauggu

SEQ ID NO: 97186 - RNA, 22 nt, Human
aagcaugggaaucccacagggu

SEQ ID NO: 97187 - RNA, 22 nt, Human
aagcaugugcuggggcuuuuug

SEQ ID NO: 97188 - RNA, 22 nt, Human
aagcauuuggcaugaaacucuu

SEQ ID NO: 97189 - RNA, 22 nt, Human
aagcauuuuguuuuaagaauga

SEQ ID NO: 97190 - RNA, 22 nt, Human
aagccaacaugauuacuauaau

SEQ ID NO: 97191 - RNA, 22 nt, Human
aagccaagaguuaacuauuugu

SEQ ID NO: 97192 - RNA, 22 nt, Human
aagccaaggagaauggccucag

SEQ ID NO: 97193 - RNA, 22 nt, Human
aagccaagugcuggccaugggc

SEQ ID NO: 97194 - RNA, 22 nt, Human
aagccaaguuggaagacugaau

SEQ ID NO: 97195 - RNA, 22 nt, Human
aagccaaugagagaggccucag

SEQ ID NO: 97196 - RNA, 22 nt, Human
aagccacaaucugcaucagcau

SEQ ID NO: 97197 - RNA, 22 nt, Human
aagccacuauggugauucucaa

SEQ ID NO: 97198 - RNA, 22 nt, Human
aagccacucacaauaacugucc

SEQ ID NO: 97199 - RNA, 22 nt, Human
aagccagauuccuuaagcacag

SEQ ID NO: 97200 - RNA, 22 nt, Human
aagccagauuucacucuuaauu

SEQ ID NO: 97201 - RNA, 19 nt, Human
aagccagcugccagcucgg

SEQ ID NO: 97202 - RNA, 22 nt, Human
aagccaggccauucucugguuc

SEQ ID NO: 97203 - RNA, 22 nt, Human
aagccaguggcuucucccugcu

SEQ ID NO: 97204 - RNA, 22 nt, Human
aagccagugggcauagcaguug

SEQ ID NO: 97205 - RNA, 22 nt, Human
aagccaguggugagaagauagc

SEQ ID NO: 97206 - RNA, 16 nt, Human
aagccaguucagcauu

SEQ ID NO: 97207 - RNA, 22 nt, Human
aagccauggcugcaucagccug

SEQ ID NO: 97208 - RNA, 22 nt, Human
aagcccagaugggagcauuuca

SEQ ID NO: 97209 - RNA, 22 nt, Human
aagcccagggaauggucgggag

SEQ ID NO: 97210 - RNA, 22 nt, Human
aagcccagguaaguggcucaug

SEQ ID NO: 97211 - RNA, 22 nt, Human
aagcccgguugggaacguggug

SEQ ID NO: 97212 - RNA, 22 nt, Human
aagcccucauccccaugggcgu

SEQ ID NO: 97213 - RNA, 22 nt, Human
aagcccugacuaugaagacaua

SEQ ID NO: 97214 - RNA, 22 nt, Human
aagcccugccacccauucacug

SEQ ID NO: 97215 - RNA, 22 nt, Human
aagcccuggauuaaagaugcca

SEQ ID NO: 97216 - RNA, 22 nt, Human
aagcccuggcggguggagggcc

SEQ ID NO: 97217 - RNA, 22 nt, Human
aagcccuguuaggcacugggga

SEQ ID NO: 97218 - RNA, 22 nt, Human
aagcccuuggcagaguucccca

SEQ ID NO: 97219 - RNA, 22 nt, Human
aagccgaggccacacagcagga

SEQ ID NO: 97220 - RNA, 16 nt, Human
aagccuaaauuacaga

SEQ ID NO: 97221 - RNA, 22 nt, Human
aagccuaggccuacucugguuu

SEQ ID NO: 97222 - RNA, 22 nt, Human
aagccucaccuuuuagaagcua

SEQ ID NO: 97223 - RNA, 22 nt, Human
aagccuucaguccguugcagag

SEQ ID NO: 97224 - RNA, 22 nt, Human
aagccuugauucacucugugga

SEQ ID NO: 97225 - RNA, 22 nt, Human
aagccuugcagcauuaggcucu

SEQ ID NO: 97226 - RNA, 22 nt, Human
aagccuuggcccuucauuauaa

SEQ ID NO: 97227 - RNA, 22 nt, Human
aagcgcagacacagagagugga

SEQ ID NO: 97228 - RNA, 22 nt, Human
aagcgccacgagaagcuggacc

SEQ ID NO: 97229 - RNA, 19 nt, Human
aagcuaagaccugaagguu

SEQ ID NO: 97230 - RNA, 22 nt, Human
aagcuaaggguguuuaagcagg

SEQ ID NO: 97231 - RNA, 22 nt, Human
aagcuaauuguacuucucacag

SEQ ID NO: 97232 - RNA, 21 nt, Human
aagcuacagaaaauaauuuga

SEQ ID NO: 97233 - RNA, 22 nt, Human
aagcuacauuaagcagauuuac

SEQ ID NO: 97234 - RNA, 22 nt, Human
aagcuaggccucaguuuccuga

SEQ ID NO: 97235 - RNA, 22 nt, Human
aagcuauauuauauuuguguuu

SEQ ID NO: 97236 - RNA, 22 nt, Human
aagcuaugggggaguuucaacc

SEQ ID NO: 97237 - RNA, 22 nt, Human
aagcucagagucucggagggaa

SEQ ID NO: 97238 - RNA, 22 nt, Human
aagcucaggaaagagucugguu

SEQ ID NO: 97239 - RNA, 22 nt, Human
aagcucauuaauuagaagcuaa

SEQ ID NO: 97240 - RNA, 19 nt, Human
aagcuccagcagauccuuu

SEQ ID NO: 97241 - RNA, 22 nt, Human
aagcucugauacuuccuaccug

SEQ ID NO: 97242 - RNA, 22 nt, Human
aagcucugcucagcagacuagg

SEQ ID NO: 97243 - RNA, 20 nt, Human
aagcucugcuucaugugguc

SEQ ID NO: 97244 - RNA, 22 nt, Human
aagcucugggguacacaucugc

SEQ ID NO: 97245 - RNA, 22 nt, Human
aagcucuuaugauauuuauuua

SEQ ID NO: 97246 - RNA, 21 nt, Human
aagcucuucucagggucaccu

SEQ ID NO: 97247 - RNA, 22 nt, Human
aagcugaaacauuagccuaaac

SEQ ID NO: 97248 - RNA, 23 nt, Human
aagcugaacuuguuugcugggag

SEQ ID NO: 97249 - RNA, 22 nt, Human
aagcugaugucccaguuugaag

SEQ ID NO: 97250 - RNA, 22 nt, Human
aagcugcaaaaaauuucugucu

SEQ ID NO: 97251 - RNA, 22 nt, Human
aagcugcagacccccugucuca

SEQ ID NO: 97252 - RNA, 22 nt, Human
aagcugcagguugaauccaggu

SEQ ID NO: 97253 - RNA, 22 nt, Human
aagcugccagcugagcugaggc

SEQ ID NO: 97254 - RNA, 22 nt, Human
aagcugcccucauucccagugc

SEQ ID NO: 97255 - RNA, 22 nt, Human
aagcugcccuguguuagaguuc

SEQ ID NO: 97256 - RNA, 22 nt, Human
aagcugccuagaguugaauguc

SEQ ID NO: 97257 - RNA, 22 nt, Human
aagcugccuugcugaggagaaa

SEQ ID NO: 97258 - RNA, 22 nt, Human
aagcuggacacugacccacugu

SEQ ID NO: 97259 - RNA, 22 nt, Human
aagcuggagugcagugcaaugg

SEQ ID NO: 97260 - RNA, 22 nt, Human
aagcuggauguaggaucccccu

SEQ ID NO: 97261 - RNA, 22 nt, Human
aagcuggcaaacaagcaucauu

SEQ ID NO: 97262 - RNA, 22 nt, Human
aagcuggcaauuaucaaaacug

SEQ ID NO: 97263 - RNA, 20 nt, Human
aagcuggcaggucauagcuu

SEQ ID NO: 97264 - RNA, 22 nt, Human
aagcuggcaugucaccugagaa

SEQ ID NO: 97265 - RNA, 22 nt, Human
aagcuggccucaaacuccuagc

SEQ ID NO: 97266 - RNA, 22 nt, Human
aagcuguagaggcaguacauuu

SEQ ID NO: 97267 - RNA, 22 nt, Human
aagcuguauguuaccacuguca

SEQ ID NO: 97268 - RNA, 19 nt, Human
aagcuguccuguuggcccu

SEQ ID NO: 97269 - RNA, 22 nt, Human
aagcugugaaaucucuagugca

SEQ ID NO: 97270 - RNA, 22 nt, Human
aagcugugcaggaacugcuugc

SEQ ID NO: 97271 - RNA, 22 nt, Human
aagcuguggcuuggaggaaaca

SEQ ID NO: 97272 - RNA, 22 nt, Human
aagcuguguauuacagaauauu

SEQ ID NO: 97273 - RNA, 22 nt, Human
aagcuguuaauggcuugcagcu

SEQ ID NO: 97274 - RNA, 22 nt, Human
aagcuguuagggagugguaggu

SEQ ID NO: 97275 - RNA, 22 nt, Human
aagcuguuaucuucuggcggac

SEQ ID NO: 97276 - RNA, 22 nt, Human
aagcuguucucuaaguuucaug

SEQ ID NO: 97277 - RNA, 22 nt, Human
aagcuguuugcaguggauggag

SEQ ID NO: 97278 - RNA, 22 nt, Human
aagcuucaggcccacccauguc

SEQ ID NO: 97279 - RNA, 22 nt, Human
aagcuucaguggacuguagugu

SEQ ID NO: 97280 - RNA, 22 nt, Human
aagcuucagugugagcauguaa

SEQ ID NO: 97281 - RNA, 22 nt, Human
aagcuucauauaugugugaguc

SEQ ID NO: 97282 - RNA, 21 nt, Human
aagcuuccaaacugcuggacu

SEQ ID NO: 97283 - RNA, 21 nt, Human
aagcuucccugcucuccaggg

SEQ ID NO: 97284 - RNA, 23 nt, Human
aagcuuccuucacgucuccuggg

SEQ ID NO: 97285 - RNA, 22 nt, Human
aagcuuuaagugucagucagcc

SEQ ID NO: 97286 - RNA, 22 nt, Human
aagcuuuaugacuuggagacag

SEQ ID NO: 97287 - RNA, 19 nt, Human
aagcuuucccauuaacccc

SEQ ID NO: 97288 - RNA, 22 nt, Human
aggaaugucaaguagaugugcg

SEQ ID NO: 97289 - RNA, 22 nt, Human
aggaaugugaaacagguggcug

SEQ ID NO: 97290 - RNA, 22 nt, Human
aggaauguggcaaucuucaagu

SEQ ID NO: 97291 - RNA, 16 nt, Human
aggaauguggcggaac

SEQ ID NO: 97292 - RNA, 22 nt, Human
aggaauuaacaauauauuuagg

SEQ ID NO: 97293 - RNA, 22 nt, Human
aggaauuacucaucugugguau

SEQ ID NO: 97294 - RNA, 22 nt, Human
aggaauuauuugucuuagucuu

SEQ ID NO: 97295 - RNA, 22 nt, Human
aggaauucaagaccagcugggc

SEQ ID NO: 97296 - RNA, 22 nt, Human
aggaauuuagacagggcauaaa

SEQ ID NO: 97297 - RNA, 22 nt, Human
aggaauuuggaauuuuuccugu

SEQ ID NO: 97298 - RNA, 22 nt, Human
aggaauuugggguuacaugaug

SEQ ID NO: 97299 - RNA, 22 nt, Human
aggaauuuucacaguuggguau

SEQ ID NO: 97300 - RNA, 22 nt, Human
aggaauuuuguauggauacugu

SEQ ID NO: 97301 - RNA, 22 nt, Human
aggacaagcuaaaggacuuccu

SEQ ID NO: 97302 - RNA, 22 nt, Human
aggacacacaaagagugagaac

SEQ ID NO: 97303 - RNA, 22 nt, Human
aggacacacccagcucacgggg

SEQ ID NO: 97304 - RNA, 22 nt, Human
aggacacacugcaagagccugg

SEQ ID NO: 97305 - RNA, 22 nt, Human
aggacacagacugauugcagca

SEQ ID NO: 97306 - RNA, 22 nt, Human
aggacacagacuuagauuuaaa

SEQ ID NO: 97307 - RNA, 22 nt, Human
aggacacagugguggggaaaag

SEQ ID NO: 97308 - RNA, 22 nt, Human
aggacacuugagaguccaguca

SEQ ID NO: 97309 - RNA, 22 nt, Human
aggacagaccuaggacuggagc

SEQ ID NO: 97310 - RNA, 21 nt, Human
aggacagauguaggaauaaag

SEQ ID NO: 97311 - RNA, 22 nt, Human
aggacagcauuuucagcaucuc

SEQ ID NO: 97312 - RNA, 22 nt, Human
aggacaguauaggcuuuaggag

SEQ ID NO: 97313 - RNA, 23 nt, Human
aggacaguggaauuuagggauug

SEQ ID NO: 97314 - RNA, 22 nt, Human
aggacagugguguucuggagug

SEQ ID NO: 97315 - RNA, 22 nt, Human
aggacaguguggaagagggugc

SEQ ID NO: 97316 - RNA, 22 nt, Human
aggacaugaagaaagggcaagg

SEQ ID NO: 97317 - RNA, 22 nt, Human
aggacauguaaauggagaggga

SEQ ID NO: 97318 - RNA, 22 nt, Human
aggacaugugccuccagggcag

SEQ ID NO: 97319 - RNA, 22 nt, Human
aggaccaacauagcagcagugg

SEQ ID NO: 97320 - RNA, 22 nt, Human
aggaccaccgguccauccaccc

SEQ ID NO: 97321 - RNA, 22 nt, Human
aggaccagccuccaggucucuu

SEQ ID NO: 97322 - RNA, 23 nt, Human
aggaccagguucccaaaagucaa

SEQ ID NO: 97323 - RNA, 22 nt, Human
aggaccaguaugagagcaucug

SEQ ID NO: 97324 - RNA, 22 nt, Human
aggacccagaaggugcagcaga

SEQ ID NO: 97325 - RNA, 22 nt, Human
aggacccugagcgggcaugccg

SEQ ID NO: 97326 - RNA, 22 nt, Human
aggacccugcucaagcaucucc

SEQ ID NO: 97327 - RNA, 22 nt, Human
aggaccuacugauaucuuagca

SEQ ID NO: 97328 - RNA, 21 nt, Human
aggaccuagaaaagugccuag

SEQ ID NO: 97329 - RNA, 22 nt, Human
aggaccugaaauucuugcuuuu

SEQ ID NO: 97330 - RNA, 22 nt, Human
aggaccugacuggcuccugcuu

SEQ ID NO: 97331 - RNA, 22 nt, Human
aggaccugcuaaugugccaagu

SEQ ID NO: 97332 - RNA, 22 nt, Human
aggaccuguagggccugcaucc

SEQ ID NO: 97333 - RNA, 22 nt, Human
aggacggggacgcaagucagca

SEQ ID NO: 97334 - RNA, 22 nt, Human
aggacucacauagcuucagaug

SEQ ID NO: 97335 - RNA, 19 nt, Human
aggacucuggaggcaugag

SEQ ID NO: 97336 - RNA, 22 nt, Human
aggacuggugccagacaaggua

SEQ ID NO: 97337 - RNA, 22 nt, Human
aggacuucuaagcuaagaaguu

SEQ ID NO: 97338 - RNA, 19 nt, Human
aggacuucugaacccgucc

SEQ ID NO: 97339 - RNA, 20 nt, Human
aggacuuguuugggcagagu

SEQ ID NO: 97340 - RNA, 22 nt, Human
aggacuuuaacauauuaacugu

SEQ ID NO: 97341 - RNA, 22 nt, Human
aggagaaaacaguguuuugccu

SEQ ID NO: 97342 - RNA, 20 nt, Human
aggagaaauucgggacaccu

SEQ ID NO: 97343 - RNA, 23 nt, Human
aggagaagagauuuccacaugca

SEQ ID NO: 97344 - RNA, 22 nt, Human
aggagaaguaaggcuagaugau

SEQ ID NO: 97345 - RNA, 22 nt, Human
aggagacacugagacuucacca

SEQ ID NO: 97346 - RNA, 18 nt, Human
aggagacagccucaccug

SEQ ID NO: 97347 - RNA, 22 nt, Human
aggagacauaacuaugaugaga

SEQ ID NO: 97348 - RNA, 22 nt, Human
aggagacauggaauagugaggc

SEQ ID NO: 97349 - RNA, 22 nt, Human
aggagagagcugagcuuugcug

SEQ ID NO: 97350 - RNA, 22 nt, Human
aggagaggcucuaacucugugu

SEQ ID NO: 97351 - RNA, 22 nt, Human
aggagaucagccucccugcaac

SEQ ID NO: 97352 - RNA, 22 nt, Human
aggagauuguacugucaucacu

SEQ ID NO: 97353 - RNA, 22 nt, Human
aggagccaaaagcugaacaaga

SEQ ID NO: 97354 - RNA, 22 nt, Human
aggagccaaauuuuagacucug

SEQ ID NO: 97355 - RNA, 22 nt, Human
aggagccagaauccagacucgg

SEQ ID NO: 97356 - RNA, 22 nt, Human
aggagccaggccccauggggcu

SEQ ID NO: 97357 - RNA, 22 nt, Human
aggagccaguuccaccccagga

SEQ ID NO: 97358 - RNA, 23 nt, Human
aggagcccaaggagagguaacuu

SEQ ID NO: 97359 - RNA, 22 nt, Human
aggagccuccauggucacauuc

SEQ ID NO: 97360 - RNA, 22 nt, Human
aggagccuccuucucaugugca

SEQ ID NO: 97361 - RNA, 22 nt, Human
aggagccugaaucagaggguga

SEQ ID NO: 97362 - RNA, 22 nt, Human
aggagcucauguggcugccugu

SEQ ID NO: 97363 - RNA, 22 nt, Human
aggagcucugggcagggccucc

SEQ ID NO: 97364 - RNA, 22 nt, Human
aggagcugaugauucuuugauc

SEQ ID NO: 97365 - RNA, 22 nt, Human
aggagcugcagauucugccuug

SEQ ID NO: 97366 - RNA, 22 nt, Human
aggagcugcauggauaccuggu

SEQ ID NO: 97367 - RNA, 22 nt, Human
aggagcugggagaaggacuaaa

SEQ ID NO: 97368 - RNA, 17 nt, Human
aggagcuggggguggug

SEQ ID NO: 97369 - RNA, 22 nt, Human
aggagcugguagucucauuggg

SEQ ID NO: 97370 - RNA, 22 nt, Human
aggagcugucauuugauucaca

SEQ ID NO: 97371 - RNA, 22 nt, Human
aggagcugugaaugggaggggu

SEQ ID NO: 97372 - RNA, 21 nt, Human
aggagcugugugcuuccuuuc

SEQ ID NO: 97373 - RNA, 22 nt, Human
aggaggaaagaaggcccccagc

SEQ ID NO: 97374 - RNA, 21 nt, Human
aggaggaacccguggcugggc

SEQ ID NO: 97375 - RNA, 22 nt, Human
aggaggaacucagaaagaaggu

SEQ ID NO: 97376 - RNA, 22 nt, Human
aggaggaggugggacacaguga

SEQ ID NO: 97377 - RNA, 22 nt, Human
aggaggcagucugucccuuagc

SEQ ID NO: 97378 - RNA, 19 nt, Human
aggaggccaugccacuaga

SEQ ID NO: 97379 - RNA, 22 nt, Human
aggaggccuggcuggggagauc

SEQ ID NO: 97380 - RNA, 22 nt, Human
aggaggcugggcacaguggccu

SEQ ID NO: 97381 - RNA, 22 nt, Human
aggagggagcacuauaugggga

SEQ ID NO: 97382 - RNA, 16 nt, Human
aggaggggaauuagga

SEQ ID NO: 97383 - RNA, 20 nt, Human
aggaggggauagaaucaaag

SEQ ID NO: 97384 - RNA, 21 nt, Human
aggaggggucuuucccacuga

SEQ ID NO: 97385 - RNA, 22 nt, Human
aggagggucauguugaagugua

SEQ ID NO: 97386 - RNA, 22 nt, Human
aggagguggcaacugucgacag

SEQ ID NO: 97387 - RNA, 22 nt, Human
aggagguggccugagcgugccc

SEQ ID NO: 97388 - RNA, 22 nt, Human
aggagguguagauuuccuguca

SEQ ID NO: 97389 - RNA, 22 nt, Human
aggagucagauaugggaaaguu

SEQ ID NO: 97390 - RNA, 22 nt, Human
aggagucauugagagggguccu

SEQ ID NO: 97391 - RNA, 22 nt, Human
aggauaaguuugauucuugcca

SEQ ID NO: 97392 - RNA, 22 nt, Human
aggauacaagucucagaaugcu

SEQ ID NO: 97393 - RNA, 22 nt, Human
aggauacacggggauuuaugua

SEQ ID NO: 97394 - RNA, 21 nt, Human
aggauauuaggugauuugggu

SEQ ID NO: 97395 - RNA, 22 nt, Human
aggauauuugcuuaagauagcu

SEQ ID NO: 97396 - RNA, 22 nt, Human
aggaucaaaugaaauauuuuga

SEQ ID NO: 97397 - RNA, 20 nt, Human
aggcucugccugcaggccca

SEQ ID NO: 97398 - RNA, 22 nt, Human
aggcucugcuuuucuggauaua

SEQ ID NO: 97399 - RNA, 22 nt, Human
aggcucuggaguguggugcugg

SEQ ID NO: 97400 - RNA, 22 nt, Human
aggcucugguuggcaaguaaag

SEQ ID NO: 97401 - RNA, 22 nt, Human
aggcucugugacaaucaagcug

SEQ ID NO: 97402 - RNA, 22 nt, Human
aggcucuguuauucuagagggc

SEQ ID NO: 97403 - RNA, 22 nt, Human
auagacaugcaacacuuuuuac

SEQ ID NO: 97404 - RNA, 22 nt, Human
auagagauggguuuaguuauaa

SEQ ID NO: 97405 - RNA, 19 nt, Human
auagaguagaguaucuguu

SEQ ID NO: 97406 - RNA, 22 nt, Human
auagauauuugaguuguuucca

SEQ ID NO: 97407 - RNA, 22 nt, Human
auagaucauguuaaaagcucca

SEQ ID NO: 97408 - RNA, 22 nt, Human
auagaucauuugcauuggucgu

SEQ ID NO: 97409 - RNA, 20 nt, Human
auagauccugguucuuugca

SEQ ID NO: 97410 - RNA, 22 nt, Human
auagaugguauuuagacuagcg

SEQ ID NO: 97411 - RNA, 22 nt, Human
auagauguucaaucagauauuu

SEQ ID NO: 97412 - RNA, 22 nt, Human
auagauuauuugcucauuacuu

SEQ ID NO: 97413 - RNA, 22 nt, Human
auagauucauucuauuucuccg

SEQ ID NO: 97414 - RNA, 22 nt, Human
auagcaaaacccacugcauuac

SEQ ID NO: 97415 - RNA, 22 nt, Human
auagcaaaagcaugugcaauac

SEQ ID NO: 97416 - RNA, 22 nt, Human
auagcaaagaucacuuccuuga

SEQ ID NO: 97417 - RNA, 22 nt, Human
auagcaaaggacaauagucagu

SEQ ID NO: 97418 - RNA, 22 nt, Human
auagcaacaccccaauuuucua

SEQ ID NO: 97419 - RNA, 22 nt, Human
auagcaaucaguguauuugaaa

SEQ ID NO: 97420 - RNA, 22 nt, Human
auagcaaugaucaagacagaca

SEQ ID NO: 97421 - RNA, 22 nt, Human
auagcacaauauuaccuuuaug

SEQ ID NO: 97422 - RNA, 22 nt, Human
auagcagaaaccaagcuucuuc

SEQ ID NO: 97423 - RNA, 22 nt, Human
auagcaguggauguggagaaag

SEQ ID NO: 97424 - RNA, 22 nt, Human
auagcauuuacuuuucagaaau

SEQ ID NO: 97425 - RNA, 22 nt, Human
auagccaggucacagagcuagc

SEQ ID NO: 97426 - RNA, 22 nt, Human
auagcuguagaauguauacaca

SEQ ID NO: 97427 - RNA, 22 nt, Human
auagcuuuuugucauagagucu

SEQ ID NO: 97428 - RNA, 22 nt, Human
auaggaaagaaaauuauguagg

SEQ ID NO: 97429 - RNA, 22 nt, Human
auaggacugagauugucaguuu

SEQ ID NO: 97430 - RNA, 22 nt, Human
auaggacuuuguaucaggauga

SEQ ID NO: 97431 - RNA, 22 nt, Human
auaggagacuguucuuggcuuc

SEQ ID NO: 97432 - RNA, 22 nt, Human
auaggcauaacacugauguccu

SEQ ID NO: 97433 - RNA, 22 nt, Human
auaggcguguuuaggaggacgu

SEQ ID NO: 97434 - RNA, 19 nt, Human
auagggcacccuaaggagu

SEQ ID NO: 97435 - RNA, 22 nt, Human
auagggcaguggcaucucuuaa

SEQ ID NO: 97436 - RNA, 22 nt, Human
auagggcccccgugggugcuca

SEQ ID NO: 97437 - RNA, 22 nt, Human
auaguacaaucaguuaauuagu

SEQ ID NO: 97438 - RNA, 22 nt, Human
auaguacagagggcuacugguu

SEQ ID NO: 97439 - RNA, 22 nt, Human
auaguacagauccauuaauuau

SEQ ID NO: 97440 - RNA, 22 nt, Human
auaguaugaauuaaaucaugag

SEQ ID NO: 97441 - RNA, 22 nt, Human
auagucuuagucuauaguuuug

SEQ ID NO: 97442 - RNA, 19 nt, Human
auagucuuuccaauuauac

SEQ ID NO: 97443 - RNA, 22 nt, Human
auagugcaguggacugaguuaa

SEQ ID NO: 97444 - RNA, 22 nt, Human
auaguguuacccuucuuaaagu

SEQ ID NO: 97445 - RNA, 22 nt, Human
auaguguugauagcaguggagu

SEQ ID NO: 97446 - RNA, 22 nt, Human
auaguucuagaccuauaguucu

SEQ ID NO: 97447 - RNA, 22 nt, Human
auaguugagaucagauucaacu

SEQ ID NO: 97448 - RNA, 22 nt, Human
auaguuuaccuuccagauggcu

SEQ ID NO: 97449 - RNA, 23 nt, Human
auauaaacaccagauagauugua

SEQ ID NO: 97450 - RNA, 22 nt, Human
auauacaaagggcaaccucgcu

SEQ ID NO: 97451 - RNA, 22 nt, Human
auauacaguuuuacaggguuuc

SEQ ID NO: 97452 - RNA, 22 nt, Human
auauaccucauucuuugagugc

SEQ ID NO: 97453 - RNA, 22 nt, Human
auauacugauagcugcacuucu

SEQ ID NO: 97454 - RNA, 22 nt, Human
auauacuugauuuaacugagca

SEQ ID NO: 97455 - RNA, 22 nt, Human
auauacuuuucacuaauggcua

SEQ ID NO: 97456 - RNA, 20 nt, Human
auauagagucaaaauggcuu

SEQ ID NO: 97457 - RNA, 22 nt, Human
auauagcacuuguuuugcaugu

SEQ ID NO: 97458 - RNA, 22 nt, Human
auauaggcuaacaacuauugag

SEQ ID NO: 97459 - RNA, 19 nt, Human
auauaggcugaaccaugcu

SEQ ID NO: 97460 - RNA, 22 nt, Human
auauaguauguccuccagaauu

SEQ ID NO: 97461 - RNA, 22 nt, Human
auauagugaaagugaugugugg

SEQ ID NO: 97462 - RNA, 22 nt, Human
auauauaauacuugcugugggc

SEQ ID NO: 97463 - RNA, 22 nt, Human
auauauacaacuagauuaaaag

SEQ ID NO: 97464 - RNA, 22 nt, Human
auauauauugcccaggcugguu

SEQ ID NO: 97465 - RNA, 22 nt, Human
auauaucaugaguaaaacuuga

SEQ ID NO: 97466 - RNA, 18 nt, Human
auauauugacaagaggga

SEQ ID NO: 97467 - RNA, 22 nt, Human
auauauuuacucuccuguugca

SEQ ID NO: 97468 - RNA, 22 nt, Human
auauauuugagaauauucauga

SEQ ID NO: 97469 - RNA, 22 nt, Human
auaucaaaauaaacagcaugca

SEQ ID NO: 97470 - RNA, 22 nt, Human
auaucacaaacaagucuguacu

SEQ ID NO: 97471 - RNA, 22 nt, Human
auaucacagcucuuucauugcu

SEQ ID NO: 97472 - RNA, 22 nt, Human
auaucauaaaucggugcaugaa

SEQ ID NO: 97473 - RNA, 18 nt, Human
auauccaauaaugaacac

SEQ ID NO: 97474 - RNA, 22 nt, Human
auauccauaguaaaagucauua

SEQ ID NO: 97475 - RNA, 19 nt, Human
auauccuugagaaagggaa

SEQ ID NO: 97476 - RNA, 22 nt, Human
auauccuugagacguggcuacu

SEQ ID NO: 97477 - RNA, 22 nt, Human
auauccuuuguguaggcaauuu

SEQ ID NO: 97478 - RNA, 22 nt, Human
auaucuaccuagcuuaggcuga

SEQ ID NO: 97479 - RNA, 22 nt, Human
auaucucauuaccuugcuguuc

SEQ ID NO: 97480 - RNA, 22 nt, Human
auaucuggggacugaauuuaga

SEQ ID NO: 97481 - RNA, 22 nt, Human
auaucugguugguaauauaaca

SEQ ID NO: 97482 - RNA, 22 nt, Human
auaucuuucaaagccaaaagua

SEQ ID NO: 97483 - RNA, 22 nt, Human
auaucuuuguuuuugccaagau

SEQ ID NO: 97484 - RNA, 22 nt, Human
auaugaagaauuccaauuugga

SEQ ID NO: 97485 - RNA, 22 nt, Human
auaugaagucagacaaacuggg

SEQ ID NO: 97486 - RNA, 21 nt, Human
auaugaguuucagauguugcu

SEQ ID NO: 97487 - RNA, 22 nt, Human
auaugcagagagcaugaauagg

SEQ ID NO: 97488 - RNA, 22 nt, Human
auaugcauauaaagcuuuuagu

SEQ ID NO: 97489 - RNA, 22 nt, Human
auaugcauaugucaaaacuuau

SEQ ID NO: 97490 - RNA, 22 nt, Human
auaugcauguacgugugcacaa

SEQ ID NO: 97491 - RNA, 20 nt, Human
auaugcugagugaaggcaga

SEQ ID NO: 97492 - RNA, 22 nt, Human
auaugcuuacacuacaagauga

SEQ ID NO: 97493 - RNA, 22 nt, Human
auaugcuuacagcuuaaaaucc

SEQ ID NO: 97494 - RNA, 22 nt, Human
auaugcuugggacugauacagu

SEQ ID NO: 97495 - RNA, 22 nt, Human
auauggagaacucaaaaaguga

SEQ ID NO: 97496 - RNA, 22 nt, Human
auauggcagaccaauuagaagc

SEQ ID NO: 97497 - RNA, 22 nt, Human
auauggcauuacauuguuaaau

SEQ ID NO: 97498 - RNA, 22 nt, Human
auauggcuguugguagccaaca

SEQ ID NO: 97499 - RNA, 22 nt, Human
auaugggucaugugauguucaa

SEQ ID NO: 97500 - RNA, 22 nt, Human
auauguauguguuuucuuugga

SEQ ID NO: 97501 - RNA, 22 nt, Human
auauguauuuuaacguguaagg

SEQ ID NO: 97502 - RNA, 23 nt, Human
auaugucaugcaccagcacuuua

SEQ ID NO: 97503 - RNA, 22 nt, Human
auauguguauggauuucuaucu

SEQ ID NO: 97504 - RNA, 22 nt, Human
auaugugugccauuucagcagu

SEQ ID NO: 97505 - RNA, 22 nt, Human
auaugugugugugagaaaagcu

SEQ ID NO: 97506 - RNA, 22 nt, Human
aguaggcauuuaauaaacauga

SEQ ID NO: 97507 - RNA, 22 nt, Human
aguagggagaccggaggccgcc

SEQ ID NO: 97508 - RNA, 22 nt, Human
aguagugaacagccacaggauu

SEQ ID NO: 97509 - RNA, 22 nt, Human
aguaguuuuuaagagguauaaa

SEQ ID NO: 97510 - RNA, 22 nt, Human
aguauacauagagauggcuguu

SEQ ID NO: 97511 - RNA, 22 nt, Human
aguauacauagugcuuccucuu

SEQ ID NO: 97512 - RNA, 22 nt, Human
aguauacauauauuagccuucg

SEQ ID NO: 97513 - RNA, 19 nt, Human
aguauagaguauugaggag

SEQ ID NO: 97514 - RNA, 22 nt, Human
aguauaucugcuucuggguccc

SEQ ID NO: 97515 - RNA, 22 nt, Human
aguauaugugcacauaugcaug

SEQ ID NO: 97516 - RNA, 22 nt, Human
aguaucaaggaucuccagcacc

SEQ ID NO: 97517 - RNA, 22 nt, Human
aguaucugcaugauuuugagaa

SEQ ID NO: 97518 - RNA, 22 nt, Human
aguaucuuuacuuaaauaguca

SEQ ID NO: 97519 - RNA, 22 nt, Human
aguaugaagaugaugaaaaaua

SEQ ID NO: 97520 - RNA, 22 nt, Human
aguaugaaucucuuuauucugc

SEQ ID NO: 97521 - RNA, 22 nt, Human
aguaugaauggaaacuaccuau

SEQ ID NO: 97522 - RNA, 22 nt, Human
aguaugcaaaugucauaagcau

SEQ ID NO: 97523 - RNA, 22 nt, Human
aguauggggcugugugugcaca

SEQ ID NO: 97524 - RNA, 22 nt, Human
aguauguagugcaaucagucag

SEQ ID NO: 97525 - RNA, 19 nt, Human
aguaugucuaugagucuuu

SEQ ID NO: 97526 - RNA, 22 nt, Human
aguauguugaguuuugcuuuag

SEQ ID NO: 97527 - RNA, 22 nt, Human
aguauucagcaaacgugaacag

SEQ ID NO: 97528 - RNA, 22 nt, Human
aguauucugguuuuucaggugg

SEQ ID NO: 97529 - RNA, 22 nt, Human
aguauuuccuggcuuaucugcu

SEQ ID NO: 97530 - RNA, 22 nt, Human
aguauuucuaguugguucuacu

SEQ ID NO: 97531 - RNA, 22 nt, Human
aguauuucugaauauuaucaua

SEQ ID NO: 97532 - RNA, 22 nt, Human
aguauuucugcucaugaaagag

SEQ ID NO: 97533 - RNA, 21 nt, Human
aguauuucuucauguccuugc

SEQ ID NO: 97534 - RNA, 22 nt, Human
aguauuugauacagucuucuag

SEQ ID NO: 97535 - RNA, 22 nt, Human
aguauuugcauguuagggaccu

SEQ ID NO: 97536 - RNA, 22 nt, Human
aguauuuggccucuacagucuc

SEQ ID NO: 97537 - RNA, 22 nt, Human
aguauuuguugauugauaugaa

SEQ ID NO: 97538 - RNA, 22 nt, Human
aguauuuucaaccauagccugg

SEQ ID NO: 97539 - RNA, 22 nt, Human
aguauuuucgccaucacaagaa

SEQ ID NO: 97540 - RNA, 22 nt, Human
agucaaaacauguacuuuccuu

SEQ ID NO: 97541 - RNA, 22 nt, Human
agucaaagaagaugguuccaaa

SEQ ID NO: 97542 - RNA, 22 nt, Human
agucaaagcuacaggcauuuga

SEQ ID NO: 97543 - RNA, 22 nt, Human
agucaaaggguauuuggauuga

SEQ ID NO: 97544 - RNA, 22 nt, Human
agucaaauaagacugucauaag

SEQ ID NO: 97545 - RNA, 22 nt, Human
agucaacaccugguucuauuac

SEQ ID NO: 97546 - RNA, 22 nt, Human
agucaacagaguggccgcagcg

SEQ ID NO: 97547 - RNA, 22 nt, Human
agucaacagcauuauggaugaa

SEQ ID NO: 97548 - RNA, 22 nt, Human
agucaacugcauuaggaaauga

SEQ ID NO: 97549 - RNA, 22 nt, Human
agucaagguggaccagaaaaau

SEQ ID NO: 97550 - RNA, 22 nt, Human
agucaauaaaagcuuuagauuc

SEQ ID NO: 97551 - RNA, 22 nt, Human
agucaauauucaaguguaaaua

SEQ ID NO: 97552 - RNA, 22 nt, Human
agucacacacugucaguucugc

SEQ ID NO: 97553 - RNA, 22 nt, Human
agucacacuucguaucucuagc

SEQ ID NO: 97554 - RNA, 19 nt, Human
agucacagaccuugucucc

SEQ ID NO: 97555 - RNA, 22 nt, Human
auggggaagcaauuggauuucc

SEQ ID NO: 97556 - RNA, 22 nt, Human
auggggagcucaccaccuguuu

SEQ ID NO: 97557 - RNA, 22 nt, Human
auggggcugggauucuccucgg

SEQ ID NO: 97558 - RNA, 22 nt, Human
auggggugaccaugagcauuua

SEQ ID NO: 97559 - RNA, 22 nt, Human
auggggugagacuaggauuaaa

SEQ ID NO: 97560 - RNA, 22 nt, Human
augggguggaguccgggcagcg

SEQ ID NO: 97561 - RNA, 22 nt, Human
augggucccuggccgcccucgg

SEQ ID NO: 97562 - RNA, 22 nt, Human
auggguggaggagaaaggcauc

SEQ ID NO: 97563 - RNA, 22 nt, Human
auggguggccccgugugcaguc

SEQ ID NO: 97564 - RNA, 22 nt, Human
augguaacaguugaguagaaac

SEQ ID NO: 97565 - RNA, 22 nt, Human
augguaaccagaagacuaugac

SEQ ID NO: 97566 - RNA, 22 nt, Human
augguaaugauuuauguaaauu

SEQ ID NO: 97567 - RNA, 22 nt, Human
augguacagauaauacaugcug

SEQ ID NO: 97568 - RNA, 22 nt, Human
augguagguacaacagcaggca

SEQ ID NO: 97569 - RNA, 22 nt, Human
augguauacaauuauggacugu

SEQ ID NO: 97570 - RNA, 22 nt, Human
augguauagagccacauguauu

SEQ ID NO: 97571 - RNA, 22 nt, Human
augguauucucagcaccuagca

SEQ ID NO: 97572 - RNA, 22 nt, Human
auggucaaagauaaagugaucu

SEQ ID NO: 97573 - RNA, 23 nt, Human
auggucagaauuuuccagcugag

SEQ ID NO: 97574 - RNA, 22 nt, Human
augguccuuauggccgugauau

SEQ ID NO: 97575 - RNA, 17 nt, Human
auggucucacugagcaa

SEQ ID NO: 97576 - RNA, 22 nt, Human
auggucuugauuuuccauaggu

SEQ ID NO: 97577 - RNA, 22 nt, Human
auggucuuuuuguuaugagaga

SEQ ID NO: 97578 - RNA, 22 nt, Human
augguggaagagcaucagaaag

SEQ ID NO: 97579 - RNA, 22 nt, Human
augguggacucuugauucaggc

SEQ ID NO: 97580 - RNA, 22 nt, Human
auggugguuugggagaaaaagc

SEQ ID NO: 97581 - RNA, 22 nt, Human
augguguagcugucagucauaa

SEQ ID NO: 97582 - RNA, 22 nt, Human
augguguccccagccuuugaag

SEQ ID NO: 97583 - RNA, 22 nt, Human
augguugaaucaagguagacaa

SEQ ID NO: 97584 - RNA, 22 nt, Human
augguugagaagguaagguacc

SEQ ID NO: 97585 - RNA, 22 nt, Human
augguuuacagaacuccuagca

SEQ ID NO: 97586 - RNA, 22 nt, Human
augguuuacugaucuuuuuggu

SEQ ID NO: 97587 - RNA, 22 nt, Human
augguuuacuucauccaaucua

SEQ ID NO: 97588 - RNA, 22 nt, Human
augguuuauaaucuagguguga

SEQ ID NO: 97589 - RNA, 22 nt, Human
augguuuauccuuuaccagucg

SEQ ID NO: 97590 - RNA, 23 nt, Human
augguuuauguuguugugaagca

SEQ ID NO: 97591 - RNA, 22 nt, Human
auguaaaagauuauuuuccugu

SEQ ID NO: 97592 - RNA, 22 nt, Human
auguaaacuuagauaagcagua

SEQ ID NO: 97593 - RNA, 22 nt, Human
auguaaacuuuaccagcucuga

SEQ ID NO: 97594 - RNA, 22 nt, Human
auguaaaggcagacuuuaauuu

SEQ ID NO: 97595 - RNA, 22 nt, Human
auguaacauugaauuauauagu

SEQ ID NO: 97596 - RNA, 22 nt, Human
auguaaggcugccuaugacacu

SEQ ID NO: 97597 - RNA, 22 nt, Human
auguaaguuuaagcacaacaag

SEQ ID NO: 97598 - RNA, 22 nt, Human
auguaauuguagcaaaaugaug

SEQ ID NO: 97599 - RNA, 22 nt, Human
auguacaaccugcaugacaguc

SEQ ID NO: 97600 - RNA, 22 nt, Human
auguacacaugcaugcaugugc

SEQ ID NO: 97601 - RNA, 22 nt, Human
auguacaggauggugcucaucu

SEQ ID NO: 97602 - RNA, 22 nt, Human
auguacagugauaagagggcag

SEQ ID NO: 97603 - RNA, 18 nt, Human
auguacauguacucacac

SEQ ID NO: 97604 - RNA, 22 nt, Human
auguacauucuucucaccgaag

SEQ ID NO: 97605 - RNA, 22 nt, Human
auguacugacuguacuuuuaaa

SEQ ID NO: 97606 - RNA, 22 nt, Human
auguagaaauaauuucaguucc

SEQ ID NO: 97607 - RNA, 22 nt, Human
auguagaaauuaggaugauagu

SEQ ID NO: 97608 - RNA, 22 nt, Human
auguagaccuuucuuugugauu

SEQ ID NO: 97609 - RNA, 20 nt, Human
auguagaugaaagcaaaggc

SEQ ID NO: 97610 - RNA, 22 nt, Human
auguagauuugcuucuccugcc

SEQ ID NO: 97611 - RNA, 22 nt, Human
auguagcaugaggcacugugcc

SEQ ID NO: 97612 - RNA, 22 nt, Human
auguagcuugucccacaucaua

SEQ ID NO: 97613 - RNA, 22 nt, Human
auguagugcccuuugucaucua

SEQ ID NO: 97614 - RNA, 22 nt, Human
auguaguugaagugcuauaaag

SEQ ID NO: 97615 - RNA, 21 nt, Human
aguccaggagucacccaagcc

SEQ ID NO: 97616 - RNA, 22 nt, Human
aguccaggccuccucuuuuccu

SEQ ID NO: 97617 - RNA, 22 nt, Human
aguccagggagcccaggcuuug

SEQ ID NO: 97618 - RNA, 22 nt, Human
aguccagggcuuagucagcggg

SEQ ID NO: 97619 - RNA, 22 nt, Human
aguccagguggaccuuggccag

SEQ ID NO: 97620 - RNA, 22 nt, Human
aguccaguguguucuggcagca

SEQ ID NO: 97621 - RNA, 22 nt, Human
aguccauacauugagaauaaca

SEQ ID NO: 97622 - RNA, 19 nt, Human
aguccaugaauggaggaug

SEQ ID NO: 97623 - RNA, 18 nt, Human
aguccaugcauggcuaua

SEQ ID NO: 97624 - RNA, 22 nt, Human
aguccauuaacuguguuaacag

SEQ ID NO: 97625 - RNA, 22 nt, Human
agucccaacagcuuacaaggaa

SEQ ID NO: 97626 - RNA, 22 nt, Human
agucccagagaggucggggcca

SEQ ID NO: 97627 - RNA, 22 nt, Human
agucccagcuacucaagaggcu

SEQ ID NO: 97628 - RNA, 22 nt, Human
agucccagcucugccacuuacu

SEQ ID NO: 97629 - RNA, 22 nt, Human
agucccagugacuuggccagaa

SEQ ID NO: 97630 - RNA, 22 nt, Human
agucccagugagaugagccacg

SEQ ID NO: 97631 - RNA, 23 nt, Human
aguccccuacauaguuccugggg

SEQ ID NO: 97632 - RNA, 22 nt, Human
aguccccucucgcuuggcugag

SEQ ID NO: 97633 - RNA, 22 nt, Human
agucccuguacuuuccacugcc

SEQ ID NO: 97634 - RNA, 22 nt, Human
agucccuucucaaagugugcgg

SEQ ID NO: 97635 - RNA, 22 nt, Human
aguccggggucuggacaccugg

SEQ ID NO: 97636 - RNA, 22 nt, Human
aguccuggguucugguguuuug

SEQ ID NO: 97637 - RNA, 22 nt, Human
aguccugucucucccagggcca

SEQ ID NO: 97638 - RNA, 22 nt, Human
aguccugugaggggugcagcuu

SEQ ID NO: 97639 - RNA, 22 nt, Human
aguccuuacaccuggaaccuau

SEQ ID NO: 97640 - RNA, 18 nt, Human
aguccuuacgaggcuaua

SEQ ID NO: 97641 - RNA, 22 nt, Human
aguccuuacucgggggcccaga

SEQ ID NO: 97642 - RNA, 22 nt, Human
aguccuuagaacagugccuggg

SEQ ID NO: 97643 - RNA, 22 nt, Human
aguccuucccaucugacacccu

SEQ ID NO: 97644 - RNA, 18 nt, Human
aguccuucuugguuuuac

SEQ ID NO: 97645 - RNA, 21 nt, Human
aguccuugaaacucuuucuug

SEQ ID NO: 97646 - RNA, 22 nt, Human
aguccuuugcugaacugucaca

SEQ ID NO: 97647 - RNA, 22 nt, Human
aguccuuuuguuuugagaugag

SEQ ID NO: 97648 - RNA, 22 nt, Human
agucuacaaagggaagcccuuu

SEQ ID NO: 97649 - RNA, 21 nt, Human
agucuacaacuagggaagcug

SEQ ID NO: 97650 - RNA, 22 nt, Human
agucuacaguucccucaggucc

SEQ ID NO: 97651 - RNA, 22 nt, Human
agucuacauuuuuguuaauggu

SEQ ID NO: 97652 - RNA, 22 nt, Human
agucuagaaugugcaccaagcu

SEQ ID NO: 97653 - RNA, 22 nt, Human
agucuagcuuaggagccuagcu

SEQ ID NO: 97654 - RNA, 22 nt, Human
agucuauacuggacuguuguga

SEQ ID NO: 97655 - RNA, 22 nt, Human
agucuauauugugaaaguaaaa

SEQ ID NO: 97656 - RNA, 22 nt, Human
agucuauuuucagaagcaguuu

SEQ ID NO: 97657 - RNA, 22 nt, Human
agucucaaguguuaguauuauu

SEQ ID NO: 97658 - RNA, 22 nt, Human
agucucagaaaauaugcuuuuu

SEQ ID NO: 97659 - RNA, 22 nt, Human
agucucagccacacagaccuau

SEQ ID NO: 97660 - RNA, 22 nt, Human
agucucagcuacuugggaggcu

SEQ ID NO: 97661 - RNA, 22 nt, Human
agucucaggcagaggaaggcua

SEQ ID NO: 97662 - RNA, 19 nt, Human
agucucaguguacagaggc

SEQ ID NO: 97663 - RNA, 22 nt, Human
agucuccacuugacaucagcag

SEQ ID NO: 97664 - RNA, 22 nt, Human
agucuccgcucucggagucggc

SEQ ID NO: 97665 - RNA, 22 nt, Human
agucucuauguuccugcaauau

SEQ ID NO: 97666 - RNA, 22 nt, Human
agucucucacagaggauucucc

SEQ ID NO: 97667 - RNA, 22 nt, Human
agucucucuccucgugguaacc

SEQ ID NO: 97668 - RNA, 22 nt, Human
agucucucuugggugugguuug

SEQ ID NO: 97669 - RNA, 22 nt, Human
agucucugagguucagaugccu

SEQ ID NO: 97670 - RNA, 22 nt, Human
agucucugcacaguaagaagca

SEQ ID NO: 97671 - RNA, 22 nt, Human
agucucugcaugccugcugugc

SEQ ID NO: 97672 - RNA, 22 nt, Human
augucuuuaaacuugaguuguu

SEQ ID NO: 97673 - RNA, 22 nt, Human
augucuuuauaaauguauaaug

SEQ ID NO: 97674 - RNA, 22 nt, Human
augucuuuauuaauaucaugcc

SEQ ID NO: 97675 - RNA, 22 nt, Human
augucuuucgcaucaguagcua

SEQ ID NO: 97676 - RNA, 22 nt, Human
augucuuucuaguuaagagcua

SEQ ID NO: 97677 - RNA, 22 nt, Human
augucuuuggcuuugacauggc

SEQ ID NO: 97678 - RNA, 22 nt, Human
augucuuuuauggagaugucau

SEQ ID NO: 97679 - RNA, 22 nt, Human
augugaaaauccaauggcagca

SEQ ID NO: 97680 - RNA, 21 nt, Human
augugaaauaucaucagagca

SEQ ID NO: 97681 - RNA, 22 nt, Human
augugacaauauuuggucuuau

SEQ ID NO: 97682 - RNA, 22 nt, Human
augugacuucagucuucuuaca

SEQ ID NO: 97683 - RNA, 22 nt, Human
augugacuuugugucuuccauc

SEQ ID NO: 97684 - RNA, 22 nt, Human
augugagcuccggcagguggaa

SEQ ID NO: 97685 - RNA, 22 nt, Human
augugagcuggggcccggccag

SEQ ID NO: 97686 - RNA, 22 nt, Human
augugagguagauaggaugcag

SEQ ID NO: 97687 - RNA, 22 nt, Human
augugagguaucuaggucuucg

SEQ ID NO: 97688 - RNA, 22 nt, Human
augugauacuccuucuagugga

SEQ ID NO: 97689 - RNA, 22 nt, Human
augugcaaaguaaaguaauuuu

SEQ ID NO: 97690 - RNA, 23 nt, Human
augugcaaagugcuacaguauag

SEQ ID NO: 97691 - RNA, 22 nt, Human
augugcaaauccaaugugaaug

SEQ ID NO: 97692 - RNA, 22 nt, Human
augugcaaauuauuuugccaga

SEQ ID NO: 97693 - RNA, 22 nt, Human
augugcaacuuuucugucuuuu

SEQ ID NO: 97694 - RNA, 22 nt, Human
augugcacacagugucaugcaa

SEQ ID NO: 97695 - RNA, 22 nt, Human
augugcaggauccaggcuccua

SEQ ID NO: 97696 - RNA, 22 nt, Human
augugcugaguguguauauaca

SEQ ID NO: 97697 - RNA, 22 nt, Human
augugcuggcuaacuggauggg

SEQ ID NO: 97698 - RNA, 21 nt, Human
augugcuuagcugcugguagu

SEQ ID NO: 97699 - RNA, 22 nt, Human
augugcuugacuacucucuauu

SEQ ID NO: 97700 - RNA, 22 nt, Human
augugcuugcagaugagccuca

SEQ ID NO: 97701 - RNA, 19 nt, Human
augugcuugggccaugcua

SEQ ID NO: 97702 - RNA, 22 nt, Human
augugcuuuagguuuguuuaca

SEQ ID NO: 97703 - RNA, 22 nt, Human
auguggagaggaagugcaaacu

SEQ ID NO: 97704 - RNA, 22 nt, Human
auguggauagcacaggaauggu

SEQ ID NO: 97705 - RNA, 22 nt, Human
auguggaucuguuauucuagau

SEQ ID NO: 97706 - RNA, 22 nt, Human
auguggauguuuauaugaagaa

SEQ ID NO: 97707 - RNA, 22 nt, Human
auguggauuguaggaaacugau

SEQ ID NO: 97708 - RNA, 22 nt, Human
auguggcagugggaggugaauu

SEQ ID NO: 97709 - RNA, 17 nt, Human
auguggcuaagcugcug

SEQ ID NO: 97710 - RNA, 23 nt, Human
auguggcuagugagaccaagaaa

SEQ ID NO: 97711 - RNA, 22 nt, Human
auguggcuaguggacacaguau

SEQ ID NO: 97712 - RNA, 22 nt, Human
auguggcuauuuuaauguuaau

SEQ ID NO: 97713 - RNA, 22 nt, Human
auguggcugguaguugacaacu

SEQ ID NO: 97714 - RNA, 20 nt, Human
auguggcuuuuugaccugcu

SEQ ID NO: 97715 - RNA, 22 nt, Human
augugggaaauacaagcuaaaa

SEQ ID NO: 97716 - RNA, 22 nt, Human
auguggggacaaaaugauggcc

SEQ ID NO: 97717 - RNA, 22 nt, Human
auguggggacucugagagaauu

SEQ ID NO: 97718 - RNA, 22 nt, Human
augugguugaagaauuacaucu

SEQ ID NO: 97719 - RNA, 22 nt, Human
auguguaaugugguauuuuaau

SEQ ID NO: 97720 - RNA, 22 nt, Human
auguguacacacauauauguau

SEQ ID NO: 97721 - RNA, 22 nt, Human
auguguauguguauacacacag

SEQ ID NO: 97722 - RNA, 22 nt, Human
auguguauuaccucgauuguga

SEQ ID NO: 97723 - RNA, 22 nt, Human
augugucauuauccagaauaac

SEQ ID NO: 97724 - RNA, 20 nt, Human
auuuggcaugaaguauugau

SEQ ID NO: 97725 - RNA, 22 nt, Human
auuugggcaguccaugaaauaa

SEQ ID NO: 97726 - RNA, 22 nt, Human
auuuggucauguucaguguaga

SEQ ID NO: 97727 - RNA, 22 nt, Human
auuuggucuccauacugguuag

SEQ ID NO: 97728 - RNA, 22 nt, Human
auuuggugagguagccauuguu

SEQ ID NO: 97729 - RNA, 22 nt, Human
auuugguuacucaguugucuga

SEQ ID NO: 97730 - RNA, 22 nt, Human
auuugguuucaggauucucagg

SEQ ID NO: 97731 - RNA, 17 nt, Human
auuuguaacuagcucuu

SEQ ID NO: 97732 - RNA, 22 nt, Human
auuugucacacauaguuuaucc

SEQ ID NO: 97733 - RNA, 22 nt, Human
auuugucuagugguauucacgu

SEQ ID NO: 97734 - RNA, 22 nt, Human
auuugucucucuggguuuacuu

SEQ ID NO: 97735 - RNA, 22 nt, Human
auuugucuuuggaccugugaga

SEQ ID NO: 97736 - RNA, 22 nt, Human
auuugugaauuaagcaugucaa

SEQ ID NO: 97737 - RNA, 22 nt, Human
auuugugaucgugcgugaugaa

SEQ ID NO: 97738 - RNA, 17 nt, Human
auuugugauguaacguc

SEQ ID NO: 97739 - RNA, 22 nt, Human
auuugugcauaucccauccacc

SEQ ID NO: 97740 - RNA, 22 nt, Human
auuuguguuguauuaagcugcu

SEQ ID NO: 97741 - RNA, 22 nt, Human
auuuguucacaaucagggcagg

SEQ ID NO: 97742 - RNA, 22 nt, Human
auuuguucauggguuguuaugc

SEQ ID NO: 97743 - RNA, 22 nt, Human
auuuguucucauaaagaaugaa

SEQ ID NO: 97744 - RNA, 22 nt, Human
auuuguugaauaaauuaguauu

SEQ ID NO: 97745 - RNA, 22 nt, Human
auuuguugcuagcagcacugau

SEQ ID NO: 97746 - RNA, 22 nt, Human
auuuguuuaucgucgauuguag

SEQ ID NO: 97747 - RNA, 22 nt, Human
auuuguuucagggccuugguau

SEQ ID NO: 97748 - RNA, 22 nt, Human
auuuuaauaagauucccaagua

SEQ ID NO: 97749 - RNA, 22 nt, Human
auuuuagagaaacaaacguagg

SEQ ID NO: 97750 - RNA, 22 nt, Human
auuuuauccccacuggauuaca

SEQ ID NO: 97751 - RNA, 22 nt, Human
auuuuaucugcuuacuuucagg

SEQ ID NO: 97752 - RNA, 22 nt, Human
auuuucaaaacaucugcugugu

SEQ ID NO: 97753 - RNA, 22 nt, Human
auuuucacccugaauauauuga

SEQ ID NO: 97754 - RNA, 22 nt, Human
auuuucagagacaucuggacuu

SEQ ID NO: 97755 - RNA, 22 nt, Human
auuuucagucuggcuggaccca

SEQ ID NO: 97756 - RNA, 22 nt, Human
auuuucagugaucauagcacac

SEQ ID NO: 97757 - RNA, 22 nt, Human
auuuucaguguaaauguuuuau

SEQ ID NO: 97758 - RNA, 21 nt, Human
auuuucauuaauucagugugg

SEQ ID NO: 97759 - RNA, 22 nt, Human
auuuucauuuugcagggugaga

SEQ ID NO: 97760 - RNA, 22 nt, Human
auuuuccaaaauaauuguuacu

SEQ ID NO: 97761 - RNA, 22 nt, Human
auuuucuagauagaugaugcau

SEQ ID NO: 97762 - RNA, 22 nt, Human
auuuucuauucugcugguuuag

SEQ ID NO: 97763 - RNA, 22 nt, Human
auuuucucacaaugcagaagga

SEQ ID NO: 97764 - RNA, 22 nt, Human
auuuucucuuuguauaugcuag

SEQ ID NO: 97765 - RNA, 22 nt, Human
auuuucugaguccagaauuuac

SEQ ID NO: 97766 - RNA, 22 nt, Human
auuuugacagaagaggcccuaa

SEQ ID NO: 97767 - RNA, 22 nt, Human
auuuugaugcuaucuaaugaau

SEQ ID NO: 97768 - RNA, 22 nt, Human
auuuugcacacuaugcagcuuu

SEQ ID NO: 97769 - RNA, 22 nt, Human
auuuuggcaacagccaugagcc

SEQ ID NO: 97770 - RNA, 20 nt, Human
auuuuggugaacacagcuuc

SEQ ID NO: 97771 - RNA, 22 nt, Human
auuuuguaucuuacggggacua

SEQ ID NO: 97772 - RNA, 22 nt, Human
auuuuguuauaggagcugaaau

SEQ ID NO: 97773 - RNA, 22 nt, Human
auuuuuaggcucuacccucaga

SEQ ID NO: 97774 - RNA, 22 nt, Human
auuuuucaacuuuggaaauggc

SEQ ID NO: 97775 - RNA, 22 nt, Human
auuuuucagcuucauugaggca

SEQ ID NO: 97776 - RNA, 18 nt, Human
auuuuucccagauggaua

SEQ ID NO: 97777 - RNA, 23 nt, Human
auuuuuccuggaacagucaccca

SEQ ID NO: 97778 - RNA, 22 nt, Human
auuuuuccugggugcuuuaguu

SEQ ID NO: 97779 - RNA, 22 nt, Human
auuuuucucuccacuccauuaa

SEQ ID NO: 97780 - RNA, 22 nt, Human
auuuuuucagauugaguguuaa

SEQ ID NO: 97781 - RNA, 22 nt, Human
auuuuuucccaguuagccagga

SEQ ID NO: 97782 - RNA, 22 nt, Human
caaaaacugcaauuacuuuuac

SEQ ID NO: 97783 - RNA, 22 nt, Human
caaaaggcaggggaaagagugc

SEQ ID NO: 97784 - RNA, 22 nt, Human
caaaaggccaguacuuuguuug

SEQ ID NO: 97785 - RNA, 22 nt, Human
caaaaguaaucguggcuuuugc

SEQ ID NO: 97786 - RNA, 22 nt, Human
caaaaguaauguaugcucaucg

SEQ ID NO: 97787 - RNA, 22 nt, Human
caaaaguaauugcaguuuuugc

SEQ ID NO: 97788 - RNA, 22 nt, Human
caaaaguaccuugugugcuuug

SEQ ID NO: 97789 - RNA, 22 nt, Human
caaaagucuguccuuuaacuuc

SEQ ID NO: 97790 - RNA, 23 nt, Human
caaaaguuagcccuucccaucuc

SEQ ID NO: 97791 - RNA, 22 nt, Human
caaaaguuauugcgguuuuugc

SEQ ID NO: 97792 - RNA, 23 nt, Human
caaaaugguuuaaaaguggcaua

SEQ ID NO: 97793 - RNA, 22 nt, Human
caaaaugugagucccaccucaa

SEQ ID NO: 97794 - RNA, 22 nt, Human
caaaauguucuggcaccuuuaa

SEQ ID NO: 97795 - RNA, 22 nt, Human
caaaauuagggagugagcugga

SEQ ID NO: 97796 - RNA, 22 nt, Human
caaaauucugcauuucuaauaa

SEQ ID NO: 97797 - RNA, 22 nt, Human
caaaauugaugaauguaugauu

SEQ ID NO: 97798 - RNA, 22 nt, Human
caaaauuguugaugcugcuuug

SEQ ID NO: 97799 - RNA, 22 nt, Human
caaacauucagaugcaauggua

SEQ ID NO: 97800 - RNA, 22 nt, Human
caaacauuccgcuucucccagg

SEQ ID NO: 97801 - RNA, 22 nt, Human
caaacauugcacuuucugcuau

SEQ ID NO: 97802 - RNA, 22 nt, Human
caaacauuuaggaggagggagg

SEQ ID NO: 97803 - RNA, 22 nt, Human
caaaccugagaacaugugcugu

SEQ ID NO: 97804 - RNA, 22 nt, Human
caaaccugcugcuauuuuaucc

SEQ ID NO: 97805 - RNA, 22 nt, Human
caaaccuguccuuuugucuccu

SEQ ID NO: 97806 - RNA, 23 nt, Human
caaaccuguucuccccacaugca

SEQ ID NO: 97807 - RNA, 22 nt, Human
caaaccuugcagaacugggcag

SEQ ID NO: 97808 - RNA, 22 nt, Human
caaacuauuguucacaagacaa

SEQ ID NO: 97809 - RNA, 22 nt, Human
caaacucucccacucacucuga

SEQ ID NO: 97810 - RNA, 22 nt, Human
caaacuguaugacccuaggccg

SEQ ID NO: 97811 - RNA, 22 nt, Human
caaacuguucucugugggauuc

SEQ ID NO: 97812 - RNA, 22 nt, Human
caaacuugguggauuaguacag

SEQ ID NO: 97813 - RNA, 22 nt, Human
caaagaauagcauggcauuugu

SEQ ID NO: 97814 - RNA, 22 nt, Human
caaagauaaucacagaauaccc

SEQ ID NO: 97815 - RNA, 22 nt, Human
caaagaugccaaaaggaagaca

SEQ ID NO: 97816 - RNA, 22 nt, Human
caaagcaggaagaauauugaaa

SEQ ID NO: 97817 - RNA, 22 nt, Human
caaagcaguauuggauucuuua

SEQ ID NO: 97818 - RNA, 22 nt, Human
caaagcagugauccuuaaagga

SEQ ID NO: 97819 - RNA, 22 nt, Human
caaagcaguuuuaaucaaguag

SEQ ID NO: 97820 - RNA, 18 nt, Human
caaagcucacguuccauc

SEQ ID NO: 97821 - RNA, 22 nt, Human
caaagcugugaauuccuacaaa

SEQ ID NO: 97822 - RNA, 22 nt, Human
caaagcuuggagaagcagcugg

SEQ ID NO: 97823 - RNA, 22 nt, Human
caaaggaaauacuaaucuggaa

SEQ ID NO: 97824 - RNA, 22 nt, Human
caaaggaggugauaggcccucu

SEQ ID NO: 97825 - RNA, 22 nt, Human
aguguuugggggccuuguaaca

SEQ ID NO: 97826 - RNA, 22 nt, Human
aguguuuguaaacuacagaucu

SEQ ID NO: 97827 - RNA, 22 nt, Human
aguguuuuucaggagcagaaca

SEQ ID NO: 97828 - RNA, 22 nt, Human
aguguuuuuggguagggugagu

SEQ ID NO: 97829 - RNA, 22 nt, Human
aguuaaaucauggccauuggaa

SEQ ID NO: 97830 - RNA, 22 nt, Human
aguuaacaaguuggcaaucaac

SEQ ID NO: 97831 - RNA, 22 nt, Human
aguuaacacagucaggaguaac

SEQ ID NO: 97832 - RNA, 17 nt, Human
aguuaaggcucuuugcu

SEQ ID NO: 97833 - RNA, 22 nt, Human
auaauguagguauguguauuua

SEQ ID NO: 97834 - RNA, 22 nt, Human
auaauguguucaucuuacaauu

SEQ ID NO: 97835 - RNA, 22 nt, Human
auaauguugaugauugucuuug

SEQ ID NO: 97836 - RNA, 22 nt, Human
auaauguuucaguacugucugu

SEQ ID NO: 97837 - RNA, 22 nt, Human
auaauguuuuuguauaagcaug

SEQ ID NO: 97838 - RNA, 22 nt, Human
auaauuaauuucaguaaucucc

SEQ ID NO: 97839 - RNA, 20 nt, Human
auaauuauuuacuuuugugc

SEQ ID NO: 97840 - RNA, 22 nt, Human
auaauuuacaacugcuuuuaau

SEQ ID NO: 97841 - RNA, 22 nt, Human
auaauuuuuguuugauguccaa

SEQ ID NO: 97842 - RNA, 22 nt, Human
auacaacugcucucagauaagu

SEQ ID NO: 97843 - RNA, 22 nt, Human
auacaaguggccacuugaauuc

SEQ ID NO: 97844 - RNA, 22 nt, Human
auacaaguugcccaaaugauua

SEQ ID NO: 97845 - RNA, 20 nt, Human
auacaaucaugaggaaaaag

SEQ ID NO: 97846 - RNA, 22 nt, Human
auacaaugauugguucucaccc

SEQ ID NO: 97847 - RNA, 22 nt, Human
auacaauuauucugcagauauu

SEQ ID NO: 97848 - RNA, 22 nt, Human
auacacagcuacauugaacaau

SEQ ID NO: 97849 - RNA, 19 nt, Human
auacacauacguaaacuga

SEQ ID NO: 97850 - RNA, 22 nt, Human
auacacauguguaugugcaugc

SEQ ID NO: 97851 - RNA, 20 nt, Human
auacacauucauagaaaaau

SEQ ID NO: 97852 - RNA, 19 nt, Human
auacacuaauauaaaccac

SEQ ID NO: 97853 - RNA, 22 nt, Human
auacacuaaucaugugcucagu

SEQ ID NO: 97854 - RNA, 22 nt, Human
auacacugguuuaugauauugu

SEQ ID NO: 97855 - RNA, 22 nt, Human
auacacuucauguuuucaucug

SEQ ID NO: 97856 - RNA, 22 nt, Human
auacacuuccaaauauugauua

SEQ ID NO: 97857 - RNA, 22 nt, Human
auacacuugaccuggagugaag

SEQ ID NO: 97858 - RNA, 21 nt, Human
auacagaaggcagacucucuc

SEQ ID NO: 97859 - RNA, 21 nt, Human
auacagaagguggcaaaguac

SEQ ID NO: 97860 - RNA, 22 nt, Human
auacagaauuugcccuuuucau

SEQ ID NO: 97861 - RNA, 22 nt, Human
auacagagaagggguagaggau

SEQ ID NO: 97862 - RNA, 22 nt, Human
auacagagcaguaauagaggag

SEQ ID NO: 97863 - RNA, 22 nt, Human
auacagaggguuucaugggcag

SEQ ID NO: 97864 - RNA, 22 nt, Human
auacagaugcuugcucgugacu

SEQ ID NO: 97865 - RNA, 19 nt, Human
auacagauguauccaugau

SEQ ID NO: 97866 - RNA, 22 nt, Human
auacagccuauucuuaccauug

SEQ ID NO: 97867 - RNA, 22 nt, Human
auacagcuuaugcauauaucuc

SEQ ID NO: 97868 - RNA, 22 nt, Human
auacagggacauccaguuuuuc

SEQ ID NO: 97869 - RNA, 22 nt, Human
auacagguaggggacauacauc

SEQ ID NO: 97870 - RNA, 22 nt, Human
auacagguguacacacaugcaa

SEQ ID NO: 97871 - RNA, 22 nt, Human
auacaguaagugucccugaaac

SEQ ID NO: 97872 - RNA, 22 nt, Human
auacaguagacaaucucaugaa

SEQ ID NO: 97873 - RNA, 22 nt, Human
auacaguauuaccuguucagga

SEQ ID NO: 97874 - RNA, 22 nt, Human
auacagugccccuuuucacaug

SEQ ID NO: 97875 - RNA, 22 nt, Human
auacaguguacuauuuagcagu

SEQ ID NO: 97876 - RNA, 22 nt, Human
auacauacauguaugcacauac

SEQ ID NO: 97877 - RNA, 22 nt, Human
auacauagauagauaaucuggc

SEQ ID NO: 97878 - RNA, 22 nt, Human
auacauagcaggguaguagauc

SEQ ID NO: 97879 - RNA, 22 nt, Human
auacauaguaccacauuugaca

SEQ ID NO: 97880 - RNA, 22 nt, Human
auacauaguucugugaaaagua

SEQ ID NO: 97881 - RNA, 22 nt, Human
auacauauccacaggagauaaa

SEQ ID NO: 97882 - RNA, 22 nt, Human
auacaucaaggaugauggugua

SEQ ID NO: 97883 - RNA, 22 nt, Human
auacaucguuuauuuuaguuca

SEQ ID NO: 97884 - RNA, 22 nt, Human
auacaucuagagucauaaaaac

SEQ ID NO: 97885 - RNA, 22 nt, Human
auacaucuaugccuuucugaca

SEQ ID NO: 97886 - RNA, 22 nt, Human
auacaucucauguaagagauaa

SEQ ID NO: 97887 - RNA, 22 nt, Human
auacaucucuuugaagugcuuu

SEQ ID NO: 97888 - RNA, 22 nt, Human
auacaugaucacuguauuauaa

SEQ ID NO: 97889 - RNA, 23 nt, Human
auacauggccggauaugauguuc

SEQ ID NO: 97890 - RNA, 22 nt, Human
auacauguaacugcauuguaau

SEQ ID NO: 97891 - RNA, 22 nt, Human
auacauguacauaaauguagca

SEQ ID NO: 97892 - RNA, 22 nt, Human
auacaugugccauguuggugua

SEQ ID NO: 97893 - RNA, 22 nt, Human
auacaugugugugcauacaugu

SEQ ID NO: 97894 - RNA, 22 nt, Human
auacauuagaaucugguacuca

SEQ ID NO: 97895 - RNA, 22 nt, Human
auacauuauuguuaaagaacau

SEQ ID NO: 97896 - RNA, 22 nt, Human
auacauucaaaggaaggauaga

SEQ ID NO: 97897 - RNA, 22 nt, Human
auaccauuguuucuaccagcug

SEQ ID NO: 97898 - RNA, 22 nt, Human
auacccaguccaaucucuuagc

SEQ ID NO: 97899 - RNA, 22 nt, Human
auacguaaguugaacaucagaa

SEQ ID NO: 97900 - RNA, 22 nt, Human
auacuaaaguauagaacuuagu

SEQ ID NO: 97901 - RNA, 22 nt, Human
auacuacauacuauguaaacau

SEQ ID NO: 97902 - RNA, 22 nt, Human
auacuagacuguucuguuauca

SEQ ID NO: 97903 - RNA, 19 nt, Human
auacuaggucaugauaauc

SEQ ID NO: 97904 - RNA, 22 nt, Human
auacugauugauauucccauga

SEQ ID NO: 97905 - RNA, 22 nt, Human
auacuguaucacuugugaguga

SEQ ID NO: 97906 - RNA, 22 nt, Human
auacugugugcagaguccuaau

SEQ ID NO: 97907 - RNA, 22 nt, Human
auacuuaacuguggagucauug

SEQ ID NO: 97908 - RNA, 22 nt, Human
auacuuaaugucaguuugaugu

SEQ ID NO: 97909 - RNA, 22 nt, Human
auacuuauacuaagaauguacu

SEQ ID NO: 97910 - RNA, 22 nt, Human
auacuuaugauaaauaauugcu

SEQ ID NO: 97911 - RNA, 22 nt, Human
auacuucuagaaauacuaugca

SEQ ID NO: 97912 - RNA, 22 nt, Human
auacuucuggugacaaagucuu

SEQ ID NO: 97913 - RNA, 22 nt, Human
auacuucuuuagcauauugaac

SEQ ID NO: 97914 - RNA, 22 nt, Human
auacuucuuugauguucacagg

SEQ ID NO: 97915 - RNA, 22 nt, Human
auacuugagguuguauaaauau

SEQ ID NO: 97916 - RNA, 20 nt, Human
auacuuguuuucaggcuuuu

SEQ ID NO: 97917 - RNA, 22 nt, Human
auacuuuaacguggcgaaccuu

SEQ ID NO: 97918 - RNA, 22 nt, Human
auacuuuggucacuauuauugg

SEQ ID NO: 97919 - RNA, 22 nt, Human
auagaaacagggaagcaaagca

SEQ ID NO: 97920 - RNA, 22 nt, Human
auagaacaagguagacagcuuu

SEQ ID NO: 97921 - RNA, 22 nt, Human
auagaacacagaugggcguggc

SEQ ID NO: 97922 - RNA, 23 nt, Human
auagaagauuauugcaacagucc

SEQ ID NO: 97923 - RNA, 22 nt, Human
auagaagcaagaacagaaugga

SEQ ID NO: 97924 - RNA, 22 nt, Human
auagaauaugacuuuuagaucc

SEQ ID NO: 97925 - RNA, 22 nt, Human
auagaaucaucugugcacuagu

SEQ ID NO: 97926 - RNA, 22 nt, Human
auagaauucuuugaaauuuaug

SEQ ID NO: 97927 - RNA, 22 nt, Human
auagaauuugcacuaaaucugc

SEQ ID NO: 97928 - RNA, 22 nt, Human
auagacaaacacgaagaugaca

SEQ ID NO: 97929 - RNA, 22 nt, Human
auagacauggucuuuugucauu

SEQ ID NO: 97930 - RNA, 23 nt, Human
auagaccauugucucacacuuca

SEQ ID NO: 97931 - RNA, 22 nt, Human
auagaguacagucuuugauuau

SEQ ID NO: 97932 - RNA, 22 nt, Human
auagauacauuagguaacuugu

SEQ ID NO: 97933 - RNA, 22 nt, Human
auagauacuggguauggagaug

SEQ ID NO: 97934 - RNA, 20 nt, Human
auagauaucaucuuuagaag

SEQ ID NO: 97935 - RNA, 22 nt, Human
auagaucaauauuuagaaacuu

SEQ ID NO: 97936 - RNA, 22 nt, Human
auagaucacaaugguucacuuu

SEQ ID NO: 97937 - RNA, 20 nt, Human
auagaucagugagacuaaag

SEQ ID NO: 97938 - RNA, 22 nt, Human
auagcaaaaggcaccagaguga

SEQ ID NO: 97939 - RNA, 22 nt, Human
auagcaaagaugucaauucccc

SEQ ID NO: 97940 - RNA, 22 nt, Human
auagcaccugugaugggaugag

SEQ ID NO: 97941 - RNA, 22 nt, Human
auagcacugguuuuucuugguu

SEQ ID NO: 97942 - RNA, 22 nt, Human
aucagcaaggcaaucacugcag

SEQ ID NO: 97943 - RNA, 22 nt, Human
aucagcauucccaaaugaugug

SEQ ID NO: 97944 - RNA, 22 nt, Human
aucagcuaauuagaauuaggau

SEQ ID NO: 97945 - RNA, 22 nt, Human
aucaggaaaaauugugaaaggg

SEQ ID NO: 97946 - RNA, 22 nt, Human
aucaggaaagaaaagcuuggcg

SEQ ID NO: 97947 - RNA, 22 nt, Human
aucaggaaagaguggaacucug

SEQ ID NO: 97948 - RNA, 22 nt, Human
aucaggaagaucuagcgaaugu

SEQ ID NO: 97949 - RNA, 22 nt, Human
aucaggauagucuguaaauugu

SEQ ID NO: 97950 - RNA, 22 nt, Human
aucaggaucacugggagucuug

SEQ ID NO: 97951 - RNA, 22 nt, Human
aucaggaucagggcuagcagag

SEQ ID NO: 97952 - RNA, 22 nt, Human
aucaggaugaagcuguagcgaa

SEQ ID NO: 97953 - RNA, 22 nt, Human
aucaggauguuuggcugucaua

SEQ ID NO: 97954 - RNA, 22 nt, Human
aucaggauuacacggggaugcu

SEQ ID NO: 97955 - RNA, 21 nt, Human
aucaggcucaaaucaucccaa

SEQ ID NO: 97956 - RNA, 22 nt, Human
aucaggugaagucacugagugg

SEQ ID NO: 97957 - RNA, 20 nt, Human
aucagguguucagccacugc

SEQ ID NO: 97958 - RNA, 22 nt, Human
aucaguaaauauucauugugca

SEQ ID NO: 97959 - RNA, 22 nt, Human
aucaguaggccaagcagcuggc

SEQ ID NO: 97960 - RNA, 22 nt, Human
aucagugcugggagaugucaga

SEQ ID NO: 97961 - RNA, 22 nt, Human
aucaguguauucauagggaaua

SEQ ID NO: 97962 - RNA, 22 nt, Human
aucaguuucacuugcuugcaaa

SEQ ID NO: 97963 - RNA, 22 nt, Human
aucaguuugagugcugugucaa

SEQ ID NO: 97964 - RNA, 22 nt, Human
aucaguuuuguucacuacuaua

SEQ ID NO: 97965 - RNA, 22 nt, Human
aucauaaaauugcaccauuucu

SEQ ID NO: 97966 - RNA, 22 nt, Human
aucauacagaaccugagcacuu

SEQ ID NO: 97967 - RNA, 22 nt, Human
aucauacauacaugguccucag

SEQ ID NO: 97968 - RNA, 22 nt, Human
aucaucaucaacaagaaacauu

SEQ ID NO: 97969 - RNA, 22 nt, Human
aucaucaugcccacuugagacu

SEQ ID NO: 97970 - RNA, 22 nt, Human
aucauccaagcguaguucuucu

SEQ ID NO: 97971 - RNA, 22 nt, Human
aucauccaucuagcgcgggggg

SEQ ID NO: 97972 - RNA, 22 nt, Human
aucauccuauugugccccaggu

SEQ ID NO: 97973 - RNA, 22 nt, Human
aucaucuuaagguaucucaagc

SEQ ID NO: 97974 - RNA, 22 nt, Human
aucaucuucauauuccucagcu

SEQ ID NO: 97975 - RNA, 22 nt, Human
aucaugacauacuuuugagaag

SEQ ID NO: 97976 - RNA, 18 nt, Human
aucaugcugaauuaaaga

SEQ ID NO: 97977 - RNA, 22 nt, Human
aucauguacuugacaaauaugu

SEQ ID NO: 97978 - RNA, 22 nt, Human
aucauguuccagaaacagugau

SEQ ID NO: 97979 - RNA, 22 nt, Human
aucauguuggcucugacaaaaa

SEQ ID NO: 97980 - RNA, 22 nt, Human
augagggaggcaaggagaugcu

SEQ ID NO: 97981 - RNA, 22 nt, Human
augagggagggguggugccgca

SEQ ID NO: 97982 - RNA, 23 nt, Human
augagguaaagaucagcuuuaaa

SEQ ID NO: 97983 - RNA, 22 nt, Human
augagguaacagcuuaucaaca

SEQ ID NO: 97984 - RNA, 22 nt, Human
augagguaagcacugggcccaa

SEQ ID NO: 97985 - RNA, 22 nt, Human
augagguaauagggcagugggg

SEQ ID NO: 97986 - RNA, 21 nt, Human
augagguaauucacuaagcag

SEQ ID NO: 97987 - RNA, 22 nt, Human
augagguacuuacauugagcuu

SEQ ID NO: 97988 - RNA, 19 nt, Human
augagguagcagcuggugc

SEQ ID NO: 97989 - RNA, 22 nt, Human
augagguaucucauuuccugaa

SEQ ID NO: 97990 - RNA, 22 nt, Human
augagguaugaagugugggaua

SEQ ID NO: 97991 - RNA, 22 nt, Human
augagguauucguaauauuucc

SEQ ID NO: 97992 - RNA, 22 nt, Human
augaggucauccuggaguaagg

SEQ ID NO: 97993 - RNA, 17 nt, Human
augaggucauuaagaua

SEQ ID NO: 97994 - RNA, 22 nt, Human
augaggucauucuuggauuaca

SEQ ID NO: 97995 - RNA, 22 nt, Human
augaggucuuauugcaguaguu

SEQ ID NO: 97996 - RNA, 22 nt, Human
augaguaagaccauaauuuuug

SEQ ID NO: 97997 - RNA, 22 nt, Human
augaguaagugaaucuccaaag

SEQ ID NO: 97998 - RNA, 22 nt, Human
augaguacauugggaucaaaga

SEQ ID NO: 97999 - RNA, 22 nt, Human
augagugauggguacauuggcu

SEQ ID NO: 98000 - RNA, 22 nt, Human
augagugugaaguuagcucagu

SEQ ID NO: 98001 - RNA, 22 nt, Human
augaguucauacuuucaguacc

SEQ ID NO: 98002 - RNA, 23 nt, Human
augauaaugccauuaacuuugau

SEQ ID NO: 98003 - RNA, 22 nt, Human
augauacaagcaaaacuaauca

SEQ ID NO: 98004 - RNA, 22 nt, Human
augauacauugcaaaauuuuaa

SEQ ID NO: 98005 - RNA, 22 nt, Human
augaucagggcagaagcagaag

SEQ ID NO: 98006 - RNA, 22 nt, Human
augaucauacagagcccuggua

SEQ ID NO: 98007 - RNA, 22 nt, Human
augauccaaagccacaggggca

SEQ ID NO: 98008 - RNA, 22 nt, Human
augaucucauucuuucaaaggg

SEQ ID NO: 98009 - RNA, 19 nt, Human
augaucugcccuuguaaua

SEQ ID NO: 98010 - RNA, 22 nt, Human
augaugaaacuaggaacuagag

SEQ ID NO: 98011 - RNA, 22 nt, Human
augaugaagcaugguuacacug

SEQ ID NO: 98012 - RNA, 22 nt, Human
augaugcuguuauuaucuauac

SEQ ID NO: 98013 - RNA, 22 nt, Human
augauggagguguccuggauuu

SEQ ID NO: 98014 - RNA, 22 nt, Human
augauggaugucacagucugua

SEQ ID NO: 98015 - RNA, 22 nt, Human
augauggugggagaugacccag

SEQ ID NO: 98016 - RNA, 22 nt, Human
augauguaaaauaaguugugag

SEQ ID NO: 98017 - RNA, 22 nt, Human
augauguaacauaaagaugucu

SEQ ID NO: 98018 - RNA, 22 nt, Human
augauguaauggaaagaacaga

SEQ ID NO: 98019 - RNA, 22 nt, Human
augaugucccuaggcagguagu

SEQ ID NO: 98020 - RNA, 22 nt, Human
augauguugauaaauuacuuua

SEQ ID NO: 98021 - RNA, 23 nt, Human
augauguuuuugguagucaaaug

SEQ ID NO: 98022 - RNA, 22 nt, Human
augauuacauguguuaauauac

SEQ ID NO: 98023 - RNA, 20 nt, Human
augauucugggcuacacugg

SEQ ID NO: 98024 - RNA, 22 nt, Human
augauugcagcccuacagcugu

SEQ ID NO: 98025 - RNA, 22 nt, Human
augauugccugugugugagaaa

SEQ ID NO: 98026 - RNA, 22 nt, Human
augauuucuauauaaacuuaaa

SEQ ID NO: 98027 - RNA, 22 nt, Human
augcaaaauaaggcagaaacau

SEQ ID NO: 98028 - RNA, 22 nt, Human
augcaaaauuaccauucuguuc

SEQ ID NO: 98029 - RNA, 20 nt, Human
augcaaacucacaaaauacc

SEQ ID NO: 98030 - RNA, 22 nt, Human
augcaaagcaccacacuaagau

SEQ ID NO: 98031 - RNA, 22 nt, Human
augcaaauaaagcaacuauaca

SEQ ID NO: 98032 - RNA, 20 nt, Human
augcaaaucccaaaaucagg

SEQ ID NO: 98033 - RNA, 22 nt, Human
augcaaaugucaccacuucuaa

SEQ ID NO: 98034 - RNA, 22 nt, Human
augcaaauugccauaaaguggg

SEQ ID NO: 98035 - RNA, 22 nt, Human
augcaacaaauugugugcaaua

SEQ ID NO: 98036 - RNA, 22 nt, Human
augcaacagaaaauugccuggg

SEQ ID NO: 98037 - RNA, 22 nt, Human
augcaacauccaauuccuuuug

SEQ ID NO: 98038 - RNA, 22 nt, Human
augcaagagauggacuuguguu

SEQ ID NO: 98039 - RNA, 22 nt, Human
augcaagagggaaaaggaaaua

SEQ ID NO: 98040 - RNA, 23 nt, Human
augcaagaguuucucaaacugga

SEQ ID NO: 98041 - RNA, 22 nt, Human
augcaauaaauacuuuccagcu

SEQ ID NO: 98042 - RNA, 22 nt, Human
augcaauaguaauucuagucug

SEQ ID NO: 98043 - RNA, 22 nt, Human
augcaauauguguuucuguuua

SEQ ID NO: 98044 - RNA, 22 nt, Human
augcacaagcaagagauaaugg

SEQ ID NO: 98045 - RNA, 23 nt, Human
augcacaagccagcaggggacag

SEQ ID NO: 98046 - RNA, 22 nt, Human
augcacaagguagauuauuauu

SEQ ID NO: 98047 - RNA, 22 nt, Human
augcacaaguuauauguaugga

SEQ ID NO: 98048 - RNA, 22 nt, Human
augcacacaagcuuauguauua

SEQ ID NO: 98049 - RNA, 22 nt, Human
augcacacguacccuacaaggc

SEQ ID NO: 98050 - RNA, 22 nt, Human
augcacagaaaaauugcuuacu

SEQ ID NO: 98051 - RNA, 22 nt, Human
cagagccuuccuagcagacucu

SEQ ID NO: 98052 - RNA, 22 nt, Human
cagagcggccacuagagggcgc

SEQ ID NO: 98053 - RNA, 22 nt, Human
cagagcucucuuugcuacuaca

SEQ ID NO: 98054 - RNA, 22 nt, Human
cagagcugacccaaggauugaa

SEQ ID NO: 98055 - RNA, 22 nt, Human
cagagcugagucuucaagguug

SEQ ID NO: 98056 - RNA, 23 nt, Human
cagagcugauuaaacuuaaucuc

SEQ ID NO: 98057 - RNA, 22 nt, Human
cagagcugcaaaugccccuccg

SEQ ID NO: 98058 - RNA, 22 nt, Human
cagagcuggagggaacccuggc

SEQ ID NO: 98059 - RNA, 22 nt, Human
cagagcuggcggugagaagaca

SEQ ID NO: 98060 - RNA, 22 nt, Human
cagagcugggaucccaugggcg

SEQ ID NO: 98061 - RNA, 22 nt, Human
cagagcuguccaaacccugaca

SEQ ID NO: 98062 - RNA, 22 nt, Human
cagagcuguuacuauucaugaa

SEQ ID NO: 98063 - RNA, 22 nt, Human
cagagcuuccugcugggcuucu

SEQ ID NO: 98064 - RNA, 22 nt, Human
cagagcuuuuuacauuaaugau

SEQ ID NO: 98065 - RNA, 22 nt, Human
cagaggaaaguauuucuggaag

SEQ ID NO: 98066 - RNA, 22 nt, Human
cagaggaacguuuggauugauu

SEQ ID NO: 98067 - RNA, 22 nt, Human
cagaggaagagauacaagcccu

SEQ ID NO: 98068 - RNA, 22 nt, Human
cagaggaagcuggguguggagu

SEQ ID NO: 98069 - RNA, 22 nt, Human
cagaggacuucccacucaucug

SEQ ID NO: 98070 - RNA, 22 nt, Human
cagaggaugaucuggccucucu

SEQ ID NO: 98071 - RNA, 22 nt, Human
cagaggauuauggagauggucu

SEQ ID NO: 98072 - RNA, 20 nt, Human
cagaggcaaggagacuugga

SEQ ID NO: 98073 - RNA, 16 nt, Human
cagaggcaccuggcuc

SEQ ID NO: 98074 - RNA, 22 nt, Human
cagaggcagacccuccagggcg

SEQ ID NO: 98075 - RNA, 21 nt, Human
cagaggcagguccugggacgg

SEQ ID NO: 98076 - RNA, 22 nt, Human
cagaggccaccuguggccacug

SEQ ID NO: 98077 - RNA, 21 nt, Human
cagaggccuaucacagacucc

SEQ ID NO: 98078 - RNA, 22 nt, Human
cagaggccucacuuccagccag

SEQ ID NO: 98079 - RNA, 22 nt, Human
cagaggccuggcuuggacaccu

SEQ ID NO: 98080 - RNA, 22 nt, Human
cagaggccuuucuacagugaua

SEQ ID NO: 98081 - RNA, 22 nt, Human
cagaggcgaggcagcugaaccu

SEQ ID NO: 98082 - RNA, 22 nt, Human
cagaggcugacaaaauauugcu

SEQ ID NO: 98083 - RNA, 21 nt, Human
cagaggcugagagggcaaucu

SEQ ID NO: 98084 - RNA, 22 nt, Human
cagaggcugagcagucaguuug

SEQ ID NO: 98085 - RNA, 22 nt, Human
cagaggcugccagccaugugca

SEQ ID NO: 98086 - RNA, 22 nt, Human
cagaggcugggaccucaggcau

SEQ ID NO: 98087 - RNA, 22 nt, Human
cagagggagcccuccaggagca

SEQ ID NO: 98088 - RNA, 21 nt, Human
cagagggccggcauguggucu

SEQ ID NO: 98089 - RNA, 22 nt, Human
cagagggcguccggguuaacuu

SEQ ID NO: 98090 - RNA, 22 nt, Human
cagagggcucuuggcugccugc

SEQ ID NO: 98091 - RNA, 22 nt, Human
cagagggcuucagguucaggau

SEQ ID NO: 98092 - RNA, 21 nt, Human
cagagggcuuuucucuguucu

SEQ ID NO: 98093 - RNA, 22 nt, Human
cagagggguguagagaucacug

SEQ ID NO: 98094 - RNA, 22 nt, Human
cagaggguugucaggcgccuug

SEQ ID NO: 98095 - RNA, 22 nt, Human
cagagguagaacuggcccucac

SEQ ID NO: 98096 - RNA, 22 nt, Human
cagaggucagguuggacauuau

SEQ ID NO: 98097 - RNA, 22 nt, Human
aucuauacuacaaauggcuggu

SEQ ID NO: 98098 - RNA, 22 nt, Human
aucuaucaccuuuagguuuguu

SEQ ID NO: 98099 - RNA, 22 nt, Human
aucuaugugccuuuguauagaa

SEQ ID NO: 98100 - RNA, 22 nt, Human
aucucacacuggguuugagggu

SEQ ID NO: 98101 - RNA, 22 nt, Human
aucucagaaaguuuaauuuuuc

SEQ ID NO: 98102 - RNA, 16 nt, Human
aucucaggagagucuu

SEQ ID NO: 98103 - RNA, 22 nt, Human
aucucaggagguuccucugucc

SEQ ID NO: 98104 - RNA, 22 nt, Human
aucucaggcccuagugaccuca

SEQ ID NO: 98105 - RNA, 22 nt, Human
aucucagggcuggagcccugga

SEQ ID NO: 98106 - RNA, 22 nt, Human
aucuccagaacauuuauaaacg

SEQ ID NO: 98107 - RNA, 22 nt, Human
aucuccagauugugaucaucag

SEQ ID NO: 98108 - RNA, 22 nt, Human
aucuccagcaauggggagcucu

SEQ ID NO: 98109 - RNA, 22 nt, Human
aucuccagcagugcuuuugagc

SEQ ID NO: 98110 - RNA, 22 nt, Human
aucuccagguugugccugcguc

SEQ ID NO: 98111 - RNA, 22 nt, Human
aucucccaaacucauuucuuca

SEQ ID NO: 98112 - RNA, 18 nt, Human
aucucccauuggccaagg

SEQ ID NO: 98113 - RNA, 22 nt, Human
aucuccucgcaggccagaacac

SEQ ID NO: 98114 - RNA, 23 nt, Human
aucuccugagaacccacaguggu

SEQ ID NO: 98115 - RNA, 22 nt, Human
aucucuccuuaugaagcauuau

SEQ ID NO: 98116 - RNA, 22 nt, Human
aucucuccuucagcugaggccc

SEQ ID NO: 98117 - RNA, 22 nt, Human
aucucucugcccaggggcugug

SEQ ID NO: 98118 - RNA, 23 nt, Human
aucucucuuuauucuuggggaua

SEQ ID NO: 98119 - RNA, 22 nt, Human
aucucugcguccccagcaucga

SEQ ID NO: 98120 - RNA, 22 nt, Human
aucucugguccaaauguuaccu

SEQ ID NO: 98121 - RNA, 22 nt, Human
aucucuuagcagucuagugacc

SEQ ID NO: 98122 - RNA, 22 nt, Human
aucucuuaugucacauaaacca

SEQ ID NO: 98123 - RNA, 22 nt, Human
aucucuucucccaacaccuggc

SEQ ID NO: 98124 - RNA, 22 nt, Human
aucucuucugagcaauuccugu

SEQ ID NO: 98125 - RNA, 22 nt, Human
aucugaaaagccucuuacuccu

SEQ ID NO: 98126 - RNA, 22 nt, Human
aucugaaacucugacauugucu

SEQ ID NO: 98127 - RNA, 22 nt, Human
aucugaaagcuaggaguucuca

SEQ ID NO: 98128 - RNA, 21 nt, Human
aucugaaagguuaguguugag

SEQ ID NO: 98129 - RNA, 22 nt, Human
aucugaaaguuuagaauucuug

SEQ ID NO: 98130 - RNA, 21 nt, Human
aucugaaaugucaaagcagau

SEQ ID NO: 98131 - RNA, 22 nt, Human
aucugaaguggagaaaaauaua

SEQ ID NO: 98132 - RNA, 21 nt, Human
aucugaaguuugagaggaaag

SEQ ID NO: 98133 - RNA, 22 nt, Human
aucugacaaggccacauauucu

SEQ ID NO: 98134 - RNA, 22 nt, Human
aucugacaucuacuagaacaga

SEQ ID NO: 98135 - RNA, 22 nt, Human
aucugacuucacgcccaugcca

SEQ ID NO: 98136 - RNA, 22 nt, Human
aucugagucaaauauuucauuu

SEQ ID NO: 98137 - RNA, 22 nt, Human
aucugauuuguaauuuuagaaa

SEQ ID NO: 98138 - RNA, 22 nt, Human
aucugcaggaaugugugcagag

SEQ ID NO: 98139 - RNA, 22 nt, Human
aucugccuggcuccaggugagc

SEQ ID NO: 98140 - RNA, 22 nt, Human
aucugccuggucuuugaugcag

SEQ ID NO: 98141 - RNA, 20 nt, Human
aucugcugagaaugaaaggc

SEQ ID NO: 98142 - RNA, 22 nt, Human
aucugcugcccagccacuugcu

SEQ ID NO: 98143 - RNA, 18 nt, Human
aucugcuggcaggucugg

SEQ ID NO: 98144 - RNA, 22 nt, Human
aucugcuggcaucucuagccca

SEQ ID NO: 98145 - RNA, 22 nt, Human
aucugcuguucuucacagcuug

SEQ ID NO: 98146 - RNA, 21 nt, Human
aucugcuuagguuuguucaga

SEQ ID NO: 98147 - RNA, 17 nt, Human
aucugcuucacccagca

SEQ ID NO: 98148 - RNA, 22 nt, Human
aucugcuucgcgccaauuucau

SEQ ID NO: 98149 - RNA, 22 nt, Human
aucugcuugaguuugaagucag

SEQ ID NO: 98150 - RNA, 22 nt, Human
aucugcuugcccucuuaggacc

SEQ ID NO: 98151 - RNA, 22 nt, Human
aucuggaacaaagcuuaggaau

SEQ ID NO: 98152 - RNA, 22 nt, Human
aucuggaagccagauacucagu

SEQ ID NO: 98153 - RNA, 22 nt, Human
aucuggaagucagagguuugca

SEQ ID NO: 98154 - RNA, 22 nt, Human
aucuggaauuaagagaaaguga

SEQ ID NO: 98155 - RNA, 22 nt, Human
aucuggacuagagcagaauggg

SEQ ID NO: 98156 - RNA, 22 nt, Human
aucuggagcucugcacaccugg

SEQ ID NO: 98157 - RNA, 22 nt, Human
aucuggagcuuguuagauguuu

SEQ ID NO: 98158 - RNA, 22 nt, Human
aucuggaguagaaaaaucgcuu

SEQ ID NO: 98159 - RNA, 22 nt, Human
aucuggagugggacacagaaau

SEQ ID NO: 98160 - RNA, 22 nt, Human
aagcugugccuuugccuagaau

SEQ ID NO: 98161 - RNA, 22 nt, Human
aagcuguguaaguugcuugguu

SEQ ID NO: 98162 - RNA, 22 nt, Human
aagcugugugacuauuucugag

SEQ ID NO: 98163 - RNA, 22 nt, Human
aagcugugugcagaugaucuca

SEQ ID NO: 98164 - RNA, 21 nt, Human
aagcuguguuccacugauagc

SEQ ID NO: 98165 - RNA, 22 nt, Human
aagcuguuguucauccugaauu

SEQ ID NO: 98166 - RNA, 22 nt, Human
aagcuucacauugaacuugggu

SEQ ID NO: 98167 - RNA, 22 nt, Human
aagcuuccugcaugggacugcu

SEQ ID NO: 98168 - RNA, 22 nt, Human
aagcuugaaucaauggauaucc

SEQ ID NO: 98169 - RNA, 22 nt, Human
aagcuuggaagucuuccuuuca

SEQ ID NO: 98170 - RNA, 21 nt, Human
aagcuuggcugauguuauugg

SEQ ID NO: 98171 - RNA, 22 nt, Human
aagcuuguagaguuugacuucc

SEQ ID NO: 98172 - RNA, 22 nt, Human
aagcuuugcaaugcuucauuau

SEQ ID NO: 98173 - RNA, 22 nt, Human
aagcuuuguucuucacagagug

SEQ ID NO: 98174 - RNA, 22 nt, Human
aaggaaacacugaacuuuguag

SEQ ID NO: 98175 - RNA, 22 nt, Human
aaggaaagaguaugcaccuugu

SEQ ID NO: 98176 - RNA, 22 nt, Human
aaggaaauacaacauguauuca

SEQ ID NO: 98177 - RNA, 22 nt, Human
aaggaaauacuucugcagagca

SEQ ID NO: 98178 - RNA, 22 nt, Human
aaggaaaugaagcugauguugg

SEQ ID NO: 98179 - RNA, 22 nt, Human
aaggaaaugugccugacacugc

SEQ ID NO: 98180 - RNA, 22 nt, Human
aaggaaauuagguuauuuugcu

SEQ ID NO: 98181 - RNA, 22 nt, Human
aaggaaccuggaguagagggag

SEQ ID NO: 98182 - RNA, 22 nt, Human
aaggaacuaacuauguagagau

SEQ ID NO: 98183 - RNA, 22 nt, Human
aaggaacuagcaugauguguag

SEQ ID NO: 98184 - RNA, 20 nt, Human
aaggaacucacccaugggcu

SEQ ID NO: 98185 - RNA, 22 nt, Human
aaggaacucuagagccuugaac

SEQ ID NO: 98186 - RNA, 22 nt, Human
aaggaacugcugauguggugac

SEQ ID NO: 98187 - RNA, 22 nt, Human
aaggaacuugccacagaaaaga

SEQ ID NO: 98188 - RNA, 22 nt, Human
aaggaagaagacucuuuacucc

SEQ ID NO: 98189 - RNA, 22 nt, Human
aaggaagaaucaucacguuggg

SEQ ID NO: 98190 - RNA, 22 nt, Human
aaggaagacucgcaggucuaug

SEQ ID NO: 98191 - RNA, 22 nt, Human
aaggaagacuugagaagguucc

SEQ ID NO: 98192 - RNA, 22 nt, Human
aaggaagaggcagguuuugcug

SEQ ID NO: 98193 - RNA, 22 nt, Human
aaggaagauauaucaagcuuaa

SEQ ID NO: 98194 - RNA, 22 nt, Human
aaggaagaugcuggccugggga

SEQ ID NO: 98195 - RNA, 22 nt, Human
aaggaagccuugccugaauaca

SEQ ID NO: 98196 - RNA, 18 nt, Human
aaggacacagucccugcu

SEQ ID NO: 98197 - RNA, 22 nt, Human
aaggacaggagaaaacgggauc

SEQ ID NO: 98198 - RNA, 22 nt, Human
aaggacagggaugguugauugu

SEQ ID NO: 98199 - RNA, 22 nt, Human
aaggacuaaugaauagaugaau

SEQ ID NO: 98200 - RNA, 22 nt, Human
aaggagagguuguccguguugu

SEQ ID NO: 98201 - RNA, 22 nt, Human
aaggagauuguuaaagcuauau

SEQ ID NO: 98202 - RNA, 22 nt, Human
aaggagcacacaaucuagaacc

SEQ ID NO: 98203 - RNA, 22 nt, Human
aaggagcucuuaaaaucagaga

SEQ ID NO: 98204 - RNA, 22 nt, Human
aaggaggaauucugaguucaug

SEQ ID NO: 98205 - RNA, 22 nt, Human
aaggaggacacccaggacuggg

SEQ ID NO: 98206 - RNA, 22 nt, Human
aaggaggcacccugagccugcc

SEQ ID NO: 98207 - RNA, 22 nt, Human
aaggaggcacucgcucucaggg

SEQ ID NO: 98208 - RNA, 22 nt, Human
aaggagggaaagcagugcuucu

SEQ ID NO: 98209 - RNA, 22 nt, Human
aaggagguuaucccaguggacu

SEQ ID NO: 98210 - RNA, 22 nt, Human
aaggauaaaaaccacuucuaau

SEQ ID NO: 98211 - RNA, 22 nt, Human
aaggaucauguauauguuuaag

SEQ ID NO: 98212 - RNA, 22 nt, Human
aaggaugugacucagucagcua

SEQ ID NO: 98213 - RNA, 22 nt, Human
aaggauguucuaguuugcugag

SEQ ID NO: 98214 - RNA, 22 nt, Human
aaggauuaguagguacaguuca

SEQ ID NO: 98215 - RNA, 22 nt, Human
aaggcaacuguaaaacaugcac

SEQ ID NO: 98216 - RNA, 22 nt, Human
aaggcaaugacugauuuagaau

SEQ ID NO: 98217 - RNA, 22 nt, Human
aaggcaaugagggagauagagu

SEQ ID NO: 98218 - RNA, 22 nt, Human
aaggcaaugucauggcucuugc

SEQ ID NO: 98219 - RNA, 22 nt, Human
aaggcaauuuggaagaggcaga

SEQ ID NO: 98220 - RNA, 22 nt, Human
aaggcaauuuguugugaggauu

SEQ ID NO: 98221 - RNA, 22 nt, Human
aaggcacagccacuugaucauc

SEQ ID NO: 98222 - RNA, 22 nt, Human
aaggcacauauuuuagagucac

SEQ ID NO: 98223 - RNA, 20 nt, Human
aaggcacuaugucugcuagc

SEQ ID NO: 98224 - RNA, 22 nt, Human
aaggcacugaacuuaaauucug

SEQ ID NO: 98225 - RNA, 22 nt, Human
aaggcacugcuuugcugcgccc

SEQ ID NO: 98226 - RNA, 22 nt, Human
aaggcacuguacuaguuaguua

SEQ ID NO: 98227 - RNA, 22 nt, Human
aaggcagaggaaggucuaguuu

SEQ ID NO: 98228 - RNA, 22 nt, Human
aaggcagcaacuaauggaucuc

SEQ ID NO: 98229 - RNA, 22 nt, Human
aaggcagcaccgccuccugaaa

SEQ ID NO: 98230 - RNA, 22 nt, Human
aaggcagccagauccuuugggu

SEQ ID NO: 98231 - RNA, 22 nt, Human
aaggcagcccuggcucagccug

SEQ ID NO: 98232 - RNA, 22 nt, Human
aaggcagccucugccagccggg

SEQ ID NO: 98233 - RNA, 22 nt, Human
aaggcagccuuuugaguugauu

SEQ ID NO: 98234 - RNA, 22 nt, Human
aaggcagcuucaccacagcauu

SEQ ID NO: 98235 - RNA, 22 nt, Human
aaggcaguaucuguagagugcu

SEQ ID NO: 98236 - RNA, 18 nt, Human
aaggcaguaugauugcac

SEQ ID NO: 98237 - RNA, 22 nt, Human
aaggcagucaguuguuuugaaa

SEQ ID NO: 98238 - RNA, 22 nt, Human
aaggcaguuaauuuggcuagaa

SEQ ID NO: 98239 - RNA, 22 nt, Human
aaggcaguucacucacgcagcc

SEQ ID NO: 98240 - RNA, 22 nt, Human
aaggcaguuugggccaccaucu

SEQ ID NO: 98241 - RNA, 22 nt, Human
aaggcauaggacaaaucaguga

SEQ ID NO: 98242 - RNA, 22 nt, Human
aaggcauuggacuaguaucaga

SEQ ID NO: 98243 - RNA, 22 nt, Human
aaggccaacuaggaugagcuag

SEQ ID NO: 98244 - RNA, 22 nt, Human
aaggccaaggcugcagugagcc

SEQ ID NO: 98245 - RNA, 22 nt, Human
aaggccacagagccucagagag

SEQ ID NO: 98246 - RNA, 22 nt, Human
aaggccacugaagaaaucacaa

SEQ ID NO: 98247 - RNA, 22 nt, Human
aaggccagccugagagcuaaca

SEQ ID NO: 98248 - RNA, 22 nt, Human
aaggccaggccuagcacggagg

SEQ ID NO: 98249 - RNA, 22 nt, Human
aaggccauacaaugaaaggggc

SEQ ID NO: 98250 - RNA, 22 nt, Human
aaggccaugaccacuugcugug

SEQ ID NO: 98251 - RNA, 22 nt, Human
aaggccaugcuugaguugaagg

SEQ ID NO: 98252 - RNA, 22 nt, Human
aaggccauguaggaggcaugcg

SEQ ID NO: 98253 - RNA, 22 nt, Human
aaggcccagccuggagcuuguu

SEQ ID NO: 98254 - RNA, 22 nt, Human
aaggcccuggccccagcuucuu

SEQ ID NO: 98255 - RNA, 22 nt, Human
aaggccucccucuuucauggga

SEQ ID NO: 98256 - RNA, 22 nt, Human
aaggccucuucucucuggagau

SEQ ID NO: 98257 - RNA, 22 nt, Human
aaggccugaacaugaggagaug

SEQ ID NO: 98258 - RNA, 22 nt, Human
aaggcgcugggcuaaggcacca

SEQ ID NO: 98259 - RNA, 22 nt, Human
aaggcuaaguaaggcucuuucu

SEQ ID NO: 98260 - RNA, 22 nt, Human
aaggcuaugaucuuuuucauga

SEQ ID NO: 98261 - RNA, 22 nt, Human
aaggcuauugggaagaaaaaug

SEQ ID NO: 98262 - RNA, 22 nt, Human
aaggcuccagugaaugcuggca

SEQ ID NO: 98263 - RNA, 22 nt, Human
aaggcuccgugacuggggcuga

SEQ ID NO: 98264 - RNA, 22 nt, Human
aaggcucuccaaaugauauaau

SEQ ID NO: 98265 - RNA, 22 nt, Human
aaggcugagacagcacaggucc

SEQ ID NO: 98266 - RNA, 22 nt, Human
aaggcugagagucacaguccua

SEQ ID NO: 98267 - RNA, 22 nt, Human
aaggcugaggcuggagaauuac

SEQ ID NO: 98268 - RNA, 22 nt, Human
aaggcugagguagggccuaaaa

SEQ ID NO: 98269 - RNA, 22 nt, Human
aagguuucuccgaggcuauuuu

SEQ ID NO: 98270 - RNA, 22 nt, Human
aaguaaaagcaggugugcuggg

SEQ ID NO: 98271 - RNA, 21 nt, Human
aaguaaaucagagaaauaacc

SEQ ID NO: 98272 - RNA, 22 nt, Human
aaguaaauguuggagcucaaau

SEQ ID NO: 98273 - RNA, 18 nt, Human
aaguaacagaagagcaca

SEQ ID NO: 98274 - RNA, 22 nt, Human
aaguaacaggcaugugaaugac

SEQ ID NO: 98275 - RNA, 22 nt, Human
aaguaacaggugcuuaguuuau

SEQ ID NO: 98276 - RNA, 22 nt, Human
aaguaaggcagugaaugagauu

SEQ ID NO: 98277 - RNA, 22 nt, Human
aaguaagugccuuuuauucuua

SEQ ID NO: 98278 - RNA, 22 nt, Human
aaguaaguuucucucuccaaga

SEQ ID NO: 98279 - RNA, 20 nt, Human
aaguaauauuuguguaacug

SEQ ID NO: 98280 - RNA, 22 nt, Human
aaguaaucuggaauuugguuuu

SEQ ID NO: 98281 - RNA, 22 nt, Human
aaguaaugguuaaauaauucua

SEQ ID NO: 98282 - RNA, 21 nt, Human
aaguaaugugucucuucuacc

SEQ ID NO: 98283 - RNA, 22 nt, Human
aaguacaaucuuucuguaaagg

SEQ ID NO: 98284 - RNA, 22 nt, Human
aaguacacaucguuggccccga

SEQ ID NO: 98285 - RNA, 22 nt, Human
aaguacagaaggagcgaacaau

SEQ ID NO: 98286 - RNA, 22 nt, Human
aaguacauuuuuaacuuacagc

SEQ ID NO: 98287 - RNA, 22 nt, Human
aaguaccaaguuuguuugacgc

SEQ ID NO: 98288 - RNA, 22 nt, Human
aaguaccucauaggguuauuuu

SEQ ID NO: 98289 - RNA, 22 nt, Human
aaguacuagaaauagcagugcc

SEQ ID NO: 98290 - RNA, 22 nt, Human
aaguacugacagagaagaauga

SEQ ID NO: 98291 - RNA, 22 nt, Human
aaguacuguaucacuuacuccu

SEQ ID NO: 98292 - RNA, 22 nt, Human
aagggcucacccaacucacuuc

SEQ ID NO: 98293 - RNA, 22 nt, Human
aagggcucgguagcaguccuga

SEQ ID NO: 98294 - RNA, 22 nt, Human
aagggcucugggcuacgcacug

SEQ ID NO: 98295 - RNA, 22 nt, Human
aagggcucuucuauuuauggcc

SEQ ID NO: 98296 - RNA, 22 nt, Human
aagggcugaaugaaggguugaa

SEQ ID NO: 98297 - RNA, 22 nt, Human
aagggcugagaaguggggcugg

SEQ ID NO: 98298 - RNA, 22 nt, Human
aagggcugcaauccaaaacacu

SEQ ID NO: 98299 - RNA, 22 nt, Human
aagggcugcauuugauguguca

SEQ ID NO: 98300 - RNA, 22 nt, Human
aagggcugccagggggugccag

SEQ ID NO: 98301 - RNA, 22 nt, Human
aagggcuggagacugggucuuc

SEQ ID NO: 98302 - RNA, 22 nt, Human
aagggcuguagacaagauugcu

SEQ ID NO: 98303 - RNA, 22 nt, Human
aaggggaaaaaguguuaggagu

SEQ ID NO: 98304 - RNA, 22 nt, Human
aagggggagagguguuuggaug

SEQ ID NO: 98305 - RNA, 22 nt, Human
aagggggcggcagccaguggaa

SEQ ID NO: 98306 - RNA, 19 nt, Human
aaggggugagggaagcaga

SEQ ID NO: 98307 - RNA, 23 nt, Human
aaggguccauagcuaucauuaca

SEQ ID NO: 98308 - RNA, 22 nt, Human
aagggugaagggugguggccua

SEQ ID NO: 98309 - RNA, 22 nt, Human
aagggugcaaagcacucuagcu

SEQ ID NO: 98310 - RNA, 22 nt, Human
aagggugcugcuaucaggaagc

SEQ ID NO: 98311 - RNA, 22 nt, Human
aagguaaucagccuuuccacaa

SEQ ID NO: 98312 - RNA, 22 nt, Human
aagguagauguugucaugccca

SEQ ID NO: 98313 - RNA, 22 nt, Human
aagguagauucuggaucgaagg

SEQ ID NO: 98314 - RNA, 21 nt, Human
aagguagcauggguugcagcc

SEQ ID NO: 98315 - RNA, 22 nt, Human
aagguagcuugcuuccugagua

SEQ ID NO: 98316 - RNA, 22 nt, Human
aagguauauguacaauagacau

SEQ ID NO: 98317 - RNA, 22 nt, Human
aagguauuuagugugaaagcua

SEQ ID NO: 98318 - RNA, 22 nt, Human
aaggucacugaucaguugagua

SEQ ID NO: 98319 - RNA, 22 nt, Human
aaggucauugguucugaauucu

SEQ ID NO: 98320 - RNA, 22 nt, Human
aaggucauuuaacaauuuauga

SEQ ID NO: 98321 - RNA, 20 nt, Human
aagguccaaacucuguguuc

SEQ ID NO: 98322 - RNA, 22 nt, Human
aagguccagaggucccgucacc

SEQ ID NO: 98323 - RNA, 22 nt, Human
aagguccaguggaaacuagagu

SEQ ID NO: 98324 - RNA, 22 nt, Human
aagguccaugacucggcauagu

SEQ ID NO: 98325 - RNA, 22 nt, Human
aaggucuaugaggccagaacau

SEQ ID NO: 98326 - RNA, 22 nt, Human
aaggucuguauuagaguuucau

SEQ ID NO: 98327 - RNA, 22 nt, Human
aaggugaagcucccgaugagaa

SEQ ID NO: 98328 - RNA, 17 nt, Human
aaggugagagcuguucu

SEQ ID NO: 98329 - RNA, 22 nt, Human
aagguggauguaagcggcaaug

SEQ ID NO: 98330 - RNA, 22 nt, Human
aaggugguaggcuauaucagua

SEQ ID NO: 98331 - RNA, 22 nt, Human
aaggugguugcaauuaccauaa

SEQ ID NO: 98332 - RNA, 22 nt, Human
aaggugucaccagauuggcagg

SEQ ID NO: 98333 - RNA, 22 nt, Human
aaggugucggguuagcucagcc

SEQ ID NO: 98334 - RNA, 22 nt, Human
aaggugucucucugcuucuugg

SEQ ID NO: 98335 - RNA, 22 nt, Human
aagguguggaguggugcgacug

SEQ ID NO: 98336 - RNA, 22 nt, Human
aagguguuauagcugaggaaua

SEQ ID NO: 98337 - RNA, 22 nt, Human
aagguguucagguuuucccauu

SEQ ID NO: 98338 - RNA, 22 nt, Human
aagguuaaauagguauuuucca

SEQ ID NO: 98339 - RNA, 22 nt, Human
aagguuagugcaucuuuuguuu

SEQ ID NO: 98340 - RNA, 22 nt, Human
aagguuaguuuucaauaauuac

SEQ ID NO: 98341 - RNA, 22 nt, Human
aagguucccucucuggaagccu

SEQ ID NO: 98342 - RNA, 22 nt, Human
aagguuuaaggucuauaaaugu

SEQ ID NO: 98343 - RNA, 22 nt, Human
aaguaaaauucaaucuucacug

SEQ ID NO: 98344 - RNA, 22 nt, Human
aaguaaacucaguggucauuca

SEQ ID NO: 98345 - RNA, 22 nt, Human
aaguaaacuuacacauaguaaa

SEQ ID NO: 98346 - RNA, 22 nt, Human
aaguaacagaggggguguugcu

SEQ ID NO: 98347 - RNA, 22 nt, Human
aaguaacaucugaacaugaugu

SEQ ID NO: 98348 - RNA, 22 nt, Human
aaguaacaugggaacaucugaa

SEQ ID NO: 98349 - RNA, 22 nt, Human
aaguaacuuauuugcaaacagg

SEQ ID NO: 98350 - RNA, 22 nt, Human
aaguaagucuuacauucacauu

SEQ ID NO: 98351 - RNA, 22 nt, Human
aaguacaacgcauacagagaaa

SEQ ID NO: 98352 - RNA, 22 nt, Human
aaguacagccagcacccagacu

SEQ ID NO: 98353 - RNA, 22 nt, Human
aaguacauaaaggaauuagcca

SEQ ID NO: 98354 - RNA, 22 nt, Human
aaguacuugauagauuaacugu

SEQ ID NO: 98355 - RNA, 22 nt, Human
aaguagacagucaucuacuuug

SEQ ID NO: 98356 - RNA, 18 nt, Human
aaguagaucaugagccac

SEQ ID NO: 98357 - RNA, 22 nt, Human
aaguagaugaucuuucugcaua

SEQ ID NO: 98358 - RNA, 22 nt, Human
aaguagcaaucucauuaguugg

SEQ ID NO: 98359 - RNA, 22 nt, Human
aaguagcauuuucaaaauguau

SEQ ID NO: 98360 - RNA, 22 nt, Human
aaguaguuaggaacauucucuc

SEQ ID NO: 98361 - RNA, 22 nt, Human
aaguaguuggaaauaagacaga

SEQ ID NO: 98362 - RNA, 20 nt, Human
aaguauauguccguguacuu

SEQ ID NO: 98363 - RNA, 22 nt, Human
aaguaucaaaugguagcauaug

SEQ ID NO: 98364 - RNA, 22 nt, Human
aaguaucucaaaaacaguaauc

SEQ ID NO: 98365 - RNA, 22 nt, Human
aaguauucauaaggacauaugu

SEQ ID NO: 98366 - RNA, 22 nt, Human
aaguauuucagcgguucuuugu

SEQ ID NO: 98367 - RNA, 22 nt, Human
aaguauuucuggccugugaaag

SEQ ID NO: 98368 - RNA, 22 nt, Human
aagucaaagcuuucagaggaaa

SEQ ID NO: 98369 - RNA, 22 nt, Human
aagucaaucaaggguguaggca

SEQ ID NO: 98370 - RNA, 22 nt, Human
aagucaauuuauguucucagac

SEQ ID NO: 98371 - RNA, 22 nt, Human
aagucacccuagggccuggacu

SEQ ID NO: 98372 - RNA, 20 nt, Human
aagucacuuaagaugggcag

SEQ ID NO: 98373 - RNA, 22 nt, Human
aagucacuucuuaggaaaggag

SEQ ID NO: 98374 - RNA, 23 nt, Human
aagucagagccaagucaaugaga

SEQ ID NO: 98375 - RNA, 22 nt, Human
aagucaggacuuaugcuaccug

SEQ ID NO: 98376 - RNA, 22 nt, Human
aagucaggcuggggucuggcag

SEQ ID NO: 98377 - RNA, 22 nt, Human
aagucagugcuagcuaauggcu

SEQ ID NO: 98378 - RNA, 22 nt, Human
aaucagaaaauucaguggaauu

SEQ ID NO: 98379 - RNA, 20 nt, Human
aaucagaaagugugagcucu

SEQ ID NO: 98380 - RNA, 19 nt, Human
aaucagaaauaucgaggcc

SEQ ID NO: 98381 - RNA, 22 nt, Human
aaucagaaccuugggucauaac

SEQ ID NO: 98382 - RNA, 22 nt, Human
aaucagaacuucucaggguggg

SEQ ID NO: 98383 - RNA, 22 nt, Human
aaucagaccguucuggcugucc

SEQ ID NO: 98384 - RNA, 22 nt, Human
aaucagacuauuaaagucucuu

SEQ ID NO: 98385 - RNA, 22 nt, Human
aaucagagucccaagaucugua

SEQ ID NO: 98386 - RNA, 22 nt, Human
aaucagcaggcuucuaaauuuu

SEQ ID NO: 98387 - RNA, 22 nt, Human
aaucagcaguuggaauuagaua

SEQ ID NO: 98388 - RNA, 22 nt, Human
aaucaggagcugagguuuagcc

SEQ ID NO: 98389 - RNA, 22 nt, Human
aaucaggaggaagccuugggca

SEQ ID NO: 98390 - RNA, 22 nt, Human
aaucaggauaugaacccaggua

SEQ ID NO: 98391 - RNA, 22 nt, Human
aaucaggcacagcgacugcagc

SEQ ID NO: 98392 - RNA, 22 nt, Human
aaucagucauuagcucugaccu

SEQ ID NO: 98393 - RNA, 23 nt, Human
aaucagugcaguuuuaugccaag

SEQ ID NO: 98394 - RNA, 22 nt, Human
aaucagugguucccagcccagg

SEQ ID NO: 98395 - RNA, 22 nt, Human
aaucaguguggugacuugucug

SEQ ID NO: 98396 - RNA, 22 nt, Human
aaucaguuucuuggcaaguuua

SEQ ID NO: 98397 - RNA, 22 nt, Human
aaucaugaaauaucaguucuuu

SEQ ID NO: 98398 - RNA, 22 nt, Human
aaucauguuucagaugaguuuu

SEQ ID NO: 98399 - RNA, 22 nt, Human
aauccacacaucuggcauguga

SEQ ID NO: 98400 - RNA, 22 nt, Human
aauccacgagcaguagguaauu

SEQ ID NO: 98401 - RNA, 19 nt, Human
aauccaggauaagccccuu

SEQ ID NO: 98402 - RNA, 22 nt, Human
aauccauuuaccuuugcuugaa

SEQ ID NO: 98403 - RNA, 22 nt, Human
aaucccuacuagagcauaccgu

SEQ ID NO: 98404 - RNA, 22 nt, Human
aaucccuucccuucucugggac

SEQ ID NO: 98405 - RNA, 22 nt, Human
aauccuagaaauuuauuugaag

SEQ ID NO: 98406 - RNA, 22 nt, Human
aauccuggaaugaguuugcuga

SEQ ID NO: 98407 - RNA, 22 nt, Human
aauccuggcaugugccuuggga

SEQ ID NO: 98408 - RNA, 22 nt, Human
aauccuggccuagcugggcuca

SEQ ID NO: 98409 - RNA, 22 nt, Human
aauccugugugacucuggggag

SEQ ID NO: 98410 - RNA, 22 nt, Human
aaucgaaagcugagggagcauu

SEQ ID NO: 98411 - RNA, 22 nt, Human
aaucgguugaacccaggaagug

SEQ ID NO: 98412 - RNA, 22 nt, Human
aaucuacauagagaucaaauga

SEQ ID NO: 98413 - RNA, 23 nt, Human
aaucuagaaugaccuacucaucu

SEQ ID NO: 98414 - RNA, 22 nt, Human
aaucuagaauuuuagggguaua

SEQ ID NO: 98415 - RNA, 22 nt, Human
aaucuagagacaauuugaauau

SEQ ID NO: 98416 - RNA, 22 nt, Human
aaucuagucuccuuaagucuuu

SEQ ID NO: 98417 - RNA, 22 nt, Human
aaucuaguuuaauauguuuaaa

SEQ ID NO: 98418 - RNA, 22 nt, Human
aaucuauaugcuuuucacauac

SEQ ID NO: 98419 - RNA, 22 nt, Human
aaucuauucccuuucuguaaaa

SEQ ID NO: 98420 - RNA, 22 nt, Human
aaucucaaagauggccagaaga

SEQ ID NO: 98421 - RNA, 22 nt, Human
aaucucaagcuguaaauaccuc

SEQ ID NO: 98422 - RNA, 22 nt, Human
aaucucagaaacugguggauuu

SEQ ID NO: 98423 - RNA, 22 nt, Human
aaucucagagauaucugugucc

SEQ ID NO: 98424 - RNA, 20 nt, Human
aaucucaguauccuaugcaa

SEQ ID NO: 98425 - RNA, 22 nt, Human
aaucucaugagcuucuuguccc

SEQ ID NO: 98426 - RNA, 22 nt, Human
aaucucuuguauuuccuuugac

SEQ ID NO: 98427 - RNA, 22 nt, Human
aaucaggaacucaagugcauug

SEQ ID NO: 98428 - RNA, 22 nt, Human
aaucaggacccacucuacaguu

SEQ ID NO: 98429 - RNA, 22 nt, Human
aaucaggagagcugcgaacguu

SEQ ID NO: 98430 - RNA, 22 nt, Human
aaucaggauagaaccucacgug

SEQ ID NO: 98431 - RNA, 22 nt, Human
aaucaguguguaaaguggcugc

SEQ ID NO: 98432 - RNA, 22 nt, Human
aaucaguuaaauauugaguaca

SEQ ID NO: 98433 - RNA, 22 nt, Human
aaucaguuaggguguuaaugag

SEQ ID NO: 98434 - RNA, 22 nt, Human
aaucaguucuacaucuuaucca

SEQ ID NO: 98435 - RNA, 22 nt, Human
aaucaguuguccaaaguucaca

SEQ ID NO: 98436 - RNA, 22 nt, Human
aaucauaauuguauacauucau

SEQ ID NO: 98437 - RNA, 22 nt, Human
aaucauaauuuugugaauguag

SEQ ID NO: 98438 - RNA, 22 nt, Human
aaucaucccaacugagaauccc

SEQ ID NO: 98439 - RNA, 22 nt, Human
aaucaucuccgaaaaaagagua

SEQ ID NO: 98440 - RNA, 22 nt, Human
aaucaucuucaucuuacacaga

SEQ ID NO: 98441 - RNA, 22 nt, Human
aaucauguacugcuguggcuuu

SEQ ID NO: 98442 - RNA, 22 nt, Human
aaucauguccaucuuaacuuuc

SEQ ID NO: 98443 - RNA, 22 nt, Human
aaucauguuuacgugacauguc

SEQ ID NO: 98444 - RNA, 22 nt, Human
aaucauucucaugccaguuucc

SEQ ID NO: 98445 - RNA, 22 nt, Human
aaucauugagacaaauuagcuu

SEQ ID NO: 98446 - RNA, 22 nt, Human
aaucauugcuccuuucucuggu

SEQ ID NO: 98447 - RNA, 22 nt, Human
aauccacgggauuauucuaacu

SEQ ID NO: 98448 - RNA, 22 nt, Human
aauccagaugagcaaucauacu

SEQ ID NO: 98449 - RNA, 22 nt, Human
aauccagcacauggacacaguc

SEQ ID NO: 98450 - RNA, 22 nt, Human
aauccaggguguggccuuucca

SEQ ID NO: 98451 - RNA, 22 nt, Human
aauccaucucuccgagaaguuu

SEQ ID NO: 98452 - RNA, 22 nt, Human
aauccaugaagugaacaaucug

SEQ ID NO: 98453 - RNA, 22 nt, Human
aauccauuaaaaacaagcgcau

SEQ ID NO: 98454 - RNA, 22 nt, Human
aauccauugcugugcugccagg

SEQ ID NO: 98455 - RNA, 22 nt, Human
aauccauuuacucuuuacaaga

SEQ ID NO: 98456 - RNA, 22 nt, Human
aaucccagcuacucaggaaguu

SEQ ID NO: 98457 - RNA, 22 nt, Human
aauccuggaauacaagagugaa

SEQ ID NO: 98458 - RNA, 22 nt, Human
aauccuggcugcguuggccagc

SEQ ID NO: 98459 - RNA, 22 nt, Human
aaucgcaauuacuuuugcacca

SEQ ID NO: 98460 - RNA, 22 nt, Human
aaucuaagccaccaguaguuuc

SEQ ID NO: 98461 - RNA, 22 nt, Human
aaucuaagggaaauuggagaug

SEQ ID NO: 98462 - RNA, 19 nt, Human
aaucuagaaauauguguuc

SEQ ID NO: 98463 - RNA, 22 nt, Human
aaucuagagugcuaggucugug

SEQ ID NO: 98464 - RNA, 22 nt, Human
aaucuagauucggaucaaaggg

SEQ ID NO: 98465 - RNA, 23 nt, Human
aaucuauacuuaggcugguaaua

SEQ ID NO: 98466 - RNA, 22 nt, Human
aaucucacauagcuaggaguag

SEQ ID NO: 98467 - RNA, 22 nt, Human
aaucucagcucaugcaauucca

SEQ ID NO: 98468 - RNA, 22 nt, Human
aaucucuucccaguaaaaaugg

SEQ ID NO: 98469 - RNA, 22 nt, Human
aaucucuugggaggaaugaauu

SEQ ID NO: 98470 - RNA, 20 nt, Human
aaucugaaucccaguccuag

SEQ ID NO: 98471 - RNA, 22 nt, Human
aaucugcacccacugaaaaugc

SEQ ID NO: 98472 - RNA, 22 nt, Human
aaucugcuuuugucauuuauga

SEQ ID NO: 98473 - RNA, 22 nt, Human
aaucuggaguuaauguuuucgc

SEQ ID NO: 98474 - RNA, 22 nt, Human
aaucuggcucagaagaagauga

SEQ ID NO: 98475 - RNA, 22 nt, Human
aaucugguuugacaacuuuugu

SEQ ID NO: 98476 - RNA, 22 nt, Human
aaucuguagggaacaacuguac

SEQ ID NO: 98477 - RNA, 22 nt, Human
aaucuguauuguuaacaaguaa

SEQ ID NO: 98478 - RNA, 22 nt, Human
aaucugucccuuaacuagucau

SEQ ID NO: 98479 - RNA, 22 nt, Human
aaucugugcucccugcauuugu

SEQ ID NO: 98480 - RNA, 22 nt, Human
aaucuguugaugcaaaccuccc

SEQ ID NO: 98481 - RNA, 22 nt, Human
aaucuguugucaggaauccaca

SEQ ID NO: 98482 - RNA, 22 nt, Human
aaucuguuuuaaaguuugugcc

SEQ ID NO: 98483 - RNA, 22 nt, Human
aaucuucaaaauguucugcuug

SEQ ID NO: 98484 - RNA, 22 nt, Human
aaucuucagcacuccagagacu

SEQ ID NO: 98485 - RNA, 22 nt, Human
aaucuucagugucuaaaaagca

SEQ ID NO: 98486 - RNA, 22 nt, Human
aaucuucauuuugacaagauuc

SEQ ID NO: 98487 - RNA, 22 nt, Human
aaugaugaguucuaauagaccc

SEQ ID NO: 98488 - RNA, 22 nt, Human
aaugauggauuuagacaagcug

SEQ ID NO: 98489 - RNA, 22 nt, Human
aaugaugguauugaugagcuaa

SEQ ID NO: 98490 - RNA, 22 nt, Human
aaugauugcaaacauugagaac

SEQ ID NO: 98491 - RNA, 22 nt, Human
aaugcaaauuaucaggcuucuc

SEQ ID NO: 98492 - RNA, 22 nt, Human
aaugcaaugcagcaccuccuug

SEQ ID NO: 98493 - RNA, 22 nt, Human
aaugcacaaaaauuguauguaa

SEQ ID NO: 98494 - RNA, 22 nt, Human
aaugcacacauuugguacugaa

SEQ ID NO: 98495 - RNA, 22 nt, Human
aaugcacagcuaaagugguucc

SEQ ID NO: 98496 - RNA, 22 nt, Human
aaugcaccuuggcagggauuca

SEQ ID NO: 98497 - RNA, 22 nt, Human
aaugcagaccaguaugaaaaac

SEQ ID NO: 98498 - RNA, 22 nt, Human
aaugcagaguaaauauuuaauu

SEQ ID NO: 98499 - RNA, 22 nt, Human
aaugcaggcacgugcaagcaag

SEQ ID NO: 98500 - RNA, 22 nt, Human
aaugcagugagccauuaaaugg

SEQ ID NO: 98501 - RNA, 21 nt, Human
aaugcauuaacauaaagcuga

SEQ ID NO: 98502 - RNA, 22 nt, Human
aaugcauuagcuacauaugucu

SEQ ID NO: 98503 - RNA, 22 nt, Human
aaugcauuguugauuuggagug

SEQ ID NO: 98504 - RNA, 22 nt, Human
aaugccaacuuggauauacauu

SEQ ID NO: 98505 - RNA, 22 nt, Human
aaugccaaugggcagaacuaga

SEQ ID NO: 98506 - RNA, 22 nt, Human
aaugccacuaaaucugugaaua

SEQ ID NO: 98507 - RNA, 22 nt, Human
aaugccaguguguugauuccag

SEQ ID NO: 98508 - RNA, 22 nt, Human
aaugccaucagagaaaacucuu

SEQ ID NO: 98509 - RNA, 22 nt, Human
aaugcuauucauuaagccuacu

SEQ ID NO: 98510 - RNA, 18 nt, Human
aaugcuauuguuauaggg

SEQ ID NO: 98511 - RNA, 22 nt, Human
aaugcucuuuaaccuauucuga

SEQ ID NO: 98512 - RNA, 22 nt, Human
aaugcucuuugaauuugucaga

SEQ ID NO: 98513 - RNA, 22 nt, Human
aaugcugcaagaggugaaaaga

SEQ ID NO: 98514 - RNA, 19 nt, Human
aaugcugcuucuuuuugca

SEQ ID NO: 98515 - RNA, 22 nt, Human
aaugcuguaaagaugcuaucug

SEQ ID NO: 98516 - RNA, 22 nt, Human
aaugcugucuuagcaugaaagc

SEQ ID NO: 98517 - RNA, 19 nt, Human
aaugcuuaggacagugccu

SEQ ID NO: 98518 - RNA, 22 nt, Human
aaugcuuauaccuaaugaucuu

SEQ ID NO: 98519 - RNA, 22 nt, Human
aaugcuuccuccucaccucagg

SEQ ID NO: 98520 - RNA, 22 nt, Human
aauggaaccuaguuauccacau

SEQ ID NO: 98521 - RNA, 22 nt, Human
aauggacaggagagcauaguca

SEQ ID NO: 98522 - RNA, 19 nt, Human
aauggacaggcaauagucu

SEQ ID NO: 98523 - RNA, 22 nt, Human
aauggagacugacacaaagaua

SEQ ID NO: 98524 - RNA, 22 nt, Human
aauggaggugucuggccuggua

SEQ ID NO: 98525 - RNA, 22 nt, Human
aauggcaaaguguuuucauacc

SEQ ID NO: 98526 - RNA, 22 nt, Human
aauggcaauucagugaaauuau

SEQ ID NO: 98527 - RNA, 22 nt, Human
aauggcacuuuauaaauguuaa

SEQ ID NO: 98528 - RNA, 22 nt, Human
aauggcaugggaaaugcagugg

SEQ ID NO: 98529 - RNA, 22 nt, Human
aauggcuguucucugugauugg

SEQ ID NO: 98530 - RNA, 21 nt, Human
aauggcuuauacagaaguaag

SEQ ID NO: 98531 - RNA, 20 nt, Human
aauggcuuauagcaugcuac

SEQ ID NO: 98532 - RNA, 22 nt, Human
aauggcuuuaaguagucucaca

SEQ ID NO: 98533 - RNA, 22 nt, Human
aaugggaaaagaguaugauuua

SEQ ID NO: 98534 - RNA, 22 nt, Human
aaugggaagccagaagacaagg

SEQ ID NO: 98535 - RNA, 22 nt, Human
aaugggauaauagaaguagaau

SEQ ID NO: 98536 - RNA, 22 nt, Human
aaugggauuaagaaagaucuug

SEQ ID NO: 98537 - RNA, 22 nt, Human
aaugggcuuucuuggacaggag

SEQ ID NO: 98538 - RNA, 22 nt, Human
aaugggcuuuggccaguaggag

SEQ ID NO: 98539 - RNA, 23 nt, Human
aaugggugcaacuauccaugaca

SEQ ID NO: 98540 - RNA, 22 nt, Human
aauggguugaacaucaaggucu

SEQ ID NO: 98541 - RNA, 22 nt, Human
aauggguuucugucccagcucu

SEQ ID NO: 98542 - RNA, 22 nt, Human
aaugcauguuuccucucagcag

SEQ ID NO: 98543 - RNA, 22 nt, Human
aaugcauuaaaguuagagacuu

SEQ ID NO: 98544 - RNA, 22 nt, Human
aaugcauucucgguuugugugu

SEQ ID NO: 98545 - RNA, 22 nt, Human
aaugcauugauugcuggaaaua

SEQ ID NO: 98546 - RNA, 22 nt, Human
aaugcauuuuauuauaugugac

SEQ ID NO: 98547 - RNA, 22 nt, Human
aaugccaucccucugucaccaa

SEQ ID NO: 98548 - RNA, 22 nt, Human
aaugccaucuggugauguauua

SEQ ID NO: 98549 - RNA, 22 nt, Human
aaugccauuccaucacacaccu

SEQ ID NO: 98550 - RNA, 19 nt, Human
aaugccucaaauugggaga

SEQ ID NO: 98551 - RNA, 22 nt, Human
aaugccuugccugcuacaacuu

SEQ ID NO: 98552 - RNA, 22 nt, Human
aaugccuuggagagccuagagg

SEQ ID NO: 98553 - RNA, 22 nt, Human
aaugcuaaaacacagauuuuug

SEQ ID NO: 98554 - RNA, 22 nt, Human
aaugcuacagaagugaucuugg

SEQ ID NO: 98555 - RNA, 22 nt, Human
aaugcugaauuuaguauuuaug

SEQ ID NO: 98556 - RNA, 22 nt, Human
aaugcugagggaugagagaggc

SEQ ID NO: 98557 - RNA, 22 nt, Human
aaugcugcucucauaauuauag

SEQ ID NO: 98558 - RNA, 20 nt, Human
aaugcugcuucuuuuugcau

SEQ ID NO: 98559 - RNA, 23 nt, Human
aaugcuggaaauucaggcaugau

SEQ ID NO: 98560 - RNA, 22 nt, Human
aaugcuguauaucuuagcuaau

SEQ ID NO: 98561 - RNA, 22 nt, Human
aaugcuguccaauaggaacaua

SEQ ID NO: 98562 - RNA, 22 nt, Human
aaugcugucuuuucuacuucau

SEQ ID NO: 98563 - RNA, 22 nt, Human
aaugcugugauuuauuaaguau

SEQ ID NO: 98564 - RNA, 22 nt, Human
aaugcuguugaguuguuccugu

SEQ ID NO: 98565 - RNA, 22 nt, Human
aaugcuuauaacguuagaaugu

SEQ ID NO: 98566 - RNA, 22 nt, Human
aaugcuuauggguuccauaaua

SEQ ID NO: 98567 - RNA, 22 nt, Human
aaugcuuauuauuaauagaaug

SEQ ID NO: 98568 - RNA, 22 nt, Human
aaugcuuuaauugcauguagug

SEQ ID NO: 98569 - RNA, 22 nt, Human
aaugcuuuagcagugauuagug

SEQ ID NO: 98570 - RNA, 22 nt, Human
aaugcuuucaaaaaugugcagu

SEQ ID NO: 98571 - RNA, 22 nt, Human
aaugcuuugagggaagaugaaa

SEQ ID NO: 98572 - RNA, 22 nt, Human
aaugcuuugauugauuaaaaca

SEQ ID NO: 98573 - RNA, 22 nt, Human
aaugcuuugccaacagcuauug

SEQ ID NO: 98574 - RNA, 22 nt, Human
aaugcuuuugcugucauugcuu

SEQ ID NO: 98575 - RNA, 22 nt, Human
aaugcuuuuugcgaaaugugca

SEQ ID NO: 98576 - RNA, 22 nt, Human
aauggacaaacuugggaaguau

SEQ ID NO: 98577 - RNA, 22 nt, Human
aauggagacccuaaggaagagg

SEQ ID NO: 98578 - RNA, 22 nt, Human
aauggcaaaaggaguuaguuga

SEQ ID NO: 98579 - RNA, 22 nt, Human
aauggcacaagaguaaacuguu

SEQ ID NO: 98580 - RNA, 22 nt, Human
aauggcaccugcuauauacuga

SEQ ID NO: 98581 - RNA, 22 nt, Human
aauggcaccuucaagaagaaaa

SEQ ID NO: 98582 - RNA, 22 nt, Human
aauggcagagacuguugaaaua

SEQ ID NO: 98583 - RNA, 22 nt, Human
aauggcaguaguugcaugagag

SEQ ID NO: 98584 - RNA, 22 nt, Human
aauggccagcaacaggagugaa

SEQ ID NO: 98585 - RNA, 22 nt, Human
aauggccauaucauugcagagc

SEQ ID NO: 98586 - RNA, 22 nt, Human
aauggcugccagggcaggaggu

SEQ ID NO: 98587 - RNA, 22 nt, Human
aauggcuuaaguauaagugaga

SEQ ID NO: 98588 - RNA, 22 nt, Human
aauggcuuagcucagcgcucag

SEQ ID NO: 98589 - RNA, 22 nt, Human
aauggcuuagugcuucacuucu

SEQ ID NO: 98590 - RNA, 22 nt, Human
aauggcuucaugucuguggaaa

SEQ ID NO: 98591 - RNA, 22 nt, Human
aauggcuucugaagcacacuuu

SEQ ID NO: 98592 - RNA, 22 nt, Human
aauggcuuuaggaauccagugc

SEQ ID NO: 98593 - RNA, 22 nt, Human
aauggcuuugaguauuuucugg

SEQ ID NO: 98594 - RNA, 22 nt, Human
aauggcuuuuaaaaauagcauu

SEQ ID NO: 98595 - RNA, 22 nt, Human
aaugggaaagagacuagaugcu

SEQ ID NO: 98596 - RNA, 22 nt, Human
aauuccaagagcuuccuaagug

SEQ ID NO: 98597 - RNA, 22 nt, Human
aauuccacagcugcacagaggu

SEQ ID NO: 98598 - RNA, 22 nt, Human
aauuccagccucaguucuauua

SEQ ID NO: 98599 - RNA, 22 nt, Human
aauuccagcugauugacuuucc

SEQ ID NO: 98600 - RNA, 22 nt, Human
aauuccaggcagaaaugugagu

SEQ ID NO: 98601 - RNA, 22 nt, Human
aauuccaggggguaccauucau

SEQ ID NO: 98602 - RNA, 22 nt, Human
aauuccagucucugcucuauuu

SEQ ID NO: 98603 - RNA, 22 nt, Human
aauucccaccuucucucuuuug

SEQ ID NO: 98604 - RNA, 21 nt, Human
aauucguuugcaacacugaua

SEQ ID NO: 98605 - RNA, 22 nt, Human
aauucuagcauugugaaaauau

SEQ ID NO: 98606 - RNA, 22 nt, Human
aauucuauguucuugaguaaga

SEQ ID NO: 98607 - RNA, 22 nt, Human
aauucucuccaggguaacauca

SEQ ID NO: 98608 - RNA, 22 nt, Human
aauucugcauaagguggcucug

SEQ ID NO: 98609 - RNA, 22 nt, Human
aauucugcucuuaacauaaugu

SEQ ID NO: 98610 - RNA, 22 nt, Human
aauucugcuucaucagcucuuu

SEQ ID NO: 98611 - RNA, 22 nt, Human
aauucuguaaagcuugucaugc

SEQ ID NO: 98612 - RNA, 22 nt, Human
aauucuguaacuuuacugaauu

SEQ ID NO: 98613 - RNA, 22 nt, Human
aauugaaaauauuguagaccau

SEQ ID NO: 98614 - RNA, 22 nt, Human
aauugagugcuagacaucauga

SEQ ID NO: 98615 - RNA, 22 nt, Human
aauugaugauucuuaugugaaa

SEQ ID NO: 98616 - RNA, 22 nt, Human
aauugauggacagagaugaaga

SEQ ID NO: 98617 - RNA, 22 nt, Human
aauugcacuuuagcaaugguga

SEQ ID NO: 98618 - RNA, 22 nt, Human
aauugcauaaaauucaacucug

SEQ ID NO: 98619 - RNA, 22 nt, Human
aauugcccgcacauugagaggu

SEQ ID NO: 98620 - RNA, 19 nt, Human
aauugccugucucugccag

SEQ ID NO: 98621 - RNA, 22 nt, Human
aauugcuucauuaacauuuagg

SEQ ID NO: 98622 - RNA, 22 nt, Human
aauugcuugucuucuucccuac

SEQ ID NO: 98623 - RNA, 22 nt, Human
aauugcuuguuucuuuaacuga

SEQ ID NO: 98624 - RNA, 22 nt, Human
aauugcuuguuuucggucauaa

SEQ ID NO: 98625 - RNA, 22 nt, Human
aauugcuuuaguuaccauagug

SEQ ID NO: 98626 - RNA, 22 nt, Human
aauugcuuuuauuuagggccag

SEQ ID NO: 98627 - RNA, 22 nt, Human
aauugcuuuucaaggguacagc

SEQ ID NO: 98628 - RNA, 22 nt, Human
aauuggaaaaagacuuaauugc

SEQ ID NO: 98629 - RNA, 22 nt, Human
aauuggaagaauugauuugcuu

SEQ ID NO: 98630 - RNA, 22 nt, Human
aauuggcaagcagauuuccacu

SEQ ID NO: 98631 - RNA, 22 nt, Human
aauuggcuuugagaaguuugag

SEQ ID NO: 98632 - RNA, 22 nt, Human
aauuggcuuugugguuucugca

SEQ ID NO: 98633 - RNA, 22 nt, Human
aauugucaaacacaaauaagag

SEQ ID NO: 98634 - RNA, 22 nt, Human
aauugugcauuuuuaaaucacg

SEQ ID NO: 98635 - RNA, 22 nt, Human
aauuuaacugagaguacuuuua

SEQ ID NO: 98636 - RNA, 22 nt, Human
aauuuaagaacauuucaggacu

SEQ ID NO: 98637 - RNA, 22 nt, Human
aauuuaaggaggccuucacucu

SEQ ID NO: 98638 - RNA, 20 nt, Human
aauuuacucacagaaugaau

SEQ ID NO: 98639 - RNA, 22 nt, Human
aauuuagaauucgcuagcuaau

SEQ ID NO: 98640 - RNA, 22 nt, Human
aauuuaguguaaagcuacugga

SEQ ID NO: 98641 - RNA, 23 nt, Human
aauuuaguuugagacauuagccu

SEQ ID NO: 98642 - RNA, 22 nt, Human
aauuuauaauaaauagggcuuu

SEQ ID NO: 98643 - RNA, 22 nt, Human
aauuuauucccgucucugggcu

SEQ ID NO: 98644 - RNA, 22 nt, Human
aauuuauuuccugccaguacac

SEQ ID NO: 98645 - RNA, 22 nt, Human
aauuucaaacucuugcccucag

SEQ ID NO: 98646 - RNA, 22 nt, Human
aauuucaaguggcaucuuugau

SEQ ID NO: 98647 - RNA, 22 nt, Human
aauuucaaugcacucaugguug

SEQ ID NO: 98648 - RNA, 22 nt, Human
aauuucacauaaggcucauugg

SEQ ID NO: 98649 - RNA, 22 nt, Human
aauuucaccuaucacuuaagcc

SEQ ID NO: 98650 - RNA, 22 nt, Human
aauuucagaugucauaaauaua

SEQ ID NO: 98651 - RNA, 18 nt, Human
aauuuccauaugaauugc

SEQ ID NO: 98652 - RNA, 22 nt, Human
aauuucucacucucuugaucac

SEQ ID NO: 98653 - RNA, 22 nt, Human
aauuucucauggauucaguuau

SEQ ID NO: 98654 - RNA, 22 nt, Human
aauuugacccaucuuggaauuu

SEQ ID NO: 98655 - RNA, 22 nt, Human
aauuuggaagauguuguuuauc

SEQ ID NO: 98656 - RNA, 22 nt, Human
aauuuggagagaaacaaguagg

SEQ ID NO: 98657 - RNA, 22 nt, Human
aauuuggagagagauuaauguu

SEQ ID NO: 98658 - RNA, 22 nt, Human
aauuuguuagcauacucuaguu

SEQ ID NO: 98659 - RNA, 22 nt, Human
aaugguaaauguaacagcauuc

SEQ ID NO: 98660 - RNA, 22 nt, Human
aauggucauuggugguuauugg

SEQ ID NO: 98661 - RNA, 22 nt, Human
aaugguuacagaaaugaaagua

SEQ ID NO: 98662 - RNA, 22 nt, Human
aaugguuugauggacaaaauga

SEQ ID NO: 98663 - RNA, 22 nt, Human
aaugguuuugucucaucaaugu

SEQ ID NO: 98664 - RNA, 22 nt, Human
aauguaaaauaucuuguacuug

SEQ ID NO: 98665 - RNA, 22 nt, Human
aauguaaagcucaggucaggag

SEQ ID NO: 98666 - RNA, 22 nt, Human
aauguacaaaccuucuuuguag

SEQ ID NO: 98667 - RNA, 22 nt, Human
aauguacaaggguuccaguuuu

SEQ ID NO: 98668 - RNA, 19 nt, Human
aauguaguguuaugucaac

SEQ ID NO: 98669 - RNA, 22 nt, Human
aauguauaaaguguuaauaacu

SEQ ID NO: 98670 - RNA, 22 nt, Human
aauguauaauauuuaaugcuuu

SEQ ID NO: 98671 - RNA, 23 nt, Human
aauguauguuaguaucuuagaga

SEQ ID NO: 98672 - RNA, 21 nt, Human
aauguauguuuaucucacagu

SEQ ID NO: 98673 - RNA, 22 nt, Human
aauguauucucuuuauaagaua

SEQ ID NO: 98674 - RNA, 22 nt, Human
aauguauucuucaaccuugcua

SEQ ID NO: 98675 - RNA, 22 nt, Human
aaugucaaacagagcagagcua

SEQ ID NO: 98676 - RNA, 22 nt, Human
aaugucaacacuugguauguca

SEQ ID NO: 98677 - RNA, 22 nt, Human
aaugucaaguagccaaugcuuc

SEQ ID NO: 98678 - RNA, 22 nt, Human
aaugucaauaacuuuaucccuc

SEQ ID NO: 98679 - RNA, 22 nt, Human
aaugucaauuaccagaacagaa

SEQ ID NO: 98680 - RNA, 22 nt, Human
aaugucacucuguuuccucugc

SEQ ID NO: 98681 - RNA, 22 nt, Human
aaugucaguguuacugcuauug

SEQ ID NO: 98682 - RNA, 22 nt, Human
aaugucauagcauuucuucaau

SEQ ID NO: 98683 - RNA, 22 nt, Human
aaugucauauuaguuugugccu

SEQ ID NO: 98684 - RNA, 21 nt, Human
aaugucauugaauggugagac

SEQ ID NO: 98685 - RNA, 22 nt, Human
aaugucauuuaggauuauguuu

SEQ ID NO: 98686 - RNA, 22 nt, Human
aauguccaccgugaugauggaa

SEQ ID NO: 98687 - RNA, 22 nt, Human
aaugucuacagcaaaccccaca

SEQ ID NO: 98688 - RNA, 22 nt, Human
aaugucuacauucugaauucgu

SEQ ID NO: 98689 - RNA, 22 nt, Human
aaugucuagaguuuuaagcuua

SEQ ID NO: 98690 - RNA, 22 nt, Human
aaugucuauuugcuacaaagcc

SEQ ID NO: 98691 - RNA, 22 nt, Human
aaugucucaccguaaauguaac

SEQ ID NO: 98692 - RNA, 19 nt, Human
aaugucucuaucuguucuc

SEQ ID NO: 98693 - RNA, 22 nt, Human
aaugucucucuaaauaaacuuu

SEQ ID NO: 98694 - RNA, 22 nt, Human
aaugucugccugaacuuuauau

SEQ ID NO: 98695 - RNA, 22 nt, Human
aaugucugugccuuaaaacuuc

SEQ ID NO: 98696 - RNA, 22 nt, Human
aaugucuucaguguauacaugg

SEQ ID NO: 98697 - RNA, 22 nt, Human
aaugucuucucuuguugaauuu

SEQ ID NO: 98698 - RNA, 22 nt, Human
aaugucuugagaagagaaaucu

SEQ ID NO: 98699 - RNA, 20 nt, Human
aaugucuugagacauuucag

SEQ ID NO: 98700 - RNA, 22 nt, Human
aaugucuuucucauaacagaua

SEQ ID NO: 98701 - RNA, 22 nt, Human
aaugucuuucuguucuaugaga

SEQ ID NO: 98702 - RNA, 22 nt, Human
aauguggauccuuacagauacc

SEQ ID NO: 98703 - RNA, 22 nt, Human
aauguguagggugccuguuuuu

SEQ ID NO: 98704 - RNA, 22 nt, Human
aauguguauacuggcaauuaag

SEQ ID NO: 98705 - RNA, 22 nt, Human
aauuucucgguuuugauauugu

SEQ ID NO: 98706 - RNA, 22 nt, Human
aauuucucucucaugcuucaug

SEQ ID NO: 98707 - RNA, 22 nt, Human
aauuucuguaugaauagagaaa

SEQ ID NO: 98708 - RNA, 22 nt, Human
aauuugauucagcaaauguuca

SEQ ID NO: 98709 - RNA, 22 nt, Human
aauuugccuuaccuucuuccaa

SEQ ID NO: 98710 - RNA, 21 nt, Human
aauuugcuaagcaaaggagca

SEQ ID NO: 98711 - RNA, 22 nt, Human
aauuugggcgaggagggaggca

SEQ ID NO: 98712 - RNA, 22 nt, Human
aauuuguauacauguuacauuu

SEQ ID NO: 98713 - RNA, 22 nt, Human
aauuugugaaucugucucuuga

SEQ ID NO: 98714 - RNA, 22 nt, Human
aauuuguggccacauuguggaa

SEQ ID NO: 98715 - RNA, 22 nt, Human
aauuuguuaaaagugagugaca

SEQ ID NO: 98716 - RNA, 22 nt, Human
aauuuuaaucaguggugcugag

SEQ ID NO: 98717 - RNA, 22 nt, Human
aauuuuacauaggggauauggg

SEQ ID NO: 98718 - RNA, 22 nt, Human
aauuuuacuaaucugaguguga

SEQ ID NO: 98719 - RNA, 20 nt, Human
aauuuuacuguccuauagag

SEQ ID NO: 98720 - RNA, 22 nt, Human
aauuuuauuagaaggcaagggg

SEQ ID NO: 98721 - RNA, 21 nt, Human
aauuuugaaggaagauuaagg

SEQ ID NO: 98722 - RNA, 22 nt, Human
aauuuugugugggaucaaagga

SEQ ID NO: 98723 - RNA, 22 nt, Human
aauuuuguuuaagugaucugcu

SEQ ID NO: 98724 - RNA, 22 nt, Human
acaaaaaccguggauucagcau

SEQ ID NO: 98725 - RNA, 22 nt, Human
acaaaaccagaaaaucucuacc

SEQ ID NO: 98726 - RNA, 22 nt, Human
acaaaagcuuuuggaggguugu

SEQ ID NO: 98727 - RNA, 22 nt, Human
acaaaaguguaggaauuccuua

SEQ ID NO: 98728 - RNA, 22 nt, Human
acaaaauuguguuaaacuuuau

SEQ ID NO: 98729 - RNA, 22 nt, Human
acaaacacgagacgccacugug

SEQ ID NO: 98730 - RNA, 22 nt, Human
acaaaccagcuuaagcaagaug

SEQ ID NO: 98731 - RNA, 22 nt, Human
acaaacuaccuacagauguuca

SEQ ID NO: 98732 - RNA, 21 nt, Human
acaaacugaaaugaguuuccu

SEQ ID NO: 98733 - RNA, 22 nt, Human
acaaacugaauggguuuucugu

SEQ ID NO: 98734 - RNA, 22 nt, Human
acaaacuuccaucaugaauuuu

SEQ ID NO: 98735 - RNA, 20 nt, Human
acaaagacuggaaaagcaag

SEQ ID NO: 98736 - RNA, 22 nt, Human
acaaagagggaccagugacuug

SEQ ID NO: 98737 - RNA, 22 nt, Human
acaaagaucuugcuuuccuacu

SEQ ID NO: 98738 - RNA, 22 nt, Human
acaaagauguuuaaagcauuua

SEQ ID NO: 98739 - RNA, 21 nt, Human
acaaaggaagucucuuuuaag

SEQ ID NO: 98740 - RNA, 18 nt, Human
acaaaggaucaugaggga

SEQ ID NO: 98741 - RNA, 18 nt, Human
acaaaggucugcaagacc

SEQ ID NO: 98742 - RNA, 22 nt, Human
acaaaggugagcagaagacaca

SEQ ID NO: 98743 - RNA, 22 nt, Human
acaaaguaggaagauuagcuga

SEQ ID NO: 98744 - RNA, 22 nt, Human
acaaagucaaauugcagccgcc

SEQ ID NO: 98745 - RNA, 22 nt, Human
acaaagugcugacauuacaggc

SEQ ID NO: 98746 - RNA, 22 nt, Human
acaaaguuauucuuucagagga

SEQ ID NO: 98747 - RNA, 19 nt, Human
acaaauaguuacauauccu

SEQ ID NO: 98748 - RNA, 22 nt, Human
acaaaugaaccugaaaucucag

SEQ ID NO: 98749 - RNA, 22 nt, Human
acaaaugaaucauacauaaugu

SEQ ID NO: 98750 - RNA, 18 nt, Human
acaaauguagugucuuaa

SEQ ID NO: 98751 - RNA, 22 nt, Human
acaaaugucuacauugagaaua

SEQ ID NO: 98752 - RNA, 23 nt, Human
acaaaugucuagagaggguguga

SEQ ID NO: 98753 - RNA, 22 nt, Human
acaaaugucuccucuuuuguua

SEQ ID NO: 98754 - RNA, 22 nt, Human
acaaaugugucuaauugugccu

SEQ ID NO: 98755 - RNA, 22 nt, Human
acaaauucucuaggcaaggaag

SEQ ID NO: 98756 - RNA, 22 nt, Human
acaaauuggguaugagcuaaga

SEQ ID NO: 98757 - RNA, 22 nt, Human
acaacaaggcuuuucauucaua

SEQ ID NO: 98758 - RNA, 22 nt, Human
acaacacagcaaaaccccaucu

SEQ ID NO: 98759 - RNA, 17 nt, Human
acaacagaaauguauuc

SEQ ID NO: 98760 - RNA, 22 nt, Human
acaacaguaggaaaacaugucu

SEQ ID NO: 98761 - RNA, 22 nt, Human
acaacaucagcugagaccuuca

SEQ ID NO: 98762 - RNA, 22 nt, Human
acaacauuauacauagaaagcu

SEQ ID NO: 98763 - RNA, 22 nt, Human
acaacauuuccauuuccuuggu

SEQ ID NO: 98764 - RNA, 22 nt, Human
acaaccaugucaguucaaacca

SEQ ID NO: 98765 - RNA, 22 nt, Human
acaaccuucuggagauaucugu

SEQ ID NO: 98766 - RNA, 22 nt, Human
acaacucucaguuaaauaaaga

SEQ ID NO: 98767 - RNA, 22 nt, Human
acaacugucaguaaagaauauu

SEQ ID NO: 98768 - RNA, 20 nt, Human
acaacuuaguugagagacua

SEQ ID NO: 98769 - RNA, 22 nt, Human
acaagaauaaggauaagagauu

SEQ ID NO: 98770 - RNA, 22 nt, Human
acaagaauuuacauguagugga

SEQ ID NO: 98771 - RNA, 22 nt, Human
acaagacugugcucuaagagug

SEQ ID NO: 98772 - RNA, 22 nt, Human
acaagagauuaucuacagauga

SEQ ID NO: 98773 - RNA, 22 nt, Human
acaagaguaucuuugacuuuag

SEQ ID NO: 98774 - RNA, 22 nt, Human
acaagauaaggugucagugugu

SEQ ID NO: 98775 - RNA, 22 nt, Human
acaagauagcuuagaagauuca

SEQ ID NO: 98776 - RNA, 23 nt, Human
acaagauagggauaaaaagauaa

SEQ ID NO: 98777 - RNA, 22 nt, Human
acaagauagguugagucuagcc

SEQ ID NO: 98778 - RNA, 22 nt, Human
acaagauuuggcugaaacucca

SEQ ID NO: 98779 - RNA, 22 nt, Human
aaucauggcguguuuagcuuaa

SEQ ID NO: 98780 - RNA, 22 nt, Human
aaucauuguucuucagauuuga

SEQ ID NO: 98781 - RNA, 22 nt, Human
aauccaauccuacucagaaagu

SEQ ID NO: 98782 - RNA, 22 nt, Human
aauccacuaaugaagaaugggc

SEQ ID NO: 98783 - RNA, 22 nt, Human
aauccauaauguugugggguuu

SEQ ID NO: 98784 - RNA, 22 nt, Human
aauccauagaauaaaauugcag

SEQ ID NO: 98785 - RNA, 22 nt, Human
aauccauagguuuuuccaagag

SEQ ID NO: 98786 - RNA, 22 nt, Human
aauccauguugauguauauuuu

SEQ ID NO: 98787 - RNA, 22 nt, Human
aauccauucagaaauugggaau

SEQ ID NO: 98788 - RNA, 20 nt, Human
aauccauuggucuauauguc

SEQ ID NO: 98789 - RNA, 22 nt, Human
aaucccuuuuucauuuaauaga

SEQ ID NO: 98790 - RNA, 22 nt, Human
aauccugaggcaaagagaugag

SEQ ID NO: 98791 - RNA, 20 nt, Human
aauccugggacagaggcagg

SEQ ID NO: 98792 - RNA, 22 nt, Human
aauccuguagauucuaauuccu

SEQ ID NO: 98793 - RNA, 21 nt, Human
aauccuuaaugaggaguuggu

SEQ ID NO: 98794 - RNA, 22 nt, Human
aaucgcuugguaauuuuaaaag

SEQ ID NO: 98795 - RNA, 22 nt, Human
aaucuaacuucauagcugauuu

SEQ ID NO: 98796 - RNA, 22 nt, Human
aaucuacauuucaguuuugccc

SEQ ID NO: 98797 - RNA, 22 nt, Human
aaucuagagaacuguggggcag

SEQ ID NO: 98798 - RNA, 22 nt, Human
aaucuagaguucccagcauaaa

SEQ ID NO: 98799 - RNA, 22 nt, Human
aaucuaguuucagacuuugagu

SEQ ID NO: 98800 - RNA, 22 nt, Human
aaucucucugggguucaguccu

SEQ ID NO: 98801 - RNA, 22 nt, Human
aaucucuugguucagaagccuc

SEQ ID NO: 98802 - RNA, 22 nt, Human
aaucugaauauuuauguguauu

SEQ ID NO: 98803 - RNA, 22 nt, Human
aaucugauguuaaauguaaggu

SEQ ID NO: 98804 - RNA, 22 nt, Human
aaucuggaauauuugcauugua

SEQ ID NO: 98805 - RNA, 22 nt, Human
aaucuggacuugucugugaaga

SEQ ID NO: 98806 - RNA, 22 nt, Human
aaucuggcauguaagcuuagag

SEQ ID NO: 98807 - RNA, 22 nt, Human
aaucuguuuaacagauuucugu

SEQ ID NO: 98808 - RNA, 22 nt, Human
aaucuguuuuaucauuuguuac

SEQ ID NO: 98809 - RNA, 22 nt, Human
aaucuguuuucugccucuauga

SEQ ID NO: 98810 - RNA, 22 nt, Human
aaucuuaagcugaauucucucc

SEQ ID NO: 98811 - RNA, 22 nt, Human
aaucuucacagagaaaauuagg

SEQ ID NO: 98812 - RNA, 22 nt, Human
aaucuucauaaaaaucuaguag

SEQ ID NO: 98813 - RNA, 22 nt, Human
aaucuucauguccucucuaauu

SEQ ID NO: 98814 - RNA, 22 nt, Human
acaggcaccuccagggguaugu

SEQ ID NO: 98815 - RNA, 22 nt, Human
acaggcaccugccaccacaucu

SEQ ID NO: 98816 - RNA, 22 nt, Human
acaggcacugucaagucaugaa

SEQ ID NO: 98817 - RNA, 19 nt, Human
acaggcagaauugggugug

SEQ ID NO: 98818 - RNA, 22 nt, Human
acaggcagagaacucagccaga

SEQ ID NO: 98819 - RNA, 17 nt, Human
acaggcagaucaccuga

SEQ ID NO: 98820 - RNA, 14 nt, Human
acaggcagauuucu

SEQ ID NO: 98821 - RNA, 22 nt, Human
acaggcagcccucucccugguu

SEQ ID NO: 98822 - RNA, 22 nt, Human
acaggcaggagcuccccauucc

SEQ ID NO: 98823 - RNA, 22 nt, Human
acaggcagguaauuuacauauu

SEQ ID NO: 98824 - RNA, 22 nt, Human
acaggcagugauuuccucuggu

SEQ ID NO: 98825 - RNA, 22 nt, Human
acaggcagugggccagauuugu

SEQ ID NO: 98826 - RNA, 22 nt, Human
acaggcauugggauggagguug

SEQ ID NO: 98827 - RNA, 22 nt, Human
acaggccucccauccggagccc

SEQ ID NO: 98828 - RNA, 22 nt, Human
acaggccugagauuuugcauuu

SEQ ID NO: 98829 - RNA, 17 nt, Human
acaggccugcuugcacu

SEQ ID NO: 98830 - RNA, 22 nt, Human
acaggcucacagucauuucauu

SEQ ID NO: 98831 - RNA, 21 nt, Human
acaggcucacgauccauuucu

SEQ ID NO: 98832 - RNA, 22 nt, Human
acaggcucgugcgcgcacgugu

SEQ ID NO: 98833 - RNA, 22 nt, Human
acaggcucucuauugagugcag

SEQ ID NO: 98834 - RNA, 22 nt, Human
acaggcucuggggcaggauggc

SEQ ID NO: 98835 - RNA, 23 nt, Human
acaggcucuuaaucagugcuccu

SEQ ID NO: 98836 - RNA, 22 nt, Human
acaggcugaaaguuaaguucug

SEQ ID NO: 98837 - RNA, 22 nt, Human
acaggcuggugguccuggccau

SEQ ID NO: 98838 - RNA, 22 nt, Human
acaggcuuacuguuucauaggg

SEQ ID NO: 98839 - RNA, 22 nt, Human
acaggcuuagggcuugggcccg

SEQ ID NO: 98840 - RNA, 22 nt, Human
acaggcuucagauguauuaacu

SEQ ID NO: 98841 - RNA, 22 nt, Human
acaggcuuggggcucagacaga

SEQ ID NO: 98842 - RNA, 22 nt, Human
acaggcuuuauguagugacuua

SEQ ID NO: 98843 - RNA, 22 nt, Human
acaggcuuuuacggauaucuuu

SEQ ID NO: 98844 - RNA, 22 nt, Human
acagggaacaggaauauacaaa

SEQ ID NO: 98845 - RNA, 22 nt, Human
acagggaagcucaggggcucug

SEQ ID NO: 98846 - RNA, 22 nt, Human
acagggaaggacaugacuuggc

SEQ ID NO: 98847 - RNA, 22 nt, Human
acagggaaguucugcaacagga

SEQ ID NO: 98848 - RNA, 22 nt, Human
acagggagaugggugaaagcgg

SEQ ID NO: 98849 - RNA, 22 nt, Human
acagggcagagggcaguuggua

SEQ ID NO: 98850 - RNA, 19 nt, Human
acagggcagcaauaggaua

SEQ ID NO: 98851 - RNA, 22 nt, Human
acagggccaaguaaacccuacc

SEQ ID NO: 98852 - RNA, 22 nt, Human
acagggccauuaucuguucuag

SEQ ID NO: 98853 - RNA, 22 nt, Human
acagggccauuggaggauuaua

SEQ ID NO: 98854 - RNA, 22 nt, Human
acagggcuauauuccucagagc

SEQ ID NO: 98855 - RNA, 23 nt, Human
acagggcuggcagcugcaagacc

SEQ ID NO: 98856 - RNA, 23 nt, Human
acagggcuguccagggcuagguc

SEQ ID NO: 98857 - RNA, 22 nt, Human
acagggcuuagaacuuggccuc

SEQ ID NO: 98858 - RNA, 22 nt, Human
acagggcuuguugaaagcggag

SEQ ID NO: 98859 - RNA, 22 nt, Human
acaggggauugauuggaagucu

SEQ ID NO: 98860 - RNA, 22 nt, Human
acaggggcaagggcucacggcc

SEQ ID NO: 98861 - RNA, 20 nt, Human
acaggggcagcacaauaaug

SEQ ID NO: 98862 - RNA, 22 nt, Human
acaggggugcauggugcauggu

SEQ ID NO: 98863 - RNA, 22 nt, Human
acagguccuuauaagagcacuc

SEQ ID NO: 98864 - RNA, 22 nt, Human
acaggucuccagagugagagga

SEQ ID NO: 98865 - RNA, 22 nt, Human
acaggucugcaguaacugggaa

SEQ ID NO: 98866 - RNA, 22 nt, Human
acaggugagggguucuaggcug

SEQ ID NO: 98867 - RNA, 22 nt, Human
acaggugauucaggcucuggga

SEQ ID NO: 98868 - RNA, 22 nt, Human
acagguggcacugcuguuacuc

SEQ ID NO: 98869 - RNA, 22 nt, Human
acagguggcuuccauuuucuaa

SEQ ID NO: 98870 - RNA, 22 nt, Human
acagguggggaggcugagguuc

SEQ ID NO: 98871 - RNA, 22 nt, Human
acagguggggcacuuggagccu

SEQ ID NO: 98872 - RNA, 22 nt, Human
acagguggucuuugcuccuuuu

SEQ ID NO: 98873 - RNA, 22 nt, Human
acagguguaaaacccaggaugg

SEQ ID NO: 98874 - RNA, 22 nt, Human
acagguguaauuugcccgaggu

SEQ ID NO: 98875 - RNA, 22 nt, Human
acagguguacaaugcaugacag

SEQ ID NO: 98876 - RNA, 22 nt, Human
acagguguagaaaacagauuau

SEQ ID NO: 98877 - RNA, 22 nt, Human
acagguguagguacauuugcau

SEQ ID NO: 98878 - RNA, 22 nt, Human
acagguguccucacagggggug

SEQ ID NO: 98879 - RNA, 22 nt, Human
acaggugucuaaggcagacagc

SEQ ID NO: 98880 - RNA, 22 nt, Human
acaggugucugcaaguuacugg

SEQ ID NO: 98881 - RNA, 22 nt, Human
acaggugugcggaaagcuguga

SEQ ID NO: 98882 - RNA, 22 nt, Human
acaggugugggcugggcucuga

SEQ ID NO: 98883 - RNA, 22 nt, Human
acagguguuuuggaggaugauu

SEQ ID NO: 98884 - RNA, 22 nt, Human
acagguuugcagcuuguuaccu

SEQ ID NO: 98885 - RNA, 22 nt, Human
acagguuuuggacuccagauuu

SEQ ID NO: 98886 - RNA, 22 nt, Human
acaguaaaucaacagaauaucu

SEQ ID NO: 98887 - RNA, 22 nt, Human
acaguaaccucuccucugaagg

SEQ ID NO: 98888 - RNA, 22 nt, Human
acaguaauaaguguuggugagg

SEQ ID NO: 98889 - RNA, 22 nt, Human
acaguaaugcauacaaguuagu

SEQ ID NO: 98890 - RNA, 22 nt, Human
acaguaauuaaacauucugauu

SEQ ID NO: 98891 - RNA, 22 nt, Human
acaguaauugugaacuuaacgu

SEQ ID NO: 98892 - RNA, 22 nt, Human
acaguaauuuauugaacaccuu

SEQ ID NO: 98893 - RNA, 22 nt, Human
acaguacaagcaaugcauuuuu

SEQ ID NO: 98894 - RNA, 22 nt, Human
acaguacaccacuguguacagu

SEQ ID NO: 98895 - RNA, 22 nt, Human
acaguacucuaaugaaaagugc

SEQ ID NO: 98896 - RNA, 21 nt, Human
acaguacuugagaucuuuuga

SEQ ID NO: 98897 - RNA, 20 nt, Human
acaguagaagggauuucaaa

SEQ ID NO: 98898 - RNA, 21 nt, Human
acaguagcugacacacaguuu

SEQ ID NO: 98899 - RNA, 22 nt, Human
acaguagucuuaauuucaugua

SEQ ID NO: 98900 - RNA, 22 nt, Human
acaguauagggcuuauauugua

SEQ ID NO: 98901 - RNA, 22 nt, Human
acaguauauauagucuaaaagc

SEQ ID NO: 98902 - RNA, 22 nt, Human
acaguauauuuucuugauuguu

SEQ ID NO: 98903 - RNA, 22 nt, Human
acaguaugaaugcagaauguag

SEQ ID NO: 98904 - RNA, 22 nt, Human
acagucaggccgagaugggccu

SEQ ID NO: 98905 - RNA, 22 nt, Human
acagucauagcagccuuuguua

SEQ ID NO: 98906 - RNA, 22 nt, Human
acaguccuuguuucggucagau

SEQ ID NO: 98907 - RNA, 23 nt, Human
acagucguagguauccuuuuccu

SEQ ID NO: 98908 - RNA, 22 nt, Human
acagucuaaucuuguguucugu

SEQ ID NO: 98909 - RNA, 22 nt, Human
acagucuacuaaacaucaucag

SEQ ID NO: 98910 - RNA, 22 nt, Human
acagucuggaagcagggggcaa

SEQ ID NO: 98911 - RNA, 22 nt, Human
acagucugucccccaggugcua

SEQ ID NO: 98912 - RNA, 22 nt, Human
acacugauuguagucuguggug

SEQ ID NO: 98913 - RNA, 22 nt, Human
acacugcauuucaacaaggccc

SEQ ID NO: 98914 - RNA, 22 nt, Human
acacugcuaaacaguaaagaug

SEQ ID NO: 98915 - RNA, 22 nt, Human
acacugcuucucuggcagagcc

SEQ ID NO: 98916 - RNA, 22 nt, Human
acacuggaggguccagggaugu

SEQ ID NO: 98917 - RNA, 22 nt, Human
acacugguaggaagagauggcu

SEQ ID NO: 98918 - RNA, 22 nt, Human
acacuguaaauugagugcguga

SEQ ID NO: 98919 - RNA, 19 nt, Human
acacuguagauauagcuau

SEQ ID NO: 98920 - RNA, 22 nt, Human
acacuguagcugagggcaugcg

SEQ ID NO: 98921 - RNA, 22 nt, Human
acacugucugggacucaggagu

SEQ ID NO: 98922 - RNA, 22 nt, Human
acacugugcuuagaugcugaac

SEQ ID NO: 98923 - RNA, 22 nt, Human
acagucuuucaguaauaauacu

SEQ ID NO: 98924 - RNA, 22 nt, Human
acagucuuugcaaaguccuggu

SEQ ID NO: 98925 - RNA, 22 nt, Human
acagugaaaauaauaucuucaa

SEQ ID NO: 98926 - RNA, 22 nt, Human
acagugaauaagacaugugcuu

SEQ ID NO: 98927 - RNA, 22 nt, Human
acagugaaugcccaagaaaagu

SEQ ID NO: 98928 - RNA, 22 nt, Human
acagugacaacccaggauaaau

SEQ ID NO: 98929 - RNA, 22 nt, Human
acagugauauuuuuacucaaau

SEQ ID NO: 98930 - RNA, 22 nt, Human
acagugaucaguuacugucugu

SEQ ID NO: 98931 - RNA, 22 nt, Human
acagugcaaauaggacugucuu

SEQ ID NO: 98932 - RNA, 20 nt, Human
acagugcauggggggacagc

SEQ ID NO: 98933 - RNA, 22 nt, Human
acagugcuaaacacuucuugaa

SEQ ID NO: 98934 - RNA, 22 nt, Human
acagugcuaucaauagcuagaa

SEQ ID NO: 98935 - RNA, 22 nt, Human
acagugcuggcuacaacccugg

SEQ ID NO: 98936 - RNA, 22 nt, Human
acagugcugucaaauauguuuu

SEQ ID NO: 98937 - RNA, 22 nt, Human
acagugcugucuaucucacuaa

SEQ ID NO: 98938 - RNA, 22 nt, Human
acagugcugugcagucugcccu

SEQ ID NO: 98939 - RNA, 22 nt, Human
acaguggaaagaacauggauuu

SEQ ID NO: 98940 - RNA, 22 nt, Human
acaguggagcucagaugaaaau

SEQ ID NO: 98941 - RNA, 22 nt, Human
acaguggauauauuaaaugaga

SEQ ID NO: 98942 - RNA, 22 nt, Human
acaguggcaucuacuuaaucug

SEQ ID NO: 98943 - RNA, 22 nt, Human
acaguggccucaaagaaagaga

SEQ ID NO: 98944 - RNA, 22 nt, Human
acaguggcucaugccugucauc

SEQ ID NO: 98945 - RNA, 20 nt, Human
acaguggguggggagcacug

SEQ ID NO: 98946 - RNA, 22 nt, Human
acaguguacuccuuuaccggag

SEQ ID NO: 98947 - RNA, 22 nt, Human
acaguguagcaugguagcaaug

SEQ ID NO: 98948 - RNA, 22 nt, Human
acaguguauauuguuuaucugg

SEQ ID NO: 98949 - RNA, 22 nt, Human
acaguguccuuguggucccugu

SEQ ID NO: 98950 - RNA, 22 nt, Human
acagugucugacacauuguagc

SEQ ID NO: 98951 - RNA, 19 nt, Human
acagugucuguauauaaau

SEQ ID NO: 98952 - RNA, 22 nt, Human
acagugugacaauugugucaga

SEQ ID NO: 98953 - RNA, 22 nt, Human
acagugugaugggccugccuga

SEQ ID NO: 98954 - RNA, 22 nt, Human
acagugugcaagaaauggggga

SEQ ID NO: 98955 - RNA, 22 nt, Human
acaguguggugauggcacuugc

SEQ ID NO: 98956 - RNA, 22 nt, Human
acaguguuacuugauaguguau

SEQ ID NO: 98957 - RNA, 20 nt, Human
acaguguuaguuaucaucuc

SEQ ID NO: 98958 - RNA, 22 nt, Human
acaguguuauuucugaguaaug

SEQ ID NO: 98959 - RNA, 22 nt, Human
acaguguucacuaagguuagcu

SEQ ID NO: 98960 - RNA, 22 nt, Human
acaguguucugcuuuuuaaucc

SEQ ID NO: 98961 - RNA, 20 nt, Human
acaguguuuuugaguagagc

SEQ ID NO: 98962 - RNA, 22 nt, Human
acaguuaaggaaauggagguuc

SEQ ID NO: 98963 - RNA, 22 nt, Human
acaguuaauaugugacagaacu

SEQ ID NO: 98964 - RNA, 22 nt, Human
acaguuaaucaaauggcauaug

SEQ ID NO: 98965 - RNA, 22 nt, Human
acaguuaauuaacauuaagggg

SEQ ID NO: 98966 - RNA, 22 nt, Human
acaguuaccacuuagcaguuac

SEQ ID NO: 98967 - RNA, 22 nt, Human
acaguuagggacuauaaucauu

SEQ ID NO: 98968 - RNA, 22 nt, Human
acaguuaguugaggaguguuug

SEQ ID NO: 98969 - RNA, 22 nt, Human
acaguuaucuuugaaauagaga

SEQ ID NO: 98970 - RNA, 22 nt, Human
acaguucuaaaucuuggauaau

SEQ ID NO: 98971 - RNA, 22 nt, Human
acaguucuccagugccuuugag

SEQ ID NO: 98972 - RNA, 22 nt, Human
acaguucucuugucacuuccuc

SEQ ID NO: 98973 - RNA, 22 nt, Human
acaguucugccuguuugagaag

SEQ ID NO: 98974 - RNA, 22 nt, Human
acaguucuuuguuuauagcuug

SEQ ID NO: 98975 - RNA, 22 nt, Human
acaguugggcuguagcaugcuu

SEQ ID NO: 98976 - RNA, 22 nt, Human
acaguugguuaacacaaauauu

SEQ ID NO: 98977 - RNA, 22 nt, Human
acaguuuacuggccuugccguu

SEQ ID NO: 98978 - RNA, 22 nt, Human
acaguuuaggaugagagaacac

SEQ ID NO: 98979 - RNA, 20 nt, Human
acaguuuauccaguuagcag

SEQ ID NO: 98980 - RNA, 22 nt, Human
acaguuuaugccucugagccug

SEQ ID NO: 98981 - RNA, 22 nt, Human
acaguuucccccuagggcagca

SEQ ID NO: 98982 - RNA, 22 nt, Human
acaguuugagaaccacuagccu

SEQ ID NO: 98983 - RNA, 22 nt, Human
acaguuuggcgugauugauagu

SEQ ID NO: 98984 - RNA, 21 nt, Human
acaguuuuaaggagcacaugg

SEQ ID NO: 98985 - RNA, 23 nt, Human
acauaaacagaaggugugcuucc

SEQ ID NO: 98986 - RNA, 22 nt, Human
acauaaaggugacuaacaucuu

SEQ ID NO: 98987 - RNA, 22 nt, Human
acauaaauagauuauugggagg

SEQ ID NO: 98988 - RNA, 22 nt, Human
acauaaugagcucuuuauaaau

SEQ ID NO: 98989 - RNA, 22 nt, Human
acauaauggacaauaaugcauc

SEQ ID NO: 98990 - RNA, 22 nt, Human
acauacacaagcguacaugaac

SEQ ID NO: 98991 - RNA, 17 nt, Human
acauacacuggugaaca

SEQ ID NO: 98992 - RNA, 22 nt, Human
acauacauauguuuaaaugcau

SEQ ID NO: 98993 - RNA, 22 nt, Human
acauacuaugaauacauguguc

SEQ ID NO: 98994 - RNA, 22 nt, Human
acauacuuuuuaaaagauugcu

SEQ ID NO: 98995 - RNA, 22 nt, Human
acauagcacgucucaauuugga

SEQ ID NO: 98996 - RNA, 22 nt, Human
acauagcauaaagaaugacucu

SEQ ID NO: 98997 - RNA, 22 nt, Human
acauaguuagcuuagagauacu

SEQ ID NO: 98998 - RNA, 22 nt, Human
acauauaagggaucagugacag

SEQ ID NO: 98999 - RNA, 22 nt, Human
acauauauguaaaguacuuugu

SEQ ID NO: 99000 - RNA, 22 nt, Human
acauaucugugagguuuuguug

SEQ ID NO: 99001 - RNA, 22 nt, Human
acauaucuguuagacacagcag

SEQ ID NO: 99002 - RNA, 22 nt, Human
acauaugcucaucugcauuccc

SEQ ID NO: 99003 - RNA, 19 nt, Human
acauauguggauauacaug

SEQ ID NO: 99004 - RNA, 22 nt, Human
acauauuccauuguugggaucc

SEQ ID NO: 99005 - RNA, 22 nt, Human
acauauugagcucuaaaaguac

SEQ ID NO: 99006 - RNA, 22 nt, Human
acauauuuugaaagcuuucuaa

SEQ ID NO: 99007 - RNA, 22 nt, Human
acaucagugcucuugguucuug

SEQ ID NO: 99008 - RNA, 18 nt, Human
acaucaguuaccaggcca

SEQ ID NO: 99009 - RNA, 22 nt, Human
acaucauucagggccucguugg

SEQ ID NO: 99010 - RNA, 22 nt, Human
acauccaucuucugccugugaa

SEQ ID NO: 99011 - RNA, 22 nt, Human
acauccauuugcuuuauuugcu

SEQ ID NO: 99012 - RNA, 22 nt, Human
acauccauuugucagcucuuga

SEQ ID NO: 99013 - RNA, 22 nt, Human
acauccauuuuguucaaaagca

SEQ ID NO: 99014 - RNA, 22 nt, Human
acauccucggggaaaggcacug

SEQ ID NO: 99015 - RNA, 22 nt, Human
acaucgauggauagagcuugcu

SEQ ID NO: 99016 - RNA, 22 nt, Human
acaucuaagccaauuuugauuu

SEQ ID NO: 99017 - RNA, 22 nt, Human
acaucucagaacugaguaaccg

SEQ ID NO: 99018 - RNA, 22 nt, Human
acaucucuccaaaggaaggugc

SEQ ID NO: 99019 - RNA, 22 nt, Human
acaucucuuauaaacucucuga

SEQ ID NO: 99020 - RNA, 20 nt, Human
acaucugagaaacacuuaaa

SEQ ID NO: 99021 - RNA, 22 nt, Human
acaucuguuugagaaaaagaag

SEQ ID NO: 99022 - RNA, 22 nt, Human
acaucuuuuuggaaacggcuga

SEQ ID NO: 99023 - RNA, 22 nt, Human
acaucuuuuuucucuaauugug

SEQ ID NO: 99024 - RNA, 20 nt, Human
acaugaaaggaaacaggaaa

SEQ ID NO: 99025 - RNA, 22 nt, Human
acaugaaaugcagccuguaacc

SEQ ID NO: 99026 - RNA, 22 nt, Human
acaugaacauuauaucagcaag

SEQ ID NO: 99027 - RNA, 22 nt, Human
acaugaagcaagaaagaugcua

SEQ ID NO: 99028 - RNA, 22 nt, Human
acaugacaaaaugcacaggauu

SEQ ID NO: 99029 - RNA, 19 nt, Human
acaugacaacaggggaggc

SEQ ID NO: 99030 - RNA, 22 nt, Human
acaugggcaucuaugaggcucu

SEQ ID NO: 99031 - RNA, 22 nt, Human
acaugguauguauuuuaagaga

SEQ ID NO: 99032 - RNA, 22 nt, Human
auguauguaguguacauauaca

SEQ ID NO: 99033 - RNA, 22 nt, Human
auguaugucugcauacacauac

SEQ ID NO: 99034 - RNA, 22 nt, Human
auguauuugcgagguuaggaaa

SEQ ID NO: 99035 - RNA, 22 nt, Human
auguauuuugccagacugucuc

SEQ ID NO: 99036 - RNA, 22 nt, Human
augucaaacacaacaccagugg

SEQ ID NO: 99037 - RNA, 22 nt, Human
augucaaaugcugcaaacucau

SEQ ID NO: 99038 - RNA, 22 nt, Human
augucaauuuguucucucgaag

SEQ ID NO: 99039 - RNA, 22 nt, Human
augucacagcucccauuccucc

SEQ ID NO: 99040 - RNA, 22 nt, Human
augucacaguugcaacaugaau

SEQ ID NO: 99041 - RNA, 22 nt, Human
augucacaugagagcgcagcac

SEQ ID NO: 99042 - RNA, 22 nt, Human
augucacauuggagcugcugga

SEQ ID NO: 99043 - RNA, 22 nt, Human
augucagauccucagaaagucu

SEQ ID NO: 99044 - RNA, 22 nt, Human
augucaguaguuucuuugaguu

SEQ ID NO: 99045 - RNA, 22 nt, Human
augucagucuuucugucucaga

SEQ ID NO: 99046 - RNA, 22 nt, Human
augucauauuacuaaugcuggc

SEQ ID NO: 99047 - RNA, 22 nt, Human
augucaugaaaugcuacuaacu

SEQ ID NO: 99048 - RNA, 22 nt, Human
augucauuaaaauugugcugca

SEQ ID NO: 99049 - RNA, 23 nt, Human
auguccaaagggauucgucugau

SEQ ID NO: 99050 - RNA, 22 nt, Human
auguccaagucacagauuuuca

SEQ ID NO: 99051 - RNA, 22 nt, Human
auguccagaaggguccccuguu

SEQ ID NO: 99052 - RNA, 22 nt, Human
auguccagagaacauuugcuuu

SEQ ID NO: 99053 - RNA, 22 nt, Human
auguccagccaaccacuggauu

SEQ ID NO: 99054 - RNA, 22 nt, Human
auguccagcucaugauacuauc

SEQ ID NO: 99055 - RNA, 23 nt, Human
auguccaguuuacuucaggauga

SEQ ID NO: 99056 - RNA, 22 nt, Human
auguccaguuucuacacacaua

SEQ ID NO: 99057 - RNA, 22 nt, Human
augucccaagauacagcuagag

SEQ ID NO: 99058 - RNA, 23 nt, Human
auguccccuucuugaugccuggc

SEQ ID NO: 99059 - RNA, 22 nt, Human
augucccuugucugugaugucu

SEQ ID NO: 99060 - RNA, 21 nt, Human
auguccuggcuaccagcgcag

SEQ ID NO: 99061 - RNA, 22 nt, Human
auguccugggcuggguuauguu

SEQ ID NO: 99062 - RNA, 22 nt, Human
auguccugguccuccaccaugg

SEQ ID NO: 99063 - RNA, 22 nt, Human
auguccuuccauuuugaucugu

SEQ ID NO: 99064 - RNA, 22 nt, Human
auguccuuccugagaucccugu

SEQ ID NO: 99065 - RNA, 22 nt, Human
auguccuuugcuucucuggucc

SEQ ID NO: 99066 - RNA, 22 nt, Human
auguccuuuguaucccuaggca

SEQ ID NO: 99067 - RNA, 22 nt, Human
auguccuuuuauuuaaagcagg

SEQ ID NO: 99068 - RNA, 22 nt, Human
augucgauaggagugccaucgg

SEQ ID NO: 99069 - RNA, 22 nt, Human
augucuauauagucaauaauca

SEQ ID NO: 99070 - RNA, 22 nt, Human
augucuauggaauuuccacaca

SEQ ID NO: 99071 - RNA, 22 nt, Human
augucuauguucuuuacugugu

SEQ ID NO: 99072 - RNA, 22 nt, Human
augucucucagguuuaacuuua

SEQ ID NO: 99073 - RNA, 22 nt, Human
augucucugccccagagagcuu

SEQ ID NO: 99074 - RNA, 19 nt, Human
augucucuguagcacauac

SEQ ID NO: 99075 - RNA, 22 nt, Human
augucugauaaauaaugcauaa

SEQ ID NO: 99076 - RNA, 22 nt, Human
augucugucuuuguacuccaca

SEQ ID NO: 99077 - RNA, 22 nt, Human
augucuguuaaucgacccuaau

SEQ ID NO: 99078 - RNA, 22 nt, Human
augucuguuugcugagcccggc

SEQ ID NO: 99079 - RNA, 22 nt, Human
augucuucucuguagguaaauu

SEQ ID NO: 99080 - RNA, 22 nt, Human
augucuuucaaauucugccuag

SEQ ID NO: 99081 - RNA, 22 nt, Human
augucuuucucacagccaguuc

SEQ ID NO: 99082 - RNA, 22 nt, Human
augucuuucucauacaagccca

SEQ ID NO: 99083 - RNA, 22 nt, Human
augucuuucuuauggucuguug

SEQ ID NO: 99084 - RNA, 22 nt, Human
augucuuucuugugucccaaga

SEQ ID NO: 99085 - RNA, 22 nt, Human
augucuuugccauaguucauau

SEQ ID NO: 99086 - RNA, 22 nt, Human
augugaaacugaagcauccaua

SEQ ID NO: 99087 - RNA, 22 nt, Human
augugaaagagguguucagugg

SEQ ID NO: 99088 - RNA, 22 nt, Human
augugaaauagcuggauaugaa

SEQ ID NO: 99089 - RNA, 22 nt, Human
augugaagcuugugcuaacaua

SEQ ID NO: 99090 - RNA, 22 nt, Human
augugaaugcaguuaucuauaa

SEQ ID NO: 99091 - RNA, 22 nt, Human
augugacaguguuugacagaug

SEQ ID NO: 99092 - RNA, 22 nt, Human
augugagaauaacucaaaacaa

SEQ ID NO: 99093 - RNA, 22 nt, Human
augugaggaagaaagagguaag

SEQ ID NO: 99094 - RNA, 22 nt, Human
augugagggcucaggcugacug

SEQ ID NO: 99095 - RNA, 21 nt, Human
augugauuauaugacuuuuac

SEQ ID NO: 99096 - RNA, 22 nt, Human
augugauucccacugaaucacu

SEQ ID NO: 99097 - RNA, 22 nt, Human
augugcaacuucagcagaaagg

SEQ ID NO: 99098 - RNA, 18 nt, Human
augugcaauuuuguauuu

SEQ ID NO: 99099 - RNA, 22 nt, Human
augugcagccuuucuucaucau

SEQ ID NO: 99100 - RNA, 22 nt, Human
augugcagcuuuucuagagaag

SEQ ID NO: 99101 - RNA, 22 nt, Human
augugcaugcacuuacaugugu

SEQ ID NO: 99102 - RNA, 22 nt, Human
augugcccucuuagagucucug

SEQ ID NO: 99103 - RNA, 22 nt, Human
augugcguguguacauauauau

SEQ ID NO: 99104 - RNA, 20 nt, Human
augugcugggcaauauguua

SEQ ID NO: 99105 - RNA, 22 nt, Human
augugcuguaauccauugaagg

SEQ ID NO: 99106 - RNA, 22 nt, Human
augugcuucauaaucuucucau

SEQ ID NO: 99107 - RNA, 22 nt, Human
augugcuucauucuacaugaca

SEQ ID NO: 99108 - RNA, 22 nt, Human
augugcuugaagccucagagaa

SEQ ID NO: 99109 - RNA, 22 nt, Human
augugcuuggaaaagcaguggu

SEQ ID NO: 99110 - RNA, 22 nt, Human
augugcuuuauuaaguaaaaau

SEQ ID NO: 99111 - RNA, 22 nt, Human
augugcuuucuuuccaaggggc

SEQ ID NO: 99112 - RNA, 22 nt, Human
augugcuuugcuggaaauguca

SEQ ID NO: 99113 - RNA, 22 nt, Human
augugcuuuuacuccccagagu

SEQ ID NO: 99114 - RNA, 22 nt, Human
auguggauggaagucagauagc

SEQ ID NO: 99115 - RNA, 22 nt, Human
auguggcacagcacaguaagag

SEQ ID NO: 99116 - RNA, 22 nt, Human
auguggcaccgaucuuuagcca

SEQ ID NO: 99117 - RNA, 22 nt, Human
auguggcccagcggucaggcug

SEQ ID NO: 99118 - RNA, 22 nt, Human
auguggccuaguauagaaauga

SEQ ID NO: 99119 - RNA, 22 nt, Human
auguggccuuaaugacagcagc

SEQ ID NO: 99120 - RNA, 22 nt, Human
auguggcugaucgcagagcucu

SEQ ID NO: 99121 - RNA, 22 nt, Human
caggcaggcugcuuuuuguuca

SEQ ID NO: 99122 - RNA, 22 nt, Human
caggcagggagccacuguauaa

SEQ ID NO: 99123 - RNA, 22 nt, Human
caggcagugugacgcuaggguu

SEQ ID NO: 99124 - RNA, 22 nt, Human
caggcauagguaggauguuucu

SEQ ID NO: 99125 - RNA, 22 nt, Human
caggcaugagccaggccccucc

SEQ ID NO: 99126 - RNA, 22 nt, Human
caggcaugaugggaagugccug

SEQ ID NO: 99127 - RNA, 22 nt, Human
caggcaugcuucugucugggca

SEQ ID NO: 99128 - RNA, 22 nt, Human
caggcauggaaaagcccagagg

SEQ ID NO: 99129 - RNA, 22 nt, Human
caggcauggagaggcagagacu

SEQ ID NO: 99130 - RNA, 22 nt, Human
caggcauggaucuggaaucauu

SEQ ID NO: 99131 - RNA, 22 nt, Human
caggcauggugagaacucagcc

SEQ ID NO: 99132 - RNA, 22 nt, Human
caggcauugccauuccuccaga

SEQ ID NO: 99133 - RNA, 21 nt, Human
caggccaaaagguucaacauu

SEQ ID NO: 99134 - RNA, 22 nt, Human
caggccaaagaucccauugaca

SEQ ID NO: 99135 - RNA, 22 nt, Human
caggccaccagauacaugcccc

SEQ ID NO: 99136 - RNA, 22 nt, Human
caggccagcggcccgcgcguuc

SEQ ID NO: 99137 - RNA, 22 nt, Human
caggccagcguccagaacaagc

SEQ ID NO: 99138 - RNA, 22 nt, Human
caggccaggguugagaagagaa

SEQ ID NO: 99139 - RNA, 22 nt, Human
caggccaggugcucuagaauca

SEQ ID NO: 99140 - RNA, 22 nt, Human
caggccagguggcaggcaaaac

SEQ ID NO: 99141 - RNA, 20 nt, Human
augugucugccucuguguuc

SEQ ID NO: 99142 - RNA, 22 nt, Human
augugucuggcauggcucuauu

SEQ ID NO: 99143 - RNA, 22 nt, Human
augugucugugggcacacacac

SEQ ID NO: 99144 - RNA, 22 nt, Human
augugucuugcggcaguuggua

SEQ ID NO: 99145 - RNA, 18 nt, Human
augugucuuucuuguuug

SEQ ID NO: 99146 - RNA, 22 nt, Human
augugugcaaugcuauuuuggc

SEQ ID NO: 99147 - RNA, 22 nt, Human
augugugcuacaggugugggaa

SEQ ID NO: 99148 - RNA, 23 nt, Human
augugugggaggucagagagcca

SEQ ID NO: 99149 - RNA, 22 nt, Human
augugugugcauuucucucccu

SEQ ID NO: 99150 - RNA, 22 nt, Human
auguguguguauauacacacau

SEQ ID NO: 99151 - RNA, 22 nt, Human
auguguguguuuaauccucaaa

SEQ ID NO: 99152 - RNA, 22 nt, Human
auguguuaaugagcaaugaccu

SEQ ID NO: 99153 - RNA, 22 nt, Human
auguguuaguuugugauuauac

SEQ ID NO: 99154 - RNA, 22 nt, Human
auguguucaguugacaggagca

SEQ ID NO: 99155 - RNA, 22 nt, Human
auguguucgcuagauugcuguu

SEQ ID NO: 99156 - RNA, 22 nt, Human
auguguucugaggcagaugacu

SEQ ID NO: 99157 - RNA, 22 nt, Human
auguuaaaagucugagugggag

SEQ ID NO: 99158 - RNA, 22 nt, Human
auguuaacugaagccauucucg

SEQ ID NO: 99159 - RNA, 22 nt, Human
auguuaagaaugcagacaaaug

SEQ ID NO: 99160 - RNA, 22 nt, Human
auguuaaguguaccauauauca

SEQ ID NO: 99161 - RNA, 22 nt, Human
auguuacaacccugaggagccg

SEQ ID NO: 99162 - RNA, 22 nt, Human
auguuacagaaagcaaagauga

SEQ ID NO: 99163 - RNA, 23 nt, Human
auguuaccaauggaggaaauugg

SEQ ID NO: 99164 - RNA, 22 nt, Human
auguuaccucuauuagaauauu

SEQ ID NO: 99165 - RNA, 23 nt, Human
auguuacuuaaccucucugugcc

SEQ ID NO: 99166 - RNA, 22 nt, Human
auguuauaaauagagacacugg

SEQ ID NO: 99167 - RNA, 22 nt, Human
auguuauaguuauaaaaugagg

SEQ ID NO: 99168 - RNA, 22 nt, Human
auguuauggcucaaacauuugg

SEQ ID NO: 99169 - RNA, 22 nt, Human
auguuauuaaaguacagauucu

SEQ ID NO: 99170 - RNA, 23 nt, Human
auguuauuauuagcagucuugcc

SEQ ID NO: 99171 - RNA, 22 nt, Human
auguuauuucugaaagaucauu

SEQ ID NO: 99172 - RNA, 22 nt, Human
auguucaacaguuugcacacau

SEQ ID NO: 99173 - RNA, 22 nt, Human
auguucauagcaucgguauuca

SEQ ID NO: 99174 - RNA, 18 nt, Human
auguucauauuuuuaggg

SEQ ID NO: 99175 - RNA, 22 nt, Human
auguucaucaacacauuacaag

SEQ ID NO: 99176 - RNA, 22 nt, Human
auguucaucuacaaggcauugu

SEQ ID NO: 99177 - RNA, 22 nt, Human
auguucauguggcugcuggcag

SEQ ID NO: 99178 - RNA, 18 nt, Human
auguuccugaggagaggu

SEQ ID NO: 99179 - RNA, 22 nt, Human
auguucuacagauggaaagggg

SEQ ID NO: 99180 - RNA, 22 nt, Human
auguucugaaucaagcaacucu

SEQ ID NO: 99181 - RNA, 22 nt, Human
auguucuguuucuuaaucuuga

SEQ ID NO: 99182 - RNA, 22 nt, Human
auguucuuagcaaaguacuugc

SEQ ID NO: 99183 - RNA, 20 nt, Human
auguucuucauuuaauguuc

SEQ ID NO: 99184 - RNA, 22 nt, Human
auguucuucuaucuuuauuaaa

SEQ ID NO: 99185 - RNA, 22 nt, Human
auguucuuguucaaaugucagu

SEQ ID NO: 99186 - RNA, 22 nt, Human
auguugaguggaugaacaaaca

SEQ ID NO: 99187 - RNA, 22 nt, Human
auguuguguuugacuguuaccc

SEQ ID NO: 99188 - RNA, 20 nt, Human
auguuguuuacucauagcau

SEQ ID NO: 99189 - RNA, 22 nt, Human
auguuuaagaaagucuuccaua

SEQ ID NO: 99190 - RNA, 22 nt, Human
auguuuaaggaacugguuugcu

SEQ ID NO: 99191 - RNA, 19 nt, Human
auguuuacacucaggggcu

SEQ ID NO: 99192 - RNA, 22 nt, Human
auguuuacagaggaagugccuc

SEQ ID NO: 99193 - RNA, 22 nt, Human
auguuuaugaccuccauaagga

SEQ ID NO: 99194 - RNA, 22 nt, Human
auguuucaaauauauagaguug

SEQ ID NO: 99195 - RNA, 22 nt, Human
auguuucaccagcaaauuaccu

SEQ ID NO: 99196 - RNA, 22 nt, Human
auguuucagauacagaucaaau

SEQ ID NO: 99197 - RNA, 22 nt, Human
auguuucagggugauagaaggu

SEQ ID NO: 99198 - RNA, 22 nt, Human
auguuucauccacuggccuuuc

SEQ ID NO: 99199 - RNA, 22 nt, Human
auguuucauuuagauaucaggc

SEQ ID NO: 99200 - RNA, 22 nt, Human
auguuucuacagcguccacuga

SEQ ID NO: 99201 - RNA, 22 nt, Human
auguuucuagagcuuuguccca

SEQ ID NO: 99202 - RNA, 22 nt, Human
auguuucuaguuguaugucacu

SEQ ID NO: 99203 - RNA, 22 nt, Human
auguuucuauaaagaaguuugg

SEQ ID NO: 99204 - RNA, 22 nt, Human
auguuucucacuguuucucuau

SEQ ID NO: 99205 - RNA, 22 nt, Human
auguuucugaaguuuacagaua

SEQ ID NO: 99206 - RNA, 22 nt, Human
auguuucuguccuacgagauaa

SEQ ID NO: 99207 - RNA, 19 nt, Human
auguuugcuugaguaauaa

SEQ ID NO: 99208 - RNA, 22 nt, Human
auguuugucccugacauccucu

SEQ ID NO: 99209 - RNA, 22 nt, Human
auguuuguugaacaucuacugc

SEQ ID NO: 99210 - RNA, 22 nt, Human
auguuuguugaaugaagaaagg

SEQ ID NO: 99211 - RNA, 22 nt, Human
auguuuuaaauauguguguaaa

SEQ ID NO: 99212 - RNA, 22 nt, Human
auguuuuauguuccacucaagg

SEQ ID NO: 99213 - RNA, 22 nt, Human
auguuuuccccaaaugaucuuc

SEQ ID NO: 99214 - RNA, 22 nt, Human
auguuuucuccauguuaugcuu

SEQ ID NO: 99215 - RNA, 22 nt, Human
auuaaauguuggacguauacau

SEQ ID NO: 99216 - RNA, 22 nt, Human
auuaaauuaaguggcuaauuua

SEQ ID NO: 99217 - RNA, 22 nt, Human
auuaaauuggaucugcauaguu

SEQ ID NO: 99218 - RNA, 22 nt, Human
auuaacacuuuggagucugcuc

SEQ ID NO: 99219 - RNA, 22 nt, Human
auuaacuguacuuucuaauuuu

SEQ ID NO: 99220 - RNA, 22 nt, Human
auuaacuuuugaucaguguggu

SEQ ID NO: 99221 - RNA, 22 nt, Human
auuaagagccuacuaugugccg

SEQ ID NO: 99222 - RNA, 22 nt, Human
auuaaggauuauacucuccuuu

SEQ ID NO: 99223 - RNA, 22 nt, Human
auuaaggcucccauuuccaauu

SEQ ID NO: 99224 - RNA, 22 nt, Human
auuaaggcugcacuggccuuaa

SEQ ID NO: 99225 - RNA, 22 nt, Human
auuaagugugacaugcugcucu

SEQ ID NO: 99226 - RNA, 22 nt, Human
auuaauauccugcuggcuaaau

SEQ ID NO: 99227 - RNA, 22 nt, Human
auuaaucauuucugcauuaucu

SEQ ID NO: 99228 - RNA, 22 nt, Human
auuaaugacgcagauaauaauu

SEQ ID NO: 99229 - RNA, 22 nt, Human
auuacaacuacauaaucucaga

SEQ ID NO: 99230 - RNA, 22 nt, Human
auuacaacuggaauggugcugg

SEQ ID NO: 99231 - RNA, 22 nt, Human
auuacaauaagguuuauuugua

SEQ ID NO: 99232 - RNA, 22 nt, Human
auuacacagcgguuacuacuag

SEQ ID NO: 99233 - RNA, 22 nt, Human
auuacagaaauauggucaaaga

SEQ ID NO: 99234 - RNA, 22 nt, Human
auuacagauagacuuugaagcu

SEQ ID NO: 99235 - RNA, 22 nt, Human
auuacagauuauaaauuugagc

SEQ ID NO: 99236 - RNA, 22 nt, Human
auuacauauguuggcaacauuu

SEQ ID NO: 99237 - RNA, 23 nt, Human
auuaccagccugacaccaacaaa

SEQ ID NO: 99238 - RNA, 22 nt, Human
auuacagaagauaugcucaaca

SEQ ID NO: 99239 - RNA, 22 nt, Human
auuacaguggguaaacagaauu

SEQ ID NO: 99240 - RNA, 23 nt, Human
auuacaguuaauuacaacaucuu

SEQ ID NO: 99241 - RNA, 22 nt, Human
auuacaguucuacacauccuuu

SEQ ID NO: 99242 - RNA, 22 nt, Human
auuacaugagagaauguaaaua

SEQ ID NO: 99243 - RNA, 23 nt, Human
auuacaugagcaaauauagcuau

SEQ ID NO: 99244 - RNA, 22 nt, Human
auuacuagauugucaagauuua

SEQ ID NO: 99245 - RNA, 22 nt, Human
auuacuaugauuugaucauuac

SEQ ID NO: 99246 - RNA, 22 nt, Human
auuacugagcaacggucauuuc

SEQ ID NO: 99247 - RNA, 22 nt, Human
auuacugagcuuguagcugcau

SEQ ID NO: 99248 - RNA, 22 nt, Human
auuacuguuggcaaagucuuau

SEQ ID NO: 99249 - RNA, 23 nt, Human
auuagaaaggcuuucuggugaaa

SEQ ID NO: 99250 - RNA, 22 nt, Human
caaaggcuucaucucagagcag

SEQ ID NO: 99251 - RNA, 22 nt, Human
caaaggcuuugcuaugaugcau

SEQ ID NO: 99252 - RNA, 22 nt, Human
caaagguuaugaaccacuugua

SEQ ID NO: 99253 - RNA, 22 nt, Human
caaaguaauuacgguuuuggcc

SEQ ID NO: 99254 - RNA, 22 nt, Human
caaaguaauuuggagauauaua

SEQ ID NO: 99255 - RNA, 19 nt, Human
caaaguaccuggcacagug

SEQ ID NO: 99256 - RNA, 22 nt, Human
caaagucagcugccagucccaa

SEQ ID NO: 99257 - RNA, 22 nt, Human
caaagucagggaagaguggcug

SEQ ID NO: 99258 - RNA, 22 nt, Human
caaaguccauaguuuacaauag

SEQ ID NO: 99259 - RNA, 22 nt, Human
caaaguccuagaacagugcuug

SEQ ID NO: 99260 - RNA, 22 nt, Human
caaagucuuggugaucaacuuu

SEQ ID NO: 99261 - RNA, 22 nt, Human
caaagugagagaauggcagaaa

SEQ ID NO: 99262 - RNA, 22 nt, Human
caaagugaguuauaaacaucuu

SEQ ID NO: 99263 - RNA, 22 nt, Human
caaagugcugagauuacaggua

SEQ ID NO: 99264 - RNA, 22 nt, Human
caaagugcuggaauuacaggug

SEQ ID NO: 99265 - RNA, 22 nt, Human
caaaguggaggcucuggggcca

SEQ ID NO: 99266 - RNA, 22 nt, Human
caaaguugcaguuaugugauua

SEQ ID NO: 99267 - RNA, 22 nt, Human
caaaguuuggcucucaugacau

SEQ ID NO: 99268 - RNA, 22 nt, Human
caaauaagaaccacaggggagu

SEQ ID NO: 99269 - RNA, 22 nt, Human
caaauacaaauacgggcagcuu

SEQ ID NO: 99270 - RNA, 22 nt, Human
caaauacuaaacauaagauuuu

SEQ ID NO: 99271 - RNA, 22 nt, Human
caaauacugagcacgcaaucaa

SEQ ID NO: 99272 - RNA, 18 nt, Human
caaauacuguugucuuau

SEQ ID NO: 99273 - RNA, 22 nt, Human
caaauagacucuagaauuuauu

SEQ ID NO: 99274 - RNA, 22 nt, Human
caaauagugaaacagauggggg

SEQ ID NO: 99275 - RNA, 22 nt, Human
caaauauuccagguacaucccu

SEQ ID NO: 99276 - RNA, 22 nt, Human
cauuguugugagaucaagcagu

SEQ ID NO: 99277 - RNA, 18 nt, Human
cauuguuuccagaagacc

SEQ ID NO: 99278 - RNA, 22 nt, Human
cauuuaauagaugcuguuucag

SEQ ID NO: 99279 - RNA, 22 nt, Human
cauuuaauccauagaggaaugu

SEQ ID NO: 99280 - RNA, 22 nt, Human
cauuuaauccucacaagccuau

SEQ ID NO: 99281 - RNA, 22 nt, Human
cauuuaaucuggcucaugagca

SEQ ID NO: 99282 - RNA, 22 nt, Human
cauuuaaugccuuugccaucca

SEQ ID NO: 99283 - RNA, 22 nt, Human
cauuuacacuucuaaccacaag

SEQ ID NO: 99284 - RNA, 22 nt, Human
cauuuacagcagacugaugaaa

SEQ ID NO: 99285 - RNA, 22 nt, Human
cauuuacagugagaguuuuuac

SEQ ID NO: 99286 - RNA, 22 nt, Human
cauuuacuguugaaucccuagc

SEQ ID NO: 99287 - RNA, 22 nt, Human
cauuuagagaguaaaaauuagc

SEQ ID NO: 99288 - RNA, 22 nt, Human
cauuuaguuauacuaaaacauu

SEQ ID NO: 99289 - RNA, 22 nt, Human
cauuuauauaaaauguccagaa

SEQ ID NO: 99290 - RNA, 22 nt, Human
cauuuauuaguuaguucgaugu

SEQ ID NO: 99291 - RNA, 22 nt, Human
cauuuauucucagauccuuguc

SEQ ID NO: 99292 - RNA, 22 nt, Human
cauuuauugaguggccacagug

SEQ ID NO: 99293 - RNA, 22 nt, Human
cauuucaaacaguuacagcugc

SEQ ID NO: 99294 - RNA, 22 nt, Human
cauuucaagcauugacuucuau

SEQ ID NO: 99295 - RNA, 22 nt, Human
cauuucaauuauuugcucuucu

SEQ ID NO: 99296 - RNA, 22 nt, Human
cauuucaccuuagagaauuauu

SEQ ID NO: 99297 - RNA, 21 nt, Human
cauuucaguaaggaagccugu

SEQ ID NO: 99298 - RNA, 22 nt, Human
cauuucccccucauguugcagc

SEQ ID NO: 99299 - RNA, 22 nt, Human
cauuuccugucuggaggucaaa

SEQ ID NO: 99300 - RNA, 21 nt, Human
cauuucuaagccuggcuauag

SEQ ID NO: 99301 - RNA, 22 nt, Human
cauuucuccugggugauaaauu

SEQ ID NO: 99302 - RNA, 22 nt, Human
cauuugaacuaauaacugugcu

SEQ ID NO: 99303 - RNA, 22 nt, Human
cauuugaaugagauugcuguaa

SEQ ID NO: 99304 - RNA, 21 nt, Human
cauuugaucccucaucaggau

SEQ ID NO: 99305 - RNA, 22 nt, Human
cauuugauccucacaacaaucu

SEQ ID NO: 99306 - RNA, 23 nt, Human
cauuugauccucacaauaaaugg

SEQ ID NO: 99307 - RNA, 22 nt, Human
cauuugcucugguuccuucugg

SEQ ID NO: 99308 - RNA, 22 nt, Human
cauuugguguuaggcauguuaa

SEQ ID NO: 99309 - RNA, 22 nt, Human
cauuuguacauguugucuucuu

SEQ ID NO: 99310 - RNA, 22 nt, Human
cauuuguacuguucaaugucau

SEQ ID NO: 99311 - RNA, 22 nt, Human
cauuuguaguuaaaaaugucuc

SEQ ID NO: 99312 - RNA, 22 nt, Human
cauuuguauguuccuccuuagg

SEQ ID NO: 99313 - RNA, 22 nt, Human
cauuugucucuaggaagugagg

SEQ ID NO: 99314 - RNA, 22 nt, Human
cauuuguguccgucccaguucu

SEQ ID NO: 99315 - RNA, 22 nt, Human
cauuuguuaaccaguguggauu

SEQ ID NO: 99316 - RNA, 22 nt, Human
cauuuguuuagaagucuuuaua

SEQ ID NO: 99317 - RNA, 22 nt, Human
cauuuuacugacucuugaauua

SEQ ID NO: 99318 - RNA, 22 nt, Human
cauuuuauccucugggaagcua

SEQ ID NO: 99319 - RNA, 19 nt, Human
cauuuucucauugugcccc

SEQ ID NO: 99320 - RNA, 22 nt, Human
cauuuugugcacacguggaguu

SEQ ID NO: 99321 - RNA, 22 nt, Human
ccaaaaagcucagagauauguu

SEQ ID NO: 99322 - RNA, 22 nt, Human
ccaaaaaguacauuuaggugug

SEQ ID NO: 99323 - RNA, 19 nt, Human
ccaaaagcaauuccaagua

SEQ ID NO: 99324 - RNA, 22 nt, Human
ccaaaauaacagcccaauucac

SEQ ID NO: 99325 - RNA, 22 nt, Human
ccaaaauauuagugcuuaagua

SEQ ID NO: 99326 - RNA, 22 nt, Human
ccaaacugggccagucagcugu

SEQ ID NO: 99327 - RNA, 22 nt, Human
ccaaagcaagucacaugaucaa

SEQ ID NO: 99328 - RNA, 21 nt, Human
ccaaaggcuauguaucuucug

SEQ ID NO: 99329 - RNA, 22 nt, Human
ccaaaguccacaguuuacauua

SEQ ID NO: 99330 - RNA, 22 nt, Human
ccaaaguccauaguuuacauua

SEQ ID NO: 99331 - RNA, 22 nt, Human
ccaaagugcugagauuacaggu

SEQ ID NO: 99332 - RNA, 22 nt, Human
ccaaaguuuuuauaguuagcau

SEQ ID NO: 99333 - RNA, 22 nt, Human
ccaaaugugccuguuucaacaa

SEQ ID NO: 99334 - RNA, 22 nt, Human
ccaacaccaucugagcuccagc

SEQ ID NO: 99335 - RNA, 21 nt, Human
ccaagacucccaucuaguggu

SEQ ID NO: 99336 - RNA, 21 nt, Human
ccaagagcaaugcuaaggaga

SEQ ID NO: 99337 - RNA, 22 nt, Human
ccaagaggggaagggccgcagc

SEQ ID NO: 99338 - RNA, 22 nt, Human
ccaagagguaauacgagauauc

SEQ ID NO: 99339 - RNA, 22 nt, Human
ccaagaguaaauucaugaugcc

SEQ ID NO: 99340 - RNA, 22 nt, Human
ccaagaguucaagagugaacca

SEQ ID NO: 99341 - RNA, 22 nt, Human
ccaagauaaucugugaaaaauc

SEQ ID NO: 99342 - RNA, 22 nt, Human
ccaagcaaauaaucacccacua

SEQ ID NO: 99343 - RNA, 22 nt, Human
ccaagcaaggcuaauucacuug

SEQ ID NO: 99344 - RNA, 22 nt, Human
ccaagcaggauauucuguguca

SEQ ID NO: 99345 - RNA, 22 nt, Human
ccaagcaugggguucaguagga

SEQ ID NO: 99346 - RNA, 22 nt, Human
ccaagccuagucgugcacacag

SEQ ID NO: 99347 - RNA, 22 nt, Human
ccaagcugccugaggcaaauuu

SEQ ID NO: 99348 - RNA, 23 nt, Human
ccaagcuucuaaugcugcugagc

SEQ ID NO: 99349 - RNA, 22 nt, Human
ccaagcuuucgaucaaccagaa

SEQ ID NO: 99350 - RNA, 22 nt, Human
ccaaggacguacaggagauaau

SEQ ID NO: 99351 - RNA, 22 nt, Human
ccaaggagcaaggcucaacaag

SEQ ID NO: 99352 - RNA, 22 nt, Human
ccaaggaguagagcaggaagcu

SEQ ID NO: 99353 - RNA, 20 nt, Human
ccaaggauuggcaagcagca

SEQ ID NO: 99354 - RNA, 22 nt, Human
ccaaggccaucagguagguccu

SEQ ID NO: 99355 - RNA, 22 nt, Human
ccaaggccccuguggucuagcc

SEQ ID NO: 99356 - RNA, 22 nt, Human
ccaaggcuggagggcuuaugua

SEQ ID NO: 99357 - RNA, 22 nt, Human
ccaaggcugucauucaguagcu

SEQ ID NO: 99358 - RNA, 22 nt, Human
ccaaggcuuccugaccuacaug

SEQ ID NO: 99359 - RNA, 22 nt, Human
caagauuuguauugggccucug

SEQ ID NO: 99360 - RNA, 22 nt, Human
caagcagaagccucaggggcau

SEQ ID NO: 99361 - RNA, 22 nt, Human
caagcagagacuagauagcugu

SEQ ID NO: 99362 - RNA, 22 nt, Human
caagcaggccuggcuggaccgu

SEQ ID NO: 99363 - RNA, 22 nt, Human
caagcagucagccugaagacug

SEQ ID NO: 99364 - RNA, 22 nt, Human
caagcaugucuucuuaagcaau

SEQ ID NO: 99365 - RNA, 21 nt, Human
caagccagaccaauagcagcc

SEQ ID NO: 99366 - RNA, 22 nt, Human
caagccaguuuguaguucucuc

SEQ ID NO: 99367 - RNA, 23 nt, Human
caagcugcaguuugguugguggg

SEQ ID NO: 99368 - RNA, 22 nt, Human
caagcuggaguuccucagagug

SEQ ID NO: 99369 - RNA, 22 nt, Human
caagcugggugcgggcaguaua

SEQ ID NO: 99370 - RNA, 22 nt, Human
caaggaaaacagaugaucaaca

SEQ ID NO: 99371 - RNA, 22 nt, Human
caaggagaaaacggcuucugaa

SEQ ID NO: 99372 - RNA, 22 nt, Human
caaggagaguaauugaaugaga

SEQ ID NO: 99373 - RNA, 22 nt, Human
caaggaggaagaugcaggggac

SEQ ID NO: 99374 - RNA, 22 nt, Human
caaggaggcagugggacuugaa

SEQ ID NO: 99375 - RNA, 22 nt, Human
caaggcagcguuccuuucugga

SEQ ID NO: 99376 - RNA, 22 nt, Human
caaggcaggaagccugucuuau

SEQ ID NO: 99377 - RNA, 22 nt, Human
caaggcagucccuacucccugc

SEQ ID NO: 99378 - RNA, 22 nt, Human
caaggcaugcacaagaaggggg

SEQ ID NO: 99379 - RNA, 22 nt, Human
caaggcauucuugcagguaggg

SEQ ID NO: 99380 - RNA, 22 nt, Human
caaggccagggaauuuuucugg

SEQ ID NO: 99381 - RNA, 22 nt, Human
caaggccaguucaccaagggca

SEQ ID NO: 99382 - RNA, 22 nt, Human
caaggcuacccuuucaccaaaa

SEQ ID NO: 99383 - RNA, 22 nt, Human
caaggcuagaaguccaacauca

SEQ ID NO: 99384 - RNA, 22 nt, Human
caaggcuagcaagcaguaguca

SEQ ID NO: 99385 - RNA, 22 nt, Human
caaggcugagaaauucugcccu

SEQ ID NO: 99386 - RNA, 22 nt, Human
caaggcugcaaaacuacauggg

SEQ ID NO: 99387 - RNA, 22 nt, Human
caaggcugcugcgggucgcacc

SEQ ID NO: 99388 - RNA, 22 nt, Human
caaggcugucuccagcuuccaa

SEQ ID NO: 99389 - RNA, 22 nt, Human
caaggcuuaucagccaggagcc

SEQ ID NO: 99390 - RNA, 22 nt, Human
caagggaaggcuaagggcaaca

SEQ ID NO: 99391 - RNA, 22 nt, Human
caagggaccugagauggucucu

SEQ ID NO: 99392 - RNA, 22 nt, Human
caagggaguugcugcaugcagg

SEQ ID NO: 99393 - RNA, 22 nt, Human
auuuuguuaucagggcuuugca

SEQ ID NO: 99394 - RNA, 22 nt, Human
auuuuguugaugguggaguagc

SEQ ID NO: 99395 - RNA, 20 nt, Human
auuuuguuuauguuccucuc

SEQ ID NO: 99396 - RNA, 22 nt, Human
auuuuuccaauuaggauaaaga

SEQ ID NO: 99397 - RNA, 22 nt, Human
auuuuuccaugauacuuaucug

SEQ ID NO: 99398 - RNA, 22 nt, Human
auuuuuccauucucuguuagua

SEQ ID NO: 99399 - RNA, 19 nt, Human
auuuuucuuccucugugca

SEQ ID NO: 99400 - RNA, 22 nt, Human
auuuuugagcugugaacauagc

SEQ ID NO: 99401 - RNA, 22 nt, Human
caaaaagcuuagguaacaagcc

SEQ ID NO: 99402 - RNA, 22 nt, Human
caaaacauucagagagcucacu

SEQ ID NO: 99403 - RNA, 22 nt, Human
caaaaccaagaacauucauuuc

SEQ ID NO: 99404 - RNA, 22 nt, Human
caaaacuaucaggcucaaagcu

SEQ ID NO: 99405 - RNA, 21 nt, Human
caaaacuuaggugacuuagga

SEQ ID NO: 99406 - RNA, 22 nt, Human
caaaagaagcucuuggggcuag

SEQ ID NO: 99407 - RNA, 22 nt, Human
caaaagauacuugcaucuaacu

SEQ ID NO: 99408 - RNA, 22 nt, Human
caaaagcaaagucccugaaugu

SEQ ID NO: 99409 - RNA, 22 nt, Human
caaaagcaguucuaucugaguu

SEQ ID NO: 99410 - RNA, 22 nt, Human
caaaaguaauugugguuuucac

SEQ ID NO: 99411 - RNA, 22 nt, Human
caaaaguagugaaguuguacau

SEQ ID NO: 99412 - RNA, 22 nt, Human
caaaagucuuccuauucucuua

SEQ ID NO: 99413 - RNA, 22 nt, Human
caaaauaccacgacuuguuuua

SEQ ID NO: 99414 - RNA, 22 nt, Human
caaaaugaugugauuuuauugu

SEQ ID NO: 99415 - RNA, 23 nt, Human
caaaaugcuaugugcccaaugca

SEQ ID NO: 99416 - RNA, 22 nt, Human
caaaauuagaaaugcagcuguu

SEQ ID NO: 99417 - RNA, 22 nt, Human
caaacauugcuaccagagguuu

SEQ ID NO: 99418 - RNA, 17 nt, Human
caaaccaguaagacugc

SEQ ID NO: 99419 - RNA, 22 nt, Human
caaaccuguuagaggucaucgu

SEQ ID NO: 99420 - RNA, 22 nt, Human
caaacuugucuaucuaggaauc

SEQ ID NO: 99421 - RNA, 22 nt, Human
caaacuuucaguuauaacauga

SEQ ID NO: 99422 - RNA, 22 nt, Human
caaagaaggaacuauaauccca

SEQ ID NO: 99423 - RNA, 20 nt, Human
caaagacaugcuaggggugg

SEQ ID NO: 99424 - RNA, 22 nt, Human
caaagaccauguggccugaaaa

SEQ ID NO: 99425 - RNA, 22 nt, Human
caaagacugcauaacacaugaa

SEQ ID NO: 99426 - RNA, 22 nt, Human
caaagagcuguucagugucgcu

SEQ ID NO: 99427 - RNA, 22 nt, Human
caaagagguuuugagggcagcu

SEQ ID NO: 99428 - RNA, 22 nt, Human
caaagaguccagcacccucucc

SEQ ID NO: 99429 - RNA, 22 nt, Human
caaagaugucauugguaagaca

SEQ ID NO: 99430 - RNA, 22 nt, Human
caaagcaaggcucaguuugaac

SEQ ID NO: 99431 - RNA, 22 nt, Human
caaagcaccacaaaccagguga

SEQ ID NO: 99432 - RNA, 22 nt, Human
caaagcagccugcaguguggac

SEQ ID NO: 99433 - RNA, 22 nt, Human
caaagcagcggauugggauagu

SEQ ID NO: 99434 - RNA, 22 nt, Human
caaagcaggaagcuccugacag

SEQ ID NO: 99435 - RNA, 18 nt, Human
caaagcaggugacagugu

SEQ ID NO: 99436 - RNA, 22 nt, Human
caaagccauagaguagauaaga

SEQ ID NO: 99437 - RNA, 22 nt, Human
caaagcccagaggccucacuuu

SEQ ID NO: 99438 - RNA, 22 nt, Human
caaagcccuggaaagaugaaga

SEQ ID NO: 99439 - RNA, 22 nt, Human
caaagccucugauuucacuugu

SEQ ID NO: 99440 - RNA, 22 nt, Human
caaagcugacgaggucagcauc

SEQ ID NO: 99441 - RNA, 22 nt, Human
caaagcugauacucagcaagua

SEQ ID NO: 99442 - RNA, 22 nt, Human
caaagcuggaaaaggaggcugg

SEQ ID NO: 99443 - RNA, 22 nt, Human
caaagcuguaccccaaccuaug

SEQ ID NO: 99444 - RNA, 21 nt, Human
caaaggacuguagcucacuga

SEQ ID NO: 99445 - RNA, 22 nt, Human
caaaggcaggcccccugugcag

SEQ ID NO: 99446 - RNA, 22 nt, Human
caaaggcugccacuguggcugu

SEQ ID NO: 99447 - RNA, 22 nt, Human
caaagggaaacgcagugucaag

SEQ ID NO: 99448 - RNA, 17 nt, Human
caaagggagcccaccaa

SEQ ID NO: 99449 - RNA, 22 nt, Human
caaagggcucuagacucagcag

SEQ ID NO: 99450 - RNA, 22 nt, Human
caaagguauaaguuaauauaca

SEQ ID NO: 99451 - RNA, 22 nt, Human
caaagguauucucauuuuggaa

SEQ ID NO: 99452 - RNA, 22 nt, Human
caaagguuucacaguagcccau

SEQ ID NO: 99453 - RNA, 22 nt, Human
caaaguacagugcuuccuggga

SEQ ID NO: 99454 - RNA, 22 nt, Human
caaaguaucaacucccacacug

SEQ ID NO: 99455 - RNA, 22 nt, Human
caaagucauaaaacuuguaagu

SEQ ID NO: 99456 - RNA, 22 nt, Human
caaagucuucaguugauucuga

SEQ ID NO: 99457 - RNA, 22 nt, Human
caaagugcagaaggaacugggu

SEQ ID NO: 99458 - RNA, 22 nt, Human
caaagugcugggauuauaggca

SEQ ID NO: 99459 - RNA, 22 nt, Human
caaauaauuacuauccucacuu

SEQ ID NO: 99460 - RNA, 22 nt, Human
caaauacuuacugaaccugugc

SEQ ID NO: 99461 - RNA, 22 nt, Human
caaauacuuuuagccuauugag

SEQ ID NO: 99462 - RNA, 22 nt, Human
caaauagguaaauguaugcugu

SEQ ID NO: 99463 - RNA, 22 nt, Human
caaauaguaugagcaaugauuc

SEQ ID NO: 99464 - RNA, 22 nt, Human
caaauaguuuuucauguauuau

SEQ ID NO: 99465 - RNA, 20 nt, Human
caaaucacagguaauugcaa

SEQ ID NO: 99466 - RNA, 22 nt, Human
caaauccagaucccagucguag

SEQ ID NO: 99467 - RNA, 22 nt, Human
caaaucuccuuaaagguaaaau

SEQ ID NO: 99468 - RNA, 22 nt, Human
cagaaauauuuauugagugaca

SEQ ID NO: 99469 - RNA, 18 nt, Human
cagaaaucacaccagcac

SEQ ID NO: 99470 - RNA, 23 nt, Human
cagaaaugacaguaagcacccug

SEQ ID NO: 99471 - RNA, 22 nt, Human
cagaaauguuuauauguggugu

SEQ ID NO: 99472 - RNA, 22 nt, Human
cagaacagaaucguguggugag

SEQ ID NO: 99473 - RNA, 22 nt, Human
cagaacagagccugaaucucuc

SEQ ID NO: 99474 - RNA, 22 nt, Human
cagaacagggcccaaggggucg

SEQ ID NO: 99475 - RNA, 22 nt, Human
cagaacauuccaugugcccugc

SEQ ID NO: 99476 - RNA, 22 nt, Human
cagaaccugagagcacaauccu

SEQ ID NO: 99477 - RNA, 22 nt, Human
cagaacuggccuuucaucaguc

SEQ ID NO: 99478 - RNA, 22 nt, Human
cagaacuucauauugacguuag

SEQ ID NO: 99479 - RNA, 22 nt, Human
cagaacuuggcaaagccgacug

SEQ ID NO: 99480 - RNA, 22 nt, Human
cagaagaaaucauuaucuggac

SEQ ID NO: 99481 - RNA, 22 nt, Human
cagaagacagcuguuucacucg

SEQ ID NO: 99482 - RNA, 22 nt, Human
cagaagacgccugggugcugua

SEQ ID NO: 99483 - RNA, 22 nt, Human
cagaagaggacuggguagcuca

SEQ ID NO: 99484 - RNA, 22 nt, Human
cagaagaugcuuuguaaaauga

SEQ ID NO: 99485 - RNA, 22 nt, Human
cagaagcacauguuuacaugua

SEQ ID NO: 99486 - RNA, 22 nt, Human
cagaagcagaacacuagauuua

SEQ ID NO: 99487 - RNA, 22 nt, Human
cagaagcauugacuccuugcuc

SEQ ID NO: 99488 - RNA, 22 nt, Human
cagaagcugcagugaucuggga

SEQ ID NO: 99489 - RNA, 22 nt, Human
cagaaggagggggcaagcccug

SEQ ID NO: 99490 - RNA, 22 nt, Human
cagaaggcauagaugaaggccu

SEQ ID NO: 99491 - RNA, 18 nt, Human
cagaaguccuucaaggcc

SEQ ID NO: 99492 - RNA, 22 nt, Human
cagaagugcaauuuaaauuagg

SEQ ID NO: 99493 - RNA, 22 nt, Human
cagaagugguauuaauuagauu

SEQ ID NO: 99494 - RNA, 22 nt, Human
cagaaguuagacuucaacuaau

SEQ ID NO: 99495 - RNA, 22 nt, Human
cagaaguugccacaugacccuu

SEQ ID NO: 99496 - RNA, 22 nt, Human
cagaaguuugacauguuuagcu

SEQ ID NO: 99497 - RNA, 22 nt, Human
cagaaguuuugcucucuugggu

SEQ ID NO: 99498 - RNA, 22 nt, Human
cagaauaaaagucccaaggcau

SEQ ID NO: 99499 - RNA, 22 nt, Human
cagaauaauauuggucucauag

SEQ ID NO: 99500 - RNA, 22 nt, Human
cagaaucucugggaguggauca

SEQ ID NO: 99501 - RNA, 22 nt, Human
cagaaucuucuuaauuggcaca

SEQ ID NO: 99502 - RNA, 21 nt, Human
cagaaugcauucuuugaagga

SEQ ID NO: 99503 - RNA, 22 nt, Human
cagaauguauaugaucuaaggu

SEQ ID NO: 99504 - RNA, 22 nt, Human
cagaauucgaaugagcagaauc

SEQ ID NO: 99505 - RNA, 22 nt, Human
cagaauuuaaguggauuauucu

SEQ ID NO: 99506 - RNA, 22 nt, Human
cagaauuuuucacucaaucuuc

SEQ ID NO: 99507 - RNA, 22 nt, Human
cagacaaggccaucuuucauuu

SEQ ID NO: 99508 - RNA, 22 nt, Human
cagacaauuaaguaauugaggu

SEQ ID NO: 99509 - RNA, 22 nt, Human
cagacacaccaggcccauucug

SEQ ID NO: 99510 - RNA, 22 nt, Human
cagacacagauaugcauauggc

SEQ ID NO: 99511 - RNA, 18 nt, Human
cagacacucugcucugca

SEQ ID NO: 99512 - RNA, 22 nt, Human
cagacacugcagcagucuccca

SEQ ID NO: 99513 - RNA, 22 nt, Human
cagacacuuauugagcaaguac

SEQ ID NO: 99514 - RNA, 22 nt, Human
cagacagaaggcuccuugaggu

SEQ ID NO: 99515 - RNA, 22 nt, Human
cagacagacagccguggccacc

SEQ ID NO: 99516 - RNA, 22 nt, Human
cagacagaccugcaagggcaca

SEQ ID NO: 99517 - RNA, 22 nt, Human
cagacagaggcuguaugagggc

SEQ ID NO: 99518 - RNA, 22 nt, Human
cagacagcaggccuggaugugu

SEQ ID NO: 99519 - RNA, 22 nt, Human
cagacagcugcuuucuugcugu

SEQ ID NO: 99520 - RNA, 22 nt, Human
cagacaggcuagccagacucac

SEQ ID NO: 99521 - RNA, 22 nt, Human
cagacaucacacucagauugca

SEQ ID NO: 99522 - RNA, 20 nt, Human
cagacaucuccaaaucugug

SEQ ID NO: 99523 - RNA, 22 nt, Human
cagacauggcgccaagugcuag

SEQ ID NO: 99524 - RNA, 22 nt, Human
cagaccagaaggaagccgacaa

SEQ ID NO: 99525 - RNA, 22 nt, Human
cagaccagccauuugccucuuc

SEQ ID NO: 99526 - RNA, 23 nt, Human
cagacccucaauccacuuguuuu

SEQ ID NO: 99527 - RNA, 17 nt, Human
cagaccucugugaagcc

SEQ ID NO: 99528 - RNA, 22 nt, Human
cagaccugagguugaguaccag

SEQ ID NO: 99529 - RNA, 22 nt, Human
cagaccuggggccugggagccc

SEQ ID NO: 99530 - RNA, 22 nt, Human
cagacucucuuccaugcaucac

SEQ ID NO: 99531 - RNA, 22 nt, Human
cagacugaaaaucccugguagu

SEQ ID NO: 99532 - RNA, 22 nt, Human
cagacuggccacaucugcacug

SEQ ID NO: 99533 - RNA, 22 nt, Human
cagacuguggcuucuuggaggg

SEQ ID NO: 99534 - RNA, 22 nt, Human
cagacuuucaaggagugaaggc

SEQ ID NO: 99535 - RNA, 22 nt, Human
cagagaaagaagcccauucauu

SEQ ID NO: 99536 - RNA, 22 nt, Human
cagagaacaaagcugaggguuu

SEQ ID NO: 99537 - RNA, 22 nt, Human
cagagaacuccaguggcuggcg

SEQ ID NO: 99538 - RNA, 22 nt, Human
cagagaauaaaagggcauuccu

SEQ ID NO: 99539 - RNA, 22 nt, Human
cagagacaaccugguagagaaa

SEQ ID NO: 99540 - RNA, 22 nt, Human
cccaagggugcccagcagagga

SEQ ID NO: 99541 - RNA, 22 nt, Human
cccaaguuaaaauucagugcuc

SEQ ID NO: 99542 - RNA, 22 nt, Human
cccaaguuaauuuguagcugaa

SEQ ID NO: 99543 - RNA, 22 nt, Human
cccaauaaaauucauuuucauu

SEQ ID NO: 99544 - RNA, 22 nt, Human
cccacacacauuuaugauagga

SEQ ID NO: 99545 - RNA, 22 nt, Human
cccacacacuggcugcugccaa

SEQ ID NO: 99546 - RNA, 22 nt, Human
cccacacauuuuucacuuaccg

SEQ ID NO: 99547 - RNA, 22 nt, Human
cccacacucugagaaaugcuga

SEQ ID NO: 99548 - RNA, 22 nt, Human
cccacaggacgggcuaaagagu

SEQ ID NO: 99549 - RNA, 22 nt, Human
cccacaggcaggggcagagaca

SEQ ID NO: 99550 - RNA, 22 nt, Human
cccacagguggaagccucggaa

SEQ ID NO: 99551 - RNA, 22 nt, Human
cccacaucucacaucuuggaac

SEQ ID NO: 99552 - RNA, 22 nt, Human
cccacauuuuugagucuucauc

SEQ ID NO: 99553 - RNA, 22 nt, Human
cccaccacgugcuuugcuggag

SEQ ID NO: 99554 - RNA, 22 nt, Human
cccaccaguacagaugguagau

SEQ ID NO: 99555 - RNA, 22 nt, Human
cccacccagccuggcugagggg

SEQ ID NO: 99556 - RNA, 22 nt, Human
cccacccagcugagccgcucac

SEQ ID NO: 99557 - RNA, 22 nt, Human
cccacccucaagggugucuaua

SEQ ID NO: 99558 - RNA, 22 nt, Human
cccaccucucagagagccuugc

SEQ ID NO: 99559 - RNA, 22 nt, Human
cccacguugaaccgcuuacaga

SEQ ID NO: 99560 - RNA, 22 nt, Human
cccacuccuggagcuagggcuc

SEQ ID NO: 99561 - RNA, 22 nt, Human
cccacuguugccucaaauauca

SEQ ID NO: 99562 - RNA, 22 nt, Human
cccagacagucaagaggccugc

SEQ ID NO: 99563 - RNA, 22 nt, Human
cccagagaaccuucugugccac

SEQ ID NO: 99564 - RNA, 19 nt, Human
cccagagagaucucuugcc

SEQ ID NO: 99565 - RNA, 22 nt, Human
cccagagaucuuguccuuucca

SEQ ID NO: 99566 - RNA, 22 nt, Human
cccagagaugggaggugaucgg

SEQ ID NO: 99567 - RNA, 23 nt, Human
cccagagcacagccuccagaugc

SEQ ID NO: 99568 - RNA, 19 nt, Human
cccagagcauccugaacuu

SEQ ID NO: 99569 - RNA, 22 nt, Human
cccagagcucagugugcaaggu

SEQ ID NO: 99570 - RNA, 22 nt, Human
cccagagcugagggggcacguu

SEQ ID NO: 99571 - RNA, 22 nt, Human
cccagagcugagucugauauau

SEQ ID NO: 99572 - RNA, 22 nt, Human
cccagagcugauuguuggagcc

SEQ ID NO: 99573 - RNA, 19 nt, Human
cccagaggaaugccuggaa

SEQ ID NO: 99574 - RNA, 22 nt, Human
cccagaggggucgucugagggg

SEQ ID NO: 99575 - RNA, 20 nt, Human
cccagagguugcggcaggag

SEQ ID NO: 99576 - RNA, 23 nt, Human
cccagagucaucuguagcugugg

SEQ ID NO: 99577 - RNA, 22 nt, Human
cagagccccucagcucucuccc

SEQ ID NO: 99578 - RNA, 22 nt, Human
cagagcccuaguccugauggcc

SEQ ID NO: 99579 - RNA, 22 nt, Human
cagagcccugggcacaugguag

SEQ ID NO: 99580 - RNA, 22 nt, Human
cagagcccuuggcuggagccca

SEQ ID NO: 99581 - RNA, 22 nt, Human
cagagccucagaauccugugga

SEQ ID NO: 99582 - RNA, 22 nt, Human
cagagccucccuccucugccau

SEQ ID NO: 99583 - RNA, 22 nt, Human
cagagccugcucacgucucugu

SEQ ID NO: 99584 - RNA, 21 nt, Human
cagagccuguguugacaguug

SEQ ID NO: 99585 - RNA, 21 nt, Human
cagagcucuuucugcuugcug

SEQ ID NO: 99586 - RNA, 22 nt, Human
cagagcugcagauugaaggcau

SEQ ID NO: 99587 - RNA, 22 nt, Human
cagagcugcuucccaguuugug

SEQ ID NO: 99588 - RNA, 22 nt, Human
cagagcuggccugugauuuuug

SEQ ID NO: 99589 - RNA, 23 nt, Human
cagagcuggcucagagcugccug

SEQ ID NO: 99590 - RNA, 22 nt, Human
cagagcugggcauggugaaagg

SEQ ID NO: 99591 - RNA, 22 nt, Human
cagagcugugauaaauagauau

SEQ ID NO: 99592 - RNA, 20 nt, Human
cagagcuguuauggaugaug

SEQ ID NO: 99593 - RNA, 22 nt, Human
cagagcuuucugucacauuagu

SEQ ID NO: 99594 - RNA, 22 nt, Human
cagagcuuugugucagggcugu

SEQ ID NO: 99595 - RNA, 22 nt, Human
cagaggaagggugcugcgaaag

SEQ ID NO: 99596 - RNA, 22 nt, Human
cagaggacaauagaauggaaag

SEQ ID NO: 99597 - RNA, 22 nt, Human
cagaggagaauugcgggaucau

SEQ ID NO: 99598 - RNA, 18 nt, Human
cagaggagagacauucag

SEQ ID NO: 99599 - RNA, 22 nt, Human
cagaggaguucaguacacagcc

SEQ ID NO: 99600 - RNA, 22 nt, Human
cagaggauauaugguuuguaug

SEQ ID NO: 99601 - RNA, 22 nt, Human
cagaggcacagcuucuuuuaau

SEQ ID NO: 99602 - RNA, 22 nt, Human
cagaggcaggaagaugggcagu

SEQ ID NO: 99603 - RNA, 20 nt, Human
cagaggcauuuucagacucu

SEQ ID NO: 99604 - RNA, 19 nt, Human
cagaggccagaagcacagg

SEQ ID NO: 99605 - RNA, 22 nt, Human
cagaggccagggggcucacaaa

SEQ ID NO: 99606 - RNA, 22 nt, Human
cagaggcccagugagagggcug

SEQ ID NO: 99607 - RNA, 22 nt, Human
cagaggccccagaacuagcucu

SEQ ID NO: 99608 - RNA, 21 nt, Human
cagaggccucaugcucugugc

SEQ ID NO: 99609 - RNA, 22 nt, Human
cagaggccuugucuucuuugcu

SEQ ID NO: 99610 - RNA, 22 nt, Human
cagaggcuaagaguguccaaag

SEQ ID NO: 99611 - RNA, 22 nt, Human
cagaggcuaagaugagugggug

SEQ ID NO: 99612 - RNA, 22 nt, Human
cagaggcuaaggguagcuuggg

SEQ ID NO: 99613 - RNA, 22 nt, Human
cagaggcugcucuggguggcau

SEQ ID NO: 99614 - RNA, 22 nt, Human
cagaggcuucaagucauucucc

SEQ ID NO: 99615 - RNA, 22 nt, Human
cagaggcuuugcccuggaaacc

SEQ ID NO: 99616 - RNA, 22 nt, Human
cagagggaccagaacauacugu

SEQ ID NO: 99617 - RNA, 22 nt, Human
cagagggccaucucuaucuuca

SEQ ID NO: 99618 - RNA, 22 nt, Human
cagagggcccccuggccacagu

SEQ ID NO: 99619 - RNA, 22 nt, Human
cagagggcuguguaaggauguu

SEQ ID NO: 99620 - RNA, 22 nt, Human
cagaggggauaacagguguaga

SEQ ID NO: 99621 - RNA, 21 nt, Human
cagaggggcuagccuggcugc

SEQ ID NO: 99622 - RNA, 22 nt, Human
cagagggucaccaggaagugca

SEQ ID NO: 99623 - RNA, 23 nt, Human
cagaggguuccauggagcauggu

SEQ ID NO: 99624 - RNA, 21 nt, Human
cagaggguuucucagguguuu

SEQ ID NO: 99625 - RNA, 22 nt, Human
cagagguaccagcagccucugg

SEQ ID NO: 99626 - RNA, 22 nt, Human
cagagguagcaugcuguggcuu

SEQ ID NO: 99627 - RNA, 22 nt, Human
cagagguagggagcuauguuau

SEQ ID NO: 99628 - RNA, 22 nt, Human
cagagguauugcaaaagccuag

SEQ ID NO: 99629 - RNA, 21 nt, Human
cagaggucauccugaggacaa

SEQ ID NO: 99630 - RNA, 22 nt, Human
cagaggucccuauuucuuuguu

SEQ ID NO: 99631 - RNA, 22 nt, Human
cagaggucugacacugaauggu

SEQ ID NO: 99632 - RNA, 22 nt, Human
cagaggugacccauaguaccuc

SEQ ID NO: 99633 - RNA, 22 nt, Human
cagagguguacagagggaggcc

SEQ ID NO: 99634 - RNA, 22 nt, Human
cagagguuugaucgaguagguc

SEQ ID NO: 99635 - RNA, 22 nt, Human
cagaguaaggagcugucaaacg

SEQ ID NO: 99636 - RNA, 19 nt, Human
cagaguacaccagauagga

SEQ ID NO: 99637 - RNA, 22 nt, Human
cagagucagagcuccauggagu

SEQ ID NO: 99638 - RNA, 22 nt, Human
cagaguccaauugcucagagcg

SEQ ID NO: 99639 - RNA, 22 nt, Human
cagaguccccagcggcgcgggc

SEQ ID NO: 99640 - RNA, 22 nt, Human
cagagucuuguguguucagccc

SEQ ID NO: 99641 - RNA, 22 nt, Human
cagagugauuugaugaguugca

SEQ ID NO: 99642 - RNA, 22 nt, Human
cagaguggagaaacgcuucguc

SEQ ID NO: 99643 - RNA, 22 nt, Human
cagaguggcaugaaugaagccu

SEQ ID NO: 99644 - RNA, 22 nt, Human
cagaguguggcaucuuccaacu

SEQ ID NO: 99645 - RNA, 22 nt, Human
cagaguguuagcgcugguuggg

SEQ ID NO: 99646 - RNA, 22 nt, Human
cagaguucaaagccugcuggga

SEQ ID NO: 99647 - RNA, 19 nt, Human
cagaguuugcaggcagagg

SEQ ID NO: 99648 - RNA, 20 nt, Human
cagauaaacgggaaagaagc

SEQ ID NO: 99649 - RNA, 22 nt, Human
cagauaaauagacuuggucaga

SEQ ID NO: 99650 - RNA, 22 nt, Human
cagauaauaauaugacuucacu

SEQ ID NO: 99651 - RNA, 22 nt, Human
cagauacauuaaaaugaugauu

SEQ ID NO: 99652 - RNA, 22 nt, Human
cagauauaguggcuugccuggg

SEQ ID NO: 99653 - RNA, 22 nt, Human
cagaucaagcuguauggucaga

SEQ ID NO: 99654 - RNA, 22 nt, Human
cagaucaugaaugacugacaga

SEQ ID NO: 99655 - RNA, 22 nt, Human
cagaucugugguaucucuauuu

SEQ ID NO: 99656 - RNA, 22 nt, Human
cagaugaacucuauccuguggc

SEQ ID NO: 99657 - RNA, 22 nt, Human
cagaugaaguaggugacgagca

SEQ ID NO: 99658 - RNA, 22 nt, Human
cagaugaauaaaugaugaggua

SEQ ID NO: 99659 - RNA, 22 nt, Human
cagaugagcaugggcacaagca

SEQ ID NO: 99660 - RNA, 22 nt, Human
cagaugcacauucucaucagca

SEQ ID NO: 99661 - RNA, 22 nt, Human
cccugaggcaaaggcuagaguu

SEQ ID NO: 99662 - RNA, 22 nt, Human
cccugaggcugaggauaggugg

SEQ ID NO: 99663 - RNA, 22 nt, Human
cccugaggggaguggugaggug

SEQ ID NO: 99664 - RNA, 23 nt, Human
cccugcacuaagaggagaaggug

SEQ ID NO: 99665 - RNA, 22 nt, Human
cccugcagaaccacagacaaac

SEQ ID NO: 99666 - RNA, 22 nt, Human
cccugcagagggaugggggcag

SEQ ID NO: 99667 - RNA, 20 nt, Human
cccugcagccaugggagugg

SEQ ID NO: 99668 - RNA, 22 nt, Human
cccugcaguccuuucuuggcuc

SEQ ID NO: 99669 - RNA, 22 nt, Human
cccugccaaucccgucucucug

SEQ ID NO: 99670 - RNA, 22 nt, Human
cccugccaggguccugacagac

SEQ ID NO: 99671 - RNA, 22 nt, Human
cccugccuacaggguuuucuuu

SEQ ID NO: 99672 - RNA, 22 nt, Human
cccugccucugaagcugcucag

SEQ ID NO: 99673 - RNA, 22 nt, Human
cccugccugugggcaucaacau

SEQ ID NO: 99674 - RNA, 23 nt, Human
cccugcucaggggucugauucuc

SEQ ID NO: 99675 - RNA, 22 nt, Human
cccugcucuucugacucaagcu

SEQ ID NO: 99676 - RNA, 22 nt, Human
cccugcugcaggcuucaggagg

SEQ ID NO: 99677 - RNA, 22 nt, Human
cccugcugcauggccuccacga

SEQ ID NO: 99678 - RNA, 22 nt, Human
cccugcugucaggugcugggag

SEQ ID NO: 99679 - RNA, 22 nt, Human
cccugcuguguagcggaggaac

SEQ ID NO: 99680 - RNA, 22 nt, Human
cccuggaagguucucuggcuca

SEQ ID NO: 99681 - RNA, 20 nt, Human
cccuggacuccugagcaaac

SEQ ID NO: 99682 - RNA, 22 nt, Human
cccuggacuguucagggccuga

SEQ ID NO: 99683 - RNA, 22 nt, Human
cccuggagaggacucaccccug

SEQ ID NO: 99684 - RNA, 22 nt, Human
cccuggaggcggauguugcagu

SEQ ID NO: 99685 - RNA, 22 nt, Human
cccuggagugccggaaucaaga

SEQ ID NO: 99686 - RNA, 22 nt, Human
cuacagugacagaauuaaacag

SEQ ID NO: 99687 - RNA, 17 nt, Human
cuacaguguguuuccug

SEQ ID NO: 99688 - RNA, 22 nt, Human
cuacauaaauauuuaugugucu

SEQ ID NO: 99689 - RNA, 22 nt, Human
cuacaucaaguaaucuucaaaa

SEQ ID NO: 99690 - RNA, 22 nt, Human
cuacaucacuuaauucuuagaa

SEQ ID NO: 99691 - RNA, 22 nt, Human
cuacaucagaacauuuacccua

SEQ ID NO: 99692 - RNA, 22 nt, Human
cuacaugaauggguguauuacu

SEQ ID NO: 99693 - RNA, 22 nt, Human
cuacauggagaagaaaauucuu

SEQ ID NO: 99694 - RNA, 22 nt, Human
cuacauuaaauuggcuuacuua

SEQ ID NO: 99695 - RNA, 22 nt, Human
cuacauuauguuuauugggacu

SEQ ID NO: 99696 - RNA, 22 nt, Human
cuacauuguuaucuguaagugu

SEQ ID NO: 99697 - RNA, 22 nt, Human
cuacauuucccagcugccuucc

SEQ ID NO: 99698 - RNA, 22 nt, Human
cuacauuuggagaguauaggaa

SEQ ID NO: 99699 - RNA, 22 nt, Human
caggaggagggcagccgccucc

SEQ ID NO: 99700 - RNA, 22 nt, Human
caggaggaggugagguagaacu

SEQ ID NO: 99701 - RNA, 22 nt, Human
caggaggcagcgcucucaggac

SEQ ID NO: 99702 - RNA, 22 nt, Human
caggaggcaguggguguugucu

SEQ ID NO: 99703 - RNA, 22 nt, Human
caggaggcaucauggagcggac

SEQ ID NO: 99704 - RNA, 22 nt, Human
caggaggcccaaagggcgcaga

SEQ ID NO: 99705 - RNA, 22 nt, Human
caggaggcccggccacagccca

SEQ ID NO: 99706 - RNA, 20 nt, Human
caggagggacauuucagcau

SEQ ID NO: 99707 - RNA, 22 nt, Human
caggaggugcccucuaguggca

SEQ ID NO: 99708 - RNA, 22 nt, Human
caggagguggagcucaaguggu

SEQ ID NO: 99709 - RNA, 22 nt, Human
caggaguggugugagggacucc

SEQ ID NO: 99710 - RNA, 22 nt, Human
caggaguguugauugcucagga

SEQ ID NO: 99711 - RNA, 22 nt, Human
caggaguucaagguugcaguga

SEQ ID NO: 99712 - RNA, 22 nt, Human
caggauauuaguuuucuuguua

SEQ ID NO: 99713 - RNA, 22 nt, Human
caggauauuuacguucugcuac

SEQ ID NO: 99714 - RNA, 22 nt, Human
caggaucccuggccuccgccca

SEQ ID NO: 99715 - RNA, 22 nt, Human
caggaucuguuaaguuguucca

SEQ ID NO: 99716 - RNA, 22 nt, Human
caggaugaagggcaaaggcaag

SEQ ID NO: 99717 - RNA, 22 nt, Human
caggaugagguagaggcagaua

SEQ ID NO: 99718 - RNA, 21 nt, Human
caggaugaugggaagguggug

SEQ ID NO: 99719 - RNA, 22 nt, Human
caggaugauguuaauugaaguu

SEQ ID NO: 99720 - RNA, 20 nt, Human
caggaugauuggacacgaug

SEQ ID NO: 99721 - RNA, 22 nt, Human
caggaugccuuugaacucugga

SEQ ID NO: 99722 - RNA, 22 nt, Human
caggauggucuucauuuggcuc

SEQ ID NO: 99723 - RNA, 22 nt, Human
caggaugguggcaugaucagaa

SEQ ID NO: 99724 - RNA, 22 nt, Human
caggauugcagauuugauuaga

SEQ ID NO: 99725 - RNA, 22 nt, Human
caggcaacguccuuagagaugc

SEQ ID NO: 99726 - RNA, 22 nt, Human
caggcaaguucauuuccaggca

SEQ ID NO: 99727 - RNA, 22 nt, Human
caggcacagcuaagacuggcca

SEQ ID NO: 99728 - RNA, 22 nt, Human
caggcacaggggaaugucuuuu

SEQ ID NO: 99729 - RNA, 22 nt, Human
caggcacaguguugcuguucaa

SEQ ID NO: 99730 - RNA, 22 nt, Human
caggcacaguuccaagcauuuu

SEQ ID NO: 99731 - RNA, 22 nt, Human
caggcaccaauagggaucgugg

SEQ ID NO: 99732 - RNA, 22 nt, Human
caggcaccacacuaggggcuga

SEQ ID NO: 99733 - RNA, 22 nt, Human
caggcacccucugaggggaagc

SEQ ID NO: 99734 - RNA, 22 nt, Human
caggcacgggggcauggccucu

SEQ ID NO: 99735 - RNA, 22 nt, Human
caggcacuggccagucagcaca

SEQ ID NO: 99736 - RNA, 22 nt, Human
caggcacuggggaugcugggau

SEQ ID NO: 99737 - RNA, 22 nt, Human
caggcacugugccucgcucccu

SEQ ID NO: 99738 - RNA, 22 nt, Human
caggcacuucggcagcguggua

SEQ ID NO: 99739 - RNA, 22 nt, Human
caggcagaaugaccgaccucgc

SEQ ID NO: 99740 - RNA, 22 nt, Human
caggcagaaugagauuacuuca

SEQ ID NO: 99741 - RNA, 22 nt, Human
caggcagacauuuuugacauag

SEQ ID NO: 99742 - RNA, 22 nt, Human
caggcagaggaggccuucuccu

SEQ ID NO: 99743 - RNA, 20 nt, Human
caggcagaggaugcugacca

SEQ ID NO: 99744 - RNA, 22 nt, Human
caggcagagugagaagcccuug

SEQ ID NO: 99745 - RNA, 22 nt, Human
caggcagaguuagugauuuagg

SEQ ID NO: 99746 - RNA, 22 nt, Human
caggcagauauguucgcuuuaa

SEQ ID NO: 99747 - RNA, 22 nt, Human
caggcagcagaggaguguggga

SEQ ID NO: 99748 - RNA, 22 nt, Human
caggcagcauuuacucugauga

SEQ ID NO: 99749 - RNA, 22 nt, Human
caggcagccugcggucugcaca

SEQ ID NO: 99750 - RNA, 22 nt, Human
caggcagccuucucgucucaca

SEQ ID NO: 99751 - RNA, 22 nt, Human
caggcagcgcucguggccuggc

SEQ ID NO: 99752 - RNA, 22 nt, Human
caggcagcuagauuuauaacaa

SEQ ID NO: 99753 - RNA, 22 nt, Human
caggcagcucaaccuugggagc

SEQ ID NO: 99754 - RNA, 22 nt, Human
caggcagcugaggacuuugcua

SEQ ID NO: 99755 - RNA, 22 nt, Human
caggcaggagccagggauucca

SEQ ID NO: 99756 - RNA, 23 nt, Human
caggcaggaugaggacuacacuc

SEQ ID NO: 99757 - RNA, 22 nt, Human
caggcagggagcuggaaaggau

SEQ ID NO: 99758 - RNA, 22 nt, Human
caggcaggucagugaagaagga

SEQ ID NO: 99759 - RNA, 22 nt, Human
caggcaggugcagauuccucuu

SEQ ID NO: 99760 - RNA, 20 nt, Human
caggcaguuugugguuaggg

SEQ ID NO: 99761 - RNA, 22 nt, Human
caggcauaaguaauguuuuaug

SEQ ID NO: 99762 - RNA, 22 nt, Human
caggcauaaucucaucuuguuu

SEQ ID NO: 99763 - RNA, 22 nt, Human
caggcauaucuacauuauccaa

SEQ ID NO: 99764 - RNA, 22 nt, Human
caggcaugaucauaggaguuua

SEQ ID NO: 99765 - RNA, 22 nt, Human
caggcaugggccaugggaagug

SEQ ID NO: 99766 - RNA, 22 nt, Human
caggcauuguucuagguucuca

SEQ ID NO: 99767 - RNA, 22 nt, Human
caggccaagucccaagugcggg

SEQ ID NO: 99768 - RNA, 22 nt, Human
caggccacgccccggcguguga

SEQ ID NO: 99769 - RNA, 22 nt, Human
caggccagagcgcgugguuggg

SEQ ID NO: 99770 - RNA, 20 nt, Human
caggccagagguuugauggc

SEQ ID NO: 99771 - RNA, 22 nt, Human
caggccagaguccaacuccaga

SEQ ID NO: 99772 - RNA, 22 nt, Human
caggccaggcugcauuugcccc

SEQ ID NO: 99773 - RNA, 19 nt, Human
caggccagugucagggggc

SEQ ID NO: 99774 - RNA, 22 nt, Human
caggcccagcccuuagccaggu

SEQ ID NO: 99775 - RNA, 22 nt, Human
caggcccaggccagugguuccc

SEQ ID NO: 99776 - RNA, 22 nt, Human
caggcccauucuaggcuugcua

SEQ ID NO: 99777 - RNA, 22 nt, Human
caggcccauuuguagccacuuu

SEQ ID NO: 99778 - RNA, 22 nt, Human
caggcccucaggcaagggcucu

SEQ ID NO: 99779 - RNA, 22 nt, Human
caggcccucguggugagcuggg

SEQ ID NO: 99780 - RNA, 22 nt, Human
caggcccugccuuggcaugugu

SEQ ID NO: 99781 - RNA, 22 nt, Human
caggcccugggcaggcacagag

SEQ ID NO: 99782 - RNA, 22 nt, Human
caggccggggcggcgccaucuu

SEQ ID NO: 99783 - RNA, 22 nt, Human
caggccggugauucuggaugua

SEQ ID NO: 99784 - RNA, 22 nt, Human
caggccucaggggcucaggcug

SEQ ID NO: 99785 - RNA, 22 nt, Human
caggccucaugguguguccuuc

SEQ ID NO: 99786 - RNA, 22 nt, Human
caggccugacccugagcuucac

SEQ ID NO: 99787 - RNA, 22 nt, Human
caggccugagacaucugagaua

SEQ ID NO: 99788 - RNA, 22 nt, Human
caggccuggcccccggcacacc

SEQ ID NO: 99789 - RNA, 22 nt, Human
caggccugugaguugaggcccc

SEQ ID NO: 99790 - RNA, 17 nt, Human
caggccuugagccuuua

SEQ ID NO: 99791 - RNA, 18 nt, Human
caggccuuugagacagaa

SEQ ID NO: 99792 - RNA, 22 nt, Human
caggcgaccccuaggagcaaca

SEQ ID NO: 99793 - RNA, 22 nt, Human
caggcuacauuugcucugagaa

SEQ ID NO: 99794 - RNA, 22 nt, Human
caggcucaaggcugacuuccau

SEQ ID NO: 99795 - RNA, 22 nt, Human
cagggcuggcuuccaaguuguu

SEQ ID NO: 99796 - RNA, 23 nt, Human
cagggcugggcuugguguuaggc

SEQ ID NO: 99797 - RNA, 22 nt, Human
cagggcuugaaucaaggaaguc

SEQ ID NO: 99798 - RNA, 22 nt, Human
cagggcuugaucugcauccugc

SEQ ID NO: 99799 - RNA, 22 nt, Human
cagggcuugguuggaaccaccc

SEQ ID NO: 99800 - RNA, 22 nt, Human
cagggcuuuccugagaagugau

SEQ ID NO: 99801 - RNA, 22 nt, Human
caggggagugagucccucucug

SEQ ID NO: 99802 - RNA, 22 nt, Human
caggggccaaggguccagaccu

SEQ ID NO: 99803 - RNA, 22 nt, Human
caggggcucccugggugccagu

SEQ ID NO: 99804 - RNA, 22 nt, Human
caggggcucuaaugcaugauca

SEQ ID NO: 99805 - RNA, 22 nt, Human
caggggcugaaauguugggguu

SEQ ID NO: 99806 - RNA, 22 nt, Human
caggggcuguggcacauggugu

SEQ ID NO: 99807 - RNA, 22 nt, Human
caggggcugugggcggagccuc

SEQ ID NO: 99808 - RNA, 22 nt, Human
caggggcuguuugccucaggcc

SEQ ID NO: 99809 - RNA, 22 nt, Human
caggggcuuuuccucuauaagg

SEQ ID NO: 99810 - RNA, 22 nt, Human
cagggggcucaaaggagagugc

SEQ ID NO: 99811 - RNA, 22 nt, Human
cagggggugguccaggcugcgc

SEQ ID NO: 99812 - RNA, 22 nt, Human
cagggguguuuuuggccaggag

SEQ ID NO: 99813 - RNA, 22 nt, Human
caggguagacaguaggugucug

SEQ ID NO: 99814 - RNA, 22 nt, Human
caggguagggcaagggaaccug

SEQ ID NO: 99815 - RNA, 22 nt, Human
caggguccggcugccuggcugu

SEQ ID NO: 99816 - RNA, 22 nt, Human
cuauuuugccugccuagaaauc

SEQ ID NO: 99817 - RNA, 22 nt, Human
cucaaagaagggagguauuugg

SEQ ID NO: 99818 - RNA, 21 nt, Human
cucaaagaccaaaaguguaga

SEQ ID NO: 99819 - RNA, 22 nt, Human
cucaaagagccagguaaucacc

SEQ ID NO: 99820 - RNA, 22 nt, Human
cucaaauccccguuccucauuc

SEQ ID NO: 99821 - RNA, 21 nt, Human
cucaaaugccaguuuuauuua

SEQ ID NO: 99822 - RNA, 22 nt, Human
cucaaauguuuccacuucugcu

SEQ ID NO: 99823 - RNA, 22 nt, Human
cucaacagacucugccaucccu

SEQ ID NO: 99824 - RNA, 22 nt, Human
cucaacauaugacuuugguggg

SEQ ID NO: 99825 - RNA, 22 nt, Human
cucaacaugccuacucagucug

SEQ ID NO: 99826 - RNA, 22 nt, Human
cucaagauauuccagcucucaa

SEQ ID NO: 99827 - RNA, 22 nt, Human
cucaaggacuuauucaugccug

SEQ ID NO: 99828 - RNA, 22 nt, Human
cucaagucccgcaguguuccuc

SEQ ID NO: 99829 - RNA, 22 nt, Human
cucaagucuauugauaagugca

SEQ ID NO: 99830 - RNA, 22 nt, Human
cucaagugugaguuuuaaaguc

SEQ ID NO: 99831 - RNA, 22 nt, Human
cucaauacccagggacucuaga

SEQ ID NO: 99832 - RNA, 22 nt, Human
cucacagagccucugugucuuc

SEQ ID NO: 99833 - RNA, 22 nt, Human
cucacagagcucauacugggag

SEQ ID NO: 99834 - RNA, 22 nt, Human
cucacagcaaggagguaaggua

SEQ ID NO: 99835 - RNA, 22 nt, Human
cucacagcacuugugucauugg

SEQ ID NO: 99836 - RNA, 22 nt, Human
cucacagcagccagucugccuu

SEQ ID NO: 99837 - RNA, 21 nt, Human
cucacaggaugcaguguuacu

SEQ ID NO: 99838 - RNA, 22 nt, Human
cucacaggguucuaucgaagag

SEQ ID NO: 99839 - RNA, 22 nt, Human
cucacaguuuucuguaguccaa

SEQ ID NO: 99840 - RNA, 22 nt, Human
cucacauaccuguuuucccuuu

SEQ ID NO: 99841 - RNA, 22 nt, Human
cucacauaguaagcagucagua

SEQ ID NO: 99842 - RNA, 22 nt, Human
cucacaugauggccuuuuucau

SEQ ID NO: 99843 - RNA, 22 nt, Human
cucacauucacaggacagaagg

SEQ ID NO: 99844 - RNA, 22 nt, Human
cucacauuccacuugugccaac

SEQ ID NO: 99845 - RNA, 22 nt, Human
cucaccauaugacuuuacuaac

SEQ ID NO: 99846 - RNA, 18 nt, Human
cucaccauucugcccaau

SEQ ID NO: 99847 - RNA, 22 nt, Human
cucaccccacuaccccuuggug

SEQ ID NO: 99848 - RNA, 19 nt, Human
cucaccuggaggugcugau

SEQ ID NO: 99849 - RNA, 22 nt, Human
cucaccugggucagacaguugu

SEQ ID NO: 99850 - RNA, 22 nt, Human
cucacucaguuuuuaguucauc

SEQ ID NO: 99851 - RNA, 22 nt, Human
cucacugacugcaagucaaguu

SEQ ID NO: 99852 - RNA, 22 nt, Human
cucacugcaaguuccaccuacc

SEQ ID NO: 99853 - RNA, 22 nt, Human
cucacugcccugaaguuggguu

SEQ ID NO: 99854 - RNA, 22 nt, Human
cucagaaaaccucuuucuugau

SEQ ID NO: 99855 - RNA, 22 nt, Human
cucagaaagcaaucuggugagg

SEQ ID NO: 99856 - RNA, 22 nt, Human
cucagaaaucccacucugugua

SEQ ID NO: 99857 - RNA, 22 nt, Human
cucagaagaacccaggguccca

SEQ ID NO: 99858 - RNA, 22 nt, Human
cucagaaguucagccuagagua

SEQ ID NO: 99859 - RNA, 22 nt, Human
cucagaauaauguuucuaaagg

SEQ ID NO: 99860 - RNA, 22 nt, Human
cucagaaucugccaaguucagg

SEQ ID NO: 99861 - RNA, 22 nt, Human
cucagacacagccccacgaagu

SEQ ID NO: 99862 - RNA, 22 nt, Human
cucagacauuuguagaaagugc

SEQ ID NO: 99863 - RNA, 21 nt, Human
cucagaccacagcucacaccc

SEQ ID NO: 99864 - RNA, 22 nt, Human
cucagagaaaugucacaacaau

SEQ ID NO: 99865 - RNA, 21 nt, Human
cucagagacaaaugccauccc

SEQ ID NO: 99866 - RNA, 22 nt, Human
cucagagagggcaccagggcca

SEQ ID NO: 99867 - RNA, 22 nt, Human
cucagagcacuuuugaaagcuc

SEQ ID NO: 99868 - RNA, 21 nt, Human
cucagagcaguucagagggau

SEQ ID NO: 99869 - RNA, 22 nt, Human
cucagagccccaggagggugug

SEQ ID NO: 99870 - RNA, 22 nt, Human
cucagagggaggacugggcugg

SEQ ID NO: 99871 - RNA, 22 nt, Human
cucagaguccccaguggguuug

SEQ ID NO: 99872 - RNA, 22 nt, Human
cucagaguggggcucccugagg

SEQ ID NO: 99873 - RNA, 22 nt, Human
cucagaguucuccugggaggug

SEQ ID NO: 99874 - RNA, 22 nt, Human
cucagauucugaauaauaaaca

SEQ ID NO: 99875 - RNA, 22 nt, Human
cucagcaacccacacacggucu

SEQ ID NO: 99876 - RNA, 19 nt, Human
cucagcaagauagaaaugg

SEQ ID NO: 99877 - RNA, 22 nt, Human
cucagcaauuaccugugucucu

SEQ ID NO: 99878 - RNA, 22 nt, Human
cucagcacacucccaucuaauu

SEQ ID NO: 99879 - RNA, 22 nt, Human
cucagcagaggcaguauucagu

SEQ ID NO: 99880 - RNA, 22 nt, Human
cucagcagcagggaagagguca

SEQ ID NO: 99881 - RNA, 22 nt, Human
cucagcaguauacucugaagau

SEQ ID NO: 99882 - RNA, 22 nt, Human
cucagcaucaugguaucugggg

SEQ ID NO: 99883 - RNA, 22 nt, Human
cucagcauggagggagaacaag

SEQ ID NO: 99884 - RNA, 22 nt, Human
cucagccaugggguggaucagc

SEQ ID NO: 99885 - RNA, 22 nt, Human
cucagccaugucaugccuaccu

SEQ ID NO: 99886 - RNA, 22 nt, Human
cucagccccaauuugcccucuu

SEQ ID NO: 99887 - RNA, 22 nt, Human
cucagcccuccccggggaauaa

SEQ ID NO: 99888 - RNA, 20 nt, Human
cucagcuaaacaacacugac

SEQ ID NO: 99889 - RNA, 22 nt, Human
cucagcucauuguggauccggu

SEQ ID NO: 99890 - RNA, 22 nt, Human
cucagcuccagcccucagcagc

SEQ ID NO: 99891 - RNA, 22 nt, Human
cucagcucccuccacccagacc

SEQ ID NO: 99892 - RNA, 22 nt, Human
cucagcuucuaccuccugagug

SEQ ID NO: 99893 - RNA, 22 nt, Human
cucaggaaggaagcagggagcc

SEQ ID NO: 99894 - RNA, 22 nt, Human
cucaggacuugguuaguguuuu

SEQ ID NO: 99895 - RNA, 22 nt, Human
cucaggagguuuccugucuagg

SEQ ID NO: 99896 - RNA, 22 nt, Human
cucaggauccaucuccugcccu

SEQ ID NO: 99897 - RNA, 22 nt, Human
cucaggaugcaggucacaggac

SEQ ID NO: 99898 - RNA, 22 nt, Human
cucaggauuaaggaaucuaaau

SEQ ID NO: 99899 - RNA, 20 nt, Human
cucaggauugucuagccccu

SEQ ID NO: 99900 - RNA, 22 nt, Human
cucaggauugugccuagggaga

SEQ ID NO: 99901 - RNA, 22 nt, Human
cucaggcacuuuugucacagac

SEQ ID NO: 99902 - RNA, 22 nt, Human
cucaggcagugcccucuggccg

SEQ ID NO: 99903 - RNA, 22 nt, Human
cucaggcaguucuguagccucc

SEQ ID NO: 99904 - RNA, 22 nt, Human
acaggcccagcucuucaccaga

SEQ ID NO: 99905 - RNA, 22 nt, Human
acaggccuagggucaauuuccu

SEQ ID NO: 99906 - RNA, 18 nt, Human
acaggccucaguccugca

SEQ ID NO: 99907 - RNA, 22 nt, Human
acaugacacaggccuggccaau

SEQ ID NO: 99908 - RNA, 22 nt, Human
acaugacaccucuggcugggug

SEQ ID NO: 99909 - RNA, 22 nt, Human
acaugacauaguagaaaagccc

SEQ ID NO: 99910 - RNA, 22 nt, Human
acaugagaagcugcaacaugac

SEQ ID NO: 99911 - RNA, 23 nt, Human
acaugauacacaauuagcaaacc

SEQ ID NO: 99912 - RNA, 22 nt, Human
acaugauuuuuaaagagauaau

SEQ ID NO: 99913 - RNA, 22 nt, Human
acaugcaaagccacaggacccg

SEQ ID NO: 99914 - RNA, 22 nt, Human
acaugcaaagggaugcaauuau

SEQ ID NO: 99915 - RNA, 22 nt, Human
acaugcaaaugugcaugcaugu

SEQ ID NO: 99916 - RNA, 22 nt, Human
acaugcaacaaaguaccugcaa

SEQ ID NO: 99917 - RNA, 19 nt, Human
acaugcaaggcaccugcag

SEQ ID NO: 99918 - RNA, 22 nt, Human
acaugcacagcaagggugagag

SEQ ID NO: 99919 - RNA, 22 nt, Human
acaugcauacacguacauaccu

SEQ ID NO: 99920 - RNA, 22 nt, Human
acaugcauauacuuaaauaugu

SEQ ID NO: 99921 - RNA, 22 nt, Human
acaugcauggagggaaaauguc

SEQ ID NO: 99922 - RNA, 22 nt, Human
acaugcaugggguaaugguauu

SEQ ID NO: 99923 - RNA, 22 nt, Human
acaugcaugucaucagcccuuu

SEQ ID NO: 99924 - RNA, 22 nt, Human
acaugcaugucuaugggcaggu

SEQ ID NO: 99925 - RNA, 22 nt, Human
acaugcauuaaaaauacuugug

SEQ ID NO: 99926 - RNA, 22 nt, Human
acaugcauucucuaaaagcaaa

SEQ ID NO: 99927 - RNA, 22 nt, Human
acaugccagcccauuuaaaugg

SEQ ID NO: 99928 - RNA, 22 nt, Human
acaugccaucacuuucauuccu

SEQ ID NO: 99929 - RNA, 22 nt, Human
acaugccaugaagguauuuuug

SEQ ID NO: 99930 - RNA, 22 nt, Human
acaugcuacagugaaggaggaa

SEQ ID NO: 99931 - RNA, 22 nt, Human
acaugcuuucuagguccuucug

SEQ ID NO: 99932 - RNA, 20 nt, Human
acauggaaggucaaacuauc

SEQ ID NO: 99933 - RNA, 22 nt, Human
acauggagcucaaacaugagug

SEQ ID NO: 99934 - RNA, 21 nt, Human
acauggauauaggacugaauu

SEQ ID NO: 99935 - RNA, 22 nt, Human
acauggauuguuuuaaaagaug

SEQ ID NO: 99936 - RNA, 17 nt, Human
acauggcaguucacgcu

SEQ ID NO: 99937 - RNA, 22 nt, Human
acauggcauucacucccacagg

SEQ ID NO: 99938 - RNA, 22 nt, Human
acauggcuaaauuagcuuuacu

SEQ ID NO: 99939 - RNA, 21 nt, Human
acaugggaccugcgaaaggaa

SEQ ID NO: 99940 - RNA, 22 nt, Human
acaugggagagaaauaaaugua

SEQ ID NO: 99941 - RNA, 17 nt, Human
acaugggcugagacucc

SEQ ID NO: 99942 - RNA, 22 nt, Human
acauggggcccaaagagagguc

SEQ ID NO: 99943 - RNA, 22 nt, Human
acaugggggcugcugccagcga

SEQ ID NO: 99944 - RNA, 22 nt, Human
acauggguuauugugagguuaa

SEQ ID NO: 99945 - RNA, 22 nt, Human
acaugguaaauugguaaaggac

SEQ ID NO: 99946 - RNA, 22 nt, Human
acauguaaacauuuacaguauu

SEQ ID NO: 99947 - RNA, 22 nt, Human
acauguacuguuggugaagagg

SEQ ID NO: 99948 - RNA, 22 nt, Human
acauguaugcuuuaugaaguag

SEQ ID NO: 99949 - RNA, 22 nt, Human
acauguauugacauuauauucu

SEQ ID NO: 99950 - RNA, 22 nt, Human
acauguggaggaggcgagggua

SEQ ID NO: 99951 - RNA, 22 nt, Human
acauguggguuuuauuuugcau

SEQ ID NO: 99952 - RNA, 22 nt, Human
acauguggucaaucuguguagg

SEQ ID NO: 99953 - RNA, 22 nt, Human
acauguguaaggucucucaguc

SEQ ID NO: 99954 - RNA, 22 nt, Human
acauguuagcuacuauuguuau

SEQ ID NO: 99955 - RNA, 22 nt, Human
acauuaaaauugggugggguaa

SEQ ID NO: 99956 - RNA, 22 nt, Human
acauuaaacuugcuuggcugua

SEQ ID NO: 99957 - RNA, 21 nt, Human
acauuacagggugaugugucu

SEQ ID NO: 99958 - RNA, 22 nt, Human
acauuacauaagauuguaaccu

SEQ ID NO: 99959 - RNA, 23 nt, Human
acauuacuuagccagagucucag

SEQ ID NO: 99960 - RNA, 22 nt, Human
acauucaaaauauuucugaugu

SEQ ID NO: 99961 - RNA, 22 nt, Human
acauucaacauggcuggucuag

SEQ ID NO: 99962 - RNA, 22 nt, Human
acauucacaagccuacaagguu

SEQ ID NO: 99963 - RNA, 22 nt, Human
acauucacgcucucaaagcuga

SEQ ID NO: 99964 - RNA, 22 nt, Human
acauucacuauguccaaacucu

SEQ ID NO: 99965 - RNA, 22 nt, Human
acauucaugucccacuucuagc

SEQ ID NO: 99966 - RNA, 22 nt, Human
acauucauugccaggguggaag

SEQ ID NO: 99967 - RNA, 22 nt, Human
acauuccugaggaaauacauuc

SEQ ID NO: 99968 - RNA, 22 nt, Human
acauucuaaagcaugcucagga

SEQ ID NO: 99969 - RNA, 22 nt, Human
acauucuaacauuguacagaua

SEQ ID NO: 99970 - RNA, 22 nt, Human
acauucuauuucaucaugucua

SEQ ID NO: 99971 - RNA, 22 nt, Human
acauucucuccaugucuucuuu

SEQ ID NO: 99972 - RNA, 22 nt, Human
acauucugaaauccaugugggu

SEQ ID NO: 99973 - RNA, 22 nt, Human
acauucugucaacagugagcag

SEQ ID NO: 99974 - RNA, 22 nt, Human
acauucugugagucauguuuua

SEQ ID NO: 99975 - RNA, 22 nt, Human
acauucuguuuccccaaagaga

SEQ ID NO: 99976 - RNA, 22 nt, Human
acauucuucagcuuugucaggc

SEQ ID NO: 99977 - RNA, 22 nt, Human
acauucuucuugugaauuuacu

SEQ ID NO: 99978 - RNA, 22 nt, Human
acauugaaccaguagacacaaa

SEQ ID NO: 99979 - RNA, 19 nt, Human
acauugaauuuucuucuuu

SEQ ID NO: 99980 - RNA, 22 nt, Human
acauugagaguuuugaagagua

SEQ ID NO: 99981 - RNA, 22 nt, Human
acauugagugcuccauaaauca

SEQ ID NO: 99982 - RNA, 22 nt, Human
acauugcaauuagguaccuaug

SEQ ID NO: 99983 - RNA, 22 nt, Human
acauugcugcauucuccuuccc

SEQ ID NO: 99984 - RNA, 22 nt, Human
acauuguaaauaccuuuaucac

SEQ ID NO: 99985 - RNA, 22 nt, Human
acauuguagacuuuucauaugu

SEQ ID NO: 99986 - RNA, 22 nt, Human
acauugugauccgacugauuaa

SEQ ID NO: 99987 - RNA, 22 nt, Human
acauuguucuacuucuaguuag

SEQ ID NO: 99988 - RNA, 22 nt, Human
acauuguugagccucuuguuca

SEQ ID NO: 99989 - RNA, 22 nt, Human
acauuuaaauaccuauguuucu

SEQ ID NO: 99990 - RNA, 22 nt, Human
acauuuaacccucagguuucug

SEQ ID NO: 99991 - RNA, 22 nt, Human
acauuuacauuuucucuggccu

SEQ ID NO: 99992 - RNA, 22 nt, Human
acauuuaggauguuuugagaga

SEQ ID NO: 99993 - RNA, 22 nt, Human
acauuuaguaugagucucugua

SEQ ID NO: 99994 - RNA, 23 nt, Human
acauuucaauacugagggucuga

SEQ ID NO: 99995 - RNA, 22 nt, Human
acauuucagaaucacacagcuu

SEQ ID NO: 99996 - RNA, 22 nt, Human
acauuucagauucaugaaguga

SEQ ID NO: 99997 - RNA, 22 nt, Human
acauuucuaucauccuguaaug

SEQ ID NO: 99998 - RNA, 22 nt, Human
acauuucucccugcaugccugc

SEQ ID NO: 99999 - RNA, 22 nt, Human
acauuucuccuacuuguuauuu

SEQ ID NO: 100000 - RNA, 22 nt, Human
acauuugaaauaaacucaagug

SEQ ID NO: 100001 - RNA, 22 nt, Human
acauuugagaugccuuuuaggu

SEQ ID NO: 100002 - RNA, 22 nt, Human
acauuugaggauguuaagaaug

SEQ ID NO: 100003 - RNA, 20 nt, Human
acauuugaguaucaucuacu

SEQ ID NO: 100004 - RNA, 22 nt, Human
acauuugagucauauuugcuua

SEQ ID NO: 100005 - RNA, 22 nt, Human
acauuugauggaguuaguaggu

SEQ ID NO: 100006 - RNA, 17 nt, Human
acauuugcaaaggucug

SEQ ID NO: 100007 - RNA, 22 nt, Human
acauuugguaacacuugagcau

SEQ ID NO: 100008 - RNA, 22 nt, Human
acauuuguaggacagaggaaga

SEQ ID NO: 100009 - RNA, 22 nt, Human
acauuuguauauaugcagcaua

SEQ ID NO: 100010 - RNA, 20 nt, Human
acauuuguaucucccagugg

SEQ ID NO: 100011 - RNA, 20 nt, Human
acauuuguggaucugagaga

SEQ ID NO: 100012 - RNA, 21 nt, Human
acauuuucuguuuuaggaagu

SEQ ID NO: 100013 - RNA, 22 nt, Human
acagggcagagaggcaggcuug

SEQ ID NO: 100014 - RNA, 21 nt, Human
acagggcaugcagcuggcugu

SEQ ID NO: 100015 - RNA, 22 nt, Human
acagggccacauguaaacagau

SEQ ID NO: 100016 - RNA, 22 nt, Human
acagggccagccugggaccugg

SEQ ID NO: 100017 - RNA, 22 nt, Human
acagggcccuuagauccuuuua

SEQ ID NO: 100018 - RNA, 22 nt, Human
acagggccucagccagggcaga

SEQ ID NO: 100019 - RNA, 22 nt, Human
acagggccuuauauccagaagg

SEQ ID NO: 100020 - RNA, 22 nt, Human
acagggcuauauuccucagagu

SEQ ID NO: 100021 - RNA, 22 nt, Human
acagggcucccagcaggucugu

SEQ ID NO: 100022 - RNA, 22 nt, Human
acagggcuccuugggcugacac

SEQ ID NO: 100023 - RNA, 22 nt, Human
acagggcucgucgggcccucgg

SEQ ID NO: 100024 - RNA, 22 nt, Human
acagggcucugacaccaaggua

SEQ ID NO: 100025 - RNA, 19 nt, Human
acagggcucuggacgccau

SEQ ID NO: 100026 - RNA, 19 nt, Human
accaaacaguggacggagc

SEQ ID NO: 100027 - RNA, 22 nt, Human
accaaauaggcuuccuggguug

SEQ ID NO: 100028 - RNA, 23 nt, Human
accaacaagccucuggagagugg

SEQ ID NO: 100029 - RNA, 22 nt, Human
accaacauguccucacacagcc

SEQ ID NO: 100030 - RNA, 22 nt, Human
accaacuugcagccaaauuuga

SEQ ID NO: 100031 - RNA, 22 nt, Human
accaagcucucuucccggcucu

SEQ ID NO: 100032 - RNA, 22 nt, Human
accaagcuguauauuauugguu

SEQ ID NO: 100033 - RNA, 22 nt, Human
accaaggagacaaagguguauu

SEQ ID NO: 100034 - RNA, 22 nt, Human
accaauuuuagagcaccaagaa

SEQ ID NO: 100035 - RNA, 22 nt, Human
accaauuuuuacagcugugguu

SEQ ID NO: 100036 - RNA, 22 nt, Human
accacacuggcuagugaagaag

SEQ ID NO: 100037 - RNA, 22 nt, Human
accacaggacccaugagucagu

SEQ ID NO: 100038 - RNA, 22 nt, Human
accacaggaggauggcugcugg

SEQ ID NO: 100039 - RNA, 22 nt, Human
accacauuucugaauagcauaa

SEQ ID NO: 100040 - RNA, 22 nt, Human
accagaaguucuccaaaaagau

SEQ ID NO: 100041 - RNA, 22 nt, Human
accagagaaugugcaucucuaa

SEQ ID NO: 100042 - RNA, 22 nt, Human
accagagagagacaggguugug

SEQ ID NO: 100043 - RNA, 20 nt, Human
accagagauagcaauagugc

SEQ ID NO: 100044 - RNA, 22 nt, Human
accagagcagacuacuggaggu

SEQ ID NO: 100045 - RNA, 20 nt, Human
accagagcucucaguaugug

SEQ ID NO: 100046 - RNA, 22 nt, Human
accagaguuuuauuaguucuaa

SEQ ID NO: 100047 - RNA, 17 nt, Human
accagaguuuuccaugc

SEQ ID NO: 100048 - RNA, 23 nt, Human
accagcaaaaaugacagcccagg

SEQ ID NO: 100049 - RNA, 22 nt, Human
accagcaagauuuugcuuugca

SEQ ID NO: 100050 - RNA, 22 nt, Human
accagcaccugauaggcaguaa

SEQ ID NO: 100051 - RNA, 22 nt, Human
accagcagaguugaggaggaca

SEQ ID NO: 100052 - RNA, 22 nt, Human
accagcaguuaugaggccagga

SEQ ID NO: 100053 - RNA, 21 nt, Human
accagcauuccacacuguccc

SEQ ID NO: 100054 - RNA, 22 nt, Human
accagccaagacugccuggaau

SEQ ID NO: 100055 - RNA, 22 nt, Human
accagccagccacaguggcucc

SEQ ID NO: 100056 - RNA, 22 nt, Human
accagccuccuagcugcuccug

SEQ ID NO: 100057 - RNA, 22 nt, Human
accagcuccaggccccugcuga

SEQ ID NO: 100058 - RNA, 22 nt, Human
accagcucucuagcccuggucc

SEQ ID NO: 100059 - RNA, 22 nt, Human
accagcugaguaggggagggcc

SEQ ID NO: 100060 - RNA, 22 nt, Human
accagcugccaagggcuacacu

SEQ ID NO: 100061 - RNA, 22 nt, Human
accagcugugugaccugaggca

SEQ ID NO: 100062 - RNA, 22 nt, Human
accagcuguuaggcuuggugcu

SEQ ID NO: 100063 - RNA, 22 nt, Human
accaggaaaaacacuguguugg

SEQ ID NO: 100064 - RNA, 22 nt, Human
accaggaaauuuggcaacaaag

SEQ ID NO: 100065 - RNA, 22 nt, Human
accaggaacucacccgcagagg

SEQ ID NO: 100066 - RNA, 22 nt, Human
accaggaagaacaggcaaggca

SEQ ID NO: 100067 - RNA, 22 nt, Human
accaggaagagauuccaauuua

SEQ ID NO: 100068 - RNA, 22 nt, Human
accaggacuuuguauucagcuu

SEQ ID NO: 100069 - RNA, 22 nt, Human
accaggagaggcacuugcaaug

SEQ ID NO: 100070 - RNA, 22 nt, Human
accaggagcauuuuuuauuagu

SEQ ID NO: 100071 - RNA, 22 nt, Human
accaggaggaaguguuaaugau

SEQ ID NO: 100072 - RNA, 22 nt, Human
accaggaggccuggagcacaaa

SEQ ID NO: 100073 - RNA, 22 nt, Human
accaggaggcuacacuguccca

SEQ ID NO: 100074 - RNA, 22 nt, Human
accaggagguguuugcucaagu

SEQ ID NO: 100075 - RNA, 22 nt, Human
accaggcagagcugggccuuaa

SEQ ID NO: 100076 - RNA, 22 nt, Human
accaggcaugauguggagcaca

SEQ ID NO: 100077 - RNA, 22 nt, Human
accaggcccaccgcaugcuccu

SEQ ID NO: 100078 - RNA, 22 nt, Human
accaggcccauguggauuacua

SEQ ID NO: 100079 - RNA, 22 nt, Human
accaggcccuccagcugcgugg

SEQ ID NO: 100080 - RNA, 22 nt, Human
accaggccuagcaaguacauua

SEQ ID NO: 100081 - RNA, 22 nt, Human
accaggcucugccaguguuuac

SEQ ID NO: 100082 - RNA, 21 nt, Human
accaggcuugugggagggagc

SEQ ID NO: 100083 - RNA, 22 nt, Human
accagggcaaauguuuguacuc

SEQ ID NO: 100084 - RNA, 22 nt, Human
accagggcacaggagucugaag

SEQ ID NO: 100085 - RNA, 22 nt, Human
accagggcacauuccggccaga

SEQ ID NO: 100086 - RNA, 22 nt, Human
accagggcuuacagcaguagcu

SEQ ID NO: 100087 - RNA, 22 nt, Human
accaggggaugguuggcacugu

SEQ ID NO: 100088 - RNA, 22 nt, Human
accaggggugucaacagcauuu

SEQ ID NO: 100089 - RNA, 20 nt, Human
accagguggcugaugacacc

SEQ ID NO: 100090 - RNA, 22 nt, Human
accaguccgcggagcuccgggg

SEQ ID NO: 100091 - RNA, 22 nt, Human
accagugggaaguggaaaauga

SEQ ID NO: 100092 - RNA, 22 nt, Human
accagugucuuauugaccaucu

SEQ ID NO: 100093 - RNA, 22 nt, Human
accaguuaaagggaaauugaaa

SEQ ID NO: 100094 - RNA, 22 nt, Human
accaguuauuagcccuacaacu

SEQ ID NO: 100095 - RNA, 22 nt, Human
accaguuuauagcgaucuguca

SEQ ID NO: 100096 - RNA, 22 nt, Human
accaguuuguaaccuguuuuca

SEQ ID NO: 100097 - RNA, 22 nt, Human
accaguuuuuuauacaucuucu

SEQ ID NO: 100098 - RNA, 22 nt, Human
accauacacaauuugcaacggu

SEQ ID NO: 100099 - RNA, 22 nt, Human
accauagacuggaggaucuccu

SEQ ID NO: 100100 - RNA, 22 nt, Human
accaucuuaaggggacuucuua

SEQ ID NO: 100101 - RNA, 22 nt, Human
accaugccaguggcagccagac

SEQ ID NO: 100102 - RNA, 22 nt, Human
accaugggcagaaucuuugcag

SEQ ID NO: 100103 - RNA, 22 nt, Human
accauguuggccaagcuggucu

SEQ ID NO: 100104 - RNA, 21 nt, Human
accauucugcacaugcuguca

SEQ ID NO: 100105 - RNA, 22 nt, Human
accauugauauaacucagucuc

SEQ ID NO: 100106 - RNA, 22 nt, Human
accauuuaaggaaaauguauca

SEQ ID NO: 100107 - RNA, 22 nt, Human
accauuuaauaaguauuuccau

SEQ ID NO: 100108 - RNA, 22 nt, Human
acccaaaagucacucaggagca

SEQ ID NO: 100109 - RNA, 22 nt, Human
acccacagccgcugugcguccc

SEQ ID NO: 100110 - RNA, 22 nt, Human
acccacuguagccacucugggu

SEQ ID NO: 100111 - RNA, 22 nt, Human
acccagaggcggagguugcagu

SEQ ID NO: 100112 - RNA, 22 nt, Human
acccagcaaagauaaacuuaug

SEQ ID NO: 100113 - RNA, 22 nt, Human
acccagccauguucaguucucu

SEQ ID NO: 100114 - RNA, 22 nt, Human
acccaggacaugggcacccgug

SEQ ID NO: 100115 - RNA, 22 nt, Human
acccaggagacagguugcagug

SEQ ID NO: 100116 - RNA, 22 nt, Human
acccaggagcucugggguccuc

SEQ ID NO: 100117 - RNA, 22 nt, Human
acccaggaggugacacagggcu

SEQ ID NO: 100118 - RNA, 22 nt, Human
acccaggagguggaggcugcag

SEQ ID NO: 100119 - RNA, 22 nt, Human
acccaggauaaucuguguaucu

SEQ ID NO: 100120 - RNA, 22 nt, Human
acccaggauagagugcugcagu

SEQ ID NO: 100121 - RNA, 17 nt, Human
acccaggcucuaucuug

SEQ ID NO: 100122 - RNA, 22 nt, Human
acugagggccaaaggcacugag

SEQ ID NO: 100123 - RNA, 23 nt, Human
acugagggccacuuccaucguga

SEQ ID NO: 100124 - RNA, 22 nt, Human
acugagggguuggagagugagg

SEQ ID NO: 100125 - RNA, 22 nt, Human
acugagggugcacaggcaggca

SEQ ID NO: 100126 - RNA, 22 nt, Human
acugagguaauugugaggauua

SEQ ID NO: 100127 - RNA, 23 nt, Human
acugagguacugagguugugaca

SEQ ID NO: 100128 - RNA, 22 nt, Human
acugagguauaauugacauaac

SEQ ID NO: 100129 - RNA, 22 nt, Human
acugaggucagggguaugugau

SEQ ID NO: 100130 - RNA, 22 nt, Human
acugagguuauugcaauaaaau

SEQ ID NO: 100131 - RNA, 22 nt, Human
acugagugggagguuuguguga

SEQ ID NO: 100132 - RNA, 22 nt, Human
acugauauuaaacacaauuuaa

SEQ ID NO: 100133 - RNA, 22 nt, Human
acugaucuguuuucagauucug

SEQ ID NO: 100134 - RNA, 22 nt, Human
acugaugugacagcugagcaga

SEQ ID NO: 100135 - RNA, 22 nt, Human
acugaugugauuucaaauucca

SEQ ID NO: 100136 - RNA, 22 nt, Human
acugauuucagggaugagaaga

SEQ ID NO: 100137 - RNA, 20 nt, Human
acugcaaaguacucuuucag

SEQ ID NO: 100138 - RNA, 22 nt, Human
acugcacaaggccuggacacac

SEQ ID NO: 100139 - RNA, 21 nt, Human
acugcacaaguugcuuugcuu

SEQ ID NO: 100140 - RNA, 22 nt, Human
acugcacagaagaaacuaucaa

SEQ ID NO: 100141 - RNA, 22 nt, Human
acugcacagaauuaugguuggu

SEQ ID NO: 100142 - RNA, 22 nt, Human
acugcaccucagccugggcgac

SEQ ID NO: 100143 - RNA, 22 nt, Human
acugcacuuacauagaggaggc

SEQ ID NO: 100144 - RNA, 22 nt, Human
acugcacuuuaggccaacuagg

SEQ ID NO: 100145 - RNA, 22 nt, Human
acugcagcagguaagagcauuu

SEQ ID NO: 100146 - RNA, 23 nt, Human
acugcagccuccgccugccgggu

SEQ ID NO: 100147 - RNA, 22 nt, Human
acugcaggccuuggugccagca

SEQ ID NO: 100148 - RNA, 22 nt, Human
acugcagguggauggcacuuua

SEQ ID NO: 100149 - RNA, 22 nt, Human
acugcaucgcucgcuuaggucc

SEQ ID NO: 100150 - RNA, 22 nt, Human
acugcaucugaacugugaaugg

SEQ ID NO: 100151 - RNA, 22 nt, Human
acugcaugcuuuacaugacaug

SEQ ID NO: 100152 - RNA, 22 nt, Human
acugcauugagguuucauacuu

SEQ ID NO: 100153 - RNA, 22 nt, Human
acugcauuugguaaagucaaga

SEQ ID NO: 100154 - RNA, 22 nt, Human
acugccagaggagguaucugaa

SEQ ID NO: 100155 - RNA, 22 nt, Human
acugccaggauggcacuagagg

SEQ ID NO: 100156 - RNA, 22 nt, Human
acugccagguaagugcuccugc

SEQ ID NO: 100157 - RNA, 23 nt, Human
acugccaguuuuaccacagacgg

SEQ ID NO: 100158 - RNA, 22 nt, Human
acugcccaugugcaucaaguag

SEQ ID NO: 100159 - RNA, 22 nt, Human
acaugcucuccuaaggcccugu

SEQ ID NO: 100160 - RNA, 22 nt, Human
acaugcuucauauuauaaccaa

SEQ ID NO: 100161 - RNA, 22 nt, Human
acaugcuuccaaauuauguugg

SEQ ID NO: 100162 - RNA, 22 nt, Human
acaugcuucuguuucaagaacu

SEQ ID NO: 100163 - RNA, 22 nt, Human
acaugcuuguuuuucacaaccu

SEQ ID NO: 100164 - RNA, 22 nt, Human
acauggaaaacuaacugcuuuu

SEQ ID NO: 100165 - RNA, 22 nt, Human
acauggaaaguacuccacaauu

SEQ ID NO: 100166 - RNA, 22 nt, Human
acauggaagauaaaaauacuca

SEQ ID NO: 100167 - RNA, 22 nt, Human
acauggaauguguacuaaguua

SEQ ID NO: 100168 - RNA, 22 nt, Human
acauggaucaaccuauuuucuu

SEQ ID NO: 100169 - RNA, 22 nt, Human
acauggcacccagaucucaaaa

SEQ ID NO: 100170 - RNA, 22 nt, Human
acauggcagcugaugauuggaa

SEQ ID NO: 100171 - RNA, 22 nt, Human
acauggcaggaaucauguguuu

SEQ ID NO: 100172 - RNA, 22 nt, Human
acauggcuaaagcaagucuaga

SEQ ID NO: 100173 - RNA, 22 nt, Human
acauggcucagucucaugacag

SEQ ID NO: 100174 - RNA, 19 nt, Human
acauggcucuccagucugg

SEQ ID NO: 100175 - RNA, 22 nt, Human
acauggcuggcaccuuaaauuu

SEQ ID NO: 100176 - RNA, 22 nt, Human
acaugggaucaaugaggcaggc

SEQ ID NO: 100177 - RNA, 22 nt, Human
acauggugagcggcaggccuau

SEQ ID NO: 100178 - RNA, 22 nt, Human
acauguaaaagauaaauuaaca

SEQ ID NO: 100179 - RNA, 22 nt, Human
acauguaaaaggaacaugcaug

SEQ ID NO: 100180 - RNA, 22 nt, Human
acauguaacauauauguagcau

SEQ ID NO: 100181 - RNA, 21 nt, Human
acauguacacauguaugcaca

SEQ ID NO: 100182 - RNA, 20 nt, Human
acauguacagacagguuucu

SEQ ID NO: 100183 - RNA, 22 nt, Human
acauguacauacacauauguaa

SEQ ID NO: 100184 - RNA, 20 nt, Human
acauguacuaaugaauacag

SEQ ID NO: 100185 - RNA, 22 nt, Human
acauguaugugugcaaacacau

SEQ ID NO: 100186 - RNA, 22 nt, Human
acaugucuaaguacucaacaaa

SEQ ID NO: 100187 - RNA, 22 nt, Human
acaugucuuuuaaagucuaaua

SEQ ID NO: 100188 - RNA, 22 nt, Human
acaugugcucuugcuguacagc

SEQ ID NO: 100189 - RNA, 22 nt, Human
acauguguacauauauaugugc

SEQ ID NO: 100190 - RNA, 22 nt, Human
acaugugucuaagaaugaaaga

SEQ ID NO: 100191 - RNA, 22 nt, Human
acauguguggacaugaaucuac

SEQ ID NO: 100192 - RNA, 22 nt, Human
acauguguggccgcuguagaca

SEQ ID NO: 100193 - RNA, 22 nt, Human
acauguuagggacagaguaugu

SEQ ID NO: 100194 - RNA, 22 nt, Human
acauguuugccugcaggcuuag

SEQ ID NO: 100195 - RNA, 22 nt, Human
acauguuuggcucuaugcuaua

SEQ ID NO: 100196 - RNA, 22 nt, Human
acauuaaaauggagaauuuuga

SEQ ID NO: 100197 - RNA, 22 nt, Human
acauuaaagaguaagguuaguu

SEQ ID NO: 100198 - RNA, 22 nt, Human
acauuaacaccgugaguuuggu

SEQ ID NO: 100199 - RNA, 22 nt, Human
acauuaacacuggugcuggugu

SEQ ID NO: 100200 - RNA, 22 nt, Human
acauuaaugaggugaugacaca

SEQ ID NO: 100201 - RNA, 22 nt, Human
acauuacagcaaguuuacguua

SEQ ID NO: 100202 - RNA, 22 nt, Human
acauuacuuaccuuggguucua

SEQ ID NO: 100203 - RNA, 22 nt, Human
acauuagaacauuaauauuggg

SEQ ID NO: 100204 - RNA, 22 nt, Human
acauuagcccaucugguauuug

SEQ ID NO: 100205 - RNA, 22 nt, Human
acauuauaguugcuacagagua

SEQ ID NO: 100206 - RNA, 22 nt, Human
acauuaucccuggcacaacugc

SEQ ID NO: 100207 - RNA, 22 nt, Human
acauucaaaaagcaucugucac

SEQ ID NO: 100208 - RNA, 22 nt, Human
acauucaagaugcauucacuua

SEQ ID NO: 100209 - RNA, 22 nt, Human
acauucaaguuucugcucaugg

SEQ ID NO: 100210 - RNA, 22 nt, Human
acauucaccacacuuauagggc

SEQ ID NO: 100211 - RNA, 22 nt, Human
acauucagaaucuuguagcagu

SEQ ID NO: 100212 - RNA, 22 nt, Human
acauucaggccacaguggaguc

SEQ ID NO: 100213 - RNA, 22 nt, Human
acauucaugcaccuuccuaucc

SEQ ID NO: 100214 - RNA, 22 nt, Human
acauucauggguuuuacauuau

SEQ ID NO: 100215 - RNA, 22 nt, Human
acauuccagguuggugcagggu

SEQ ID NO: 100216 - RNA, 19 nt, Human
acauucccaucagcaaugu

SEQ ID NO: 100217 - RNA, 22 nt, Human
acauucccuuggcuugaagcag

SEQ ID NO: 100218 - RNA, 22 nt, Human
acauucuauagcaagcugaucu

SEQ ID NO: 100219 - RNA, 22 nt, Human
acauucuaugaagauaauuuua

SEQ ID NO: 100220 - RNA, 22 nt, Human
acauucucuuccuaaauauacu

SEQ ID NO: 100221 - RNA, 22 nt, Human
acauucugaauaggcauuuuau

SEQ ID NO: 100222 - RNA, 22 nt, Human
acauucuguugaggcuggguca

SEQ ID NO: 100223 - RNA, 22 nt, Human
acauucuuauaagagugaggca

SEQ ID NO: 100224 - RNA, 22 nt, Human
acauucuugaagugaaguuuau

SEQ ID NO: 100225 - RNA, 23 nt, Human
acauucuugauucaggccuuagc

SEQ ID NO: 100226 - RNA, 22 nt, Human
acauugaaagcauauuaucucc

SEQ ID NO: 100227 - RNA, 22 nt, Human
acauugaacaguacaaaugauc

SEQ ID NO: 100228 - RNA, 22 nt, Human
acauugaagcugugaaaucaaa

SEQ ID NO: 100229 - RNA, 22 nt, Human
acauugaauuucacuuuuguac

SEQ ID NO: 100230 - RNA, 22 nt, Human
acauugaugugaugcagaagug

SEQ ID NO: 100231 - RNA, 22 nt, Human
agaaaguuugagaacuguagau

SEQ ID NO: 100232 - RNA, 22 nt, Human
agaaaguuuugugcuauauaug

SEQ ID NO: 100233 - RNA, 22 nt, Human
agaaauaagagcuuuccuuggg

SEQ ID NO: 100234 - RNA, 21 nt, Human
agaaauacagcagggaugauc

SEQ ID NO: 100235 - RNA, 18 nt, Human
agaaauaccaguauugga

SEQ ID NO: 100236 - RNA, 20 nt, Human
agaaauacuuugguauaaug

SEQ ID NO: 100237 - RNA, 22 nt, Human
agaaauacuuuguaaaucucac

SEQ ID NO: 100238 - RNA, 22 nt, Human
agaaauagcagagucaggcggg

SEQ ID NO: 100239 - RNA, 20 nt, Human
agaaaucagcauguccucug

SEQ ID NO: 100240 - RNA, 22 nt, Human
agaaaucaugucuuauuucuau

SEQ ID NO: 100241 - RNA, 22 nt, Human
agaaaucauuuuaggcuugaug

SEQ ID NO: 100242 - RNA, 22 nt, Human
agaaaucuuaucaagaaaugcc

SEQ ID NO: 100243 - RNA, 22 nt, Human
agaaaucuuggagucuguggua

SEQ ID NO: 100244 - RNA, 22 nt, Human
agaaaugaaaccaaagccuaga

SEQ ID NO: 100245 - RNA, 22 nt, Human
agaaaugaagcaggaguuauua

SEQ ID NO: 100246 - RNA, 22 nt, Human
agaaaugaauauguagugguua

SEQ ID NO: 100247 - RNA, 22 nt, Human
agaaaugacacacaugagacau

SEQ ID NO: 100248 - RNA, 22 nt, Human
agaaaugcaguuucaagacaaa

SEQ ID NO: 100249 - RNA, 22 nt, Human
agaaaugcucuuccugaccaga

SEQ ID NO: 100250 - RNA, 22 nt, Human
agaaaugggccuugggacacaa

SEQ ID NO: 100251 - RNA, 22 nt, Human
agaaauguaauugcaacugucu

SEQ ID NO: 100252 - RNA, 21 nt, Human
agaaauguaucauucuuuucc

SEQ ID NO: 100253 - RNA, 22 nt, Human
agaaaugucaaguguucuuguu

SEQ ID NO: 100254 - RNA, 22 nt, Human
agaaauguugaauacacaaaau

SEQ ID NO: 100255 - RNA, 22 nt, Human
agaaauguuuauggcugccuau

SEQ ID NO: 100256 - RNA, 22 nt, Human
agaacaaaucgauggaagccug

SEQ ID NO: 100257 - RNA, 22 nt, Human
agaacacacugggggaaacaag

SEQ ID NO: 100258 - RNA, 22 nt, Human
agaacagaagggaggaaggccu

SEQ ID NO: 100259 - RNA, 22 nt, Human
agaacagguucaggguauaaaa

SEQ ID NO: 100260 - RNA, 22 nt, Human
agaacagucguggugagagaaa

SEQ ID NO: 100261 - RNA, 22 nt, Human
agaacauagauaccuaagacag

SEQ ID NO: 100262 - RNA, 22 nt, Human
agaacaucugaagauacaaagu

SEQ ID NO: 100263 - RNA, 22 nt, Human
agaacauuugucgaucaauuug

SEQ ID NO: 100264 - RNA, 22 nt, Human
agaaccaugaguuugaguaucu

SEQ ID NO: 100265 - RNA, 22 nt, Human
agaaccucacgagauuccuuca

SEQ ID NO: 100266 - RNA, 22 nt, Human
agaaccugccuuuacucuccuu

SEQ ID NO: 100267 - RNA, 22 nt, Human
agaacgaaugcuucagcucuag

SEQ ID NO: 100268 - RNA, 22 nt, Human
agaacuauacauuacucauuga

SEQ ID NO: 100269 - RNA, 22 nt, Human
agaacucuaggauuggcuggau

SEQ ID NO: 100270 - RNA, 22 nt, Human
agaacucucgcuggaucagacu

SEQ ID NO: 100271 - RNA, 22 nt, Human
agaacugucacgagugacaaag

SEQ ID NO: 100272 - RNA, 22 nt, Human
agaacuguccccagagagcacu

SEQ ID NO: 100273 - RNA, 20 nt, Human
agaacuguuguuuggguccu

SEQ ID NO: 100274 - RNA, 22 nt, Human
agaacuuacauuauagagcugu

SEQ ID NO: 100275 - RNA, 22 nt, Human
agaacuuaggaacaacagcuua

SEQ ID NO: 100276 - RNA, 22 nt, Human
agaagaacuuagcuuucuaucu

SEQ ID NO: 100277 - RNA, 22 nt, Human
agaagacagagucuacauucua

SEQ ID NO: 100278 - RNA, 17 nt, Human
accaaugucagacaaag

SEQ ID NO: 100279 - RNA, 22 nt, Human
accaaugugaugauauuaggag

SEQ ID NO: 100280 - RNA, 22 nt, Human
accaauuucuuggcuuccaaau

SEQ ID NO: 100281 - RNA, 22 nt, Human
accacagaggaauuugaagagg

SEQ ID NO: 100282 - RNA, 22 nt, Human
accacaggggaggaaugaugcc

SEQ ID NO: 100283 - RNA, 22 nt, Human
accacaggguaaaguuagauau

SEQ ID NO: 100284 - RNA, 22 nt, Human
accacaguaugaaaucugaaau

SEQ ID NO: 100285 - RNA, 22 nt, Human
accacagucucgaagcacugca

SEQ ID NO: 100286 - RNA, 22 nt, Human
accacaucuagauugcagcccu

SEQ ID NO: 100287 - RNA, 22 nt, Human
accacccaccucacagcauagu

SEQ ID NO: 100288 - RNA, 22 nt, Human
accaccccagaauuuuucaagg

SEQ ID NO: 100289 - RNA, 22 nt, Human
accacccccuuggguguggaag

SEQ ID NO: 100290 - RNA, 22 nt, Human
accacccucagcagagcugaaa

SEQ ID NO: 100291 - RNA, 17 nt, Human
accaccucucaccagca

SEQ ID NO: 100292 - RNA, 22 nt, Human
accacuguacuauuugaguggc

SEQ ID NO: 100293 - RNA, 22 nt, Human
accacuguaucuccagcacauu

SEQ ID NO: 100294 - RNA, 17 nt, Human
accacuuugccaaguug

SEQ ID NO: 100295 - RNA, 22 nt, Human
accacuuugguauuucaauuuu

SEQ ID NO: 100296 - RNA, 22 nt, Human
accagaaaggaauaauagaauu

SEQ ID NO: 100297 - RNA, 22 nt, Human
accagaaaggaugccuccuucc

SEQ ID NO: 100298 - RNA, 22 nt, Human
accagaaggaccagaggcaagg

SEQ ID NO: 100299 - RNA, 22 nt, Human
accagagaauuuagccaagaaa

SEQ ID NO: 100300 - RNA, 20 nt, Human
accagagaccugaaucaguu

SEQ ID NO: 100301 - RNA, 22 nt, Human
accagagacugcauuucucuga

SEQ ID NO: 100302 - RNA, 22 nt, Human
accagagcccaucugcuccuag

SEQ ID NO: 100303 - RNA, 22 nt, Human
accagagcgcucaagccuuccc

SEQ ID NO: 100304 - RNA, 22 nt, Human
accagaggaagggaaucucaag

SEQ ID NO: 100305 - RNA, 22 nt, Human
accagaggaggaauuaccuucc

SEQ ID NO: 100306 - RNA, 22 nt, Human
accagaggcaguuucggcuggu

SEQ ID NO: 100307 - RNA, 22 nt, Human
accagaggcucugccaccucca

SEQ ID NO: 100308 - RNA, 22 nt, Human
accagagggcaaaccccagugu

SEQ ID NO: 100309 - RNA, 22 nt, Human
accagcacuuccagaggucagg

SEQ ID NO: 100310 - RNA, 22 nt, Human
accagcauuugcagaaauggag

SEQ ID NO: 100311 - RNA, 22 nt, Human
accagccccaccgggacugcag

SEQ ID NO: 100312 - RNA, 22 nt, Human
accagcucauaauuuucaaaac

SEQ ID NO: 100313 - RNA, 22 nt, Human
accagcucuggacaggcauuuc

SEQ ID NO: 100314 - RNA, 22 nt, Human
accagcucuucugcucuaguug

SEQ ID NO: 100315 - RNA, 22 nt, Human
accagcugaacugcagcccagg

SEQ ID NO: 100316 - RNA, 22 nt, Human
accagcugauuuaagaauaaag

SEQ ID NO: 100317 - RNA, 22 nt, Human
accagcugccuggucuaucugc

SEQ ID NO: 100318 - RNA, 22 nt, Human
accagcugccuuuucuuaguag

SEQ ID NO: 100319 - RNA, 22 nt, Human
accagcuggcccaugagcacgu

SEQ ID NO: 100320 - RNA, 22 nt, Human
accagcuggucaccugggcacu

SEQ ID NO: 100321 - RNA, 22 nt, Human
accagcuggucagggcuuuucu

SEQ ID NO: 100322 - RNA, 22 nt, Human
accagcuguguccuggcugcag

SEQ ID NO: 100323 - RNA, 22 nt, Human
accagcugugugacuuuuaaug

SEQ ID NO: 100324 - RNA, 22 nt, Human
accaggaaacucucgucuaguu

SEQ ID NO: 100325 - RNA, 22 nt, Human
accaggaagcugugagaccuuu

SEQ ID NO: 100326 - RNA, 22 nt, Human
accaggacauuuuagucaucuu

SEQ ID NO: 100327 - RNA, 23 nt, Human
accaggagccaagaucucccugg

SEQ ID NO: 100328 - RNA, 22 nt, Human
accaggagccacaggaggagcc

SEQ ID NO: 100329 - RNA, 22 nt, Human
accaggagggacccugguggcc

SEQ ID NO: 100330 - RNA, 22 nt, Human
accaggaguagaauaucuguga

SEQ ID NO: 100331 - RNA, 23 nt, Human
accaggaguugucucaggaaaca

SEQ ID NO: 100332 - RNA, 22 nt, Human
accaggcaacugugaaugggcu

SEQ ID NO: 100333 - RNA, 22 nt, Human
accaggcagcacuuuccuugca

SEQ ID NO: 100334 - RNA, 22 nt, Human
accaggcagcugggggugaugu

SEQ ID NO: 100335 - RNA, 22 nt, Human
accaggcaguauggugcugcaa

SEQ ID NO: 100336 - RNA, 22 nt, Human
accaggccaaaaucauauuuac

SEQ ID NO: 100337 - RNA, 22 nt, Human
accaggccaacagcuaaguuaa

SEQ ID NO: 100338 - RNA, 20 nt, Human
accaggccccgggcccugca

SEQ ID NO: 100339 - RNA, 20 nt, Human
accaggcccggugucuccuc

SEQ ID NO: 100340 - RNA, 22 nt, Human
agaauacaguucaguaauggau

SEQ ID NO: 100341 - RNA, 22 nt, Human
agaauacaucaaucuauuuucu

SEQ ID NO: 100342 - RNA, 22 nt, Human
agaauacaucuagugcugcaug

SEQ ID NO: 100343 - RNA, 22 nt, Human
agaauauucaucuguauucuua

SEQ ID NO: 100344 - RNA, 22 nt, Human
agaaucaaagagaaauacuuug

SEQ ID NO: 100345 - RNA, 22 nt, Human
agaaucaacugaaaauugguga

SEQ ID NO: 100346 - RNA, 22 nt, Human
agaaucaauucacugcugcagc

SEQ ID NO: 100347 - RNA, 22 nt, Human
agaaucacuggaauuguuuuuu

SEQ ID NO: 100348 - RNA, 20 nt, Human
agaaucagaguggaaaggaa

SEQ ID NO: 100349 - RNA, 19 nt, Human
agaaucaggucaggugaca

SEQ ID NO: 100350 - RNA, 22 nt, Human
agaaucagugagcaguugugau

SEQ ID NO: 100351 - RNA, 19 nt, Human
agaaucaucuugaagugau

SEQ ID NO: 100352 - RNA, 22 nt, Human
agaauccugaugaaaaggagag

SEQ ID NO: 100353 - RNA, 22 nt, Human
agaauccuggagaagcuguacc

SEQ ID NO: 100354 - RNA, 22 nt, Human
agaaucuaaauaugcaauuuga

SEQ ID NO: 100355 - RNA, 22 nt, Human
agaaucugaaggcaccucuggu

SEQ ID NO: 100356 - RNA, 22 nt, Human
agaaucugcauuuuaacaagau

SEQ ID NO: 100357 - RNA, 22 nt, Human
agaaucugcauuuuaacaagcu

SEQ ID NO: 100358 - RNA, 22 nt, Human
agaaucuucgguaacuggaaga

SEQ ID NO: 100359 - RNA, 22 nt, Human
agaaucuugggcaaauucaucu

SEQ ID NO: 100360 - RNA, 22 nt, Human
agaaugaauuaaucaacuggaa

SEQ ID NO: 100361 - RNA, 22 nt, Human
agaaugauaaugccaugaugga

SEQ ID NO: 100362 - RNA, 22 nt, Human
agaaugcuuccuuugaaacuga

SEQ ID NO: 100363 - RNA, 22 nt, Human
agaaugcuuguaccuuuguuuu

SEQ ID NO: 100364 - RNA, 22 nt, Human
agaauguagucuuggagauuua

SEQ ID NO: 100365 - RNA, 22 nt, Human
agaaugucaacagccucucaag

SEQ ID NO: 100366 - RNA, 22 nt, Human
agaauguuuucaugagaaugaa

SEQ ID NO: 100367 - RNA, 22 nt, Human
agaauuagcugggcagauuccu

SEQ ID NO: 100368 - RNA, 22 nt, Human
agaauucuccuucagggcagga

SEQ ID NO: 100369 - RNA, 22 nt, Human
agaauucuuggugguuagaaua

SEQ ID NO: 100370 - RNA, 22 nt, Human
agaauugcuggaauuugcuuua

SEQ ID NO: 100371 - RNA, 22 nt, Human
agaauuuaggcuugucugcugu

SEQ ID NO: 100372 - RNA, 23 nt, Human
agaauuucaaaguccagcacauu

SEQ ID NO: 100373 - RNA, 22 nt, Human
agaauuugagugcuuucugugu

SEQ ID NO: 100374 - RNA, 22 nt, Human
agaauuugguaguuauuuuugg

SEQ ID NO: 100375 - RNA, 22 nt, Human
agaauuuuaucuaaagggagua

SEQ ID NO: 100376 - RNA, 22 nt, Human
agaauuuuugauuaucuacucg

SEQ ID NO: 100377 - RNA, 22 nt, Human
agaauuuuugcaguuuagccau

SEQ ID NO: 100378 - RNA, 22 nt, Human
agacaaacccaguggcuguuuu

SEQ ID NO: 100379 - RNA, 22 nt, Human
agacaaaccuuguuuuaugaug

SEQ ID NO: 100380 - RNA, 22 nt, Human
agacaaagaaaccguagaagca

SEQ ID NO: 100381 - RNA, 22 nt, Human
agacaaauuuccugcaaugaag

SEQ ID NO: 100382 - RNA, 22 nt, Human
agacaaauuuguuuuccugucu

SEQ ID NO: 100383 - RNA, 22 nt, Human
agacaacaucacuaaagcugag

SEQ ID NO: 100384 - RNA, 22 nt, Human
agacaacaugaucagcaguccu

SEQ ID NO: 100385 - RNA, 22 nt, Human
agacaaggcccccuugggcucu

SEQ ID NO: 100386 - RNA, 22 nt, Human
agacaaguaggaaugguugaag

SEQ ID NO: 100387 - RNA, 22 nt, Human
agacaauggaccaagcaccuuc

SEQ ID NO: 100388 - RNA, 22 nt, Human
agacaauuaaaaaauuaugcuu

SEQ ID NO: 100389 - RNA, 22 nt, Human
agacacagaaguugcuguuggg

SEQ ID NO: 100390 - RNA, 22 nt, Human
agacacagcagugccugccuca

SEQ ID NO: 100391 - RNA, 22 nt, Human
agacacaguacuugcccucaug

SEQ ID NO: 100392 - RNA, 22 nt, Human
agacacagugaguuucuuuccc

SEQ ID NO: 100393 - RNA, 22 nt, Human
agacacaguguugaaggcuagu

SEQ ID NO: 100394 - RNA, 22 nt, Human
agacacauaggaccacacugug

SEQ ID NO: 100395 - RNA, 22 nt, Human
agacacccagugauugagacuu

SEQ ID NO: 100396 - RNA, 22 nt, Human
acauuuuaauaugcuuagugug

SEQ ID NO: 100397 - RNA, 22 nt, Human
acauuuugagaaaugacaagcu

SEQ ID NO: 100398 - RNA, 22 nt, Human
acauuuuuacugggcaucugca

SEQ ID NO: 100399 - RNA, 22 nt, Human
acauuuuuauucaucaaagcag

SEQ ID NO: 100400 - RNA, 22 nt, Human
acauuuuuuagagucccacauu

SEQ ID NO: 100401 - RNA, 22 nt, Human
accaaaaauuguggggcugaau

SEQ ID NO: 100402 - RNA, 22 nt, Human
accaaagcgagugauaugucau

SEQ ID NO: 100403 - RNA, 22 nt, Human
accaaaugcuuggcugcuguga

SEQ ID NO: 100404 - RNA, 22 nt, Human
accaaggagaaggugcaagcuu

SEQ ID NO: 100405 - RNA, 22 nt, Human
accaaggagccacauacaaccu

SEQ ID NO: 100406 - RNA, 22 nt, Human
accaaggcuaaaauaacauguu

SEQ ID NO: 100407 - RNA, 22 nt, Human
accaaucuccuauuuuguuuca

SEQ ID NO: 100408 - RNA, 20 nt, Human
accaauuucagaggugcaga

SEQ ID NO: 100409 - RNA, 22 nt, Human
accacagcuuugcaccaggugu

SEQ ID NO: 100410 - RNA, 22 nt, Human
accacaggaauugcucuguggu

SEQ ID NO: 100411 - RNA, 22 nt, Human
accacagugggccacaagaagu

SEQ ID NO: 100412 - RNA, 22 nt, Human
accacaguuuaguccaaugaca

SEQ ID NO: 100413 - RNA, 22 nt, Human
accacccauucagaaacacuga

SEQ ID NO: 100414 - RNA, 22 nt, Human
accaccccaaaugaaccucugu

SEQ ID NO: 100415 - RNA, 22 nt, Human
accaccucaucaagcuggauug

SEQ ID NO: 100416 - RNA, 22 nt, Human
accacuggauaucagagaugua

SEQ ID NO: 100417 - RNA, 22 nt, Human
accacuggcucaggagcuggga

SEQ ID NO: 100418 - RNA, 22 nt, Human
accacugggcgggcagccugcu

SEQ ID NO: 100419 - RNA, 22 nt, Human
accacuguacagcagauauagu

SEQ ID NO: 100420 - RNA, 22 nt, Human
accagaagcuggagcacaagga

SEQ ID NO: 100421 - RNA, 20 nt, Human
accagagacuggggacaagu

SEQ ID NO: 100422 - RNA, 22 nt, Human
accagagaggcugcagugugug

SEQ ID NO: 100423 - RNA, 22 nt, Human
accagagaugucuaauaggggc

SEQ ID NO: 100424 - RNA, 22 nt, Human
accagagcucuucagcacagga

SEQ ID NO: 100425 - RNA, 22 nt, Human
accagagcuggcagaguaucaa

SEQ ID NO: 100426 - RNA, 22 nt, Human
accagagggagacuuccucuuc

SEQ ID NO: 100427 - RNA, 22 nt, Human
accagagucaauuauuuugcca

SEQ ID NO: 100428 - RNA, 22 nt, Human
accagaguuggaauaauuuuga

SEQ ID NO: 100429 - RNA, 22 nt, Human
accagcacggauuagaaugcuu

SEQ ID NO: 100430 - RNA, 22 nt, Human
accagcagcugccagaguggag

SEQ ID NO: 100431 - RNA, 21 nt, Human
accagcaggagaucagaagga

SEQ ID NO: 100432 - RNA, 22 nt, Human
accagcagggcugggccaaugg

SEQ ID NO: 100433 - RNA, 22 nt, Human
accagcauccuuccuauuaaca

SEQ ID NO: 100434 - RNA, 22 nt, Human
accagcauugcuuuggguuaua

SEQ ID NO: 100435 - RNA, 22 nt, Human
accagccaccaccaggagaucg

SEQ ID NO: 100436 - RNA, 19 nt, Human
accagcccacucccaguuu

SEQ ID NO: 100437 - RNA, 22 nt, Human
accagcccucaggucagauacu

SEQ ID NO: 100438 - RNA, 17 nt, Human
accagccucuccugggg

SEQ ID NO: 100439 - RNA, 22 nt, Human
accagccugucugagucguggg

SEQ ID NO: 100440 - RNA, 22 nt, Human
accagcucagaagccagaaaga

SEQ ID NO: 100441 - RNA, 22 nt, Human
accagcuccaggccccugcugg

SEQ ID NO: 100442 - RNA, 22 nt, Human
accagcucuuucuuuucacuau

SEQ ID NO: 100443 - RNA, 23 nt, Human
accagcugcccugaacuuugugc

SEQ ID NO: 100444 - RNA, 22 nt, Human
accagcuggucaguugaagauu

SEQ ID NO: 100445 - RNA, 22 nt, Human
accaggaaacugugcccacgac

SEQ ID NO: 100446 - RNA, 19 nt, Human
accaggaacuucccuaggc

SEQ ID NO: 100447 - RNA, 22 nt, Human
accaggaagcaucccuuuguaa

SEQ ID NO: 100448 - RNA, 20 nt, Human
accaggaaucuuuucugagc

SEQ ID NO: 100449 - RNA, 22 nt, Human
acucucucugauggaacuuuag

SEQ ID NO: 100450 - RNA, 22 nt, Human
acucucugguguagaaagaccu

SEQ ID NO: 100451 - RNA, 22 nt, Human
acucucugucuaaaugcaguuu

SEQ ID NO: 100452 - RNA, 22 nt, Human
acucucugugauggaggccagc

SEQ ID NO: 100453 - RNA, 22 nt, Human
acucucuugggggagagcagag

SEQ ID NO: 100454 - RNA, 22 nt, Human
acucugaacuccaggaggcuca

SEQ ID NO: 100455 - RNA, 22 nt, Human
acucugacauuuaaaaagcaau

SEQ ID NO: 100456 - RNA, 22 nt, Human
acucugacuggagugagagagg

SEQ ID NO: 100457 - RNA, 22 nt, Human
acucugccuuaguccuggggcu

SEQ ID NO: 100458 - RNA, 22 nt, Human
acucugcucaaaguccugaggc

SEQ ID NO: 100459 - RNA, 17 nt, Human
acucugcugaaguagaa

SEQ ID NO: 100460 - RNA, 22 nt, Human
acucugcugauagguccucaga

SEQ ID NO: 100461 - RNA, 21 nt, Human
acucugcugcgggcuuggccu

SEQ ID NO: 100462 - RNA, 22 nt, Human
acucuggcugccuugugagcau

SEQ ID NO: 100463 - RNA, 22 nt, Human
acucugggaauccucaccuucc

SEQ ID NO: 100464 - RNA, 22 nt, Human
acucugggaugagaaaaggguu

SEQ ID NO: 100465 - RNA, 22 nt, Human
acucugggccccagguggagcu

SEQ ID NO: 100466 - RNA, 20 nt, Human
acucuggggcucauuagggg

SEQ ID NO: 100467 - RNA, 22 nt, Human
acucuggguucuuucacuugac

SEQ ID NO: 100468 - RNA, 22 nt, Human
acucuguaauucugaagcaccu

SEQ ID NO: 100469 - RNA, 22 nt, Human
acucuguagggacgguucuccc

SEQ ID NO: 100470 - RNA, 21 nt, Human
acucugucuugagccaucugu

SEQ ID NO: 100471 - RNA, 22 nt, Human
acucugugaagucuuauuaugc

SEQ ID NO: 100472 - RNA, 22 nt, Human
acucugugcuggggaccucauc

SEQ ID NO: 100473 - RNA, 22 nt, Human
acucuguuugcagguagcucag

SEQ ID NO: 100474 - RNA, 22 nt, Human
acucuuauggaaauuuuaacua

SEQ ID NO: 100475 - RNA, 22 nt, Human
acucuucagggcagugagcggg

SEQ ID NO: 100476 - RNA, 22 nt, Human
acucuucauucaaguaugcaaa

SEQ ID NO: 100477 - RNA, 22 nt, Human
acucuugaacugauuaagaaug

SEQ ID NO: 100478 - RNA, 22 nt, Human
acucuugauugauuuagucuuu

SEQ ID NO: 100479 - RNA, 22 nt, Human
acucuuuacuuaaacucuaagu

SEQ ID NO: 100480 - RNA, 22 nt, Human
acucuuuauuguuuguggcuag

SEQ ID NO: 100481 - RNA, 22 nt, Human
acucuuugucuguugccgcuua

SEQ ID NO: 100482 - RNA, 22 nt, Human
acucuuuuauaaagcaucuuga

SEQ ID NO: 100483 - RNA, 22 nt, Human
acucuuuuaugcauuccuucag

SEQ ID NO: 100484 - RNA, 22 nt, Human
acugaaacauauauuugaguuu

SEQ ID NO: 100485 - RNA, 22 nt, Human
acugaacacuuuugaaagauua

SEQ ID NO: 100486 - RNA, 22 nt, Human
acugaacagaccauuuuguccu

SEQ ID NO: 100487 - RNA, 22 nt, Human
acugaagagaagcauuuucugc

SEQ ID NO: 100488 - RNA, 19 nt, Human
acugaagcagggacugaaa

SEQ ID NO: 100489 - RNA, 22 nt, Human
acugaaggaaacuuuuguguuu

SEQ ID NO: 100490 - RNA, 22 nt, Human
acugaauaaggugaaugcucug

SEQ ID NO: 100491 - RNA, 22 nt, Human
acugaauagugcugcauuguac

SEQ ID NO: 100492 - RNA, 21 nt, Human
acugaccacuucugccugucu

SEQ ID NO: 100493 - RNA, 22 nt, Human
acugacuguggauggcagcagc

SEQ ID NO: 100494 - RNA, 22 nt, Human
acugagaacuuggggacagagg

SEQ ID NO: 100495 - RNA, 22 nt, Human
acugagaagauucucacucuua

SEQ ID NO: 100496 - RNA, 22 nt, Human
acugagacaacuguguuucuaa

SEQ ID NO: 100497 - RNA, 22 nt, Human
acugagacugaaucugaaugau

SEQ ID NO: 100498 - RNA, 22 nt, Human
acugagaggaaauugagacuau

SEQ ID NO: 100499 - RNA, 22 nt, Human
acugagaugaauagauggcaag

SEQ ID NO: 100500 - RNA, 22 nt, Human
acugagauuuacauguucuagu

SEQ ID NO: 100501 - RNA, 22 nt, Human
acugagcacuugguauauuucc

SEQ ID NO: 100502 - RNA, 22 nt, Human
acugagcaggguuccgcaugga

SEQ ID NO: 100503 - RNA, 22 nt, Human
acugagcugcaagucagggagg

SEQ ID NO: 100504 - RNA, 20 nt, Human
acugagcugcauggagagga

SEQ ID NO: 100505 - RNA, 22 nt, Human
acugaggagaaauuugagugaa

SEQ ID NO: 100506 - RNA, 22 nt, Human
acugaggauuagcccaggcuag

SEQ ID NO: 100507 - RNA, 22 nt, Human
acugaggcuuacaaagguaaag

SEQ ID NO: 100508 - RNA, 22 nt, Human
acugagggcauaaaaguacugu

SEQ ID NO: 100509 - RNA, 21 nt, Human
acugagggccagagaggaccu

SEQ ID NO: 100510 - RNA, 22 nt, Human
acugagguagggcacaccuagg

SEQ ID NO: 100511 - RNA, 22 nt, Human
acugaggucaugcauaguuucu

SEQ ID NO: 100512 - RNA, 20 nt, Human
acugagguuagauaacaggu

SEQ ID NO: 100513 - RNA, 22 nt, Human
acuugaaaagcucagcaguagu

SEQ ID NO: 100514 - RNA, 19 nt, Human
acuugaaagcagagaguuu

SEQ ID NO: 100515 - RNA, 22 nt, Human
acuugaauaggaaagccacaaa

SEQ ID NO: 100516 - RNA, 22 nt, Human
acuugaauuaggccuugagaga

SEQ ID NO: 100517 - RNA, 22 nt, Human
acuugaauuauauuucuagaga

SEQ ID NO: 100518 - RNA, 22 nt, Human
acuugacaccuaauuagucauc

SEQ ID NO: 100519 - RNA, 23 nt, Human
acuugauuauuguugauagauuc

SEQ ID NO: 100520 - RNA, 22 nt, Human
acuugcaagguugcaguuagaa

SEQ ID NO: 100521 - RNA, 22 nt, Human
acuugcaugucaggaaauuaac

SEQ ID NO: 100522 - RNA, 22 nt, Human
acuugcauguguaaaucuuccu

SEQ ID NO: 100523 - RNA, 22 nt, Human
acuugcauuuaaauauugaaua

SEQ ID NO: 100524 - RNA, 22 nt, Human
acuugccuccauauuuuauugc

SEQ ID NO: 100525 - RNA, 22 nt, Human
acuugccuguuacauuucuagu

SEQ ID NO: 100526 - RNA, 22 nt, Human
acuugcugguggcauuuacagu

SEQ ID NO: 100527 - RNA, 20 nt, Human
acuuggaacucauuuuucuu

SEQ ID NO: 100528 - RNA, 23 nt, Human
acuuggaagcagugaacaacuuu

SEQ ID NO: 100529 - RNA, 22 nt, Human
acuuggagggagcuggguggaa

SEQ ID NO: 100530 - RNA, 22 nt, Human
acuuggcaaacaacguggauau

SEQ ID NO: 100531 - RNA, 21 nt, Human
acuuggcagaacgcagaaggc

SEQ ID NO: 100532 - RNA, 22 nt, Human
acuuggcaggucaggggauauu

SEQ ID NO: 100533 - RNA, 22 nt, Human
acuuggccuuauuuccacagaa

SEQ ID NO: 100534 - RNA, 22 nt, Human
acuuggcucagauaccaugccc

SEQ ID NO: 100535 - RNA, 22 nt, Human
acuugggaggcugaaggacauu

SEQ ID NO: 100536 - RNA, 22 nt, Human
acuugguguauuagcucucacu

SEQ ID NO: 100537 - RNA, 22 nt, Human
acuugguuggucucacccuguu

SEQ ID NO: 100538 - RNA, 22 nt, Human
acuuguaaguaacaagugagaa

SEQ ID NO: 100539 - RNA, 22 nt, Human
acuuguauggagacuuggaacc

SEQ ID NO: 100540 - RNA, 17 nt, Human
acuuguauugugcuuua

SEQ ID NO: 100541 - RNA, 22 nt, Human
acuuguuagauauaaaguuugu

SEQ ID NO: 100542 - RNA, 22 nt, Human
acuuguugcccuccugaaaauu

SEQ ID NO: 100543 - RNA, 22 nt, Human
acuuguuuacaagcaguucuga

SEQ ID NO: 100544 - RNA, 22 nt, Human
acuuguuucaacuguacucuca

SEQ ID NO: 100545 - RNA, 22 nt, Human
acuuguuucaacuguacucucc

SEQ ID NO: 100546 - RNA, 22 nt, Human
acuuuaaagcagaauggcuaug

SEQ ID NO: 100547 - RNA, 22 nt, Human
acuuuaaggaggcacucaucuc

SEQ ID NO: 100548 - RNA, 22 nt, Human
acuuuacaaacuccucacuguu

SEQ ID NO: 100549 - RNA, 22 nt, Human
acuuuacaauauccugugacuu

SEQ ID NO: 100550 - RNA, 20 nt, Human
acuuuacagagaagacugac

SEQ ID NO: 100551 - RNA, 22 nt, Human
acuuuacagaugguuuccugac

SEQ ID NO: 100552 - RNA, 22 nt, Human
acuuuacccgcacucagacaca

SEQ ID NO: 100553 - RNA, 22 nt, Human
acuuuacuacauccacagaugg

SEQ ID NO: 100554 - RNA, 22 nt, Human
acuuuacucaacaaauauuuau

SEQ ID NO: 100555 - RNA, 22 nt, Human
acuuuagaaaaggaacagagga

SEQ ID NO: 100556 - RNA, 22 nt, Human
acuuuagaccaucuuccacagu

SEQ ID NO: 100557 - RNA, 23 nt, Human
acuuuagauaaauuaugugcaca

SEQ ID NO: 100558 - RNA, 20 nt, Human
acuggcagccugccugcugu

SEQ ID NO: 100559 - RNA, 22 nt, Human
acuggcagcuguaggaugcaug

SEQ ID NO: 100560 - RNA, 19 nt, Human
acuggcagcuguagucugu

SEQ ID NO: 100561 - RNA, 22 nt, Human
acuggcaguagagggagcgcau

SEQ ID NO: 100562 - RNA, 22 nt, Human
acuggcagugucguuuacauga

SEQ ID NO: 100563 - RNA, 22 nt, Human
acuggccaggagcuggaaauac

SEQ ID NO: 100564 - RNA, 22 nt, Human
acuggccaggcacagcuguggg

SEQ ID NO: 100565 - RNA, 22 nt, Human
acuggccaugggauuuauauuu

SEQ ID NO: 100566 - RNA, 22 nt, Human
acuggcucagaguuccuagaga

SEQ ID NO: 100567 - RNA, 22 nt, Human
acuggcugaguuuauguucaca

SEQ ID NO: 100568 - RNA, 22 nt, Human
acuggcugcgggguggaagaag

SEQ ID NO: 100569 - RNA, 21 nt, Human
acuggcuggcugaguuuccug

SEQ ID NO: 100570 - RNA, 22 nt, Human
acuggcugugcccauagagcuc

SEQ ID NO: 100571 - RNA, 22 nt, Human
acuggcuguggccacggcugcu

SEQ ID NO: 100572 - RNA, 23 nt, Human
acuggcuuugauccagauagauu

SEQ ID NO: 100573 - RNA, 22 nt, Human
acuggcuuugccucugccucuc

SEQ ID NO: 100574 - RNA, 22 nt, Human
acugggaaaaacugcuuugagg

SEQ ID NO: 100575 - RNA, 22 nt, Human
acugggaaaagcuauggcaaau

SEQ ID NO: 100576 - RNA, 22 nt, Human
acugggaaagugcugccugcag

SEQ ID NO: 100577 - RNA, 22 nt, Human
acugggaacaaggugcucagcg

SEQ ID NO: 100578 - RNA, 22 nt, Human
acugggaagacaagaaagauag

SEQ ID NO: 100579 - RNA, 22 nt, Human
acugggaagucagagagaggcu

SEQ ID NO: 100580 - RNA, 20 nt, Human
acugggagcuaacggagauu

SEQ ID NO: 100581 - RNA, 22 nt, Human
acugggaggcaucuggagcuga

SEQ ID NO: 100582 - RNA, 22 nt, Human
acugggagggucuugaagaggg

SEQ ID NO: 100583 - RNA, 22 nt, Human
acugggcaccaucaugagauag

SEQ ID NO: 100584 - RNA, 22 nt, Human
acugggcaccaucaugagaugg

SEQ ID NO: 100585 - RNA, 22 nt, Human
acugggcagcagcucgagccgc

SEQ ID NO: 100586 - RNA, 22 nt, Human
acugggcauuuugaacguucuu

SEQ ID NO: 100587 - RNA, 22 nt, Human
acugggccagacacugauuccc

SEQ ID NO: 100588 - RNA, 22 nt, Human
acugggccaggggcuuuggagc

SEQ ID NO: 100589 - RNA, 22 nt, Human
acugggccaggugugggugagu

SEQ ID NO: 100590 - RNA, 22 nt, Human
acugggccgaaauggacagaau

SEQ ID NO: 100591 - RNA, 22 nt, Human
acugggcucauaaugucauaga

SEQ ID NO: 100592 - RNA, 22 nt, Human
acugggcugccugguucuucua

SEQ ID NO: 100593 - RNA, 22 nt, Human
acugggcuguaaagagaggcaa

SEQ ID NO: 100594 - RNA, 22 nt, Human
acugggcuguuuuuugagugga

SEQ ID NO: 100595 - RNA, 22 nt, Human
acuggggaauggaacugggaau

SEQ ID NO: 100596 - RNA, 22 nt, Human
acuggggauuagggacucagug

SEQ ID NO: 100597 - RNA, 22 nt, Human
acuggguggcugccuccuucuc

SEQ ID NO: 100598 - RNA, 22 nt, Human
acuggguguauuagugguguuu

SEQ ID NO: 100599 - RNA, 22 nt, Human
acugguaacaauggaagcuucu

SEQ ID NO: 100600 - RNA, 22 nt, Human
acugguaccugucuugaauuuu

SEQ ID NO: 100601 - RNA, 22 nt, Human
acugguacuguucugcggauca

SEQ ID NO: 100602 - RNA, 22 nt, Human
acugguuuuccagguuacuucu

SEQ ID NO: 100603 - RNA, 22 nt, Human
acuguaaaaugagauauguaua

SEQ ID NO: 100604 - RNA, 22 nt, Human
acuguaaagaaguaaguauggg

SEQ ID NO: 100605 - RNA, 22 nt, Human
acuguaaaguuacgaucaaguu

SEQ ID NO: 100606 - RNA, 22 nt, Human
acuguaacacaaugguaucugu

SEQ ID NO: 100607 - RNA, 22 nt, Human
acuguaacacucauacugaagu

SEQ ID NO: 100608 - RNA, 19 nt, Human
acuguaaggcauuuuuuuc

SEQ ID NO: 100609 - RNA, 22 nt, Human
acuguaaugguggauccauguc

SEQ ID NO: 100610 - RNA, 22 nt, Human
acuguaauguuuuaaagcagag

SEQ ID NO: 100611 - RNA, 22 nt, Human
acuguaauuaucugaacgugca

SEQ ID NO: 100612 - RNA, 22 nt, Human
acuguacauguaaacauuguca

SEQ ID NO: 100613 - RNA, 22 nt, Human
acuguacuuuagaaaguguagu

SEQ ID NO: 100614 - RNA, 22 nt, Human
acuguagucuaaauauagucuu

SEQ ID NO: 100615 - RNA, 22 nt, Human
acuguauaaggcauagguaagc

SEQ ID NO: 100616 - RNA, 22 nt, Human
acuguauuuuguacuuucgugu

SEQ ID NO: 100617 - RNA, 22 nt, Human
acugucaaauuuauggaaagag

SEQ ID NO: 100618 - RNA, 22 nt, Human
acugucaaggaaacaaaauuac

SEQ ID NO: 100619 - RNA, 22 nt, Human
acugucaauagugcugagcuug

SEQ ID NO: 100620 - RNA, 22 nt, Human
acugucauuaaugaauguaaua

SEQ ID NO: 100621 - RNA, 22 nt, Human
acuguccagaagauagaaauau

SEQ ID NO: 100622 - RNA, 22 nt, Human
acuguccauaauauuggugaac

SEQ ID NO: 100623 - RNA, 22 nt, Human
acuguccauucacucauauuca

SEQ ID NO: 100624 - RNA, 22 nt, Human
acuguccuggagcucacacucu

SEQ ID NO: 100625 - RNA, 22 nt, Human
acugucuccucaucaugccugg

SEQ ID NO: 100626 - RNA, 18 nt, Human
acugucucugagaguggu

SEQ ID NO: 100627 - RNA, 22 nt, Human
acugucuguacuucuugcaagg

SEQ ID NO: 100628 - RNA, 22 nt, Human
acugucuugcuaugagcuccca

SEQ ID NO: 100629 - RNA, 22 nt, Human
acugucuuguguuaaagaacca

SEQ ID NO: 100630 - RNA, 22 nt, Human
acugucuuuauuagaaucuuau

SEQ ID NO: 100631 - RNA, 21 nt, Human
acugugaagaugcuauaaacu

SEQ ID NO: 100632 - RNA, 22 nt, Human
acugugaaucacuacuaguaga

SEQ ID NO: 100633 - RNA, 22 nt, Human
acugugagagagguucuuggua

SEQ ID NO: 100634 - RNA, 22 nt, Human
acugugagaguuuuucuaggag

SEQ ID NO: 100635 - RNA, 22 nt, Human
acugugauguuugugaucaucu

SEQ ID NO: 100636 - RNA, 22 nt, Human
acugugcacaauucuaaguccu

SEQ ID NO: 100637 - RNA, 22 nt, Human
acugugcacacaaaaauagauu

SEQ ID NO: 100638 - RNA, 22 nt, Human
acugugcaucuauugccauuua

SEQ ID NO: 100639 - RNA, 21 nt, Human
acugugccaggcacaaaaaca

SEQ ID NO: 100640 - RNA, 22 nt, Human
acugugcugcucuccgcagccc

SEQ ID NO: 100641 - RNA, 22 nt, Human
acuguggaugccaaaggggagg

SEQ ID NO: 100642 - RNA, 22 nt, Human
acuguggcgucaggaagaaauu

SEQ ID NO: 100643 - RNA, 22 nt, Human
acugugggggagccagucccau

SEQ ID NO: 100644 - RNA, 22 nt, Human
acugugggucccagcugugucu

SEQ ID NO: 100645 - RNA, 22 nt, Human
acuugaaacccugagaugauaa

SEQ ID NO: 100646 - RNA, 21 nt, Human
acuugaaguuggaguuucugu

SEQ ID NO: 100647 - RNA, 22 nt, Human
acuugaauaggugucaaggcca

SEQ ID NO: 100648 - RNA, 22 nt, Human
acuugcaaagugagggaguguu

SEQ ID NO: 100649 - RNA, 22 nt, Human
acuugcauguuauuuuuauagg

SEQ ID NO: 100650 - RNA, 22 nt, Human
acuugccccagaauugcugcug

SEQ ID NO: 100651 - RNA, 22 nt, Human
acuuggaaaauucaaaauggca

SEQ ID NO: 100652 - RNA, 22 nt, Human
acuuggaaagaugcaacacagu

SEQ ID NO: 100653 - RNA, 22 nt, Human
acuuggauauguucacuagacc

SEQ ID NO: 100654 - RNA, 21 nt, Human
acuuggccaggcccccaccug

SEQ ID NO: 100655 - RNA, 22 nt, Human
acuuggcuucaagguuaagguc

SEQ ID NO: 100656 - RNA, 22 nt, Human
acuuggcuuuuccaucucugca

SEQ ID NO: 100657 - RNA, 22 nt, Human
acuugggagggugugggcagcu

SEQ ID NO: 100658 - RNA, 22 nt, Human
acuuggucguggugcagcaugg

SEQ ID NO: 100659 - RNA, 22 nt, Human
acuuggugaagucaggugauua

SEQ ID NO: 100660 - RNA, 22 nt, Human
acuugguugaugucauaagguu

SEQ ID NO: 100661 - RNA, 22 nt, Human
acuugucuggcagaucaugcaa

SEQ ID NO: 100662 - RNA, 22 nt, Human
acuugucuuuguaaaauagaaa

SEQ ID NO: 100663 - RNA, 22 nt, Human
acuuguguaacacagaaagaac

SEQ ID NO: 100664 - RNA, 22 nt, Human
acuuguuugaaucucucuagag

SEQ ID NO: 100665 - RNA, 22 nt, Human
acuuguuugccuaaaauuuuga

SEQ ID NO: 100666 - RNA, 22 nt, Human
acuuguuuggagccagcuguaa

SEQ ID NO: 100667 - RNA, 22 nt, Human
acuguuuaaaggcuuccuuucu

SEQ ID NO: 100668 - RNA, 22 nt, Human
acuguuucugccacaauagccc

SEQ ID NO: 100669 - RNA, 22 nt, Human
acuguuuuccuaaugagcaaga

SEQ ID NO: 100670 - RNA, 22 nt, Human
acuguuuugugccuuaguuucc

SEQ ID NO: 100671 - RNA, 22 nt, Human
acuuacaaguucccuuucucag

SEQ ID NO: 100672 - RNA, 22 nt, Human
acuuagaagaugcaguaaagca

SEQ ID NO: 100673 - RNA, 22 nt, Human
acuuagcagguacuuucauauu

SEQ ID NO: 100674 - RNA, 22 nt, Human
acuuaggccuugcuaagcauuu

SEQ ID NO: 100675 - RNA, 22 nt, Human
acuuaggcuugguucagcuaga

SEQ ID NO: 100676 - RNA, 20 nt, Human
acuuaguguaggguuccuag

SEQ ID NO: 100677 - RNA, 22 nt, Human
acuuaguuaaguauuuuggaaa

SEQ ID NO: 100678 - RNA, 22 nt, Human
acuuauagccagaauuaauuau

SEQ ID NO: 100679 - RNA, 22 nt, Human
acuuauauuugcuuuaugcuuc

SEQ ID NO: 100680 - RNA, 22 nt, Human
acuucaaaucucuugaaagcaa

SEQ ID NO: 100681 - RNA, 22 nt, Human
acuucaaaugugacaaugugaa

SEQ ID NO: 100682 - RNA, 22 nt, Human
acuucaaauucugggggaagag

SEQ ID NO: 100683 - RNA, 22 nt, Human
acuucacagauauuuauuuggu

SEQ ID NO: 100684 - RNA, 22 nt, Human
acuucacagguuuucauaaaac

SEQ ID NO: 100685 - RNA, 22 nt, Human
acuucagagaaagagggaauuc

SEQ ID NO: 100686 - RNA, 22 nt, Human
acuucagaguuaguuauagacc

SEQ ID NO: 100687 - RNA, 22 nt, Human
acuucagugugguauaaaacgu

SEQ ID NO: 100688 - RNA, 22 nt, Human
acuucaugcagaagagagcugu

SEQ ID NO: 100689 - RNA, 22 nt, Human
acuucauguuucuauuagcuca

SEQ ID NO: 100690 - RNA, 22 nt, Human
acuuccaaagaagugauuacag

SEQ ID NO: 100691 - RNA, 22 nt, Human
acuuccaaauaccaucacauug

SEQ ID NO: 100692 - RNA, 22 nt, Human
acuuccaaguuuauucauguga

SEQ ID NO: 100693 - RNA, 22 nt, Human
acuuccagcaacuuggugcuau

SEQ ID NO: 100694 - RNA, 22 nt, Human
acuuccagcaccucaagcggaa

SEQ ID NO: 100695 - RNA, 22 nt, Human
acuuccagcuagguucugcuaa

SEQ ID NO: 100696 - RNA, 22 nt, Human
acuuccagcuuuauaauucagu

SEQ ID NO: 100697 - RNA, 22 nt, Human
acuuccagguuccacccaagac

SEQ ID NO: 100698 - RNA, 22 nt, Human
acuuccagugucugcugcuagc

SEQ ID NO: 100699 - RNA, 23 nt, Human
acuuccaguuauaggaacucuuc

SEQ ID NO: 100700 - RNA, 23 nt, Human
acuuccaguugcuucagcauaug

SEQ ID NO: 100701 - RNA, 22 nt, Human
acuuccaguuuuaauuaaauug

SEQ ID NO: 100702 - RNA, 22 nt, Human
acuucccaacgugggccuccca

SEQ ID NO: 100703 - RNA, 18 nt, Human
acuucccagaugagggga

SEQ ID NO: 100704 - RNA, 22 nt, Human
acuucccauuucucugcuuuag

SEQ ID NO: 100705 - RNA, 22 nt, Human
acuuccuggcugggugaccugg

SEQ ID NO: 100706 - RNA, 22 nt, Human
acuuccugggcaugcagagucc

SEQ ID NO: 100707 - RNA, 22 nt, Human
acuuccuguauuuauccauagc

SEQ ID NO: 100708 - RNA, 22 nt, Human
acuuccuuccaaacauucauuu

SEQ ID NO: 100709 - RNA, 22 nt, Human
acuuccuugucaggugcaucau

SEQ ID NO: 100710 - RNA, 22 nt, Human
acuucuauuggucaugauaaaa

SEQ ID NO: 100711 - RNA, 22 nt, Human
acuucucugguugagguccaau

SEQ ID NO: 100712 - RNA, 22 nt, Human
acuucucuuccccggaacucua

SEQ ID NO: 100713 - RNA, 22 nt, Human
acuucuguauguccugcauuca

SEQ ID NO: 100714 - RNA, 22 nt, Human
acuucuguccuccaagccacgu

SEQ ID NO: 100715 - RNA, 22 nt, Human
acuucuugaugaaaaugguacu

SEQ ID NO: 100716 - RNA, 22 nt, Human
acuugaaacaucuuuaaaugua

SEQ ID NO: 100717 - RNA, 22 nt, Human
acuugaaaccuuggcaaacaau

SEQ ID NO: 100718 - RNA, 22 nt, Human
acuugaaagaaguuuccuuaaa

SEQ ID NO: 100719 - RNA, 22 nt, Human
acuugaaaggaagcucuaaaac

SEQ ID NO: 100720 - RNA, 22 nt, Human
acuugaauucaaagcgaaagca

SEQ ID NO: 100721 - RNA, 22 nt, Human
acuugacuuugucauuugugcu

SEQ ID NO: 100722 - RNA, 22 nt, Human
acuugauuguaugaaguuauuu

SEQ ID NO: 100723 - RNA, 22 nt, Human
acuugauuuugaaccuuucuac

SEQ ID NO: 100724 - RNA, 22 nt, Human
acuugauuuuuauaauaaaugg

SEQ ID NO: 100725 - RNA, 22 nt, Human
acuugcauuauauuuaucacaa

SEQ ID NO: 100726 - RNA, 22 nt, Human
acuugccauaaaugaaaauacu

SEQ ID NO: 100727 - RNA, 22 nt, Human
acuugccuaaggucaugcaacu

SEQ ID NO: 100728 - RNA, 20 nt, Human
acuugcugggcuuuguuacc

SEQ ID NO: 100729 - RNA, 22 nt, Human
acuugcuuaguuugcaacagag

SEQ ID NO: 100730 - RNA, 22 nt, Human
acuugcuugggccaucucgcuu

SEQ ID NO: 100731 - RNA, 22 nt, Human
acuuggagagauaaucccauau

SEQ ID NO: 100732 - RNA, 22 nt, Human
acuugggaaagaaguuucaccg

SEQ ID NO: 100733 - RNA, 22 nt, Human
acuugggaguucuggaagccug

SEQ ID NO: 100734 - RNA, 22 nt, Human
acuugggaugguggccagagcg

SEQ ID NO: 100735 - RNA, 22 nt, Human
acuugggucaaguagcucacag

SEQ ID NO: 100736 - RNA, 22 nt, Human
acuugggucacaugaccuaccu

SEQ ID NO: 100737 - RNA, 22 nt, Human
acuugguggaacguguauuuua

SEQ ID NO: 100738 - RNA, 22 nt, Human
acuugguucuaacuaguguaua

SEQ ID NO: 100739 - RNA, 22 nt, Human
acuugguugcaaaugaauuauu

SEQ ID NO: 100740 - RNA, 22 nt, Human
acuugguugcuucugaaaugac

SEQ ID NO: 100741 - RNA, 22 nt, Human
acuuguaaacaaaucuaaugua

SEQ ID NO: 100742 - RNA, 22 nt, Human
acuugucuaccaugaauauuua

SEQ ID NO: 100743 - RNA, 22 nt, Human
acuuguguuaccaagguuuggu

SEQ ID NO: 100744 - RNA, 22 nt, Human
acuuguuaguuuuaucugcaug

SEQ ID NO: 100745 - RNA, 22 nt, Human
acuuguucauugaguacauaug

SEQ ID NO: 100746 - RNA, 22 nt, Human
acuuuaaaaagagccuucuaac

SEQ ID NO: 100747 - RNA, 22 nt, Human
acuuuaaaacugaucaucagag

SEQ ID NO: 100748 - RNA, 22 nt, Human
acuuuaacuguuauuacucacc

SEQ ID NO: 100749 - RNA, 23 nt, Human
acuuuaagaguauaugacuuccc

SEQ ID NO: 100750 - RNA, 21 nt, Human
acuuuaauauacaugaggagg

SEQ ID NO: 100751 - RNA, 21 nt, Human
acuuuacaauuuacauaguga

SEQ ID NO: 100752 - RNA, 20 nt, Human
acuuuacugagcuguaauuc

SEQ ID NO: 100753 - RNA, 22 nt, Human
acuuuagaaaagcauccauaga

SEQ ID NO: 100754 - RNA, 22 nt, Human
acuuuaugcuaaacuuuacucu

SEQ ID NO: 100755 - RNA, 22 nt, Human
acuuuauuuccuauugcaucca

SEQ ID NO: 100756 - RNA, 22 nt, Human
acuuucaagaacuucuuuaaug

SEQ ID NO: 100757 - RNA, 22 nt, Human
acuuucaauucccuuagcaacu

SEQ ID NO: 100758 - RNA, 22 nt, Human
acuuucauguuggugaaggguu

SEQ ID NO: 100759 - RNA, 22 nt, Human
acuuucccacuuaauguauuua

SEQ ID NO: 100760 - RNA, 22 nt, Human
acuuucccucucagaacucuua

SEQ ID NO: 100761 - RNA, 22 nt, Human
acuuuccuuauggauggggaaa

SEQ ID NO: 100762 - RNA, 23 nt, Human
agcacuuguaucuuacuaaaaug

SEQ ID NO: 100763 - RNA, 22 nt, Human
agcacuuuaagcaacagaucaa

SEQ ID NO: 100764 - RNA, 22 nt, Human
agcacuuugggagauaaagcug

SEQ ID NO: 100765 - RNA, 22 nt, Human
agcagaaagcuuauuuugacug

SEQ ID NO: 100766 - RNA, 22 nt, Human
agcagaaccugcagaccugucu

SEQ ID NO: 100767 - RNA, 22 nt, Human
agcagaaucuguccuuggaaga

SEQ ID NO: 100768 - RNA, 22 nt, Human
agcagacaccaggaguaaagaa

SEQ ID NO: 100769 - RNA, 22 nt, Human
agcagacaggcugccacagugc

SEQ ID NO: 100770 - RNA, 22 nt, Human
agcagacauggcuuggaugugg

SEQ ID NO: 100771 - RNA, 22 nt, Human
agcagacuccauugagugaguc

SEQ ID NO: 100772 - RNA, 19 nt, Human
agcagagcaaaguggcuga

SEQ ID NO: 100773 - RNA, 22 nt, Human
agcagagcagaaugugaaggug

SEQ ID NO: 100774 - RNA, 18 nt, Human
agcagagcccaugcauuc

SEQ ID NO: 100775 - RNA, 19 nt, Human
agcagagcccugaagaucc

SEQ ID NO: 100776 - RNA, 22 nt, Human
cauguguggagggcaugcaugg

SEQ ID NO: 100777 - RNA, 22 nt, Human
cauguguggucuguggcuaucu

SEQ ID NO: 100778 - RNA, 22 nt, Human
cauguguuaaucuuucugcaaa

SEQ ID NO: 100779 - RNA, 22 nt, Human
cauguguuucgagacuguugag

SEQ ID NO: 100780 - RNA, 22 nt, Human
cauguguuuugucauuucaaua

SEQ ID NO: 100781 - RNA, 22 nt, Human
cauguuaacuaagauuaacuau

SEQ ID NO: 100782 - RNA, 19 nt, Human
cauguuaugcuguaguauc

SEQ ID NO: 100783 - RNA, 22 nt, Human
cauguuauuuauccauuaaaca

SEQ ID NO: 100784 - RNA, 22 nt, Human
cauguucaaauaaguaguuucu

SEQ ID NO: 100785 - RNA, 22 nt, Human
cauguucaccuguggcacuagu

SEQ ID NO: 100786 - RNA, 22 nt, Human
cauguucagugacaguuauuga

SEQ ID NO: 100787 - RNA, 22 nt, Human
cauguugauuagagagcuuaga

SEQ ID NO: 100788 - RNA, 22 nt, Human
cauguuucugagaaaaguagga

SEQ ID NO: 100789 - RNA, 22 nt, Human
cauguuuucuaggcuuucacaa

SEQ ID NO: 100790 - RNA, 22 nt, Human
cauuaaauaucaaccuagacua

SEQ ID NO: 100791 - RNA, 22 nt, Human
cauuaaaucuuccagaccucac

SEQ ID NO: 100792 - RNA, 22 nt, Human
cauuaaauuccuuguucucaaa

SEQ ID NO: 100793 - RNA, 22 nt, Human
cauuaacaaugacugcuugacu

SEQ ID NO: 100794 - RNA, 22 nt, Human
cauuaacaauuguuuaugcugu

SEQ ID NO: 100795 - RNA, 21 nt, Human
cauuaaguaccagggcacugu

SEQ ID NO: 100796 - RNA, 22 nt, Human
cauuacaaacauguuaagauuu

SEQ ID NO: 100797 - RNA, 22 nt, Human
cauuacaacaaucugccauggc

SEQ ID NO: 100798 - RNA, 22 nt, Human
cauuacaaccccaaauuacaaa

SEQ ID NO: 100799 - RNA, 22 nt, Human
cauuagcaagucacuauuuuau

SEQ ID NO: 100800 - RNA, 18 nt, Human
cauuagcaccacguagag

SEQ ID NO: 100801 - RNA, 22 nt, Human
cauuagcaugguagccagguca

SEQ ID NO: 100802 - RNA, 22 nt, Human
cauuagcauuacuucaaagagu

SEQ ID NO: 100803 - RNA, 21 nt, Human
cauuagggcagaagcaggaag

SEQ ID NO: 100804 - RNA, 22 nt, Human
cauuauauuacagcacuguuaa

SEQ ID NO: 100805 - RNA, 22 nt, Human
cauuauccaacagcacuuucca

SEQ ID NO: 100806 - RNA, 22 nt, Human
cauuaucugccauugacaccau

SEQ ID NO: 100807 - RNA, 22 nt, Human
cauuaugaagcaucaucuuauu

SEQ ID NO: 100808 - RNA, 18 nt, Human
cauuaugugguuauagaa

SEQ ID NO: 100809 - RNA, 22 nt, Human
cauuauugccagccauacugaa

SEQ ID NO: 100810 - RNA, 20 nt, Human
cauuauuguaaucagcugua

SEQ ID NO: 100811 - RNA, 22 nt, Human
cauucaaaaugggcugaccugu

SEQ ID NO: 100812 - RNA, 22 nt, Human
cauucaaaugugccacuguccu

SEQ ID NO: 100813 - RNA, 22 nt, Human
cauucaagaguggacauaaugc

SEQ ID NO: 100814 - RNA, 22 nt, Human
cauucacagagggggaagcauc

SEQ ID NO: 100815 - RNA, 22 nt, Human
cauucacagcaggucagcugaa

SEQ ID NO: 100816 - RNA, 22 nt, Human
cauucauccacuguuggaaauu

SEQ ID NO: 100817 - RNA, 22 nt, Human
cauucauucuguaaguaacuau

SEQ ID NO: 100818 - RNA, 18 nt, Human
cauuccaaguucuaccuc

SEQ ID NO: 100819 - RNA, 22 nt, Human
cauuccagagcugccucugcua

SEQ ID NO: 100820 - RNA, 22 nt, Human
cauuccagaugaggccaggccc

SEQ ID NO: 100821 - RNA, 22 nt, Human
cauuccagcucucauacucugg

SEQ ID NO: 100822 - RNA, 22 nt, Human
cauucccacguguucuuugcuu

SEQ ID NO: 100823 - RNA, 22 nt, Human
cauucccaugacuccugcucag

SEQ ID NO: 100824 - RNA, 18 nt, Human
cauuccccaucucugagc

SEQ ID NO: 100825 - RNA, 21 nt, Human
cauuccucggcucauagagga

SEQ ID NO: 100826 - RNA, 20 nt, Human
cauuccugaggaauucaugu

SEQ ID NO: 100827 - RNA, 23 nt, Human
cauuccugauauggccacaagag

SEQ ID NO: 100828 - RNA, 22 nt, Human
cauucuaaaguguuuuauaccu

SEQ ID NO: 100829 - RNA, 22 nt, Human
cauucuaugaaaacuaggcaau

SEQ ID NO: 100830 - RNA, 22 nt, Human
cauucucuacacuccugcccug

SEQ ID NO: 100831 - RNA, 22 nt, Human
cauucucuugacaggacagccc

SEQ ID NO: 100832 - RNA, 22 nt, Human
cauucugagcuaauaugcuuau

SEQ ID NO: 100833 - RNA, 18 nt, Human
cauugacaguauaucuuu

SEQ ID NO: 100834 - RNA, 22 nt, Human
cauugacaguucuuuaaguugc

SEQ ID NO: 100835 - RNA, 22 nt, Human
cauugacaucaggcuuggccaa

SEQ ID NO: 100836 - RNA, 22 nt, Human
cauugagagaaucacauagaag

SEQ ID NO: 100837 - RNA, 22 nt, Human
cauugauuauggaaagcagugg

SEQ ID NO: 100838 - RNA, 22 nt, Human
cauugcaacuucaaacuccugg

SEQ ID NO: 100839 - RNA, 22 nt, Human
cauugcugugggcauuugcugc

SEQ ID NO: 100840 - RNA, 22 nt, Human
cauugcuuauuucagcuaaagu

SEQ ID NO: 100841 - RNA, 22 nt, Human
cauuggcacaaguagcuucauc

SEQ ID NO: 100842 - RNA, 22 nt, Human
cauagaaugcagcaggaaaguu

SEQ ID NO: 100843 - RNA, 22 nt, Human
cauagaauguaauaaagaguag

SEQ ID NO: 100844 - RNA, 22 nt, Human
cauagaggcaaaauggcuguac

SEQ ID NO: 100845 - RNA, 22 nt, Human
cauagaggcuaaaauuauuugg

SEQ ID NO: 100846 - RNA, 22 nt, Human
cauagagugauguaagguaugu

SEQ ID NO: 100847 - RNA, 22 nt, Human
cauagauuuuagguuagaucga

SEQ ID NO: 100848 - RNA, 22 nt, Human
cauagcaagaucacauucugua

SEQ ID NO: 100849 - RNA, 22 nt, Human
cauagcuuagggguuaaacuca

SEQ ID NO: 100850 - RNA, 22 nt, Human
cauaguaaauaaugcagaugau

SEQ ID NO: 100851 - RNA, 22 nt, Human
cauaguuccuaccuaagcauaa

SEQ ID NO: 100852 - RNA, 22 nt, Human
cauauaaauacaacauguguua

SEQ ID NO: 100853 - RNA, 22 nt, Human
cauauacugcauacauaugugu

SEQ ID NO: 100854 - RNA, 22 nt, Human
cauauacuuuucuauagcuuuc

SEQ ID NO: 100855 - RNA, 22 nt, Human
cauauauucugguuuucacugg

SEQ ID NO: 100856 - RNA, 15 nt, Human
cauaucacugggaau

SEQ ID NO: 100857 - RNA, 22 nt, Human
cauaucccauuggccaggacau

SEQ ID NO: 100858 - RNA, 22 nt, Human
cauaucuggagacuccuggucu

SEQ ID NO: 100859 - RNA, 23 nt, Human
cauaugaaaguagacacuuucca

SEQ ID NO: 100860 - RNA, 22 nt, Human
cauaugaagaugucuuuuugua

SEQ ID NO: 100861 - RNA, 22 nt, Human
cauaugaaguucaacagagaug

SEQ ID NO: 100862 - RNA, 23 nt, Human
cauaugaauuuuagaggcaguuu

SEQ ID NO: 100863 - RNA, 20 nt, Human
cauauggaaagauauuguuc

SEQ ID NO: 100864 - RNA, 23 nt, Human
cauauucaaaacuggaccacucu

SEQ ID NO: 100865 - RNA, 16 nt, Human
cauauugcugaaagag

SEQ ID NO: 100866 - RNA, 19 nt, Human
cauauugugcuugcauuuu

SEQ ID NO: 100867 - RNA, 22 nt, Human
cauauuuauagaucuggcauuu

SEQ ID NO: 100868 - RNA, 22 nt, Human
cauauuuuaguugcugaacagc

SEQ ID NO: 100869 - RNA, 17 nt, Human
caucaaagaaauuucca

SEQ ID NO: 100870 - RNA, 22 nt, Human
caucaaaugccauauaugguug

SEQ ID NO: 100871 - RNA, 22 nt, Human
caucaaauggcaagugaaagcu

SEQ ID NO: 100872 - RNA, 22 nt, Human
caucaaugugcagagaugaacg

SEQ ID NO: 100873 - RNA, 22 nt, Human
caucacagaaauaaacauaccu

SEQ ID NO: 100874 - RNA, 22 nt, Human
caucacagauguuguguggagu

SEQ ID NO: 100875 - RNA, 21 nt, Human
caucacaggaugauuuuuuca

SEQ ID NO: 100876 - RNA, 22 nt, Human
caucacaguggcuguuuauuua

SEQ ID NO: 100877 - RNA, 22 nt, Human
caucacaucaaaccuacucuca

SEQ ID NO: 100878 - RNA, 22 nt, Human
caucacugacgcugagauucca

SEQ ID NO: 100879 - RNA, 22 nt, Human
caucacuguccaaaguucaguu

SEQ ID NO: 100880 - RNA, 22 nt, Human
caucacuguccucagcauucca

SEQ ID NO: 100881 - RNA, 22 nt, Human
caucagaaagaguccuggacuu

SEQ ID NO: 100882 - RNA, 22 nt, Human
caucagaaccagcugggugagg

SEQ ID NO: 100883 - RNA, 22 nt, Human
caucagaacgugagcuccuugu

SEQ ID NO: 100884 - RNA, 22 nt, Human
caucagaagaaagacaaaugau

SEQ ID NO: 100885 - RNA, 22 nt, Human
caucagaaggccagaggguagc

SEQ ID NO: 100886 - RNA, 22 nt, Human
cauuugaaccuggauguucuua

SEQ ID NO: 100887 - RNA, 20 nt, Human
cauuugaaucuccauucugc

SEQ ID NO: 100888 - RNA, 22 nt, Human
cauuugauuacuaaagauaauu

SEQ ID NO: 100889 - RNA, 22 nt, Human
cauuugauuccuuuacucuuau

SEQ ID NO: 100890 - RNA, 22 nt, Human
cauuugcaaaccaacaagauga

SEQ ID NO: 100891 - RNA, 22 nt, Human
cauuugcugaggccuucagagg

SEQ ID NO: 100892 - RNA, 22 nt, Human
cauuugcuggggucuugggagu

SEQ ID NO: 100893 - RNA, 20 nt, Human
cauuugggaucaugagguuu

SEQ ID NO: 100894 - RNA, 22 nt, Human
cauuuguuaagaaggaaaaagg

SEQ ID NO: 100895 - RNA, 22 nt, Human
cauuuguuaaugcugcuuuuaa

SEQ ID NO: 100896 - RNA, 22 nt, Human
cauuuguuaauuacuauuaucu

SEQ ID NO: 100897 - RNA, 18 nt, Human
cauuuguuauugugugug

SEQ ID NO: 100898 - RNA, 22 nt, Human
cauuuguugggacaaugaaaag

SEQ ID NO: 100899 - RNA, 22 nt, Human
cauuuguugguugcugucuuau

SEQ ID NO: 100900 - RNA, 19 nt, Human
cauuuuaagcauccccagu

SEQ ID NO: 100901 - RNA, 22 nt, Human
cauuuuaccuagaagcugaaag

SEQ ID NO: 100902 - RNA, 22 nt, Human
cauuuucagcacccaucugaaa

SEQ ID NO: 100903 - RNA, 22 nt, Human
cauuuuguaagucucucuuguu

SEQ ID NO: 100904 - RNA, 22 nt, Human
cauuuuguagcaaugacuguug

SEQ ID NO: 100905 - RNA, 22 nt, Human
ccaaaagcagcugucugugaau

SEQ ID NO: 100906 - RNA, 22 nt, Human
ccaaacaaauccccauucuuag

SEQ ID NO: 100907 - RNA, 22 nt, Human
ccaaacauuucaaauuuagaga

SEQ ID NO: 100908 - RNA, 22 nt, Human
ccaaagagagaccuuucuucuc

SEQ ID NO: 100909 - RNA, 22 nt, Human
ccaaagcuggcuuucaugguuu

SEQ ID NO: 100910 - RNA, 22 nt, Human
ccaaaggccaggcacugagguu

SEQ ID NO: 100911 - RNA, 22 nt, Human
ccaaagguguuggccuucagug

SEQ ID NO: 100912 - RNA, 22 nt, Human
ccaaagucagugcucagucguc

SEQ ID NO: 100913 - RNA, 22 nt, Human
ccaaaguccauaguuuacauaa

SEQ ID NO: 100914 - RNA, 23 nt, Human
ccaaagucgaagucuaguccaga

SEQ ID NO: 100915 - RNA, 22 nt, Human
ccaaagucugcauuuuaacaug

SEQ ID NO: 100916 - RNA, 22 nt, Human
ccaaagucuggagcagcagagc

SEQ ID NO: 100917 - RNA, 22 nt, Human
ccaaagugcugggauucaggca

SEQ ID NO: 100918 - RNA, 22 nt, Human
ccaaagugcugggguuacaggc

SEQ ID NO: 100919 - RNA, 22 nt, Human
ccaaauaauauuucagaaccau

SEQ ID NO: 100920 - RNA, 20 nt, Human
ccaaauguggagaaaaagua

SEQ ID NO: 100921 - RNA, 22 nt, Human
ccaaauuaaaucauacagacag

SEQ ID NO: 100922 - RNA, 22 nt, Human
ccaacacagauguguuaguguu

SEQ ID NO: 100923 - RNA, 22 nt, Human
ccaacagguugagagucugaau

SEQ ID NO: 100924 - RNA, 15 nt, Human
ccaagaacuaauuag

SEQ ID NO: 100925 - RNA, 23 nt, Human
ccaagacuguuaggaguggggag

SEQ ID NO: 100926 - RNA, 22 nt, Human
ccaagaggaccuugccagggca

SEQ ID NO: 100927 - RNA, 22 nt, Human
ccaagaggggcagagggcugca

SEQ ID NO: 100928 - RNA, 22 nt, Human
ccaagaggguugcccugagcgu

SEQ ID NO: 100929 - RNA, 22 nt, Human
ccaagagguaucuugccauaaa

SEQ ID NO: 100930 - RNA, 22 nt, Human
ccaagagguugugaggcaggca

SEQ ID NO: 100931 - RNA, 22 nt, Human
ccaagcagaaccauucaggcac

SEQ ID NO: 100932 - RNA, 22 nt, Human
ccaagcauuucuagccagucac

SEQ ID NO: 100933 - RNA, 22 nt, Human
ccaagcuggacagcagcaagga

SEQ ID NO: 100934 - RNA, 23 nt, Human
ccaagcuugucccugccugcuuu

SEQ ID NO: 100935 - RNA, 20 nt, Human
ccaaggacacuggcuccugg

SEQ ID NO: 100936 - RNA, 22 nt, Human
ccaaggagcucauauucuuguu

SEQ ID NO: 100937 - RNA, 22 nt, Human
ccaaggagcugcaggcacuugu

SEQ ID NO: 100938 - RNA, 22 nt, Human
ccaaggaggccccaggucagcu

SEQ ID NO: 100939 - RNA, 22 nt, Human
ccaaggcaaugugcagcuggug

SEQ ID NO: 100940 - RNA, 22 nt, Human
ccaaggcauauggcugaaacca

SEQ ID NO: 100941 - RNA, 18 nt, Human
ccaaggccccugcugggg

SEQ ID NO: 100942 - RNA, 22 nt, Human
ccaaggcuguggggcugugcag

SEQ ID NO: 100943 - RNA, 22 nt, Human
ccaagggaaaccgagaggcugg

SEQ ID NO: 100944 - RNA, 22 nt, Human
ccaagggcucuggacagagugg

SEQ ID NO: 100945 - RNA, 22 nt, Human
ccaagggcugagauacaucuag

SEQ ID NO: 100946 - RNA, 22 nt, Human
ccaagggcugcugaggugucca

SEQ ID NO: 100947 - RNA, 22 nt, Human
ccaaggugggcagaucacgagg

SEQ ID NO: 100948 - RNA, 22 nt, Human
ccaaguguuuuauaagggacag

SEQ ID NO: 100949 - RNA, 22 nt, Human
ccaauacacuuuauagaagaaa

SEQ ID NO: 100950 - RNA, 22 nt, Human
ccaaucuuaucuuuauuuucua

SEQ ID NO: 100951 - RNA, 22 nt, Human
ccaaucuugcuguccacuuggu

SEQ ID NO: 100952 - RNA, 22 nt, Human
ccaaucuuguuuucuacaucca

SEQ ID NO: 100953 - RNA, 22 nt, Human
ccaaugaaaggucaauucuaua

SEQ ID NO: 100954 - RNA, 22 nt, Human
ccaaugaauauauuucauauga

SEQ ID NO: 100955 - RNA, 22 nt, Human
ccaaugauggugcccacgauga

SEQ ID NO: 100956 - RNA, 22 nt, Human
ccaaugcauaaugauccccuaa

SEQ ID NO: 100957 - RNA, 23 nt, Human
ccaauucauggcagauuugaaga

SEQ ID NO: 100958 - RNA, 22 nt, Human
ccaauuguccuaauuaauuaga

SEQ ID NO: 100959 - RNA, 22 nt, Human
ccacaaaacugugugucaaaga

SEQ ID NO: 100960 - RNA, 22 nt, Human
caugaaaaugucaaguucugcu

SEQ ID NO: 100961 - RNA, 22 nt, Human
caugaaacaucagagauuucuc

SEQ ID NO: 100962 - RNA, 22 nt, Human
caugaaaugauauuuggguggg

SEQ ID NO: 100963 - RNA, 22 nt, Human
caugaaauggccaaccuucggc

SEQ ID NO: 100964 - RNA, 22 nt, Human
caugaacaaauucuguuugagg

SEQ ID NO: 100965 - RNA, 22 nt, Human
caugaacaccaggcaugaacaa

SEQ ID NO: 100966 - RNA, 22 nt, Human
caugaacuccaagcuuccuucc

SEQ ID NO: 100967 - RNA, 22 nt, Human
caugaagcauguuuugucauga

SEQ ID NO: 100968 - RNA, 22 nt, Human
caugaaggcugccagcaggcau

SEQ ID NO: 100969 - RNA, 22 nt, Human
caugaauuagcaauggugugca

SEQ ID NO: 100970 - RNA, 22 nt, Human
caugaauuuuaagacuguuuuu

SEQ ID NO: 100971 - RNA, 22 nt, Human
caugacaccuaccauauuaagu

SEQ ID NO: 100972 - RNA, 22 nt, Human
caugacagaugcaaaggauugg

SEQ ID NO: 100973 - RNA, 22 nt, Human
caugacauccugaagcugcaca

SEQ ID NO: 100974 - RNA, 22 nt, Human
caugacccauuuuucuugcugu

SEQ ID NO: 100975 - RNA, 22 nt, Human
caugagaagggguggaguuaga

SEQ ID NO: 100976 - RNA, 22 nt, Human
caugagaaguggccuucaaaaa

SEQ ID NO: 100977 - RNA, 22 nt, Human
caugagaaugaagaagacuuaa

SEQ ID NO: 100978 - RNA, 22 nt, Human
caugagagacauucugugugaa

SEQ ID NO: 100979 - RNA, 22 nt, Human
caugagauuugggaggggccag

SEQ ID NO: 100980 - RNA, 19 nt, Human
caugagcugcucacuuccc

SEQ ID NO: 100981 - RNA, 22 nt, Human
caugaggguugggguggagcuu

SEQ ID NO: 100982 - RNA, 22 nt, Human
caugaggugauaaagcugggau

SEQ ID NO: 100983 - RNA, 22 nt, Human
caugagugcuauaugugaagag

SEQ ID NO: 100984 - RNA, 22 nt, Human
caugaguucaucugcuucucuu

SEQ ID NO: 100985 - RNA, 22 nt, Human
caugauaacacuucuguuuaau

SEQ ID NO: 100986 - RNA, 22 nt, Human
caugauaauuguuaacaaagua

SEQ ID NO: 100987 - RNA, 22 nt, Human
caugaucaccacuugacagccc

SEQ ID NO: 100988 - RNA, 22 nt, Human
caugaucagaaagagaagcuag

SEQ ID NO: 100989 - RNA, 22 nt, Human
caugauggaugugcacuucgcu

SEQ ID NO: 100990 - RNA, 23 nt, Human
caugauguuaacuuuguuaugcu

SEQ ID NO: 100991 - RNA, 22 nt, Human
caugauuauguguuagaguuug

SEQ ID NO: 100992 - RNA, 22 nt, Human
caugcaaaauguauuuuauuag

SEQ ID NO: 100993 - RNA, 22 nt, Human
caugcaaagcguuuugaccagc

SEQ ID NO: 100994 - RNA, 22 nt, Human
caugcaaaggucaagaucagga

SEQ ID NO: 100995 - RNA, 22 nt, Human
cuuccucccccacacacucacu

SEQ ID NO: 100996 - RNA, 22 nt, Human
cuuccucucaauaagaugagaa

SEQ ID NO: 100997 - RNA, 22 nt, Human
cuuccucugcggcgccgggcgc

SEQ ID NO: 100998 - RNA, 17 nt, Human
ccagguggaaucgugga

SEQ ID NO: 100999 - RNA, 16 nt, Human
ccagguggggcuguga

SEQ ID NO: 101000 - RNA, 18 nt, Human
ccagguggugacagagau

SEQ ID NO: 101001 - RNA, 22 nt, Human
ccagguggugccucuguucgca

SEQ ID NO: 101002 - RNA, 22 nt, Human
ccagguguagcacugcucacag

SEQ ID NO: 101003 - RNA, 22 nt, Human
ccagguguccccgucacugcag

SEQ ID NO: 101004 - RNA, 22 nt, Human
ccaggugugcucugcaguggau

SEQ ID NO: 101005 - RNA, 22 nt, Human
ccagguguguacagaacagcac

SEQ ID NO: 101006 - RNA, 22 nt, Human
ccagguguuuggccugcaugau

SEQ ID NO: 101007 - RNA, 22 nt, Human
ccagucacucugugagagcuac

SEQ ID NO: 101008 - RNA, 22 nt, Human
ccagucccaucucugucgcuua

SEQ ID NO: 101009 - RNA, 22 nt, Human
ccaguccugggagcuugcacug

SEQ ID NO: 101010 - RNA, 22 nt, Human
ccaguccugugugacccugcac

SEQ ID NO: 101011 - RNA, 23 nt, Human
ccagucucacguauacaggauuu

SEQ ID NO: 101012 - RNA, 22 nt, Human
ccagucucaguucacguuggua

SEQ ID NO: 101013 - RNA, 19 nt, Human
ccagucuccuugcagcauc

SEQ ID NO: 101014 - RNA, 22 nt, Human
ccagucuggcaggagggggaac

SEQ ID NO: 101015 - RNA, 22 nt, Human
ccagugacuggcuuucuggugu

SEQ ID NO: 101016 - RNA, 22 nt, Human
ccagugagaaugaagauaaggc

SEQ ID NO: 101017 - RNA, 23 nt, Human
ccagugauugccuggaaggaggu

SEQ ID NO: 101018 - RNA, 22 nt, Human
ccagugcacaauggaacaacuc

SEQ ID NO: 101019 - RNA, 22 nt, Human
ccagugcaccauuucccucugu

SEQ ID NO: 101020 - RNA, 22 nt, Human
ccagugcaggugagcaccaggu

SEQ ID NO: 101021 - RNA, 17 nt, Human
ccagugccuguggcaac

SEQ ID NO: 101022 - RNA, 22 nt, Human
ccagugcgcaggcgccaccugu

SEQ ID NO: 101023 - RNA, 21 nt, Human
ccagugcuacagcugccugac

SEQ ID NO: 101024 - RNA, 22 nt, Human
ccaguggacaauuucugaggaa

SEQ ID NO: 101025 - RNA, 22 nt, Human
ccaguguauuauuugagaaauu

SEQ ID NO: 101026 - RNA, 22 nt, Human
ccagugucugugguauagaaag

SEQ ID NO: 101027 - RNA, 22 nt, Human
ccagugugcauuaucauguguc

SEQ ID NO: 101028 - RNA, 22 nt, Human
ccagugugggcccggccuccuc

SEQ ID NO: 101029 - RNA, 22 nt, Human
ccaguguguuuaaugcauucca

SEQ ID NO: 101030 - RNA, 22 nt, Human
ccaguguuauuuuagaguguga

SEQ ID NO: 101031 - RNA, 22 nt, Human
ccaguguucaguaugcauuaag

SEQ ID NO: 101032 - RNA, 22 nt, Human
ccaguguucaucaagaaaaugu

SEQ ID NO: 101033 - RNA, 22 nt, Human
ccaguguuuacaguugaacaaa

SEQ ID NO: 101034 - RNA, 22 nt, Human
ccaguguuuccgucaguacacg

SEQ ID NO: 101035 - RNA, 22 nt, Human
ccaguguuuucauccucccuug

SEQ ID NO: 101036 - RNA, 22 nt, Human
ccaguguuuuccaguuugccca

SEQ ID NO: 101037 - RNA, 22 nt, Human
ccaguuauccagcaugcugucu

SEQ ID NO: 101038 - RNA, 22 nt, Human
ccaguuuagguacuaggcucua

SEQ ID NO: 101039 - RNA, 23 nt, Human
ccaguuuaucuuuaguguagauc

SEQ ID NO: 101040 - RNA, 22 nt, Human
ccaguuuugccaugguaacacu

SEQ ID NO: 101041 - RNA, 22 nt, Human
ccauaaggagccagacauucca

SEQ ID NO: 101042 - RNA, 22 nt, Human
ccauaagguugaaaacuguaca

SEQ ID NO: 101043 - RNA, 21 nt, Human
ccauaaucuuaggaucaaaau

SEQ ID NO: 101044 - RNA, 21 nt, Human
ccauaauuuuguuucagaagu

SEQ ID NO: 101045 - RNA, 17 nt, Human
ccauacugacauauuga

SEQ ID NO: 101046 - RNA, 22 nt, Human
ccauacugaggacacauuguga

SEQ ID NO: 101047 - RNA, 22 nt, Human
ccauaguacauaauacauuuua

SEQ ID NO: 101048 - RNA, 22 nt, Human
ccauagugccaagucuucagca

SEQ ID NO: 101049 - RNA, 19 nt, Human
ccauauaaccagcaagugu

SEQ ID NO: 101050 - RNA, 22 nt, Human
ccaucagauuagcaaaauccag

SEQ ID NO: 101051 - RNA, 21 nt, Human
ccauccacugagugguucccu

SEQ ID NO: 101052 - RNA, 22 nt, Human
ccauccagaaggguuugaaaga

SEQ ID NO: 101053 - RNA, 22 nt, Human
ccauccaggcugugggugagcu

SEQ ID NO: 101054 - RNA, 19 nt, Human
ccauccauggggccagagg

SEQ ID NO: 101055 - RNA, 22 nt, Human
ccauccaugguguugguuguau

SEQ ID NO: 101056 - RNA, 22 nt, Human
ccaucccuccuccaccagcuag

SEQ ID NO: 101057 - RNA, 22 nt, Human
ccaucccugccauuauagccca

SEQ ID NO: 101058 - RNA, 22 nt, Human
ccauccugaauggucucagcca

SEQ ID NO: 101059 - RNA, 22 nt, Human
ccaucuccaaauaccaucacau

SEQ ID NO: 101060 - RNA, 22 nt, Human
ccaucuccaguuuauucuuccu

SEQ ID NO: 101061 - RNA, 22 nt, Human
ccaucuguaucugacaaauucu

SEQ ID NO: 101062 - RNA, 22 nt, Human
ccaucuugggucacugcccccc

SEQ ID NO: 101063 - RNA, 22 nt, Human
ccaugacauuuuaauuuucacu

SEQ ID NO: 101064 - RNA, 22 nt, Human
ccaugaccccuggcauccaggg

SEQ ID NO: 101065 - RNA, 22 nt, Human
ccaugagccaggcugaggaagc

SEQ ID NO: 101066 - RNA, 22 nt, Human
ccaugaguagcgauuucauuuu

SEQ ID NO: 101067 - RNA, 22 nt, Human
ccaugcaaagaaugugggcaua

SEQ ID NO: 101068 - RNA, 22 nt, Human
ccaugcaagaaguccaaccauc

SEQ ID NO: 101069 - RNA, 22 nt, Human
ccaugcacaccagcaggcagac

SEQ ID NO: 101070 - RNA, 22 nt, Human
ccaugccagcugcuaggucaca

SEQ ID NO: 101071 - RNA, 22 nt, Human
ccaugccccaccaggacgcugc

SEQ ID NO: 101072 - RNA, 22 nt, Human
ccauggaacucaguaaauuaua

SEQ ID NO: 101073 - RNA, 22 nt, Human
ccauggcaaaggagauguuuuc

SEQ ID NO: 101074 - RNA, 22 nt, Human
ccauggcaauggucagucuauu

SEQ ID NO: 101075 - RNA, 22 nt, Human
ccauggccugaaggagugcauc

SEQ ID NO: 101076 - RNA, 18 nt, Human
ccauggcucccuccugcc

SEQ ID NO: 101077 - RNA, 22 nt, Human
ccauggcuuucuuucauuguaa

SEQ ID NO: 101078 - RNA, 22 nt, Human
ccaugggagaugauggggagug

SEQ ID NO: 101079 - RNA, 22 nt, Human
ccaugggcacuggguggaggua

SEQ ID NO: 101080 - RNA, 22 nt, Human
ccaugggcuggcugccuuauca

SEQ ID NO: 101081 - RNA, 21 nt, Human
ccaugucagaugugggcugug

SEQ ID NO: 101082 - RNA, 22 nt, Human
ccauguggugggaaggagaaug

SEQ ID NO: 101083 - RNA, 22 nt, Human
ccauguuggaacuucacauucu

SEQ ID NO: 101084 - RNA, 22 nt, Human
ccauuaaaauugugacauagga

SEQ ID NO: 101085 - RNA, 22 nt, Human
ccauuauccacgggcuuccuga

SEQ ID NO: 101086 - RNA, 22 nt, Human
ccauuauccauuuugagucuua

SEQ ID NO: 101087 - RNA, 22 nt, Human
ccauucaauaccuuagagaaaa

SEQ ID NO: 101088 - RNA, 22 nt, Human
ccauucauacaauuuuguucua

SEQ ID NO: 101089 - RNA, 19 nt, Human
ccauucauauagacagcag

SEQ ID NO: 101090 - RNA, 22 nt, Human
ccauucauguuuuugaacuaug

SEQ ID NO: 101091 - RNA, 22 nt, Human
ccauucauuuguugucagccuu

SEQ ID NO: 101092 - RNA, 22 nt, Human
ccauucugacuucauugccuca

SEQ ID NO: 101093 - RNA, 22 nt, Human
ccauucuguauaaaugcuagaa

SEQ ID NO: 101094 - RNA, 22 nt, Human
ccauucugugucucuccacagc

SEQ ID NO: 101095 - RNA, 21 nt, Human
ccauucuuagucaagugucuc

SEQ ID NO: 101096 - RNA, 22 nt, Human
ccauugaauuagaaggggaagg

SEQ ID NO: 101097 - RNA, 22 nt, Human
ccauuggagccaagaguuuuac

SEQ ID NO: 101098 - RNA, 22 nt, Human
ccauuguaaauucuguggaagu

SEQ ID NO: 101099 - RNA, 22 nt, Human
ccauuuaacacagaguuuucca

SEQ ID NO: 101100 - RNA, 22 nt, Human
ccauuuacauuguacucuguga

SEQ ID NO: 101101 - RNA, 22 nt, Human
ccauuuaguaaggaagaacagc

SEQ ID NO: 101102 - RNA, 22 nt, Human
ccauuucauugccuguaaagug

SEQ ID NO: 101103 - RNA, 22 nt, Human
ccauuugaaaugaauguuuuua

SEQ ID NO: 101104 - RNA, 22 nt, Human
cuugcagaugugacuaaauuaa

SEQ ID NO: 101105 - RNA, 22 nt, Human
cuugcagcauccgguccucucu

SEQ ID NO: 101106 - RNA, 23 nt, Human
cuugcaggaagcagauggcacac

SEQ ID NO: 101107 - RNA, 20 nt, Human
cuugcaggaguggguagagu

SEQ ID NO: 101108 - RNA, 22 nt, Human
cuugcaggcagggacacugucu

SEQ ID NO: 101109 - RNA, 18 nt, Human
cuugcaguguguggagaa

SEQ ID NO: 101110 - RNA, 22 nt, Human
cuugccagcacuuggccagcug

SEQ ID NO: 101111 - RNA, 22 nt, Human
cuugccagggacucagucaggg

SEQ ID NO: 101112 - RNA, 22 nt, Human
cuugccuacuugucaaccagca

SEQ ID NO: 101113 - RNA, 22 nt, Human
cuugccucccucagcucacagc

SEQ ID NO: 101114 - RNA, 22 nt, Human
cuugccugccacuacagcugaa

SEQ ID NO: 101115 - RNA, 22 nt, Human
cuugccugcuggagcagggcuc

SEQ ID NO: 101116 - RNA, 22 nt, Human
cccuaagacccucaagaucucc

SEQ ID NO: 101117 - RNA, 22 nt, Human
cccuaaugcagcugagaagggc

SEQ ID NO: 101118 - RNA, 20 nt, Human
cccuaggaacgcagcaggag

SEQ ID NO: 101119 - RNA, 22 nt, Human
cccuaggcccaaagggugacau

SEQ ID NO: 101120 - RNA, 22 nt, Human
cccuaggcugaggccagggugc

SEQ ID NO: 101121 - RNA, 19 nt, Human
cccuaggggcuccugaggg

SEQ ID NO: 101122 - RNA, 22 nt, Human
cccuaggguuuggccagagccc

SEQ ID NO: 101123 - RNA, 22 nt, Human
cccucacagucuaggagcagcu

SEQ ID NO: 101124 - RNA, 22 nt, Human
cccucagggaccacugacuuca

SEQ ID NO: 101125 - RNA, 22 nt, Human
cccucaggugaaaggaaaaauu

SEQ ID NO: 101126 - RNA, 22 nt, Human
cccucaguuuuccagugugggc

SEQ ID NO: 101127 - RNA, 22 nt, Human
cccucaugucagucccugccca

SEQ ID NO: 101128 - RNA, 22 nt, Human
cccuccagagcuugaccugcug

SEQ ID NO: 101129 - RNA, 22 nt, Human
cccuccagcucaaagcaaccgg

SEQ ID NO: 101130 - RNA, 22 nt, Human
cccuccaggcacugcccucuuc

SEQ ID NO: 101131 - RNA, 22 nt, Human
cccuccaggccugucauguucc

SEQ ID NO: 101132 - RNA, 22 nt, Human
cccuccaugagugugcugcugg

SEQ ID NO: 101133 - RNA, 20 nt, Human
cccucccagaugcuucccaa

SEQ ID NO: 101134 - RNA, 22 nt, Human
cccucccucugcuggguguaga

SEQ ID NO: 101135 - RNA, 22 nt, Human
cccucccugaagaaguuacucu

SEQ ID NO: 101136 - RNA, 22 nt, Human
cccuccuuaccaccacagcucc

SEQ ID NO: 101137 - RNA, 22 nt, Human
cccucgccgcagcugcuucccg

SEQ ID NO: 101138 - RNA, 22 nt, Human
cccucucgcggggcagcggagg

SEQ ID NO: 101139 - RNA, 22 nt, Human
cccucucugacuucugaacuug

SEQ ID NO: 101140 - RNA, 20 nt, Human
cccucugcacauggcugugg

SEQ ID NO: 101141 - RNA, 22 nt, Human
cccucugcugccuggcuggguc

SEQ ID NO: 101142 - RNA, 17 nt, Human
cccucuggggagggagg

SEQ ID NO: 101143 - RNA, 22 nt, Human
cccucugguuugcccuugggug

SEQ ID NO: 101144 - RNA, 22 nt, Human
cccugaccaccagcuccauuug

SEQ ID NO: 101145 - RNA, 22 nt, Human
cccugacccaaaacugucagaa

SEQ ID NO: 101146 - RNA, 20 nt, Human
cccugagacgacugagcucc

SEQ ID NO: 101147 - RNA, 22 nt, Human
cccugagagcagggucuuucuc

SEQ ID NO: 101148 - RNA, 22 nt, Human
cccugagaugccucacccuagu

SEQ ID NO: 101149 - RNA, 22 nt, Human
cccugagaugugaauuucagag

SEQ ID NO: 101150 - RNA, 22 nt, Human
cccugagcccauaguugacauu

SEQ ID NO: 101151 - RNA, 22 nt, Human
cccugagccgccugccgugucc

SEQ ID NO: 101152 - RNA, 22 nt, Human
cccugagcgugaggaggaagua

SEQ ID NO: 101153 - RNA, 22 nt, Human
cccugaggcaguaggagcuuuu

SEQ ID NO: 101154 - RNA, 22 nt, Human
cccugaggcccuccuggggucu

SEQ ID NO: 101155 - RNA, 22 nt, Human
cccugaggccucagguucauug

SEQ ID NO: 101156 - RNA, 18 nt, Human
cccugaggcuagcaugcu

SEQ ID NO: 101157 - RNA, 22 nt, Human
cccugcagaccaaugccauaga

SEQ ID NO: 101158 - RNA, 22 nt, Human
cccugcagacgucuugaugccu

SEQ ID NO: 101159 - RNA, 22 nt, Human
cccugcagagagugcuuuugug

SEQ ID NO: 101160 - RNA, 22 nt, Human
cccugcagcauucucuaacugg

SEQ ID NO: 101161 - RNA, 22 nt, Human
cccugcagcuuuugcauaguca

SEQ ID NO: 101162 - RNA, 22 nt, Human
cccugcaggcucagacuggagu

SEQ ID NO: 101163 - RNA, 22 nt, Human
cccugcccaccacaugcuggga

SEQ ID NO: 101164 - RNA, 23 nt, Human
cccugcccauugagcaggacguc

SEQ ID NO: 101165 - RNA, 22 nt, Human
cccugcccugggcagaaguggg

SEQ ID NO: 101166 - RNA, 22 nt, Human
cccugcuaguugucucagugau

SEQ ID NO: 101167 - RNA, 22 nt, Human
cccugcugcagagagcuuucca

SEQ ID NO: 101168 - RNA, 22 nt, Human
cccugcugucccucaguccugc

SEQ ID NO: 101169 - RNA, 22 nt, Human
cccugcugugccugacugccau

SEQ ID NO: 101170 - RNA, 22 nt, Human
cccugcuuccgcuguuuucuca

SEQ ID NO: 101171 - RNA, 22 nt, Human
cccugcuugucaccccuggguc

SEQ ID NO: 101172 - RNA, 22 nt, Human
cccugcuuucaaccuucuagcu

SEQ ID NO: 101173 - RNA, 22 nt, Human
cccuggaacccauggccagugu

SEQ ID NO: 101174 - RNA, 22 nt, Human
cccuggagaaggggacgcggag

SEQ ID NO: 101175 - RNA, 22 nt, Human
cccuggagcuagucugagcaga

SEQ ID NO: 101176 - RNA, 23 nt, Human
cccuggagcuagucugagcagag

SEQ ID NO: 101177 - RNA, 23 nt, Human
cccuggagcuagucugagcgggg

SEQ ID NO: 101178 - RNA, 22 nt, Human
cccuggaggcggagcuugcagu

SEQ ID NO: 101179 - RNA, 22 nt, Human
cccuggagggcagacagaugcc

SEQ ID NO: 101180 - RNA, 22 nt, Human
cccuggaggucagaggccuggg

SEQ ID NO: 101181 - RNA, 22 nt, Human
cccuggagguggagguugcagg

SEQ ID NO: 101182 - RNA, 22 nt, Human
cccuggaguccuggcaguugau

SEQ ID NO: 101183 - RNA, 22 nt, Human
cccuggcagaaugucucugggc

SEQ ID NO: 101184 - RNA, 22 nt, Human
cccuggccccucacuccgaggc

SEQ ID NO: 101185 - RNA, 22 nt, Human
cccugggaguccacugauguca

SEQ ID NO: 101186 - RNA, 22 nt, Human
cccugggauaccagacaccaga

SEQ ID NO: 101187 - RNA, 22 nt, Human
cccugggauucaauuucacucu

SEQ ID NO: 101188 - RNA, 22 nt, Human
cccugggcaccaggccugguaa

SEQ ID NO: 101189 - RNA, 22 nt, Human
cccuggugcccugggucagccu

SEQ ID NO: 101190 - RNA, 22 nt, Human
cccugguggggccagacuugcu

SEQ ID NO: 101191 - RNA, 22 nt, Human
cccugugagcggcuggaugccu

SEQ ID NO: 101192 - RNA, 21 nt, Human
cccuguguuccacagcagaca

SEQ ID NO: 101193 - RNA, 22 nt, Human
cccuuagaggcuggaggcagca

SEQ ID NO: 101194 - RNA, 22 nt, Human
cccuuagauaauuuccuuuucu

SEQ ID NO: 101195 - RNA, 22 nt, Human
cccuuagaugucuuccuccgga

SEQ ID NO: 101196 - RNA, 18 nt, Human
cccuuagccuuuccucuc

SEQ ID NO: 101197 - RNA, 22 nt, Human
cccuucaggguuaaguagaggg

SEQ ID NO: 101198 - RNA, 22 nt, Human
cccuucagugcuaggcugccug

SEQ ID NO: 101199 - RNA, 22 nt, Human
cccuuccuugauuuuaacugga

SEQ ID NO: 101200 - RNA, 22 nt, Human
cccuucuaguccauucuucaca

SEQ ID NO: 101201 - RNA, 22 nt, Human
cccuugaauuuucagagagggg

SEQ ID NO: 101202 - RNA, 22 nt, Human
cccuugagccuggaggagcucu

SEQ ID NO: 101203 - RNA, 22 nt, Human
cccuuggcuucuauggguuuuc

SEQ ID NO: 101204 - RNA, 22 nt, Human
cccuugggguggagguugcagu

SEQ ID NO: 101205 - RNA, 19 nt, Human
cccuugguagacagcugca

SEQ ID NO: 101206 - RNA, 22 nt, Human
cccuuuaaggucugauuuucag

SEQ ID NO: 101207 - RNA, 22 nt, Human
cccuuucauuggcagagcucuc

SEQ ID NO: 101208 - RNA, 22 nt, Human
cccuuucugccuucuaaaauaa

SEQ ID NO: 101209 - RNA, 22 nt, Human
cccuuucugggaccccugucuc

SEQ ID NO: 101210 - RNA, 22 nt, Human
cccuuugcccaguauauucuag

SEQ ID NO: 101211 - RNA, 22 nt, Human
ccgcagggaaagccccaggaag

SEQ ID NO: 101212 - RNA, 22 nt, Human
ccgccaggauauuguggcuuuu

SEQ ID NO: 101213 - RNA, 22 nt, Human
ccuagggucaguguggcaggag

SEQ ID NO: 101214 - RNA, 22 nt, Human
ccuaguccccaggaggucagug

SEQ ID NO: 101215 - RNA, 21 nt, Human
ccuaguguuaaaacaguuuaa

SEQ ID NO: 101216 - RNA, 22 nt, Human
ccuaugaaagacaggagaugcg

SEQ ID NO: 101217 - RNA, 21 nt, Human
ccucaaagaugaugggguuuc

SEQ ID NO: 101218 - RNA, 22 nt, Human
ccucaaagcgguaugcagacgg

SEQ ID NO: 101219 - RNA, 22 nt, Human
ccucaagaacaauccaccauua

SEQ ID NO: 101220 - RNA, 22 nt, Human
ccucaagucaauucugucucgc

SEQ ID NO: 101221 - RNA, 18 nt, Human
ccucacagacuuccaugu

SEQ ID NO: 101222 - RNA, 22 nt, Human
ccucacagcccuccucuagcac

SEQ ID NO: 101223 - RNA, 22 nt, Human
ccucacagcuugggcaaacggc

SEQ ID NO: 101224 - RNA, 22 nt, Human
ccucacaugaauguaagcucca

SEQ ID NO: 101225 - RNA, 22 nt, Human
ccucacucugcacccugcagca

SEQ ID NO: 101226 - RNA, 22 nt, Human
ccucacucuuguccuggcaggu

SEQ ID NO: 101227 - RNA, 22 nt, Human
ccucagaccccacagggccugu

SEQ ID NO: 101228 - RNA, 21 nt, Human
ccucagagacagauacgggug

SEQ ID NO: 101229 - RNA, 23 nt, Human
ccucagagaggcagagccacaug

SEQ ID NO: 101230 - RNA, 22 nt, Human
ccucagagcagcacccagauga

SEQ ID NO: 101231 - RNA, 22 nt, Human
ccucagagccaugccugaguuc

SEQ ID NO: 101232 - RNA, 22 nt, Human
ccucagagccuccagaaggaau

SEQ ID NO: 101233 - RNA, 20 nt, Human
ccucagagcgcaggcccccu

SEQ ID NO: 101234 - RNA, 19 nt, Human
ccucagagcuagugaacau

SEQ ID NO: 101235 - RNA, 18 nt, Human
ccucagaggcaaauuguu

SEQ ID NO: 101236 - RNA, 23 nt, Human
ccucagaggccucauagucuggc

SEQ ID NO: 101237 - RNA, 22 nt, Human
ccucagaguaggucucagcugu

SEQ ID NO: 101238 - RNA, 22 nt, Human
ccucagaguuggccacgagagc

SEQ ID NO: 101239 - RNA, 22 nt, Human
ccucagcauccuccugcucagu

SEQ ID NO: 101240 - RNA, 22 nt, Human
ccucagcauccuggugaaguag

SEQ ID NO: 101241 - RNA, 22 nt, Human
ccucagcugcugcacagcuuuu

SEQ ID NO: 101242 - RNA, 22 nt, Human
ccucagcugcuucccuggagcc

SEQ ID NO: 101243 - RNA, 22 nt, Human
ccucagcugucuuuuccgaggu

SEQ ID NO: 101244 - RNA, 22 nt, Human
ccucaggaaccacauugcugcu

SEQ ID NO: 101245 - RNA, 22 nt, Human
ccucaggauccgcaggugcagu

SEQ ID NO: 101246 - RNA, 22 nt, Human
ccucaggcaagucacuuaacau

SEQ ID NO: 101247 - RNA, 22 nt, Human
ccucaggcccugucccugcgcc

SEQ ID NO: 101248 - RNA, 22 nt, Human
ccucaggcugggcugccccugg

SEQ ID NO: 101249 - RNA, 22 nt, Human
ccucaggcuuacgggcaaugga

SEQ ID NO: 101250 - RNA, 22 nt, Human
ccucaggcuugugagccuucag

SEQ ID NO: 101251 - RNA, 18 nt, Human
ccucagggagagagacgc

SEQ ID NO: 101252 - RNA, 18 nt, Human
ccucagggagauccagug

SEQ ID NO: 101253 - RNA, 22 nt, Human
ccucaggggcuuuucguuguug

SEQ ID NO: 101254 - RNA, 22 nt, Human
ccucaggggucacugugaggag

SEQ ID NO: 101255 - RNA, 23 nt, Human
ccucagggucuagcagagagaag

SEQ ID NO: 101256 - RNA, 22 nt, Human
ccucaggguucggaugagaaca

SEQ ID NO: 101257 - RNA, 22 nt, Human
ccucaggugugggccagcuguc

SEQ ID NO: 101258 - RNA, 22 nt, Human
ccucagucuauuuccagcaggu

SEQ ID NO: 101259 - RNA, 21 nt, Human
ccucagucucccugcuccacu

SEQ ID NO: 101260 - RNA, 22 nt, Human
ccucagugaccuauugcauuca

SEQ ID NO: 101261 - RNA, 22 nt, Human
ccucaguguguuuggggugagg

SEQ ID NO: 101262 - RNA, 22 nt, Human
ccucaguuuucucaucuguaaa

SEQ ID NO: 101263 - RNA, 21 nt, Human
ccuagccucuuacccagcuuu

SEQ ID NO: 101264 - RNA, 22 nt, Human
ccuagccuucggccuacccauc

SEQ ID NO: 101265 - RNA, 18 nt, Human
ccuaggaaagggaggcaa

SEQ ID NO: 101266 - RNA, 22 nt, Human
ccuaggaaggaguauaguaaau

SEQ ID NO: 101267 - RNA, 22 nt, Human
ccuaggcuggcugucuucaggu

SEQ ID NO: 101268 - RNA, 22 nt, Human
ccuagucuuccgcguccccacc

SEQ ID NO: 101269 - RNA, 20 nt, Human
ccuaguuuucugagcgugac

SEQ ID NO: 101270 - RNA, 22 nt, Human
ccuauacagccucagcugagau

SEQ ID NO: 101271 - RNA, 19 nt, Human
ccuauggcaggauggaggc

SEQ ID NO: 101272 - RNA, 22 nt, Human
ccuauuuguaggcugggccagu

SEQ ID NO: 101273 - RNA, 22 nt, Human
ccucaaaguagagggagaugag

SEQ ID NO: 101274 - RNA, 20 nt, Human
ccucaaauaagugccagcau

SEQ ID NO: 101275 - RNA, 22 nt, Human
ccucaaauagcccccagucuag

SEQ ID NO: 101276 - RNA, 22 nt, Human
ccucaaauugcucagcgucuag

SEQ ID NO: 101277 - RNA, 22 nt, Human
ccucaaauuggcauuaauuaag

SEQ ID NO: 101278 - RNA, 22 nt, Human
ccucaaauugucaaauaagaau

SEQ ID NO: 101279 - RNA, 22 nt, Human
ccucaagucauuccggagaccu

SEQ ID NO: 101280 - RNA, 22 nt, Human
ccucacagaggggcagccaucu

SEQ ID NO: 101281 - RNA, 22 nt, Human
ccucacagcaaggauuucagug

SEQ ID NO: 101282 - RNA, 22 nt, Human
ccucacagcccuuggcccagga

SEQ ID NO: 101283 - RNA, 22 nt, Human
ccucacagccucaugcccagcc

SEQ ID NO: 101284 - RNA, 17 nt, Human
ccucacagggaccagac

SEQ ID NO: 101285 - RNA, 20 nt, Human
ccucacagggcagagagggg

SEQ ID NO: 101286 - RNA, 22 nt, Human
ccucacagggccaggccccuca

SEQ ID NO: 101287 - RNA, 22 nt, Human
ccucacaguuuggcuaacugug

SEQ ID NO: 101288 - RNA, 19 nt, Human
ccucacccugcagaggagg

SEQ ID NO: 101289 - RNA, 22 nt, Human
ccucacuggccagccaggggug

SEQ ID NO: 101290 - RNA, 22 nt, Human
ccucagaagaaguggaauugau

SEQ ID NO: 101291 - RNA, 22 nt, Human
ccucagaagcucaaggacauug

SEQ ID NO: 101292 - RNA, 22 nt, Human
ccucagaaggacaagagacaaa

SEQ ID NO: 101293 - RNA, 22 nt, Human
ccucagacuugauaauuggguu

SEQ ID NO: 101294 - RNA, 22 nt, Human
ccucagagacaguaacuggaau

SEQ ID NO: 101295 - RNA, 22 nt, Human
ccucagagcgcguggcauuauu

SEQ ID NO: 101296 - RNA, 22 nt, Human
ccucagaguuauuugaagugaa

SEQ ID NO: 101297 - RNA, 22 nt, Human
ccucagaguuuaagaugucaga

SEQ ID NO: 101298 - RNA, 22 nt, Human
ccucagaugucuuaaggcacug

SEQ ID NO: 101299 - RNA, 22 nt, Human
ccucagcauccucaugcucagu

SEQ ID NO: 101300 - RNA, 17 nt, Human
ccucagcuucuuuccuc

SEQ ID NO: 101301 - RNA, 22 nt, Human
ccucagcuugauuucugcagag

SEQ ID NO: 101302 - RNA, 22 nt, Human
ccucaggcaggaaacugucccg

SEQ ID NO: 101303 - RNA, 22 nt, Human
ccucaggcugucuuccuucugg

SEQ ID NO: 101304 - RNA, 22 nt, Human
ccucaggcuuaacuugucuuga

SEQ ID NO: 101305 - RNA, 22 nt, Human
ccucaggcuucuaguucaguga

SEQ ID NO: 101306 - RNA, 22 nt, Human
ccucagggaaugggaggcuggg

SEQ ID NO: 101307 - RNA, 22 nt, Human
ccucagggaggccucuguggcu

SEQ ID NO: 101308 - RNA, 18 nt, Human
ccucaggggaccuggcag

SEQ ID NO: 101309 - RNA, 23 nt, Human
ccucaggggaccugugagccuga

SEQ ID NO: 101310 - RNA, 22 nt, Human
ccucaggggugcccacagcugc

SEQ ID NO: 101311 - RNA, 22 nt, Human
ccucaggguggcaucagaucuu

SEQ ID NO: 101312 - RNA, 22 nt, Human
ccucagucauuggccuacacuu

SEQ ID NO: 101313 - RNA, 22 nt, Human
ccucagugcguacugaacagug

SEQ ID NO: 101314 - RNA, 22 nt, Human
ccucagugugcagcagcaucug

SEQ ID NO: 101315 - RNA, 22 nt, Human
ccucaguguguggauguuagag

SEQ ID NO: 101316 - RNA, 22 nt, Human
ccucaugcugcaucucugaggu

SEQ ID NO: 101317 - RNA, 22 nt, Human
ccucauggccuugagcugaggg

SEQ ID NO: 101318 - RNA, 22 nt, Human
ccucauucuuuccugggccccu

SEQ ID NO: 101319 - RNA, 18 nt, Human
ccuccaaguccccagccu

SEQ ID NO: 101320 - RNA, 22 nt, Human
ccuccaaguuugacucaggaca

SEQ ID NO: 101321 - RNA, 22 nt, Human
ccuccacucuggccucucaggu

SEQ ID NO: 101322 - RNA, 22 nt, Human
ccuccagcauuacuggcccaug

SEQ ID NO: 101323 - RNA, 22 nt, Human
gagauguuauucuucagugugu

SEQ ID NO: 101324 - RNA, 20 nt, Human
gagauuaacugagaaucuag

SEQ ID NO: 101325 - RNA, 23 nt, Human
gagauucuccuguugucaagucu

SEQ ID NO: 101326 - RNA, 22 nt, Human
gagauucugagaaguuaagucc

SEQ ID NO: 101327 - RNA, 22 nt, Human
gagauucuguagucaggcaucu

SEQ ID NO: 101328 - RNA, 22 nt, Human
gagauuggauuuaauggccaaa

SEQ ID NO: 101329 - RNA, 22 nt, Human
gagauugggucuugcucuguca

SEQ ID NO: 101330 - RNA, 22 nt, Human
gagauuuaauuggauuaacuua

SEQ ID NO: 101331 - RNA, 23 nt, Human
gagauuuagcagacaaagcucuu

SEQ ID NO: 101332 - RNA, 22 nt, Human
gagauuuauugacuuaacagua

SEQ ID NO: 101333 - RNA, 22 nt, Human
gagauuuccauauuuuguaaca

SEQ ID NO: 101334 - RNA, 17 nt, Human
gagauuuucguccugaa

SEQ ID NO: 101335 - RNA, 22 nt, Human
gagcaaagcuuuuagggccuuu

SEQ ID NO: 101336 - RNA, 22 nt, Human
gagcaagauccuguuuuucuau

SEQ ID NO: 101337 - RNA, 22 nt, Human
gagcaagauuuuauaaguugug

SEQ ID NO: 101338 - RNA, 22 nt, Human
gagcaaggauggccggggccgu

SEQ ID NO: 101339 - RNA, 22 nt, Human
gagcaaggaugggucuauagua

SEQ ID NO: 101340 - RNA, 22 nt, Human
gagcaaggcggcaucucucuga

SEQ ID NO: 101341 - RNA, 22 nt, Human
gagcaauagcaccaauuaacuc

SEQ ID NO: 101342 - RNA, 22 nt, Human
gagcacagaaucuucccaugca

SEQ ID NO: 101343 - RNA, 22 nt, Human
gagcacagccaaaguaagaagg

SEQ ID NO: 101344 - RNA, 19 nt, Human
gagcacagcggcauuuggu

SEQ ID NO: 101345 - RNA, 22 nt, Human
gagcacagggaauagacagaua

SEQ ID NO: 101346 - RNA, 22 nt, Human
gagcacagugcaguuucugcua

SEQ ID NO: 101347 - RNA, 22 nt, Human
gagcacauguggagagucuggg

SEQ ID NO: 101348 - RNA, 22 nt, Human
gagcaccaaggcucugccaugg

SEQ ID NO: 101349 - RNA, 23 nt, Human
gagcaccagggcuuuugagacau

SEQ ID NO: 101350 - RNA, 22 nt, Human
gagcacccuaccugccacugag

SEQ ID NO: 101351 - RNA, 22 nt, Human
gagcaccgccuccacgaugccc

SEQ ID NO: 101352 - RNA, 22 nt, Human
gagcacucuggcauguaaccuu

SEQ ID NO: 101353 - RNA, 22 nt, Human
gagcacugauuuauuuuugucu

SEQ ID NO: 101354 - RNA, 22 nt, Human
gagcacuuagaugcuaugaaug

SEQ ID NO: 101355 - RNA, 22 nt, Human
gagcagcaagcacucaaaggcu

SEQ ID NO: 101356 - RNA, 22 nt, Human
gagcagcacugaguuagcagcu

SEQ ID NO: 101357 - RNA, 22 nt, Human
gagcagcaggccagguugcagg

SEQ ID NO: 101358 - RNA, 22 nt, Human
gagcagcaguuguuacaaugau

SEQ ID NO: 101359 - RNA, 22 nt, Human
gagcagcucugggugacccagu

SEQ ID NO: 101360 - RNA, 22 nt, Human
gagcagcuggaggccuuguugg

SEQ ID NO: 101361 - RNA, 19 nt, Human
gagcagcuuccuaucuggu

SEQ ID NO: 101362 - RNA, 22 nt, Human
gagcaggaaggccagaaggguc

SEQ ID NO: 101363 - RNA, 22 nt, Human
gagcaggacagcagcuuccugg

SEQ ID NO: 101364 - RNA, 22 nt, Human
gagcagggccacuucuguaccu

SEQ ID NO: 101365 - RNA, 22 nt, Human
gagcagugaugggaggacguca

SEQ ID NO: 101366 - RNA, 22 nt, Human
gagcagugggaaggaacagggu

SEQ ID NO: 101367 - RNA, 22 nt, Human
gagcaguuauuuuuagacauga

SEQ ID NO: 101368 - RNA, 22 nt, Human
gagcauaggacacagaggugug

SEQ ID NO: 101369 - RNA, 22 nt, Human
gagcaucgcugagaucccagac

SEQ ID NO: 101370 - RNA, 22 nt, Human
gagcaucuaugugcuggguacu

SEQ ID NO: 101371 - RNA, 22 nt, Human
gagcaucugaugagauuggauu

SEQ ID NO: 101372 - RNA, 22 nt, Human
gagcaucuuguucccaacuucu

SEQ ID NO: 101373 - RNA, 21 nt, Human
gagcauggcuuacaucagcag

SEQ ID NO: 101374 - RNA, 22 nt, Human
gagccaaggguugccauggaga

SEQ ID NO: 101375 - RNA, 22 nt, Human
gagccaaucuuugggcucuugg

SEQ ID NO: 101376 - RNA, 22 nt, Human
gagccacagaaggaaauugggg

SEQ ID NO: 101377 - RNA, 22 nt, Human
gagccacaguggauugauucca

SEQ ID NO: 101378 - RNA, 17 nt, Human
gagccacccugugcgag

SEQ ID NO: 101379 - RNA, 22 nt, Human
gagccacuguugggcacuuucc

SEQ ID NO: 101380 - RNA, 22 nt, Human
gagccagcagccggcaccacca

SEQ ID NO: 101381 - RNA, 22 nt, Human
gagccagccuccgccucucucc

SEQ ID NO: 101382 - RNA, 19 nt, Human
ccucaucuuggugugugca

SEQ ID NO: 101383 - RNA, 22 nt, Human
ccucauucucgcguguguuucu

SEQ ID NO: 101384 - RNA, 22 nt, Human
ccuccaagcugguccucugugu

SEQ ID NO: 101385 - RNA, 22 nt, Human
ccuccaaggugagagaggaugg

SEQ ID NO: 101386 - RNA, 22 nt, Human
ccuccagccuuccugaagagcc

SEQ ID NO: 101387 - RNA, 22 nt, Human
ccuccaggaacuugagagacac

SEQ ID NO: 101388 - RNA, 22 nt, Human
ccuccaggccuugcagguuaac

SEQ ID NO: 101389 - RNA, 22 nt, Human
ccuccagggccccucucacugg

SEQ ID NO: 101390 - RNA, 22 nt, Human
ccuccaucaccaucugcccuca

SEQ ID NO: 101391 - RNA, 22 nt, Human
ccucccauggagcucuguccau

SEQ ID NO: 101392 - RNA, 22 nt, Human
ccuccccacaggccaaauaggc

SEQ ID NO: 101393 - RNA, 22 nt, Human
ccuccccacgggcagccggcgc

SEQ ID NO: 101394 - RNA, 22 nt, Human
ccucccucccucuuaugguuua

SEQ ID NO: 101395 - RNA, 22 nt, Human
ccucccucuguuagagcugucu

SEQ ID NO: 101396 - RNA, 22 nt, Human
ccucccuggccagagcagcagc

SEQ ID NO: 101397 - RNA, 22 nt, Human
ccucccugguggcucuggucua

SEQ ID NO: 101398 - RNA, 22 nt, Human
ccucccugucuaccuguugugg

SEQ ID NO: 101399 - RNA, 22 nt, Human
ccucccuuccccaguagucaag

SEQ ID NO: 101400 - RNA, 23 nt, Human
ccuccucauaucuuugacuagug

SEQ ID NO: 101401 - RNA, 22 nt, Human
ccuccucugggaagauucagag

SEQ ID NO: 101402 - RNA, 21 nt, Human
ccuccugcccgcaagcuaggg

SEQ ID NO: 101403 - RNA, 19 nt, Human
ccuccugcuagauaugcaa

SEQ ID NO: 101404 - RNA, 22 nt, Human
ccuccuggaggcucuagggaaa

SEQ ID NO: 101405 - RNA, 22 nt, Human
ccuccuggauggauuuggugga

SEQ ID NO: 101406 - RNA, 22 nt, Human
ccuccuggggugaaggauggga

SEQ ID NO: 101407 - RNA, 22 nt, Human
ccuccuggguucaagcgauucu

SEQ ID NO: 101408 - RNA, 22 nt, Human
ccuccugguaauuagcgaaagg

SEQ ID NO: 101409 - RNA, 20 nt, Human
ccuccuggucaggugugcag

SEQ ID NO: 101410 - RNA, 22 nt, Human
ccuccugguccagcaucucuuu

SEQ ID NO: 101411 - RNA, 22 nt, Human
ccuccuucuggggccuucugcu

SEQ ID NO: 101412 - RNA, 22 nt, Human
ccucggagaaaggcagcuccac

SEQ ID NO: 101413 - RNA, 18 nt, Human
ccucggagccuccguguc

SEQ ID NO: 101414 - RNA, 22 nt, Human
ccucgugugcuaggauccaggu

SEQ ID NO: 101415 - RNA, 22 nt, Human
ccucuaaauuguuugaaguugg

SEQ ID NO: 101416 - RNA, 23 nt, Human
ccucuaauaaacuugaccuugug

SEQ ID NO: 101417 - RNA, 22 nt, Human
ccucucaaaagcacaacauuga

SEQ ID NO: 101418 - RNA, 23 nt, Human
ccucuccagacacugggccuugu

SEQ ID NO: 101419 - RNA, 19 nt, Human
ccucuccgcccaccagccc

SEQ ID NO: 101420 - RNA, 22 nt, Human
ccucucggcagcccaucuuguc

SEQ ID NO: 101421 - RNA, 23 nt, Human
ccucucucccuguuuggcaaaua

SEQ ID NO: 101422 - RNA, 22 nt, Human
ccucucuguaagggucccuccc

SEQ ID NO: 101423 - RNA, 16 nt, Human
ccucucuuauuccucc

SEQ ID NO: 101424 - RNA, 22 nt, Human
ccucucuuuccuacaccuugga

SEQ ID NO: 101425 - RNA, 22 nt, Human
ccucugacuccacacuugaacu

SEQ ID NO: 101426 - RNA, 22 nt, Human
ccucugagaacaccuggcgucc

SEQ ID NO: 101427 - RNA, 22 nt, Human
ccucugagccugugugcggcac

SEQ ID NO: 101428 - RNA, 22 nt, Human
ccucugaguagacuggacauga

SEQ ID NO: 101429 - RNA, 22 nt, Human
ccucugagucucacuguaaccu

SEQ ID NO: 101430 - RNA, 22 nt, Human
ccucugagugcuuugagggaga

SEQ ID NO: 101431 - RNA, 22 nt, Human
ccucugaguuagagaucuagau

SEQ ID NO: 101432 - RNA, 22 nt, Human
gauguucagugguugaccauaa

SEQ ID NO: 101433 - RNA, 22 nt, Human
gauguuuggcucaaacgagugu

SEQ ID NO: 101434 - RNA, 22 nt, Human
gauguuuucuggaaaaugaaug

SEQ ID NO: 101435 - RNA, 22 nt, Human
gauuaacaaauuucauauccaa

SEQ ID NO: 101436 - RNA, 22 nt, Human
gauuaaguaacugaacacuuug

SEQ ID NO: 101437 - RNA, 22 nt, Human
gauuaaguggaaugaguauuug

SEQ ID NO: 101438 - RNA, 22 nt, Human
gauuacaauucagguugauaag

SEQ ID NO: 101439 - RNA, 22 nt, Human
gauuacacguuuuuaaucacau

SEQ ID NO: 101440 - RNA, 22 nt, Human
gauuacauucuccuuguauuag

SEQ ID NO: 101441 - RNA, 17 nt, Human
gauuagaaaacacauga

SEQ ID NO: 101442 - RNA, 22 nt, Human
gauuagaaauguuaccauacag

SEQ ID NO: 101443 - RNA, 22 nt, Human
gauuagaaugggaagauacaag

SEQ ID NO: 101444 - RNA, 22 nt, Human
gauuauggagaagaacaaugaa

SEQ ID NO: 101445 - RNA, 22 nt, Human
gauuauguucgacuuuagaaau

SEQ ID NO: 101446 - RNA, 22 nt, Human
gauucaaaguuaaugaagaugc

SEQ ID NO: 101447 - RNA, 22 nt, Human
gauucacagaacuuagucaagc

SEQ ID NO: 101448 - RNA, 22 nt, Human
gauucagugagggugagaagaa

SEQ ID NO: 101449 - RNA, 22 nt, Human
gauucauucucaguuucuagag

SEQ ID NO: 101450 - RNA, 22 nt, Human
gauucccaugucugaggaggug

SEQ ID NO: 101451 - RNA, 22 nt, Human
gauucucugcuaucuaucaccu

SEQ ID NO: 101452 - RNA, 22 nt, Human
gauucugaucuauaguguuaua

SEQ ID NO: 101453 - RNA, 22 nt, Human
gauucuggauugucugcuugaa

SEQ ID NO: 101454 - RNA, 22 nt, Human
gauucuggguccugugucuugc

SEQ ID NO: 101455 - RNA, 22 nt, Human
gauugaaauauaaauauguguu

SEQ ID NO: 101456 - RNA, 22 nt, Human
gauugcuguucccagggggcug

SEQ ID NO: 101457 - RNA, 22 nt, Human
gauuggagaguggaacaugcug

SEQ ID NO: 101458 - RNA, 22 nt, Human
gauuggucuacucaacagcaga

SEQ ID NO: 101459 - RNA, 22 nt, Human
gauuguaaaacagaucauuauc

SEQ ID NO: 101460 - RNA, 22 nt, Human
gauuguaauuuucaagagguaa

SEQ ID NO: 101461 - RNA, 22 nt, Human
gauuuacagguuagguccugua

SEQ ID NO: 101462 - RNA, 22 nt, Human
gauuuaguggcccuugguacac

SEQ ID NO: 101463 - RNA, 21 nt, Human
gauuuaguggcuguucuaccu

SEQ ID NO: 101464 - RNA, 22 nt, Human
gauuuauuuuuaaucagcaggg

SEQ ID NO: 101465 - RNA, 22 nt, Human
gauuucaaaaguagauccauca

SEQ ID NO: 101466 - RNA, 22 nt, Human
gauuucaaagguucugcaugcc

SEQ ID NO: 101467 - RNA, 22 nt, Human
gauuucaaguaucuugggcgag

SEQ ID NO: 101468 - RNA, 22 nt, Human
gauuucagaagcaagaggaggu

SEQ ID NO: 101469 - RNA, 22 nt, Human
gauuucagaguuuauuagguua

SEQ ID NO: 101470 - RNA, 22 nt, Human
gauuucagggugucuuccagcu

SEQ ID NO: 101471 - RNA, 22 nt, Human
gauuuccaggucauuaauaaag

SEQ ID NO: 101472 - RNA, 22 nt, Human
gauuuccaugauugggccagaa

SEQ ID NO: 101473 - RNA, 22 nt, Human
gauuucccagcaaaagcugguu

SEQ ID NO: 101474 - RNA, 22 nt, Human
gauuuccuagacauggggcaga

SEQ ID NO: 101475 - RNA, 22 nt, Human
gauuucuaaggaggcugaacuu

SEQ ID NO: 101476 - RNA, 19 nt, Human
gauuucuacaaaugucaga

SEQ ID NO: 101477 - RNA, 22 nt, Human
gauuucuacuugaacuugcuaa

SEQ ID NO: 101478 - RNA, 22 nt, Human
gauuucucugcacccacucagg

SEQ ID NO: 101479 - RNA, 22 nt, Human
gauuucugggcuuuauuucaga

SEQ ID NO: 101480 - RNA, 22 nt, Human
gauuucuguaacacuucagaua

SEQ ID NO: 101481 - RNA, 22 nt, Human
gauuucuucauuuguggugaau

SEQ ID NO: 101482 - RNA, 22 nt, Human
gauuucuugauaauucaaaucc

SEQ ID NO: 101483 - RNA, 22 nt, Human
gauuucuuuaugaaguacagaa

SEQ ID NO: 101484 - RNA, 22 nt, Human
gauuucuuuguacccacaaucc

SEQ ID NO: 101485 - RNA, 22 nt, Human
gauuuggccuuucgcaugguau

SEQ ID NO: 101486 - RNA, 22 nt, Human
gauuuggcuuggaugauuaaac

SEQ ID NO: 101487 - RNA, 22 nt, Human
gauuugucacgguugagagcca

SEQ ID NO: 101488 - RNA, 22 nt, Human
gauuuguccacagagugaugaa

SEQ ID NO: 101489 - RNA, 22 nt, Human
gauuugucuaggucaugacuuu

SEQ ID NO: 101490 - RNA, 22 nt, Human
gauuugucuauauucaaauaug

SEQ ID NO: 101491 - RNA, 21 nt, Human
gauuuuaaagagacugccaca

SEQ ID NO: 101492 - RNA, 22 nt, Human
gauuuuaauuauaggagguccu

SEQ ID NO: 101493 - RNA, 22 nt, Human
gauuuuaucuuugugugcagua

SEQ ID NO: 101494 - RNA, 22 nt, Human
gcaaaauuuacacuccuucuuc

SEQ ID NO: 101495 - RNA, 22 nt, Human
gcaaacagccaggcgcagaagu

SEQ ID NO: 101496 - RNA, 22 nt, Human
gcaaacauucaggaguacagga

SEQ ID NO: 101497 - RNA, 22 nt, Human
gcaaagaaaguuuuaaugaggu

SEQ ID NO: 101498 - RNA, 22 nt, Human
gcaaagacccaggugucuaucc

SEQ ID NO: 101499 - RNA, 22 nt, Human
gcaaagacggacucaggagugc

SEQ ID NO: 101500 - RNA, 22 nt, Human
gcaaagacugcaauuacuuuug

SEQ ID NO: 101501 - RNA, 22 nt, Human
gcaaagcaagcugucagccuca

SEQ ID NO: 101502 - RNA, 22 nt, Human
gcaaagcaaucaggaguagcau

SEQ ID NO: 101503 - RNA, 22 nt, Human
gcaaagcacacccucagaguuu

SEQ ID NO: 101504 - RNA, 22 nt, Human
gcaaagcaucaguagaaauguu

SEQ ID NO: 101505 - RNA, 22 nt, Human
gcaaagcauucuguggagucua

SEQ ID NO: 101506 - RNA, 22 nt, Human
gcaaagguagccaaggagcuca

SEQ ID NO: 101507 - RNA, 17 nt, Human
gcaaaggugaggagaga

SEQ ID NO: 101508 - RNA, 22 nt, Human
gcaaagugcuucagugggagcu

SEQ ID NO: 101509 - RNA, 21 nt, Human
gcaaagugugggcauaaacag

SEQ ID NO: 101510 - RNA, 22 nt, Human
gcaaauaauauacuuugaucuc

SEQ ID NO: 101511 - RNA, 22 nt, Human
gcaaauauucaagacuuuucca

SEQ ID NO: 101512 - RNA, 22 nt, Human
gcaaauauuucuaauuccugaa

SEQ ID NO: 101513 - RNA, 22 nt, Human
gcaaaugaagguggugcuacag

SEQ ID NO: 101514 - RNA, 22 nt, Human
gcaaauguggcuuccuuucuag

SEQ ID NO: 101515 - RNA, 22 nt, Human
gcaaauguucacggggagcaua

SEQ ID NO: 101516 - RNA, 21 nt, Human
gcaaauguucaggaaaaaaga

SEQ ID NO: 101517 - RNA, 22 nt, Human
gcaaauucuaggccccucucca

SEQ ID NO: 101518 - RNA, 22 nt, Human
gcaaauugggaaauuucucuag

SEQ ID NO: 101519 - RNA, 22 nt, Human
gcaacaggcaguuugcucaugu

SEQ ID NO: 101520 - RNA, 22 nt, Human
gcaacauuaaaccaauaauugu

SEQ ID NO: 101521 - RNA, 22 nt, Human
gcaacauugcuucugaacauag

SEQ ID NO: 101522 - RNA, 21 nt, Human
gcaaccagaccacagggcagu

SEQ ID NO: 101523 - RNA, 20 nt, Human
gcaacuagggagacacagcu

SEQ ID NO: 101524 - RNA, 22 nt, Human
gcaacuuaggaguuagagcaug

SEQ ID NO: 101525 - RNA, 16 nt, Human
gcaacuuugggguuga

SEQ ID NO: 101526 - RNA, 22 nt, Human
gcaagacaauggagcauaaacg

SEQ ID NO: 101527 - RNA, 22 nt, Human
gcaagaccuaucuaguugcugu

SEQ ID NO: 101528 - RNA, 22 nt, Human
gcaagagacuuuuaugucugcc

SEQ ID NO: 101529 - RNA, 22 nt, Human
gcaagagcgcucucuuucauua

SEQ ID NO: 101530 - RNA, 22 nt, Human
gcaagauguuaacauagggaga

SEQ ID NO: 101531 - RNA, 22 nt, Human
gcaagauuagaaucaacuguga

SEQ ID NO: 101532 - RNA, 22 nt, Human
gcaagcaauggacggugacuuu

SEQ ID NO: 101533 - RNA, 22 nt, Human
gcaagcagaucuccggagggaa

SEQ ID NO: 101534 - RNA, 23 nt, Human
cguuuuuuccucagauguucugg

SEQ ID NO: 101535 - RNA, 22 nt, Human
cuaaacauguuggugcuuuaaa

SEQ ID NO: 101536 - RNA, 22 nt, Human
cuaaacuucauauguugcuuua

SEQ ID NO: 101537 - RNA, 22 nt, Human
cuaaagaagcuagcaaucuaua

SEQ ID NO: 101538 - RNA, 22 nt, Human
cuaaagacacaauaaguagcuu

SEQ ID NO: 101539 - RNA, 22 nt, Human
cuaaagcaacugagacacauag

SEQ ID NO: 101540 - RNA, 22 nt, Human
cuaaagcauucucagauuuugc

SEQ ID NO: 101541 - RNA, 22 nt, Human
cucacacacgaagcccuuggcc

SEQ ID NO: 101542 - RNA, 22 nt, Human
cucacaccagcuuacaagacuu

SEQ ID NO: 101543 - RNA, 22 nt, Human
cucacagaugaugucuaugugg

SEQ ID NO: 101544 - RNA, 22 nt, Human
cucacagaugcugugggucagg

SEQ ID NO: 101545 - RNA, 22 nt, Human
cucacaggcaucucaucaggcu

SEQ ID NO: 101546 - RNA, 22 nt, Human
cucacaggcgguaauucaggga

SEQ ID NO: 101547 - RNA, 22 nt, Human
cucacagguagaauaacaacau

SEQ ID NO: 101548 - RNA, 22 nt, Human
cucacaguuucacaguguagau

SEQ ID NO: 101549 - RNA, 23 nt, Human
cucaccaagcgccgccgcugugu

SEQ ID NO: 101550 - RNA, 22 nt, Human
cucaccccuguaauuccagcac

SEQ ID NO: 101551 - RNA, 22 nt, Human
cucacucagacauccagugcag

SEQ ID NO: 101552 - RNA, 22 nt, Human
cucacuggcaagacuacaggug

SEQ ID NO: 101553 - RNA, 22 nt, Human
cucacugucuguacuagcugau

SEQ ID NO: 101554 - RNA, 22 nt, Human
cucacuguuuaauagcuggauc

SEQ ID NO: 101555 - RNA, 20 nt, Human
cucacuuaccuuuuucuaua

SEQ ID NO: 101556 - RNA, 22 nt, Human
cucagaagaacaaaggcucuac

SEQ ID NO: 101557 - RNA, 22 nt, Human
cucagaagccuucagucuuggc

SEQ ID NO: 101558 - RNA, 22 nt, Human
cucagaauuaauaaccacaagg

SEQ ID NO: 101559 - RNA, 22 nt, Human
cucagacaaaugauuaagguua

SEQ ID NO: 101560 - RNA, 22 nt, Human
cucagacaucugaaauggguua

SEQ ID NO: 101561 - RNA, 22 nt, Human
cucagacuggggcucccugagu

SEQ ID NO: 101562 - RNA, 22 nt, Human
cucagacuuucaggguaggcca

SEQ ID NO: 101563 - RNA, 22 nt, Human
cucagagaaaaggagcaagggu

SEQ ID NO: 101564 - RNA, 22 nt, Human
cucagagaagauggaugaggua

SEQ ID NO: 101565 - RNA, 22 nt, Human
cucagagaggcaguggaaguca

SEQ ID NO: 101566 - RNA, 22 nt, Human
cucagagcaaugaacaugcaaa

SEQ ID NO: 101567 - RNA, 22 nt, Human
cucagagcacaguuuaugacag

SEQ ID NO: 101568 - RNA, 17 nt, Human
cucagagcaggacagaa

SEQ ID NO: 101569 - RNA, 22 nt, Human
cucagaggguacaggugaaccc

SEQ ID NO: 101570 - RNA, 22 nt, Human
cucagagguggaugccuugugg

SEQ ID NO: 101571 - RNA, 23 nt, Human
cucagagguguuuuucacuuacu

SEQ ID NO: 101572 - RNA, 22 nt, Human
cucagagucugcauuucuguca

SEQ ID NO: 101573 - RNA, 22 nt, Human
cucagauguagaaagauuguga

SEQ ID NO: 101574 - RNA, 22 nt, Human
cucagcaacccuagaacauuug

SEQ ID NO: 101575 - RNA, 22 nt, Human
cucagcacaucuuuacauuucc

SEQ ID NO: 101576 - RNA, 22 nt, Human
cucagcacauuccuaagggaug

SEQ ID NO: 101577 - RNA, 20 nt, Human
cucagcagauucuucuagaa

SEQ ID NO: 101578 - RNA, 22 nt, Human
cucagcagcuacaggauucggg

SEQ ID NO: 101579 - RNA, 22 nt, Human
cucagcagcugcugcugguggg

SEQ ID NO: 101580 - RNA, 22 nt, Human
cucagcagguaccacaugaucu

SEQ ID NO: 101581 - RNA, 22 nt, Human
cucagccagacaugacccaguc

SEQ ID NO: 101582 - RNA, 22 nt, Human
cucagccaggugggggucggga

SEQ ID NO: 101583 - RNA, 22 nt, Human
cucagccagugaucuuuccuuu

SEQ ID NO: 101584 - RNA, 22 nt, Human
cucagccccagcccagauagca

SEQ ID NO: 101585 - RNA, 22 nt, Human
cucagcccggugcucgugccac

SEQ ID NO: 101586 - RNA, 22 nt, Human
cucagcuagggaagguuagcuu

SEQ ID NO: 101587 - RNA, 22 nt, Human
cucagcuaguaacguacauguc

SEQ ID NO: 101588 - RNA, 22 nt, Human
cucagcucaaaauucaccuuug

SEQ ID NO: 101589 - RNA, 22 nt, Human
cucagcuccaggugugcaucuu

SEQ ID NO: 101590 - RNA, 20 nt, Human
cucagcucuucagggcaagu

SEQ ID NO: 101591 - RNA, 22 nt, Human
cucagcugcagccuggcuggca

SEQ ID NO: 101592 - RNA, 22 nt, Human
cucagcuggcaauucuggcucc

SEQ ID NO: 101593 - RNA, 22 nt, Human
cucaggagacaguguccacaug

SEQ ID NO: 101594 - RNA, 22 nt, Human
cucaggagagucuuauaucucc

SEQ ID NO: 101595 - RNA, 22 nt, Human
cucaggaguuggaggcuacagu

SEQ ID NO: 101596 - RNA, 22 nt, Human
cucaggauauugggcuggagca

SEQ ID NO: 101597 - RNA, 22 nt, Human
cucaggaugaaagucaugguga

SEQ ID NO: 101598 - RNA, 22 nt, Human
cucaggauucucgacacucaca

SEQ ID NO: 101599 - RNA, 22 nt, Human
cucaggauuuaaaggggcacuc

SEQ ID NO: 101600 - RNA, 18 nt, Human
cucaggcagagaagcuuu

SEQ ID NO: 101601 - RNA, 22 nt, Human
cucaggccagguuucucccaca

SEQ ID NO: 101602 - RNA, 22 nt, Human
cucaggcccacagcagacccac

SEQ ID NO: 101603 - RNA, 22 nt, Human
cucaggccuugaagucuuuucu

SEQ ID NO: 101604 - RNA, 22 nt, Human
cucaggcucuggccauccaagg

SEQ ID NO: 101605 - RNA, 22 nt, Human
cucaggcugucuaauggauuag

SEQ ID NO: 101606 - RNA, 22 nt, Human
cucaggcuugggaggaggccca

SEQ ID NO: 101607 - RNA, 22 nt, Human
cucagggaagcuauggugaggg

SEQ ID NO: 101608 - RNA, 22 nt, Human
cucagggacaaggggagacccc

SEQ ID NO: 101609 - RNA, 22 nt, Human
cucagggacggcaucucauuuc

SEQ ID NO: 101610 - RNA, 22 nt, Human
cucagggacguuagaggacagg

SEQ ID NO: 101611 - RNA, 22 nt, Human
cucagggagagccaagaguucc

SEQ ID NO: 101612 - RNA, 22 nt, Human
cucagggaggccucugcugguu

SEQ ID NO: 101613 - RNA, 22 nt, Human
cucagggauggugaagcaccca

SEQ ID NO: 101614 - RNA, 18 nt, Human
cucagggcaucagucugg

SEQ ID NO: 101615 - RNA, 22 nt, Human
cucagggccaaggaugcuguug

SEQ ID NO: 101616 - RNA, 22 nt, Human
cucagggugcagcacaguuccu

SEQ ID NO: 101617 - RNA, 22 nt, Human
cucagguagagucugcaugggg

SEQ ID NO: 101618 - RNA, 20 nt, Human
cucaguaaaagcacaggguc

SEQ ID NO: 101619 - RNA, 22 nt, Human
cucaguaaggaugcuucagcgg

SEQ ID NO: 101620 - RNA, 22 nt, Human
cucaguagaaaauacauggacu

SEQ ID NO: 101621 - RNA, 22 nt, Human
cucagucaugacgcucaggacc

SEQ ID NO: 101622 - RNA, 22 nt, Human
cucaguccagggaccggccucc

SEQ ID NO: 101623 - RNA, 22 nt, Human
cucaguccgucccgcuaggugc

SEQ ID NO: 101624 - RNA, 22 nt, Human
cucaguccuuauuugccucuac

SEQ ID NO: 101625 - RNA, 22 nt, Human
cucagugcugaggaaaguugaa

SEQ ID NO: 101626 - RNA, 22 nt, Human
cucagugcuuaguguguuuugg

SEQ ID NO: 101627 - RNA, 22 nt, Human
cucagugguugagagccugggc

SEQ ID NO: 101628 - RNA, 22 nt, Human
cucagugucuggggccccaggg

SEQ ID NO: 101629 - RNA, 22 nt, Human
cucagugucuuauuugaguucu

SEQ ID NO: 101630 - RNA, 23 nt, Human
cucagugugugacccauggccuc

SEQ ID NO: 101631 - RNA, 18 nt, Human
cucaguguuugcugaaaa

SEQ ID NO: 101632 - RNA, 22 nt, Human
cucaguuugagggguagguguu

SEQ ID NO: 101633 - RNA, 22 nt, Human
cucauaaaggcacacuuguugu

SEQ ID NO: 101634 - RNA, 22 nt, Human
cucauaaugugacuguauuuga

SEQ ID NO: 101635 - RNA, 22 nt, Human
cucauagauuuagauagaucga

SEQ ID NO: 101636 - RNA, 22 nt, Human
cucauauucagucacugaugca

SEQ ID NO: 101637 - RNA, 22 nt, Human
cucaucuggcuucaguaacagu

SEQ ID NO: 101638 - RNA, 22 nt, Human
cucauggauauaagaacuguuu

SEQ ID NO: 101639 - RNA, 22 nt, Human
cucaugugcaaaaguccaaauu

SEQ ID NO: 101640 - RNA, 22 nt, Human
cucauucauucccgcagccacc

SEQ ID NO: 101641 - RNA, 22 nt, Human
cucauucuuucacagucugugg

SEQ ID NO: 101642 - RNA, 22 nt, Human
cucauugcagcugcauuacugu

SEQ ID NO: 101643 - RNA, 22 nt, Human
cucauuuaacagauuaaaaagu

SEQ ID NO: 101644 - RNA, 22 nt, Human
cucauuuacucaucugcaaaac

SEQ ID NO: 101645 - RNA, 22 nt, Human
cucauuuauccaaaagccaguu

SEQ ID NO: 101646 - RNA, 22 nt, Human
cuccaaauauaaucacauugga

SEQ ID NO: 101647 - RNA, 22 nt, Human
cguuuauuuugaagauuccacu

SEQ ID NO: 101648 - RNA, 18 nt, Human
cguuuuuccgggauugca

SEQ ID NO: 101649 - RNA, 22 nt, Human
cuaaaaauccacacuaggugaa

SEQ ID NO: 101650 - RNA, 17 nt, Human
cucagcugaaccccaga

SEQ ID NO: 101651 - RNA, 19 nt, Human
cucagcuguagcucaugug

SEQ ID NO: 101652 - RNA, 22 nt, Human
cucaggaaccgcggcagcagcc

SEQ ID NO: 101653 - RNA, 22 nt, Human
cucaggacccgguccagguggg

SEQ ID NO: 101654 - RNA, 22 nt, Human
cucaggacggccgggggagccu

SEQ ID NO: 101655 - RNA, 22 nt, Human
cuccaacgaggcugggguacaa

SEQ ID NO: 101656 - RNA, 22 nt, Human
cuccaaggcucuggugcugagg

SEQ ID NO: 101657 - RNA, 22 nt, Human
cuccaaucugggcaacagagca

SEQ ID NO: 101658 - RNA, 20 nt, Human
cuccacaccuguucgcaggc

SEQ ID NO: 101659 - RNA, 22 nt, Human
cuccacagcucaggcucagagu

SEQ ID NO: 101660 - RNA, 19 nt, Human
cuccacagggauugugauu

SEQ ID NO: 101661 - RNA, 22 nt, Human
cuccacaguugcugcuuuuaau

SEQ ID NO: 101662 - RNA, 22 nt, Human
cuccaccccgugccggugcugg

SEQ ID NO: 101663 - RNA, 22 nt, Human
cuccacggcccauugggcagga

SEQ ID NO: 101664 - RNA, 22 nt, Human
cuccacucaccagaugccagga

SEQ ID NO: 101665 - RNA, 22 nt, Human
cuccagaaauuuggaugcagca

SEQ ID NO: 101666 - RNA, 19 nt, Human
cuccagaauacauguuccu

SEQ ID NO: 101667 - RNA, 22 nt, Human
cuccagaggaugcaggugaggg

SEQ ID NO: 101668 - RNA, 22 nt, Human
cuccagagggucagacucugag

SEQ ID NO: 101669 - RNA, 22 nt, Human
cuccagagucaucgagcauucc

SEQ ID NO: 101670 - RNA, 22 nt, Human
cuccagauguauacuuuccaag

SEQ ID NO: 101671 - RNA, 22 nt, Human
cuccagauuccugcuggcagaa

SEQ ID NO: 101672 - RNA, 22 nt, Human
cuccagcaggugcgucucagag

SEQ ID NO: 101673 - RNA, 22 nt, Human
cuccagccagagugccucuguu

SEQ ID NO: 101674 - RNA, 22 nt, Human
cuccagcuucugcccagagacu

SEQ ID NO: 101675 - RNA, 22 nt, Human
cuccagcuuuagcucuccaggg

SEQ ID NO: 101676 - RNA, 22 nt, Human
cuccaggaaagucaggcuuaga

SEQ ID NO: 101677 - RNA, 22 nt, Human
cuccaggacagauucagggcca

SEQ ID NO: 101678 - RNA, 22 nt, Human
cuccaggacccaguggcuccag

SEQ ID NO: 101679 - RNA, 22 nt, Human
cuccaggauaccuguuccuaua

SEQ ID NO: 101680 - RNA, 22 nt, Human
cuccaggccaagauuaaguaau

SEQ ID NO: 101681 - RNA, 22 nt, Human
cuccaggccccuggccuucugc

SEQ ID NO: 101682 - RNA, 22 nt, Human
cuccaggcuggauccaagucaa

SEQ ID NO: 101683 - RNA, 22 nt, Human
cuccaggcuucaagggccggcc

SEQ ID NO: 101684 - RNA, 18 nt, Human
cuccagggaacucaguca

SEQ ID NO: 101685 - RNA, 22 nt, Human
cuccagggaggagcacggguuc

SEQ ID NO: 101686 - RNA, 22 nt, Human
cuccagggaggucugcaggacu

SEQ ID NO: 101687 - RNA, 22 nt, Human
cuccaggguuccccgauccacu

SEQ ID NO: 101688 - RNA, 22 nt, Human
cuccagguagcuaaguccuggg

SEQ ID NO: 101689 - RNA, 22 nt, Human
cuccagguuacuuagccuagcu

SEQ ID NO: 101690 - RNA, 22 nt, Human
cuccagucuaguagagccugcu

SEQ ID NO: 101691 - RNA, 22 nt, Human
cuccagugagcgcggggcaugg

SEQ ID NO: 101692 - RNA, 22 nt, Human
cuccagugcgucuuaguaaacc

SEQ ID NO: 101693 - RNA, 22 nt, Human
cuccagugcugucaucccuucc

SEQ ID NO: 101694 - RNA, 22 nt, Human
cuccauacuuccaacaaacuuu

SEQ ID NO: 101695 - RNA, 20 nt, Human
cuccaugacuugaauuagua

SEQ ID NO: 101696 - RNA, 22 nt, Human
cuccauggaaaaggcuguuguu

SEQ ID NO: 101697 - RNA, 22 nt, Human
cuccauggaaccggggcugcuu

SEQ ID NO: 101698 - RNA, 22 nt, Human
cuccauggcuuucgcaucugca

SEQ ID NO: 101699 - RNA, 22 nt, Human
cuccauggggaaaugaaggugg

SEQ ID NO: 101700 - RNA, 22 nt, Human
cuccaugggggcuggccugugu

SEQ ID NO: 101701 - RNA, 22 nt, Human
cucccacuccuggcucaccaca

SEQ ID NO: 101702 - RNA, 22 nt, Human
cucccagacaugugccuccuug

SEQ ID NO: 101703 - RNA, 22 nt, Human
cucccagauuccugcuguggga

SEQ ID NO: 101704 - RNA, 22 nt, Human
cucccaggacucagaggagaag

SEQ ID NO: 101705 - RNA, 22 nt, Human
cucccaggacuggcucuaacug

SEQ ID NO: 101706 - RNA, 22 nt, Human
cucccaggggaacuaucaagua

SEQ ID NO: 101707 - RNA, 22 nt, Human
cucccaggggagucaucugcuu

SEQ ID NO: 101708 - RNA, 22 nt, Human
cucccagguugauucuuucccu

SEQ ID NO: 101709 - RNA, 22 nt, Human
cucccaguguuguuuucugaug

SEQ ID NO: 101710 - RNA, 22 nt, Human
cucccauugcuucaaagauccu

SEQ ID NO: 101711 - RNA, 22 nt, Human
cuccccaaagauaacggcuucu

SEQ ID NO: 101712 - RNA, 22 nt, Human
cuccccacauuucucccugucu

SEQ ID NO: 101713 - RNA, 22 nt, Human
cuccccacgccuggacuaagag

SEQ ID NO: 101714 - RNA, 22 nt, Human
cuccccagcauucugacuuccu

SEQ ID NO: 101715 - RNA, 22 nt, Human
cuccccagcucgcgggugacgg

SEQ ID NO: 101716 - RNA, 18 nt, Human
cuccccagcugcccccag

SEQ ID NO: 101717 - RNA, 22 nt, Human
cucccggcacuuggcaugucau

SEQ ID NO: 101718 - RNA, 22 nt, Human
cucccgugauccuggaggagag

SEQ ID NO: 101719 - RNA, 22 nt, Human
cucccucagaggagcaccuguu

SEQ ID NO: 101720 - RNA, 22 nt, Human
cucccucaggccuuagcccugc

SEQ ID NO: 101721 - RNA, 22 nt, Human
cucccuccaaauaagacucggg

SEQ ID NO: 101722 - RNA, 22 nt, Human
cucccuccucaaauaucuuugu

SEQ ID NO: 101723 - RNA, 22 nt, Human
cucccucugaggcuuugagccu

SEQ ID NO: 101724 - RNA, 22 nt, Human
cucccugaaauucagaugccuc

SEQ ID NO: 101725 - RNA, 22 nt, Human
cucccugaguuuguggcuaagu

SEQ ID NO: 101726 - RNA, 22 nt, Human
cucccuggcagccgcacuccug

SEQ ID NO: 101727 - RNA, 22 nt, Human
cucccuggggcuccuccuauuu

SEQ ID NO: 101728 - RNA, 22 nt, Human
cucccuggugacucccaaagcu

SEQ ID NO: 101729 - RNA, 22 nt, Human
cucccugugucuucacuuggcc

SEQ ID NO: 101730 - RNA, 22 nt, Human
cucccuucaggagaggcucaca

SEQ ID NO: 101731 - RNA, 19 nt, Human
cuccggccagcaacugcau

SEQ ID NO: 101732 - RNA, 22 nt, Human
cuccuacauuccaccuuggacu

SEQ ID NO: 101733 - RNA, 22 nt, Human
cuccuaggugcucacugggguc

SEQ ID NO: 101734 - RNA, 22 nt, Human
cuccucaaggucucaggaauaa

SEQ ID NO: 101735 - RNA, 22 nt, Human
cuccucacacccacugcaacca

SEQ ID NO: 101736 - RNA, 22 nt, Human
cuccucacuuuccagacugggc

SEQ ID NO: 101737 - RNA, 22 nt, Human
cuccucagaacagccuuggcug

SEQ ID NO: 101738 - RNA, 22 nt, Human
cuccucagucaggucuaggguc

SEQ ID NO: 101739 - RNA, 22 nt, Human
cuccuccacagaguccuugcca

SEQ ID NO: 101740 - RNA, 22 nt, Human
cuccuccagcucucccuggggg

SEQ ID NO: 101741 - RNA, 22 nt, Human
cuccuccagugggucccucagg

SEQ ID NO: 101742 - RNA, 22 nt, Human
cuccucccacggucucaggaag

SEQ ID NO: 101743 - RNA, 22 nt, Human
cuccuccuggacacaggcugug

SEQ ID NO: 101744 - RNA, 23 nt, Human
cuccucguaacucuguggugggu

SEQ ID NO: 101745 - RNA, 22 nt, Human
cuccucucaaaaguagguugac

SEQ ID NO: 101746 - RNA, 22 nt, Human
cuccucucaggcuggauggcgc

SEQ ID NO: 101747 - RNA, 22 nt, Human
cuccucuggaaauuccucugcc

SEQ ID NO: 101748 - RNA, 22 nt, Human
cuccucugucuggcccugagcc

SEQ ID NO: 101749 - RNA, 22 nt, Human
cuccugacuugugagccccucc

SEQ ID NO: 101750 - RNA, 22 nt, Human
cuccugagaaauaagcaaguaa

SEQ ID NO: 101751 - RNA, 22 nt, Human
cuccugaggacuucuauugggu

SEQ ID NO: 101752 - RNA, 22 nt, Human
cuccugcccacgugcuacuucu

SEQ ID NO: 101753 - RNA, 22 nt, Human
cuccuggagggccaaagaaaua

SEQ ID NO: 101754 - RNA, 22 nt, Human
cuccuggaucuuagccagauuc

SEQ ID NO: 101755 - RNA, 22 nt, Human
cuccuggcaguuccccuuguca

SEQ ID NO: 101756 - RNA, 22 nt, Human
cuccuggccacguucuugcugg

SEQ ID NO: 101757 - RNA, 22 nt, Human
cuccugggaauuuaguugugag

SEQ ID NO: 101758 - RNA, 20 nt, Human
cuccugggacugcugguuau

SEQ ID NO: 101759 - RNA, 22 nt, Human
acuuugcaauacuuaauacaaa

SEQ ID NO: 101760 - RNA, 22 nt, Human
acuuugcaaugggcagaaccca

SEQ ID NO: 101761 - RNA, 22 nt, Human
acuuugcagagccagaagagaa

SEQ ID NO: 101762 - RNA, 23 nt, Human
acuuugcagagccccuugaaaca

SEQ ID NO: 101763 - RNA, 22 nt, Human
acuuugcauggaaaauggucau

SEQ ID NO: 101764 - RNA, 20 nt, Human
acuuugcauuuccugauuuu

SEQ ID NO: 101765 - RNA, 22 nt, Human
acuuugccccaaagaaguuggu

SEQ ID NO: 101766 - RNA, 22 nt, Human
acuuugccccaggucucaugac

SEQ ID NO: 101767 - RNA, 22 nt, Human
acuuuggaaauugucuauaaga

SEQ ID NO: 101768 - RNA, 22 nt, Human
acuuuggacaauuuauuacugu

SEQ ID NO: 101769 - RNA, 22 nt, Human
acuuuggaggguguuguagaug

SEQ ID NO: 101770 - RNA, 22 nt, Human
acuuuggcacagaacuuccauu

SEQ ID NO: 101771 - RNA, 22 nt, Human
acuuugggaagcugcaauugcc

SEQ ID NO: 101772 - RNA, 22 nt, Human
acuuugggcacagugaggccag

SEQ ID NO: 101773 - RNA, 21 nt, Human
acuuugggcacuuuccugccc

SEQ ID NO: 101774 - RNA, 20 nt, Human
acuuuggggucuuucucaga

SEQ ID NO: 101775 - RNA, 22 nt, Human
acuuuguucuaauaguaucucu

SEQ ID NO: 101776 - RNA, 22 nt, Human
acuuuguuguuccuugucuaaa

SEQ ID NO: 101777 - RNA, 22 nt, Human
acuuuuaugauaaucaauguuc

SEQ ID NO: 101778 - RNA, 22 nt, Human
acuuuucucccuccugccuuca

SEQ ID NO: 101779 - RNA, 22 nt, Human
acuuuucuuaucagaaaggcca

SEQ ID NO: 101780 - RNA, 22 nt, Human
acuuuugaacaaacuccucugu

SEQ ID NO: 101781 - RNA, 22 nt, Human
acuuuuugcauaguaagugucu

SEQ ID NO: 101782 - RNA, 22 nt, Human
agaaaaacacaaucgggccucc

SEQ ID NO: 101783 - RNA, 22 nt, Human
agaaaaaucuuggcgcuugucu

SEQ ID NO: 101784 - RNA, 22 nt, Human
agaaaacacugcccccucucuc

SEQ ID NO: 101785 - RNA, 22 nt, Human
agaaaacugggaggagagcuuc

SEQ ID NO: 101786 - RNA, 17 nt, Human
agaaaagagaccagcag

SEQ ID NO: 101787 - RNA, 22 nt, Human
agaaaagaggcuuucuaagcau

SEQ ID NO: 101788 - RNA, 22 nt, Human
agaaaaggcuugaagagguuuu

SEQ ID NO: 101789 - RNA, 22 nt, Human
agaaaauuacuccagagacaag

SEQ ID NO: 101790 - RNA, 22 nt, Human
agaaacaacuuguuucucuugc

SEQ ID NO: 101791 - RNA, 22 nt, Human
agaaacaucauuguuugguauu

SEQ ID NO: 101792 - RNA, 21 nt, Human
agaaacaugaucaaaggaacc

SEQ ID NO: 101793 - RNA, 22 nt, Human
agaaaccagacuuggcccauuu

SEQ ID NO: 101794 - RNA, 22 nt, Human
agaaaccaucuuuauauaucug

SEQ ID NO: 101795 - RNA, 22 nt, Human
agaaaccucacagcaauucuga

SEQ ID NO: 101796 - RNA, 22 nt, Human
agaaaccuggggguuguacaua

SEQ ID NO: 101797 - RNA, 22 nt, Human
agaaacuaaccugguaggguuc

SEQ ID NO: 101798 - RNA, 22 nt, Human
agaaacuacuuggaggaaagau

SEQ ID NO: 101799 - RNA, 22 nt, Human
agaaacucaccuuuccagccau

SEQ ID NO: 101800 - RNA, 22 nt, Human
agaaacucuggaagaacuuuua

SEQ ID NO: 101801 - RNA, 22 nt, Human
agaaacugaacacaagagucgg

SEQ ID NO: 101802 - RNA, 22 nt, Human
agaaacugacaggaaaugaauu

SEQ ID NO: 101803 - RNA, 22 nt, Human
agaaagacgugaugaagaagua

SEQ ID NO: 101804 - RNA, 22 nt, Human
agaaagauuuucaacaggaggu

SEQ ID NO: 101805 - RNA, 22 nt, Human
agaaagcacagcggguccauuu

SEQ ID NO: 101806 - RNA, 22 nt, Human
agaaagcacccugcacuuucug

SEQ ID NO: 101807 - RNA, 22 nt, Human
agaaagcacucugucuuuuacc

SEQ ID NO: 101808 - RNA, 22 nt, Human
agaaagcagucccuuccgaccg

SEQ ID NO: 101809 - RNA, 22 nt, Human
agaaaggacaucucccuuuaag

SEQ ID NO: 101810 - RNA, 22 nt, Human
agaaaggcaauauuaacuacac

SEQ ID NO: 101811 - RNA, 22 nt, Human
agaaagggagagccagcacacg

SEQ ID NO: 101812 - RNA, 22 nt, Human
agaaaggguucucugaggugcu

SEQ ID NO: 101813 - RNA, 23 nt, Human
agaaagucauggccagguuugau

SEQ ID NO: 101814 - RNA, 20 nt, Human
agaaauacaugcaugcauga

SEQ ID NO: 101815 - RNA, 22 nt, Human
agaaauacugugagagcagccu

SEQ ID NO: 101816 - RNA, 22 nt, Human
agaaauagaggaaagguuugac

SEQ ID NO: 101817 - RNA, 22 nt, Human
agaaaucaauaucuauauguug

SEQ ID NO: 101818 - RNA, 22 nt, Human
agaaaucaggaacaguaaggag

SEQ ID NO: 101819 - RNA, 22 nt, Human
agaaaucauugaauuauuugcu

SEQ ID NO: 101820 - RNA, 22 nt, Human
agaaaucucaguaucucaggga

SEQ ID NO: 101821 - RNA, 22 nt, Human
agaaaucucuagcacaucgaau

SEQ ID NO: 101822 - RNA, 22 nt, Human
agaaaucugacugcugugcaca

SEQ ID NO: 101823 - RNA, 22 nt, Human
agaaaucuuugaaguguaaugu

SEQ ID NO: 101824 - RNA, 22 nt, Human
agaaaugacaagacugaucagg

SEQ ID NO: 101825 - RNA, 22 nt, Human
agaaaugccuacgagauaggga

SEQ ID NO: 101826 - RNA, 22 nt, Human
agaaaugcucaggucaacuuaa

SEQ ID NO: 101827 - RNA, 22 nt, Human
agaaauguacacgacacccaga

SEQ ID NO: 101828 - RNA, 22 nt, Human
agaaauguacgauguuaugcag

SEQ ID NO: 101829 - RNA, 22 nt, Human
agaaauguauagugaauuuuuc

SEQ ID NO: 101830 - RNA, 22 nt, Human
agaaauguauucuguauguuuu

SEQ ID NO: 101831 - RNA, 22 nt, Human
agaaaugugaauuucauuuccu

SEQ ID NO: 101832 - RNA, 22 nt, Human
agaaaugugagccccuuaucaa

SEQ ID NO: 101833 - RNA, 22 nt, Human
agaaauguucuucauuugccau

SEQ ID NO: 101834 - RNA, 22 nt, Human
agaaauguugaauacaucagga

SEQ ID NO: 101835 - RNA, 22 nt, Human
agaaauguuguggguuuuguua

SEQ ID NO: 101836 - RNA, 22 nt, Human
agaaauguuuacucacccccuu

SEQ ID NO: 101837 - RNA, 22 nt, Human
agaaauuaugcaguaguuuuau

SEQ ID NO: 101838 - RNA, 22 nt, Human
agaaauucuaagcaucaauagc

SEQ ID NO: 101839 - RNA, 22 nt, Human
agaaauugccagaaugucaggc

SEQ ID NO: 101840 - RNA, 22 nt, Human
agaacaaaauuagaggagugca

SEQ ID NO: 101841 - RNA, 20 nt, Human
agaacaaguacuaaaggaga

SEQ ID NO: 101842 - RNA, 22 nt, Human
agaacaaugcguauuuuacucc

SEQ ID NO: 101843 - RNA, 22 nt, Human
agaacacacgucagaguuuccu

SEQ ID NO: 101844 - RNA, 18 nt, Human
agaacacuugguuagauc

SEQ ID NO: 101845 - RNA, 22 nt, Human
agaacacuuuuaaauggcuugu

SEQ ID NO: 101846 - RNA, 22 nt, Human
agaacagccaauaaaagagggg

SEQ ID NO: 101847 - RNA, 22 nt, Human
agaacagccuauaguggccuuu

SEQ ID NO: 101848 - RNA, 22 nt, Human
agaacaggcaguugguuggauu

SEQ ID NO: 101849 - RNA, 22 nt, Human
agaacauggauugucaaaggua

SEQ ID NO: 101850 - RNA, 22 nt, Human
agaacauuaaugcgagguauua

SEQ ID NO: 101851 - RNA, 22 nt, Human
agaaccaguuuaagauuugggu

SEQ ID NO: 101852 - RNA, 22 nt, Human
agaaccauuuugacagauauac

SEQ ID NO: 101853 - RNA, 22 nt, Human
agaaccucaauuauuuuugcac

SEQ ID NO: 101854 - RNA, 22 nt, Human
agaaccuucagauuaggaggug

SEQ ID NO: 101855 - RNA, 22 nt, Human
agaaccuucagcuugcaacaag

SEQ ID NO: 101856 - RNA, 22 nt, Human
agaacucuauauucaugaacaa

SEQ ID NO: 101857 - RNA, 22 nt, Human
agaacugauuugaagguugggg

SEQ ID NO: 101858 - RNA, 17 nt, Human
agaacuguaguagcucc

SEQ ID NO: 101859 - RNA, 22 nt, Human
agaacuuaauucagugacuuaa

SEQ ID NO: 101860 - RNA, 22 nt, Human
agaacuucagcaaaaccaguua

SEQ ID NO: 101861 - RNA, 22 nt, Human
agaagaaacugucggggauauu

SEQ ID NO: 101862 - RNA, 22 nt, Human
agaagaauuucucucaugauuu

SEQ ID NO: 101863 - RNA, 22 nt, Human
agagauuucuacugcacucuuu

SEQ ID NO: 101864 - RNA, 22 nt, Human
agagcaacgaggugauacuaga

SEQ ID NO: 101865 - RNA, 23 nt, Human
agagcaaggaaaugaggugugau

SEQ ID NO: 101866 - RNA, 22 nt, Human
agagcaagugacagaaacaggg

SEQ ID NO: 101867 - RNA, 22 nt, Human
agagcaauuagcuuagguaaaa

SEQ ID NO: 101868 - RNA, 22 nt, Human
agccuguggaaacugggugcag

SEQ ID NO: 101869 - RNA, 22 nt, Human
agccuguguugcucuggcgaua

SEQ ID NO: 101870 - RNA, 22 nt, Human
agagggaaggacagauguuuca

SEQ ID NO: 101871 - RNA, 22 nt, Human
agagggagaaaagaaucaguug

SEQ ID NO: 101872 - RNA, 22 nt, Human
agagggagaagcuaaaauaacu

SEQ ID NO: 101873 - RNA, 22 nt, Human
agagggagcccagucauagcug

SEQ ID NO: 101874 - RNA, 22 nt, Human
agagggagugaaauggaauaga

SEQ ID NO: 101875 - RNA, 22 nt, Human
agagggauaauauguauuguaa

SEQ ID NO: 101876 - RNA, 22 nt, Human
agagggcaaguguaguccagua

SEQ ID NO: 101877 - RNA, 22 nt, Human
agagggcaugcuugguggccug

SEQ ID NO: 101878 - RNA, 22 nt, Human
agagggccauaggugcauaguu

SEQ ID NO: 101879 - RNA, 22 nt, Human
agagggcugcugcacagugcuc

SEQ ID NO: 101880 - RNA, 22 nt, Human
agagggcuggacgcagguugga

SEQ ID NO: 101881 - RNA, 22 nt, Human
agagggcuucccuaggagugag

SEQ ID NO: 101882 - RNA, 22 nt, Human
agaggggaaggaugugauguga

SEQ ID NO: 101883 - RNA, 22 nt, Human
agaggggaaguaaugaaugaua

SEQ ID NO: 101884 - RNA, 22 nt, Human
agaggggagagcuaagcaauuc

SEQ ID NO: 101885 - RNA, 22 nt, Human
agaggggaguccuaaucugauu

SEQ ID NO: 101886 - RNA, 22 nt, Human
agaggggcagggucuccggauu

SEQ ID NO: 101887 - RNA, 22 nt, Human
agagggggugucagcacugcag

SEQ ID NO: 101888 - RNA, 23 nt, Human
agagggugcaacauggggaucua

SEQ ID NO: 101889 - RNA, 22 nt, Human
agagggugcuggagagacauug

SEQ ID NO: 101890 - RNA, 22 nt, Human
agaggguggugaggccugguuc

SEQ ID NO: 101891 - RNA, 22 nt, Human
agaggguugaaccuauaaacua

SEQ ID NO: 101892 - RNA, 22 nt, Human
agagguaaagagaggggaaauu

SEQ ID NO: 101893 - RNA, 22 nt, Human
agagguaagcaguggcaagugc

SEQ ID NO: 101894 - RNA, 22 nt, Human
agagguauauauucuccauauu

SEQ ID NO: 101895 - RNA, 22 nt, Human
agagguaugguauauuggaaga

SEQ ID NO: 101896 - RNA, 22 nt, Human
agagguaugugaagugauacca

SEQ ID NO: 101897 - RNA, 22 nt, Human
agagguaugugucagugcuuau

SEQ ID NO: 101898 - RNA, 22 nt, Human
agaggucuaugcuaggggaacu

SEQ ID NO: 101899 - RNA, 22 nt, Human
agaggugaaagaauuuggcucu

SEQ ID NO: 101900 - RNA, 22 nt, Human
agagguguggccaggacucaag

SEQ ID NO: 101901 - RNA, 22 nt, Human
agagguucagagaaggcgaucu

SEQ ID NO: 101902 - RNA, 20 nt, Human
agagguucagucuggagaag

SEQ ID NO: 101903 - RNA, 16 nt, Human
agagguuuacagccug

SEQ ID NO: 101904 - RNA, 23 nt, Human
agaguaauguuuuuacuguauuc

SEQ ID NO: 101905 - RNA, 22 nt, Human
agaguagccucauagacacuca

SEQ ID NO: 101906 - RNA, 22 nt, Human
agaguaugcaucuauuguaccu

SEQ ID NO: 101907 - RNA, 22 nt, Human
agagucaagggugcagaggaag

SEQ ID NO: 101908 - RNA, 22 nt, Human
agagucaagguggcauuuagcu

SEQ ID NO: 101909 - RNA, 22 nt, Human
agagucagaaccaagaugaggc

SEQ ID NO: 101910 - RNA, 22 nt, Human
agagucagucacuggcacuuug

SEQ ID NO: 101911 - RNA, 22 nt, Human
agagucaguuagcgaauacuua

SEQ ID NO: 101912 - RNA, 22 nt, Human
agagucaguuaugucaagugcu

SEQ ID NO: 101913 - RNA, 22 nt, Human
agagucauaguuuaacuuuugu

SEQ ID NO: 101914 - RNA, 23 nt, Human
agaguccacaagauuuuccagug

SEQ ID NO: 101915 - RNA, 22 nt, Human
agaguccagaaaacagugugcu

SEQ ID NO: 101916 - RNA, 22 nt, Human
agaguccauauauugauuuguu

SEQ ID NO: 101917 - RNA, 22 nt, Human
agaguccugaguggaaaaaugg

SEQ ID NO: 101918 - RNA, 22 nt, Human
agagucugaggaggaccaacag

SEQ ID NO: 101919 - RNA, 21 nt, Human
agagucugagugugcaagggc

SEQ ID NO: 101920 - RNA, 22 nt, Human
agagucugauauuuguaccaga

SEQ ID NO: 101921 - RNA, 21 nt, Human
agagucugcauuucugacaag

SEQ ID NO: 101922 - RNA, 22 nt, Human
agagucugccuuuuucuccugc

SEQ ID NO: 101923 - RNA, 22 nt, Human
agagucugggcacugggaaugc

SEQ ID NO: 101924 - RNA, 22 nt, Human
agagucuuccaggcagccugag

SEQ ID NO: 101925 - RNA, 22 nt, Human
agagugaaggccagguuacagu

SEQ ID NO: 101926 - RNA, 22 nt, Human
agagugaaguucaucgugcagc

SEQ ID NO: 101927 - RNA, 22 nt, Human
agagugcaaccgaaacaagcag

SEQ ID NO: 101928 - RNA, 22 nt, Human
agagugcccaagccuggcaggg

SEQ ID NO: 101929 - RNA, 20 nt, Human
agagugcuggacugaggagc

SEQ ID NO: 101930 - RNA, 22 nt, Human
agagugcuuaguagugacaugg

SEQ ID NO: 101931 - RNA, 22 nt, Human
agagugcuuuauuagauguagc

SEQ ID NO: 101932 - RNA, 22 nt, Human
agaguggagagaaacaacucug

SEQ ID NO: 101933 - RNA, 23 nt, Human
agaguggccuacucacacucauu

SEQ ID NO: 101934 - RNA, 22 nt, Human
agaguggccuggccuggggcau

SEQ ID NO: 101935 - RNA, 22 nt, Human
agaguggcuugcucagcuagca

SEQ ID NO: 101936 - RNA, 22 nt, Human
agagugggacacgggcgcuguc

SEQ ID NO: 101937 - RNA, 22 nt, Human
agagugggccucugagucccag

SEQ ID NO: 101938 - RNA, 22 nt, Human
agagugggugaucucuguuguc

SEQ ID NO: 101939 - RNA, 20 nt, Human
agagugggugucacaggcug

SEQ ID NO: 101940 - RNA, 22 nt, Human
agagugguacuucuuuuucuuc

SEQ ID NO: 101941 - RNA, 22 nt, Human
agagugugaagaaagugcaaug

SEQ ID NO: 101942 - RNA, 22 nt, Human
agaguguggaaauguucagagu

SEQ ID NO: 101943 - RNA, 22 nt, Human
agaguguuauuugcucuguauu

SEQ ID NO: 101944 - RNA, 22 nt, Human
agaguuaaauaagcauuaacuu

SEQ ID NO: 101945 - RNA, 22 nt, Human
agaguuaaggccacugucagua

SEQ ID NO: 101946 - RNA, 22 nt, Human
agaguuagguccagaauguugc

SEQ ID NO: 101947 - RNA, 22 nt, Human
agaguuauccuguccuagggga

SEQ ID NO: 101948 - RNA, 22 nt, Human
agaguucacacucagugcaccc

SEQ ID NO: 101949 - RNA, 22 nt, Human
agaguucagcuacugcaaaugu

SEQ ID NO: 101950 - RNA, 22 nt, Human
agaguuccacguacagcuuuug

SEQ ID NO: 101951 - RNA, 22 nt, Human
agaguucugaauuuuauucucu

SEQ ID NO: 101952 - RNA, 21 nt, Human
agaguucuugcugagcaagcc

SEQ ID NO: 101953 - RNA, 22 nt, Human
agaguuggcccacguguaggcg

SEQ ID NO: 101954 - RNA, 19 nt, Human
agaguugggcacuguuuca

SEQ ID NO: 101955 - RNA, 22 nt, Human
agaguuuacagaaauaagcugu

SEQ ID NO: 101956 - RNA, 22 nt, Human
agaguuuagggcugagagcuug

SEQ ID NO: 101957 - RNA, 22 nt, Human
agaguuugaaguuaucuuugac

SEQ ID NO: 101958 - RNA, 22 nt, Human
agaguuugggguaugauuguuu

SEQ ID NO: 101959 - RNA, 22 nt, Human
agaguuugggugggacagcuug

SEQ ID NO: 101960 - RNA, 22 nt, Human
agaguuuggugaagcaauuuga

SEQ ID NO: 101961 - RNA, 22 nt, Human
agaguuuguaguggugaaugua

SEQ ID NO: 101962 - RNA, 22 nt, Human
agaguuugugggcuuuuccucc

SEQ ID NO: 101963 - RNA, 22 nt, Human
agaguuuguugaauuuacuugg

SEQ ID NO: 101964 - RNA, 23 nt, Human
agaguuuguuucuaaugagugag

SEQ ID NO: 101965 - RNA, 22 nt, Human
agauaaaaugauuuucuggauc

SEQ ID NO: 101966 - RNA, 22 nt, Human
agauaaauuccuaagauuucag

SEQ ID NO: 101967 - RNA, 22 nt, Human
agauaacugguuuacauuauug

SEQ ID NO: 101968 - RNA, 22 nt, Human
agauaaugaaugccaugacauu

SEQ ID NO: 101969 - RNA, 22 nt, Human
agauaaugaauuuauugaaugu

SEQ ID NO: 101970 - RNA, 22 nt, Human
agauaaugauucugcauuucua

SEQ ID NO: 101971 - RNA, 22 nt, Human
agauacaaaagauaagauuuag

SEQ ID NO: 101972 - RNA, 22 nt, Human
agauacaaggcagagaugugca

SEQ ID NO: 101973 - RNA, 22 nt, Human
agauacauagcugugagcacac

SEQ ID NO: 101974 - RNA, 22 nt, Human
agauacaucauuuauaccuuca

SEQ ID NO: 101975 - RNA, 22 nt, Human
agauacuaaaaggggaagcucc

SEQ ID NO: 101976 - RNA, 22 nt, Human
agauacuacaugaaugggaauu

SEQ ID NO: 101977 - RNA, 22 nt, Human
aggaacaacugauucagucaac

SEQ ID NO: 101978 - RNA, 22 nt, Human
aggaacacaucuuuguagcagg

SEQ ID NO: 101979 - RNA, 22 nt, Human
aggaacacuuaauucgauacua

SEQ ID NO: 101980 - RNA, 22 nt, Human
aggaacacuuguggaaacauuc

SEQ ID NO: 101981 - RNA, 22 nt, Human
aggaacaucuaucacauaaacg

SEQ ID NO: 101982 - RNA, 22 nt, Human
aggaacccugcgccauacuuug

SEQ ID NO: 101983 - RNA, 22 nt, Human
aggaaccuaagagccugcaguc

SEQ ID NO: 101984 - RNA, 22 nt, Human
aggaacugaugagcagccaggg

SEQ ID NO: 101985 - RNA, 20 nt, Human
aggaacuggaagggaggaaa

SEQ ID NO: 101986 - RNA, 22 nt, Human
aggaacugggcucagcaaacau

SEQ ID NO: 101987 - RNA, 22 nt, Human
aggaacuggggcuauucacccu

SEQ ID NO: 101988 - RNA, 22 nt, Human
aggaacuggugggaggugauug

SEQ ID NO: 101989 - RNA, 22 nt, Human
aggaagaaccuaagaaagucuc

SEQ ID NO: 101990 - RNA, 22 nt, Human
aggaagaauguuuacauaucaa

SEQ ID NO: 101991 - RNA, 23 nt, Human
aggaagagagagugccucuuucu

SEQ ID NO: 101992 - RNA, 23 nt, Human
aggaagaggcaauuucucuuaga

SEQ ID NO: 101993 - RNA, 22 nt, Human
aggaagaggguggcagauaauc

SEQ ID NO: 101994 - RNA, 22 nt, Human
aggaagaggugugcaauggugu

SEQ ID NO: 101995 - RNA, 22 nt, Human
aggaagcaguuuauaaugcauu

SEQ ID NO: 101996 - RNA, 22 nt, Human
aggaagccacugaaugaaaguu

SEQ ID NO: 101997 - RNA, 22 nt, Human
aggaagccaggcccuugggugg

SEQ ID NO: 101998 - RNA, 17 nt, Human
aggaagcgagcuggccu

SEQ ID NO: 101999 - RNA, 23 nt, Human
aggaagcuaccaauuuuguaggc

SEQ ID NO: 102000 - RNA, 22 nt, Human
aggaagcuagagccaccggacu

SEQ ID NO: 102001 - RNA, 22 nt, Human
aggaagcucaaagccaugaugu

SEQ ID NO: 102002 - RNA, 22 nt, Human
agaguccacccuggggucaggc

SEQ ID NO: 102003 - RNA, 22 nt, Human
agaguccaggugggcuggaggc

SEQ ID NO: 102004 - RNA, 22 nt, Human
agagucuggcgcugagaugaca

SEQ ID NO: 102005 - RNA, 22 nt, Human
agagucuggugcaugauaagca

SEQ ID NO: 102006 - RNA, 22 nt, Human
agagucugugcuuucaucagga

SEQ ID NO: 102007 - RNA, 22 nt, Human
agagucuuaucuuuuacaagua

SEQ ID NO: 102008 - RNA, 22 nt, Human
agagucuucuuuaggccauuua

SEQ ID NO: 102009 - RNA, 22 nt, Human
agagugaaaagcuagagcagua

SEQ ID NO: 102010 - RNA, 22 nt, Human
agagugauccuaauugauuugg

SEQ ID NO: 102011 - RNA, 22 nt, Human
agaguggcagcaagucagguag

SEQ ID NO: 102012 - RNA, 22 nt, Human
agaguggcaguaaaauagagca

SEQ ID NO: 102013 - RNA, 22 nt, Human
agaguggccucagagaaauaca

SEQ ID NO: 102014 - RNA, 22 nt, Human
agaguggggaagguguugagaa

SEQ ID NO: 102015 - RNA, 22 nt, Human
agaguggggacagggccugucc

SEQ ID NO: 102016 - RNA, 22 nt, Human
agaguggguuauaggcagacuu

SEQ ID NO: 102017 - RNA, 22 nt, Human
agagugugucuauggaaggggu

SEQ ID NO: 102018 - RNA, 22 nt, Human
agaguguguuccccaagaaaga

SEQ ID NO: 102019 - RNA, 22 nt, Human
agaguguuuuucugucaaggac

SEQ ID NO: 102020 - RNA, 22 nt, Human
agaguuaagacguacaugagug

SEQ ID NO: 102021 - RNA, 22 nt, Human
agaguuaagcuuugccuaaaga

SEQ ID NO: 102022 - RNA, 22 nt, Human
agaguuaaugcaggccaagccu

SEQ ID NO: 102023 - RNA, 21 nt, Human
agaguuacugucauccuaggu

SEQ ID NO: 102024 - RNA, 22 nt, Human
agaguucagaaagugcagguuu

SEQ ID NO: 102025 - RNA, 22 nt, Human
agaguucaguuguagccauauu

SEQ ID NO: 102026 - RNA, 22 nt, Human
agaguugcuauagaaggaugga

SEQ ID NO: 102027 - RNA, 22 nt, Human
agaguuggagaaauuaaaauuu

SEQ ID NO: 102028 - RNA, 22 nt, Human
agaguuguuguacaaacuaaau

SEQ ID NO: 102029 - RNA, 22 nt, Human
agaguuuaaacacugucacaga

SEQ ID NO: 102030 - RNA, 19 nt, Human
agaguuuaggucuaucagg

SEQ ID NO: 102031 - RNA, 22 nt, Human
agaguuuggagguguuccugga

SEQ ID NO: 102032 - RNA, 20 nt, Human
agaguuuggggucauuuugg

SEQ ID NO: 102033 - RNA, 22 nt, Human
agaguuuguacuuuacccugag

SEQ ID NO: 102034 - RNA, 23 nt, Human
agaguuuucuguuuucuguaggg

SEQ ID NO: 102035 - RNA, 22 nt, Human
agauaaaguccaaacuguguag

SEQ ID NO: 102036 - RNA, 22 nt, Human
agauaacauguugcagauucug

SEQ ID NO: 102037 - RNA, 22 nt, Human
agauaagucuuccauauuucua

SEQ ID NO: 102038 - RNA, 22 nt, Human
agauaauaagucugguaauaau

SEQ ID NO: 102039 - RNA, 22 nt, Human
agauaaugucaaauucugucug

SEQ ID NO: 102040 - RNA, 22 nt, Human
agauaauguucugauccauuuc

SEQ ID NO: 102041 - RNA, 22 nt, Human
agauaauuaugucaauuucuug

SEQ ID NO: 102042 - RNA, 22 nt, Human
agauacaacuguuuaaacauua

SEQ ID NO: 102043 - RNA, 22 nt, Human
agauacaagaggccugacgugu

SEQ ID NO: 102044 - RNA, 22 nt, Human
agauacacagagguaaagauga

SEQ ID NO: 102045 - RNA, 22 nt, Human
agauacaccggaaccugaggcu

SEQ ID NO: 102046 - RNA, 23 nt, Human
agauacagaucuacgugucaaug

SEQ ID NO: 102047 - RNA, 22 nt, Human
agauacauauagaaaacaucaa

SEQ ID NO: 102048 - RNA, 22 nt, Human
agauacaucuugaacuucuaga

SEQ ID NO: 102049 - RNA, 22 nt, Human
agauacaugucaagagacuuau

SEQ ID NO: 102050 - RNA, 22 nt, Human
agauacauugaguuuccuccug

SEQ ID NO: 102051 - RNA, 22 nt, Human
agauacauugcacgaugcagau

SEQ ID NO: 102052 - RNA, 22 nt, Human
agauacauuugugugcauguau

SEQ ID NO: 102053 - RNA, 22 nt, Human
agauacugaaauccaauggcca

SEQ ID NO: 102054 - RNA, 22 nt, Human
agauacugauucucaauggcuc

SEQ ID NO: 102055 - RNA, 22 nt, Human
agauauaguuguugagaagaac

SEQ ID NO: 102056 - RNA, 22 nt, Human
agauaucaccucuaggcuggug

SEQ ID NO: 102057 - RNA, 22 nt, Human
agauaucugcaauauaauuuaa

SEQ ID NO: 102058 - RNA, 22 nt, Human
agauaugacuagaagcucauuu

SEQ ID NO: 102059 - RNA, 22 nt, Human
agauauguuuguauauauuugu

SEQ ID NO: 102060 - RNA, 22 nt, Human
agauauuaggaggauucauaau

SEQ ID NO: 102061 - RNA, 22 nt, Human
agauauucugccuaacagguuu

SEQ ID NO: 102062 - RNA, 22 nt, Human
agaucaaugugucagaagagau

SEQ ID NO: 102063 - RNA, 22 nt, Human
agaucacauaauuuccugugac

SEQ ID NO: 102064 - RNA, 22 nt, Human
agaucacugguuacuuaaugaa

SEQ ID NO: 102065 - RNA, 22 nt, Human
agaucagaaauguaauggcagu

SEQ ID NO: 102066 - RNA, 22 nt, Human
agaucaguaagaggaagaaugg

SEQ ID NO: 102067 - RNA, 22 nt, Human
agaucauacuacuuguacuaaa

SEQ ID NO: 102068 - RNA, 22 nt, Human
agaucauaugaaaaauuucaag

SEQ ID NO: 102069 - RNA, 22 nt, Human
agaucauaugcaguaaugaacu

SEQ ID NO: 102070 - RNA, 22 nt, Human
agauccacucgaauccaggaau

SEQ ID NO: 102071 - RNA, 22 nt, Human
agauccagauccuuccugguug

SEQ ID NO: 102072 - RNA, 22 nt, Human
agauccaguuaauagcuucauu

SEQ ID NO: 102073 - RNA, 22 nt, Human
agauccaugugauuuggaguuc

SEQ ID NO: 102074 - RNA, 22 nt, Human
agauccugccaauggaagcagg

SEQ ID NO: 102075 - RNA, 21 nt, Human
agauccuguggcugagaagua

SEQ ID NO: 102076 - RNA, 22 nt, Human
agaucuauuagcaaacugccau

SEQ ID NO: 102077 - RNA, 22 nt, Human
agaucugaguggcugcauguaa

SEQ ID NO: 102078 - RNA, 20 nt, Human
agaucugccugcacccucuc

SEQ ID NO: 102079 - RNA, 22 nt, Human
agaucuggcccucagcuugauu

SEQ ID NO: 102080 - RNA, 22 nt, Human
agaucugguuggaguccugaca

SEQ ID NO: 102081 - RNA, 22 nt, Human
agaucuuguuaaaugcugccuc

SEQ ID NO: 102082 - RNA, 22 nt, Human
agaucuuuagaagauagaauca

SEQ ID NO: 102083 - RNA, 22 nt, Human
agaucuuuagugaagcuaaauc

SEQ ID NO: 102084 - RNA, 20 nt, Human
agaucuuuucuauagaagug

SEQ ID NO: 102085 - RNA, 22 nt, Human
agaugaaaagauaagcagcaau

SEQ ID NO: 102086 - RNA, 21 nt, Human
agcaacucugacuagaugagg

SEQ ID NO: 102087 - RNA, 22 nt, Human
agcaagaauauuucugccacug

SEQ ID NO: 102088 - RNA, 22 nt, Human
agcaagagcaugucggccuggu

SEQ ID NO: 102089 - RNA, 20 nt, Human
agcaagaguguaccuggcca

SEQ ID NO: 102090 - RNA, 22 nt, Human
agcaagaugcaaacauccgucc

SEQ ID NO: 102091 - RNA, 22 nt, Human
agcaagaugcauuauuucuuau

SEQ ID NO: 102092 - RNA, 22 nt, Human
agcaagauugaggcuuccucag

SEQ ID NO: 102093 - RNA, 22 nt, Human
agcaagauuuuccuugaauguu

SEQ ID NO: 102094 - RNA, 22 nt, Human
agcaagcacacuucaugugaac

SEQ ID NO: 102095 - RNA, 22 nt, Human
agcaagcagaaaugccauggca

SEQ ID NO: 102096 - RNA, 22 nt, Human
agcaagcuaccuagauagucua

SEQ ID NO: 102097 - RNA, 22 nt, Human
agcaaggaaacuauggagagau

SEQ ID NO: 102098 - RNA, 22 nt, Human
agcaaggaguagaacaagagug

SEQ ID NO: 102099 - RNA, 17 nt, Human
agcaaggcuuaaguaaa

SEQ ID NO: 102100 - RNA, 22 nt, Human
agcaaggucucccugcaccugg

SEQ ID NO: 102101 - RNA, 22 nt, Human
agcaaggugacaucaugcugag

SEQ ID NO: 102102 - RNA, 22 nt, Human
agcaagguggagaaggaugggu

SEQ ID NO: 102103 - RNA, 22 nt, Human
agcaauaaauguaaagguuaag

SEQ ID NO: 102104 - RNA, 22 nt, Human
agcaauaacagaaaacuuuccu

SEQ ID NO: 102105 - RNA, 22 nt, Human
agcaauauuuaaagguuugcaa

SEQ ID NO: 102106 - RNA, 22 nt, Human
agcaaucaccaccucuauauuu

SEQ ID NO: 102107 - RNA, 22 nt, Human
agcaaugauguuuucaaguagg

SEQ ID NO: 102108 - RNA, 22 nt, Human
agcaaugcuaccgggugauucg

SEQ ID NO: 102109 - RNA, 22 nt, Human
agcaauguaaacccugaaguug

SEQ ID NO: 102110 - RNA, 22 nt, Human
agcaauguggaccagcucaggg

SEQ ID NO: 102111 - RNA, 19 nt, Human
agcaauuaagacugugggc

SEQ ID NO: 102112 - RNA, 22 nt, Human
agcaauuuucccuuagucuuug

SEQ ID NO: 102113 - RNA, 22 nt, Human
agcacacaggccaccuccacuu

SEQ ID NO: 102114 - RNA, 22 nt, Human
agcacacugaccugaagccuug

SEQ ID NO: 102115 - RNA, 22 nt, Human
agcacagagauuauuuacaaga

SEQ ID NO: 102116 - RNA, 22 nt, Human
agcacagagcuaggaguggagg

SEQ ID NO: 102117 - RNA, 20 nt, Human
agcacagcgcgguguuccuu

SEQ ID NO: 102118 - RNA, 21 nt, Human
agcacagcuuuaagccaugug

SEQ ID NO: 102119 - RNA, 22 nt, Human
agaggcucagaggccugguccu

SEQ ID NO: 102120 - RNA, 22 nt, Human
agaggcuccucggugccucgug

SEQ ID NO: 102121 - RNA, 22 nt, Human
agaggcuccuucacucuggcac

SEQ ID NO: 102122 - RNA, 22 nt, Human
agaggcucuaauaccagcaugg

SEQ ID NO: 102123 - RNA, 22 nt, Human
agaggcucugccgccucaggua

SEQ ID NO: 102124 - RNA, 22 nt, Human
agaggcugaaugaugucaucau

SEQ ID NO: 102125 - RNA, 22 nt, Human
agaggcugagaaacccucuucu

SEQ ID NO: 102126 - RNA, 23 nt, Human
agaggcugcaggguauugagaau

SEQ ID NO: 102127 - RNA, 18 nt, Human
agaggcuggacaggggau

SEQ ID NO: 102128 - RNA, 22 nt, Human
agaggcugggaaggguccccgg

SEQ ID NO: 102129 - RNA, 22 nt, Human
agaggcuggguacgggccaccu

SEQ ID NO: 102130 - RNA, 22 nt, Human
agaggcugucccuugcuauucc

SEQ ID NO: 102131 - RNA, 22 nt, Human
agaggcugucucauauuuugua

SEQ ID NO: 102132 - RNA, 22 nt, Human
agaggcuuccugccaccugaga

SEQ ID NO: 102133 - RNA, 22 nt, Human
agaggcuuggaggugcaagguu

SEQ ID NO: 102134 - RNA, 22 nt, Human
agagggaaauccaggagugcuu

SEQ ID NO: 102135 - RNA, 22 nt, Human
agagggaacggaucccagcgcg

SEQ ID NO: 102136 - RNA, 18 nt, Human
agagggaaucaguuggau

SEQ ID NO: 102137 - RNA, 21 nt, Human
agagggagaguggcccuucca

SEQ ID NO: 102138 - RNA, 22 nt, Human
agagggaucacccuguuucugg

SEQ ID NO: 102139 - RNA, 22 nt, Human
agagggauggccccguaacuca

SEQ ID NO: 102140 - RNA, 22 nt, Human
agagggcagggcgguaaguccu

SEQ ID NO: 102141 - RNA, 22 nt, Human
agagggcagucucagauuggga

SEQ ID NO: 102142 - RNA, 22 nt, Human
agagggcccauguugggcugcu

SEQ ID NO: 102143 - RNA, 22 nt, Human
agagggcgcccaggcccacgcc

SEQ ID NO: 102144 - RNA, 22 nt, Human
agagggcuaagguuugggagau

SEQ ID NO: 102145 - RNA, 22 nt, Human
agagggcugccucagucagcua

SEQ ID NO: 102146 - RNA, 23 nt, Human
agaggggagcaucugcuggcuga

SEQ ID NO: 102147 - RNA, 22 nt, Human
agaggggaggcgaaccagaguc

SEQ ID NO: 102148 - RNA, 18 nt, Human
agaggggagguaagucug

SEQ ID NO: 102149 - RNA, 22 nt, Human
agaggggcgggaacucaaccuc

SEQ ID NO: 102150 - RNA, 22 nt, Human
agaggggcucaagcaguggucu

SEQ ID NO: 102151 - RNA, 22 nt, Human
agagggggaaaauagagguguu

SEQ ID NO: 102152 - RNA, 22 nt, Human
agagggggcagcggaccaguga

SEQ ID NO: 102153 - RNA, 22 nt, Human
agagggguuaagugcuaguccg

SEQ ID NO: 102154 - RNA, 22 nt, Human
agagggguuaugcuugacauuu

SEQ ID NO: 102155 - RNA, 22 nt, Human
agagggugaaugagauagaaaa

SEQ ID NO: 102156 - RNA, 22 nt, Human
agagguagaaaauaauggagag

SEQ ID NO: 102157 - RNA, 22 nt, Human
agagguagagguugcagugagc

SEQ ID NO: 102158 - RNA, 22 nt, Human
agagguauuagauuugcauagg

SEQ ID NO: 102159 - RNA, 22 nt, Human
agaggucagcugcaugccacau

SEQ ID NO: 102160 - RNA, 22 nt, Human
agaggucugagcaaucucaagc

SEQ ID NO: 102161 - RNA, 22 nt, Human
agaggugagucauuaccuagug

SEQ ID NO: 102162 - RNA, 22 nt, Human
agagguugggucugaggugaga

SEQ ID NO: 102163 - RNA, 20 nt, Human
agaguaacuggcacauaggg

SEQ ID NO: 102164 - RNA, 22 nt, Human
agaguaacuuuuaacuuuacgu

SEQ ID NO: 102165 - RNA, 21 nt, Human
agaguaauuccugcuggaaag

SEQ ID NO: 102166 - RNA, 22 nt, Human
agaguacacuguacacacaauu

SEQ ID NO: 102167 - RNA, 22 nt, Human
agagucagcuuaugacacaguc

SEQ ID NO: 102168 - RNA, 22 nt, Human
agagucaguaacauauauggua

SEQ ID NO: 102169 - RNA, 18 nt, Human
agaguccagggugaggug

SEQ ID NO: 102170 - RNA, 22 nt, Human
agagucccagggacacuccaga

SEQ ID NO: 102171 - RNA, 19 nt, Human
agagucggggggacauagg

SEQ ID NO: 102172 - RNA, 22 nt, Human
agagucugaaugcucagaguug

SEQ ID NO: 102173 - RNA, 22 nt, Human
agagucugaggcagcugcagcc

SEQ ID NO: 102174 - RNA, 22 nt, Human
agagucugcauuucuacaagcu

SEQ ID NO: 102175 - RNA, 22 nt, Human
agagucuguuacuuguccccua

SEQ ID NO: 102176 - RNA, 22 nt, Human
agagucuuagccucauuaguca

SEQ ID NO: 102177 - RNA, 22 nt, Human
agagucuucuggggccacuuuc

SEQ ID NO: 102178 - RNA, 22 nt, Human
agagucuuggcauucaugcguu

SEQ ID NO: 102179 - RNA, 22 nt, Human
agagucuuggcugagaacaaga

SEQ ID NO: 102180 - RNA, 22 nt, Human
agagugaagguugacacuucac

SEQ ID NO: 102181 - RNA, 22 nt, Human
agagugaaguuuuugaaaguga

SEQ ID NO: 102182 - RNA, 23 nt, Human
agagugcagagauaugcuugugu

SEQ ID NO: 102183 - RNA, 22 nt, Human
agagugcagaggucaaagaaca

SEQ ID NO: 102184 - RNA, 22 nt, Human
agagugcagauaagagaauguu

SEQ ID NO: 102185 - RNA, 22 nt, Human
agagugcucagaugcaugucuu

SEQ ID NO: 102186 - RNA, 22 nt, Human
agagugcuuaaagcuggcuuug

SEQ ID NO: 102187 - RNA, 17 nt, Human
agaguggcuaaggcuca

SEQ ID NO: 102188 - RNA, 22 nt, Human
agaguggcucugcugggcacag

SEQ ID NO: 102189 - RNA, 22 nt, Human
agaguggcuucuuugacaugcu

SEQ ID NO: 102190 - RNA, 22 nt, Human
agagugguggccguggugucac

SEQ ID NO: 102191 - RNA, 22 nt, Human
agaguguaauaagggcaagggc

SEQ ID NO: 102192 - RNA, 22 nt, Human
agaguguaccaaauauccuaca

SEQ ID NO: 102193 - RNA, 22 nt, Human
agagugucugguagcugcucug

SEQ ID NO: 102194 - RNA, 22 nt, Human
agaguguggaacuugaggagcu

SEQ ID NO: 102195 - RNA, 22 nt, Human
agcagcaauggaaagcaacaca

SEQ ID NO: 102196 - RNA, 22 nt, Human
agcagcaauuuucacugucaau

SEQ ID NO: 102197 - RNA, 22 nt, Human
agcagcacacgggagaaagaca

SEQ ID NO: 102198 - RNA, 22 nt, Human
agcagcacauggggcuggcaac

SEQ ID NO: 102199 - RNA, 21 nt, Human
agcagcagaucuggugagggc

SEQ ID NO: 102200 - RNA, 20 nt, Human
agcagcagauguuggaggug

SEQ ID NO: 102201 - RNA, 22 nt, Human
agcagcagauuauggucuacau

SEQ ID NO: 102202 - RNA, 22 nt, Human
agcagcagcucauucuuccugu

SEQ ID NO: 102203 - RNA, 22 nt, Human
agcagcagcucuguugcccuac

SEQ ID NO: 102204 - RNA, 22 nt, Human
agcagcaggagccgugggguga

SEQ ID NO: 102205 - RNA, 22 nt, Human
agcagcaggauuuucguuggga

SEQ ID NO: 102206 - RNA, 22 nt, Human
agcagcaggcuagggaacugcu

SEQ ID NO: 102207 - RNA, 22 nt, Human
agcagcagggugauagugccca

SEQ ID NO: 102208 - RNA, 22 nt, Human
agcagcaguacauauaagacua

SEQ ID NO: 102209 - RNA, 22 nt, Human
agcagcagugacagccgaaagc

SEQ ID NO: 102210 - RNA, 23 nt, Human
agcagcagugagaggugucuuac

SEQ ID NO: 102211 - RNA, 22 nt, Human
agcagcauagaagcugggagga

SEQ ID NO: 102212 - RNA, 22 nt, Human
agcagcaucaacccucccgugu

SEQ ID NO: 102213 - RNA, 22 nt, Human
agcagcaucucuuauugcagug

SEQ ID NO: 102214 - RNA, 22 nt, Human
agcagcaugaugacagagucuc

SEQ ID NO: 102215 - RNA, 22 nt, Human
agcagcauggaugggccucagc

SEQ ID NO: 102216 - RNA, 22 nt, Human
agcagcauuaugauauaucuua

SEQ ID NO: 102217 - RNA, 22 nt, Human
agcagcauucucugguaugggg

SEQ ID NO: 102218 - RNA, 20 nt, Human
agcagcauuguucuagagca

SEQ ID NO: 102219 - RNA, 22 nt, Human
agcagcauuuaaggauccaagu

SEQ ID NO: 102220 - RNA, 22 nt, Human
agcagccaaaugaagauuuuac

SEQ ID NO: 102221 - RNA, 22 nt, Human
agcagccaagguaaccugugcu

SEQ ID NO: 102222 - RNA, 22 nt, Human
agcagccacagcagaucugagu

SEQ ID NO: 102223 - RNA, 22 nt, Human
agcagccagaaauccagaggug

SEQ ID NO: 102224 - RNA, 22 nt, Human
agcagccagugggagugauaca

SEQ ID NO: 102225 - RNA, 23 nt, Human
agcagccauagggaagcaauaca

SEQ ID NO: 102226 - RNA, 21 nt, Human
agcagccauggaugguaugua

SEQ ID NO: 102227 - RNA, 22 nt, Human
agcagccauuuaaaaugaauug

SEQ ID NO: 102228 - RNA, 22 nt, Human
agcagccuuagguauugugauu

SEQ ID NO: 102229 - RNA, 22 nt, Human
agcagccuugcaggggucgcac

SEQ ID NO: 102230 - RNA, 22 nt, Human
agcagccuugugacuccggggu

SEQ ID NO: 102231 - RNA, 19 nt, Human
agcagcguuuaaaaaaugc

SEQ ID NO: 102232 - RNA, 22 nt, Human
agcagcuccccucaugcuccac

SEQ ID NO: 102233 - RNA, 22 nt, Human
agcagcucgggcuacagagggg

SEQ ID NO: 102234 - RNA, 22 nt, Human
agcagcucuguuuaccuggagg

SEQ ID NO: 102235 - RNA, 22 nt, Human
agcagcugauggggaaggaguu

SEQ ID NO: 102236 - RNA, 22 nt, Human
agcagcugccagagagaguucc

SEQ ID NO: 102237 - RNA, 22 nt, Human
agcagcugcuuuucuucauugg

SEQ ID NO: 102238 - RNA, 22 nt, Human
agcaauguugggguuagaggac

SEQ ID NO: 102239 - RNA, 22 nt, Human
agcaauuucccaucucuucugc

SEQ ID NO: 102240 - RNA, 22 nt, Human
agcaauuuuugauuuucagugu

SEQ ID NO: 102241 - RNA, 22 nt, Human
agcacaaaaacauucccagagu

SEQ ID NO: 102242 - RNA, 22 nt, Human
agcacaaaagcagccacagaug

SEQ ID NO: 102243 - RNA, 22 nt, Human
agcacaaauauaaaaaugucug

SEQ ID NO: 102244 - RNA, 22 nt, Human
agcacaaugugaaaagagcucu

SEQ ID NO: 102245 - RNA, 19 nt, Human
agcacagacaagaccagca

SEQ ID NO: 102246 - RNA, 22 nt, Human
agcacagagaaacuaagacauu

SEQ ID NO: 102247 - RNA, 19 nt, Human
agcacagagagucuauagc

SEQ ID NO: 102248 - RNA, 22 nt, Human
agcacagagguggaaguguaua

SEQ ID NO: 102249 - RNA, 22 nt, Human
agcacagauguacuuugagggg

SEQ ID NO: 102250 - RNA, 22 nt, Human
agcacagauuugucaacauaga

SEQ ID NO: 102251 - RNA, 22 nt, Human
agcacagcuucaccgagcccau

SEQ ID NO: 102252 - RNA, 22 nt, Human
agcacaggaacauggagauggg

SEQ ID NO: 102253 - RNA, 22 nt, Human
agcacaggaccaaggaagcugu

SEQ ID NO: 102254 - RNA, 22 nt, Human
agcacaguaaagcagugucaca

SEQ ID NO: 102255 - RNA, 22 nt, Human
agcacaguaauugauauuacug

SEQ ID NO: 102256 - RNA, 22 nt, Human
agcacauaccagaaccacaggu

SEQ ID NO: 102257 - RNA, 22 nt, Human
agcacaugacuuuuagucgagu

SEQ ID NO: 102258 - RNA, 22 nt, Human
agcacaugcacagugcuacacu

SEQ ID NO: 102259 - RNA, 22 nt, Human
agcacauuaguaucuaagaaca

SEQ ID NO: 102260 - RNA, 21 nt, Human
agcaccaaaugcaggcucugg

SEQ ID NO: 102261 - RNA, 16 nt, Human
agcaccagaucauauc

SEQ ID NO: 102262 - RNA, 23 nt, Human
agcaccaggaacagugugguccu

SEQ ID NO: 102263 - RNA, 22 nt, Human
agcaccaggcaccaaagggccu

SEQ ID NO: 102264 - RNA, 22 nt, Human
agcaccaguuucgucgugacaa

SEQ ID NO: 102265 - RNA, 22 nt, Human
agcacccuuugugagcauaagu

SEQ ID NO: 102266 - RNA, 22 nt, Human
agcaccuauagaaguuguguuc

SEQ ID NO: 102267 - RNA, 20 nt, Human
agcaccucccauaugcuaga

SEQ ID NO: 102268 - RNA, 22 nt, Human
agcaccuccgugcagcguggcc

SEQ ID NO: 102269 - RNA, 22 nt, Human
agcaccugccugcauuggcuau

SEQ ID NO: 102270 - RNA, 22 nt, Human
agcaccugggcuggaagacccc

SEQ ID NO: 102271 - RNA, 17 nt, Human
agcaccuguccaguccc

SEQ ID NO: 102272 - RNA, 19 nt, Human
agcaccugugagagccugg

SEQ ID NO: 102273 - RNA, 23 nt, Human
agcaccugugauuuccuagcucu

SEQ ID NO: 102274 - RNA, 22 nt, Human
agcaccugugcccugauggaga

SEQ ID NO: 102275 - RNA, 20 nt, Human
agcaccuguguagaagcauc

SEQ ID NO: 102276 - RNA, 17 nt, Human
agcacuaaggauaauac

SEQ ID NO: 102277 - RNA, 22 nt, Human
agcacuagacauguaagugagc

SEQ ID NO: 102278 - RNA, 22 nt, Human
agcacuagccuguuuugcugug

SEQ ID NO: 102279 - RNA, 22 nt, Human
agcacuccugucuuuccccuuu

SEQ ID NO: 102280 - RNA, 22 nt, Human
agcacuguaguuauagcuaaca

SEQ ID NO: 102281 - RNA, 22 nt, Human
agcacuuaaguuaauugaacug

SEQ ID NO: 102282 - RNA, 22 nt, Human
agcacuuaugugauuaggacag

SEQ ID NO: 102283 - RNA, 17 nt, Human
agcacuugaaaauuucu

SEQ ID NO: 102284 - RNA, 22 nt, Human
agcacuuuccuggcaaaugugg

SEQ ID NO: 102285 - RNA, 22 nt, Human
agcacuuugagcagaugaagga

SEQ ID NO: 102286 - RNA, 22 nt, Human
agcacuuugugcauuucugaag

SEQ ID NO: 102287 - RNA, 22 nt, Human
agcagaaaacuuucaugcucug

SEQ ID NO: 102288 - RNA, 22 nt, Human
agcagaaauagaagucaaugau

SEQ ID NO: 102289 - RNA, 22 nt, Human
agcagaacauuuucagggcugu

SEQ ID NO: 102290 - RNA, 21 nt, Human
agcagacagaugcacgcacac

SEQ ID NO: 102291 - RNA, 22 nt, Human
agcagacagguaggaggauaaa

SEQ ID NO: 102292 - RNA, 22 nt, Human
agcagaccaggagugcacaggu

SEQ ID NO: 102293 - RNA, 22 nt, Human
agcagacucuucuccuggggcu

SEQ ID NO: 102294 - RNA, 22 nt, Human
agcagagaagacacaggcuuca

SEQ ID NO: 102295 - RNA, 22 nt, Human
agcagagacaugaaauaugcuu

SEQ ID NO: 102296 - RNA, 22 nt, Human
agcagagaggagguggcccugu

SEQ ID NO: 102297 - RNA, 22 nt, Human
agcagagcaaagcucagaaaug

SEQ ID NO: 102298 - RNA, 22 nt, Human
agcagagccagaauuggaccag

SEQ ID NO: 102299 - RNA, 22 nt, Human
agcagagccaggucucucugua

SEQ ID NO: 102300 - RNA, 22 nt, Human
agcagagcggggccuccggaag

SEQ ID NO: 102301 - RNA, 22 nt, Human
agcagaggaggauuuaguuagg

SEQ ID NO: 102302 - RNA, 21 nt, Human
agcagaggcagaauguaugca

SEQ ID NO: 102303 - RNA, 22 nt, Human
agcagagguuuguuggaaaccu

SEQ ID NO: 102304 - RNA, 22 nt, Human
agcagggcuuugcagacuuggg

SEQ ID NO: 102305 - RNA, 22 nt, Human
agcagggggcauccuugcccuu

SEQ ID NO: 102306 - RNA, 22 nt, Human
agcagggggccacagucacagc

SEQ ID NO: 102307 - RNA, 22 nt, Human
agcagggguggaagguagcuuu

SEQ ID NO: 102308 - RNA, 22 nt, Human
agcaggguccugaggugaguca

SEQ ID NO: 102309 - RNA, 22 nt, Human
agcagggugugguggcccugga

SEQ ID NO: 102310 - RNA, 22 nt, Human
agcaggguucucaguuggugcu

SEQ ID NO: 102311 - RNA, 21 nt, Human
agcagguaggcauucauacug

SEQ ID NO: 102312 - RNA, 22 nt, Human
agcaggucgccgaagauagcuc

SEQ ID NO: 102313 - RNA, 21 nt, Human
agcaggucuacagguucauag

SEQ ID NO: 102314 - RNA, 22 nt, Human
agcaggucuugcucucaacagg

SEQ ID NO: 102315 - RNA, 22 nt, Human
agcaggugaugugagucuggaa

SEQ ID NO: 102316 - RNA, 22 nt, Human
agcaggugcauggcgagcgcgg

SEQ ID NO: 102317 - RNA, 21 nt, Human
agcaggugcuguuggaggaaa

SEQ ID NO: 102318 - RNA, 22 nt, Human
agcagguggaaaauucuuauca

SEQ ID NO: 102319 - RNA, 22 nt, Human
agcagguggccacgaggaggag

SEQ ID NO: 102320 - RNA, 22 nt, Human
agcagguggccuccugucuguc

SEQ ID NO: 102321 - RNA, 19 nt, Human
agcagguggguaagaaaau

SEQ ID NO: 102322 - RNA, 22 nt, Human
agcagguguagggcucuuugua

SEQ ID NO: 102323 - RNA, 22 nt, Human
agcaggugucggcgagggucuu

SEQ ID NO: 102324 - RNA, 22 nt, Human
agcagguuuaaacucuaaugca

SEQ ID NO: 102325 - RNA, 22 nt, Human
agcagucaguccugaaugaagg

SEQ ID NO: 102326 - RNA, 22 nt, Human
agcaguccaacugagguggcau

SEQ ID NO: 102327 - RNA, 22 nt, Human
agcaguccuucuuuagagagcc

SEQ ID NO: 102328 - RNA, 22 nt, Human
agcagugcccauucugcccccu

SEQ ID NO: 102329 - RNA, 22 nt, Human
agcaguggaccucagugcuauu

SEQ ID NO: 102330 - RNA, 22 nt, Human
agcaguggcauacauuuugagu

SEQ ID NO: 102331 - RNA, 22 nt, Human
agcagugggggaguguuaguuu

SEQ ID NO: 102332 - RNA, 22 nt, Human
agcagugggugacagagcugag

SEQ ID NO: 102333 - RNA, 22 nt, Human
agcagugggugguuuuugagca

SEQ ID NO: 102334 - RNA, 22 nt, Human
agcaguggugugaggagggcuc

SEQ ID NO: 102335 - RNA, 22 nt, Human
agcaguguggccuuagacccgg

SEQ ID NO: 102336 - RNA, 22 nt, Human
agcaguguucuaaucuggcuag

SEQ ID NO: 102337 - RNA, 22 nt, Human
agcaguguuggugggagcaucu

SEQ ID NO: 102338 - RNA, 20 nt, Human
agcaguguuucuugacucua

SEQ ID NO: 102339 - RNA, 22 nt, Human
agcaguuaccaaggaaccuggu

SEQ ID NO: 102340 - RNA, 22 nt, Human
agcaguuacgggccuaucuagg

SEQ ID NO: 102341 - RNA, 22 nt, Human
agcaguuaugugucucuugacu

SEQ ID NO: 102342 - RNA, 22 nt, Human
agcaguucauaaacauuuugag

SEQ ID NO: 102343 - RNA, 22 nt, Human
agcaguuguagucauggaaaau

SEQ ID NO: 102344 - RNA, 22 nt, Human
agcaguuuauccucauaaugga

SEQ ID NO: 102345 - RNA, 22 nt, Human
agcaguuuggcccgagcaguuc

SEQ ID NO: 102346 - RNA, 23 nt, Human
agcauaaaccucuguggcuuuag

SEQ ID NO: 102347 - RNA, 22 nt, Human
agcauacaaacauuugaggcag

SEQ ID NO: 102348 - RNA, 20 nt, Human
agcauacaucauaagaaacc

SEQ ID NO: 102349 - RNA, 19 nt, Human
agcauagacuucucaggaa

SEQ ID NO: 102350 - RNA, 22 nt, Human
agcauagauacauugagccaca

SEQ ID NO: 102351 - RNA, 22 nt, Human
agcauaggcggugguaggaccc

SEQ ID NO: 102352 - RNA, 22 nt, Human
agcaucaguacuaaucuggcca

SEQ ID NO: 102353 - RNA, 22 nt, Human
agcaucucugggagucauccgu

SEQ ID NO: 102354 - RNA, 22 nt, Human
agcaucuggcagaaagucagaa

SEQ ID NO: 102355 - RNA, 22 nt, Human
agcaucuggccugguuacuuuu

SEQ ID NO: 102356 - RNA, 23 nt, Human
agcaucuggcuuccccuggaugg

SEQ ID NO: 102357 - RNA, 22 nt, Human
agcaucuguuaagugccuucaa

SEQ ID NO: 102358 - RNA, 22 nt, Human
aggcgcauugaggcccuguugc

SEQ ID NO: 102359 - RNA, 22 nt, Human
aggcggagcucaguguguccaa

SEQ ID NO: 102360 - RNA, 22 nt, Human
aggcggcugguguccugcaggu

SEQ ID NO: 102361 - RNA, 22 nt, Human
aggcggguacccuggcucgaaa

SEQ ID NO: 102362 - RNA, 22 nt, Human
aggcggugcuguggacagugac

SEQ ID NO: 102363 - RNA, 22 nt, Human
aggcuaaggugggaggaucgcu

SEQ ID NO: 102364 - RNA, 22 nt, Human
aggcuacaaauaagcauguaau

SEQ ID NO: 102365 - RNA, 22 nt, Human
aggcuacauguugggguggaag

SEQ ID NO: 102366 - RNA, 22 nt, Human
aggcuagaggcuucuggcuuca

SEQ ID NO: 102367 - RNA, 22 nt, Human
aggcuagcugauugccuuagaa

SEQ ID NO: 102368 - RNA, 22 nt, Human
aggcuaggaaucaagccuuucu

SEQ ID NO: 102369 - RNA, 22 nt, Human
aggcuaggcaugugcuaccaca

SEQ ID NO: 102370 - RNA, 22 nt, Human
aggcuaggcugaugccucuucc

SEQ ID NO: 102371 - RNA, 22 nt, Human
aggcuagggccauggcugguga

SEQ ID NO: 102372 - RNA, 22 nt, Human
aggcuaugguggggccaguggc

SEQ ID NO: 102373 - RNA, 22 nt, Human
aggcuauuuccacucuucucau

SEQ ID NO: 102374 - RNA, 21 nt, Human
aggcucagagaucaaacagua

SEQ ID NO: 102375 - RNA, 22 nt, Human
aggcucagagaugaguaagcac

SEQ ID NO: 102376 - RNA, 22 nt, Human
aggcucagauucacauuugguu

SEQ ID NO: 102377 - RNA, 21 nt, Human
aggcucagcagguguauaaag

SEQ ID NO: 102378 - RNA, 22 nt, Human
aggcucagcccaagguggagag

SEQ ID NO: 102379 - RNA, 22 nt, Human
aggcucaggcaggaauggcgga

SEQ ID NO: 102380 - RNA, 22 nt, Human
aggcucagggacggggccccuu

SEQ ID NO: 102381 - RNA, 22 nt, Human
aggcucaggucucaggucuggc

SEQ ID NO: 102382 - RNA, 22 nt, Human
aggcucaguuugguuuccauug

SEQ ID NO: 102383 - RNA, 16 nt, Human
aggcuccaagagcugu

SEQ ID NO: 102384 - RNA, 23 nt, Human
aggcuccacaugggcacuuugca

SEQ ID NO: 102385 - RNA, 22 nt, Human
aggcuccacggcaggaugcugu

SEQ ID NO: 102386 - RNA, 22 nt, Human
aggcuccagcccaaggcugcag

SEQ ID NO: 102387 - RNA, 22 nt, Human
aggcuccaggcaaaauuucgga

SEQ ID NO: 102388 - RNA, 22 nt, Human
aggcuccagucuccucuggcag

SEQ ID NO: 102389 - RNA, 22 nt, Human
aggcuccauaccaucuccggag

SEQ ID NO: 102390 - RNA, 22 nt, Human
aggcuccaugcuaagcgauaug

SEQ ID NO: 102391 - RNA, 22 nt, Human
aggcucccaagcacugacccca

SEQ ID NO: 102392 - RNA, 22 nt, Human
aggcucccaugguguggcagga

SEQ ID NO: 102393 - RNA, 22 nt, Human
aggcuccugcaggccuuguagg

SEQ ID NO: 102394 - RNA, 22 nt, Human
aggcuccuugcucacaggcuca

SEQ ID NO: 102395 - RNA, 22 nt, Human
aggcuccuuuaccauucuggag

SEQ ID NO: 102396 - RNA, 22 nt, Human
aggcucgcaugcccugcaccac

SEQ ID NO: 102397 - RNA, 22 nt, Human
aggcucuauaccgcugggaguu

SEQ ID NO: 102398 - RNA, 22 nt, Human
aggcucucucugccagccgugc

SEQ ID NO: 102399 - RNA, 22 nt, Human
aggcucucucugccccugggac

SEQ ID NO: 102400 - RNA, 22 nt, Human
aggcucugagucuggugucugc

SEQ ID NO: 102401 - RNA, 22 nt, Human
aggcucuggacagugaggaguu

SEQ ID NO: 102402 - RNA, 22 nt, Human
aggcucuggaguuagccaggca

SEQ ID NO: 102403 - RNA, 22 nt, Human
aggcucuggcaacagcuggugu

SEQ ID NO: 102404 - RNA, 22 nt, Human
aggcucuggcuacuacagagcu

SEQ ID NO: 102405 - RNA, 22 nt, Human
aggcucugggaagcagugaguu

SEQ ID NO: 102406 - RNA, 22 nt, Human
aggcucuguuugcugugguacc

SEQ ID NO: 102407 - RNA, 22 nt, Human
aggcugaaaacgagauggcaau

SEQ ID NO: 102408 - RNA, 22 nt, Human
aggcugagagcaacgugucaga

SEQ ID NO: 102409 - RNA, 22 nt, Human
aggcugagcaaagggccuuacc

SEQ ID NO: 102410 - RNA, 22 nt, Human
aggcugagccacggggcuggcu

SEQ ID NO: 102411 - RNA, 22 nt, Human
aggcugaggagggauguugcuu

SEQ ID NO: 102412 - RNA, 22 nt, Human
aggcugagucaaguuaggguga

SEQ ID NO: 102413 - RNA, 23 nt, Human
aggaaacugaaggggcccucuau

SEQ ID NO: 102414 - RNA, 22 nt, Human
aggaaacugggccucagguuag

SEQ ID NO: 102415 - RNA, 22 nt, Human
aggaaacuggguaugguuauac

SEQ ID NO: 102416 - RNA, 22 nt, Human
aggaaacuuucuuuugcuucau

SEQ ID NO: 102417 - RNA, 22 nt, Human
aggaaagaaguacauucucaug

SEQ ID NO: 102418 - RNA, 18 nt, Human
aggaaagacgaagagggc

SEQ ID NO: 102419 - RNA, 22 nt, Human
aggaaaggauuggcuucucugu

SEQ ID NO: 102420 - RNA, 22 nt, Human
aggaaaggccuuugcauuuggu

SEQ ID NO: 102421 - RNA, 22 nt, Human
aggaaagggguagguguggacg

SEQ ID NO: 102422 - RNA, 22 nt, Human
aggaaaggugagagcggccgcg

SEQ ID NO: 102423 - RNA, 19 nt, Human
aggaaagguggccuuagca

SEQ ID NO: 102424 - RNA, 22 nt, Human
aggaaaguggugggaaaucagg

SEQ ID NO: 102425 - RNA, 22 nt, Human
aggaaauugagaaucagaauaa

SEQ ID NO: 102426 - RNA, 22 nt, Human
aggaacaagggagccuuuucuc

SEQ ID NO: 102427 - RNA, 22 nt, Human
aggaacacacugagcaacuccu

SEQ ID NO: 102428 - RNA, 22 nt, Human
aggaacacccccuuccuaccag

SEQ ID NO: 102429 - RNA, 23 nt, Human
aggaacugcuucauuuuugaaag

SEQ ID NO: 102430 - RNA, 22 nt, Human
aggaacuggugaaguguaguga

SEQ ID NO: 102431 - RNA, 22 nt, Human
aggaagacaaucugugugcugu

SEQ ID NO: 102432 - RNA, 18 nt, Human
aggaagaccaucagauau

SEQ ID NO: 102433 - RNA, 22 nt, Human
aggaagagcauucacaugguag

SEQ ID NO: 102434 - RNA, 22 nt, Human
aggaagauguguuuagcagguu

SEQ ID NO: 102435 - RNA, 22 nt, Human
aggaagcaaaaggcagggucua

SEQ ID NO: 102436 - RNA, 18 nt, Human
aggaagcaggaggaaggc

SEQ ID NO: 102437 - RNA, 22 nt, Human
aggaagccacgaguggcacggg

SEQ ID NO: 102438 - RNA, 22 nt, Human
aggaagccugggagguuuggga

SEQ ID NO: 102439 - RNA, 22 nt, Human
aggaagcgugggucuggcugga

SEQ ID NO: 102440 - RNA, 23 nt, Human
aggaagcuaaguguggcugcgga

SEQ ID NO: 102441 - RNA, 22 nt, Human
aggaagcucggagagggcaaau

SEQ ID NO: 102442 - RNA, 22 nt, Human
aggaagcucucugcuuuuaaga

SEQ ID NO: 102443 - RNA, 22 nt, Human
aggaagcugggguguucuucau

SEQ ID NO: 102444 - RNA, 22 nt, Human
aggaagcuuguguguauugguc

SEQ ID NO: 102445 - RNA, 20 nt, Human
aggaaggaaguuugcaugga

SEQ ID NO: 102446 - RNA, 22 nt, Human
aggaaggagggcagauauuaag

SEQ ID NO: 102447 - RNA, 23 nt, Human
aggaaggagguccuaacaguauc

SEQ ID NO: 102448 - RNA, 22 nt, Human
aggaaggcacauuguuggcuaa

SEQ ID NO: 102449 - RNA, 22 nt, Human
aggaaggcaugagguguucaca

SEQ ID NO: 102450 - RNA, 19 nt, Human
aggaaggcggcggcugccc

SEQ ID NO: 102451 - RNA, 22 nt, Human
aggaagggauacauaggauagu

SEQ ID NO: 102452 - RNA, 22 nt, Human
aggaaggggagaaguuaaagcu

SEQ ID NO: 102453 - RNA, 22 nt, Human
aggaaggguggauaguaacgug

SEQ ID NO: 102454 - RNA, 22 nt, Human
aggaagugaaagggaaggaguu

SEQ ID NO: 102455 - RNA, 22 nt, Human
aggaaguggauaaaauagcuuu

SEQ ID NO: 102456 - RNA, 22 nt, Human
aggaaucugggcccaacugugc

SEQ ID NO: 102457 - RNA, 22 nt, Human
aggaaugacaggccucccgcag

SEQ ID NO: 102458 - RNA, 22 nt, Human
aggaaugacauagaaaggggag

SEQ ID NO: 102459 - RNA, 23 nt, Human
aggaauggcuagaagugugaccc

SEQ ID NO: 102460 - RNA, 22 nt, Human
aggaauguauuauuccuucugg

SEQ ID NO: 102461 - RNA, 22 nt, Human
aggaaugucugagaaagaggca

SEQ ID NO: 102462 - RNA, 22 nt, Human
aggaaugugaccacuagacucu

SEQ ID NO: 102463 - RNA, 22 nt, Human
aggaauguggccuagggaggag

SEQ ID NO: 102464 - RNA, 22 nt, Human
aggaauguuaguucuguauaca

SEQ ID NO: 102465 - RNA, 22 nt, Human
aggaauguuuagaaugucagaa

SEQ ID NO: 102466 - RNA, 22 nt, Human
aggaauuaauaaccaguaagcc

SEQ ID NO: 102467 - RNA, 22 nt, Human
aggaauuauaguaguauuuguc

SEQ ID NO: 102468 - RNA, 22 nt, Human
aggaauuccugggaaggcacag

SEQ ID NO: 102469 - RNA, 22 nt, Human
aggaauugagauccuagguuuu

SEQ ID NO: 102470 - RNA, 22 nt, Human
aggaauugccuggggccuggga

SEQ ID NO: 102471 - RNA, 22 nt, Human
aggaauuuaagggcucagagag

SEQ ID NO: 102472 - RNA, 22 nt, Human
aggaauuugcuggaacacagau

SEQ ID NO: 102473 - RNA, 22 nt, Human
aggaauuuuacaucucagagag

SEQ ID NO: 102474 - RNA, 22 nt, Human
aggaauuuuucuagccggaguu

SEQ ID NO: 102475 - RNA, 22 nt, Human
aggacacacuguucucacguaa

SEQ ID NO: 102476 - RNA, 22 nt, Human
aggacacagguaagccagugga

SEQ ID NO: 102477 - RNA, 18 nt, Human
aggacacauucuucccuc

SEQ ID NO: 102478 - RNA, 22 nt, Human
aggacagagcccuaguuucaua

SEQ ID NO: 102479 - RNA, 22 nt, Human
aggacagagccugugcagaccg

SEQ ID NO: 102480 - RNA, 22 nt, Human
aggacagcaaccguuauucaca

SEQ ID NO: 102481 - RNA, 22 nt, Human
aggacagcaguuggugagguuc

SEQ ID NO: 102482 - RNA, 22 nt, Human
aggacagcauaugggaaccagu

SEQ ID NO: 102483 - RNA, 22 nt, Human
aggacagcccuugagagcacau

SEQ ID NO: 102484 - RNA, 22 nt, Human
aggacaggauuccuugccuugc

SEQ ID NO: 102485 - RNA, 22 nt, Human
aggacagguguagugggcucug

SEQ ID NO: 102486 - RNA, 22 nt, Human
aggacaguuaaaaauagauggc

SEQ ID NO: 102487 - RNA, 22 nt, Human
aggacauguuuguaucuuccuu

SEQ ID NO: 102488 - RNA, 22 nt, Human
aggaccagaccgaacuagcuaa

SEQ ID NO: 102489 - RNA, 22 nt, Human
aggaccagaggccagagucagc

SEQ ID NO: 102490 - RNA, 22 nt, Human
aggacccaagcacaguuccugg

SEQ ID NO: 102491 - RNA, 22 nt, Human
aggacccacgcacaggaacccc

SEQ ID NO: 102492 - RNA, 22 nt, Human
agguucaggcugcacaccugag

SEQ ID NO: 102493 - RNA, 22 nt, Human
agguucauucccaaauuuggag

SEQ ID NO: 102494 - RNA, 22 nt, Human
agguuccagguucgaaucccau

SEQ ID NO: 102495 - RNA, 22 nt, Human
agguuccaucaccugcagugga

SEQ ID NO: 102496 - RNA, 22 nt, Human
agguuccucuucauguucaaca

SEQ ID NO: 102497 - RNA, 21 nt, Human
agguuccugagucaugccuua

SEQ ID NO: 102498 - RNA, 20 nt, Human
agguuccuuuguggagaauu

SEQ ID NO: 102499 - RNA, 23 nt, Human
agguucucuuaucaucucugccc

SEQ ID NO: 102500 - RNA, 22 nt, Human
agguucugguaagcuguugcuu

SEQ ID NO: 102501 - RNA, 22 nt, Human
agguucuguuuggcugaggauc

SEQ ID NO: 102502 - RNA, 22 nt, Human
agguucuugacucuaccuucca

SEQ ID NO: 102503 - RNA, 22 nt, Human
agguugaacccccaagaccuau

SEQ ID NO: 102504 - RNA, 22 nt, Human
agguuggccaagcugcuggccc

SEQ ID NO: 102505 - RNA, 22 nt, Human
agguugggaugagugggugagc

SEQ ID NO: 102506 - RNA, 19 nt, Human
agguuuauggggaggguga

SEQ ID NO: 102507 - RNA, 22 nt, Human
agguuuauguuuggugcaggag

SEQ ID NO: 102508 - RNA, 22 nt, Human
agguuuccagcauggggaaggc

SEQ ID NO: 102509 - RNA, 22 nt, Human
agguuucuaugcuguuuaucuu

SEQ ID NO: 102510 - RNA, 22 nt, Human
agguuucuucuuaggaauaugu

SEQ ID NO: 102511 - RNA, 22 nt, Human
agguuuguuaaaccagauugcu

SEQ ID NO: 102512 - RNA, 22 nt, Human
agguuuucagcuguauccugag

SEQ ID NO: 102513 - RNA, 22 nt, Human
aguaaaauuguauuggaaaaca

SEQ ID NO: 102514 - RNA, 22 nt, Human
aguaaacacgugggguuucuuu

SEQ ID NO: 102515 - RNA, 22 nt, Human
aguaaacaguaggaacugagaa

SEQ ID NO: 102516 - RNA, 22 nt, Human
aguaaacauaauuuaccuguag

SEQ ID NO: 102517 - RNA, 22 nt, Human
aguaaacugugugccuuugacu

SEQ ID NO: 102518 - RNA, 22 nt, Human
aguaaagcauugucuucagagu

SEQ ID NO: 102519 - RNA, 18 nt, Human
aguaaagcuuauuacaug

SEQ ID NO: 102520 - RNA, 22 nt, Human
aguaaauaacagagaaaauggg

SEQ ID NO: 102521 - RNA, 22 nt, Human
aguaaauggcccaggguuauca

SEQ ID NO: 102522 - RNA, 22 nt, Human
cugagaaaccaggugcucugau

SEQ ID NO: 102523 - RNA, 22 nt, Human
cugagaacaucauucagauauu

SEQ ID NO: 102524 - RNA, 22 nt, Human
cugagaagcacugucugcaaga

SEQ ID NO: 102525 - RNA, 22 nt, Human
cugagaagguguggagaugggc

SEQ ID NO: 102526 - RNA, 22 nt, Human
cugagaauguuuucugauugau

SEQ ID NO: 102527 - RNA, 22 nt, Human
cugagacacggagaggcugugu

SEQ ID NO: 102528 - RNA, 22 nt, Human
cugagagaagagcgcaguuugu

SEQ ID NO: 102529 - RNA, 22 nt, Human
cugagagaguaaaguagaauua

SEQ ID NO: 102530 - RNA, 22 nt, Human
cugagagaucaagccacaggau

SEQ ID NO: 102531 - RNA, 19 nt, Human
cugagagaugcuucacaca

SEQ ID NO: 102532 - RNA, 22 nt, Human
cugagagaugguguguuuauaa

SEQ ID NO: 102533 - RNA, 22 nt, Human
cugagaggaacaucuuaugcuu

SEQ ID NO: 102534 - RNA, 22 nt, Human
cugagaggaugcugcaguggag

SEQ ID NO: 102535 - RNA, 22 nt, Human
cugagaggugacagcgugcugg

SEQ ID NO: 102536 - RNA, 22 nt, Human
cugagaggugcugguggcugca

SEQ ID NO: 102537 - RNA, 22 nt, Human
cugagaguucguuccacccucc

SEQ ID NO: 102538 - RNA, 22 nt, Human
cugagaucccaggcaggguggc

SEQ ID NO: 102539 - RNA, 22 nt, Human
cugagauggucucuuuguuacu

SEQ ID NO: 102540 - RNA, 23 nt, Human
cugagcaaagggggaagcugcuu

SEQ ID NO: 102541 - RNA, 22 nt, Human
cugagcaauuucagcucucacu

SEQ ID NO: 102542 - RNA, 22 nt, Human
cugagcagauguugcccagaag

SEQ ID NO: 102543 - RNA, 22 nt, Human
cugagcagccccaccagccauu

SEQ ID NO: 102544 - RNA, 22 nt, Human
cugagcagcguggggagcuggc

SEQ ID NO: 102545 - RNA, 22 nt, Human
cugagcagucuagccagguguu

SEQ ID NO: 102546 - RNA, 22 nt, Human
cugagcagugcuuugcaguggg

SEQ ID NO: 102547 - RNA, 17 nt, Human
cugagcauccgugcucu

SEQ ID NO: 102548 - RNA, 22 nt, Human
cugagcaugcuccucuuuucca

SEQ ID NO: 102549 - RNA, 22 nt, Human
cugagcauggccgguccauggu

SEQ ID NO: 102550 - RNA, 22 nt, Human
cugagccagggccacacaugga

SEQ ID NO: 102551 - RNA, 22 nt, Human
cugagcccauugggugcuguua

SEQ ID NO: 102552 - RNA, 22 nt, Human
cugagccccaucugaggugccc

SEQ ID NO: 102553 - RNA, 22 nt, Human
cugagcccguugugaauauucc

SEQ ID NO: 102554 - RNA, 22 nt, Human
cugagcccuggcucgccuggag

SEQ ID NO: 102555 - RNA, 22 nt, Human
cugagcccuugucuuccugguc

SEQ ID NO: 102556 - RNA, 22 nt, Human
cugagccuccauuucaucaggu

SEQ ID NO: 102557 - RNA, 22 nt, Human
cugagcgcaugguugcugggga

SEQ ID NO: 102558 - RNA, 22 nt, Human
cugagcucaagugaucugccca

SEQ ID NO: 102559 - RNA, 22 nt, Human
cugagcucagucccagcucuac

SEQ ID NO: 102560 - RNA, 22 nt, Human
cugagcugcuuugcuuuugggg

SEQ ID NO: 102561 - RNA, 22 nt, Human
cugagcugggcucucuugaggg

SEQ ID NO: 102562 - RNA, 22 nt, Human
cugagcugugcuaagugaaaug

SEQ ID NO: 102563 - RNA, 22 nt, Human
cucuuauacauauuuuuaggcg

SEQ ID NO: 102564 - RNA, 22 nt, Human
cucuuauagacacucuucuaua

SEQ ID NO: 102565 - RNA, 20 nt, Human
cucuuauugcauuaguuucu

SEQ ID NO: 102566 - RNA, 22 nt, Human
cucuucaaaagucuaauccuua

SEQ ID NO: 102567 - RNA, 20 nt, Human
cucuucaaauauuuuauucu

SEQ ID NO: 102568 - RNA, 22 nt, Human
cucuuccuacagucugcuaugc

SEQ ID NO: 102569 - RNA, 22 nt, Human
cucuuccuuucccuugagggug

SEQ ID NO: 102570 - RNA, 22 nt, Human
cucuucuuauggccguggcuga

SEQ ID NO: 102571 - RNA, 22 nt, Human
cucuucuugaaagaggaauuca

SEQ ID NO: 102572 - RNA, 22 nt, Human
cucuucuugcuagacugagugc

SEQ ID NO: 102573 - RNA, 22 nt, Human
cucuucuugucucugguuagaa

SEQ ID NO: 102574 - RNA, 22 nt, Human
cucuugaagggcaucugaguua

SEQ ID NO: 102575 - RNA, 21 nt, Human
cucuugcugaugucuccuuua

SEQ ID NO: 102576 - RNA, 22 nt, Human
cucuugcuugcaaguggggaua

SEQ ID NO: 102577 - RNA, 22 nt, Human
cucuuggccagacacagaggca

SEQ ID NO: 102578 - RNA, 22 nt, Human
cucuuguauuggaguuaguggg

SEQ ID NO: 102579 - RNA, 21 nt, Human
cucuugucuuugcucaguagc

SEQ ID NO: 102580 - RNA, 21 nt, Human
cucuugugucagagccagagg

SEQ ID NO: 102581 - RNA, 22 nt, Human
cucuuuacugcuacuacaaaga

SEQ ID NO: 102582 - RNA, 22 nt, Human
cucuuuagucacagggcuucau

SEQ ID NO: 102583 - RNA, 22 nt, Human
cucuuuagucuguguggagaag

SEQ ID NO: 102584 - RNA, 22 nt, Human
cucuuuaguggugaugaugcua

SEQ ID NO: 102585 - RNA, 21 nt, Human
cucuuuauauaguaaagauau

SEQ ID NO: 102586 - RNA, 22 nt, Human
cucuuuccaggguaccccaggu

SEQ ID NO: 102587 - RNA, 19 nt, Human
cucuuuccauuguauuugc

SEQ ID NO: 102588 - RNA, 22 nt, Human
cucuuucucauugucagcagaa

SEQ ID NO: 102589 - RNA, 18 nt, Human
cucuuucuuuggcacaaa

SEQ ID NO: 102590 - RNA, 22 nt, Human
cucuuuggcccccgaugauuca

SEQ ID NO: 102591 - RNA, 22 nt, Human
cucuuuggcguuggcagagcca

SEQ ID NO: 102592 - RNA, 22 nt, Human
cucuuugguuaaucacacagau

SEQ ID NO: 102593 - RNA, 22 nt, Human
cucuuuguaaagaagugguagg

SEQ ID NO: 102594 - RNA, 22 nt, Human
cucuuugucacucauacaguca

SEQ ID NO: 102595 - RNA, 22 nt, Human
cucuuugugcuauuaugauccu

SEQ ID NO: 102596 - RNA, 22 nt, Human
cucuuuguggaacggcaguguc

SEQ ID NO: 102597 - RNA, 21 nt, Human
cucuuuguggcaauguauuuu

SEQ ID NO: 102598 - RNA, 22 nt, Human
cucuuuucaaaccuguuuaugg

SEQ ID NO: 102599 - RNA, 20 nt, Human
cucuuuugacucuuugcaag

SEQ ID NO: 102600 - RNA, 22 nt, Human
cugaaaagugucuguugaguua

SEQ ID NO: 102601 - RNA, 22 nt, Human
cugaaacauugcaauaacaaag

SEQ ID NO: 102602 - RNA, 22 nt, Human
cugaaacuggucaauuaaucug

SEQ ID NO: 102603 - RNA, 22 nt, Human
cugaaagcaaaguaauucuuaa

SEQ ID NO: 102604 - RNA, 22 nt, Human
cugaaagcaaauacaugaaucu

SEQ ID NO: 102605 - RNA, 22 nt, Human
cugaaaggaauaaggcucuuug

SEQ ID NO: 102606 - RNA, 22 nt, Human
cugaaauaaaguugcuaaaauu

SEQ ID NO: 102607 - RNA, 23 nt, Human
cugaaauaccagaaaaucagugu

SEQ ID NO: 102608 - RNA, 22 nt, Human
cugaaaucaauuuugauuaucu

SEQ ID NO: 102609 - RNA, 22 nt, Human
cugaaaugguugccuggagaau

SEQ ID NO: 102610 - RNA, 22 nt, Human
cugaaauuauuguuuaaucaaa

SEQ ID NO: 102611 - RNA, 22 nt, Human
cugaaauugaugacagggaugg

SEQ ID NO: 102612 - RNA, 22 nt, Human
cugaacaacuugucauuccaag

SEQ ID NO: 102613 - RNA, 22 nt, Human
cugaacaucauagaguguacuu

SEQ ID NO: 102614 - RNA, 22 nt, Human
cugaagagaaagggagcucuuc

SEQ ID NO: 102615 - RNA, 22 nt, Human
cugaagagaaauguacacaugg

SEQ ID NO: 102616 - RNA, 22 nt, Human
cugaagagacuggagggggcau

SEQ ID NO: 102617 - RNA, 22 nt, Human
cugaagagcucuccuguccccu

SEQ ID NO: 102618 - RNA, 22 nt, Human
cugaagagguuguugaggaaua

SEQ ID NO: 102619 - RNA, 22 nt, Human
cugaagaugucugagaugcuca

SEQ ID NO: 102620 - RNA, 22 nt, Human
cugaagcaggaggggaggcgcu

SEQ ID NO: 102621 - RNA, 22 nt, Human
cugaagcauaucaugccaaguu

SEQ ID NO: 102622 - RNA, 22 nt, Human
cugaagccaguuugcugcccuu

SEQ ID NO: 102623 - RNA, 22 nt, Human
cugaagcuaggucaaaaaaggg

SEQ ID NO: 102624 - RNA, 22 nt, Human
cugaagcucuccaguuuguuuc

SEQ ID NO: 102625 - RNA, 22 nt, Human
cugaaggacacgugaggagcca

SEQ ID NO: 102626 - RNA, 18 nt, Human
cugaaggauccaggugua

SEQ ID NO: 102627 - RNA, 22 nt, Human
cugaaggauuuaguucuuugcu

SEQ ID NO: 102628 - RNA, 22 nt, Human
cugaaggcaccaggggugccag

SEQ ID NO: 102629 - RNA, 22 nt, Human
cugaagggucuggggcugugcc

SEQ ID NO: 102630 - RNA, 22 nt, Human
cugaaguggacaaauggagugg

SEQ ID NO: 102631 - RNA, 22 nt, Human
cugagggcaugaacauuccaua

SEQ ID NO: 102632 - RNA, 23 nt, Human
cugagggcuggucugaagucugc

SEQ ID NO: 102633 - RNA, 22 nt, Human
cugaggggaaaagucaggauga

SEQ ID NO: 102634 - RNA, 22 nt, Human
cugaggggauguuuuugacgga

SEQ ID NO: 102635 - RNA, 22 nt, Human
cugaggggucgugggagcccag

SEQ ID NO: 102636 - RNA, 23 nt, Human
cugagguaaaauauucugaagga

SEQ ID NO: 102637 - RNA, 22 nt, Human
cugagguacaagaaaggcaccu

SEQ ID NO: 102638 - RNA, 22 nt, Human
cugaggucaauuaaucaacaac

SEQ ID NO: 102639 - RNA, 22 nt, Human
cugaggucuagacaccccaggg

SEQ ID NO: 102640 - RNA, 22 nt, Human
cugaggucucuuuccauaguga

SEQ ID NO: 102641 - RNA, 19 nt, Human
cugaggugcaguaagaggc

SEQ ID NO: 102642 - RNA, 22 nt, Human
cugaggugcuagggucccugcu

SEQ ID NO: 102643 - RNA, 22 nt, Human
cugagguggcauccuagcucua

SEQ ID NO: 102644 - RNA, 22 nt, Human
cugaggugugaaaugguggcaa

SEQ ID NO: 102645 - RNA, 22 nt, Human
cugagguguugaugaccuaugc

SEQ ID NO: 102646 - RNA, 22 nt, Human
cugagguguuuaguaggggcgg

SEQ ID NO: 102647 - RNA, 22 nt, Human
cugagucauugcagauguggag

SEQ ID NO: 102648 - RNA, 22 nt, Human
cugagucucccggcaguggagg

SEQ ID NO: 102649 - RNA, 22 nt, Human
cugagucuguacguuagccaua

SEQ ID NO: 102650 - RNA, 22 nt, Human
cugaguggaacauaggaugaua

SEQ ID NO: 102651 - RNA, 22 nt, Human
cugaguucugcccaaggucugg

SEQ ID NO: 102652 - RNA, 22 nt, Human
cugauaauguccugcaguaaau

SEQ ID NO: 102653 - RNA, 22 nt, Human
cugauacaaugucugcuuuaua

SEQ ID NO: 102654 - RNA, 22 nt, Human
cugauaugaugggugauuuuca

SEQ ID NO: 102655 - RNA, 22 nt, Human
cugauauuaacaggcaagugag

SEQ ID NO: 102656 - RNA, 22 nt, Human
cugauauuauugaagcuggagu

SEQ ID NO: 102657 - RNA, 22 nt, Human
cugauauucauuauggagcucc

SEQ ID NO: 102658 - RNA, 22 nt, Human
cugauauucuauuuugcuugcu

SEQ ID NO: 102659 - RNA, 22 nt, Human
cugauccagagccaaccaaggc

SEQ ID NO: 102660 - RNA, 22 nt, Human
cugauccuccuuuaaguagcug

SEQ ID NO: 102661 - RNA, 22 nt, Human
cugaucuguccuccucagagcc

SEQ ID NO: 102662 - RNA, 22 nt, Human
cugaucuuaaguaacauuauuu

SEQ ID NO: 102663 - RNA, 22 nt, Human
cugaugagucggcugccaccag

SEQ ID NO: 102664 - RNA, 22 nt, Human
cugaugauagugauuuauugag

SEQ ID NO: 102665 - RNA, 22 nt, Human
cugauggagagugugauuuggg

SEQ ID NO: 102666 - RNA, 22 nt, Human
cugauggauggacagggguagu

SEQ ID NO: 102667 - RNA, 20 nt, Human
cugauguucgugcuuccugg

SEQ ID NO: 102668 - RNA, 22 nt, Human
cugauuaacugaacugaauuua

SEQ ID NO: 102669 - RNA, 22 nt, Human
cugauuagaguguuaaugagga

SEQ ID NO: 102670 - RNA, 22 nt, Human
cugauuccagagucuguguucu

SEQ ID NO: 102671 - RNA, 22 nt, Human
cugauucccuggugccuccguu

SEQ ID NO: 102672 - RNA, 22 nt, Human
cugauucucugacucuuggcuu

SEQ ID NO: 102673 - RNA, 22 nt, Human
cugauucuguaauuuuuccuaa

SEQ ID NO: 102674 - RNA, 22 nt, Human
cugauucuuucuucuugccagg

SEQ ID NO: 102675 - RNA, 23 nt, Human
cugauuugagcagaauaaaauag

SEQ ID NO: 102676 - RNA, 22 nt, Human
cugcaaaagucauugugguuuu

SEQ ID NO: 102677 - RNA, 22 nt, Human
cugcaaaggugggggaggagcu

SEQ ID NO: 102678 - RNA, 22 nt, Human
cugcaaaucccuacugggcaca

SEQ ID NO: 102679 - RNA, 21 nt, Human
cugcaaauguaaugaguuugg

SEQ ID NO: 102680 - RNA, 21 nt, Human
cugcaagacaugcuguucuug

SEQ ID NO: 102681 - RNA, 22 nt, Human
cugcaagcaaaucaacucuuug

SEQ ID NO: 102682 - RNA, 22 nt, Human
gcccucucggcauagcaggggc

SEQ ID NO: 102683 - RNA, 22 nt, Human
gcccucugaugcucaccgagga

SEQ ID NO: 102684 - RNA, 22 nt, Human
gcccugaaauauuuccacggcc

SEQ ID NO: 102685 - RNA, 22 nt, Human
gcccugaagcugaggguguuaa

SEQ ID NO: 102686 - RNA, 22 nt, Human
gcccugaaggcagagguggagc

SEQ ID NO: 102687 - RNA, 19 nt, Human
gcccugaccuuggcugcuc

SEQ ID NO: 102688 - RNA, 23 nt, Human
gcccugacugcggccucccacuc

SEQ ID NO: 102689 - RNA, 22 nt, Human
gcccugagaaugugugugucua

SEQ ID NO: 102690 - RNA, 22 nt, Human
gcccugaggauuugcauuuccu

SEQ ID NO: 102691 - RNA, 22 nt, Human
gcccugagggguggugucugua

SEQ ID NO: 102692 - RNA, 22 nt, Human
gcccugagggucuggguuccca

SEQ ID NO: 102693 - RNA, 22 nt, Human
gcccugagugccuguguaagaa

SEQ ID NO: 102694 - RNA, 19 nt, Human
gcccugcaggagguggggc

SEQ ID NO: 102695 - RNA, 22 nt, Human
gcccugcagugcggagguggca

SEQ ID NO: 102696 - RNA, 22 nt, Human
gcccugcuccuccgucccacga

SEQ ID NO: 102697 - RNA, 22 nt, Human
gcccugcugaguccggcucaga

SEQ ID NO: 102698 - RNA, 23 nt, Human
gcccugcugggaccuccugcuac

SEQ ID NO: 102699 - RNA, 22 nt, Human
gcccugcuucuggcaugcagaa

SEQ ID NO: 102700 - RNA, 17 nt, Human
gcccuggagccaggcua

SEQ ID NO: 102701 - RNA, 20 nt, Human
gcccuggagccuuguccugg

SEQ ID NO: 102702 - RNA, 22 nt, Human
gcccuggccuccuggaacaggc

SEQ ID NO: 102703 - RNA, 22 nt, Human
gcccugguuuuagaggagcagg

SEQ ID NO: 102704 - RNA, 22 nt, Human
gcccugugcgacucuagagguu

SEQ ID NO: 102705 - RNA, 22 nt, Human
gcccugugcucaugggaacauc

SEQ ID NO: 102706 - RNA, 22 nt, Human
gcccugugcuuggauggcagau

SEQ ID NO: 102707 - RNA, 22 nt, Human
gcccuuagguacuacuuauucu

SEQ ID NO: 102708 - RNA, 22 nt, Human
gcccuuagucagcacuuucacu

SEQ ID NO: 102709 - RNA, 22 nt, Human
gcccuuccuuagacagcaggau

SEQ ID NO: 102710 - RNA, 22 nt, Human
gcccuucugcuguuagguagcc

SEQ ID NO: 102711 - RNA, 22 nt, Human
gccggccagcaagcuucaggug

SEQ ID NO: 102712 - RNA, 22 nt, Human
gccgggaccaaggccacggagc

SEQ ID NO: 102713 - RNA, 22 nt, Human
gccggucuuaagcugacuguga

SEQ ID NO: 102714 - RNA, 22 nt, Human
gccguggccagagcccagucuc

SEQ ID NO: 102715 - RNA, 22 nt, Human
gccuaaggauaugcuuugcuug

SEQ ID NO: 102716 - RNA, 22 nt, Human
gccuacaguuggcugagggccu

SEQ ID NO: 102717 - RNA, 22 nt, Human
gccuacauuucccaguugaaug

SEQ ID NO: 102718 - RNA, 22 nt, Human
gccuacuuaguagcugggauua

SEQ ID NO: 102719 - RNA, 22 nt, Human
gccuagagagggagugccacac

SEQ ID NO: 102720 - RNA, 22 nt, Human
gccuagggugcucagggacgag

SEQ ID NO: 102721 - RNA, 22 nt, Human
gccuagguaccagcagagagcc

SEQ ID NO: 102722 - RNA, 22 nt, Human
gccuauggauuggagaaggagc

SEQ ID NO: 102723 - RNA, 22 nt, Human
gccucaaaaguguuguagaggg

SEQ ID NO: 102724 - RNA, 19 nt, Human
gccucacaggucucaggcc

SEQ ID NO: 102725 - RNA, 22 nt, Human
gccucagaaucauuuaucaucu

SEQ ID NO: 102726 - RNA, 22 nt, Human
gccucagacacugccugggugu

SEQ ID NO: 102727 - RNA, 23 nt, Human
gccucagagaaacagcugcacac

SEQ ID NO: 102728 - RNA, 22 nt, Human
gccucagagggcccuagggaca

SEQ ID NO: 102729 - RNA, 20 nt, Human
gccucagaggguuugaguuu

SEQ ID NO: 102730 - RNA, 22 nt, Human
gccucagccggcggacgccagg

SEQ ID NO: 102731 - RNA, 22 nt, Human
gccucaggccuauagcugcugu

SEQ ID NO: 102732 - RNA, 22 nt, Human
gccucagggauaggaugagcau

SEQ ID NO: 102733 - RNA, 20 nt, Human
gccuccacacucaccccuua

SEQ ID NO: 102734 - RNA, 22 nt, Human
gccuccaccgaacgcucucuug

SEQ ID NO: 102735 - RNA, 22 nt, Human
gccuccaguuuuuuucugaacu

SEQ ID NO: 102736 - RNA, 22 nt, Human
gccuccccugcaauuguccuug

SEQ ID NO: 102737 - RNA, 22 nt, Human
gccuccggaguugcagugucuu

SEQ ID NO: 102738 - RNA, 22 nt, Human
gccuccuaccacacccucaguc

SEQ ID NO: 102739 - RNA, 22 nt, Human
gccuccuauuaaaauuuaccuu

SEQ ID NO: 102740 - RNA, 22 nt, Human
cugucucaagacugcaggcacu

SEQ ID NO: 102741 - RNA, 23 nt, Human
cugucuccugggcuagguggaau

SEQ ID NO: 102742 - RNA, 22 nt, Human
cugucugcaggauaguacccuc

SEQ ID NO: 102743 - RNA, 22 nt, Human
cugucugcccuggccagagccc

SEQ ID NO: 102744 - RNA, 22 nt, Human
cugucuggauauaccuuggcca

SEQ ID NO: 102745 - RNA, 22 nt, Human
cugucuggaugugagucaccua

SEQ ID NO: 102746 - RNA, 22 nt, Human
cugucuggccggcccagcuucc

SEQ ID NO: 102747 - RNA, 22 nt, Human
cugucuggucaacaacugagug

SEQ ID NO: 102748 - RNA, 19 nt, Human
cugucugugcagagaugug

SEQ ID NO: 102749 - RNA, 22 nt, Human
cugucuguggucucaguaggcc

SEQ ID NO: 102750 - RNA, 22 nt, Human
cugucuguguggacacggcugc

SEQ ID NO: 102751 - RNA, 22 nt, Human
cugucuguuuuaccuucuccag

SEQ ID NO: 102752 - RNA, 20 nt, Human
cugucuugugggcuuccccu

SEQ ID NO: 102753 - RNA, 22 nt, Human
cugucuuuaguacaaaaaaugu

SEQ ID NO: 102754 - RNA, 22 nt, Human
cugucuuuucauacuuucccuc

SEQ ID NO: 102755 - RNA, 22 nt, Human
cugucuuuucuucucauugaug

SEQ ID NO: 102756 - RNA, 22 nt, Human
cugucuuuuuagagaguaggau

SEQ ID NO: 102757 - RNA, 22 nt, Human
cugugaaaucaaccuugagccc

SEQ ID NO: 102758 - RNA, 22 nt, Human
cugugaaaugcuuugcgauggu

SEQ ID NO: 102759 - RNA, 22 nt, Human
cugugaacaauagcagcaucuu

SEQ ID NO: 102760 - RNA, 22 nt, Human
cugugaauguugaauaaauccu

SEQ ID NO: 102761 - RNA, 22 nt, Human
cugugaauuaaguauuguuauc

SEQ ID NO: 102762 - RNA, 22 nt, Human
cugugaauugaauaugacuaug

SEQ ID NO: 102763 - RNA, 22 nt, Human
cugugacaaaagcagccugccu

SEQ ID NO: 102764 - RNA, 22 nt, Human
cugugacaguuucucagaauuu

SEQ ID NO: 102765 - RNA, 22 nt, Human
cugugacuggaaucuggcucuu

SEQ ID NO: 102766 - RNA, 22 nt, Human
cugugacuguguuggaugcaca

SEQ ID NO: 102767 - RNA, 22 nt, Human
cugugacuuuugcccuguacca

SEQ ID NO: 102768 - RNA, 22 nt, Human
cugugagaccugauuucuucau

SEQ ID NO: 102769 - RNA, 22 nt, Human
cugugagacugauagggaagag

SEQ ID NO: 102770 - RNA, 22 nt, Human
cugugagcuggguggccaggac

SEQ ID NO: 102771 - RNA, 22 nt, Human
cugugaggcccugggugcugga

SEQ ID NO: 102772 - RNA, 22 nt, Human
cugugaggccuuuggccagaua

SEQ ID NO: 102773 - RNA, 22 nt, Human
cugugauguuagcucuguguua

SEQ ID NO: 102774 - RNA, 21 nt, Human
cugugauguugccgggguagg

SEQ ID NO: 102775 - RNA, 22 nt, Human
cugugcaaaggccuuauguuuu

SEQ ID NO: 102776 - RNA, 22 nt, Human
cugugcacuaaccacacccacg

SEQ ID NO: 102777 - RNA, 22 nt, Human
cugugcacuucucuuuauuugu

SEQ ID NO: 102778 - RNA, 19 nt, Human
cugugcaggccgggcugag

SEQ ID NO: 102779 - RNA, 22 nt, Human
cugugcagugugggguaggccu

SEQ ID NO: 102780 - RNA, 22 nt, Human
cugugcauugucuugucuguag

SEQ ID NO: 102781 - RNA, 22 nt, Human
cugugcauuguugaguguuuag

SEQ ID NO: 102782 - RNA, 22 nt, Human
cugugccaccugagggacucua

SEQ ID NO: 102783 - RNA, 22 nt, Human
cugugccagagggugaccaagg

SEQ ID NO: 102784 - RNA, 22 nt, Human
cugugcccaccuggcucugagg

SEQ ID NO: 102785 - RNA, 22 nt, Human
cugugcccaggcuggagugcag

SEQ ID NO: 102786 - RNA, 23 nt, Human
cugugcccggggcuccaccugau

SEQ ID NO: 102787 - RNA, 19 nt, Human
cugugcccuaugacuugua

SEQ ID NO: 102788 - RNA, 22 nt, Human
cugugcccuggccaggccucuc

SEQ ID NO: 102789 - RNA, 22 nt, Human
cugugcccuuucgcugcacugu

SEQ ID NO: 102790 - RNA, 20 nt, Human
cugugccuaaaccuccgggu

SEQ ID NO: 102791 - RNA, 20 nt, Human
cugugccuccugcuaguccu

SEQ ID NO: 102792 - RNA, 22 nt, Human
cugugccugcaggccacaucaa

SEQ ID NO: 102793 - RNA, 22 nt, Human
cugugccuggggggcagagcug

SEQ ID NO: 102794 - RNA, 22 nt, Human
cugugccuuaguauucucauuu

SEQ ID NO: 102795 - RNA, 22 nt, Human
cugugccuuggcgcugugccac

SEQ ID NO: 102796 - RNA, 22 nt, Human
cugugcguugugaaauguuuag

SEQ ID NO: 102797 - RNA, 20 nt, Human
cugugcuccggguuccugga

SEQ ID NO: 102798 - RNA, 22 nt, Human
cugugcucugagcgugggguug

SEQ ID NO: 102799 - RNA, 22 nt, Human
cugugcugauucagcacaggcc

SEQ ID NO: 102800 - RNA, 22 nt, Human
cugugcugcuagaccuggauuc

SEQ ID NO: 102801 - RNA, 22 nt, Human
cugugcugucuugggagccuua

SEQ ID NO: 102802 - RNA, 22 nt, Human
cugugcuucgcaacuccaaggu

SEQ ID NO: 102803 - RNA, 22 nt, Human
cugugcuugcggguguggagcc

SEQ ID NO: 102804 - RNA, 20 nt, Human
cugugcuuuggaaccuggaa

SEQ ID NO: 102805 - RNA, 22 nt, Human
cuguggaacuuagugggagaca

SEQ ID NO: 102806 - RNA, 22 nt, Human
cuguggaaggacuuagcgauac

SEQ ID NO: 102807 - RNA, 21 nt, Human
cuguggacaggcuggggcaug

SEQ ID NO: 102808 - RNA, 22 nt, Human
cuguggaguguagaugcugggu

SEQ ID NO: 102809 - RNA, 22 nt, Human
cuguggaguuccaucaggggag

SEQ ID NO: 102810 - RNA, 22 nt, Human
cuguggauuuacuugagaagcu

SEQ ID NO: 102811 - RNA, 22 nt, Human
cuguggcccugugaucuggcac

SEQ ID NO: 102812 - RNA, 22 nt, Human
cuguggccuuggaccagcaucu

SEQ ID NO: 102813 - RNA, 22 nt, Human
cuguggcuaauaauuaguauuu

SEQ ID NO: 102814 - RNA, 22 nt, Human
cuguggcucaggccuguaagcc

SEQ ID NO: 102815 - RNA, 22 nt, Human
cuguggcucauaucuguaaucu

SEQ ID NO: 102816 - RNA, 20 nt, Human
cuguggcucaugcaucugcc

SEQ ID NO: 102817 - RNA, 22 nt, Human
cuguggcucucugcaggguccc

SEQ ID NO: 102818 - RNA, 22 nt, Human
cuguggcugaacucugaagagg

SEQ ID NO: 102819 - RNA, 23 nt, Human
cuguggcugaguccuguuggagu

SEQ ID NO: 102820 - RNA, 22 nt, Human
cuguggcugcgcccugggggag

SEQ ID NO: 102821 - RNA, 22 nt, Human
cuguggcuucugggucaguuca

SEQ ID NO: 102822 - RNA, 22 nt, Human
cuguggcuuucucugccuccuu

SEQ ID NO: 102823 - RNA, 22 nt, Human
cuguggcuuuuccggggagccu

SEQ ID NO: 102824 - RNA, 22 nt, Human
cugugggagcacaugacagaua

SEQ ID NO: 102825 - RNA, 22 nt, Human
cugugggagggugagagaacca

SEQ ID NO: 102826 - RNA, 22 nt, Human
cugugggaugggaccucagcug

SEQ ID NO: 102827 - RNA, 22 nt, Human
cugugggcgccugucagccuca

SEQ ID NO: 102828 - RNA, 22 nt, Human
cugugggcucccagcuucucuc

SEQ ID NO: 102829 - RNA, 22 nt, Human
cugugggcugaaagugcucccg

SEQ ID NO: 102830 - RNA, 22 nt, Human
cuguggggaaaggguccugcuc

SEQ ID NO: 102831 - RNA, 22 nt, Human
cuguggggccaaauucuccucu

SEQ ID NO: 102832 - RNA, 22 nt, Human
cuucaaggaagccacguuggga

SEQ ID NO: 102833 - RNA, 22 nt, Human
cuucaaguaauucugauggcua

SEQ ID NO: 102834 - RNA, 20 nt, Human
cuucaaguuaugguuggcaa

SEQ ID NO: 102835 - RNA, 22 nt, Human
cuucaauaggaacugcauggca

SEQ ID NO: 102836 - RNA, 22 nt, Human
cuucacagaauaaacucauuau

SEQ ID NO: 102837 - RNA, 22 nt, Human
cuucacagaugcugagagggcu

SEQ ID NO: 102838 - RNA, 22 nt, Human
cuucacagcaugagcuuuggag

SEQ ID NO: 102839 - RNA, 22 nt, Human
cuucacaggcaagucuguuuuu

SEQ ID NO: 102840 - RNA, 23 nt, Human
cuucacagguucaggggauuaag

SEQ ID NO: 102841 - RNA, 22 nt, Human
cuucacagucacccugcugugu

SEQ ID NO: 102842 - RNA, 22 nt, Human
cuucacagucuuuauuuccucc

SEQ ID NO: 102843 - RNA, 19 nt, Human
cuucacaucugugagggga

SEQ ID NO: 102844 - RNA, 22 nt, Human
cuucacugaguagucuagacuc

SEQ ID NO: 102845 - RNA, 22 nt, Human
cuucagaaacuaguaacagcua

SEQ ID NO: 102846 - RNA, 22 nt, Human
cuucagaaccagccagaagagg

SEQ ID NO: 102847 - RNA, 22 nt, Human
cuucagaauccagaaucagaau

SEQ ID NO: 102848 - RNA, 22 nt, Human
cuucagaaugggacuguguuug

SEQ ID NO: 102849 - RNA, 22 nt, Human
cugggccuugagaaucauguuu

SEQ ID NO: 102850 - RNA, 22 nt, Human
cugggccuugaucacacaggug

SEQ ID NO: 102851 - RNA, 22 nt, Human
cugggccuugccaggggugucu

SEQ ID NO: 102852 - RNA, 22 nt, Human
cugggccuuugggaguucggug

SEQ ID NO: 102853 - RNA, 18 nt, Human
cugggccuuuguauuuuu

SEQ ID NO: 102854 - RNA, 22 nt, Human
cugggcgcguccccugaggcgg

SEQ ID NO: 102855 - RNA, 22 nt, Human
cugggcuaauuaagcacagcug

SEQ ID NO: 102856 - RNA, 20 nt, Human
cugggcucaagugauccucc

SEQ ID NO: 102857 - RNA, 22 nt, Human
cugggcucagaugagaggaagg

SEQ ID NO: 102858 - RNA, 22 nt, Human
cugggcucuaggaaccauuccu

SEQ ID NO: 102859 - RNA, 22 nt, Human
cugggcucuucucacccuguuu

SEQ ID NO: 102860 - RNA, 19 nt, Human
cugggcugaggucugccuu

SEQ ID NO: 102861 - RNA, 22 nt, Human
cugggcugauuuagucacguuu

SEQ ID NO: 102862 - RNA, 22 nt, Human
cugggcugcaguuccugguccu

SEQ ID NO: 102863 - RNA, 22 nt, Human
cugggcugcgguucucugaagc

SEQ ID NO: 102864 - RNA, 22 nt, Human
cugggcugcuguccacuagggu

SEQ ID NO: 102865 - RNA, 21 nt, Human
cugggcuggcaggcauuaccu

SEQ ID NO: 102866 - RNA, 22 nt, Human
cugggcuggguuuacccucuuc

SEQ ID NO: 102867 - RNA, 22 nt, Human
cugggcuugaguuccugcucgu

SEQ ID NO: 102868 - RNA, 22 nt, Human
cugggcuuugaagccaggcugc

SEQ ID NO: 102869 - RNA, 22 nt, Human
cuggggaacaauuugccacacu

SEQ ID NO: 102870 - RNA, 22 nt, Human
cuggggaacgcagcgagcagcg

SEQ ID NO: 102871 - RNA, 22 nt, Human
cuggggaccgagcaagcucugg

SEQ ID NO: 102872 - RNA, 22 nt, Human
cuggggacuuugguucuccaug

SEQ ID NO: 102873 - RNA, 22 nt, Human
cuggggagaagcgacucggcug

SEQ ID NO: 102874 - RNA, 20 nt, Human
cuggggagcugcucccacga

SEQ ID NO: 102875 - RNA, 22 nt, Human
cuggggaggcagggcugccccu

SEQ ID NO: 102876 - RNA, 22 nt, Human
cuggggagugaagguaauuaca

SEQ ID NO: 102877 - RNA, 22 nt, Human
cuggggaugggaccuggcauaa

SEQ ID NO: 102878 - RNA, 17 nt, Human
cuggggaugugggacuc

SEQ ID NO: 102879 - RNA, 22 nt, Human
cuggggccagugaggaggcuuu

SEQ ID NO: 102880 - RNA, 22 nt, Human
cuggggcucacuccagcccugg

SEQ ID NO: 102881 - RNA, 22 nt, Human
cuggggcugcgguggaggagcc

SEQ ID NO: 102882 - RNA, 19 nt, Human
cugggggugcucacgcucu

SEQ ID NO: 102883 - RNA, 22 nt, Human
cuggggucucaauucuagcggg

SEQ ID NO: 102884 - RNA, 22 nt, Human
cugggucagucugucccuaggg

SEQ ID NO: 102885 - RNA, 22 nt, Human
cuggguccugcucucccuaaga

SEQ ID NO: 102886 - RNA, 22 nt, Human
cugggucucaggaguucugagg

SEQ ID NO: 102887 - RNA, 22 nt, Human
cugggucuuuuucuuccauuga

SEQ ID NO: 102888 - RNA, 22 nt, Human
cugggugaguugaugaaggaga

SEQ ID NO: 102889 - RNA, 22 nt, Human
cugggugauuccuguccaggca

SEQ ID NO: 102890 - RNA, 22 nt, Human
cuggguggagccuggucaucug

SEQ ID NO: 102891 - RNA, 22 nt, Human
cugggugguucuaacuguugau

SEQ ID NO: 102892 - RNA, 22 nt, Human
cuggguuccauguagccaagag

SEQ ID NO: 102893 - RNA, 22 nt, Human
cuggguucuauuuuuggcuuca

SEQ ID NO: 102894 - RNA, 22 nt, Human
cuggguucucugcuuagggccu

SEQ ID NO: 102895 - RNA, 22 nt, Human
cuggguugcccugggccuguga

SEQ ID NO: 102896 - RNA, 22 nt, Human
cuggguuuagggucuccccuug

SEQ ID NO: 102897 - RNA, 22 nt, Human
cuggguuuuauuacagugagcu

SEQ ID NO: 102898 - RNA, 22 nt, Human
cugguagcagugaagcuguuga

SEQ ID NO: 102899 - RNA, 22 nt, Human
cuggucaccagguagcauugua

SEQ ID NO: 102900 - RNA, 22 nt, Human
cuggucaccuccuucccagcua

SEQ ID NO: 102901 - RNA, 22 nt, Human
cuggucacuggucucauccagc

SEQ ID NO: 102902 - RNA, 23 nt, Human
cuggucagaggcugcuggaaggg

SEQ ID NO: 102903 - RNA, 22 nt, Human
cuggucaggaagguggggacag

SEQ ID NO: 102904 - RNA, 22 nt, Human
cuggucaggggauggggcucag

SEQ ID NO: 102905 - RNA, 22 nt, Human
cugguccaguggaugcugaggg

SEQ ID NO: 102906 - RNA, 22 nt, Human
cuggucccagcagagcucugag

SEQ ID NO: 102907 - RNA, 22 nt, Human
cugguccuccuugccuucagau

SEQ ID NO: 102908 - RNA, 22 nt, Human
cuggucugagggcucuugaggc

SEQ ID NO: 102909 - RNA, 22 nt, Human
cuggucugcgggaaggcguggg

SEQ ID NO: 102910 - RNA, 22 nt, Human
cuggucugggaugagggaugua

SEQ ID NO: 102911 - RNA, 16 nt, Human
cuggucuugcugccga

SEQ ID NO: 102912 - RNA, 22 nt, Human
cuggugaauggauaaacuguug

SEQ ID NO: 102913 - RNA, 22 nt, Human
cuggugagacucagggaugcuu

SEQ ID NO: 102914 - RNA, 22 nt, Human
cuggugauuacaaugaugacaa

SEQ ID NO: 102915 - RNA, 22 nt, Human
cuggugcacauucgcucucaua

SEQ ID NO: 102916 - RNA, 22 nt, Human
cuggugcuggagccuagucccu

SEQ ID NO: 102917 - RNA, 22 nt, Human
cugguggaagccugggcucaga

SEQ ID NO: 102918 - RNA, 22 nt, Human
cugguggaccagccuccccagc

SEQ ID NO: 102919 - RNA, 22 nt, Human
cugguggggaguccuggucucc

SEQ ID NO: 102920 - RNA, 22 nt, Human
cugguggguagagggcaucagg

SEQ ID NO: 102921 - RNA, 21 nt, Human
cugguguagcacucaggugcu

SEQ ID NO: 102922 - RNA, 22 nt, Human
cuggugucuacuacaugguuga

SEQ ID NO: 102923 - RNA, 22 nt, Human
cuggugucugcucccucacagc

SEQ ID NO: 102924 - RNA, 22 nt, Human
cugguguuguccgggugagagu

SEQ ID NO: 102925 - RNA, 22 nt, Human
cugguguuuaucugacugccua

SEQ ID NO: 102926 - RNA, 22 nt, Human
cugguuaaaugaaaaaguauua

SEQ ID NO: 102927 - RNA, 22 nt, Human
cugguucaauggggcugagccc

SEQ ID NO: 102928 - RNA, 22 nt, Human
cugguucagugaaaggcauggg

SEQ ID NO: 102929 - RNA, 22 nt, Human
cugguuggugccacaugguggc

SEQ ID NO: 102930 - RNA, 22 nt, Human
cugguuuacccaagauuugcug

SEQ ID NO: 102931 - RNA, 22 nt, Human
cugguuuagugaaauaggccag

SEQ ID NO: 102932 - RNA, 22 nt, Human
cugguuuauaaaucuguggcca

SEQ ID NO: 102933 - RNA, 22 nt, Human
cugguuuaugagggaagggaug

SEQ ID NO: 102934 - RNA, 17 nt, Human
cugguuuaugggcagug

SEQ ID NO: 102935 - RNA, 22 nt, Human
cugguuuuauguuauagaugga

SEQ ID NO: 102936 - RNA, 22 nt, Human
cugguuuuccaauguuuugacu

SEQ ID NO: 102937 - RNA, 22 nt, Human
cuguaaaacacuguaguaucug

SEQ ID NO: 102938 - RNA, 22 nt, Human
cuguaaaacugcuuaaguaugc

SEQ ID NO: 102939 - RNA, 22 nt, Human
cuguaaacuucuggaggucaag

SEQ ID NO: 102940 - RNA, 22 nt, Human
cuguaaagaucacagagcuggu

SEQ ID NO: 102941 - RNA, 22 nt, Human
cuguaaauggaacuauguagua

SEQ ID NO: 102942 - RNA, 22 nt, Human
cuguaauucacuagggucagcg

SEQ ID NO: 102943 - RNA, 22 nt, Human
cuguacaaaguagcugcuggga

SEQ ID NO: 102944 - RNA, 22 nt, Human
cuguacaaauggcaguugaguu

SEQ ID NO: 102945 - RNA, 22 nt, Human
cuguacaaguccuucaucaggg

SEQ ID NO: 102946 - RNA, 22 nt, Human
cuguacagaagcuagagcaaau

SEQ ID NO: 102947 - RNA, 22 nt, Human
cuguacagauugcacacgggga

SEQ ID NO: 102948 - RNA, 22 nt, Human
cuguacagcaaguucaccuugg

SEQ ID NO: 102949 - RNA, 22 nt, Human
cuguacauaugucuccagagug

SEQ ID NO: 102950 - RNA, 20 nt, Human
cuguacaucaccaaggugac

SEQ ID NO: 102951 - RNA, 22 nt, Human
cuguacaucccgagagccagua

SEQ ID NO: 102952 - RNA, 22 nt, Human
cuguggguggcugugccccagg

SEQ ID NO: 102953 - RNA, 22 nt, Human
cuguggucacuguuggggaaug

SEQ ID NO: 102954 - RNA, 22 nt, Human
cugugguggcacagcgggcugg

SEQ ID NO: 102955 - RNA, 22 nt, Human
cuguguaugacuccagagggua

SEQ ID NO: 102956 - RNA, 22 nt, Human
cugugucacucacugcguuaug

SEQ ID NO: 102957 - RNA, 22 nt, Human
cugugucccagccaggauaaug

SEQ ID NO: 102958 - RNA, 22 nt, Human
cuuuccaggcugaguuugcuug

SEQ ID NO: 102959 - RNA, 22 nt, Human
cuuuccaguuucuaaguacagu

SEQ ID NO: 102960 - RNA, 22 nt, Human
cuuucccagaguaguugaugcu

SEQ ID NO: 102961 - RNA, 22 nt, Human
cuuuccccaagcaccacagugc

SEQ ID NO: 102962 - RNA, 22 nt, Human
cuuuccucuggcacugucuggu

SEQ ID NO: 102963 - RNA, 22 nt, Human
cuuucuaguaggaaguagauca

SEQ ID NO: 102964 - RNA, 22 nt, Human
cuuucucaguguuaauuacuuu

SEQ ID NO: 102965 - RNA, 22 nt, Human
cuuucucuuacccaaggaucug

SEQ ID NO: 102966 - RNA, 22 nt, Human
cuuucucuugagcaagagcugu

SEQ ID NO: 102967 - RNA, 22 nt, Human
cuuucugaggagacgggcuuug

SEQ ID NO: 102968 - RNA, 22 nt, Human
cuuucugauguaaggaacuagg

SEQ ID NO: 102969 - RNA, 22 nt, Human
cuuucuggacaagacagaggga

SEQ ID NO: 102970 - RNA, 22 nt, Human
cuuucuggcacagccgcgggau

SEQ ID NO: 102971 - RNA, 22 nt, Human
cuuucuucaaccucauucugca

SEQ ID NO: 102972 - RNA, 22 nt, Human
cuuucuucaagcuggucucaau

SEQ ID NO: 102973 - RNA, 22 nt, Human
cuuucuucaucaagugccacgu

SEQ ID NO: 102974 - RNA, 22 nt, Human
cuuucuugcauaauuugaaacc

SEQ ID NO: 102975 - RNA, 22 nt, Human
cuuucuugguccugaagauggc

SEQ ID NO: 102976 - RNA, 22 nt, Human
cuuugaaaacacacgaauagac

SEQ ID NO: 102977 - RNA, 22 nt, Human
cuuugaaaccugcucugcagaa

SEQ ID NO: 102978 - RNA, 22 nt, Human
cuuugaauugccguuucaucug

SEQ ID NO: 102979 - RNA, 22 nt, Human
cuuugacuuuguccucaggaaa

SEQ ID NO: 102980 - RNA, 22 nt, Human
cuuugauauaaguauacauagu

SEQ ID NO: 102981 - RNA, 22 nt, Human
cuuugauucagacuuugucggc

SEQ ID NO: 102982 - RNA, 22 nt, Human
cuuugcaaaaguuaauuguuga

SEQ ID NO: 102983 - RNA, 22 nt, Human
cuuugcaagggauuucaugucu

SEQ ID NO: 102984 - RNA, 22 nt, Human
cuuugcaagugcuuuguagucc

SEQ ID NO: 102985 - RNA, 22 nt, Human
cuuugcagagggggugggagcu

SEQ ID NO: 102986 - RNA, 20 nt, Human
cuuugcaggagaacagagaa

SEQ ID NO: 102987 - RNA, 22 nt, Human
cuuugcaguauagccuaguaga

SEQ ID NO: 102988 - RNA, 22 nt, Human
cuuugcagugauuguucuugga

SEQ ID NO: 102989 - RNA, 22 nt, Human
cuuugcauacaauuuuuagaaa

SEQ ID NO: 102990 - RNA, 22 nt, Human
ggaugcccacuaucugcuggcu

SEQ ID NO: 102991 - RNA, 22 nt, Human
ggaugcugauuccagucuccag

SEQ ID NO: 102992 - RNA, 22 nt, Human
ggaugcugggagacagcaggca

SEQ ID NO: 102993 - RNA, 22 nt, Human
ggaugcugucuaagcugaggac

SEQ ID NO: 102994 - RNA, 22 nt, Human
ggauggagaugaccauggugac

SEQ ID NO: 102995 - RNA, 23 nt, Human
ggauggagccacuuugaaaccac

SEQ ID NO: 102996 - RNA, 22 nt, Human
ggaugucucccagcaccaaagu

SEQ ID NO: 102997 - RNA, 22 nt, Human
ggauguucugggguucucuugu

SEQ ID NO: 102998 - RNA, 22 nt, Human
ggauguuuauccuaucuuaguu

SEQ ID NO: 102999 - RNA, 22 nt, Human
ggauguuuggcguuugaauugc

SEQ ID NO: 103000 - RNA, 22 nt, Human
ggauucuaacugaacagaauau

SEQ ID NO: 103001 - RNA, 19 nt, Human
ggauucugcaguuuucaca

SEQ ID NO: 103002 - RNA, 22 nt, Human
ggauuuacaaguuuaacucuca

SEQ ID NO: 103003 - RNA, 22 nt, Human
ggauuuacacaccugccuguca

SEQ ID NO: 103004 - RNA, 20 nt, Human
ggauuuacaggggaaaagug

SEQ ID NO: 103005 - RNA, 23 nt, Human
ggauuuaguggaugagcugagug

SEQ ID NO: 103006 - RNA, 22 nt, Human
ggauuuccucuugacucuaaag

SEQ ID NO: 103007 - RNA, 22 nt, Human
ggcaaaaacagcaaugacuuuu

SEQ ID NO: 103008 - RNA, 22 nt, Human
ggcaaacagacuugaccaucuu

SEQ ID NO: 103009 - RNA, 22 nt, Human
ggcaaacaggagaguaaagaga

SEQ ID NO: 103010 - RNA, 22 nt, Human
ggcaaagccuuacucuaacuga

SEQ ID NO: 103011 - RNA, 22 nt, Human
ggcaaagcugggauucaaaccc

SEQ ID NO: 103012 - RNA, 22 nt, Human
ggcaaaggaaaacgucucagcu

SEQ ID NO: 103013 - RNA, 22 nt, Human
ggcaaaguuuucaucucauaac

SEQ ID NO: 103014 - RNA, 21 nt, Human
ggcaagaaacacaaucaagua

SEQ ID NO: 103015 - RNA, 22 nt, Human
ggcaagaaggcuucagguagcu

SEQ ID NO: 103016 - RNA, 22 nt, Human
ggcaagagguccaagaggucuc

SEQ ID NO: 103017 - RNA, 22 nt, Human
ggcaagaguugaagcuccagga

SEQ ID NO: 103018 - RNA, 22 nt, Human
ggcaagauccaaggggcuagga

SEQ ID NO: 103019 - RNA, 19 nt, Human
ggcaagcacaaaagcuuug

SEQ ID NO: 103020 - RNA, 22 nt, Human
ggcaagugugagaagggacugg

SEQ ID NO: 103021 - RNA, 22 nt, Human
ggcaauaaaugacuucugcauu

SEQ ID NO: 103022 - RNA, 20 nt, Human
ggcaaugccagaugacagga

SEQ ID NO: 103023 - RNA, 22 nt, Human
ggcacaaguuugaugugaguua

SEQ ID NO: 103024 - RNA, 22 nt, Human
ggcacacauggugguuggugaa

SEQ ID NO: 103025 - RNA, 22 nt, Human
ggcacacucacuucugcccuga

SEQ ID NO: 103026 - RNA, 22 nt, Human
ggcacagagcccagcuuccuag

SEQ ID NO: 103027 - RNA, 22 nt, Human
ggcacagagguugccuccagau

SEQ ID NO: 103028 - RNA, 22 nt, Human
ggcacagauagaucaagugucu

SEQ ID NO: 103029 - RNA, 23 nt, Human
ggcacagaugcugagcaugugca

SEQ ID NO: 103030 - RNA, 22 nt, Human
ggcacaggagcuagucaaagcc

SEQ ID NO: 103031 - RNA, 22 nt, Human
ggcacagggagaggcggauuuu

SEQ ID NO: 103032 - RNA, 22 nt, Human
ggcacagggaggcccuggugug

SEQ ID NO: 103033 - RNA, 22 nt, Human
ggcacagugauuaagagccagu

SEQ ID NO: 103034 - RNA, 22 nt, Human
ggcacauggagacuuggcauca

SEQ ID NO: 103035 - RNA, 22 nt, Human
ggcaccagcacuugggauggcu

SEQ ID NO: 103036 - RNA, 22 nt, Human
ggcaccagggacaauccucuuc

SEQ ID NO: 103037 - RNA, 22 nt, Human
ggcacccuuggggggccacagc

SEQ ID NO: 103038 - RNA, 22 nt, Human
ggcaccugaugacugcuucccu

SEQ ID NO: 103039 - RNA, 22 nt, Human
ggcaccuggagguuuacuggau

SEQ ID NO: 103040 - RNA, 22 nt, Human
ggcaccuggauguagcagugaa

SEQ ID NO: 103041 - RNA, 19 nt, Human
ggcaccuuggcuaugccug

SEQ ID NO: 103042 - RNA, 21 nt, Human
ggcacuaggcccggaggaagc

SEQ ID NO: 103043 - RNA, 22 nt, Human
ggcacugacacuagcauggcac

SEQ ID NO: 103044 - RNA, 22 nt, Human
ggcacugacugugcagcgcacc

SEQ ID NO: 103045 - RNA, 22 nt, Human
ggcacuggcaaagcaaagucug

SEQ ID NO: 103046 - RNA, 16 nt, Human
ggcacuggcagguccu

SEQ ID NO: 103047 - RNA, 22 nt, Human
ggcacuggccuggggccaagag

SEQ ID NO: 103048 - RNA, 22 nt, Human
ggcacugggagaggugagacgg

SEQ ID NO: 103049 - RNA, 19 nt, Human
ggcacuggggccaggacca

SEQ ID NO: 103050 - RNA, 22 nt, Human
ggcacuguguacacacagagac

SEQ ID NO: 103051 - RNA, 22 nt, Human
ggcacuuggaucuuaguugggg

SEQ ID NO: 103052 - RNA, 22 nt, Human
ggcacuuugccuuuaugcacug

SEQ ID NO: 103053 - RNA, 22 nt, Human
ggcagaagaaaggcuaagucuc

SEQ ID NO: 103054 - RNA, 22 nt, Human
ggcagaaggccucccagcuccu

SEQ ID NO: 103055 - RNA, 19 nt, Human
ggcagaagguguaggggga

SEQ ID NO: 103056 - RNA, 21 nt, Human
ggcagaaguagcauggacggg

SEQ ID NO: 103057 - RNA, 22 nt, Human
ggcagacacaaaaacauaaggu

SEQ ID NO: 103058 - RNA, 22 nt, Human
ggcagagaguucuccaccucuc

SEQ ID NO: 103059 - RNA, 22 nt, Human
ggcagagaugugggucagaauc

SEQ ID NO: 103060 - RNA, 22 nt, Human
ggcagagccuucuggagcucgc

SEQ ID NO: 103061 - RNA, 22 nt, Human
ggcagagcgcaugcgucgcaga

SEQ ID NO: 103062 - RNA, 22 nt, Human
ggcagagcuaguggcuucucuu

SEQ ID NO: 103063 - RNA, 20 nt, Human
ggcagagcuaugucuguugc

SEQ ID NO: 103064 - RNA, 21 nt, Human
ggcagagcuggggccuccagc

SEQ ID NO: 103065 - RNA, 22 nt, Human
ggcagaggaaggaugaauucac

SEQ ID NO: 103066 - RNA, 22 nt, Human
ggcagaggaggggugaauuugc

SEQ ID NO: 103067 - RNA, 22 nt, Human
gacccuuugacuugugacauua

SEQ ID NO: 103068 - RNA, 22 nt, Human
gacccuuuggagguagucacca

SEQ ID NO: 103069 - RNA, 22 nt, Human
gaccuagauuaacauucuguga

SEQ ID NO: 103070 - RNA, 22 nt, Human
gaccucaggcuucuguaauuaa

SEQ ID NO: 103071 - RNA, 22 nt, Human
gaccucagguuuguaauggaca

SEQ ID NO: 103072 - RNA, 22 nt, Human
gaccuccauucugucaugacug

SEQ ID NO: 103073 - RNA, 22 nt, Human
gaccucuugcacccuggcucuu

SEQ ID NO: 103074 - RNA, 22 nt, Human
gaccugaaagagauuaaaugac

SEQ ID NO: 103075 - RNA, 22 nt, Human
gaccugaaauuugugguagaac

SEQ ID NO: 103076 - RNA, 22 nt, Human
gaccugcuccacgacaaguggu

SEQ ID NO: 103077 - RNA, 22 nt, Human
gaccuggaagaugguccucacc

SEQ ID NO: 103078 - RNA, 22 nt, Human
gaccuggaggcuuuucccaaga

SEQ ID NO: 103079 - RNA, 22 nt, Human
gaccuggccugcacagcccuua

SEQ ID NO: 103080 - RNA, 22 nt, Human
gaccuggguaaggggcugacaa

SEQ ID NO: 103081 - RNA, 22 nt, Human
gaccugguccuuguacuuugaa

SEQ ID NO: 103082 - RNA, 22 nt, Human
gaccuucaagcaccauauuuau

SEQ ID NO: 103083 - RNA, 22 nt, Human
gaccuucuguuggaggcauuua

SEQ ID NO: 103084 - RNA, 22 nt, Human
gaccuugugauccagccaccuu

SEQ ID NO: 103085 - RNA, 22 nt, Human
gaccuugugcuccgaggcgggc

SEQ ID NO: 103086 - RNA, 22 nt, Human
gaccuuuuuacuguguacgcug

SEQ ID NO: 103087 - RNA, 22 nt, Human
gacggagcugguugcugcggcu

SEQ ID NO: 103088 - RNA, 19 nt, Human
gacuaaauaauaauagcag

SEQ ID NO: 103089 - RNA, 22 nt, Human
gacuaaaugcuuugugcaugca

SEQ ID NO: 103090 - RNA, 22 nt, Human
gacuaacagucuccgcuugaaa

SEQ ID NO: 103091 - RNA, 22 nt, Human
gacuacagauagccaauuaagu

SEQ ID NO: 103092 - RNA, 22 nt, Human
gacuacaggugugugccaccau

SEQ ID NO: 103093 - RNA, 22 nt, Human
gacuagaagggcaagagucccu

SEQ ID NO: 103094 - RNA, 22 nt, Human
gacuagucauuugcauuccguc

SEQ ID NO: 103095 - RNA, 22 nt, Human
gacuauuuuuaucuaacugggu

SEQ ID NO: 103096 - RNA, 19 nt, Human
gacucacaccuuccgcugu

SEQ ID NO: 103097 - RNA, 22 nt, Human
gacucagauuuagaggguaaga

SEQ ID NO: 103098 - RNA, 22 nt, Human
gacuccagguguccaggccucc

SEQ ID NO: 103099 - RNA, 22 nt, Human
gacuccccugggccccauccag

SEQ ID NO: 103100 - RNA, 22 nt, Human
gacuccucucuaacccacugga

SEQ ID NO: 103101 - RNA, 22 nt, Human
gacuccugggccucugagaggc

SEQ ID NO: 103102 - RNA, 22 nt, Human
gacucguucauaguuccaauuu

SEQ ID NO: 103103 - RNA, 22 nt, Human
gacucugcuaggaaaaucucag

SEQ ID NO: 103104 - RNA, 22 nt, Human
gacucugugggaggaggcucag

SEQ ID NO: 103105 - RNA, 22 nt, Human
gacugaacaguaagaggcuuua

SEQ ID NO: 103106 - RNA, 22 nt, Human
gacugaaggucucagcauguga

SEQ ID NO: 103107 - RNA, 22 nt, Human
gaagauuaaauggcucccauau

SEQ ID NO: 103108 - RNA, 22 nt, Human
gaagauuaccugagaccacuug

SEQ ID NO: 103109 - RNA, 22 nt, Human
gaagauuucaguuaaguaucua

SEQ ID NO: 103110 - RNA, 22 nt, Human
gaagauuugaaacacauagaca

SEQ ID NO: 103111 - RNA, 22 nt, Human
gaagauuuggauuccaugucac

SEQ ID NO: 103112 - RNA, 22 nt, Human
gaagcaaaaugucugcacauau

SEQ ID NO: 103113 - RNA, 22 nt, Human
gaagcacagauaauucaaguau

SEQ ID NO: 103114 - RNA, 22 nt, Human
gaagcacugccauaauucagac

SEQ ID NO: 103115 - RNA, 22 nt, Human
gaagcagaaguacgauuuacua

SEQ ID NO: 103116 - RNA, 16 nt, Human
gaagcagaggguguug

SEQ ID NO: 103117 - RNA, 22 nt, Human
gaagcagcaaaucugcaguauc

SEQ ID NO: 103118 - RNA, 22 nt, Human
gaagcagcuggugagauggagc

SEQ ID NO: 103119 - RNA, 22 nt, Human
gaagcaguagauuccuacucau

SEQ ID NO: 103120 - RNA, 22 nt, Human
gaagcaguuucuguaaugaaau

SEQ ID NO: 103121 - RNA, 18 nt, Human
gaagcauauuuguucuuc

SEQ ID NO: 103122 - RNA, 22 nt, Human
gaagcaugcuaaggauucucag

SEQ ID NO: 103123 - RNA, 22 nt, Human
gaagccaacauuccaaguagaa

SEQ ID NO: 103124 - RNA, 22 nt, Human
gaagccacagagauuguggggg

SEQ ID NO: 103125 - RNA, 22 nt, Human
gaagccacguuaaauuggcugu

SEQ ID NO: 103126 - RNA, 22 nt, Human
gaagccagauuuggggcauauc

SEQ ID NO: 103127 - RNA, 22 nt, Human
gaagccaguacugugcucugca

SEQ ID NO: 103128 - RNA, 22 nt, Human
gaagccaucuuuguuccccacc

SEQ ID NO: 103129 - RNA, 22 nt, Human
gaagcccuaauacacaguaccu

SEQ ID NO: 103130 - RNA, 22 nt, Human
gaagcccuauccucuccuggga

SEQ ID NO: 103131 - RNA, 19 nt, Human
gaagcccugcauucuccgc

SEQ ID NO: 103132 - RNA, 22 nt, Human
gaagcccuggggucagugucgu

SEQ ID NO: 103133 - RNA, 22 nt, Human
gaagcccuguaggugcaaaggu

SEQ ID NO: 103134 - RNA, 22 nt, Human
gaagccugguucgcuggccacc

SEQ ID NO: 103135 - RNA, 22 nt, Human
gaagcggcaucaggaggcugcc

SEQ ID NO: 103136 - RNA, 22 nt, Human
gaagcuaaaagagaugugguuu

SEQ ID NO: 103137 - RNA, 22 nt, Human
gaagcuaaugauuuauuuucug

SEQ ID NO: 103138 - RNA, 22 nt, Human
gaagcugagcugaggcauguug

SEQ ID NO: 103139 - RNA, 22 nt, Human
gaagcuggggugcugagggcaa

SEQ ID NO: 103140 - RNA, 22 nt, Human
gaagcugggucgcugggauccu

SEQ ID NO: 103141 - RNA, 22 nt, Human
gaagcuguguugauggcaugga

SEQ ID NO: 103142 - RNA, 22 nt, Human
gaagcuuggauaacuguauggg

SEQ ID NO: 103143 - RNA, 22 nt, Human
gaagcuuuauugcaagugaggc

SEQ ID NO: 103144 - RNA, 22 nt, Human
gaagcuuugucuugucuccugg

SEQ ID NO: 103145 - RNA, 22 nt, Human
gaaggaaaucugugauuuaugc

SEQ ID NO: 103146 - RNA, 22 nt, Human
gaaggaagccguuucucuccag

SEQ ID NO: 103147 - RNA, 22 nt, Human
gaaggaaggaaaaauauauuua

SEQ ID NO: 103148 - RNA, 22 nt, Human
gaaggaagucauuagugcagac

SEQ ID NO: 103149 - RNA, 22 nt, Human
gaaggaaguuuauuuuagaaga

SEQ ID NO: 103150 - RNA, 16 nt, Human
gaaggagauucagaaa

SEQ ID NO: 103151 - RNA, 22 nt, Human
gaaggagcuaccaagacugaau

SEQ ID NO: 103152 - RNA, 22 nt, Human
gaaggagcuacuaauaagaggg

SEQ ID NO: 103153 - RNA, 22 nt, Human
gaaggagggugcggaucugagc

SEQ ID NO: 103154 - RNA, 22 nt, Human
gaaggcaagcagcauaaauguc

SEQ ID NO: 103155 - RNA, 22 nt, Human
gaaggcaagugagccaagagaa

SEQ ID NO: 103156 - RNA, 22 nt, Human
gaaggcaguaaauggcuguuuu

SEQ ID NO: 103157 - RNA, 22 nt, Human
gaaggcaucacagaggcugugg

SEQ ID NO: 103158 - RNA, 22 nt, Human
gaaggcauuuaggaacugcaau

SEQ ID NO: 103159 - RNA, 22 nt, Human
gaaggcauuucagagaucucug

SEQ ID NO: 103160 - RNA, 22 nt, Human
gaaggccaagaggcuccaagau

SEQ ID NO: 103161 - RNA, 22 nt, Human
gaaggccacuuuguguugagaa

SEQ ID NO: 103162 - RNA, 22 nt, Human
gaaggccauuuuuagguagaau

SEQ ID NO: 103163 - RNA, 22 nt, Human
gaaggcccagcuugaaugcugc

SEQ ID NO: 103164 - RNA, 22 nt, Human
gaaggcuacuucuccucagggc

SEQ ID NO: 103165 - RNA, 22 nt, Human
gaaggcuagaaacgaugcuuau

SEQ ID NO: 103166 - RNA, 22 nt, Human
gaaggcuauaugacucagcccu

SEQ ID NO: 103167 - RNA, 22 nt, Human
gaaggcugaguggguacggagg

SEQ ID NO: 103168 - RNA, 22 nt, Human
gaaggcugcauggaggcugugg

SEQ ID NO: 103169 - RNA, 22 nt, Human
gaaggcugcgaggggagugccg

SEQ ID NO: 103170 - RNA, 22 nt, Human
gaaggcugcugggaaguguggu

SEQ ID NO: 103171 - RNA, 22 nt, Human
gaaggcuguaggcaaaguagga

SEQ ID NO: 103172 - RNA, 22 nt, Human
gaaggcuguuucugguagugau

SEQ ID NO: 103173 - RNA, 22 nt, Human
gaaggcuuccugaugccaacca

SEQ ID NO: 103174 - RNA, 22 nt, Human
gaaggcuuccuggaggaggugg

SEQ ID NO: 103175 - RNA, 22 nt, Human
gaaggcuucuccagggcuuacu

SEQ ID NO: 103176 - RNA, 22 nt, Human
gaggaaccaaucugugauauuc

SEQ ID NO: 103177 - RNA, 20 nt, Human
gaggaaccacugggaggaga

SEQ ID NO: 103178 - RNA, 22 nt, Human
gaggaacccaagcucaccguca

SEQ ID NO: 103179 - RNA, 22 nt, Human
gaggaacuggagcuuucauuuu

SEQ ID NO: 103180 - RNA, 22 nt, Human
gaggaagccccauugaagccag

SEQ ID NO: 103181 - RNA, 22 nt, Human
gaggaagcuuuugaucgcccag

SEQ ID NO: 103182 - RNA, 22 nt, Human
gaggaaggcuaaggggcuuaga

SEQ ID NO: 103183 - RNA, 22 nt, Human
gaggacacaaaguggcugagau

SEQ ID NO: 103184 - RNA, 22 nt, Human
gaggacacggccuuuuggaaaa

SEQ ID NO: 103185 - RNA, 22 nt, Human
gaggacagcucuaacuaaaguc

SEQ ID NO: 103186 - RNA, 17 nt, Human
gaggacagggaaguagg

SEQ ID NO: 103187 - RNA, 22 nt, Human
gaggacauaguccagauggcaa

SEQ ID NO: 103188 - RNA, 22 nt, Human
gaggacgggcuucauggggccu

SEQ ID NO: 103189 - RNA, 22 nt, Human
gaggagacggggugccuggagc

SEQ ID NO: 103190 - RNA, 22 nt, Human
gaggagagaacauuccuccaua

SEQ ID NO: 103191 - RNA, 22 nt, Human
gaggagagggcugcgggcccac

SEQ ID NO: 103192 - RNA, 20 nt, Human
gaggagccaccuugagcugg

SEQ ID NO: 103193 - RNA, 22 nt, Human
gaggagcucugcuccauccuuc

SEQ ID NO: 103194 - RNA, 22 nt, Human
gaggagcugagccacguccugg

SEQ ID NO: 103195 - RNA, 22 nt, Human
gaggagcuggcugucgggaggc

SEQ ID NO: 103196 - RNA, 22 nt, Human
gaggagcugucaccgugacuca

SEQ ID NO: 103197 - RNA, 22 nt, Human
gaggagcugucuuugugaucuu

SEQ ID NO: 103198 - RNA, 22 nt, Human
gaggagcuugaggcuaggagcc

SEQ ID NO: 103199 - RNA, 22 nt, Human
gaggagcuugugagaagauguc

SEQ ID NO: 103200 - RNA, 22 nt, Human
gaggaggaaaggaguugaaaug

SEQ ID NO: 103201 - RNA, 22 nt, Human
gaggaggaaguucucuguaggc

SEQ ID NO: 103202 - RNA, 22 nt, Human
gaggaggcuaucagcaaucagg

SEQ ID NO: 103203 - RNA, 22 nt, Human
gaggaggcugaacaaugcccug

SEQ ID NO: 103204 - RNA, 19 nt, Human
gaggaggcuucagcuuucu

SEQ ID NO: 103205 - RNA, 22 nt, Human
gaggagggagaauuaggcuuaa

SEQ ID NO: 103206 - RNA, 22 nt, Human
gaggagggcaguuccucuuuua

SEQ ID NO: 103207 - RNA, 22 nt, Human
gaggagggccuggugucccuuc

SEQ ID NO: 103208 - RNA, 22 nt, Human
gaggagggcuuuguugauguua

SEQ ID NO: 103209 - RNA, 22 nt, Human
gaggaggggcacuugucuccua

SEQ ID NO: 103210 - RNA, 23 nt, Human
gaggagggucugacaaguguagc

SEQ ID NO: 103211 - RNA, 22 nt, Human
gaggaggucuccuccgcagggg

SEQ ID NO: 103212 - RNA, 22 nt, Human
gaggagguggagucaugcagag

SEQ ID NO: 103213 - RNA, 20 nt, Human
gaggagucuuguagaaaaug

SEQ ID NO: 103214 - RNA, 22 nt, Human
gaggagugccagccguggaguc

SEQ ID NO: 103215 - RNA, 22 nt, Human
gaggaguggguuagugcuuauu

SEQ ID NO: 103216 - RNA, 22 nt, Human
gaggaguguauuccacaccacu

SEQ ID NO: 103217 - RNA, 20 nt, Human
gaggaugcagacagagggca

SEQ ID NO: 103218 - RNA, 18 nt, Human
gaggauggaaggagaugc

SEQ ID NO: 103219 - RNA, 22 nt, Human
gaggauggaggcaguuagggcc

SEQ ID NO: 103220 - RNA, 22 nt, Human
gaggauggugagcaggacccag

SEQ ID NO: 103221 - RNA, 22 nt, Human
gaggauguaaaauagacaaaau

SEQ ID NO: 103222 - RNA, 22 nt, Human
gaggauuugauggcuuucuccc

SEQ ID NO: 103223 - RNA, 22 nt, Human
gaggcaaagcauguggcucagg

SEQ ID NO: 103224 - RNA, 22 nt, Human
gaggcaagcccagugggucuaa

SEQ ID NO: 103225 - RNA, 19 nt, Human
gaggcaaggaguuuaagcc

SEQ ID NO: 103226 - RNA, 22 nt, Human
gaggcacaguguuuggucagug

SEQ ID NO: 103227 - RNA, 18 nt, Human
gaggcacauaguuggggc

SEQ ID NO: 103228 - RNA, 22 nt, Human
gaggcacaucacuuggugcauu

SEQ ID NO: 103229 - RNA, 22 nt, Human
gaggcacugagagugggggaug

SEQ ID NO: 103230 - RNA, 22 nt, Human
gaggcacugcaguacagugacu

SEQ ID NO: 103231 - RNA, 22 nt, Human
gaggcagaggaagguggucucu

SEQ ID NO: 103232 - RNA, 22 nt, Human
gaggcagagguuguugcaguga

SEQ ID NO: 103233 - RNA, 22 nt, Human
gaggcagagucacaaagagucu

SEQ ID NO: 103234 - RNA, 22 nt, Human
gaggcagcucuucugaaugggg

SEQ ID NO: 103235 - RNA, 22 nt, Human
gaggcagcugaaggagugacag

SEQ ID NO: 103236 - RNA, 22 nt, Human
gaggcagcuggguccggucggg

SEQ ID NO: 103237 - RNA, 22 nt, Human
gaggcaguccaguggguaagaa

SEQ ID NO: 103238 - RNA, 22 nt, Human
gaggcaucugggcacagaagug

SEQ ID NO: 103239 - RNA, 22 nt, Human
gaggcaugcagagcuggagcag

SEQ ID NO: 103240 - RNA, 22 nt, Human
gaggcauuaaagggaaucuucu

SEQ ID NO: 103241 - RNA, 22 nt, Human
gaggccacagucaguguucauc

SEQ ID NO: 103242 - RNA, 23 nt, Human
gaggccacauuccccugcuugag

SEQ ID NO: 103243 - RNA, 22 nt, Human
gaggccacgguuuuccuugggg

SEQ ID NO: 103244 - RNA, 22 nt, Human
gaggccagaagucugagaucag

SEQ ID NO: 103245 - RNA, 22 nt, Human
gaggccagaagugccucgggcu

SEQ ID NO: 103246 - RNA, 22 nt, Human
gaggccagaaugagcugaaugc

SEQ ID NO: 103247 - RNA, 22 nt, Human
gaggccagacugccuuuuauga

SEQ ID NO: 103248 - RNA, 22 nt, Human
gaggccagauacucucuucugc

SEQ ID NO: 103249 - RNA, 22 nt, Human
gaggccagaugucaugucuuau

SEQ ID NO: 103250 - RNA, 22 nt, Human
gaggccaugaauggauguuccu

SEQ ID NO: 103251 - RNA, 22 nt, Human
gaggcccaaggacucugucccg

SEQ ID NO: 103252 - RNA, 22 nt, Human
gaggcccaaugcuucccuccuu

SEQ ID NO: 103253 - RNA, 22 nt, Human
gaggcccagcagcgcaggucuu

SEQ ID NO: 103254 - RNA, 22 nt, Human
gaggcccaggguacaggccgcu

SEQ ID NO: 103255 - RNA, 22 nt, Human
gaggcccaguccugcaagcacg

SEQ ID NO: 103256 - RNA, 21 nt, Human
gaggcccaugggacaggggcu

SEQ ID NO: 103257 - RNA, 22 nt, Human
gaggccucaggaaugucgugug

SEQ ID NO: 103258 - RNA, 22 nt, Human
gaggccucuucuuuguuaaccu

SEQ ID NO: 103259 - RNA, 22 nt, Human
gaggccugaaaggggaccuaug

SEQ ID NO: 103260 - RNA, 22 nt, Human
gaggguccuggcuaagucugac

SEQ ID NO: 103261 - RNA, 22 nt, Human
gagggugacaguucuggucucu

SEQ ID NO: 103262 - RNA, 22 nt, Human
gaggguggaagagcugcugaga

SEQ ID NO: 103263 - RNA, 22 nt, Human
gaggguggagcuccagaaucug

SEQ ID NO: 103264 - RNA, 22 nt, Human
gaggguggggaauagacugcua

SEQ ID NO: 103265 - RNA, 22 nt, Human
gagggugugaacacuggcugug

SEQ ID NO: 103266 - RNA, 22 nt, Human
gagguaacaacugaaaugagaa

SEQ ID NO: 103267 - RNA, 22 nt, Human
gagguagccacagauagagacu

SEQ ID NO: 103268 - RNA, 22 nt, Human
gagguauuggccauugucuguu

SEQ ID NO: 103269 - RNA, 22 nt, Human
gaggucaggugaggaauuaaga

SEQ ID NO: 103270 - RNA, 22 nt, Human
gaggucaucaccaauauaugcc

SEQ ID NO: 103271 - RNA, 22 nt, Human
gaggucaucuguuuugguuacu

SEQ ID NO: 103272 - RNA, 22 nt, Human
gagguccacugaggcaacaggg

SEQ ID NO: 103273 - RNA, 22 nt, Human
gagguccucucggaaccccuuu

SEQ ID NO: 103274 - RNA, 22 nt, Human
gagguccugucugagaauggag

SEQ ID NO: 103275 - RNA, 22 nt, Human
gaggucucacuauguugcccag

SEQ ID NO: 103276 - RNA, 22 nt, Human
gaggucuggaccaagucgcccc

SEQ ID NO: 103277 - RNA, 22 nt, Human
gaggucugggcuugggccuggu

SEQ ID NO: 103278 - RNA, 22 nt, Human
gaggucuucacaaagaacagca

SEQ ID NO: 103279 - RNA, 22 nt, Human
gaggugaaaguuauucauuuau

SEQ ID NO: 103280 - RNA, 22 nt, Human
gaggugccuggcgaugucucug

SEQ ID NO: 103281 - RNA, 22 nt, Human
gagguggauguugcagugagcu

SEQ ID NO: 103282 - RNA, 22 nt, Human
gagguggcagaggccuggaccu

SEQ ID NO: 103283 - RNA, 22 nt, Human
gagguggccucaagcagucuuc

SEQ ID NO: 103284 - RNA, 22 nt, Human
gagguggcugcuugcugggaaa

SEQ ID NO: 103285 - RNA, 22 nt, Human
gaguugaacauaugcaaucucu

SEQ ID NO: 103286 - RNA, 22 nt, Human
gaguugccucuaagucccuggu

SEQ ID NO: 103287 - RNA, 22 nt, Human
gaguuuaaucauuguucuaucc

SEQ ID NO: 103288 - RNA, 22 nt, Human
gaguuuaguggaauuuccuucu

SEQ ID NO: 103289 - RNA, 22 nt, Human
gaguuuaugucuuucauuguuc

SEQ ID NO: 103290 - RNA, 22 nt, Human
gaguuuccaaaucccugaaggg

SEQ ID NO: 103291 - RNA, 22 nt, Human
gaguuucuucauggugcagagg

SEQ ID NO: 103292 - RNA, 22 nt, Human
gaguuuguaaacuauucacuaa

SEQ ID NO: 103293 - RNA, 22 nt, Human
gauaaaagaggaaauuuguuca

SEQ ID NO: 103294 - RNA, 22 nt, Human
gauaaacacaaggugauuucau

SEQ ID NO: 103295 - RNA, 22 nt, Human
gauaaacaugaaguucugugua

SEQ ID NO: 103296 - RNA, 22 nt, Human
gauaaacuggaaccauugccuc

SEQ ID NO: 103297 - RNA, 22 nt, Human
gauaaacuuguggaguuuuggu

SEQ ID NO: 103298 - RNA, 22 nt, Human
gauaaagcaaggaugacugaag

SEQ ID NO: 103299 - RNA, 22 nt, Human
gauaacaugguuaguguuuuua

SEQ ID NO: 103300 - RNA, 22 nt, Human
gauaacauuauaaguucacugu

SEQ ID NO: 103301 - RNA, 22 nt, Human
gauaacauuuguauagcgcuuu

SEQ ID NO: 103302 - RNA, 22 nt, Human
gauaagcuaacccaagcccuuu

SEQ ID NO: 103303 - RNA, 22 nt, Human
gauaauaagcacagcaggaugu

SEQ ID NO: 103304 - RNA, 22 nt, Human
gauaauguggauuuauugugau

SEQ ID NO: 103305 - RNA, 22 nt, Human
gauacaaauucaugucugaauu

SEQ ID NO: 103306 - RNA, 22 nt, Human
gauacacaaguggaaggagacg

SEQ ID NO: 103307 - RNA, 22 nt, Human
gauacacacccuugauaggacu

SEQ ID NO: 103308 - RNA, 20 nt, Human
gauacacagcuucacuguug

SEQ ID NO: 103309 - RNA, 22 nt, Human
gauacacuggagcuuccugaca

SEQ ID NO: 103310 - RNA, 22 nt, Human
gauacacuggccaaguggagga

SEQ ID NO: 103311 - RNA, 22 nt, Human
gauacauaaaaaugugcucuau

SEQ ID NO: 103312 - RNA, 22 nt, Human
gauaccagacagggagggagaa

SEQ ID NO: 103313 - RNA, 22 nt, Human
gauacuuuguggaauccuggau

SEQ ID NO: 103314 - RNA, 22 nt, Human
gauauacagagcauucuuugau

SEQ ID NO: 103315 - RNA, 22 nt, Human
gauauaguaauauuccugaacu

SEQ ID NO: 103316 - RNA, 18 nt, Human
gauauauaggaggaaagu

SEQ ID NO: 103317 - RNA, 22 nt, Human
gauauauguaaaaguagacaga

SEQ ID NO: 103318 - RNA, 22 nt, Human
gauaugcacauucaaaaauugc

SEQ ID NO: 103319 - RNA, 22 nt, Human
gauauucauaggcagguauuua

SEQ ID NO: 103320 - RNA, 22 nt, Human
gauauucuauguagaaugagcu

SEQ ID NO: 103321 - RNA, 19 nt, Human
gauauugcuugaguaacug

SEQ ID NO: 103322 - RNA, 22 nt, Human
gauauuuaacucucacaggucc

SEQ ID NO: 103323 - RNA, 22 nt, Human
gauauuuacauuaagcacauug

SEQ ID NO: 103324 - RNA, 22 nt, Human
gauauuuauuaagugguuggua

SEQ ID NO: 103325 - RNA, 22 nt, Human
gauauuuucagucuccuuucaa

SEQ ID NO: 103326 - RNA, 22 nt, Human
gauauuuuuaggugaugcaggc

SEQ ID NO: 103327 - RNA, 22 nt, Human
gauauuuuugcagacaccuggg

SEQ ID NO: 103328 - RNA, 22 nt, Human
gaucaaagccagugaggaguga

SEQ ID NO: 103329 - RNA, 22 nt, Human
gaucaggacauagcuauaggcu

SEQ ID NO: 103330 - RNA, 22 nt, Human
gaucaguaagugaauaaugagu

SEQ ID NO: 103331 - RNA, 22 nt, Human
gaucaguguuuugugcauucuu

SEQ ID NO: 103332 - RNA, 22 nt, Human
gaucaucuuuuccugcuuccag

SEQ ID NO: 103333 - RNA, 22 nt, Human
gaucauuagcuuuucaaaggag

SEQ ID NO: 103334 - RNA, 22 nt, Human
gauccacagggcccuggcccag

SEQ ID NO: 103335 - RNA, 21 nt, Human
gauccacugaccuggggaucc

SEQ ID NO: 103336 - RNA, 22 nt, Human
gauccagauauuugggcuggua

SEQ ID NO: 103337 - RNA, 22 nt, Human
gauccagcuucuacacagagcu

SEQ ID NO: 103338 - RNA, 22 nt, Human
gaucccugcccucagccuggac

SEQ ID NO: 103339 - RNA, 22 nt, Human
gaucccuugggccaaggaguug

SEQ ID NO: 103340 - RNA, 22 nt, Human
gauccguuccaccagucuuuau

SEQ ID NO: 103341 - RNA, 22 nt, Human
gauccguuuuaacaaugggagu

SEQ ID NO: 103342 - RNA, 22 nt, Human
gauccucuuuuccuaggaaggu

SEQ ID NO: 103343 - RNA, 22 nt, Human
gauccugggacugaaugggugc

SEQ ID NO: 103344 - RNA, 22 nt, Human
gauccugggcccuucuggguca

SEQ ID NO: 103345 - RNA, 22 nt, Human
gauccuguuagaaauguagacu

SEQ ID NO: 103346 - RNA, 22 nt, Human
gaucuagaccagaagcuguugu

SEQ ID NO: 103347 - RNA, 21 nt, Human
gaucuagacuugggcccagua

SEQ ID NO: 103348 - RNA, 22 nt, Human
gaucuauuuacucuuuuccuag

SEQ ID NO: 103349 - RNA, 22 nt, Human
gaucuccuggacgucuuguuaa

SEQ ID NO: 103350 - RNA, 21 nt, Human
gaucucuggaaggagaaagcu

SEQ ID NO: 103351 - RNA, 22 nt, Human
gaucugaagagcaaugaaauau

SEQ ID NO: 103352 - RNA, 22 nt, Human
gaucugaagauaugaaauauuu

SEQ ID NO: 103353 - RNA, 22 nt, Human
gaucugaaucaauagaauaacu

SEQ ID NO: 103354 - RNA, 22 nt, Human
gaucuguuugccuagagauuua

SEQ ID NO: 103355 - RNA, 22 nt, Human
gaucuguuuuuucuuagacagu

SEQ ID NO: 103356 - RNA, 22 nt, Human
gaucuucuauguaaugaagugu

SEQ ID NO: 103357 - RNA, 22 nt, Human
gaucuugaaauaucuuuuccua

SEQ ID NO: 103358 - RNA, 22 nt, Human
gaucuuuacuacugccuucucu

SEQ ID NO: 103359 - RNA, 22 nt, Human
gaucuuuagccaagacacacca

SEQ ID NO: 103360 - RNA, 22 nt, Human
gaucuuuauacuguaauaauga

SEQ ID NO: 103361 - RNA, 22 nt, Human
gaucuuugcaaacuuugucacu

SEQ ID NO: 103362 - RNA, 19 nt, Human
gaucuuugccaauuuaagc

SEQ ID NO: 103363 - RNA, 22 nt, Human
gaucuuuucagaauuuaucagu

SEQ ID NO: 103364 - RNA, 22 nt, Human
gaugaaaaaagacgagcauaua

SEQ ID NO: 103365 - RNA, 22 nt, Human
gaugaaaaucuugagaugucga

SEQ ID NO: 103366 - RNA, 22 nt, Human
gaugaaauccagaucacaggug

SEQ ID NO: 103367 - RNA, 22 nt, Human
gaugaaauucagaauugagggg

SEQ ID NO: 103368 - RNA, 22 nt, Human
gaugaaauuugaaaauaguguu

SEQ ID NO: 103369 - RNA, 22 nt, Human
gaugaagccccaguguaaguaa

SEQ ID NO: 103370 - RNA, 22 nt, Human
gaugaauucuggcuuggacaga

SEQ ID NO: 103371 - RNA, 22 nt, Human
gaugaauugaaaucauugggca

SEQ ID NO: 103372 - RNA, 22 nt, Human
gaugacacuugugagaaaucaa

SEQ ID NO: 103373 - RNA, 22 nt, Human
gaugagaaggcucagauccaaa

SEQ ID NO: 103374 - RNA, 22 nt, Human
gaugagaauguuuaucaaaugc

SEQ ID NO: 103375 - RNA, 22 nt, Human
gaugagacagaauagcccaagg

SEQ ID NO: 103376 - RNA, 22 nt, Human
gaugagcugucuagcuguugga

SEQ ID NO: 103377 - RNA, 22 nt, Human
gagcaggcaaagaugaaaggag

SEQ ID NO: 103378 - RNA, 22 nt, Human
gagcaggcauucuaguggcuga

SEQ ID NO: 103379 - RNA, 22 nt, Human
gagcaggccuggggugaggccu

SEQ ID NO: 103380 - RNA, 22 nt, Human
gagcagggagacaacucuggug

SEQ ID NO: 103381 - RNA, 22 nt, Human
gagcaggugccuguagcucucu

SEQ ID NO: 103382 - RNA, 22 nt, Human
gagcagguuucaaugcugaugc

SEQ ID NO: 103383 - RNA, 20 nt, Human
gagcaguggaguuuccaggg

SEQ ID NO: 103384 - RNA, 22 nt, Human
gagcaguggucugaucuucuaa

SEQ ID NO: 103385 - RNA, 22 nt, Human
gagcaguuuuauuucaugagac

SEQ ID NO: 103386 - RNA, 22 nt, Human
gagcaucacuguccucuccccg

SEQ ID NO: 103387 - RNA, 22 nt, Human
gagcaucucuauagugacugug

SEQ ID NO: 103388 - RNA, 22 nt, Human
gagcaucugugguccaucagaa

SEQ ID NO: 103389 - RNA, 22 nt, Human
gagcauggaucaugugcugggu

SEQ ID NO: 103390 - RNA, 18 nt, Human
gagcaugggcagugggga

SEQ ID NO: 103391 - RNA, 22 nt, Human
gagcaugguuccauagguuggu

SEQ ID NO: 103392 - RNA, 22 nt, Human
gagcauuuuugucugcauuuua

SEQ ID NO: 103393 - RNA, 22 nt, Human
gagccaagcaauauacccaacc

SEQ ID NO: 103394 - RNA, 22 nt, Human
aguggcagggacuucauauaaa

SEQ ID NO: 103395 - RNA, 22 nt, Human
aguggcagguguguaguauccc

SEQ ID NO: 103396 - RNA, 22 nt, Human
aguggcaguaacauuccacaau

SEQ ID NO: 103397 - RNA, 22 nt, Human
aguggcaguggcugggcagagc

SEQ ID NO: 103398 - RNA, 22 nt, Human
aguggccaauaugucaugcucu

SEQ ID NO: 103399 - RNA, 22 nt, Human
aguggcuagaucaugagugagc

SEQ ID NO: 103400 - RNA, 22 nt, Human
aguggcuaugcaugacuggaau

SEQ ID NO: 103401 - RNA, 22 nt, Human
aguggcucuugggucacugggc

SEQ ID NO: 103402 - RNA, 22 nt, Human
aguggcugacaacuggguuaac

SEQ ID NO: 103403 - RNA, 23 nt, Human
aguggcugagaguguuucauaug

SEQ ID NO: 103404 - RNA, 22 nt, Human
aguggcugauguaggcaguggg

SEQ ID NO: 103405 - RNA, 22 nt, Human
aguggcuggcauaggaacagac

SEQ ID NO: 103406 - RNA, 22 nt, Human
aguggcugugaaauacauggga

SEQ ID NO: 103407 - RNA, 22 nt, Human
aguggcuuccuucauaagcuuu

SEQ ID NO: 103408 - RNA, 22 nt, Human
agugggaauuucagugcuaaaa

SEQ ID NO: 103409 - RNA, 20 nt, Human
agugggagagggcagacugc

SEQ ID NO: 103410 - RNA, 22 nt, Human
agugggagccagcagcuugggg

SEQ ID NO: 103411 - RNA, 22 nt, Human
agugggagcggcagucggggac

SEQ ID NO: 103412 - RNA, 22 nt, Human
agugggaggaaguggugauauu

SEQ ID NO: 103413 - RNA, 22 nt, Human
agugggaggcggcugacgggcg

SEQ ID NO: 103414 - RNA, 22 nt, Human
agugggcagcccaggaggucuu

SEQ ID NO: 103415 - RNA, 22 nt, Human
agugggcaggcagggugcgcag

SEQ ID NO: 103416 - RNA, 23 nt, Human
agugggcucaguccuccaacccc

SEQ ID NO: 103417 - RNA, 22 nt, Human
agugggcuuuuuuccguuccau

SEQ ID NO: 103418 - RNA, 22 nt, Human
aguggggaagagcaugggcccu

SEQ ID NO: 103419 - RNA, 22 nt, Human
aguggggacaaugagagcaggu

SEQ ID NO: 103420 - RNA, 20 nt, Human
aguggggagucaggagugcc

SEQ ID NO: 103421 - RNA, 22 nt, Human
aguggggccgcgguccugcccu

SEQ ID NO: 103422 - RNA, 22 nt, Human
agugggggcagagccucucucg

SEQ ID NO: 103423 - RNA, 22 nt, Human
agugggggcuggcucugucugu

SEQ ID NO: 103424 - RNA, 21 nt, Human
aguggggucucuguggaggcc

SEQ ID NO: 103425 - RNA, 22 nt, Human
aguggguacugggcaggcagag

SEQ ID NO: 103426 - RNA, 22 nt, Human
aguggguaggccucuggugccu

SEQ ID NO: 103427 - RNA, 22 nt, Human
agugggucagagagcuccagau

SEQ ID NO: 103428 - RNA, 18 nt, Human
aguggucuguuauaucau

SEQ ID NO: 103429 - RNA, 21 nt, Human
aguggucuuuuucacccagug

SEQ ID NO: 103430 - RNA, 22 nt, Human
aguggugccauuaaaaucauug

SEQ ID NO: 103431 - RNA, 22 nt, Human
aguggugccggguggguuuugc

SEQ ID NO: 103432 - RNA, 22 nt, Human
aguguaaacuuaagagaauauc

SEQ ID NO: 103433 - RNA, 22 nt, Human
aguguagaaggagaaauggauc

SEQ ID NO: 103434 - RNA, 21 nt, Human
aguguaggucauuagcuguug

SEQ ID NO: 103435 - RNA, 22 nt, Human
aguguaucuagguaucuauagu

SEQ ID NO: 103436 - RNA, 20 nt, Human
aguguaugaacagaugcggg

SEQ ID NO: 103437 - RNA, 20 nt, Human
aguguaugaaucuggauggg

SEQ ID NO: 103438 - RNA, 22 nt, Human
aguguaugcagguuuucaaugu

SEQ ID NO: 103439 - RNA, 22 nt, Human
aguguaugucaaguauauacac

SEQ ID NO: 103440 - RNA, 22 nt, Human
aguguauuaucagaaacugugg

SEQ ID NO: 103441 - RNA, 22 nt, Human
aguguauucugcaugggagacu

SEQ ID NO: 103442 - RNA, 22 nt, Human
agugucaacucggaauaaggau

SEQ ID NO: 103443 - RNA, 22 nt, Human
agugucagccugggcaaggaac

SEQ ID NO: 103444 - RNA, 17 nt, Human
agugucagggcccuucc

SEQ ID NO: 103445 - RNA, 22 nt, Human
agugucaguugccuugucauaa

SEQ ID NO: 103446 - RNA, 22 nt, Human
agugucauuuccacgacauuca

SEQ ID NO: 103447 - RNA, 22 nt, Human
aguguccccuacagaggcauuc

SEQ ID NO: 103448 - RNA, 22 nt, Human
aguguccucaucuguaaaauga

SEQ ID NO: 103449 - RNA, 22 nt, Human
aguguccuuaguuagcuuuggg

SEQ ID NO: 103450 - RNA, 21 nt, Human
aguguccuuuuacugugaaua

SEQ ID NO: 103451 - RNA, 22 nt, Human
agugucuaaacuggcuuccugg

SEQ ID NO: 103452 - RNA, 22 nt, Human
agugucugcagugaugucucuu

SEQ ID NO: 103453 - RNA, 22 nt, Human
agugucugcuagguucaucaac

SEQ ID NO: 103454 - RNA, 22 nt, Human
agugucugcuuugagucaggug

SEQ ID NO: 103455 - RNA, 22 nt, Human
agugucuggaggcauucuuggu

SEQ ID NO: 103456 - RNA, 22 nt, Human
agugucuggucucugaacuaaa

SEQ ID NO: 103457 - RNA, 20 nt, Human
agugucuggugcagggccuc

SEQ ID NO: 103458 - RNA, 22 nt, Human
agugucuguugaguuucaaaag

SEQ ID NO: 103459 - RNA, 22 nt, Human
agugucuuaguccauuugggcu

SEQ ID NO: 103460 - RNA, 22 nt, Human
agugucuuucucucuccaagug

SEQ ID NO: 103461 - RNA, 22 nt, Human
agugucuuugacacauucaaag

SEQ ID NO: 103462 - RNA, 22 nt, Human
agugugacaaaucuauggcuca

SEQ ID NO: 103463 - RNA, 22 nt, Human
agugugaccuuauuuggaaaca

SEQ ID NO: 103464 - RNA, 19 nt, Human
agugugagacuccaucuca

SEQ ID NO: 103465 - RNA, 22 nt, Human
agugugcauuccucuccucagg

SEQ ID NO: 103466 - RNA, 22 nt, Human
agugugcuagcaagaacugggg

SEQ ID NO: 103467 - RNA, 22 nt, Human
agugugcuauugcaccaucaua

SEQ ID NO: 103468 - RNA, 22 nt, Human
aguguggaccuucacacagaga

SEQ ID NO: 103469 - RNA, 22 nt, Human
aguguggccaaugaggaugggc

SEQ ID NO: 103470 - RNA, 20 nt, Human
agugugguuuucaggaauau

SEQ ID NO: 103471 - RNA, 22 nt, Human
aguguguacucauauacuucca

SEQ ID NO: 103472 - RNA, 19 nt, Human
aguguguacugaaagcacu

SEQ ID NO: 103473 - RNA, 22 nt, Human
agugugucugaucacuugugag

SEQ ID NO: 103474 - RNA, 22 nt, Human
agugugugcaugcauucgugca

SEQ ID NO: 103475 - RNA, 22 nt, Human
aguguguuuggagcgagggagg

SEQ ID NO: 103476 - RNA, 22 nt, Human
aguguuaaggcugguugcuaua

SEQ ID NO: 103477 - RNA, 22 nt, Human
aguguuaguggcugcagcuggu

SEQ ID NO: 103478 - RNA, 22 nt, Human
aguguuauugaggcaaaacugu

SEQ ID NO: 103479 - RNA, 22 nt, Human
aguguucagugauugucaaccg

SEQ ID NO: 103480 - RNA, 20 nt, Human
aguguuccggaagacuggca

SEQ ID NO: 103481 - RNA, 22 nt, Human
aguguucucagcuacuagagag

SEQ ID NO: 103482 - RNA, 18 nt, Human
aguguucucguuuuauaa

SEQ ID NO: 103483 - RNA, 22 nt, Human
aguguucuuccuaucugcuguu

SEQ ID NO: 103484 - RNA, 22 nt, Human
aguguugcaugaggcaguacca

SEQ ID NO: 103485 - RNA, 22 nt, Human
aguguugucaaacggcucagca

SEQ ID NO: 103486 - RNA, 22 nt, Human
aguguuuaccccaaucaguuua

SEQ ID NO: 103487 - RNA, 22 nt, Human
aguguuuagcaugaaguucauu

SEQ ID NO: 103488 - RNA, 22 nt, Human
aguguuuagggaaucaaggggu

SEQ ID NO: 103489 - RNA, 22 nt, Human
agcuuguuaaacagccuccacu

SEQ ID NO: 103490 - RNA, 22 nt, Human
agcuuguuagaaauguagacuc

SEQ ID NO: 103491 - RNA, 21 nt, Human
agcuuguuauuaauucagaac

SEQ ID NO: 103492 - RNA, 22 nt, Human
agcuuguuuuguugaauacuua

SEQ ID NO: 103493 - RNA, 22 nt, Human
agcuuuaaaaauccaauaucca

SEQ ID NO: 103494 - RNA, 22 nt, Human
agcuuuaaagcauauuucuaag

SEQ ID NO: 103495 - RNA, 22 nt, Human
agcuuuaaaucaauccagugag

SEQ ID NO: 103496 - RNA, 23 nt, Human
agcuuuaacccuuucaggagcau

SEQ ID NO: 103497 - RNA, 22 nt, Human
agcuuuagagagccaagacuca

SEQ ID NO: 103498 - RNA, 22 nt, Human
agcuuuauauaaaagaguacau

SEQ ID NO: 103499 - RNA, 22 nt, Human
agcuuuaucccuugcccaucga

SEQ ID NO: 103500 - RNA, 22 nt, Human
agcuuuaugaggagaccuuagu

SEQ ID NO: 103501 - RNA, 22 nt, Human
agcuuuaugcuuccuacaagcu

SEQ ID NO: 103502 - RNA, 22 nt, Human
agcuuuaugggagcuuagauaa

SEQ ID NO: 103503 - RNA, 22 nt, Human
agcuuuauuugucauucacggc

SEQ ID NO: 103504 - RNA, 22 nt, Human
agcuuucacugauaugcuuuga

SEQ ID NO: 103505 - RNA, 22 nt, Human
agcuuucaggauaaugaaaaag

SEQ ID NO: 103506 - RNA, 22 nt, Human
agcuuucuaccagguccugucu

SEQ ID NO: 103507 - RNA, 22 nt, Human
agcuuucucccugacgcuuugg

SEQ ID NO: 103508 - RNA, 22 nt, Human
agcuuucuucuaguuguacagu

SEQ ID NO: 103509 - RNA, 22 nt, Human
agcuuugaaguauuuggucucc

SEQ ID NO: 103510 - RNA, 22 nt, Human
agcuuugaaugagugcauugca

SEQ ID NO: 103511 - RNA, 19 nt, Human
agcuuugccaaaaacuuag

SEQ ID NO: 103512 - RNA, 22 nt, Human
agcuuugcuucugggagccaag

SEQ ID NO: 103513 - RNA, 22 nt, Human
agcuuugcuucuuuuccauagc

SEQ ID NO: 103514 - RNA, 19 nt, Human
agcuuuggacuugcauuuc

SEQ ID NO: 103515 - RNA, 22 nt, Human
agcuuuggaugaucuuugauac

SEQ ID NO: 103516 - RNA, 22 nt, Human
agcuuuggcuguguugcucugu

SEQ ID NO: 103517 - RNA, 22 nt, Human
agcuuugggauucaggcaggaa

SEQ ID NO: 103518 - RNA, 22 nt, Human
agcuuugggcagaagaggauuc

SEQ ID NO: 103519 - RNA, 22 nt, Human
agcuuugggccacuggcuggau

SEQ ID NO: 103520 - RNA, 20 nt, Human
agcuuugguuaagccagugg

SEQ ID NO: 103521 - RNA, 22 nt, Human
agcuuugguugaggggagugug

SEQ ID NO: 103522 - RNA, 22 nt, Human
agcuuugucuucucacauaucc

SEQ ID NO: 103523 - RNA, 23 nt, Human
agcuuugugaaagcagacauggg

SEQ ID NO: 103524 - RNA, 20 nt, Human
aggaaaaauggaaacuggag

SEQ ID NO: 103525 - RNA, 20 nt, Human
aggaaaaggguggugguaga

SEQ ID NO: 103526 - RNA, 22 nt, Human
aggaaaaucgagucuggaggca

SEQ ID NO: 103527 - RNA, 22 nt, Human
aggaaaaugauauucugcuguu

SEQ ID NO: 103528 - RNA, 22 nt, Human
aggaaaauggaccagaguuguu

SEQ ID NO: 103529 - RNA, 22 nt, Human
aggaaaauuaucaugagagcca

SEQ ID NO: 103530 - RNA, 22 nt, Human
aggaaacagagugaagcuuggg

SEQ ID NO: 103531 - RNA, 22 nt, Human
aggaaacaggcagccuuugaac

SEQ ID NO: 103532 - RNA, 22 nt, Human
aggaaacaguugguaaugcaua

SEQ ID NO: 103533 - RNA, 17 nt, Human
aggaaacauuuucuuuc

SEQ ID NO: 103534 - RNA, 22 nt, Human
aggaaacuaaagcccagagagg

SEQ ID NO: 103535 - RNA, 22 nt, Human
aggaaacuaauuaguagaauaa

SEQ ID NO: 103536 - RNA, 22 nt, Human
aggaaacucaaagugucaggua

SEQ ID NO: 103537 - RNA, 22 nt, Human
aggaaacuccccuacaucucaa

SEQ ID NO: 103538 - RNA, 19 nt, Human
aggaaacugucuuuuccag

SEQ ID NO: 103539 - RNA, 22 nt, Human
aggaaacuucagaguuuugguc

SEQ ID NO: 103540 - RNA, 23 nt, Human
aggaaagcauucauuuuuaccau

SEQ ID NO: 103541 - RNA, 22 nt, Human
aggaaagccaaucucucuugac

SEQ ID NO: 103542 - RNA, 22 nt, Human
aggaaagcucccaguagggcuc

SEQ ID NO: 103543 - RNA, 22 nt, Human
aggaaagcuuggcaaacuaaau

SEQ ID NO: 103544 - RNA, 22 nt, Human
aggaaagguagcgugccagcag

SEQ ID NO: 103545 - RNA, 22 nt, Human
aggaaauaagggcacuucagau

SEQ ID NO: 103546 - RNA, 22 nt, Human
aggaaaugccgcggcucucuuu

SEQ ID NO: 103547 - RNA, 22 nt, Human
aggaaaugcugaugcuccugga

SEQ ID NO: 103548 - RNA, 22 nt, Human
aggaaaugggaauagaugguau

SEQ ID NO: 103549 - RNA, 22 nt, Human
aggaaauguacaaaugaagaug

SEQ ID NO: 103550 - RNA, 22 nt, Human
aggaaauguaguccucaucucc

SEQ ID NO: 103551 - RNA, 22 nt, Human
aggaaauuuugaaucagugucu

SEQ ID NO: 103552 - RNA, 22 nt, Human
aggaacaauugauaaacucaca

SEQ ID NO: 103553 - RNA, 22 nt, Human
aggaacacaagcuaugauccac

SEQ ID NO: 103554 - RNA, 22 nt, Human
aggaacacaaugcuucugugug

SEQ ID NO: 103555 - RNA, 22 nt, Human
aggaacacauggacauuucuga

SEQ ID NO: 103556 - RNA, 22 nt, Human
aggaacagaagagcaaugcagg

SEQ ID NO: 103557 - RNA, 22 nt, Human
aggaacaggccucguuuucuau

SEQ ID NO: 103558 - RNA, 22 nt, Human
aggaacccggucugucacugug

SEQ ID NO: 103559 - RNA, 22 nt, Human
aggaaccugagucugaucauuu

SEQ ID NO: 103560 - RNA, 22 nt, Human
aggaacuagugcaacaggagcg

SEQ ID NO: 103561 - RNA, 23 nt, Human
aggaacugaggccuagggaggua

SEQ ID NO: 103562 - RNA, 22 nt, Human
aggaacugauuuauaacuuuag

SEQ ID NO: 103563 - RNA, 22 nt, Human
aggaacuggauauaaugugaga

SEQ ID NO: 103564 - RNA, 22 nt, Human
aggaacugucauguauugcuca

SEQ ID NO: 103565 - RNA, 20 nt, Human
aggaacuuuguagaauacaa

SEQ ID NO: 103566 - RNA, 22 nt, Human
aggaagaaaacuaauuagaugg

SEQ ID NO: 103567 - RNA, 22 nt, Human
aggaagaaaccuacuagaguuu

SEQ ID NO: 103568 - RNA, 22 nt, Human
aggaagaaacugagcucugaca

SEQ ID NO: 103569 - RNA, 21 nt, Human
aggaagaaagguuggagguug

SEQ ID NO: 103570 - RNA, 22 nt, Human
aggaagagcuggaccagaggac

SEQ ID NO: 103571 - RNA, 22 nt, Human
aggaagagguagcugucaaggg

SEQ ID NO: 103572 - RNA, 22 nt, Human
aggaagaguguuaccuaugggu

SEQ ID NO: 103573 - RNA, 20 nt, Human
aggaagauccuuucuuuuaa

SEQ ID NO: 103574 - RNA, 22 nt, Human
aggaagaugugcaaaguuggaa

SEQ ID NO: 103575 - RNA, 22 nt, Human
aggaagcaccggaaugaugacu

SEQ ID NO: 103576 - RNA, 22 nt, Human
aggaagcacuggaagggguugg

SEQ ID NO: 103577 - RNA, 20 nt, Human
aggaagccaaaggcugucuu

SEQ ID NO: 103578 - RNA, 22 nt, Human
aggaagccaagccugacacuca

SEQ ID NO: 103579 - RNA, 22 nt, Human
aggaagccaugguggacgucua

SEQ ID NO: 103580 - RNA, 22 nt, Human
aggaagcccaagucucaucuuc

SEQ ID NO: 103581 - RNA, 22 nt, Human
aggaagccugcaggugacugcu

SEQ ID NO: 103582 - RNA, 22 nt, Human
aggaagccuggaguccugccca

SEQ ID NO: 103583 - RNA, 22 nt, Human
aggaagccuggggcugcccucg

SEQ ID NO: 103584 - RNA, 22 nt, Human
aggaagcuaaccagggagugag

SEQ ID NO: 103585 - RNA, 22 nt, Human
aggaagcuagaaggucuucuuu

SEQ ID NO: 103586 - RNA, 22 nt, Human
aggaagcucauuuugacauauc

SEQ ID NO: 103587 - RNA, 22 nt, Human
aggaagcuuggggcagggcuac

SEQ ID NO: 103588 - RNA, 22 nt, Human
aggaaggcugaucacugcuugu

SEQ ID NO: 103589 - RNA, 20 nt, Human
aggaaggcuguuggccuugc

SEQ ID NO: 103590 - RNA, 22 nt, Human
aggaagggugucaugagcccuu

SEQ ID NO: 103591 - RNA, 22 nt, Human
aggaaggguucuuucuguuuau

SEQ ID NO: 103592 - RNA, 22 nt, Human
aggaagugcagggggaaguacu

SEQ ID NO: 103593 - RNA, 22 nt, Human
aggaauaaccucauugcuuuuu

SEQ ID NO: 103594 - RNA, 22 nt, Human
aggaauaugagcugcugcagug

SEQ ID NO: 103595 - RNA, 22 nt, Human
aggaaucagaauucuuagaauu

SEQ ID NO: 103596 - RNA, 22 nt, Human
aggaaucaggagaugagcacgg

SEQ ID NO: 103597 - RNA, 22 nt, Human
aggaaugaacucgagugaucug

SEQ ID NO: 103598 - RNA, 22 nt, Human
aggaaugacagauguccgcacc

SEQ ID NO: 103599 - RNA, 19 nt, Human
aggaauggaauuaauucug

SEQ ID NO: 103600 - RNA, 22 nt, Human
aguguuuagugaugaaagagaa

SEQ ID NO: 103601 - RNA, 22 nt, Human
aguguuuaucagacaagcccug

SEQ ID NO: 103602 - RNA, 22 nt, Human
aguguuuauggaaucuuaguua

SEQ ID NO: 103603 - RNA, 22 nt, Human
aguguuucaccguauguucuca

SEQ ID NO: 103604 - RNA, 22 nt, Human
aguguuucccaguaggaugaaa

SEQ ID NO: 103605 - RNA, 22 nt, Human
aguguuuuauuucagcacuuug

SEQ ID NO: 103606 - RNA, 22 nt, Human
aguguuuugcuaauccuauuaa

SEQ ID NO: 103607 - RNA, 22 nt, Human
aguguuuuggagugggaaggca

SEQ ID NO: 103608 - RNA, 22 nt, Human
aguuaaacuugccuuuauuccu

SEQ ID NO: 103609 - RNA, 22 nt, Human
aguuaaaugucaguagcuuaac

SEQ ID NO: 103610 - RNA, 22 nt, Human
aguuaaauguguuagccagggu

SEQ ID NO: 103611 - RNA, 22 nt, Human
aguuaacauuugagcuaaaagg

SEQ ID NO: 103612 - RNA, 22 nt, Human
aggagguguugauagaagguuu

SEQ ID NO: 103613 - RNA, 22 nt, Human
aggagucacucagggcuucauc

SEQ ID NO: 103614 - RNA, 22 nt, Human
aggaguccucaugucugugcga

SEQ ID NO: 103615 - RNA, 22 nt, Human
aggagucuguugaaaugucuau

SEQ ID NO: 103616 - RNA, 22 nt, Human
aggagugcaaauaguccagaga

SEQ ID NO: 103617 - RNA, 22 nt, Human
aggagugugaagagccuagauc

SEQ ID NO: 103618 - RNA, 21 nt, Human
aggaguugagugcacaguugg

SEQ ID NO: 103619 - RNA, 22 nt, Human
aggauaaaggucauuauuccca

SEQ ID NO: 103620 - RNA, 22 nt, Human
aggauaaaugaucuagauuuuc

SEQ ID NO: 103621 - RNA, 22 nt, Human
aggauaaauucuccaaagugug

SEQ ID NO: 103622 - RNA, 22 nt, Human
aggcaguugaguggcuuuuuca

SEQ ID NO: 103623 - RNA, 22 nt, Human
aggcauaggacaucuaugucau

SEQ ID NO: 103624 - RNA, 22 nt, Human
aggcauaugauuguaaccuuua

SEQ ID NO: 103625 - RNA, 22 nt, Human
aggcaucugcugcccuucugga

SEQ ID NO: 103626 - RNA, 22 nt, Human
aggcauggauggauccagggcu

SEQ ID NO: 103627 - RNA, 22 nt, Human
aggcauggcacugagcagcuuc

SEQ ID NO: 103628 - RNA, 23 nt, Human
aggcauggcauggaugguggcuc

SEQ ID NO: 103629 - RNA, 22 nt, Human
aggcauggcauggggcagaugu

SEQ ID NO: 103630 - RNA, 19 nt, Human
aggcaugggaagagaaguc

SEQ ID NO: 103631 - RNA, 17 nt, Human
aggcauggucuggggug

SEQ ID NO: 103632 - RNA, 22 nt, Human
aggcauguauaugugcacaugu

SEQ ID NO: 103633 - RNA, 22 nt, Human
aggcaugugcuguuugucucca

SEQ ID NO: 103634 - RNA, 22 nt, Human
aggcauuacaucuaaauauuua

SEQ ID NO: 103635 - RNA, 22 nt, Human
aggccaaauagcagguuugcua

SEQ ID NO: 103636 - RNA, 22 nt, Human
aggccaaauugaucaucuuuag

SEQ ID NO: 103637 - RNA, 22 nt, Human
aggccacacaacucuuagagau

SEQ ID NO: 103638 - RNA, 18 nt, Human
aggccacacuccagaaca

SEQ ID NO: 103639 - RNA, 22 nt, Human
aggccacagagagugcaugugc

SEQ ID NO: 103640 - RNA, 22 nt, Human
aggccacagauacugugaagua

SEQ ID NO: 103641 - RNA, 22 nt, Human
aggccacagccugggaggugac

SEQ ID NO: 103642 - RNA, 22 nt, Human
aggccacaggaguacugucggu

SEQ ID NO: 103643 - RNA, 22 nt, Human
aggccacaguacuuugcagacc

SEQ ID NO: 103644 - RNA, 22 nt, Human
aggccacauagcuugcauguag

SEQ ID NO: 103645 - RNA, 22 nt, Human
aggccacucagggggccaagau

SEQ ID NO: 103646 - RNA, 22 nt, Human
aggccagaaauuuggaguaugu

SEQ ID NO: 103647 - RNA, 22 nt, Human
aggccagaacagcucugcacca

SEQ ID NO: 103648 - RNA, 22 nt, Human
aggccagcagcaugacggcauc

SEQ ID NO: 103649 - RNA, 22 nt, Human
aggccagcauucucucuccagg

SEQ ID NO: 103650 - RNA, 22 nt, Human
aggccagcccucaccuguguuc

SEQ ID NO: 103651 - RNA, 22 nt, Human
aggccagcccugggcugagaga

SEQ ID NO: 103652 - RNA, 23 nt, Human
aggccagcgcagacaccgagcac

SEQ ID NO: 103653 - RNA, 22 nt, Human
aggccagcugccacccgguccg

SEQ ID NO: 103654 - RNA, 22 nt, Human
aggccagcuguuacuagagcca

SEQ ID NO: 103655 - RNA, 22 nt, Human
aggccaggauagcauggaucag

SEQ ID NO: 103656 - RNA, 22 nt, Human
aggccagggccagauuagccac

SEQ ID NO: 103657 - RNA, 22 nt, Human
aggccaggguagggcccauugu

SEQ ID NO: 103658 - RNA, 22 nt, Human
aggccagugguucucugugucc

SEQ ID NO: 103659 - RNA, 22 nt, Human
aggccaguguggcuggagcaca

SEQ ID NO: 103660 - RNA, 22 nt, Human
aggccaucaaaucauguagugc

SEQ ID NO: 103661 - RNA, 22 nt, Human
aggccaugggauuuccaauugg

SEQ ID NO: 103662 - RNA, 22 nt, Human
aggccauguggccccagagucu

SEQ ID NO: 103663 - RNA, 22 nt, Human
aggcccagagagccaguuagug

SEQ ID NO: 103664 - RNA, 21 nt, Human
aggcccagagucuugggggga

SEQ ID NO: 103665 - RNA, 22 nt, Human
aggcccagcccguccucgugcu

SEQ ID NO: 103666 - RNA, 19 nt, Human
aggcccagcgcugggggcu

SEQ ID NO: 103667 - RNA, 22 nt, Human
aggcccagcugggccaggaaca

SEQ ID NO: 103668 - RNA, 21 nt, Human
aggcccaggaauaugcauuuu

SEQ ID NO: 103669 - RNA, 22 nt, Human
aggcccagggcugcucucugaa

SEQ ID NO: 103670 - RNA, 23 nt, Human
aggcccagguauguuuguuuugg

SEQ ID NO: 103671 - RNA, 22 nt, Human
aggccccaaagcagugcaagua

SEQ ID NO: 103672 - RNA, 22 nt, Human
aggcccgagguucgugugcacc

SEQ ID NO: 103673 - RNA, 22 nt, Human
aggcccucacagucuauuguga

SEQ ID NO: 103674 - RNA, 22 nt, Human
aggcccugaccugggagaucua

SEQ ID NO: 103675 - RNA, 20 nt, Human
aggcccugccagggacggag

SEQ ID NO: 103676 - RNA, 22 nt, Human
aggcccuggacacucaagccgg

SEQ ID NO: 103677 - RNA, 22 nt, Human
aggcccuggguuagggcccacu

SEQ ID NO: 103678 - RNA, 22 nt, Human
aggcccuguaagguguggagau

SEQ ID NO: 103679 - RNA, 20 nt, Human
aggcccugugcaucuuguuu

SEQ ID NO: 103680 - RNA, 22 nt, Human
aggccgccuggggagaggcccu

SEQ ID NO: 103681 - RNA, 17 nt, Human
aggccucaggugaaacc

SEQ ID NO: 103682 - RNA, 22 nt, Human
aggccucagugaucaucaucag

SEQ ID NO: 103683 - RNA, 22 nt, Human
aggccucaugucaaagcagcaa

SEQ ID NO: 103684 - RNA, 22 nt, Human
aggccuccagcugaguuuugcu

SEQ ID NO: 103685 - RNA, 22 nt, Human
aggccuccuggcuccaggccuu

SEQ ID NO: 103686 - RNA, 22 nt, Human
aggccucucugcuuagcuugua

SEQ ID NO: 103687 - RNA, 17 nt, Human
aggccucugccggugcc

SEQ ID NO: 103688 - RNA, 22 nt, Human
aggccucugcuggaaagaguug

SEQ ID NO: 103689 - RNA, 22 nt, Human
aggccucuggagguggcagugu

SEQ ID NO: 103690 - RNA, 22 nt, Human
aggccucugggccugcggguuu

SEQ ID NO: 103691 - RNA, 22 nt, Human
aggccucugggucuccucugac

SEQ ID NO: 103692 - RNA, 22 nt, Human
aggccugaaggaagaugagcug

SEQ ID NO: 103693 - RNA, 22 nt, Human
aggccugaaguguggagugggg

SEQ ID NO: 103694 - RNA, 22 nt, Human
aggccugagccccagguuuguu

SEQ ID NO: 103695 - RNA, 22 nt, Human
aggccugaggaccuucuggagg

SEQ ID NO: 103696 - RNA, 22 nt, Human
aggccugagguuccugugcuca

SEQ ID NO: 103697 - RNA, 22 nt, Human
aggccugcuguguagccuguug

SEQ ID NO: 103698 - RNA, 22 nt, Human
aggccuggccugggcggcauug

SEQ ID NO: 103699 - RNA, 22 nt, Human
aggccuggccuuuauguucaag

SEQ ID NO: 103700 - RNA, 18 nt, Human
aggccugggaagcugagg

SEQ ID NO: 103701 - RNA, 22 nt, Human
aggccugggcaagaaggggcgu

SEQ ID NO: 103702 - RNA, 19 nt, Human
aggccugggguuuugcacu

SEQ ID NO: 103703 - RNA, 22 nt, Human
aggccuuaucuccaaauacagu

SEQ ID NO: 103704 - RNA, 22 nt, Human
aggccuuccucggagacaggga

SEQ ID NO: 103705 - RNA, 22 nt, Human
aggcgaagggaccagacgguag

SEQ ID NO: 103706 - RNA, 22 nt, Human
aggcgcaggguuuggacccagg

SEQ ID NO: 103707 - RNA, 22 nt, Human
aggcggcuucugaggaggcugc

SEQ ID NO: 103708 - RNA, 22 nt, Human
aggcggugugcuuugcagagca

SEQ ID NO: 103709 - RNA, 22 nt, Human
aggcgugggaggaucugaggcc

SEQ ID NO: 103710 - RNA, 22 nt, Human
aggcgugguugaggcgagcaua

SEQ ID NO: 103711 - RNA, 22 nt, Human
aggcuaagauguggucugagca

SEQ ID NO: 103712 - RNA, 22 nt, Human
aggcuaagggaugacuggagug

SEQ ID NO: 103713 - RNA, 22 nt, Human
aggcuacagccucaagagugca

SEQ ID NO: 103714 - RNA, 19 nt, Human
aggcuaguguuacaccugc

SEQ ID NO: 103715 - RNA, 22 nt, Human
aggcuaguuaguauuuacaaaa

SEQ ID NO: 103716 - RNA, 23 nt, Human
aggcuaguuugugacuuucuuug

SEQ ID NO: 103717 - RNA, 21 nt, Human
aggcucagagagaaacucuug

SEQ ID NO: 103718 - RNA, 22 nt, Human
aggcucagagagcuguguccau

SEQ ID NO: 103719 - RNA, 22 nt, Human
aggcucagaggugagcaucugc

SEQ ID NO: 103720 - RNA, 22 nt, Human
aggcucagccccugggaggaga

SEQ ID NO: 103721 - RNA, 22 nt, Human
auccuuuaucuuuccuaggaau

SEQ ID NO: 103722 - RNA, 22 nt, Human
aucgagggugaguacagcggac

SEQ ID NO: 103723 - RNA, 22 nt, Human
aucgaguucugaugucccuucu

SEQ ID NO: 103724 - RNA, 22 nt, Human
aucgcaaguuuaaaaaucuuug

SEQ ID NO: 103725 - RNA, 22 nt, Human
aucgcuuuacagccugcuuccu

SEQ ID NO: 103726 - RNA, 20 nt, Human
aucggcuugccuggaaacaa

SEQ ID NO: 103727 - RNA, 22 nt, Human
aucgugcauuuuuauuaacccu

SEQ ID NO: 103728 - RNA, 22 nt, Human
aucuaaacagguguucuuuaga

SEQ ID NO: 103729 - RNA, 22 nt, Human
aucuaacuuauguuuuaccaaa

SEQ ID NO: 103730 - RNA, 22 nt, Human
aucuaagacaaugagugagacu

SEQ ID NO: 103731 - RNA, 22 nt, Human
aucuaagagagagagcaugucu

SEQ ID NO: 103732 - RNA, 22 nt, Human
aucuaauuuucacucauuugcu

SEQ ID NO: 103733 - RNA, 22 nt, Human
aucuacaaaaacugucucagga

SEQ ID NO: 103734 - RNA, 22 nt, Human
aucuacaacaucacauggcauu

SEQ ID NO: 103735 - RNA, 22 nt, Human
aucuacaggcugaggugggagg

SEQ ID NO: 103736 - RNA, 22 nt, Human
aucuacagugcacaggacagcc

SEQ ID NO: 103737 - RNA, 22 nt, Human
aucuacuccugaauauaucuag

SEQ ID NO: 103738 - RNA, 22 nt, Human
aucuagaaagccaggggccugc

SEQ ID NO: 103739 - RNA, 22 nt, Human
aucuagaagucauggcuuucuu

SEQ ID NO: 103740 - RNA, 22 nt, Human
aucuagaggagggcugcuggau

SEQ ID NO: 103741 - RNA, 22 nt, Human
aucuagguuuggaagauagagu

SEQ ID NO: 103742 - RNA, 22 nt, Human
aucuauacccaucaugauuuaa

SEQ ID NO: 103743 - RNA, 22 nt, Human
aucucaaaugauuacaccaagc

SEQ ID NO: 103744 - RNA, 22 nt, Human
aucucaccaaguuauuacgaga

SEQ ID NO: 103745 - RNA, 22 nt, Human
aucucaggaggacccugaugcu

SEQ ID NO: 103746 - RNA, 22 nt, Human
aucucauaaacacacauauaug

SEQ ID NO: 103747 - RNA, 22 nt, Human
aucucauaaucgucauugcuuu

SEQ ID NO: 103748 - RNA, 22 nt, Human
aucucauuuugguuucuacuua

SEQ ID NO: 103749 - RNA, 22 nt, Human
aucuccagaugccuggaaauga

SEQ ID NO: 103750 - RNA, 22 nt, Human
aucuccaguccugguuuccugg

SEQ ID NO: 103751 - RNA, 22 nt, Human
aucuccagugcccaaaggaaau

SEQ ID NO: 103752 - RNA, 22 nt, Human
aucucccagccacagcauucuu

SEQ ID NO: 103753 - RNA, 22 nt, Human
aucuccccgagcuuaccuccug

SEQ ID NO: 103754 - RNA, 22 nt, Human
aucuccucccgcgccgagcucg

SEQ ID NO: 103755 - RNA, 22 nt, Human
aucuccuuggaucacguuuagu

SEQ ID NO: 103756 - RNA, 22 nt, Human
aucucuaaagucuguucagcuc

SEQ ID NO: 103757 - RNA, 22 nt, Human
aucucuaauuuaaaaaguaaca

SEQ ID NO: 103758 - RNA, 22 nt, Human
aucucuagcuaacccucuggca

SEQ ID NO: 103759 - RNA, 15 nt, Human
aucucucuagcugcu

SEQ ID NO: 103760 - RNA, 22 nt, Human
aucucugauuuacagcaucucu

SEQ ID NO: 103761 - RNA, 22 nt, Human
aucucugcuagccuucuucagg

SEQ ID NO: 103762 - RNA, 22 nt, Human
aucucuggccccugggguccga

SEQ ID NO: 103763 - RNA, 22 nt, Human
aucucugguuguuuugcuccca

SEQ ID NO: 103764 - RNA, 22 nt, Human
aucucuguaaaccauaaauuga

SEQ ID NO: 103765 - RNA, 22 nt, Human
aucucuucccaacuccacauuc

SEQ ID NO: 103766 - RNA, 22 nt, Human
aucucuucuagcucugaaauua

SEQ ID NO: 103767 - RNA, 22 nt, Human
aucugaaaaaucuccuuuguca

SEQ ID NO: 103768 - RNA, 23 nt, Human
aucugaaaaggcauuuucuuccc

SEQ ID NO: 103769 - RNA, 22 nt, Human
aucugaagaaugaauggaauua

SEQ ID NO: 103770 - RNA, 22 nt, Human
aucugaagaggucauggcugac

SEQ ID NO: 103771 - RNA, 22 nt, Human
aucugaagcuaucugcacuuca

SEQ ID NO: 103772 - RNA, 22 nt, Human
aucugaagggaaguggaaggca

SEQ ID NO: 103773 - RNA, 22 nt, Human
aucugaauaaauuucuuuuagu

SEQ ID NO: 103774 - RNA, 22 nt, Human
aucugagacugaguuuggauuu

SEQ ID NO: 103775 - RNA, 19 nt, Human
aucugagauuauaaacaga

SEQ ID NO: 103776 - RNA, 22 nt, Human
aucugagucucugacagcaugu

SEQ ID NO: 103777 - RNA, 18 nt, Human
aucugaugcaauucaaua

SEQ ID NO: 103778 - RNA, 21 nt, Human
aucugauguauaaauaccucu

SEQ ID NO: 103779 - RNA, 22 nt, Human
aucugcacuuaagcgaggccug

SEQ ID NO: 103780 - RNA, 22 nt, Human
aucugcaggauguuaggaugau

SEQ ID NO: 103781 - RNA, 22 nt, Human
aucugccuccaaguccaugugu

SEQ ID NO: 103782 - RNA, 22 nt, Human
aucugccugagucuagguuuuc

SEQ ID NO: 103783 - RNA, 22 nt, Human
aucugccugcaguggagguggg

SEQ ID NO: 103784 - RNA, 19 nt, Human
aucugccuuagugcugcug

SEQ ID NO: 103785 - RNA, 17 nt, Human
aucugcugacauucugu

SEQ ID NO: 103786 - RNA, 22 nt, Human
aucugcuuagaauucauugucc

SEQ ID NO: 103787 - RNA, 22 nt, Human
aucugcuuccugggcuccauga

SEQ ID NO: 103788 - RNA, 22 nt, Human
aucugcuugaaacuucuuauac

SEQ ID NO: 103789 - RNA, 20 nt, Human
aucugcuugccuguccucgg

SEQ ID NO: 103790 - RNA, 22 nt, Human
aucuggaaaacacaguguagac

SEQ ID NO: 103791 - RNA, 21 nt, Human
aucuggaaauucugccagaga

SEQ ID NO: 103792 - RNA, 17 nt, Human
aucuggaagcuagcuga

SEQ ID NO: 103793 - RNA, 22 nt, Human
aucuggagaucagcugguggca

SEQ ID NO: 103794 - RNA, 22 nt, Human
aucuggaguuucaguuuucugg

SEQ ID NO: 103795 - RNA, 22 nt, Human
aucuggcuauuucuggucgggg

SEQ ID NO: 103796 - RNA, 22 nt, Human
aucuggcucaccuggguaaaua

SEQ ID NO: 103797 - RNA, 22 nt, Human
aucuggcucccuuggaauccgu

SEQ ID NO: 103798 - RNA, 22 nt, Human
aucuggcuccuacacuugaaga

SEQ ID NO: 103799 - RNA, 17 nt, Human
aucuggcugcuucuaga

SEQ ID NO: 103800 - RNA, 22 nt, Human
aucuggcuggauucuuagcguu

SEQ ID NO: 103801 - RNA, 22 nt, Human
aucuggcuuacgaagcacuggu

SEQ ID NO: 103802 - RNA, 22 nt, Human
aucuggcuuggguguggguagc

SEQ ID NO: 103803 - RNA, 22 nt, Human
aucuggcuuucuuaaugacuua

SEQ ID NO: 103804 - RNA, 22 nt, Human
aucugggaauggaagccuucug

SEQ ID NO: 103805 - RNA, 22 nt, Human
aucugggagacccuugcgggaa

SEQ ID NO: 103806 - RNA, 22 nt, Human
aucugggcagggcagcaaggcg

SEQ ID NO: 103807 - RNA, 20 nt, Human
aucugggcaucaauuuugug

SEQ ID NO: 103808 - RNA, 22 nt, Human
aucuggguuucaaagaagccuu

SEQ ID NO: 103809 - RNA, 22 nt, Human
aucuggugcuaacaaaugugga

SEQ ID NO: 103810 - RNA, 22 nt, Human
aucuguacaagauuuuaugcgu

SEQ ID NO: 103811 - RNA, 22 nt, Human
aucuguauauuuuucaaugcaa

SEQ ID NO: 103812 - RNA, 22 nt, Human
aucugucaagauagacucugca

SEQ ID NO: 103813 - RNA, 22 nt, Human
aucugucccuccucacagccuc

SEQ ID NO: 103814 - RNA, 22 nt, Human
aucuguccugugacagugggag

SEQ ID NO: 103815 - RNA, 22 nt, Human
aucugucugagugcuuaggacc

SEQ ID NO: 103816 - RNA, 22 nt, Human
aucugucuuccaccacacaucc

SEQ ID NO: 103817 - RNA, 22 nt, Human
aucugugaucaagacagacagu

SEQ ID NO: 103818 - RNA, 22 nt, Human
aucuguggauaugcacagagca

SEQ ID NO: 103819 - RNA, 22 nt, Human
aucuguguaugaaaguauaacu

SEQ ID NO: 103820 - RNA, 22 nt, Human
aucuguguguuauuguuuauca

SEQ ID NO: 103821 - RNA, 22 nt, Human
aucuguguguucaggaaguccu

SEQ ID NO: 103822 - RNA, 22 nt, Human
aucuguuauuuacccaucucug

SEQ ID NO: 103823 - RNA, 22 nt, Human
aucuguuguuuucucauauguu

SEQ ID NO: 103824 - RNA, 22 nt, Human
aucuuaaacagaggaaugacuu

SEQ ID NO: 103825 - RNA, 18 nt, Human
aucuuaacuugauggagu

SEQ ID NO: 103826 - RNA, 22 nt, Human
aucuuacaauuacaagacacuc

SEQ ID NO: 103827 - RNA, 22 nt, Human
aucuuacacgauaacuguuagu

SEQ ID NO: 103828 - RNA, 22 nt, Human
aucuuacacuguuggguuucuc

SEQ ID NO: 103829 - RNA, 22 nt, Human
aucuuacagcagcaaggaagua

SEQ ID NO: 103830 - RNA, 22 nt, Human
agggcuccuaugccccauggac

SEQ ID NO: 103831 - RNA, 22 nt, Human
agggcuccugaggcccuucugg

SEQ ID NO: 103832 - RNA, 22 nt, Human
agggcucugugacuaucacugc

SEQ ID NO: 103833 - RNA, 22 nt, Human
agggcucuuuaggccgaggcca

SEQ ID NO: 103834 - RNA, 22 nt, Human
agggcugaagggaggugcucau

SEQ ID NO: 103835 - RNA, 22 nt, Human
agggcugacacaccuuauccuc

SEQ ID NO: 103836 - RNA, 22 nt, Human
agggcugacaguaaaaguauga

SEQ ID NO: 103837 - RNA, 20 nt, Human
agggcugagaagggacuagc

SEQ ID NO: 103838 - RNA, 22 nt, Human
agggcugagacuaaggccagau

SEQ ID NO: 103839 - RNA, 22 nt, Human
agggcugcaccggggcuucgcg

SEQ ID NO: 103840 - RNA, 22 nt, Human
agggcugccugcucugcauuga

SEQ ID NO: 103841 - RNA, 22 nt, Human
agggcugcuauguugauucaga

SEQ ID NO: 103842 - RNA, 22 nt, Human
agggcugcugaggaagccuugc

SEQ ID NO: 103843 - RNA, 22 nt, Human
agggcugcuuaccuggaauggc

SEQ ID NO: 103844 - RNA, 22 nt, Human
agggcuggcaagggauugaaau

SEQ ID NO: 103845 - RNA, 22 nt, Human
agggcuguaccaucagguuccu

SEQ ID NO: 103846 - RNA, 22 nt, Human
agggcuugcagaaaugagaaau

SEQ ID NO: 103847 - RNA, 22 nt, Human
agggcuuguuuccuguuucaua

SEQ ID NO: 103848 - RNA, 22 nt, Human
agggcuuuaaugauuauuuucu

SEQ ID NO: 103849 - RNA, 22 nt, Human
agggcuuucuuuguaaaagaag

SEQ ID NO: 103850 - RNA, 22 nt, Human
aggggaaggccagccuguagag

SEQ ID NO: 103851 - RNA, 22 nt, Human
aggggaauggguagacuguuga

SEQ ID NO: 103852 - RNA, 21 nt, Human
aggggacagaguagcuccagg

SEQ ID NO: 103853 - RNA, 22 nt, Human
aggggaccaaaauguccugccu

SEQ ID NO: 103854 - RNA, 22 nt, Human
aggggagaauuucaacucaggu

SEQ ID NO: 103855 - RNA, 22 nt, Human
aggggagacuggaaucuaacau

SEQ ID NO: 103856 - RNA, 22 nt, Human
aggggagcaaggccguggugua

SEQ ID NO: 103857 - RNA, 22 nt, Human
aggggagccagggcugcgaguu

SEQ ID NO: 103858 - RNA, 22 nt, Human
aggcaguccccagggguguugc

SEQ ID NO: 103859 - RNA, 22 nt, Human
aggcagugcaugcaaaggucgg

SEQ ID NO: 103860 - RNA, 23 nt, Human
aggcaguggugguaacaugucaa

SEQ ID NO: 103861 - RNA, 20 nt, Human
aggcaguguagagaugagua

SEQ ID NO: 103862 - RNA, 22 nt, Human
aggcaguguggagggcuguugc

SEQ ID NO: 103863 - RNA, 22 nt, Human
aggcagugugggccaagcuucc

SEQ ID NO: 103864 - RNA, 22 nt, Human
aggcaguguucuucuaagggca

SEQ ID NO: 103865 - RNA, 21 nt, Human
aggcaguugagcauguuauga

SEQ ID NO: 103866 - RNA, 22 nt, Human
aggcaguuggucauugcucuuu

SEQ ID NO: 103867 - RNA, 22 nt, Human
aggcaguuuaggcagcgauuua

SEQ ID NO: 103868 - RNA, 22 nt, Human
aggcaguuuauccccagagccu

SEQ ID NO: 103869 - RNA, 22 nt, Human
aggcaguuucugggacagcaua

SEQ ID NO: 103870 - RNA, 22 nt, Human
aggcauauacucucagaaaaaa

SEQ ID NO: 103871 - RNA, 22 nt, Human
aggcauccucucugccuugagg

SEQ ID NO: 103872 - RNA, 20 nt, Human
aggcaucugagucacaucuu

SEQ ID NO: 103873 - RNA, 17 nt, Human
aggcaugaggcaucacu

SEQ ID NO: 103874 - RNA, 22 nt, Human
aggcaugcgccaauuuauuaga

SEQ ID NO: 103875 - RNA, 22 nt, Human
aggcauggauguagcagugacc

SEQ ID NO: 103876 - RNA, 22 nt, Human
aggcauggcuuuaggcaggcgu

SEQ ID NO: 103877 - RNA, 20 nt, Human
aggcaugggaugcccagauu

SEQ ID NO: 103878 - RNA, 18 nt, Human
aggcaugguggugcgcac

SEQ ID NO: 103879 - RNA, 21 nt, Human
aggcauuauaaauuucaccug

SEQ ID NO: 103880 - RNA, 22 nt, Human
aggcauucuagaaguagaagua

SEQ ID NO: 103881 - RNA, 22 nt, Human
aggcauuuccuaugggcagaga

SEQ ID NO: 103882 - RNA, 16 nt, Human
aggccaaaaaggggca

SEQ ID NO: 103883 - RNA, 20 nt, Human
aggccaaacccagcgcgccc

SEQ ID NO: 103884 - RNA, 22 nt, Human
aggccaaaccggauggaaaagg

SEQ ID NO: 103885 - RNA, 22 nt, Human
aggccaaagcacagagcuggaa

SEQ ID NO: 103886 - RNA, 22 nt, Human
aggccaaauguguauaaaacau

SEQ ID NO: 103887 - RNA, 22 nt, Human
aggccaagcucccagagaagcu

SEQ ID NO: 103888 - RNA, 22 nt, Human
aggccaagggcaaagcggagag

SEQ ID NO: 103889 - RNA, 22 nt, Human
aggccaagugaacaaugcuagu

SEQ ID NO: 103890 - RNA, 22 nt, Human
aggccaagugcugggacaggug

SEQ ID NO: 103891 - RNA, 22 nt, Human
aggccacaagaaaaugcuucau

SEQ ID NO: 103892 - RNA, 22 nt, Human
aggccacaagaacuaccccauc

SEQ ID NO: 103893 - RNA, 22 nt, Human
aggccacaggauugcacagcau

SEQ ID NO: 103894 - RNA, 22 nt, Human
aggccacagguggaagccagag

SEQ ID NO: 103895 - RNA, 22 nt, Human
aggccacagucagugggugcug

SEQ ID NO: 103896 - RNA, 22 nt, Human
aggccacaguugaggccagcaa

SEQ ID NO: 103897 - RNA, 22 nt, Human
aggccaccacccuaucuccugg

SEQ ID NO: 103898 - RNA, 22 nt, Human
aggccagaugucgggcuagaag

SEQ ID NO: 103899 - RNA, 22 nt, Human
aggccagcagacgugggacuga

SEQ ID NO: 103900 - RNA, 22 nt, Human
aggccagcuaugacucugcucc

SEQ ID NO: 103901 - RNA, 22 nt, Human
aggccaggaauccuugucccag

SEQ ID NO: 103902 - RNA, 22 nt, Human
aggccaggacacuuaaguaaga

SEQ ID NO: 103903 - RNA, 22 nt, Human
aggccaggccuuucuccauucc

SEQ ID NO: 103904 - RNA, 22 nt, Human
aggccaggcgagacacccggcu

SEQ ID NO: 103905 - RNA, 22 nt, Human
aggccaggggugagcacuucug

SEQ ID NO: 103906 - RNA, 22 nt, Human
aggccagggucccacacucgca

SEQ ID NO: 103907 - RNA, 22 nt, Human
aggccagugcagcuggaacaga

SEQ ID NO: 103908 - RNA, 22 nt, Human
aggccaguuguucagugggccg

SEQ ID NO: 103909 - RNA, 22 nt, Human
aggcccagacucagcggggcgg

SEQ ID NO: 103910 - RNA, 22 nt, Human
aggcccagcuggacaaacugcu

SEQ ID NO: 103911 - RNA, 22 nt, Human
aggcccaugugagucuuguccu

SEQ ID NO: 103912 - RNA, 22 nt, Human
aggcccauguucacuugcucag

SEQ ID NO: 103913 - RNA, 22 nt, Human
aggcccccacaggcuugaggca

SEQ ID NO: 103914 - RNA, 22 nt, Human
aggcccuaauccaacaugacug

SEQ ID NO: 103915 - RNA, 22 nt, Human
aggcccuauucaauggggccca

SEQ ID NO: 103916 - RNA, 22 nt, Human
aggcccucucauuccagaggca

SEQ ID NO: 103917 - RNA, 22 nt, Human
aggcccugcaggaguggggaca

SEQ ID NO: 103918 - RNA, 22 nt, Human
aggcccugcccagugccacaag

SEQ ID NO: 103919 - RNA, 22 nt, Human
aggcccugcuuuccagagcuca

SEQ ID NO: 103920 - RNA, 22 nt, Human
aggcccuggcacugccugggag

SEQ ID NO: 103921 - RNA, 22 nt, Human
aggcccuggcccccagagauuc

SEQ ID NO: 103922 - RNA, 22 nt, Human
aggcccuggggucuguuaaauu

SEQ ID NO: 103923 - RNA, 22 nt, Human
aggcccuggucaggucuggcug

SEQ ID NO: 103924 - RNA, 22 nt, Human
aggccgugugagcaugugugag

SEQ ID NO: 103925 - RNA, 22 nt, Human
aggccuagaggaauggccaggg

SEQ ID NO: 103926 - RNA, 22 nt, Human
aggccucacauugggcuucaag

SEQ ID NO: 103927 - RNA, 22 nt, Human
aggccucacucucagagcuucu

SEQ ID NO: 103928 - RNA, 22 nt, Human
aggccucagcucagugugacag

SEQ ID NO: 103929 - RNA, 22 nt, Human
aggccucaguucuugccaggug

SEQ ID NO: 103930 - RNA, 22 nt, Human
aggccucauugcccaccugugg

SEQ ID NO: 103931 - RNA, 21 nt, Human
aggccucccuguugacagggc

SEQ ID NO: 103932 - RNA, 22 nt, Human
aggccucuguagggcccugaag

SEQ ID NO: 103933 - RNA, 18 nt, Human
aggccucugugugcccag

SEQ ID NO: 103934 - RNA, 22 nt, Human
aggccugacuugaauuuagggc

SEQ ID NO: 103935 - RNA, 22 nt, Human
aggccugccuggagccuggcug

SEQ ID NO: 103936 - RNA, 22 nt, Human
aggccuggcaugagaccugaga

SEQ ID NO: 103937 - RNA, 22 nt, Human
aggccuggccccaguugcuagg

SEQ ID NO: 103938 - RNA, 22 nt, Human
aggccugggacgggagccguga

SEQ ID NO: 103939 - RNA, 22 nt, Human
agggcagcagcuccuccuagcu

SEQ ID NO: 103940 - RNA, 22 nt, Human
agggcagcauugccuuucucca

SEQ ID NO: 103941 - RNA, 22 nt, Human
agggcagccauugagggauucu

SEQ ID NO: 103942 - RNA, 22 nt, Human
agggcagcuaaggugcugacug

SEQ ID NO: 103943 - RNA, 22 nt, Human
agggcagcuagcuguagaaaga

SEQ ID NO: 103944 - RNA, 22 nt, Human
agggcagcuggaagguggcuuc

SEQ ID NO: 103945 - RNA, 22 nt, Human
agggcagcuuccauagucuggc

SEQ ID NO: 103946 - RNA, 22 nt, Human
agggcaguguggugggacugac

SEQ ID NO: 103947 - RNA, 22 nt, Human
agggcaucuaguucccucucuu

SEQ ID NO: 103948 - RNA, 23 nt, Human
agggcaugaagcagaggacgugg

SEQ ID NO: 103949 - RNA, 22 nt, Human
agggcaugugggagaggagccu

SEQ ID NO: 103950 - RNA, 22 nt, Human
agggcauuggcacagaucugcu

SEQ ID NO: 103951 - RNA, 22 nt, Human
agggccaccucucuggguuccc

SEQ ID NO: 103952 - RNA, 22 nt, Human
agggccacgugcaccgcggucu

SEQ ID NO: 103953 - RNA, 22 nt, Human
agggccacuggcugacggcugc

SEQ ID NO: 103954 - RNA, 22 nt, Human
agggccagaggcaccuugcagc

SEQ ID NO: 103955 - RNA, 22 nt, Human
agggccagcagcuuggccaacc

SEQ ID NO: 103956 - RNA, 22 nt, Human
agggccagcugaugagaaugag

SEQ ID NO: 103957 - RNA, 18 nt, Human
agggccagcugugaguag

SEQ ID NO: 103958 - RNA, 22 nt, Human
agggccaggaacaccugaaggg

SEQ ID NO: 103959 - RNA, 19 nt, Human
agggccaggauucuggaac

SEQ ID NO: 103960 - RNA, 22 nt, Human
agggccaggcucccaugucagg

SEQ ID NO: 103961 - RNA, 23 nt, Human
agggccaggugcggaaacagcuc

SEQ ID NO: 103962 - RNA, 22 nt, Human
agggcccaccuuggugcugagg

SEQ ID NO: 103963 - RNA, 20 nt, Human
agggcccaggaagagaguua

SEQ ID NO: 103964 - RNA, 22 nt, Human
agggcccaggacagcaucaggg

SEQ ID NO: 103965 - RNA, 22 nt, Human
agggcccaguggagagcugagc

SEQ ID NO: 103966 - RNA, 22 nt, Human
agggcccuuacgcaggcccuuc

SEQ ID NO: 103967 - RNA, 23 nt, Human
agggccucugucccccagcacuc

SEQ ID NO: 103968 - RNA, 22 nt, Human
agggccugcaucaggagcuugg

SEQ ID NO: 103969 - RNA, 22 nt, Human
agggccuggaacuggagaccac

SEQ ID NO: 103970 - RNA, 22 nt, Human
agggccuggacuaauuggaucc

SEQ ID NO: 103971 - RNA, 22 nt, Human
agggccuggcgcguggccgccg

SEQ ID NO: 103972 - RNA, 22 nt, Human
agggccugggccagcacccuuu

SEQ ID NO: 103973 - RNA, 22 nt, Human
agggccugggguagcuuacugc

SEQ ID NO: 103974 - RNA, 22 nt, Human
agggccuggugaccuggguccu

SEQ ID NO: 103975 - RNA, 22 nt, Human
agggccugguucuguguaggga

SEQ ID NO: 103976 - RNA, 22 nt, Human
aggggagcgacauuccgugccg

SEQ ID NO: 103977 - RNA, 22 nt, Human
aggggagcuaacaccagagccc

SEQ ID NO: 103978 - RNA, 22 nt, Human
aggggagcuugaggcauggccu

SEQ ID NO: 103979 - RNA, 22 nt, Human
aggggagcuugccuggucaccc

SEQ ID NO: 103980 - RNA, 22 nt, Human
aggggaggcagcgauaaaccug

SEQ ID NO: 103981 - RNA, 22 nt, Human
aggggagguggcagaaaugugc

SEQ ID NO: 103982 - RNA, 22 nt, Human
aggggcacgaguagagcucuag

SEQ ID NO: 103983 - RNA, 23 nt, Human
aggggcagcaaguuuugguguua

SEQ ID NO: 103984 - RNA, 22 nt, Human
aggggcaguuccaaguuuugug

SEQ ID NO: 103985 - RNA, 22 nt, Human
aggggccaccuguggcacccug

SEQ ID NO: 103986 - RNA, 22 nt, Human
aggggccuggcacugagcuggc

SEQ ID NO: 103987 - RNA, 22 nt, Human
aggggccugguuggccucuguu

SEQ ID NO: 103988 - RNA, 22 nt, Human
aggggcgaggggagccgugcca

SEQ ID NO: 103989 - RNA, 22 nt, Human
aggggcgcugcgguccucagcc

SEQ ID NO: 103990 - RNA, 22 nt, Human
aggggcgucuguaggcaguggg

SEQ ID NO: 103991 - RNA, 22 nt, Human
aggggcuccuggccuggagagc

SEQ ID NO: 103992 - RNA, 22 nt, Human
aggggcucugagugggccagga

SEQ ID NO: 103993 - RNA, 22 nt, Human
aggggcugacuggaaagugcca

SEQ ID NO: 103994 - RNA, 22 nt, Human
aggggcugccuggcuuggcacu

SEQ ID NO: 103995 - RNA, 22 nt, Human
aggggcuggaguucgagguuac

SEQ ID NO: 103996 - RNA, 22 nt, Human
aggggcuuauguuucuccaggc

SEQ ID NO: 103997 - RNA, 17 nt, Human
agggggaaccugggagg

SEQ ID NO: 103998 - RNA, 22 nt, Human
agggggaggcugugcugcgucu

SEQ ID NO: 103999 - RNA, 22 nt, Human
agggggcaggagagaccugcug

SEQ ID NO: 104000 - RNA, 22 nt, Human
agggggcucagugacugaagug

SEQ ID NO: 104001 - RNA, 22 nt, Human
agggggcuccuccggugcuucc

SEQ ID NO: 104002 - RNA, 22 nt, Human
agggggcuggagacaccuccuc

SEQ ID NO: 104003 - RNA, 22 nt, Human
agggggugaaugucugucuaca

SEQ ID NO: 104004 - RNA, 22 nt, Human
agggggugcccagaugaaggau

SEQ ID NO: 104005 - RNA, 22 nt, Human
aggggugaaagagggcccucaa

SEQ ID NO: 104006 - RNA, 22 nt, Human
aggggugugcauccuggaggau

SEQ ID NO: 104007 - RNA, 22 nt, Human
aggguaagcuuggggcuggcag

SEQ ID NO: 104008 - RNA, 19 nt, Human
aggguacacgagagaagag

SEQ ID NO: 104009 - RNA, 22 nt, Human
aggguagggcccggagacagac

SEQ ID NO: 104010 - RNA, 22 nt, Human
aggguagggccguagggccaug

SEQ ID NO: 104011 - RNA, 22 nt, Human
aggguaggguaaaugaugcauc

SEQ ID NO: 104012 - RNA, 22 nt, Human
aggguauguuuuaggcugaguu

SEQ ID NO: 104013 - RNA, 22 nt, Human
agggucaccaguucauaggcac

SEQ ID NO: 104014 - RNA, 20 nt, Human
agggucagagagcgugagug

SEQ ID NO: 104015 - RNA, 22 nt, Human
agggucagagaucggccaugug

SEQ ID NO: 104016 - RNA, 22 nt, Human
agggucagagucaggugcagua

SEQ ID NO: 104017 - RNA, 21 nt, Human
agggucaggaaccaggguacc

SEQ ID NO: 104018 - RNA, 22 nt, Human
agggucagggagugaguauuua

SEQ ID NO: 104019 - RNA, 22 nt, Human
agggucagguuaagggagucau

SEQ ID NO: 104020 - RNA, 23 nt, Human
aggguccagggaucaccaggugu

SEQ ID NO: 104021 - RNA, 21 nt, Human
aggguccuacagggcucagga

SEQ ID NO: 104022 - RNA, 22 nt, Human
aggguccuucuguuccugagca

SEQ ID NO: 104023 - RNA, 22 nt, Human
agggucuaucucucugccuuug

SEQ ID NO: 104024 - RNA, 22 nt, Human
agggucucugggaguagggcac

SEQ ID NO: 104025 - RNA, 22 nt, Human
agggucugacuccucuggcaag

SEQ ID NO: 104026 - RNA, 22 nt, Human
agggucugacugaauggaaaag

SEQ ID NO: 104027 - RNA, 20 nt, Human
agggucugaugugguggccc

SEQ ID NO: 104028 - RNA, 23 nt, Human
agggucugcucagugucguucaa

SEQ ID NO: 104029 - RNA, 20 nt, Human
agggucugcuggguaggaca

SEQ ID NO: 104030 - RNA, 22 nt, Human
agggucuguuguuuguucugga

SEQ ID NO: 104031 - RNA, 22 nt, Human
agggugcaaaagcaaggacagu

SEQ ID NO: 104032 - RNA, 22 nt, Human
agggugcagucacaggaaaugu

SEQ ID NO: 104033 - RNA, 22 nt, Human
agggugccugcugcagguucag

SEQ ID NO: 104034 - RNA, 22 nt, Human
agggugccuggaagccacucac

SEQ ID NO: 104035 - RNA, 22 nt, Human
agggugcguucuaugagaaucu

SEQ ID NO: 104036 - RNA, 22 nt, Human
aggguggcacugguggcucuau

SEQ ID NO: 104037 - RNA, 22 nt, Human
aggguggccaccaaguauguca

SEQ ID NO: 104038 - RNA, 23 nt, Human
aggguggcuugcuuugcuuccuu

SEQ ID NO: 104039 - RNA, 22 nt, Human
aggguggggugcuacaucuuua

SEQ ID NO: 104040 - RNA, 22 nt, Human
agggugguucuuuuaguggaag

SEQ ID NO: 104041 - RNA, 22 nt, Human
agggugugcuguugggucuuuc

SEQ ID NO: 104042 - RNA, 22 nt, Human
aggguuaauugguguccugagg

SEQ ID NO: 104043 - RNA, 22 nt, Human
aggguucagugagguguacucc

SEQ ID NO: 104044 - RNA, 22 nt, Human
aggguuuucauuucugagcauu

SEQ ID NO: 104045 - RNA, 22 nt, Human
agguaaaaugagucuccauuau

SEQ ID NO: 104046 - RNA, 22 nt, Human
agguaaagaaagguguaacauu

SEQ ID NO: 104047 - RNA, 22 nt, Human
agguaaagacagugaaagaggg

SEQ ID NO: 104048 - RNA, 21 nt, Human
agugaaaugaaguguaugcuc

SEQ ID NO: 104049 - RNA, 17 nt, Human
agugaaauuuacauugc

SEQ ID NO: 104050 - RNA, 22 nt, Human
agugaacuguggcccgugaacu

SEQ ID NO: 104051 - RNA, 21 nt, Human
agugaagagugaaacacaugg

SEQ ID NO: 104052 - RNA, 22 nt, Human
agugaagcuaaccugcugauuu

SEQ ID NO: 104053 - RNA, 22 nt, Human
agugaaggaaguuugucuuggg

SEQ ID NO: 104054 - RNA, 22 nt, Human
agugaagugauaguuugccuag

SEQ ID NO: 104055 - RNA, 22 nt, Human
agugaauaugcagcaagaaguu

SEQ ID NO: 104056 - RNA, 22 nt, Human
agugaauuguugccacagagac

SEQ ID NO: 104057 - RNA, 22 nt, Human
agugacaaggccugaagcuccu

SEQ ID NO: 104058 - RNA, 22 nt, Human
agugacaaggugguaaugaagc

SEQ ID NO: 104059 - RNA, 22 nt, Human
agugacaauaugugcuagguau

SEQ ID NO: 104060 - RNA, 21 nt, Human
agugacagaggaaggugcaua

SEQ ID NO: 104061 - RNA, 22 nt, Human
agugacaguauuuguugccaau

SEQ ID NO: 104062 - RNA, 22 nt, Human
agugaccaaucaugguuagauu

SEQ ID NO: 104063 - RNA, 22 nt, Human
agugacucacacaaacaugugu

SEQ ID NO: 104064 - RNA, 21 nt, Human
agugacucugaaccacuugaa

SEQ ID NO: 104065 - RNA, 20 nt, Human
agugacugggagaauggauu

SEQ ID NO: 104066 - RNA, 22 nt, Human
agugacuggugugaaguuaaau

SEQ ID NO: 104067 - RNA, 22 nt, Human
agugacuuaaaggaacuuacug

SEQ ID NO: 104068 - RNA, 22 nt, Human
agugacuucuccguggcaggau

SEQ ID NO: 104069 - RNA, 22 nt, Human
agugacuucuccuaaugucaua

SEQ ID NO: 104070 - RNA, 22 nt, Human
agugagaguauuaaugugaacu

SEQ ID NO: 104071 - RNA, 22 nt, Human
agugaggauaccaauguguaga

SEQ ID NO: 104072 - RNA, 20 nt, Human
agugaggcaguucagugggc

SEQ ID NO: 104073 - RNA, 22 nt, Human
agugaggcuaauaggcaauggu

SEQ ID NO: 104074 - RNA, 22 nt, Human
agugagggaugaagaacugcgg

SEQ ID NO: 104075 - RNA, 22 nt, Human
agugagguaauuagagcugcug

SEQ ID NO: 104076 - RNA, 22 nt, Human
agugagguggggucacagggac

SEQ ID NO: 104077 - RNA, 22 nt, Human
agugagucaaacauauccugac

SEQ ID NO: 104078 - RNA, 20 nt, Human
agugaguuaucagcuacagu

SEQ ID NO: 104079 - RNA, 22 nt, Human
agugauaaugugguaauuauuu

SEQ ID NO: 104080 - RNA, 22 nt, Human
agugauaggacauauggauuuu

SEQ ID NO: 104081 - RNA, 23 nt, Human
agugaucuguguuugaagaaugc

SEQ ID NO: 104082 - RNA, 22 nt, Human
agugaugucuaacuugaucccu

SEQ ID NO: 104083 - RNA, 22 nt, Human
agugauguuaauaaaugauguu

SEQ ID NO: 104084 - RNA, 22 nt, Human
agugauguugacuagcuauaag

SEQ ID NO: 104085 - RNA, 22 nt, Human
agugauugcuugcuuaaggaca

SEQ ID NO: 104086 - RNA, 22 nt, Human
agugauuucaucauuuuaucaa

SEQ ID NO: 104087 - RNA, 20 nt, Human
agugauuuguuaguacauug

SEQ ID NO: 104088 - RNA, 22 nt, Human
agugauuuuaucaauuuacuca

SEQ ID NO: 104089 - RNA, 22 nt, Human
agugauuuugcuuugaagugac

SEQ ID NO: 104090 - RNA, 22 nt, Human
agugcaaacuuuauugugaccu

SEQ ID NO: 104091 - RNA, 22 nt, Human
agugcaauagcaaagaacaaca

SEQ ID NO: 104092 - RNA, 22 nt, Human
agugcacaccuuaguacaaagu

SEQ ID NO: 104093 - RNA, 22 nt, Human
agugcacagcgugauguauugg

SEQ ID NO: 104094 - RNA, 22 nt, Human
agugcagagaccuggucaggca

SEQ ID NO: 104095 - RNA, 22 nt, Human
agugcagcugggacuguagggu

SEQ ID NO: 104096 - RNA, 22 nt, Human
agugcaggcucgcuugugaggc

SEQ ID NO: 104097 - RNA, 23 nt, Human
agugcaugcuugacuuagcaagc

SEQ ID NO: 104098 - RNA, 20 nt, Human
agugcauggagggagagggc

SEQ ID NO: 104099 - RNA, 22 nt, Human
agugcauguucacuggcauggu

SEQ ID NO: 104100 - RNA, 22 nt, Human
agugcauuauauguuucaaugg

SEQ ID NO: 104101 - RNA, 22 nt, Human
agugcauucuggcagaacaggu

SEQ ID NO: 104102 - RNA, 22 nt, Human
agugcauucugucaucuugguu

SEQ ID NO: 104103 - RNA, 22 nt, Human
agugccaggagcaaggagcucc

SEQ ID NO: 104104 - RNA, 21 nt, Human
agugccaguagguauggagga

SEQ ID NO: 104105 - RNA, 23 nt, Human
agugccauugacccuaugucuau

SEQ ID NO: 104106 - RNA, 22 nt, Human
agugcccucgugcccagggccu

SEQ ID NO: 104107 - RNA, 22 nt, Human
agugcccugggccuuccaggac

SEQ ID NO: 104108 - RNA, 22 nt, Human
agugccuaaccccuuguaugaa

SEQ ID NO: 104109 - RNA, 22 nt, Human
agugccucugcagguccgaguu

SEQ ID NO: 104110 - RNA, 19 nt, Human
agugccuugcucucuaggu

SEQ ID NO: 104111 - RNA, 22 nt, Human
agugcgugggcaggcauggaag

SEQ ID NO: 104112 - RNA, 22 nt, Human
agugcuaaaggaucacaggguc

SEQ ID NO: 104113 - RNA, 22 nt, Human
agugcucauaaaaaugugaaac

SEQ ID NO: 104114 - RNA, 22 nt, Human
auguuuguguuucccauucagg

SEQ ID NO: 104115 - RNA, 22 nt, Human
auguuuguugaucauuuaugaa

SEQ ID NO: 104116 - RNA, 22 nt, Human
auguuuuacccuuugcacaaac

SEQ ID NO: 104117 - RNA, 20 nt, Human
auguuuuauaaaagaacggg

SEQ ID NO: 104118 - RNA, 19 nt, Human
auguuuuaugcugauggga

SEQ ID NO: 104119 - RNA, 23 nt, Human
auguuuuaugucucuagcugcca

SEQ ID NO: 104120 - RNA, 22 nt, Human
auguuuuucauaccaguguugg

SEQ ID NO: 104121 - RNA, 22 nt, Human
auuaaaagagauaauguguguu

SEQ ID NO: 104122 - RNA, 22 nt, Human
auuaaacugagcaaauuaacau

SEQ ID NO: 104123 - RNA, 22 nt, Human
auuaaagaaacccagcauguga

SEQ ID NO: 104124 - RNA, 22 nt, Human
auuaaaguugaaauugaacuga

SEQ ID NO: 104125 - RNA, 22 nt, Human
auuaaauacugcaggcuaagca

SEQ ID NO: 104126 - RNA, 22 nt, Human
auuaaauuagcaaacugugaaa

SEQ ID NO: 104127 - RNA, 20 nt, Human
auuaacacugagcuaugggu

SEQ ID NO: 104128 - RNA, 19 nt, Human
auuaacaucaguguuggcc

SEQ ID NO: 104129 - RNA, 22 nt, Human
auuaacaugcagccagacacac

SEQ ID NO: 104130 - RNA, 22 nt, Human
auuaagcugguccagacaaguu

SEQ ID NO: 104131 - RNA, 18 nt, Human
auuaaggaauucuuuaga

SEQ ID NO: 104132 - RNA, 22 nt, Human
auuaaggagguaaacuaugguu

SEQ ID NO: 104133 - RNA, 22 nt, Human
auuaaggcguuggcgugcuuau

SEQ ID NO: 104134 - RNA, 18 nt, Human
auuaaggcuuugauagua

SEQ ID NO: 104135 - RNA, 22 nt, Human
auuaagggccaauccuccagcc

SEQ ID NO: 104136 - RNA, 22 nt, Human
auuaauaaaauaccacuuuguu

SEQ ID NO: 104137 - RNA, 18 nt, Human
auuaaucauaaaaugcug

SEQ ID NO: 104138 - RNA, 20 nt, Human
auuaaugaauacauuuugau

SEQ ID NO: 104139 - RNA, 22 nt, Human
auuaaugucuaccaguugugug

SEQ ID NO: 104140 - RNA, 22 nt, Human
auuacaacaagaaaaggguaag

SEQ ID NO: 104141 - RNA, 22 nt, Human
auuacaagaugcauccauauuu

SEQ ID NO: 104142 - RNA, 22 nt, Human
auuacaauaauacaugcucauu

SEQ ID NO: 104143 - RNA, 22 nt, Human
auuacacaggauuugccuuacu

SEQ ID NO: 104144 - RNA, 22 nt, Human
auuacacaggcuggcucuuuga

SEQ ID NO: 104145 - RNA, 22 nt, Human
auuacagagggucggucguuuu

SEQ ID NO: 104146 - RNA, 22 nt, Human
auuacaguaaaugcuacaggca

SEQ ID NO: 104147 - RNA, 22 nt, Human
auuacaguagcaaaagaccgga

SEQ ID NO: 104148 - RNA, 22 nt, Human
auuacaguaggauuggaaagga

SEQ ID NO: 104149 - RNA, 22 nt, Human
auuacagugccaccucgugguc

SEQ ID NO: 104150 - RNA, 22 nt, Human
auuacaguggacagcuaugcac

SEQ ID NO: 104151 - RNA, 22 nt, Human
auuacaguuaauuuaccuucuu

SEQ ID NO: 104152 - RNA, 21 nt, Human
auuacaucccuggugauacau

SEQ ID NO: 104153 - RNA, 22 nt, Human
auuaccuaugcucuaguaauca

SEQ ID NO: 104154 - RNA, 22 nt, Human
auuacugaggcaaaguaguuuu

SEQ ID NO: 104155 - RNA, 22 nt, Human
auuacugugacuagccaucugg

SEQ ID NO: 104156 - RNA, 22 nt, Human
auuagaaaauacaugggcuguc

SEQ ID NO: 104157 - RNA, 22 nt, Human
aggucugaguuuguuguuggcu

SEQ ID NO: 104158 - RNA, 22 nt, Human
aggucugaucaugggcccacuu

SEQ ID NO: 104159 - RNA, 22 nt, Human
aggucugguguugaugaauucc

SEQ ID NO: 104160 - RNA, 18 nt, Human
aggucuguggucaccagg

SEQ ID NO: 104161 - RNA, 22 nt, Human
aggugaaguugaggaggcagaa

SEQ ID NO: 104162 - RNA, 22 nt, Human
aggugaaugcucacauucuaau

SEQ ID NO: 104163 - RNA, 22 nt, Human
aggugacaugaaaaauguugag

SEQ ID NO: 104164 - RNA, 22 nt, Human
aggugacugguuuaucuggcag

SEQ ID NO: 104165 - RNA, 22 nt, Human
aggugaguuacaggaggagguc

SEQ ID NO: 104166 - RNA, 19 nt, Human
aggugaugugacucuagaa

SEQ ID NO: 104167 - RNA, 20 nt, Human
aggugcaaggcauggcaugu

SEQ ID NO: 104168 - RNA, 22 nt, Human
aggugcaccugagggugucauc

SEQ ID NO: 104169 - RNA, 22 nt, Human
aggugcacugucuaauuagguc

SEQ ID NO: 104170 - RNA, 22 nt, Human
aggugcagcaugaguccaacgg

SEQ ID NO: 104171 - RNA, 23 nt, Human
aggugcagcccuggaccugcccc

SEQ ID NO: 104172 - RNA, 18 nt, Human
aggugcagccucugaggc

SEQ ID NO: 104173 - RNA, 22 nt, Human
aggugcaggagcugugcaggga

SEQ ID NO: 104174 - RNA, 22 nt, Human
aggugcaugaugcagagugcag

SEQ ID NO: 104175 - RNA, 21 nt, Human
aggugccaaggagaagcaggc

SEQ ID NO: 104176 - RNA, 22 nt, Human
aggugccagaugcacagcugaa

SEQ ID NO: 104177 - RNA, 22 nt, Human
aggugccagcucucaggcagga

SEQ ID NO: 104178 - RNA, 22 nt, Human
aggugccauugcuugccaguuu

SEQ ID NO: 104179 - RNA, 18 nt, Human
aggugcccuccuuacacu

SEQ ID NO: 104180 - RNA, 22 nt, Human
aggugccuaucuggucucugca

SEQ ID NO: 104181 - RNA, 22 nt, Human
aggugcugaacuggugaggucu

SEQ ID NO: 104182 - RNA, 22 nt, Human
aggugcugccccgagaaggaug

SEQ ID NO: 104183 - RNA, 22 nt, Human
aggugcuguuaacauaugaggu

SEQ ID NO: 104184 - RNA, 22 nt, Human
aggugcuuggcucgugcacaca

SEQ ID NO: 104185 - RNA, 22 nt, Human
agguggagacccagagaaggcg

SEQ ID NO: 104186 - RNA, 22 nt, Human
agguggcagacuaacagaagga

SEQ ID NO: 104187 - RNA, 22 nt, Human
agguggcagaggacuccuccug

SEQ ID NO: 104188 - RNA, 22 nt, Human
agguggcagaugggggugcucg

SEQ ID NO: 104189 - RNA, 22 nt, Human
agguggcaguuguggaaccauc

SEQ ID NO: 104190 - RNA, 22 nt, Human
agguggcuccucccauggcugg

SEQ ID NO: 104191 - RNA, 22 nt, Human
agguggcugagcugugccccug

SEQ ID NO: 104192 - RNA, 22 nt, Human
agguggcugccuccccgcgcgg

SEQ ID NO: 104193 - RNA, 17 nt, Human
agguggcugcugcgccu

SEQ ID NO: 104194 - RNA, 22 nt, Human
aggugggcaaugaggccugagu

SEQ ID NO: 104195 - RNA, 22 nt, Human
aggugggcccagugggcuccag

SEQ ID NO: 104196 - RNA, 22 nt, Human
agguggggaggagugucucuuu

SEQ ID NO: 104197 - RNA, 22 nt, Human
aggugggguguuggauguuuau

SEQ ID NO: 104198 - RNA, 22 nt, Human
agguggguccuggcucugccau

SEQ ID NO: 104199 - RNA, 22 nt, Human
aggugggugccuauguauguau

SEQ ID NO: 104200 - RNA, 17 nt, Human
agguggguggaucaccu

SEQ ID NO: 104201 - RNA, 22 nt, Human
agguggucuuaaacugcucugg

SEQ ID NO: 104202 - RNA, 22 nt, Human
agguggucuuguggaugccgca

SEQ ID NO: 104203 - RNA, 22 nt, Human
aggugugagaaacgugaccagu

SEQ ID NO: 104204 - RNA, 22 nt, Human
agguuacagugauuauagguuu

SEQ ID NO: 104205 - RNA, 22 nt, Human
agguuagauaagaagguugugg

SEQ ID NO: 104206 - RNA, 22 nt, Human
agguuaggaaugggagguaaug

SEQ ID NO: 104207 - RNA, 23 nt, Human
agguuaugauuauagagcgagga

SEQ ID NO: 104208 - RNA, 22 nt, Human
agguuauuaaaguguauuuuug

SEQ ID NO: 104209 - RNA, 22 nt, Human
agguuauuguagauuauaggca

SEQ ID NO: 104210 - RNA, 22 nt, Human
agguuauuuuugcuuagaaaga

SEQ ID NO: 104211 - RNA, 22 nt, Human
agguucaaauuguugcaguuuc

SEQ ID NO: 104212 - RNA, 22 nt, Human
agguucacacacacaaaaagau

SEQ ID NO: 104213 - RNA, 23 nt, Human
agguucagcuuucuuacucuggg

SEQ ID NO: 104214 - RNA, 17 nt, Human
agguucagguuacauuc

SEQ ID NO: 104215 - RNA, 22 nt, Human
agguucagugccuggaacaggg

SEQ ID NO: 104216 - RNA, 22 nt, Human
agguuccaggucuggguuaugu

SEQ ID NO: 104217 - RNA, 22 nt, Human
agguucccagagauagagcugu

SEQ ID NO: 104218 - RNA, 23 nt, Human
agguucccccgccaggacccugc

SEQ ID NO: 104219 - RNA, 22 nt, Human
agguuccucuuccucuggccug

SEQ ID NO: 104220 - RNA, 22 nt, Human
agguucgggcacuuacaaaugg

SEQ ID NO: 104221 - RNA, 22 nt, Human
agguucucacacgucuacaccc

SEQ ID NO: 104222 - RNA, 22 nt, Human
agguucuggagaacuuggaggu

SEQ ID NO: 104223 - RNA, 22 nt, Human
agguugaagagacuuuaaauua

SEQ ID NO: 104224 - RNA, 22 nt, Human
agguuguuuugccucauuaucc

SEQ ID NO: 104225 - RNA, 22 nt, Human
agguuuauaggaaauuuguucc

SEQ ID NO: 104226 - RNA, 22 nt, Human
agguuuaucucauagaaagaau

SEQ ID NO: 104227 - RNA, 22 nt, Human
agguuuaugccuuggagcuggg

SEQ ID NO: 104228 - RNA, 19 nt, Human
agguuucuaacuauucaag

SEQ ID NO: 104229 - RNA, 22 nt, Human
agguuucuacuguguuaagaaa

SEQ ID NO: 104230 - RNA, 21 nt, Human
agguuucucuuuuauggaggg

SEQ ID NO: 104231 - RNA, 22 nt, Human
agguuucugcaauguguguaca

SEQ ID NO: 104232 - RNA, 22 nt, Human
aguccaggcggguauagaggcu

SEQ ID NO: 104233 - RNA, 22 nt, Human
aguccagucucacucuuggcag

SEQ ID NO: 104234 - RNA, 22 nt, Human
aguccagugucaaggugccauu

SEQ ID NO: 104235 - RNA, 22 nt, Human
aguccauagaggcugcuuucau

SEQ ID NO: 104236 - RNA, 20 nt, Human
agucccaacauucagcucug

SEQ ID NO: 104237 - RNA, 22 nt, Human
agucccagccuaggcugugcug

SEQ ID NO: 104238 - RNA, 22 nt, Human
agucccagccuguaggauuggg

SEQ ID NO: 104239 - RNA, 22 nt, Human
agucccagcuucccccaugcag

SEQ ID NO: 104240 - RNA, 22 nt, Human
agucccaggcagccgagccggu

SEQ ID NO: 104241 - RNA, 19 nt, Human
agucccaggcccgaaagag

SEQ ID NO: 104242 - RNA, 21 nt, Human
aguccccuguccuuacuucua

SEQ ID NO: 104243 - RNA, 22 nt, Human
agucccuuuagucuggagagcu

SEQ ID NO: 104244 - RNA, 22 nt, Human
aguccgccugcugccguggcag

SEQ ID NO: 104245 - RNA, 22 nt, Human
aguccguuucuccuugaaggca

SEQ ID NO: 104246 - RNA, 22 nt, Human
aguccugaugcucuggcaggag

SEQ ID NO: 104247 - RNA, 18 nt, Human
aguccuggcucuaccacc

SEQ ID NO: 104248 - RNA, 22 nt, Human
aguccuggcucuacgggcuuca

SEQ ID NO: 104249 - RNA, 22 nt, Human
aguccuggguccagcagguccu

SEQ ID NO: 104250 - RNA, 22 nt, Human
aguccugggugugcaaggcaga

SEQ ID NO: 104251 - RNA, 22 nt, Human
aguccuggugacacuccucuuc

SEQ ID NO: 104252 - RNA, 22 nt, Human
aguccugguucugauucugaca

SEQ ID NO: 104253 - RNA, 22 nt, Human
aguccuguugguuccagaggug

SEQ ID NO: 104254 - RNA, 22 nt, Human
aguccuuagaacacuguaucug

SEQ ID NO: 104255 - RNA, 22 nt, Human
aguccuuccggcagauuucacu

SEQ ID NO: 104256 - RNA, 22 nt, Human
aguccuucuuuuaguugcuugg

SEQ ID NO: 104257 - RNA, 22 nt, Human
aguccuuugggaaaaaugacua

SEQ ID NO: 104258 - RNA, 22 nt, Human
agucuaauguuuguaaaaucau

SEQ ID NO: 104259 - RNA, 22 nt, Human
agucuacaacgcaagcaacaug

SEQ ID NO: 104260 - RNA, 22 nt, Human
agucuagaugauccuaggaaua

SEQ ID NO: 104261 - RNA, 22 nt, Human
agucuagauguguacuagguua

SEQ ID NO: 104262 - RNA, 22 nt, Human
agucuauuugcuguccgagcaa

SEQ ID NO: 104263 - RNA, 22 nt, Human
agucuauuuugcuuauucuaug

SEQ ID NO: 104264 - RNA, 22 nt, Human
agucucaagcaccgaaagcugu

SEQ ID NO: 104265 - RNA, 19 nt, Human
agucucacccaagcagucu

SEQ ID NO: 104266 - RNA, 22 nt, Human
ggugagaaaaaugaguaugauu

SEQ ID NO: 104267 - RNA, 17 nt, Human
ggugagaccucccacuc

SEQ ID NO: 104268 - RNA, 22 nt, Human
ggugagaggcagugcuguggaa

SEQ ID NO: 104269 - RNA, 18 nt, Human
ggugaggcggcggccagc

SEQ ID NO: 104270 - RNA, 22 nt, Human
ggugaggcguccccaccauggg

SEQ ID NO: 104271 - RNA, 22 nt, Human
ggugagggaguggaacgaggug

SEQ ID NO: 104272 - RNA, 22 nt, Human
ggugaggggcaccucugcccgg

SEQ ID NO: 104273 - RNA, 22 nt, Human
ggugaggggcgccucugcccag

SEQ ID NO: 104274 - RNA, 22 nt, Human
ggugaguuucaugguuguuuac

SEQ ID NO: 104275 - RNA, 22 nt, Human
ggugcaaacguaauugugguuu

SEQ ID NO: 104276 - RNA, 22 nt, Human
ggugcagaagaaagcagucauu

SEQ ID NO: 104277 - RNA, 22 nt, Human
ggugcagcuggacagagaagcc

SEQ ID NO: 104278 - RNA, 22 nt, Human
ggugcaggaaucugcaauugaa

SEQ ID NO: 104279 - RNA, 22 nt, Human
ggugcagugcaggguaauuaua

SEQ ID NO: 104280 - RNA, 22 nt, Human
ggugccagaguggcccaggggc

SEQ ID NO: 104281 - RNA, 22 nt, Human
ggugccagccuagugcaguggu

SEQ ID NO: 104282 - RNA, 22 nt, Human
ggugcccagagccaggaaugag

SEQ ID NO: 104283 - RNA, 22 nt, Human
ggugcccagcaagcuuucaaug

SEQ ID NO: 104284 - RNA, 22 nt, Human
ggugcccagcgaaguggcugug

SEQ ID NO: 104285 - RNA, 22 nt, Human
ggugccuguauuuggggcacag

SEQ ID NO: 104286 - RNA, 22 nt, Human
ggugcucaaggugacaggacau

SEQ ID NO: 104287 - RNA, 22 nt, Human
ggugcugaauucuggaggaggc

SEQ ID NO: 104288 - RNA, 22 nt, Human
ggugcugacauucagagucugg

SEQ ID NO: 104289 - RNA, 22 nt, Human
ggugcugacuucacagucuuac

SEQ ID NO: 104290 - RNA, 22 nt, Human
ggugcugagagccuaggagggc

SEQ ID NO: 104291 - RNA, 22 nt, Human
ggugcugaggccuuggcaggga

SEQ ID NO: 104292 - RNA, 22 nt, Human
ggugcugagugagcuagaggcu

SEQ ID NO: 104293 - RNA, 22 nt, Human
ggugcugauaguaacaauaaua

SEQ ID NO: 104294 - RNA, 22 nt, Human
ggugcugaugaagauguagccu

SEQ ID NO: 104295 - RNA, 22 nt, Human
ggugcugaugaguuaggagagg

SEQ ID NO: 104296 - RNA, 22 nt, Human
ggugcuggacacguggcacucc

SEQ ID NO: 104297 - RNA, 22 nt, Human
ggugcugggaacgaggaauuca

SEQ ID NO: 104298 - RNA, 22 nt, Human
ggugcugguucaggguggcugu

SEQ ID NO: 104299 - RNA, 22 nt, Human
ggugcuguggcagcuccuccuc

SEQ ID NO: 104300 - RNA, 22 nt, Human
gguggacaguguuagcucuggg

SEQ ID NO: 104301 - RNA, 22 nt, Human
gguggagcuauacgggauggcu

SEQ ID NO: 104302 - RNA, 22 nt, Human
gguggaguaauucgcagagguu

SEQ ID NO: 104303 - RNA, 22 nt, Human
gguggauagguacauggacuuu

SEQ ID NO: 104304 - RNA, 22 nt, Human
gguggauggacucucgggggcc

SEQ ID NO: 104305 - RNA, 22 nt, Human
gguggcaccuuacccugcgcag

SEQ ID NO: 104306 - RNA, 22 nt, Human
gguggcaccuugaucuuggacu

SEQ ID NO: 104307 - RNA, 22 nt, Human
gguggcagagaggagguaguuu

SEQ ID NO: 104308 - RNA, 23 nt, Human
gguggcaggaguggaugcugagc

SEQ ID NO: 104309 - RNA, 22 nt, Human
gguggccauucuaccgccuucu

SEQ ID NO: 104310 - RNA, 22 nt, Human
gguggccucgguggugcacagg

SEQ ID NO: 104311 - RNA, 22 nt, Human
gguggccucucaugcaagguag

SEQ ID NO: 104312 - RNA, 17 nt, Human
gguggccugcaguggcu

SEQ ID NO: 104313 - RNA, 18 nt, Human
gguggcucagucaugggg

SEQ ID NO: 104314 - RNA, 22 nt, Human
gguggcucccacccagcuuuga

SEQ ID NO: 104315 - RNA, 22 nt, Human
gguggcugcacccuggcuaacu

SEQ ID NO: 104316 - RNA, 22 nt, Human
gguggcuggaggagcugaugga

SEQ ID NO: 104317 - RNA, 22 nt, Human
ggugggaaggggccagugugcg

SEQ ID NO: 104318 - RNA, 22 nt, Human
ggugggagagcucugucuccag

SEQ ID NO: 104319 - RNA, 22 nt, Human
ggugggagggcugcguuccucu

SEQ ID NO: 104320 - RNA, 16 nt, Human
ggugggaggugaggug

SEQ ID NO: 104321 - RNA, 22 nt, Human
ggugggcaggcgaggcccaggu

SEQ ID NO: 104322 - RNA, 22 nt, Human
ggugggcgacugagagggguuu

SEQ ID NO: 104323 - RNA, 22 nt, Human
gguggggagucaggcauucuug

SEQ ID NO: 104324 - RNA, 22 nt, Human
gguggggcccaggcaucugaug

SEQ ID NO: 104325 - RNA, 21 nt, Human
ggugggguaccuaagguagcu

SEQ ID NO: 104326 - RNA, 22 nt, Human
gguggguauaguuagggccucu

SEQ ID NO: 104327 - RNA, 19 nt, Human
ggugggugaccuccccacc

SEQ ID NO: 104328 - RNA, 22 nt, Human
ggugggugcagggggcuucuua

SEQ ID NO: 104329 - RNA, 22 nt, Human
gguggugacuguccuagggaug

SEQ ID NO: 104330 - RNA, 22 nt, Human
gguggugggagagcuuucugga

SEQ ID NO: 104331 - RNA, 22 nt, Human
gguguagaaaagggaaggguuu

SEQ ID NO: 104332 - RNA, 22 nt, Human
ggugucaaugcucccaccuugg

SEQ ID NO: 104333 - RNA, 22 nt, Human
ggugucauccaacaggacaggg

SEQ ID NO: 104334 - RNA, 22 nt, Human
gguguccacucagcccguccug

SEQ ID NO: 104335 - RNA, 22 nt, Human
gguguccgcgcuguagaagguc

SEQ ID NO: 104336 - RNA, 22 nt, Human
gguguccucggauucagggcag

SEQ ID NO: 104337 - RNA, 22 nt, Human
gguguccugucagcuagaguga

SEQ ID NO: 104338 - RNA, 22 nt, Human
gguguccuuagaaagcagaccu

SEQ ID NO: 104339 - RNA, 22 nt, Human
gguguccuuguccuuugguacc

SEQ ID NO: 104340 - RNA, 22 nt, Human
gguguccuuugggggcuccgag

SEQ ID NO: 104341 - RNA, 22 nt, Human
ggugucugauuccaaggccaca

SEQ ID NO: 104342 - RNA, 19 nt, Human
ggugugaagugaggaguua

SEQ ID NO: 104343 - RNA, 22 nt, Human
ggugugggagagauucuuuccu

SEQ ID NO: 104344 - RNA, 22 nt, Human
gguguggguccuugugcuugcu

SEQ ID NO: 104345 - RNA, 22 nt, Human
gguguguagcauguuuaagacc

SEQ ID NO: 104346 - RNA, 22 nt, Human
ggugugugguccucucacuuag

SEQ ID NO: 104347 - RNA, 22 nt, Human
ggugugugguuuugauacaguc

SEQ ID NO: 104348 - RNA, 22 nt, Human
gguuaaacacuuuggaaguggc

SEQ ID NO: 104349 - RNA, 22 nt, Human
gguucacagguccgacugcugg

SEQ ID NO: 104350 - RNA, 22 nt, Human
gguucacagguccugggagcag

SEQ ID NO: 104351 - RNA, 22 nt, Human
gguucaguggaauguguugacc

SEQ ID NO: 104352 - RNA, 22 nt, Human
gguuccacgguguuuggaggca

SEQ ID NO: 104353 - RNA, 22 nt, Human
gguuccugugcccaugucaugg

SEQ ID NO: 104354 - RNA, 22 nt, Human
gguuccuguguacuguggcuua

SEQ ID NO: 104355 - RNA, 22 nt, Human
gguucugacaagcugggauggu

SEQ ID NO: 104356 - RNA, 22 nt, Human
gguuggacacuagguaggagcg

SEQ ID NO: 104357 - RNA, 22 nt, Human
gguuggaggugggaauagcuag

SEQ ID NO: 104358 - RNA, 22 nt, Human
gguuggggcgagcuggaggccc

SEQ ID NO: 104359 - RNA, 22 nt, Human
gguugguaacucccugugcagu

SEQ ID NO: 104360 - RNA, 22 nt, Human
gguuggugagugcaggguguua

SEQ ID NO: 104361 - RNA, 22 nt, Human
gguuguaguuggagguuguaua

SEQ ID NO: 104362 - RNA, 19 nt, Human
gguuuaucuguuucuucuc

SEQ ID NO: 104363 - RNA, 22 nt, Human
gguuuauuaaugugaacuguau

SEQ ID NO: 104364 - RNA, 22 nt, Human
gguuuauuguuaauaaguuuga

SEQ ID NO: 104365 - RNA, 22 nt, Human
gguuucaaauuaaagucuuaag

SEQ ID NO: 104366 - RNA, 22 nt, Human
gguuuccaccuugcuaugagaa

SEQ ID NO: 104367 - RNA, 22 nt, Human
gguuuccugcauugggaaauuu

SEQ ID NO: 104368 - RNA, 22 nt, Human
gguuugguuuuggccaucuucc

SEQ ID NO: 104369 - RNA, 22 nt, Human
gguuuucaguuugugagcucug

SEQ ID NO: 104370 - RNA, 22 nt, Human
gguuuuggaaguauaaagaugu

SEQ ID NO: 104371 - RNA, 22 nt, Human
guaaaaccugcuuuucaacacc

SEQ ID NO: 104372 - RNA, 22 nt, Human
guaaaacugcagaacuuggagg

SEQ ID NO: 104373 - RNA, 22 nt, Human
guaaaaucuuuccuauuugccu

SEQ ID NO: 104374 - RNA, 22 nt, Human
guaaaauugcaauuacuuuugc

SEQ ID NO: 104375 - RNA, 22 nt, Human
gcagggccagguacaagaagca

SEQ ID NO: 104376 - RNA, 20 nt, Human
gcagggcgacacgggggagg

SEQ ID NO: 104377 - RNA, 22 nt, Human
gcagggcuaggucuucuagggc

SEQ ID NO: 104378 - RNA, 22 nt, Human
gcagggcucaacaggacacccc

SEQ ID NO: 104379 - RNA, 22 nt, Human
gcagggcuccacuguggccaag

SEQ ID NO: 104380 - RNA, 22 nt, Human
gcagggcucugcuguaguccua

SEQ ID NO: 104381 - RNA, 22 nt, Human
gcagggcugacucagccacccu

SEQ ID NO: 104382 - RNA, 22 nt, Human
gcagggcugagucaugugugcc

SEQ ID NO: 104383 - RNA, 18 nt, Human
gcagggcugcacacgcau

SEQ ID NO: 104384 - RNA, 22 nt, Human
gcagggcuguucaggagggugg

SEQ ID NO: 104385 - RNA, 22 nt, Human
gcagggcuugcagcagcuagac

SEQ ID NO: 104386 - RNA, 22 nt, Human
gcaggggcggcuggguuuccag

SEQ ID NO: 104387 - RNA, 22 nt, Human
gcaggggcuacucugagcuucc

SEQ ID NO: 104388 - RNA, 22 nt, Human
gcagggggauggaguugaaaug

SEQ ID NO: 104389 - RNA, 22 nt, Human
gcaggguacauugggaugggau

SEQ ID NO: 104390 - RNA, 21 nt, Human
gcaggguccuuuccauuccua

SEQ ID NO: 104391 - RNA, 22 nt, Human
gcaggguggauggcagggccag

SEQ ID NO: 104392 - RNA, 22 nt, Human
gcagguagugaucgagggugac

SEQ ID NO: 104393 - RNA, 19 nt, Human
gcaggucauuaggcuaggu

SEQ ID NO: 104394 - RNA, 22 nt, Human
gcaggucucaaucugagcaggc

SEQ ID NO: 104395 - RNA, 22 nt, Human
gcaggucuggcauagagccugc

SEQ ID NO: 104396 - RNA, 22 nt, Human
gcaggucuguugauuacaguca

SEQ ID NO: 104397 - RNA, 22 nt, Human
gcaggugaaugauggacuagga

SEQ ID NO: 104398 - RNA, 22 nt, Human
gcaggugauucacccugggccu

SEQ ID NO: 104399 - RNA, 22 nt, Human
gcagguggagcaguagucuggu

SEQ ID NO: 104400 - RNA, 22 nt, Human
gcagguggauauugcuacuuga

SEQ ID NO: 104401 - RNA, 14 nt, Human
gcagguggaucacc

SEQ ID NO: 104402 - RNA, 22 nt, Human
gcaggugggagccgcugccuga

SEQ ID NO: 104403 - RNA, 16 nt, Human
gcagguggggcgcgca

SEQ ID NO: 104404 - RNA, 22 nt, Human
gcaggugggggagaaguuguga

SEQ ID NO: 104405 - RNA, 22 nt, Human
gcagguggucacucauccccag

SEQ ID NO: 104406 - RNA, 22 nt, Human
gcaggugucaguccccaaggug

SEQ ID NO: 104407 - RNA, 22 nt, Human
gcaggugugaaugugaauuaag

SEQ ID NO: 104408 - RNA, 22 nt, Human
gcaggugugcugaauuacguga

SEQ ID NO: 104409 - RNA, 22 nt, Human
gcagguguggagaguggucggg

SEQ ID NO: 104410 - RNA, 22 nt, Human
guacaaaugagaguucuguuuu

SEQ ID NO: 104411 - RNA, 22 nt, Human
guacaaauuaggaagcuuugug

SEQ ID NO: 104412 - RNA, 22 nt, Human
guacaacaggauugauguacca

SEQ ID NO: 104413 - RNA, 22 nt, Human
guacaacaugauuuuacucucu

SEQ ID NO: 104414 - RNA, 22 nt, Human
guacaagaggagaaaauggagu

SEQ ID NO: 104415 - RNA, 21 nt, Human
guacaagcucaccaaguggac

SEQ ID NO: 104416 - RNA, 22 nt, Human
guacaauuccugucaagcuggc

SEQ ID NO: 104417 - RNA, 22 nt, Human
guacacauacuauucaaagaga

SEQ ID NO: 104418 - RNA, 23 nt, Human
guacacauaguguaguuauauuu

SEQ ID NO: 104419 - RNA, 22 nt, Human
guacagaaaugugaugacgcaa

SEQ ID NO: 104420 - RNA, 22 nt, Human
guacagaaggauuucuaguagu

SEQ ID NO: 104421 - RNA, 22 nt, Human
guacagagaagguuacauauga

SEQ ID NO: 104422 - RNA, 22 nt, Human
guacagagguugcuggaggcuc

SEQ ID NO: 104423 - RNA, 22 nt, Human
guacaggaaggagggaguuuca

SEQ ID NO: 104424 - RNA, 22 nt, Human
guacaggccaccacugaauuuu

SEQ ID NO: 104425 - RNA, 22 nt, Human
guacaguacuucagaaccagcc

SEQ ID NO: 104426 - RNA, 22 nt, Human
guacauaagaaauuacuacaga

SEQ ID NO: 104427 - RNA, 22 nt, Human
guacaugagcauaaacacacau

SEQ ID NO: 104428 - RNA, 22 nt, Human
guacauguugguuguuuccagu

SEQ ID NO: 104429 - RNA, 22 nt, Human
guacauuggcaacucucuuaga

SEQ ID NO: 104430 - RNA, 22 nt, Human
guacauuuacugaugaaaagua

SEQ ID NO: 104431 - RNA, 22 nt, Human
guacauuuaggauucauugaaa

SEQ ID NO: 104432 - RNA, 22 nt, Human
guaccaaaucuguauuaggaaa

SEQ ID NO: 104433 - RNA, 22 nt, Human
guaccaugggaucuagggccca

SEQ ID NO: 104434 - RNA, 22 nt, Human
guaccugggggauccacuucuu

SEQ ID NO: 104435 - RNA, 22 nt, Human
guacuacaguuucucauuaaau

SEQ ID NO: 104436 - RNA, 20 nt, Human
guacucagaucaagucagcu

SEQ ID NO: 104437 - RNA, 22 nt, Human
guacugaauaacaaagucuguc

SEQ ID NO: 104438 - RNA, 22 nt, Human
guacugcuguaaauauucuuca

SEQ ID NO: 104439 - RNA, 22 nt, Human
guacuuuaagacuccaguagca

SEQ ID NO: 104440 - RNA, 22 nt, Human
guagaaauguaaccaggagaua

SEQ ID NO: 104441 - RNA, 20 nt, Human
guagaaccaugugugcuggg

SEQ ID NO: 104442 - RNA, 22 nt, Human
guagaaccuucuuuacuagagu

SEQ ID NO: 104443 - RNA, 22 nt, Human
guagaacucccagugguauugu

SEQ ID NO: 104444 - RNA, 22 nt, Human
guagaauaaauguacacaucug

SEQ ID NO: 104445 - RNA, 22 nt, Human
guagaauuaccucucuaugucc

SEQ ID NO: 104446 - RNA, 22 nt, Human
guagacaaauuucuucucucaa

SEQ ID NO: 104447 - RNA, 22 nt, Human
guagacaucuagauuuaugugu

SEQ ID NO: 104448 - RNA, 22 nt, Human
guagagcagggagcaggaagcu

SEQ ID NO: 104449 - RNA, 22 nt, Human
guagcaauguugaacacugcgu

SEQ ID NO: 104450 - RNA, 22 nt, Human
guagcagcagagcagguccucc

SEQ ID NO: 104451 - RNA, 22 nt, Human
guagcagcucuccaggguucac

SEQ ID NO: 104452 - RNA, 22 nt, Human
guagcagcucugagcaugcugc

SEQ ID NO: 104453 - RNA, 22 nt, Human
guagcagcuucagcccaaauua

SEQ ID NO: 104454 - RNA, 22 nt, Human
guagcauucugaguucgcagag

SEQ ID NO: 104455 - RNA, 22 nt, Human
guagcugauccugaggacaggg

SEQ ID NO: 104456 - RNA, 22 nt, Human
guagcugucucggucaggaguu

SEQ ID NO: 104457 - RNA, 22 nt, Human
guagcuuauuagggauaauagu

SEQ ID NO: 104458 - RNA, 22 nt, Human
guagcuuccagaaagugucuuu

SEQ ID NO: 104459 - RNA, 23 nt, Human
guaggaauuuucacuuccucuug

SEQ ID NO: 104460 - RNA, 22 nt, Human
guaggcagggcuguggggagaa

SEQ ID NO: 104461 - RNA, 22 nt, Human
guaggcagugguuggaagagaa

SEQ ID NO: 104462 - RNA, 22 nt, Human
guaggcugugugaggcuagaga

SEQ ID NO: 104463 - RNA, 21 nt, Human
guagggacagagaguugguga

SEQ ID NO: 104464 - RNA, 22 nt, Human
guagggacaugccauuaucuca

SEQ ID NO: 104465 - RNA, 22 nt, Human
guagggcaacaugggcacuagg

SEQ ID NO: 104466 - RNA, 22 nt, Human
guaggggugcugagaucuggaa

SEQ ID NO: 104467 - RNA, 18 nt, Human
guaggucaguaccaagca

SEQ ID NO: 104468 - RNA, 22 nt, Human
guaguaaagcagguuuugcugu

SEQ ID NO: 104469 - RNA, 22 nt, Human
guagucacaaaccauucauaug

SEQ ID NO: 104470 - RNA, 22 nt, Human
guaguguguaggcacugugcuc

SEQ ID NO: 104471 - RNA, 22 nt, Human
guauaacugcuaccaccugaug

SEQ ID NO: 104472 - RNA, 22 nt, Human
guauacaauacacaaugcucug

SEQ ID NO: 104473 - RNA, 22 nt, Human
guauacacugguaagauuuguc

SEQ ID NO: 104474 - RNA, 22 nt, Human
guauacauacuucuagauuaaa

SEQ ID NO: 104475 - RNA, 22 nt, Human
guauacauuuauuacaggucuu

SEQ ID NO: 104476 - RNA, 22 nt, Human
guauacuugcagacauuuauau

SEQ ID NO: 104477 - RNA, 22 nt, Human
guauagaaacccagaaagauag

SEQ ID NO: 104478 - RNA, 22 nt, Human
guauagaaggaucuggugaauu

SEQ ID NO: 104479 - RNA, 20 nt, Human
guauauaaccauagugacua

SEQ ID NO: 104480 - RNA, 22 nt, Human
guauaucaccccaagcagcuga

SEQ ID NO: 104481 - RNA, 22 nt, Human
guauaucaggcagaauguucuc

SEQ ID NO: 104482 - RNA, 22 nt, Human
guauaugagaaccauggaggug

SEQ ID NO: 104483 - RNA, 22 nt, Human
guauccaugggggauugguucc

SEQ ID NO: 104484 - RNA, 18 nt, Human
gccuggcugccaacccag

SEQ ID NO: 104485 - RNA, 23 nt, Human
gccuggcuuccaagguaggggag

SEQ ID NO: 104486 - RNA, 18 nt, Human
gccuggcuucggagccgc

SEQ ID NO: 104487 - RNA, 22 nt, Human
gccuggcuugccagcccuggcg

SEQ ID NO: 104488 - RNA, 21 nt, Human
gccugggaaaucugggaagcc

SEQ ID NO: 104489 - RNA, 22 nt, Human
gccugggaagacuaagugggag

SEQ ID NO: 104490 - RNA, 22 nt, Human
gccugggagagggauagugcag

SEQ ID NO: 104491 - RNA, 22 nt, Human
gccugggagcacaucggggucc

SEQ ID NO: 104492 - RNA, 18 nt, Human
gccugggaggaggaaaug

SEQ ID NO: 104493 - RNA, 16 nt, Human
gccugggagggaacag

SEQ ID NO: 104494 - RNA, 22 nt, Human
gccuggggaacuugauccuguc

SEQ ID NO: 104495 - RNA, 22 nt, Human
gccuggggcaugcagcugauac

SEQ ID NO: 104496 - RNA, 22 nt, Human
gccugggugaauuugauccuaa

SEQ ID NO: 104497 - RNA, 22 nt, Human
gccugggugagggucuccuuca

SEQ ID NO: 104498 - RNA, 22 nt, Human
gccuggguuccaugaucuccag

SEQ ID NO: 104499 - RNA, 22 nt, Human
gccuggucucugggguugggua

SEQ ID NO: 104500 - RNA, 22 nt, Human
gccuggugguauccuggcaaga

SEQ ID NO: 104501 - RNA, 22 nt, Human
gccuguccccaggagaguccgg

SEQ ID NO: 104502 - RNA, 22 nt, Human
gccugucucuuggaacuuggua

SEQ ID NO: 104503 - RNA, 22 nt, Human
gccugugacccagggcccagga

SEQ ID NO: 104504 - RNA, 22 nt, Human
gccugugacucgucuugggcca

SEQ ID NO: 104505 - RNA, 22 nt, Human
gccugugcuuaacugacgugag

SEQ ID NO: 104506 - RNA, 22 nt, Human
gccuguggcccaacugucuguc

SEQ ID NO: 104507 - RNA, 22 nt, Human
gccugugguuugauuaagcauu

SEQ ID NO: 104508 - RNA, 22 nt, Human
gccuguguccuucccagugggg

SEQ ID NO: 104509 - RNA, 22 nt, Human
gccuguucuccagcauccaggu

SEQ ID NO: 104510 - RNA, 22 nt, Human
gccuguuuaaguauucugacau

SEQ ID NO: 104511 - RNA, 22 nt, Human
gccuguuuccaucaacacaugc

SEQ ID NO: 104512 - RNA, 22 nt, Human
gccuguuuguuaugucauggua

SEQ ID NO: 104513 - RNA, 22 nt, Human
gccuuaauacagauggguggug

SEQ ID NO: 104514 - RNA, 22 nt, Human
gccuuaauuaguaacagaccau

SEQ ID NO: 104515 - RNA, 22 nt, Human
gccuuaauuuuuuauaaucucu

SEQ ID NO: 104516 - RNA, 22 nt, Human
gccuuagcaucuuaaagcugug

SEQ ID NO: 104517 - RNA, 18 nt, Human
gccuucagacugcaugcu

SEQ ID NO: 104518 - RNA, 22 nt, Human
gccuucagaguaccauguccuc

SEQ ID NO: 104519 - RNA, 22 nt, Human
gccuucaggaaaucaguccuug

SEQ ID NO: 104520 - RNA, 22 nt, Human
gccuucaggaggguuccagaca

SEQ ID NO: 104521 - RNA, 22 nt, Human
gccuucaggugcugccaggcua

SEQ ID NO: 104522 - RNA, 22 nt, Human
gccuucaguaguauccucauga

SEQ ID NO: 104523 - RNA, 22 nt, Human
gccuucaguagugucagcugua

SEQ ID NO: 104524 - RNA, 17 nt, Human
gccuuccagcauguggg

SEQ ID NO: 104525 - RNA, 22 nt, Human
gccuucccacccugcgaggcug

SEQ ID NO: 104526 - RNA, 22 nt, Human
gccuucuguccaaccccacgau

SEQ ID NO: 104527 - RNA, 22 nt, Human
gccuucugugcuccuggccuuu

SEQ ID NO: 104528 - RNA, 22 nt, Human
gccuugaacucauguauauuga

SEQ ID NO: 104529 - RNA, 22 nt, Human
gccuugaucugcuguguuugag

SEQ ID NO: 104530 - RNA, 21 nt, Human
gccuugccgugaaagcccuuu

SEQ ID NO: 104531 - RNA, 22 nt, Human
gccuuggaaagcuggagcaguu

SEQ ID NO: 104532 - RNA, 22 nt, Human
gccuuggaacaauuauugcugc

SEQ ID NO: 104533 - RNA, 22 nt, Human
gccuuggacuaccacucccaca

SEQ ID NO: 104534 - RNA, 23 nt, Human
gccuuggagaagucacucaggga

SEQ ID NO: 104535 - RNA, 22 nt, Human
gccuugggccagcugcucugga

SEQ ID NO: 104536 - RNA, 17 nt, Human
gccuuuauacaugcugc

SEQ ID NO: 104537 - RNA, 22 nt, Human
gccuuuauauuuuucugguguu

SEQ ID NO: 104538 - RNA, 22 nt, Human
gccuuuaucccuguacaaggug

SEQ ID NO: 104539 - RNA, 18 nt, Human
gccuuuggacugcuccca

SEQ ID NO: 104540 - RNA, 22 nt, Human
gccuuuggugacaggcaugugu

SEQ ID NO: 104541 - RNA, 22 nt, Human
gccuuuuaaggcagagggagau

SEQ ID NO: 104542 - RNA, 22 nt, Human
gccuuuuuuguugcucugucac

SEQ ID NO: 104543 - RNA, 22 nt, Human
gcgacuguacagaauugccccu

SEQ ID NO: 104544 - RNA, 19 nt, Human
gcgaggaagucacuguggu

SEQ ID NO: 104545 - RNA, 22 nt, Human
gcgcaccaccuccagguggccg

SEQ ID NO: 104546 - RNA, 22 nt, Human
gcgcaggagccgcggagggccg

SEQ ID NO: 104547 - RNA, 22 nt, Human
gcgcaggcccgggucagggccg

SEQ ID NO: 104548 - RNA, 22 nt, Human
gcgccuauuuucauuaucaagg

SEQ ID NO: 104549 - RNA, 22 nt, Human
gcgcgcuaccgccagggcugca

SEQ ID NO: 104550 - RNA, 22 nt, Human
gcgcucaggugccaggccugcg

SEQ ID NO: 104551 - RNA, 22 nt, Human
gcgcuccucccggcccuggugg

SEQ ID NO: 104552 - RNA, 22 nt, Human
gcgcugaggcuggaggcgcacg

SEQ ID NO: 104553 - RNA, 23 nt, Human
gcggaaggggucauaauggagac

SEQ ID NO: 104554 - RNA, 22 nt, Human
gcggcaggaagagcgcagcccc

SEQ ID NO: 104555 - RNA, 22 nt, Human
gcggcccgagcaggacgggugg

SEQ ID NO: 104556 - RNA, 22 nt, Human
gcggccugcgcugcucccgacg

SEQ ID NO: 104557 - RNA, 18 nt, Human
gcgggcggugcagugggc

SEQ ID NO: 104558 - RNA, 22 nt, Human
gcggggccauguccaacggccu

SEQ ID NO: 104559 - RNA, 22 nt, Human
gcgguagcucaagcuuguaauc

SEQ ID NO: 104560 - RNA, 22 nt, Human
gcgucucaaggcccccaggcca

SEQ ID NO: 104561 - RNA, 22 nt, Human
gcgugcaacagccucuuccauu

SEQ ID NO: 104562 - RNA, 22 nt, Human
gcgugggcuggacugggaugaa

SEQ ID NO: 104563 - RNA, 22 nt, Human
gcgugggguagguagacaugga

SEQ ID NO: 104564 - RNA, 22 nt, Human
gccacccuggaccacccugggc

SEQ ID NO: 104565 - RNA, 22 nt, Human
gccaccuccuuauuccaccugu

SEQ ID NO: 104566 - RNA, 20 nt, Human
gccaccucucuagcaguaga

SEQ ID NO: 104567 - RNA, 22 nt, Human
gccaccuggacucagagccagg

SEQ ID NO: 104568 - RNA, 22 nt, Human
gccaccuguuucgcuugcccag

SEQ ID NO: 104569 - RNA, 21 nt, Human
gccacguuucagucuucucag

SEQ ID NO: 104570 - RNA, 22 nt, Human
gccacucaugggaggugugcaa

SEQ ID NO: 104571 - RNA, 19 nt, Human
gccacuccugaugcugccc

SEQ ID NO: 104572 - RNA, 22 nt, Human
gccacugaacauuagagcuagu

SEQ ID NO: 104573 - RNA, 20 nt, Human
gccacugggcaccagcaggg

SEQ ID NO: 104574 - RNA, 22 nt, Human
gccacugucauacccuggcaau

SEQ ID NO: 104575 - RNA, 22 nt, Human
gccacuguccugugccugugcu

SEQ ID NO: 104576 - RNA, 21 nt, Human
gccacugugcacacuaaccca

SEQ ID NO: 104577 - RNA, 22 nt, Human
gccacuguugcuccucaggaaa

SEQ ID NO: 104578 - RNA, 22 nt, Human
gccagagaaugaaaaucagauu

SEQ ID NO: 104579 - RNA, 22 nt, Human
gccagagagauggaaaagcuua

SEQ ID NO: 104580 - RNA, 22 nt, Human
gccagagcagaauagaguggcc

SEQ ID NO: 104581 - RNA, 21 nt, Human
gccagagcaguacaaugaggu

SEQ ID NO: 104582 - RNA, 22 nt, Human
gccagagcaucgcacccuccau

SEQ ID NO: 104583 - RNA, 22 nt, Human
gccagagccggcuucacaggau

SEQ ID NO: 104584 - RNA, 22 nt, Human
gccagagcugagugagguucuu

SEQ ID NO: 104585 - RNA, 23 nt, Human
gccagagcugccugcccuugcug

SEQ ID NO: 104586 - RNA, 22 nt, Human
gccagaggcccaaggacagcug

SEQ ID NO: 104587 - RNA, 18 nt, Human
gccagagggcccaagguc

SEQ ID NO: 104588 - RNA, 18 nt, Human
gccagagguacuacugau

SEQ ID NO: 104589 - RNA, 22 nt, Human
gccagagguaucaaagauagua

SEQ ID NO: 104590 - RNA, 22 nt, Human
gccagagguucaacaacugucu

SEQ ID NO: 104591 - RNA, 20 nt, Human
gccagaguuaugaugagagg

SEQ ID NO: 104592 - RNA, 22 nt, Human
gccagaguugaggcaguuuauu

SEQ ID NO: 104593 - RNA, 22 nt, Human
gccagcaaagcaaguugucagc

SEQ ID NO: 104594 - RNA, 22 nt, Human
gcuagcagguugcaucugucuu

SEQ ID NO: 104595 - RNA, 20 nt, Human
gcuaggaaggggaaaaagug

SEQ ID NO: 104596 - RNA, 22 nt, Human
gcuaggaguaaggagaccuuca

SEQ ID NO: 104597 - RNA, 22 nt, Human
gcuaggcucggaagcagcaggg

SEQ ID NO: 104598 - RNA, 19 nt, Human
gcuaggcuggccuugaggg

SEQ ID NO: 104599 - RNA, 20 nt, Human
gcuaggcuggugauugucaa

SEQ ID NO: 104600 - RNA, 20 nt, Human
gcuaggcuguguccugccca

SEQ ID NO: 104601 - RNA, 22 nt, Human
gcuagggaucugauuugcuguu

SEQ ID NO: 104602 - RNA, 22 nt, Human
gcuagugagcucuuugucaucu

SEQ ID NO: 104603 - RNA, 22 nt, Human
gcuaucuaccacaucagccagg

SEQ ID NO: 104604 - RNA, 22 nt, Human
gcuaugaauauccaugaucagc

SEQ ID NO: 104605 - RNA, 22 nt, Human
gcuauguucccuuuugcuauaa

SEQ ID NO: 104606 - RNA, 22 nt, Human
gcuauucauggagcauguacug

SEQ ID NO: 104607 - RNA, 22 nt, Human
gcuauugugacagcuuuucgcc

SEQ ID NO: 104608 - RNA, 22 nt, Human
gcuauuuccaaagcugcuguuc

SEQ ID NO: 104609 - RNA, 22 nt, Human
gcuauuucuauauuauaaagaa

SEQ ID NO: 104610 - RNA, 22 nt, Human
gcucaaagaccagacagaggag

SEQ ID NO: 104611 - RNA, 22 nt, Human
gcucaaagaggccuccaaaucc

SEQ ID NO: 104612 - RNA, 22 nt, Human
gcucaaagcauaagacaucuaa

SEQ ID NO: 104613 - RNA, 22 nt, Human
gcucaaaggcuaucaauagugu

SEQ ID NO: 104614 - RNA, 21 nt, Human
gcucaaagggcuugccaugcu

SEQ ID NO: 104615 - RNA, 22 nt, Human
gcucaaaucccagcgggcuccu

SEQ ID NO: 104616 - RNA, 22 nt, Human
gcucaagggaugggagugggug

SEQ ID NO: 104617 - RNA, 21 nt, Human
gcucaaguuucucuggcaaca

SEQ ID NO: 104618 - RNA, 22 nt, Human
gcucacagaacuucucuuccca

SEQ ID NO: 104619 - RNA, 22 nt, Human
gcucacagcccaggccagcgug

SEQ ID NO: 104620 - RNA, 22 nt, Human
gcucacagccggcuggcagggg

SEQ ID NO: 104621 - RNA, 23 nt, Human
gcucacaggguguaacuccuagu

SEQ ID NO: 104622 - RNA, 22 nt, Human
gcucaccaagcagagacucugg

SEQ ID NO: 104623 - RNA, 22 nt, Human
gcucacuggccugaagaggacg

SEQ ID NO: 104624 - RNA, 22 nt, Human
gcucagaagauauuugaugcug

SEQ ID NO: 104625 - RNA, 22 nt, Human
gcucagagaaaacuggggcuug

SEQ ID NO: 104626 - RNA, 22 nt, Human
gcucagagaagcgguuucgccu

SEQ ID NO: 104627 - RNA, 22 nt, Human
gcucagagaaguugugccuggc

SEQ ID NO: 104628 - RNA, 19 nt, Human
gcucagagacaccuguugc

SEQ ID NO: 104629 - RNA, 22 nt, Human
gcucagagcaucccagugaaug

SEQ ID NO: 104630 - RNA, 20 nt, Human
gcucagagccugaacuucau

SEQ ID NO: 104631 - RNA, 22 nt, Human
gcucagaggcacgaccucuugg

SEQ ID NO: 104632 - RNA, 19 nt, Human
gcucagagucccccugcgg

SEQ ID NO: 104633 - RNA, 22 nt, Human
gcucaggaucagccaccucuuu

SEQ ID NO: 104634 - RNA, 22 nt, Human
gcucaggcaccauaugaugugu

SEQ ID NO: 104635 - RNA, 22 nt, Human
gcucaggccucacuccauuugg

SEQ ID NO: 104636 - RNA, 22 nt, Human
gcucaggccuggcuauccauug

SEQ ID NO: 104637 - RNA, 21 nt, Human
gcucaggcucagguucagguu

SEQ ID NO: 104638 - RNA, 22 nt, Human
gcucaggcucucccaggggaau

SEQ ID NO: 104639 - RNA, 22 nt, Human
gcucagggaaggccacgugaga

SEQ ID NO: 104640 - RNA, 22 nt, Human
gcucagggaguuucacagugua

SEQ ID NO: 104641 - RNA, 22 nt, Human
gcucagguagaugggguugucc

SEQ ID NO: 104642 - RNA, 20 nt, Human
gcucagguuugggcuuugug

SEQ ID NO: 104643 - RNA, 22 nt, Human
gcucagugaaacaucaaauagu

SEQ ID NO: 104644 - RNA, 22 nt, Human
gcucagugaauuuuugcccaug

SEQ ID NO: 104645 - RNA, 22 nt, Human
gcucagugugcacgaguacucu

SEQ ID NO: 104646 - RNA, 22 nt, Human
gcucagugugguccucagaugu

SEQ ID NO: 104647 - RNA, 18 nt, Human
gcucaguguguuaacacu

SEQ ID NO: 104648 - RNA, 22 nt, Human
gcucaguguguucaagggcuca

SEQ ID NO: 104649 - RNA, 23 nt, Human
gcucauccacggagaggggcucc

SEQ ID NO: 104650 - RNA, 22 nt, Human
gcuccagaguguggcaucuggg

SEQ ID NO: 104651 - RNA, 22 nt, Human
gcuccagcucguggcucccagc

SEQ ID NO: 104652 - RNA, 22 nt, Human
gcuccaggauaauaaaguuguu

SEQ ID NO: 104653 - RNA, 22 nt, Human
gcuccaggcagagccucuuucg

SEQ ID NO: 104654 - RNA, 22 nt, Human
gcuccaggcagcauaguggaug

SEQ ID NO: 104655 - RNA, 22 nt, Human
gcuccaggccacggcuucuugg

SEQ ID NO: 104656 - RNA, 17 nt, Human
gcuccaggcgugaguga

SEQ ID NO: 104657 - RNA, 22 nt, Human
gcuccagggucagcucagaacu

SEQ ID NO: 104658 - RNA, 22 nt, Human
gcuccaggugaauccucucacc

SEQ ID NO: 104659 - RNA, 22 nt, Human
gcuccaggugucccagguaaaa

SEQ ID NO: 104660 - RNA, 22 nt, Human
gcuccaguggauacagcagugg

SEQ ID NO: 104661 - RNA, 22 nt, Human
gcucccacaaccuucuugcucc

SEQ ID NO: 104662 - RNA, 22 nt, Human
gcucccaccaggcagaccuacc

SEQ ID NO: 104663 - RNA, 22 nt, Human
gcucccagaaccaaggcugggg

SEQ ID NO: 104664 - RNA, 22 nt, Human
gcucccagcauugcugcugaau

SEQ ID NO: 104665 - RNA, 22 nt, Human
gcucccaggaugaggagccagg

SEQ ID NO: 104666 - RNA, 22 nt, Human
gcucccaggcauggagguaauu

SEQ ID NO: 104667 - RNA, 22 nt, Human
gcucccaguucccaaagugacc

SEQ ID NO: 104668 - RNA, 22 nt, Human
gcuccccauugaucugcaggcu

SEQ ID NO: 104669 - RNA, 22 nt, Human
gcuccccuugguccuccuggga

SEQ ID NO: 104670 - RNA, 22 nt, Human
gcucccugaagagauuuggucu

SEQ ID NO: 104671 - RNA, 22 nt, Human
gcucccugacucaguuccugag

SEQ ID NO: 104672 - RNA, 22 nt, Human
gcucccugccuacacggaccuu

SEQ ID NO: 104673 - RNA, 21 nt, Human
gcucccugcucagcuccuggg

SEQ ID NO: 104674 - RNA, 22 nt, Human
gcucccuggcuuuuacagugua

SEQ ID NO: 104675 - RNA, 22 nt, Human
gcucccugucucugggguccau

SEQ ID NO: 104676 - RNA, 22 nt, Human
gcucccuuaggccuugccggga

SEQ ID NO: 104677 - RNA, 22 nt, Human
gcuccucuauuccccacauuuu

SEQ ID NO: 104678 - RNA, 22 nt, Human
gcuccucucccagagcugcagg

SEQ ID NO: 104679 - RNA, 22 nt, Human
gcuccugaaggcucugcagggu

SEQ ID NO: 104680 - RNA, 18 nt, Human
gcuccuggagucugacuc

SEQ ID NO: 104681 - RNA, 19 nt, Human
gcuccuggaugaccugugg

SEQ ID NO: 104682 - RNA, 22 nt, Human
guuacaauguucuucaguucug

SEQ ID NO: 104683 - RNA, 22 nt, Human
guuacagugagaagauagccua

SEQ ID NO: 104684 - RNA, 22 nt, Human
guuacagugcauguggcuucug

SEQ ID NO: 104685 - RNA, 22 nt, Human
guuacagugcuuggcaauaagu

SEQ ID NO: 104686 - RNA, 22 nt, Human
guuacauggagcaaugaugcau

SEQ ID NO: 104687 - RNA, 22 nt, Human
guuacauuacuugugcaguugu

SEQ ID NO: 104688 - RNA, 22 nt, Human
guuacauuaggauaauuugcug

SEQ ID NO: 104689 - RNA, 22 nt, Human
guuacauuuauuagaggucucu

SEQ ID NO: 104690 - RNA, 22 nt, Human
guuacauuuggugauuuggugc

SEQ ID NO: 104691 - RNA, 22 nt, Human
guuacucuuccccggggucugg

SEQ ID NO: 104692 - RNA, 22 nt, Human
guuagagggcugccuuuuguuu

SEQ ID NO: 104693 - RNA, 22 nt, Human
guuagcaacaagucucaaugac

SEQ ID NO: 104694 - RNA, 20 nt, Human
guuaggagguuggacaugga

SEQ ID NO: 104695 - RNA, 22 nt, Human
guuaggauauggugaaauggag

SEQ ID NO: 104696 - RNA, 22 nt, Human
guuaggauuauauaucccauga

SEQ ID NO: 104697 - RNA, 22 nt, Human
guuaggcaguuuucuucauucu

SEQ ID NO: 104698 - RNA, 22 nt, Human
guuagggagggugcauaugugu

SEQ ID NO: 104699 - RNA, 22 nt, Human
guuauaaaaugcacaguuguuu

SEQ ID NO: 104700 - RNA, 22 nt, Human
guuauaaauaccuaauaggauu

SEQ ID NO: 104701 - RNA, 22 nt, Human
guuauacaguuuugggucugcu

SEQ ID NO: 104702 - RNA, 22 nt, Human
guuauauuggcagaagagaaga

SEQ ID NO: 104703 - RNA, 22 nt, Human
gcuuaaauuguuuguggauagu

SEQ ID NO: 104704 - RNA, 22 nt, Human
gcuuacaagaucgugcuccagu

SEQ ID NO: 104705 - RNA, 22 nt, Human
gcuuacaaggguaggaagucua

SEQ ID NO: 104706 - RNA, 22 nt, Human
gcuuacaggugaggcagcaaga

SEQ ID NO: 104707 - RNA, 22 nt, Human
gcuuagaaagugauugauacau

SEQ ID NO: 104708 - RNA, 22 nt, Human
gcuuagaaguuccuauaaaaug

SEQ ID NO: 104709 - RNA, 22 nt, Human
gcuuagagcagcucacaacaug

SEQ ID NO: 104710 - RNA, 22 nt, Human
gcuuagcaaacaucuguagucc

SEQ ID NO: 104711 - RNA, 22 nt, Human
gcuuagcacagaaugagaguuc

SEQ ID NO: 104712 - RNA, 22 nt, Human
gcuuaggaaaaugguggaguug

SEQ ID NO: 104713 - RNA, 22 nt, Human
gcuuaucuugaaauccaccagc

SEQ ID NO: 104714 - RNA, 22 nt, Human
gcuuaugauguuuacauaaaag

SEQ ID NO: 104715 - RNA, 22 nt, Human
gcuucacacuaaaaauguuaaa

SEQ ID NO: 104716 - RNA, 22 nt, Human
gcuucacaggcaaguuaagccu

SEQ ID NO: 104717 - RNA, 22 nt, Human
gcuucagaccugaaaggaaaaa

SEQ ID NO: 104718 - RNA, 22 nt, Human
gcuucagauucuuuucaugucu

SEQ ID NO: 104719 - RNA, 21 nt, Human
gcuucagcaaggcuugcuggu

SEQ ID NO: 104720 - RNA, 22 nt, Human
gcuucagccucacacugauauc

SEQ ID NO: 104721 - RNA, 22 nt, Human
gcuucagcuuugucuccuuggg

SEQ ID NO: 104722 - RNA, 22 nt, Human
gcuucaggaggucggucuccuu

SEQ ID NO: 104723 - RNA, 22 nt, Human
gcuucaugccaggagguuuaag

SEQ ID NO: 104724 - RNA, 22 nt, Human
uacaugcauguguguaaauaua

SEQ ID NO: 104725 - RNA, 22 nt, Human
uacaugcauuggauggcaauag

SEQ ID NO: 104726 - RNA, 22 nt, Human
uacaugcucuucaaggacucau

SEQ ID NO: 104727 - RNA, 22 nt, Human
uacauggauguuauccuuacug

SEQ ID NO: 104728 - RNA, 22 nt, Human
uacauggguagguuaagucaua

SEQ ID NO: 104729 - RNA, 22 nt, Human
uacauguacauugggcauuaau

SEQ ID NO: 104730 - RNA, 22 nt, Human
uacauguauguguuaauaucug

SEQ ID NO: 104731 - RNA, 22 nt, Human
uacauguauugauuucucuucu

SEQ ID NO: 104732 - RNA, 22 nt, Human
uacaugucuacagccaugucug

SEQ ID NO: 104733 - RNA, 22 nt, Human
uacaugucuggguuuuguuucc

SEQ ID NO: 104734 - RNA, 22 nt, Human
uacaugugcuauuuguuuugua

SEQ ID NO: 104735 - RNA, 17 nt, Human
uacauguguaucugauu

SEQ ID NO: 104736 - RNA, 22 nt, Human
uacauuaaggauauggacauga

SEQ ID NO: 104737 - RNA, 22 nt, Human
uacauuacaggaaagauaaaga

SEQ ID NO: 104738 - RNA, 22 nt, Human
uacauuagcaaacaucuuggug

SEQ ID NO: 104739 - RNA, 22 nt, Human
uacauucacaguuguucaucuc

SEQ ID NO: 104740 - RNA, 22 nt, Human
uacauucagagaaaguuuccau

SEQ ID NO: 104741 - RNA, 22 nt, Human
uacauucauggugacuuguaug

SEQ ID NO: 104742 - RNA, 22 nt, Human
uacauuccacuagugacuggcg

SEQ ID NO: 104743 - RNA, 22 nt, Human
uacauuccauguguguguauuc

SEQ ID NO: 104744 - RNA, 22 nt, Human
uacauuccuguuagcaucuaag

SEQ ID NO: 104745 - RNA, 22 nt, Human
uacauuccuucguuuagagauu

SEQ ID NO: 104746 - RNA, 22 nt, Human
uacauucucuucccauugucuc

SEQ ID NO: 104747 - RNA, 22 nt, Human
uacauucugaaauaaaugguuu

SEQ ID NO: 104748 - RNA, 22 nt, Human
uacauugaccuuuguuagguug

SEQ ID NO: 104749 - RNA, 22 nt, Human
uacauugagcacguacuaugug

SEQ ID NO: 104750 - RNA, 22 nt, Human
uacauugcuagaaauguauuuu

SEQ ID NO: 104751 - RNA, 22 nt, Human
uacauugcucauuauauugcuu

SEQ ID NO: 104752 - RNA, 19 nt, Human
uacauugcugguggggaug

SEQ ID NO: 104753 - RNA, 22 nt, Human
uacauuugggacaauaagagaa

SEQ ID NO: 104754 - RNA, 22 nt, Human
uaccaaaaccaagccauuaucu

SEQ ID NO: 104755 - RNA, 22 nt, Human
uaccaaaagcuuguuucauaca

SEQ ID NO: 104756 - RNA, 19 nt, Human
uaccaaucccuugguuuac

SEQ ID NO: 104757 - RNA, 22 nt, Human
uaccacagacagauuucaguaa

SEQ ID NO: 104758 - RNA, 22 nt, Human
uaccacagcaaaugaggccaac

SEQ ID NO: 104759 - RNA, 22 nt, Human
uaccagcaucacagcauguugg

SEQ ID NO: 104760 - RNA, 22 nt, Human
uaccagccuuuuaacaugggcc

SEQ ID NO: 104761 - RNA, 22 nt, Human
uaccauuuugaaacauuucauc

SEQ ID NO: 104762 - RNA, 22 nt, Human
uacccagaagauugucagcaaa

SEQ ID NO: 104763 - RNA, 22 nt, Human
uacccagucuggagugcaguga

SEQ ID NO: 104764 - RNA, 20 nt, Human
uacccagugguggaugguaa

SEQ ID NO: 104765 - RNA, 22 nt, Human
uacccuggagcaaguuuccuca

SEQ ID NO: 104766 - RNA, 22 nt, Human
uaccguacacauuaacuacagu

SEQ ID NO: 104767 - RNA, 22 nt, Human
uaccucauuacaucugcaauga

SEQ ID NO: 104768 - RNA, 22 nt, Human
uaccugaauuaccaaaagcuuu

SEQ ID NO: 104769 - RNA, 22 nt, Human
uaccugcaaaguuccuuuugcc

SEQ ID NO: 104770 - RNA, 22 nt, Human
uaccuggaaauggcuuuaguua

SEQ ID NO: 104771 - RNA, 22 nt, Human
uaccuggaauagagucucucca

SEQ ID NO: 104772 - RNA, 22 nt, Human
uaccuggaaucacagaggcuga

SEQ ID NO: 104773 - RNA, 22 nt, Human
uaccuggaauuuauauagcuau

SEQ ID NO: 104774 - RNA, 22 nt, Human
uaccuggagcaggaggcagaau

SEQ ID NO: 104775 - RNA, 22 nt, Human
uaccugggaagugggaccugag

SEQ ID NO: 104776 - RNA, 22 nt, Human
uaccuucaccagcgaauguuug

SEQ ID NO: 104777 - RNA, 22 nt, Human
uaccuugagccguugcugauga

SEQ ID NO: 104778 - RNA, 22 nt, Human
uaccuuggaaaugcuagaguaa

SEQ ID NO: 104779 - RNA, 22 nt, Human
uaccuugggagacgccaggccc

SEQ ID NO: 104780 - RNA, 22 nt, Human
uaccuugggguuuuguugcucu

SEQ ID NO: 104781 - RNA, 22 nt, Human
uacgugcaaggucccugccccu

SEQ ID NO: 104782 - RNA, 22 nt, Human
uacguuuagcuuuaugagacau

SEQ ID NO: 104783 - RNA, 19 nt, Human
uacuaaacaugcauauugg

SEQ ID NO: 104784 - RNA, 22 nt, Human
uacuaaauaguuuaauuccuca

SEQ ID NO: 104785 - RNA, 22 nt, Human
uacuaacaaugagaacaagcca

SEQ ID NO: 104786 - RNA, 23 nt, Human
uacuacagggucuugcuaugaau

SEQ ID NO: 104787 - RNA, 22 nt, Human
uacuacaguauguguguuauac

SEQ ID NO: 104788 - RNA, 21 nt, Human
uacuacagucucuuuaucagu

SEQ ID NO: 104789 - RNA, 22 nt, Human
uacuacauacagaauuuagaga

SEQ ID NO: 104790 - RNA, 22 nt, Human
uacuagaaaaacacaugcucug

SEQ ID NO: 104791 - RNA, 22 nt, Human
uacuaguuucuaccuuacagaa

SEQ ID NO: 104792 - RNA, 22 nt, Human
uacuaguuuuuaggaaaaguga

SEQ ID NO: 104793 - RNA, 22 nt, Human
uacuauaaagucuuaaugaguc

SEQ ID NO: 104794 - RNA, 22 nt, Human
uacuauaccauguaagauauga

SEQ ID NO: 104795 - RNA, 22 nt, Human
uacuauacucuccauuuuauag

SEQ ID NO: 104796 - RNA, 22 nt, Human
uacuauuuggaauuuuaaauug

SEQ ID NO: 104797 - RNA, 22 nt, Human
uacucacuauucuaucagauag

SEQ ID NO: 104798 - RNA, 22 nt, Human
uacuccacacgcuauuauaaug

SEQ ID NO: 104799 - RNA, 22 nt, Human
uacucuaaaaagaagcagaucu

SEQ ID NO: 104800 - RNA, 22 nt, Human
uacucuaacauuuguuagaugu

SEQ ID NO: 104801 - RNA, 22 nt, Human
uacucugcaaguugaagguggc

SEQ ID NO: 104802 - RNA, 22 nt, Human
uacucugcaggauggacuaugg

SEQ ID NO: 104803 - RNA, 22 nt, Human
uacucugcucauuggagugugu

SEQ ID NO: 104804 - RNA, 22 nt, Human
uacugaaauacuaagaaguuaa

SEQ ID NO: 104805 - RNA, 22 nt, Human
uacugaagcaccauuaaagaca

SEQ ID NO: 104806 - RNA, 22 nt, Human
uacugaauuguaagaugaugcc

SEQ ID NO: 104807 - RNA, 22 nt, Human
uacugacacaaagccaaucccu

SEQ ID NO: 104808 - RNA, 22 nt, Human
uacugagggcaaagagugaagc

SEQ ID NO: 104809 - RNA, 22 nt, Human
uacugaggguaugaagccaagg

SEQ ID NO: 104810 - RNA, 20 nt, Human
uacugcaggaaucagcuagc

SEQ ID NO: 104811 - RNA, 22 nt, Human
uacugccuggagcauuggugcu

SEQ ID NO: 104812 - RNA, 22 nt, Human
gcuuucugggcuauagaacggg

SEQ ID NO: 104813 - RNA, 22 nt, Human
gcuuucugguuugugcuacagg

SEQ ID NO: 104814 - RNA, 18 nt, Human
gcuuucuguagaaaaggg

SEQ ID NO: 104815 - RNA, 22 nt, Human
gcuuucugugcagugaacacua

SEQ ID NO: 104816 - RNA, 22 nt, Human
gcuuugacacucgcccagcccu

SEQ ID NO: 104817 - RNA, 22 nt, Human
gcuuugcacagauuagguuauu

SEQ ID NO: 104818 - RNA, 22 nt, Human
gcuuugcacagugcuguguuaa

SEQ ID NO: 104819 - RNA, 22 nt, Human
gcuuugcccaagggcccuaccc

SEQ ID NO: 104820 - RNA, 22 nt, Human
gcuuugcugaggucugaggauu

SEQ ID NO: 104821 - RNA, 22 nt, Human
gcuuugcuggaaucaacgaaug

SEQ ID NO: 104822 - RNA, 22 nt, Human
gcuuugcugggugcuucaugua

SEQ ID NO: 104823 - RNA, 22 nt, Human
gcuuugcuuccuuccccuucaa

SEQ ID NO: 104824 - RNA, 22 nt, Human
gcuuuggaaauaagaggcuaaa

SEQ ID NO: 104825 - RNA, 17 nt, Human
gcuuuggaaggguagac

SEQ ID NO: 104826 - RNA, 22 nt, Human
gcuuuggagccuguguucugcc

SEQ ID NO: 104827 - RNA, 22 nt, Human
gcuuuggagggcaagagcuguu

SEQ ID NO: 104828 - RNA, 22 nt, Human
gcuuuggaugugugccugaggu

SEQ ID NO: 104829 - RNA, 22 nt, Human
gcuuugggggcugcagugcgug

SEQ ID NO: 104830 - RNA, 22 nt, Human
gcuuuggucagguguccagccc

SEQ ID NO: 104831 - RNA, 22 nt, Human
gcuuuggucuucuagcugugag

SEQ ID NO: 104832 - RNA, 19 nt, Human
gcuuuuauugcucaggugc

SEQ ID NO: 104833 - RNA, 22 nt, Human
gcuuuuauugucuuuacgacga

SEQ ID NO: 104834 - RNA, 22 nt, Human
gcuuuucuucagcagccugaug

SEQ ID NO: 104835 - RNA, 22 nt, Human
gcuuuugagguccugcucagcc

SEQ ID NO: 104836 - RNA, 22 nt, Human
gcuuuugugagauuaagcuacu

SEQ ID NO: 104837 - RNA, 22 nt, Human
ggaaaaaugacacauaucucaa

SEQ ID NO: 104838 - RNA, 17 nt, Human
ggaaaaggaugauacag

SEQ ID NO: 104839 - RNA, 22 nt, Human
ggaaaauuggcgcguggggcug

SEQ ID NO: 104840 - RNA, 22 nt, Human
ggaaacagagggcaccugagcc

SEQ ID NO: 104841 - RNA, 22 nt, Human
ggaaacagcucuuuggggcugu

SEQ ID NO: 104842 - RNA, 22 nt, Human
ggaaacaugccugcuggacagu

SEQ ID NO: 104843 - RNA, 22 nt, Human
ggaaaccaggacugcaccgucu

SEQ ID NO: 104844 - RNA, 22 nt, Human
ggaaaccauucccgacucuccu

SEQ ID NO: 104845 - RNA, 22 nt, Human
ggaaacuuggcauaauuuuaag

SEQ ID NO: 104846 - RNA, 22 nt, Human
ggaaagagcccagcagugcuug

SEQ ID NO: 104847 - RNA, 22 nt, Human
ggaaagagcuaaaagggugaga

SEQ ID NO: 104848 - RNA, 22 nt, Human
ggaaagcauccaggugccccca

SEQ ID NO: 104849 - RNA, 22 nt, Human
ggaaagggcauggccuuuucac

SEQ ID NO: 104850 - RNA, 22 nt, Human
ggaaaguccuucuaaagccaga

SEQ ID NO: 104851 - RNA, 22 nt, Human
ggaaauacaaagauacaccacu

SEQ ID NO: 104852 - RNA, 22 nt, Human
ggaaaucaagaagcagaugagu

SEQ ID NO: 104853 - RNA, 22 nt, Human
ggaaaucaugggagaguuggaa

SEQ ID NO: 104854 - RNA, 22 nt, Human
ggaaaucuggugguagauggga

SEQ ID NO: 104855 - RNA, 22 nt, Human
ggaacacuggcucaauuauauc

SEQ ID NO: 104856 - RNA, 22 nt, Human
ggaacaguugagaugauguacc

SEQ ID NO: 104857 - RNA, 22 nt, Human
ggaacauaccgaaaauacuuaa

SEQ ID NO: 104858 - RNA, 22 nt, Human
ggaaccaguggaaugauaugcu

SEQ ID NO: 104859 - RNA, 22 nt, Human
ggaacccagagcucauaaaauu

SEQ ID NO: 104860 - RNA, 22 nt, Human
ggaaccuguacguuguccuuga

SEQ ID NO: 104861 - RNA, 22 nt, Human
ggaaccuugcuagaugcugagg

SEQ ID NO: 104862 - RNA, 19 nt, Human
ggaacucacuuagagaaac

SEQ ID NO: 104863 - RNA, 22 nt, Human
ggaacugagaagcagcuaugcc

SEQ ID NO: 104864 - RNA, 19 nt, Human
ggaacuuggccuuuaccca

SEQ ID NO: 104865 - RNA, 22 nt, Human
ggaacuuuuuaacaagcugcug

SEQ ID NO: 104866 - RNA, 18 nt, Human
ggaagaaaaggaacucag

SEQ ID NO: 104867 - RNA, 22 nt, Human
ggaagaaaaugggcaacaggug

SEQ ID NO: 104868 - RNA, 22 nt, Human
ggaagaaagacauuuauuuuga

SEQ ID NO: 104869 - RNA, 22 nt, Human
ggaagaaagguggacaacaggu

SEQ ID NO: 104870 - RNA, 22 nt, Human
ggaagaaaucugguuaagagau

SEQ ID NO: 104871 - RNA, 22 nt, Human
ggaagaacagguuuauuuuccu

SEQ ID NO: 104872 - RNA, 22 nt, Human
ggaagaagcagggcauuugaau

SEQ ID NO: 104873 - RNA, 22 nt, Human
ggaagacagaagccuacagcuu

SEQ ID NO: 104874 - RNA, 22 nt, Human
ggaagagaaugauggcuauggg

SEQ ID NO: 104875 - RNA, 22 nt, Human
ggaagagauucuuuacauucau

SEQ ID NO: 104876 - RNA, 22 nt, Human
ggaagagccuggggugucaggc

SEQ ID NO: 104877 - RNA, 22 nt, Human
ggaagaggaggagccaggcuuu

SEQ ID NO: 104878 - RNA, 22 nt, Human
ggaagaggcucucauugagggc

SEQ ID NO: 104879 - RNA, 22 nt, Human
ggaagaggcugaggccaugcug

SEQ ID NO: 104880 - RNA, 22 nt, Human
ggaagauucagcauauaugagu

SEQ ID NO: 104881 - RNA, 22 nt, Human
ggaagcacagcauaaaguuacu

SEQ ID NO: 104882 - RNA, 20 nt, Human
ggaagcagagaacuguuuuc

SEQ ID NO: 104883 - RNA, 21 nt, Human
ggaagcaguggcggcaacucc

SEQ ID NO: 104884 - RNA, 22 nt, Human
ggaagccacccagcuuugauag

SEQ ID NO: 104885 - RNA, 22 nt, Human
ggaagccaggccaaugagaaca

SEQ ID NO: 104886 - RNA, 20 nt, Human
ggaagccagggugcagggga

SEQ ID NO: 104887 - RNA, 22 nt, Human
ggaagccaguugcuuggugugg

SEQ ID NO: 104888 - RNA, 19 nt, Human
ggaagcccugggucagagc

SEQ ID NO: 104889 - RNA, 22 nt, Human
ggaagcuggcucuuauaaauau

SEQ ID NO: 104890 - RNA, 22 nt, Human
ggaagcuggggagcuuuggaga

SEQ ID NO: 104891 - RNA, 22 nt, Human
ggaaggaaauuggggcaguugu

SEQ ID NO: 104892 - RNA, 18 nt, Human
ggaaggaagaaugcauuu

SEQ ID NO: 104893 - RNA, 22 nt, Human
ggaaggcagugaaggggcugau

SEQ ID NO: 104894 - RNA, 22 nt, Human
ggaaggcugugcaguguuugca

SEQ ID NO: 104895 - RNA, 22 nt, Human
ggaaggcugugccagaagaacu

SEQ ID NO: 104896 - RNA, 22 nt, Human
ggaaggcuguucacuaacaugu

SEQ ID NO: 104897 - RNA, 20 nt, Human
ggaaggcuguuuuuccacca

SEQ ID NO: 104898 - RNA, 22 nt, Human
ggaaggcuuuguagaagugcca

SEQ ID NO: 104899 - RNA, 22 nt, Human
ggaagggaguaguuggaaugca

SEQ ID NO: 104900 - RNA, 22 nt, Human
ggaaggggagcuaaaucuacug

SEQ ID NO: 104901 - RNA, 22 nt, Human
ggaaggggugucgcccauggau

SEQ ID NO: 104902 - RNA, 22 nt, Human
ggaagggguuaggggucccuga

SEQ ID NO: 104903 - RNA, 18 nt, Human
ggaaggugaugugaaaag

SEQ ID NO: 104904 - RNA, 22 nt, Human
ggaaguagaaguaaugaaauca

SEQ ID NO: 104905 - RNA, 18 nt, Human
ggaaguaggaagaggaag

SEQ ID NO: 104906 - RNA, 22 nt, Human
ggaaguguggcuaagccaagaa

SEQ ID NO: 104907 - RNA, 22 nt, Human
ggaaguuuauugaguucaagua

SEQ ID NO: 104908 - RNA, 22 nt, Human
ggaaguuucaggaaucugcauu

SEQ ID NO: 104909 - RNA, 22 nt, Human
ggaauaaaaauuguuuacugua

SEQ ID NO: 104910 - RNA, 22 nt, Human
ggaauacuaugacacacaggug

SEQ ID NO: 104911 - RNA, 21 nt, Human
ggaauagcuuaaagugagggg

SEQ ID NO: 104912 - RNA, 22 nt, Human
ggaauaggauuuaccucuguaa

SEQ ID NO: 104913 - RNA, 22 nt, Human
ggaauagggagagaaucguuug

SEQ ID NO: 104914 - RNA, 22 nt, Human
ggaaucuucagccaugccaaga

SEQ ID NO: 104915 - RNA, 22 nt, Human
ggaaugaaacacuucugauucu

SEQ ID NO: 104916 - RNA, 22 nt, Human
ggaaugaauuuccagcuggguc

SEQ ID NO: 104917 - RNA, 22 nt, Human
ggaaugagcucggagcagaagg

SEQ ID NO: 104918 - RNA, 22 nt, Human
ggaaugcacuagacugugaaac

SEQ ID NO: 104919 - RNA, 22 nt, Human
ggaaugcucaguucuuggugcu

SEQ ID NO: 104920 - RNA, 22 nt, Human
ggaauguaacgugaccaaguuc

SEQ ID NO: 104921 - RNA, 22 nt, Human
ggaauguagaaucucuggucuc

SEQ ID NO: 104922 - RNA, 22 nt, Human
uaugcacaacaugcagguuugu

SEQ ID NO: 104923 - RNA, 22 nt, Human
uaugcacacaggcuuaauucau

SEQ ID NO: 104924 - RNA, 22 nt, Human
uaugcacacauuagcacagggu

SEQ ID NO: 104925 - RNA, 22 nt, Human
uaugcacauuaucuaauccauu

SEQ ID NO: 104926 - RNA, 22 nt, Human
uaugcacgucuauuuaugaaga

SEQ ID NO: 104927 - RNA, 22 nt, Human
uaugcagcaccacucacugcag

SEQ ID NO: 104928 - RNA, 20 nt, Human
uaugcaguauguguguauaa

SEQ ID NO: 104929 - RNA, 22 nt, Human
uaugcauaauuggauaaguaga

SEQ ID NO: 104930 - RNA, 22 nt, Human
uaugcauagguaucuauacuca

SEQ ID NO: 104931 - RNA, 22 nt, Human
uaugcauagugauuuagaacag

SEQ ID NO: 104932 - RNA, 22 nt, Human
uaugcauaguggaauuagcaaa

SEQ ID NO: 104933 - RNA, 22 nt, Human
uaugcauauauuuucccaucuu

SEQ ID NO: 104934 - RNA, 22 nt, Human
uaugcaugucuuugcacacaaa

SEQ ID NO: 104935 - RNA, 22 nt, Human
uaugcauucagagguugggugu

SEQ ID NO: 104936 - RNA, 22 nt, Human
uaugcauugugagacuguggga

SEQ ID NO: 104937 - RNA, 22 nt, Human
uaugcauuuuauagugcaaagc

SEQ ID NO: 104938 - RNA, 23 nt, Human
uaugccaaaauggaaaguguaua

SEQ ID NO: 104939 - RNA, 22 nt, Human
uaugcccagcuuaaaguacaca

SEQ ID NO: 104940 - RNA, 22 nt, Human
uaugccuaccuccaaaauauau

SEQ ID NO: 104941 - RNA, 22 nt, Human
uaugccuggaaccuuucucuuu

SEQ ID NO: 104942 - RNA, 22 nt, Human
uaugcgugccucugucugucug

SEQ ID NO: 104943 - RNA, 22 nt, Human
uaugcuaaauauguucacauug

SEQ ID NO: 104944 - RNA, 22 nt, Human
uaugcuaauuguuagucacaug

SEQ ID NO: 104945 - RNA, 22 nt, Human
uaugcugaauuugguuugcuau

SEQ ID NO: 104946 - RNA, 22 nt, Human
uaugcuguauucuguauguuag

SEQ ID NO: 104947 - RNA, 22 nt, Human
uaugcuguggaaaauacaaaga

SEQ ID NO: 104948 - RNA, 20 nt, Human
uaugcuuuuuauaagauuga

SEQ ID NO: 104949 - RNA, 22 nt, Human
uauggaaauaauuagacaagug

SEQ ID NO: 104950 - RNA, 22 nt, Human
uauggauauaaucagacuggaa

SEQ ID NO: 104951 - RNA, 22 nt, Human
uauggcaauugucuaaguuuua

SEQ ID NO: 104952 - RNA, 22 nt, Human
uauggcagaggagaggcacuag

SEQ ID NO: 104953 - RNA, 22 nt, Human
uauggcauauaguccagcauaa

SEQ ID NO: 104954 - RNA, 22 nt, Human
uauggcauuguuggugaugaua

SEQ ID NO: 104955 - RNA, 22 nt, Human
uauggcauuuagaaaugucaga

SEQ ID NO: 104956 - RNA, 22 nt, Human
uauggcuggaauacugaaaggc

SEQ ID NO: 104957 - RNA, 22 nt, Human
uauggcuucucagucaugaaaa

SEQ ID NO: 104958 - RNA, 22 nt, Human
uauggcuucugcuuucuugacu

SEQ ID NO: 104959 - RNA, 22 nt, Human
uauggcuugucuuuauaccagg

SEQ ID NO: 104960 - RNA, 22 nt, Human
uauggcuuugaaagggcuuuuc

SEQ ID NO: 104961 - RNA, 22 nt, Human
uauggcuuuucauuccuaugug

SEQ ID NO: 104962 - RNA, 22 nt, Human
uauggcuuuucuuccuccccca

SEQ ID NO: 104963 - RNA, 22 nt, Human
uauggcuuuuuauucaucuuac

SEQ ID NO: 104964 - RNA, 22 nt, Human
uauggguacuuugauuuagaaa

SEQ ID NO: 104965 - RNA, 22 nt, Human
uauggguagagauggggguuag

SEQ ID NO: 104966 - RNA, 22 nt, Human
uauggguaggccugccgccugu

SEQ ID NO: 104967 - RNA, 22 nt, Human
uauggguaucuguacugauugu

SEQ ID NO: 104968 - RNA, 22 nt, Human
uauggguauuuuauacauaacc

SEQ ID NO: 104969 - RNA, 22 nt, Human
uaugggucuggaaaauggcuug

SEQ ID NO: 104970 - RNA, 22 nt, Human
uauggguguuaauggugagaga

SEQ ID NO: 104971 - RNA, 22 nt, Human
uaugguagaaaaacugaguccc

SEQ ID NO: 104972 - RNA, 22 nt, Human
uauguacacacacaugcaugua

SEQ ID NO: 104973 - RNA, 22 nt, Human
uauguacacauacacuuguaau

SEQ ID NO: 104974 - RNA, 22 nt, Human
uauguacauaacaugaaaugca

SEQ ID NO: 104975 - RNA, 22 nt, Human
uauguacaugauuucauuugcu

SEQ ID NO: 104976 - RNA, 22 nt, Human
uauguacuaacuuucauucuag

SEQ ID NO: 104977 - RNA, 22 nt, Human
uauguacuacacuagaacauuu

SEQ ID NO: 104978 - RNA, 22 nt, Human
uauguacucaucaacuauugaa

SEQ ID NO: 104979 - RNA, 22 nt, Human
uauguagaagcugcucaaagaa

SEQ ID NO: 104980 - RNA, 17 nt, Human
uauguaguacuuauaaa

SEQ ID NO: 104981 - RNA, 22 nt, Human
uauguauauaggugugugucuc

SEQ ID NO: 104982 - RNA, 22 nt, Human
uaugucaugggucaaaaugaag

SEQ ID NO: 104983 - RNA, 22 nt, Human
uauguccugcuacucucucaug

SEQ ID NO: 104984 - RNA, 22 nt, Human
uaugucuggaaguguacuuguc

SEQ ID NO: 104985 - RNA, 22 nt, Human
uaugucuggaauuugagguuca

SEQ ID NO: 104986 - RNA, 22 nt, Human
uaugucuggaccacugcagccc

SEQ ID NO: 104987 - RNA, 22 nt, Human
uaugucuuaacucuagaaaggu

SEQ ID NO: 104988 - RNA, 22 nt, Human
uaugucuuguguuugcuaaucu

SEQ ID NO: 104989 - RNA, 22 nt, Human
uaugucuuuguccaugugcagu

SEQ ID NO: 104990 - RNA, 22 nt, Human
uaugucuuuuccaaugcugucu

SEQ ID NO: 104991 - RNA, 22 nt, Human
uaugugaagagauuaaaaaaua

SEQ ID NO: 104992 - RNA, 22 nt, Human
uaugugaccuucugaaugagua

SEQ ID NO: 104993 - RNA, 22 nt, Human
uaugugauauaggcuauuugau

SEQ ID NO: 104994 - RNA, 22 nt, Human
ggagaaaggcauagcagaaccu

SEQ ID NO: 104995 - RNA, 22 nt, Human
ggagaacaggcaagcaucuggc

SEQ ID NO: 104996 - RNA, 19 nt, Human
ggagaagcaucuagaaaua

SEQ ID NO: 104997 - RNA, 22 nt, Human
ggagaaggaagaaagcuacuau

SEQ ID NO: 104998 - RNA, 22 nt, Human
ggagaagggcaugguaguuuua

SEQ ID NO: 104999 - RNA, 22 nt, Human
ggagacaauggaggccaaaaga

SEQ ID NO: 105000 - RNA, 22 nt, Human
ggagacacagagcaacaaaaua

SEQ ID NO: 105001 - RNA, 22 nt, Human
ggagacacuggaaaguauuaca

SEQ ID NO: 105002 - RNA, 17 nt, Human
ggagacagggucuuuaa

SEQ ID NO: 105003 - RNA, 22 nt, Human
ggagacaguauggcuuguagcu

SEQ ID NO: 105004 - RNA, 22 nt, Human
ggagaccuuaaggugcuuccua

SEQ ID NO: 105005 - RNA, 22 nt, Human
ggagacuaccuagcaggcuguu

SEQ ID NO: 105006 - RNA, 19 nt, Human
ggagacucagcccaugccu

SEQ ID NO: 105007 - RNA, 22 nt, Human
ggagagaaucugaaccugcucc

SEQ ID NO: 105008 - RNA, 22 nt, Human
ggagagaggagcccacugcugu

SEQ ID NO: 105009 - RNA, 22 nt, Human
ggagagcagggaggcugcucug

SEQ ID NO: 105010 - RNA, 22 nt, Human
ggagagcaggguccugagauac

SEQ ID NO: 105011 - RNA, 22 nt, Human
ggagagcuuggagugcgauuuu

SEQ ID NO: 105012 - RNA, 19 nt, Human
ggagaggcuggagggaugc

SEQ ID NO: 105013 - RNA, 22 nt, Human
ggagaggggcaaguuuaucuag

SEQ ID NO: 105014 - RNA, 23 nt, Human
ggagaggggugugggcaucuuua

SEQ ID NO: 105015 - RNA, 22 nt, Human
ggagauagacuuggugagccac

SEQ ID NO: 105016 - RNA, 22 nt, Human
ggagauaguccaggugaaggga

SEQ ID NO: 105017 - RNA, 22 nt, Human
ggagaucugagagcuggaagug

SEQ ID NO: 105018 - RNA, 22 nt, Human
ggagaugcaauguagaaucugg

SEQ ID NO: 105019 - RNA, 22 nt, Human
ggagaugcuacaguucagcucu

SEQ ID NO: 105020 - RNA, 22 nt, Human
ggagaugcuauguaguuugguu

SEQ ID NO: 105021 - RNA, 23 nt, Human
ggagaugcuuaagagugguugag

SEQ ID NO: 105022 - RNA, 22 nt, Human
ggagaugcuucuuguguuuauu

SEQ ID NO: 105023 - RNA, 22 nt, Human
ggagaugcuuuccaguggggau

SEQ ID NO: 105024 - RNA, 22 nt, Human
ggagauggaauagauucugacu

SEQ ID NO: 105025 - RNA, 22 nt, Human
ggagauggccaaaaacacaaau

SEQ ID NO: 105026 - RNA, 22 nt, Human
ggagauggccacgucacucagu

SEQ ID NO: 105027 - RNA, 22 nt, Human
ggagauggcuggcagguagaug

SEQ ID NO: 105028 - RNA, 22 nt, Human
ggagaugguggaagcuggugca

SEQ ID NO: 105029 - RNA, 22 nt, Human
ggagcaagagguggugaaaaau

SEQ ID NO: 105030 - RNA, 22 nt, Human
ggagcaagucccaggcacuagu

SEQ ID NO: 105031 - RNA, 22 nt, Human
ggcagggagagcaugcugauaa

SEQ ID NO: 105032 - RNA, 20 nt, Human
ggcagggagggauacugagg

SEQ ID NO: 105033 - RNA, 22 nt, Human
ggcagggaguggagacucccua

SEQ ID NO: 105034 - RNA, 20 nt, Human
ggcagggcaucaacagcucu

SEQ ID NO: 105035 - RNA, 22 nt, Human
ggcaggguaaaccgagguaagu

SEQ ID NO: 105036 - RNA, 22 nt, Human
ggcaggguggcccuccagugag

SEQ ID NO: 105037 - RNA, 22 nt, Human
ggcaggguguggaguugggaca

SEQ ID NO: 105038 - RNA, 22 nt, Human
ggcaggguuuacaauagcaaua

SEQ ID NO: 105039 - RNA, 22 nt, Human
ggcaggguuucuccauucugcc

SEQ ID NO: 105040 - RNA, 22 nt, Human
ggcagguacuggggagugaaga

SEQ ID NO: 105041 - RNA, 17 nt, Human
ggcaggugacagacacc

SEQ ID NO: 105042 - RNA, 22 nt, Human
ggcaggugaguucauuaucugc

SEQ ID NO: 105043 - RNA, 22 nt, Human
ggcaggugcccagagagcacga

SEQ ID NO: 105044 - RNA, 22 nt, Human
ggcaggugccuucugugcuagc

SEQ ID NO: 105045 - RNA, 20 nt, Human
ggcaggugcucgcuuggucu

SEQ ID NO: 105046 - RNA, 22 nt, Human
ggcagguggaaguuggcagagc

SEQ ID NO: 105047 - RNA, 15 nt, Human
ggcagguggaucacu

SEQ ID NO: 105048 - RNA, 22 nt, Human
ggcaggugugagaucgaggcca

SEQ ID NO: 105049 - RNA, 19 nt, Human
ggcaggugugcuuaugcuu

SEQ ID NO: 105050 - RNA, 22 nt, Human
ggcagucaagagggagucugaa

SEQ ID NO: 105051 - RNA, 22 nt, Human
ggcagucacuuuugcuugugcc

SEQ ID NO: 105052 - RNA, 22 nt, Human
ggcagugacuggggacccccaa

SEQ ID NO: 105053 - RNA, 22 nt, Human
ggcagugagaggucuccugguc

SEQ ID NO: 105054 - RNA, 22 nt, Human
ggcagugcaaggcuggcacagu

SEQ ID NO: 105055 - RNA, 18 nt, Human
ggcagugcagucucaggg

SEQ ID NO: 105056 - RNA, 22 nt, Human
ggcagugccugaugcugcagga

SEQ ID NO: 105057 - RNA, 22 nt, Human
ggcaguggaggacccugugucu

SEQ ID NO: 105058 - RNA, 22 nt, Human
ggcaguggcuccucucuacucc

SEQ ID NO: 105059 - RNA, 22 nt, Human
ggcagugggaaauaagugagaa

SEQ ID NO: 105060 - RNA, 22 nt, Human
ggcaguggguuccccaaggcac

SEQ ID NO: 105061 - RNA, 22 nt, Human
ggcagugguuagaaacaugagc

SEQ ID NO: 105062 - RNA, 22 nt, Human
ggcagugucaaaauaggcagaa

SEQ ID NO: 105063 - RNA, 22 nt, Human
ggcagugugcaucuguguggcc

SEQ ID NO: 105064 - RNA, 22 nt, Human
ggcaguguuuauggguaacaca

SEQ ID NO: 105065 - RNA, 22 nt, Human
ggcaguuccagaauuucaguac

SEQ ID NO: 105066 - RNA, 22 nt, Human
ggcaguucuggaugcauuguca

SEQ ID NO: 105067 - RNA, 22 nt, Human
ggcaucagcccgguccugggcu

SEQ ID NO: 105068 - RNA, 22 nt, Human
ggcaucaggagcuucuucaggu

SEQ ID NO: 105069 - RNA, 19 nt, Human
ggcauccacagcuggagag

SEQ ID NO: 105070 - RNA, 21 nt, Human
ggcaucccaggccagugacug

SEQ ID NO: 105071 - RNA, 22 nt, Human
ggcaucccuagaauagccaggu

SEQ ID NO: 105072 - RNA, 22 nt, Human
ggcauccucuagaagcuggaaa

SEQ ID NO: 105073 - RNA, 22 nt, Human
ggcaucguccugggcauaggga

SEQ ID NO: 105074 - RNA, 22 nt, Human
ggcaucuccaaaacaugaacuc

SEQ ID NO: 105075 - RNA, 22 nt, Human
ggcaucuucaaaauugccaaau

SEQ ID NO: 105076 - RNA, 22 nt, Human
ggcaucuuguugcucaaaucua

SEQ ID NO: 105077 - RNA, 22 nt, Human
ggcaugcaaaacaacucagaga

SEQ ID NO: 105078 - RNA, 22 nt, Human
ggcaugcauguuguuuuaggug

SEQ ID NO: 105079 - RNA, 22 nt, Human
ggcauggacgucucugaggcca

SEQ ID NO: 105080 - RNA, 19 nt, Human
ggcaugggguccggggacc

SEQ ID NO: 105081 - RNA, 22 nt, Human
ggcaugggguguauguggcacg

SEQ ID NO: 105082 - RNA, 20 nt, Human
ggcauggguggggcucccag

SEQ ID NO: 105083 - RNA, 22 nt, Human
ggcauguguugggaacagcaug

SEQ ID NO: 105084 - RNA, 22 nt, Human
ggcauuaagaauaucauuaaaa

SEQ ID NO: 105085 - RNA, 22 nt, Human
ggcauuagcguugaauuuuauu

SEQ ID NO: 105086 - RNA, 22 nt, Human
ggcauucaaagaaugguaauua

SEQ ID NO: 105087 - RNA, 22 nt, Human
ggcauuuagauugaauuucugu

SEQ ID NO: 105088 - RNA, 22 nt, Human
ggcauuuaggaucuuuaguuga

SEQ ID NO: 105089 - RNA, 22 nt, Human
ggcauuuaggcagauaacagac

SEQ ID NO: 105090 - RNA, 22 nt, Human
ggcauuuauuugucucauucuu

SEQ ID NO: 105091 - RNA, 22 nt, Human
ggccaaaagcauaauccucaca

SEQ ID NO: 105092 - RNA, 22 nt, Human
ggccaaaugaaggcaaugggac

SEQ ID NO: 105093 - RNA, 22 nt, Human
ggccaaauuuggccaugagcau

SEQ ID NO: 105094 - RNA, 22 nt, Human
ggccacagagggcgggaugcug

SEQ ID NO: 105095 - RNA, 22 nt, Human
ggccacaugaauucuuggacag

SEQ ID NO: 105096 - RNA, 22 nt, Human
ggccaccuuccaguugccugca

SEQ ID NO: 105097 - RNA, 19 nt, Human
ggccacuccuggugacugg

SEQ ID NO: 105098 - RNA, 22 nt, Human
ggccacugcccuggcuacaccg

SEQ ID NO: 105099 - RNA, 22 nt, Human
ggccacugcugcucugguggag

SEQ ID NO: 105100 - RNA, 22 nt, Human
ggccacuguccucuagcccaga

SEQ ID NO: 105101 - RNA, 22 nt, Human
ggccagacauaucgcucccaaa

SEQ ID NO: 105102 - RNA, 22 nt, Human
ggccagagaagucagacccuug

SEQ ID NO: 105103 - RNA, 18 nt, Human
ggccagagggaggguccc

SEQ ID NO: 105104 - RNA, 22 nt, Human
ggccagcagaccucagggacuc

SEQ ID NO: 105105 - RNA, 22 nt, Human
ggccagcaguauauagcuaauu

SEQ ID NO: 105106 - RNA, 18 nt, Human
ggccagccccaggccagc

SEQ ID NO: 105107 - RNA, 22 nt, Human
ggccagcccuccucccuggguu

SEQ ID NO: 105108 - RNA, 22 nt, Human
ggccagcuggaugugggugacg

SEQ ID NO: 105109 - RNA, 19 nt, Human
ggccagcugucuccugcua

SEQ ID NO: 105110 - RNA, 22 nt, Human
ggccagguaagagugcagccgc

SEQ ID NO: 105111 - RNA, 22 nt, Human
ggagggcaucaaucaggccugg

SEQ ID NO: 105112 - RNA, 22 nt, Human
ggagggccaucuugggugugau

SEQ ID NO: 105113 - RNA, 22 nt, Human
ggagggccccuccagugggcag

SEQ ID NO: 105114 - RNA, 22 nt, Human
ggagggcucgucauccaccacu

SEQ ID NO: 105115 - RNA, 22 nt, Human
ggaggggaugguuugacccugg

SEQ ID NO: 105116 - RNA, 22 nt, Human
ggagggggaagaagcuaaagac

SEQ ID NO: 105117 - RNA, 22 nt, Human
ggaggguccacugugaggcaga

SEQ ID NO: 105118 - RNA, 22 nt, Human
ggaggguccaucuugugaaaag

SEQ ID NO: 105119 - RNA, 22 nt, Human
ggagggugcuuaaguuguguuu

SEQ ID NO: 105120 - RNA, 20 nt, Human
ggaggguggaagaaagcaag

SEQ ID NO: 105121 - RNA, 22 nt, Human
ggaggguggcagcguccugggc

SEQ ID NO: 105122 - RNA, 22 nt, Human
ggaggguuagcaaaggcacaga

SEQ ID NO: 105123 - RNA, 22 nt, Human
ggagguagucugagucauaggc

SEQ ID NO: 105124 - RNA, 22 nt, Human
ggagguaugauagcuguguccu

SEQ ID NO: 105125 - RNA, 22 nt, Human
ggaggucccaggccuggcagca

SEQ ID NO: 105126 - RNA, 22 nt, Human
ggaggugacgaaaagaaauugu

SEQ ID NO: 105127 - RNA, 22 nt, Human
ggaggugacuggaucaugggca

SEQ ID NO: 105128 - RNA, 22 nt, Human
ggaggugaucagaguuuugagg

SEQ ID NO: 105129 - RNA, 22 nt, Human
ggaggugcagaguaggguuggu

SEQ ID NO: 105130 - RNA, 22 nt, Human
ggaggugcugaucccagucaac

SEQ ID NO: 105131 - RNA, 22 nt, Human
ggaggugcuggcggccagcucu

SEQ ID NO: 105132 - RNA, 22 nt, Human
ggagguggcagggaacauaauu

SEQ ID NO: 105133 - RNA, 22 nt, Human
ggagguggccugaaaauguggc

SEQ ID NO: 105134 - RNA, 22 nt, Human
ggaggugggaguuuaguucuug

SEQ ID NO: 105135 - RNA, 22 nt, Human
ggaggugggcuaaggacucucu

SEQ ID NO: 105136 - RNA, 22 nt, Human
ggaguaggaguagaacucauca

SEQ ID NO: 105137 - RNA, 22 nt, Human
ggagucaccaaguaggagucuu

SEQ ID NO: 105138 - RNA, 22 nt, Human
ggagucagaauggcaggguggu

SEQ ID NO: 105139 - RNA, 22 nt, Human
ggagucagaggaaggcuugcuc

SEQ ID NO: 105140 - RNA, 22 nt, Human
ggaguccaugcagcuugagaca

SEQ ID NO: 105141 - RNA, 22 nt, Human
auugaagagaagcuaaauagag

SEQ ID NO: 105142 - RNA, 22 nt, Human
auugaagaucagggaaagauuc

SEQ ID NO: 105143 - RNA, 22 nt, Human
auugaaugcuugcuaacacuuu

SEQ ID NO: 105144 - RNA, 22 nt, Human
auugacaaauggauguugacau

SEQ ID NO: 105145 - RNA, 22 nt, Human
auugacaacccugguaugagca

SEQ ID NO: 105146 - RNA, 22 nt, Human
auugacaaggaaacuauaccag

SEQ ID NO: 105147 - RNA, 22 nt, Human
auugacaauguauuuguaucug

SEQ ID NO: 105148 - RNA, 22 nt, Human
auugacacaaugggauguaagg

SEQ ID NO: 105149 - RNA, 23 nt, Human
auugaccuguuuagucucucccu

SEQ ID NO: 105150 - RNA, 22 nt, Human
auugagaaaggcuuauguuugc

SEQ ID NO: 105151 - RNA, 22 nt, Human
auugagaagaaaaucuaauaua

SEQ ID NO: 105152 - RNA, 22 nt, Human
auugagaauccauuugagauga

SEQ ID NO: 105153 - RNA, 22 nt, Human
auugagcaauaguguuugcagc

SEQ ID NO: 105154 - RNA, 22 nt, Human
auugagcaccuacaguauuacc

SEQ ID NO: 105155 - RNA, 22 nt, Human
auugagcagcuucucugccauc

SEQ ID NO: 105156 - RNA, 18 nt, Human
auugagcaugacagaccu

SEQ ID NO: 105157 - RNA, 22 nt, Human
auugaguaccuccagauucaua

SEQ ID NO: 105158 - RNA, 22 nt, Human
auugaguaguaggaaaauaacu

SEQ ID NO: 105159 - RNA, 22 nt, Human
auugauauauuauuucuaacug

SEQ ID NO: 105160 - RNA, 23 nt, Human
auugaugacuugauuacacuuuu

SEQ ID NO: 105161 - RNA, 22 nt, Human
auugauucuaccagcuacuuug

SEQ ID NO: 105162 - RNA, 22 nt, Human
auugauuuagcucaagacacau

SEQ ID NO: 105163 - RNA, 22 nt, Human
auugcaaauaacuguacugaau

SEQ ID NO: 105164 - RNA, 22 nt, Human
auugcacagcugaauauuuugg

SEQ ID NO: 105165 - RNA, 22 nt, Human
auugcaccuuggguuuugaaag

SEQ ID NO: 105166 - RNA, 22 nt, Human
auugcaggauacccagguagag

SEQ ID NO: 105167 - RNA, 22 nt, Human
auugcauuguauuguaaauguu

SEQ ID NO: 105168 - RNA, 22 nt, Human
auugcccaauaauaaaauggua

SEQ ID NO: 105169 - RNA, 22 nt, Human
auugcuaggaacagguugcacc

SEQ ID NO: 105170 - RNA, 22 nt, Human
auugcucugcaauccuccccaa

SEQ ID NO: 105171 - RNA, 21 nt, Human
auugcucuguugugucuagaa

SEQ ID NO: 105172 - RNA, 22 nt, Human
auugcugaaaguauuuuaugac

SEQ ID NO: 105173 - RNA, 22 nt, Human
auugcugaacuuauaaaugaau

SEQ ID NO: 105174 - RNA, 22 nt, Human
auugcuggcaucagugacaaua

SEQ ID NO: 105175 - RNA, 22 nt, Human
auugcuguacacuucuagaucu

SEQ ID NO: 105176 - RNA, 22 nt, Human
auugcuuucuuuggggaacugu

SEQ ID NO: 105177 - RNA, 22 nt, Human
auuggaaauacugagagauaaa

SEQ ID NO: 105178 - RNA, 22 nt, Human
auuggaacccuaggcaggcaga

SEQ ID NO: 105179 - RNA, 22 nt, Human
auuggcaaugucccggcugcug

SEQ ID NO: 105180 - RNA, 22 nt, Human
auuggcauacuuucuauauuca

SEQ ID NO: 105181 - RNA, 20 nt, Human
auuggcugggguucugaugc

SEQ ID NO: 105182 - RNA, 22 nt, Human
auuggcuuaguuggcaauuguu

SEQ ID NO: 105183 - RNA, 22 nt, Human
auuggcuugcacuguauuuuaa

SEQ ID NO: 105184 - RNA, 22 nt, Human
auugggcuggccuucuggagag

SEQ ID NO: 105185 - RNA, 22 nt, Human
auugguaaaauucuucccauuu

SEQ ID NO: 105186 - RNA, 22 nt, Human
auugguauguauucugaaaacu

SEQ ID NO: 105187 - RNA, 22 nt, Human
auuggucaggacuggcaugugg

SEQ ID NO: 105188 - RNA, 22 nt, Human
auuggucauaaauugagugauu

SEQ ID NO: 105189 - RNA, 22 nt, Human
auuggucucuagagucuauugu

SEQ ID NO: 105190 - RNA, 22 nt, Human
auuggugcauguaggugaugcu

SEQ ID NO: 105191 - RNA, 22 nt, Human
auugguggugaggacaugccag

SEQ ID NO: 105192 - RNA, 22 nt, Human
auugguuacucaauuugacuga

SEQ ID NO: 105193 - RNA, 22 nt, Human
auuguacauaaaauguaugucu

SEQ ID NO: 105194 - RNA, 22 nt, Human
auuguacauaugauguauguaa

SEQ ID NO: 105195 - RNA, 22 nt, Human
auuguacucccucuccugcccg

SEQ ID NO: 105196 - RNA, 22 nt, Human
auuguauaauuguauugccaaa

SEQ ID NO: 105197 - RNA, 22 nt, Human
auuguaucccccagguguuuaa

SEQ ID NO: 105198 - RNA, 22 nt, Human
auuguauucaguuacaggucuu

SEQ ID NO: 105199 - RNA, 22 nt, Human
auugucagggguuguggaguuu

SEQ ID NO: 105200 - RNA, 22 nt, Human
auugucucugaauuuccagcug

SEQ ID NO: 105201 - RNA, 22 nt, Human
auugucucugaauuuucagcug

SEQ ID NO: 105202 - RNA, 22 nt, Human
auugucucuuaaauguggaaau

SEQ ID NO: 105203 - RNA, 22 nt, Human
auugucuuggcauucaaauuag

SEQ ID NO: 105204 - RNA, 22 nt, Human
auugucuuuaaaaauauacaac

SEQ ID NO: 105205 - RNA, 22 nt, Human
auugugaauaaugcugcaauaa

SEQ ID NO: 105206 - RNA, 22 nt, Human
auugugaauagugccgcaguaa

SEQ ID NO: 105207 - RNA, 22 nt, Human
auugugaauagugcugcaauaa

SEQ ID NO: 105208 - RNA, 22 nt, Human
auugugcaccuacugugugcag

SEQ ID NO: 105209 - RNA, 22 nt, Human
auugugcagaauuggaauugca

SEQ ID NO: 105210 - RNA, 22 nt, Human
auugugcaggucaguuauugca

SEQ ID NO: 105211 - RNA, 14 nt, Human
auugugcaugccau

SEQ ID NO: 105212 - RNA, 22 nt, Human
auuguggacugaucagggcuag

SEQ ID NO: 105213 - RNA, 22 nt, Human
auuguuaaaaagguggaaaugc

SEQ ID NO: 105214 - RNA, 22 nt, Human
auuguuaauguugcacuaaggu

SEQ ID NO: 105215 - RNA, 21 nt, Human
auuguuaucauugugcugugu

SEQ ID NO: 105216 - RNA, 22 nt, Human
auuguuaugaaaauaagauguu

SEQ ID NO: 105217 - RNA, 22 nt, Human
auuguucauguaugaauaaaua

SEQ ID NO: 105218 - RNA, 22 nt, Human
auuguugaggcaguucaucuug

SEQ ID NO: 105219 - RNA, 22 nt, Human
auuguugauaaucguguuguca

SEQ ID NO: 105220 - RNA, 22 nt, Human
auuguuucugcuuuauuuaggg

SEQ ID NO: 105221 - RNA, 22 nt, Human
auuguuuuaauuccauugugaa

SEQ ID NO: 105222 - RNA, 22 nt, Human
agguuucugcacugucacuggu

SEQ ID NO: 105223 - RNA, 18 nt, Human
agguuugguggaaacaua

SEQ ID NO: 105224 - RNA, 22 nt, Human
agguuuguuuuggaaagaucau

SEQ ID NO: 105225 - RNA, 22 nt, Human
agguuuucacaggaaguauguu

SEQ ID NO: 105226 - RNA, 22 nt, Human
aguaaaaauugaggugcaaaau

SEQ ID NO: 105227 - RNA, 22 nt, Human
aguaaaacagagaaaucacuca

SEQ ID NO: 105228 - RNA, 22 nt, Human
aguaaacacuaaaaugacugcg

SEQ ID NO: 105229 - RNA, 22 nt, Human
aguaaacacugucuuuauauau

SEQ ID NO: 105230 - RNA, 22 nt, Human
aguaaacaguaucuuuaguguc

SEQ ID NO: 105231 - RNA, 22 nt, Human
aguaaacaguuucuuagaagaa

SEQ ID NO: 105232 - RNA, 22 nt, Human
aguaaacauguaauuguucauu

SEQ ID NO: 105233 - RNA, 22 nt, Human
aguaaacuguggguacagaugu

SEQ ID NO: 105234 - RNA, 22 nt, Human
aguaaagcagaguugcaguaca

SEQ ID NO: 105235 - RNA, 22 nt, Human
aguaaaguaccaaagugugagu

SEQ ID NO: 105236 - RNA, 18 nt, Human
aguaaauguuaaauauug

SEQ ID NO: 105237 - RNA, 22 nt, Human
aguaacaaagaaagccuuugga

SEQ ID NO: 105238 - RNA, 22 nt, Human
aguaacaaauauucauuggauu

SEQ ID NO: 105239 - RNA, 22 nt, Human
aguaacaagugccaacguuaga

SEQ ID NO: 105240 - RNA, 22 nt, Human
aguaacacuuggaaugauagca

SEQ ID NO: 105241 - RNA, 22 nt, Human
aguaacagagcauggguucaga

SEQ ID NO: 105242 - RNA, 22 nt, Human
aguaacagcaucuccacuggaa

SEQ ID NO: 105243 - RNA, 22 nt, Human
aguaacaggguauuuguguggg

SEQ ID NO: 105244 - RNA, 22 nt, Human
aguaacaugaguuuuucuaaug

SEQ ID NO: 105245 - RNA, 23 nt, Human
aguaacaugcaaauaacagucug

SEQ ID NO: 105246 - RNA, 22 nt, Human
aguaacucauguaaaccucaca

SEQ ID NO: 105247 - RNA, 22 nt, Human
aguaacuuaggagauacauggg

SEQ ID NO: 105248 - RNA, 22 nt, Human
aguaagcaccgggauggucaag

SEQ ID NO: 105249 - RNA, 22 nt, Human
aguaaguuuugauagcauuagg

SEQ ID NO: 105250 - RNA, 22 nt, Human
auuuagacuucccagcacugug

SEQ ID NO: 105251 - RNA, 22 nt, Human
auuuagacuucuugcagguaau

SEQ ID NO: 105252 - RNA, 22 nt, Human
auuuagcaaaaaaugaugaagc

SEQ ID NO: 105253 - RNA, 22 nt, Human
auuuagcuuaccucguuacuga

SEQ ID NO: 105254 - RNA, 22 nt, Human
auuuagucucccuuaucaagga

SEQ ID NO: 105255 - RNA, 22 nt, Human
auuuagugaccugaacugaaac

SEQ ID NO: 105256 - RNA, 22 nt, Human
auuuaguuuaggaaaaguaggu

SEQ ID NO: 105257 - RNA, 18 nt, Human
auuuaugcuaaugggaua

SEQ ID NO: 105258 - RNA, 22 nt, Human
auuuauguaucuguguagauca

SEQ ID NO: 105259 - RNA, 22 nt, Human
auuuauuauugugguuacuucu

SEQ ID NO: 105260 - RNA, 22 nt, Human
auuucaacagaguuugaaggca

SEQ ID NO: 105261 - RNA, 22 nt, Human
auuucacaaagaacagaugcag

SEQ ID NO: 105262 - RNA, 22 nt, Human
auuucacucucccugccacuua

SEQ ID NO: 105263 - RNA, 22 nt, Human
auuucagagaaugaaccuaauc

SEQ ID NO: 105264 - RNA, 22 nt, Human
auuucagagugagagugcucaa

SEQ ID NO: 105265 - RNA, 22 nt, Human
auuucagauucagaaauguagg

SEQ ID NO: 105266 - RNA, 22 nt, Human
auuucagcaaaguuuugauugg

SEQ ID NO: 105267 - RNA, 22 nt, Human
auuucagcagcccauguuugga

SEQ ID NO: 105268 - RNA, 22 nt, Human
auuucagcuaaaauucuuaauu

SEQ ID NO: 105269 - RNA, 22 nt, Human
auuucaggguaaaaaguguuca

SEQ ID NO: 105270 - RNA, 22 nt, Human
auuucagguaccugugggaucc

SEQ ID NO: 105271 - RNA, 22 nt, Human
auuucaguagaaaaucuugauu

SEQ ID NO: 105272 - RNA, 22 nt, Human
auuucauagauuguaaaucccu

SEQ ID NO: 105273 - RNA, 22 nt, Human
auuucaugaaugcugcuguuga

SEQ ID NO: 105274 - RNA, 22 nt, Human
auuucaugagcuaauggaucuc

SEQ ID NO: 105275 - RNA, 22 nt, Human
auuucauggacaucuuuggagg

SEQ ID NO: 105276 - RNA, 22 nt, Human
auuucauguuaacugaacagaa

SEQ ID NO: 105277 - RNA, 22 nt, Human
auuucauguuucaucuaccuaa

SEQ ID NO: 105278 - RNA, 22 nt, Human
auuucauugaaguuaauucuuc

SEQ ID NO: 105279 - RNA, 22 nt, Human
auuuccaaaaccacuuauugcc

SEQ ID NO: 105280 - RNA, 21 nt, Human
auuuccacauaaucauaagac

SEQ ID NO: 105281 - RNA, 22 nt, Human
auuuccauacacccauuucuga

SEQ ID NO: 105282 - RNA, 22 nt, Human
auuuccaugaauucccacucau

SEQ ID NO: 105283 - RNA, 22 nt, Human
auuuccauguccaaaaauuagu

SEQ ID NO: 105284 - RNA, 22 nt, Human
auuucccagcuuugaucaguuu

SEQ ID NO: 105285 - RNA, 22 nt, Human
auuucccagggccugggauuug

SEQ ID NO: 105286 - RNA, 22 nt, Human
auuucccaugugaaucaauugg

SEQ ID NO: 105287 - RNA, 23 nt, Human
auuucccauugugucagcagagc

SEQ ID NO: 105288 - RNA, 22 nt, Human
auuucccuccagggaaagcuua

SEQ ID NO: 105289 - RNA, 23 nt, Human
auuuccuaaaagauaaucauuac

SEQ ID NO: 105290 - RNA, 22 nt, Human
auuuccuaacagaggcaacagu

SEQ ID NO: 105291 - RNA, 22 nt, Human
auuuccuagccucucuugcagu

SEQ ID NO: 105292 - RNA, 22 nt, Human
auuuccuaggugcucgagugcu

SEQ ID NO: 105293 - RNA, 22 nt, Human
auuuccuauacaguuguccaua

SEQ ID NO: 105294 - RNA, 22 nt, Human
auuuccugcaaggaguggguuu

SEQ ID NO: 105295 - RNA, 22 nt, Human
auuuccuggaggaauggaagca

SEQ ID NO: 105296 - RNA, 22 nt, Human
auuuccugguugcauuggcuuu

SEQ ID NO: 105297 - RNA, 22 nt, Human
auuuccuucaguguuuaauacu

SEQ ID NO: 105298 - RNA, 22 nt, Human
auuucuaaagagggugguuugg

SEQ ID NO: 105299 - RNA, 22 nt, Human
auuucuacaguacacaugcauu

SEQ ID NO: 105300 - RNA, 22 nt, Human
auuucuagacuuagaacucuua

SEQ ID NO: 105301 - RNA, 22 nt, Human
auuucuagcaaaggcucugcua

SEQ ID NO: 105302 - RNA, 22 nt, Human
auuucuagccucugaaguagga

SEQ ID NO: 105303 - RNA, 22 nt, Human
auuucuaguccuuguguaguca

SEQ ID NO: 105304 - RNA, 22 nt, Human
auuucucacaguggaaucucug

SEQ ID NO: 105305 - RNA, 22 nt, Human
auuucucagaccagagaggugu

SEQ ID NO: 105306 - RNA, 22 nt, Human
auuucucagcacuuccuaucuc

SEQ ID NO: 105307 - RNA, 22 nt, Human
auuucucaggacuccaugggcg

SEQ ID NO: 105308 - RNA, 22 nt, Human
auuucucagggcugaggaggag

SEQ ID NO: 105309 - RNA, 22 nt, Human
auuucucagugugaucaggccu

SEQ ID NO: 105310 - RNA, 22 nt, Human
auuucucaucuuugugaauggu

SEQ ID NO: 105311 - RNA, 18 nt, Human
auuucucuggggugauuc

SEQ ID NO: 105312 - RNA, 22 nt, Human
auuucucuuccuccuaggguug

SEQ ID NO: 105313 - RNA, 22 nt, Human
auuucugauaaacguaagcugc

SEQ ID NO: 105314 - RNA, 22 nt, Human
auuucugccaaaguggggaccu

SEQ ID NO: 105315 - RNA, 22 nt, Human
auuucugccauagccaggggau

SEQ ID NO: 105316 - RNA, 22 nt, Human
auuucugugcaguaaaugguga

SEQ ID NO: 105317 - RNA, 22 nt, Human
auuucuuacauaacaaauuguu

SEQ ID NO: 105318 - RNA, 22 nt, Human
auuucuucaggucagaaauaga

SEQ ID NO: 105319 - RNA, 19 nt, Human
auuugaaagcugugcuugc

SEQ ID NO: 105320 - RNA, 22 nt, Human
auuugaaugcagguagcugagu

SEQ ID NO: 105321 - RNA, 22 nt, Human
auuugacaacuucugguggcau

SEQ ID NO: 105322 - RNA, 22 nt, Human
auuugacauuauucucucaguc

SEQ ID NO: 105323 - RNA, 22 nt, Human
auuugaggauaguuggguacuc

SEQ ID NO: 105324 - RNA, 22 nt, Human
auuugcaauuacucaugucauu

SEQ ID NO: 105325 - RNA, 22 nt, Human
auuugcagaagggagggggacc

SEQ ID NO: 105326 - RNA, 22 nt, Human
auuugcagauucugucagguuu

SEQ ID NO: 105327 - RNA, 22 nt, Human
auuugcauaucugauagacuaa

SEQ ID NO: 105328 - RNA, 22 nt, Human
auuugcaugaccuuugcaagug

SEQ ID NO: 105329 - RNA, 23 nt, Human
auuugcauggccggauuauggau

SEQ ID NO: 105330 - RNA, 22 nt, Human
auuugcauuuagaaagaucacu

SEQ ID NO: 105331 - RNA, 22 nt, Human
auuugccuuacugaagaaggag

SEQ ID NO: 105332 - RNA, 22 nt, Human
auuugccuuucgaaucaacagg

SEQ ID NO: 105333 - RNA, 22 nt, Human
auuugccuuuuaaacucacaau

SEQ ID NO: 105334 - RNA, 22 nt, Human
auuugcugaucaucuagcuaau

SEQ ID NO: 105335 - RNA, 22 nt, Human
auuugcugugugcuuuagagac

SEQ ID NO: 105336 - RNA, 22 nt, Human
auuugcuuagauucagcacuuu

SEQ ID NO: 105337 - RNA, 22 nt, Human
auuugcuucuagucaguuccau

SEQ ID NO: 105338 - RNA, 22 nt, Human
auuugcuucugcuaaacaacuu

SEQ ID NO: 105339 - RNA, 22 nt, Human
auuugcuucugugaaaucaagu

SEQ ID NO: 105340 - RNA, 23 nt, Human
agugaauucaguuuaaaacagag

SEQ ID NO: 105341 - RNA, 22 nt, Human
agugaauucuccacccaguagg

SEQ ID NO: 105342 - RNA, 22 nt, Human
agugaauucugcacuacugaag

SEQ ID NO: 105343 - RNA, 22 nt, Human
agugacaaaacggaacauacag

SEQ ID NO: 105344 - RNA, 22 nt, Human
agugacaacaaguugacuagaa

SEQ ID NO: 105345 - RNA, 22 nt, Human
agugacaagguaguuaguugga

SEQ ID NO: 105346 - RNA, 20 nt, Human
agugacagagacuguguggc

SEQ ID NO: 105347 - RNA, 22 nt, Human
agugacagauuaccggcagagc

SEQ ID NO: 105348 - RNA, 22 nt, Human
agugacaggaccaggucuggaa

SEQ ID NO: 105349 - RNA, 22 nt, Human
agugacagucugauuucucaaa

SEQ ID NO: 105350 - RNA, 22 nt, Human
agugacauuauuuuguguacua

SEQ ID NO: 105351 - RNA, 22 nt, Human
agugaccaaucacugaaugauu

SEQ ID NO: 105352 - RNA, 22 nt, Human
agugacuaaagguuuuaauggc

SEQ ID NO: 105353 - RNA, 22 nt, Human
agugacuacugauuuuuacuuu

SEQ ID NO: 105354 - RNA, 21 nt, Human
agugacuaugacauuauuacc

SEQ ID NO: 105355 - RNA, 22 nt, Human
agugacucacuagcucucagug

SEQ ID NO: 105356 - RNA, 22 nt, Human
agugacuuuaguugaaucuugu

SEQ ID NO: 105357 - RNA, 17 nt, Human
agugagaaugucaugua

SEQ ID NO: 105358 - RNA, 22 nt, Human
agugagacaguauacugagcag

SEQ ID NO: 105359 - RNA, 23 nt, Human
auauuagggagauuagcccucua

SEQ ID NO: 105360 - RNA, 22 nt, Human
auauuaguuuggagacuacaau

SEQ ID NO: 105361 - RNA, 22 nt, Human
auauuauagacagagucuucug

SEQ ID NO: 105362 - RNA, 18 nt, Human
auauucaagaagacagag

SEQ ID NO: 105363 - RNA, 22 nt, Human
caagauuuccaacccuggguaa

SEQ ID NO: 105364 - RNA, 22 nt, Human
caagauuugccaguggccaacu

SEQ ID NO: 105365 - RNA, 22 nt, Human
caagauuuggcaacuuugucau

SEQ ID NO: 105366 - RNA, 22 nt, Human
caagauuuuaucuccguuucug

SEQ ID NO: 105367 - RNA, 22 nt, Human
caagcacuguggcacucgcagg

SEQ ID NO: 105368 - RNA, 22 nt, Human
caagcagagaagucucuaggcu

SEQ ID NO: 105369 - RNA, 22 nt, Human
caagcagagaggucaacuaaua

SEQ ID NO: 105370 - RNA, 22 nt, Human
caagcagagagguuagaacaca

SEQ ID NO: 105371 - RNA, 22 nt, Human
caagcaggaggagaaguuucug

SEQ ID NO: 105372 - RNA, 22 nt, Human
caagcaggaugaagcccaggga

SEQ ID NO: 105373 - RNA, 22 nt, Human
caagcaggguuuaugcauggag

SEQ ID NO: 105374 - RNA, 22 nt, Human
caagcagguuugcuauuuucuu

SEQ ID NO: 105375 - RNA, 22 nt, Human
caagcauacucauuccagacuc

SEQ ID NO: 105376 - RNA, 22 nt, Human
caagccagcaguuuaaugacuc

SEQ ID NO: 105377 - RNA, 22 nt, Human
caagccagcuccugccacagag

SEQ ID NO: 105378 - RNA, 22 nt, Human
caagccagugauguuugcugcc

SEQ ID NO: 105379 - RNA, 22 nt, Human
caagccauauuuugaagaauga

SEQ ID NO: 105380 - RNA, 22 nt, Human
caagcccaggauuccccaguua

SEQ ID NO: 105381 - RNA, 22 nt, Human
caagccucagaaucuucuccau

SEQ ID NO: 105382 - RNA, 22 nt, Human
caagccugucucaccagugcua

SEQ ID NO: 105383 - RNA, 22 nt, Human
caagcuccuuacauccacaggg

SEQ ID NO: 105384 - RNA, 22 nt, Human
caagcucugggauagcagagag

SEQ ID NO: 105385 - RNA, 22 nt, Human
caagcucuuuaaacuuauguca

SEQ ID NO: 105386 - RNA, 22 nt, Human
caagcugcagcgccugcgccgg

SEQ ID NO: 105387 - RNA, 22 nt, Human
caagcugccaccagaagagcau

SEQ ID NO: 105388 - RNA, 22 nt, Human
caagcugcuauagguugcuggg

SEQ ID NO: 105389 - RNA, 22 nt, Human
caaggaaacaugaaaugcauug

SEQ ID NO: 105390 - RNA, 22 nt, Human
caaggaagacccacgcagauau

SEQ ID NO: 105391 - RNA, 22 nt, Human
caaggacacucccugcugggca

SEQ ID NO: 105392 - RNA, 22 nt, Human
caaggacagcgucaggugcaac

SEQ ID NO: 105393 - RNA, 22 nt, Human
caaggagauaaaauguugagcu

SEQ ID NO: 105394 - RNA, 22 nt, Human
caaggcaagucauaugggcaag

SEQ ID NO: 105395 - RNA, 20 nt, Human
caaggcagaccagagugagu

SEQ ID NO: 105396 - RNA, 22 nt, Human
caaggcauacuccuuucucagc

SEQ ID NO: 105397 - RNA, 22 nt, Human
caaggcaugcaaugucuucagg

SEQ ID NO: 105398 - RNA, 22 nt, Human
caaggcauuguguaagcacuug

SEQ ID NO: 105399 - RNA, 22 nt, Human
caaggccaagguuuugugaacu

SEQ ID NO: 105400 - RNA, 19 nt, Human
caaggccaccauuucuccg

SEQ ID NO: 105401 - RNA, 22 nt, Human
caaggccacugcucagguuucc

SEQ ID NO: 105402 - RNA, 22 nt, Human
caaggccauauugccuguaugu

SEQ ID NO: 105403 - RNA, 22 nt, Human
caaggcccugcaaccugacuug

SEQ ID NO: 105404 - RNA, 22 nt, Human
caaggccuaaucauacugcuaa

SEQ ID NO: 105405 - RNA, 22 nt, Human
caaggccuccugggcccagaga

SEQ ID NO: 105406 - RNA, 22 nt, Human
caaggccugccucuggcagaaa

SEQ ID NO: 105407 - RNA, 22 nt, Human
caaggccuucgucuccuagcuu

SEQ ID NO: 105408 - RNA, 22 nt, Human
caaggccuugcugucuccuccu

SEQ ID NO: 105409 - RNA, 22 nt, Human
caaggcucuggaccaaauccca

SEQ ID NO: 105410 - RNA, 22 nt, Human
caaggcugcuggcuucugagcu

SEQ ID NO: 105411 - RNA, 22 nt, Human
caaggcugcuucagacuaguga

SEQ ID NO: 105412 - RNA, 22 nt, Human
caaggcuguguuagcugcccuc

SEQ ID NO: 105413 - RNA, 21 nt, Human
caaggcuuaaacauuaaucua

SEQ ID NO: 105414 - RNA, 22 nt, Human
caaggcuuagguggcucccugu

SEQ ID NO: 105415 - RNA, 20 nt, Human
caaggcuucuuugauggggu

SEQ ID NO: 105416 - RNA, 22 nt, Human
caaggcuugaauucugaugggu

SEQ ID NO: 105417 - RNA, 22 nt, Human
caaggcuuggagagaaugccau

SEQ ID NO: 105418 - RNA, 22 nt, Human
caagggaagaggacagggaccu

SEQ ID NO: 105419 - RNA, 22 nt, Human
caagggcauugcuugggaccuu

SEQ ID NO: 105420 - RNA, 22 nt, Human
caagguaguucuggucauugac

SEQ ID NO: 105421 - RNA, 22 nt, Human
caaggucacauaacuugucaaa

SEQ ID NO: 105422 - RNA, 22 nt, Human
caagguuuacauugggcuauca

SEQ ID NO: 105423 - RNA, 22 nt, Human
caagguuucgaguucccaacca

SEQ ID NO: 105424 - RNA, 22 nt, Human
caagguuucuaugcucaaagga

SEQ ID NO: 105425 - RNA, 22 nt, Human
caagguuuuggaagauuuucgu

SEQ ID NO: 105426 - RNA, 22 nt, Human
caaguaaacaauaugugauuca

SEQ ID NO: 105427 - RNA, 22 nt, Human
caaguaaagaaucacauuucuu

SEQ ID NO: 105428 - RNA, 22 nt, Human
caaguaaugguuuuauaauagu

SEQ ID NO: 105429 - RNA, 22 nt, Human
caaguaauucugcaagaaacca

SEQ ID NO: 105430 - RNA, 22 nt, Human
caaguauuuuaaggacuagugg

SEQ ID NO: 105431 - RNA, 22 nt, Human
caagucaaagacuagaacuagu

SEQ ID NO: 105432 - RNA, 22 nt, Human
caagucauuguuuagucauguu

SEQ ID NO: 105433 - RNA, 22 nt, Human
caaguccaggugggcaaauaaa

SEQ ID NO: 105434 - RNA, 22 nt, Human
caaguccucaaagggcucugcu

SEQ ID NO: 105435 - RNA, 22 nt, Human
caaguccuccaugugacuaggu

SEQ ID NO: 105436 - RNA, 22 nt, Human
caaguccuuuucuuggcucagg

SEQ ID NO: 105437 - RNA, 22 nt, Human
caagugacugugcuggcaacau

SEQ ID NO: 105438 - RNA, 22 nt, Human
caaguggggcagauucucuucc

SEQ ID NO: 105439 - RNA, 20 nt, Human
caaguguagaaacuaauaag

SEQ ID NO: 105440 - RNA, 22 nt, Human
caagugucuauaucagugcuug

SEQ ID NO: 105441 - RNA, 20 nt, Human
caaguguuauugugcauuua

SEQ ID NO: 105442 - RNA, 22 nt, Human
caaguuaaauuugcauuucaga

SEQ ID NO: 105443 - RNA, 22 nt, Human
caaguuaauugguauuuugauc

SEQ ID NO: 105444 - RNA, 22 nt, Human
caaguuacauuagaaaucaugc

SEQ ID NO: 105445 - RNA, 22 nt, Human
caaguuaucagaaggcacuuuu

SEQ ID NO: 105446 - RNA, 22 nt, Human
caaguuauuccuuuacacuaua

SEQ ID NO: 105447 - RNA, 23 nt, Human
caaguuauucugacacucaucaa

SEQ ID NO: 105448 - RNA, 21 nt, Human
caaguucugcugaaucuucuu

SEQ ID NO: 105449 - RNA, 22 nt, Human
caaguucuggacaggggaauau

SEQ ID NO: 105450 - RNA, 22 nt, Human
caaguugugaaugacagacuuc

SEQ ID NO: 105451 - RNA, 22 nt, Human
caaguuguuuaggagguguugu

SEQ ID NO: 105452 - RNA, 22 nt, Human
caaguuuagucauggugguagu

SEQ ID NO: 105453 - RNA, 22 nt, Human
caaguuuuagaaauaucuggau

SEQ ID NO: 105454 - RNA, 22 nt, Human
caaguuuucuggguucagagca

SEQ ID NO: 105455 - RNA, 22 nt, Human
caauaaaguggaggcccgggcu

SEQ ID NO: 105456 - RNA, 22 nt, Human
caauaacuuugauauuuugcgg

SEQ ID NO: 105457 - RNA, 22 nt, Human
caauaagugcuuuuguuuagca

SEQ ID NO: 105458 - RNA, 22 nt, Human
caauaauugcuuuccagaguua

SEQ ID NO: 105459 - RNA, 22 nt, Human
caauacaauuaccaguuaauca

SEQ ID NO: 105460 - RNA, 22 nt, Human
caauacacuaaacuucucugaa

SEQ ID NO: 105461 - RNA, 22 nt, Human
caauacugaguuuacauucauc

SEQ ID NO: 105462 - RNA, 22 nt, Human
caauacuuccuuguuagaggca

SEQ ID NO: 105463 - RNA, 22 nt, Human
caauagcagcuucugaaugcaa

SEQ ID NO: 105464 - RNA, 22 nt, Human
caauagcaggucuacagagaga

SEQ ID NO: 105465 - RNA, 22 nt, Human
caauagcuaggcugguaaagga

SEQ ID NO: 105466 - RNA, 22 nt, Human
caauaguauuuauugaacaccu

SEQ ID NO: 105467 - RNA, 22 nt, Human
caauauagagagaaaauuaugu

SEQ ID NO: 105468 - RNA, 22 nt, Human
cacagaagaaucaugcuguguu

SEQ ID NO: 105469 - RNA, 22 nt, Human
cacagaaguguguauaacucuu

SEQ ID NO: 105470 - RNA, 22 nt, Human
cacagacccagaagggaugaag

SEQ ID NO: 105471 - RNA, 22 nt, Human
cacagagaacugugggagugug

SEQ ID NO: 105472 - RNA, 22 nt, Human
cacagagauggccagggcacau

SEQ ID NO: 105473 - RNA, 22 nt, Human
cacagagcugaaccugggucau

SEQ ID NO: 105474 - RNA, 22 nt, Human
cacagaggaugcccaagcgauc

SEQ ID NO: 105475 - RNA, 22 nt, Human
cacagaggcggaaaauucugaa

SEQ ID NO: 105476 - RNA, 22 nt, Human
cacagaggucugggcccagcag

SEQ ID NO: 105477 - RNA, 22 nt, Human
cacagaguggaggcuuggccug

SEQ ID NO: 105478 - RNA, 22 nt, Human
cacagaugagcugaauagcuuu

SEQ ID NO: 105479 - RNA, 22 nt, Human
cacagcagaacuuaauuucaaa

SEQ ID NO: 105480 - RNA, 22 nt, Human
cacagcagauccagggguugug

SEQ ID NO: 105481 - RNA, 22 nt, Human
cacagcagggcauggcuguugu

SEQ ID NO: 105482 - RNA, 20 nt, Human
auacacuugcccagcuugug

SEQ ID NO: 105483 - RNA, 22 nt, Human
auacagagaagggaggcaaaau

SEQ ID NO: 105484 - RNA, 22 nt, Human
auacagauauaagauugaggag

SEQ ID NO: 105485 - RNA, 22 nt, Human
auacagaucccacagcauguga

SEQ ID NO: 105486 - RNA, 22 nt, Human
auacagaugaaauacuaagcua

SEQ ID NO: 105487 - RNA, 22 nt, Human
auacagauugcuauacuuacaa

SEQ ID NO: 105488 - RNA, 22 nt, Human
auacagcagugaauaagauaaa

SEQ ID NO: 105489 - RNA, 22 nt, Human
auacagcaguuugugauccuag

SEQ ID NO: 105490 - RNA, 22 nt, Human
auacagcugccuucuaacuaug

SEQ ID NO: 105491 - RNA, 22 nt, Human
auacaggaugcugaacaucucu

SEQ ID NO: 105492 - RNA, 22 nt, Human
auacagguggacuucaguuagu

SEQ ID NO: 105493 - RNA, 22 nt, Human
auacaguaauugcauaggcuuc

SEQ ID NO: 105494 - RNA, 20 nt, Human
auacaguaggugcucaauau

SEQ ID NO: 105495 - RNA, 22 nt, Human
auacagucagacuuuagccauu

SEQ ID NO: 105496 - RNA, 22 nt, Human
auacagugaauacuuacagugu

SEQ ID NO: 105497 - RNA, 22 nt, Human
auacagugagaauaauucuuag

SEQ ID NO: 105498 - RNA, 22 nt, Human
auacaguggcugugagcugggc

SEQ ID NO: 105499 - RNA, 22 nt, Human
auacauaauuacuuccgauguu

SEQ ID NO: 105500 - RNA, 23 nt, Human
auacauacagucuuacugacuuu

SEQ ID NO: 105501 - RNA, 22 nt, Human
auacauacguacauacguaugu

SEQ ID NO: 105502 - RNA, 22 nt, Human
auacauagcagagucaauuaau

SEQ ID NO: 105503 - RNA, 22 nt, Human
auacaucaauuucuuaguuauc

SEQ ID NO: 105504 - RNA, 22 nt, Human
auacaucauuuaugaugugugu

SEQ ID NO: 105505 - RNA, 22 nt, Human
auacaucauuuauggaauaagg

SEQ ID NO: 105506 - RNA, 22 nt, Human
auacaucauuucccaucaaucg

SEQ ID NO: 105507 - RNA, 22 nt, Human
auacaucuggauguaugcauuu

SEQ ID NO: 105508 - RNA, 22 nt, Human
auacaugacucacacauucugc

SEQ ID NO: 105509 - RNA, 22 nt, Human
auacaugaggaggcuggaaaca

SEQ ID NO: 105510 - RNA, 22 nt, Human
auacaugauacuuaguacguag

SEQ ID NO: 105511 - RNA, 22 nt, Human
auacaugauggguguauaguuu

SEQ ID NO: 105512 - RNA, 22 nt, Human
auacaugcacauuuuuauacau

SEQ ID NO: 105513 - RNA, 17 nt, Human
auacauguaaagugcuu

SEQ ID NO: 105514 - RNA, 22 nt, Human
auacaugugggucuaaacauau

SEQ ID NO: 105515 - RNA, 22 nt, Human
auacaugugugagcgaagaugu

SEQ ID NO: 105516 - RNA, 22 nt, Human
auacauuagcucauaugauuaa

SEQ ID NO: 105517 - RNA, 22 nt, Human
auacauuagugaacaaaagaga

SEQ ID NO: 105518 - RNA, 22 nt, Human
auacauucagcagugcucauga

SEQ ID NO: 105519 - RNA, 21 nt, Human
auacauucuauuaagcauuua

SEQ ID NO: 105520 - RNA, 22 nt, Human
auaccacaacauggcucagagg

SEQ ID NO: 105521 - RNA, 22 nt, Human
auaccauaggaaaggaucagcc

SEQ ID NO: 105522 - RNA, 22 nt, Human
auaccauggcaguuuauucacg

SEQ ID NO: 105523 - RNA, 22 nt, Human
auacccagaguggguagaguua

SEQ ID NO: 105524 - RNA, 22 nt, Human
auacccagcucuuucguuuugg

SEQ ID NO: 105525 - RNA, 22 nt, Human
auaccucuggcacucaagacuu

SEQ ID NO: 105526 - RNA, 22 nt, Human
auaccuuuuagacauguaguug

SEQ ID NO: 105527 - RNA, 22 nt, Human
auacgccauaggcuccucacuu

SEQ ID NO: 105528 - RNA, 22 nt, Human
auacuacaaucauaauuguaca

SEQ ID NO: 105529 - RNA, 22 nt, Human
auacucagcugcuagacagaag

SEQ ID NO: 105530 - RNA, 23 nt, Human
auacugaaacuguuguuuaucug

SEQ ID NO: 105531 - RNA, 22 nt, Human
auacugaacauguuugcaguca

SEQ ID NO: 105532 - RNA, 22 nt, Human
auacugauuaguugagaaagca

SEQ ID NO: 105533 - RNA, 22 nt, Human
auacuguaauaccuaaaugaac

SEQ ID NO: 105534 - RNA, 22 nt, Human
auacuguacgucccagauagga

SEQ ID NO: 105535 - RNA, 22 nt, Human
auacuguagaggcauagcuagu

SEQ ID NO: 105536 - RNA, 22 nt, Human
auacuuacuuuucuucagacua

SEQ ID NO: 105537 - RNA, 22 nt, Human
auacuugagguagcaacuuaag

SEQ ID NO: 105538 - RNA, 22 nt, Human
auacuuggugguguuccauagg

SEQ ID NO: 105539 - RNA, 22 nt, Human
auacuuuagagcuagauugccu

SEQ ID NO: 105540 - RNA, 22 nt, Human
auacuuugcuacauuguacauu

SEQ ID NO: 105541 - RNA, 22 nt, Human
auacuuuggggguuaguguaga

SEQ ID NO: 105542 - RNA, 22 nt, Human
auagaaacagaggucaggcauu

SEQ ID NO: 105543 - RNA, 18 nt, Human
auagaaaccuuuaaucag

SEQ ID NO: 105544 - RNA, 23 nt, Human
auagaaacuaacaauuuggcuua

SEQ ID NO: 105545 - RNA, 22 nt, Human
auagaaaggucuuuggcagaca

SEQ ID NO: 105546 - RNA, 21 nt, Human
auagaacaccaggcauauaua

SEQ ID NO: 105547 - RNA, 22 nt, Human
auagaaccacccagagccuuuu

SEQ ID NO: 105548 - RNA, 19 nt, Human
auagaaccugcaguuucaa

SEQ ID NO: 105549 - RNA, 22 nt, Human
auagaacucgggcuuuggaauc

SEQ ID NO: 105550 - RNA, 22 nt, Human
auagaauaaugguugucaggag

SEQ ID NO: 105551 - RNA, 22 nt, Human
auagaauccugcagcaagccuu

SEQ ID NO: 105552 - RNA, 22 nt, Human
auagaauuauggaaagcaucuu

SEQ ID NO: 105553 - RNA, 22 nt, Human
auagaauucguguuuguaauuc

SEQ ID NO: 105554 - RNA, 20 nt, Human
auagacaaagacaugccaga

SEQ ID NO: 105555 - RNA, 22 nt, Human
auagacaacacuuauuauuccu

SEQ ID NO: 105556 - RNA, 22 nt, Human
auagacacauguuauuauacuu

SEQ ID NO: 105557 - RNA, 22 nt, Human
auagacagaaagauaauagaau

SEQ ID NO: 105558 - RNA, 22 nt, Human
auagacauauggcuuuguuucu

SEQ ID NO: 105559 - RNA, 22 nt, Human
auagacauuauaacacagagcu

SEQ ID NO: 105560 - RNA, 22 nt, Human
auagaccuucuacacaggacaa

SEQ ID NO: 105561 - RNA, 22 nt, Human
auagacgcggccgcugaugcag

SEQ ID NO: 105562 - RNA, 22 nt, Human
auagagcuauaagaauuuugug

SEQ ID NO: 105563 - RNA, 22 nt, Human
auagagcucuucuucuuuuaac

SEQ ID NO: 105564 - RNA, 22 nt, Human
auagaguccaaaguaugaauau

SEQ ID NO: 105565 - RNA, 22 nt, Human
auagagugauguaagguaugug

SEQ ID NO: 105566 - RNA, 22 nt, Human
auagauacauuguuauauuugu

SEQ ID NO: 105567 - RNA, 22 nt, Human
auagauacuuauaacaauugug

SEQ ID NO: 105568 - RNA, 22 nt, Human
auagauccagaaaauuuauuau

SEQ ID NO: 105569 - RNA, 22 nt, Human
auagaugucauugucauccauc

SEQ ID NO: 105570 - RNA, 22 nt, Human
auagauguuuucuccuaauugg

SEQ ID NO: 105571 - RNA, 22 nt, Human
auagauuagcccuauaguuuua

SEQ ID NO: 105572 - RNA, 22 nt, Human
auagauugcuaguuuuaaaauu

SEQ ID NO: 105573 - RNA, 22 nt, Human
auagauuugaauuuaagacuug

SEQ ID NO: 105574 - RNA, 22 nt, Human
auagcaaacuggagcuugcuuu

SEQ ID NO: 105575 - RNA, 22 nt, Human
auagcaaagccuggcacaauga

SEQ ID NO: 105576 - RNA, 22 nt, Human
auagcaaauauuuuaaugagca

SEQ ID NO: 105577 - RNA, 22 nt, Human
cacugcuuaguugguaaaugug

SEQ ID NO: 105578 - RNA, 22 nt, Human
cacugcuuauaaauucuaggca

SEQ ID NO: 105579 - RNA, 22 nt, Human
cacugcuucuggaggaauuugg

SEQ ID NO: 105580 - RNA, 22 nt, Human
cacugcuuuaaggcugaguaac

SEQ ID NO: 105581 - RNA, 22 nt, Human
cacugcuuucacaguuuguucc

SEQ ID NO: 105582 - RNA, 18 nt, Human
cacuggaagauuaggguc

SEQ ID NO: 105583 - RNA, 22 nt, Human
cacuggaauagcauugauucuu

SEQ ID NO: 105584 - RNA, 22 nt, Human
cacuggaauauggcguugaacc

SEQ ID NO: 105585 - RNA, 22 nt, Human
cacuggaauucaagauacugag

SEQ ID NO: 105586 - RNA, 22 nt, Human
cacuggcaaauggagagaaugu

SEQ ID NO: 105587 - RNA, 22 nt, Human
cacuggcaugugaggcgguggc

SEQ ID NO: 105588 - RNA, 22 nt, Human
cacuggcauuagucacgaggca

SEQ ID NO: 105589 - RNA, 22 nt, Human
cacuggcccauuccugucuggc

SEQ ID NO: 105590 - RNA, 22 nt, Human
cacugggagucguaagacacgg

SEQ ID NO: 105591 - RNA, 20 nt, Human
cacugggcuggagucagggc

SEQ ID NO: 105592 - RNA, 22 nt, Human
cacugggcuuuguaguuagcau

SEQ ID NO: 105593 - RNA, 22 nt, Human
cacuggugacuucugagcugga

SEQ ID NO: 105594 - RNA, 22 nt, Human
cacuggugccagagaacagaau

SEQ ID NO: 105595 - RNA, 22 nt, Human
cacugguguauuagagcuagaa

SEQ ID NO: 105596 - RNA, 22 nt, Human
cacuggugucugagcaggguga

SEQ ID NO: 105597 - RNA, 22 nt, Human
cacugguuggcugagauccaua

SEQ ID NO: 105598 - RNA, 22 nt, Human
cacuguaauggaauuuucuuua

SEQ ID NO: 105599 - RNA, 22 nt, Human
cacuguacccauuuaaauaaau

SEQ ID NO: 105600 - RNA, 22 nt, Human
cacuguacuggguugaaggacg

SEQ ID NO: 105601 - RNA, 22 nt, Human
auagcaauggcaacaacuaagc

SEQ ID NO: 105602 - RNA, 22 nt, Human
auagcaccaugacuaaacaauu

SEQ ID NO: 105603 - RNA, 22 nt, Human
auagcaguaacacugacauuuu

SEQ ID NO: 105604 - RNA, 22 nt, Human
auagcauuauuuacaauuagua

SEQ ID NO: 105605 - RNA, 22 nt, Human
auagccuugacucacagcucuu

SEQ ID NO: 105606 - RNA, 22 nt, Human
auagcugacuccagacauagcu

SEQ ID NO: 105607 - RNA, 22 nt, Human
auagcuguuuuuaggccaaaua

SEQ ID NO: 105608 - RNA, 22 nt, Human
auagcuuuacagaagaguuuag

SEQ ID NO: 105609 - RNA, 22 nt, Human
auagcuuucuuaaauauauaaa

SEQ ID NO: 105610 - RNA, 22 nt, Human
auagcuuugagggcuccuuagg

SEQ ID NO: 105611 - RNA, 22 nt, Human
auaggaaugugauuuauaaaug

SEQ ID NO: 105612 - RNA, 22 nt, Human
auaggcaagggauacaauauac

SEQ ID NO: 105613 - RNA, 22 nt, Human
auaggccaauacuguagaguuu

SEQ ID NO: 105614 - RNA, 22 nt, Human
auaggcuugagcuaagagagaa

SEQ ID NO: 105615 - RNA, 22 nt, Human
auagggcagucaggccgccacu

SEQ ID NO: 105616 - RNA, 22 nt, Human
auaggugaaauauucaaaaugu

SEQ ID NO: 105617 - RNA, 22 nt, Human
auaguaaauuaucguggagaga

SEQ ID NO: 105618 - RNA, 22 nt, Human
auaguaugagcucauacacuug

SEQ ID NO: 105619 - RNA, 22 nt, Human
auaguauuuaauaguuagcuca

SEQ ID NO: 105620 - RNA, 22 nt, Human
auaguauuuccagaaauagucu

SEQ ID NO: 105621 - RNA, 22 nt, Human
auagucacugccuuccauuugu

SEQ ID NO: 105622 - RNA, 22 nt, Human
auagucagugucuauaucguug

SEQ ID NO: 105623 - RNA, 23 nt, Human
auagucauguaaaauauuugaag

SEQ ID NO: 105624 - RNA, 22 nt, Human
auagucuuagaaucuugagugu

SEQ ID NO: 105625 - RNA, 22 nt, Human
auagucuucagcacuuugauca

SEQ ID NO: 105626 - RNA, 22 nt, Human
auagucuuuacugcugaauuga

SEQ ID NO: 105627 - RNA, 22 nt, Human
auagugcauuuuauuaucagca

SEQ ID NO: 105628 - RNA, 22 nt, Human
auaguggggacaggaugguugg

SEQ ID NO: 105629 - RNA, 22 nt, Human
auaguggguacaggggcagaga

SEQ ID NO: 105630 - RNA, 22 nt, Human
auaguguguuagugacauaggc

SEQ ID NO: 105631 - RNA, 22 nt, Human
auaguguuagagccaguauguu

SEQ ID NO: 105632 - RNA, 22 nt, Human
auaguuacauacagaaauauuu

SEQ ID NO: 105633 - RNA, 22 nt, Human
auaguuauaagaaaacguugaa

SEQ ID NO: 105634 - RNA, 22 nt, Human
auaguugguccaugaaaaaagu

SEQ ID NO: 105635 - RNA, 22 nt, Human
auaguuguguggggauucuggu

SEQ ID NO: 105636 - RNA, 22 nt, Human
auaguuugaaggcuguucuacu

SEQ ID NO: 105637 - RNA, 22 nt, Human
auaguuuuaaaaccucaggaag

SEQ ID NO: 105638 - RNA, 22 nt, Human
auaguuuuauagauauugugua

SEQ ID NO: 105639 - RNA, 23 nt, Human
auaguuuucccugguucuugcca

SEQ ID NO: 105640 - RNA, 22 nt, Human
auauaaagaaguggaaaaugag

SEQ ID NO: 105641 - RNA, 22 nt, Human
auauaacucuccauuaagggcc

SEQ ID NO: 105642 - RNA, 22 nt, Human
auauaacucuuguucuuauagu

SEQ ID NO: 105643 - RNA, 20 nt, Human
auauaauaaauuuugguuac

SEQ ID NO: 105644 - RNA, 22 nt, Human
auauaauuaauuuagcugccuc

SEQ ID NO: 105645 - RNA, 22 nt, Human
auauaauuguucugaaguguuu

SEQ ID NO: 105646 - RNA, 22 nt, Human
auauaauuuuugguuagcucaa

SEQ ID NO: 105647 - RNA, 22 nt, Human
auauacagggagaaacagcuua

SEQ ID NO: 105648 - RNA, 22 nt, Human
auauacaggugguauguguaaa

SEQ ID NO: 105649 - RNA, 19 nt, Human
auauacauacugugugcau

SEQ ID NO: 105650 - RNA, 22 nt, Human
auauacguauauuccaaagggu

SEQ ID NO: 105651 - RNA, 22 nt, Human
auauacuuccccauuauggggg

SEQ ID NO: 105652 - RNA, 22 nt, Human
auauagaaggugcuauuuacau

SEQ ID NO: 105653 - RNA, 22 nt, Human
auauagacagaugacagggaua

SEQ ID NO: 105654 - RNA, 22 nt, Human
auauaggcuucaugacagaggg

SEQ ID NO: 105655 - RNA, 22 nt, Human
auauaguaagcagucuguaaau

SEQ ID NO: 105656 - RNA, 22 nt, Human
auauagugagagauuacagaag

SEQ ID NO: 105657 - RNA, 22 nt, Human
auauauaagcugaugagccaca

SEQ ID NO: 105658 - RNA, 22 nt, Human
auauaucuucauuaggucgaga

SEQ ID NO: 105659 - RNA, 22 nt, Human
auauaugcgcaggcacccagcu

SEQ ID NO: 105660 - RNA, 21 nt, Human
auaucacaaacauauggucug

SEQ ID NO: 105661 - RNA, 23 nt, Human
auaucacacccaguacagucucc

SEQ ID NO: 105662 - RNA, 22 nt, Human
auaucacagaugcagaaagaga

SEQ ID NO: 105663 - RNA, 22 nt, Human
auaucacaguaguuguuuaguu

SEQ ID NO: 105664 - RNA, 22 nt, Human
auaucacuagagaaguuguuaa

SEQ ID NO: 105665 - RNA, 22 nt, Human
auaucagaaauaguaagcagag

SEQ ID NO: 105666 - RNA, 22 nt, Human
auauccagcagcaggugaguau

SEQ ID NO: 105667 - RNA, 18 nt, Human
auaucugugggauggaga

SEQ ID NO: 105668 - RNA, 22 nt, Human
auaucuucuuuauuuugugagg

SEQ ID NO: 105669 - RNA, 22 nt, Human
auaucuuuguaugguucagcag

SEQ ID NO: 105670 - RNA, 22 nt, Human
auaugaaaagaagucaccauug

SEQ ID NO: 105671 - RNA, 22 nt, Human
auaugaauuuggggaggacaca

SEQ ID NO: 105672 - RNA, 22 nt, Human
auaugagagaggaaagauuuua

SEQ ID NO: 105673 - RNA, 22 nt, Human
auaugagaguaaaugccgaucu

SEQ ID NO: 105674 - RNA, 22 nt, Human
auaugcaagcacauagaauacu

SEQ ID NO: 105675 - RNA, 22 nt, Human
auaugcauuaacauuguaggag

SEQ ID NO: 105676 - RNA, 22 nt, Human
auaugcuagugugcuuauacuu

SEQ ID NO: 105677 - RNA, 22 nt, Human
auaugcuauugcuguaauuuaa

SEQ ID NO: 105678 - RNA, 20 nt, Human
auaugcuuaaucucacuaca

SEQ ID NO: 105679 - RNA, 22 nt, Human
auaugcuuaugaugguuaauuu

SEQ ID NO: 105680 - RNA, 22 nt, Human
auaugcuuccccuucuuuuugg

SEQ ID NO: 105681 - RNA, 18 nt, Human
auaugcuugagcuaagga

SEQ ID NO: 105682 - RNA, 22 nt, Human
auauggaaauagcaauaugguu

SEQ ID NO: 105683 - RNA, 22 nt, Human
auauggaacuauucuguguaga

SEQ ID NO: 105684 - RNA, 22 nt, Human
auauggaaguuaccugacuuca

SEQ ID NO: 105685 - RNA, 22 nt, Human
auauggcuguugcacaucuaag

SEQ ID NO: 105686 - RNA, 22 nt, Human
augcugucccugcccuucaccc

SEQ ID NO: 105687 - RNA, 22 nt, Human
augcugugagugugccgcagag

SEQ ID NO: 105688 - RNA, 22 nt, Human
augcugugauuguagaaauauu

SEQ ID NO: 105689 - RNA, 22 nt, Human
augcuguggaaguuccugaagc

SEQ ID NO: 105690 - RNA, 22 nt, Human
augcuguggggagugaggguag

SEQ ID NO: 105691 - RNA, 22 nt, Human
augcugugucaggaauuugaua

SEQ ID NO: 105692 - RNA, 22 nt, Human
augcuguguggccaccuccaug

SEQ ID NO: 105693 - RNA, 22 nt, Human
augcuguuaagaaucucuuccu

SEQ ID NO: 105694 - RNA, 22 nt, Human
augcuuaaugaggguauauaug

SEQ ID NO: 105695 - RNA, 22 nt, Human
augcuuagguuaaauuuguaau

SEQ ID NO: 105696 - RNA, 22 nt, Human
augcuuccaaggcuaagacaag

SEQ ID NO: 105697 - RNA, 22 nt, Human
augcuuccacuguucugcucuc

SEQ ID NO: 105698 - RNA, 20 nt, Human
augcuuccagggugugucug

SEQ ID NO: 105699 - RNA, 22 nt, Human
augcuuccccucucauuucagc

SEQ ID NO: 105700 - RNA, 22 nt, Human
augcuuccuaaccauggccgug

SEQ ID NO: 105701 - RNA, 22 nt, Human
augcuuccucccuuccacucaa

SEQ ID NO: 105702 - RNA, 22 nt, Human
augcuuccucuacggccucuga

SEQ ID NO: 105703 - RNA, 22 nt, Human
augcuuccuuuuucccuuaagg

SEQ ID NO: 105704 - RNA, 22 nt, Human
augcuucuguguauguuucagg

SEQ ID NO: 105705 - RNA, 22 nt, Human
augcuugaaaguuauuucauuu

SEQ ID NO: 105706 - RNA, 22 nt, Human
augcuugcccauguuucugaag

SEQ ID NO: 105707 - RNA, 22 nt, Human
augcuugggacucccuguagca

SEQ ID NO: 105708 - RNA, 22 nt, Human
augcuuuaaacuauaaauccac

SEQ ID NO: 105709 - RNA, 22 nt, Human
augcuuuacaguuuuccaaaca

SEQ ID NO: 105710 - RNA, 22 nt, Human
augcuuuauuguuaggucaugu

SEQ ID NO: 105711 - RNA, 22 nt, Human
augcuuucucuuaguucauuga

SEQ ID NO: 105712 - RNA, 20 nt, Human
augcuuucuugugugcugcu

SEQ ID NO: 105713 - RNA, 22 nt, Human
augcuuuuaugucacaugguca

SEQ ID NO: 105714 - RNA, 19 nt, Human
auggaaaaugccagacuga

SEQ ID NO: 105715 - RNA, 22 nt, Human
auggaaaucagguucauccaag

SEQ ID NO: 105716 - RNA, 22 nt, Human
auggaaauccaagucaccguag

SEQ ID NO: 105717 - RNA, 22 nt, Human
auggaaauggagugugcuugcu

SEQ ID NO: 105718 - RNA, 21 nt, Human
auggaaauuggcaaaugcuac

SEQ ID NO: 105719 - RNA, 22 nt, Human
auggaacagauuaaagugaggg

SEQ ID NO: 105720 - RNA, 22 nt, Human
auggaacaggcucagagaugcu

SEQ ID NO: 105721 - RNA, 22 nt, Human
auggaagacuaacagaaacaug

SEQ ID NO: 105722 - RNA, 22 nt, Human
auggaagaguccccauggauga

SEQ ID NO: 105723 - RNA, 22 nt, Human
auggaagcugaaaaagacacgg

SEQ ID NO: 105724 - RNA, 22 nt, Human
auggaagggacagaagggcaag

SEQ ID NO: 105725 - RNA, 22 nt, Human
auggaagugcaacuugcucauc

SEQ ID NO: 105726 - RNA, 22 nt, Human
auggaauaauuguuucacagaa

SEQ ID NO: 105727 - RNA, 22 nt, Human
auggaauaggcugcucuuuaaa

SEQ ID NO: 105728 - RNA, 22 nt, Human
auggaauauuugacacauaggg

SEQ ID NO: 105729 - RNA, 22 nt, Human
auggaaugaaaaacacaugcaa

SEQ ID NO: 105730 - RNA, 22 nt, Human
auggaaugcgguaguaugugca

SEQ ID NO: 105731 - RNA, 22 nt, Human
auggaauggccugucauaaucu

SEQ ID NO: 105732 - RNA, 22 nt, Human
auggaaugugaacaugauggca

SEQ ID NO: 105733 - RNA, 22 nt, Human
auggaauguuuccucuuuuauu

SEQ ID NO: 105734 - RNA, 22 nt, Human
auggacagugugucuguuucca

SEQ ID NO: 105735 - RNA, 22 nt, Human
auggagacgcaagggaccuagg

SEQ ID NO: 105736 - RNA, 22 nt, Human
aucucagaaggcauuuccaaga

SEQ ID NO: 105737 - RNA, 22 nt, Human
aucucagagaaauuugaaugca

SEQ ID NO: 105738 - RNA, 22 nt, Human
aucucaggugaaacuucuaggu

SEQ ID NO: 105739 - RNA, 22 nt, Human
aucucaguucaggcuccacugu

SEQ ID NO: 105740 - RNA, 22 nt, Human
aucucauucucccgugccaugg

SEQ ID NO: 105741 - RNA, 22 nt, Human
aucuccagaauggcuuguuaau

SEQ ID NO: 105742 - RNA, 22 nt, Human
aucuccaggaagugucauuuac

SEQ ID NO: 105743 - RNA, 22 nt, Human
aucuccagggugcccuuguucu

SEQ ID NO: 105744 - RNA, 22 nt, Human
aucuccaguuagcaguacugau

SEQ ID NO: 105745 - RNA, 22 nt, Human
aucucccaaauuagccucuuga

SEQ ID NO: 105746 - RNA, 22 nt, Human
aucucccacaggcugcuacuuc

SEQ ID NO: 105747 - RNA, 21 nt, Human
aucucgggcuucucgcccagc

SEQ ID NO: 105748 - RNA, 22 nt, Human
aucucucuaugcacugaggacu

SEQ ID NO: 105749 - RNA, 22 nt, Human
aucucugggcuuugaguuuguu

SEQ ID NO: 105750 - RNA, 22 nt, Human
aucucuggguccauagaagaga

SEQ ID NO: 105751 - RNA, 22 nt, Human
aucucuguaauuacaugauauu

SEQ ID NO: 105752 - RNA, 22 nt, Human
aucucuguuagaucugcuuaaa

SEQ ID NO: 105753 - RNA, 22 nt, Human
aucucuguuuuaggagauagug

SEQ ID NO: 105754 - RNA, 21 nt, Human
aucucuucaaggcugauuuac

SEQ ID NO: 105755 - RNA, 22 nt, Human
aucucuugccagucagaauggu

SEQ ID NO: 105756 - RNA, 22 nt, Human
aucugaaaagcuuuaaugagcu

SEQ ID NO: 105757 - RNA, 19 nt, Human
aucugaaguaggugcagcu

SEQ ID NO: 105758 - RNA, 22 nt, Human
aucugaaguccuuauaaucuga

SEQ ID NO: 105759 - RNA, 22 nt, Human
aucugauucauugaaaugggug

SEQ ID NO: 105760 - RNA, 22 nt, Human
aucugcagaggacaggcgagga

SEQ ID NO: 105761 - RNA, 22 nt, Human
aucugcaguuuguuuucucuug

SEQ ID NO: 105762 - RNA, 22 nt, Human
aucugcauguaucucucugcau

SEQ ID NO: 105763 - RNA, 22 nt, Human
aucugcauguccccauggaucc

SEQ ID NO: 105764 - RNA, 22 nt, Human
aucugcauuuacauugcuugua

SEQ ID NO: 105765 - RNA, 22 nt, Human
aucugcuauguuauuucccacu

SEQ ID NO: 105766 - RNA, 22 nt, Human
aucugcuuguugcaugucuguu

SEQ ID NO: 105767 - RNA, 22 nt, Human
aucugcuuuugagaauuuacuu

SEQ ID NO: 105768 - RNA, 21 nt, Human
aucuggaagaacugguaagug

SEQ ID NO: 105769 - RNA, 22 nt, Human
aucuggagaauaaauguccaag

SEQ ID NO: 105770 - RNA, 22 nt, Human
aucuggagaugggucugucacc

SEQ ID NO: 105771 - RNA, 22 nt, Human
aucuggcucacuuagucuagga

SEQ ID NO: 105772 - RNA, 22 nt, Human
aucuggcucucucauuuacaaa

SEQ ID NO: 105773 - RNA, 22 nt, Human
aucuggcugacuuugugggaca

SEQ ID NO: 105774 - RNA, 22 nt, Human
aucugggcauggaggaaagaga

SEQ ID NO: 105775 - RNA, 22 nt, Human
aucugggccagccccaagagac

SEQ ID NO: 105776 - RNA, 22 nt, Human
aucugggcguauaggugcaagu

SEQ ID NO: 105777 - RNA, 22 nt, Human
aucugggcucgaauccuagcuc

SEQ ID NO: 105778 - RNA, 22 nt, Human
aucuggggagguaucuguaguc

SEQ ID NO: 105779 - RNA, 22 nt, Human
aucugggggagcugcucaugga

SEQ ID NO: 105780 - RNA, 22 nt, Human
aucuggggucagacagcccugg

SEQ ID NO: 105781 - RNA, 22 nt, Human
aucuggguagugcaagacauga

SEQ ID NO: 105782 - RNA, 22 nt, Human
aucugggucacaguggcaucua

SEQ ID NO: 105783 - RNA, 22 nt, Human
aucuggugacacgaggagcugg

SEQ ID NO: 105784 - RNA, 22 nt, Human
aucugguucuuuguauuuccuu

SEQ ID NO: 105785 - RNA, 22 nt, Human
aucugguuuuggcugugucccu

SEQ ID NO: 105786 - RNA, 22 nt, Human
aucuguaacugcuaucaucucc

SEQ ID NO: 105787 - RNA, 22 nt, Human
aucuguaauuuugaaugcaaau

SEQ ID NO: 105788 - RNA, 22 nt, Human
aucuguacuaauuaauuaaugu

SEQ ID NO: 105789 - RNA, 22 nt, Human
aucuguagaagauacucugaga

SEQ ID NO: 105790 - RNA, 22 nt, Human
aucugucaggagcaaggacuac

SEQ ID NO: 105791 - RNA, 22 nt, Human
aucugucuauguggcuauguau

SEQ ID NO: 105792 - RNA, 22 nt, Human
aucuguggcagugaugagucuu

SEQ ID NO: 105793 - RNA, 22 nt, Human
aucuguguaugugaccuuaucu

SEQ ID NO: 105794 - RNA, 22 nt, Human
aucuguguccuuauaagagaca

SEQ ID NO: 105795 - RNA, 22 nt, Human
augaaugaugcaaaagacacug

SEQ ID NO: 105796 - RNA, 22 nt, Human
augaaugauuugucagucacag

SEQ ID NO: 105797 - RNA, 22 nt, Human
augaaugcauacauuugucaag

SEQ ID NO: 105798 - RNA, 22 nt, Human
augaauggugaagucugauaag

SEQ ID NO: 105799 - RNA, 22 nt, Human
augaauguaaguggauuucuuu

SEQ ID NO: 105800 - RNA, 22 nt, Human
augaaugugaugauucuguuac

SEQ ID NO: 105801 - RNA, 19 nt, Human
augaauguguucuuaccuc

SEQ ID NO: 105802 - RNA, 22 nt, Human
augaauuaaggauaacuggucu

SEQ ID NO: 105803 - RNA, 22 nt, Human
augaauugaaagaagaauaucu

SEQ ID NO: 105804 - RNA, 22 nt, Human
augaauugaggaaaacagucgu

SEQ ID NO: 105805 - RNA, 22 nt, Human
augacaaaagaagacaugaggu

SEQ ID NO: 105806 - RNA, 23 nt, Human
augacaaacaggacaucuugugc

SEQ ID NO: 105807 - RNA, 22 nt, Human
augacaaacccaggauguaaca

SEQ ID NO: 105808 - RNA, 22 nt, Human
augacaaaggcugaaagggaaa

SEQ ID NO: 105809 - RNA, 22 nt, Human
augacaacacauggugcugaau

SEQ ID NO: 105810 - RNA, 22 nt, Human
augacaaggguugacacauguc

SEQ ID NO: 105811 - RNA, 22 nt, Human
augacaauacuucaauaagcug

SEQ ID NO: 105812 - RNA, 22 nt, Human
augacacaagagcagaagccau

SEQ ID NO: 105813 - RNA, 22 nt, Human
augacacaagcagaggcucuaa

SEQ ID NO: 105814 - RNA, 22 nt, Human
augacacauaaaacaaggacug

SEQ ID NO: 105815 - RNA, 22 nt, Human
augacacccaaaaccagugcag

SEQ ID NO: 105816 - RNA, 22 nt, Human
augacacucgaaaaauugaugc

SEQ ID NO: 105817 - RNA, 22 nt, Human
augacagaggagugcaggugau

SEQ ID NO: 105818 - RNA, 22 nt, Human
augacagaggauuguaaagagg

SEQ ID NO: 105819 - RNA, 19 nt, Human
augacagaguugauaagug

SEQ ID NO: 105820 - RNA, 21 nt, Human
augacagaugcugcagaucgu

SEQ ID NO: 105821 - RNA, 22 nt, Human
augacaggaggcagcugggcag

SEQ ID NO: 105822 - RNA, 22 nt, Human
augacaguacuggugacaauac

SEQ ID NO: 105823 - RNA, 22 nt, Human
augacaguucuuuagagaugua

SEQ ID NO: 105824 - RNA, 22 nt, Human
augacaugaggcaucuuuggag

SEQ ID NO: 105825 - RNA, 22 nt, Human
augaccacauuccagcugucca

SEQ ID NO: 105826 - RNA, 22 nt, Human
augaccagccgagauaaacaga

SEQ ID NO: 105827 - RNA, 22 nt, Human
augacccuuacugcaucauaca

SEQ ID NO: 105828 - RNA, 22 nt, Human
augacucaaaauuauuguuuug

SEQ ID NO: 105829 - RNA, 22 nt, Human
augacuucguuuucucucugca

SEQ ID NO: 105830 - RNA, 22 nt, Human
augagaaauuuauuacaagcua

SEQ ID NO: 105831 - RNA, 22 nt, Human
augagaauaugauuuacuauug

SEQ ID NO: 105832 - RNA, 22 nt, Human
augagacuaccuguaauguggc

SEQ ID NO: 105833 - RNA, 22 nt, Human
augagacuugagggccucaagu

SEQ ID NO: 105834 - RNA, 22 nt, Human
augagagccaccaugcuucugu

SEQ ID NO: 105835 - RNA, 22 nt, Human
augagauagacuaugucauaca

SEQ ID NO: 105836 - RNA, 22 nt, Human
augagauguucaggagucugag

SEQ ID NO: 105837 - RNA, 22 nt, Human
augagauuuuauagugucuuga

SEQ ID NO: 105838 - RNA, 22 nt, Human
augagcagauauggauuuuaga

SEQ ID NO: 105839 - RNA, 22 nt, Human
augagcagguuuaagagaggcc

SEQ ID NO: 105840 - RNA, 22 nt, Human
augagcaguagguucauggcug

SEQ ID NO: 105841 - RNA, 22 nt, Human
augagcaugugacucaaaccaa

SEQ ID NO: 105842 - RNA, 22 nt, Human
augagcccuggaggcauuuuuu

SEQ ID NO: 105843 - RNA, 22 nt, Human
augagcuaagcagaaagcacac

SEQ ID NO: 105844 - RNA, 22 nt, Human
augagcucaggugugcaaaaua

SEQ ID NO: 105845 - RNA, 19 nt, Human
augagcuggcauuucaggu

SEQ ID NO: 105846 - RNA, 22 nt, Human
augagcugggccauccagugau

SEQ ID NO: 105847 - RNA, 22 nt, Human
augagcuguaagguggcuuccu

SEQ ID NO: 105848 - RNA, 22 nt, Human
augagcugugggauuccagagg

SEQ ID NO: 105849 - RNA, 22 nt, Human
augaggaacagacuugcuggau

SEQ ID NO: 105850 - RNA, 19 nt, Human
augaggaacugaggcucag

SEQ ID NO: 105851 - RNA, 22 nt, Human
augaggaggccaguaagagccu

SEQ ID NO: 105852 - RNA, 22 nt, Human
augaggaggucaggccuuacaa

SEQ ID NO: 105853 - RNA, 22 nt, Human
auggagagugaaagucucucua

SEQ ID NO: 105854 - RNA, 22 nt, Human
auggagaguucacuucuaaguu

SEQ ID NO: 105855 - RNA, 21 nt, Human
auggagccuaagaguggaggu

SEQ ID NO: 105856 - RNA, 23 nt, Human
auggagcugguacuagcuaccuc

SEQ ID NO: 105857 - RNA, 22 nt, Human
auggagcuguagggagcagugg

SEQ ID NO: 105858 - RNA, 17 nt, Human
auggaggcagacagguc

SEQ ID NO: 105859 - RNA, 18 nt, Human
auggaggcagagagcuga

SEQ ID NO: 105860 - RNA, 22 nt, Human
auggagggugguaagacagaga

SEQ ID NO: 105861 - RNA, 22 nt, Human
auggagggugucagagagcgaa

SEQ ID NO: 105862 - RNA, 21 nt, Human
auggagucaggggaaugggcc

SEQ ID NO: 105863 - RNA, 22 nt, Human
auggagucuacaaaguguugga

SEQ ID NO: 105864 - RNA, 20 nt, Human
auggagugaagagugaaagc

SEQ ID NO: 105865 - RNA, 22 nt, Human
auggaguggggacugcagugga

SEQ ID NO: 105866 - RNA, 22 nt, Human
auggaguucuuuaaauucacag

SEQ ID NO: 105867 - RNA, 22 nt, Human
auggauaaucaugaacuuugag

SEQ ID NO: 105868 - RNA, 22 nt, Human
auggauaauggugauaguugca

SEQ ID NO: 105869 - RNA, 22 nt, Human
auggaugcuucuuucuaguuuu

SEQ ID NO: 105870 - RNA, 21 nt, Human
auggauuuaaacaggccacaa

SEQ ID NO: 105871 - RNA, 22 nt, Human
auggcacaggagaggagggcug

SEQ ID NO: 105872 - RNA, 22 nt, Human
auggcacagugggaaaugaccu

SEQ ID NO: 105873 - RNA, 22 nt, Human
auggcagaaaggcaugugggcc

SEQ ID NO: 105874 - RNA, 22 nt, Human
auggcagaauccauaguaggug

SEQ ID NO: 105875 - RNA, 22 nt, Human
auggcagaauuaggauuucaag

SEQ ID NO: 105876 - RNA, 22 nt, Human
auggcagaccuccuggccacaa

SEQ ID NO: 105877 - RNA, 22 nt, Human
auggcagacgaggcagcagggg

SEQ ID NO: 105878 - RNA, 22 nt, Human
auggcagagaaagcgagccaca

SEQ ID NO: 105879 - RNA, 22 nt, Human
auggcagcauaguggcaaguua

SEQ ID NO: 105880 - RNA, 22 nt, Human
auggcagccugaacacuuccug

SEQ ID NO: 105881 - RNA, 22 nt, Human
auggcagcuggcuugggcaccu

SEQ ID NO: 105882 - RNA, 22 nt, Human
auggcagcuuugaauuucuuga

SEQ ID NO: 105883 - RNA, 22 nt, Human
auggcaggauacccaguccggc

SEQ ID NO: 105884 - RNA, 22 nt, Human
auggcaggcccagguguucauu

SEQ ID NO: 105885 - RNA, 22 nt, Human
auggcagggacuguggcccuug

SEQ ID NO: 105886 - RNA, 22 nt, Human
auggcaguauuucugaaaggcu

SEQ ID NO: 105887 - RNA, 20 nt, Human
auggcaguccguguucaggg

SEQ ID NO: 105888 - RNA, 22 nt, Human
auggcaguguuucaguuuuugg

SEQ ID NO: 105889 - RNA, 22 nt, Human
auggcauucacauuuccagaga

SEQ ID NO: 105890 - RNA, 22 nt, Human
auggcauuuauguugacaaugg

SEQ ID NO: 105891 - RNA, 22 nt, Human
auggcauuugaccgcuuugugg

SEQ ID NO: 105892 - RNA, 22 nt, Human
auggccaaagccacagcagagg

SEQ ID NO: 105893 - RNA, 22 nt, Human
auggccaaauaacagcuugcau

SEQ ID NO: 105894 - RNA, 22 nt, Human
auggccaagaaauugccgacug

SEQ ID NO: 105895 - RNA, 22 nt, Human
auggccagagaaggcaggguca

SEQ ID NO: 105896 - RNA, 22 nt, Human
auggccagagagagcacaccug

SEQ ID NO: 105897 - RNA, 22 nt, Human
auggccagagaggccagccugg

SEQ ID NO: 105898 - RNA, 22 nt, Human
auggccagucugacuaguuucc

SEQ ID NO: 105899 - RNA, 22 nt, Human
auggccaguuagaaaucaaaaa

SEQ ID NO: 105900 - RNA, 22 nt, Human
auggcccaggcaggcugguacu

SEQ ID NO: 105901 - RNA, 22 nt, Human
auggcccuaucaccuuugcuuc

SEQ ID NO: 105902 - RNA, 22 nt, Human
auggcccucuccuuaggucagc

SEQ ID NO: 105903 - RNA, 22 nt, Human
auggcccuggaaagagcuugag

SEQ ID NO: 105904 - RNA, 20 nt, Human
ggcugcugugggcagagagg

SEQ ID NO: 105905 - RNA, 22 nt, Human
ggcugcuugcuguuucuuggau

SEQ ID NO: 105906 - RNA, 22 nt, Human
ggcugcuuuaucggcugcugaa

SEQ ID NO: 105907 - RNA, 22 nt, Human
ggcuggaaaggauauuuuaggu

SEQ ID NO: 105908 - RNA, 22 nt, Human
ggcuggacauagacauagccau

SEQ ID NO: 105909 - RNA, 22 nt, Human
ggcuggacucugggccucucca

SEQ ID NO: 105910 - RNA, 22 nt, Human
ggcuggacugccucccagaguc

SEQ ID NO: 105911 - RNA, 22 nt, Human
ggcuggauaccaggagacaggg

SEQ ID NO: 105912 - RNA, 22 nt, Human
ggcuggcaagucagugcugaug

SEQ ID NO: 105913 - RNA, 22 nt, Human
ggcuggcacaaagcuccaaauc

SEQ ID NO: 105914 - RNA, 23 nt, Human
ggcuggcccggggcugcuccuga

SEQ ID NO: 105915 - RNA, 22 nt, Human
ucaggauguuaauauagcauua

SEQ ID NO: 105916 - RNA, 22 nt, Human
ucaggcaaucugacagcuggag

SEQ ID NO: 105917 - RNA, 22 nt, Human
ucaggcacuggcugagugaugg

SEQ ID NO: 105918 - RNA, 22 nt, Human
ucaggcagaaaaaucacuaauu

SEQ ID NO: 105919 - RNA, 22 nt, Human
ucaggcagaccaccgugggcag

SEQ ID NO: 105920 - RNA, 22 nt, Human
ucaggcagagcuguggagcucu

SEQ ID NO: 105921 - RNA, 22 nt, Human
ucaggcagaguggaagcugcaa

SEQ ID NO: 105922 - RNA, 22 nt, Human
ucaggcaggcagagggcaaaug

SEQ ID NO: 105923 - RNA, 22 nt, Human
ucaggcaggcucagaggaaaac

SEQ ID NO: 105924 - RNA, 21 nt, Human
ucaggcagugcaaauacaugg

SEQ ID NO: 105925 - RNA, 19 nt, Human
ucaggcaguuauucacaaa

SEQ ID NO: 105926 - RNA, 22 nt, Human
ucaggccaaagaaacagcauga

SEQ ID NO: 105927 - RNA, 22 nt, Human
ucaggccagcaccaucccuauc

SEQ ID NO: 105928 - RNA, 22 nt, Human
ucaggcccuuugcugcugcccc

SEQ ID NO: 105929 - RNA, 22 nt, Human
ucaggccuagggagaaaauuca

SEQ ID NO: 105930 - RNA, 22 nt, Human
ucaggccuagggagccacacca

SEQ ID NO: 105931 - RNA, 22 nt, Human
ucaggccuccagguuaccauuu

SEQ ID NO: 105932 - RNA, 22 nt, Human
ucaggccugagaaaaauccuuu

SEQ ID NO: 105933 - RNA, 22 nt, Human
ucaggccugcaaaugaauggua

SEQ ID NO: 105934 - RNA, 22 nt, Human
ucaggccugcagugccaaccca

SEQ ID NO: 105935 - RNA, 22 nt, Human
ucaggccugugcuggaggagau

SEQ ID NO: 105936 - RNA, 22 nt, Human
ucaggccuucagaccuggcccg

SEQ ID NO: 105937 - RNA, 22 nt, Human
ucaggcgaggcuuaauccaagg

SEQ ID NO: 105938 - RNA, 22 nt, Human
ucaggcuaacccuaggcagaag

SEQ ID NO: 105939 - RNA, 22 nt, Human
ucaggcucaaagggccggauga

SEQ ID NO: 105940 - RNA, 22 nt, Human
ucaggcucugccaccuagauua

SEQ ID NO: 105941 - RNA, 22 nt, Human
ucaggcugaaggaggccuaucu

SEQ ID NO: 105942 - RNA, 22 nt, Human
ucaggcugaccagguuuugcuc

SEQ ID NO: 105943 - RNA, 22 nt, Human
ucaggcugauuucuuuugaggg

SEQ ID NO: 105944 - RNA, 22 nt, Human
ucaggcugcagcugucagcagc

SEQ ID NO: 105945 - RNA, 22 nt, Human
ucaggcugcccguucagggcuc

SEQ ID NO: 105946 - RNA, 22 nt, Human
ucaggcugccuaucagacugug

SEQ ID NO: 105947 - RNA, 22 nt, Human
ucaggcugcuuucaugcuuaga

SEQ ID NO: 105948 - RNA, 22 nt, Human
ucaggcuggagugcaguggcgc

SEQ ID NO: 105949 - RNA, 22 nt, Human
ucaggcugggagacaaucacug

SEQ ID NO: 105950 - RNA, 22 nt, Human
ucaggcugggcuccucucccca

SEQ ID NO: 105951 - RNA, 20 nt, Human
ucaggcuggugggcuuuccc

SEQ ID NO: 105952 - RNA, 22 nt, Human
ucaggcugguggucagauggcu

SEQ ID NO: 105953 - RNA, 17 nt, Human
ucaggcugugccuggua

SEQ ID NO: 105954 - RNA, 22 nt, Human
ucaggcuguggcuuugaccgca

SEQ ID NO: 105955 - RNA, 22 nt, Human
ucaggcuuauagguagugguua

SEQ ID NO: 105956 - RNA, 22 nt, Human
ucaggcuugaggucuguaugug

SEQ ID NO: 105957 - RNA, 22 nt, Human
ucaggcuugcgauggaagucac

SEQ ID NO: 105958 - RNA, 18 nt, Human
ucaggcuuugagagaauc

SEQ ID NO: 105959 - RNA, 22 nt, Human
ucagggaaaccuaaggaagcca

SEQ ID NO: 105960 - RNA, 22 nt, Human
ucagggaacaauguuauggcuu

SEQ ID NO: 105961 - RNA, 22 nt, Human
ucagggaaccucuccuguuucu

SEQ ID NO: 105962 - RNA, 22 nt, Human
ucagggaacuacuucucccuau

SEQ ID NO: 105963 - RNA, 22 nt, Human
ucagggaagaaaugggacuuua

SEQ ID NO: 105964 - RNA, 22 nt, Human
ucagggaagacuucuuagagga

SEQ ID NO: 105965 - RNA, 22 nt, Human
ucagggaauaaguagaugagug

SEQ ID NO: 105966 - RNA, 22 nt, Human
ucagggaaugugauacaggaag

SEQ ID NO: 105967 - RNA, 22 nt, Human
ucagggacgugagcucagaguc

SEQ ID NO: 105968 - RNA, 22 nt, Human
ucagggacuuacaaaccagaag

SEQ ID NO: 105969 - RNA, 22 nt, Human
ucagggaggugucugccagaga

SEQ ID NO: 105970 - RNA, 22 nt, Human
ucagggauugcaaaauucaucc

SEQ ID NO: 105971 - RNA, 22 nt, Human
ucagggcaagucucagaagguu

SEQ ID NO: 105972 - RNA, 22 nt, Human
ucagggcagccuaaggcaccuc

SEQ ID NO: 105973 - RNA, 22 nt, Human
ucagggcagguuaacuugggug

SEQ ID NO: 105974 - RNA, 22 nt, Human
ucagggcauucaagaggccugg

SEQ ID NO: 105975 - RNA, 22 nt, Human
ucagggccgccggggaucucgc

SEQ ID NO: 105976 - RNA, 22 nt, Human
ucagggccuuugcaguuguuuu

SEQ ID NO: 105977 - RNA, 22 nt, Human
ucagggcugcauacaggagaua

SEQ ID NO: 105978 - RNA, 22 nt, Human
ucagggcugugguuccuuuucu

SEQ ID NO: 105979 - RNA, 22 nt, Human
ucagggcuuuggcuuuuacucu

SEQ ID NO: 105980 - RNA, 22 nt, Human
ucaggggaaaucucucagcgaa

SEQ ID NO: 105981 - RNA, 22 nt, Human
ucaggggacagccagcuggagg

SEQ ID NO: 105982 - RNA, 22 nt, Human
ucaggggacuuaggagagaagu

SEQ ID NO: 105983 - RNA, 22 nt, Human
ucaggggcugugcauuucccag

SEQ ID NO: 105984 - RNA, 22 nt, Human
ucagggggaggagacugccagu

SEQ ID NO: 105985 - RNA, 19 nt, Human
ucagggggcugauaggagg

SEQ ID NO: 105986 - RNA, 22 nt, Human
ucaggguauguucuagaucuga

SEQ ID NO: 105987 - RNA, 22 nt, Human
ucagggucaggacccagcuguu

SEQ ID NO: 105988 - RNA, 22 nt, Human
ucaggguugcugugaucagucc

SEQ ID NO: 105989 - RNA, 20 nt, Human
ucaggguuucccauucuugg

SEQ ID NO: 105990 - RNA, 22 nt, Human
ucaggucaggaaaauaagauug

SEQ ID NO: 105991 - RNA, 22 nt, Human
ucaggucccacugcuaguaagu

SEQ ID NO: 105992 - RNA, 22 nt, Human
ucagguccuuuugguguauauu

SEQ ID NO: 105993 - RNA, 22 nt, Human
ucaggucugaugccucauccau

SEQ ID NO: 105994 - RNA, 22 nt, Human
ucagguggagaccuccuuggcc

SEQ ID NO: 105995 - RNA, 21 nt, Human
ucagguggcagaguguuuaug

SEQ ID NO: 105996 - RNA, 22 nt, Human
ucaggugggaguagaaugcuag

SEQ ID NO: 105997 - RNA, 22 nt, Human
ucaggugggcguuccggugcgg

SEQ ID NO: 105998 - RNA, 22 nt, Human
ucaggugggucuacaauuaguu

SEQ ID NO: 105999 - RNA, 22 nt, Human
ucaggugucaagcagggagcug

SEQ ID NO: 106000 - RNA, 22 nt, Human
ucaggugucuugugggauuuua

SEQ ID NO: 106001 - RNA, 16 nt, Human
ucaggugugacuuuuu

SEQ ID NO: 106002 - RNA, 22 nt, Human
ucagguguggaccgaggucaga

SEQ ID NO: 106003 - RNA, 22 nt, Human
ucaggugugggcagagaaacca

SEQ ID NO: 106004 - RNA, 22 nt, Human
ucagguguguuguauuuuacca

SEQ ID NO: 106005 - RNA, 22 nt, Human
ucagguguuuaaggauagugau

SEQ ID NO: 106006 - RNA, 18 nt, Human
ucagguguuuucuguaua

SEQ ID NO: 106007 - RNA, 22 nt, Human
ucaguaaaguucuuucuugcug

SEQ ID NO: 106008 - RNA, 22 nt, Human
ucaguaaaugccuuucugugaa

SEQ ID NO: 106009 - RNA, 22 nt, Human
ucaguaaaugguugcuguuauu

SEQ ID NO: 106010 - RNA, 22 nt, Human
ucaguaacuuggccgaggucau

SEQ ID NO: 106011 - RNA, 22 nt, Human
ucaguacaaaggugcucucaag

SEQ ID NO: 106012 - RNA, 22 nt, Human
ucaguagucuaggauuucaccu

SEQ ID NO: 106013 - RNA, 22 nt, Human
ucauuucaaugauacuacuaag

SEQ ID NO: 106014 - RNA, 22 nt, Human
ucauuucaguggcacagaagau

SEQ ID NO: 106015 - RNA, 23 nt, Human
ucauuucauccagccuugagagu

SEQ ID NO: 106016 - RNA, 22 nt, Human
ucauuucaugucucaggcacug

SEQ ID NO: 106017 - RNA, 17 nt, Human
ucauuucuaggcacucc

SEQ ID NO: 106018 - RNA, 22 nt, Human
ucauuucuauugcuacugucug

SEQ ID NO: 106019 - RNA, 22 nt, Human
ucauuucucccggccaaaaacu

SEQ ID NO: 106020 - RNA, 22 nt, Human
ucauuugucuggcacagggaau

SEQ ID NO: 106021 - RNA, 22 nt, Human
ucauuuguucaucugcucuucu

SEQ ID NO: 106022 - RNA, 22 nt, Human
ucauuuucaaguuugaacagga

SEQ ID NO: 106023 - RNA, 22 nt, Human
ucauuuuggccaugauacagac

SEQ ID NO: 106024 - RNA, 18 nt, Human
uccaaaaucauguauuuu

SEQ ID NO: 106025 - RNA, 22 nt, Human
uccaaacacccuccaugcugca

SEQ ID NO: 106026 - RNA, 23 nt, Human
uccaaacucaagacauuaauaag

SEQ ID NO: 106027 - RNA, 19 nt, Human
uccaaagaaguucacauuu

SEQ ID NO: 106028 - RNA, 22 nt, Human
uccaaagccgacugacaucuga

SEQ ID NO: 106029 - RNA, 18 nt, Human
uccaaagcugcugguuuu

SEQ ID NO: 106030 - RNA, 21 nt, Human
uccaaaggagacugagugugu

SEQ ID NO: 106031 - RNA, 22 nt, Human
uccaaaggcaaaacuguggugu

SEQ ID NO: 106032 - RNA, 22 nt, Human
uccaaaggcccuaauaagcuug

SEQ ID NO: 106033 - RNA, 22 nt, Human
uccaaauagcuggaugauggug

SEQ ID NO: 106034 - RNA, 22 nt, Human
uccaaauauagaugaguuguaa

SEQ ID NO: 106035 - RNA, 22 nt, Human
uccaaauaucuuggugguuagg

SEQ ID NO: 106036 - RNA, 22 nt, Human
uccaaauauucaucuacuucug

SEQ ID NO: 106037 - RNA, 22 nt, Human
gggcuucucagagaggcuuuag

SEQ ID NO: 106038 - RNA, 22 nt, Human
gggcuucucccuaaggacucug

SEQ ID NO: 106039 - RNA, 22 nt, Human
gggcuucucucaggggcaugag

SEQ ID NO: 106040 - RNA, 22 nt, Human
gggcuucucuuuagugagcuga

SEQ ID NO: 106041 - RNA, 22 nt, Human
gggcuucugcucuuuuggugcu

SEQ ID NO: 106042 - RNA, 22 nt, Human
gggcuucuggucauuccucauc

SEQ ID NO: 106043 - RNA, 22 nt, Human
gggcuucuugagcugccggccc

SEQ ID NO: 106044 - RNA, 22 nt, Human
gggcuucuugccauggggacgg

SEQ ID NO: 106045 - RNA, 22 nt, Human
gggcuugcuaagaagagcgcau

SEQ ID NO: 106046 - RNA, 22 nt, Human
gggcuuggcacaugggcucagc

SEQ ID NO: 106047 - RNA, 22 nt, Human
gggcuuggccccagaagagcua

SEQ ID NO: 106048 - RNA, 22 nt, Human
gggcuuggcucauaaguggaug

SEQ ID NO: 106049 - RNA, 19 nt, Human
gggcuuggggcugaagccu

SEQ ID NO: 106050 - RNA, 22 nt, Human
gggcuuggguauugugagaggu

SEQ ID NO: 106051 - RNA, 22 nt, Human
gggcuuuagauugcagaggauu

SEQ ID NO: 106052 - RNA, 22 nt, Human
gggcuuuaggggccagugacca

SEQ ID NO: 106053 - RNA, 22 nt, Human
gggcuuuaugagauugagaucu

SEQ ID NO: 106054 - RNA, 21 nt, Human
gggcuuuuuauuuagcacugu

SEQ ID NO: 106055 - RNA, 18 nt, Human
ggggaaaagccagguguc

SEQ ID NO: 106056 - RNA, 22 nt, Human
ggggaaacauguuguucagacc

SEQ ID NO: 106057 - RNA, 22 nt, Human
ggggaacaccgggcagaggcgc

SEQ ID NO: 106058 - RNA, 20 nt, Human
ggggaagaaaaggaugugau

SEQ ID NO: 106059 - RNA, 22 nt, Human
ggggaagaaccgggauucccau

SEQ ID NO: 106060 - RNA, 22 nt, Human
ggggaagauuuuuaauuaguaa

SEQ ID NO: 106061 - RNA, 22 nt, Human
ggggaaggauugaguugaccca

SEQ ID NO: 106062 - RNA, 23 nt, Human
ggggaaguggcagugagugaggc

SEQ ID NO: 106063 - RNA, 23 nt, Human
ggggacaguucccacuggggucu

SEQ ID NO: 106064 - RNA, 22 nt, Human
ggggaccuggccacccauccuu

SEQ ID NO: 106065 - RNA, 22 nt, Human
ggggaccuucccagagcaguug

SEQ ID NO: 106066 - RNA, 22 nt, Human
ggggacucugcuucugggauca

SEQ ID NO: 106067 - RNA, 22 nt, Human
ggggagaauuacauggcgugga

SEQ ID NO: 106068 - RNA, 22 nt, Human
ggggagaguccuuuccaguucc

SEQ ID NO: 106069 - RNA, 22 nt, Human
ggggagcaauaguugaggugug

SEQ ID NO: 106070 - RNA, 22 nt, Human
ggggagcaauugcccccuuaga

SEQ ID NO: 106071 - RNA, 22 nt, Human
ggggagcagaagcagcaacaac

SEQ ID NO: 106072 - RNA, 22 nt, Human
ggggagcaggcugggcugucug

SEQ ID NO: 106073 - RNA, 22 nt, Human
ggggagcugggaggugaguuac

SEQ ID NO: 106074 - RNA, 22 nt, Human
ggggagcuuagggucucugaau

SEQ ID NO: 106075 - RNA, 22 nt, Human
ggggaggaagcucucaguucca

SEQ ID NO: 106076 - RNA, 22 nt, Human
ggggaggcugaugugggcaaag

SEQ ID NO: 106077 - RNA, 21 nt, Human
ggggaugcgaccacaggcucc

SEQ ID NO: 106078 - RNA, 22 nt, Human
ggggcaaagggagagucccuac

SEQ ID NO: 106079 - RNA, 22 nt, Human
ggggcacuuccaggcugaggcu

SEQ ID NO: 106080 - RNA, 22 nt, Human
ggggcagaaagcccacagagug

SEQ ID NO: 106081 - RNA, 22 nt, Human
ggggcagagagaaggaagcuug

SEQ ID NO: 106082 - RNA, 22 nt, Human
ggggcagagcauagcuccaauu

SEQ ID NO: 106083 - RNA, 21 nt, Human
ggggcagagcuaggcccugca

SEQ ID NO: 106084 - RNA, 22 nt, Human
ggggcagagucuggacuguugu

SEQ ID NO: 106085 - RNA, 20 nt, Human
ggggcagguuuuuauggcua

SEQ ID NO: 106086 - RNA, 20 nt, Human
ggggcaguggcucaugccug

SEQ ID NO: 106087 - RNA, 22 nt, Human
ggggccagagaggacccaggug

SEQ ID NO: 106088 - RNA, 20 nt, Human
ggggcccaagcccucuugcc

SEQ ID NO: 106089 - RNA, 22 nt, Human
ggggcccagggcagcagugcag

SEQ ID NO: 106090 - RNA, 22 nt, Human
ggggccgaccgcgguucaggcc

SEQ ID NO: 106091 - RNA, 22 nt, Human
ggggccuauuuguucaacuucc

SEQ ID NO: 106092 - RNA, 22 nt, Human
ggggccuuggaucugugccccg

SEQ ID NO: 106093 - RNA, 22 nt, Human
ggggcgcucggagggauccccu

SEQ ID NO: 106094 - RNA, 22 nt, Human
ggggcuaacuuucugaggguag

SEQ ID NO: 106095 - RNA, 22 nt, Human
ggggcuccagucuucacauuuu

SEQ ID NO: 106096 - RNA, 22 nt, Human
ggggcugagaauucagucucgg

SEQ ID NO: 106097 - RNA, 22 nt, Human
ggggcugauggaacucaggccu

SEQ ID NO: 106098 - RNA, 22 nt, Human
ggggcugcuucaccuuuuuacg

SEQ ID NO: 106099 - RNA, 22 nt, Human
ggggcuuuugcacgugggaggc

SEQ ID NO: 106100 - RNA, 22 nt, Human
gggggaaagcucaggagccugu

SEQ ID NO: 106101 - RNA, 22 nt, Human
gggggaaaguggagguucguga

SEQ ID NO: 106102 - RNA, 22 nt, Human
gggggacaggaugaauaucugu

SEQ ID NO: 106103 - RNA, 23 nt, Human
gggggagcuggacuccuagaucc

SEQ ID NO: 106104 - RNA, 22 nt, Human
gggggccuuguuaguggaugga

SEQ ID NO: 106105 - RNA, 22 nt, Human
gggggcgcacagucaccacaaa

SEQ ID NO: 106106 - RNA, 22 nt, Human
gggggcgggagacagcagugac

SEQ ID NO: 106107 - RNA, 22 nt, Human
gggggcuagagagaugaaauau

SEQ ID NO: 106108 - RNA, 22 nt, Human
gggggcucugacucccucagcu

SEQ ID NO: 106109 - RNA, 22 nt, Human
gggggcugaggcuguucugagg

SEQ ID NO: 106110 - RNA, 22 nt, Human
gggggcuggaauauccaucaac

SEQ ID NO: 106111 - RNA, 22 nt, Human
gggggcuguccugugcauugua

SEQ ID NO: 106112 - RNA, 22 nt, Human
gggggggucuucagaccucaga

SEQ ID NO: 106113 - RNA, 22 nt, Human
ggggggugacaaguagagguug

SEQ ID NO: 106114 - RNA, 22 nt, Human
gggggugguucuaaguccuaua

SEQ ID NO: 106115 - RNA, 21 nt, Human
ggggucaagugaaugguguug

SEQ ID NO: 106116 - RNA, 22 nt, Human
gggguccucggagccugggucu

SEQ ID NO: 106117 - RNA, 22 nt, Human
ggggucugggcuuagcuggaau

SEQ ID NO: 106118 - RNA, 22 nt, Human
gggguggagaugguggcccuuu

SEQ ID NO: 106119 - RNA, 22 nt, Human
gggguggauuccuacaggucca

SEQ ID NO: 106120 - RNA, 22 nt, Human
gggguggccuguaggcagcaug

SEQ ID NO: 106121 - RNA, 22 nt, Human
gggguggcuggcaccuccuggu

SEQ ID NO: 106122 - RNA, 21 nt, Human
ggucaguggcuuucuugcacc

SEQ ID NO: 106123 - RNA, 22 nt, Human
ggucaguguauguauugauaag

SEQ ID NO: 106124 - RNA, 22 nt, Human
ggucauacaaggcacuggugau

SEQ ID NO: 106125 - RNA, 22 nt, Human
ggucauagagcuggaaauuggc

SEQ ID NO: 106126 - RNA, 22 nt, Human
ggucaucugccuccaaagcacu

SEQ ID NO: 106127 - RNA, 20 nt, Human
ggucaucuuccaaucccagg

SEQ ID NO: 106128 - RNA, 22 nt, Human
ggucaugagggagcagugcagg

SEQ ID NO: 106129 - RNA, 22 nt, Human
ggucauuguucuuuucugugau

SEQ ID NO: 106130 - RNA, 22 nt, Human
ggucauuuucacuuucaaguua

SEQ ID NO: 106131 - RNA, 19 nt, Human
gguccagacuucagacuag

SEQ ID NO: 106132 - RNA, 22 nt, Human
gguccagcacaacacuggcaug

SEQ ID NO: 106133 - RNA, 22 nt, Human
gguccagccaggugcucaugcc

SEQ ID NO: 106134 - RNA, 23 nt, Human
gguccaggaaaggcagcagcacc

SEQ ID NO: 106135 - RNA, 22 nt, Human
gguccaguccugcucaccacuu

SEQ ID NO: 106136 - RNA, 22 nt, Human
gguccaucucuugagcccacau

SEQ ID NO: 106137 - RNA, 22 nt, Human
ggucccaagugcuuuuccugca

SEQ ID NO: 106138 - RNA, 22 nt, Human
ggucccagaauugguuagcaca

SEQ ID NO: 106139 - RNA, 22 nt, Human
ggucccaggauugguugcgcag

SEQ ID NO: 106140 - RNA, 23 nt, Human
ggucccaguggagaggccucacc

SEQ ID NO: 106141 - RNA, 22 nt, Human
gguccccagcaguggcugcuuc

SEQ ID NO: 106142 - RNA, 22 nt, Human
ggucccuagagugggaugacuu

SEQ ID NO: 106143 - RNA, 22 nt, Human
ggucccugccugaggcuggccu

SEQ ID NO: 106144 - RNA, 22 nt, Human
ggucccuggggaacuaggcugu

SEQ ID NO: 106145 - RNA, 22 nt, Human
gguccucaaucccaacaaggca

SEQ ID NO: 106146 - RNA, 22 nt, Human
gguccucuccagcgccacagug

SEQ ID NO: 106147 - RNA, 22 nt, Human
gguccugaggggagcugaaggu

SEQ ID NO: 106148 - RNA, 22 nt, Human
gguccugcauugccagcaagcu

SEQ ID NO: 106149 - RNA, 22 nt, Human
gguccuggaugagacagguagu

SEQ ID NO: 106150 - RNA, 22 nt, Human
gguccuggcagucuuugguugu

SEQ ID NO: 106151 - RNA, 22 nt, Human
gguccugggaagaugcucauga

SEQ ID NO: 106152 - RNA, 20 nt, Human
gguccuguacucucauugaa

SEQ ID NO: 106153 - RNA, 22 nt, Human
gguccuucaguagguuccagac

SEQ ID NO: 106154 - RNA, 20 nt, Human
gguccuugucacaaggagag

SEQ ID NO: 106155 - RNA, 22 nt, Human
gguccuuugaaagggguguguc

SEQ ID NO: 106156 - RNA, 22 nt, Human
ggucgcacccgggcgcugcugg

SEQ ID NO: 106157 - RNA, 22 nt, Human
ggucuagaguggggccuggaaa

SEQ ID NO: 106158 - RNA, 22 nt, Human
ggucuagaucaagaacagaacu

SEQ ID NO: 106159 - RNA, 22 nt, Human
ggucucagcaguugcuuugacu

SEQ ID NO: 106160 - RNA, 22 nt, Human
ggucucagcccucgccagcagc

SEQ ID NO: 106161 - RNA, 22 nt, Human
ggucuccagcugggacccugca

SEQ ID NO: 106162 - RNA, 22 nt, Human
ggucucgagccaggcagcugca

SEQ ID NO: 106163 - RNA, 22 nt, Human
ggucugaaaugugacuuuugaa

SEQ ID NO: 106164 - RNA, 22 nt, Human
ggucugaaucacugugccuauc

SEQ ID NO: 106165 - RNA, 22 nt, Human
ggucugagcuugagcccaugcu

SEQ ID NO: 106166 - RNA, 22 nt, Human
ggucugaggcuccaaggaggug

SEQ ID NO: 106167 - RNA, 22 nt, Human
ggucugccacaagauuuuugag

SEQ ID NO: 106168 - RNA, 22 nt, Human
ggucugcuuuccuugccacugu

SEQ ID NO: 106169 - RNA, 22 nt, Human
ggucuggaauggaguaggggug

SEQ ID NO: 106170 - RNA, 22 nt, Human
ggucuggagcuuggcuaaggga

SEQ ID NO: 106171 - RNA, 22 nt, Human
ggucuggaguagaugagucaug

SEQ ID NO: 106172 - RNA, 22 nt, Human
ggucuggauuuuaucuacugua

SEQ ID NO: 106173 - RNA, 22 nt, Human
ggucuggcaggugaggacucag

SEQ ID NO: 106174 - RNA, 22 nt, Human
ggucuucucuaugagcuggucu

SEQ ID NO: 106175 - RNA, 22 nt, Human
ggucuucuggaaagcagacugu

SEQ ID NO: 106176 - RNA, 22 nt, Human
ggucuugaaggacauccagucc

SEQ ID NO: 106177 - RNA, 22 nt, Human
ggucuuguuuauauaagguggu

SEQ ID NO: 106178 - RNA, 22 nt, Human
ggucuuuucacagugguuugag

SEQ ID NO: 106179 - RNA, 22 nt, Human
ggugaaauauuuuugauauguu

SEQ ID NO: 106180 - RNA, 22 nt, Human
ggugaagcucuaccauucccag

SEQ ID NO: 106181 - RNA, 22 nt, Human
ggugaaggcacaagagggcaag

SEQ ID NO: 106182 - RNA, 22 nt, Human
ggugacaucuagagacauccaa

SEQ ID NO: 106183 - RNA, 22 nt, Human
ggugacggggcccagguuuccu

SEQ ID NO: 106184 - RNA, 22 nt, Human
ggugacuggagggacccaggcc

SEQ ID NO: 106185 - RNA, 22 nt, Human
ggugacugguuuaucuggcagu

SEQ ID NO: 106186 - RNA, 22 nt, Human
ggugagaaagggauuccuguuc

SEQ ID NO: 106187 - RNA, 22 nt, Human
ggugagagucuuguggucccag

SEQ ID NO: 106188 - RNA, 22 nt, Human
ggugagcaaagcuucaucugua

SEQ ID NO: 106189 - RNA, 22 nt, Human
ggucugagugccagggagagaa

SEQ ID NO: 106190 - RNA, 22 nt, Human
ggucugaguggugcugacucag

SEQ ID NO: 106191 - RNA, 22 nt, Human
ggucugcccacuacucuccauu

SEQ ID NO: 106192 - RNA, 22 nt, Human
ggucuggaagcgcaguaggcug

SEQ ID NO: 106193 - RNA, 22 nt, Human
ggucuggaccauggacgccggg

SEQ ID NO: 106194 - RNA, 22 nt, Human
ggucuggauaauuccaguaccu

SEQ ID NO: 106195 - RNA, 22 nt, Human
ggucuggauuucugcuucuuuc

SEQ ID NO: 106196 - RNA, 22 nt, Human
ggucuggauuuugaacaaaauu

SEQ ID NO: 106197 - RNA, 22 nt, Human
ggucuggcacucaugcagcagg

SEQ ID NO: 106198 - RNA, 22 nt, Human
ggucugggcuugaguccuuuug

SEQ ID NO: 106199 - RNA, 22 nt, Human
ggucuggggcaggcaucugaca

SEQ ID NO: 106200 - RNA, 22 nt, Human
ggucugugaucuuauggauucu

SEQ ID NO: 106201 - RNA, 22 nt, Human
ggucugugcucuggagccucug

SEQ ID NO: 106202 - RNA, 22 nt, Human
ggucuucaggucuaguugguau

SEQ ID NO: 106203 - RNA, 22 nt, Human
ggucuugcuauguugcccaggc

SEQ ID NO: 106204 - RNA, 22 nt, Human
ggucuuucuuugauaguggaga

SEQ ID NO: 106205 - RNA, 22 nt, Human
ggugaaauguagucuugugaga

SEQ ID NO: 106206 - RNA, 22 nt, Human
ggugaaggaggaagcugaugga

SEQ ID NO: 106207 - RNA, 22 nt, Human
ggugaagggugucauggcauuu

SEQ ID NO: 106208 - RNA, 22 nt, Human
ggugaaggucagagcaggaaaa

SEQ ID NO: 106209 - RNA, 22 nt, Human
ggugaaggucuacugugugcca

SEQ ID NO: 106210 - RNA, 22 nt, Human
ggugaagguggaacgcagagca

SEQ ID NO: 106211 - RNA, 22 nt, Human
ggugacacagggaccagagucu

SEQ ID NO: 106212 - RNA, 21 nt, Human
ggugacacguggccccgcucu

SEQ ID NO: 106213 - RNA, 22 nt, Human
ggugacagcgggucaagaggag

SEQ ID NO: 106214 - RNA, 22 nt, Human
ggugacaguuccggagguacag

SEQ ID NO: 106215 - RNA, 22 nt, Human
ggugacauuaucauuauuuuaa

SEQ ID NO: 106216 - RNA, 22 nt, Human
ggugaccucaccuggucccacc

SEQ ID NO: 106217 - RNA, 22 nt, Human
ggugacgaauccauagcaucga

SEQ ID NO: 106218 - RNA, 22 nt, Human
ggugagagaaaagaaacacugu

SEQ ID NO: 106219 - RNA, 22 nt, Human
ggugagaggccugagagcugga

SEQ ID NO: 106220 - RNA, 22 nt, Human
ggugagaguuaugauuccaauu

SEQ ID NO: 106221 - RNA, 22 nt, Human
ggugagcacugcccugggucuc

SEQ ID NO: 106222 - RNA, 22 nt, Human
ggugaggcuaagugacacaggg

SEQ ID NO: 106223 - RNA, 22 nt, Human
ggugaggcuggcuugccuucuu

SEQ ID NO: 106224 - RNA, 22 nt, Human
ggugaggggagagugaaagaaa

SEQ ID NO: 106225 - RNA, 22 nt, Human
ggugaggggcgccucugcccgg

SEQ ID NO: 106226 - RNA, 22 nt, Human
ggugaggggcuccucugcccgg

SEQ ID NO: 106227 - RNA, 22 nt, Human
ggugaguccagaguccaaaucc

SEQ ID NO: 106228 - RNA, 22 nt, Human
ggugagugccuggccuggccac

SEQ ID NO: 106229 - RNA, 17 nt, Human
ggugaguguccaggugg

SEQ ID NO: 106230 - RNA, 22 nt, Human
ggugaugaaaagugccuuuauc

SEQ ID NO: 106231 - RNA, 22 nt, Human
gguucucuuccuccugacugag

SEQ ID NO: 106232 - RNA, 23 nt, Human
gguucugccgcuuacugcugugc

SEQ ID NO: 106233 - RNA, 22 nt, Human
gguugacagaagaaggaugaca

SEQ ID NO: 106234 - RNA, 18 nt, Human
gguugauaacuugugauu

SEQ ID NO: 106235 - RNA, 19 nt, Human
gguuggagaagagcggccc

SEQ ID NO: 106236 - RNA, 22 nt, Human
gguuuaaaagccaugcaugggg

SEQ ID NO: 106237 - RNA, 22 nt, Human
gguuuaagacaggcuucacagu

SEQ ID NO: 106238 - RNA, 17 nt, Human
gguuuaauccuuaccug

SEQ ID NO: 106239 - RNA, 22 nt, Human
gguuuaauggagauauuucaga

SEQ ID NO: 106240 - RNA, 22 nt, Human
gguuuccaaugacaaacacugu

SEQ ID NO: 106241 - RNA, 22 nt, Human
gguuuccacauccauggaaugg

SEQ ID NO: 106242 - RNA, 22 nt, Human
gguuuccauuauuuuaugggug

SEQ ID NO: 106243 - RNA, 14 nt, Human
gguuuccauuuuua

SEQ ID NO: 106244 - RNA, 22 nt, Human
gguuugaacagcuuuggagaag

SEQ ID NO: 106245 - RNA, 22 nt, Human
gguuuguugggguccaggccca

SEQ ID NO: 106246 - RNA, 22 nt, Human
gguuuuaaccauucacaaguga

SEQ ID NO: 106247 - RNA, 22 nt, Human
gguuuuauagcaguacuaucag

SEQ ID NO: 106248 - RNA, 22 nt, Human
gguuuuauuaacuuuaacauca

SEQ ID NO: 106249 - RNA, 22 nt, Human
guaaaacauguuuuaacuagga

SEQ ID NO: 106250 - RNA, 23 nt, Human
guaaaauacgcagugcaguguga

SEQ ID NO: 106251 - RNA, 22 nt, Human
guaaacugaauuggauacugug

SEQ ID NO: 106252 - RNA, 20 nt, Human
guaaagcauucuuggcauac

SEQ ID NO: 106253 - RNA, 22 nt, Human
guaaaguaaacccacuuuguag

SEQ ID NO: 106254 - RNA, 22 nt, Human
guaaauaacugguaauuggggu

SEQ ID NO: 106255 - RNA, 22 nt, Human
guaaaugagucaaaugggggaa

SEQ ID NO: 106256 - RNA, 22 nt, Human
guaaauguccugcuacagagug

SEQ ID NO: 106257 - RNA, 22 nt, Human
guaaaugugcuaaaaugugucg

SEQ ID NO: 106258 - RNA, 22 nt, Human
guaaauguuugcugaugauucu

SEQ ID NO: 106259 - RNA, 22 nt, Human
guaaauuauuucaagaucaucu

SEQ ID NO: 106260 - RNA, 22 nt, Human
guaaauuucccgggccauuuaa

SEQ ID NO: 106261 - RNA, 22 nt, Human
guaacaaaggauaacuugguuu

SEQ ID NO: 106262 - RNA, 22 nt, Human
guaacagaggguuugcagauau

SEQ ID NO: 106263 - RNA, 19 nt, Human
guaacaguggacauuuuag

SEQ ID NO: 106264 - RNA, 20 nt, Human
guaacucuggcuaaguaaau

SEQ ID NO: 106265 - RNA, 22 nt, Human
guaacucuuuggaaaacauuuu

SEQ ID NO: 106266 - RNA, 22 nt, Human
guaacuuuggauuuaggguacc

SEQ ID NO: 106267 - RNA, 22 nt, Human
guaagaagaugaauccaggcug

SEQ ID NO: 106268 - RNA, 22 nt, Human
guaagacaagcggacugccguu

SEQ ID NO: 106269 - RNA, 18 nt, Human
guaagcaaagacuuuaua

SEQ ID NO: 106270 - RNA, 22 nt, Human
guaagcaucugucucuucugca

SEQ ID NO: 106271 - RNA, 22 nt, Human
guaagccucugcucuaucuggu

SEQ ID NO: 106272 - RNA, 22 nt, Human
guaaggcuaaugucuuuguggu

SEQ ID NO: 106273 - RNA, 22 nt, Human
guaaguuuuguauaggcauggg

SEQ ID NO: 106274 - RNA, 22 nt, Human
guaaguuuuucccuagauguag

SEQ ID NO: 106275 - RNA, 22 nt, Human
guaauaauuugcuaccuggugg

SEQ ID NO: 106276 - RNA, 22 nt, Human
guaauagucucaaacuccugga

SEQ ID NO: 106277 - RNA, 17 nt, Human
guaauauaauaagccuu

SEQ ID NO: 106278 - RNA, 22 nt, Human
guaaucucagcuacuugggagg

SEQ ID NO: 106279 - RNA, 20 nt, Human
guaaugaauguaaacaguaa

SEQ ID NO: 106280 - RNA, 22 nt, Human
guaauguguuuugaaaaacagu

SEQ ID NO: 106281 - RNA, 22 nt, Human
guaauuacaugaguacuguaag

SEQ ID NO: 106282 - RNA, 22 nt, Human
guaauucugugugaaucuauua

SEQ ID NO: 106283 - RNA, 22 nt, Human
guaauugaguuaccuggaccag

SEQ ID NO: 106284 - RNA, 22 nt, Human
guaauuuaauucucugacuuga

SEQ ID NO: 106285 - RNA, 22 nt, Human
guaauuuuggaguauaaccugg

SEQ ID NO: 106286 - RNA, 22 nt, Human
guaauuuuuaguucauucuauc

SEQ ID NO: 106287 - RNA, 22 nt, Human
guacaaaggcagaauuggguag

SEQ ID NO: 106288 - RNA, 22 nt, Human
guacaaaugcagguuuguuaca

SEQ ID NO: 106289 - RNA, 22 nt, Human
guacaaauguacacuuguauaa

SEQ ID NO: 106290 - RNA, 22 nt, Human
guacaaauuuugacaucuagga

SEQ ID NO: 106291 - RNA, 19 nt, Human
guacaagaaugacugagca

SEQ ID NO: 106292 - RNA, 22 nt, Human
guacaaguucuacucuauaaau

SEQ ID NO: 106293 - RNA, 22 nt, Human
guacaauaacuagucuuauagu

SEQ ID NO: 106294 - RNA, 19 nt, Human
guacaauguguuguuggua

SEQ ID NO: 106295 - RNA, 22 nt, Human
guacaauuaagugcacaaauag

SEQ ID NO: 106296 - RNA, 22 nt, Human
guacacaaaagaggaaaccgga

SEQ ID NO: 106297 - RNA, 22 nt, Human
guacacacuguuugaucauuuc

SEQ ID NO: 106298 - RNA, 22 nt, Human
guacacagagugguggaagaaa

SEQ ID NO: 106299 - RNA, 22 nt, Human
guacacauagguuacugauuaa

SEQ ID NO: 106300 - RNA, 22 nt, Human
guacacauauauuaaaaauugu

SEQ ID NO: 106301 - RNA, 22 nt, Human
guacagaaugcuugguaaggca

SEQ ID NO: 106302 - RNA, 22 nt, Human
guacagcauuugaaauuacugg

SEQ ID NO: 106303 - RNA, 22 nt, Human
guacaggacauagacagaguag

SEQ ID NO: 106304 - RNA, 21 nt, Human
guacagggauaguagugucaa

SEQ ID NO: 106305 - RNA, 22 nt, Human
guacaguaguaaaagugaauga

SEQ ID NO: 106306 - RNA, 22 nt, Human
guacaguuuucaguguucacug

SEQ ID NO: 106307 - RNA, 22 nt, Human
uccugggacucugccucaggcu

SEQ ID NO: 106308 - RNA, 22 nt, Human
uccugggagacccagcugugga

SEQ ID NO: 106309 - RNA, 22 nt, Human
uccugggagagugggacuguau

SEQ ID NO: 106310 - RNA, 22 nt, Human
uccugggagcauggugccguga

SEQ ID NO: 106311 - RNA, 22 nt, Human
uccugggaguaauugagucaug

SEQ ID NO: 106312 - RNA, 22 nt, Human
uccugggaguggccauguaaug

SEQ ID NO: 106313 - RNA, 22 nt, Human
uccugggauacuaagaaauuuu

SEQ ID NO: 106314 - RNA, 22 nt, Human
uccugggaugacuuuugaaaug

SEQ ID NO: 106315 - RNA, 22 nt, Human
uccugggauuaagguggugauu

SEQ ID NO: 106316 - RNA, 22 nt, Human
uccugggcaaaaguaucuguga

SEQ ID NO: 106317 - RNA, 22 nt, Human
uccugggcacaagugagucucc

SEQ ID NO: 106318 - RNA, 22 nt, Human
uccugggcgguuaugugaucug

SEQ ID NO: 106319 - RNA, 19 nt, Human
uccugggcguugacuuugg

SEQ ID NO: 106320 - RNA, 22 nt, Human
uccugggcugcagggaagagca

SEQ ID NO: 106321 - RNA, 22 nt, Human
uccugggcuuaagugauccucc

SEQ ID NO: 106322 - RNA, 22 nt, Human
uccugggcuucacagacucugu

SEQ ID NO: 106323 - RNA, 19 nt, Human
uccuggggaggggcauggc

SEQ ID NO: 106324 - RNA, 22 nt, Human
uccuggggccaggcaccucugg

SEQ ID NO: 106325 - RNA, 22 nt, Human
uccuggggcucaugggauuugu

SEQ ID NO: 106326 - RNA, 22 nt, Human
uccuggggcucugagcgagaca

SEQ ID NO: 106327 - RNA, 22 nt, Human
uccuggggcucuuugaugugau

SEQ ID NO: 106328 - RNA, 22 nt, Human
uccuggguaaacacugaccuuu

SEQ ID NO: 106329 - RNA, 22 nt, Human
uccuggguagccuguccaagau

SEQ ID NO: 106330 - RNA, 22 nt, Human
uccugggucugggugucugagg

SEQ ID NO: 106331 - RNA, 22 nt, Human
uccuggguggugguaggagcag

SEQ ID NO: 106332 - RNA, 22 nt, Human
uccuggguuaauuaugauucac

SEQ ID NO: 106333 - RNA, 22 nt, Human
uccuggucagugccaaacuggu

SEQ ID NO: 106334 - RNA, 22 nt, Human
uccuggucuacacugcauuggg

SEQ ID NO: 106335 - RNA, 22 nt, Human
uccuggugaaugacuuuuuauu

SEQ ID NO: 106336 - RNA, 23 nt, Human
uccuggugacaugccugagcauc

SEQ ID NO: 106337 - RNA, 22 nt, Human
uccuggugaggcuagaaguguc

SEQ ID NO: 106338 - RNA, 22 nt, Human
uccuggugcuuguauuugaagu

SEQ ID NO: 106339 - RNA, 20 nt, Human
uccugguggauacugcuuaa

SEQ ID NO: 106340 - RNA, 22 nt, Human
uccuggugggacagaaaaccuc

SEQ ID NO: 106341 - RNA, 22 nt, Human
guuuuuaucuaauagcaguuau

SEQ ID NO: 106342 - RNA, 22 nt, Human
guuuuucuagaaaucuccuccu

SEQ ID NO: 106343 - RNA, 22 nt, Human
guuuuucuagacugggaguuug

SEQ ID NO: 106344 - RNA, 22 nt, Human
guuuuucuaggaccaugugauu

SEQ ID NO: 106345 - RNA, 22 nt, Human
guuuuugucgaguuccuugacc

SEQ ID NO: 106346 - RNA, 22 nt, Human
gugagagugguuuauguccaug

SEQ ID NO: 106347 - RNA, 22 nt, Human
gugagaguguuuggaaauagaa

SEQ ID NO: 106348 - RNA, 22 nt, Human
gugagauuugaguggggauaca

SEQ ID NO: 106349 - RNA, 22 nt, Human
gugagcagaauaaggguugaga

SEQ ID NO: 106350 - RNA, 18 nt, Human
gugagcagagagcaucac

SEQ ID NO: 106351 - RNA, 22 nt, Human
gugagcaggauaggggcucccu

SEQ ID NO: 106352 - RNA, 22 nt, Human
gugagcaguuguauaaagacuu

SEQ ID NO: 106353 - RNA, 22 nt, Human
gugagcaguugugagccccaaa

SEQ ID NO: 106354 - RNA, 22 nt, Human
gugagcaucuuggcagauauga

SEQ ID NO: 106355 - RNA, 22 nt, Human
gugagccaguucgacuguuucu

SEQ ID NO: 106356 - RNA, 22 nt, Human
gugagcugggugaaugguaggg

SEQ ID NO: 106357 - RNA, 22 nt, Human
gugagcuucugacagaugcacc

SEQ ID NO: 106358 - RNA, 19 nt, Human
gugagcuucuuguaagagg

SEQ ID NO: 106359 - RNA, 22 nt, Human
gugaggaagucugagagccaca

SEQ ID NO: 106360 - RNA, 19 nt, Human
gugaggaguguuuacagaa

SEQ ID NO: 106361 - RNA, 22 nt, Human
gugaggcagaaguucccuuuua

SEQ ID NO: 106362 - RNA, 22 nt, Human
gugaggcagcaggagccucugu

SEQ ID NO: 106363 - RNA, 22 nt, Human
gugaggcuacucagcuguccga

SEQ ID NO: 106364 - RNA, 22 nt, Human
gugagggcagcuuggucagugu

SEQ ID NO: 106365 - RNA, 22 nt, Human
gugaggggccaagaguagggca

SEQ ID NO: 106366 - RNA, 22 nt, Human
gugagguaaacuguaguucaga

SEQ ID NO: 106367 - RNA, 22 nt, Human
gugagguagcagagacagugaa

SEQ ID NO: 106368 - RNA, 22 nt, Human
gugaggucaaagccuuggguau

SEQ ID NO: 106369 - RNA, 22 nt, Human
gugagguccaguaacuugucca

SEQ ID NO: 106370 - RNA, 22 nt, Human
gugagguccugagaggcuugug

SEQ ID NO: 106371 - RNA, 22 nt, Human
gugaggugacuagcaggugggg

SEQ ID NO: 106372 - RNA, 22 nt, Human
gugagucuguggaccgggcacu

SEQ ID NO: 106373 - RNA, 22 nt, Human
gugagucugugggugggaacug

SEQ ID NO: 106374 - RNA, 22 nt, Human
gugagucuuaagcaccaccuuu

SEQ ID NO: 106375 - RNA, 22 nt, Human
gugaguguuaacccacugcuuc

SEQ ID NO: 106376 - RNA, 22 nt, Human
gugauaaaggggaggaagugug

SEQ ID NO: 106377 - RNA, 22 nt, Human
gugauaacucaggcagagaaua

SEQ ID NO: 106378 - RNA, 22 nt, Human
gugauacaaauaaacauaugcu

SEQ ID NO: 106379 - RNA, 22 nt, Human
gugauaggcauuuaacucuaag

SEQ ID NO: 106380 - RNA, 23 nt, Human
gugauauuaaggauagagacaag

SEQ ID NO: 106381 - RNA, 22 nt, Human
gugauggagucaaggcuagaac

SEQ ID NO: 106382 - RNA, 22 nt, Human
gugaugucacagaauaagugau

SEQ ID NO: 106383 - RNA, 22 nt, Human
gugauuaaugccaaugggccuu

SEQ ID NO: 106384 - RNA, 22 nt, Human
gugauucucacucuagugcuug

SEQ ID NO: 106385 - RNA, 22 nt, Human
gugauucugccuggaagguccu

SEQ ID NO: 106386 - RNA, 22 nt, Human
gugauucuggcaggcagaaggg

SEQ ID NO: 106387 - RNA, 19 nt, Human
gugauuucuuuccacaagc

SEQ ID NO: 106388 - RNA, 22 nt, Human
gugcaaaagcaguugugguuuu

SEQ ID NO: 106389 - RNA, 22 nt, Human
gugcaaaaguaauuacaguuuu

SEQ ID NO: 106390 - RNA, 22 nt, Human
gugcaaaaguaauugcaguacu

SEQ ID NO: 106391 - RNA, 22 nt, Human
gugcaaaaguaauugcaguuuu

SEQ ID NO: 106392 - RNA, 22 nt, Human
gugcaaaaguaauugugguuuu

SEQ ID NO: 106393 - RNA, 22 nt, Human
gugcaaaaguacuugcggauuu

SEQ ID NO: 106394 - RNA, 22 nt, Human
gugcaaaagucauugugguuuu

SEQ ID NO: 106395 - RNA, 16 nt, Human
gugcaaaagugaggag

SEQ ID NO: 106396 - RNA, 22 nt, Human
gugcaaaaugauauccugaagc

SEQ ID NO: 106397 - RNA, 22 nt, Human
gugcaaacaucauagaguguac

SEQ ID NO: 106398 - RNA, 22 nt, Human
gugcaaauacauaugcugugga

SEQ ID NO: 106399 - RNA, 18 nt, Human
gugcaaauacuugcugac

SEQ ID NO: 106400 - RNA, 22 nt, Human
gugcaaaugagauggauucaag

SEQ ID NO: 106401 - RNA, 22 nt, Human
gugcaaccaucaccacugacuc

SEQ ID NO: 106402 - RNA, 22 nt, Human
gugcaagguacauccuugaugu

SEQ ID NO: 106403 - RNA, 22 nt, Human
gugcaauagacugugguauuaa

SEQ ID NO: 106404 - RNA, 20 nt, Human
gugcaauggcaccaucucag

SEQ ID NO: 106405 - RNA, 20 nt, Human
gugcaauggcgcaaucucgg

SEQ ID NO: 106406 - RNA, 22 nt, Human
gugcacaaucuucauauggcgu

SEQ ID NO: 106407 - RNA, 22 nt, Human
gugcacacaagcaaugcacuua

SEQ ID NO: 106408 - RNA, 22 nt, Human
gugcacagaagcagaagcuaga

SEQ ID NO: 106409 - RNA, 22 nt, Human
gugcacagagcccagggccgcg

SEQ ID NO: 106410 - RNA, 22 nt, Human
gugcacagauucagagguuuug

SEQ ID NO: 106411 - RNA, 22 nt, Human
gugcacccccaaggagguggag

SEQ ID NO: 106412 - RNA, 22 nt, Human
gugcagaaucaguacagaacga

SEQ ID NO: 106413 - RNA, 22 nt, Human
gugcagaccuuaguucaagcca

SEQ ID NO: 106414 - RNA, 22 nt, Human
gugcagaccuuccagaaagaac

SEQ ID NO: 106415 - RNA, 22 nt, Human
gugcagagaaaugagaagucga

SEQ ID NO: 106416 - RNA, 21 nt, Human
gugcagaggaauguagggggc

SEQ ID NO: 106417 - RNA, 22 nt, Human
gugcagaggacguggcggccuc

SEQ ID NO: 106418 - RNA, 20 nt, Human
gugcagauguccuuucacac

SEQ ID NO: 106419 - RNA, 23 nt, Human
gugcagcagugucugcagucaug

SEQ ID NO: 106420 - RNA, 22 nt, Human
gugcagcugagggccucuucua

SEQ ID NO: 106421 - RNA, 22 nt, Human
gugcagcugugguggagccagg

SEQ ID NO: 106422 - RNA, 22 nt, Human
gugcagcugugugagagcucca

SEQ ID NO: 106423 - RNA, 22 nt, Human
gugcagcuuccuggucucagcc

SEQ ID NO: 106424 - RNA, 22 nt, Human
gugcaggaguaggagagggcuu

SEQ ID NO: 106425 - RNA, 22 nt, Human
gugcagggcagccgaaugggcu

SEQ ID NO: 106426 - RNA, 22 nt, Human
gugcagggcuggcaccggaggc

SEQ ID NO: 106427 - RNA, 22 nt, Human
gugcaggugaccuaauccaugu

SEQ ID NO: 106428 - RNA, 22 nt, Human
gugcagucccuccucccaaggc

SEQ ID NO: 106429 - RNA, 22 nt, Human
gugcaguugaagcauggggaga

SEQ ID NO: 106430 - RNA, 22 nt, Human
gugcaguugagacaauaggcug

SEQ ID NO: 106431 - RNA, 22 nt, Human
gugcaguugauaguuuuaguga

SEQ ID NO: 106432 - RNA, 22 nt, Human
gugcaguuguggacaugacaac

SEQ ID NO: 106433 - RNA, 22 nt, Human
gugcauaugguuacagcaccgc

SEQ ID NO: 106434 - RNA, 22 nt, Human
gugcaucaauuucccauguguc

SEQ ID NO: 106435 - RNA, 21 nt, Human
gugcaucagaucaguggaguc

SEQ ID NO: 106436 - RNA, 22 nt, Human
gugcaucaggaucugaccagau

SEQ ID NO: 106437 - RNA, 22 nt, Human
gugcaucugaauuugaaaaucu

SEQ ID NO: 106438 - RNA, 18 nt, Human
gugcaugcaugcucugcc

SEQ ID NO: 106439 - RNA, 22 nt, Human
gugcauggggagggaagcgcuc

SEQ ID NO: 106440 - RNA, 22 nt, Human
gugcaugugucuuuauaguagc

SEQ ID NO: 106441 - RNA, 22 nt, Human
gugcauugcgaugcagacgacc

SEQ ID NO: 106442 - RNA, 22 nt, Human
gugcauuuaggucacaugaugu

SEQ ID NO: 106443 - RNA, 22 nt, Human
gugcauuucucauacacuaaau

SEQ ID NO: 106444 - RNA, 22 nt, Human
gugccaaaagcuauaauuuggu

SEQ ID NO: 106445 - RNA, 22 nt, Human
gugccagagacaugacuagcug

SEQ ID NO: 106446 - RNA, 22 nt, Human
gugccagaggcagugaggaguu

SEQ ID NO: 106447 - RNA, 22 nt, Human
gugccagaggccccaaacaagu

SEQ ID NO: 106448 - RNA, 22 nt, Human
gugccagaguuugaggacaauu

SEQ ID NO: 106449 - RNA, 22 nt, Human
gugccagccgcaccccaggaga

SEQ ID NO: 106450 - RNA, 22 nt, Human
guuucaaaagucaggcuauucu

SEQ ID NO: 106451 - RNA, 22 nt, Human
guuucaaagggaagacgcugga

SEQ ID NO: 106452 - RNA, 22 nt, Human
guuucaauuugaaugcgaggcu

SEQ ID NO: 106453 - RNA, 22 nt, Human
guuucacagauggggagacacg

SEQ ID NO: 106454 - RNA, 22 nt, Human
guuucacagaugguguucauau

SEQ ID NO: 106455 - RNA, 22 nt, Human
guuucacagguuggagccagca

SEQ ID NO: 106456 - RNA, 22 nt, Human
guuucacugcaaacugacuuuu

SEQ ID NO: 106457 - RNA, 22 nt, Human
guuucagaaauguucuccugcu

SEQ ID NO: 106458 - RNA, 22 nt, Human
guuucagacuauucuguuucug

SEQ ID NO: 106459 - RNA, 22 nt, Human
guuucagaguagaaccucaagg

SEQ ID NO: 106460 - RNA, 22 nt, Human
guuucagauuugguuucagaag

SEQ ID NO: 106461 - RNA, 22 nt, Human
guuucauaauucaaucaaauga

SEQ ID NO: 106462 - RNA, 22 nt, Human
guuucauacagauuauucaugg

SEQ ID NO: 106463 - RNA, 22 nt, Human
guuucauaugcaguuaacagca

SEQ ID NO: 106464 - RNA, 22 nt, Human
guuucaugguuguuugauggca

SEQ ID NO: 106465 - RNA, 22 nt, Human
guuuccaagaugcugccaucag

SEQ ID NO: 106466 - RNA, 22 nt, Human
guuuccagagugagggcacuug

SEQ ID NO: 106467 - RNA, 22 nt, Human
guuuccagcuugggcccgggga

SEQ ID NO: 106468 - RNA, 22 nt, Human
guuuccaugaaaauguuucugc

SEQ ID NO: 106469 - RNA, 22 nt, Human
guuucccaggcuguggggcccu

SEQ ID NO: 106470 - RNA, 22 nt, Human
guuuccgcccugggccuguggg

SEQ ID NO: 106471 - RNA, 22 nt, Human
guuuccuauggcugcugcagga

SEQ ID NO: 106472 - RNA, 22 nt, Human
guuuccucugcugguuuucauu

SEQ ID NO: 106473 - RNA, 22 nt, Human
guuuccugaaauagaguacugg

SEQ ID NO: 106474 - RNA, 22 nt, Human
guuuccugcacacguguuauau

SEQ ID NO: 106475 - RNA, 22 nt, Human
guuuccugcccugucuuaucca

SEQ ID NO: 106476 - RNA, 22 nt, Human
guuuccuggagguuauuuuuga

SEQ ID NO: 106477 - RNA, 22 nt, Human
guuuccugugggaacucggcug

SEQ ID NO: 106478 - RNA, 22 nt, Human
guuuccuuuaauagugauauug

SEQ ID NO: 106479 - RNA, 22 nt, Human
guuuccuuugccaguaaauggg

SEQ ID NO: 106480 - RNA, 22 nt, Human
guuuccuuuuggaauuagagcu

SEQ ID NO: 106481 - RNA, 22 nt, Human
guuucuaugguuuauauuacug

SEQ ID NO: 106482 - RNA, 22 nt, Human
guuucucaaauuauuucagcuu

SEQ ID NO: 106483 - RNA, 22 nt, Human
guuucucagcaacuauaugacu

SEQ ID NO: 106484 - RNA, 22 nt, Human
guuucucuuugaagccuggcug

SEQ ID NO: 106485 - RNA, 22 nt, Human
guuucugagagccacacacagc

SEQ ID NO: 106486 - RNA, 22 nt, Human
guuucuguguuagaugagucuu

SEQ ID NO: 106487 - RNA, 22 nt, Human
guuucuguugcucagauaaugc

SEQ ID NO: 106488 - RNA, 22 nt, Human
guuucuuaaaagaggaguuaga

SEQ ID NO: 106489 - RNA, 22 nt, Human
guuucuuaaauguagcaggacc

SEQ ID NO: 106490 - RNA, 22 nt, Human
guuucuuagacauaugccauga

SEQ ID NO: 106491 - RNA, 22 nt, Human
guuucuuauuucaacuggaaca

SEQ ID NO: 106492 - RNA, 20 nt, Human
guuugaaaugauugguuggu

SEQ ID NO: 106493 - RNA, 22 nt, Human
guuugaaugcaguaugcauuuu

SEQ ID NO: 106494 - RNA, 22 nt, Human
guuugauucaagaacaaagagu

SEQ ID NO: 106495 - RNA, 22 nt, Human
guuugcaaagaucauuuucucc

SEQ ID NO: 106496 - RNA, 22 nt, Human
guuugcaggaacucuggggaga

SEQ ID NO: 106497 - RNA, 22 nt, Human
guuugcagggagagauguggug

SEQ ID NO: 106498 - RNA, 21 nt, Human
guuugcaguugaguccuuccc

SEQ ID NO: 106499 - RNA, 22 nt, Human
guuugcaguugucauccuccug

SEQ ID NO: 106500 - RNA, 22 nt, Human
guuugcauauuugcacaggaau

SEQ ID NO: 106501 - RNA, 21 nt, Human
guuugcaugaacaagucagcc

SEQ ID NO: 106502 - RNA, 22 nt, Human
ucuuuaugcacauaaagaaacu

SEQ ID NO: 106503 - RNA, 22 nt, Human
ucuuuaugccuaccugggaaga

SEQ ID NO: 106504 - RNA, 22 nt, Human
ucuuuauggaaaaugaauggca

SEQ ID NO: 106505 - RNA, 22 nt, Human
ucuuucaaugagcauucuuucc

SEQ ID NO: 106506 - RNA, 22 nt, Human
ucuuucauguauaugcaaccua

SEQ ID NO: 106507 - RNA, 22 nt, Human
ucuuucccuguguuagccugua

SEQ ID NO: 106508 - RNA, 22 nt, Human
ucuuuccuuagaauaauucuuu

SEQ ID NO: 106509 - RNA, 22 nt, Human
ucuuucugaauauuugaccuca

SEQ ID NO: 106510 - RNA, 22 nt, Human
ucuuucugaugggaagggucaa

SEQ ID NO: 106511 - RNA, 22 nt, Human
ucuuucugguuauguauagaga

SEQ ID NO: 106512 - RNA, 22 nt, Human
ucuuucuguaagcuccauggaa

SEQ ID NO: 106513 - RNA, 22 nt, Human
ucuuucuuauuaugcucaaugu

SEQ ID NO: 106514 - RNA, 22 nt, Human
ucuuucuucagcccuguaagau

SEQ ID NO: 106515 - RNA, 22 nt, Human
ucuuucuugguauaaagcaggg

SEQ ID NO: 106516 - RNA, 22 nt, Human
ucuuugaaaagggagauagaaa

SEQ ID NO: 106517 - RNA, 22 nt, Human
ucuuugaacucuguguauuaac

SEQ ID NO: 106518 - RNA, 22 nt, Human
ucuuugaauucaaacuguucaa

SEQ ID NO: 106519 - RNA, 22 nt, Human
ucuuugaugcuucugaaggugu

SEQ ID NO: 106520 - RNA, 22 nt, Human
ucuuugaugugguuaauuauga

SEQ ID NO: 106521 - RNA, 21 nt, Human
ucuuugauuaagcuugacuag

SEQ ID NO: 106522 - RNA, 22 nt, Human
ucuuugauuugacaauaucuug

SEQ ID NO: 106523 - RNA, 22 nt, Human
ucuuugauuuuguuacuaagac

SEQ ID NO: 106524 - RNA, 22 nt, Human
ucuuugcaaacuauggagugug

SEQ ID NO: 106525 - RNA, 22 nt, Human
ucuuugcacacagcgauucuuc

SEQ ID NO: 106526 - RNA, 22 nt, Human
ucuuugcacugugcaagcagaa

SEQ ID NO: 106527 - RNA, 22 nt, Human
ucuuugcagaacgaugaagaug

SEQ ID NO: 106528 - RNA, 22 nt, Human
ucuuugcagaauuuaacuuugc

SEQ ID NO: 106529 - RNA, 22 nt, Human
ucuuugcaggagcccuuugaac

SEQ ID NO: 106530 - RNA, 22 nt, Human
ucuuugcaguggugaauaaaga

SEQ ID NO: 106531 - RNA, 22 nt, Human
ucuuugcaugaguucccucugu

SEQ ID NO: 106532 - RNA, 22 nt, Human
ucuuugcaugugcuucuuggcc

SEQ ID NO: 106533 - RNA, 22 nt, Human
ucuuugcauuccugugugcuuu

SEQ ID NO: 106534 - RNA, 22 nt, Human
ucuuugcugaguacaucuccaa

SEQ ID NO: 106535 - RNA, 18 nt, Human
ucuuuggacaacuacugg

SEQ ID NO: 106536 - RNA, 22 nt, Human
ucuuuggcauuuaggagcagga

SEQ ID NO: 106537 - RNA, 22 nt, Human
ucuuuggcugccugaagcccaa

SEQ ID NO: 106538 - RNA, 22 nt, Human
ucuuuggcuugucuccucaguu

SEQ ID NO: 106539 - RNA, 22 nt, Human
ucuuugggcuaggaguuuggau

SEQ ID NO: 106540 - RNA, 22 nt, Human
ucuuugguauucacuugugaag

SEQ ID NO: 106541 - RNA, 16 nt, Human
ucuuuguaaucagcag

SEQ ID NO: 106542 - RNA, 22 nt, Human
ucuuuguacuuucuggcugucc

SEQ ID NO: 106543 - RNA, 22 nt, Human
ucuuuguaguuauaaacgacuu

SEQ ID NO: 106544 - RNA, 22 nt, Human
ucuuuguauguauguuucaaag

SEQ ID NO: 106545 - RNA, 22 nt, Human
ucuuugucugaacagggacauu

SEQ ID NO: 106546 - RNA, 22 nt, Human
ucuuugugccaugcagugaggc

SEQ ID NO: 106547 - RNA, 21 nt, Human
ucuuuuaacaccaggaauucc

SEQ ID NO: 106548 - RNA, 22 nt, Human
ucuuuuaguaauaaauauuugu

SEQ ID NO: 106549 - RNA, 22 nt, Human
ucuuuuaucuguuguguaacaa

SEQ ID NO: 106550 - RNA, 18 nt, Human
ucuuuuccuuccacuucc

SEQ ID NO: 106551 - RNA, 22 nt, Human
ucuuuuccuugaugguuaaaua

SEQ ID NO: 106552 - RNA, 21 nt, Human
ucuuuucucagcuuugugguu

SEQ ID NO: 106553 - RNA, 22 nt, Human
ucuuuucuucuuaaugguuaau

SEQ ID NO: 106554 - RNA, 22 nt, Human
ucuuuuguagcuaacacauuca

SEQ ID NO: 106555 - RNA, 22 nt, Human
ucuuuugucgguguaucaugga

SEQ ID NO: 106556 - RNA, 22 nt, Human
ucuuuugugccaaguaaugaau

SEQ ID NO: 106557 - RNA, 22 nt, Human
ucuuuuguugauggaauuaaug

SEQ ID NO: 106558 - RNA, 22 nt, Human
ucuuuuguugccuacuuauuaa

SEQ ID NO: 106559 - RNA, 22 nt, Human
ugaagcauaagaggguucuuuu

SEQ ID NO: 106560 - RNA, 22 nt, Human
ugaagcaucuggucugagaauu

SEQ ID NO: 106561 - RNA, 22 nt, Human
ugaagccaaggaugccuuucuc

SEQ ID NO: 106562 - RNA, 22 nt, Human
ugaagccaaucugccaggcaga

SEQ ID NO: 106563 - RNA, 22 nt, Human
ugaagccagucaauguuaaguu

SEQ ID NO: 106564 - RNA, 22 nt, Human
ugaagccaucaggaagccagca

SEQ ID NO: 106565 - RNA, 22 nt, Human
ugaagccaucccucagauggcc

SEQ ID NO: 106566 - RNA, 22 nt, Human
ugaagccucaccugcucaguau

SEQ ID NO: 106567 - RNA, 21 nt, Human
ugaagccugaggcauagcccc

SEQ ID NO: 106568 - RNA, 22 nt, Human
ugaagcuagucaagcuuagaua

SEQ ID NO: 106569 - RNA, 22 nt, Human
ugaagcuauauaaguuacagca

SEQ ID NO: 106570 - RNA, 22 nt, Human
ugaagcuggaagcaugcagacu

SEQ ID NO: 106571 - RNA, 22 nt, Human
ugaagcuggaaguuagguagac

SEQ ID NO: 106572 - RNA, 22 nt, Human
ugaaggaaagagggaacauccc

SEQ ID NO: 106573 - RNA, 22 nt, Human
ugaaggaaaugacggcagaaga

SEQ ID NO: 106574 - RNA, 22 nt, Human
ugaaggaagaauaggcaguguu

SEQ ID NO: 106575 - RNA, 22 nt, Human
ugaaggaaugagggaguggguc

SEQ ID NO: 106576 - RNA, 22 nt, Human
ugaaggagcucaaugaugaugc

SEQ ID NO: 106577 - RNA, 22 nt, Human
ugaaggagcucaggagauaguc

SEQ ID NO: 106578 - RNA, 22 nt, Human
ugaaggaggaauguggccucca

SEQ ID NO: 106579 - RNA, 22 nt, Human
ugaaggcaaaacauguuacacc

SEQ ID NO: 106580 - RNA, 22 nt, Human
ugaaggcaaccucugugguccu

SEQ ID NO: 106581 - RNA, 22 nt, Human
ugaaggcacuugccuaggggca

SEQ ID NO: 106582 - RNA, 22 nt, Human
ugaaggcagcaugcacacuagu

SEQ ID NO: 106583 - RNA, 22 nt, Human
ugaaggcauuugaguuggugag

SEQ ID NO: 106584 - RNA, 20 nt, Human
ugaaggccagcagcauaggg

SEQ ID NO: 106585 - RNA, 22 nt, Human
ugaaggccagcucuuuaucagc

SEQ ID NO: 106586 - RNA, 22 nt, Human
ugaaggcccuaucuccauauac

SEQ ID NO: 106587 - RNA, 22 nt, Human
ugaaggccuaacuuccagugcu

SEQ ID NO: 106588 - RNA, 23 nt, Human
ugaaggccuggaggacgcguugu

SEQ ID NO: 106589 - RNA, 22 nt, Human
ugaaggcuugacugaggcagga

SEQ ID NO: 106590 - RNA, 22 nt, Human
ugaagggcaaccccaggcccag

SEQ ID NO: 106591 - RNA, 22 nt, Human
ugaagggguucagcaugggggu

SEQ ID NO: 106592 - RNA, 22 nt, Human
ugaaggucaugguaauauuuuu

SEQ ID NO: 106593 - RNA, 22 nt, Human
ugaaggugagcauuugcugauu

SEQ ID NO: 106594 - RNA, 19 nt, Human
ugaagguguaugugcuggg

SEQ ID NO: 106595 - RNA, 22 nt, Human
ugaaguaacuguccaggaucca

SEQ ID NO: 106596 - RNA, 22 nt, Human
ugaaguaucuauggauauaaga

SEQ ID NO: 106597 - RNA, 23 nt, Human
ugaagugaaauuucacaagggac

SEQ ID NO: 106598 - RNA, 22 nt, Human
ugaagugaccuggggcagugua

SEQ ID NO: 106599 - RNA, 22 nt, Human
ugaaguucaagggcuacauuug

SEQ ID NO: 106600 - RNA, 22 nt, Human
ugaaguuucuugaaucuuggag

SEQ ID NO: 106601 - RNA, 22 nt, Human
ugaauaaaguauguccugggaa

SEQ ID NO: 106602 - RNA, 22 nt, Human
ugaauaaauugagagcgaaugu

SEQ ID NO: 106603 - RNA, 22 nt, Human
ugaauagauuuuuaacauauaa

SEQ ID NO: 106604 - RNA, 20 nt, Human
ugaauaugaccuuauuugga

SEQ ID NO: 106605 - RNA, 22 nt, Human
ugaauaugauugcaaauuuggc

SEQ ID NO: 106606 - RNA, 22 nt, Human
ugaaucaguauaaauucucaaa

SEQ ID NO: 106607 - RNA, 22 nt, Human
ugaauccuaauucuaucacuua

SEQ ID NO: 106608 - RNA, 22 nt, Human
ugaaucugauuucccuggaggc

SEQ ID NO: 106609 - RNA, 22 nt, Human
ugaaugagaacacugaaagagg

SEQ ID NO: 106610 - RNA, 21 nt, Human
ugaaugagcaucuggacuuuu

SEQ ID NO: 106611 - RNA, 22 nt, Human
ugaaugaucuccgauuaguccu

SEQ ID NO: 106612 - RNA, 21 nt, Human
ugaaugaucugguugccuuuu

SEQ ID NO: 106613 - RNA, 22 nt, Human
ugaaugauguauaauauugaga

SEQ ID NO: 106614 - RNA, 23 nt, Human
ugaaugauuguacugagcuuuua

SEQ ID NO: 106615 - RNA, 22 nt, Human
ugaaugcacugcucuccuagga

SEQ ID NO: 106616 - RNA, 22 nt, Human
ugaaugugaugcuaaacauaug

SEQ ID NO: 106617 - RNA, 22 nt, Human
ugaaugugggagagcuggcaau

SEQ ID NO: 106618 - RNA, 22 nt, Human
ugaauguucucuaaauacuccu

SEQ ID NO: 106619 - RNA, 22 nt, Human
uagaaucauugagaauaacagg

SEQ ID NO: 106620 - RNA, 22 nt, Human
uagaaucccagccagcuggaag

SEQ ID NO: 106621 - RNA, 23 nt, Human
uagaauccucugagauggaauag

SEQ ID NO: 106622 - RNA, 22 nt, Human
uagaaucuccagcauugguugu

SEQ ID NO: 106623 - RNA, 23 nt, Human
uagaaucuguauuucugcaguuc

SEQ ID NO: 106624 - RNA, 18 nt, Human
uagaaucuguuauugccu

SEQ ID NO: 106625 - RNA, 22 nt, Human
uagaaucuuuaaaauucauagu

SEQ ID NO: 106626 - RNA, 21 nt, Human
uagaaugcuauugucuuuucu

SEQ ID NO: 106627 - RNA, 22 nt, Human
uagaauguggagguaacagacu

SEQ ID NO: 106628 - RNA, 23 nt, Human
uagaauucaaucuguuccacauc

SEQ ID NO: 106629 - RNA, 22 nt, Human
uagaauugaguuucacuguucc

SEQ ID NO: 106630 - RNA, 22 nt, Human
uagacaaucucagcaaacacac

SEQ ID NO: 106631 - RNA, 22 nt, Human
uagacacaagagaaggguauaa

SEQ ID NO: 106632 - RNA, 22 nt, Human
uagacacaggggaaugugaggu

SEQ ID NO: 106633 - RNA, 22 nt, Human
uagacacuagggauuuaguacu

SEQ ID NO: 106634 - RNA, 23 nt, Human
uagacacuccuuugucuguccuu

SEQ ID NO: 106635 - RNA, 22 nt, Human
uagacagaauccagcccacgcc

SEQ ID NO: 106636 - RNA, 22 nt, Human
uagacagagugaagacaagugg

SEQ ID NO: 106637 - RNA, 22 nt, Human
uagacaggaaacauuaggaugg

SEQ ID NO: 106638 - RNA, 22 nt, Human
uagacaggagucaggcuagaau

SEQ ID NO: 106639 - RNA, 22 nt, Human
uagacaggguggcuuagaaaca

SEQ ID NO: 106640 - RNA, 22 nt, Human
uagacauuagguagguucaugg

SEQ ID NO: 106641 - RNA, 22 nt, Human
uagacauuauguauuaaguucu

SEQ ID NO: 106642 - RNA, 22 nt, Human
uagacauuggccauuccugugg

SEQ ID NO: 106643 - RNA, 22 nt, Human
uagacauuuaucuccaugugga

SEQ ID NO: 106644 - RNA, 22 nt, Human
uagacauuuggaguuuuaugac

SEQ ID NO: 106645 - RNA, 22 nt, Human
uagacauuugucaagaaugacu

SEQ ID NO: 106646 - RNA, 21 nt, Human
uagaccagcugugcuccucgg

SEQ ID NO: 106647 - RNA, 22 nt, Human
uagaccagguugaccagguagg

SEQ ID NO: 106648 - RNA, 22 nt, Human
uagacuauuucuuuugcauagg

SEQ ID NO: 106649 - RNA, 22 nt, Human
uagacucagacagaaaaugugu

SEQ ID NO: 106650 - RNA, 22 nt, Human
uagacuuuucaaaaucuagacc

SEQ ID NO: 106651 - RNA, 20 nt, Human
uagacuuuucaucaaccuua

SEQ ID NO: 106652 - RNA, 22 nt, Human
uagagaauggccuugaaguagu

SEQ ID NO: 106653 - RNA, 22 nt, Human
uagagaggccgcggguccccuc

SEQ ID NO: 106654 - RNA, 22 nt, Human
uagagcagaacuuguuaacacc

SEQ ID NO: 106655 - RNA, 22 nt, Human
uagagcaguggguaccauggca

SEQ ID NO: 106656 - RNA, 20 nt, Human
uagagcaugaaguccuaucc

SEQ ID NO: 106657 - RNA, 22 nt, Human
uagagcauucuaucuccaacag

SEQ ID NO: 106658 - RNA, 21 nt, Human
uagagccagugguguucugac

SEQ ID NO: 106659 - RNA, 22 nt, Human
uagagcuagcuucaaaaugcga

SEQ ID NO: 106660 - RNA, 22 nt, Human
uagagcuauuuaucagccagaa

SEQ ID NO: 106661 - RNA, 22 nt, Human
uagagcugaguugacuccauuu

SEQ ID NO: 106662 - RNA, 23 nt, Human
uagagcuucagcgaaugugcuca

SEQ ID NO: 106663 - RNA, 19 nt, Human
uagagcuuguuuuaggaag

SEQ ID NO: 106664 - RNA, 22 nt, Human
uagaggaaauuuccaaggugag

SEQ ID NO: 106665 - RNA, 22 nt, Human
uagaggagaguugcuggaugga

SEQ ID NO: 106666 - RNA, 22 nt, Human
uagaggagggcuguucuucagu

SEQ ID NO: 106667 - RNA, 22 nt, Human
uagaggcaaccaguguugagaa

SEQ ID NO: 106668 - RNA, 22 nt, Human
augcugugccuucucugugcca

SEQ ID NO: 106669 - RNA, 22 nt, Human
augcuguggccagaguucaacu

SEQ ID NO: 106670 - RNA, 22 nt, Human
augcugugucaccuuaggauuu

SEQ ID NO: 106671 - RNA, 22 nt, Human
augcuguguccuagugaaagaa

SEQ ID NO: 106672 - RNA, 22 nt, Human
augcugugucuagcaggaacac

SEQ ID NO: 106673 - RNA, 22 nt, Human
augcuuaaaaggcugcguuaga

SEQ ID NO: 106674 - RNA, 22 nt, Human
augcuuaacuuccuagucuaua

SEQ ID NO: 106675 - RNA, 22 nt, Human
augcuuaauacacuguuaaagg

SEQ ID NO: 106676 - RNA, 22 nt, Human
augcuucagauuugggguauua

SEQ ID NO: 106677 - RNA, 22 nt, Human
augcuucaugauuuggccaugu

SEQ ID NO: 106678 - RNA, 22 nt, Human
augcuuccaacaguucugugaa

SEQ ID NO: 106679 - RNA, 23 nt, Human
augcuuccacagagcuugcagcc

SEQ ID NO: 106680 - RNA, 22 nt, Human
augcuuccaugaacguucuugu

SEQ ID NO: 106681 - RNA, 22 nt, Human
augcuucccucacauauccugg

SEQ ID NO: 106682 - RNA, 22 nt, Human
augcuucugcucauauuucauu

SEQ ID NO: 106683 - RNA, 22 nt, Human
augcuucuguaaugugggaaug

SEQ ID NO: 106684 - RNA, 22 nt, Human
augcuuggaugcugccauggga

SEQ ID NO: 106685 - RNA, 22 nt, Human
augcuuggccccuuuauagccu

SEQ ID NO: 106686 - RNA, 22 nt, Human
augcuuuaaaacguauguguaa

SEQ ID NO: 106687 - RNA, 22 nt, Human
augcuuuaaaugucuuuugcuu

SEQ ID NO: 106688 - RNA, 22 nt, Human
augcuuuacgacaaaaaacuca

SEQ ID NO: 106689 - RNA, 22 nt, Human
augcuuuaguucaaaggacuua

SEQ ID NO: 106690 - RNA, 22 nt, Human
augcuuuauacaaaacacuuaa

SEQ ID NO: 106691 - RNA, 22 nt, Human
augcuuuauguucuggcauuuu

SEQ ID NO: 106692 - RNA, 22 nt, Human
augcuuucuucuuuccuguaag

SEQ ID NO: 106693 - RNA, 22 nt, Human
auggaaagggaagcaaggaaca

SEQ ID NO: 106694 - RNA, 22 nt, Human
auggaaauacagccagagcaga

SEQ ID NO: 106695 - RNA, 23 nt, Human
auggaaauagcaugugucauuua

SEQ ID NO: 106696 - RNA, 22 nt, Human
auggaaaucgaugucuaaguua

SEQ ID NO: 106697 - RNA, 22 nt, Human
auggaaauggagggugcuagaa

SEQ ID NO: 106698 - RNA, 22 nt, Human
auggaaauguuccauauauuga

SEQ ID NO: 106699 - RNA, 22 nt, Human
auggaacaagaacucagauuua

SEQ ID NO: 106700 - RNA, 22 nt, Human
auggaacaucagguuaagaaau

SEQ ID NO: 106701 - RNA, 22 nt, Human
auggaacugagcuugccaaacu

SEQ ID NO: 106702 - RNA, 22 nt, Human
auggaacugcuaauaauaguug

SEQ ID NO: 106703 - RNA, 22 nt, Human
auggaagaacgcucaggguuac

SEQ ID NO: 106704 - RNA, 22 nt, Human
auggaagacagauaaggcagaa

SEQ ID NO: 106705 - RNA, 22 nt, Human
auggaagcagacagguaauucc

SEQ ID NO: 106706 - RNA, 23 nt, Human
auggaagucacuguuuucuuguc

SEQ ID NO: 106707 - RNA, 22 nt, Human
auggaaugccaaguucacugcu

SEQ ID NO: 106708 - RNA, 22 nt, Human
auggaauuaaaagucaaguaau

SEQ ID NO: 106709 - RNA, 22 nt, Human
auggaauugagcaucaguuguu

SEQ ID NO: 106710 - RNA, 22 nt, Human
auggaauuucuccggcuccacc

SEQ ID NO: 106711 - RNA, 22 nt, Human
auggaauuugcaauaacaggau

SEQ ID NO: 106712 - RNA, 21 nt, Human
auggacaauugagugucuguc

SEQ ID NO: 106713 - RNA, 22 nt, Human
auggacagaagguagcaccuau

SEQ ID NO: 106714 - RNA, 22 nt, Human
auggacagagcugagcuccacc

SEQ ID NO: 106715 - RNA, 22 nt, Human
auggacagauuaacacaguaga

SEQ ID NO: 106716 - RNA, 22 nt, Human
auggacagcucuuaugugggca

SEQ ID NO: 106717 - RNA, 22 nt, Human
auggacaggcuuauaacagcaa

SEQ ID NO: 106718 - RNA, 23 nt, Human
auggacaggguuucagggucaca

SEQ ID NO: 106719 - RNA, 22 nt, Human
auggacagguacugcagugggu

SEQ ID NO: 106720 - RNA, 22 nt, Human
auggacaguacugaguggacua

SEQ ID NO: 106721 - RNA, 21 nt, Human
auggagggaccagggaagcag

SEQ ID NO: 106722 - RNA, 22 nt, Human
auggagguguuugauaauuugg

SEQ ID NO: 106723 - RNA, 22 nt, Human
auggaguaauauuaacauguua

SEQ ID NO: 106724 - RNA, 22 nt, Human
auggagugggccaauuuuagug

SEQ ID NO: 106725 - RNA, 22 nt, Human
auggaguucugccagcgcugcu

SEQ ID NO: 106726 - RNA, 22 nt, Human
auggauaguggugaaggcugua

SEQ ID NO: 106727 - RNA, 22 nt, Human
auggaucuaccuucaggcucug

SEQ ID NO: 106728 - RNA, 22 nt, Human
auggaugaguccuugagacaca

SEQ ID NO: 106729 - RNA, 22 nt, Human
auggauucauuaaugacuucuc

SEQ ID NO: 106730 - RNA, 22 nt, Human
auggcaauguggcuuauuugga

SEQ ID NO: 106731 - RNA, 22 nt, Human
auggcacacaggucugcaaggg

SEQ ID NO: 106732 - RNA, 18 nt, Human
auggcacagucuuucccu

SEQ ID NO: 106733 - RNA, 22 nt, Human
auggcacuaagagggagcugga

SEQ ID NO: 106734 - RNA, 22 nt, Human
auggcacugaccucccuuguaa

SEQ ID NO: 106735 - RNA, 22 nt, Human
auggcagaagucaagaugaguu

SEQ ID NO: 106736 - RNA, 22 nt, Human
auggcagacacaggcaggcaga

SEQ ID NO: 106737 - RNA, 18 nt, Human
auggcagaugauaagugc

SEQ ID NO: 106738 - RNA, 22 nt, Human
auggcagauggcuggagcaggu

SEQ ID NO: 106739 - RNA, 22 nt, Human
auggcagcaaaugucuggcugg

SEQ ID NO: 106740 - RNA, 22 nt, Human
auggcagcagcuuuagcugugg

SEQ ID NO: 106741 - RNA, 22 nt, Human
cagccuuugggucagaagauuc

SEQ ID NO: 106742 - RNA, 22 nt, Human
cagccuuugugaacaucaggug

SEQ ID NO: 106743 - RNA, 22 nt, Human
cagcgcugugggaacagggcua

SEQ ID NO: 106744 - RNA, 22 nt, Human
cagcggaggacagaugggagcu

SEQ ID NO: 106745 - RNA, 22 nt, Human
cagcgucucguugugggccucg

SEQ ID NO: 106746 - RNA, 22 nt, Human
cagcuaaggcuccuucuaggua

SEQ ID NO: 106747 - RNA, 22 nt, Human
cagcuaauccucucuauccaag

SEQ ID NO: 106748 - RNA, 22 nt, Human
cagcuacaaauacuuuuguaug

SEQ ID NO: 106749 - RNA, 22 nt, Human
cagcuacacuucuggguguguc

SEQ ID NO: 106750 - RNA, 22 nt, Human
cagcuacaggaccugaugcacc

SEQ ID NO: 106751 - RNA, 22 nt, Human
cagcuaccaugguuuguuccag

SEQ ID NO: 106752 - RNA, 22 nt, Human
cagcuagaaagucuguuaggga

SEQ ID NO: 106753 - RNA, 22 nt, Human
cagcuagcggugcuggcggcuc

SEQ ID NO: 106754 - RNA, 22 nt, Human
cagcuauugauaaauguugggg

SEQ ID NO: 106755 - RNA, 22 nt, Human
cagcuauuggcaagaaguggug

SEQ ID NO: 106756 - RNA, 22 nt, Human
cagcuauugguccacagguaug

SEQ ID NO: 106757 - RNA, 22 nt, Human
cagcucagcuuccugggugugu

SEQ ID NO: 106758 - RNA, 19 nt, Human
cagcucaguuugauucucu

SEQ ID NO: 106759 - RNA, 22 nt, Human
cagcuccacuugaguggggccu

SEQ ID NO: 106760 - RNA, 22 nt, Human
cagcuccccaugguuccugaag

SEQ ID NO: 106761 - RNA, 22 nt, Human
cagcuccuaugaguaugauucc

SEQ ID NO: 106762 - RNA, 22 nt, Human
cagcuccucuguuagcccuggg

SEQ ID NO: 106763 - RNA, 22 nt, Human
cagcuccugcagcugcugccgu

SEQ ID NO: 106764 - RNA, 22 nt, Human
cagcucuacguuucuaugaauc

SEQ ID NO: 106765 - RNA, 22 nt, Human
cagcucucacacccuccuccca

SEQ ID NO: 106766 - RNA, 22 nt, Human
cagcucucacacuuagcuucua

SEQ ID NO: 106767 - RNA, 22 nt, Human
cagcucucuaaggucuugcuuu

SEQ ID NO: 106768 - RNA, 22 nt, Human
cagcucugaagaaaggugucua

SEQ ID NO: 106769 - RNA, 22 nt, Human
cagcucugacacaguacaaaau

SEQ ID NO: 106770 - RNA, 17 nt, Human
cagcucugcaucuuccu

SEQ ID NO: 106771 - RNA, 22 nt, Human
cagcucugcuuccuuguacagg

SEQ ID NO: 106772 - RNA, 20 nt, Human
cagcucugggcaggucgagg

SEQ ID NO: 106773 - RNA, 22 nt, Human
cagcucuguucauagauggugc

SEQ ID NO: 106774 - RNA, 22 nt, Human
cagcucuguugccaaagugggc

SEQ ID NO: 106775 - RNA, 22 nt, Human
cagcucuuauuuucucuccuaa

SEQ ID NO: 106776 - RNA, 22 nt, Human
cagcucuuccuagccaugccac

SEQ ID NO: 106777 - RNA, 22 nt, Human
auggcuagcaccgcguugcugg

SEQ ID NO: 106778 - RNA, 22 nt, Human
auggcucagcccauggaagaaa

SEQ ID NO: 106779 - RNA, 22 nt, Human
auggcucagcgccuuucugugg

SEQ ID NO: 106780 - RNA, 22 nt, Human
auggcucauuuaucuugcagcc

SEQ ID NO: 106781 - RNA, 22 nt, Human
auggcuccaagauggagagcca

SEQ ID NO: 106782 - RNA, 22 nt, Human
auggcuccuucugugcaguuuu

SEQ ID NO: 106783 - RNA, 22 nt, Human
auggcucugcugggcaaagcaa

SEQ ID NO: 106784 - RNA, 20 nt, Human
auggcucuguuuggcaguga

SEQ ID NO: 106785 - RNA, 21 nt, Human
auggcugaugauauugaacau

SEQ ID NO: 106786 - RNA, 22 nt, Human
auggcugcaguccgugcccugg

SEQ ID NO: 106787 - RNA, 22 nt, Human
auggcugcugccuuccccugcu

SEQ ID NO: 106788 - RNA, 22 nt, Human
auggcugcuucaguaccaguuc

SEQ ID NO: 106789 - RNA, 22 nt, Human
auggcugcuuucccuuagcacc

SEQ ID NO: 106790 - RNA, 22 nt, Human
auggcuggaagagucgaagagu

SEQ ID NO: 106791 - RNA, 22 nt, Human
auggcuggaggccgggcuuccu

SEQ ID NO: 106792 - RNA, 22 nt, Human
auggcuggauaguugaagcucu

SEQ ID NO: 106793 - RNA, 22 nt, Human
auggcuggauuugauccauggg

SEQ ID NO: 106794 - RNA, 22 nt, Human
auggcugggcuuuuagucagau

SEQ ID NO: 106795 - RNA, 22 nt, Human
auggcugugagcaggcagcuuc

SEQ ID NO: 106796 - RNA, 22 nt, Human
auggcuguguuguuccucugaa

SEQ ID NO: 106797 - RNA, 22 nt, Human
auggcuguuccugggaguucua

SEQ ID NO: 106798 - RNA, 22 nt, Human
auggcuuaagaaugcuuuugug

SEQ ID NO: 106799 - RNA, 22 nt, Human
auggcuuaugguaaauauuucu

SEQ ID NO: 106800 - RNA, 22 nt, Human
auggcuucucgcuggcaccugu

SEQ ID NO: 106801 - RNA, 22 nt, Human
auggcuugcagagaaaagaggu

SEQ ID NO: 106802 - RNA, 22 nt, Human
auggcuuggcaccaucuccuug

SEQ ID NO: 106803 - RNA, 22 nt, Human
auggcuuucagauuucuauguu

SEQ ID NO: 106804 - RNA, 22 nt, Human
auggcuuucuguguuuccguag

SEQ ID NO: 106805 - RNA, 22 nt, Human
auggcuuugaaguucagcuuuu

SEQ ID NO: 106806 - RNA, 22 nt, Human
auggcuuuguguucagagcuga

SEQ ID NO: 106807 - RNA, 22 nt, Human
auggcuuuugaugcuaagccaa

SEQ ID NO: 106808 - RNA, 19 nt, Human
augggaagcggccagcgga

SEQ ID NO: 106809 - RNA, 22 nt, Human
augggaagcugaccugcaugga

SEQ ID NO: 106810 - RNA, 22 nt, Human
augggaauauaauuuuagcaac

SEQ ID NO: 106811 - RNA, 22 nt, Human
augggacacacaaggaaguaaa

SEQ ID NO: 106812 - RNA, 22 nt, Human
augggacagguacuagaaaggg

SEQ ID NO: 106813 - RNA, 22 nt, Human
augggaggaaggaggcccuuga

SEQ ID NO: 106814 - RNA, 22 nt, Human
augggaggcaaagaucgcagaa

SEQ ID NO: 106815 - RNA, 22 nt, Human
augggaggcaggcucagaaccg

SEQ ID NO: 106816 - RNA, 22 nt, Human
augggaugcauggcuguggcca

SEQ ID NO: 106817 - RNA, 22 nt, Human
augggcagagcuggugggaggc

SEQ ID NO: 106818 - RNA, 22 nt, Human
augggcagcagcugccauucau

SEQ ID NO: 106819 - RNA, 22 nt, Human
augggcagcugcagcaguggug

SEQ ID NO: 106820 - RNA, 22 nt, Human
augggcaugcuucuaguugaaa

SEQ ID NO: 106821 - RNA, 22 nt, Human
augggccuugacacauggagug

SEQ ID NO: 106822 - RNA, 22 nt, Human
augggcugacaagacaugcaua

SEQ ID NO: 106823 - RNA, 22 nt, Human
augggcugaggaagcuccugag

SEQ ID NO: 106824 - RNA, 22 nt, Human
augggcugcuucuccagcaccu

SEQ ID NO: 106825 - RNA, 22 nt, Human
augggcuggggaagcucacucc

SEQ ID NO: 106826 - RNA, 20 nt, Human
augggcugguuaggaagugu

SEQ ID NO: 106827 - RNA, 22 nt, Human
augggcuguccuaguccagccc

SEQ ID NO: 106828 - RNA, 23 nt, Human
augggcuuagaaagcaaguggga

SEQ ID NO: 106829 - RNA, 22 nt, Human
auggggagagaagggcugagcu

SEQ ID NO: 106830 - RNA, 22 nt, Human
auggggagagccucugucccca

SEQ ID NO: 106831 - RNA, 22 nt, Human
auggggcuguucucugcccugc

SEQ ID NO: 106832 - RNA, 22 nt, Human
auggguaaggcugaaggaaagu

SEQ ID NO: 106833 - RNA, 22 nt, Human
auggguaaggguguuugguuag

SEQ ID NO: 106834 - RNA, 22 nt, Human
auggguagacugacaaagucaa

SEQ ID NO: 106835 - RNA, 22 nt, Human
augggugugaaaauggucaucu

SEQ ID NO: 106836 - RNA, 22 nt, Human
augguaaauuuuaccuuaugua

SEQ ID NO: 106837 - RNA, 22 nt, Human
augguacaaugauggauagugg

SEQ ID NO: 106838 - RNA, 22 nt, Human
augguacaauguguuuguuagg

SEQ ID NO: 106839 - RNA, 22 nt, Human
augguacaauuuucauuugugg

SEQ ID NO: 106840 - RNA, 22 nt, Human
auggucacagagcuuaauuaau

SEQ ID NO: 106841 - RNA, 22 nt, Human
auggucaguugcagcuaauguu

SEQ ID NO: 106842 - RNA, 23 nt, Human
augguccagccagcugcacagga

SEQ ID NO: 106843 - RNA, 22 nt, Human
augguccuuuuugccuggaugc

SEQ ID NO: 106844 - RNA, 22 nt, Human
auggucuguuaggagcuacuuu

SEQ ID NO: 106845 - RNA, 22 nt, Human
auggucuugugagaguaacagu

SEQ ID NO: 106846 - RNA, 22 nt, Human
augguggaaucggcgugaaugg

SEQ ID NO: 106847 - RNA, 22 nt, Human
augguggacgggagacaggacu

SEQ ID NO: 106848 - RNA, 22 nt, Human
augguggagguguauucuggau

SEQ ID NO: 106849 - RNA, 22 nt, Human
augguggugaagagcacaguga

SEQ ID NO: 106850 - RNA, 22 nt, Human
augguuaaauugguuauuuaug

SEQ ID NO: 106851 - RNA, 22 nt, Human
augguuauuacugcuguuccag

SEQ ID NO: 106852 - RNA, 22 nt, Human
augguucauauuaugcaucuga

SEQ ID NO: 106853 - RNA, 22 nt, Human
augguugaacuuaaagggaaug

SEQ ID NO: 106854 - RNA, 22 nt, Human
augguuuauaggacagcucugu

SEQ ID NO: 106855 - RNA, 22 nt, Human
augguuuuagaaucaggaaaaa

SEQ ID NO: 106856 - RNA, 22 nt, Human
augguuuuccucugcugcuuaa

SEQ ID NO: 106857 - RNA, 20 nt, Human
auguaaaagacagggaguag

SEQ ID NO: 106858 - RNA, 21 nt, Human
caggaaacugaggccaugggg

SEQ ID NO: 106859 - RNA, 22 nt, Human
caggaaacugugggcuuaaauc

SEQ ID NO: 106860 - RNA, 22 nt, Human
caggaaaggugugucaugaugg

SEQ ID NO: 106861 - RNA, 22 nt, Human
caggaaauaguucagucaaacu

SEQ ID NO: 106862 - RNA, 22 nt, Human
caggaaauauaggaaaaggaac

SEQ ID NO: 106863 - RNA, 22 nt, Human
caggaaauucuuuuguuugugc

SEQ ID NO: 106864 - RNA, 22 nt, Human
caggaaauuuauguucuacuua

SEQ ID NO: 106865 - RNA, 22 nt, Human
caggaacaaucuuacuacuauu

SEQ ID NO: 106866 - RNA, 22 nt, Human
caggaacacaaguucagggaug

SEQ ID NO: 106867 - RNA, 22 nt, Human
caggaacacaaugagucucaaa

SEQ ID NO: 106868 - RNA, 22 nt, Human
caggaacaugucuccaauuaga

SEQ ID NO: 106869 - RNA, 22 nt, Human
caggaacauuguagaauugaaa

SEQ ID NO: 106870 - RNA, 22 nt, Human
caggaacccaaugggccaggcc

SEQ ID NO: 106871 - RNA, 22 nt, Human
caggaaccuaaagagacauuac

SEQ ID NO: 106872 - RNA, 18 nt, Human
caggaaccucuccuuuuu

SEQ ID NO: 106873 - RNA, 22 nt, Human
caggaagaccagggcuguggcu

SEQ ID NO: 106874 - RNA, 14 nt, Human
caggaagacucagc

SEQ ID NO: 106875 - RNA, 22 nt, Human
caggaagagguggggcuaaagu

SEQ ID NO: 106876 - RNA, 22 nt, Human
caggaagauuguggaggugguu

SEQ ID NO: 106877 - RNA, 22 nt, Human
caggaagcaucuggcuagcuaa

SEQ ID NO: 106878 - RNA, 22 nt, Human
caggaagcuggucagauccugu

SEQ ID NO: 106879 - RNA, 22 nt, Human
caggaagcugugaaggagacgg

SEQ ID NO: 106880 - RNA, 22 nt, Human
caggaaggaaaggguguggaga

SEQ ID NO: 106881 - RNA, 22 nt, Human
caggaagggaaaauaguucggg

SEQ ID NO: 106882 - RNA, 19 nt, Human
caggaaggggcgaaucugg

SEQ ID NO: 106883 - RNA, 22 nt, Human
caggaagucgcagagcuggggg

SEQ ID NO: 106884 - RNA, 22 nt, Human
caggaagugcucgcugugggga

SEQ ID NO: 106885 - RNA, 22 nt, Human
caggaaguggcugggcuggguu

SEQ ID NO: 106886 - RNA, 22 nt, Human
caguaaaugaugauagugccuu

SEQ ID NO: 106887 - RNA, 22 nt, Human
caguaaaugcagauauagauac

SEQ ID NO: 106888 - RNA, 22 nt, Human
caguaaauuugagggaucuaau

SEQ ID NO: 106889 - RNA, 22 nt, Human
caguaacagugaucaccugugg

SEQ ID NO: 106890 - RNA, 22 nt, Human
caguaacaugucuguuaagaaa

SEQ ID NO: 106891 - RNA, 22 nt, Human
caguaaguauucgagucuccau

SEQ ID NO: 106892 - RNA, 22 nt, Human
caguaauagcagagucuuccau

SEQ ID NO: 106893 - RNA, 22 nt, Human
caguaauuccaagugcuuauac

SEQ ID NO: 106894 - RNA, 22 nt, Human
caguacauaaugcgcaaaaccg

SEQ ID NO: 106895 - RNA, 22 nt, Human
caguaccagucaccacauugau

SEQ ID NO: 106896 - RNA, 22 nt, Human
caguacugcuugugggagcaga

SEQ ID NO: 106897 - RNA, 22 nt, Human
caguacuucuuggaaacuggau

SEQ ID NO: 106898 - RNA, 22 nt, Human
caguacuugggaaugcugggga

SEQ ID NO: 106899 - RNA, 22 nt, Human
caguacuuguccucagguguua

SEQ ID NO: 106900 - RNA, 22 nt, Human
caguacuuuucuggcuuucuac

SEQ ID NO: 106901 - RNA, 22 nt, Human
caguagaagcuuguuuuucaga

SEQ ID NO: 106902 - RNA, 22 nt, Human
caguagauuugguaaacuagga

SEQ ID NO: 106903 - RNA, 22 nt, Human
caguagcacucugucagugaag

SEQ ID NO: 106904 - RNA, 22 nt, Human
caguagcaggcacucagcacgu

SEQ ID NO: 106905 - RNA, 22 nt, Human
caguagccuuauuuggaucauu

SEQ ID NO: 106906 - RNA, 22 nt, Human
caguaggaaggaugcagaaaaa

SEQ ID NO: 106907 - RNA, 22 nt, Human
caguaguaguuaaacuguguau

SEQ ID NO: 106908 - RNA, 22 nt, Human
caguagucuuuuuccuccuaga

SEQ ID NO: 106909 - RNA, 21 nt, Human
caguagugagguauuugccaa

SEQ ID NO: 106910 - RNA, 18 nt, Human
caguauaaccagcaacuc

SEQ ID NO: 106911 - RNA, 22 nt, Human
caguauaagagugaggaagggc

SEQ ID NO: 106912 - RNA, 22 nt, Human
caguauagaaaguuuuaaauug

SEQ ID NO: 106913 - RNA, 20 nt, Human
caguaucugaagccacacaa

SEQ ID NO: 106914 - RNA, 22 nt, Human
caguaugagaguugaaucaagg

SEQ ID NO: 106915 - RNA, 22 nt, Human
caguaugauugccaguucuauc

SEQ ID NO: 106916 - RNA, 22 nt, Human
caguaugcaguugaaaauaagc

SEQ ID NO: 106917 - RNA, 22 nt, Human
caguauguucuuccaggacaga

SEQ ID NO: 106918 - RNA, 22 nt, Human
caguauucaucuaaggagcuug

SEQ ID NO: 106919 - RNA, 22 nt, Human
caguauuuccucuucuuaacuu

SEQ ID NO: 106920 - RNA, 22 nt, Human
caguauuuguuacagcauuagc

SEQ ID NO: 106921 - RNA, 22 nt, Human
caguauuuucaggauuuggaag

SEQ ID NO: 106922 - RNA, 22 nt, Human
caguauuuuccuuguuaacuua

SEQ ID NO: 106923 - RNA, 22 nt, Human
cagucacauagguauacacaua

SEQ ID NO: 106924 - RNA, 22 nt, Human
cagucacauggaugauggauag

SEQ ID NO: 106925 - RNA, 22 nt, Human
cagucaccauagaauaaaacau

SEQ ID NO: 106926 - RNA, 22 nt, Human
cagucaccuugaggacucagac

SEQ ID NO: 106927 - RNA, 22 nt, Human
cagucagaggucuucuaaaaca

SEQ ID NO: 106928 - RNA, 22 nt, Human
cagucagagucacaguaauuug

SEQ ID NO: 106929 - RNA, 22 nt, Human
cagucaggggugggaucaaggc

SEQ ID NO: 106930 - RNA, 20 nt, Human
caguccaaucagaggccacc

SEQ ID NO: 106931 - RNA, 22 nt, Human
caguccagcccccugcuaaaag

SEQ ID NO: 106932 - RNA, 20 nt, Human
caguccaggcuagaaaacaa

SEQ ID NO: 106933 - RNA, 22 nt, Human
cagucccaaggaggaagcaguc

SEQ ID NO: 106934 - RNA, 22 nt, Human
cagucccagacccagaaggugg

SEQ ID NO: 106935 - RNA, 22 nt, Human
caguccucucugugucugcacc

SEQ ID NO: 106936 - RNA, 22 nt, Human
caguccugagccaaucaugaug

SEQ ID NO: 106937 - RNA, 21 nt, Human
caguccugcaaauaauucuuu

SEQ ID NO: 106938 - RNA, 20 nt, Human
caguccugccccuuggggac

SEQ ID NO: 106939 - RNA, 22 nt, Human
caguccugcuggccuucccugg

SEQ ID NO: 106940 - RNA, 22 nt, Human
caguccuggagcccuucuuggc

SEQ ID NO: 106941 - RNA, 22 nt, Human
caguccugggcaggucaggcca

SEQ ID NO: 106942 - RNA, 22 nt, Human
caguccuuaaggaaacauuugu

SEQ ID NO: 106943 - RNA, 22 nt, Human
caguccuucuccauuaaggcuc

SEQ ID NO: 106944 - RNA, 22 nt, Human
caguccuugauccaauaguggg

SEQ ID NO: 106945 - RNA, 22 nt, Human
caguccuugcuaugacccugag

SEQ ID NO: 106946 - RNA, 22 nt, Human
caguccuugcucaaagucuaca

SEQ ID NO: 106947 - RNA, 22 nt, Human
cagucuaacuucacagccugga

SEQ ID NO: 106948 - RNA, 22 nt, Human
cagucuaaguuaauuuccacaa

SEQ ID NO: 106949 - RNA, 22 nt, Human
cagucuaaucuguuacucauua

SEQ ID NO: 106950 - RNA, 22 nt, Human
cagucuagaugcuagaaaauau

SEQ ID NO: 106951 - RNA, 22 nt, Human
cagucucagaggugggaguggg

SEQ ID NO: 106952 - RNA, 22 nt, Human
cagucuccaaaucagucugaau

SEQ ID NO: 106953 - RNA, 23 nt, Human
cagucucuccccggacagcaaaa

SEQ ID NO: 106954 - RNA, 22 nt, Human
cagucucucugaaguauuaaga

SEQ ID NO: 106955 - RNA, 22 nt, Human
cagucucugccacuucuaagcu

SEQ ID NO: 106956 - RNA, 22 nt, Human
cagucucuggcagcugcuggcc

SEQ ID NO: 106957 - RNA, 22 nt, Human
cagucucuugcuucauuaguug

SEQ ID NO: 106958 - RNA, 22 nt, Human
cagucucuuuauccaccaagcc

SEQ ID NO: 106959 - RNA, 22 nt, Human
cagucugauguucgcaggugaa

SEQ ID NO: 106960 - RNA, 22 nt, Human
cagucuuaggagaaacuacaga

SEQ ID NO: 106961 - RNA, 22 nt, Human
cagugaaauaguggacaucaaa

SEQ ID NO: 106962 - RNA, 22 nt, Human
cagugagagagaacgcauucau

SEQ ID NO: 106963 - RNA, 22 nt, Human
cagugagcuccugucugucccu

SEQ ID NO: 106964 - RNA, 22 nt, Human
cagugaggaagcugucuggacc

SEQ ID NO: 106965 - RNA, 18 nt, Human
cagugaggaugaaggguu

SEQ ID NO: 106966 - RNA, 17 nt, Human
cagugaggccuuuccuc

SEQ ID NO: 106967 - RNA, 22 nt, Human
cagugagggcauucagugcugg

SEQ ID NO: 106968 - RNA, 22 nt, Human
cagugagguagacagcuuuuuc

SEQ ID NO: 106969 - RNA, 22 nt, Human
cagugaggugcccagccugccc

SEQ ID NO: 106970 - RNA, 22 nt, Human
cagugaguaaguagacagcuua

SEQ ID NO: 106971 - RNA, 22 nt, Human
cagugaguccaagauggcugaa

SEQ ID NO: 106972 - RNA, 22 nt, Human
cagugaguucaucaagacauga

SEQ ID NO: 106973 - RNA, 22 nt, Human
cagugauaggacagcuagaacu

SEQ ID NO: 106974 - RNA, 22 nt, Human
cagugaugaucauuguaacauc

SEQ ID NO: 106975 - RNA, 22 nt, Human
cagugauggauauggagaaguc

SEQ ID NO: 106976 - RNA, 22 nt, Human
cagugauucagacucaucauuu

SEQ ID NO: 106977 - RNA, 22 nt, Human
cagugauuuuaaacuauggaug

SEQ ID NO: 106978 - RNA, 22 nt, Human
cagugauuuucucagaacuuga

SEQ ID NO: 106979 - RNA, 22 nt, Human
cagugcaacagauucgagaagc

SEQ ID NO: 106980 - RNA, 22 nt, Human
cagugcaacguugugcauucaa

SEQ ID NO: 106981 - RNA, 22 nt, Human
cagugcaauguuaaauaggaaa

SEQ ID NO: 106982 - RNA, 22 nt, Human
cagugcacacaauccucugccg

SEQ ID NO: 106983 - RNA, 22 nt, Human
cagugcagaggugcaagcaugu

SEQ ID NO: 106984 - RNA, 23 nt, Human
cagugcagggcaacucagacucc

SEQ ID NO: 106985 - RNA, 21 nt, Human
cagugcagggguuagcgugua

SEQ ID NO: 106986 - RNA, 22 nt, Human
cagugcaguggcugagcuggag

SEQ ID NO: 106987 - RNA, 22 nt, Human
cagugcaguugguggcaggggu

SEQ ID NO: 106988 - RNA, 20 nt, Human
cagugcauugcuucugauuu

SEQ ID NO: 106989 - RNA, 22 nt, Human
cagugccaggagacaagaucag

SEQ ID NO: 106990 - RNA, 22 nt, Human
cagugccauauugaaagacauu

SEQ ID NO: 106991 - RNA, 22 nt, Human
auuauuguugcggcuguuaccg

SEQ ID NO: 106992 - RNA, 22 nt, Human
auuauuuagaaaucgauugaaa

SEQ ID NO: 106993 - RNA, 22 nt, Human
auuauuucagucagacacuggc

SEQ ID NO: 106994 - RNA, 22 nt, Human
auuauuuccuugcuuugaggaa

SEQ ID NO: 106995 - RNA, 22 nt, Human
auugacuuaaaggcucugguua

SEQ ID NO: 106996 - RNA, 22 nt, Human
auugacuuucccuucuccucau

SEQ ID NO: 106997 - RNA, 22 nt, Human
auucucaguucacuaguuucuu

SEQ ID NO: 106998 - RNA, 22 nt, Human
auucuccagcucacuguccaua

SEQ ID NO: 106999 - RNA, 22 nt, Human
auucuccaucaccacuggcacu

SEQ ID NO: 107000 - RNA, 19 nt, Human
auucucccuagaauuuuga

SEQ ID NO: 107001 - RNA, 22 nt, Human
auucucugaagucaauggaaau

SEQ ID NO: 107002 - RNA, 22 nt, Human
auucucugaugcagguggaaga

SEQ ID NO: 107003 - RNA, 22 nt, Human
auucucuggaagaagauaaaaa

SEQ ID NO: 107004 - RNA, 22 nt, Human
auucucuggcuaaaaccugaag

SEQ ID NO: 107005 - RNA, 22 nt, Human
auucucuggguuccaguaaaug

SEQ ID NO: 107006 - RNA, 22 nt, Human
auucucuggucauugaguauaa

SEQ ID NO: 107007 - RNA, 19 nt, Human
auucucugguuugcuggcu

SEQ ID NO: 107008 - RNA, 21 nt, Human
auucucugugaugggauuagg

SEQ ID NO: 107009 - RNA, 22 nt, Human
auucucugugcagauuuaagac

SEQ ID NO: 107010 - RNA, 22 nt, Human
auucucuguggugaugcuggug

SEQ ID NO: 107011 - RNA, 22 nt, Human
auucucuucugaugucuugcca

SEQ ID NO: 107012 - RNA, 22 nt, Human
auucugaauucugagccuuuca

SEQ ID NO: 107013 - RNA, 22 nt, Human
auucugagacaauugccgucag

SEQ ID NO: 107014 - RNA, 22 nt, Human
auucugaguacaacaagauguu

SEQ ID NO: 107015 - RNA, 23 nt, Human
auucugagucagaaaguuugggg

SEQ ID NO: 107016 - RNA, 22 nt, Human
auucugaugcuucacaaaggua

SEQ ID NO: 107017 - RNA, 22 nt, Human
auucugcaacuguuguuggugg

SEQ ID NO: 107018 - RNA, 22 nt, Human
auucugcacauccaagaacagg

SEQ ID NO: 107019 - RNA, 22 nt, Human
auucugcacuuccuuugcuucc

SEQ ID NO: 107020 - RNA, 22 nt, Human
auucugcauaauuuccuggcag

SEQ ID NO: 107021 - RNA, 22 nt, Human
auucugcauugcucacaaagau

SEQ ID NO: 107022 - RNA, 22 nt, Human
auucugcuaguuaauaucucuc

SEQ ID NO: 107023 - RNA, 22 nt, Human
auucugcugccuaguuuaugaa

SEQ ID NO: 107024 - RNA, 22 nt, Human
auucuggaaagcuauucucucu

SEQ ID NO: 107025 - RNA, 22 nt, Human
auucuggacaaggcaagcuccu

SEQ ID NO: 107026 - RNA, 22 nt, Human
auucuggauuaucaguccacca

SEQ ID NO: 107027 - RNA, 22 nt, Human
auucugggccccaucccagacc

SEQ ID NO: 107028 - RNA, 22 nt, Human
auucugggcgccuauggcugca

SEQ ID NO: 107029 - RNA, 22 nt, Human
auucuggguucaugagugagcu

SEQ ID NO: 107030 - RNA, 22 nt, Human
auucuggguuuuugucuucugu

SEQ ID NO: 107031 - RNA, 22 nt, Human
auucuguauggaaaagcacuau

SEQ ID NO: 107032 - RNA, 22 nt, Human
auucugugauaguugauccuua

SEQ ID NO: 107033 - RNA, 22 nt, Human
auucuuauuauaguaaaacagu

SEQ ID NO: 107034 - RNA, 22 nt, Human
auucuucacaaauauauagaag

SEQ ID NO: 107035 - RNA, 22 nt, Human
auucuucacuguuucagaauga

SEQ ID NO: 107036 - RNA, 22 nt, Human
auucuucagaauaucuggcacu

SEQ ID NO: 107037 - RNA, 22 nt, Human
auucuucauuguugauucaugu

SEQ ID NO: 107038 - RNA, 22 nt, Human
auucuucuugagucuuggacuc

SEQ ID NO: 107039 - RNA, 22 nt, Human
auucuuggagcagucaaagaag

SEQ ID NO: 107040 - RNA, 22 nt, Human
auucuuggcaaggagauuuaaa

SEQ ID NO: 107041 - RNA, 22 nt, Human
auucuuuagccagcagguauau

SEQ ID NO: 107042 - RNA, 22 nt, Human
auucuuucauauaaaggcucag

SEQ ID NO: 107043 - RNA, 22 nt, Human
auucuuuccagacacugauugc

SEQ ID NO: 107044 - RNA, 22 nt, Human
auucuuuuguccuagcuugaua

SEQ ID NO: 107045 - RNA, 22 nt, Human
auugaaacaaguugcuuucuau

SEQ ID NO: 107046 - RNA, 22 nt, Human
auugaaagagaauguagcucuu

SEQ ID NO: 107047 - RNA, 22 nt, Human
auugaaagauaggcuacugugg

SEQ ID NO: 107048 - RNA, 22 nt, Human
auugaaagauauacuguucuca

SEQ ID NO: 107049 - RNA, 22 nt, Human
auugaaaguccuaucuaaggga

SEQ ID NO: 107050 - RNA, 20 nt, Human
auugaaauuuuucugagauu

SEQ ID NO: 107051 - RNA, 23 nt, Human
auugaacagagagaaaaacaucc

SEQ ID NO: 107052 - RNA, 22 nt, Human
auugaagaaacccaaauaaugg

SEQ ID NO: 107053 - RNA, 22 nt, Human
auugaagaguugauuauuaucu

SEQ ID NO: 107054 - RNA, 22 nt, Human
auugaagauuaaaugcuuccuu

SEQ ID NO: 107055 - RNA, 22 nt, Human
auugaagcauggagaugaggca

SEQ ID NO: 107056 - RNA, 22 nt, Human
auugaaguccuaaucuccagua

SEQ ID NO: 107057 - RNA, 22 nt, Human
auugaauagaugcauuauacua

SEQ ID NO: 107058 - RNA, 22 nt, Human
auugacaaaaacaggugguuga

SEQ ID NO: 107059 - RNA, 22 nt, Human
auugacaagacaauggcucuua

SEQ ID NO: 107060 - RNA, 22 nt, Human
auugacaguguuaaaguugccu

SEQ ID NO: 107061 - RNA, 23 nt, Human
auugaccagcugucucauuuuca

SEQ ID NO: 107062 - RNA, 22 nt, Human
auugacuagagucacaguugca

SEQ ID NO: 107063 - RNA, 22 nt, Human
auugacuuccauagcuaccugg

SEQ ID NO: 107064 - RNA, 22 nt, Human
auugagaaaauucgagcaaguu

SEQ ID NO: 107065 - RNA, 22 nt, Human
auugagaaggagauuggcaucu

SEQ ID NO: 107066 - RNA, 22 nt, Human
auugagaaugaagggacauuuu

SEQ ID NO: 107067 - RNA, 22 nt, Human
auugagaauugugaguuuggag

SEQ ID NO: 107068 - RNA, 22 nt, Human
auugagcacaugcuaugugcca

SEQ ID NO: 107069 - RNA, 22 nt, Human
auugagcaccuacuaugugcua

SEQ ID NO: 107070 - RNA, 22 nt, Human
auugagcaccuacuuugugcca

SEQ ID NO: 107071 - RNA, 22 nt, Human
auugagcaggcaaaguaucaua

SEQ ID NO: 107072 - RNA, 22 nt, Human
auugaggagcagagauggggua

SEQ ID NO: 107073 - RNA, 22 nt, Human
auugaggcagcauaguucaggg

SEQ ID NO: 107074 - RNA, 22 nt, Human
auugaguaauaauugaucuugg

SEQ ID NO: 107075 - RNA, 22 nt, Human
auugaguauuguaaauaaaaca

SEQ ID NO: 107076 - RNA, 22 nt, Human
auugauaaauugcaauggggcu

SEQ ID NO: 107077 - RNA, 22 nt, Human
auugauaucaguuugcugauug

SEQ ID NO: 107078 - RNA, 22 nt, Human
auugaucaugcagaugcuucac

SEQ ID NO: 107079 - RNA, 22 nt, Human
auugaugagcauuacucucuaa

SEQ ID NO: 107080 - RNA, 23 nt, Human
auugauucccucuuggaagggau

SEQ ID NO: 107081 - RNA, 22 nt, Human
auugauucuguaagucaacaau

SEQ ID NO: 107082 - RNA, 22 nt, Human
auugcaaagcguagacucuaaa

SEQ ID NO: 107083 - RNA, 22 nt, Human
auugcaaauaaugcgagccagu

SEQ ID NO: 107084 - RNA, 22 nt, Human
auugcaaaugguuuggucaucu

SEQ ID NO: 107085 - RNA, 22 nt, Human
auugcaagugcuagcuaaaaua

SEQ ID NO: 107086 - RNA, 22 nt, Human
auugcaaucuggugaaaacagu

SEQ ID NO: 107087 - RNA, 22 nt, Human
auugcacaaacacagucagacu

SEQ ID NO: 107088 - RNA, 22 nt, Human
auugcagauucuucucagggag

SEQ ID NO: 107089 - RNA, 19 nt, Human
auugcagcuauagacugcc

SEQ ID NO: 107090 - RNA, 22 nt, Human
auugcagcucagggugaugacu

SEQ ID NO: 107091 - RNA, 22 nt, Human
auugcaggcaaagugcuguguc

SEQ ID NO: 107092 - RNA, 22 nt, Human
auugcaguguguguuccaugag

SEQ ID NO: 107093 - RNA, 22 nt, Human
auugcauucauugacauaugag

SEQ ID NO: 107094 - RNA, 22 nt, Human
auugcauuguuugaggcagagg

SEQ ID NO: 107095 - RNA, 22 nt, Human
auugccaccuguugcuauggag

SEQ ID NO: 107096 - RNA, 23 nt, Human
auugccagacggccccugcucgc

SEQ ID NO: 107097 - RNA, 22 nt, Human
auugccaggaggguugagaaua

SEQ ID NO: 107098 - RNA, 22 nt, Human
auugccaugcucauagggucga

SEQ ID NO: 107099 - RNA, 22 nt, Human
auugccuugucagauuucuuuu

SEQ ID NO: 107100 - RNA, 22 nt, Human
auugcucagcacaagcagcaga

SEQ ID NO: 107101 - RNA, 22 nt, Human
auugcugacaccaaguaguagc

SEQ ID NO: 107102 - RNA, 22 nt, Human
auugcugacuuuaauauuauau

SEQ ID NO: 107103 - RNA, 22 nt, Human
auugcuggaugagcucuuggau

SEQ ID NO: 107104 - RNA, 22 nt, Human
cauccuucucaaagagugcaug

SEQ ID NO: 107105 - RNA, 22 nt, Human
caucuaaauuugacuccaagga

SEQ ID NO: 107106 - RNA, 22 nt, Human
caucuaauaccucauuuaaucu

SEQ ID NO: 107107 - RNA, 22 nt, Human
caucuacuuuaaggauucuggg

SEQ ID NO: 107108 - RNA, 22 nt, Human
caucucauccugcccuaaaaca

SEQ ID NO: 107109 - RNA, 22 nt, Human
caucucaugggcaugccaagcu

SEQ ID NO: 107110 - RNA, 22 nt, Human
caucucccacuuccuugggggu

SEQ ID NO: 107111 - RNA, 19 nt, Human
caucucugcaaggagcugc

SEQ ID NO: 107112 - RNA, 22 nt, Human
caucucuugccaaaguuugacc

SEQ ID NO: 107113 - RNA, 22 nt, Human
caucugaaaucugccuacaagc

SEQ ID NO: 107114 - RNA, 22 nt, Human
auugcacaucugcacuacagcc

SEQ ID NO: 107115 - RNA, 22 nt, Human
auugcacuccagcccugcugac

SEQ ID NO: 107116 - RNA, 22 nt, Human
auugcagcuggucaggguaauu

SEQ ID NO: 107117 - RNA, 22 nt, Human
auugcagggacucaauaagaau

SEQ ID NO: 107118 - RNA, 22 nt, Human
auugcagguuguagcccauuag

SEQ ID NO: 107119 - RNA, 22 nt, Human
auugcagugaugguugcauaau

SEQ ID NO: 107120 - RNA, 22 nt, Human
auugcauugcagcuagauuuug

SEQ ID NO: 107121 - RNA, 22 nt, Human
auugcugaaaugaaaggauaug

SEQ ID NO: 107122 - RNA, 22 nt, Human
auugcugaaucuaaggcuucca

SEQ ID NO: 107123 - RNA, 22 nt, Human
auugcugacucaauaauugaag

SEQ ID NO: 107124 - RNA, 22 nt, Human
auugcuggcugccaucuugccc

SEQ ID NO: 107125 - RNA, 22 nt, Human
auugcugguagucagugucccu

SEQ ID NO: 107126 - RNA, 22 nt, Human
auugcuuacagcuauuucugua

SEQ ID NO: 107127 - RNA, 22 nt, Human
auugcuuaucuaucuuuaaguc

SEQ ID NO: 107128 - RNA, 22 nt, Human
auugcuucaacuguucaauggg

SEQ ID NO: 107129 - RNA, 22 nt, Human
auugcuuuguacaugccuagca

SEQ ID NO: 107130 - RNA, 22 nt, Human
auugcuuuuaagcaccaccuaa

SEQ ID NO: 107131 - RNA, 22 nt, Human
auugcuuuucagacaaugaggc

SEQ ID NO: 107132 - RNA, 22 nt, Human
auugcuuuugagcuagaauuuu

SEQ ID NO: 107133 - RNA, 18 nt, Human
auugcuuuuguaccaacc

SEQ ID NO: 107134 - RNA, 22 nt, Human
auuggaaaauaugguuucugga

SEQ ID NO: 107135 - RNA, 22 nt, Human
auuggaaaugcuacaaguuaga

SEQ ID NO: 107136 - RNA, 22 nt, Human
auuggagaagaacaugaauuag

SEQ ID NO: 107137 - RNA, 22 nt, Human
auuggcaggaaccgaggagggg

SEQ ID NO: 107138 - RNA, 22 nt, Human
auuggccauuugcauguauuau

SEQ ID NO: 107139 - RNA, 22 nt, Human
auuggcuauugagugugugcug

SEQ ID NO: 107140 - RNA, 22 nt, Human
auuggcuuugauaucuaaaggg

SEQ ID NO: 107141 - RNA, 22 nt, Human
auugggaagauuuagauccacu

SEQ ID NO: 107142 - RNA, 22 nt, Human
auugggaugccggcugauaaga

SEQ ID NO: 107143 - RNA, 22 nt, Human
auugggcuggauuaggacuguu

SEQ ID NO: 107144 - RNA, 22 nt, Human
auugguaagcaagauggcaaua

SEQ ID NO: 107145 - RNA, 22 nt, Human
auuggucagaguaaauuuauuu

SEQ ID NO: 107146 - RNA, 22 nt, Human
auuggucuaaaguuaagaagau

SEQ ID NO: 107147 - RNA, 22 nt, Human
auuggucuaggcuuuaaaaaga

SEQ ID NO: 107148 - RNA, 22 nt, Human
auuggugcaauuaugagggugu

SEQ ID NO: 107149 - RNA, 22 nt, Human
auuggugcauuuuacaaaacuc

SEQ ID NO: 107150 - RNA, 22 nt, Human
auugguuaacucugugugucaa

SEQ ID NO: 107151 - RNA, 22 nt, Human
auugguuaagacgcaucaugcu

SEQ ID NO: 107152 - RNA, 22 nt, Human
auugguuaccacuuuaaaucuu

SEQ ID NO: 107153 - RNA, 22 nt, Human
auugguuuuguuaucuccauuc

SEQ ID NO: 107154 - RNA, 22 nt, Human
auuguaacaggaucccuguggc

SEQ ID NO: 107155 - RNA, 22 nt, Human
auuguaacauguucagaucacu

SEQ ID NO: 107156 - RNA, 22 nt, Human
auuguacaaaaaaguagaccuu

SEQ ID NO: 107157 - RNA, 22 nt, Human
auuguacaaugcugagguuugg

SEQ ID NO: 107158 - RNA, 22 nt, Human
auuguacagacaugggaaacaa

SEQ ID NO: 107159 - RNA, 22 nt, Human
auuguacagaugaaccucacuc

SEQ ID NO: 107160 - RNA, 22 nt, Human
auuguacagguuggaggaagug

SEQ ID NO: 107161 - RNA, 22 nt, Human
auuguacucuagccucugggca

SEQ ID NO: 107162 - RNA, 22 nt, Human
auuguauaagucuauuuacaau

SEQ ID NO: 107163 - RNA, 22 nt, Human
auuguauuauaauuaggccaaa

SEQ ID NO: 107164 - RNA, 18 nt, Human
auugucagaagucaugug

SEQ ID NO: 107165 - RNA, 22 nt, Human
auugucagcucgaaaugcauca

SEQ ID NO: 107166 - RNA, 22 nt, Human
auugucagugggauuugucaac

SEQ ID NO: 107167 - RNA, 22 nt, Human
auugucauuggcuucuaugucu

SEQ ID NO: 107168 - RNA, 22 nt, Human
auugucuuaaacaaauguguuu

SEQ ID NO: 107169 - RNA, 22 nt, Human
auugucuucugucuuauaguuc

SEQ ID NO: 107170 - RNA, 23 nt, Human
auugugagauuacuaucacacug

SEQ ID NO: 107171 - RNA, 22 nt, Human
auugugcaauguuuuacaauuu

SEQ ID NO: 107172 - RNA, 22 nt, Human
auugugcuuugcaucuuguucc

SEQ ID NO: 107173 - RNA, 22 nt, Human
auuguggugucaguuauaggca

SEQ ID NO: 107174 - RNA, 22 nt, Human
auuguguaauuuucagcucaua

SEQ ID NO: 107175 - RNA, 22 nt, Human
auuguguggugaaugaucagcu

SEQ ID NO: 107176 - RNA, 22 nt, Human
auuguuaaacugaagcauuacu

SEQ ID NO: 107177 - RNA, 22 nt, Human
auuguucaaagugcuuugcaug

SEQ ID NO: 107178 - RNA, 22 nt, Human
auuguucauuguacaccuagua

SEQ ID NO: 107179 - RNA, 22 nt, Human
auuguuccuggaaaagaacagg

SEQ ID NO: 107180 - RNA, 22 nt, Human
auuguucuguagugacauguag

SEQ ID NO: 107181 - RNA, 22 nt, Human
auuguugaggagacucuucaau

SEQ ID NO: 107182 - RNA, 22 nt, Human
auuguugagugcuucagcugua

SEQ ID NO: 107183 - RNA, 22 nt, Human
auuguuggguaguuuguucagc

SEQ ID NO: 107184 - RNA, 22 nt, Human
auuguuuacacuaacuucauaa

SEQ ID NO: 107185 - RNA, 22 nt, Human
auuguuuuauuaaaugagcccu

SEQ ID NO: 107186 - RNA, 16 nt, Human
auuguuuucaauuaga

SEQ ID NO: 107187 - RNA, 22 nt, Human
auuguuuuguagaaugacccuu

SEQ ID NO: 107188 - RNA, 22 nt, Human
auuguuuuguuucccagugacu

SEQ ID NO: 107189 - RNA, 22 nt, Human
auuuaagacugacuucaccagu

SEQ ID NO: 107190 - RNA, 22 nt, Human
auuuaagauugcguauucaugu

SEQ ID NO: 107191 - RNA, 22 nt, Human
auuuaauaccacuuggugcuuu

SEQ ID NO: 107192 - RNA, 22 nt, Human
auuuaaugucgagcuauuguag

SEQ ID NO: 107193 - RNA, 22 nt, Human
auuuaauuuacauuugacagag

SEQ ID NO: 107194 - RNA, 21 nt, Human
auuuacaaaacagucccuucc

SEQ ID NO: 107195 - RNA, 22 nt, Human
auuuacacuugguuuacuagag

SEQ ID NO: 107196 - RNA, 22 nt, Human
auuuacagaaacuuaaucauag

SEQ ID NO: 107197 - RNA, 22 nt, Human
auuuacagaagcauguaauagc

SEQ ID NO: 107198 - RNA, 22 nt, Human
auuuacagacguggauuagugc

SEQ ID NO: 107199 - RNA, 23 nt, Human
auuuacagcugugugagcaaguu

SEQ ID NO: 107200 - RNA, 22 nt, Human
auuuacaguuuagcauuucaag

SEQ ID NO: 107201 - RNA, 17 nt, Human
auuuacauugucaccga

SEQ ID NO: 107202 - RNA, 22 nt, Human
auuuacauuuauuugagaaggu

SEQ ID NO: 107203 - RNA, 22 nt, Human
auuuacugcuugacacauuggu

SEQ ID NO: 107204 - RNA, 22 nt, Human
auuuacuuugcugagauccauc

SEQ ID NO: 107205 - RNA, 22 nt, Human
auuuagacaacaagccuucucc

SEQ ID NO: 107206 - RNA, 22 nt, Human
auuuagacacaaaagugccaug

SEQ ID NO: 107207 - RNA, 22 nt, Human
auuuagaguguucacucugagc

SEQ ID NO: 107208 - RNA, 22 nt, Human
auuuagcaagcaggcaaauuca

SEQ ID NO: 107209 - RNA, 22 nt, Human
auuuagcaccuccaucucaaca

SEQ ID NO: 107210 - RNA, 22 nt, Human
auuuagcaguccuccucacaau

SEQ ID NO: 107211 - RNA, 22 nt, Human
auuuagccucauuuuugacaua

SEQ ID NO: 107212 - RNA, 22 nt, Human
auuuaguaaguacuuguugaau

SEQ ID NO: 107213 - RNA, 22 nt, Human
caaaugaagaaccuucucaccu

SEQ ID NO: 107214 - RNA, 22 nt, Human
caaaugaagagggcaacuucug

SEQ ID NO: 107215 - RNA, 22 nt, Human
caaaugaagggagcugaagucu

SEQ ID NO: 107216 - RNA, 22 nt, Human
caaaugcaaaauauaacccugu

SEQ ID NO: 107217 - RNA, 22 nt, Human
caaaugcagucccuuuguugcu

SEQ ID NO: 107218 - RNA, 22 nt, Human
caaaugcuaacuucuuuccaaa

SEQ ID NO: 107219 - RNA, 22 nt, Human
caaauggauacaggcaaacauu

SEQ ID NO: 107220 - RNA, 22 nt, Human
caaauggucauuucucuuuugu

SEQ ID NO: 107221 - RNA, 22 nt, Human
caaauguaauggcagguuuugc

SEQ ID NO: 107222 - RNA, 22 nt, Human
caaauguauucucacuucaggg

SEQ ID NO: 107223 - RNA, 22 nt, Human
caaauguuugguggcauuuugu

SEQ ID NO: 107224 - RNA, 22 nt, Human
caaauuacccucaacaucuaga

SEQ ID NO: 107225 - RNA, 22 nt, Human
caaauuagagguuuguuuugau

SEQ ID NO: 107226 - RNA, 22 nt, Human
caaauuccucagaaucagaaaa

SEQ ID NO: 107227 - RNA, 22 nt, Human
caaauugaucugucuuuaugaa

SEQ ID NO: 107228 - RNA, 22 nt, Human
caaauugcuugucuguagugga

SEQ ID NO: 107229 - RNA, 22 nt, Human
caaauuuaaguuagaaagcaau

SEQ ID NO: 107230 - RNA, 22 nt, Human
caacaaguguucguaaagugcc

SEQ ID NO: 107231 - RNA, 22 nt, Human
caacaauaugcugaguuuuuca

SEQ ID NO: 107232 - RNA, 22 nt, Human
caacacagguucugcaaaggaa

SEQ ID NO: 107233 - RNA, 22 nt, Human
caacacauugaagcuaugauga

SEQ ID NO: 107234 - RNA, 22 nt, Human
caacagagagaccagaaacagg

SEQ ID NO: 107235 - RNA, 22 nt, Human
caacagaggaguggccugaucc

SEQ ID NO: 107236 - RNA, 22 nt, Human
caacagucucuauagcuccuug

SEQ ID NO: 107237 - RNA, 22 nt, Human
caacaguguugcaaucugaaaa

SEQ ID NO: 107238 - RNA, 22 nt, Human
caacaguucaguugagcucaac

SEQ ID NO: 107239 - RNA, 22 nt, Human
caacaguuccuccauccucucu

SEQ ID NO: 107240 - RNA, 22 nt, Human
caacaguucucauagcagauuc

SEQ ID NO: 107241 - RNA, 22 nt, Human
caacauauaauauuugaguucu

SEQ ID NO: 107242 - RNA, 22 nt, Human
caacauauauaaggauuuacua

SEQ ID NO: 107243 - RNA, 22 nt, Human
caacauauuuuccaagagugaa

SEQ ID NO: 107244 - RNA, 22 nt, Human
caacaucuguaucauuaguaca

SEQ ID NO: 107245 - RNA, 22 nt, Human
caacauuucaaggucuuuagga

SEQ ID NO: 107246 - RNA, 22 nt, Human
caacauuugaguaaagaaaugg

SEQ ID NO: 107247 - RNA, 22 nt, Human
caacauuugugaugagcaaacu

SEQ ID NO: 107248 - RNA, 22 nt, Human
caaccugaauucugcuuuggca

SEQ ID NO: 107249 - RNA, 22 nt, Human
caaauucaaugaacauguuuaa

SEQ ID NO: 107250 - RNA, 18 nt, Human
caaauucagugcuggaag

SEQ ID NO: 107251 - RNA, 22 nt, Human
caaauucucacccuguuugauu

SEQ ID NO: 107252 - RNA, 22 nt, Human
caacaacaugggauucauuucu

SEQ ID NO: 107253 - RNA, 22 nt, Human
caacacugauuauggcugagcu

SEQ ID NO: 107254 - RNA, 22 nt, Human
caacagaaaucaauuuucccau

SEQ ID NO: 107255 - RNA, 22 nt, Human
caacagaagguguacuacugaa

SEQ ID NO: 107256 - RNA, 22 nt, Human
caacagaccuggauucaaaaac

SEQ ID NO: 107257 - RNA, 22 nt, Human
caacagagcaguugaucaggaa

SEQ ID NO: 107258 - RNA, 20 nt, Human
caacagaggggucuggagua

SEQ ID NO: 107259 - RNA, 22 nt, Human
caacagcucagacacgggaccu

SEQ ID NO: 107260 - RNA, 22 nt, Human
caacaggcuuuauguuuaaagu

SEQ ID NO: 107261 - RNA, 22 nt, Human
caacaguauagcuuuugacugc

SEQ ID NO: 107262 - RNA, 22 nt, Human
caacagugauucugcaugagga

SEQ ID NO: 107263 - RNA, 22 nt, Human
caacaguuuauaguguuaucuu

SEQ ID NO: 107264 - RNA, 22 nt, Human
caacauaugcuuucaugaggua

SEQ ID NO: 107265 - RNA, 20 nt, Human
caacaugagcaagugaacug

SEQ ID NO: 107266 - RNA, 22 nt, Human
caacauguguuagacaauagac

SEQ ID NO: 107267 - RNA, 22 nt, Human
caacauuauauagccacaugcc

SEQ ID NO: 107268 - RNA, 22 nt, Human
caacauucaaccaacauuuaug

SEQ ID NO: 107269 - RNA, 22 nt, Human
caaccaguagcugaguucaaaa

SEQ ID NO: 107270 - RNA, 22 nt, Human
caacccaagguuaguuggucuu

SEQ ID NO: 107271 - RNA, 22 nt, Human
caaccccacuacacguuggaga

SEQ ID NO: 107272 - RNA, 22 nt, Human
caaccucauagaaagaaaaugu

SEQ ID NO: 107273 - RNA, 22 nt, Human
caaccugagacuccaggcaccu

SEQ ID NO: 107274 - RNA, 22 nt, Human
caacuacauccacacuuuguua

SEQ ID NO: 107275 - RNA, 22 nt, Human
caacugaucuauuuccuaacug

SEQ ID NO: 107276 - RNA, 22 nt, Human
caacugguggucaaccuucugu

SEQ ID NO: 107277 - RNA, 22 nt, Human
caacugugaauuuuaugauacc

SEQ ID NO: 107278 - RNA, 22 nt, Human
caacuucacugugccucuaguu

SEQ ID NO: 107279 - RNA, 22 nt, Human
caacuucuuggcuuccuaaugg

SEQ ID NO: 107280 - RNA, 22 nt, Human
caacuuggcucucuggcuaucc

SEQ ID NO: 107281 - RNA, 22 nt, Human
caacuuuagaccccaaguagcu

SEQ ID NO: 107282 - RNA, 22 nt, Human
caagaacaguuugccaaauugg

SEQ ID NO: 107283 - RNA, 22 nt, Human
caagaaccgcaauuacuuuugc

SEQ ID NO: 107284 - RNA, 22 nt, Human
caagaagucauuuagccucuca

SEQ ID NO: 107285 - RNA, 22 nt, Human
caagaauaaaauacauguugau

SEQ ID NO: 107286 - RNA, 22 nt, Human
caagaauauaaauacuuucaaa

SEQ ID NO: 107287 - RNA, 22 nt, Human
caagaauauauauggaguggag

SEQ ID NO: 107288 - RNA, 22 nt, Human
caagaaucagaccugucagggu

SEQ ID NO: 107289 - RNA, 22 nt, Human
caagaaugaauucaaugugugg

SEQ ID NO: 107290 - RNA, 22 nt, Human
caagaccucaaaaugagagggg

SEQ ID NO: 107291 - RNA, 22 nt, Human
caagacuuagagcaucuugaaa

SEQ ID NO: 107292 - RNA, 22 nt, Human
caagagacgggcaaggcaagag

SEQ ID NO: 107293 - RNA, 22 nt, Human
caagagacuuauguggaaaccu

SEQ ID NO: 107294 - RNA, 22 nt, Human
caagagcuagacuuugucagga

SEQ ID NO: 107295 - RNA, 22 nt, Human
caagagcugcaaauagcgugac

SEQ ID NO: 107296 - RNA, 22 nt, Human
caagagcuggagaggcagucua

SEQ ID NO: 107297 - RNA, 22 nt, Human
caagagcuggguggcaagcuag

SEQ ID NO: 107298 - RNA, 22 nt, Human
caagaggagcaggcaggugugc

SEQ ID NO: 107299 - RNA, 22 nt, Human
caagaguuuaaaucaauggcca

SEQ ID NO: 107300 - RNA, 22 nt, Human
caagauaaaaucagcauuccaa

SEQ ID NO: 107301 - RNA, 22 nt, Human
caagauaagaucauuuacacua

SEQ ID NO: 107302 - RNA, 22 nt, Human
caagauaauuuauucugaguuu

SEQ ID NO: 107303 - RNA, 22 nt, Human
caagauaucaaugacauaguau

SEQ ID NO: 107304 - RNA, 22 nt, Human
caagauauguguuguuagcucu

SEQ ID NO: 107305 - RNA, 22 nt, Human
caagaucaaucaauacuccuua

SEQ ID NO: 107306 - RNA, 22 nt, Human
caagaucagggugccagaaugg

SEQ ID NO: 107307 - RNA, 22 nt, Human
caagaucuuccucaauagaccu

SEQ ID NO: 107308 - RNA, 22 nt, Human
caagaugacaaggcuggaggcu

SEQ ID NO: 107309 - RNA, 22 nt, Human
caagauggacauaaggagagaa

SEQ ID NO: 107310 - RNA, 22 nt, Human
caagauggagaagcagcaaggg

SEQ ID NO: 107311 - RNA, 22 nt, Human
caagaugggcaccccagcaccu

SEQ ID NO: 107312 - RNA, 22 nt, Human
caagauguuaaaaccacccuug

SEQ ID NO: 107313 - RNA, 22 nt, Human
caagauuaucuucuucuuguua

SEQ ID NO: 107314 - RNA, 22 nt, Human
caagauuuagcucccuuaucuc

SEQ ID NO: 107315 - RNA, 22 nt, Human
caagauuugggggcacggaauc

SEQ ID NO: 107316 - RNA, 22 nt, Human
caagcaacgacuuucaagcugu

SEQ ID NO: 107317 - RNA, 22 nt, Human
caagcaauauuuuagaaaggua

SEQ ID NO: 107318 - RNA, 22 nt, Human
caagcaaugcuauacucauuau

SEQ ID NO: 107319 - RNA, 22 nt, Human
caagcagggagcaucaagggag

SEQ ID NO: 107320 - RNA, 22 nt, Human
caagcagguccugaaucugguc

SEQ ID NO: 107321 - RNA, 22 nt, Human
caagcauuuauuauaauuauca

SEQ ID NO: 107322 - RNA, 22 nt, Human
caauucuuccuguuggauaugc

SEQ ID NO: 107323 - RNA, 22 nt, Human
caauugcaauagagaaaagagu

SEQ ID NO: 107324 - RNA, 22 nt, Human
caauugcuuucuuaccaagaga

SEQ ID NO: 107325 - RNA, 22 nt, Human
caauugucagugcuguuuaaau

SEQ ID NO: 107326 - RNA, 18 nt, Human
caauuucaauggucugaa

SEQ ID NO: 107327 - RNA, 22 nt, Human
caauuucagucucagagaguuc

SEQ ID NO: 107328 - RNA, 22 nt, Human
caauuucagugcuguggagagg

SEQ ID NO: 107329 - RNA, 20 nt, Human
caauuucaucauuuccugug

SEQ ID NO: 107330 - RNA, 22 nt, Human
caauuucucuuuauaucucaca

SEQ ID NO: 107331 - RNA, 22 nt, Human
cacaaaaucuuucucgauuauu

SEQ ID NO: 107332 - RNA, 22 nt, Human
cacaaacaucaauccuguuuuc

SEQ ID NO: 107333 - RNA, 22 nt, Human
cacaaaguauaacuugauggaa

SEQ ID NO: 107334 - RNA, 22 nt, Human
cacaaaguggguggaaaacuaa

SEQ ID NO: 107335 - RNA, 22 nt, Human
cacaaauaccaguuuccuaaca

SEQ ID NO: 107336 - RNA, 22 nt, Human
cacaaaugguuguagacauuaa

SEQ ID NO: 107337 - RNA, 22 nt, Human
cacaaauguaguagcuuaaaac

SEQ ID NO: 107338 - RNA, 17 nt, Human
cacaacuggcugauuga

SEQ ID NO: 107339 - RNA, 22 nt, Human
cacaacuuagcagcuugaaaca

SEQ ID NO: 107340 - RNA, 22 nt, Human
cacaagauggucacauaagugc

SEQ ID NO: 107341 - RNA, 22 nt, Human
cacaaguggcuggggaaaggga

SEQ ID NO: 107342 - RNA, 22 nt, Human
cacaaugauuugguucaaaaau

SEQ ID NO: 107343 - RNA, 22 nt, Human
cacaaugcguacauauaucaaa

SEQ ID NO: 107344 - RNA, 22 nt, Human
cacaauguaagaguuuguucau

SEQ ID NO: 107345 - RNA, 22 nt, Human
cacaaugucugguaggccacuu

SEQ ID NO: 107346 - RNA, 22 nt, Human
cacaauuagcagcucuuuauuu

SEQ ID NO: 107347 - RNA, 22 nt, Human
cacaauuauagaagaaagcaua

SEQ ID NO: 107348 - RNA, 22 nt, Human
cacaauuauuaucucuuucuac

SEQ ID NO: 107349 - RNA, 22 nt, Human
cacaauuccauggcauucuuug

SEQ ID NO: 107350 - RNA, 22 nt, Human
cacaauuucaguugcaugcaac

SEQ ID NO: 107351 - RNA, 22 nt, Human
cacaauuuccuugcuucacuuu

SEQ ID NO: 107352 - RNA, 22 nt, Human
cacaauuuguauuuugcaucca

SEQ ID NO: 107353 - RNA, 22 nt, Human
cacaauuuguuugcucuuaguc

SEQ ID NO: 107354 - RNA, 22 nt, Human
cacaauuuuucuuagguccugg

SEQ ID NO: 107355 - RNA, 22 nt, Human
cacacacaguuuuguauucugu

SEQ ID NO: 107356 - RNA, 22 nt, Human
cacacaccaaucaaaugucaga

SEQ ID NO: 107357 - RNA, 22 nt, Human
cacacacucuuccuggcaccua

SEQ ID NO: 107358 - RNA, 22 nt, Human
cacacagcuagugacaggagaa

SEQ ID NO: 107359 - RNA, 22 nt, Human
cacacagcucaggggcacugcc

SEQ ID NO: 107360 - RNA, 21 nt, Human
cacacaguggagugcccuugc

SEQ ID NO: 107361 - RNA, 22 nt, Human
cacacaugcauguaagaccucu

SEQ ID NO: 107362 - RNA, 22 nt, Human
cacacaugguagcagguacaag

SEQ ID NO: 107363 - RNA, 22 nt, Human
cacacauggucaguggcuacuc

SEQ ID NO: 107364 - RNA, 22 nt, Human
cacacauuaauaucaaaggcuc

SEQ ID NO: 107365 - RNA, 22 nt, Human
cacacauucaccaugacugaaa

SEQ ID NO: 107366 - RNA, 22 nt, Human
ccagagggagccaccagggugu

SEQ ID NO: 107367 - RNA, 22 nt, Human
ccagagggcaaaaugaagcuua

SEQ ID NO: 107368 - RNA, 22 nt, Human
ccagagggccuuuggaguuauc

SEQ ID NO: 107369 - RNA, 22 nt, Human
ccagaggucucucuauacuggg

SEQ ID NO: 107370 - RNA, 22 nt, Human
ccagaggugcugggagaggucu

SEQ ID NO: 107371 - RNA, 22 nt, Human
ccagagucuaugaguccucauu

SEQ ID NO: 107372 - RNA, 17 nt, Human
ccagaucccaguccuua

SEQ ID NO: 107373 - RNA, 22 nt, Human
ccagaucccuguuugccucugg

SEQ ID NO: 107374 - RNA, 21 nt, Human
ccagauccugcuuccucaccc

SEQ ID NO: 107375 - RNA, 22 nt, Human
ccagaucuaaguccaaaguacu

SEQ ID NO: 107376 - RNA, 22 nt, Human
ccagaucuaguguuguaaagcu

SEQ ID NO: 107377 - RNA, 22 nt, Human
ccagaugaggucaugcuggguu

SEQ ID NO: 107378 - RNA, 22 nt, Human
ccagaugggaagaagcaugacu

SEQ ID NO: 107379 - RNA, 22 nt, Human
ccagauggguuacuucaagcaa

SEQ ID NO: 107380 - RNA, 22 nt, Human
ccagauguuccccuggaggccu

SEQ ID NO: 107381 - RNA, 22 nt, Human
ccagauuugagcgucuuaaacc

SEQ ID NO: 107382 - RNA, 22 nt, Human
ccagauuuguaggggcucuuac

SEQ ID NO: 107383 - RNA, 22 nt, Human
ccagcaagccaggucuguggcu

SEQ ID NO: 107384 - RNA, 22 nt, Human
ccagcaagguccagcauaggga

SEQ ID NO: 107385 - RNA, 20 nt, Human
ccagcacccucucagcugaa

SEQ ID NO: 107386 - RNA, 22 nt, Human
ccagcaccuugaucuuggaguu

SEQ ID NO: 107387 - RNA, 22 nt, Human
ccagcacuguucuaaggaaaca

SEQ ID NO: 107388 - RNA, 22 nt, Human
ccagcagcaggccaggcccucc

SEQ ID NO: 107389 - RNA, 22 nt, Human
ccagcagccaccuucucgaaau

SEQ ID NO: 107390 - RNA, 22 nt, Human
ccagcagccagagaaggaccuc

SEQ ID NO: 107391 - RNA, 22 nt, Human
ccagcagccccucaaugaucug

SEQ ID NO: 107392 - RNA, 21 nt, Human
ccagcagcucaaggaucucuu

SEQ ID NO: 107393 - RNA, 22 nt, Human
ccagcagcucagcuacugguca

SEQ ID NO: 107394 - RNA, 22 nt, Human
ccagcaggacuuuggaaauaug

SEQ ID NO: 107395 - RNA, 22 nt, Human
ccagcaggagagaacauuuccc

SEQ ID NO: 107396 - RNA, 22 nt, Human
ccagcaggcagucauauccuuu

SEQ ID NO: 107397 - RNA, 22 nt, Human
ccagcagggaaaaacccaccaa

SEQ ID NO: 107398 - RNA, 22 nt, Human
ccagcaggguugguuucuucug

SEQ ID NO: 107399 - RNA, 22 nt, Human
ccagcagguguagggcucaugg

SEQ ID NO: 107400 - RNA, 22 nt, Human
ccagcaucuaugugcuguugau

SEQ ID NO: 107401 - RNA, 22 nt, Human
ccagcaucuguccuuucccuca

SEQ ID NO: 107402 - RNA, 22 nt, Human
ccagccacgaagcucccuucau

SEQ ID NO: 107403 - RNA, 22 nt, Human
ccagccacugggccacugccag

SEQ ID NO: 107404 - RNA, 22 nt, Human
ccagccagaugauaagcucuau

SEQ ID NO: 107405 - RNA, 22 nt, Human
ccagccaggcuggcuguggagg

SEQ ID NO: 107406 - RNA, 22 nt, Human
ccagccauaaacccagaugacu

SEQ ID NO: 107407 - RNA, 22 nt, Human
ccagccccgggaaccuggccgu

SEQ ID NO: 107408 - RNA, 23 nt, Human
ccagcccuccaccagcucuaggc

SEQ ID NO: 107409 - RNA, 22 nt, Human
ccagcccugccagagagagcug

SEQ ID NO: 107410 - RNA, 22 nt, Human
ccagcccugucaccaacuggag

SEQ ID NO: 107411 - RNA, 22 nt, Human
ccagcccuucccaacuggccag

SEQ ID NO: 107412 - RNA, 22 nt, Human
ccagccucaucauauuccugcu

SEQ ID NO: 107413 - RNA, 22 nt, Human
ccagccugaaaugccucauccu

SEQ ID NO: 107414 - RNA, 22 nt, Human
ccagccuggacugggucuugug

SEQ ID NO: 107415 - RNA, 22 nt, Human
ccagccuggagggcaguggugg

SEQ ID NO: 107416 - RNA, 22 nt, Human
ccagccuggggaggcagcuucu

SEQ ID NO: 107417 - RNA, 22 nt, Human
ccagccuggguguuagaagaca

SEQ ID NO: 107418 - RNA, 22 nt, Human
ccagccuugcaccgagccagcc

SEQ ID NO: 107419 - RNA, 22 nt, Human
ccagcgacugugaccucagcua

SEQ ID NO: 107420 - RNA, 22 nt, Human
ccagcuaguuggguauuauaag

SEQ ID NO: 107421 - RNA, 22 nt, Human
ccagcucagggucacauggcac

SEQ ID NO: 107422 - RNA, 22 nt, Human
ccagcuccagcauagccaccau

SEQ ID NO: 107423 - RNA, 22 nt, Human
ccagcuccagguagaugggcag

SEQ ID NO: 107424 - RNA, 22 nt, Human
ccagcucccauucuucaccugu

SEQ ID NO: 107425 - RNA, 22 nt, Human
ccagcucccgcaggcugcacag

SEQ ID NO: 107426 - RNA, 22 nt, Human
ccagcucuaaacggcucugugg

SEQ ID NO: 107427 - RNA, 22 nt, Human
ccagcucucuuugaagcauaaa

SEQ ID NO: 107428 - RNA, 22 nt, Human
ccagcucugcauguuucccuug

SEQ ID NO: 107429 - RNA, 22 nt, Human
ccagcucuggcuucuugcuggg

SEQ ID NO: 107430 - RNA, 22 nt, Human
ccagcucuguaagcugugaaau

SEQ ID NO: 107431 - RNA, 19 nt, Human
cacagaugauugacacaua

SEQ ID NO: 107432 - RNA, 22 nt, Human
cacagauuaugagacgagauac

SEQ ID NO: 107433 - RNA, 22 nt, Human
cacagauuuccuaagcaucaau

SEQ ID NO: 107434 - RNA, 22 nt, Human
cacagauuucuggucuucaccc

SEQ ID NO: 107435 - RNA, 22 nt, Human
cacagcaagagcuaaaugacca

SEQ ID NO: 107436 - RNA, 22 nt, Human
cacagcagaaaguguaggagga

SEQ ID NO: 107437 - RNA, 22 nt, Human
cacagcagacagggaggcggcu

SEQ ID NO: 107438 - RNA, 22 nt, Human
cacagcagcaucauuuaucugg

SEQ ID NO: 107439 - RNA, 22 nt, Human
cacagcaggcacuauacagggc

SEQ ID NO: 107440 - RNA, 22 nt, Human
cacagcaggcagaacgugggca

SEQ ID NO: 107441 - RNA, 22 nt, Human
cacagcagggaugaauggagug

SEQ ID NO: 107442 - RNA, 22 nt, Human
cacagcagucuuucacuaaaua

SEQ ID NO: 107443 - RNA, 22 nt, Human
cacagcauugccuuccaaaagg

SEQ ID NO: 107444 - RNA, 22 nt, Human
cacagccuccuucagagagcau

SEQ ID NO: 107445 - RNA, 22 nt, Human
cacagccugcugcacucaagaa

SEQ ID NO: 107446 - RNA, 19 nt, Human
cacagcgaagacaaggugg

SEQ ID NO: 107447 - RNA, 22 nt, Human
cacagcuagacuaauugcuggg

SEQ ID NO: 107448 - RNA, 22 nt, Human
cacagcuaugagcagccuagcu

SEQ ID NO: 107449 - RNA, 19 nt, Human
cacagcucugcucagggaa

SEQ ID NO: 107450 - RNA, 22 nt, Human
cacagcugaccacccugcuccc

SEQ ID NO: 107451 - RNA, 22 nt, Human
cacagcugcccccucucuaacu

SEQ ID NO: 107452 - RNA, 22 nt, Human
cacagcuggggaagcugaggcc

SEQ ID NO: 107453 - RNA, 22 nt, Human
cacagcuuagaaaagaagccau

SEQ ID NO: 107454 - RNA, 22 nt, Human
cacagcuuaugccacugauugg

SEQ ID NO: 107455 - RNA, 22 nt, Human
cacagcuuccauuagaaugaga

SEQ ID NO: 107456 - RNA, 22 nt, Human
cacagcuuguuuagugacucac

SEQ ID NO: 107457 - RNA, 22 nt, Human
cacaggaacuuacuggccacuu

SEQ ID NO: 107458 - RNA, 22 nt, Human
cacaggaagcaagccuggggcc

SEQ ID NO: 107459 - RNA, 22 nt, Human
cacaggaagcugacugcuggca

SEQ ID NO: 107460 - RNA, 22 nt, Human
cacaggacucgacugcagacag

SEQ ID NO: 107461 - RNA, 18 nt, Human
cacaggagaugaccugac

SEQ ID NO: 107462 - RNA, 22 nt, Human
cacaggagguuaggaagugguc

SEQ ID NO: 107463 - RNA, 22 nt, Human
cacaggagugcugcuauuguug

SEQ ID NO: 107464 - RNA, 22 nt, Human
cacaggcagccuuguagaagaa

SEQ ID NO: 107465 - RNA, 22 nt, Human
cacaggccaauacccucucucu

SEQ ID NO: 107466 - RNA, 22 nt, Human
cacaggccugggguugagcggg

SEQ ID NO: 107467 - RNA, 22 nt, Human
cacaggcucuccagggccugga

SEQ ID NO: 107468 - RNA, 23 nt, Human
cacaggcugcgcauaagcuucuc

SEQ ID NO: 107469 - RNA, 22 nt, Human
cacaggcuuuuuuggcugaugu

SEQ ID NO: 107470 - RNA, 22 nt, Human
cacagggaacaacuagaacaaa

SEQ ID NO: 107471 - RNA, 22 nt, Human
cacagggagaggaacagcgcag

SEQ ID NO: 107472 - RNA, 22 nt, Human
cacagggcaccaguuggccauc

SEQ ID NO: 107473 - RNA, 22 nt, Human
cacagggcagaggguccguggc

SEQ ID NO: 107474 - RNA, 22 nt, Human
cacagggcagguacucucagag

SEQ ID NO: 107475 - RNA, 19 nt, Human
cacagggcaggucucaugu

SEQ ID NO: 107476 - RNA, 22 nt, Human
cacagggcagugcugcccacuc

SEQ ID NO: 107477 - RNA, 22 nt, Human
cacagguaauagccuaggcuau

SEQ ID NO: 107478 - RNA, 22 nt, Human
cacagguauauguguauauacu

SEQ ID NO: 107479 - RNA, 22 nt, Human
caagucugaccucugggugaag

SEQ ID NO: 107480 - RNA, 22 nt, Human
caagucugucugcuccugugug

SEQ ID NO: 107481 - RNA, 22 nt, Human
caagugaagauauacagaaaau

SEQ ID NO: 107482 - RNA, 22 nt, Human
caagugcaugguggcaaagaau

SEQ ID NO: 107483 - RNA, 22 nt, Human
caagugggaccugucugauucc

SEQ ID NO: 107484 - RNA, 21 nt, Human
caaguguggauguggaaggua

SEQ ID NO: 107485 - RNA, 22 nt, Human
caaguuaauauauagaauuuug

SEQ ID NO: 107486 - RNA, 22 nt, Human
caaguuaguauugguuuuggga

SEQ ID NO: 107487 - RNA, 22 nt, Human
caaguucacuugucuacaaggg

SEQ ID NO: 107488 - RNA, 22 nt, Human
caaguuguacagauuguauuag

SEQ ID NO: 107489 - RNA, 22 nt, Human
caaguuuaaagugagguuugaa

SEQ ID NO: 107490 - RNA, 22 nt, Human
caaguuuaaggcacugauaagu

SEQ ID NO: 107491 - RNA, 22 nt, Human
caaguuuugauuuugcaguaaa

SEQ ID NO: 107492 - RNA, 22 nt, Human
caauaacugcuaaauucccugu

SEQ ID NO: 107493 - RNA, 22 nt, Human
caauaacugcugaggagaagca

SEQ ID NO: 107494 - RNA, 22 nt, Human
caauaagauguauugagcagag

SEQ ID NO: 107495 - RNA, 22 nt, Human
caauaaguaauaggcaucuaau

SEQ ID NO: 107496 - RNA, 22 nt, Human
caauaauuuacauuggauacca

SEQ ID NO: 107497 - RNA, 22 nt, Human
caauacaucaggucaaaaugug

SEQ ID NO: 107498 - RNA, 16 nt, Human
caauacauggcauuuc

SEQ ID NO: 107499 - RNA, 20 nt, Human
caauagaauguggagauaag

SEQ ID NO: 107500 - RNA, 22 nt, Human
caauagcuauguaaccugaaga

SEQ ID NO: 107501 - RNA, 22 nt, Human
caauaguucgguccugaaggcc

SEQ ID NO: 107502 - RNA, 19 nt, Human
caauauauagugaguggau

SEQ ID NO: 107503 - RNA, 22 nt, Human
caauauucaguggaaaagccau

SEQ ID NO: 107504 - RNA, 22 nt, Human
caaucacaaagagacaaguguc

SEQ ID NO: 107505 - RNA, 22 nt, Human
caaucacucugcaacauuccug

SEQ ID NO: 107506 - RNA, 22 nt, Human
caaucacugaccugcagaugca

SEQ ID NO: 107507 - RNA, 22 nt, Human
caauccaguuucugucagcuac

SEQ ID NO: 107508 - RNA, 22 nt, Human
caaucucuggugcuucugagag

SEQ ID NO: 107509 - RNA, 22 nt, Human
caaucuguuagaaaugcagaca

SEQ ID NO: 107510 - RNA, 22 nt, Human
caaugacacucugcacagugcu

SEQ ID NO: 107511 - RNA, 22 nt, Human
caaugacagguucaugacuccu

SEQ ID NO: 107512 - RNA, 22 nt, Human
caaugauugcuauuuacauaaa

SEQ ID NO: 107513 - RNA, 22 nt, Human
caaugauuuuuccauugcagga

SEQ ID NO: 107514 - RNA, 22 nt, Human
caaugcauacuucgaaauuuca

SEQ ID NO: 107515 - RNA, 22 nt, Human
caaugcauuauucucccacuuc

SEQ ID NO: 107516 - RNA, 22 nt, Human
caauggauauuuuaugugagaa

SEQ ID NO: 107517 - RNA, 21 nt, Human
caauggcgagaucuuggcuca

SEQ ID NO: 107518 - RNA, 22 nt, Human
caaugggccuggagagagcugg

SEQ ID NO: 107519 - RNA, 22 nt, Human
caaugguggugucagaagagau

SEQ ID NO: 107520 - RNA, 22 nt, Human
caaugguucucaaacuaucaug

SEQ ID NO: 107521 - RNA, 22 nt, Human
caauguaaauauuuucuaauca

SEQ ID NO: 107522 - RNA, 22 nt, Human
caauguaucaagaagcaucagu

SEQ ID NO: 107523 - RNA, 22 nt, Human
caaugucaaggagaccaaaacg

SEQ ID NO: 107524 - RNA, 22 nt, Human
caaugucagagaagcucauauc

SEQ ID NO: 107525 - RNA, 22 nt, Human
caaugucaugauuuuccauuag

SEQ ID NO: 107526 - RNA, 22 nt, Human
caaugucauuucacugggcuua

SEQ ID NO: 107527 - RNA, 22 nt, Human
caaugucugaccguuuugccca

SEQ ID NO: 107528 - RNA, 21 nt, Human
caaugucugcucucugccuag

SEQ ID NO: 107529 - RNA, 22 nt, Human
caauguuuacuggggacccaga

SEQ ID NO: 107530 - RNA, 22 nt, Human
caauguuucuuguaaccaguga

SEQ ID NO: 107531 - RNA, 22 nt, Human
caauguuugugaucuacugacu

SEQ ID NO: 107532 - RNA, 22 nt, Human
caauguuuguuagagcucuaga

SEQ ID NO: 107533 - RNA, 18 nt, Human
caauguuuuagaucucua

SEQ ID NO: 107534 - RNA, 22 nt, Human
caauuacauuuauugagcauuc

SEQ ID NO: 107535 - RNA, 22 nt, Human
caauuaccaguaauugagguuu

SEQ ID NO: 107536 - RNA, 21 nt, Human
caauuacuuuugcaccgacuu

SEQ ID NO: 107537 - RNA, 22 nt, Human
caauuagacauuuauuggccag

SEQ ID NO: 107538 - RNA, 22 nt, Human
caauucaaguugaguacagcuu

SEQ ID NO: 107539 - RNA, 22 nt, Human
caauucaugggcugaggaaggg

SEQ ID NO: 107540 - RNA, 22 nt, Human
uacccagcuccucagaagacca

SEQ ID NO: 107541 - RNA, 22 nt, Human
uacccagcuucaagucaggacu

SEQ ID NO: 107542 - RNA, 22 nt, Human
uacccaggaggaaacugaggcu

SEQ ID NO: 107543 - RNA, 22 nt, Human
uacccagggcuuuucugaugca

SEQ ID NO: 107544 - RNA, 19 nt, Human
uacccucagggccucauuu

SEQ ID NO: 107545 - RNA, 22 nt, Human
uacccugcuagcuagcaucucu

SEQ ID NO: 107546 - RNA, 20 nt, Human
uacccuggcuaugcuucuga

SEQ ID NO: 107547 - RNA, 22 nt, Human
uaccuagacaugaacacagaug

SEQ ID NO: 107548 - RNA, 22 nt, Human
uaccuauagguacaauuacaag

SEQ ID NO: 107549 - RNA, 22 nt, Human
uaccucagauugcugccuuggg

SEQ ID NO: 107550 - RNA, 22 nt, Human
uaccucaugcuguacagcacgu

SEQ ID NO: 107551 - RNA, 22 nt, Human
uaccucucuaaacccagggaca

SEQ ID NO: 107552 - RNA, 22 nt, Human
uaccucuggacauuguggagca

SEQ ID NO: 107553 - RNA, 22 nt, Human
uaccugaaguaacaaugaauau

SEQ ID NO: 107554 - RNA, 22 nt, Human
uaccugagccccugcuggugua

SEQ ID NO: 107555 - RNA, 22 nt, Human
uaccugagguaaggaugaugag

SEQ ID NO: 107556 - RNA, 22 nt, Human
uaccugcagcgggaauccauua

SEQ ID NO: 107557 - RNA, 22 nt, Human
uaccuggacaucagagagacac

SEQ ID NO: 107558 - RNA, 22 nt, Human
uaccuggauccugguagacauc

SEQ ID NO: 107559 - RNA, 22 nt, Human
uaccuggauguuuagauuggca

SEQ ID NO: 107560 - RNA, 22 nt, Human
uaccuggcagucagucuuuccg

SEQ ID NO: 107561 - RNA, 22 nt, Human
uaccuggcuggggaauagccag

SEQ ID NO: 107562 - RNA, 22 nt, Human
uaccuggggcugggcuuugauu

SEQ ID NO: 107563 - RNA, 22 nt, Human
uaccuguugucacgauaacacu

SEQ ID NO: 107564 - RNA, 23 nt, Human
uaccuuucccugggagacugcuc

SEQ ID NO: 107565 - RNA, 22 nt, Human
uacgagcgcucuugcuggccaa

SEQ ID NO: 107566 - RNA, 22 nt, Human
uacuaaacaucuggcauuaaau

SEQ ID NO: 107567 - RNA, 22 nt, Human
uacuacaagggcccuaaaaggu

SEQ ID NO: 107568 - RNA, 22 nt, Human
uacuacauuaauaaaacauuca

SEQ ID NO: 107569 - RNA, 22 nt, Human
uacuagaaauuaccuucucacu

SEQ ID NO: 107570 - RNA, 22 nt, Human
uacuagaagcuguaauuuuuca

SEQ ID NO: 107571 - RNA, 22 nt, Human
uacuaggaagcagcugcauugg

SEQ ID NO: 107572 - RNA, 22 nt, Human
uacuagucuucugcuauucccu

SEQ ID NO: 107573 - RNA, 22 nt, Human
uacuaguucucauaugaaauaa

SEQ ID NO: 107574 - RNA, 22 nt, Human
uacuaugugaaaauacuauagu

SEQ ID NO: 107575 - RNA, 22 nt, Human
uacuauguucuuccuaaauagu

SEQ ID NO: 107576 - RNA, 22 nt, Human
uacuauuuauggagugguuauu

SEQ ID NO: 107577 - RNA, 22 nt, Human
uacucaaucuagguggcuuacc

SEQ ID NO: 107578 - RNA, 22 nt, Human
uacucaaugaaguagccugguu

SEQ ID NO: 107579 - RNA, 22 nt, Human
uacucauugauuccuuuacuca

SEQ ID NO: 107580 - RNA, 22 nt, Human
uacuccaggacuccauuugaaa

SEQ ID NO: 107581 - RNA, 22 nt, Human
uacucccaccauggcugauuuc

SEQ ID NO: 107582 - RNA, 22 nt, Human
uacuccugcugauccugccagc

SEQ ID NO: 107583 - RNA, 22 nt, Human
uacugaaaaagaauccagaccu

SEQ ID NO: 107584 - RNA, 22 nt, Human
uacugaaacucuuguaaauauc

SEQ ID NO: 107585 - RNA, 22 nt, Human
uacugaaagaauacauaauuuc

SEQ ID NO: 107586 - RNA, 22 nt, Human
uacugaaagacugaauauuuag

SEQ ID NO: 107587 - RNA, 22 nt, Human
uacugaaaguggucaacagugg

SEQ ID NO: 107588 - RNA, 22 nt, Human
uacugaaauagcacucugaugc

SEQ ID NO: 107589 - RNA, 22 nt, Human
uacugaauggggcaguaagaaa

SEQ ID NO: 107590 - RNA, 22 nt, Human
uacugaggcugaauucuuagca

SEQ ID NO: 107591 - RNA, 17 nt, Human
uacugaggggucuggag

SEQ ID NO: 107592 - RNA, 22 nt, Human
uacugcaugguggaguggagcu

SEQ ID NO: 107593 - RNA, 22 nt, Human
uacugcauguguuugaugaugg

SEQ ID NO: 107594 - RNA, 22 nt, Human
uacugccaaauugcagcaaugu

SEQ ID NO: 107595 - RNA, 23 nt, Human
uacugccuuguucauguguauuu

SEQ ID NO: 107596 - RNA, 22 nt, Human
uacugcuucauauagggaugua

SEQ ID NO: 107597 - RNA, 20 nt, Human
uacuggauuagggcucaccc

SEQ ID NO: 107598 - RNA, 22 nt, Human
uacuggguauacaaagaugaau

SEQ ID NO: 107599 - RNA, 18 nt, Human
uacugguccuuuuaugau

SEQ ID NO: 107600 - RNA, 22 nt, Human
uacuguacauuccguuuguugc

SEQ ID NO: 107601 - RNA, 22 nt, Human
uacuguacugcaguucugcaaa

SEQ ID NO: 107602 - RNA, 22 nt, Human
uacuguauacuacugcuguucu

SEQ ID NO: 107603 - RNA, 22 nt, Human
uacugucuauacacuugauuac

SEQ ID NO: 107604 - RNA, 22 nt, Human
uacugucuuuccauccuugccu

SEQ ID NO: 107605 - RNA, 22 nt, Human
uacugucuuuuccuaaaugggu

SEQ ID NO: 107606 - RNA, 22 nt, Human
uacugugaauacaaaauaaauu

SEQ ID NO: 107607 - RNA, 22 nt, Human
uacugugcagcugugcuuuggg

SEQ ID NO: 107608 - RNA, 16 nt, Human
uacuguggagcaaggc

SEQ ID NO: 107609 - RNA, 18 nt, Human
uacuguggaucagggguu

SEQ ID NO: 107610 - RNA, 22 nt, Human
uacugugggauguugugauuag

SEQ ID NO: 107611 - RNA, 22 nt, Human
uacuguggggauauugauugua

SEQ ID NO: 107612 - RNA, 22 nt, Human
uacuguuuuaaaagguacuugu

SEQ ID NO: 107613 - RNA, 22 nt, Human
uacuuaaauaauugcugcuauu

SEQ ID NO: 107614 - RNA, 22 nt, Human
uacuuaaugccacugaauugua

SEQ ID NO: 107615 - RNA, 22 nt, Human
uacuuacagaaggaagcaauug

SEQ ID NO: 107616 - RNA, 22 nt, Human
uacuuagagcgauaauuuauac

SEQ ID NO: 107617 - RNA, 23 nt, Human
uacuuaggguuuagaucugacug

SEQ ID NO: 107618 - RNA, 18 nt, Human
uacuucaacucccagggc

SEQ ID NO: 107619 - RNA, 22 nt, Human
uacuucauucaaguucgcuaua

SEQ ID NO: 107620 - RNA, 20 nt, Human
uacuucugaggcacucugaa

SEQ ID NO: 107621 - RNA, 22 nt, Human
uacuucuguaagugcgccaagg

SEQ ID NO: 107622 - RNA, 22 nt, Human
uacuuguggcaguuugaauuua

SEQ ID NO: 107623 - RNA, 22 nt, Human
uacuugugugucaugugcagag

SEQ ID NO: 107624 - RNA, 22 nt, Human
uacuuguuuuguguuccuaaac

SEQ ID NO: 107625 - RNA, 22 nt, Human
uacuuuaauauaugugaaguuc

SEQ ID NO: 107626 - RNA, 22 nt, Human
uacuuucuaagacauacaacuu

SEQ ID NO: 107627 - RNA, 22 nt, Human
uacuuucuuucugauccuuaug

SEQ ID NO: 107628 - RNA, 20 nt, Human
uacuuugaucugauaagcaa

SEQ ID NO: 107629 - RNA, 22 nt, Human
uacuuugcagcuugauaaaaug

SEQ ID NO: 107630 - RNA, 22 nt, Human
uacuuugucaugcuaagaguga

SEQ ID NO: 107631 - RNA, 22 nt, Human
uacuuuguggagauuaaaaaua

SEQ ID NO: 107632 - RNA, 22 nt, Human
uacuuuucaagcagcugguuau

SEQ ID NO: 107633 - RNA, 22 nt, Human
uacuuuucuuugucaugcaucu

SEQ ID NO: 107634 - RNA, 19 nt, Human
uacuuuuucaggacagagu

SEQ ID NO: 107635 - RNA, 22 nt, Human
uagaaaagaagucuggccggga

SEQ ID NO: 107636 - RNA, 22 nt, Human
uagaaaagcucuaaggccucuc

SEQ ID NO: 107637 - RNA, 22 nt, Human
uagaaaauagggccuguggagc

SEQ ID NO: 107638 - RNA, 22 nt, Human
uagaaacaagggagaggauucu

SEQ ID NO: 107639 - RNA, 22 nt, Human
uagaaacacagagagacccaug

SEQ ID NO: 107640 - RNA, 22 nt, Human
uagaaacacagaucugguguca

SEQ ID NO: 107641 - RNA, 22 nt, Human
uagaaacagauguuuuugaaga

SEQ ID NO: 107642 - RNA, 22 nt, Human
uagaaacagcauauauuagccc

SEQ ID NO: 107643 - RNA, 22 nt, Human
uaugaaguagagcagagaugcc

SEQ ID NO: 107644 - RNA, 22 nt, Human
uaugaagugaguuaugguugcu

SEQ ID NO: 107645 - RNA, 22 nt, Human
uaugacaaaugauauauuuggc

SEQ ID NO: 107646 - RNA, 22 nt, Human
uaugacauuuucccagauuuau

SEQ ID NO: 107647 - RNA, 22 nt, Human
uaugacuuuggaaaaauuacuu

SEQ ID NO: 107648 - RNA, 18 nt, Human
uaugagaagauuagcaau

SEQ ID NO: 107649 - RNA, 22 nt, Human
uacaguaaucuggacaugauuu

SEQ ID NO: 107650 - RNA, 22 nt, Human
uacaguacagucuagacucugg

SEQ ID NO: 107651 - RNA, 22 nt, Human
uacaguagaaucuuauagccca

SEQ ID NO: 107652 - RNA, 22 nt, Human
uacaguagcugagguucucagg

SEQ ID NO: 107653 - RNA, 22 nt, Human
uacaguaguaagaaugccuuau

SEQ ID NO: 107654 - RNA, 22 nt, Human
uacaguagucgucuuauuuuga

SEQ ID NO: 107655 - RNA, 22 nt, Human
uacaguauggaaaauguauagu

SEQ ID NO: 107656 - RNA, 22 nt, Human
uacagucaacauugaugaugau

SEQ ID NO: 107657 - RNA, 22 nt, Human
uacagucaagcauaagaaguca

SEQ ID NO: 107658 - RNA, 21 nt, Human
uacagucuccccuguugucca

SEQ ID NO: 107659 - RNA, 22 nt, Human
uacagucucuuugagugauugu

SEQ ID NO: 107660 - RNA, 19 nt, Human
uacagugaaccaggaggag

SEQ ID NO: 107661 - RNA, 22 nt, Human
uacagugaaugaauggcugugc

SEQ ID NO: 107662 - RNA, 22 nt, Human
uacagugcgauuuuuaggccuc

SEQ ID NO: 107663 - RNA, 22 nt, Human
uacaguggggagcucaggagag

SEQ ID NO: 107664 - RNA, 20 nt, Human
uacaguguauguauuuaggc

SEQ ID NO: 107665 - RNA, 22 nt, Human
uacaguguuucccccaggauag

SEQ ID NO: 107666 - RNA, 22 nt, Human
uacaguuagccugucuacuccc

SEQ ID NO: 107667 - RNA, 22 nt, Human
uacaguucacaguaucauaaau

SEQ ID NO: 107668 - RNA, 22 nt, Human
uacaguuccaggaucauagggu

SEQ ID NO: 107669 - RNA, 22 nt, Human
uacaguuccucucguggaggug

SEQ ID NO: 107670 - RNA, 22 nt, Human
uacaguucuagucaaaaaucac

SEQ ID NO: 107671 - RNA, 22 nt, Human
uacaguuuagaaccauagaugg

SEQ ID NO: 107672 - RNA, 22 nt, Human
uacaguuuuggugaugaugaug

SEQ ID NO: 107673 - RNA, 22 nt, Human
uacaguuuuuauucaugacaag

SEQ ID NO: 107674 - RNA, 22 nt, Human
uacaguuuuucacugaagaugu

SEQ ID NO: 107675 - RNA, 22 nt, Human
uacauaaugagcuaguuaaguu

SEQ ID NO: 107676 - RNA, 22 nt, Human
uacauacagagaugcuaguuaa

SEQ ID NO: 107677 - RNA, 22 nt, Human
uacauacagccaaguaugaagu

SEQ ID NO: 107678 - RNA, 22 nt, Human
uacauacaguggaugcuuuagg

SEQ ID NO: 107679 - RNA, 22 nt, Human
uacauacauauucauacaggug

SEQ ID NO: 107680 - RNA, 22 nt, Human
uacauacaugguggaaugguua

SEQ ID NO: 107681 - RNA, 22 nt, Human
uacauacauuaccucauuuagu

SEQ ID NO: 107682 - RNA, 22 nt, Human
uacauagaggguaauagcauca

SEQ ID NO: 107683 - RNA, 22 nt, Human
uacauagauuuugaaacuggac

SEQ ID NO: 107684 - RNA, 22 nt, Human
uacauagcaaggaaaugacaga

SEQ ID NO: 107685 - RNA, 22 nt, Human
uacauauacugagugauuugcu

SEQ ID NO: 107686 - RNA, 22 nt, Human
uacauauguaaacauguauaaa

SEQ ID NO: 107687 - RNA, 20 nt, Human
uacaucucucagaugucuaa

SEQ ID NO: 107688 - RNA, 22 nt, Human
uacaucugucuggcuuuccauu

SEQ ID NO: 107689 - RNA, 22 nt, Human
uacaugaaauaggauucuggag

SEQ ID NO: 107690 - RNA, 22 nt, Human
uacaugaacaaaauagcagaaa

SEQ ID NO: 107691 - RNA, 22 nt, Human
uacaugaagaugaauguauggc

SEQ ID NO: 107692 - RNA, 21 nt, Human
uacaugaagcugguguuuguc

SEQ ID NO: 107693 - RNA, 21 nt, Human
uacaugaguguaugagcauau

SEQ ID NO: 107694 - RNA, 22 nt, Human
uacaugcacaugaacaugugug

SEQ ID NO: 107695 - RNA, 22 nt, Human
uacaugcaugauacaaaguugc

SEQ ID NO: 107696 - RNA, 22 nt, Human
uacaugcucaguaacuuucagu

SEQ ID NO: 107697 - RNA, 22 nt, Human
uacaugcuccacuuucuccugu

SEQ ID NO: 107698 - RNA, 22 nt, Human
uacaugcuuccaacugccccau

SEQ ID NO: 107699 - RNA, 22 nt, Human
uacauguaauuuucauaguaag

SEQ ID NO: 107700 - RNA, 22 nt, Human
uacaugugaucagaaagugaaa

SEQ ID NO: 107701 - RNA, 22 nt, Human
uacauguggccagaaauuugag

SEQ ID NO: 107702 - RNA, 22 nt, Human
uacauguggguuaaaaacacuc

SEQ ID NO: 107703 - RNA, 22 nt, Human
uacauguguucuguuucaaguu

SEQ ID NO: 107704 - RNA, 22 nt, Human
uacauuagcucaucuauuuauu

SEQ ID NO: 107705 - RNA, 22 nt, Human
uacauucagaauugggaggcaa

SEQ ID NO: 107706 - RNA, 22 nt, Human
uacauucagcaaaagaaugguu

SEQ ID NO: 107707 - RNA, 19 nt, Human
uacauuccacacaaucucu

SEQ ID NO: 107708 - RNA, 22 nt, Human
uacauucuauaucuguuacauc

SEQ ID NO: 107709 - RNA, 16 nt, Human
uacauucugaucacug

SEQ ID NO: 107710 - RNA, 22 nt, Human
uacauucugguggagaaaguaa

SEQ ID NO: 107711 - RNA, 22 nt, Human
uacauugaaaucaauggaugug

SEQ ID NO: 107712 - RNA, 22 nt, Human
uacauugauucaggauauaggc

SEQ ID NO: 107713 - RNA, 22 nt, Human
uacauugugauaggaagucacc

SEQ ID NO: 107714 - RNA, 22 nt, Human
uacauuguucaugcaugagaaa

SEQ ID NO: 107715 - RNA, 22 nt, Human
uacauuguuuuuucuugccauc

SEQ ID NO: 107716 - RNA, 22 nt, Human
uacauuuauaaggcuucucugu

SEQ ID NO: 107717 - RNA, 22 nt, Human
uacauuuccugucagagauaua

SEQ ID NO: 107718 - RNA, 22 nt, Human
uacauuuccuugacuccucaac

SEQ ID NO: 107719 - RNA, 22 nt, Human
uaccaaaaagugagccccagag

SEQ ID NO: 107720 - RNA, 22 nt, Human
uaccaaagauuaaauagcaaca

SEQ ID NO: 107721 - RNA, 19 nt, Human
uaccaaauugcauuauggc

SEQ ID NO: 107722 - RNA, 20 nt, Human
uaccaacagcaggaagcaua

SEQ ID NO: 107723 - RNA, 21 nt, Human
uaccaauugccuucuaguugu

SEQ ID NO: 107724 - RNA, 22 nt, Human
uaccacaggccaaauuugaggu

SEQ ID NO: 107725 - RNA, 22 nt, Human
uaccacagucugccauuagaug

SEQ ID NO: 107726 - RNA, 22 nt, Human
uaccacugcucccugccuguga

SEQ ID NO: 107727 - RNA, 20 nt, Human
uaccacuuauuugaauaauu

SEQ ID NO: 107728 - RNA, 19 nt, Human
uaccagccuccugccugau

SEQ ID NO: 107729 - RNA, 22 nt, Human
uaccagccugacccugucugac

SEQ ID NO: 107730 - RNA, 22 nt, Human
uaccagcucacacaaucuuugu

SEQ ID NO: 107731 - RNA, 15 nt, Human
uaccagcugauccgu

SEQ ID NO: 107732 - RNA, 22 nt, Human
uaccaggaauuauuuuacauuu

SEQ ID NO: 107733 - RNA, 22 nt, Human
uaccaggcagcugcacagaggc

SEQ ID NO: 107734 - RNA, 22 nt, Human
uaccaggucugugcagguguca

SEQ ID NO: 107735 - RNA, 22 nt, Human
uaccaguaauaguaugugagau

SEQ ID NO: 107736 - RNA, 22 nt, Human
uaccaugcuugagauacaguga

SEQ ID NO: 107737 - RNA, 22 nt, Human
uaccaugucaagcgagacaugu

SEQ ID NO: 107738 - RNA, 22 nt, Human
uaccaugucuucaauaagucua

SEQ ID NO: 107739 - RNA, 22 nt, Human
uaccauuguaccaagguaauuu

SEQ ID NO: 107740 - RNA, 22 nt, Human
uaccauuucaguaaaaacuuag

SEQ ID NO: 107741 - RNA, 22 nt, Human
uaccauuugagagagaacauaa

SEQ ID NO: 107742 - RNA, 22 nt, Human
uacccaggagaaacagcagggc

SEQ ID NO: 107743 - RNA, 22 nt, Human
uacccaguuauuuugucuuugu

SEQ ID NO: 107744 - RNA, 22 nt, Human
uacccaguucaguguuuaaaaa

SEQ ID NO: 107745 - RNA, 22 nt, Human
uacccucacgagacuucaaguc

SEQ ID NO: 107746 - RNA, 22 nt, Human
uacccucucccgguccagcuuu

SEQ ID NO: 107747 - RNA, 22 nt, Human
uaccucaaguuccaggaaagcg

SEQ ID NO: 107748 - RNA, 22 nt, Human
uaccucacugggccucaguuuu

SEQ ID NO: 107749 - RNA, 22 nt, Human
uaccugaaccaagcccagcucu

SEQ ID NO: 107750 - RNA, 22 nt, Human
uaccugagcccagugcagcaua

SEQ ID NO: 107751 - RNA, 22 nt, Human
uaccugaguuauauuaauaauu

SEQ ID NO: 107752 - RNA, 22 nt, Human
uaccugcacagccagccaugug

SEQ ID NO: 107753 - RNA, 22 nt, Human
uaccuggaaaaguuauaugugu

SEQ ID NO: 107754 - RNA, 22 nt, Human
uaccugggcccaccagugccug

SEQ ID NO: 107755 - RNA, 22 nt, Human
uaccugucaaaagacauggaga

SEQ ID NO: 107756 - RNA, 22 nt, Human
uaccuguuuuaaagcuaaaagg

SEQ ID NO: 107757 - RNA, 22 nt, Human
uaccuucaggcugcccuuugau

SEQ ID NO: 107758 - RNA, 22 nt, Human
uaugaagacucauuuauugggu

SEQ ID NO: 107759 - RNA, 22 nt, Human
uaugaagucucugauguugagu

SEQ ID NO: 107760 - RNA, 22 nt, Human
uaugaagugauguugaauuuug

SEQ ID NO: 107761 - RNA, 22 nt, Human
uaugaagugucuguuguaucug

SEQ ID NO: 107762 - RNA, 22 nt, Human
uaugaauucuguucauugauga

SEQ ID NO: 107763 - RNA, 20 nt, Human
uaugacaacgcagcaaggca

SEQ ID NO: 107764 - RNA, 22 nt, Human
uaugacaagguggaguaugagu

SEQ ID NO: 107765 - RNA, 22 nt, Human
uaugacauugcuuuuuagaacu

SEQ ID NO: 107766 - RNA, 22 nt, Human
uaugacauuggccaaguucugu

SEQ ID NO: 107767 - RNA, 22 nt, Human
uaugagaaaauaaauaucuguu

SEQ ID NO: 107768 - RNA, 22 nt, Human
uaugagaaauugcugauauuug

SEQ ID NO: 107769 - RNA, 22 nt, Human
uaugagaacaagaacaaucucc

SEQ ID NO: 107770 - RNA, 23 nt, Human
uaugagaacccauacgcugucuu

SEQ ID NO: 107771 - RNA, 22 nt, Human
uaugagaacgggggcguguggg

SEQ ID NO: 107772 - RNA, 22 nt, Human
uaugagaacugacagagugcca

SEQ ID NO: 107773 - RNA, 22 nt, Human
uaugagaagguauggugacuug

SEQ ID NO: 107774 - RNA, 22 nt, Human
uaugagaaucugcaguaugcuu

SEQ ID NO: 107775 - RNA, 22 nt, Human
uaugagaauuugcuaauuggcu

SEQ ID NO: 107776 - RNA, 22 nt, Human
uaugagauacuacagauuguga

SEQ ID NO: 107777 - RNA, 21 nt, Human
uaugagauauacuuauucuuu

SEQ ID NO: 107778 - RNA, 22 nt, Human
uaugagauuuggauucagugaa

SEQ ID NO: 107779 - RNA, 22 nt, Human
uaugagugguugaaugguaaac

SEQ ID NO: 107780 - RNA, 22 nt, Human
uaugaguguguguagaagguac

SEQ ID NO: 107781 - RNA, 22 nt, Human
uaugcaaaugacugguauguuu

SEQ ID NO: 107782 - RNA, 22 nt, Human
uaugcaauucucuuaauauucu

SEQ ID NO: 107783 - RNA, 22 nt, Human
uaugcacaguuacaagaauauc

SEQ ID NO: 107784 - RNA, 22 nt, Human
uaugcacauauaaccugcacug

SEQ ID NO: 107785 - RNA, 22 nt, Human
uaugcagagcaugacuguacca

SEQ ID NO: 107786 - RNA, 22 nt, Human
uaugcagcugguuaagaacaca

SEQ ID NO: 107787 - RNA, 22 nt, Human
uaugcagugguaucauuuuaaa

SEQ ID NO: 107788 - RNA, 22 nt, Human
uaugcaguguacgauguuuagu

SEQ ID NO: 107789 - RNA, 21 nt, Human
uaugcaguuuacuuagguauu

SEQ ID NO: 107790 - RNA, 22 nt, Human
uaugcauauguguucauuggag

SEQ ID NO: 107791 - RNA, 22 nt, Human
uaugcauuauacauuaauuucu

SEQ ID NO: 107792 - RNA, 22 nt, Human
uaugcccuuacaaugagcacaa

SEQ ID NO: 107793 - RNA, 22 nt, Human
uaugcuaagauaaacagaguua

SEQ ID NO: 107794 - RNA, 22 nt, Human
uaugcuaagugagaaaagacag

SEQ ID NO: 107795 - RNA, 22 nt, Human
uaugcuagauggaaaaauauug

SEQ ID NO: 107796 - RNA, 22 nt, Human
uaugcuccaaagacauguugcc

SEQ ID NO: 107797 - RNA, 22 nt, Human
uaugcucugagaccuuugugca

SEQ ID NO: 107798 - RNA, 22 nt, Human
uaugcuuuacuuuucauuguga

SEQ ID NO: 107799 - RNA, 22 nt, Human
ugcugaaugugcucccuuuuaa

SEQ ID NO: 107800 - RNA, 22 nt, Human
ugcugaauuccagggccccacu

SEQ ID NO: 107801 - RNA, 22 nt, Human
ugcugaauugguaguacuguug

SEQ ID NO: 107802 - RNA, 17 nt, Human
ugcugacagcugugugu

SEQ ID NO: 107803 - RNA, 22 nt, Human
ugcugagaaucacagguuauaa

SEQ ID NO: 107804 - RNA, 22 nt, Human
ugcugagagccagggcuggcau

SEQ ID NO: 107805 - RNA, 22 nt, Human
ugcugaggaaagaggauaaaag

SEQ ID NO: 107806 - RNA, 22 nt, Human
ugcugaggacuaaaggagauga

SEQ ID NO: 107807 - RNA, 22 nt, Human
ugcugaggagggcacccggggg

SEQ ID NO: 107808 - RNA, 19 nt, Human
ugcugaggaugcaagaucc

SEQ ID NO: 107809 - RNA, 22 nt, Human
ugcugaggcccaggagcacuuu

SEQ ID NO: 107810 - RNA, 22 nt, Human
ugcugagggcagaugaauuaga

SEQ ID NO: 107811 - RNA, 22 nt, Human
ugcugagguaaccauauccugc

SEQ ID NO: 107812 - RNA, 22 nt, Human
ugcugaguggcggccucacuuu

SEQ ID NO: 107813 - RNA, 22 nt, Human
ugcugagugggauuccugugcu

SEQ ID NO: 107814 - RNA, 22 nt, Human
ugcugauuuugccuacugaucc

SEQ ID NO: 107815 - RNA, 22 nt, Human
ugcugcacagauugccuuuuac

SEQ ID NO: 107816 - RNA, 22 nt, Human
ugcugcacgauaaauaauuucu

SEQ ID NO: 107817 - RNA, 22 nt, Human
ugcugcagcagugcgggcagcu

SEQ ID NO: 107818 - RNA, 22 nt, Human
ugcugcagcuuugucacaugca

SEQ ID NO: 107819 - RNA, 22 nt, Human
ugcugcaggaacuuaagaagcu

SEQ ID NO: 107820 - RNA, 22 nt, Human
ugcugcaggcagccccucuacu

SEQ ID NO: 107821 - RNA, 22 nt, Human
ugcugcagggauuucagagaca

SEQ ID NO: 107822 - RNA, 19 nt, Human
ugcugcagucaggcgaggg

SEQ ID NO: 107823 - RNA, 22 nt, Human
ugcugcauuugcaguccuuuaa

SEQ ID NO: 107824 - RNA, 23 nt, Human
ugcugccaagcacgaguugaguu

SEQ ID NO: 107825 - RNA, 22 nt, Human
ugcugccaagcccgugcuccug

SEQ ID NO: 107826 - RNA, 22 nt, Human
ugcugccaauuucuggucuuga

SEQ ID NO: 107827 - RNA, 22 nt, Human
ugcugccaccugguggcugaag

SEQ ID NO: 107828 - RNA, 22 nt, Human
ugcugccaccugugguagucug

SEQ ID NO: 107829 - RNA, 22 nt, Human
ugcugccagggcucugcccaca

SEQ ID NO: 107830 - RNA, 21 nt, Human
ugcugccauagaccugaggga

SEQ ID NO: 107831 - RNA, 22 nt, Human
ugcugccauggucgcugguguc

SEQ ID NO: 107832 - RNA, 23 nt, Human
ugcugcccgcuuggcacgcuccc

SEQ ID NO: 107833 - RNA, 22 nt, Human
ugcugccuaacagaacucuuuc

SEQ ID NO: 107834 - RNA, 20 nt, Human
ugcugccuacuaagcccuca

SEQ ID NO: 107835 - RNA, 22 nt, Human
ugcugccuaggaaucuguauuu

SEQ ID NO: 107836 - RNA, 20 nt, Human
ugcugccuguuuuugugaau

SEQ ID NO: 107837 - RNA, 22 nt, Human
ugcugccuuagcagccaggcaa

SEQ ID NO: 107838 - RNA, 22 nt, Human
ugcugccuucuaggcgugcccu

SEQ ID NO: 107839 - RNA, 22 nt, Human
ugcugccuuucugaauggugga

SEQ ID NO: 107840 - RNA, 22 nt, Human
ugcugcgggacccacugugggc

SEQ ID NO: 107841 - RNA, 17 nt, Human
ugcugcuaauuaaaaua

SEQ ID NO: 107842 - RNA, 22 nt, Human
ugcugcucaagcugcagcaaaa

SEQ ID NO: 107843 - RNA, 22 nt, Human
ugcugcucaaugagaugccauc

SEQ ID NO: 107844 - RNA, 22 nt, Human
ugcugcucuguaaagugaugag

SEQ ID NO: 107845 - RNA, 21 nt, Human
ugcugcugaucgggguuggcu

SEQ ID NO: 107846 - RNA, 22 nt, Human
ugcugcuguuuccuacaucuca

SEQ ID NO: 107847 - RNA, 22 nt, Human
ugcugcuuggcacccucagagu

SEQ ID NO: 107848 - RNA, 22 nt, Human
ugcugcuuuaaaaagugcugau

SEQ ID NO: 107849 - RNA, 22 nt, Human
ugcugcuuuuaguuggauagaa

SEQ ID NO: 107850 - RNA, 22 nt, Human
ugcugcuuuuguauaucagaga

SEQ ID NO: 107851 - RNA, 22 nt, Human
ugcuggaaagaauuuucuguua

SEQ ID NO: 107852 - RNA, 22 nt, Human
ugcuggaaagugaggugaauga

SEQ ID NO: 107853 - RNA, 22 nt, Human
ugcuggaaauaggcauuguagc

SEQ ID NO: 107854 - RNA, 20 nt, Human
ugcuggaaauuguucuagga

SEQ ID NO: 107855 - RNA, 19 nt, Human
ugcuggaacaucaguagcu

SEQ ID NO: 107856 - RNA, 22 nt, Human
ugcuggaaccaggaauuugaag

SEQ ID NO: 107857 - RNA, 23 nt, Human
ugcuggaacccagggccuaacac

SEQ ID NO: 107858 - RNA, 22 nt, Human
ugcuggaagaaaauucuuuaac

SEQ ID NO: 107859 - RNA, 22 nt, Human
ugcuggaagagaauacuggugg

SEQ ID NO: 107860 - RNA, 23 nt, Human
ugcuggaagguccaauuugcuca

SEQ ID NO: 107861 - RNA, 22 nt, Human
ugcuggagaaaguuuuucugaa

SEQ ID NO: 107862 - RNA, 22 nt, Human
ugcuggagacauagcaggcagc

SEQ ID NO: 107863 - RNA, 22 nt, Human
ugcuggagaggaaggugggguc

SEQ ID NO: 107864 - RNA, 22 nt, Human
ugcuggagcaucugagagcauc

SEQ ID NO: 107865 - RNA, 22 nt, Human
ugcuggagcuccgggcuguagg

SEQ ID NO: 107866 - RNA, 21 nt, Human
ugcuggaggacaggguuucau

SEQ ID NO: 107867 - RNA, 22 nt, Human
ugcuuuaagagauuguuaguac

SEQ ID NO: 107868 - RNA, 22 nt, Human
ugcuuuacaagccugcuuccuc

SEQ ID NO: 107869 - RNA, 22 nt, Human
ugcuuuauaaccauuucugugg

SEQ ID NO: 107870 - RNA, 22 nt, Human
ugcuuuauucccuucugaugug

SEQ ID NO: 107871 - RNA, 22 nt, Human
ugcuuucaaaggcuuucuagau

SEQ ID NO: 107872 - RNA, 22 nt, Human
ugcuuucaaugaauuguauacu

SEQ ID NO: 107873 - RNA, 22 nt, Human
ugcuuucacuucucugcagcca

SEQ ID NO: 107874 - RNA, 22 nt, Human
ugcuuucagccagugucuggau

SEQ ID NO: 107875 - RNA, 22 nt, Human
ugcuuucauucacaaaauagca

SEQ ID NO: 107876 - RNA, 22 nt, Human
ugcuuugacagggaugacauga

SEQ ID NO: 107877 - RNA, 20 nt, Human
ugcuuugauggaaauacagc

SEQ ID NO: 107878 - RNA, 22 nt, Human
ugcuuugcagugucuaacagaa

SEQ ID NO: 107879 - RNA, 22 nt, Human
ugcuuugcucugucucuagcua

SEQ ID NO: 107880 - RNA, 22 nt, Human
ugcuuugcuuuggagagccagc

SEQ ID NO: 107881 - RNA, 22 nt, Human
ugcuuuggcccaacauugaugc

SEQ ID NO: 107882 - RNA, 22 nt, Human
ugcuuugugacagauuaguuuu

SEQ ID NO: 107883 - RNA, 22 nt, Human
uggaaaaacugagacuuagaca

SEQ ID NO: 107884 - RNA, 19 nt, Human
uggaaaauggauugaauca

SEQ ID NO: 107885 - RNA, 22 nt, Human
uggaaaaugugacuauucuaaa

SEQ ID NO: 107886 - RNA, 22 nt, Human
uggaaacaaagucauaagcuca

SEQ ID NO: 107887 - RNA, 22 nt, Human
uggaaacagaucauaacuaagc

SEQ ID NO: 107888 - RNA, 23 nt, Human
uggaaacauucugaauguccauc

SEQ ID NO: 107889 - RNA, 22 nt, Human
uggaaacuagagugugggaagc

SEQ ID NO: 107890 - RNA, 22 nt, Human
uggaaacucagggccagaagga

SEQ ID NO: 107891 - RNA, 23 nt, Human
uggaaacuuaagggggagauguc

SEQ ID NO: 107892 - RNA, 22 nt, Human
uggaaacuuaccguuuggggaa

SEQ ID NO: 107893 - RNA, 22 nt, Human
uggaaagacauguccuucauua

SEQ ID NO: 107894 - RNA, 21 nt, Human
uggaaagauucaaagaccagg

SEQ ID NO: 107895 - RNA, 22 nt, Human
uggaaagcaguucuuagaaucg

SEQ ID NO: 107896 - RNA, 23 nt, Human
uggaaagcggaccuggggcagag

SEQ ID NO: 107897 - RNA, 22 nt, Human
uggaaaggacaguugcugauag

SEQ ID NO: 107898 - RNA, 22 nt, Human
uggaaauacuugccauaaaacu

SEQ ID NO: 107899 - RNA, 22 nt, Human
uggaaauaguaaugcauaagug

SEQ ID NO: 107900 - RNA, 22 nt, Human
uggaaauauacaaugugucucu

SEQ ID NO: 107901 - RNA, 22 nt, Human
uggaaauauuugcucauuaucu

SEQ ID NO: 107902 - RNA, 22 nt, Human
uggaaauggaucugaugagucu

SEQ ID NO: 107903 - RNA, 22 nt, Human
uggaaauguauuugggcaugcc

SEQ ID NO: 107904 - RNA, 22 nt, Human
uggaaauugcuauuaccgauga

SEQ ID NO: 107905 - RNA, 22 nt, Human
uggaaauuuaucaagauauaca

SEQ ID NO: 107906 - RNA, 22 nt, Human
uggaacaacaugcuggaaaauu

SEQ ID NO: 107907 - RNA, 22 nt, Human
uggaacaauucuugaagggaau

SEQ ID NO: 107908 - RNA, 22 nt, Human
uggaacacaggacuaucagcug

SEQ ID NO: 107909 - RNA, 22 nt, Human
uggaacacuggcuuuccacugu

SEQ ID NO: 107910 - RNA, 22 nt, Human
uggaacacuuucaguagcuauu

SEQ ID NO: 107911 - RNA, 22 nt, Human
uggaacgucguaauguugguua

SEQ ID NO: 107912 - RNA, 22 nt, Human
uggaagaauauggggguacaga

SEQ ID NO: 107913 - RNA, 22 nt, Human
uggaagaauguuugccuuauaa

SEQ ID NO: 107914 - RNA, 22 nt, Human
uggaagacauuuuggaccuugg

SEQ ID NO: 107915 - RNA, 22 nt, Human
uggaagagaaaauccacccuua

SEQ ID NO: 107916 - RNA, 22 nt, Human
uaugcuuugcaauuggaaaagg

SEQ ID NO: 107917 - RNA, 22 nt, Human
uaugcuuugguagagaguugug

SEQ ID NO: 107918 - RNA, 22 nt, Human
uaugcuuuuaaccuguaacuga

SEQ ID NO: 107919 - RNA, 17 nt, Human
uaugcuuuucuucucca

SEQ ID NO: 107920 - RNA, 22 nt, Human
uauggaaaaauguaucuuguca

SEQ ID NO: 107921 - RNA, 22 nt, Human
uauggaaagggaguuuaauuug

SEQ ID NO: 107922 - RNA, 19 nt, Human
uauggcaggccgaggcacu

SEQ ID NO: 107923 - RNA, 22 nt, Human
uauggcaguuacccuugaugau

SEQ ID NO: 107924 - RNA, 22 nt, Human
uauggcuaauucuuuacugacc

SEQ ID NO: 107925 - RNA, 17 nt, Human
uauggcuguguuugugc

SEQ ID NO: 107926 - RNA, 22 nt, Human
uauggcuucuuuugcaacuacu

SEQ ID NO: 107927 - RNA, 21 nt, Human
uauggcuuuacuaagcugcac

SEQ ID NO: 107928 - RNA, 22 nt, Human
uauggcuuucaaaggaacucgg

SEQ ID NO: 107929 - RNA, 22 nt, Human
uauggcuuugggccaaaucuac

SEQ ID NO: 107930 - RNA, 22 nt, Human
uauggcuuuuaacugucguaug

SEQ ID NO: 107931 - RNA, 22 nt, Human
uauggcuuuucuuuccuagugu

SEQ ID NO: 107932 - RNA, 22 nt, Human
uauggguaaauaauaauuuuag

SEQ ID NO: 107933 - RNA, 22 nt, Human
uauggguaagaucuuuuguauu

SEQ ID NO: 107934 - RNA, 22 nt, Human
uauggguagaaguggcccaagc

SEQ ID NO: 107935 - RNA, 22 nt, Human
uauggucauuuguuagugcuuu

SEQ ID NO: 107936 - RNA, 22 nt, Human
uauguaagugagaucauggagu

SEQ ID NO: 107937 - RNA, 22 nt, Human
uauguacauacaugugcauacg

SEQ ID NO: 107938 - RNA, 22 nt, Human
uauguacucuaauuugucucau

SEQ ID NO: 107939 - RNA, 22 nt, Human
uauguagaaaacaaaaguugaa

SEQ ID NO: 107940 - RNA, 22 nt, Human
uauguagacaggcugcuuuucc

SEQ ID NO: 107941 - RNA, 22 nt, Human
uauguagacuucauuguuuacu

SEQ ID NO: 107942 - RNA, 22 nt, Human
uauguagguaaacacagacaua

SEQ ID NO: 107943 - RNA, 22 nt, Human
uauguaguguugagaaugcuug

SEQ ID NO: 107944 - RNA, 18 nt, Human
uauguauaacauaguuca

SEQ ID NO: 107945 - RNA, 22 nt, Human
uauguauauguauacacacaca

SEQ ID NO: 107946 - RNA, 22 nt, Human
uauguauccguguguguacaga

SEQ ID NO: 107947 - RNA, 22 nt, Human
uauguaucuuuuguuuucccug

SEQ ID NO: 107948 - RNA, 22 nt, Human
uauguauuauucaucaguggga

SEQ ID NO: 107949 - RNA, 22 nt, Human
uauguauucugaguacaaguuc

SEQ ID NO: 107950 - RNA, 19 nt, Human
uaugucccuuucccccauu

SEQ ID NO: 107951 - RNA, 22 nt, Human
uaugucuuaauccuuccuuagg

SEQ ID NO: 107952 - RNA, 22 nt, Human
uaugucuugcauuuuucaaacu

SEQ ID NO: 107953 - RNA, 22 nt, Human
uaugucuuuaguaucuuuugga

SEQ ID NO: 107954 - RNA, 22 nt, Human
uaugugaauacagcaguggaug

SEQ ID NO: 107955 - RNA, 22 nt, Human
uaugugacauaucucaguuuga

SEQ ID NO: 107956 - RNA, 22 nt, Human
uaugugacuugacaaagcuucc

SEQ ID NO: 107957 - RNA, 22 nt, Human
uaugugauagaguuacuuuaua

SEQ ID NO: 107958 - RNA, 22 nt, Human
uaugugcaaaaugcuagacuag

SEQ ID NO: 107959 - RNA, 22 nt, Human
uaugugcauaugcauacacaca

SEQ ID NO: 107960 - RNA, 23 nt, Human
uaugugcauauguguaagaauac

SEQ ID NO: 107961 - RNA, 22 nt, Human
uaugugcauuauuaccagugga

SEQ ID NO: 107962 - RNA, 22 nt, Human
uaugugcuaucaaaugcucauu

SEQ ID NO: 107963 - RNA, 22 nt, Human
uauguguaaccuugugauuuau

SEQ ID NO: 107964 - RNA, 22 nt, Human
uauguguacaucugguugagca

SEQ ID NO: 107965 - RNA, 22 nt, Human
uauguguauaucuguaugugca

SEQ ID NO: 107966 - RNA, 19 nt, Human
uauguguauauguaucugu

SEQ ID NO: 107967 - RNA, 22 nt, Human
uauguguauguucauucaugca

SEQ ID NO: 107968 - RNA, 22 nt, Human
uauguguauugagcauuguuac

SEQ ID NO: 107969 - RNA, 22 nt, Human
uaugugucccugcuacucaaca

SEQ ID NO: 107970 - RNA, 22 nt, Human
uaugugucucaguugugauuga

SEQ ID NO: 107971 - RNA, 23 nt, Human
uaugugugggucuacuagaaguc

SEQ ID NO: 107972 - RNA, 22 nt, Human
uauguguguaugacagacagag

SEQ ID NO: 107973 - RNA, 22 nt, Human
uauguuaagugggauaaucaaa

SEQ ID NO: 107974 - RNA, 19 nt, Human
uauguuauguuguuuacuc

SEQ ID NO: 107975 - RNA, 22 nt, Human
uauguuauuuucauacaacaga

SEQ ID NO: 107976 - RNA, 22 nt, Human
ucccacaccugucuauuccuag

SEQ ID NO: 107977 - RNA, 21 nt, Human
ucccacagaaacugcgaaauu

SEQ ID NO: 107978 - RNA, 22 nt, Human
ucccacagcaugaguaacucuc

SEQ ID NO: 107979 - RNA, 22 nt, Human
ucccacagcuucgugcuucccc

SEQ ID NO: 107980 - RNA, 22 nt, Human
ucccacaggagccugaguccca

SEQ ID NO: 107981 - RNA, 22 nt, Human
ucccacagguggagcuugcagu

SEQ ID NO: 107982 - RNA, 22 nt, Human
ucccacccauccugcaucucuu

SEQ ID NO: 107983 - RNA, 22 nt, Human
ucccaccuuccguggaacccgu

SEQ ID NO: 107984 - RNA, 22 nt, Human
ucccacugagcauaugcagaug

SEQ ID NO: 107985 - RNA, 22 nt, Human
ucccacugagccccugcuggug

SEQ ID NO: 107986 - RNA, 22 nt, Human
ucccacuggacgucugugcugg

SEQ ID NO: 107987 - RNA, 22 nt, Human
ucccagaaaaaggaggcuauga

SEQ ID NO: 107988 - RNA, 22 nt, Human
ucccagaauccucacucuauca

SEQ ID NO: 107989 - RNA, 22 nt, Human
ucccagacaaucauuggccacc

SEQ ID NO: 107990 - RNA, 22 nt, Human
ucccagagaaagucaaggucuu

SEQ ID NO: 107991 - RNA, 22 nt, Human
ucccagagacagagccuccucc

SEQ ID NO: 107992 - RNA, 22 nt, Human
ucccagagcucuggagguugga

SEQ ID NO: 107993 - RNA, 22 nt, Human
ucccagagcugauaagccuuua

SEQ ID NO: 107994 - RNA, 22 nt, Human
ucccagaggaaauggcagcuga

SEQ ID NO: 107995 - RNA, 21 nt, Human
ucccagagugcuugggacugc

SEQ ID NO: 107996 - RNA, 22 nt, Human
ucccagaguuuccuguguccca

SEQ ID NO: 107997 - RNA, 22 nt, Human
ucccagauuguugauggcuuaa

SEQ ID NO: 107998 - RNA, 22 nt, Human
ucccagcacgucugcuguuucu

SEQ ID NO: 107999 - RNA, 22 nt, Human
ucccagcagcauagcucagaau

SEQ ID NO: 108000 - RNA, 22 nt, Human
ucccagccuccugacaguuuug

SEQ ID NO: 108001 - RNA, 22 nt, Human
ucccagccuuccagucugguuu

SEQ ID NO: 108002 - RNA, 22 nt, Human
ucccagccuuucuuucuccagc

SEQ ID NO: 108003 - RNA, 22 nt, Human
ucccagcgcggggggaggaucc

SEQ ID NO: 108004 - RNA, 22 nt, Human
ucccagcugcugagauagugcu

SEQ ID NO: 108005 - RNA, 17 nt, Human
ucccaggaacagggaau

SEQ ID NO: 108006 - RNA, 22 nt, Human
ucccaggacaugggcucugcuc

SEQ ID NO: 108007 - RNA, 22 nt, Human
ucccaggacuuccaguuggagg

SEQ ID NO: 108008 - RNA, 16 nt, Human
ucccaggaggcggaac

SEQ ID NO: 108009 - RNA, 22 nt, Human
ucccaggaucugagggcagaga

SEQ ID NO: 108010 - RNA, 22 nt, Human
ucccaggaugaagacaguguug

SEQ ID NO: 108011 - RNA, 22 nt, Human
ucccaggaugugcgugccgccg

SEQ ID NO: 108012 - RNA, 19 nt, Human
ucccaggcaaaggcuucuc

SEQ ID NO: 108013 - RNA, 22 nt, Human
ucccaggccacacuuggggaac

SEQ ID NO: 108014 - RNA, 22 nt, Human
ucccaggcuaggccucugcguu

SEQ ID NO: 108015 - RNA, 22 nt, Human
ucccaggcuggcaggcagcagu

SEQ ID NO: 108016 - RNA, 22 nt, Human
ucccagggacaccaagcuguuu

SEQ ID NO: 108017 - RNA, 22 nt, Human
ucccagggacucucugccuucc

SEQ ID NO: 108018 - RNA, 22 nt, Human
ucccagggacuggaugaugcag

SEQ ID NO: 108019 - RNA, 21 nt, Human
ucccagggccaggugccauca

SEQ ID NO: 108020 - RNA, 22 nt, Human
ucccaggguuacagccagggca

SEQ ID NO: 108021 - RNA, 22 nt, Human
ucccaggugaugcugaggccac

SEQ ID NO: 108022 - RNA, 20 nt, Human
ucccagucagccagagugag

SEQ ID NO: 108023 - RNA, 22 nt, Human
ucccagugggaagcagcacgcu

SEQ ID NO: 108024 - RNA, 22 nt, Human
ucccagugggugacuggaggcu

SEQ ID NO: 108025 - RNA, 22 nt, Human
ucccaguggugggugcacauuu

SEQ ID NO: 108026 - RNA, 22 nt, Human
ucccaguguggcaggccaugga

SEQ ID NO: 108027 - RNA, 22 nt, Human
ucccaucaucuguucuggcuac

SEQ ID NO: 108028 - RNA, 23 nt, Human
ucccaugggcucacugcccugca

SEQ ID NO: 108029 - RNA, 22 nt, Human
ucccauucugccaaggacauug

SEQ ID NO: 108030 - RNA, 22 nt, Human
ucccauuuaucuagaugucaga

SEQ ID NO: 108031 - RNA, 22 nt, Human
ucccauuucaugcuggcugugg

SEQ ID NO: 108032 - RNA, 22 nt, Human
ucccauuucuugcauccuugcu

SEQ ID NO: 108033 - RNA, 22 nt, Human
uccccaccuaagauacccaucu

SEQ ID NO: 108034 - RNA, 22 nt, Human
uccccacucucuccuggagcuu

SEQ ID NO: 108035 - RNA, 22 nt, Human
uccccagcauugagggucucuc

SEQ ID NO: 108036 - RNA, 22 nt, Human
uccccagccgugaaggagagga

SEQ ID NO: 108037 - RNA, 22 nt, Human
uccccagcucugugcuuccacu

SEQ ID NO: 108038 - RNA, 22 nt, Human
uccccaggacuaaguugcaauc

SEQ ID NO: 108039 - RNA, 20 nt, Human
uccccagggcaucaggagca

SEQ ID NO: 108040 - RNA, 22 nt, Human
uccccaggggcaucucucugcu

SEQ ID NO: 108041 - RNA, 22 nt, Human
ucccccacucuaaaggagccuu

SEQ ID NO: 108042 - RNA, 23 nt, Human
uccccucaggcagccagugcccu

SEQ ID NO: 108043 - RNA, 22 nt, Human
uccccucccuuccaacagagcu

SEQ ID NO: 108044 - RNA, 22 nt, Human
uccccuccucuccugauauggg

SEQ ID NO: 108045 - RNA, 22 nt, Human
uccccuuuguaagauggaaacg

SEQ ID NO: 108046 - RNA, 19 nt, Human
ucccgcccacugagcgugc

SEQ ID NO: 108047 - RNA, 22 nt, Human
ucccggcgcugggagguggguc

SEQ ID NO: 108048 - RNA, 22 nt, Human
ucccuagguccuagucacagua

SEQ ID NO: 108049 - RNA, 22 nt, Human
ucccucagaugagcuccuagca

SEQ ID NO: 108050 - RNA, 15 nt, Human
ucccucagcuaaaga

SEQ ID NO: 108051 - RNA, 22 nt, Human
ucccucagcucauauuuaugcc

SEQ ID NO: 108052 - RNA, 22 nt, Human
ucccucagggugcaguugcuuu

SEQ ID NO: 108053 - RNA, 22 nt, Human
ucccucaggugguucuuguuuc

SEQ ID NO: 108054 - RNA, 20 nt, Human
ucccucaguuuccagcccug

SEQ ID NO: 108055 - RNA, 22 nt, Human
ucccucaucucacaugugugug

SEQ ID NO: 108056 - RNA, 22 nt, Human
ucccuccccacuucugagcuuu

SEQ ID NO: 108057 - RNA, 19 nt, Human
ucccucccuguaaucucac

SEQ ID NO: 108058 - RNA, 20 nt, Human
ucccuccugcagauagagaa

SEQ ID NO: 108059 - RNA, 22 nt, Human
ucccuccuggccgucaccgcug

SEQ ID NO: 108060 - RNA, 22 nt, Human
ucccucuaaacuguaagauucu

SEQ ID NO: 108061 - RNA, 22 nt, Human
ucccucugcuagugcuugagcu

SEQ ID NO: 108062 - RNA, 22 nt, Human
ucccugaaacauaauagaugcc

SEQ ID NO: 108063 - RNA, 22 nt, Human
ucccugaaauuugaagaggaau

SEQ ID NO: 108064 - RNA, 22 nt, Human
ucccugaaccacuagugaugag

SEQ ID NO: 108065 - RNA, 22 nt, Human
ucccugagaaagcccaggaggu

SEQ ID NO: 108066 - RNA, 22 nt, Human
ucccugagagcacuggggagcc

SEQ ID NO: 108067 - RNA, 21 nt, Human
ucccugagcccaaggggcucc

SEQ ID NO: 108068 - RNA, 22 nt, Human
ucccugagcuucaucaggcuuu

SEQ ID NO: 108069 - RNA, 22 nt, Human
ucccugaugccuugauccgugg

SEQ ID NO: 108070 - RNA, 22 nt, Human
ucagccucauuuucugcucugu

SEQ ID NO: 108071 - RNA, 22 nt, Human
ucagccuccgaaagugcuggga

SEQ ID NO: 108072 - RNA, 22 nt, Human
ucagccuuugaagggcugcagg

SEQ ID NO: 108073 - RNA, 22 nt, Human
ucagcuaugagguggugguucu

SEQ ID NO: 108074 - RNA, 22 nt, Human
ucagcuccacagcuccucugcc

SEQ ID NO: 108075 - RNA, 22 nt, Human
ucagcucuaaguuuuaugcaaa

SEQ ID NO: 108076 - RNA, 22 nt, Human
ucagcucuacacacaccugugu

SEQ ID NO: 108077 - RNA, 22 nt, Human
ucagcucucugggcucgaaccu

SEQ ID NO: 108078 - RNA, 20 nt, Human
ucagcucugugccugggaug

SEQ ID NO: 108079 - RNA, 22 nt, Human
ucagcugaaguggagaagcaga

SEQ ID NO: 108080 - RNA, 22 nt, Human
ucagcugccccgggcacugccc

SEQ ID NO: 108081 - RNA, 22 nt, Human
ucagcugcugugguauguacau

SEQ ID NO: 108082 - RNA, 22 nt, Human
ucagcugcuucauguucugaau

SEQ ID NO: 108083 - RNA, 23 nt, Human
ucagcugcuuccuccugccugcc

SEQ ID NO: 108084 - RNA, 22 nt, Human
ucagcuggagauccuuguugug

SEQ ID NO: 108085 - RNA, 22 nt, Human
uggcccuuguccugggagaguu

SEQ ID NO: 108086 - RNA, 22 nt, Human
uggccggccaccuccaggguug

SEQ ID NO: 108087 - RNA, 22 nt, Human
uggccgggaagggacagugugg

SEQ ID NO: 108088 - RNA, 22 nt, Human
uggccguguuagauguuuggcu

SEQ ID NO: 108089 - RNA, 22 nt, Human
uggccucaaccguccuaagcac

SEQ ID NO: 108090 - RNA, 22 nt, Human
uggccucaagucugagggccuu

SEQ ID NO: 108091 - RNA, 22 nt, Human
uggccuccccuaacagccucuu

SEQ ID NO: 108092 - RNA, 23 nt, Human
uggccucuccccaccuggcagaa

SEQ ID NO: 108093 - RNA, 22 nt, Human
uggccucugaggcaccuuugcc

SEQ ID NO: 108094 - RNA, 22 nt, Human
uggccucugggaaagcagauuc

SEQ ID NO: 108095 - RNA, 22 nt, Human
uggccugacuguccagccaggg

SEQ ID NO: 108096 - RNA, 22 nt, Human
uggccugaggcucggcaugggu

SEQ ID NO: 108097 - RNA, 22 nt, Human
uggccugcaaagucuucuugcu

SEQ ID NO: 108098 - RNA, 22 nt, Human
uggccugccucccggcuucuuu

SEQ ID NO: 108099 - RNA, 22 nt, Human
uggccugccuucgcugagcuga

SEQ ID NO: 108100 - RNA, 22 nt, Human
uggccugcucugacuuuggggg

SEQ ID NO: 108101 - RNA, 22 nt, Human
uggccuggaagagaggucgagg

SEQ ID NO: 108102 - RNA, 23 nt, Human
uggccuggagagaaaagaugagu

SEQ ID NO: 108103 - RNA, 22 nt, Human
uggccuggcagagcaaggccug

SEQ ID NO: 108104 - RNA, 22 nt, Human
uggccuggcugcccugucugga

SEQ ID NO: 108105 - RNA, 22 nt, Human
uggccugggcaugaagcaucgu

SEQ ID NO: 108106 - RNA, 22 nt, Human
uggccuggggaccugugagacc

SEQ ID NO: 108107 - RNA, 22 nt, Human
uggccugggugcugcugacauc

SEQ ID NO: 108108 - RNA, 22 nt, Human
uggccugguaccacauagauuu

SEQ ID NO: 108109 - RNA, 22 nt, Human
uggccugguccuugucaaggca

SEQ ID NO: 108110 - RNA, 22 nt, Human
uggccuggugucugcgaggccu

SEQ ID NO: 108111 - RNA, 22 nt, Human
uggccugguuguugcugccguu

SEQ ID NO: 108112 - RNA, 22 nt, Human
uggccugucuuguugugcuaga

SEQ ID NO: 108113 - RNA, 22 nt, Human
uggccuguggcuuaaggucugu

SEQ ID NO: 108114 - RNA, 22 nt, Human
uggccuugaaccaggucuccac

SEQ ID NO: 108115 - RNA, 22 nt, Human
uggccuugagagaucaaaaggu

SEQ ID NO: 108116 - RNA, 22 nt, Human
uggccuuggagaggcacggccc

SEQ ID NO: 108117 - RNA, 22 nt, Human
uggccuugguccucuuugcaau

SEQ ID NO: 108118 - RNA, 22 nt, Human
uggccuuguguuuaagcaagaa

SEQ ID NO: 108119 - RNA, 22 nt, Human
uggcgagccccgacugaguguu

SEQ ID NO: 108120 - RNA, 20 nt, Human
uggcggggaugagggaguua

SEQ ID NO: 108121 - RNA, 22 nt, Human
uggcgucucucauaaguaugug

SEQ ID NO: 108122 - RNA, 23 nt, Human
uggcuaaacaguggagaaagcuu

SEQ ID NO: 108123 - RNA, 22 nt, Human
uggcuacagaauuggcccuguu

SEQ ID NO: 108124 - RNA, 22 nt, Human
uggcuacagauuugcugacaau

SEQ ID NO: 108125 - RNA, 22 nt, Human
uggcuacagcaagaggaaagaa

SEQ ID NO: 108126 - RNA, 22 nt, Human
uggcuacauuuguugaucacuu

SEQ ID NO: 108127 - RNA, 22 nt, Human
uggcucagagagggagugugga

SEQ ID NO: 108128 - RNA, 22 nt, Human
uggcucagaugcucuuccagug

SEQ ID NO: 108129 - RNA, 22 nt, Human
uggcucagcuuuccccaucugg

SEQ ID NO: 108130 - RNA, 22 nt, Human
uggcucaggaucuaagcagaau

SEQ ID NO: 108131 - RNA, 22 nt, Human
uggcucaggccuacgacgccuu

SEQ ID NO: 108132 - RNA, 23 nt, Human
uggcucagggucucuuaugaagu

SEQ ID NO: 108133 - RNA, 22 nt, Human
uggcucaggugugagcugaaga

SEQ ID NO: 108134 - RNA, 22 nt, Human
uggcucaguagcagugugguca

SEQ ID NO: 108135 - RNA, 22 nt, Human
uggcucaguuucaguccugguu

SEQ ID NO: 108136 - RNA, 22 nt, Human
uggcucauggaauuagcuauua

SEQ ID NO: 108137 - RNA, 22 nt, Human
uggcuccacaggccagggugug

SEQ ID NO: 108138 - RNA, 22 nt, Human
uggcuccagauuuccugcugca

SEQ ID NO: 108139 - RNA, 20 nt, Human
uggcuccagccuccccuacc

SEQ ID NO: 108140 - RNA, 22 nt, Human
uggcuccagcucaaguauggca

SEQ ID NO: 108141 - RNA, 22 nt, Human
uggcuccagguugaacuuuggg

SEQ ID NO: 108142 - RNA, 22 nt, Human
uggcuccaugauaguucuuaca

SEQ ID NO: 108143 - RNA, 22 nt, Human
uggcucccaaggagcuccugcc

SEQ ID NO: 108144 - RNA, 22 nt, Human
uggcucccacaaacucacuacu

SEQ ID NO: 108145 - RNA, 22 nt, Human
uggcuccguuguacaggcugga

SEQ ID NO: 108146 - RNA, 22 nt, Human
uggcuccuaaucggcuucuuuc

SEQ ID NO: 108147 - RNA, 22 nt, Human
uggcuccucccugugugugcgu

SEQ ID NO: 108148 - RNA, 20 nt, Human
uggcuccucuuggcuguggc

SEQ ID NO: 108149 - RNA, 20 nt, Human
uggcuccuggcuccucccuc

SEQ ID NO: 108150 - RNA, 22 nt, Human
uggcucucagcucccagcagcc

SEQ ID NO: 108151 - RNA, 22 nt, Human
uggcucucugggagguccuggc

SEQ ID NO: 108152 - RNA, 22 nt, Human
uggcucugagcugcaaagcugc

SEQ ID NO: 108153 - RNA, 23 nt, Human
uggcucugagcuuccugguggcc

SEQ ID NO: 108154 - RNA, 17 nt, Human
uggcucugaggcugaau

SEQ ID NO: 108155 - RNA, 22 nt, Human
uggcucugcaccucaguguacc

SEQ ID NO: 108156 - RNA, 22 nt, Human
uggcucugcagcagugugcgug

SEQ ID NO: 108157 - RNA, 18 nt, Human
uggcucugcagccagaug

SEQ ID NO: 108158 - RNA, 21 nt, Human
uggcucugcucagagcagucc

SEQ ID NO: 108159 - RNA, 22 nt, Human
uggcucugcugaaccuagugca

SEQ ID NO: 108160 - RNA, 22 nt, Human
uggcucuggauuaaucuaggaa

SEQ ID NO: 108161 - RNA, 22 nt, Human
uggcucugggaaugggaagaug

SEQ ID NO: 108162 - RNA, 22 nt, Human
uggcucugggcaccguguccac

SEQ ID NO: 108163 - RNA, 22 nt, Human
uggcucugugaacagacgacug

SEQ ID NO: 108164 - RNA, 23 nt, Human
uggcucugugucacauacaggau

SEQ ID NO: 108165 - RNA, 22 nt, Human
uggcucuguucgccaucaggag

SEQ ID NO: 108166 - RNA, 19 nt, Human
uggcucuguuucucuggag

SEQ ID NO: 108167 - RNA, 19 nt, Human
uggcucuuuuuaugacauu

SEQ ID NO: 108168 - RNA, 22 nt, Human
uggcugaauucaucaagaaaau

SEQ ID NO: 108169 - RNA, 22 nt, Human
uggcugacaauguagcaguaac

SEQ ID NO: 108170 - RNA, 22 nt, Human
uggcugagaaaaaagagcuaua

SEQ ID NO: 108171 - RNA, 22 nt, Human
uggcugagaaguucugguggga

SEQ ID NO: 108172 - RNA, 22 nt, Human
uggcugagaaugggaugaugcc

SEQ ID NO: 108173 - RNA, 22 nt, Human
uggcugagagucauccugugug

SEQ ID NO: 108174 - RNA, 22 nt, Human
uggcugagcugcagcguggcuu

SEQ ID NO: 108175 - RNA, 22 nt, Human
uggcugaggcacagcugccgcc

SEQ ID NO: 108176 - RNA, 23 nt, Human
uggcugagguccagguaguuuca

SEQ ID NO: 108177 - RNA, 22 nt, Human
uggcugagugaacauguccauu

SEQ ID NO: 108178 - RNA, 22 nt, Human
uggcugagugauauuugcaaag

SEQ ID NO: 108179 - RNA, 21 nt, Human
uggcugaguggaugcaugaau

SEQ ID NO: 108180 - RNA, 22 nt, Human
uggcugaguucuccaggaguag

SEQ ID NO: 108181 - RNA, 22 nt, Human
uggcugauugauuuccuaugua

SEQ ID NO: 108182 - RNA, 21 nt, Human
uggcugcaagcagcugccucc

SEQ ID NO: 108183 - RNA, 22 nt, Human
uggcugcacuucaacacauccu

SEQ ID NO: 108184 - RNA, 22 nt, Human
uggcugcagaucaagggcaggc

SEQ ID NO: 108185 - RNA, 22 nt, Human
uggcugccaugacgccugggga

SEQ ID NO: 108186 - RNA, 22 nt, Human
uggcugcccucaugggccugau

SEQ ID NO: 108187 - RNA, 22 nt, Human
ucccugcagccccugagccuuc

SEQ ID NO: 108188 - RNA, 22 nt, Human
ucccugcaguaguggcuaagau

SEQ ID NO: 108189 - RNA, 22 nt, Human
ucccugcccucagugcacccgg

SEQ ID NO: 108190 - RNA, 20 nt, Human
ucccugccuuuuacugcugg

SEQ ID NO: 108191 - RNA, 22 nt, Human
ucccugcugggagaugaccuua

SEQ ID NO: 108192 - RNA, 22 nt, Human
ucccugcuuggaaugacccuua

SEQ ID NO: 108193 - RNA, 22 nt, Human
ucccuggaacagagagacaacg

SEQ ID NO: 108194 - RNA, 22 nt, Human
uccccaguaagccugcacugug

SEQ ID NO: 108195 - RNA, 22 nt, Human
ucccccaaaugaaugaggaaua

SEQ ID NO: 108196 - RNA, 22 nt, Human
ucccccaacucuuagcacugua

SEQ ID NO: 108197 - RNA, 22 nt, Human
uccccucucugcgcucccaggu

SEQ ID NO: 108198 - RNA, 22 nt, Human
uccccucugguugacccaggag

SEQ ID NO: 108199 - RNA, 18 nt, Human
uccccugcucuggugcuc

SEQ ID NO: 108200 - RNA, 22 nt, Human
uccccuggcaccuaguccuacu

SEQ ID NO: 108201 - RNA, 22 nt, Human
uccccuuggcuuggucaagagg

SEQ ID NO: 108202 - RNA, 22 nt, Human
ucccgcuucuuccgaaucgcga

SEQ ID NO: 108203 - RNA, 22 nt, Human
ucccgggcaggucgagcgagcc

SEQ ID NO: 108204 - RNA, 22 nt, Human
ucccguugaugacggugcaucc

SEQ ID NO: 108205 - RNA, 22 nt, Human
ucccuaaacucugaacugauuc

SEQ ID NO: 108206 - RNA, 22 nt, Human
ucccuagaggucuucacaagau

SEQ ID NO: 108207 - RNA, 22 nt, Human
ucccuaggagaauugccgcagc

SEQ ID NO: 108208 - RNA, 22 nt, Human
ucccuagucgcaucuguggaga

SEQ ID NO: 108209 - RNA, 22 nt, Human
ucccucagaaauucucucugaa

SEQ ID NO: 108210 - RNA, 21 nt, Human
ucccucagaagcucuugguca

SEQ ID NO: 108211 - RNA, 21 nt, Human
ucccucagaagguagccaagc

SEQ ID NO: 108212 - RNA, 18 nt, Human
ucccucagaauuauagaa

SEQ ID NO: 108213 - RNA, 22 nt, Human
ucccucagcaggaacuggccug

SEQ ID NO: 108214 - RNA, 22 nt, Human
ucccucagcaggaauguggcag

SEQ ID NO: 108215 - RNA, 22 nt, Human
ucccucaggacccaacuuguaa

SEQ ID NO: 108216 - RNA, 23 nt, Human
ucccucaggccuuaucuccaucu

SEQ ID NO: 108217 - RNA, 19 nt, Human
ucccucagucugccaggcc

SEQ ID NO: 108218 - RNA, 22 nt, Human
ucccuccagaauggugaggaag

SEQ ID NO: 108219 - RNA, 18 nt, Human
ucccucccugcuguggcc

SEQ ID NO: 108220 - RNA, 18 nt, Human
ucccuccugccugcuucc

SEQ ID NO: 108221 - RNA, 22 nt, Human
ucccucucccuauugccuggag

SEQ ID NO: 108222 - RNA, 22 nt, Human
ucccucucuagccuguucagua

SEQ ID NO: 108223 - RNA, 22 nt, Human
ucccucucuggcuggggugcgg

SEQ ID NO: 108224 - RNA, 22 nt, Human
ucccucucuugggcguggcuca

SEQ ID NO: 108225 - RNA, 22 nt, Human
ucccucugggcuggagcagggu

SEQ ID NO: 108226 - RNA, 22 nt, Human
ucccucugguccucgguggaga

SEQ ID NO: 108227 - RNA, 22 nt, Human
ucccugaaacaucucuguggau

SEQ ID NO: 108228 - RNA, 22 nt, Human
ucucucuucaacccuuaacuag

SEQ ID NO: 108229 - RNA, 22 nt, Human
ucucucuucuuuguuaagaaug

SEQ ID NO: 108230 - RNA, 22 nt, Human
ucucugaagagucagacauaac

SEQ ID NO: 108231 - RNA, 22 nt, Human
ucucugagaagcugaggcuggg

SEQ ID NO: 108232 - RNA, 22 nt, Human
ucucugagaaguuccuuuguga

SEQ ID NO: 108233 - RNA, 21 nt, Human
ucucugagaggucugcuuaga

SEQ ID NO: 108234 - RNA, 22 nt, Human
ucucugagcaccuaagauauau

SEQ ID NO: 108235 - RNA, 23 nt, Human
ucucugagccauagcagucccaa

SEQ ID NO: 108236 - RNA, 22 nt, Human
ucucugagcccagugucccccu

SEQ ID NO: 108237 - RNA, 22 nt, Human
ucucugagggagauggccugcc

SEQ ID NO: 108238 - RNA, 22 nt, Human
ucucugagguuguuuccagcac

SEQ ID NO: 108239 - RNA, 22 nt, Human
ucucugaucuuuaauucagaua

SEQ ID NO: 108240 - RNA, 22 nt, Human
ucucugcacuugcacauaagcu

SEQ ID NO: 108241 - RNA, 20 nt, Human
ucucugcagcagaggcuggg

SEQ ID NO: 108242 - RNA, 19 nt, Human
ucucugcagcgcgcccggc

SEQ ID NO: 108243 - RNA, 22 nt, Human
ucucugcaucccagggcucagc

SEQ ID NO: 108244 - RNA, 23 nt, Human
ucucugcauguccugagcacauc

SEQ ID NO: 108245 - RNA, 22 nt, Human
ucucugccacagcuucugccuu

SEQ ID NO: 108246 - RNA, 22 nt, Human
ucucugccaccaugagaugggc

SEQ ID NO: 108247 - RNA, 22 nt, Human
ucucugcccauccucaguccac

SEQ ID NO: 108248 - RNA, 22 nt, Human
ucucugcuaagauugugucuag

SEQ ID NO: 108249 - RNA, 22 nt, Human
ucucugcucaggcaccagcccu

SEQ ID NO: 108250 - RNA, 21 nt, Human
ucucuggaauuagaccauguu

SEQ ID NO: 108251 - RNA, 22 nt, Human
ucucuggaauuggcugaggcaa

SEQ ID NO: 108252 - RNA, 22 nt, Human
ucucuggcacucccuuauggcu

SEQ ID NO: 108253 - RNA, 22 nt, Human
ucucuggccccauggcugagcu

SEQ ID NO: 108254 - RNA, 22 nt, Human
ucucuggcuuagguugagugca

SEQ ID NO: 108255 - RNA, 22 nt, Human
ucucugggaaauggagaauuuu

SEQ ID NO: 108256 - RNA, 22 nt, Human
ucucugggagccaggaugacac

SEQ ID NO: 108257 - RNA, 22 nt, Human
ucucuggggaaaaggcugauac

SEQ ID NO: 108258 - RNA, 22 nt, Human
ucucuggggccuuucuacauca

SEQ ID NO: 108259 - RNA, 22 nt, Human
ucucugggguagggcccaggac

SEQ ID NO: 108260 - RNA, 22 nt, Human
ucucuggguccuggcaagcuca

SEQ ID NO: 108261 - RNA, 23 nt, Human
ucucugggugggcugugucuaua

SEQ ID NO: 108262 - RNA, 20 nt, Human
ucucuggguucucacucagc

SEQ ID NO: 108263 - RNA, 22 nt, Human
ucucuguaagagaggcuuucau

SEQ ID NO: 108264 - RNA, 23 nt, Human
ucucuguacagaugaggacacac

SEQ ID NO: 108265 - RNA, 22 nt, Human
ucucuguaguugggcagcugcu

SEQ ID NO: 108266 - RNA, 22 nt, Human
ucucugucacacaaucuacaca

SEQ ID NO: 108267 - RNA, 22 nt, Human
ucucugucucccguguguccgg

SEQ ID NO: 108268 - RNA, 22 nt, Human
ucucugugacauuucugagccu

SEQ ID NO: 108269 - RNA, 22 nt, Human
ucucugugagauuuguauuaag

SEQ ID NO: 108270 - RNA, 22 nt, Human
ucucugugagccagguccuagu

SEQ ID NO: 108271 - RNA, 22 nt, Human
ucucugugaguggaaggcaccc

SEQ ID NO: 108272 - RNA, 22 nt, Human
ucucugugcaggaugcugaguu

SEQ ID NO: 108273 - RNA, 22 nt, Human
ucucuguggcaacaauucacua

SEQ ID NO: 108274 - RNA, 22 nt, Human
ucucuguggcaagcaugcugcu

SEQ ID NO: 108275 - RNA, 22 nt, Human
ucucugugguacugagagucua

SEQ ID NO: 108276 - RNA, 22 nt, Human
ucucugugguuugagagccggg

SEQ ID NO: 108277 - RNA, 21 nt, Human
ucucuguguacagucucaccc

SEQ ID NO: 108278 - RNA, 22 nt, Human
ucucuguguccugaaaugaagg

SEQ ID NO: 108279 - RNA, 19 nt, Human
ucucugugucucuguuuau

SEQ ID NO: 108280 - RNA, 23 nt, Human
ucucugugugccucaguuucuuc

SEQ ID NO: 108281 - RNA, 22 nt, Human
ucucuguguucccuguuuucuc

SEQ ID NO: 108282 - RNA, 22 nt, Human
ucucuguguugcaggaaaaucu

SEQ ID NO: 108283 - RNA, 22 nt, Human
ucucuuaaaggucuucagcuga

SEQ ID NO: 108284 - RNA, 23 nt, Human
ucucuuaccugagacauuuccua

SEQ ID NO: 108285 - RNA, 22 nt, Human
ucucuuaggagaaauucauaaa

SEQ ID NO: 108286 - RNA, 23 nt, Human
ucucuuaucacaauucauuuugc

SEQ ID NO: 108287 - RNA, 22 nt, Human
ucucuucacauuccuggcaaac

SEQ ID NO: 108288 - RNA, 22 nt, Human
ucucuuccuagugaugggcuuu

SEQ ID NO: 108289 - RNA, 22 nt, Human
ucucuuccuugaccuauuguaa

SEQ ID NO: 108290 - RNA, 22 nt, Human
ucucuucuaacacuagaaauuc

SEQ ID NO: 108291 - RNA, 22 nt, Human
ucucuucuaauuuucccgagua

SEQ ID NO: 108292 - RNA, 19 nt, Human
ucucuucucccugguuuua

SEQ ID NO: 108293 - RNA, 22 nt, Human
ucucuucuugauuuucacugga

SEQ ID NO: 108294 - RNA, 18 nt, Human
ucucuucuuggcagucaa

SEQ ID NO: 108295 - RNA, 22 nt, Human
ucucuuggaacacuugcucuua

SEQ ID NO: 108296 - RNA, 22 nt, Human
ucucuuggacauguggcucugc

SEQ ID NO: 108297 - RNA, 22 nt, Human
ucucuugggaggaaagagagaa

SEQ ID NO: 108298 - RNA, 22 nt, Human
ucucuuggugacuuaaaauguu

SEQ ID NO: 108299 - RNA, 22 nt, Human
ucucuuuaaguauaaucuuaua

SEQ ID NO: 108300 - RNA, 22 nt, Human
ucucuuuacuuucaccaauuug

SEQ ID NO: 108301 - RNA, 22 nt, Human
ucucuuuagugcuuagacgucu

SEQ ID NO: 108302 - RNA, 22 nt, Human
ucucuuucucaaaauguaagca

SEQ ID NO: 108303 - RNA, 22 nt, Human
ucugauaauggacuucucaucu

SEQ ID NO: 108304 - RNA, 17 nt, Human
ucugaugacuagaggaa

SEQ ID NO: 108305 - RNA, 22 nt, Human
ucugaugauaaagcauccuuua

SEQ ID NO: 108306 - RNA, 22 nt, Human
ucugauguguuuaagaaagaag

SEQ ID NO: 108307 - RNA, 22 nt, Human
ucugauguugcuucugcagaac

SEQ ID NO: 108308 - RNA, 22 nt, Human
ucugauguugugacaucacuuc

SEQ ID NO: 108309 - RNA, 22 nt, Human
ucugauuccagaaggggcauac

SEQ ID NO: 108310 - RNA, 22 nt, Human
ucugauuuacuggaaaaaagga

SEQ ID NO: 108311 - RNA, 22 nt, Human
ucugcaaauauuagcuuagaca

SEQ ID NO: 108312 - RNA, 22 nt, Human
ucugcaacauuccucuccccac

SEQ ID NO: 108313 - RNA, 22 nt, Human
ucugcaacgcacugcaaaaccu

SEQ ID NO: 108314 - RNA, 22 nt, Human
ucugcaagcgucacaugauucu

SEQ ID NO: 108315 - RNA, 22 nt, Human
ucugcaauguuuucccauccug

SEQ ID NO: 108316 - RNA, 22 nt, Human
ucugcacacaauuuaucuuucu

SEQ ID NO: 108317 - RNA, 22 nt, Human
ucugcacauagguaggcuggaa

SEQ ID NO: 108318 - RNA, 22 nt, Human
ucugcacauggcgcugguccug

SEQ ID NO: 108319 - RNA, 22 nt, Human
ucugcacauguaguaaauauua

SEQ ID NO: 108320 - RNA, 22 nt, Human
ucugcacauuuuaccaauacuc

SEQ ID NO: 108321 - RNA, 22 nt, Human
ucugcacccugaccucuguuuc

SEQ ID NO: 108322 - RNA, 22 nt, Human
ucugcacccugugguccucuag

SEQ ID NO: 108323 - RNA, 22 nt, Human
ucugcacccuucuggguuggaa

SEQ ID NO: 108324 - RNA, 20 nt, Human
ucugcaccuccuuccaauca

SEQ ID NO: 108325 - RNA, 20 nt, Human
ucugcacuccugcaugugcc

SEQ ID NO: 108326 - RNA, 22 nt, Human
ucugcagaaaguggcucagugg

SEQ ID NO: 108327 - RNA, 22 nt, Human
ucugcagaacuuuaugagcaaa

SEQ ID NO: 108328 - RNA, 22 nt, Human
ucugcagaagcucacuaaaucc

SEQ ID NO: 108329 - RNA, 22 nt, Human
ucugcagaauugucucaagcua

SEQ ID NO: 108330 - RNA, 22 nt, Human
ucugcagagcauuauagcaaaa

SEQ ID NO: 108331 - RNA, 22 nt, Human
ucugcagagccucaggagaaca

SEQ ID NO: 108332 - RNA, 19 nt, Human
ucugcagaggaauucuuca

SEQ ID NO: 108333 - RNA, 22 nt, Human
ucugcagccagaggcaugaaaa

SEQ ID NO: 108334 - RNA, 22 nt, Human
ucugcaggaagcuggcggcuga

SEQ ID NO: 108335 - RNA, 18 nt, Human
ucugcaggaccucagggc

SEQ ID NO: 108336 - RNA, 22 nt, Human
ucugcaggagcagggcguggag

SEQ ID NO: 108337 - RNA, 22 nt, Human
ucugcaggaggcuggcugcagg

SEQ ID NO: 108338 - RNA, 22 nt, Human
ucugcaggaugcaaaguguaca

SEQ ID NO: 108339 - RNA, 22 nt, Human
ucugcaggcuguacaggaagca

SEQ ID NO: 108340 - RNA, 22 nt, Human
ucugcagggaugugagggguga

SEQ ID NO: 108341 - RNA, 22 nt, Human
ucugcagggucccagccucagc

SEQ ID NO: 108342 - RNA, 22 nt, Human
ucugcagguguuggaaggguca

SEQ ID NO: 108343 - RNA, 22 nt, Human
ucugcauaccccuuuagcagag

SEQ ID NO: 108344 - RNA, 22 nt, Human
ucugcauauuguuaauggaaug

SEQ ID NO: 108345 - RNA, 22 nt, Human
ucugcaucucaggauucccuuc

SEQ ID NO: 108346 - RNA, 22 nt, Human
ucccugaaucucgaacuagccu

SEQ ID NO: 108347 - RNA, 22 nt, Human
ucccugagacucuggaguguaa

SEQ ID NO: 108348 - RNA, 22 nt, Human
ucccugagcugagcucaacagc

SEQ ID NO: 108349 - RNA, 23 nt, Human
ucccugagcuggagagacugcac

SEQ ID NO: 108350 - RNA, 22 nt, Human
ucccugagcuucucugaaaugg

SEQ ID NO: 108351 - RNA, 22 nt, Human
ucccugaggaagggguguggug

SEQ ID NO: 108352 - RNA, 22 nt, Human
ucccugaguguauguggugaac

SEQ ID NO: 108353 - RNA, 19 nt, Human
ucccugaguuccagcccag

SEQ ID NO: 108354 - RNA, 22 nt, Human
ucccugaguuuucuuucugacu

SEQ ID NO: 108355 - RNA, 22 nt, Human
ucccugaugugggcugcgugac

SEQ ID NO: 108356 - RNA, 22 nt, Human
ucccugcaguaggcagcccucc

SEQ ID NO: 108357 - RNA, 22 nt, Human
ucccugccaaugauuggagcaa

SEQ ID NO: 108358 - RNA, 22 nt, Human
ucccugccuccuggcagugcca

SEQ ID NO: 108359 - RNA, 22 nt, Human
ucccugccucucagacuuccuu

SEQ ID NO: 108360 - RNA, 22 nt, Human
ucccugcucagcucaccuggca

SEQ ID NO: 108361 - RNA, 22 nt, Human
ucccugcugagagugcucuccc

SEQ ID NO: 108362 - RNA, 21 nt, Human
ucccugcuuucuggcccaguc

SEQ ID NO: 108363 - RNA, 23 nt, Human
ucccuggccgcaauggccgccuu

SEQ ID NO: 108364 - RNA, 22 nt, Human
ucccuggccuggaaggauauca

SEQ ID NO: 108365 - RNA, 19 nt, Human
ucccuggcgccucucgggc

SEQ ID NO: 108366 - RNA, 22 nt, Human
ucccugggaacaaaggaugaga

SEQ ID NO: 108367 - RNA, 22 nt, Human
ucccugggagaugaugaugagg

SEQ ID NO: 108368 - RNA, 16 nt, Human
ucccugggaguggugg

SEQ ID NO: 108369 - RNA, 18 nt, Human
ucccugggauauaauuac

SEQ ID NO: 108370 - RNA, 22 nt, Human
ucccugggccuaucuuagcucc

SEQ ID NO: 108371 - RNA, 22 nt, Human
ucccuggggcaguggcucggag

SEQ ID NO: 108372 - RNA, 18 nt, Human
ucccuggggcugccaccc

SEQ ID NO: 108373 - RNA, 22 nt, Human
ucccugguuacguauaaagaug

SEQ ID NO: 108374 - RNA, 22 nt, Human
ucccuguauagagaaucccuuu

SEQ ID NO: 108375 - RNA, 21 nt, Human
ucccugugagcagcucuuccu

SEQ ID NO: 108376 - RNA, 22 nt, Human
ucccugugccuauaugugcuga

SEQ ID NO: 108377 - RNA, 22 nt, Human
ucccuuaaccguaggacagucu

SEQ ID NO: 108378 - RNA, 22 nt, Human
ucccuuaagcaccugaguaguc

SEQ ID NO: 108379 - RNA, 22 nt, Human
ucccuucaauaauucaacauua

SEQ ID NO: 108380 - RNA, 22 nt, Human
ucccuucacagaugcgauguuu

SEQ ID NO: 108381 - RNA, 18 nt, Human
ucccuucucccuugccuc

SEQ ID NO: 108382 - RNA, 22 nt, Human
ucccuuggaaaguagccucaca

SEQ ID NO: 108383 - RNA, 22 nt, Human
ucccuugguuaaauauguagga

SEQ ID NO: 108384 - RNA, 22 nt, Human
ucccuuuggauccaagcuuaug

SEQ ID NO: 108385 - RNA, 22 nt, Human
uccgaggccaaagcugugaaua

SEQ ID NO: 108386 - RNA, 22 nt, Human
uccgauaagcaauucuugugcu

SEQ ID NO: 108387 - RNA, 22 nt, Human
uccgauuagcucuuuauaaaac

SEQ ID NO: 108388 - RNA, 22 nt, Human
uccgccaggacugagggcccau

SEQ ID NO: 108389 - RNA, 22 nt, Human
uccgcccgcacguauggagugg

SEQ ID NO: 108390 - RNA, 22 nt, Human
uccgcgcucucacccgcucccg

SEQ ID NO: 108391 - RNA, 22 nt, Human
uccgggagcugaacgucuugcg

SEQ ID NO: 108392 - RNA, 22 nt, Human
uccgggggugguagauuuccuu

SEQ ID NO: 108393 - RNA, 22 nt, Human
uccguggggccuguggcuuccg

SEQ ID NO: 108394 - RNA, 22 nt, Human
uccguuuucacacugcuauaaa

SEQ ID NO: 108395 - RNA, 22 nt, Human
uccuaacuaauuuguagcaaaa

SEQ ID NO: 108396 - RNA, 20 nt, Human
uccuaacuauaaaguggcuc

SEQ ID NO: 108397 - RNA, 22 nt, Human
uccuaacuccacuagccuuggg

SEQ ID NO: 108398 - RNA, 22 nt, Human
uccuaacugcccugggcaaggu

SEQ ID NO: 108399 - RNA, 20 nt, Human
uccuaagaggauggccacgu

SEQ ID NO: 108400 - RNA, 22 nt, Human
uccuaagauagaagauagugaa

SEQ ID NO: 108401 - RNA, 22 nt, Human
uccuacaucagcucucaguagc

SEQ ID NO: 108402 - RNA, 22 nt, Human
uccuagaacagcccaccuggaa

SEQ ID NO: 108403 - RNA, 22 nt, Human
uccuagaacuccaggacagucc

SEQ ID NO: 108404 - RNA, 22 nt, Human
uccuagaauauuuguggagguu

SEQ ID NO: 108405 - RNA, 22 nt, Human
uccuagaaucuuuguaagauug

SEQ ID NO: 108406 - RNA, 22 nt, Human
uccuagaaugcaccucugcugu

SEQ ID NO: 108407 - RNA, 22 nt, Human
uccuagagaugcaauuugauuu

SEQ ID NO: 108408 - RNA, 22 nt, Human
uccuaggaaguggaggcaccug

SEQ ID NO: 108409 - RNA, 22 nt, Human
uccuaggcccagccugagcugu

SEQ ID NO: 108410 - RNA, 22 nt, Human
uccuaggcuccagaacugugaa

SEQ ID NO: 108411 - RNA, 22 nt, Human
uccuaggguaaucagcauacau

SEQ ID NO: 108412 - RNA, 22 nt, Human
ccauagaugagacaaaguagag

SEQ ID NO: 108413 - RNA, 22 nt, Human
ccauagcaagaggagcagaaau

SEQ ID NO: 108414 - RNA, 22 nt, Human
ccauagugaauugucucagacg

SEQ ID NO: 108415 - RNA, 22 nt, Human
ccauauuugcuucuugcugaua

SEQ ID NO: 108416 - RNA, 22 nt, Human
ccaucagagggcugcucugcaa

SEQ ID NO: 108417 - RNA, 22 nt, Human
ccaucaguggcaaauaaacacc

SEQ ID NO: 108418 - RNA, 22 nt, Human
ccaucauuugauacagcugucu

SEQ ID NO: 108419 - RNA, 22 nt, Human
ccauccagaccaguccaugggu

SEQ ID NO: 108420 - RNA, 22 nt, Human
ccaucccugagucacaggaggg

SEQ ID NO: 108421 - RNA, 22 nt, Human
ccauccuaucugaccuacuugu

SEQ ID NO: 108422 - RNA, 22 nt, Human
ccauccuggccuugcuguccac

SEQ ID NO: 108423 - RNA, 22 nt, Human
ccauccugucuguggccucagg

SEQ ID NO: 108424 - RNA, 22 nt, Human
ccauccuuggcucgcucucugu

SEQ ID NO: 108425 - RNA, 22 nt, Human
ccaugcaacagaauccagauuu

SEQ ID NO: 108426 - RNA, 19 nt, Human
ccaugcagccugggggcag

SEQ ID NO: 108427 - RNA, 22 nt, Human
ccaugcauggcacuggacuggg

SEQ ID NO: 108428 - RNA, 22 nt, Human
ccaugccucgggaagagucugu

SEQ ID NO: 108429 - RNA, 22 nt, Human
ccaugccuggacuccacucuca

SEQ ID NO: 108430 - RNA, 22 nt, Human
ccaugcuggagucccuagcugu

SEQ ID NO: 108431 - RNA, 22 nt, Human
ccaugcugugacacaguaguua

SEQ ID NO: 108432 - RNA, 23 nt, Human
ccauggagcauggcucacuaggc

SEQ ID NO: 108433 - RNA, 22 nt, Human
ccauggaguuccucuggucuau

SEQ ID NO: 108434 - RNA, 22 nt, Human
ccauggaucuggaucuaucuuu

SEQ ID NO: 108435 - RNA, 22 nt, Human
ccauggcaacuggcguccaggg

SEQ ID NO: 108436 - RNA, 23 nt, Human
ccauggccaaugucaagcuacua

SEQ ID NO: 108437 - RNA, 22 nt, Human
ccauggcuccuugcccuguagc

SEQ ID NO: 108438 - RNA, 22 nt, Human
ccauggcucuuaccuuguuaua

SEQ ID NO: 108439 - RNA, 22 nt, Human
ccauggcuuacagauggagcau

SEQ ID NO: 108440 - RNA, 22 nt, Human
ccauggcuuuugagucucaaga

SEQ ID NO: 108441 - RNA, 22 nt, Human
ccaugggaauugggagguccca

SEQ ID NO: 108442 - RNA, 22 nt, Human
ccauguggggucaguguuuggg

SEQ ID NO: 108443 - RNA, 22 nt, Human
ccauguguucaauaagggaguu

SEQ ID NO: 108444 - RNA, 22 nt, Human
ccauguguugagauuccagccu

SEQ ID NO: 108445 - RNA, 22 nt, Human
ccauguugucaaacuuagagua

SEQ ID NO: 108446 - RNA, 22 nt, Human
ccauuaaacuuguggacccagu

SEQ ID NO: 108447 - RNA, 22 nt, Human
ccauuacugaaauaaagagaau

SEQ ID NO: 108448 - RNA, 22 nt, Human
ccauuauuauaggaggcucauu

SEQ ID NO: 108449 - RNA, 23 nt, Human
ccauucaucucagucauugcuuu

SEQ ID NO: 108450 - RNA, 22 nt, Human
ccauucaugugagcaagaacug

SEQ ID NO: 108451 - RNA, 23 nt, Human
ccauucccacugugccuucccug

SEQ ID NO: 108452 - RNA, 22 nt, Human
ccauucugaacaauucuugucu

SEQ ID NO: 108453 - RNA, 22 nt, Human
ccauucuuucagugucucaugu

SEQ ID NO: 108454 - RNA, 22 nt, Human
ccauuguaaagaguauacuuug

SEQ ID NO: 108455 - RNA, 22 nt, Human
ccauuguuuauuuagacuuaau

SEQ ID NO: 108456 - RNA, 22 nt, Human
ccauuucacucuuccugaagga

SEQ ID NO: 108457 - RNA, 18 nt, Human
ccauuucaugauuauuac

SEQ ID NO: 108458 - RNA, 22 nt, Human
ccauuuggaggucauuaggaca

SEQ ID NO: 108459 - RNA, 22 nt, Human
ccauuugugauguggcagcauc

SEQ ID NO: 108460 - RNA, 23 nt, Human
ccauuuuguguuuuggagaaaca

SEQ ID NO: 108461 - RNA, 20 nt, Human
cccaaagcuucauaugagcc

SEQ ID NO: 108462 - RNA, 22 nt, Human
cccaaagguugaggcugcagug

SEQ ID NO: 108463 - RNA, 22 nt, Human
cccaagagguggagguugcagu

SEQ ID NO: 108464 - RNA, 22 nt, Human
cccaagcagggugcagaggcau

SEQ ID NO: 108465 - RNA, 22 nt, Human
cccaagccagacccugacccug

SEQ ID NO: 108466 - RNA, 23 nt, Human
cccaagccugugcccucugacuc

SEQ ID NO: 108467 - RNA, 16 nt, Human
cccaaggagcuccagg

SEQ ID NO: 108468 - RNA, 22 nt, Human
cccaaggcagggauuuucugcu

SEQ ID NO: 108469 - RNA, 22 nt, Human
cccaaggcauggcaugguggca

SEQ ID NO: 108470 - RNA, 22 nt, Human
cccaaggcugcagugagcauga

SEQ ID NO: 108471 - RNA, 21 nt, Human
cccaagggaggcaggauaagg

SEQ ID NO: 108472 - RNA, 22 nt, Human
cccaagggaugcuugaguaguu

SEQ ID NO: 108473 - RNA, 22 nt, Human
cccaagggguguugauggagga

SEQ ID NO: 108474 - RNA, 21 nt, Human
cacaccaaacaggaacaggga

SEQ ID NO: 108475 - RNA, 22 nt, Human
cacaccaaaguauuugguauuu

SEQ ID NO: 108476 - RNA, 22 nt, Human
cacaccagcauggucucagugu

SEQ ID NO: 108477 - RNA, 22 nt, Human
cacaccauaugauuccauuuag

SEQ ID NO: 108478 - RNA, 19 nt, Human
cacacccaugcuugccaag

SEQ ID NO: 108479 - RNA, 22 nt, Human
cacaccucagccauguggaggc

SEQ ID NO: 108480 - RNA, 23 nt, Human
cacaccuguuaagaagagugccu

SEQ ID NO: 108481 - RNA, 22 nt, Human
cacaccuuaggccugagcgcuu

SEQ ID NO: 108482 - RNA, 22 nt, Human
cacacugaccugaacuuagcau

SEQ ID NO: 108483 - RNA, 22 nt, Human
cacacugauaggcuugacaggc

SEQ ID NO: 108484 - RNA, 22 nt, Human
cacacuuuguugaaguuuucau

SEQ ID NO: 108485 - RNA, 22 nt, Human
cacagaaaggcucaaaucccaa

SEQ ID NO: 108486 - RNA, 22 nt, Human
cacagaaauuauuaggaugcuu

SEQ ID NO: 108487 - RNA, 22 nt, Human
cacagaauaaauugguaucaga

SEQ ID NO: 108488 - RNA, 22 nt, Human
cacagaauggaccaguuuuaga

SEQ ID NO: 108489 - RNA, 22 nt, Human
cacagaauuaagggagaaauau

SEQ ID NO: 108490 - RNA, 22 nt, Human
cacagaauuuucucuuuacaau

SEQ ID NO: 108491 - RNA, 22 nt, Human
cacagagaaugaugagucacug

SEQ ID NO: 108492 - RNA, 22 nt, Human
cacagagacagaucuauuuugc

SEQ ID NO: 108493 - RNA, 22 nt, Human
cacagagcaggugcugggaaga

SEQ ID NO: 108494 - RNA, 22 nt, Human
cacagagcuggaaaggcugggc

SEQ ID NO: 108495 - RNA, 22 nt, Human
cacagaggaaaggcaguuggua

SEQ ID NO: 108496 - RNA, 22 nt, Human
cacagaggagugcacacucucu

SEQ ID NO: 108497 - RNA, 22 nt, Human
cacagaggugauaguggucaag

SEQ ID NO: 108498 - RNA, 20 nt, Human
cacagagucuugcagcguuc

SEQ ID NO: 108499 - RNA, 22 nt, Human
cacagauaaggauguuaauuuu

SEQ ID NO: 108500 - RNA, 22 nt, Human
cacagcaaagacacucucaacu

SEQ ID NO: 108501 - RNA, 22 nt, Human
cacagcaaaggcuucggcugau

SEQ ID NO: 108502 - RNA, 22 nt, Human
cacagcaauagcuaacugauac

SEQ ID NO: 108503 - RNA, 22 nt, Human
cacagcauaaugaaauauacuu

SEQ ID NO: 108504 - RNA, 22 nt, Human
cacagccuuacugagauccacu

SEQ ID NO: 108505 - RNA, 22 nt, Human
cacagccuuuaggguacacaca

SEQ ID NO: 108506 - RNA, 22 nt, Human
cacagcgugaugaauguagcgu

SEQ ID NO: 108507 - RNA, 22 nt, Human
cacagcugaaguagccaugugg

SEQ ID NO: 108508 - RNA, 22 nt, Human
cacagcugcuuguuagaauagc

SEQ ID NO: 108509 - RNA, 22 nt, Human
cacagcuguauccaggagaucc

SEQ ID NO: 108510 - RNA, 22 nt, Human
cacagcugugagaagggagccu

SEQ ID NO: 108511 - RNA, 22 nt, Human
cacagcuucaguuucugacuug

SEQ ID NO: 108512 - RNA, 22 nt, Human
cacagcuucccaaaguggaccu

SEQ ID NO: 108513 - RNA, 22 nt, Human
cacagcuucuccccgcugcggc

SEQ ID NO: 108514 - RNA, 22 nt, Human
cacagcuucugucugacccaug

SEQ ID NO: 108515 - RNA, 22 nt, Human
cacagcuugggcucugacaaua

SEQ ID NO: 108516 - RNA, 22 nt, Human
cacaggaaauauuaggagggau

SEQ ID NO: 108517 - RNA, 18 nt, Human
cacaggaaggggaauauc

SEQ ID NO: 108518 - RNA, 22 nt, Human
cacaggaaguggucagugccag

SEQ ID NO: 108519 - RNA, 22 nt, Human
cacaggaauaagucaaacuuca

SEQ ID NO: 108520 - RNA, 22 nt, Human
cacaggagcccugaggccuccc

SEQ ID NO: 108521 - RNA, 22 nt, Human
cagacccugggccacagaggag

SEQ ID NO: 108522 - RNA, 22 nt, Human
cagacccuuuucugagaggacc

SEQ ID NO: 108523 - RNA, 22 nt, Human
cagaccucaaagcugcagugcu

SEQ ID NO: 108524 - RNA, 22 nt, Human
cagaccucaguccucaguagga

SEQ ID NO: 108525 - RNA, 22 nt, Human
cagaccugaggagcacugagcc

SEQ ID NO: 108526 - RNA, 22 nt, Human
cagaccuggaaaacaggcuugc

SEQ ID NO: 108527 - RNA, 23 nt, Human
cagaccuuucuguaucaguuauc

SEQ ID NO: 108528 - RNA, 22 nt, Human
cagacguuggaggaaauauacc

SEQ ID NO: 108529 - RNA, 22 nt, Human
cagacugacuuucuguggcuau

SEQ ID NO: 108530 - RNA, 22 nt, Human
cagacugggagucaggaagaag

SEQ ID NO: 108531 - RNA, 22 nt, Human
cagacugggcugguggaaagcu

SEQ ID NO: 108532 - RNA, 22 nt, Human
cagacuugacggcagcugcuuu

SEQ ID NO: 108533 - RNA, 22 nt, Human
cagagaaacucagauagcugau

SEQ ID NO: 108534 - RNA, 22 nt, Human
cagagaagaaagugacuauaau

SEQ ID NO: 108535 - RNA, 22 nt, Human
cagagacagaaaauggaucuag

SEQ ID NO: 108536 - RNA, 22 nt, Human
cagagacagcaaguugauuucc

SEQ ID NO: 108537 - RNA, 22 nt, Human
cagagacaggcuugcccuccac

SEQ ID NO: 108538 - RNA, 22 nt, Human
cagagacauguggccugcacgu

SEQ ID NO: 108539 - RNA, 22 nt, Human
cagagacauuaagugccaugau

SEQ ID NO: 108540 - RNA, 22 nt, Human
cagagacauucaguaaauuauc

SEQ ID NO: 108541 - RNA, 22 nt, Human
cagagagaauauguaguaugga

SEQ ID NO: 108542 - RNA, 22 nt, Human
cagagagaaucuuggcagcuga

SEQ ID NO: 108543 - RNA, 22 nt, Human
cagagagaggggcugccuggcc

SEQ ID NO: 108544 - RNA, 22 nt, Human
cagagagcacauaggauacuuu

SEQ ID NO: 108545 - RNA, 22 nt, Human
cagagaggaggcuauaugcaaa

SEQ ID NO: 108546 - RNA, 22 nt, Human
cagagagggcggcccuggcuuc

SEQ ID NO: 108547 - RNA, 22 nt, Human
cagagaguggcaguuacugaag

SEQ ID NO: 108548 - RNA, 22 nt, Human
cagagcacagagcuugggacaa

SEQ ID NO: 108549 - RNA, 22 nt, Human
cagagcaccagugggagacaag

SEQ ID NO: 108550 - RNA, 22 nt, Human
cagagcacugcuuggaggauuu

SEQ ID NO: 108551 - RNA, 22 nt, Human
cagagcagacguugagauuaag

SEQ ID NO: 108552 - RNA, 18 nt, Human
cagagcagagguggagcg

SEQ ID NO: 108553 - RNA, 22 nt, Human
cagagcagagugauuguucugg

SEQ ID NO: 108554 - RNA, 22 nt, Human
cagagcagauuucuaaguauug

SEQ ID NO: 108555 - RNA, 22 nt, Human
cagagcagggguuucccagguu

SEQ ID NO: 108556 - RNA, 18 nt, Human
cagagcaguaugaauguu

SEQ ID NO: 108557 - RNA, 22 nt, Human
cagagcaguggagaguaggucu

SEQ ID NO: 108558 - RNA, 22 nt, Human
cagagcagugggguuggucaga

SEQ ID NO: 108559 - RNA, 22 nt, Human
cagagcauaauugacaugaggu

SEQ ID NO: 108560 - RNA, 22 nt, Human
cagagcauuuggaagccacgug

SEQ ID NO: 108561 - RNA, 22 nt, Human
cagagccaacgccaccugccca

SEQ ID NO: 108562 - RNA, 22 nt, Human
cagagccacuuggagaugagaa

SEQ ID NO: 108563 - RNA, 22 nt, Human
cagagccagaacuagaccuugu

SEQ ID NO: 108564 - RNA, 22 nt, Human
cagagccagcccacuguucccg

SEQ ID NO: 108565 - RNA, 22 nt, Human
cagagccagcuguccuuggcau

SEQ ID NO: 108566 - RNA, 22 nt, Human
cagagccaggccugcccucuuu

SEQ ID NO: 108567 - RNA, 22 nt, Human
cagagccagucagucagaaacu

SEQ ID NO: 108568 - RNA, 22 nt, Human
cagagccauaaaggugaaagag

SEQ ID NO: 108569 - RNA, 22 nt, Human
cagagccauccaggugccuguu

SEQ ID NO: 108570 - RNA, 22 nt, Human
cagagccccccuucugaucaca

SEQ ID NO: 108571 - RNA, 22 nt, Human
cagagccccuggguugggagcu

SEQ ID NO: 108572 - RNA, 22 nt, Human
cagagcccugcaugcuccaucu

SEQ ID NO: 108573 - RNA, 22 nt, Human
cagagcccuuccucccacgggg

SEQ ID NO: 108574 - RNA, 19 nt, Human
cagagccucagagcuagaa

SEQ ID NO: 108575 - RNA, 22 nt, Human
cagagccucucagaggucagac

SEQ ID NO: 108576 - RNA, 22 nt, Human
cagagccucugcccugggcacu

SEQ ID NO: 108577 - RNA, 22 nt, Human
cagagccuggcgaugucaugga

SEQ ID NO: 108578 - RNA, 20 nt, Human
cagagcuaucccuuuauuua

SEQ ID NO: 108579 - RNA, 22 nt, Human
cagagcucagagcagggcacuc

SEQ ID NO: 108580 - RNA, 22 nt, Human
cagagcucuauguucauggagg

SEQ ID NO: 108581 - RNA, 21 nt, Human
cagagcugaaggguguagugu

SEQ ID NO: 108582 - RNA, 22 nt, Human
cagagcugagaauguugaugcu

SEQ ID NO: 108583 - RNA, 22 nt, Human
cagagcugcucaugguggccag

SEQ ID NO: 108584 - RNA, 19 nt, Human
cagagcugcuggccucguc

SEQ ID NO: 108585 - RNA, 22 nt, Human
cagagcuggagcuugaauggag

SEQ ID NO: 108586 - RNA, 22 nt, Human
cagagcuggcucugcauguaca

SEQ ID NO: 108587 - RNA, 22 nt, Human
cagagcuggggacuguuggaug

SEQ ID NO: 108588 - RNA, 22 nt, Human
cagagcuguauuuaucuuucca

SEQ ID NO: 108589 - RNA, 22 nt, Human
cagagcugucauuugccaguga

SEQ ID NO: 108590 - RNA, 21 nt, Human
cagagcuguccaaacccugac

SEQ ID NO: 108591 - RNA, 22 nt, Human
cagagcuguugcggggcuuggc

SEQ ID NO: 108592 - RNA, 22 nt, Human
cagagcuucagggaauaagaau

SEQ ID NO: 108593 - RNA, 22 nt, Human
cagagcuugaauguccaugguu

SEQ ID NO: 108594 - RNA, 22 nt, Human
cagagcuuuggcuagaugguug

SEQ ID NO: 108595 - RNA, 22 nt, Human
cagaggaaaugggaaggagaua

SEQ ID NO: 108596 - RNA, 22 nt, Human
cagaggaagcagacacaucuug

SEQ ID NO: 108597 - RNA, 22 nt, Human
cagaggaaguuccuugaugaga

SEQ ID NO: 108598 - RNA, 22 nt, Human
cagaggacaugaaaacucgcuc

SEQ ID NO: 108599 - RNA, 17 nt, Human
cagaggagcuuuggggg

SEQ ID NO: 108600 - RNA, 20 nt, Human
cagaggaguacauauguuca

SEQ ID NO: 108601 - RNA, 22 nt, Human
cagaggauuauuucagaaucua

SEQ ID NO: 108602 - RNA, 22 nt, Human
cagaggauucccuagugaccug

SEQ ID NO: 108603 - RNA, 22 nt, Human
cagaggcacaagaaagcaaggc

SEQ ID NO: 108604 - RNA, 19 nt, Human
cagaggcaccagguauaga

SEQ ID NO: 108605 - RNA, 19 nt, Human
cagaggcacuuucucuuag

SEQ ID NO: 108606 - RNA, 22 nt, Human
cagaggcagaggucaucucugg

SEQ ID NO: 108607 - RNA, 22 nt, Human
cagaggcagccgggggagaacg

SEQ ID NO: 108608 - RNA, 22 nt, Human
cagaggcaggauaagaacugcg

SEQ ID NO: 108609 - RNA, 22 nt, Human
cagagcugauuggauccagaga

SEQ ID NO: 108610 - RNA, 22 nt, Human
cagagcugcacauucuaugaug

SEQ ID NO: 108611 - RNA, 22 nt, Human
cagagcugcgcuuuuuccuggu

SEQ ID NO: 108612 - RNA, 22 nt, Human
cagagcuggacuuaaauauauu

SEQ ID NO: 108613 - RNA, 22 nt, Human
cagagcuggagaaguggauuua

SEQ ID NO: 108614 - RNA, 20 nt, Human
cagagcugggauuugaacac

SEQ ID NO: 108615 - RNA, 22 nt, Human
cagagcuggguuugggaaaccu

SEQ ID NO: 108616 - RNA, 22 nt, Human
cagagcugguaagugguagagg

SEQ ID NO: 108617 - RNA, 22 nt, Human
cagagcugguguuacaagucca

SEQ ID NO: 108618 - RNA, 22 nt, Human
cagagcuuaaaacuccauggaa

SEQ ID NO: 108619 - RNA, 22 nt, Human
cagagcuucugacagcugcugc

SEQ ID NO: 108620 - RNA, 22 nt, Human
cagaggaaggcucugggaaugu

SEQ ID NO: 108621 - RNA, 22 nt, Human
cagaggaccauuguauguauug

SEQ ID NO: 108622 - RNA, 22 nt, Human
cagaggaccuguguggccagag

SEQ ID NO: 108623 - RNA, 22 nt, Human
cagaggaggccaccgcauaggc

SEQ ID NO: 108624 - RNA, 22 nt, Human
cagaggaggcgguauacacugc

SEQ ID NO: 108625 - RNA, 22 nt, Human
cagaggagugggccguuauggu

SEQ ID NO: 108626 - RNA, 22 nt, Human
cagaggcaaaagagguggaggu

SEQ ID NO: 108627 - RNA, 22 nt, Human
cagaggcacagugcgggccacu

SEQ ID NO: 108628 - RNA, 22 nt, Human
cagaggcagaauggagauuugg

SEQ ID NO: 108629 - RNA, 22 nt, Human
cagaggcauacucccagucuug

SEQ ID NO: 108630 - RNA, 22 nt, Human
ccucuguggucugucuaaugca

SEQ ID NO: 108631 - RNA, 22 nt, Human
ccucuuccucaccaucuacaac

SEQ ID NO: 108632 - RNA, 17 nt, Human
ccucuuccucucagcug

SEQ ID NO: 108633 - RNA, 22 nt, Human
ccucuucuaggacguccuugug

SEQ ID NO: 108634 - RNA, 22 nt, Human
ccucuuugacaaguaccugccc

SEQ ID NO: 108635 - RNA, 22 nt, Human
ccucuuugacucucaggucuuu

SEQ ID NO: 108636 - RNA, 22 nt, Human
ccucuuugugccugcaggcugc

SEQ ID NO: 108637 - RNA, 22 nt, Human
ccugaaaauauccucuccuuug

SEQ ID NO: 108638 - RNA, 22 nt, Human
ccugaaaaucaagguaguuugg

SEQ ID NO: 108639 - RNA, 22 nt, Human
ccugaaacaguccuugcccuca

SEQ ID NO: 108640 - RNA, 22 nt, Human
ccugaaauccauaguuuacacu

SEQ ID NO: 108641 - RNA, 22 nt, Human
ccugaagagugaauguggcagu

SEQ ID NO: 108642 - RNA, 22 nt, Human
ccugaagauccauuauagacac

SEQ ID NO: 108643 - RNA, 17 nt, Human
ccugaaggcacuuccag

SEQ ID NO: 108644 - RNA, 22 nt, Human
ccugaagggacuccagagagca

SEQ ID NO: 108645 - RNA, 22 nt, Human
ccugaauacuggugcugaaagu

SEQ ID NO: 108646 - RNA, 22 nt, Human
ccugaaugccugacauuucacu

SEQ ID NO: 108647 - RNA, 22 nt, Human
ccugacagcgugucccuggccc

SEQ ID NO: 108648 - RNA, 22 nt, Human
ccugaccauuugccacaugggu

SEQ ID NO: 108649 - RNA, 23 nt, Human
ccugacccugucucccucacaug

SEQ ID NO: 108650 - RNA, 22 nt, Human
ccugacccuuuccaguguuggc

SEQ ID NO: 108651 - RNA, 22 nt, Human
ccugagacaugaaccaggcucc

SEQ ID NO: 108652 - RNA, 22 nt, Human
ccugagagagugagcccugaca

SEQ ID NO: 108653 - RNA, 22 nt, Human
ccugagagcagcuuccugcuua

SEQ ID NO: 108654 - RNA, 22 nt, Human
ccugagagccagugccugccca

SEQ ID NO: 108655 - RNA, 22 nt, Human
ccugagagugagugccaccuua

SEQ ID NO: 108656 - RNA, 22 nt, Human
ccugagauggccagugcuggga

SEQ ID NO: 108657 - RNA, 22 nt, Human
ccugagauggggauuauuccaa

SEQ ID NO: 108658 - RNA, 18 nt, Human
ccugagcccugcuuacuu

SEQ ID NO: 108659 - RNA, 22 nt, Human
ccugagccugaguggugcaggg

SEQ ID NO: 108660 - RNA, 22 nt, Human
ccugagcugacucuccuuucag

SEQ ID NO: 108661 - RNA, 22 nt, Human
ccugaggauauucaccagcaug

SEQ ID NO: 108662 - RNA, 22 nt, Human
ccugaggaugccagcaugggug

SEQ ID NO: 108663 - RNA, 22 nt, Human
ccugaggcuggcccuuccaucc

SEQ ID NO: 108664 - RNA, 22 nt, Human
ccugagggcguaauuaacagug

SEQ ID NO: 108665 - RNA, 22 nt, Human
ccugaggucagcgguucccaca

SEQ ID NO: 108666 - RNA, 18 nt, Human
ccugaggugggaggaagg

SEQ ID NO: 108667 - RNA, 22 nt, Human
ccugagguugaaguauaaauug

SEQ ID NO: 108668 - RNA, 22 nt, Human
ccugagguuuuuggauaguugu

SEQ ID NO: 108669 - RNA, 22 nt, Human
ccugagucccauaauguugcca

SEQ ID NO: 108670 - RNA, 22 nt, Human
ccugagucuuggcuucuuggcu

SEQ ID NO: 108671 - RNA, 22 nt, Human
ccugagugaccugaggucuagu

SEQ ID NO: 108672 - RNA, 21 nt, Human
ccugagugagaccuggcccgu

SEQ ID NO: 108673 - RNA, 22 nt, Human
ccugagugcuuccagagucaug

SEQ ID NO: 108674 - RNA, 22 nt, Human
ccugaguuaguugcugugucuc

SEQ ID NO: 108675 - RNA, 22 nt, Human
ccugauguccauaauccuguaa

SEQ ID NO: 108676 - RNA, 22 nt, Human
ccugauucaguggugcccagag

SEQ ID NO: 108677 - RNA, 22 nt, Human
ccugauucugaugccucaugga

SEQ ID NO: 108678 - RNA, 23 nt, Human
ccugcaaagaaacaagccaccug

SEQ ID NO: 108679 - RNA, 22 nt, Human
ccugcaagagcggagaagccag

SEQ ID NO: 108680 - RNA, 22 nt, Human
ccugcacuaccuggggcugcug

SEQ ID NO: 108681 - RNA, 22 nt, Human
ccugcagagccacgugccagcg

SEQ ID NO: 108682 - RNA, 21 nt, Human
ccugcagcaccagaaggagau

SEQ ID NO: 108683 - RNA, 18 nt, Human
ccugcagcccaggaggcc

SEQ ID NO: 108684 - RNA, 22 nt, Human
ccugcagccucuucugaaaauc

SEQ ID NO: 108685 - RNA, 22 nt, Human
ccugcagcuccggauuucuggg

SEQ ID NO: 108686 - RNA, 22 nt, Human
ccugcagcuuugccuccugaac

SEQ ID NO: 108687 - RNA, 22 nt, Human
ccugcagggugcugccacagau

SEQ ID NO: 108688 - RNA, 22 nt, Human
ccugcagguaaggcuaacugcc

SEQ ID NO: 108689 - RNA, 22 nt, Human
ccugcagguccccggaugcgca

SEQ ID NO: 108690 - RNA, 22 nt, Human
ccugccagcaucuucagccccu

SEQ ID NO: 108691 - RNA, 22 nt, Human
ccugccagcauggcuuaucucc

SEQ ID NO: 108692 - RNA, 22 nt, Human
ccugccagcgcuuaucucucgg

SEQ ID NO: 108693 - RNA, 22 nt, Human
ccugccaggccagugagcuucc

SEQ ID NO: 108694 - RNA, 22 nt, Human
ccugccaggcuuucagguuugg

SEQ ID NO: 108695 - RNA, 22 nt, Human
ccugccaggcuuugggcuucug

SEQ ID NO: 108696 - RNA, 22 nt, Human
ccugcccacagagagggugcau

SEQ ID NO: 108697 - RNA, 22 nt, Human
ccugcccacuccaggagcaacu

SEQ ID NO: 108698 - RNA, 17 nt, Human
ccugcccagagacagau

SEQ ID NO: 108699 - RNA, 22 nt, Human
ccugcccagcuucccgagugca

SEQ ID NO: 108700 - RNA, 22 nt, Human
ccugcccuagagaugacacaau

SEQ ID NO: 108701 - RNA, 22 nt, Human
ccugcccuucuuuccccagcau

SEQ ID NO: 108702 - RNA, 20 nt, Human
ccugccugccucggcucauu

SEQ ID NO: 108703 - RNA, 22 nt, Human
ccugccugcggcccgcggggag

SEQ ID NO: 108704 - RNA, 22 nt, Human
ccugccuggaucagccauccug

SEQ ID NO: 108705 - RNA, 22 nt, Human
ccugccuggcugucagcagagc

SEQ ID NO: 108706 - RNA, 22 nt, Human
ccugccugggcucacuugccag

SEQ ID NO: 108707 - RNA, 22 nt, Human
ccugccugguguaagucuaagg

SEQ ID NO: 108708 - RNA, 22 nt, Human
ccugccugucccucaguccaca

SEQ ID NO: 108709 - RNA, 22 nt, Human
ccugccuucagcccugaagucu

SEQ ID NO: 108710 - RNA, 22 nt, Human
ccugccuucuaaagcgcccgcc

SEQ ID NO: 108711 - RNA, 22 nt, Human
ccugccuugacguaacgcauga

SEQ ID NO: 108712 - RNA, 22 nt, Human
ccugcucagcuguccucacgcu

SEQ ID NO: 108713 - RNA, 22 nt, Human
ccugcucaugggucccuggcag

SEQ ID NO: 108714 - RNA, 22 nt, Human
ccugcuccaugcucaccaucag

SEQ ID NO: 108715 - RNA, 22 nt, Human
ccugcucuaaaucucauggaac

SEQ ID NO: 108716 - RNA, 22 nt, Human
ccugcucuagacucugggaagg

SEQ ID NO: 108717 - RNA, 22 nt, Human
ccugcucugguuuagucagucu

SEQ ID NO: 108718 - RNA, 19 nt, Human
ccugcugcccacccucugc

SEQ ID NO: 108719 - RNA, 22 nt, Human
ccugcuggccaguggagggcug

SEQ ID NO: 108720 - RNA, 22 nt, Human
ccugcuggcguggcuggcgccc

SEQ ID NO: 108721 - RNA, 22 nt, Human
ccugcugggccugagcaaugag

SEQ ID NO: 108722 - RNA, 22 nt, Human
ccugcugucaguggggcaggca

SEQ ID NO: 108723 - RNA, 22 nt, Human
ccugcugucccucugggcucca

SEQ ID NO: 108724 - RNA, 20 nt, Human
ccugcugugcuuuccaugga

SEQ ID NO: 108725 - RNA, 22 nt, Human
ccuggaaaacaugggaaucaca

SEQ ID NO: 108726 - RNA, 22 nt, Human
ccuggaaagcgguucauuuugu

SEQ ID NO: 108727 - RNA, 22 nt, Human
ccuggaaggacaauagauagug

SEQ ID NO: 108728 - RNA, 22 nt, Human
ccuggacaaugagaugucaggg

SEQ ID NO: 108729 - RNA, 22 nt, Human
ccuggacacccauuccuuggcu

SEQ ID NO: 108730 - RNA, 22 nt, Human
cagcauuuuccauagaaagaag

SEQ ID NO: 108731 - RNA, 22 nt, Human
cagccaaaugagucauaaaugu

SEQ ID NO: 108732 - RNA, 22 nt, Human
cagccaagaaagcagugcucca

SEQ ID NO: 108733 - RNA, 22 nt, Human
cagccacucggccauaaaggcu

SEQ ID NO: 108734 - RNA, 22 nt, Human
cagccacuggugccaggcuguu

SEQ ID NO: 108735 - RNA, 22 nt, Human
cagccacuguggaauagccccc

SEQ ID NO: 108736 - RNA, 22 nt, Human
cagccacuugugaugcugggga

SEQ ID NO: 108737 - RNA, 22 nt, Human
cagccagccucucaaccaugca

SEQ ID NO: 108738 - RNA, 22 nt, Human
cagccagcuggcacugugagua

SEQ ID NO: 108739 - RNA, 22 nt, Human
cagcugcuguucaguuuuguuu

SEQ ID NO: 108740 - RNA, 22 nt, Human
cagcugcuuacuagcuguguga

SEQ ID NO: 108741 - RNA, 22 nt, Human
cagcuggaggagcagcuuccag

SEQ ID NO: 108742 - RNA, 22 nt, Human
cagcuggcaaguggagcagggu

SEQ ID NO: 108743 - RNA, 22 nt, Human
cagcuggcagcccuggcccugc

SEQ ID NO: 108744 - RNA, 22 nt, Human
cagcuggcgccuggggaccaga

SEQ ID NO: 108745 - RNA, 22 nt, Human
cagcuggcuccaccucugggcu

SEQ ID NO: 108746 - RNA, 22 nt, Human
cagcugggcuaagaguagaggc

SEQ ID NO: 108747 - RNA, 22 nt, Human
cagcuggggcagccacgugcgg

SEQ ID NO: 108748 - RNA, 22 nt, Human
cagcuggguuuaguggggugug

SEQ ID NO: 108749 - RNA, 22 nt, Human
cagcugguacucaguucuuguc

SEQ ID NO: 108750 - RNA, 22 nt, Human
cagcuggugagcuuaguagggu

SEQ ID NO: 108751 - RNA, 22 nt, Human
cagcuggugucaggcacugcag

SEQ ID NO: 108752 - RNA, 22 nt, Human
cagcugguguccagggaagugg

SEQ ID NO: 108753 - RNA, 22 nt, Human
cagcugguuaucagagaggccu

SEQ ID NO: 108754 - RNA, 22 nt, Human
cagcugguuggaagggagcuga

SEQ ID NO: 108755 - RNA, 22 nt, Human
cagcugucuggggagugcucgc

SEQ ID NO: 108756 - RNA, 22 nt, Human
cagcugugacagccaguugaug

SEQ ID NO: 108757 - RNA, 22 nt, Human
cagcuguguaaacacaugugua

SEQ ID NO: 108758 - RNA, 22 nt, Human
cagcuguuacugaaguaaaaug

SEQ ID NO: 108759 - RNA, 22 nt, Human
cagcuguugacugguacaugaa

SEQ ID NO: 108760 - RNA, 22 nt, Human
cagcuguugaucucuuaagccu

SEQ ID NO: 108761 - RNA, 22 nt, Human
cagcuguugcagcacugagaga

SEQ ID NO: 108762 - RNA, 22 nt, Human
cagcuguugucaccucacaucc

SEQ ID NO: 108763 - RNA, 22 nt, Human
cagcuguugugcugggcaguua

SEQ ID NO: 108764 - RNA, 22 nt, Human
cagcuguuguuaugucugcagg

SEQ ID NO: 108765 - RNA, 22 nt, Human
cagcuuaccucccacagcucuc

SEQ ID NO: 108766 - RNA, 22 nt, Human
cagcuuauucaguaagcacaua

SEQ ID NO: 108767 - RNA, 22 nt, Human
cagcuucaauaauggcugaugg

SEQ ID NO: 108768 - RNA, 22 nt, Human
cagcuucccuuggcugagcaga

SEQ ID NO: 108769 - RNA, 22 nt, Human
cagcuuccgaccgggggcugca

SEQ ID NO: 108770 - RNA, 22 nt, Human
cagcuucuagcaucggcuuuga

SEQ ID NO: 108771 - RNA, 22 nt, Human
cagcuucugagcaagccagggg

SEQ ID NO: 108772 - RNA, 22 nt, Human
cagcuucugcuaucgaacaucu

SEQ ID NO: 108773 - RNA, 22 nt, Human
cagcuucuguccuagaaacugg

SEQ ID NO: 108774 - RNA, 21 nt, Human
cagcuucuucugugaccuggu

SEQ ID NO: 108775 - RNA, 22 nt, Human
cagcuucuuugggauucuuuau

SEQ ID NO: 108776 - RNA, 22 nt, Human
cagcuugaaauauuaggagaug

SEQ ID NO: 108777 - RNA, 22 nt, Human
cagcuugcacacauauuagacg

SEQ ID NO: 108778 - RNA, 22 nt, Human
cagcuugcaguacuuguuuuug

SEQ ID NO: 108779 - RNA, 22 nt, Human
cagcuugcuaauuuugacuuca

SEQ ID NO: 108780 - RNA, 22 nt, Human
cagcuuggcuucacauucugua

SEQ ID NO: 108781 - RNA, 22 nt, Human
cagcuuggcuuccgcuuuacug

SEQ ID NO: 108782 - RNA, 22 nt, Human
cagcuugugcaaagguccuggg

SEQ ID NO: 108783 - RNA, 22 nt, Human
cagcuugugucauucaucuugu

SEQ ID NO: 108784 - RNA, 22 nt, Human
cagcuuguuuacaugcuuauuc

SEQ ID NO: 108785 - RNA, 22 nt, Human
cagcuuuagagaaaacauauuu

SEQ ID NO: 108786 - RNA, 22 nt, Human
cagcuuuaggacucauaauaaa

SEQ ID NO: 108787 - RNA, 16 nt, Human
cagcuuuaugucagug

SEQ ID NO: 108788 - RNA, 22 nt, Human
cagcuuuauugagguauaauug

SEQ ID NO: 108789 - RNA, 22 nt, Human
cagcuuucaucagugacacuca

SEQ ID NO: 108790 - RNA, 22 nt, Human
cagcuuuccccgugccucagcc

SEQ ID NO: 108791 - RNA, 22 nt, Human
cagcuuugagcagccaguggca

SEQ ID NO: 108792 - RNA, 22 nt, Human
cagcuuuggagugugagugcug

SEQ ID NO: 108793 - RNA, 22 nt, Human
cagcuuugucauuugauuuggg

SEQ ID NO: 108794 - RNA, 22 nt, Human
cagcuuugucugauuccucuuu

SEQ ID NO: 108795 - RNA, 21 nt, Human
cagcuuugucugucuucgggg

SEQ ID NO: 108796 - RNA, 22 nt, Human
caggaaacggcuauucuuuugu

SEQ ID NO: 108797 - RNA, 22 nt, Human
caggaaagaaaugagaacacca

SEQ ID NO: 108798 - RNA, 22 nt, Human
caggaaagggaugggcugccac

SEQ ID NO: 108799 - RNA, 22 nt, Human
caggaaagguagucacaaugua

SEQ ID NO: 108800 - RNA, 22 nt, Human
caggaaauagacacuguaugau

SEQ ID NO: 108801 - RNA, 22 nt, Human
caggaaaucacucugauuuugg

SEQ ID NO: 108802 - RNA, 22 nt, Human
caggaaaucagaacucaagugg

SEQ ID NO: 108803 - RNA, 21 nt, Human
caggaaaucagugugaauuag

SEQ ID NO: 108804 - RNA, 22 nt, Human
caggaaaugaacaggaaugaac

SEQ ID NO: 108805 - RNA, 23 nt, Human
caggaaaugaauccaggaggaug

SEQ ID NO: 108806 - RNA, 22 nt, Human
caggaaaugggguuuaguuauu

SEQ ID NO: 108807 - RNA, 22 nt, Human
caggaaaugggucguuuuauaa

SEQ ID NO: 108808 - RNA, 23 nt, Human
caggaaauguucuugaagccuga

SEQ ID NO: 108809 - RNA, 22 nt, Human
caggaaauuagucucucuguug

SEQ ID NO: 108810 - RNA, 22 nt, Human
caggaaauucaagagaggcugc

SEQ ID NO: 108811 - RNA, 22 nt, Human
caggaaauucuuuuuaacagaa

SEQ ID NO: 108812 - RNA, 22 nt, Human
caggaaauugcaacagucugag

SEQ ID NO: 108813 - RNA, 22 nt, Human
caggaaauuuugugaucuguuc

SEQ ID NO: 108814 - RNA, 22 nt, Human
caggaacaaggccuaugggacu

SEQ ID NO: 108815 - RNA, 22 nt, Human
caggaacaauaccucuugccag

SEQ ID NO: 108816 - RNA, 22 nt, Human
caggaacaauguaagucucauu

SEQ ID NO: 108817 - RNA, 22 nt, Human
caggaacaggguguccuggcag

SEQ ID NO: 108818 - RNA, 22 nt, Human
caggaaccaggagagucccuga

SEQ ID NO: 108819 - RNA, 22 nt, Human
caggaaccuaaugaaggcucac

SEQ ID NO: 108820 - RNA, 16 nt, Human
caggaaccugucuggc

SEQ ID NO: 108821 - RNA, 22 nt, Human
caggaaccuugucuguguuguu

SEQ ID NO: 108822 - RNA, 22 nt, Human
caggaacuggaacccuggccga

SEQ ID NO: 108823 - RNA, 22 nt, Human
caggaagaaagaggugaggugu

SEQ ID NO: 108824 - RNA, 22 nt, Human
caggaagcaagugauuuucuug

SEQ ID NO: 108825 - RNA, 22 nt, Human
caggaagcacagugaggagacc

SEQ ID NO: 108826 - RNA, 22 nt, Human
caggaagcaguagaacuuuucc

SEQ ID NO: 108827 - RNA, 22 nt, Human
caggaagccuuccuugucugcu

SEQ ID NO: 108828 - RNA, 22 nt, Human
caggaagcuagauuuuguugcu

SEQ ID NO: 108829 - RNA, 22 nt, Human
caggaagcugaugucuagucau

SEQ ID NO: 108830 - RNA, 22 nt, Human
caggaaggaccguccagaucag

SEQ ID NO: 108831 - RNA, 22 nt, Human
caggaagggggauccuuggaag

SEQ ID NO: 108832 - RNA, 22 nt, Human
caggaagucuuugcccaggcca

SEQ ID NO: 108833 - RNA, 22 nt, Human
caggaauccagagugagccucc

SEQ ID NO: 108834 - RNA, 22 nt, Human
caggaaugacccaacaguuuca

SEQ ID NO: 108835 - RNA, 19 nt, Human
caggaaugagguaauggcu

SEQ ID NO: 108836 - RNA, 22 nt, Human
caggaaugaggucguaaguguc

SEQ ID NO: 108837 - RNA, 22 nt, Human
caggaauguaugauacaguggu

SEQ ID NO: 108838 - RNA, 22 nt, Human
caggacaaagcccuuugagaaa

SEQ ID NO: 108839 - RNA, 22 nt, Human
caggacacaggguguggcugau

SEQ ID NO: 108840 - RNA, 22 nt, Human
caggacaccuuagcuaaaauuc

SEQ ID NO: 108841 - RNA, 22 nt, Human
caggacacuuguucuucucugc

SEQ ID NO: 108842 - RNA, 22 nt, Human
caggacagacagaaugccuaac

SEQ ID NO: 108843 - RNA, 20 nt, Human
caggacagcgcaaucggagg

SEQ ID NO: 108844 - RNA, 22 nt, Human
caggacaguauaggcuuuagga

SEQ ID NO: 108845 - RNA, 19 nt, Human
caggacaguuugccaagaa

SEQ ID NO: 108846 - RNA, 22 nt, Human
caggacaguuugcuuugcccug

SEQ ID NO: 108847 - RNA, 22 nt, Human
ccuggaccugcagcaucagcau

SEQ ID NO: 108848 - RNA, 22 nt, Human
caggccucuauggucagcugag

SEQ ID NO: 108849 - RNA, 22 nt, Human
caggccugaguguggaagucuu

SEQ ID NO: 108850 - RNA, 22 nt, Human
caggccuggcugcagcucgccu

SEQ ID NO: 108851 - RNA, 22 nt, Human
caggccugggcuggguaucagg

SEQ ID NO: 108852 - RNA, 22 nt, Human
caggccugggcuucggggcuga

SEQ ID NO: 108853 - RNA, 22 nt, Human
caggccugugacaccgugucug

SEQ ID NO: 108854 - RNA, 22 nt, Human
caggccuugggacccagacugg

SEQ ID NO: 108855 - RNA, 22 nt, Human
ccuugggguguuggaggcagcc

SEQ ID NO: 108856 - RNA, 22 nt, Human
ccuuggugaucugggcuggaag

SEQ ID NO: 108857 - RNA, 22 nt, Human
ccuugguucugccuggccugga

SEQ ID NO: 108858 - RNA, 22 nt, Human
ccuuguuuuggaaccaaaggau

SEQ ID NO: 108859 - RNA, 22 nt, Human
ccuuuaaagacugcauaacuuc

SEQ ID NO: 108860 - RNA, 22 nt, Human
ccuuuaaauggauguucaacug

SEQ ID NO: 108861 - RNA, 22 nt, Human
ccuuuaaguccucuuuuauauu

SEQ ID NO: 108862 - RNA, 22 nt, Human
ccuuuacaaaguucuucauggg

SEQ ID NO: 108863 - RNA, 22 nt, Human
ccuuuacaucugacuucuuuca

SEQ ID NO: 108864 - RNA, 22 nt, Human
ccuuuagaauacagacuuucua

SEQ ID NO: 108865 - RNA, 21 nt, Human
ccuuuagauuucuaugcaguu

SEQ ID NO: 108866 - RNA, 22 nt, Human
ccuuuaggagugaggaccgagc

SEQ ID NO: 108867 - RNA, 22 nt, Human
ccuuuauacuaaggcauacaau

SEQ ID NO: 108868 - RNA, 22 nt, Human
ccuuuauucaauuaguccuaau

SEQ ID NO: 108869 - RNA, 22 nt, Human
ccuuucaaaguuuugccaugcu

SEQ ID NO: 108870 - RNA, 22 nt, Human
ccuuuccugccucaggaaguag

SEQ ID NO: 108871 - RNA, 17 nt, Human
ccuuucucuuucaucuc

SEQ ID NO: 108872 - RNA, 22 nt, Human
ccuuucugacagugaugggggg

SEQ ID NO: 108873 - RNA, 22 nt, Human
ccuuucugauggccucccagcc

SEQ ID NO: 108874 - RNA, 22 nt, Human
ccuuucugguauuuaaccaaag

SEQ ID NO: 108875 - RNA, 18 nt, Human
ccuuugcaaaggggguua

SEQ ID NO: 108876 - RNA, 22 nt, Human
ccuuuggggcuuuacuguggaa

SEQ ID NO: 108877 - RNA, 22 nt, Human
ccuuuguaccuuaaauccugug

SEQ ID NO: 108878 - RNA, 22 nt, Human
ccuuuguacucugguccaaacu

SEQ ID NO: 108879 - RNA, 22 nt, Human
ccuuuguggggcgguggguaau

SEQ ID NO: 108880 - RNA, 22 nt, Human
ccuuuguucacuggagagugga

SEQ ID NO: 108881 - RNA, 22 nt, Human
ccuuuuauacucuguccucugg

SEQ ID NO: 108882 - RNA, 22 nt, Human
ccuuuuauagaucaguguguua

SEQ ID NO: 108883 - RNA, 16 nt, Human
ccuuuucucaucucua

SEQ ID NO: 108884 - RNA, 22 nt, Human
ccuuuucuguuuccugucacug

SEQ ID NO: 108885 - RNA, 22 nt, Human
ccuuuugaagguguuguuaagu

SEQ ID NO: 108886 - RNA, 22 nt, Human
ccuuuuggccaggucagugcag

SEQ ID NO: 108887 - RNA, 22 nt, Human
ccuuuuguacacuuacuauaua

SEQ ID NO: 108888 - RNA, 21 nt, Human
ccuuuuugcuuauggacagac

SEQ ID NO: 108889 - RNA, 22 nt, Human
cgaaaucagcaucuugaggcaa

SEQ ID NO: 108890 - RNA, 22 nt, Human
cgaacacacuugggaguucuga

SEQ ID NO: 108891 - RNA, 21 nt, Human
cgacaguguauagauuagagc

SEQ ID NO: 108892 - RNA, 22 nt, Human
cgacugucauacacaagacaug

SEQ ID NO: 108893 - RNA, 22 nt, Human
cgagagauggguuggcaggggc

SEQ ID NO: 108894 - RNA, 22 nt, Human
cgaggagugugaaggcuugucg

SEQ ID NO: 108895 - RNA, 22 nt, Human
cgaggcagacaaaaguuggaag

SEQ ID NO: 108896 - RNA, 22 nt, Human
cgaggcagggaagcugcaaaag

SEQ ID NO: 108897 - RNA, 22 nt, Human
cgaggccacaccugcuucuggg

SEQ ID NO: 108898 - RNA, 22 nt, Human
cgaggccagcucuaagcccuac

SEQ ID NO: 108899 - RNA, 22 nt, Human
cgaggcucagagagggugacuu

SEQ ID NO: 108900 - RNA, 22 nt, Human
cgaggugggcagaucacagagu

SEQ ID NO: 108901 - RNA, 22 nt, Human
cgaguaauuggaaauuugcuau

SEQ ID NO: 108902 - RNA, 22 nt, Human
cgcaacagcguggcgcccagcu

SEQ ID NO: 108903 - RNA, 22 nt, Human
cgcagagggagccgcgggcugc

SEQ ID NO: 108904 - RNA, 22 nt, Human
cgcagcagccccgugguaggug

SEQ ID NO: 108905 - RNA, 22 nt, Human
cgcagcugaccuuuuacaaaac

SEQ ID NO: 108906 - RNA, 22 nt, Human
cgcagcugcaaaggaaacauuu

SEQ ID NO: 108907 - RNA, 22 nt, Human
cgcagcugccuugucagccguu

SEQ ID NO: 108908 - RNA, 22 nt, Human
cgcaggcuccggggugcccugg

SEQ ID NO: 108909 - RNA, 22 nt, Human
cgcaggcucgguucacagagca

SEQ ID NO: 108910 - RNA, 22 nt, Human
cgcaggcuuuagaaucugcuac

SEQ ID NO: 108911 - RNA, 22 nt, Human
cgcagggccgcgagcgggacca

SEQ ID NO: 108912 - RNA, 22 nt, Human
cgcaggugccggcagauggggu

SEQ ID NO: 108913 - RNA, 22 nt, Human
cgcagguguguuuucaggacua

SEQ ID NO: 108914 - RNA, 22 nt, Human
cgcagguguucaguaaauguau

SEQ ID NO: 108915 - RNA, 20 nt, Human
cgcauaguuuccaucauucc

SEQ ID NO: 108916 - RNA, 22 nt, Human
cgcauccagggcgcaggaucug

SEQ ID NO: 108917 - RNA, 22 nt, Human
cgcaugugcguugauugcagug

SEQ ID NO: 108918 - RNA, 23 nt, Human
cgcccagccucagugaccugggc

SEQ ID NO: 108919 - RNA, 22 nt, Human
cgcccagcugaaaucuccaggc

SEQ ID NO: 108920 - RNA, 20 nt, Human
cgcccaggagggcccaugug

SEQ ID NO: 108921 - RNA, 22 nt, Human
cgcccagggcaggaggccgcuc

SEQ ID NO: 108922 - RNA, 22 nt, Human
cgccccagccaguugagcggcg

SEQ ID NO: 108923 - RNA, 22 nt, Human
cgcccuccacacagccccuggc

SEQ ID NO: 108924 - RNA, 22 nt, Human
cgccugcucucacuggacagcu

SEQ ID NO: 108925 - RNA, 19 nt, Human
cgccuggcaggcccugcgc

SEQ ID NO: 108926 - RNA, 22 nt, Human
cgcgcggcucucgcgagaugug

SEQ ID NO: 108927 - RNA, 22 nt, Human
cgcgcuguuuacgugacuuaau

SEQ ID NO: 108928 - RNA, 22 nt, Human
cgcggagcuccgcccggugccc

SEQ ID NO: 108929 - RNA, 22 nt, Human
cgcuggcauuagggcaguggcc

SEQ ID NO: 108930 - RNA, 22 nt, Human
cgcuggccauagccuccugugu

SEQ ID NO: 108931 - RNA, 22 nt, Human
cgcuggggcuuuuugcuugaga

SEQ ID NO: 108932 - RNA, 22 nt, Human
cgcugggggaacagcgagggug

SEQ ID NO: 108933 - RNA, 22 nt, Human
cgcugugugcagacugaaaaug

SEQ ID NO: 108934 - RNA, 22 nt, Human
cggaagagggacagcgccagcc

SEQ ID NO: 108935 - RNA, 22 nt, Human
cggacaggcuccuggagcuccu

SEQ ID NO: 108936 - RNA, 22 nt, Human
cggacccacucggaucccagcc

SEQ ID NO: 108937 - RNA, 20 nt, Human
cggacuuucuucucagggca

SEQ ID NO: 108938 - RNA, 22 nt, Human
cggagccugcuuguugcagcug

SEQ ID NO: 108939 - RNA, 22 nt, Human
cggaggcaaacucaccuggcuc

SEQ ID NO: 108940 - RNA, 22 nt, Human
cggaucaugugaccuuugagug

SEQ ID NO: 108941 - RNA, 22 nt, Human
cggcagagcggcgagccccucc

SEQ ID NO: 108942 - RNA, 18 nt, Human
cggcagagugcuucuagc

SEQ ID NO: 108943 - RNA, 22 nt, Human
cggcagagugugugcgugcaug

SEQ ID NO: 108944 - RNA, 22 nt, Human
cggcagcaaaggaagccagguc

SEQ ID NO: 108945 - RNA, 22 nt, Human
cggcagcaucgaaacuacauuc

SEQ ID NO: 108946 - RNA, 22 nt, Human
cggcaggugugcucacucugcc

SEQ ID NO: 108947 - RNA, 22 nt, Human
cggcccugaccagaccuuaguu

SEQ ID NO: 108948 - RNA, 22 nt, Human
cggcccuggcggaggcgggaga

SEQ ID NO: 108949 - RNA, 22 nt, Human
cggccuucucccugggcaucac

SEQ ID NO: 108950 - RNA, 22 nt, Human
cggcucagcuagcuuggcccca

SEQ ID NO: 108951 - RNA, 22 nt, Human
cggcugcuucugagccccggcg

SEQ ID NO: 108952 - RNA, 22 nt, Human
cggcuggggcuguccccaugac

SEQ ID NO: 108953 - RNA, 22 nt, Human
cggcuucaugagaaaugacaga

SEQ ID NO: 108954 - RNA, 23 nt, Human
cggcuucugaaaucccaucuguu

SEQ ID NO: 108955 - RNA, 22 nt, Human
cggcuucuucaucaggucagca

SEQ ID NO: 108956 - RNA, 22 nt, Human
cgggaaaguuccacagauggau

SEQ ID NO: 108957 - RNA, 22 nt, Human
caguccucucacucaggccuuu

SEQ ID NO: 108958 - RNA, 17 nt, Human
caguccucugcucuaag

SEQ ID NO: 108959 - RNA, 22 nt, Human
caguccugagcuccugggcuga

SEQ ID NO: 108960 - RNA, 22 nt, Human
caguccugggcacagcccuggg

SEQ ID NO: 108961 - RNA, 22 nt, Human
caguccugggugcagcaggaaa

SEQ ID NO: 108962 - RNA, 22 nt, Human
caguccuuagauuuuacugcca

SEQ ID NO: 108963 - RNA, 22 nt, Human
caguccuuagucuggauggcuu

SEQ ID NO: 108964 - RNA, 22 nt, Human
caguccuuauuccuauauuccu

SEQ ID NO: 108965 - RNA, 22 nt, Human
caguccuucauuccuccuuuga

SEQ ID NO: 108966 - RNA, 22 nt, Human
caguccuuggcuucauccgagu

SEQ ID NO: 108967 - RNA, 17 nt, Human
cagucgaggaggaccug

SEQ ID NO: 108968 - RNA, 22 nt, Human
cagucucacccuggaggcccca

SEQ ID NO: 108969 - RNA, 22 nt, Human
cagucuccugggggcuguuguu

SEQ ID NO: 108970 - RNA, 22 nt, Human
cagucucuaaaucaaucugaau

SEQ ID NO: 108971 - RNA, 22 nt, Human
cagucucucuuguagugcagcu

SEQ ID NO: 108972 - RNA, 22 nt, Human
cagucucuuuucagcuccaucc

SEQ ID NO: 108973 - RNA, 22 nt, Human
cagucugaacacugggcuacuc

SEQ ID NO: 108974 - RNA, 22 nt, Human
cagucuggaggucagcuggcuu

SEQ ID NO: 108975 - RNA, 22 nt, Human
cagucuggcacagcacacugaa

SEQ ID NO: 108976 - RNA, 22 nt, Human
cagucugggacugagcuccacc

SEQ ID NO: 108977 - RNA, 22 nt, Human
cagucuguuucugagaaacaga

SEQ ID NO: 108978 - RNA, 22 nt, Human
cagucuuagccuucccucaccc

SEQ ID NO: 108979 - RNA, 22 nt, Human
cagucuuugacaagcccuuuca

SEQ ID NO: 108980 - RNA, 22 nt, Human
cagucuuugaugcauccuagcc

SEQ ID NO: 108981 - RNA, 22 nt, Human
cagucuuuguucccauuacuga

SEQ ID NO: 108982 - RNA, 22 nt, Human
cagugaaguguggacgucacca

SEQ ID NO: 108983 - RNA, 22 nt, Human
cagugaaguuuaaaguguagau

SEQ ID NO: 108984 - RNA, 22 nt, Human
cagugacacccagucuggccca

SEQ ID NO: 108985 - RNA, 22 nt, Human
cagugacagcaagcagugcugg

SEQ ID NO: 108986 - RNA, 22 nt, Human
cagugagaauucaguagguacu

SEQ ID NO: 108987 - RNA, 21 nt, Human
cagugaggcccuccuguuccc

SEQ ID NO: 108988 - RNA, 22 nt, Human
cagugaggcucugcugagcggu

SEQ ID NO: 108989 - RNA, 22 nt, Human
cagugagguggaguaguuccca

SEQ ID NO: 108990 - RNA, 22 nt, Human
caguauguccuuccucguuggc

SEQ ID NO: 108991 - RNA, 22 nt, Human
caguaugugaugcaacggaaua

SEQ ID NO: 108992 - RNA, 22 nt, Human
caguauuucauucagaauuguu

SEQ ID NO: 108993 - RNA, 22 nt, Human
caguauuuggaauauagcuaag

SEQ ID NO: 108994 - RNA, 22 nt, Human
cagucacauuucgacauaacua

SEQ ID NO: 108995 - RNA, 22 nt, Human
cagucaccuagacagaacuuac

SEQ ID NO: 108996 - RNA, 22 nt, Human
cagucacuggaauagcugagga

SEQ ID NO: 108997 - RNA, 22 nt, Human
cagucaggcugcgcuucucuga

SEQ ID NO: 108998 - RNA, 22 nt, Human
cagucagggacaccagcuagga

SEQ ID NO: 108999 - RNA, 22 nt, Human
cagucauuaugggaguuaaucc

SEQ ID NO: 109000 - RNA, 22 nt, Human
cagucauuggcuaaagcucccu

SEQ ID NO: 109001 - RNA, 22 nt, Human
caguccagagcccaccagagga

SEQ ID NO: 109002 - RNA, 22 nt, Human
caguccagccaguagggugugg

SEQ ID NO: 109003 - RNA, 22 nt, Human
caguccauaugccauaauucuu

SEQ ID NO: 109004 - RNA, 22 nt, Human
cagucccaccaggaucgcucuu

SEQ ID NO: 109005 - RNA, 22 nt, Human
cagucccacuagugccaauacc

SEQ ID NO: 109006 - RNA, 22 nt, Human
cagucccagacauaguaaggga

SEQ ID NO: 109007 - RNA, 22 nt, Human
cagucccaggguugguucagcu

SEQ ID NO: 109008 - RNA, 22 nt, Human
cagucccaugagcccagaacau

SEQ ID NO: 109009 - RNA, 22 nt, Human
caguccugcccaggcugacaga

SEQ ID NO: 109010 - RNA, 22 nt, Human
caguccugcuagugugaaaagc

SEQ ID NO: 109011 - RNA, 22 nt, Human
caguccugggagacuuacccag

SEQ ID NO: 109012 - RNA, 22 nt, Human
caguccuggggaccaggcugag

SEQ ID NO: 109013 - RNA, 20 nt, Human
caguccugucccugcugccc

SEQ ID NO: 109014 - RNA, 22 nt, Human
caguccugucuuuaugacuuca

SEQ ID NO: 109015 - RNA, 22 nt, Human
caguccuguguuaaacaagagc

SEQ ID NO: 109016 - RNA, 22 nt, Human
caguccuuccuugccccuuggg

SEQ ID NO: 109017 - RNA, 22 nt, Human
caguccuuggcaaguucucagu

SEQ ID NO: 109018 - RNA, 22 nt, Human
caguccuuucaauggugaccuu

SEQ ID NO: 109019 - RNA, 19 nt, Human
caguccuuuccgcuuucuc

SEQ ID NO: 109020 - RNA, 22 nt, Human
caguccuuucugaaauccuaua

SEQ ID NO: 109021 - RNA, 18 nt, Human
cagucuaauucccuuccc

SEQ ID NO: 109022 - RNA, 22 nt, Human
cagucuccgccagcuccucaca

SEQ ID NO: 109023 - RNA, 22 nt, Human
cagucucucuccuugcaggcgu

SEQ ID NO: 109024 - RNA, 22 nt, Human
cagucucugggaaagaggacag

SEQ ID NO: 109025 - RNA, 22 nt, Human
cagucucuggugaguugacagu

SEQ ID NO: 109026 - RNA, 22 nt, Human
cagucucugugccagauccugg

SEQ ID NO: 109027 - RNA, 22 nt, Human
cagucuggaucugugcugcugu

SEQ ID NO: 109028 - RNA, 22 nt, Human
cagucuuagaggugacugugga

SEQ ID NO: 109029 - RNA, 22 nt, Human
cagucuuauccugaaaacaaca

SEQ ID NO: 109030 - RNA, 22 nt, Human
cagucuucuaaccuagcagccu

SEQ ID NO: 109031 - RNA, 22 nt, Human
cagugaacuugaguacuucauu

SEQ ID NO: 109032 - RNA, 17 nt, Human
cagugaagagacauuaa

SEQ ID NO: 109033 - RNA, 22 nt, Human
cagugacguaaacugcaugugc

SEQ ID NO: 109034 - RNA, 22 nt, Human
cagugagcacggccagagggga

SEQ ID NO: 109035 - RNA, 22 nt, Human
cagugaggaguccagggcagag

SEQ ID NO: 109036 - RNA, 22 nt, Human
cagugaggaugauaauuaaggu

SEQ ID NO: 109037 - RNA, 22 nt, Human
cagugagguggauggauggccu

SEQ ID NO: 109038 - RNA, 22 nt, Human
cagugaguugugcugaggacca

SEQ ID NO: 109039 - RNA, 22 nt, Human
cagugauuguacuguugugccu

SEQ ID NO: 109040 - RNA, 22 nt, Human
cagugcaaugcagaugacacca

SEQ ID NO: 109041 - RNA, 22 nt, Human
cagugcaauuagaacuuauuua

SEQ ID NO: 109042 - RNA, 17 nt, Human
cagugcagagcccuuuc

SEQ ID NO: 109043 - RNA, 22 nt, Human
cagugcaugaaacaauaugcag

SEQ ID NO: 109044 - RNA, 22 nt, Human
cagugcaugcacacacauggua

SEQ ID NO: 109045 - RNA, 22 nt, Human
cagugccagcugcuuggccuac

SEQ ID NO: 109046 - RNA, 22 nt, Human
cagugccaguggaugaacuguu

SEQ ID NO: 109047 - RNA, 22 nt, Human
cagugcccaaaggaacagaaag

SEQ ID NO: 109048 - RNA, 22 nt, Human
cagugcccaagaugugccaugc

SEQ ID NO: 109049 - RNA, 22 nt, Human
cagugcccucaucuaugaaauc

SEQ ID NO: 109050 - RNA, 22 nt, Human
cagugccuggccggcuuccauu

SEQ ID NO: 109051 - RNA, 21 nt, Human
cagugcucaaucugacagugg

SEQ ID NO: 109052 - RNA, 21 nt, Human
cagugcucaggaauagagaga

SEQ ID NO: 109053 - RNA, 22 nt, Human
cagugcuccugauguacccuug

SEQ ID NO: 109054 - RNA, 22 nt, Human
cagugcugacagggaggaaccu

SEQ ID NO: 109055 - RNA, 22 nt, Human
cagugcuggaggcuggagggaa

SEQ ID NO: 109056 - RNA, 23 nt, Human
cagugcugguucugccugugggg

SEQ ID NO: 109057 - RNA, 22 nt, Human
cagugcugugcuggaagcuguu

SEQ ID NO: 109058 - RNA, 22 nt, Human
cagugcuguuaauaaacacaaa

SEQ ID NO: 109059 - RNA, 22 nt, Human
cagugcuguuguaagcucauug

SEQ ID NO: 109060 - RNA, 22 nt, Human
cagugcuuuuaaaacaacauca

SEQ ID NO: 109061 - RNA, 22 nt, Human
caguggaagacucagcucuccc

SEQ ID NO: 109062 - RNA, 22 nt, Human
caguggaauacgagcagauguc

SEQ ID NO: 109063 - RNA, 22 nt, Human
caguggagugggacuggucuga

SEQ ID NO: 109064 - RNA, 22 nt, Human
caguggauccucugacucccuc

SEQ ID NO: 109065 - RNA, 22 nt, Human
caguggaugauuuggcugcuag

SEQ ID NO: 109066 - RNA, 22 nt, Human
ucucuagguugauauaaauuau

SEQ ID NO: 109067 - RNA, 22 nt, Human
ucucuaguauuaaauauagugu

SEQ ID NO: 109068 - RNA, 22 nt, Human
ucucuagugccaugaaaguccu

SEQ ID NO: 109069 - RNA, 22 nt, Human
ucucuaugacaagguuugguug

SEQ ID NO: 109070 - RNA, 20 nt, Human
ucucuauucccacgaggaaa

SEQ ID NO: 109071 - RNA, 22 nt, Human
ucucucaaccucggcacuauug

SEQ ID NO: 109072 - RNA, 22 nt, Human
ucucucacuggugccucuguug

SEQ ID NO: 109073 - RNA, 22 nt, Human
ucucucauaagaugaguacuua

SEQ ID NO: 109074 - RNA, 22 nt, Human
ucucuccaacaugguggugcug

SEQ ID NO: 109075 - RNA, 22 nt, Human
ucucucccuuuccuuaucaguu

SEQ ID NO: 109076 - RNA, 21 nt, Human
ucucuccucaagcucgacccc

SEQ ID NO: 109077 - RNA, 22 nt, Human
ucucuccuccacaccgggugcu

SEQ ID NO: 109078 - RNA, 22 nt, Human
ucucuccucuagucaggguggu

SEQ ID NO: 109079 - RNA, 22 nt, Human
ucucucuacuggggcacuagga

SEQ ID NO: 109080 - RNA, 22 nt, Human
ucucucuauaugucaacagggg

SEQ ID NO: 109081 - RNA, 22 nt, Human
ucucucugccaacucacagcca

SEQ ID NO: 109082 - RNA, 22 nt, Human
ucucucuucagagauaccuugc

SEQ ID NO: 109083 - RNA, 22 nt, Human
ucucucuugucaccccaucugc

SEQ ID NO: 109084 - RNA, 22 nt, Human
ucucugaaagcagcugcucauc

SEQ ID NO: 109085 - RNA, 22 nt, Human
ucucugaacuuccuggaaaggc

SEQ ID NO: 109086 - RNA, 22 nt, Human
ucucugaagagcucagacuagu

SEQ ID NO: 109087 - RNA, 22 nt, Human
ucucugaauuguuuaaguuauu

SEQ ID NO: 109088 - RNA, 21 nt, Human
ucucugagacacucuggagcc

SEQ ID NO: 109089 - RNA, 22 nt, Human
ucucugagacaguagccucugc

SEQ ID NO: 109090 - RNA, 22 nt, Human
ucucugagcaugccauauugcu

SEQ ID NO: 109091 - RNA, 21 nt, Human
ucucugagcccaccaggaucu

SEQ ID NO: 109092 - RNA, 22 nt, Human
ucucugagccccugccucuuuc

SEQ ID NO: 109093 - RNA, 22 nt, Human
ucucugagcgcauuccuccggc

SEQ ID NO: 109094 - RNA, 22 nt, Human
ucucugagcucaggagcugcag

SEQ ID NO: 109095 - RNA, 22 nt, Human
ucucugagcugcuucuugcaua

SEQ ID NO: 109096 - RNA, 22 nt, Human
ucucugaggaagaggcuguaau

SEQ ID NO: 109097 - RNA, 22 nt, Human
ucucugaggacuugggguugcc

SEQ ID NO: 109098 - RNA, 22 nt, Human
ucucugaguucuccuccagccc

SEQ ID NO: 109099 - RNA, 23 nt, Human
ucucugaguuguacuuucccuug

SEQ ID NO: 109100 - RNA, 22 nt, Human
ucucugaugcugccagggaaaa

SEQ ID NO: 109101 - RNA, 22 nt, Human
ucucugauguauaucagagaac

SEQ ID NO: 109102 - RNA, 22 nt, Human
ucucugcagucuugggcaggca

SEQ ID NO: 109103 - RNA, 19 nt, Human
ucucugccgaucagggccc

SEQ ID NO: 109104 - RNA, 22 nt, Human
ucucugcucugugccucaguuu

SEQ ID NO: 109105 - RNA, 22 nt, Human
ucucugcugagaagggcuggca

SEQ ID NO: 109106 - RNA, 16 nt, Human
ucucugcuucauaggu

SEQ ID NO: 109107 - RNA, 22 nt, Human
ucucugcuugguguaugugagu

SEQ ID NO: 109108 - RNA, 22 nt, Human
ucucuggaagcgcagaucuguu

SEQ ID NO: 109109 - RNA, 22 nt, Human
ucucuggaauuuugagagugac

SEQ ID NO: 109110 - RNA, 22 nt, Human
ucucuggagcugcagauccagg

SEQ ID NO: 109111 - RNA, 22 nt, Human
ucucuggaguauaaccagggau

SEQ ID NO: 109112 - RNA, 21 nt, Human
ucucuggaguuagcagagaga

SEQ ID NO: 109113 - RNA, 19 nt, Human
ucucuggaugacagacacu

SEQ ID NO: 109114 - RNA, 22 nt, Human
ucucuggcagacaccucccuga

SEQ ID NO: 109115 - RNA, 22 nt, Human
ucucuggcagcuugugcuguug

SEQ ID NO: 109116 - RNA, 23 nt, Human
ucucuggccuuugaucagguuga

SEQ ID NO: 109117 - RNA, 19 nt, Human
ucucuggcuugucugccug

SEQ ID NO: 109118 - RNA, 22 nt, Human
ucucugggaaugggccugggua

SEQ ID NO: 109119 - RNA, 22 nt, Human
ucucugggacacugggucaguu

SEQ ID NO: 109120 - RNA, 22 nt, Human
ucucugggagcaauuguuugcu

SEQ ID NO: 109121 - RNA, 22 nt, Human
ucucugggaguugagcagcagc

SEQ ID NO: 109122 - RNA, 22 nt, Human
ucucugggcccagaccuuccuu

SEQ ID NO: 109123 - RNA, 21 nt, Human
ucucugggcccuccugugggg

SEQ ID NO: 109124 - RNA, 22 nt, Human
ucucugggccucaguuuucuca

SEQ ID NO: 109125 - RNA, 22 nt, Human
ucucugggccuguuuucucauc

SEQ ID NO: 109126 - RNA, 19 nt, Human
ucucuggggacacuuucac

SEQ ID NO: 109127 - RNA, 22 nt, Human
ucucuggguaaaguucucucau

SEQ ID NO: 109128 - RNA, 22 nt, Human
ucucuggguucucacucagcac

SEQ ID NO: 109129 - RNA, 22 nt, Human
ucucuggguugagaacuaggac

SEQ ID NO: 109130 - RNA, 16 nt, Human
ucucuggguugcacag

SEQ ID NO: 109131 - RNA, 22 nt, Human
ucucuggguuuuuguccuguac

SEQ ID NO: 109132 - RNA, 22 nt, Human
ucucugguggcuccaucaguag

SEQ ID NO: 109133 - RNA, 23 nt, Human
ucucugguuaggggagauuggug

SEQ ID NO: 109134 - RNA, 22 nt, Human
ucucuguaagcugccuucucgu

SEQ ID NO: 109135 - RNA, 22 nt, Human
ucucuguacaguacaugccgug

SEQ ID NO: 109136 - RNA, 22 nt, Human
ucucuguagaccugaccagcac

SEQ ID NO: 109137 - RNA, 22 nt, Human
ucucuguagcagcuuccuuccu

SEQ ID NO: 109138 - RNA, 22 nt, Human
ucucuguccccucagcuggggu

SEQ ID NO: 109139 - RNA, 22 nt, Human
ucucugucccuaggagccuugc

SEQ ID NO: 109140 - RNA, 22 nt, Human
ucucugucugcacccaaucaau

SEQ ID NO: 109141 - RNA, 22 nt, Human
ucucugucuuuguugucuucac

SEQ ID NO: 109142 - RNA, 22 nt, Human
ucucugugaagcucccguuagg

SEQ ID NO: 109143 - RNA, 22 nt, Human
ucucugugaauggcgucaccug

SEQ ID NO: 109144 - RNA, 22 nt, Human
ucucugugacagcuggguaugu

SEQ ID NO: 109145 - RNA, 22 nt, Human
ucucugugcuugacuuucccau

SEQ ID NO: 109146 - RNA, 22 nt, Human
ucucuguggagcaguguguuca

SEQ ID NO: 109147 - RNA, 22 nt, Human
ucucuguggcaacuacuuagcu

SEQ ID NO: 109148 - RNA, 21 nt, Human
ucucuguggccuacccucuac

SEQ ID NO: 109149 - RNA, 22 nt, Human
ucucuguggguuucaccagcgc

SEQ ID NO: 109150 - RNA, 22 nt, Human
ucucugugguaugucauagcaa

SEQ ID NO: 109151 - RNA, 21 nt, Human
ucucugugguccaaucccagc

SEQ ID NO: 109152 - RNA, 22 nt, Human
ucucugugugggagaucuuuuu

SEQ ID NO: 109153 - RNA, 22 nt, Human
ucucuuaaaagauuuuaaugac

SEQ ID NO: 109154 - RNA, 22 nt, Human
ucucuuaacugguucagcaauu

SEQ ID NO: 109155 - RNA, 22 nt, Human
ucucuuaauccggugcuuucug

SEQ ID NO: 109156 - RNA, 22 nt, Human
ucucuuaauuguaaugguuccu

SEQ ID NO: 109157 - RNA, 22 nt, Human
ucucuuagucuuauauguaaaa

SEQ ID NO: 109158 - RNA, 22 nt, Human
ucucuuauuuugccuuugacaa

SEQ ID NO: 109159 - RNA, 22 nt, Human
ucucuucccggauaaaguaagu

SEQ ID NO: 109160 - RNA, 22 nt, Human
ucucuucucuagugagcaacug

SEQ ID NO: 109161 - RNA, 22 nt, Human
ucucuucugaccuagccuugga

SEQ ID NO: 109162 - RNA, 22 nt, Human
ucucuucuuuggggugggcuca

SEQ ID NO: 109163 - RNA, 19 nt, Human
ucucuugaauaggucaaac

SEQ ID NO: 109164 - RNA, 22 nt, Human
ucucuugauauauuacauagag

SEQ ID NO: 109165 - RNA, 18 nt, Human
ucucuugcaucuucugua

SEQ ID NO: 109166 - RNA, 22 nt, Human
ucucuuggagguucuuccuguu

SEQ ID NO: 109167 - RNA, 22 nt, Human
ucucuugugguuuuguaguuga

SEQ ID NO: 109168 - RNA, 17 nt, Human
ucucuuguucacugcug

SEQ ID NO: 109169 - RNA, 22 nt, Human
ucucuuuaaagacucagagauu

SEQ ID NO: 109170 - RNA, 17 nt, Human
ucucuuucccuuucugc

SEQ ID NO: 109171 - RNA, 18 nt, Human
ucucuuuccucaguggag

SEQ ID NO: 109172 - RNA, 22 nt, Human
ucucuuugacccuuuagcucca

SEQ ID NO: 109173 - RNA, 22 nt, Human
ucucuuuucuuucuggauaaaa

SEQ ID NO: 109174 - RNA, 22 nt, Human
ucugaaagcccuaguuuguaau

SEQ ID NO: 109175 - RNA, 22 nt, Human
ucugaaauaagggagaagggaa

SEQ ID NO: 109176 - RNA, 22 nt, Human
uuaacaaaaauaucaggcauca

SEQ ID NO: 109177 - RNA, 22 nt, Human
uuaacaaauauuucccaugccc

SEQ ID NO: 109178 - RNA, 22 nt, Human
uuaacaaggugacugcauuaaa

SEQ ID NO: 109179 - RNA, 22 nt, Human
uuaacacagggggagacaaagu

SEQ ID NO: 109180 - RNA, 22 nt, Human
uuaacacuccuaacuacagucu

SEQ ID NO: 109181 - RNA, 22 nt, Human
uuaacagagaacauagaaguag

SEQ ID NO: 109182 - RNA, 22 nt, Human
uuaacagagugccuggcaugua

SEQ ID NO: 109183 - RNA, 22 nt, Human
uuaacagauguuuauggagcau

SEQ ID NO: 109184 - RNA, 22 nt, Human
uuaacaguggcuaagacugagg

SEQ ID NO: 109185 - RNA, 22 nt, Human
uuaacauacaucaugaacaaug

SEQ ID NO: 109186 - RNA, 22 nt, Human
uuaacauccuguuuaaauuugg

SEQ ID NO: 109187 - RNA, 22 nt, Human
uuaacauuguccuuagcagauu

SEQ ID NO: 109188 - RNA, 22 nt, Human
uuaacuguaucauacuguuuca

SEQ ID NO: 109189 - RNA, 22 nt, Human
uuaagaaugugccuuuugguug

SEQ ID NO: 109190 - RNA, 22 nt, Human
uuaagacacauuucucagacgg

SEQ ID NO: 109191 - RNA, 22 nt, Human
uuaagacaguguauuuguuuuc

SEQ ID NO: 109192 - RNA, 22 nt, Human
uuaagacaugugagcauaacuu

SEQ ID NO: 109193 - RNA, 21 nt, Human
uuaagaccugcaucaucauua

SEQ ID NO: 109194 - RNA, 22 nt, Human
uuaagacuauuguaauagggga

SEQ ID NO: 109195 - RNA, 22 nt, Human
uuaagagaagaguaucuagaac

SEQ ID NO: 109196 - RNA, 22 nt, Human
uuaagagaaggaaugaccuagc

SEQ ID NO: 109197 - RNA, 22 nt, Human
uuaagagauuuaggaacauuau

SEQ ID NO: 109198 - RNA, 22 nt, Human
uuaagaggagaucauacuggag

SEQ ID NO: 109199 - RNA, 22 nt, Human
uuaagagggugaugcuagcauu

SEQ ID NO: 109200 - RNA, 22 nt, Human
uuaagaucaagauaagcaauaa

SEQ ID NO: 109201 - RNA, 22 nt, Human
uuaagauguucagauaauuugg

SEQ ID NO: 109202 - RNA, 22 nt, Human
uuaagauuuguagagaaaaagc

SEQ ID NO: 109203 - RNA, 19 nt, Human
uuaagcuaagauacuagua

SEQ ID NO: 109204 - RNA, 22 nt, Human
uuaagcuagugaagucccucaa

SEQ ID NO: 109205 - RNA, 22 nt, Human
uuaaggaaagauuagcauuugu

SEQ ID NO: 109206 - RNA, 22 nt, Human
uuaaggaaagccaaaaugaauu

SEQ ID NO: 109207 - RNA, 22 nt, Human
uuaaggaacaauucuacacacc

SEQ ID NO: 109208 - RNA, 22 nt, Human
uuaaggaacuugucuuucucuu

SEQ ID NO: 109209 - RNA, 18 nt, Human
uuaaggauaagcagacua

SEQ ID NO: 109210 - RNA, 22 nt, Human
uuaaggauguugugauuuauua

SEQ ID NO: 109211 - RNA, 22 nt, Human
uuaagguagcucacuaaauaug

SEQ ID NO: 109212 - RNA, 22 nt, Human
uuaaguacuucccuguuggaca

SEQ ID NO: 109213 - RNA, 22 nt, Human
uuaaguagauucaguguuaagg

SEQ ID NO: 109214 - RNA, 22 nt, Human
uuaagucaauaucaaucucagc

SEQ ID NO: 109215 - RNA, 22 nt, Human
uuaaguccuugguaauuuucuu

SEQ ID NO: 109216 - RNA, 22 nt, Human
uuaauacagucuccagaaguaa

SEQ ID NO: 109217 - RNA, 22 nt, Human
uuaauagauaugccucuagagu

SEQ ID NO: 109218 - RNA, 22 nt, Human
uuaauaugcugcuucuugaaaa

SEQ ID NO: 109219 - RNA, 22 nt, Human
uuaaucaagaguggggacugug

SEQ ID NO: 109220 - RNA, 22 nt, Human
uuaauccaauaacaagguucaa

SEQ ID NO: 109221 - RNA, 22 nt, Human
uuaaucugaaucaguaaacacu

SEQ ID NO: 109222 - RNA, 22 nt, Human
uuaaucuuauauguaaagguaa

SEQ ID NO: 109223 - RNA, 22 nt, Human
uuaaugaaugugugcuaacguu

SEQ ID NO: 109224 - RNA, 22 nt, Human
uuaaugacuuauauuuaaagca

SEQ ID NO: 109225 - RNA, 21 nt, Human
uuaaugcuaugcagaaaaucu

SEQ ID NO: 109226 - RNA, 22 nt, Human
uuaauguaugggguugagauga

SEQ ID NO: 109227 - RNA, 22 nt, Human
uuaaugucaacauuucugaaga

SEQ ID NO: 109228 - RNA, 22 nt, Human
uuaauguggaaagcucuugagu

SEQ ID NO: 109229 - RNA, 22 nt, Human
uuaauguguguacaggauuuug

SEQ ID NO: 109230 - RNA, 22 nt, Human
uuaauuacuaagcacaaugcaa

SEQ ID NO: 109231 - RNA, 22 nt, Human
uuaauuaguagaggcauuuagu

SEQ ID NO: 109232 - RNA, 22 nt, Human
uuaauuaugcaaaaggccccau

SEQ ID NO: 109233 - RNA, 22 nt, Human
uuaauucuaguuuaacacuuag

SEQ ID NO: 109234 - RNA, 22 nt, Human
uuaauucugccuuucauguaac

SEQ ID NO: 109235 - RNA, 22 nt, Human
uuaauugauauaaagaacuuca

SEQ ID NO: 109236 - RNA, 22 nt, Human
uuaauugguaaccucuggacua

SEQ ID NO: 109237 - RNA, 22 nt, Human
uuaauuugaccauaaauaucuu

SEQ ID NO: 109238 - RNA, 22 nt, Human
uuaauuuugaugagguucaguu

SEQ ID NO: 109239 - RNA, 22 nt, Human
uuacaaacaacagacauuuauu

SEQ ID NO: 109240 - RNA, 22 nt, Human
uuacaaacuccagugagugagc

SEQ ID NO: 109241 - RNA, 22 nt, Human
uuacaaagagaaguuguagaau

SEQ ID NO: 109242 - RNA, 22 nt, Human
uuacaaagaguguucuuuucca

SEQ ID NO: 109243 - RNA, 21 nt, Human
uuacaaagcaagugcuguguc

SEQ ID NO: 109244 - RNA, 22 nt, Human
uuacaaagcaggucagcugaaa

SEQ ID NO: 109245 - RNA, 22 nt, Human
uuacaaagcgcuuuaccucuga

SEQ ID NO: 109246 - RNA, 22 nt, Human
uuacaaagguaguuuugucuau

SEQ ID NO: 109247 - RNA, 22 nt, Human
uuacaaaguguuaugauaaaca

SEQ ID NO: 109248 - RNA, 22 nt, Human
uuacaaaguucugaguucaaac

SEQ ID NO: 109249 - RNA, 22 nt, Human
uuacaacacuacuuauccuuga

SEQ ID NO: 109250 - RNA, 22 nt, Human
uuacaacauaugauaggagucu

SEQ ID NO: 109251 - RNA, 22 nt, Human
uuacaacucugaacuacagagg

SEQ ID NO: 109252 - RNA, 22 nt, Human
uuacaacucugucaguauagcu

SEQ ID NO: 109253 - RNA, 22 nt, Human
uuacaacuugcagaggauguug

SEQ ID NO: 109254 - RNA, 22 nt, Human
uuacaagacacugcugacacag

SEQ ID NO: 109255 - RNA, 22 nt, Human
uuacaagauaaccugaugcugu

SEQ ID NO: 109256 - RNA, 22 nt, Human
uuacaagauaacggagaaagca

SEQ ID NO: 109257 - RNA, 22 nt, Human
uuacaagauugauuugcuuggc

SEQ ID NO: 109258 - RNA, 19 nt, Human
uuacaagcauugaaagaaa

SEQ ID NO: 109259 - RNA, 23 nt, Human
uuacaaggaagugcacagauggg

SEQ ID NO: 109260 - RNA, 22 nt, Human
uuacaagggucaguguguuugu

SEQ ID NO: 109261 - RNA, 22 nt, Human
uuacaaguauuuaagaugcugu

SEQ ID NO: 109262 - RNA, 22 nt, Human
uuacaagugucagguacuggca

SEQ ID NO: 109263 - RNA, 22 nt, Human
uuacaauaguuccuucuuuugu

SEQ ID NO: 109264 - RNA, 22 nt, Human
uuacaaugagaaaugguuggca

SEQ ID NO: 109265 - RNA, 22 nt, Human
ucuauuuucuugccaaaacugc

SEQ ID NO: 109266 - RNA, 22 nt, Human
ucuauuuuguuuccagcucuac

SEQ ID NO: 109267 - RNA, 22 nt, Human
ucuauuuuuauaguugaagugc

SEQ ID NO: 109268 - RNA, 22 nt, Human
ucucaaauauuuggagagagga

SEQ ID NO: 109269 - RNA, 22 nt, Human
ucucaaauggacaauauugugg

SEQ ID NO: 109270 - RNA, 22 nt, Human
ucucaaauuuguuagauaaaau

SEQ ID NO: 109271 - RNA, 23 nt, Human
ucucaagaggaagcagggcucau

SEQ ID NO: 109272 - RNA, 22 nt, Human
ucucaagaucucaagauggccc

SEQ ID NO: 109273 - RNA, 22 nt, Human
ucucaagcuacuaccuuggauc

SEQ ID NO: 109274 - RNA, 22 nt, Human
ucucaaguuauguaacagcugu

SEQ ID NO: 109275 - RNA, 22 nt, Human
ucucaauauuauaugucauaaa

SEQ ID NO: 109276 - RNA, 22 nt, Human
ucucaaucaaacaugucugacu

SEQ ID NO: 109277 - RNA, 22 nt, Human
ucucaaugacuccuauuuacau

SEQ ID NO: 109278 - RNA, 22 nt, Human
ucucacaccgucccuaaaccau

SEQ ID NO: 109279 - RNA, 22 nt, Human
ucucacacuauuuauucugcuu

SEQ ID NO: 109280 - RNA, 22 nt, Human
ucucacacuauuucaggugacu

SEQ ID NO: 109281 - RNA, 22 nt, Human
ucucacagcaggggccaggucu

SEQ ID NO: 109282 - RNA, 22 nt, Human
ucucacagcauuauccagggca

SEQ ID NO: 109283 - RNA, 22 nt, Human
ucucacagcucugcugcaugcu

SEQ ID NO: 109284 - RNA, 20 nt, Human
ucucacaggggcuuuucucu

SEQ ID NO: 109285 - RNA, 22 nt, Human
ucugggucaugacucagcguga

SEQ ID NO: 109286 - RNA, 22 nt, Human
ucugggucuggcugcuggugca

SEQ ID NO: 109287 - RNA, 22 nt, Human
ucugggugcuacaaacaguauu

SEQ ID NO: 109288 - RNA, 22 nt, Human
ucuggguggcugccaaucugcc

SEQ ID NO: 109289 - RNA, 22 nt, Human
ucuggguggcuucagaggccac

SEQ ID NO: 109290 - RNA, 22 nt, Human
ucugggugggcccgagaaaucu

SEQ ID NO: 109291 - RNA, 22 nt, Human
ucuggguuggguuccuggaauu

SEQ ID NO: 109292 - RNA, 22 nt, Human
ucuggguuugaaguagagccca

SEQ ID NO: 109293 - RNA, 23 nt, Human
ucugguacuauugcuguugagca

SEQ ID NO: 109294 - RNA, 22 nt, Human
ucuggucaagacauccuaacau

SEQ ID NO: 109295 - RNA, 20 nt, Human
ucuggugccccuuccugaga

SEQ ID NO: 109296 - RNA, 22 nt, Human
ucugguggcacgugucuugcau

SEQ ID NO: 109297 - RNA, 19 nt, Human
ucugguucauuucugcugu

SEQ ID NO: 109298 - RNA, 22 nt, Human
ucuguaaucuuccccagcucag

SEQ ID NO: 109299 - RNA, 22 nt, Human
ucuguacaacaaagggaugaga

SEQ ID NO: 109300 - RNA, 22 nt, Human
ucuguacaguaccagauaguaa

SEQ ID NO: 109301 - RNA, 22 nt, Human
ucuguagcaucuuaaauguagu

SEQ ID NO: 109302 - RNA, 22 nt, Human
ucuguagcauucaccagcccug

SEQ ID NO: 109303 - RNA, 22 nt, Human
ucuguaggacagagaaaugggg

SEQ ID NO: 109304 - RNA, 20 nt, Human
ucuguaggcaaguuagcagg

SEQ ID NO: 109305 - RNA, 22 nt, Human
uucaggaaaugucugccuacca

SEQ ID NO: 109306 - RNA, 22 nt, Human
uucaggaagguccuauagcaga

SEQ ID NO: 109307 - RNA, 22 nt, Human
uucaggagaauuccaagaagua

SEQ ID NO: 109308 - RNA, 22 nt, Human
uucaggagcuggcugcgaagga

SEQ ID NO: 109309 - RNA, 22 nt, Human
uucaggauaguggugaguggca

SEQ ID NO: 109310 - RNA, 22 nt, Human
uucaggaucauuuguuuuaucu

SEQ ID NO: 109311 - RNA, 22 nt, Human
uucaggaugcagagguuguagu

SEQ ID NO: 109312 - RNA, 22 nt, Human
uucaggauggaguaccuuuuau

SEQ ID NO: 109313 - RNA, 22 nt, Human
uucaggcccaacgcacagcuuc

SEQ ID NO: 109314 - RNA, 22 nt, Human
uucaggcccagcacagcgcgug

SEQ ID NO: 109315 - RNA, 22 nt, Human
uucagggagagcgggacgggug

SEQ ID NO: 109316 - RNA, 22 nt, Human
uucagggcagagaguucaggga

SEQ ID NO: 109317 - RNA, 22 nt, Human
uucagggcguuguggcugacug

SEQ ID NO: 109318 - RNA, 21 nt, Human
uucaggguuucacaauacuaa

SEQ ID NO: 109319 - RNA, 21 nt, Human
uucaggugagaucauguugac

SEQ ID NO: 109320 - RNA, 22 nt, Human
uucagguguggccagaggagaa

SEQ ID NO: 109321 - RNA, 22 nt, Human
uucagguuuuuaaguucugccu

SEQ ID NO: 109322 - RNA, 22 nt, Human
uucaguauacuucauaacauuu

SEQ ID NO: 109323 - RNA, 22 nt, Human
uucaguauauuacucuugucaa

SEQ ID NO: 109324 - RNA, 22 nt, Human
uucaguaugacagacgcauugg

SEQ ID NO: 109325 - RNA, 22 nt, Human
uucaguauguagaacaaguguu

SEQ ID NO: 109326 - RNA, 22 nt, Human
uucagucuuguugaaaacuugg

SEQ ID NO: 109327 - RNA, 22 nt, Human
uucagugacuuaccuggagcca

SEQ ID NO: 109328 - RNA, 22 nt, Human
uucagugccuguccacagcuuc

SEQ ID NO: 109329 - RNA, 22 nt, Human
uucagugcuuacagguuucuuu

SEQ ID NO: 109330 - RNA, 22 nt, Human
uucagugguuugaugauguaua

SEQ ID NO: 109331 - RNA, 22 nt, Human
uucagugucccuaguagaaguu

SEQ ID NO: 109332 - RNA, 22 nt, Human
uucaguguuaaucuugggagaa

SEQ ID NO: 109333 - RNA, 22 nt, Human
uucaguucacauguaucauggc

SEQ ID NO: 109334 - RNA, 22 nt, Human
uucaguuccauuucaggugggu

SEQ ID NO: 109335 - RNA, 22 nt, Human
uucaguuucagucuugcaaaaa

SEQ ID NO: 109336 - RNA, 18 nt, Human
uucaguuucuaguuccuu

SEQ ID NO: 109337 - RNA, 21 nt, Human
uucaguuucuuccucaucuau

SEQ ID NO: 109338 - RNA, 22 nt, Human
uucaguuuguuugacuguuaga

SEQ ID NO: 109339 - RNA, 22 nt, Human
uucaguuuucuuuagaauguag

SEQ ID NO: 109340 - RNA, 22 nt, Human
uucaguuuugcuuuuaaucaug

SEQ ID NO: 109341 - RNA, 22 nt, Human
uucauaaacaaauuaaggccug

SEQ ID NO: 109342 - RNA, 22 nt, Human
uucauaaguuugucacugaugu

SEQ ID NO: 109343 - RNA, 22 nt, Human
uucauacuaaaguguaagaugu

SEQ ID NO: 109344 - RNA, 22 nt, Human
uucauacuguuuaaguucuguu

SEQ ID NO: 109345 - RNA, 22 nt, Human
uucauagaagcagaaaguaaac

SEQ ID NO: 109346 - RNA, 22 nt, Human
uucauagacccaugugaggaag

SEQ ID NO: 109347 - RNA, 23 nt, Human
uucauagagagauggugagaauu

SEQ ID NO: 109348 - RNA, 22 nt, Human
uucauauauaugcacuacguac

SEQ ID NO: 109349 - RNA, 23 nt, Human
uucauauguugcugaaaacagca

SEQ ID NO: 109350 - RNA, 22 nt, Human
uucaucaauguguuuaauaaug

SEQ ID NO: 109351 - RNA, 22 nt, Human
uucaucaccuugguagcacucc

SEQ ID NO: 109352 - RNA, 18 nt, Human
uucaucaugacucugugg

SEQ ID NO: 109353 - RNA, 22 nt, Human
uucaucugcuucuuccuauucc

SEQ ID NO: 109354 - RNA, 22 nt, Human
uucaucuggucuaguuuuuagu

SEQ ID NO: 109355 - RNA, 22 nt, Human
uucaugaaagacagcaacugug

SEQ ID NO: 109356 - RNA, 22 nt, Human
uucaugagguaccugugaucau

SEQ ID NO: 109357 - RNA, 20 nt, Human
uucaugcuggaggggcuggc

SEQ ID NO: 109358 - RNA, 20 nt, Human
uucaugguguauuucuuucu

SEQ ID NO: 109359 - RNA, 22 nt, Human
uucauguaauaggauguguuaa

SEQ ID NO: 109360 - RNA, 22 nt, Human
uucauguaggcugcaaugcaca

SEQ ID NO: 109361 - RNA, 22 nt, Human
uucaugucugccuuuucaagug

SEQ ID NO: 109362 - RNA, 22 nt, Human
uucauguggaaaagggcuuuca

SEQ ID NO: 109363 - RNA, 22 nt, Human
uucauguguauggaacauuuuu

SEQ ID NO: 109364 - RNA, 22 nt, Human
uucaugugucuguagcacauau

SEQ ID NO: 109365 - RNA, 22 nt, Human
uucauguuggauucacugugag

SEQ ID NO: 109366 - RNA, 22 nt, Human
uucauguuucauuuguuacuau

SEQ ID NO: 109367 - RNA, 22 nt, Human
uucauguuuugagccauucuga

SEQ ID NO: 109368 - RNA, 22 nt, Human
uucauuacuuaggcaggcauuu

SEQ ID NO: 109369 - RNA, 22 nt, Human
uucauuagagauuauaaaauga

SEQ ID NO: 109370 - RNA, 22 nt, Human
uucauucagcacauauuuauug

SEQ ID NO: 109371 - RNA, 22 nt, Human
uucauucaucacaugcagcugg

SEQ ID NO: 109372 - RNA, 22 nt, Human
uucauucauucaugaauguuaa

SEQ ID NO: 109373 - RNA, 22 nt, Human
uucauucccaagaguaaacaua

SEQ ID NO: 109374 - RNA, 22 nt, Human
uucauuccuucccuaagcaacu

SEQ ID NO: 109375 - RNA, 22 nt, Human
uucauucugggcucuaaggaac

SEQ ID NO: 109376 - RNA, 22 nt, Human
uucauugaaauguuucuagcug

SEQ ID NO: 109377 - RNA, 22 nt, Human
uucauugaguuacugccugggc

SEQ ID NO: 109378 - RNA, 23 nt, Human
uucauugauugcaaggagauugg

SEQ ID NO: 109379 - RNA, 22 nt, Human
uucauugauuuaacaaacaagu

SEQ ID NO: 109380 - RNA, 22 nt, Human
uucauugcaguucuucagguua

SEQ ID NO: 109381 - RNA, 22 nt, Human
uucauuuagcaugcuaaaccug

SEQ ID NO: 109382 - RNA, 22 nt, Human
uucauuugaguuuauaguugcu

SEQ ID NO: 109383 - RNA, 22 nt, Human
uucauuugccaucaguguaaug

SEQ ID NO: 109384 - RNA, 22 nt, Human
uuccaaaacaauauucugugaa

SEQ ID NO: 109385 - RNA, 22 nt, Human
uuccaaaccucaaauaauuaau

SEQ ID NO: 109386 - RNA, 22 nt, Human
uuccaaagcacuugauguaaag

SEQ ID NO: 109387 - RNA, 22 nt, Human
uuccaaagcugcuuuauuuagu

SEQ ID NO: 109388 - RNA, 22 nt, Human
uuccaaaguuauucaagcagua

SEQ ID NO: 109389 - RNA, 22 nt, Human
uuccaaaugcccaucuacacag

SEQ ID NO: 109390 - RNA, 22 nt, Human
uuccaaauguuggacaacugua

SEQ ID NO: 109391 - RNA, 22 nt, Human
uuccaacuucccaucccugcug

SEQ ID NO: 109392 - RNA, 22 nt, Human
uuccaacuuuaaaauucauucu

SEQ ID NO: 109393 - RNA, 22 nt, Human
uuccaacuuugaaaauguuaug

SEQ ID NO: 109394 - RNA, 22 nt, Human
uuccucaucuagcacagaaauu

SEQ ID NO: 109395 - RNA, 18 nt, Human
uuccuccacagagcgcug

SEQ ID NO: 109396 - RNA, 21 nt, Human
uuccuccucuggagaagaaga

SEQ ID NO: 109397 - RNA, 17 nt, Human
uuccucucacauuuuuu

SEQ ID NO: 109398 - RNA, 22 nt, Human
uuccucugaaauggcuuggaaa

SEQ ID NO: 109399 - RNA, 22 nt, Human
uuccucuggaggcucuaggaga

SEQ ID NO: 109400 - RNA, 22 nt, Human
uuccucuguaugcuuugcugcu

SEQ ID NO: 109401 - RNA, 22 nt, Human
uuccucuuauuuucccagugau

SEQ ID NO: 109402 - RNA, 21 nt, Human
uuccucuugcuuccgccuugc

SEQ ID NO: 109403 - RNA, 22 nt, Human
uuccugaauauaaagacacuag

SEQ ID NO: 109404 - RNA, 22 nt, Human
uuccugaaucccaaggagagcu

SEQ ID NO: 109405 - RNA, 22 nt, Human
uuccugagcuuuuaaccuaguc

SEQ ID NO: 109406 - RNA, 22 nt, Human
uuccugagucgccgagucuaug

SEQ ID NO: 109407 - RNA, 22 nt, Human
uuccugcaagaucuuuaaggag

SEQ ID NO: 109408 - RNA, 22 nt, Human
uuccugccuacaugccuuaugc

SEQ ID NO: 109409 - RNA, 22 nt, Human
uuccugcuuccuggccucacaa

SEQ ID NO: 109410 - RNA, 22 nt, Human
uuccuggaaauuaugcucaccu

SEQ ID NO: 109411 - RNA, 17 nt, Human
uuccuggaagucauucc

SEQ ID NO: 109412 - RNA, 22 nt, Human
uuccuggcacauaguuagugcu

SEQ ID NO: 109413 - RNA, 22 nt, Human
uuccuggcauagagagggcaca

SEQ ID NO: 109414 - RNA, 22 nt, Human
uuccuggccccaccccuggaga

SEQ ID NO: 109415 - RNA, 21 nt, Human
uuccuggcggcagaaacguga

SEQ ID NO: 109416 - RNA, 19 nt, Human
uuccuggcucuucuguuuu

SEQ ID NO: 109417 - RNA, 22 nt, Human
uuccuggcugaacugaacuccu

SEQ ID NO: 109418 - RNA, 22 nt, Human
uuccuggcugaucuaccaaagu

SEQ ID NO: 109419 - RNA, 22 nt, Human
uuccugggccuuaaaucuuuug

SEQ ID NO: 109420 - RNA, 22 nt, Human
uuccugggcugcagagagcacc

SEQ ID NO: 109421 - RNA, 22 nt, Human
uuccuggggcgacuguaucuga

SEQ ID NO: 109422 - RNA, 21 nt, Human
ugaaagaggauguggucauuc

SEQ ID NO: 109423 - RNA, 22 nt, Human
ugaaagaugcucaaugaauggu

SEQ ID NO: 109424 - RNA, 22 nt, Human
ugaaagcaaccuguaacaguga

SEQ ID NO: 109425 - RNA, 22 nt, Human
ugaaagcacaaguucuaacagg

SEQ ID NO: 109426 - RNA, 22 nt, Human
ugaaagcacucacuucugcucu

SEQ ID NO: 109427 - RNA, 22 nt, Human
ugaaagcucugucaucauuccu

SEQ ID NO: 109428 - RNA, 22 nt, Human
ugaaagcugaggacaggagggu

SEQ ID NO: 109429 - RNA, 22 nt, Human
ugaaagcugggcacaagauucu

SEQ ID NO: 109430 - RNA, 22 nt, Human
ugaaagcuguacaugugguaca

SEQ ID NO: 109431 - RNA, 22 nt, Human
ugaaagcuguccacuaggcugu

SEQ ID NO: 109432 - RNA, 20 nt, Human
ugaaaggugggaauuguggg

SEQ ID NO: 109433 - RNA, 22 nt, Human
ugaaagguguccaauauuucuc

SEQ ID NO: 109434 - RNA, 22 nt, Human
ugaaaguauuugauuucuauua

SEQ ID NO: 109435 - RNA, 22 nt, Human
ugaaagugucauagaaacccau

SEQ ID NO: 109436 - RNA, 22 nt, Human
ugaaauaggaaacagauguuuc

SEQ ID NO: 109437 - RNA, 22 nt, Human
ugaaauagucuaaaaaaccaga

SEQ ID NO: 109438 - RNA, 22 nt, Human
ugaaauauccagcccagcagga

SEQ ID NO: 109439 - RNA, 22 nt, Human
ugaaaucaauaauuggugauug

SEQ ID NO: 109440 - RNA, 22 nt, Human
ugaaaucaauugcaauguuuau

SEQ ID NO: 109441 - RNA, 22 nt, Human
ugaaaucaguaugucuuucuca

SEQ ID NO: 109442 - RNA, 22 nt, Human
ugaaaucaugagauagugucac

SEQ ID NO: 109443 - RNA, 22 nt, Human
ugaaaucugcaugcaaaguccu

SEQ ID NO: 109444 - RNA, 22 nt, Human
ugaaaucuuauacuuugguagu

SEQ ID NO: 109445 - RNA, 22 nt, Human
ugaaaucuuuaguuucuguccc

SEQ ID NO: 109446 - RNA, 22 nt, Human
ugaaaugaaacagaacauauca

SEQ ID NO: 109447 - RNA, 22 nt, Human
ugaaaugagauaauuuaagugc

SEQ ID NO: 109448 - RNA, 22 nt, Human
ugaaaugcuugggaccagaagu

SEQ ID NO: 109449 - RNA, 22 nt, Human
ugaaaugcuuuuacaggauauu

SEQ ID NO: 109450 - RNA, 22 nt, Human
ugaaauggaugagagcagaggu

SEQ ID NO: 109451 - RNA, 22 nt, Human
ugaaauggcaaggcagagcuuu

SEQ ID NO: 109452 - RNA, 22 nt, Human
ugaaauguagugaagcauggaa

SEQ ID NO: 109453 - RNA, 22 nt, Human
ugaaaugucugaaagccaaucu

SEQ ID NO: 109454 - RNA, 22 nt, Human
ugaaauguuaaacaaguggcuc

SEQ ID NO: 109455 - RNA, 22 nt, Human
ugaaauguuaaucacacaaagg

SEQ ID NO: 109456 - RNA, 22 nt, Human
ugaaauguuugaagaccacuga

SEQ ID NO: 109457 - RNA, 22 nt, Human
ugaaauguuuggguccagaagu

SEQ ID NO: 109458 - RNA, 22 nt, Human
ugaaauuauucuuaccaaggug

SEQ ID NO: 109459 - RNA, 23 nt, Human
ugaacaaaggcaggagaaggcgg

SEQ ID NO: 109460 - RNA, 22 nt, Human
ugaacaaaugaaucaguguagc

SEQ ID NO: 109461 - RNA, 22 nt, Human
ugaacaaauggaaauaaccagu

SEQ ID NO: 109462 - RNA, 22 nt, Human
ugaacacacacaucuuaauaau

SEQ ID NO: 109463 - RNA, 22 nt, Human
ugaacacacaccuauguacaaa

SEQ ID NO: 109464 - RNA, 22 nt, Human
ugaacacagcauauuuuguuac

SEQ ID NO: 109465 - RNA, 22 nt, Human
ugaacacagggaauggggguuu

SEQ ID NO: 109466 - RNA, 22 nt, Human
ugaacacagggccaaacuugag

SEQ ID NO: 109467 - RNA, 18 nt, Human
ugaacacaguacaauucc

SEQ ID NO: 109468 - RNA, 22 nt, Human
ugaacacauaaggcuuuccugu

SEQ ID NO: 109469 - RNA, 22 nt, Human
ugaacacauauuaggugcucau

SEQ ID NO: 109470 - RNA, 22 nt, Human
ugaacacauuugggaaaaucuu

SEQ ID NO: 109471 - RNA, 22 nt, Human
ugaacacugccauauuuaagaa

SEQ ID NO: 109472 - RNA, 22 nt, Human
ugaacagacugaccucugaccu

SEQ ID NO: 109473 - RNA, 22 nt, Human
ugaacagaugccuucucccaug

SEQ ID NO: 109474 - RNA, 22 nt, Human
ugaacagauggcccagcagagg

SEQ ID NO: 109475 - RNA, 22 nt, Human
ugaacauacaauuauuaagaac

SEQ ID NO: 109476 - RNA, 22 nt, Human
ugaacauuaguugaguaaaguc

SEQ ID NO: 109477 - RNA, 22 nt, Human
ugaaccagagucuccagugguu

SEQ ID NO: 109478 - RNA, 22 nt, Human
ugaaccaggaggcagccagcac

SEQ ID NO: 109479 - RNA, 22 nt, Human
ugaacccuuguagaggauggag

SEQ ID NO: 109480 - RNA, 22 nt, Human
ugaaccuuguuccugcccuccu

SEQ ID NO: 109481 - RNA, 22 nt, Human
ugaacgcagguccacauggcuc

SEQ ID NO: 109482 - RNA, 22 nt, Human
ugaacucuccaggcaaaugauc

SEQ ID NO: 109483 - RNA, 22 nt, Human
ugaacucucucaagugacagaa

SEQ ID NO: 109484 - RNA, 18 nt, Human
ugaacuggcaucagaauc

SEQ ID NO: 109485 - RNA, 22 nt, Human
ugaacuucagugauuugcugca

SEQ ID NO: 109486 - RNA, 22 nt, Human
ugaacuugaauuuuggaaauac

SEQ ID NO: 109487 - RNA, 17 nt, Human
ugaacuuuagguggagc

SEQ ID NO: 109488 - RNA, 22 nt, Human
ugaacuuuguaguaauggagau

SEQ ID NO: 109489 - RNA, 22 nt, Human
ugaacuuuuauuugaugacagg

SEQ ID NO: 109490 - RNA, 22 nt, Human
ugaacuuuugcacagaggauuu

SEQ ID NO: 109491 - RNA, 22 nt, Human
ugaagaaaauaugauuacccca

SEQ ID NO: 109492 - RNA, 22 nt, Human
ugaagaaacagaccaagaggau

SEQ ID NO: 109493 - RNA, 22 nt, Human
ugaagaacgugagauccagaaa

SEQ ID NO: 109494 - RNA, 22 nt, Human
ugaagaaucagauuggccugcg

SEQ ID NO: 109495 - RNA, 15 nt, Human
ugaagacauaaggug

SEQ ID NO: 109496 - RNA, 22 nt, Human
ugaagaggccgugugcagguga

SEQ ID NO: 109497 - RNA, 22 nt, Human
ugaagauccuaucugcaaauau

SEQ ID NO: 109498 - RNA, 22 nt, Human
ugaagauuuagaccucuuugcc

SEQ ID NO: 109499 - RNA, 22 nt, Human
ugaagcaacuggacaaguuggc

SEQ ID NO: 109500 - RNA, 19 nt, Human
ugaagcaauaccauuuuug

SEQ ID NO: 109501 - RNA, 22 nt, Human
ugaagcaaugauagcagaauga

SEQ ID NO: 109502 - RNA, 22 nt, Human
ugaagcacaggcauacacaacc

SEQ ID NO: 109503 - RNA, 22 nt, Human
ugagaagauugggcagagugga

SEQ ID NO: 109504 - RNA, 22 nt, Human
ugagaagcaguuucaguaagaa

SEQ ID NO: 109505 - RNA, 23 nt, Human
ugagaagccaggggagcgugagg

SEQ ID NO: 109506 - RNA, 23 nt, Human
ugagaagccgccgggcagccugg

SEQ ID NO: 109507 - RNA, 20 nt, Human
ugagaaggggucagcuguac

SEQ ID NO: 109508 - RNA, 22 nt, Human
ugagaaggguuggagaaauaau

SEQ ID NO: 109509 - RNA, 22 nt, Human
ugagaaguacuacaagagaggg

SEQ ID NO: 109510 - RNA, 22 nt, Human
ugagaauaggcauagaaccugg

SEQ ID NO: 109511 - RNA, 22 nt, Human
ugagaauauuguuuuagugagg

SEQ ID NO: 109512 - RNA, 22 nt, Human
ugagaaugugcaauauccuucc

SEQ ID NO: 109513 - RNA, 22 nt, Human
ugagaauuugugaacuuuucuc

SEQ ID NO: 109514 - RNA, 22 nt, Human
ugagacaauauccuuuguaacc

SEQ ID NO: 109515 - RNA, 19 nt, Human
ugagacagaagaugagccu

SEQ ID NO: 109516 - RNA, 19 nt, Human
ugagacagagaccaguucu

SEQ ID NO: 109517 - RNA, 22 nt, Human
ugagacagcagauuagcaauga

SEQ ID NO: 109518 - RNA, 22 nt, Human
ugagacagcagucagggaaaua

SEQ ID NO: 109519 - RNA, 17 nt, Human
ugagacagggcaggccc

SEQ ID NO: 109520 - RNA, 22 nt, Human
ugagacagggucuugcucuguu

SEQ ID NO: 109521 - RNA, 22 nt, Human
ugagacaguucugcagcugggu

SEQ ID NO: 109522 - RNA, 22 nt, Human
ugagacaguuggugaaaucuaa

SEQ ID NO: 109523 - RNA, 22 nt, Human
ugagacaguuuuucuauuucca

SEQ ID NO: 109524 - RNA, 22 nt, Human
ugagaccauuugacauacagug

SEQ ID NO: 109525 - RNA, 20 nt, Human
ugagacccgcugacaaguuc

SEQ ID NO: 109526 - RNA, 23 nt, Human
ugagacccuaauuuagcaagugu

SEQ ID NO: 109527 - RNA, 22 nt, Human
ugagacuugugaguccuucuag

SEQ ID NO: 109528 - RNA, 22 nt, Human
ugagagaaacguuccuuacauc

SEQ ID NO: 109529 - RNA, 18 nt, Human
ugagagaauguucaugcu

SEQ ID NO: 109530 - RNA, 22 nt, Human
ugagagagccugaaucucuuac

SEQ ID NO: 109531 - RNA, 22 nt, Human
ugagagagcgccugggaucauu

SEQ ID NO: 109532 - RNA, 22 nt, Human
ugagagaggaugcccucauauu

SEQ ID NO: 109533 - RNA, 21 nt, Human
ugagagaguagcaggacauau

SEQ ID NO: 109534 - RNA, 22 nt, Human
ugagagccagaagggccugagg

SEQ ID NO: 109535 - RNA, 20 nt, Human
ugagagcugggcagggauac

SEQ ID NO: 109536 - RNA, 22 nt, Human
ugagaggagugauuguaaaauu

SEQ ID NO: 109537 - RNA, 22 nt, Human
ugagaggcgcucacucucaggu

SEQ ID NO: 109538 - RNA, 22 nt, Human
ugagaggcuagaucagcucugu

SEQ ID NO: 109539 - RNA, 18 nt, Human
ugagaggcuauuuuuugc

SEQ ID NO: 109540 - RNA, 22 nt, Human
ugagaggucaaagggcauggag

SEQ ID NO: 109541 - RNA, 22 nt, Human
ugagagucucagaccuccuggu

SEQ ID NO: 109542 - RNA, 22 nt, Human
ugagagugaaaugucacauguc

SEQ ID NO: 109543 - RNA, 22 nt, Human
ugagagugccuuguaaaccugc

SEQ ID NO: 109544 - RNA, 22 nt, Human
ugagaguucucucuucaggugg

SEQ ID NO: 109545 - RNA, 22 nt, Human
ugagauaauaaacaucuccuua

SEQ ID NO: 109546 - RNA, 22 nt, Human
ugagauaaucaugugauuucau

SEQ ID NO: 109547 - RNA, 22 nt, Human
ugagauaguauauggaaagagu

SEQ ID NO: 109548 - RNA, 22 nt, Human
ugagaugaauaacuccugcuaa

SEQ ID NO: 109549 - RNA, 22 nt, Human
ugagaugaugggauaagagggc

SEQ ID NO: 109550 - RNA, 22 nt, Human
ugagaugcugcuguaacaaaua

SEQ ID NO: 109551 - RNA, 22 nt, Human
ugagauggagucuugcucuguu

SEQ ID NO: 109552 - RNA, 22 nt, Human
ugagauggcaacaccagcuuug

SEQ ID NO: 109553 - RNA, 22 nt, Human
ugagauggggucaugcuuuguc

SEQ ID NO: 109554 - RNA, 22 nt, Human
ugagauggguguccagggagga

SEQ ID NO: 109555 - RNA, 22 nt, Human
ugagauggugaagaagacagca

SEQ ID NO: 109556 - RNA, 22 nt, Human
ugagauguaagguaugcuuacu

SEQ ID NO: 109557 - RNA, 22 nt, Human
ugagaugucauaguucaguuca

SEQ ID NO: 109558 - RNA, 22 nt, Human
ugagauucagggaugcagagca

SEQ ID NO: 109559 - RNA, 22 nt, Human
ugagauucccugaaugauauau

SEQ ID NO: 109560 - RNA, 22 nt, Human
ugagauugugugcuucagaaau

SEQ ID NO: 109561 - RNA, 22 nt, Human
ugagauuucaggccaaggagug

SEQ ID NO: 109562 - RNA, 22 nt, Human
ugagauuuguuuuauaaaauag

SEQ ID NO: 109563 - RNA, 22 nt, Human
ugagauuuuccuaaauauaaug

SEQ ID NO: 109564 - RNA, 21 nt, Human
ugagcaaaauuuagagugaug

SEQ ID NO: 109565 - RNA, 22 nt, Human
ugagcaacugugcucugcuaaa

SEQ ID NO: 109566 - RNA, 22 nt, Human
ugagcaagacccggccucugcc

SEQ ID NO: 109567 - RNA, 22 nt, Human
ugagcaagagaaacugacugua

SEQ ID NO: 109568 - RNA, 22 nt, Human
ugagcacacuccuggugagcga

SEQ ID NO: 109569 - RNA, 22 nt, Human
ugagcacauuucacaugacagg

SEQ ID NO: 109570 - RNA, 21 nt, Human
ugagcaccagcugcaugcccc

SEQ ID NO: 109571 - RNA, 22 nt, Human
ugagcaccuaccuuguccagug

SEQ ID NO: 109572 - RNA, 22 nt, Human
ugagcagaacacgggauccaug

SEQ ID NO: 109573 - RNA, 22 nt, Human
ugagcagaauguucagauaaau

SEQ ID NO: 109574 - RNA, 22 nt, Human
uugcauccgaaacaauuucucu

SEQ ID NO: 109575 - RNA, 22 nt, Human
uugcaucuaccauaucaaagau

SEQ ID NO: 109576 - RNA, 22 nt, Human
uugcauguguaagguuguuuau

SEQ ID NO: 109577 - RNA, 22 nt, Human
uugcauuacauuugcucagucu

SEQ ID NO: 109578 - RNA, 22 nt, Human
uugcauugaaaauauauuuuaa

SEQ ID NO: 109579 - RNA, 22 nt, Human
uugcauugaugucuauacgcug

SEQ ID NO: 109580 - RNA, 22 nt, Human
uugcauugcuuggucuucaaga

SEQ ID NO: 109581 - RNA, 22 nt, Human
uugcauugggagugaggagacc

SEQ ID NO: 109582 - RNA, 22 nt, Human
uugcauuguaggauguuagaag

SEQ ID NO: 109583 - RNA, 19 nt, Human
uugcauuucauguuugauu

SEQ ID NO: 109584 - RNA, 22 nt, Human
uugcauuugaucuuggguucuc

SEQ ID NO: 109585 - RNA, 22 nt, Human
uugcauuuuuagaugcuucugu

SEQ ID NO: 109586 - RNA, 22 nt, Human
uugccacacaaguaaagaaaca

SEQ ID NO: 109587 - RNA, 22 nt, Human
uugccacaguagcaaaagguuc

SEQ ID NO: 109588 - RNA, 22 nt, Human
uugccacuaacuagcugugaga

SEQ ID NO: 109589 - RNA, 22 nt, Human
uugccaggagacaaagugggcc

SEQ ID NO: 109590 - RNA, 22 nt, Human
uugccaggagacaucuggagcc

SEQ ID NO: 109591 - RNA, 22 nt, Human
uugccauuaucauuuaugauac

SEQ ID NO: 109592 - RNA, 22 nt, Human
uugccauugcucagugaacaga

SEQ ID NO: 109593 - RNA, 22 nt, Human
uugccauuuauacugcaaguca

SEQ ID NO: 109594 - RNA, 22 nt, Human
uugcccaccauccaauaaaaug

SEQ ID NO: 109595 - RNA, 22 nt, Human
uugcccacucaugcuuuugaua

SEQ ID NO: 109596 - RNA, 22 nt, Human
uugcccacuggcuguuggucag

SEQ ID NO: 109597 - RNA, 22 nt, Human
uugccccuggucagaggaggcu

SEQ ID NO: 109598 - RNA, 22 nt, Human
uugcccuagggucuuauccucc

SEQ ID NO: 109599 - RNA, 16 nt, Human
uugcccugaggggagg

SEQ ID NO: 109600 - RNA, 22 nt, Human
uugcccugccucccugagguga

SEQ ID NO: 109601 - RNA, 22 nt, Human
uugcccuggggcuggccuggca

SEQ ID NO: 109602 - RNA, 22 nt, Human
uugcccugucuuaagcuggcaa

SEQ ID NO: 109603 - RNA, 22 nt, Human
uugccuauguaacuuuauauuu

SEQ ID NO: 109604 - RNA, 22 nt, Human
uugcuaaaaggugaaaagugua

SEQ ID NO: 109605 - RNA, 22 nt, Human
uugcuaacgcucacccuuugcc

SEQ ID NO: 109606 - RNA, 22 nt, Human
uugcuacuguucuuugcuagag

SEQ ID NO: 109607 - RNA, 22 nt, Human
uugcucauacucauguugugau

SEQ ID NO: 109608 - RNA, 22 nt, Human
uugcucuaucacagugauggga

SEQ ID NO: 109609 - RNA, 22 nt, Human
uugcucuccagaggcucacagc

SEQ ID NO: 109610 - RNA, 22 nt, Human
uugcucugaacccagggcacca

SEQ ID NO: 109611 - RNA, 22 nt, Human
uugcugaaaguggcaagaagua

SEQ ID NO: 109612 - RNA, 22 nt, Human
uuggcagugacugcgggccccg

SEQ ID NO: 109613 - RNA, 22 nt, Human
uuggcagugucacuagggagcc

SEQ ID NO: 109614 - RNA, 20 nt, Human
uuggcaguuaagaaucuuac

SEQ ID NO: 109615 - RNA, 22 nt, Human
uuggcauucaugggacaacaaa

SEQ ID NO: 109616 - RNA, 22 nt, Human
uuggcauugaaguuucauuggu

SEQ ID NO: 109617 - RNA, 20 nt, Human
uuggcauuuagacaagaguu

SEQ ID NO: 109618 - RNA, 22 nt, Human
uuggcauuuauucuaaggucaa

SEQ ID NO: 109619 - RNA, 22 nt, Human
uuggcauuuuuccucagcugga

SEQ ID NO: 109620 - RNA, 22 nt, Human
uuggccaaaggaaagacuacug

SEQ ID NO: 109621 - RNA, 22 nt, Human
uuggccaaauaaucuugcagau

SEQ ID NO: 109622 - RNA, 20 nt, Human
uuggccaaaucuuagucaug

SEQ ID NO: 109623 - RNA, 22 nt, Human
uuggccaacagcgacagggcca

SEQ ID NO: 109624 - RNA, 22 nt, Human
uuggccaagacucauguccuau

SEQ ID NO: 109625 - RNA, 22 nt, Human
uuggccaagauacgagcacaua

SEQ ID NO: 109626 - RNA, 22 nt, Human
uuggccaaggaccuuuuuggag

SEQ ID NO: 109627 - RNA, 22 nt, Human
uuggccaagugguuaaucucca

SEQ ID NO: 109628 - RNA, 22 nt, Human
uuggccaauuuagaacguguug

SEQ ID NO: 109629 - RNA, 22 nt, Human
uuggccacacucacuagagccc

SEQ ID NO: 109630 - RNA, 22 nt, Human
uuggccagaaucuuccuaguga

SEQ ID NO: 109631 - RNA, 22 nt, Human
uuggccagacugaggugcuggg

SEQ ID NO: 109632 - RNA, 22 nt, Human
uuggcccugaggaggcagcugc

SEQ ID NO: 109633 - RNA, 22 nt, Human
uuggcccugagguuaucaucua

SEQ ID NO: 109634 - RNA, 21 nt, Human
uuggccgugcagaugaacagc

SEQ ID NO: 109635 - RNA, 22 nt, Human
uuggccuccacauuuuccaggu

SEQ ID NO: 109636 - RNA, 21 nt, Human
uuggccugauaucuuggagca

SEQ ID NO: 109637 - RNA, 22 nt, Human
uuggccuucucauuugcuuauu

SEQ ID NO: 109638 - RNA, 22 nt, Human
uuggccuucugguguucauuuu

SEQ ID NO: 109639 - RNA, 22 nt, Human
uuggccuugucuggucuucucc

SEQ ID NO: 109640 - RNA, 22 nt, Human
uuggccuuuauucuguacuucu

SEQ ID NO: 109641 - RNA, 22 nt, Human
uuggccuuugucaucaagauca

SEQ ID NO: 109642 - RNA, 22 nt, Human
uuggcuaacacgcguuuuguuc

SEQ ID NO: 109643 - RNA, 22 nt, Human
uuggcuacaucgaggcuccagc

SEQ ID NO: 109644 - RNA, 22 nt, Human
uuggcucaccuggagccuguug

SEQ ID NO: 109645 - RNA, 22 nt, Human
uuggcucaccugucuacccaga

SEQ ID NO: 109646 - RNA, 20 nt, Human
uuggcucaugcaacaccuac

SEQ ID NO: 109647 - RNA, 22 nt, Human
uuggcucauuaaagaugauaau

SEQ ID NO: 109648 - RNA, 22 nt, Human
uuggcucugauggggaucagga

SEQ ID NO: 109649 - RNA, 22 nt, Human
uuggcugaagacuagauguuua

SEQ ID NO: 109650 - RNA, 22 nt, Human
uuggcugcaaucacagggacuc

SEQ ID NO: 109651 - RNA, 22 nt, Human
uuggcugccgagcgcaucccgg

SEQ ID NO: 109652 - RNA, 22 nt, Human
uuggcugccuguggaucgcauu

SEQ ID NO: 109653 - RNA, 22 nt, Human
uuggcugcucuguguuuaguau

SEQ ID NO: 109654 - RNA, 22 nt, Human
uuggcugcugaaauauguucug

SEQ ID NO: 109655 - RNA, 22 nt, Human
uuggcugcugggaacucaaaca

SEQ ID NO: 109656 - RNA, 22 nt, Human
uuggcuguuuuaucuccuggug

SEQ ID NO: 109657 - RNA, 22 nt, Human
uuggcuucaaugucagagacag

SEQ ID NO: 109658 - RNA, 22 nt, Human
uuggcuucauugaucucacuuu

SEQ ID NO: 109659 - RNA, 22 nt, Human
uuggcuuccugcacuugaguuu

SEQ ID NO: 109660 - RNA, 22 nt, Human
uuggcuucugauguauuccuga

SEQ ID NO: 109661 - RNA, 22 nt, Human
uuggcuuguuaaaaaugcaauu

SEQ ID NO: 109662 - RNA, 22 nt, Human
uuggcuuuagaccugagacugu

SEQ ID NO: 109663 - RNA, 22 nt, Human
uugggaaagaaugagaagguga

SEQ ID NO: 109664 - RNA, 22 nt, Human
uugggaaauuacucugcuagga

SEQ ID NO: 109665 - RNA, 22 nt, Human
uugggaaggcguggaagcagaa

SEQ ID NO: 109666 - RNA, 22 nt, Human
uugggaaguaauaugguggucu

SEQ ID NO: 109667 - RNA, 22 nt, Human
uugggacagcaacgguucuguu

SEQ ID NO: 109668 - RNA, 22 nt, Human
uugggagcauuuagaaaagacg

SEQ ID NO: 109669 - RNA, 22 nt, Human
uugggagcuggaagcaaggccu

SEQ ID NO: 109670 - RNA, 22 nt, Human
uugggagcuuggccgagaugua

SEQ ID NO: 109671 - RNA, 22 nt, Human
uugggaguaauaaaaaauucca

SEQ ID NO: 109672 - RNA, 22 nt, Human
uugggaucucaaauccagcuau

SEQ ID NO: 109673 - RNA, 22 nt, Human
uugggauuacagguguaagcca

SEQ ID NO: 109674 - RNA, 22 nt, Human
uugggcacggacagguggggau

SEQ ID NO: 109675 - RNA, 22 nt, Human
uugggcaggaacagaugcuuga

SEQ ID NO: 109676 - RNA, 22 nt, Human
uugggcagggaaaggacaggca

SEQ ID NO: 109677 - RNA, 22 nt, Human
uugggcagguguggcucuccuu

SEQ ID NO: 109678 - RNA, 22 nt, Human
uugggcagucuggcugcagagu

SEQ ID NO: 109679 - RNA, 22 nt, Human
uugggccaagugauucucugcc

SEQ ID NO: 109680 - RNA, 22 nt, Human
uugggccucacucuagaaggca

SEQ ID NO: 109681 - RNA, 22 nt, Human
uugggccugggguagugucgga

SEQ ID NO: 109682 - RNA, 20 nt, Human
uugggccugucagcacuccc

SEQ ID NO: 109683 - RNA, 22 nt, Human
uugggcugaucuguggaagaag

SEQ ID NO: 109684 - RNA, 22 nt, Human
uugggcuggcagagguggucuu

SEQ ID NO: 109685 - RNA, 22 nt, Human
uugggcuggcccuugucucugg

SEQ ID NO: 109686 - RNA, 22 nt, Human
uugggcuuuaauuccagagagg

SEQ ID NO: 109687 - RNA, 22 nt, Human
uuggggaguuaaugccaaagau

SEQ ID NO: 109688 - RNA, 20 nt, Human
uuggggcauccaccgaaugg

SEQ ID NO: 109689 - RNA, 22 nt, Human
ugcacacacaugaaguagcaug

SEQ ID NO: 109690 - RNA, 20 nt, Human
ugcacacacccuguccucca

SEQ ID NO: 109691 - RNA, 22 nt, Human
ugcacacacucugcauauacuu

SEQ ID NO: 109692 - RNA, 22 nt, Human
ugcacacagcugggccuggcug

SEQ ID NO: 109693 - RNA, 22 nt, Human
ugcacacaggucuaggacaugg

SEQ ID NO: 109694 - RNA, 22 nt, Human
ugcacacauacaugggaagugc

SEQ ID NO: 109695 - RNA, 22 nt, Human
ugcacacauucuauggggcuga

SEQ ID NO: 109696 - RNA, 22 nt, Human
ugcacaccucuccaccacucuc

SEQ ID NO: 109697 - RNA, 22 nt, Human
ugcacagaauaauauauguucu

SEQ ID NO: 109698 - RNA, 22 nt, Human
ugcacagaaucauuuucagcug

SEQ ID NO: 109699 - RNA, 22 nt, Human
ugcacagagagaugagacacgu

SEQ ID NO: 109700 - RNA, 21 nt, Human
ugcacagccauacccuccuug

SEQ ID NO: 109701 - RNA, 20 nt, Human
ugcacagggugggaagcaac

SEQ ID NO: 109702 - RNA, 22 nt, Human
ugcacagguaugcaaagcaugu

SEQ ID NO: 109703 - RNA, 22 nt, Human
ugcacaguguaaugaaucagaa

SEQ ID NO: 109704 - RNA, 22 nt, Human
ugcacaguuggcuacaucgugg

SEQ ID NO: 109705 - RNA, 22 nt, Human
ugcacauggcaaugcugcuccc

SEQ ID NO: 109706 - RNA, 22 nt, Human
ugcaccagagcagggugcccaa

SEQ ID NO: 109707 - RNA, 22 nt, Human
ugcaccauguaaguggccacgu

SEQ ID NO: 109708 - RNA, 22 nt, Human
ugcaccccauuuuacauuuaca

SEQ ID NO: 109709 - RNA, 22 nt, Human
ugcacccugccugccugcgggu

SEQ ID NO: 109710 - RNA, 21 nt, Human
ugcaccugugccccauccuuc

SEQ ID NO: 109711 - RNA, 22 nt, Human
ugcaccuuuaaauucagcagua

SEQ ID NO: 109712 - RNA, 22 nt, Human
ugcacgaaaucuuucuagucuu

SEQ ID NO: 109713 - RNA, 22 nt, Human
ugcacuagccacauuucaaaug

SEQ ID NO: 109714 - RNA, 22 nt, Human
ugcacuccaggcugggugacag

SEQ ID NO: 109715 - RNA, 22 nt, Human
ugcacugauccugaccagugaa

SEQ ID NO: 109716 - RNA, 19 nt, Human
ugcacuugagauguuugua

SEQ ID NO: 109717 - RNA, 22 nt, Human
ugcacuuguguuuucagaaucu

SEQ ID NO: 109718 - RNA, 22 nt, Human
ugcacuuuaaaaaauggugaug

SEQ ID NO: 109719 - RNA, 22 nt, Human
ugcagaaacagaguuuugccau

SEQ ID NO: 109720 - RNA, 22 nt, Human
ugcagaaacagucauuaaugua

SEQ ID NO: 109721 - RNA, 22 nt, Human
uggcuccuaucaaggagugggu

SEQ ID NO: 109722 - RNA, 22 nt, Human
uggcuccucaucacaguuggug

SEQ ID NO: 109723 - RNA, 22 nt, Human
uggcuccucuucuggguguccc

SEQ ID NO: 109724 - RNA, 22 nt, Human
uggcuccugcagaccaucugga

SEQ ID NO: 109725 - RNA, 20 nt, Human
uggcuccugcgguggaacca

SEQ ID NO: 109726 - RNA, 20 nt, Human
uggcucucacccugugcgau

SEQ ID NO: 109727 - RNA, 23 nt, Human
uggcucucucagugcugcagagg

SEQ ID NO: 109728 - RNA, 22 nt, Human
uggcucucuuguaagguaguag

SEQ ID NO: 109729 - RNA, 21 nt, Human
uggcucugaaagagugcugca

SEQ ID NO: 109730 - RNA, 22 nt, Human
ugcuggaggggaugccuucacu

SEQ ID NO: 109731 - RNA, 19 nt, Human
ugcuggagugacauucuga

SEQ ID NO: 109732 - RNA, 22 nt, Human
ugcuggagugagauuaugaguu

SEQ ID NO: 109733 - RNA, 22 nt, Human
ugcuggaguggcacuguguggc

SEQ ID NO: 109734 - RNA, 22 nt, Human
ugcuggaguucgacauugcaaa

SEQ ID NO: 109735 - RNA, 17 nt, Human
ugcuggcaacauacaaa

SEQ ID NO: 109736 - RNA, 20 nt, Human
ugcuggcacggguggacucc

SEQ ID NO: 109737 - RNA, 22 nt, Human
ugcuggcauaccaccuaguuca

SEQ ID NO: 109738 - RNA, 22 nt, Human
ugcuggcauggucuuggugaca

SEQ ID NO: 109739 - RNA, 22 nt, Human
ugcuggcauuucaggacucacc

SEQ ID NO: 109740 - RNA, 21 nt, Human
ugcuggccaugugcugggcau

SEQ ID NO: 109741 - RNA, 22 nt, Human
ugcuggcccaguacuaaugucu

SEQ ID NO: 109742 - RNA, 22 nt, Human
ugcuggcccaguauggacugca

SEQ ID NO: 109743 - RNA, 22 nt, Human
ugcuggcccuggcucagggaac

SEQ ID NO: 109744 - RNA, 22 nt, Human
ugcuggccgugagcucucggga

SEQ ID NO: 109745 - RNA, 22 nt, Human
ugcuggccucggcgcugggccu

SEQ ID NO: 109746 - RNA, 22 nt, Human
ugcuggccugggcugcaccuug

SEQ ID NO: 109747 - RNA, 22 nt, Human
ugcuggcuccucgaggcuucgu

SEQ ID NO: 109748 - RNA, 23 nt, Human
ugcuggcugaaacagccaaagga

SEQ ID NO: 109749 - RNA, 22 nt, Human
ugcuggcugccagguucccugu

SEQ ID NO: 109750 - RNA, 22 nt, Human
ugcuggcugucccuaccuggcu

SEQ ID NO: 109751 - RNA, 22 nt, Human
ugcuggcuuagauaucacugcc

SEQ ID NO: 109752 - RNA, 22 nt, Human
ugcuggcuuggaaggaaagcgc

SEQ ID NO: 109753 - RNA, 22 nt, Human
ugcuggcuuucugucccuggca

SEQ ID NO: 109754 - RNA, 22 nt, Human
ugcuggcuuugcgagaugcauu

SEQ ID NO: 109755 - RNA, 22 nt, Human
ugcugggcauuuaugcagaugg

SEQ ID NO: 109756 - RNA, 22 nt, Human
ugcugggcauuuuuauggcucc

SEQ ID NO: 109757 - RNA, 22 nt, Human
ugcugggccugccccugucagc

SEQ ID NO: 109758 - RNA, 22 nt, Human
ugcugggcuaggguggagcucu

SEQ ID NO: 109759 - RNA, 22 nt, Human
ugcugggcuggagcugccaggg

SEQ ID NO: 109760 - RNA, 22 nt, Human
ugcugggcuggggccucagacc

SEQ ID NO: 109761 - RNA, 22 nt, Human
ugcugggcuguuccuguccaug

SEQ ID NO: 109762 - RNA, 22 nt, Human
ugcugggcuucaacugccugag

SEQ ID NO: 109763 - RNA, 22 nt, Human
ugcuggggagugauugaccauc

SEQ ID NO: 109764 - RNA, 22 nt, Human
ugcuggggcucugaccacucca

SEQ ID NO: 109765 - RNA, 22 nt, Human
ugcugggggugucucaccaggc

SEQ ID NO: 109766 - RNA, 22 nt, Human
ugcuggggguucagaugaguaa

SEQ ID NO: 109767 - RNA, 23 nt, Human
ugcuggguaaauagcugaguaac

SEQ ID NO: 109768 - RNA, 22 nt, Human
ugcuggguggacuuggcucuca

SEQ ID NO: 109769 - RNA, 20 nt, Human
ugcugggugggcagcuguaa

SEQ ID NO: 109770 - RNA, 22 nt, Human
ugcuggguuaccuaagccuaaa

SEQ ID NO: 109771 - RNA, 21 nt, Human
ugcuggguuugcccaucaggc

SEQ ID NO: 109772 - RNA, 22 nt, Human
ugcuggugauuaaauccugaag

SEQ ID NO: 109773 - RNA, 23 nt, Human
ugcugguguuuuugggaccaggg

SEQ ID NO: 109774 - RNA, 22 nt, Human
ugcugguucuuaggagagagau

SEQ ID NO: 109775 - RNA, 22 nt, Human
ugcuguagcccugcacagugca

SEQ ID NO: 109776 - RNA, 22 nt, Human
ugcuguauuacuuuuacaaacu

SEQ ID NO: 109777 - RNA, 23 nt, Human
ugcuguccaacagacuggccaug

SEQ ID NO: 109778 - RNA, 22 nt, Human
ugcugucccccgugucugggcu

SEQ ID NO: 109779 - RNA, 21 nt, Human
ugcuguccuagaaccagggcc

SEQ ID NO: 109780 - RNA, 19 nt, Human
ugcuguccucagaguaagu

SEQ ID NO: 109781 - RNA, 22 nt, Human
ugcuguccuguuuuggaguaau

SEQ ID NO: 109782 - RNA, 22 nt, Human
ugcugucuuuucccaauccugg

SEQ ID NO: 109783 - RNA, 22 nt, Human
ugcuguggcaguuuauguauag

SEQ ID NO: 109784 - RNA, 22 nt, Human
ugcugugguucccagaguggau

SEQ ID NO: 109785 - RNA, 22 nt, Human
ugcuguguggaugugaagaauc

SEQ ID NO: 109786 - RNA, 22 nt, Human
ugcuguguucuccugacucacc

SEQ ID NO: 109787 - RNA, 22 nt, Human
ugcuuaaaggauaguuuaaacu

SEQ ID NO: 109788 - RNA, 22 nt, Human
ugcuuaaaguguuaacccuguu

SEQ ID NO: 109789 - RNA, 22 nt, Human
ugcuuaauauugugauguaaua

SEQ ID NO: 109790 - RNA, 23 nt, Human
ugcuuaauuccucugcuucaccu

SEQ ID NO: 109791 - RNA, 18 nt, Human
ugcuuacaggaguuccug

SEQ ID NO: 109792 - RNA, 21 nt, Human
ugcuuaccgccccagggcucc

SEQ ID NO: 109793 - RNA, 22 nt, Human
ugcuuaccucuggcuguuuucc

SEQ ID NO: 109794 - RNA, 22 nt, Human
ugcuuauucuuuccacaauuca

SEQ ID NO: 109795 - RNA, 22 nt, Human
ugcuuauuugaauuuauucuca

SEQ ID NO: 109796 - RNA, 22 nt, Human
ugcuucagagaagaauggaaag

SEQ ID NO: 109797 - RNA, 22 nt, Human
ugcuucagagacauccuacuca

SEQ ID NO: 109798 - RNA, 22 nt, Human
ugcuucagcacuuugagagccu

SEQ ID NO: 109799 - RNA, 22 nt, Human
ugcuucagcagggaucgggggg

SEQ ID NO: 109800 - RNA, 22 nt, Human
ugcuucaugagguaguggcagu

SEQ ID NO: 109801 - RNA, 22 nt, Human
ugcuucaugcuucugacaauag

SEQ ID NO: 109802 - RNA, 19 nt, Human
ugcuucauuucuuuuaugu

SEQ ID NO: 109803 - RNA, 22 nt, Human
ugcuuccaggaauccaucuggc

SEQ ID NO: 109804 - RNA, 22 nt, Human
ugcuucccaagguuucaugugc

SEQ ID NO: 109805 - RNA, 22 nt, Human
ugcuuccugaggccgucuucuc

SEQ ID NO: 109806 - RNA, 22 nt, Human
ugcuucuaaucuacugcauuag

SEQ ID NO: 109807 - RNA, 21 nt, Human
ugcuucucuagaucaacuacu

SEQ ID NO: 109808 - RNA, 23 nt, Human
ugcuucucugcuugacaguucug

SEQ ID NO: 109809 - RNA, 22 nt, Human
ugcuucucuuuauuuguagguu

SEQ ID NO: 109810 - RNA, 22 nt, Human
ugcuucugaaguggaugggugc

SEQ ID NO: 109811 - RNA, 22 nt, Human
ugcuucugaguugcaggacuug

SEQ ID NO: 109812 - RNA, 22 nt, Human
ugcuucugauucaugguuauug

SEQ ID NO: 109813 - RNA, 22 nt, Human
ugcuucugcaggagcuccugau

SEQ ID NO: 109814 - RNA, 22 nt, Human
ugcuucugcucagcuuccuacu

SEQ ID NO: 109815 - RNA, 22 nt, Human
ugcuucugcuuuacuugguuca

SEQ ID NO: 109816 - RNA, 22 nt, Human
ugcuucuggcacuugagggggu

SEQ ID NO: 109817 - RNA, 22 nt, Human
ugcuucugggccugguguuccc

SEQ ID NO: 109818 - RNA, 22 nt, Human
ugcuucugggucccagccuggc

SEQ ID NO: 109819 - RNA, 22 nt, Human
ugcuucuguauuuugggcuuga

SEQ ID NO: 109820 - RNA, 22 nt, Human
ugcuucuguucuuucaccuacg

SEQ ID NO: 109821 - RNA, 22 nt, Human
ugcuucuguuucauugaucuua

SEQ ID NO: 109822 - RNA, 22 nt, Human
ugcuucuuuaaaugauagucaa

SEQ ID NO: 109823 - RNA, 22 nt, Human
ugcuugaaagggguuucccagu

SEQ ID NO: 109824 - RNA, 22 nt, Human
ugcuugaacaaggauaaauuug

SEQ ID NO: 109825 - RNA, 22 nt, Human
ugcuugaggggaauaaaaagaa

SEQ ID NO: 109826 - RNA, 22 nt, Human
ugcuugauuagggaagucacau

SEQ ID NO: 109827 - RNA, 22 nt, Human
ugcuugcaagagaugcaaugac

SEQ ID NO: 109828 - RNA, 22 nt, Human
ugcuugcauccaacauuaaggg

SEQ ID NO: 109829 - RNA, 22 nt, Human
ugcuugcugggccaauggcaau

SEQ ID NO: 109830 - RNA, 19 nt, Human
ugcuccauugaggugucuc

SEQ ID NO: 109831 - RNA, 22 nt, Human
ugcucccaggacucuugagcca

SEQ ID NO: 109832 - RNA, 22 nt, Human
ugcucccaggcucuguggucug

SEQ ID NO: 109833 - RNA, 23 nt, Human
ugcucccaggugacgcugcuguu

SEQ ID NO: 109834 - RNA, 22 nt, Human
ugcucccauguguggguacaga

SEQ ID NO: 109835 - RNA, 22 nt, Human
ugcucccugcucagagaggcca

SEQ ID NO: 109836 - RNA, 22 nt, Human
ugcucccuugccagaggggaag

SEQ ID NO: 109837 - RNA, 20 nt, Human
ugcuccuaccacuucugccc

SEQ ID NO: 109838 - RNA, 22 nt, Human
ugcuccugagcgguuuccauga

SEQ ID NO: 109839 - RNA, 22 nt, Human
ugcuccugagguuggagaucca

SEQ ID NO: 109840 - RNA, 22 nt, Human
ugcuccuggacuggugugagau

SEQ ID NO: 109841 - RNA, 22 nt, Human
ugcuccuggaugagguacucca

SEQ ID NO: 109842 - RNA, 22 nt, Human
ugcuccuggcuucagguugggc

SEQ ID NO: 109843 - RNA, 17 nt, Human
ugcuccuguggcagccu

SEQ ID NO: 109844 - RNA, 22 nt, Human
ugcucuagagcuauuggcuucc

SEQ ID NO: 109845 - RNA, 22 nt, Human
ugcucuaguggguagagcauug

SEQ ID NO: 109846 - RNA, 22 nt, Human
ugcucucucaggccuggcccac

SEQ ID NO: 109847 - RNA, 22 nt, Human
uuucugugauaggcugcgacgc

SEQ ID NO: 109848 - RNA, 22 nt, Human
uuucuguuaggcaucauuuuaa

SEQ ID NO: 109849 - RNA, 23 nt, Human
uuucuguuccucuagcuuugcau

SEQ ID NO: 109850 - RNA, 23 nt, Human
uuucuguuggguauauauccaag

SEQ ID NO: 109851 - RNA, 22 nt, Human
uuucuguuguacuuaaacuagg

SEQ ID NO: 109852 - RNA, 19 nt, Human
uuucuguuugcuucugguu

SEQ ID NO: 109853 - RNA, 22 nt, Human
uuucuuauacuauauugucauc

SEQ ID NO: 109854 - RNA, 22 nt, Human
uuucuuaugagcaagacucuau

SEQ ID NO: 109855 - RNA, 22 nt, Human
uuucuuaugugcagagugagua

SEQ ID NO: 109856 - RNA, 21 nt, Human
uuucuucacuuugccccaugu

SEQ ID NO: 109857 - RNA, 23 nt, Human
uuucuucagaagccuugcgaggc

SEQ ID NO: 109858 - RNA, 22 nt, Human
uuucuucaguaacacaaaccau

SEQ ID NO: 109859 - RNA, 22 nt, Human
uuucuucauagaccuugucuug

SEQ ID NO: 109860 - RNA, 22 nt, Human
uuucuucuaggacuaauaagag

SEQ ID NO: 109861 - RNA, 23 nt, Human
uuucuucucgaagagggagcuua

SEQ ID NO: 109862 - RNA, 22 nt, Human
uuucuucucuaaucucaaugau

SEQ ID NO: 109863 - RNA, 22 nt, Human
uuucuucuuaauacuggcugcu

SEQ ID NO: 109864 - RNA, 22 nt, Human
uuucuugaaguccuaacccuca

SEQ ID NO: 109865 - RNA, 22 nt, Human
uuucuugaccacuauguugaua

SEQ ID NO: 109866 - RNA, 22 nt, Human
uuucuugauuagcuguggcuca

SEQ ID NO: 109867 - RNA, 22 nt, Human
uuucuuggaugugaaacuaggg

SEQ ID NO: 109868 - RNA, 20 nt, Human
uuucuugucggcuguugcug

SEQ ID NO: 109869 - RNA, 22 nt, Human
uuucuuuaggcuguguugccaa

SEQ ID NO: 109870 - RNA, 22 nt, Human
uuucuuuaucauagcaucuuug

SEQ ID NO: 109871 - RNA, 18 nt, Human
uuucuuucugccuggggc

SEQ ID NO: 109872 - RNA, 22 nt, Human
uuucuuuuacaguguggcuauu

SEQ ID NO: 109873 - RNA, 22 nt, Human
uuugaaaauuuaagugcuacac

SEQ ID NO: 109874 - RNA, 22 nt, Human
uuugaaaccuaguuauaugacu

SEQ ID NO: 109875 - RNA, 22 nt, Human
uuugaaacucaugaucaucacu

SEQ ID NO: 109876 - RNA, 22 nt, Human
uuugaaagcaccauuugaguag

SEQ ID NO: 109877 - RNA, 21 nt, Human
uuugaaagcuacaucuauagc

SEQ ID NO: 109878 - RNA, 17 nt, Human
uuugaaaggaugucagu

SEQ ID NO: 109879 - RNA, 19 nt, Human
uuugaaaggauuguuauuu

SEQ ID NO: 109880 - RNA, 22 nt, Human
uuugaaagggaaauaaacuccu

SEQ ID NO: 109881 - RNA, 22 nt, Human
uuugaaagggacaaagucacug

SEQ ID NO: 109882 - RNA, 22 nt, Human
uuugaaauaugaggcauuauga

SEQ ID NO: 109883 - RNA, 22 nt, Human
uuugaaaucuaaucaaggaaca

SEQ ID NO: 109884 - RNA, 22 nt, Human
uuugaaauuaagauauugucca

SEQ ID NO: 109885 - RNA, 22 nt, Human
uuugaaauuggcucauugguuu

SEQ ID NO: 109886 - RNA, 22 nt, Human
uuugaacaggaguaucuauagu

SEQ ID NO: 109887 - RNA, 22 nt, Human
uuugaacaugcugcaugauaau

SEQ ID NO: 109888 - RNA, 23 nt, Human
uuugaacauuucuagauuacaua

SEQ ID NO: 109889 - RNA, 22 nt, Human
uuugaacugauaaucuucuguu

SEQ ID NO: 109890 - RNA, 22 nt, Human
uuugaagacagaucaauauaag

SEQ ID NO: 109891 - RNA, 22 nt, Human
uuugaagacauauuguuacaua

SEQ ID NO: 109892 - RNA, 22 nt, Human
uuugaagacuacugggagugaa

SEQ ID NO: 109893 - RNA, 22 nt, Human
uuugaagagccacagugaaauu

SEQ ID NO: 109894 - RNA, 22 nt, Human
uuugaaguaccugguucugacu

SEQ ID NO: 109895 - RNA, 22 nt, Human
uuugaagucaggcuuucuaccc

SEQ ID NO: 109896 - RNA, 22 nt, Human
uuugaaguggaaaaggauuuaa

SEQ ID NO: 109897 - RNA, 22 nt, Human
uuugaagugggcauuagaaccu

SEQ ID NO: 109898 - RNA, 21 nt, Human
uuugaauagaaauagugcuua

SEQ ID NO: 109899 - RNA, 22 nt, Human
uuugaauagaggccccucagaa

SEQ ID NO: 109900 - RNA, 22 nt, Human
uuugaauagcauaggauuacau

SEQ ID NO: 109901 - RNA, 22 nt, Human
uuugaauagggcuuugcaggga

SEQ ID NO: 109902 - RNA, 22 nt, Human
uuugaauauacuucaaacaaag

SEQ ID NO: 109903 - RNA, 22 nt, Human
uuugaauaucacaaacuuucaa

SEQ ID NO: 109904 - RNA, 22 nt, Human
uuugaaugacaugauucaggca

SEQ ID NO: 109905 - RNA, 22 nt, Human
uuugaaugagaauuauugucau

SEQ ID NO: 109906 - RNA, 22 nt, Human
uuugaaugauuaucuuucggca

SEQ ID NO: 109907 - RNA, 22 nt, Human
uuugaauguuggauugacuuag

SEQ ID NO: 109908 - RNA, 22 nt, Human
uuugacaaaggaaaaaugcaca

SEQ ID NO: 109909 - RNA, 22 nt, Human
uuugacaaauguaucugcauua

SEQ ID NO: 109910 - RNA, 22 nt, Human
uuugacaaccaggcagguaaga

SEQ ID NO: 109911 - RNA, 22 nt, Human
uuugacaagagggcaucuucag

SEQ ID NO: 109912 - RNA, 20 nt, Human
uuugacaccuugggagagac

SEQ ID NO: 109913 - RNA, 22 nt, Human
uuugacagcauaauccuacacc

SEQ ID NO: 109914 - RNA, 23 nt, Human
uuugacagcgugguuucuguggg

SEQ ID NO: 109915 - RNA, 21 nt, Human
uuugacagcucagagggcauu

SEQ ID NO: 109916 - RNA, 22 nt, Human
uuugacagcuuguuacaaaguu

SEQ ID NO: 109917 - RNA, 22 nt, Human
uuugacaggaauucucucuagg

SEQ ID NO: 109918 - RNA, 22 nt, Human
uuugacaggacuaacauauggc

SEQ ID NO: 109919 - RNA, 22 nt, Human
uuugacagugaugauauauaca

SEQ ID NO: 109920 - RNA, 22 nt, Human
uuugacaugcaaagcacuuuag

SEQ ID NO: 109921 - RNA, 22 nt, Human
uuugacauuaaggaacauauau

SEQ ID NO: 109922 - RNA, 22 nt, Human
uuugacauugaaagcagaaucg

SEQ ID NO: 109923 - RNA, 22 nt, Human
uuugacauugccaauuugcuca

SEQ ID NO: 109924 - RNA, 22 nt, Human
uuugacucaagccuuucuuuag

SEQ ID NO: 109925 - RNA, 22 nt, Human
uuugacuccugccuucuccugu

SEQ ID NO: 109926 - RNA, 22 nt, Human
uuugacuccuguguuucuggaa

SEQ ID NO: 109927 - RNA, 22 nt, Human
uuugacuccuuugugaaaagag

SEQ ID NO: 109928 - RNA, 22 nt, Human
uuugacucuuagcccaggacuc

SEQ ID NO: 109929 - RNA, 22 nt, Human
uuugacucuugcccaguuuggc

SEQ ID NO: 109930 - RNA, 22 nt, Human
uuugacucuugcuuugguggcu

SEQ ID NO: 109931 - RNA, 22 nt, Human
uuugacuucuaucuaguaagaa

SEQ ID NO: 109932 - RNA, 22 nt, Human
uuugagaaacugauuauuaugg

SEQ ID NO: 109933 - RNA, 22 nt, Human
uuugagaagauguaauguuaag

SEQ ID NO: 109934 - RNA, 19 nt, Human
uuugagaaguuauuaucua

SEQ ID NO: 109935 - RNA, 22 nt, Human
uuugagcagagaaaggacauga

SEQ ID NO: 109936 - RNA, 22 nt, Human
uuugaggacauuuuagaaaguu

SEQ ID NO: 109937 - RNA, 22 nt, Human
uuugagguuagcuagcagauca

SEQ ID NO: 109938 - RNA, 22 nt, Human
uuugagucugcuuccauuuuca

SEQ ID NO: 109939 - RNA, 20 nt, Human
cagguccagcacgugcacgg

SEQ ID NO: 109940 - RNA, 22 nt, Human
cagguccagucacuggucugca

SEQ ID NO: 109941 - RNA, 22 nt, Human
cagguccugcagggagaguaaa

SEQ ID NO: 109942 - RNA, 22 nt, Human
cagguccuggcagcugacucag

SEQ ID NO: 109943 - RNA, 22 nt, Human
caggucugagucacauguucau

SEQ ID NO: 109944 - RNA, 22 nt, Human
caggucugcagacagggccaug

SEQ ID NO: 109945 - RNA, 22 nt, Human
caggucuggugagagaacaguu

SEQ ID NO: 109946 - RNA, 22 nt, Human
caggugaagaggauaaaaaguu

SEQ ID NO: 109947 - RNA, 22 nt, Human
caggugaccuuuguccuaaguu

SEQ ID NO: 109948 - RNA, 22 nt, Human
caggugaguuuuccuccuuggu

SEQ ID NO: 109949 - RNA, 22 nt, Human
caggugcagggaguucaggaug

SEQ ID NO: 109950 - RNA, 22 nt, Human
caggugccauagacgggccugg

SEQ ID NO: 109951 - RNA, 22 nt, Human
caggugcccaggggacaguggc

SEQ ID NO: 109952 - RNA, 22 nt, Human
caggugccucaggaugagacaa

SEQ ID NO: 109953 - RNA, 22 nt, Human
caggugcucccagagaagugcu

SEQ ID NO: 109954 - RNA, 22 nt, Human
cagguggcagugccugcauucu

SEQ ID NO: 109955 - RNA, 22 nt, Human
cagguggcaugacugccuacaa

SEQ ID NO: 109956 - RNA, 22 nt, Human
cagguggcuuauuagggucagu

SEQ ID NO: 109957 - RNA, 22 nt, Human
caggugggaccaugauagggca

SEQ ID NO: 109958 - RNA, 22 nt, Human
caggugggagcgaggagcuacu

SEQ ID NO: 109959 - RNA, 22 nt, Human
cagguggggagaguguggagca

SEQ ID NO: 109960 - RNA, 22 nt, Human
cagguggggcgcccucaggcag

SEQ ID NO: 109961 - RNA, 22 nt, Human
cagguggucaggcagaugggcu

SEQ ID NO: 109962 - RNA, 22 nt, Human
cagguggugccuccaggcuggu

SEQ ID NO: 109963 - RNA, 22 nt, Human
cagguguauaaacucagugacu

SEQ ID NO: 109964 - RNA, 22 nt, Human
caggugucuaauucucaccccc

SEQ ID NO: 109965 - RNA, 22 nt, Human
cagguguugcaguugaagacug

SEQ ID NO: 109966 - RNA, 22 nt, Human
cagguguugggagaagagauaa

SEQ ID NO: 109967 - RNA, 22 nt, Human
cagguucuauacugaauaauuu

SEQ ID NO: 109968 - RNA, 22 nt, Human
cagguucucagaaggcagucac

SEQ ID NO: 109969 - RNA, 22 nt, Human
cagguucugaggauggugccug

SEQ ID NO: 109970 - RNA, 22 nt, Human
cagguucuggggcuccacugug

SEQ ID NO: 109971 - RNA, 22 nt, Human
cagguucuuaacuuguucuucc

SEQ ID NO: 109972 - RNA, 22 nt, Human
cagguucuugaagccuucuggc

SEQ ID NO: 109973 - RNA, 22 nt, Human
cagguuggagaucugucuaugg

SEQ ID NO: 109974 - RNA, 22 nt, Human
cagguuuacaaaguaaagugug

SEQ ID NO: 109975 - RNA, 22 nt, Human
cagguuuagguggacgugcagg

SEQ ID NO: 109976 - RNA, 22 nt, Human
cagguuuaguuccacacagcuc

SEQ ID NO: 109977 - RNA, 22 nt, Human
caguaaaaauguugucaaggca

SEQ ID NO: 109978 - RNA, 22 nt, Human
caguaaaugagaagcuaguaau

SEQ ID NO: 109979 - RNA, 22 nt, Human
caguaacaugaagagacaugga

SEQ ID NO: 109980 - RNA, 18 nt, Human
caguaacuauguuguuac

SEQ ID NO: 109981 - RNA, 22 nt, Human
caguaagaguugacaauggcca

SEQ ID NO: 109982 - RNA, 22 nt, Human
caguaauagaggcuuugagucu

SEQ ID NO: 109983 - RNA, 22 nt, Human
caguguggcugagacagaggcu

SEQ ID NO: 109984 - RNA, 22 nt, Human
caguguguggauccucccagga

SEQ ID NO: 109985 - RNA, 22 nt, Human
caguguuuagaucaagaaggcc

SEQ ID NO: 109986 - RNA, 22 nt, Human
caguguuuagcacagugcuugg

SEQ ID NO: 109987 - RNA, 22 nt, Human
caguguuugcuuaaguuauaug

SEQ ID NO: 109988 - RNA, 22 nt, Human
caguguuuguggaauucaggug

SEQ ID NO: 109989 - RNA, 22 nt, Human
caguguuuguugagaaaggcaa

SEQ ID NO: 109990 - RNA, 22 nt, Human
caguuaaauucuccaguuacca

SEQ ID NO: 109991 - RNA, 22 nt, Human
caguuacacaccauugugaaca

SEQ ID NO: 109992 - RNA, 19 nt, Human
caguuacagcagcuaagac

SEQ ID NO: 109993 - RNA, 21 nt, Human
caguuacagccaggacaaggc

SEQ ID NO: 109994 - RNA, 19 nt, Human
caguuacaggcacuguggg

SEQ ID NO: 109995 - RNA, 22 nt, Human
caguuaccagaucgcaggaggu

SEQ ID NO: 109996 - RNA, 22 nt, Human
caguuauuaugaggucauuagg

SEQ ID NO: 109997 - RNA, 22 nt, Human
caguuccuaugggcaaaacaca

SEQ ID NO: 109998 - RNA, 22 nt, Human
caguuccuugagaaugguugcu

SEQ ID NO: 109999 - RNA, 22 nt, Human
caguucugacuuucauaauguc

SEQ ID NO: 110000 - RNA, 22 nt, Human
caguucuggaggcuccacaucu

SEQ ID NO: 110001 - RNA, 22 nt, Human
caguucuuaauaccaugugguu

SEQ ID NO: 110002 - RNA, 22 nt, Human
caguucuuuguggggaguucuc

SEQ ID NO: 110003 - RNA, 22 nt, Human
caguugaucacuauaggcuuca

SEQ ID NO: 110004 - RNA, 22 nt, Human
caguugcagcugugacauugcg

SEQ ID NO: 110005 - RNA, 22 nt, Human
caguugcuggaugugcagcucu

SEQ ID NO: 110006 - RNA, 22 nt, Human
caguuguucccagcaaugaaag

SEQ ID NO: 110007 - RNA, 19 nt, Human
caguuuaacuaauuuuauc

SEQ ID NO: 110008 - RNA, 22 nt, Human
caguuuaaggcaggacauggga

SEQ ID NO: 110009 - RNA, 22 nt, Human
caguuuagcaaauuuguaucaa

SEQ ID NO: 110010 - RNA, 22 nt, Human
caguuuaguccugccaccaugg

SEQ ID NO: 110011 - RNA, 22 nt, Human
caguuuauaugucagagcugua

SEQ ID NO: 110012 - RNA, 22 nt, Human
caguuuauauucuagugcuguu

SEQ ID NO: 110013 - RNA, 20 nt, Human
caguuuaucuuuccggagcu

SEQ ID NO: 110014 - RNA, 22 nt, Human
caguuuauuguugcguucacau

SEQ ID NO: 110015 - RNA, 22 nt, Human
caguuucagaaucaaaacauca

SEQ ID NO: 110016 - RNA, 22 nt, Human
caguuucagcucaagcacucag

SEQ ID NO: 110017 - RNA, 22 nt, Human
caguuucuacgaaggucaaccc

SEQ ID NO: 110018 - RNA, 22 nt, Human
caguuucucucaauaagcaucg

SEQ ID NO: 110019 - RNA, 22 nt, Human
caguuucugggaggaaaggaag

SEQ ID NO: 110020 - RNA, 22 nt, Human
caguuucuguggucucuuuuca

SEQ ID NO: 110021 - RNA, 22 nt, Human
caguuucuuagugacacaaauc

SEQ ID NO: 110022 - RNA, 22 nt, Human
caguuucuuuccauuguuaccu

SEQ ID NO: 110023 - RNA, 22 nt, Human
caguuuguauuuauuacucaua

SEQ ID NO: 110024 - RNA, 22 nt, Human
caguuuuaaauuguuagauaau

SEQ ID NO: 110025 - RNA, 22 nt, Human
caguuuuaugaaugcuuauuag

SEQ ID NO: 110026 - RNA, 22 nt, Human
caguuuucuaaagucucuuuaa

SEQ ID NO: 110027 - RNA, 22 nt, Human
caguuuugguccuuucuaggua

SEQ ID NO: 110028 - RNA, 22 nt, Human
cauaaaagguagcaguuugaaa

SEQ ID NO: 110029 - RNA, 22 nt, Human
cauaaaguaaagaugucuucca

SEQ ID NO: 110030 - RNA, 22 nt, Human
cauaaagucaugaucugaguau

SEQ ID NO: 110031 - RNA, 19 nt, Human
cauaaauguacaagauaca

SEQ ID NO: 110032 - RNA, 22 nt, Human
cauaaauuguacccauuccaac

SEQ ID NO: 110033 - RNA, 22 nt, Human
cauaacaccugauggcaaugau

SEQ ID NO: 110034 - RNA, 22 nt, Human
cauaacugggagauccaagggu

SEQ ID NO: 110035 - RNA, 22 nt, Human
cauaacuggggacacuucucua

SEQ ID NO: 110036 - RNA, 22 nt, Human
cauaacuuuaaagacagugugg

SEQ ID NO: 110037 - RNA, 22 nt, Human
cauaaguuggguaauauaauga

SEQ ID NO: 110038 - RNA, 22 nt, Human
cauaaucagauguguacauaag

SEQ ID NO: 110039 - RNA, 22 nt, Human
cauaauguaugcauuuuccagc

SEQ ID NO: 110040 - RNA, 22 nt, Human
cauaauuucuguaucagcacca

SEQ ID NO: 110041 - RNA, 22 nt, Human
cauaauuuuccaugguuugcua

SEQ ID NO: 110042 - RNA, 22 nt, Human
cauacaguguggcauguagucu

SEQ ID NO: 110043 - RNA, 22 nt, Human
cauacauaccacugcugucuuu

SEQ ID NO: 110044 - RNA, 22 nt, Human
cauacauacugaguggacugau

SEQ ID NO: 110045 - RNA, 22 nt, Human
cauacauugaaggagaaaggaa

SEQ ID NO: 110046 - RNA, 22 nt, Human
cauacuauuacuaggagcagga

SEQ ID NO: 110047 - RNA, 22 nt, Human
cauacuuacuguguaccaggug

SEQ ID NO: 110048 - RNA, 22 nt, Human
cugacccuggaggcauuucucu

SEQ ID NO: 110049 - RNA, 22 nt, Human
cugaccuggccuuggugggcca

SEQ ID NO: 110050 - RNA, 23 nt, Human
cugacucaucccaccaccuccuc

SEQ ID NO: 110051 - RNA, 22 nt, Human
cugacuccuaugccccaugggc

SEQ ID NO: 110052 - RNA, 20 nt, Human
cugacucuccuuggcuugga

SEQ ID NO: 110053 - RNA, 22 nt, Human
cugacuuuagaacccaaaaagu

SEQ ID NO: 110054 - RNA, 22 nt, Human
cugagaaaagacauuucuagau

SEQ ID NO: 110055 - RNA, 22 nt, Human
cugagaaaggaccucaaacagg

SEQ ID NO: 110056 - RNA, 22 nt, Human
cugagaaaguuuauguuuauuu

SEQ ID NO: 110057 - RNA, 22 nt, Human
cugagaaauacccaagucuggu

SEQ ID NO: 110058 - RNA, 22 nt, Human
cugagaaauucuuucuuucacu

SEQ ID NO: 110059 - RNA, 22 nt, Human
cugagaagcaaagaacugcacu

SEQ ID NO: 110060 - RNA, 22 nt, Human
cugagaauggacagcagggcag

SEQ ID NO: 110061 - RNA, 22 nt, Human
cugagaauuacucugaugagua

SEQ ID NO: 110062 - RNA, 22 nt, Human
cugagacaugguuugacuggca

SEQ ID NO: 110063 - RNA, 22 nt, Human
cugagacauuaugacaagugga

SEQ ID NO: 110064 - RNA, 21 nt, Human
cugagaccugcauuagagagg

SEQ ID NO: 110065 - RNA, 22 nt, Human
cugagacuuucaugugcuuuua

SEQ ID NO: 110066 - RNA, 22 nt, Human
cugagagacuguuuguaauauu

SEQ ID NO: 110067 - RNA, 22 nt, Human
cugagagaugauauagcuuaau

SEQ ID NO: 110068 - RNA, 22 nt, Human
cugagagcagggacuugagcca

SEQ ID NO: 110069 - RNA, 22 nt, Human
cugagaggcagccagagaaaau

SEQ ID NO: 110070 - RNA, 22 nt, Human
cugagaggcggagcuugcagug

SEQ ID NO: 110071 - RNA, 22 nt, Human
cugagaggggaccaggguguuu

SEQ ID NO: 110072 - RNA, 22 nt, Human
cugagaguauuggcaggcuugg

SEQ ID NO: 110073 - RNA, 22 nt, Human
cugagagucaguggaguggugu

SEQ ID NO: 110074 - RNA, 20 nt, Human
cugagagucugugcuuaguc

SEQ ID NO: 110075 - RNA, 22 nt, Human
cugagaguguggcuuccaggcc

SEQ ID NO: 110076 - RNA, 22 nt, Human
cugagauggaguuucgcucuuc

SEQ ID NO: 110077 - RNA, 22 nt, Human
cugagcaccccaggaccugcgc

SEQ ID NO: 110078 - RNA, 22 nt, Human
cugagcagaagggugcacgugc

SEQ ID NO: 110079 - RNA, 22 nt, Human
cugagcagcacagggcgccagg

SEQ ID NO: 110080 - RNA, 19 nt, Human
cugagcagcggcagcacuu

SEQ ID NO: 110081 - RNA, 22 nt, Human
cugagcaggauauucacagcag

SEQ ID NO: 110082 - RNA, 22 nt, Human
cugagcaguagagggucucuuu

SEQ ID NO: 110083 - RNA, 22 nt, Human
cugagcaguuucuuagggcuca

SEQ ID NO: 110084 - RNA, 22 nt, Human
cugagcauccagcagguacugc

SEQ ID NO: 110085 - RNA, 22 nt, Human
cugagcauuugugcagcuucuc

SEQ ID NO: 110086 - RNA, 22 nt, Human
cugagccaaccacagcaggagc

SEQ ID NO: 110087 - RNA, 20 nt, Human
cugagccaacucucuucuug

SEQ ID NO: 110088 - RNA, 22 nt, Human
cugagccaccggcagggacauc

SEQ ID NO: 110089 - RNA, 22 nt, Human
cugagccagcuggcaugugcua

SEQ ID NO: 110090 - RNA, 22 nt, Human
cugagccauaagggaggcuggg

SEQ ID NO: 110091 - RNA, 22 nt, Human
cugagccauccauaccagcuua

SEQ ID NO: 110092 - RNA, 22 nt, Human
cugagccaugagccugcgccca

SEQ ID NO: 110093 - RNA, 22 nt, Human
cugagccccucugaccucagag

SEQ ID NO: 110094 - RNA, 19 nt, Human
cugagccucaguuuccuag

SEQ ID NO: 110095 - RNA, 22 nt, Human
cugagccuguguuucucuggca

SEQ ID NO: 110096 - RNA, 22 nt, Human
cugagcgaggaguuggagcuuu

SEQ ID NO: 110097 - RNA, 22 nt, Human
cugagcucuaaugucagccuug

SEQ ID NO: 110098 - RNA, 22 nt, Human
cugagcugacaucuuccucuuu

SEQ ID NO: 110099 - RNA, 20 nt, Human
cugagcugagcuccaugggu

SEQ ID NO: 110100 - RNA, 22 nt, Human
cugagcugcaguccuggcucug

SEQ ID NO: 110101 - RNA, 22 nt, Human
cugagcugcggcaggcaccugg

SEQ ID NO: 110102 - RNA, 22 nt, Human
cugagcugcucccgcugcagcg

SEQ ID NO: 110103 - RNA, 22 nt, Human
caucucuguguccccacaccca

SEQ ID NO: 110104 - RNA, 22 nt, Human
caucucuguguccccagagcuu

SEQ ID NO: 110105 - RNA, 22 nt, Human
caucugaauuugccuuaguuuc

SEQ ID NO: 110106 - RNA, 22 nt, Human
caucugcucugucugccauguu

SEQ ID NO: 110107 - RNA, 22 nt, Human
caucuggacaaaacucugaagg

SEQ ID NO: 110108 - RNA, 22 nt, Human
caucuggguucucagauggaua

SEQ ID NO: 110109 - RNA, 19 nt, Human
caucuguaaggacagaaac

SEQ ID NO: 110110 - RNA, 22 nt, Human
caucugucuuuuguuacaaggc

SEQ ID NO: 110111 - RNA, 22 nt, Human
caucugugccggguguuuguca

SEQ ID NO: 110112 - RNA, 22 nt, Human
caucuguguaucugugcuuaga

SEQ ID NO: 110113 - RNA, 22 nt, Human
caucuguuuccuaaucuguagc

SEQ ID NO: 110114 - RNA, 22 nt, Human
caucuuaaauuaaagcuuaagg

SEQ ID NO: 110115 - RNA, 22 nt, Human
caucuuaccccugcuaaugacc

SEQ ID NO: 110116 - RNA, 22 nt, Human
caucuuauaggcagaguucagu

SEQ ID NO: 110117 - RNA, 22 nt, Human
caucuucaccagagacaagcaa

SEQ ID NO: 110118 - RNA, 22 nt, Human
caucuucagguguuuuccauca

SEQ ID NO: 110119 - RNA, 22 nt, Human
caucuucagguucauggucaua

SEQ ID NO: 110120 - RNA, 22 nt, Human
caucuugagacaugaaaggugu

SEQ ID NO: 110121 - RNA, 22 nt, Human
caucuuugaacucuguauaaac

SEQ ID NO: 110122 - RNA, 22 nt, Human
caucuuugagacagcauuaccc

SEQ ID NO: 110123 - RNA, 22 nt, Human
caucuuugcacccucaaaaccu

SEQ ID NO: 110124 - RNA, 20 nt, Human
caucuuuggcaggacuccuu

SEQ ID NO: 110125 - RNA, 22 nt, Human
caugaaacuuccaaagcugacc

SEQ ID NO: 110126 - RNA, 22 nt, Human
caugaaagcaggaaugguuuua

SEQ ID NO: 110127 - RNA, 22 nt, Human
caugaaauucagcaggugagua

SEQ ID NO: 110128 - RNA, 22 nt, Human
caugaaauugcuccuuuggugc

SEQ ID NO: 110129 - RNA, 22 nt, Human
caugaacaauuugcucacugau

SEQ ID NO: 110130 - RNA, 21 nt, Human
caugaacaugcuuauccucag

SEQ ID NO: 110131 - RNA, 22 nt, Human
caugaacauugcagggauguga

SEQ ID NO: 110132 - RNA, 22 nt, Human
caugaagcucuugcaccucuag

SEQ ID NO: 110133 - RNA, 22 nt, Human
caugaaggaccauuucacgguc

SEQ ID NO: 110134 - RNA, 22 nt, Human
caugaagucaggauuuccauga

SEQ ID NO: 110135 - RNA, 22 nt, Human
caugaaugcuggguucauguaa

SEQ ID NO: 110136 - RNA, 23 nt, Human
caugacaaaggaucucaugggcc

SEQ ID NO: 110137 - RNA, 22 nt, Human
caugacaaaucagaggggcuug

SEQ ID NO: 110138 - RNA, 22 nt, Human
caugacacccaggcauagcacc

SEQ ID NO: 110139 - RNA, 22 nt, Human
caugaccagagaggacggccag

SEQ ID NO: 110140 - RNA, 22 nt, Human
caugagaaccaggucuguguuu

SEQ ID NO: 110141 - RNA, 22 nt, Human
caugagaucugcagggaugggc

SEQ ID NO: 110142 - RNA, 22 nt, Human
caugaggucagggggagccggu

SEQ ID NO: 110143 - RNA, 22 nt, Human
caugagugugccagucugauau

SEQ ID NO: 110144 - RNA, 22 nt, Human
caugauaacuucauuacacaau

SEQ ID NO: 110145 - RNA, 23 nt, Human
caugauauuuaucuucccugggu

SEQ ID NO: 110146 - RNA, 22 nt, Human
caugaugguucuuacaaaggug

SEQ ID NO: 110147 - RNA, 22 nt, Human
caugauguuaucuaaaucuggu

SEQ ID NO: 110148 - RNA, 22 nt, Human
caugcaagacaaucuuuaaaau

SEQ ID NO: 110149 - RNA, 22 nt, Human
caugcacaagggaugaugaaau

SEQ ID NO: 110150 - RNA, 22 nt, Human
caugcacacacaguucuaauua

SEQ ID NO: 110151 - RNA, 22 nt, Human
caugcacagugauaucugaaga

SEQ ID NO: 110152 - RNA, 22 nt, Human
caugcacauguggcuauguaau

SEQ ID NO: 110153 - RNA, 22 nt, Human
caugcacauuauucaaagccca

SEQ ID NO: 110154 - RNA, 22 nt, Human
caugcacuuaccugaaauucaa

SEQ ID NO: 110155 - RNA, 22 nt, Human
caugcagaguuuauuaccaucu

SEQ ID NO: 110156 - RNA, 22 nt, Human
caugcaggcccgccugaauggg

SEQ ID NO: 110157 - RNA, 22 nt, Human
ccacagugguucucaaccaggg

SEQ ID NO: 110158 - RNA, 22 nt, Human
ccacaguguucuuuuuaaaauu

SEQ ID NO: 110159 - RNA, 22 nt, Human
ccacauacaaauggggugcugu

SEQ ID NO: 110160 - RNA, 22 nt, Human
ccacaugaaucuuggaagcagg

SEQ ID NO: 110161 - RNA, 20 nt, Human
ccacaugagcucuuucugac

SEQ ID NO: 110162 - RNA, 22 nt, Human
ccacauggauagauagggacau

SEQ ID NO: 110163 - RNA, 22 nt, Human
ccacauuggccucagagguuag

SEQ ID NO: 110164 - RNA, 22 nt, Human
ccaccagaccaccaagagcaac

SEQ ID NO: 110165 - RNA, 22 nt, Human
ccaccagagggcagacugugau

SEQ ID NO: 110166 - RNA, 22 nt, Human
ccaccagcuucagcagccgcgg

SEQ ID NO: 110167 - RNA, 20 nt, Human
ccacccacgcgggcucugcc

SEQ ID NO: 110168 - RNA, 19 nt, Human
ccaccccuuugcugggccc

SEQ ID NO: 110169 - RNA, 22 nt, Human
ccacccuggacucgaggcccga

SEQ ID NO: 110170 - RNA, 22 nt, Human
ccacccuggguucugaugugga

SEQ ID NO: 110171 - RNA, 22 nt, Human
ccacccugugcaggcgugggua

SEQ ID NO: 110172 - RNA, 22 nt, Human
ccaccgcugaaggcacuggcau

SEQ ID NO: 110173 - RNA, 22 nt, Human
ccaccucucaggguuuccuaau

SEQ ID NO: 110174 - RNA, 22 nt, Human
ccaccucugagcccaaacccug

SEQ ID NO: 110175 - RNA, 16 nt, Human
ccaccugcagcucuca

SEQ ID NO: 110176 - RNA, 22 nt, Human
ccaccugcugguuuugcucucc

SEQ ID NO: 110177 - RNA, 22 nt, Human
ccacguccagcuaauuuucgua

SEQ ID NO: 110178 - RNA, 22 nt, Human
ccacucaggccuccugcucucc

SEQ ID NO: 110179 - RNA, 22 nt, Human
ccacucugcugugcuccaugau

SEQ ID NO: 110180 - RNA, 22 nt, Human
ccacucuugaaucaagagcuca

SEQ ID NO: 110181 - RNA, 22 nt, Human
ccacugagaccuuuuggaggag

SEQ ID NO: 110182 - RNA, 22 nt, Human
ccacugaggcaggcaguaucua

SEQ ID NO: 110183 - RNA, 22 nt, Human
ccacugauccugacuuuggagc

SEQ ID NO: 110184 - RNA, 22 nt, Human
ccacugauucugccaggucucu

SEQ ID NO: 110185 - RNA, 22 nt, Human
ccacugccagccgcccggaggc

SEQ ID NO: 110186 - RNA, 22 nt, Human
ccacugccgugggccuugggga

SEQ ID NO: 110187 - RNA, 22 nt, Human
ccacugcuccugaccaagguca

SEQ ID NO: 110188 - RNA, 21 nt, Human
ccacugcucuucccuagggcc

SEQ ID NO: 110189 - RNA, 22 nt, Human
ccacuggagaugucagacaggu

SEQ ID NO: 110190 - RNA, 22 nt, Human
ccacuggcaaccccgccucaua

SEQ ID NO: 110191 - RNA, 22 nt, Human
ccacuguauuuuggaagcagau

SEQ ID NO: 110192 - RNA, 22 nt, Human
ccacuugacaauaaacugagcu

SEQ ID NO: 110193 - RNA, 22 nt, Human
ccacuuuuucagugugcaugca

SEQ ID NO: 110194 - RNA, 22 nt, Human
ccacuuuuuucuccaucucuga

SEQ ID NO: 110195 - RNA, 22 nt, Human
ccagaaagaaugaacugaaccc

SEQ ID NO: 110196 - RNA, 22 nt, Human
ccagaacagaccugccugaccu

SEQ ID NO: 110197 - RNA, 22 nt, Human
ccagaaccaaaagcauggagua

SEQ ID NO: 110198 - RNA, 22 nt, Human
ccagaacugggcaacagaaagu

SEQ ID NO: 110199 - RNA, 22 nt, Human
ccagaagaccggggagucaggg

SEQ ID NO: 110200 - RNA, 22 nt, Human
ccagaagaggacacagugugga

SEQ ID NO: 110201 - RNA, 22 nt, Human
ccagaagauggcucaaaccaug

SEQ ID NO: 110202 - RNA, 22 nt, Human
ccagaagcaaaacagacaguuu

SEQ ID NO: 110203 - RNA, 20 nt, Human
ccagaagguaggauggaaca

SEQ ID NO: 110204 - RNA, 22 nt, Human
ccagaaguggcuuucucaggga

SEQ ID NO: 110205 - RNA, 22 nt, Human
ccagaauuuggaucaugauuuu

SEQ ID NO: 110206 - RNA, 20 nt, Human
ccagacagcaccugccuggu

SEQ ID NO: 110207 - RNA, 22 nt, Human
ccagacagcaguuaaaggacau

SEQ ID NO: 110208 - RNA, 22 nt, Human
ccagacaugugcccuugaggaa

SEQ ID NO: 110209 - RNA, 21 nt, Human
ccagacuugaguguauguugu

SEQ ID NO: 110210 - RNA, 22 nt, Human
ccagagaagucuugccuggauu

SEQ ID NO: 110211 - RNA, 22 nt, Human
ccagagaauccggagaguccau

SEQ ID NO: 110212 - RNA, 22 nt, Human
ccagagagaaaauggagggcca

SEQ ID NO: 110213 - RNA, 22 nt, Human
ccagagagauugcuucuaaaga

SEQ ID NO: 110214 - RNA, 19 nt, Human
ccagagagcuagguacaga

SEQ ID NO: 110215 - RNA, 22 nt, Human
ccagagaggccuuggcaagaca

SEQ ID NO: 110216 - RNA, 22 nt, Human
ccagagaggggaagggcuugcc

SEQ ID NO: 110217 - RNA, 22 nt, Human
ccagagaguaaacauuuuccgg

SEQ ID NO: 110218 - RNA, 22 nt, Human
ccagagaguaggaggcauuauu

SEQ ID NO: 110219 - RNA, 20 nt, Human
ccagagaguagguuagugau

SEQ ID NO: 110220 - RNA, 17 nt, Human
ccagagaguaguuagga

SEQ ID NO: 110221 - RNA, 22 nt, Human
ccagagaguaucauggagagua

SEQ ID NO: 110222 - RNA, 17 nt, Human
ccagagaugccucaggc

SEQ ID NO: 110223 - RNA, 22 nt, Human
ccagagaugugaaaaugccgga

SEQ ID NO: 110224 - RNA, 22 nt, Human
ccagagcaauucucacagaacu

SEQ ID NO: 110225 - RNA, 22 nt, Human
ccagagcagaaccggaacacca

SEQ ID NO: 110226 - RNA, 22 nt, Human
ccagagcagggcagcagggcuc

SEQ ID NO: 110227 - RNA, 22 nt, Human
ccagagccccugagcuucccug

SEQ ID NO: 110228 - RNA, 22 nt, Human
ccagagccuaagaucugauccu

SEQ ID NO: 110229 - RNA, 21 nt, Human
ccagagccugcugagcccccu

SEQ ID NO: 110230 - RNA, 22 nt, Human
ccagagccuggcaucugcauaa

SEQ ID NO: 110231 - RNA, 17 nt, Human
ccagagcuacugagacu

SEQ ID NO: 110232 - RNA, 22 nt, Human
ccagagcugagggagccugagc

SEQ ID NO: 110233 - RNA, 20 nt, Human
ccagagcugauggcugcccg

SEQ ID NO: 110234 - RNA, 22 nt, Human
ccagagcuugacgugcaacgga

SEQ ID NO: 110235 - RNA, 22 nt, Human
ccagaggagcaggcuggcucca

SEQ ID NO: 110236 - RNA, 22 nt, Human
ccagaggcagacuuacacucca

SEQ ID NO: 110237 - RNA, 22 nt, Human
ccagaggcauguucaaagcaau

SEQ ID NO: 110238 - RNA, 20 nt, Human
ccagaggcugacagacuuug

SEQ ID NO: 110239 - RNA, 22 nt, Human
cuggagauacugcucuccauau

SEQ ID NO: 110240 - RNA, 19 nt, Human
cuggagauagggccuuuaa

SEQ ID NO: 110241 - RNA, 22 nt, Human
cuggagcauccaugcccagggu

SEQ ID NO: 110242 - RNA, 22 nt, Human
cuggagcauuuucugcuucugc

SEQ ID NO: 110243 - RNA, 17 nt, Human
cuggagccaagagggcc

SEQ ID NO: 110244 - RNA, 22 nt, Human
cuggagccacuuuuuauccuuu

SEQ ID NO: 110245 - RNA, 22 nt, Human
cuggagccagccagggcccucu

SEQ ID NO: 110246 - RNA, 22 nt, Human
cuggagcccaggccuggugucu

SEQ ID NO: 110247 - RNA, 22 nt, Human
cuggagcccugaaugggcagga

SEQ ID NO: 110248 - RNA, 22 nt, Human
cuggagccggaccagggacggu

SEQ ID NO: 110249 - RNA, 22 nt, Human
cuggagcucagcccagguucca

SEQ ID NO: 110250 - RNA, 22 nt, Human
cuggagcuccagggucuccucu

SEQ ID NO: 110251 - RNA, 22 nt, Human
cuggagcugccagggcugccgc

SEQ ID NO: 110252 - RNA, 22 nt, Human
cuggagcugcuguccuugggug

SEQ ID NO: 110253 - RNA, 22 nt, Human
cuggagcuggcuuccuuccacu

SEQ ID NO: 110254 - RNA, 17 nt, Human
cuggagcuguguaaccu

SEQ ID NO: 110255 - RNA, 22 nt, Human
cuggaggaaaacaacugcagac

SEQ ID NO: 110256 - RNA, 22 nt, Human
cuggaggaaucacagaaggcuu

SEQ ID NO: 110257 - RNA, 22 nt, Human
cuggaggaccacagaagcuggu

SEQ ID NO: 110258 - RNA, 22 nt, Human
cuggaggagagucugaaugaca

SEQ ID NO: 110259 - RNA, 22 nt, Human
cuggaggagcaauaugguuagg

SEQ ID NO: 110260 - RNA, 22 nt, Human
cuggaggcaguugccccaguca

SEQ ID NO: 110261 - RNA, 22 nt, Human
cuggagggacaagguaugcauu

SEQ ID NO: 110262 - RNA, 22 nt, Human
cuggagggagauucaaaggagg

SEQ ID NO: 110263 - RNA, 22 nt, Human
cuggagggaggaggcugcuauu

SEQ ID NO: 110264 - RNA, 22 nt, Human
cuggagggcuggacuaaggaaa

SEQ ID NO: 110265 - RNA, 22 nt, Human
cuggaggggccauccacagucu

SEQ ID NO: 110266 - RNA, 22 nt, Human
cuggagguaagaggcccugggc

SEQ ID NO: 110267 - RNA, 22 nt, Human
ccagaugguccagagucuagcc

SEQ ID NO: 110268 - RNA, 22 nt, Human
ccagauggugccugucagaagg

SEQ ID NO: 110269 - RNA, 22 nt, Human
ccagaugguuugcaugggaggg

SEQ ID NO: 110270 - RNA, 22 nt, Human
ccagauguauguaugagugcau

SEQ ID NO: 110271 - RNA, 22 nt, Human
ccagaugucccucucagguuug

SEQ ID NO: 110272 - RNA, 22 nt, Human
ccagaugucugagccacacucc

SEQ ID NO: 110273 - RNA, 22 nt, Human
ccagaugugagcagagccuuga

SEQ ID NO: 110274 - RNA, 22 nt, Human
ccagcacugcucucagacugag

SEQ ID NO: 110275 - RNA, 22 nt, Human
ccagcagacacacaggcguggg

SEQ ID NO: 110276 - RNA, 19 nt, Human
ccagcagacacagcugccc

SEQ ID NO: 110277 - RNA, 22 nt, Human
ccagcagagcauggggaggaag

SEQ ID NO: 110278 - RNA, 22 nt, Human
ccagcagaggggcggagugcag

SEQ ID NO: 110279 - RNA, 22 nt, Human
ccagcagaguugguuucuggua

SEQ ID NO: 110280 - RNA, 22 nt, Human
ccagcagcugacaccaguccca

SEQ ID NO: 110281 - RNA, 22 nt, Human
ccagcagcugcaaagccugggu

SEQ ID NO: 110282 - RNA, 22 nt, Human
ccagcagcugcuaugugguuuu

SEQ ID NO: 110283 - RNA, 22 nt, Human
ccagcagcuguggcuuugccuc

SEQ ID NO: 110284 - RNA, 19 nt, Human
ccagcagcuuugauucucu

SEQ ID NO: 110285 - RNA, 22 nt, Human
ccagcagggcagugcccuggac

SEQ ID NO: 110286 - RNA, 22 nt, Human
ccagcaggggaauauuuuuagg

SEQ ID NO: 110287 - RNA, 22 nt, Human
ccagcaucagcauugucuuagg

SEQ ID NO: 110288 - RNA, 22 nt, Human
ccagcaucagucagauuuugcu

SEQ ID NO: 110289 - RNA, 22 nt, Human
ccagcauccucagcucacuucu

SEQ ID NO: 110290 - RNA, 22 nt, Human
ccagcaucgacuuccugccuga

SEQ ID NO: 110291 - RNA, 22 nt, Human
ccagcaugcucagucuaaauug

SEQ ID NO: 110292 - RNA, 22 nt, Human
ccagcauucacacugguuccuu

SEQ ID NO: 110293 - RNA, 22 nt, Human
ccagccagaaguccgggcuucu

SEQ ID NO: 110294 - RNA, 22 nt, Human
ccagccagcugcccuuggggcc

SEQ ID NO: 110295 - RNA, 22 nt, Human
ccagccagggaaacuuuuucuu

SEQ ID NO: 110296 - RNA, 22 nt, Human
ccagccaugggccaccuagcug

SEQ ID NO: 110297 - RNA, 22 nt, Human
ccagcccaaacaagccgccuuc

SEQ ID NO: 110298 - RNA, 19 nt, Human
ccagcccacagugacuuuc

SEQ ID NO: 110299 - RNA, 22 nt, Human
ccagcccaugcccuuauagcau

SEQ ID NO: 110300 - RNA, 22 nt, Human
ccagcccuacaguaucaccugu

SEQ ID NO: 110301 - RNA, 22 nt, Human
ccagcccucacugaggccucuc

SEQ ID NO: 110302 - RNA, 22 nt, Human
ccagcccuccuccaucagagga

SEQ ID NO: 110303 - RNA, 22 nt, Human
ccagcccuguaaggaugaggca

SEQ ID NO: 110304 - RNA, 19 nt, Human
ccagcccugucacuucuug

SEQ ID NO: 110305 - RNA, 22 nt, Human
ccagcccuuagauaaaccuggc

SEQ ID NO: 110306 - RNA, 22 nt, Human
ccagcccuugagauggaaggga

SEQ ID NO: 110307 - RNA, 21 nt, Human
ccagccucagaucagggagcu

SEQ ID NO: 110308 - RNA, 22 nt, Human
ccagccucaucgccugccuguc

SEQ ID NO: 110309 - RNA, 22 nt, Human
ccagccuuacugcccuucagug

SEQ ID NO: 110310 - RNA, 22 nt, Human
ccagccuucugagcugccugga

SEQ ID NO: 110311 - RNA, 22 nt, Human
ccagccuugacugccccagcac

SEQ ID NO: 110312 - RNA, 22 nt, Human
ccagcuaggcuugcacucuugu

SEQ ID NO: 110313 - RNA, 22 nt, Human
ccagcuccaaguuugggcauca

SEQ ID NO: 110314 - RNA, 21 nt, Human
ccagcuccaggaccuuggauc

SEQ ID NO: 110315 - RNA, 22 nt, Human
ccagcuccaggacugggagcug

SEQ ID NO: 110316 - RNA, 22 nt, Human
ccagcuccauugcuuaguguaa

SEQ ID NO: 110317 - RNA, 22 nt, Human
ccagcuccccucagcagguaau

SEQ ID NO: 110318 - RNA, 22 nt, Human
ccagcucccugaagccuggucu

SEQ ID NO: 110319 - RNA, 22 nt, Human
ccagcuccgggaguugcugcug

SEQ ID NO: 110320 - RNA, 23 nt, Human
ccagcuccgugagccucgggcuc

SEQ ID NO: 110321 - RNA, 22 nt, Human
ccagcuccuucugucuguggag

SEQ ID NO: 110322 - RNA, 22 nt, Human
ccagcucucugcagaaaggacu

SEQ ID NO: 110323 - RNA, 22 nt, Human
ccagcucucuguccuccccaca

SEQ ID NO: 110324 - RNA, 22 nt, Human
ccagcucugccaagcgucagcu

SEQ ID NO: 110325 - RNA, 22 nt, Human
ccagcucugcuugcccagucag

SEQ ID NO: 110326 - RNA, 22 nt, Human
ccagcucuuuuggcugagugag

SEQ ID NO: 110327 - RNA, 22 nt, Human
ccagcugacgaugccuggucuc

SEQ ID NO: 110328 - RNA, 22 nt, Human
ccagcugcgggcaucgagaguu

SEQ ID NO: 110329 - RNA, 17 nt, Human
ccagcugcucccucaga

SEQ ID NO: 110330 - RNA, 22 nt, Human
ccagcugcugugaggaccacag

SEQ ID NO: 110331 - RNA, 22 nt, Human
ccagcugcugugcagggaggcu

SEQ ID NO: 110332 - RNA, 22 nt, Human
ccagcugcuugggaaaaugucu

SEQ ID NO: 110333 - RNA, 22 nt, Human
ccagcuggcaggagagucaggg

SEQ ID NO: 110334 - RNA, 22 nt, Human
ccagcugggauuaagggaaaau

SEQ ID NO: 110335 - RNA, 22 nt, Human
ccagcugguaagugauggagcc

SEQ ID NO: 110336 - RNA, 22 nt, Human
ccagcuggugacauccccaacc

SEQ ID NO: 110337 - RNA, 22 nt, Human
ccagcugucacucagaaaggcc

SEQ ID NO: 110338 - RNA, 22 nt, Human
ccagcugugccggggaccuggg

SEQ ID NO: 110339 - RNA, 22 nt, Human
ccagcuucaugggcaugcacca

SEQ ID NO: 110340 - RNA, 22 nt, Human
ccagcuucucucugaugcagcu

SEQ ID NO: 110341 - RNA, 22 nt, Human
ccagcuuggaauaugccauugu

SEQ ID NO: 110342 - RNA, 21 nt, Human
ccagcuuucccaagucccuuu

SEQ ID NO: 110343 - RNA, 22 nt, Human
ccagcuuuggaguguuguugcu

SEQ ID NO: 110344 - RNA, 22 nt, Human
ccagcuuuucagaaucugccug

SEQ ID NO: 110345 - RNA, 22 nt, Human
ccaggaaaaacacauugaagag

SEQ ID NO: 110346 - RNA, 22 nt, Human
ccaggaaaaagagaaacauggu

SEQ ID NO: 110347 - RNA, 16 nt, Human
ccaggaacacacagcu

SEQ ID NO: 110348 - RNA, 22 nt, Human
ccaggaacucagcucugcacuu

SEQ ID NO: 110349 - RNA, 22 nt, Human
ccaggaagacacaugcucaucc

SEQ ID NO: 110350 - RNA, 22 nt, Human
ccaggaagcggugagggcugcc

SEQ ID NO: 110351 - RNA, 22 nt, Human
ccaggaagcucugcuccacggg

SEQ ID NO: 110352 - RNA, 22 nt, Human
ccaggaaggcaggccuccccgc

SEQ ID NO: 110353 - RNA, 22 nt, Human
ccaggaaggcguuguuccucuc

SEQ ID NO: 110354 - RNA, 22 nt, Human
ccaggaagggcucuuuaaagac

SEQ ID NO: 110355 - RNA, 22 nt, Human
ccaggaagguguuuaacuagag

SEQ ID NO: 110356 - RNA, 22 nt, Human
cuggcuccaaauucugauguuc

SEQ ID NO: 110357 - RNA, 22 nt, Human
cuggcuccaaggaagagguuuu

SEQ ID NO: 110358 - RNA, 22 nt, Human
cuggcuccacucccugccugac

SEQ ID NO: 110359 - RNA, 22 nt, Human
cuggcuccaggucaugcacuca

SEQ ID NO: 110360 - RNA, 22 nt, Human
cuggcuccaucacugggugaug

SEQ ID NO: 110361 - RNA, 22 nt, Human
cuggcuccaucuuugcuuccug

SEQ ID NO: 110362 - RNA, 22 nt, Human
cuggcuccauuacucagcaucu

SEQ ID NO: 110363 - RNA, 22 nt, Human
cuggcucccggggaucgagcac

SEQ ID NO: 110364 - RNA, 22 nt, Human
cuggcucccgucugguggccau

SEQ ID NO: 110365 - RNA, 23 nt, Human
cuggcuccgaagacuccaggauc

SEQ ID NO: 110366 - RNA, 22 nt, Human
cuggcuccucaggacugcggga

SEQ ID NO: 110367 - RNA, 22 nt, Human
cuggcuccucaguauuccacuu

SEQ ID NO: 110368 - RNA, 22 nt, Human
cuggcuccuccaaggccuggag

SEQ ID NO: 110369 - RNA, 22 nt, Human
cuggcucgcauuauauuuuggg

SEQ ID NO: 110370 - RNA, 22 nt, Human
cuggcucugaccgcgcuggccu

SEQ ID NO: 110371 - RNA, 23 nt, Human
cuggcucuguagguggcauccuu

SEQ ID NO: 110372 - RNA, 22 nt, Human
cuggcucugugggaccuggccu

SEQ ID NO: 110373 - RNA, 21 nt, Human
cuggcucuguugucacccggc

SEQ ID NO: 110374 - RNA, 22 nt, Human
cuggcucuucagugcuugguuc

SEQ ID NO: 110375 - RNA, 22 nt, Human
cuggcucuuggcuagggagagu

SEQ ID NO: 110376 - RNA, 22 nt, Human
ccagcugugccguguggauagc

SEQ ID NO: 110377 - RNA, 22 nt, Human
ccagcuugcuccucugcaaugg

SEQ ID NO: 110378 - RNA, 22 nt, Human
ccagcuuuagguugccugccag

SEQ ID NO: 110379 - RNA, 22 nt, Human
ccagcuuuaucaagucugagcu

SEQ ID NO: 110380 - RNA, 22 nt, Human
ccagcuuuugcacuggacuggg

SEQ ID NO: 110381 - RNA, 22 nt, Human
ccaggaaauggcuugcuucuuu

SEQ ID NO: 110382 - RNA, 19 nt, Human
ccaggaaccccuagcuacc

SEQ ID NO: 110383 - RNA, 22 nt, Human
ccaggaagcauaauguaguggg

SEQ ID NO: 110384 - RNA, 22 nt, Human
ccaggaagccucagaugcugag

SEQ ID NO: 110385 - RNA, 22 nt, Human
ccaggaaggaucguuugggagu

SEQ ID NO: 110386 - RNA, 22 nt, Human
ccaggacaagccagagggacag

SEQ ID NO: 110387 - RNA, 22 nt, Human
ccaggacaauucgucacuuucu

SEQ ID NO: 110388 - RNA, 22 nt, Human
ccaggacacgauuuuuagucug

SEQ ID NO: 110389 - RNA, 22 nt, Human
ccaggacagugaacauguaaga

SEQ ID NO: 110390 - RNA, 22 nt, Human
ccaggacucaaugaccacaggg

SEQ ID NO: 110391 - RNA, 19 nt, Human
ccaggacuuugcagacacu

SEQ ID NO: 110392 - RNA, 22 nt, Human
ccaggagaaugggauuacccua

SEQ ID NO: 110393 - RNA, 22 nt, Human
ccaggagacccagggaaggagc

SEQ ID NO: 110394 - RNA, 22 nt, Human
ccaggagagcaaaggucacucu

SEQ ID NO: 110395 - RNA, 22 nt, Human
ccaggagagcauugcacagagg

SEQ ID NO: 110396 - RNA, 22 nt, Human
ccaggagaugggagcaucuaaa

SEQ ID NO: 110397 - RNA, 22 nt, Human
ccaggagcaacuugaaggcaag

SEQ ID NO: 110398 - RNA, 22 nt, Human
ccaggagcaccaggccugugcc

SEQ ID NO: 110399 - RNA, 22 nt, Human
ccaggagcagauauggacauaa

SEQ ID NO: 110400 - RNA, 22 nt, Human
ccaggagcaggagcugcagcug

SEQ ID NO: 110401 - RNA, 22 nt, Human
ccaggagccacucaggcccaca

SEQ ID NO: 110402 - RNA, 22 nt, Human
ccaggagcccugccacaauggu

SEQ ID NO: 110403 - RNA, 22 nt, Human
ccaggagccugggccaggcugg

SEQ ID NO: 110404 - RNA, 22 nt, Human
ccaggaggaaauucuaaaggua

SEQ ID NO: 110405 - RNA, 22 nt, Human
ccaggaggaucauccuguuuuc

SEQ ID NO: 110406 - RNA, 22 nt, Human
ccaggaggcagaaguugcagug

SEQ ID NO: 110407 - RNA, 22 nt, Human
ccaggaggcagagguuacagug

SEQ ID NO: 110408 - RNA, 22 nt, Human
ccaggaggcuucguccguggag

SEQ ID NO: 110409 - RNA, 22 nt, Human
ccaggaggucugaguguggaca

SEQ ID NO: 110410 - RNA, 22 nt, Human
ccaggaggugaaacuucaccag

SEQ ID NO: 110411 - RNA, 22 nt, Human
ccaggaucuggguccaugggac

SEQ ID NO: 110412 - RNA, 22 nt, Human
ccaggaugacccccacuuuccu

SEQ ID NO: 110413 - RNA, 22 nt, Human
ccaggcaacggagcccacugcc

SEQ ID NO: 110414 - RNA, 22 nt, Human
ccaggcaaggacaugaaacuga

SEQ ID NO: 110415 - RNA, 22 nt, Human
ccaggcaauucugaaagcauuu

SEQ ID NO: 110416 - RNA, 22 nt, Human
ccaggcaccauguucuuaggac

SEQ ID NO: 110417 - RNA, 22 nt, Human
ccaggcacgguggcucaugccu

SEQ ID NO: 110418 - RNA, 22 nt, Human
ccaggcacugcucgaggugcua

SEQ ID NO: 110419 - RNA, 20 nt, Human
ccaggcacugucccaugcag

SEQ ID NO: 110420 - RNA, 22 nt, Human
ccaggcacuuguuugccaggca

SEQ ID NO: 110421 - RNA, 22 nt, Human
ccaggcagagggaauagcaagu

SEQ ID NO: 110422 - RNA, 22 nt, Human
ccaggcagcucugauuuauguc

SEQ ID NO: 110423 - RNA, 22 nt, Human
ccaggcaggcagcguucucagg

SEQ ID NO: 110424 - RNA, 21 nt, Human
ccaggcaugacugcagagagc

SEQ ID NO: 110425 - RNA, 22 nt, Human
ccaggcauggggagagccagau

SEQ ID NO: 110426 - RNA, 22 nt, Human
ccaggccagagugcaguggcac

SEQ ID NO: 110427 - RNA, 22 nt, Human
ccaggccagccuggagcauggc

SEQ ID NO: 110428 - RNA, 19 nt, Human
ccaggccaucccaguuccc

SEQ ID NO: 110429 - RNA, 22 nt, Human
ccaggcccaccuuggccacuua

SEQ ID NO: 110430 - RNA, 22 nt, Human
ccaggcccaggguacugaccaa

SEQ ID NO: 110431 - RNA, 22 nt, Human
ccaggcccguucccuucuccag

SEQ ID NO: 110432 - RNA, 22 nt, Human
ccaggcccugccugugguuccu

SEQ ID NO: 110433 - RNA, 22 nt, Human
ccaggccuagccccugagggua

SEQ ID NO: 110434 - RNA, 22 nt, Human
ccaggccucccuuuuccagcca

SEQ ID NO: 110435 - RNA, 22 nt, Human
ccaggccuggccaggggaugcc

SEQ ID NO: 110436 - RNA, 22 nt, Human
ccaggccugugcaaggagggag

SEQ ID NO: 110437 - RNA, 22 nt, Human
ccaggcuagagagcaguggcau

SEQ ID NO: 110438 - RNA, 22 nt, Human
ccaggcuagagugcaguggcau

SEQ ID NO: 110439 - RNA, 22 nt, Human
ccaggcuaggaccgauuucccu

SEQ ID NO: 110440 - RNA, 22 nt, Human
ccaggcucaccuggagccccug

SEQ ID NO: 110441 - RNA, 22 nt, Human
ccaggcucagcgcgcacgucug

SEQ ID NO: 110442 - RNA, 17 nt, Human
ccaggcuccaucacugu

SEQ ID NO: 110443 - RNA, 22 nt, Human
ccaggcuccccaggaggcccuu

SEQ ID NO: 110444 - RNA, 21 nt, Human
ccaggcuccugaggcugguca

SEQ ID NO: 110445 - RNA, 22 nt, Human
ccaggcucugcaaaaucaggcu

SEQ ID NO: 110446 - RNA, 22 nt, Human
ccaggcucugccaggcccuuga

SEQ ID NO: 110447 - RNA, 22 nt, Human
ccaggcucugugugggcuagag

SEQ ID NO: 110448 - RNA, 23 nt, Human
ccaggcucuuucaccugcuauuc

SEQ ID NO: 110449 - RNA, 22 nt, Human
ccaggcuggagugcaauggugc

SEQ ID NO: 110450 - RNA, 22 nt, Human
ccaggcuggaguguagucgcau

SEQ ID NO: 110451 - RNA, 21 nt, Human
ccaggcugggagggcaguucc

SEQ ID NO: 110452 - RNA, 22 nt, Human
ccaggcugggcuacaaguugag

SEQ ID NO: 110453 - RNA, 22 nt, Human
ccaggcuucccccauccuagga

SEQ ID NO: 110454 - RNA, 22 nt, Human
ccaggcuuucccagccucucca

SEQ ID NO: 110455 - RNA, 22 nt, Human
ccaggcuuucuccugacucaca

SEQ ID NO: 110456 - RNA, 22 nt, Human
ccaggcuuuuagcugcauggca

SEQ ID NO: 110457 - RNA, 22 nt, Human
ccaggcuuuucucauggaguca

SEQ ID NO: 110458 - RNA, 22 nt, Human
ccagggaagaaagaugaagugc

SEQ ID NO: 110459 - RNA, 22 nt, Human
ccagggaaggacucucuuuccc

SEQ ID NO: 110460 - RNA, 23 nt, Human
ccagggaaggccaucuucaacug

SEQ ID NO: 110461 - RNA, 22 nt, Human
ccagggaaggcucugccugcuu

SEQ ID NO: 110462 - RNA, 22 nt, Human
ccagggaagucacauugucuag

SEQ ID NO: 110463 - RNA, 22 nt, Human
ccagggaaugauauuuuugccu

SEQ ID NO: 110464 - RNA, 23 nt, Human
ccagggagguugauugguuaccc

SEQ ID NO: 110465 - RNA, 22 nt, Human
ccagggaugcagagguugcagu

SEQ ID NO: 110466 - RNA, 22 nt, Human
ccagggcagugggagaaggugc

SEQ ID NO: 110467 - RNA, 22 nt, Human
ccagggcaucacauccaguguu

SEQ ID NO: 110468 - RNA, 22 nt, Human
ccagggcaugggaagaacugaa

SEQ ID NO: 110469 - RNA, 22 nt, Human
cauuucugcagaauugcucuuc

SEQ ID NO: 110470 - RNA, 22 nt, Human
cauuucuguucucuuccuguac

SEQ ID NO: 110471 - RNA, 22 nt, Human
cauuugaaaauacucuuuucca

SEQ ID NO: 110472 - RNA, 22 nt, Human
cauuugaauggcauuucacuuu

SEQ ID NO: 110473 - RNA, 22 nt, Human
cauuugcaagagauaaauguuu

SEQ ID NO: 110474 - RNA, 22 nt, Human
cauuugcauaugaagaaguaag

SEQ ID NO: 110475 - RNA, 22 nt, Human
cauuugcuguauuuucagauuc

SEQ ID NO: 110476 - RNA, 22 nt, Human
cauuuggaaagagacuagagaa

SEQ ID NO: 110477 - RNA, 22 nt, Human
cauuuggaccaaaauagccaac

SEQ ID NO: 110478 - RNA, 22 nt, Human
cauuuggauuuugaagagagua

SEQ ID NO: 110479 - RNA, 22 nt, Human
cauuuguacagaacagcuuuau

SEQ ID NO: 110480 - RNA, 22 nt, Human
cauuuguagaguaggaaagagu

SEQ ID NO: 110481 - RNA, 22 nt, Human
cauuuguagcuauuuacuguau

SEQ ID NO: 110482 - RNA, 22 nt, Human
cauuuguauagugcuuagacca

SEQ ID NO: 110483 - RNA, 22 nt, Human
cauuugucaucacugagcugcc

SEQ ID NO: 110484 - RNA, 22 nt, Human
cauuuguucaaccauucucgcu

SEQ ID NO: 110485 - RNA, 22 nt, Human
cugucaaugacaguuauuuggg

SEQ ID NO: 110486 - RNA, 22 nt, Human
cugucaauuuauguugacaugc

SEQ ID NO: 110487 - RNA, 17 nt, Human
cugucacaauaccucgc

SEQ ID NO: 110488 - RNA, 22 nt, Human
cugucacacugauaucaggcuu

SEQ ID NO: 110489 - RNA, 22 nt, Human
cugucaccugccagcauaccca

SEQ ID NO: 110490 - RNA, 22 nt, Human
cugucaccuguucacugcagca

SEQ ID NO: 110491 - RNA, 22 nt, Human
cugucacuuaaauucaggcuga

SEQ ID NO: 110492 - RNA, 22 nt, Human
cugucagcacucuacuacagau

SEQ ID NO: 110493 - RNA, 19 nt, Human
cugucaggggcuggauguu

SEQ ID NO: 110494 - RNA, 22 nt, Human
cugucagguuucccaucugcaa

SEQ ID NO: 110495 - RNA, 22 nt, Human
cugucaguaggcucccaucauu

SEQ ID NO: 110496 - RNA, 22 nt, Human
cugucaucacaguugagcagcc

SEQ ID NO: 110497 - RNA, 22 nt, Human
cugucauuucuuuagcaauggg

SEQ ID NO: 110498 - RNA, 22 nt, Human
cugucauuuucuuccaauauaa

SEQ ID NO: 110499 - RNA, 19 nt, Human
cuguccacacacucgcuuc

SEQ ID NO: 110500 - RNA, 22 nt, Human
cuguccacauggagaaccuggu

SEQ ID NO: 110501 - RNA, 22 nt, Human
cuguccagcuuggcuccugggg

SEQ ID NO: 110502 - RNA, 22 nt, Human
cuguccagugacuuugggccau

SEQ ID NO: 110503 - RNA, 22 nt, Human
cuguccagugcagagaacagag

SEQ ID NO: 110504 - RNA, 20 nt, Human
cuguccauauuugaaaaugc

SEQ ID NO: 110505 - RNA, 22 nt, Human
cuguccaucagaaaggggcuua

SEQ ID NO: 110506 - RNA, 22 nt, Human
cuguccauuuucgugccuccuu

SEQ ID NO: 110507 - RNA, 22 nt, Human
cugucccacaagcagugugcac

SEQ ID NO: 110508 - RNA, 22 nt, Human
cugucccaggagcuguaagaca

SEQ ID NO: 110509 - RNA, 22 nt, Human
cugucccauacuaucuggguga

SEQ ID NO: 110510 - RNA, 21 nt, Human
cuguccccagugagcaccccc

SEQ ID NO: 110511 - RNA, 20 nt, Human
cuguccccgaggucaccagg

SEQ ID NO: 110512 - RNA, 22 nt, Human
cuguccugagauaaagaugagg

SEQ ID NO: 110513 - RNA, 22 nt, Human
cuguccugaggcagguggccug

SEQ ID NO: 110514 - RNA, 20 nt, Human
cuguccugaucuuuucagaa

SEQ ID NO: 110515 - RNA, 22 nt, Human
cuguccugcaguugggggcagg

SEQ ID NO: 110516 - RNA, 22 nt, Human
cuguccugcccacccugcaggg

SEQ ID NO: 110517 - RNA, 22 nt, Human
cuguccuggccgcccuugugag

SEQ ID NO: 110518 - RNA, 22 nt, Human
cuguccugggggugguccuugc

SEQ ID NO: 110519 - RNA, 22 nt, Human
cuguccugguacuuugagguuc

SEQ ID NO: 110520 - RNA, 21 nt, Human
cuguccuggucuagaggcaca

SEQ ID NO: 110521 - RNA, 22 nt, Human
cuguccugucugcuuuuaauuu

SEQ ID NO: 110522 - RNA, 22 nt, Human
cuguccugugcauugucagaug

SEQ ID NO: 110523 - RNA, 23 nt, Human
cuguccuuggucuuggcugagug

SEQ ID NO: 110524 - RNA, 22 nt, Human
cugucgccugguccucucugga

SEQ ID NO: 110525 - RNA, 22 nt, Human
cugucuacagaugaaauaagca

SEQ ID NO: 110526 - RNA, 22 nt, Human
cugucucagcaggaagucauca

SEQ ID NO: 110527 - RNA, 22 nt, Human
cugucuccuccuuuguucuuaa

SEQ ID NO: 110528 - RNA, 22 nt, Human
cugucucuguugccuguaggug

SEQ ID NO: 110529 - RNA, 22 nt, Human
cugucugaauccuaagcuuccu

SEQ ID NO: 110530 - RNA, 17 nt, Human
cugucugcgcaugaggu

SEQ ID NO: 110531 - RNA, 17 nt, Human
cugucugcugcuuccuc

SEQ ID NO: 110532 - RNA, 22 nt, Human
cugucuggaaugcaguacauag

SEQ ID NO: 110533 - RNA, 21 nt, Human
cugucuggccgcgggcuccgc

SEQ ID NO: 110534 - RNA, 19 nt, Human
cugucugguucauguguuc

SEQ ID NO: 110535 - RNA, 22 nt, Human
cugucuguagacauuuuugguu

SEQ ID NO: 110536 - RNA, 22 nt, Human
cugucuguggagcuucugaugu

SEQ ID NO: 110537 - RNA, 22 nt, Human
cugucuguuaucucaccagucc

SEQ ID NO: 110538 - RNA, 22 nt, Human
cugucuguucagauucauuacu

SEQ ID NO: 110539 - RNA, 22 nt, Human
cugucuguugaccauaguuugc

SEQ ID NO: 110540 - RNA, 22 nt, Human
cugucuguuucugauucaaccu

SEQ ID NO: 110541 - RNA, 22 nt, Human
cugucuguuuuguauacaggcc

SEQ ID NO: 110542 - RNA, 22 nt, Human
cugucuucuaccuucaaccucc

SEQ ID NO: 110543 - RNA, 18 nt, Human
cugucuuuuuucucucca

SEQ ID NO: 110544 - RNA, 22 nt, Human
cugugaaacuggacagcacuug

SEQ ID NO: 110545 - RNA, 22 nt, Human
cugugacaguuucucagacuuu

SEQ ID NO: 110546 - RNA, 20 nt, Human
cugugaccagagacccagga

SEQ ID NO: 110547 - RNA, 21 nt, Human
cugugaccuuucuuuccuccu

SEQ ID NO: 110548 - RNA, 21 nt, Human
cugugacucccugggcaaucc

SEQ ID NO: 110549 - RNA, 22 nt, Human
cugugagaugaccaacugacug

SEQ ID NO: 110550 - RNA, 22 nt, Human
cugugagauuuuuaaauaacuu

SEQ ID NO: 110551 - RNA, 22 nt, Human
cugugaggcggguggaguggag

SEQ ID NO: 110552 - RNA, 22 nt, Human
cugugaguaaugaccugucuug

SEQ ID NO: 110553 - RNA, 22 nt, Human
cugugagucuucagcaaguguu

SEQ ID NO: 110554 - RNA, 19 nt, Human
cugugagucuuguggccuc

SEQ ID NO: 110555 - RNA, 22 nt, Human
cugugagugacccuggucagca

SEQ ID NO: 110556 - RNA, 22 nt, Human
cugugaguucauugugccaccu

SEQ ID NO: 110557 - RNA, 22 nt, Human
cugugaucauucuugauuuaag

SEQ ID NO: 110558 - RNA, 22 nt, Human
cugugaugauggaaacuuucuu

SEQ ID NO: 110559 - RNA, 22 nt, Human
cugugauggucaggcccuaucu

SEQ ID NO: 110560 - RNA, 22 nt, Human
cugugcaaauaaagagcaacau

SEQ ID NO: 110561 - RNA, 22 nt, Human
cugugcaagacuuacuuuaaua

SEQ ID NO: 110562 - RNA, 22 nt, Human
cugugcaaugccuaaucacaaa

SEQ ID NO: 110563 - RNA, 22 nt, Human
cugugcaguaggucagggcugg

SEQ ID NO: 110564 - RNA, 22 nt, Human
cugugcaguccagcccuggaca

SEQ ID NO: 110565 - RNA, 22 nt, Human
cugugcauggccaucagugccc

SEQ ID NO: 110566 - RNA, 22 nt, Human
cugugccacugccccaggccuc

SEQ ID NO: 110567 - RNA, 22 nt, Human
cugugccacugggggccggcaa

SEQ ID NO: 110568 - RNA, 22 nt, Human
cugugccagccugucccaggag

SEQ ID NO: 110569 - RNA, 22 nt, Human
cugugccaguguauuccuguga

SEQ ID NO: 110570 - RNA, 22 nt, Human
cugugccauccgcuugaccugg

SEQ ID NO: 110571 - RNA, 22 nt, Human
cugugccaucugcacucucguc

SEQ ID NO: 110572 - RNA, 22 nt, Human
cugugccauucuuuguagcaug

SEQ ID NO: 110573 - RNA, 22 nt, Human
cugugcccaggccccuggggau

SEQ ID NO: 110574 - RNA, 22 nt, Human
cugugccucaguguccucgagu

SEQ ID NO: 110575 - RNA, 22 nt, Human
cugugccucccuuuacuuugag

SEQ ID NO: 110576 - RNA, 22 nt, Human
cugugccugccuuguucacuga

SEQ ID NO: 110577 - RNA, 22 nt, Human
cugugccuucugccuggaacau

SEQ ID NO: 110578 - RNA, 23 nt, Human
cugugcucagagggagggagagc

SEQ ID NO: 110579 - RNA, 22 nt, Human
cugugcugagugaugugacuua

SEQ ID NO: 110580 - RNA, 22 nt, Human
cugugcuggagaugggccagag

SEQ ID NO: 110581 - RNA, 22 nt, Human
cugugcuggcagaccuggaguu

SEQ ID NO: 110582 - RNA, 22 nt, Human
cugugcuggugaaacccacaga

SEQ ID NO: 110583 - RNA, 22 nt, Human
cugugcuuaccugcccagguga

SEQ ID NO: 110584 - RNA, 21 nt, Human
cugugcuucuuccuaagccag

SEQ ID NO: 110585 - RNA, 22 nt, Human
cugugcuuucaaaagaaggguu

SEQ ID NO: 110586 - RNA, 22 nt, Human
cugugcuuucgagaugugaucu

SEQ ID NO: 110587 - RNA, 21 nt, Human
cugugcuuuuuaagugugaug

SEQ ID NO: 110588 - RNA, 22 nt, Human
cuguggaauugaugcuuagugu

SEQ ID NO: 110589 - RNA, 22 nt, Human
ccauguguaaauuagauaacuc

SEQ ID NO: 110590 - RNA, 22 nt, Human
ccaugugucgggccugcagugg

SEQ ID NO: 110591 - RNA, 18 nt, Human
ccauguguuccuuuuggg

SEQ ID NO: 110592 - RNA, 22 nt, Human
ccauguguugauucucugcaga

SEQ ID NO: 110593 - RNA, 22 nt, Human
ccauguuguaucucuuaucggc

SEQ ID NO: 110594 - RNA, 22 nt, Human
ccauuaaagcaccacuguaaua

SEQ ID NO: 110595 - RNA, 22 nt, Human
cuuucaaaacgcucuguaugca

SEQ ID NO: 110596 - RNA, 22 nt, Human
cuuucacagcuugaaaaguauu

SEQ ID NO: 110597 - RNA, 22 nt, Human
cuuucacauaauugaccuugaa

SEQ ID NO: 110598 - RNA, 22 nt, Human
cuuucacuuuaaucugacaccu

SEQ ID NO: 110599 - RNA, 22 nt, Human
cuuucagguucuauaggaagcc

SEQ ID NO: 110600 - RNA, 22 nt, Human
cuuucagucuuuacaagguugc

SEQ ID NO: 110601 - RNA, 22 nt, Human
cuuucaguuacaguuacacaca

SEQ ID NO: 110602 - RNA, 22 nt, Human
cuuucauaaaggaaaugaugag

SEQ ID NO: 110603 - RNA, 22 nt, Human
cuuucauaauucagcacauuga

SEQ ID NO: 110604 - RNA, 22 nt, Human
cuuucaugaacagacaaggaac

SEQ ID NO: 110605 - RNA, 19 nt, Human
cuuucaugugguucuucuu

SEQ ID NO: 110606 - RNA, 22 nt, Human
cuuuccaaugucacuaugaauc

SEQ ID NO: 110607 - RNA, 22 nt, Human
cuuuccccaguauaucauugcc

SEQ ID NO: 110608 - RNA, 22 nt, Human
cuuucccugcuuagaaggauuu

SEQ ID NO: 110609 - RNA, 22 nt, Human
cuuuccuagauggccaucuuuc

SEQ ID NO: 110610 - RNA, 22 nt, Human
cuuuccugagaaaggagaagga

SEQ ID NO: 110611 - RNA, 19 nt, Human
ccaggccucuggggccugu

SEQ ID NO: 110612 - RNA, 22 nt, Human
ccaggccugcauucccucucag

SEQ ID NO: 110613 - RNA, 19 nt, Human
ccaggccugcgggcguugg

SEQ ID NO: 110614 - RNA, 22 nt, Human
ccaggccuggaccaugccaggg

SEQ ID NO: 110615 - RNA, 22 nt, Human
ccaggccuuucuucuuggucug

SEQ ID NO: 110616 - RNA, 22 nt, Human
ccaggcuagagugcaauggcau

SEQ ID NO: 110617 - RNA, 22 nt, Human
ccaggcucacagcaucccagga

SEQ ID NO: 110618 - RNA, 22 nt, Human
ccaggcucugagccucacucuu

SEQ ID NO: 110619 - RNA, 22 nt, Human
ccaggcucugcgcuggacaugg

SEQ ID NO: 110620 - RNA, 22 nt, Human
ccaggcugaauauguuccaggg

SEQ ID NO: 110621 - RNA, 22 nt, Human
ccaggcugcuguugguguccgc

SEQ ID NO: 110622 - RNA, 22 nt, Human
ccaggcugggcggggaaccugg

SEQ ID NO: 110623 - RNA, 22 nt, Human
ccaggcuucccugagaggcugc

SEQ ID NO: 110624 - RNA, 22 nt, Human
ccaggcuugguguguggucagg

SEQ ID NO: 110625 - RNA, 22 nt, Human
ccagggaaaggagguugacuug

SEQ ID NO: 110626 - RNA, 21 nt, Human
ccagggaagaaaugagggcag

SEQ ID NO: 110627 - RNA, 22 nt, Human
ccagggaaguaguugugagagc

SEQ ID NO: 110628 - RNA, 22 nt, Human
ccagggacuuugcauuguuuau

SEQ ID NO: 110629 - RNA, 22 nt, Human
ccagggagccuggugugucagc

SEQ ID NO: 110630 - RNA, 22 nt, Human
ccagggaguuuccaaucugaga

SEQ ID NO: 110631 - RNA, 22 nt, Human
ccagggaugccaagcuuuacca

SEQ ID NO: 110632 - RNA, 22 nt, Human
ccagggaugcuuucccaggacu

SEQ ID NO: 110633 - RNA, 22 nt, Human
ccagggcaacgcugucucagag

SEQ ID NO: 110634 - RNA, 22 nt, Human
ccagggcagcgccccuccacgc

SEQ ID NO: 110635 - RNA, 22 nt, Human
ccagggcagggaccacgugucu

SEQ ID NO: 110636 - RNA, 22 nt, Human
ccagggccugccacuuagcaag

SEQ ID NO: 110637 - RNA, 22 nt, Human
ccagggcucaggcucccagugg

SEQ ID NO: 110638 - RNA, 22 nt, Human
ccagggcugagcugugaccaug

SEQ ID NO: 110639 - RNA, 22 nt, Human
ccagggcugcucauuggcuggu

SEQ ID NO: 110640 - RNA, 20 nt, Human
ccagggcuggcuccugggau

SEQ ID NO: 110641 - RNA, 22 nt, Human
ccagggcuuaacuuuucaggag

SEQ ID NO: 110642 - RNA, 22 nt, Human
ccaggggaaacagggagcacuc

SEQ ID NO: 110643 - RNA, 22 nt, Human
ccaggggcugcagauccauggu

SEQ ID NO: 110644 - RNA, 22 nt, Human
ccaggggcuggugcugagcugg

SEQ ID NO: 110645 - RNA, 22 nt, Human
ccaggguggcguagaugcuggg

SEQ ID NO: 110646 - RNA, 22 nt, Human
ccagggugggaggcugaaggcg

SEQ ID NO: 110647 - RNA, 22 nt, Human
ccagggugggguccaggaacca

SEQ ID NO: 110648 - RNA, 22 nt, Human
ccaggguguagggauuccagau

SEQ ID NO: 110649 - RNA, 22 nt, Human
ccaggguugcuuuagauucuga

SEQ ID NO: 110650 - RNA, 22 nt, Human
ccaggguuuaaauucugacuau

SEQ ID NO: 110651 - RNA, 22 nt, Human
ccagguaccagucaaaucugua

SEQ ID NO: 110652 - RNA, 22 nt, Human
ccagguaggagagagggauccu

SEQ ID NO: 110653 - RNA, 22 nt, Human
ccagguaggagagucaacaugu

SEQ ID NO: 110654 - RNA, 22 nt, Human
ccaggucccuggaauuuaugag

SEQ ID NO: 110655 - RNA, 22 nt, Human
ccaggucugcgggcggcaggca

SEQ ID NO: 110656 - RNA, 22 nt, Human
ccaggucuggcacuggccaguc

SEQ ID NO: 110657 - RNA, 19 nt, Human
ccaggucuggggccagauu

SEQ ID NO: 110658 - RNA, 22 nt, Human
ccaggucuucacuuuacugaag

SEQ ID NO: 110659 - RNA, 21 nt, Human
ccaggucuugguccuuggacu

SEQ ID NO: 110660 - RNA, 22 nt, Human
ccaggucuuuggccuuggcacu

SEQ ID NO: 110661 - RNA, 22 nt, Human
ccaggugcaaacucccagcagg

SEQ ID NO: 110662 - RNA, 22 nt, Human
ccaggugcuagcaaucacuguc

SEQ ID NO: 110663 - RNA, 22 nt, Human
ccaggugcugaccggucagauu

SEQ ID NO: 110664 - RNA, 19 nt, Human
ccagguggaacugagguag

SEQ ID NO: 110665 - RNA, 22 nt, Human
ccagguggauaagguuucugga

SEQ ID NO: 110666 - RNA, 22 nt, Human
ccagguggcuucugcccgaugu

SEQ ID NO: 110667 - RNA, 22 nt, Human
ccaggugggaggaaagcagaga

SEQ ID NO: 110668 - RNA, 22 nt, Human
ccagguggugaaagugggcccu

SEQ ID NO: 110669 - RNA, 22 nt, Human
ccaggugguucaggucaccaua

SEQ ID NO: 110670 - RNA, 22 nt, Human
ccagguguaggacaccaaggga

SEQ ID NO: 110671 - RNA, 22 nt, Human
ccaggugugccagcagggacug

SEQ ID NO: 110672 - RNA, 22 nt, Human
ccagguguggggaggacucaca

SEQ ID NO: 110673 - RNA, 22 nt, Human
ccaggugugguggcauacaccu

SEQ ID NO: 110674 - RNA, 22 nt, Human
ccaggugugucaccauugccca

SEQ ID NO: 110675 - RNA, 22 nt, Human
ccaggugugucuggccccgaag

SEQ ID NO: 110676 - RNA, 22 nt, Human
ccagguucaaauagcuguguga

SEQ ID NO: 110677 - RNA, 22 nt, Human
ccaguaauuagacuuucaggca

SEQ ID NO: 110678 - RNA, 22 nt, Human
ccaguacaucgcauggugacca

SEQ ID NO: 110679 - RNA, 22 nt, Human
ccaguacugucuccaauauucc

SEQ ID NO: 110680 - RNA, 22 nt, Human
ccaguacuuugugcaacaaaug

SEQ ID NO: 110681 - RNA, 19 nt, Human
ccaguagagacagcugcag

SEQ ID NO: 110682 - RNA, 23 nt, Human
ccaguagcacaguuacccagugg

SEQ ID NO: 110683 - RNA, 19 nt, Human
ccaguaguauagcacaguc

SEQ ID NO: 110684 - RNA, 22 nt, Human
ccagucaaaaggaagucaaugu

SEQ ID NO: 110685 - RNA, 22 nt, Human
ccagucagagcagcgcucgcau

SEQ ID NO: 110686 - RNA, 22 nt, Human
ccagucagucaguugcuggcau

SEQ ID NO: 110687 - RNA, 20 nt, Human
ccaguccaccugagacaugu

SEQ ID NO: 110688 - RNA, 22 nt, Human
ccaguccaggccauggauuuug

SEQ ID NO: 110689 - RNA, 22 nt, Human
ccagucccgcaugguccagaau

SEQ ID NO: 110690 - RNA, 20 nt, Human
ccagucccugagcaccaggg

SEQ ID NO: 110691 - RNA, 22 nt, Human
ccaguccuagaagaggagucga

SEQ ID NO: 110692 - RNA, 22 nt, Human
ccaguccucagauggucugugc

SEQ ID NO: 110693 - RNA, 22 nt, Human
ccaguccugccacccugucuau

SEQ ID NO: 110694 - RNA, 22 nt, Human
ccaguccugcucccugaccacc

SEQ ID NO: 110695 - RNA, 22 nt, Human
ccaguccuuugagccaguucug

SEQ ID NO: 110696 - RNA, 23 nt, Human
ccagucucuuuccaaaaucacau

SEQ ID NO: 110697 - RNA, 22 nt, Human
ccagucuguacuuugcucuguu

SEQ ID NO: 110698 - RNA, 22 nt, Human
ccagucuguucucaccucugag

SEQ ID NO: 110699 - RNA, 22 nt, Human
ccagugauggugaucagauguu

SEQ ID NO: 110700 - RNA, 22 nt, Human
ccagugcacagccaggcaggug

SEQ ID NO: 110701 - RNA, 22 nt, Human
ccagugcauaaucaauacagcc

SEQ ID NO: 110702 - RNA, 22 nt, Human
ccagugcauugccgugucuagg

SEQ ID NO: 110703 - RNA, 18 nt, Human
ccagugccaagaguggca

SEQ ID NO: 110704 - RNA, 22 nt, Human
ccucucucugcaucuggagggc

SEQ ID NO: 110705 - RNA, 20 nt, Human
ccucucugaagaggucaucu

SEQ ID NO: 110706 - RNA, 20 nt, Human
ccucucugcaugcucccuga

SEQ ID NO: 110707 - RNA, 20 nt, Human
ccucucugcccugcaaggcc

SEQ ID NO: 110708 - RNA, 22 nt, Human
ccucucugucacaccaguggcc

SEQ ID NO: 110709 - RNA, 22 nt, Human
ccucucuuggauguggaugggu

SEQ ID NO: 110710 - RNA, 22 nt, Human
ccucugaguacagugauggauu

SEQ ID NO: 110711 - RNA, 22 nt, Human
ccucugcaaagaauuugucucc

SEQ ID NO: 110712 - RNA, 22 nt, Human
ccucugcacuucaccuuagcuc

SEQ ID NO: 110713 - RNA, 18 nt, Human
ccucugccauagccagca

SEQ ID NO: 110714 - RNA, 19 nt, Human
ccucugcuccaguuuccuu

SEQ ID NO: 110715 - RNA, 22 nt, Human
ccucugcugcuguugagcaccg

SEQ ID NO: 110716 - RNA, 22 nt, Human
ccucuggacuugggacagugag

SEQ ID NO: 110717 - RNA, 22 nt, Human
ccucuggcaacuucacagccca

SEQ ID NO: 110718 - RNA, 16 nt, Human
ccucuggcaauuagau

SEQ ID NO: 110719 - RNA, 22 nt, Human
ccucuggcagccagccaguugu

SEQ ID NO: 110720 - RNA, 22 nt, Human
ccucuggcauagcaaguggccu

SEQ ID NO: 110721 - RNA, 22 nt, Human
ccucuggccagagaaaggccag

SEQ ID NO: 110722 - RNA, 22 nt, Human
ccucuggccauucuuugaugga

SEQ ID NO: 110723 - RNA, 22 nt, Human
ccucuggccuaggccgggagag

SEQ ID NO: 110724 - RNA, 22 nt, Human
ccucuggcucacagcaccaacu

SEQ ID NO: 110725 - RNA, 22 nt, Human
ccucugggagacugcuacugag

SEQ ID NO: 110726 - RNA, 22 nt, Human
ccucugggcugccugcacgggu

SEQ ID NO: 110727 - RNA, 22 nt, Human
ccucuggguaucuguggaagua

SEQ ID NO: 110728 - RNA, 22 nt, Human
ccaguguucauaauuuuacacu

SEQ ID NO: 110729 - RNA, 22 nt, Human
ccaguguuccagagagcugaug

SEQ ID NO: 110730 - RNA, 22 nt, Human
ccaguguucugguguucauuuc

SEQ ID NO: 110731 - RNA, 22 nt, Human
ccaguguuuaggaauaaaaugu

SEQ ID NO: 110732 - RNA, 22 nt, Human
ccaguguuugaugggauuuuca

SEQ ID NO: 110733 - RNA, 22 nt, Human
ccaguuacaagugauucuuggu

SEQ ID NO: 110734 - RNA, 22 nt, Human
ccaguucuaaacauaaagcuaa

SEQ ID NO: 110735 - RNA, 23 nt, Human
ccaguucuccuuugaacagugac

SEQ ID NO: 110736 - RNA, 22 nt, Human
ccaguucugacacaagcacagu

SEQ ID NO: 110737 - RNA, 22 nt, Human
ccaguucugagaugaauaucca

SEQ ID NO: 110738 - RNA, 22 nt, Human
ccaguuuaggacacaugcccac

SEQ ID NO: 110739 - RNA, 22 nt, Human
ccaguuuauaagaaagaaaacc

SEQ ID NO: 110740 - RNA, 22 nt, Human
ccaguuucuuaaguaggaagaa

SEQ ID NO: 110741 - RNA, 22 nt, Human
ccaguuugaggaagaaguagau

SEQ ID NO: 110742 - RNA, 22 nt, Human
ccauaaaguaggaaacacuaca

SEQ ID NO: 110743 - RNA, 22 nt, Human
ccauaauauuaaaugcuuuugu

SEQ ID NO: 110744 - RNA, 22 nt, Human
ccauaaucuggcuuugagagag

SEQ ID NO: 110745 - RNA, 22 nt, Human
ccauacacacaccaaauuugua

SEQ ID NO: 110746 - RNA, 21 nt, Human
ccauaccuaccucaccugguu

SEQ ID NO: 110747 - RNA, 22 nt, Human
ccaucacaguccccaucgugau

SEQ ID NO: 110748 - RNA, 22 nt, Human
ccaucagacaauucuuucucuu

SEQ ID NO: 110749 - RNA, 22 nt, Human
ccaucagcaugggagcaugggc

SEQ ID NO: 110750 - RNA, 22 nt, Human
ccaucagcuccaguaucuucug

SEQ ID NO: 110751 - RNA, 23 nt, Human
ccaucaggccuccguguccagcc

SEQ ID NO: 110752 - RNA, 22 nt, Human
ccaucagugaaggagacagauu

SEQ ID NO: 110753 - RNA, 22 nt, Human
ccauccagaaacuuccaucccc

SEQ ID NO: 110754 - RNA, 21 nt, Human
ccauccaucucccuuugcugg

SEQ ID NO: 110755 - RNA, 22 nt, Human
ccauccauguggcagggcuggc

SEQ ID NO: 110756 - RNA, 22 nt, Human
ccauccauuuucuugcuugccu

SEQ ID NO: 110757 - RNA, 22 nt, Human
ccaucccugggccauguccccu

SEQ ID NO: 110758 - RNA, 22 nt, Human
ccaucccuucaccacagcagua

SEQ ID NO: 110759 - RNA, 22 nt, Human
ccauccuggccucgcuguccac

SEQ ID NO: 110760 - RNA, 22 nt, Human
ccaucgcuucaaaucucagacu

SEQ ID NO: 110761 - RNA, 22 nt, Human
ccaucucacucauguuucuaga

SEQ ID NO: 110762 - RNA, 22 nt, Human
ccaucuccacugucccugucaa

SEQ ID NO: 110763 - RNA, 22 nt, Human
ccaucugacugccacccaggcc

SEQ ID NO: 110764 - RNA, 22 nt, Human
ccaucuucucuugaaccuccuu

SEQ ID NO: 110765 - RNA, 22 nt, Human
ccaugagacagcaacugaaagu

SEQ ID NO: 110766 - RNA, 22 nt, Human
ccaugagcuucaacugacacag

SEQ ID NO: 110767 - RNA, 22 nt, Human
ccaugagcuuccuauauagggu

SEQ ID NO: 110768 - RNA, 22 nt, Human
ccaugcaaggagaacucucacu

SEQ ID NO: 110769 - RNA, 22 nt, Human
ccaugcaagggucugguccugc

SEQ ID NO: 110770 - RNA, 22 nt, Human
ccaugcaauauauauccucaag

SEQ ID NO: 110771 - RNA, 22 nt, Human
ccaugcauauaauagugccugg

SEQ ID NO: 110772 - RNA, 22 nt, Human
ccaugcaugccugaaauugcug

SEQ ID NO: 110773 - RNA, 22 nt, Human
ccaugccccaauacaggacacc

SEQ ID NO: 110774 - RNA, 22 nt, Human
ccaugcuaggaacucucaggga

SEQ ID NO: 110775 - RNA, 22 nt, Human
ccaugcucuggggaggucaagc

SEQ ID NO: 110776 - RNA, 19 nt, Human
ccauggagagagaugcauu

SEQ ID NO: 110777 - RNA, 22 nt, Human
ccauggagcaccucacagaggc

SEQ ID NO: 110778 - RNA, 19 nt, Human
ccauggcaaugaucugaug

SEQ ID NO: 110779 - RNA, 22 nt, Human
ccauggcauuuuaugugucuua

SEQ ID NO: 110780 - RNA, 20 nt, Human
ccauggccacaucugugcug

SEQ ID NO: 110781 - RNA, 22 nt, Human
ccauggccaggaaagccaaggu

SEQ ID NO: 110782 - RNA, 22 nt, Human
ccauggccgccgcugcucagga

SEQ ID NO: 110783 - RNA, 22 nt, Human
ccauggcuaaguaucuguagaa

SEQ ID NO: 110784 - RNA, 22 nt, Human
ccaugugucuccccuggaagua

SEQ ID NO: 110785 - RNA, 22 nt, Human
ccauuaaaauggaauguaguga

SEQ ID NO: 110786 - RNA, 22 nt, Human
ccauuaaguauuauuaaugauu

SEQ ID NO: 110787 - RNA, 22 nt, Human
ccauuacuuagaaaggaacuga

SEQ ID NO: 110788 - RNA, 22 nt, Human
ccauuacuuuccaauauaucag

SEQ ID NO: 110789 - RNA, 22 nt, Human
ccauucauagcaagcuacaucu

SEQ ID NO: 110790 - RNA, 22 nt, Human
ccauucugccaugcuucaucua

SEQ ID NO: 110791 - RNA, 19 nt, Human
ccauucugucucugccaca

SEQ ID NO: 110792 - RNA, 22 nt, Human
ccauugaaccccucuaggccac

SEQ ID NO: 110793 - RNA, 22 nt, Human
ccauugaaggcacuugagcaga

SEQ ID NO: 110794 - RNA, 22 nt, Human
ccauuggagaguuuuaagaagg

SEQ ID NO: 110795 - RNA, 22 nt, Human
ccauuuauagauguauuuggcu

SEQ ID NO: 110796 - RNA, 22 nt, Human
ccauuucacccacugcuuuagg

SEQ ID NO: 110797 - RNA, 22 nt, Human
ccauuucacuggguaguugugg

SEQ ID NO: 110798 - RNA, 19 nt, Human
ccauuucauauguauugug

SEQ ID NO: 110799 - RNA, 22 nt, Human
ccauuuggcaaacauuuuacag

SEQ ID NO: 110800 - RNA, 22 nt, Human
ccauuugguauagugaaaagga

SEQ ID NO: 110801 - RNA, 22 nt, Human
ccauuuguucgcccagcuccaa

SEQ ID NO: 110802 - RNA, 22 nt, Human
ccauuuguuuucgcuaccaugg

SEQ ID NO: 110803 - RNA, 22 nt, Human
ccauuuuauuagugacauuuag

SEQ ID NO: 110804 - RNA, 22 nt, Human
ccauuuugucugacuucuugcu

SEQ ID NO: 110805 - RNA, 22 nt, Human
ccauuuuuaaagagcuuaagua

SEQ ID NO: 110806 - RNA, 22 nt, Human
cccaaacaguuccugugguacu

SEQ ID NO: 110807 - RNA, 22 nt, Human
cccaaagggugucagcagcaag

SEQ ID NO: 110808 - RNA, 22 nt, Human
cccaacaacaugaaacuaccua

SEQ ID NO: 110809 - RNA, 21 nt, Human
cccaacccauuuccaguucau

SEQ ID NO: 110810 - RNA, 19 nt, Human
cccaacuggauccaucaua

SEQ ID NO: 110811 - RNA, 19 nt, Human
cccaacuugacuauuuucu

SEQ ID NO: 110812 - RNA, 22 nt, Human
cccaagagaucgcauguaguug

SEQ ID NO: 110813 - RNA, 22 nt, Human
ugugaggcuggcaggggccagg

SEQ ID NO: 110814 - RNA, 21 nt, Human
ugugaguccaucugagcagaa

SEQ ID NO: 110815 - RNA, 22 nt, Human
ugugagucuaggucaggguguu

SEQ ID NO: 110816 - RNA, 22 nt, Human
ugugagugaaugggucugaagu

SEQ ID NO: 110817 - RNA, 22 nt, Human
ugugaguucuuagaaagucagu

SEQ ID NO: 110818 - RNA, 22 nt, Human
ugugaguugcucuuuugcuacu

SEQ ID NO: 110819 - RNA, 22 nt, Human
ugugauaacuuuuacauuuucg

SEQ ID NO: 110820 - RNA, 22 nt, Human
ugugauauuugaguauugucaa

SEQ ID NO: 110821 - RNA, 22 nt, Human
ugugaucuuagacaacucacug

SEQ ID NO: 110822 - RNA, 22 nt, Human
ugugauuagcugaauacacugg

SEQ ID NO: 110823 - RNA, 22 nt, Human
ugugauuuauugaaaagagcuu

SEQ ID NO: 110824 - RNA, 22 nt, Human
ugugauuuccagccauuaaaaa

SEQ ID NO: 110825 - RNA, 18 nt, Human
ugugcaauauuaaccacc

SEQ ID NO: 110826 - RNA, 22 nt, Human
ugugcacaaugugcagguuugu

SEQ ID NO: 110827 - RNA, 23 nt, Human
ugugcacaucugacgggugaagg

SEQ ID NO: 110828 - RNA, 22 nt, Human
ugugcagaguugaagacaggag

SEQ ID NO: 110829 - RNA, 22 nt, Human
ugugcagcagcagcuguggaga

SEQ ID NO: 110830 - RNA, 22 nt, Human
ugugcaggugcaggaagggggc

SEQ ID NO: 110831 - RNA, 21 nt, Human
ugugcaguccaaugugcuagc

SEQ ID NO: 110832 - RNA, 22 nt, Human
ugugcaucaagagaaaacagug

SEQ ID NO: 110833 - RNA, 22 nt, Human
ugugcauggcaucauugcagcc

SEQ ID NO: 110834 - RNA, 22 nt, Human
ugugccaagaucaaacuuuucu

SEQ ID NO: 110835 - RNA, 22 nt, Human
ugugccaggcccuggggaccaa

SEQ ID NO: 110836 - RNA, 22 nt, Human
ugugccaucugauauaagagcc

SEQ ID NO: 110837 - RNA, 20 nt, Human
ugugcccagcagaggcugcc

SEQ ID NO: 110838 - RNA, 22 nt, Human
ugugcccauuccacuugaguac

SEQ ID NO: 110839 - RNA, 22 nt, Human
ugugcccuccugccaggggcug

SEQ ID NO: 110840 - RNA, 22 nt, Human
ugugcccuuuccugcuccucca

SEQ ID NO: 110841 - RNA, 22 nt, Human
ugugccugcuagaugguugucg

SEQ ID NO: 110842 - RNA, 22 nt, Human
ugugccuggcauucugggcuuc

SEQ ID NO: 110843 - RNA, 22 nt, Human
ugugccugugacagcgaccugg

SEQ ID NO: 110844 - RNA, 22 nt, Human
ugugccuuaugaauucuuucug

SEQ ID NO: 110845 - RNA, 22 nt, Human
ugugccuuucaucaugcuuuug

SEQ ID NO: 110846 - RNA, 22 nt, Human
ugugcgcgugcagcggaguguu

SEQ ID NO: 110847 - RNA, 22 nt, Human
ugugcuaaggcagucuaucaca

SEQ ID NO: 110848 - RNA, 22 nt, Human
ugugcuaaguauuuucuuauuu

SEQ ID NO: 110849 - RNA, 22 nt, Human
ugugcuauuuuugcauaugugu

SEQ ID NO: 110850 - RNA, 17 nt, Human
ugugcucucucacucag

SEQ ID NO: 110851 - RNA, 22 nt, Human
ugugcucuggaguugccuucac

SEQ ID NO: 110852 - RNA, 22 nt, Human
ugugcugcucucagugacagcc

SEQ ID NO: 110853 - RNA, 22 nt, Human
uguggaaaauuggaacguuccu

SEQ ID NO: 110854 - RNA, 22 nt, Human
uguggaacaaaauguugggaga

SEQ ID NO: 110855 - RNA, 22 nt, Human
uguggaagaaacaagacacuuu

SEQ ID NO: 110856 - RNA, 22 nt, Human
uguggaagccggugggaagcag

SEQ ID NO: 110857 - RNA, 22 nt, Human
uguggaaggggccccaugacca

SEQ ID NO: 110858 - RNA, 20 nt, Human
uguggacucaguuucuugcu

SEQ ID NO: 110859 - RNA, 22 nt, Human
uguggacuuuauuuuagggagg

SEQ ID NO: 110860 - RNA, 22 nt, Human
uguggagguuuaaguaauggga

SEQ ID NO: 110861 - RNA, 22 nt, Human
uguggaugaauaaagugcagac

SEQ ID NO: 110862 - RNA, 22 nt, Human
uguggcaaagaccauuucuuuc

SEQ ID NO: 110863 - RNA, 22 nt, Human
uguggcagaaagcauguggaca

SEQ ID NO: 110864 - RNA, 22 nt, Human
uguggcagaaccagaauucaaa

SEQ ID NO: 110865 - RNA, 22 nt, Human
uguggcagaaggcuaagguguc

SEQ ID NO: 110866 - RNA, 22 nt, Human
uguggcagaggaggcagcgucc

SEQ ID NO: 110867 - RNA, 22 nt, Human
uguggcagcugcugcaggagcu

SEQ ID NO: 110868 - RNA, 22 nt, Human
uguggcaggcuaggcuuuuugg

SEQ ID NO: 110869 - RNA, 22 nt, Human
uguggcaguaaaauugggcaac

SEQ ID NO: 110870 - RNA, 22 nt, Human
uggcuggcugucaguaggcugu

SEQ ID NO: 110871 - RNA, 20 nt, Human
uggcuggcuuguauuuccuu

SEQ ID NO: 110872 - RNA, 22 nt, Human
uggcugggccgggccuugugcc

SEQ ID NO: 110873 - RNA, 22 nt, Human
uggcugggggugcuauagcugc

SEQ ID NO: 110874 - RNA, 22 nt, Human
uggcugggugcuauccaguacu

SEQ ID NO: 110875 - RNA, 22 nt, Human
uggcuguagaacaguggauauu

SEQ ID NO: 110876 - RNA, 22 nt, Human
uggcugugaacaaagagaauaa

SEQ ID NO: 110877 - RNA, 22 nt, Human
uggcugugccucuuuccaggcc

SEQ ID NO: 110878 - RNA, 19 nt, Human
uggcuguggggaaaugcuu

SEQ ID NO: 110879 - RNA, 22 nt, Human
uggcugugguuuaucccaguuc

SEQ ID NO: 110880 - RNA, 22 nt, Human
uggcuuaagcgcaacucugucu

SEQ ID NO: 110881 - RNA, 22 nt, Human
uggcuuaauauuucauauuuaa

SEQ ID NO: 110882 - RNA, 22 nt, Human
uggcuucacaauuucauaacua

SEQ ID NO: 110883 - RNA, 22 nt, Human
uggcuucacacaggcacuuccg

SEQ ID NO: 110884 - RNA, 22 nt, Human
uggcuucacccguccuccccac

SEQ ID NO: 110885 - RNA, 22 nt, Human
uggcuucaccucagcaugaagg

SEQ ID NO: 110886 - RNA, 22 nt, Human
uggcuucaggcagaauuuagac

SEQ ID NO: 110887 - RNA, 22 nt, Human
uggcuucaggguugucuucagc

SEQ ID NO: 110888 - RNA, 22 nt, Human
uggcuucaucugcagcacugcc

SEQ ID NO: 110889 - RNA, 22 nt, Human
uggcuuccacugugugcccccu

SEQ ID NO: 110890 - RNA, 19 nt, Human
uggcuuccaucucucucau

SEQ ID NO: 110891 - RNA, 16 nt, Human
uggcuucccagagaua

SEQ ID NO: 110892 - RNA, 19 nt, Human
uggcuuccugacucucauc

SEQ ID NO: 110893 - RNA, 18 nt, Human
uggcuuccugcgggcugc

SEQ ID NO: 110894 - RNA, 22 nt, Human
uggcuucuaguuugaggaaaaa

SEQ ID NO: 110895 - RNA, 22 nt, Human
uggcuucucccuccccaucuag

SEQ ID NO: 110896 - RNA, 22 nt, Human
uggcuucucugugguggcuccc

SEQ ID NO: 110897 - RNA, 22 nt, Human
uggcuucucuguuuuaguauuu

SEQ ID NO: 110898 - RNA, 20 nt, Human
uggcuucucuucacuccugu

SEQ ID NO: 110899 - RNA, 22 nt, Human
uggcuucugagucuccugacau

SEQ ID NO: 110900 - RNA, 22 nt, Human
uggcuucugcauauuuuuagag

SEQ ID NO: 110901 - RNA, 21 nt, Human
uggcuucugccaauguuaaga

SEQ ID NO: 110902 - RNA, 22 nt, Human
uggcuucugcuuucaguggagg

SEQ ID NO: 110903 - RNA, 22 nt, Human
uggcuucuggccaggcacagga

SEQ ID NO: 110904 - RNA, 22 nt, Human
uggcuucugggacuugugagca

SEQ ID NO: 110905 - RNA, 22 nt, Human
uggcuucugggguggccugcau

SEQ ID NO: 110906 - RNA, 22 nt, Human
uggcuucuuacuagggcucagu

SEQ ID NO: 110907 - RNA, 22 nt, Human
uggcuucuuagaccaguggccu

SEQ ID NO: 110908 - RNA, 22 nt, Human
uggcuucuuguuugguuuaaga

SEQ ID NO: 110909 - RNA, 22 nt, Human
uggcuucuuugugacagcucuu

SEQ ID NO: 110910 - RNA, 22 nt, Human
uggcuuggacuaaauggaccgu

SEQ ID NO: 110911 - RNA, 22 nt, Human
uggcuuggcuaagaucuaagcu

SEQ ID NO: 110912 - RNA, 22 nt, Human
uggcuugggugucucagcucuu

SEQ ID NO: 110913 - RNA, 16 nt, Human
uggcuuggguuucaug

SEQ ID NO: 110914 - RNA, 22 nt, Human
uggcuugguaaggaccagcagg

SEQ ID NO: 110915 - RNA, 22 nt, Human
uggcuuuaaaucuguauucaua

SEQ ID NO: 110916 - RNA, 22 nt, Human
uggcuuuacugucauucuuaug

SEQ ID NO: 110917 - RNA, 23 nt, Human
uggcuuuauucacauaucugacc

SEQ ID NO: 110918 - RNA, 22 nt, Human
uggcuuucccccagcccaguug

SEQ ID NO: 110919 - RNA, 17 nt, Human
uggcuuuccugacacag

SEQ ID NO: 110920 - RNA, 22 nt, Human
uggcuuucucccccagcuucuc

SEQ ID NO: 110921 - RNA, 21 nt, Human
uggcuuugcccugcuugcccc

SEQ ID NO: 110922 - RNA, 22 nt, Human
ugggaaagacucaggacaggag

SEQ ID NO: 110923 - RNA, 22 nt, Human
gugggacucuucuuuggcagug

SEQ ID NO: 110924 - RNA, 22 nt, Human
gugggagaauggccuugcaaac

SEQ ID NO: 110925 - RNA, 22 nt, Human
gugggagcauggucccagugcc

SEQ ID NO: 110926 - RNA, 22 nt, Human
gugggagcugcggaggccuggg

SEQ ID NO: 110927 - RNA, 22 nt, Human
gugggagcugcuaccuccuucc

SEQ ID NO: 110928 - RNA, 22 nt, Human
gugggaugguagguagguaaua

SEQ ID NO: 110929 - RNA, 22 nt, Human
gugggcagagcaagggaacuca

SEQ ID NO: 110930 - RNA, 20 nt, Human
gugggcagagcaccaccugg

SEQ ID NO: 110931 - RNA, 22 nt, Human
gugggcagauuaauuucucaau

SEQ ID NO: 110932 - RNA, 22 nt, Human
gugggcagcaccagggaagugu

SEQ ID NO: 110933 - RNA, 20 nt, Human
gugggcagcaggcauacugg

SEQ ID NO: 110934 - RNA, 22 nt, Human
gugggcagccccuucaaggcca

SEQ ID NO: 110935 - RNA, 22 nt, Human
gugggcagccuccuuuauuuuc

SEQ ID NO: 110936 - RNA, 22 nt, Human
gugggcagguaggcaccagcua

SEQ ID NO: 110937 - RNA, 22 nt, Human
gugggcagucaugaaaucuaga

SEQ ID NO: 110938 - RNA, 22 nt, Human
gugggcagugugucaguaucuu

SEQ ID NO: 110939 - RNA, 22 nt, Human
gugggccuucaacccugucugg

SEQ ID NO: 110940 - RNA, 22 nt, Human
gugggccuugcagggugcaggg

SEQ ID NO: 110941 - RNA, 22 nt, Human
gugggcuggauuugcuugcaga

SEQ ID NO: 110942 - RNA, 22 nt, Human
gugggcuguuguucccuguucu

SEQ ID NO: 110943 - RNA, 22 nt, Human
gugggcuucccuuaagccagag

SEQ ID NO: 110944 - RNA, 22 nt, Human
gugggcuucuguuagggaggcu

SEQ ID NO: 110945 - RNA, 22 nt, Human
guggccaaggugcagagcagcu

SEQ ID NO: 110946 - RNA, 22 nt, Human
guggccaauuuccaucuguaag

SEQ ID NO: 110947 - RNA, 22 nt, Human
guggccagcugucagcacccuu

SEQ ID NO: 110948 - RNA, 22 nt, Human
guggccaggagagggugggaca

SEQ ID NO: 110949 - RNA, 22 nt, Human
guggccaggcguccgcgcggcu

SEQ ID NO: 110950 - RNA, 22 nt, Human
guggccaugugcuugcagggua

SEQ ID NO: 110951 - RNA, 22 nt, Human
guggccauuuggaaggcaagua

SEQ ID NO: 110952 - RNA, 22 nt, Human
guggcccagcccuacagaggac

SEQ ID NO: 110953 - RNA, 21 nt, Human
guggcccugguguggcugcac

SEQ ID NO: 110954 - RNA, 22 nt, Human
guggccuagaggugcaaggaac

SEQ ID NO: 110955 - RNA, 20 nt, Human
guggccucucacauucugag

SEQ ID NO: 110956 - RNA, 22 nt, Human
guggccugaugccagcccugug

SEQ ID NO: 110957 - RNA, 22 nt, Human
guggccugccgcaccccaauau

SEQ ID NO: 110958 - RNA, 22 nt, Human
guggccuggaguuugauguagg

SEQ ID NO: 110959 - RNA, 20 nt, Human
guggccuguccuguuguggg

SEQ ID NO: 110960 - RNA, 22 nt, Human
guggccugugcugucuccccaa

SEQ ID NO: 110961 - RNA, 22 nt, Human
guggccuuuuagaauaaacucu

SEQ ID NO: 110962 - RNA, 22 nt, Human
guggccuuuucaaguaggguau

SEQ ID NO: 110963 - RNA, 22 nt, Human
guggcuaggcccaacggcagga

SEQ ID NO: 110964 - RNA, 22 nt, Human
guggcuaguuggcagagaacag

SEQ ID NO: 110965 - RNA, 22 nt, Human
guggcucaguuaacuuccaugu

SEQ ID NO: 110966 - RNA, 21 nt, Human
guggcucugccaggacugaaa

SEQ ID NO: 110967 - RNA, 22 nt, Human
guggcucuggcuuuccaggcgg

SEQ ID NO: 110968 - RNA, 22 nt, Human
guggcugaguggucgagucaga

SEQ ID NO: 110969 - RNA, 22 nt, Human
guggcugcagagggcacagcau

SEQ ID NO: 110970 - RNA, 22 nt, Human
guggcugcagcccagcggcacg

SEQ ID NO: 110971 - RNA, 22 nt, Human
guggcugcagcucugaacggac

SEQ ID NO: 110972 - RNA, 22 nt, Human
guggcugcaucggggugaccag

SEQ ID NO: 110973 - RNA, 22 nt, Human
guggcugggcuccgagcggcuu

SEQ ID NO: 110974 - RNA, 22 nt, Human
guggcuucugcggugugcgcag

SEQ ID NO: 110975 - RNA, 22 nt, Human
guggcuugagcaggggcagagg

SEQ ID NO: 110976 - RNA, 22 nt, Human
guggcuuggaccagucacagug

SEQ ID NO: 110977 - RNA, 22 nt, Human
guggcuuuauaggaagaggaac

SEQ ID NO: 110978 - RNA, 22 nt, Human
gugggaagaacuucaaguggcu

SEQ ID NO: 110979 - RNA, 22 nt, Human
gugggaagagccaauuggggua

SEQ ID NO: 110980 - RNA, 22 nt, Human
gugggaagucucucggaggaag

SEQ ID NO: 110981 - RNA, 22 nt, Human
gugggacaaggaugaagauauu

SEQ ID NO: 110982 - RNA, 22 nt, Human
gugggagaaauuagcucuaguu

SEQ ID NO: 110983 - RNA, 22 nt, Human
gugggagccauuuccaguaugc

SEQ ID NO: 110984 - RNA, 22 nt, Human
gugggcagaacauuuguaggcu

SEQ ID NO: 110985 - RNA, 20 nt, Human
gugggcagaugugugcaugg

SEQ ID NO: 110986 - RNA, 22 nt, Human
gugggcaggaggcccugcccug

SEQ ID NO: 110987 - RNA, 22 nt, Human
gugggcagugccugacggauga

SEQ ID NO: 110988 - RNA, 22 nt, Human
gugggcagugguuugcgcgguc

SEQ ID NO: 110989 - RNA, 22 nt, Human
gugggcaguucaauucugggag

SEQ ID NO: 110990 - RNA, 22 nt, Human
gugggccacugggaggcaaggg

SEQ ID NO: 110991 - RNA, 22 nt, Human
gugggccagcauuuugaagagu

SEQ ID NO: 110992 - RNA, 22 nt, Human
gugggccaggacccgcuguccg

SEQ ID NO: 110993 - RNA, 22 nt, Human
gugggccaggccggagugcaga

SEQ ID NO: 110994 - RNA, 22 nt, Human
gugggccaggcgucuaggcccu

SEQ ID NO: 110995 - RNA, 22 nt, Human
gugggccuccccuuuacgagcc

SEQ ID NO: 110996 - RNA, 22 nt, Human
gugggcucaggccucugugggg

SEQ ID NO: 110997 - RNA, 22 nt, Human
gugggcuccccuggcaugucca

SEQ ID NO: 110998 - RNA, 22 nt, Human
gugggcugcccuugaggucagc

SEQ ID NO: 110999 - RNA, 22 nt, Human
gugggcuggacccuccugcucc

SEQ ID NO: 111000 - RNA, 22 nt, Human
gugggcuuugcuggauccuucc

SEQ ID NO: 111001 - RNA, 22 nt, Human
guggggaaaggaguggggcuca

SEQ ID NO: 111002 - RNA, 22 nt, Human
guggggaggcauucuucucccu

SEQ ID NO: 111003 - RNA, 22 nt, Human
guggggaguguucugugauugg

SEQ ID NO: 111004 - RNA, 22 nt, Human
guggggcaugcacgcugcuccu

SEQ ID NO: 111005 - RNA, 22 nt, Human
guggggcuaaaaacugugcagu

SEQ ID NO: 111006 - RNA, 22 nt, Human
guggggcucccaucuccuggcu

SEQ ID NO: 111007 - RNA, 22 nt, Human
guggggcugaguggagccagaa

SEQ ID NO: 111008 - RNA, 22 nt, Human
guggggcuggaagauggguacu

SEQ ID NO: 111009 - RNA, 22 nt, Human
gugggggaugcugaguuggaaa

SEQ ID NO: 111010 - RNA, 22 nt, Human
guggggggagcugcaagcugga

SEQ ID NO: 111011 - RNA, 22 nt, Human
gugggguagaucuuucucagga

SEQ ID NO: 111012 - RNA, 22 nt, Human
guggggugggcugaguuaggcc

SEQ ID NO: 111013 - RNA, 22 nt, Human
gugggugcugucaggcagggaa

SEQ ID NO: 111014 - RNA, 22 nt, Human
guggguggaggcgucgagggca

SEQ ID NO: 111015 - RNA, 22 nt, Human
guggguggaucaugaggucagg

SEQ ID NO: 111016 - RNA, 22 nt, Human
gugggugucaguaucuuuaacg

SEQ ID NO: 111017 - RNA, 22 nt, Human
gugggugucucaagaauggggg

SEQ ID NO: 111018 - RNA, 22 nt, Human
gugggugugauaagaccaaggg

SEQ ID NO: 111019 - RNA, 22 nt, Human
gugguaaucggauucuuaccgg

SEQ ID NO: 111020 - RNA, 22 nt, Human
gugguaccaguaggucagccau

SEQ ID NO: 111021 - RNA, 20 nt, Human
gugguauucaguaacaguga

SEQ ID NO: 111022 - RNA, 22 nt, Human
guggucagaauggagcccagga

SEQ ID NO: 111023 - RNA, 22 nt, Human
guggucagcagcagugggagug

SEQ ID NO: 111024 - RNA, 22 nt, Human
guggucaggcagugggagagaa

SEQ ID NO: 111025 - RNA, 22 nt, Human
guggucaggggcuguggcuaug

SEQ ID NO: 111026 - RNA, 22 nt, Human
guggucauggaagguccuaccu

SEQ ID NO: 111027 - RNA, 22 nt, Human
gugguccccagagcuguguaca

SEQ ID NO: 111028 - RNA, 22 nt, Human
guggucccuucuggcccugguc

SEQ ID NO: 111029 - RNA, 22 nt, Human
gugguccugcacccgcuuggcc

SEQ ID NO: 111030 - RNA, 22 nt, Human
gugguccugccagccaggucca

SEQ ID NO: 111031 - RNA, 22 nt, Human
guggugcaggccagcaggggcg

SEQ ID NO: 111032 - RNA, 22 nt, Human
ucuguucagcugccucagggua

SEQ ID NO: 111033 - RNA, 22 nt, Human
ucuguucagguuucagagaacu

SEQ ID NO: 111034 - RNA, 22 nt, Human
ucuguucauacagaguauagua

SEQ ID NO: 111035 - RNA, 22 nt, Human
ucuguucaugucuuuuuaagug

SEQ ID NO: 111036 - RNA, 22 nt, Human
ucuguuccuggucucuggagcu

SEQ ID NO: 111037 - RNA, 18 nt, Human
ucuguugagcagagaggc

SEQ ID NO: 111038 - RNA, 22 nt, Human
ucuguugcauaugcugcugggu

SEQ ID NO: 111039 - RNA, 21 nt, Human
ucuguuggaggccucucuucc

SEQ ID NO: 111040 - RNA, 22 nt, Human
ucuguuggcuugagauuuaauu

SEQ ID NO: 111041 - RNA, 22 nt, Human
ucuguuggcuuuuuaaaguugu

SEQ ID NO: 111042 - RNA, 22 nt, Human
ucuguuuagaugcuuuaucugu

SEQ ID NO: 111043 - RNA, 22 nt, Human
ucuguuuauauuucaaaccuuc

SEQ ID NO: 111044 - RNA, 22 nt, Human
ucuguuuccucuuguguaaagu

SEQ ID NO: 111045 - RNA, 22 nt, Human
ucuguuucuucuucuguuauau

SEQ ID NO: 111046 - RNA, 22 nt, Human
ucuguuuucauuugucuugaga

SEQ ID NO: 111047 - RNA, 22 nt, Human
ucuguuuuggucaccuuuauau

SEQ ID NO: 111048 - RNA, 22 nt, Human
ucuguuuuguaccagauacagc

SEQ ID NO: 111049 - RNA, 22 nt, Human
ucuguuuugugucucucuggug

SEQ ID NO: 111050 - RNA, 22 nt, Human
ucuuaaaccacacaugugcucu

SEQ ID NO: 111051 - RNA, 22 nt, Human
ucuuaaaggcacauagugucua

SEQ ID NO: 111052 - RNA, 22 nt, Human
ucuuaacuaucauuugaacacc

SEQ ID NO: 111053 - RNA, 22 nt, Human
ucuuaaugcuagccaauagaga

SEQ ID NO: 111054 - RNA, 22 nt, Human
ucuuacaagaaauaagccaaug

SEQ ID NO: 111055 - RNA, 22 nt, Human
ucuuacaagucacccgcuuucu

SEQ ID NO: 111056 - RNA, 22 nt, Human
ucuuacauauagcaugaguaca

SEQ ID NO: 111057 - RNA, 22 nt, Human
ucuuagaaaaaugguauguuuu

SEQ ID NO: 111058 - RNA, 22 nt, Human
ucuuagaaacuguaucgauuag

SEQ ID NO: 111059 - RNA, 22 nt, Human
ucuuagauguuagcucugugug

SEQ ID NO: 111060 - RNA, 22 nt, Human
ucuuagcaaauuuucuuugccu

SEQ ID NO: 111061 - RNA, 20 nt, Human
ucuuagcaucacuugcuuaa

SEQ ID NO: 111062 - RNA, 22 nt, Human
ucuuagucacagaggugagaaa

SEQ ID NO: 111063 - RNA, 22 nt, Human
guguccacggcugagaaugauu

SEQ ID NO: 111064 - RNA, 22 nt, Human
guguccaguuuuuucucugcug

SEQ ID NO: 111065 - RNA, 22 nt, Human
guguccaucagcagccacugug

SEQ ID NO: 111066 - RNA, 22 nt, Human
guguccauguuguucaggguga

SEQ ID NO: 111067 - RNA, 22 nt, Human
gugucccaggccucuggaauua

SEQ ID NO: 111068 - RNA, 22 nt, Human
guguccugaucaauugagcugg

SEQ ID NO: 111069 - RNA, 22 nt, Human
guguccugggcugguagagcug

SEQ ID NO: 111070 - RNA, 22 nt, Human
guguccuuauaagaagagaugc

SEQ ID NO: 111071 - RNA, 18 nt, Human
guguccuuugcaagaaac

SEQ ID NO: 111072 - RNA, 22 nt, Human
guguccuuuugaggguccacag

SEQ ID NO: 111073 - RNA, 22 nt, Human
gugucuauaaugaaaugcacuu

SEQ ID NO: 111074 - RNA, 22 nt, Human
gugucucuaucuaugccugaag

SEQ ID NO: 111075 - RNA, 22 nt, Human
gugucugcucagcuugcuagaa

SEQ ID NO: 111076 - RNA, 22 nt, Human
gugucugcuugcugagcauuua

SEQ ID NO: 111077 - RNA, 18 nt, Human
gugucuuauuacaguggg

SEQ ID NO: 111078 - RNA, 22 nt, Human
gugucuuuugaggcugaccagu

SEQ ID NO: 111079 - RNA, 22 nt, Human
gugugaaaaugugcacaauaug

SEQ ID NO: 111080 - RNA, 22 nt, Human
gugugaaaguaauugcgguuuu

SEQ ID NO: 111081 - RNA, 22 nt, Human
gugugaaaugguucucuuuguu

SEQ ID NO: 111082 - RNA, 20 nt, Human
gugugaccuccuguggaugc

SEQ ID NO: 111083 - RNA, 22 nt, Human
gugugagaagggaauguaaagc

SEQ ID NO: 111084 - RNA, 22 nt, Human
gugugagagaagcugccaugga

SEQ ID NO: 111085 - RNA, 22 nt, Human
gugugagggacagagaaagggg

SEQ ID NO: 111086 - RNA, 21 nt, Human
gugugaguagcaugugucuca

SEQ ID NO: 111087 - RNA, 23 nt, Human
gugugcaggauuauuugcagaca

SEQ ID NO: 111088 - RNA, 22 nt, Human
gugugcaggcuugaggauuagg

SEQ ID NO: 111089 - RNA, 18 nt, Human
gugugcaguugcaggggu

SEQ ID NO: 111090 - RNA, 22 nt, Human
gugugcauauguguggcucucc

SEQ ID NO: 111091 - RNA, 22 nt, Human
gugugcaucuugguaauggagc

SEQ ID NO: 111092 - RNA, 22 nt, Human
gugugccaacaaaagacagugc

SEQ ID NO: 111093 - RNA, 23 nt, Human
gugugccaagcacugugccagga

SEQ ID NO: 111094 - RNA, 22 nt, Human
gugugcgcgcgcgucccgggug

SEQ ID NO: 111095 - RNA, 22 nt, Human
gugugcgcgcucauaggugugu

SEQ ID NO: 111096 - RNA, 22 nt, Human
gugugcguuccuaguaaacgug

SEQ ID NO: 111097 - RNA, 22 nt, Human
gugugcucaagggcaggaaccu

SEQ ID NO: 111098 - RNA, 22 nt, Human
gugugcucuggaggcuagauuu

SEQ ID NO: 111099 - RNA, 21 nt, Human
gugugcugauacauuggagaa

SEQ ID NO: 111100 - RNA, 22 nt, Human
guguggaaagaguggccucuca

SEQ ID NO: 111101 - RNA, 21 nt, Human
guguggauaugugacaggugg

SEQ ID NO: 111102 - RNA, 22 nt, Human
guguggcaaggugagaaguggg

SEQ ID NO: 111103 - RNA, 19 nt, Human
guguggcagagagugacca

SEQ ID NO: 111104 - RNA, 23 nt, Human
guguggccccagggccuccucgc

SEQ ID NO: 111105 - RNA, 22 nt, Human
guguggcuaccucagaggagca

SEQ ID NO: 111106 - RNA, 22 nt, Human
guguggcugauugacaugguca

SEQ ID NO: 111107 - RNA, 22 nt, Human
gugugggaaggcuaggaugcug

SEQ ID NO: 111108 - RNA, 22 nt, Human
gugugggcugcagaggcacagc

SEQ ID NO: 111109 - RNA, 22 nt, Human
gugugggggcagcucugauaug

SEQ ID NO: 111110 - RNA, 22 nt, Human
guguggggucuucucuuggccu

SEQ ID NO: 111111 - RNA, 22 nt, Human
guguggguguacuguucuagau

SEQ ID NO: 111112 - RNA, 22 nt, Human
guguguaaugcuuauugugcuu

SEQ ID NO: 111113 - RNA, 22 nt, Human
guguguacaaauuucauguaaa

SEQ ID NO: 111114 - RNA, 22 nt, Human
guguguauguagaacuauguau

SEQ ID NO: 111115 - RNA, 22 nt, Human
guguguauuauugcauacacau

SEQ ID NO: 111116 - RNA, 22 nt, Human
gugugucagagcucagagaagu

SEQ ID NO: 111117 - RNA, 22 nt, Human
guguguccaaggcacggaugac

SEQ ID NO: 111118 - RNA, 22 nt, Human
gugugucccuccucuccugagu

SEQ ID NO: 111119 - RNA, 22 nt, Human
guguguccucaguaguggcaug

SEQ ID NO: 111120 - RNA, 22 nt, Human
guguguccuguuuuaaaauagu

SEQ ID NO: 111121 - RNA, 22 nt, Human
gugugucuuucauuucaugagg

SEQ ID NO: 111122 - RNA, 22 nt, Human
guguguggaaugcucauuuauu

SEQ ID NO: 111123 - RNA, 22 nt, Human
guguguggcaaacugggccugc

SEQ ID NO: 111124 - RNA, 22 nt, Human
gugugugugccugcacacacac

SEQ ID NO: 111125 - RNA, 22 nt, Human
guguguguucaauaaauuuaag

SEQ ID NO: 111126 - RNA, 22 nt, Human
guguuaaaaaucccaugauaug

SEQ ID NO: 111127 - RNA, 22 nt, Human
guguuaaaaugcuuuauaguag

SEQ ID NO: 111128 - RNA, 22 nt, Human
guguuaaacauguucacagcau

SEQ ID NO: 111129 - RNA, 22 nt, Human
guguuaauggcuaugaacugau

SEQ ID NO: 111130 - RNA, 22 nt, Human
guguuacauauucuaaaaugcu

SEQ ID NO: 111131 - RNA, 22 nt, Human
guguuacucaagagauagcuuu

SEQ ID NO: 111132 - RNA, 22 nt, Human
guguuacugacacauuuuuguc

SEQ ID NO: 111133 - RNA, 23 nt, Human
guguucaucccagucugugcaau

SEQ ID NO: 111134 - RNA, 22 nt, Human
guguuccuggacagcaagugag

SEQ ID NO: 111135 - RNA, 22 nt, Human
guguucucuagagcuguacaaa

SEQ ID NO: 111136 - RNA, 22 nt, Human
guguucucucuacaggaauuua

SEQ ID NO: 111137 - RNA, 22 nt, Human
guguugacacagccaucuuguc

SEQ ID NO: 111138 - RNA, 22 nt, Human
guguugcucuguuuggggguug

SEQ ID NO: 111139 - RNA, 22 nt, Human
guguuuacagauaaagugagcu

SEQ ID NO: 111140 - RNA, 19 nt, Human
guguuuacugugugcagaa

SEQ ID NO: 111141 - RNA, 22 nt, Human
guuccauaucacagcagacgaa

SEQ ID NO: 111142 - RNA, 22 nt, Human
guucccaugccuccaagcuuca

SEQ ID NO: 111143 - RNA, 22 nt, Human
guucccauuggggaucuugggc

SEQ ID NO: 111144 - RNA, 22 nt, Human
guuccccuuguguuguugccca

SEQ ID NO: 111145 - RNA, 22 nt, Human
guucccuuucguauggacuggg

SEQ ID NO: 111146 - RNA, 22 nt, Human
guuccuaaccagcagagaaaca

SEQ ID NO: 111147 - RNA, 22 nt, Human
guuccuaagcuguggcccugga

SEQ ID NO: 111148 - RNA, 22 nt, Human
guuccucaguuguaaaaaaugu

SEQ ID NO: 111149 - RNA, 22 nt, Human
guuccucaugaguaccccuuaa

SEQ ID NO: 111150 - RNA, 22 nt, Human
guuccugaagggacuggugcag

SEQ ID NO: 111151 - RNA, 22 nt, Human
guuccugacuguggaguuuggu

SEQ ID NO: 111152 - RNA, 22 nt, Human
guuccuuggaagaacuugaggu

SEQ ID NO: 111153 - RNA, 22 nt, Human
guucguugcuugguuuccucua

SEQ ID NO: 111154 - RNA, 22 nt, Human
guucuaagggcuugaaauguau

SEQ ID NO: 111155 - RNA, 22 nt, Human
guucuaauuuggggcuccuuag

SEQ ID NO: 111156 - RNA, 21 nt, Human
guucuacaguuuuagaauucc

SEQ ID NO: 111157 - RNA, 22 nt, Human
guucuagaugacugagcagcug

SEQ ID NO: 111158 - RNA, 22 nt, Human
guucuauucauugcuccacgag

SEQ ID NO: 111159 - RNA, 22 nt, Human
guucuauuucaguaagcaggca

SEQ ID NO: 111160 - RNA, 21 nt, Human
guucuauuuugcaaacuucug

SEQ ID NO: 111161 - RNA, 20 nt, Human
guucucacugaucugcaggg

SEQ ID NO: 111162 - RNA, 22 nt, Human
guucucauaguggaaaauaggu

SEQ ID NO: 111163 - RNA, 22 nt, Human
guucucucucuugccugggugg

SEQ ID NO: 111164 - RNA, 22 nt, Human
guucucucugcuuccaagaugg

SEQ ID NO: 111165 - RNA, 22 nt, Human
guucugaaugugccuguacucu

SEQ ID NO: 111166 - RNA, 22 nt, Human
guucugcacaucacacaggugc

SEQ ID NO: 111167 - RNA, 22 nt, Human
guucugcagacuuggaaggugg

SEQ ID NO: 111168 - RNA, 22 nt, Human
guucuggaaagcaagaaagagu

SEQ ID NO: 111169 - RNA, 22 nt, Human
guucuggaggagagccuggugu

SEQ ID NO: 111170 - RNA, 21 nt, Human
guucuggaggcugcaagucca

SEQ ID NO: 111171 - RNA, 22 nt, Human
guucuggaguggugccaggccu

SEQ ID NO: 111172 - RNA, 22 nt, Human
guucugggagaucuugagcuuc

SEQ ID NO: 111173 - RNA, 22 nt, Human
guucugucugagcaccacagga

SEQ ID NO: 111174 - RNA, 22 nt, Human
guucuuaaagauucaucaagca

SEQ ID NO: 111175 - RNA, 21 nt, Human
guucuuaguuauauucucaau

SEQ ID NO: 111176 - RNA, 22 nt, Human
guucuucacauuucauugagga

SEQ ID NO: 111177 - RNA, 22 nt, Human
guucuucagauuccauuucagu

SEQ ID NO: 111178 - RNA, 22 nt, Human
guucuucagcauuagaagucau

SEQ ID NO: 111179 - RNA, 22 nt, Human
guucuucaggccauccucccag

SEQ ID NO: 111180 - RNA, 22 nt, Human
guucuccaggggcuguucaucu

SEQ ID NO: 111181 - RNA, 22 nt, Human
guucuccauucagcuuccugug

SEQ ID NO: 111182 - RNA, 22 nt, Human
guucuccuggcucccacccugc

SEQ ID NO: 111183 - RNA, 22 nt, Human
guucucguuucugaagaaaagu

SEQ ID NO: 111184 - RNA, 22 nt, Human
guucucucaaacuuuguguuug

SEQ ID NO: 111185 - RNA, 16 nt, Human
guucucucacuguacc

SEQ ID NO: 111186 - RNA, 22 nt, Human
guucucucagccuuuguuauua

SEQ ID NO: 111187 - RNA, 22 nt, Human
guucucugaguccuggcaaaau

SEQ ID NO: 111188 - RNA, 22 nt, Human
guucucugccggcaccuacccg

SEQ ID NO: 111189 - RNA, 22 nt, Human
guucugccuguggcuucugugg

SEQ ID NO: 111190 - RNA, 22 nt, Human
guucugcuguaauaucucugcu

SEQ ID NO: 111191 - RNA, 22 nt, Human
guucugcugugucucagcaggu

SEQ ID NO: 111192 - RNA, 22 nt, Human
guucugcuuaaauuauugaucc

SEQ ID NO: 111193 - RNA, 22 nt, Human
guucugcuuccuugcuugcgca

SEQ ID NO: 111194 - RNA, 22 nt, Human
guucuggaagcuuuugagcaac

SEQ ID NO: 111195 - RNA, 22 nt, Human
guucugggugaugagguuggcu

SEQ ID NO: 111196 - RNA, 22 nt, Human
guucuggguucuggguuauugg

SEQ ID NO: 111197 - RNA, 22 nt, Human
guucuguccuccuaccaggcau

SEQ ID NO: 111198 - RNA, 22 nt, Human
guucuuaagaccacaauaaaaa

SEQ ID NO: 111199 - RNA, 22 nt, Human
guucuucagaggggaaagaacc

SEQ ID NO: 111200 - RNA, 22 nt, Human
guucuucagcccucagguccua

SEQ ID NO: 111201 - RNA, 22 nt, Human
guucuucagucacaucacagaa

SEQ ID NO: 111202 - RNA, 22 nt, Human
guucuucauuacaagggaacca

SEQ ID NO: 111203 - RNA, 22 nt, Human
guucuuccucauugcuuugaag

SEQ ID NO: 111204 - RNA, 22 nt, Human
guucuuggaccagcagcauuga

SEQ ID NO: 111205 - RNA, 22 nt, Human
guugaaagagcauggacuugaa

SEQ ID NO: 111206 - RNA, 22 nt, Human
guugaauauaccugcauuugug

SEQ ID NO: 111207 - RNA, 22 nt, Human
guugaauaucguguucuuguuu

SEQ ID NO: 111208 - RNA, 22 nt, Human
guugaauauuuuaagaguuuug

SEQ ID NO: 111209 - RNA, 22 nt, Human
guugaggaggcacucacuguca

SEQ ID NO: 111210 - RNA, 22 nt, Human
guugaggagguucagggugguu

SEQ ID NO: 111211 - RNA, 22 nt, Human
guugaguggguuaggaugcuga

SEQ ID NO: 111212 - RNA, 22 nt, Human
guugauuugaagagcagaaagu

SEQ ID NO: 111213 - RNA, 22 nt, Human
guugcaaacuccuacuucucau

SEQ ID NO: 111214 - RNA, 22 nt, Human
guugcaaaugggaagaugguua

SEQ ID NO: 111215 - RNA, 22 nt, Human
guugcaggaggauggcugcaua

SEQ ID NO: 111216 - RNA, 22 nt, Human
guugcauuaaucugcucaggcu

SEQ ID NO: 111217 - RNA, 22 nt, Human
guugcucaaugggaauaagaau

SEQ ID NO: 111218 - RNA, 22 nt, Human
guugcugauuaacacuuugagu

SEQ ID NO: 111219 - RNA, 22 nt, Human
guugcuuguuaguggugagguu

SEQ ID NO: 111220 - RNA, 22 nt, Human
guuggaagaagacuguaaauua

SEQ ID NO: 111221 - RNA, 22 nt, Human
guuggcaaguguuccuuccucu

SEQ ID NO: 111222 - RNA, 19 nt, Human
guuggcacugaaaauggcu

SEQ ID NO: 111223 - RNA, 22 nt, Human
guuggcuauagggagauggggc

SEQ ID NO: 111224 - RNA, 22 nt, Human
guuggcuaugagagcuuuagug

SEQ ID NO: 111225 - RNA, 18 nt, Human
guuggcugcuguggcugg

SEQ ID NO: 111226 - RNA, 22 nt, Human
guugggccccagagguccaggc

SEQ ID NO: 111227 - RNA, 22 nt, Human
guugggcucauuacagccugcu

SEQ ID NO: 111228 - RNA, 22 nt, Human
guugggguaccuugaggcuggg

SEQ ID NO: 111229 - RNA, 22 nt, Human
guuggugaguuucugaucacaa

SEQ ID NO: 111230 - RNA, 22 nt, Human
guuguacaauuguuucacaugc

SEQ ID NO: 111231 - RNA, 22 nt, Human
guuguacaggcagggaaacuga

SEQ ID NO: 111232 - RNA, 22 nt, Human
guuguauagagggcaugaaucu

SEQ ID NO: 111233 - RNA, 22 nt, Human
guuguauauguagagaaugguc

SEQ ID NO: 111234 - RNA, 22 nt, Human
guuguauuugccugaaugcagu

SEQ ID NO: 111235 - RNA, 22 nt, Human
guugucagguaaaacaguaugg

SEQ ID NO: 111236 - RNA, 22 nt, Human
guugucaucaccguuguuauca

SEQ ID NO: 111237 - RNA, 22 nt, Human
guugugauuguagcuaaacuag

SEQ ID NO: 111238 - RNA, 22 nt, Human
guugugcaaacacuggggucug

SEQ ID NO: 111239 - RNA, 22 nt, Human
guugugcauuuaugaagaaguu

SEQ ID NO: 111240 - RNA, 21 nt, Human
guugugguuggggcugcagcu

SEQ ID NO: 111241 - RNA, 22 nt, Human
guuguuuuauaauugauugcaa

SEQ ID NO: 111242 - RNA, 22 nt, Human
guuguuuuauugugagucccau

SEQ ID NO: 111243 - RNA, 22 nt, Human
guuguuuucagcaguuuaugac

SEQ ID NO: 111244 - RNA, 22 nt, Human
guuguuuugcaggauccuuaca

SEQ ID NO: 111245 - RNA, 22 nt, Human
guuguuuugcugucugucuuag

SEQ ID NO: 111246 - RNA, 22 nt, Human
guuuaaaguagcuuccuuuugg

SEQ ID NO: 111247 - RNA, 22 nt, Human
guuuaacugggagugugggaaa

SEQ ID NO: 111248 - RNA, 22 nt, Human
guuuaagaaaauucauguuguu

SEQ ID NO: 111249 - RNA, 22 nt, Human
guuuaauucccacaccugcccu

SEQ ID NO: 111250 - RNA, 22 nt, Human
uacagcugaguuuagguacagg

SEQ ID NO: 111251 - RNA, 22 nt, Human
uacagcuuaaaagaugcauuua

SEQ ID NO: 111252 - RNA, 22 nt, Human
uacagcuuauccagcuugauag

SEQ ID NO: 111253 - RNA, 22 nt, Human
uacagcuucagugugccccagu

SEQ ID NO: 111254 - RNA, 22 nt, Human
uacagcuugacccauaaugucu

SEQ ID NO: 111255 - RNA, 22 nt, Human
uacagcuuuauacccaucaaaa

SEQ ID NO: 111256 - RNA, 22 nt, Human
uacagcuuuugcagcuguuuug

SEQ ID NO: 111257 - RNA, 22 nt, Human
uacaggaacugggcaggacauu

SEQ ID NO: 111258 - RNA, 22 nt, Human
uacaggaaggagcacaucggga

SEQ ID NO: 111259 - RNA, 22 nt, Human
uacaggaaguuacagacuauga

SEQ ID NO: 111260 - RNA, 22 nt, Human
uacaggacagauguuuacagga

SEQ ID NO: 111261 - RNA, 22 nt, Human
uacaggacauugugcauuuguc

SEQ ID NO: 111262 - RNA, 20 nt, Human
uacaggagugaguggguggg

SEQ ID NO: 111263 - RNA, 22 nt, Human
uacaggauaucacuucauuucu

SEQ ID NO: 111264 - RNA, 19 nt, Human
uacaggauccucauacagu

SEQ ID NO: 111265 - RNA, 22 nt, Human
uacaggcauguagcauggugau

SEQ ID NO: 111266 - RNA, 22 nt, Human
uacaggcuagggagagugacug

SEQ ID NO: 111267 - RNA, 20 nt, Human
uacaggcucugagagaugau

SEQ ID NO: 111268 - RNA, 22 nt, Human
uacaggcugcagggcuagaggg

SEQ ID NO: 111269 - RNA, 22 nt, Human
uacagggaaugggacauaaauc

SEQ ID NO: 111270 - RNA, 22 nt, Human
uacagggacucccgcagagaua

SEQ ID NO: 111271 - RNA, 22 nt, Human
uacaggguauagguacagauga

SEQ ID NO: 111272 - RNA, 22 nt, Human
uacaggugguaaaaauauuguu

SEQ ID NO: 111273 - RNA, 22 nt, Human
uacagguuccaggaauuaggac

SEQ ID NO: 111274 - RNA, 22 nt, Human
uacaguaacauguuguacaagc

SEQ ID NO: 111275 - RNA, 22 nt, Human
uacaguaagaugaaauagcaau

SEQ ID NO: 111276 - RNA, 22 nt, Human
uacaguaauaaaaugagcuaca

SEQ ID NO: 111277 - RNA, 22 nt, Human
uacaguaccagaaaugcuaaga

SEQ ID NO: 111278 - RNA, 22 nt, Human
uacaguacccugaugaacuaaa

SEQ ID NO: 111279 - RNA, 22 nt, Human
uacaguagaaugcggugccagu

SEQ ID NO: 111280 - RNA, 22 nt, Human
uacaguagacaauguuaguaug

SEQ ID NO: 111281 - RNA, 22 nt, Human
uacaguauagaauguguauuaa

SEQ ID NO: 111282 - RNA, 22 nt, Human
uacaguauauacuguguguaga

SEQ ID NO: 111283 - RNA, 22 nt, Human
uacaguauuacuguguuguuuu

SEQ ID NO: 111284 - RNA, 22 nt, Human
uacagucaauacuaggaccaua

SEQ ID NO: 111285 - RNA, 22 nt, Human
uacagucacauucugaggucuu

SEQ ID NO: 111286 - RNA, 22 nt, Human
uacagucagagugccuuucuaa

SEQ ID NO: 111287 - RNA, 22 nt, Human
uacagucucugauaacugucag

SEQ ID NO: 111288 - RNA, 22 nt, Human
uacagugacagauagggauaga

SEQ ID NO: 111289 - RNA, 21 nt, Human
uacagugagguguuaggaugu

SEQ ID NO: 111290 - RNA, 22 nt, Human
uacagugaguggcagagccaga

SEQ ID NO: 111291 - RNA, 22 nt, Human
uacagugauagagaguagcuau

SEQ ID NO: 111292 - RNA, 22 nt, Human
uacagugcaaugugauguagau

SEQ ID NO: 111293 - RNA, 22 nt, Human
uacagugcacauuucuuaggaa

SEQ ID NO: 111294 - RNA, 22 nt, Human
uacagugcuagaaccugcugua

SEQ ID NO: 111295 - RNA, 22 nt, Human
uacagugcuuuuugguggagaa

SEQ ID NO: 111296 - RNA, 22 nt, Human
uacaguuacuguuauaugugcu

SEQ ID NO: 111297 - RNA, 20 nt, Human
uacaguucuguagaaguaga

SEQ ID NO: 111298 - RNA, 22 nt, Human
uacaguuuaacacuuuggagaa

SEQ ID NO: 111299 - RNA, 22 nt, Human
uacaguuucccagcagaugcaa

SEQ ID NO: 111300 - RNA, 22 nt, Human
uacaguuucucauuaugcucuc

SEQ ID NO: 111301 - RNA, 22 nt, Human
uacaguuuguauggucaggaau

SEQ ID NO: 111302 - RNA, 22 nt, Human
uacaguuuguuacauuguuagu

SEQ ID NO: 111303 - RNA, 22 nt, Human
uacauaauuaaucuuuaaguuc

SEQ ID NO: 111304 - RNA, 22 nt, Human
uacauaauugucuuuguccuca

SEQ ID NO: 111305 - RNA, 22 nt, Human
uacauagagaaguuacagugga

SEQ ID NO: 111306 - RNA, 21 nt, Human
uacauagaggugauaucuguu

SEQ ID NO: 111307 - RNA, 22 nt, Human
uacauagugaacauuuacagag

SEQ ID NO: 111308 - RNA, 22 nt, Human
uacauaguguuuugaagaauua

SEQ ID NO: 111309 - RNA, 22 nt, Human
uacauauuugucuuuguacugu

SEQ ID NO: 111310 - RNA, 22 nt, Human
uacaucauggcuucaugcugca

SEQ ID NO: 111311 - RNA, 22 nt, Human
uacaucauuuuggagaugagca

SEQ ID NO: 111312 - RNA, 22 nt, Human
uacauccaaaguugaggugccu

SEQ ID NO: 111313 - RNA, 19 nt, Human
uacauccggguuacuuaag

SEQ ID NO: 111314 - RNA, 22 nt, Human
uacaucuauacugaucuacauu

SEQ ID NO: 111315 - RNA, 22 nt, Human
uacaucuauuugacagauacag

SEQ ID NO: 111316 - RNA, 22 nt, Human
uacaucucaucugugcucuccg

SEQ ID NO: 111317 - RNA, 22 nt, Human
uacaugaaccuuuaugugugau

SEQ ID NO: 111318 - RNA, 22 nt, Human
uacaugaauguuucaauauugu

SEQ ID NO: 111319 - RNA, 22 nt, Human
uacaugacauuucuuucuguuc

SEQ ID NO: 111320 - RNA, 22 nt, Human
uacaugaccuagacuugcuaaa

SEQ ID NO: 111321 - RNA, 22 nt, Human
uacaugagggcacucugcaucu

SEQ ID NO: 111322 - RNA, 22 nt, Human
uacaugcaauuaagagggugaa

SEQ ID NO: 111323 - RNA, 22 nt, Human
uacaugcuccuuaugagaaucu

SEQ ID NO: 111324 - RNA, 22 nt, Human
uacaugcuggugacuguagaca

SEQ ID NO: 111325 - RNA, 22 nt, Human
uacaugcuuaaaaugcaauguu

SEQ ID NO: 111326 - RNA, 22 nt, Human
uacauguaggugacauuuuaau

SEQ ID NO: 111327 - RNA, 22 nt, Human
uacauguaguucacugguggca

SEQ ID NO: 111328 - RNA, 22 nt, Human
uacauguauguguacgugcaug

SEQ ID NO: 111329 - RNA, 22 nt, Human
uacaugugauaaauugauuaaa

SEQ ID NO: 111330 - RNA, 22 nt, Human
uacaugugcacgugugacuuug

SEQ ID NO: 111331 - RNA, 22 nt, Human
uacauguggagauaacugaagc

SEQ ID NO: 111332 - RNA, 22 nt, Human
uacauguggaguuuucuaguca

SEQ ID NO: 111333 - RNA, 22 nt, Human
uacauguuauuucacuauuggu

SEQ ID NO: 111334 - RNA, 22 nt, Human
uacauguuugguaaaugauggc

SEQ ID NO: 111335 - RNA, 22 nt, Human
uacauuaucuuguuaucuuuca

SEQ ID NO: 111336 - RNA, 22 nt, Human
uacauucacuuguugaaggugg

SEQ ID NO: 111337 - RNA, 22 nt, Human
uacauucagaagaauggacacg

SEQ ID NO: 111338 - RNA, 22 nt, Human
uacauucauaugugugcauaca

SEQ ID NO: 111339 - RNA, 23 nt, Human
uacauucauuugcacagccagua

SEQ ID NO: 111340 - RNA, 22 nt, Human
uacauuccugggcuccacccua

SEQ ID NO: 111341 - RNA, 22 nt, Human
uacauucuacuuuuucacuccc

SEQ ID NO: 111342 - RNA, 23 nt, Human
uacauucuguauuuuuauagagu

SEQ ID NO: 111343 - RNA, 22 nt, Human
uacauugaacuaugaguucagu

SEQ ID NO: 111344 - RNA, 22 nt, Human
uacauugaauuuuuuagcaugu

SEQ ID NO: 111345 - RNA, 22 nt, Human
uacauugacugugugcaucaca

SEQ ID NO: 111346 - RNA, 22 nt, Human
uacauugacuuggauuguuaga

SEQ ID NO: 111347 - RNA, 22 nt, Human
uacauugagaaccacugcuuag

SEQ ID NO: 111348 - RNA, 22 nt, Human
uacauugaggcaguagcuggag

SEQ ID NO: 111349 - RNA, 22 nt, Human
uacauugauggaguaccuagcu

SEQ ID NO: 111350 - RNA, 20 nt, Human
uacauuguagaaauauucaa

SEQ ID NO: 111351 - RNA, 23 nt, Human
uacauuguggauggaguccuggg

SEQ ID NO: 111352 - RNA, 22 nt, Human
uacauugugucucuaucuaguc

SEQ ID NO: 111353 - RNA, 22 nt, Human
uacauuuacagagccuucucug

SEQ ID NO: 111354 - RNA, 22 nt, Human
uacauuucagagcuccucucug

SEQ ID NO: 111355 - RNA, 22 nt, Human
uacauuuggaugugcuuaagug

SEQ ID NO: 111356 - RNA, 19 nt, Human
uacauuuguguacacuugu

SEQ ID NO: 111357 - RNA, 22 nt, Human
uacauuuguuauagaaaugaag

SEQ ID NO: 111358 - RNA, 22 nt, Human
uacauuuucuaggggaccaaga

SEQ ID NO: 111359 - RNA, 22 nt, Human
uagcaucagccacaccuuguac

SEQ ID NO: 111360 - RNA, 22 nt, Human
uagcaucuaacaucuuaggacu

SEQ ID NO: 111361 - RNA, 22 nt, Human
uagcaucuggagaaacaagucc

SEQ ID NO: 111362 - RNA, 22 nt, Human
uagcaucuguacugacauaauc

SEQ ID NO: 111363 - RNA, 22 nt, Human
uagcauuucccaaaugcauuug

SEQ ID NO: 111364 - RNA, 22 nt, Human
uagccaggcgaggucagugucg

SEQ ID NO: 111365 - RNA, 22 nt, Human
uagccagggagacacuguggag

SEQ ID NO: 111366 - RNA, 22 nt, Human
uagccaggucacacuguguguu

SEQ ID NO: 111367 - RNA, 22 nt, Human
uagccauuuuuauuaaugcugg

SEQ ID NO: 111368 - RNA, 22 nt, Human
uagcccagaaagcaaaugucuc

SEQ ID NO: 111369 - RNA, 22 nt, Human
uagcccagagagccaggggcuu

SEQ ID NO: 111370 - RNA, 22 nt, Human
uagcccagaugauugaaccaug

SEQ ID NO: 111371 - RNA, 22 nt, Human
uagcccaggcuguagugcagug

SEQ ID NO: 111372 - RNA, 22 nt, Human
uagcccaugaugguggaaggca

SEQ ID NO: 111373 - RNA, 22 nt, Human
uagccccagcuacucggaagcu

SEQ ID NO: 111374 - RNA, 22 nt, Human
uagccgggugugguggaacucc

SEQ ID NO: 111375 - RNA, 22 nt, Human
uagccuucucaagacaaaguug

SEQ ID NO: 111376 - RNA, 22 nt, Human
uagcuacaaaucugauaagugg

SEQ ID NO: 111377 - RNA, 22 nt, Human
uagcuacacaucuaaacagcaa

SEQ ID NO: 111378 - RNA, 22 nt, Human
uagcuacacugaggcugcuuaa

SEQ ID NO: 111379 - RNA, 22 nt, Human
uagcuacauacuuggccauucu

SEQ ID NO: 111380 - RNA, 22 nt, Human
uagcuagaagguugaaagcagg

SEQ ID NO: 111381 - RNA, 22 nt, Human
uagcuagagguagauggguuag

SEQ ID NO: 111382 - RNA, 22 nt, Human
uagcuagcugcacaggcccugg

SEQ ID NO: 111383 - RNA, 22 nt, Human
uagcuaguguuuggagauggau

SEQ ID NO: 111384 - RNA, 22 nt, Human
uagcuauuuggaaaauuccaau

SEQ ID NO: 111385 - RNA, 22 nt, Human
uagcuccuccccauccagguuc

SEQ ID NO: 111386 - RNA, 22 nt, Human
uagcucugaggccaucuccggu

SEQ ID NO: 111387 - RNA, 19 nt, Human
uagcucugucuuauuccaa

SEQ ID NO: 111388 - RNA, 22 nt, Human
uagcucugugcucuggaucugu

SEQ ID NO: 111389 - RNA, 22 nt, Human
uagcucuucauuucaucugauu

SEQ ID NO: 111390 - RNA, 22 nt, Human
uagcugaagaggguauuguagg

SEQ ID NO: 111391 - RNA, 22 nt, Human
uagcugaagggcauuuaauaaa

SEQ ID NO: 111392 - RNA, 22 nt, Human
uagcugaauaaugcgucugcag

SEQ ID NO: 111393 - RNA, 22 nt, Human
uagcugacgcuaaauaaauguu

SEQ ID NO: 111394 - RNA, 19 nt, Human
uagcugccuguuaccucca

SEQ ID NO: 111395 - RNA, 22 nt, Human
uagcugcugcagcacagggagg

SEQ ID NO: 111396 - RNA, 22 nt, Human
uagcugggaauuaucugguugc

SEQ ID NO: 111397 - RNA, 22 nt, Human
uagcugguccucagcuccagcc

SEQ ID NO: 111398 - RNA, 22 nt, Human
uagcuggucuuuaagcauguaa

SEQ ID NO: 111399 - RNA, 22 nt, Human
uagcugguuaaugcagaaggag

SEQ ID NO: 111400 - RNA, 22 nt, Human
uagcugugaaacagcagaagag

SEQ ID NO: 111401 - RNA, 22 nt, Human
uagcuguggccuugcuggucug

SEQ ID NO: 111402 - RNA, 22 nt, Human
uagcuguguaagcuugguaaga

SEQ ID NO: 111403 - RNA, 22 nt, Human
uagcuguguagacacucagagc

SEQ ID NO: 111404 - RNA, 22 nt, Human
uagcuguuaauauacaaauggu

SEQ ID NO: 111405 - RNA, 22 nt, Human
uagcuguuugaaguauuuuucu

SEQ ID NO: 111406 - RNA, 22 nt, Human
uagcuuaauaugaaacacauaa

SEQ ID NO: 111407 - RNA, 19 nt, Human
uagcuucacguggucuaga

SEQ ID NO: 111408 - RNA, 22 nt, Human
uagcuucccuagcuaaagaggu

SEQ ID NO: 111409 - RNA, 22 nt, Human
uagcuucccugcuggaucauaa

SEQ ID NO: 111410 - RNA, 22 nt, Human
uagcuucuaauacuuaccaauu

SEQ ID NO: 111411 - RNA, 21 nt, Human
uagcuucuugaggcuuggccg

SEQ ID NO: 111412 - RNA, 22 nt, Human
uagcuugacuauucuaugaugu

SEQ ID NO: 111413 - RNA, 22 nt, Human
uagcuuuaggaugguucucuug

SEQ ID NO: 111414 - RNA, 22 nt, Human
uagcuuugccuguuaaucacaa

SEQ ID NO: 111415 - RNA, 22 nt, Human
uagcuuuggauucuuuggggaa

SEQ ID NO: 111416 - RNA, 22 nt, Human
uagcuuuguguccugauuuagc

SEQ ID NO: 111417 - RNA, 16 nt, Human
uagcuuuguguugugg

SEQ ID NO: 111418 - RNA, 22 nt, Human
uaggaaaaagaggcuggcaagg

SEQ ID NO: 111419 - RNA, 22 nt, Human
uaggaaaagcacaggauguucu

SEQ ID NO: 111420 - RNA, 22 nt, Human
uaggaaacauuugaagaggauu

SEQ ID NO: 111421 - RNA, 22 nt, Human
uaggaaaccaaucuuuugggag

SEQ ID NO: 111422 - RNA, 22 nt, Human
uaggaaacucaaagggaagugg

SEQ ID NO: 111423 - RNA, 22 nt, Human
uaggaaauaauucacucuggcu

SEQ ID NO: 111424 - RNA, 22 nt, Human
uaggaaaugcugucuuauugua

SEQ ID NO: 111425 - RNA, 22 nt, Human
uaggaaauugccaauauaugac

SEQ ID NO: 111426 - RNA, 22 nt, Human
uaggaacaaagagccucacauu

SEQ ID NO: 111427 - RNA, 22 nt, Human
uaggaacacagggacuugauga

SEQ ID NO: 111428 - RNA, 18 nt, Human
uaggaaccacuugcagag

SEQ ID NO: 111429 - RNA, 22 nt, Human
uaagaacauuuucggaaagaua

SEQ ID NO: 111430 - RNA, 22 nt, Human
uaagaacuuuguagccuguucu

SEQ ID NO: 111431 - RNA, 22 nt, Human
uaagaaguacaaaaauuuucug

SEQ ID NO: 111432 - RNA, 22 nt, Human
uaagaagugagugcaccuucuu

SEQ ID NO: 111433 - RNA, 22 nt, Human
uaagaagugcugaauugaauau

SEQ ID NO: 111434 - RNA, 22 nt, Human
uaagaaucaguagauauagauu

SEQ ID NO: 111435 - RNA, 22 nt, Human
uaagaaucgauguuuauuuaga

SEQ ID NO: 111436 - RNA, 22 nt, Human
uaagaaucggucgcaacagagg

SEQ ID NO: 111437 - RNA, 22 nt, Human
uaagaauuaucucauggauaau

SEQ ID NO: 111438 - RNA, 22 nt, Human
uaagaauuccaucgcagaguau

SEQ ID NO: 111439 - RNA, 19 nt, Human
uaagacacaaaugcaagcc

SEQ ID NO: 111440 - RNA, 22 nt, Human
uaagacacaguccgcacucucu

SEQ ID NO: 111441 - RNA, 22 nt, Human
uaagacacgggcugaucuaaag

SEQ ID NO: 111442 - RNA, 22 nt, Human
uaagacagggucuauucuuagu

SEQ ID NO: 111443 - RNA, 22 nt, Human
uaagacagguaguaagaacauu

SEQ ID NO: 111444 - RNA, 22 nt, Human
uaagacauaaauaggcuuuuua

SEQ ID NO: 111445 - RNA, 22 nt, Human
uaagacauagccaagagcaucc

SEQ ID NO: 111446 - RNA, 22 nt, Human
uaagaccaauccuguguaccuc

SEQ ID NO: 111447 - RNA, 22 nt, Human
uaagaccaguaugcauuuucac

SEQ ID NO: 111448 - RNA, 22 nt, Human
uaagaccauacauuuccacaga

SEQ ID NO: 111449 - RNA, 22 nt, Human
uaagacuuaggucgaguuuggc

SEQ ID NO: 111450 - RNA, 22 nt, Human
uaagacuugauccaaagaacua

SEQ ID NO: 111451 - RNA, 22 nt, Human
uaagagaaugucaggaguggau

SEQ ID NO: 111452 - RNA, 22 nt, Human
uaagagacuuaagaauaauuga

SEQ ID NO: 111453 - RNA, 22 nt, Human
uaagagcauuguaaaauaaucu

SEQ ID NO: 111454 - RNA, 22 nt, Human
uaagaggcauuagagacauagc

SEQ ID NO: 111455 - RNA, 22 nt, Human
uaagauaauaccaugggccagg

SEQ ID NO: 111456 - RNA, 22 nt, Human
uaagaucaguucaaacaugugu

SEQ ID NO: 111457 - RNA, 22 nt, Human
uaagaugaaggcucaccuagaa

SEQ ID NO: 111458 - RNA, 22 nt, Human
uaagaugaccuuauaaagagca

SEQ ID NO: 111459 - RNA, 22 nt, Human
uaagaugacuacuuaccacuga

SEQ ID NO: 111460 - RNA, 22 nt, Human
uaagauguaagaucagagcuug

SEQ ID NO: 111461 - RNA, 22 nt, Human
uaagauguacaaccacuucucu

SEQ ID NO: 111462 - RNA, 22 nt, Human
uaagauguuuugguuugauaag

SEQ ID NO: 111463 - RNA, 22 nt, Human
uaagauuuuuaaaauguccuca

SEQ ID NO: 111464 - RNA, 22 nt, Human
uaagcaaauaaugcaucaaggg

SEQ ID NO: 111465 - RNA, 21 nt, Human
uaagcaaggaaagggcagccc

SEQ ID NO: 111466 - RNA, 22 nt, Human
uaagcacacaauaucuggagag

SEQ ID NO: 111467 - RNA, 20 nt, Human
uaagcacaugaacaguccuc

SEQ ID NO: 111468 - RNA, 22 nt, Human
uaggauuucucuuuuugcaacu

SEQ ID NO: 111469 - RNA, 21 nt, Human
uaggcaauuuguugucauagc

SEQ ID NO: 111470 - RNA, 22 nt, Human
uaggcaccaccuagggugaccc

SEQ ID NO: 111471 - RNA, 22 nt, Human
uaggcacugaguacauauuggu

SEQ ID NO: 111472 - RNA, 22 nt, Human
uaggcacugggcuaggacaggu

SEQ ID NO: 111473 - RNA, 22 nt, Human
uaggcacuuggcguguuggaga

SEQ ID NO: 111474 - RNA, 22 nt, Human
uaggcagaaaggaaggcaaguu

SEQ ID NO: 111475 - RNA, 22 nt, Human
uaggcagcauggauucugaaua

SEQ ID NO: 111476 - RNA, 22 nt, Human
uaggcagcugcaaacuucgguc

SEQ ID NO: 111477 - RNA, 23 nt, Human
uaggcaggacucagauaugacag

SEQ ID NO: 111478 - RNA, 22 nt, Human
uaggcauuauuuuaccacgguc

SEQ ID NO: 111479 - RNA, 22 nt, Human
uaggccaacguggaagggucca

SEQ ID NO: 111480 - RNA, 22 nt, Human
uaggccacagagaggagauuuc

SEQ ID NO: 111481 - RNA, 22 nt, Human
uaggccaccaggguuccauuua

SEQ ID NO: 111482 - RNA, 19 nt, Human
uaggccagaaguuuuccac

SEQ ID NO: 111483 - RNA, 22 nt, Human
uaggccagauuacuagaguagg

SEQ ID NO: 111484 - RNA, 22 nt, Human
uaggccagcccuuaguccuguc

SEQ ID NO: 111485 - RNA, 22 nt, Human
uaggccaggaaucagcaagcuu

SEQ ID NO: 111486 - RNA, 22 nt, Human
uaggccauuccuucucuugauc

SEQ ID NO: 111487 - RNA, 22 nt, Human
uaggccuaguuacugcuuacuu

SEQ ID NO: 111488 - RNA, 22 nt, Human
uaggccuaugcagaaggugguu

SEQ ID NO: 111489 - RNA, 22 nt, Human
uaggccuauuguauucuuaucu

SEQ ID NO: 111490 - RNA, 22 nt, Human
uaggccuucggugugugcuugg

SEQ ID NO: 111491 - RNA, 22 nt, Human
uaggcgaaggucugggugggca

SEQ ID NO: 111492 - RNA, 22 nt, Human
uaggcgacagcuugauggugcg

SEQ ID NO: 111493 - RNA, 22 nt, Human
uaggcuaggcugaagguuuugg

SEQ ID NO: 111494 - RNA, 22 nt, Human
uaggcucagggcugggugacgg

SEQ ID NO: 111495 - RNA, 22 nt, Human
uaggcugacuuguuucauaaag

SEQ ID NO: 111496 - RNA, 22 nt, Human
uaggcugagcuuguagaucgua

SEQ ID NO: 111497 - RNA, 22 nt, Human
uaggcugggcauucuggccagg

SEQ ID NO: 111498 - RNA, 22 nt, Human
uaggcuucacuuccaguuauuc

SEQ ID NO: 111499 - RNA, 22 nt, Human
uaggcuugcaauuaggauggaa

SEQ ID NO: 111500 - RNA, 22 nt, Human
uaggcuuguuacaaaacaguca

SEQ ID NO: 111501 - RNA, 22 nt, Human
uagggacaaagagcugaggccu

SEQ ID NO: 111502 - RNA, 20 nt, Human
uagggagauaugcucuuuuc

SEQ ID NO: 111503 - RNA, 22 nt, Human
uagggaugaggauagauuuuuc

SEQ ID NO: 111504 - RNA, 22 nt, Human
uagggaugcuuaguaggaccca

SEQ ID NO: 111505 - RNA, 22 nt, Human
uagggauggaugaugccuggca

SEQ ID NO: 111506 - RNA, 22 nt, Human
uagggcacagcuuagauaaaug

SEQ ID NO: 111507 - RNA, 22 nt, Human
uagggcagaguccaggaugggc

SEQ ID NO: 111508 - RNA, 22 nt, Human
uagggcaggggaggaaucugaa

SEQ ID NO: 111509 - RNA, 22 nt, Human
uagggcuauaagagaauaagac

SEQ ID NO: 111510 - RNA, 22 nt, Human
uagggcucacugagaugaauau

SEQ ID NO: 111511 - RNA, 20 nt, Human
uagggcucauuaugaucucc

SEQ ID NO: 111512 - RNA, 19 nt, Human
uagggcuggccgggcggug

SEQ ID NO: 111513 - RNA, 22 nt, Human
uagggcuggcgugcucagggaa

SEQ ID NO: 111514 - RNA, 16 nt, Human
uagggcugggaaggag

SEQ ID NO: 111515 - RNA, 22 nt, Human
uagggcuggguacacucuugcc

SEQ ID NO: 111516 - RNA, 22 nt, Human
uagggcuuagaaaagaauuuac

SEQ ID NO: 111517 - RNA, 22 nt, Human
uaggggcucagaacauguccuu

SEQ ID NO: 111518 - RNA, 23 nt, Human
uaggggcuggcguggagccugcg

SEQ ID NO: 111519 - RNA, 21 nt, Human
uagggggcagugggaugcuua

SEQ ID NO: 111520 - RNA, 22 nt, Human
uaggguccucaucuguaaauga

SEQ ID NO: 111521 - RNA, 22 nt, Human
uagguagauacauguguuggcu

SEQ ID NO: 111522 - RNA, 22 nt, Human
uagguauacagagauuucuggg

SEQ ID NO: 111523 - RNA, 20 nt, Human
uagguccaaugcucgucuuc

SEQ ID NO: 111524 - RNA, 22 nt, Human
uagguccacaagaucaaugcag

SEQ ID NO: 111525 - RNA, 22 nt, Human
uaggucccuucuguccuggucu

SEQ ID NO: 111526 - RNA, 20 nt, Human
uaggugagggcagauagagg

SEQ ID NO: 111527 - RNA, 22 nt, Human
uaggugcaggucacaagggaug

SEQ ID NO: 111528 - RNA, 21 nt, Human
uaggugggagccccaguaugc

SEQ ID NO: 111529 - RNA, 22 nt, Human
uagguggugugcgaagagcgug

SEQ ID NO: 111530 - RNA, 22 nt, Human
uaggugucuggacaacuuugua

SEQ ID NO: 111531 - RNA, 22 nt, Human
uaggugucuuucuguccuuguu

SEQ ID NO: 111532 - RNA, 22 nt, Human
uagguucaaguucaggcucuau

SEQ ID NO: 111533 - RNA, 22 nt, Human
uagguucauauucuagaaucau

SEQ ID NO: 111534 - RNA, 22 nt, Human
uagguuuaggagugaaggugaa

SEQ ID NO: 111535 - RNA, 22 nt, Human
uagguuucagaggugccgggaa

SEQ ID NO: 111536 - RNA, 22 nt, Human
uaguaaaaguuuaguugaaagu

SEQ ID NO: 111537 - RNA, 22 nt, Human
uaguaacaacaacuagcauuuu

SEQ ID NO: 111538 - RNA, 22 nt, Human
uaguaacacacugguauuugga

SEQ ID NO: 111539 - RNA, 22 nt, Human
uaguaacacauugaacgaucgc

SEQ ID NO: 111540 - RNA, 22 nt, Human
uaguaacagauuuauacagucu

SEQ ID NO: 111541 - RNA, 22 nt, Human
uaguaacucuacacacgacacu

SEQ ID NO: 111542 - RNA, 22 nt, Human
uaguaacugguugaacaacugu

SEQ ID NO: 111543 - RNA, 22 nt, Human
uaguaaguucucgcauuguuau

SEQ ID NO: 111544 - RNA, 22 nt, Human
uaguacacuaccaucagguuuu

SEQ ID NO: 111545 - RNA, 22 nt, Human
uaguacagugcucuguaaguuu

SEQ ID NO: 111546 - RNA, 22 nt, Human
uaguacaguggagagcaaagaa

SEQ ID NO: 111547 - RNA, 22 nt, Human
uaagugguaccaagcucaguga

SEQ ID NO: 111548 - RNA, 18 nt, Human
uaaguguaauugacaauu

SEQ ID NO: 111549 - RNA, 22 nt, Human
uaaguuagagcacaauucuuac

SEQ ID NO: 111550 - RNA, 22 nt, Human
uaaguuagcccuauuaaauuaa

SEQ ID NO: 111551 - RNA, 22 nt, Human
uaaguuaguccuuuuuaaaagu

SEQ ID NO: 111552 - RNA, 22 nt, Human
uaaguucaagucuuggauauaa

SEQ ID NO: 111553 - RNA, 22 nt, Human
uaaguucauaagcuuauucuua

SEQ ID NO: 111554 - RNA, 22 nt, Human
uaaguucauuagacuacagaua

SEQ ID NO: 111555 - RNA, 22 nt, Human
uaaguucugaagaggcgaggua

SEQ ID NO: 111556 - RNA, 22 nt, Human
uaaguucugcugacggccagcc

SEQ ID NO: 111557 - RNA, 22 nt, Human
uaaguucuuuucuauguaauau

SEQ ID NO: 111558 - RNA, 22 nt, Human
uaaguuuaacccucugggacua

SEQ ID NO: 111559 - RNA, 22 nt, Human
uaaguuucuccaaagcacagaa

SEQ ID NO: 111560 - RNA, 22 nt, Human
uaaguuugugucucuguuacuu

SEQ ID NO: 111561 - RNA, 22 nt, Human
uaaguuuucuggaauaacuugg

SEQ ID NO: 111562 - RNA, 22 nt, Human
uaauaacaauuguaggacauga

SEQ ID NO: 111563 - RNA, 19 nt, Human
uaauaagcaauauggaagu

SEQ ID NO: 111564 - RNA, 22 nt, Human
uaauaauuggcuaacccuggga

SEQ ID NO: 111565 - RNA, 22 nt, Human
uaauaauuuuaaagaaggcuag

SEQ ID NO: 111566 - RNA, 22 nt, Human
uaauacaauggaguugggcccc

SEQ ID NO: 111567 - RNA, 22 nt, Human
uaauacacugcuuuuuguaacu

SEQ ID NO: 111568 - RNA, 22 nt, Human
uaauacagaaguguauuaaaau

SEQ ID NO: 111569 - RNA, 22 nt, Human
uaauaccuacuggucauugcaa

SEQ ID NO: 111570 - RNA, 22 nt, Human
uaauaccuggccuugauacagu

SEQ ID NO: 111571 - RNA, 22 nt, Human
uaauacugaaaggaguaucagc

SEQ ID NO: 111572 - RNA, 22 nt, Human
uaauacugacuaaagauaucaa

SEQ ID NO: 111573 - RNA, 22 nt, Human
uaauacuguauacugcaaauuu

SEQ ID NO: 111574 - RNA, 22 nt, Human
uaauacuugcuuuggauguaug

SEQ ID NO: 111575 - RNA, 22 nt, Human
uaauacuugucauaaaggcauu

SEQ ID NO: 111576 - RNA, 22 nt, Human
uaauaguuucauaaugugcuuc

SEQ ID NO: 111577 - RNA, 22 nt, Human
uagugcuuauuacugugcuguc

SEQ ID NO: 111578 - RNA, 22 nt, Human
uagugcuuuaggccugaguguc

SEQ ID NO: 111579 - RNA, 22 nt, Human
uagugcuuuggagcuuucuccu

SEQ ID NO: 111580 - RNA, 22 nt, Human
uaguggagaaguggagucugug

SEQ ID NO: 111581 - RNA, 22 nt, Human
uaguggaggccuguugugugca

SEQ ID NO: 111582 - RNA, 19 nt, Human
uaguggagugacaaguucu

SEQ ID NO: 111583 - RNA, 22 nt, Human
uaguggauggguaaaguauuuu

SEQ ID NO: 111584 - RNA, 22 nt, Human
uaguggcauuguugugaggauu

SEQ ID NO: 111585 - RNA, 23 nt, Human
uaguguauaucaacauuuguccc

SEQ ID NO: 111586 - RNA, 22 nt, Human
uagugucaugaaaaguacacua

SEQ ID NO: 111587 - RNA, 22 nt, Human
uagugucauuucaguggaguuu

SEQ ID NO: 111588 - RNA, 22 nt, Human
uagugucuauugaccggaaaga

SEQ ID NO: 111589 - RNA, 22 nt, Human
uagugucugacauuuaagagca

SEQ ID NO: 111590 - RNA, 21 nt, Human
uagugucuuaagagccuugca

SEQ ID NO: 111591 - RNA, 22 nt, Human
uagugucuucaggagauaugag

SEQ ID NO: 111592 - RNA, 22 nt, Human
uagugucuuccaggacauggua

SEQ ID NO: 111593 - RNA, 22 nt, Human
uaguguguggucucucccuugu

SEQ ID NO: 111594 - RNA, 22 nt, Human
uaguuaaaauaauggagauguu

SEQ ID NO: 111595 - RNA, 22 nt, Human
uaguuaaagauucuguuaagag

SEQ ID NO: 111596 - RNA, 22 nt, Human
uaguuaacucuugguaauaggu

SEQ ID NO: 111597 - RNA, 22 nt, Human
uaguuacaauggguucugugac

SEQ ID NO: 111598 - RNA, 22 nt, Human
uaguuacacauggguagggaau

SEQ ID NO: 111599 - RNA, 22 nt, Human
uaguuacagugcauagcaagau

SEQ ID NO: 111600 - RNA, 23 nt, Human
uaguuacauuauugucagagcug

SEQ ID NO: 111601 - RNA, 22 nt, Human
uaguuacuuuugcucuucauua

SEQ ID NO: 111602 - RNA, 22 nt, Human
uaguuauuauuguuacuaucag

SEQ ID NO: 111603 - RNA, 22 nt, Human
uaguucaaagucugucaaagga

SEQ ID NO: 111604 - RNA, 22 nt, Human
uaguucuauaagcagauagagu

SEQ ID NO: 111605 - RNA, 22 nt, Human
uaguucucuauucaaggaucaa

SEQ ID NO: 111606 - RNA, 22 nt, Human
uaguucuucaugaauucagcuu

SEQ ID NO: 111607 - RNA, 22 nt, Human
uaguucuugguucuuaguucuu

SEQ ID NO: 111608 - RNA, 22 nt, Human
uaguugaagagaugaaugacca

SEQ ID NO: 111609 - RNA, 22 nt, Human
uaguugcuaaaaagugccuaac

SEQ ID NO: 111610 - RNA, 22 nt, Human
uaguuuagaauguugcaauaca

SEQ ID NO: 111611 - RNA, 22 nt, Human
uaguuuagccauuuaggaauug

SEQ ID NO: 111612 - RNA, 22 nt, Human
uaguuuaggauccaaucuaaga

SEQ ID NO: 111613 - RNA, 22 nt, Human
uaguuuaggaucuuuuuugugc

SEQ ID NO: 111614 - RNA, 22 nt, Human
uaguuuaggucguacaagcaaa

SEQ ID NO: 111615 - RNA, 22 nt, Human
uaguuuaugauuuuuuggaagg

SEQ ID NO: 111616 - RNA, 18 nt, Human
uaguuucuaauggccuuu

SEQ ID NO: 111617 - RNA, 22 nt, Human
uaguuucuggguuggcuucuac

SEQ ID NO: 111618 - RNA, 22 nt, Human
uaguuucuugauuagccacuuu

SEQ ID NO: 111619 - RNA, 22 nt, Human
uaguuugcgaaauuccugccuc

SEQ ID NO: 111620 - RNA, 22 nt, Human
uaguuuugaggauuauauguga

SEQ ID NO: 111621 - RNA, 22 nt, Human
uauaaagaaggcacagcaagac

SEQ ID NO: 111622 - RNA, 22 nt, Human
uauaaagagucucaaagaaguu

SEQ ID NO: 111623 - RNA, 22 nt, Human
uauaaaguuggggcugaaguaa

SEQ ID NO: 111624 - RNA, 22 nt, Human
uauaaaguuucgaaagauguau

SEQ ID NO: 111625 - RNA, 20 nt, Human
uauaaauucagagcuuuggu

SEQ ID NO: 111626 - RNA, 22 nt, Human
uauaacaccauguucuacagau

SEQ ID NO: 111627 - RNA, 22 nt, Human
uauaacaggaaguauucaaaca

SEQ ID NO: 111628 - RNA, 22 nt, Human
uauaagaaauugccaaccuguu

SEQ ID NO: 111629 - RNA, 22 nt, Human
uauaagcaugcuucauauggau

SEQ ID NO: 111630 - RNA, 22 nt, Human
uauaaguaguuguugaagacuu

SEQ ID NO: 111631 - RNA, 22 nt, Human
uauaagucuggcauauguaugc

SEQ ID NO: 111632 - RNA, 22 nt, Human
uauaaguguaguuucaaauguu

SEQ ID NO: 111633 - RNA, 22 nt, Human
uauaauccauucauugauuucu

SEQ ID NO: 111634 - RNA, 22 nt, Human
uauaauuaguaaauggcagauu

SEQ ID NO: 111635 - RNA, 22 nt, Human
uauacaagaggugagaugagca

SEQ ID NO: 111636 - RNA, 22 nt, Human
uauacaagugagaagaagaguu

SEQ ID NO: 111637 - RNA, 22 nt, Human
uauacaauggcugaaucaucca

SEQ ID NO: 111638 - RNA, 22 nt, Human
uauacacaaacaagggguuaag

SEQ ID NO: 111639 - RNA, 22 nt, Human
uauacacauaucuucuaggccu

SEQ ID NO: 111640 - RNA, 22 nt, Human
uauacacugauauaaggaguaa

SEQ ID NO: 111641 - RNA, 22 nt, Human
uauacagaacauuaagaacugu

SEQ ID NO: 111642 - RNA, 22 nt, Human
uauacagaaccgccugaagucu

SEQ ID NO: 111643 - RNA, 22 nt, Human
uauacagaacugcacgugcacg

SEQ ID NO: 111644 - RNA, 22 nt, Human
uauacagauggaaagauacaca

SEQ ID NO: 111645 - RNA, 22 nt, Human
uauacaggaacuguuggcuccc

SEQ ID NO: 111646 - RNA, 22 nt, Human
uauacaguaucuuuugaaggca

SEQ ID NO: 111647 - RNA, 22 nt, Human
uauacagugccucuuccauuag

SEQ ID NO: 111648 - RNA, 22 nt, Human
uauacaguuaaguuucuucagu

SEQ ID NO: 111649 - RNA, 22 nt, Human
uauaccaaaaaaauucuugucu

SEQ ID NO: 111650 - RNA, 22 nt, Human
uauaccaaaauaucagaaaggg

SEQ ID NO: 111651 - RNA, 22 nt, Human
uauacuacgcaccaaacaaagg

SEQ ID NO: 111652 - RNA, 22 nt, Human
uauacuauuauugucaguuuau

SEQ ID NO: 111653 - RNA, 22 nt, Human
uauacucugagaaacgugucac

SEQ ID NO: 111654 - RNA, 22 nt, Human
uauacucuggaauuuuauucuu

SEQ ID NO: 111655 - RNA, 22 nt, Human
uauacugagagcaaauacauuc

SEQ ID NO: 111656 - RNA, 22 nt, Human
uauacugaguguguuaaugaug

SEQ ID NO: 111657 - RNA, 22 nt, Human
uauacugaucacugaggucauc

SEQ ID NO: 111658 - RNA, 22 nt, Human
uauagaagagacaugugcauag

SEQ ID NO: 111659 - RNA, 22 nt, Human
uauagacaagcguaacaagaag

SEQ ID NO: 111660 - RNA, 22 nt, Human
ugagcucauagcucuuauuaug

SEQ ID NO: 111661 - RNA, 22 nt, Human
ugagcuccggcauauggaauua

SEQ ID NO: 111662 - RNA, 23 nt, Human
ugagcucuauggaggacugaacc

SEQ ID NO: 111663 - RNA, 22 nt, Human
ugagcucuguuagggcuggaac

SEQ ID NO: 111664 - RNA, 22 nt, Human
ugagcucuucuaacuaauugug

SEQ ID NO: 111665 - RNA, 22 nt, Human
ugagcugagaacacuugggcua

SEQ ID NO: 111666 - RNA, 22 nt, Human
ugagcugauaggcugugagccu

SEQ ID NO: 111667 - RNA, 22 nt, Human
ugagcugcuucuuauaaugugu

SEQ ID NO: 111668 - RNA, 22 nt, Human
ugagcuggaaucuucuugacug

SEQ ID NO: 111669 - RNA, 22 nt, Human
ugagcuggcaggggcucaggga

SEQ ID NO: 111670 - RNA, 22 nt, Human
ugagcuggucuugaguguagcu

SEQ ID NO: 111671 - RNA, 22 nt, Human
ugagcugucuaugguccugucu

SEQ ID NO: 111672 - RNA, 22 nt, Human
ugagcugucugaauggugagga

SEQ ID NO: 111673 - RNA, 22 nt, Human
ugagcugugauuaacucugaga

SEQ ID NO: 111674 - RNA, 22 nt, Human
ugagcuguuucucugguggcuu

SEQ ID NO: 111675 - RNA, 22 nt, Human
ugagcuucaaaauaugugaauc

SEQ ID NO: 111676 - RNA, 22 nt, Human
ugagcuucuuuauuuggccaga

SEQ ID NO: 111677 - RNA, 22 nt, Human
ugagcuuuuaauauacaggugu

SEQ ID NO: 111678 - RNA, 22 nt, Human
ugaggaaacugaggcacagaug

SEQ ID NO: 111679 - RNA, 22 nt, Human
ugaggaaacuuacaaggcagaa

SEQ ID NO: 111680 - RNA, 18 nt, Human
ugaggaaggggaaguauu

SEQ ID NO: 111681 - RNA, 22 nt, Human
ugaggaauggcuuaauguggga

SEQ ID NO: 111682 - RNA, 22 nt, Human
ugaggacauuaggaagugaagg

SEQ ID NO: 111683 - RNA, 23 nt, Human
ugaggaccucucaggggccaggc

SEQ ID NO: 111684 - RNA, 22 nt, Human
ugaggagaaaugcucagagcca

SEQ ID NO: 111685 - RNA, 23 nt, Human
ugaggagcauagcugacugacag

SEQ ID NO: 111686 - RNA, 22 nt, Human
uaagaacauaaauucauacggg

SEQ ID NO: 111687 - RNA, 21 nt, Human
uaagaacauuaucuucuuccu

SEQ ID NO: 111688 - RNA, 22 nt, Human
uaagaacuuggcagcaagaaau

SEQ ID NO: 111689 - RNA, 22 nt, Human
uaagaagcuucugcuaaugccu

SEQ ID NO: 111690 - RNA, 22 nt, Human
uaagaagguaauacauuuuugc

SEQ ID NO: 111691 - RNA, 22 nt, Human
uaagaauagucccuagaugugu

SEQ ID NO: 111692 - RNA, 22 nt, Human
uaagaaucuauuaggaauaugu

SEQ ID NO: 111693 - RNA, 22 nt, Human
uaagaaugacuaccaaacugga

SEQ ID NO: 111694 - RNA, 22 nt, Human
uaagacacaaauaucuuuuaca

SEQ ID NO: 111695 - RNA, 22 nt, Human
uaagacacauuggaguagauga

SEQ ID NO: 111696 - RNA, 23 nt, Human
uaagacacccgacuccagagaug

SEQ ID NO: 111697 - RNA, 22 nt, Human
uaagacaccucucugcccuuca

SEQ ID NO: 111698 - RNA, 22 nt, Human
uaagacaucauuaaacagcaau

SEQ ID NO: 111699 - RNA, 22 nt, Human
uaagacauccuggauguucaaa

SEQ ID NO: 111700 - RNA, 22 nt, Human
uaagacaugagacucagccagu

SEQ ID NO: 111701 - RNA, 22 nt, Human
uaagacuucauuaguaauaugg

SEQ ID NO: 111702 - RNA, 22 nt, Human
uaagagacuauugagcaucuug

SEQ ID NO: 111703 - RNA, 22 nt, Human
uaagagaugguuaucaaaagca

SEQ ID NO: 111704 - RNA, 22 nt, Human
uaagagcacugaagucuucuua

SEQ ID NO: 111705 - RNA, 22 nt, Human
uaagagcucccuucuccuugca

SEQ ID NO: 111706 - RNA, 22 nt, Human
uaagaggcaaaagauacucaga

SEQ ID NO: 111707 - RNA, 22 nt, Human
uaagaggcagcauuccucgccu

SEQ ID NO: 111708 - RNA, 22 nt, Human
uaagaguaucuauuaaguacuu

SEQ ID NO: 111709 - RNA, 22 nt, Human
uaagaguuagggcuagcaauau

SEQ ID NO: 111710 - RNA, 22 nt, Human
uaagauaaguggguugagaugg

SEQ ID NO: 111711 - RNA, 22 nt, Human
uaagaugguuguagauggacug

SEQ ID NO: 111712 - RNA, 22 nt, Human
uaagaugucauccacauagagu

SEQ ID NO: 111713 - RNA, 22 nt, Human
uaagcaaaggauuuugaucuuu

SEQ ID NO: 111714 - RNA, 18 nt, Human
uaagcaaugacauugcaa

SEQ ID NO: 111715 - RNA, 22 nt, Human
uaagcaaugagauaaucauggg

SEQ ID NO: 111716 - RNA, 22 nt, Human
uaagcaggggucaaguguacaa

SEQ ID NO: 111717 - RNA, 22 nt, Human
uaagcauaacuaaaaaugauuu

SEQ ID NO: 111718 - RNA, 22 nt, Human
uaagcauacauucucuccuuuc

SEQ ID NO: 111719 - RNA, 22 nt, Human
uaagcauuaacucugcugcaag

SEQ ID NO: 111720 - RNA, 22 nt, Human
uaagcauuaugguaaagaagua

SEQ ID NO: 111721 - RNA, 22 nt, Human
uaagcucacuguaagaacugau

SEQ ID NO: 111722 - RNA, 22 nt, Human
uaagcucuccaggugaucauga

SEQ ID NO: 111723 - RNA, 22 nt, Human
uaagcuggagcuucccccgucc

SEQ ID NO: 111724 - RNA, 22 nt, Human
uaaggaagucacaagaaucgcu

SEQ ID NO: 111725 - RNA, 22 nt, Human
uaaggaaugcuugaauguuccu

SEQ ID NO: 111726 - RNA, 22 nt, Human
uaaggagagaauuuagagguuu

SEQ ID NO: 111727 - RNA, 22 nt, Human
uaaggagguugguggguuggau

SEQ ID NO: 111728 - RNA, 22 nt, Human
uaaggcaaagaaccauaguaau

SEQ ID NO: 111729 - RNA, 22 nt, Human
uaaggcacacaguugcugcaug

SEQ ID NO: 111730 - RNA, 22 nt, Human
uaaggcacccgugagcugccag

SEQ ID NO: 111731 - RNA, 22 nt, Human
uaaggcacuucaauguuuagaa

SEQ ID NO: 111732 - RNA, 22 nt, Human
uaaggcagcauaauuaggccac

SEQ ID NO: 111733 - RNA, 22 nt, Human
uaaggcaguuuugccugagaua

SEQ ID NO: 111734 - RNA, 22 nt, Human
uaaggcauuagagugaaagcaa

SEQ ID NO: 111735 - RNA, 21 nt, Human
uaaggccaagucuauuucugu

SEQ ID NO: 111736 - RNA, 22 nt, Human
uaaggccaauuaacaaccaggg

SEQ ID NO: 111737 - RNA, 22 nt, Human
uaaggccaccguuauagaacca

SEQ ID NO: 111738 - RNA, 22 nt, Human
uaaggccagccagcaaaucugu

SEQ ID NO: 111739 - RNA, 22 nt, Human
uaaggccaggcuguggucggca

SEQ ID NO: 111740 - RNA, 22 nt, Human
uaaggcccgugaguuucauauc

SEQ ID NO: 111741 - RNA, 22 nt, Human
uaaggcuagcaagaugagaaua

SEQ ID NO: 111742 - RNA, 22 nt, Human
uaaggcuagugccugacugggu

SEQ ID NO: 111743 - RNA, 22 nt, Human
uaaggcuuagaagcuaucugcu

SEQ ID NO: 111744 - RNA, 22 nt, Human
uaaggcuuaugaucagaagguu

SEQ ID NO: 111745 - RNA, 22 nt, Human
uaaggcuuggacuucuccaacc

SEQ ID NO: 111746 - RNA, 22 nt, Human
uaaggcuuggggaaaagugagg

SEQ ID NO: 111747 - RNA, 22 nt, Human
uaaggcuuuggucaccauggag

SEQ ID NO: 111748 - RNA, 22 nt, Human
uaaggcuuuguagugauugcuu

SEQ ID NO: 111749 - RNA, 22 nt, Human
uaaggucuuuaacaggucuuuu

SEQ ID NO: 111750 - RNA, 22 nt, Human
uaaggugugguaguuuaguucu

SEQ ID NO: 111751 - RNA, 22 nt, Human
uaagguuuaacgcccugucucg

SEQ ID NO: 111752 - RNA, 19 nt, Human
uaagguuuaccagcaaaau

SEQ ID NO: 111753 - RNA, 22 nt, Human
uaaguaaaacauucaagaaguc

SEQ ID NO: 111754 - RNA, 22 nt, Human
uaagucauaagucaugauguua

SEQ ID NO: 111755 - RNA, 22 nt, Human
uaaguccauaauggcaguaaau

SEQ ID NO: 111756 - RNA, 22 nt, Human
uaaguccuaacagacugggggc

SEQ ID NO: 111757 - RNA, 17 nt, Human
uaaguccuaguuauuuu

SEQ ID NO: 111758 - RNA, 22 nt, Human
uaaguccuggcugguuugaagc

SEQ ID NO: 111759 - RNA, 22 nt, Human
uaagucuucauagucuaauguc

SEQ ID NO: 111760 - RNA, 22 nt, Human
uaagugagaacuaaaccuucug

SEQ ID NO: 111761 - RNA, 22 nt, Human
uaagugagaucugaaaugaaau

SEQ ID NO: 111762 - RNA, 23 nt, Human
uaagugauuagaauuugcuguca

SEQ ID NO: 111763 - RNA, 17 nt, Human
uaagugauuaucucaua

SEQ ID NO: 111764 - RNA, 22 nt, Human
uaagugcaauguuuuacuuaaa

SEQ ID NO: 111765 - RNA, 22 nt, Human
uaaguuaacccuguuaauagau

SEQ ID NO: 111766 - RNA, 17 nt, Human
uaaguuauagcagaaga

SEQ ID NO: 111767 - RNA, 22 nt, Human
uaaguuaucggaguguguuuca

SEQ ID NO: 111768 - RNA, 22 nt, Human
uaaguucaaugaacucaguucu

SEQ ID NO: 111769 - RNA, 22 nt, Human
uaaguucaccaguuguaauaag

SEQ ID NO: 111770 - RNA, 22 nt, Human
uaaguucaguuggucgaaguag

SEQ ID NO: 111771 - RNA, 23 nt, Human
uaaguucuaugagaagagaaauc

SEQ ID NO: 111772 - RNA, 22 nt, Human
uaaguucucaauacauuguagc

SEQ ID NO: 111773 - RNA, 22 nt, Human
uacaaauggguuaaaauauagu

SEQ ID NO: 111774 - RNA, 22 nt, Human
uacaaaugguugaauggaugaa

SEQ ID NO: 111775 - RNA, 22 nt, Human
uacaaauguauuuuauuuuggu

SEQ ID NO: 111776 - RNA, 20 nt, Human
uacaacaaguagagacauac

SEQ ID NO: 111777 - RNA, 22 nt, Human
uacaacacugguucgacaugug

SEQ ID NO: 111778 - RNA, 22 nt, Human
uacaacacuguucagccucuuc

SEQ ID NO: 111779 - RNA, 21 nt, Human
uacaacagguuuuauuucgau

SEQ ID NO: 111780 - RNA, 22 nt, Human
uacaacaguaaucaagguuuuu

SEQ ID NO: 111781 - RNA, 22 nt, Human
uacaacauuuacguuaggcugu

SEQ ID NO: 111782 - RNA, 22 nt, Human
uacaaccauagacauauacuag

SEQ ID NO: 111783 - RNA, 22 nt, Human
uacaacuuacuugaauggcuuu

SEQ ID NO: 111784 - RNA, 21 nt, Human
uacaagaccggauucgggccc

SEQ ID NO: 111785 - RNA, 22 nt, Human
uacaagaggauguggacaugga

SEQ ID NO: 111786 - RNA, 22 nt, Human
uacaagaugacaggugcaugau

SEQ ID NO: 111787 - RNA, 22 nt, Human
uacaagauguacuaaaaauuau

SEQ ID NO: 111788 - RNA, 22 nt, Human
uacaagcuggcgcaguuaagau

SEQ ID NO: 111789 - RNA, 19 nt, Human
uacaagcuuaaaguaaugu

SEQ ID NO: 111790 - RNA, 22 nt, Human
uacaaggcuucagcucagcuau

SEQ ID NO: 111791 - RNA, 22 nt, Human
uacaaguacuguggcuuugaau

SEQ ID NO: 111792 - RNA, 22 nt, Human
uacaaguagcucagguuuucug

SEQ ID NO: 111793 - RNA, 22 nt, Human
uacaaguccguaaagggcagau

SEQ ID NO: 111794 - RNA, 22 nt, Human
uacaagugcuagcagauauugu

SEQ ID NO: 111795 - RNA, 22 nt, Human
uauauaugagcaugugaggaca

SEQ ID NO: 111796 - RNA, 22 nt, Human
uauauauucuuaaguaguguag

SEQ ID NO: 111797 - RNA, 19 nt, Human
uauauauuuugggguugug

SEQ ID NO: 111798 - RNA, 22 nt, Human
uauaucagaguuaaaagaaugu

SEQ ID NO: 111799 - RNA, 22 nt, Human
uauaucugggaaccaaaggggg

SEQ ID NO: 111800 - RNA, 22 nt, Human
uauaugacaguaucauuuuaaa

SEQ ID NO: 111801 - RNA, 22 nt, Human
uauaugcaauuuuuuagugcaa

SEQ ID NO: 111802 - RNA, 22 nt, Human
uauaugcucugggauccugaaa

SEQ ID NO: 111803 - RNA, 22 nt, Human
uauauguagauuguaccaaugu

SEQ ID NO: 111804 - RNA, 22 nt, Human
uauaugucugcuacuguauaaa

SEQ ID NO: 111805 - RNA, 22 nt, Human
uauauuaccugccugaucuaua

SEQ ID NO: 111806 - RNA, 22 nt, Human
uauauucuuaccaguguaugua

SEQ ID NO: 111807 - RNA, 22 nt, Human
uauauugcuagugguacuguaa

SEQ ID NO: 111808 - RNA, 22 nt, Human
uauauugggacuucaggacuuu

SEQ ID NO: 111809 - RNA, 22 nt, Human
uauauuuaauuaguugcuggau

SEQ ID NO: 111810 - RNA, 22 nt, Human
uauauuugugugugauuuauga

SEQ ID NO: 111811 - RNA, 19 nt, Human
uauauuuguugaauaaaaa

SEQ ID NO: 111812 - RNA, 22 nt, Human
uaucaaaggcuaugugauuuuu

SEQ ID NO: 111813 - RNA, 21 nt, Human
uaucaaggcacuuuuuaaaga

SEQ ID NO: 111814 - RNA, 22 nt, Human
uaucaaggcauggaaaaugcua

SEQ ID NO: 111815 - RNA, 19 nt, Human
uaucaaucacggcaucuuu

SEQ ID NO: 111816 - RNA, 20 nt, Human
uaucaaucagaaagaagacu

SEQ ID NO: 111817 - RNA, 22 nt, Human
uaucacaauuccuauaguuugu

SEQ ID NO: 111818 - RNA, 22 nt, Human
uaucacaggugugauuuacauu

SEQ ID NO: 111819 - RNA, 22 nt, Human
uaucacauuuggagauuuauga

SEQ ID NO: 111820 - RNA, 22 nt, Human
uaucacccuacauaagaaauaa

SEQ ID NO: 111821 - RNA, 22 nt, Human
uaucacuacaccuggcuaauua

SEQ ID NO: 111822 - RNA, 22 nt, Human
uaucacuacacuucagcuuuaa

SEQ ID NO: 111823 - RNA, 22 nt, Human
uaucacuugcguuuuggcagag

SEQ ID NO: 111824 - RNA, 22 nt, Human
uaucagaaaugccuuaaauugg

SEQ ID NO: 111825 - RNA, 22 nt, Human
uaucagaacacauguuuugcag

SEQ ID NO: 111826 - RNA, 21 nt, Human
uaucagaagagaaagaaugau

SEQ ID NO: 111827 - RNA, 22 nt, Human
uaucagauuuagaggagucaua

SEQ ID NO: 111828 - RNA, 22 nt, Human
uaucagcauauuuacuuucuug

SEQ ID NO: 111829 - RNA, 22 nt, Human
uaucaggaagaacacgugaaau

SEQ ID NO: 111830 - RNA, 22 nt, Human
uaucaggaauugaauggcuuca

SEQ ID NO: 111831 - RNA, 22 nt, Human
uaucaggaguugacaguugcua

SEQ ID NO: 111832 - RNA, 22 nt, Human
uaucaguagaacaauggacauu

SEQ ID NO: 111833 - RNA, 22 nt, Human
uaucaguagauaaacggauugc

SEQ ID NO: 111834 - RNA, 22 nt, Human
uaucaguauggauucauggauu

SEQ ID NO: 111835 - RNA, 22 nt, Human
uaucaguccaggguuuugugac

SEQ ID NO: 111836 - RNA, 22 nt, Human
uaucagugcucccagcuuagca

SEQ ID NO: 111837 - RNA, 22 nt, Human
uaucagugugguuucuggacug

SEQ ID NO: 111838 - RNA, 22 nt, Human
uaucauuauacagacguauaca

SEQ ID NO: 111839 - RNA, 22 nt, Human
uaucauucuaauucuccucgua

SEQ ID NO: 111840 - RNA, 22 nt, Human
uaucauugcugaugugcugaga

SEQ ID NO: 111841 - RNA, 22 nt, Human
uaucauuuaacagaaucauugc

SEQ ID NO: 111842 - RNA, 22 nt, Human
uaucauuuagaguauuucuuca

SEQ ID NO: 111843 - RNA, 22 nt, Human
uauccaaaggaacaaucacagc

SEQ ID NO: 111844 - RNA, 22 nt, Human
uauccaaaguggcauauuauag

SEQ ID NO: 111845 - RNA, 22 nt, Human
uauccauauuaagaugccucug

SEQ ID NO: 111846 - RNA, 22 nt, Human
uauccaugccuuugugccuuag

SEQ ID NO: 111847 - RNA, 22 nt, Human
uauccauuaggucuauggucaa

SEQ ID NO: 111848 - RNA, 22 nt, Human
uauccguuagaaucaugcuggg

SEQ ID NO: 111849 - RNA, 22 nt, Human
uauccuguuuugcacaauuaua

SEQ ID NO: 111850 - RNA, 21 nt, Human
uaucuacaguguccauucagu

SEQ ID NO: 111851 - RNA, 22 nt, Human
uaucuacaguuaauaugucauc

SEQ ID NO: 111852 - RNA, 23 nt, Human
uaucuacuuugcaauucaguacc

SEQ ID NO: 111853 - RNA, 22 nt, Human
uaucuagaaacagaguuuuacu

SEQ ID NO: 111854 - RNA, 22 nt, Human
uaucuagaacuccagaauguag

SEQ ID NO: 111855 - RNA, 22 nt, Human
uaucuagauaguuuagccaucu

SEQ ID NO: 111856 - RNA, 22 nt, Human
uaucuagauauuuggauaaaug

SEQ ID NO: 111857 - RNA, 22 nt, Human
uaucuauaaguacuaacauggu

SEQ ID NO: 111858 - RNA, 22 nt, Human
uaucuauaauguuuuacuuccu

SEQ ID NO: 111859 - RNA, 22 nt, Human
uaucuauuauguucuauguguc

SEQ ID NO: 111860 - RNA, 17 nt, Human
uaucucugcuucauggu

SEQ ID NO: 111861 - RNA, 22 nt, Human
uaucucuguaaaagaaaucaca

SEQ ID NO: 111862 - RNA, 22 nt, Human
uaucucuuuauugacaauaaaa

SEQ ID NO: 111863 - RNA, 22 nt, Human
uaucugauacaacagaauaaca

SEQ ID NO: 111864 - RNA, 20 nt, Human
uaucugcucuaguagcaguu

SEQ ID NO: 111865 - RNA, 21 nt, Human
uaucugcuuuuuaaggcucac

SEQ ID NO: 111866 - RNA, 17 nt, Human
uaucuguaugauggaua

SEQ ID NO: 111867 - RNA, 22 nt, Human
uaucuguauucugacagucacu

SEQ ID NO: 111868 - RNA, 23 nt, Human
uaucuguauuuguucacugcugu

SEQ ID NO: 111869 - RNA, 22 nt, Human
uaucuguuaaaacaagcuuuaa

SEQ ID NO: 111870 - RNA, 22 nt, Human
uaucuguuagcuaaugaaugag

SEQ ID NO: 111871 - RNA, 22 nt, Human
uaucuguuaugggcugaauugc

SEQ ID NO: 111872 - RNA, 22 nt, Human
uaucuguuuauuguuacuguca

SEQ ID NO: 111873 - RNA, 22 nt, Human
uaucuucauagauuuuuacacc

SEQ ID NO: 111874 - RNA, 22 nt, Human
uaucuucuugccaggcuggugu

SEQ ID NO: 111875 - RNA, 19 nt, Human
uaucuuuaugcaguggugg

SEQ ID NO: 111876 - RNA, 22 nt, Human
uaucuuucuguccuagauucug

SEQ ID NO: 111877 - RNA, 22 nt, Human
uaugaaacauucauacaaauaa

SEQ ID NO: 111878 - RNA, 22 nt, Human
uaugaaagaaucucagagcaca

SEQ ID NO: 111879 - RNA, 22 nt, Human
uaugaaauuucuaguucugcuu

SEQ ID NO: 111880 - RNA, 22 nt, Human
uaugaacauguucauugacuua

SEQ ID NO: 111881 - RNA, 22 nt, Human
uaugaacauugaagaggagccc

SEQ ID NO: 111882 - RNA, 22 nt, Human
uaugaacuagcugauuuaguuu

SEQ ID NO: 111883 - RNA, 22 nt, Human
uaugaacugcucuuguguuuug

SEQ ID NO: 111884 - RNA, 22 nt, Human
uaugaacuuuugaugugacaug

SEQ ID NO: 111885 - RNA, 22 nt, Human
uaugaagaaaccuauccucuag

SEQ ID NO: 111886 - RNA, 22 nt, Human
uaugaagaagacaaaugacacu

SEQ ID NO: 111887 - RNA, 22 nt, Human
uaugaagaaguucugugaaaug

SEQ ID NO: 111888 - RNA, 22 nt, Human
uaugaagauugcggucuggaau

SEQ ID NO: 111889 - RNA, 22 nt, Human
uaugaagcugauaaucacugau

SEQ ID NO: 111890 - RNA, 22 nt, Human
ugcaaaagaauauagauauugu

SEQ ID NO: 111891 - RNA, 23 nt, Human
ugcaaaauuugcagaguucgaug

SEQ ID NO: 111892 - RNA, 22 nt, Human
ugcaaacagccuugaaagaggg

SEQ ID NO: 111893 - RNA, 22 nt, Human
ugcaaacaggagaguaaguaua

SEQ ID NO: 111894 - RNA, 22 nt, Human
ugcaaacaucaauggccugagc

SEQ ID NO: 111895 - RNA, 18 nt, Human
ugcaaaggacacugagau

SEQ ID NO: 111896 - RNA, 22 nt, Human
ugcaaaggaggaugggaaagaa

SEQ ID NO: 111897 - RNA, 22 nt, Human
ugcaaaggggacagaguccacu

SEQ ID NO: 111898 - RNA, 22 nt, Human
ugcaaauacaaaaugguacagc

SEQ ID NO: 111899 - RNA, 22 nt, Human
ugcaaauaggggacaacucuuu

SEQ ID NO: 111900 - RNA, 22 nt, Human
ugcaaauauuagcauucgauau

SEQ ID NO: 111901 - RNA, 22 nt, Human
ugcaaauggagcauguauaaga

SEQ ID NO: 111902 - RNA, 22 nt, Human
ugcaaaugggugaggguuagga

SEQ ID NO: 111903 - RNA, 22 nt, Human
ugcaaauguguagguuuacaua

SEQ ID NO: 111904 - RNA, 22 nt, Human
uagcgggucacccugcugugaa

SEQ ID NO: 111905 - RNA, 22 nt, Human
uagcuaauggugaagauucaga

SEQ ID NO: 111906 - RNA, 22 nt, Human
uagcuacaaucacuguccuuug

SEQ ID NO: 111907 - RNA, 22 nt, Human
uagcuagaaagugaagaucaca

SEQ ID NO: 111908 - RNA, 22 nt, Human
uagcuagaaugcuucgugauau

SEQ ID NO: 111909 - RNA, 22 nt, Human
uagcuauuugagcauauuccag

SEQ ID NO: 111910 - RNA, 22 nt, Human
uauuucccagggagcaacaagc

SEQ ID NO: 111911 - RNA, 22 nt, Human
uauuucuggcuuugagggugau

SEQ ID NO: 111912 - RNA, 20 nt, Human
uauuucugggcaaccauuua

SEQ ID NO: 111913 - RNA, 22 nt, Human
uauuucuguaacucagggucug

SEQ ID NO: 111914 - RNA, 22 nt, Human
uauuucuguuuauuuguacauc

SEQ ID NO: 111915 - RNA, 22 nt, Human
uauuucuugagacucgucuucc

SEQ ID NO: 111916 - RNA, 22 nt, Human
uauuucuuuucgugacuuauug

SEQ ID NO: 111917 - RNA, 22 nt, Human
uauuugaagggagaaagugcca

SEQ ID NO: 111918 - RNA, 22 nt, Human
uauuugaauccugguucuucag

SEQ ID NO: 111919 - RNA, 22 nt, Human
uauuugaugaagguaaagucuu

SEQ ID NO: 111920 - RNA, 22 nt, Human
uauuugcaggcuuuugucaugg

SEQ ID NO: 111921 - RNA, 23 nt, Human
uauuugcuacugguaauucugga

SEQ ID NO: 111922 - RNA, 22 nt, Human
uauuugcugaaucugauucaga

SEQ ID NO: 111923 - RNA, 22 nt, Human
uauuugcuuugguccuccaagc

SEQ ID NO: 111924 - RNA, 22 nt, Human
uauuugcuuuugugccacagau

SEQ ID NO: 111925 - RNA, 22 nt, Human
uauuuggaaaugauaaaguacu

SEQ ID NO: 111926 - RNA, 22 nt, Human
uauuuggaaucugccuuaggac

SEQ ID NO: 111927 - RNA, 22 nt, Human
uauuuggagaugggaucuucaa

SEQ ID NO: 111928 - RNA, 22 nt, Human
uauuuggagcugugugagcuca

SEQ ID NO: 111929 - RNA, 22 nt, Human
uauuuggauacaaucauuugcu

SEQ ID NO: 111930 - RNA, 22 nt, Human
uauuuggugaaucuauggucag

SEQ ID NO: 111931 - RNA, 22 nt, Human
uauuuguccuuauuaagaucug

SEQ ID NO: 111932 - RNA, 22 nt, Human
uauuugucuuucuuauaagaau

SEQ ID NO: 111933 - RNA, 22 nt, Human
uauuuguguggguaucuauaua

SEQ ID NO: 111934 - RNA, 22 nt, Human
uauuuguugaguuguuaugucu

SEQ ID NO: 111935 - RNA, 22 nt, Human
uauuuuaaagacugccagccua

SEQ ID NO: 111936 - RNA, 22 nt, Human
uauuuuacaaaugggaaugcug

SEQ ID NO: 111937 - RNA, 22 nt, Human
uauuuuacagacuacuuuagau

SEQ ID NO: 111938 - RNA, 22 nt, Human
uauuuuacaugacagguguuua

SEQ ID NO: 111939 - RNA, 22 nt, Human
uauuuuacaugauccagaguug

SEQ ID NO: 111940 - RNA, 22 nt, Human
uauuuuacuuuaaagcgagaga

SEQ ID NO: 111941 - RNA, 22 nt, Human
uauuuucaccuucucuggauau

SEQ ID NO: 111942 - RNA, 22 nt, Human
uauuuucauucugugugacugu

SEQ ID NO: 111943 - RNA, 23 nt, Human
uauuuuccaaaugaugacuacau

SEQ ID NO: 111944 - RNA, 22 nt, Human
uauuuugagguauuuuugagcu

SEQ ID NO: 111945 - RNA, 20 nt, Human
uauuuugcaauuaugguuca

SEQ ID NO: 111946 - RNA, 22 nt, Human
uauuuugucuucugcucaucac

SEQ ID NO: 111947 - RNA, 22 nt, Human
uauuuuguuuuguauccacugu

SEQ ID NO: 111948 - RNA, 22 nt, Human
ucaaaaauggucuuugagcugc

SEQ ID NO: 111949 - RNA, 22 nt, Human
ucaaaacccagccaucaggacu

SEQ ID NO: 111950 - RNA, 22 nt, Human
ucaaaaccuaggcucucugcuu

SEQ ID NO: 111951 - RNA, 22 nt, Human
ucaaaacucauuuuggaaguaa

SEQ ID NO: 111952 - RNA, 22 nt, Human
ucaaaagaaacaccauguuccu

SEQ ID NO: 111953 - RNA, 20 nt, Human
ucaaaauaggugugggcgga

SEQ ID NO: 111954 - RNA, 22 nt, Human
ucaaaauuucagcacuagcccu

SEQ ID NO: 111955 - RNA, 22 nt, Human
ucaaacagaaauuguucaugcu

SEQ ID NO: 111956 - RNA, 22 nt, Human
ucaaacauaaaacuaaaucgag

SEQ ID NO: 111957 - RNA, 23 nt, Human
ucaaacauauugugagacacagg

SEQ ID NO: 111958 - RNA, 22 nt, Human
ucaaacuguuagauuucagcuc

SEQ ID NO: 111959 - RNA, 22 nt, Human
ucaaacuucuauucucuguuuu

SEQ ID NO: 111960 - RNA, 22 nt, Human
ucaaagaacaucaucugaaaug

SEQ ID NO: 111961 - RNA, 17 nt, Human
ucaaagaaugcaugcag

SEQ ID NO: 111962 - RNA, 22 nt, Human
ucaaagagcucuaucuucaaaa

SEQ ID NO: 111963 - RNA, 22 nt, Human
ucaaagauagauguugagaaau

SEQ ID NO: 111964 - RNA, 22 nt, Human
ucaaagaugauaggaaaucaua

SEQ ID NO: 111965 - RNA, 22 nt, Human
ucaaagauggguuuuguuugau

SEQ ID NO: 111966 - RNA, 22 nt, Human
ucaaagauugaaacuaaggaga

SEQ ID NO: 111967 - RNA, 22 nt, Human
ucaaagcaauuucaccagugcc

SEQ ID NO: 111968 - RNA, 22 nt, Human
ucaaagcacacuuagugguaga

SEQ ID NO: 111969 - RNA, 22 nt, Human
ucaaaggagacacaaggagaaa

SEQ ID NO: 111970 - RNA, 23 nt, Human
ucaaaggaggcaucguucugcag

SEQ ID NO: 111971 - RNA, 22 nt, Human
ucaaaggcaccaaggucacugc

SEQ ID NO: 111972 - RNA, 22 nt, Human
ucaaaggcccauugucccguug

SEQ ID NO: 111973 - RNA, 19 nt, Human
ucaaaggcuuuuaggagac

SEQ ID NO: 111974 - RNA, 22 nt, Human
ucaaaguaagaauuuauuacaa

SEQ ID NO: 111975 - RNA, 22 nt, Human
ucaaaguagccggauggaauuu

SEQ ID NO: 111976 - RNA, 22 nt, Human
ucaaagucauggcaggcucaga

SEQ ID NO: 111977 - RNA, 22 nt, Human
ucaaaguccuugcuuuuucugu

SEQ ID NO: 111978 - RNA, 22 nt, Human
ucaaauaaggagucaugaccau

SEQ ID NO: 111979 - RNA, 22 nt, Human
ucaaauaccagcaauuucaugu

SEQ ID NO: 111980 - RNA, 22 nt, Human
ucaaaucccagcucagccucuc

SEQ ID NO: 111981 - RNA, 22 nt, Human
ucaaaugcaccucucauuuguu

SEQ ID NO: 111982 - RNA, 17 nt, Human
ucaaauguacagaacua

SEQ ID NO: 111983 - RNA, 22 nt, Human
ucaaauguucccuguacuggcc

SEQ ID NO: 111984 - RNA, 22 nt, Human
ucaaauucagugugacaacauu

SEQ ID NO: 111985 - RNA, 22 nt, Human
ucaaauucuauucuauacucag

SEQ ID NO: 111986 - RNA, 22 nt, Human
ucaacaauugcauguugauguu

SEQ ID NO: 111987 - RNA, 19 nt, Human
ucaacaguggugcugugga

SEQ ID NO: 111988 - RNA, 22 nt, Human
ucaacauauaggcaaccuguaa

SEQ ID NO: 111989 - RNA, 22 nt, Human
ucaacucacaagaaugagcaag

SEQ ID NO: 111990 - RNA, 22 nt, Human
ucaagaaaaugacgccaaccuu

SEQ ID NO: 111991 - RNA, 22 nt, Human
ucaagaacuggaaauugauaug

SEQ ID NO: 111992 - RNA, 22 nt, Human
ucaagaacugugaagagucuga

SEQ ID NO: 111993 - RNA, 22 nt, Human
ucaagaacuuaggagcaagcca

SEQ ID NO: 111994 - RNA, 22 nt, Human
ucaagaauagcugcaaacaggg

SEQ ID NO: 111995 - RNA, 22 nt, Human
ucaagaauuuggauaagaaaug

SEQ ID NO: 111996 - RNA, 22 nt, Human
ucaagacagauggguaacuugg

SEQ ID NO: 111997 - RNA, 22 nt, Human
ucaagacaggguuuaagguuga

SEQ ID NO: 111998 - RNA, 22 nt, Human
ucaagacauauuaaaugugcga

SEQ ID NO: 111999 - RNA, 22 nt, Human
ucaagagaagugcuccacagua

SEQ ID NO: 112000 - RNA, 22 nt, Human
ucaagagcauguaucucccuaa

SEQ ID NO: 112001 - RNA, 22 nt, Human
ucaagauaagucaguauaucaa

SEQ ID NO: 112002 - RNA, 22 nt, Human
ucaagcaaagauacaaauggaa

SEQ ID NO: 112003 - RNA, 22 nt, Human
ucaagcaaucucugugucccug

SEQ ID NO: 112004 - RNA, 22 nt, Human
ucaagcagcagaucaagagcua

SEQ ID NO: 112005 - RNA, 22 nt, Human
ucaagcaggguagcaagcuggu

SEQ ID NO: 112006 - RNA, 22 nt, Human
ucaagcuacaaccauauucauu

SEQ ID NO: 112007 - RNA, 22 nt, Human
ucaagcucauuccucuaaccuc

SEQ ID NO: 112008 - RNA, 22 nt, Human
ucaaggaagggauauucuugaa

SEQ ID NO: 112009 - RNA, 22 nt, Human
ucaaggaaugacuauaugagga

SEQ ID NO: 112010 - RNA, 22 nt, Human
ucaaggagacagaaagcaaugg

SEQ ID NO: 112011 - RNA, 19 nt, Human
ucaaggcucccugagggau

SEQ ID NO: 112012 - RNA, 22 nt, Human
ucaaggugcugugcugugcuag

SEQ ID NO: 112013 - RNA, 22 nt, Human
ugccagcuagucacauauuaga

SEQ ID NO: 112014 - RNA, 22 nt, Human
ugccagcucagaguuaggacug

SEQ ID NO: 112015 - RNA, 22 nt, Human
ugccagcuccgaggagcugcag

SEQ ID NO: 112016 - RNA, 22 nt, Human
ugccagcugacagcagagacaa

SEQ ID NO: 112017 - RNA, 22 nt, Human
ugccagcuuuugacuaucuuag

SEQ ID NO: 112018 - RNA, 22 nt, Human
ugccaggacaaggaccacaugg

SEQ ID NO: 112019 - RNA, 22 nt, Human
ugccaggaguguagagugguuu

SEQ ID NO: 112020 - RNA, 22 nt, Human
ugccaggcauuugacagacacu

SEQ ID NO: 112021 - RNA, 22 nt, Human
ugccaggcccagcuccagagcu

SEQ ID NO: 112022 - RNA, 22 nt, Human
ugccaggcccucccacagauua

SEQ ID NO: 112023 - RNA, 22 nt, Human
ugccaggcccugcgggguccca

SEQ ID NO: 112024 - RNA, 22 nt, Human
ugccaggcgugguggugcgcac

SEQ ID NO: 112025 - RNA, 22 nt, Human
uagcuauuuugcuuggaaauac

SEQ ID NO: 112026 - RNA, 22 nt, Human
uagcucaucuaggcuaccacag

SEQ ID NO: 112027 - RNA, 22 nt, Human
uagcucauguaauccgaacaua

SEQ ID NO: 112028 - RNA, 22 nt, Human
uagcucuggcauucuuuccaaa

SEQ ID NO: 112029 - RNA, 22 nt, Human
uagcucuucaaucacugucucc

SEQ ID NO: 112030 - RNA, 22 nt, Human
uagcugaaggcuacagcagaac

SEQ ID NO: 112031 - RNA, 22 nt, Human
uagcugaaugccuuggauuuuu

SEQ ID NO: 112032 - RNA, 22 nt, Human
uagcugccaaaagggugggcua

SEQ ID NO: 112033 - RNA, 22 nt, Human
uagcugccuagacagcuauagc

SEQ ID NO: 112034 - RNA, 22 nt, Human
uagcugccuuugggcuccugcu

SEQ ID NO: 112035 - RNA, 22 nt, Human
uagcugcuuagaaaucacugag

SEQ ID NO: 112036 - RNA, 22 nt, Human
uagcugcuucagucuaggucuc

SEQ ID NO: 112037 - RNA, 22 nt, Human
uagcugggagugucugaugggu

SEQ ID NO: 112038 - RNA, 22 nt, Human
uagcuggggcuuucauucuugc

SEQ ID NO: 112039 - RNA, 22 nt, Human
uagcugggucucuguuuucuca

SEQ ID NO: 112040 - RNA, 22 nt, Human
uagcuggguugaggucaucuac

SEQ ID NO: 112041 - RNA, 22 nt, Human
uagcugugacguaucucuaugg

SEQ ID NO: 112042 - RNA, 22 nt, Human
uagcugugagcacccaggcugu

SEQ ID NO: 112043 - RNA, 22 nt, Human
uagcugugcccagggaaguugu

SEQ ID NO: 112044 - RNA, 22 nt, Human
uagcugugcccgccacccaacg

SEQ ID NO: 112045 - RNA, 22 nt, Human
uagcuguucucuguaaauugga

SEQ ID NO: 112046 - RNA, 22 nt, Human
uagcuguuggcuuacaucuguu

SEQ ID NO: 112047 - RNA, 22 nt, Human
uagcuguugggagagggcuaga

SEQ ID NO: 112048 - RNA, 22 nt, Human
uagcuguuuaucaaguucuuga

SEQ ID NO: 112049 - RNA, 22 nt, Human
uagcuguuucagugcagcagaa

SEQ ID NO: 112050 - RNA, 22 nt, Human
uagcuguuuugccauaagcgcu

SEQ ID NO: 112051 - RNA, 22 nt, Human
uagcuuaaaccaaucugaauaa

SEQ ID NO: 112052 - RNA, 22 nt, Human
uagcuuaacagcaaaacuguug

SEQ ID NO: 112053 - RNA, 22 nt, Human
uagcuuaaggaguaccagauca

SEQ ID NO: 112054 - RNA, 22 nt, Human
uagcuuaaggcaggcccuuguc

SEQ ID NO: 112055 - RNA, 22 nt, Human
uagcuucagggaaaccacugcu

SEQ ID NO: 112056 - RNA, 22 nt, Human
uagcuucuggaguguuugaaaa

SEQ ID NO: 112057 - RNA, 22 nt, Human
uagcuucugggaguguuuacua

SEQ ID NO: 112058 - RNA, 22 nt, Human
uagcuuguuacacagcaauguu

SEQ ID NO: 112059 - RNA, 22 nt, Human
uagcuuuaaaaaucaucaaagc

SEQ ID NO: 112060 - RNA, 22 nt, Human
uagcuuuaauaagcugcugaau

SEQ ID NO: 112061 - RNA, 22 nt, Human
uagcuuuagugaaaaauaucag

SEQ ID NO: 112062 - RNA, 22 nt, Human
uagcuuugcaaaggaaguuuua

SEQ ID NO: 112063 - RNA, 22 nt, Human
uagcuuugccacacauguagau

SEQ ID NO: 112064 - RNA, 22 nt, Human
uagcuuugccaucugucacaua

SEQ ID NO: 112065 - RNA, 22 nt, Human
uagcuuugcccgugcuggauuu

SEQ ID NO: 112066 - RNA, 22 nt, Human
uagcuuuguuagaaugucuuca

SEQ ID NO: 112067 - RNA, 22 nt, Human
uagcuuuuaguacuuaauggcu

SEQ ID NO: 112068 - RNA, 16 nt, Human
uagcuuuuuccuaugu

SEQ ID NO: 112069 - RNA, 22 nt, Human
uaggaaaacgugauuuucucac

SEQ ID NO: 112070 - RNA, 22 nt, Human
uaggaaaagucuagauugauga

SEQ ID NO: 112071 - RNA, 22 nt, Human
uaggaaacagugcauauauagu

SEQ ID NO: 112072 - RNA, 22 nt, Human
uaggaaagcaguagagccagga

SEQ ID NO: 112073 - RNA, 22 nt, Human
uaggaaauacuguaaguuuggg

SEQ ID NO: 112074 - RNA, 20 nt, Human
uaggaaaucgaggcagggug

SEQ ID NO: 112075 - RNA, 22 nt, Human
uaggaaaugcuccauugcauaa

SEQ ID NO: 112076 - RNA, 22 nt, Human
uaggaaauuugaaauauguggg

SEQ ID NO: 112077 - RNA, 22 nt, Human
uaggaacaacugcagguacaag

SEQ ID NO: 112078 - RNA, 22 nt, Human
uaggaacaaguuuccuugcugu

SEQ ID NO: 112079 - RNA, 22 nt, Human
uaggaacacauccuccucuagc

SEQ ID NO: 112080 - RNA, 22 nt, Human
uaggaacaguuucaggauguuu

SEQ ID NO: 112081 - RNA, 22 nt, Human
uaggaacauaugcagugcuuuu

SEQ ID NO: 112082 - RNA, 22 nt, Human
uaggaacaugcccuuaccuucc

SEQ ID NO: 112083 - RNA, 18 nt, Human
uaggaacauugauuggag

SEQ ID NO: 112084 - RNA, 22 nt, Human
uaggaaccagagcacucugggc

SEQ ID NO: 112085 - RNA, 22 nt, Human
uaggaaccuacugugguuuuaa

SEQ ID NO: 112086 - RNA, 22 nt, Human
uaggaacuaguagauguguaaa

SEQ ID NO: 112087 - RNA, 22 nt, Human
uaggaagauaaacauuuguaug

SEQ ID NO: 112088 - RNA, 22 nt, Human
uaggaagaucaaguuuaucuca

SEQ ID NO: 112089 - RNA, 22 nt, Human
uaggaagcuuccagaacuuaag

SEQ ID NO: 112090 - RNA, 22 nt, Human
uaggaagggaaaggcuucaacu

SEQ ID NO: 112091 - RNA, 22 nt, Human
uaggaaugauaauaguaaagag

SEQ ID NO: 112092 - RNA, 22 nt, Human
uaggaauugaaaaguggucuga

SEQ ID NO: 112093 - RNA, 22 nt, Human
uaggaauuuugcaugggaauuu

SEQ ID NO: 112094 - RNA, 23 nt, Human
uaggacagaaugcagaaaaauac

SEQ ID NO: 112095 - RNA, 22 nt, Human
uaggacagagcugguuacaaug

SEQ ID NO: 112096 - RNA, 22 nt, Human
uaggacaggaucaugaugcugg

SEQ ID NO: 112097 - RNA, 22 nt, Human
uaggacagggacaucuuuuuga

SEQ ID NO: 112098 - RNA, 22 nt, Human
uaggacaggugaggggcugugg

SEQ ID NO: 112099 - RNA, 22 nt, Human
uaggacaguagcuggugcacag

SEQ ID NO: 112100 - RNA, 22 nt, Human
uaggacugauaaggggccagag

SEQ ID NO: 112101 - RNA, 21 nt, Human
uaggacuuuacaauuuaggaa

SEQ ID NO: 112102 - RNA, 22 nt, Human
uaggagagcugaacuauugucu

SEQ ID NO: 112103 - RNA, 22 nt, Human
uaggagcuauaaugugaagucu

SEQ ID NO: 112104 - RNA, 21 nt, Human
uaggagcugauggggaaguag

SEQ ID NO: 112105 - RNA, 22 nt, Human
uaggaguaacucucgucaucau

SEQ ID NO: 112106 - RNA, 22 nt, Human
uaggagugcauaaaacuauauu

SEQ ID NO: 112107 - RNA, 22 nt, Human
uaggauuuuuuggauucuggau

SEQ ID NO: 112108 - RNA, 22 nt, Human
uaggcaacaugucgaauacugu

SEQ ID NO: 112109 - RNA, 22 nt, Human
uaggcaaguugcccaaucucuc

SEQ ID NO: 112110 - RNA, 22 nt, Human
uaggcaauguucuaaggaauga

SEQ ID NO: 112111 - RNA, 22 nt, Human
uaggcacaaaaugaaaauggca

SEQ ID NO: 112112 - RNA, 22 nt, Human
uaggcacuggggaggcagcaug

SEQ ID NO: 112113 - RNA, 22 nt, Human
uaggcacuguguuuguaggagu

SEQ ID NO: 112114 - RNA, 21 nt, Human
uaggcagaggagcagguaucu

SEQ ID NO: 112115 - RNA, 22 nt, Human
uaggcagauuccauauuuuggc

SEQ ID NO: 112116 - RNA, 22 nt, Human
uaggcagccagcaucaguuggg

SEQ ID NO: 112117 - RNA, 22 nt, Human
uaggcagcgcuuggcugugcuu

SEQ ID NO: 112118 - RNA, 22 nt, Human
uaggcagggauuaggguugauu

SEQ ID NO: 112119 - RNA, 22 nt, Human
uaggcagugcucugugcuucag

SEQ ID NO: 112120 - RNA, 22 nt, Human
uaggccacgaaggagaugauag

SEQ ID NO: 112121 - RNA, 22 nt, Human
uaggccacggaaagcagguugc

SEQ ID NO: 112122 - RNA, 22 nt, Human
ugccugcuccaguccuguccac

SEQ ID NO: 112123 - RNA, 19 nt, Human
ugccugcuccuggcuucca

SEQ ID NO: 112124 - RNA, 16 nt, Human
ugccugcucugaucuc

SEQ ID NO: 112125 - RNA, 22 nt, Human
ugccugcucuuaccacucuccc

SEQ ID NO: 112126 - RNA, 22 nt, Human
ugccugcuuguuuaccuacucc

SEQ ID NO: 112127 - RNA, 22 nt, Human
ugccuggaucugaggacccauu

SEQ ID NO: 112128 - RNA, 22 nt, Human
ugccuggcaagaggggcuggcu

SEQ ID NO: 112129 - RNA, 22 nt, Human
ugccuggcaaugccagaagcca

SEQ ID NO: 112130 - RNA, 22 nt, Human
ugccuggcacagagcagguggc

SEQ ID NO: 112131 - RNA, 19 nt, Human
ugccuggcaccagcuccac

SEQ ID NO: 112132 - RNA, 22 nt, Human
ugccuggcacuccuggagcuca

SEQ ID NO: 112133 - RNA, 22 nt, Human
ugccuggcauguuauagacaca

SEQ ID NO: 112134 - RNA, 20 nt, Human
ugccuggccuuucucugccc

SEQ ID NO: 112135 - RNA, 22 nt, Human
ugccuggcugaggugacagguu

SEQ ID NO: 112136 - RNA, 22 nt, Human
ugccugggaaccaauccuggcu

SEQ ID NO: 112137 - RNA, 22 nt, Human
ugccugggacucuguuaucuug

SEQ ID NO: 112138 - RNA, 22 nt, Human
ugccugggccuucccaccucug

SEQ ID NO: 112139 - RNA, 22 nt, Human
ugccugggcucaccgccucuuu

SEQ ID NO: 112140 - RNA, 22 nt, Human
ugccuggggauugcucugggcc

SEQ ID NO: 112141 - RNA, 22 nt, Human
ugccugggugcuggcuggucac

SEQ ID NO: 112142 - RNA, 22 nt, Human
ugccuguccugaggaugagggu

SEQ ID NO: 112143 - RNA, 22 nt, Human
uagauucuaagauucuaagaau

SEQ ID NO: 112144 - RNA, 22 nt, Human
uagauucuacagcucagcuguc

SEQ ID NO: 112145 - RNA, 22 nt, Human
uagauucucccaccugccaggc

SEQ ID NO: 112146 - RNA, 22 nt, Human
uagauucuucuuuugagucucu

SEQ ID NO: 112147 - RNA, 22 nt, Human
uagauuuaagacccugaauuug

SEQ ID NO: 112148 - RNA, 22 nt, Human
uagauuucaggagacaaaaugg

SEQ ID NO: 112149 - RNA, 22 nt, Human
uagauuucaggcuggcuugcgg

SEQ ID NO: 112150 - RNA, 22 nt, Human
uagauuucuaacagugugcuug

SEQ ID NO: 112151 - RNA, 22 nt, Human
uagauuugauguaagcauaguc

SEQ ID NO: 112152 - RNA, 22 nt, Human
uagauuugccugggaaagcuca

SEQ ID NO: 112153 - RNA, 22 nt, Human
uagauuuguuuccuucucucca

SEQ ID NO: 112154 - RNA, 22 nt, Human
uagcaaaagccacgauuacuuu

SEQ ID NO: 112155 - RNA, 22 nt, Human
uagcaaacucauacaugugggu

SEQ ID NO: 112156 - RNA, 22 nt, Human
uagcaaagaagauauuauugca

SEQ ID NO: 112157 - RNA, 22 nt, Human
uagcaaagaccaaagcuaguug

SEQ ID NO: 112158 - RNA, 22 nt, Human
uagcaaagagaaaaauuaugcu

SEQ ID NO: 112159 - RNA, 22 nt, Human
uagcaaagggaaagaagggccu

SEQ ID NO: 112160 - RNA, 23 nt, Human
uagcaaaguuguuugggaaauuu

SEQ ID NO: 112161 - RNA, 22 nt, Human
uagcaaauacaugauguaauuu

SEQ ID NO: 112162 - RNA, 22 nt, Human
uagcaaauguaaaaugccuaca

SEQ ID NO: 112163 - RNA, 22 nt, Human
uagcaaauguguuaugcuaugc

SEQ ID NO: 112164 - RNA, 22 nt, Human
uagcaacaauggaaguaacuuc

SEQ ID NO: 112165 - RNA, 22 nt, Human
uagcaacaugguuaucacauua

SEQ ID NO: 112166 - RNA, 22 nt, Human
uagcaacugccuuuacuauauu

SEQ ID NO: 112167 - RNA, 22 nt, Human
uagcaagaccaauauguagaua

SEQ ID NO: 112168 - RNA, 22 nt, Human
uagcaagaggaaacaaggggcc

SEQ ID NO: 112169 - RNA, 22 nt, Human
uagcaagauccuucccuggcgu

SEQ ID NO: 112170 - RNA, 20 nt, Human
uagcaagcaggaggugcaga

SEQ ID NO: 112171 - RNA, 22 nt, Human
uagcaaggcguggcacucaaau

SEQ ID NO: 112172 - RNA, 22 nt, Human
uagcaaggugaaguauggguga

SEQ ID NO: 112173 - RNA, 22 nt, Human
uagcaaguagauacucauuuag

SEQ ID NO: 112174 - RNA, 22 nt, Human
uagcaauagaaacauauaaagu

SEQ ID NO: 112175 - RNA, 22 nt, Human
uagcaaugcuucauuauuuaaa

SEQ ID NO: 112176 - RNA, 22 nt, Human
uagcacaaagagucuuucagag

SEQ ID NO: 112177 - RNA, 22 nt, Human
uagcacaaagucuugcccuuuu

SEQ ID NO: 112178 - RNA, 22 nt, Human
uagcacaagcaacuacugaagu

SEQ ID NO: 112179 - RNA, 22 nt, Human
uagcacaauaucaugucuguga

SEQ ID NO: 112180 - RNA, 22 nt, Human
uagcacacuaaagauauuaaca

SEQ ID NO: 112181 - RNA, 18 nt, Human
uagcacagagcaggaugu

SEQ ID NO: 112182 - RNA, 21 nt, Human
uagcacagcuguagacaguuu

SEQ ID NO: 112183 - RNA, 22 nt, Human
uagcacaggucuuguugccauu

SEQ ID NO: 112184 - RNA, 17 nt, Human
uagcacagugccuggua

SEQ ID NO: 112185 - RNA, 22 nt, Human
uagcacaguucacuaugauaca

SEQ ID NO: 112186 - RNA, 22 nt, Human
uagcacauaacuuagaauaguu

SEQ ID NO: 112187 - RNA, 22 nt, Human
uagcacaucuggcgcuuauagg

SEQ ID NO: 112188 - RNA, 22 nt, Human
uagcacaucuucuuggccugca

SEQ ID NO: 112189 - RNA, 22 nt, Human
uagcaccaaaacugaagaacau

SEQ ID NO: 112190 - RNA, 22 nt, Human
uagcaccuuagcauuucuagug

SEQ ID NO: 112191 - RNA, 22 nt, Human
uagcacuauauguuagcuauua

SEQ ID NO: 112192 - RNA, 22 nt, Human
uagcagaaacuguuacagaagg

SEQ ID NO: 112193 - RNA, 22 nt, Human
uagcagaacaauagucaaugau

SEQ ID NO: 112194 - RNA, 22 nt, Human
uagcagaagaacaacaugaucu

SEQ ID NO: 112195 - RNA, 22 nt, Human
uagcagagauaugggcauagau

SEQ ID NO: 112196 - RNA, 19 nt, Human
uagcagagaugacuccagc

SEQ ID NO: 112197 - RNA, 22 nt, Human
uagcagagcacaucuucauucu

SEQ ID NO: 112198 - RNA, 22 nt, Human
uagcagagguaaguguggcaau

SEQ ID NO: 112199 - RNA, 22 nt, Human
uagcagcaaaaugaccuucuaa

SEQ ID NO: 112200 - RNA, 22 nt, Human
uagcagcaagaaugggaugugu

SEQ ID NO: 112201 - RNA, 22 nt, Human
uagcagcaauuacacaguccgu

SEQ ID NO: 112202 - RNA, 22 nt, Human
uagcagcaauuucagaaguuug

SEQ ID NO: 112203 - RNA, 22 nt, Human
uagcagcacauggugguuuuau

SEQ ID NO: 112204 - RNA, 22 nt, Human
uagcagcaccuacacgucagag

SEQ ID NO: 112205 - RNA, 22 nt, Human
uagcagcauccuguggugaugg

SEQ ID NO: 112206 - RNA, 23 nt, Human
uagcagcauuuuuagccucuguc

SEQ ID NO: 112207 - RNA, 22 nt, Human
uagcagcgacuaaugaauaagu

SEQ ID NO: 112208 - RNA, 22 nt, Human
uagcagcucacagccucccauu

SEQ ID NO: 112209 - RNA, 22 nt, Human
uagcagcuccauuucucuggca

SEQ ID NO: 112210 - RNA, 22 nt, Human
uagcagcuccuaaacaguggug

SEQ ID NO: 112211 - RNA, 22 nt, Human
uagcagcucuuuacuaaccagu

SEQ ID NO: 112212 - RNA, 19 nt, Human
uagcagcugccaaaggaga

SEQ ID NO: 112213 - RNA, 22 nt, Human
uagcagcugugaguaaaagcca

SEQ ID NO: 112214 - RNA, 22 nt, Human
uagcagcuguggaggggcugug

SEQ ID NO: 112215 - RNA, 22 nt, Human
uagcaggaaaccuguguugagg

SEQ ID NO: 112216 - RNA, 22 nt, Human
uagcaggagagaaguuuuaagu

SEQ ID NO: 112217 - RNA, 22 nt, Human
uagcagggccaggcugggaacc

SEQ ID NO: 112218 - RNA, 22 nt, Human
uagcaggguaaauguagaugga

SEQ ID NO: 112219 - RNA, 22 nt, Human
uagcagugguuccuacguguug

SEQ ID NO: 112220 - RNA, 22 nt, Human
uagcauaauuuguagaaaauca

SEQ ID NO: 112221 - RNA, 22 nt, Human
uagcaucugaacuguugaaaag

SEQ ID NO: 112222 - RNA, 22 nt, Human
uagcaucugcguuggguuggac

SEQ ID NO: 112223 - RNA, 22 nt, Human
uagcaucuguucuuucauuaaa

SEQ ID NO: 112224 - RNA, 22 nt, Human
uagcaucuuuuucugucuucua

SEQ ID NO: 112225 - RNA, 22 nt, Human
uagcauggggagcagaaaguca

SEQ ID NO: 112226 - RNA, 22 nt, Human
uagcaugggucgcgucucugga

SEQ ID NO: 112227 - RNA, 22 nt, Human
uagcauuaaagguaagacauua

SEQ ID NO: 112228 - RNA, 22 nt, Human
uagcauuagagauagaaauagu

SEQ ID NO: 112229 - RNA, 22 nt, Human
uagcauuagucagauauguuuu

SEQ ID NO: 112230 - RNA, 22 nt, Human
uagcauuaucugucuuaucauu

SEQ ID NO: 112231 - RNA, 22 nt, Human
uaggacuugguuugaagauuuu

SEQ ID NO: 112232 - RNA, 22 nt, Human
uaggagaagagucagggccuaa

SEQ ID NO: 112233 - RNA, 22 nt, Human
uaggagacauugaucccaagaa

SEQ ID NO: 112234 - RNA, 18 nt, Human
uaggagagaauuuauuua

SEQ ID NO: 112235 - RNA, 22 nt, Human
uaggagccugcucugcagggac

SEQ ID NO: 112236 - RNA, 22 nt, Human
uaggagcuuuuggaguccugug

SEQ ID NO: 112237 - RNA, 22 nt, Human
uaggaggccauccagccugccu

SEQ ID NO: 112238 - RNA, 22 nt, Human
uaggagggggaacaaggcauac

SEQ ID NO: 112239 - RNA, 22 nt, Human
uaggaggguuagagggaaauau

SEQ ID NO: 112240 - RNA, 22 nt, Human
uaggauacaaauucuguaauuu

SEQ ID NO: 112241 - RNA, 22 nt, Human
uaggaugaaaauccagcuuaua

SEQ ID NO: 112242 - RNA, 22 nt, Human
uaggaugacugauagugauucc

SEQ ID NO: 112243 - RNA, 22 nt, Human
uaggaugagggguggccaagua

SEQ ID NO: 112244 - RNA, 22 nt, Human
uaggauguagcuaugucaucau

SEQ ID NO: 112245 - RNA, 22 nt, Human
uaggauuuauucuacaauauug

SEQ ID NO: 112246 - RNA, 22 nt, Human
uaggcaauauuagacuuugucu

SEQ ID NO: 112247 - RNA, 22 nt, Human
uaggcacaagaccaugcaaagg

SEQ ID NO: 112248 - RNA, 22 nt, Human
uaggcacugguuguggauaguu

SEQ ID NO: 112249 - RNA, 22 nt, Human
uaggcagaauuguugaaugaag

SEQ ID NO: 112250 - RNA, 20 nt, Human
uaggcagcuugacccuuggu

SEQ ID NO: 112251 - RNA, 22 nt, Human
uaggcaugcaaauaaaugugca

SEQ ID NO: 112252 - RNA, 22 nt, Human
uaggccaaaugacuugauguuu

SEQ ID NO: 112253 - RNA, 22 nt, Human
uaggccaaggacaguaaggaca

SEQ ID NO: 112254 - RNA, 22 nt, Human
uaggccaaguugaucagacauc

SEQ ID NO: 112255 - RNA, 22 nt, Human
uaggccacaaauaagauccugu

SEQ ID NO: 112256 - RNA, 22 nt, Human
uaggccacagaugagacauaag

SEQ ID NO: 112257 - RNA, 21 nt, Human
uaggccacauggguuggagau

SEQ ID NO: 112258 - RNA, 22 nt, Human
uaggccacucuccuuugucuca

SEQ ID NO: 112259 - RNA, 22 nt, Human
uaggccaggagucagacagauu

SEQ ID NO: 112260 - RNA, 23 nt, Human
ucagaaggugccacugacgcuuu

SEQ ID NO: 112261 - RNA, 22 nt, Human
ucagaaguaagguucucccaag

SEQ ID NO: 112262 - RNA, 22 nt, Human
ucagaaguacugugcuacaaua

SEQ ID NO: 112263 - RNA, 22 nt, Human
ucagaaguaggagacauucuug

SEQ ID NO: 112264 - RNA, 22 nt, Human
ucagaaguauuaugcuaaagga

SEQ ID NO: 112265 - RNA, 22 nt, Human
ucagaagucuggacugcuucuc

SEQ ID NO: 112266 - RNA, 22 nt, Human
ucagaaguuaauacgaggagaa

SEQ ID NO: 112267 - RNA, 22 nt, Human
ucagaaguuucaaucccagcug

SEQ ID NO: 112268 - RNA, 22 nt, Human
ucagaaucugaaaagcgcuugg

SEQ ID NO: 112269 - RNA, 22 nt, Human
ucagaaugaaauuucuuucaga

SEQ ID NO: 112270 - RNA, 21 nt, Human
ucagaauuaccccuggaucug

SEQ ID NO: 112271 - RNA, 22 nt, Human
ucagaauucuacaauagaucag

SEQ ID NO: 112272 - RNA, 22 nt, Human
ucagaauucuagcucuucccuu

SEQ ID NO: 112273 - RNA, 22 nt, Human
ucagaauuggaacgugaagauu

SEQ ID NO: 112274 - RNA, 22 nt, Human
ucagaauuguggagaaagggga

SEQ ID NO: 112275 - RNA, 22 nt, Human
ucagacagagaaguacaaugag

SEQ ID NO: 112276 - RNA, 22 nt, Human
ucagacagauuuugacacuugc

SEQ ID NO: 112277 - RNA, 22 nt, Human
ucagacagcuugcagggaggug

SEQ ID NO: 112278 - RNA, 22 nt, Human
ucagacauauuuuuaacaaagu

SEQ ID NO: 112279 - RNA, 22 nt, Human
ucagacaugggauaugaagcuc

SEQ ID NO: 112280 - RNA, 22 nt, Human
ucagaccauccugcuguuagug

SEQ ID NO: 112281 - RNA, 20 nt, Human
ucagacccuacauuccucag

SEQ ID NO: 112282 - RNA, 22 nt, Human
ucagacccugcgguguuuggau

SEQ ID NO: 112283 - RNA, 22 nt, Human
ucagaccucugaccuugccaaa

SEQ ID NO: 112284 - RNA, 22 nt, Human
ucagacugaucaucuaucagau

SEQ ID NO: 112285 - RNA, 22 nt, Human
ucagacuuccacuuugugcacu

SEQ ID NO: 112286 - RNA, 22 nt, Human
ucagacuugacuuuguaaguuu

SEQ ID NO: 112287 - RNA, 22 nt, Human
ucagacuuuuaaagacugaaug

SEQ ID NO: 112288 - RNA, 22 nt, Human
ucagagaaaggccaaaauauca

SEQ ID NO: 112289 - RNA, 22 nt, Human
ucagagaaaugacaauauauag

SEQ ID NO: 112290 - RNA, 22 nt, Human
ucagagaaaugcugagcucaug

SEQ ID NO: 112291 - RNA, 22 nt, Human
ucagagaacacagaggugaugu

SEQ ID NO: 112292 - RNA, 21 nt, Human
ucagagaacccggcaggcaag

SEQ ID NO: 112293 - RNA, 22 nt, Human
ucagagaaggcugagucacggc

SEQ ID NO: 112294 - RNA, 21 nt, Human
ucagagaauggccuacucuca

SEQ ID NO: 112295 - RNA, 22 nt, Human
ucagagacaguucuggggcagg

SEQ ID NO: 112296 - RNA, 22 nt, Human
ucagagaccuagcaagaaauug

SEQ ID NO: 112297 - RNA, 22 nt, Human
ucagagagcagaacuuuuuuac

SEQ ID NO: 112298 - RNA, 22 nt, Human
ucagagaggauuuuaauaagug

SEQ ID NO: 112299 - RNA, 21 nt, Human
ucagagagucacagugaacug

SEQ ID NO: 112300 - RNA, 22 nt, Human
ucagagaguuggaaagaauuaa

SEQ ID NO: 112301 - RNA, 22 nt, Human
ucagagaguuuucacuagggug

SEQ ID NO: 112302 - RNA, 22 nt, Human
ucagagaugcagugccaccuac

SEQ ID NO: 112303 - RNA, 22 nt, Human
ucagagcaugugggcugcaguu

SEQ ID NO: 112304 - RNA, 22 nt, Human
ucagaggacaagcucccuggug

SEQ ID NO: 112305 - RNA, 22 nt, Human
ucagaggaccuuacugagaacc

SEQ ID NO: 112306 - RNA, 22 nt, Human
ucagaggacuaccuucuccagu

SEQ ID NO: 112307 - RNA, 22 nt, Human
ucagaggagaccaaggggaaua

SEQ ID NO: 112308 - RNA, 23 nt, Human
ucagaggaucaucaaacguuuuc

SEQ ID NO: 112309 - RNA, 22 nt, Human
ucagaggauuggacuuuuaugu

SEQ ID NO: 112310 - RNA, 22 nt, Human
ucagaggcuacagucugggagu

SEQ ID NO: 112311 - RNA, 22 nt, Human
ucagaggcucaucugccuugca

SEQ ID NO: 112312 - RNA, 21 nt, Human
ucagaggcugggggaaugccc

SEQ ID NO: 112313 - RNA, 22 nt, Human
ucagaggcuuccuuccucggag

SEQ ID NO: 112314 - RNA, 22 nt, Human
ucagaggcuucuggccagucug

SEQ ID NO: 112315 - RNA, 22 nt, Human
ucagaggguggcugggagcauc

SEQ ID NO: 112316 - RNA, 18 nt, Human
ucagagguacagaaaagu

SEQ ID NO: 112317 - RNA, 22 nt, Human
ucagaggugagcuucuugcuaa

SEQ ID NO: 112318 - RNA, 22 nt, Human
ucagaggugguaaaggacagca

SEQ ID NO: 112319 - RNA, 22 nt, Human
ucagagguuccggccauaacca

SEQ ID NO: 112320 - RNA, 22 nt, Human
ucagaguaacuacaguauagac

SEQ ID NO: 112321 - RNA, 22 nt, Human
ucagagucauugcaaguagaag

SEQ ID NO: 112322 - RNA, 22 nt, Human
ucagaguccaugguacuuaauu

SEQ ID NO: 112323 - RNA, 22 nt, Human
ucagaguccucacccugaggau

SEQ ID NO: 112324 - RNA, 22 nt, Human
ucagagucuuaacuauucagag

SEQ ID NO: 112325 - RNA, 22 nt, Human
ucagagugaccuuacauggucu

SEQ ID NO: 112326 - RNA, 22 nt, Human
ucagagugcagcgggaggcugg

SEQ ID NO: 112327 - RNA, 22 nt, Human
ucagagugcagggaguagcagc

SEQ ID NO: 112328 - RNA, 22 nt, Human
ucagaguguuuuacuaaacaag

SEQ ID NO: 112329 - RNA, 22 nt, Human
ucagauaagugaagcaaaguuu

SEQ ID NO: 112330 - RNA, 22 nt, Human
ucagauacuguggcuuaugggc

SEQ ID NO: 112331 - RNA, 22 nt, Human
ucagauagugauaauagcaugu

SEQ ID NO: 112332 - RNA, 22 nt, Human
ucagauauggagucuaaaacca

SEQ ID NO: 112333 - RNA, 22 nt, Human
ucagauauucaauuaaguuaaa

SEQ ID NO: 112334 - RNA, 22 nt, Human
ucagauauucucuaagaacaau

SEQ ID NO: 112335 - RNA, 22 nt, Human
ucagauggaaagguuacugucc

SEQ ID NO: 112336 - RNA, 22 nt, Human
ucagauggauucauuacaugac

SEQ ID NO: 112337 - RNA, 22 nt, Human
ucagauggauuuauacuauuuc

SEQ ID NO: 112338 - RNA, 20 nt, Human
ucagaugggagugagccauc

SEQ ID NO: 112339 - RNA, 22 nt, Human
ucagauggguuuugaaggaugu

SEQ ID NO: 112340 - RNA, 22 nt, Human
uaucuguucaauggaagaugac

SEQ ID NO: 112341 - RNA, 22 nt, Human
uaucuguuggcuccuaguugua

SEQ ID NO: 112342 - RNA, 22 nt, Human
uaucuguugucuuuuacaugua

SEQ ID NO: 112343 - RNA, 22 nt, Human
uaucuguuuccuaugcauguga

SEQ ID NO: 112344 - RNA, 19 nt, Human
uaucuguuuccugcuuguc

SEQ ID NO: 112345 - RNA, 22 nt, Human
uaucuguuuuuacagugucuuu

SEQ ID NO: 112346 - RNA, 22 nt, Human
uaucuuaaaaaucgaagcagau

SEQ ID NO: 112347 - RNA, 22 nt, Human
uaucuuaaaugcaugauagaca

SEQ ID NO: 112348 - RNA, 23 nt, Human
uaucuuaccucccuucuuuccug

SEQ ID NO: 112349 - RNA, 22 nt, Human
uaucuucacuuauaucuuucuu

SEQ ID NO: 112350 - RNA, 22 nt, Human
uaucuucagcugaagcagaguc

SEQ ID NO: 112351 - RNA, 22 nt, Human
uaucuugccuuuaacugcucau

SEQ ID NO: 112352 - RNA, 22 nt, Human
uaucuuguaauagguccacuug

SEQ ID NO: 112353 - RNA, 22 nt, Human
uaucuugugcagaugaaagaau

SEQ ID NO: 112354 - RNA, 22 nt, Human
uaucuuuaacuugcaguauuua

SEQ ID NO: 112355 - RNA, 22 nt, Human
uaucuuuguaucaaucuccauu

SEQ ID NO: 112356 - RNA, 18 nt, Human
uaucuuuuccagugguau

SEQ ID NO: 112357 - RNA, 23 nt, Human
uaucuuuuucaauguuggaaaua

SEQ ID NO: 112358 - RNA, 22 nt, Human
uaugaaaauuuagcugaagcau

SEQ ID NO: 112359 - RNA, 22 nt, Human
uaugaaaugguaguaggaaggg

SEQ ID NO: 112360 - RNA, 22 nt, Human
uaugaaauuuaaacacagauca

SEQ ID NO: 112361 - RNA, 22 nt, Human
uaugaacacuuauuggggaagg

SEQ ID NO: 112362 - RNA, 21 nt, Human
uaugaacaugaccaauagucc

SEQ ID NO: 112363 - RNA, 22 nt, Human
uaugaacaugcugugguuauaa

SEQ ID NO: 112364 - RNA, 22 nt, Human
uaugaacauuauuuuugucuag

SEQ ID NO: 112365 - RNA, 22 nt, Human
uaugaacucuggagucugagug

SEQ ID NO: 112366 - RNA, 23 nt, Human
uaugaacugcauugcuggugugu

SEQ ID NO: 112367 - RNA, 22 nt, Human
uaugaacuuuaagcucuguguc

SEQ ID NO: 112368 - RNA, 22 nt, Human
uaugaagauauaucugaucucu

SEQ ID NO: 112369 - RNA, 20 nt, Human
uaugaaguguucuucuggua

SEQ ID NO: 112370 - RNA, 19 nt, Human
uaugaaguugauaaaaguu

SEQ ID NO: 112371 - RNA, 22 nt, Human
uaugaauucucuuguguauagu

SEQ ID NO: 112372 - RNA, 20 nt, Human
uaugaauucuggucccuggg

SEQ ID NO: 112373 - RNA, 22 nt, Human
uaugacaggcaugagauccuaa

SEQ ID NO: 112374 - RNA, 22 nt, Human
uaugacauuauaaaggauuauu

SEQ ID NO: 112375 - RNA, 22 nt, Human
uaugacauuucucugauuugug

SEQ ID NO: 112376 - RNA, 22 nt, Human
uaugaccauaagauuacuguua

SEQ ID NO: 112377 - RNA, 22 nt, Human
uaugacuauagggcuuaguguu

SEQ ID NO: 112378 - RNA, 22 nt, Human
uaugacuuauuucaucaguucu

SEQ ID NO: 112379 - RNA, 21 nt, Human
uaugagaaaacugaggugcau

SEQ ID NO: 112380 - RNA, 22 nt, Human
uaugagaaagucguaugucucc

SEQ ID NO: 112381 - RNA, 22 nt, Human
uaugagauauucccagcgucua

SEQ ID NO: 112382 - RNA, 22 nt, Human
uaugaggcacuucauuagcugg

SEQ ID NO: 112383 - RNA, 22 nt, Human
uaugaguacaaggaaggaugga

SEQ ID NO: 112384 - RNA, 22 nt, Human
uaugaguacaaggaaucuucca

SEQ ID NO: 112385 - RNA, 22 nt, Human
uaugaguacaaggacucugucu

SEQ ID NO: 112386 - RNA, 23 nt, Human
uaugagucaucugcuacaaccca

SEQ ID NO: 112387 - RNA, 22 nt, Human
uaugaguucaguuaucuuaagu

SEQ ID NO: 112388 - RNA, 22 nt, Human
uaugaguuuaaggcuaaaauag

SEQ ID NO: 112389 - RNA, 20 nt, Human
uaugauaauuacaaaauagu

SEQ ID NO: 112390 - RNA, 22 nt, Human
uaugauauucuaaauugacacc

SEQ ID NO: 112391 - RNA, 22 nt, Human
uaugaucucugggucuggagcu

SEQ ID NO: 112392 - RNA, 22 nt, Human
uaugaucuuuauaaccuaucuu

SEQ ID NO: 112393 - RNA, 19 nt, Human
ucaguggaugaacauguuu

SEQ ID NO: 112394 - RNA, 22 nt, Human
ucaguggauuggaugagaucug

SEQ ID NO: 112395 - RNA, 20 nt, Human
ucagugggaaagugagagug

SEQ ID NO: 112396 - RNA, 22 nt, Human
ucaguguaaguuauguagaugu

SEQ ID NO: 112397 - RNA, 18 nt, Human
ucaguguagaucugugua

SEQ ID NO: 112398 - RNA, 22 nt, Human
ucaguguagcagacuuguagcc

SEQ ID NO: 112399 - RNA, 22 nt, Human
ucaguguagggcagaccccugg

SEQ ID NO: 112400 - RNA, 16 nt, Human
ucagugucagcuccug

SEQ ID NO: 112401 - RNA, 20 nt, Human
ucagugucaguagccacuac

SEQ ID NO: 112402 - RNA, 22 nt, Human
ucaguguccauaaauaaaguuu

SEQ ID NO: 112403 - RNA, 22 nt, Human
ucagugucucauaugagguuuc

SEQ ID NO: 112404 - RNA, 22 nt, Human
ucagugucuugaccugggugug

SEQ ID NO: 112405 - RNA, 22 nt, Human
ucagugucuugggcuugaaugc

SEQ ID NO: 112406 - RNA, 22 nt, Human
ucagugugaauucaggagccua

SEQ ID NO: 112407 - RNA, 22 nt, Human
ucagugugaggggcuggguccu

SEQ ID NO: 112408 - RNA, 22 nt, Human
ucagugugcacucugugaccca

SEQ ID NO: 112409 - RNA, 22 nt, Human
ucaguguuacauuauauagaac

SEQ ID NO: 112410 - RNA, 22 nt, Human
ucaguguuauuagaugagguuu

SEQ ID NO: 112411 - RNA, 22 nt, Human
ucaguguucagcggugugugca

SEQ ID NO: 112412 - RNA, 22 nt, Human
ucaguguucgcucagggacucc

SEQ ID NO: 112413 - RNA, 22 nt, Human
ucaguguuggcauucagaaaug

SEQ ID NO: 112414 - RNA, 22 nt, Human
ucaguguuuaccguauguuguu

SEQ ID NO: 112415 - RNA, 22 nt, Human
ucaguuaagacugcacuggacu

SEQ ID NO: 112416 - RNA, 22 nt, Human
ucaguuaagcacuauacccuaa

SEQ ID NO: 112417 - RNA, 22 nt, Human
ucaguuaaucaauguggucuaa

SEQ ID NO: 112418 - RNA, 22 nt, Human
ucaguuacuccuuuccuuaggu

SEQ ID NO: 112419 - RNA, 22 nt, Human
ucaguuagcguaaucacugggg

SEQ ID NO: 112420 - RNA, 20 nt, Human
ucaguuaggaagaggcacuc

SEQ ID NO: 112421 - RNA, 22 nt, Human
ucaguuccucugcccaaggcag

SEQ ID NO: 112422 - RNA, 22 nt, Human
ucaguuccuguugcacagcauc

SEQ ID NO: 112423 - RNA, 22 nt, Human
ucaguucucucaugccugcccu

SEQ ID NO: 112424 - RNA, 21 nt, Human
ucaguucucugccugugcuug

SEQ ID NO: 112425 - RNA, 22 nt, Human
ucaguucuuauuuucaugaaua

SEQ ID NO: 112426 - RNA, 22 nt, Human
ucaguucuugggcugcuaggac

SEQ ID NO: 112427 - RNA, 22 nt, Human
ucaguugcaccugcaugguacu

SEQ ID NO: 112428 - RNA, 21 nt, Human
ucaguugccaaagugauguca

SEQ ID NO: 112429 - RNA, 22 nt, Human
ucaguuucacagucugugcaga

SEQ ID NO: 112430 - RNA, 22 nt, Human
ucaguuuccucaucuacaaaag

SEQ ID NO: 112431 - RNA, 22 nt, Human
ucaguuuccugguuuuaauauu

SEQ ID NO: 112432 - RNA, 22 nt, Human
ucaguuucuaaaucuuaccaau

SEQ ID NO: 112433 - RNA, 22 nt, Human
ucaguuucuucaucucccuaac

SEQ ID NO: 112434 - RNA, 22 nt, Human
ucaguuucuucuuuagauaaaa

SEQ ID NO: 112435 - RNA, 22 nt, Human
ucaguuuuaagguuugagaauu

SEQ ID NO: 112436 - RNA, 22 nt, Human
ucaguuuucucaucuguaauuu

SEQ ID NO: 112437 - RNA, 22 nt, Human
ucaguuuugauuccugguucuc

SEQ ID NO: 112438 - RNA, 22 nt, Human
ucaguuuuguauguuguaaguc

SEQ ID NO: 112439 - RNA, 22 nt, Human
ucaguuuuuacggucacaggga

SEQ ID NO: 112440 - RNA, 22 nt, Human
ucauaaaacacaccagguaguu

SEQ ID NO: 112441 - RNA, 22 nt, Human
ucauaaaaugcuccugauauug

SEQ ID NO: 112442 - RNA, 21 nt, Human
ucauaaacuaguaucaaaguu

SEQ ID NO: 112443 - RNA, 22 nt, Human
ucauaaagagugcuguuguuuu

SEQ ID NO: 112444 - RNA, 22 nt, Human
ucauaaaucauacuccauuugc

SEQ ID NO: 112445 - RNA, 22 nt, Human
ucauaaauuagcugucuuugaa

SEQ ID NO: 112446 - RNA, 22 nt, Human
ucauaacagcuaagucccuuuc

SEQ ID NO: 112447 - RNA, 22 nt, Human
ucauaaugaccccagaguccgc

SEQ ID NO: 112448 - RNA, 22 nt, Human
ucauacauaaauaagaguuuag

SEQ ID NO: 112449 - RNA, 22 nt, Human
ucauucaucaguugguagagau

SEQ ID NO: 112450 - RNA, 22 nt, Human
ucauucaugaggugcuagugcu

SEQ ID NO: 112451 - RNA, 22 nt, Human
ucauuccauuuccagcucugaa

SEQ ID NO: 112452 - RNA, 22 nt, Human
ucauucuugaucacuaguuagu

SEQ ID NO: 112453 - RNA, 22 nt, Human
ucauucuuuaccaaguugucac

SEQ ID NO: 112454 - RNA, 22 nt, Human
ucauugaaagugccuccucgga

SEQ ID NO: 112455 - RNA, 22 nt, Human
ucauugaacgaagagcuccauu

SEQ ID NO: 112456 - RNA, 16 nt, Human
ucauugaagacaguac

SEQ ID NO: 112457 - RNA, 22 nt, Human
ucauugaauacauauuugggau

SEQ ID NO: 112458 - RNA, 22 nt, Human
ucauugaauuugguucaauaug

SEQ ID NO: 112459 - RNA, 22 nt, Human
ucauugaguugcacuuuuacua

SEQ ID NO: 112460 - RNA, 22 nt, Human
ucauugauaaaguacugcuuuu

SEQ ID NO: 112461 - RNA, 20 nt, Human
ucauugcacauaauggaagc

SEQ ID NO: 112462 - RNA, 22 nt, Human
ucauugcagaaauaaaggugaa

SEQ ID NO: 112463 - RNA, 22 nt, Human
ucauugcagugauguuguaugu

SEQ ID NO: 112464 - RNA, 22 nt, Human
ucauugcaguugaguuguguua

SEQ ID NO: 112465 - RNA, 21 nt, Human
ucauuggucauuaagcucugu

SEQ ID NO: 112466 - RNA, 22 nt, Human
ucauuguauuaaaauauugguu

SEQ ID NO: 112467 - RNA, 22 nt, Human
ucauugucagcucuugacuucu

SEQ ID NO: 112468 - RNA, 22 nt, Human
ucauugucuugauaugauuguc

SEQ ID NO: 112469 - RNA, 23 nt, Human
ucauugugacugugccacauaac

SEQ ID NO: 112470 - RNA, 22 nt, Human
ucauuguuaauuguaugaucug

SEQ ID NO: 112471 - RNA, 22 nt, Human
ucauuguuacuguuuaguugcc

SEQ ID NO: 112472 - RNA, 22 nt, Human
ucauuuaaaauguaccaggauu

SEQ ID NO: 112473 - RNA, 22 nt, Human
ucauuuaauaauuuuugaguag

SEQ ID NO: 112474 - RNA, 22 nt, Human
ucauuuacauagaaacaauaua

SEQ ID NO: 112475 - RNA, 22 nt, Human
ucauuuacuugguuuuaaucuu

SEQ ID NO: 112476 - RNA, 22 nt, Human
ucauuuauagaagugggcagua

SEQ ID NO: 112477 - RNA, 22 nt, Human
ucauuuauagcuaaccuugaau

SEQ ID NO: 112478 - RNA, 22 nt, Human
ucauuuauauuguauucuguag

SEQ ID NO: 112479 - RNA, 22 nt, Human
ucauuuaugcaggaauggcaua

SEQ ID NO: 112480 - RNA, 21 nt, Human
ucauuuauugagaaaugacug

SEQ ID NO: 112481 - RNA, 22 nt, Human
ucauuucagaugcauuuagaau

SEQ ID NO: 112482 - RNA, 22 nt, Human
ucauuucagccauuuuuaaaug

SEQ ID NO: 112483 - RNA, 22 nt, Human
ucauuucaguuguucccugguu

SEQ ID NO: 112484 - RNA, 22 nt, Human
ucauuucccuccuacaaagagg

SEQ ID NO: 112485 - RNA, 22 nt, Human
ucauuucuccgaccugcugucc

SEQ ID NO: 112486 - RNA, 22 nt, Human
ucauuucuccuaagugaaauau

SEQ ID NO: 112487 - RNA, 22 nt, Human
ucauuucuguugugcaucacug

SEQ ID NO: 112488 - RNA, 22 nt, Human
ucauuuggaagccugagagugu

SEQ ID NO: 112489 - RNA, 22 nt, Human
ucauuuggagccuuccuguuuu

SEQ ID NO: 112490 - RNA, 22 nt, Human
ucauuugggucaguuuuccaua

SEQ ID NO: 112491 - RNA, 22 nt, Human
ucauuuguaccauuuuuuaaga

SEQ ID NO: 112492 - RNA, 22 nt, Human
ucauuugugugagugauuugac

SEQ ID NO: 112493 - RNA, 22 nt, Human
ucauuuguugcuguuaccugag

SEQ ID NO: 112494 - RNA, 18 nt, Human
ucauuuguuuugcaugaa

SEQ ID NO: 112495 - RNA, 16 nt, Human
ucauuuugagugacag

SEQ ID NO: 112496 - RNA, 22 nt, Human
ucauuuugggguuugucaucuu

SEQ ID NO: 112497 - RNA, 22 nt, Human
ucauuuuugucuccgguuugug

SEQ ID NO: 112498 - RNA, 22 nt, Human
ucauuuuuugcauaccuguguc

SEQ ID NO: 112499 - RNA, 21 nt, Human
uccaaaaaggagcguccuucu

SEQ ID NO: 112500 - RNA, 22 nt, Human
uccaaaacagaacucugugaau

SEQ ID NO: 112501 - RNA, 22 nt, Human
uccaaagaagucacaaacgaag

SEQ ID NO: 112502 - RNA, 20 nt, Human
uccaaagaaguucacauuua

SEQ ID NO: 112503 - RNA, 22 nt, Human
uccaaagagguuaagaacgaga

SEQ ID NO: 112504 - RNA, 22 nt, Human
uccaaagcaucugagugugcau

SEQ ID NO: 112505 - RNA, 22 nt, Human
uccaaaggcccugaguucacuu

SEQ ID NO: 112506 - RNA, 22 nt, Human
uccaaaggggcaguguccagcc

SEQ ID NO: 112507 - RNA, 22 nt, Human
uccaaauauauucacguccuag

SEQ ID NO: 112508 - RNA, 22 nt, Human
uccaaauauuaugauuauagga

SEQ ID NO: 112509 - RNA, 22 nt, Human
uccaaauucuagggccuugguu

SEQ ID NO: 112510 - RNA, 22 nt, Human
uccaaauuuaccuuacagauau

SEQ ID NO: 112511 - RNA, 22 nt, Human
uccaacauuuaucaagguuguu

SEQ ID NO: 112512 - RNA, 22 nt, Human
uccaacuccaccuuugucuccc

SEQ ID NO: 112513 - RNA, 22 nt, Human
uauuagcuuguuuggcaggaug

SEQ ID NO: 112514 - RNA, 22 nt, Human
uauuagggaacugcaagacuaa

SEQ ID NO: 112515 - RNA, 22 nt, Human
uauuagguaaaggacuugcagg

SEQ ID NO: 112516 - RNA, 22 nt, Human
uauuagguuggugcaaaauuaa

SEQ ID NO: 112517 - RNA, 22 nt, Human
uauuagguuggugcaacaguaa

SEQ ID NO: 112518 - RNA, 22 nt, Human
uauuagguuguugcaaaaguaa

SEQ ID NO: 112519 - RNA, 22 nt, Human
uauuagucuguaaauugaugcu

SEQ ID NO: 112520 - RNA, 22 nt, Human
uauuauauuuaguaauguggag

SEQ ID NO: 112521 - RNA, 22 nt, Human
uauuauccaaagagcugggagc

SEQ ID NO: 112522 - RNA, 22 nt, Human
uauuaugagccaggugcugucu

SEQ ID NO: 112523 - RNA, 22 nt, Human
uauuaugaggcuuagggaugac

SEQ ID NO: 112524 - RNA, 22 nt, Human
uauuaugaggggcagagggcau

SEQ ID NO: 112525 - RNA, 22 nt, Human
uauuaugcaaauauuccuaccu

SEQ ID NO: 112526 - RNA, 22 nt, Human
uauuaugcauaggcaauaaugg

SEQ ID NO: 112527 - RNA, 22 nt, Human
uauuauguagaguaaggguuaa

SEQ ID NO: 112528 - RNA, 22 nt, Human
uauuauuauauuggaugagacu

SEQ ID NO: 112529 - RNA, 22 nt, Human
uauuauuaugcauagcaugaaa

SEQ ID NO: 112530 - RNA, 22 nt, Human
uauuauugaaucaguucuuuga

SEQ ID NO: 112531 - RNA, 22 nt, Human
uauuauuuuuauucgagggaaa

SEQ ID NO: 112532 - RNA, 22 nt, Human
uauucaaagugcgaggucaggg

SEQ ID NO: 112533 - RNA, 22 nt, Human
uauucacaaaaugagguccuca

SEQ ID NO: 112534 - RNA, 22 nt, Human
uauucacaggcuggagugaugu

SEQ ID NO: 112535 - RNA, 22 nt, Human
uauucacagguuccggagauua

SEQ ID NO: 112536 - RNA, 22 nt, Human
uauucacaugaaaacaaauuuu

SEQ ID NO: 112537 - RNA, 22 nt, Human
uauucacauguacauaugcuca

SEQ ID NO: 112538 - RNA, 22 nt, Human
uauucacuguaacucagcaaua

SEQ ID NO: 112539 - RNA, 22 nt, Human
uauucagaggguugaauuuuua

SEQ ID NO: 112540 - RNA, 23 nt, Human
uauucagcagugggauuuguugu

SEQ ID NO: 112541 - RNA, 22 nt, Human
uauucaggucgagcuaacugcu

SEQ ID NO: 112542 - RNA, 21 nt, Human
uauucaguccauugauguuua

SEQ ID NO: 112543 - RNA, 22 nt, Human
uauucagugcgggaacucagcc

SEQ ID NO: 112544 - RNA, 22 nt, Human
uauucauaguaaacaaaagugg

SEQ ID NO: 112545 - RNA, 22 nt, Human
uauucaugucggcugaaaaagc

SEQ ID NO: 112546 - RNA, 22 nt, Human
uauuccaagugccuagaagagu

SEQ ID NO: 112547 - RNA, 22 nt, Human
uauuccagaugaaaucauucag

SEQ ID NO: 112548 - RNA, 22 nt, Human
uauuccaugccagaguuuauug

SEQ ID NO: 112549 - RNA, 22 nt, Human
uauucccagccucuuucuaucu

SEQ ID NO: 112550 - RNA, 22 nt, Human
uauucccauuccacuuaucaag

SEQ ID NO: 112551 - RNA, 22 nt, Human
uauuccugguguuggcuggguc

SEQ ID NO: 112552 - RNA, 22 nt, Human
uauucucauuagucuguauucc

SEQ ID NO: 112553 - RNA, 22 nt, Human
uauucuccccggaucagggcaa

SEQ ID NO: 112554 - RNA, 22 nt, Human
uauucucuccccaaucuugcuu

SEQ ID NO: 112555 - RNA, 22 nt, Human
uauucugcaugaaaauaaacag

SEQ ID NO: 112556 - RNA, 22 nt, Human
uauucugguuuccggaucucua

SEQ ID NO: 112557 - RNA, 18 nt, Human
uauucuguccuaugaagc

SEQ ID NO: 112558 - RNA, 22 nt, Human
ucaaagguuaacucuguuguuc

SEQ ID NO: 112559 - RNA, 22 nt, Human
ucaaaguaaaaguauagaguuu

SEQ ID NO: 112560 - RNA, 22 nt, Human
ucaaaguacuacucaguucagc

SEQ ID NO: 112561 - RNA, 22 nt, Human
ucaaaguagaguucagugcagc

SEQ ID NO: 112562 - RNA, 22 nt, Human
ucaaaguauuuuaacuguaucc

SEQ ID NO: 112563 - RNA, 22 nt, Human
ucaaagucuaucuguaauuacu

SEQ ID NO: 112564 - RNA, 22 nt, Human
ucaaaguuacuugugguuuucu

SEQ ID NO: 112565 - RNA, 22 nt, Human
ucaaauaccagcuuuuccagaa

SEQ ID NO: 112566 - RNA, 22 nt, Human
ucaaaucaccaaacucacuggc

SEQ ID NO: 112567 - RNA, 21 nt, Human
ucaaaucagguaucacuauug

SEQ ID NO: 112568 - RNA, 21 nt, Human
ucaaauccugcuguuaccacu

SEQ ID NO: 112569 - RNA, 19 nt, Human
ucaaaugccaaugucacag

SEQ ID NO: 112570 - RNA, 22 nt, Human
ucaaaugcggucauggcuuuua

SEQ ID NO: 112571 - RNA, 22 nt, Human
ucaaaugcuguauuguaguaau

SEQ ID NO: 112572 - RNA, 22 nt, Human
ucaaauuaguggaauaauaaug

SEQ ID NO: 112573 - RNA, 22 nt, Human
ucaacaaauacuuaaagcagag

SEQ ID NO: 112574 - RNA, 22 nt, Human
ucaacaagagcccaugcuuuuu

SEQ ID NO: 112575 - RNA, 22 nt, Human
ucaacaauuuugagaugagaca

SEQ ID NO: 112576 - RNA, 22 nt, Human
ucaacacaacagagaaaugcug

SEQ ID NO: 112577 - RNA, 22 nt, Human
ucaacacuaaagaauaaucuuu

SEQ ID NO: 112578 - RNA, 22 nt, Human
ucaacacucuuuggcacaguua

SEQ ID NO: 112579 - RNA, 22 nt, Human
ucaacauuuaugaagcuguggc

SEQ ID NO: 112580 - RNA, 22 nt, Human
ucaaccauccggcuuauccugc

SEQ ID NO: 112581 - RNA, 22 nt, Human
ucaacccuuccuccauauuucc

SEQ ID NO: 112582 - RNA, 21 nt, Human
ucaacccuugcgucaccaagc

SEQ ID NO: 112583 - RNA, 22 nt, Human
ucaacgcaugcuccaagaaaga

SEQ ID NO: 112584 - RNA, 22 nt, Human
ucaacuaaggcacaaucucuaa

SEQ ID NO: 112585 - RNA, 22 nt, Human
ucaacugauuuagucugugcca

SEQ ID NO: 112586 - RNA, 22 nt, Human
ucaacugcaaguuugcuuaguu

SEQ ID NO: 112587 - RNA, 22 nt, Human
ucaacuuggagcacauuuggcu

SEQ ID NO: 112588 - RNA, 22 nt, Human
ucaacuuggcuuuuuaaagucc

SEQ ID NO: 112589 - RNA, 22 nt, Human
ucaacuuuaguguagcuauuua

SEQ ID NO: 112590 - RNA, 22 nt, Human
ucaagaaacuguagcaaugggu

SEQ ID NO: 112591 - RNA, 22 nt, Human
ucaagaaacugugcuacagagu

SEQ ID NO: 112592 - RNA, 22 nt, Human
ucaagaaaugugcuuggauaua

SEQ ID NO: 112593 - RNA, 22 nt, Human
ucaagaaggaguuauuuauuca

SEQ ID NO: 112594 - RNA, 22 nt, Human
ucaagaauuuuuaaugugacug

SEQ ID NO: 112595 - RNA, 21 nt, Human
ucaagacagcauauuuaagaa

SEQ ID NO: 112596 - RNA, 22 nt, Human
ucaagagauugaauaauaacug

SEQ ID NO: 112597 - RNA, 19 nt, Human
ucaagauggauggcuccca

SEQ ID NO: 112598 - RNA, 22 nt, Human
ucaagauguccagugccuauaa

SEQ ID NO: 112599 - RNA, 22 nt, Human
ucaagcaaacucugagaaauaa

SEQ ID NO: 112600 - RNA, 19 nt, Human
ucaagcagucugauuuagg

SEQ ID NO: 112601 - RNA, 22 nt, Human
ucaagcaucuuggucuacgauc

SEQ ID NO: 112602 - RNA, 22 nt, Human
ucaagccacuggcagaagauua

SEQ ID NO: 112603 - RNA, 22 nt, Human
ucaagcggacugagauacucug

SEQ ID NO: 112604 - RNA, 22 nt, Human
ucaagcuuucugucucuuaugg

SEQ ID NO: 112605 - RNA, 22 nt, Human
ucaaggaaaagauaacuugaug

SEQ ID NO: 112606 - RNA, 22 nt, Human
ucaaggaagucuuauugcacag

SEQ ID NO: 112607 - RNA, 22 nt, Human
ucaaggaauggguccuucccuu

SEQ ID NO: 112608 - RNA, 22 nt, Human
ucaaggacuauugcaugacucc

SEQ ID NO: 112609 - RNA, 22 nt, Human
ucaaggaggugcuuggcuucac

SEQ ID NO: 112610 - RNA, 22 nt, Human
ucaaggcauacauuuagaagag

SEQ ID NO: 112611 - RNA, 22 nt, Human
ucaaggcuauuaauucugugag

SEQ ID NO: 112612 - RNA, 22 nt, Human
ucaaguaacaugaacacacaga

SEQ ID NO: 112613 - RNA, 22 nt, Human
ucaaguaguacccaaugcgugg

SEQ ID NO: 112614 - RNA, 22 nt, Human
ucaaguauuauuacagauguag

SEQ ID NO: 112615 - RNA, 22 nt, Human
ucaagucccagcucuucacuua

SEQ ID NO: 112616 - RNA, 22 nt, Human
ucaagucuugaugagacaaacc

SEQ ID NO: 112617 - RNA, 22 nt, Human
ucaagugcuugugagguauuug

SEQ ID NO: 112618 - RNA, 22 nt, Human
ucaaguuuaauugagauguuua

SEQ ID NO: 112619 - RNA, 22 nt, Human
ucaauacagaaaggauauuuug

SEQ ID NO: 112620 - RNA, 22 nt, Human
ucaauagaaaugcagagucuca

SEQ ID NO: 112621 - RNA, 22 nt, Human
ucaauagauuagguauuagauu

SEQ ID NO: 112622 - RNA, 22 nt, Human
ucaauagcaaucaagccuucca

SEQ ID NO: 112623 - RNA, 22 nt, Human
ucaaucaaagccagauguccuu

SEQ ID NO: 112624 - RNA, 22 nt, Human
ucaaucaaugguuuccaaauuu

SEQ ID NO: 112625 - RNA, 22 nt, Human
ucaaucacguguuccauguucu

SEQ ID NO: 112626 - RNA, 22 nt, Human
ucaaucauaaugaagugaagaa

SEQ ID NO: 112627 - RNA, 22 nt, Human
ucaaucuagagauuaaaauagg

SEQ ID NO: 112628 - RNA, 22 nt, Human
uccaacuuucuccuccggcuug

SEQ ID NO: 112629 - RNA, 22 nt, Human
uccaagaagucaucuaaacugu

SEQ ID NO: 112630 - RNA, 22 nt, Human
uccaagagaauacuggagagua

SEQ ID NO: 112631 - RNA, 22 nt, Human
uccaagaggagacacugggaug

SEQ ID NO: 112632 - RNA, 22 nt, Human
uccaagaucuacagcaguuuag

SEQ ID NO: 112633 - RNA, 17 nt, Human
uccaagccagcuugccu

SEQ ID NO: 112634 - RNA, 22 nt, Human
uccaagcuacugaagguuuggg

SEQ ID NO: 112635 - RNA, 22 nt, Human
uccaagcuugcuuuagccacag

SEQ ID NO: 112636 - RNA, 22 nt, Human
uccaagcuuuccaugcccucac

SEQ ID NO: 112637 - RNA, 22 nt, Human
uccaaggacgcuggaccccugc

SEQ ID NO: 112638 - RNA, 22 nt, Human
uccaaggagcagucuucaaccu

SEQ ID NO: 112639 - RNA, 22 nt, Human
uccaaggaggagcuggagauug

SEQ ID NO: 112640 - RNA, 20 nt, Human
uccaagggcagcagaaucag

SEQ ID NO: 112641 - RNA, 22 nt, Human
uccaagggcagccauagaacuu

SEQ ID NO: 112642 - RNA, 22 nt, Human
uccaaguccauuaugguggucu

SEQ ID NO: 112643 - RNA, 22 nt, Human
uccaauaaccacaaucagauag

SEQ ID NO: 112644 - RNA, 22 nt, Human
uccaauggggccucucugucag

SEQ ID NO: 112645 - RNA, 20 nt, Human
uccaauguaggauaaaugug

SEQ ID NO: 112646 - RNA, 22 nt, Human
uccaaugugacuaucagggagc

SEQ ID NO: 112647 - RNA, 22 nt, Human
uccaauguuauuaucuagaggc

SEQ ID NO: 112648 - RNA, 22 nt, Human
uccaauguuccaggguaaaugu

SEQ ID NO: 112649 - RNA, 20 nt, Human
uccaauuaaaaauuguaugc

SEQ ID NO: 112650 - RNA, 22 nt, Human
uccaauuugaaaugguauaugu

SEQ ID NO: 112651 - RNA, 22 nt, Human
uccacacacauuucuaugugca

SEQ ID NO: 112652 - RNA, 22 nt, Human
uccacagaauggaauucuccgc

SEQ ID NO: 112653 - RNA, 22 nt, Human
uccacagacuauuaagugaucu

SEQ ID NO: 112654 - RNA, 22 nt, Human
uccacagcuuuuaaaugucuag

SEQ ID NO: 112655 - RNA, 22 nt, Human
uccacagggccuuucuggugug

SEQ ID NO: 112656 - RNA, 22 nt, Human
uccacaggucagggagauaggc

SEQ ID NO: 112657 - RNA, 22 nt, Human
uccacagguccucuuugcaaag

SEQ ID NO: 112658 - RNA, 22 nt, Human
uccacaucuagguuugucaaca

SEQ ID NO: 112659 - RNA, 20 nt, Human
uccacaucuuuugagaugug

SEQ ID NO: 112660 - RNA, 22 nt, Human
uccacaugaccauugugcuccu

SEQ ID NO: 112661 - RNA, 22 nt, Human
uccaccagagccuucccaugcu

SEQ ID NO: 112662 - RNA, 20 nt, Human
uccaccaggaaggguaggga

SEQ ID NO: 112663 - RNA, 18 nt, Human
uccaccagucaaucuguc

SEQ ID NO: 112664 - RNA, 22 nt, Human
uccaccuccaugcugggcagag

SEQ ID NO: 112665 - RNA, 22 nt, Human
uccaccugaguuucaguuauuu

SEQ ID NO: 112666 - RNA, 22 nt, Human
uccacugcucauuccacaggca

SEQ ID NO: 112667 - RNA, 17 nt, Human
ucaaaguauucugaugc

SEQ ID NO: 112668 - RNA, 22 nt, Human
ucaaagucauggcuaguaauga

SEQ ID NO: 112669 - RNA, 22 nt, Human
ucaaagucucugcuucuguaac

SEQ ID NO: 112670 - RNA, 19 nt, Human
ucaaagucugagucacuuu

SEQ ID NO: 112671 - RNA, 22 nt, Human
ucaaaguuuuugagaauuacau

SEQ ID NO: 112672 - RNA, 22 nt, Human
ucaaauacauggucaaucaacu

SEQ ID NO: 112673 - RNA, 22 nt, Human
ucaaauaggcuuguagugacug

SEQ ID NO: 112674 - RNA, 22 nt, Human
ucaaauaugugauagaagcuaa

SEQ ID NO: 112675 - RNA, 17 nt, Human
ucaaauccucugucugg

SEQ ID NO: 112676 - RNA, 22 nt, Human
ucaaaucucacucugcauuucu

SEQ ID NO: 112677 - RNA, 22 nt, Human
ucaaaucucaucuugaauugua

SEQ ID NO: 112678 - RNA, 22 nt, Human
ucaaaucucauugccuaaaacu

SEQ ID NO: 112679 - RNA, 22 nt, Human
ucaaaucuuuaacaugugcaaa

SEQ ID NO: 112680 - RNA, 22 nt, Human
ucaaaucuuugaccacuuaugu

SEQ ID NO: 112681 - RNA, 22 nt, Human
ucaaaugcaggucuggucuugg

SEQ ID NO: 112682 - RNA, 22 nt, Human
ucaaaugccagugguguggauc

SEQ ID NO: 112683 - RNA, 22 nt, Human
ucaaaugcucuuugcagagagg

SEQ ID NO: 112684 - RNA, 22 nt, Human
ucaaaugcugccuuugugugcc

SEQ ID NO: 112685 - RNA, 22 nt, Human
ucaaaugcuucuacuccuaaga

SEQ ID NO: 112686 - RNA, 22 nt, Human
ucaaauggguaugcuuuauaau

SEQ ID NO: 112687 - RNA, 22 nt, Human
ucaaauguaauuuauuguuuua

SEQ ID NO: 112688 - RNA, 22 nt, Human
ucaaauugucaucuugauaaug

SEQ ID NO: 112689 - RNA, 22 nt, Human
ucaacaauaggauauagcaggu

SEQ ID NO: 112690 - RNA, 22 nt, Human
ucaacaaugggucuguaaugga

SEQ ID NO: 112691 - RNA, 22 nt, Human
ucaacacuuuugucuuuguccc

SEQ ID NO: 112692 - RNA, 22 nt, Human
ucaacagccagaaauauuagcc

SEQ ID NO: 112693 - RNA, 22 nt, Human
ucaacaguucuguccaauuaau

SEQ ID NO: 112694 - RNA, 22 nt, Human
ucaacaguugcacuggagaggu

SEQ ID NO: 112695 - RNA, 22 nt, Human
ucaacauugagucccugggucu

SEQ ID NO: 112696 - RNA, 22 nt, Human
ucaacauuggaggcaacauuca

SEQ ID NO: 112697 - RNA, 22 nt, Human
ucaaccagaguuuuucuuaaua

SEQ ID NO: 112698 - RNA, 19 nt, Human
ucaacccucuuugccuagc

SEQ ID NO: 112699 - RNA, 22 nt, Human
ucaacccuggugggaauauuug

SEQ ID NO: 112700 - RNA, 22 nt, Human
ucaacccuugugcaacagugau

SEQ ID NO: 112701 - RNA, 20 nt, Human
ucaaccuacugugcucaagu

SEQ ID NO: 112702 - RNA, 22 nt, Human
ucaaccucuggagaaaucagga

SEQ ID NO: 112703 - RNA, 22 nt, Human
ucaaccuugugagaacugaguc

SEQ ID NO: 112704 - RNA, 22 nt, Human
ucaacuaacucuauuauuugaa

SEQ ID NO: 112705 - RNA, 22 nt, Human
ucaacugguucuugaauguaua

SEQ ID NO: 112706 - RNA, 22 nt, Human
ucaacuuugaaaccauagugaa

SEQ ID NO: 112707 - RNA, 22 nt, Human
ucaagaaaaugccugcuggugu

SEQ ID NO: 112708 - RNA, 20 nt, Human
ucaagacagacauggaguuu

SEQ ID NO: 112709 - RNA, 22 nt, Human
ucaagacagugugauacuggcc

SEQ ID NO: 112710 - RNA, 22 nt, Human
ucaagacaucacugugcauuuu

SEQ ID NO: 112711 - RNA, 18 nt, Human
ucaagacaucaugaaaua

SEQ ID NO: 112712 - RNA, 22 nt, Human
ucaagagaaggggaaauagacu

SEQ ID NO: 112713 - RNA, 22 nt, Human
ucaagauaccaccauuauaugu

SEQ ID NO: 112714 - RNA, 22 nt, Human
ucaagauauagaggguucuaga

SEQ ID NO: 112715 - RNA, 22 nt, Human
ucaagaugaaagauguagccau

SEQ ID NO: 112716 - RNA, 22 nt, Human
ucaagcaaauguccuuuuguuc

SEQ ID NO: 112717 - RNA, 22 nt, Human
ucaagcaaguguuugguguaaa

SEQ ID NO: 112718 - RNA, 23 nt, Human
ucaagcaauaauugguaauagug

SEQ ID NO: 112719 - RNA, 22 nt, Human
ucaagcagcuuuuacagaagag

SEQ ID NO: 112720 - RNA, 22 nt, Human
ucaagcuggcuguugcuauuuc

SEQ ID NO: 112721 - RNA, 20 nt, Human
ucaaggaaugucauuuuguu

SEQ ID NO: 112722 - RNA, 21 nt, Human
ucaaggaguuucucuuuucca

SEQ ID NO: 112723 - RNA, 22 nt, Human
ucaaggcaaaguaaauauucaa

SEQ ID NO: 112724 - RNA, 22 nt, Human
ucaaguauuauauucucauuuu

SEQ ID NO: 112725 - RNA, 22 nt, Human
ucaaguauuuauuucugcuggc

SEQ ID NO: 112726 - RNA, 22 nt, Human
ucaagucacuggcagggaugcu

SEQ ID NO: 112727 - RNA, 19 nt, Human
ucaaguccuaggcccacaa

SEQ ID NO: 112728 - RNA, 22 nt, Human
ucaaguguaguggugucagguc

SEQ ID NO: 112729 - RNA, 22 nt, Human
ucaaguuaggugguuguuagga

SEQ ID NO: 112730 - RNA, 20 nt, Human
ucaaguuuugcuugacaaga

SEQ ID NO: 112731 - RNA, 22 nt, Human
ucaauaacuuuguuuagcauug

SEQ ID NO: 112732 - RNA, 22 nt, Human
ucaauaauggcaggauaaauuu

SEQ ID NO: 112733 - RNA, 22 nt, Human
ucaauagagccuucuuucaggu

SEQ ID NO: 112734 - RNA, 22 nt, Human
ucaauagauaaagcuacauaaa

SEQ ID NO: 112735 - RNA, 22 nt, Human
ucaauagcucaguguggaagcu

SEQ ID NO: 112736 - RNA, 22 nt, Human
ucaauauauuccauguuuucuc

SEQ ID NO: 112737 - RNA, 22 nt, Human
ucaauauucuucuuuaguagga

SEQ ID NO: 112738 - RNA, 22 nt, Human
ucaaucaaagcacugggcuuug

SEQ ID NO: 112739 - RNA, 22 nt, Human
ucaaucaaugugucaguuccca

SEQ ID NO: 112740 - RNA, 22 nt, Human
ucaaucauucuugccauuuauu

SEQ ID NO: 112741 - RNA, 22 nt, Human
ucaaugacugguccaagguggc

SEQ ID NO: 112742 - RNA, 22 nt, Human
ucaaugauagacaagaucuaag

SEQ ID NO: 112743 - RNA, 22 nt, Human
ucaaugauaguacaaucagccu

SEQ ID NO: 112744 - RNA, 22 nt, Human
ucaaugcaaucauuggacaagu

SEQ ID NO: 112745 - RNA, 22 nt, Human
ucaaugcacacaggacuuggug

SEQ ID NO: 112746 - RNA, 22 nt, Human
ucaauuaagaggcuaaguuacu

SEQ ID NO: 112747 - RNA, 22 nt, Human
ucaauuacagcacaguacucca

SEQ ID NO: 112748 - RNA, 23 nt, Human
ucaauuaucaauggaaagaaguu

SEQ ID NO: 112749 - RNA, 22 nt, Human
ucaauuucucagaaauggucuu

SEQ ID NO: 112750 - RNA, 22 nt, Human
ucacaaaagcuuuugaauuugg

SEQ ID NO: 112751 - RNA, 22 nt, Human
ucacaaacaaugcuuuggaauu

SEQ ID NO: 112752 - RNA, 22 nt, Human
ucacaaauauagugagaaccag

SEQ ID NO: 112753 - RNA, 22 nt, Human
ucacaaaucauuuuaucugugu

SEQ ID NO: 112754 - RNA, 22 nt, Human
ucacaaaucgaagccuuauaau

SEQ ID NO: 112755 - RNA, 20 nt, Human
ucacaacuccaucauuuccc

SEQ ID NO: 112756 - RNA, 22 nt, Human
ucacaacucuuuccauuuaaua

SEQ ID NO: 112757 - RNA, 22 nt, Human
ucacaagauaaacauagcucca

SEQ ID NO: 112758 - RNA, 22 nt, Human
ucacaaugaaaaacacuacaua

SEQ ID NO: 112759 - RNA, 22 nt, Human
ucacaauuuggauacagcuaug

SEQ ID NO: 112760 - RNA, 22 nt, Human
ucacacagcuccuuuccuuagu

SEQ ID NO: 112761 - RNA, 22 nt, Human
ucacacagggucggaaagagug

SEQ ID NO: 112762 - RNA, 22 nt, Human
ucacacagugagaaagugcgga

SEQ ID NO: 112763 - RNA, 22 nt, Human
ucacacagugguaaaacccuga

SEQ ID NO: 112764 - RNA, 22 nt, Human
ucacacaugaguaaauacaggg

SEQ ID NO: 112765 - RNA, 22 nt, Human
ucacacaugcuaagccagagau

SEQ ID NO: 112766 - RNA, 22 nt, Human
ucacacauuucucaaguguagg

SEQ ID NO: 112767 - RNA, 22 nt, Human
ucacaccuuuuagaauuacuau

SEQ ID NO: 112768 - RNA, 22 nt, Human
ucacacguccuugcuacuccuc

SEQ ID NO: 112769 - RNA, 22 nt, Human
ucacacuaagacaaaauaauuu

SEQ ID NO: 112770 - RNA, 22 nt, Human
ucacacuuagagcgaauuguuu

SEQ ID NO: 112771 - RNA, 21 nt, Human
ucacacuugauuggcuuagac

SEQ ID NO: 112772 - RNA, 22 nt, Human
ucacacuuuauuuauuucaugc

SEQ ID NO: 112773 - RNA, 22 nt, Human
ucacacuuuccauggcuguuaa

SEQ ID NO: 112774 - RNA, 22 nt, Human
ucacagaaaagcugagcaucag

SEQ ID NO: 112775 - RNA, 22 nt, Human
ucacagaaaaguggagagccua

SEQ ID NO: 112776 - RNA, 22 nt, Human
ucacagaacaauguuuaguucu

SEQ ID NO: 112777 - RNA, 22 nt, Human
ucacagaagcaucauacccgga

SEQ ID NO: 112778 - RNA, 22 nt, Human
ucacagaagcuugaagauuuuc

SEQ ID NO: 112779 - RNA, 22 nt, Human
ucacagaauaaauguacuggcc

SEQ ID NO: 112780 - RNA, 22 nt, Human
ucacagaaugucagaguugggg

SEQ ID NO: 112781 - RNA, 22 nt, Human
ucacagacaccuuggccacagu

SEQ ID NO: 112782 - RNA, 18 nt, Human
ucacagacagcugucuuu

SEQ ID NO: 112783 - RNA, 22 nt, Human
ucacagacgccuccccucgccu

SEQ ID NO: 112784 - RNA, 21 nt, Human
ucacagacuggucagugaggc

SEQ ID NO: 112785 - RNA, 22 nt, Human
ucacagacuguguugcuacuca

SEQ ID NO: 112786 - RNA, 22 nt, Human
ucacagagagugacuuguugcu

SEQ ID NO: 112787 - RNA, 20 nt, Human
ucacagaguagccuugucug

SEQ ID NO: 112788 - RNA, 20 nt, Human
ucacagaugaaaguucaaga

SEQ ID NO: 112789 - RNA, 22 nt, Human
ucacagcaacacuggggcagac

SEQ ID NO: 112790 - RNA, 22 nt, Human
ucacagcaccaggaucucucca

SEQ ID NO: 112791 - RNA, 19 nt, Human
ucacagcaucugucugaac

SEQ ID NO: 112792 - RNA, 22 nt, Human
ucacagcucacuguagccucga

SEQ ID NO: 112793 - RNA, 22 nt, Human
ucacagcuccagacugcaacuc

SEQ ID NO: 112794 - RNA, 22 nt, Human
ucacagcugaguuuccauuucu

SEQ ID NO: 112795 - RNA, 22 nt, Human
ucacagcuguuuuguccauuaa

SEQ ID NO: 112796 - RNA, 22 nt, Human
ucacaggaaggguaaauauuua

SEQ ID NO: 112797 - RNA, 22 nt, Human
ucacaggagaauguacuuacca

SEQ ID NO: 112798 - RNA, 22 nt, Human
ucacaggagggagagacaccca

SEQ ID NO: 112799 - RNA, 22 nt, Human
ucacaggcuaaauuuaugcagg

SEQ ID NO: 112800 - RNA, 21 nt, Human
ucacaggcucagggagagagu

SEQ ID NO: 112801 - RNA, 22 nt, Human
ucacaggcucuccaccaugagg

SEQ ID NO: 112802 - RNA, 23 nt, Human
ucacagggcacuggcugggguug

SEQ ID NO: 112803 - RNA, 22 nt, Human
ucacaguacaugauucaguggu

SEQ ID NO: 112804 - RNA, 22 nt, Human
ucacaguaguuguucucuguuu

SEQ ID NO: 112805 - RNA, 23 nt, Human
ucacaguaucucuggagccauag

SEQ ID NO: 112806 - RNA, 22 nt, Human
ucacaguauucaugaacaugga

SEQ ID NO: 112807 - RNA, 22 nt, Human
ucacagugaugacgugggagca

SEQ ID NO: 112808 - RNA, 22 nt, Human
ucacagugucguccuugggugu

SEQ ID NO: 112809 - RNA, 22 nt, Human
ucacaguuaauuguuggaaugu

SEQ ID NO: 112810 - RNA, 22 nt, Human
ucacaguuacuccuucagauga

SEQ ID NO: 112811 - RNA, 21 nt, Human
ucacaguucaagaugaacccc

SEQ ID NO: 112812 - RNA, 21 nt, Human
ucacaguuggccaggcauuua

SEQ ID NO: 112813 - RNA, 22 nt, Human
ucacauaaauuuaccagaugau

SEQ ID NO: 112814 - RNA, 22 nt, Human
ucacauaguggggcauuggaau

SEQ ID NO: 112815 - RNA, 22 nt, Human
ucacaucacccugcucuuaauu

SEQ ID NO: 112816 - RNA, 22 nt, Human
ucacaucacuagcugguaauga

SEQ ID NO: 112817 - RNA, 18 nt, Human
ucacaucaucccaugcuu

SEQ ID NO: 112818 - RNA, 22 nt, Human
ucacaucauuaagacuucuccu

SEQ ID NO: 112819 - RNA, 22 nt, Human
ucacaucucccuggaggacaca

SEQ ID NO: 112820 - RNA, 22 nt, Human
ucacaucucucauugccucugc

SEQ ID NO: 112821 - RNA, 22 nt, Human
ucacaucugauuagugacugau

SEQ ID NO: 112822 - RNA, 22 nt, Human
ucacaugaagaucccucaauuu

SEQ ID NO: 112823 - RNA, 22 nt, Human
ucacaugacuuuuugguggccu

SEQ ID NO: 112824 - RNA, 22 nt, Human
ucacaugaggcauccccgggca

SEQ ID NO: 112825 - RNA, 22 nt, Human
ucacaugauguuuccucugugc

SEQ ID NO: 112826 - RNA, 22 nt, Human
ucacaugcacauacuuccugug

SEQ ID NO: 112827 - RNA, 22 nt, Human
ucacaugcucaccuaagccaca

SEQ ID NO: 112828 - RNA, 22 nt, Human
ucacaugcuguguguggagauc

SEQ ID NO: 112829 - RNA, 22 nt, Human
ucacaugcuugaggaaagaaaa

SEQ ID NO: 112830 - RNA, 22 nt, Human
ucacauguguuuucucaccaac

SEQ ID NO: 112831 - RNA, 19 nt, Human
ucacauucagccuugcuga

SEQ ID NO: 112832 - RNA, 22 nt, Human
ucacauucauggugcuaauaaa

SEQ ID NO: 112833 - RNA, 22 nt, Human
ucacauucuucccugacuucuu

SEQ ID NO: 112834 - RNA, 22 nt, Human
ucacauucuuuauuugccaucc

SEQ ID NO: 112835 - RNA, 22 nt, Human
ucacauugaagaaauuuuaagu

SEQ ID NO: 112836 - RNA, 22 nt, Human
ucacauugaauggaagaauaga

SEQ ID NO: 112837 - RNA, 22 nt, Human
ucacauuucaagugcucaaaag

SEQ ID NO: 112838 - RNA, 22 nt, Human
ucacauuucucagcacugauga

SEQ ID NO: 112839 - RNA, 22 nt, Human
ucacauuucugauuauaccaaa

SEQ ID NO: 112840 - RNA, 22 nt, Human
ucacauuugauaaugcccauug

SEQ ID NO: 112841 - RNA, 22 nt, Human
ucacauuuuaguaccaugauuu

SEQ ID NO: 112842 - RNA, 22 nt, Human
ucacauuuuauaucucugguuu

SEQ ID NO: 112843 - RNA, 22 nt, Human
ucacauuuuaucugagauugac

SEQ ID NO: 112844 - RNA, 22 nt, Human
ucacauuuucauauucucugag

SEQ ID NO: 112845 - RNA, 22 nt, Human
ucaccaaguccauaugcaucau

SEQ ID NO: 112846 - RNA, 22 nt, Human
ucaccaauaauaacuugagaau

SEQ ID NO: 112847 - RNA, 22 nt, Human
ucaccacugaggccacguggcu

SEQ ID NO: 112848 - RNA, 22 nt, Human
ucaccagaugauuuuucuucag

SEQ ID NO: 112849 - RNA, 22 nt, Human
ucaccaggauugggcuguaggc

SEQ ID NO: 112850 - RNA, 22 nt, Human
ucaccagucuuucuuaccauug

SEQ ID NO: 112851 - RNA, 22 nt, Human
ucaccauuaaggacuuucagcu

SEQ ID NO: 112852 - RNA, 22 nt, Human
ucacccagaaaagacagcagau

SEQ ID NO: 112853 - RNA, 22 nt, Human
ucaaucuguguaugcugggagu

SEQ ID NO: 112854 - RNA, 22 nt, Human
ucaaugaaagagcaugcauuuu

SEQ ID NO: 112855 - RNA, 22 nt, Human
ucaaugacauuguaucagaguu

SEQ ID NO: 112856 - RNA, 22 nt, Human
ucaaugagaaagacacagucuu

SEQ ID NO: 112857 - RNA, 22 nt, Human
ucaaugagcuggggacguguac

SEQ ID NO: 112858 - RNA, 22 nt, Human
ucaaugagguaaucagucaccc

SEQ ID NO: 112859 - RNA, 22 nt, Human
ucaaugaggugauugcuguccu

SEQ ID NO: 112860 - RNA, 22 nt, Human
ucaaugcaaccuccaccucccg

SEQ ID NO: 112861 - RNA, 19 nt, Human
ucaaugcaugaaaucagcc

SEQ ID NO: 112862 - RNA, 22 nt, Human
ucaaugcaugugacaaagagua

SEQ ID NO: 112863 - RNA, 20 nt, Human
ucaauguaaucauaucauca

SEQ ID NO: 112864 - RNA, 22 nt, Human
ucaaugucugcggcuagcugga

SEQ ID NO: 112865 - RNA, 22 nt, Human
ucaauuacagugucaccuuaag

SEQ ID NO: 112866 - RNA, 21 nt, Human
ucaauuauggaugugugcaaa

SEQ ID NO: 112867 - RNA, 22 nt, Human
ucaauucuuauugguguucugc

SEQ ID NO: 112868 - RNA, 23 nt, Human
ucaauugaugauguucucuuuug

SEQ ID NO: 112869 - RNA, 22 nt, Human
ucaauuuaagguacuacuuugg

SEQ ID NO: 112870 - RNA, 22 nt, Human
ucaauuuauguggcuauucauu

SEQ ID NO: 112871 - RNA, 22 nt, Human
ucaauuucaacagcugauaaga

SEQ ID NO: 112872 - RNA, 22 nt, Human
ucaauuuccccuauugauagac

SEQ ID NO: 112873 - RNA, 22 nt, Human
ucaauuucuugguuugauaaua

SEQ ID NO: 112874 - RNA, 22 nt, Human
ucacaaagcuuugauaagcaga

SEQ ID NO: 112875 - RNA, 22 nt, Human
ucacaaaggaugaugaauucug

SEQ ID NO: 112876 - RNA, 22 nt, Human
ucacaaauagcuauauuaagga

SEQ ID NO: 112877 - RNA, 22 nt, Human
ucacaaaugaccaugguuacua

SEQ ID NO: 112878 - RNA, 22 nt, Human
ucacaaaugaggaaaucgagca

SEQ ID NO: 112879 - RNA, 22 nt, Human
ucacaaaugucuccuguccugu

SEQ ID NO: 112880 - RNA, 22 nt, Human
ucacaaauuucagcucccugaa

SEQ ID NO: 112881 - RNA, 22 nt, Human
ucacaacuugaagcugauuuaa

SEQ ID NO: 112882 - RNA, 22 nt, Human
ucacaagaauuuguagaugaaa

SEQ ID NO: 112883 - RNA, 22 nt, Human
ucacaagacugagcuugcuuga

SEQ ID NO: 112884 - RNA, 19 nt, Human
ucacaagagagauaaagug

SEQ ID NO: 112885 - RNA, 22 nt, Human
ucacucugcugcccgagggcug

SEQ ID NO: 112886 - RNA, 22 nt, Human
ucacucuggaguccgcuaccag

SEQ ID NO: 112887 - RNA, 22 nt, Human
ucacucuguggcccaggcagug

SEQ ID NO: 112888 - RNA, 22 nt, Human
ucacucuguguuugaacucaag

SEQ ID NO: 112889 - RNA, 22 nt, Human
ucacucuguuuuacucacuguu

SEQ ID NO: 112890 - RNA, 22 nt, Human
ucacucuuuaucuuuuaugucu

SEQ ID NO: 112891 - RNA, 22 nt, Human
ucacugaaagaaugacauuaug

SEQ ID NO: 112892 - RNA, 22 nt, Human
ucacugcaaccucugccuuccg

SEQ ID NO: 112893 - RNA, 22 nt, Human
ucacugcagacaaccucaguca

SEQ ID NO: 112894 - RNA, 22 nt, Human
ucacugcagagaccucuaguca

SEQ ID NO: 112895 - RNA, 23 nt, Human
ucacugcuacucagccugagauu

SEQ ID NO: 112896 - RNA, 22 nt, Human
ucacugcucuccaauguggagu

SEQ ID NO: 112897 - RNA, 22 nt, Human
ucacugcuuucaaaaauuauug

SEQ ID NO: 112898 - RNA, 20 nt, Human
ucacuggccagaguagcccu

SEQ ID NO: 112899 - RNA, 22 nt, Human
ucacugggagagcugacaagga

SEQ ID NO: 112900 - RNA, 17 nt, Human
ucacugggccugcuccc

SEQ ID NO: 112901 - RNA, 22 nt, Human
ucacuggggagcacugacaugu

SEQ ID NO: 112902 - RNA, 22 nt, Human
ucacuggggccaugugagggac

SEQ ID NO: 112903 - RNA, 22 nt, Human
ucacuggggcccacaucaacau

SEQ ID NO: 112904 - RNA, 18 nt, Human
ucacuggguguauguggc

SEQ ID NO: 112905 - RNA, 22 nt, Human
ucacugguuagaagaaguaagc

SEQ ID NO: 112906 - RNA, 20 nt, Human
ucacuguaacauuugggggg

SEQ ID NO: 112907 - RNA, 20 nt, Human
ucacuguaauugccuacauu

SEQ ID NO: 112908 - RNA, 22 nt, Human
ucacuguagagucuguuuccac

SEQ ID NO: 112909 - RNA, 22 nt, Human
ucacugucccuguccucuuauc

SEQ ID NO: 112910 - RNA, 22 nt, Human
ucacugugauucuguauggauu

SEQ ID NO: 112911 - RNA, 22 nt, Human
ucacugugcucucuagauaggc

SEQ ID NO: 112912 - RNA, 22 nt, Human
ucacuguuucaucccuagcacu

SEQ ID NO: 112913 - RNA, 22 nt, Human
ucacuguuuugccugcacuucc

SEQ ID NO: 112914 - RNA, 22 nt, Human
ucacuuauugcucaucucaugc

SEQ ID NO: 112915 - RNA, 22 nt, Human
ucacuucccucuucagcuccca

SEQ ID NO: 112916 - RNA, 22 nt, Human
ucacuucguaaaccccucccau

SEQ ID NO: 112917 - RNA, 22 nt, Human
ucacuucuucagcuuuccuuga

SEQ ID NO: 112918 - RNA, 23 nt, Human
ucacuugaagcuagaaucugccc

SEQ ID NO: 112919 - RNA, 22 nt, Human
ucacuugagauguaccacaaac

SEQ ID NO: 112920 - RNA, 22 nt, Human
ucacuugauccuucccugaaau

SEQ ID NO: 112921 - RNA, 22 nt, Human
ucacuuuaccaaaguacaggag

SEQ ID NO: 112922 - RNA, 22 nt, Human
ucacuuuagaucuucaucucuu

SEQ ID NO: 112923 - RNA, 22 nt, Human
ucacuuuccucaucacgacuag

SEQ ID NO: 112924 - RNA, 22 nt, Human
ucacuuugaauuccuugauuuu

SEQ ID NO: 112925 - RNA, 22 nt, Human
ucacuuugacggccaacuucua

SEQ ID NO: 112926 - RNA, 22 nt, Human
ucacuuugaugacauuguagcu

SEQ ID NO: 112927 - RNA, 23 nt, Human
ucacuuugauguaauugaaaagc

SEQ ID NO: 112928 - RNA, 22 nt, Human
ucacuuugcaaauggcacggga

SEQ ID NO: 112929 - RNA, 22 nt, Human
ucagaaaagacucaggggcuga

SEQ ID NO: 112930 - RNA, 22 nt, Human
ucagaaaaugaaauggacucuc

SEQ ID NO: 112931 - RNA, 22 nt, Human
ucagaaagcuuagugucuugca

SEQ ID NO: 112932 - RNA, 22 nt, Human
ucagaaaggaguuagaggucuc

SEQ ID NO: 112933 - RNA, 22 nt, Human
ucagaaagguugagucaugugc

SEQ ID NO: 112934 - RNA, 22 nt, Human
ucagaaaugaucguuauucauu

SEQ ID NO: 112935 - RNA, 22 nt, Human
ucagaaauuuucucaguaguuc

SEQ ID NO: 112936 - RNA, 22 nt, Human
ucagaacagaagaaggaacacg

SEQ ID NO: 112937 - RNA, 22 nt, Human
ucagaacagcacagggugauuu

SEQ ID NO: 112938 - RNA, 22 nt, Human
ucagaacaggacuggcugccau

SEQ ID NO: 112939 - RNA, 23 nt, Human
ucagaacaguucuuggugcauag

SEQ ID NO: 112940 - RNA, 22 nt, Human
ucagaacaucccagauaguaga

SEQ ID NO: 112941 - RNA, 22 nt, Human
ucagaacaugaagguuaauuug

SEQ ID NO: 112942 - RNA, 22 nt, Human
ucagaacuauaguaguuucaug

SEQ ID NO: 112943 - RNA, 19 nt, Human
ucagaacucagaaugugua

SEQ ID NO: 112944 - RNA, 22 nt, Human
ucagaacugguauuuaucaagg

SEQ ID NO: 112945 - RNA, 21 nt, Human
ucagaacuggugcagaugaau

SEQ ID NO: 112946 - RNA, 22 nt, Human
ucagaacuuaaagccgauuggg

SEQ ID NO: 112947 - RNA, 19 nt, Human
ucagaaggcaggagaggcc

SEQ ID NO: 112948 - RNA, 22 nt, Human
ucagaagggaaacacaagugac

SEQ ID NO: 112949 - RNA, 22 nt, Human
ucagaagucacuuaggaaaggg

SEQ ID NO: 112950 - RNA, 22 nt, Human
ucagaagucaugcucagucugu

SEQ ID NO: 112951 - RNA, 22 nt, Human
ucagaaguccaauuuucgcacc

SEQ ID NO: 112952 - RNA, 22 nt, Human
ucagaaguccccagucaaggag

SEQ ID NO: 112953 - RNA, 21 nt, Human
ucagaagugcagcccaggaau

SEQ ID NO: 112954 - RNA, 22 nt, Human
ucagaagugcuguccuuauccc

SEQ ID NO: 112955 - RNA, 23 nt, Human
ucagaauaauaaccuaguaacug

SEQ ID NO: 112956 - RNA, 22 nt, Human
ucagaauaugcuaaugacauuu

SEQ ID NO: 112957 - RNA, 22 nt, Human
ucagaaucugcauuuaacaaaa

SEQ ID NO: 112958 - RNA, 23 nt, Human
ucagaaugcacugaauuuacccu

SEQ ID NO: 112959 - RNA, 22 nt, Human
ucagaauuagagcucuucuuga

SEQ ID NO: 112960 - RNA, 22 nt, Human
ucagaauuauguaggccugguu

SEQ ID NO: 112961 - RNA, 22 nt, Human
ucagaauuggacaauagaagca

SEQ ID NO: 112962 - RNA, 22 nt, Human
ucagaauuuaaaauguguagau

SEQ ID NO: 112963 - RNA, 22 nt, Human
ucagacaaguaaaauaauguaa

SEQ ID NO: 112964 - RNA, 22 nt, Human
ucagacagaaagaugaguaugg

SEQ ID NO: 112965 - RNA, 22 nt, Human
ucagacagaaggacuauuugaa

SEQ ID NO: 112966 - RNA, 22 nt, Human
ucagacagcuugggauaacuga

SEQ ID NO: 112967 - RNA, 22 nt, Human
ucagacaggcuucuuucucccu

SEQ ID NO: 112968 - RNA, 22 nt, Human
ucagacagggagucagaaaaua

SEQ ID NO: 112969 - RNA, 20 nt, Human
ucagacccagauuagcaggu

SEQ ID NO: 112970 - RNA, 22 nt, Human
ucacaucuccauguguuguuca

SEQ ID NO: 112971 - RNA, 23 nt, Human
ucacaucugccguaguguauucu

SEQ ID NO: 112972 - RNA, 20 nt, Human
ucacaucuggcagcugauga

SEQ ID NO: 112973 - RNA, 19 nt, Human
ucacaugaagccuagagaa

SEQ ID NO: 112974 - RNA, 18 nt, Human
ucacaugacagcuguugc

SEQ ID NO: 112975 - RNA, 22 nt, Human
ucacaugagguuaugacaaagc

SEQ ID NO: 112976 - RNA, 22 nt, Human
ucacaugagucacuaucuuaau

SEQ ID NO: 112977 - RNA, 18 nt, Human
ucacaugauuacccuggg

SEQ ID NO: 112978 - RNA, 22 nt, Human
ucacaugcacaucucuggaacc

SEQ ID NO: 112979 - RNA, 22 nt, Human
ucacaugcagucacugagcagg

SEQ ID NO: 112980 - RNA, 21 nt, Human
ucacaugcccauuacuggagc

SEQ ID NO: 112981 - RNA, 22 nt, Human
ucacaugcccuaccuaaucuua

SEQ ID NO: 112982 - RNA, 22 nt, Human
ucacaugccuuuuacucugcac

SEQ ID NO: 112983 - RNA, 22 nt, Human
ucacaugcuacugagccagacc

SEQ ID NO: 112984 - RNA, 22 nt, Human
ucacauguauaugcagcacagc

SEQ ID NO: 112985 - RNA, 22 nt, Human
ucacauguuaggucgggcaagg

SEQ ID NO: 112986 - RNA, 22 nt, Human
ucacauucucagcaucuauaca

SEQ ID NO: 112987 - RNA, 22 nt, Human
ucacauuuaaacaggaggauua

SEQ ID NO: 112988 - RNA, 23 nt, Human
ucacauuuaaccccucagaccuc

SEQ ID NO: 112989 - RNA, 22 nt, Human
ucacauuucacaugggaggagg

SEQ ID NO: 112990 - RNA, 22 nt, Human
ucacauuucgcaucaguccgau

SEQ ID NO: 112991 - RNA, 22 nt, Human
ucacauuucuuuauguagucuu

SEQ ID NO: 112992 - RNA, 22 nt, Human
ucacauuuggagaaagccugcc

SEQ ID NO: 112993 - RNA, 22 nt, Human
ucacauuuuaucuauuuuaagu

SEQ ID NO: 112994 - RNA, 22 nt, Human
ucagucucagcaccuagucaca

SEQ ID NO: 112995 - RNA, 22 nt, Human
ucagucucaucaacucuauucc

SEQ ID NO: 112996 - RNA, 22 nt, Human
ucagucuccuuuccucuagaca

SEQ ID NO: 112997 - RNA, 22 nt, Human
ucagucuuuaaaagcucaggaa

SEQ ID NO: 112998 - RNA, 22 nt, Human
ucagucuuucgaauucagccag

SEQ ID NO: 112999 - RNA, 22 nt, Human
ucagucuuuugcccugaggagu

SEQ ID NO: 113000 - RNA, 22 nt, Human
ucagugaaguaauggugagaga

SEQ ID NO: 113001 - RNA, 22 nt, Human
ucagugacuggguauuaaauca

SEQ ID NO: 113002 - RNA, 22 nt, Human
ucagugaugagguggcuuucaa

SEQ ID NO: 113003 - RNA, 22 nt, Human
ucagugauugguggacugccua

SEQ ID NO: 113004 - RNA, 22 nt, Human
ucagugcaaucaagguauguuu

SEQ ID NO: 113005 - RNA, 22 nt, Human
ucagugcacagagauuuuuguu

SEQ ID NO: 113006 - RNA, 22 nt, Human
ucagugcaggaaucucuagcca

SEQ ID NO: 113007 - RNA, 22 nt, Human
ucagugcaggaauuuccuuaga

SEQ ID NO: 113008 - RNA, 22 nt, Human
ucagugcagugaaagguuuacu

SEQ ID NO: 113009 - RNA, 22 nt, Human
ucagugcauggacagauuuaga

SEQ ID NO: 113010 - RNA, 22 nt, Human
ucagugcauucuaccaaaaggc

SEQ ID NO: 113011 - RNA, 22 nt, Human
ucagugcauuguucauuguagg

SEQ ID NO: 113012 - RNA, 22 nt, Human
ucagugccaugggcagacaggc

SEQ ID NO: 113013 - RNA, 22 nt, Human
ucagugcuaaaagagcuggugu

SEQ ID NO: 113014 - RNA, 20 nt, Human
ucagugcucaggcaccaggu

SEQ ID NO: 113015 - RNA, 19 nt, Human
ucagugcuccuauguccuu

SEQ ID NO: 113016 - RNA, 22 nt, Human
ucagugcugaguagcgugcacc

SEQ ID NO: 113017 - RNA, 22 nt, Human
ucagugcugcuuuaugacaguu

SEQ ID NO: 113018 - RNA, 22 nt, Human
ucagugcuuccuggaggaagcc

SEQ ID NO: 113019 - RNA, 22 nt, Human
ucagugcuugacagcucuggga

SEQ ID NO: 113020 - RNA, 22 nt, Human
ucaguggagagcuuccaggauu

SEQ ID NO: 113021 - RNA, 22 nt, Human
ucaguggauugacaugaaaaag

SEQ ID NO: 113022 - RNA, 22 nt, Human
ucaguggauuguagaaggcuua

SEQ ID NO: 113023 - RNA, 22 nt, Human
ucaguggggucgaugugaggga

SEQ ID NO: 113024 - RNA, 22 nt, Human
ucagugguaugcgugggagcug

SEQ ID NO: 113025 - RNA, 22 nt, Human
ucagugguuggaugauggucgc

SEQ ID NO: 113026 - RNA, 20 nt, Human
ucaguguauccucaguggcu

SEQ ID NO: 113027 - RNA, 22 nt, Human
ucagugucaucacuuaauauaa

SEQ ID NO: 113028 - RNA, 19 nt, Human
ucagugucccuguuaauau

SEQ ID NO: 113029 - RNA, 22 nt, Human
ucaguguccugugcggugcagc

SEQ ID NO: 113030 - RNA, 22 nt, Human
ucaguguccuucguucuuguug

SEQ ID NO: 113031 - RNA, 19 nt, Human
ucagugugacuuggucagu

SEQ ID NO: 113032 - RNA, 22 nt, Human
ucagugugauuaggcuaucuga

SEQ ID NO: 113033 - RNA, 22 nt, Human
ucagugugcacaugguagcagu

SEQ ID NO: 113034 - RNA, 22 nt, Human
ucaguguguaauucuuuguuuc

SEQ ID NO: 113035 - RNA, 22 nt, Human
ucaguguguacacugagcauuu

SEQ ID NO: 113036 - RNA, 19 nt, Human
ucagugugugggagguggu

SEQ ID NO: 113037 - RNA, 22 nt, Human
ucaguguguuacuuucuccuau

SEQ ID NO: 113038 - RNA, 22 nt, Human
ucaguguuggcuacaucugccu

SEQ ID NO: 113039 - RNA, 22 nt, Human
ucaguguugugcacauacaaaa

SEQ ID NO: 113040 - RNA, 22 nt, Human
ucaguguuugaacccaggguua

SEQ ID NO: 113041 - RNA, 22 nt, Human
ucaguguuugguuucagaauug

SEQ ID NO: 113042 - RNA, 22 nt, Human
ucaguguuuuccagggucuacu

SEQ ID NO: 113043 - RNA, 22 nt, Human
ucaguuaacggaaaggggugug

SEQ ID NO: 113044 - RNA, 23 nt, Human
ucaguuaacuguguuaccugugc

SEQ ID NO: 113045 - RNA, 22 nt, Human
ucaguuaagaggccacggcagu

SEQ ID NO: 113046 - RNA, 22 nt, Human
ucaguuaaugguaagggugaaa

SEQ ID NO: 113047 - RNA, 22 nt, Human
ucaguugcuaaaugguguagug

SEQ ID NO: 113048 - RNA, 22 nt, Human
ucaguuuaauacccagaugccu

SEQ ID NO: 113049 - RNA, 22 nt, Human
ucaguuuccugguugugauauu

SEQ ID NO: 113050 - RNA, 22 nt, Human
ucaguuuucucaucugugaaau

SEQ ID NO: 113051 - RNA, 22 nt, Human
ucaguuuucucauuuaugagau

SEQ ID NO: 113052 - RNA, 23 nt, Human
ucaguuuuggcuguucaguguug

SEQ ID NO: 113053 - RNA, 22 nt, Human
ucauaaaaauagacucuaaagu

SEQ ID NO: 113054 - RNA, 22 nt, Human
ucauaaacacacuaguaugauu

SEQ ID NO: 113055 - RNA, 20 nt, Human
ucauaaagaggaaauaaaua

SEQ ID NO: 113056 - RNA, 22 nt, Human
ucauaaagcuugccugcagugu

SEQ ID NO: 113057 - RNA, 22 nt, Human
ucauaaaguuaucaccaaaucc

SEQ ID NO: 113058 - RNA, 22 nt, Human
ucauaaaguuguuuuaauggga

SEQ ID NO: 113059 - RNA, 22 nt, Human
ucauaaauucuggugcugugag

SEQ ID NO: 113060 - RNA, 22 nt, Human
ucauaaauuggguuggcugggu

SEQ ID NO: 113061 - RNA, 22 nt, Human
ucauaagcuagcugcaccauau

SEQ ID NO: 113062 - RNA, 19 nt, Human
ucauaaggagagaggaaau

SEQ ID NO: 113063 - RNA, 22 nt, Human
ucauaaguaauuuaaacauucc

SEQ ID NO: 113064 - RNA, 22 nt, Human
ucauaagugguuuauaugcuug

SEQ ID NO: 113065 - RNA, 22 nt, Human
ucauaaugacaaacauacucag

SEQ ID NO: 113066 - RNA, 22 nt, Human
ucauacaaggaggguguucaaa

SEQ ID NO: 113067 - RNA, 22 nt, Human
ucauacaauucaaucucugauu

SEQ ID NO: 113068 - RNA, 22 nt, Human
ucauacaggcucaagcuauacg

SEQ ID NO: 113069 - RNA, 22 nt, Human
ucauacauaacuuguacaguga

SEQ ID NO: 113070 - RNA, 22 nt, Human
ucauacaucuuguauaucuauc

SEQ ID NO: 113071 - RNA, 22 nt, Human
ucauagaaauguggccagaaac

SEQ ID NO: 113072 - RNA, 22 nt, Human
ucauauaacuggauauuuucaa

SEQ ID NO: 113073 - RNA, 22 nt, Human
ucauauaucugcaaagcaguau

SEQ ID NO: 113074 - RNA, 22 nt, Human
ucauauauuuuggcagugauca

SEQ ID NO: 113075 - RNA, 21 nt, Human
ucauaucugcuuugcugucug

SEQ ID NO: 113076 - RNA, 22 nt, Human
ucauauuaggguaaugauaaga

SEQ ID NO: 113077 - RNA, 21 nt, Human
ucauauuucucuugcuauugu

SEQ ID NO: 113078 - RNA, 20 nt, Human
ucauauuuuugcccugggcc

SEQ ID NO: 113079 - RNA, 22 nt, Human
ucaucacauaugucaugauuug

SEQ ID NO: 113080 - RNA, 22 nt, Human
ucaucacucauuggacaacaga

SEQ ID NO: 113081 - RNA, 20 nt, Human
ucaucagauagguuaguaca

SEQ ID NO: 113082 - RNA, 22 nt, Human
ucaucagcucaucugcuccuag

SEQ ID NO: 113083 - RNA, 22 nt, Human
ucaucaucugggcuugggggug

SEQ ID NO: 113084 - RNA, 22 nt, Human
ucaucauguuugauuuccacag

SEQ ID NO: 113085 - RNA, 22 nt, Human
ucauccagaaaaaugucuuagc

SEQ ID NO: 113086 - RNA, 22 nt, Human
ucauccauaguuugguuggacu

SEQ ID NO: 113087 - RNA, 16 nt, Human
ucauccaugacagcuc

SEQ ID NO: 113088 - RNA, 22 nt, Human
ucauccugcacuggcuccuccu

SEQ ID NO: 113089 - RNA, 22 nt, Human
ucauccuggagaagcuccuucg

SEQ ID NO: 113090 - RNA, 22 nt, Human
ucaucgccucgugcaucuuggc

SEQ ID NO: 113091 - RNA, 22 nt, Human
ucaucuaagagucuuacauuua

SEQ ID NO: 113092 - RNA, 22 nt, Human
ucaucuaauuuuggaacagaga

SEQ ID NO: 113093 - RNA, 22 nt, Human
ucaucucagagagguauguuag

SEQ ID NO: 113094 - RNA, 22 nt, Human
ucaucuccauacggucucgcag

SEQ ID NO: 113095 - RNA, 22 nt, Human
ucaucucuccccagugucuuua

SEQ ID NO: 113096 - RNA, 22 nt, Human
ucaucugaacaugcagccugug

SEQ ID NO: 113097 - RNA, 22 nt, Human
ucaucugaccccaucuauucuc

SEQ ID NO: 113098 - RNA, 20 nt, Human
ucaucugauuaaccucgaag

SEQ ID NO: 113099 - RNA, 21 nt, Human
ucaucuggucuggggccugcu

SEQ ID NO: 113100 - RNA, 22 nt, Human
ucaucugucaaauugcaauaag

SEQ ID NO: 113101 - RNA, 22 nt, Human
ucaucugucauccacaaagcug

SEQ ID NO: 113102 - RNA, 22 nt, Human
ucaguuuauuucuuguuccaca

SEQ ID NO: 113103 - RNA, 22 nt, Human
ugggagucacuguuguugaggg

SEQ ID NO: 113104 - RNA, 22 nt, Human
ugggagucagacagccugagau

SEQ ID NO: 113105 - RNA, 22 nt, Human
ugggagucugaggcgggucgau

SEQ ID NO: 113106 - RNA, 23 nt, Human
ugggaguguugggaucucugcuc

SEQ ID NO: 113107 - RNA, 22 nt, Human
uccugaggacccugucaggggc

SEQ ID NO: 113108 - RNA, 22 nt, Human
uccugaggcccuguuagggucu

SEQ ID NO: 113109 - RNA, 22 nt, Human
uccugagggcauuuuggugacu

SEQ ID NO: 113110 - RNA, 22 nt, Human
uccugaggucugaaaaaggagc

SEQ ID NO: 113111 - RNA, 22 nt, Human
uccugaggugcucagccaggaa

SEQ ID NO: 113112 - RNA, 21 nt, Human
uccugagugugcccaggcucu

SEQ ID NO: 113113 - RNA, 22 nt, Human
uccugauggaggggucaucuuu

SEQ ID NO: 113114 - RNA, 22 nt, Human
uccugcagacauuuacaccuuu

SEQ ID NO: 113115 - RNA, 22 nt, Human
uccugcagagucccacugauuu

SEQ ID NO: 113116 - RNA, 23 nt, Human
uccugcagauaagcugguugaca

SEQ ID NO: 113117 - RNA, 22 nt, Human
uccugcaggccuguucccagua

SEQ ID NO: 113118 - RNA, 22 nt, Human
uccugcaggcuugaguccucag

SEQ ID NO: 113119 - RNA, 21 nt, Human
uccugcagggcagcagagugg

SEQ ID NO: 113120 - RNA, 22 nt, Human
uccugcagucugcacucugccu

SEQ ID NO: 113121 - RNA, 22 nt, Human
uccugccacugcacauauacuu

SEQ ID NO: 113122 - RNA, 23 nt, Human
uccugccagaugacuccuuucuu

SEQ ID NO: 113123 - RNA, 22 nt, Human
uccugccaucugcuguugaucu

SEQ ID NO: 113124 - RNA, 22 nt, Human
uccugccuaccuugcggaggug

SEQ ID NO: 113125 - RNA, 22 nt, Human
uccugccucaggcucuggagua

SEQ ID NO: 113126 - RNA, 22 nt, Human
uccugccucuccaugcuaacua

SEQ ID NO: 113127 - RNA, 22 nt, Human
uccugccucuuuucuuauucca

SEQ ID NO: 113128 - RNA, 22 nt, Human
uccugccuguuuaccuguacuu

SEQ ID NO: 113129 - RNA, 21 nt, Human
uccugccuuaguccagagcag

SEQ ID NO: 113130 - RNA, 22 nt, Human
uccugcuccaccgugggcugga

SEQ ID NO: 113131 - RNA, 22 nt, Human
uccugcugaccaguaaaugaau

SEQ ID NO: 113132 - RNA, 21 nt, Human
uccugcugagaaacagauggu

SEQ ID NO: 113133 - RNA, 20 nt, Human
uccugcugccaccucuucuu

SEQ ID NO: 113134 - RNA, 21 nt, Human
uccugcugcuccugucguguu

SEQ ID NO: 113135 - RNA, 22 nt, Human
uccugcugggucuaacucuggu

SEQ ID NO: 113136 - RNA, 22 nt, Human
uccugcugugcuuauuauccug

SEQ ID NO: 113137 - RNA, 19 nt, Human
uccugcugugugaagggga

SEQ ID NO: 113138 - RNA, 22 nt, Human
uccuggaacauggauaaagaau

SEQ ID NO: 113139 - RNA, 22 nt, Human
uccuggaagugcuuggugaggg

SEQ ID NO: 113140 - RNA, 22 nt, Human
uccuggagaagaggggcuugga

SEQ ID NO: 113141 - RNA, 22 nt, Human
uccuggagaauccugccaccug

SEQ ID NO: 113142 - RNA, 22 nt, Human
uccuggagauaauugcagugaa

SEQ ID NO: 113143 - RNA, 22 nt, Human
uccuggagccucauucaaacac

SEQ ID NO: 113144 - RNA, 22 nt, Human
uccuggagcugacuccguuuga

SEQ ID NO: 113145 - RNA, 20 nt, Human
uccuggagcugcuugaauuc

SEQ ID NO: 113146 - RNA, 22 nt, Human
uccuggaggggacagcaugggc

SEQ ID NO: 113147 - RNA, 20 nt, Human
uccuggaguauuccaugcuu

SEQ ID NO: 113148 - RNA, 22 nt, Human
uccuggaguauuucuguggugu

SEQ ID NO: 113149 - RNA, 22 nt, Human
uccuggagugucuuccccaagg

SEQ ID NO: 113150 - RNA, 22 nt, Human
uccuggauuaauagggagcugu

SEQ ID NO: 113151 - RNA, 22 nt, Human
uccuggauucugcccugaaggc

SEQ ID NO: 113152 - RNA, 22 nt, Human
uccuggcagaaauggggcugug

SEQ ID NO: 113153 - RNA, 22 nt, Human
uccuggcagcccgcaggugcug

SEQ ID NO: 113154 - RNA, 22 nt, Human
uccuggcagggucuaggucuag

SEQ ID NO: 113155 - RNA, 22 nt, Human
uccuggcaggguggcagcgggu

SEQ ID NO: 113156 - RNA, 22 nt, Human
uccuggcaggucagcaggagca

SEQ ID NO: 113157 - RNA, 22 nt, Human
uccuggcagguguauuggcugu

SEQ ID NO: 113158 - RNA, 22 nt, Human
uccuggcauccgugggucugug

SEQ ID NO: 113159 - RNA, 19 nt, Human
uccuggcaucuuccucccu

SEQ ID NO: 113160 - RNA, 22 nt, Human
uccuggcauugugcagggugug

SEQ ID NO: 113161 - RNA, 19 nt, Human
uccuggcauuuguaggaaa

SEQ ID NO: 113162 - RNA, 21 nt, Human
uccuggccagggcacuaggca

SEQ ID NO: 113163 - RNA, 22 nt, Human
uccuggcccaaucugcccauga

SEQ ID NO: 113164 - RNA, 22 nt, Human
uccuggcccacuccuagcuucu

SEQ ID NO: 113165 - RNA, 22 nt, Human
uccuggcccucugcaaacgcca

SEQ ID NO: 113166 - RNA, 22 nt, Human
uccuggccgccgcguggggccg

SEQ ID NO: 113167 - RNA, 22 nt, Human
uccuggccuagaguuuguguuc

SEQ ID NO: 113168 - RNA, 22 nt, Human
uccuggccuagcucacccugga

SEQ ID NO: 113169 - RNA, 20 nt, Human
uccuggccucccuggggcuc

SEQ ID NO: 113170 - RNA, 22 nt, Human
uccuggccucugagucaagaac

SEQ ID NO: 113171 - RNA, 22 nt, Human
uccuggccugucuggaguagcu

SEQ ID NO: 113172 - RNA, 16 nt, Human
uccuggccuuuggaag

SEQ ID NO: 113173 - RNA, 22 nt, Human
uccuggcuccugaucugucacu

SEQ ID NO: 113174 - RNA, 22 nt, Human
uccuggcuucugucuccuuauu

SEQ ID NO: 113175 - RNA, 22 nt, Human
uccugggaagacugugaggaca

SEQ ID NO: 113176 - RNA, 22 nt, Human
uccugggaaguugcaucaccgu

SEQ ID NO: 113177 - RNA, 22 nt, Human
uccugggaccaggcaccuacug

SEQ ID NO: 113178 - RNA, 22 nt, Human
uccugggagaguuugauucauu

SEQ ID NO: 113179 - RNA, 22 nt, Human
uccugggaggcugugccuggcu

SEQ ID NO: 113180 - RNA, 22 nt, Human
uccugggaguaaaagcugcccu

SEQ ID NO: 113181 - RNA, 22 nt, Human
uccugggaugaggaaacaagga

SEQ ID NO: 113182 - RNA, 22 nt, Human
uccugggaugcauaaaauaugu

SEQ ID NO: 113183 - RNA, 22 nt, Human
uccugggcagccucucuggaag

SEQ ID NO: 113184 - RNA, 22 nt, Human
uccugggcccuccggaucaggu

SEQ ID NO: 113185 - RNA, 22 nt, Human
uccugggcgagguacuggggcu

SEQ ID NO: 113186 - RNA, 22 nt, Human
uccugggcgaguggugguacac

SEQ ID NO: 113187 - RNA, 20 nt, Human
uccugggguaagccaugguc

SEQ ID NO: 113188 - RNA, 22 nt, Human
uccugggguuuagagggaagug

SEQ ID NO: 113189 - RNA, 22 nt, Human
uccugggucucuuccuuaguuc

SEQ ID NO: 113190 - RNA, 22 nt, Human
uccugggugugauauucauaga

SEQ ID NO: 113191 - RNA, 18 nt, Human
uccugguauugcaagcac

SEQ ID NO: 113192 - RNA, 22 nt, Human
uccuggucagcuuugagguugu

SEQ ID NO: 113193 - RNA, 22 nt, Human
uccugguggauagaagccaagg

SEQ ID NO: 113194 - RNA, 22 nt, Human
uccugguggcagauuuuagguc

SEQ ID NO: 113195 - RNA, 22 nt, Human
uccuggugguuugaaaacugaa

SEQ ID NO: 113196 - RNA, 22 nt, Human
uccugguguccuggucugcuag

SEQ ID NO: 113197 - RNA, 22 nt, Human
uccuggugucgccuggucaguu

SEQ ID NO: 113198 - RNA, 22 nt, Human
uccugguuagagcucucugggg

SEQ ID NO: 113199 - RNA, 22 nt, Human
uccugguuuauagacugauggc

SEQ ID NO: 113200 - RNA, 21 nt, Human
uccuguaagcuuggguggcuc

SEQ ID NO: 113201 - RNA, 22 nt, Human
uccuguagcugucacugggggc

SEQ ID NO: 113202 - RNA, 22 nt, Human
uccuguaguugcuaaguuuguu

SEQ ID NO: 113203 - RNA, 22 nt, Human
uccuguccucugggugccccau

SEQ ID NO: 113204 - RNA, 22 nt, Human
uccuguccugaggcuccaggcc

SEQ ID NO: 113205 - RNA, 22 nt, Human
uccugucugcucacagagcugg

SEQ ID NO: 113206 - RNA, 22 nt, Human
uccugucuuaaugaucucgugc

SEQ ID NO: 113207 - RNA, 22 nt, Human
uccugugagacuuguccauuau

SEQ ID NO: 113208 - RNA, 22 nt, Human
uccugugauggcuugcgaugug

SEQ ID NO: 113209 - RNA, 22 nt, Human
uccuguggucauucuucugccc

SEQ ID NO: 113210 - RNA, 22 nt, Human
uccugugucucagcgugaagca

SEQ ID NO: 113211 - RNA, 22 nt, Human
uccugugugcuuucuuuagguu

SEQ ID NO: 113212 - RNA, 22 nt, Human
uccagccugaacuuuguccaga

SEQ ID NO: 113213 - RNA, 22 nt, Human
uccagccugguugcgggcaucc

SEQ ID NO: 113214 - RNA, 18 nt, Human
uccagcgugcuccagggc

SEQ ID NO: 113215 - RNA, 18 nt, Human
uccagcucacagaugggc

SEQ ID NO: 113216 - RNA, 22 nt, Human
uccagcucagaugcagggauca

SEQ ID NO: 113217 - RNA, 22 nt, Human
uccagcucccacucucacugcu

SEQ ID NO: 113218 - RNA, 22 nt, Human
uccagcuccugaguucacugcu

SEQ ID NO: 113219 - RNA, 22 nt, Human
uccagcucuaacaugcugggcc

SEQ ID NO: 113220 - RNA, 21 nt, Human
uccagcucucauaguguucca

SEQ ID NO: 113221 - RNA, 22 nt, Human
uccagcucugcuucacagucuc

SEQ ID NO: 113222 - RNA, 22 nt, Human
uccagcucuuguugcccacugc

SEQ ID NO: 113223 - RNA, 22 nt, Human
uccagcugacaguucaaaauga

SEQ ID NO: 113224 - RNA, 19 nt, Human
uccuuaaaaaagcaguucu

SEQ ID NO: 113225 - RNA, 22 nt, Human
uccuuaaauccuucagagauua

SEQ ID NO: 113226 - RNA, 22 nt, Human
uccuuacaguuaaaaugggagu

SEQ ID NO: 113227 - RNA, 22 nt, Human
uccuuacaugcuuccuuauaca

SEQ ID NO: 113228 - RNA, 22 nt, Human
uccuuaccucaagcuugugguc

SEQ ID NO: 113229 - RNA, 22 nt, Human
uccuuagacaaagagugggcuu

SEQ ID NO: 113230 - RNA, 22 nt, Human
uccuuagaccuggcaaaugggg

SEQ ID NO: 113231 - RNA, 22 nt, Human
uccuuagcaggcauucaggacc

SEQ ID NO: 113232 - RNA, 22 nt, Human
uccuuagcccacuaauacuuau

SEQ ID NO: 113233 - RNA, 22 nt, Human
uccuuagcugugaaaugagaau

SEQ ID NO: 113234 - RNA, 22 nt, Human
uccuuaggcaauuugggagagu

SEQ ID NO: 113235 - RNA, 22 nt, Human
uccuuauaccuuugcuccgcuu

SEQ ID NO: 113236 - RNA, 22 nt, Human
uccuuauaguugucuuugaacc

SEQ ID NO: 113237 - RNA, 21 nt, Human
uccuuauauuugaauacuuua

SEQ ID NO: 113238 - RNA, 22 nt, Human
uccuucaaaaguugagagagcc

SEQ ID NO: 113239 - RNA, 22 nt, Human
uccuucaagugcaguaccugag

SEQ ID NO: 113240 - RNA, 23 nt, Human
uccuucaaguuaggaagugaaca

SEQ ID NO: 113241 - RNA, 18 nt, Human
uccuucacagcaggaagg

SEQ ID NO: 113242 - RNA, 22 nt, Human
uccuucaccucaagcuuuugaa

SEQ ID NO: 113243 - RNA, 22 nt, Human
uccuucagaaaaccucagucuu

SEQ ID NO: 113244 - RNA, 20 nt, Human
uccuucagacuuuggaguug

SEQ ID NO: 113245 - RNA, 22 nt, Human
uccuucagaggauaaggaagaa

SEQ ID NO: 113246 - RNA, 22 nt, Human
uccuucagcuuguuagagugac

SEQ ID NO: 113247 - RNA, 23 nt, Human
uccuucaggcucuuccccuggac

SEQ ID NO: 113248 - RNA, 17 nt, Human
uccuucagggccucaca

SEQ ID NO: 113249 - RNA, 21 nt, Human
uccuucagucuagaugauugu

SEQ ID NO: 113250 - RNA, 22 nt, Human
uccuucagucuucugagccaua

SEQ ID NO: 113251 - RNA, 22 nt, Human
uccuucaguuaaagaucucaca

SEQ ID NO: 113252 - RNA, 22 nt, Human
uccuucaugaugcuuagcagag

SEQ ID NO: 113253 - RNA, 22 nt, Human
uccuuccagguccagggaugug

SEQ ID NO: 113254 - RNA, 19 nt, Human
uccuuccaguuccuggggu

SEQ ID NO: 113255 - RNA, 21 nt, Human
uccuucccccuuggccuggga

SEQ ID NO: 113256 - RNA, 22 nt, Human
uccuuccuggggucucugcugc

SEQ ID NO: 113257 - RNA, 21 nt, Human
uccuuccuugagguccuuucc

SEQ ID NO: 113258 - RNA, 22 nt, Human
uccuucuacacugccucugaga

SEQ ID NO: 113259 - RNA, 22 nt, Human
uccuucucuacaaauccaggca

SEQ ID NO: 113260 - RNA, 21 nt, Human
uccuucucuaugauugucuga

SEQ ID NO: 113261 - RNA, 20 nt, Human
uccuucugaggugaggagga

SEQ ID NO: 113262 - RNA, 22 nt, Human
uccuucuguagucccugucccu

SEQ ID NO: 113263 - RNA, 22 nt, Human
uccuucuucaugaagauauaug

SEQ ID NO: 113264 - RNA, 22 nt, Human
uccuugaaaaucuugguuuaga

SEQ ID NO: 113265 - RNA, 22 nt, Human
uccuugaagcuuguaucuaaua

SEQ ID NO: 113266 - RNA, 22 nt, Human
uccuugaauauaauaacaguag

SEQ ID NO: 113267 - RNA, 22 nt, Human
uccuugaauccuagcauccuau

SEQ ID NO: 113268 - RNA, 22 nt, Human
uccuugaauggacauuacacug

SEQ ID NO: 113269 - RNA, 22 nt, Human
uccuugaggaggugacacugga

SEQ ID NO: 113270 - RNA, 22 nt, Human
uccuuggaaauuucaucagaca

SEQ ID NO: 113271 - RNA, 22 nt, Human
uccuuggaacauugauccaaac

SEQ ID NO: 113272 - RNA, 22 nt, Human
uccuuggaagagcauucccagg

SEQ ID NO: 113273 - RNA, 22 nt, Human
uccuuggagaaucuuguuuuac

SEQ ID NO: 113274 - RNA, 22 nt, Human
uccuuggaggucaacgggacgg

SEQ ID NO: 113275 - RNA, 22 nt, Human
uccuuggaucuuuccuaugauu

SEQ ID NO: 113276 - RNA, 22 nt, Human
uccuuggcuaguacuggccagc

SEQ ID NO: 113277 - RNA, 22 nt, Human
uccuuggcucuuugauaaauac

SEQ ID NO: 113278 - RNA, 22 nt, Human
uccuugggguaacuccagccug

SEQ ID NO: 113279 - RNA, 22 nt, Human
uccuuggugcaaaugauuuaau

SEQ ID NO: 113280 - RNA, 22 nt, Human
uccuuggugcuggagcucagac

SEQ ID NO: 113281 - RNA, 22 nt, Human
uccuuguaacguugggcugggg

SEQ ID NO: 113282 - RNA, 22 nt, Human
uccuuuaacuugauuauuuuca

SEQ ID NO: 113283 - RNA, 22 nt, Human
uccuuuaucaaggagccuuaga

SEQ ID NO: 113284 - RNA, 22 nt, Human
uccuuucaccaaaaaguguugu

SEQ ID NO: 113285 - RNA, 22 nt, Human
uccuuucuccagcuggcauugu

SEQ ID NO: 113286 - RNA, 22 nt, Human
uccuuucugucuuuacucugga

SEQ ID NO: 113287 - RNA, 17 nt, Human
uccuuucuuuaccuguu

SEQ ID NO: 113288 - RNA, 22 nt, Human
uccuuuggcaagcucugcucuu

SEQ ID NO: 113289 - RNA, 20 nt, Human
uccuuuggccuuagagcugu

SEQ ID NO: 113290 - RNA, 22 nt, Human
uccuuugguucucuaagaugcu

SEQ ID NO: 113291 - RNA, 22 nt, Human
uccuuuguugagauaaauuggg

SEQ ID NO: 113292 - RNA, 22 nt, Human
uccuuuguuguacaauuauuuu

SEQ ID NO: 113293 - RNA, 18 nt, Human
uccuuuucucccacccac

SEQ ID NO: 113294 - RNA, 22 nt, Human
ucgaaaaugaagagucaauuaa

SEQ ID NO: 113295 - RNA, 22 nt, Human
ucgaaggaaccucaauuuucgu

SEQ ID NO: 113296 - RNA, 22 nt, Human
ucgagcugcacgcccccgagcu

SEQ ID NO: 113297 - RNA, 22 nt, Human
ucgagucauguucucccauuaa

SEQ ID NO: 113298 - RNA, 22 nt, Human
ucgauguggugacaagguacgu

SEQ ID NO: 113299 - RNA, 22 nt, Human
ucgcagaccgcggugcacgugg

SEQ ID NO: 113300 - RNA, 22 nt, Human
ucgcagcacuagcccugcauug

SEQ ID NO: 113301 - RNA, 22 nt, Human
ucgccauggaaguccuugcgga

SEQ ID NO: 113302 - RNA, 22 nt, Human
ucgccccgaggcagcccuaugc

SEQ ID NO: 113303 - RNA, 22 nt, Human
ucgcugaggcugcacggcugcc

SEQ ID NO: 113304 - RNA, 22 nt, Human
ucgcuggccuggaggggagcca

SEQ ID NO: 113305 - RNA, 22 nt, Human
ucgcugugaaaaccuuggacaa

SEQ ID NO: 113306 - RNA, 22 nt, Human
ucgcugugguuucuguacaugg

SEQ ID NO: 113307 - RNA, 22 nt, Human
ucggaaggggccgcgcucggac

SEQ ID NO: 113308 - RNA, 22 nt, Human
ucggccacgggguuuccuccaa

SEQ ID NO: 113309 - RNA, 22 nt, Human
ucgggcugcucgcugcggaacu

SEQ ID NO: 113310 - RNA, 17 nt, Human
ucgguuugccaggcuuc

SEQ ID NO: 113311 - RNA, 22 nt, Human
ucguacagcagacugaaguccu

SEQ ID NO: 113312 - RNA, 22 nt, Human
ucguauccugcuucaugcccag

SEQ ID NO: 113313 - RNA, 22 nt, Human
ucguaugcucucuguguccugu

SEQ ID NO: 113314 - RNA, 22 nt, Human
ucgugcaaaccugacacagcca

SEQ ID NO: 113315 - RNA, 22 nt, Human
ucgugcaaaggcccaugugggu

SEQ ID NO: 113316 - RNA, 19 nt, Human
ucguggggaggugggcagc

SEQ ID NO: 113317 - RNA, 23 nt, Human
ucguugaauagcaauagcacaac

SEQ ID NO: 113318 - RNA, 22 nt, Human
ucuaaaaugcagaucuacuggu

SEQ ID NO: 113319 - RNA, 22 nt, Human
ucuaaacagccucuuaccaacu

SEQ ID NO: 113320 - RNA, 20 nt, Human
ucuaaacaguuggcaugggg

SEQ ID NO: 113321 - RNA, 22 nt, Human
ucuaaacugcgagcaugccccc

SEQ ID NO: 113322 - RNA, 22 nt, Human
uccaggcaggguuaaggguccu

SEQ ID NO: 113323 - RNA, 17 nt, Human
uccaggcauaucuccua

SEQ ID NO: 113324 - RNA, 23 nt, Human
uccaggcaugagcucuggaugga

SEQ ID NO: 113325 - RNA, 22 nt, Human
uccaggccauugacugcauccu

SEQ ID NO: 113326 - RNA, 22 nt, Human
uccaggcccgagaugggcugga

SEQ ID NO: 113327 - RNA, 22 nt, Human
uccaggccgcauaguuacucug

SEQ ID NO: 113328 - RNA, 21 nt, Human
uccaggccucaggaagggaug

SEQ ID NO: 113329 - RNA, 22 nt, Human
uccaggccucuagcccucucuu

SEQ ID NO: 113330 - RNA, 22 nt, Human
uccaggccugcaaugacaaagc

SEQ ID NO: 113331 - RNA, 22 nt, Human
uccaggccugccugguguuugc

SEQ ID NO: 113332 - RNA, 22 nt, Human
uccaggcucagucaagcacuuc

SEQ ID NO: 113333 - RNA, 18 nt, Human
uccaggcuccaggcuaac

SEQ ID NO: 113334 - RNA, 22 nt, Human
uccaggcucuaggcugcucucc

SEQ ID NO: 113335 - RNA, 22 nt, Human
uccaggcucucaggugucagca

SEQ ID NO: 113336 - RNA, 21 nt, Human
uccaggcugaugaugucaacu

SEQ ID NO: 113337 - RNA, 22 nt, Human
uccaggcugcagucuugcccuc

SEQ ID NO: 113338 - RNA, 22 nt, Human
uccaggcuggagugcaguggcg

SEQ ID NO: 113339 - RNA, 22 nt, Human
uccaggcuggcucuucaaaauu

SEQ ID NO: 113340 - RNA, 22 nt, Human
uccaggcugugcaugaguuuag

SEQ ID NO: 113341 - RNA, 22 nt, Human
uccaggcuucacgucugcccuc

SEQ ID NO: 113342 - RNA, 21 nt, Human
uccagcugcacaagcaugggg

SEQ ID NO: 113343 - RNA, 23 nt, Human
uccagcugcagugggauggggaa

SEQ ID NO: 113344 - RNA, 22 nt, Human
uccagcugcuagcuagaugcaa

SEQ ID NO: 113345 - RNA, 22 nt, Human
uccagcugcugacccaguagcc

SEQ ID NO: 113346 - RNA, 22 nt, Human
uccagcugcugccagccaagcu

SEQ ID NO: 113347 - RNA, 22 nt, Human
uccagcuguacuuuguccuggc

SEQ ID NO: 113348 - RNA, 22 nt, Human
uccagcuguaguggauuugaga

SEQ ID NO: 113349 - RNA, 22 nt, Human
uccagcuguugauauucuaggu

SEQ ID NO: 113350 - RNA, 22 nt, Human
uccagcuuucacgcuccugccu

SEQ ID NO: 113351 - RNA, 22 nt, Human
uccagcuuugagauuuuaugga

SEQ ID NO: 113352 - RNA, 22 nt, Human
uccagcuuuuaccaaaugagca

SEQ ID NO: 113353 - RNA, 22 nt, Human
uccagcuuuuauuggaugagga

SEQ ID NO: 113354 - RNA, 22 nt, Human
uccaggaaacaucuccgccuaa

SEQ ID NO: 113355 - RNA, 22 nt, Human
uccaggaacagaauguuagugc

SEQ ID NO: 113356 - RNA, 22 nt, Human
uccaggaaugugugugggcuag

SEQ ID NO: 113357 - RNA, 22 nt, Human
uccaggaccaaagacacaugua

SEQ ID NO: 113358 - RNA, 17 nt, Human
uccaggagaggcaaugg

SEQ ID NO: 113359 - RNA, 22 nt, Human
uccaggagagguguggggacug

SEQ ID NO: 113360 - RNA, 22 nt, Human
uccaggagauucauuaggucau

SEQ ID NO: 113361 - RNA, 21 nt, Human
uccaggagcacgggacuagga

SEQ ID NO: 113362 - RNA, 22 nt, Human
uccaggaggacugagggggcug

SEQ ID NO: 113363 - RNA, 19 nt, Human
uccaggaggcugccauuga

SEQ ID NO: 113364 - RNA, 20 nt, Human
uccaggagguuaguguggcu

SEQ ID NO: 113365 - RNA, 22 nt, Human
uccaggaguccugggagugauu

SEQ ID NO: 113366 - RNA, 22 nt, Human
uccaggagucuagccucaggcc

SEQ ID NO: 113367 - RNA, 22 nt, Human
uccaggaguggggcagaggucu

SEQ ID NO: 113368 - RNA, 22 nt, Human
uccaggauugcaggugcacaac

SEQ ID NO: 113369 - RNA, 22 nt, Human
uccaggcaaagggacuagcagg

SEQ ID NO: 113370 - RNA, 22 nt, Human
uccaggcaaagugcugggcugc

SEQ ID NO: 113371 - RNA, 22 nt, Human
uccaggcacagaguuggucagu

SEQ ID NO: 113372 - RNA, 20 nt, Human
uccaggcagacagcuauggg

SEQ ID NO: 113373 - RNA, 22 nt, Human
uccaggcagcccuuccugacuc

SEQ ID NO: 113374 - RNA, 22 nt, Human
uccaggcagucauuaaucucua

SEQ ID NO: 113375 - RNA, 22 nt, Human
uccaggcaguuuuccagguugu

SEQ ID NO: 113376 - RNA, 22 nt, Human
uccaggcauaaugcccaguggu

SEQ ID NO: 113377 - RNA, 22 nt, Human
uccaggcauagaaggcacgcac

SEQ ID NO: 113378 - RNA, 22 nt, Human
uccaggccaggguaagaggaga

SEQ ID NO: 113379 - RNA, 21 nt, Human
uccaggccaugguggggaggc

SEQ ID NO: 113380 - RNA, 20 nt, Human
uccaggcccacucagcugaa

SEQ ID NO: 113381 - RNA, 22 nt, Human
uccaggcccagacggggugagg

SEQ ID NO: 113382 - RNA, 22 nt, Human
uccaggcccauggagcagagcu

SEQ ID NO: 113383 - RNA, 22 nt, Human
uccaggccccacugaagccccu

SEQ ID NO: 113384 - RNA, 22 nt, Human
uccaggccccagaccguacugc

SEQ ID NO: 113385 - RNA, 22 nt, Human
uccaggccccccacgcuaaugg

SEQ ID NO: 113386 - RNA, 22 nt, Human
uccaggccccugccugggccug

SEQ ID NO: 113387 - RNA, 22 nt, Human
uccaggccuaggccaagugauu

SEQ ID NO: 113388 - RNA, 18 nt, Human
uccaggccugaagugucc

SEQ ID NO: 113389 - RNA, 22 nt, Human
uccaggccugacuauaaaugua

SEQ ID NO: 113390 - RNA, 22 nt, Human
uccaggccuggcuccauucagu

SEQ ID NO: 113391 - RNA, 22 nt, Human
uccaggccuuugcacauguugu

SEQ ID NO: 113392 - RNA, 22 nt, Human
uccaggcucagcacuugcuacu

SEQ ID NO: 113393 - RNA, 19 nt, Human
uccaggcuccauuggcaga

SEQ ID NO: 113394 - RNA, 22 nt, Human
uccaggcucccucaggaugcac

SEQ ID NO: 113395 - RNA, 23 nt, Human
uccaggcugaaggagcagauuuu

SEQ ID NO: 113396 - RNA, 22 nt, Human
uccaggcugacgcagcuauuua

SEQ ID NO: 113397 - RNA, 22 nt, Human
uccaggcuuuggggcaggagcg

SEQ ID NO: 113398 - RNA, 22 nt, Human
uccagggaagagcagaggcuac

SEQ ID NO: 113399 - RNA, 22 nt, Human
uccagggacacagaguccuucu

SEQ ID NO: 113400 - RNA, 22 nt, Human
uccagggacagcgcuggagcua

SEQ ID NO: 113401 - RNA, 22 nt, Human
uccagggacaguauagaggauc

SEQ ID NO: 113402 - RNA, 22 nt, Human
uccagggauguccuguagcacu

SEQ ID NO: 113403 - RNA, 22 nt, Human
uccagggcaccagcgucccccu

SEQ ID NO: 113404 - RNA, 22 nt, Human
uccagggcaggugcugggcucu

SEQ ID NO: 113405 - RNA, 22 nt, Human
uccagggccaguccuugucugu

SEQ ID NO: 113406 - RNA, 22 nt, Human
uccagggccuuaccucuucaga

SEQ ID NO: 113407 - RNA, 22 nt, Human
uccagggcugacuugggagagg

SEQ ID NO: 113408 - RNA, 23 nt, Human
uccagggcuggccagaccucggu

SEQ ID NO: 113409 - RNA, 18 nt, Human
uccagggcuuccuccucu

SEQ ID NO: 113410 - RNA, 22 nt, Human
uccaggggugauuuuugacuug

SEQ ID NO: 113411 - RNA, 22 nt, Human
uccaggguguguuuacuggggu

SEQ ID NO: 113412 - RNA, 22 nt, Human
uccagguaauuuggaugcuagu

SEQ ID NO: 113413 - RNA, 22 nt, Human
uccagguguauuuacugaagua

SEQ ID NO: 113414 - RNA, 22 nt, Human
uccagguuucgcuacaggagag

SEQ ID NO: 113415 - RNA, 22 nt, Human
uccaguaugacugauguccuuc

SEQ ID NO: 113416 - RNA, 22 nt, Human
uccagucaacuuaaucucuuua

SEQ ID NO: 113417 - RNA, 22 nt, Human
uccagucaagcuugagaauuuc

SEQ ID NO: 113418 - RNA, 22 nt, Human
uccagucauuuccauuguuccc

SEQ ID NO: 113419 - RNA, 22 nt, Human
uccaguccuaucugcccuugga

SEQ ID NO: 113420 - RNA, 18 nt, Human
uccagucuuauuaccauu

SEQ ID NO: 113421 - RNA, 22 nt, Human
uccagucuucuugcagcuacau

SEQ ID NO: 113422 - RNA, 22 nt, Human
uccagugccucacugaggauuc

SEQ ID NO: 113423 - RNA, 20 nt, Human
uccaguggccugaaucugga

SEQ ID NO: 113424 - RNA, 22 nt, Human
uccaguggguugcugagggagg

SEQ ID NO: 113425 - RNA, 23 nt, Human
uccagugugugcagauuaagugc

SEQ ID NO: 113426 - RNA, 22 nt, Human
uccaguugcccaucucucuucu

SEQ ID NO: 113427 - RNA, 22 nt, Human
uccaguuguuuguauuaacucu

SEQ ID NO: 113428 - RNA, 22 nt, Human
uccaguuuacaggguugcuuuu

SEQ ID NO: 113429 - RNA, 22 nt, Human
uccaguuuauuaugcauuuaca

SEQ ID NO: 113430 - RNA, 22 nt, Human
uccaguuucauagcuaaggaac

SEQ ID NO: 113431 - RNA, 22 nt, Human
uccuaggguuggagacagugac

SEQ ID NO: 113432 - RNA, 22 nt, Human
uccucaaaguuguauaaauauu

SEQ ID NO: 113433 - RNA, 22 nt, Human
uccucaaauauuuacuuacuga

SEQ ID NO: 113434 - RNA, 22 nt, Human
uccucacaagcaagcacaggua

SEQ ID NO: 113435 - RNA, 22 nt, Human
uccucacagucaacacuuugag

SEQ ID NO: 113436 - RNA, 22 nt, Human
uccucacauggugagccacaca

SEQ ID NO: 113437 - RNA, 22 nt, Human
uccucacugcagugcuccgagc

SEQ ID NO: 113438 - RNA, 22 nt, Human
uccucagaaaccccugugaggu

SEQ ID NO: 113439 - RNA, 20 nt, Human
uccucagaagacauuugggg

SEQ ID NO: 113440 - RNA, 22 nt, Human
uccucagcuuuuauuucacuug

SEQ ID NO: 113441 - RNA, 22 nt, Human
uccucaggauguggaguagaau

SEQ ID NO: 113442 - RNA, 22 nt, Human
uccucaggaugugggguagaau

SEQ ID NO: 113443 - RNA, 22 nt, Human
uccucaggcggugaggaggggc

SEQ ID NO: 113444 - RNA, 22 nt, Human
uccucaggugacuagguaucuu

SEQ ID NO: 113445 - RNA, 22 nt, Human
uccucaguaaggaucgucagcu

SEQ ID NO: 113446 - RNA, 22 nt, Human
uccucagucacgguagcacauu

SEQ ID NO: 113447 - RNA, 22 nt, Human
uccucagucguuugagccaaaa

SEQ ID NO: 113448 - RNA, 22 nt, Human
uccucagucucuaaggccucag

SEQ ID NO: 113449 - RNA, 22 nt, Human
uccucaguggggcauucauuau

SEQ ID NO: 113450 - RNA, 22 nt, Human
uccucauacauaucucagucuu

SEQ ID NO: 113451 - RNA, 22 nt, Human
uccucauugucacuggcccgca

SEQ ID NO: 113452 - RNA, 20 nt, Human
uccuccaaccagcugcuaau

SEQ ID NO: 113453 - RNA, 22 nt, Human
uccuccaagcagaggcccugaa

SEQ ID NO: 113454 - RNA, 23 nt, Human
uccuccaaucucauggcccuuaa

SEQ ID NO: 113455 - RNA, 22 nt, Human
uccuccagaaacugaggcagaa

SEQ ID NO: 113456 - RNA, 22 nt, Human
uccuccagcuguauccugccug

SEQ ID NO: 113457 - RNA, 22 nt, Human
uccuccagcuucucuuuugggg

SEQ ID NO: 113458 - RNA, 22 nt, Human
uccuccaggauaaaauguguug

SEQ ID NO: 113459 - RNA, 22 nt, Human
uccuccaguggcccaguccuuc

SEQ ID NO: 113460 - RNA, 22 nt, Human
uccucccacauaggacaauggg

SEQ ID NO: 113461 - RNA, 22 nt, Human
uccuccccugcccaugaggagg

SEQ ID NO: 113462 - RNA, 22 nt, Human
uccucccugcacucagugaagu

SEQ ID NO: 113463 - RNA, 22 nt, Human
uccucccuugacuccugcuuuu

SEQ ID NO: 113464 - RNA, 22 nt, Human
uccucccuugggguuucguuau

SEQ ID NO: 113465 - RNA, 21 nt, Human
uccuccuccacuaggcuagcc

SEQ ID NO: 113466 - RNA, 22 nt, Human
uccuccugccuuugcuucuugu

SEQ ID NO: 113467 - RNA, 23 nt, Human
uccuccuggauacaaagggaaca

SEQ ID NO: 113468 - RNA, 21 nt, Human
uccuccuggccaggcggcccc

SEQ ID NO: 113469 - RNA, 21 nt, Human
uccuccuucaaguccuggccu

SEQ ID NO: 113470 - RNA, 22 nt, Human
uccuccuucgggacugcuugac

SEQ ID NO: 113471 - RNA, 20 nt, Human
uccuccuugcagagcccaga

SEQ ID NO: 113472 - RNA, 22 nt, Human
uccuccuuguuuugucucugcu

SEQ ID NO: 113473 - RNA, 22 nt, Human
uccucuacucgcuugcccuuug

SEQ ID NO: 113474 - RNA, 22 nt, Human
uccucucagugugguuguggga

SEQ ID NO: 113475 - RNA, 22 nt, Human
uccucuccagcaaacuggcuau

SEQ ID NO: 113476 - RNA, 22 nt, Human
uccggggcuuccccgcagugcc

SEQ ID NO: 113477 - RNA, 22 nt, Human
uccggguuuuacacucacauca

SEQ ID NO: 113478 - RNA, 22 nt, Human
uccguauuugacuauugcaccg

SEQ ID NO: 113479 - RNA, 22 nt, Human
uccguguucuccagagauaauc

SEQ ID NO: 113480 - RNA, 22 nt, Human
uccguucucuaggagaaacuuc

SEQ ID NO: 113481 - RNA, 20 nt, Human
uccuaacgaggcccauugca

SEQ ID NO: 113482 - RNA, 23 nt, Human
uccuaacucaauucagggguguc

SEQ ID NO: 113483 - RNA, 18 nt, Human
uccuaacuuagauacucc

SEQ ID NO: 113484 - RNA, 20 nt, Human
uccuaauaaccugaagaaau

SEQ ID NO: 113485 - RNA, 22 nt, Human
uccuacagauacuaaggagauc

SEQ ID NO: 113486 - RNA, 22 nt, Human
uccuagccuggugagaaacugu

SEQ ID NO: 113487 - RNA, 22 nt, Human
uccuagcuggccucucaccagc

SEQ ID NO: 113488 - RNA, 22 nt, Human
uccuagggauucaacacugaac

SEQ ID NO: 113489 - RNA, 22 nt, Human
uccuagugcaaauuggagcaug

SEQ ID NO: 113490 - RNA, 22 nt, Human
uccuaguucugguucugucacu

SEQ ID NO: 113491 - RNA, 22 nt, Human
uccuauugguagacauuucugu

SEQ ID NO: 113492 - RNA, 22 nt, Human
uccucaaauuagcagaucauag

SEQ ID NO: 113493 - RNA, 22 nt, Human
uccucacaagcauccugucuca

SEQ ID NO: 113494 - RNA, 22 nt, Human
uccucagaagaaccccuagauu

SEQ ID NO: 113495 - RNA, 22 nt, Human
uccucagauauaaaugagggug

SEQ ID NO: 113496 - RNA, 22 nt, Human
uccucagaugcucuuggacgcc

SEQ ID NO: 113497 - RNA, 18 nt, Human
uccucagccucaccuagc

SEQ ID NO: 113498 - RNA, 22 nt, Human
uccucaggagagcuccuaugcc

SEQ ID NO: 113499 - RNA, 22 nt, Human
uccucagggggccaacccagcc

SEQ ID NO: 113500 - RNA, 22 nt, Human
uccucagggguuucagguguac

SEQ ID NO: 113501 - RNA, 22 nt, Human
uccucaguauuguggagcagau

SEQ ID NO: 113502 - RNA, 22 nt, Human
uccucagucagcuccguucuug

SEQ ID NO: 113503 - RNA, 22 nt, Human
uccucagucucucaaaugaggc

SEQ ID NO: 113504 - RNA, 22 nt, Human
uccucaucucggaaccugccac

SEQ ID NO: 113505 - RNA, 22 nt, Human
uccucauucuuggugcaucaaa

SEQ ID NO: 113506 - RNA, 22 nt, Human
uccuccaagccuuugugaagug

SEQ ID NO: 113507 - RNA, 22 nt, Human
uccuccaaggcagggggagaga

SEQ ID NO: 113508 - RNA, 22 nt, Human
uccuccacgauggcacaccugg

SEQ ID NO: 113509 - RNA, 23 nt, Human
uccuccagaggcccuccuuggcc

SEQ ID NO: 113510 - RNA, 22 nt, Human
uccuccagcaggacugaggccc

SEQ ID NO: 113511 - RNA, 22 nt, Human
uccuccagugucuggggccuug

SEQ ID NO: 113512 - RNA, 22 nt, Human
uccucccaacuuuuccaucuca

SEQ ID NO: 113513 - RNA, 22 nt, Human
uccuccccucagggcaacggau

SEQ ID NO: 113514 - RNA, 22 nt, Human
uccucccuaaauccuagacugu

SEQ ID NO: 113515 - RNA, 22 nt, Human
uccucccuaacucaugaugagu

SEQ ID NO: 113516 - RNA, 23 nt, Human
uccucccugacuucuacagcaca

SEQ ID NO: 113517 - RNA, 21 nt, Human
uccucccugagcuguggggga

SEQ ID NO: 113518 - RNA, 23 nt, Human
uccuccugagugagagugccagc

SEQ ID NO: 113519 - RNA, 21 nt, Human
uccuccuguagaggguccugg

SEQ ID NO: 113520 - RNA, 22 nt, Human
uccuccuguuucucaggccugg

SEQ ID NO: 113521 - RNA, 19 nt, Human
uccuccuuacuuccucuug

SEQ ID NO: 113522 - RNA, 22 nt, Human
uccuccuuguucuuuugccuac

SEQ ID NO: 113523 - RNA, 22 nt, Human
uccuccuuguuuuccuguuuac

SEQ ID NO: 113524 - RNA, 18 nt, Human
uccuccuuuggccuuuuc

SEQ ID NO: 113525 - RNA, 22 nt, Human
uccucggcugggccccaggcuu

SEQ ID NO: 113526 - RNA, 22 nt, Human
uccucuccaggugagccgaaau

SEQ ID NO: 113527 - RNA, 22 nt, Human
uccucuccauauuuucugauuu

SEQ ID NO: 113528 - RNA, 18 nt, Human
uccucucuuuccccaggg

SEQ ID NO: 113529 - RNA, 22 nt, Human
uccucugaaaucuagauuguga

SEQ ID NO: 113530 - RNA, 22 nt, Human
uccucugaauguacuucauaau

SEQ ID NO: 113531 - RNA, 22 nt, Human
uccucugacucacagccugggg

SEQ ID NO: 113532 - RNA, 21 nt, Human
uccucugcagugagguggccu

SEQ ID NO: 113533 - RNA, 22 nt, Human
uccucugcuccaucuuuacugu

SEQ ID NO: 113534 - RNA, 22 nt, Human
uccucugcuguucugguucuuu

SEQ ID NO: 113535 - RNA, 22 nt, Human
uccucuggggcgugguccugga

SEQ ID NO: 113536 - RNA, 22 nt, Human
uccucuggggucagggcacuac

SEQ ID NO: 113537 - RNA, 22 nt, Human
uccucuggucuucgguguggac

SEQ ID NO: 113538 - RNA, 22 nt, Human
uccucuuccuucuguccaaaug

SEQ ID NO: 113539 - RNA, 22 nt, Human
uccucuucugccuauaucugcc

SEQ ID NO: 113540 - RNA, 22 nt, Human
ucuggagaaucugucagugugg

SEQ ID NO: 113541 - RNA, 22 nt, Human
ucuggagaggaggauguggaca

SEQ ID NO: 113542 - RNA, 22 nt, Human
ucuggagagucacagugccaga

SEQ ID NO: 113543 - RNA, 22 nt, Human
ucuggagauaagacagacagau

SEQ ID NO: 113544 - RNA, 22 nt, Human
ucuggagaucauguggggugga

SEQ ID NO: 113545 - RNA, 22 nt, Human
ucuggagcuggcagggcccugg

SEQ ID NO: 113546 - RNA, 22 nt, Human
ucuggagcugggggcuuaguau

SEQ ID NO: 113547 - RNA, 22 nt, Human
ucuggagcuuccucauuuacag

SEQ ID NO: 113548 - RNA, 22 nt, Human
ucuggagcuugaagcuuugguu

SEQ ID NO: 113549 - RNA, 22 nt, Human
ucuggaguaauuacagugacug

SEQ ID NO: 113550 - RNA, 20 nt, Human
ucuggaguagagcacaggca

SEQ ID NO: 113551 - RNA, 22 nt, Human
ucuggaguaugugugaacggug

SEQ ID NO: 113552 - RNA, 22 nt, Human
ucuggagucuaaagaaccaaaa

SEQ ID NO: 113553 - RNA, 22 nt, Human
ucuggagucugagaucugagga

SEQ ID NO: 113554 - RNA, 22 nt, Human
ucuggagucuggugguuauggu

SEQ ID NO: 113555 - RNA, 22 nt, Human
ucuggagugaaugaaguagugu

SEQ ID NO: 113556 - RNA, 22 nt, Human
ucuggagugcccugcucugccc

SEQ ID NO: 113557 - RNA, 22 nt, Human
ucuggaguguguguauucagcu

SEQ ID NO: 113558 - RNA, 22 nt, Human
ucuggaguguuucuaauuacug

SEQ ID NO: 113559 - RNA, 22 nt, Human
ucuggaguuaguuauaaugguu

SEQ ID NO: 113560 - RNA, 22 nt, Human
ucuggaguuugaggacaagcuu

SEQ ID NO: 113561 - RNA, 22 nt, Human
ucuggaucucccucauccuggg

SEQ ID NO: 113562 - RNA, 22 nt, Human
ucuggaugaagacccagaggcu

SEQ ID NO: 113563 - RNA, 22 nt, Human
ucuggaugauaugugaacuuga

SEQ ID NO: 113564 - RNA, 22 nt, Human
ucuggauggucagcucuuccug

SEQ ID NO: 113565 - RNA, 22 nt, Human
ucuggcagcaagauaacaaugg

SEQ ID NO: 113566 - RNA, 22 nt, Human
ucuggcagcaagucuguuucuc

SEQ ID NO: 113567 - RNA, 21 nt, Human
ucuggcagcaguuuguugagu

SEQ ID NO: 113568 - RNA, 22 nt, Human
ucuggcagcucaguucaggucu

SEQ ID NO: 113569 - RNA, 22 nt, Human
ucuggcaggacaugcugaccau

SEQ ID NO: 113570 - RNA, 22 nt, Human
ucuggcaggcaaucggcucugg

SEQ ID NO: 113571 - RNA, 22 nt, Human
ucuggcaggccuugucaaucug

SEQ ID NO: 113572 - RNA, 22 nt, Human
ucuggcaguaauaggggagaga

SEQ ID NO: 113573 - RNA, 22 nt, Human
ucuggcagugauuucugugauc

SEQ ID NO: 113574 - RNA, 22 nt, Human
ucuggcaguuugagaaaggcua

SEQ ID NO: 113575 - RNA, 22 nt, Human
ucuggcaucacucgcaagagca

SEQ ID NO: 113576 - RNA, 22 nt, Human
ucuggccaauguugugaucaca

SEQ ID NO: 113577 - RNA, 22 nt, Human
ucuggccacccgaggccccugc

SEQ ID NO: 113578 - RNA, 22 nt, Human
ucuggccacuugcuucacacug

SEQ ID NO: 113579 - RNA, 22 nt, Human
ucuggccaggauggcaagacca

SEQ ID NO: 113580 - RNA, 22 nt, Human
ucuggcccaaguuuucggugag

SEQ ID NO: 113581 - RNA, 22 nt, Human
ucuggcccagccccugauccca

SEQ ID NO: 113582 - RNA, 22 nt, Human
ucuggcccaucuucugccacca

SEQ ID NO: 113583 - RNA, 22 nt, Human
ucuggccugggccugccggugc

SEQ ID NO: 113584 - RNA, 22 nt, Human
ucuggcucagggcucugaggga

SEQ ID NO: 113585 - RNA, 23 nt, Human
ucuggcuccauccuuggggaucc

SEQ ID NO: 113586 - RNA, 22 nt, Human
ucuggcucccagccugcucuca

SEQ ID NO: 113587 - RNA, 22 nt, Human
ucuggcuccguguccgcuccca

SEQ ID NO: 113588 - RNA, 22 nt, Human
ucuggcucucucaucacccaau

SEQ ID NO: 113589 - RNA, 22 nt, Human
ucuggcucugacacuacuguua

SEQ ID NO: 113590 - RNA, 22 nt, Human
ucuggcugaaauuagaagguuc

SEQ ID NO: 113591 - RNA, 22 nt, Human
ucuggcugacauccuguaugag

SEQ ID NO: 113592 - RNA, 19 nt, Human
ucuggcugccaaggauuga

SEQ ID NO: 113593 - RNA, 22 nt, Human
uccugcugcuaccuggcccacg

SEQ ID NO: 113594 - RNA, 22 nt, Human
uccugcuggaaguagggaauga

SEQ ID NO: 113595 - RNA, 22 nt, Human
uccugcuggaauggaaaaugaa

SEQ ID NO: 113596 - RNA, 22 nt, Human
uccugcuguuuucuggcccaca

SEQ ID NO: 113597 - RNA, 22 nt, Human
uccugcuugaaacucugccuuc

SEQ ID NO: 113598 - RNA, 22 nt, Human
uccuggacuggcucagcacccu

SEQ ID NO: 113599 - RNA, 22 nt, Human
uccuggagaacugauucgcggg

SEQ ID NO: 113600 - RNA, 22 nt, Human
uccuggagaauggacaaugcac

SEQ ID NO: 113601 - RNA, 22 nt, Human
uccuggagccacggagcuuuca

SEQ ID NO: 113602 - RNA, 22 nt, Human
uccuggagcuggugucuuuccc

SEQ ID NO: 113603 - RNA, 22 nt, Human
uccuggagcuucaguuuccuuu

SEQ ID NO: 113604 - RNA, 22 nt, Human
uccuggaggacagaggcaucuc

SEQ ID NO: 113605 - RNA, 20 nt, Human
uccuggaggcuucauccaua

SEQ ID NO: 113606 - RNA, 22 nt, Human
uccuggagggaggcggugcuac

SEQ ID NO: 113607 - RNA, 22 nt, Human
uccuggaguuuguggugauaug

SEQ ID NO: 113608 - RNA, 22 nt, Human
uccuggauaucaaacaaacauu

SEQ ID NO: 113609 - RNA, 22 nt, Human
uccuggaucagcgggggcaggc

SEQ ID NO: 113610 - RNA, 22 nt, Human
uccuggcaaagauguugguguu

SEQ ID NO: 113611 - RNA, 22 nt, Human
uccuggcacccuuggguuggag

SEQ ID NO: 113612 - RNA, 22 nt, Human
uccuggcacuuugggggcucgc

SEQ ID NO: 113613 - RNA, 18 nt, Human
uccuggcagucagagagg

SEQ ID NO: 113614 - RNA, 22 nt, Human
uccuggccaaguagauguggcg

SEQ ID NO: 113615 - RNA, 22 nt, Human
uccuggccaaguuacucucugc

SEQ ID NO: 113616 - RNA, 22 nt, Human
uccuggccacacauuaauagug

SEQ ID NO: 113617 - RNA, 18 nt, Human
uccuggccacacuaccuu

SEQ ID NO: 113618 - RNA, 16 nt, Human
uccuggccccuaugga

SEQ ID NO: 113619 - RNA, 22 nt, Human
uccuggccgcuggccccugaga

SEQ ID NO: 113620 - RNA, 22 nt, Human
uccuggccucacaguccugggu

SEQ ID NO: 113621 - RNA, 22 nt, Human
uccuggccucgcuguccaccuu

SEQ ID NO: 113622 - RNA, 17 nt, Human
uccuggccuggugugug

SEQ ID NO: 113623 - RNA, 22 nt, Human
uccuggccuuagcgaggcgguc

SEQ ID NO: 113624 - RNA, 22 nt, Human
uccuggccuuauccccaaacug

SEQ ID NO: 113625 - RNA, 20 nt, Human
uccuggccuucucgggcagu

SEQ ID NO: 113626 - RNA, 22 nt, Human
uccuggccuugcgucuugggag

SEQ ID NO: 113627 - RNA, 22 nt, Human
uccuggccuugcuccugaugcc

SEQ ID NO: 113628 - RNA, 22 nt, Human
uccuggcuccuggagaccugcu

SEQ ID NO: 113629 - RNA, 22 nt, Human
uccuggcucgauugcuaccaau

SEQ ID NO: 113630 - RNA, 22 nt, Human
uccuggcucuaaguccugagug

SEQ ID NO: 113631 - RNA, 22 nt, Human
uccuggcucuucugaguuuucu

SEQ ID NO: 113632 - RNA, 22 nt, Human
uccuggcugaguucccaagucg

SEQ ID NO: 113633 - RNA, 22 nt, Human
uccuggcugucacucggguuga

SEQ ID NO: 113634 - RNA, 22 nt, Human
uccuggcuguuagagaggcaag

SEQ ID NO: 113635 - RNA, 22 nt, Human
uccuggcuuagguuuccagaac

SEQ ID NO: 113636 - RNA, 22 nt, Human
uccugggaacucggaaagcucu

SEQ ID NO: 113637 - RNA, 22 nt, Human
uccugggaagagaccugagcau

SEQ ID NO: 113638 - RNA, 21 nt, Human
uccugggaagcacuggggugg

SEQ ID NO: 113639 - RNA, 22 nt, Human
uccugggagcccuugcuccacc

SEQ ID NO: 113640 - RNA, 22 nt, Human
uccugggagguaaaccagcauc

SEQ ID NO: 113641 - RNA, 21 nt, Human
uccugggagucugagauccug

SEQ ID NO: 113642 - RNA, 22 nt, Human
uccugggauuugcccuuuucuc

SEQ ID NO: 113643 - RNA, 22 nt, Human
uccugggcaaagaggggcagug

SEQ ID NO: 113644 - RNA, 22 nt, Human
uccugggcagaaugggauggcu

SEQ ID NO: 113645 - RNA, 22 nt, Human
uccugggccaagggcugugagg

SEQ ID NO: 113646 - RNA, 22 nt, Human
uccugggccuguacuccauccg

SEQ ID NO: 113647 - RNA, 19 nt, Human
uccugggcugggccagguc

SEQ ID NO: 113648 - RNA, 22 nt, Human
uccugggcugugugccacucug

SEQ ID NO: 113649 - RNA, 22 nt, Human
ugaggaguaugguggggucauu

SEQ ID NO: 113650 - RNA, 21 nt, Human
ugaggauaaguaaagcugaag

SEQ ID NO: 113651 - RNA, 22 nt, Human
ugaggcaaagacaaagcagcau

SEQ ID NO: 113652 - RNA, 22 nt, Human
ugaggcaaaguucaagcugaaa

SEQ ID NO: 113653 - RNA, 19 nt, Human
ugaggcaagauggcucugg

SEQ ID NO: 113654 - RNA, 22 nt, Human
ugaggcaaggcugaaugaaggc

SEQ ID NO: 113655 - RNA, 21 nt, Human
ugaggcaaguccuuuuauagc

SEQ ID NO: 113656 - RNA, 22 nt, Human
ugaggcaauuggaaauuuuaac

SEQ ID NO: 113657 - RNA, 22 nt, Human
ugaggcagaaauuccuguuuuc

SEQ ID NO: 113658 - RNA, 22 nt, Human
ugaggcagaguaagauacauga

SEQ ID NO: 113659 - RNA, 22 nt, Human
ugaggcagcaauuguauuguau

SEQ ID NO: 113660 - RNA, 20 nt, Human
ugaggcaggagaauggcaug

SEQ ID NO: 113661 - RNA, 22 nt, Human
ugaggcaggaugcuugcacagg

SEQ ID NO: 113662 - RNA, 22 nt, Human
ugaggcagggaguuuaauuguc

SEQ ID NO: 113663 - RNA, 21 nt, Human
ugaggcaggggugcuuuuguc

SEQ ID NO: 113664 - RNA, 22 nt, Human
ugaggcaguucuuacuuguauu

SEQ ID NO: 113665 - RNA, 22 nt, Human
ugaggccaagaaaagcugggug

SEQ ID NO: 113666 - RNA, 21 nt, Human
ugaggccaauagccccuggac

SEQ ID NO: 113667 - RNA, 22 nt, Human
ugaggccagacugaaaccaaca

SEQ ID NO: 113668 - RNA, 18 nt, Human
ugaggccagagugggcau

SEQ ID NO: 113669 - RNA, 22 nt, Human
ugaggccagcuucagcagugga

SEQ ID NO: 113670 - RNA, 22 nt, Human
ugaggccagggauuccaucauu

SEQ ID NO: 113671 - RNA, 22 nt, Human
ugaggcccagccgcccugagag

SEQ ID NO: 113672 - RNA, 22 nt, Human
ugaggcccuagggcaugggaga

SEQ ID NO: 113673 - RNA, 22 nt, Human
ugaggccucauaaugagauuuc

SEQ ID NO: 113674 - RNA, 22 nt, Human
ugaggccugaagccugaaguga

SEQ ID NO: 113675 - RNA, 22 nt, Human
ugaggccugcauugaacuagaa

SEQ ID NO: 113676 - RNA, 22 nt, Human
ugaggccuggacucugcaugga

SEQ ID NO: 113677 - RNA, 22 nt, Human
ugaggccuuaguaacccugcac

SEQ ID NO: 113678 - RNA, 22 nt, Human
ugaggccuuuucugucuggcua

SEQ ID NO: 113679 - RNA, 22 nt, Human
ugaggcucaaggucugguggag

SEQ ID NO: 113680 - RNA, 22 nt, Human
ugaggcucacaaaucugcauuu

SEQ ID NO: 113681 - RNA, 22 nt, Human
ugaggcucagaaauguaaguuu

SEQ ID NO: 113682 - RNA, 22 nt, Human
ugaggcucagagaacagugacu

SEQ ID NO: 113683 - RNA, 21 nt, Human
ugaggcucaucuuauguggcu

SEQ ID NO: 113684 - RNA, 22 nt, Human
ugaggcuccuuguagagagugg

SEQ ID NO: 113685 - RNA, 18 nt, Human
ugaggcugaggguagagg

SEQ ID NO: 113686 - RNA, 22 nt, Human
ugaggcuggcaaggcugguauu

SEQ ID NO: 113687 - RNA, 22 nt, Human
ugaggcuugauuugcccgagag

SEQ ID NO: 113688 - RNA, 22 nt, Human
ugaggcuuggaggcuccagugg

SEQ ID NO: 113689 - RNA, 22 nt, Human
ugaggcuugucucagauggggg

SEQ ID NO: 113690 - RNA, 22 nt, Human
ugaggcuuuauguaagggugca

SEQ ID NO: 113691 - RNA, 22 nt, Human
ugagggacugcauacccagcuu

SEQ ID NO: 113692 - RNA, 22 nt, Human
ugagggacuugcuaguucucug

SEQ ID NO: 113693 - RNA, 22 nt, Human
ugagggagcacacacugaagug

SEQ ID NO: 113694 - RNA, 22 nt, Human
ugagggauccagaggcaguggu

SEQ ID NO: 113695 - RNA, 22 nt, Human
ugagggcaaaguggugcugagg

SEQ ID NO: 113696 - RNA, 22 nt, Human
ugagggcagagcacuggggagc

SEQ ID NO: 113697 - RNA, 22 nt, Human
ugagggcuaaauuguggcaggu

SEQ ID NO: 113698 - RNA, 22 nt, Human
ugagggcuguggaaggcuaacc

SEQ ID NO: 113699 - RNA, 22 nt, Human
ugaggggagaagcagcagccug

SEQ ID NO: 113700 - RNA, 22 nt, Human
ugaggggagguuggggcacauc

SEQ ID NO: 113701 - RNA, 22 nt, Human
ugaggggauacgguacacauug

SEQ ID NO: 113702 - RNA, 22 nt, Human
ugaggggcagagagguguccag

SEQ ID NO: 113703 - RNA, 22 nt, Human
ugaggggcauguguuuacacau

SEQ ID NO: 113704 - RNA, 22 nt, Human
ugccugggggacuaaggccaaa

SEQ ID NO: 113705 - RNA, 22 nt, Human
ugccugggguuggcaaacugcu

SEQ ID NO: 113706 - RNA, 22 nt, Human
ugccugggugcccucugcuccu

SEQ ID NO: 113707 - RNA, 22 nt, Human
ugccugucagggggagugggaa

SEQ ID NO: 113708 - RNA, 22 nt, Human
ugccugucuccucugcagggug

SEQ ID NO: 113709 - RNA, 22 nt, Human
ugccugucuucaggagugucac

SEQ ID NO: 113710 - RNA, 22 nt, Human
ugccugucuuuccucccucgua

SEQ ID NO: 113711 - RNA, 17 nt, Human
ugccugugauaagcaca

SEQ ID NO: 113712 - RNA, 22 nt, Human
ugccugugggugccaccacccu

SEQ ID NO: 113713 - RNA, 22 nt, Human
ugccuguguauuuccggccugc

SEQ ID NO: 113714 - RNA, 22 nt, Human
ugccuguguggggucugccgcc

SEQ ID NO: 113715 - RNA, 22 nt, Human
ugccuguguugauuacuuuguc

SEQ ID NO: 113716 - RNA, 22 nt, Human
ugccuuaaguaagacugaacag

SEQ ID NO: 113717 - RNA, 22 nt, Human
ugccuuaauuuucuaagcugug

SEQ ID NO: 113718 - RNA, 22 nt, Human
ugccuucaaucaggauggucuc

SEQ ID NO: 113719 - RNA, 22 nt, Human
ugccuucaccaggccuucagcc

SEQ ID NO: 113720 - RNA, 22 nt, Human
ugccuuccugcuuugaguucug

SEQ ID NO: 113721 - RNA, 22 nt, Human
ugccuugacaguuguaagaccu

SEQ ID NO: 113722 - RNA, 22 nt, Human
ugccuugcagguuuuaaauaca

SEQ ID NO: 113723 - RNA, 22 nt, Human
ugccuugcgggcguuucuguug

SEQ ID NO: 113724 - RNA, 22 nt, Human
ugccuugcgguguauuucuggg

SEQ ID NO: 113725 - RNA, 22 nt, Human
ugccuugcugcuuuggaguccu

SEQ ID NO: 113726 - RNA, 20 nt, Human
ugccuuggagcagccaaggu

SEQ ID NO: 113727 - RNA, 19 nt, Human
ugccuuggcugccaggaaa

SEQ ID NO: 113728 - RNA, 22 nt, Human
ugccuugguucucuacuuggag

SEQ ID NO: 113729 - RNA, 22 nt, Human
ugccuugguuuccccaucugua

SEQ ID NO: 113730 - RNA, 22 nt, Human
ugccuuuaacuuaaagcaugac

SEQ ID NO: 113731 - RNA, 22 nt, Human
ugccuuuaggggccucucccuc

SEQ ID NO: 113732 - RNA, 20 nt, Human
ugccuuuccuguuucaucuu

SEQ ID NO: 113733 - RNA, 22 nt, Human
ugccuuuuccagcuuccagagg

SEQ ID NO: 113734 - RNA, 22 nt, Human
ugccuuuuccaguuucuagggg

SEQ ID NO: 113735 - RNA, 22 nt, Human
ugccuuuucuguagcucuggaa

SEQ ID NO: 113736 - RNA, 22 nt, Human
ugcgaauugaugucaacucagg

SEQ ID NO: 113737 - RNA, 22 nt, Human
ugcgagaguggaaaggaagccu

SEQ ID NO: 113738 - RNA, 22 nt, Human
ugcgcaugcguggcucuccggc

SEQ ID NO: 113739 - RNA, 22 nt, Human
ugcgcccagccaagucuggcac

SEQ ID NO: 113740 - RNA, 22 nt, Human
ugcgcggcucagucaucuccag

SEQ ID NO: 113741 - RNA, 22 nt, Human
ugcggagggagcagucggcugu

SEQ ID NO: 113742 - RNA, 22 nt, Human
ugcggccgggcaucguauggcg

SEQ ID NO: 113743 - RNA, 22 nt, Human
ugcguacuguuuauacaugugu

SEQ ID NO: 113744 - RNA, 22 nt, Human
ugcguaguacgaauuugugccu

SEQ ID NO: 113745 - RNA, 21 nt, Human
ugcgugugcauggccuucggg

SEQ ID NO: 113746 - RNA, 20 nt, Human
ugcguguguauuuauuuucu

SEQ ID NO: 113747 - RNA, 22 nt, Human
ugcuaaacaauguacaguguau

SEQ ID NO: 113748 - RNA, 22 nt, Human
ugcuaaauaacuuacauagugg

SEQ ID NO: 113749 - RNA, 22 nt, Human
ugcuaaauaaguggaauagaca

SEQ ID NO: 113750 - RNA, 22 nt, Human
ugcuaagcucacauggcucuag

SEQ ID NO: 113751 - RNA, 22 nt, Human
ugcuaagcugaggaagaugaga

SEQ ID NO: 113752 - RNA, 19 nt, Human
ugcuaaguccuuuagaggc

SEQ ID NO: 113753 - RNA, 22 nt, Human
ugcuacacucaaucagugcuau

SEQ ID NO: 113754 - RNA, 22 nt, Human
ugcuacaggcgauccucaacua

SEQ ID NO: 113755 - RNA, 21 nt, Human
ugcuacauugcugguuauguu

SEQ ID NO: 113756 - RNA, 21 nt, Human
ugcuaggccauauugguugcu

SEQ ID NO: 113757 - RNA, 22 nt, Human
ugcuagggauauaguggcgagu

SEQ ID NO: 113758 - RNA, 22 nt, Human
ugacagacauggaagccagagu

SEQ ID NO: 113759 - RNA, 22 nt, Human
ugacagaccacugcaacucugu

SEQ ID NO: 113760 - RNA, 19 nt, Human
ugacagagagcaggguggu

SEQ ID NO: 113761 - RNA, 23 nt, Human
ugacagagcacagugggggagau

SEQ ID NO: 113762 - RNA, 22 nt, Human
ugacagagccaagaucaguacu

SEQ ID NO: 113763 - RNA, 22 nt, Human
ugacagaggagcuggaaugauu

SEQ ID NO: 113764 - RNA, 22 nt, Human
ugacagagugacacucuugucu

SEQ ID NO: 113765 - RNA, 19 nt, Human
ugacagcaugaauuaggac

SEQ ID NO: 113766 - RNA, 22 nt, Human
ugacagcaugaccacagggucu

SEQ ID NO: 113767 - RNA, 22 nt, Human
ugacagcauuacuaauacaugu

SEQ ID NO: 113768 - RNA, 22 nt, Human
ugacagccaugauccuuacugu

SEQ ID NO: 113769 - RNA, 22 nt, Human
ugacagcugagccccaggcaag

SEQ ID NO: 113770 - RNA, 22 nt, Human
ugacagcuuggacaggucccuc

SEQ ID NO: 113771 - RNA, 22 nt, Human
ugacaggaugaugagcaggggg

SEQ ID NO: 113772 - RNA, 22 nt, Human
ugacaggauugguugcuucuga

SEQ ID NO: 113773 - RNA, 22 nt, Human
ugacaggcaggacagaggugug

SEQ ID NO: 113774 - RNA, 23 nt, Human
ugacaggcugcuucuggcugagg

SEQ ID NO: 113775 - RNA, 22 nt, Human
ugacagggagguggaauaagua

SEQ ID NO: 113776 - RNA, 22 nt, Human
ugacaggugauugugaacuaag

SEQ ID NO: 113777 - RNA, 22 nt, Human
ugacaggugcugggggcagugu

SEQ ID NO: 113778 - RNA, 22 nt, Human
ugacagguucguuagucauguu

SEQ ID NO: 113779 - RNA, 22 nt, Human
ugacagguuguguagguggcca

SEQ ID NO: 113780 - RNA, 22 nt, Human
ugacaguauugauggcaggauu

SEQ ID NO: 113781 - RNA, 22 nt, Human
ugacagugacagccaaaggcuu

SEQ ID NO: 113782 - RNA, 22 nt, Human
ugacaguguuggggguaaauuu

SEQ ID NO: 113783 - RNA, 22 nt, Human
ugacaguuuaguguaauaguua

SEQ ID NO: 113784 - RNA, 22 nt, Human
ugacaguuuauuuugcagaaug

SEQ ID NO: 113785 - RNA, 22 nt, Human
ugacauaaugcuuugaaguugc

SEQ ID NO: 113786 - RNA, 19 nt, Human
ugacauagcaagacaaaac

SEQ ID NO: 113787 - RNA, 22 nt, Human
ugacaucacguccuuucagaga

SEQ ID NO: 113788 - RNA, 22 nt, Human
ugacaucauuggccauugggga

SEQ ID NO: 113789 - RNA, 22 nt, Human
ugacaucuggcuugugcccugc

SEQ ID NO: 113790 - RNA, 22 nt, Human
ugacaugcuaagauuauguuau

SEQ ID NO: 113791 - RNA, 22 nt, Human
ugacauguauaucuuacgcuau

SEQ ID NO: 113792 - RNA, 22 nt, Human
ugacaugugucuccuuccgucu

SEQ ID NO: 113793 - RNA, 22 nt, Human
ugacauguuagggaaaugugau

SEQ ID NO: 113794 - RNA, 22 nt, Human
ugacauuuaauuaacgaaugcu

SEQ ID NO: 113795 - RNA, 21 nt, Human
ugacauuuccaauauaaagcc

SEQ ID NO: 113796 - RNA, 22 nt, Human
ugacauuucgguguaugugaug

SEQ ID NO: 113797 - RNA, 22 nt, Human
ugacauuucuuguugauauaaa

SEQ ID NO: 113798 - RNA, 22 nt, Human
ugacauuuuuaaaaccacuagu

SEQ ID NO: 113799 - RNA, 22 nt, Human
ugaccaaaaaauucccugugag

SEQ ID NO: 113800 - RNA, 22 nt, Human
ugaccaaagacuuuagauguuc

SEQ ID NO: 113801 - RNA, 22 nt, Human
ugaccacacgucuggaauugug

SEQ ID NO: 113802 - RNA, 22 nt, Human
ugaccacagacccaaugacuac

SEQ ID NO: 113803 - RNA, 22 nt, Human
ugaccaggauacugcagggaug

SEQ ID NO: 113804 - RNA, 22 nt, Human
ugaccaguuaagucauccuguc

SEQ ID NO: 113805 - RNA, 22 nt, Human
ugaccauuugaucuacauucca

SEQ ID NO: 113806 - RNA, 22 nt, Human
ugacccaucaggccacaugagg

SEQ ID NO: 113807 - RNA, 22 nt, Human
ugacccauuugcuuuuccugua

SEQ ID NO: 113808 - RNA, 19 nt, Human
ugaccccacgcuccagagc

SEQ ID NO: 113809 - RNA, 22 nt, Human
ugaccccacugugcucagaggu

SEQ ID NO: 113810 - RNA, 22 nt, Human
ugacccucuuccccaugcgcuc

SEQ ID NO: 113811 - RNA, 22 nt, Human
ugacccuggccugguggcggaa

SEQ ID NO: 113812 - RNA, 22 nt, Human
ugacccuucaaauauccucaaa

SEQ ID NO: 113813 - RNA, 22 nt, Human
ugaccguuuuggcacccaugcu

SEQ ID NO: 113814 - RNA, 22 nt, Human
ugaccuccaauaccuuucuucc

SEQ ID NO: 113815 - RNA, 22 nt, Human
ugaccucuguccugcagucugg

SEQ ID NO: 113816 - RNA, 22 nt, Human
ugaccucuugucggagcuccag

SEQ ID NO: 113817 - RNA, 18 nt, Human
ugaccugcgcuucacggu

SEQ ID NO: 113818 - RNA, 22 nt, Human
ugaccuguguuugcuguugcuc

SEQ ID NO: 113819 - RNA, 22 nt, Human
ugaccuucgagcugcggguugu

SEQ ID NO: 113820 - RNA, 19 nt, Human
ugaggggcucacagucuca

SEQ ID NO: 113821 - RNA, 22 nt, Human
ugagggggguaaucacuggguu

SEQ ID NO: 113822 - RNA, 22 nt, Human
ugagggguaaguaaaggaauug

SEQ ID NO: 113823 - RNA, 22 nt, Human
ugaggguagcuggaucacggag

SEQ ID NO: 113824 - RNA, 22 nt, Human
ugagggucuggaaucugggcuu

SEQ ID NO: 113825 - RNA, 22 nt, Human
ugagggugggcccugggcaucu

SEQ ID NO: 113826 - RNA, 22 nt, Human
ugagguaauguguacguuaauu

SEQ ID NO: 113827 - RNA, 21 nt, Human
ugagguagccagugagaugga

SEQ ID NO: 113828 - RNA, 22 nt, Human
ugagguagggaguuuguuguug

SEQ ID NO: 113829 - RNA, 22 nt, Human
ugagguauacguugguucaguc

SEQ ID NO: 113830 - RNA, 20 nt, Human
ugagguaucaauucaaggca

SEQ ID NO: 113831 - RNA, 22 nt, Human
ugagguauccagugaagcagcc

SEQ ID NO: 113832 - RNA, 22 nt, Human
ugagguaugugaugucuuuuag

SEQ ID NO: 113833 - RNA, 22 nt, Human
ugaggucaagcccagagcagca

SEQ ID NO: 113834 - RNA, 22 nt, Human
ugaggucacagcuggggaugga

SEQ ID NO: 113835 - RNA, 22 nt, Human
ugaggucaccuggaggcagccu

SEQ ID NO: 113836 - RNA, 22 nt, Human
ugaggucagcccuuccuaugau

SEQ ID NO: 113837 - RNA, 22 nt, Human
ugagguccuagagagugugugg

SEQ ID NO: 113838 - RNA, 22 nt, Human
ugaggugaagaguggagcucag

SEQ ID NO: 113839 - RNA, 22 nt, Human
ugagguggcacacacuuccugc

SEQ ID NO: 113840 - RNA, 22 nt, Human
ugaggugggcuuguggauuugc

SEQ ID NO: 113841 - RNA, 22 nt, Human
ugagguggguggcuucuguuau

SEQ ID NO: 113842 - RNA, 22 nt, Human
ugagguguguccccagggaggu

SEQ ID NO: 113843 - RNA, 22 nt, Human
ugagguuagcugggauuucaug

SEQ ID NO: 113844 - RNA, 22 nt, Human
ugaguaaauacaaaaucaccuc

SEQ ID NO: 113845 - RNA, 17 nt, Human
ugaguagggaagaggag

SEQ ID NO: 113846 - RNA, 22 nt, Human
ugaguaggugguuaagcaugga

SEQ ID NO: 113847 - RNA, 22 nt, Human
ugaguauucugaauuucaaacu

SEQ ID NO: 113848 - RNA, 22 nt, Human
ugaguauuuuaaguucucaauc

SEQ ID NO: 113849 - RNA, 22 nt, Human
ugagucacuggcaaggcuuuga

SEQ ID NO: 113850 - RNA, 22 nt, Human
ugagucagccagagcugccaug

SEQ ID NO: 113851 - RNA, 22 nt, Human
ugagucagucugcccuggcuuc

SEQ ID NO: 113852 - RNA, 22 nt, Human
ugagucagugacaugaacuugu

SEQ ID NO: 113853 - RNA, 22 nt, Human
ugaguccacuuuaaaaugucag

SEQ ID NO: 113854 - RNA, 22 nt, Human
ugaguccaucgcagggaagugg

SEQ ID NO: 113855 - RNA, 22 nt, Human
ugaguccuaaagcugugcccuu

SEQ ID NO: 113856 - RNA, 22 nt, Human
ugaguccugucuuugucacuua

SEQ ID NO: 113857 - RNA, 23 nt, Human
ugagucuacucaccacaacuggg

SEQ ID NO: 113858 - RNA, 22 nt, Human
ugagucucauuaauuaugaaug

SEQ ID NO: 113859 - RNA, 22 nt, Human
ugagucucccaaguaguuggaa

SEQ ID NO: 113860 - RNA, 22 nt, Human
ugagucucccagcguuaaaccu

SEQ ID NO: 113861 - RNA, 21 nt, Human
ugagucucccuuagcccacgc

SEQ ID NO: 113862 - RNA, 22 nt, Human
ugagucugauuuuucuagcauu

SEQ ID NO: 113863 - RNA, 22 nt, Human
ugagucugggcauguucacuuu

SEQ ID NO: 113864 - RNA, 22 nt, Human
ugagucuucugccuaaagaagu

SEQ ID NO: 113865 - RNA, 22 nt, Human
ugagucuuuccaaagccgucau

SEQ ID NO: 113866 - RNA, 21 nt, Human
ugagucuuuuaauaggugcac

SEQ ID NO: 113867 - RNA, 22 nt, Human
uugauucaucuucuaauaccca

SEQ ID NO: 113868 - RNA, 22 nt, Human
uugauucuagaaucuucccucu

SEQ ID NO: 113869 - RNA, 22 nt, Human
uugauucugcugaucucggacg

SEQ ID NO: 113870 - RNA, 22 nt, Human
uugauucuucugaauuugcaga

SEQ ID NO: 113871 - RNA, 22 nt, Human
uugauugaauuuugaaaaucua

SEQ ID NO: 113872 - RNA, 21 nt, Human
uugauuuagcagaucuagcug

SEQ ID NO: 113873 - RNA, 22 nt, Human
uugauuucuauugaguuccugu

SEQ ID NO: 113874 - RNA, 22 nt, Human
uugauuucuuacucuuccaagg

SEQ ID NO: 113875 - RNA, 22 nt, Human
uugauuugcagaagguguagag

SEQ ID NO: 113876 - RNA, 22 nt, Human
uugauuuguauugcaggccccu

SEQ ID NO: 113877 - RNA, 22 nt, Human
uugcaaaaaccacaauuacuuu

SEQ ID NO: 113878 - RNA, 22 nt, Human
uugcaaaagcaauugcaguuuu

SEQ ID NO: 113879 - RNA, 22 nt, Human
uugcaaaagccgaggcacucca

SEQ ID NO: 113880 - RNA, 23 nt, Human
uugcaaaaugcaauugaguuaga

SEQ ID NO: 113881 - RNA, 22 nt, Human
uugcaaagaauuuuacauucua

SEQ ID NO: 113882 - RNA, 20 nt, Human
uugcaaagugaauagcaauu

SEQ ID NO: 113883 - RNA, 20 nt, Human
uugcaaauaucuauugauug

SEQ ID NO: 113884 - RNA, 22 nt, Human
uugcaaauauguucuccuauuc

SEQ ID NO: 113885 - RNA, 22 nt, Human
uugcaaaucacaagagcagagc

SEQ ID NO: 113886 - RNA, 22 nt, Human
uugcaaauggaggccuggcagc

SEQ ID NO: 113887 - RNA, 22 nt, Human
uugcaaaugguaccaagggucu

SEQ ID NO: 113888 - RNA, 22 nt, Human
uugcaaauguuauacugccagu

SEQ ID NO: 113889 - RNA, 22 nt, Human
uugcaaauucauggaucugaau

SEQ ID NO: 113890 - RNA, 18 nt, Human
uugcaaauucuucccugu

SEQ ID NO: 113891 - RNA, 23 nt, Human
uugcaaauuucaguuaguucaug

SEQ ID NO: 113892 - RNA, 21 nt, Human
uugcaacaaccuauauauuuu

SEQ ID NO: 113893 - RNA, 22 nt, Human
uugcaacauuguaaguuuauau

SEQ ID NO: 113894 - RNA, 22 nt, Human
uugcaacucuugaaaagcauug

SEQ ID NO: 113895 - RNA, 20 nt, Human
uugcaacuguaagaagcagg

SEQ ID NO: 113896 - RNA, 22 nt, Human
uugcaacuucucccaucacucu

SEQ ID NO: 113897 - RNA, 22 nt, Human
uugcaagagagucugaaaaaug

SEQ ID NO: 113898 - RNA, 22 nt, Human
uugcaaggagccacucugccug

SEQ ID NO: 113899 - RNA, 22 nt, Human
uugcaaggucaucaugcauugg

SEQ ID NO: 113900 - RNA, 22 nt, Human
uugcaaucagcaguguuuucac

SEQ ID NO: 113901 - RNA, 22 nt, Human
uugcaaucugcaaagcugugga

SEQ ID NO: 113902 - RNA, 22 nt, Human
uugcaauuaguuacaaaagugg

SEQ ID NO: 113903 - RNA, 22 nt, Human
uugcacaaaaaauuguugaaua

SEQ ID NO: 113904 - RNA, 22 nt, Human
uugcacagggcuggaauguccu

SEQ ID NO: 113905 - RNA, 23 nt, Human
uugcacauuggagcuggucuucu

SEQ ID NO: 113906 - RNA, 22 nt, Human
uugcacccaguaguuuaaauuc

SEQ ID NO: 113907 - RNA, 22 nt, Human
uugcagaauacuuauucuguau

SEQ ID NO: 113908 - RNA, 22 nt, Human
uugcagacauuccagagcuuuu

SEQ ID NO: 113909 - RNA, 22 nt, Human
uugcagacccuuacugcuagag

SEQ ID NO: 113910 - RNA, 22 nt, Human
uugcagagaucagcagguuuga

SEQ ID NO: 113911 - RNA, 22 nt, Human
uugcagagcaguaggaauauag

SEQ ID NO: 113912 - RNA, 22 nt, Human
uugcagcaaggucaugaaaugu

SEQ ID NO: 113913 - RNA, 22 nt, Human
uugcagcagcucuuugaauguu

SEQ ID NO: 113914 - RNA, 22 nt, Human
uugcagcuagaagauucacugu

SEQ ID NO: 113915 - RNA, 22 nt, Human
uugcagcugcuguuccucaugg

SEQ ID NO: 113916 - RNA, 22 nt, Human
uugcagcuguuacugauagaua

SEQ ID NO: 113917 - RNA, 22 nt, Human
uugcagcuucgagucuaucugu

SEQ ID NO: 113918 - RNA, 22 nt, Human
uugcagcuucuaacagcuucag

SEQ ID NO: 113919 - RNA, 22 nt, Human
uugcaggauuuuagagaugaca

SEQ ID NO: 113920 - RNA, 22 nt, Human
uugcagggaaacaguuuaggaa

SEQ ID NO: 113921 - RNA, 22 nt, Human
uugcagggauuaccuuauuuuu

SEQ ID NO: 113922 - RNA, 22 nt, Human
uugcagggcuuggggauuacag

SEQ ID NO: 113923 - RNA, 22 nt, Human
uugcaggguacauucuuagaau

SEQ ID NO: 113924 - RNA, 22 nt, Human
uugcaggguugaccaauaggcu

SEQ ID NO: 113925 - RNA, 22 nt, Human
uugcaguugcuguauuuaagga

SEQ ID NO: 113926 - RNA, 22 nt, Human
uugcaguuuauguuccugcagu

SEQ ID NO: 113927 - RNA, 22 nt, Human
uugcauaaaagaguauaucuua

SEQ ID NO: 113928 - RNA, 22 nt, Human
uugcauaaagauuuuauugcau

SEQ ID NO: 113929 - RNA, 22 nt, Human
uugcauagugcugagguucggg

SEQ ID NO: 113930 - RNA, 22 nt, Human
uugcaucacaguaucucuguaa

SEQ ID NO: 113931 - RNA, 22 nt, Human
uugcaucaguccucaauaaaau

SEQ ID NO: 113932 - RNA, 22 nt, Human
uugcaucauuuccuggccgugu

SEQ ID NO: 113933 - RNA, 22 nt, Human
ugaugagggcaguucuuguugc

SEQ ID NO: 113934 - RNA, 22 nt, Human
ugaugagggggaacagagauuu

SEQ ID NO: 113935 - RNA, 22 nt, Human
ugaugaguaaauaagguugagu

SEQ ID NO: 113936 - RNA, 22 nt, Human
ugaugauugggagacauuuggg

SEQ ID NO: 113937 - RNA, 22 nt, Human
ugaugauuugaaaccaguuucu

SEQ ID NO: 113938 - RNA, 22 nt, Human
ugaugcaauagagagauagaua

SEQ ID NO: 113939 - RNA, 22 nt, Human
ugaugcacaaagucagcauccu

SEQ ID NO: 113940 - RNA, 22 nt, Human
ugaugcaguguccucccaugca

SEQ ID NO: 113941 - RNA, 20 nt, Human
ugaugcuggucugaauugca

SEQ ID NO: 113942 - RNA, 22 nt, Human
ugauggaaaauaaaucuuauuc

SEQ ID NO: 113943 - RNA, 22 nt, Human
ugauggaaauauugacaccaca

SEQ ID NO: 113944 - RNA, 22 nt, Human
ugauggaaauuugggaagcuuu

SEQ ID NO: 113945 - RNA, 22 nt, Human
ugauggaagguuucucggugau

SEQ ID NO: 113946 - RNA, 22 nt, Human
ugauggcucccaugggcauaug

SEQ ID NO: 113947 - RNA, 22 nt, Human
ugauggcuccuucauuaugggu

SEQ ID NO: 113948 - RNA, 22 nt, Human
ugaugggaggugcugcaggacc

SEQ ID NO: 113949 - RNA, 22 nt, Human
ugauggggaauuaauuaauggg

SEQ ID NO: 113950 - RNA, 22 nt, Human
ugauggucaacaauuuugagug

SEQ ID NO: 113951 - RNA, 22 nt, Human
ugauggugggucugaucucaua

SEQ ID NO: 113952 - RNA, 20 nt, Human
ugaugguucuuuccggguug

SEQ ID NO: 113953 - RNA, 22 nt, Human
ugaugucucucuauacucuaac

SEQ ID NO: 113954 - RNA, 22 nt, Human
ugaugucugccaggguccuggg

SEQ ID NO: 113955 - RNA, 22 nt, Human
ugaugugauagaaagguagugg

SEQ ID NO: 113956 - RNA, 22 nt, Human
ugaugugugauucauucucaaa

SEQ ID NO: 113957 - RNA, 22 nt, Human
ugauuaaauuaauuaagaugag

SEQ ID NO: 113958 - RNA, 22 nt, Human
ugauuaaguugcauuuuaauau

SEQ ID NO: 113959 - RNA, 22 nt, Human
ugauuacaacagagucauccau

SEQ ID NO: 113960 - RNA, 23 nt, Human
ugauuacaagggccaaagaaagg

SEQ ID NO: 113961 - RNA, 22 nt, Human
ugauuacacuauuugggaauag

SEQ ID NO: 113962 - RNA, 23 nt, Human
ugauuacaggaaguucaaguguu

SEQ ID NO: 113963 - RNA, 22 nt, Human
ugauuacagucugacagauguu

SEQ ID NO: 113964 - RNA, 22 nt, Human
ugauuagcugaagaauaugcug

SEQ ID NO: 113965 - RNA, 22 nt, Human
ugauuauauuaacuauguuccu

SEQ ID NO: 113966 - RNA, 22 nt, Human
ugauucaagagaguugggguau

SEQ ID NO: 113967 - RNA, 22 nt, Human
ugauucaauaggaauugaguag

SEQ ID NO: 113968 - RNA, 22 nt, Human
ugauucagaccugucagacuuc

SEQ ID NO: 113969 - RNA, 22 nt, Human
ugauucagucucuucaggagaa

SEQ ID NO: 113970 - RNA, 22 nt, Human
ugauuccuaggcacucuucucc

SEQ ID NO: 113971 - RNA, 22 nt, Human
ugauucugaggacccugugacg

SEQ ID NO: 113972 - RNA, 23 nt, Human
ugauucugcuuugagaaucaugg

SEQ ID NO: 113973 - RNA, 20 nt, Human
ugauucuggucuacgcuuua

SEQ ID NO: 113974 - RNA, 22 nt, Human
ugauucuguaagucauauuguu

SEQ ID NO: 113975 - RNA, 22 nt, Human
ugauucugugaauuaguugggu

SEQ ID NO: 113976 - RNA, 22 nt, Human
uugguucagaugggaucugcga

SEQ ID NO: 113977 - RNA, 22 nt, Human
uugguucaguaggcaugccugg

SEQ ID NO: 113978 - RNA, 22 nt, Human
uugguucauuauugaaugugcu

SEQ ID NO: 113979 - RNA, 22 nt, Human
uugguuuacuaggauucaaauu

SEQ ID NO: 113980 - RNA, 22 nt, Human
uugguuuauuucuuccuaugag

SEQ ID NO: 113981 - RNA, 22 nt, Human
uugguuuuaucuuaagauucuu

SEQ ID NO: 113982 - RNA, 22 nt, Human
uugguuuucaggggcaggauaa

SEQ ID NO: 113983 - RNA, 22 nt, Human
uugguuuucauagcuccacucu

SEQ ID NO: 113984 - RNA, 22 nt, Human
uugguuuucuauccucugcaau

SEQ ID NO: 113985 - RNA, 22 nt, Human
uugguuuugggauguacaaagg

SEQ ID NO: 113986 - RNA, 22 nt, Human
uuguaaagcugauuagaaagcc

SEQ ID NO: 113987 - RNA, 22 nt, Human
uuguaaaguucuuaggaagcuc

SEQ ID NO: 113988 - RNA, 22 nt, Human
uuguaaauaguaguaagaugcc

SEQ ID NO: 113989 - RNA, 21 nt, Human
uuguaaauggcuuuuuccuuc

SEQ ID NO: 113990 - RNA, 22 nt, Human
uuguaacaaucugucauaaaug

SEQ ID NO: 113991 - RNA, 22 nt, Human
uuguaacagguacuaaauaacu

SEQ ID NO: 113992 - RNA, 22 nt, Human
uuguaacaguagcugucagcuc

SEQ ID NO: 113993 - RNA, 22 nt, Human
uuguaacaucaccaucaaaauc

SEQ ID NO: 113994 - RNA, 22 nt, Human
uuguaacucugaauacauccua

SEQ ID NO: 113995 - RNA, 22 nt, Human
uuguaacuuugcauacuccugu

SEQ ID NO: 113996 - RNA, 22 nt, Human
uuguaagauggauaggaacagc

SEQ ID NO: 113997 - RNA, 22 nt, Human
uuguacaaaggauuuggaagag

SEQ ID NO: 113998 - RNA, 22 nt, Human
uuguacaaauaggaaccucuga

SEQ ID NO: 113999 - RNA, 22 nt, Human
uuguacagaaaaaauucuuggu

SEQ ID NO: 114000 - RNA, 22 nt, Human
uuguacagacccugaaaagcuc

SEQ ID NO: 114001 - RNA, 22 nt, Human
uuguacagauuuuccucggucu

SEQ ID NO: 114002 - RNA, 23 nt, Human
uuguacagcccagauuccucuuc

SEQ ID NO: 114003 - RNA, 22 nt, Human
uuguacuagaaaggaugucaaa

SEQ ID NO: 114004 - RNA, 22 nt, Human
uuguacuuuugucagguggaca

SEQ ID NO: 114005 - RNA, 22 nt, Human
uuguagaaaauucucuuggaua

SEQ ID NO: 114006 - RNA, 22 nt, Human
uuguagacaucuguaucauuuu

SEQ ID NO: 114007 - RNA, 22 nt, Human
uuguagauggcuuauuucugug

SEQ ID NO: 114008 - RNA, 22 nt, Human
uuguagauuggagaguguguga

SEQ ID NO: 114009 - RNA, 22 nt, Human
uuguagucuaggauagauuuuu

SEQ ID NO: 114010 - RNA, 22 nt, Human
uuguauaagaaguuggcagaua

SEQ ID NO: 114011 - RNA, 22 nt, Human
uuguauacauuauccuguuuca

SEQ ID NO: 114012 - RNA, 22 nt, Human
uuguaucagugccuauaaaaug

SEQ ID NO: 114013 - RNA, 20 nt, Human
uuguaucagugucucccaaa

SEQ ID NO: 114014 - RNA, 23 nt, Human
uuguaucucuggaaauucuucaa

SEQ ID NO: 114015 - RNA, 22 nt, Human
uuguaugaauguauccuaauuu

SEQ ID NO: 114016 - RNA, 22 nt, Human
uuguaugaguaugguguauagg

SEQ ID NO: 114017 - RNA, 22 nt, Human
uuguauuaaaauguguuucugu

SEQ ID NO: 114018 - RNA, 20 nt, Human
uuguauuccuugaaucaggu

SEQ ID NO: 114019 - RNA, 22 nt, Human
uuguauuuauauugaauagcuu

SEQ ID NO: 114020 - RNA, 22 nt, Human
uuguauuucgaugcacguguag

SEQ ID NO: 114021 - RNA, 22 nt, Human
uuguauuucuccacuuucuguu

SEQ ID NO: 114022 - RNA, 23 nt, Human
uuguauuuuuaguagagacaggg

SEQ ID NO: 114023 - RNA, 22 nt, Human
uuguauuuuuuccuggcggugg

SEQ ID NO: 114024 - RNA, 22 nt, Human
uugucaaggcuuuuaauauucu

SEQ ID NO: 114025 - RNA, 22 nt, Human
uugucacauguaguucauucuc

SEQ ID NO: 114026 - RNA, 22 nt, Human
uugucaccuauacugagcuuaa

SEQ ID NO: 114027 - RNA, 22 nt, Human
uuguccaucuguauuucccaug

SEQ ID NO: 114028 - RNA, 22 nt, Human
uuguccauggacagcaccacag

SEQ ID NO: 114029 - RNA, 22 nt, Human
uuguccuaauuuauggccugga

SEQ ID NO: 114030 - RNA, 22 nt, Human
uuguccugaggacuguuaucag

SEQ ID NO: 114031 - RNA, 22 nt, Human
uuguccugauuuugcaacuucu

SEQ ID NO: 114032 - RNA, 22 nt, Human
uuguccugcagguggcugggag

SEQ ID NO: 114033 - RNA, 22 nt, Human
uuguccuggagguuaauagagu

SEQ ID NO: 114034 - RNA, 22 nt, Human
uuguccugugauuucagggccu

SEQ ID NO: 114035 - RNA, 22 nt, Human
uugucgggcuuacgcagggcca

SEQ ID NO: 114036 - RNA, 22 nt, Human
uugucuacuaagaaagacaauu

SEQ ID NO: 114037 - RNA, 22 nt, Human
uugucucugccaugcuugaggg

SEQ ID NO: 114038 - RNA, 22 nt, Human
uugucucuggaaggaaaaagca

SEQ ID NO: 114039 - RNA, 22 nt, Human
uugucugaaucuggagcucucu

SEQ ID NO: 114040 - RNA, 22 nt, Human
uugucugaauucuucuaggcag

SEQ ID NO: 114041 - RNA, 22 nt, Human
uugucugacuucuuuaguuacu

SEQ ID NO: 114042 - RNA, 22 nt, Human
uugucugugaaauggaaauagu

SEQ ID NO: 114043 - RNA, 23 nt, Human
uugucugugcuuuuccaguugcu

SEQ ID NO: 114044 - RNA, 22 nt, Human
uugucuuucccagcuucuagag

SEQ ID NO: 114045 - RNA, 22 nt, Human
uugugaaaucguguuuggaagc

SEQ ID NO: 114046 - RNA, 22 nt, Human
uugugaauagugccgcuauaaa

SEQ ID NO: 114047 - RNA, 22 nt, Human
uugugaauggugccgcaauaaa

SEQ ID NO: 114048 - RNA, 22 nt, Human
uugugagagaaaauguguauau

SEQ ID NO: 114049 - RNA, 22 nt, Human
uugugagcaggcugcacaaacc

SEQ ID NO: 114050 - RNA, 22 nt, Human
uugugagcaugugcagccucug

SEQ ID NO: 114051 - RNA, 19 nt, Human
uugugagcugaagaacagg

SEQ ID NO: 114052 - RNA, 22 nt, Human
uugugcaaggucuggacuauag

SEQ ID NO: 114053 - RNA, 22 nt, Human
uugugcaaugguguuuagguuu

SEQ ID NO: 114054 - RNA, 22 nt, Human
uugugcagagaaaucuuucuug

SEQ ID NO: 114055 - RNA, 22 nt, Human
uugugcagaguugccuuuauuu

SEQ ID NO: 114056 - RNA, 22 nt, Human
uugugccuggcuuguauucaca

SEQ ID NO: 114057 - RNA, 22 nt, Human
uugugcuaagugcuaugaaggc

SEQ ID NO: 114058 - RNA, 22 nt, Human
uugugcucccucccgucuggcc

SEQ ID NO: 114059 - RNA, 22 nt, Human
uugugcuccuaugagaaucuaa

SEQ ID NO: 114060 - RNA, 22 nt, Human
uugugcugagcuucuagcugug

SEQ ID NO: 114061 - RNA, 22 nt, Human
uuguggaagcccuaugagagac

SEQ ID NO: 114062 - RNA, 22 nt, Human
uuguggauucuauuucccagaa

SEQ ID NO: 114063 - RNA, 22 nt, Human
uuguggcaugugagaacuagaa

SEQ ID NO: 114064 - RNA, 22 nt, Human
ugauggaaauauguaaucuggu

SEQ ID NO: 114065 - RNA, 23 nt, Human
ugauggaaaugaucugggucugu

SEQ ID NO: 114066 - RNA, 22 nt, Human
ugauggaauauaccuucgggag

SEQ ID NO: 114067 - RNA, 22 nt, Human
ugauggaauggaggacaugugg

SEQ ID NO: 114068 - RNA, 22 nt, Human
ugauggaggacccagcguggga

SEQ ID NO: 114069 - RNA, 18 nt, Human
ugauggaggagggcuggu

SEQ ID NO: 114070 - RNA, 22 nt, Human
ugauggccagucgcacuggagg

SEQ ID NO: 114071 - RNA, 22 nt, Human
ugauggcuaucccuggaagggc

SEQ ID NO: 114072 - RNA, 22 nt, Human
ugauggcuuaguggcagggcga

SEQ ID NO: 114073 - RNA, 23 nt, Human
ugaugggaaggaacgacuaccac

SEQ ID NO: 114074 - RNA, 22 nt, Human
ugauggucaggaugcauggaga

SEQ ID NO: 114075 - RNA, 22 nt, Human
ugaugugugggcaugcagacag

SEQ ID NO: 114076 - RNA, 22 nt, Human
ugauguucaacaaguacauauu

SEQ ID NO: 114077 - RNA, 22 nt, Human
ugauguucuguauaucauauag

SEQ ID NO: 114078 - RNA, 22 nt, Human
ugauguuuaauacuaugcuuuu

SEQ ID NO: 114079 - RNA, 22 nt, Human
ugauuaaagguggaaggcaggu

SEQ ID NO: 114080 - RNA, 22 nt, Human
ugauuacaguauuugagaucca

SEQ ID NO: 114081 - RNA, 22 nt, Human
ugauuagcuuugaaugugcugc

SEQ ID NO: 114082 - RNA, 22 nt, Human
ugauucaacuuucauaacaaaa

SEQ ID NO: 114083 - RNA, 22 nt, Human
ugauucaagcuacuguuacugg

SEQ ID NO: 114084 - RNA, 22 nt, Human
ugauucacagacuucacaaggc

SEQ ID NO: 114085 - RNA, 22 nt, Human
ugcagggcacggugcgcguggg

SEQ ID NO: 114086 - RNA, 22 nt, Human
ugcagggccagacuggguugga

SEQ ID NO: 114087 - RNA, 22 nt, Human
ugcagggccuugggucuuucuu

SEQ ID NO: 114088 - RNA, 22 nt, Human
ugcagggcuccuggcuccaauc

SEQ ID NO: 114089 - RNA, 20 nt, Human
ugcagggcucugcuucucuc

SEQ ID NO: 114090 - RNA, 20 nt, Human
ugcagggcugccucccagcu

SEQ ID NO: 114091 - RNA, 22 nt, Human
ugcagggcuuccucuuggaguu

SEQ ID NO: 114092 - RNA, 22 nt, Human
ugcaggguagacaggugagguc

SEQ ID NO: 114093 - RNA, 22 nt, Human
ugcagggucucugcaaaugagg

SEQ ID NO: 114094 - RNA, 23 nt, Human
ugcaggguguuccugccuuugcu

SEQ ID NO: 114095 - RNA, 22 nt, Human
ugcagguaaauuuguggaggau

SEQ ID NO: 114096 - RNA, 22 nt, Human
ugcaggucuccauuggcagacu

SEQ ID NO: 114097 - RNA, 22 nt, Human
ugcaggugacaccacucuuccu

SEQ ID NO: 114098 - RNA, 23 nt, Human
ugcaggugauuaauccaguuuca

SEQ ID NO: 114099 - RNA, 22 nt, Human
ugcagguggauucaauguggga

SEQ ID NO: 114100 - RNA, 22 nt, Human
ugcagguggcagcggggcacca

SEQ ID NO: 114101 - RNA, 22 nt, Human
ugcaggugguccauuugggaac

SEQ ID NO: 114102 - RNA, 22 nt, Human
ugcagguguaaauuuucaagag

SEQ ID NO: 114103 - RNA, 22 nt, Human
ugcagguguagaguugggcucc

SEQ ID NO: 114104 - RNA, 22 nt, Human
ugcaggugucuccagggcaggu

SEQ ID NO: 114105 - RNA, 22 nt, Human
ugcaggugucucugucuagcgu

SEQ ID NO: 114106 - RNA, 22 nt, Human
ugcaggugugguuccucagcca

SEQ ID NO: 114107 - RNA, 20 nt, Human
ugcagguguguccaagcacu

SEQ ID NO: 114108 - RNA, 22 nt, Human
ugcagucccuggcccacuuuaa

SEQ ID NO: 114109 - RNA, 22 nt, Human
ugcagucuccaccuccugggug

SEQ ID NO: 114110 - RNA, 22 nt, Human
ugcagucucuaguuucugaaug

SEQ ID NO: 114111 - RNA, 22 nt, Human
ugcagucuggauguccucagau

SEQ ID NO: 114112 - RNA, 22 nt, Human
ugcagugagaagcaguuaugau

SEQ ID NO: 114113 - RNA, 22 nt, Human
ugcagugauuuguacaauuaga

SEQ ID NO: 114114 - RNA, 22 nt, Human
ugcaguggcgccaucucagcuc

SEQ ID NO: 114115 - RNA, 22 nt, Human
ugcagugguguccagguguacu

SEQ ID NO: 114116 - RNA, 22 nt, Human
ugcagugguugagagcccagac

SEQ ID NO: 114117 - RNA, 20 nt, Human
ugcaguguggaagacugaga

SEQ ID NO: 114118 - RNA, 22 nt, Human
ugcaguuagccuaggauugagc

SEQ ID NO: 114119 - RNA, 22 nt, Human
ugcauaacuagaguaauuacag

SEQ ID NO: 114120 - RNA, 22 nt, Human
ugcauacacaagcauacaugua

SEQ ID NO: 114121 - RNA, 22 nt, Human
ugcauacacacaucaaauguuu

SEQ ID NO: 114122 - RNA, 22 nt, Human
ugcauacauaaagugcuaucau

SEQ ID NO: 114123 - RNA, 19 nt, Human
ugcauacauguuaacaugu

SEQ ID NO: 114124 - RNA, 22 nt, Human
ugcauacugaacagcaugcuaa

SEQ ID NO: 114125 - RNA, 22 nt, Human
ugcauagaggauccaguguggu

SEQ ID NO: 114126 - RNA, 22 nt, Human
ugcauagggaaccucaugcauu

SEQ ID NO: 114127 - RNA, 22 nt, Human
ugcauaguucuccuuccuccuc

SEQ ID NO: 114128 - RNA, 22 nt, Human
ugcauaucuucaaugcuguugc

SEQ ID NO: 114129 - RNA, 22 nt, Human
ugcauauuauguguaucugucu

SEQ ID NO: 114130 - RNA, 21 nt, Human
ugcauauucuucugguggcug

SEQ ID NO: 114131 - RNA, 22 nt, Human
ugcauauuuguaugauguuuag

SEQ ID NO: 114132 - RNA, 22 nt, Human
ugcauauuuuauaaagauggaa

SEQ ID NO: 114133 - RNA, 22 nt, Human
ugcaucacuuagcugcacaacu

SEQ ID NO: 114134 - RNA, 22 nt, Human
ugcaucagugacugaauaugag

SEQ ID NO: 114135 - RNA, 22 nt, Human
ugcaucauauaaugucuaugga

SEQ ID NO: 114136 - RNA, 22 nt, Human
ugcaucaugcggaacuggcuuu

SEQ ID NO: 114137 - RNA, 22 nt, Human
ugcauccuagggaaggcacuga

SEQ ID NO: 114138 - RNA, 23 nt, Human
ugcauccucauuuuucacacgag

SEQ ID NO: 114139 - RNA, 22 nt, Human
ugcaucuguaguggaaaccuua

SEQ ID NO: 114140 - RNA, 22 nt, Human
ugcaucuguucauucguuccca

SEQ ID NO: 114141 - RNA, 19 nt, Human
ugcaucuugcaugggugag

SEQ ID NO: 114142 - RNA, 22 nt, Human
ugcaucuuuagucuuaugucug

SEQ ID NO: 114143 - RNA, 22 nt, Human
ugcaucuuucugcauauguaaa

SEQ ID NO: 114144 - RNA, 22 nt, Human
ugcaucuuuuuccaaguuuauu

SEQ ID NO: 114145 - RNA, 22 nt, Human
ugcaugauagagaugguauuag

SEQ ID NO: 114146 - RNA, 22 nt, Human
ugcaugaugguuuagauggggu

SEQ ID NO: 114147 - RNA, 22 nt, Human
ugcaugcaaagugucugcuuug

SEQ ID NO: 114148 - RNA, 22 nt, Human
ugcaugcaaugugaagaaagcu

SEQ ID NO: 114149 - RNA, 22 nt, Human
ugcaugcagcuggucgggcgcc

SEQ ID NO: 114150 - RNA, 22 nt, Human
ugcaugcaugugagcaugcaua

SEQ ID NO: 114151 - RNA, 22 nt, Human
ugcaugcauguuuuuacccaca

SEQ ID NO: 114152 - RNA, 17 nt, Human
ugcaugcgucugugaua

SEQ ID NO: 114153 - RNA, 22 nt, Human
ugcaugcguuaguuggcguguu

SEQ ID NO: 114154 - RNA, 22 nt, Human
ugcaugcucaaguuaguuguga

SEQ ID NO: 114155 - RNA, 22 nt, Human
ugcaugcugcacacaugcguag

SEQ ID NO: 114156 - RNA, 22 nt, Human
ugcauggaggauaauaauugag

SEQ ID NO: 114157 - RNA, 22 nt, Human
ugcauggaguaauugaugcuug

SEQ ID NO: 114158 - RNA, 20 nt, Human
ugcauggcgcacaucugugg

SEQ ID NO: 114159 - RNA, 22 nt, Human
ugcauguggaccccuggugccu

SEQ ID NO: 114160 - RNA, 22 nt, Human
ugcauguggaucauauguccua

SEQ ID NO: 114161 - RNA, 22 nt, Human
ugcauguguguguauuuauaaa

SEQ ID NO: 114162 - RNA, 22 nt, Human
ugcauguguguuaagaugcuuu

SEQ ID NO: 114163 - RNA, 22 nt, Human
ugcauguuauagaauuuuaacu

SEQ ID NO: 114164 - RNA, 22 nt, Human
ugcauguuauuguggcaagaau

SEQ ID NO: 114165 - RNA, 22 nt, Human
ugcauguuuguagguucuucua

SEQ ID NO: 114166 - RNA, 22 nt, Human
ugcauguuugugucugagaacu

SEQ ID NO: 114167 - RNA, 20 nt, Human
ugcauuaaguggcauugagc

SEQ ID NO: 114168 - RNA, 22 nt, Human
ugcauuauacuuuuagaaauuu

SEQ ID NO: 114169 - RNA, 22 nt, Human
ugcauuaucaucuggaagcuug

SEQ ID NO: 114170 - RNA, 23 nt, Human
ugcauuauccucucugaagacca

SEQ ID NO: 114171 - RNA, 22 nt, Human
ugcauuaucuuuaauguucuca

SEQ ID NO: 114172 - RNA, 22 nt, Human
ugcauuaugcuacccagaagcu

SEQ ID NO: 114173 - RNA, 22 nt, Human
ugcauuaugcuugugcuguaua

SEQ ID NO: 114174 - RNA, 22 nt, Human
ugcauuauugaaggcccugugg

SEQ ID NO: 114175 - RNA, 22 nt, Human
ugcauuauuugcaugugccugu

SEQ ID NO: 114176 - RNA, 22 nt, Human
ugcauuccacagaagggaaaac

SEQ ID NO: 114177 - RNA, 22 nt, Human
ugcauuccacauaaagcgauaa

SEQ ID NO: 114178 - RNA, 23 nt, Human
ugcauuccucacagggcagaaga

SEQ ID NO: 114179 - RNA, 22 nt, Human
uggagcaugagagucuuuagcu

SEQ ID NO: 114180 - RNA, 22 nt, Human
uggagcauucagguuucccuuu

SEQ ID NO: 114181 - RNA, 22 nt, Human
uggagccaagagucaaggggag

SEQ ID NO: 114182 - RNA, 20 nt, Human
uggagccaaggugugucugg

SEQ ID NO: 114183 - RNA, 20 nt, Human
uggagccacagucagguucc

SEQ ID NO: 114184 - RNA, 22 nt, Human
uggagccagaagagccaguuca

SEQ ID NO: 114185 - RNA, 22 nt, Human
uggagccagagcgcagccuggg

SEQ ID NO: 114186 - RNA, 22 nt, Human
uggagccagcccaggccccucu

SEQ ID NO: 114187 - RNA, 22 nt, Human
uggagcccaggagaggauaaac

SEQ ID NO: 114188 - RNA, 22 nt, Human
uggagccuuuuguucugggaca

SEQ ID NO: 114189 - RNA, 22 nt, Human
uggagcucaaaggccuguggga

SEQ ID NO: 114190 - RNA, 21 nt, Human
uggagcucccugcaucccacu

SEQ ID NO: 114191 - RNA, 23 nt, Human
uggagcuccugcccauccuggcu

SEQ ID NO: 114192 - RNA, 21 nt, Human
uggagcugaauuuuuggcauc

SEQ ID NO: 114193 - RNA, 22 nt, Human
uggagcugagagccaggcuggc

SEQ ID NO: 114194 - RNA, 22 nt, Human
uuguguuucuggccaagaugga

SEQ ID NO: 114195 - RNA, 22 nt, Human
uuguguuucugugauauguaaa

SEQ ID NO: 114196 - RNA, 22 nt, Human
uuguuaaaacuccauugguuug

SEQ ID NO: 114197 - RNA, 22 nt, Human
uuguuaaaauauuggagaaagg

SEQ ID NO: 114198 - RNA, 22 nt, Human
uuguuaaauggaugcagaauaa

SEQ ID NO: 114199 - RNA, 23 nt, Human
uuguuaacuuuccugccccuaca

SEQ ID NO: 114200 - RNA, 22 nt, Human
uuguuacaucuuauguaagugg

SEQ ID NO: 114201 - RNA, 21 nt, Human
uuguuacauucuuauggcaua

SEQ ID NO: 114202 - RNA, 22 nt, Human
uuguuacuugcauguagacuaa

SEQ ID NO: 114203 - RNA, 20 nt, Human
uuguuagaggaaugccauag

SEQ ID NO: 114204 - RNA, 22 nt, Human
uuguuagcaugcuuaauggaua

SEQ ID NO: 114205 - RNA, 22 nt, Human
uuguucaggccugggacaguuu

SEQ ID NO: 114206 - RNA, 22 nt, Human
uuguucuuacuuaagagugaau

SEQ ID NO: 114207 - RNA, 22 nt, Human
uuguucuuaguaugcauuguuu

SEQ ID NO: 114208 - RNA, 22 nt, Human
uuguugaauggauaaauaaauu

SEQ ID NO: 114209 - RNA, 22 nt, Human
uuguugaauuaguugacugugu

SEQ ID NO: 114210 - RNA, 22 nt, Human
uuguugcaaggguuaaaugaga

SEQ ID NO: 114211 - RNA, 22 nt, Human
uuguugcucuuguugccacaug

SEQ ID NO: 114212 - RNA, 22 nt, Human
uuguuggugaauaggguggaau

SEQ ID NO: 114213 - RNA, 22 nt, Human
uuguuguuauaggugguacaag

SEQ ID NO: 114214 - RNA, 22 nt, Human
uuguuguuggagccaauaugca

SEQ ID NO: 114215 - RNA, 20 nt, Human
uuguuuauuauguucugauc

SEQ ID NO: 114216 - RNA, 22 nt, Human
uuguuucagcccagaucuuuac

SEQ ID NO: 114217 - RNA, 22 nt, Human
uuguuucagcuguaugcuaugu

SEQ ID NO: 114218 - RNA, 22 nt, Human
uuguuucaggaugguuuguuac

SEQ ID NO: 114219 - RNA, 22 nt, Human
uuguuucauggggauguuuauu

SEQ ID NO: 114220 - RNA, 21 nt, Human
uuguuucccagagcucgcucc

SEQ ID NO: 114221 - RNA, 20 nt, Human
uuguuuccuggcuguucugc

SEQ ID NO: 114222 - RNA, 22 nt, Human
uuguuuccuuucuauacaggau

SEQ ID NO: 114223 - RNA, 17 nt, Human
uuguuucuucucugugg

SEQ ID NO: 114224 - RNA, 22 nt, Human
uuguuugaggucacugauauuu

SEQ ID NO: 114225 - RNA, 22 nt, Human
uuguuuguaaggcucuuagaau

SEQ ID NO: 114226 - RNA, 22 nt, Human
uuguuuguaugcugagaagaau

SEQ ID NO: 114227 - RNA, 22 nt, Human
uuguuuuaaccuaguguuuaug

SEQ ID NO: 114228 - RNA, 22 nt, Human
uuguuuuaacgacucagcuugu

SEQ ID NO: 114229 - RNA, 22 nt, Human
uuguuuucuccacugcaucuua

SEQ ID NO: 114230 - RNA, 22 nt, Human
uuguuuuggaagaacuuacucu

SEQ ID NO: 114231 - RNA, 22 nt, Human
uuguuuuugugaggcagcccau

SEQ ID NO: 114232 - RNA, 22 nt, Human
uuuaaaccuaucuaagaaauag

SEQ ID NO: 114233 - RNA, 22 nt, Human
uuuaaaccuccugauucagcua

SEQ ID NO: 114234 - RNA, 22 nt, Human
uuuaaagaaauuccucaucuuu

SEQ ID NO: 114235 - RNA, 22 nt, Human
uuuaaagugcugcuccuauccu

SEQ ID NO: 114236 - RNA, 22 nt, Human
uuuaaagugguccauuucagaa

SEQ ID NO: 114237 - RNA, 22 nt, Human
uuuaaaugcuuuaagcaagggu

SEQ ID NO: 114238 - RNA, 22 nt, Human
uuuaaauguguucuuaguagcu

SEQ ID NO: 114239 - RNA, 22 nt, Human
uuuaaauguuuaaaacucguga

SEQ ID NO: 114240 - RNA, 22 nt, Human
uuuaaauuuguguuuagagggu

SEQ ID NO: 114241 - RNA, 22 nt, Human
uuuaacagaugaggaggugagg

SEQ ID NO: 114242 - RNA, 22 nt, Human
uuuaacagguaaaguaaaugug

SEQ ID NO: 114243 - RNA, 22 nt, Human
uuuaacaugugaauuuuggaag

SEQ ID NO: 114244 - RNA, 23 nt, Human
uuuaacauuugaacauguggcca

SEQ ID NO: 114245 - RNA, 22 nt, Human
uuuaaccugucaauuugcaugc

SEQ ID NO: 114246 - RNA, 23 nt, Human
uuuaaccuuggucaagaauuucc

SEQ ID NO: 114247 - RNA, 22 nt, Human
uuuaacuuaaucugcuugauga

SEQ ID NO: 114248 - RNA, 22 nt, Human
uuuaacuugaucaguagagcau

SEQ ID NO: 114249 - RNA, 20 nt, Human
uuuaagaaguuucugaggaa

SEQ ID NO: 114250 - RNA, 22 nt, Human
uuuaagaguuaaacuuugaccu

SEQ ID NO: 114251 - RNA, 22 nt, Human
uuuaagaucuaucccauuuugu

SEQ ID NO: 114252 - RNA, 22 nt, Human
uuuaagauucaguaaggcaaac

SEQ ID NO: 114253 - RNA, 22 nt, Human
uuuaagcacagggauaaaguua

SEQ ID NO: 114254 - RNA, 19 nt, Human
uuuaagcauagaggccaga

SEQ ID NO: 114255 - RNA, 22 nt, Human
uuuaaggagcuacucaccguca

SEQ ID NO: 114256 - RNA, 22 nt, Human
uuuaaggaugaugugauauaua

SEQ ID NO: 114257 - RNA, 22 nt, Human
uuuaaggauguaaaggaagaag

SEQ ID NO: 114258 - RNA, 22 nt, Human
uuuaaggcagugaaacuauucu

SEQ ID NO: 114259 - RNA, 22 nt, Human
uuuaagguacagcuagcagcau

SEQ ID NO: 114260 - RNA, 22 nt, Human
uuuaagugaaauguaauacagu

SEQ ID NO: 114261 - RNA, 22 nt, Human
uuuaauauccaguggauacaaa

SEQ ID NO: 114262 - RNA, 22 nt, Human
uuuaauaucucacacuuccaug

SEQ ID NO: 114263 - RNA, 22 nt, Human
uuuaaucucccacucucagccu

SEQ ID NO: 114264 - RNA, 23 nt, Human
uuuaaugaccaauagaaggaaca

SEQ ID NO: 114265 - RNA, 22 nt, Human
uuuaaugaggucucucgcuggc

SEQ ID NO: 114266 - RNA, 22 nt, Human
uuuaauguauucuuuggaacca

SEQ ID NO: 114267 - RNA, 22 nt, Human
uuuaaugugagucccuuucaag

SEQ ID NO: 114268 - RNA, 22 nt, Human
uuuaauuauaucugggcaguua

SEQ ID NO: 114269 - RNA, 22 nt, Human
uuuaauucuggcauaauagcuc

SEQ ID NO: 114270 - RNA, 22 nt, Human
uuuaauuuuccugguaggccug

SEQ ID NO: 114271 - RNA, 22 nt, Human
uuuacaacauaggccccaagaa

SEQ ID NO: 114272 - RNA, 22 nt, Human
uuuacaaggaucaagggaucuc

SEQ ID NO: 114273 - RNA, 22 nt, Human
uuuacaaguuuacagaaugaug

SEQ ID NO: 114274 - RNA, 22 nt, Human
uuuacacugacagcacauaagg

SEQ ID NO: 114275 - RNA, 22 nt, Human
uuuacacugccauucugaauac

SEQ ID NO: 114276 - RNA, 22 nt, Human
uuuacacuuuccugggaacauc

SEQ ID NO: 114277 - RNA, 22 nt, Human
uuuacagaaugucaauuucuau

SEQ ID NO: 114278 - RNA, 22 nt, Human
uuuacagacaacuuaauagggg

SEQ ID NO: 114279 - RNA, 22 nt, Human
uuuacagagaauguacauaaag

SEQ ID NO: 114280 - RNA, 22 nt, Human
uuuacagagagagaacuggacu

SEQ ID NO: 114281 - RNA, 22 nt, Human
uuuacagauucuggguauuagg

SEQ ID NO: 114282 - RNA, 22 nt, Human
uuuacagcacugaagccagggg

SEQ ID NO: 114283 - RNA, 22 nt, Human
uuuacagcuagacauaccugag

SEQ ID NO: 114284 - RNA, 22 nt, Human
uuuacagcugcuggcaagcuug

SEQ ID NO: 114285 - RNA, 22 nt, Human
uuuacaggauuacccuggcugc

SEQ ID NO: 114286 - RNA, 19 nt, Human
uuuacagggaauggagacc

SEQ ID NO: 114287 - RNA, 22 nt, Human
uuuacagucuauguugaauuaa

SEQ ID NO: 114288 - RNA, 22 nt, Human
uuuacagucugucuagcaaugu

SEQ ID NO: 114289 - RNA, 22 nt, Human
uuuacagugucuuguugacugu

SEQ ID NO: 114290 - RNA, 22 nt, Human
uuuacauagugcuuucccacua

SEQ ID NO: 114291 - RNA, 22 nt, Human
uuuacaugaguagcagauguuc

SEQ ID NO: 114292 - RNA, 22 nt, Human
ugcacaguaaacaugacuggag

SEQ ID NO: 114293 - RNA, 22 nt, Human
ugcacaguucgccuucuccaag

SEQ ID NO: 114294 - RNA, 22 nt, Human
ugcacaucuuucagcaucauac

SEQ ID NO: 114295 - RNA, 22 nt, Human
ugcacauggccugagugccuga

SEQ ID NO: 114296 - RNA, 22 nt, Human
ugcacauuuguuauuuugaggu

SEQ ID NO: 114297 - RNA, 22 nt, Human
ugcaccaguuucucagagaauc

SEQ ID NO: 114298 - RNA, 22 nt, Human
ugcaccauuaauuuaugugaga

SEQ ID NO: 114299 - RNA, 22 nt, Human
ugcacccacuuagcugaaguuc

SEQ ID NO: 114300 - RNA, 22 nt, Human
ugcacccauagcacacacuccu

SEQ ID NO: 114301 - RNA, 22 nt, Human
ugcacccaugucuccacguaca

SEQ ID NO: 114302 - RNA, 22 nt, Human
ugcacccucaucagucaaaugg

SEQ ID NO: 114303 - RNA, 22 nt, Human
uuuaccuggauucuuacuuccu

SEQ ID NO: 114304 - RNA, 22 nt, Human
uuuacgacugcuaaaugccugc

SEQ ID NO: 114305 - RNA, 22 nt, Human
uuuacgagugcuaaugauauug

SEQ ID NO: 114306 - RNA, 22 nt, Human
uuuacuaacaccauacaugcug

SEQ ID NO: 114307 - RNA, 22 nt, Human
uuuacucaaguaugcauuuaug

SEQ ID NO: 114308 - RNA, 22 nt, Human
uuuacugucucagagagacaaa

SEQ ID NO: 114309 - RNA, 22 nt, Human
uuuacugugcauuagaaucacc

SEQ ID NO: 114310 - RNA, 22 nt, Human
uuuagaaauucaucuauggccu

SEQ ID NO: 114311 - RNA, 17 nt, Human
uuuagaauacaauguuu

SEQ ID NO: 114312 - RNA, 22 nt, Human
uuuagacagaugugaggugggu

SEQ ID NO: 114313 - RNA, 22 nt, Human
uuuagacagcaucuggugacuu

SEQ ID NO: 114314 - RNA, 22 nt, Human
uuuagagagcacuguagacacu

SEQ ID NO: 114315 - RNA, 22 nt, Human
uuuagagaggcucuguaaaaug

SEQ ID NO: 114316 - RNA, 22 nt, Human
uuuagagcccaugugaguguga

SEQ ID NO: 114317 - RNA, 22 nt, Human
uuuagagcugugcugccacaug

SEQ ID NO: 114318 - RNA, 22 nt, Human
uuuagaggaauugggagaacgu

SEQ ID NO: 114319 - RNA, 21 nt, Human
uuuagaggacacagggaggca

SEQ ID NO: 114320 - RNA, 22 nt, Human
uuuagaggaggaagaaauuuug

SEQ ID NO: 114321 - RNA, 22 nt, Human
uuuagaggucuguuucacauca

SEQ ID NO: 114322 - RNA, 22 nt, Human
uuuagagucauuuuauauugac

SEQ ID NO: 114323 - RNA, 22 nt, Human
uuuagauaaugcucaagcaauu

SEQ ID NO: 114324 - RNA, 22 nt, Human
uuuagcaaaaaagcucugcgua

SEQ ID NO: 114325 - RNA, 20 nt, Human
uuuagcaaaagggacugcuc

SEQ ID NO: 114326 - RNA, 22 nt, Human
uuuagcaaagguaggguucaga

SEQ ID NO: 114327 - RNA, 21 nt, Human
uuuagcaagaguauagugcau

SEQ ID NO: 114328 - RNA, 22 nt, Human
uuuagcaauaucauaaggaaga

SEQ ID NO: 114329 - RNA, 22 nt, Human
uuuagcacgguaacacauaaag

SEQ ID NO: 114330 - RNA, 22 nt, Human
uuuagcagaaacucauuaaauu

SEQ ID NO: 114331 - RNA, 22 nt, Human
uuuagcagagcauaugauaucc

SEQ ID NO: 114332 - RNA, 22 nt, Human
uuuagcagugaagugaagugaa

SEQ ID NO: 114333 - RNA, 22 nt, Human
uuuagcaucgaaguaaauuuag

SEQ ID NO: 114334 - RNA, 22 nt, Human
uuuagccaaucagcuugggagc

SEQ ID NO: 114335 - RNA, 22 nt, Human
uuuagcuaagacauagauucuu

SEQ ID NO: 114336 - RNA, 23 nt, Human
uuuagcuuauaaaugcuuuugaa

SEQ ID NO: 114337 - RNA, 22 nt, Human
uuuagcuuuaccucauagauuu

SEQ ID NO: 114338 - RNA, 22 nt, Human
uuuaggaaauacuguccuauga

SEQ ID NO: 114339 - RNA, 21 nt, Human
uuuaggaaguuuaaggcaggu

SEQ ID NO: 114340 - RNA, 22 nt, Human
uuuaggaauauuuucuuucagg

SEQ ID NO: 114341 - RNA, 19 nt, Human
uuuaggauaaagucuggac

SEQ ID NO: 114342 - RNA, 22 nt, Human
uuuaggauauuaauguucagag

SEQ ID NO: 114343 - RNA, 22 nt, Human
uuuaggaucaaugagaaagucu

SEQ ID NO: 114344 - RNA, 22 nt, Human
uuuaggaucucucuuguuacau

SEQ ID NO: 114345 - RNA, 22 nt, Human
uuuaggcaaacucauugucaga

SEQ ID NO: 114346 - RNA, 22 nt, Human
uuuaggcaaauuucagaugugc

SEQ ID NO: 114347 - RNA, 22 nt, Human
uuuaggcacaacuacucagcua

SEQ ID NO: 114348 - RNA, 22 nt, Human
uuuaggcacagggaguugguuu

SEQ ID NO: 114349 - RNA, 22 nt, Human
uuuaggcagaagcccugcugau

SEQ ID NO: 114350 - RNA, 22 nt, Human
uuuaggcagcacgggcagcccu

SEQ ID NO: 114351 - RNA, 22 nt, Human
uuuaggcaugcaguucuauuua

SEQ ID NO: 114352 - RNA, 20 nt, Human
uuuaggcauuacucuuuugu

SEQ ID NO: 114353 - RNA, 22 nt, Human
uuuagggaagaagcccauggcc

SEQ ID NO: 114354 - RNA, 21 nt, Human
uuuagggaggauauuuaacuu

SEQ ID NO: 114355 - RNA, 22 nt, Human
uuuagggaugucagaacaggga

SEQ ID NO: 114356 - RNA, 22 nt, Human
uuuagggugauguaugugcagc

SEQ ID NO: 114357 - RNA, 22 nt, Human
uuuaguagaaauauuugggccu

SEQ ID NO: 114358 - RNA, 22 nt, Human
uuuaguagugacagauucuggg

SEQ ID NO: 114359 - RNA, 22 nt, Human
uuuaguauauaaaaagagaagu

SEQ ID NO: 114360 - RNA, 22 nt, Human
uuuaguauucucuauuuccauc

SEQ ID NO: 114361 - RNA, 22 nt, Human
uuuagucagguaagaugcaggg

SEQ ID NO: 114362 - RNA, 22 nt, Human
uuuagugauucauuuagaaaaa

SEQ ID NO: 114363 - RNA, 22 nt, Human
uuuagugccugguuuccuucuu

SEQ ID NO: 114364 - RNA, 22 nt, Human
uuuaguguaauucugccuuuug

SEQ ID NO: 114365 - RNA, 22 nt, Human
uuuaguguggcacugauguuca

SEQ ID NO: 114366 - RNA, 22 nt, Human
uuuaguuauuguuacaguauga

SEQ ID NO: 114367 - RNA, 22 nt, Human
uuuaguucucccagucuugauu

SEQ ID NO: 114368 - RNA, 22 nt, Human
uuuaguuugauguucuacuccu

SEQ ID NO: 114369 - RNA, 22 nt, Human
uuuaguuuugaugaaaaugcca

SEQ ID NO: 114370 - RNA, 22 nt, Human
uuuauaaccaaguucugcuugu

SEQ ID NO: 114371 - RNA, 22 nt, Human
uuuauaccucauucuuagcaaa

SEQ ID NO: 114372 - RNA, 22 nt, Human
uuuauagcugugagaccuuggg

SEQ ID NO: 114373 - RNA, 20 nt, Human
uuuauagugaucaauuuaua

SEQ ID NO: 114374 - RNA, 22 nt, Human
uuuauauauggcuggucuggau

SEQ ID NO: 114375 - RNA, 22 nt, Human
uuuauaucuggaguugcuagga

SEQ ID NO: 114376 - RNA, 22 nt, Human
uuuauaucuuaugucauuucaa

SEQ ID NO: 114377 - RNA, 22 nt, Human
uuuauauuaccuggaauagcuu

SEQ ID NO: 114378 - RNA, 22 nt, Human
uuuauauuucccaggauuggcc

SEQ ID NO: 114379 - RNA, 22 nt, Human
uuuaucaaacaaauuauccagc

SEQ ID NO: 114380 - RNA, 22 nt, Human
uuuaucagagauauguguggac

SEQ ID NO: 114381 - RNA, 22 nt, Human
uuuauccagaaucaggauuuuu

SEQ ID NO: 114382 - RNA, 22 nt, Human
uuuauccaugcucccguugaug

SEQ ID NO: 114383 - RNA, 22 nt, Human
uuuaucucuuuugaccaagauu

SEQ ID NO: 114384 - RNA, 22 nt, Human
uuuaucugaaaaaacucuugga

SEQ ID NO: 114385 - RNA, 22 nt, Human
uuuaucugaggaaagcagacaa

SEQ ID NO: 114386 - RNA, 22 nt, Human
uuuaucugcauucugaccaucu

SEQ ID NO: 114387 - RNA, 22 nt, Human
uuuaucugggauuuugcagucu

SEQ ID NO: 114388 - RNA, 22 nt, Human
uuuaucugucauuucccauauc

SEQ ID NO: 114389 - RNA, 22 nt, Human
uuuaucuguccuuugccaguga

SEQ ID NO: 114390 - RNA, 20 nt, Human
uuuaucugugggaguggaga

SEQ ID NO: 114391 - RNA, 22 nt, Human
uuuaucugugguaaauaacauu

SEQ ID NO: 114392 - RNA, 22 nt, Human
uuuaucuguuccucuuggaggc

SEQ ID NO: 114393 - RNA, 22 nt, Human
uuuaucuucugcaguucuggcu

SEQ ID NO: 114394 - RNA, 22 nt, Human
uuuaucuuuggaucuucagaaa

SEQ ID NO: 114395 - RNA, 22 nt, Human
uuuaugaacuacagauauaacu

SEQ ID NO: 114396 - RNA, 22 nt, Human
uuuaugacaagcauuacugauu

SEQ ID NO: 114397 - RNA, 22 nt, Human
uuuaugcacaauuagucuuaua

SEQ ID NO: 114398 - RNA, 21 nt, Human
uuuaugcagauaaugcuauuu

SEQ ID NO: 114399 - RNA, 22 nt, Human
uuuauguaaguggaaugaugcc

SEQ ID NO: 114400 - RNA, 22 nt, Human
uuuauguaauuucauaggugug

SEQ ID NO: 114401 - RNA, 22 nt, Human
uuuauguuauggguaggaucaa

SEQ ID NO: 114402 - RNA, 22 nt, Human
uuuauguuccucuugagcuuuc

SEQ ID NO: 114403 - RNA, 22 nt, Human
uuuauuacaccagguuaacuca

SEQ ID NO: 114404 - RNA, 22 nt, Human
uuuauuagauuaucaaagaggu

SEQ ID NO: 114405 - RNA, 22 nt, Human
uuuauuauagugguggggacug

SEQ ID NO: 114406 - RNA, 22 nt, Human
uuuauucaagaugagguucaug

SEQ ID NO: 114407 - RNA, 22 nt, Human
ugcccuggaaaugagaggugug

SEQ ID NO: 114408 - RNA, 22 nt, Human
ugcccuggagucaguggcuauu

SEQ ID NO: 114409 - RNA, 22 nt, Human
ugcccugggaacacagaugcca

SEQ ID NO: 114410 - RNA, 22 nt, Human
ugcccugggaguuggagcugcu

SEQ ID NO: 114411 - RNA, 20 nt, Human
ugcccuguggaggggaaagg

SEQ ID NO: 114412 - RNA, 22 nt, Human
ugcagggcagauaugacuguag

SEQ ID NO: 114413 - RNA, 22 nt, Human
ugcagggcagcuagggagcuuu

SEQ ID NO: 114414 - RNA, 22 nt, Human
ugcagggcccucauuccugucc

SEQ ID NO: 114415 - RNA, 22 nt, Human
ugcagggcccuugggguugaac

SEQ ID NO: 114416 - RNA, 22 nt, Human
ugcagggccgcuggaggucaug

SEQ ID NO: 114417 - RNA, 22 nt, Human
ugcagggccuucuagaccaugg

SEQ ID NO: 114418 - RNA, 22 nt, Human
ugcagggcuaagucagagccug

SEQ ID NO: 114419 - RNA, 22 nt, Human
ugcaggggcuugucugggccug

SEQ ID NO: 114420 - RNA, 22 nt, Human
ugcaggguauccuugucucugc

SEQ ID NO: 114421 - RNA, 22 nt, Human
ugcagggucccgaagggaagac

SEQ ID NO: 114422 - RNA, 22 nt, Human
ugcaggguggagcggaagcgga

SEQ ID NO: 114423 - RNA, 22 nt, Human
ugcagguacuugacaacuuggg

SEQ ID NO: 114424 - RNA, 22 nt, Human
ugcagguaggccugacuuccag

SEQ ID NO: 114425 - RNA, 22 nt, Human
ugcaggucauguggcgggacug

SEQ ID NO: 114426 - RNA, 22 nt, Human
ugcaggucuauuuaaaugauug

SEQ ID NO: 114427 - RNA, 22 nt, Human
ugcaggugaaaauuaugaggau

SEQ ID NO: 114428 - RNA, 22 nt, Human
ugcaggugcagcgauacuguga

SEQ ID NO: 114429 - RNA, 22 nt, Human
ugcaggugccaucgcugcucau

SEQ ID NO: 114430 - RNA, 22 nt, Human
ugcaggugccucuugagcuugu

SEQ ID NO: 114431 - RNA, 22 nt, Human
ugcaggugcuacaagaacucac

SEQ ID NO: 114432 - RNA, 22 nt, Human
ugcaggugcugauaccuacucc

SEQ ID NO: 114433 - RNA, 22 nt, Human
ugcaggugcugugucaagagag

SEQ ID NO: 114434 - RNA, 22 nt, Human
ugcagguggacacgggagacgg

SEQ ID NO: 114435 - RNA, 22 nt, Human
ugcagguggccaucuucguucu

SEQ ID NO: 114436 - RNA, 22 nt, Human
ugcaggugguccuuccucugcu

SEQ ID NO: 114437 - RNA, 22 nt, Human
ugcaggugucugggggcaacag

SEQ ID NO: 114438 - RNA, 20 nt, Human
ugcagguguuggagaaggua

SEQ ID NO: 114439 - RNA, 22 nt, Human
ugcagguucugaccagccaacu

SEQ ID NO: 114440 - RNA, 23 nt, Human
ugcaguaggauggggcugggccu

SEQ ID NO: 114441 - RNA, 21 nt, Human
ugcaguauguauuuguaucca

SEQ ID NO: 114442 - RNA, 22 nt, Human
ugcagucuguacauuuuaagaa

SEQ ID NO: 114443 - RNA, 22 nt, Human
ugcagucuuccagcugcacaaa

SEQ ID NO: 114444 - RNA, 22 nt, Human
ugcagucuuuccucgaguuugu

SEQ ID NO: 114445 - RNA, 21 nt, Human
ugcagugaggggagcugucag

SEQ ID NO: 114446 - RNA, 22 nt, Human
ugcaguggugguaaagaugcuc

SEQ ID NO: 114447 - RNA, 20 nt, Human
ugcaguguccucacuuguca

SEQ ID NO: 114448 - RNA, 22 nt, Human
ugcaguguuccuguggguuuau

SEQ ID NO: 114449 - RNA, 23 nt, Human
ugcaguguuuaacaaugacuuga

SEQ ID NO: 114450 - RNA, 22 nt, Human
ugcaguguuuuucagggcauau

SEQ ID NO: 114451 - RNA, 22 nt, Human
ugcaguucaagguuguacagcu

SEQ ID NO: 114452 - RNA, 21 nt, Human
ugcaguucaagucaaucuacu

SEQ ID NO: 114453 - RNA, 22 nt, Human
ugcaguucuaaguagacaaguc

SEQ ID NO: 114454 - RNA, 22 nt, Human
ugcaguuuaaacuuggcaacuu

SEQ ID NO: 114455 - RNA, 22 nt, Human
ugcaguuuccuuucuagucuuu

SEQ ID NO: 114456 - RNA, 22 nt, Human
ugcaguuugcccuuugcucacu

SEQ ID NO: 114457 - RNA, 20 nt, Human
ugcaguuugucaagguuccu

SEQ ID NO: 114458 - RNA, 22 nt, Human
ugcaguuuucaaaaguuuacag

SEQ ID NO: 114459 - RNA, 21 nt, Human
ugcaguuuugcuugaucucug

SEQ ID NO: 114460 - RNA, 22 nt, Human
ugcauaaaaaccacauacaagg

SEQ ID NO: 114461 - RNA, 22 nt, Human
ugcauaaaacaugauuucugcu

SEQ ID NO: 114462 - RNA, 22 nt, Human
ugcauaaacagauacuucaugu

SEQ ID NO: 114463 - RNA, 21 nt, Human
ugcauaaagaaauacaaauac

SEQ ID NO: 114464 - RNA, 19 nt, Human
ugcauaaauuauauacuuu

SEQ ID NO: 114465 - RNA, 22 nt, Human
ugcauacacacauagguauggg

SEQ ID NO: 114466 - RNA, 22 nt, Human
ugcauacauguuuguguauuuu

SEQ ID NO: 114467 - RNA, 22 nt, Human
ugcauacugaaucugccaucac

SEQ ID NO: 114468 - RNA, 22 nt, Human
ugcauaggguucaaaggcugua

SEQ ID NO: 114469 - RNA, 21 nt, Human
ugcauauauaagugcauacac

SEQ ID NO: 114470 - RNA, 22 nt, Human
ugcauauaucuuauuuuucugu

SEQ ID NO: 114471 - RNA, 22 nt, Human
ugcauauauuugagauuauggc

SEQ ID NO: 114472 - RNA, 22 nt, Human
ugcauauccacaccuuaucucu

SEQ ID NO: 114473 - RNA, 22 nt, Human
ugcauauucuccuuuauuuugu

SEQ ID NO: 114474 - RNA, 22 nt, Human
ugcauauuugauugagauaccu

SEQ ID NO: 114475 - RNA, 22 nt, Human
ugcaucaagaagucuaaguuug

SEQ ID NO: 114476 - RNA, 22 nt, Human
ugcaucagaguuugcugcugcu

SEQ ID NO: 114477 - RNA, 22 nt, Human
ugcaucagcugugcuucuugac

SEQ ID NO: 114478 - RNA, 18 nt, Human
ugcaucauuuauggguca

SEQ ID NO: 114479 - RNA, 22 nt, Human
ugcauccuuaaccagcaucacu

SEQ ID NO: 114480 - RNA, 22 nt, Human
ugcauccuuccauggguuucaa

SEQ ID NO: 114481 - RNA, 22 nt, Human
ugcauccuucccauuuaaacca

SEQ ID NO: 114482 - RNA, 22 nt, Human
ugcaucuaaguggcuaacaacc

SEQ ID NO: 114483 - RNA, 22 nt, Human
ugcaugagcgaauguguccugu

SEQ ID NO: 114484 - RNA, 22 nt, Human
ugcaugauguuaaacaucaggu

SEQ ID NO: 114485 - RNA, 22 nt, Human
ugcaugcaaaaaaaucugcauu

SEQ ID NO: 114486 - RNA, 22 nt, Human
ugcaugcacgugcuauguauga

SEQ ID NO: 114487 - RNA, 22 nt, Human
ugcaugcacuaucuagaugaug

SEQ ID NO: 114488 - RNA, 22 nt, Human
ugcaugcagcuggugauaagaa

SEQ ID NO: 114489 - RNA, 22 nt, Human
ugcaugcaugcuacugggaggu

SEQ ID NO: 114490 - RNA, 21 nt, Human
ugcaugcuauguuuuuauuuc

SEQ ID NO: 114491 - RNA, 22 nt, Human
ugcaugcucuguagaaagcagg

SEQ ID NO: 114492 - RNA, 22 nt, Human
ugcauggaacggucuccugguc

SEQ ID NO: 114493 - RNA, 22 nt, Human
ugcauggacucaucagacaaga

SEQ ID NO: 114494 - RNA, 22 nt, Human
ugcauggaggaagaugaaugca

SEQ ID NO: 114495 - RNA, 22 nt, Human
ugcaugguaaccaggaugucua

SEQ ID NO: 114496 - RNA, 22 nt, Human
ugcaugguuauauacuacuagu

SEQ ID NO: 114497 - RNA, 22 nt, Human
ugcauguuuuauaccaaagcuu

SEQ ID NO: 114498 - RNA, 22 nt, Human
ugcauuaagguaauuguauaau

SEQ ID NO: 114499 - RNA, 22 nt, Human
ugcauuaauuuuugccagguuc

SEQ ID NO: 114500 - RNA, 22 nt, Human
ugcauuaguaaguaauuuuaau

SEQ ID NO: 114501 - RNA, 22 nt, Human
ugcauuauaacugaauguuguu

SEQ ID NO: 114502 - RNA, 15 nt, Human
ugcauuaucaauaga

SEQ ID NO: 114503 - RNA, 22 nt, Human
ugcauuauuacaagguaagacu

SEQ ID NO: 114504 - RNA, 22 nt, Human
ugcauucaucauuugaaagccc

SEQ ID NO: 114505 - RNA, 22 nt, Human
ugcauuccacacccauagagau

SEQ ID NO: 114506 - RNA, 22 nt, Human
ugcauuccauguguuuccugag

SEQ ID NO: 114507 - RNA, 22 nt, Human
ugcauuccuccaccuccugcac

SEQ ID NO: 114508 - RNA, 21 nt, Human
ugcauuccuccauccaacagg

SEQ ID NO: 114509 - RNA, 22 nt, Human
ugcauuccuuucuaggauagcu

SEQ ID NO: 114510 - RNA, 22 nt, Human
ugcauugaggggcucucuuccu

SEQ ID NO: 114511 - RNA, 22 nt, Human
ugcauugaucauauccuuccug

SEQ ID NO: 114512 - RNA, 22 nt, Human
ugcauugcaguuaacucaguau

SEQ ID NO: 114513 - RNA, 22 nt, Human
ugcauugguaaaauacauacac

SEQ ID NO: 114514 - RNA, 22 nt, Human
ugcauuggucuuaaucuucagg

SEQ ID NO: 114515 - RNA, 17 nt, Human
ugcauuguaggcuagcc

SEQ ID NO: 114516 - RNA, 22 nt, Human
ugcauuguugaccaguugugca

SEQ ID NO: 114517 - RNA, 22 nt, Human
ugcauuguuugauaggugaauu

SEQ ID NO: 114518 - RNA, 21 nt, Human
ugcauuuaacagaaacaggaa

SEQ ID NO: 114519 - RNA, 22 nt, Human
ugcauuuaagaaaacaugaguc

SEQ ID NO: 114520 - RNA, 22 nt, Human
ugcauuuauuugaauugaucua

SEQ ID NO: 114521 - RNA, 22 nt, Human
ugcuggaauuuuucuaggauuu

SEQ ID NO: 114522 - RNA, 22 nt, Human
ugcuggagaucauuaauguuca

SEQ ID NO: 114523 - RNA, 22 nt, Human
ugcuggagcaacauuauugugc

SEQ ID NO: 114524 - RNA, 22 nt, Human
ugcuggaggagaagguugcuca

SEQ ID NO: 114525 - RNA, 22 nt, Human
ugcuggaggccagaagucugag

SEQ ID NO: 114526 - RNA, 22 nt, Human
uuuccaauucaagcuuuuacgu

SEQ ID NO: 114527 - RNA, 22 nt, Human
uuuccaauuugguagucaucgg

SEQ ID NO: 114528 - RNA, 22 nt, Human
uuuccaauuuuuaaguggauga

SEQ ID NO: 114529 - RNA, 22 nt, Human
uuuccacaauuugagcagcaga

SEQ ID NO: 114530 - RNA, 22 nt, Human
uuuccacacugcagccagcaaa

SEQ ID NO: 114531 - RNA, 22 nt, Human
uuuccacuguagagauguugaa

SEQ ID NO: 114532 - RNA, 22 nt, Human
uuuccagagcugagaaggcuug

SEQ ID NO: 114533 - RNA, 22 nt, Human
uuuccaggcagaggaguuguga

SEQ ID NO: 114534 - RNA, 22 nt, Human
uuuccagggcucuguagaagaa

SEQ ID NO: 114535 - RNA, 22 nt, Human
uuuccagucucagcccuguaac

SEQ ID NO: 114536 - RNA, 22 nt, Human
uuuccagugaauuagucuguuu

SEQ ID NO: 114537 - RNA, 22 nt, Human
uuuccagugauugcugcucuca

SEQ ID NO: 114538 - RNA, 22 nt, Human
uuucccaaagccuggggugagu

SEQ ID NO: 114539 - RNA, 22 nt, Human
uuucccaauugagagguucugu

SEQ ID NO: 114540 - RNA, 22 nt, Human
uuuccccagguagauagauaau

SEQ ID NO: 114541 - RNA, 22 nt, Human
uuuccccucaguacuaaacaua

SEQ ID NO: 114542 - RNA, 22 nt, Human
uuucccuacuuguaacuggaaa

SEQ ID NO: 114543 - RNA, 21 nt, Human
uuucccucauuguguuggcac

SEQ ID NO: 114544 - RNA, 22 nt, Human
uuucccucugugccagcuucuc

SEQ ID NO: 114545 - RNA, 22 nt, Human
uuuccuaacucaucggauguac

SEQ ID NO: 114546 - RNA, 22 nt, Human
uuuccuaagggaugcggcucaa

SEQ ID NO: 114547 - RNA, 22 nt, Human
uuuccuaggagauugaucacau

SEQ ID NO: 114548 - RNA, 22 nt, Human
uuuccuaguucuaagaaaugua

SEQ ID NO: 114549 - RNA, 22 nt, Human
uuuccucaacugucaaaugggg

SEQ ID NO: 114550 - RNA, 22 nt, Human
uuuccucagaagugucuacuau

SEQ ID NO: 114551 - RNA, 22 nt, Human
uuuccucuccggggccuccagg

SEQ ID NO: 114552 - RNA, 22 nt, Human
uuuccucugagugagcugggag

SEQ ID NO: 114553 - RNA, 22 nt, Human
uuuccucugcugccauugcccc

SEQ ID NO: 114554 - RNA, 22 nt, Human
uuuccucuucuggcaggcaggg

SEQ ID NO: 114555 - RNA, 22 nt, Human
uuuccucuuuguaccuugacua

SEQ ID NO: 114556 - RNA, 22 nt, Human
uuuccugguuggggacgugguu

SEQ ID NO: 114557 - RNA, 22 nt, Human
uuuccugguuugaagcagcagc

SEQ ID NO: 114558 - RNA, 22 nt, Human
uuuccuguccugguacuuggca

SEQ ID NO: 114559 - RNA, 22 nt, Human
uuuccuucaucaucugagagcu

SEQ ID NO: 114560 - RNA, 22 nt, Human
uuuccuuccaaaugcccgggag

SEQ ID NO: 114561 - RNA, 22 nt, Human
uuuccuuccauguugggcaaaa

SEQ ID NO: 114562 - RNA, 22 nt, Human
uuuccuucccuggaugagaagu

SEQ ID NO: 114563 - RNA, 22 nt, Human
uuuccuugggucucuuaguggc

SEQ ID NO: 114564 - RNA, 22 nt, Human
uuuccuuguuauuauuuguccu

SEQ ID NO: 114565 - RNA, 22 nt, Human
uuuccuuucucaagagccggca

SEQ ID NO: 114566 - RNA, 22 nt, Human
uuuccuuuuauaaggcuugagg

SEQ ID NO: 114567 - RNA, 22 nt, Human
uuucgagggauuagcuaggacu

SEQ ID NO: 114568 - RNA, 22 nt, Human
uuucgggaaaaacugguaagac

SEQ ID NO: 114569 - RNA, 22 nt, Human
uuucgucaauuguaacaaaugu

SEQ ID NO: 114570 - RNA, 22 nt, Human
uuucuaaaauagauuuuauggu

SEQ ID NO: 114571 - RNA, 22 nt, Human
uuucuaaaggguagauuuggcc

SEQ ID NO: 114572 - RNA, 22 nt, Human
uuucuaacagcaaauguuuauc

SEQ ID NO: 114573 - RNA, 22 nt, Human
uuucuaagaugugguuucaagg

SEQ ID NO: 114574 - RNA, 19 nt, Human
uuucuaagcuaaaugcuuc

SEQ ID NO: 114575 - RNA, 23 nt, Human
uuucuaagguuuuuaucugcuac

SEQ ID NO: 114576 - RNA, 22 nt, Human
uuucuaaguaagauuaacuucu

SEQ ID NO: 114577 - RNA, 22 nt, Human
uuucuaauaguugagucagcua

SEQ ID NO: 114578 - RNA, 22 nt, Human
uuucuaauaucacuuccagcug

SEQ ID NO: 114579 - RNA, 22 nt, Human
uuucuacauucaaaaacuacca

SEQ ID NO: 114580 - RNA, 22 nt, Human
uuucuacucauccuuuggagaa

SEQ ID NO: 114581 - RNA, 22 nt, Human
uuucuacuucuccugaaugucu

SEQ ID NO: 114582 - RNA, 22 nt, Human
uuucuagaaacauuaucucuau

SEQ ID NO: 114583 - RNA, 22 nt, Human
uuucuagacauuucuauguaca

SEQ ID NO: 114584 - RNA, 22 nt, Human
uuucuagaggcuccaggggagu

SEQ ID NO: 114585 - RNA, 22 nt, Human
uuucuagagugggcaugucuua

SEQ ID NO: 114586 - RNA, 22 nt, Human
uuucuagaguucaucaugguaa

SEQ ID NO: 114587 - RNA, 22 nt, Human
uuucuaggacaugauaggauau

SEQ ID NO: 114588 - RNA, 22 nt, Human
uuucuagucuucccuaccuccc

SEQ ID NO: 114589 - RNA, 22 nt, Human
uuucuaguggguauucccuguu

SEQ ID NO: 114590 - RNA, 22 nt, Human
uuucuaguucuaccacaguaau

SEQ ID NO: 114591 - RNA, 19 nt, Human
uuucuaguuucagcuuguc

SEQ ID NO: 114592 - RNA, 22 nt, Human
uuucuauaaaaagugcuaggau

SEQ ID NO: 114593 - RNA, 22 nt, Human
uuucuauaacuggacuggauug

SEQ ID NO: 114594 - RNA, 22 nt, Human
uuucuauaucuuaccuauugua

SEQ ID NO: 114595 - RNA, 22 nt, Human
uuucuauaugaggagcuaaagu

SEQ ID NO: 114596 - RNA, 22 nt, Human
uuucuaucuaggguuagaguga

SEQ ID NO: 114597 - RNA, 22 nt, Human
uuucucaaaagacagaagugaa

SEQ ID NO: 114598 - RNA, 23 nt, Human
uuucucaaagaguggcagcuuca

SEQ ID NO: 114599 - RNA, 22 nt, Human
uuucucaaguacugcacaugaa

SEQ ID NO: 114600 - RNA, 20 nt, Human
uuucucagaacaguggcugc

SEQ ID NO: 114601 - RNA, 22 nt, Human
uuucucagaggagccagacggu

SEQ ID NO: 114602 - RNA, 22 nt, Human
uuucucagccuccuugcuggag

SEQ ID NO: 114603 - RNA, 22 nt, Human
uuucucagggaggagucaagcc

SEQ ID NO: 114604 - RNA, 22 nt, Human
uuucucagugcaguuucuacgu

SEQ ID NO: 114605 - RNA, 22 nt, Human
uuucucaguuacuagcuguggu

SEQ ID NO: 114606 - RNA, 22 nt, Human
uuucucaguugugcgagcagca

SEQ ID NO: 114607 - RNA, 22 nt, Human
uuucucauuuagaguggcaggg

SEQ ID NO: 114608 - RNA, 20 nt, Human
uuucucccaagugcaagggu

SEQ ID NO: 114609 - RNA, 22 nt, Human
uuucuccuugugucuccuuuga

SEQ ID NO: 114610 - RNA, 22 nt, Human
uuucucuauuaggggcuagcuu

SEQ ID NO: 114611 - RNA, 22 nt, Human
uuucucugugccauuuccauaa

SEQ ID NO: 114612 - RNA, 22 nt, Human
uuucucuguucucuaacuguaa

SEQ ID NO: 114613 - RNA, 22 nt, Human
uuucugaaaucucuuuugagga

SEQ ID NO: 114614 - RNA, 22 nt, Human
uuucugaagauacagcuuugcu

SEQ ID NO: 114615 - RNA, 23 nt, Human
uuucugaaguugagauggacuuu

SEQ ID NO: 114616 - RNA, 22 nt, Human
uuucugaauuccuaggauguug

SEQ ID NO: 114617 - RNA, 22 nt, Human
uuucugauucucacuuuggcau

SEQ ID NO: 114618 - RNA, 20 nt, Human
uuucugcagggagcugggcu

SEQ ID NO: 114619 - RNA, 22 nt, Human
uuucugcagguauugcauaagu

SEQ ID NO: 114620 - RNA, 22 nt, Human
uuucugcagucucucagaagcc

SEQ ID NO: 114621 - RNA, 22 nt, Human
uuucugcaucucuacaguuguu

SEQ ID NO: 114622 - RNA, 22 nt, Human
uuucugccaaccauuuaaacuc

SEQ ID NO: 114623 - RNA, 22 nt, Human
uuucugcuaaucuuuuacugag

SEQ ID NO: 114624 - RNA, 22 nt, Human
uuucugcugugcuuucuugcgu

SEQ ID NO: 114625 - RNA, 22 nt, Human
uuucugcuguguaaaaugaggg

SEQ ID NO: 114626 - RNA, 22 nt, Human
uuucugcuuaggacucugugga

SEQ ID NO: 114627 - RNA, 22 nt, Human
uuucuggaaacuguaaagagga

SEQ ID NO: 114628 - RNA, 22 nt, Human
uuucuggaaagcaagauacauu

SEQ ID NO: 114629 - RNA, 22 nt, Human
uuucuggaaccacaaaaguaug

SEQ ID NO: 114630 - RNA, 19 nt, Human
ugggcagguucaguaaugg

SEQ ID NO: 114631 - RNA, 19 nt, Human
ugggcagugccagggcuua

SEQ ID NO: 114632 - RNA, 22 nt, Human
ugggcaguggcugggccucucu

SEQ ID NO: 114633 - RNA, 22 nt, Human
ugggcaucucugcugccggccu

SEQ ID NO: 114634 - RNA, 22 nt, Human
ugggcaugaagaaggaaguggg

SEQ ID NO: 114635 - RNA, 22 nt, Human
ugggcauggacuguggagccgc

SEQ ID NO: 114636 - RNA, 22 nt, Human
ugggccaacaggaggucuagga

SEQ ID NO: 114637 - RNA, 22 nt, Human
ugggccacacacagaagaauca

SEQ ID NO: 114638 - RNA, 22 nt, Human
ugggccacagagugagaaaugu

SEQ ID NO: 114639 - RNA, 22 nt, Human
ugggccacggggguggagagcu

SEQ ID NO: 114640 - RNA, 22 nt, Human
ugggccacgucaucucccacaa

SEQ ID NO: 114641 - RNA, 22 nt, Human
ugggccacugaggguggucauu

SEQ ID NO: 114642 - RNA, 21 nt, Human
ugggccagaucugaguuucua

SEQ ID NO: 114643 - RNA, 22 nt, Human
ugggccagcaauugcugcucag

SEQ ID NO: 114644 - RNA, 22 nt, Human
ugggccagcacugggugcucau

SEQ ID NO: 114645 - RNA, 22 nt, Human
ugggccaggcaugugaucagca

SEQ ID NO: 114646 - RNA, 23 nt, Human
ugggccaguucuguugaaagcca

SEQ ID NO: 114647 - RNA, 22 nt, Human
ugggcccagguccugggagaag

SEQ ID NO: 114648 - RNA, 22 nt, Human
ugggcccugguggccaugccuc

SEQ ID NO: 114649 - RNA, 22 nt, Human
ugggcccuuaugaagcucaaga

SEQ ID NO: 114650 - RNA, 22 nt, Human
ugggccucaguuuccuuaggau

SEQ ID NO: 114651 - RNA, 22 nt, Human
ugggccucaugcccagccaccc

SEQ ID NO: 114652 - RNA, 22 nt, Human
ugggccucccaugucuuaggga

SEQ ID NO: 114653 - RNA, 22 nt, Human
ugggccucuggguuagucccua

SEQ ID NO: 114654 - RNA, 22 nt, Human
ugggccucuguuuccucaucug

SEQ ID NO: 114655 - RNA, 22 nt, Human
ugggccugagcucaccaggggc

SEQ ID NO: 114656 - RNA, 21 nt, Human
ugggccugauucccaggguca

SEQ ID NO: 114657 - RNA, 22 nt, Human
uggagguggugcccagcaauuu

SEQ ID NO: 114658 - RNA, 22 nt, Human
uggagguguccaacucgugggu

SEQ ID NO: 114659 - RNA, 16 nt, Human
uggagguguuucuagu

SEQ ID NO: 114660 - RNA, 22 nt, Human
uggagucacagugaccugaguc

SEQ ID NO: 114661 - RNA, 22 nt, Human
uggagucacuuucucuuccagu

SEQ ID NO: 114662 - RNA, 22 nt, Human
uggagucagaaugcgacaggcc

SEQ ID NO: 114663 - RNA, 22 nt, Human
uggaguccuaguauuggaaaca

SEQ ID NO: 114664 - RNA, 22 nt, Human
uggagugaaguaaagaggacaa

SEQ ID NO: 114665 - RNA, 22 nt, Human
uggagugcaauaguaauaaggu

SEQ ID NO: 114666 - RNA, 22 nt, Human
uggagugggcaauguaggcaag

SEQ ID NO: 114667 - RNA, 22 nt, Human
uggaguucauccaugacagcuu

SEQ ID NO: 114668 - RNA, 22 nt, Human
uggaguucucaggugagggcuu

SEQ ID NO: 114669 - RNA, 23 nt, Human
uggaguugauguccuucugugcu

SEQ ID NO: 114670 - RNA, 22 nt, Human
uggaguugcagcuaccagacau

SEQ ID NO: 114671 - RNA, 20 nt, Human
uggaguuguggcaguuugga

SEQ ID NO: 114672 - RNA, 22 nt, Human
uggauaaaacguucugaaaaac

SEQ ID NO: 114673 - RNA, 22 nt, Human
uggauaaaugugcagaugacau

SEQ ID NO: 114674 - RNA, 22 nt, Human
uggauaccugguuuuuauuuac

SEQ ID NO: 114675 - RNA, 22 nt, Human
uggauauccuuguuaacuuucu

SEQ ID NO: 114676 - RNA, 22 nt, Human
uggauaugggccauggaaaaaa

SEQ ID NO: 114677 - RNA, 23 nt, Human
uggaucaauaagccugacugugu

SEQ ID NO: 114678 - RNA, 22 nt, Human
uggaucaucuuaagaagugauu

SEQ ID NO: 114679 - RNA, 22 nt, Human
uggauccugcacugaguggagu

SEQ ID NO: 114680 - RNA, 22 nt, Human
uggaucuaucuccagggguccu

SEQ ID NO: 114681 - RNA, 18 nt, Human
uggaucuuuaugaggcug

SEQ ID NO: 114682 - RNA, 22 nt, Human
uggaugaaauauugcauuuaug

SEQ ID NO: 114683 - RNA, 22 nt, Human
uggaugcuauggaguauuuaga

SEQ ID NO: 114684 - RNA, 22 nt, Human
uggaugcugagaacacugccug

SEQ ID NO: 114685 - RNA, 22 nt, Human
uggaugcuuaaaucguuugaau

SEQ ID NO: 114686 - RNA, 22 nt, Human
uggaugucauaguuggauauac

SEQ ID NO: 114687 - RNA, 22 nt, Human
uggauucucaugggaccaguag

SEQ ID NO: 114688 - RNA, 22 nt, Human
uggauucugggagaguucuaua

SEQ ID NO: 114689 - RNA, 22 nt, Human
uggauugauaagagacaaguga

SEQ ID NO: 114690 - RNA, 22 nt, Human
uggauuuaaggcagagagggcc

SEQ ID NO: 114691 - RNA, 22 nt, Human
uggauuuaauggaugaggggca

SEQ ID NO: 114692 - RNA, 22 nt, Human
uggauuucagcaagggugggug

SEQ ID NO: 114693 - RNA, 22 nt, Human
uggauuucuccagcucuccauu

SEQ ID NO: 114694 - RNA, 22 nt, Human
uggcaaaacccacaauuauauc

SEQ ID NO: 114695 - RNA, 22 nt, Human
uggcaaacuggaggaagcccug

SEQ ID NO: 114696 - RNA, 22 nt, Human
uggcaaagaugaagcauuucgu

SEQ ID NO: 114697 - RNA, 22 nt, Human
uggcaaagcuagacauucccuc

SEQ ID NO: 114698 - RNA, 22 nt, Human
uggcaaaggcgcucacaugccu

SEQ ID NO: 114699 - RNA, 22 nt, Human
uggcaaaggggaccauguugaa

SEQ ID NO: 114700 - RNA, 22 nt, Human
uggcaaaguaauuggguuucuc

SEQ ID NO: 114701 - RNA, 22 nt, Human
uggcaaaguaucugucccagcu

SEQ ID NO: 114702 - RNA, 22 nt, Human
uggcaaagugacuccuuggggc

SEQ ID NO: 114703 - RNA, 22 nt, Human
uggcaaccgcauggccugcuuc

SEQ ID NO: 114704 - RNA, 22 nt, Human
uggcaagaaacugaggccugcu

SEQ ID NO: 114705 - RNA, 22 nt, Human
uggcaagcucguuugggucaga

SEQ ID NO: 114706 - RNA, 23 nt, Human
uggcaaggaaugggauggagacu

SEQ ID NO: 114707 - RNA, 22 nt, Human
uggcaauacauaaucuuaaugg

SEQ ID NO: 114708 - RNA, 22 nt, Human
uggcaauaugcuuucaguggcc

SEQ ID NO: 114709 - RNA, 22 nt, Human
uggcaauuucagaaaauagaau

SEQ ID NO: 114710 - RNA, 22 nt, Human
uggcaauuuguagaguaaauua

SEQ ID NO: 114711 - RNA, 22 nt, Human
uggcaauuuuaggugguuuagu

SEQ ID NO: 114712 - RNA, 22 nt, Human
uggcacagacagaucaggaguc

SEQ ID NO: 114713 - RNA, 22 nt, Human
uggcacagacugggccaaggaa

SEQ ID NO: 114714 - RNA, 22 nt, Human
uggcacagcccggauucuauga

SEQ ID NO: 114715 - RNA, 22 nt, Human
uggcacauagaaaaggaucaau

SEQ ID NO: 114716 - RNA, 22 nt, Human
uggcacauagcagguacucagu

SEQ ID NO: 114717 - RNA, 22 nt, Human
uggcacauaguaggugcucaau

SEQ ID NO: 114718 - RNA, 22 nt, Human
uggcaccagcaccuagaugggg

SEQ ID NO: 114719 - RNA, 20 nt, Human
uggcaccaggugguggcccc

SEQ ID NO: 114720 - RNA, 22 nt, Human
uggcaccauguuggcaaauguu

SEQ ID NO: 114721 - RNA, 22 nt, Human
uggcacugcacuuuaagauuua

SEQ ID NO: 114722 - RNA, 22 nt, Human
uggcacugccaaccugcuaggu

SEQ ID NO: 114723 - RNA, 22 nt, Human
uggcacuguagccacuacugcc

SEQ ID NO: 114724 - RNA, 22 nt, Human
uggcacuuccacuguggcugcu

SEQ ID NO: 114725 - RNA, 22 nt, Human
uggcacuugauauuugauuugc

SEQ ID NO: 114726 - RNA, 22 nt, Human
uggcagaaagaaccaugugcaa

SEQ ID NO: 114727 - RNA, 22 nt, Human
uggcagaccugaagguucggcg

SEQ ID NO: 114728 - RNA, 22 nt, Human
uggcagagccuugccaaacucc

SEQ ID NO: 114729 - RNA, 22 nt, Human
uggcagaggaaaaagucacugg

SEQ ID NO: 114730 - RNA, 19 nt, Human
uggcagaggacaaggacuu

SEQ ID NO: 114731 - RNA, 22 nt, Human
uggcagaggagaauuaagauua

SEQ ID NO: 114732 - RNA, 16 nt, Human
uggcagagguucagcc

SEQ ID NO: 114733 - RNA, 22 nt, Human
uggcagaguaggauggcccugu

SEQ ID NO: 114734 - RNA, 22 nt, Human
uggcagagucaucacaucugga

SEQ ID NO: 114735 - RNA, 22 nt, Human
uggcagagucucuccuuuccag

SEQ ID NO: 114736 - RNA, 22 nt, Human
uggcagagucugggcuugggca

SEQ ID NO: 114737 - RNA, 22 nt, Human
uggcagagugcggcauccccug

SEQ ID NO: 114738 - RNA, 22 nt, Human
uggcagaguggaccauacucaa

SEQ ID NO: 114739 - RNA, 22 nt, Human
ugcuuggcuagcuuggcagcuc

SEQ ID NO: 114740 - RNA, 22 nt, Human
ugcuuggcuuucugagcuucug

SEQ ID NO: 114741 - RNA, 22 nt, Human
ugcuugggcggccagcauggcg

SEQ ID NO: 114742 - RNA, 22 nt, Human
ugcuuguauucauaucacagcu

SEQ ID NO: 114743 - RNA, 22 nt, Human
ugcuuguccgaggugaguacuu

SEQ ID NO: 114744 - RNA, 22 nt, Human
ugcuuuaaccaucuuguuugga

SEQ ID NO: 114745 - RNA, 22 nt, Human
ugcuuuaagacacuaaguuuga

SEQ ID NO: 114746 - RNA, 22 nt, Human
ugcuuuaccuucccagaaacca

SEQ ID NO: 114747 - RNA, 22 nt, Human
ugcuuuaguucaacaugccaaa

SEQ ID NO: 114748 - RNA, 22 nt, Human
ugcuuuauaacuuaguuuaugg

SEQ ID NO: 114749 - RNA, 22 nt, Human
ugcuuuauagacaaggaaguag

SEQ ID NO: 114750 - RNA, 22 nt, Human
ugcuuuauaucucucuucuuag

SEQ ID NO: 114751 - RNA, 22 nt, Human
ugcuuuaucaaagcuauaguga

SEQ ID NO: 114752 - RNA, 22 nt, Human
ugcuuuaucugugagaaccuga

SEQ ID NO: 114753 - RNA, 18 nt, Human
ugcuuuaugcuuauauaa

SEQ ID NO: 114754 - RNA, 22 nt, Human
ugcuuuauguuaucagaagggu

SEQ ID NO: 114755 - RNA, 22 nt, Human
ugcuuuauucaggguuuacccc

SEQ ID NO: 114756 - RNA, 22 nt, Human
ugcuuuauucgacaucugguag

SEQ ID NO: 114757 - RNA, 22 nt, Human
ugcuuuauugcaucaguguggg

SEQ ID NO: 114758 - RNA, 22 nt, Human
ugcuuuauuuuaaauaugccau

SEQ ID NO: 114759 - RNA, 22 nt, Human
ugcuuucaccuguuugcaccca

SEQ ID NO: 114760 - RNA, 22 nt, Human
ugcuuucagcugguaaagaaac

SEQ ID NO: 114761 - RNA, 22 nt, Human
ugcuuucauugccugcgguuuu

SEQ ID NO: 114762 - RNA, 18 nt, Human
ugcuuucuagcuucagau

SEQ ID NO: 114763 - RNA, 22 nt, Human
ugcuuucugcucuggaaacagg

SEQ ID NO: 114764 - RNA, 22 nt, Human
ugcuuucuuuagcuccugaguc

SEQ ID NO: 114765 - RNA, 22 nt, Human
ugcuuugaaagauaauacuguc

SEQ ID NO: 114766 - RNA, 22 nt, Human
ugcuuugcaaauaauagaaugu

SEQ ID NO: 114767 - RNA, 22 nt, Human
ugcuuugcaggaacccuaagca

SEQ ID NO: 114768 - RNA, 21 nt, Human
ugcuuugcagguggauuuagu

SEQ ID NO: 114769 - RNA, 19 nt, Human
ugcuuugcaucugauuguu

SEQ ID NO: 114770 - RNA, 22 nt, Human
ugcuuugccagacaguucccuu

SEQ ID NO: 114771 - RNA, 21 nt, Human
ugcuuugcucguucccagagu

SEQ ID NO: 114772 - RNA, 22 nt, Human
ugcuuugcucucacuguaaggu

SEQ ID NO: 114773 - RNA, 22 nt, Human
ugggccugcuggggcauuuuca

SEQ ID NO: 114774 - RNA, 23 nt, Human
ugggccuggaaagccuuagagag

SEQ ID NO: 114775 - RNA, 22 nt, Human
ugggccuggacaucuguauuuu

SEQ ID NO: 114776 - RNA, 22 nt, Human
ugggccuggagcccuggagagu

SEQ ID NO: 114777 - RNA, 22 nt, Human
ugggccugggucuuugcugcca

SEQ ID NO: 114778 - RNA, 21 nt, Human
ugggccugucccucuuggagg

SEQ ID NO: 114779 - RNA, 20 nt, Human
ugggccuguggcagaagucu

SEQ ID NO: 114780 - RNA, 22 nt, Human
ugggccuguuucccuucagggc

SEQ ID NO: 114781 - RNA, 22 nt, Human
ugggccuugcugagcuauggag

SEQ ID NO: 114782 - RNA, 23 nt, Human
ugggcgaggcaggaguggagcac

SEQ ID NO: 114783 - RNA, 22 nt, Human
ugggcuacucugggagccuaac

SEQ ID NO: 114784 - RNA, 22 nt, Human
ugggcuagcagggaagagagac

SEQ ID NO: 114785 - RNA, 22 nt, Human
ugggcucacuggggcagggacc

SEQ ID NO: 114786 - RNA, 22 nt, Human
ugggcucagccaugaccuccac

SEQ ID NO: 114787 - RNA, 22 nt, Human
ugggcucagccuucauguggcc

SEQ ID NO: 114788 - RNA, 22 nt, Human
ugggcucaggaccccagaggcc

SEQ ID NO: 114789 - RNA, 22 nt, Human
ugggcucagggucgaggacuuu

SEQ ID NO: 114790 - RNA, 22 nt, Human
ugggcucagucugcaccugcgg

SEQ ID NO: 114791 - RNA, 22 nt, Human
ugggcucaugcuggagaugaga

SEQ ID NO: 114792 - RNA, 22 nt, Human
ugggcuccggcggccucaggcu

SEQ ID NO: 114793 - RNA, 22 nt, Human
ugggcucucuggcaggaaggcu

SEQ ID NO: 114794 - RNA, 20 nt, Human
ugggcucugcuuccuggagu

SEQ ID NO: 114795 - RNA, 22 nt, Human
ugggcucugugccagguuggug

SEQ ID NO: 114796 - RNA, 22 nt, Human
ugggcugcacccucagccucug

SEQ ID NO: 114797 - RNA, 18 nt, Human
ugggcugccuggccucug

SEQ ID NO: 114798 - RNA, 22 nt, Human
ugggcugcugucugcacaugcu

SEQ ID NO: 114799 - RNA, 22 nt, Human
ugggcuggcguggagaguuuag

SEQ ID NO: 114800 - RNA, 22 nt, Human
ugggcuuuaucaugggucuggu

SEQ ID NO: 114801 - RNA, 22 nt, Human
uggggaaaacagaggaaauuag

SEQ ID NO: 114802 - RNA, 22 nt, Human
uggggaaagacauucauacagu

SEQ ID NO: 114803 - RNA, 22 nt, Human
uggggaaagggauggcucccgc

SEQ ID NO: 114804 - RNA, 22 nt, Human
uggggaagaauaauguauguac

SEQ ID NO: 114805 - RNA, 22 nt, Human
uggggaagggcacccuggagac

SEQ ID NO: 114806 - RNA, 22 nt, Human
uggggacacagagguucguugg

SEQ ID NO: 114807 - RNA, 22 nt, Human
uggggacaggagacuuacagcu

SEQ ID NO: 114808 - RNA, 22 nt, Human
uggggacagggcucagcaauuu

SEQ ID NO: 114809 - RNA, 22 nt, Human
uggggacauagccagucuggcu

SEQ ID NO: 114810 - RNA, 22 nt, Human
uggggacauucaugcagguugu

SEQ ID NO: 114811 - RNA, 22 nt, Human
uggggaccagauuagaccaugg

SEQ ID NO: 114812 - RNA, 22 nt, Human
uggggagaaaugucuuuguucc

SEQ ID NO: 114813 - RNA, 22 nt, Human
uggggagaagcaauagacucua

SEQ ID NO: 114814 - RNA, 22 nt, Human
uggggagacuggccgagauccu

SEQ ID NO: 114815 - RNA, 22 nt, Human
uggggagagauugaggaguuuu

SEQ ID NO: 114816 - RNA, 22 nt, Human
uggggagagguaucauugagau

SEQ ID NO: 114817 - RNA, 22 nt, Human
uggggagauuguuaaauuuaga

SEQ ID NO: 114818 - RNA, 22 nt, Human
uggggagguaacaauuucaggc

SEQ ID NO: 114819 - RNA, 20 nt, Human
uggggaguugagcacgagca

SEQ ID NO: 114820 - RNA, 22 nt, Human
uggggaugaaacccaggcaucu

SEQ ID NO: 114821 - RNA, 22 nt, Human
uggggauggaugaaucuuugcu

SEQ ID NO: 114822 - RNA, 22 nt, Human
uggggcacagcugagaaagcac

SEQ ID NO: 114823 - RNA, 22 nt, Human
uggggcagaguaggauuuuggc

SEQ ID NO: 114824 - RNA, 22 nt, Human
uggggccacacugaucucccag

SEQ ID NO: 114825 - RNA, 22 nt, Human
uggggccagagauggggcgcag

SEQ ID NO: 114826 - RNA, 22 nt, Human
uggggccagagcugcagggagc

SEQ ID NO: 114827 - RNA, 22 nt, Human
uggggccagcggggaggacuca

SEQ ID NO: 114828 - RNA, 22 nt, Human
uggggccugagguggagcugca

SEQ ID NO: 114829 - RNA, 22 nt, Human
uggggccugugacggguccaga

SEQ ID NO: 114830 - RNA, 22 nt, Human
uggggcuagaauccugcaggaa

SEQ ID NO: 114831 - RNA, 22 nt, Human
ugggggaacuguugcgcgcggg

SEQ ID NO: 114832 - RNA, 22 nt, Human
ugggggagaguuuagaugauuu

SEQ ID NO: 114833 - RNA, 22 nt, Human
ugggggcugggaugucacuuuc

SEQ ID NO: 114834 - RNA, 22 nt, Human
ugggggucaggaugaggccuug

SEQ ID NO: 114835 - RNA, 22 nt, Human
uggggguccuccucugcuuaag

SEQ ID NO: 114836 - RNA, 21 nt, Human
ugggggucuucacgguguugu

SEQ ID NO: 114837 - RNA, 22 nt, Human
ugggggugaaagucuggacagu

SEQ ID NO: 114838 - RNA, 22 nt, Human
ugggggugugccagggaccucc

SEQ ID NO: 114839 - RNA, 22 nt, Human
ugggguaggagucagcgagaga

SEQ ID NO: 114840 - RNA, 22 nt, Human
ugggguagguaugaaaacuagg

SEQ ID NO: 114841 - RNA, 19 nt, Human
uggggucaagagaggcuuc

SEQ ID NO: 114842 - RNA, 17 nt, Human
ugggguccccgauggug

SEQ ID NO: 114843 - RNA, 22 nt, Human
ugggguccucucacuuggaggg

SEQ ID NO: 114844 - RNA, 22 nt, Human
uggggugaggcagccacauuua

SEQ ID NO: 114845 - RNA, 22 nt, Human
ugggguggauagaaagugaugu

SEQ ID NO: 114846 - RNA, 17 nt, Human
ugggguguugaaggguu

SEQ ID NO: 114847 - RNA, 22 nt, Human
ugggguucuuuguuuccugccu

SEQ ID NO: 114848 - RNA, 22 nt, Human
uggugaggccaaagccaugaca

SEQ ID NO: 114849 - RNA, 22 nt, Human
uggugaucagucaacugucuuc

SEQ ID NO: 114850 - RNA, 22 nt, Human
uggugcagacaggagccccgcu

SEQ ID NO: 114851 - RNA, 22 nt, Human
uggugcagaugcaggucacugg

SEQ ID NO: 114852 - RNA, 22 nt, Human
uggugcaggccaagcugcgagc

SEQ ID NO: 114853 - RNA, 22 nt, Human
uggugcaguucccagggccggg

SEQ ID NO: 114854 - RNA, 23 nt, Human
uggugccucagaagcagugggcu

SEQ ID NO: 114855 - RNA, 21 nt, Human
uggugccuucagcugucuuuu

SEQ ID NO: 114856 - RNA, 22 nt, Human
uggugccuugggccuacagcgc

SEQ ID NO: 114857 - RNA, 19 nt, Human
uggugcgcuguuccugagc

SEQ ID NO: 114858 - RNA, 22 nt, Human
uggugcugauaauggcaggauu

SEQ ID NO: 114859 - RNA, 22 nt, Human
uggugcugccaccuccucugcu

SEQ ID NO: 114860 - RNA, 22 nt, Human
uggugcugccaggcuccugcca

SEQ ID NO: 114861 - RNA, 22 nt, Human
uggugcugccucagaugccuua

SEQ ID NO: 114862 - RNA, 22 nt, Human
uggugcugucuacuuugugcag

SEQ ID NO: 114863 - RNA, 22 nt, Human
ugguggaaauaaacauccaauu

SEQ ID NO: 114864 - RNA, 22 nt, Human
ugguggacaucccagggugaaa

SEQ ID NO: 114865 - RNA, 21 nt, Human
ugguggaccagugcugggaga

SEQ ID NO: 114866 - RNA, 22 nt, Human
ugguggaccuggcauugaaccu

SEQ ID NO: 114867 - RNA, 22 nt, Human
ugguggagggaacuauuuccag

SEQ ID NO: 114868 - RNA, 22 nt, Human
ugguggaggugcauuucggagc

SEQ ID NO: 114869 - RNA, 22 nt, Human
ugguggcacugacaucagacac

SEQ ID NO: 114870 - RNA, 22 nt, Human
ugguggcagagcaagagcugga

SEQ ID NO: 114871 - RNA, 22 nt, Human
ugguggcagcaggagggccccu

SEQ ID NO: 114872 - RNA, 22 nt, Human
ugguggcaugauagugugaaug

SEQ ID NO: 114873 - RNA, 22 nt, Human
ugguggccuugauggcaucugc

SEQ ID NO: 114874 - RNA, 22 nt, Human
ugguggcugcucccugccuuga

SEQ ID NO: 114875 - RNA, 22 nt, Human
uggugggaguccgcugugcugc

SEQ ID NO: 114876 - RNA, 22 nt, Human
uggugguccacaaauggguaca

SEQ ID NO: 114877 - RNA, 15 nt, Human
uggugguguugagac

SEQ ID NO: 114878 - RNA, 22 nt, Human
uggugucuccauccugcccugc

SEQ ID NO: 114879 - RNA, 22 nt, Human
uggugucuuggaaguaggugcu

SEQ ID NO: 114880 - RNA, 22 nt, Human
ugguguuuaaugggcuguuuau

SEQ ID NO: 114881 - RNA, 22 nt, Human
ugguuaaaugggaagagcaaca

SEQ ID NO: 114882 - RNA, 22 nt, Human
ugguuacauauccuuuggagcc

SEQ ID NO: 114883 - RNA, 22 nt, Human
ugguuacccagucgcuggaguu

SEQ ID NO: 114884 - RNA, 22 nt, Human
ugguuagacacaugcaugucau

SEQ ID NO: 114885 - RNA, 22 nt, Human
ugguuauaaaaguccucucauu

SEQ ID NO: 114886 - RNA, 22 nt, Human
ugguucauagccucacaggaua

SEQ ID NO: 114887 - RNA, 22 nt, Human
ugguucaugcucauggugauag

SEQ ID NO: 114888 - RNA, 22 nt, Human
ugguuccaguuuucaauagagc

SEQ ID NO: 114889 - RNA, 22 nt, Human
ugguuccuacgcacauugaauu

SEQ ID NO: 114890 - RNA, 22 nt, Human
uuugugauuaauuuucaaccuc

SEQ ID NO: 114891 - RNA, 22 nt, Human
uuugugcaauuuauguacuaua

SEQ ID NO: 114892 - RNA, 22 nt, Human
uuugugcacauugcuuuucuau

SEQ ID NO: 114893 - RNA, 22 nt, Human
uuugugcagauaggagacaauc

SEQ ID NO: 114894 - RNA, 22 nt, Human
uuugugcaggugugucagaucg

SEQ ID NO: 114895 - RNA, 22 nt, Human
uuugugcauaaagggcuauagu

SEQ ID NO: 114896 - RNA, 22 nt, Human
uuuguggauggaaaauagcagg

SEQ ID NO: 114897 - RNA, 22 nt, Human
uuugugugguggauacugggua

SEQ ID NO: 114898 - RNA, 22 nt, Human
uuuguguguauauccuuccaga

SEQ ID NO: 114899 - RNA, 22 nt, Human
uuuguguguguauaggaaagga

SEQ ID NO: 114900 - RNA, 22 nt, Human
uuuguguuggaagaaaugcuac

SEQ ID NO: 114901 - RNA, 22 nt, Human
uuuguguuguuuuaagccacua

SEQ ID NO: 114902 - RNA, 22 nt, Human
uuuguguuuguacaaugcacua

SEQ ID NO: 114903 - RNA, 22 nt, Human
uuuguguuuucacuagcagugu

SEQ ID NO: 114904 - RNA, 22 nt, Human
uuuguguuuucccauacuauug

SEQ ID NO: 114905 - RNA, 22 nt, Human
uuuguuaaauauuuauugagug

SEQ ID NO: 114906 - RNA, 22 nt, Human
uuuguuaaggaguauugcuucu

SEQ ID NO: 114907 - RNA, 22 nt, Human
uuuguuacauuaaaaaguaggu

SEQ ID NO: 114908 - RNA, 22 nt, Human
uuuguuagagugugggaggcug

SEQ ID NO: 114909 - RNA, 22 nt, Human
uuuguucaaaaauuauaagaua

SEQ ID NO: 114910 - RNA, 22 nt, Human
uuuguucaauccagacaauagc

SEQ ID NO: 114911 - RNA, 22 nt, Human
uuuguucacugauguaucccaa

SEQ ID NO: 114912 - RNA, 21 nt, Human
uuuguucaggggcaaaguuaa

SEQ ID NO: 114913 - RNA, 22 nt, Human
uuuguucauaauggcaaagaga

SEQ ID NO: 114914 - RNA, 22 nt, Human
uuuguucauuaaaagugcugua

SEQ ID NO: 114915 - RNA, 22 nt, Human
uuuguucuagaucguguuugug

SEQ ID NO: 114916 - RNA, 22 nt, Human
uuuguucuauuuuagagaugaa

SEQ ID NO: 114917 - RNA, 22 nt, Human
uuuguucugcaucacagaaaaa

SEQ ID NO: 114918 - RNA, 22 nt, Human
uuuguugacaucccuguacuuu

SEQ ID NO: 114919 - RNA, 22 nt, Human
uuuguugguugcacuggugggu

SEQ ID NO: 114920 - RNA, 22 nt, Human
uuuguuucugcaauaccuauag

SEQ ID NO: 114921 - RNA, 22 nt, Human
uuuuaaaggcuguaugaccaag

SEQ ID NO: 114922 - RNA, 22 nt, Human
uuuuaagaugcuaguauuucag

SEQ ID NO: 114923 - RNA, 22 nt, Human
uuuuaagcaaaagaauggugug

SEQ ID NO: 114924 - RNA, 19 nt, Human
uuuuaaguccucucuauuc

SEQ ID NO: 114925 - RNA, 22 nt, Human
uuuuaaguuggauugcuaagua

SEQ ID NO: 114926 - RNA, 22 nt, Human
uuuuaaguuuauuccaguacau

SEQ ID NO: 114927 - RNA, 22 nt, Human
uuuuaaucaugcuucuaugucc

SEQ ID NO: 114928 - RNA, 22 nt, Human
uuuuacaccucagaugagcaga

SEQ ID NO: 114929 - RNA, 22 nt, Human
uuuuacacuucgguugugugca

SEQ ID NO: 114930 - RNA, 22 nt, Human
uuuuacaggucauagguauagu

SEQ ID NO: 114931 - RNA, 22 nt, Human
uuuuacaggugugagccaccau

SEQ ID NO: 114932 - RNA, 18 nt, Human
uuuuacucauagcaggcc

SEQ ID NO: 114933 - RNA, 22 nt, Human
uuuuacuucauuccugacuuca

SEQ ID NO: 114934 - RNA, 22 nt, Human
uuuuagaaagaucccuggcagg

SEQ ID NO: 114935 - RNA, 22 nt, Human
uuuuagaaguucaugugggauu

SEQ ID NO: 114936 - RNA, 20 nt, Human
uuuuagcacuuguuauggug

SEQ ID NO: 114937 - RNA, 23 nt, Human
uuuuagugacuccuuuaucugcc

SEQ ID NO: 114938 - RNA, 22 nt, Human
uuuuaguuacugcaguagcaaa

SEQ ID NO: 114939 - RNA, 22 nt, Human
uuuuauacacaugaacaugcag

SEQ ID NO: 114940 - RNA, 22 nt, Human
uuuuauacuuaagacagaguuu

SEQ ID NO: 114941 - RNA, 22 nt, Human
uuuuauagcugaauaguauucc

SEQ ID NO: 114942 - RNA, 22 nt, Human
uuuuaucaaucauuaagacauu

SEQ ID NO: 114943 - RNA, 22 nt, Human
uuuuaucauuacccagcugaaa

SEQ ID NO: 114944 - RNA, 22 nt, Human
uuuuaugaagauaauuuucuga

SEQ ID NO: 114945 - RNA, 22 nt, Human
uuuuaugagugucccucugugg

SEQ ID NO: 114946 - RNA, 22 nt, Human
uuuuaugauugagcuggcuaca

SEQ ID NO: 114947 - RNA, 20 nt, Human
uuuuaugucaccuuccuguc

SEQ ID NO: 114948 - RNA, 22 nt, Human
uuuuaugugcuggacuggcagu

SEQ ID NO: 114949 - RNA, 22 nt, Human
uuuuauguugcuauaauaggua

SEQ ID NO: 114950 - RNA, 22 nt, Human
uuuuauuaguggcuagaugggg

SEQ ID NO: 114951 - RNA, 22 nt, Human
uuuuauucucaagacaauggga

SEQ ID NO: 114952 - RNA, 22 nt, Human
uuuuauugucaaugaagacaga

SEQ ID NO: 114953 - RNA, 16 nt, Human
uuuuauugugacagcc

SEQ ID NO: 114954 - RNA, 22 nt, Human
uuuucacaaggguccaacuagu

SEQ ID NO: 114955 - RNA, 22 nt, Human
uuuucacauugucccagcacua

SEQ ID NO: 114956 - RNA, 22 nt, Human
uuuucacuuaaggaauuucaug

SEQ ID NO: 114957 - RNA, 22 nt, Human
ugucugaaucucgguuuccuca

SEQ ID NO: 114958 - RNA, 22 nt, Human
ugucugagcgagaaaguagugu

SEQ ID NO: 114959 - RNA, 22 nt, Human
ugucugagcuggggcagacaga

SEQ ID NO: 114960 - RNA, 22 nt, Human
ugucugagcuuuaugauggaag

SEQ ID NO: 114961 - RNA, 19 nt, Human
ugucugaguaugcugacaa

SEQ ID NO: 114962 - RNA, 22 nt, Human
ugucugagucaugcagagauau

SEQ ID NO: 114963 - RNA, 22 nt, Human
ugucugaguuagcucuucucag

SEQ ID NO: 114964 - RNA, 18 nt, Human
ugucugaguucuuccauu

SEQ ID NO: 114965 - RNA, 22 nt, Human
ugucugaugauagugucucucc

SEQ ID NO: 114966 - RNA, 22 nt, Human
ugucugcagaagauggcauggg

SEQ ID NO: 114967 - RNA, 22 nt, Human
ugucugccaaagcuuccuccug

SEQ ID NO: 114968 - RNA, 22 nt, Human
ugucugccaccccaucaagcuc

SEQ ID NO: 114969 - RNA, 22 nt, Human
ugucugccauuagcccagucca

SEQ ID NO: 114970 - RNA, 22 nt, Human
ugucugcccucaacccagaggc

SEQ ID NO: 114971 - RNA, 21 nt, Human
ugucugccugcuucuucacuc

SEQ ID NO: 114972 - RNA, 22 nt, Human
ugucugcuagcugguggcaauu

SEQ ID NO: 114973 - RNA, 21 nt, Human
ugucugcugaaggcuggucac

SEQ ID NO: 114974 - RNA, 22 nt, Human
ugucugcugaugucacauagcc

SEQ ID NO: 114975 - RNA, 22 nt, Human
ugucugcugguugggagcuuaa

SEQ ID NO: 114976 - RNA, 22 nt, Human
ugucuggaugucuggagcaucg

SEQ ID NO: 114977 - RNA, 23 nt, Human
ugucuggcucauggugggucuca

SEQ ID NO: 114978 - RNA, 22 nt, Human
ugucugggagacugaucacccg

SEQ ID NO: 114979 - RNA, 22 nt, Human
ugucugggauguaauuccugcc

SEQ ID NO: 114980 - RNA, 22 nt, Human
ugucugggauguuggcagccac

SEQ ID NO: 114981 - RNA, 22 nt, Human
ugucuggggaacugugcaucca

SEQ ID NO: 114982 - RNA, 22 nt, Human
ugucugggucaccccuccuggc

SEQ ID NO: 114983 - RNA, 22 nt, Human
ugucuggguuuugggucauauu

SEQ ID NO: 114984 - RNA, 23 nt, Human
ugucugguucaugcuuauuuugg

SEQ ID NO: 114985 - RNA, 23 nt, Human
ugucugguuucuuuuauuuagca

SEQ ID NO: 114986 - RNA, 22 nt, Human
ugucugguuugaaguccaugau

SEQ ID NO: 114987 - RNA, 22 nt, Human
ugucuguauugaggugcauauu

SEQ ID NO: 114988 - RNA, 22 nt, Human
ugucugucagauauuaaguuuc

SEQ ID NO: 114989 - RNA, 17 nt, Human
ugucugucaucaguucc

SEQ ID NO: 114990 - RNA, 23 nt, Human
ugucugucauggaauuucaaggu

SEQ ID NO: 114991 - RNA, 22 nt, Human
ugucuguccaucugucugggac

SEQ ID NO: 114992 - RNA, 22 nt, Human
ugucugucugcacagcucaugg

SEQ ID NO: 114993 - RNA, 22 nt, Human
ugucugugacagaccuuugcua

SEQ ID NO: 114994 - RNA, 22 nt, Human
ugucugugaccucuuaggcaag

SEQ ID NO: 114995 - RNA, 20 nt, Human
ugucugugccacggcacucc

SEQ ID NO: 114996 - RNA, 22 nt, Human
ugucugugcccaaggcucccgg

SEQ ID NO: 114997 - RNA, 22 nt, Human
ugucuguggcaauuguggguaa

SEQ ID NO: 114998 - RNA, 22 nt, Human
ugucugugggcaacgccuccca

SEQ ID NO: 114999 - RNA, 22 nt, Human
ugucuguuauugguguauaaga

SEQ ID NO: 115000 - RNA, 22 nt, Human
ugucuuaacauaaaaggaaauc

SEQ ID NO: 115001 - RNA, 22 nt, Human
ugucuuaaguagauuacagccu

SEQ ID NO: 115002 - RNA, 22 nt, Human
ugucuuaauaguauccagguuc

SEQ ID NO: 115003 - RNA, 22 nt, Human
ugucuuauggcauguccacugg

SEQ ID NO: 115004 - RNA, 22 nt, Human
ugucuuauuaagaccagugacu

SEQ ID NO: 115005 - RNA, 22 nt, Human
ugucuucaucucagacacaguu

SEQ ID NO: 115006 - RNA, 20 nt, Human
ugucuuccagcagguguuua

SEQ ID NO: 115007 - RNA, 23 nt, Human
ugucuucgacuccugcgugcuuc

SEQ ID NO: 115008 - RNA, 22 nt, Human
ugucuucgcuacaaugaaaagg

SEQ ID NO: 115009 - RNA, 22 nt, Human
ugucuucuaccuugacagcauu

SEQ ID NO: 115010 - RNA, 22 nt, Human
ugucuucuguauucaagucuau

SEQ ID NO: 115011 - RNA, 22 nt, Human
ugucuucuucauaaggagagug

SEQ ID NO: 115012 - RNA, 22 nt, Human
ugucuugacuuuagagccagga

SEQ ID NO: 115013 - RNA, 22 nt, Human
ugucuugaggcgcaguguagau

SEQ ID NO: 115014 - RNA, 22 nt, Human
ugucuugauuagaaugaugggc

SEQ ID NO: 115015 - RNA, 22 nt, Human
ugucuugucugugagggcauug

SEQ ID NO: 115016 - RNA, 22 nt, Human
ugucuuuaagcaaacaguguuu

SEQ ID NO: 115017 - RNA, 22 nt, Human
ugucuuuacuuagaaguucagg

SEQ ID NO: 115018 - RNA, 22 nt, Human
ugucuuuagccacuugccucuu

SEQ ID NO: 115019 - RNA, 22 nt, Human
ugucuuuagccagcagucuucu

SEQ ID NO: 115020 - RNA, 22 nt, Human
ugucuuuaguugcuuagauuug

SEQ ID NO: 115021 - RNA, 22 nt, Human
ugucuuuauauauuuggaaaau

SEQ ID NO: 115022 - RNA, 22 nt, Human
ugucuuucugcaccaccucaca

SEQ ID NO: 115023 - RNA, 23 nt, Human
ugucuuugaaugggcuguagaca

SEQ ID NO: 115024 - RNA, 22 nt, Human
ugucuuuguguacaggaucgcc

SEQ ID NO: 115025 - RNA, 22 nt, Human
ugucuuuguuauuguggacagg

SEQ ID NO: 115026 - RNA, 22 nt, Human
ugucuuuuggagcaucuuucuu

SEQ ID NO: 115027 - RNA, 22 nt, Human
ugugaaaaaaguucuagaagga

SEQ ID NO: 115028 - RNA, 22 nt, Human
ugugaaaagggcuuuguacaaa

SEQ ID NO: 115029 - RNA, 22 nt, Human
ugugaaagauacuaggcagagg

SEQ ID NO: 115030 - RNA, 22 nt, Human
ugugaaaggggucacagggaaa

SEQ ID NO: 115031 - RNA, 22 nt, Human
ugugaaagucaaauuaauugaa

SEQ ID NO: 115032 - RNA, 22 nt, Human
ugugaaaucacaggcuauuuag

SEQ ID NO: 115033 - RNA, 22 nt, Human
ugugaaaugaguauauuugaau

SEQ ID NO: 115034 - RNA, 22 nt, Human
ugugaaaugcuauugugacaaa

SEQ ID NO: 115035 - RNA, 22 nt, Human
ugugaaauguggauguuaauag

SEQ ID NO: 115036 - RNA, 22 nt, Human
ugugaaauguguguauaauuaa

SEQ ID NO: 115037 - RNA, 22 nt, Human
ugugaaauugaaugcccauugc

SEQ ID NO: 115038 - RNA, 22 nt, Human
ugugaacaguaugucauuucac

SEQ ID NO: 115039 - RNA, 22 nt, Human
ugugaaccuuggugagucagua

SEQ ID NO: 115040 - RNA, 22 nt, Human
ugugaacuggcagguggacggg

SEQ ID NO: 115041 - RNA, 22 nt, Human
ugugaagaguagacauguggug

SEQ ID NO: 115042 - RNA, 22 nt, Human
ugugaaggcagagccagugaaa

SEQ ID NO: 115043 - RNA, 23 nt, Human
ugugaagguggguccaagggcug

SEQ ID NO: 115044 - RNA, 22 nt, Human
ugugaauagucagcauuuuguu

SEQ ID NO: 115045 - RNA, 22 nt, Human
ugugaauagugccgcaauaaac

SEQ ID NO: 115046 - RNA, 22 nt, Human
ugugacagaauuggucuguucu

SEQ ID NO: 115047 - RNA, 22 nt, Human
ugugacagaucucuauacauga

SEQ ID NO: 115048 - RNA, 23 nt, Human
ugugacagugacaauacugacuu

SEQ ID NO: 115049 - RNA, 22 nt, Human
ugugacagugccagcuucauag

SEQ ID NO: 115050 - RNA, 22 nt, Human
ugugaccauaauuuguaaauaa

SEQ ID NO: 115051 - RNA, 22 nt, Human
ugugacugaggcuccaagcuag

SEQ ID NO: 115052 - RNA, 22 nt, Human
ugugacuguggacuuuuguggg

SEQ ID NO: 115053 - RNA, 22 nt, Human
ugugacuuaauccuuggguggg

SEQ ID NO: 115054 - RNA, 22 nt, Human
ugugagaaaaugauugcacagu

SEQ ID NO: 115055 - RNA, 22 nt, Human
ugugagacguaggccaucgagg

SEQ ID NO: 115056 - RNA, 20 nt, Human
ugugagaggguggcuugccc

SEQ ID NO: 115057 - RNA, 22 nt, Human
ugugagcaagauucagagauuc

SEQ ID NO: 115058 - RNA, 22 nt, Human
ugugagcacuauggcuaggcuc

SEQ ID NO: 115059 - RNA, 17 nt, Human
ugugagcaucuauagaa

SEQ ID NO: 115060 - RNA, 22 nt, Human
ugugagcuuaggacagggcuau

SEQ ID NO: 115061 - RNA, 22 nt, Human
ugugaggagggucaaacugagu

SEQ ID NO: 115062 - RNA, 22 nt, Human
ugugaggauaaaaaggaaggag

SEQ ID NO: 115063 - RNA, 22 nt, Human
ugugaggauguuaaggggauga

SEQ ID NO: 115064 - RNA, 22 nt, Human
ugugaggauuaaaugcauagug

SEQ ID NO: 115065 - RNA, 22 nt, Human
ugugaggccuagacagccuggg

SEQ ID NO: 115066 - RNA, 22 nt, Human
uggcuucucaaaauaacugguu

SEQ ID NO: 115067 - RNA, 22 nt, Human
uggcuucucagaauacucugga

SEQ ID NO: 115068 - RNA, 22 nt, Human
uggcuucucaguuucauaauga

SEQ ID NO: 115069 - RNA, 22 nt, Human
uggcuucucuggcauccccauc

SEQ ID NO: 115070 - RNA, 22 nt, Human
uggcuucugcucccagaaugau

SEQ ID NO: 115071 - RNA, 22 nt, Human
uggcuucuggcuggugagaaau

SEQ ID NO: 115072 - RNA, 19 nt, Human
uggcuucuguuuucauguu

SEQ ID NO: 115073 - RNA, 16 nt, Human
uggcuucuuauuucua

SEQ ID NO: 115074 - RNA, 22 nt, Human
uggcuucuucauaugugaucuu

SEQ ID NO: 115075 - RNA, 22 nt, Human
uggcuucuugucuaauuuguua

SEQ ID NO: 115076 - RNA, 22 nt, Human
uggcuucuuuccacuguccugu

SEQ ID NO: 115077 - RNA, 22 nt, Human
uggcuucuuucuuuccaugugu

SEQ ID NO: 115078 - RNA, 23 nt, Human
uggcuugcuaauguuccaaauaa

SEQ ID NO: 115079 - RNA, 22 nt, Human
uggcuuggugagcagaguguag

SEQ ID NO: 115080 - RNA, 22 nt, Human
uggcuuuaaaaugguuugguau

SEQ ID NO: 115081 - RNA, 20 nt, Human
uggcuuuaaguuuuuugcua

SEQ ID NO: 115082 - RNA, 22 nt, Human
uggcuuuacacauccacugccu

SEQ ID NO: 115083 - RNA, 22 nt, Human
uggcuuuacuuaaacugaauca

SEQ ID NO: 115084 - RNA, 22 nt, Human
uggcuuuagguugcauguuucu

SEQ ID NO: 115085 - RNA, 22 nt, Human
uggcuuuauaaauccacugguu

SEQ ID NO: 115086 - RNA, 22 nt, Human
uggcuuugaaauccagucauua

SEQ ID NO: 115087 - RNA, 21 nt, Human
uggcuuuuauggagcucuggg

SEQ ID NO: 115088 - RNA, 22 nt, Human
uggcuuuugaaaaggugaugua

SEQ ID NO: 115089 - RNA, 22 nt, Human
ugggaaagccagcagugucacc

SEQ ID NO: 115090 - RNA, 20 nt, Human
ugggaaagucuaagugccuc

SEQ ID NO: 115091 - RNA, 22 nt, Human
ugggaaauuguauuucuauuuc

SEQ ID NO: 115092 - RNA, 22 nt, Human
ugggaacauuuugagcugagag

SEQ ID NO: 115093 - RNA, 22 nt, Human
ugggaaccacaggacucggcac

SEQ ID NO: 115094 - RNA, 22 nt, Human
ugggaaccaggacuggcugagg

SEQ ID NO: 115095 - RNA, 22 nt, Human
ugggaacugcagguguuacaua

SEQ ID NO: 115096 - RNA, 22 nt, Human
ugggaagacuccucaggaggcg

SEQ ID NO: 115097 - RNA, 22 nt, Human
ugggaagaggagcacuggaaug

SEQ ID NO: 115098 - RNA, 22 nt, Human
ugggaagaugauaauucacagu

SEQ ID NO: 115099 - RNA, 22 nt, Human
ugggaagccuagcagacagcug

SEQ ID NO: 115100 - RNA, 22 nt, Human
ugggaagcuuuaaauggguguc

SEQ ID NO: 115101 - RNA, 22 nt, Human
ugggaaggacagaacauaauug

SEQ ID NO: 115102 - RNA, 22 nt, Human
ugggaaggacgugucaguggca

SEQ ID NO: 115103 - RNA, 22 nt, Human
ugggaagggccgauggagccuc

SEQ ID NO: 115104 - RNA, 22 nt, Human
ugggaaguuguaccuucuguua

SEQ ID NO: 115105 - RNA, 18 nt, Human
ugggaaugcucaaggccc

SEQ ID NO: 115106 - RNA, 22 nt, Human
ugggaaugcugauuucaggaac

SEQ ID NO: 115107 - RNA, 22 nt, Human
ugggacagagugagcuuuggcc

SEQ ID NO: 115108 - RNA, 22 nt, Human
ugggacagauuauaagucugca

SEQ ID NO: 115109 - RNA, 22 nt, Human
ugggacaggaugaccagaaggu

SEQ ID NO: 115110 - RNA, 22 nt, Human
ugggacagggaaucugaucccc

SEQ ID NO: 115111 - RNA, 22 nt, Human
ugggaccaagucauuucuuuag

SEQ ID NO: 115112 - RNA, 22 nt, Human
ugggaccugaagcagguuggca

SEQ ID NO: 115113 - RNA, 22 nt, Human
ugggaccugcccuggccccauc

SEQ ID NO: 115114 - RNA, 22 nt, Human
ugggaccuguuacauugaguua

SEQ ID NO: 115115 - RNA, 23 nt, Human
ugggaccuguuugcccacagaug

SEQ ID NO: 115116 - RNA, 22 nt, Human
ugggacugagaauaugaugggg

SEQ ID NO: 115117 - RNA, 22 nt, Human
ugggacugcucuugcugggguc

SEQ ID NO: 115118 - RNA, 22 nt, Human
ugggacuuguguggcaguauuu

SEQ ID NO: 115119 - RNA, 22 nt, Human
ugggagaaagaacccugaguga

SEQ ID NO: 115120 - RNA, 22 nt, Human
ugggagaauauauuuaaaacuu

SEQ ID NO: 115121 - RNA, 22 nt, Human
ugggagacuccagaacugaucc

SEQ ID NO: 115122 - RNA, 23 nt, Human
ugggagacuuuucauuuuguucu

SEQ ID NO: 115123 - RNA, 22 nt, Human
ugggagagaauaaucaauaggu

SEQ ID NO: 115124 - RNA, 22 nt, Human
ugggagagcagagaacccucuu

SEQ ID NO: 115125 - RNA, 22 nt, Human
ugggagaggcugccaucuugca

SEQ ID NO: 115126 - RNA, 22 nt, Human
ugggagcacucuuugggaagca

SEQ ID NO: 115127 - RNA, 22 nt, Human
ugggagcagcauugccaugugc

SEQ ID NO: 115128 - RNA, 22 nt, Human
ugggagcagcugggaacacagc

SEQ ID NO: 115129 - RNA, 22 nt, Human
ugggagcaguugcaucuccagu

SEQ ID NO: 115130 - RNA, 22 nt, Human
ugggagcaguugugaagcucag

SEQ ID NO: 115131 - RNA, 22 nt, Human
ugggagccauuuuagaggcugc

SEQ ID NO: 115132 - RNA, 22 nt, Human
ugggagcuccuggagggcagga

SEQ ID NO: 115133 - RNA, 20 nt, Human
ugggagcuggugaggucuca

SEQ ID NO: 115134 - RNA, 22 nt, Human
ugggaggaagugcuaaugggag

SEQ ID NO: 115135 - RNA, 22 nt, Human
ugggaggacuugugggcuucau

SEQ ID NO: 115136 - RNA, 22 nt, Human
ugggaggcagaaguugacugga

SEQ ID NO: 115137 - RNA, 22 nt, Human
ugggaggcccaggccuggcagg

SEQ ID NO: 115138 - RNA, 22 nt, Human
ugggaguagaugaggagugggc

SEQ ID NO: 115139 - RNA, 22 nt, Human
ugggagucaacccucacgagca

SEQ ID NO: 115140 - RNA, 22 nt, Human
ugggagucaucguguuuggauc

SEQ ID NO: 115141 - RNA, 22 nt, Human
uguuuacugcauucuauuugcu

SEQ ID NO: 115142 - RNA, 22 nt, Human
uguuuacuuaaauguuuucaua

SEQ ID NO: 115143 - RNA, 22 nt, Human
uguuuacuuaugugggucacau

SEQ ID NO: 115144 - RNA, 22 nt, Human
uguuuacuugagguggaaacaa

SEQ ID NO: 115145 - RNA, 21 nt, Human
uguuuauggaaaagagacaaa

SEQ ID NO: 115146 - RNA, 22 nt, Human
uguuuauugcagugcugggcug

SEQ ID NO: 115147 - RNA, 18 nt, Human
uguuuauuuuucucuuac

SEQ ID NO: 115148 - RNA, 22 nt, Human
uguuucaaaacagugauaauuu

SEQ ID NO: 115149 - RNA, 22 nt, Human
uguuucaaagguuauacaguca

SEQ ID NO: 115150 - RNA, 22 nt, Human
uguuucaaauuacuugaggauu

SEQ ID NO: 115151 - RNA, 17 nt, Human
uguuucacuuggggaaa

SEQ ID NO: 115152 - RNA, 22 nt, Human
uguuucagagcacugggcuuau

SEQ ID NO: 115153 - RNA, 22 nt, Human
uguuucaugaaacauguuuagg

SEQ ID NO: 115154 - RNA, 22 nt, Human
uguuucauguggacauaguugu

SEQ ID NO: 115155 - RNA, 22 nt, Human
uguuuccaaagucuuuucuuaa

SEQ ID NO: 115156 - RNA, 22 nt, Human
uguuuccaaaugguauaaagac

SEQ ID NO: 115157 - RNA, 22 nt, Human
uguuuccagaauguagcugcuu

SEQ ID NO: 115158 - RNA, 22 nt, Human
uguuuccccaaccccacaagua

SEQ ID NO: 115159 - RNA, 22 nt, Human
uguuuccuucugucucuuugga

SEQ ID NO: 115160 - RNA, 23 nt, Human
uguuucuagaaucauugaugucu

SEQ ID NO: 115161 - RNA, 22 nt, Human
uguuucuaucuggaucaauaga

SEQ ID NO: 115162 - RNA, 22 nt, Human
uguuucugggugugucucaccu

SEQ ID NO: 115163 - RNA, 20 nt, Human
uguuucuuuuaaugagcggc

SEQ ID NO: 115164 - RNA, 16 nt, Human
uguuugcaaagcaauc

SEQ ID NO: 115165 - RNA, 22 nt, Human
uguuugcucugacuaucuugcg

SEQ ID NO: 115166 - RNA, 22 nt, Human
uguuuguagagacagcugaugc

SEQ ID NO: 115167 - RNA, 22 nt, Human
uguuuguauggaccuguucuau

SEQ ID NO: 115168 - RNA, 20 nt, Human
uguuugugccagcuuuguca

SEQ ID NO: 115169 - RNA, 22 nt, Human
uguuuguucccucucuuuccug

SEQ ID NO: 115170 - RNA, 22 nt, Human
uguuuuagcugacacauggagc

SEQ ID NO: 115171 - RNA, 22 nt, Human
uguuuucuauuaccugagauug

SEQ ID NO: 115172 - RNA, 22 nt, Human
uguuuucucuugaaaagcaguc

SEQ ID NO: 115173 - RNA, 17 nt, Human
uguuuucugcuaccuuu

SEQ ID NO: 115174 - RNA, 22 nt, Human
uguuuugcuucucuguuuccca

SEQ ID NO: 115175 - RNA, 21 nt, Human
uggucugaaaguauuuguggc

SEQ ID NO: 115176 - RNA, 22 nt, Human
uggucugaacacauuuuaggua

SEQ ID NO: 115177 - RNA, 22 nt, Human
uggucugagcaacugcccuauc

SEQ ID NO: 115178 - RNA, 22 nt, Human
uggucugauaccggauuccagu

SEQ ID NO: 115179 - RNA, 22 nt, Human
uggucugauggucccaccaccg

SEQ ID NO: 115180 - RNA, 22 nt, Human
uggucugauuccaccuaacuga

SEQ ID NO: 115181 - RNA, 22 nt, Human
uggucugauucuugcuccccaa

SEQ ID NO: 115182 - RNA, 22 nt, Human
uggucugccuggaucacagccc

SEQ ID NO: 115183 - RNA, 17 nt, Human
uggucuggaagaacuga

SEQ ID NO: 115184 - RNA, 22 nt, Human
uggucuuugagagaaguugauu

SEQ ID NO: 115185 - RNA, 18 nt, Human
uggugaaggguggaggag

SEQ ID NO: 115186 - RNA, 22 nt, Human
uggugaagucagcggagcccgg

SEQ ID NO: 115187 - RNA, 20 nt, Human
uggugagagcaccugauggg

SEQ ID NO: 115188 - RNA, 22 nt, Human
uggugagagcugaccgugcgag

SEQ ID NO: 115189 - RNA, 22 nt, Human
uggugcaagucucugaggaggg

SEQ ID NO: 115190 - RNA, 22 nt, Human
uggugcaggaguuggcagggac

SEQ ID NO: 115191 - RNA, 22 nt, Human
uggugcagguguugaugcagga

SEQ ID NO: 115192 - RNA, 23 nt, Human
uggugccacagcugaagucaggu

SEQ ID NO: 115193 - RNA, 22 nt, Human
uggugccacccuccuucagcug

SEQ ID NO: 115194 - RNA, 22 nt, Human
uggugccacuucuuaggcuggu

SEQ ID NO: 115195 - RNA, 18 nt, Human
uggugccuuucacucuuc

SEQ ID NO: 115196 - RNA, 22 nt, Human
uggugcugagaugaagugcucc

SEQ ID NO: 115197 - RNA, 22 nt, Human
uggugcuguggaggggcagaag

SEQ ID NO: 115198 - RNA, 20 nt, Human
ugguggagagaagcuauuug

SEQ ID NO: 115199 - RNA, 22 nt, Human
ugguggcaacauugcuggagug

SEQ ID NO: 115200 - RNA, 22 nt, Human
ugguggcaucaauugacuucuc

SEQ ID NO: 115201 - RNA, 22 nt, Human
ugguggccaauucacagggcuc

SEQ ID NO: 115202 - RNA, 20 nt, Human
ugguggccagugcugcaggc

SEQ ID NO: 115203 - RNA, 22 nt, Human
ugguggccgaagcccucucuca

SEQ ID NO: 115204 - RNA, 22 nt, Human
ugguggcuguugcagaacugag

SEQ ID NO: 115205 - RNA, 22 nt, Human
ugguggcuucugaggauggcga

SEQ ID NO: 115206 - RNA, 22 nt, Human
uggugggacaucugaggagagg

SEQ ID NO: 115207 - RNA, 23 nt, Human
uggugggcccugcuugcucacug

SEQ ID NO: 115208 - RNA, 22 nt, Human
ugguggggauucccucccuggc

SEQ ID NO: 115209 - RNA, 22 nt, Human
ugguggggucaucgucagaugc

SEQ ID NO: 115210 - RNA, 22 nt, Human
ugguggucaaagccaguguucu

SEQ ID NO: 115211 - RNA, 22 nt, Human
uggugguuaugcgcuuuguggg

SEQ ID NO: 115212 - RNA, 22 nt, Human
uggugucaagcagaacugugaa

SEQ ID NO: 115213 - RNA, 22 nt, Human
uggugucucuuaguacauagau

SEQ ID NO: 115214 - RNA, 22 nt, Human
uggugugaggcgggaguguagu

SEQ ID NO: 115215 - RNA, 22 nt, Human
uggugugggcguggcaggcaag

SEQ ID NO: 115216 - RNA, 22 nt, Human
ugguuaaaaugcagauucagua

SEQ ID NO: 115217 - RNA, 22 nt, Human
ugguuacacagcauguggacuu

SEQ ID NO: 115218 - RNA, 22 nt, Human
ugguuagaggcuucuugcuugg

SEQ ID NO: 115219 - RNA, 21 nt, Human
ugguuaguuauuggcagugcc

SEQ ID NO: 115220 - RNA, 22 nt, Human
ugguucaggcaggguguugcug

SEQ ID NO: 115221 - RNA, 22 nt, Human
ugguucauugagaagacugaag

SEQ ID NO: 115222 - RNA, 22 nt, Human
ugguuccaagauggcugccaca

SEQ ID NO: 115223 - RNA, 22 nt, Human
ugguucccuuaacagcuguaua

SEQ ID NO: 115224 - RNA, 22 nt, Human
ugguuccucaagcgcuggcggc

SEQ ID NO: 115225 - RNA, 22 nt, Human
ugguuccucagggcagcuguac

SEQ ID NO: 115226 - RNA, 22 nt, Human
ugguuccuucugcauuuucagc

SEQ ID NO: 115227 - RNA, 22 nt, Human
ugguuggcugagcagagucacu

SEQ ID NO: 115228 - RNA, 22 nt, Human
ugguuuaaccugucucuuauua

SEQ ID NO: 115229 - RNA, 22 nt, Human
ugguuucacggagugccuugcu

SEQ ID NO: 115230 - RNA, 22 nt, Human
ugguuucucugaacucuacgac

SEQ ID NO: 115231 - RNA, 20 nt, Human
uguaaaacaaggugaauccu

SEQ ID NO: 115232 - RNA, 22 nt, Human
uguaaaaccaaaucaaucuagu

SEQ ID NO: 115233 - RNA, 22 nt, Human
uguaaaauaccauuccuuguca

SEQ ID NO: 115234 - RNA, 20 nt, Human
uguaaacaauaguguucuug

SEQ ID NO: 115235 - RNA, 22 nt, Human
uguaaacauauguauguaugua

SEQ ID NO: 115236 - RNA, 22 nt, Human
uguaaacucaguauguuuuacu

SEQ ID NO: 115237 - RNA, 22 nt, Human
uguaaacuguagaaaauacuuu

SEQ ID NO: 115238 - RNA, 22 nt, Human
uguaaagaaauagcauuuguag

SEQ ID NO: 115239 - RNA, 22 nt, Human
uguaaagauuagauuacaugaa

SEQ ID NO: 115240 - RNA, 22 nt, Human
uguaaagcaucucugucauaua

SEQ ID NO: 115241 - RNA, 22 nt, Human
uguaaagcauuuccuaaaucca

SEQ ID NO: 115242 - RNA, 22 nt, Human
uguaaagcuuugaguguuuauc

SEQ ID NO: 115243 - RNA, 22 nt, Human
uguaaaggguguuaaauuacuc

SEQ ID NO: 115244 - RNA, 22 nt, Human
uguaaauaaugcauguaaauca

SEQ ID NO: 115245 - RNA, 22 nt, Human
uguaaaugaaacagcuaaaucc

SEQ ID NO: 115246 - RNA, 22 nt, Human
uguaaauucuauacacuuaaaa

SEQ ID NO: 115247 - RNA, 21 nt, Human
uguaacaaaauacugcagauu

SEQ ID NO: 115248 - RNA, 22 nt, Human
uguaacaagugcuuacuuuggg

SEQ ID NO: 115249 - RNA, 23 nt, Human
uguaacaauucccagccuuugcc

SEQ ID NO: 115250 - RNA, 22 nt, Human
uguaacagcucuccaugugggg

SEQ ID NO: 115251 - RNA, 22 nt, Human
uguaacaguuauaacaaugugg

SEQ ID NO: 115252 - RNA, 22 nt, Human
uguaacauauguaaaagcaccu

SEQ ID NO: 115253 - RNA, 22 nt, Human
uguaacugccauguagccuguc

SEQ ID NO: 115254 - RNA, 22 nt, Human
uguaagaacaacugucaaaugu

SEQ ID NO: 115255 - RNA, 22 nt, Human
uguaagaauaaugauuucuaag

SEQ ID NO: 115256 - RNA, 22 nt, Human
uguaagaugcugggauagauga

SEQ ID NO: 115257 - RNA, 22 nt, Human
uguaagcuucaaauaucuguga

SEQ ID NO: 115258 - RNA, 22 nt, Human
ugggaguccaaggcaggcggau

SEQ ID NO: 115259 - RNA, 22 nt, Human
ugggaguccaagguuuuuauag

SEQ ID NO: 115260 - RNA, 22 nt, Human
ugggagugaggcagagucuauc

SEQ ID NO: 115261 - RNA, 19 nt, Human
ugggaguggggaagguccu

SEQ ID NO: 115262 - RNA, 22 nt, Human
ugggauauaccuauccuagaag

SEQ ID NO: 115263 - RNA, 17 nt, Human
ugggauccgucucugug

SEQ ID NO: 115264 - RNA, 22 nt, Human
ugggaugaggccucuguuguga

SEQ ID NO: 115265 - RNA, 22 nt, Human
ugggaugagggugagccacaug

SEQ ID NO: 115266 - RNA, 22 nt, Human
ugggaugcccugacccucugga

SEQ ID NO: 115267 - RNA, 18 nt, Human
ugggauggagaguaacug

SEQ ID NO: 115268 - RNA, 22 nt, Human
ugggauggagccugaguauagu

SEQ ID NO: 115269 - RNA, 22 nt, Human
ugggauggccuuugaaagccag

SEQ ID NO: 115270 - RNA, 22 nt, Human
ugggaugggaucucgcuguguc

SEQ ID NO: 115271 - RNA, 20 nt, Human
ugggauuguuuuuuagcuuc

SEQ ID NO: 115272 - RNA, 22 nt, Human
ugggcaaaugucacuuucuuuu

SEQ ID NO: 115273 - RNA, 20 nt, Human
ugggcacagcuuuggagggc

SEQ ID NO: 115274 - RNA, 22 nt, Human
ugggcacaggggaauggaugaa

SEQ ID NO: 115275 - RNA, 22 nt, Human
ugggcacuggaagccugcugug

SEQ ID NO: 115276 - RNA, 22 nt, Human
ugggcagaaaucaguaucagau

SEQ ID NO: 115277 - RNA, 22 nt, Human
ugggcagaauugugguaguuaa

SEQ ID NO: 115278 - RNA, 22 nt, Human
ugggcagaguugugaugaacug

SEQ ID NO: 115279 - RNA, 15 nt, Human
ugggcagaucacuug

SEQ ID NO: 115280 - RNA, 22 nt, Human
ugggcagaucuuugguggcuag

SEQ ID NO: 115281 - RNA, 22 nt, Human
ugggcagauguccucugaagug

SEQ ID NO: 115282 - RNA, 20 nt, Human
ugggcagcacugcuggcugg

SEQ ID NO: 115283 - RNA, 22 nt, Human
ugggcagcagaaccaggccgac

SEQ ID NO: 115284 - RNA, 22 nt, Human
ugggcagccaucccagccucuc

SEQ ID NO: 115285 - RNA, 22 nt, Human
uuacugaugaucuggaggggcu

SEQ ID NO: 115286 - RNA, 22 nt, Human
uuacugaugucauuagaaacag

SEQ ID NO: 115287 - RNA, 22 nt, Human
uuacugcuguuaggauauuuuu

SEQ ID NO: 115288 - RNA, 22 nt, Human
uuacuggcugggccugagggcu

SEQ ID NO: 115289 - RNA, 22 nt, Human
uuacuguagaagagaaugauuc

SEQ ID NO: 115290 - RNA, 22 nt, Human
uuacuguucauguuguacacuu

SEQ ID NO: 115291 - RNA, 22 nt, Human
uuacuguuugaaaaaugaaugu

SEQ ID NO: 115292 - RNA, 22 nt, Human
uuacuguuuuuaacuaauugug

SEQ ID NO: 115293 - RNA, 22 nt, Human
uuacuugaaugcugugaucuca

SEQ ID NO: 115294 - RNA, 22 nt, Human
uuacuugauuguggagucugag

SEQ ID NO: 115295 - RNA, 22 nt, Human
uuacuugauuugaaaaucauag

SEQ ID NO: 115296 - RNA, 22 nt, Human
uuacuugcuuauaaucaaaaca

SEQ ID NO: 115297 - RNA, 22 nt, Human
uuacuuucaaaaacuacguggg

SEQ ID NO: 115298 - RNA, 22 nt, Human
uuacuuucaaguggcugggggu

SEQ ID NO: 115299 - RNA, 22 nt, Human
uuacuuugcuuucucauuacag

SEQ ID NO: 115300 - RNA, 22 nt, Human
uuacuuuguucucaagauaugu

SEQ ID NO: 115301 - RNA, 22 nt, Human
uuagaaaaaggcuguggucuua

SEQ ID NO: 115302 - RNA, 22 nt, Human
uuagaaacccagacucuuaggu

SEQ ID NO: 115303 - RNA, 19 nt, Human
uuagaaacuguugacacug

SEQ ID NO: 115304 - RNA, 22 nt, Human
uuagaaagaguauaccagaaac

SEQ ID NO: 115305 - RNA, 22 nt, Human
uuagaaagcuuuccauagucaa

SEQ ID NO: 115306 - RNA, 22 nt, Human
uuagaaaggaaucuucauuuca

SEQ ID NO: 115307 - RNA, 22 nt, Human
uuagaaaggcuuauggugccuu

SEQ ID NO: 115308 - RNA, 22 nt, Human
uuagaaagggugucugaaucug

SEQ ID NO: 115309 - RNA, 22 nt, Human
uuagaaauacaagugagguuga

SEQ ID NO: 115310 - RNA, 21 nt, Human
uuagaacaauauuugguauag

SEQ ID NO: 115311 - RNA, 22 nt, Human
uuagaacacugagaaagugaug

SEQ ID NO: 115312 - RNA, 22 nt, Human
uuagaacauagcaacagaauua

SEQ ID NO: 115313 - RNA, 22 nt, Human
uuagaacaucucucuucugcca

SEQ ID NO: 115314 - RNA, 22 nt, Human
uuagaaccaggguuacgauucu

SEQ ID NO: 115315 - RNA, 22 nt, Human
uuagaaccauaaugaaucaaug

SEQ ID NO: 115316 - RNA, 22 nt, Human
uuagaagcaucaccuguucugg

SEQ ID NO: 115317 - RNA, 22 nt, Human
uuagaagccaggauggagcagg

SEQ ID NO: 115318 - RNA, 21 nt, Human
uuagaagcuaaugcagcuggu

SEQ ID NO: 115319 - RNA, 22 nt, Human
uuagaagucaucuagucuaaaa

SEQ ID NO: 115320 - RNA, 22 nt, Human
uuagaagugaaauagcuguaca

SEQ ID NO: 115321 - RNA, 22 nt, Human
uuagaagugguaaguagaaaga

SEQ ID NO: 115322 - RNA, 22 nt, Human
uuagaauuauuguuuccuucua

SEQ ID NO: 115323 - RNA, 22 nt, Human
uuagagaauuccaaaugacuac

SEQ ID NO: 115324 - RNA, 22 nt, Human
uuagagauacauuuguagcuug

SEQ ID NO: 115325 - RNA, 22 nt, Human
uuagagauugguugacagauuu

SEQ ID NO: 115326 - RNA, 22 nt, Human
uuagagcuacggccuuuaaaaa

SEQ ID NO: 115327 - RNA, 22 nt, Human
uuagaggggcugcugaauggga

SEQ ID NO: 115328 - RNA, 22 nt, Human
uuagaggugucaggagcacagg

SEQ ID NO: 115329 - RNA, 22 nt, Human
uuagagucaaaauggcauguua

SEQ ID NO: 115330 - RNA, 22 nt, Human
uuagaguugaguuucuaugaga

SEQ ID NO: 115331 - RNA, 22 nt, Human
uuagaguuuuaucauugccuua

SEQ ID NO: 115332 - RNA, 22 nt, Human
uuagauaaagugauguaggcua

SEQ ID NO: 115333 - RNA, 22 nt, Human
uuagauaaauuaagacuuuaca

SEQ ID NO: 115334 - RNA, 22 nt, Human
uuagauaaauugcaacuugauu

SEQ ID NO: 115335 - RNA, 22 nt, Human
uuagauaauguuauuguaauuu

SEQ ID NO: 115336 - RNA, 22 nt, Human
uuagcaaaaauaucucauauua

SEQ ID NO: 115337 - RNA, 17 nt, Human
uuagcaaaauagcacuu

SEQ ID NO: 115338 - RNA, 22 nt, Human
uuagcaaacaaaugaaaugguu

SEQ ID NO: 115339 - RNA, 22 nt, Human
uuagcaaacaucuucgugugag

SEQ ID NO: 115340 - RNA, 22 nt, Human
uuagcaaauaucuugaaacagg

SEQ ID NO: 115341 - RNA, 22 nt, Human
uuagcaauuccagguaaguuau

SEQ ID NO: 115342 - RNA, 22 nt, Human
uuagcaauugauucucauaagc

SEQ ID NO: 115343 - RNA, 22 nt, Human
uuagcaccuugaacagacccug

SEQ ID NO: 115344 - RNA, 22 nt, Human
uuagcacuuugauucaugcaga

SEQ ID NO: 115345 - RNA, 22 nt, Human
uuagcagcuaaacugacagacc

SEQ ID NO: 115346 - RNA, 20 nt, Human
uuagcaguagagugugcuuc

SEQ ID NO: 115347 - RNA, 21 nt, Human
uuagcaguuguugauuuccag

SEQ ID NO: 115348 - RNA, 22 nt, Human
uuagcauucuucuggggggcac

SEQ ID NO: 115349 - RNA, 22 nt, Human
uuagccaggggagcagcuuguc

SEQ ID NO: 115350 - RNA, 22 nt, Human
uuagccauauagaaaaagagcu

SEQ ID NO: 115351 - RNA, 22 nt, Human
uuagccauauagugcucuugua

SEQ ID NO: 115352 - RNA, 22 nt, Human
uuagccaugugggaaaaacagc

SEQ ID NO: 115353 - RNA, 22 nt, Human
uuagccauuaaauuacaaggug

SEQ ID NO: 115354 - RNA, 22 nt, Human
uuagccauuaauguccugugca

SEQ ID NO: 115355 - RNA, 22 nt, Human
uuagccauugucagcacauggc

SEQ ID NO: 115356 - RNA, 22 nt, Human
uuagccauuuuauucagcaggu

SEQ ID NO: 115357 - RNA, 22 nt, Human
uuagccuuagaagcuuagcaaa

SEQ ID NO: 115358 - RNA, 22 nt, Human
uuagcuauaguaugucugcuuu

SEQ ID NO: 115359 - RNA, 22 nt, Human
uuagcucagaaaauuuaaacuu

SEQ ID NO: 115360 - RNA, 22 nt, Human
uuagcugaaaaaauucaugcaa

SEQ ID NO: 115361 - RNA, 22 nt, Human
uuagcuuucagccuuucucacc

SEQ ID NO: 115362 - RNA, 21 nt, Human
uuagcuuucuagaaucuuugu

SEQ ID NO: 115363 - RNA, 22 nt, Human
uuagcuuucuuggagaauuaca

SEQ ID NO: 115364 - RNA, 22 nt, Human
uuagcuuucuuuggcagacgug

SEQ ID NO: 115365 - RNA, 22 nt, Human
uuagcuuuucucuauguuggcu

SEQ ID NO: 115366 - RNA, 22 nt, Human
uuaggaaaaugaaauuaccugu

SEQ ID NO: 115367 - RNA, 19 nt, Human
uuaggaaaccacuuuccuu

SEQ ID NO: 115368 - RNA, 22 nt, Human
uuaggaaagaagcagcuaggag

SEQ ID NO: 115369 - RNA, 22 nt, Human
uuaggaaaggguuuucuaacag

SEQ ID NO: 115370 - RNA, 22 nt, Human
uuaggaaaucacuuugcucacc

SEQ ID NO: 115371 - RNA, 22 nt, Human
uuaggaaauuccaccuguauuc

SEQ ID NO: 115372 - RNA, 22 nt, Human
uggggcucaugccugcuggaac

SEQ ID NO: 115373 - RNA, 22 nt, Human
uggggcugaggagccucacucu

SEQ ID NO: 115374 - RNA, 22 nt, Human
uggggcugucccgguuuggcga

SEQ ID NO: 115375 - RNA, 22 nt, Human
uggggcuguccuuagucugaga

SEQ ID NO: 115376 - RNA, 19 nt, Human
uggggcuguguuuugaccc

SEQ ID NO: 115377 - RNA, 22 nt, Human
uggggcuucuccuguaggcuca

SEQ ID NO: 115378 - RNA, 22 nt, Human
ugggggaagagcuuguuaaagu

SEQ ID NO: 115379 - RNA, 22 nt, Human
ugggggagagaggcauucuuuc

SEQ ID NO: 115380 - RNA, 22 nt, Human
ugggggagauagagucugaugg

SEQ ID NO: 115381 - RNA, 22 nt, Human
ugggggagccuucacaguagcu

SEQ ID NO: 115382 - RNA, 22 nt, Human
ugggggagcgacagacauaauu

SEQ ID NO: 115383 - RNA, 22 nt, Human
ugggggauuguuuuaaugaaua

SEQ ID NO: 115384 - RNA, 22 nt, Human
ugggggcacuucgaggucgccu

SEQ ID NO: 115385 - RNA, 22 nt, Human
ugggggcauggaccagccuggc

SEQ ID NO: 115386 - RNA, 17 nt, Human
ugggggcgccagggucu

SEQ ID NO: 115387 - RNA, 22 nt, Human
ugggggcuagaacccagggauu

SEQ ID NO: 115388 - RNA, 22 nt, Human
ugggggcugaguaagaugagau

SEQ ID NO: 115389 - RNA, 22 nt, Human
uggggggcacuucagcacaaug

SEQ ID NO: 115390 - RNA, 22 nt, Human
uggggggcaugaaccuccacgg

SEQ ID NO: 115391 - RNA, 22 nt, Human
ugggggugacuaucucgggaau

SEQ ID NO: 115392 - RNA, 22 nt, Human
ugggggugcugagaagacagga

SEQ ID NO: 115393 - RNA, 22 nt, Human
ugggguacacguggggcaggau

SEQ ID NO: 115394 - RNA, 22 nt, Human
uuagggaaggacagugaagaaa

SEQ ID NO: 115395 - RNA, 22 nt, Human
uuagggaaguguuauucucagg

SEQ ID NO: 115396 - RNA, 22 nt, Human
uuagggacaaauuugcagaacc

SEQ ID NO: 115397 - RNA, 19 nt, Human
uuagggacaugaauucuag

SEQ ID NO: 115398 - RNA, 19 nt, Human
uuagggguaugaaguggua

SEQ ID NO: 115399 - RNA, 22 nt, Human
uuagguaaggauggugacagua

SEQ ID NO: 115400 - RNA, 22 nt, Human
uuagguauuuuguuaugucagc

SEQ ID NO: 115401 - RNA, 22 nt, Human
uuagguuuaagugacuggaauc

SEQ ID NO: 115402 - RNA, 22 nt, Human
uuaguaagcacucacacauucc

SEQ ID NO: 115403 - RNA, 22 nt, Human
uuaguacaagagauuaauuacu

SEQ ID NO: 115404 - RNA, 22 nt, Human
uuaguaguaagagucauaugua

SEQ ID NO: 115405 - RNA, 22 nt, Human
uuagucaaaucauucuguuucu

SEQ ID NO: 115406 - RNA, 22 nt, Human
uuagucuccagcuuaggguuug

SEQ ID NO: 115407 - RNA, 22 nt, Human
uuagucucuuugcauugccaua

SEQ ID NO: 115408 - RNA, 22 nt, Human
uuagucuucuuccuuauauguu

SEQ ID NO: 115409 - RNA, 22 nt, Human
uuagugauaggaagccagauug

SEQ ID NO: 115410 - RNA, 22 nt, Human
uuagugauaggacuuuaaagcc

SEQ ID NO: 115411 - RNA, 22 nt, Human
uuagugcaauucagagaacaau

SEQ ID NO: 115412 - RNA, 22 nt, Human
uuagugcagcugagccccaugg

SEQ ID NO: 115413 - RNA, 22 nt, Human
uuagugcucacguguuagaaag

SEQ ID NO: 115414 - RNA, 22 nt, Human
uuagugcuuggcacacaauaca

SEQ ID NO: 115415 - RNA, 22 nt, Human
uuaguggagaguuauuaucagc

SEQ ID NO: 115416 - RNA, 22 nt, Human
uuagugguacucagggagggaa

SEQ ID NO: 115417 - RNA, 22 nt, Human
uuaguguaaauugugcuugaga

SEQ ID NO: 115418 - RNA, 22 nt, Human
uuaguguauuuucaaauguaga

SEQ ID NO: 115419 - RNA, 22 nt, Human
uuaguguccagaguuuuuauua

SEQ ID NO: 115420 - RNA, 22 nt, Human
uuaguguccuuaugucacaagc

SEQ ID NO: 115421 - RNA, 22 nt, Human
uuagugucuggcuauauuuaaa

SEQ ID NO: 115422 - RNA, 22 nt, Human
uuagugucuucuucauccucug

SEQ ID NO: 115423 - RNA, 22 nt, Human
uuaguguuuaaagguuucagag

SEQ ID NO: 115424 - RNA, 22 nt, Human
uuaguuaaaagauaauuuugga

SEQ ID NO: 115425 - RNA, 22 nt, Human
uuaguuaauugacuauguugca

SEQ ID NO: 115426 - RNA, 22 nt, Human
uuaguucacugcuauaucauca

SEQ ID NO: 115427 - RNA, 22 nt, Human
uuaguucauagaauguaacagg

SEQ ID NO: 115428 - RNA, 22 nt, Human
uuauaaagugagaagugcuaug

SEQ ID NO: 115429 - RNA, 22 nt, Human
uuauaacacugccuugucacca

SEQ ID NO: 115430 - RNA, 22 nt, Human
uuauaagcucugaaaucuccua

SEQ ID NO: 115431 - RNA, 22 nt, Human
uuauacaccaucacugccuugg

SEQ ID NO: 115432 - RNA, 22 nt, Human
uuauacauguguuuugagauga

SEQ ID NO: 115433 - RNA, 22 nt, Human
uuauaccugaagcaggugaugu

SEQ ID NO: 115434 - RNA, 22 nt, Human
uuauacuaaaacgcauugaauu

SEQ ID NO: 115435 - RNA, 22 nt, Human
uuauacuuuauacuacaucauu

SEQ ID NO: 115436 - RNA, 22 nt, Human
uuauagaauccaguuguuguau

SEQ ID NO: 115437 - RNA, 22 nt, Human
uuauagaaugguggauuuucug

SEQ ID NO: 115438 - RNA, 22 nt, Human
uuauagaugccuugaguaaaug

SEQ ID NO: 115439 - RNA, 22 nt, Human
uuauagguccacugcaauuugc

SEQ ID NO: 115440 - RNA, 22 nt, Human
uuauaguaugugcauaugugug

SEQ ID NO: 115441 - RNA, 22 nt, Human
uuauaguuaugaaagacugagg

SEQ ID NO: 115442 - RNA, 19 nt, Human
uuauauacuugguuucucu

SEQ ID NO: 115443 - RNA, 22 nt, Human
uuauauaucuugauuuguucca

SEQ ID NO: 115444 - RNA, 22 nt, Human
uuauaucuuuuuacaucucucc

SEQ ID NO: 115445 - RNA, 22 nt, Human
uuauaugaguaucauaucacuu

SEQ ID NO: 115446 - RNA, 22 nt, Human
uuauauguuucuguuuggaggc

SEQ ID NO: 115447 - RNA, 22 nt, Human
uuaucaagggagaaacaggagg

SEQ ID NO: 115448 - RNA, 22 nt, Human
uuaucagaguccccaaaagaaa

SEQ ID NO: 115449 - RNA, 22 nt, Human
uuaucaugacuucaagcaucca

SEQ ID NO: 115450 - RNA, 22 nt, Human
uuaucauugucgcagucuaauu

SEQ ID NO: 115451 - RNA, 22 nt, Human
uuauccaaacuggugaaucauu

SEQ ID NO: 115452 - RNA, 18 nt, Human
uuaucucuggcaugugcc

SEQ ID NO: 115453 - RNA, 20 nt, Human
uuaucugucaaucugucuca

SEQ ID NO: 115454 - RNA, 22 nt, Human
uuaucuguugcuuaaugcgcau

SEQ ID NO: 115455 - RNA, 22 nt, Human
uuaucuguuguuuuaguacaau

SEQ ID NO: 115456 - RNA, 17 nt, Human
uuaucuugcuguuucua

SEQ ID NO: 115457 - RNA, 22 nt, Human
uuaucuugguguuuuaguaauu

SEQ ID NO: 115458 - RNA, 22 nt, Human
uuaugaaggaucagguacuugg

SEQ ID NO: 115459 - RNA, 22 nt, Human
uuaugagacuguuuuacacacu

SEQ ID NO: 115460 - RNA, 22 nt, Human
uuaugagauauuuauacugcug

SEQ ID NO: 115461 - RNA, 18 nt, Human
uuaugcaaaacuguuuuc

SEQ ID NO: 115462 - RNA, 20 nt, Human
uuaugcaagcaucaauauug

SEQ ID NO: 115463 - RNA, 22 nt, Human
uuaugcauauagcagauacgag

SEQ ID NO: 115464 - RNA, 22 nt, Human
uuaugcuaaccucaucuucucc

SEQ ID NO: 115465 - RNA, 22 nt, Human
uuauggaaaauacaauuauaag

SEQ ID NO: 115466 - RNA, 22 nt, Human
uuauggaauaaccuuucugaaa

SEQ ID NO: 115467 - RNA, 21 nt, Human
uuauggagaaggaaaguaagg

SEQ ID NO: 115468 - RNA, 22 nt, Human
uuaugggcgaugcaaaccugau

SEQ ID NO: 115469 - RNA, 22 nt, Human
uuaugucaaaaugguugagauu

SEQ ID NO: 115470 - RNA, 22 nt, Human
uuauguuuuaaguguguaucuu

SEQ ID NO: 115471 - RNA, 22 nt, Human
uuauuaauacaugcaccugcau

SEQ ID NO: 115472 - RNA, 22 nt, Human
uuauuaaucuuaucuuuggaaa

SEQ ID NO: 115473 - RNA, 22 nt, Human
uuauuaaugaguacaaguuauu

SEQ ID NO: 115474 - RNA, 22 nt, Human
uuauuacacugaaagaauugcg

SEQ ID NO: 115475 - RNA, 22 nt, Human
uuauuagcugggcuucagggug

SEQ ID NO: 115476 - RNA, 22 nt, Human
uuauuagguuuacauaaagguu

SEQ ID NO: 115477 - RNA, 22 nt, Human
uuauuauaaugagggauaaaaa

SEQ ID NO: 115478 - RNA, 22 nt, Human
uuauuauagauuaugcaagauu

SEQ ID NO: 115479 - RNA, 22 nt, Human
uuauuauggcaguuuucuaggu

SEQ ID NO: 115480 - RNA, 22 nt, Human
uuauuaugguauuucuuugcag

SEQ ID NO: 115481 - RNA, 22 nt, Human
uuauuauugauucgcucucaaa

SEQ ID NO: 115482 - RNA, 22 nt, Human
uuauuauugugguugcauuauc

SEQ ID NO: 115483 - RNA, 22 nt, Human
uuauucaccauuuauuauguga

SEQ ID NO: 115484 - RNA, 22 nt, Human
uuauucacuucuuggucccuca

SEQ ID NO: 115485 - RNA, 18 nt, Human
uuauucagacgcauauga

SEQ ID NO: 115486 - RNA, 22 nt, Human
uuauucagcagggacuuccuuu

SEQ ID NO: 115487 - RNA, 22 nt, Human
uuauucagugccuuugaaagaa

SEQ ID NO: 115488 - RNA, 22 nt, Human
uuauuccagguacuugguuucu

SEQ ID NO: 115489 - RNA, 22 nt, Human
ugguccacagggaguccgugcu

SEQ ID NO: 115490 - RNA, 22 nt, Human
ugguccagacuuugaccucuca

SEQ ID NO: 115491 - RNA, 22 nt, Human
ugguccagcuugauucucuucu

SEQ ID NO: 115492 - RNA, 22 nt, Human
ugguccaggguguaguacagag

SEQ ID NO: 115493 - RNA, 22 nt, Human
ugguccauguccuccaucucuc

SEQ ID NO: 115494 - RNA, 22 nt, Human
uggucccauuguucugcccagg

SEQ ID NO: 115495 - RNA, 22 nt, Human
uggucccugccugccaagugcu

SEQ ID NO: 115496 - RNA, 22 nt, Human
ugguccugaucaccgcugggca

SEQ ID NO: 115497 - RNA, 22 nt, Human
ugguccugccccgugcacagag

SEQ ID NO: 115498 - RNA, 22 nt, Human
ugguccugcuacaggggauuag

SEQ ID NO: 115499 - RNA, 22 nt, Human
ugguccugcuugcugcuuaaga

SEQ ID NO: 115500 - RNA, 22 nt, Human
ugguccuggagaucaauaugca

SEQ ID NO: 115501 - RNA, 22 nt, Human
ugguccuggucaucugggcugg

SEQ ID NO: 115502 - RNA, 22 nt, Human
ugguccuuuaagucuuucucug

SEQ ID NO: 115503 - RNA, 22 nt, Human
ugucuucacucaagucucuugg

SEQ ID NO: 115504 - RNA, 22 nt, Human
ugucuucaguaaaauacacuau

SEQ ID NO: 115505 - RNA, 22 nt, Human
ugucuucaugccugaaagaaga

SEQ ID NO: 115506 - RNA, 20 nt, Human
ugucuucauuauggugcccu

SEQ ID NO: 115507 - RNA, 22 nt, Human
ugucuucauuccccaugaaguc

SEQ ID NO: 115508 - RNA, 17 nt, Human
ugucuucugaagagagc

SEQ ID NO: 115509 - RNA, 22 nt, Human
ugucuuggaugaggauuaacag

SEQ ID NO: 115510 - RNA, 19 nt, Human
ugucuuuaacuggaaccac

SEQ ID NO: 115511 - RNA, 22 nt, Human
ugucuuuaauucuacauaucuc

SEQ ID NO: 115512 - RNA, 22 nt, Human
ugucuuuacuuaauaaauauac

SEQ ID NO: 115513 - RNA, 22 nt, Human
ugucuuuggaauauuuagcuga

SEQ ID NO: 115514 - RNA, 18 nt, Human
ugucuuuggaccacugaa

SEQ ID NO: 115515 - RNA, 22 nt, Human
ugucuuuuaccuaaugagcugg

SEQ ID NO: 115516 - RNA, 22 nt, Human
ugucuuuucuacuguaagcaua

SEQ ID NO: 115517 - RNA, 22 nt, Human
ugucuuuuuaccugugaugagu

SEQ ID NO: 115518 - RNA, 22 nt, Human
ugugaaaggaaggcaugaaaag

SEQ ID NO: 115519 - RNA, 22 nt, Human
ugugaaaugcuauuuccaugag

SEQ ID NO: 115520 - RNA, 22 nt, Human
ugugaaauucuugaaaugcaca

SEQ ID NO: 115521 - RNA, 23 nt, Human
ugugaaauuugaggucagugcuu

SEQ ID NO: 115522 - RNA, 22 nt, Human
ugugaacuuaagauuccuuauc

SEQ ID NO: 115523 - RNA, 22 nt, Human
ugugaagaauuaaugugaauca

SEQ ID NO: 115524 - RNA, 22 nt, Human
ugugaagagaguaauaaaguca

SEQ ID NO: 115525 - RNA, 22 nt, Human
ugugaagauagcuguuacaucu

SEQ ID NO: 115526 - RNA, 22 nt, Human
ugugaagauuaaguuacugggc

SEQ ID NO: 115527 - RNA, 22 nt, Human
ugugaagauuuggcaugcagaa

SEQ ID NO: 115528 - RNA, 22 nt, Human
ugugaagcgugugcaggggaca

SEQ ID NO: 115529 - RNA, 22 nt, Human
ugugaaggagcaugcagagggg

SEQ ID NO: 115530 - RNA, 22 nt, Human
ugugaaggcagcagcucugucc

SEQ ID NO: 115531 - RNA, 22 nt, Human
ugugaagguuuuuaugggauau

SEQ ID NO: 115532 - RNA, 22 nt, Human
ugugaauacagcaugugcuucu

SEQ ID NO: 115533 - RNA, 22 nt, Human
ugugaauauacuuaaugccacu

SEQ ID NO: 115534 - RNA, 22 nt, Human
ugugacaagcauuguauauugg

SEQ ID NO: 115535 - RNA, 22 nt, Human
ugugacacugacaucugcuccc

SEQ ID NO: 115536 - RNA, 22 nt, Human
ugugacagcacgguucaacugc

SEQ ID NO: 115537 - RNA, 22 nt, Human
ugugacaucgcugugucuguuu

SEQ ID NO: 115538 - RNA, 19 nt, Human
ugugaccccagacaagcug

SEQ ID NO: 115539 - RNA, 22 nt, Human
ugugacccccgucacggcugcu

SEQ ID NO: 115540 - RNA, 22 nt, Human
ugugacccucuccgaugggcag

SEQ ID NO: 115541 - RNA, 22 nt, Human
ugugacguuguucuggauuccc

SEQ ID NO: 115542 - RNA, 22 nt, Human
ugugacuaggccugagcucuug

SEQ ID NO: 115543 - RNA, 22 nt, Human
ugugacugaagugucuagaccu

SEQ ID NO: 115544 - RNA, 22 nt, Human
ugugacugagcugcagaguguc

SEQ ID NO: 115545 - RNA, 22 nt, Human
ugugacuuuucacaggcugguc

SEQ ID NO: 115546 - RNA, 22 nt, Human
ugugagaauuccugaucacagg

SEQ ID NO: 115547 - RNA, 22 nt, Human
ugugagaggagaaaugcauuaa

SEQ ID NO: 115548 - RNA, 22 nt, Human
ugugagaguugagauauuuugc

SEQ ID NO: 115549 - RNA, 22 nt, Human
ugugagauuuuauuugauaugc

SEQ ID NO: 115550 - RNA, 22 nt, Human
uguuaggguccugugcaggggc

SEQ ID NO: 115551 - RNA, 22 nt, Human
uguuauauaacuuacaaccugu

SEQ ID NO: 115552 - RNA, 22 nt, Human
uguuauaucuaaauagccacau

SEQ ID NO: 115553 - RNA, 22 nt, Human
uguuaucacuuagacaugcuag

SEQ ID NO: 115554 - RNA, 22 nt, Human
uguuaucacuuguaaaagcaau

SEQ ID NO: 115555 - RNA, 22 nt, Human
uguuauccucagcucaccucua

SEQ ID NO: 115556 - RNA, 22 nt, Human
uguuaucugagcaacgucgacg

SEQ ID NO: 115557 - RNA, 22 nt, Human
uguuaugaacuucuagaaaaca

SEQ ID NO: 115558 - RNA, 22 nt, Human
uguuaugugccacacuugaggg

SEQ ID NO: 115559 - RNA, 22 nt, Human
uguuauucucugccuacaaguc

SEQ ID NO: 115560 - RNA, 22 nt, Human
uguucaaguggauguggcuuuu

SEQ ID NO: 115561 - RNA, 22 nt, Human
uguucacacagucuauacggau

SEQ ID NO: 115562 - RNA, 20 nt, Human
uguucacaguaguugcugcu

SEQ ID NO: 115563 - RNA, 21 nt, Human
uguucacauggagcagaaugu

SEQ ID NO: 115564 - RNA, 22 nt, Human
uguucagagacagaaauucuaa

SEQ ID NO: 115565 - RNA, 22 nt, Human
uguucauuacugcuguuugcca

SEQ ID NO: 115566 - RNA, 22 nt, Human
uguucauuaguggaaguaaguu

SEQ ID NO: 115567 - RNA, 22 nt, Human
uguucauuauucuucaucugcc

SEQ ID NO: 115568 - RNA, 22 nt, Human
uguucauuccggggagggcuaa

SEQ ID NO: 115569 - RNA, 22 nt, Human
uguucauuuggcccuuuuguau

SEQ ID NO: 115570 - RNA, 22 nt, Human
uguuccaagcugcuggauaagc

SEQ ID NO: 115571 - RNA, 22 nt, Human
uguuccagggcgcgaagguggu

SEQ ID NO: 115572 - RNA, 22 nt, Human
uguuccauaaguggugcuuugu

SEQ ID NO: 115573 - RNA, 22 nt, Human
uguuccaugucuuuguaggacu

SEQ ID NO: 115574 - RNA, 22 nt, Human
uguucccacaccagccucagcc

SEQ ID NO: 115575 - RNA, 22 nt, Human
uguuccugaggcaugugucaau

SEQ ID NO: 115576 - RNA, 22 nt, Human
uguuccuggggaccugccuucc

SEQ ID NO: 115577 - RNA, 23 nt, Human
uguuccugucaaauuuucuuccc

SEQ ID NO: 115578 - RNA, 22 nt, Human
uguuccuguuucugcguaguuu

SEQ ID NO: 115579 - RNA, 22 nt, Human
uguucguagcacguaguuucuu

SEQ ID NO: 115580 - RNA, 22 nt, Human
uguucuaaguguuuuguucaug

SEQ ID NO: 115581 - RNA, 22 nt, Human
uguucuagcaacacaguuuugg

SEQ ID NO: 115582 - RNA, 22 nt, Human
uguucuaugcucuuuaagguga

SEQ ID NO: 115583 - RNA, 22 nt, Human
uguucucacuggaugcuucaca

SEQ ID NO: 115584 - RNA, 22 nt, Human
uguucucuaagaaaagaagcau

SEQ ID NO: 115585 - RNA, 22 nt, Human
uguucucucuccuuuugaagug

SEQ ID NO: 115586 - RNA, 22 nt, Human
uguucucuuuuccugcugagcc

SEQ ID NO: 115587 - RNA, 22 nt, Human
uguucugcaaugcugccuccuu

SEQ ID NO: 115588 - RNA, 22 nt, Human
uguucuggcuccuuuuaaaugu

SEQ ID NO: 115589 - RNA, 22 nt, Human
uguucugggguugagagacaau

SEQ ID NO: 115590 - RNA, 22 nt, Human
uguucugugcaucuagccagua

SEQ ID NO: 115591 - RNA, 22 nt, Human
uguucuuacggaacuuaucuuu

SEQ ID NO: 115592 - RNA, 22 nt, Human
uguucuuaugaugaagcacuga

SEQ ID NO: 115593 - RNA, 22 nt, Human
uguucuuugccagugauuuaau

SEQ ID NO: 115594 - RNA, 22 nt, Human
uguucuuuggcuucacagcucu

SEQ ID NO: 115595 - RNA, 22 nt, Human
uguucuuuucucuaaacugaua

SEQ ID NO: 115596 - RNA, 18 nt, Human
uguugaaacuucagguaa

SEQ ID NO: 115597 - RNA, 22 nt, Human
uguugaagauaaaguucucauu

SEQ ID NO: 115598 - RNA, 22 nt, Human
uguugauuaguguuuagacuua

SEQ ID NO: 115599 - RNA, 19 nt, Human
uguugccagguaucauguu

SEQ ID NO: 115600 - RNA, 22 nt, Human
uguugccuggggaagcucugau

SEQ ID NO: 115601 - RNA, 22 nt, Human
uguugcuaaggggaaugagagc

SEQ ID NO: 115602 - RNA, 22 nt, Human
uguugcuguaugaauaggaagg

SEQ ID NO: 115603 - RNA, 22 nt, Human
uguuggagcccgagucagggag

SEQ ID NO: 115604 - RNA, 22 nt, Human
uguuggaugaccuuguaauuau

SEQ ID NO: 115605 - RNA, 22 nt, Human
uguuggcaucucugagagaguu

SEQ ID NO: 115606 - RNA, 22 nt, Human
uguugggaucgaaugguggaac

SEQ ID NO: 115607 - RNA, 22 nt, Human
uguuggggucaggagcuagccu

SEQ ID NO: 115608 - RNA, 22 nt, Human
uguugguaaauagcuuagcaau

SEQ ID NO: 115609 - RNA, 22 nt, Human
uguugguaggauuugcuucagc

SEQ ID NO: 115610 - RNA, 19 nt, Human
uguuggugcggauguggag

SEQ ID NO: 115611 - RNA, 22 nt, Human
uguuuaagauccgucagucacu

SEQ ID NO: 115612 - RNA, 22 nt, Human
ugugcuucugcagagacuauuu

SEQ ID NO: 115613 - RNA, 22 nt, Human
ugugcuugucguggagccaggc

SEQ ID NO: 115614 - RNA, 22 nt, Human
ugugcuuucaaaguuaaguaaa

SEQ ID NO: 115615 - RNA, 20 nt, Human
uguggaaaaacagaagcaga

SEQ ID NO: 115616 - RNA, 22 nt, Human
uguggaaaagaauaagggagau

SEQ ID NO: 115617 - RNA, 22 nt, Human
uguggaagggacacuggacugg

SEQ ID NO: 115618 - RNA, 22 nt, Human
uguggaaugggagugagaagac

SEQ ID NO: 115619 - RNA, 22 nt, Human
uguggaauuucuuucagguaug

SEQ ID NO: 115620 - RNA, 22 nt, Human
uguggacauacuaggccuaggc

SEQ ID NO: 115621 - RNA, 22 nt, Human
uguggacuugaaauuacuuuuc

SEQ ID NO: 115622 - RNA, 22 nt, Human
uguggacuuuaguaggugagag

SEQ ID NO: 115623 - RNA, 22 nt, Human
uguggacuuuggcauuggacuu

SEQ ID NO: 115624 - RNA, 22 nt, Human
uguggagcccccaggagugggg

SEQ ID NO: 115625 - RNA, 22 nt, Human
uguggaggauucugaugccagc

SEQ ID NO: 115626 - RNA, 22 nt, Human
uguggaugagggagugaacaaa

SEQ ID NO: 115627 - RNA, 22 nt, Human
uguggcacuucucuccuuguaa

SEQ ID NO: 115628 - RNA, 21 nt, Human
uguggcagagacaaugcuagu

SEQ ID NO: 115629 - RNA, 22 nt, Human
uguggcagagagagcuuccuug

SEQ ID NO: 115630 - RNA, 22 nt, Human
uguggcagaguaaggacccagu

SEQ ID NO: 115631 - RNA, 22 nt, Human
uguggcagauuuuauaaauugc

SEQ ID NO: 115632 - RNA, 22 nt, Human
uguggcaggcaagauguacaga

SEQ ID NO: 115633 - RNA, 18 nt, Human
uguggcaggggugggaga

SEQ ID NO: 115634 - RNA, 22 nt, Human
uguggcaguauaagagcuagaa

SEQ ID NO: 115635 - RNA, 21 nt, Human
uguggcaucauugaucuguga

SEQ ID NO: 115636 - RNA, 22 nt, Human
uguggccaccagagcugcuauu

SEQ ID NO: 115637 - RNA, 22 nt, Human
uguggccacuguuucuuuuccu

SEQ ID NO: 115638 - RNA, 22 nt, Human
uguggccagagguacuauuuua

SEQ ID NO: 115639 - RNA, 22 nt, Human
uguggccucucaggcuugauca

SEQ ID NO: 115640 - RNA, 22 nt, Human
uguggccugggagcugaggucu

SEQ ID NO: 115641 - RNA, 22 nt, Human
uguggccuuucaaggauggaau

SEQ ID NO: 115642 - RNA, 22 nt, Human
uguggcucucaugcacucccag

SEQ ID NO: 115643 - RNA, 21 nt, Human
uguggcugacacccuuuggga

SEQ ID NO: 115644 - RNA, 22 nt, Human
uguggcugcuccugggugguca

SEQ ID NO: 115645 - RNA, 22 nt, Human
uguggcuggauugauuuuaccu

SEQ ID NO: 115646 - RNA, 15 nt, Human
uguggcuggcuccug

SEQ ID NO: 115647 - RNA, 18 nt, Human
uguggcugguccacacug

SEQ ID NO: 115648 - RNA, 22 nt, Human
uguggcugucuguucuccuagg

SEQ ID NO: 115649 - RNA, 22 nt, Human
uguggcuguugaggaccccaag

SEQ ID NO: 115650 - RNA, 22 nt, Human
ugugggaagauguugcaggaga

SEQ ID NO: 115651 - RNA, 22 nt, Human
ugugggaaguuuggagggaaag

SEQ ID NO: 115652 - RNA, 23 nt, Human
ugugggaauguuggagaggaaac

SEQ ID NO: 115653 - RNA, 22 nt, Human
ugugggagaaggaagcaagcug

SEQ ID NO: 115654 - RNA, 22 nt, Human
ugugggcaaaggguagcugggu

SEQ ID NO: 115655 - RNA, 19 nt, Human
ugugggcaagggauggcag

SEQ ID NO: 115656 - RNA, 22 nt, Human
ugugggcacuaaugacaugcag

SEQ ID NO: 115657 - RNA, 22 nt, Human
ugugggcaggcccgggucugag

SEQ ID NO: 115658 - RNA, 22 nt, Human
ugugggccaggaggccucagug

SEQ ID NO: 115659 - RNA, 22 nt, Human
ugugggccucagcaggacucca

SEQ ID NO: 115660 - RNA, 20 nt, Human
ugugggccuucggcgugcuc

SEQ ID NO: 115661 - RNA, 23 nt, Human
ugugggcgcauuguaaggguagc

SEQ ID NO: 115662 - RNA, 22 nt, Human
ugugggcucuaauggcagcaga

SEQ ID NO: 115663 - RNA, 22 nt, Human
ugugggcuguacugagggcagg

SEQ ID NO: 115664 - RNA, 22 nt, Human
ugugggcuuuggagucaggaag

SEQ ID NO: 115665 - RNA, 22 nt, Human
uguggggaagaguaugacuugg

SEQ ID NO: 115666 - RNA, 22 nt, Human
uguggggcagcuagccggccug

SEQ ID NO: 115667 - RNA, 22 nt, Human
uguggggccucgugcuagcugg

SEQ ID NO: 115668 - RNA, 22 nt, Human
uuccuuaggcuguuugcagugc

SEQ ID NO: 115669 - RNA, 22 nt, Human
uuccuuaggggacagggggaua

SEQ ID NO: 115670 - RNA, 22 nt, Human
uuccuuagugccucuuccgcug

SEQ ID NO: 115671 - RNA, 22 nt, Human
uuccuucaaacgccuccugcac

SEQ ID NO: 115672 - RNA, 22 nt, Human
uuccuuccagcuugugacaguc

SEQ ID NO: 115673 - RNA, 22 nt, Human
uuccuuccauagcaaaacaugc

SEQ ID NO: 115674 - RNA, 22 nt, Human
uuccuuccccuagcugagaaac

SEQ ID NO: 115675 - RNA, 22 nt, Human
uuccuucuaauauucugccugu

SEQ ID NO: 115676 - RNA, 22 nt, Human
uuccuucucagcccucgaggau

SEQ ID NO: 115677 - RNA, 18 nt, Human
uuccuucugauguauaug

SEQ ID NO: 115678 - RNA, 22 nt, Human
uuccuucuggagcccggggagc

SEQ ID NO: 115679 - RNA, 22 nt, Human
uuccuucuucauuguguuacag

SEQ ID NO: 115680 - RNA, 22 nt, Human
uuccuucuuccaaacccaucau

SEQ ID NO: 115681 - RNA, 22 nt, Human
uuccuucuuguaaugaucugcc

SEQ ID NO: 115682 - RNA, 22 nt, Human
uuccuugaaagcuggacauggg

SEQ ID NO: 115683 - RNA, 22 nt, Human
uuccuugaaugagucauggaaa

SEQ ID NO: 115684 - RNA, 22 nt, Human
uuccuuggaaagagacgucgcu

SEQ ID NO: 115685 - RNA, 22 nt, Human
uuccuuggccccaugcccaggg

SEQ ID NO: 115686 - RNA, 18 nt, Human
uuccuugguaacauaugc

SEQ ID NO: 115687 - RNA, 22 nt, Human
uuccuugguagggacaacucug

SEQ ID NO: 115688 - RNA, 22 nt, Human
uuccuuggugcccgauguauuu

SEQ ID NO: 115689 - RNA, 22 nt, Human
uuccuuucacguuuuaaugcac

SEQ ID NO: 115690 - RNA, 22 nt, Human
uuccuuucucuggacugcagcc

SEQ ID NO: 115691 - RNA, 22 nt, Human
uuccuuugggaaaucacuaagg

SEQ ID NO: 115692 - RNA, 22 nt, Human
uuccuuuuacaaauagccuccu

SEQ ID NO: 115693 - RNA, 22 nt, Human
uuccuuuuagaaucaugaagac

SEQ ID NO: 115694 - RNA, 22 nt, Human
uucgaguuggcuuuauuaaacu

SEQ ID NO: 115695 - RNA, 22 nt, Human
uucgcagccagugagcagagga

SEQ ID NO: 115696 - RNA, 22 nt, Human
uucgcagggagacaggcucucu

SEQ ID NO: 115697 - RNA, 20 nt, Human
uucgcugggaguggccaggc

SEQ ID NO: 115698 - RNA, 22 nt, Human
uucuaaaauaaguuuaucuggu

SEQ ID NO: 115699 - RNA, 22 nt, Human
uucuaaacacuacgggauuugg

SEQ ID NO: 115700 - RNA, 20 nt, Human
uucuaaacuguuaggcuugc

SEQ ID NO: 115701 - RNA, 22 nt, Human
uucuaaauggggauccuuucug

SEQ ID NO: 115702 - RNA, 22 nt, Human
uucuaacaaguggcuuguuagu

SEQ ID NO: 115703 - RNA, 22 nt, Human
uucuaacuaaagucuuuguuuu

SEQ ID NO: 115704 - RNA, 22 nt, Human
uucuaacuaauuggaaauggaa

SEQ ID NO: 115705 - RNA, 22 nt, Human
uucuaacuccacuucccacucc

SEQ ID NO: 115706 - RNA, 22 nt, Human
uucuaagaaauggaaaacgauu

SEQ ID NO: 115707 - RNA, 22 nt, Human
uucuaagauucaugaggacagg

SEQ ID NO: 115708 - RNA, 22 nt, Human
uucuaagggguucacaggcaua

SEQ ID NO: 115709 - RNA, 23 nt, Human
uucuaagguaugguuuauaccug

SEQ ID NO: 115710 - RNA, 22 nt, Human
uucuaaguccuaccugaaagca

SEQ ID NO: 115711 - RNA, 22 nt, Human
uucuaagugauucuagcuggac

SEQ ID NO: 115712 - RNA, 22 nt, Human
uucuaaguguugacaaagucua

SEQ ID NO: 115713 - RNA, 22 nt, Human
uucuaaucccagcucuacuacu

SEQ ID NO: 115714 - RNA, 22 nt, Human
uucuaaucugggcuucugcagu

SEQ ID NO: 115715 - RNA, 22 nt, Human
uucuaauugaccuuaggcugug

SEQ ID NO: 115716 - RNA, 22 nt, Human
uucuaauuguguuugcauaucu

SEQ ID NO: 115717 - RNA, 22 nt, Human
uucuacaauaugaauaaugaag

SEQ ID NO: 115718 - RNA, 22 nt, Human
uucuacacagugcggguuaaca

SEQ ID NO: 115719 - RNA, 21 nt, Human
uucuacaggaugaaugaaaac

SEQ ID NO: 115720 - RNA, 22 nt, Human
uucuacagguacugaaguacau

SEQ ID NO: 115721 - RNA, 22 nt, Human
uuagcagcuaagucaugcugca

SEQ ID NO: 115722 - RNA, 22 nt, Human
uuagcagcuuagacugccuggg

SEQ ID NO: 115723 - RNA, 22 nt, Human
uuagcagcuuuuaaaugguucu

SEQ ID NO: 115724 - RNA, 22 nt, Human
uuagcagguuucuggcucuugg

SEQ ID NO: 115725 - RNA, 22 nt, Human
uuagcaguuuccauuuugguca

SEQ ID NO: 115726 - RNA, 22 nt, Human
uuagcaucugcuguaagcuuau

SEQ ID NO: 115727 - RNA, 22 nt, Human
uuagcauucucauuugcauaaa

SEQ ID NO: 115728 - RNA, 22 nt, Human
uuagcauuucaguacacauguu

SEQ ID NO: 115729 - RNA, 22 nt, Human
uuagcauuucauuucaagagga

SEQ ID NO: 115730 - RNA, 22 nt, Human
uuagccagugaaauggagaaau

SEQ ID NO: 115731 - RNA, 22 nt, Human
uuagccauggacugaauugacu

SEQ ID NO: 115732 - RNA, 22 nt, Human
uuagccauguugaagauuuaga

SEQ ID NO: 115733 - RNA, 22 nt, Human
uuagccauucugauagguaugu

SEQ ID NO: 115734 - RNA, 22 nt, Human
uuagccauuugaggucuucauu

SEQ ID NO: 115735 - RNA, 22 nt, Human
uuagcgcacaucacagggggaa

SEQ ID NO: 115736 - RNA, 22 nt, Human
uuagcucuuuguagcuauuucu

SEQ ID NO: 115737 - RNA, 22 nt, Human
uuagcugucaagguggcugcag

SEQ ID NO: 115738 - RNA, 22 nt, Human
uuagcuucuuacauuucauccu

SEQ ID NO: 115739 - RNA, 22 nt, Human
uuagcuuucaugaaccuggucg

SEQ ID NO: 115740 - RNA, 22 nt, Human
uuagcuuuggauugcauuuagu

SEQ ID NO: 115741 - RNA, 22 nt, Human
uuagcuuuuaagugugcuacau

SEQ ID NO: 115742 - RNA, 22 nt, Human
uuagcuuuugagaaugauuucu

SEQ ID NO: 115743 - RNA, 22 nt, Human
uuaggaaaagaagacauuucua

SEQ ID NO: 115744 - RNA, 22 nt, Human
uuaggaaaauggaguccuuuua

SEQ ID NO: 115745 - RNA, 22 nt, Human
uuaggaagcacacaguaaauau

SEQ ID NO: 115746 - RNA, 22 nt, Human
uuaggaaggacuuggauucugg

SEQ ID NO: 115747 - RNA, 20 nt, Human
uuaggaagucacaauuucag

SEQ ID NO: 115748 - RNA, 22 nt, Human
uuaggaauauagacuaaguaga

SEQ ID NO: 115749 - RNA, 22 nt, Human
uuaggaauauuuucugaguagu

SEQ ID NO: 115750 - RNA, 22 nt, Human
uuaggaaucaccugcagaucuu

SEQ ID NO: 115751 - RNA, 22 nt, Human
uuaggaaugagauuucuaguga

SEQ ID NO: 115752 - RNA, 22 nt, Human
uuaggaauuuaucacagacugg

SEQ ID NO: 115753 - RNA, 22 nt, Human
uuaggaggucuauggacauccu

SEQ ID NO: 115754 - RNA, 22 nt, Human
uuaggauagucuguuagaaaag

SEQ ID NO: 115755 - RNA, 22 nt, Human
uuaggcaaagauauuacguagu

SEQ ID NO: 115756 - RNA, 22 nt, Human
uuaggcaaagcuggaauccagg

SEQ ID NO: 115757 - RNA, 22 nt, Human
uuaggcaaugaauuauuccaag

SEQ ID NO: 115758 - RNA, 22 nt, Human
uuaggcauuggaaggucagcuu

SEQ ID NO: 115759 - RNA, 22 nt, Human
uuagggaaacaaacauuuucuu

SEQ ID NO: 115760 - RNA, 22 nt, Human
uuagggaaagcagcauucccuu

SEQ ID NO: 115761 - RNA, 22 nt, Human
uuagggaaauaaaauuaucagu

SEQ ID NO: 115762 - RNA, 22 nt, Human
uuagggcaggcaugagagaacu

SEQ ID NO: 115763 - RNA, 22 nt, Human
uuagggcuuuucugaauaggcc

SEQ ID NO: 115764 - RNA, 22 nt, Human
uuagguaaguaggaucaaaaaa

SEQ ID NO: 115765 - RNA, 22 nt, Human
uuaggucauucccugagcagau

SEQ ID NO: 115766 - RNA, 22 nt, Human
uuaguaaauaaagucuacuuuc

SEQ ID NO: 115767 - RNA, 22 nt, Human
uuaguaauuagaaaguaauucu

SEQ ID NO: 115768 - RNA, 22 nt, Human
uuaguacauagaugaugguuga

SEQ ID NO: 115769 - RNA, 22 nt, Human
uuaguagaagacagauaacaaa

SEQ ID NO: 115770 - RNA, 22 nt, Human
uuaguagaauguuauagcaauu

SEQ ID NO: 115771 - RNA, 22 nt, Human
uuaguaucuggaaaucacauua

SEQ ID NO: 115772 - RNA, 22 nt, Human
uuagucacaugcccaucucuga

SEQ ID NO: 115773 - RNA, 22 nt, Human
uuagugaguuaaguguccugag

SEQ ID NO: 115774 - RNA, 22 nt, Human
uuagugauuacuacauagauga

SEQ ID NO: 115775 - RNA, 22 nt, Human
uuagugguaaggaugaaauuuc

SEQ ID NO: 115776 - RNA, 23 nt, Human
uuaguguaaggcaggcacaguug

SEQ ID NO: 115777 - RNA, 22 nt, Human
uuaguguacuuagugcucuaag

SEQ ID NO: 115778 - RNA, 22 nt, Human
uuagugucucaccuaaaaucug

SEQ ID NO: 115779 - RNA, 22 nt, Human
uuaguguuagggccuguuaccu

SEQ ID NO: 115780 - RNA, 22 nt, Human
uuaguuaauaggucuucagcuu

SEQ ID NO: 115781 - RNA, 22 nt, Human
uuaguuagagcccuauguuagg

SEQ ID NO: 115782 - RNA, 22 nt, Human
uuaguuaggaaacaaaguuguu

SEQ ID NO: 115783 - RNA, 22 nt, Human
uuaguuaggauuuggugguaua

SEQ ID NO: 115784 - RNA, 22 nt, Human
uuaguuagggcuccugaggacc

SEQ ID NO: 115785 - RNA, 22 nt, Human
uuaguuauacuacugaauggag

SEQ ID NO: 115786 - RNA, 22 nt, Human
uuaguucucaugaauuuuaagu

SEQ ID NO: 115787 - RNA, 22 nt, Human
uuaguugauagccaaaauuuau

SEQ ID NO: 115788 - RNA, 22 nt, Human
uguuacacagcagaauagcaag

SEQ ID NO: 115789 - RNA, 21 nt, Human
uguuacaguccaaauguuugu

SEQ ID NO: 115790 - RNA, 22 nt, Human
uguuacaguggcuuuuuaaaca

SEQ ID NO: 115791 - RNA, 22 nt, Human
uguuaccaaggcugcuucuagu

SEQ ID NO: 115792 - RNA, 22 nt, Human
uguuacuauuaguuugagcaua

SEQ ID NO: 115793 - RNA, 22 nt, Human
uguuacugauuugauauacagu

SEQ ID NO: 115794 - RNA, 22 nt, Human
uguuacuuugauugguauucua

SEQ ID NO: 115795 - RNA, 22 nt, Human
uguuaggacuccccagaagcug

SEQ ID NO: 115796 - RNA, 22 nt, Human
uguuaguauuggcaaauuuguu

SEQ ID NO: 115797 - RNA, 22 nt, Human
uguuaguguaauuccaguuuuc

SEQ ID NO: 115798 - RNA, 22 nt, Human
uguuauaacaucgguugacuaa

SEQ ID NO: 115799 - RNA, 22 nt, Human
uguuauacuauuuagagguaca

SEQ ID NO: 115800 - RNA, 22 nt, Human
uguuaucagagagaggugcugu

SEQ ID NO: 115801 - RNA, 19 nt, Human
uguuaugacuuugccuuuu

SEQ ID NO: 115802 - RNA, 22 nt, Human
uguuaugagaaagacauuaggu

SEQ ID NO: 115803 - RNA, 22 nt, Human
uguuauuaaauaauucucucuu

SEQ ID NO: 115804 - RNA, 23 nt, Human
uguuauuccagguuaauguacuu

SEQ ID NO: 115805 - RNA, 22 nt, Human
uguuauugagguuacuuauaag

SEQ ID NO: 115806 - RNA, 21 nt, Human
uguucaaacguacacauuucu

SEQ ID NO: 115807 - RNA, 22 nt, Human
uguucaaaugaucuucuuaaau

SEQ ID NO: 115808 - RNA, 22 nt, Human
uguucacaacgugcagguuugu

SEQ ID NO: 115809 - RNA, 22 nt, Human
uguucacaagcagauguugcuu

SEQ ID NO: 115810 - RNA, 22 nt, Human
uguucacaggggagccauuuau

SEQ ID NO: 115811 - RNA, 22 nt, Human
uguucacaucgauggauuuugc

SEQ ID NO: 115812 - RNA, 22 nt, Human
uguucacauguacaugaauauu

SEQ ID NO: 115813 - RNA, 22 nt, Human
uguucagaaaacagauaacuaa

SEQ ID NO: 115814 - RNA, 22 nt, Human
uguucagcccucuauuaaucag

SEQ ID NO: 115815 - RNA, 22 nt, Human
uguucaguccaauguuggaaaa

SEQ ID NO: 115816 - RNA, 22 nt, Human
uguucauuacccaucccagguc

SEQ ID NO: 115817 - RNA, 22 nt, Human
uguucauucugugaccugguuc

SEQ ID NO: 115818 - RNA, 22 nt, Human
uguucauuugcaacaaccaaau

SEQ ID NO: 115819 - RNA, 20 nt, Human
uguuccaagcuaaugaauga

SEQ ID NO: 115820 - RNA, 22 nt, Human
uguuccagauucggcgugggac

SEQ ID NO: 115821 - RNA, 22 nt, Human
uguuccagauuuagccaaccga

SEQ ID NO: 115822 - RNA, 22 nt, Human
uguuccaucaguuuuugguuga

SEQ ID NO: 115823 - RNA, 22 nt, Human
uguucccaagauaagauuauga

SEQ ID NO: 115824 - RNA, 22 nt, Human
uguucccugguaaacugacucc

SEQ ID NO: 115825 - RNA, 22 nt, Human
uguuccgaccgugggguuugau

SEQ ID NO: 115826 - RNA, 22 nt, Human
uguuccugaaugccuggcuggc

SEQ ID NO: 115827 - RNA, 22 nt, Human
uguuccugacggccaaagaggu

SEQ ID NO: 115828 - RNA, 22 nt, Human
uguuccuggaaagccagguggg

SEQ ID NO: 115829 - RNA, 19 nt, Human
uguucuagcggcaccaggc

SEQ ID NO: 115830 - RNA, 22 nt, Human
uuaucugaaacuuuugggacca

SEQ ID NO: 115831 - RNA, 19 nt, Human
uuaucuguguugcaguggu

SEQ ID NO: 115832 - RNA, 22 nt, Human
uuaucuguuuucugugcguuuc

SEQ ID NO: 115833 - RNA, 22 nt, Human
uuaucuugaguauugagauucu

SEQ ID NO: 115834 - RNA, 22 nt, Human
uuaugaaagacauuucuguugg

SEQ ID NO: 115835 - RNA, 22 nt, Human
uuaugaaguuccuguuacagug

SEQ ID NO: 115836 - RNA, 22 nt, Human
uuaugcaaagaaauagacuaau

SEQ ID NO: 115837 - RNA, 22 nt, Human
uuaugcaaaggggccucuuccu

SEQ ID NO: 115838 - RNA, 22 nt, Human
uuaugcaaggacuuauuacagu

SEQ ID NO: 115839 - RNA, 22 nt, Human
uuaugcuaaguggaauaagcca

SEQ ID NO: 115840 - RNA, 22 nt, Human
uuauggaauacuuaugcugcag

SEQ ID NO: 115841 - RNA, 22 nt, Human
uuauggaauggagaaagucugc

SEQ ID NO: 115842 - RNA, 22 nt, Human
uuauggaauuugcaaaagguua

SEQ ID NO: 115843 - RNA, 18 nt, Human
uuauggcugugaaagagu

SEQ ID NO: 115844 - RNA, 22 nt, Human
uuauggcuucugugaagaauuu

SEQ ID NO: 115845 - RNA, 22 nt, Human
uuaugggagcaauuggggaggu

SEQ ID NO: 115846 - RNA, 22 nt, Human
uuauguaauuuguuugcucuuc

SEQ ID NO: 115847 - RNA, 22 nt, Human
uuauguagcagaaagauguuug

SEQ ID NO: 115848 - RNA, 22 nt, Human
uuauguagucacuguggucuug

SEQ ID NO: 115849 - RNA, 22 nt, Human
uuauguagugacugacuguuag

SEQ ID NO: 115850 - RNA, 22 nt, Human
uuauguaugaauauaguagaag

SEQ ID NO: 115851 - RNA, 22 nt, Human
uuauguauggauggcugaaagu

SEQ ID NO: 115852 - RNA, 22 nt, Human
uuauguucagcaucugcuuuau

SEQ ID NO: 115853 - RNA, 22 nt, Human
uuauguugggaaaagucagauu

SEQ ID NO: 115854 - RNA, 22 nt, Human
uuauguuuuauggcuauaucau

SEQ ID NO: 115855 - RNA, 22 nt, Human
uuauuaagugcguacuguaugc

SEQ ID NO: 115856 - RNA, 22 nt, Human
uuauuacaaugcagaaaauaga

SEQ ID NO: 115857 - RNA, 22 nt, Human
uuauuagaucuguuagggaucc

SEQ ID NO: 115858 - RNA, 22 nt, Human
uuauuaggaacucaggauuuuu

SEQ ID NO: 115859 - RNA, 22 nt, Human
uuauuagguuauucucuguacu

SEQ ID NO: 115860 - RNA, 22 nt, Human
uuauuauguggaugaaagaugu

SEQ ID NO: 115861 - RNA, 22 nt, Human
uuauuauuccccaagucauuau

SEQ ID NO: 115862 - RNA, 22 nt, Human
uuauuauuggugaguuaaggaa

SEQ ID NO: 115863 - RNA, 22 nt, Human
uuauucacaugggcucauucua

SEQ ID NO: 115864 - RNA, 22 nt, Human
uuauucaccucuauuagacuca

SEQ ID NO: 115865 - RNA, 22 nt, Human
uuauucacucugaagccauccu

SEQ ID NO: 115866 - RNA, 22 nt, Human
uuauucagcauuuagaggaagg

SEQ ID NO: 115867 - RNA, 22 nt, Human
uuauucaggaagguguuacuua

SEQ ID NO: 115868 - RNA, 22 nt, Human
uuauucaggaggugcucgaagg

SEQ ID NO: 115869 - RNA, 22 nt, Human
uuauucagggauaacauccagg

SEQ ID NO: 115870 - RNA, 22 nt, Human
uuauucagucugucuagggagu

SEQ ID NO: 115871 - RNA, 22 nt, Human
uuauucaguucccuucacucuc

SEQ ID NO: 115872 - RNA, 22 nt, Human
uuauuccaaaucaugguugcau

SEQ ID NO: 115873 - RNA, 22 nt, Human
uuauuccacagcucagaauuuu

SEQ ID NO: 115874 - RNA, 22 nt, Human
uuauuccagcuaagaguccugg

SEQ ID NO: 115875 - RNA, 22 nt, Human
uuauuccagugggugguuucuc

SEQ ID NO: 115876 - RNA, 22 nt, Human
uuauucugaacuagacucucau

SEQ ID NO: 115877 - RNA, 22 nt, Human
uuauucugacuaauguauaacu

SEQ ID NO: 115878 - RNA, 21 nt, Human
uuauucugagaugagauucuu

SEQ ID NO: 115879 - RNA, 22 nt, Human
uuauucugugaacaugguuaau

SEQ ID NO: 115880 - RNA, 22 nt, Human
uuauucuucuucucuugccagg

SEQ ID NO: 115881 - RNA, 22 nt, Human
uuauugaaggaacugaaauaaa

SEQ ID NO: 115882 - RNA, 22 nt, Human
uuauugacucccagcuuuucca

SEQ ID NO: 115883 - RNA, 22 nt, Human
uuauugacugaaaugagaguga

SEQ ID NO: 115884 - RNA, 22 nt, Human
uuauugacugaucagagaggga

SEQ ID NO: 115885 - RNA, 21 nt, Human
uuauugagacauuuguggaaa

SEQ ID NO: 115886 - RNA, 22 nt, Human
uuauugagcaacucuggggcuc

SEQ ID NO: 115887 - RNA, 22 nt, Human
uuauugaguuuacagcuuuaga

SEQ ID NO: 115888 - RNA, 23 nt, Human
uuauugcaagguaaaauugcuga

SEQ ID NO: 115889 - RNA, 17 nt, Human
uuauugcuauaagcuga

SEQ ID NO: 115890 - RNA, 22 nt, Human
uuauugcuauggugagagggau

SEQ ID NO: 115891 - RNA, 22 nt, Human
uuauugcucuauuauggccuaa

SEQ ID NO: 115892 - RNA, 22 nt, Human
uuauuggaaaagggcuguaauu

SEQ ID NO: 115893 - RNA, 18 nt, Human
uuauuggugcugcuguuc

SEQ ID NO: 115894 - RNA, 22 nt, Human
uuauuuaaaagugguaagauuc

SEQ ID NO: 115895 - RNA, 22 nt, Human
uuauuuacaacucuucucuucc

SEQ ID NO: 115896 - RNA, 22 nt, Human
uuauuuaggagaaggaacccug

SEQ ID NO: 115897 - RNA, 22 nt, Human
uuauuuauguuaacagucgaga

SEQ ID NO: 115898 - RNA, 22 nt, Human
uuauuucauugauuucuaagac

SEQ ID NO: 115899 - RNA, 20 nt, Human
uuauuuccaguccagguccu

SEQ ID NO: 115900 - RNA, 22 nt, Human
uuauuuccuagggaauuugccu

SEQ ID NO: 115901 - RNA, 22 nt, Human
uuauuuccucucuaauagggua

SEQ ID NO: 115902 - RNA, 22 nt, Human
uuauuuccugacacagcugauu

SEQ ID NO: 115903 - RNA, 22 nt, Human
uuauuucuugucuauguagcca

SEQ ID NO: 115904 - RNA, 22 nt, Human
uuauuugacuucuugcuaugcu

SEQ ID NO: 115905 - RNA, 22 nt, Human
uugaaaaguuuugaaacacucu

SEQ ID NO: 115906 - RNA, 19 nt, Human
uugaaaauauggaucugag

SEQ ID NO: 115907 - RNA, 20 nt, Human
uugaaaaugcauugugcagu

SEQ ID NO: 115908 - RNA, 22 nt, Human
uugaaaaugguaagcaugauau

SEQ ID NO: 115909 - RNA, 22 nt, Human
uugaaacauucuccuauugauu

SEQ ID NO: 115910 - RNA, 22 nt, Human
uugaaacucccuuuugucuagu

SEQ ID NO: 115911 - RNA, 22 nt, Human
uugaaacugcuuauugaauuug

SEQ ID NO: 115912 - RNA, 22 nt, Human
uugaaacugggaagcagggggu

SEQ ID NO: 115913 - RNA, 22 nt, Human
uugaaagacuucuccugugaaa

SEQ ID NO: 115914 - RNA, 22 nt, Human
uugaaagauauguuaaucuuuc

SEQ ID NO: 115915 - RNA, 19 nt, Human
uugaaagauuagcuuucua

SEQ ID NO: 115916 - RNA, 22 nt, Human
uugaaagcuccauauuguagag

SEQ ID NO: 115917 - RNA, 22 nt, Human
uugaaaggaauacagaggccua

SEQ ID NO: 115918 - RNA, 22 nt, Human
uugaaaggcacaggcaccuggg

SEQ ID NO: 115919 - RNA, 22 nt, Human
uugaaagggauauaucuuucug

SEQ ID NO: 115920 - RNA, 22 nt, Human
uugaaaggugacauuguuagag

SEQ ID NO: 115921 - RNA, 21 nt, Human
uugaaaguaaauucagcagcu

SEQ ID NO: 115922 - RNA, 22 nt, Human
uugaaagucacaauggcauuaa

SEQ ID NO: 115923 - RNA, 22 nt, Human
uugaaauagaugcgucagagau

SEQ ID NO: 115924 - RNA, 22 nt, Human
uugaaaucaccacuagcauuug

SEQ ID NO: 115925 - RNA, 22 nt, Human
uugaaaugagacuaauugauug

SEQ ID NO: 115926 - RNA, 22 nt, Human
uugaaaugaucuauuucaguag

SEQ ID NO: 115927 - RNA, 22 nt, Human
uugaaauggaagugaaaauucu

SEQ ID NO: 115928 - RNA, 22 nt, Human
uugaaauuuuaggccuugcaau

SEQ ID NO: 115929 - RNA, 22 nt, Human
uugaacaauuugguauacaaac

SEQ ID NO: 115930 - RNA, 22 nt, Human
uugaacauaaaucacuggucag

SEQ ID NO: 115931 - RNA, 22 nt, Human
uugaacauuagaauaaguaauu

SEQ ID NO: 115932 - RNA, 22 nt, Human
uugaacauuggcaauuucauau

SEQ ID NO: 115933 - RNA, 22 nt, Human
uugaacuaauagguaucuugua

SEQ ID NO: 115934 - RNA, 22 nt, Human
uugaacugguaguuggaaaucu

SEQ ID NO: 115935 - RNA, 22 nt, Human
uugaacuuugaaccauuccuau

SEQ ID NO: 115936 - RNA, 19 nt, Human
uugaagaauaaaaacacau

SEQ ID NO: 115937 - RNA, 22 nt, Human
uugaagacacagacauauagag

SEQ ID NO: 115938 - RNA, 22 nt, Human
uugaagacuaauuuagauaaug

SEQ ID NO: 115939 - RNA, 22 nt, Human
uuccucagggcggaugggcagg

SEQ ID NO: 115940 - RNA, 22 nt, Human
uuccucaguuagugccugaggc

SEQ ID NO: 115941 - RNA, 22 nt, Human
uuccucaucugugcaccucacu

SEQ ID NO: 115942 - RNA, 22 nt, Human
uuccuccacgugacaggagcca

SEQ ID NO: 115943 - RNA, 22 nt, Human
uuccuccagccuggagcacuuc

SEQ ID NO: 115944 - RNA, 17 nt, Human
uuccuccucaccauguu

SEQ ID NO: 115945 - RNA, 22 nt, Human
uuccuccuucccauuccugggg

SEQ ID NO: 115946 - RNA, 22 nt, Human
uuccucuagcuucucacuaaca

SEQ ID NO: 115947 - RNA, 22 nt, Human
uuccucuauucuaacaaaagua

SEQ ID NO: 115948 - RNA, 22 nt, Human
uuccucuccucccaccagguga

SEQ ID NO: 115949 - RNA, 22 nt, Human
uuccucucgcucuccggggccc

SEQ ID NO: 115950 - RNA, 22 nt, Human
uuccucuuccaucuucccaggg

SEQ ID NO: 115951 - RNA, 22 nt, Human
uuccucuuucucugugcuaugu

SEQ ID NO: 115952 - RNA, 22 nt, Human
uuccucuuugcauccucaacuc

SEQ ID NO: 115953 - RNA, 22 nt, Human
uuccugaaaauacagggagacc

SEQ ID NO: 115954 - RNA, 22 nt, Human
uuccugaaaauacagggagaga

SEQ ID NO: 115955 - RNA, 22 nt, Human
uuccugaacauuucuaaguuga

SEQ ID NO: 115956 - RNA, 22 nt, Human
uuccugagaacauggcagcuua

SEQ ID NO: 115957 - RNA, 22 nt, Human
uuccugagucccggguaaagau

SEQ ID NO: 115958 - RNA, 23 nt, Human
uuccugagugcuggagagagugc

SEQ ID NO: 115959 - RNA, 22 nt, Human
uuccugcaaagccagaugucga

SEQ ID NO: 115960 - RNA, 22 nt, Human
uuccugcagcaaggagaagcug

SEQ ID NO: 115961 - RNA, 22 nt, Human
uuccugcauggauugaggcuau

SEQ ID NO: 115962 - RNA, 22 nt, Human
uuccugcuccauuugcugagcu

SEQ ID NO: 115963 - RNA, 22 nt, Human
uuccuggagaguuuucccaaag

SEQ ID NO: 115964 - RNA, 21 nt, Human
uuccuggaggcagaaacguga

SEQ ID NO: 115965 - RNA, 22 nt, Human
uuccuggcaaagugagcaucac

SEQ ID NO: 115966 - RNA, 22 nt, Human
uuccuggcacugcagugguuga

SEQ ID NO: 115967 - RNA, 23 nt, Human
uuccuggcagguacaacuuuuac

SEQ ID NO: 115968 - RNA, 22 nt, Human
uuccuggcauuaugggaggcug

SEQ ID NO: 115969 - RNA, 22 nt, Human
uuccuggccaagcagaguggaa

SEQ ID NO: 115970 - RNA, 22 nt, Human
uuccuggccuaagguaggugac

SEQ ID NO: 115971 - RNA, 22 nt, Human
uuccuggcugucaugcccuagu

SEQ ID NO: 115972 - RNA, 22 nt, Human
uuccugggaggcuguguacuug

SEQ ID NO: 115973 - RNA, 22 nt, Human
uuccugggauuauugucaagca

SEQ ID NO: 115974 - RNA, 22 nt, Human
uuccugggggcagcagucuuga

SEQ ID NO: 115975 - RNA, 22 nt, Human
uuccuggggggauagauuucac

SEQ ID NO: 115976 - RNA, 19 nt, Human
uuccugggguuccauugug

SEQ ID NO: 115977 - RNA, 22 nt, Human
uuccuggguugugcauuguaca

SEQ ID NO: 115978 - RNA, 22 nt, Human
uuccuggguuuacguauugggu

SEQ ID NO: 115979 - RNA, 22 nt, Human
uuccugguuugccuggaaucca

SEQ ID NO: 115980 - RNA, 22 nt, Human
uuccuguaguugugcaauguac

SEQ ID NO: 115981 - RNA, 22 nt, Human
uuccugugaaauauagguccau

SEQ ID NO: 115982 - RNA, 22 nt, Human
uuccugugauauuagccacugu

SEQ ID NO: 115983 - RNA, 22 nt, Human
uuccuguggccuuacaucugug

SEQ ID NO: 115984 - RNA, 23 nt, Human
uuccugugguauauuuuauaggg

SEQ ID NO: 115985 - RNA, 22 nt, Human
uuccugugguccagagucaucc

SEQ ID NO: 115986 - RNA, 22 nt, Human
uuccuguguacguguuucgcug

SEQ ID NO: 115987 - RNA, 22 nt, Human
uuccugugugaccgagacagug

SEQ ID NO: 115988 - RNA, 22 nt, Human
uuccugugugacucaagugguu

SEQ ID NO: 115989 - RNA, 22 nt, Human
uuccuguuucauagaaaacuga

SEQ ID NO: 115990 - RNA, 22 nt, Human
uuccuuagccugccuuccaggg

SEQ ID NO: 115991 - RNA, 22 nt, Human
uuccuuagcuccucauggccug

SEQ ID NO: 115992 - RNA, 20 nt, Human
uuccuuaggcauuggaagaa

SEQ ID NO: 115993 - RNA, 22 nt, Human
uuccuuagggucagccagaucu

SEQ ID NO: 115994 - RNA, 22 nt, Human
uuccuuaguuauuugguccccu

SEQ ID NO: 115995 - RNA, 22 nt, Human
uuccuucccucaguggcugaag

SEQ ID NO: 115996 - RNA, 22 nt, Human
uuccuuccgggcaccaggcacu

SEQ ID NO: 115997 - RNA, 22 nt, Human
uuccuucuaauuuuacaccuga

SEQ ID NO: 115998 - RNA, 22 nt, Human
uuccuucuagagcuuguuuagg

SEQ ID NO: 115999 - RNA, 22 nt, Human
uuccuucuuccuuuaguaacca

SEQ ID NO: 116000 - RNA, 22 nt, Human
uuccuugauuaguacaugaagg

SEQ ID NO: 116001 - RNA, 22 nt, Human
uuccuuggauacaaguaacuuu

SEQ ID NO: 116002 - RNA, 22 nt, Human
uuccuuguugaaaaugucugca

SEQ ID NO: 116003 - RNA, 20 nt, Human
uuccuuuucgccucucuccc

SEQ ID NO: 116004 - RNA, 22 nt, Human
uuccuuuuuacauaaucacauu

SEQ ID NO: 116005 - RNA, 22 nt, Human
uucgcauucagcuuugccacug

SEQ ID NO: 116006 - RNA, 22 nt, Human
uucggucuggcuguuauacgcu

SEQ ID NO: 116007 - RNA, 22 nt, Human
uucguguggagauguuucugca

SEQ ID NO: 116008 - RNA, 22 nt, Human
uucguuuaguccacaaaugcau

SEQ ID NO: 116009 - RNA, 22 nt, Human
uucuaaaaccaauucugcuucu

SEQ ID NO: 116010 - RNA, 22 nt, Human
uucuaaacggcuucacaggaau

SEQ ID NO: 116011 - RNA, 22 nt, Human
uucuaaacugaaguauuuuaaa

SEQ ID NO: 116012 - RNA, 22 nt, Human
uucuaaacuucaauucuaaauu

SEQ ID NO: 116013 - RNA, 22 nt, Human
uucuaaagugcaaucugacaga

SEQ ID NO: 116014 - RNA, 22 nt, Human
uucuaaauguaaauaguaugau

SEQ ID NO: 116015 - RNA, 23 nt, Human
uucuaaccuuaaagcccuuugga

SEQ ID NO: 116016 - RNA, 22 nt, Human
uucuaacucaaagcuucuuuca

SEQ ID NO: 116017 - RNA, 22 nt, Human
uucuaacucuacacuagcuuug

SEQ ID NO: 116018 - RNA, 22 nt, Human
uucuaacuggcuugacaguuuc

SEQ ID NO: 116019 - RNA, 22 nt, Human
uucuaacuggugcagugcugca

SEQ ID NO: 116020 - RNA, 22 nt, Human
uucuaacuuucaagguccuuuc

SEQ ID NO: 116021 - RNA, 20 nt, Human
uucuaagguuuuggugcaca

SEQ ID NO: 116022 - RNA, 22 nt, Human
uucuaagucugcugucuucauc

SEQ ID NO: 116023 - RNA, 19 nt, Human
uucuaaguuuugcuugcug

SEQ ID NO: 116024 - RNA, 22 nt, Human
uucuaaugaaaguggaccaugg

SEQ ID NO: 116025 - RNA, 22 nt, Human
uucuaauuaaaucuacgcuagg

SEQ ID NO: 116026 - RNA, 22 nt, Human
uucuacacucacccagcuguaa

SEQ ID NO: 116027 - RNA, 22 nt, Human
uucuacacuuuucauuagcuag

SEQ ID NO: 116028 - RNA, 22 nt, Human
uucuacagacuauaacugugau

SEQ ID NO: 116029 - RNA, 22 nt, Human
uucuacagugacugcagccaua

SEQ ID NO: 116030 - RNA, 22 nt, Human
uucuacauugugaaguucuuua

SEQ ID NO: 116031 - RNA, 22 nt, Human
uucuagaacaggcaaaaccaau

SEQ ID NO: 116032 - RNA, 22 nt, Human
uucuagaaccaugacuucaggg

SEQ ID NO: 116033 - RNA, 22 nt, Human
uucuagaagaacuagccaggaa

SEQ ID NO: 116034 - RNA, 22 nt, Human
uucuagaagcugaaaaggggga

SEQ ID NO: 116035 - RNA, 20 nt, Human
uucuagaaguuugcuaccca

SEQ ID NO: 116036 - RNA, 22 nt, Human
uugggccucucaaagugcuggg

SEQ ID NO: 116037 - RNA, 22 nt, Human
uugggccugaucggaauaagga

SEQ ID NO: 116038 - RNA, 21 nt, Human
uugggccuuuucugguagcuu

SEQ ID NO: 116039 - RNA, 22 nt, Human
uugggcucaggaguuugagacc

SEQ ID NO: 116040 - RNA, 22 nt, Human
uugggcugaggagggcguggcc

SEQ ID NO: 116041 - RNA, 22 nt, Human
uugggcugcagcaauuauuagu

SEQ ID NO: 116042 - RNA, 22 nt, Human
uugggcuggagaugaucugcug

SEQ ID NO: 116043 - RNA, 22 nt, Human
uugggcuggauaagucuuuguu

SEQ ID NO: 116044 - RNA, 23 nt, Human
uugggcuggcucucgaugccucu

SEQ ID NO: 116045 - RNA, 22 nt, Human
uugggcuugacaagcugucaag

SEQ ID NO: 116046 - RNA, 22 nt, Human
uuggggagaaaugaaaugaagu

SEQ ID NO: 116047 - RNA, 22 nt, Human
uuggggcaugauuagauuauga

SEQ ID NO: 116048 - RNA, 22 nt, Human
uucagcagagaaauuacauaau

SEQ ID NO: 116049 - RNA, 22 nt, Human
uucagcagguggugaguucugc

SEQ ID NO: 116050 - RNA, 22 nt, Human
uucagcagucguccaggaaaag

SEQ ID NO: 116051 - RNA, 22 nt, Human
uucagccaauuagaagccccac

SEQ ID NO: 116052 - RNA, 22 nt, Human
uucagccugucugcagaccccu

SEQ ID NO: 116053 - RNA, 22 nt, Human
uucagcuaaugggaauaagagu

SEQ ID NO: 116054 - RNA, 20 nt, Human
uucagcuaccagguaucuuc

SEQ ID NO: 116055 - RNA, 17 nt, Human
uucagcuacucaacaca

SEQ ID NO: 116056 - RNA, 22 nt, Human
uucagcuauuauacccacuuuu

SEQ ID NO: 116057 - RNA, 21 nt, Human
uucagcuauucagaaggggag

SEQ ID NO: 116058 - RNA, 22 nt, Human
uucagcucagcacugacaagau

SEQ ID NO: 116059 - RNA, 22 nt, Human
uucagcucagucugugcagcag

SEQ ID NO: 116060 - RNA, 22 nt, Human
uucaggaagugcugccuggugu

SEQ ID NO: 116061 - RNA, 20 nt, Human
uucaggaauaagauagcagc

SEQ ID NO: 116062 - RNA, 22 nt, Human
uucaggagaaaguucaguacuu

SEQ ID NO: 116063 - RNA, 22 nt, Human
uucaggaggugagcaagaaggg

SEQ ID NO: 116064 - RNA, 22 nt, Human
uucaggagugucaggagugccu

SEQ ID NO: 116065 - RNA, 22 nt, Human
uucaggauaugugauaucugaa

SEQ ID NO: 116066 - RNA, 22 nt, Human
uucaggaucaaguugccaguag

SEQ ID NO: 116067 - RNA, 22 nt, Human
uucaggauccccaccgcguuua

SEQ ID NO: 116068 - RNA, 22 nt, Human
uucaggaugacaccauguccag

SEQ ID NO: 116069 - RNA, 22 nt, Human
uucaggauucucucccauuuac

SEQ ID NO: 116070 - RNA, 22 nt, Human
uucaggauucugugucugacaa

SEQ ID NO: 116071 - RNA, 22 nt, Human
uucaggauucuuucagacuggg

SEQ ID NO: 116072 - RNA, 22 nt, Human
uucaggauuguguuuuuccuga

SEQ ID NO: 116073 - RNA, 22 nt, Human
uucaggcauggaaacuggauua

SEQ ID NO: 116074 - RNA, 22 nt, Human
uucagggacuuagugucaguuu

SEQ ID NO: 116075 - RNA, 22 nt, Human
uucagggcaugagggacacauc

SEQ ID NO: 116076 - RNA, 20 nt, Human
uucagggcuuuggggacacc

SEQ ID NO: 116077 - RNA, 22 nt, Human
uucagggucuagaguaucuacc

SEQ ID NO: 116078 - RNA, 22 nt, Human
uucaggugggccuuuugagcau

SEQ ID NO: 116079 - RNA, 22 nt, Human
uucaguaaaacacugcaauguc

SEQ ID NO: 116080 - RNA, 22 nt, Human
uucaguauaaaaucaaagugau

SEQ ID NO: 116081 - RNA, 22 nt, Human
uucaguaucccugcuuggacag

SEQ ID NO: 116082 - RNA, 22 nt, Human
uucaguaucugcaaaaugggga

SEQ ID NO: 116083 - RNA, 21 nt, Human
uucaguaugcgucaugcuguu

SEQ ID NO: 116084 - RNA, 22 nt, Human
uucaguauguuggacguuaugu

SEQ ID NO: 116085 - RNA, 22 nt, Human
uucaguauucaaauaugucuua

SEQ ID NO: 116086 - RNA, 22 nt, Human
uucagucagugacuaagcaguu

SEQ ID NO: 116087 - RNA, 22 nt, Human
uucaguccucacaaccucacua

SEQ ID NO: 116088 - RNA, 22 nt, Human
uucagucucaagugcugcucac

SEQ ID NO: 116089 - RNA, 22 nt, Human
uucagucucaauuuaaguuuaa

SEQ ID NO: 116090 - RNA, 22 nt, Human
uucagugcagacgccgaagccc

SEQ ID NO: 116091 - RNA, 22 nt, Human
uucagugcuaaaaagucucaag

SEQ ID NO: 116092 - RNA, 22 nt, Human
uucagugugccuaagucaguug

SEQ ID NO: 116093 - RNA, 22 nt, Human
uucagugugcuucaggacguua

SEQ ID NO: 116094 - RNA, 22 nt, Human
uucaguguggcccaugaagagg

SEQ ID NO: 116095 - RNA, 22 nt, Human
uucaguguggugcacaguuuug

SEQ ID NO: 116096 - RNA, 22 nt, Human
uucaguguuaaauucaaagagu

SEQ ID NO: 116097 - RNA, 22 nt, Human
uucaguuccuugugcgaauucc

SEQ ID NO: 116098 - RNA, 22 nt, Human
uucaguuucaaauccuggaugc

SEQ ID NO: 116099 - RNA, 19 nt, Human
uucaguuuccucaucugga

SEQ ID NO: 116100 - RNA, 22 nt, Human
uucaguuucguuaucuaugaga

SEQ ID NO: 116101 - RNA, 22 nt, Human
uucaguuucuaaaugcuccucu

SEQ ID NO: 116102 - RNA, 22 nt, Human
uucaguuucuucccugugaaau

SEQ ID NO: 116103 - RNA, 22 nt, Human
uucaguuugcuacaagcaacau

SEQ ID NO: 116104 - RNA, 22 nt, Human
uucauaaguugguguugacuuu

SEQ ID NO: 116105 - RNA, 19 nt, Human
uucauaaguuuagugaggg

SEQ ID NO: 116106 - RNA, 22 nt, Human
uucauaaucaccaaaaacugga

SEQ ID NO: 116107 - RNA, 22 nt, Human
uucauacaaugggauauuauga

SEQ ID NO: 116108 - RNA, 22 nt, Human
uucauacacgaaaaugcaugca

SEQ ID NO: 116109 - RNA, 23 nt, Human
uucauacagaaacaucacuucau

SEQ ID NO: 116110 - RNA, 22 nt, Human
uucauacaugagacuagaugca

SEQ ID NO: 116111 - RNA, 22 nt, Human
uucauacauguguacuguucca

SEQ ID NO: 116112 - RNA, 22 nt, Human
uucauacucacuccaauaacug

SEQ ID NO: 116113 - RNA, 22 nt, Human
uucauacucuucccugggcaaa

SEQ ID NO: 116114 - RNA, 22 nt, Human
uucauacuguguuuccaaguuu

SEQ ID NO: 116115 - RNA, 22 nt, Human
uucauagacccagaacucauua

SEQ ID NO: 116116 - RNA, 22 nt, Human
uucauagguuugcugugaacau

SEQ ID NO: 116117 - RNA, 22 nt, Human
uucauagugauuguucagauag

SEQ ID NO: 116118 - RNA, 22 nt, Human
uucauagugcuuaauuugauaa

SEQ ID NO: 116119 - RNA, 22 nt, Human
uucauauaaauggaaucagaau

SEQ ID NO: 116120 - RNA, 22 nt, Human
uucauauuucuuuaaggacuuu

SEQ ID NO: 116121 - RNA, 22 nt, Human
uucauauuugaaacagaaguua

SEQ ID NO: 116122 - RNA, 23 nt, Human
uucaucaguugcuguugcagaac

SEQ ID NO: 116123 - RNA, 22 nt, Human
uucaucaugauguuccccucua

SEQ ID NO: 116124 - RNA, 22 nt, Human
uucaucauuacagucauguuau

SEQ ID NO: 116125 - RNA, 22 nt, Human
uucaucauugccagucuuuaaa

SEQ ID NO: 116126 - RNA, 22 nt, Human
uucauccauaugcagagagcuu

SEQ ID NO: 116127 - RNA, 22 nt, Human
uucaucuagugugcucguaacg

SEQ ID NO: 116128 - RNA, 22 nt, Human
uucaucuggaauuuauguuaua

SEQ ID NO: 116129 - RNA, 22 nt, Human
uucaucuguagcaucuuccaau

SEQ ID NO: 116130 - RNA, 22 nt, Human
uucaucuguaguuuuuccaagg

SEQ ID NO: 116131 - RNA, 22 nt, Human
uucaugaacgaacauauguaua

SEQ ID NO: 116132 - RNA, 22 nt, Human
uucaugaagggugaauauaguc

SEQ ID NO: 116133 - RNA, 22 nt, Human
uucaugaauaccccuucuguaa

SEQ ID NO: 116134 - RNA, 22 nt, Human
uucaugaauauauugaauuagc

SEQ ID NO: 116135 - RNA, 21 nt, Human
uucaugagauaaccagcugua

SEQ ID NO: 116136 - RNA, 22 nt, Human
uucaugagcagaagggaggggu

SEQ ID NO: 116137 - RNA, 22 nt, Human
uucaugcacuauuucuucuagc

SEQ ID NO: 116138 - RNA, 20 nt, Human
uucaugcagugguugcugug

SEQ ID NO: 116139 - RNA, 22 nt, Human
uucaugcuuguuccuccaccug

SEQ ID NO: 116140 - RNA, 22 nt, Human
uucauggccuacuuugcuucaa

SEQ ID NO: 116141 - RNA, 22 nt, Human
uucauguaacuuuucuucucca

SEQ ID NO: 116142 - RNA, 22 nt, Human
uucauguaccguguaccaggca

SEQ ID NO: 116143 - RNA, 22 nt, Human
uucauguaguguaaugucuuca

SEQ ID NO: 116144 - RNA, 22 nt, Human
uucauguaugaggccaaucuuu

SEQ ID NO: 116145 - RNA, 22 nt, Human
uucauguauugcauuguguccu

SEQ ID NO: 116146 - RNA, 22 nt, Human
uucauguauuuaucauguaaau

SEQ ID NO: 116147 - RNA, 22 nt, Human
uucaugugaucacagauuguaa

SEQ ID NO: 116148 - RNA, 23 nt, Human
uucauguggaccuagaggccugu

SEQ ID NO: 116149 - RNA, 22 nt, Human
uucauguguuugauagcccaga

SEQ ID NO: 116150 - RNA, 22 nt, Human
uucauguucaugcuuaggaaaa

SEQ ID NO: 116151 - RNA, 22 nt, Human
uucauguuggcauguuuuuagg

SEQ ID NO: 116152 - RNA, 22 nt, Human
uucauguuguaguauguaucag

SEQ ID NO: 116153 - RNA, 22 nt, Human
uugugcucuguguuauuuaagg

SEQ ID NO: 116154 - RNA, 23 nt, Human
uuguggaagggagauggcaacag

SEQ ID NO: 116155 - RNA, 22 nt, Human
uuguggcucgugagauguuagg

SEQ ID NO: 116156 - RNA, 22 nt, Human
uuguggcugucgagaauugagg

SEQ ID NO: 116157 - RNA, 22 nt, Human
uucuucuucaagugcugcauuc

SEQ ID NO: 116158 - RNA, 22 nt, Human
uucauguuuccucuugugcugc

SEQ ID NO: 116159 - RNA, 22 nt, Human
uucauguuuguaggacugaggc

SEQ ID NO: 116160 - RNA, 22 nt, Human
uucauguuuuauucaguaauua

SEQ ID NO: 116161 - RNA, 17 nt, Human
uucauuaauaaaagcaa

SEQ ID NO: 116162 - RNA, 22 nt, Human
uucauuaauucauucagugacu

SEQ ID NO: 116163 - RNA, 22 nt, Human
uucauuacauucaaaaggcauu

SEQ ID NO: 116164 - RNA, 22 nt, Human
uucauuacugcgguagucacac

SEQ ID NO: 116165 - RNA, 22 nt, Human
uucauuagcaaggucuucaagu

SEQ ID NO: 116166 - RNA, 22 nt, Human
uucauucaaagaggcauccaag

SEQ ID NO: 116167 - RNA, 22 nt, Human
uucauucagugagacuaggacg

SEQ ID NO: 116168 - RNA, 22 nt, Human
uucauucauuacgugccaggca

SEQ ID NO: 116169 - RNA, 22 nt, Human
uucauucccuuauauuagcauu

SEQ ID NO: 116170 - RNA, 22 nt, Human
uucauuccuucuguaccuugcc

SEQ ID NO: 116171 - RNA, 22 nt, Human
uucauucuuauuugugaucugg

SEQ ID NO: 116172 - RNA, 22 nt, Human
uucauucuugggaucagagagu

SEQ ID NO: 116173 - RNA, 22 nt, Human
uucauucuuuuacaugugaaua

SEQ ID NO: 116174 - RNA, 22 nt, Human
uucauugaaccacuuuauucuu

SEQ ID NO: 116175 - RNA, 22 nt, Human
uucauugagcuguacacuuagg

SEQ ID NO: 116176 - RNA, 22 nt, Human
uucauugauuccaggcucuucu

SEQ ID NO: 116177 - RNA, 22 nt, Human
uucauuguacuuuaagagaugc

SEQ ID NO: 116178 - RNA, 22 nt, Human
uucauugucucuguuugccuuc

SEQ ID NO: 116179 - RNA, 22 nt, Human
uucauuuaaucagaaucucuaa

SEQ ID NO: 116180 - RNA, 22 nt, Human
uucauuuaauuuguguauuaac

SEQ ID NO: 116181 - RNA, 23 nt, Human
uucauuuaggaguucauaagagc

SEQ ID NO: 116182 - RNA, 22 nt, Human
uucauuuauucagcagguauuu

SEQ ID NO: 116183 - RNA, 22 nt, Human
uucauuugucugcuauagaucc

SEQ ID NO: 116184 - RNA, 22 nt, Human
uuccaaacugccaauucagaag

SEQ ID NO: 116185 - RNA, 22 nt, Human
uuccaaaguuaguuauuagaaa

SEQ ID NO: 116186 - RNA, 22 nt, Human
uuccaaauuaaaauguacaaug

SEQ ID NO: 116187 - RNA, 22 nt, Human
uuccaacaauguguuauuguuc

SEQ ID NO: 116188 - RNA, 22 nt, Human
uuccaaggagagcucgaccuca

SEQ ID NO: 116189 - RNA, 22 nt, Human
uuccaaggcaacagccuaggcu

SEQ ID NO: 116190 - RNA, 22 nt, Human
uuccaaggccagacagggcagu

SEQ ID NO: 116191 - RNA, 22 nt, Human
uuccaagguguucugcugguuu

SEQ ID NO: 116192 - RNA, 22 nt, Human
uuccaaguagaagcauuugcau

SEQ ID NO: 116193 - RNA, 22 nt, Human
uuccaagugggggaagcugagu

SEQ ID NO: 116194 - RNA, 22 nt, Human
uuccaagugucagaucagauuu

SEQ ID NO: 116195 - RNA, 22 nt, Human
uuccaauauuuacaaugcauua

SEQ ID NO: 116196 - RNA, 22 nt, Human
uuccaauugcagaucagauaca

SEQ ID NO: 116197 - RNA, 22 nt, Human
uuccaauugugagauuuuuuaa

SEQ ID NO: 116198 - RNA, 22 nt, Human
uuccaauuguucuuuggaaucu

SEQ ID NO: 116199 - RNA, 22 nt, Human
uuccacaacaaccaagcauaua

SEQ ID NO: 116200 - RNA, 22 nt, Human
uuccacaaugguuaagcucguu

SEQ ID NO: 116201 - RNA, 22 nt, Human
uuccacagaugaaaauuaaguu

SEQ ID NO: 116202 - RNA, 22 nt, Human
uuccacaggacuaaaugucauc

SEQ ID NO: 116203 - RNA, 22 nt, Human
uuccacagguuucagacuguuc

SEQ ID NO: 116204 - RNA, 22 nt, Human
uuccacucuacucuggccaguc

SEQ ID NO: 116205 - RNA, 19 nt, Human
uuccacuuggguuagaauu

SEQ ID NO: 116206 - RNA, 22 nt, Human
uuccagaaaccugaaaguuucu

SEQ ID NO: 116207 - RNA, 21 nt, Human
uuccagaaaucucuuucuuca

SEQ ID NO: 116208 - RNA, 22 nt, Human
uuccagaacucaagaaaugccc

SEQ ID NO: 116209 - RNA, 22 nt, Human
uuccagagaaaagguuuauuuc

SEQ ID NO: 116210 - RNA, 22 nt, Human
uuccagagaggcucauguuccc

SEQ ID NO: 116211 - RNA, 23 nt, Human
uuccagaggaagaagucaugacu

SEQ ID NO: 116212 - RNA, 22 nt, Human
uuccagaggcucuaggggagaa

SEQ ID NO: 116213 - RNA, 22 nt, Human
uuccagaggcuugaggaaaauu

SEQ ID NO: 116214 - RNA, 22 nt, Human
uuccagagguagcaaugacuug

SEQ ID NO: 116215 - RNA, 22 nt, Human
uuccagagguucucagcccugu

SEQ ID NO: 116216 - RNA, 22 nt, Human
uuccagagugacugugccacuu

SEQ ID NO: 116217 - RNA, 22 nt, Human
uuccagaguugggggagugguu

SEQ ID NO: 116218 - RNA, 22 nt, Human
uuccagauauuuuuauguggaa

SEQ ID NO: 116219 - RNA, 22 nt, Human
uuccagcuuagagcaucauguu

SEQ ID NO: 116220 - RNA, 22 nt, Human
uuccaggaacaaacucaccuua

SEQ ID NO: 116221 - RNA, 22 nt, Human
uuccaggaagcaguuagcagcc

SEQ ID NO: 116222 - RNA, 22 nt, Human
uuccaggaagcucucggccucu

SEQ ID NO: 116223 - RNA, 22 nt, Human
uuccaggaggcacugacagagg

SEQ ID NO: 116224 - RNA, 22 nt, Human
uuccaggaggucaaaggccugu

SEQ ID NO: 116225 - RNA, 22 nt, Human
uuccaggauagcuuucaggaau

SEQ ID NO: 116226 - RNA, 22 nt, Human
uuccaggauggcaauaaugaau

SEQ ID NO: 116227 - RNA, 22 nt, Human
uuccaggccgggcaggaaacac

SEQ ID NO: 116228 - RNA, 22 nt, Human
uuccaggcuauucccuuuggag

SEQ ID NO: 116229 - RNA, 22 nt, Human
uuccaggcuucucuggggcguc

SEQ ID NO: 116230 - RNA, 22 nt, Human
uuccagggaagagcaaggcagu

SEQ ID NO: 116231 - RNA, 22 nt, Human
uuccagggcuaauuccugugga

SEQ ID NO: 116232 - RNA, 19 nt, Human
uuccaggugcuguggggag

SEQ ID NO: 116233 - RNA, 18 nt, Human
uuccaguagcuguaucac

SEQ ID NO: 116234 - RNA, 22 nt, Human
uuccagucuaguaccuggaugc

SEQ ID NO: 116235 - RNA, 22 nt, Human
uuccaguucagaugcaacaggg

SEQ ID NO: 116236 - RNA, 19 nt, Human
uuccaguucuaaucucuuc

SEQ ID NO: 116237 - RNA, 22 nt, Human
uuccaguugguagaauguaagg

SEQ ID NO: 116238 - RNA, 22 nt, Human
uuccaguuugcaguugacacua

SEQ ID NO: 116239 - RNA, 22 nt, Human
uuccauaauaaccugagagaaa

SEQ ID NO: 116240 - RNA, 22 nt, Human
uuccauauguauauagcuguua

SEQ ID NO: 116241 - RNA, 22 nt, Human
uuccauauuguacucuuuggag

SEQ ID NO: 116242 - RNA, 22 nt, Human
uuccauauuuguguggcaaaag

SEQ ID NO: 116243 - RNA, 22 nt, Human
uuccaucugcuagguaaaugaa

SEQ ID NO: 116244 - RNA, 22 nt, Human
uuccaugaaagugaaauggagc

SEQ ID NO: 116245 - RNA, 22 nt, Human
uuccaugaagggcagccucuca

SEQ ID NO: 116246 - RNA, 22 nt, Human
uuccaugaguagcaguauuucc

SEQ ID NO: 116247 - RNA, 22 nt, Human
uuccauugaguaccuggagaca

SEQ ID NO: 116248 - RNA, 22 nt, Human
uuccauuuauucuuguccagau

SEQ ID NO: 116249 - RNA, 22 nt, Human
uucccacacccauauugugauu

SEQ ID NO: 116250 - RNA, 22 nt, Human
uucccacaguucagaacaaagg

SEQ ID NO: 116251 - RNA, 22 nt, Human
uucccacauucuuuacauucau

SEQ ID NO: 116252 - RNA, 22 nt, Human
uucccagaaugaauggauggag

SEQ ID NO: 116253 - RNA, 22 nt, Human
uucccagaauuguugggaacug

SEQ ID NO: 116254 - RNA, 22 nt, Human
uucccagaccuguaggaucaga

SEQ ID NO: 116255 - RNA, 22 nt, Human
uucccagagauaagacgucuua

SEQ ID NO: 116256 - RNA, 22 nt, Human
uucccaggaagccucuccaagc

SEQ ID NO: 116257 - RNA, 22 nt, Human
uucccagugauuaaggcagugg

SEQ ID NO: 116258 - RNA, 22 nt, Human
uucccauuugugguagugaauu

SEQ ID NO: 116259 - RNA, 22 nt, Human
uuccccuugauaaugcaguaag

SEQ ID NO: 116260 - RNA, 22 nt, Human
uuccccuugcacuaucacccug

SEQ ID NO: 116261 - RNA, 22 nt, Human
uuccccuuuuugugugcagcug

SEQ ID NO: 116262 - RNA, 22 nt, Human
uucccuaagcauugcaauggcg

SEQ ID NO: 116263 - RNA, 22 nt, Human
uucccucccuggcugccauuuc

SEQ ID NO: 116264 - RNA, 22 nt, Human
uucccuccgaaccucagugcug

SEQ ID NO: 116265 - RNA, 22 nt, Human
uucccuccuaugcccacugaaa

SEQ ID NO: 116266 - RNA, 22 nt, Human
uuuauuaugauggacaccuucg

SEQ ID NO: 116267 - RNA, 22 nt, Human
uuuauuauguacaggcacuaua

SEQ ID NO: 116268 - RNA, 22 nt, Human
uuuauuauucucuggagaaugu

SEQ ID NO: 116269 - RNA, 22 nt, Human
uuuauuauucuguucucucuac

SEQ ID NO: 116270 - RNA, 19 nt, Human
uuuauucaccuuuaccuug

SEQ ID NO: 116271 - RNA, 22 nt, Human
uuuauucaucaucuguucauau

SEQ ID NO: 116272 - RNA, 22 nt, Human
uuuauuccaguguuucucaaau

SEQ ID NO: 116273 - RNA, 22 nt, Human
uuuauuccaugugucuaugacc

SEQ ID NO: 116274 - RNA, 18 nt, Human
uuuauuccugcccccagc

SEQ ID NO: 116275 - RNA, 22 nt, Human
uugaccuuggcuuuuaaaauau

SEQ ID NO: 116276 - RNA, 22 nt, Human
uugacuauacucuggcggaaaa

SEQ ID NO: 116277 - RNA, 17 nt, Human
uugacuguuaauggguu

SEQ ID NO: 116278 - RNA, 22 nt, Human
uugacuucagaauguugauggu

SEQ ID NO: 116279 - RNA, 22 nt, Human
uugagaaaacacagaguuuauu

SEQ ID NO: 116280 - RNA, 22 nt, Human
uugagaaaggggucaauaucuc

SEQ ID NO: 116281 - RNA, 22 nt, Human
uugagaaauacuuuuguagccu

SEQ ID NO: 116282 - RNA, 22 nt, Human
uugagaaccacugaguuagaua

SEQ ID NO: 116283 - RNA, 22 nt, Human
uugagaacucuguauguccagc

SEQ ID NO: 116284 - RNA, 22 nt, Human
uugagaagaauguguugaguuu

SEQ ID NO: 116285 - RNA, 19 nt, Human
uugagaauuaucugaguca

SEQ ID NO: 116286 - RNA, 22 nt, Human
uugagacacaaggcacaguaag

SEQ ID NO: 116287 - RNA, 22 nt, Human
uugagacuccugguguagaaua

SEQ ID NO: 116288 - RNA, 22 nt, Human
uugagacugccuugucgucugc

SEQ ID NO: 116289 - RNA, 22 nt, Human
uugagagaaaaaauuuauuggu

SEQ ID NO: 116290 - RNA, 22 nt, Human
uugagagaggaaacauagucuc

SEQ ID NO: 116291 - RNA, 22 nt, Human
uugagaguuaccagcagaggaa

SEQ ID NO: 116292 - RNA, 22 nt, Human
uugagauagguggaaucucuuu

SEQ ID NO: 116293 - RNA, 22 nt, Human
uugagcaagccugcggcgggaa

SEQ ID NO: 116294 - RNA, 22 nt, Human
uugagcacaacucuuggagagc

SEQ ID NO: 116295 - RNA, 22 nt, Human
uugagcagaucgggcugugggg

SEQ ID NO: 116296 - RNA, 20 nt, Human
uugagcagcagugcuguguc

SEQ ID NO: 116297 - RNA, 22 nt, Human
uugagcaggaacuagaagauag

SEQ ID NO: 116298 - RNA, 22 nt, Human
uugagcaggauggcuaugcaca

SEQ ID NO: 116299 - RNA, 19 nt, Human
uugagcagugcuuagcacc

SEQ ID NO: 116300 - RNA, 22 nt, Human
uugagcauaugcauuuccaauu

SEQ ID NO: 116301 - RNA, 22 nt, Human
uugagcauuuguuuugaaagag

SEQ ID NO: 116302 - RNA, 22 nt, Human
uugagcccaggaggccugggug

SEQ ID NO: 116303 - RNA, 22 nt, Human
uugagcucagugacucgacuuu

SEQ ID NO: 116304 - RNA, 22 nt, Human
uugagcuguaaggugggaugug

SEQ ID NO: 116305 - RNA, 20 nt, Human
uugagcuuccaagucuuugu

SEQ ID NO: 116306 - RNA, 22 nt, Human
uugagcuugaggaguuauuuga

SEQ ID NO: 116307 - RNA, 22 nt, Human
uugagcuuuacaacagcuguua

SEQ ID NO: 116308 - RNA, 20 nt, Human
uugagcuuuuaguacagaca

SEQ ID NO: 116309 - RNA, 22 nt, Human
uugaggagaagacuuugcuucc

SEQ ID NO: 116310 - RNA, 22 nt, Human
uugaggagcacuagucagguau

SEQ ID NO: 116311 - RNA, 22 nt, Human
uugaggaguagaagcuuugaau

SEQ ID NO: 116312 - RNA, 22 nt, Human
uugaggagucaggggcacggaa

SEQ ID NO: 116313 - RNA, 22 nt, Human
uugaggaguggcgcuggacuua

SEQ ID NO: 116314 - RNA, 23 nt, Human
uugaggcaaacauguaaguagga

SEQ ID NO: 116315 - RNA, 20 nt, Human
uugaggcaugucuagaagua

SEQ ID NO: 116316 - RNA, 22 nt, Human
uugaggccaaaaaguccuauga

SEQ ID NO: 116317 - RNA, 22 nt, Human
uugaggcugcacaguacaggcu

SEQ ID NO: 116318 - RNA, 22 nt, Human
uugagggagaaagcugaggugu

SEQ ID NO: 116319 - RNA, 22 nt, Human
uugagggauuuuaaaugaacaa

SEQ ID NO: 116320 - RNA, 19 nt, Human
uugaggggccaggggagau

SEQ ID NO: 116321 - RNA, 21 nt, Human
uugagggguauugcuuuucuc

SEQ ID NO: 116322 - RNA, 22 nt, Human
uugagguaauaaacagccauuc

SEQ ID NO: 116323 - RNA, 22 nt, Human
uugagguacaaacaugagguuu

SEQ ID NO: 116324 - RNA, 22 nt, Human
uugagguacaaugggucaguua

SEQ ID NO: 116325 - RNA, 22 nt, Human
uugagguagagaaaggaaauga

SEQ ID NO: 116326 - RNA, 22 nt, Human
uugagguauugauaaaacauuu

SEQ ID NO: 116327 - RNA, 20 nt, Human
uugaggucaaggacuaggcc

SEQ ID NO: 116328 - RNA, 22 nt, Human
uugagguccaggugugggcagg

SEQ ID NO: 116329 - RNA, 22 nt, Human
uugagguccagucuccacccac

SEQ ID NO: 116330 - RNA, 22 nt, Human
uugaggucccaaacccacugag

SEQ ID NO: 116331 - RNA, 22 nt, Human
uugaggucugugauaaaaguca

SEQ ID NO: 116332 - RNA, 22 nt, Human
uugagucaguaauuccauuucu

SEQ ID NO: 116333 - RNA, 18 nt, Human
uugagucuagccauggaa

SEQ ID NO: 116334 - RNA, 22 nt, Human
uugagucucugccaaaacacaa

SEQ ID NO: 116335 - RNA, 22 nt, Human
uugagucuucaguaaaagggua

SEQ ID NO: 116336 - RNA, 22 nt, Human
uugaguucagggguugauugga

SEQ ID NO: 116337 - RNA, 22 nt, Human
uugaguuccaggaugguuguua

SEQ ID NO: 116338 - RNA, 22 nt, Human
uugaguucuguguauccuuugu

SEQ ID NO: 116339 - RNA, 22 nt, Human
uugauaaaaugauaucuucuuu

SEQ ID NO: 116340 - RNA, 22 nt, Human
uugauaaaaugaugaaaucacu

SEQ ID NO: 116341 - RNA, 18 nt, Human
uugauaaacaauuucauu

SEQ ID NO: 116342 - RNA, 23 nt, Human
uugauacagaagaaucaguuugu

SEQ ID NO: 116343 - RNA, 22 nt, Human
uugauacauuuuuaggauaaac

SEQ ID NO: 116344 - RNA, 22 nt, Human
uugauacuauuaagcacugggc

SEQ ID NO: 116345 - RNA, 20 nt, Human
uugauaggcagcuugucagg

SEQ ID NO: 116346 - RNA, 22 nt, Human
uugauauuagaguauuuguuug

SEQ ID NO: 116347 - RNA, 22 nt, Human
uugauauucugagaagcugaag

SEQ ID NO: 116348 - RNA, 22 nt, Human
uugaucaucuaagaguaauagu

SEQ ID NO: 116349 - RNA, 22 nt, Human
uugaucaucuugugcugacggc

SEQ ID NO: 116350 - RNA, 22 nt, Human
uugaucauuuuucugguaaaau

SEQ ID NO: 116351 - RNA, 22 nt, Human
uugauccaguugaaagugauga

SEQ ID NO: 116352 - RNA, 22 nt, Human
uugaucucauuguucuccucag

SEQ ID NO: 116353 - RNA, 22 nt, Human
uugaucucuguugcugucuuug

SEQ ID NO: 116354 - RNA, 22 nt, Human
uugaucuuacaguguucuucca

SEQ ID NO: 116355 - RNA, 22 nt, Human
uugaugcugucuuucagaauca

SEQ ID NO: 116356 - RNA, 22 nt, Human
uugauggcuuuuuggcagagcu

SEQ ID NO: 116357 - RNA, 22 nt, Human
uugauguacagaauuguucaca

SEQ ID NO: 116358 - RNA, 22 nt, Human
uugauguucauaaaugauacag

SEQ ID NO: 116359 - RNA, 22 nt, Human
uugauuaaacaggcauauucaa

SEQ ID NO: 116360 - RNA, 22 nt, Human
uugauucacaauuaccaagacu

SEQ ID NO: 116361 - RNA, 22 nt, Human
uugauucagagaagauuggccc

SEQ ID NO: 116362 - RNA, 20 nt, Human
uugauucccucuaaacucgc

SEQ ID NO: 116363 - RNA, 22 nt, Human
uugauuccuugaaauauccuug

SEQ ID NO: 116364 - RNA, 22 nt, Human
uugauucuauggcuccgggagu

SEQ ID NO: 116365 - RNA, 22 nt, Human
uugauucuauguuguugucuca

SEQ ID NO: 116366 - RNA, 23 nt, Human
uugauucuccaguaugggcugag

SEQ ID NO: 116367 - RNA, 22 nt, Human
uugauucugggcucauuucuuu

SEQ ID NO: 116368 - RNA, 22 nt, Human
uugauuucuauucagauguaga

SEQ ID NO: 116369 - RNA, 22 nt, Human
uugauuuuuuucuacuaugcgc

SEQ ID NO: 116370 - RNA, 23 nt, Human
uugcaaaaugagucuugagugaa

SEQ ID NO: 116371 - RNA, 22 nt, Human
uugcaaagagauaauccuaggc

SEQ ID NO: 116372 - RNA, 22 nt, Human
uugcaaauaaacaaguauacau

SEQ ID NO: 116373 - RNA, 22 nt, Human
uugcaaauauuccccuaggucu

SEQ ID NO: 116374 - RNA, 22 nt, Human
uugcaaauauuguuuaccuuuc

SEQ ID NO: 116375 - RNA, 22 nt, Human
uuucaguucauguauuccgagu

SEQ ID NO: 116376 - RNA, 22 nt, Human
uuucaguucuguacaaguccag

SEQ ID NO: 116377 - RNA, 22 nt, Human
uuucaguugauugcuuggguua

SEQ ID NO: 116378 - RNA, 20 nt, Human
uuucaguugguuaauggcau

SEQ ID NO: 116379 - RNA, 22 nt, Human
uuucaguuguccuguuaauagc

SEQ ID NO: 116380 - RNA, 22 nt, Human
uuucaguuugucggccuuggac

SEQ ID NO: 116381 - RNA, 22 nt, Human
uuucaguuuuugcucgauguau

SEQ ID NO: 116382 - RNA, 22 nt, Human
uuucauaaccucaagcuacagu

SEQ ID NO: 116383 - RNA, 22 nt, Human
uuucauaaggguuucuagacuu

SEQ ID NO: 116384 - RNA, 22 nt, Human
uuucauaauacuguacaugaaa

SEQ ID NO: 116385 - RNA, 22 nt, Human
uuucauaauagugcaguuuguu

SEQ ID NO: 116386 - RNA, 22 nt, Human
uuucauagucaaguguguauga

SEQ ID NO: 116387 - RNA, 22 nt, Human
uuucauauuauuccuugagucu

SEQ ID NO: 116388 - RNA, 22 nt, Human
uucuacaugagaaaauguauuu

SEQ ID NO: 116389 - RNA, 22 nt, Human
uucuacaugguugcucagaggg

SEQ ID NO: 116390 - RNA, 22 nt, Human
uucuacauuuaaaaggaaaauc

SEQ ID NO: 116391 - RNA, 22 nt, Human
uucuaccuacccucugcauaca

SEQ ID NO: 116392 - RNA, 19 nt, Human
uucuaccuuacuguaggcu

SEQ ID NO: 116393 - RNA, 22 nt, Human
uucuacuugccaaaugacacau

SEQ ID NO: 116394 - RNA, 22 nt, Human
uucuacuuuagcaugcucauuc

SEQ ID NO: 116395 - RNA, 22 nt, Human
uucuagaaacacaugcaaacag

SEQ ID NO: 116396 - RNA, 21 nt, Human
uucuagaaccgugggcgguuc

SEQ ID NO: 116397 - RNA, 22 nt, Human
uucuagaagcucuaggggagaa

SEQ ID NO: 116398 - RNA, 22 nt, Human
uucuagaaggcaggcugggcca

SEQ ID NO: 116399 - RNA, 22 nt, Human
uucuagaauguuuugaaaggga

SEQ ID NO: 116400 - RNA, 22 nt, Human
uucuagauaucuaguguauaac

SEQ ID NO: 116401 - RNA, 22 nt, Human
uucuagauugccuguaaguaaa

SEQ ID NO: 116402 - RNA, 22 nt, Human
uucuagcacugccuggaagaca

SEQ ID NO: 116403 - RNA, 22 nt, Human
uucuagcagagggcaucugcug

SEQ ID NO: 116404 - RNA, 23 nt, Human
uucuaggcucugauugggcuucc

SEQ ID NO: 116405 - RNA, 22 nt, Human
uucuagggaaugggaugaggau

SEQ ID NO: 116406 - RNA, 22 nt, Human
uucuaguguccuuggacuugcu

SEQ ID NO: 116407 - RNA, 22 nt, Human
uucuaguuauagaaaaagcauu

SEQ ID NO: 116408 - RNA, 22 nt, Human
uucuauauuggaagugagaaau

SEQ ID NO: 116409 - RNA, 22 nt, Human
uucuaugauucauuuagaaguu

SEQ ID NO: 116410 - RNA, 22 nt, Human
uucuaugccauguucagcuacu

SEQ ID NO: 116411 - RNA, 22 nt, Human
uucuaugccugagaagaagccg

SEQ ID NO: 116412 - RNA, 22 nt, Human
uucuaugcuaguggaaagcuuc

SEQ ID NO: 116413 - RNA, 22 nt, Human
uucuauguagauaaggcugcuc

SEQ ID NO: 116414 - RNA, 22 nt, Human
uucuauguaguagcagagccaa

SEQ ID NO: 116415 - RNA, 22 nt, Human
uucuauguggauauagaacugc

SEQ ID NO: 116416 - RNA, 22 nt, Human
uucuauguggcaucaagcucag

SEQ ID NO: 116417 - RNA, 22 nt, Human
uucuauguguugacaagccuga

SEQ ID NO: 116418 - RNA, 22 nt, Human
uucuauguucuaagucucaagg

SEQ ID NO: 116419 - RNA, 22 nt, Human
uucuauuaauauguuaauucug

SEQ ID NO: 116420 - RNA, 22 nt, Human
uucuauuuccaguccuucagag

SEQ ID NO: 116421 - RNA, 22 nt, Human
uucucacaauucuuguauuugc

SEQ ID NO: 116422 - RNA, 22 nt, Human
uucucacacuuuccacugaggu

SEQ ID NO: 116423 - RNA, 22 nt, Human
uucucacagaagcacgaagccu

SEQ ID NO: 116424 - RNA, 22 nt, Human
uucucacaggaaguaggacuuu

SEQ ID NO: 116425 - RNA, 22 nt, Human
uucucacaggauuucuuuuagu

SEQ ID NO: 116426 - RNA, 22 nt, Human
uucucacaggcuggaaugauga

SEQ ID NO: 116427 - RNA, 22 nt, Human
uucucacauucagaacuuuuau

SEQ ID NO: 116428 - RNA, 22 nt, Human
uucucacguuauuggcugagag

SEQ ID NO: 116429 - RNA, 22 nt, Human
uucucacuauguauguagauug

SEQ ID NO: 116430 - RNA, 22 nt, Human
uucucagaaaagcaagcuuucu

SEQ ID NO: 116431 - RNA, 22 nt, Human
uucucagacuuccagcaccagc

SEQ ID NO: 116432 - RNA, 18 nt, Human
uucucagacuuuggaagu

SEQ ID NO: 116433 - RNA, 22 nt, Human
uucucagagcacugcugacaaa

SEQ ID NO: 116434 - RNA, 22 nt, Human
uucucagagcucacuguaguaa

SEQ ID NO: 116435 - RNA, 21 nt, Human
uucucagagucuauuacaguu

SEQ ID NO: 116436 - RNA, 21 nt, Human
uucucagaucgaguagugaga

SEQ ID NO: 116437 - RNA, 22 nt, Human
uucucagaugauucagauaaac

SEQ ID NO: 116438 - RNA, 22 nt, Human
uucucagauuccccuuuuaaua

SEQ ID NO: 116439 - RNA, 23 nt, Human
uucucaggagcccccaggucagg

SEQ ID NO: 116440 - RNA, 22 nt, Human
uucucaggcacuucuuccccgc

SEQ ID NO: 116441 - RNA, 22 nt, Human
uucucaggguagaggugacacu

SEQ ID NO: 116442 - RNA, 22 nt, Human
uucucagggucuugugcaaggg

SEQ ID NO: 116443 - RNA, 22 nt, Human
uucucaggucaccagggugcca

SEQ ID NO: 116444 - RNA, 22 nt, Human
uucucaguauuacaugcuaaug

SEQ ID NO: 116445 - RNA, 21 nt, Human
uucucaguguccauguuaguu

SEQ ID NO: 116446 - RNA, 22 nt, Human
uucucaguuucauagcugagca

SEQ ID NO: 116447 - RNA, 22 nt, Human
uucucauaaauccugagaccua

SEQ ID NO: 116448 - RNA, 22 nt, Human
uucucauaugcacucuauuuga

SEQ ID NO: 116449 - RNA, 22 nt, Human
uucucauguaaaugccaucauc

SEQ ID NO: 116450 - RNA, 22 nt, Human
uucuccaagaugaagcugugua

SEQ ID NO: 116451 - RNA, 22 nt, Human
uucuccaagguucauauuuauc

SEQ ID NO: 116452 - RNA, 22 nt, Human
uucuccagaccacugccucugu

SEQ ID NO: 116453 - RNA, 21 nt, Human
uucuccaggcaaccauuucag

SEQ ID NO: 116454 - RNA, 19 nt, Human
uucuccaggcugcagaggg

SEQ ID NO: 116455 - RNA, 22 nt, Human
uucuccaggcuugggccagguc

SEQ ID NO: 116456 - RNA, 19 nt, Human
uucuccagggacuuaggga

SEQ ID NO: 116457 - RNA, 22 nt, Human
uucuccagucacugacuucgag

SEQ ID NO: 116458 - RNA, 22 nt, Human
uucuccaguuucucccuucagu

SEQ ID NO: 116459 - RNA, 21 nt, Human
uucuccccagcgaauccucgg

SEQ ID NO: 116460 - RNA, 22 nt, Human
uucuccccugacccugaugagg

SEQ ID NO: 116461 - RNA, 22 nt, Human
uucuccuaggaucagggguccu

SEQ ID NO: 116462 - RNA, 22 nt, Human
uucuccucuacauagacugugc

SEQ ID NO: 116463 - RNA, 23 nt, Human
uucuccugaggaagcagggacug

SEQ ID NO: 116464 - RNA, 22 nt, Human
uucuccuggagugcuuguuggg

SEQ ID NO: 116465 - RNA, 22 nt, Human
uucuccuggggccgugauguga

SEQ ID NO: 116466 - RNA, 21 nt, Human
uucuccuguuuugcaccacag

SEQ ID NO: 116467 - RNA, 22 nt, Human
uucuccuugaaaagcugcaucu

SEQ ID NO: 116468 - RNA, 22 nt, Human
uucucuaaaugugaaccggcuu

SEQ ID NO: 116469 - RNA, 22 nt, Human
uucucuaagagaugcagaaguu

SEQ ID NO: 116470 - RNA, 22 nt, Human
uucucuaaggucccguucugga

SEQ ID NO: 116471 - RNA, 22 nt, Human
uucucuaauacauuuugacaaa

SEQ ID NO: 116472 - RNA, 22 nt, Human
uucucuacuucacaagggaugg

SEQ ID NO: 116473 - RNA, 20 nt, Human
uucucuagccuuccccuggg

SEQ ID NO: 116474 - RNA, 22 nt, Human
uucucucauucaaauuaaagug

SEQ ID NO: 116475 - RNA, 22 nt, Human
uucucucccaugaagcuucuau

SEQ ID NO: 116476 - RNA, 22 nt, Human
uucucuccuccuagaggcuuuu

SEQ ID NO: 116477 - RNA, 22 nt, Human
uucucucugugucauuauggac

SEQ ID NO: 116478 - RNA, 22 nt, Human
uucucucuuacugccaugcugu

SEQ ID NO: 116479 - RNA, 22 nt, Human
uucucugagucuugguuucuua

SEQ ID NO: 116480 - RNA, 22 nt, Human
uucucugcuacauacuagggcu

SEQ ID NO: 116481 - RNA, 22 nt, Human
uucucuggacuauuugcacucc

SEQ ID NO: 116482 - RNA, 20 nt, Human
uucucuggauagccagaugu

SEQ ID NO: 116483 - RNA, 22 nt, Human
uucucuggggacugucucuauu

SEQ ID NO: 116484 - RNA, 22 nt, Human
uuguuuuuaaacaugugacuga

SEQ ID NO: 116485 - RNA, 22 nt, Human
uuuaaaaaacuagucugagucu

SEQ ID NO: 116486 - RNA, 23 nt, Human
uuuaaaaguuguaauguaggcuu

SEQ ID NO: 116487 - RNA, 22 nt, Human
uuuaaaaucagaugggaguugg

SEQ ID NO: 116488 - RNA, 22 nt, Human
uuuaaaauuuagaccucuccac

SEQ ID NO: 116489 - RNA, 22 nt, Human
uuuaaacuguugauuuuaugaa

SEQ ID NO: 116490 - RNA, 21 nt, Human
uuuaaagaauaggaagggagg

SEQ ID NO: 116491 - RNA, 22 nt, Human
uuuaaaggccuugcugagccac

SEQ ID NO: 116492 - RNA, 22 nt, Human
uuuaaaugcagacguugauuca

SEQ ID NO: 116493 - RNA, 22 nt, Human
uuuaaauggcauuuucccagau

SEQ ID NO: 116494 - RNA, 22 nt, Human
uuuaacacuaguuucuuuaacu

SEQ ID NO: 116495 - RNA, 22 nt, Human
uuuaacagaugcuaugucuacc

SEQ ID NO: 116496 - RNA, 22 nt, Human
uuuaacagaugugaaauuuuca

SEQ ID NO: 116497 - RNA, 22 nt, Human
uuuaacauguaauugcugcuuu

SEQ ID NO: 116498 - RNA, 22 nt, Human
uuuaaccaguuuacaaagaauu

SEQ ID NO: 116499 - RNA, 22 nt, Human
uuuaacucugucauucucuuua

SEQ ID NO: 116500 - RNA, 22 nt, Human
uuuaacuuagaagagauauccu

SEQ ID NO: 116501 - RNA, 22 nt, Human
uuuaagacucuuguaguacaca

SEQ ID NO: 116502 - RNA, 22 nt, Human
uuuaagacuuaggaaagaggau

SEQ ID NO: 116503 - RNA, 22 nt, Human
uuuaagcaaguugacauagcau

SEQ ID NO: 116504 - RNA, 22 nt, Human
uuuaagcuguggcauuaauucu

SEQ ID NO: 116505 - RNA, 22 nt, Human
uuuaaggcuucacuggaguggg

SEQ ID NO: 116506 - RNA, 22 nt, Human
uuuaagguggacaucuaaguca

SEQ ID NO: 116507 - RNA, 22 nt, Human
uuuaauacuauggggaugaaca

SEQ ID NO: 116508 - RNA, 22 nt, Human
uuuaaucuucaaaauagucuua

SEQ ID NO: 116509 - RNA, 22 nt, Human
uuuaaugauagcuguuucacau

SEQ ID NO: 116510 - RNA, 22 nt, Human
uuuaaugauagucuuacgaaaa

SEQ ID NO: 116511 - RNA, 22 nt, Human
uuuaauggcaagaaggcugcag

SEQ ID NO: 116512 - RNA, 22 nt, Human
uuuaaugggauccaucugguua

SEQ ID NO: 116513 - RNA, 22 nt, Human
uuuaauguagcgugaaaugauu

SEQ ID NO: 116514 - RNA, 22 nt, Human
uuuaaugugacaucuuuuagag

SEQ ID NO: 116515 - RNA, 22 nt, Human
uuuaauugcauuuaaagaugga

SEQ ID NO: 116516 - RNA, 22 nt, Human
uuuaauuugaaaugaguaaccc

SEQ ID NO: 116517 - RNA, 22 nt, Human
uuuaauuuguauuucuagaggg

SEQ ID NO: 116518 - RNA, 22 nt, Human
uuuaauuuuccucuuccuggag

SEQ ID NO: 116519 - RNA, 22 nt, Human
uugcagggcaucuaugucuggu

SEQ ID NO: 116520 - RNA, 18 nt, Human
uugcagguaccucuaucu

SEQ ID NO: 116521 - RNA, 22 nt, Human
uugcaggucuggggguccuggu

SEQ ID NO: 116522 - RNA, 22 nt, Human
uugcaggugagggaaaugacug

SEQ ID NO: 116523 - RNA, 22 nt, Human
uugcaguagguggagugaauuu

SEQ ID NO: 116524 - RNA, 22 nt, Human
uugcaguugcauaugccccuac

SEQ ID NO: 116525 - RNA, 22 nt, Human
uugcaguugcuuucuauauuga

SEQ ID NO: 116526 - RNA, 22 nt, Human
uugcaguugucuuuccuaauuu

SEQ ID NO: 116527 - RNA, 22 nt, Human
uugcaguuuucugccucauuuc

SEQ ID NO: 116528 - RNA, 22 nt, Human
uugcauacugaccucuaagcuu

SEQ ID NO: 116529 - RNA, 22 nt, Human
uugcauaugaagcugacuuaaa

SEQ ID NO: 116530 - RNA, 22 nt, Human
uugcaucaaauauguaccacag

SEQ ID NO: 116531 - RNA, 22 nt, Human
uugcauccgggcuacuuccaca

SEQ ID NO: 116532 - RNA, 22 nt, Human
uugcaucuagggcaacccagag

SEQ ID NO: 116533 - RNA, 22 nt, Human
uugcaugcuagaaagauugauu

SEQ ID NO: 116534 - RNA, 22 nt, Human
uugcauggaggaacauggccca

SEQ ID NO: 116535 - RNA, 23 nt, Human
uugcauguagcccaugaguaacu

SEQ ID NO: 116536 - RNA, 22 nt, Human
uugcauguguaauuuuucuaaa

SEQ ID NO: 116537 - RNA, 22 nt, Human
uugcauugaucccagcuugggc

SEQ ID NO: 116538 - RNA, 22 nt, Human
uugcauugauguuccuucuugc

SEQ ID NO: 116539 - RNA, 19 nt, Human
uugcauuguaguuggacug

SEQ ID NO: 116540 - RNA, 22 nt, Human
uugcauuguugcaaugaaguau

SEQ ID NO: 116541 - RNA, 22 nt, Human
uugcauuuaaguagauguuaca

SEQ ID NO: 116542 - RNA, 22 nt, Human
uugcauuucacuuucaguaggc

SEQ ID NO: 116543 - RNA, 22 nt, Human
uugcauuugagaaaguucuccu

SEQ ID NO: 116544 - RNA, 22 nt, Human
uugcauuuguggcauggguguu

SEQ ID NO: 116545 - RNA, 21 nt, Human
uugcauuuuaaguuuacugcu

SEQ ID NO: 116546 - RNA, 22 nt, Human
uugcauuuugguuguaaauaug

SEQ ID NO: 116547 - RNA, 22 nt, Human
uugccacugaaccagucuugca

SEQ ID NO: 116548 - RNA, 22 nt, Human
uugccaggcuuguuucuaggcu

SEQ ID NO: 116549 - RNA, 22 nt, Human
uugccauugcaaaguacuauga

SEQ ID NO: 116550 - RNA, 22 nt, Human
uugccauuuaguaugcuuguau

SEQ ID NO: 116551 - RNA, 22 nt, Human
uugcccagagcugccuguuaca

SEQ ID NO: 116552 - RNA, 21 nt, Human
uugccccugaguuuuucugag

SEQ ID NO: 116553 - RNA, 22 nt, Human
uugcccugaagaacgucccaga

SEQ ID NO: 116554 - RNA, 22 nt, Human
uugcccugcagcggugaguggu

SEQ ID NO: 116555 - RNA, 22 nt, Human
uugcccugcguuaccaucucuu

SEQ ID NO: 116556 - RNA, 22 nt, Human
uugcccuguggggccuccagcc

SEQ ID NO: 116557 - RNA, 22 nt, Human
uugccuauuguucuuacauguu

SEQ ID NO: 116558 - RNA, 22 nt, Human
uugccuggaugguccccagaga

SEQ ID NO: 116559 - RNA, 22 nt, Human
uugccugguccugugggugcug

SEQ ID NO: 116560 - RNA, 22 nt, Human
uugccugugaggauucugguug

SEQ ID NO: 116561 - RNA, 22 nt, Human
uugccugugucagcagguggaa

SEQ ID NO: 116562 - RNA, 22 nt, Human
uugccuguuugagagcuguguu

SEQ ID NO: 116563 - RNA, 22 nt, Human
uugccuuauagugcucugcauu

SEQ ID NO: 116564 - RNA, 22 nt, Human
uugccuuugacggugcagcagu

SEQ ID NO: 116565 - RNA, 22 nt, Human
uugcuaaaggauuuuguauuua

SEQ ID NO: 116566 - RNA, 22 nt, Human
uugcuaaaucccuauaauauuc

SEQ ID NO: 116567 - RNA, 22 nt, Human
uugcuaauagaagauuugggaa

SEQ ID NO: 116568 - RNA, 22 nt, Human
uugcuaauuuaacuaccuuguu

SEQ ID NO: 116569 - RNA, 22 nt, Human
uugcuaauuuguauaaugaaaa

SEQ ID NO: 116570 - RNA, 22 nt, Human
uugcuacaugguuucaaagcug

SEQ ID NO: 116571 - RNA, 22 nt, Human
uugcuaggauucauucuauacu

SEQ ID NO: 116572 - RNA, 22 nt, Human
uugcuauaaauggucuaucuuu

SEQ ID NO: 116573 - RNA, 22 nt, Human
uugcuauaaaugguuucauauu

SEQ ID NO: 116574 - RNA, 22 nt, Human
uugcuaugugagauggcucaag

SEQ ID NO: 116575 - RNA, 22 nt, Human
uugcuauguggguugugcacuc

SEQ ID NO: 116576 - RNA, 22 nt, Human
uugcuauuuugagagucauagu

SEQ ID NO: 116577 - RNA, 22 nt, Human
uugcucauauuugcauguguuu

SEQ ID NO: 116578 - RNA, 22 nt, Human
uugcucuacccugaucaguuaa

SEQ ID NO: 116579 - RNA, 22 nt, Human
uugcucuauguuuguaaacaga

SEQ ID NO: 116580 - RNA, 22 nt, Human
uugcucugaaccacaccaucac

SEQ ID NO: 116581 - RNA, 22 nt, Human
uugcucugacuggagugcagug

SEQ ID NO: 116582 - RNA, 22 nt, Human
uugcugaaaagcuggccuuugu

SEQ ID NO: 116583 - RNA, 22 nt, Human
uugcugaagugaagguauguuu

SEQ ID NO: 116584 - RNA, 22 nt, Human
uugcugaaguuaaugcuugcaa

SEQ ID NO: 116585 - RNA, 22 nt, Human
uugcugagagcgugucaacaag

SEQ ID NO: 116586 - RNA, 22 nt, Human
uugcugagcaguguuuaauugu

SEQ ID NO: 116587 - RNA, 22 nt, Human
uugcugaggacgcagugcagug

SEQ ID NO: 116588 - RNA, 22 nt, Human
uugcugagucucuagguaugau

SEQ ID NO: 116589 - RNA, 22 nt, Human
uugcugauaccaugaauguuaa

SEQ ID NO: 116590 - RNA, 22 nt, Human
uugcugaucugugaaucagcca

SEQ ID NO: 116591 - RNA, 22 nt, Human
uugcugaugguauuaugcuagu

SEQ ID NO: 116592 - RNA, 22 nt, Human
uugcugauuuccccuugagugu

SEQ ID NO: 116593 - RNA, 22 nt, Human
uuuucuguuuacagagggaccu

SEQ ID NO: 116594 - RNA, 22 nt, Human
uuuucuuacugucugugauccu

SEQ ID NO: 116595 - RNA, 22 nt, Human
uuuucuuauagagcuuaaaguu

SEQ ID NO: 116596 - RNA, 22 nt, Human
uuuucuucggugcuggguugau

SEQ ID NO: 116597 - RNA, 22 nt, Human
uuuucuucuaccugcuguccaa

SEQ ID NO: 116598 - RNA, 19 nt, Human
uuuugaaguaugagacagg

SEQ ID NO: 116599 - RNA, 23 nt, Human
uuuugacaggaggaagguguuga

SEQ ID NO: 116600 - RNA, 20 nt, Human
uuuugauagcaaagacggua

SEQ ID NO: 116601 - RNA, 22 nt, Human
uuuugcaaaguacauuaucagg

SEQ ID NO: 116602 - RNA, 20 nt, Human
uuuugcagagaaggcgacug

SEQ ID NO: 116603 - RNA, 22 nt, Human
uuuugccugagagugaaaauaa

SEQ ID NO: 116604 - RNA, 22 nt, Human
uuuugccugugaauacuaucuu

SEQ ID NO: 116605 - RNA, 22 nt, Human
uuuugcugggguggcuagcuua

SEQ ID NO: 116606 - RNA, 22 nt, Human
uuuugcuguuauaugcuauuau

SEQ ID NO: 116607 - RNA, 21 nt, Human
uuuugcuguuuuagaaugaga

SEQ ID NO: 116608 - RNA, 22 nt, Human
uuuugcuuaucugagugcagcc

SEQ ID NO: 116609 - RNA, 22 nt, Human
uuuugcuuuaagauggagagga

SEQ ID NO: 116610 - RNA, 19 nt, Human
uuuuggaaaugugaacagc

SEQ ID NO: 116611 - RNA, 22 nt, Human
uuuuggaagccgcggcugggca

SEQ ID NO: 116612 - RNA, 22 nt, Human
uuuuggaaucauuuacagagca

SEQ ID NO: 116613 - RNA, 22 nt, Human
uuuuggcaagcugggagauauu

SEQ ID NO: 116614 - RNA, 22 nt, Human
uuuugggugaauuugccaguua

SEQ ID NO: 116615 - RNA, 22 nt, Human
uuuuggguggaagcuguuaugg

SEQ ID NO: 116616 - RNA, 22 nt, Human
uuuugguagccaacaaaauguu

SEQ ID NO: 116617 - RNA, 22 nt, Human
uuuuggucagguuggucucgaa

SEQ ID NO: 116618 - RNA, 22 nt, Human
uuuuggugcccugguucccacc

SEQ ID NO: 116619 - RNA, 22 nt, Human
uuuuguauagucaaagacaaga

SEQ ID NO: 116620 - RNA, 22 nt, Human
uuuuguaugagaagugcuuuac

SEQ ID NO: 116621 - RNA, 22 nt, Human
uuuugucaccugauuugcccac

SEQ ID NO: 116622 - RNA, 22 nt, Human
uuuugugagaugcguaugaaug

SEQ ID NO: 116623 - RNA, 19 nt, Human
uuuuguguagcugcugguu

SEQ ID NO: 116624 - RNA, 22 nt, Human
uuuuuaagagucuggaaauagu

SEQ ID NO: 116625 - RNA, 22 nt, Human
uuuuuaccuggaggauaaaugu

SEQ ID NO: 116626 - RNA, 22 nt, Human
uuuuucaugagacuagaaguca

SEQ ID NO: 116627 - RNA, 22 nt, Human
uuuuuccuagugcuuucuggua

SEQ ID NO: 116628 - RNA, 22 nt, Human
uuuuuccuuagggguuacucac

SEQ ID NO: 116629 - RNA, 22 nt, Human
uuuuuccuuggaugugucucuc

SEQ ID NO: 116630 - RNA, 22 nt, Human
uuuuucuaauggcuuaggaugu

SEQ ID NO: 116631 - RNA, 22 nt, Human
uuuuucuacugcccacauugua

SEQ ID NO: 116632 - RNA, 22 nt, Human
uuuuucucuaugccaggggccu

SEQ ID NO: 116633 - RNA, 22 nt, Human
uuuuucucuucuguaaaguggu

SEQ ID NO: 116634 - RNA, 22 nt, Human
uuuuucuggauaacuguaucuc

SEQ ID NO: 116635 - RNA, 22 nt, Human
uuuuugaaggcugaugugauua

SEQ ID NO: 116636 - RNA, 22 nt, Human
uugggaagaauggaggugguua

SEQ ID NO: 116637 - RNA, 22 nt, Human
uugggaaguuuaaugacagacu

SEQ ID NO: 116638 - RNA, 22 nt, Human
uugggacaaagacuccuugaau

SEQ ID NO: 116639 - RNA, 22 nt, Human
uugggacaucuggcauacaguu

SEQ ID NO: 116640 - RNA, 17 nt, Human
uugggagagaaagguau

SEQ ID NO: 116641 - RNA, 22 nt, Human
uugggagauauuguucuuuaca

SEQ ID NO: 116642 - RNA, 22 nt, Human
uugggagauucauugagccaag

SEQ ID NO: 116643 - RNA, 22 nt, Human
uugggaucuacauagcuaugua

SEQ ID NO: 116644 - RNA, 22 nt, Human
uugggcagaggccaggaggaug

SEQ ID NO: 116645 - RNA, 22 nt, Human
uugggcagauguuuccugugga

SEQ ID NO: 116646 - RNA, 22 nt, Human
uugggcagcauugcaguucccu

SEQ ID NO: 116647 - RNA, 22 nt, Human
uugggccaaagauguccuuguu

SEQ ID NO: 116648 - RNA, 22 nt, Human
uugggccacuuuaguuuccuua

SEQ ID NO: 116649 - RNA, 22 nt, Human
uugggcccugcucugaguugcu

SEQ ID NO: 116650 - RNA, 22 nt, Human
uugggccucggccaaggacggg

SEQ ID NO: 116651 - RNA, 22 nt, Human
uugggcugaaguagagggcaga

SEQ ID NO: 116652 - RNA, 22 nt, Human
uugggcugggcaagaaucaaug

SEQ ID NO: 116653 - RNA, 22 nt, Human
uugggcuugucugggaaacugc

SEQ ID NO: 116654 - RNA, 22 nt, Human
uuggggaagcuuugaaauacuu

SEQ ID NO: 116655 - RNA, 22 nt, Human
uuggggagguugccacauucca

SEQ ID NO: 116656 - RNA, 22 nt, Human
uuggggcucugaaaaagaugua

SEQ ID NO: 116657 - RNA, 19 nt, Human
uuggggugaaugccagaca

SEQ ID NO: 116658 - RNA, 22 nt, Human
uuggguaggagaaagaacagau

SEQ ID NO: 116659 - RNA, 22 nt, Human
uugggucuuauggcuggaguag

SEQ ID NO: 116660 - RNA, 22 nt, Human
uuggguuuugauacaugucuaa

SEQ ID NO: 116661 - RNA, 22 nt, Human
uugguacaugcagauauuuagu

SEQ ID NO: 116662 - RNA, 22 nt, Human
uugguauacaaauauuuagcac

SEQ ID NO: 116663 - RNA, 22 nt, Human
uugguauauugugcuacuuuau

SEQ ID NO: 116664 - RNA, 22 nt, Human
uugguauuuccucaggcauguc

SEQ ID NO: 116665 - RNA, 22 nt, Human
uuggucagaugugucuccuccu

SEQ ID NO: 116666 - RNA, 22 nt, Human
uuggucagucagagaauggagu

SEQ ID NO: 116667 - RNA, 22 nt, Human
uuggucccucauggacacauga

SEQ ID NO: 116668 - RNA, 22 nt, Human
uugguccugcagaggggucugg

SEQ ID NO: 116669 - RNA, 22 nt, Human
uugguccugcccccuccagguc

SEQ ID NO: 116670 - RNA, 22 nt, Human
uuggucugcucugauguuuucu

SEQ ID NO: 116671 - RNA, 22 nt, Human
uuggucuguguuacaucauuua

SEQ ID NO: 116672 - RNA, 22 nt, Human
uuggucuucagagaucuggugg

SEQ ID NO: 116673 - RNA, 22 nt, Human
uuggucuuuucuauuaaauaua

SEQ ID NO: 116674 - RNA, 22 nt, Human
uuggugaacacauacacauuuu

SEQ ID NO: 116675 - RNA, 22 nt, Human
uugguggaccucaucagaaccg

SEQ ID NO: 116676 - RNA, 22 nt, Human
uuggugggagagaugaggguug

SEQ ID NO: 116677 - RNA, 19 nt, Human
uugguggugguuuugguuc

SEQ ID NO: 116678 - RNA, 22 nt, Human
uugguguacaucuccccuucau

SEQ ID NO: 116679 - RNA, 22 nt, Human
uugguucaaaacauggaagggu

SEQ ID NO: 116680 - RNA, 22 nt, Human
uugguucaaagggauucaauuu

SEQ ID NO: 116681 - RNA, 22 nt, Human
uugguucaacuuuucuaaguag

SEQ ID NO: 116682 - RNA, 19 nt, Human
uugguucauggaugcccaa

SEQ ID NO: 116683 - RNA, 23 nt, Human
uugguuuacaggaauaagcaggg

SEQ ID NO: 116684 - RNA, 22 nt, Human
uugguuuaccagagggaacgug

SEQ ID NO: 116685 - RNA, 22 nt, Human
uugguuuagagagugugguuac

SEQ ID NO: 116686 - RNA, 22 nt, Human
uugguuuagcaacuuccugugu

SEQ ID NO: 116687 - RNA, 22 nt, Human
uugguuuugaaauagcuuauug

SEQ ID NO: 116688 - RNA, 22 nt, Human
uuguaaacauagagauuuaggu

SEQ ID NO: 116689 - RNA, 22 nt, Human
uuguaaacaucuguugcuuaga

SEQ ID NO: 116690 - RNA, 22 nt, Human
uuguaaacuguuaaaagccaga

SEQ ID NO: 116691 - RNA, 22 nt, Human
uuguaaaugaccuuuucuaauu

SEQ ID NO: 116692 - RNA, 22 nt, Human
uuguaacaaagacacuccaaaa

SEQ ID NO: 116693 - RNA, 22 nt, Human
uuguaacagcugcuuaauagag

SEQ ID NO: 116694 - RNA, 22 nt, Human
uuguaacagcuguuuauauagu

SEQ ID NO: 116695 - RNA, 22 nt, Human
uuguaacuuaaguuuugcauau

SEQ ID NO: 116696 - RNA, 22 nt, Human
uuguaagaauaugaauacaaau

SEQ ID NO: 116697 - RNA, 22 nt, Human
uuguaagacuguagaaugcaaa

SEQ ID NO: 116698 - RNA, 22 nt, Human
uuguaauggagcaaacagguug

SEQ ID NO: 116699 - RNA, 22 nt, Human
uuguaauuuguucccaagcaga

SEQ ID NO: 116700 - RNA, 22 nt, Human
uuguacaacacauauucuacag

SEQ ID NO: 116701 - RNA, 22 nt, Human
uuguacaaguuuugagcuuaag

SEQ ID NO: 116702 - RNA, 22 nt, Human
uugucuguccaggcaccccaag

SEQ ID NO: 116703 - RNA, 22 nt, Human
uugucugucccagcuugugcau

SEQ ID NO: 116704 - RNA, 19 nt, Human
uugucuuagcugcauaaga

SEQ ID NO: 116705 - RNA, 22 nt, Human
uugugaaaagccgcaaguauag

SEQ ID NO: 116706 - RNA, 22 nt, Human
uugugaauagugccgcaauaaa

SEQ ID NO: 116707 - RNA, 22 nt, Human
uugugaauagugcugcaauaaa

SEQ ID NO: 116708 - RNA, 22 nt, Human
uugugacacaugccguccugag

SEQ ID NO: 116709 - RNA, 22 nt, Human
uugugagagccaaacauguaag

SEQ ID NO: 116710 - RNA, 22 nt, Human
uugugagcauguuuacuugauu

SEQ ID NO: 116711 - RNA, 22 nt, Human
uugugcaagaagccagcaccaa

SEQ ID NO: 116712 - RNA, 22 nt, Human
uugugcaauaguuuucucauga

SEQ ID NO: 116713 - RNA, 22 nt, Human
uugugcaugacugugaauagcu

SEQ ID NO: 116714 - RNA, 22 nt, Human
uugugcauggcuacuuuuuaug

SEQ ID NO: 116715 - RNA, 22 nt, Human
uugugcauuagggaaaggaacu

SEQ ID NO: 116716 - RNA, 22 nt, Human
uugugccauaaccacccugacu

SEQ ID NO: 116717 - RNA, 22 nt, Human
uugugcuaagcaauuugcuuaa

SEQ ID NO: 116718 - RNA, 22 nt, Human
uugugcuccugugagaaucuag

SEQ ID NO: 116719 - RNA, 22 nt, Human
uugugcucuuauugugcaggga

SEQ ID NO: 116720 - RNA, 22 nt, Human
uugugcuugcccuggaggugcg

SEQ ID NO: 116721 - RNA, 22 nt, Human
uuguggaaauacagacuccaag

SEQ ID NO: 116722 - RNA, 23 nt, Human
uuguggagugguuguuuucuagg

SEQ ID NO: 116723 - RNA, 22 nt, Human
uuguggcagaccaugagucuaa

SEQ ID NO: 116724 - RNA, 22 nt, Human
uuguggcucuugaggcucucgu

SEQ ID NO: 116725 - RNA, 22 nt, Human
uuguggcugugcaccgcugccu

SEQ ID NO: 116726 - RNA, 22 nt, Human
uugugggauggcucuucccaaa

SEQ ID NO: 116727 - RNA, 22 nt, Human
uugugggcuugccuggcucuug

SEQ ID NO: 116728 - RNA, 22 nt, Human
uuguggggaggauuugaugaga

SEQ ID NO: 116729 - RNA, 22 nt, Human
uuguggggcaacagcaggugaa

SEQ ID NO: 116730 - RNA, 22 nt, Human
uuguguacagguguuuccaagu

SEQ ID NO: 116731 - RNA, 22 nt, Human
uuguguccaaggcuauggugau

SEQ ID NO: 116732 - RNA, 22 nt, Human
uuguguccuaagcaccagaugg

SEQ ID NO: 116733 - RNA, 22 nt, Human
uuguguccucuaaucucaccac

SEQ ID NO: 116734 - RNA, 22 nt, Human
uugugucuggaaugcguggagc

SEQ ID NO: 116735 - RNA, 22 nt, Human
uugugucuuaaagauuaaaugg

SEQ ID NO: 116736 - RNA, 22 nt, Human
uugugugguagcuucauugaac

SEQ ID NO: 116737 - RNA, 22 nt, Human
uuguguguagacucagccauug

SEQ ID NO: 116738 - RNA, 22 nt, Human
uuguguguguaacuuuaugaga

SEQ ID NO: 116739 - RNA, 22 nt, Human
uuguguuaaggugcaucuagug

SEQ ID NO: 116740 - RNA, 22 nt, Human
uuguguuucccuugcauauucc

SEQ ID NO: 116741 - RNA, 22 nt, Human
uuguguuugaugcugacacgca

SEQ ID NO: 116742 - RNA, 22 nt, Human
uuguuaaaggcaaaacaagcac

SEQ ID NO: 116743 - RNA, 22 nt, Human
uuguuacagaucacauuucugc

SEQ ID NO: 116744 - RNA, 22 nt, Human
uuguuacagcacuuaaccuuuu

SEQ ID NO: 116745 - RNA, 22 nt, Human
uuguuacagcagugauuucaga

SEQ ID NO: 116746 - RNA, 22 nt, Human
uuguuacauacagcagaacaua

SEQ ID NO: 116747 - RNA, 22 nt, Human
uuguuagcugaucuugagugca

SEQ ID NO: 116748 - RNA, 22 nt, Human
uuguuaguaagugacaaaaauc

SEQ ID NO: 116749 - RNA, 22 nt, Human
uuguuaucugcgugaagaaaau

SEQ ID NO: 116750 - RNA, 22 nt, Human
uuguuauuuaggucuggguuag

SEQ ID NO: 116751 - RNA, 22 nt, Human
uuguucagaaauuuggacuccu

SEQ ID NO: 116752 - RNA, 22 nt, Human
uuguucagaaguuuaaagaauu

SEQ ID NO: 116753 - RNA, 22 nt, Human
uuguucaucguccuugcucugu

SEQ ID NO: 116754 - RNA, 22 nt, Human
uuguucaucuggaacccagagc

SEQ ID NO: 116755 - RNA, 22 nt, Human
uuguucaugguuguaaguuuga

SEQ ID NO: 116756 - RNA, 22 nt, Human
uuguucauuagcgcuugggcac

SEQ ID NO: 116757 - RNA, 23 nt, Human
uuguucuaucaaccuagacuuag

SEQ ID NO: 116758 - RNA, 23 nt, Human
uuguucuuggaucuuccugaagc

SEQ ID NO: 116759 - RNA, 22 nt, Human
uuguucuuuauccuggaagccu

SEQ ID NO: 116760 - RNA, 22 nt, Human
uuguucuuuugcuuagacagau

SEQ ID NO: 116761 - RNA, 22 nt, Human
uuguugacgacuugacuuucuc

SEQ ID NO: 116762 - RNA, 21 nt, Human
uuguugagaguuagaacaugg

SEQ ID NO: 116763 - RNA, 22 nt, Human
uuuccucugucaugacagcuga

SEQ ID NO: 116764 - RNA, 22 nt, Human
uuuccucuuccgagggggaggc

SEQ ID NO: 116765 - RNA, 22 nt, Human
uuuccugcacccgcugaugcca

SEQ ID NO: 116766 - RNA, 22 nt, Human
uuuccugugcuuaacaaauauu

SEQ ID NO: 116767 - RNA, 22 nt, Human
uuuccuuccuugcuagccugag

SEQ ID NO: 116768 - RNA, 22 nt, Human
uuuccuucuuagcgguguucuu

SEQ ID NO: 116769 - RNA, 22 nt, Human
uuuccuugccuccuguccuucu

SEQ ID NO: 116770 - RNA, 22 nt, Human
uuuccuuugggagcaugaauuu

SEQ ID NO: 116771 - RNA, 22 nt, Human
uuuccuuugggcacccgagcuc

SEQ ID NO: 116772 - RNA, 22 nt, Human
uuuccuuuuggcuaggugugaa

SEQ ID NO: 116773 - RNA, 22 nt, Human
uuucggaauaaauacgaacauc

SEQ ID NO: 116774 - RNA, 22 nt, Human
uuucggccgcgugaaguuuucu

SEQ ID NO: 116775 - RNA, 21 nt, Human
uuucggucccagaugccugug

SEQ ID NO: 116776 - RNA, 22 nt, Human
uuucuaaacuggauucagccug

SEQ ID NO: 116777 - RNA, 22 nt, Human
uuucuaagaauauugcucuuaa

SEQ ID NO: 116778 - RNA, 22 nt, Human
uuucuaaggugagguagaaaau

SEQ ID NO: 116779 - RNA, 21 nt, Human
uuucuaaguaacuggcagcau

SEQ ID NO: 116780 - RNA, 22 nt, Human
uuucuaagugugauuuuagauu

SEQ ID NO: 116781 - RNA, 22 nt, Human
uuucuaaguguguuucauagga

SEQ ID NO: 116782 - RNA, 22 nt, Human
uuucuaaucugauucuccuacc

SEQ ID NO: 116783 - RNA, 19 nt, Human
uuucuaauguguuuuucuu

SEQ ID NO: 116784 - RNA, 22 nt, Human
uuucuacacuucgugguguuuu

SEQ ID NO: 116785 - RNA, 22 nt, Human
uuucuacaguacugauuucaua

SEQ ID NO: 116786 - RNA, 17 nt, Human
uuucuacaguuggcagc

SEQ ID NO: 116787 - RNA, 22 nt, Human
uuucuacauguuuucuauugaa

SEQ ID NO: 116788 - RNA, 22 nt, Human
uuucuagaaugacucaucugag

SEQ ID NO: 116789 - RNA, 22 nt, Human
uuucuagacucaaagaggauau

SEQ ID NO: 116790 - RNA, 22 nt, Human
uuucuagaucaaacuuuuauau

SEQ ID NO: 116791 - RNA, 22 nt, Human
uuucuagaugcggggcuugugc

SEQ ID NO: 116792 - RNA, 17 nt, Human
uuucuagauuauccucu

SEQ ID NO: 116793 - RNA, 22 nt, Human
uuucuagcaagaaagaggugga

SEQ ID NO: 116794 - RNA, 22 nt, Human
uuucuagcaugacacaguccuc

SEQ ID NO: 116795 - RNA, 22 nt, Human
uuucuagcugacaaaaauguuu

SEQ ID NO: 116796 - RNA, 22 nt, Human
uuucuaggauacucuaaaugua

SEQ ID NO: 116797 - RNA, 22 nt, Human
uuucuagguuuacaauacugca

SEQ ID NO: 116798 - RNA, 22 nt, Human
uuucuaguaaucaauauaaagu

SEQ ID NO: 116799 - RNA, 22 nt, Human
uuucuaguauauaacuagaucu

SEQ ID NO: 116800 - RNA, 22 nt, Human
uuucuaguucucugccaaaaaa

SEQ ID NO: 116801 - RNA, 20 nt, Human
uuucuauggggccagcacau

SEQ ID NO: 116802 - RNA, 22 nt, Human
uuucuauugaucuaauaaacau

SEQ ID NO: 116803 - RNA, 22 nt, Human
uuucucaaauacuguuccagga

SEQ ID NO: 116804 - RNA, 22 nt, Human
uuucucaaauugcaugaguagc

SEQ ID NO: 116805 - RNA, 22 nt, Human
uuucucaacagaguaugcccuu

SEQ ID NO: 116806 - RNA, 22 nt, Human
uuucucaacuguauuaugcaga

SEQ ID NO: 116807 - RNA, 18 nt, Human
uuucucaaggcugacauu

SEQ ID NO: 116808 - RNA, 21 nt, Human
uuucucaccaugguauggaaa

SEQ ID NO: 116809 - RNA, 22 nt, Human
uuucucacccaagaguuauuuu

SEQ ID NO: 116810 - RNA, 23 nt, Human
uuucucauccagagagucagucc

SEQ ID NO: 116811 - RNA, 22 nt, Human
uuucucauggaacaucguuuag

SEQ ID NO: 116812 - RNA, 22 nt, Human
uuucucccaaagugcaaccaca

SEQ ID NO: 116813 - RNA, 22 nt, Human
uuucuccccagucuaaucugga

SEQ ID NO: 116814 - RNA, 22 nt, Human
uuucucccuuuauaagacugua

SEQ ID NO: 116815 - RNA, 22 nt, Human
uuuaaugaauaauucaaaucug

SEQ ID NO: 116816 - RNA, 19 nt, Human
uuuaaugugugcugcaauc

SEQ ID NO: 116817 - RNA, 22 nt, Human
uuuaauguucaucucaaaggau

SEQ ID NO: 116818 - RNA, 22 nt, Human
uuuaauguuugagucaguauau

SEQ ID NO: 116819 - RNA, 22 nt, Human
uuuaauuagcaagccagagagc

SEQ ID NO: 116820 - RNA, 22 nt, Human
uuuaauuaggaaaugggcaggg

SEQ ID NO: 116821 - RNA, 22 nt, Human
uuuaauugauucacagucugua

SEQ ID NO: 116822 - RNA, 22 nt, Human
uuuaauuuucugggcccagcag

SEQ ID NO: 116823 - RNA, 22 nt, Human
uuuacaaccucauauucugaug

SEQ ID NO: 116824 - RNA, 22 nt, Human
uuuacaagaaaucaugaugcua

SEQ ID NO: 116825 - RNA, 22 nt, Human
uuuacaauagggucugaaugaa

SEQ ID NO: 116826 - RNA, 22 nt, Human
uuuacaauucuggugccagcua

SEQ ID NO: 116827 - RNA, 22 nt, Human
uuuacacagaggacacugggcu

SEQ ID NO: 116828 - RNA, 22 nt, Human
uuuacacauaaauguguagaca

SEQ ID NO: 116829 - RNA, 22 nt, Human
uuuacacauaccucuuuaaagu

SEQ ID NO: 116830 - RNA, 22 nt, Human
uuuacacauuauuuucagugug

SEQ ID NO: 116831 - RNA, 22 nt, Human
uuuacacugcuugaacaaucuc

SEQ ID NO: 116832 - RNA, 22 nt, Human
uuuacagagguguccugcauug

SEQ ID NO: 116833 - RNA, 22 nt, Human
uuuacagaugaggaaacugaga

SEQ ID NO: 116834 - RNA, 22 nt, Human
uuuacaggaagcugaaaaacau

SEQ ID NO: 116835 - RNA, 23 nt, Human
uuuacagggcacucuuaugcagc

SEQ ID NO: 116836 - RNA, 22 nt, Human
uuuacagucucuauagucaaaa

SEQ ID NO: 116837 - RNA, 22 nt, Human
uuuacaguuaagaaauguuacc

SEQ ID NO: 116838 - RNA, 22 nt, Human
uuuacaguuccaugugauaggc

SEQ ID NO: 116839 - RNA, 20 nt, Human
uuuacauuuugaaacaguga

SEQ ID NO: 116840 - RNA, 22 nt, Human
uuuaccaagaguugucacuguu

SEQ ID NO: 116841 - RNA, 22 nt, Human
uuuaccacagaaaaaaguaacu

SEQ ID NO: 116842 - RNA, 22 nt, Human
uuuaccauacaucaaaauauuu

SEQ ID NO: 116843 - RNA, 22 nt, Human
uuuacccauauuagcaucaagu

SEQ ID NO: 116844 - RNA, 19 nt, Human
uuuaccuucuugagagcag

SEQ ID NO: 116845 - RNA, 22 nt, Human
uuuacuaagcccaguuauaugc

SEQ ID NO: 116846 - RNA, 18 nt, Human
uuuacucauaggccugac

SEQ ID NO: 116847 - RNA, 19 nt, Human
uuuacucuccaaggugagu

SEQ ID NO: 116848 - RNA, 22 nt, Human
uuuacugaacugcuaguacagg

SEQ ID NO: 116849 - RNA, 22 nt, Human
uuuacugaauuugguauauucc

SEQ ID NO: 116850 - RNA, 21 nt, Human
uuuacugagcacuuacuaugu

SEQ ID NO: 116851 - RNA, 22 nt, Human
uuuacuucauuuccagugagga

SEQ ID NO: 116852 - RNA, 22 nt, Human
uuuacuugauauggagcugagg

SEQ ID NO: 116853 - RNA, 22 nt, Human
uuuagaacagauauuguaacuu

SEQ ID NO: 116854 - RNA, 20 nt, Human
uuuagaagaaugagcacuuu

SEQ ID NO: 116855 - RNA, 19 nt, Human
uuuagaaguugaaacucug

SEQ ID NO: 116856 - RNA, 22 nt, Human
uuuagaaugugacuguauuuga

SEQ ID NO: 116857 - RNA, 22 nt, Human
uuuagacagcggcucugaacca

SEQ ID NO: 116858 - RNA, 22 nt, Human
uuuagacaggggcaaaauaagg

SEQ ID NO: 116859 - RNA, 22 nt, Human
uuuagacauagcugaaaucauu

SEQ ID NO: 116860 - RNA, 22 nt, Human
uuuagacauggcuugcucacuu

SEQ ID NO: 116861 - RNA, 22 nt, Human
uuuagacuaauuccuaaagggc

SEQ ID NO: 116862 - RNA, 22 nt, Human
uuuagagaguguaaaaauauau

SEQ ID NO: 116863 - RNA, 22 nt, Human
uuuagaguugaguauucauugg

SEQ ID NO: 116864 - RNA, 22 nt, Human
uuuagcaaauuacucacagggu

SEQ ID NO: 116865 - RNA, 22 nt, Human
uuuagcaagaugcccuggcuuu

SEQ ID NO: 116866 - RNA, 22 nt, Human
uuuagcaaggagaaauaauccu

SEQ ID NO: 116867 - RNA, 22 nt, Human
uuuagcagcugguguuaccaua

SEQ ID NO: 116868 - RNA, 22 nt, Human
uuuagcauauuuaaggaaugau

SEQ ID NO: 116869 - RNA, 22 nt, Human
uuuagcauuacuaaaaugaaaa

SEQ ID NO: 116870 - RNA, 22 nt, Human
uuuagcauuccugggaugauuu

SEQ ID NO: 116871 - RNA, 22 nt, Human
uuuagccaacuauaugacuagu

SEQ ID NO: 116872 - RNA, 22 nt, Human
uuucuuccuggauuccuacuuc

SEQ ID NO: 116873 - RNA, 22 nt, Human
uuucuucuaagauuucaaacua

SEQ ID NO: 116874 - RNA, 22 nt, Human
uuucuucuaugugugauauuuu

SEQ ID NO: 116875 - RNA, 22 nt, Human
uuucuucuccauggcagguccu

SEQ ID NO: 116876 - RNA, 22 nt, Human
uuucuucucugauuaaggcuca

SEQ ID NO: 116877 - RNA, 22 nt, Human
uuucuucuguuuguaguuacac

SEQ ID NO: 116878 - RNA, 22 nt, Human
uuucuucuugauuuaaacaggg

SEQ ID NO: 116879 - RNA, 22 nt, Human
uuucuucuuucccagugauggg

SEQ ID NO: 116880 - RNA, 22 nt, Human
uuucuugacugcuuaggaaugc

SEQ ID NO: 116881 - RNA, 22 nt, Human
uuucuugagcccaggaggugga

SEQ ID NO: 116882 - RNA, 22 nt, Human
uuucuugagcuaggaaccuggg

SEQ ID NO: 116883 - RNA, 22 nt, Human
uuucuugagugaugcuuagugu

SEQ ID NO: 116884 - RNA, 22 nt, Human
uuucuuggagcucuuagggucg

SEQ ID NO: 116885 - RNA, 22 nt, Human
uuucuuggucuucccgaccugg

SEQ ID NO: 116886 - RNA, 22 nt, Human
uuucuugugccuaauuuugggc

SEQ ID NO: 116887 - RNA, 22 nt, Human
uuucuuuaauucucacagcaau

SEQ ID NO: 116888 - RNA, 22 nt, Human
uuucuuuauccuccuuugcaca

SEQ ID NO: 116889 - RNA, 22 nt, Human
uuucuuuccagagugauuggca

SEQ ID NO: 116890 - RNA, 22 nt, Human
uuucuuuccauacauauugcua

SEQ ID NO: 116891 - RNA, 22 nt, Human
uuucuuuguuguuaucacauca

SEQ ID NO: 116892 - RNA, 22 nt, Human
uuucuuuuccaauaucccuacu

SEQ ID NO: 116893 - RNA, 22 nt, Human
uuucuuuugaauaguguguggu

SEQ ID NO: 116894 - RNA, 22 nt, Human
uuucuuuugcccuguggguuag

SEQ ID NO: 116895 - RNA, 22 nt, Human
uuugaaaacuuaauuuggucgu

SEQ ID NO: 116896 - RNA, 22 nt, Human
uuugaaaagaaccaucgccuua

SEQ ID NO: 116897 - RNA, 22 nt, Human
uuugaaacccgucacuuugagu

SEQ ID NO: 116898 - RNA, 22 nt, Human
uuugaaacucugaacauguuuc

SEQ ID NO: 116899 - RNA, 19 nt, Human
uuugaaagaguuuuauugg

SEQ ID NO: 116900 - RNA, 22 nt, Human
uuugaaaggaauuaggaugaca

SEQ ID NO: 116901 - RNA, 22 nt, Human
uuugaaaggagcuuuauccaga

SEQ ID NO: 116902 - RNA, 22 nt, Human
uuugaaaggguuaugagacuga

SEQ ID NO: 116903 - RNA, 22 nt, Human
uuugaaaggugucgagaugugu

SEQ ID NO: 116904 - RNA, 23 nt, Human
uuugaaaguaucaacucgccuga

SEQ ID NO: 116905 - RNA, 21 nt, Human
uuugaaagugggugauucuuu

SEQ ID NO: 116906 - RNA, 22 nt, Human
uuugaaaguucuucugacacua

SEQ ID NO: 116907 - RNA, 22 nt, Human
uuugaacaagagcuucacauua

SEQ ID NO: 116908 - RNA, 22 nt, Human
uuugaacagacacuuucuacag

SEQ ID NO: 116909 - RNA, 22 nt, Human
uuugaaccugagcuucugcaug

SEQ ID NO: 116910 - RNA, 22 nt, Human
uuugaacucagcuucagacaac

SEQ ID NO: 116911 - RNA, 22 nt, Human
uuugaacuguucuaggauuuaa

SEQ ID NO: 116912 - RNA, 20 nt, Human
uuugaacuuuguacucuguu

SEQ ID NO: 116913 - RNA, 22 nt, Human
uuugaagacauuugaauacuuu

SEQ ID NO: 116914 - RNA, 22 nt, Human
uuugaagauaaauauggagaaa

SEQ ID NO: 116915 - RNA, 22 nt, Human
uuugaagauuaugccagaguga

SEQ ID NO: 116916 - RNA, 22 nt, Human
uuugaagucagacacugcuuug

SEQ ID NO: 116917 - RNA, 23 nt, Human
uuugaaguugacugccuuccaga

SEQ ID NO: 116918 - RNA, 22 nt, Human
uuugaauaugugcuuguuaaau

SEQ ID NO: 116919 - RNA, 22 nt, Human
uuugaaugagggaaccacaguu

SEQ ID NO: 116920 - RNA, 23 nt, Human
uuugaaugggucuauuuuucuua

SEQ ID NO: 116921 - RNA, 22 nt, Human
uuugaauguaaaugcugcagcu

SEQ ID NO: 116922 - RNA, 22 nt, Human
uuugaaugugugaguuaacuuu

SEQ ID NO: 116923 - RNA, 22 nt, Human
uuugacaaauccuucagcaaug

SEQ ID NO: 116924 - RNA, 22 nt, Human
uuugacaauucaugacauuuau

SEQ ID NO: 116925 - RNA, 22 nt, Human
uuugacagauagauguuauguu

SEQ ID NO: 116926 - RNA, 22 nt, Human
uuugacagcuugcagugagacc

SEQ ID NO: 116927 - RNA, 22 nt, Human
uuugacaggagguggcuacuca

SEQ ID NO: 116928 - RNA, 22 nt, Human
uuugacagugcugcuaaaaugc

SEQ ID NO: 116929 - RNA, 22 nt, Human
uuuaugacccaagaagauacca

SEQ ID NO: 116930 - RNA, 22 nt, Human
uuuaugacuucuaaucugaagc

SEQ ID NO: 116931 - RNA, 18 nt, Human
uuuaugagcugugggacc

SEQ ID NO: 116932 - RNA, 22 nt, Human
uuuaugcacacuuagacauggc

SEQ ID NO: 116933 - RNA, 23 nt, Human
uuuaugcagcauguagaacaugg

SEQ ID NO: 116934 - RNA, 22 nt, Human
uuuaugcagccucaguaucaga

SEQ ID NO: 116935 - RNA, 22 nt, Human
uuuaugccuccagaucuugcuu

SEQ ID NO: 116936 - RNA, 22 nt, Human
uuuauguacauauccacaagga

SEQ ID NO: 116937 - RNA, 19 nt, Human
uuuaugucauugaggucau

SEQ ID NO: 116938 - RNA, 22 nt, Human
uuuaugugaugcaucccagaaa

SEQ ID NO: 116939 - RNA, 22 nt, Human
uuuauuaaaacuguuggcucug

SEQ ID NO: 116940 - RNA, 21 nt, Human
uuuauuaacaacuguggacgu

SEQ ID NO: 116941 - RNA, 22 nt, Human
uuuauuaauuagugacccaaug

SEQ ID NO: 116942 - RNA, 22 nt, Human
uuuauucacuggggucugcccg

SEQ ID NO: 116943 - RNA, 22 nt, Human
uuuauucuauaggcauuaagca

SEQ ID NO: 116944 - RNA, 21 nt, Human
uuuauucucagauacagggag

SEQ ID NO: 116945 - RNA, 20 nt, Human
uuuauugagcacguacugug

SEQ ID NO: 116946 - RNA, 22 nt, Human
uuuauuggauggauggauggau

SEQ ID NO: 116947 - RNA, 22 nt, Human
uuuauuggaugggucagcucua

SEQ ID NO: 116948 - RNA, 20 nt, Human
uuuauuggccuuucaggaac

SEQ ID NO: 116949 - RNA, 22 nt, Human
uuuauugggccuggaggaucua

SEQ ID NO: 116950 - RNA, 22 nt, Human
uuuauugucuaugaacugcuug

SEQ ID NO: 116951 - RNA, 22 nt, Human
uuuauuguguugaaacugaauu

SEQ ID NO: 116952 - RNA, 22 nt, Human
uuuauuguuguuagucauaagu

SEQ ID NO: 116953 - RNA, 22 nt, Human
uuuauuuaaagucguguguuaa

SEQ ID NO: 116954 - RNA, 22 nt, Human
uuuauuucuuaguuugccacag

SEQ ID NO: 116955 - RNA, 22 nt, Human
uuuauuugucuugccauuuagu

SEQ ID NO: 116956 - RNA, 22 nt, Human
uuucaaaauuuugcagugguaa

SEQ ID NO: 116957 - RNA, 22 nt, Human
uuucaaacauagaucugaauau

SEQ ID NO: 116958 - RNA, 22 nt, Human
uuucaaaccacugagguucuga

SEQ ID NO: 116959 - RNA, 22 nt, Human
uuucaaagacagccauauuugu

SEQ ID NO: 116960 - RNA, 23 nt, Human
uuucaaagacuuucccuuagagu

SEQ ID NO: 116961 - RNA, 22 nt, Human
uuucaaaggaggcugagaggau

SEQ ID NO: 116962 - RNA, 22 nt, Human
uuucaaaguugggaauuguaau

SEQ ID NO: 116963 - RNA, 22 nt, Human
uuucaaauggagucgugaaaug

SEQ ID NO: 116964 - RNA, 23 nt, Human
uuucaaauuacucugcagaugac

SEQ ID NO: 116965 - RNA, 22 nt, Human
uuucaacaccagagaccaugcg

SEQ ID NO: 116966 - RNA, 22 nt, Human
uuucaacauaccucaguguaug

SEQ ID NO: 116967 - RNA, 22 nt, Human
uuucaacaucaccuagcaguuc

SEQ ID NO: 116968 - RNA, 23 nt, Human
uuucaacuccugccauuauuucu

SEQ ID NO: 116969 - RNA, 22 nt, Human
uuucaacuuguuugcuuccaua

SEQ ID NO: 116970 - RNA, 22 nt, Human
uuucaagaacaacauucauuca

SEQ ID NO: 116971 - RNA, 22 nt, Human
uuucaagaagcaaauuaaaguc

SEQ ID NO: 116972 - RNA, 22 nt, Human
uuucaagacguuaagucagcuu

SEQ ID NO: 116973 - RNA, 22 nt, Human
uuucaagagcaggaaaaagguc

SEQ ID NO: 116974 - RNA, 22 nt, Human
uuucaagaggccagagcgaggc

SEQ ID NO: 116975 - RNA, 22 nt, Human
uuucaagcucuucaguguuauu

SEQ ID NO: 116976 - RNA, 22 nt, Human
uuucaagcugugguaacugaga

SEQ ID NO: 116977 - RNA, 17 nt, Human
uuucaagguuacguucc

SEQ ID NO: 116978 - RNA, 22 nt, Human
uuucaaguaagauacauuucag

SEQ ID NO: 116979 - RNA, 22 nt, Human
uuucaaguacuguaaacaugcu

SEQ ID NO: 116980 - RNA, 22 nt, Human
uuucaagugacuaugguuuuug

SEQ ID NO: 116981 - RNA, 22 nt, Human
uuucaaguucuguuccuaaacu

SEQ ID NO: 116982 - RNA, 22 nt, Human
uuucaaguuguugcauuaaaug

SEQ ID NO: 116983 - RNA, 21 nt, Human
uuucaauguguucuuuguagu

SEQ ID NO: 116984 - RNA, 21 nt, Human
uuucaauuugccuugagucau

SEQ ID NO: 116985 - RNA, 21 nt, Human
uuucacaaaaguaugugacaa

SEQ ID NO: 116986 - RNA, 22 nt, Human
uuucacaaguaaaguccuaagu

SEQ ID NO: 116987 - RNA, 23 nt, Human
uuucacaaugagcauuacagaau

SEQ ID NO: 116988 - RNA, 22 nt, Human
uuucacagaaagacaacagaua

SEQ ID NO: 116989 - RNA, 22 nt, Human
uuucacagaacucacuaaggag

SEQ ID NO: 116990 - RNA, 22 nt, Human
uuucacagauccuacagcuugu

SEQ ID NO: 116991 - RNA, 22 nt, Human
uuucacagcugauaccucuucc

SEQ ID NO: 116992 - RNA, 22 nt, Human
uuucacagcuggguggcagagu

SEQ ID NO: 116993 - RNA, 22 nt, Human
uuucacaggaguuguaccauuu

SEQ ID NO: 116994 - RNA, 22 nt, Human
uuucacaggggcaaccuccaug

SEQ ID NO: 116995 - RNA, 22 nt, Human
uuucacagguauccacgggucu

SEQ ID NO: 116996 - RNA, 22 nt, Human
uuucacagucaauuuggaguca

SEQ ID NO: 116997 - RNA, 22 nt, Human
uuucacauaaauauuaugccua

SEQ ID NO: 116998 - RNA, 22 nt, Human
uuucacauagaaagugauuuac

SEQ ID NO: 116999 - RNA, 22 nt, Human
uuucacauaugguuguugauug

SEQ ID NO: 117000 - RNA, 22 nt, Human
uuucacauccugaagccccacu

SEQ ID NO: 117001 - RNA, 22 nt, Human
uuucacaugguacugccuguuu

SEQ ID NO: 117002 - RNA, 22 nt, Human
uuucacauuggcuucuauuucu

SEQ ID NO: 117003 - RNA, 23 nt, Human
uuucacauuuacuguuagauggc

SEQ ID NO: 117004 - RNA, 22 nt, Human
uuucacauuuuauacuuaagcc

SEQ ID NO: 117005 - RNA, 20 nt, Human
uuucaccaucuuggccaggc

SEQ ID NO: 117006 - RNA, 20 nt, Human
uuucacuggcuugauaaggu

SEQ ID NO: 117007 - RNA, 22 nt, Human
uuucacugggcuugcagaaauc

SEQ ID NO: 117008 - RNA, 22 nt, Human
uuucagaaagcaucaucaaagu

SEQ ID NO: 117009 - RNA, 22 nt, Human
uuucagaacagggauugggccu

SEQ ID NO: 117010 - RNA, 22 nt, Human
uuucagaauaucgauucaguga

SEQ ID NO: 117011 - RNA, 22 nt, Human
uuucagacauaccaguuauuga

SEQ ID NO: 117012 - RNA, 22 nt, Human
uuucagacaugggggcaaacag

SEQ ID NO: 117013 - RNA, 22 nt, Human
uuucagacauuaagugauggga

SEQ ID NO: 117014 - RNA, 22 nt, Human
uuucagaccuggaugugggggc

SEQ ID NO: 117015 - RNA, 22 nt, Human
uuucagacucaucucaagcuuu

SEQ ID NO: 117016 - RNA, 22 nt, Human
uuucagacugcccauguuugcc

SEQ ID NO: 117017 - RNA, 22 nt, Human
uuucagacuguacuuugggguu

SEQ ID NO: 117018 - RNA, 22 nt, Human
uuucagagaggcuucaaaucuu

SEQ ID NO: 117019 - RNA, 22 nt, Human
uuucagagaugucuagccuauu

SEQ ID NO: 117020 - RNA, 22 nt, Human
uuucagagccugcaaucccaau

SEQ ID NO: 117021 - RNA, 22 nt, Human
uuucagagcucagcagcuagag

SEQ ID NO: 117022 - RNA, 22 nt, Human
uuucagagcugagaugccacag

SEQ ID NO: 117023 - RNA, 22 nt, Human
uuucagagguaugcugcuuauc

SEQ ID NO: 117024 - RNA, 22 nt, Human
uuucagagucuggcugcagccu

SEQ ID NO: 117025 - RNA, 22 nt, Human
uuucagaucauuuuuuaaguac

SEQ ID NO: 117026 - RNA, 22 nt, Human
uuucagauggagguuuaggaca

SEQ ID NO: 117027 - RNA, 20 nt, Human
uuucagauuuacagaaaugu

SEQ ID NO: 117028 - RNA, 22 nt, Human
uuucagccagugaugcugaaga

SEQ ID NO: 117029 - RNA, 22 nt, Human
uuucagcugguaaaggaguagc

SEQ ID NO: 117030 - RNA, 22 nt, Human
uuucaggaaggugaggcacaug

SEQ ID NO: 117031 - RNA, 22 nt, Human
uuucaggacucaaaacgauaau

SEQ ID NO: 117032 - RNA, 19 nt, Human
uuucaggagcuaugcaggg

SEQ ID NO: 117033 - RNA, 22 nt, Human
uuucagggucagccuguaugug

SEQ ID NO: 117034 - RNA, 22 nt, Human
uuucagucaugaguuguuuuca

SEQ ID NO: 117035 - RNA, 22 nt, Human
uuucagucuuauuuuguugaua

SEQ ID NO: 117036 - RNA, 22 nt, Human
uuucagugcccagagcuuugca

SEQ ID NO: 117037 - RNA, 22 nt, Human
uuucagugcuucuguuuaccgg

SEQ ID NO: 117038 - RNA, 22 nt, Human
uuucagugugagugucuuauuu

SEQ ID NO: 117039 - RNA, 22 nt, Human
uuucaguuguuuuagcucugug

SEQ ID NO: 117040 - RNA, 22 nt, Human
uuuggagauagggccuagcaau

SEQ ID NO: 117041 - RNA, 22 nt, Human
uuuggagauggagagagggcau

SEQ ID NO: 117042 - RNA, 22 nt, Human
uuuggcaaagaucaacauguua

SEQ ID NO: 117043 - RNA, 22 nt, Human
uuuggcaacggagaacuuacuc

SEQ ID NO: 117044 - RNA, 22 nt, Human
uuuggcacauucugucacauuc

SEQ ID NO: 117045 - RNA, 22 nt, Human
uuuggcacucacuuaucauugg

SEQ ID NO: 117046 - RNA, 23 nt, Human
uuuggcauguuaacuucacuuac

SEQ ID NO: 117047 - RNA, 22 nt, Human
uuuggccucguuuagaaauggc

SEQ ID NO: 117048 - RNA, 22 nt, Human
uuuggccuuguguucucuccau

SEQ ID NO: 117049 - RNA, 22 nt, Human
uuuggcggggcaauucugaagc

SEQ ID NO: 117050 - RNA, 22 nt, Human
uuuggcuagccaagaaacaaaa

SEQ ID NO: 117051 - RNA, 22 nt, Human
uuuggcucgauggacuuugaau

SEQ ID NO: 117052 - RNA, 22 nt, Human
uuuggcucggcugcugauggug

SEQ ID NO: 117053 - RNA, 23 nt, Human
uuuggcugggcugugggcacacc

SEQ ID NO: 117054 - RNA, 22 nt, Human
uuugggaaauaaaccuagagga

SEQ ID NO: 117055 - RNA, 22 nt, Human
uuugggaauagcagggacugag

SEQ ID NO: 117056 - RNA, 22 nt, Human
uuugggaugcuagacaccucag

SEQ ID NO: 117057 - RNA, 22 nt, Human
uuugggauuuuacauuguaugg

SEQ ID NO: 117058 - RNA, 22 nt, Human
uuugggcaauucagugggaccu

SEQ ID NO: 117059 - RNA, 22 nt, Human
uuugggcagaaacaugcgcccc

SEQ ID NO: 117060 - RNA, 22 nt, Human
uuugggcaggcuuuucccuaga

SEQ ID NO: 117061 - RNA, 22 nt, Human
uuugggcauauagcuguucccu

SEQ ID NO: 117062 - RNA, 22 nt, Human
uuugggcauguuguggccagcu

SEQ ID NO: 117063 - RNA, 22 nt, Human
uuugggcugagaugugggccga

SEQ ID NO: 117064 - RNA, 18 nt, Human
uuugggcugauguugggc

SEQ ID NO: 117065 - RNA, 22 nt, Human
uuuggggcucagcaggcuguuu

SEQ ID NO: 117066 - RNA, 22 nt, Human
uuugguaacaguuuuuggcacu

SEQ ID NO: 117067 - RNA, 17 nt, Human
uuugguaauauauuaag

SEQ ID NO: 117068 - RNA, 22 nt, Human
uuugguauugcacacugucuuc

SEQ ID NO: 117069 - RNA, 22 nt, Human
uuuggucuggaaucuucagggu

SEQ ID NO: 117070 - RNA, 22 nt, Human
uuuggucuuuuauuuaaagcag

SEQ ID NO: 117071 - RNA, 22 nt, Human
uuuggugagcugcgagugagga

SEQ ID NO: 117072 - RNA, 22 nt, Human
uuugguuuagggucauuuaaca

SEQ ID NO: 117073 - RNA, 22 nt, Human
uuugguuugccugaguacccuc

SEQ ID NO: 117074 - RNA, 22 nt, Human
uuuuuuaucuaugguaguacca

SEQ ID NO: 117075 - RNA, 22 nt, Human
uuuuuuggauaauaaacgaucu

SEQ ID NO: 117076 - RNA, 22 nt, Human
uuuuuuguagcaagcgcagaua

SEQ ID NO: 117077 - RNA, 22 nt, Human adenovirus A
aacaaugcuauuauugagcauu

SEQ ID NO: 117078 - RNA, 22 nt, Human adenovirus A
acugcggugcgugucacagcau

SEQ ID NO: 117079 - RNA, 19 nt, Human adenovirus A
auuaagaugucagcugcga

SEQ ID NO: 117080 - RNA, 23 nt, Human adenovirus A
caaaaaggacgaggugcgauaac

SEQ ID NO: 117081 - RNA, 22 nt, Human adenovirus A
ccaauguuguaaugacuaagca

SEQ ID NO: 117082 - RNA, 22 nt, Human adenovirus A
gcgcucuuguguuaagugugag

SEQ ID NO: 117083 - RNA, 22 nt, Human adenovirus A
gggaugcuuuugggacgcuggu

SEQ ID NO: 117084 - RNA, 22 nt, Human adenovirus A
ugccagcguccggguucacuac

SEQ ID NO: 117085 - RNA, 22 nt, Human adenovirus A
uugcugcuggcuucugauuugu

SEQ ID NO: 117086 - RNA, 22 nt, Human adenovirus A
gucuacggcuaggggcuguggc

SEQ ID NO: 117087 - RNA, 22 nt, Human adenovirus A
augaguguauggaaaauuuggg

SEQ ID NO: 117088 - RNA, 22 nt, Human adenovirus A
caagcuuggcaagcauaacagu

SEQ ID NO: 117089 - RNA, 21 nt, Human adenovirus A
ccacgguacccaggcgugggc

SEQ ID NO: 117090 - RNA, 22 nt, Human adenovirus A
gacaccuucuuaaaaguguggu

SEQ ID NO: 117091 - RNA, 22 nt, Human adenovirus A
uauuugguuacgccgggcucgu

SEQ ID NO: 117092 - RNA, 22 nt, Human adenovirus A
ugaaagcacuggcggguaccaa

SEQ ID NO: 117093 - RNA, 22 nt, Human adenovirus A
ugugcucauagcggauccugcc

SEQ ID NO: 117094 - RNA, 22 nt, Human adenovirus A
uuuacugcuaggggggcgcucc

SEQ ID NO: 117095 - RNA, 22 nt, Human adenovirus A
caggccaacucacggaggaguc

SEQ ID NO: 117096 - RNA, 22 nt, Human adenovirus A
gggguccggcgcuuaaccaauu

SEQ ID NO: 117097 - RNA, 22 nt, Human adenovirus A
gggguuccucgcuaugguaccc

SEQ ID NO: 117098 - RNA, 22 nt, Human adenovirus A
guacucagccggcuaauguucc

SEQ ID NO: 117099 - RNA, 22 nt, Human adenovirus A
uccuuagucauauugcauuggg

SEQ ID NO: 117100 - RNA, 22 nt, Human adenovirus C
acgcugccacuguccgugaagg

SEQ ID NO: 117101 - RNA, 22 nt, Human adenovirus C
agguagugccgggcccggcgcc

SEQ ID NO: 117102 - RNA, 22 nt, Human adenovirus C
auaggggcuacgcugguuagca

SEQ ID NO: 117103 - RNA, 22 nt, Human adenovirus C
augaaaaaauucauagauugga

SEQ ID NO: 117104 - RNA, 22 nt, Human adenovirus C
cacuccaguaggccgucaccgc

SEQ ID NO: 117105 - RNA, 22 nt, Human adenovirus C
cgcccgcgaugccgaagggggc

SEQ ID NO: 117106 - RNA, 22 nt, Human adenovirus C
gcugggcguuaccccgucgcgc

SEQ ID NO: 117107 - RNA, 22 nt, Human adenovirus C
ggcgccgggcccggcacuaccu

SEQ ID NO: 117108 - RNA, 22 nt, Human adenovirus C
ggcggacggaagacaacaguag

SEQ ID NO: 117109 - RNA, 20 nt, Human adenovirus C
gguugccucggcgguggcag

SEQ ID NO: 117110 - RNA, 22 nt, Human adenovirus C
gugagugcgcccauggacauaa

SEQ ID NO: 117111 - RNA, 22 nt, Human adenovirus C
guggaagccuggaccgauguaa

SEQ ID NO: 117112 - RNA, 22 nt, Human adenovirus C
uccccgcggcgacggcgcaugg

SEQ ID NO: 117113 - RNA, 22 nt, Human adenovirus C
aagcaagggcccgcggcugcug

SEQ ID NO: 117114 - RNA, 21 nt, Human adenovirus C
acauccaacagugcgggaaug

SEQ ID NO: 117115 - RNA, 22 nt, Human adenovirus C
agguuuuggccagcugguuuag

SEQ ID NO: 117116 - RNA, 22 nt, Human adenovirus C
cauccccgcccuguucgguguc

SEQ ID NO: 117117 - RNA, 22 nt, Human adenovirus C
cggcacguggagcucaaucucg

SEQ ID NO: 117118 - RNA, 22 nt, Human adenovirus C
cggcagcugcagcuucuuuuug

SEQ ID NO: 117119 - RNA, 22 nt, Human adenovirus C
cuguuagagcucuguuccagca

SEQ ID NO: 117120 - RNA, 22 nt, Human adenovirus C
gagcggugcggggugcauaggu

SEQ ID NO: 117121 - RNA, 22 nt, Human adenovirus C
gcgcguuucucgucgcguccaa

SEQ ID NO: 117122 - RNA, 22 nt, Human adenovirus C
ggucguccgccaugauacccuu

SEQ ID NO: 117123 - RNA, 22 nt, Human adenovirus C
guacuucccagagacgcccagg

SEQ ID NO: 117124 - RNA, 22 nt, Human adenovirus C
uccggccguccgccgugaucca

SEQ ID NO: 117125 - RNA, 22 nt, Human adenovirus C
ucgcgguacagugucagcaagu

SEQ ID NO: 117126 - RNA, 22 nt, Human adenovirus C
uugccugggaggagccccacag

SEQ ID NO: 117127 - RNA, 22 nt, Human adenovirus C
uuggcacuucgucgagcgaggc

SEQ ID NO: 117128 - RNA, 22 nt, Human adenovirus C
aaugauaggccuauagaugggg

SEQ ID NO: 117129 - RNA, 17 nt, Human adenovirus C
acccaacauagcuuuag

SEQ ID NO: 117130 - RNA, 22 nt, Human adenovirus C
augcgccaaagggugcgaucgc

SEQ ID NO: 117131 - RNA, 22 nt, Human adenovirus C
cuccugcuguugcuccuccguc

SEQ ID NO: 117132 - RNA, 22 nt, Human adenovirus C
cugaaagcaauguaauuggguc

SEQ ID NO: 117133 - RNA, 22 nt, Human adenovirus C
gaucaugucuaccugcggggcg

SEQ ID NO: 117134 - RNA, 22 nt, Human adenovirus C
gcauggaucacggcggacggcc

SEQ ID NO: 117135 - RNA, 22 nt, Human adenovirus C
guccucgucagcguagucuggg

SEQ ID NO: 117136 - RNA, 22 nt, Human adenovirus C
guugcgcgcggucauguccagc

SEQ ID NO: 117137 - RNA, 20 nt, Human adenovirus C
uccacguuggaaauuuugca

SEQ ID NO: 117138 - RNA, 22 nt, Human adenovirus C
ugcaaaauuccaagguaggaga

SEQ ID NO: 117139 - RNA, 22 nt, Human adenovirus C
ugucauaaucaguguggguucu

SEQ ID NO: 117140 - RNA, 22 nt, Human adenovirus C
uugccacugccacagagggcau

SEQ ID NO: 117141 - RNA, 22 nt, Human adenovirus C
auuguuccagucccgguucccu

SEQ ID NO: 117142 - RNA, 22 nt, Human adenovirus C
cuccgggcugcgcgcuggccag

SEQ ID NO: 117143 - RNA, 22 nt, Human adenovirus C
ugcagagcuucaugcugcgggg

SEQ ID NO: 117144 - RNA, 22 nt, Human adenovirus C
uuuuccgcuugcuuguauuccc

SEQ ID NO: 117145 - RNA, 20 nt, Human adenovirus D
aaggcggcucguccaccugc

SEQ ID NO: 117146 - RNA, 22 nt, Human adenovirus D
agcgauguccgccgacuuguug

SEQ ID NO: 117147 - RNA, 22 nt, Human adenovirus D
agcgccagucccucauccuccg

SEQ ID NO: 117148 - RNA, 22 nt, Human adenovirus D
cucccaggcccacaauacugug

SEQ ID NO: 117149 - RNA, 22 nt, Human adenovirus D
gcagcacauccuccucuccucc

SEQ ID NO: 117150 - RNA, 22 nt, Human adenovirus D
ggagggcauaucaauuuucucc

SEQ ID NO: 117151 - RNA, 22 nt, Human adenovirus D
uuggcggcacgcuccugcugcu

SEQ ID NO: 117152 - RNA, 22 nt, Human adenovirus D
cgggguuguggacuuccgcgua

SEQ ID NO: 117153 - RNA, 23 nt, Human adenovirus D
cgucacgacgcacggcuaacggu

SEQ ID NO: 117154 - RNA, 22 nt, Human adenovirus D
gacugcgauuggcuagacgcuu

SEQ ID NO: 117155 - RNA, 22 nt, Human adenovirus D
gaggaugagggacuggcgcugc

SEQ ID NO: 117156 - RNA, 22 nt, Human adenovirus D
gcuggcuggugccgaucucguu

SEQ ID NO: 117157 - RNA, 21 nt, Human adenovirus D
gggccugcaaacggugaaccu

SEQ ID NO: 117158 - RNA, 22 nt, Human adenovirus D
agcgucugccucaggcgcucgg

SEQ ID NO: 117159 - RNA, 22 nt, Human adenovirus D
ccaguucugggccuggcggcgg

SEQ ID NO: 117160 - RNA, 22 nt, Human adenovirus D
cgcaccgcggcacggucguggc

SEQ ID NO: 117161 - RNA, 18 nt, Human adenovirus D
gacuggugcugcgcgcgc

SEQ ID NO: 117162 - RNA, 20 nt, Human adenovirus D
gggaauccucgaucguccgc

SEQ ID NO: 117163 - RNA, 22 nt, Human adenovirus D
gucagguguguuuggcuuuagu

SEQ ID NO: 117164 - RNA, 22 nt, Human adenovirus D
ucggccagguccgaggcgacgg

SEQ ID NO: 117165 - RNA, 22 nt, Human adenovirus D
ugagaggagugugauaugcaca

SEQ ID NO: 117166 - RNA, 22 nt, Human adenovirus D
aagauucuccgauccggucgau

SEQ ID NO: 117167 - RNA, 22 nt, Human adenovirus D
accaacuaaaguuacguuugac

SEQ ID NO: 117168 - RNA, 22 nt, Human adenovirus D
aguugcaggaugcgcugcucgg

SEQ ID NO: 117169 - RNA, 22 nt, Human adenovirus D
ccguggccucuucgcccgaccg

SEQ ID NO: 117170 - RNA, 22 nt, Human adenovirus D
gauuggccgagaaacguugaug

SEQ ID NO: 117171 - RNA, 22 nt, Human adenovirus D
gcgucugcagcauugucugccu

SEQ ID NO: 117172 - RNA, 22 nt, Human adenovirus D
gcguggugggcaugccggccuu

SEQ ID NO: 117173 - RNA, 22 nt, Human adenovirus D
guuggacugcacguuugugcug

SEQ ID NO: 117174 - RNA, 22 nt, Human adenovirus D
ucaggaaguugcuguggucguu

SEQ ID NO: 117175 - RNA, 22 nt, Human adenovirus D
acauguaacuuagucguagggc

SEQ ID NO: 117176 - RNA, 20 nt, Human adenovirus D
agaaauuccauauguccgcc

SEQ ID NO: 117177 - RNA, 22 nt, Human adenovirus D
cagcagggcguuguacacuagc

SEQ ID NO: 117178 - RNA, 22 nt, Human adenovirus E
cagaauguucaccagguccagg

SEQ ID NO: 117179 - RNA, 21 nt, Human adenovirus E
cccugagcagcagcuugacgg

SEQ ID NO: 117180 - RNA, 22 nt, Human adenovirus E
ccugaagagguagugcagguuc

SEQ ID NO: 117181 - RNA, 22 nt, Human adenovirus E
ccugcaagaucuccaacgugga

SEQ ID NO: 117182 - RNA, 22 nt, Human adenovirus E
cgccucagcaaccugcugggca

SEQ ID NO: 117183 - RNA, 22 nt, Human adenovirus E
cgcuggcuccuggaccugguga

SEQ ID NO: 117184 - RNA, 22 nt, Human adenovirus E
uuucaguauguggaaucaggcg

SEQ ID NO: 117185 - RNA, 22 nt, Human adenovirus E
ccgcgucugcuccugcagcuga

SEQ ID NO: 117186 - RNA, 22 nt, Human adenovirus E
gugauuuccccguucuuggugg

SEQ ID NO: 117187 - RNA, 20 nt, Human adenovirus E
caucguggugcaggagcgcg

SEQ ID NO: 117188 - RNA, 22 nt, Human adenovirus E
gaggacgacggucuggcggcgg

SEQ ID NO: 117189 - RNA, 23 nt, Human adenovirus E
ucagcucgcccaggcgcuggguc

SEQ ID NO: 117190 - RNA, 22 nt, Human adenovirus E
accugguggacaacaagucggc

SEQ ID NO: 117191 - RNA, 22 nt, Human adenovirus E
cccgaggaaucgagguccaccc

SEQ ID NO: 117192 - RNA, 22 nt, Human adenovirus E
ccgugggcaucaugcugaggga

SEQ ID NO: 117193 - RNA, 22 nt, Human adenovirus E
ccucgggcucggugauauucag

SEQ ID NO: 117194 - RNA, 22 nt, Human adenovirus E
ggagaucuugcaggccuggcgc

SEQ ID NO: 117195 - RNA, 22 nt, Human adenovirus F
agcgguggggagaggugugauc

SEQ ID NO: 117196 - RNA, 22 nt, Human adenovirus F
cugcuguaugaugggcacgcgg

SEQ ID NO: 117197 - RNA, 22 nt, Human adenovirus F
gucaaaauugauggucugggua

SEQ ID NO: 117198 - RNA, 22 nt, Human adenovirus F
ucgcaucuuuuuugacuuggcu

SEQ ID NO: 117199 - RNA, 23 nt, Human adenovirus F
acugucaguggugcggcgguggc

SEQ ID NO: 117200 - RNA, 16 nt, Human adenovirus F
agucauuauuuuguac

SEQ ID NO: 117201 - RNA, 22 nt, Human adenovirus F
caccuguaccgggucuuggaaa

SEQ ID NO: 117202 - RNA, 22 nt, Human adenovirus F
cggaaggcauagugcagggacu

SEQ ID NO: 117203 - RNA, 22 nt, Human adenovirus F
gaggcguucgacgcgaggauga

SEQ ID NO: 117204 - RNA, 22 nt, Human adenovirus F
gccucugccaguguuaauacua

SEQ ID NO: 117205 - RNA, 22 nt, Human adenovirus F
gccugggagaaaggcauggauu

SEQ ID NO: 117206 - RNA, 22 nt, Human adenovirus F
ggagaucuugcaggccugacga

SEQ ID NO: 117207 - RNA, 22 nt, Human adenovirus F
ggagcguguuugucagagguag

SEQ ID NO: 117208 - RNA, 22 nt, Human adenovirus F
ggagggacguggagcgccugca

SEQ ID NO: 117209 - RNA, 22 nt, Human adenovirus F
ugaggcuuggcagucucuaccu

SEQ ID NO: 117210 - RNA, 22 nt, Human adenovirus F
uuuaaacgaccgcgacaggugg

SEQ ID NO: 117211 - RNA, 22 nt, Human adenovirus F
aguuagcgcccugucgcugccu

SEQ ID NO: 117212 - RNA, 22 nt, Human adenovirus F
cagugguucuuaauccgcaggc

SEQ ID NO: 117213 - RNA, 22 nt, Human adenovirus F
cgcccucuucugcaccugcacg

SEQ ID NO: 117214 - RNA, 22 nt, Human adenovirus F
gaccaccugucgcggucguuua

SEQ ID NO: 117215 - RNA, 22 nt, Human adenovirus F
gcaagcccauucugccaguugg

SEQ ID NO: 117216 - RNA, 22 nt, Human adenovirus F
ugcagagccaccggaggcuggc

SEQ ID NO: 117217 - RNA, 22 nt, Human adenovirus F
ugcggagccugagggucgcugg

SEQ ID NO: 117218 - RNA, 22 nt, Human adenovirus F
aacguaugcuguuccgcccuuc

SEQ ID NO: 117219 - RNA, 22 nt, Human adenovirus F
gugcaggugcagaagagggcga

SEQ ID NO: 117220 - RNA, 22 nt, Human astrovirus
cccagcagacuuccauccagug

SEQ ID NO: 117221 - RNA, 22 nt, Human coronavirus 229E
ccauagaagacauacuuuuuag

SEQ ID NO: 117222 - RNA, 22 nt, Human coronavirus 229E
uuaccagacuaacaucuauuca

SEQ ID NO: 117223 - RNA, 20 nt, Human coronavirus 229E
aucuucaaguugaaucugca

SEQ ID NO: 117224 - RNA, 22 nt, Human coronavirus 229E
gcagaggauguuuguacuuguu

SEQ ID NO: 117225 - RNA, 22 nt, Human coronavirus 229E
gcauaugaaacagcaagacaag

SEQ ID NO: 117226 - RNA, 22 nt, Human coronavirus 229E
gcuuuaacaccauuggccacaa

SEQ ID NO: 117227 - RNA, 18 nt, Human coronavirus 229E
ggucaaggucucuggggc

SEQ ID NO: 117228 - RNA, 22 nt, Human coronavirus 229E
gucugucauagauagccugaau

SEQ ID NO: 117229 - RNA, 22 nt, Human coronavirus 229E
ugagggcagaaccauuuauggu

SEQ ID NO: 117230 - RNA, 22 nt, Human coronavirus 229E
auuucuuuugcuccaugguggu

SEQ ID NO: 117231 - RNA, 22 nt, Human coronavirus 229E
gccuaucuacuuguugaucagc

SEQ ID NO: 117232 - RNA, 22 nt, Human coronavirus 229E
ggugcuaauuucacuggucaaa

SEQ ID NO: 117233 - RNA, 22 nt, Human coronavirus 229E
gugcaauuucuaaugaauggua

SEQ ID NO: 117234 - RNA, 20 nt, Human coronavirus 229E
uaguaugugguucucaaaca

SEQ ID NO: 117235 - RNA, 22 nt, Human coronavirus 229E
ugucugaaauccauaguagcua

SEQ ID NO: 117236 - RNA, 22 nt, Human coronavirus 229E
uguugcaacaugcuacaauucu

SEQ ID NO: 117237 - RNA, 22 nt, Human coronavirus 229E
uuaagauuggagcuguuaaaca

SEQ ID NO: 117238 - RNA, 22 nt, Human coronavirus 229E
uuugaacaguguaauuaagcuc

SEQ ID NO: 117239 - RNA, 22 nt, Human coronavirus 229E
uuuucaugcccuauuuuaugua

SEQ ID NO: 117240 - RNA, 22 nt, Human coronavirus 229E
agauguuaacaguuaauguggu

SEQ ID NO: 117241 - RNA, 20 nt, Human coronavirus 229E
auuguuaugacaagaacccu

SEQ ID NO: 117242 - RNA, 22 nt, Human coronavirus 229E
caagcugucacgcaaauaccug

SEQ ID NO: 117243 - RNA, 22 nt, Human coronavirus 229E
ccagaguauauugauguuaaua

SEQ ID NO: 117244 - RNA, 22 nt, Human coronavirus 229E
uacacauuuugacauugaagaa

SEQ ID NO: 117245 - RNA, 22 nt, Human coronavirus 229E
uauucaaucagcacuuucuguu

SEQ ID NO: 117246 - RNA, 22 nt, Human coronavirus 229E
uuuguuaaugacaaaauuacug

SEQ ID NO: 117247 - RNA, 22 nt, Human echovirus 1
acucggcacacaugggggccac

SEQ ID NO: 117248 - RNA, 22 nt, Human echovirus 1
ccaugggaggugaaggugucgu

SEQ ID NO: 117249 - RNA, 22 nt, Human echovirus 1
cucaaguguuuggcuuucaacu

SEQ ID NO: 117250 - RNA, 22 nt, Human herpesvirus 1
aaacgcgagcugcacgcggggc

SEQ ID NO: 117251 - RNA, 22 nt, Human herpesvirus 1
aagaagcucacauaguccccac

SEQ ID NO: 117252 - RNA, 22 nt, Human herpesvirus 1
acacgcgggacaucgcgcagcg

SEQ ID NO: 117253 - RNA, 22 nt, Human herpesvirus 1
accccaggcgugccgggggaac

SEQ ID NO: 117254 - RNA, 19 nt, Human herpesvirus 1
acgcaggcgcccccggcga

SEQ ID NO: 117255 - RNA, 22 nt, Human herpesvirus 1
agaacagcgucacccgauuacu

SEQ ID NO: 117256 - RNA, 22 nt, Human herpesvirus 1
agcgcgcucgucugacguuugg

SEQ ID NO: 117257 - RNA, 22 nt, Human herpesvirus 1
agcgcuggcggccgucucgagg

SEQ ID NO: 117258 - RNA, 22 nt, Human herpesvirus 1
agcucauccaacgccgcauggg

SEQ ID NO: 117259 - RNA, 22 nt, Human herpesvirus 1
ccauguccuuuugucaaucggu

SEQ ID NO: 117260 - RNA, 22 nt, Human herpesvirus 1
cccaugcggcguuggaugagcu

SEQ ID NO: 117261 - RNA, 22 nt, Human herpesvirus 1
ccccaugggcgguggaggaguu

SEQ ID NO: 117262 - RNA, 22 nt, Human herpesvirus 1
ccgccgcuugaucauuaucacc

SEQ ID NO: 117263 - RNA, 22 nt, Human herpesvirus 1
ccggagguuccggaggcgccgc

SEQ ID NO: 117264 - RNA, 22 nt, Human herpesvirus 1
ccggaucgagguaccgucggug

SEQ ID NO: 117265 - RNA, 22 nt, Human herpesvirus 1
accgggucucgagguaucgguu

SEQ ID NO: 117266 - RNA, 22 nt, Human herpesvirus 1
acgccgccaucgcgcccuuucg

SEQ ID NO: 117267 - RNA, 22 nt, Human herpesvirus 1
acgcgcgauagagucgacgacc

SEQ ID NO: 117268 - RNA, 22 nt, Human herpesvirus 1
agcugcucgagucccugccugu

SEQ ID NO: 117269 - RNA, 22 nt, Human herpesvirus 1
agguggcgcacccggacguggg

SEQ ID NO: 117270 - RNA, 22 nt, Human herpesvirus 1
caucaacaggaggucagugucc

SEQ ID NO: 117271 - RNA, 22 nt, Human herpesvirus 1
ccaacccuggguggucgcggaa

SEQ ID NO: 117272 - RNA, 22 nt, Human herpesvirus 1
ccgucccgggccuucgcggcca

SEQ ID NO: 117273 - RNA, 22 nt, Human herpesvirus 1
ccucgagacggccgccagcgcu

SEQ ID NO: 117274 - RNA, 22 nt, Human herpesvirus 1
cgaacgcacaacggcgcugcuc

SEQ ID NO: 117275 - RNA, 22 nt, Human herpesvirus 1
cgauagugccgaggcgccgccc

SEQ ID NO: 117276 - RNA, 22 nt, Human herpesvirus 1
cgcucacgcgcaugcccgccac

SEQ ID NO: 117277 - RNA, 22 nt, Human herpesvirus 1
cggaacagcaucguaccggggc

SEQ ID NO: 117278 - RNA, 17 nt, Human herpesvirus 1
cggccggccgccauggc

SEQ ID NO: 117279 - RNA, 18 nt, Human herpesvirus 1
cuuuccgagggcgagcuc

SEQ ID NO: 117280 - RNA, 22 nt, Human herpesvirus 1
gaacuugggggucgugagcagg

SEQ ID NO: 117281 - RNA, 22 nt, Human herpesvirus 1
gaagaggggucgggauccaaag

SEQ ID NO: 117282 - RNA, 22 nt, Human herpesvirus 1
gaccgcgagggacacguggugc

SEQ ID NO: 117283 - RNA, 22 nt, Human herpesvirus 1
gaucggugggcccgccgcggcc

SEQ ID NO: 117284 - RNA, 22 nt, Human herpesvirus 1
gcaggccgugugcaggcccugc

SEQ ID NO: 117285 - RNA, 21 nt, Human herpesvirus 1
gcgacaccuucccgugcaugc

SEQ ID NO: 117286 - RNA, 22 nt, Human herpesvirus 1
gcgcagacugucgacggccccc

SEQ ID NO: 117287 - RNA, 22 nt, Human herpesvirus 1
gcgcgugguccccggggacgug

SEQ ID NO: 117288 - RNA, 22 nt, Human herpesvirus 1
gcgugcaggaggcggacggccc

SEQ ID NO: 117289 - RNA, 22 nt, Human herpesvirus 1
ggagcugugccgccagacacgc

SEQ ID NO: 117290 - RNA, 22 nt, Human herpesvirus 1
ggccgcuguucgagggccagga

SEQ ID NO: 117291 - RNA, 22 nt, Human herpesvirus 1
ggccggggcccgcgcgcugaug

SEQ ID NO: 117292 - RNA, 22 nt, Human herpesvirus 1
gggacgcgaguacccacguuaa

SEQ ID NO: 117293 - RNA, 22 nt, Human herpesvirus 1
gggccuaccguggacuccauuu

SEQ ID NO: 117294 - RNA, 22 nt, Human herpesvirus 1
gggccuguucgguaucgucguu

SEQ ID NO: 117295 - RNA, 22 nt, Human herpesvirus 1
gggcguggccgcuauuauaaaa

SEQ ID NO: 117296 - RNA, 22 nt, Human herpesvirus 1
ggggcgagcugugcccgcguga

SEQ ID NO: 117297 - RNA, 22 nt, Human herpesvirus 1
ggggcggagcguugugugggcg

SEQ ID NO: 117298 - RNA, 22 nt, Human herpesvirus 1
ggucccggcgcuggcgguaagu

SEQ ID NO: 117299 - RNA, 22 nt, Human herpesvirus 1
gguccggagaucaugcgcgggu

SEQ ID NO: 117300 - RNA, 22 nt, Human herpesvirus 1
gguguuuacgaacgaguuugac

SEQ ID NO: 117301 - RNA, 22 nt, Human herpesvirus 1
guacgcgaccguguugguguga

SEQ ID NO: 117302 - RNA, 19 nt, Human herpesvirus 1
gucgacguagggggcgcgg

SEQ ID NO: 117303 - RNA, 22 nt, Human herpesvirus 1
gucgcucgguauucgaggccac

SEQ ID NO: 117304 - RNA, 23 nt, Human herpesvirus 1
guggaccugggaccgcgccgccc

SEQ ID NO: 117305 - RNA, 18 nt, Human herpesvirus 1
uacucgcgagcgcggggg

SEQ ID NO: 117306 - RNA, 22 nt, Human herpesvirus 1
uagcauaucacauaccccguuc

SEQ ID NO: 117307 - RNA, 17 nt, Human herpesvirus 1
ucgggccgugggcgacc

SEQ ID NO: 117308 - RNA, 22 nt, Human herpesvirus 1
ucgucgucagcaccgucaucca

SEQ ID NO: 117309 - RNA, 22 nt, Human herpesvirus 1
ugggggugugcguucgaugcgg

SEQ ID NO: 117310 - RNA, 22 nt, Human herpesvirus 1
uuggugccgguggggcguaccg

SEQ ID NO: 117311 - RNA, 22 nt, Human herpesvirus 1
gagcuuguuuucgugggggacg

SEQ ID NO: 117312 - RNA, 19 nt, Human herpesvirus 1
gcacggccgacgccgcggu

SEQ ID NO: 117313 - RNA, 22 nt, Human herpesvirus 1
gcagccuucgcucuccauccug

SEQ ID NO: 117314 - RNA, 22 nt, Human herpesvirus 1
gcagguugucguugccgcgggu

SEQ ID NO: 117315 - RNA, 22 nt, Human herpesvirus 1
gcgcccgaggccucgaaccggc

SEQ ID NO: 117316 - RNA, 18 nt, Human herpesvirus 1
gcggggguggauacgcug

SEQ ID NO: 117317 - RNA, 22 nt, Human herpesvirus 1
ggccuuguuugucuggcggauc

SEQ ID NO: 117318 - RNA, 22 nt, Human herpesvirus 1
ggcguuguugauggccacggug

SEQ ID NO: 117319 - RNA, 22 nt, Human herpesvirus 1
ggcucguguuguuuuccgagua

SEQ ID NO: 117320 - RNA, 22 nt, Human herpesvirus 1
ggcugguucgcagcgaggugca

SEQ ID NO: 117321 - RNA, 22 nt, Human herpesvirus 1
gggagugagggucgcgucgucu

SEQ ID NO: 117322 - RNA, 22 nt, Human herpesvirus 1
gggcccagcgcgaucuacggga

SEQ ID NO: 117323 - RNA, 17 nt, Human herpesvirus 1
gggggaagcgagauagg

SEQ ID NO: 117324 - RNA, 22 nt, Human herpesvirus 1
gucucggggucagccucgagcu

SEQ ID NO: 117325 - RNA, 22 nt, Human herpesvirus 1
gugggggaguuugagacggccg

SEQ ID NO: 117326 - RNA, 16 nt, Human herpesvirus 1
guggugcccggggcug

SEQ ID NO: 117327 - RNA, 22 nt, Human herpesvirus 1
guucggacggcaggcacacgua

SEQ ID NO: 117328 - RNA, 23 nt, Human herpesvirus 1
ucccgaggcgucgcugccggccc

SEQ ID NO: 117329 - RNA, 22 nt, Human herpesvirus 1
ucgucgagcguaccgacgggcg

SEQ ID NO: 117330 - RNA, 22 nt, Human herpesvirus 1
ugaucgggguacuucgccgccg

SEQ ID NO: 117331 - RNA, 22 nt, Human herpesvirus 1
ugccccccggccucgucgaggu

SEQ ID NO: 117332 - RNA, 22 nt, Human herpesvirus 1
ugccggacacccaggggcgauu

SEQ ID NO: 117333 - RNA, 22 nt, Human herpesvirus 1
uggccgucuuugacgagccgcc

SEQ ID NO: 117334 - RNA, 22 nt, Human herpesvirus 1
uggguuuggcgcgcguaugcgu

SEQ ID NO: 117335 - RNA, 22 nt, Human herpesvirus 1
uggucccgacgccaacccaggc

SEQ ID NO: 117336 - RNA, 22 nt, Human herpesvirus 1
cuccccugcggcguugcgacau

SEQ ID NO: 117337 - RNA, 18 nt, Human herpesvirus 1
gacaacaacgcccauguu

SEQ ID NO: 117338 - RNA, 22 nt, Human herpesvirus 1
gacgucgacucuaucgcgcgca

SEQ ID NO: 117339 - RNA, 22 nt, Human herpesvirus 1
gcccggcucgcgccgugcugac

SEQ ID NO: 117340 - RNA, 22 nt, Human herpesvirus 1
gccguguccuucacggggcucu

SEQ ID NO: 117341 - RNA, 22 nt, Human herpesvirus 1
gcgcuguggccucccguuccgg

SEQ ID NO: 117342 - RNA, 22 nt, Human herpesvirus 1
gcgggccugucguguagauucg

SEQ ID NO: 117343 - RNA, 22 nt, Human herpesvirus 1
gcggucccgcgucgggucgugg

SEQ ID NO: 117344 - RNA, 22 nt, Human herpesvirus 1
ggacgaggcgucggcgggccuc

SEQ ID NO: 117345 - RNA, 22 nt, Human herpesvirus 1
ggcagggcguuguucuggucaa

SEQ ID NO: 117346 - RNA, 22 nt, Human herpesvirus 1
ggcccagacgccguacccggug

SEQ ID NO: 117347 - RNA, 22 nt, Human herpesvirus 1
ggcgcgacacgaacaccgggcg

SEQ ID NO: 117348 - RNA, 22 nt, Human herpesvirus 1
ggggggccuccgacggugcguu

SEQ ID NO: 117349 - RNA, 22 nt, Human herpesvirus 1
ggguggcagcagcgccgggucu

SEQ ID NO: 117350 - RNA, 22 nt, Human herpesvirus 1
ggucgucggcgggcugacgauc

SEQ ID NO: 117351 - RNA, 22 nt, Human herpesvirus 1
gucccgccgaacgcauacaugc

SEQ ID NO: 117352 - RNA, 22 nt, Human herpesvirus 1
guccuuuggaucccgaccccuc

SEQ ID NO: 117353 - RNA, 22 nt, Human herpesvirus 1
gucgcggcguccuggaucgacg

SEQ ID NO: 117354 - RNA, 22 nt, Human herpesvirus 1
guucccccggcacgccuggggu

SEQ ID NO: 117355 - RNA, 20 nt, Human herpesvirus 1
uagggcgaagugcgagcacu

SEQ ID NO: 117356 - RNA, 22 nt, Human herpesvirus 1
uccccugugguguuuuugguua

SEQ ID NO: 117357 - RNA, 22 nt, Human herpesvirus 1
ucgaugugggggugaccuccgg

SEQ ID NO: 117358 - RNA, 22 nt, Human herpesvirus 1
ucgcagcgauuuucguacgggg

SEQ ID NO: 117359 - RNA, 22 nt, Human herpesvirus 1
ucucgucgacaaacagggggaa

SEQ ID NO: 117360 - RNA, 22 nt, Human herpesvirus 1
ugaauaucucguugcgauucac

SEQ ID NO: 117361 - RNA, 22 nt, Human herpesvirus 1
ugcccgggacccacguggcggc

SEQ ID NO: 117362 - RNA, 20 nt, Human herpesvirus 1
ugcgucgcccgcgucuggac

SEQ ID NO: 117363 - RNA, 22 nt, Human herpesvirus 1
uggacaggcucuggagcauccg

SEQ ID NO: 117364 - RNA, 23 nt, Human herpesvirus 1
uggccgucaggagcucggcgcag

SEQ ID NO: 117365 - RNA, 22 nt, Human herpesvirus 1
uggcgcacccggacguggggcg

SEQ ID NO: 117366 - RNA, 22 nt, Human herpesvirus 1
uggggaccacgcccccaacacg

SEQ ID NO: 117367 - RNA, 14 nt, Human herpesvirus 1
uggugcgauggcga

SEQ ID NO: 117368 - RNA, 22 nt, Human herpesvirus 1
uguggccucaccugaccaaccu

SEQ ID NO: 117369 - RNA, 20 nt, Human herpesvirus 1
uguggugccgccugugauac

SEQ ID NO: 117370 - RNA, 22 nt, Human herpesvirus 1
uugccgucgucguccucguccu

SEQ ID NO: 117371 - RNA, 22 nt, Human herpesvirus 1
uuggucaggugaggccacagcg

SEQ ID NO: 117372 - RNA, 22 nt, Human herpesvirus 1
acggcccgaagaugcguggcua

SEQ ID NO: 117373 - RNA, 18 nt, Human herpesvirus 1
acgggcugucauuccucg

SEQ ID NO: 117374 - RNA, 22 nt, Human herpesvirus 1
agaaccuccccggguugcucgu

SEQ ID NO: 117375 - RNA, 22 nt, Human herpesvirus 1
agaugggcugcgcugggcgcca

SEQ ID NO: 117376 - RNA, 22 nt, Human herpesvirus 1
agugcucgcacuucgcccuaau

SEQ ID NO: 117377 - RNA, 22 nt, Human herpesvirus 1
auaauuuuauuggugggucguu

SEQ ID NO: 117378 - RNA, 22 nt, Human herpesvirus 1
cagucgcacucgucccuggcuc

SEQ ID NO: 117379 - RNA, 22 nt, Human herpesvirus 1
caguuuggugggauuugcggcg

SEQ ID NO: 117380 - RNA, 22 nt, Human herpesvirus 1
caugcucacgcugcaggugcug

SEQ ID NO: 117381 - RNA, 22 nt, Human herpesvirus 1
ccacgggccgcagcggcaccgu

SEQ ID NO: 117382 - RNA, 22 nt, Human herpesvirus 1
ccccagcgugcaggcugcggcc

SEQ ID NO: 117383 - RNA, 22 nt, Human herpesvirus 1
cccccgagucggacccggaggc

SEQ ID NO: 117384 - RNA, 22 nt, Human herpesvirus 1
ccgggcaugaaaacgaccucca

SEQ ID NO: 117385 - RNA, 22 nt, Human herpesvirus 1
cgacaggauuugggaccuacca

SEQ ID NO: 117386 - RNA, 22 nt, Human herpesvirus 1
cgccccgacggccaggugcgug

SEQ ID NO: 117387 - RNA, 22 nt, Human herpesvirus 1
cggacgucuucggaggccccgc

SEQ ID NO: 117388 - RNA, 22 nt, Human herpesvirus 1
cgguuccgcgguaccccgaguc

SEQ ID NO: 117389 - RNA, 22 nt, Human herpesvirus 1
cgucgccugcacaggaaggacc

SEQ ID NO: 117390 - RNA, 22 nt, Human herpesvirus 1
cguugcggagcaucccgcgccu

SEQ ID NO: 117391 - RNA, 22 nt, Human herpesvirus 1
gaccaccggcgucggcgcccgg

SEQ ID NO: 117392 - RNA, 22 nt, Human herpesvirus 1
aaaggggucugcaaccaaaggu

SEQ ID NO: 117393 - RNA, 22 nt, Human herpesvirus 1
aaugcgcgcgauagagucgacg

SEQ ID NO: 117394 - RNA, 22 nt, Human herpesvirus 1
acccaggcggcgaacgggggcc

SEQ ID NO: 117395 - RNA, 22 nt, Human herpesvirus 1
accugcagcaaacggcaccacg

SEQ ID NO: 117396 - RNA, 22 nt, Human herpesvirus 1
acgggcgcuuuggcacccaguc

SEQ ID NO: 117397 - RNA, 22 nt, Human herpesvirus 1
agccccacgcagggucugcgag

SEQ ID NO: 117398 - RNA, 22 nt, Human herpesvirus 1
agcguucgcacuucgucccaau

SEQ ID NO: 117399 - RNA, 22 nt, Human herpesvirus 1
aggccccuaggucgcgacggcu

SEQ ID NO: 117400 - RNA, 22 nt, Human herpesvirus 1
cagaggggcgagguccguuucg

SEQ ID NO: 117401 - RNA, 22 nt, Human herpesvirus 1
cagcggccggccggcgcuuagg

SEQ ID NO: 117402 - RNA, 22 nt, Human herpesvirus 1
caucgggccagauucacgcuuc

SEQ ID NO: 117403 - RNA, 22 nt, Human herpesvirus 1
ccacaacauggagcauacgcuc

SEQ ID NO: 117404 - RNA, 22 nt, Human herpesvirus 1
ccccgagccacgccagaaccuu

SEQ ID NO: 117405 - RNA, 22 nt, Human herpesvirus 1
cccgcgagucggagcuggagcu

SEQ ID NO: 117406 - RNA, 22 nt, Human herpesvirus 1
cccgcgcgucgacgggacccag

SEQ ID NO: 117407 - RNA, 22 nt, Human herpesvirus 1
ccgcgugggccccgcuggcguu

SEQ ID NO: 117408 - RNA, 22 nt, Human herpesvirus 1
ccggagagcggcuuggugcgga

SEQ ID NO: 117409 - RNA, 22 nt, Human herpesvirus 1
ccggccuggccgcccugugucu

SEQ ID NO: 117410 - RNA, 22 nt, Human herpesvirus 1
cgagucggauuaugcccucuac

SEQ ID NO: 117411 - RNA, 15 nt, Human herpesvirus 1
cgccgcgcccgggcc

SEQ ID NO: 117412 - RNA, 22 nt, Human herpesvirus 1
cgccggggcugcccggccguga

SEQ ID NO: 117413 - RNA, 22 nt, Human herpesvirus 1
cgcgcgccaauggggucgggaa

SEQ ID NO: 117414 - RNA, 22 nt, Human herpesvirus 1
cgcggccggggccucgaugugg

SEQ ID NO: 117415 - RNA, 23 nt, Human herpesvirus 1
cggccggccgccauggcguagcc

SEQ ID NO: 117416 - RNA, 23 nt, Human herpesvirus 1
cgguccauggcgucgcgggcguc

SEQ ID NO: 117417 - RNA, 22 nt, Human herpesvirus 1
cggugcagcggacuggcaccga

SEQ ID NO: 117418 - RNA, 22 nt, Human herpesvirus 1
cgucgagcguaccgacgggcgg

SEQ ID NO: 117419 - RNA, 18 nt, Human herpesvirus 1
cgugacgggcggggcguc

SEQ ID NO: 117420 - RNA, 22 nt, Human herpesvirus 1
cucauggccacggcggccgccg

SEQ ID NO: 117421 - RNA, 22 nt, Human herpesvirus 1
ucggugcucuccaaggggcugu

SEQ ID NO: 117422 - RNA, 22 nt, Human herpesvirus 1
ucucggcgggggccgucuggcc

SEQ ID NO: 117423 - RNA, 22 nt, Human herpesvirus 1
ucugucucgccaggggcuggcc

SEQ ID NO: 117424 - RNA, 22 nt, Human herpesvirus 1
ugacgacagcuuuguaaagacu

SEQ ID NO: 117425 - RNA, 22 nt, Human herpesvirus 1
ugcaggucguacguggcccccg

SEQ ID NO: 117426 - RNA, 22 nt, Human herpesvirus 1
ugcgcaggugcaugccccaggu

SEQ ID NO: 117427 - RNA, 18 nt, Human herpesvirus 1
ugcuugccugucaaacuc

SEQ ID NO: 117428 - RNA, 20 nt, Human herpesvirus 1
uggccgucaggagcucggcg

SEQ ID NO: 117429 - RNA, 22 nt, Human herpesvirus 1
uggccgucgagugccuggccgc

SEQ ID NO: 117430 - RNA, 22 nt, Human herpesvirus 1
uggguuccgggagcaggcgugg

SEQ ID NO: 117431 - RNA, 22 nt, Human herpesvirus 1
uguaggcgaugcgggucccccg

SEQ ID NO: 117432 - RNA, 20 nt, Human herpesvirus 1
ugugucgcagggcggcccgc

SEQ ID NO: 117433 - RNA, 21 nt, Human herpesvirus 1
uuuauaauagcggccacgccc

SEQ ID NO: 117434 - RNA, 22 nt, Human herpesvirus 1
ccguccgccuucuccgugacau

SEQ ID NO: 117435 - RNA, 22 nt, Human herpesvirus 1
ccuuggccgccccggcugcagg

SEQ ID NO: 117436 - RNA, 22 nt, Human herpesvirus 1
cgcccccucccuguuugucgcc

SEQ ID NO: 117437 - RNA, 20 nt, Human herpesvirus 1
cgcggggugguuccgucacg

SEQ ID NO: 117438 - RNA, 22 nt, Human herpesvirus 1
cggggugaaugagcugggcggc

SEQ ID NO: 117439 - RNA, 22 nt, Human herpesvirus 1
cgucccccgacgaccucuugca

SEQ ID NO: 117440 - RNA, 23 nt, Human herpesvirus 1
cgucgacucuaucgcgcgugccg

SEQ ID NO: 117441 - RNA, 22 nt, Human herpesvirus 1
cguggagucgaaggccagcgcc

SEQ ID NO: 117442 - RNA, 22 nt, Human herpesvirus 1
cucgcugcgaaccagcccgggu

SEQ ID NO: 117443 - RNA, 22 nt, Human herpesvirus 1
cuggcgucggcgcguguggguc

SEQ ID NO: 117444 - RNA, 22 nt, Human herpesvirus 1
cuugccgaauccagggagggua

SEQ ID NO: 117445 - RNA, 22 nt, Human herpesvirus 1
gaaaggggucugcaaccaaagg

SEQ ID NO: 117446 - RNA, 22 nt, Human herpesvirus 1
gagugccagcccugggaccgaa

SEQ ID NO: 117447 - RNA, 22 nt, Human herpesvirus 1
gaguuugacaggcaagcaugug

SEQ ID NO: 117448 - RNA, 22 nt, Human herpesvirus 1
gaugugcgucgcguuguaccug

SEQ ID NO: 117449 - RNA, 22 nt, Human herpesvirus 1
gcaccucgugguggacguauag

SEQ ID NO: 117450 - RNA, 22 nt, Human herpesvirus 1
gccagggucgcgcggcccgaaa

SEQ ID NO: 117451 - RNA, 22 nt, Human herpesvirus 1
gcgccacggccuccgcguucuc

SEQ ID NO: 117452 - RNA, 22 nt, Human herpesvirus 1
gcggggcccccgcuuccggaug

SEQ ID NO: 117453 - RNA, 19 nt, Human herpesvirus 1
gcucggcuugcgccugccc

SEQ ID NO: 117454 - RNA, 22 nt, Human herpesvirus 1
gcuggccgagggcuucgacggc

SEQ ID NO: 117455 - RNA, 16 nt, Human herpesvirus 1
gcuuggaggccggaug

SEQ ID NO: 117456 - RNA, 22 nt, Human herpesvirus 1
ggacggccuggacguugcgagc

SEQ ID NO: 117457 - RNA, 22 nt, Human herpesvirus 1
ggcccccguucgccgccugggu

SEQ ID NO: 117458 - RNA, 22 nt, Human herpesvirus 1
ggcccgguuggcggcgacgcuu

SEQ ID NO: 117459 - RNA, 22 nt, Human herpesvirus 1
ggcggacguggugccucagcgu

SEQ ID NO: 117460 - RNA, 22 nt, Human herpesvirus 1
gggcccggaacgggaggccaca

SEQ ID NO: 117461 - RNA, 22 nt, Human herpesvirus 1
gggcucgaggucgcucgguggg

SEQ ID NO: 117462 - RNA, 22 nt, Human herpesvirus 1
ggggggugcucugauagucucg

SEQ ID NO: 117463 - RNA, 22 nt, Human herpesvirus 1
ggucgaugcggcccgaggauug

SEQ ID NO: 117464 - RNA, 22 nt, Human herpesvirus 1
gguggucagcacgcggcccccu

SEQ ID NO: 117465 - RNA, 22 nt, Human herpesvirus 1
guauuggucccaauggggucuc

SEQ ID NO: 117466 - RNA, 22 nt, Human herpesvirus 1
gucaagaaucccaucgcccgug

SEQ ID NO: 117467 - RNA, 22 nt, Human herpesvirus 1
gucucguccguccggcaucuuc

SEQ ID NO: 117468 - RNA, 22 nt, Human herpesvirus 1
gugccgggcgcgugcgacggug

SEQ ID NO: 117469 - RNA, 22 nt, Human herpesvirus 1
gugugcacggaugagaucgcgc

SEQ ID NO: 117470 - RNA, 22 nt, Human herpesvirus 1
uacugggcguggugauggacga

SEQ ID NO: 117471 - RNA, 22 nt, Human herpesvirus 1
uagggcgaagugcgagcacugg

SEQ ID NO: 117472 - RNA, 22 nt, Human herpesvirus 1
uccgcggaagacccaggccgcc

SEQ ID NO: 117473 - RNA, 22 nt, Human herpesvirus 1
ucgggggugccgacgcaggcgu

SEQ ID NO: 117474 - RNA, 22 nt, Human herpesvirus 2
aaacugcacgccgccacggcgg

SEQ ID NO: 117475 - RNA, 22 nt, Human herpesvirus 2
aaaguccgggaggggccgcagg

SEQ ID NO: 117476 - RNA, 23 nt, Human herpesvirus 2
aacgcccugggguugccgugagg

SEQ ID NO: 117477 - RNA, 22 nt, Human herpesvirus 2
aaggccgugguguugcggagcg

SEQ ID NO: 117478 - RNA, 22 nt, Human herpesvirus 2
agauggagguucagaucguacg

SEQ ID NO: 117479 - RNA, 22 nt, Human herpesvirus 2
agguggucgagauggcgucgga

SEQ ID NO: 117480 - RNA, 22 nt, Human herpesvirus 2
augacgccccggaugacguggc

SEQ ID NO: 117481 - RNA, 22 nt, Human herpesvirus 2
cacgagcucgcggcaccccggc

SEQ ID NO: 117482 - RNA, 22 nt, Human herpesvirus 2
ccagcgugucggggccgaagcg

SEQ ID NO: 117483 - RNA, 16 nt, Human herpesvirus 2
ccaucuccgugauggc

SEQ ID NO: 117484 - RNA, 18 nt, Human herpesvirus 2
cccgcgaugcuaaugaga

SEQ ID NO: 117485 - RNA, 22 nt, Human herpesvirus 2
cccgcgccgggcgcuaaugaga

SEQ ID NO: 117486 - RNA, 17 nt, Human herpesvirus 2
cgaucccgugaccgacc

SEQ ID NO: 117487 - RNA, 22 nt, Human herpesvirus 2
cgcccuccgcuacacgacccug

SEQ ID NO: 117488 - RNA, 22 nt, Human herpesvirus 2
cgccgccuggcggaccgcaucu

SEQ ID NO: 117489 - RNA, 22 nt, Human herpesvirus 2
cgcgccuccgaaagaugguguu

SEQ ID NO: 117490 - RNA, 22 nt, Human herpesvirus 2
cgcuggugcccauguccccgcg

SEQ ID NO: 117491 - RNA, 23 nt, Human herpesvirus 2
cggcccauaggaucucgcggcuc

SEQ ID NO: 117492 - RNA, 22 nt, Human herpesvirus 2
cggugccacgucagcuggcagg

SEQ ID NO: 117493 - RNA, 22 nt, Human herpesvirus 2
cgugcuggagcgccuggugccg

SEQ ID NO: 117494 - RNA, 22 nt, Human herpesvirus 2
cuccgacgccaucucgaccacc

SEQ ID NO: 117495 - RNA, 22 nt, Human herpesvirus 2
cugcagcagcgcgaggagccgu

SEQ ID NO: 117496 - RNA, 22 nt, Human herpesvirus 2
gaagaccagccugucgccuaug

SEQ ID NO: 117497 - RNA, 22 nt, Human herpesvirus 2
gagcuggcggaggaucccgggu

SEQ ID NO: 117498 - RNA, 22 nt, Human herpesvirus 2
gaggauggaagggcagaagaug

SEQ ID NO: 117499 - RNA, 22 nt, Human herpesvirus 2
gccccggcgcgucguccgucac

SEQ ID NO: 117500 - RNA, 22 nt, Human herpesvirus 2
gcccgguucgaggccucgggcg

SEQ ID NO: 117501 - RNA, 22 nt, Human herpesvirus 2
gccuccagggcgugggcgcgcu

SEQ ID NO: 117502 - RNA, 22 nt, Human herpesvirus 2
gccugcuggccacguacgcaau

SEQ ID NO: 117503 - RNA, 22 nt, Human herpesvirus 2
gcgcagacggcagaugugcgcg

SEQ ID NO: 117504 - RNA, 20 nt, Human herpesvirus 2
gcgcgccaaccgcccaccag

SEQ ID NO: 117505 - RNA, 23 nt, Human herpesvirus 2
gcggcgggggauguguccauggc

SEQ ID NO: 117506 - RNA, 22 nt, Human herpesvirus 2
gcgguccccggcacgaggguga

SEQ ID NO: 117507 - RNA, 18 nt, Human herpesvirus 2
gcggucggggucgcuacu

SEQ ID NO: 117508 - RNA, 22 nt, Human herpesvirus 2
gcuggcagcgguggccguggau

SEQ ID NO: 117509 - RNA, 22 nt, Human herpesvirus 2
gcuguacgcguguuccacgugc

SEQ ID NO: 117510 - RNA, 22 nt, Human herpesvirus 2
ggacgccggcacccccgaagcc

SEQ ID NO: 117511 - RNA, 22 nt, Human herpesvirus 2
ggacgugcgaucggaucccgcg

SEQ ID NO: 117512 - RNA, 22 nt, Human herpesvirus 2
ggcgcccggggacguggcgcug

SEQ ID NO: 117513 - RNA, 22 nt, Human herpesvirus 2
ccgcgaauagcuacggccgcuu

SEQ ID NO: 117514 - RNA, 22 nt, Human herpesvirus 2
ccggaccuguucuucaagcgcc

SEQ ID NO: 117515 - RNA, 23 nt, Human herpesvirus 2
ccgggcgugcguggccgccaggc

SEQ ID NO: 117516 - RNA, 22 nt, Human herpesvirus 2
ccuacgagggcacaagccccgg

SEQ ID NO: 117517 - RNA, 22 nt, Human herpesvirus 2
cgacggugcgcugguuuucggg

SEQ ID NO: 117518 - RNA, 22 nt, Human herpesvirus 2
cgagguuccgcccgaccgcacc

SEQ ID NO: 117519 - RNA, 22 nt, Human herpesvirus 2
cgcaucucgagggccccgggac

SEQ ID NO: 117520 - RNA, 22 nt, Human herpesvirus 2
cgcccgaacggcggggucgaug

SEQ ID NO: 117521 - RNA, 22 nt, Human herpesvirus 2
cgcccggaggacggccguggcg

SEQ ID NO: 117522 - RNA, 22 nt, Human herpesvirus 2
cgcccgugugggcgcccgagcu

SEQ ID NO: 117523 - RNA, 22 nt, Human herpesvirus 2
cgccgcugccgggcgaggaccu

SEQ ID NO: 117524 - RNA, 22 nt, Human herpesvirus 2
cggccaucugcaucgugggccc

SEQ ID NO: 117525 - RNA, 22 nt, Human herpesvirus 2
cgggggcugcagucggcgcuga

SEQ ID NO: 117526 - RNA, 22 nt, Human herpesvirus 2
cugucugauccacagcaccccg

SEQ ID NO: 117527 - RNA, 22 nt, Human herpesvirus 2
gcagaccgucacgcgaauggug

SEQ ID NO: 117528 - RNA, 22 nt, Human herpesvirus 2
gcccagcaacggcuccucgcgc

SEQ ID NO: 117529 - RNA, 22 nt, Human herpesvirus 2
gcccgccacccgcgacgagcug

SEQ ID NO: 117530 - RNA, 22 nt, Human herpesvirus 2
gcccggggcguuccgcucaaca

SEQ ID NO: 117531 - RNA, 22 nt, Human herpesvirus 2
gcggaccuggugcccggacguc

SEQ ID NO: 117532 - RNA, 18 nt, Human herpesvirus 2
gcucaugggcgacgagga

SEQ ID NO: 117533 - RNA, 22 nt, Human herpesvirus 2
gcucgguggccgcgcgguacgu

SEQ ID NO: 117534 - RNA, 22 nt, Human herpesvirus 2
ggaaccaagcggaggcaccccg

SEQ ID NO: 117535 - RNA, 22 nt, Human herpesvirus 2
ggcccggaggaggcgcucguca

SEQ ID NO: 117536 - RNA, 20 nt, Human herpesvirus 2
ggccggacaugguguccgug

SEQ ID NO: 117537 - RNA, 19 nt, Human herpesvirus 2
ggccuccgccucgacccgc

SEQ ID NO: 117538 - RNA, 19 nt, Human herpesvirus 2
ggcggggagccgacgaucc

SEQ ID NO: 117539 - RNA, 22 nt, Human herpesvirus 2
gggcggcgccuuggaaccaucg

SEQ ID NO: 117540 - RNA, 22 nt, Human herpesvirus 2
ggggccaacgugcgguaccgcg

SEQ ID NO: 117541 - RNA, 22 nt, Human herpesvirus 2
gggggaguuugagacggccgag

SEQ ID NO: 117542 - RNA, 22 nt, Human herpesvirus 2
ggguccuccgccgccgcgggcc

SEQ ID NO: 117543 - RNA, 22 nt, Human herpesvirus 2
gguccggcauccagagggcgcu

SEQ ID NO: 117544 - RNA, 22 nt, Human herpesvirus 2
ggucgcgcaugacccaggcuca

SEQ ID NO: 117545 - RNA, 22 nt, Human herpesvirus 2
gucuggcaugacacccagcucu

SEQ ID NO: 117546 - RNA, 18 nt, Human herpesvirus 2
guggaagacggugacggu

SEQ ID NO: 117547 - RNA, 22 nt, Human herpesvirus 2
uaggguagacucgagacggcgg

SEQ ID NO: 117548 - RNA, 22 nt, Human herpesvirus 2
ucacgcccggcggacagccucu

SEQ ID NO: 117549 - RNA, 20 nt, Human herpesvirus 2
ucagggagcuguggugggug

SEQ ID NO: 117550 - RNA, 22 nt, Human herpesvirus 2
ucggcgcggagcaucucgucca

SEQ ID NO: 117551 - RNA, 22 nt, Human herpesvirus 2
ucgucggcggccccgcggaggu

SEQ ID NO: 117552 - RNA, 22 nt, Human herpesvirus 2
ugccgagugaacucucccgccc

SEQ ID NO: 117553 - RNA, 22 nt, Human herpesvirus 2
ugcgcgaggccuuagacgcccu

SEQ ID NO: 117554 - RNA, 22 nt, Human herpesvirus 2
uggccagcugccggggcagcgu

SEQ ID NO: 117555 - RNA, 22 nt, Human herpesvirus 2
uggcggcguagaugcgucucuc

SEQ ID NO: 117556 - RNA, 22 nt, Human herpesvirus 2
ugggaaaucuauugaacucucc

SEQ ID NO: 117557 - RNA, 22 nt, Human herpesvirus 2
ugggagucugcgguugggagcg

SEQ ID NO: 117558 - RNA, 22 nt, Human herpesvirus 2
ugggcgucgacgaggcgucggc

SEQ ID NO: 117559 - RNA, 22 nt, Human herpesvirus 2
uuacaacaacaacgcccauguc

SEQ ID NO: 117560 - RNA, 23 nt, Human herpesvirus 2
uucaccgcgacuccaccuccgag

SEQ ID NO: 117561 - RNA, 22 nt, Human herpesvirus 2
uucaggagcccaaagucguccu

SEQ ID NO: 117562 - RNA, 22 nt, Human herpesvirus 2
uuggguuccgcggacgccgggc

SEQ ID NO: 117563 - RNA, 22 nt, Human herpesvirus 2
accgagcucguguucguggggg

SEQ ID NO: 117564 - RNA, 22 nt, Human herpesvirus 2
acggaggcgaguugcuggacgu

SEQ ID NO: 117565 - RNA, 22 nt, Human herpesvirus 2
agaggcuguccgccgggcguga

SEQ ID NO: 117566 - RNA, 22 nt, Human herpesvirus 2
agcgccccgugugugaccgagg

SEQ ID NO: 117567 - RNA, 20 nt, Human herpesvirus 2
agcgcgugaggccgggcgcc

SEQ ID NO: 117568 - RNA, 20 nt, Human herpesvirus 2
cagcuacaccgggagggcgu

SEQ ID NO: 117569 - RNA, 22 nt, Human herpesvirus 2
cagggcguggaggcagucgcgc

SEQ ID NO: 117570 - RNA, 22 nt, Human herpesvirus 2
cccgccccguacguugugcacg

SEQ ID NO: 117571 - RNA, 22 nt, Human herpesvirus 2
cccgcggcgucgcgacagacca

SEQ ID NO: 117572 - RNA, 22 nt, Human herpesvirus 2
cccugggcucucggggaacccg

SEQ ID NO: 117573 - RNA, 18 nt, Human herpesvirus 2
acaccucgaucaccgucc

SEQ ID NO: 117574 - RNA, 22 nt, Human herpesvirus 2
acgcgggugcuggugucucggg

SEQ ID NO: 117575 - RNA, 22 nt, Human herpesvirus 2
agaccugguuuuuggugccccu

SEQ ID NO: 117576 - RNA, 22 nt, Human herpesvirus 2
agcgcgccuccggagcgagcuc

SEQ ID NO: 117577 - RNA, 19 nt, Human herpesvirus 2
agcugggccuggagcccgg

SEQ ID NO: 117578 - RNA, 22 nt, Human herpesvirus 2
aggcgcaugacguguuucaggc

SEQ ID NO: 117579 - RNA, 22 nt, Human herpesvirus 2
agggucucauuagcaucgcggg

SEQ ID NO: 117580 - RNA, 22 nt, Human herpesvirus 2
agugguuaaaucgaccgugaug

SEQ ID NO: 117581 - RNA, 22 nt, Human herpesvirus 2
aguuccugcugcagggacguca

SEQ ID NO: 117582 - RNA, 22 nt, Human herpesvirus 2
auuagggcaaagugcgagcgcu

SEQ ID NO: 117583 - RNA, 22 nt, Human herpesvirus 2
auuguccacguaggugcugaag

SEQ ID NO: 117584 - RNA, 22 nt, Human herpesvirus 2
caccaacucguucgcgcgcugc

SEQ ID NO: 117585 - RNA, 22 nt, Human herpesvirus 2
cacggacggcgaccugcggcgc

SEQ ID NO: 117586 - RNA, 22 nt, Human herpesvirus 2
cacggccgacguccccagcgug

SEQ ID NO: 117587 - RNA, 22 nt, Human herpesvirus 2
cacgggcguccccggugucucc

SEQ ID NO: 117588 - RNA, 22 nt, Human herpesvirus 2
cagcucgcgcagcagcugcucg

SEQ ID NO: 117589 - RNA, 22 nt, Human herpesvirus 2
caguuuuuccgcggugagcugc

SEQ ID NO: 117590 - RNA, 22 nt, Human herpesvirus 2
caugguggaccgcgggcucggc

SEQ ID NO: 117591 - RNA, 22 nt, Human herpesvirus 2
cccccucguacuuccugaucgc

SEQ ID NO: 117592 - RNA, 22 nt, Human herpesvirus 2
cccggcgcgccggacuucugcg

SEQ ID NO: 117593 - RNA, 22 nt, Human herpesvirus 2
ccgacgccgguggucccggcga

SEQ ID NO: 117594 - RNA, 22 nt, Human herpesvirus 2
ccucggagguggagucgcggug

SEQ ID NO: 117595 - RNA, 22 nt, Human herpesvirus 2
cgcgcacguccuccgggucggg

SEQ ID NO: 117596 - RNA, 22 nt, Human herpesvirus 2
cgcucgcuaugggguucgucug

SEQ ID NO: 117597 - RNA, 22 nt, Human herpesvirus 2
cgcuguucgaggccacgcgcgu

SEQ ID NO: 117598 - RNA, 22 nt, Human herpesvirus 2
cggggccgccgguagcaccccg

SEQ ID NO: 117599 - RNA, 22 nt, Human herpesvirus 2
cggugccgucuggguggcuccc

SEQ ID NO: 117600 - RNA, 22 nt, Human herpesvirus 2
cgugggugugcuagaucgaacg

SEQ ID NO: 117601 - RNA, 22 nt, Human herpesvirus 2
cucggggcuccgccagggcgcc

SEQ ID NO: 117602 - RNA, 22 nt, Human herpesvirus 2
cugcgcggcggagaccgggacg

SEQ ID NO: 117603 - RNA, 18 nt, Human herpesvirus 2
cuggaaggcacaucucga

SEQ ID NO: 117604 - RNA, 22 nt, Human herpesvirus 2
gauguuggcaaucucgagacca

SEQ ID NO: 117605 - RNA, 22 nt, Human herpesvirus 2
gcaccccaccgaaaaacggagc

SEQ ID NO: 117606 - RNA, 22 nt, Human herpesvirus 2
gcagggcguuucguuggucuag

SEQ ID NO: 117607 - RNA, 22 nt, Human herpesvirus 2
gcauggccggcaacgaccgcgu

SEQ ID NO: 117608 - RNA, 22 nt, Human herpesvirus 2
gcccgcccucaccgucggccag

SEQ ID NO: 117609 - RNA, 22 nt, Human herpesvirus 2
gccgucagcgggggagcccugg

SEQ ID NO: 117610 - RNA, 22 nt, Human herpesvirus 2
gccugcgugggugccaucgcuc

SEQ ID NO: 117611 - RNA, 22 nt, Human herpesvirus 2
gccuucccgguguuggucgacg

SEQ ID NO: 117612 - RNA, 22 nt, Human herpesvirus 2
gcgcucucgaccgcgguucccg

SEQ ID NO: 117613 - RNA, 22 nt, Human herpesvirus 2
gcggccgcgacaugucccacag

SEQ ID NO: 117614 - RNA, 20 nt, Human herpesvirus 2
gcggcuccccuagcugcagc

SEQ ID NO: 117615 - RNA, 22 nt, Human herpesvirus 2
ggacgggugaguucgcuaggca

SEQ ID NO: 117616 - RNA, 22 nt, Human herpesvirus 2
ggaggcccaagaugccggcggu

SEQ ID NO: 117617 - RNA, 22 nt, Human herpesvirus 2
ggcuccaggccgccacgcuggg

SEQ ID NO: 117618 - RNA, 22 nt, Human herpesvirus 2
gggcguggccgcccuucuaaaa

SEQ ID NO: 117619 - RNA, 17 nt, Human herpesvirus 2
ggggaucaagauaggcu

SEQ ID NO: 117620 - RNA, 22 nt, Human herpesvirus 2
ggggcgcgucccuucagccacu

SEQ ID NO: 117621 - RNA, 22 nt, Human herpesvirus 2
ggggggcaagugcaguaaccca

SEQ ID NO: 117622 - RNA, 22 nt, Human herpesvirus 2
ggucacccuggaguugcuccug

SEQ ID NO: 117623 - RNA, 22 nt, Human herpesvirus 2
ggucgcgccugcccggcccaga

SEQ ID NO: 117624 - RNA, 22 nt, Human herpesvirus 2
guccacggccgugccggcccgc

SEQ ID NO: 117625 - RNA, 22 nt, Human herpesvirus 2
guccaggauaaaccggguggug

SEQ ID NO: 117626 - RNA, 22 nt, Human herpesvirus 2
guccucgcccggcagcggcgag

SEQ ID NO: 117627 - RNA, 22 nt, Human herpesvirus 2
gucugggggccuuucucugugu

SEQ ID NO: 117628 - RNA, 22 nt, Human herpesvirus 2
gugcggcggcgaccgggacgcc

SEQ ID NO: 117629 - RNA, 22 nt, Human herpesvirus 2
ucaaagggggcguggccgcccu

SEQ ID NO: 117630 - RNA, 22 nt, Human herpesvirus 2
uccgaaggucugcgcgaggccg

SEQ ID NO: 117631 - RNA, 22 nt, Human herpesvirus 2
ucguacccgggcaccacguggc

SEQ ID NO: 117632 - RNA, 22 nt, Human herpesvirus 2
ucugagccugggucaugcgcga

SEQ ID NO: 117633 - RNA, 21 nt, Human herpesvirus 2
uggcgaccgucaaguccccga

SEQ ID NO: 117634 - RNA, 20 nt, Human herpesvirus 2
aacgcccugggguugccgug

SEQ ID NO: 117635 - RNA, 17 nt, Human herpesvirus 2
acgcggugucggcggug

SEQ ID NO: 117636 - RNA, 22 nt, Human herpesvirus 2
agaguggcuccuggagcgcucg

SEQ ID NO: 117637 - RNA, 22 nt, Human herpesvirus 2
agcgcucgcacuuugcccuaau

SEQ ID NO: 117638 - RNA, 22 nt, Human herpesvirus 2
aggcgacaggcuggucuuccug

SEQ ID NO: 117639 - RNA, 22 nt, Human herpesvirus 2
aggugcggcuggacgccaacga

SEQ ID NO: 117640 - RNA, 22 nt, Human herpesvirus 2
aucgucggcuccccgccgcgcu

SEQ ID NO: 117641 - RNA, 22 nt, Human herpesvirus 2
caccgguccuucgcgggggccg

SEQ ID NO: 117642 - RNA, 22 nt, Human herpesvirus 2
caccucggucuccuccuccgag

SEQ ID NO: 117643 - RNA, 22 nt, Human herpesvirus 2
cacgaagccccggcggguuugu

SEQ ID NO: 117644 - RNA, 22 nt, Human herpesvirus 2
caucuucugcccuuccauccuc

SEQ ID NO: 117645 - RNA, 22 nt, Human herpesvirus 2
ccagggcgccaugcgcccgcac

SEQ ID NO: 117646 - RNA, 22 nt, Human herpesvirus 2
cccgggauccuccgccagcucg

SEQ ID NO: 117647 - RNA, 22 nt, Human herpesvirus 2
ccgaccgcgggcugacgcggcu

SEQ ID NO: 117648 - RNA, 22 nt, Human herpesvirus 2
cgaagagcucccguaggauaag

SEQ ID NO: 117649 - RNA, 22 nt, Human herpesvirus 2
cgaccgucaagagccugggccc

SEQ ID NO: 117650 - RNA, 22 nt, Human herpesvirus 2
cgacgcacccggagccgcuucu

SEQ ID NO: 117651 - RNA, 22 nt, Human herpesvirus 2
cgcgccggguccguuguaucuu

SEQ ID NO: 117652 - RNA, 22 nt, Human herpesvirus 2
cgcgucguggacaucauggcgc

SEQ ID NO: 117653 - RNA, 22 nt, Human herpesvirus 2
cguggucucgggagcagggcgc

SEQ ID NO: 117654 - RNA, 22 nt, Human herpesvirus 2
cucgccgucgagguggcggauc

SEQ ID NO: 117655 - RNA, 22 nt, Human herpesvirus 2
cugcccgcgaagaaacucucgc

SEQ ID NO: 117656 - RNA, 22 nt, Human herpesvirus 2
cugcugcagcuaggggagccgc

SEQ ID NO: 117657 - RNA, 22 nt, Human herpesvirus 2
cuggagagacgcaucuacgccg

SEQ ID NO: 117658 - RNA, 22 nt, Human herpesvirus 2
gaaagggguccguaaccaaagg

SEQ ID NO: 117659 - RNA, 22 nt, Human herpesvirus 2
gaagcugcugcggucgcgcccc

SEQ ID NO: 117660 - RNA, 17 nt, Human herpesvirus 2
gacgccgccauggccgc

SEQ ID NO: 117661 - RNA, 22 nt, Human herpesvirus 2
gagaggccguggagcuugccag

SEQ ID NO: 117662 - RNA, 22 nt, Human herpesvirus 2
gauggucgugcugggccucagc

SEQ ID NO: 117663 - RNA, 23 nt, Human herpesvirus 2
gccacgugcgugccgggcacgag

SEQ ID NO: 117664 - RNA, 22 nt, Human herpesvirus 2
gcccguuaaaagcugcuaauua

SEQ ID NO: 117665 - RNA, 22 nt, Human herpesvirus 2
gcgcgccaaugggcucgggaaa

SEQ ID NO: 117666 - RNA, 17 nt, Human herpesvirus 2
gcggaugcggguagcug

SEQ ID NO: 117667 - RNA, 22 nt, Human herpesvirus 2
gcgggcgagggcgucuaaggcc

SEQ ID NO: 117668 - RNA, 22 nt, Human herpesvirus 2
gcggggcuuggagcgaccgagg

SEQ ID NO: 117669 - RNA, 22 nt, Human herpesvirus 2
gcggguccgggggucguucacu

SEQ ID NO: 117670 - RNA, 22 nt, Human herpesvirus 2
ggccgucgaacagaucgggccg

SEQ ID NO: 117671 - RNA, 22 nt, Human herpesvirus 2
ggggcgcugccgaagguucgug

SEQ ID NO: 117672 - RNA, 22 nt, Human herpesvirus 2
guccccgcccaggcuguggagg

SEQ ID NO: 117673 - RNA, 22 nt, Human herpesvirus 2
guccuuguuuucggucugguac

SEQ ID NO: 117674 - RNA, 22 nt, Human herpesvirus 2
gucgaggcuucgggggugccgg

SEQ ID NO: 117675 - RNA, 22 nt, Human herpesvirus 2
gucggcgcggggguggccaaac

SEQ ID NO: 117676 - RNA, 22 nt, Human herpesvirus 2
gugggccgugaugcgcgggcgg

SEQ ID NO: 117677 - RNA, 20 nt, Human herpesvirus 2
uacggccauggaccugguuc

SEQ ID NO: 117678 - RNA, 22 nt, Human herpesvirus 2
ucacgcgggugcuggugucucg

SEQ ID NO: 117679 - RNA, 22 nt, Human herpesvirus 2
ucgaccccgccguucgggcggu

SEQ ID NO: 117680 - RNA, 22 nt, Human herpesvirus 2
ucgaugguggacgaggccguuc

SEQ ID NO: 117681 - RNA, 22 nt, Human herpesvirus 2
ucgggaaggccucgucggaccc

SEQ ID NO: 117682 - RNA, 22 nt, Human herpesvirus 2
ucugaauuucccgcagaaccuc

SEQ ID NO: 117683 - RNA, 22 nt, Human herpesvirus 2
ugugugcaccgcgaagaaucca

SEQ ID NO: 117684 - RNA, 23 nt, Human herpesvirus 2
uugcuggcggcggccguguacgc

SEQ ID NO: 117685 - RNA, 22 nt, Human herpesvirus 2
gggccagcacguggccgugcug

SEQ ID NO: 117686 - RNA, 22 nt, Human herpesvirus 2
gggcgcaugugucugccgagcg

SEQ ID NO: 117687 - RNA, 22 nt, Human herpesvirus 2
gggucgacucggucucgcagcg

SEQ ID NO: 117688 - RNA, 22 nt, Human herpesvirus 2
gucccggucgccgccgcaccag

SEQ ID NO: 117689 - RNA, 22 nt, Human herpesvirus 2
guggcgucggugguucuggucg

SEQ ID NO: 117690 - RNA, 22 nt, Human herpesvirus 2
ucaccaccauucgcgugacggu

SEQ ID NO: 117691 - RNA, 20 nt, Human herpesvirus 2
ucaccggcacgucggccucg

SEQ ID NO: 117692 - RNA, 22 nt, Human herpesvirus 2
ucucgucgccgauuaccgcggc

SEQ ID NO: 117693 - RNA, 22 nt, Human herpesvirus 2
ugcccgacccggaggacgugcg

SEQ ID NO: 117694 - RNA, 22 nt, Human herpesvirus 2
ugcgggccggcacggccgugga

SEQ ID NO: 117695 - RNA, 22 nt, Human herpesvirus 2
uggccccgaacacaaccggcuc

SEQ ID NO: 117696 - RNA, 22 nt, Human herpesvirus 2
ugggccgggcaggcgcgaccga

SEQ ID NO: 117697 - RNA, 22 nt, Human herpesvirus 2
uucaccgcgacuccaccuccga

SEQ ID NO: 117698 - RNA, 22 nt, Human herpesvirus 2
uugacgagcuucgcgguacuac

SEQ ID NO: 117699 - RNA, 22 nt, Human herpesvirus 2
uuugggucgggcucagggccag

SEQ ID NO: 117700 - RNA, 21 nt, Human herpesvirus 3
aaaagcagaugaugugccgau

SEQ ID NO: 117701 - RNA, 22 nt, Human herpesvirus 3
aaacguuaccgcaaaucaaucu

SEQ ID NO: 117702 - RNA, 22 nt, Human herpesvirus 3
acgaaacguguuuuuagcuaag

SEQ ID NO: 117703 - RNA, 22 nt, Human herpesvirus 3
aucgggguucuggaucgcggca

SEQ ID NO: 117704 - RNA, 22 nt, Human herpesvirus 3
cagcagaugaugcuggaguccg

SEQ ID NO: 117705 - RNA, 22 nt, Human herpesvirus 3
cauauacuguguuuuuauccau

SEQ ID NO: 117706 - RNA, 22 nt, Human herpesvirus 3
ccgguacuccgggucgagggug

SEQ ID NO: 117707 - RNA, 22 nt, Human herpesvirus 3
cgccugugaaauaacggucgcg

SEQ ID NO: 117708 - RNA, 22 nt, Human herpesvirus 3
gaaccgggcgcgguaguaacag

SEQ ID NO: 117709 - RNA, 22 nt, Human herpesvirus 3
gccguguuacugguaauggcgg

SEQ ID NO: 117710 - RNA, 22 nt, Human herpesvirus 3
guguuguuguuuccaaacggaa

SEQ ID NO: 117711 - RNA, 19 nt, Human herpesvirus 3
guguuuacgugcgauggua

SEQ ID NO: 117712 - RNA, 22 nt, Human herpesvirus 3
uauugcagacauuuguuucgau

SEQ ID NO: 117713 - RNA, 22 nt, Human herpesvirus 3
ucaggcgggcguaggcuagcga

SEQ ID NO: 117714 - RNA, 22 nt, Human herpesvirus 3
uccgaaccguuccaugcgucuu

SEQ ID NO: 117715 - RNA, 22 nt, Human herpesvirus 3
ucguggggggcgguaugaucaa

SEQ ID NO: 117716 - RNA, 22 nt, Human herpesvirus 3
ugcuucuugaaaaaggccacac

SEQ ID NO: 117717 - RNA, 19 nt, Human herpesvirus 3
ugggaauaauugugcaaac

SEQ ID NO: 117718 - RNA, 22 nt, Human herpesvirus 3
uucuaggauucgaacgacgaca

SEQ ID NO: 117719 - RNA, 15 nt, Human herpesvirus 3
agagcccacacaauc

SEQ ID NO: 117720 - RNA, 22 nt, Human herpesvirus 3
ccaaguccccguucauauugca

SEQ ID NO: 117721 - RNA, 21 nt, Human herpesvirus 3
agacgcauggaacgguucgga

SEQ ID NO: 117722 - RNA, 20 nt, Human herpesvirus 3
aguugcauguuaacgucgac

SEQ ID NO: 117723 - RNA, 22 nt, Human herpesvirus 3
cguguauaucuguccauggagu

SEQ ID NO: 117724 - RNA, 18 nt, Human herpesvirus 3
cuuauauuuuuggaagau

SEQ ID NO: 117725 - RNA, 22 nt, Human herpesvirus 3
gaguguuuuuucuagcucuugg

SEQ ID NO: 117726 - RNA, 22 nt, Human herpesvirus 3
gccaagauuugcgguaaugcga

SEQ ID NO: 117727 - RNA, 22 nt, Human herpesvirus 3
ggagccacacaauauucgcgaa

SEQ ID NO: 117728 - RNA, 22 nt, Human herpesvirus 3
uacgauucagacguuuuuucuc

SEQ ID NO: 117729 - RNA, 22 nt, Human herpesvirus 3
uccccggacgguccaaaccgca

SEQ ID NO: 117730 - RNA, 22 nt, Human herpesvirus 3
uguauguuggagauagagcgua

SEQ ID NO: 117731 - RNA, 22 nt, Human herpesvirus 3
uuagaccguuuguuaaccggag

SEQ ID NO: 117732 - RNA, 22 nt, Human herpesvirus 3
uugaagacagggauacggaggg

SEQ ID NO: 117733 - RNA, 22 nt, Human herpesvirus 3
uuugcuuggguuucuauguccg

SEQ ID NO: 117734 - RNA, 22 nt, Human herpesvirus 3
aagcguuuaauuguuaugccgu

SEQ ID NO: 117735 - RNA, 22 nt, Human herpesvirus 3
acucccauuggcaugauaaacg

SEQ ID NO: 117736 - RNA, 22 nt, Human herpesvirus 3
acucuuguagugugagcaaugc

SEQ ID NO: 117737 - RNA, 22 nt, Human herpesvirus 3
agaauacguuuaaugucgucuu

SEQ ID NO: 117738 - RNA, 22 nt, Human herpesvirus 3
cggcuauuggguaucacuguca

SEQ ID NO: 117739 - RNA, 22 nt, Human herpesvirus 3
cuaauuuaauagggcuaugucc

SEQ ID NO: 117740 - RNA, 22 nt, Human herpesvirus 3
cugaccacgagucuccgauucu

SEQ ID NO: 117741 - RNA, 22 nt, Human herpesvirus 3
gcaucauguuuccuugggcggg

SEQ ID NO: 117742 - RNA, 22 nt, Human herpesvirus 3
gcauguugcucgaagagcacau

SEQ ID NO: 117743 - RNA, 22 nt, Human herpesvirus 3
ggauacuuggcucuguauuaaa

SEQ ID NO: 117744 - RNA, 22 nt, Human herpesvirus 3
ucggcgcgcugcugaugugguu

SEQ ID NO: 117745 - RNA, 22 nt, Human herpesvirus 3
ucguaauucgaaugcagguggu

SEQ ID NO: 117746 - RNA, 22 nt, Human herpesvirus 3
uggaacaauuccaucagagucu

SEQ ID NO: 117747 - RNA, 22 nt, Human herpesvirus 3
ugggaggggugccgauccgggc

SEQ ID NO: 117748 - RNA, 22 nt, Human herpesvirus 3
uggguuaacgcucuuaacacgg

SEQ ID NO: 117749 - RNA, 22 nt, Human herpesvirus 3
ugucucuggcgccccgguuccc

SEQ ID NO: 117750 - RNA, 18 nt, Human herpesvirus 3
uuggacuuccguucucgg

SEQ ID NO: 117751 - RNA, 22 nt, Human herpesvirus 3
uuuggagacggcgguaaaggcu

SEQ ID NO: 117752 - RNA, 22 nt, Human herpesvirus 3
ccgaggcugguuagagagcgcu

SEQ ID NO: 117753 - RNA, 22 nt, Human herpesvirus 3
cgcguauguaaaucggugaaga

SEQ ID NO: 117754 - RNA, 22 nt, Human herpesvirus 3
cuguuuucccuuggcucuugug

SEQ ID NO: 117755 - RNA, 22 nt, Human herpesvirus 3
gauuuucuuccacugacaccuc

SEQ ID NO: 117756 - RNA, 22 nt, Human herpesvirus 3
gcugggcuaaauguggcgaggu

SEQ ID NO: 117757 - RNA, 22 nt, Human herpesvirus 3
ggauccacgcgggugcacgucu

SEQ ID NO: 117758 - RNA, 22 nt, Human herpesvirus 3
gggguuuuggauuaagaucucc

SEQ ID NO: 117759 - RNA, 22 nt, Human herpesvirus 3
gguugugucggucucuccaagc

SEQ ID NO: 117760 - RNA, 22 nt, Human herpesvirus 3
guccagccguguuacugguaau

SEQ ID NO: 117761 - RNA, 22 nt, Human herpesvirus 3
gucugacgugguaagugcggcu

SEQ ID NO: 117762 - RNA, 22 nt, Human herpesvirus 3
uacaccuucucguuggcgucgc

SEQ ID NO: 117763 - RNA, 22 nt, Human herpesvirus 3
uguauugauaccacggcggcua

SEQ ID NO: 117764 - RNA, 22 nt, Human herpesvirus 3
uuuaucaugccaaugggagugu

SEQ ID NO: 117765 - RNA, 22 nt, Human herpesvirus 4 [Epstein-Barr virus]
agcaccaucagcccggggggac

SEQ ID NO: 117766 - RNA, 17 nt, Human herpesvirus 4 [Epstein-Barr virus]
agcccugcucacgaaug

SEQ ID NO: 117767 - RNA, 22 nt, Human herpesvirus 4 [Epstein-Barr virus]
aggcucucccaacacaauagaa

SEQ ID NO: 117768 - RNA, 22 nt, Human herpesvirus 4 [Epstein-Barr virus]
aguucauccugggcuuuguggc

SEQ ID NO: 117769 - RNA, 22 nt, Human herpesvirus 4 [Epstein-Barr virus]
cagcagcaggcgcagcgacugg

SEQ ID NO: 117770 - RNA, 22 nt, Human herpesvirus 4 [Epstein-Barr virus]
ccagcuccugaacacggccccu

SEQ ID NO: 117771 - RNA, 22 nt, Human herpesvirus 4 [Epstein-Barr virus]
cggccacacggccggagcuccg

SEQ ID NO: 117772 - RNA, 22 nt, Human herpesvirus 4 [Epstein-Barr virus]
gaccacguccccccagacgcgc

SEQ ID NO: 117773 - RNA, 23 nt, Human herpesvirus 4 [Epstein-Barr virus]
gccugcacguccugccacgcccu

SEQ ID NO: 117774 - RNA, 22 nt, Human herpesvirus 4 [Epstein-Barr virus]
uaggcauagagagugaugagcc

SEQ ID NO: 117775 - RNA, 22 nt, Human herpesvirus 4 [Epstein-Barr virus]
ucugggguccaggagucugcug

SEQ ID NO: 117776 - RNA, 22 nt, Human herpesvirus 4 [Epstein-Barr virus]
uggcaaagugcugagagcaagg

SEQ ID NO: 117777 - RNA, 22 nt, Human herpesvirus 4 [Epstein-Barr virus]
aacuguguggcucucugcacca

SEQ ID NO: 117778 - RNA, 22 nt, Human herpesvirus 4 [Epstein-Barr virus]
agcucgaguacgacugugaggu

SEQ ID NO: 117779 - RNA, 22 nt, Human herpesvirus 4 [Epstein-Barr virus]
cagauagugaacguggagguug

SEQ ID NO: 117780 - RNA, 22 nt, Human herpesvirus 4 [Epstein-Barr virus]
cagcguccugaggcugcugcuu

SEQ ID NO: 117781 - RNA, 22 nt, Human herpesvirus 4 [Epstein-Barr virus]
cuguacauccagcugcuguaug

SEQ ID NO: 117782 - RNA, 22 nt, Human herpesvirus 4 [Epstein-Barr virus]
gaggcccacgguggcggcagac

SEQ ID NO: 117783 - RNA, 22 nt, Human herpesvirus 4 [Epstein-Barr virus]
gaggucucugaugagcuggaag

SEQ ID NO: 117784 - RNA, 22 nt, Human herpesvirus 4 [Epstein-Barr virus]
gcuccacgcaaagucagauugc

SEQ ID NO: 117785 - RNA, 22 nt, Human herpesvirus 4 [Epstein-Barr virus]
uaugaggacauuuucccaaucu

SEQ ID NO: 117786 - RNA, 22 nt, Human herpesvirus 4 [Epstein-Barr virus]
ugcgccugcugcugggaaccug

SEQ ID NO: 117787 - RNA, 22 nt, Human herpesvirus 4 [Epstein-Barr virus]
uggagggcaucuuccgggagua

SEQ ID NO: 117788 - RNA, 17 nt, Human herpesvirus 4 [Epstein-Barr virus]
uuauggcuagauuuccu

SEQ ID NO: 117789 - RNA, 22 nt, Human herpesvirus 4 [Epstein-Barr virus]
uuguggaccucucagaguuuca

SEQ ID NO: 117790 - RNA, 23 nt, Human herpesvirus 4 [Epstein-Barr virus]
aucagcaaauccaguuguauuca

SEQ ID NO: 117791 - RNA, 22 nt, Human herpesvirus 4 [Epstein-Barr virus]
caggaggccccgcggcaggagg

SEQ ID NO: 117792 - RNA, 18 nt, Human herpesvirus 4 [Epstein-Barr virus]
ccagcguguuucuuaucc

SEQ ID NO: 117793 - RNA, 22 nt, Human herpesvirus 4 [Epstein-Barr virus]
ccauguguguccagugccuaau

SEQ ID NO: 117794 - RNA, 22 nt, Human herpesvirus 4 [Epstein-Barr virus]
ccgggccguggaaugagggccu

SEQ ID NO: 117795 - RNA, 22 nt, Human herpesvirus 4 [Epstein-Barr virus]
cucacgccgcacgguccggcac

SEQ ID NO: 117796 - RNA, 22 nt, Human herpesvirus 4 [Epstein-Barr virus]
gagcuccaaagccaggcucgag

SEQ ID NO: 117797 - RNA, 22 nt, Human herpesvirus 4 [Epstein-Barr virus]
gagggggaucgcccgggucucu

SEQ ID NO: 117798 - RNA, 23 nt, Human herpesvirus 4 [Epstein-Barr virus]
gccacuagcacaggugagaagcg

SEQ ID NO: 117799 - RNA, 17 nt, Human herpesvirus 4 [Epstein-Barr virus]
ggccacaggggaggugg

SEQ ID NO: 117800 - RNA, 22 nt, Human herpesvirus 4 [Epstein-Barr virus]
gucaggagacacggcucuguca

SEQ ID NO: 117801 - RNA, 22 nt, Human herpesvirus 4 [Epstein-Barr virus]
uauuugcggcugggcuaaugau

SEQ ID NO: 117802 - RNA, 22 nt, Human herpesvirus 4 [Epstein-Barr virus]
uggagcuccuuggugcaggaga

SEQ ID NO: 117803 - RNA, 22 nt, Human herpesvirus 4 [Epstein-Barr virus]
gccacguggccacgugacacac

SEQ ID NO: 117804 - RNA, 22 nt, Human herpesvirus 4 [Epstein-Barr virus]
ucauggucuuuuuacaaacuca

SEQ ID NO: 117805 - RNA, 22 nt, Human herpesvirus 4 [Epstein-Barr virus]
ucggugggaggcauaggcccca

SEQ ID NO: 117806 - RNA, 22 nt, Human herpesvirus 4 [Epstein-Barr virus]
uggagcguucucagggaucgcu

SEQ ID NO: 117807 - RNA, 17 nt, Human herpesvirus 4 [Epstein-Barr virus]
uggcagacgcccuccug

SEQ ID NO: 117808 - RNA, 22 nt, Human herpesvirus 4 [Epstein-Barr virus]
uggugcagagagccacacaguu

SEQ ID NO: 117809 - RNA, 22 nt, Human herpesvirus 4 [Epstein-Barr virus]
auccaggccuucgcuggcuucu

SEQ ID NO: 117810 - RNA, 22 nt, Human herpesvirus 4 [Epstein-Barr virus]
cggggcaguauuuucgaccgag

SEQ ID NO: 117811 - RNA, 22 nt, Human herpesvirus 4 [Epstein-Barr virus]
gaugcguguagcccagaagcgu

SEQ ID NO: 117812 - RNA, 22 nt, Human herpesvirus 5
cucggcgcgucacaugagcgau

SEQ ID NO: 117813 - RNA, 22 nt, Human herpesvirus 5
cugagagucgccuguacgacgc

SEQ ID NO: 117814 - RNA, 22 nt, Human herpesvirus 5
cugcaggaaccaguugugcgga

SEQ ID NO: 117815 - RNA, 22 nt, Human herpesvirus 5
cugccuacgcgaucggcggccg

SEQ ID NO: 117816 - RNA, 22 nt, Human herpesvirus 5
cugcgcacgcucucggucacgg

SEQ ID NO: 117817 - RNA, 22 nt, Human herpesvirus 5
cugcgccuccagccgcuccgag

SEQ ID NO: 117818 - RNA, 22 nt, Human herpesvirus 5
cuggaaauggacuuuugcucuc

SEQ ID NO: 117819 - RNA, 22 nt, Human herpesvirus 5
cuucuugaccguuaucacggug

SEQ ID NO: 117820 - RNA, 22 nt, Human herpesvirus 5
gacaacgugguccaguacgucc

SEQ ID NO: 117821 - RNA, 22 nt, Human herpesvirus 5
gacagcaacaggcgcuccgggc

SEQ ID NO: 117822 - RNA, 22 nt, Human herpesvirus 5
gacguccgcccgacgguggugg

SEQ ID NO: 117823 - RNA, 22 nt, Human herpesvirus 5
gacuaggucgucuuggaagccg

SEQ ID NO: 117824 - RNA, 22 nt, Human herpesvirus 5
gagacgcacgacaguauacgug

SEQ ID NO: 117825 - RNA, 20 nt, Human herpesvirus 5
gauuugaugcgcuagcguca

SEQ ID NO: 117826 - RNA, 22 nt, Human herpesvirus 5
gcaagugcuucagcagcagcuu

SEQ ID NO: 117827 - RNA, 22 nt, Human herpesvirus 5
gcagcgagccgcguaacgucug

SEQ ID NO: 117828 - RNA, 22 nt, Human herpesvirus 5
gccgaggacgccgugggcggcg

SEQ ID NO: 117829 - RNA, 23 nt, Human herpesvirus 5
gccggcaaaauguagguggcguu

SEQ ID NO: 117830 - RNA, 22 nt, Human herpesvirus 5
gcgacggucuuuuuugccuggg

SEQ ID NO: 117831 - RNA, 22 nt, Human herpesvirus 5
gcgaggacacgcagacggcgga

SEQ ID NO: 117832 - RNA, 22 nt, Human herpesvirus 5
gcggaucggacaucauacugac

SEQ ID NO: 117833 - RNA, 23 nt, Human herpesvirus 5
gcgggcacugggucugcacgacg

SEQ ID NO: 117834 - RNA, 22 nt, Human herpesvirus 5
gcggggucguggcggcuguguc

SEQ ID NO: 117835 - RNA, 22 nt, Human herpesvirus 5
gcgugcugauuguaguuuuugc

SEQ ID NO: 117836 - RNA, 22 nt, Human herpesvirus 5
gcugugccugucauccacuugg

SEQ ID NO: 117837 - RNA, 22 nt, Human herpesvirus 5
gcuuggucuucacguccagcag

SEQ ID NO: 117838 - RNA, 22 nt, Human herpesvirus 5
ggcacggucucgcacgccaccu

SEQ ID NO: 117839 - RNA, 22 nt, Human herpesvirus 5
ggccgccuagcgcuuccagcug

SEQ ID NO: 117840 - RNA, 23 nt, Human herpesvirus 5
ggcgauucgccgccgccgauacc

SEQ ID NO: 117841 - RNA, 19 nt, Human herpesvirus 5
ggcugucggguacgugacg

SEQ ID NO: 117842 - RNA, 22 nt, Human herpesvirus 5
gguacuugacgcgggugcgcgu

SEQ ID NO: 117843 - RNA, 22 nt, Human herpesvirus 5
gguccgcgucgcguagcgcuuc

SEQ ID NO: 117844 - RNA, 22 nt, Human herpesvirus 5
aaacgacguagacgaugaaccg

SEQ ID NO: 117845 - RNA, 20 nt, Human herpesvirus 5
acgcaccgagagacugaggc

SEQ ID NO: 117846 - RNA, 22 nt, Human herpesvirus 5
acggcgugauugagcaccugcg

SEQ ID NO: 117847 - RNA, 22 nt, Human herpesvirus 5
acggguaucugcagcuggaccu

SEQ ID NO: 117848 - RNA, 22 nt, Human herpesvirus 5
acggugucgccaccguugacgu

SEQ ID NO: 117849 - RNA, 22 nt, Human herpesvirus 5
acuguugcagcgcuugggucag

SEQ ID NO: 117850 - RNA, 22 nt, Human herpesvirus 5
acuuccccgucguacuggcggc

SEQ ID NO: 117851 - RNA, 22 nt, Human herpesvirus 5
agacggguacggcgcgccgcau

SEQ ID NO: 117852 - RNA, 22 nt, Human herpesvirus 5
agaggucacucgcggcgugccg

SEQ ID NO: 117853 - RNA, 22 nt, Human herpesvirus 5
agcaccgagagcugcuguugcg

SEQ ID NO: 117854 - RNA, 22 nt, Human herpesvirus 5
agcgcgaggcgucggagcucgg

SEQ ID NO: 117855 - RNA, 22 nt, Human herpesvirus 5
agcggcgugaugauacggagcg

SEQ ID NO: 117856 - RNA, 22 nt, Human herpesvirus 5
agguggagauucuaaagccacg

SEQ ID NO: 117857 - RNA, 22 nt, Human herpesvirus 5
agguggugugcgaucccuucca

SEQ ID NO: 117858 - RNA, 20 nt, Human herpesvirus 5
agugcgccgagcggccguug

SEQ ID NO: 117859 - RNA, 22 nt, Human herpesvirus 5
auagauucaacgugaugagacc

SEQ ID NO: 117860 - RNA, 22 nt, Human herpesvirus 5
aucggcuuccaagacgaccuag

SEQ ID NO: 117861 - RNA, 21 nt, Human herpesvirus 5
aucuccucucgcucggcggcg

SEQ ID NO: 117862 - RNA, 22 nt, Human herpesvirus 5
aucugcuguagauaucauaacg

SEQ ID NO: 117863 - RNA, 22 nt, Human herpesvirus 5
aucuugagcggcagcgcguaca

SEQ ID NO: 117864 - RNA, 22 nt, Human herpesvirus 5
augucacaggcgcccgaggcgu

SEQ ID NO: 117865 - RNA, 21 nt, Human herpesvirus 5
augucgcugaaauugcggauc

SEQ ID NO: 117866 - RNA, 22 nt, Human herpesvirus 5
caaagagaccccgcugugccgc

SEQ ID NO: 117867 - RNA, 22 nt, Human herpesvirus 5
caaguaagaaacaggaugaggc

SEQ ID NO: 117868 - RNA, 22 nt, Human herpesvirus 5
cacccguuucugccgcucgcga

SEQ ID NO: 117869 - RNA, 22 nt, Human herpesvirus 5
cacggccagcgccuugucgcgg

SEQ ID NO: 117870 - RNA, 22 nt, Human herpesvirus 5
cagcgggucgcucuugauaaac

SEQ ID NO: 117871 - RNA, 22 nt, Human herpesvirus 5
cagggcgcuuuggcaaaaggcg

SEQ ID NO: 117872 - RNA, 22 nt, Human herpesvirus 5
caguugacugagauugagaucc

SEQ ID NO: 117873 - RNA, 22 nt, Human herpesvirus 5
cauacguuuuugggaaaguugg

SEQ ID NO: 117874 - RNA, 22 nt, Human herpesvirus 5
ccaacgcaacagaccuaggcac

SEQ ID NO: 117875 - RNA, 22 nt, Human herpesvirus 5
ccgacugugggaagcuguccac

SEQ ID NO: 117876 - RNA, 22 nt, Human herpesvirus 5
ccgguauucggaaacagcgucc

SEQ ID NO: 117877 - RNA, 17 nt, Human herpesvirus 5
ccgugaagacgaccugu

SEQ ID NO: 117878 - RNA, 22 nt, Human herpesvirus 5
cgagcugucggaauccucgucg

SEQ ID NO: 117879 - RNA, 22 nt, Human herpesvirus 5
cgaggccugauccguggagaac

SEQ ID NO: 117880 - RNA, 22 nt, Human herpesvirus 5
cgaggcggugcccgcgacucgc

SEQ ID NO: 117881 - RNA, 21 nt, Human herpesvirus 5
cgccugucuccugggcgagca

SEQ ID NO: 117882 - RNA, 22 nt, Human herpesvirus 5
cgcgcaggggcuccgacguggc

SEQ ID NO: 117883 - RNA, 22 nt, Human herpesvirus 5
cggcgaccgcggacucgccucg

SEQ ID NO: 117884 - RNA, 22 nt, Human herpesvirus 5
cggcggcgcccgagcgggacau

SEQ ID NO: 117885 - RNA, 22 nt, Human herpesvirus 5
cggugggggcgugccccgcaga

SEQ ID NO: 117886 - RNA, 17 nt, Human herpesvirus 5
cgguuucucauacgcgc

SEQ ID NO: 117887 - RNA, 22 nt, Human herpesvirus 5
cgugaugcgcaccuucggcggu

SEQ ID NO: 117888 - RNA, 22 nt, Human herpesvirus 5
cgugcacgccgucgccgaggau

SEQ ID NO: 117889 - RNA, 23 nt, Human herpesvirus 5
cucaguugucaaguccgagugcc

SEQ ID NO: 117890 - RNA, 22 nt, Human herpesvirus 5
cucgagaccgaagacgccguca

SEQ ID NO: 117891 - RNA, 22 nt, Human herpesvirus 5
uucaccgucgcugugcaacgcg

SEQ ID NO: 117892 - RNA, 22 nt, Human herpesvirus 5
uucgccguugcuguuccuccgc

SEQ ID NO: 117893 - RNA, 23 nt, Human herpesvirus 5
uucguagagaacgauggaggacg

SEQ ID NO: 117894 - RNA, 22 nt, Human herpesvirus 5
uucuggucguuuugcugcucau

SEQ ID NO: 117895 - RNA, 22 nt, Human herpesvirus 5
uuucugauacuggaucgucugu

SEQ ID NO: 117896 - RNA, 17 nt, Human herpesvirus 5
uuuggcuacgguggugu

SEQ ID NO: 117897 - RNA, 22 nt, Human herpesvirus 5
caaguauguggaacagcucgug

SEQ ID NO: 117898 - RNA, 22 nt, Human herpesvirus 5
cacgaacguguccucggugaag

SEQ ID NO: 117899 - RNA, 21 nt, Human herpesvirus 5
cacguugcgguccgugcccgc

SEQ ID NO: 117900 - RNA, 22 nt, Human herpesvirus 5
cagccgccgucgcuggugggca

SEQ ID NO: 117901 - RNA, 22 nt, Human herpesvirus 5
cagcucgucuuuuuagccguga

SEQ ID NO: 117902 - RNA, 22 nt, Human herpesvirus 5
caggucgcggauuuguuaucgg

SEQ ID NO: 117903 - RNA, 22 nt, Human herpesvirus 5
caguaucguguugugcuucaac

SEQ ID NO: 117904 - RNA, 22 nt, Human herpesvirus 5
cagugucagcgccgagccgcgg

SEQ ID NO: 117905 - RNA, 22 nt, Human herpesvirus 5
ccaccgauccgcacgaccgcga

SEQ ID NO: 117906 - RNA, 22 nt, Human herpesvirus 5
ccaggagcucaucauguucggg

SEQ ID NO: 117907 - RNA, 22 nt, Human herpesvirus 5
ccaucgagggccugcgcgccug

SEQ ID NO: 117908 - RNA, 22 nt, Human herpesvirus 5
cccagguuucuggagauuguac

SEQ ID NO: 117909 - RNA, 22 nt, Human herpesvirus 5
ccccucuuucugcgucguggcu

SEQ ID NO: 117910 - RNA, 22 nt, Human herpesvirus 5
ccgugaugagcacgguguucug

SEQ ID NO: 117911 - RNA, 22 nt, Human herpesvirus 5
cgacgaagaugcgucgaaucgc

SEQ ID NO: 117912 - RNA, 22 nt, Human herpesvirus 5
cgaggccgacagccuggagaug

SEQ ID NO: 117913 - RNA, 22 nt, Human herpesvirus 5
cgcacgauggccaugcgcguca

SEQ ID NO: 117914 - RNA, 22 nt, Human herpesvirus 5
cgccgcaggcccucauagucgc

SEQ ID NO: 117915 - RNA, 22 nt, Human herpesvirus 5
cgccgccagcggguacacgugc

SEQ ID NO: 117916 - RNA, 23 nt, Human herpesvirus 5
cgccucgucugagccggggugcc

SEQ ID NO: 117917 - RNA, 22 nt, Human herpesvirus 5
cgccugugcuuuguuacgacgg

SEQ ID NO: 117918 - RNA, 22 nt, Human herpesvirus 5
cgcgacggccucgcugacugga

SEQ ID NO: 117919 - RNA, 22 nt, Human herpesvirus 5
cgcguugcgaacggugucguua

SEQ ID NO: 117920 - RNA, 22 nt, Human herpesvirus 5
cgcuguuggagcugcucaucga

SEQ ID NO: 117921 - RNA, 22 nt, Human herpesvirus 5
cggacgugucaucucgcccgga

SEQ ID NO: 117922 - RNA, 22 nt, Human herpesvirus 5
cggaggucacgccacaugaagc

SEQ ID NO: 117923 - RNA, 22 nt, Human herpesvirus 5
cggcgguuucgccaccgcugac

SEQ ID NO: 117924 - RNA, 22 nt, Human herpesvirus 5
cgggccaguagcagagguggac

SEQ ID NO: 117925 - RNA, 18 nt, Human herpesvirus 5
cgguagcucucgucgcuc

SEQ ID NO: 117926 - RNA, 22 nt, Human herpesvirus 5
acgcaggggcuggacgugguua

SEQ ID NO: 117927 - RNA, 22 nt, Human herpesvirus 5
acgcuguuuccgaauaccggga

SEQ ID NO: 117928 - RNA, 22 nt, Human herpesvirus 5
acgcuguuuuacuuuugucggg

SEQ ID NO: 117929 - RNA, 22 nt, Human herpesvirus 5
acggcggacgaccggcauggcg

SEQ ID NO: 117930 - RNA, 22 nt, Human herpesvirus 5
acgucugagcgccgcugacagu

SEQ ID NO: 117931 - RNA, 21 nt, Human herpesvirus 5
acuggcccgacaagcggugca

SEQ ID NO: 117932 - RNA, 22 nt, Human herpesvirus 5
agcagacaguguaguucuugcc

SEQ ID NO: 117933 - RNA, 22 nt, Human herpesvirus 5
agcgcgugcuucggcgguugcu

SEQ ID NO: 117934 - RNA, 22 nt, Human herpesvirus 5
aggcgaguccgcggucgccgcc

SEQ ID NO: 117935 - RNA, 22 nt, Human herpesvirus 5
agggcauucaguugaugggugg

SEQ ID NO: 117936 - RNA, 20 nt, Human herpesvirus 5
agguugagccacccgccgca

SEQ ID NO: 117937 - RNA, 22 nt, Human herpesvirus 5
agugacggugagauccaggcug

SEQ ID NO: 117938 - RNA, 22 nt, Human herpesvirus 5
agugugagcacuacccuaguuu

SEQ ID NO: 117939 - RNA, 22 nt, Human herpesvirus 5
aucagcggcgugaugguaagca

SEQ ID NO: 117940 - RNA, 22 nt, Human herpesvirus 5
augaagggccagacgccuuuga

SEQ ID NO: 117941 - RNA, 22 nt, Human herpesvirus 5
augucucccuuggagaacgucg

SEQ ID NO: 117942 - RNA, 22 nt, Human herpesvirus 5
caaaacugucagcggcgcucag

SEQ ID NO: 117943 - RNA, 22 nt, Human herpesvirus 5
caacgacuggacgacgucguuu

SEQ ID NO: 117944 - RNA, 22 nt, Human herpesvirus 5
caaguucaccugguggaaacga

SEQ ID NO: 117945 - RNA, 22 nt, Human herpesvirus 5
cacugcgagggccagcccagcg

SEQ ID NO: 117946 - RNA, 21 nt, Human herpesvirus 5
ccaaccgucaagauccgcguu

SEQ ID NO: 117947 - RNA, 22 nt, Human herpesvirus 5
ccaagucagagcagcgucgguc

SEQ ID NO: 117948 - RNA, 22 nt, Human herpesvirus 5
ccauguuguccaaggguaucau

SEQ ID NO: 117949 - RNA, 22 nt, Human herpesvirus 5
ccgaucaccagaaggcggacau

SEQ ID NO: 117950 - RNA, 22 nt, Human herpesvirus 5
ccgcgugucuaaaccgcgugcu

SEQ ID NO: 117951 - RNA, 22 nt, Human herpesvirus 5
ccugaugcuggucaugguauau

SEQ ID NO: 117952 - RNA, 22 nt, Human herpesvirus 5
ccugccgcgucaccgugugucc

SEQ ID NO: 117953 - RNA, 22 nt, Human herpesvirus 5
ccugcgugccagucuguccguc

SEQ ID NO: 117954 - RNA, 22 nt, Human herpesvirus 5
cgacgacgaugcagccugccgc

SEQ ID NO: 117955 - RNA, 22 nt, Human herpesvirus 5
cgagcugcugaugugccgucgc

SEQ ID NO: 117956 - RNA, 22 nt, Human herpesvirus 5
cgcacgaccuaugguguugcug

SEQ ID NO: 117957 - RNA, 22 nt, Human herpesvirus 5
cgccgcccaugugccgcguucc

SEQ ID NO: 117958 - RNA, 19 nt, Human herpesvirus 5
cgcgagcggcggacuuggc

SEQ ID NO: 117959 - RNA, 22 nt, Human herpesvirus 5
cgcgcccagguaggccguuacu

SEQ ID NO: 117960 - RNA, 19 nt, Human herpesvirus 5
cgcggagccaggcugcggc

SEQ ID NO: 117961 - RNA, 22 nt, Human herpesvirus 5
cgcggccgggugggugugugcc

SEQ ID NO: 117962 - RNA, 22 nt, Human herpesvirus 5
cgcguaaccguuguccguuaua

SEQ ID NO: 117963 - RNA, 22 nt, Human herpesvirus 5
cgcuaaccuucggggcuguugc

SEQ ID NO: 117964 - RNA, 22 nt, Human herpesvirus 5
cggagaauggccggcgcugcgc

SEQ ID NO: 117965 - RNA, 22 nt, Human herpesvirus 5
cggcagcugcagcacguggaga

SEQ ID NO: 117966 - RNA, 22 nt, Human herpesvirus 5
cgggaagaggagggugguucau

SEQ ID NO: 117967 - RNA, 22 nt, Human herpesvirus 5
cgguagauguccaggugcuuac

SEQ ID NO: 117968 - RNA, 22 nt, Human herpesvirus 5
cgguuucggcuuagccucuggc

SEQ ID NO: 117969 - RNA, 22 nt, Human herpesvirus 5
cgucguguagccacacggucuc

SEQ ID NO: 117970 - RNA, 22 nt, Human herpesvirus 5
cguuguaaacaagcuauugcug

SEQ ID NO: 117971 - RNA, 22 nt, Human herpesvirus 5
cucaccuggaccggugguacug

SEQ ID NO: 117972 - RNA, 22 nt, Human herpesvirus 5
aacgcuuucgucguguuuuuca

SEQ ID NO: 117973 - RNA, 22 nt, Human herpesvirus 5
aaucacagguaccguaucuauu

SEQ ID NO: 117974 - RNA, 22 nt, Human herpesvirus 5
acaaacuagcauucuggugaga

SEQ ID NO: 117975 - RNA, 22 nt, Human herpesvirus 5
accagacgcgauggcccgcuau

SEQ ID NO: 117976 - RNA, 22 nt, Human herpesvirus 5
accaguccaagcacguccgguc

SEQ ID NO: 117977 - RNA, 21 nt, Human herpesvirus 5
acgcacgucgccguccauguc

SEQ ID NO: 117978 - RNA, 22 nt, Human herpesvirus 5
acgugguuuuugcuuccgagcu

SEQ ID NO: 117979 - RNA, 22 nt, Human herpesvirus 5
acuucuuucgcucccucgaccc

SEQ ID NO: 117980 - RNA, 22 nt, Human herpesvirus 5
agaggggacgucggggcccucc

SEQ ID NO: 117981 - RNA, 22 nt, Human herpesvirus 5
agccgcgcaugacgcaggugag

SEQ ID NO: 117982 - RNA, 22 nt, Human herpesvirus 5
agccgugcugggccucaacgcg

SEQ ID NO: 117983 - RNA, 22 nt, Human herpesvirus 5
agcggguaaguucuaagaaaca

SEQ ID NO: 117984 - RNA, 22 nt, Human herpesvirus 5
aggacgccguauuggugcgcga

SEQ ID NO: 117985 - RNA, 22 nt, Human herpesvirus 5
aggcggacgagguagagguuug

SEQ ID NO: 117986 - RNA, 22 nt, Human herpesvirus 5
aguauacuaauaugaagcgucg

SEQ ID NO: 117987 - RNA, 22 nt, Human herpesvirus 5
aguggcaggcccggguucgcga

SEQ ID NO: 117988 - RNA, 22 nt, Human herpesvirus 5
auagccuccggcugucaugggu

SEQ ID NO: 117989 - RNA, 22 nt, Human herpesvirus 5
aucaccaugguaauagcgauga

SEQ ID NO: 117990 - RNA, 22 nt, Human herpesvirus 5
augaaaaacacgacgaaagcgu

SEQ ID NO: 117991 - RNA, 22 nt, Human herpesvirus 5
auggagugagaggccggaccac

SEQ ID NO: 117992 - RNA, 22 nt, Human herpesvirus 5
auguggacauggccuaugccug

SEQ ID NO: 117993 - RNA, 23 nt, Human herpesvirus 5
auuugaguauacgguuaauguau

SEQ ID NO: 117994 - RNA, 22 nt, Human herpesvirus 5
caaaauaucgaacucuucgcgg

SEQ ID NO: 117995 - RNA, 22 nt, Human herpesvirus 5
caccaccgcagucggaggagga

SEQ ID NO: 117996 - RNA, 22 nt, Human herpesvirus 5
caccgcccauggguuccugcug

SEQ ID NO: 117997 - RNA, 22 nt, Human herpesvirus 5
cacgccguccuugacgacgcag

SEQ ID NO: 117998 - RNA, 22 nt, Human herpesvirus 5
cacguuaaugcgcgagacggcg

SEQ ID NO: 117999 - RNA, 22 nt, Human herpesvirus 5
caucacguccuuuaagagcugu

SEQ ID NO: 118000 - RNA, 22 nt, Human herpesvirus 5
ccacggaaaacgguaguuuugu

SEQ ID NO: 118001 - RNA, 22 nt, Human herpesvirus 5
ccagagcugcuaggaaccgguc

SEQ ID NO: 118002 - RNA, 22 nt, Human herpesvirus 5
ccagcaguaugacgugcgaugg

SEQ ID NO: 118003 - RNA, 21 nt, Human herpesvirus 5
cccaacaggaucaucgaccuc

SEQ ID NO: 118004 - RNA, 22 nt, Human herpesvirus 5
ccgccuccucgaguauuguucc

SEQ ID NO: 118005 - RNA, 22 nt, Human herpesvirus 5
ccgccucgcccauguguacgca

SEQ ID NO: 118006 - RNA, 22 nt, Human herpesvirus 5
ccggcgagcugacgaguggcgg

SEQ ID NO: 118007 - RNA, 22 nt, Human herpesvirus 5
ccgggaaagagcugcgacagcg

SEQ ID NO: 118008 - RNA, 23 nt, Human herpesvirus 5
ccuucgguaucaucgucuuugcu

SEQ ID NO: 118009 - RNA, 22 nt, Human herpesvirus 5
cgacgcagaaccacgcgcaguu

SEQ ID NO: 118010 - RNA, 18 nt, Human herpesvirus 5
cgagaacgcgcccuuucc

SEQ ID NO: 118011 - RNA, 22 nt, Human herpesvirus 5
cgcgcccacgguccgggcacaa

SEQ ID NO: 118012 - RNA, 19 nt, Human herpesvirus 5
cgcggcacaggcuuucgcg

SEQ ID NO: 118013 - RNA, 22 nt, Human herpesvirus 5
cgcguucuggacugcauccguc

SEQ ID NO: 118014 - RNA, 22 nt, Human herpesvirus 5
cggagacugggcugcaggcggc

SEQ ID NO: 118015 - RNA, 22 nt, Human herpesvirus 5
cgggcguacuaccccacgucaa

SEQ ID NO: 118016 - RNA, 22 nt, Human herpesvirus 5
cggucgacguuggcugcgcacc

SEQ ID NO: 118017 - RNA, 22 nt, Human herpesvirus 5
cgguuauuaucaacgucucugu

SEQ ID NO: 118018 - RNA, 20 nt, Human herpesvirus 5
cgucaagcgguuauaggugc

SEQ ID NO: 118019 - RNA, 22 nt, Human herpesvirus 5
cgucgcagugugagguguucac

SEQ ID NO: 118020 - RNA, 22 nt, Human herpesvirus 5
cguggaugagaucguagagggc

SEQ ID NO: 118021 - RNA, 22 nt, Human herpesvirus 5
cguguacgaucaccggcuggcu

SEQ ID NO: 118022 - RNA, 22 nt, Human herpesvirus 5
cgugucgaugcgcuggugccag

SEQ ID NO: 118023 - RNA, 22 nt, Human herpesvirus 5
cucgagaugcacuccgcuucag

SEQ ID NO: 118024 - RNA, 22 nt, Human herpesvirus 5
cugcugugaaaacgggcacggu

SEQ ID NO: 118025 - RNA, 22 nt, Human herpesvirus 5
cuggacacguuguuaagcggcg

SEQ ID NO: 118026 - RNA, 22 nt, Human herpesvirus 5
cuggagaacgccggggcagcag

SEQ ID NO: 118027 - RNA, 22 nt, Human herpesvirus 5
cuucagccaucaucccgaguuc

SEQ ID NO: 118028 - RNA, 22 nt, Human herpesvirus 5
cuugugguuaaguuguagauag

SEQ ID NO: 118029 - RNA, 21 nt, Human herpesvirus 5
gaacaugaugccguugcagac

SEQ ID NO: 118030 - RNA, 22 nt, Human herpesvirus 5
gaccucuggccagucgugcgcg

SEQ ID NO: 118031 - RNA, 22 nt, Human herpesvirus 5
gacggcgucuucggucucgagc

SEQ ID NO: 118032 - RNA, 22 nt, Human herpesvirus 5
gacguugaccguuguggggauu

SEQ ID NO: 118033 - RNA, 22 nt, Human herpesvirus 5
gagcucgccggcggcgaaacaa

SEQ ID NO: 118034 - RNA, 22 nt, Human herpesvirus 5
gaggagcgcauguucguggggu

SEQ ID NO: 118035 - RNA, 22 nt, Human herpesvirus 5
gaugagcagcuccaacagcgug

SEQ ID NO: 118036 - RNA, 22 nt, Human herpesvirus 5
gcaggugguucaccacguccgu

SEQ ID NO: 118037 - RNA, 22 nt, Human herpesvirus 5
gcaguacccgaacacggcgccc

SEQ ID NO: 118038 - RNA, 22 nt, Human herpesvirus 5
gcaguugcaguagagcaauuua

SEQ ID NO: 118039 - RNA, 22 nt, Human herpesvirus 5
gccaugucguuucgcgucggca

SEQ ID NO: 118040 - RNA, 20 nt, Human herpesvirus 5
gcgcaggauauggcagccug

SEQ ID NO: 118041 - RNA, 22 nt, Human herpesvirus 5
gcgcaugaaggguugcggguug

SEQ ID NO: 118042 - RNA, 22 nt, Human herpesvirus 5
gcgcucguuaaucugaacgaag

SEQ ID NO: 118043 - RNA, 22 nt, Human herpesvirus 5
gcggccuuggcggucgggucug

SEQ ID NO: 118044 - RNA, 22 nt, Human herpesvirus 5
gcgguccaacugcagccgcuuc

SEQ ID NO: 118045 - RNA, 23 nt, Human herpesvirus 5
gcgguucgccgucaucguugucg

SEQ ID NO: 118046 - RNA, 22 nt, Human herpesvirus 5
gcucgucuuuuuagccgugacc

SEQ ID NO: 118047 - RNA, 22 nt, Human herpesvirus 5
ggagaacuauuuucuuugucaa

SEQ ID NO: 118048 - RNA, 22 nt, Human herpesvirus 5
ggagcggggcguccgaaggcga

SEQ ID NO: 118049 - RNA, 22 nt, Human herpesvirus 5
ggcaagccgagcgggaggcggu

SEQ ID NO: 118050 - RNA, 22 nt, Human herpesvirus 5
ggcccucgcucgucgugccucu

SEQ ID NO: 118051 - RNA, 22 nt, Human herpesvirus 5
ggcgaccagaagcccggugccg

SEQ ID NO: 118052 - RNA, 22 nt, Human herpesvirus 5
ggcgcgcacagccuccugucga

SEQ ID NO: 118053 - RNA, 22 nt, Human herpesvirus 5
ggcgucggagccccgauacaug

SEQ ID NO: 118054 - RNA, 20 nt, Human herpesvirus 5
gggauuguugccggccaggu

SEQ ID NO: 118055 - RNA, 22 nt, Human herpesvirus 5
gggcgagucgcgggcaccgccu

SEQ ID NO: 118056 - RNA, 22 nt, Human herpesvirus 5
gggucccggcacgggccgagga

SEQ ID NO: 118057 - RNA, 22 nt, Human herpesvirus 5
gggucucggacgagucgacacg

SEQ ID NO: 118058 - RNA, 22 nt, Human herpesvirus 5
ggucgcgcugcuuuccccgagc

SEQ ID NO: 118059 - RNA, 22 nt, Human herpesvirus 5
gucgcagucagacccacuaccu

SEQ ID NO: 118060 - RNA, 22 nt, Human herpesvirus 5
gucucgagcgccccccgaugua

SEQ ID NO: 118061 - RNA, 22 nt, Human herpesvirus 5
guguucguggacgcguacggcg

SEQ ID NO: 118062 - RNA, 22 nt, Human herpesvirus 5
guugcacgcgucgcggcguaug

SEQ ID NO: 118063 - RNA, 20 nt, Human herpesvirus 5
guuuaacgugagguugaaga

SEQ ID NO: 118064 - RNA, 22 nt, Human herpesvirus 5
guuugucuuugagcgcgcgaca

SEQ ID NO: 118065 - RNA, 22 nt, Human herpesvirus 5
uaccgccgcgucgucucguauu

SEQ ID NO: 118066 - RNA, 22 nt, Human herpesvirus 5
uacgaugcgagccacggcuugg

SEQ ID NO: 118067 - RNA, 22 nt, Human herpesvirus 5
uacgucggccaacaaccacggc

SEQ ID NO: 118068 - RNA, 22 nt, Human herpesvirus 5
uacugcugaaugagcaucugaa

SEQ ID NO: 118069 - RNA, 20 nt, Human herpesvirus 5
uauccguguccaccaucggg

SEQ ID NO: 118070 - RNA, 22 nt, Human herpesvirus 5
ucccuagccagcgugccgugua

SEQ ID NO: 118071 - RNA, 22 nt, Human herpesvirus 5
uccgccguguuucucggcguac

SEQ ID NO: 118072 - RNA, 22 nt, Human herpesvirus 5
ucgcgaucuccgagaggaggag

SEQ ID NO: 118073 - RNA, 22 nt, Human herpesvirus 5
ucgcgcaccauaaacucgccua

SEQ ID NO: 118074 - RNA, 22 nt, Human herpesvirus 5
ucgcgcguacggacgaguggaa

SEQ ID NO: 118075 - RNA, 22 nt, Human herpesvirus 5
ucggccuacggagugcugacga

SEQ ID NO: 118076 - RNA, 22 nt, Human herpesvirus 5
ucucacgggaaggcuaguuaga

SEQ ID NO: 118077 - RNA, 22 nt, Human herpesvirus 5
ucuuuccagguguuuucaacgu

SEQ ID NO: 118078 - RNA, 22 nt, Human herpesvirus 5
ugaagcggagugcaucucgagu

SEQ ID NO: 118079 - RNA, 22 nt, Human herpesvirus 5
ugacaagccugacgagagcguu

SEQ ID NO: 118080 - RNA, 22 nt, Human herpesvirus 5
ugaggcucucggaucugcggcu

SEQ ID NO: 118081 - RNA, 22 nt, Human herpesvirus 5
ugauagaacuguuguauacgaa

SEQ ID NO: 118082 - RNA, 22 nt, Human herpesvirus 5
ugcagaucaucaugucgcugcu

SEQ ID NO: 118083 - RNA, 22 nt, Human herpesvirus 5
ugcgcuguuacacggaauccag

SEQ ID NO: 118084 - RNA, 22 nt, Human herpesvirus 5
ugcucgcaguaguggcgcagcu

SEQ ID NO: 118085 - RNA, 22 nt, Human herpesvirus 5
ugcugauaacuguuguacugua

SEQ ID NO: 118086 - RNA, 22 nt, Human herpesvirus 5
ugcuggagcgcgacgacgaggc

SEQ ID NO: 118087 - RNA, 22 nt, Human herpesvirus 5
ugcuuuuauugcugauaacugu

SEQ ID NO: 118088 - RNA, 22 nt, Human herpesvirus 5
uggaacaccaaauuguacgugg

SEQ ID NO: 118089 - RNA, 22 nt, Human herpesvirus 5
ugguccuuuuguuggugccgcc

SEQ ID NO: 118090 - RNA, 22 nt, Human herpesvirus 5
ugugaagcagcaacccgaacgc

SEQ ID NO: 118091 - RNA, 22 nt, Human herpesvirus 5
uguuguugcgggauguucaagg

SEQ ID NO: 118092 - RNA, 22 nt, Human herpesvirus 5
uuaaagcaaaaagucuggugag

SEQ ID NO: 118093 - RNA, 21 nt, Human herpesvirus 5
uuacgaggucugcauguuggu

SEQ ID NO: 118094 - RNA, 22 nt, Human herpesvirus 5
uucagcuucauaagaugucugc

SEQ ID NO: 118095 - RNA, 22 nt, Human herpesvirus 5
uugaccagcagcuugcagcgcu

SEQ ID NO: 118096 - RNA, 22 nt, Human herpesvirus 5
uugccgucguccgucacccggg

SEQ ID NO: 118097 - RNA, 22 nt, Human herpesvirus 5
aaagcaaggcacguucauaaug

SEQ ID NO: 118098 - RNA, 22 nt, Human herpesvirus 5
aaauaacgguacagagcgcgaa

SEQ ID NO: 118099 - RNA, 22 nt, Human herpesvirus 5
aacucgcgugccgacggggucu

SEQ ID NO: 118100 - RNA, 22 nt, Human herpesvirus 5
aaucauccuguacgaagaggaa

SEQ ID NO: 118101 - RNA, 21 nt, Human herpesvirus 5
aaugugaagaugguggaccgc

SEQ ID NO: 118102 - RNA, 22 nt, Human herpesvirus 5
acagggaaugggaaaaacacgc

SEQ ID NO: 118103 - RNA, 22 nt, Human herpesvirus 5
accgcuauccacgcccauugau

SEQ ID NO: 118104 - RNA, 22 nt, Human herpesvirus 5
accucgucaaucuugacgcgac

SEQ ID NO: 118105 - RNA, 21 nt, Human herpesvirus 5
acgcacgugaggcaaucuccg

SEQ ID NO: 118106 - RNA, 22 nt, Human herpesvirus 5
acgcaggagcgucugacuagca

SEQ ID NO: 118107 - RNA, 22 nt, Human herpesvirus 5
cuccuccuccgacugcgguggu

SEQ ID NO: 118108 - RNA, 23 nt, Human herpesvirus 5
cucgggcgccugugacaugaggc

SEQ ID NO: 118109 - RNA, 22 nt, Human herpesvirus 5
cugagcaagaucaguuggcugg

SEQ ID NO: 118110 - RNA, 22 nt, Human herpesvirus 5
cugcaggaaacguuggcgacgg

SEQ ID NO: 118111 - RNA, 22 nt, Human herpesvirus 5
cuguggcgggucgcgacgacga

SEQ ID NO: 118112 - RNA, 22 nt, Human herpesvirus 5
cuuggcguggcgcacgcagcga

SEQ ID NO: 118113 - RNA, 17 nt, Human herpesvirus 5
cuuugcgggcauguacg

SEQ ID NO: 118114 - RNA, 22 nt, Human herpesvirus 5
gaccguggcgguggcgggcaug

SEQ ID NO: 118115 - RNA, 22 nt, Human herpesvirus 5
gagaggaguggcugcuguguug

SEQ ID NO: 118116 - RNA, 22 nt, Human herpesvirus 5
gagccgcagauccgagagccuc

SEQ ID NO: 118117 - RNA, 22 nt, Human herpesvirus 5
gaguaucgggccgucgcuugcc

SEQ ID NO: 118118 - RNA, 22 nt, Human herpesvirus 5
gauaggugugacgaugucuuua

SEQ ID NO: 118119 - RNA, 19 nt, Human herpesvirus 5
gaucucuggcaucaugaga

SEQ ID NO: 118120 - RNA, 22 nt, Human herpesvirus 5
gcagcucgggcguguuuucguc

SEQ ID NO: 118121 - RNA, 22 nt, Human herpesvirus 5
gccacgcgauuggccgucggcg

SEQ ID NO: 118122 - RNA, 22 nt, Human herpesvirus 5
gccgucugcguguccucgcugg

SEQ ID NO: 118123 - RNA, 22 nt, Human herpesvirus 5
gccuucuuuggacucugcggcc

SEQ ID NO: 118124 - RNA, 22 nt, Human herpesvirus 5
gcgacauggacggcgacgugcg

SEQ ID NO: 118125 - RNA, 22 nt, Human herpesvirus 5
gcgccggcacgaugcagcuggc

SEQ ID NO: 118126 - RNA, 22 nt, Human herpesvirus 5
gcgccuggacguugcacgcggc

SEQ ID NO: 118127 - RNA, 22 nt, Human herpesvirus 5
gcgcuggaggaccugcugccca

SEQ ID NO: 118128 - RNA, 22 nt, Human herpesvirus 5
gcggagcagggagcgcaaggcc

SEQ ID NO: 118129 - RNA, 21 nt, Human herpesvirus 5
gcggcgaaucgcccgggcugc

SEQ ID NO: 118130 - RNA, 22 nt, Human herpesvirus 5
gcggcgucgaauuaccgggcgg

SEQ ID NO: 118131 - RNA, 22 nt, Human herpesvirus 5
gcucgcaguaguggcgcagcug

SEQ ID NO: 118132 - RNA, 22 nt, Human herpesvirus 5
gcugggaucguugcgguugucg

SEQ ID NO: 118133 - RNA, 22 nt, Human herpesvirus 5
ggagccguagcggcgggaaccg

SEQ ID NO: 118134 - RNA, 22 nt, Human herpesvirus 5
ggagugacggacggccaguacg

SEQ ID NO: 118135 - RNA, 22 nt, Human herpesvirus 5
ggcgugaccacgucaccgugcc

SEQ ID NO: 118136 - RNA, 22 nt, Human herpesvirus 5
ggcgugcgcgaccccuagucgg

SEQ ID NO: 118137 - RNA, 22 nt, Human herpesvirus 5
ggcguuggccuguggauagauu

SEQ ID NO: 118138 - RNA, 22 nt, Human herpesvirus 5
gggaucauuuucuuggccgugg

SEQ ID NO: 118139 - RNA, 22 nt, Human herpesvirus 5
gggccacgucgggcugcugccg

SEQ ID NO: 118140 - RNA, 22 nt, Human herpesvirus 5
gguccgagacacccagguuguu

SEQ ID NO: 118141 - RNA, 22 nt, Human herpesvirus 5
ggugguaaaacuucggcccgca

SEQ ID NO: 118142 - RNA, 22 nt, Human herpesvirus 5
guaaagacaaaugagacgcuga

SEQ ID NO: 118143 - RNA, 22 nt, Human herpesvirus 5
guacuuuccgcuguuuuccguc

SEQ ID NO: 118144 - RNA, 19 nt, Human herpesvirus 5
guauuaaggccugaacgcc

SEQ ID NO: 118145 - RNA, 22 nt, Human herpesvirus 5
gucacagagcgugcugacgugg

SEQ ID NO: 118146 - RNA, 22 nt, Human herpesvirus 5
gugcacgcgcugcuuucgcacg

SEQ ID NO: 118147 - RNA, 22 nt, Human herpesvirus 5
gugcucuuugucgacgacgugg

SEQ ID NO: 118148 - RNA, 22 nt, Human herpesvirus 5
guggccgcuaaauauggcgacg

SEQ ID NO: 118149 - RNA, 22 nt, Human herpesvirus 5
cgguaguaguaguuggggagga

SEQ ID NO: 118150 - RNA, 22 nt, Human herpesvirus 5
cguccucccgcccaggaccugu

SEQ ID NO: 118151 - RNA, 17 nt, Human herpesvirus 5
cgucucuuuauuuuuau

SEQ ID NO: 118152 - RNA, 22 nt, Human herpesvirus 5
cguuccggcgggugguugacgu

SEQ ID NO: 118153 - RNA, 22 nt, Human herpesvirus 5
cuaccugaccguagcgguuagc

SEQ ID NO: 118154 - RNA, 22 nt, Human herpesvirus 5
cuccccaacuacuacuaccgug

SEQ ID NO: 118155 - RNA, 22 nt, Human herpesvirus 5
cucgguuucgcuguagcugugg

SEQ ID NO: 118156 - RNA, 22 nt, Human herpesvirus 5
cugcgugcacggccaagacauu

SEQ ID NO: 118157 - RNA, 22 nt, Human herpesvirus 5
cugggaaaauugaaagacacgc

SEQ ID NO: 118158 - RNA, 22 nt, Human herpesvirus 5
cugucguuaucgcggcgaaugc

SEQ ID NO: 118159 - RNA, 22 nt, Human herpesvirus 5
cuucagaucguggacguguuug

SEQ ID NO: 118160 - RNA, 22 nt, Human herpesvirus 5
cuucgaggcccaugguucucug

SEQ ID NO: 118161 - RNA, 22 nt, Human herpesvirus 5
gaccgaccgccgcuuuggucgg

SEQ ID NO: 118162 - RNA, 22 nt, Human herpesvirus 5
gacggguguauaccagaugugg

SEQ ID NO: 118163 - RNA, 22 nt, Human herpesvirus 5
gacguuugugcugcuggucaua

SEQ ID NO: 118164 - RNA, 22 nt, Human herpesvirus 5
gacuucuacggaguuuucccuc

SEQ ID NO: 118165 - RNA, 19 nt, Human herpesvirus 5
gagaugcgggguggugcuc

SEQ ID NO: 118166 - RNA, 22 nt, Human herpesvirus 5
gagcagccggagcccgcacacu

SEQ ID NO: 118167 - RNA, 22 nt, Human herpesvirus 5
gaggcgcggaccgugaguuaua

SEQ ID NO: 118168 - RNA, 22 nt, Human herpesvirus 5
gcacuccgggcgagaugacacg

SEQ ID NO: 118169 - RNA, 22 nt, Human herpesvirus 5
gccgucugcagcucgucggccg

SEQ ID NO: 118170 - RNA, 22 nt, Human herpesvirus 5
gccgugugggaaugacggugau

SEQ ID NO: 118171 - RNA, 22 nt, Human herpesvirus 5
gccuccggaucacaugguuacu

SEQ ID NO: 118172 - RNA, 22 nt, Human herpesvirus 5
gcgcagccaacuuucauacuug

SEQ ID NO: 118173 - RNA, 22 nt, Human herpesvirus 5
gcgcucacggccgaguucggcc

SEQ ID NO: 118174 - RNA, 22 nt, Human herpesvirus 5
gcgcugaucugcagcugcacgg

SEQ ID NO: 118175 - RNA, 22 nt, Human herpesvirus 5
gcgucaaacuggugacgacgga

SEQ ID NO: 118176 - RNA, 22 nt, Human herpesvirus 5
gcguuucgguccacguguccug

SEQ ID NO: 118177 - RNA, 22 nt, Human herpesvirus 5
ggaggcuuucgccacaccuauc

SEQ ID NO: 118178 - RNA, 22 nt, Human herpesvirus 5
ggcacggaccgcaacgugcugc

SEQ ID NO: 118179 - RNA, 22 nt, Human herpesvirus 5
ggcgcguucucgcccuugaggc

SEQ ID NO: 118180 - RNA, 22 nt, Human herpesvirus 5
gggcgagacggugcaggagucc

SEQ ID NO: 118181 - RNA, 22 nt, Human herpesvirus 5
ggucugcgcgacauuuuggguc

SEQ ID NO: 118182 - RNA, 22 nt, Human herpesvirus 5
ggugaaguggagggccacggug

SEQ ID NO: 118183 - RNA, 22 nt, Human herpesvirus 5
ggugcacguugaugcuggggau

SEQ ID NO: 118184 - RNA, 18 nt, Human herpesvirus 5
guccgccgccgccgcggu

SEQ ID NO: 118185 - RNA, 22 nt, Human herpesvirus 5
guggcgguaggguaugugucug

SEQ ID NO: 118186 - RNA, 22 nt, Human herpesvirus 5
guucaucguaacguuguugcug

SEQ ID NO: 118187 - RNA, 18 nt, Human herpesvirus 5
guucuccaauggauacgu

SEQ ID NO: 118188 - RNA, 21 nt, Human herpesvirus 5
guuuaacgugagguugaagau

SEQ ID NO: 118189 - RNA, 22 nt, Human herpesvirus 5
uacuaguggaauaguuaacggu

SEQ ID NO: 118190 - RNA, 20 nt, Human herpesvirus 5
uaugcuggaucaagaucagc

SEQ ID NO: 118191 - RNA, 22 nt, Human herpesvirus 5
uccagucucuaacugccguguu

SEQ ID NO: 118192 - RNA, 22 nt, Human herpesvirus 5
uccgccacucgucagcucgccg

SEQ ID NO: 118193 - RNA, 22 nt, Human herpesvirus 5
uccgcguguaaugcacgcggug

SEQ ID NO: 118194 - RNA, 22 nt, Human herpesvirus 5
ucgccgucgaguacgugcugau

SEQ ID NO: 118195 - RNA, 22 nt, Human herpesvirus 5
ucguacgugagcgagucgaguc

SEQ ID NO: 118196 - RNA, 22 nt, Human herpesvirus 5
ucgugcagccgcaugagacgug

SEQ ID NO: 118197 - RNA, 22 nt, Human herpesvirus 5
ucuagagggaagguggggaaug

SEQ ID NO: 118198 - RNA, 21 nt, Human herpesvirus 5
ucuauacauuguaguucauca

SEQ ID NO: 118199 - RNA, 22 nt, Human herpesvirus 5
ucucaccagaaugcuaguuugu

SEQ ID NO: 118200 - RNA, 20 nt, Human herpesvirus 5
ucuccaggcugucggccucg

SEQ ID NO: 118201 - RNA, 21 nt, Human herpesvirus 5
ucugcgcgacauuuuggguca

SEQ ID NO: 118202 - RNA, 23 nt, Human herpesvirus 5
ucugcggaggaacagcaacggcg

SEQ ID NO: 118203 - RNA, 22 nt, Human herpesvirus 5
ucuuuuuucaauacgucaaggu

SEQ ID NO: 118204 - RNA, 22 nt, Human herpesvirus 5
ugcccgggccaugcaucgccuc

SEQ ID NO: 118205 - RNA, 20 nt, Human herpesvirus 5
ugcgccagguaguaaagcac

SEQ ID NO: 118206 - RNA, 22 nt, Human herpesvirus 5
ugcgggaacuggccuggcggcg

SEQ ID NO: 118207 - RNA, 22 nt, Human herpesvirus 5
uggagcgucagacccagggcgc

SEQ ID NO: 118208 - RNA, 22 nt, Human herpesvirus 5
ugguuugggguggcauccaaac

SEQ ID NO: 118209 - RNA, 22 nt, Human herpesvirus 5
ugucgguaggcgccuacggccg

SEQ ID NO: 118210 - RNA, 22 nt, Human herpesvirus 5
ugucugcucauucuggcggcgc

SEQ ID NO: 118211 - RNA, 22 nt, Human herpesvirus 5
ugugcucggaccgugacggugg

SEQ ID NO: 118212 - RNA, 22 nt, Human herpesvirus 5
guggcgcuucgcuacgcgguga

SEQ ID NO: 118213 - RNA, 22 nt, Human herpesvirus 5
guggcgguuguuucuccgucgc

SEQ ID NO: 118214 - RNA, 22 nt, Human herpesvirus 5
guucaugcugccuaucuacgag

SEQ ID NO: 118215 - RNA, 22 nt, Human herpesvirus 5
guugagguaaaugaugauauag

SEQ ID NO: 118216 - RNA, 22 nt, Human herpesvirus 5
guugcacgggcucgggugacgg

SEQ ID NO: 118217 - RNA, 22 nt, Human herpesvirus 5
guuucgcggcagcgcaagccgu

SEQ ID NO: 118218 - RNA, 22 nt, Human herpesvirus 5
guuuuccgacuuagccuuuggu

SEQ ID NO: 118219 - RNA, 22 nt, Human herpesvirus 5
uaauauuccuuugaacgcugag

SEQ ID NO: 118220 - RNA, 22 nt, Human herpesvirus 5
uaccgcgagauccucuuucguu

SEQ ID NO: 118221 - RNA, 17 nt, Human herpesvirus 5
uacgccgcgacgcgugc

SEQ ID NO: 118222 - RNA, 22 nt, Human herpesvirus 5
uagaagaagcaccggcggccgc

SEQ ID NO: 118223 - RNA, 22 nt, Human herpesvirus 5
uaggcgcacgauggccaugcgc

SEQ ID NO: 118224 - RNA, 22 nt, Human herpesvirus 5
ucaucguuugggguguagaauu

SEQ ID NO: 118225 - RNA, 22 nt, Human herpesvirus 5
ucgccgcgauaacgacagguca

SEQ ID NO: 118226 - RNA, 22 nt, Human herpesvirus 5
ucgcggcggcucccucucggcg

SEQ ID NO: 118227 - RNA, 19 nt, Human herpesvirus 5
ucggcccgugccgggaccc

SEQ ID NO: 118228 - RNA, 22 nt, Human herpesvirus 5
ucggcgucagguaggcgcgcag

SEQ ID NO: 118229 - RNA, 22 nt, Human herpesvirus 5
ucugcgcggcgacagcugcuuu

SEQ ID NO: 118230 - RNA, 23 nt, Human herpesvirus 5
ugagcagcaaaacgaccagaauc

SEQ ID NO: 118231 - RNA, 22 nt, Human herpesvirus 5
ugauccugagaacgucaucuau

SEQ ID NO: 118232 - RNA, 22 nt, Human herpesvirus 5
ugaugcugugcaauaaaauuuu

SEQ ID NO: 118233 - RNA, 22 nt, Human herpesvirus 5
ugcccgucuacgcgguccacgg

SEQ ID NO: 118234 - RNA, 22 nt, Human herpesvirus 5
ugccugugucuaggcugcucuc

SEQ ID NO: 118235 - RNA, 22 nt, Human herpesvirus 5
uggcggguuccgagggcggucc

SEQ ID NO: 118236 - RNA, 22 nt, Human herpesvirus 5
uguacucaagagagcgauuggu

SEQ ID NO: 118237 - RNA, 22 nt, Human herpesvirus 5
ugucggagcugucggcgcuggg

SEQ ID NO: 118238 - RNA, 22 nt, Human herpesvirus 5
uguucgaugaucguauguuaca

SEQ ID NO: 118239 - RNA, 22 nt, Human herpesvirus 5
uuccaccgugguguaaccgcga

SEQ ID NO: 118240 - RNA, 22 nt, Human herpesvirus 5
uugcgcguuaaguugcaauuuu

SEQ ID NO: 118241 - RNA, 22 nt, Human herpesvirus 5
uuguuucgccgccggcgagcuc

SEQ ID NO: 118242 - RNA, 22 nt, Human herpesvirus 5
uuuguuggcggggcucacggug

SEQ ID NO: 118243 - RNA, 22 nt, Human herpesvirus 5
aaacucaacggggugcagcgcu

SEQ ID NO: 118244 - RNA, 22 nt, Human herpesvirus 5
aaaggcuaagucggaaaacucg

SEQ ID NO: 118245 - RNA, 22 nt, Human herpesvirus 5
aaaguuggcugcgcccguuggu

SEQ ID NO: 118246 - RNA, 22 nt, Human herpesvirus 5
aacgacguggacuuuugguuac

SEQ ID NO: 118247 - RNA, 22 nt, Human herpesvirus 5
aacgagcgcuguguggccgucu

SEQ ID NO: 118248 - RNA, 21 nt, Human herpesvirus 5
aacgcggcacaugggcggcgg

SEQ ID NO: 118249 - RNA, 19 nt, Human herpesvirus 5
aagaguucgauauuuugcg

SEQ ID NO: 118250 - RNA, 22 nt, Human herpesvirus 5
aaggauggcaacuuggacacgu

SEQ ID NO: 118251 - RNA, 22 nt, Human herpesvirus 5
acaccuccguuuugagcguguu

SEQ ID NO: 118252 - RNA, 22 nt, Human herpesvirus 5
acacggcaguuagagacuggag

SEQ ID NO: 118253 - RNA, 22 nt, Human herpesvirus 5
accagccguagccaaucccgau

SEQ ID NO: 118254 - RNA, 22 nt, Human herpesvirus 5
accaguucugcccucggugcau

SEQ ID NO: 118255 - RNA, 19 nt, Human herpesvirus 5
acgaggcuggugagcgcga

SEQ ID NO: 118256 - RNA, 22 nt, Human herpesvirus 5
acgccgggucgcaccgaggugg

SEQ ID NO: 118257 - RNA, 22 nt, Human herpesvirus 5
acgcggccccgcaccggcggug

SEQ ID NO: 118258 - RNA, 22 nt, Human herpesvirus 5
acgucagcgguggcgaaaccgc

SEQ ID NO: 118259 - RNA, 22 nt, Human herpesvirus 5
acgucgcgagaccugguguuug

SEQ ID NO: 118260 - RNA, 22 nt, Human herpesvirus 5
acguucaaccccauguuuuuca

SEQ ID NO: 118261 - RNA, 22 nt, Human herpesvirus 5
acuuggaacgccgcggcgcaca

SEQ ID NO: 118262 - RNA, 22 nt, Human herpesvirus 5
agacgcagugguccgucggugu

SEQ ID NO: 118263 - RNA, 22 nt, Human herpesvirus 5
agcagcgugugcaguucggcgu

SEQ ID NO: 118264 - RNA, 22 nt, Human herpesvirus 5
agccguguuuuuugcacaauuu

SEQ ID NO: 118265 - RNA, 22 nt, Human herpesvirus 5
agcggucguuuuaaccgcaggu

SEQ ID NO: 118266 - RNA, 22 nt, Human herpesvirus 5
aggaacuaucuucaucgggccg

SEQ ID NO: 118267 - RNA, 22 nt, Human herpesvirus 5
aggagagccuacagacgggacg

SEQ ID NO: 118268 - RNA, 22 nt, Human herpesvirus 5
aggccagaggcuaagccgaaac

SEQ ID NO: 118269 - RNA, 22 nt, Human herpesvirus 5
aggcgugccggcgcccauggcc

SEQ ID NO: 118270 - RNA, 22 nt, Human herpesvirus 5
agguugaaaaaccgcguaucug

SEQ ID NO: 118271 - RNA, 22 nt, Human herpesvirus 5
agguugcuguugcggcgcgagc

SEQ ID NO: 118272 - RNA, 21 nt, Human herpesvirus 5
aguggcaggcccggguucgcg

SEQ ID NO: 118273 - RNA, 22 nt, Human herpesvirus 5
auguccaccucgaaggugucgg

SEQ ID NO: 118274 - RNA, 22 nt, Human herpesvirus 5
augucgcagccggucuagcagg

SEQ ID NO: 118275 - RNA, 22 nt, Human herpesvirus 5
caacaccguaaagccguugcgc

SEQ ID NO: 118276 - RNA, 22 nt, Human herpesvirus 5
gguuugcuuccuauauagugga

SEQ ID NO: 118277 - RNA, 22 nt, Human herpesvirus 5
guaucggggcuccgacgccuua

SEQ ID NO: 118278 - RNA, 22 nt, Human herpesvirus 5
gucaacgguggcgacaccguac

SEQ ID NO: 118279 - RNA, 22 nt, Human herpesvirus 5
guccgcacagagguaacaacgu

SEQ ID NO: 118280 - RNA, 22 nt, Human herpesvirus 5
gucguaacgauucacggagcac

SEQ ID NO: 118281 - RNA, 22 nt, Human herpesvirus 5
gucucuggccggcgccagaccg

SEQ ID NO: 118282 - RNA, 22 nt, Human herpesvirus 5
gucugcaggacggcgcucguuc

SEQ ID NO: 118283 - RNA, 22 nt, Human herpesvirus 5
gugacguagcaauuaucguauu

SEQ ID NO: 118284 - RNA, 22 nt, Human herpesvirus 5
gugauccgccgaucgaugacca

SEQ ID NO: 118285 - RNA, 22 nt, Human herpesvirus 5
gugaucuacgaacugguguagg

SEQ ID NO: 118286 - RNA, 22 nt, Human herpesvirus 5
gugcaacagcccgugucgcgca

SEQ ID NO: 118287 - RNA, 22 nt, Human herpesvirus 5
guggaugagggcucuucacggu

SEQ ID NO: 118288 - RNA, 22 nt, Human herpesvirus 5
guggguucaugcugccuaucua

SEQ ID NO: 118289 - RNA, 22 nt, Human herpesvirus 5
guucccaggccgagaacgcgca

SEQ ID NO: 118290 - RNA, 22 nt, Human herpesvirus 5
guuguccuccucguccucgugg

SEQ ID NO: 118291 - RNA, 21 nt, Human herpesvirus 5
guuguuggccgacguagcgcc

SEQ ID NO: 118292 - RNA, 22 nt, Human herpesvirus 5
uaaccacguccagccccugcgu

SEQ ID NO: 118293 - RNA, 21 nt, Human herpesvirus 5
uacgacaucaccgaggcggag

SEQ ID NO: 118294 - RNA, 22 nt, Human herpesvirus 5
uacgauuucaaaaugugcaauc

SEQ ID NO: 118295 - RNA, 16 nt, Human herpesvirus 5
uacggaguuuucccuc

SEQ ID NO: 118296 - RNA, 22 nt, Human herpesvirus 5
uacguggcuauguuugccaguu

SEQ ID NO: 118297 - RNA, 22 nt, Human herpesvirus 5
uagcuccggcauggugcugccg

SEQ ID NO: 118298 - RNA, 17 nt, Human herpesvirus 5
uaguggggcccuugugu

SEQ ID NO: 118299 - RNA, 22 nt, Human herpesvirus 5
uccaaggaucggaaaguagcgu

SEQ ID NO: 118300 - RNA, 22 nt, Human herpesvirus 5
uccccguagccggccuacggcg

SEQ ID NO: 118301 - RNA, 18 nt, Human herpesvirus 5
ucgacucguccgagaccc

SEQ ID NO: 118302 - RNA, 22 nt, Human herpesvirus 5
ucgcaacagcagcucucggugc

SEQ ID NO: 118303 - RNA, 22 nt, Human herpesvirus 5
ucggaggcgugcucguaucccg

SEQ ID NO: 118304 - RNA, 22 nt, Human herpesvirus 5
ucggccuuaaggcggccgcgug

SEQ ID NO: 118305 - RNA, 22 nt, Human herpesvirus 5
ucgucacgcucaaggacaucga

SEQ ID NO: 118306 - RNA, 22 nt, Human herpesvirus 5
ucguuuccaccaggugaacuug

SEQ ID NO: 118307 - RNA, 22 nt, Human herpesvirus 5
ucguuuucagcaggaacccaug

SEQ ID NO: 118308 - RNA, 22 nt, Human herpesvirus 5
ucuaacuagccuucccgugaga

SEQ ID NO: 118309 - RNA, 20 nt, Human herpesvirus 5
ucuccacggaucaggccucg

SEQ ID NO: 118310 - RNA, 22 nt, Human herpesvirus 5
ucugcagcucgucggccggcgu

SEQ ID NO: 118311 - RNA, 22 nt, Human herpesvirus 5
ucuuuccaggugucuucaacga

SEQ ID NO: 118312 - RNA, 22 nt, Human herpesvirus 5
ugcgccgguacgccgggaaggu

SEQ ID NO: 118313 - RNA, 22 nt, Human herpesvirus 5
ugcguuccagccuggccgcgcg

SEQ ID NO: 118314 - RNA, 22 nt, Human herpesvirus 5
ugcucacggccacgggcugcug

SEQ ID NO: 118315 - RNA, 22 nt, Human herpesvirus 5
ugcuccgacugucggggcgcag

SEQ ID NO: 118316 - RNA, 22 nt, Human herpesvirus 5
uggacgccgccucugccggcuc

SEQ ID NO: 118317 - RNA, 22 nt, Human herpesvirus 5
uggcguggcgcacgcagcgacc

SEQ ID NO: 118318 - RNA, 23 nt, Human herpesvirus 5
uggggcaguuugagcagcccacc

SEQ ID NO: 118319 - RNA, 22 nt, Human herpesvirus 5
uguaaggaagcuuuuaucgugc

SEQ ID NO: 118320 - RNA, 22 nt, Human herpesvirus 5
ugugaucugggcagcggcugcg

SEQ ID NO: 118321 - RNA, 22 nt, Human herpesvirus 5
uguggcgccagcgaaccggcgg

SEQ ID NO: 118322 - RNA, 22 nt, Human herpesvirus 5
uucagcgucucauuugucuuua

SEQ ID NO: 118323 - RNA, 22 nt, Human herpesvirus 5
uuccuuuccuguuuuguacucg

SEQ ID NO: 118324 - RNA, 22 nt, Human herpesvirus 5
uugcgauagcgggccaucgcgu

SEQ ID NO: 118325 - RNA, 22 nt, Human herpesvirus 5
uuucucaucaaccugucgaugg

SEQ ID NO: 118326 - RNA, 22 nt, Human herpesvirus 5
uuuuuccacugggcggccgcac

SEQ ID NO: 118327 - RNA, 22 nt, Human herpesvirus 5
uuuuugugcuggaacuucccuc

SEQ ID NO: 118328 - RNA, 22 nt, Human herpesvirus 6
aaggacuaucugagacagucca

SEQ ID NO: 118329 - RNA, 22 nt, Human herpesvirus 6
aauguuaugaagaaguuaacua

SEQ ID NO: 118330 - RNA, 22 nt, Human herpesvirus 6
accguuucguugcaaaugacuu

SEQ ID NO: 118331 - RNA, 21 nt, Human herpesvirus 6
acuuagcagauauucuagauu

SEQ ID NO: 118332 - RNA, 22 nt, Human herpesvirus 6
augcuuuaccucuuuagugacu

SEQ ID NO: 118333 - RNA, 22 nt, Human herpesvirus 6
cacacacggcgugagacgccgc

SEQ ID NO: 118334 - RNA, 22 nt, Human herpesvirus 6
caggucggcaggguguacgcgg

SEQ ID NO: 118335 - RNA, 16 nt, Human herpesvirus 6
ccuggcgauuuucgau

SEQ ID NO: 118336 - RNA, 22 nt, Human herpesvirus 6
cggcggauggagcccgcucggu

SEQ ID NO: 118337 - RNA, 22 nt, Human herpesvirus 6
cggugugucauuggagaaauac

SEQ ID NO: 118338 - RNA, 22 nt, Human herpesvirus 6
gaagaucacuuuguuucugaac

SEQ ID NO: 118339 - RNA, 22 nt, Human herpesvirus 6
gcuucccaacacuuuaagauaa

SEQ ID NO: 118340 - RNA, 22 nt, Human herpesvirus 6
gggugucuaaacgagucuggag

SEQ ID NO: 118341 - RNA, 22 nt, Human herpesvirus 6
uaagcagccgcgaacucguuaa

SEQ ID NO: 118342 - RNA, 22 nt, Human herpesvirus 6
uaccuuuguuuugcagagaaaa

SEQ ID NO: 118343 - RNA, 22 nt, Human herpesvirus 6
uauaucgaauuaucuuugaagc

SEQ ID NO: 118344 - RNA, 23 nt, Human herpesvirus 6
ucgaaaucgcggaugaauugcgg

SEQ ID NO: 118345 - RNA, 22 nt, Human herpesvirus 6
ucuauuagauggcgauuugaag

SEQ ID NO: 118346 - RNA, 22 nt, Human herpesvirus 6
ugcgagaccgagcgggcuccau

SEQ ID NO: 118347 - RNA, 22 nt, Human herpesvirus 6
uguuguuuagcguggagauguu

SEQ ID NO: 118348 - RNA, 22 nt, Human herpesvirus 6
uuaucguugguguuagaguuag

SEQ ID NO: 118349 - RNA, 19 nt, Human herpesvirus 6
uucauuucugacgucugaa

SEQ ID NO: 118350 - RNA, 22 nt, Human herpesvirus 6
uuccuuuucaguauagacauuu

SEQ ID NO: 118351 - RNA, 22 nt, Human herpesvirus 6
uucucgguaaaaauuuggucca

SEQ ID NO: 118352 - RNA, 18 nt, Human herpesvirus 6
uuucaacagccugucuag

SEQ ID NO: 118353 - RNA, 22 nt, Human herpesvirus 6
gcgagcauaguuuaguggguau

SEQ ID NO: 118354 - RNA, 22 nt, Human herpesvirus 6
gggcggauaguaggaguggguc

SEQ ID NO: 118355 - RNA, 22 nt, Human herpesvirus 6
gugccuauugcugcuaugccug

SEQ ID NO: 118356 - RNA, 22 nt, Human herpesvirus 6
uagcuguguguuauaaggaaga

SEQ ID NO: 118357 - RNA, 22 nt, Human herpesvirus 6
uaucagaugacgcaucaacuuu

SEQ ID NO: 118358 - RNA, 22 nt, Human herpesvirus 6
uccguccucgucuguuaaugua

SEQ ID NO: 118359 - RNA, 22 nt, Human herpesvirus 6
ucucaucguaaucuuuguaggc

SEQ ID NO: 118360 - RNA, 22 nt, Human herpesvirus 6
ugcuuugccaguauaacuguuu

SEQ ID NO: 118361 - RNA, 22 nt, Human herpesvirus 6
uggaaugaugaacgguaagcga

SEQ ID NO: 118362 - RNA, 22 nt, Human herpesvirus 6
uuucaacagccugucuagaaau

SEQ ID NO: 118363 - RNA, 22 nt, Human herpesvirus 6
aaccgcgguacccacugaucuu

SEQ ID NO: 118364 - RNA, 22 nt, Human herpesvirus 6
aacugauacuguucaaguccuu

SEQ ID NO: 118365 - RNA, 23 nt, Human herpesvirus 6
aagaaaaacaggaacugcgguug

SEQ ID NO: 118366 - RNA, 22 nt, Human herpesvirus 6
aagcuguuaaauguaaauggaa

SEQ ID NO: 118367 - RNA, 22 nt, Human herpesvirus 6
acacgucgugcguuuugucuuc

SEQ ID NO: 118368 - RNA, 22 nt, Human herpesvirus 6
acguagaaaaucgucaauggug

SEQ ID NO: 118369 - RNA, 22 nt, Human herpesvirus 6
agccgaugacggccuccggccc

SEQ ID NO: 118370 - RNA, 18 nt, Human herpesvirus 6
aucgcaaaauugauacaa

SEQ ID NO: 118371 - RNA, 21 nt, Human herpesvirus 6
aucgcaaaauugauacaaacg

SEQ ID NO: 118372 - RNA, 22 nt, Human herpesvirus 6
caaauaguuguguuauaaaagg

SEQ ID NO: 118373 - RNA, 22 nt, Human herpesvirus 6
cgcguuucucuccacaucuccg

SEQ ID NO: 118374 - RNA, 22 nt, Human herpesvirus 6
cucuguuuggagacauacugua

SEQ ID NO: 118375 - RNA, 22 nt, Human herpesvirus 6
gaauaucaucccuaccgaugaa

SEQ ID NO: 118376 - RNA, 23 nt, Human herpesvirus 6
gagaaaaguaacacaggucuccc

SEQ ID NO: 118377 - RNA, 22 nt, Human herpesvirus 6
gaggugugauuuuagaagguag

SEQ ID NO: 118378 - RNA, 22 nt, Human herpesvirus 6
gcauucgacacauggaauuuac

SEQ ID NO: 118379 - RNA, 22 nt, Human herpesvirus 6
gcuaauaauuccauaaauguca

SEQ ID NO: 118380 - RNA, 22 nt, Human herpesvirus 6
ggcaccgugccaggccaccgug

SEQ ID NO: 118381 - RNA, 22 nt, Human herpesvirus 6
guacaaaugauuuaauuucgcu

SEQ ID NO: 118382 - RNA, 22 nt, Human herpesvirus 6
aaaaauaaggcaacgcccacca

SEQ ID NO: 118383 - RNA, 23 nt, Human herpesvirus 6
aaagucaccuguauagauuuauu

SEQ ID NO: 118384 - RNA, 22 nt, Human herpesvirus 6
aaucuggguuccugcuuaguua

SEQ ID NO: 118385 - RNA, 22 nt, Human herpesvirus 6
acggagcccgcuggguaucgcg

SEQ ID NO: 118386 - RNA, 22 nt, Human herpesvirus 6
acggcaccauuaauauguucgc

SEQ ID NO: 118387 - RNA, 23 nt, Human herpesvirus 6
acuuguuuuuaucggggcggauc

SEQ ID NO: 118388 - RNA, 22 nt, Human herpesvirus 6
agcggaaacuguaacggccacg

SEQ ID NO: 118389 - RNA, 22 nt, Human herpesvirus 6
agcugggugucgauacauauau

SEQ ID NO: 118390 - RNA, 22 nt, Human herpesvirus 6
aguaaauauuuaucugcaugua

SEQ ID NO: 118391 - RNA, 22 nt, Human herpesvirus 6
auuccguuugcguggcuagauc

SEQ ID NO: 118392 - RNA, 22 nt, Human herpesvirus 6
auugcgaggagacggagacgga

SEQ ID NO: 118393 - RNA, 22 nt, Human herpesvirus 6
auuuacuacaggauaaaacuuc

SEQ ID NO: 118394 - RNA, 22 nt, Human herpesvirus 6
ccguggugcgucucuccgauag

SEQ ID NO: 118395 - RNA, 22 nt, Human herpesvirus 6
ccuuuuuaauuucgaguauugu

SEQ ID NO: 118396 - RNA, 22 nt, Human herpesvirus 6
cgacagaugugugucuuccgau

SEQ ID NO: 118397 - RNA, 22 nt, Human herpesvirus 6
cggcgaggcggccggagagccg

SEQ ID NO: 118398 - RNA, 22 nt, Human herpesvirus 6
cggugguuaguuuuuggguaga

SEQ ID NO: 118399 - RNA, 22 nt, Human herpesvirus 6
cgugugcgugcgccggacucug

SEQ ID NO: 118400 - RNA, 22 nt, Human herpesvirus 6
gaauguuugggagaacugagga

SEQ ID NO: 118401 - RNA, 22 nt, Human herpesvirus 6
gaguaaaucgaacgauacuuac

SEQ ID NO: 118402 - RNA, 22 nt, Human herpesvirus 6
gauucucauuauaacgcagaca

SEQ ID NO: 118403 - RNA, 22 nt, Human herpesvirus 6
gcgcgugggccagucucgccuc

SEQ ID NO: 118404 - RNA, 22 nt, Human herpesvirus 6
gcuaucuucggcaaaaaguuuu

SEQ ID NO: 118405 - RNA, 22 nt, Human herpesvirus 6
ggcgucucacgccgugugugcg

SEQ ID NO: 118406 - RNA, 23 nt, Human herpesvirus 6
gguggcacgucgcgcgcgauguc

SEQ ID NO: 118407 - RNA, 22 nt, Human herpesvirus 6
uaugacuagggguauggcuagg

SEQ ID NO: 118408 - RNA, 22 nt, Human herpesvirus 6
uccgagaacucgagccauaguu

SEQ ID NO: 118409 - RNA, 22 nt, Human herpesvirus 6
ucgccguuuacuauuguaaaau

SEQ ID NO: 118410 - RNA, 22 nt, Human herpesvirus 6
ucuacaaaauagaauuuaacga

SEQ ID NO: 118411 - RNA, 22 nt, Human herpesvirus 6
ugccaauuuugagcaauauaag

SEQ ID NO: 118412 - RNA, 22 nt, Human herpesvirus 6
uuccgauagggaaacucuauuc

SEQ ID NO: 118413 - RNA, 22 nt, Human herpesvirus 6
uuccuggacauggugaaacuug

SEQ ID NO: 118414 - RNA, 22 nt, Human herpesvirus 6
uuuaaaucuaauauucaucggc

SEQ ID NO: 118415 - RNA, 22 nt, Human herpesvirus 6
uuuaagucguugugucaugauu

SEQ ID NO: 118416 - RNA, 22 nt, Human herpesvirus 6
acaaauucgguguuuuuaaugu

SEQ ID NO: 118417 - RNA, 22 nt, Human herpesvirus 6
acauuuaaucacgagucuccuu

SEQ ID NO: 118418 - RNA, 22 nt, Human herpesvirus 6
acuuuuuguccgaucacaucuu

SEQ ID NO: 118419 - RNA, 22 nt, Human herpesvirus 6
agacugggaaccgcggcagcau

SEQ ID NO: 118420 - RNA, 22 nt, Human herpesvirus 6
aucgagucuuuauauuuucggu

SEQ ID NO: 118421 - RNA, 22 nt, Human herpesvirus 6
aucgauaauccucgggccaggg

SEQ ID NO: 118422 - RNA, 22 nt, Human herpesvirus 6
aucgcaaaauugauacaaacgu

SEQ ID NO: 118423 - RNA, 21 nt, Human herpesvirus 6
auggugucguuuaauuucaca

SEQ ID NO: 118424 - RNA, 22 nt, Human herpesvirus 6
auuacuagaugguaaagcguug

SEQ ID NO: 118425 - RNA, 22 nt, Human herpesvirus 6
auucucauuugaaagcgauaga

SEQ ID NO: 118426 - RNA, 21 nt, Human herpesvirus 6
auucucucacagcaugaugac

SEQ ID NO: 118427 - RNA, 22 nt, Human herpesvirus 6
cagcgacaguaacggcggcggc

SEQ ID NO: 118428 - RNA, 22 nt, Human herpesvirus 6
cgacgcggcgucuccgacgagu

SEQ ID NO: 118429 - RNA, 20 nt, Human herpesvirus 6
cgcguguuugcaucagugac

SEQ ID NO: 118430 - RNA, 22 nt, Human herpesvirus 6
cggcgguugccuguauaggcag

SEQ ID NO: 118431 - RNA, 22 nt, Human herpesvirus 6
cuauauaugcaagccaugacaa

SEQ ID NO: 118432 - RNA, 22 nt, Human herpesvirus 6
cugauguagauauuuuaaaaau

SEQ ID NO: 118433 - RNA, 22 nt, Human herpesvirus 6
gauugauaaguuuccgacaugc

SEQ ID NO: 118434 - RNA, 22 nt, Human herpesvirus 6
gauuuucucagcaauuuggaaa

SEQ ID NO: 118435 - RNA, 22 nt, Human herpesvirus 6
gccgcagaguugcaagaaaugu

SEQ ID NO: 118436 - RNA, 22 nt, Human herpesvirus 6
guccgugugaacuggcacgagu

SEQ ID NO: 118437 - RNA, 22 nt, Human herpesvirus 6
gucgcucaugcggacagucaaa

SEQ ID NO: 118438 - RNA, 22 nt, Human herpesvirus 6
gugacggugcuccgaucagggg

SEQ ID NO: 118439 - RNA, 18 nt, Human herpesvirus 6
guuauggaacguauguag

SEQ ID NO: 118440 - RNA, 21 nt, Human herpesvirus 6
guuucgugucaguucuguggu

SEQ ID NO: 118441 - RNA, 22 nt, Human herpesvirus 6
ucaguuuauaucuucguaaugg

SEQ ID NO: 118442 - RNA, 22 nt, Human herpesvirus 6
ugagacaucgagauucuuuaaa

SEQ ID NO: 118443 - RNA, 22 nt, Human herpesvirus 6
ugcagaauaucaaaaacucaug

SEQ ID NO: 118444 - RNA, 22 nt, Human herpesvirus 6
uguccauuucguaucgaaugaa

SEQ ID NO: 118445 - RNA, 22 nt, Human herpesvirus 6
uuaggauucuauguggagccgu

SEQ ID NO: 118446 - RNA, 22 nt, Human herpesvirus 6
uucguuaacaauaauacgcagu

SEQ ID NO: 118447 - RNA, 22 nt, Human herpesvirus 6
uuuaccgguaauuggcaguuuu

SEQ ID NO: 118448 - RNA, 22 nt, Human herpesvirus 6
uuuagaauuaaggaauugguau

SEQ ID NO: 118449 - RNA, 22 nt, Human herpesvirus 6
uuucacgugcacgagaucuguu

SEQ ID NO: 118450 - RNA, 22 nt, Human herpesvirus 6
uuuggcgacuguuugaaauauu

SEQ ID NO: 118451 - RNA, 22 nt, Human herpesvirus 6B
acugcgaggacacguugcgcga

SEQ ID NO: 118452 - RNA, 23 nt, Human herpesvirus 6B
agaaaaacaggaacugcgguugc

SEQ ID NO: 118453 - RNA, 22 nt, Human herpesvirus 6B
agcaucgguuguguuagcuucg

SEQ ID NO: 118454 - RNA, 22 nt, Human herpesvirus 6B
aggcagggagggauacggucac

SEQ ID NO: 118455 - RNA, 21 nt, Human herpesvirus 6B
aguuggccaaaggagggccgg

SEQ ID NO: 118456 - RNA, 19 nt, Human herpesvirus 6B
auucucauuaguguuauuc

SEQ ID NO: 118457 - RNA, 22 nt, Human herpesvirus 6B
cauguaugcauuaacucugggu

SEQ ID NO: 118458 - RNA, 22 nt, Human herpesvirus 6B
ccucuuccuucucguaccccgg

SEQ ID NO: 118459 - RNA, 22 nt, Human herpesvirus 6B
gaagugcgggaguuucgccgag

SEQ ID NO: 118460 - RNA, 22 nt, Human herpesvirus 6B
gaaucugaagcguuuucacgau

SEQ ID NO: 118461 - RNA, 21 nt, Human herpesvirus 6B
gcauucgacauauggaauuua

SEQ ID NO: 118462 - RNA, 22 nt, Human herpesvirus 6B
ggcgaacaauuggauuuucaga

SEQ ID NO: 118463 - RNA, 22 nt, Human herpesvirus 6B
gggcuccggcuuccucuccguc

SEQ ID NO: 118464 - RNA, 22 nt, Human herpesvirus 6B
uaagaauuggugucauucgugg

SEQ ID NO: 118465 - RNA, 20 nt, Human herpesvirus 6B
ucgcaaauaccgaucaguuc

SEQ ID NO: 118466 - RNA, 22 nt, Human herpesvirus 6B
ucugaauguuuucauguaauuu

SEQ ID NO: 118467 - RNA, 22 nt, Human herpesvirus 6B
ucugcuggaggcucugcuggag

SEQ ID NO: 118468 - RNA, 22 nt, Human herpesvirus 6B
ugaaugucaucgagauaaucgu

SEQ ID NO: 118469 - RNA, 18 nt, Human herpesvirus 6B
uuucaacagccugucuag

SEQ ID NO: 118470 - RNA, 22 nt, Human herpesvirus 6B
uuugcucggagucccggagauc

SEQ ID NO: 118471 - RNA, 22 nt, Human herpesvirus 6B
ggcauucgaggccgcccucuau

SEQ ID NO: 118472 - RNA, 22 nt, Human herpesvirus 6B
uaaccgcgguacacacugaccu

SEQ ID NO: 118473 - RNA, 17 nt, Human herpesvirus 6B
uaaugaaugugcuuugg

SEQ ID NO: 118474 - RNA, 22 nt, Human herpesvirus 6B
uaguaaacauuugauucagugg

SEQ ID NO: 118475 - RNA, 22 nt, Human herpesvirus 6B
ucgcguuggcaucgggcgcugc

SEQ ID NO: 118476 - RNA, 22 nt, Human herpesvirus 6B
ucguaauacaacagaagcaaau

SEQ ID NO: 118477 - RNA, 22 nt, Human herpesvirus 6B
uggcgccgacccugccgcggca

SEQ ID NO: 118478 - RNA, 22 nt, Human herpesvirus 6B
aaagaacuggaaagaagcaucc

SEQ ID NO: 118479 - RNA, 22 nt, Human herpesvirus 6B
aagcuguuaaauguaaauggaa

SEQ ID NO: 118480 - RNA, 22 nt, Human herpesvirus 6B
acaucuaucgccgcucagaauu

SEQ ID NO: 118481 - RNA, 22 nt, Human herpesvirus 6B
acauuucugaagaugaucuccu

SEQ ID NO: 118482 - RNA, 22 nt, Human herpesvirus 6B
acggcuguuuuugcucucugua

SEQ ID NO: 118483 - RNA, 22 nt, Human herpesvirus 6B
caagcagucccgaucuaugcga

SEQ ID NO: 118484 - RNA, 22 nt, Human herpesvirus 6B
gaaguuuaccuagagauuacaa

SEQ ID NO: 118485 - RNA, 22 nt, Human herpesvirus 6B
gagaagauuggaaaaauaucca

SEQ ID NO: 118486 - RNA, 22 nt, Human herpesvirus 6B
ggaugacaccggcuauaaaagc

SEQ ID NO: 118487 - RNA, 22 nt, Human herpesvirus 6B
gggugucuaaaugagucuggag

SEQ ID NO: 118488 - RNA, 22 nt, Human herpesvirus 6B
guaucacguaucucugguaaau

SEQ ID NO: 118489 - RNA, 22 nt, Human herpesvirus 6B
ucccgcccucgucuguugcugu

SEQ ID NO: 118490 - RNA, 22 nt, Human herpesvirus 6B
ucgaacaacgcguuggcgaaau

SEQ ID NO: 118491 - RNA, 19 nt, Human herpesvirus 6B
uuuugcguuuauguuucaa

SEQ ID NO: 118492 - RNA, 22 nt, Human herpesvirus 6B
aaucuauuuugagaaaaguuac

SEQ ID NO: 118493 - RNA, 22 nt, Human herpesvirus 6B
aauucucauuuaaaagcgauag

SEQ ID NO: 118494 - RNA, 22 nt, Human herpesvirus 6B
cccggagaucuaaugggggaga

SEQ ID NO: 118495 - RNA, 22 nt, Human herpesvirus 6B
cugccaaaugcugaucugucuc

SEQ ID NO: 118496 - RNA, 22 nt, Human herpesvirus 6B
cuguaguucauggauuaccaau

SEQ ID NO: 118497 - RNA, 22 nt, Human herpesvirus 6B
cuucccuuugcguuucucacgg

SEQ ID NO: 118498 - RNA, 22 nt, Human herpesvirus 6B
gaucccgcucggagcucucuca

SEQ ID NO: 118499 - RNA, 22 nt, Human herpesvirus 6B
ggcuuuuuguucaguugauuau

SEQ ID NO: 118500 - RNA, 22 nt, Human herpesvirus 6B
gguggcgcgucgcgaagucccg

SEQ ID NO: 118501 - RNA, 19 nt, Human herpesvirus 6B
gguuccacuugugcacggu

SEQ ID NO: 118502 - RNA, 22 nt, Human herpesvirus 6B
guacaaaugauuuaauuucgcu

SEQ ID NO: 118503 - RNA, 22 nt, Human herpesvirus 6B
gucgaaaucgcggaugaauugc

SEQ ID NO: 118504 - RNA, 22 nt, Human herpesvirus 6B
uaugugugacguccgcaucaug

SEQ ID NO: 118505 - RNA, 23 nt, Human herpesvirus 6B
ucagcggugguggcggaggcggu

SEQ ID NO: 118506 - RNA, 22 nt, Human herpesvirus 6B
ucuuugaaggacuaucugagac

SEQ ID NO: 118507 - RNA, 22 nt, Human herpesvirus 6B
ugaaaauggcugaauaauauua

SEQ ID NO: 118508 - RNA, 22 nt, Human herpesvirus 6B
ugacuguguacauucgccgauu

SEQ ID NO: 118509 - RNA, 21 nt, Human herpesvirus 6B
uggcgccgacccugccgcggc

SEQ ID NO: 118510 - RNA, 22 nt, Human herpesvirus 6B
ugguuuuauaagcucaagaggg

SEQ ID NO: 118511 - RNA, 22 nt, Human herpesvirus 6B
uugaaacggagggcggaaagcg

SEQ ID NO: 118512 - RNA, 22 nt, Human herpesvirus 6B
uugcacagcagacaauguaaua

SEQ ID NO: 118513 - RNA, 18 nt, Human herpesvirus 6B
uuuauggccacuuuaucu

SEQ ID NO: 118514 - RNA, 22 nt, Human herpesvirus 6B
uuucggaaaaagaggaggguau

SEQ ID NO: 118515 - RNA, 22 nt, Human herpesvirus 6B
uuuuuacaagucgaucuuuggu

SEQ ID NO: 118516 - RNA, 22 nt, Human herpesvirus 6B
aaacgaucucgauucugugcag

SEQ ID NO: 118517 - RNA, 21 nt, Human herpesvirus 6B
acuuucacacgcauagauggg

SEQ ID NO: 118518 - RNA, 22 nt, Human herpesvirus 6B
agugucguucuaucuacucggg

SEQ ID NO: 118519 - RNA, 22 nt, Human herpesvirus 6B
aguugcauggugauguguuagc

SEQ ID NO: 118520 - RNA, 21 nt, Human herpesvirus 6B
auacgucucccaguucguuaa

SEQ ID NO: 118521 - RNA, 22 nt, Human herpesvirus 6B
auguuauugggagcauuggaaa

SEQ ID NO: 118522 - RNA, 22 nt, Human herpesvirus 6B
auuugguuggcaaacacugagc

SEQ ID NO: 118523 - RNA, 22 nt, Human herpesvirus 6B
caacgcggcagagucggcgcca

SEQ ID NO: 118524 - RNA, 21 nt, Human herpesvirus 6B
cuaugcuuuuguacucgcuua

SEQ ID NO: 118525 - RNA, 22 nt, Human herpesvirus 6B
cuuuauagaaaaugucucacga

SEQ ID NO: 118526 - RNA, 22 nt, Human herpesvirus 6B
gaguggccaagcguccccgggg

SEQ ID NO: 118527 - RNA, 22 nt, Human herpesvirus 6B
gcaggaagagggaguccaacaa

SEQ ID NO: 118528 - RNA, 22 nt, Human herpesvirus 6B
gcuccgcuugguuuuccguguc

SEQ ID NO: 118529 - RNA, 22 nt, Human herpesvirus 6B
ggagggauacggucacgcgcac

SEQ ID NO: 118530 - RNA, 22 nt, Human herpesvirus 7
aaacacaggaaaaauaguggug

SEQ ID NO: 118531 - RNA, 20 nt, Human herpesvirus 7
aauaugucucugauggucuc

SEQ ID NO: 118532 - RNA, 22 nt, Human herpesvirus 7
aaucuauggaugcaccaaacac

SEQ ID NO: 118533 - RNA, 22 nt, Human herpesvirus 7
acacugaaacauaguacaaggg

SEQ ID NO: 118534 - RNA, 22 nt, Human herpesvirus 7
acauuuguggccaggcaauuga

SEQ ID NO: 118535 - RNA, 22 nt, Human herpesvirus 7
auucagaagaugaaagauuucu

SEQ ID NO: 118536 - RNA, 22 nt, Human herpesvirus 7
auuugaagaacaagaggcacug

SEQ ID NO: 118537 - RNA, 22 nt, Human herpesvirus 7
cacuggagaaugucgaggucuu

SEQ ID NO: 118538 - RNA, 22 nt, Human herpesvirus 7
caugugaaauuggcauuaaugc

SEQ ID NO: 118539 - RNA, 22 nt, Human herpesvirus 7
cgaggggccuauuuauuaguau

SEQ ID NO: 118540 - RNA, 22 nt, Human herpesvirus 7
gaauggucuauuuuuuacucga

SEQ ID NO: 118541 - RNA, 22 nt, Human herpesvirus 7
gauauuuuggguaauaugucuu

SEQ ID NO: 118542 - RNA, 22 nt, Human herpesvirus 7
gcagggguaauaacagaacauu

SEQ ID NO: 118543 - RNA, 22 nt, Human herpesvirus 7
gcuguacagauagaaaucguuc

SEQ ID NO: 118544 - RNA, 22 nt, Human herpesvirus 7
ggccauggcaaugcuacgaguu

SEQ ID NO: 118545 - RNA, 22 nt, Human herpesvirus 7
guuguugucauuaaaagagauu

SEQ ID NO: 118546 - RNA, 22 nt, Human herpesvirus 7
uacauuuuuuacgaugacaaac

SEQ ID NO: 118547 - RNA, 21 nt, Human herpesvirus 7
uaugaagaguucuuguuugga

SEQ ID NO: 118548 - RNA, 22 nt, Human herpesvirus 7
ucaccgccauagauguccgaca

SEQ ID NO: 118549 - RNA, 22 nt, Human herpesvirus 7
ucagaacacaaucuuucggugu

SEQ ID NO: 118550 - RNA, 22 nt, Human herpesvirus 7
ucagagcugcuucuagaucugu

SEQ ID NO: 118551 - RNA, 23 nt, Human herpesvirus 7
ucagaugaucuucuugcagcgca

SEQ ID NO: 118552 - RNA, 22 nt, Human herpesvirus 7
ugauggaucugguguccuucuu

SEQ ID NO: 118553 - RNA, 22 nt, Human herpesvirus 7
uggucucuggaagcguggucug

SEQ ID NO: 118554 - RNA, 22 nt, Human herpesvirus 7
ugugauuauugcauuugcuuca

SEQ ID NO: 118555 - RNA, 22 nt, Human herpesvirus 7
uuauagacguggaauuucuugg

SEQ ID NO: 118556 - RNA, 22 nt, Human herpesvirus 7
uugaucagcgaauugggaauaa

SEQ ID NO: 118557 - RNA, 22 nt, Human herpesvirus 7
uugcaagaugcugaggauuuaa

SEQ ID NO: 118558 - RNA, 22 nt, Human herpesvirus 7
uuuaucccaccgguccuuccuc

SEQ ID NO: 118559 - RNA, 22 nt, Human herpesvirus 7
uuuggaagugcagaaaguuggu

SEQ ID NO: 118560 - RNA, 22 nt, Human herpesvirus 7
acaguuuauggacaauuuuggc

SEQ ID NO: 118561 - RNA, 22 nt, Human herpesvirus 7
acauaaaaagagagaugucuac

SEQ ID NO: 118562 - RNA, 22 nt, Human herpesvirus 7
accugucaaaaauugauuagua

SEQ ID NO: 118563 - RNA, 22 nt, Human herpesvirus 7
agaagcuaugaugccugugaau

SEQ ID NO: 118564 - RNA, 22 nt, Human herpesvirus 7
agucauuuucaaauagaguuua

SEQ ID NO: 118565 - RNA, 22 nt, Human herpesvirus 7
auauuucugaugaauagcuuuu

SEQ ID NO: 118566 - RNA, 22 nt, Human herpesvirus 7
aucuucuagaguuauugccgug

SEQ ID NO: 118567 - RNA, 22 nt, Human herpesvirus 7
augaacaauaucguuuauuuca

SEQ ID NO: 118568 - RNA, 22 nt, Human herpesvirus 7
augccaccgcuaacuacggugg

SEQ ID NO: 118569 - RNA, 22 nt, Human herpesvirus 7
auggagcaaauguuuuacuacg

SEQ ID NO: 118570 - RNA, 22 nt, Human herpesvirus 7
auuuaccucacuuucuucagua

SEQ ID NO: 118571 - RNA, 22 nt, Human herpesvirus 7
auuugcguuucgcuguugccaa

SEQ ID NO: 118572 - RNA, 22 nt, Human herpesvirus 7
cguagagagcauuagcauuaaa

SEQ ID NO: 118573 - RNA, 22 nt, Human herpesvirus 7
cugcaacuuuucuccgcguccg

SEQ ID NO: 118574 - RNA, 22 nt, Human herpesvirus 7
cuguggaaauaaauccgcuugc

SEQ ID NO: 118575 - RNA, 22 nt, Human herpesvirus 7
gacauugaaaaaaucugcuguu

SEQ ID NO: 118576 - RNA, 22 nt, Human herpesvirus 7
guacuaggucuuguucuagcuu

SEQ ID NO: 118577 - RNA, 22 nt, Human herpesvirus 7
uaacaacacgcuauccaaagau

SEQ ID NO: 118578 - RNA, 22 nt, Human herpesvirus 7
uagaggcagaccuaaacccaga

SEQ ID NO: 118579 - RNA, 22 nt, Human herpesvirus 7
ugaagcagguuaaagauauugu

SEQ ID NO: 118580 - RNA, 22 nt, Human herpesvirus 7
ugauaacaguugaaagccaaau

SEQ ID NO: 118581 - RNA, 19 nt, Human herpesvirus 7
uggacguaaacaggaaaga

SEQ ID NO: 118582 - RNA, 22 nt, Human herpesvirus 7
uggauuuagaugcagaucuaga

SEQ ID NO: 118583 - RNA, 22 nt, Human herpesvirus 7
ugucaucguaauaauggaaacu

SEQ ID NO: 118584 - RNA, 22 nt, Human herpesvirus 7
uugauuggaaaucaaaauucug

SEQ ID NO: 118585 - RNA, 22 nt, Human herpesvirus 7
uuuaagacauuauuugcugaac

SEQ ID NO: 118586 - RNA, 22 nt, Human herpesvirus 7
aaaaagauauuuuauauagauu

SEQ ID NO: 118587 - RNA, 22 nt, Human herpesvirus 7
aaauuuuagcuucacugaaaag

SEQ ID NO: 118588 - RNA, 22 nt, Human herpesvirus 7
aaucuauauguuguauuaaaau

SEQ ID NO: 118589 - RNA, 22 nt, Human herpesvirus 7
aauggcaacgguugagcaaauu

SEQ ID NO: 118590 - RNA, 22 nt, Human herpesvirus 7
agggaauugauuugguuaauca

SEQ ID NO: 118591 - RNA, 22 nt, Human herpesvirus 7
agucucagcaccgcggauuuac

SEQ ID NO: 118592 - RNA, 18 nt, Human herpesvirus 7
auaucuaaaguggagaca

SEQ ID NO: 118593 - RNA, 22 nt, Human herpesvirus 7
cagaaucuauuccacuugaauc

SEQ ID NO: 118594 - RNA, 22 nt, Human herpesvirus 7
caggggcuaucagaaacuuuca

SEQ ID NO: 118595 - RNA, 22 nt, Human herpesvirus 7
cauguaaguauugguuugcuca

SEQ ID NO: 118596 - RNA, 22 nt, Human herpesvirus 7
cguuguucaguuuuuauaaaug

SEQ ID NO: 118597 - RNA, 22 nt, Human herpesvirus 7
cugaaggcgcggcucuguugcg

SEQ ID NO: 118598 - RNA, 19 nt, Human herpesvirus 7
gaaguucacaucuguucuu

SEQ ID NO: 118599 - RNA, 22 nt, Human herpesvirus 7
gacagguguuguuuccgaucua

SEQ ID NO: 118600 - RNA, 22 nt, Human herpesvirus 7
gagugcagaaaugcuccgcgcu

SEQ ID NO: 118601 - RNA, 22 nt, Human herpesvirus 7
gcucugaagauggguuguuauc

SEQ ID NO: 118602 - RNA, 22 nt, Human herpesvirus 7
gcuguucgugcuucacaguguu

SEQ ID NO: 118603 - RNA, 22 nt, Human herpesvirus 7
ggguuagggccgcagcccuagg

SEQ ID NO: 118604 - RNA, 22 nt, Human herpesvirus 7
guugaauauauacgcuuaaaau

SEQ ID NO: 118605 - RNA, 22 nt, Human herpesvirus 7
uaagcaauguagauauagugga

SEQ ID NO: 118606 - RNA, 22 nt, Human herpesvirus 7
uacgcuuuuuucgaguccaucg

SEQ ID NO: 118607 - RNA, 22 nt, Human herpesvirus 7
uagaaucaucaaugcuucaucg

SEQ ID NO: 118608 - RNA, 22 nt, Human herpesvirus 7
uagaugauacuuuugucaguuc

SEQ ID NO: 118609 - RNA, 22 nt, Human herpesvirus 7
uauagacauuucguuauuccau

SEQ ID NO: 118610 - RNA, 22 nt, Human herpesvirus 7
uccuucuugagaugcccaagga

SEQ ID NO: 118611 - RNA, 23 nt, Human herpesvirus 7
ucuaaaaauaucuauuugcuuau

SEQ ID NO: 118612 - RNA, 19 nt, Human herpesvirus 7
ucucuguguuuaccucacc

SEQ ID NO: 118613 - RNA, 22 nt, Human herpesvirus 7
ugccauugaaugcguuggaaau

SEQ ID NO: 118614 - RNA, 22 nt, Human herpesvirus 7
uggagggaauagacgauuauca

SEQ ID NO: 118615 - RNA, 22 nt, Human herpesvirus 7
ugucauaaauuuuaguugccgu

SEQ ID NO: 118616 - RNA, 22 nt, Human herpesvirus 7
ugugcucuggcgucucgauagg

SEQ ID NO: 118617 - RNA, 22 nt, Human herpesvirus 7
uucaggaaaaacgguguuguaa

SEQ ID NO: 118618 - RNA, 22 nt, Human herpesvirus 7
uucaugcucaucgucuccaagc

SEQ ID NO: 118619 - RNA, 22 nt, Human herpesvirus 7
uuccuauguguguaugaugaua

SEQ ID NO: 118620 - RNA, 22 nt, Human herpesvirus 7
uugacgguggaaaguucgacag

SEQ ID NO: 118621 - RNA, 22 nt, Human herpesvirus 7
uuggagucguucuauguaugaa

SEQ ID NO: 118622 - RNA, 22 nt, Human herpesvirus 7
aaauacuguguucugaauuuga

SEQ ID NO: 118623 - RNA, 22 nt, Human herpesvirus 7
aagacguauuggucaauauaau

SEQ ID NO: 118624 - RNA, 22 nt, Human herpesvirus 7
aaguugggacaaugcuuagaau

SEQ ID NO: 118625 - RNA, 22 nt, Human herpesvirus 7
accagguuaugcaauuuuuacc

SEQ ID NO: 118626 - RNA, 22 nt, Human herpesvirus 7
agaguuucgaauccuuuuaagc

SEQ ID NO: 118627 - RNA, 22 nt, Human herpesvirus 7
auccaaaucucagauauugcgu

SEQ ID NO: 118628 - RNA, 22 nt, Human herpesvirus 7
auucacaggcaucauagcuucu

SEQ ID NO: 118629 - RNA, 20 nt, Human herpesvirus 7
auuucuucaaaauugcuauu

SEQ ID NO: 118630 - RNA, 22 nt, Human herpesvirus 7
guuaggguuagggccgcagccc

SEQ ID NO: 118631 - RNA, 22 nt, Human herpesvirus 7
uaaauuccauuuauaguuacaa

SEQ ID NO: 118632 - RNA, 22 nt, Human herpesvirus 7
uaauuucugguauggaauuggc

SEQ ID NO: 118633 - RNA, 22 nt, Human herpesvirus 7
uacaugagacagucaggugagu

SEQ ID NO: 118634 - RNA, 22 nt, Human herpesvirus 7
uaggcugcauuguaaaauucga

SEQ ID NO: 118635 - RNA, 22 nt, Human herpesvirus 7
uauauuuccagacauauuguaa

SEQ ID NO: 118636 - RNA, 22 nt, Human herpesvirus 7
ucaaauguuugcauuguguuuc

SEQ ID NO: 118637 - RNA, 22 nt, Human herpesvirus 7
ucugugguugcagcagucauag

SEQ ID NO: 118638 - RNA, 22 nt, Human herpesvirus 7
ugauauuuuuaacacaauggca

SEQ ID NO: 118639 - RNA, 22 nt, Human herpesvirus 7
uugaaucaacugcauaaauucg

SEQ ID NO: 118640 - RNA, 21 nt, Human herpesvirus 7
aaaaagauugugagcaauuua

SEQ ID NO: 118641 - RNA, 22 nt, Human herpesvirus 7
aagaggaauagcacgucgcgga

SEQ ID NO: 118642 - RNA, 22 nt, Human herpesvirus 7
aaucaaguauuucagucuguag

SEQ ID NO: 118643 - RNA, 22 nt, Human herpesvirus 7
acaguaaguaaaaaugguuaca

SEQ ID NO: 118644 - RNA, 22 nt, Human herpesvirus 8 [Kaposi`s sarcoma-associated h
accgcaccaaaaauggcgucug

SEQ ID NO: 118645 - RNA, 22 nt, Human herpesvirus 8 [Kaposi`s sarcoma-associated h
agccuggacgauguacuugaac

SEQ ID NO: 118646 - RNA, 22 nt, Human herpesvirus 8 [Kaposi`s sarcoma-associated h
agucccgacuaaugaggacaau

SEQ ID NO: 118647 - RNA, 19 nt, Human herpesvirus 8 [Kaposi`s sarcoma-associated h
caaccuaaccuagugcugc

SEQ ID NO: 118648 - RNA, 22 nt, Human herpesvirus 8 [Kaposi`s sarcoma-associated h
caaucacgggaggcuugguggc

SEQ ID NO: 118649 - RNA, 22 nt, Human herpesvirus 8 [Kaposi`s sarcoma-associated h
cacccugauaucgacggccucg

SEQ ID NO: 118650 - RNA, 22 nt, Human herpesvirus 8 [Kaposi`s sarcoma-associated h
cagcaccagcuucugucggugu

SEQ ID NO: 118651 - RNA, 22 nt, Human herpesvirus 8 [Kaposi`s sarcoma-associated h
cagggggugucuccgucugcuc

SEQ ID NO: 118652 - RNA, 22 nt, Human herpesvirus 8 [Kaposi`s sarcoma-associated h
ccggggaugugaugaaguuggg

SEQ ID NO: 118653 - RNA, 22 nt, Human herpesvirus 8 [Kaposi`s sarcoma-associated h
cgaggaauaggcagcagaggca

SEQ ID NO: 118654 - RNA, 16 nt, Human herpesvirus 8 [Kaposi`s sarcoma-associated h
cgcccgagcugucguu

SEQ ID NO: 118655 - RNA, 22 nt, Human herpesvirus 8 [Kaposi`s sarcoma-associated h
guccaccauuccuccggugacu

SEQ ID NO: 118656 - RNA, 22 nt, Human herpesvirus 8 [Kaposi`s sarcoma-associated h
uguuuuuuguacuacagcucuc

SEQ ID NO: 118657 - RNA, 21 nt, Human herpesvirus 8 [Kaposi`s sarcoma-associated h
cggauuccauccguggugccc

SEQ ID NO: 118658 - RNA, 22 nt, Human herpesvirus 8 [Kaposi`s sarcoma-associated h
cuugugcacacggcccguaugg

SEQ ID NO: 118659 - RNA, 22 nt, Human herpesvirus 8 [Kaposi`s sarcoma-associated h
ggggacugucauccuguugguc

SEQ ID NO: 118660 - RNA, 22 nt, Human herpesvirus 8 [Kaposi`s sarcoma-associated h
gggucuccugcggaggccaaua

SEQ ID NO: 118661 - RNA, 22 nt, Human herpesvirus 8 [Kaposi`s sarcoma-associated h
ucuaaaucccagcaugccagau

SEQ ID NO: 118662 - RNA, 22 nt, Human herpesvirus 8 [Kaposi`s sarcoma-associated h
uggcgcuggaagaaggcugucg

SEQ ID NO: 118663 - RNA, 22 nt, Human herpesvirus 8 [Kaposi`s sarcoma-associated h
uguccaccggacgaguggcgcg

SEQ ID NO: 118664 - RNA, 22 nt, Human herpesvirus 8 [Kaposi`s sarcoma-associated h
cgccucagcgaggaccugcgca

SEQ ID NO: 118665 - RNA, 22 nt, Human herpesvirus 8 [Kaposi`s sarcoma-associated h
gacgauguggcucgggugaaug

SEQ ID NO: 118666 - RNA, 22 nt, Human herpesvirus 8 [Kaposi`s sarcoma-associated h
gacgguggacaugaucagggug

SEQ ID NO: 118667 - RNA, 22 nt, Human herpesvirus 8 [Kaposi`s sarcoma-associated h
gcaguuagacaccguuaucucc

SEQ ID NO: 118668 - RNA, 22 nt, Human herpesvirus 8 [Kaposi`s sarcoma-associated h
gcaucuuugacgagcgugacua

SEQ ID NO: 118669 - RNA, 22 nt, Human herpesvirus 8 [Kaposi`s sarcoma-associated h
gcuaccgacggacguauuccug

SEQ ID NO: 118670 - RNA, 22 nt, Human herpesvirus 8 [Kaposi`s sarcoma-associated h
uccagggucaccgccucacucu

SEQ ID NO: 118671 - RNA, 19 nt, Human herpesvirus 8 [Kaposi`s sarcoma-associated h
agggcggguuauuggcagu

SEQ ID NO: 118672 - RNA, 22 nt, Human herpesvirus 8 [Kaposi`s sarcoma-associated h
auuguaaaagauccgauccuca

SEQ ID NO: 118673 - RNA, 22 nt, Human herpesvirus 8 [Kaposi`s sarcoma-associated h
gauggccuugaagucuauguuu

SEQ ID NO: 118674 - RNA, 22 nt, Human herpesvirus 8 [Kaposi`s sarcoma-associated h
ggacaucgccguggaccccgga

SEQ ID NO: 118675 - RNA, 22 nt, Human herpesvirus 8 [Kaposi`s sarcoma-associated h
ggugccccuaaagaccgucugu

SEQ ID NO: 118676 - RNA, 22 nt, Human herpesvirus 8 [Kaposi`s sarcoma-associated h
uccaggucagagagcagggaug

SEQ ID NO: 118677 - RNA, 22 nt, Human herpesvirus 8 [Kaposi`s sarcoma-associated h
uccguggcaguggcagcauguu

SEQ ID NO: 118678 - RNA, 22 nt, Human herpesvirus 8 [Kaposi`s sarcoma-associated h
uggcugcgcaguccaagggcga

SEQ ID NO: 118679 - RNA, 22 nt, Human herpesvirus 8 [Kaposi`s sarcoma-associated h
cacaucagcuuguccugugggg

SEQ ID NO: 118680 - RNA, 22 nt, Human metapneumovirus
caucgccuaccuccaguguaaa

SEQ ID NO: 118681 - RNA, 22 nt, Human metapneumovirus
ggcauaugaagagucauuuuca

SEQ ID NO: 118682 - RNA, 22 nt, Human parainfluenza virus 1 strain Washington/1964
uucuauacaguuugugacaucu

SEQ ID NO: 118683 - RNA, 22 nt, Human parainfluenza virus 1 strain Washington/1964
uuggcacuuucguucauggagg

SEQ ID NO: 118684 - RNA, 22 nt, Human parainfluenza virus 1 strain Washington/1964
uaaugggugucauuauugagga

SEQ ID NO: 118685 - RNA, 22 nt, Human parainfluenza virus 1 strain Washington/1964
uccuccugauuuucccgaugcu

SEQ ID NO: 118686 - RNA, 22 nt, Human parainfluenza virus 1 strain Washington/1964
auugauaugaauuauuggucug

SEQ ID NO: 118687 - RNA, 22 nt, Human parainfluenza virus 2
acaagggaugcuuucucugcuc

SEQ ID NO: 118688 - RNA, 22 nt, Human parainfluenza virus 2
auugaauugaagaugcaagauu

SEQ ID NO: 118689 - RNA, 21 nt, Human parainfluenza virus 3
ucguuuuguucugggauuagu

SEQ ID NO: 118690 - RNA, 22 nt, Human parainfluenza virus 3
aagcauauugaauuauagauga

SEQ ID NO: 118691 - RNA, 22 nt, Human parechovirus 2
aaugcuuuagguuauuuacugu

SEQ ID NO: 118692 - RNA, 22 nt, Human parechovirus 2
ccaaauuucuucuuucccuuac

SEQ ID NO: 118693 - RNA, 23 nt, Human parechovirus 2
guaaauauagaggagauuuggca

SEQ ID NO: 118694 - RNA, 22 nt, Human parechovirus 2
aaggauaugguacuaucaguau

SEQ ID NO: 118695 - RNA, 21 nt, Human parechovirus 2
auagagauauuccuuagcuug

SEQ ID NO: 118696 - RNA, 22 nt, Human parechovirus 2
auuacaaagugaauucagaacu

SEQ ID NO: 118697 - RNA, 22 nt, Human parechovirus 2
cacgcaaggacgaaccaccauc

SEQ ID NO: 118698 - RNA, 22 nt, Human respiratory syncytial virus
acugaucaaaaaucaucaagug

SEQ ID NO: 118699 - RNA, 22 nt, Human respiratory syncytial virus
augacacuauagcuccaagaga

SEQ ID NO: 118700 - RNA, 22 nt, Human respiratory syncytial virus
aauuguuugaauacauuaaaua

SEQ ID NO: 118701 - RNA, 22 nt, Human respiratory syncytial virus
cccuuuauugauucuaggaauu

SEQ ID NO: 118702 - RNA, 22 nt, Human respiratory syncytial virus
cucaucuuauagauguuuuugu

SEQ ID NO: 118703 - RNA, 22 nt, Human respiratory syncytial virus
cuugguaaugucaaacuguuca

SEQ ID NO: 118704 - RNA, 22 nt, Human respiratory syncytial virus
uggacuguacuuuacaaguguc

SEQ ID NO: 118705 - RNA, 22 nt, Human respiratory syncytial virus
uucuuaggaucuuuggaugaug

SEQ ID NO: 118706 - RNA, 22 nt, Human respiratory syncytial virus
auuuuuguuggaugcagugcau

SEQ ID NO: 118707 - RNA, 22 nt, Human respiratory syncytial virus
ucacugagcaugauaaagguua

SEQ ID NO: 118708 - RNA, 22 nt, Human rhinovirus 89
cauuuguuccugauugccaugu

SEQ ID NO: 118709 - RNA, 22 nt, Human rhinovirus B
uggccauucagcauaacacaca

SEQ ID NO: 118710 - RNA, 19 nt, Human T-lymphotropic virus 1
guccaggccugacaagccc

SEQ ID NO: 118711 - RNA, 22 nt, Human T-lymphotropic virus 1
ggguuuuuuaggcuggacaacu

SEQ ID NO: 118712 - RNA, 22 nt, Human T-lymphotropic virus 2
ccacggcaguuauguuguagag

SEQ ID NO: 118713 - RNA, 22 nt, Human T-lymphotropic virus 2
ugagggugguaguaauggcauu

SEQ ID NO: 118714 - RNA, 22 nt, Human T-lymphotropic virus 2
uuuggcggaggauacaggggcc

SEQ ID NO: 118715 - RNA, 22 nt, Human T-lymphotropic virus 2
cucaugggguugaggacggcug

SEQ ID NO: 118716 - RNA, 22 nt, Human T-lymphotropic virus 2
cgguuuuguaaccgcuguggaa

SEQ ID NO: 118717 - RNA, 21 nt, Human T-lymphotropic virus 2
uaacgcauggaguuguugugg

SEQ ID NO: 118718 - RNA, 21 nt, Human T-lymphotropic virus 2
uauagggauuguagguguuug

SEQ ID NO: 118719 - RNA, 22 nt, Human T-lymphotropic virus 2
ucuguaaggucagcuggauaaa

SEQ ID NO: 118720 - RNA, 22 nt, Human T-lymphotropic virus 2
aaugaaccuccauuuaccauuu

SEQ ID NO: 118721 - RNA, 22 nt, Human T-lymphotropic virus 2
caagcucuugggucccgguacc

SEQ ID NO: 118722 - RNA, 22 nt, Human T-lymphotropic virus 2
uauccacgcaaaccaugcagga

SEQ ID NO: 118723 - RNA, 22 nt, Influenza A virus
acaggcauucaaaugggacugu

SEQ ID NO: 118724 - RNA, 22 nt, Influenza A virus
uccuggaagagaaggcaauggu

SEQ ID NO: 118725 - RNA, 22 nt, Influenza B virus
agauuagguaguugucugauuu

SEQ ID NO: 118726 - RNA, 22 nt, Japanese encephalitis virus
caccaccauggccaugacugac

SEQ ID NO: 118727 - RNA, 22 nt, Japanese encephalitis virus
uggcucgagcgagcaugcggug

SEQ ID NO: 118728 - RNA, 22 nt, Japanese encephalitis virus
aagcucaugagcaaaccuuggg

SEQ ID NO: 118729 - RNA, 22 nt, Japanese encephalitis virus
aggagguccuucgcaagaggug

SEQ ID NO: 118730 - RNA, 22 nt, Japanese encephalitis virus
cuuccucaccaccagcuacaua

SEQ ID NO: 118731 - RNA, 22 nt, Japanese encephalitis virus
uagcugguggugaggaagaaca

SEQ ID NO: 118732 - RNA, 22 nt, Japanese encephalitis virus
uaguagcugauguugagauaga

SEQ ID NO: 118733 - RNA, 22 nt, Japanese encephalitis virus
accaguccauugggcaugugua

SEQ ID NO: 118734 - RNA, 23 nt, Japanese encephalitis virus
ugccucuguccaaugggcuaggu

SEQ ID NO: 118735 - RNA, 22 nt, Marburg virus
gacccugaaccggauguuauga

SEQ ID NO: 118736 - RNA, 22 nt, Marburg virus
ggagcacauguuugauucuucg

SEQ ID NO: 118737 - RNA, 22 nt, Marburg virus
ucaucaucauuguuugggucug

SEQ ID NO: 118738 - RNA, 22 nt, Marburg virus
ugaagagcaccgaagcauccag

SEQ ID NO: 118739 - RNA, 22 nt, Measles virus
aacaucaugguggauuaauucu

SEQ ID NO: 118740 - RNA, 22 nt, Measles virus
auagaguuaagcaauccaucuu

SEQ ID NO: 118741 - RNA, 22 nt, Measles virus
gcaguuauugaggagaguuaua

SEQ ID NO: 118742 - RNA, 22 nt, Measles virus
gugccugcucuucugccaucgg

SEQ ID NO: 118743 - RNA, 22 nt, Measles virus
guugacucuuugucuucuaugu

SEQ ID NO: 118744 - RNA, 22 nt, Measles virus
uuugcagccaucaguuccucaa

SEQ ID NO: 118745 - RNA, 22 nt, Measles virus
aaguuguugccucuggauugga

SEQ ID NO: 118746 - RNA, 22 nt, Measles virus
acccuucaccugaagcuugagc

SEQ ID NO: 118747 - RNA, 22 nt, Measles virus
ucuucacauuagaagcacaggc

SEQ ID NO: 118748 - RNA, 22 nt, Measles virus
uggggccaaauaaugacaggau

SEQ ID NO: 118749 - RNA, 22 nt, Measles virus
acucuggaggagcagaugcaag

SEQ ID NO: 118750 - RNA, 19 nt, Measles virus
auuuggccccagcuuacgg

SEQ ID NO: 118751 - RNA, 22 nt, Measles virus
uccccuccuucugcaguuucaa

SEQ ID NO: 118752 - RNA, 22 nt, Measles virus
ucugucauuguggaacuuagga

SEQ ID NO: 118753 - RNA, 22 nt, Measles virus
acuguucucaguagucuccugu

SEQ ID NO: 118754 - RNA, 22 nt, Measles virus
auauggaauaugagagugggcc

SEQ ID NO: 118755 - RNA, 22 nt, Measles virus
aucugagcaauuugagcccuag

SEQ ID NO: 118756 - RNA, 23 nt, Measles virus
auuacaucuucacgucgaaacag

SEQ ID NO: 118757 - RNA, 22 nt, Measles virus
cugguuuuugcacuugguggga

SEQ ID NO: 118758 - RNA, 20 nt, Measles virus
gcagcaugcagggggagggu

SEQ ID NO: 118759 - RNA, 22 nt, Measles virus
uccuaaguuuuuuauaauggau

SEQ ID NO: 118760 - RNA, 22 nt, Molluscum contagiosum virus
aacucgcucgcuuagggagccc

SEQ ID NO: 118761 - RNA, 22 nt, Molluscum contagiosum virus
aagcacagcaggagcacgccug

SEQ ID NO: 118762 - RNA, 22 nt, Molluscum contagiosum virus
aaggcgucgggagcaccgucag

SEQ ID NO: 118763 - RNA, 22 nt, Molluscum contagiosum virus
aaguacuucucgauguugggaa

SEQ ID NO: 118764 - RNA, 22 nt, Molluscum contagiosum virus
aaugcgaggcgcgacuggcaca

SEQ ID NO: 118765 - RNA, 22 nt, Molluscum contagiosum virus
accuugucacugucgcgacaac

SEQ ID NO: 118766 - RNA, 22 nt, Molluscum contagiosum virus
acggcguacacaacuuccgcgu

SEQ ID NO: 118767 - RNA, 22 nt, Molluscum contagiosum virus
acgggcucccuaagcgagcgag

SEQ ID NO: 118768 - RNA, 20 nt, Molluscum contagiosum virus
acguacacgccgcacauugc

SEQ ID NO: 118769 - RNA, 22 nt, Molluscum contagiosum virus
agacacgcgcgcgugccugacg

SEQ ID NO: 118770 - RNA, 22 nt, Molluscum contagiosum virus
agaucgcgaucuugaaggagua

SEQ ID NO: 118771 - RNA, 22 nt, Molluscum contagiosum virus
agcaauucgcuuugcagcccgc

SEQ ID NO: 118772 - RNA, 22 nt, Molluscum contagiosum virus
agcacuucuccgaugggucggu

SEQ ID NO: 118773 - RNA, 22 nt, Molluscum contagiosum virus
agcccgucuacauuuugcggcg

SEQ ID NO: 118774 - RNA, 22 nt, Molluscum contagiosum virus
agcgaauauggaccuugcacgc

SEQ ID NO: 118775 - RNA, 22 nt, Molluscum contagiosum virus
agcgggcgcgccacucccuguc

SEQ ID NO: 118776 - RNA, 22 nt, Molluscum contagiosum virus
agcgguguugcugacgacugcg

SEQ ID NO: 118777 - RNA, 22 nt, Molluscum contagiosum virus
aggugcucgaugagaguucgcg

SEQ ID NO: 118778 - RNA, 22 nt, Molluscum contagiosum virus
aucagcgcgaucucgaucgaac

SEQ ID NO: 118779 - RNA, 22 nt, Molluscum contagiosum virus
auguuggccagguagguguucu

SEQ ID NO: 118780 - RNA, 22 nt, Molluscum contagiosum virus
cacgacggcggguucucguccc

SEQ ID NO: 118781 - RNA, 22 nt, Molluscum contagiosum virus
cacgcuagucguuggcgcgccc

SEQ ID NO: 118782 - RNA, 22 nt, Molluscum contagiosum virus
cacgggcgcggagaacugcacc

SEQ ID NO: 118783 - RNA, 22 nt, Molluscum contagiosum virus
cagacgcgacaccuuccgagcc

SEQ ID NO: 118784 - RNA, 22 nt, Molluscum contagiosum virus
cagcacgcgcagcguguccaug

SEQ ID NO: 118785 - RNA, 22 nt, Molluscum contagiosum virus
caucuucuugaugaucuugcgc

SEQ ID NO: 118786 - RNA, 22 nt, Molluscum contagiosum virus
ccaggccugggcuucggaagcg

SEQ ID NO: 118787 - RNA, 22 nt, Molluscum contagiosum virus
ccugcacguucacgcgcuccag

SEQ ID NO: 118788 - RNA, 22 nt, Molluscum contagiosum virus
ccugcagcagcaaugugcacac

SEQ ID NO: 118789 - RNA, 22 nt, Molluscum contagiosum virus
ccugcggggugccuuuccugcg

SEQ ID NO: 118790 - RNA, 22 nt, Molluscum contagiosum virus
cgacgccuucugagcccgagcu

SEQ ID NO: 118791 - RNA, 22 nt, Molluscum contagiosum virus
cgcggcacgccuucgucagcuu

SEQ ID NO: 118792 - RNA, 17 nt, Molluscum contagiosum virus
cgcguacguguccaugc

SEQ ID NO: 118793 - RNA, 22 nt, Molluscum contagiosum virus
cgcuggugucgcuuccaugggc

SEQ ID NO: 118794 - RNA, 22 nt, Molluscum contagiosum virus
cggcgcgucgagcuugggcgug

SEQ ID NO: 118795 - RNA, 22 nt, Molluscum contagiosum virus
cguaagccaccgcgcaggaccg

SEQ ID NO: 118796 - RNA, 22 nt, Molluscum contagiosum virus
cgucugcuuuugcgucgcgcgu

SEQ ID NO: 118797 - RNA, 22 nt, Molluscum contagiosum virus
cuacgugcuggaacaggugcac

SEQ ID NO: 118798 - RNA, 22 nt, Molluscum contagiosum virus
cucgggcggguuguuggcgugg

SEQ ID NO: 118799 - RNA, 22 nt, Molluscum contagiosum virus
cucugugucggaauccucgcgg

SEQ ID NO: 118800 - RNA, 22 nt, Molluscum contagiosum virus
cugccgcggggcuagcgcugca

SEQ ID NO: 118801 - RNA, 22 nt, Molluscum contagiosum virus
cugugcccgaguagaagagcgu

SEQ ID NO: 118802 - RNA, 22 nt, Molluscum contagiosum virus
cugugcgcgcaggccacggggu

SEQ ID NO: 118803 - RNA, 22 nt, Molluscum contagiosum virus
gaaguccagcacgcgcgcgugc

SEQ ID NO: 118804 - RNA, 17 nt, Molluscum contagiosum virus
gacggaaugcgagcgcc

SEQ ID NO: 118805 - RNA, 22 nt, Molluscum contagiosum virus
gacguccugcgccaugcgcagu

SEQ ID NO: 118806 - RNA, 22 nt, Molluscum contagiosum virus
gacugcuucguuuucgaccugg

SEQ ID NO: 118807 - RNA, 22 nt, Molluscum contagiosum virus
gagcacgugcgccgcuucgagg

SEQ ID NO: 118808 - RNA, 22 nt, Molluscum contagiosum virus
gagugucgcgaccguagaagau

SEQ ID NO: 118809 - RNA, 22 nt, Molluscum contagiosum virus
gaugcucauggacgcgcucggg

SEQ ID NO: 118810 - RNA, 22 nt, Molluscum contagiosum virus
gcagcauuuuggugggcacgca

SEQ ID NO: 118811 - RNA, 22 nt, Molluscum contagiosum virus
gcccuuugccacggcgagucac

SEQ ID NO: 118812 - RNA, 22 nt, Molluscum contagiosum virus
gcgcaagacgaguagugcgcga

SEQ ID NO: 118813 - RNA, 22 nt, Molluscum contagiosum virus
gcgcacacgggcucgagcucgg

SEQ ID NO: 118814 - RNA, 22 nt, Molluscum contagiosum virus
gcgccacgagcuugucccgcca

SEQ ID NO: 118815 - RNA, 22 nt, Molluscum contagiosum virus
gcgccgcgccuguguccgucuc

SEQ ID NO: 118816 - RNA, 22 nt, Molluscum contagiosum virus
gcgccgcuggaggcgagcguug

SEQ ID NO: 118817 - RNA, 23 nt, Molluscum contagiosum virus
gcgcgaaacgguaagcucgacgu

SEQ ID NO: 118818 - RNA, 22 nt, Molluscum contagiosum virus
gcgcgcuacacugugcucacgu

SEQ ID NO: 118819 - RNA, 20 nt, Molluscum contagiosum virus
gcgcuucgagcacgcuuucc

SEQ ID NO: 118820 - RNA, 22 nt, Molluscum contagiosum virus
gcggcccuucguguucgcggac

SEQ ID NO: 118821 - RNA, 19 nt, Molluscum contagiosum virus
gcggcgccgucuuguugcc

SEQ ID NO: 118822 - RNA, 22 nt, Molluscum contagiosum virus
gcggugcagcugccgcagagcc

SEQ ID NO: 118823 - RNA, 22 nt, Molluscum contagiosum virus
gcgugcgccgcagugcaccauc

SEQ ID NO: 118824 - RNA, 22 nt, Molluscum contagiosum virus
gcuagcgagcaaagucguggca

SEQ ID NO: 118825 - RNA, 22 nt, Molluscum contagiosum virus
gcucacggccuucgcguuccgg

SEQ ID NO: 118826 - RNA, 22 nt, Molluscum contagiosum virus
gcugucugugcauguagcaguc

SEQ ID NO: 118827 - RNA, 22 nt, Molluscum contagiosum virus
gcuugauccugcgauggccgug

SEQ ID NO: 118828 - RNA, 22 nt, Molluscum contagiosum virus
ggaagaccgucgugcuguuguc

SEQ ID NO: 118829 - RNA, 22 nt, Molluscum contagiosum virus
ggaagcgcucuagguugggugu

SEQ ID NO: 118830 - RNA, 22 nt, Molluscum contagiosum virus
ggaaggccacuggcgagcguac

SEQ ID NO: 118831 - RNA, 22 nt, Molluscum contagiosum virus
ggaucauggugugcacguucgc

SEQ ID NO: 118832 - RNA, 22 nt, Molluscum contagiosum virus
ggcaacgcaugcagucgacggc

SEQ ID NO: 118833 - RNA, 22 nt, Molluscum contagiosum virus
ggcucgcaacuacccgcaggcc

SEQ ID NO: 118834 - RNA, 18 nt, Molluscum contagiosum virus
gggccugccagccggcgc

SEQ ID NO: 118835 - RNA, 22 nt, Molluscum contagiosum virus
gggcgcugaacuuagcgcgcag

SEQ ID NO: 118836 - RNA, 22 nt, Molluscum contagiosum virus
ggggccugcaguugagagccuu

SEQ ID NO: 118837 - RNA, 22 nt, Molluscum contagiosum virus
ggucgagucguucucgcgguac

SEQ ID NO: 118838 - RNA, 22 nt, Molluscum contagiosum virus
ggugcacgcguagcacggccag

SEQ ID NO: 118839 - RNA, 22 nt, Molluscum contagiosum virus
gugggcggcagagagccggcgc

SEQ ID NO: 118840 - RNA, 22 nt, Molluscum contagiosum virus
guugccgucgucgcugcaguuu

SEQ ID NO: 118841 - RNA, 22 nt, Molluscum contagiosum virus
uaggcguguccgcagcugugcg

SEQ ID NO: 118842 - RNA, 21 nt, Molluscum contagiosum virus
uauccacgccaccaggccugg

SEQ ID NO: 118843 - RNA, 22 nt, Molluscum contagiosum virus
ucagcguuuaccccgagggccg

SEQ ID NO: 118844 - RNA, 22 nt, Molluscum contagiosum virus
uccggcgaaaagccgcucgcgu

SEQ ID NO: 118845 - RNA, 22 nt, Molluscum contagiosum virus
uccgugcacgggcucgagcgcg

SEQ ID NO: 118846 - RNA, 22 nt, Molluscum contagiosum virus
uccuccgcggccaauucgcgcu

SEQ ID NO: 118847 - RNA, 22 nt, Molluscum contagiosum virus
uccucgguguacugcuugcagu

SEQ ID NO: 118848 - RNA, 22 nt, Molluscum contagiosum virus
ucgcccagauccgcccagcuug

SEQ ID NO: 118849 - RNA, 22 nt, Molluscum contagiosum virus
ucgcguggaacuugacgccgua

SEQ ID NO: 118850 - RNA, 23 nt, Molluscum contagiosum virus
ucggggaagagcagguggaugcc

SEQ ID NO: 118851 - RNA, 22 nt, Molluscum contagiosum virus
ucucgcagcuggaccugcgcgc

SEQ ID NO: 118852 - RNA, 22 nt, Molluscum contagiosum virus
ucucugcgcgcaagucaccgcu

SEQ ID NO: 118853 - RNA, 22 nt, Molluscum contagiosum virus
ugcaccuguuccagcacguagc

SEQ ID NO: 118854 - RNA, 22 nt, Molluscum contagiosum virus
ugcgcauuggcagcgcuuuguu

SEQ ID NO: 118855 - RNA, 21 nt, Molluscum contagiosum virus
ugcggcuugggcaccgcgcgg

SEQ ID NO: 118856 - RNA, 21 nt, Molluscum contagiosum virus
ugcggguaccuuuccugcggg

SEQ ID NO: 118857 - RNA, 22 nt, Molluscum contagiosum virus
ugcuuugaugacuaugcgucuu

SEQ ID NO: 118858 - RNA, 22 nt, Molluscum contagiosum virus
uggcuucucgacuggagggggc

SEQ ID NO: 118859 - RNA, 22 nt, Molluscum contagiosum virus
ugugauggagggucuaggcuuc

SEQ ID NO: 118860 - RNA, 22 nt, Molluscum contagiosum virus
ugugcucgcgugccuugcgcgu

SEQ ID NO: 118861 - RNA, 22 nt, Molluscum contagiosum virus
ugugugugcgcucacacggaac

SEQ ID NO: 118862 - RNA, 22 nt, Molluscum contagiosum virus
uuccuggacacgcgcaucgugu

SEQ ID NO: 118863 - RNA, 22 nt, Molluscum contagiosum virus
uugaugcugaacgaucucugac

SEQ ID NO: 118864 - RNA, 22 nt, Molluscum contagiosum virus
uugccaucgauuaugcuugagu

SEQ ID NO: 118865 - RNA, 22 nt, Molluscum contagiosum virus
cagcgcgugccgcagaagguug

SEQ ID NO: 118866 - RNA, 22 nt, Molluscum contagiosum virus
caggaauugcagcgccugcgac

SEQ ID NO: 118867 - RNA, 22 nt, Molluscum contagiosum virus
caugacgcgcgugcgcaugucg

SEQ ID NO: 118868 - RNA, 22 nt, Molluscum contagiosum virus
ccagcgccgccaggacagcauu

SEQ ID NO: 118869 - RNA, 22 nt, Molluscum contagiosum virus
ccgcgcagaaaagccucgcagu

SEQ ID NO: 118870 - RNA, 22 nt, Molluscum contagiosum virus
ccuucucgguguagauguggua

SEQ ID NO: 118871 - RNA, 22 nt, Molluscum contagiosum virus
cgcacagcugcgggcugcggcu

SEQ ID NO: 118872 - RNA, 22 nt, Molluscum contagiosum virus
cgccggcuggcaauguagcgua

SEQ ID NO: 118873 - RNA, 22 nt, Molluscum contagiosum virus
cgcgacauggacaucgccagug

SEQ ID NO: 118874 - RNA, 21 nt, Molluscum contagiosum virus
cgcgcagguccagcugcgaga

SEQ ID NO: 118875 - RNA, 22 nt, Molluscum contagiosum virus
cgcgcccgaugaucugcuugag

SEQ ID NO: 118876 - RNA, 22 nt, Molluscum contagiosum virus
cgcgcucuuccguccgugcccg

SEQ ID NO: 118877 - RNA, 22 nt, Molluscum contagiosum virus
cgcggcaguccgagcuguucaa

SEQ ID NO: 118878 - RNA, 22 nt, Molluscum contagiosum virus
cgcgggagcggccuccggagaa

SEQ ID NO: 118879 - RNA, 22 nt, Molluscum contagiosum virus
cgcguaggccagcaccugagcc

SEQ ID NO: 118880 - RNA, 22 nt, Molluscum contagiosum virus
cgcuuccgaagcccaggccugg

SEQ ID NO: 118881 - RNA, 22 nt, Molluscum contagiosum virus
cggagacucgcgcaacagcgcu

SEQ ID NO: 118882 - RNA, 22 nt, Molluscum contagiosum virus
cgggcucagaaggcgucgggag

SEQ ID NO: 118883 - RNA, 22 nt, Molluscum contagiosum virus
cggugcacgcguagcacggcca

SEQ ID NO: 118884 - RNA, 19 nt, Molluscum contagiosum virus
cgugagggacagagucgcu

SEQ ID NO: 118885 - RNA, 22 nt, Molluscum contagiosum virus
cgugcucacggcagcguaaucc

SEQ ID NO: 118886 - RNA, 22 nt, Molluscum contagiosum virus
cguggucaagauccaagcgcaa

SEQ ID NO: 118887 - RNA, 22 nt, Molluscum contagiosum virus
cuccgcacacgugcucguugcc

SEQ ID NO: 118888 - RNA, 22 nt, Molluscum contagiosum virus
cuccucgggcaaggaggcgagc

SEQ ID NO: 118889 - RNA, 22 nt, Molluscum contagiosum virus
cucguggcguugcugcugcgcg

SEQ ID NO: 118890 - RNA, 22 nt, Molluscum contagiosum virus
cugcgcguacgccgcaugguug

SEQ ID NO: 118891 - RNA, 22 nt, Molluscum contagiosum virus
cuggacgacgugcagcaugcca

SEQ ID NO: 118892 - RNA, 22 nt, Molluscum contagiosum virus
gaaguucugcacagcacaggcc

SEQ ID NO: 118893 - RNA, 22 nt, Molluscum contagiosum virus
gacccaguggcguuugccguga

SEQ ID NO: 118894 - RNA, 22 nt, Molluscum contagiosum virus
gagaaagcugaugcccucguug

SEQ ID NO: 118895 - RNA, 22 nt, Molluscum contagiosum virus
gagauguuccccgagcucgacc

SEQ ID NO: 118896 - RNA, 22 nt, Molluscum contagiosum virus
gagcgagcgaacucgacaacgc

SEQ ID NO: 118897 - RNA, 22 nt, Molluscum contagiosum virus
gaugcgugcacgucgagcacgg

SEQ ID NO: 118898 - RNA, 22 nt, Molluscum contagiosum virus
gcacagcugcgggcugcggcua

SEQ ID NO: 118899 - RNA, 22 nt, Molluscum contagiosum virus
gcacgagcuggagcuggccuuc

SEQ ID NO: 118900 - RNA, 22 nt, Molluscum contagiosum virus
gcacgcuuuccuuugcggcgag

SEQ ID NO: 118901 - RNA, 20 nt, Molluscum contagiosum virus
gcagucguacgugagcaugc

SEQ ID NO: 118902 - RNA, 22 nt, Molluscum contagiosum virus
gcgcccugcgccgcacguaugg

SEQ ID NO: 118903 - RNA, 20 nt, Molluscum contagiosum virus
gcgcggacgcguuucuucgc

SEQ ID NO: 118904 - RNA, 22 nt, Molluscum contagiosum virus
gcgcugcuccgcucguucagca

SEQ ID NO: 118905 - RNA, 22 nt, Molluscum contagiosum virus
gcggcgcuaccugcacaaggag

SEQ ID NO: 118906 - RNA, 22 nt, Molluscum contagiosum virus
gcggucgacgggaacgagguca

SEQ ID NO: 118907 - RNA, 22 nt, Molluscum contagiosum virus
gcgucggacacguccagaaccu

SEQ ID NO: 118908 - RNA, 22 nt, Molluscum contagiosum virus
gcucagcauggaguuuugcaac

SEQ ID NO: 118909 - RNA, 22 nt, Molluscum contagiosum virus
gcuccgcguggcagugcgcggg

SEQ ID NO: 118910 - RNA, 22 nt, Molluscum contagiosum virus
gcugagcgcggagcuggcguug

SEQ ID NO: 118911 - RNA, 22 nt, Molluscum contagiosum virus
gcugaguauggacgugggcggc

SEQ ID NO: 118912 - RNA, 22 nt, Molluscum contagiosum virus
gcugcacgggucguagucgugc

SEQ ID NO: 118913 - RNA, 22 nt, Molluscum contagiosum virus
gcugccguccagguucagcgcg

SEQ ID NO: 118914 - RNA, 21 nt, Molluscum contagiosum virus
ggaagcgggcgagaucguggc

SEQ ID NO: 118915 - RNA, 22 nt, Molluscum contagiosum virus
ggacgcgucucaacgugggagu

SEQ ID NO: 118916 - RNA, 22 nt, Molluscum contagiosum virus
ggacgcucgugaggaaagcguu

SEQ ID NO: 118917 - RNA, 22 nt, Molluscum contagiosum virus
ggagaaaagggguuguaguccc

SEQ ID NO: 118918 - RNA, 22 nt, Molluscum contagiosum virus
ggcacgcuggcacuugcgggug

SEQ ID NO: 118919 - RNA, 22 nt, Molluscum contagiosum virus
ggcagcgaaacgcgugccucgc

SEQ ID NO: 118920 - RNA, 22 nt, Molluscum contagiosum virus
ggcgacaucuucaugguuacgg

SEQ ID NO: 118921 - RNA, 22 nt, Molluscum contagiosum virus
ggcguucgcagugcccgggggc

SEQ ID NO: 118922 - RNA, 22 nt, Molluscum contagiosum virus
ggcuccucgcgcagcgccacgu

SEQ ID NO: 118923 - RNA, 22 nt, Molluscum contagiosum virus
ggcuugcgcuuagaccuuuacg

SEQ ID NO: 118924 - RNA, 23 nt, Molluscum contagiosum virus
gggaagcgugucacuuuccgaug

SEQ ID NO: 118925 - RNA, 20 nt, Molluscum contagiosum virus
gguacacggccucuggcggc

SEQ ID NO: 118926 - RNA, 19 nt, Molluscum contagiosum virus
ggucgcguuccaggugcug

SEQ ID NO: 118927 - RNA, 22 nt, Molluscum contagiosum virus
ggucuaagcgcaagccagagcu

SEQ ID NO: 118928 - RNA, 22 nt, Molluscum contagiosum virus
ggugcucguacuccucaugaau

SEQ ID NO: 118929 - RNA, 22 nt, Molluscum contagiosum virus
guagcucuggaugugcucggug

SEQ ID NO: 118930 - RNA, 22 nt, Molluscum contagiosum virus
gucaaagaccgggcgguaguug

SEQ ID NO: 118931 - RNA, 22 nt, Molluscum contagiosum virus
guccugcgagcucgacaugucc

SEQ ID NO: 118932 - RNA, 18 nt, Molluscum contagiosum virus
gucgacugggcgcggcgc

SEQ ID NO: 118933 - RNA, 22 nt, Molluscum contagiosum virus
gucgcccaucacgucgaagauc

SEQ ID NO: 118934 - RNA, 22 nt, Molluscum contagiosum virus
gucugcuuuugcgucgcgcguu

SEQ ID NO: 118935 - RNA, 22 nt, Molluscum contagiosum virus
gugcgcuuugaggaacuagugc

SEQ ID NO: 118936 - RNA, 22 nt, Molluscum contagiosum virus
gugcgucgcugcgcgugguggg

SEQ ID NO: 118937 - RNA, 22 nt, Molluscum contagiosum virus
gugcuuggguucccguguaacc

SEQ ID NO: 118938 - RNA, 22 nt, Molluscum contagiosum virus
guuccagcuagaagaggccguc

SEQ ID NO: 118939 - RNA, 22 nt, Molluscum contagiosum virus
uagcucugcucgcucugcgaga

SEQ ID NO: 118940 - RNA, 22 nt, Molluscum contagiosum virus
uaugggcagcagcgagagcaug

SEQ ID NO: 118941 - RNA, 22 nt, Molluscum contagiosum virus
ucagcgcgaucucgaucgaaca

SEQ ID NO: 118942 - RNA, 22 nt, Molluscum contagiosum virus
uccacgaagcacagcaugcagu

SEQ ID NO: 118943 - RNA, 23 nt, Molluscum contagiosum virus
uccaggccacgucguugcggcac

SEQ ID NO: 118944 - RNA, 22 nt, Molluscum contagiosum virus
uccgcggacgcgggccuguccg

SEQ ID NO: 118945 - RNA, 19 nt, Molluscum contagiosum virus
ucgagcacgggcuuugcgu

SEQ ID NO: 118946 - RNA, 22 nt, Molluscum contagiosum virus
ucgcccguguucgcggagcugu

SEQ ID NO: 118947 - RNA, 22 nt, Molluscum contagiosum virus
aaugaaagacgugcugcugcug

SEQ ID NO: 118948 - RNA, 22 nt, Molluscum contagiosum virus
acagugcucgcaaaggagucgc

SEQ ID NO: 118949 - RNA, 22 nt, Molluscum contagiosum virus
accgagucggaccgcaucucgg

SEQ ID NO: 118950 - RNA, 22 nt, Molluscum contagiosum virus
agagcugcccgaguuucggaag

SEQ ID NO: 118951 - RNA, 22 nt, Molluscum contagiosum virus
agaucacgcuggaccuggcgca

SEQ ID NO: 118952 - RNA, 22 nt, Molluscum contagiosum virus
agaugcucauggacgcgcucgg

SEQ ID NO: 118953 - RNA, 22 nt, Molluscum contagiosum virus
agcgguagucggcgaugagccc

SEQ ID NO: 118954 - RNA, 22 nt, Molluscum contagiosum virus
agguccguguacccgcgcucgu

SEQ ID NO: 118955 - RNA, 22 nt, Molluscum contagiosum virus
aggucuucgccgcgggagaacu

SEQ ID NO: 118956 - RNA, 22 nt, Molluscum contagiosum virus
auggcggccagcguugcgccga

SEQ ID NO: 118957 - RNA, 23 nt, Molluscum contagiosum virus
auuucccugccggugcguuggca

SEQ ID NO: 118958 - RNA, 22 nt, Molluscum contagiosum virus
cacgccucaagcucgggcccag

SEQ ID NO: 118959 - RNA, 22 nt, Molluscum contagiosum virus
cacgcgcacgcucucgcuggcu

SEQ ID NO: 118960 - RNA, 22 nt, Molluscum contagiosum virus
cacgcgcagcucaaugagcgug

SEQ ID NO: 118961 - RNA, 22 nt, Molluscum contagiosum virus
cacugacaaggucuuucucgcg

SEQ ID NO: 118962 - RNA, 22 nt, Molluscum contagiosum virus
caucagguagcgcucguccacg

SEQ ID NO: 118963 - RNA, 22 nt, Molluscum contagiosum virus
caugggcucguccuguacuggc

SEQ ID NO: 118964 - RNA, 20 nt, Molluscum contagiosum virus
ccagcgccuguccgugggcg

SEQ ID NO: 118965 - RNA, 22 nt, Molluscum contagiosum virus
cccgagcucuucagcagcugca

SEQ ID NO: 118966 - RNA, 22 nt, Molluscum contagiosum virus
ccgcgugacgucuucucgcggg

SEQ ID NO: 118967 - RNA, 22 nt, Molluscum contagiosum virus
ccguuccugguagugcaccagg

SEQ ID NO: 118968 - RNA, 18 nt, Molluscum contagiosum virus
cgacaccuuccgagcccg

SEQ ID NO: 118969 - RNA, 18 nt, Molluscum contagiosum virus
cgacgccuucugagcccg

SEQ ID NO: 118970 - RNA, 22 nt, Molluscum contagiosum virus
cgagcagccgcgccgcacuguc

SEQ ID NO: 118971 - RNA, 22 nt, Molluscum contagiosum virus
cgccgacacgcgcgugcucauc

SEQ ID NO: 118972 - RNA, 18 nt, Molluscum contagiosum virus
cgccucaagcucgggccc

SEQ ID NO: 118973 - RNA, 22 nt, Molluscum contagiosum virus
cgcucgucuuccagagccugcg

SEQ ID NO: 118974 - RNA, 20 nt, Molluscum contagiosum virus
cgcugcguacguggucuugc

SEQ ID NO: 118975 - RNA, 22 nt, Molluscum contagiosum virus
cggacgcgggccuguccgcgga

SEQ ID NO: 118976 - RNA, 21 nt, Molluscum contagiosum virus
cggcccagcacgcgcggcucc

SEQ ID NO: 118977 - RNA, 18 nt, Molluscum contagiosum virus
cgggcgcgaccugcggcu

SEQ ID NO: 118978 - RNA, 22 nt, Molluscum contagiosum virus
cgucggacaggccuugcagacg

SEQ ID NO: 118979 - RNA, 22 nt, Molluscum contagiosum virus
cgugcgcaccugcgcaagaugu

SEQ ID NO: 118980 - RNA, 22 nt, Molluscum contagiosum virus
cgugcgccgcgcccagucgacc

SEQ ID NO: 118981 - RNA, 22 nt, Molluscum contagiosum virus
cuaggcguguccgcagcugugc

SEQ ID NO: 118982 - RNA, 22 nt, Molluscum contagiosum virus
cucccugcgcguacgccgcaug

SEQ ID NO: 118983 - RNA, 22 nt, Molluscum contagiosum virus
cucgcgcgucuccgcguagaau

SEQ ID NO: 118984 - RNA, 20 nt, Molluscum contagiosum virus
cucggcgcuaugccgcgugc

SEQ ID NO: 118985 - RNA, 22 nt, Molluscum contagiosum virus
cugccaugcccacauuggcgcc

SEQ ID NO: 118986 - RNA, 22 nt, Molluscum contagiosum virus
cuguucgcgcagagauguuguc

SEQ ID NO: 118987 - RNA, 17 nt, Molluscum contagiosum virus
cuucgcgcagcuuggcc

SEQ ID NO: 118988 - RNA, 20 nt, Molluscum contagiosum virus
gaccuucuggggcucgaguc

SEQ ID NO: 118989 - RNA, 22 nt, Molluscum contagiosum virus
gagccgcacaaagaacgcgcgu

SEQ ID NO: 118990 - RNA, 22 nt, Molluscum contagiosum virus
gcacgagcgaaaacgcgugucu

SEQ ID NO: 118991 - RNA, 20 nt, Molluscum contagiosum virus
gcagguccuccgugcugggc

SEQ ID NO: 118992 - RNA, 22 nt, Molluscum contagiosum virus
gccgcgacaucuuccgcuuccu

SEQ ID NO: 118993 - RNA, 22 nt, Molluscum contagiosum virus
gcgagcgccgugaacugugcag

SEQ ID NO: 118994 - RNA, 17 nt, Molluscum contagiosum virus
gcgcgccuuucccgucc

SEQ ID NO: 118995 - RNA, 22 nt, Molluscum contagiosum virus
gcgucgucgccguguuggaagu

SEQ ID NO: 118996 - RNA, 22 nt, Molluscum contagiosum virus
gcgugcuguggaagucgucaua

SEQ ID NO: 118997 - RNA, 22 nt, Molluscum contagiosum virus
gcguucccgcagcgccugcgga

SEQ ID NO: 118998 - RNA, 18 nt, Molluscum contagiosum virus
gcguucucggcaaugccc

SEQ ID NO: 118999 - RNA, 22 nt, Molluscum contagiosum virus
gcucagcaugauguacuugaug

SEQ ID NO: 119000 - RNA, 22 nt, Molluscum contagiosum virus
gcucauccaggcgccgcgcucg

SEQ ID NO: 119001 - RNA, 22 nt, Molluscum contagiosum virus
gcugcacaugugcgugcaccuc

SEQ ID NO: 119002 - RNA, 22 nt, Molluscum contagiosum virus
gcuggcgcucguagcucacgcg

SEQ ID NO: 119003 - RNA, 22 nt, Molluscum contagiosum virus
gcuuggcgggcagcggcgacga

SEQ ID NO: 119004 - RNA, 22 nt, Molluscum contagiosum virus
gcuuguguccaagcugggcugc

SEQ ID NO: 119005 - RNA, 22 nt, Molluscum contagiosum virus
ggaaaacgcccagaaugccgag

SEQ ID NO: 119006 - RNA, 22 nt, Molluscum contagiosum virus
ggaguagcgugcgccugcagcc

SEQ ID NO: 119007 - RNA, 22 nt, Molluscum contagiosum virus
ggaugccuuucaggggucuguc

SEQ ID NO: 119008 - RNA, 22 nt, Molluscum contagiosum virus
ggaugcuggugucgagcucgcg

SEQ ID NO: 119009 - RNA, 22 nt, Molluscum contagiosum virus
ggccugugcugugcagaacuuc

SEQ ID NO: 119010 - RNA, 22 nt, Molluscum contagiosum virus
ggccuucgcugccuucgaagag

SEQ ID NO: 119011 - RNA, 22 nt, Molluscum contagiosum virus
ggcucgaaaucugcgcgaggcc

SEQ ID NO: 119012 - RNA, 22 nt, Molluscum contagiosum virus
ggcucgggguuggcuuugugca

SEQ ID NO: 119013 - RNA, 22 nt, Molluscum contagiosum virus
ggcucguagauggcaggcacgu

SEQ ID NO: 119014 - RNA, 22 nt, Molluscum contagiosum virus
ggcugcagaaccgcgcgcugua

SEQ ID NO: 119015 - RNA, 22 nt, Molluscum contagiosum virus
gggaccggcaccugcuacuccc

SEQ ID NO: 119016 - RNA, 18 nt, Molluscum contagiosum virus
gggucuggucgcacggag

SEQ ID NO: 119017 - RNA, 22 nt, Molluscum contagiosum virus
gggugcagggcccuguuuugua

SEQ ID NO: 119018 - RNA, 22 nt, Molluscum contagiosum virus
gucgacugggcgcggcgcacgu

SEQ ID NO: 119019 - RNA, 22 nt, Molluscum contagiosum virus
gucggcgggcacggccagcguc

SEQ ID NO: 119020 - RNA, 22 nt, Molluscum contagiosum virus
gugagcacaguguagcgcgcgc

SEQ ID NO: 119021 - RNA, 22 nt, Molluscum contagiosum virus
gugccgucagcacccaccaaga

SEQ ID NO: 119022 - RNA, 18 nt, Molluscum contagiosum virus
gugcgcagcccgcugccc

SEQ ID NO: 119023 - RNA, 22 nt, Molluscum contagiosum virus
guggcaugcugcacgucgucca

SEQ ID NO: 119024 - RNA, 22 nt, Molluscum contagiosum virus
uacacguaguugaggucgcugc

SEQ ID NO: 119025 - RNA, 22 nt, Molluscum contagiosum virus
uacagccucuacacgcagaacg

SEQ ID NO: 119026 - RNA, 22 nt, Molluscum contagiosum virus
uacucggccacgcgguggugcg

SEQ ID NO: 119027 - RNA, 22 nt, Molluscum contagiosum virus
uaguuguagucgggcagcuugu

SEQ ID NO: 119028 - RNA, 20 nt, Molluscum contagiosum virus
ucauguggaugucgcaguag

SEQ ID NO: 119029 - RNA, 22 nt, Molluscum contagiosum virus
uccgcgggcgcgggccuguccg

SEQ ID NO: 119030 - RNA, 22 nt, Molluscum contagiosum virus
ucgcggcgccgcuguccuguga

SEQ ID NO: 119031 - RNA, 22 nt, Molluscum contagiosum virus
agcacguuguucuugcgcgugg

SEQ ID NO: 119032 - RNA, 22 nt, Molluscum contagiosum virus
agccgcgcugucgcugccugua

SEQ ID NO: 119033 - RNA, 22 nt, Molluscum contagiosum virus
agcgagauggcguugaugcugc

SEQ ID NO: 119034 - RNA, 22 nt, Molluscum contagiosum virus
agcgccgugaacugugcgacgc

SEQ ID NO: 119035 - RNA, 22 nt, Molluscum contagiosum virus
agcgcgaaaacacguuggagga

SEQ ID NO: 119036 - RNA, 22 nt, Molluscum contagiosum virus
agcgcgugagcuacgagcgcca

SEQ ID NO: 119037 - RNA, 22 nt, Molluscum contagiosum virus
aagggcucugccaccaugcgca

SEQ ID NO: 119038 - RNA, 20 nt, Molluscum contagiosum virus
accagugugaccaggucucc

SEQ ID NO: 119039 - RNA, 22 nt, Molluscum contagiosum virus
accccgagcugcggcgcgugcu

SEQ ID NO: 119040 - RNA, 22 nt, Molluscum contagiosum virus
acgugcucgauagcgcagagcu

SEQ ID NO: 119041 - RNA, 22 nt, Molluscum contagiosum virus
acguguucgaacugcucgcguu

SEQ ID NO: 119042 - RNA, 22 nt, Molluscum contagiosum virus
acugcgcagccgccgaguaugg

SEQ ID NO: 119043 - RNA, 22 nt, Molluscum contagiosum virus
agaagcuuuccaugccgcuccc

SEQ ID NO: 119044 - RNA, 22 nt, Molluscum contagiosum virus
agagaaacauguagaaggccag

SEQ ID NO: 119045 - RNA, 22 nt, Molluscum contagiosum virus
agcccgcaguauugcgcgagcc

SEQ ID NO: 119046 - RNA, 22 nt, Molluscum contagiosum virus
agcggcgacucuggcacguggu

SEQ ID NO: 119047 - RNA, 23 nt, Molluscum contagiosum virus
agcuugguguuauugacggcguc

SEQ ID NO: 119048 - RNA, 22 nt, Molluscum contagiosum virus
agugaaggucgcguuccaggug

SEQ ID NO: 119049 - RNA, 21 nt, Molluscum contagiosum virus
augcgcgccuuggcuagcagc

SEQ ID NO: 119050 - RNA, 22 nt, Molluscum contagiosum virus
auggccagcuucugcgccgcgc

SEQ ID NO: 119051 - RNA, 20 nt, Molluscum contagiosum virus
augucgcgcaucaccgagcg

SEQ ID NO: 119052 - RNA, 22 nt, Molluscum contagiosum virus
caaugcgugcgcccgucgccgu

SEQ ID NO: 119053 - RNA, 22 nt, Molluscum contagiosum virus
ccugcaugacgauguagcucuu

SEQ ID NO: 119054 - RNA, 22 nt, Molluscum contagiosum virus
ccuucgugcacgccuucgacgc

SEQ ID NO: 119055 - RNA, 22 nt, Molluscum contagiosum virus
ccuugcgcuugugcguacgcgc

SEQ ID NO: 119056 - RNA, 22 nt, Molluscum contagiosum virus
cgaggguggccacgucgagucu

SEQ ID NO: 119057 - RNA, 22 nt, Molluscum contagiosum virus
cgcagcacgcugagcguggcag

SEQ ID NO: 119058 - RNA, 22 nt, Molluscum contagiosum virus
cgccuggaaaccacgcuauccg

SEQ ID NO: 119059 - RNA, 22 nt, Molluscum contagiosum virus
cgcgagcgcuugcgaccugaag

SEQ ID NO: 119060 - RNA, 22 nt, Molluscum contagiosum virus
cgcguacaauguagcugccgau

SEQ ID NO: 119061 - RNA, 22 nt, Molluscum contagiosum virus
cgcgugugcggggcagcaggca

SEQ ID NO: 119062 - RNA, 22 nt, Molluscum contagiosum virus
cggacucgggcacaggcgugau

SEQ ID NO: 119063 - RNA, 22 nt, Molluscum contagiosum virus
cggccgcgagcagcuguggggg

SEQ ID NO: 119064 - RNA, 22 nt, Molluscum contagiosum virus
cgggccggaagcccacgauggc

SEQ ID NO: 119065 - RNA, 22 nt, Molluscum contagiosum virus
cggugcuggcgcgcgugcccug

SEQ ID NO: 119066 - RNA, 22 nt, Molluscum contagiosum virus
cgucaggcugggcgcgcgagcu

SEQ ID NO: 119067 - RNA, 22 nt, Molluscum contagiosum virus
cgugcccgagcacgcgugugug

SEQ ID NO: 119068 - RNA, 22 nt, Molluscum contagiosum virus
cgugcgguguugcucgaagggc

SEQ ID NO: 119069 - RNA, 22 nt, Molluscum contagiosum virus
cguggcgccgcugcuggaacag

SEQ ID NO: 119070 - RNA, 16 nt, Molluscum contagiosum virus
cguggcgcugcgcgag

SEQ ID NO: 119071 - RNA, 22 nt, Molluscum contagiosum virus
cuccgaugggucggucgugacu

SEQ ID NO: 119072 - RNA, 22 nt, Molluscum contagiosum virus
cucgaugacgcggcgguugcgc

SEQ ID NO: 119073 - RNA, 22 nt, Molluscum contagiosum virus
cucgcacacgcggaucuccuug

SEQ ID NO: 119074 - RNA, 22 nt, Molluscum contagiosum virus
cucgcgcaucugccgcgacucc

SEQ ID NO: 119075 - RNA, 22 nt, Molluscum contagiosum virus
cucugcgcuaucgagcacgucg

SEQ ID NO: 119076 - RNA, 22 nt, Molluscum contagiosum virus
cugcaugcugugcuucguggag

SEQ ID NO: 119077 - RNA, 22 nt, Molluscum contagiosum virus
cuggcgggcagcucugcuggca

SEQ ID NO: 119078 - RNA, 22 nt, Molluscum contagiosum virus
cugggagcaccgcguggcgcgc

SEQ ID NO: 119079 - RNA, 22 nt, Molluscum contagiosum virus
cugguguuuucguccauccacu

SEQ ID NO: 119080 - RNA, 22 nt, Molluscum contagiosum virus
cuucgccaaugacggcgucucu

SEQ ID NO: 119081 - RNA, 22 nt, Molluscum contagiosum virus
gaacgacacggagcggaucgug

SEQ ID NO: 119082 - RNA, 22 nt, Molluscum contagiosum virus
gacggcggguucucgucccgug

SEQ ID NO: 119083 - RNA, 22 nt, Molluscum contagiosum virus
gacguccuguagcaaggggucu

SEQ ID NO: 119084 - RNA, 22 nt, Molluscum contagiosum virus
gagcgcgagaagaaguacaucc

SEQ ID NO: 119085 - RNA, 22 nt, Molluscum contagiosum virus
gaggacgugcgcgagaacuacu

SEQ ID NO: 119086 - RNA, 22 nt, Molluscum contagiosum virus
gaggagaaaugucuugaucgug

SEQ ID NO: 119087 - RNA, 22 nt, Molluscum contagiosum virus
gaggauccgcauccucuaggcg

SEQ ID NO: 119088 - RNA, 22 nt, Molluscum contagiosum virus
gaggugcacgcagagcuggucg

SEQ ID NO: 119089 - RNA, 22 nt, Molluscum contagiosum virus
gaugaccucguucccgucgacc

SEQ ID NO: 119090 - RNA, 22 nt, Molluscum contagiosum virus
gcacagcucgcgcugcgucugc

SEQ ID NO: 119091 - RNA, 22 nt, Molluscum contagiosum virus
gcacgcgcgcgugucuuccagc

SEQ ID NO: 119092 - RNA, 22 nt, Molluscum contagiosum virus
gccgacgucaccgggcgcgcca

SEQ ID NO: 119093 - RNA, 19 nt, Molluscum contagiosum virus
gccgucgaugcgcaccagc

SEQ ID NO: 119094 - RNA, 19 nt, Molluscum contagiosum virus
gcgagcauguucugcgcga

SEQ ID NO: 119095 - RNA, 22 nt, Molluscum contagiosum virus
gcgaggcgcuggucucguucga

SEQ ID NO: 119096 - RNA, 22 nt, Molluscum contagiosum virus
gcgccacuugagacucgcaugu

SEQ ID NO: 119097 - RNA, 19 nt, Molluscum contagiosum virus
gcgccgugccuggccuggc

SEQ ID NO: 119098 - RNA, 23 nt, Molluscum contagiosum virus
gcgcgcagacguggugcucgugg

SEQ ID NO: 119099 - RNA, 22 nt, Molluscum contagiosum virus
gcgcgcggccauguguacgcag

SEQ ID NO: 119100 - RNA, 22 nt, Molluscum contagiosum virus
gcgcuggucacaugcacguacu

SEQ ID NO: 119101 - RNA, 22 nt, Molluscum contagiosum virus
gcguccagcuccagguuuagcu

SEQ ID NO: 119102 - RNA, 22 nt, Molluscum contagiosum virus
gcgucccggcucugcucgucca

SEQ ID NO: 119103 - RNA, 22 nt, Molluscum contagiosum virus
gcgugagccaauggacgccggg

SEQ ID NO: 119104 - RNA, 22 nt, Molluscum contagiosum virus
gcuccgcgggcgccauaaagag

SEQ ID NO: 119105 - RNA, 22 nt, Molluscum contagiosum virus
gcucgaucagguucgcggagug

SEQ ID NO: 119106 - RNA, 22 nt, Molluscum contagiosum virus
gcucuacggcgugcugugccug

SEQ ID NO: 119107 - RNA, 22 nt, Molluscum contagiosum virus
gcugcgaguacuuccuggaaug

SEQ ID NO: 119108 - RNA, 22 nt, Molluscum contagiosum virus
ggacgacgaguacgugcaugug

SEQ ID NO: 119109 - RNA, 22 nt, Molluscum contagiosum virus
ggagcagcggcucguagcuggu

SEQ ID NO: 119110 - RNA, 22 nt, Molluscum contagiosum virus
ggcgccucgagcgcgcuggacu

SEQ ID NO: 119111 - RNA, 22 nt, Molluscum contagiosum virus
ggcggaugcggacacguagacc

SEQ ID NO: 119112 - RNA, 22 nt, Molluscum contagiosum virus
ggcggaugucacgcagaagugg

SEQ ID NO: 119113 - RNA, 22 nt, Molluscum contagiosum virus
ggcguccuucuuugcgugcgcc

SEQ ID NO: 119114 - RNA, 23 nt, Molluscum contagiosum virus
ggcuugcgcuuagaccuuuacgu

SEQ ID NO: 119115 - RNA, 22 nt, Molluscum contagiosum virus
gggcagcguguagcggcacacc

SEQ ID NO: 119116 - RNA, 22 nt, Molluscum contagiosum virus
gggcgcgccgacgucaccgggc

SEQ ID NO: 119117 - RNA, 22 nt, Molluscum contagiosum virus
gggcguccgagggcgcgugccu

SEQ ID NO: 119118 - RNA, 22 nt, Molluscum contagiosum virus
gggcuugucggaauuucugucu

SEQ ID NO: 119119 - RNA, 22 nt, Molluscum contagiosum virus
gucgugcuccacgcgcagcuuc

SEQ ID NO: 119120 - RNA, 22 nt, Molluscum contagiosum virus
gucuagugcguccgcccuuacg

SEQ ID NO: 119121 - RNA, 22 nt, Molluscum contagiosum virus
gugcgcgucauuaaacuccagg

SEQ ID NO: 119122 - RNA, 22 nt, Molluscum contagiosum virus
uagugcucuuuguggaccgcgg

SEQ ID NO: 119123 - RNA, 20 nt, Molluscum contagiosum virus
uccaaguucaacaacgucuu

SEQ ID NO: 119124 - RNA, 18 nt, Molluscum contagiosum virus
uccagcagcaguguugcc

SEQ ID NO: 119125 - RNA, 21 nt, Molluscum contagiosum virus
ucgagaggucaugaugguaca

SEQ ID NO: 119126 - RNA, 22 nt, Molluscum contagiosum virus
ucgcuagcagugccgccuccuc

SEQ ID NO: 119127 - RNA, 22 nt, Molluscum contagiosum virus
ucggcaacgucggugcacguug

SEQ ID NO: 119128 - RNA, 22 nt, Molluscum contagiosum virus
ucggcgggcucggaaggugucg

SEQ ID NO: 119129 - RNA, 20 nt, Molluscum contagiosum virus
ucuacguguccgcauccgcc

SEQ ID NO: 119130 - RNA, 22 nt, Molluscum contagiosum virus
ucuccccggacggugcggucuu

SEQ ID NO: 119131 - RNA, 22 nt, Molluscum contagiosum virus
ucuguucgagaaccugcacgcg

SEQ ID NO: 119132 - RNA, 22 nt, Molluscum contagiosum virus
ugaugagcucgccguugguguu

SEQ ID NO: 119133 - RNA, 22 nt, Molluscum contagiosum virus
ugcuggccgcccuggcgcuguu

SEQ ID NO: 119134 - RNA, 19 nt, Molluscum contagiosum virus
uggaagaaucggacucgga

SEQ ID NO: 119135 - RNA, 22 nt, Molluscum contagiosum virus
uggccgugcccgccgacugccg

SEQ ID NO: 119136 - RNA, 22 nt, Molluscum contagiosum virus
aaagcggaaaaaugcacgcccg

SEQ ID NO: 119137 - RNA, 22 nt, Molluscum contagiosum virus
aacguuccgucgugugcuugcg

SEQ ID NO: 119138 - RNA, 22 nt, Molluscum contagiosum virus
aaggcgcacccucacaccuaga

SEQ ID NO: 119139 - RNA, 22 nt, Molluscum contagiosum virus
acauguccaagcugcaggaacg

SEQ ID NO: 119140 - RNA, 22 nt, Molluscum contagiosum virus
acguaaagacggcgauucgugc

SEQ ID NO: 119141 - RNA, 22 nt, Molluscum contagiosum virus
acguggcgggcaaggcgcgaca

SEQ ID NO: 119142 - RNA, 21 nt, Molluscum contagiosum virus
acuucgagaugaucucgcggc

SEQ ID NO: 119143 - RNA, 22 nt, Molluscum contagiosum virus
agagcccgugcaugugagccau

SEQ ID NO: 119144 - RNA, 22 nt, Molluscum contagiosum virus
agcgacucggacucgagcgacu

SEQ ID NO: 119145 - RNA, 22 nt, Molluscum contagiosum virus
agcgccuucuugaccagcacca

SEQ ID NO: 119146 - RNA, 22 nt, Molluscum contagiosum virus
agcucgcgcagcgcaucggggg

SEQ ID NO: 119147 - RNA, 22 nt, Molluscum contagiosum virus
aggagcacguuccugccgguga

SEQ ID NO: 119148 - RNA, 22 nt, Molluscum contagiosum virus
aggugcacgaccgcgcgcugcu

SEQ ID NO: 119149 - RNA, 22 nt, Molluscum contagiosum virus
aucagguagagcgcgcagccgg

SEQ ID NO: 119150 - RNA, 22 nt, Molluscum contagiosum virus
aucgagcccgagucuuccagcu

SEQ ID NO: 119151 - RNA, 20 nt, Molluscum contagiosum virus
aucuucguggagacggcgac

SEQ ID NO: 119152 - RNA, 22 nt, Molluscum contagiosum virus
augcaggcggagcagcugcugg

SEQ ID NO: 119153 - RNA, 22 nt, Molluscum contagiosum virus
auggccaccgggaugcgcaugg

SEQ ID NO: 119154 - RNA, 22 nt, Molluscum contagiosum virus
auggccccuugucuaguuggag

SEQ ID NO: 119155 - RNA, 22 nt, Molluscum contagiosum virus
caaugucugugugcgaucugga

SEQ ID NO: 119156 - RNA, 22 nt, Molluscum contagiosum virus
cagcaguagaaaaugcccagcc

SEQ ID NO: 119157 - RNA, 19 nt, Molluscum contagiosum virus
cagcagugccagcgcuguc

SEQ ID NO: 119158 - RNA, 22 nt, Molluscum contagiosum virus
cagcagugccagcgcuguccgc

SEQ ID NO: 119159 - RNA, 22 nt, Molluscum contagiosum virus
caugcacagccgcuuucugggc

SEQ ID NO: 119160 - RNA, 22 nt, Molluscum contagiosum virus
cauguggaugucgcaguagaug

SEQ ID NO: 119161 - RNA, 22 nt, Molluscum contagiosum virus
ccgcagugcucgcacacgugca

SEQ ID NO: 119162 - RNA, 22 nt, Molluscum contagiosum virus
ccggggugugccuuuuccuugu

SEQ ID NO: 119163 - RNA, 22 nt, Molluscum contagiosum virus
ugggcuacagacaggcacgcgc

SEQ ID NO: 119164 - RNA, 22 nt, Molluscum contagiosum virus
ugggcuccgugagcucguccga

SEQ ID NO: 119165 - RNA, 22 nt, Molluscum contagiosum virus
uggucuucuugccgcggcagcg

SEQ ID NO: 119166 - RNA, 22 nt, Molluscum contagiosum virus
uggugcacgaguccgcgggcgg

SEQ ID NO: 119167 - RNA, 22 nt, Molluscum contagiosum virus
ugguguagaggaagcgcaggug

SEQ ID NO: 119168 - RNA, 22 nt, Molluscum contagiosum virus
ugucaagcacggaaaggaagug

SEQ ID NO: 119169 - RNA, 22 nt, Molluscum contagiosum virus
uguccgagcgaaccgcggcagc

SEQ ID NO: 119170 - RNA, 22 nt, Molluscum contagiosum virus
ugugcacgcacgcgguugcgcc

SEQ ID NO: 119171 - RNA, 22 nt, Molluscum contagiosum virus
uguggacuccuugugcagguag

SEQ ID NO: 119172 - RNA, 22 nt, Molluscum contagiosum virus
uuugaacucuugcgagcggcaa

SEQ ID NO: 119173 - RNA, 22 nt, Molluscum contagiosum virus
uuuugcgggggcgcgcgaaugc

SEQ ID NO: 119174 - RNA, 22 nt, Molluscum contagiosum virus
ucgcgugugcggggcagcaggc

SEQ ID NO: 119175 - RNA, 21 nt, Molluscum contagiosum virus
ucggagggucggagccugagc

SEQ ID NO: 119176 - RNA, 22 nt, Molluscum contagiosum virus
ucggcgcaacgcuggccgccau

SEQ ID NO: 119177 - RNA, 19 nt, Molluscum contagiosum virus
ucuagcagcugcgccagcg

SEQ ID NO: 119178 - RNA, 22 nt, Molluscum contagiosum virus
ugaccuuguacugcacgugcuc

SEQ ID NO: 119179 - RNA, 22 nt, Molluscum contagiosum virus
ugcacgcuguccaggcgcugca

SEQ ID NO: 119180 - RNA, 22 nt, Molluscum contagiosum virus
ugcagcagcagcgcuuucaggu

SEQ ID NO: 119181 - RNA, 22 nt, Molluscum contagiosum virus
ugcaggccagugcgacguugcg

SEQ ID NO: 119182 - RNA, 22 nt, Molluscum contagiosum virus
ugcgcgcguggugugcuaccag

SEQ ID NO: 119183 - RNA, 22 nt, Molluscum contagiosum virus
ugcgugcccagcagguagcugg

SEQ ID NO: 119184 - RNA, 22 nt, Molluscum contagiosum virus
ugcuggcguucguucgcgccag

SEQ ID NO: 119185 - RNA, 22 nt, Molluscum contagiosum virus
uggaggacgugcacgggccagc

SEQ ID NO: 119186 - RNA, 22 nt, Molluscum contagiosum virus
uguccacguaccugucgagugc

SEQ ID NO: 119187 - RNA, 19 nt, Molluscum contagiosum virus
uguccugguucuuugcgcg

SEQ ID NO: 119188 - RNA, 22 nt, Molluscum contagiosum virus
ugucggucucgagcgccgccau

SEQ ID NO: 119189 - RNA, 21 nt, Molluscum contagiosum virus
ugugcgaggacguggcgcugc

SEQ ID NO: 119190 - RNA, 22 nt, Molluscum contagiosum virus
uuccaugcgcaacgugcugcgu

SEQ ID NO: 119191 - RNA, 22 nt, Molluscum contagiosum virus
uucguccaccagcgugugguug

SEQ ID NO: 119192 - RNA, 22 nt, Molluscum contagiosum virus
uuguaguugcgguggugcaucc

SEQ ID NO: 119193 - RNA, 22 nt, Molluscum contagiosum virus
ucgugcucuaggugugagggug

SEQ ID NO: 119194 - RNA, 22 nt, Molluscum contagiosum virus
ucucgacggggccguaguaggg

SEQ ID NO: 119195 - RNA, 17 nt, Molluscum contagiosum virus
ucugcgugacauccgcc

SEQ ID NO: 119196 - RNA, 21 nt, Molluscum contagiosum virus
ugaucguguccaaguucaaga

SEQ ID NO: 119197 - RNA, 22 nt, Molluscum contagiosum virus
ugaucguguccaaguucaagaa

SEQ ID NO: 119198 - RNA, 23 nt, Molluscum contagiosum virus
ugauggacauguacacgcgcgcg

SEQ ID NO: 119199 - RNA, 22 nt, Molluscum contagiosum virus
ugcacuacaaccauggcgcgcu

SEQ ID NO: 119200 - RNA, 22 nt, Molluscum contagiosum virus
ugccggcguccucuucccgcgg

SEQ ID NO: 119201 - RNA, 22 nt, Molluscum contagiosum virus
ugccuccugcacgcgguccauc

SEQ ID NO: 119202 - RNA, 22 nt, Molluscum contagiosum virus
ugcgagccauuaugcucggagu

SEQ ID NO: 119203 - RNA, 22 nt, Molluscum contagiosum virus
ugcgcgugaacaucggcagcgg

SEQ ID NO: 119204 - RNA, 22 nt, Molluscum contagiosum virus
ugcuaguccuagccgcgagccc

SEQ ID NO: 119205 - RNA, 20 nt, Molluscum contagiosum virus
ugcucgcucgugcugccggu

SEQ ID NO: 119206 - RNA, 22 nt, Molluscum contagiosum virus
ugcugcgcgccaguuuuccgug

SEQ ID NO: 119207 - RNA, 22 nt, Molluscum contagiosum virus
ugcuggucgucgccggcgccaa

SEQ ID NO: 119208 - RNA, 23 nt, Molluscum contagiosum virus
ugcuucuucgacgagcgcgcggg

SEQ ID NO: 119209 - RNA, 22 nt, Molluscum contagiosum virus
uggagaccggcggcucggaaug

SEQ ID NO: 119210 - RNA, 22 nt, Molluscum contagiosum virus
uggucgugcucgugcaccucgu

SEQ ID NO: 119211 - RNA, 22 nt, Molluscum contagiosum virus
uuacggacgcccuccucgaccu

SEQ ID NO: 119212 - RNA, 22 nt, Molluscum contagiosum virus
uucgggccuuaaaugaacacca

SEQ ID NO: 119213 - RNA, 22 nt, Molluscum contagiosum virus
uucuugaccuugaucgagaugu

SEQ ID NO: 119214 - RNA, 22 nt, Murray Valley encephalitis virus
ugcucauuuuuacgcuugccac

SEQ ID NO: 119215 - RNA, 22 nt, Murray Valley encephalitis virus
acagcuuggaugguguugcgag

SEQ ID NO: 119216 - RNA, 22 nt, Murray Valley encephalitis virus
gggaggcuuuccaaccguggag

SEQ ID NO: 119217 - RNA, 22 nt, Murray Valley encephalitis virus
ggggauauucgugcucuuccaa

SEQ ID NO: 119218 - RNA, 22 nt, Murray Valley encephalitis virus
uccauuguuggcagggacuccu

SEQ ID NO: 119219 - RNA, 22 nt, Norwalk virus
uggcaacaugugacaaugaaac

SEQ ID NO: 119220 - RNA, 22 nt, Norwalk virus
aguaagguugauuacagugcca

SEQ ID NO: 119221 - RNA, 22 nt, Poliovirus
caccuccugggagucaacugcu

SEQ ID NO: 119222 - RNA, 22 nt, Poliovirus
ggcccuguaagcguggcagggu

SEQ ID NO: 119223 - RNA, 22 nt, Poliovirus
cagcccugcuugguucgaggca

SEQ ID NO: 119224 - RNA, 22 nt, Poliovirus
cuuuaagagaugcuguccuuua

SEQ ID NO: 119225 - RNA, 22 nt, Respiratory syncytial virus
ugccuugauuucacagggugug

SEQ ID NO: 119226 - RNA, 22 nt, Rubella virus
acggcagcugauggugguggug

SEQ ID NO: 119227 - RNA, 22 nt, Rubella virus
cgugaugcuguggcacagggcg

SEQ ID NO: 119228 - RNA, 22 nt, Rubella virus
gcgagccagcaguuaugcaccu

SEQ ID NO: 119229 - RNA, 22 nt, Rubella virus
gcgcacgccuuuggggaccaug

SEQ ID NO: 119230 - RNA, 22 nt, Rubella virus
ucagccugacccgggccuccga

SEQ ID NO: 119231 - RNA, 22 nt, Rubella virus
uggggcacccggcacucgugua

SEQ ID NO: 119232 - RNA, 23 nt, Rubella virus
cgcgcgucccauggggcucacca

SEQ ID NO: 119233 - RNA, 22 nt, Rubella virus
gugccccaagugcgccuacggc

SEQ ID NO: 119234 - RNA, 22 nt, Rubella virus
uggcgagccagagggccgaggc

SEQ ID NO: 119235 - RNA, 22 nt, Rubella virus
agauggcaauugccucccccgg

SEQ ID NO: 119236 - RNA, 22 nt, Rubella virus
cauggccacggugguguugugc

SEQ ID NO: 119237 - RNA, 22 nt, Rubella virus
gcucgccgccuaccgccgcauc

SEQ ID NO: 119238 - RNA, 22 nt, Rubella virus
gugccgccaugauggccgucgu

SEQ ID NO: 119239 - RNA, 22 nt, Rubella virus
ucgaggucgacuucacugaguu

SEQ ID NO: 119240 - RNA, 20 nt, SARS coronavirus
aauaaauugccagaagcugc

SEQ ID NO: 119241 - RNA, 22 nt, SARS coronavirus
uuaacaauuuucuugaacuuac

SEQ ID NO: 119242 - RNA, 21 nt, SARS coronavirus
uuguccuccacuugcuaggua

SEQ ID NO: 119243 - RNA, 22 nt, SARS coronavirus
cacaaggcagaugggcuaugua

SEQ ID NO: 119244 - RNA, 22 nt, SARS coronavirus
cucuuaauggugaagcaaagua

SEQ ID NO: 119245 - RNA, 22 nt, SARS coronavirus
uacuagagcagcaacaaugaga

SEQ ID NO: 119246 - RNA, 22 nt, SARS coronavirus
uccaucauuaauaaugcuguuu

SEQ ID NO: 119247 - RNA, 22 nt, SARS coronavirus
auugugcagacaccuauuguag

SEQ ID NO: 119248 - RNA, 23 nt, SARS coronavirus
cucacgaauuuugcucacagcau

SEQ ID NO: 119249 - RNA, 22 nt, Seoul virus
aaagaugaaauuaugugcaauc

SEQ ID NO: 119250 - RNA, 20 nt, Seoul virus
ucauguggaguuugcuauua

SEQ ID NO: 119251 - RNA, 22 nt, Sin Nombre virus
uauaagaucacauuugauguug

SEQ ID NO: 119252 - RNA, 23 nt, Sin Nombre virus
auaacaaauuacugucuuccuug

SEQ ID NO: 119253 - RNA, 22 nt, Sin Nombre virus
auaagcaaugcuuuuauuauau

SEQ ID NO: 119254 - RNA, 22 nt, Tula virus
agcaugugcaauuagacauucu

SEQ ID NO: 119255 - RNA, 22 nt, Tula virus
ccauuuaagagugcacuugaug

SEQ ID NO: 119256 - RNA, 22 nt, Tula virus
accgagaagacucaaacacaga

SEQ ID NO: 119257 - RNA, 22 nt, Vaccinia virus
gaaaguguaaagacaacgaaua

SEQ ID NO: 119258 - RNA, 22 nt, Vaccinia virus
uguccgggaacauacgcuucca

SEQ ID NO: 119259 - RNA, 22 nt, Vaccinia virus
acaucgauucccauaugauguu

SEQ ID NO: 119260 - RNA, 22 nt, Vaccinia virus
gcuuugaguuuuguugaaucga

SEQ ID NO: 119261 - RNA, 20 nt, Vaccinia virus
ucgguugcaccuucagaugc

SEQ ID NO: 119262 - RNA, 22 nt, Variola virus
gucguaaagcguuaaaucaaua

SEQ ID NO: 119263 - RNA, 22 nt, West Nile virus
guggcugguugugcagagcaga

SEQ ID NO: 119264 - RNA, 22 nt, West Nile virus
guguucuagcaccaccagccac

SEQ ID NO: 119265 - RNA, 22 nt, B19 virus
aguuuugucuguaacauccuua

SEQ ID NO: 119266 - RNA, 22 nt, B19 virus
ggcagccauuuuaaguguuuca

SEQ ID NO: 119267 - RNA, 23 nt, Human
auaaugcaaguggugguaaucug

SEQ ID NO: 119268 - RNA, 22 nt, Human
gugcuugggggaaguaacagac

SEQ ID NO: 119269 - RNA, 22 nt, Human
ugggccacgugacccuuacccu

SEQ ID NO: 119270 - RNA, 22 nt, Human
cuucccacagaauucaaucagu

SEQ ID NO: 119271 - RNA, 22 nt, Human
uacaguagacaggaccacaggc

SEQ ID NO: 119272 - RNA, 22 nt, Human
gagggcugcuggaaaaaugcag

SEQ ID NO: 119273 - RNA, 22 nt, Human
aggcugagccugggcguggugg

SEQ ID NO: 119274 - RNA, 22 nt, Human
gucagcaccucuuuggggagcu

SEQ ID NO: 119275 - RNA, 20 nt, Human
ccugucucacguuccgcccc

SEQ ID NO: 119276 - RNA, 22 nt, Human
uuuaguauccuaucucauuuaa

SEQ ID NO: 119277 - RNA, 21 nt, Human
aggcagccagucaugcucccu

SEQ ID NO: 119278 - RNA, 22 nt, Human
gcugaguugaaagcagaggaua

SEQ ID NO: 119279 - RNA, 22 nt, Human
ugauuucuucuaauuuccauca

SEQ ID NO: 119280 - RNA, 22 nt, Human
uauuaggcauuugaggauaaac

SEQ ID NO: 119281 - RNA, 22 nt, Human
cacuguuuuauuccaacauagg

SEQ ID NO: 119282 - RNA, 22 nt, Human
caggacccaaccucccugcucu

SEQ ID NO: 119283 - RNA, 22 nt, Human
aggagggagcuuaagccaggca

SEQ ID NO: 119284 - RNA, 22 nt, Human
agaagccaugguaugcaacuac

SEQ ID NO: 119285 - RNA, 22 nt, Human
ucacaucaacauuauagcauga

SEQ ID NO: 119286 - RNA, 22 nt, Human
gagagaggccuccauguacuga

SEQ ID NO: 119287 - RNA, 23 nt, Human
cagaggguuccauggagcauggu

SEQ ID NO: 119288 - RNA, 22 nt, Human
agccagcaggugagugcagccu

SEQ ID NO: 119289 - RNA, 22 nt, Human
aacauuugaaaaucaagaaucu

SEQ ID NO: 119290 - RNA, 22 nt, Human
cagcacagaguauuuuauugau

SEQ ID NO: 119291 - RNA, 22 nt, Human
auuugucauauauaauacucuu

SEQ ID NO: 119292 - RNA, 22 nt, Human
ggagaugcuucuuguguuuauu

SEQ ID NO: 119293 - RNA, 22 nt, Human
ugaggcaggagaaucacaugaa

SEQ ID NO: 119294 - RNA, 22 nt, Human
aaaagaggagugguuuaugaca

SEQ ID NO: 119295 - RNA, 22 nt, Human
aaaugcaaggccaugugaagga

SEQ ID NO: 119296 - RNA, 20 nt, Human
aacauugcuucaauguaacc

SEQ ID NO: 119297 - RNA, 22 nt, Human
ugcacaguuggcuacaucgugg

SEQ ID NO: 119298 - RNA, 22 nt, Human
acaucagagggcucacaugauc

SEQ ID NO: 119299 - RNA, 22 nt, Human
aaacaugaugucauauaugcca

SEQ ID NO: 119300 - RNA, 22 nt, Human
uggcucaggaucuaagcagaau

SEQ ID NO: 119301 - RNA, 22 nt, Human
cggcagagcuuccugcucagcg

SEQ ID NO: 119302 - RNA, 22 nt, Human
gagggcaguagccucguacccu

SEQ ID NO: 119303 - RNA, 22 nt, Human
cuguugucccugggagcucagc

SEQ ID NO: 119304 - RNA, 22 nt, Human
aggaguggaauuacuggguucu

SEQ ID NO: 119305 - RNA, 22 nt, Human
agguauuaugcugcugaaugcu

SEQ ID NO: 119306 - RNA, 22 nt, Human
uacugugaauacaaaauaaauu

SEQ ID NO: 119307 - RNA, 22 nt, Human
cagagcccagggccuacguccc

SEQ ID NO: 119308 - RNA, 22 nt, Human
ugagaagcagcuuacagguguc

SEQ ID NO: 119309 - RNA, 22 nt, Human
ugaggcucagaagugccaagug

SEQ ID NO: 119310 - RNA, 23 nt, Human
cccagaccuugugcugcccuugg

SEQ ID NO: 119311 - RNA, 23 nt, Human
gcugggcuuacucuuucagugag

SEQ ID NO: 119312 - RNA, 16 nt, Human
aggcucagaggcugga

SEQ ID NO: 119313 - RNA, 22 nt, Human
cagauggaacacagaaaggaga

SEQ ID NO: 119314 - RNA, 22 nt, Human
cucugguucagggcucccuggc

SEQ ID NO: 119315 - RNA, 22 nt, Human
cagaggcaaaagagguggaggu

SEQ ID NO: 119316 - RNA, 21 nt, Human
caaagccaggcaacucucucc

SEQ ID NO: 119317 - RNA, 18 nt, Human
gagcagaggcucaacugg

SEQ ID NO: 119318 - RNA, 22 nt, Human
agguuuauuaaguaaauagagc

SEQ ID NO: 119319 - RNA, 22 nt, Human
cagagugaaauaggggaucaag

SEQ ID NO: 119320 - RNA, 22 nt, Human
uuuguucacauuuaggacucuc

SEQ ID NO: 119321 - RNA, 22 nt, Human
aaguggaggccgaguucacgca

SEQ ID NO: 119322 - RNA, 22 nt, Human
ugcaggcuggaggagggacuaa

SEQ ID NO: 119323 - RNA, 18 nt, Human
cuucagugacagucuggc

SEQ ID NO: 119324 - RNA, 22 nt, Human
gaggucaugcaaaauugaauca

SEQ ID NO: 119325 - RNA, 19 nt, Human
ccagguggaacugagguag

SEQ ID NO: 119326 - RNA, 22 nt, Human
gagucgagcagaaagccgucgg

SEQ ID NO: 119327 - RNA, 21 nt, Human
ucacuacaauguucucuuaua

SEQ ID NO: 119328 - RNA, 22 nt, Human
uuuacaaguuuacagaaugaug

SEQ ID NO: 119329 - RNA, 22 nt, Human
aaaugcagauugucauucagga

SEQ ID NO: 119330 - RNA, 22 nt, Human
uaacugauauugaaaaacauca

SEQ ID NO: 119331 - RNA, 18 nt, Human
cccagccucuccuuucua

SEQ ID NO: 119332 - RNA, 22 nt, Human
acuuaaaaagaaucuuuucacg

SEQ ID NO: 119333 - RNA, 22 nt, Human
aaugcacauaaauauggucuua

SEQ ID NO: 119334 - RNA, 22 nt, Human
acuugaauuauauuucuagaga

SEQ ID NO: 119335 - RNA, 22 nt, Human
cugugaccuccaggaaggggug

SEQ ID NO: 119336 - RNA, 22 nt, Human
aaggugucggcagagccgcuuc

SEQ ID NO: 119337 - RNA, 22 nt, Human
acauuugacucuguucauauua

SEQ ID NO: 119338 - RNA, 22 nt, Human
uggcagcaguagccaccccagc

SEQ ID NO: 119339 - RNA, 22 nt, Human
agggccaccagagcagggcagu

SEQ ID NO: 119340 - RNA, 19 nt, Human
ugggaguggggaagguccu

SEQ ID NO: 119341 - RNA, 22 nt, Human
ugcagggccaugguggcggcug

SEQ ID NO: 119342 - RNA, 18 nt, Human
uggcaggaaaugcacuuu

SEQ ID NO: 119343 - RNA, 22 nt, Human
acaguggaauuuguagaugugu

SEQ ID NO: 119344 - RNA, 22 nt, Human
uaugaacauugaagaggagccc

SEQ ID NO: 119345 - RNA, 22 nt, Human
uacaugaauguuucaauauugu

SEQ ID NO: 119346 - RNA, 22 nt, Human
aaagaggauggaguagucagcu

SEQ ID NO: 119347 - RNA, 23 nt, Human
agggcugaaugcagagaagcaga

SEQ ID NO: 119348 - RNA, 22 nt, Human
acagccugcugccugcuucuug

SEQ ID NO: 119349 - RNA, 22 nt, Human
uaguggagaaguggagucugug

SEQ ID NO: 119350 - RNA, 22 nt, Human
aggucaggguauucacgucugu

SEQ ID NO: 119351 - RNA, 22 nt, Human
cugaggcuggcguuugaggaag

SEQ ID NO: 119352 - RNA, 22 nt, Human
cagcagugucuccagcaucaca

SEQ ID NO: 119353 - RNA, 22 nt, Human
aagguauuggggaauauuugac

SEQ ID NO: 119354 - RNA, 22 nt, Human
cacucacuuauuucuaacagaa

SEQ ID NO: 119355 - RNA, 22 nt, Human
augauauauguguugagcuugc

SEQ ID NO: 119356 - RNA, 22 nt, Human
caggaggcaucauggagcggac

SEQ ID NO: 119357 - RNA, 22 nt, Human
gagccagggcugugagcugagc

SEQ ID NO: 119358 - RNA, 22 nt, Human
uacaguucuuugaaggaucuag

SEQ ID NO: 119359 - RNA, 22 nt, Human
gggcugagucaucuggggccuc

SEQ ID NO: 119360 - RNA, 22 nt, Human
agcagccaggaaucugcagagc

SEQ ID NO: 119361 - RNA, 22 nt, Human
acaguggaguugggguagcccu

SEQ ID NO: 119362 - RNA, 22 nt, Human
uaagacauuugaaaugugaucc

SEQ ID NO: 119363 - RNA, 22 nt, Human
ucugugcacaauaggcauuuuu

SEQ ID NO: 119364 - RNA, 22 nt, Human
ucagaagguggagguugcagug

SEQ ID NO: 119365 - RNA, 22 nt, Human
gaggcugguucugaaguacugu

SEQ ID NO: 119366 - RNA, 22 nt, Human
gaaggaagucauuagugcagac

SEQ ID NO: 119367 - RNA, 22 nt, Human
aguggcagccgagcaggagaug

SEQ ID NO: 119368 - RNA, 22 nt, Human
aacagugcugcauucauugagc

SEQ ID NO: 119369 - RNA, 22 nt, Human
augaggcaaucaugguccaguu

SEQ ID NO: 119370 - RNA, 22 nt, Human
cuauuauuuccucaucuauaaa

SEQ ID NO: 119371 - RNA, 22 nt, Human
acagcuguggggacucuugccc

SEQ ID NO: 119372 - RNA, 22 nt, Human
acacuguguggucucucucgga

SEQ ID NO: 119373 - RNA, 22 nt, Human
guuauuuucauuggcucagacu

SEQ ID NO: 119374 - RNA, 22 nt, Human
aauaacagagucuucaagauag

SEQ ID NO: 119375 - RNA, 22 nt, Human
ugaaggcauugaugaaggaauc

SEQ ID NO: 119376 - RNA, 22 nt, Human
acuguggccugcuguaugggcu

SEQ ID NO: 119377 - RNA, 22 nt, Human
uggagaaggccggccaggagug

SEQ ID NO: 119378 - RNA, 22 nt, Human
uugccucccagcaugggcagcu

SEQ ID NO: 119379 - RNA, 22 nt, Human
caccaggugcuggaggacauca

SEQ ID NO: 119380 - RNA, 22 nt, Human
cuaaacauggcuuagaacacuc

SEQ ID NO: 119381 - RNA, 22 nt, Human
acagaggccgccucucucacgg

SEQ ID NO: 119382 - RNA, 22 nt, Human
ggcugaaggaugaaagcugcag

SEQ ID NO: 119383 - RNA, 19 nt, Human
cagauguuuucaguucauu

SEQ ID NO: 119384 - RNA, 22 nt, Human
guggcacagugggagagcccca

SEQ ID NO: 119385 - RNA, 22 nt, Human
gcaggagccaggccgagcuggu

SEQ ID NO: 119386 - RNA, 22 nt, Human
gcaccaggaggcccuucucauc

SEQ ID NO: 119387 - RNA, 22 nt, Human
ccagggcuccauugcucauccu

SEQ ID NO: 119388 - RNA, 22 nt, Human
gggcugagcuaagcuggguuga

SEQ ID NO: 119389 - RNA, 19 nt, Human
aggagaaguagcagaaauu

SEQ ID NO: 119390 - RNA, 22 nt, Human
cagugcagguggcagaggacag

SEQ ID NO: 119391 - RNA, 22 nt, Human
ggcagaggaggggugaauuugc

SEQ ID NO: 119392 - RNA, 22 nt, Human
caguggaagcuggcugugaaga

SEQ ID NO: 119393 - RNA, 22 nt, Human
cuggagcagcagguggccaggg

SEQ ID NO: 119394 - RNA, 21 nt, Human
gcagaugggagucaucaggcu

SEQ ID NO: 119395 - RNA, 22 nt, Human
acaguggaggccauaugguccu

SEQ ID NO: 119396 - RNA, 22 nt, Human
acaguggauauauuaaaugaga

SEQ ID NO: 119397 - RNA, 22 nt, Human
uuauacauguguuuugagauga

SEQ ID NO: 119398 - RNA, 22 nt, Human
gcugggcaggccucgugagggc

SEQ ID NO: 119399 - RNA, 22 nt, Human
aagauuauggcagauaacaauu

SEQ ID NO: 119400 - RNA, 22 nt, Human
aggcccagagcaggaaaggguu

SEQ ID NO: 119401 - RNA, 22 nt, Human
uagaaacccauguuuauucagu

SEQ ID NO: 119402 - RNA, 22 nt, Human
ucugugcaggaagucauuauga

SEQ ID NO: 119403 - RNA, 22 nt, Human
cugugacuguguuggaugcaca

SEQ ID NO: 119404 - RNA, 22 nt, Human
aaggaggagcggaggcuuguug

SEQ ID NO: 119405 - RNA, 22 nt, Human
caggagaagucucuagggggug

SEQ ID NO: 119406 - RNA, 22 nt, Human
ccccuuccuuccucagacagcc

SEQ ID NO: 119407 - RNA, 22 nt, Human
uacaacaguucaugaaaugaaa

SEQ ID NO: 119408 - RNA, 22 nt, Human
ugggcaggcaagugaauaccuu

SEQ ID NO: 119409 - RNA, 22 nt, Human
agugagcaguacuuacuccugc

SEQ ID NO: 119410 - RNA, 22 nt, Human
aggcugaggggcgagggacccu

SEQ ID NO: 119411 - RNA, 22 nt, Human
aggauuaaaguauauuuuugag

SEQ ID NO: 119412 - RNA, 18 nt, Human
ccgggcuuuggugacaca

SEQ ID NO: 119413 - RNA, 22 nt, Human
gcacacacaugugaguacaugc

SEQ ID NO: 119414 - RNA, 22 nt, Human
cugccaggcacgugcagcauca

SEQ ID NO: 119415 - RNA, 22 nt, Human
ucauccaguaugacuggugucu

SEQ ID NO: 119416 - RNA, 22 nt, Human
cacauuuaagugcuuguucaga

SEQ ID NO: 119417 - RNA, 18 nt, Human
uacaggaagggguucucg

SEQ ID NO: 119418 - RNA, 20 nt, Human
ucucugagcuucucuugggg

SEQ ID NO: 119419 - RNA, 22 nt, Human
aaauacuggcaagugcuaauuc

SEQ ID NO: 119420 - RNA, 22 nt, Human
uggcagaggaaaaagucacugg

SEQ ID NO: 119421 - RNA, 22 nt, Human
gaaugcagauggcugguguaug

SEQ ID NO: 119422 - RNA, 22 nt, Human
caggaggcccaaagggcgcaga

SEQ ID NO: 119423 - RNA, 20 nt, Human
uaaacaguauuuacuaggag

SEQ ID NO: 119424 - RNA, 22 nt, Human
auucaguuucauggcacagcua

SEQ ID NO: 119425 - RNA, 22 nt, Human
cagguauucauagaauucagag

SEQ ID NO: 119426 - RNA, 22 nt, Human
ucaccccuacauuucccuugcu

SEQ ID NO: 119427 - RNA, 22 nt, Human
ugucauacaacaauaaguaccg

SEQ ID NO: 119428 - RNA, 22 nt, Human
auagaaauguauuuuggacuag

SEQ ID NO: 119429 - RNA, 22 nt, Human
ggagaugcgacucgcggggcug

SEQ ID NO: 119430 - RNA, 22 nt, Human
augaggcucucaggggagcugu

SEQ ID NO: 119431 - RNA, 17 nt, Human
ucaggcugggugcagug

SEQ ID NO: 119432 - RNA, 22 nt, Human
gagggcugugaaggagcggguu

SEQ ID NO: 119433 - RNA, 22 nt, Human
agaagagccuggggaccauggc

SEQ ID NO: 119434 - RNA, 22 nt, Human
ggugaagggccuuaggagacag

SEQ ID NO: 119435 - RNA, 22 nt, Human
agggccagaguacaucagggcu

SEQ ID NO: 119436 - RNA, 22 nt, Human
ggcagccaugcacgcugccugg

SEQ ID NO: 119437 - RNA, 22 nt, Human
aguacaugcagaacuaacagau

SEQ ID NO: 119438 - RNA, 22 nt, Human
ugcaaauagccugaugaaagaa

SEQ ID NO: 119439 - RNA, 22 nt, Human
uacaggcauguagcauggugau

SEQ ID NO: 119440 - RNA, 22 nt, Human
uuauagcagcaugauuuacaau

SEQ ID NO: 119441 - RNA, 22 nt, Human
auguuuuauguuccacucaagg

SEQ ID NO: 119442 - RNA, 22 nt, Human
uugcagagccaugaggcuggcu

SEQ ID NO: 119443 - RNA, 22 nt, Human
uugaaaggaauacagaggccua

SEQ ID NO: 119444 - RNA, 21 nt, Human
ucagggcagugggagguuccu

SEQ ID NO: 119445 - RNA, 22 nt, Human
ucucugagcgcauuccuccggc

SEQ ID NO: 119446 - RNA, 22 nt, Human
augcugugucaccuuaggauuu

SEQ ID NO: 119447 - RNA, 22 nt, Human
augcaagauguauagaagacuu

SEQ ID NO: 119448 - RNA, 22 nt, Human
cauaauuugugguaguggggga

SEQ ID NO: 119449 - RNA, 22 nt, Human
cugcuguguuggcauuggauag

SEQ ID NO: 119450 - RNA, 22 nt, Human
acacacuuuaaauuaaaccucu

SEQ ID NO: 119451 - RNA, 22 nt, Human
ugcaauacauacuuagacccag

SEQ ID NO: 119452 - RNA, 22 nt, Human
gccagguguaguggccacaccu

SEQ ID NO: 119453 - RNA, 22 nt, Human
cuugauauuuuaaacauacagu

SEQ ID NO: 119454 - RNA, 22 nt, Human
auuugcaaugauuucagugcuu

SEQ ID NO: 119455 - RNA, 21 nt, Human
ugcaggaaagugcugcgaccc

SEQ ID NO: 119456 - RNA, 22 nt, Human
gcaugagggggguuaggaaguu

SEQ ID NO: 119457 - RNA, 22 nt, Human
ucucucugccaacucacagcca

SEQ ID NO: 119458 - RNA, 22 nt, Human
augaacaauaaaauagaucaca

SEQ ID NO: 119459 - RNA, 22 nt, Human
gggagaaguggaaaucucauua

SEQ ID NO: 119460 - RNA, 22 nt, Human
gaaggcugagcagacaggccaa

SEQ ID NO: 119461 - RNA, 22 nt, Human
ugcugugcuccauugucuucac

SEQ ID NO: 119462 - RNA, 22 nt, Human
aaggaagaagacucuuuacucc

SEQ ID NO: 119463 - RNA, 22 nt, Human
gggaagggagggccuccaguca

SEQ ID NO: 119464 - RNA, 22 nt, Human
uuguuaaaaauagauuuccagg

SEQ ID NO: 119465 - RNA, 22 nt, Human
gcgagccucuggaguccucugg

SEQ ID NO: 119466 - RNA, 22 nt, Human
gauaaacaugaaguucugugua

SEQ ID NO: 119467 - RNA, 22 nt, Human
acaugcauacacguacauaccu

SEQ ID NO: 119468 - RNA, 22 nt, Human
gcagggaagacccggagcagcg

SEQ ID NO: 119469 - RNA, 22 nt, Human
cugggggucgcgccucugggca

SEQ ID NO: 119470 - RNA, 22 nt, Human
aacaugaaguuuucuauaguga

SEQ ID NO: 119471 - RNA, 20 nt, Human
caucuugaaggucuuccaca

SEQ ID NO: 119472 - RNA, 22 nt, Human
ugaaggagggaagaaggcucug

SEQ ID NO: 119473 - RNA, 22 nt, Human
augaggcagguggaggcugcca

SEQ ID NO: 119474 - RNA, 17 nt, Human
ugaugcaaagucagcug

SEQ ID NO: 119475 - RNA, 22 nt, Human
ccugucucuguuaccacauuug

SEQ ID NO: 119476 - RNA, 22 nt, Human
ugaggaaguuguuucucuucua

SEQ ID NO: 119477 - RNA, 22 nt, Human
ccugagugcuuccagagucaug

SEQ ID NO: 119478 - RNA, 22 nt, Human
aggcaggaacccugugugcgcc

SEQ ID NO: 119479 - RNA, 22 nt, Human
acuggacagaggaaauauggag

SEQ ID NO: 119480 - RNA, 22 nt, Human
acaguggaaaugugggagggga

SEQ ID NO: 119481 - RNA, 22 nt, Human
aacauguugcuuuaauaauauu

SEQ ID NO: 119482 - RNA, 22 nt, Human
auaugcaagcacauagaauacu

SEQ ID NO: 119483 - RNA, 22 nt, Human
uccagcuugccuggucuuuugg

SEQ ID NO: 119484 - RNA, 22 nt, Human
acauuugagcaucuacuaagug

SEQ ID NO: 119485 - RNA, 22 nt, Human
ugcaggcugggaagagggacaa

SEQ ID NO: 119486 - RNA, 22 nt, Human
cuacaguaugaaaccuuuacuc

SEQ ID NO: 119487 - RNA, 23 nt, Human
uucuucauuuucagaguugagca

SEQ ID NO: 119488 - RNA, 22 nt, Human
ucacaucacccugcucuuaauu

SEQ ID NO: 119489 - RNA, 22 nt, Human
augggcaguguauuggaaggaa

SEQ ID NO: 119490 - RNA, 22 nt, Human
ugcgggucaucagggagaacgu

SEQ ID NO: 119491 - RNA, 22 nt, Human
cuugcuacuaugccuggcuaau

SEQ ID NO: 119492 - RNA, 22 nt, Human
aaacaugaauagauauuaaaca

SEQ ID NO: 119493 - RNA, 22 nt, Human
gcaggagcuggaaagugauguu

SEQ ID NO: 119494 - RNA, 22 nt, Human
acacagugccaaauugcaguua

SEQ ID NO: 119495 - RNA, 16 nt, Human
cagccugcagugguca

SEQ ID NO: 119496 - RNA, 22 nt, Human
agaugcagaguugcuuaagcau

SEQ ID NO: 119497 - RNA, 22 nt, Human
uuuguucaugccuauauucuca

SEQ ID NO: 119498 - RNA, 22 nt, Human
aaauuggauugggagaauguga

SEQ ID NO: 119499 - RNA, 22 nt, Human
agaagccaaaugccagugaccu

SEQ ID NO: 119500 - RNA, 22 nt, Human
ccugugcaauguugagguuuca

SEQ ID NO: 119501 - RNA, 22 nt, Human
uggcucagagcagggacucugg

SEQ ID NO: 119502 - RNA, 22 nt, Human
aggcucagagaugaguaagcac

SEQ ID NO: 119503 - RNA, 22 nt, Human
gugugcagcagagacaggacuc

SEQ ID NO: 119504 - RNA, 22 nt, Human
ucaggcaggcucagaggaaaac

SEQ ID NO: 119505 - RNA, 22 nt, Human
ggagugaaguggcgcgaucucg

SEQ ID NO: 119506 - RNA, 22 nt, Human
acagcuguauccccagagcuca

SEQ ID NO: 119507 - RNA, 22 nt, Human
uucaucugcugguuuuuggcau

SEQ ID NO: 119508 - RNA, 22 nt, Human
ggcaggcaagucugcucuguga

SEQ ID NO: 119509 - RNA, 21 nt, Human
gcagaauagucucugucuuca

SEQ ID NO: 119510 - RNA, 22 nt, Human
gggcugagagugacuguucugu

SEQ ID NO: 119511 - RNA, 22 nt, Human
gaacuguaguuaauacuacaca

SEQ ID NO: 119512 - RNA, 22 nt, Human
uucauaugcagauuaacaaaua

SEQ ID NO: 119513 - RNA, 22 nt, Human
aaugcacagcuaaagugguucc

SEQ ID NO: 119514 - RNA, 22 nt, Human
ucacauuuuaucugagauugac

SEQ ID NO: 119515 - RNA, 22 nt, Human
uaggcucagggcugggugacgg

SEQ ID NO: 119516 - RNA, 23 nt, Human
uuuugcaauaagucacuggaaua

SEQ ID NO: 119517 - RNA, 22 nt, Human
ucaggcugaggucaucugcauc

SEQ ID NO: 119518 - RNA, 22 nt, Human
ugccaggcuuuggucaaaggcu

SEQ ID NO: 119519 - RNA, 22 nt, Human
ugcucauugcugauuuacaugu

SEQ ID NO: 119520 - RNA, 20 nt, Human
aguggcaggcgaucauuacu

SEQ ID NO: 119521 - RNA, 22 nt, Human
cuaguugaagaggcugucauca

SEQ ID NO: 119522 - RNA, 22 nt, Human
cauaacauccuugcuacuuuga

SEQ ID NO: 119523 - RNA, 22 nt, Human
agggcaugaagcaguggacagc

SEQ ID NO: 119524 - RNA, 22 nt, Human
guccuuugaaggcaaaaggaga

SEQ ID NO: 119525 - RNA, 22 nt, Human
guaaacaggaauguggucaugg

SEQ ID NO: 119526 - RNA, 22 nt, Human
cagaauaaagguacaauugagu

SEQ ID NO: 119527 - RNA, 22 nt, Human
aggcagagcuaggaagaauugu

SEQ ID NO: 119528 - RNA, 22 nt, Human
gagcagugacuggagcaugaga

SEQ ID NO: 119529 - RNA, 22 nt, Human
aggcugaggcagguggaucacu

SEQ ID NO: 119530 - RNA, 22 nt, Human
cuggagugaagcuuauuuuuca

SEQ ID NO: 119531 - RNA, 22 nt, Human
uauuuguauguguguacauaua

SEQ ID NO: 119532 - RNA, 22 nt, Human
gaggcagagacuccaccuucag

SEQ ID NO: 119533 - RNA, 22 nt, Human
aggugcagaaaaaaguccuuua

SEQ ID NO: 119534 - RNA, 22 nt, Human
uguguccuuuggaggaucagcg

SEQ ID NO: 119535 - RNA, 22 nt, Human
gcacaugguaggcauuugaugu

SEQ ID NO: 119536 - RNA, 22 nt, Human
aauuugauuuucuuaaaccaua

SEQ ID NO: 119537 - RNA, 22 nt, Human
uacaggcacugaaaugcuuauu

SEQ ID NO: 119538 - RNA, 22 nt, Human
agagaugcuguggguagaggca

SEQ ID NO: 119539 - RNA, 22 nt, Human
agggaggaucugcuccuugucu

SEQ ID NO: 119540 - RNA, 22 nt, Human
auguaaacuuagauaagcagua

SEQ ID NO: 119541 - RNA, 22 nt, Human
acaguggagcucagaugaaaau

SEQ ID NO: 119542 - RNA, 22 nt, Human
gggcgccgugggaaacagccgg

SEQ ID NO: 119543 - RNA, 22 nt, Human
ugagcagaggaggcugccaacu

SEQ ID NO: 119544 - RNA, 22 nt, Human
agaauaaacugcuuuagggcag

SEQ ID NO: 119545 - RNA, 22 nt, Human
gcaccugggacccagaggcacc

SEQ ID NO: 119546 - RNA, 22 nt, Human
uggcucauucuggggaagucag

SEQ ID NO: 119547 - RNA, 21 nt, Human
aucaccagcagaagcugcaga

SEQ ID NO: 119548 - RNA, 22 nt, Human
caaaugaagggagcugaagucu

SEQ ID NO: 119549 - RNA, 22 nt, Human
aaaggucuuaagguuaagcagg

SEQ ID NO: 119550 - RNA, 22 nt, Human
caggcugggcuccggagauaaa

SEQ ID NO: 119551 - RNA, 22 nt, Human
aggcaggugcuuaugacuugcu

SEQ ID NO: 119552 - RNA, 22 nt, Human
gccugagaguugaaguucagug

SEQ ID NO: 119553 - RNA, 22 nt, Human
guauuauuggguaguaugguaa

SEQ ID NO: 119554 - RNA, 22 nt, Human
agaagugagugugacucagcag

SEQ ID NO: 119555 - RNA, 22 nt, Human
ucccaggguuacagccagggca

SEQ ID NO: 119556 - RNA, 22 nt, Human
acugugcaugguauccuugaug

SEQ ID NO: 119557 - RNA, 22 nt, Human
ugcagggacacgaagacaaaua

SEQ ID NO: 119558 - RNA, 22 nt, Human
gaguccaguuagugaggcuggg

SEQ ID NO: 119559 - RNA, 22 nt, Human
cagugcagguuuagggcugggg

SEQ ID NO: 119560 - RNA, 22 nt, Human
ccaucccuucaccacagcagua

SEQ ID NO: 119561 - RNA, 22 nt, Human
ucauuuguucucauucucuacu

SEQ ID NO: 119562 - RNA, 22 nt, Human
ucaggcagaaaaaucacuaauu

SEQ ID NO: 119563 - RNA, 20 nt, Human
cagaggcaaggagacuugga

SEQ ID NO: 119564 - RNA, 22 nt, Human
cucagccccaauucuccccauu

SEQ ID NO: 119565 - RNA, 16 nt, Human
agccaggcugccucgg

SEQ ID NO: 119566 - RNA, 22 nt, Human
ugaguaaauauuuaugacuaga

SEQ ID NO: 119567 - RNA, 22 nt, Human
agggagguaggagcuucuagcu

SEQ ID NO: 119568 - RNA, 22 nt, Human
agggccacaguggggccugaga

SEQ ID NO: 119569 - RNA, 21 nt, Human
aucccagcacccaggagugca

SEQ ID NO: 119570 - RNA, 22 nt, Human
gugaagagcuguugcagagauu

SEQ ID NO: 119571 - RNA, 20 nt, Human
gcaaauggacacucagggaa

SEQ ID NO: 119572 - RNA, 22 nt, Human
auuucuacugugagaaacauga

SEQ ID NO: 119573 - RNA, 22 nt, Human
cuggcuuuggaaacaauuuauc

SEQ ID NO: 119574 - RNA, 22 nt, Human
ugauuacacaccacagugcucc

SEQ ID NO: 119575 - RNA, 22 nt, Human
gcacccagaauaaggacaggac

SEQ ID NO: 119576 - RNA, 22 nt, Human
ugcaggaauagcuacagagcug

SEQ ID NO: 119577 - RNA, 22 nt, Human
agugcacagcgugauguauugg

SEQ ID NO: 119578 - RNA, 22 nt, Human
gcaccugguuuauauaaucaua

SEQ ID NO: 119579 - RNA, 22 nt, Human
gacaauuucucaauauagaaac

SEQ ID NO: 119580 - RNA, 22 nt, Human
cugggcaguuuauucaguucug

SEQ ID NO: 119581 - RNA, 22 nt, Human
ucugugcauccuuaacgccugc

SEQ ID NO: 119582 - RNA, 22 nt, Human
ggcagggcagcgcugauuaggg

SEQ ID NO: 119583 - RNA, 22 nt, Human
augcagaaagagaauguaaugu

SEQ ID NO: 119584 - RNA, 22 nt, Human
aagaacuguaucaagauguagu

SEQ ID NO: 119585 - RNA, 22 nt, Human
gucugcauacaggacaugcaca

SEQ ID NO: 119586 - RNA, 22 nt, Human
gacauaaaccuugagauauuaa

SEQ ID NO: 119587 - RNA, 22 nt, Human
aacaucaucaugaacaacuaau

SEQ ID NO: 119588 - RNA, 22 nt, Human
uacagugacccuauuuccaaau

SEQ ID NO: 119589 - RNA, 22 nt, Human
cacuggggugggccugguagag

SEQ ID NO: 119590 - RNA, 22 nt, Human
aggcugagcuggcccuugaaau

SEQ ID NO: 119591 - RNA, 22 nt, Human
uuaacauuguccuuagcagauu

SEQ ID NO: 119592 - RNA, 22 nt, Human
uggggugugagaaguagaggga

SEQ ID NO: 119593 - RNA, 22 nt, Human
guuguacagcauccagugcaga

SEQ ID NO: 119594 - RNA, 22 nt, Human
uucauucauguauugucuaugg

SEQ ID NO: 119595 - RNA, 22 nt, Human
uacaacagaccuagaugaauga

SEQ ID NO: 119596 - RNA, 22 nt, Human
accaggagccacaggaggagcc

SEQ ID NO: 119597 - RNA, 22 nt, Human
uggcagagguauauugggagga

SEQ ID NO: 119598 - RNA, 19 nt, Human
gcugugggacagcagggug

SEQ ID NO: 119599 - RNA, 22 nt, Human
aagagggguggucugugaggau

SEQ ID NO: 119600 - RNA, 22 nt, Human
aucauaaaccacuuuguaaucu

SEQ ID NO: 119601 - RNA, 18 nt, Human
uggcagagugucuguucu

SEQ ID NO: 119602 - RNA, 22 nt, Human
caugucuuuguuaugcucacca

SEQ ID NO: 119603 - RNA, 22 nt, Human
aaucacauuacagcauaucugu

SEQ ID NO: 119604 - RNA, 22 nt, Human
ugaaacauuaggaaaucauuau

SEQ ID NO: 119605 - RNA, 22 nt, Human
cauuugcaaaccaacaagauga

SEQ ID NO: 119606 - RNA, 22 nt, Human
agggcagcaaugcagcugcugc

SEQ ID NO: 119607 - RNA, 22 nt, Human
ucuccccaaaggacucacucuc

SEQ ID NO: 119608 - RNA, 22 nt, Human
aaguggagccagggaaacugaa

SEQ ID NO: 119609 - RNA, 22 nt, Human
uuugcaaauaaauaagugcucg

SEQ ID NO: 119610 - RNA, 22 nt, Human
ccagcugucugguuccagagcc

SEQ ID NO: 119611 - RNA, 22 nt, Human
aaacaggucugaaaauagcuac

SEQ ID NO: 119612 - RNA, 22 nt, Human
ugcagcaaacaggccuucaggg

SEQ ID NO: 119613 - RNA, 22 nt, Human
ccagggcaaaugagaucauagc

SEQ ID NO: 119614 - RNA, 21 nt, Human
guuauuuuaagugagcuuugc

SEQ ID NO: 119615 - RNA, 22 nt, Human
acaaauggaagguguucucuuc

SEQ ID NO: 119616 - RNA, 21 nt, Human
ugggggagaauugguugcuuu

SEQ ID NO: 119617 - RNA, 22 nt, Human
cauccugcggggagcagagggc

SEQ ID NO: 119618 - RNA, 22 nt, Human
gaaggcuaaaggggcagagguu

SEQ ID NO: 119619 - RNA, 22 nt, Human
ugcagggccuugggaugugucc

SEQ ID NO: 119620 - RNA, 22 nt, Human
gggcugagacgauggggucuuc

SEQ ID NO: 119621 - RNA, 19 nt, Human
aggacccuuauccuggcuu

SEQ ID NO: 119622 - RNA, 22 nt, Human
ucugugcaccuucuaaugagua

SEQ ID NO: 119623 - RNA, 22 nt, Human
agggcaugcuggaggagagaca

SEQ ID NO: 119624 - RNA, 22 nt, Human
caugaaauguuagaauuagaca

SEQ ID NO: 119625 - RNA, 21 nt, Human
aggcucagagagaaacucuug

SEQ ID NO: 119626 - RNA, 22 nt, Human
gccaggaguucagaugcauguu

SEQ ID NO: 119627 - RNA, 22 nt, Human
cagguauuuucaaggcuugugu

SEQ ID NO: 119628 - RNA, 22 nt, Human
uccuuugguuguagacaggaau

SEQ ID NO: 119629 - RNA, 20 nt, Human
gggcagccucgggagugggu

SEQ ID NO: 119630 - RNA, 18 nt, Human
uggaggcagaguucuggc

SEQ ID NO: 119631 - RNA, 22 nt, Human
uagaaaggauauugagaugaau

SEQ ID NO: 119632 - RNA, 22 nt, Human
aggcugagcugguagugaguac

SEQ ID NO: 119633 - RNA, 23 nt, Human
ccagggccccuacaccacugucc

SEQ ID NO: 119634 - RNA, 22 nt, Human
gagaagucauuugaccaccuag

SEQ ID NO: 119635 - RNA, 22 nt, Human
gauuuucaugauaaacuuguga

SEQ ID NO: 119636 - RNA, 22 nt, Human
agggcagaaguacagacacuua

SEQ ID NO: 119637 - RNA, 20 nt, Human
aacauuuguagucaggcaca

SEQ ID NO: 119638 - RNA, 22 nt, Human
cagggcugagaauuuagagaca

SEQ ID NO: 119639 - RNA, 22 nt, Human
cagugcaguuucccagaugcug

SEQ ID NO: 119640 - RNA, 22 nt, Human
aaggugucaccagauuggcagg

SEQ ID NO: 119641 - RNA, 22 nt, Human
ucuuugcuccacacucuagaga

SEQ ID NO: 119642 - RNA, 22 nt, Human
gcaaauaauauacuuugaucuc

SEQ ID NO: 119643 - RNA, 22 nt, Human
auuuguagugaagugaaaauaa

SEQ ID NO: 119644 - RNA, 21 nt, Human
auggaaauuggcaaaugcuac

SEQ ID NO: 119645 - RNA, 22 nt, Human
cauuuagagaagauuacaagga

SEQ ID NO: 119646 - RNA, 22 nt, Human
aggaagcaaaaggcagggucua

SEQ ID NO: 119647 - RNA, 22 nt, Human
gccaccagcagaaaaggggcca

SEQ ID NO: 119648 - RNA, 22 nt, Human
ugccaggcauguaguagacuug

SEQ ID NO: 119649 - RNA, 22 nt, Human
ucagggcagguuaacuugggug

SEQ ID NO: 119650 - RNA, 22 nt, Human
gaagccacaacuuuuucuuagc

SEQ ID NO: 119651 - RNA, 20 nt, Human
ucugugcaguuuaggaaggc

SEQ ID NO: 119652 - RNA, 21 nt, Human
ugaggcucuguugugccugca

SEQ ID NO: 119653 - RNA, 22 nt, Human
gcugagaugucguuagauaucu

SEQ ID NO: 119654 - RNA, 22 nt, Human
aagggcagaauagagaagaugg

SEQ ID NO: 119655 - RNA, 22 nt, Human
agggcugaguggugcagucaaa

SEQ ID NO: 119656 - RNA, 22 nt, Human
ucagaggaccuuacugagaacc

SEQ ID NO: 119657 - RNA, 22 nt, Human
caguggcacccacgggcugggc

SEQ ID NO: 119658 - RNA, 22 nt, Human
acauggauaaauuuuacuuucc

SEQ ID NO: 119659 - RNA, 22 nt, Human
aggaauuaacaauauauuuagg

SEQ ID NO: 119660 - RNA, 22 nt, Human
auaacacuaaauguauguaaca

SEQ ID NO: 119661 - RNA, 22 nt, Human
auuuugcacacuaugcagcuuu

SEQ ID NO: 119662 - RNA, 22 nt, Human
gaggaaggcuaaggggcuuaga

SEQ ID NO: 119663 - RNA, 22 nt, Human
aggcaguuucugggacagcaua

SEQ ID NO: 119664 - RNA, 22 nt, Human
ugaagugaccuggggcagugua

SEQ ID NO: 119665 - RNA, 21 nt, Human
acaugagacacacauauaugu

SEQ ID NO: 119666 - RNA, 22 nt, Human
uggagaagucaaagugaacagg

SEQ ID NO: 119667 - RNA, 22 nt, Human
aagggcuguaagccaaguaaag

SEQ ID NO: 119668 - RNA, 22 nt, Human
aauuuugugugggaucaaagga

SEQ ID NO: 119669 - RNA, 22 nt, Human
cuuauuuugcugaugacccagg

SEQ ID NO: 119670 - RNA, 22 nt, Human
ggcugugcccucacauggggca

SEQ ID NO: 119671 - RNA, 22 nt, Human
ugccaggcuccggaacgacagu

SEQ ID NO: 119672 - RNA, 22 nt, Human
aauggcugccagggcaggaggu

SEQ ID NO: 119673 - RNA, 22 nt, Human
gcagaggcauuucugacgcugc

SEQ ID NO: 119674 - RNA, 22 nt, Human
aaauggaacugggcuacuaggu

SEQ ID NO: 119675 - RNA, 22 nt, Human
gaagcuaaugauuuauuuucug

SEQ ID NO: 119676 - RNA, 22 nt, Human
auuuucuauucugcugguuuag

SEQ ID NO: 119677 - RNA, 22 nt, Human
cuagggcacuaggacucaugug

SEQ ID NO: 119678 - RNA, 22 nt, Human
augcugagguuguuguccuauu

SEQ ID NO: 119679 - RNA, 19 nt, Human
ggagaggcuggagggaugc

SEQ ID NO: 119680 - RNA, 22 nt, Human
uaaaggcuucugcagggacuga

SEQ ID NO: 119681 - RNA, 22 nt, Human
gagcugaacaaauugcgagugg

SEQ ID NO: 119682 - RNA, 22 nt, Human
caggcagcgcucguggccuggc

SEQ ID NO: 119683 - RNA, 22 nt, Human
aacauaaauuugaaguggcaaa

SEQ ID NO: 119684 - RNA, 22 nt, Human
aggcagagaaaaaccagauaug

SEQ ID NO: 119685 - RNA, 22 nt, Human
gagaggcauggaacagauucuu

SEQ ID NO: 119686 - RNA, 22 nt, Human
ucccuccuggugagcaggggcu

SEQ ID NO: 119687 - RNA, 22 nt, Human
aacauucuaugugcauucagaa

SEQ ID NO: 119688 - RNA, 22 nt, Human
acauugaugaucccacuuacag

SEQ ID NO: 119689 - RNA, 22 nt, Human
uacagaagcugagacacugaga

SEQ ID NO: 119690 - RNA, 22 nt, Human
aaauacuguuuuauuccaugau

SEQ ID NO: 119691 - RNA, 22 nt, Human
agcagggccucuggcacugguc

SEQ ID NO: 119692 - RNA, 22 nt, Human
agggagcaugggugaagcaggc

SEQ ID NO: 119693 - RNA, 22 nt, Human
gcagggcaaacccagguguuca

SEQ ID NO: 119694 - RNA, 22 nt, Human
uguccuuuaugaaaugguguuu

SEQ ID NO: 119695 - RNA, 22 nt, Human
agggccugggucuguacuccuc

SEQ ID NO: 119696 - RNA, 22 nt, Human
gaggcacaguguuuggucagug

SEQ ID NO: 119697 - RNA, 20 nt, Human
acauccuggugacuagaacu

SEQ ID NO: 119698 - RNA, 22 nt, Human
cgggaggaaaggcgaggcucug

SEQ ID NO: 119699 - RNA, 22 nt, Human
aagggcuggaauaucucuuaga

SEQ ID NO: 119700 - RNA, 22 nt, Human
agacagugacuuagugaccaga

SEQ ID NO: 119701 - RNA, 22 nt, Human
aagagcuggcucuugcagcagc

SEQ ID NO: 119702 - RNA, 22 nt, Human
gcagaggagaugaagauacuuu

SEQ ID NO: 119703 - RNA, 22 nt, Human
uucucagauccaucagaagucc

SEQ ID NO: 119704 - RNA, 22 nt, Human
uggcugagaccuucccaaauuc

SEQ ID NO: 119705 - RNA, 22 nt, Human
agugcaugaaagcauacaaggc

SEQ ID NO: 119706 - RNA, 22 nt, Human
cugagggagaagucacgggcag

SEQ ID NO: 119707 - RNA, 19 nt, Human
ucugucauuucuucuguac

SEQ ID NO: 119708 - RNA, 22 nt, Human
ugauuuaugaccaaguuagaau

SEQ ID NO: 119709 - RNA, 22 nt, Human
uggcagaguucgcuccuauuca

SEQ ID NO: 119710 - RNA, 21 nt, Human
gcugugcacauaguagaagug

SEQ ID NO: 119711 - RNA, 19 nt, Human
ugcauauaucuaugaaaga

SEQ ID NO: 119712 - RNA, 21 nt, Human
agaggcaggcauuaaguacac

SEQ ID NO: 119713 - RNA, 22 nt, Human
ugccaggcacgugagaguggcc

SEQ ID NO: 119714 - RNA, 16 nt, Human
aggcagagauuuaccc

SEQ ID NO: 119715 - RNA, 22 nt, Human
guuauuuuaucucugagagguu

SEQ ID NO: 119716 - RNA, 21 nt, Human
gaaggagaaagcaagugcugc

SEQ ID NO: 119717 - RNA, 22 nt, Human
cagcugugaauugucuuaucua

SEQ ID NO: 119718 - RNA, 22 nt, Human
ccagagccucaacacagguccu

SEQ ID NO: 119719 - RNA, 22 nt, Human
uggaggaaguugcuggaaguca

SEQ ID NO: 119720 - RNA, 20 nt, Human
gagggcaggcacccauuuca

SEQ ID NO: 119721 - RNA, 22 nt, Human
ucauaaaaugcuccugauauug

SEQ ID NO: 119722 - RNA, 22 nt, Human
gauaacauuauaaguucacugu

SEQ ID NO: 119723 - RNA, 22 nt, Human
gacauaaaauucaauaauuugu

SEQ ID NO: 119724 - RNA, 22 nt, Human
cagcacagugcagaugcugacu

SEQ ID NO: 119725 - RNA, 22 nt, Human
gggcugagauuggugcccuguc

SEQ ID NO: 119726 - RNA, 22 nt, Human
uuaaaaugaauauugauuagca

SEQ ID NO: 119727 - RNA, 22 nt, Human
ggcugugcagggcagagucuca

SEQ ID NO: 119728 - RNA, 22 nt, Human
gggaagccaugcucagagguac

SEQ ID NO: 119729 - RNA, 22 nt, Human
gccagcugcuggaacagcgcga

SEQ ID NO: 119730 - RNA, 22 nt, Human
agaugcugugaggaagcuagga

SEQ ID NO: 119731 - RNA, 22 nt, Human
caggcagcucaaccuugggagc

SEQ ID NO: 119732 - RNA, 22 nt, Human
cauggcagugauucagccuuug

SEQ ID NO: 119733 - RNA, 22 nt, Human
ggucagugccuaucaugugggc

SEQ ID NO: 119734 - RNA, 22 nt, Human
ugucaauaacauuuacuucuau

SEQ ID NO: 119735 - RNA, 22 nt, Human
gugaaggcuacaagagaucaag

SEQ ID NO: 119736 - RNA, 22 nt, Human
ugcagggccuugggucuuucuu

SEQ ID NO: 119737 - RNA, 22 nt, Human
agcagugaugcaugacagccua

SEQ ID NO: 119738 - RNA, 18 nt, Human
acacacacaccuguguau

SEQ ID NO: 119739 - RNA, 22 nt, Human
uuuauauguuuguacaauuaag

SEQ ID NO: 119740 - RNA, 22 nt, Human
ugggcaggugcuauuuuccaug

SEQ ID NO: 119741 - RNA, 22 nt, Human
agacagugagaaugaguugaaa

SEQ ID NO: 119742 - RNA, 22 nt, Human
uaggugugggcucaggaaugug

SEQ ID NO: 119743 - RNA, 22 nt, Human
gggcagugacaaaggggaugaa

SEQ ID NO: 119744 - RNA, 22 nt, Human
gauacaguauuuaaagagcaac

SEQ ID NO: 119745 - RNA, 22 nt, Human
caaaugcauaguuuauaagaag

SEQ ID NO: 119746 - RNA, 22 nt, Human
caggaaagagcugccaggcagg

SEQ ID NO: 119747 - RNA, 22 nt, Human
uuacaacauaugauaggagucu

SEQ ID NO: 119748 - RNA, 22 nt, Human
uagcagcuuaaguaauuagaau

SEQ ID NO: 119749 - RNA, 22 nt, Human
ugaaaaaacaaguuggcccauu

SEQ ID NO: 119750 - RNA, 22 nt, Human
ugaagccauuacuguguuaggg

SEQ ID NO: 119751 - RNA, 23 nt, Human
uucaaagcuuaagcucuuuccac

SEQ ID NO: 119752 - RNA, 22 nt, Human
gccuguuggugacuuucuguug

SEQ ID NO: 119753 - RNA, 22 nt, Human
gaggcaguggucugaugcaagg

SEQ ID NO: 119754 - RNA, 22 nt, Human
agaggaggcuggguccagauaa

SEQ ID NO: 119755 - RNA, 22 nt, Human
ggagaggcuuggcccagccugg

SEQ ID NO: 119756 - RNA, 22 nt, Human
aggcuguccucucuugcucagu

SEQ ID NO: 119757 - RNA, 22 nt, Human
aguucccaggugaugcugaugu

SEQ ID NO: 119758 - RNA, 22 nt, Human
ggggccagcacugugccuuugu

SEQ ID NO: 119759 - RNA, 22 nt, Human
ccagaggaugcuggucagccuc

SEQ ID NO: 119760 - RNA, 22 nt, Human
acauuuugagaaaugacaagcu

SEQ ID NO: 119761 - RNA, 23 nt, Human
uuacuuuugcaccaaccuaauau

SEQ ID NO: 119762 - RNA, 22 nt, Human
agccucaguuucaggccuccuc

SEQ ID NO: 119763 - RNA, 22 nt, Human
gcaggcuggucugaccaucccu

SEQ ID NO: 119764 - RNA, 22 nt, Human
gaaggcuguuucugguagugau

SEQ ID NO: 119765 - RNA, 23 nt, Human
uggcagagacccagaaucuacau

SEQ ID NO: 119766 - RNA, 22 nt, Human
gggggagagacgagcggcucug

SEQ ID NO: 119767 - RNA, 22 nt, Human
uccagcuuauagguagauuuaa

SEQ ID NO: 119768 - RNA, 22 nt, Human
uaugaacacuuauuggggaagg

SEQ ID NO: 119769 - RNA, 22 nt, Human
uggcugaguguuccaaggagca

SEQ ID NO: 119770 - RNA, 22 nt, Human
uauaggauugguucccauuuua

SEQ ID NO: 119771 - RNA, 22 nt, Human
agaucauagcacaaaagugaca

SEQ ID NO: 119772 - RNA, 22 nt, Human
gcaccugggguacacagcuaca

SEQ ID NO: 119773 - RNA, 22 nt, Human
uggcucagaagaaaagguaaac

SEQ ID NO: 119774 - RNA, 22 nt, Human
cauaagaaauuuaacagaacuu

SEQ ID NO: 119775 - RNA, 22 nt, Human
aaggagaaaugguagaugugca

SEQ ID NO: 119776 - RNA, 22 nt, Human
aagucuguuugagugucacacu

SEQ ID NO: 119777 - RNA, 22 nt, Human
ugagaucugugcauguuaguua

SEQ ID NO: 119778 - RNA, 22 nt, Human
cagugcccaagaugugccaugc

SEQ ID NO: 119779 - RNA, 22 nt, Human
acauuugaggauguuaagaaug

SEQ ID NO: 119780 - RNA, 22 nt, Human
caggaugcacuaggaaccaggg

SEQ ID NO: 119781 - RNA, 19 nt, Human
agugucagaauucauugaa

SEQ ID NO: 119782 - RNA, 22 nt, Human
acccaggaggcagagguugcag

SEQ ID NO: 119783 - RNA, 20 nt, Human
ugaggcucagagagguugag

SEQ ID NO: 119784 - RNA, 22 nt, Human
caggagccagcugucccaacca

SEQ ID NO: 119785 - RNA, 22 nt, Human
acaaaggcaggauugacuuagu

SEQ ID NO: 119786 - RNA, 22 nt, Human
uuuaagcaaguugacauagcau

SEQ ID NO: 119787 - RNA, 22 nt, Human
aaggccagaguacuagaggcug

SEQ ID NO: 119788 - RNA, 16 nt, Human
ggcaccagugaacaca

SEQ ID NO: 119789 - RNA, 22 nt, Human
agaagugccgaaaggaagacag

SEQ ID NO: 119790 - RNA, 22 nt, Human
gcucccagucugauggaggaga

SEQ ID NO: 119791 - RNA, 22 nt, Human
gugaggcagagaugccaaaacu

SEQ ID NO: 119792 - RNA, 22 nt, Human
gcugagagaucaaggcaggauu

SEQ ID NO: 119793 - RNA, 22 nt, Human
gcagaggccaggccaccagcaa

SEQ ID NO: 119794 - RNA, 22 nt, Human
aggcugaguuucucauucucgc

SEQ ID NO: 119795 - RNA, 22 nt, Human
auacaguauaacuaauaaaccc

SEQ ID NO: 119796 - RNA, 22 nt, Human
ugcaguggugguaaagaugcuc

SEQ ID NO: 119797 - RNA, 22 nt, Human
aggcugcguuagccucacuccc

SEQ ID NO: 119798 - RNA, 22 nt, Human
agggggucuccuaucauggaag

SEQ ID NO: 119799 - RNA, 22 nt, Human
ucagaggaauuugcuuuucaug

SEQ ID NO: 119800 - RNA, 22 nt, Human
aguguacauaguuaggaacauc

SEQ ID NO: 119801 - RNA, 17 nt, Human
gagugcagacacaagca

SEQ ID NO: 119802 - RNA, 22 nt, Human
gaggcagcagaacauggaagag

SEQ ID NO: 119803 - RNA, 20 nt, Human
acauuuuggcauacucucaa

SEQ ID NO: 119804 - RNA, 22 nt, Human
ccagaagaccccguccaccucc

SEQ ID NO: 119805 - RNA, 22 nt, Human
uggaagaaggcagagaggcauu

SEQ ID NO: 119806 - RNA, 22 nt, Human
agggccagggaaacgaucagca

SEQ ID NO: 119807 - RNA, 22 nt, Human
cauauuucagucuaagaugugu

SEQ ID NO: 119808 - RNA, 22 nt, Human
uccugagggacugguuccucgc

SEQ ID NO: 119809 - RNA, 22 nt, Human
ugagagcugggaaauguuagcu

SEQ ID NO: 119810 - RNA, 20 nt, Human
ugcagggcugccucccagcu

SEQ ID NO: 119811 - RNA, 22 nt, Human
gaggaagaauugguuauuggag

SEQ ID NO: 119812 - RNA, 22 nt, Human
agucacuaggcugaaaguggag

SEQ ID NO: 119813 - RNA, 22 nt, Human
gaugaagaggcacugacauauu

SEQ ID NO: 119814 - RNA, 22 nt, Human
agggcagagaucugagugggca

SEQ ID NO: 119815 - RNA, 23 nt, Human
acaucagaguuaguucaaucagg

SEQ ID NO: 119816 - RNA, 22 nt, Human
accagggcccgggagagcucuc

SEQ ID NO: 119817 - RNA, 22 nt, Human
ugaggcagucacccccuccugc

SEQ ID NO: 119818 - RNA, 22 nt, Human
ggacaucuugguugcuuccaag

SEQ ID NO: 119819 - RNA, 22 nt, Human
cagccucuuuccacaucaggca

SEQ ID NO: 119820 - RNA, 22 nt, Human
ucccagauucuucugugugggc

SEQ ID NO: 119821 - RNA, 22 nt, Human
agagccaggaaguggcgugggg

SEQ ID NO: 119822 - RNA, 18 nt, Human
aacaguuuccagauucuc

SEQ ID NO: 119823 - RNA, 19 nt, Human
ucaguggagaaaggggaag

SEQ ID NO: 119824 - RNA, 22 nt, Human
agaggaggccaggcccacaccu

SEQ ID NO: 119825 - RNA, 22 nt, Human
cuguggaguggggaguacuggu

SEQ ID NO: 119826 - RNA, 22 nt, Human
uuuguacacugucuacuaugaa

SEQ ID NO: 119827 - RNA, 22 nt, Human
aggcucaggaggagcugccgga

SEQ ID NO: 119828 - RNA, 22 nt, Human
gacauuuguaugacacuuuaaa

SEQ ID NO: 119829 - RNA, 22 nt, Human
uauacacugauauaaggaguaa

SEQ ID NO: 119830 - RNA, 22 nt, Human
agagggcaugcuugguggccug

SEQ ID NO: 119831 - RNA, 20 nt, Human
agacaaaaugacuucaugca

SEQ ID NO: 119832 - RNA, 22 nt, Human
uaggugucugcucuuauuuaac

SEQ ID NO: 119833 - RNA, 22 nt, Human
gggcagugguccaggcuacagc

SEQ ID NO: 119834 - RNA, 22 nt, Human
auggaaauaucuuuagagcuua

SEQ ID NO: 119835 - RNA, 22 nt, Human
guuaaauucgaugauggauaaa

SEQ ID NO: 119836 - RNA, 22 nt, Human
cccagccugucuuucccaauga

SEQ ID NO: 119837 - RNA, 22 nt, Human
cacaggaagagguauacaauuc

SEQ ID NO: 119838 - RNA, 22 nt, Human
ccaagggaaaccgagaggcugg

SEQ ID NO: 119839 - RNA, 18 nt, Human
gauguaaaauaguagcuu

SEQ ID NO: 119840 - RNA, 22 nt, Human
uggcaugauaggaggugcagaa

SEQ ID NO: 119841 - RNA, 22 nt, Human
agacauuuggaagauacacaua

SEQ ID NO: 119842 - RNA, 21 nt, Human
ccuggccaaucugauaggguu

SEQ ID NO: 119843 - RNA, 22 nt, Human
cagagugaaaacugagcucaaa

SEQ ID NO: 119844 - RNA, 22 nt, Human
uggcugaggagggucuucuggu

SEQ ID NO: 119845 - RNA, 22 nt, Human
uggcugagagaagacggggaag

SEQ ID NO: 119846 - RNA, 23 nt, Human
gggcagguuuuuauaggcuucag

SEQ ID NO: 119847 - RNA, 22 nt, Human
augggcagacagggagcucacg

SEQ ID NO: 119848 - RNA, 22 nt, Human
aagagcuggaguuugcagcccu

SEQ ID NO: 119849 - RNA, 22 nt, Human
agggcugcuccuccuucaggcc

SEQ ID NO: 119850 - RNA, 22 nt, Human
ugaggcucagagcaccugcucc

SEQ ID NO: 119851 - RNA, 22 nt, Human
ugcagggcacggugcgcguggg

SEQ ID NO: 119852 - RNA, 22 nt, Human
cagggcagggagcuuagaauga

SEQ ID NO: 119853 - RNA, 21 nt, Human
acagggcaugcagcuggcugu

SEQ ID NO: 119854 - RNA, 22 nt, Human
aggcaggagugacccugacagg

SEQ ID NO: 119855 - RNA, 22 nt, Human
auggagauuuuuagaauuacag

SEQ ID NO: 119856 - RNA, 22 nt, Human
ugcccaggguggagugcagcgg

SEQ ID NO: 119857 - RNA, 22 nt, Human
agcagggcucugccaugggccc

SEQ ID NO: 119858 - RNA, 22 nt, Human
aggcugaggcggguagaucacc

SEQ ID NO: 119859 - RNA, 22 nt, Human
aagcagcauaugacagcaucca

SEQ ID NO: 119860 - RNA, 22 nt, Human
gauggcagcagcagccagggau

SEQ ID NO: 119861 - RNA, 20 nt, Human
cugcugugugugccucagcc

SEQ ID NO: 119862 - RNA, 22 nt, Human
cccaggacucuucacugcagcc

SEQ ID NO: 119863 - RNA, 20 nt, Human
uuacucaguuccugccaugc

SEQ ID NO: 119864 - RNA, 22 nt, Human
cagcacaggaauaugguggaca

SEQ ID NO: 119865 - RNA, 22 nt, Human
gaagccaguacugugcucugca

SEQ ID NO: 119866 - RNA, 22 nt, Human
gccaguggucacugaggaagaa

SEQ ID NO: 119867 - RNA, 22 nt, Human
ucagaggagccaaaguucugag

SEQ ID NO: 119868 - RNA, 18 nt, Human
cacaggaaggggaauauc

SEQ ID NO: 119869 - RNA, 22 nt, Human
agggcagaaaucgauuacaccu

SEQ ID NO: 119870 - RNA, 22 nt, Human
aaagaagggacagacugccucu

SEQ ID NO: 119871 - RNA, 22 nt, Human
gaaaucugaacaacagcuguca

SEQ ID NO: 119872 - RNA, 22 nt, Human
acugugcaggugaacuguuugc

SEQ ID NO: 119873 - RNA, 22 nt, Human
caguggcaaugggacagagcac

SEQ ID NO: 119874 - RNA, 22 nt, Human
gcugugcagugggaguucggug

SEQ ID NO: 119875 - RNA, 22 nt, Human
acugugcaagucaaagaugggc

SEQ ID NO: 119876 - RNA, 22 nt, Human
guaaacauuacugugcuguaua

SEQ ID NO: 119877 - RNA, 22 nt, Human
gaaagcaguaaaugggucccau

SEQ ID NO: 119878 - RNA, 22 nt, Human
auaaagcuaagacuuacaugaa

SEQ ID NO: 119879 - RNA, 22 nt, Human
augagcagcauugcuccucuua

SEQ ID NO: 119880 - RNA, 21 nt, Human
gggcgaggccugauguggcuc

SEQ ID NO: 119881 - RNA, 22 nt, Human
gcagagugaagcaguauggaaa

SEQ ID NO: 119882 - RNA, 22 nt, Human
augaggcauucacagaaggcac

SEQ ID NO: 119883 - RNA, 22 nt, Human
ugaggcucacaaaucugcauuu

SEQ ID NO: 119884 - RNA, 22 nt, Human
gaggaagcugcguggcauuuca

SEQ ID NO: 119885 - RNA, 22 nt, Human
ggagaugccuuguuucaggaac

SEQ ID NO: 119886 - RNA, 19 nt, Human
uggcagaggcaguuuguac

SEQ ID NO: 119887 - RNA, 22 nt, Human
acauuugagcauauuucuuguc

SEQ ID NO: 119888 - RNA, 22 nt, Human
gggaaggagguggcuugaagug

SEQ ID NO: 119889 - RNA, 22 nt, Human
agcagggcuguguagguaauga

SEQ ID NO: 119890 - RNA, 22 nt, Human
gggcacuguguucagagugcag

SEQ ID NO: 119891 - RNA, 22 nt, Human
uacagaccaguaguucucagcg

SEQ ID NO: 119892 - RNA, 22 nt, Human
ccucccacuucuugcugagguc

SEQ ID NO: 119893 - RNA, 22 nt, Human
ccugaggggcugcaggccagcu

SEQ ID NO: 119894 - RNA, 22 nt, Human
gagugggcaccgugggcacacu

SEQ ID NO: 119895 - RNA, 22 nt, Human
cagggagcuggcuggcugugcc

SEQ ID NO: 119896 - RNA, 18 nt, Human
uguagagccagguuugcc

SEQ ID NO: 119897 - RNA, 22 nt, Human
gagcagggagacaacucuggug

SEQ ID NO: 119898 - RNA, 22 nt, Human
aagggcugcuguagaagcagag

SEQ ID NO: 119899 - RNA, 18 nt, Human
uucaccagugugaugggu

SEQ ID NO: 119900 - RNA, 22 nt, Human
cagcaaaguaagcugacaugua

SEQ ID NO: 119901 - RNA, 22 nt, Human
ccacugucuuuuccaggcugaa

SEQ ID NO: 119902 - RNA, 22 nt, Human
uggggaggaagucagauuucag

SEQ ID NO: 119903 - RNA, 22 nt, Human
ucccacuggacgucugugcugg

SEQ ID NO: 119904 - RNA, 22 nt, Human
ugccagucucacccuggguccu

SEQ ID NO: 119905 - RNA, 22 nt, Human
gggggaagacugggcuagugau

SEQ ID NO: 119906 - RNA, 22 nt, Human
cagggcagugaagaacacacgu

SEQ ID NO: 119907 - RNA, 22 nt, Human
aaagccagcucugagcugcacc

SEQ ID NO: 119908 - RNA, 22 nt, Human
ugagaugcaggagaugggacug

SEQ ID NO: 119909 - RNA, 22 nt, Human
cucuggaguucuucaagcuacu

SEQ ID NO: 119910 - RNA, 23 nt, Human
ccuggaguacuaaggggauggaa

SEQ ID NO: 119911 - RNA, 22 nt, Human
ugggccacacacagaagaauca

SEQ ID NO: 119912 - RNA, 22 nt, Human
gacaacagugguuucagguucc

SEQ ID NO: 119913 - RNA, 22 nt, Human
ugcugugcucuuuaaggugcug

SEQ ID NO: 119914 - RNA, 22 nt, Human
uggcagguuuccuccucauagu

SEQ ID NO: 119915 - RNA, 22 nt, Human
caggcccagcccagcccuucga

SEQ ID NO: 119916 - RNA, 17 nt, Human
gcagugaaaagagauca

SEQ ID NO: 119917 - RNA, 22 nt, Human
auuaaauuaaguggcuaauuua

SEQ ID NO: 119918 - RNA, 22 nt, Human
agcuggugcucaggggcaugga

SEQ ID NO: 119919 - RNA, 22 nt, Human
agggucagagaucggccaugug

SEQ ID NO: 119920 - RNA, 22 nt, Human
ucaggcagagcuguggagcucu

SEQ ID NO: 119921 - RNA, 22 nt, Human
agggagaagguuuagcugugag

SEQ ID NO: 119922 - RNA, 22 nt, Human
aggcagcaugcucugcuucuac

SEQ ID NO: 119923 - RNA, 22 nt, Human
cauuuguauguuccuccuuagg

SEQ ID NO: 119924 - RNA, 22 nt, Human
aggcagcaugggccccagcucc

SEQ ID NO: 119925 - RNA, 22 nt, Human
gcugagagugggugcagugcuu

SEQ ID NO: 119926 - RNA, 22 nt, Human
uagugucagggagugauaaaug

SEQ ID NO: 119927 - RNA, 22 nt, Human
aggcugagacugugcauuagug

SEQ ID NO: 119928 - RNA, 22 nt, Human
aggcucaguauagcuggcaagu

SEQ ID NO: 119929 - RNA, 22 nt, Human
uuacauucauugaagugauuca

SEQ ID NO: 119930 - RNA, 22 nt, Human
acugauuaaaaacagacauuua

SEQ ID NO: 119931 - RNA, 22 nt, Human
aggcccagagagccaguuagug

SEQ ID NO: 119932 - RNA, 22 nt, Human
gaggcagaaguugcagugagca

SEQ ID NO: 119933 - RNA, 22 nt, Human
ugaacauugucacauuccuagc

SEQ ID NO: 119934 - RNA, 22 nt, Human
gcacggcuaauuuuuguauuuu

SEQ ID NO: 119935 - RNA, 22 nt, Human
aaggaagauauaucaagcuuaa

SEQ ID NO: 119936 - RNA, 23 nt, Human
agguucaggagauggaggaacaa

SEQ ID NO: 119937 - RNA, 22 nt, Human
aguuagagacacaugcacaugc

SEQ ID NO: 119938 - RNA, 22 nt, Human
cucagaagaacccaggguccca

SEQ ID NO: 119939 - RNA, 22 nt, Human
agcagggcucacauuaguggau

SEQ ID NO: 119940 - RNA, 22 nt, Human
uaguggagaguuguuuugugca

SEQ ID NO: 119941 - RNA, 22 nt, Human
uuuguacaauuagcagaggcua

SEQ ID NO: 119942 - RNA, 22 nt, Human
acaguggaagcaugaugcuauc

SEQ ID NO: 119943 - RNA, 22 nt, Human
ucaggcugguggucagauggcu

SEQ ID NO: 119944 - RNA, 20 nt, Human
ucaaaggcaaaggugggugu

SEQ ID NO: 119945 - RNA, 22 nt, Human
gucagcacuuuuccgaggcaga

SEQ ID NO: 119946 - RNA, 22 nt, Human
aucaccaggcaaaaugucagag

SEQ ID NO: 119947 - RNA, 22 nt, Human
aaugugaggccuugguaguuau

SEQ ID NO: 119948 - RNA, 18 nt, Human
uacaggaaaaguguuaca

SEQ ID NO: 119949 - RNA, 22 nt, Human
gauuuauuuuuaaucagcaggg

SEQ ID NO: 119950 - RNA, 19 nt, Human
agagaaggauccuaugguu

SEQ ID NO: 119951 - RNA, 22 nt, Human
ccagagcagauguggccuuggu

SEQ ID NO: 119952 - RNA, 22 nt, Human
uuucucaaccucaacacuauuu

SEQ ID NO: 119953 - RNA, 22 nt, Human
augaacaagagagggaagauuc

SEQ ID NO: 119954 - RNA, 22 nt, Human
gcagugauuggaucagagaugg

SEQ ID NO: 119955 - RNA, 22 nt, Human
gaugcugagcuguauggcuggu

SEQ ID NO: 119956 - RNA, 22 nt, Human
uggagaagauuggucaccauuc

SEQ ID NO: 119957 - RNA, 22 nt, Human
gggauggggagcuggaaagggg

SEQ ID NO: 119958 - RNA, 22 nt, Human
gccaggcauguccucugcagaa

SEQ ID NO: 119959 - RNA, 22 nt, Human
aagcauuuuaguaaugaacuug

SEQ ID NO: 119960 - RNA, 17 nt, Human
aguggcaggcagauggg

SEQ ID NO: 119961 - RNA, 22 nt, Human
auguuauuaaaguacagauucu

SEQ ID NO: 119962 - RNA, 22 nt, Human
aagguauuggucuggucuuccu

SEQ ID NO: 119963 - RNA, 22 nt, Human
ugugaaggagaugaagggagug

SEQ ID NO: 119964 - RNA, 22 nt, Human
ccugggcaacauagugagaccu

SEQ ID NO: 119965 - RNA, 19 nt, Human
gguagaagggaaguguuuu

SEQ ID NO: 119966 - RNA, 22 nt, Human
gacaugcaugaaugcaggucuc

SEQ ID NO: 119967 - RNA, 22 nt, Human
auauugcaauagaugcaucauu

SEQ ID NO: 119968 - RNA, 22 nt, Human
agggcccuaaggaaggcacaca

SEQ ID NO: 119969 - RNA, 22 nt, Human
ccaggugcucuugccagggcug

SEQ ID NO: 119970 - RNA, 22 nt, Human
gaauuaguguugaaaucagggc

SEQ ID NO: 119971 - RNA, 22 nt, Human
gggaaauagagcuggaaccuug

SEQ ID NO: 119972 - RNA, 22 nt, Human
auuacuagauugucaagauuua

SEQ ID NO: 119973 - RNA, 23 nt, Human
auguuuuaugucucuagcugcca

SEQ ID NO: 119974 - RNA, 20 nt, Human
agccaggccucaaguuaagu

SEQ ID NO: 119975 - RNA, 22 nt, Human
cacagcugaaguagccaugugg

SEQ ID NO: 119976 - RNA, 22 nt, Human
gcagccacccucaaggcugaau

SEQ ID NO: 119977 - RNA, 22 nt, Human
agggggucguccggaagaccug

SEQ ID NO: 119978 - RNA, 22 nt, Human
ggcagccauggacacuggcuag

SEQ ID NO: 119979 - RNA, 22 nt, Human
ggccaggccaagaggguuggaa

SEQ ID NO: 119980 - RNA, 22 nt, Human
uggucgaccaguuggaaaguaa

SEQ ID NO: 119981 - RNA, 22 nt, Human
cacauggaagagauacagugag

SEQ ID NO: 119982 - RNA, 22 nt, Human
agaagccacaggccucgucugg

SEQ ID NO: 119983 - RNA, 22 nt, Human
uaauccaggguauucuaguuuc

SEQ ID NO: 119984 - RNA, 17 nt, Human
agccgggcauggaccag

SEQ ID NO: 119985 - RNA, 22 nt, Human
uuucccaaguguaaacauggca

SEQ ID NO: 119986 - RNA, 22 nt, Human
ucccaggauguuggcggcaggu

SEQ ID NO: 119987 - RNA, 22 nt, Human
uugcaagaaauaaucgaauaga

SEQ ID NO: 119988 - RNA, 22 nt, Human
ucucccagaaguccucaguaca

SEQ ID NO: 119989 - RNA, 22 nt, Human
ggcagggcccugauuccugggg

SEQ ID NO: 119990 - RNA, 22 nt, Human
gaggcuggaauauuagaaaugu

SEQ ID NO: 119991 - RNA, 22 nt, Human
augaggcaggauuaagcuauca

SEQ ID NO: 119992 - RNA, 22 nt, Human
ccagguguggggaggacucaca

SEQ ID NO: 119993 - RNA, 22 nt, Human
aagggcagcuauuaucgucauc

SEQ ID NO: 119994 - RNA, 22 nt, Human
uuauauuaguuagacuugcugu

SEQ ID NO: 119995 - RNA, 22 nt, Human
cggcuggugucgggcacagcaa

SEQ ID NO: 119996 - RNA, 22 nt, Human
agccaggcugcaguuggcuggc

SEQ ID NO: 119997 - RNA, 21 nt, Human
aggaggaacccguggcugggc

SEQ ID NO: 119998 - RNA, 22 nt, Human
cagcacaggccugucuuugucu

SEQ ID NO: 119999 - RNA, 22 nt, Human
cagcugggugaucuugggcagg

SEQ ID NO: 120000 - RNA, 22 nt, Human
ggagaaagcuguaguggaaugu

SEQ ID NO: 120001 - RNA, 22 nt, Human
caguaggaaggaugcagaaaaa

SEQ ID NO: 120002 - RNA, 22 nt, Human
caguaacauuucaagguagagg

SEQ ID NO: 120003 - RNA, 22 nt, Human
agccaguguuaagugacugguu

SEQ ID NO: 120004 - RNA, 22 nt, Human
gaggcucauugcauugugcauu

SEQ ID NO: 120005 - RNA, 22 nt, Human
uggcugaguuacgaacagagca

SEQ ID NO: 120006 - RNA, 22 nt, Human
auguacaaccugcaugacaguc

SEQ ID NO: 120007 - RNA, 22 nt, Human
aaugcucaaaauguuucaucua

SEQ ID NO: 120008 - RNA, 21 nt, Human
aagggagauaggaaucaggcc

SEQ ID NO: 120009 - RNA, 22 nt, Human
cacaggagugcugcuauuguug

SEQ ID NO: 120010 - RNA, 22 nt, Human
uggagcugguaaacagugacau

SEQ ID NO: 120011 - RNA, 22 nt, Human
auugugauuagagaauauagag

SEQ ID NO: 120012 - RNA, 19 nt, Human
aucugaaguaggugcagcu

SEQ ID NO: 120013 - RNA, 22 nt, Human
aggggaaggccagccuguagag

SEQ ID NO: 120014 - RNA, 22 nt, Human
gaaggcuggcuuucugagagca

SEQ ID NO: 120015 - RNA, 22 nt, Human
ugucagcagcugguuugcuguu

SEQ ID NO: 120016 - RNA, 22 nt, Human
ucagggcaaugucccucagaag

SEQ ID NO: 120017 - RNA, 22 nt, Human
agagcugagcaccaagcauggu

SEQ ID NO: 120018 - RNA, 22 nt, Human
cucaggcuugggaggaggccca

SEQ ID NO: 120019 - RNA, 19 nt, Human
ugagcaugcgagcugagaa

SEQ ID NO: 120020 - RNA, 22 nt, Human
agucaggagcugcugcauugua

SEQ ID NO: 120021 - RNA, 22 nt, Human
uacaggaaggcucuggaggugc

SEQ ID NO: 120022 - RNA, 22 nt, Human
ggccugaggcgucccagcugug

SEQ ID NO: 120023 - RNA, 22 nt, Human
aggcgugggaggaucugaggcc

SEQ ID NO: 120024 - RNA, 22 nt, Human
cgggcagcggcguggccauggu

SEQ ID NO: 120025 - RNA, 22 nt, Human
ggugggucuuguggggcagcuu

SEQ ID NO: 120026 - RNA, 22 nt, Human
gcccaggauucuuucuuccuua

SEQ ID NO: 120027 - RNA, 22 nt, Human
guggagcaaucagagggucagu

SEQ ID NO: 120028 - RNA, 22 nt, Human
ucuaaauguaucacaucuggau

SEQ ID NO: 120029 - RNA, 22 nt, Human
uuagagcaggaguugacagauu

SEQ ID NO: 120030 - RNA, 22 nt, Human
acauucuguuuccccaaagaga

SEQ ID NO: 120031 - RNA, 22 nt, Human
cuagggaaugagagacuggauc

SEQ ID NO: 120032 - RNA, 22 nt, Human
cagagcaggcccacugcccucc

SEQ ID NO: 120033 - RNA, 22 nt, Human
guucaagguuuuacagagugua

SEQ ID NO: 120034 - RNA, 19 nt, Human
ucaguggaugaacauguuu

SEQ ID NO: 120035 - RNA, 22 nt, Human
aaggaaauuagguuauuuugcu

SEQ ID NO: 120036 - RNA, 22 nt, Human
cugagcugggagccuggcacca

SEQ ID NO: 120037 - RNA, 20 nt, Human
agcuaacccuacuuucuuug

SEQ ID NO: 120038 - RNA, 22 nt, Human
aggcaggggagcuggaagggua

SEQ ID NO: 120039 - RNA, 22 nt, Human
auacagugaauacuuacagugu

SEQ ID NO: 120040 - RNA, 22 nt, Human
gcaggcagaucaccugucagga

SEQ ID NO: 120041 - RNA, 22 nt, Human
cagagcagaagcgguccucaca

SEQ ID NO: 120042 - RNA, 17 nt, Human
aggugcagaggcagagc

SEQ ID NO: 120043 - RNA, 22 nt, Human
uggcagcauguuauguaaggaa

SEQ ID NO: 120044 - RNA, 22 nt, Human
gaggcagugucgguggcaggau

SEQ ID NO: 120045 - RNA, 22 nt, Human
ugagcagggacuuugaguguag

SEQ ID NO: 120046 - RNA, 22 nt, Human
gugggcugcccuugaggucagc

SEQ ID NO: 120047 - RNA, 20 nt, Human
uccugguggauacugcuuaa

SEQ ID NO: 120048 - RNA, 22 nt, Human
gaggcacaccagggagucuugu

SEQ ID NO: 120049 - RNA, 22 nt, Human
agugcccuggcccagcuggacc

SEQ ID NO: 120050 - RNA, 22 nt, Human
uguacaugugucuguauaucuu

SEQ ID NO: 120051 - RNA, 22 nt, Human
aggaagagcuggaccagaggac

SEQ ID NO: 120052 - RNA, 20 nt, Human
aggcucagcugagcucuugg

SEQ ID NO: 120053 - RNA, 22 nt, Human
cagggcuggauccuccagacuc

SEQ ID NO: 120054 - RNA, 22 nt, Human
ucccaggaucugagggcagaga

SEQ ID NO: 120055 - RNA, 22 nt, Human
augcaaacauucgcuugucucu

SEQ ID NO: 120056 - RNA, 22 nt, Human
uuguaaaugaccuuuucuaauu

SEQ ID NO: 120057 - RNA, 22 nt, Human
ccaggguuuaaauucugacuau

SEQ ID NO: 120058 - RNA, 22 nt, Human
aguggcagagccaaguagagcc

SEQ ID NO: 120059 - RNA, 22 nt, Human
aguaaacauagaauguucuucc

SEQ ID NO: 120060 - RNA, 22 nt, Human
acaacacagcaaaaccccaucu

SEQ ID NO: 120061 - RNA, 22 nt, Human
cugcugugcaacauugcaccua

SEQ ID NO: 120062 - RNA, 22 nt, Human
acagcugugaagcaagcacucu

SEQ ID NO: 120063 - RNA, 22 nt, Human
ggcagauguuauaugaucugag

SEQ ID NO: 120064 - RNA, 22 nt, Human
ugaaggaagaauaggcaguguu

SEQ ID NO: 120065 - RNA, 22 nt, Human
augcugugauuguagaaauauu

SEQ ID NO: 120066 - RNA, 22 nt, Human
uuauaugauugagcaucuuggu

SEQ ID NO: 120067 - RNA, 22 nt, Human
agaguccagaaaacagugugcu

SEQ ID NO: 120068 - RNA, 22 nt, Human
cagaggcauauaauugcugggg

SEQ ID NO: 120069 - RNA, 22 nt, Human
aggaaaaagaguugcugccuuc

SEQ ID NO: 120070 - RNA, 22 nt, Human
ggaggaggggugacugaaugcu

SEQ ID NO: 120071 - RNA, 22 nt, Human
ugggcagggagcuggaaccaca

SEQ ID NO: 120072 - RNA, 22 nt, Human
aaggaaaugugccugacacugc

SEQ ID NO: 120073 - RNA, 22 nt, Human
gccaggcugcuccagggaggcc

SEQ ID NO: 120074 - RNA, 19 nt, Human
ggcaugggguccggggacc

SEQ ID NO: 120075 - RNA, 19 nt, Human
ugggcagguucaguaaugg

SEQ ID NO: 120076 - RNA, 22 nt, Human
aaacaguuucuaaucauggaga

SEQ ID NO: 120077 - RNA, 22 nt, Human
acaggcugcugggcuccgugcu

SEQ ID NO: 120078 - RNA, 18 nt, Human
cccagcuggugggucagu

SEQ ID NO: 120079 - RNA, 20 nt, Human
ggcugugcccuuccguggcc

SEQ ID NO: 120080 - RNA, 22 nt, Human
cugagggagacagugcggacua

SEQ ID NO: 120081 - RNA, 22 nt, Human
gucagaggggacaagacacaga

SEQ ID NO: 120082 - RNA, 22 nt, Human
gcagggcacacaagaaugauaa

SEQ ID NO: 120083 - RNA, 22 nt, Human
aagggcuggaucucucugagca

SEQ ID NO: 120084 - RNA, 22 nt, Human
gaggaagccccauugaagccag

SEQ ID NO: 120085 - RNA, 22 nt, Human
acagggcagagaggcaggcuug

SEQ ID NO: 120086 - RNA, 22 nt, Human
cuuauuuuaagucaguuugggu

SEQ ID NO: 120087 - RNA, 22 nt, Human
uuguaaauaguaguaagaugcc

SEQ ID NO: 120088 - RNA, 22 nt, Human
ugguccuggggugcaggcugac

SEQ ID NO: 120089 - RNA, 22 nt, Human
ggcaggagaaaggucucuucuu

SEQ ID NO: 120090 - RNA, 22 nt, Human
aggugcuggaguagaagaaaaa

SEQ ID NO: 120091 - RNA, 22 nt, Human
aaaguggggucuagagggccug

SEQ ID NO: 120092 - RNA, 22 nt, Human
acugagcugugacaaugcuuaa

SEQ ID NO: 120093 - RNA, 22 nt, Human
agggcuggcaagggauugaaau

SEQ ID NO: 120094 - RNA, 22 nt, Human
auucuggccuuggcucugucac

SEQ ID NO: 120095 - RNA, 22 nt, Human
augcuguguggucaaguuaauu

SEQ ID NO: 120096 - RNA, 22 nt, Human
aggggccauuguucugcccgcu

SEQ ID NO: 120097 - RNA, 22 nt, Human
aauacacuauuuugugcucagu

SEQ ID NO: 120098 - RNA, 22 nt, Human
gcaggaagccuuaccaagccca

SEQ ID NO: 120099 - RNA, 22 nt, Human
ugaguccauugauggauaguga

SEQ ID NO: 120100 - RNA, 22 nt, Human
agggcugagugggagagaguug

SEQ ID NO: 120101 - RNA, 22 nt, Human
ugccaggccacguagcuucaag

SEQ ID NO: 120102 - RNA, 22 nt, Human
aucugguucuucuuaggcauca

SEQ ID NO: 120103 - RNA, 22 nt, Human
ucccugcacagccgagccaugc

SEQ ID NO: 120104 - RNA, 21 nt, Human
ugccaggccugagcugggguc

SEQ ID NO: 120105 - RNA, 22 nt, Human
auuuuaguuuuagcauccaugc

SEQ ID NO: 120106 - RNA, 22 nt, Human
agcagccacacgccuccuucuc

SEQ ID NO: 120107 - RNA, 22 nt, Human
acagugaugagggaauuuugug

SEQ ID NO: 120108 - RNA, 22 nt, Human
ugcaggaguccaaucaggagac

SEQ ID NO: 120109 - RNA, 20 nt, Human
aggcucagauacccagggaa

SEQ ID NO: 120110 - RNA, 22 nt, Human
gagaaggcuggucuuaagucga

SEQ ID NO: 120111 - RNA, 22 nt, Human
cccagccucugggcucacccaa

SEQ ID NO: 120112 - RNA, 20 nt, Human
aggcucaggguguuuaggaa

SEQ ID NO: 120113 - RNA, 22 nt, Human
ucuuaagcagagaagaaguuga

SEQ ID NO: 120114 - RNA, 22 nt, Human
cagugguauuugagagaaugga

SEQ ID NO: 120115 - RNA, 22 nt, Human
gugaggcagcaggagccucugu

SEQ ID NO: 120116 - RNA, 22 nt, Human
cauucauucagcaacuguuauu

SEQ ID NO: 120117 - RNA, 22 nt, Human
ugaggcaguucuuacuuguauu

SEQ ID NO: 120118 - RNA, 22 nt, Human
gacaucauagggugggaggaaa

SEQ ID NO: 120119 - RNA, 22 nt, Human
auauugaucuuggaacugauuu

SEQ ID NO: 120120 - RNA, 19 nt, Human
ggagaagcccaggaauccu

SEQ ID NO: 120121 - RNA, 22 nt, Human
guccugggggcagcugugucca

SEQ ID NO: 120122 - RNA, 22 nt, Human
caggaggcagagguugcagcga

SEQ ID NO: 120123 - RNA, 18 nt, Human
gguccugggccuggcuca

SEQ ID NO: 120124 - RNA, 22 nt, Human
caggaagagguaucaccgagca

SEQ ID NO: 120125 - RNA, 22 nt, Human
cagcuggaggagcagcuuccag

SEQ ID NO: 120126 - RNA, 22 nt, Human
gggacgggcaguccaagggguc

SEQ ID NO: 120127 - RNA, 22 nt, Human
cagggcuggcucaugaaaaguu

SEQ ID NO: 120128 - RNA, 22 nt, Human
gaagccacagagauuguggggg

SEQ ID NO: 120129 - RNA, 22 nt, Human
agcagggcuggggcacgagcca

SEQ ID NO: 120130 - RNA, 22 nt, Human
uaggcagauguuaacaggaaaa

SEQ ID NO: 120131 - RNA, 22 nt, Human
uuucucaacuguauuaugcaga

SEQ ID NO: 120132 - RNA, 22 nt, Human
ggagcagccacgucucagggca

SEQ ID NO: 120133 - RNA, 20 nt, Human
gaaggaagggggcaagguga

SEQ ID NO: 120134 - RNA, 22 nt, Human
uguguacacagauaguaauggc

SEQ ID NO: 120135 - RNA, 22 nt, Human
aauaugcaaauagguguaauga

SEQ ID NO: 120136 - RNA, 22 nt, Human
ggggacgggacuuagcaugagu

SEQ ID NO: 120137 - RNA, 22 nt, Human
gcagggcagcugaagcuaggug

SEQ ID NO: 120138 - RNA, 22 nt, Human
aggcagggugaugauaaugauu

SEQ ID NO: 120139 - RNA, 22 nt, Human
acaguuugagaaccacuagccu

SEQ ID NO: 120140 - RNA, 22 nt, Human
cauuugaagaagaaacguacua

SEQ ID NO: 120141 - RNA, 22 nt, Human
agcugauacauuucuuguagcc

SEQ ID NO: 120142 - RNA, 23 nt, Human
aggagacagggaagugccuggcu

SEQ ID NO: 120143 - RNA, 22 nt, Human
uucauacauguguacuguucca

SEQ ID NO: 120144 - RNA, 22 nt, Human
cuucuuucaagaauggauuagg

SEQ ID NO: 120145 - RNA, 22 nt, Human
uaugaacacacuuuggaaguga

SEQ ID NO: 120146 - RNA, 22 nt, Human
gucuggggcagcaaggcgcgcg

SEQ ID NO: 120147 - RNA, 22 nt, Human
aagggcagcuuaaauugguagc

SEQ ID NO: 120148 - RNA, 19 nt, Human
ugcagaagacacaguggug

SEQ ID NO: 120149 - RNA, 16 nt, Human
ucagggcagaauggca

SEQ ID NO: 120150 - RNA, 22 nt, Human
auacacuacuaagcacagauug

SEQ ID NO: 120151 - RNA, 22 nt, Human
ugcugagacaacaggaaacaag

SEQ ID NO: 120152 - RNA, 22 nt, Human
cagguauuaauaaauggagagu

SEQ ID NO: 120153 - RNA, 22 nt, Human
cagggacaauggcagagccuga

SEQ ID NO: 120154 - RNA, 22 nt, Human
cccaguggaaggaguagaagac

SEQ ID NO: 120155 - RNA, 22 nt, Human
gcagcuggauuucaagagggag

SEQ ID NO: 120156 - RNA, 22 nt, Human
ugcaaauguguagguuuacaua

SEQ ID NO: 120157 - RNA, 22 nt, Human
acauuuguuucucuagaguagg

SEQ ID NO: 120158 - RNA, 21 nt, Human
gguugguguguccaguggcca

SEQ ID NO: 120159 - RNA, 22 nt, Human
auacauuagcucauaugauuaa

SEQ ID NO: 120160 - RNA, 22 nt, Human
ugccaggccaauucuauuugac

SEQ ID NO: 120161 - RNA, 17 nt, Human
acaguuugucauucuaa

SEQ ID NO: 120162 - RNA, 22 nt, Human
aggagaaggaggccccucacac

SEQ ID NO: 120163 - RNA, 22 nt, Human
caggcagaaauuuuguuucauu

SEQ ID NO: 120164 - RNA, 22 nt, Human
agagucugaaugcucagaguug

SEQ ID NO: 120165 - RNA, 22 nt, Human
ugaggcuuagagaagaugggau

SEQ ID NO: 120166 - RNA, 22 nt, Human
agcaggugagcacagccaggcu

SEQ ID NO: 120167 - RNA, 22 nt, Human
agaucacaguggcaacucccuu

SEQ ID NO: 120168 - RNA, 22 nt, Human
uggggguccuccucugcuuaag

SEQ ID NO: 120169 - RNA, 22 nt, Human
caggaggcuuugggauccaagu

SEQ ID NO: 120170 - RNA, 22 nt, Human
uucaggauaugugauaucugaa

SEQ ID NO: 120171 - RNA, 22 nt, Human
uuuucucaagauccaaugcacu

SEQ ID NO: 120172 - RNA, 22 nt, Human
ucagaggagaccaaggggaaua

SEQ ID NO: 120173 - RNA, 20 nt, Human
gcagggcaucuuggccccca

SEQ ID NO: 120174 - RNA, 22 nt, Human
aggagggcuaggaaaaccagga

SEQ ID NO: 120175 - RNA, 22 nt, Human
aagggcagagggaaucccacau

SEQ ID NO: 120176 - RNA, 22 nt, Human
ucugugaacaucacauugacag

SEQ ID NO: 120177 - RNA, 22 nt, Human
ugaggcaggagaauggcgggaa

SEQ ID NO: 120178 - RNA, 22 nt, Human
guucagcccacagagggggccg

SEQ ID NO: 120179 - RNA, 22 nt, Human
aucaggaagccagucuaaugga

SEQ ID NO: 120180 - RNA, 22 nt, Human
uuuauauguauugacuuugaug

SEQ ID NO: 120181 - RNA, 22 nt, Human
cggggaggcuucggauuaaagc

SEQ ID NO: 120182 - RNA, 22 nt, Human
uggcugaguaaguugugauaug

SEQ ID NO: 120183 - RNA, 22 nt, Human
gggcugagaaguugaucccaag

SEQ ID NO: 120184 - RNA, 22 nt, Human
gcaaaggcuagagacacaggga

SEQ ID NO: 120185 - RNA, 22 nt, Human
ggugucuguugccuccugguua

SEQ ID NO: 120186 - RNA, 22 nt, Human
uuccucaggcuucccuuugucc

SEQ ID NO: 120187 - RNA, 22 nt, Human
agaagccauguuuaguaggaug

SEQ ID NO: 120188 - RNA, 22 nt, Human
acaguggagaagcaaaugcagu

SEQ ID NO: 120189 - RNA, 18 nt, Human
acauuuaggagagucaau

SEQ ID NO: 120190 - RNA, 22 nt, Human
uacaacauuguguugcuucaua

SEQ ID NO: 120191 - RNA, 22 nt, Human
ggcagugagcuggagggaagga

SEQ ID NO: 120192 - RNA, 22 nt, Human
caauuacuuuugcaccaauaua

SEQ ID NO: 120193 - RNA, 22 nt, Human
ggccaggcacugugugagauau

SEQ ID NO: 120194 - RNA, 22 nt, Human
cagcugagcucccaggccauca

SEQ ID NO: 120195 - RNA, 22 nt, Human
acagggcaugugcaagagacau

SEQ ID NO: 120196 - RNA, 22 nt, Human
agugcagagaccuggucaggca

SEQ ID NO: 120197 - RNA, 22 nt, Human
caugcugugguaaaucacugaa

SEQ ID NO: 120198 - RNA, 22 nt, Human
ugcaggagaaaguacggagcgu

SEQ ID NO: 120199 - RNA, 21 nt, Human
aggcucagcagguguauaaag

SEQ ID NO: 120200 - RNA, 22 nt, Human
uuauccaacaugacuuaugucc

SEQ ID NO: 120201 - RNA, 22 nt, Human
ggugggucuugcggggcagcuu

SEQ ID NO: 120202 - RNA, 22 nt, Human
caaggcaguuccccagagggcu

SEQ ID NO: 120203 - RNA, 22 nt, Human
agagcugcaauuucauguggug

SEQ ID NO: 120204 - RNA, 23 nt, Human
uggcugagguccagguaguuuca

SEQ ID NO: 120205 - RNA, 21 nt, Human
aggcccagagucuugggggga

SEQ ID NO: 120206 - RNA, 18 nt, Human
gcagugaagaaagagcuu

SEQ ID NO: 120207 - RNA, 22 nt, Human
uuuauaguagcaugauuuauag

SEQ ID NO: 120208 - RNA, 22 nt, Human
uccuggcccggccgggccugcu

SEQ ID NO: 120209 - RNA, 22 nt, Human
uuugugcaagacaugcuaagag

SEQ ID NO: 120210 - RNA, 22 nt, Human
uggcagagaugaagaguuguuu

SEQ ID NO: 120211 - RNA, 22 nt, Human
aucauaacuguaauucaucuac

SEQ ID NO: 120212 - RNA, 22 nt, Human
uggcugagggggcucugcucag

SEQ ID NO: 120213 - RNA, 22 nt, Human
ugccaggcugaacagggucuua

SEQ ID NO: 120214 - RNA, 23 nt, Human
uuucucaaagaguggcagcuuca

SEQ ID NO: 120215 - RNA, 22 nt, Human
aggcuucagaaagaguaauugg

SEQ ID NO: 120216 - RNA, 22 nt, Human
gaagggugugugugagggacac

SEQ ID NO: 120217 - RNA, 23 nt, Human
ggcaccaggccauggagcgggag

SEQ ID NO: 120218 - RNA, 22 nt, Human
cauaucauaggucuuggauaau

SEQ ID NO: 120219 - RNA, 22 nt, Human
uacaucuaucuagaugcucaga

SEQ ID NO: 120220 - RNA, 22 nt, Human
acugugcaguguuguaacccga

SEQ ID NO: 120221 - RNA, 23 nt, Human
cuggaagugcuuuuauagcuuug

SEQ ID NO: 120222 - RNA, 20 nt, Human
uauuuacaacuuagagccuc

SEQ ID NO: 120223 - RNA, 22 nt, Human
acaugaaacuguugcauuagaa

SEQ ID NO: 120224 - RNA, 22 nt, Human
agagugaaaagcuagagcagua

SEQ ID NO: 120225 - RNA, 22 nt, Human
uacagcuagagggcacgugaac

SEQ ID NO: 120226 - RNA, 22 nt, Human
ucccaggugaugcugaggccac

SEQ ID NO: 120227 - RNA, 22 nt, Human
ugagaagcugcuugugcuguau

SEQ ID NO: 120228 - RNA, 22 nt, Human
acauuagaacauuaauauuggg

SEQ ID NO: 120229 - RNA, 22 nt, Human
acauucuagauauguuauauuu

SEQ ID NO: 120230 - RNA, 22 nt, Human
ccccaccagcacccucucuauc

SEQ ID NO: 120231 - RNA, 20 nt, Human
uccaguggccugaaucugga

SEQ ID NO: 120232 - RNA, 22 nt, Human
uaggaaaauaucucuuauuggg

SEQ ID NO: 120233 - RNA, 22 nt, Human
gggcugaggcuaccacuggucu

SEQ ID NO: 120234 - RNA, 22 nt, Human
uccugaggcacaauccuagaau

SEQ ID NO: 120235 - RNA, 22 nt, Human
uggcugagccacuuguucagau

SEQ ID NO: 120236 - RNA, 19 nt, Human
gaaaggcugcugcuaccug

SEQ ID NO: 120237 - RNA, 22 nt, Human
gaagccaggggccugacaggca

SEQ ID NO: 120238 - RNA, 22 nt, Human
auuugcauaucugauagacuaa

SEQ ID NO: 120239 - RNA, 22 nt, Human
cauuauggcagccaggauauug

SEQ ID NO: 120240 - RNA, 22 nt, Human
ucaaaggcuugugguucuggga

SEQ ID NO: 120241 - RNA, 22 nt, Human
gauaacauuuugaagugcuagu

SEQ ID NO: 120242 - RNA, 22 nt, Human
ggcagagguagcuggaaccagg

SEQ ID NO: 120243 - RNA, 18 nt, Human
uacaucuauauaguguuu

SEQ ID NO: 120244 - RNA, 22 nt, Human
uuuugaaagccagguuuguaug

SEQ ID NO: 120245 - RNA, 22 nt, Human
augaacaucggaaaugagacug

SEQ ID NO: 120246 - RNA, 22 nt, Human
cagggcagagccaggauuucaa

SEQ ID NO: 120247 - RNA, 22 nt, Human
uacuguuuucuauaauggcugu

SEQ ID NO: 120248 - RNA, 22 nt, Human
ucucugagguuguuuccagcac

SEQ ID NO: 120249 - RNA, 22 nt, Human
uagggcagccuuauagcuccca

SEQ ID NO: 120250 - RNA, 22 nt, Human
aggcugagguaggaggaucgcu

SEQ ID NO: 120251 - RNA, 22 nt, Human
cagcagcauugcucuggauucc

SEQ ID NO: 120252 - RNA, 22 nt, Human
ccaggguaccccaagggcaggu

SEQ ID NO: 120253 - RNA, 22 nt, Human
gaggcagagguuguugcaguga

SEQ ID NO: 120254 - RNA, 22 nt, Human
aagccaguccucuacugggcac

SEQ ID NO: 120255 - RNA, 22 nt, Human
uugcagcuuagugauguuaucu

SEQ ID NO: 120256 - RNA, 22 nt, Human
uccugagaaggcacagcuugca

SEQ ID NO: 120257 - RNA, 22 nt, Human
acaugcauucucuaaaagcaaa

SEQ ID NO: 120258 - RNA, 22 nt, Human
cugagcaggauauucacagcag

SEQ ID NO: 120259 - RNA, 22 nt, Human
ugcacagugaccacugagcaag

SEQ ID NO: 120260 - RNA, 22 nt, Human
agcugcccaaggucacagagcu

SEQ ID NO: 120261 - RNA, 22 nt, Human
agcugcccuuuaugaugcugaa

SEQ ID NO: 120262 - RNA, 22 nt, Human
ugcucccaggcucuguggucug

SEQ ID NO: 120263 - RNA, 22 nt, Human
aggcagguccccuggaaggcac

SEQ ID NO: 120264 - RNA, 22 nt, Human
gucaucauuuuuagcauauggg

SEQ ID NO: 120265 - RNA, 22 nt, Human
uuguacauucugaaucuguccu

SEQ ID NO: 120266 - RNA, 22 nt, Human
gaggcaggguguugauuacaga

SEQ ID NO: 120267 - RNA, 20 nt, Human
caggcaguuugugguuaggg

SEQ ID NO: 120268 - RNA, 18 nt, Human
ggaaaccacaggguucug

SEQ ID NO: 120269 - RNA, 22 nt, Human
ucuccugguuuguuaaauaauu

SEQ ID NO: 120270 - RNA, 22 nt, Human
ugggggacugcacuggcgucag

SEQ ID NO: 120271 - RNA, 22 nt, Human
ccugcucagccccagcucaccc

SEQ ID NO: 120272 - RNA, 18 nt, Human
gugugcaguugcaggggu

SEQ ID NO: 120273 - RNA, 22 nt, Human
uaaacauguugacaucuuaccu

SEQ ID NO: 120274 - RNA, 22 nt, Human
ggccaggcugcccugggagcag

SEQ ID NO: 120275 - RNA, 22 nt, Human
auuugucauguauguaaaguug

SEQ ID NO: 120276 - RNA, 22 nt, Human
uguggcagcuggagguggagaa

SEQ ID NO: 120277 - RNA, 22 nt, Human
augaggcagucuggccugaggg

SEQ ID NO: 120278 - RNA, 22 nt, Human
gagagugaggcaucaggggcag

SEQ ID NO: 120279 - RNA, 22 nt, Human
agcuguggaagacugucagggu

SEQ ID NO: 120280 - RNA, 22 nt, Human
ugaggaaacuuacaaggcagaa

SEQ ID NO: 120281 - RNA, 22 nt, Human
uggcucaguuugggggauugaa

SEQ ID NO: 120282 - RNA, 22 nt, Human
agugcugucuccuucccccggg

SEQ ID NO: 120283 - RNA, 22 nt, Human
gaggcucaccuagggagcacug

SEQ ID NO: 120284 - RNA, 22 nt, Human
ugcagggaacuuggacagcuag

SEQ ID NO: 120285 - RNA, 22 nt, Human
uaugcacacauuagcacagggu

SEQ ID NO: 120286 - RNA, 22 nt, Human
caccauaaaaauaagagaugcc

SEQ ID NO: 120287 - RNA, 22 nt, Human
uccugaggacuaacaggaagga

SEQ ID NO: 120288 - RNA, 22 nt, Human
cuucuucagcacaauauugaug

SEQ ID NO: 120289 - RNA, 22 nt, Human
uggcugaguuucaugcaucaug

SEQ ID NO: 120290 - RNA, 22 nt, Human
cagcaguggcugcaggcagcug

SEQ ID NO: 120291 - RNA, 22 nt, Human
guggggguuucauuaagacaau

SEQ ID NO: 120292 - RNA, 22 nt, Human
ccugagugccaugagagcaccc

SEQ ID NO: 120293 - RNA, 22 nt, Human
uuuguaaauagcaguacucaug

SEQ ID NO: 120294 - RNA, 22 nt, Human
cucuguccuccaccugcuuuca

SEQ ID NO: 120295 - RNA, 22 nt, Human
agggaguuccgaucugugcacc

SEQ ID NO: 120296 - RNA, 20 nt, Human
uuggcucugaucaguggagc

SEQ ID NO: 120297 - RNA, 22 nt, Human
gggaagguauuuagcugcugaa

SEQ ID NO: 120298 - RNA, 22 nt, Human
gggcugagaauucagcuuuccu

SEQ ID NO: 120299 - RNA, 22 nt, Human
aggcuucagguuugcuuugcag

SEQ ID NO: 120300 - RNA, 22 nt, Human
ggugagggacaucacucagcca

SEQ ID NO: 120301 - RNA, 22 nt, Human
ucauuguuucugcuuuucauga

SEQ ID NO: 120302 - RNA, 22 nt, Human
aggcucagucccggcccgcgcc

SEQ ID NO: 120303 - RNA, 22 nt, Human
uaguggaguagaaaccaaagaa

SEQ ID NO: 120304 - RNA, 22 nt, Human
ccaggggaaacagggagcacuc

SEQ ID NO: 120305 - RNA, 17 nt, Human
agggacagcaguuuagg

SEQ ID NO: 120306 - RNA, 22 nt, Human
cugggggucuugaaagggagag

SEQ ID NO: 120307 - RNA, 22 nt, Human
gaggcagugaacaauuccugug

SEQ ID NO: 120308 - RNA, 22 nt, Human
cuggagguaauguuauuuuugu

SEQ ID NO: 120309 - RNA, 22 nt, Human
gcugagauuacgggcaugagcc

SEQ ID NO: 120310 - RNA, 22 nt, Human
gggagccacagugaggugcaug

SEQ ID NO: 120311 - RNA, 22 nt, Human
uuaucacuuaugagcuuuuugc

SEQ ID NO: 120312 - RNA, 22 nt, Human
ugaugauaugaaagaaucuuua

SEQ ID NO: 120313 - RNA, 22 nt, Human
ugaggcucaagaaagauuuguu

SEQ ID NO: 120314 - RNA, 22 nt, Human
uuauuauugugaccugagaaug

SEQ ID NO: 120315 - RNA, 22 nt, Human
aaauuauuaugccccucuauaa

SEQ ID NO: 120316 - RNA, 22 nt, Human
aggcugaggcaagaggaucacu

SEQ ID NO: 120317 - RNA, 22 nt, Human
cagggccaugaggcacaggguc

SEQ ID NO: 120318 - RNA, 23 nt, Human
agcaggaaaccgagggugauguu

SEQ ID NO: 120319 - RNA, 22 nt, Human
ugcuggaggcaguggaggugcc

SEQ ID NO: 120320 - RNA, 22 nt, Human
cauucauuagaauagauaugua

SEQ ID NO: 120321 - RNA, 22 nt, Human
gggcugagucugcugccuguca

SEQ ID NO: 120322 - RNA, 22 nt, Human
ggagucaccaaguaggagucuu

SEQ ID NO: 120323 - RNA, 22 nt, Human
ucagggcauccauugccuguug

SEQ ID NO: 120324 - RNA, 22 nt, Human
cugauuccaaagccaaagcuau

SEQ ID NO: 120325 - RNA, 22 nt, Human
caccaggcugcccaggacaggg

SEQ ID NO: 120326 - RNA, 22 nt, Human
cacccuagcugucauuucaguu

SEQ ID NO: 120327 - RNA, 22 nt, Human
ugaggcaggacuugcauaaagu

SEQ ID NO: 120328 - RNA, 22 nt, Human
cuguaaauaugaagaauauaug

SEQ ID NO: 120329 - RNA, 19 nt, Human
auacuaggucaugauaauc

SEQ ID NO: 120330 - RNA, 22 nt, Human
gccacaugucaugugcucagua

SEQ ID NO: 120331 - RNA, 22 nt, Human
ucagcccugaggacagaggcag

SEQ ID NO: 120332 - RNA, 20 nt, Human
ggcaccaggcuaggauugga

SEQ ID NO: 120333 - RNA, 20 nt, Human
cuucuucaguaguuuguucu

SEQ ID NO: 120334 - RNA, 22 nt, Human
agcagagguuuguuggaaaccu

SEQ ID NO: 120335 - RNA, 22 nt, Human
gcaagaaaaaggcuucaugaac

SEQ ID NO: 120336 - RNA, 22 nt, Human
auacauucaaaggaaggauaga

SEQ ID NO: 120337 - RNA, 22 nt, Human
aggcaguggagcuggaauaggc

SEQ ID NO: 120338 - RNA, 22 nt, Human
aauguggauccuuacagauacc

SEQ ID NO: 120339 - RNA, 22 nt, Human
agacauuuauugaacaccuagc

SEQ ID NO: 120340 - RNA, 22 nt, Human
aguggcagacacaaugugggca

SEQ ID NO: 120341 - RNA, 18 nt, Human
ugucauaauauaucaccu

SEQ ID NO: 120342 - RNA, 21 nt, Human
uuagaguugccauuauaugua

SEQ ID NO: 120343 - RNA, 22 nt, Human
auacacguguguguacaugcac

SEQ ID NO: 120344 - RNA, 22 nt, Human
cacaggagaacccacagauucu

SEQ ID NO: 120345 - RNA, 22 nt, Human
ugaggcaggaauggggaaaagu

SEQ ID NO: 120346 - RNA, 22 nt, Human
ccuccaguacuccaguccagcg

SEQ ID NO: 120347 - RNA, 22 nt, Human
ugagcagacuugaugaggcagc

SEQ ID NO: 120348 - RNA, 18 nt, Human
agaagccacgaggagucc

SEQ ID NO: 120349 - RNA, 17 nt, Human
ggcaccagacggagagu

SEQ ID NO: 120350 - RNA, 22 nt, Human
cagcugagaaauggggaaaggg

SEQ ID NO: 120351 - RNA, 21 nt, Human
ggagaaggacaauguugagua

SEQ ID NO: 120352 - RNA, 22 nt, Human
gcagggcauagaggcacggagg

SEQ ID NO: 120353 - RNA, 22 nt, Human
gggcuguaggagcuggaauggg

SEQ ID NO: 120354 - RNA, 22 nt, Human
ugggcagggucucuguuaucag

SEQ ID NO: 120355 - RNA, 22 nt, Human
acacuagcuauuaacuucacau

SEQ ID NO: 120356 - RNA, 22 nt, Human
agagaugcaggguacauggaau

SEQ ID NO: 120357 - RNA, 22 nt, Human
cagugcaguugguggcaggggu

SEQ ID NO: 120358 - RNA, 22 nt, Human
agagguauuagauuugcauagg

SEQ ID NO: 120359 - RNA, 22 nt, Human
aaggaagagucuagaacaggca

SEQ ID NO: 120360 - RNA, 22 nt, Human
gaaguggaauuacugggucaua

SEQ ID NO: 120361 - RNA, 22 nt, Human
ucagccucucugaguccagacc

SEQ ID NO: 120362 - RNA, 22 nt, Human
uugagcaauuaggaaauaaaga

SEQ ID NO: 120363 - RNA, 22 nt, Human
aaguacauguuguucaaaagcc

SEQ ID NO: 120364 - RNA, 22 nt, Human
agcagggccuggcacuccuggg

SEQ ID NO: 120365 - RNA, 18 nt, Human
gguggcaggucagaugcc

SEQ ID NO: 120366 - RNA, 22 nt, Human
ucagggcauucaagaggccugg

SEQ ID NO: 120367 - RNA, 22 nt, Human
caucaaauuaugugucaaagca

SEQ ID NO: 120368 - RNA, 22 nt, Human
acauuugugcaacguauccaca

SEQ ID NO: 120369 - RNA, 22 nt, Human
uuuacugucucagagagacaaa

SEQ ID NO: 120370 - RNA, 22 nt, Human
gacacagggggauguguggacg

SEQ ID NO: 120371 - RNA, 22 nt, Human
ccagguguagcacugcucacag

SEQ ID NO: 120372 - RNA, 22 nt, Human
uccugccuaccuugcggaggug

SEQ ID NO: 120373 - RNA, 22 nt, Human
agggcaguguggugggacugac

SEQ ID NO: 120374 - RNA, 22 nt, Human
agcugugcugccaaguugcuga

SEQ ID NO: 120375 - RNA, 22 nt, Human
uggcugaggucuggggcuucug

SEQ ID NO: 120376 - RNA, 22 nt, Human
ugcccauguuucucuguauccc

SEQ ID NO: 120377 - RNA, 22 nt, Human
cugaggcuggggaagggaagug

SEQ ID NO: 120378 - RNA, 22 nt, Human
agggagccuuccuggcuguggu

SEQ ID NO: 120379 - RNA, 22 nt, Human
gaggcucagagugguuaaauaa

SEQ ID NO: 120380 - RNA, 22 nt, Human
gaagggugcauggagggaaguc

SEQ ID NO: 120381 - RNA, 22 nt, Human
gccaccaggagcccaguccaaa

SEQ ID NO: 120382 - RNA, 22 nt, Human
augaacaaucuggcaagaacuu

SEQ ID NO: 120383 - RNA, 22 nt, Human
gucaaacagccuccuguucuaa

SEQ ID NO: 120384 - RNA, 22 nt, Human
acaggauuaauaaaaaauugua

SEQ ID NO: 120385 - RNA, 22 nt, Human
ucacucagguucaugucuuugu

SEQ ID NO: 120386 - RNA, 22 nt, Human
gagggcagugaauuuugaagcu

SEQ ID NO: 120387 - RNA, 17 nt, Human
aggcaggagauuggaga

SEQ ID NO: 120388 - RNA, 23 nt, Human
aguacauucgaaaaauucuguga

SEQ ID NO: 120389 - RNA, 22 nt, Human
gagcacagaaggagaaauaugg

SEQ ID NO: 120390 - RNA, 22 nt, Human
aggagguggcugaacuugaggg

SEQ ID NO: 120391 - RNA, 22 nt, Human
gggcagagagcuggaacuccuu

SEQ ID NO: 120392 - RNA, 22 nt, Human
ugucauggcugaaagugggggc

SEQ ID NO: 120393 - RNA, 22 nt, Human
agccaggccagcugucuugagu

SEQ ID NO: 120394 - RNA, 22 nt, Human
uuucucaacagaguaugcccuu

SEQ ID NO: 120395 - RNA, 22 nt, Human
cauuuguucaaccauucucgcu

SEQ ID NO: 120396 - RNA, 22 nt, Human
ugcacaguucgccuucuccaag

SEQ ID NO: 120397 - RNA, 22 nt, Human
aaagccaguucuuagagaaagc

SEQ ID NO: 120398 - RNA, 22 nt, Human
ugggcaggggcccugcuuccgu

SEQ ID NO: 120399 - RNA, 22 nt, Human
caggagccgccaggcacguugg

SEQ ID NO: 120400 - RNA, 22 nt, Human
caugggcaguuggcagggcuca

SEQ ID NO: 120401 - RNA, 22 nt, Human
ccuucauucauuaauuuagccc

SEQ ID NO: 120402 - RNA, 22 nt, Human
cacaggaauuagcagccuaaaa

SEQ ID NO: 120403 - RNA, 22 nt, Human
uggggcuccuccuggcaggagg

SEQ ID NO: 120404 - RNA, 23 nt, Human
uuuauauuccuaaugucuugagc

SEQ ID NO: 120405 - RNA, 22 nt, Human
cgcauacauagaaacacacaga

SEQ ID NO: 120406 - RNA, 22 nt, Human
ucuaauuuuggcauuuuaaccu

SEQ ID NO: 120407 - RNA, 22 nt, Human
uaugauuuguagacauuugauu

SEQ ID NO: 120408 - RNA, 22 nt, Human
ggcugugcgucauccggcugca

SEQ ID NO: 120409 - RNA, 22 nt, Human
ggccagagagcagccaggauuc

SEQ ID NO: 120410 - RNA, 22 nt, Human
ugcaaauccuguuuggaguaag

SEQ ID NO: 120411 - RNA, 22 nt, Human
cagggcccagucccugcuguca

SEQ ID NO: 120412 - RNA, 22 nt, Human
uaacauuuaaauuuuucacaua

SEQ ID NO: 120413 - RNA, 22 nt, Human
aguuggguuugugucaguugca

SEQ ID NO: 120414 - RNA, 22 nt, Human
agcugaggcucugagagggaag

SEQ ID NO: 120415 - RNA, 22 nt, Human
gagugcaguuggggugagggga

SEQ ID NO: 120416 - RNA, 16 nt, Human
uagggcugggaaggag

SEQ ID NO: 120417 - RNA, 22 nt, Human
gagaagcagguuuagcagacaa

SEQ ID NO: 120418 - RNA, 22 nt, Human
gguggaaggccuggaaggaggc

SEQ ID NO: 120419 - RNA, 22 nt, Human
auccaggguguggagagagcuc

SEQ ID NO: 120420 - RNA, 22 nt, Human
ugccaggcauauggccucuuug

SEQ ID NO: 120421 - RNA, 22 nt, Human
auccagggauaaaaguaagguu

SEQ ID NO: 120422 - RNA, 22 nt, Human
ggaggcagaacuucccgucagu

SEQ ID NO: 120423 - RNA, 22 nt, Human
ugcacaggccuugaagggagag

SEQ ID NO: 120424 - RNA, 21 nt, Human
agcagaggcagaauguaugca

SEQ ID NO: 120425 - RNA, 22 nt, Human
cggggagggcagaggcucccuc

SEQ ID NO: 120426 - RNA, 22 nt, Human
agcagguguagggcucuuugua

SEQ ID NO: 120427 - RNA, 21 nt, Human
uuacuggcagcagaaaccuga

SEQ ID NO: 120428 - RNA, 20 nt, Human
uggcugugggcaucuguuuc

SEQ ID NO: 120429 - RNA, 21 nt, Human
gaacauuuggguuguuucuac

SEQ ID NO: 120430 - RNA, 22 nt, Human
cugccaggacugacgucuucag

SEQ ID NO: 120431 - RNA, 21 nt, Human
gcugugcagaggauggagugg

SEQ ID NO: 120432 - RNA, 22 nt, Human
aguuuccaaauauuguuuuagc

SEQ ID NO: 120433 - RNA, 22 nt, Human
ucccugcagacguccugcgggu

SEQ ID NO: 120434 - RNA, 22 nt, Human
gcucccagggaccgcagggcag

SEQ ID NO: 120435 - RNA, 17 nt, Human
gcaagggaugggagauu

SEQ ID NO: 120436 - RNA, 22 nt, Human
acugcccucccaucuauugcaa

SEQ ID NO: 120437 - RNA, 22 nt, Human
ucagagguaguagcagaguuga

SEQ ID NO: 120438 - RNA, 22 nt, Human
ccagggcagcagaauuggggca

SEQ ID NO: 120439 - RNA, 22 nt, Human
ucaaacagcaggucuuucauag

SEQ ID NO: 120440 - RNA, 22 nt, Human
gcacuagauacuguucaggaaa

SEQ ID NO: 120441 - RNA, 19 nt, Human
ggugugaagugaggaguua

SEQ ID NO: 120442 - RNA, 22 nt, Human
cagucaccaccagguggcagua

SEQ ID NO: 120443 - RNA, 22 nt, Human
ggcaggugaccuggccucccag

SEQ ID NO: 120444 - RNA, 20 nt, Human
auuugcaucugaauaacuua

SEQ ID NO: 120445 - RNA, 18 nt, Human
ugaugcaagagugagcua

SEQ ID NO: 120446 - RNA, 22 nt, Human
guuuuccacuggauuguuugga

SEQ ID NO: 120447 - RNA, 22 nt, Human
gaagaagguggcccagggguag

SEQ ID NO: 120448 - RNA, 22 nt, Human
agccugugugcuuuggacaggg

SEQ ID NO: 120449 - RNA, 22 nt, Human
aguggcagaagccaagucugca

SEQ ID NO: 120450 - RNA, 22 nt, Human
aguggcaguuugggagcuacag

SEQ ID NO: 120451 - RNA, 22 nt, Human
ccugcgggcugguaagaggcuu

SEQ ID NO: 120452 - RNA, 22 nt, Human
aucagugcugagagacuaucaa

SEQ ID NO: 120453 - RNA, 22 nt, Human
ggucauuguucuuuucugugau

SEQ ID NO: 120454 - RNA, 22 nt, Human
uauuuacuuuuaaauugagaac

SEQ ID NO: 120455 - RNA, 22 nt, Human
agugcaaaauucagaagcaauu

SEQ ID NO: 120456 - RNA, 22 nt, Human
ugauuaaauuaauuaagaugag

SEQ ID NO: 120457 - RNA, 22 nt, Human
gaagccacuauagauauucuaa

SEQ ID NO: 120458 - RNA, 22 nt, Human
cccagccucuggauucugcccu

SEQ ID NO: 120459 - RNA, 22 nt, Human
acaguggaagaagcacugaacu

SEQ ID NO: 120460 - RNA, 22 nt, Human
cacagcuggugacagagcccag

SEQ ID NO: 120461 - RNA, 22 nt, Human
uuugacaugaaguagcuuauaa

SEQ ID NO: 120462 - RNA, 22 nt, Human
aggcagcauuucugcuuaucca

SEQ ID NO: 120463 - RNA, 22 nt, Human
acaaguggguccuacauaaagc

SEQ ID NO: 120464 - RNA, 22 nt, Human
ugggcagggaucucuuuugcaa

SEQ ID NO: 120465 - RNA, 22 nt, Human
ugggccaggcaugugaucagca

SEQ ID NO: 120466 - RNA, 22 nt, Human
aucaggaaauacuuauuuauaa

SEQ ID NO: 120467 - RNA, 22 nt, Human
ucucugagcugcuucuugcaua

SEQ ID NO: 120468 - RNA, 22 nt, Human
agagccacggcaggccuaggaa

SEQ ID NO: 120469 - RNA, 22 nt, Human
ugggagcacccugaggagcuuc

SEQ ID NO: 120470 - RNA, 22 nt, Human
gcauaucagcaucaaaacacag

SEQ ID NO: 120471 - RNA, 22 nt, Human
aauggcacuuuauaaauguuaa

SEQ ID NO: 120472 - RNA, 22 nt, Human
agccaggcagacucucuuucuu

SEQ ID NO: 120473 - RNA, 22 nt, Human
ggaccugaacauaaaacgaggc

SEQ ID NO: 120474 - RNA, 22 nt, Human
ccuucccuaaagcgucgcuuag

SEQ ID NO: 120475 - RNA, 22 nt, Human
gggagaaggagcuaguucuuga

SEQ ID NO: 120476 - RNA, 22 nt, Human
ccagugcacagccaggcaggug

SEQ ID NO: 120477 - RNA, 22 nt, Human
auauggaaugguaaucuacaau

SEQ ID NO: 120478 - RNA, 21 nt, Human
agccaggcaagcacccccacu

SEQ ID NO: 120479 - RNA, 22 nt, Human
ggaagccagaaagugagaauau

SEQ ID NO: 120480 - RNA, 22 nt, Human
uccuggggaggguucuggcucc

SEQ ID NO: 120481 - RNA, 22 nt, Human
gaauucugguccuguccaaggu

SEQ ID NO: 120482 - RNA, 22 nt, Human
gcauggcagugaggauggugcu

SEQ ID NO: 120483 - RNA, 22 nt, Human
uagagaugaauucugcagucuu

SEQ ID NO: 120484 - RNA, 22 nt, Human
ggagggagcauccccuugcuga

SEQ ID NO: 120485 - RNA, 22 nt, Human
aguggaguugaguugauggauu

SEQ ID NO: 120486 - RNA, 22 nt, Human
gcagagcaccaaagugaaagau

SEQ ID NO: 120487 - RNA, 22 nt, Human
ccagagggccuuuggaguuauc

SEQ ID NO: 120488 - RNA, 22 nt, Human
aaacagugauguugaguguaaa

SEQ ID NO: 120489 - RNA, 22 nt, Human
augagcaauuaggaagaaaaca

SEQ ID NO: 120490 - RNA, 22 nt, Human
caggagcagaggguggucagca

SEQ ID NO: 120491 - RNA, 22 nt, Human
agguggcaggaggucagagaaa

SEQ ID NO: 120492 - RNA, 19 nt, Human
gacucacaccuuccgcugu

SEQ ID NO: 120493 - RNA, 19 nt, Human
aggcaggugcagagguccc

SEQ ID NO: 120494 - RNA, 22 nt, Human
uuaaauuuuagaaacagacucu

SEQ ID NO: 120495 - RNA, 22 nt, Human
ucagggcagccuaaggcaccuc

SEQ ID NO: 120496 - RNA, 22 nt, Human
gaggccacgguuuuccuugggg

SEQ ID NO: 120497 - RNA, 22 nt, Human
cauaaacucucuguaccaauau

SEQ ID NO: 120498 - RNA, 22 nt, Human
uaggcaggcugaauguagauuu

SEQ ID NO: 120499 - RNA, 22 nt, Human
ucaucacauguguagucauccc

SEQ ID NO: 120500 - RNA, 22 nt, Human
gcagaggacacaggagggcaag

SEQ ID NO: 120501 - RNA, 22 nt, Human
gcugagagcaaagcaugucuag

SEQ ID NO: 120502 - RNA, 22 nt, Human
gagggaccccaggcuggcccuu

SEQ ID NO: 120503 - RNA, 22 nt, Human
accagagcuggcucugagcacc

SEQ ID NO: 120504 - RNA, 22 nt, Human
cauuuguaucauauguaucuua

SEQ ID NO: 120505 - RNA, 22 nt, Human
ggcagggcuugucucugugaug

SEQ ID NO: 120506 - RNA, 22 nt, Human
guuuacauuaaguauuagcauc

SEQ ID NO: 120507 - RNA, 21 nt, Human
augggcagaggcagagaggcu

SEQ ID NO: 120508 - RNA, 22 nt, Human
uaugaauucuguucauugauga

SEQ ID NO: 120509 - RNA, 18 nt, Human
ggcugugcguggaggcug

SEQ ID NO: 120510 - RNA, 22 nt, Human
ggggccagguccagcuuccaaa

SEQ ID NO: 120511 - RNA, 22 nt, Human
acuugguugaugucauaagguu

SEQ ID NO: 120512 - RNA, 22 nt, Human
auaccauuuccauguuacauua

SEQ ID NO: 120513 - RNA, 22 nt, Human
ggcuguggggccggguacagug

SEQ ID NO: 120514 - RNA, 22 nt, Human
uucauacauuuuuacuaacagc

SEQ ID NO: 120515 - RNA, 22 nt, Human
uaugcauagguaucuauacuca

SEQ ID NO: 120516 - RNA, 22 nt, Human
ggcuguggucauuaggagguug

SEQ ID NO: 120517 - RNA, 22 nt, Human
gggcaguggguggcugcagccu

SEQ ID NO: 120518 - RNA, 22 nt, Human
aggcugugcaauuaggguaaga

SEQ ID NO: 120519 - RNA, 22 nt, Human
caagauggagaagcagcaaggg

SEQ ID NO: 120520 - RNA, 22 nt, Human
gaggcucagggaguauaugaau

SEQ ID NO: 120521 - RNA, 22 nt, Human
agaaaauauucauugagaggcu

SEQ ID NO: 120522 - RNA, 22 nt, Human
uucagauguggcuuugucaggc

SEQ ID NO: 120523 - RNA, 22 nt, Human
aaagccacugcauguguaguau

SEQ ID NO: 120524 - RNA, 22 nt, Human
gaagcuaaaccacagcuaagaa

SEQ ID NO: 120525 - RNA, 22 nt, Human
cugcacaaugcaccaucaaguu

SEQ ID NO: 120526 - RNA, 22 nt, Human
uaaaaucauucuggugucagua

SEQ ID NO: 120527 - RNA, 22 nt, Human
ccagaggagggcucugaugagg

SEQ ID NO: 120528 - RNA, 22 nt, Human
aagccaguguccagaaugggca

SEQ ID NO: 120529 - RNA, 22 nt, Human
acugugcacccuggacaguguc

SEQ ID NO: 120530 - RNA, 23 nt, Human
acagugaaacacgcaguaagagu

SEQ ID NO: 120531 - RNA, 22 nt, Human
uuuauuaugauggacaccuucg

SEQ ID NO: 120532 - RNA, 22 nt, Human
auuaaauuggaucugcauaguu

SEQ ID NO: 120533 - RNA, 19 nt, Human
ggccaccucucuucccagg

SEQ ID NO: 120534 - RNA, 22 nt, Human
agcagggcuggauuuggcaaga

SEQ ID NO: 120535 - RNA, 22 nt, Human
ugauuacaauugucuuagauuu

SEQ ID NO: 120536 - RNA, 22 nt, Human
aguggcaguagaugagcugguu

SEQ ID NO: 120537 - RNA, 22 nt, Human
guagaaaaagcaguaagucuca

SEQ ID NO: 120538 - RNA, 22 nt, Human
cugcugugggcaggguagcugg

SEQ ID NO: 120539 - RNA, 22 nt, Human
uggcugagaaguucugguggga

SEQ ID NO: 120540 - RNA, 22 nt, Human
gcauccagagguagccacugug

SEQ ID NO: 120541 - RNA, 22 nt, Human
ucacuggggccaugugagggac

SEQ ID NO: 120542 - RNA, 22 nt, Human
ugcaguggaaucuggagagcag

SEQ ID NO: 120543 - RNA, 22 nt, Human
aauuuuauuaacuggauguagc

SEQ ID NO: 120544 - RNA, 22 nt, Human
acccuguugguggaucagauug

SEQ ID NO: 120545 - RNA, 20 nt, Human
ucucccaggcucagggaaga

SEQ ID NO: 120546 - RNA, 22 nt, Human
ggcagccauacucagaccuggg

SEQ ID NO: 120547 - RNA, 22 nt, Human
auuuggucacaccaguccacau

SEQ ID NO: 120548 - RNA, 22 nt, Human
ucaggauuauuucaguggcuuu

SEQ ID NO: 120549 - RNA, 20 nt, Human
gcuguugccaguacagaugg

SEQ ID NO: 120550 - RNA, 22 nt, Human
caccagggcagcagccuagucu

SEQ ID NO: 120551 - RNA, 19 nt, Human
ucugugcugggaggcagca

SEQ ID NO: 120552 - RNA, 22 nt, Human
uggcugagguuaugcugguugu

SEQ ID NO: 120553 - RNA, 22 nt, Human
gggcagaggggcgcuucccucu

SEQ ID NO: 120554 - RNA, 22 nt, Human
aagugauuuucuucuuaguuau

SEQ ID NO: 120555 - RNA, 22 nt, Human
ggaagggcaauaaaaucucagg

SEQ ID NO: 120556 - RNA, 21 nt, Human
gacauccaugugaguggcagu

SEQ ID NO: 120557 - RNA, 22 nt, Human
aacauugccaugguuaauuuua

SEQ ID NO: 120558 - RNA, 22 nt, Human
ugaggcaggacauggacaacug

SEQ ID NO: 120559 - RNA, 22 nt, Human
ucauuacacaguucaguggaaa

SEQ ID NO: 120560 - RNA, 22 nt, Human
agaggaauaugggugcacuaga

SEQ ID NO: 120561 - RNA, 22 nt, Human
caagggcagcagccucaagcgg

SEQ ID NO: 120562 - RNA, 22 nt, Human
uggcugaggcacagcugccgcc

SEQ ID NO: 120563 - RNA, 22 nt, Human
ccacugcccaccccgacgucua

SEQ ID NO: 120564 - RNA, 22 nt, Human
gccuggucucugggguugggua

SEQ ID NO: 120565 - RNA, 22 nt, Human
gaaggcugcgaggggagugccg

SEQ ID NO: 120566 - RNA, 22 nt, Human
aggcccagacucagcggggcgg

SEQ ID NO: 120567 - RNA, 21 nt, Human
aggagggcacaaggccaggaa

SEQ ID NO: 120568 - RNA, 22 nt, Human
agccugguuuaagcauuuuaua

SEQ ID NO: 120569 - RNA, 22 nt, Human
gggcaugccugcgcagugcaug

SEQ ID NO: 120570 - RNA, 22 nt, Human
caauuacugguccacagaaauu

SEQ ID NO: 120571 - RNA, 22 nt, Human
aguaaacacugucuuuauauau

SEQ ID NO: 120572 - RNA, 22 nt, Human
agagugcaaccgaaacaagcag

SEQ ID NO: 120573 - RNA, 22 nt, Human
aaguccagacuccuuugcgugg

SEQ ID NO: 120574 - RNA, 22 nt, Human
ucaugggugcuccagguggcug

SEQ ID NO: 120575 - RNA, 23 nt, Human
aggcugagcucucccagcuucag

SEQ ID NO: 120576 - RNA, 22 nt, Human
accaggcuggagugcaguggcg

SEQ ID NO: 120577 - RNA, 22 nt, Human
aagguuuauuaaaaguugaugg

SEQ ID NO: 120578 - RNA, 22 nt, Human
uuauucuucuucucuugccagg

SEQ ID NO: 120579 - RNA, 22 nt, Human
ucagaggaaagggaacauaguc

SEQ ID NO: 120580 - RNA, 22 nt, Human
cguagguggcucagcaccuggg

SEQ ID NO: 120581 - RNA, 19 nt, Human
gcaucagagcagaaggggu

SEQ ID NO: 120582 - RNA, 22 nt, Human
ccaggagccugggccaggcugg

SEQ ID NO: 120583 - RNA, 22 nt, Human
gagagaagggggauaugagccu

SEQ ID NO: 120584 - RNA, 22 nt, Human
uuguugucauuguagaggauuu

SEQ ID NO: 120585 - RNA, 20 nt, Human
auuuggcaugaaguauugau

SEQ ID NO: 120586 - RNA, 22 nt, Human
agaggauugaucaaacacugca

SEQ ID NO: 120587 - RNA, 22 nt, Human
uuucucaaguucagauauuuga

SEQ ID NO: 120588 - RNA, 19 nt, Human
ugcaagugucuuggacaag

SEQ ID NO: 120589 - RNA, 22 nt, Human
ggacaggaugcugaagaugaag

SEQ ID NO: 120590 - RNA, 22 nt, Human
ugaccugcagucaagaggggaa

SEQ ID NO: 120591 - RNA, 23 nt, Human
acuuugcauacccaaauuguuuu

SEQ ID NO: 120592 - RNA, 22 nt, Human
cugagagaaucaugcugcaggu

SEQ ID NO: 120593 - RNA, 22 nt, Human
uccuguggucuggaaggaaugg

SEQ ID NO: 120594 - RNA, 22 nt, Human
agugagcauucguuuggaaccc

SEQ ID NO: 120595 - RNA, 22 nt, Human
aguuccagcugugaccagaaaa

SEQ ID NO: 120596 - RNA, 22 nt, Human
augcuguguccuagugaaagaa

SEQ ID NO: 120597 - RNA, 22 nt, Human
gauaauuuaagucuugggggcu

SEQ ID NO: 120598 - RNA, 21 nt, Human
aggaaguggccagauugggaa

SEQ ID NO: 120599 - RNA, 22 nt, Human
cugagcugguucucuugugaaa

SEQ ID NO: 120600 - RNA, 22 nt, Human
gggcucagacaucccuccugga

SEQ ID NO: 120601 - RNA, 22 nt, Human
ugccaggccaaugaaggcaggg

SEQ ID NO: 120602 - RNA, 22 nt, Human
caccugggcuaaacuaugcagg

SEQ ID NO: 120603 - RNA, 22 nt, Human
auuuuccagccuuucuagaacu

SEQ ID NO: 120604 - RNA, 22 nt, Human
acaggcuguugggguccagggu

SEQ ID NO: 120605 - RNA, 22 nt, Human
ccagaagagaucacaguucuug

SEQ ID NO: 120606 - RNA, 21 nt, Human
uaaaacuguaacuuuguccug

SEQ ID NO: 120607 - RNA, 22 nt, Human
auuugucacugagagaguuaga

SEQ ID NO: 120608 - RNA, 22 nt, Human
uauuuuaucugccagaguggag

SEQ ID NO: 120609 - RNA, 22 nt, Human
ccagggcagggaccacgugucu

SEQ ID NO: 120610 - RNA, 22 nt, Human
ugcagggcuauaacuccauucu

SEQ ID NO: 120611 - RNA, 22 nt, Human
acaguggaaagaaacgaauuag

SEQ ID NO: 120612 - RNA, 22 nt, Human
ucugucaugccacaggacuugg

SEQ ID NO: 120613 - RNA, 22 nt, Human
aaaaaugucauuauggaacuga

SEQ ID NO: 120614 - RNA, 22 nt, Human
cuggaguguaaagagcauagaa

SEQ ID NO: 120615 - RNA, 22 nt, Human
gaugcauagugaagcugacaga

SEQ ID NO: 120616 - RNA, 22 nt, Human
ucugugcaguucuugucuugac

SEQ ID NO: 120617 - RNA, 22 nt, Human
aggcagaggaaggguggauuug

SEQ ID NO: 120618 - RNA, 22 nt, Human
agcugcccccagggcugugcuu

SEQ ID NO: 120619 - RNA, 22 nt, Human
cagccaccauacagcagaagcu

SEQ ID NO: 120620 - RNA, 22 nt, Human
ggcugugcugagggggaagccc

SEQ ID NO: 120621 - RNA, 22 nt, Human
guggugaagccccaucucugcu

SEQ ID NO: 120622 - RNA, 22 nt, Human
ggagaugcuauguaguuugguu

SEQ ID NO: 120623 - RNA, 22 nt, Human
aaauuggaugcacauuuagaaa

SEQ ID NO: 120624 - RNA, 22 nt, Human
ccagcugcccaagaggcauccu

SEQ ID NO: 120625 - RNA, 22 nt, Human
accagggcacaggagucugaag

SEQ ID NO: 120626 - RNA, 22 nt, Human
ucucugagaaguuccuuuguga

SEQ ID NO: 120627 - RNA, 22 nt, Human
augucuuuuaugauuacgggau

SEQ ID NO: 120628 - RNA, 22 nt, Human
aaaugcagcagcuaauugaaaa

SEQ ID NO: 120629 - RNA, 22 nt, Human
gcagucaguaaggcagccagaa

SEQ ID NO: 120630 - RNA, 22 nt, Human
gggcugagugucccaggccgaa

SEQ ID NO: 120631 - RNA, 21 nt, Human
uucuguuuuuuguaccagggc

SEQ ID NO: 120632 - RNA, 22 nt, Human
agggcagcuggaagguggcuuc

SEQ ID NO: 120633 - RNA, 22 nt, Human
uaaacauggcuguuucaguuau

SEQ ID NO: 120634 - RNA, 22 nt, Human
aguggagacaggacagucgaua

SEQ ID NO: 120635 - RNA, 22 nt, Human
uggcagaggcucugugauguug

SEQ ID NO: 120636 - RNA, 22 nt, Human
uauuugcaaagaacuacacuag

SEQ ID NO: 120637 - RNA, 22 nt, Human
gccucccugagucacccaagca

SEQ ID NO: 120638 - RNA, 23 nt, Human
ugccagaggcagucacaguggug

SEQ ID NO: 120639 - RNA, 22 nt, Human
cccugcagacgucuugaugccu

SEQ ID NO: 120640 - RNA, 22 nt, Human
uugcucugauuagguggaaaca

SEQ ID NO: 120641 - RNA, 21 nt, Human
uggcagagugcagucuauaca

SEQ ID NO: 120642 - RNA, 22 nt, Human
uagggcagcugcaucaggcacu

SEQ ID NO: 120643 - RNA, 22 nt, Human
ugaagccacacuagcuuguccu

SEQ ID NO: 120644 - RNA, 22 nt, Human
augaaacagugaauuagucaag

SEQ ID NO: 120645 - RNA, 22 nt, Human
ggcugugcuugguguccuugga

SEQ ID NO: 120646 - RNA, 22 nt, Human
gcugcagugagccaagaucgug

SEQ ID NO: 120647 - RNA, 22 nt, Human
ugcagggcaucuuugaagugug

SEQ ID NO: 120648 - RNA, 22 nt, Human
ucacacacauuugcugucugau

SEQ ID NO: 120649 - RNA, 22 nt, Human
cuucuucaagagaaugggagac

SEQ ID NO: 120650 - RNA, 22 nt, Human
ugaggaaacugaggcacagaug

SEQ ID NO: 120651 - RNA, 22 nt, Human
gggcgcaucaccugaggucagg

SEQ ID NO: 120652 - RNA, 23 nt, Human
gguauucauucauuuaugcuaag

SEQ ID NO: 120653 - RNA, 22 nt, Human
uugcugugucauuuguuuaauc

SEQ ID NO: 120654 - RNA, 22 nt, Human
ucacauucuagaauguuaucgu

SEQ ID NO: 120655 - RNA, 22 nt, Human
aaucuugaguguuacucucauu

SEQ ID NO: 120656 - RNA, 20 nt, Human
uucugcuugcaaauaucaag

SEQ ID NO: 120657 - RNA, 22 nt, Human
ucagaggauugccucagcgagc

SEQ ID NO: 120658 - RNA, 22 nt, Human
cuggagauguccgggugcuguu

SEQ ID NO: 120659 - RNA, 19 nt, Human
agccacagaacuugcagga

SEQ ID NO: 120660 - RNA, 22 nt, Human
cugaggcucaagggcagguggg

SEQ ID NO: 120661 - RNA, 23 nt, Human
agcagggccagaauacuugcugu

SEQ ID NO: 120662 - RNA, 22 nt, Human
agggagaaaauuggaugcacaa

SEQ ID NO: 120663 - RNA, 22 nt, Human
ugcagauaauacuagaacuuac

SEQ ID NO: 120664 - RNA, 22 nt, Human
ccagaagacaagaauguucuua

SEQ ID NO: 120665 - RNA, 22 nt, Human
gcucuugucaaaaauuaguuga

SEQ ID NO: 120666 - RNA, 22 nt, Human
gagcagagacaguacaacuggc

SEQ ID NO: 120667 - RNA, 22 nt, Human
caucuugaagguuucuuuagcu

SEQ ID NO: 120668 - RNA, 21 nt, Human
uuuucccacugaaagcuccca

SEQ ID NO: 120669 - RNA, 22 nt, Human
gcaggugaaugauggacuagga

SEQ ID NO: 120670 - RNA, 22 nt, Human
uuuauuagugcuuguaucacug

SEQ ID NO: 120671 - RNA, 22 nt, Human
aggcugagagcaacgugucaga

SEQ ID NO: 120672 - RNA, 22 nt, Human
ugaagccacagagcaucugccu

SEQ ID NO: 120673 - RNA, 23 nt, Human
ccugcucaggcgugugcccugcu

SEQ ID NO: 120674 - RNA, 22 nt, Human
aagcugaaaaugagacucuaca

SEQ ID NO: 120675 - RNA, 22 nt, Human
ucccuguuuuauauccuaacaa

SEQ ID NO: 120676 - RNA, 22 nt, Human
auuuccuauagauauggugagu

SEQ ID NO: 120677 - RNA, 18 nt, Human
gaucgggggcgccccaag

SEQ ID NO: 120678 - RNA, 22 nt, Human
ggcugagacuagagugaggcau

SEQ ID NO: 120679 - RNA, 22 nt, Human
agagaugcccuugaaaggauua

SEQ ID NO: 120680 - RNA, 22 nt, Human
agaugcuauacauuguaagaca

SEQ ID NO: 120681 - RNA, 22 nt, Human
ggcugugggaugcauaggagcu

SEQ ID NO: 120682 - RNA, 22 nt, Human
ugugggaggaauuagaauggga

SEQ ID NO: 120683 - RNA, 22 nt, Human
gggcagguguugucaaucuaau

SEQ ID NO: 120684 - RNA, 22 nt, Human
gcagcugagagaagaacagggc

SEQ ID NO: 120685 - RNA, 22 nt, Human
ucuguuuaaugggaaugauacu

SEQ ID NO: 120686 - RNA, 22 nt, Human
aaggaagguucauagucaaaga

SEQ ID NO: 120687 - RNA, 22 nt, Human
augaaacaugcuuuguggauga

SEQ ID NO: 120688 - RNA, 22 nt, Human
aacauacagugagcaguggacu

SEQ ID NO: 120689 - RNA, 22 nt, Human
ccucccagugccuccagagcag

SEQ ID NO: 120690 - RNA, 22 nt, Human
ggagaggggaacuuguugcuug

SEQ ID NO: 120691 - RNA, 22 nt, Human
cagcacauaaucagugauugug

SEQ ID NO: 120692 - RNA, 22 nt, Human
ggaaaucaagaagcagaugagu

SEQ ID NO: 120693 - RNA, 22 nt, Human
gaaauucugugucccagagugc

SEQ ID NO: 120694 - RNA, 22 nt, Human
ucugccugcaguguggcagggc

SEQ ID NO: 120695 - RNA, 22 nt, Human
uguggcaggcaagauguacaga

SEQ ID NO: 120696 - RNA, 22 nt, Human
agccaggcuaaaugagccauga

SEQ ID NO: 120697 - RNA, 22 nt, Human
uugagcacaggugaacagcauc

SEQ ID NO: 120698 - RNA, 22 nt, Human
cagaccugagguugaguaccag

SEQ ID NO: 120699 - RNA, 23 nt, Human
agggcaugaagcagaggacgugg

SEQ ID NO: 120700 - RNA, 22 nt, Human
ugcaacaggcugugacauggaa

SEQ ID NO: 120701 - RNA, 22 nt, Human
auaauaacaaugccagaugccu

SEQ ID NO: 120702 - RNA, 22 nt, Human
uacagugcuugguaucuaguaa

SEQ ID NO: 120703 - RNA, 22 nt, Human
gacaggcuuccuaagugccaga

SEQ ID NO: 120704 - RNA, 22 nt, Human
aggcucagucuguucaugcacu

SEQ ID NO: 120705 - RNA, 22 nt, Human
uugcagcuucuaccacuguuuc

SEQ ID NO: 120706 - RNA, 22 nt, Human
gcucccagacugaccagaggug

SEQ ID NO: 120707 - RNA, 22 nt, Human
agugauuagaaaguacacuugg

SEQ ID NO: 120708 - RNA, 22 nt, Human
uaugagcaagaguuugugaagg

SEQ ID NO: 120709 - RNA, 22 nt, Human
aggcugagcggggucccagagc

SEQ ID NO: 120710 - RNA, 22 nt, Human
cagggcaguuugugccuaugag

SEQ ID NO: 120711 - RNA, 22 nt, Human
uagcagcuggggcuauucauca

SEQ ID NO: 120712 - RNA, 22 nt, Human
cugaggcacagugaacuucucc

SEQ ID NO: 120713 - RNA, 19 nt, Human
acagggcagcaauaggaua

SEQ ID NO: 120714 - RNA, 22 nt, Human
gugugcagggaugagugcaggu

SEQ ID NO: 120715 - RNA, 22 nt, Human
gaggcucaguuauuuuagccug

SEQ ID NO: 120716 - RNA, 22 nt, Human
cucagaagaacaaaggcucuac

SEQ ID NO: 120717 - RNA, 22 nt, Human
ucaggaguaaagacagaguucc

SEQ ID NO: 120718 - RNA, 22 nt, Human
ugaucaguguugguucuaucua

SEQ ID NO: 120719 - RNA, 20 nt, Human
gcaaauggaucccacaagcc

SEQ ID NO: 120720 - RNA, 22 nt, Human
cagaagcauuccagcaaauagu

SEQ ID NO: 120721 - RNA, 22 nt, Human
agggaaaucuuucaacacuuca

SEQ ID NO: 120722 - RNA, 22 nt, Human
agucaguuaaccucacagcauc

SEQ ID NO: 120723 - RNA, 17 nt, Human
ugaagaugcauggcagc

SEQ ID NO: 120724 - RNA, 21 nt, Human
uggggaggggaccugauuaug

SEQ ID NO: 120725 - RNA, 22 nt, Human
guaauuaggaauaaaaugggaa

SEQ ID NO: 120726 - RNA, 22 nt, Human
ggugaagguggaacgcagagca

SEQ ID NO: 120727 - RNA, 22 nt, Human
ccagagccucgcccggagccuc

SEQ ID NO: 120728 - RNA, 22 nt, Human
acaaaggcauagugaauguuuu

SEQ ID NO: 120729 - RNA, 22 nt, Human
aagggcugcauuugauguguca

SEQ ID NO: 120730 - RNA, 22 nt, Human
gaagauugaaggcugggaauua

SEQ ID NO: 120731 - RNA, 22 nt, Human
ugccaggcagugucagauugag

SEQ ID NO: 120732 - RNA, 22 nt, Human
gagacguggccuuugccugagc

SEQ ID NO: 120733 - RNA, 22 nt, Human
gggugcagggucuccagcagcu

SEQ ID NO: 120734 - RNA, 22 nt, Human
gcugugcagguccccacugccu

SEQ ID NO: 120735 - RNA, 21 nt, Human
uucuucaugaugauuaauggc

SEQ ID NO: 120736 - RNA, 22 nt, Human
acauuuguauauaugcagcaua

SEQ ID NO: 120737 - RNA, 19 nt, Human
ucucccagcugagaagggc

SEQ ID NO: 120738 - RNA, 22 nt, Human
cagugcaggaagugagaugccu

SEQ ID NO: 120739 - RNA, 22 nt, Human
uacaguacacagguaccaagcu

SEQ ID NO: 120740 - RNA, 22 nt, Human
ggggccgaccgcgguucaggcc

SEQ ID NO: 120741 - RNA, 22 nt, Human
gagagggcaaacuuguagcuaa

SEQ ID NO: 120742 - RNA, 22 nt, Human
ggcagauggagaagcagcaggu

SEQ ID NO: 120743 - RNA, 23 nt, Human
guguucaucccagucugugcaau

SEQ ID NO: 120744 - RNA, 22 nt, Human
aagggcagcugacagaugcuua

SEQ ID NO: 120745 - RNA, 22 nt, Human
ugcucugucaagaaaagaugcc

SEQ ID NO: 120746 - RNA, 22 nt, Human
aggcagcauuugaauccagguc

SEQ ID NO: 120747 - RNA, 22 nt, Human
caggcagaugcugacaagaguu

SEQ ID NO: 120748 - RNA, 22 nt, Human
ugucuucaguaaaauacacuau

SEQ ID NO: 120749 - RNA, 22 nt, Human
acauuugacuguagauacuugc

SEQ ID NO: 120750 - RNA, 22 nt, Human
cugagucucccggcaguggagg

SEQ ID NO: 120751 - RNA, 22 nt, Human
gugcaugaagacucagaaaguc

SEQ ID NO: 120752 - RNA, 22 nt, Human
gcugguaaacuucuggugccau

SEQ ID NO: 120753 - RNA, 22 nt, Human
guguccuuauaagaagagaugc

SEQ ID NO: 120754 - RNA, 22 nt, Human
ucaggcugcuggccagcaggcu

SEQ ID NO: 120755 - RNA, 22 nt, Human
ugaggcagggagaguggauaug

SEQ ID NO: 120756 - RNA, 20 nt, Human
ugccaggcugcacgccugcc

SEQ ID NO: 120757 - RNA, 22 nt, Human
aacauuuguguuugcuaaaaau

SEQ ID NO: 120758 - RNA, 22 nt, Human
gcagggucuugagaggcagcca

SEQ ID NO: 120759 - RNA, 22 nt, Human
cagagccccucagcucucuccc

SEQ ID NO: 120760 - RNA, 22 nt, Human
agcagggcccacuaggggagau

SEQ ID NO: 120761 - RNA, 22 nt, Human
aaguccagguccucauuccauc

SEQ ID NO: 120762 - RNA, 22 nt, Human
ugggggaagagcuuguuaaagu

SEQ ID NO: 120763 - RNA, 22 nt, Human
cagaggaaaguauuucuggaag

SEQ ID NO: 120764 - RNA, 22 nt, Human
uguggcaguauaagagcuagaa

SEQ ID NO: 120765 - RNA, 17 nt, Human
cagggcugucugccuag

SEQ ID NO: 120766 - RNA, 22 nt, Human
ccugugcauugcaggguguuca

SEQ ID NO: 120767 - RNA, 22 nt, Human
agaugugguaguugaagggaag

SEQ ID NO: 120768 - RNA, 22 nt, Human
agaaugcauuuuguguagcuau

SEQ ID NO: 120769 - RNA, 22 nt, Human
agggaggugguuccccagugga

SEQ ID NO: 120770 - RNA, 22 nt, Human
caucaucaaaagugacagagaa

SEQ ID NO: 120771 - RNA, 23 nt, Human
caggcaggaugaggacuacacuc

SEQ ID NO: 120772 - RNA, 22 nt, Human
cauaacauugagcagcauuccu

SEQ ID NO: 120773 - RNA, 22 nt, Human
uuuaugcacaauuagucuuaua

SEQ ID NO: 120774 - RNA, 22 nt, Human
ugcugugcaucauaguguuugg

SEQ ID NO: 120775 - RNA, 22 nt, Human
gggagaagaaugugucaauugu

SEQ ID NO: 120776 - RNA, 22 nt, Human
ugcagugauuuguacaauuaga

SEQ ID NO: 120777 - RNA, 22 nt, Human
ccagggcaggggcuggaguuca

SEQ ID NO: 120778 - RNA, 22 nt, Human
cagggcagaacauauagauagu

SEQ ID NO: 120779 - RNA, 23 nt, Human
gguggcaggaguggaugcugagc

SEQ ID NO: 120780 - RNA, 22 nt, Human
gagagggccagggugagaacua

SEQ ID NO: 120781 - RNA, 22 nt, Human
auauaauucucagguuugacua

SEQ ID NO: 120782 - RNA, 22 nt, Human
ugacauuuaucaaagaaauggu

SEQ ID NO: 120783 - RNA, 22 nt, Human
aagacuugaccagguugaaggc

SEQ ID NO: 120784 - RNA, 22 nt, Human
uaacugauguucccuuacugua

SEQ ID NO: 120785 - RNA, 22 nt, Human
caguagcuugcuuaggcuuuua

SEQ ID NO: 120786 - RNA, 22 nt, Human
ccagggcauccucacaucgcag

SEQ ID NO: 120787 - RNA, 22 nt, Human
auguaacauugaauuauauagu

SEQ ID NO: 120788 - RNA, 22 nt, Human
auaauaacaccugaauaggaaa

SEQ ID NO: 120789 - RNA, 22 nt, Human
ccagggcaugggaagaacugaa

SEQ ID NO: 120790 - RNA, 22 nt, Human
gggcagugucggggcccaggga

SEQ ID NO: 120791 - RNA, 22 nt, Human
uggcagagcccagacuccaguc

SEQ ID NO: 120792 - RNA, 22 nt, Human
aagcugaagacacagcuccagu

SEQ ID NO: 120793 - RNA, 22 nt, Human
caaauagauuguucaauccuga

SEQ ID NO: 120794 - RNA, 22 nt, Human
gaggcugguaggaaaggaaaca

SEQ ID NO: 120795 - RNA, 22 nt, Human
ucaauuacuaaccaaauaaugu

SEQ ID NO: 120796 - RNA, 22 nt, Human
cagugaggcucugcugagcggu

SEQ ID NO: 120797 - RNA, 22 nt, Human
aguuaacaaguuggcaaucaac

SEQ ID NO: 120798 - RNA, 22 nt, Human
caggggcagucugugugcgugg

SEQ ID NO: 120799 - RNA, 22 nt, Human
gcauggcauuugaagguagaag

SEQ ID NO: 120800 - RNA, 22 nt, Human
acugagcucugaugagauuugg

SEQ ID NO: 120801 - RNA, 22 nt, Human
cugcuguguaucauuuuagaug

SEQ ID NO: 120802 - RNA, 22 nt, Human
aguggcaggcagaagcuucuca

SEQ ID NO: 120803 - RNA, 22 nt, Human
cucgcaggacagugcuaggacu

SEQ ID NO: 120804 - RNA, 22 nt, Human
uuucacaaucaaauggugaaau

SEQ ID NO: 120805 - RNA, 22 nt, Human
gugcugaggauacagcugugaa

SEQ ID NO: 120806 - RNA, 18 nt, Human
ucagaggagauaccuaaa

SEQ ID NO: 120807 - RNA, 22 nt, Human
ccagagggcaaaaugaagcuua

SEQ ID NO: 120808 - RNA, 22 nt, Human
auuuuaguaccucaaguaucca

SEQ ID NO: 120809 - RNA, 21 nt, Human
agcagaggggacauguuugau

SEQ ID NO: 120810 - RNA, 22 nt, Human
aaggauuaguagguacaguuca

SEQ ID NO: 120811 - RNA, 22 nt, Human
gaggagaaauuuggggaccuga

SEQ ID NO: 120812 - RNA, 22 nt, Human
agaagccaauucugugugaguc

SEQ ID NO: 120813 - RNA, 22 nt, Human
aaauggaaaaugcuguuuuggu

SEQ ID NO: 120814 - RNA, 22 nt, Human
gaccugggguggaaggaaggca

SEQ ID NO: 120815 - RNA, 22 nt, Human
cucuguuuuucaauaguucuug

SEQ ID NO: 120816 - RNA, 22 nt, Human
uggcagagguaauucaaauccc

SEQ ID NO: 120817 - RNA, 17 nt, Human
agaggcagauacuugga

SEQ ID NO: 120818 - RNA, 22 nt, Human
aagccaguguuuuugagaguug

SEQ ID NO: 120819 - RNA, 22 nt, Human
caucaucaaaacaaauggaguc

SEQ ID NO: 120820 - RNA, 22 nt, Human
acagugauuggcacugauucag

SEQ ID NO: 120821 - RNA, 22 nt, Human
agcugugccuauucguggcaag

SEQ ID NO: 120822 - RNA, 22 nt, Human
ugcauaaagugccauaguauua

SEQ ID NO: 120823 - RNA, 22 nt, Human
gggcagguguuuccaaggugag

SEQ ID NO: 120824 - RNA, 22 nt, Human
gcaugcugcagggaaugcuugu

SEQ ID NO: 120825 - RNA, 22 nt, Human
gaagucugcugcucaggaguuu

SEQ ID NO: 120826 - RNA, 22 nt, Human
gggaagggacuuguuuaagguc

SEQ ID NO: 120827 - RNA, 22 nt, Human
agccuccuguagcccucaccca

SEQ ID NO: 120828 - RNA, 22 nt, Human
caugagaaguggccuucaaaaa

SEQ ID NO: 120829 - RNA, 22 nt, Human
agagaugccaccuuuuugcugu

SEQ ID NO: 120830 - RNA, 22 nt, Human
aagccacuauggugauucucaa

SEQ ID NO: 120831 - RNA, 23 nt, Human
uuuguacauugaggaggcagaau

SEQ ID NO: 120832 - RNA, 22 nt, Human
gguggcagaggugcaucagccc

SEQ ID NO: 120833 - RNA, 22 nt, Human
agauggggcugaaaguuccaau

SEQ ID NO: 120834 - RNA, 18 nt, Human
uggugaaggguggaggag

SEQ ID NO: 120835 - RNA, 22 nt, Human
aauaugcacucugauuuagcag

SEQ ID NO: 120836 - RNA, 22 nt, Human
aaugggaagucacuacuguuac

SEQ ID NO: 120837 - RNA, 22 nt, Human
uggcagagagacucuccuugau

SEQ ID NO: 120838 - RNA, 22 nt, Human
gcagacaauuuauuagcagauu

SEQ ID NO: 120839 - RNA, 22 nt, Human
caggaggagcauuagcgucuca

SEQ ID NO: 120840 - RNA, 22 nt, Human
agggcagcugugagccacugug

SEQ ID NO: 120841 - RNA, 22 nt, Human
cauuuguaauacugacuugcag

SEQ ID NO: 120842 - RNA, 17 nt, Human
gacaggcucagugacga

SEQ ID NO: 120843 - RNA, 22 nt, Human
uggaggaauaacagcaaccuua

SEQ ID NO: 120844 - RNA, 22 nt, Human
acauuugagucauauuugcuua

SEQ ID NO: 120845 - RNA, 22 nt, Human
cugagcgcaugguugcugggga

SEQ ID NO: 120846 - RNA, 22 nt, Human
guuucaaagcacagcucacauu

SEQ ID NO: 120847 - RNA, 18 nt, Human
gccagagggaagcaggug

SEQ ID NO: 120848 - RNA, 22 nt, Human
cucucuguuaugcuuucaugaa

SEQ ID NO: 120849 - RNA, 22 nt, Human
caagggcauugcuugggaccuu

SEQ ID NO: 120850 - RNA, 22 nt, Human
acuaugaaaguauaauauugaa

SEQ ID NO: 120851 - RNA, 22 nt, Human
ugaggaagcaaaggcuugugug

SEQ ID NO: 120852 - RNA, 22 nt, Human
gagaagcaaucgugacaucucc

SEQ ID NO: 120853 - RNA, 22 nt, Human
gggagccagcagggcauggagc

SEQ ID NO: 120854 - RNA, 22 nt, Human
aggcagccaguucagguuucuu

SEQ ID NO: 120855 - RNA, 22 nt, Human
ucugggagauccaagcagaacu

SEQ ID NO: 120856 - RNA, 22 nt, Human
gcuggcagagagcuggugagga

SEQ ID NO: 120857 - RNA, 22 nt, Human
accaaaggcagagcugaacacu

SEQ ID NO: 120858 - RNA, 22 nt, Human
gagggcugauguugccaccuca

SEQ ID NO: 120859 - RNA, 22 nt, Human
gccaggcuccccggaucccugg

SEQ ID NO: 120860 - RNA, 22 nt, Human
ucagggcaaaagggaaaccauu

SEQ ID NO: 120861 - RNA, 22 nt, Human
agcugcagugaacuguuuuguc

SEQ ID NO: 120862 - RNA, 22 nt, Human
agaaagagcucgggauuaacag

SEQ ID NO: 120863 - RNA, 22 nt, Human
gagaaagggauaauuugaagag

SEQ ID NO: 120864 - RNA, 20 nt, Human
uccuggccucccuggggcuc

SEQ ID NO: 120865 - RNA, 22 nt, Human
gugugcaggugucagugcagcu

SEQ ID NO: 120866 - RNA, 22 nt, Human
caguuaccaucuucagugauga

SEQ ID NO: 120867 - RNA, 22 nt, Human
uuguauuuccuauaaccuuucu

SEQ ID NO: 120868 - RNA, 22 nt, Human
aauucugugcaggcagagcuau

SEQ ID NO: 120869 - RNA, 22 nt, Human
uauagaggccaccaacaugaaa

SEQ ID NO: 120870 - RNA, 19 nt, Human
ucagaggauuuggcuauga

SEQ ID NO: 120871 - RNA, 22 nt, Human
aggcagagcugauguucuguga

SEQ ID NO: 120872 - RNA, 22 nt, Human
uggagaagcuguagguggacuc

SEQ ID NO: 120873 - RNA, 22 nt, Human
cuccucuuuggggauuuacaca

SEQ ID NO: 120874 - RNA, 22 nt, Human
ucugccugagcagagggaggcc

SEQ ID NO: 120875 - RNA, 22 nt, Human
auguuuaaaggagucagagacu

SEQ ID NO: 120876 - RNA, 22 nt, Human
cagaaauggagcccaggaaucu

SEQ ID NO: 120877 - RNA, 22 nt, Human
agggccaggaacaccugaaggg

SEQ ID NO: 120878 - RNA, 22 nt, Human
guuagcaccagugcucauaaca

SEQ ID NO: 120879 - RNA, 22 nt, Human
acagggcaccugagguaggaag

SEQ ID NO: 120880 - RNA, 22 nt, Human
ggcugagcaauuuugaugacau

SEQ ID NO: 120881 - RNA, 22 nt, Human
aggggagguguccccaaaucuc

SEQ ID NO: 120882 - RNA, 19 nt, Human
gcgaggaagucacuguggc

SEQ ID NO: 120883 - RNA, 20 nt, Human
acauuugaguaucaucuacu

SEQ ID NO: 120884 - RNA, 22 nt, Human
ggaagccagagugcugggcagg

SEQ ID NO: 120885 - RNA, 22 nt, Human
cugagaguguggcuuccaggcc

SEQ ID NO: 120886 - RNA, 19 nt, Human
agaaaaacugguacugcug

SEQ ID NO: 120887 - RNA, 19 nt, Human
agccagugagccucugggu

SEQ ID NO: 120888 - RNA, 22 nt, Human
aaacauuuuucuucaucauccu

SEQ ID NO: 120889 - RNA, 22 nt, Human
acagcacaggaguugaaugggc

SEQ ID NO: 120890 - RNA, 22 nt, Human
aaacagauaagggacaauuuca

SEQ ID NO: 120891 - RNA, 22 nt, Human
ggguguccugugccaagcuggg

SEQ ID NO: 120892 - RNA, 22 nt, Human
aggcucagacaggaaaaguaac

SEQ ID NO: 120893 - RNA, 22 nt, Human
agaauaaaugcuaccuaucaca

SEQ ID NO: 120894 - RNA, 23 nt, Human
acagggcauugcuggccucgagg

SEQ ID NO: 120895 - RNA, 22 nt, Human
uuauuacacugaaagaauugcg

SEQ ID NO: 120896 - RNA, 22 nt, Human
ggcuguggcauuaggugaggcc

SEQ ID NO: 120897 - RNA, 22 nt, Human
acgcuggugaaagggugguuuu

SEQ ID NO: 120898 - RNA, 22 nt, Human
uaugcauaguggaauuagcaaa

SEQ ID NO: 120899 - RNA, 22 nt, Human
aaacuagagauggcagguggaa

SEQ ID NO: 120900 - RNA, 22 nt, Human
gggcacuggaggccaaggagcu

SEQ ID NO: 120901 - RNA, 22 nt, Human
acauucuuaacaguuaaaaacu

SEQ ID NO: 120902 - RNA, 22 nt, Human
aggucauuaaaguuaaaugagg

SEQ ID NO: 120903 - RNA, 22 nt, Human
gcugugcaguaguagguacagu

SEQ ID NO: 120904 - RNA, 22 nt, Human
cagaggaggcgguauacacugc

SEQ ID NO: 120905 - RNA, 22 nt, Human
gaggcagagucacaaagagucu

SEQ ID NO: 120906 - RNA, 22 nt, Human
cauuuguaguaucuguuuauau

SEQ ID NO: 120907 - RNA, 22 nt, Human
aaacaugaguuaaaaguaacug

SEQ ID NO: 120908 - RNA, 22 nt, Human
ggccugaggccaccagcagccc

SEQ ID NO: 120909 - RNA, 22 nt, Human
uggcugagggcacuaugaagcc

SEQ ID NO: 120910 - RNA, 21 nt, Human
uccugggggguaggugaguuu

SEQ ID NO: 120911 - RNA, 19 nt, Human
aggcagucauuggaauaua

SEQ ID NO: 120912 - RNA, 22 nt, Human
ucccaggaaaacacucgaggac

SEQ ID NO: 120913 - RNA, 22 nt, Human
gaugagcugucuagcuguugga

SEQ ID NO: 120914 - RNA, 22 nt, Human
ucagaggauagaaauacuuauu

SEQ ID NO: 120915 - RNA, 22 nt, Human
uccuguggagaggacuggaggu

SEQ ID NO: 120916 - RNA, 22 nt, Human
gaagaggaugacaggagccggu

SEQ ID NO: 120917 - RNA, 22 nt, Human
gccaccuggacagcugugcccu

SEQ ID NO: 120918 - RNA, 22 nt, Human
gggcaggugcccagggccagag

SEQ ID NO: 120919 - RNA, 22 nt, Human
gcauggcaaauaucgagggcag

SEQ ID NO: 120920 - RNA, 19 nt, Human
ucauaaaaaugguaaccca

SEQ ID NO: 120921 - RNA, 22 nt, Human
cagagcagacguugagauuaag

SEQ ID NO: 120922 - RNA, 23 nt, Human
agaggcaggaguggcuugcccgg

SEQ ID NO: 120923 - RNA, 20 nt, Human
acaguggaaauugaugucug

SEQ ID NO: 120924 - RNA, 17 nt, Human
aauguggaaguacaugc

SEQ ID NO: 120925 - RNA, 22 nt, Human
uauuagcgucaggaggugagua

SEQ ID NO: 120926 - RNA, 22 nt, Human
uggggcagggaugggaaacuau

SEQ ID NO: 120927 - RNA, 22 nt, Human
uugagcaaugcugcaaagagau

SEQ ID NO: 120928 - RNA, 22 nt, Human
agcuggcagagcauuuguggcc

SEQ ID NO: 120929 - RNA, 22 nt, Human
ucagccuuguggcccugcucca

SEQ ID NO: 120930 - RNA, 22 nt, Human
aggccagcaccagagucaagaa

SEQ ID NO: 120931 - RNA, 20 nt, Human
gcaauauaugagugcaauaa

SEQ ID NO: 120932 - RNA, 22 nt, Human
aggcugaugcuggcugaggcug

SEQ ID NO: 120933 - RNA, 19 nt, Human
gguguccuagagauaagag

SEQ ID NO: 120934 - RNA, 19 nt, Human
agaggcagucuccaacagg

SEQ ID NO: 120935 - RNA, 22 nt, Human
accagugcuuccugcuggagcu

SEQ ID NO: 120936 - RNA, 22 nt, Human
uuccucagccagcacuuagggg

SEQ ID NO: 120937 - RNA, 22 nt, Human
agggcagaccacgugcaaggau

SEQ ID NO: 120938 - RNA, 22 nt, Human
uuagggcaggcaugagagaacu

SEQ ID NO: 120939 - RNA, 23 nt, Human
uacauucuguauuuuuauagagu

SEQ ID NO: 120940 - RNA, 22 nt, Human
uuugucaaaucaaaccacauuc

SEQ ID NO: 120941 - RNA, 22 nt, Human
uacaacagacaggaauaagauu

SEQ ID NO: 120942 - RNA, 22 nt, Human
aaacaguuuauaacaugauacu

SEQ ID NO: 120943 - RNA, 22 nt, Human
gcaggguccauggaggcagccc

SEQ ID NO: 120944 - RNA, 22 nt, Human
gaagccaguguuugaagaauuu

SEQ ID NO: 120945 - RNA, 22 nt, Human
cugagagguaagcagcgcagug

SEQ ID NO: 120946 - RNA, 22 nt, Human
cagccagugguugaagaugcag

SEQ ID NO: 120947 - RNA, 22 nt, Human
auguuuaagaaagucuuccaua

SEQ ID NO: 120948 - RNA, 22 nt, Human
ugggagcaccuugagggcagaa

SEQ ID NO: 120949 - RNA, 18 nt, Human
aggugcagccucugaggc

SEQ ID NO: 120950 - RNA, 22 nt, Human
aaaaugaauaaguuaacccagg

SEQ ID NO: 120951 - RNA, 22 nt, Human
gcaggagcaaacugcagugugg

SEQ ID NO: 120952 - RNA, 22 nt, Human
uagcauauggaggguaagaggg

SEQ ID NO: 120953 - RNA, 22 nt, Human
ucugugcagggaccccaagagu

SEQ ID NO: 120954 - RNA, 22 nt, Human
aagguauuggcagggcugaguu

SEQ ID NO: 120955 - RNA, 20 nt, Human
aagggcagagggaacagacu

SEQ ID NO: 120956 - RNA, 22 nt, Human
ugccaggcauuugacagacacu

SEQ ID NO: 120957 - RNA, 22 nt, Human
gugugggcugcagaggcacagc

SEQ ID NO: 120958 - RNA, 22 nt, Human
uccugaaaaauuacauguucag

SEQ ID NO: 120959 - RNA, 22 nt, Human
cagguggaucucuaaggacuga

SEQ ID NO: 120960 - RNA, 19 nt, Human
cagaaauagcgaaguguaa

SEQ ID NO: 120961 - RNA, 22 nt, Human
uuagagcuucccaauuaaaacg

SEQ ID NO: 120962 - RNA, 18 nt, Human
aggaagcaggaggaaggc

SEQ ID NO: 120963 - RNA, 22 nt, Human
aauacaguaauuuugaugaguu

SEQ ID NO: 120964 - RNA, 23 nt, Human
aggcagugucucuuauccugucc

SEQ ID NO: 120965 - RNA, 22 nt, Human
gccagguguccucacagugagg

SEQ ID NO: 120966 - RNA, 22 nt, Human
gugcacaaucuucauauggcgu

SEQ ID NO: 120967 - RNA, 20 nt, Human
cagguauuacuuccuuuaug

SEQ ID NO: 120968 - RNA, 22 nt, Human
aggagaaggaagugcaucacua

SEQ ID NO: 120969 - RNA, 22 nt, Human
uugaucagguugcuguggugua

SEQ ID NO: 120970 - RNA, 22 nt, Human
uccugccuuagagcaaggaaaa

SEQ ID NO: 120971 - RNA, 22 nt, Human
uggggagguucgggaaucuugu

SEQ ID NO: 120972 - RNA, 18 nt, Human
ugcugugcacagcccuau

SEQ ID NO: 120973 - RNA, 22 nt, Human
ccacccugagccgcaagagcag

SEQ ID NO: 120974 - RNA, 22 nt, Human
caugcauauuacuagcacagca

SEQ ID NO: 120975 - RNA, 22 nt, Human
aggugcaggagcugugcaggga

SEQ ID NO: 120976 - RNA, 22 nt, Human
gccagguggcugagcagcugca

SEQ ID NO: 120977 - RNA, 22 nt, Human
ucagaaaugaucguuauucauu

SEQ ID NO: 120978 - RNA, 22 nt, Human
uuuuauacacaugaacaugcag

SEQ ID NO: 120979 - RNA, 22 nt, Human
cauuuguaguuaaaaaugucuc

SEQ ID NO: 120980 - RNA, 22 nt, Human
gguuuacucguaguggcgguuu

SEQ ID NO: 120981 - RNA, 22 nt, Human
uuuaaucuauucccuaaacacc

SEQ ID NO: 120982 - RNA, 22 nt, Human
uuugauuuacuggauauucuca

SEQ ID NO: 120983 - RNA, 22 nt, Human
aaggcugaauucaaggguaggc

SEQ ID NO: 120984 - RNA, 21 nt, Human
ccaccaggucuucugcucggg

SEQ ID NO: 120985 - RNA, 22 nt, Human
ugguccugguagcggugugcuu

SEQ ID NO: 120986 - RNA, 22 nt, Human
ugcuguggcaguuuauguauag

SEQ ID NO: 120987 - RNA, 22 nt, Human
ccagggcagcgccccuccacgc

SEQ ID NO: 120988 - RNA, 23 nt, Human
ugggcagcuucugcaugcccacc

SEQ ID NO: 120989 - RNA, 20 nt, Human
gggaggcgagggcugagcag

SEQ ID NO: 120990 - RNA, 22 nt, Human
aaggaagacuugagaagguucc

SEQ ID NO: 120991 - RNA, 22 nt, Human
agcacaauagagcaguuaaaaa

SEQ ID NO: 120992 - RNA, 18 nt, Human
ucauuuguuuugcaugaa

SEQ ID NO: 120993 - RNA, 22 nt, Human
ucucugaguucuccuccagccc

SEQ ID NO: 120994 - RNA, 22 nt, Human
ggugaaggucagagcaggaaaa

SEQ ID NO: 120995 - RNA, 22 nt, Human
aauuggaagaauugauuugcuu

SEQ ID NO: 120996 - RNA, 22 nt, Human
gguguccuugcagaaggcggcg

SEQ ID NO: 120997 - RNA, 22 nt, Human
ucacaagacagaaaacauuuag

SEQ ID NO: 120998 - RNA, 22 nt, Human
cauaacauuaagccucuauuuc

SEQ ID NO: 120999 - RNA, 21 nt, Human
uuagaguagagaacaugaucc

SEQ ID NO: 121000 - RNA, 22 nt, Human
ugcagggcaguggagguugagu

SEQ ID NO: 121001 - RNA, 22 nt, Human
uggcugaggagagggcggaagu

SEQ ID NO: 121002 - RNA, 22 nt, Human
agguuuaugauucugcacgugg

SEQ ID NO: 121003 - RNA, 22 nt, Human
uggagcaggacggggaguggua

SEQ ID NO: 121004 - RNA, 22 nt, Human
ucaaaggcgguccaggaauaaa

SEQ ID NO: 121005 - RNA, 22 nt, Human
agagcuauaacagcacuguaca

SEQ ID NO: 121006 - RNA, 22 nt, Human
gggaaggacauucugggcucag

SEQ ID NO: 121007 - RNA, 22 nt, Human
accaggcugugaagugagacua

SEQ ID NO: 121008 - RNA, 22 nt, Human
cagugggggugaggccgaggua

SEQ ID NO: 121009 - RNA, 22 nt, Human
aacauuuauugagcaccuacug

SEQ ID NO: 121010 - RNA, 21 nt, Human
gcagaggaaugguauacauaa

SEQ ID NO: 121011 - RNA, 22 nt, Human
caaaggcuuugcuaugaugcau

SEQ ID NO: 121012 - RNA, 22 nt, Human
uugcagcugcaguaaauguuca

SEQ ID NO: 121013 - RNA, 20 nt, Human
ggcagagggccugggagaag

SEQ ID NO: 121014 - RNA, 20 nt, Human
ucccaagggcugagaggauc

SEQ ID NO: 121015 - RNA, 16 nt, Human
uggcugagagaggguu

SEQ ID NO: 121016 - RNA, 22 nt, Human
uggcagagugcagaagaggcau

SEQ ID NO: 121017 - RNA, 22 nt, Human
gggcugagggccaauuccuacu

SEQ ID NO: 121018 - RNA, 22 nt, Human
uggggcaguuaauaaacauucu

SEQ ID NO: 121019 - RNA, 22 nt, Human
ucaggcaggacaauuauuuagg

SEQ ID NO: 121020 - RNA, 22 nt, Human
uggcugagaaugggaugaugcc

SEQ ID NO: 121021 - RNA, 22 nt, Human
uacuaggcaauuauguaaauaa

SEQ ID NO: 121022 - RNA, 22 nt, Human
caggagcaguuagaagcccacu

SEQ ID NO: 121023 - RNA, 22 nt, Human
uugauucaaaggggacaagugg

SEQ ID NO: 121024 - RNA, 22 nt, Human
aagaacaguugggaggugagcc

SEQ ID NO: 121025 - RNA, 22 nt, Human
aggcucagaggugagcaucugc

SEQ ID NO: 121026 - RNA, 22 nt, Human
agggcagugggaaagccugcuc

SEQ ID NO: 121027 - RNA, 22 nt, Human
aauaugcauguauacaugugua

SEQ ID NO: 121028 - RNA, 22 nt, Human
caggcagagcaacugguccaga

SEQ ID NO: 121029 - RNA, 22 nt, Human
accugagaccuaaucugacugu

SEQ ID NO: 121030 - RNA, 22 nt, Human
gugccagggggcacugaacaga

SEQ ID NO: 121031 - RNA, 21 nt, Human
aacaugauauguguauggauu

SEQ ID NO: 121032 - RNA, 17 nt, Human
cagugcagauaagugag

SEQ ID NO: 121033 - RNA, 22 nt, Human
augaguaaaaccacuauuuaca

SEQ ID NO: 121034 - RNA, 22 nt, Human
aggcugagcaaagggccuuacc

SEQ ID NO: 121035 - RNA, 22 nt, Human
aaguccaguuuuuccagguggu

SEQ ID NO: 121036 - RNA, 22 nt, Human
aagaggaagucuccauggagag

SEQ ID NO: 121037 - RNA, 22 nt, Human
aaauggaucuguggaauacauu

SEQ ID NO: 121038 - RNA, 22 nt, Human
ugguucaugcucauggugauag

SEQ ID NO: 121039 - RNA, 22 nt, Human
uccaaaaaacguuugaauaguu

SEQ ID NO: 121040 - RNA, 22 nt, Human
agacaacaccaaaugcuagugu

SEQ ID NO: 121041 - RNA, 22 nt, Human
ggucaguggcaggggguacuuc

SEQ ID NO: 121042 - RNA, 22 nt, Human
uggcagagaacacacaugauuc

SEQ ID NO: 121043 - RNA, 22 nt, Human
uucuugcucaaugucuguuuaa

SEQ ID NO: 121044 - RNA, 22 nt, Human
gcagaggagugauuaugccgug

SEQ ID NO: 121045 - RNA, 22 nt, Human
acauuuugaaagggaaauuguu

SEQ ID NO: 121046 - RNA, 22 nt, Human
uuccauaauaggcuuaagugaa

SEQ ID NO: 121047 - RNA, 22 nt, Human
agugggguccucaguaugguuc

SEQ ID NO: 121048 - RNA, 22 nt, Human
gagugaugucuguagugaagaa

SEQ ID NO: 121049 - RNA, 22 nt, Human
acauucuuugaguuuuguuaaa

SEQ ID NO: 121050 - RNA, 18 nt, Human
ggcuuugcugggguuucu

SEQ ID NO: 121051 - RNA, 23 nt, Human
aggaggaaaaguuaucugcugag

SEQ ID NO: 121052 - RNA, 22 nt, Human
acagugacaacccaggauaaau

SEQ ID NO: 121053 - RNA, 22 nt, Human
cagagugaacagugggaugugc

SEQ ID NO: 121054 - RNA, 22 nt, Human
aggcucaguuugguuuccauug

SEQ ID NO: 121055 - RNA, 22 nt, Human
aggcugugggguucugcuuuca

SEQ ID NO: 121056 - RNA, 22 nt, Human
ugaguccaucgcagggaagugg

SEQ ID NO: 121057 - RNA, 18 nt, Human
uccgaggcaccauaaaaa

SEQ ID NO: 121058 - RNA, 22 nt, Human
cuucuuaaugcauaaacugugu

SEQ ID NO: 121059 - RNA, 22 nt, Human
agcagccagagucugaacauua

SEQ ID NO: 121060 - RNA, 22 nt, Human
gcagagcucaugccugcaccuc

SEQ ID NO: 121061 - RNA, 20 nt, Human
auacaguaggugcucaauau

SEQ ID NO: 121062 - RNA, 22 nt, Human
ucacacacauggauaguauuuu

SEQ ID NO: 121063 - RNA, 22 nt, Human
cagccugcucucagauguugag

SEQ ID NO: 121064 - RNA, 22 nt, Human
gaauacaaauaauaccaaggug

SEQ ID NO: 121065 - RNA, 22 nt, Human
aacauuugagaaaaauacucuu

SEQ ID NO: 121066 - RNA, 22 nt, Human
gcugugcagaggugagaaucca

SEQ ID NO: 121067 - RNA, 22 nt, Human
uuuaaauuuagaagaaacacug

SEQ ID NO: 121068 - RNA, 23 nt, Human
aggagaagagauuuccacaugca

SEQ ID NO: 121069 - RNA, 22 nt, Human
uucugcagcccaacaguaguuu

SEQ ID NO: 121070 - RNA, 22 nt, Human
agggccagcccauaaugccaaa

SEQ ID NO: 121071 - RNA, 19 nt, Human
uggcaggcccaggauggac

SEQ ID NO: 121072 - RNA, 22 nt, Human
caaagccaggcuuucuaaugua

SEQ ID NO: 121073 - RNA, 22 nt, Human
gaggagagaagcuaacggugcu

SEQ ID NO: 121074 - RNA, 22 nt, Human
aaauauaauuucugccucaaua

SEQ ID NO: 121075 - RNA, 18 nt, Human
aggaaagaaaggcaggug

SEQ ID NO: 121076 - RNA, 22 nt, Human
ugcaauaaguuguguuaucacu

SEQ ID NO: 121077 - RNA, 22 nt, Human
ugaagccaucaggaagccagca

SEQ ID NO: 121078 - RNA, 22 nt, Human
uuaaaugugauuucauuuaugu

SEQ ID NO: 121079 - RNA, 22 nt, Human
aguaaacacuaaaaugacugcg

SEQ ID NO: 121080 - RNA, 22 nt, Human
gccaggcuguuuuuauuacugu

SEQ ID NO: 121081 - RNA, 22 nt, Human
cccaggucugccagccuguggg

SEQ ID NO: 121082 - RNA, 22 nt, Human
agaggagguccuuuucugaugu

SEQ ID NO: 121083 - RNA, 22 nt, Human
aauuuuauuagaaggcaagggg

SEQ ID NO: 121084 - RNA, 22 nt, Human
ugccaggcuuagagcaggggcu

SEQ ID NO: 121085 - RNA, 22 nt, Human
aacucuauuuacccuacuaaac

SEQ ID NO: 121086 - RNA, 22 nt, Human
ccaccaggacagcccugagggg

SEQ ID NO: 121087 - RNA, 22 nt, Human
gcauggaauucccuuaugggcc

SEQ ID NO: 121088 - RNA, 22 nt, Human
agggccaccucucuggguuccc

SEQ ID NO: 121089 - RNA, 22 nt, Human
ugaagaauguugcagugagcau

SEQ ID NO: 121090 - RNA, 22 nt, Human
uggcagagcuggcugcggauga

SEQ ID NO: 121091 - RNA, 22 nt, Human
aauggaauucuccauuagaugu

SEQ ID NO: 121092 - RNA, 22 nt, Human
ucugugcaggauuugaggaacc

SEQ ID NO: 121093 - RNA, 22 nt, Human
gccagucugcucccacaaguuc

SEQ ID NO: 121094 - RNA, 22 nt, Human
accuguuuucagaaaaugcaga

SEQ ID NO: 121095 - RNA, 22 nt, Human
aaauagauuuccuagcauugga

SEQ ID NO: 121096 - RNA, 22 nt, Human
aauaacagauuuucaagcugug

SEQ ID NO: 121097 - RNA, 22 nt, Human
cauguacacacaaagggacaau

SEQ ID NO: 121098 - RNA, 22 nt, Human
ucucccaguggugcagaaagca

SEQ ID NO: 121099 - RNA, 20 nt, Human
gggcuagaccagggcagagg

SEQ ID NO: 121100 - RNA, 22 nt, Human
aaggggaaaaaguguuaggagu

SEQ ID NO: 121101 - RNA, 22 nt, Human
ccugggcaauauagugaggccc

SEQ ID NO: 121102 - RNA, 22 nt, Human
ugcugugggcaguacauaagcu

SEQ ID NO: 121103 - RNA, 22 nt, Human
aggcagguguuaacccucugag

SEQ ID NO: 121104 - RNA, 22 nt, Human
ugugggcacuaaugacaugcag

SEQ ID NO: 121105 - RNA, 22 nt, Human
ugcagggcuaagucagagccug

SEQ ID NO: 121106 - RNA, 22 nt, Human
augaugaaauuuucuaucaugu

SEQ ID NO: 121107 - RNA, 22 nt, Human
ccacugcccccugaagaccagg

SEQ ID NO: 121108 - RNA, 22 nt, Human
ugugcagcucuagagccaagcc

SEQ ID NO: 121109 - RNA, 22 nt, Human
ggaaucuuaauggcauggaguu

SEQ ID NO: 121110 - RNA, 22 nt, Human
aaacaguuaauugcuuucaguu

SEQ ID NO: 121111 - RNA, 22 nt, Human
uggggcagcuccaucuauucca

SEQ ID NO: 121112 - RNA, 22 nt, Human
guggcaggucccauuggagcag

SEQ ID NO: 121113 - RNA, 22 nt, Human
aggugauuuucuccuuacgauu

SEQ ID NO: 121114 - RNA, 21 nt, Human
ccaaaggcuauguaucuucug

SEQ ID NO: 121115 - RNA, 22 nt, Human
caguucagcuagaagaaacaaa

SEQ ID NO: 121116 - RNA, 22 nt, Human
uggagaugcacgagcaggugga

SEQ ID NO: 121117 - RNA, 22 nt, Human
ucauuuauaaggaugcaauuaa

SEQ ID NO: 121118 - RNA, 22 nt, Human
augcugagauaaggcuuuaguc

SEQ ID NO: 121119 - RNA, 17 nt, Human
ugugcauagaauaauga

SEQ ID NO: 121120 - RNA, 22 nt, Human
uaugcacauucacacaaaaaug

SEQ ID NO: 121121 - RNA, 22 nt, Human
cauucauuuacuuucaacagcu

SEQ ID NO: 121122 - RNA, 22 nt, Human
agcacaaugugaaaagagcucu

SEQ ID NO: 121123 - RNA, 22 nt, Human
uguuaaacuguauugcauaagg

SEQ ID NO: 121124 - RNA, 22 nt, Human
uauaauccugcuucacauugaa

SEQ ID NO: 121125 - RNA, 22 nt, Human
acagugaaugcccaagaaaagu

SEQ ID NO: 121126 - RNA, 22 nt, Human
cccuucucuuucacucacuauu

SEQ ID NO: 121127 - RNA, 22 nt, Human
gaacauuuauauuagauagcua

SEQ ID NO: 121128 - RNA, 22 nt, Human
gagggcagagacagugauucac

SEQ ID NO: 121129 - RNA, 23 nt, Human
aacacauugcuaauuacauucaa

SEQ ID NO: 121130 - RNA, 22 nt, Human
agcagggcuccauuucacugcc

SEQ ID NO: 121131 - RNA, 22 nt, Human
gggcugagcuguucugaguuua

SEQ ID NO: 121132 - RNA, 22 nt, Human
agggccaggaucacagccaaga

SEQ ID NO: 121133 - RNA, 22 nt, Human
cuguuaagcaacaugaguaagu

SEQ ID NO: 121134 - RNA, 22 nt, Human
agcugugggauuugggugugcc

SEQ ID NO: 121135 - RNA, 22 nt, Human
aggugcuagguguguaguggag

SEQ ID NO: 121136 - RNA, 22 nt, Human
gggcugacucaaccuugcaaag

SEQ ID NO: 121137 - RNA, 22 nt, Human
gcagggcaucccugagcgggug

SEQ ID NO: 121138 - RNA, 22 nt, Human
agggaggucuggcugcccugag

SEQ ID NO: 121139 - RNA, 22 nt, Human
agggaggaguccucaaagucau

SEQ ID NO: 121140 - RNA, 22 nt, Human
gguggcagaauaauugaagguc

SEQ ID NO: 121141 - RNA, 22 nt, Human
gugcauuugugcaugcacaugu

SEQ ID NO: 121142 - RNA, 22 nt, Human
gaguggagcaaaagagguagau

SEQ ID NO: 121143 - RNA, 22 nt, Human
acaggcugcccgcuccccaccu

SEQ ID NO: 121144 - RNA, 22 nt, Human
gggcugagggguaucucauggg

SEQ ID NO: 121145 - RNA, 22 nt, Human
agcugaagaaaugggaagcauu

SEQ ID NO: 121146 - RNA, 22 nt, Human
uggcugaguucuccaggaguag

SEQ ID NO: 121147 - RNA, 22 nt, Human
ccagggcaauuauuuggagggu

SEQ ID NO: 121148 - RNA, 21 nt, Human
ugacauuuggauucauaguaa

SEQ ID NO: 121149 - RNA, 21 nt, Human
uuugagaauuggucagagugc

SEQ ID NO: 121150 - RNA, 20 nt, Human
uccuuuggccuuagagcugu

SEQ ID NO: 121151 - RNA, 22 nt, Human
ccaucccuccuccaccagcuag

SEQ ID NO: 121152 - RNA, 22 nt, Human
agggcagccaugagccuucagg

SEQ ID NO: 121153 - RNA, 22 nt, Human
gcaguggauggccagcaggggc

SEQ ID NO: 121154 - RNA, 22 nt, Human
guggggguggaaaggcaaguug

SEQ ID NO: 121155 - RNA, 22 nt, Human
augaaaacagccuccugugaua

SEQ ID NO: 121156 - RNA, 22 nt, Human
ugacauuuuaucaauaucacag

SEQ ID NO: 121157 - RNA, 22 nt, Human
agucagcagccuggccaggaga

SEQ ID NO: 121158 - RNA, 22 nt, Human
ugauugaauucaaaugcaaucu

SEQ ID NO: 121159 - RNA, 22 nt, Human
gaaaggaaauauucuaagcacu

SEQ ID NO: 121160 - RNA, 22 nt, Human
ucuauacaugugcacacacauc

SEQ ID NO: 121161 - RNA, 22 nt, Human
caccagguuccgggcagagcug

SEQ ID NO: 121162 - RNA, 22 nt, Human
caguccaggccuggaggagcca

SEQ ID NO: 121163 - RNA, 22 nt, Human
cuuugcaaaaguuaauuguuga

SEQ ID NO: 121164 - RNA, 22 nt, Human
uggcugagugauauuugcaaag

SEQ ID NO: 121165 - RNA, 22 nt, Human
ugaagccaccgaaccagaagag

SEQ ID NO: 121166 - RNA, 22 nt, Human
caggacaucgucaucaugggga

SEQ ID NO: 121167 - RNA, 22 nt, Human
gaggcagagaccuucaggaccu

SEQ ID NO: 121168 - RNA, 22 nt, Human
uuucacauuuaggcgugaauug

SEQ ID NO: 121169 - RNA, 22 nt, Human
gcagggcaugggcccugucugc

SEQ ID NO: 121170 - RNA, 22 nt, Human
caugggcaccuuaaaaugaggc

SEQ ID NO: 121171 - RNA, 22 nt, Human
accagggcugacaaucugaugg

SEQ ID NO: 121172 - RNA, 22 nt, Human
gggagggaagguaccuguguga

SEQ ID NO: 121173 - RNA, 22 nt, Human
gggaggaaggcuugggugagua

SEQ ID NO: 121174 - RNA, 22 nt, Human
uuucccaauugagagguucugu

SEQ ID NO: 121175 - RNA, 22 nt, Human
cuucauuacuugcucguagcac

SEQ ID NO: 121176 - RNA, 22 nt, Human
ggcagaggagcuggaaacaugg

SEQ ID NO: 121177 - RNA, 22 nt, Human
aauacagugaaagugagcaagg

SEQ ID NO: 121178 - RNA, 22 nt, Human
ggcucacgcaauuaucccggcc

SEQ ID NO: 121179 - RNA, 22 nt, Human
guccuggguccccgcaggucag

SEQ ID NO: 121180 - RNA, 20 nt, Human
gcugaagauucccaugcaag

SEQ ID NO: 121181 - RNA, 22 nt, Human
gaguccaguucuuuccagcagu

SEQ ID NO: 121182 - RNA, 23 nt, Human
agcagugaguaaacagauaggau

SEQ ID NO: 121183 - RNA, 22 nt, Human
ugaggcuugucucagauggggg

SEQ ID NO: 121184 - RNA, 22 nt, Human
auuuccaccggcucaggaaguu

SEQ ID NO: 121185 - RNA, 22 nt, Human
aagccaggccauucucugguuc

SEQ ID NO: 121186 - RNA, 22 nt, Human
ugaaggcacuugccuaggggca

SEQ ID NO: 121187 - RNA, 22 nt, Human
caagauaaaaucagcauuccaa

SEQ ID NO: 121188 - RNA, 22 nt, Human
uggcagagaauaaaucuugacu

SEQ ID NO: 121189 - RNA, 22 nt, Human
uuauuuaaaagugguaagauuc

SEQ ID NO: 121190 - RNA, 22 nt, Human
aggggaggcagcgauaaaccug

SEQ ID NO: 121191 - RNA, 22 nt, Human
aucuucaucaaguucacagugg

SEQ ID NO: 121192 - RNA, 21 nt, Human
ucacacacguuuccaagggca

SEQ ID NO: 121193 - RNA, 22 nt, Human
ugagcaguaacagcucacaggg

SEQ ID NO: 121194 - RNA, 22 nt, Human
aggccagcaagaaagagagucu

SEQ ID NO: 121195 - RNA, 22 nt, Human
cugcuguggaugcaggaccuca

SEQ ID NO: 121196 - RNA, 22 nt, Human
cucccuggcuuuguccugaggc

SEQ ID NO: 121197 - RNA, 22 nt, Human
aggcugaggcgggaggaucacu

SEQ ID NO: 121198 - RNA, 22 nt, Human
uagucucuggagacucuagggg

SEQ ID NO: 121199 - RNA, 22 nt, Human
gcucccaggaugaggagccagg

SEQ ID NO: 121200 - RNA, 22 nt, Human
gcacccagaggucagcagugcu

SEQ ID NO: 121201 - RNA, 22 nt, Human
caggaggcagagguugcaguga

SEQ ID NO: 121202 - RNA, 22 nt, Human
aggcugagucaaguuaggguga

SEQ ID NO: 121203 - RNA, 22 nt, Human
cagugggguuucugugggugcu

SEQ ID NO: 121204 - RNA, 22 nt, Human
aggcagcagucaugaggaaaga

SEQ ID NO: 121205 - RNA, 22 nt, Human
gcagaagaccaugguggaaaga

SEQ ID NO: 121206 - RNA, 22 nt, Human
aggcagcagacuguuaaucaga

SEQ ID NO: 121207 - RNA, 22 nt, Human
auggcagagaaagcgagccaca

SEQ ID NO: 121208 - RNA, 22 nt, Human
uuuucaucucugcuuuguaccu

SEQ ID NO: 121209 - RNA, 22 nt, Human
uggcagaguuggagguggaaga

SEQ ID NO: 121210 - RNA, 22 nt, Human
acacaccaugauuuauuuaccc

SEQ ID NO: 121211 - RNA, 22 nt, Human
gagagggcugccuggugugagg

SEQ ID NO: 121212 - RNA, 22 nt, Human
augaggcacaucacagccaaug

SEQ ID NO: 121213 - RNA, 22 nt, Human
ccuggccaggcauggagucaca

SEQ ID NO: 121214 - RNA, 19 nt, Human
cuggaaugagaacaugccc

SEQ ID NO: 121215 - RNA, 22 nt, Human
gauaaacacaaggugauuucau

SEQ ID NO: 121216 - RNA, 22 nt, Human
uccucccugaguggggacagcu

SEQ ID NO: 121217 - RNA, 22 nt, Human
ucaguggagcuaagcaugagau

SEQ ID NO: 121218 - RNA, 22 nt, Human
caagggcagaggcagggccccg

SEQ ID NO: 121219 - RNA, 22 nt, Human
ggagcagccgcgucucagggca

SEQ ID NO: 121220 - RNA, 22 nt, Human
aguggcagagugcacucaggca

SEQ ID NO: 121221 - RNA, 22 nt, Human
gcaggaagaugagcucagguaa

SEQ ID NO: 121222 - RNA, 22 nt, Human
uccaucaccacagaggacagag

SEQ ID NO: 121223 - RNA, 22 nt, Human
agggcagccucucagccuaggu

SEQ ID NO: 121224 - RNA, 22 nt, Human
caaauagacuuaagcaucugua

SEQ ID NO: 121225 - RNA, 22 nt, Human
guggcagugugaggauccugcu

SEQ ID NO: 121226 - RNA, 22 nt, Human
ggccaggcugguuccuugaccu

SEQ ID NO: 121227 - RNA, 22 nt, Human
acauuugauuccauccucuacu

SEQ ID NO: 121228 - RNA, 22 nt, Human
uaaggguucagaaugcaguggu

SEQ ID NO: 121229 - RNA, 22 nt, Human
ccagggcaucacauccaguguu

SEQ ID NO: 121230 - RNA, 22 nt, Human
uuucuacagaagauacacugcu

SEQ ID NO: 121231 - RNA, 21 nt, Human
agccugggaggcggagguugc

SEQ ID NO: 121232 - RNA, 22 nt, Human
cagcuggacuuuugauagaagu

SEQ ID NO: 121233 - RNA, 22 nt, Human
agcaugaagacuucagagcuag

SEQ ID NO: 121234 - RNA, 22 nt, Human
aaauugauguucccaguugaaa

SEQ ID NO: 121235 - RNA, 23 nt, Human
uucauauguugcugaaaacagca

SEQ ID NO: 121236 - RNA, 22 nt, Human
ggagcugucuguagggcacagg

SEQ ID NO: 121237 - RNA, 22 nt, Human
gguccuggcagcucugugucca

SEQ ID NO: 121238 - RNA, 22 nt, Human
uacagguagagucucuaguuua

SEQ ID NO: 121239 - RNA, 22 nt, Human
ucacauuuguucuugaaucuaa

SEQ ID NO: 121240 - RNA, 22 nt, Human
uagacauuuuaagacauauacc

SEQ ID NO: 121241 - RNA, 22 nt, Human
gccgugucaucugcggguggca

SEQ ID NO: 121242 - RNA, 23 nt, Human
ucuggcucuaugugacagcucuc

SEQ ID NO: 121243 - RNA, 21 nt, Human
uacagugagguguuaggaugu

SEQ ID NO: 121244 - RNA, 22 nt, Human
gccaggcugacucccccggccu

SEQ ID NO: 121245 - RNA, 22 nt, Human
ugaggauggaaugcugugcaag

SEQ ID NO: 121246 - RNA, 22 nt, Human
uuagaucauuuugaacuaauuu

SEQ ID NO: 121247 - RNA, 22 nt, Human
gcuuugcauuguuuaaucagga

SEQ ID NO: 121248 - RNA, 19 nt, Human
cucuccagcuccaguagcu

SEQ ID NO: 121249 - RNA, 22 nt, Human
cagugagggcauucagugcugg

SEQ ID NO: 121250 - RNA, 22 nt, Human
uuuauaguagcaugauuuauaa

SEQ ID NO: 121251 - RNA, 22 nt, Human
guuauuuuaacuucucaguaau

SEQ ID NO: 121252 - RNA, 22 nt, Human
ugaggcagggaguuuaauuguc

SEQ ID NO: 121253 - RNA, 22 nt, Human
uaccuucuaggugaugguuaca

SEQ ID NO: 121254 - RNA, 22 nt, Human
ugggcaggagagaagcuaaaga

SEQ ID NO: 121255 - RNA, 22 nt, Human
aaugugaaaccgcacagaauaa

SEQ ID NO: 121256 - RNA, 22 nt, Human
ccucacuggccagccaggggug

SEQ ID NO: 121257 - RNA, 22 nt, Human
cugggcagcugugcaaacaaua

SEQ ID NO: 121258 - RNA, 22 nt, Human
aggcaguuguugcugagcagcu

SEQ ID NO: 121259 - RNA, 22 nt, Human
acugugcaggggaagagagaaa

SEQ ID NO: 121260 - RNA, 22 nt, Human
ugccaggcgugguggugcgcac

SEQ ID NO: 121261 - RNA, 22 nt, Human
acagugauuuuaggauagaugg

SEQ ID NO: 121262 - RNA, 22 nt, Human
aaaaugaacagaacaaugggga

SEQ ID NO: 121263 - RNA, 22 nt, Human
acuaaauaguuuugacagaaca

SEQ ID NO: 121264 - RNA, 22 nt, Human
cagcugugcuagaagccacgaa

SEQ ID NO: 121265 - RNA, 21 nt, Human
agagacugucacugcaguacc

SEQ ID NO: 121266 - RNA, 22 nt, Human
aaggcaggagcuguaucuuauu

SEQ ID NO: 121267 - RNA, 21 nt, Human
acacugugucauaaugcuuaa

SEQ ID NO: 121268 - RNA, 22 nt, Human
agagaugcugcccgcagacgug

SEQ ID NO: 121269 - RNA, 22 nt, Human
aggugucuggauggguguccuu

SEQ ID NO: 121270 - RNA, 22 nt, Human
gcauggcauuaacaagauggaa

SEQ ID NO: 121271 - RNA, 22 nt, Human
ccagccuggacugggucuugug

SEQ ID NO: 121272 - RNA, 22 nt, Human
gaggcagcggcucacagagaaa

SEQ ID NO: 121273 - RNA, 22 nt, Human
cccagccucagcuuuacuucca

SEQ ID NO: 121274 - RNA, 22 nt, Human
cugucaauuuauguugacaugc

SEQ ID NO: 121275 - RNA, 22 nt, Human
uuccucagacccucauugugag

SEQ ID NO: 121276 - RNA, 23 nt, Human
acaugauacacaauuagcaaacc

SEQ ID NO: 121277 - RNA, 22 nt, Human
ucaggcagguuggcugcagguc

SEQ ID NO: 121278 - RNA, 22 nt, Human
uacaguaccugccacguuguug

SEQ ID NO: 121279 - RNA, 22 nt, Human
ucugccugagggagcugaggaa

SEQ ID NO: 121280 - RNA, 22 nt, Human
cagggcuggguuaaaagcaggg

SEQ ID NO: 121281 - RNA, 22 nt, Human
gaggaagggcugccugccgggc

SEQ ID NO: 121282 - RNA, 22 nt, Human
agugcagugaugaauaaugguu

SEQ ID NO: 121283 - RNA, 22 nt, Human
uggcaggaaaaagggccagagg

SEQ ID NO: 121284 - RNA, 22 nt, Human
cugcugugcuuguggccacccg

SEQ ID NO: 121285 - RNA, 22 nt, Human
agugcucaugcacauuuauagu

SEQ ID NO: 121286 - RNA, 22 nt, Human
ucagggcacauucugcaguggc

SEQ ID NO: 121287 - RNA, 22 nt, Human
aagagccagugggaaagucuug

SEQ ID NO: 121288 - RNA, 22 nt, Human
cugcugugcacccaggaaggcu

SEQ ID NO: 121289 - RNA, 22 nt, Human
ugaguccaccuuaguauauggg

SEQ ID NO: 121290 - RNA, 22 nt, Human
ugauggaaaauaaaucuuauuc

SEQ ID NO: 121291 - RNA, 22 nt, Human
gaaugcuaagcaugugggaguu

SEQ ID NO: 121292 - RNA, 21 nt, Human
aggcuguccuuugccagcccu

SEQ ID NO: 121293 - RNA, 22 nt, Human
cagaguaaggagcugucaaacg

SEQ ID NO: 121294 - RNA, 22 nt, Human
ugucauaugcugucauagccau

SEQ ID NO: 121295 - RNA, 22 nt, Human
auacaugacagcauagcauccu

SEQ ID NO: 121296 - RNA, 22 nt, Human
ccagugccugugggcauggugc

SEQ ID NO: 121297 - RNA, 22 nt, Human
caggcugccgugaagcaggccu

SEQ ID NO: 121298 - RNA, 22 nt, Human
aaacaguaaguucuaguauuau

SEQ ID NO: 121299 - RNA, 22 nt, Human
uucucaaagaaagcugucauua

SEQ ID NO: 121300 - RNA, 22 nt, Human
ggggcagccuccaggaaagcug

SEQ ID NO: 121301 - RNA, 22 nt, Human
augaaaacggaccagagcuauu

SEQ ID NO: 121302 - RNA, 19 nt, Human
ucaggcaguuauucacaaa

SEQ ID NO: 121303 - RNA, 22 nt, Human
agcagggcagcuuuuuucagaa

SEQ ID NO: 121304 - RNA, 22 nt, Human
agggucagugaugagggagccc

SEQ ID NO: 121305 - RNA, 22 nt, Human
aaaugugaguuauagcaauaga

SEQ ID NO: 121306 - RNA, 20 nt, Human
cagcacagagcuuggcucua

SEQ ID NO: 121307 - RNA, 22 nt, Human
gcaggagcagucaggggcagcu

SEQ ID NO: 121308 - RNA, 22 nt, Human
uuucacaucagagguagauuag

SEQ ID NO: 121309 - RNA, 16 nt, Human
uggcagagguucagcc

SEQ ID NO: 121310 - RNA, 20 nt, Human
uuucugcagauguuuacaug

SEQ ID NO: 121311 - RNA, 22 nt, Human
agagggaaugugauugcaccau

SEQ ID NO: 121312 - RNA, 22 nt, Human
aggcagcauccagaggagaaug

SEQ ID NO: 121313 - RNA, 21 nt, Human
caauuacuaugaaccaguuga

SEQ ID NO: 121314 - RNA, 22 nt, Human
agcagccagaaagggcagucga

SEQ ID NO: 121315 - RNA, 22 nt, Human
aggggcagccucacaauccucu

SEQ ID NO: 121316 - RNA, 22 nt, Human
aaauggaagaagugcaauacug

SEQ ID NO: 121317 - RNA, 22 nt, Human
ccaggcuuucccagccucucca

SEQ ID NO: 121318 - RNA, 22 nt, Human
ugguuguauaaugucacuaagc

SEQ ID NO: 121319 - RNA, 22 nt, Human
agagaugcaucucuuaaaauug

SEQ ID NO: 121320 - RNA, 22 nt, Human
gcagugaagccagaucugaaau

SEQ ID NO: 121321 - RNA, 22 nt, Human
uacagugcacauuucuuaggaa

SEQ ID NO: 121322 - RNA, 23 nt, Human
ucccagggaaggugagcgaggcu

SEQ ID NO: 121323 - RNA, 22 nt, Human
gagggcugauaaaugcgcaugg

SEQ ID NO: 121324 - RNA, 22 nt, Human
uccuggcccuguggccugcagu

SEQ ID NO: 121325 - RNA, 22 nt, Human
uccuguggcguuaucaugugau

SEQ ID NO: 121326 - RNA, 21 nt, Human
ugcuaagugucacaugucugc

SEQ ID NO: 121327 - RNA, 22 nt, Human
cuucaguuuaucccaucaucca

SEQ ID NO: 121328 - RNA, 22 nt, Human
uuaaugcagaaaucaaacugac

SEQ ID NO: 121329 - RNA, 22 nt, Human
cauguacaguuuuucuguccug

SEQ ID NO: 121330 - RNA, 22 nt, Human
uuucacauaugguuguugauug

SEQ ID NO: 121331 - RNA, 22 nt, Human
uggcagagcccagaacugagca

SEQ ID NO: 121332 - RNA, 22 nt, Human
gcugugcagagcacaggguccc

SEQ ID NO: 121333 - RNA, 22 nt, Human
caugauuauauuaauggcuuca

SEQ ID NO: 121334 - RNA, 22 nt, Human
uacaggaagucucaguacagua

SEQ ID NO: 121335 - RNA, 22 nt, Human
ugggcagguuguuauuugacau

SEQ ID NO: 121336 - RNA, 22 nt, Human
ugagccagucugucugggugaa

SEQ ID NO: 121337 - RNA, 22 nt, Human
gccaccagggggcuccagugag

SEQ ID NO: 121338 - RNA, 22 nt, Human
ugaauuaaaggaauucgaauuc

SEQ ID NO: 121339 - RNA, 22 nt, Human
cauucugagcuaauaugcuuau

SEQ ID NO: 121340 - RNA, 22 nt, Human
agggcccucuggcaggccaggc

SEQ ID NO: 121341 - RNA, 22 nt, Human
uuugaaguccaucuggcccagu

SEQ ID NO: 121342 - RNA, 22 nt, Human
aauguuugccugacuagagugg

SEQ ID NO: 121343 - RNA, 22 nt, Human
agagugguacuucuuuuucuuc

SEQ ID NO: 121344 - RNA, 22 nt, Human
ugcagcugaaccuagagucugu

SEQ ID NO: 121345 - RNA, 21 nt, Human
gcugugcaggugccccugcuc

SEQ ID NO: 121346 - RNA, 22 nt, Human
cuuaaauuggaugaguuaaguu

SEQ ID NO: 121347 - RNA, 22 nt, Human
ggcugugcgggcagccguggga

SEQ ID NO: 121348 - RNA, 22 nt, Human
gggggacuggaccguccugggu

SEQ ID NO: 121349 - RNA, 22 nt, Human
gaaacauuuguugaguacuugc

SEQ ID NO: 121350 - RNA, 22 nt, Human
ucucccaggugggugccuggag

SEQ ID NO: 121351 - RNA, 18 nt, Human
cagcugugcccuguuugg

SEQ ID NO: 121352 - RNA, 22 nt, Human
ggaagaggcucucauugagggc

SEQ ID NO: 121353 - RNA, 22 nt, Human
uuucccaagaaaaauaauugga

SEQ ID NO: 121354 - RNA, 22 nt, Human
agauuuauguggucacacucag

SEQ ID NO: 121355 - RNA, 22 nt, Human
aaagaaaccuaucagccacaug

SEQ ID NO: 121356 - RNA, 22 nt, Human
aggcgcauugaggcccuguugc

SEQ ID NO: 121357 - RNA, 22 nt, Human
gaggcaguuugccaugccagga

SEQ ID NO: 121358 - RNA, 22 nt, Human
gccaguggcaugcggcagggac

SEQ ID NO: 121359 - RNA, 22 nt, Human
aacaugaugacauuguaagcuu

SEQ ID NO: 121360 - RNA, 22 nt, Human
cugaggcaugaaugugggcuuu

SEQ ID NO: 121361 - RNA, 22 nt, Human
gcagaggaggacccaggaauua

SEQ ID NO: 121362 - RNA, 19 nt, Human
uugaaauuguuugauaugg

SEQ ID NO: 121363 - RNA, 20 nt, Human
aggcugaguucuaugcacuu

SEQ ID NO: 121364 - RNA, 22 nt, Human
ggaaucuuugaaggauuuuaag

SEQ ID NO: 121365 - RNA, 22 nt, Human
aggucauuuuugccuucuauuu

SEQ ID NO: 121366 - RNA, 22 nt, Human
guuagagcacauacuuugcaug

SEQ ID NO: 121367 - RNA, 22 nt, Human
gccgugcgugcgcaggugcugu

SEQ ID NO: 121368 - RNA, 22 nt, Human
gcagaggauagcauaugaaccu

SEQ ID NO: 121369 - RNA, 22 nt, Human
accacccucagcagagcugaaa

SEQ ID NO: 121370 - RNA, 22 nt, Human
gaugauaacucuuuaugaugaa

SEQ ID NO: 121371 - RNA, 22 nt, Human
uaagccacuagucuguuaugaa

SEQ ID NO: 121372 - RNA, 22 nt, Human
ugauuaaaauuuaacuuaguua

SEQ ID NO: 121373 - RNA, 22 nt, Human
acucccagguugccuggcaggc

SEQ ID NO: 121374 - RNA, 22 nt, Human
guaaacaucagccacucuauuu

SEQ ID NO: 121375 - RNA, 22 nt, Human
ugccagagaagacccagucacu

SEQ ID NO: 121376 - RNA, 22 nt, Human
aagccaggcugcacuugcuggg

SEQ ID NO: 121377 - RNA, 22 nt, Human
ggcaggucagguccaugaccaa

SEQ ID NO: 121378 - RNA, 22 nt, Human
uauaugcaauuuuuuagugcaa

SEQ ID NO: 121379 - RNA, 22 nt, Human
agcugcagcguucauuuuucca

SEQ ID NO: 121380 - RNA, 22 nt, Human
ugaggcagccugcauuaaagag

SEQ ID NO: 121381 - RNA, 22 nt, Human
ucagaggagaugguuaccaggg

SEQ ID NO: 121382 - RNA, 19 nt, Human
ugcagggcugcgccugggg

SEQ ID NO: 121383 - RNA, 22 nt, Human
gaggaagaagcaaaccagcuaa

SEQ ID NO: 121384 - RNA, 22 nt, Human
cccaguggagauaggagugugg

SEQ ID NO: 121385 - RNA, 22 nt, Human
ucugugcacuaacauuccuggu

SEQ ID NO: 121386 - RNA, 22 nt, Human
uuugcaaugugaaauuaaagaa

SEQ ID NO: 121387 - RNA, 22 nt, Human
ugaggcaggagguugagaacug

SEQ ID NO: 121388 - RNA, 22 nt, Human
aaagggagcauggcugcaggga

SEQ ID NO: 121389 - RNA, 22 nt, Human
uagcugagaggccaauugaacu

SEQ ID NO: 121390 - RNA, 22 nt, Human
agccaccaccacugaaagguua

SEQ ID NO: 121391 - RNA, 22 nt, Human
ucuaaaugucaguacagaauga

SEQ ID NO: 121392 - RNA, 20 nt, Human
ugucaauagcacugaggcug

SEQ ID NO: 121393 - RNA, 22 nt, Human
aggacccugaggucuccuguga

SEQ ID NO: 121394 - RNA, 22 nt, Human
gccucccuguagaggccagccu

SEQ ID NO: 121395 - RNA, 22 nt, Human
agaagccagucgcucucccgca

SEQ ID NO: 121396 - RNA, 22 nt, Human
aucugaagggaaguggaaggca

SEQ ID NO: 121397 - RNA, 21 nt, Human
ugagaugcuagaaggcaggga

SEQ ID NO: 121398 - RNA, 22 nt, Human
gggcaugguggugcacaccugu

SEQ ID NO: 121399 - RNA, 22 nt, Human
ccaguggaauuaaaaauaagug

SEQ ID NO: 121400 - RNA, 22 nt, Human
gggcagauggggcacaggcuga

SEQ ID NO: 121401 - RNA, 20 nt, Human
ggaagccagcauccuugagg

SEQ ID NO: 121402 - RNA, 23 nt, Human
gcaguggaaugucucuguuugga

SEQ ID NO: 121403 - RNA, 22 nt, Human
gccagaagacuggagucagcug

SEQ ID NO: 121404 - RNA, 18 nt, Human
cgaggcaggcggaucacg

SEQ ID NO: 121405 - RNA, 19 nt, Human
aauucuguuucagcagauc

SEQ ID NO: 121406 - RNA, 22 nt, Human
cggcagagacggcgcuuugaac

SEQ ID NO: 121407 - RNA, 22 nt, Human
gagaaggacuacacaucuggcc

SEQ ID NO: 121408 - RNA, 21 nt, Human
acugugcagccugaggaugug

SEQ ID NO: 121409 - RNA, 22 nt, Human
aaugggaaagagacuagaugcu

SEQ ID NO: 121410 - RNA, 22 nt, Human
uucuugauguaccaacuuggga

SEQ ID NO: 121411 - RNA, 22 nt, Human
gcugcugugugggagacaggcg

SEQ ID NO: 121412 - RNA, 22 nt, Human
caggaaagggaugggcugccac

SEQ ID NO: 121413 - RNA, 22 nt, Human
ggagaugcuuuccaguggggau

SEQ ID NO: 121414 - RNA, 22 nt, Human
agcagggcugugcuccuuccga

SEQ ID NO: 121415 - RNA, 22 nt, Human
cagcugaagagaggugcugagu

SEQ ID NO: 121416 - RNA, 22 nt, Human
acagugaaugagaauggagaaa

SEQ ID NO: 121417 - RNA, 22 nt, Human
ucucaaacuaacaaugauuaua

SEQ ID NO: 121418 - RNA, 22 nt, Human
gaggcaggcagauugcuugagg

SEQ ID NO: 121419 - RNA, 22 nt, Human
caagcuggcugggagaggcacg

SEQ ID NO: 121420 - RNA, 22 nt, Human
cacacacaguuuuguauucugu

SEQ ID NO: 121421 - RNA, 22 nt, Human
gagaugcugucaggcuaucugu

SEQ ID NO: 121422 - RNA, 22 nt, Human
ucaggcuggaaugcaguggggc

SEQ ID NO: 121423 - RNA, 22 nt, Human
aggcagugugggccaagcuucc

SEQ ID NO: 121424 - RNA, 22 nt, Human
aauuacugucuguaaagggaau

SEQ ID NO: 121425 - RNA, 22 nt, Human
acuugguuggucucacccuguu

SEQ ID NO: 121426 - RNA, 22 nt, Human
gcucaguguuucugguagaaaa

SEQ ID NO: 121427 - RNA, 22 nt, Human
aggcaggagcaagcccuacaag

SEQ ID NO: 121428 - RNA, 22 nt, Human
gagcgggaggaacggcucgggc

SEQ ID NO: 121429 - RNA, 22 nt, Human
agcccucugcaaacaccugaua

SEQ ID NO: 121430 - RNA, 22 nt, Human
aaugaacacagcccucuacuuu

SEQ ID NO: 121431 - RNA, 22 nt, Human
uggaggucgcuagcgagcgggc

SEQ ID NO: 121432 - RNA, 22 nt, Human
cagcugccuaugaccuagccuc

SEQ ID NO: 121433 - RNA, 22 nt, Human
uggagguccugcaggauggcac

SEQ ID NO: 121434 - RNA, 22 nt, Human
caugaacauugcagggauguga

SEQ ID NO: 121435 - RNA, 23 nt, Human
ucucugaguuguacuuucccuug

SEQ ID NO: 121436 - RNA, 22 nt, Human
caagcugguaucagcuagagcg

SEQ ID NO: 121437 - RNA, 22 nt, Human
agaggcaggaagagcugauuuu

SEQ ID NO: 121438 - RNA, 22 nt, Human
gucuugaaauucuguuaaagga

SEQ ID NO: 121439 - RNA, 22 nt, Human
ugccaggcccugugcuggaugc

SEQ ID NO: 121440 - RNA, 22 nt, Human
gguguccucaugauuuucuaga

SEQ ID NO: 121441 - RNA, 18 nt, Human
uuaugcaaaacuguuuuc

SEQ ID NO: 121442 - RNA, 21 nt, Human
auggagucaggggaaugggcc

SEQ ID NO: 121443 - RNA, 22 nt, Human
gcagggcagcucacugugguuc

SEQ ID NO: 121444 - RNA, 22 nt, Human
aagguauuauugucuauguacu

SEQ ID NO: 121445 - RNA, 22 nt, Human
cucauaaaagcuuuguuuacac

SEQ ID NO: 121446 - RNA, 19 nt, Human
aggagaagacucucucccc

SEQ ID NO: 121447 - RNA, 20 nt, Human
auacacaugcagacagaugc

SEQ ID NO: 121448 - RNA, 22 nt, Human
aagggagacaguugugugagga

SEQ ID NO: 121449 - RNA, 22 nt, Human
gaaguggaagccaucggcaguc

SEQ ID NO: 121450 - RNA, 22 nt, Human
cugaguccagggacagaggcgu

SEQ ID NO: 121451 - RNA, 22 nt, Human
gggcuagaaauucugcagugga

SEQ ID NO: 121452 - RNA, 22 nt, Human
cugagcacugggcacauagcug

SEQ ID NO: 121453 - RNA, 22 nt, Human
ugaagaagccaauugguaggcu

SEQ ID NO: 121454 - RNA, 22 nt, Human
ccagggcagugggagaaggugc

SEQ ID NO: 121455 - RNA, 22 nt, Human
ggcuagaguggaacuggagcgg

SEQ ID NO: 121456 - RNA, 22 nt, Human
ccagggagccuggugugucagc

SEQ ID NO: 121457 - RNA, 22 nt, Human
guggaggacaaaagaagccuuu

SEQ ID NO: 121458 - RNA, 22 nt, Human
uccugaaaauaauuucacaaga

SEQ ID NO: 121459 - RNA, 22 nt, Human
ggcugugcuuugcccaaagggc

SEQ ID NO: 121460 - RNA, 22 nt, Human
acugugcauuugucaugggguu

SEQ ID NO: 121461 - RNA, 22 nt, Human
uacacacaugcauuugccuuau

SEQ ID NO: 121462 - RNA, 22 nt, Human
ugggaguccaaggcaggcggau

SEQ ID NO: 121463 - RNA, 22 nt, Human
cagcugugggccugacguggca

SEQ ID NO: 121464 - RNA, 22 nt, Human
uccagggagauggcagaggcug

SEQ ID NO: 121465 - RNA, 22 nt, Human
agauguaaacucucaugucauu

SEQ ID NO: 121466 - RNA, 22 nt, Human
gacaucauggagaggacaaaca

SEQ ID NO: 121467 - RNA, 22 nt, Human
ccaggugugauuuggcaguguc

SEQ ID NO: 121468 - RNA, 22 nt, Human
uuucacauuggcuucuauuucu

SEQ ID NO: 121469 - RNA, 22 nt, Human
ucugcucuccauacuuccgcac

SEQ ID NO: 121470 - RNA, 22 nt, Human
agcugaggcauggacaggcugc

SEQ ID NO: 121471 - RNA, 21 nt, Human
uacaacagguuuuauuucgau

SEQ ID NO: 121472 - RNA, 22 nt, Human
gcgucaauuccaucauucuucu

SEQ ID NO: 121473 - RNA, 22 nt, Human
ugcagggaaugcuugcagcaug

SEQ ID NO: 121474 - RNA, 22 nt, Human
aggaggaggcuggaguacaccc

SEQ ID NO: 121475 - RNA, 22 nt, Human
aacacaguccugcucacuuauu

SEQ ID NO: 121476 - RNA, 22 nt, Human
aggagugaguguccucagcaga

SEQ ID NO: 121477 - RNA, 22 nt, Human
ucagggcaucaucaugaauaua

SEQ ID NO: 121478 - RNA, 17 nt, Human
aggaagggcaaguuucu

SEQ ID NO: 121479 - RNA, 22 nt, Human
ucugcagaauucgaggaagaaa

SEQ ID NO: 121480 - RNA, 22 nt, Human
acaguacagugcagaggaagau

SEQ ID NO: 121481 - RNA, 22 nt, Human
aagaugcaugcugaagcuggcu

SEQ ID NO: 121482 - RNA, 22 nt, Human
gcagggcaguaagagcuagagu

SEQ ID NO: 121483 - RNA, 22 nt, Human
aggguagggcccggagacagac

SEQ ID NO: 121484 - RNA, 22 nt, Human
auuuaucaucagaccuuuuaaa

SEQ ID NO: 121485 - RNA, 22 nt, Human
uggcagagaaccugggcuuugu

SEQ ID NO: 121486 - RNA, 22 nt, Human
cuuguucaucucauugggacug

SEQ ID NO: 121487 - RNA, 18 nt, Human
cugcugugucgucugggc

SEQ ID NO: 121488 - RNA, 21 nt, Human
aggcagcaggauccagggaca

SEQ ID NO: 121489 - RNA, 22 nt, Human
agggaaggagguuagaacccac

SEQ ID NO: 121490 - RNA, 21 nt, Human
uuuaugcagauaaugcuauuu

SEQ ID NO: 121491 - RNA, 22 nt, Human
uccaggcuccccugcgugcucc

SEQ ID NO: 121492 - RNA, 22 nt, Human
caggacagaaauaaggaauaua

SEQ ID NO: 121493 - RNA, 23 nt, Human
acaugggagggacauggaggcug

SEQ ID NO: 121494 - RNA, 22 nt, Human
gguccuggaaguguaaguggca

SEQ ID NO: 121495 - RNA, 22 nt, Human
aguaacaugcuaauuugauuau

SEQ ID NO: 121496 - RNA, 22 nt, Human
auugagcagcuucucugccauc

SEQ ID NO: 121497 - RNA, 22 nt, Human
gugcaggagguaacauagcaaa

SEQ ID NO: 121498 - RNA, 22 nt, Human
cuguggcaggaagggacuagca

SEQ ID NO: 121499 - RNA, 22 nt, Human
uagcagcugcaucauuuuacag

SEQ ID NO: 121500 - RNA, 22 nt, Human
aaagcagcagcacguggaagag

SEQ ID NO: 121501 - RNA, 22 nt, Human
agagaugcugacguuuacauuu

SEQ ID NO: 121502 - RNA, 22 nt, Human
cauucugacccuaugauuuaag

SEQ ID NO: 121503 - RNA, 22 nt, Human
agcugugguucugggcagcgac

SEQ ID NO: 121504 - RNA, 20 nt, Human
gaagccagaggggaaaggag

SEQ ID NO: 121505 - RNA, 22 nt, Human
gcaggaagaggcucgaagcccc

SEQ ID NO: 121506 - RNA, 22 nt, Human
gagaggaguagacacuuugguu

SEQ ID NO: 121507 - RNA, 22 nt, Human
uaaacauggauucugaucacag

SEQ ID NO: 121508 - RNA, 22 nt, Human
uuucacacuagucagaauacca

SEQ ID NO: 121509 - RNA, 20 nt, Human
uggcaggaauagggccagag

SEQ ID NO: 121510 - RNA, 22 nt, Human
aaggugaaacuggaagcuggcc

SEQ ID NO: 121511 - RNA, 18 nt, Human
ugaggcagucagugaugg

SEQ ID NO: 121512 - RNA, 22 nt, Human
aguggagaauaugcagaaagcc

SEQ ID NO: 121513 - RNA, 23 nt, Human
cagcacaguacauuuccugucuc

SEQ ID NO: 121514 - RNA, 22 nt, Human
uuccuaaaagaauacacuggau

SEQ ID NO: 121515 - RNA, 22 nt, Human
caggggaagaugccaagggaga

SEQ ID NO: 121516 - RNA, 23 nt, Human
cagaagcaccuguugacugcugc

SEQ ID NO: 121517 - RNA, 23 nt, Human
ggagaugcuuaagagugguugag

SEQ ID NO: 121518 - RNA, 22 nt, Human
ucuguuuagacucaguugaaac

SEQ ID NO: 121519 - RNA, 22 nt, Human
cggcugaggaucuccaggccug

SEQ ID NO: 121520 - RNA, 17 nt, Human
uguuuucauucauugcu

SEQ ID NO: 121521 - RNA, 22 nt, Human
uacagugcaaugugauguagau

SEQ ID NO: 121522 - RNA, 22 nt, Human
ccagaagggcuauugcagugac

SEQ ID NO: 121523 - RNA, 22 nt, Human
acauuacagcaaguuuacguua

SEQ ID NO: 121524 - RNA, 22 nt, Human
aguggcagagcaggugcuggaa

SEQ ID NO: 121525 - RNA, 22 nt, Human
agugcagagagcaauacucuac

SEQ ID NO: 121526 - RNA, 22 nt, Human
gucaggcugccagucuuuauug

SEQ ID NO: 121527 - RNA, 22 nt, Human
uuucacaacguuguggugagag

SEQ ID NO: 121528 - RNA, 22 nt, Human
cagggcugaacugagcuuguga

SEQ ID NO: 121529 - RNA, 19 nt, Human
ucauaaacugggcacagug

SEQ ID NO: 121530 - RNA, 22 nt, Human
cucugucccagacccaccucuc

SEQ ID NO: 121531 - RNA, 22 nt, Human
ucugugcauuguaacaacuaaa

SEQ ID NO: 121532 - RNA, 22 nt, Human
cagaagaguagcugaacaaguu

SEQ ID NO: 121533 - RNA, 22 nt, Human
agaugcagauuuggauucagga

SEQ ID NO: 121534 - RNA, 22 nt, Human
ccugggggccaggaagguguga

SEQ ID NO: 121535 - RNA, 22 nt, Human
ccugggcagggagaccaggcuc

SEQ ID NO: 121536 - RNA, 22 nt, Human
agcagggcagguaaggaucaga

SEQ ID NO: 121537 - RNA, 22 nt, Human
aucuaaacuauaguaccuaguc

SEQ ID NO: 121538 - RNA, 22 nt, Human
cagcagcaacaacggaagccuu

SEQ ID NO: 121539 - RNA, 22 nt, Human
acccagggaccccgcugacgcc

SEQ ID NO: 121540 - RNA, 22 nt, Human
ggcacuaugaguuauaagugga

SEQ ID NO: 121541 - RNA, 23 nt, Human
ggcugugcagccugcggcaaaag

SEQ ID NO: 121542 - RNA, 22 nt, Human
aguggcagcugucaugcccuag

SEQ ID NO: 121543 - RNA, 22 nt, Human
cuggagugaggucugggagccu

SEQ ID NO: 121544 - RNA, 22 nt, Human
cgcugugccuggcacccagugu

SEQ ID NO: 121545 - RNA, 22 nt, Human
auuugauaguaugacagggcag

SEQ ID NO: 121546 - RNA, 22 nt, Human
cauguuauuuauccauuaaaca

SEQ ID NO: 121547 - RNA, 19 nt, Human
auuuccaagaauuggagag

SEQ ID NO: 121548 - RNA, 22 nt, Human
cagucacuggaauagcugagga

SEQ ID NO: 121549 - RNA, 22 nt, Human
acuguggcgucaggaagaaauu

SEQ ID NO: 121550 - RNA, 22 nt, Human
aaagccagcaaggugaguuuca

SEQ ID NO: 121551 - RNA, 22 nt, Human
gcaggcagagucaauuugaucc

SEQ ID NO: 121552 - RNA, 22 nt, Human
uggaaucuugcgggcacauggc

SEQ ID NO: 121553 - RNA, 22 nt, Human
uuuugaaagggugauuuggcuu

SEQ ID NO: 121554 - RNA, 22 nt, Human
agaagggccagcuggacaccug

SEQ ID NO: 121555 - RNA, 19 nt, Human
agcuaacucacuaacuaug

SEQ ID NO: 121556 - RNA, 19 nt, Human
cuccucagucccagagguc

SEQ ID NO: 121557 - RNA, 22 nt, Human
ucagggcacaggccuguggguu

SEQ ID NO: 121558 - RNA, 22 nt, Human
ccaguggccaugcacgagcagc

SEQ ID NO: 121559 - RNA, 22 nt, Human
aggaagugcuaagagaacauca

SEQ ID NO: 121560 - RNA, 22 nt, Human
agaugcugggaggcugagugca

SEQ ID NO: 121561 - RNA, 22 nt, Human
cagaagaggacuggguagcuca

SEQ ID NO: 121562 - RNA, 22 nt, Human
aaggcagauauaaagacuagag

SEQ ID NO: 121563 - RNA, 23 nt, Human
aagguauuuauuuuaaagguaag

SEQ ID NO: 121564 - RNA, 22 nt, Human
ggcugagccuggagcaucuggu

SEQ ID NO: 121565 - RNA, 22 nt, Human
ugcaguggaggccgugagacag

SEQ ID NO: 121566 - RNA, 22 nt, Human
uggggaggauaugugaguuauu

SEQ ID NO: 121567 - RNA, 22 nt, Human
ugcugugguucccagaguggau

SEQ ID NO: 121568 - RNA, 22 nt, Human
gggggcaguaaccucaaagugu

SEQ ID NO: 121569 - RNA, 22 nt, Human
caggcagcuagauuuauaacaa

SEQ ID NO: 121570 - RNA, 22 nt, Human
aggcagccuuuagacagucugc

SEQ ID NO: 121571 - RNA, 22 nt, Human
uuuaauguagcgugaaaugauu

SEQ ID NO: 121572 - RNA, 22 nt, Human
uuauaccugaagcaggugaugu

SEQ ID NO: 121573 - RNA, 22 nt, Human
gcagagcugggucuguauccaa

SEQ ID NO: 121574 - RNA, 22 nt, Human
caggcccauucuaggcuugcua

SEQ ID NO: 121575 - RNA, 22 nt, Human
agaagccaccagcugaggaaga

SEQ ID NO: 121576 - RNA, 22 nt, Human
cacggucacccaucagagucca

SEQ ID NO: 121577 - RNA, 22 nt, Human
agcagccagaaauccagaggug

SEQ ID NO: 121578 - RNA, 22 nt, Human
gcuggagaugcuaugcagaggg

SEQ ID NO: 121579 - RNA, 22 nt, Human
aauuacugucuccugcuggugu

SEQ ID NO: 121580 - RNA, 22 nt, Human
agcagccacccagcugcucauu

SEQ ID NO: 121581 - RNA, 22 nt, Human
ccugggcaacauagugagaccc

SEQ ID NO: 121582 - RNA, 22 nt, Human
caggugucaaaauacuaagugg

SEQ ID NO: 121583 - RNA, 22 nt, Human
uagucucugcuuugcccuuggc

SEQ ID NO: 121584 - RNA, 22 nt, Human
aaaagcaguuaucugggaggaa

SEQ ID NO: 121585 - RNA, 22 nt, Human
ccauggagcgggugagugagug

SEQ ID NO: 121586 - RNA, 22 nt, Human
cagugagggaagaucucagcac

SEQ ID NO: 121587 - RNA, 22 nt, Human
gaguccaguguuuaccaggggu

SEQ ID NO: 121588 - RNA, 22 nt, Human
augggcagagcuggugggaggc

SEQ ID NO: 121589 - RNA, 22 nt, Human
gcagaggagcaagcuggacacc

SEQ ID NO: 121590 - RNA, 22 nt, Human
cugaagaggacgcagcagcaag

SEQ ID NO: 121591 - RNA, 22 nt, Human
gggcagguggagggcccagcca

SEQ ID NO: 121592 - RNA, 22 nt, Human
ugccaggcaacugcccagccau

SEQ ID NO: 121593 - RNA, 23 nt, Human
ugugaagguggguccaagggcug

SEQ ID NO: 121594 - RNA, 22 nt, Human
uccaugggaagauuuugagugg

SEQ ID NO: 121595 - RNA, 22 nt, Human
acugugcauuucaugucuuuuc

SEQ ID NO: 121596 - RNA, 22 nt, Human
gcucccaggaagagaagggcca

SEQ ID NO: 121597 - RNA, 19 nt, Human
ccagaggacuguuaaugaa

SEQ ID NO: 121598 - RNA, 22 nt, Human
agcgcugugggcgugcgaggag

SEQ ID NO: 121599 - RNA, 22 nt, Human
uccuggugucgccuggucaguu

SEQ ID NO: 121600 - RNA, 22 nt, Human
uggcucaguagcagugugguca

SEQ ID NO: 121601 - RNA, 22 nt, Human
ugaggcaggacugagcgggaug

SEQ ID NO: 121602 - RNA, 22 nt, Human
uaggcuggaacuuaggcagagg

SEQ ID NO: 121603 - RNA, 22 nt, Human
aggagggcaggcuggcugccua

SEQ ID NO: 121604 - RNA, 22 nt, Human
ugcagagguuuccaggcaaguu

SEQ ID NO: 121605 - RNA, 22 nt, Human
cauguacaugccuacuaucaau

SEQ ID NO: 121606 - RNA, 22 nt, Human
acugugcaugaaccgaaacaaa

SEQ ID NO: 121607 - RNA, 21 nt, Human
uaagccaccaugugaaaccag

SEQ ID NO: 121608 - RNA, 22 nt, Human
agaggcaacauggggaacagau

SEQ ID NO: 121609 - RNA, 22 nt, Human
ccagaauagaaggcagcuguca

SEQ ID NO: 121610 - RNA, 22 nt, Human
gcccagugguaaaagcaggccu

SEQ ID NO: 121611 - RNA, 22 nt, Human
uaacauuucggugacaguggga

SEQ ID NO: 121612 - RNA, 20 nt, Human
uauaugcagccaacacuccc

SEQ ID NO: 121613 - RNA, 22 nt, Human
gaggcucacuaggcauccuggg

SEQ ID NO: 121614 - RNA, 22 nt, Human
gcucaaagaauauucagaauga

SEQ ID NO: 121615 - RNA, 22 nt, Human
ucugccuggaugauggcagggc

SEQ ID NO: 121616 - RNA, 22 nt, Human
cuguggcauugugaggacugca

SEQ ID NO: 121617 - RNA, 22 nt, Human
ggagaagccacacauugggugu

SEQ ID NO: 121618 - RNA, 22 nt, Human
cagggcaggaauuugacauugc

SEQ ID NO: 121619 - RNA, 22 nt, Human
ggccaggagauggacaccacau

SEQ ID NO: 121620 - RNA, 22 nt, Human
cugaggcaguuuaauuuuugaa

SEQ ID NO: 121621 - RNA, 22 nt, Human
auggcagauggcuggagcaggu

SEQ ID NO: 121622 - RNA, 22 nt, Human
gggccguagaccacguccgggc

SEQ ID NO: 121623 - RNA, 22 nt, Human
ucacuccucauugcugcccauu

SEQ ID NO: 121624 - RNA, 22 nt, Human
ugagcauggugggugcagagca

SEQ ID NO: 121625 - RNA, 22 nt, Human
auguacauuuguaguaauauca

SEQ ID NO: 121626 - RNA, 22 nt, Human
uggcacagacagaucaggaguc

SEQ ID NO: 121627 - RNA, 19 nt, Human
ccugugcacauguguccuu

SEQ ID NO: 121628 - RNA, 22 nt, Human
gguguagcucugugucccacug

SEQ ID NO: 121629 - RNA, 22 nt, Human
gcuccucucccagagcugcagg

SEQ ID NO: 121630 - RNA, 22 nt, Human
gaggcucacgacgggacgaacu

SEQ ID NO: 121631 - RNA, 22 nt, Human
accagggcaaauguuuguacuc

SEQ ID NO: 121632 - RNA, 22 nt, Human
auuuggcaacauuaauugaauc

SEQ ID NO: 121633 - RNA, 22 nt, Human
agaguccaugaagacagcugag

SEQ ID NO: 121634 - RNA, 22 nt, Human
aaggcagaaagggaugugagug

SEQ ID NO: 121635 - RNA, 22 nt, Human
ccuggagccccucuggccagcc

SEQ ID NO: 121636 - RNA, 20 nt, Human
agccaggcucaagcuccccc

SEQ ID NO: 121637 - RNA, 22 nt, Human
ucauucaucugguguuaguccu

SEQ ID NO: 121638 - RNA, 22 nt, Human
auuuccaagaaagcuuuaggau

SEQ ID NO: 121639 - RNA, 22 nt, Human
ggaagccaugagggacaguucu

SEQ ID NO: 121640 - RNA, 22 nt, Human
uuuguacauguaagauugcauc

SEQ ID NO: 121641 - RNA, 22 nt, Human
agcaggaacucagggaguucuc

SEQ ID NO: 121642 - RNA, 22 nt, Human
gccugugguuugauuaagcauu

SEQ ID NO: 121643 - RNA, 22 nt, Human
uggaggaaaaaaccaggcagag

SEQ ID NO: 121644 - RNA, 22 nt, Human
aagggcugagcacagugagcca

SEQ ID NO: 121645 - RNA, 22 nt, Human
agaguuauauugguugagaauu

SEQ ID NO: 121646 - RNA, 22 nt, Human
agcucaguggcucaguggguau

SEQ ID NO: 121647 - RNA, 22 nt, Human
cugcuguguuucacaccucugg

SEQ ID NO: 121648 - RNA, 22 nt, Human
gaggcucaacccacagggguug

SEQ ID NO: 121649 - RNA, 22 nt, Human
uguuugcucugacuaucuugcg

SEQ ID NO: 121650 - RNA, 22 nt, Human
uagcugaaggcuacagcagaac

SEQ ID NO: 121651 - RNA, 22 nt, Human
acugucuuguguuaaagaacca

SEQ ID NO: 121652 - RNA, 22 nt, Human
uuaaaaugcagauucugauuca

SEQ ID NO: 121653 - RNA, 22 nt, Human
ugaggcucaagaaucugcauuu

SEQ ID NO: 121654 - RNA, 22 nt, Human
uggcugaggcuggagugcagug

SEQ ID NO: 121655 - RNA, 22 nt, Human
cauuguuaccaucuuuuaccua

SEQ ID NO: 121656 - RNA, 22 nt, Human
agcccagguugaggcugcagug

SEQ ID NO: 121657 - RNA, 22 nt, Human
ugucauggcacuagaguggggu

SEQ ID NO: 121658 - RNA, 20 nt, Human
augcaaaucccaaaaucagg

SEQ ID NO: 121659 - RNA, 22 nt, Human
uggagagcaagucgcagacaug

SEQ ID NO: 121660 - RNA, 21 nt, Human
agacagagugcagucuacaua

SEQ ID NO: 121661 - RNA, 22 nt, Human
ucagaggaugcuguucuuuaau

SEQ ID NO: 121662 - RNA, 22 nt, Human
auucaaacuguguuaggcagca

SEQ ID NO: 121663 - RNA, 22 nt, Human
agggccugcucuaucacucuca

SEQ ID NO: 121664 - RNA, 22 nt, Human
aaagaagguagggcuggugacu

SEQ ID NO: 121665 - RNA, 22 nt, Human
augaggcaugugaggagaaggg

SEQ ID NO: 121666 - RNA, 22 nt, Human
augcaguguuuggaagcuuaag

SEQ ID NO: 121667 - RNA, 23 nt, Human
caaaccuguucuccccacaugca

SEQ ID NO: 121668 - RNA, 22 nt, Human
ugccaaggagcuggaucagggc

SEQ ID NO: 121669 - RNA, 22 nt, Human
aggugucugggcuuuggaguca

SEQ ID NO: 121670 - RNA, 22 nt, Human
ugcuggagaggaaggugggguc

SEQ ID NO: 121671 - RNA, 22 nt, Human
gcaggcugggguagccccacuu

SEQ ID NO: 121672 - RNA, 22 nt, Human
gaggaggaaguucucuguaggc

SEQ ID NO: 121673 - RNA, 22 nt, Human
auucugauaucuuauucuagcu

SEQ ID NO: 121674 - RNA, 22 nt, Human
uacaguaggauuuucagggucu

SEQ ID NO: 121675 - RNA, 22 nt, Human
caugcauauaugcuacaugcaa

SEQ ID NO: 121676 - RNA, 22 nt, Human
aggcucagugcaaaucauucug

SEQ ID NO: 121677 - RNA, 22 nt, Human
aacaggcaaacugugggauccc

SEQ ID NO: 121678 - RNA, 22 nt, Human
uagggcagagcuuguacacgau

SEQ ID NO: 121679 - RNA, 20 nt, Human
accaggagauggaggcaggg

SEQ ID NO: 121680 - RNA, 23 nt, Human
cagguauugauuuuucuucuagg

SEQ ID NO: 121681 - RNA, 22 nt, Human
ucagggcaagucucagaagguu

SEQ ID NO: 121682 - RNA, 22 nt, Human
ucaguggauugacaugaaaaag

SEQ ID NO: 121683 - RNA, 22 nt, Human
ugcacacacucugcauauacuu

SEQ ID NO: 121684 - RNA, 22 nt, Human
agaugcuggauggaaaaugauc

SEQ ID NO: 121685 - RNA, 22 nt, Human
ucacuacaaccgcuaccugaca

SEQ ID NO: 121686 - RNA, 22 nt, Human
auuauucaacacuugagaaauu

SEQ ID NO: 121687 - RNA, 22 nt, Human
aggggcaguuccaaguuuugug

SEQ ID NO: 121688 - RNA, 18 nt, Human
gggaagccgggaagccgg

SEQ ID NO: 121689 - RNA, 22 nt, Human
ugaggcagugugagauaauaaa

SEQ ID NO: 121690 - RNA, 22 nt, Human
uggcugagaaaaaagagcuaua

SEQ ID NO: 121691 - RNA, 22 nt, Human
ccagggcauguaacuaauggug

SEQ ID NO: 121692 - RNA, 22 nt, Human
uaacaugaaacuccaaauggua

SEQ ID NO: 121693 - RNA, 22 nt, Human
gccagggcucgcggucccucgu

SEQ ID NO: 121694 - RNA, 22 nt, Human
uggaaauagcuccaguuaagca

SEQ ID NO: 121695 - RNA, 22 nt, Human
augcacaugaggcaagcaaaau

SEQ ID NO: 121696 - RNA, 22 nt, Human
gaggcuggcagaaaagcacagg

SEQ ID NO: 121697 - RNA, 22 nt, Human
gaguucaguguuucuaguagug

SEQ ID NO: 121698 - RNA, 22 nt, Human
agaaggcacucacacuggcacg

SEQ ID NO: 121699 - RNA, 23 nt, Human
aggaaagcauucauuuuuaccau

SEQ ID NO: 121700 - RNA, 22 nt, Human
agcugucucugguauuauguga

SEQ ID NO: 121701 - RNA, 22 nt, Human
ucagggcaccaaaaaagaugcc

SEQ ID NO: 121702 - RNA, 21 nt, Human
agaugcugaugcugcaggucc

SEQ ID NO: 121703 - RNA, 22 nt, Human
agaagccagaggcaguggguac

SEQ ID NO: 121704 - RNA, 22 nt, Human
ucauuuucaaguuugaacagga

SEQ ID NO: 121705 - RNA, 22 nt, Human
auucuguuacuuggugaucuuc

SEQ ID NO: 121706 - RNA, 22 nt, Human
aggaggggcauagaaauguaau

SEQ ID NO: 121707 - RNA, 22 nt, Human
cagggccaggcugauggccugg

SEQ ID NO: 121708 - RNA, 22 nt, Human
agggcugacagugaggagucaa

SEQ ID NO: 121709 - RNA, 22 nt, Human
ggacagaggguugacagaguau

SEQ ID NO: 121710 - RNA, 22 nt, Human
uguuaaaccuaguacagguccu

SEQ ID NO: 121711 - RNA, 19 nt, Human
gggcaguggcacuagggag

SEQ ID NO: 121712 - RNA, 22 nt, Human
gcugagacuggcagcaggaagu

SEQ ID NO: 121713 - RNA, 22 nt, Human
agggagguccaucccugcagag

SEQ ID NO: 121714 - RNA, 22 nt, Human
ugaagaaaggugugggauacuc

SEQ ID NO: 121715 - RNA, 22 nt, Human
gaggcucagagagguccacaua

SEQ ID NO: 121716 - RNA, 22 nt, Human
caugauaauuguuaacaaagua

SEQ ID NO: 121717 - RNA, 22 nt, Human
uguucccaagauaagauuauga

SEQ ID NO: 121718 - RNA, 22 nt, Human
ucauuuguugaacuuuagugcg

SEQ ID NO: 121719 - RNA, 22 nt, Human
ugagaagcaguuucaguaagaa

SEQ ID NO: 121720 - RNA, 22 nt, Human
guggaaaugcccccaaauagug

SEQ ID NO: 121721 - RNA, 22 nt, Human
aguggcaguggcugggcagagc

SEQ ID NO: 121722 - RNA, 22 nt, Human
auuccaaagcacaucagaacua

SEQ ID NO: 121723 - RNA, 22 nt, Human
ucucugagcccagugucccccu

SEQ ID NO: 121724 - RNA, 21 nt, Human
ccagcugucuguccuuaggca

SEQ ID NO: 121725 - RNA, 21 nt, Human
uggcugagccaggugugugga

SEQ ID NO: 121726 - RNA, 22 nt, Human
cugagcagcaacccagagccuc

SEQ ID NO: 121727 - RNA, 22 nt, Human
ugugaagguaaggaggggcaag

SEQ ID NO: 121728 - RNA, 23 nt, Human
aggcagcagguuguccaggguga

SEQ ID NO: 121729 - RNA, 22 nt, Human
ugaggaagaacaagaauuuaga

SEQ ID NO: 121730 - RNA, 22 nt, Human
agccaggcggggcagguuuccu

SEQ ID NO: 121731 - RNA, 21 nt, Human
uuagaagcuaaugcagcuggu

SEQ ID NO: 121732 - RNA, 22 nt, Human
ucugggagagcacguggcugac

SEQ ID NO: 121733 - RNA, 22 nt, Human
ccaaaggccaagcucagguaaa

SEQ ID NO: 121734 - RNA, 22 nt, Human
gccagguggagguugcagugag

SEQ ID NO: 121735 - RNA, 19 nt, Human
aaggcagaaguuggauaug

SEQ ID NO: 121736 - RNA, 22 nt, Human
cccuuccuugugacuggugggg

SEQ ID NO: 121737 - RNA, 22 nt, Human
caauuugauuaauaccauacuu

SEQ ID NO: 121738 - RNA, 22 nt, Human
aaacauuguuaugauaaauuac

SEQ ID NO: 121739 - RNA, 22 nt, Human
uaugcacacauguaugcaugug

SEQ ID NO: 121740 - RNA, 22 nt, Human
uuuguaaaggccugaauuucag

SEQ ID NO: 121741 - RNA, 22 nt, Human
gggggcaguaaggauauggaaa

SEQ ID NO: 121742 - RNA, 22 nt, Human
augauuacauguguuaauauac

SEQ ID NO: 121743 - RNA, 22 nt, Human
uggggagguaacaauuucaggc

SEQ ID NO: 121744 - RNA, 22 nt, Human
agaaauacuaggaauauucaua

SEQ ID NO: 121745 - RNA, 22 nt, Human
ugggcugagcacugaggaagga

SEQ ID NO: 121746 - RNA, 19 nt, Human
aacaucauggcucuuucca

SEQ ID NO: 121747 - RNA, 22 nt, Human
augcuguguuuuaaauggaaau

SEQ ID NO: 121748 - RNA, 22 nt, Human
ggucugagcuugagcccaugcu

SEQ ID NO: 121749 - RNA, 22 nt, Human
uggccaccccuuucucugcacu

SEQ ID NO: 121750 - RNA, 22 nt, Human
agggcgaggagacggaggcaca

SEQ ID NO: 121751 - RNA, 22 nt, Human
aauaacaggcucaucagaugcu

SEQ ID NO: 121752 - RNA, 22 nt, Human
aggcugaggagggauguugcuu

SEQ ID NO: 121753 - RNA, 22 nt, Human
gaaggcacugaacuccuucugg

SEQ ID NO: 121754 - RNA, 22 nt, Human
uggcaggagguuuucuccagga

SEQ ID NO: 121755 - RNA, 23 nt, Human
aggaaggagguccuaacaguauc

SEQ ID NO: 121756 - RNA, 22 nt, Human
augcacaucacucugaagaaaa

SEQ ID NO: 121757 - RNA, 22 nt, Human
gugauacagguguucuggauau

SEQ ID NO: 121758 - RNA, 22 nt, Human
gaaggcugaguggguacggagg

SEQ ID NO: 121759 - RNA, 22 nt, Human
aauuaggaauaaaugaguacuu

SEQ ID NO: 121760 - RNA, 22 nt, Human
ccagggcacuuaggcccagccc

SEQ ID NO: 121761 - RNA, 22 nt, Human
guccucuuagccacuuaauuau

SEQ ID NO: 121762 - RNA, 22 nt, Human
agaaccucaauuauuuuugcac

SEQ ID NO: 121763 - RNA, 22 nt, Human
uuucuacaguacugauuucaua

SEQ ID NO: 121764 - RNA, 22 nt, Human
ugcaggagacauaauagggacu

SEQ ID NO: 121765 - RNA, 22 nt, Human
ggaggaguguggggcacucugc

SEQ ID NO: 121766 - RNA, 22 nt, Human
gcggcaggaagagcgcagcccc

SEQ ID NO: 121767 - RNA, 22 nt, Human
caagaaggcuauaugggccagg

SEQ ID NO: 121768 - RNA, 22 nt, Human
gugcugaguagaaugaaugccu

SEQ ID NO: 121769 - RNA, 22 nt, Human
acacauaugguugcugcaguga

SEQ ID NO: 121770 - RNA, 22 nt, Human
ccuggaguuuuuugguugacuc

SEQ ID NO: 121771 - RNA, 22 nt, Human
gaguucaguaguuauagucuag

SEQ ID NO: 121772 - RNA, 19 nt, Human
agacagagacugaaauaga

SEQ ID NO: 121773 - RNA, 22 nt, Human
aauuugaaacauagucaccacu

SEQ ID NO: 121774 - RNA, 22 nt, Human
uuugagcagcagaugcacuuag

SEQ ID NO: 121775 - RNA, 21 nt, Human
accaggcuugugggagggagc

SEQ ID NO: 121776 - RNA, 22 nt, Human
aaugccucuuggaagaagacuu

SEQ ID NO: 121777 - RNA, 22 nt, Human
gcacacacuguuuuccucacau

SEQ ID NO: 121778 - RNA, 22 nt, Human
aagaggcagcccgcugaggcug

SEQ ID NO: 121779 - RNA, 22 nt, Human
cacccacauggaaauucacagu

SEQ ID NO: 121780 - RNA, 22 nt, Human
uaucaguagauaaacggauugc

SEQ ID NO: 121781 - RNA, 22 nt, Human
gcagugaacauaacacagaagg

SEQ ID NO: 121782 - RNA, 22 nt, Human
gcugaugcaggguugagaggag

SEQ ID NO: 121783 - RNA, 22 nt, Human
aagggcagaaagggacgcuuug

SEQ ID NO: 121784 - RNA, 21 nt, Human
ccagagagagggaaguggguu

SEQ ID NO: 121785 - RNA, 22 nt, Human
gggcagaggcucuggcccaucc

SEQ ID NO: 121786 - RNA, 22 nt, Human
aguaaacauguaauuguucauu

SEQ ID NO: 121787 - RNA, 22 nt, Human
acaggauuucaccauguuggcc

SEQ ID NO: 121788 - RNA, 22 nt, Human
ucccaggcuggcaggcagcagu

SEQ ID NO: 121789 - RNA, 23 nt, Human
acugauuaacaugugugauauuc

SEQ ID NO: 121790 - RNA, 22 nt, Human
cacagugcuuuaugagagaucu

SEQ ID NO: 121791 - RNA, 22 nt, Human
cucagggcuggaaagccaggaa

SEQ ID NO: 121792 - RNA, 22 nt, Human
ggugaccucaccuggucccacc

SEQ ID NO: 121793 - RNA, 22 nt, Human
acauugauauuucaaauacagg

SEQ ID NO: 121794 - RNA, 22 nt, Human
cggcugugucuucacaggagcc

SEQ ID NO: 121795 - RNA, 22 nt, Human
augcagaagcagaacuuacaca

SEQ ID NO: 121796 - RNA, 22 nt, Human
ucauacaggcucaagcuauacg

SEQ ID NO: 121797 - RNA, 22 nt, Human
ggagaugcuacaguucagcucu

SEQ ID NO: 121798 - RNA, 22 nt, Human
uguucagaacaaagguaaauga

SEQ ID NO: 121799 - RNA, 22 nt, Human
agacauuuccuagacaucaaug

SEQ ID NO: 121800 - RNA, 22 nt, Human
cagaggguugaugugaggcuua

SEQ ID NO: 121801 - RNA, 20 nt, Human
agugggagagggcagacugc

SEQ ID NO: 121802 - RNA, 19 nt, Human
aggcagcaggccagggaug

SEQ ID NO: 121803 - RNA, 22 nt, Human
ucagggcauggcugcacuuggc

SEQ ID NO: 121804 - RNA, 22 nt, Human
agagaagggccuguauguaauc

SEQ ID NO: 121805 - RNA, 22 nt, Human
acaaaggcagccaaucaucugc

SEQ ID NO: 121806 - RNA, 22 nt, Human
guuuauauucaacggaguaucu

SEQ ID NO: 121807 - RNA, 22 nt, Human
ugcagggcaguuuguuucggca

SEQ ID NO: 121808 - RNA, 22 nt, Human
gcagggcaaauguggaaaggag

SEQ ID NO: 121809 - RNA, 22 nt, Human
cauccauagauugagagauggu

SEQ ID NO: 121810 - RNA, 19 nt, Human
uaguggagugacaaguucu

SEQ ID NO: 121811 - RNA, 22 nt, Human
auggagugggccaauuuuagug

SEQ ID NO: 121812 - RNA, 22 nt, Human
ggcgcucaguguugccccagag

SEQ ID NO: 121813 - RNA, 22 nt, Human
acuguggcucaucaggcuggug

SEQ ID NO: 121814 - RNA, 22 nt, Human
ucaguggaguauggaugaaguc

SEQ ID NO: 121815 - RNA, 22 nt, Human
uggcagagucaucacaucugga

SEQ ID NO: 121816 - RNA, 22 nt, Human
uuauaacuuuggauaugacaag

SEQ ID NO: 121817 - RNA, 22 nt, Human
auuaugcauauacauuugacua

SEQ ID NO: 121818 - RNA, 22 nt, Human
aggcucagauccuuguguccug

SEQ ID NO: 121819 - RNA, 22 nt, Human
aguucuagaagacuuuuccauu

SEQ ID NO: 121820 - RNA, 18 nt, Human
gcuuugcagaaauacaga

SEQ ID NO: 121821 - RNA, 19 nt, Human
uggagguccaggaguaggg

SEQ ID NO: 121822 - RNA, 20 nt, Human
ugcuauauugaagugcaguu

SEQ ID NO: 121823 - RNA, 22 nt, Human
gagggagccgccacagacuggg

SEQ ID NO: 121824 - RNA, 22 nt, Human
aucauaaaauugcaccauuucu

SEQ ID NO: 121825 - RNA, 22 nt, Human
gcaaaggccacuggggcgaugg

SEQ ID NO: 121826 - RNA, 22 nt, Human
uggcucagagagggagugugga

SEQ ID NO: 121827 - RNA, 19 nt, Human
ucaaaggcaaggaggaacu

SEQ ID NO: 121828 - RNA, 23 nt, Human
cagugugacgaggugaggcaggc

SEQ ID NO: 121829 - RNA, 22 nt, Human
aguggcagagccaagauaugau

SEQ ID NO: 121830 - RNA, 22 nt, Human
gugccagggaguggaggagcuu

SEQ ID NO: 121831 - RNA, 22 nt, Human
uccugccugagcguggaggagg

SEQ ID NO: 121832 - RNA, 22 nt, Human
uagggcugcugcagaugacagg

SEQ ID NO: 121833 - RNA, 22 nt, Human
cagugaggaagcugucuggacc

SEQ ID NO: 121834 - RNA, 22 nt, Human
agcagggcagugcuucagcucu

SEQ ID NO: 121835 - RNA, 22 nt, Human
aguaggaggcgggagcaugaag

SEQ ID NO: 121836 - RNA, 23 nt, Human
uugaaagguagcuggcagcuaga

SEQ ID NO: 121837 - RNA, 22 nt, Human
ugucagagcaaugagguucagc

SEQ ID NO: 121838 - RNA, 22 nt, Human
uguacauagaucuugaaaauua

SEQ ID NO: 121839 - RNA, 22 nt, Human
augcuguguuugagaaccuagg

SEQ ID NO: 121840 - RNA, 22 nt, Human
aacuagaacgagaaagcugaac

SEQ ID NO: 121841 - RNA, 22 nt, Human
agcugcagagguuugugcaaca

SEQ ID NO: 121842 - RNA, 22 nt, Human
gccuguuggguaacagaguuca

SEQ ID NO: 121843 - RNA, 22 nt, Human
augggcagaguggggacaggaa

SEQ ID NO: 121844 - RNA, 21 nt, Human
cacuauuuauauaugccagcu

SEQ ID NO: 121845 - RNA, 19 nt, Human
cugugcaggccgggcugag

SEQ ID NO: 121846 - RNA, 22 nt, Human
cugagaauuacucugaugagua

SEQ ID NO: 121847 - RNA, 22 nt, Human
accugccucuaagcagcaggug

SEQ ID NO: 121848 - RNA, 20 nt, Human
cugcugugauucccuccucc

SEQ ID NO: 121849 - RNA, 22 nt, Human
aaagggaggggcgauaagccgg

SEQ ID NO: 121850 - RNA, 22 nt, Human
ugcagaugagggaugaaaauga

SEQ ID NO: 121851 - RNA, 22 nt, Human
ugggcaggaugcguugauucuu

SEQ ID NO: 121852 - RNA, 22 nt, Human
uggaggcaacugaagauguagu

SEQ ID NO: 121853 - RNA, 22 nt, Human
uuacuacugcuuuacuacuggg

SEQ ID NO: 121854 - RNA, 22 nt, Human
agggcagcuagcuguagaaaga

SEQ ID NO: 121855 - RNA, 22 nt, Human
cgaggcagaggcugaaacggcu

SEQ ID NO: 121856 - RNA, 22 nt, Human
aggcugagucgggaggaucacu

SEQ ID NO: 121857 - RNA, 22 nt, Human
ugcagggcacacgcacgggugu

SEQ ID NO: 121858 - RNA, 22 nt, Human
guggcagggugcucaucaugca

SEQ ID NO: 121859 - RNA, 22 nt, Human
guggcagguuauaagcaucuca

SEQ ID NO: 121860 - RNA, 22 nt, Human
uccaggcucucaggugucagca

SEQ ID NO: 121861 - RNA, 22 nt, Human
uggcagagagagugcagucgac

SEQ ID NO: 121862 - RNA, 22 nt, Human
gggcugagccauuugaaccuug

SEQ ID NO: 121863 - RNA, 22 nt, Human
gacaucauaucaggaggcaugu

SEQ ID NO: 121864 - RNA, 22 nt, Human
ugcacuccaggcugggugacag

SEQ ID NO: 121865 - RNA, 22 nt, Human
ucugugcagacauggggaagcc

SEQ ID NO: 121866 - RNA, 22 nt, Human
cauuuguacagaacagcuuuau

SEQ ID NO: 121867 - RNA, 22 nt, Human
acugugcaaugaguaauaaacu

SEQ ID NO: 121868 - RNA, 22 nt, Human
cagaccuggggccugggagccc

SEQ ID NO: 121869 - RNA, 22 nt, Human
gagagugagauccuccugggga

SEQ ID NO: 121870 - RNA, 22 nt, Human
ggcgcaggccuuggauccuggu

SEQ ID NO: 121871 - RNA, 22 nt, Human
ugaggcaggaaguuauauaaug

SEQ ID NO: 121872 - RNA, 18 nt, Human
ccucacagacuuccaugu

SEQ ID NO: 121873 - RNA, 22 nt, Human
agagccccugguggagugagaa

SEQ ID NO: 121874 - RNA, 22 nt, Human
uggcagaguucgcugugccuuu

SEQ ID NO: 121875 - RNA, 22 nt, Human
uccauggggcccaggaugagag

SEQ ID NO: 121876 - RNA, 22 nt, Human
agaagccacuggagguugagau

SEQ ID NO: 121877 - RNA, 22 nt, Human
aagggcagccugacucacgguc

SEQ ID NO: 121878 - RNA, 22 nt, Human
uuaacauuucuuuuccacucau

SEQ ID NO: 121879 - RNA, 22 nt, Human
agggcagacuaggauggaagug

SEQ ID NO: 121880 - RNA, 22 nt, Human
ugcagcaagaccggauaugucg

SEQ ID NO: 121881 - RNA, 22 nt, Human
ggcagcaaauauugucagcugu

SEQ ID NO: 121882 - RNA, 22 nt, Human
uuguuuaauccuuguacccaug

SEQ ID NO: 121883 - RNA, 22 nt, Human
ucauaaacacacuaguaugauu

SEQ ID NO: 121884 - RNA, 22 nt, Human
uucuuuuacauuaagauuucag

SEQ ID NO: 121885 - RNA, 22 nt, Human
acccuggacuggggcugaggcu

SEQ ID NO: 121886 - RNA, 22 nt, Human
uuuuagugccugauuaaugggu

SEQ ID NO: 121887 - RNA, 22 nt, Human
aguggagaagaggauggucucc

SEQ ID NO: 121888 - RNA, 21 nt, Human
ugacauuuccaauauaaagcc

SEQ ID NO: 121889 - RNA, 19 nt, Human
ugagaugccuuccagcccu

SEQ ID NO: 121890 - RNA, 22 nt, Human
ucaggcugaaucauccuagcuu

SEQ ID NO: 121891 - RNA, 22 nt, Human
gggcugaaaggccgccucagau

SEQ ID NO: 121892 - RNA, 22 nt, Human
acagcuguggccacuugcaucc

SEQ ID NO: 121893 - RNA, 21 nt, Human
ccagccucagaucagggagcu

SEQ ID NO: 121894 - RNA, 22 nt, Human
aggagugagcuuuggggucaga

SEQ ID NO: 121895 - RNA, 22 nt, Human
uucauucagguguauuuauggg

SEQ ID NO: 121896 - RNA, 22 nt, Human
ggcaggguggcagaggcucaga

SEQ ID NO: 121897 - RNA, 22 nt, Human
acaauucuggguauuuauauag

SEQ ID NO: 121898 - RNA, 21 nt, Human
aaacuagaguguggcaaagcu

SEQ ID NO: 121899 - RNA, 22 nt, Human
agggcugagacuaaggccagau

SEQ ID NO: 121900 - RNA, 22 nt, Human
caggguagacaguaggugucug

SEQ ID NO: 121901 - RNA, 22 nt, Human
agacauuuauguuucucuagga

SEQ ID NO: 121902 - RNA, 22 nt, Human
uuggauccaucucaggcauagg

SEQ ID NO: 121903 - RNA, 22 nt, Human
agggcugacaaauggcagugac

SEQ ID NO: 121904 - RNA, 22 nt, Human
augcagaaggagccaugcuugc

SEQ ID NO: 121905 - RNA, 22 nt, Human
ggcaggagcucuccaguuugcc

SEQ ID NO: 121906 - RNA, 22 nt, Human
aacauucugguucuaaaaaccu

SEQ ID NO: 121907 - RNA, 22 nt, Human
gccugagaaggauaggaagcga

SEQ ID NO: 121908 - RNA, 22 nt, Human
uauaugcaugcccauguauaca

SEQ ID NO: 121909 - RNA, 22 nt, Human
ggcaguggugggaggcucgcuc

SEQ ID NO: 121910 - RNA, 22 nt, Human
cccaggaccgcgcggcugagcg

SEQ ID NO: 121911 - RNA, 22 nt, Human
aaagggcugucaaauaagcaac

SEQ ID NO: 121912 - RNA, 22 nt, Human
ugcugugcuggcggcagaggcc

SEQ ID NO: 121913 - RNA, 22 nt, Human
cagaggcaggauaagaacugcg

SEQ ID NO: 121914 - RNA, 22 nt, Human
agggcugccugacuccagagcc

SEQ ID NO: 121915 - RNA, 23 nt, Human
acacauuuuucccguucugaggu

SEQ ID NO: 121916 - RNA, 22 nt, Human
aaagugccuucuauuuuaguga

SEQ ID NO: 121917 - RNA, 22 nt, Human
ugaaauaauaucuggaucaauc

SEQ ID NO: 121918 - RNA, 22 nt, Human
cacagccuugagcgaggacaag

SEQ ID NO: 121919 - RNA, 22 nt, Human
cauuuuauccucugggaagcua

SEQ ID NO: 121920 - RNA, 22 nt, Human
auggaaauguuccauauauuga

SEQ ID NO: 121921 - RNA, 22 nt, Human
aauguacaaaagucagccaacu

SEQ ID NO: 121922 - RNA, 22 nt, Human
uucaucuguagcaucuuccaau

SEQ ID NO: 121923 - RNA, 22 nt, Human
ccagggcauguccaagacuuag

SEQ ID NO: 121924 - RNA, 21 nt, Human
auaaacagcaugugauccaug

SEQ ID NO: 121925 - RNA, 22 nt, Human
aaggcugcuuuuaacaugcaua

SEQ ID NO: 121926 - RNA, 22 nt, Human
ccugcagggaaucgaggcagaa

SEQ ID NO: 121927 - RNA, 22 nt, Human
aggcuucagaugaccuuagcau

SEQ ID NO: 121928 - RNA, 22 nt, Human
gggacaggcugagacuugagcu

SEQ ID NO: 121929 - RNA, 22 nt, Human
acagggcauuuccucuaugugu

SEQ ID NO: 121930 - RNA, 22 nt, Human
ggcugagcguggcugccguggg

SEQ ID NO: 121931 - RNA, 22 nt, Human
guggggcaguggccugggagca

SEQ ID NO: 121932 - RNA, 22 nt, Human
gauuuaaaguagaccuuuguuu

SEQ ID NO: 121933 - RNA, 21 nt, Human
uuucuccaagugacugauucc

SEQ ID NO: 121934 - RNA, 22 nt, Human
cucccaggguagggagagacua

SEQ ID NO: 121935 - RNA, 22 nt, Human
ugccaggcgauugcuaucagca

SEQ ID NO: 121936 - RNA, 21 nt, Human
uuucacaaaaguaugugacaa

SEQ ID NO: 121937 - RNA, 22 nt, Human
ugaggcagauauuuauuggguu

SEQ ID NO: 121938 - RNA, 20 nt, Human
gaaauucucguauuaguuua

SEQ ID NO: 121939 - RNA, 17 nt, Human
ugcaaacaaucacauau

SEQ ID NO: 121940 - RNA, 22 nt, Human
uuaugcaacaggugagcagaca

SEQ ID NO: 121941 - RNA, 22 nt, Human
agcaugaaagcauaggacaguc

SEQ ID NO: 121942 - RNA, 22 nt, Human
gaagagcuccaaaaacagugag

SEQ ID NO: 121943 - RNA, 22 nt, Human
uagaggcagaagaaauugacaa

SEQ ID NO: 121944 - RNA, 22 nt, Human
aggacugacuuuugccaugaaa

SEQ ID NO: 121945 - RNA, 19 nt, Human
augcaaauagauuuggaau

SEQ ID NO: 121946 - RNA, 22 nt, Human
uuuguucaauccagacaauagc

SEQ ID NO: 121947 - RNA, 22 nt, Human
acaguggaugugauguccaggu

SEQ ID NO: 121948 - RNA, 22 nt, Human
gaagcccagcaaacugugauca

SEQ ID NO: 121949 - RNA, 22 nt, Human
agagauauauauuuguuuacca

SEQ ID NO: 121950 - RNA, 22 nt, Human
auagugcauuuuauuaucagca

SEQ ID NO: 121951 - RNA, 21 nt, Human
agaguaauuccugcuggaaag

SEQ ID NO: 121952 - RNA, 22 nt, Human
cagcagcagagauacugguuuc

SEQ ID NO: 121953 - RNA, 23 nt, Human
aggugcagcccuggaccugcccc

SEQ ID NO: 121954 - RNA, 22 nt, Human
ugcagggccuucuagaccaugg

SEQ ID NO: 121955 - RNA, 22 nt, Human
ugccaggccucaggagucucca

SEQ ID NO: 121956 - RNA, 22 nt, Human
acaggcagagaacucagccaga

SEQ ID NO: 121957 - RNA, 22 nt, Human
auauacguauauuccaaagggu

SEQ ID NO: 121958 - RNA, 22 nt, Human
ucagggcaggcgagcagcugcu

SEQ ID NO: 121959 - RNA, 22 nt, Human
ucagaggacuaccuucuccagu

SEQ ID NO: 121960 - RNA, 22 nt, Human
aaggccaggagacuuggaguca

SEQ ID NO: 121961 - RNA, 22 nt, Human
agggcugcuuugcuaaauaugg

SEQ ID NO: 121962 - RNA, 22 nt, Human
gaagaaggugccagaggcuuac

SEQ ID NO: 121963 - RNA, 22 nt, Human
uaaacagagugcuaguucacgg

SEQ ID NO: 121964 - RNA, 22 nt, Human
augcuacaggaagacgucaggc

SEQ ID NO: 121965 - RNA, 22 nt, Human
accugcaggcacaggugugcgc

SEQ ID NO: 121966 - RNA, 22 nt, Human
ccaaaggcggaacugagucucu

SEQ ID NO: 121967 - RNA, 22 nt, Human
acagcagcgugaaguguguuau

SEQ ID NO: 121968 - RNA, 22 nt, Human
ucuguuuaugugucuaaauaaa

SEQ ID NO: 121969 - RNA, 18 nt, Human
auguacauuugcuaaagc

SEQ ID NO: 121970 - RNA, 22 nt, Human
agugggaccggugcuauuccag

SEQ ID NO: 121971 - RNA, 22 nt, Human
aaacaucauaggcaugcaugau

SEQ ID NO: 121972 - RNA, 22 nt, Human
agaagccaaucagcucucugcu

SEQ ID NO: 121973 - RNA, 22 nt, Human
agccaggcuacuccuugcugac

SEQ ID NO: 121974 - RNA, 22 nt, Human
uuucuucauagaccuugucuug

SEQ ID NO: 121975 - RNA, 22 nt, Human
uaggcuggaggaagcagugccu

SEQ ID NO: 121976 - RNA, 22 nt, Human
cagggcagagggaaacuccuuu

SEQ ID NO: 121977 - RNA, 22 nt, Human
ugaagggcaaccccaggcccag

SEQ ID NO: 121978 - RNA, 22 nt, Human
ccugaagggacuccagagagca

SEQ ID NO: 121979 - RNA, 22 nt, Human
cccucccaagcacucugacaua

SEQ ID NO: 121980 - RNA, 20 nt, Human
aggccaggaaauguaguucu

SEQ ID NO: 121981 - RNA, 22 nt, Human
guacaugagcauaaacacacau

SEQ ID NO: 121982 - RNA, 22 nt, Human
uugagcaaaggaguaaaaugca

SEQ ID NO: 121983 - RNA, 22 nt, Human
uggauaaauagauacacuugca

SEQ ID NO: 121984 - RNA, 22 nt, Human
acuuugcagggcuugauaucca

SEQ ID NO: 121985 - RNA, 22 nt, Human
auacaaagcuaaauaugguuuc

SEQ ID NO: 121986 - RNA, 22 nt, Human
gcuggcagccaagugaagaggg

SEQ ID NO: 121987 - RNA, 20 nt, Human
cagaggcauuuucagacucu

SEQ ID NO: 121988 - RNA, 22 nt, Human
uguuuuaguucugucuugcaug

SEQ ID NO: 121989 - RNA, 22 nt, Human
aaauacuguugaaugaaguaag

SEQ ID NO: 121990 - RNA, 22 nt, Human
aaagcacauaguagaaggauuu

SEQ ID NO: 121991 - RNA, 22 nt, Human
aguugaagguuggcugauccau

SEQ ID NO: 121992 - RNA, 23 nt, Human
acucagagaccccgggaagugac

SEQ ID NO: 121993 - RNA, 22 nt, Human
guuuuccauggaggucugaccu

SEQ ID NO: 121994 - RNA, 22 nt, Human
cugaggcucccucgggucugcu

SEQ ID NO: 121995 - RNA, 22 nt, Human
ccaggugucaugcgugugaccc

SEQ ID NO: 121996 - RNA, 22 nt, Human
uacuuuuagccuauuugauucu

SEQ ID NO: 121997 - RNA, 22 nt, Human
uggcucaguuucaguccugguu

SEQ ID NO: 121998 - RNA, 22 nt, Human
acacauuuucaacacugucaag

SEQ ID NO: 121999 - RNA, 22 nt, Human
ucugucauuucauucauaugaa

SEQ ID NO: 122000 - RNA, 22 nt, Human
agccaggcgcaguggcuuaugc

SEQ ID NO: 122001 - RNA, 22 nt, Human
ggcccagaauacuuuguaaaau

SEQ ID NO: 122002 - RNA, 22 nt, Human
ucaggcugcuguacugugaaug

SEQ ID NO: 122003 - RNA, 22 nt, Human
ucucccaguccucugugcuuac

SEQ ID NO: 122004 - RNA, 22 nt, Human
uggaggaaguggacaguugugu

SEQ ID NO: 122005 - RNA, 22 nt, Human
ccucccuggccagagcagcagc

SEQ ID NO: 122006 - RNA, 22 nt, Human
aggcugagugcuccccuagaug

SEQ ID NO: 122007 - RNA, 22 nt, Human
caccuagggcaucccugcccca

SEQ ID NO: 122008 - RNA, 22 nt, Human
agggcagccugagugcuggccc

SEQ ID NO: 122009 - RNA, 22 nt, Human
uuuauaugugaagguuugcaga

SEQ ID NO: 122010 - RNA, 22 nt, Human
uuugggcaauucagugggaccu

SEQ ID NO: 122011 - RNA, 22 nt, Human
caguggagagacuuuuacucuu

SEQ ID NO: 122012 - RNA, 22 nt, Human
aucaggaaugaauacuuuugga

SEQ ID NO: 122013 - RNA, 22 nt, Human
augcaccugaacuccaucagcu

SEQ ID NO: 122014 - RNA, 22 nt, Human
caugcagugacucagacacagg

SEQ ID NO: 122015 - RNA, 19 nt, Human
ugaauacagagauacagaa

SEQ ID NO: 122016 - RNA, 22 nt, Human
uccagcuugacaaaugauuuua

SEQ ID NO: 122017 - RNA, 22 nt, Human
uuaaugcuugucuagaucuucu

SEQ ID NO: 122018 - RNA, 22 nt, Human
cuaggcuagauaguauauuggu

SEQ ID NO: 122019 - RNA, 22 nt, Human
uggcugaggcuuuucuuaaaga

SEQ ID NO: 122020 - RNA, 22 nt, Human
gggugaagcuccugcaggggcc

SEQ ID NO: 122021 - RNA, 22 nt, Human
ucagggcaucucuuaaguggug

SEQ ID NO: 122022 - RNA, 22 nt, Human
gcaggaguguauuugcauguaa

SEQ ID NO: 122023 - RNA, 22 nt, Human
gccugagaaggacacagcaggu

SEQ ID NO: 122024 - RNA, 22 nt, Human
uggaggcaguuuaagucugaga

SEQ ID NO: 122025 - RNA, 22 nt, Human
gaacauuugaugaugacauugg

SEQ ID NO: 122026 - RNA, 22 nt, Human
uucauucagcacauauuuauug

SEQ ID NO: 122027 - RNA, 22 nt, Human
cagaggaaggcucugggaaugu

SEQ ID NO: 122028 - RNA, 22 nt, Human
uuuaucuuuaggacuuugcaga

SEQ ID NO: 122029 - RNA, 22 nt, Human
acccaggggcagccuugcugug

SEQ ID NO: 122030 - RNA, 22 nt, Human
caaaugcauagaaagaugaaac

SEQ ID NO: 122031 - RNA, 22 nt, Human
uaucaacauuaauauuuucugg

SEQ ID NO: 122032 - RNA, 22 nt, Human
aagggcugggucugguuaaccc

SEQ ID NO: 122033 - RNA, 22 nt, Human
gaagccagcaguggagaaagga

SEQ ID NO: 122034 - RNA, 22 nt, Human
cagggcuggauuucauuucuag

SEQ ID NO: 122035 - RNA, 22 nt, Human
auucugauaugaacacacauau

SEQ ID NO: 122036 - RNA, 22 nt, Human
caacaguguugcaaucugaaaa

SEQ ID NO: 122037 - RNA, 21 nt, Human
aucagaaguuuuggucaguag

SEQ ID NO: 122038 - RNA, 22 nt, Human
agagaugcauucagcauggaug

SEQ ID NO: 122039 - RNA, 22 nt, Human
uccaggcaagggaggagcaugg

SEQ ID NO: 122040 - RNA, 22 nt, Human
ugaggcucugcuucuguggcuc

SEQ ID NO: 122041 - RNA, 22 nt, Human
gacccuguuucuacaaauaauu

SEQ ID NO: 122042 - RNA, 22 nt, Human
cagcuguggagggaggaaaugc

SEQ ID NO: 122043 - RNA, 22 nt, Human
gccucccuggcccacagcagcg

SEQ ID NO: 122044 - RNA, 20 nt, Human
cuucuucagccuaugcuuca

SEQ ID NO: 122045 - RNA, 22 nt, Human
augaugaaaugauagguuuguu

SEQ ID NO: 122046 - RNA, 18 nt, Human
uauauuucacacauauuc

SEQ ID NO: 122047 - RNA, 22 nt, Human
aauuuuaucucuaagcaggcuu

SEQ ID NO: 122048 - RNA, 22 nt, Human
ggaaucuuuuucauaagccuca

SEQ ID NO: 122049 - RNA, 22 nt, Human
agggcagagagaugaaugggau

SEQ ID NO: 122050 - RNA, 22 nt, Human
agugaagaggaaguggggcaca

SEQ ID NO: 122051 - RNA, 22 nt, Human
agaggucucaguuauguuuaaa

SEQ ID NO: 122052 - RNA, 22 nt, Human
uuauuugcccauguuuagcaga

SEQ ID NO: 122053 - RNA, 22 nt, Human
cagcccuggcuagggcgagggc

SEQ ID NO: 122054 - RNA, 22 nt, Human
agagaugcgguuccaugguuau

SEQ ID NO: 122055 - RNA, 23 nt, Human
ugcugugccuuugucugccucca

SEQ ID NO: 122056 - RNA, 22 nt, Human
aggcccaguagugcugccuuua

SEQ ID NO: 122057 - RNA, 22 nt, Human
agcagggcagugaucagaaagg

SEQ ID NO: 122058 - RNA, 22 nt, Human
aguauggggcugugugugcaca

SEQ ID NO: 122059 - RNA, 22 nt, Human
caucaugaagaugagaaagcau

SEQ ID NO: 122060 - RNA, 22 nt, Human
uaagcauuaacucugcugcaag

SEQ ID NO: 122061 - RNA, 22 nt, Human
uggagcuggaauuugagcugga

SEQ ID NO: 122062 - RNA, 22 nt, Human
agaagaaaugugaaggccacug

SEQ ID NO: 122063 - RNA, 22 nt, Human
caggaagauuagaccaagagcu

SEQ ID NO: 122064 - RNA, 22 nt, Human
gaggcucagagacuuuaaguuu

SEQ ID NO: 122065 - RNA, 22 nt, Human
augcaagcaaucugagcuuugg

SEQ ID NO: 122066 - RNA, 22 nt, Human
cagagcuggguuugggaaaccu

SEQ ID NO: 122067 - RNA, 18 nt, Human
cugugcagcaaacugagc

SEQ ID NO: 122068 - RNA, 22 nt, Human
gggccggagcugggucccgcgc

SEQ ID NO: 122069 - RNA, 22 nt, Human
aguuagagcgcauauuuuauua

SEQ ID NO: 122070 - RNA, 22 nt, Human
uaugucaugucuuagagaauga

SEQ ID NO: 122071 - RNA, 22 nt, Human
ugcagggcuacaggacuacaac

SEQ ID NO: 122072 - RNA, 22 nt, Human
uggcugagagucauccugugug

SEQ ID NO: 122073 - RNA, 22 nt, Human
gcugugcacuaccuauacaucc

SEQ ID NO: 122074 - RNA, 22 nt, Human
caugccaguuuugagaugcacc

SEQ ID NO: 122075 - RNA, 22 nt, Human
ucaucauaauauggaaucuugu

SEQ ID NO: 122076 - RNA, 22 nt, Human
aagggcaggugggcauuucugg

SEQ ID NO: 122077 - RNA, 22 nt, Human
gcaccuggacagugacccuagc

SEQ ID NO: 122078 - RNA, 22 nt, Human
gagcagcugagcuggaaugaga

SEQ ID NO: 122079 - RNA, 22 nt, Human
cacuagaugauaaucagcugga

SEQ ID NO: 122080 - RNA, 22 nt, Human
acagugcagggcgggaagaagg

SEQ ID NO: 122081 - RNA, 22 nt, Human
ccagcugcagguguuccagaug

SEQ ID NO: 122082 - RNA, 22 nt, Human
cacaucauucaauggugauauu

SEQ ID NO: 122083 - RNA, 22 nt, Human
agggcccuuacgcaggcccuuc

SEQ ID NO: 122084 - RNA, 22 nt, Human
aggugucugugaugggagcgau

SEQ ID NO: 122085 - RNA, 21 nt, Human
ugacauaauccauaguacaaa

SEQ ID NO: 122086 - RNA, 22 nt, Human
cacagugcuguuuguaaagaga

SEQ ID NO: 122087 - RNA, 22 nt, Human
auuuaaauuuucugauggagag

SEQ ID NO: 122088 - RNA, 22 nt, Human
cacaugcaucugucauguuugg

SEQ ID NO: 122089 - RNA, 22 nt, Human
ugccaggcuaaguggaggacuu

SEQ ID NO: 122090 - RNA, 22 nt, Human
agcaaguggaaucauggaaaag

SEQ ID NO: 122091 - RNA, 22 nt, Human
gcaggagagucugugccagguu

SEQ ID NO: 122092 - RNA, 22 nt, Human
gaagaaggugcuacacagggca

SEQ ID NO: 122093 - RNA, 22 nt, Human
ggccagagucuauaugcagaca

SEQ ID NO: 122094 - RNA, 22 nt, Human
gagggccaacuagcaccacuuu

SEQ ID NO: 122095 - RNA, 22 nt, Human
cuaaacaugcaagagcuucugg

SEQ ID NO: 122096 - RNA, 22 nt, Human
ugaggcaggagaaucaccggaa

SEQ ID NO: 122097 - RNA, 22 nt, Human
gagcuggaagucuguggucaga

SEQ ID NO: 122098 - RNA, 22 nt, Human
aaggggaaguagcaccagaggu

SEQ ID NO: 122099 - RNA, 22 nt, Human
auuuaaaugcuuaagaggguuu

SEQ ID NO: 122100 - RNA, 23 nt, Human
ccucccaggcugcgagucccgag

SEQ ID NO: 122101 - RNA, 19 nt, Human
ugcagaggguaggaaggcc

SEQ ID NO: 122102 - RNA, 22 nt, Human
aagacauuggacaauccagagg

SEQ ID NO: 122103 - RNA, 23 nt, Human
cagggcugguagggaagagcgug

SEQ ID NO: 122104 - RNA, 19 nt, Human
auuucaagagguuuauugg

SEQ ID NO: 122105 - RNA, 22 nt, Human
ugugagcagagccugacaugag

SEQ ID NO: 122106 - RNA, 22 nt, Human
aauaacaggguugauuugcaau

SEQ ID NO: 122107 - RNA, 22 nt, Human
uggccuggaaaaaugcagaugg

SEQ ID NO: 122108 - RNA, 22 nt, Human
ucugugcaagaccaacuuucaa

SEQ ID NO: 122109 - RNA, 22 nt, Human
ucacauuuguguuuuauuagag

SEQ ID NO: 122110 - RNA, 20 nt, Human
ucacaggagggaaggcaggu

SEQ ID NO: 122111 - RNA, 22 nt, Human
acagggcaaccucugggagacu

SEQ ID NO: 122112 - RNA, 21 nt, Human
uggcucaguugcugggcacag

SEQ ID NO: 122113 - RNA, 22 nt, Human
ugggacuugccucgagggcugc

SEQ ID NO: 122114 - RNA, 22 nt, Human
guacaguagagccagguucagu

SEQ ID NO: 122115 - RNA, 22 nt, Human
caacagugauucugcaugagga

SEQ ID NO: 122116 - RNA, 22 nt, Human
accuucaaacuagauagaaguu

SEQ ID NO: 122117 - RNA, 22 nt, Human
aaaacauugaauugcacacuau

SEQ ID NO: 122118 - RNA, 22 nt, Human
gaggcugaauggccagaagcca

SEQ ID NO: 122119 - RNA, 22 nt, Human
agaagccaauccuugucucucu

SEQ ID NO: 122120 - RNA, 22 nt, Human
augcacaucuuacagaugcaga

SEQ ID NO: 122121 - RNA, 22 nt, Human
cagggcaguaccgcccucuggc

SEQ ID NO: 122122 - RNA, 22 nt, Human
auguacaucuuuauaacaagcu

SEQ ID NO: 122123 - RNA, 22 nt, Human
gggcaguuuauucuagaugguu

SEQ ID NO: 122124 - RNA, 17 nt, Human
gcacagugauauuauuu

SEQ ID NO: 122125 - RNA, 22 nt, Human
ucagaacagaagaaggaacacg

SEQ ID NO: 122126 - RNA, 22 nt, Human
uggucagacaaaggagaauguu

SEQ ID NO: 122127 - RNA, 22 nt, Human
aggcugggaaauguauuccagc

SEQ ID NO: 122128 - RNA, 22 nt, Human
gcaggcagucaucuuucauauu

SEQ ID NO: 122129 - RNA, 22 nt, Human
uucagcacaagacuagacaggu

SEQ ID NO: 122130 - RNA, 22 nt, Human
uugaauaauuaauuacacucag

SEQ ID NO: 122131 - RNA, 22 nt, Human
gcaaauaaaugcucacugcugu

SEQ ID NO: 122132 - RNA, 22 nt, Human
augaggcaguacacacaaagcc

SEQ ID NO: 122133 - RNA, 22 nt, Human
ucuaugaaccucugcaaugaca

SEQ ID NO: 122134 - RNA, 22 nt, Human
ggcagcaacucggagagaagag

SEQ ID NO: 122135 - RNA, 22 nt, Human
cuguuuaaugagguguaacaac

SEQ ID NO: 122136 - RNA, 22 nt, Human
acacaaacagucuauagcacca

SEQ ID NO: 122137 - RNA, 22 nt, Human
augaggcaggagugcaguggca

SEQ ID NO: 122138 - RNA, 19 nt, Human
aguuuauuauaggugauuc

SEQ ID NO: 122139 - RNA, 22 nt, Human
aggcucagggacggggccccuu

SEQ ID NO: 122140 - RNA, 22 nt, Human
uccagcuuugagauuuuaugga

SEQ ID NO: 122141 - RNA, 22 nt, Human
uuucugcagguauugcauaagu

SEQ ID NO: 122142 - RNA, 22 nt, Human
ucacauuuuaucuauuuuaagu

SEQ ID NO: 122143 - RNA, 22 nt, Human
ucauuuguaccauuuuuuaaga

SEQ ID NO: 122144 - RNA, 21 nt, Human
ugggggucuucacgguguugu

SEQ ID NO: 122145 - RNA, 21 nt, Human
uuucccagcugaaaauaaaug

SEQ ID NO: 122146 - RNA, 22 nt, Human
auaacuucaucaaauaggcaca

SEQ ID NO: 122147 - RNA, 22 nt, Human
aagucagcacuccaggaagcca

SEQ ID NO: 122148 - RNA, 22 nt, Human
aagggcaggcacccacccucac

SEQ ID NO: 122149 - RNA, 21 nt, Human
ugcagauaauugaaagcugac

SEQ ID NO: 122150 - RNA, 22 nt, Human
aggaggaauacaauccagcagc

SEQ ID NO: 122151 - RNA, 22 nt, Human
ugaggcucagugagcccugcag

SEQ ID NO: 122152 - RNA, 22 nt, Human
cugugggagcagcaccaaggac

SEQ ID NO: 122153 - RNA, 22 nt, Human
gaggagcacaugaggcugaggg

SEQ ID NO: 122154 - RNA, 22 nt, Human
cugaggcugggcauggggucca

SEQ ID NO: 122155 - RNA, 22 nt, Human
gcuguggccgucagggaaaugg

SEQ ID NO: 122156 - RNA, 22 nt, Human
gaugcaggauagcuucacccag

SEQ ID NO: 122157 - RNA, 22 nt, Human
ucuaguucuagaucccugagga

SEQ ID NO: 122158 - RNA, 22 nt, Human
accaggaggccuggagcacaaa

SEQ ID NO: 122159 - RNA, 22 nt, Human
uuuucaagggcagggaaaucau

SEQ ID NO: 122160 - RNA, 22 nt, Human
caggcagcugcgacaagagagc

SEQ ID NO: 122161 - RNA, 19 nt, Human
gaucagagugucagcuugu

SEQ ID NO: 122162 - RNA, 22 nt, Human
ucaggcugaaggaggccuaucu

SEQ ID NO: 122163 - RNA, 22 nt, Human
auuccaaaggcuggccuggagg

SEQ ID NO: 122164 - RNA, 17 nt, Human
uggcaagaauggaaaug

SEQ ID NO: 122165 - RNA, 22 nt, Human
uggagccaaugaacauuugcug

SEQ ID NO: 122166 - RNA, 22 nt, Human
uguuagagcuaagauaacaucu

SEQ ID NO: 122167 - RNA, 22 nt, Human
gcugugcagucuuuggugugcc

SEQ ID NO: 122168 - RNA, 22 nt, Human
gauguaaaaacuccuuucgaaa

SEQ ID NO: 122169 - RNA, 22 nt, Human
cacaggaaugaacagggaaaga

SEQ ID NO: 122170 - RNA, 22 nt, Human
agggaggaccaaugugugguua

SEQ ID NO: 122171 - RNA, 22 nt, Human
aagcagaauuuaauagaaaggu

SEQ ID NO: 122172 - RNA, 21 nt, Human
aucucacagcccagagaagcc

SEQ ID NO: 122173 - RNA, 22 nt, Human
aaacauguaaguucagaucacc

SEQ ID NO: 122174 - RNA, 22 nt, Human
augcugagaaacagacguguug

SEQ ID NO: 122175 - RNA, 22 nt, Human
gcaggcagagguggaggagaca

SEQ ID NO: 122176 - RNA, 22 nt, Human
aguaugcaaaugucauaagcau

SEQ ID NO: 122177 - RNA, 22 nt, Human
gggcaguugauggaggucugga

SEQ ID NO: 122178 - RNA, 22 nt, Human
uuaaugauuuggaacccuuuaa

SEQ ID NO: 122179 - RNA, 22 nt, Human
acauuuagcuguacaaucuaug

SEQ ID NO: 122180 - RNA, 22 nt, Human
cagcugggagcuccauuagaua

SEQ ID NO: 122181 - RNA, 22 nt, Human
ucacauuuauuucaaaguuacu

SEQ ID NO: 122182 - RNA, 22 nt, Human
uauuacuguuacuucacacugu

SEQ ID NO: 122183 - RNA, 20 nt, Human
uguggcaggaugagggcgga

SEQ ID NO: 122184 - RNA, 20 nt, Human
ggaagccagggugcagggga

SEQ ID NO: 122185 - RNA, 22 nt, Human
agccagggacgcugcaggcuac

SEQ ID NO: 122186 - RNA, 22 nt, Human
cauuuucaugaguuucuguuca

SEQ ID NO: 122187 - RNA, 22 nt, Human
ugcugaaggcaggggagguggc

SEQ ID NO: 122188 - RNA, 22 nt, Human
aggcccaguccucugccgucug

SEQ ID NO: 122189 - RNA, 22 nt, Human
gcucccagcauugcugcugaau

SEQ ID NO: 122190 - RNA, 22 nt, Human
aggaagcccaagucucaucuuc

SEQ ID NO: 122191 - RNA, 22 nt, Human
gggcagguuauuggaguaggga

SEQ ID NO: 122192 - RNA, 22 nt, Human
cagugaaguucuacugaauggu

SEQ ID NO: 122193 - RNA, 22 nt, Human
gccaccagggggugcaaggucc

SEQ ID NO: 122194 - RNA, 19 nt, Human
ugggcagcucccucugucc

SEQ ID NO: 122195 - RNA, 22 nt, Human
gcagggcagaaggugcugagga

SEQ ID NO: 122196 - RNA, 22 nt, Human
agggucaguucugugagguguu

SEQ ID NO: 122197 - RNA, 22 nt, Human
acugugcauuugaagggaucau

SEQ ID NO: 122198 - RNA, 22 nt, Human
ugucacaguuuguacuuuauag

SEQ ID NO: 122199 - RNA, 22 nt, Human
agucaccaacaugguucccagg

SEQ ID NO: 122200 - RNA, 20 nt, Human
uuugucaacugcauccagca

SEQ ID NO: 122201 - RNA, 22 nt, Human
agcugagcuaguaguuccagug

SEQ ID NO: 122202 - RNA, 19 nt, Human
auacacauacguaaacuga

SEQ ID NO: 122203 - RNA, 22 nt, Human
auucucaaaacauaacuucacu

SEQ ID NO: 122204 - RNA, 22 nt, Human
ugaugauugggagacauuuggg

SEQ ID NO: 122205 - RNA, 22 nt, Human
aagcugaaacauuagccuaaac

SEQ ID NO: 122206 - RNA, 22 nt, Human
gcagugaaaaagugcacccugu

SEQ ID NO: 122207 - RNA, 22 nt, Human
aggcaguuguagagagggcucu

SEQ ID NO: 122208 - RNA, 22 nt, Human
uccaucaccauuucugcgagcu

SEQ ID NO: 122209 - RNA, 22 nt, Human
uuguccuuggaugaagcuggga

SEQ ID NO: 122210 - RNA, 22 nt, Human
gggcagagguucaacuucaaca

SEQ ID NO: 122211 - RNA, 22 nt, Human
uuacaaguauuuaagaugcugu

SEQ ID NO: 122212 - RNA, 22 nt, Human
aggcaguuuauccccagagccu

SEQ ID NO: 122213 - RNA, 22 nt, Human
uaaaaugguaacuuucauuugc

SEQ ID NO: 122214 - RNA, 22 nt, Human
augcaagacauaaauaaucuuu

SEQ ID NO: 122215 - RNA, 22 nt, Human
aaagccagagcaagcugucaca

SEQ ID NO: 122216 - RNA, 22 nt, Human
ugaguccacuuuaaaaugucag

SEQ ID NO: 122217 - RNA, 22 nt, Human
ccaggugugccagcagggacug

SEQ ID NO: 122218 - RNA, 22 nt, Human
uguuuauaccugcaaccuguca

SEQ ID NO: 122219 - RNA, 22 nt, Human
acuaugaauagccagauaguga

SEQ ID NO: 122220 - RNA, 22 nt, Human
gacaacaggcagacgucagaaa

SEQ ID NO: 122221 - RNA, 22 nt, Human
augggcaguuaggaggccagga

SEQ ID NO: 122222 - RNA, 22 nt, Human
uuauaugaacuggacuuuagga

SEQ ID NO: 122223 - RNA, 22 nt, Human
ucuaauccuugcuaccugggug

SEQ ID NO: 122224 - RNA, 22 nt, Human
cugagccagcgggcucacuuuu

SEQ ID NO: 122225 - RNA, 22 nt, Human
gauuuucauuauagcuaguuuc

SEQ ID NO: 122226 - RNA, 22 nt, Human
ugagcacauuucacaugacagg

SEQ ID NO: 122227 - RNA, 22 nt, Human
cuguuuaaccagaucucauauc

SEQ ID NO: 122228 - RNA, 22 nt, Human
uggcugagagcaauugacucug

SEQ ID NO: 122229 - RNA, 22 nt, Human
caccagggcucugagcucugaa

SEQ ID NO: 122230 - RNA, 22 nt, Human
cugaggcuuggaggggucuggu

SEQ ID NO: 122231 - RNA, 22 nt, Human
cuggagugaagucuggcagcuu

SEQ ID NO: 122232 - RNA, 22 nt, Human
uuuaucugugguaaauaacauu

SEQ ID NO: 122233 - RNA, 22 nt, Human
ugccaggcaggacccuagaacc

SEQ ID NO: 122234 - RNA, 19 nt, Human
cagugcccgacgcaggucu

SEQ ID NO: 122235 - RNA, 22 nt, Human
uuguuuuaguagguacacugag

SEQ ID NO: 122236 - RNA, 22 nt, Human
uucauacaugagacuagaugca

SEQ ID NO: 122237 - RNA, 23 nt, Human
ugcagggcaaguuagagacccca

SEQ ID NO: 122238 - RNA, 22 nt, Human
auggcagagggauugaacagcu

SEQ ID NO: 122239 - RNA, 22 nt, Human
acaauguaggaguaugacagua

SEQ ID NO: 122240 - RNA, 20 nt, Human
agcaggaaaagugccagucu

SEQ ID NO: 122241 - RNA, 22 nt, Human
ucaguggggucgaugugaggga

SEQ ID NO: 122242 - RNA, 22 nt, Human
ccaucccuucucuggccagcag

SEQ ID NO: 122243 - RNA, 22 nt, Human
uggcagagucucuccuuuccag

SEQ ID NO: 122244 - RNA, 22 nt, Human
ucacagcuaagcuuggucacug

SEQ ID NO: 122245 - RNA, 22 nt, Human
uuugauacugagaaaaacaaau

SEQ ID NO: 122246 - RNA, 22 nt, Human
gggaagcagcauugugcuggcu

SEQ ID NO: 122247 - RNA, 22 nt, Human
agggcugaugcaccauguagcc

SEQ ID NO: 122248 - RNA, 19 nt, Human
cauuuagaaguacauauua

SEQ ID NO: 122249 - RNA, 22 nt, Human
uuagaggcaugauucaguaaag

SEQ ID NO: 122250 - RNA, 22 nt, Human
caguggagugggacuggucuga

SEQ ID NO: 122251 - RNA, 22 nt, Human
caggguugcaugcaucuguggg

SEQ ID NO: 122252 - RNA, 22 nt, Human
augaucaagaauuuuguauucc

SEQ ID NO: 122253 - RNA, 22 nt, Human
acagcugugagggucacuugua

SEQ ID NO: 122254 - RNA, 22 nt, Human
cacaggagauugaucuauuggu

SEQ ID NO: 122255 - RNA, 22 nt, Human
agagcagcuggggcagagacca

SEQ ID NO: 122256 - RNA, 22 nt, Human
augaggcaaggcuggccguguu

SEQ ID NO: 122257 - RNA, 22 nt, Human
ggaaggaggggcaaagcaguuc

SEQ ID NO: 122258 - RNA, 22 nt, Human
gcagggcagccacaggcccccu

SEQ ID NO: 122259 - RNA, 22 nt, Human
ggagauaguccaggugaaggga

SEQ ID NO: 122260 - RNA, 22 nt, Human
agugggggccaacgagggcagc

SEQ ID NO: 122261 - RNA, 22 nt, Human
gaggagaagcuauuggaaggac

SEQ ID NO: 122262 - RNA, 22 nt, Human
agccagugggauuagagccucu

SEQ ID NO: 122263 - RNA, 22 nt, Human
agggcugacaguggcguggcgu

SEQ ID NO: 122264 - RNA, 22 nt, Human
gagaggggaccugugugucuag

SEQ ID NO: 122265 - RNA, 22 nt, Human
cagagcggccacuagagggcgc

SEQ ID NO: 122266 - RNA, 22 nt, Human
agguggagacccagagaaggcg

SEQ ID NO: 122267 - RNA, 22 nt, Human
uguacuugaacuugacuguaga

SEQ ID NO: 122268 - RNA, 22 nt, Human
agggucagcuggcugucagggg

SEQ ID NO: 122269 - RNA, 22 nt, Human
cagaggcagaauggagauuugg

SEQ ID NO: 122270 - RNA, 22 nt, Human
agggcuguuuuuggcaccuggg

SEQ ID NO: 122271 - RNA, 22 nt, Human
uaccucaugcuguacagcacgu

SEQ ID NO: 122272 - RNA, 22 nt, Human
uccuggggccagcacuggugga

SEQ ID NO: 122273 - RNA, 22 nt, Human
cccaggacucggcacucuccuu

SEQ ID NO: 122274 - RNA, 22 nt, Human
auucauuuagagggauuaagca

SEQ ID NO: 122275 - RNA, 22 nt, Human
cugcuguggguuaagacacugu

SEQ ID NO: 122276 - RNA, 22 nt, Human
gcaccugggcaaggauucagag

SEQ ID NO: 122277 - RNA, 18 nt, Human
aggggcagcuugugugga

SEQ ID NO: 122278 - RNA, 22 nt, Human
ccagagcuccagggcuacagaa

SEQ ID NO: 122279 - RNA, 22 nt, Human
aaagcaaucagauucagauguc

SEQ ID NO: 122280 - RNA, 22 nt, Human
gaaaggagaggguuaaggagcu

SEQ ID NO: 122281 - RNA, 22 nt, Human
augaggcagaaaaaagucggag

SEQ ID NO: 122282 - RNA, 22 nt, Human
auaaacuggguaucaagaggcc

SEQ ID NO: 122283 - RNA, 22 nt, Human
caauggauauuuuaugugagaa

SEQ ID NO: 122284 - RNA, 22 nt, Human
aagggugggcaccgccagguca

SEQ ID NO: 122285 - RNA, 22 nt, Human
ggagaugccagaauugcaaauu

SEQ ID NO: 122286 - RNA, 22 nt, Human
cuggagggggaaauguucauug

SEQ ID NO: 122287 - RNA, 22 nt, Human
cuacagugaagacuagcuauag

SEQ ID NO: 122288 - RNA, 22 nt, Human
gcagggcagggcaagaacuggg

SEQ ID NO: 122289 - RNA, 22 nt, Human
auuuucaucauggguuuaacau

SEQ ID NO: 122290 - RNA, 22 nt, Human
cauuugauuacuaaagauaauu

SEQ ID NO: 122291 - RNA, 22 nt, Human
auucugaucauucaagauguca

SEQ ID NO: 122292 - RNA, 22 nt, Human
acugugcauuccccaaccugug

SEQ ID NO: 122293 - RNA, 22 nt, Human
uauacugaguguguuaaugaug

SEQ ID NO: 122294 - RNA, 22 nt, Human
acaauguuucucuuuagucauu

SEQ ID NO: 122295 - RNA, 22 nt, Human
aggcagcaagauuauuuaaucc

SEQ ID NO: 122296 - RNA, 22 nt, Human
uuugaugaguuuaauaacagcc

SEQ ID NO: 122297 - RNA, 22 nt, Human
gcucccagguucuugggccuug

SEQ ID NO: 122298 - RNA, 22 nt, Human
gaggcacaauacaugucucaag

SEQ ID NO: 122299 - RNA, 22 nt, Human
ucagaggaaaggucagauggcu

SEQ ID NO: 122300 - RNA, 22 nt, Human
uuagaucauuuuagcuaaaugg

SEQ ID NO: 122301 - RNA, 22 nt, Human
cagaggaagcagacacaucuug

SEQ ID NO: 122302 - RNA, 22 nt, Human
guaguuacccagaacacuggaa

SEQ ID NO: 122303 - RNA, 22 nt, Human
aggaaggguucuuugugaaaga

SEQ ID NO: 122304 - RNA, 22 nt, Human
uucuccucuguuggccuucccu

SEQ ID NO: 122305 - RNA, 22 nt, Human
aguggcaggcggagauguagga

SEQ ID NO: 122306 - RNA, 22 nt, Human
uaucuguuuauuguuacuguca

SEQ ID NO: 122307 - RNA, 22 nt, Human
uucaggaugaaagugugcaaca

SEQ ID NO: 122308 - RNA, 18 nt, Human
agauuuugagaaauacaa

SEQ ID NO: 122309 - RNA, 22 nt, Human
guucaaggaagggaggaaagcc

SEQ ID NO: 122310 - RNA, 22 nt, Human
gcagccagggagagaaccaggg

SEQ ID NO: 122311 - RNA, 22 nt, Human
ggaagccacccagcuuugauag

SEQ ID NO: 122312 - RNA, 19 nt, Human
cagaggcaccagguauaga

SEQ ID NO: 122313 - RNA, 22 nt, Human
uugaaaguaauaacuuuguuca

SEQ ID NO: 122314 - RNA, 22 nt, Human
gcagggcagcuuagucccuguc

SEQ ID NO: 122315 - RNA, 22 nt, Human
uacuguuuuuuagacucauggu

SEQ ID NO: 122316 - RNA, 22 nt, Human
cugagcugguggaagcaugcag

SEQ ID NO: 122317 - RNA, 22 nt, Human
augcugaauugaugcgagggag

SEQ ID NO: 122318 - RNA, 22 nt, Human
cagggccagcgcccaggcccag

SEQ ID NO: 122319 - RNA, 22 nt, Human
acaguacauagaucucuacccu

SEQ ID NO: 122320 - RNA, 22 nt, Human
cugaggcugaagagggccuacg

SEQ ID NO: 122321 - RNA, 22 nt, Human
uccugggguccugacugcuucc

SEQ ID NO: 122322 - RNA, 22 nt, Human
ucaaucacguguuccauguucu

SEQ ID NO: 122323 - RNA, 22 nt, Human
cugaggcugggcugaggguaua

SEQ ID NO: 122324 - RNA, 22 nt, Human
acaguucccgucuugcacagcu

SEQ ID NO: 122325 - RNA, 22 nt, Human
ccugugcaugccaggguacacc

SEQ ID NO: 122326 - RNA, 22 nt, Human
caggagaaacauaauuuucugg

SEQ ID NO: 122327 - RNA, 22 nt, Human
ugucaauaucaggcagaccuaa

SEQ ID NO: 122328 - RNA, 22 nt, Human
cucccugggccucaguuucucu

SEQ ID NO: 122329 - RNA, 21 nt, Human
ggcaggauggcaguggacccc

SEQ ID NO: 122330 - RNA, 22 nt, Human
aggcagcagagguugaggaaag

SEQ ID NO: 122331 - RNA, 22 nt, Human
augcugaagagugcacaggcua

SEQ ID NO: 122332 - RNA, 22 nt, Human
acaguggaaagaacauggauuu

SEQ ID NO: 122333 - RNA, 19 nt, Human
agacagagcucaguggguu

SEQ ID NO: 122334 - RNA, 22 nt, Human
augaacaaucuguugacuucug

SEQ ID NO: 122335 - RNA, 22 nt, Human
ugagcagaguuguuucuccuga

SEQ ID NO: 122336 - RNA, 21 nt, Human
auuugcauuaaaauauuacgc

SEQ ID NO: 122337 - RNA, 22 nt, Human
ggcagaccucuccagccccaca

SEQ ID NO: 122338 - RNA, 22 nt, Human
acacuucucccaucuccuguug

SEQ ID NO: 122339 - RNA, 22 nt, Human
gaggcgagaagcuggagauggu

SEQ ID NO: 122340 - RNA, 20 nt, Human
cccaggugucugaagcucug

SEQ ID NO: 122341 - RNA, 22 nt, Human
ggaggaagagguuguucucuca

SEQ ID NO: 122342 - RNA, 19 nt, Human
caggccagugucagggggc

SEQ ID NO: 122343 - RNA, 22 nt, Human
ggagaggcgaugagucacagcc

SEQ ID NO: 122344 - RNA, 22 nt, Human
uaaacagaaagcagauguacuu

SEQ ID NO: 122345 - RNA, 22 nt, Human
aaaugauugucaaaguucuguu

SEQ ID NO: 122346 - RNA, 22 nt, Human
uucucacaguaccuaacaugua

SEQ ID NO: 122347 - RNA, 22 nt, Human
ucagaggagggacucagaccca

SEQ ID NO: 122348 - RNA, 22 nt, Human
ucauccagccucaucaggagcu

SEQ ID NO: 122349 - RNA, 22 nt, Human
gaggaaaauaacaacuaagggc

SEQ ID NO: 122350 - RNA, 22 nt, Human
ugcaggcucacccuggagcuga

SEQ ID NO: 122351 - RNA, 22 nt, Human
aggcugagccacggggcuggcu

SEQ ID NO: 122352 - RNA, 22 nt, Human
uaaaggcuuuuacaggagugca

SEQ ID NO: 122353 - RNA, 22 nt, Human
gagcugcagcggcugacgcaac

SEQ ID NO: 122354 - RNA, 22 nt, Human
ugcagggcagauaugacuguag

SEQ ID NO: 122355 - RNA, 22 nt, Human
ggaaagagcuaaaagggugaga

SEQ ID NO: 122356 - RNA, 21 nt, Human
gggcaggucucugaugucaac

SEQ ID NO: 122357 - RNA, 20 nt, Human
aggaaaaggguggugguaga

SEQ ID NO: 122358 - RNA, 22 nt, Human
guauuuucaugauuucagacca

SEQ ID NO: 122359 - RNA, 22 nt, Human
cgcagggccgcgagcgggacca

SEQ ID NO: 122360 - RNA, 22 nt, Human
aggcuucacgaugggugaggug

SEQ ID NO: 122361 - RNA, 22 nt, Human
gggcaguggcucacgccuguaa

SEQ ID NO: 122362 - RNA, 16 nt, Human
gcaggcagaucacaug

SEQ ID NO: 122363 - RNA, 22 nt, Human
cugccaggccuccgcugucccc

SEQ ID NO: 122364 - RNA, 19 nt, Human
gcauaaaaugucaaugugu

SEQ ID NO: 122365 - RNA, 22 nt, Human
uugaccuauguuucuucaucug

SEQ ID NO: 122366 - RNA, 21 nt, Human
gugguucuagagaaacagaau

SEQ ID NO: 122367 - RNA, 22 nt, Human
uuucuggcagcgggacaggggu

SEQ ID NO: 122368 - RNA, 22 nt, Human
agcagggcuuuggcuggcuuuc

SEQ ID NO: 122369 - RNA, 22 nt, Human
gggaggagugaagauucaccug

SEQ ID NO: 122370 - RNA, 22 nt, Human
ugaaggugaaugucuaugggga

SEQ ID NO: 122371 - RNA, 22 nt, Human
gcagauggcagcccaggcuggg

SEQ ID NO: 122372 - RNA, 22 nt, Human
ggaaucuucagccaugccaaga

SEQ ID NO: 122373 - RNA, 22 nt, Human
aacagcugucugccuaucucug

SEQ ID NO: 122374 - RNA, 22 nt, Human
gaaggcugucagagaggagggc

SEQ ID NO: 122375 - RNA, 23 nt, Human
gagugcagaauagacaugcagug

SEQ ID NO: 122376 - RNA, 22 nt, Human
acauuuauauaacucacuagga

SEQ ID NO: 122377 - RNA, 22 nt, Human
aggcagaugguaacugugauau

SEQ ID NO: 122378 - RNA, 22 nt, Human
acagggcagagugaaaugcuau

SEQ ID NO: 122379 - RNA, 22 nt, Human
aaauagauugcugaggcauuac

SEQ ID NO: 122380 - RNA, 22 nt, Human
gcacuauagcugcagcacagag

SEQ ID NO: 122381 - RNA, 22 nt, Human
agaagccaacagggcaggagag

SEQ ID NO: 122382 - RNA, 22 nt, Human
ugaaaaacugaauaguugagua

SEQ ID NO: 122383 - RNA, 22 nt, Human
gcaguaggagaagaggaugcuu

SEQ ID NO: 122384 - RNA, 22 nt, Human
caggcagagaggagcauuuaau

SEQ ID NO: 122385 - RNA, 22 nt, Human
uguuuauaccuugguauaacca

SEQ ID NO: 122386 - RNA, 22 nt, Human
aacaggaugucauuucucaugu

SEQ ID NO: 122387 - RNA, 20 nt, Human
uuuacauuuugaaacaguga

SEQ ID NO: 122388 - RNA, 22 nt, Human
aggcagccuauggggagcucag

SEQ ID NO: 122389 - RNA, 22 nt, Human
aucaggaagaagaauguguugg

SEQ ID NO: 122390 - RNA, 22 nt, Human
ugcagggcuuccucuuggaguu

SEQ ID NO: 122391 - RNA, 22 nt, Human
caugauuauguguuagaguuug

SEQ ID NO: 122392 - RNA, 22 nt, Human
cagcugcaugucuguggugguc

SEQ ID NO: 122393 - RNA, 22 nt, Human
ggcugugcaccauccaccuccc

SEQ ID NO: 122394 - RNA, 22 nt, Human
agugcagccgagaucaggugcu

SEQ ID NO: 122395 - RNA, 22 nt, Human
uggaggagggcuggugucugua

SEQ ID NO: 122396 - RNA, 22 nt, Human
aggcacaggaaugucauccagu

SEQ ID NO: 122397 - RNA, 22 nt, Human
auuuucucucaaaccuuaaaau

SEQ ID NO: 122398 - RNA, 22 nt, Human
gaggcagcaggcugaggaggau

SEQ ID NO: 122399 - RNA, 23 nt, Human
gcugugcacgagccacugccugu

SEQ ID NO: 122400 - RNA, 22 nt, Human
acaguggagaaggcaugaggcu

SEQ ID NO: 122401 - RNA, 22 nt, Human
acauuugagaugccuuuuaggu

SEQ ID NO: 122402 - RNA, 22 nt, Human
guauuaguuaucuacugcugug

SEQ ID NO: 122403 - RNA, 22 nt, Human
agcagcagaagggagacccagg

SEQ ID NO: 122404 - RNA, 22 nt, Human
ugaggcagcauucuucaagaca

SEQ ID NO: 122405 - RNA, 22 nt, Human
uuuauccagaaucaggauuuuu

SEQ ID NO: 122406 - RNA, 22 nt, Human
ugauuagacaaaggaaucaugc

SEQ ID NO: 122407 - RNA, 22 nt, Human
agcagggcacuggaaggcacug

SEQ ID NO: 122408 - RNA, 22 nt, Human
cuguggaccugcucuuagagac

SEQ ID NO: 122409 - RNA, 19 nt, Human
agcauuuggaauucuacac

SEQ ID NO: 122410 - RNA, 22 nt, Human
aguaacauuuagcuucucacug

SEQ ID NO: 122411 - RNA, 22 nt, Human
cuguugucuucauugucauauc

SEQ ID NO: 122412 - RNA, 19 nt, Human
gaaggcugaaaugaagcac

SEQ ID NO: 122413 - RNA, 21 nt, Human
gaguggaacgcucuucacacc

SEQ ID NO: 122414 - RNA, 22 nt, Human
gcagggcacagacagugccaag

SEQ ID NO: 122415 - RNA, 19 nt, Human
accaggccucagaggcccu

SEQ ID NO: 122416 - RNA, 22 nt, Human
uaaaggcuuuuagugaugguaa

SEQ ID NO: 122417 - RNA, 22 nt, Human
gaauucugggagagaucugaca

SEQ ID NO: 122418 - RNA, 22 nt, Human
cagaggcacaagaaagcaaggc

SEQ ID NO: 122419 - RNA, 22 nt, Human
aggcugaggcuggcagcuccag

SEQ ID NO: 122420 - RNA, 22 nt, Human
uuccucagagggcgcuggggaa

SEQ ID NO: 122421 - RNA, 22 nt, Human
gagcaggaugggagcuggggcc

SEQ ID NO: 122422 - RNA, 22 nt, Human
uggcugaguuccuggcacacgg

SEQ ID NO: 122423 - RNA, 22 nt, Human
cugagggccuuggcuccugccc

SEQ ID NO: 122424 - RNA, 22 nt, Human
aggauuuaggagcuggcuaacg

SEQ ID NO: 122425 - RNA, 23 nt, Human
agggccacugggaaggauuacug

SEQ ID NO: 122426 - RNA, 22 nt, Human
uguauuuaagcuuuaccuaaaa

SEQ ID NO: 122427 - RNA, 22 nt, Human
uuaccuguaaaacugcgauaua

SEQ ID NO: 122428 - RNA, 22 nt, Human
agcuguggcagcacuuuggagu

SEQ ID NO: 122429 - RNA, 22 nt, Human
auauuacuuccugguauaaaau

SEQ ID NO: 122430 - RNA, 22 nt, Human
gcaggaagcauagaagaaugcc

SEQ ID NO: 122431 - RNA, 22 nt, Human
gagcugaaauaugaagccaauu

SEQ ID NO: 122432 - RNA, 22 nt, Human
aagggcugccagggggugccag

SEQ ID NO: 122433 - RNA, 22 nt, Human
ucaccaggcaacuauguacucc

SEQ ID NO: 122434 - RNA, 22 nt, Human
uuauagugggcccaacauggcg

SEQ ID NO: 122435 - RNA, 22 nt, Human
cacaaaugacugaaacgacugu

SEQ ID NO: 122436 - RNA, 22 nt, Human
aagcauuucagguagagauauu

SEQ ID NO: 122437 - RNA, 22 nt, Human
ugcagagggacagccacagcuc

SEQ ID NO: 122438 - RNA, 22 nt, Human
augcugagguguguuuaauuua

SEQ ID NO: 122439 - RNA, 22 nt, Human
ugagggucauuuggaaguggaa

SEQ ID NO: 122440 - RNA, 22 nt, Human
gcuccucuccucggagucgggg

SEQ ID NO: 122441 - RNA, 22 nt, Human
guugauacaccucaugguuacu

SEQ ID NO: 122442 - RNA, 22 nt, Human
gccagaagggguggauccaggc

SEQ ID NO: 122443 - RNA, 22 nt, Human
ucugugcaauaguuuguuuuac

SEQ ID NO: 122444 - RNA, 22 nt, Human
agagguauuagguaauucagua

SEQ ID NO: 122445 - RNA, 22 nt, Human
aggucauuacaauuaucauuuu

SEQ ID NO: 122446 - RNA, 16 nt, Human
gcagaggaaaggggag

SEQ ID NO: 122447 - RNA, 22 nt, Human
agagggcauuaacucugucuug

SEQ ID NO: 122448 - RNA, 22 nt, Human
acauucuuucucuucaggaaac

SEQ ID NO: 122449 - RNA, 22 nt, Human
ucaaccagaguuuuucuuaaua

SEQ ID NO: 122450 - RNA, 23 nt, Human
uuucacaaugagcauuacagaau

SEQ ID NO: 122451 - RNA, 19 nt, Human
uggaagaggaagggaaaua

SEQ ID NO: 122452 - RNA, 22 nt, Human
uggguaggccaggaagcagugu

SEQ ID NO: 122453 - RNA, 22 nt, Human
cugggcaguaugaauauucaaa

SEQ ID NO: 122454 - RNA, 22 nt, Human
agcugggcagacugcagugguu

SEQ ID NO: 122455 - RNA, 22 nt, Human
agggaaauuaaugugagcaaug

SEQ ID NO: 122456 - RNA, 22 nt, Human
gagggcaggggucuugcacggu

SEQ ID NO: 122457 - RNA, 22 nt, Human
aacuauuuuuggagcuaacucu

SEQ ID NO: 122458 - RNA, 22 nt, Human
uuacaagauaaccugaugcugu

SEQ ID NO: 122459 - RNA, 22 nt, Human
auuccauuguguaaggauaucg

SEQ ID NO: 122460 - RNA, 23 nt, Human
ggagaggggugugggcaucuuua

SEQ ID NO: 122461 - RNA, 22 nt, Human
uggugggucggcugggagagcu

SEQ ID NO: 122462 - RNA, 22 nt, Human
cauucugcauuuggaaggggca

SEQ ID NO: 122463 - RNA, 22 nt, Human
aggauaacuauaggauaaugcu

SEQ ID NO: 122464 - RNA, 22 nt, Human
guguuuuaucagacaaaguaua

SEQ ID NO: 122465 - RNA, 22 nt, Human
acauuuaaugauccuacuguga

SEQ ID NO: 122466 - RNA, 22 nt, Human
ugcccaggauugugaggucagg

SEQ ID NO: 122467 - RNA, 22 nt, Human
ugacauuuaaucccuaaauauu

SEQ ID NO: 122468 - RNA, 21 nt, Human
uggcagggguaguaguacagc

SEQ ID NO: 122469 - RNA, 22 nt, Human
ucaugggguuuggcuggauguc

SEQ ID NO: 122470 - RNA, 22 nt, Human
uuucacauacaguguauaguag

SEQ ID NO: 122471 - RNA, 22 nt, Human
gcauuugaaaugcaagaaagug

SEQ ID NO: 122472 - RNA, 22 nt, Human
uagggcaguuucauguuaucuu

SEQ ID NO: 122473 - RNA, 22 nt, Human
guauucauuuauuuacucaucc

SEQ ID NO: 122474 - RNA, 22 nt, Human
agaggaggcucugggaucgucc

SEQ ID NO: 122475 - RNA, 22 nt, Human
cauucacagagggggaagcauc

SEQ ID NO: 122476 - RNA, 22 nt, Human
cuaauuguaagcuccuugaggg

SEQ ID NO: 122477 - RNA, 22 nt, Human
aaggucauuguugcauguucuc

SEQ ID NO: 122478 - RNA, 22 nt, Human
auugcagaacaugaggucuucu

SEQ ID NO: 122479 - RNA, 22 nt, Human
acaccauacucauguugguucc

SEQ ID NO: 122480 - RNA, 22 nt, Human
gaguccagacaccauaccugau

SEQ ID NO: 122481 - RNA, 22 nt, Human
gaggggaagacuucuggacagu

SEQ ID NO: 122482 - RNA, 22 nt, Human
cucccagggccaucgagucacu

SEQ ID NO: 122483 - RNA, 20 nt, Human
cuuguacaugauaaagauuu

SEQ ID NO: 122484 - RNA, 22 nt, Human
ucauuuguugcuguuaccugag

SEQ ID NO: 122485 - RNA, 22 nt, Human
uuuuaucaaucauuaagacauu

SEQ ID NO: 122486 - RNA, 20 nt, Human
ucagcacagcugacaagguu

SEQ ID NO: 122487 - RNA, 22 nt, Human
uugcucugaacccagggcacca

SEQ ID NO: 122488 - RNA, 22 nt, Human
caggaggaggguacaccaucag

SEQ ID NO: 122489 - RNA, 22 nt, Human
auuugcaaagucguaucuguga

SEQ ID NO: 122490 - RNA, 22 nt, Human
uuaaauuccagccucauaauag

SEQ ID NO: 122491 - RNA, 22 nt, Human
auaaaaugguaaacgaagcuga

SEQ ID NO: 122492 - RNA, 22 nt, Human
uaugugcaggggcaggagcuca

SEQ ID NO: 122493 - RNA, 19 nt, Human
ucugaaguccagggcauac

SEQ ID NO: 122494 - RNA, 22 nt, Human
ucacaucacuagcugguaauga

SEQ ID NO: 122495 - RNA, 22 nt, Human
acauuugacuacauuuauauau

SEQ ID NO: 122496 - RNA, 22 nt, Human
aggcucagagagcuguguccau

SEQ ID NO: 122497 - RNA, 22 nt, Human
uugauuuauagaauguucaagc

SEQ ID NO: 122498 - RNA, 19 nt, Human
agcacaguuuccacaugca

SEQ ID NO: 122499 - RNA, 22 nt, Human
ccaggugggaggaaagcagaga

SEQ ID NO: 122500 - RNA, 22 nt, Human
uggcugagguaacuaugaauaa

SEQ ID NO: 122501 - RNA, 22 nt, Human
ugggggagcgacagacauaauu

SEQ ID NO: 122502 - RNA, 22 nt, Human
ucaggcugcccguucagggcuc

SEQ ID NO: 122503 - RNA, 22 nt, Human
aaguccagcagugcuuguugau

SEQ ID NO: 122504 - RNA, 22 nt, Human
agcagugaaacagcugcauaug

SEQ ID NO: 122505 - RNA, 22 nt, Human
uagcagcuaugccauuuugaca

SEQ ID NO: 122506 - RNA, 22 nt, Human
auuugcauuuacauagcauaga

SEQ ID NO: 122507 - RNA, 18 nt, Human
aggcacagagcauacaua

SEQ ID NO: 122508 - RNA, 22 nt, Human
uauuuccaagcugaauccaaug

SEQ ID NO: 122509 - RNA, 22 nt, Human
agcugugcacacugugaaguag

SEQ ID NO: 122510 - RNA, 23 nt, Human
ugggaaauguagccuuggcauga

SEQ ID NO: 122511 - RNA, 22 nt, Human
caguggaaaucagagugagagu

SEQ ID NO: 122512 - RNA, 22 nt, Human
agggcugaaacauaauccuucu

SEQ ID NO: 122513 - RNA, 22 nt, Human
aagcauuuuucacagcaacagc

SEQ ID NO: 122514 - RNA, 22 nt, Human
ccaggagcaccaggccugugcc

SEQ ID NO: 122515 - RNA, 22 nt, Human
uuauacauguuuauaagguuga

SEQ ID NO: 122516 - RNA, 22 nt, Human
ucaguuaagaggccacggcagu

SEQ ID NO: 122517 - RNA, 22 nt, Human
guuuacaugcagaaaaucaaug

SEQ ID NO: 122518 - RNA, 22 nt, Human
cagugcaguggcugagcuggag

SEQ ID NO: 122519 - RNA, 22 nt, Human
ugugaaggagcaugcagagggg

SEQ ID NO: 122520 - RNA, 22 nt, Human
uccaggcuggaaaugucaaacu

SEQ ID NO: 122521 - RNA, 22 nt, Human
cugcaguguucuggaaugcauu

SEQ ID NO: 122522 - RNA, 22 nt, Human
gcacagggcugccaggcggcuu

SEQ ID NO: 122523 - RNA, 22 nt, Human
aaacagguagcccuagccuucu

SEQ ID NO: 122524 - RNA, 22 nt, Human
ucaaaggcaccaaggucacugc

SEQ ID NO: 122525 - RNA, 22 nt, Human
auuuccaaucucugcauauggg

SEQ ID NO: 122526 - RNA, 22 nt, Human
agggucagggagugaguauuua

SEQ ID NO: 122527 - RNA, 22 nt, Human
uggcagcaaaaccagaaucaga

SEQ ID NO: 122528 - RNA, 22 nt, Human
uugcagcuucgagucuaucugu

SEQ ID NO: 122529 - RNA, 22 nt, Human
uaucaugaucagcaacuaauca

SEQ ID NO: 122530 - RNA, 22 nt, Human
aaacaguuucauuuucaugacc

SEQ ID NO: 122531 - RNA, 22 nt, Human
gggcugagugaccucaggccaa

SEQ ID NO: 122532 - RNA, 22 nt, Human
gagggggacguauccugguaug

SEQ ID NO: 122533 - RNA, 22 nt, Human
agggccugggccagcacccuuu

SEQ ID NO: 122534 - RNA, 22 nt, Human
aaucaggaugacugucauuuca

SEQ ID NO: 122535 - RNA, 22 nt, Human
agcuggggguuggauaagggua

SEQ ID NO: 122536 - RNA, 20 nt, Human
ggagaugccucucaguccau

SEQ ID NO: 122537 - RNA, 22 nt, Human
gggcagagacucagaaacagaa

SEQ ID NO: 122538 - RNA, 22 nt, Human
ccugugcauugaccacacucuc

SEQ ID NO: 122539 - RNA, 22 nt, Human
agaggccggccgagcccauggg

SEQ ID NO: 122540 - RNA, 22 nt, Human
gccugccacgcaugcagaguca

SEQ ID NO: 122541 - RNA, 22 nt, Human
ucaggcugcagcugucagcagc

SEQ ID NO: 122542 - RNA, 22 nt, Human
uagggcagccacccaggcugcu

SEQ ID NO: 122543 - RNA, 22 nt, Human
caucccugcccucaugccuaua

SEQ ID NO: 122544 - RNA, 20 nt, Human
caggcagaggaugcugacca

SEQ ID NO: 122545 - RNA, 22 nt, Human
acaagagcccuuucagauugac

SEQ ID NO: 122546 - RNA, 22 nt, Human
gcacacaugcaugcacaggagu

SEQ ID NO: 122547 - RNA, 22 nt, Human
caccaggcugaaccagagggga

SEQ ID NO: 122548 - RNA, 22 nt, Human
uucagugucaauuuuuaaauau

SEQ ID NO: 122549 - RNA, 22 nt, Human
cagggcugucuccaaaggcccc

SEQ ID NO: 122550 - RNA, 22 nt, Human
cucagaaguucagccuagagua

SEQ ID NO: 122551 - RNA, 22 nt, Human
cuccugguucagagagcugaga

SEQ ID NO: 122552 - RNA, 22 nt, Human
uagcagagaggggacaguggca

SEQ ID NO: 122553 - RNA, 20 nt, Human
uuugacauauacaguucagg

SEQ ID NO: 122554 - RNA, 22 nt, Human
uggcugagaccaucagggugua

SEQ ID NO: 122555 - RNA, 22 nt, Human
caggcugcagcagcaguggccc

SEQ ID NO: 122556 - RNA, 22 nt, Human
gaggcucagagggagcaugguc

SEQ ID NO: 122557 - RNA, 22 nt, Human
gccaggcuccaggcccuccuga

SEQ ID NO: 122558 - RNA, 22 nt, Human
gaggaaacauuguagaagcagu

SEQ ID NO: 122559 - RNA, 19 nt, Human
ccugugacuaucuuuguaa

SEQ ID NO: 122560 - RNA, 22 nt, Human
ccaggaggcagaaguugcagug

SEQ ID NO: 122561 - RNA, 18 nt, Human
gagcugggagaaggaagg

SEQ ID NO: 122562 - RNA, 22 nt, Human
acugugcacacaaaaauagauu

SEQ ID NO: 122563 - RNA, 22 nt, Human
cugaggcauguuacaggacaua

SEQ ID NO: 122564 - RNA, 22 nt, Human
gaagccacccuccuuccagccc

SEQ ID NO: 122565 - RNA, 22 nt, Human
uccugccugcaaucccagcacu

SEQ ID NO: 122566 - RNA, 22 nt, Human
aggccacaguacuuugcagacc

SEQ ID NO: 122567 - RNA, 18 nt, Human
caucaguauccacuaggu

SEQ ID NO: 122568 - RNA, 22 nt, Human
ucaggcuggagugcaguggcgc

SEQ ID NO: 122569 - RNA, 23 nt, Human
aaauuauugcucuucaauugccu

SEQ ID NO: 122570 - RNA, 22 nt, Human
guggggcaugcacgcugcuccu

SEQ ID NO: 122571 - RNA, 18 nt, Human
cagaugagaugcaaucuc

SEQ ID NO: 122572 - RNA, 22 nt, Human
ugguccuggaagguccugaggg

SEQ ID NO: 122573 - RNA, 22 nt, Human
agaggcaggagguugacuugag

SEQ ID NO: 122574 - RNA, 22 nt, Human
auuugaauggcuuaacacaacg

SEQ ID NO: 122575 - RNA, 22 nt, Human
uaugcacacaucgcagcaggaa

SEQ ID NO: 122576 - RNA, 22 nt, Human
uauuugcaacauaaaacucuga

SEQ ID NO: 122577 - RNA, 22 nt, Human
auguacaaucuaucacaagaag

SEQ ID NO: 122578 - RNA, 22 nt, Human
gaggccaggguaccaucaacau

SEQ ID NO: 122579 - RNA, 22 nt, Human
aagcuggaacaucuugaggaag

SEQ ID NO: 122580 - RNA, 22 nt, Human
aagggcuggcccugggaagagu

SEQ ID NO: 122581 - RNA, 22 nt, Human
guaaacauuuucaucugugccc

SEQ ID NO: 122582 - RNA, 22 nt, Human
cacagcugcacagaggaggugc

SEQ ID NO: 122583 - RNA, 22 nt, Human
aggcucaguucuguggugagcc

SEQ ID NO: 122584 - RNA, 22 nt, Human
agggccugggauguccuccuag

SEQ ID NO: 122585 - RNA, 22 nt, Human
gcagaggaucaggcucuggaaa

SEQ ID NO: 122586 - RNA, 22 nt, Human
acaguuacaucacuuacugaca

SEQ ID NO: 122587 - RNA, 22 nt, Human
caggaggcaguuucagaaguca

SEQ ID NO: 122588 - RNA, 22 nt, Human
guguccuuuuaugugacugguu

SEQ ID NO: 122589 - RNA, 22 nt, Human
guggggaaaggaguggggcuca

SEQ ID NO: 122590 - RNA, 22 nt, Human
cacagcugugagaagggagccu

SEQ ID NO: 122591 - RNA, 22 nt, Human
agaauucugacaauagaauugg

SEQ ID NO: 122592 - RNA, 22 nt, Human
agcaugaaaggcgugccaacuu

SEQ ID NO: 122593 - RNA, 22 nt, Human
uguucccauuuucugcauaauc

SEQ ID NO: 122594 - RNA, 18 nt, Human
agaaggagcuaugggcag

SEQ ID NO: 122595 - RNA, 22 nt, Human
ugccaggcucaggaugucccug

SEQ ID NO: 122596 - RNA, 21 nt, Human
ggcagugaugugaagugcauc

SEQ ID NO: 122597 - RNA, 17 nt, Human
acagggcagaaacagcu

SEQ ID NO: 122598 - RNA, 22 nt, Human
uccaggcuggccucgcgugaca

SEQ ID NO: 122599 - RNA, 22 nt, Human
gacauucuaaaaaauauggaag

SEQ ID NO: 122600 - RNA, 22 nt, Human
acccaggacucucuuccaguag

SEQ ID NO: 122601 - RNA, 22 nt, Human
acagugcagugugaugaguauu

SEQ ID NO: 122602 - RNA, 22 nt, Human
cccacacauuuuucacuuaccg

SEQ ID NO: 122603 - RNA, 22 nt, Human
caauagcuauguaaccugaaga

SEQ ID NO: 122604 - RNA, 22 nt, Human
auuuugaugcuaucuaaugaau

SEQ ID NO: 122605 - RNA, 22 nt, Human
cgcagagggcaggcagugcugg

SEQ ID NO: 122606 - RNA, 22 nt, Human
cagugcagaggugcaagcaugu

SEQ ID NO: 122607 - RNA, 22 nt, Human
cggcagagugugugcgugcaug

SEQ ID NO: 122608 - RNA, 22 nt, Human
gcugugcaggggauuugguuau

SEQ ID NO: 122609 - RNA, 17 nt, Human
uuacaacaauucaugag

SEQ ID NO: 122610 - RNA, 17 nt, Human
agcugcagaugaaguug

SEQ ID NO: 122611 - RNA, 19 nt, Human
cagcugcaccgugaccauc

SEQ ID NO: 122612 - RNA, 22 nt, Human
agcugcuugggaaccaucaauu

SEQ ID NO: 122613 - RNA, 22 nt, Human
agcagggcucuguggagggugg

SEQ ID NO: 122614 - RNA, 22 nt, Human
cagcacacagugacucgcaccu

SEQ ID NO: 122615 - RNA, 22 nt, Human
cugggggugagcagcagcgacg

SEQ ID NO: 122616 - RNA, 19 nt, Human
agugguagaugagcaggag

SEQ ID NO: 122617 - RNA, 22 nt, Human
ucaucuuaggugaugagacagu

SEQ ID NO: 122618 - RNA, 22 nt, Human
auaguuguguggggauucuggu

SEQ ID NO: 122619 - RNA, 17 nt, Human
gcuuuggaaggguagac

SEQ ID NO: 122620 - RNA, 22 nt, Human
uggcugagcugcagcguggcuu

SEQ ID NO: 122621 - RNA, 20 nt, Human
cagggcacacugcagccucg

SEQ ID NO: 122622 - RNA, 19 nt, Human
gaagaagcuugagaaguag

SEQ ID NO: 122623 - RNA, 22 nt, Human
cauguauaguuggaacuacauc

SEQ ID NO: 122624 - RNA, 22 nt, Human
ccagaggacuugggggcugaau

SEQ ID NO: 122625 - RNA, 22 nt, Human
gcugaaggcccggaggacaggg

SEQ ID NO: 122626 - RNA, 22 nt, Human
acuuggcaaguaucuauaaagu

SEQ ID NO: 122627 - RNA, 22 nt, Human
aagagcugugggugguaguccu

SEQ ID NO: 122628 - RNA, 22 nt, Human
aagggcaggaaaagauggaugu

SEQ ID NO: 122629 - RNA, 22 nt, Human
acagaggaagcauauagcacaa

SEQ ID NO: 122630 - RNA, 22 nt, Human
gagggcagagucuaaugaugca

SEQ ID NO: 122631 - RNA, 22 nt, Human
gaaagccauagcccagcuuuac

SEQ ID NO: 122632 - RNA, 22 nt, Human
ccugugcagcccuugccaguuu

SEQ ID NO: 122633 - RNA, 22 nt, Human
gaaacauuguguucuacagauu

SEQ ID NO: 122634 - RNA, 22 nt, Human
ucacuacaaaagucucccuuuc

SEQ ID NO: 122635 - RNA, 22 nt, Human
gcugugcauaaguauaauaaac

SEQ ID NO: 122636 - RNA, 22 nt, Human
agugugaguaauucagggaggg

SEQ ID NO: 122637 - RNA, 22 nt, Human
ugcacaguuaauaugugacaga

SEQ ID NO: 122638 - RNA, 22 nt, Human
guggcgcagaggguggcagaga

SEQ ID NO: 122639 - RNA, 22 nt, Human
cugugcaguaggucagggcugg

SEQ ID NO: 122640 - RNA, 22 nt, Human
ucaggcagguggcuggcuaugg

SEQ ID NO: 122641 - RNA, 22 nt, Human
augacaaaaugaaugcagcuag

SEQ ID NO: 122642 - RNA, 22 nt, Human
ggagaggguagggguccugccc

SEQ ID NO: 122643 - RNA, 20 nt, Human
agcaagaguaaggacagcga

SEQ ID NO: 122644 - RNA, 22 nt, Human
ucucccaggucauacacagaga

SEQ ID NO: 122645 - RNA, 22 nt, Human
ugugaaggcagagccagugaaa

SEQ ID NO: 122646 - RNA, 22 nt, Human
gugugcagggcugccugugccg

SEQ ID NO: 122647 - RNA, 22 nt, Human
cagggcaggacagauacauuac

SEQ ID NO: 122648 - RNA, 22 nt, Human
gaggcucagagaagucauggua

SEQ ID NO: 122649 - RNA, 17 nt, Human
cagucgaggaggaccug

SEQ ID NO: 122650 - RNA, 22 nt, Human
caggugucuaauucucaccccc

SEQ ID NO: 122651 - RNA, 22 nt, Human
acugcccuguaacugccaggua

SEQ ID NO: 122652 - RNA, 22 nt, Human
aaaacagacagccaguguagag

SEQ ID NO: 122653 - RNA, 22 nt, Human
agcugugccuugcugcacggug

SEQ ID NO: 122654 - RNA, 22 nt, Human
gaggcucagagggacuuucaag

SEQ ID NO: 122655 - RNA, 22 nt, Human
agaaagcuuaugaaugggcaag

SEQ ID NO: 122656 - RNA, 22 nt, Human
agugcugacucugggcacagug

SEQ ID NO: 122657 - RNA, 22 nt, Human
agcaccauuucucuaaagcacu

SEQ ID NO: 122658 - RNA, 17 nt, Human
agggucaggugaaguuc

SEQ ID NO: 122659 - RNA, 22 nt, Human
cugaggcagagggcagaccaga

SEQ ID NO: 122660 - RNA, 22 nt, Human
aacauugcagcuuaauugcagg

SEQ ID NO: 122661 - RNA, 22 nt, Human
uacaggaaggagcacaucggga

SEQ ID NO: 122662 - RNA, 22 nt, Human
cauuugauccucacaacaaucu

SEQ ID NO: 122663 - RNA, 22 nt, Human
uuuugaaagaguccugcuacag

SEQ ID NO: 122664 - RNA, 22 nt, Human
augaaacacacacgcgcauacu

SEQ ID NO: 122665 - RNA, 22 nt, Human
agaguuauggacuuaaugcagg

SEQ ID NO: 122666 - RNA, 22 nt, Human
uuaaacacacugagauuuaugu

SEQ ID NO: 122667 - RNA, 22 nt, Human
aaggguugaagauaaauaaggu

SEQ ID NO: 122668 - RNA, 22 nt, Human
ggcagugaugucaaacagugaa

SEQ ID NO: 122669 - RNA, 22 nt, Human
cuccagugcgcaggacagcccc

SEQ ID NO: 122670 - RNA, 22 nt, Human
ucacaucauuaagacuucuccu

SEQ ID NO: 122671 - RNA, 22 nt, Human
uacagugauuucuacugguguu

SEQ ID NO: 122672 - RNA, 22 nt, Human
uugcaagagagucugaaaaaug

SEQ ID NO: 122673 - RNA, 22 nt, Human
uuuaucacagaauaagaaguca

SEQ ID NO: 122674 - RNA, 20 nt, Human
cgcccaggagggcccaugug

SEQ ID NO: 122675 - RNA, 22 nt, Human
cggccgcagcagugucggccca

SEQ ID NO: 122676 - RNA, 22 nt, Human
ggucucugacuuagagauggau

SEQ ID NO: 122677 - RNA, 22 nt, Human
gauguaaauggucuuuggcaga

SEQ ID NO: 122678 - RNA, 22 nt, Human
agggcagcacaaggcauggacu

SEQ ID NO: 122679 - RNA, 22 nt, Human
ugaggcagcaauuguauuguau

SEQ ID NO: 122680 - RNA, 22 nt, Human
caacagagagaccagaaacagg

SEQ ID NO: 122681 - RNA, 22 nt, Human
ucaaauggguaugcuuuauaau

SEQ ID NO: 122682 - RNA, 22 nt, Human
aggggagguggcagaaaugugc

SEQ ID NO: 122683 - RNA, 21 nt, Human
ugaggcaggggugcuuuuguc

SEQ ID NO: 122684 - RNA, 22 nt, Human
ugaugaaaauaugauucugagg

SEQ ID NO: 122685 - RNA, 22 nt, Human
agccaggccagacucacacccu

SEQ ID NO: 122686 - RNA, 22 nt, Human
ugucauggcacugguaggagug

SEQ ID NO: 122687 - RNA, 22 nt, Human
caggggagugagucccucucug

SEQ ID NO: 122688 - RNA, 22 nt, Human
acacugugucuagcauuuuaca

SEQ ID NO: 122689 - RNA, 22 nt, Human
cagaauaaacagaaacguagcu

SEQ ID NO: 122690 - RNA, 23 nt, Human
auguuauuauuagcagucuugcc

SEQ ID NO: 122691 - RNA, 22 nt, Human
aaguggagagcccuggaggucu

SEQ ID NO: 122692 - RNA, 22 nt, Human
cagugaugaucauuguaacauc

SEQ ID NO: 122693 - RNA, 22 nt, Human
gcucaguguucaucuguaugca

SEQ ID NO: 122694 - RNA, 22 nt, Human
ugccaggcugcccuccagucug

SEQ ID NO: 122695 - RNA, 22 nt, Human
gccagcagccacagaagucacu

SEQ ID NO: 122696 - RNA, 22 nt, Human
gaaggagagggucaaggauaau

SEQ ID NO: 122697 - RNA, 22 nt, Human
gugcagauccugauugcaguuc

SEQ ID NO: 122698 - RNA, 22 nt, Human
agcagggcugcggccccaccac

SEQ ID NO: 122699 - RNA, 22 nt, Human
aaugguaucaccucacagaauu

SEQ ID NO: 122700 - RNA, 22 nt, Human
cagugacguaaacugcaugugc

SEQ ID NO: 122701 - RNA, 22 nt, Human
ugaggcagaaauuccuguuuuc

SEQ ID NO: 122702 - RNA, 22 nt, Human
cccagguguuuguggcagaggu

SEQ ID NO: 122703 - RNA, 22 nt, Human
augaggcaucuaacauugcaaa

SEQ ID NO: 122704 - RNA, 22 nt, Human
gaggcucagggaaacagcgcag

SEQ ID NO: 122705 - RNA, 19 nt, Human
aaauggagcuaaucuuguc

SEQ ID NO: 122706 - RNA, 22 nt, Human
cauuuguauagugcuuagacca

SEQ ID NO: 122707 - RNA, 22 nt, Human
caggcaggugcagauuccucuu

SEQ ID NO: 122708 - RNA, 22 nt, Human
aggaggggcaaugauagucugg

SEQ ID NO: 122709 - RNA, 22 nt, Human
gaaaauuauugaaaauggcucu

SEQ ID NO: 122710 - RNA, 22 nt, Human
gauuacaauucagguugauaag

SEQ ID NO: 122711 - RNA, 22 nt, Human
guagcugauauuagcaaugagu

SEQ ID NO: 122712 - RNA, 22 nt, Human
acguggagagaauagggcacca

SEQ ID NO: 122713 - RNA, 19 nt, Human
ugcugcuguccuugcaggg

SEQ ID NO: 122714 - RNA, 23 nt, Human
auggaaauagcaugugucauuua

SEQ ID NO: 122715 - RNA, 22 nt, Human
caugcuguccugaaaagauauu

SEQ ID NO: 122716 - RNA, 22 nt, Human
uucugucaaauuugccauaugg

SEQ ID NO: 122717 - RNA, 20 nt, Human
ucaggcaguggggaaaggca

SEQ ID NO: 122718 - RNA, 22 nt, Human
gucacuguauccagguuccagc

SEQ ID NO: 122719 - RNA, 16 nt, Human
gaggcuggcagauguc

SEQ ID NO: 122720 - RNA, 22 nt, Human
uuuugcuugagugcacaaaaug

SEQ ID NO: 122721 - RNA, 22 nt, Human
ugcagaggagcuggaaggcugg

SEQ ID NO: 122722 - RNA, 22 nt, Human
gcugaggccccagggugauggg

SEQ ID NO: 122723 - RNA, 22 nt, Human
agaagccauucccuguaggcuc

SEQ ID NO: 122724 - RNA, 22 nt, Human
gggcaggucugggucagccuga

SEQ ID NO: 122725 - RNA, 22 nt, Human
agacauuuuagacauaaaagau

SEQ ID NO: 122726 - RNA, 22 nt, Human
uuacacuaugaaugagaauaua

SEQ ID NO: 122727 - RNA, 22 nt, Human
cugagccuguguuucucuggca

SEQ ID NO: 122728 - RNA, 22 nt, Human
cagggccacacggaagggaaca

SEQ ID NO: 122729 - RNA, 20 nt, Human
gaacauuuggccauacugag

SEQ ID NO: 122730 - RNA, 22 nt, Human
caggcagggagcuggaaaggau

SEQ ID NO: 122731 - RNA, 22 nt, Human
aguaaacauuucagauuuauuu

SEQ ID NO: 122732 - RNA, 22 nt, Human
uaaauuguuuucuagaaguugu

SEQ ID NO: 122733 - RNA, 22 nt, Human
cagcaucccucaggggccucug

SEQ ID NO: 122734 - RNA, 20 nt, Human
caguggcuucuguggaauau

SEQ ID NO: 122735 - RNA, 22 nt, Human
uccaggcugggcugaagggugc

SEQ ID NO: 122736 - RNA, 22 nt, Human
ccugcucagagcgucuugugug

SEQ ID NO: 122737 - RNA, 22 nt, Human
auucgcgggccuggaggguggg

SEQ ID NO: 122738 - RNA, 22 nt, Human
uugcauauccuccaacacaugg

SEQ ID NO: 122739 - RNA, 22 nt, Human
gaggcagaggaagguggucucu

SEQ ID NO: 122740 - RNA, 18 nt, Human
gugccaggaggcgcagcc

SEQ ID NO: 122741 - RNA, 22 nt, Human
gcagauggaaagugcuugaggg

SEQ ID NO: 122742 - RNA, 22 nt, Human
aaggcugugucagaagcucccu

SEQ ID NO: 122743 - RNA, 20 nt, Human
agggucaguagcacagagcu

SEQ ID NO: 122744 - RNA, 19 nt, Human
augaugcagagcugacuca

SEQ ID NO: 122745 - RNA, 23 nt, Human
guuuucaacacaauaaauguaac

SEQ ID NO: 122746 - RNA, 22 nt, Human
ucauucauugcaagcacacgca

SEQ ID NO: 122747 - RNA, 22 nt, Human
ugcaggcaggggaugagcagcc

SEQ ID NO: 122748 - RNA, 22 nt, Human
aacagagcugaccagugagggc

SEQ ID NO: 122749 - RNA, 22 nt, Human
cgaggcaggcaggcggaggaua

SEQ ID NO: 122750 - RNA, 22 nt, Human
agggccagcacuccuggcagga

SEQ ID NO: 122751 - RNA, 22 nt, Human
ucagcccugggacccagggaug

SEQ ID NO: 122752 - RNA, 16 nt, Human
agcagggcgggaagga

SEQ ID NO: 122753 - RNA, 22 nt, Human
aagaugcacaauguggcaauua

SEQ ID NO: 122754 - RNA, 22 nt, Human
uuucuacuuuggaaugcacuga

SEQ ID NO: 122755 - RNA, 22 nt, Human
ucacauuugcaauugcauuguu

SEQ ID NO: 122756 - RNA, 22 nt, Human
gggccagugaacaaugagggaa

SEQ ID NO: 122757 - RNA, 22 nt, Human
caggcccagugaucagggcucu

SEQ ID NO: 122758 - RNA, 22 nt, Human
acuguggaugccaaaggggagg

SEQ ID NO: 122759 - RNA, 22 nt, Human
aggggcaggugcugcacuuaga

SEQ ID NO: 122760 - RNA, 22 nt, Human
aaugucugaaaaucagacugca

SEQ ID NO: 122761 - RNA, 22 nt, Human
agcaggggcaggguuuugugcu

SEQ ID NO: 122762 - RNA, 22 nt, Human
uggggugugcucagagcagggg

SEQ ID NO: 122763 - RNA, 22 nt, Human
ugggcugaguggcagccagagu

SEQ ID NO: 122764 - RNA, 22 nt, Human
uagcuguguagacacucagagc

SEQ ID NO: 122765 - RNA, 22 nt, Human
ggcaguggguuccccaaggcac

SEQ ID NO: 122766 - RNA, 22 nt, Human
ugcauaacuagaguaauuacag

SEQ ID NO: 122767 - RNA, 22 nt, Human
cagggcagccaggccccguggg

SEQ ID NO: 122768 - RNA, 22 nt, Human
aggcagguguuaccucugguuu

SEQ ID NO: 122769 - RNA, 22 nt, Human
gcugagccccccugcguggguc

SEQ ID NO: 122770 - RNA, 22 nt, Human
uccuguguuacugccuggagcg

SEQ ID NO: 122771 - RNA, 22 nt, Human
ggaagccaggccaaugagaaca

SEQ ID NO: 122772 - RNA, 22 nt, Human
caugggggcugaggcugcugua

SEQ ID NO: 122773 - RNA, 22 nt, Human
ugagcugagaacacuugggcua

SEQ ID NO: 122774 - RNA, 22 nt, Human
uuucucaaguacugcacaugaa

SEQ ID NO: 122775 - RNA, 22 nt, Human
gaguccuucuggcuggcaggau

SEQ ID NO: 122776 - RNA, 23 nt, Human
cuagggcaguauuucacagacac

SEQ ID NO: 122777 - RNA, 22 nt, Human
uuguacuugccauagaacaaca

SEQ ID NO: 122778 - RNA, 22 nt, Human
ccagggaggguccuguggcuuc

SEQ ID NO: 122779 - RNA, 22 nt, Human
aagggcaggagaagacggauau

SEQ ID NO: 122780 - RNA, 22 nt, Human
ugacaaagguguugccagaggg

SEQ ID NO: 122781 - RNA, 22 nt, Human
ggccagagaagucagacccuug

SEQ ID NO: 122782 - RNA, 22 nt, Human
agcucugcaggcacagcugagg

SEQ ID NO: 122783 - RNA, 22 nt, Human
aaagccagugguaugagagaaa

SEQ ID NO: 122784 - RNA, 22 nt, Human
ccaggcucugagccucacucuu

SEQ ID NO: 122785 - RNA, 22 nt, Human
ugacauuugagagagauauaca

SEQ ID NO: 122786 - RNA, 22 nt, Human
uugcagagcaguaggaauauag

SEQ ID NO: 122787 - RNA, 22 nt, Human
uaaaggcucguauuguugugug

SEQ ID NO: 122788 - RNA, 22 nt, Human
ucaguggagagcuuccaggauu

SEQ ID NO: 122789 - RNA, 22 nt, Human
gacaggaaacaagaaggcagga

SEQ ID NO: 122790 - RNA, 22 nt, Human
cuacaguagagguugucaggga

SEQ ID NO: 122791 - RNA, 18 nt, Human
acaaaggucugcaagacc

SEQ ID NO: 122792 - RNA, 22 nt, Human
cgccaggcuugguagcucaugc

SEQ ID NO: 122793 - RNA, 22 nt, Human
gggcuggaggugagcaggacag

SEQ ID NO: 122794 - RNA, 23 nt, Human
uggcugagcccacuaucuuggcc

SEQ ID NO: 122795 - RNA, 22 nt, Human
uuuacugugcauuagaaucacc

SEQ ID NO: 122796 - RNA, 22 nt, Human
agggcugaccuaagcuccacuu

SEQ ID NO: 122797 - RNA, 22 nt, Human
aggcugagaaagugggaagaug

SEQ ID NO: 122798 - RNA, 22 nt, Human
agcagugagugggaggaccaug

SEQ ID NO: 122799 - RNA, 22 nt, Human
ugaggaagccaaacagcuacac

SEQ ID NO: 122800 - RNA, 22 nt, Human
agugggcaggcagggugcgcag

SEQ ID NO: 122801 - RNA, 22 nt, Human
ugaugacaguguuacagcucca

SEQ ID NO: 122802 - RNA, 22 nt, Human
cagaggaagcuggguguggagu

SEQ ID NO: 122803 - RNA, 18 nt, Human
cagcugccagcucaugga

SEQ ID NO: 122804 - RNA, 22 nt, Human
gcugaaggucucuggagagguc

SEQ ID NO: 122805 - RNA, 19 nt, Human
agggccugcagcucaagcu

SEQ ID NO: 122806 - RNA, 23 nt, Human
caguggagacucaugcuuccuua

SEQ ID NO: 122807 - RNA, 22 nt, Human
ggggcagcuaccggaaguaggg

SEQ ID NO: 122808 - RNA, 22 nt, Human
ccugggcagugcuggaguugaa

SEQ ID NO: 122809 - RNA, 22 nt, Human
gcuccucugucaaaugagagug

SEQ ID NO: 122810 - RNA, 22 nt, Human
aggcugagauagguggaucauu

SEQ ID NO: 122811 - RNA, 22 nt, Human
cugugcaguggcagcguguggg

SEQ ID NO: 122812 - RNA, 22 nt, Human
uccugccuugccugggacauca

SEQ ID NO: 122813 - RNA, 22 nt, Human
ucagggcauguauguuucuuua

SEQ ID NO: 122814 - RNA, 22 nt, Human
augacuaagugcauuuuaauug

SEQ ID NO: 122815 - RNA, 22 nt, Human
ugagaagcugcugacuuagccu

SEQ ID NO: 122816 - RNA, 22 nt, Human
uccaggcugauccaugaagaau

SEQ ID NO: 122817 - RNA, 22 nt, Human
uaagacauagccaagagcaucc

SEQ ID NO: 122818 - RNA, 22 nt, Human
agcauauaggaaauguugaauc

SEQ ID NO: 122819 - RNA, 22 nt, Human
ggggaaggauugaguugaccca

SEQ ID NO: 122820 - RNA, 18 nt, Human
acacaguggaugccuggu

SEQ ID NO: 122821 - RNA, 22 nt, Human
aagggcagggaguuugugucua

SEQ ID NO: 122822 - RNA, 22 nt, Human
acugugcagguagaugccuggg

SEQ ID NO: 122823 - RNA, 22 nt, Human
agaagcagcuuucaaggugauu

SEQ ID NO: 122824 - RNA, 22 nt, Human
agcugcccuuaauaggcauuca

SEQ ID NO: 122825 - RNA, 22 nt, Human
uaggggaacuggcacagggcag

SEQ ID NO: 122826 - RNA, 22 nt, Human
caaagccauagaguagauaaga

SEQ ID NO: 122827 - RNA, 22 nt, Human
aggcuuguggauuggagcgagu

SEQ ID NO: 122828 - RNA, 22 nt, Human
gccagaaagaggaggaccuggg

SEQ ID NO: 122829 - RNA, 22 nt, Human
uggaugaaaaaugagaauuuuc

SEQ ID NO: 122830 - RNA, 22 nt, Human
agggcagcacagcugugcuccu

SEQ ID NO: 122831 - RNA, 22 nt, Human
uuugauaucuugguauacagau

SEQ ID NO: 122832 - RNA, 19 nt, Human
ugcagccacgugagagacu

SEQ ID NO: 122833 - RNA, 22 nt, Human
caacuacuggugcucaggaaau

SEQ ID NO: 122834 - RNA, 20 nt, Human
uaacugaucauuuucaccag

SEQ ID NO: 122835 - RNA, 22 nt, Human
ugacauuucgguguaugugaug

SEQ ID NO: 122836 - RNA, 22 nt, Human
aguacaugugguccuggccaga

SEQ ID NO: 122837 - RNA, 22 nt, Human
ccagaggaguugaggcuuuggg

SEQ ID NO: 122838 - RNA, 22 nt, Human
gggcugagccacagcuuuuguu

SEQ ID NO: 122839 - RNA, 22 nt, Human
acauugauugagcacccauuau

SEQ ID NO: 122840 - RNA, 22 nt, Human
aggggaggagcuuuucuugccu

SEQ ID NO: 122841 - RNA, 22 nt, Human
uucugugaaucuuuuuucccac

SEQ ID NO: 122842 - RNA, 22 nt, Human
cacagcuggggaagcugaggcc

SEQ ID NO: 122843 - RNA, 22 nt, Human
gcagccuguuguaccagccugu

SEQ ID NO: 122844 - RNA, 21 nt, Human
ccacauucucauucugacugc

SEQ ID NO: 122845 - RNA, 22 nt, Human
uccaggcuaauuuugcauuguu

SEQ ID NO: 122846 - RNA, 22 nt, Human
uagggcaguuauaacauuagug

SEQ ID NO: 122847 - RNA, 22 nt, Human
gggaggaaagagaaguggucca

SEQ ID NO: 122848 - RNA, 22 nt, Human
uagggcugccuauggcuagaua

SEQ ID NO: 122849 - RNA, 22 nt, Human
uauacugagagcaaauacauuc

SEQ ID NO: 122850 - RNA, 20 nt, Human
ugccaggcacggagugcaug

SEQ ID NO: 122851 - RNA, 22 nt, Human
gcaccaggcuuagagccccagg

SEQ ID NO: 122852 - RNA, 22 nt, Human
ugaguccaagagccagugggaa

SEQ ID NO: 122853 - RNA, 22 nt, Human
ucuguuccauguuuuguuccau

SEQ ID NO: 122854 - RNA, 22 nt, Human
uacaggaaagaaauuugaacuc

SEQ ID NO: 122855 - RNA, 22 nt, Human
ccugugcacuaucugcauuuuu

SEQ ID NO: 122856 - RNA, 23 nt, Human
uuauuuggauuuuaguggaaaga

SEQ ID NO: 122857 - RNA, 22 nt, Human
ucauaacagcuaagucccuuuc

SEQ ID NO: 122858 - RNA, 22 nt, Human
aggguaggguaaaugaugcauc

SEQ ID NO: 122859 - RNA, 22 nt, Human
aagauuuuuuuccacagacuca

SEQ ID NO: 122860 - RNA, 22 nt, Human
gaguccaggcucagaaacccgu

SEQ ID NO: 122861 - RNA, 22 nt, Human
augauaacaacagcagugcugg

SEQ ID NO: 122862 - RNA, 22 nt, Human
ccagggcugguggcugcagagg

SEQ ID NO: 122863 - RNA, 20 nt, Human
aggcagagcgcacuuuuaga

SEQ ID NO: 122864 - RNA, 22 nt, Human
cuugucagccaauuguggauuu

SEQ ID NO: 122865 - RNA, 22 nt, Human
gggcugaggaacauauuuuguu

SEQ ID NO: 122866 - RNA, 21 nt, Human
aggugcagagccagggaccag

SEQ ID NO: 122867 - RNA, 22 nt, Human
augcacuacuagaugcaaaagu

SEQ ID NO: 122868 - RNA, 23 nt, Human
aggcagugggggccacuuugcuu

SEQ ID NO: 122869 - RNA, 22 nt, Human
aagguauuauuugcaaucauuu

SEQ ID NO: 122870 - RNA, 22 nt, Human
cagggccagccauccugcuggg

SEQ ID NO: 122871 - RNA, 22 nt, Human
gggcaggagagaacagucaugg

SEQ ID NO: 122872 - RNA, 22 nt, Human
ccaguggaguuuuuauacccag

SEQ ID NO: 122873 - RNA, 22 nt, Human
acagaguuaauggauaggcagg

SEQ ID NO: 122874 - RNA, 19 nt, Human
ucaggaguuaguugugcuc

SEQ ID NO: 122875 - RNA, 22 nt, Human
gucaaauaauuuucucaauagu

SEQ ID NO: 122876 - RNA, 22 nt, Human
auacaguaauuuguaacucauc

SEQ ID NO: 122877 - RNA, 21 nt, Human
gagagggcauuauaggaagug

SEQ ID NO: 122878 - RNA, 22 nt, Human
cauuugauuccuuuacucuuau

SEQ ID NO: 122879 - RNA, 22 nt, Human
cugaggcuuugugugcaugccu

SEQ ID NO: 122880 - RNA, 22 nt, Human
ggcugagcccccucugcguagg

SEQ ID NO: 122881 - RNA, 22 nt, Human
uuacaguuuaguccaagccaga

SEQ ID NO: 122882 - RNA, 22 nt, Human
gcaugggcuuucucagaguucu

SEQ ID NO: 122883 - RNA, 23 nt, Human
cugcauauggagguuagcaacuc

SEQ ID NO: 122884 - RNA, 22 nt, Human
cagcacagcuggcucuggaagc

SEQ ID NO: 122885 - RNA, 22 nt, Human
ccguggaguugugcugaguaug

SEQ ID NO: 122886 - RNA, 19 nt, Human
gaggaggcuucagcuuucu

SEQ ID NO: 122887 - RNA, 22 nt, Human
ggagaagcaggugcuuuggguc

SEQ ID NO: 122888 - RNA, 22 nt, Human
auccagcuuugucuggucuucg

SEQ ID NO: 122889 - RNA, 22 nt, Human
uuuuaucauuacccagcugaaa

SEQ ID NO: 122890 - RNA, 22 nt, Human
cacaggaaucagcauuaauggc

SEQ ID NO: 122891 - RNA, 17 nt, Human
caggcagacauguaagc

SEQ ID NO: 122892 - RNA, 22 nt, Human
ugcagggcauaggguccaguuu

SEQ ID NO: 122893 - RNA, 22 nt, Human
gagggccagcagccucagcaug

SEQ ID NO: 122894 - RNA, 22 nt, Human
gaggcuggaggucaaagaugaa

SEQ ID NO: 122895 - RNA, 22 nt, Human
agaugcagacuugguucaggca

SEQ ID NO: 122896 - RNA, 22 nt, Human
ugaguaaagggccagauaguaa

SEQ ID NO: 122897 - RNA, 22 nt, Human
gaacauuuaugaugcaauaccu

SEQ ID NO: 122898 - RNA, 17 nt, Human
agcugagcuggccaggg

SEQ ID NO: 122899 - RNA, 21 nt, Human
caauuacuuuugcaccgacuu

SEQ ID NO: 122900 - RNA, 22 nt, Human
ucugugcagaacucacagaagg

SEQ ID NO: 122901 - RNA, 22 nt, Human
ugcaguggaagagguggagauc

SEQ ID NO: 122902 - RNA, 22 nt, Human
uggcugagcucccuguguguug

SEQ ID NO: 122903 - RNA, 22 nt, Human
cugucuccagggcaggugcagg

SEQ ID NO: 122904 - RNA, 22 nt, Human
cauuucauaguugucacaauaa

SEQ ID NO: 122905 - RNA, 22 nt, Human
gggggaagaaagaacauggcau

SEQ ID NO: 122906 - RNA, 22 nt, Human
ggaggaagugcaguucuacuac

SEQ ID NO: 122907 - RNA, 21 nt, Human
uggcaggcagcuggaagcuug

SEQ ID NO: 122908 - RNA, 22 nt, Human
ccaggugugcucugcaguggau

SEQ ID NO: 122909 - RNA, 22 nt, Human
aggaggaggugggacacaguga

SEQ ID NO: 122910 - RNA, 22 nt, Human
ugagagugaaaugucacauguc

SEQ ID NO: 122911 - RNA, 22 nt, Human
aaggaagggaaauagugauguc

SEQ ID NO: 122912 - RNA, 22 nt, Human
ucaggcagcauuaaacuucagc

SEQ ID NO: 122913 - RNA, 21 nt, Human
ggcagcacuaccugaagcaua

SEQ ID NO: 122914 - RNA, 22 nt, Human
ccugugcauugaguuugcaccc

SEQ ID NO: 122915 - RNA, 22 nt, Human
gagaaacuaacaucugaaggug

SEQ ID NO: 122916 - RNA, 22 nt, Human
aggcagcagugauaagauagga

SEQ ID NO: 122917 - RNA, 22 nt, Human
aggaauucaagaccagcugggc

SEQ ID NO: 122918 - RNA, 22 nt, Human
uugcagagagguuaggaacuca

SEQ ID NO: 122919 - RNA, 22 nt, Human
gcagccugaggcccuuucuggc

SEQ ID NO: 122920 - RNA, 22 nt, Human
agggcugacaguaaaaguauga

SEQ ID NO: 122921 - RNA, 22 nt, Human
gaagucuggcugacgagaguua

SEQ ID NO: 122922 - RNA, 22 nt, Human
auguggaaugaacaaaggaggc

SEQ ID NO: 122923 - RNA, 22 nt, Human
ggcaggagcucagguugguucc

SEQ ID NO: 122924 - RNA, 22 nt, Human
cagaggcagaggucaucucugg

SEQ ID NO: 122925 - RNA, 22 nt, Human
gugauacaaauaaacauaugcu

SEQ ID NO: 122926 - RNA, 22 nt, Human
aagcauuugugaaauucagaug

SEQ ID NO: 122927 - RNA, 22 nt, Human
cugcugugaguuuggaggucua

SEQ ID NO: 122928 - RNA, 22 nt, Human
agacauuuccugugaaccuacu

SEQ ID NO: 122929 - RNA, 22 nt, Human
gaaggcuggaaggcaaguagga

SEQ ID NO: 122930 - RNA, 22 nt, Human
uagggcuguuuaaaagugaggu

SEQ ID NO: 122931 - RNA, 22 nt, Human
caggggcaagaaugcugucagc

SEQ ID NO: 122932 - RNA, 22 nt, Human
ccagagcagggcagcagggcuc

SEQ ID NO: 122933 - RNA, 22 nt, Human
ggucagcagugcagggcagagc

SEQ ID NO: 122934 - RNA, 22 nt, Human
aaacauuugcaacucgguuugg

SEQ ID NO: 122935 - RNA, 22 nt, Human
uggagcugagaaguggagcucu

SEQ ID NO: 122936 - RNA, 19 nt, Human
ggcuggaguggccaucugu

SEQ ID NO: 122937 - RNA, 22 nt, Human
aaagcagcagcaccugcauuuc

SEQ ID NO: 122938 - RNA, 22 nt, Human
cagcugggcuaagaguagaggc

SEQ ID NO: 122939 - RNA, 22 nt, Human
ucugugcaaguauuugacauuu

SEQ ID NO: 122940 - RNA, 22 nt, Human
cuacaggaguaaaauaauuuca

SEQ ID NO: 122941 - RNA, 22 nt, Human
cauguacaaggaugcucagagu

SEQ ID NO: 122942 - RNA, 22 nt, Human
ggcaggguccacaccugggaaa

SEQ ID NO: 122943 - RNA, 22 nt, Human
ggagaugcaauguagaaucugg

SEQ ID NO: 122944 - RNA, 22 nt, Human
cugccagguuggcgcucgcucu

SEQ ID NO: 122945 - RNA, 22 nt, Human
acaucaguccaccacugcaguu

SEQ ID NO: 122946 - RNA, 20 nt, Human
agggcagcuugaggagccgg

SEQ ID NO: 122947 - RNA, 22 nt, Human
uggcaggaaaguaacagagcac

SEQ ID NO: 122948 - RNA, 22 nt, Human
augcauaaagaaagcuaucugg

SEQ ID NO: 122949 - RNA, 22 nt, Human
agggccaguaccaggugggugg

SEQ ID NO: 122950 - RNA, 22 nt, Human
gagugcaguaugagaggcugcu

SEQ ID NO: 122951 - RNA, 22 nt, Human
agcagggcuucugugccugugc

SEQ ID NO: 122952 - RNA, 22 nt, Human
uccaggcuagaagucacaggcc

SEQ ID NO: 122953 - RNA, 22 nt, Human
caacauauaauauuugaguucu

SEQ ID NO: 122954 - RNA, 22 nt, Human
aggcugagcugaccugguuugg

SEQ ID NO: 122955 - RNA, 22 nt, Human
aguuuauagcccagauucaugg

SEQ ID NO: 122956 - RNA, 22 nt, Human
ccaggacccugcaaacccuguu

SEQ ID NO: 122957 - RNA, 22 nt, Human
uggagauguaaagcaaggcuua

SEQ ID NO: 122958 - RNA, 22 nt, Human
uggcucagucauggaugaguaa

SEQ ID NO: 122959 - RNA, 22 nt, Human
aagguauuuucuaauguauacu

SEQ ID NO: 122960 - RNA, 22 nt, Human
acaauuacccuggcuugauaaa

SEQ ID NO: 122961 - RNA, 22 nt, Human
uggcaggaaaaacauuggagau

SEQ ID NO: 122962 - RNA, 22 nt, Human
uuugaucagcaagauaaauaga

SEQ ID NO: 122963 - RNA, 22 nt, Human
cugccuuugugaucaguucuuu

SEQ ID NO: 122964 - RNA, 22 nt, Human
uggggcagaguaggauuuuggc

SEQ ID NO: 122965 - RNA, 18 nt, Human
cugaggcuuagagagguu

SEQ ID NO: 122966 - RNA, 22 nt, Human
uugauuuuaaaauagugacacu

SEQ ID NO: 122967 - RNA, 22 nt, Human
uacaggagagauuuaguaauca

SEQ ID NO: 122968 - RNA, 22 nt, Human
cauaacauguacauauaaaugc

SEQ ID NO: 122969 - RNA, 22 nt, Human
ugggcugaguguggaacuaguu

SEQ ID NO: 122970 - RNA, 22 nt, Human
uagaugaccuuguguuaggcaa

SEQ ID NO: 122971 - RNA, 22 nt, Human
uuuaaauuuguguuuagagggu

SEQ ID NO: 122972 - RNA, 23 nt, Human
agugcugaauugaaagcuccagg

SEQ ID NO: 122973 - RNA, 22 nt, Human
aacagugaguugaugacugaau

SEQ ID NO: 122974 - RNA, 22 nt, Human
caguggcugagaguggacacug

SEQ ID NO: 122975 - RNA, 21 nt, Human
uagggcaggcauuggaagaga

SEQ ID NO: 122976 - RNA, 22 nt, Human
ugucagaacucuauugaugucc

SEQ ID NO: 122977 - RNA, 22 nt, Human
gcuggcagguccaagauagagc

SEQ ID NO: 122978 - RNA, 22 nt, Human
uugcaagacacuuggaagcaca

SEQ ID NO: 122979 - RNA, 22 nt, Human
agagacuggagaugggcagugu

SEQ ID NO: 122980 - RNA, 19 nt, Human
acagcacagaaauauuuca

SEQ ID NO: 122981 - RNA, 22 nt, Human
agcagggcuugccgcuuguccu

SEQ ID NO: 122982 - RNA, 22 nt, Human
cuggacagaaaccaguccuggg

SEQ ID NO: 122983 - RNA, 22 nt, Human
uucagaaauucauggaguucag

SEQ ID NO: 122984 - RNA, 23 nt, Human
uggggagggaagucauuucugua

SEQ ID NO: 122985 - RNA, 22 nt, Human
caggucagaggcgcagccccca

SEQ ID NO: 122986 - RNA, 22 nt, Human
cauuugcaagagauaaauguuu

SEQ ID NO: 122987 - RNA, 22 nt, Human
ccagugcccagucucccugguc

SEQ ID NO: 122988 - RNA, 19 nt, Human
ccugcagggaugagagguu

SEQ ID NO: 122989 - RNA, 22 nt, Human
agaacauuugucgaucaauuug

SEQ ID NO: 122990 - RNA, 19 nt, Human
gaggaggaaaacuagugua

SEQ ID NO: 122991 - RNA, 22 nt, Human
gagucacaaaagaugcccaggg

SEQ ID NO: 122992 - RNA, 22 nt, Human
cagagcugguguuacaagucca

SEQ ID NO: 122993 - RNA, 22 nt, Human
agccaggccuuagggagaggca

SEQ ID NO: 122994 - RNA, 22 nt, Human
gaggaagaagggauuagaacuc

SEQ ID NO: 122995 - RNA, 22 nt, Human
cauucucaauaguagaugagua

SEQ ID NO: 122996 - RNA, 22 nt, Human
agguaguguagcugagugggau

SEQ ID NO: 122997 - RNA, 22 nt, Human
gagucugagaacugggcucagu

SEQ ID NO: 122998 - RNA, 19 nt, Human
agcugugcagacacuucgc

SEQ ID NO: 122999 - RNA, 22 nt, Human
agaggcaguauacaauccgagc

SEQ ID NO: 123000 - RNA, 22 nt, Human
gccacucaugggaggugugcaa

SEQ ID NO: 123001 - RNA, 22 nt, Human
uggggagugaugccucggauaa

SEQ ID NO: 123002 - RNA, 22 nt, Human
acaggauaguuuuuaaucuucc

SEQ ID NO: 123003 - RNA, 22 nt, Human
cauccugguuaccccauaguca

SEQ ID NO: 123004 - RNA, 22 nt, Human
uuugaaauaugaggcauuauga

SEQ ID NO: 123005 - RNA, 22 nt, Human
aaacaguuuuuuaagucucuag

SEQ ID NO: 123006 - RNA, 22 nt, Human
aauaugcaaagcguguuaucug

SEQ ID NO: 123007 - RNA, 22 nt, Human
caugcugugugguuagaacugu

SEQ ID NO: 123008 - RNA, 22 nt, Human
gcauggcaagaucaggagacca

SEQ ID NO: 123009 - RNA, 22 nt, Human
agaaggcagaugggacggagca

SEQ ID NO: 123010 - RNA, 22 nt, Human
ugaggaaguugaucucaucagu

SEQ ID NO: 123011 - RNA, 22 nt, Human
uuaaauuagucaagcuucucug

SEQ ID NO: 123012 - RNA, 22 nt, Human
gagggagggacuagcauucucu

SEQ ID NO: 123013 - RNA, 22 nt, Human
aggcagugagugugacuucaca

SEQ ID NO: 123014 - RNA, 22 nt, Human
ggcuguggacacugagcucaga

SEQ ID NO: 123015 - RNA, 22 nt, Human
aagaugcuugagaacuguuuga

SEQ ID NO: 123016 - RNA, 22 nt, Human
aagggcuggagacugggucuuc

SEQ ID NO: 123017 - RNA, 22 nt, Human
gcagccagguuugaggaccacu

SEQ ID NO: 123018 - RNA, 23 nt, Human
cagugcagggcaacucagacucc

SEQ ID NO: 123019 - RNA, 22 nt, Human
agcuguggcaaccuugucagac

SEQ ID NO: 123020 - RNA, 22 nt, Human
agagggcuggacgcagguugga

SEQ ID NO: 123021 - RNA, 16 nt, Human
gcacacacaucaauga

SEQ ID NO: 123022 - RNA, 22 nt, Human
cacaggcagccuuguagaagaa

SEQ ID NO: 123023 - RNA, 21 nt, Human
acagcuaagcaacaacuacug

SEQ ID NO: 123024 - RNA, 22 nt, Human
aguuugauaaacaccagcuagu

SEQ ID NO: 123025 - RNA, 22 nt, Human
gagagggcucuguguggguacu

SEQ ID NO: 123026 - RNA, 19 nt, Human
ugagacagggauucaggug

SEQ ID NO: 123027 - RNA, 22 nt, Human
caggacacagaauaaggcaguu

SEQ ID NO: 123028 - RNA, 22 nt, Human
gccuucccaagacgccugaguu

SEQ ID NO: 123029 - RNA, 22 nt, Human
ucagggcauacucuucaagguc

SEQ ID NO: 123030 - RNA, 20 nt, Human
aggcugagggugauuguguc

SEQ ID NO: 123031 - RNA, 22 nt, Human
uucaucuggaauuuauguuaua

SEQ ID NO: 123032 - RNA, 22 nt, Human
uguauaaaccauggacagcuuu

SEQ ID NO: 123033 - RNA, 22 nt, Human
augcugugucaggaauuugaua

SEQ ID NO: 123034 - RNA, 22 nt, Human
uaggauuauuuguucuauuucu

SEQ ID NO: 123035 - RNA, 22 nt, Human
ccugugcaggcuccauaauaga

SEQ ID NO: 123036 - RNA, 22 nt, Human
aagcagagccaccagcuuugga

SEQ ID NO: 123037 - RNA, 22 nt, Human
acagcugcugcuucucacuggg

SEQ ID NO: 123038 - RNA, 22 nt, Human
gcagaagcuguucgaaggccgc

SEQ ID NO: 123039 - RNA, 22 nt, Human
uagcacauaacuuagaauaguu

SEQ ID NO: 123040 - RNA, 22 nt, Human
cagaggaaguuccuugaugaga

SEQ ID NO: 123041 - RNA, 22 nt, Human
uggcucagauaauucaaggggc

SEQ ID NO: 123042 - RNA, 22 nt, Human
ccagagcugcauccagcagguu

SEQ ID NO: 123043 - RNA, 22 nt, Human
uggccagaaccugcaguaggcc

SEQ ID NO: 123044 - RNA, 17 nt, Human
agauggcaggaggcaga

SEQ ID NO: 123045 - RNA, 19 nt, Human
uggcugagcuggacugagg

SEQ ID NO: 123046 - RNA, 22 nt, Human
uugugcagcuauaaagaaaugg

SEQ ID NO: 123047 - RNA, 23 nt, Human
aaaugugagggaaaaucuuucug

SEQ ID NO: 123048 - RNA, 22 nt, Human
uuccagaauuuuguucugcuug

SEQ ID NO: 123049 - RNA, 22 nt, Human
ugcagggcccuugggguugaac

SEQ ID NO: 123050 - RNA, 22 nt, Human
ggaagccaggcugggggaucug

SEQ ID NO: 123051 - RNA, 22 nt, Human
cugaaaauguuacacaggaaga

SEQ ID NO: 123052 - RNA, 22 nt, Human
gaaaugaacugauuaucauugc

SEQ ID NO: 123053 - RNA, 22 nt, Human
aggcucaggcaggaauggcgga

SEQ ID NO: 123054 - RNA, 22 nt, Human
ucugugcagucagggcucaguc

SEQ ID NO: 123055 - RNA, 22 nt, Human
acuuccaaauaccaucacauug

SEQ ID NO: 123056 - RNA, 22 nt, Human
ucaguggauuguagaaggcuua

SEQ ID NO: 123057 - RNA, 22 nt, Human
cgcccagggcaggaggccgcuc

SEQ ID NO: 123058 - RNA, 22 nt, Human
acuauuuacucaaaugagguug

SEQ ID NO: 123059 - RNA, 22 nt, Human
uggcaggagacacauggcauag

SEQ ID NO: 123060 - RNA, 22 nt, Human
agucaacaaaaauguggagccu

SEQ ID NO: 123061 - RNA, 22 nt, Human
auuugcaauuacucaugucauu

SEQ ID NO: 123062 - RNA, 22 nt, Human
gggauuugugggauggccagug

SEQ ID NO: 123063 - RNA, 22 nt, Human
aauaaaauggucaguuuucuca

SEQ ID NO: 123064 - RNA, 22 nt, Human
gggagggacacaaagaguuccc

SEQ ID NO: 123065 - RNA, 22 nt, Human
gcagagcugucuaagucacuuc

SEQ ID NO: 123066 - RNA, 22 nt, Human
ucaauucugccucuaaauauuu

SEQ ID NO: 123067 - RNA, 22 nt, Human
ggaagccaguugcuuggugugg

SEQ ID NO: 123068 - RNA, 20 nt, Human
agaagccaagugacauguuu

SEQ ID NO: 123069 - RNA, 22 nt, Human
acagaggcagugugagauacug

SEQ ID NO: 123070 - RNA, 20 nt, Human
ugcagggccuaaaaagggaa

SEQ ID NO: 123071 - RNA, 22 nt, Human
uugcagaggcaaaaaugaacuc

SEQ ID NO: 123072 - RNA, 22 nt, Human
ucagaggaggcauuuaaacaga

SEQ ID NO: 123073 - RNA, 19 nt, Human
uuuaagcauagaggccaga

SEQ ID NO: 123074 - RNA, 22 nt, Human
uuguggcagaccaugagucuaa

SEQ ID NO: 123075 - RNA, 22 nt, Human
ucaccaggcuccuguuaagaug

SEQ ID NO: 123076 - RNA, 23 nt, Human
ucagaggaucaucaaacguuuuc

SEQ ID NO: 123077 - RNA, 22 nt, Human
acugugcacaauucuaaguccu

SEQ ID NO: 123078 - RNA, 22 nt, Human
uccugaggugcucagccaggaa

SEQ ID NO: 123079 - RNA, 22 nt, Human
uuugucaaguuugcaaauacgu

SEQ ID NO: 123080 - RNA, 23 nt, Human
cacuccuguuucuaagccagcau

SEQ ID NO: 123081 - RNA, 20 nt, Human
cauuaugguugggcacagug

SEQ ID NO: 123082 - RNA, 23 nt, Human
acagccaguucaccucuccuugg

SEQ ID NO: 123083 - RNA, 22 nt, Human
gcagggcuguggacacuuuggu

SEQ ID NO: 123084 - RNA, 22 nt, Human
caggcagaguuagugauuuagg

SEQ ID NO: 123085 - RNA, 22 nt, Human
ucuucauucucgccuuugucgu

SEQ ID NO: 123086 - RNA, 22 nt, Human
gaggucaucaccaauauaugcc

SEQ ID NO: 123087 - RNA, 22 nt, Human
cuggagugauacucagaaugug

SEQ ID NO: 123088 - RNA, 22 nt, Human
aguuugauggcuuaauaguaga

SEQ ID NO: 123089 - RNA, 22 nt, Human
uuuaaauuauaguuaaugucug

SEQ ID NO: 123090 - RNA, 22 nt, Human
uaggcagagguaugguaaggac

SEQ ID NO: 123091 - RNA, 22 nt, Human
gccagagguaucaaagauagua

SEQ ID NO: 123092 - RNA, 22 nt, Human
gggcugaguuccugccucacuc

SEQ ID NO: 123093 - RNA, 22 nt, Human
uccugaggacccugucaggggc

SEQ ID NO: 123094 - RNA, 22 nt, Human
ugcuaaauaaguggaauagaca

SEQ ID NO: 123095 - RNA, 22 nt, Human
uaacugaugugaacuuaccauu

SEQ ID NO: 123096 - RNA, 22 nt, Human
gaagucugacucuuuguaagcu

SEQ ID NO: 123097 - RNA, 22 nt, Human
uuugaugaugaugauaaaguuu

SEQ ID NO: 123098 - RNA, 22 nt, Human
ucucuuauuuugccuuugacaa

SEQ ID NO: 123099 - RNA, 22 nt, Human
ccaggugucuguggccagcccu

SEQ ID NO: 123100 - RNA, 21 nt, Human
ggacaccagucacacuggauu

SEQ ID NO: 123101 - RNA, 22 nt, Human
gcuguggcuugcagcuggggcu

SEQ ID NO: 123102 - RNA, 23 nt, Human
gggggccguccuggggauuauag

SEQ ID NO: 123103 - RNA, 22 nt, Human
aguccccucuaacccaacuuua

SEQ ID NO: 123104 - RNA, 22 nt, Human
uaguggagguggucugugaacu

SEQ ID NO: 123105 - RNA, 22 nt, Human
gaaggccuaggaaggaagccuu

SEQ ID NO: 123106 - RNA, 18 nt, Human
uguggcaggggugggaga

SEQ ID NO: 123107 - RNA, 22 nt, Human
gaggaggcacuaguuagugaca

SEQ ID NO: 123108 - RNA, 22 nt, Human
ccuaggccuuacuuuccugugc

SEQ ID NO: 123109 - RNA, 22 nt, Human
uccuggccgccgcguggggccg

SEQ ID NO: 123110 - RNA, 22 nt, Human
ggcucaguguuuguggaacaua

SEQ ID NO: 123111 - RNA, 22 nt, Human
ggagggagucagcugauuagaa

SEQ ID NO: 123112 - RNA, 22 nt, Human
uggaaucuguauguauguauaa

SEQ ID NO: 123113 - RNA, 17 nt, Human
cagguauuuaggcauug

SEQ ID NO: 123114 - RNA, 22 nt, Human
aagcauuucuguuuaucuaucg

SEQ ID NO: 123115 - RNA, 22 nt, Human
gaggcucacugggcaaagacuc

SEQ ID NO: 123116 - RNA, 22 nt, Human
gaagccagccuugucugccucu

SEQ ID NO: 123117 - RNA, 22 nt, Human
agcugagagguggcaagcugua

SEQ ID NO: 123118 - RNA, 22 nt, Human
agcugaggaggaaugaugggua

SEQ ID NO: 123119 - RNA, 22 nt, Human
agggccagggaagcuguauuuu

SEQ ID NO: 123120 - RNA, 22 nt, Human
gugggcagacagugcuuugcag

SEQ ID NO: 123121 - RNA, 22 nt, Human
ugugaccucaucuuaacuggaa

SEQ ID NO: 123122 - RNA, 22 nt, Human
uacagugcauagaggcaugaua

SEQ ID NO: 123123 - RNA, 22 nt, Human
guguccuuauuucugucucuca

SEQ ID NO: 123124 - RNA, 22 nt, Human
gcugaggcuccucgggaggaca

SEQ ID NO: 123125 - RNA, 22 nt, Human
cugcuguguuccuccugcaucu

SEQ ID NO: 123126 - RNA, 22 nt, Human
uucuccccugacccugaugagg

SEQ ID NO: 123127 - RNA, 22 nt, Human
agcaguggugugaggagggcuc

SEQ ID NO: 123128 - RNA, 22 nt, Human
uccuggccucacaguccugggu

SEQ ID NO: 123129 - RNA, 22 nt, Human
uccugggagagugggacuguau

SEQ ID NO: 123130 - RNA, 22 nt, Human
aauagugcuuuuguacauagga

SEQ ID NO: 123131 - RNA, 22 nt, Human
acauuugacauuuaguaucagc

SEQ ID NO: 123132 - RNA, 22 nt, Human
uuucuacaacacuucugaaucu

SEQ ID NO: 123133 - RNA, 22 nt, Human
ucaguggauauuucuguggcug

SEQ ID NO: 123134 - RNA, 22 nt, Human
gguggcagucuuaagagaucuu

SEQ ID NO: 123135 - RNA, 22 nt, Human
uauguaaaggauugagaugaau

SEQ ID NO: 123136 - RNA, 22 nt, Human
gcagaagggaauaaggagcuuu

SEQ ID NO: 123137 - RNA, 22 nt, Human
ugaggcaggaguucaggcugcg

SEQ ID NO: 123138 - RNA, 22 nt, Human
uucuguuuuagaaauaaguagu

SEQ ID NO: 123139 - RNA, 22 nt, Human
gcacaguggguggucauguaca

SEQ ID NO: 123140 - RNA, 21 nt, Human
uccuguaagcuuggguggcuc

SEQ ID NO: 123141 - RNA, 23 nt, Human
agucagagagugugagacaacug

SEQ ID NO: 123142 - RNA, 22 nt, Human
aagcaguguucccagcuggccc

SEQ ID NO: 123143 - RNA, 22 nt, Human
ggggcaggagguguucucuuuu

SEQ ID NO: 123144 - RNA, 21 nt, Human
cacuggaauuuucugugacau

SEQ ID NO: 123145 - RNA, 22 nt, Human
aacauuugugaaguacuuagau

SEQ ID NO: 123146 - RNA, 22 nt, Human
uuccagcuaacucacaucccuu

SEQ ID NO: 123147 - RNA, 22 nt, Human
uguccuuuucuuuagugcagcu

SEQ ID NO: 123148 - RNA, 22 nt, Human
ugaggcagugauguuuaagcac

SEQ ID NO: 123149 - RNA, 22 nt, Human
agcuggggcugcagagaacagg

SEQ ID NO: 123150 - RNA, 22 nt, Human
caguggaggccuugggaccuuu

SEQ ID NO: 123151 - RNA, 22 nt, Human
caucauaauaacccagacacag

SEQ ID NO: 123152 - RNA, 22 nt, Human
auuaacaugcagccagacacac

SEQ ID NO: 123153 - RNA, 22 nt, Human
agaugcagaaaaacuaagugau

SEQ ID NO: 123154 - RNA, 21 nt, Human
aggcucagagaucaaacagua

SEQ ID NO: 123155 - RNA, 22 nt, Human
accaaagggcagaacaugagca

SEQ ID NO: 123156 - RNA, 22 nt, Human
auaacaugaccugugcuucaca

SEQ ID NO: 123157 - RNA, 22 nt, Human
ugcauacacaagcauacaugua

SEQ ID NO: 123158 - RNA, 22 nt, Human
gucagaggaggcugaguaggaa

SEQ ID NO: 123159 - RNA, 22 nt, Human
aggacuuagaacauuauguacu

SEQ ID NO: 123160 - RNA, 22 nt, Human
agucucuuuugcgaagaguguu

SEQ ID NO: 123161 - RNA, 22 nt, Human
uaugcacaguuacaagaauauc

SEQ ID NO: 123162 - RNA, 22 nt, Human
acugugcagcugagugcuaauu

SEQ ID NO: 123163 - RNA, 22 nt, Human
acacagugugugcagucggacg

SEQ ID NO: 123164 - RNA, 20 nt, Human
uacaggaaucaagacugcau

SEQ ID NO: 123165 - RNA, 21 nt, Human
ugucagcaacaauacuuucuc

SEQ ID NO: 123166 - RNA, 20 nt, Human
uuggucagugguucaguuug

SEQ ID NO: 123167 - RNA, 22 nt, Human
auacuaaaguauagaacuuagu

SEQ ID NO: 123168 - RNA, 22 nt, Human
auuauuguacuuucaauaaggu

SEQ ID NO: 123169 - RNA, 22 nt, Human
aaauuauuacaagcuaguuggc

SEQ ID NO: 123170 - RNA, 22 nt, Human
ugggagaugguucugagacuuu

SEQ ID NO: 123171 - RNA, 22 nt, Human
ggcugaaguguaguggcucacu

SEQ ID NO: 123172 - RNA, 22 nt, Human
ucuuuauaaaagucauuauguc

SEQ ID NO: 123173 - RNA, 22 nt, Human
cagcuguggagauggggugcau

SEQ ID NO: 123174 - RNA, 22 nt, Human
ccagaagaggacacagugugga

SEQ ID NO: 123175 - RNA, 23 nt, Human
agugagcagcuguagggcaagga

SEQ ID NO: 123176 - RNA, 20 nt, Human
ugggcugaggaucaggugcc

SEQ ID NO: 123177 - RNA, 22 nt, Human
uggaagugcucuucugaccaac

SEQ ID NO: 123178 - RNA, 22 nt, Human
aaucuugaguaucagaccaaga

SEQ ID NO: 123179 - RNA, 23 nt, Human
cagaggcaucggauucaacauca

SEQ ID NO: 123180 - RNA, 22 nt, Human
ucucccuggagcccugaagcau

SEQ ID NO: 123181 - RNA, 22 nt, Human
gaugggggccagggccugcuuu

SEQ ID NO: 123182 - RNA, 22 nt, Human
uuuauccauaucauuaaaaucu

SEQ ID NO: 123183 - RNA, 22 nt, Human
uggaaggagcuaaggaccuggg

SEQ ID NO: 123184 - RNA, 22 nt, Human
cuauuauuagauaaucuacuug

SEQ ID NO: 123185 - RNA, 23 nt, Human
agcauggaauaggaaagaggcag

SEQ ID NO: 123186 - RNA, 22 nt, Human
agcuggaugaauuuggaacacu

SEQ ID NO: 123187 - RNA, 22 nt, Human
gccaguggcuugccaggcagga

SEQ ID NO: 123188 - RNA, 22 nt, Human
ccauguggugggaaggagaaug

SEQ ID NO: 123189 - RNA, 21 nt, Human
ucaggcagugcaaauacaugg

SEQ ID NO: 123190 - RNA, 22 nt, Human
aauuuuguucuuggaaaucagg

SEQ ID NO: 123191 - RNA, 22 nt, Human
ggcugcaggcaggguauccacu

SEQ ID NO: 123192 - RNA, 22 nt, Human
gcugugcauugagccugagagu

SEQ ID NO: 123193 - RNA, 21 nt, Human
gcugcucgagauccagugcuu

SEQ ID NO: 123194 - RNA, 22 nt, Human
aagacauugucauuuuauaauu

SEQ ID NO: 123195 - RNA, 22 nt, Human
ucugugcacugugucauuaggu

SEQ ID NO: 123196 - RNA, 22 nt, Human
ccuggccagaggcgugccugug

SEQ ID NO: 123197 - RNA, 22 nt, Human
aaaggauuaaauaaaugugcug

SEQ ID NO: 123198 - RNA, 22 nt, Human
cuguuuucccuggaguucagca

SEQ ID NO: 123199 - RNA, 22 nt, Human
gcagaugguggggcaggaaaau

SEQ ID NO: 123200 - RNA, 17 nt, Human
gcaguggagggguaguu

SEQ ID NO: 123201 - RNA, 22 nt, Human
uccauguuucagcaucuacauc

SEQ ID NO: 123202 - RNA, 22 nt, Human
aaagacuuggcuuaugauuugc

SEQ ID NO: 123203 - RNA, 22 nt, Human
augaacaacuugaagcuccaug

SEQ ID NO: 123204 - RNA, 22 nt, Human
ugagcugauaggcugugagccu

SEQ ID NO: 123205 - RNA, 22 nt, Human
uuuucauuguuccucgagcauu

SEQ ID NO: 123206 - RNA, 22 nt, Human
ugcauaaacagauacuucaugu

SEQ ID NO: 123207 - RNA, 22 nt, Human
aagaagguguggaaagaugcuc

SEQ ID NO: 123208 - RNA, 22 nt, Human
ugagaugcuaaagggcugcuca

SEQ ID NO: 123209 - RNA, 22 nt, Human
ccagggcaacgcugucucagag

SEQ ID NO: 123210 - RNA, 22 nt, Human
ucaccaggcuggaaugcagugg

SEQ ID NO: 123211 - RNA, 22 nt, Human
gcugugcagauguagggagugg

SEQ ID NO: 123212 - RNA, 22 nt, Human
uaguggagaggauguggagaaa

SEQ ID NO: 123213 - RNA, 22 nt, Human
gagaaagggaacuuacagagug

SEQ ID NO: 123214 - RNA, 20 nt, Human
uucaugggagcaaagaggcc

SEQ ID NO: 123215 - RNA, 22 nt, Human
gaggaagaaagcauaggugggg

SEQ ID NO: 123216 - RNA, 22 nt, Human
agaagcuugaaggagcagugac

SEQ ID NO: 123217 - RNA, 22 nt, Human
uuacuaagagaaguaaauauuu

SEQ ID NO: 123218 - RNA, 19 nt, Human
acacauuugcacaauccac

SEQ ID NO: 123219 - RNA, 22 nt, Human
gagggcugcaaugagacagaga

SEQ ID NO: 123220 - RNA, 22 nt, Human
aggcugagggcuccugagggca

SEQ ID NO: 123221 - RNA, 22 nt, Human
cggcagagcggcgagccccucc

SEQ ID NO: 123222 - RNA, 22 nt, Human
acagugaaaaguagcuaacaca

SEQ ID NO: 123223 - RNA, 22 nt, Human
gagcacagggaauagacagaua

SEQ ID NO: 123224 - RNA, 22 nt, Human
aaguccagaacuccugugauag

SEQ ID NO: 123225 - RNA, 22 nt, Human
uaucagcaggccaaagcugcaa

SEQ ID NO: 123226 - RNA, 22 nt, Human
ugcccaggcuccucgcagccuu

SEQ ID NO: 123227 - RNA, 22 nt, Human
ggaggccaugaggcucuaggug

SEQ ID NO: 123228 - RNA, 22 nt, Human
gggucaggcucagcagggcagc

SEQ ID NO: 123229 - RNA, 22 nt, Human
guaagcacaugugugugcaugg

SEQ ID NO: 123230 - RNA, 22 nt, Human
gacccuggaguuaguccugugu

SEQ ID NO: 123231 - RNA, 22 nt, Human
auagugggaauuacgauauacu

SEQ ID NO: 123232 - RNA, 22 nt, Human
gggcagugguuacacagcugag

SEQ ID NO: 123233 - RNA, 22 nt, Human
uguugauuaguguuuagacuua

SEQ ID NO: 123234 - RNA, 22 nt, Human
ugaaauuccaggagaguuaaaa

SEQ ID NO: 123235 - RNA, 22 nt, Human
gcuggcagacugggggcagaac

SEQ ID NO: 123236 - RNA, 22 nt, Human
auauaauuuuugguuagcucaa

SEQ ID NO: 123237 - RNA, 22 nt, Human
ucaggcugguccccacagugga

SEQ ID NO: 123238 - RNA, 22 nt, Human
uggaauggaaacaaacugagga

SEQ ID NO: 123239 - RNA, 22 nt, Human
ucacagaaggcaucacagaaga

SEQ ID NO: 123240 - RNA, 22 nt, Human
gaaaugcauggaucuuggcaga

SEQ ID NO: 123241 - RNA, 22 nt, Human
auacaugacucacacauucugc

SEQ ID NO: 123242 - RNA, 22 nt, Human
ucucccagugucuggcagucag

SEQ ID NO: 123243 - RNA, 22 nt, Human
uuacaugaugauuucauaaaca

SEQ ID NO: 123244 - RNA, 22 nt, Human
caggaggcagaggaugcccagu

SEQ ID NO: 123245 - RNA, 22 nt, Human
auuucgauagaccuaacaauug

SEQ ID NO: 123246 - RNA, 22 nt, Human
agguaaggcuguaagcuaagcc

SEQ ID NO: 123247 - RNA, 22 nt, Human
ugcuuugcaaauaauagaaugu

SEQ ID NO: 123248 - RNA, 22 nt, Human
uaggaaauacuguaaguuuggg

SEQ ID NO: 123249 - RNA, 22 nt, Human
gauuacugucuacuugggauag

SEQ ID NO: 123250 - RNA, 22 nt, Human
ugggagucugaggcgggucgau

SEQ ID NO: 123251 - RNA, 22 nt, Human
cagaaggcuuuguggaguagac

SEQ ID NO: 123252 - RNA, 22 nt, Human
aaacagcagcuguuuaauuugc

SEQ ID NO: 123253 - RNA, 22 nt, Human
ugcagugugaccuguagcgagc

SEQ ID NO: 123254 - RNA, 22 nt, Human
ccaguuuuuccagugcuuucug

SEQ ID NO: 123255 - RNA, 22 nt, Human
uacacacagaggccaugggauu

SEQ ID NO: 123256 - RNA, 22 nt, Human
ccaguggacaauuucugaggaa

SEQ ID NO: 123257 - RNA, 22 nt, Human
uguacaugaauaaaagaucuug

SEQ ID NO: 123258 - RNA, 22 nt, Human
gcuguggaugcuauggaucauc

SEQ ID NO: 123259 - RNA, 20 nt, Human
cuaagcacuuugauaaacug

SEQ ID NO: 123260 - RNA, 22 nt, Human
ccuccacaggagcugcagugcu

SEQ ID NO: 123261 - RNA, 22 nt, Human
ugccaggcccagcagggcggcc

SEQ ID NO: 123262 - RNA, 22 nt, Human
ccuggggaauagagucaagggg

SEQ ID NO: 123263 - RNA, 22 nt, Human
aagggcugaaugaaggguugaa

SEQ ID NO: 123264 - RNA, 22 nt, Human
agcagaggacaguucuuaggaa

SEQ ID NO: 123265 - RNA, 22 nt, Human
caucagagugguggccuggugu

SEQ ID NO: 123266 - RNA, 22 nt, Human
ggcucaccauuuucacucucug

SEQ ID NO: 123267 - RNA, 22 nt, Human
cagggcaguuuuacuucucucu

SEQ ID NO: 123268 - RNA, 22 nt, Human
cuaguggaaacuaacuggaauu

SEQ ID NO: 123269 - RNA, 22 nt, Human
aggcucaggugccucauucaca

SEQ ID NO: 123270 - RNA, 22 nt, Human
uuucuuauacuauauugucauc

SEQ ID NO: 123271 - RNA, 22 nt, Human
uucauuuaauuuguguauuaac

SEQ ID NO: 123272 - RNA, 22 nt, Human
gucaccagcaccaaugccacau

SEQ ID NO: 123273 - RNA, 22 nt, Human
ucugucauuuuguaucuacaug

SEQ ID NO: 123274 - RNA, 22 nt, Human
gcaaaggcuucuuuuauucucc

SEQ ID NO: 123275 - RNA, 22 nt, Human
aggaagugaaagggaaggaguu

SEQ ID NO: 123276 - RNA, 22 nt, Human
aggccucaggaagguaaagaag

SEQ ID NO: 123277 - RNA, 22 nt, Human
agcaggugggcaugaaagcuga

SEQ ID NO: 123278 - RNA, 22 nt, Human
agugggaggaaguggugauauu

SEQ ID NO: 123279 - RNA, 22 nt, Human
uugaaacauucuccuauugauu

SEQ ID NO: 123280 - RNA, 22 nt, Human
aggcugaggaucccuguguucu

SEQ ID NO: 123281 - RNA, 22 nt, Human
agcuguggaguaggggguugga

SEQ ID NO: 123282 - RNA, 21 nt, Human
aggaaaggccagcacguaggg

SEQ ID NO: 123283 - RNA, 22 nt, Human
aaaagcagagacucuggagcua

SEQ ID NO: 123284 - RNA, 22 nt, Human
aggcagagcuggguuuugaaau

SEQ ID NO: 123285 - RNA, 22 nt, Human
uaaaacagcagggcagagaagu

SEQ ID NO: 123286 - RNA, 22 nt, Human
uacagugacagauagggauaga

SEQ ID NO: 123287 - RNA, 22 nt, Human
gcugugcaucuucauucuggac

SEQ ID NO: 123288 - RNA, 22 nt, Human
augaggcagauguugcaugagg

SEQ ID NO: 123289 - RNA, 22 nt, Human
uggcagagucugggcuugggca

SEQ ID NO: 123290 - RNA, 20 nt, Human
cagguauuacaucugcaccu

SEQ ID NO: 123291 - RNA, 22 nt, Human
ucauuuucacacauaaauagca

SEQ ID NO: 123292 - RNA, 22 nt, Human
cucauaaagugagaauaugacc

SEQ ID NO: 123293 - RNA, 22 nt, Human
cggucaggugcagcguuggcac

SEQ ID NO: 123294 - RNA, 21 nt, Human
cccugcuuggggcagaacaac

SEQ ID NO: 123295 - RNA, 22 nt, Human
aggcaggaaaaucgcuugaacc

SEQ ID NO: 123296 - RNA, 22 nt, Human
gcugagggcagccuccuagguc

SEQ ID NO: 123297 - RNA, 18 nt, Human
agggucagugucacuggc

SEQ ID NO: 123298 - RNA, 20 nt, Human
aguuuauuccaggagaacug

SEQ ID NO: 123299 - RNA, 22 nt, Human
aaauuaguacauugcaaagucc

SEQ ID NO: 123300 - RNA, 22 nt, Human
agaggaaguaaucaggaccugc

SEQ ID NO: 123301 - RNA, 22 nt, Human
cuacagugacagaauuaaacag

SEQ ID NO: 123302 - RNA, 22 nt, Human
ucagggcaggacaguguaggcc

SEQ ID NO: 123303 - RNA, 22 nt, Human
uacuuguuaucaucuuuuccuu

SEQ ID NO: 123304 - RNA, 22 nt, Human
gaguccaguuguucacagaggc

SEQ ID NO: 123305 - RNA, 22 nt, Human
ggagaggaaaugccagcacuuc

SEQ ID NO: 123306 - RNA, 21 nt, Human
ugucauauuucaauacaguuu

SEQ ID NO: 123307 - RNA, 22 nt, Human
cccaguuguugccggcucugga

SEQ ID NO: 123308 - RNA, 22 nt, Human
uggagaugaauauguguaccug

SEQ ID NO: 123309 - RNA, 22 nt, Human
ggccaggcgaugaccccuccac

SEQ ID NO: 123310 - RNA, 22 nt, Human
accaugccaguggcagccagac

SEQ ID NO: 123311 - RNA, 22 nt, Human
ugcagauacaguauguggaagc

SEQ ID NO: 123312 - RNA, 22 nt, Human
auacaguagggaccaugucuga

SEQ ID NO: 123313 - RNA, 20 nt, Human
aagagcugacucacaguggu

SEQ ID NO: 123314 - RNA, 17 nt, Human
gcagccagugcagcagg

SEQ ID NO: 123315 - RNA, 22 nt, Human
cagcacaauuuucaggagucca

SEQ ID NO: 123316 - RNA, 22 nt, Human
aggcucagccccugggaggaga

SEQ ID NO: 123317 - RNA, 22 nt, Human
acaaaggugagcagaagacaca

SEQ ID NO: 123318 - RNA, 22 nt, Human
ggcuugggagcaggcaugugac

SEQ ID NO: 123319 - RNA, 22 nt, Human
gagcugagccuggguggaccgc

SEQ ID NO: 123320 - RNA, 22 nt, Human
caaaggcugccacuguggcugu

SEQ ID NO: 123321 - RNA, 22 nt, Human
cugggcagguauacaaaaaaug

SEQ ID NO: 123322 - RNA, 20 nt, Human
aaaagcagccagagauggua

SEQ ID NO: 123323 - RNA, 23 nt, Human
ccagcugugccuggcccaggagc

SEQ ID NO: 123324 - RNA, 21 nt, Human
agaugcagugacccacugggg

SEQ ID NO: 123325 - RNA, 19 nt, Human
acauggcaucccaggaggu

SEQ ID NO: 123326 - RNA, 22 nt, Human
gagggcagaaaauuaugcggug

SEQ ID NO: 123327 - RNA, 22 nt, Human
aggcccagcccguccucgugcu

SEQ ID NO: 123328 - RNA, 22 nt, Human
uauuauuaugcauagcaugaaa

SEQ ID NO: 123329 - RNA, 22 nt, Human
auucugucuuuuuauacaucua

SEQ ID NO: 123330 - RNA, 22 nt, Human
gaagcuaaugagauaaaugcca

SEQ ID NO: 123331 - RNA, 22 nt, Human
ucauuugugugagugauuugac

SEQ ID NO: 123332 - RNA, 22 nt, Human
acauuugauggaguuaguaggu

SEQ ID NO: 123333 - RNA, 22 nt, Human
ugagccagaguggagugugccu

SEQ ID NO: 123334 - RNA, 23 nt, Human
cagcugaagcagccugggcugga

SEQ ID NO: 123335 - RNA, 22 nt, Human
ggccaggcugcugggaccccgc

SEQ ID NO: 123336 - RNA, 22 nt, Human
cagcuguguagaugcaggguca

SEQ ID NO: 123337 - RNA, 15 nt, Human
ucugugcagcaaggg

SEQ ID NO: 123338 - RNA, 22 nt, Human
cugagagaugauauagcuuaau

SEQ ID NO: 123339 - RNA, 22 nt, Human
aaguggagucccuacaaccagc

SEQ ID NO: 123340 - RNA, 22 nt, Human
aggcucaggucucaggucuggc

SEQ ID NO: 123341 - RNA, 22 nt, Human
gcagacagccagacugcacugg

SEQ ID NO: 123342 - RNA, 23 nt, Human
ugaagugaaauuucacaagggac

SEQ ID NO: 123343 - RNA, 22 nt, Human
ugcauaaaauaugagaaaugua

SEQ ID NO: 123344 - RNA, 22 nt, Human
gagaaagauggaaucuuacagg

SEQ ID NO: 123345 - RNA, 22 nt, Human
uggcucagaggggaagugguuu

SEQ ID NO: 123346 - RNA, 22 nt, Human
uggcagaggagaauuaagauua

SEQ ID NO: 123347 - RNA, 22 nt, Human
agaagugcuccagugaguuggg

SEQ ID NO: 123348 - RNA, 22 nt, Human
cccagugccaggcacaggcagc

SEQ ID NO: 123349 - RNA, 22 nt, Human
auacaguauuaccuguucagga

SEQ ID NO: 123350 - RNA, 17 nt, Human
ggcugugccaggugaga

SEQ ID NO: 123351 - RNA, 22 nt, Human
aguaaacaauguaugaggacag

SEQ ID NO: 123352 - RNA, 22 nt, Human
uagggcaggugaagaaaagcua

SEQ ID NO: 123353 - RNA, 22 nt, Human
uauacugaucacugaggucauc

SEQ ID NO: 123354 - RNA, 22 nt, Human
uucugcaggagcccuaguguau

SEQ ID NO: 123355 - RNA, 19 nt, Human
gcgaggaagucacuguggu

SEQ ID NO: 123356 - RNA, 23 nt, Human
ggggaaguggcagugagugaggc

SEQ ID NO: 123357 - RNA, 22 nt, Human
ugggcugaaaugcuguggacua

SEQ ID NO: 123358 - RNA, 22 nt, Human
acaugcuaugagagauuacuuc

SEQ ID NO: 123359 - RNA, 22 nt, Human
cccaggucccgccccagcucua

SEQ ID NO: 123360 - RNA, 22 nt, Human
ugucauggaggccuccccuaaa

SEQ ID NO: 123361 - RNA, 22 nt, Human
gcaggcagguggcaucuuguga

SEQ ID NO: 123362 - RNA, 22 nt, Human
auuuagcaaaaaaugaugaagc

SEQ ID NO: 123363 - RNA, 22 nt, Human
gcagaggagcaaguugcuacag

SEQ ID NO: 123364 - RNA, 22 nt, Human
uaauaacaauuguaggacauga

SEQ ID NO: 123365 - RNA, 21 nt, Human
gcugugcaggauugaaagcag

SEQ ID NO: 123366 - RNA, 22 nt, Human
aaaucugaaauagugugaagua

SEQ ID NO: 123367 - RNA, 22 nt, Human
ccagguguaggacaccaaggga

SEQ ID NO: 123368 - RNA, 22 nt, Human
uaacucacuccaaaaaggcauu

SEQ ID NO: 123369 - RNA, 22 nt, Human
uuugcuuguucaagauuucugu

SEQ ID NO: 123370 - RNA, 22 nt, Human
ggaggguccacugugaggcaga

SEQ ID NO: 123371 - RNA, 22 nt, Human
agcuaacaugacuagaagcuuc

SEQ ID NO: 123372 - RNA, 22 nt, Human
cugcugugcagacagacucucu

SEQ ID NO: 123373 - RNA, 19 nt, Human
auuuauuguaugauuccau

SEQ ID NO: 123374 - RNA, 22 nt, Human
ccagagaggccaaggucguggu

SEQ ID NO: 123375 - RNA, 22 nt, Human
aaguaaaacacacaguccaccg

SEQ ID NO: 123376 - RNA, 22 nt, Human
ugucacuacaucauaaauauau

SEQ ID NO: 123377 - RNA, 22 nt, Human
aguuagaguuaauuuccuaaca

SEQ ID NO: 123378 - RNA, 22 nt, Human
cggcugagacggccauagacac

SEQ ID NO: 123379 - RNA, 22 nt, Human
ggcagagacuggguuggcagag

SEQ ID NO: 123380 - RNA, 18 nt, Human
acagggagggcgcugggg

SEQ ID NO: 123381 - RNA, 22 nt, Human
gugugcagggggccagcgcagc

SEQ ID NO: 123382 - RNA, 22 nt, Human
aaagugggaacaauggagagug

SEQ ID NO: 123383 - RNA, 22 nt, Human
uuacaacagacacauauucuaa

SEQ ID NO: 123384 - RNA, 22 nt, Human
ucauaaaacacaccagguaguu

SEQ ID NO: 123385 - RNA, 22 nt, Human
gaauucugguuuugaaaugaau

SEQ ID NO: 123386 - RNA, 22 nt, Human
aagugccugaccuagccuggag

SEQ ID NO: 123387 - RNA, 22 nt, Human
gcaggugauucacccugggccu

SEQ ID NO: 123388 - RNA, 22 nt, Human
ggcagugaaucugagagccugg

SEQ ID NO: 123389 - RNA, 22 nt, Human
cuugugcaaauccucgagcaca

SEQ ID NO: 123390 - RNA, 22 nt, Human
gcagauggcucagacacugggg

SEQ ID NO: 123391 - RNA, 22 nt, Human
gggcagguggcaaagccagagg

SEQ ID NO: 123392 - RNA, 18 nt, Human
gugagcagagagcaucac

SEQ ID NO: 123393 - RNA, 18 nt, Human
gauggaaaguguaugagu

SEQ ID NO: 123394 - RNA, 22 nt, Human
augcuguggggagugaggguag

SEQ ID NO: 123395 - RNA, 22 nt, Human
ugaggcaguauuuuagugacuu

SEQ ID NO: 123396 - RNA, 22 nt, Human
gggcugagugggccucuuacuu

SEQ ID NO: 123397 - RNA, 22 nt, Human
uuaguuuucccaucuuuauggu

SEQ ID NO: 123398 - RNA, 23 nt, Human
gacacaggagcacccagcugagc

SEQ ID NO: 123399 - RNA, 22 nt, Human
aucacaucgaggagcaaucaga

SEQ ID NO: 123400 - RNA, 22 nt, Human
acacugugcagauucccuguga

SEQ ID NO: 123401 - RNA, 20 nt, Human
agaaggcuccuuuugccaag

SEQ ID NO: 123402 - RNA, 22 nt, Human
ggcagcacgacaggaguggaag

SEQ ID NO: 123403 - RNA, 22 nt, Human
ggcagggagagcaugcugauaa

SEQ ID NO: 123404 - RNA, 22 nt, Human
augcaaaugcuagagaauguug

SEQ ID NO: 123405 - RNA, 22 nt, Human
ugcugugcaaaggugaugugag

SEQ ID NO: 123406 - RNA, 22 nt, Human
guauaugagaaccauggaggug

SEQ ID NO: 123407 - RNA, 19 nt, Human
agggcuaggcacauagggc

SEQ ID NO: 123408 - RNA, 22 nt, Human
uggcagagacuccuccugggag

SEQ ID NO: 123409 - RNA, 22 nt, Human
uggcugcaguucacaggagcaa

SEQ ID NO: 123410 - RNA, 22 nt, Human
gagccaccuucaacucaggaau

SEQ ID NO: 123411 - RNA, 22 nt, Human
accagagcucuucagcacagga

SEQ ID NO: 123412 - RNA, 22 nt, Human
ucauuuguucaucugcucuucu

SEQ ID NO: 123413 - RNA, 22 nt, Human
caaaugcaggucagcagguguc

SEQ ID NO: 123414 - RNA, 22 nt, Human
uaagacaucauuaaacagcaau

SEQ ID NO: 123415 - RNA, 22 nt, Human
uaugcauagugauuuagaacag

SEQ ID NO: 123416 - RNA, 22 nt, Human
uggggcucaugccugcuggaac

SEQ ID NO: 123417 - RNA, 22 nt, Human
ggaggggagguccagcugaucu

SEQ ID NO: 123418 - RNA, 22 nt, Human
acacaucagaaauaugaaugag

SEQ ID NO: 123419 - RNA, 22 nt, Human
uggcaagagggaugcaagguuu

SEQ ID NO: 123420 - RNA, 22 nt, Human
cagaagcaaaugccuugcugag

SEQ ID NO: 123421 - RNA, 22 nt, Human
caggcagcagccacucugguau

SEQ ID NO: 123422 - RNA, 22 nt, Human
caguccugugucccuugguggg

SEQ ID NO: 123423 - RNA, 22 nt, Human
ucuuuccauggccacacagucu

SEQ ID NO: 123424 - RNA, 22 nt, Human
agcagggcaugaauaaggguuu

SEQ ID NO: 123425 - RNA, 22 nt, Human
acccaggaugauaauguucaca

SEQ ID NO: 123426 - RNA, 22 nt, Human
gcugaggguaacacuucgggau

SEQ ID NO: 123427 - RNA, 22 nt, Human
gggcaggaggcuaauucugcau

SEQ ID NO: 123428 - RNA, 22 nt, Human
agagccaguuacaacuguggag

SEQ ID NO: 123429 - RNA, 22 nt, Human
agcagccacagucugggacagg

SEQ ID NO: 123430 - RNA, 22 nt, Human
gaugcugauuuuacuguuuucu

SEQ ID NO: 123431 - RNA, 22 nt, Human
uugcagagugguugugaggauu

SEQ ID NO: 123432 - RNA, 22 nt, Human
uggcagaguaggauggcccugu

SEQ ID NO: 123433 - RNA, 22 nt, Human
cugcccucuagaggaggacuga

SEQ ID NO: 123434 - RNA, 23 nt, Human
gccauggcugccccacaggccuc

SEQ ID NO: 123435 - RNA, 22 nt, Human
auuugaaccacucagaacucau

SEQ ID NO: 123436 - RNA, 22 nt, Human
agaggcugaaugaugucaucau

SEQ ID NO: 123437 - RNA, 20 nt, Human
ggggcagguuuuuauggcua

SEQ ID NO: 123438 - RNA, 22 nt, Human
ggggccagcaauguugaggaau

SEQ ID NO: 123439 - RNA, 22 nt, Human
ucaggcagagggagaagccaag

SEQ ID NO: 123440 - RNA, 22 nt, Human
cucccagguuccgacgccucuu

SEQ ID NO: 123441 - RNA, 22 nt, Human
agguagaggccuccaggcagca

SEQ ID NO: 123442 - RNA, 22 nt, Human
cugcugugagugguucuugccu

SEQ ID NO: 123443 - RNA, 22 nt, Human
gagugcaguaucuucugugucc

SEQ ID NO: 123444 - RNA, 22 nt, Human
augcggugaauugacuguuucu

SEQ ID NO: 123445 - RNA, 22 nt, Human
gguccagggaacuuugaaggau

SEQ ID NO: 123446 - RNA, 22 nt, Human
auuaaauuuucacuaggcuccc

SEQ ID NO: 123447 - RNA, 22 nt, Human
ggugaggaauuggggacugacc

SEQ ID NO: 123448 - RNA, 22 nt, Human
acgugauauauuuacuucccca

SEQ ID NO: 123449 - RNA, 23 nt, Human
ugagaagccaggggagcgugagg

SEQ ID NO: 123450 - RNA, 22 nt, Human
uugauacaugcucuagaguuga

SEQ ID NO: 123451 - RNA, 22 nt, Human
ugccaggcccucccacagauua

SEQ ID NO: 123452 - RNA, 22 nt, Human
auuacaugagagaauguaaaua

SEQ ID NO: 123453 - RNA, 22 nt, Human
uuuauauccaucuuugaaguaa

SEQ ID NO: 123454 - RNA, 22 nt, Human
gaggccugucgcuaggccucug

SEQ ID NO: 123455 - RNA, 22 nt, Human
agggccagccaggcccuacaaa

SEQ ID NO: 123456 - RNA, 22 nt, Human
ucaguggauuggaugagaucug

SEQ ID NO: 123457 - RNA, 22 nt, Human
agccuggcuaaauucucccaug

SEQ ID NO: 123458 - RNA, 22 nt, Human
cggcugagcagugcugauggaa

SEQ ID NO: 123459 - RNA, 19 nt, Human
cagagcagugguuccugaa

SEQ ID NO: 123460 - RNA, 22 nt, Human
uggcagaguggaccauacucaa

SEQ ID NO: 123461 - RNA, 22 nt, Human
uaacauugucaguucaacugcu

SEQ ID NO: 123462 - RNA, 22 nt, Human
aggcugaaaacgagauggcaau

SEQ ID NO: 123463 - RNA, 22 nt, Human
auuuccaaaaccacuuauugcc

SEQ ID NO: 123464 - RNA, 22 nt, Human
auaacauggaguuugucauuua

SEQ ID NO: 123465 - RNA, 18 nt, Human
aggcaggugcuggaaguc

SEQ ID NO: 123466 - RNA, 20 nt, Human
aguggggagucaggagugcc

SEQ ID NO: 123467 - RNA, 22 nt, Human
caccagguggaaaugucacagc

SEQ ID NO: 123468 - RNA, 22 nt, Human
uugggggaagaggauagacagu

SEQ ID NO: 123469 - RNA, 22 nt, Human
ccacuggcauccagcugccauc

SEQ ID NO: 123470 - RNA, 22 nt, Human
acaucuguuugagaaaaagaag

SEQ ID NO: 123471 - RNA, 22 nt, Human
cauggcagaaaccugagcugcu

SEQ ID NO: 123472 - RNA, 22 nt, Human
uacuucaugaguuaauaugcag

SEQ ID NO: 123473 - RNA, 22 nt, Human
agaguccauaugugggaggagu

SEQ ID NO: 123474 - RNA, 22 nt, Human
acuuucuauucccacagagaua

SEQ ID NO: 123475 - RNA, 22 nt, Human
agggccagaugaagccacaagc

SEQ ID NO: 123476 - RNA, 22 nt, Human
acagggcagagggcaguuggua

SEQ ID NO: 123477 - RNA, 18 nt, Human
cccagugcucacugccuc

SEQ ID NO: 123478 - RNA, 22 nt, Human
cagcugaagaaagagugguuag

SEQ ID NO: 123479 - RNA, 22 nt, Human
ggaggcaggaaagacagguuca

SEQ ID NO: 123480 - RNA, 22 nt, Human
auaacagugaccucucagcacc

SEQ ID NO: 123481 - RNA, 22 nt, Human
ggaggaagcacacggcuuguau

SEQ ID NO: 123482 - RNA, 22 nt, Human
ccuggccagccagggcuggggu

SEQ ID NO: 123483 - RNA, 22 nt, Human
ggcugugcuuuguuagguuguc

SEQ ID NO: 123484 - RNA, 22 nt, Human
acacuugauaggucaaaucagu

SEQ ID NO: 123485 - RNA, 22 nt, Human
cagggcuguggaaaacuggugc

SEQ ID NO: 123486 - RNA, 22 nt, Human
gaggaggcacuugagcagaugu

SEQ ID NO: 123487 - RNA, 22 nt, Human
ucauuuguggaagugauugugg

SEQ ID NO: 123488 - RNA, 22 nt, Human
ccagggcagaaaaagagggaau

SEQ ID NO: 123489 - RNA, 22 nt, Human
agccaggcgggucuuugcuccu

SEQ ID NO: 123490 - RNA, 21 nt, Human
uuucaauguguucuuuguagu

SEQ ID NO: 123491 - RNA, 22 nt, Human
uguacauacauagauauacaca

SEQ ID NO: 123492 - RNA, 22 nt, Human
ucaccacugaacagaccuuugg

SEQ ID NO: 123493 - RNA, 22 nt, Human
cagaggaaaugggaaggagaua

SEQ ID NO: 123494 - RNA, 22 nt, Human
ggagaagcagcuucuugaugaa

SEQ ID NO: 123495 - RNA, 20 nt, Human
acauuugaagucgcauuucu

SEQ ID NO: 123496 - RNA, 22 nt, Human
aaaauugagagucuugugcaag

SEQ ID NO: 123497 - RNA, 22 nt, Human
uuaaagcauguugcuuaacagg

SEQ ID NO: 123498 - RNA, 22 nt, Human
gagggcugauaacaggaauaca

SEQ ID NO: 123499 - RNA, 22 nt, Human
ugaaggcagcaugcacacuagu

SEQ ID NO: 123500 - RNA, 22 nt, Human
uuucuacagcuggugcaacuuu

SEQ ID NO: 123501 - RNA, 22 nt, Human
aaggugucggguuagcucagcc

SEQ ID NO: 123502 - RNA, 22 nt, Human
acacacacaagcagguugugga

SEQ ID NO: 123503 - RNA, 22 nt, Human
agggaaggaaaagcugucgcuu

SEQ ID NO: 123504 - RNA, 22 nt, Human
uucauucuuauuugugaucugg

SEQ ID NO: 123505 - RNA, 17 nt, Human
ucaggcugugccuggua

SEQ ID NO: 123506 - RNA, 22 nt, Human
gugcugagcugcagaugcgcuc

SEQ ID NO: 123507 - RNA, 22 nt, Human
cuggaagugggguuggcuugaa

SEQ ID NO: 123508 - RNA, 22 nt, Human
ugaggcucaaggucugguggag

SEQ ID NO: 123509 - RNA, 22 nt, Human
gagcucagcaaaggucugugug

SEQ ID NO: 123510 - RNA, 22 nt, Human
agcagggccugagugaccuaac

SEQ ID NO: 123511 - RNA, 20 nt, Human
aggaggggauagaaucaaag

SEQ ID NO: 123512 - RNA, 19 nt, Human
agcuguggggccuagcacc

SEQ ID NO: 123513 - RNA, 20 nt, Human
uggcagaguugucccaccca

SEQ ID NO: 123514 - RNA, 22 nt, Human
ucaaaggcugcuugucuucugg

SEQ ID NO: 123515 - RNA, 17 nt, Human
aaguccagccugcagcu

SEQ ID NO: 123516 - RNA, 22 nt, Human
aaggcaggaugcggacccaucu

SEQ ID NO: 123517 - RNA, 22 nt, Human
acauggaucaaccuauuuucuu

SEQ ID NO: 123518 - RNA, 22 nt, Human
acagggcagguggcuacugguc

SEQ ID NO: 123519 - RNA, 22 nt, Human
ugccaggcucagccccuaucuu

SEQ ID NO: 123520 - RNA, 22 nt, Human
uagagcaguguuguccaucaga

SEQ ID NO: 123521 - RNA, 22 nt, Human
cagugcagccaaggacaggcac

SEQ ID NO: 123522 - RNA, 22 nt, Human
uuuauuggauauuuacaagaua

SEQ ID NO: 123523 - RNA, 22 nt, Human
cuguuucauagaguugugaauu

SEQ ID NO: 123524 - RNA, 22 nt, Human
agccaggccuuuucucaagguu

SEQ ID NO: 123525 - RNA, 22 nt, Human
guggaggguuugcaaugugcag

SEQ ID NO: 123526 - RNA, 22 nt, Human
ugaggcucuccaagcagaugag

SEQ ID NO: 123527 - RNA, 22 nt, Human
cccuauuagugaccacaucaua

SEQ ID NO: 123528 - RNA, 22 nt, Human
ccacauuuuugauacucucacu

SEQ ID NO: 123529 - RNA, 22 nt, Human
uggaggcagucaaaugacugac

SEQ ID NO: 123530 - RNA, 22 nt, Human
gcugugcagccaagugccucug

SEQ ID NO: 123531 - RNA, 22 nt, Human
cugcugugugaccauggacagg

SEQ ID NO: 123532 - RNA, 19 nt, Human
aguggcagaucuggaagua

SEQ ID NO: 123533 - RNA, 22 nt, Human
agcagggcuccugaaagccgcg

SEQ ID NO: 123534 - RNA, 22 nt, Human
ucagaggaucaugucccuacuc

SEQ ID NO: 123535 - RNA, 22 nt, Human
gcaaccauuuggaauguaaaaa

SEQ ID NO: 123536 - RNA, 20 nt, Human
ggcagccaaucagcgugccg

SEQ ID NO: 123537 - RNA, 22 nt, Human
aggugucuuugcggcccgccgc

SEQ ID NO: 123538 - RNA, 22 nt, Human
augagcaaggcuuugugauagu

SEQ ID NO: 123539 - RNA, 22 nt, Human
ugccaggcccagcuccagagcu

SEQ ID NO: 123540 - RNA, 22 nt, Human
ucugggagggagccucagaauc

SEQ ID NO: 123541 - RNA, 22 nt, Human
gucaaacaaauuaacauaucca

SEQ ID NO: 123542 - RNA, 22 nt, Human
ugaguccauguggaggggaggu

SEQ ID NO: 123543 - RNA, 22 nt, Human
uucugaaugauagucuugaacu

SEQ ID NO: 123544 - RNA, 22 nt, Human
uggcagugggaagcuggaaguc

SEQ ID NO: 123545 - RNA, 22 nt, Human
ucagaggacaagcucccuggug

SEQ ID NO: 123546 - RNA, 22 nt, Human
caaggauucucacuagacuaga

SEQ ID NO: 123547 - RNA, 22 nt, Human
cuuguagaauugaaauggucuc

SEQ ID NO: 123548 - RNA, 21 nt, Human
ugaggcucaucuuauguggcu

SEQ ID NO: 123549 - RNA, 22 nt, Human
cuggcuuucugaacaucaguga

SEQ ID NO: 123550 - RNA, 23 nt, Human
gaggccacauuccccugcuugag

SEQ ID NO: 123551 - RNA, 22 nt, Human
guccugggcggagggcugcugu

SEQ ID NO: 123552 - RNA, 20 nt, Human
cugcccagccacugagggau

SEQ ID NO: 123553 - RNA, 22 nt, Human
ugaggcagugcugggaagccug

SEQ ID NO: 123554 - RNA, 22 nt, Human
agggaagugaaugacagauauc

SEQ ID NO: 123555 - RNA, 22 nt, Human
gcagaggacagggauuuagauu

SEQ ID NO: 123556 - RNA, 22 nt, Human
aggagcagaccguaguccugca

SEQ ID NO: 123557 - RNA, 22 nt, Human
gggaauuauagcugucacaggc

SEQ ID NO: 123558 - RNA, 22 nt, Human
gcgagggcacgcgguugaaggc

SEQ ID NO: 123559 - RNA, 22 nt, Human
accauucugguccauacuguuc

SEQ ID NO: 123560 - RNA, 22 nt, Human
auuuacauuuauuugagaaggu

SEQ ID NO: 123561 - RNA, 22 nt, Human
gcuguggcugaagaugcaggga

SEQ ID NO: 123562 - RNA, 22 nt, Human
ggcagaggugacagugucuuuu

SEQ ID NO: 123563 - RNA, 23 nt, Human
uuaugcaagcuuccuggucucag

SEQ ID NO: 123564 - RNA, 22 nt, Human
uagggguuaccuuuagcaucuc

SEQ ID NO: 123565 - RNA, 21 nt, Human
gcaggcuggucaaaccucagu

SEQ ID NO: 123566 - RNA, 22 nt, Human
aaguacauuauaugagcagaau

SEQ ID NO: 123567 - RNA, 22 nt, Human
caugcugugcaucuugaugacc

SEQ ID NO: 123568 - RNA, 22 nt, Human
aggacagagggaccagagccca

SEQ ID NO: 123569 - RNA, 18 nt, Human
cugaggcuggcaggagcc

SEQ ID NO: 123570 - RNA, 22 nt, Human
ugaagccacuuuccagaaucac

SEQ ID NO: 123571 - RNA, 22 nt, Human
uguggcaggaagagcuucugag

SEQ ID NO: 123572 - RNA, 22 nt, Human
aggcucagcaucugauucauau

SEQ ID NO: 123573 - RNA, 22 nt, Human
accgggaaguccugcacugggc

SEQ ID NO: 123574 - RNA, 22 nt, Human
ggcagccagcaaugagaaguuu

SEQ ID NO: 123575 - RNA, 22 nt, Human
gugagggcagcuuggucagugu

SEQ ID NO: 123576 - RNA, 22 nt, Human
uccuuugguucucuaagaugcu

SEQ ID NO: 123577 - RNA, 22 nt, Human
uggaaauacuugccauaaaacu

SEQ ID NO: 123578 - RNA, 22 nt, Human
uuagagcugauaguacacuggu

SEQ ID NO: 123579 - RNA, 22 nt, Human
aaaacuuagcuaggcaaguuuu

SEQ ID NO: 123580 - RNA, 23 nt, Human
agaguccacaagauuuuccagug

SEQ ID NO: 123581 - RNA, 22 nt, Human
gauacaguguguuaacgagaaa

SEQ ID NO: 123582 - RNA, 22 nt, Human
ucugucauuucaauaugguuaa

SEQ ID NO: 123583 - RNA, 22 nt, Human
gggcaugagagggcagcuggca

SEQ ID NO: 123584 - RNA, 22 nt, Human
gugggcagugguuugcgcgguc

SEQ ID NO: 123585 - RNA, 22 nt, Human
uagcuuccagaauuuaauguca

SEQ ID NO: 123586 - RNA, 22 nt, Human
uggagaaggggcagggucucca

SEQ ID NO: 123587 - RNA, 22 nt, Human
uacaucauguaagcagaaucau

SEQ ID NO: 123588 - RNA, 22 nt, Human
agaagccagauuguagugggac

SEQ ID NO: 123589 - RNA, 22 nt, Human
gcaccaggcagcugagcaggcc

SEQ ID NO: 123590 - RNA, 22 nt, Human
acacagauuucacuggaauaga

SEQ ID NO: 123591 - RNA, 22 nt, Human
uugaauucauuucucauugagu

SEQ ID NO: 123592 - RNA, 22 nt, Human
uaguggaggguguagcugcugg

SEQ ID NO: 123593 - RNA, 22 nt, Human
gaggcucaaaccuggacagagc

SEQ ID NO: 123594 - RNA, 22 nt, Human
ugggcaggauaauaucucaugu

SEQ ID NO: 123595 - RNA, 18 nt, Human
aaagaaggauuggagagc

SEQ ID NO: 123596 - RNA, 22 nt, Human
aggcucagugauguaaaauaua

SEQ ID NO: 123597 - RNA, 22 nt, Human
aggcgcagaaggccaggggccu

SEQ ID NO: 123598 - RNA, 22 nt, Human
gccagggcugugcagguuuguu

SEQ ID NO: 123599 - RNA, 22 nt, Human
uagcugagagcucacuugagga

SEQ ID NO: 123600 - RNA, 22 nt, Human
cauuugaucuccugaauaaaca

SEQ ID NO: 123601 - RNA, 22 nt, Human
agaggcagccguauuucaaagg

SEQ ID NO: 123602 - RNA, 22 nt, Human
aguggcagagguugacugcagu

SEQ ID NO: 123603 - RNA, 22 nt, Human
gcagaggcucuuuaaugcuuag

SEQ ID NO: 123604 - RNA, 22 nt, Human
agccaggcucaaggccugcucc

SEQ ID NO: 123605 - RNA, 22 nt, Human
uggcugcagacaccuauggcag

SEQ ID NO: 123606 - RNA, 22 nt, Human
cacaucauagagacucaaucca

SEQ ID NO: 123607 - RNA, 22 nt, Human
uggaaauacaagaaguauguca

SEQ ID NO: 123608 - RNA, 22 nt, Human
cugccaggccucaucccagcca

SEQ ID NO: 123609 - RNA, 22 nt, Human
uacaucauggcuucaugcugca

SEQ ID NO: 123610 - RNA, 22 nt, Human
aggcucagggacucccucccuc

SEQ ID NO: 123611 - RNA, 17 nt, Human
cugaagauaauggcaac

SEQ ID NO: 123612 - RNA, 22 nt, Human
acaggaaguuuggaaagccuca

SEQ ID NO: 123613 - RNA, 22 nt, Human
agaggauuguuacugauuagcu

SEQ ID NO: 123614 - RNA, 18 nt, Human
aacaggauccuccacuuc

SEQ ID NO: 123615 - RNA, 22 nt, Human
agggcugacacaccuuauccuc

SEQ ID NO: 123616 - RNA, 21 nt, Human
uggcagaguugaguaguuaug

SEQ ID NO: 123617 - RNA, 22 nt, Human
ggcugugagcaggcagaaugcu

SEQ ID NO: 123618 - RNA, 22 nt, Human
gggcagguggcagggucucugg

SEQ ID NO: 123619 - RNA, 22 nt, Human
ggcagccaugucccagggcuuc

SEQ ID NO: 123620 - RNA, 22 nt, Human
gcacagugauaggcaguugugc

SEQ ID NO: 123621 - RNA, 22 nt, Human
ccaaaggccaggcacugagguu

SEQ ID NO: 123622 - RNA, 21 nt, Human
uacaagauagagguaauauau

SEQ ID NO: 123623 - RNA, 22 nt, Human
cguuuauuuugaagauuccacu

SEQ ID NO: 123624 - RNA, 22 nt, Human
gaggccagcgcgcagcacuuuu

SEQ ID NO: 123625 - RNA, 22 nt, Human
uuauuagguuauucucuguacu

SEQ ID NO: 123626 - RNA, 22 nt, Human
uggcugagggggcaguucagga

SEQ ID NO: 123627 - RNA, 22 nt, Human
aggcaggcuagucgcuugagcc

SEQ ID NO: 123628 - RNA, 22 nt, Human
acucagaggcagcugcucaccc

SEQ ID NO: 123629 - RNA, 22 nt, Human
gaguccaguaguuaggacagag

SEQ ID NO: 123630 - RNA, 22 nt, Human
gaugcaaagauaaaacagacgc

SEQ ID NO: 123631 - RNA, 22 nt, Human
acaggcagguaauuuacauauu

SEQ ID NO: 123632 - RNA, 22 nt, Human
ucauccaguaccauggaaggca

SEQ ID NO: 123633 - RNA, 22 nt, Human
ugaugacagcaaaaaaugcuag

SEQ ID NO: 123634 - RNA, 22 nt, Human
cuguugucuccucucagauuau

SEQ ID NO: 123635 - RNA, 22 nt, Human
aagcauuugguucugaagacuc

SEQ ID NO: 123636 - RNA, 18 nt, Human
ccagguggugacagagau

SEQ ID NO: 123637 - RNA, 22 nt, Human
aagugauuugcaugcuuaauuc

SEQ ID NO: 123638 - RNA, 22 nt, Human
acauaugaguacuauacagugc

SEQ ID NO: 123639 - RNA, 23 nt, Human
ugaaacauuuaggguagaauuuc

SEQ ID NO: 123640 - RNA, 22 nt, Human
ccugcagguugcagaggcggaa

SEQ ID NO: 123641 - RNA, 22 nt, Human
gaaaccagcuagaggcagaggg

SEQ ID NO: 123642 - RNA, 22 nt, Human
ugagaggcagaauggugccugc

SEQ ID NO: 123643 - RNA, 22 nt, Human
cuaguucuagaucccugaggaa

SEQ ID NO: 123644 - RNA, 22 nt, Human
aggccagggucccacacucgca

SEQ ID NO: 123645 - RNA, 22 nt, Human
ucaggcagaauuaucaaaagau

SEQ ID NO: 123646 - RNA, 22 nt, Human
aggagaaguaaggcuagaugau

SEQ ID NO: 123647 - RNA, 22 nt, Human
gggcaagcacagcgagcgugcg

SEQ ID NO: 123648 - RNA, 22 nt, Human
acugugcaaaugacaggcacac

SEQ ID NO: 123649 - RNA, 19 nt, Human
cuuugucagaacaugcuuc

SEQ ID NO: 123650 - RNA, 22 nt, Human
agcagccauagauagcaugcaa

SEQ ID NO: 123651 - RNA, 20 nt, Human
uauuuguauuugggaaaguu

SEQ ID NO: 123652 - RNA, 22 nt, Human
acacauuugcauaauaccucau

SEQ ID NO: 123653 - RNA, 22 nt, Human
cagaccugaggagcacugagcc

SEQ ID NO: 123654 - RNA, 22 nt, Human
gggagccacaguuuauagugau

SEQ ID NO: 123655 - RNA, 22 nt, Human
ccucccugcgcuccugcggcgg

SEQ ID NO: 123656 - RNA, 22 nt, Human
caugucuuauauccugucuuca

SEQ ID NO: 123657 - RNA, 22 nt, Human
auguacauaaaauguauaauga

SEQ ID NO: 123658 - RNA, 22 nt, Human
cugcagugcaagcccagaugga

SEQ ID NO: 123659 - RNA, 22 nt, Human
uguuucauguggacauaguugu

SEQ ID NO: 123660 - RNA, 22 nt, Human
auccuucagcugcccuguuacc

SEQ ID NO: 123661 - RNA, 22 nt, Human
gcucccagcaauugaggcagcc

SEQ ID NO: 123662 - RNA, 22 nt, Human
ucugucauaagugcugaaguau

SEQ ID NO: 123663 - RNA, 22 nt, Human
uaguccaggacaaucuucauau

SEQ ID NO: 123664 - RNA, 22 nt, Human
aaagugccugacucauaguuag

SEQ ID NO: 123665 - RNA, 22 nt, Human
ccagcugucacucagaaaggcc

SEQ ID NO: 123666 - RNA, 22 nt, Human
ugagcacagcuuucacuagaaa

SEQ ID NO: 123667 - RNA, 22 nt, Human
agaggcagaaguguucaaaccc

SEQ ID NO: 123668 - RNA, 22 nt, Human
aauguuaguaacuugaguauuu

SEQ ID NO: 123669 - RNA, 22 nt, Human
ucagggcaaagggcagaguuug

SEQ ID NO: 123670 - RNA, 22 nt, Human
ccagggcacguugggacaguac

SEQ ID NO: 123671 - RNA, 22 nt, Human
gccaggcuggccagcaccuucu

SEQ ID NO: 123672 - RNA, 18 nt, Human
agcagggcauuuugccau

SEQ ID NO: 123673 - RNA, 17 nt, Human
ucucuuucccuuucugc

SEQ ID NO: 123674 - RNA, 22 nt, Human
cuacaugaacucuuaagucaca

SEQ ID NO: 123675 - RNA, 18 nt, Human
cacaggcaggugauaggu

SEQ ID NO: 123676 - RNA, 22 nt, Human
acaguuugguugcuacaguaaa

SEQ ID NO: 123677 - RNA, 22 nt, Human
uuucaaauagaaucuuuccaaa

SEQ ID NO: 123678 - RNA, 22 nt, Human
acacugugagcugaagggcugc

SEQ ID NO: 123679 - RNA, 22 nt, Human
ugaggcagcaauugauuauuca

SEQ ID NO: 123680 - RNA, 22 nt, Human
acagugcacauccugagugauu

SEQ ID NO: 123681 - RNA, 22 nt, Human
uuuauaugguugacuaugaguu

SEQ ID NO: 123682 - RNA, 21 nt, Human
cccaagggaggcaggauaagg

SEQ ID NO: 123683 - RNA, 22 nt, Human
ugggcagcagcaaagccagacu

SEQ ID NO: 123684 - RNA, 22 nt, Human
aucauacagccuuuguuagugu

SEQ ID NO: 123685 - RNA, 22 nt, Human
accaggagccauagagucaggc

SEQ ID NO: 123686 - RNA, 22 nt, Human
uccaugccaggcagucgaugca

SEQ ID NO: 123687 - RNA, 22 nt, Human
agggccagaaucccucagucua

SEQ ID NO: 123688 - RNA, 22 nt, Human
ggggcagggagguuaucgccga

SEQ ID NO: 123689 - RNA, 22 nt, Human
ggguuggggcccagcagucugc

SEQ ID NO: 123690 - RNA, 22 nt, Human
uuaugcaaggacuuauuacagu

SEQ ID NO: 123691 - RNA, 22 nt, Human
gcaguggauccaaugguaucuu

SEQ ID NO: 123692 - RNA, 22 nt, Human
uggaggucugcaaggcgcugga

SEQ ID NO: 123693 - RNA, 22 nt, Human
gcugaggccucagaaggcugag

SEQ ID NO: 123694 - RNA, 22 nt, Human
agaagccauaguaucucagggu

SEQ ID NO: 123695 - RNA, 22 nt, Human
auucauuuagguauucacuuac

SEQ ID NO: 123696 - RNA, 22 nt, Human
ugaggcaggaguuaaugugcuc

SEQ ID NO: 123697 - RNA, 22 nt, Human
ucauucaugaggugcuagugcu

SEQ ID NO: 123698 - RNA, 22 nt, Human
agcagggcugcagugugucuuu

SEQ ID NO: 123699 - RNA, 22 nt, Human
uacaugcacaugaacaugugug

SEQ ID NO: 123700 - RNA, 20 nt, Human
caucagugccugacaggucc

SEQ ID NO: 123701 - RNA, 22 nt, Human
cauaauuugauaugcuugaugg

SEQ ID NO: 123702 - RNA, 22 nt, Human
ggcagugaaugaaacagaggcu

SEQ ID NO: 123703 - RNA, 22 nt, Human
aguucaggcauaaggcaugaac

SEQ ID NO: 123704 - RNA, 22 nt, Human
aggcaagcauugggaacagggc

SEQ ID NO: 123705 - RNA, 22 nt, Human
uacaggaaguuacagacuauga

SEQ ID NO: 123706 - RNA, 19 nt, Human
agggccaggauucuggaac

SEQ ID NO: 123707 - RNA, 22 nt, Human
uuuugucagugagaacagaguu

SEQ ID NO: 123708 - RNA, 22 nt, Human
acccaggagccgugagagguua

SEQ ID NO: 123709 - RNA, 22 nt, Human
cagaggcauuacugaaaaggug

SEQ ID NO: 123710 - RNA, 23 nt, Human
ugguccugguugaggugggcccc

SEQ ID NO: 123711 - RNA, 22 nt, Human
agucaggauaugccuugugggc

SEQ ID NO: 123712 - RNA, 22 nt, Human
gccacccugagcugggccaggg

SEQ ID NO: 123713 - RNA, 22 nt, Human
uggaaauaugcuccauucuuuu

SEQ ID NO: 123714 - RNA, 22 nt, Human
aaagccacguggccuggggagc

SEQ ID NO: 123715 - RNA, 22 nt, Human
cgaggcagggaagcugcaaaag

SEQ ID NO: 123716 - RNA, 22 nt, Human
cagggcugugcccaucuucccc

SEQ ID NO: 123717 - RNA, 22 nt, Human
aacaugaaaacuaccugugauu

SEQ ID NO: 123718 - RNA, 22 nt, Human
uuuauaugaaagugaccagugg

SEQ ID NO: 123719 - RNA, 22 nt, Human
caguggaaacuaugcugcugga

SEQ ID NO: 123720 - RNA, 22 nt, Human
acaugggaucaaugaggcaggc

SEQ ID NO: 123721 - RNA, 22 nt, Human
uauuauuauauuggaugagacu

SEQ ID NO: 123722 - RNA, 19 nt, Human
ucagggcaguccggucccc

SEQ ID NO: 123723 - RNA, 18 nt, Human
cggcagagugcuucuagc

SEQ ID NO: 123724 - RNA, 22 nt, Human
ggaaagccaggugcucuggugu

SEQ ID NO: 123725 - RNA, 22 nt, Human
agccagugaugaagacucugga

SEQ ID NO: 123726 - RNA, 22 nt, Human
acauucuucuugugaauuuacu

SEQ ID NO: 123727 - RNA, 22 nt, Human
ggcagugagucccggagaggcc

SEQ ID NO: 123728 - RNA, 22 nt, Human
ggguggucuggcaggcuggaaa

SEQ ID NO: 123729 - RNA, 22 nt, Human
ucugccuguugcuagaauguca

SEQ ID NO: 123730 - RNA, 22 nt, Human
aggagugggggcgagaaguuaa

SEQ ID NO: 123731 - RNA, 22 nt, Human
ucuauguaaagccauauugaua

SEQ ID NO: 123732 - RNA, 18 nt, Human
cagggcuguggggucacu

SEQ ID NO: 123733 - RNA, 22 nt, Human
gugaagaaggcaauacaaagaa

SEQ ID NO: 123734 - RNA, 17 nt, Human
ccaggugggaggugggg

SEQ ID NO: 123735 - RNA, 20 nt, Human
ucccaggcugggcuccagcu

SEQ ID NO: 123736 - RNA, 22 nt, Human
uaguaugggaagaacuuuguag

SEQ ID NO: 123737 - RNA, 22 nt, Human
augcugagacuggagcagcugg

SEQ ID NO: 123738 - RNA, 22 nt, Human
ucagaggauuggacuuuuaugu

SEQ ID NO: 123739 - RNA, 20 nt, Human
caggaggcaaggucaagguc

SEQ ID NO: 123740 - RNA, 20 nt, Human
ucacauccucucccaacaug

SEQ ID NO: 123741 - RNA, 22 nt, Human
uuuucucaggugcuuaucuaag

SEQ ID NO: 123742 - RNA, 22 nt, Human
gggagaaggaggacugugcugu

SEQ ID NO: 123743 - RNA, 22 nt, Human
gccaggcauuauuccgaucccu

SEQ ID NO: 123744 - RNA, 22 nt, Human
cgggcagugcccagcggggcag

SEQ ID NO: 123745 - RNA, 22 nt, Human
aggcgcaggguuuggacccagg

SEQ ID NO: 123746 - RNA, 22 nt, Human
auuaaauuagcaaacugugaaa

SEQ ID NO: 123747 - RNA, 16 nt, Human
gagaagagcccggcag

SEQ ID NO: 123748 - RNA, 22 nt, Human
cugcugugugcuuacuuggguu

SEQ ID NO: 123749 - RNA, 22 nt, Human
cagggcugaagaaauucaaaag

SEQ ID NO: 123750 - RNA, 22 nt, Human
ugaagccaucccucagauggcc

SEQ ID NO: 123751 - RNA, 22 nt, Human
uagcaguauauuuuaaggaagc

SEQ ID NO: 123752 - RNA, 22 nt, Human
agugugagccuacaggccaaag

SEQ ID NO: 123753 - RNA, 22 nt, Human
ugaggcagguggauuacaaggu

SEQ ID NO: 123754 - RNA, 22 nt, Human
ucgccagggaugcuguaaggaa

SEQ ID NO: 123755 - RNA, 22 nt, Human
cagcacagggacaauagcagau

SEQ ID NO: 123756 - RNA, 22 nt, Human
ggagcugugcugggugaucagg

SEQ ID NO: 123757 - RNA, 18 nt, Human
uuacacuagccuugguuc

SEQ ID NO: 123758 - RNA, 22 nt, Human
aagggugggcccuggcagccau

SEQ ID NO: 123759 - RNA, 22 nt, Human
cagggcagggccacacccccug

SEQ ID NO: 123760 - RNA, 20 nt, Human
aggcugggguguuuugccca

SEQ ID NO: 123761 - RNA, 22 nt, Human
ucuaauuuuaggcauuuguuca

SEQ ID NO: 123762 - RNA, 19 nt, Human
cagagcugcuggccucguc

SEQ ID NO: 123763 - RNA, 19 nt, Human
caguggagauuggaggagg

SEQ ID NO: 123764 - RNA, 22 nt, Human
gaggcaggcccugaaugaguca

SEQ ID NO: 123765 - RNA, 22 nt, Human
ucuuacauauagcaugaguaca

SEQ ID NO: 123766 - RNA, 22 nt, Human
gcagagugagauaugaacccag

SEQ ID NO: 123767 - RNA, 22 nt, Human
uccuggcccgaucccugugaag

SEQ ID NO: 123768 - RNA, 22 nt, Human
uccuggccuugcuccugaugcc

SEQ ID NO: 123769 - RNA, 22 nt, Human
agggcuagaguugagaugggga

SEQ ID NO: 123770 - RNA, 22 nt, Human
cagcugugagcagccaguugcc

SEQ ID NO: 123771 - RNA, 22 nt, Human
caggaaggcgcggcugugccug

SEQ ID NO: 123772 - RNA, 23 nt, Human
agggaaauacugcaauuuuugga

SEQ ID NO: 123773 - RNA, 22 nt, Human
uggagaauucuauguugagggg

SEQ ID NO: 123774 - RNA, 19 nt, Human
gucagcaccauggacaggg

SEQ ID NO: 123775 - RNA, 22 nt, Human
aaugggaagccagaagacaagg

SEQ ID NO: 123776 - RNA, 22 nt, Human
caaaugcaggucauaaccugag

SEQ ID NO: 123777 - RNA, 22 nt, Human
cucauuuauguaaugauuaagg

SEQ ID NO: 123778 - RNA, 22 nt, Human
gugcugugucuaucaggaauaa

SEQ ID NO: 123779 - RNA, 22 nt, Human
agggcugaagggaggugcucau

SEQ ID NO: 123780 - RNA, 22 nt, Human
gggaggaaaugugcagcgaauu

SEQ ID NO: 123781 - RNA, 22 nt, Human
gaaggccugugguagugagacg

SEQ ID NO: 123782 - RNA, 22 nt, Human
aguggcagagaccccagccagc

SEQ ID NO: 123783 - RNA, 22 nt, Human
cauuaaacaaccuugaaucaau

SEQ ID NO: 123784 - RNA, 22 nt, Human
ggggaggaagcuggaacacggg

SEQ ID NO: 123785 - RNA, 22 nt, Human
auuauaugugggauagaauuua

SEQ ID NO: 123786 - RNA, 22 nt, Human
agguauauugaaugcuuacuua

SEQ ID NO: 123787 - RNA, 20 nt, Human
gcaugaggaaucauugcagc

SEQ ID NO: 123788 - RNA, 22 nt, Human
ggccaggcuggucucagacuuc

SEQ ID NO: 123789 - RNA, 22 nt, Human
aaggagucugggccauucagag

SEQ ID NO: 123790 - RNA, 22 nt, Human
uuuaccaaauagauuaugucag

SEQ ID NO: 123791 - RNA, 22 nt, Human
gagagugaggccugggaaucua

SEQ ID NO: 123792 - RNA, 22 nt, Human
aggcaggucacaugcuuggcga

SEQ ID NO: 123793 - RNA, 22 nt, Human
gaagagcuaaaggcacaggcuu

SEQ ID NO: 123794 - RNA, 22 nt, Human
acccuguaugcuauaucccuaa

SEQ ID NO: 123795 - RNA, 22 nt, Human
agggcagagggugccucaccug

SEQ ID NO: 123796 - RNA, 19 nt, Human
agggucaggacaaggacuu

SEQ ID NO: 123797 - RNA, 22 nt, Human
auuaaauuggacgcugggggaa

SEQ ID NO: 123798 - RNA, 22 nt, Human
acagugauugggguaucugcag

SEQ ID NO: 123799 - RNA, 22 nt, Human
caggcagagucagauuagacuu

SEQ ID NO: 123800 - RNA, 22 nt, Human
uuucugcauauguauguaugga

SEQ ID NO: 123801 - RNA, 22 nt, Human
uuacucagucucccauacauug

SEQ ID NO: 123802 - RNA, 22 nt, Human
gaaggagaggauugugaggcug

SEQ ID NO: 123803 - RNA, 22 nt, Human
aacaguacuggacaaggaguca

SEQ ID NO: 123804 - RNA, 22 nt, Human
ucaguggaacugucugggugag

SEQ ID NO: 123805 - RNA, 22 nt, Human
aauacugccugugagguaacuc

SEQ ID NO: 123806 - RNA, 19 nt, Human
uucauucucuuauuguugu

SEQ ID NO: 123807 - RNA, 22 nt, Human
uucagaaaucgaguuucauguc

SEQ ID NO: 123808 - RNA, 22 nt, Human
gggcagagaaauggacaguugg

SEQ ID NO: 123809 - RNA, 22 nt, Human
accaaaaauuguggggcugaau

SEQ ID NO: 123810 - RNA, 22 nt, Human
ucuuuugugauucuucaguuac

SEQ ID NO: 123811 - RNA, 22 nt, Human
gaguggagaucgugccacugca

SEQ ID NO: 123812 - RNA, 22 nt, Human
ggcugugccucuggcagcacau

SEQ ID NO: 123813 - RNA, 22 nt, Human
gggcugagcacauacugacagc

SEQ ID NO: 123814 - RNA, 22 nt, Human
cuguggcauugccgaggcuggc

SEQ ID NO: 123815 - RNA, 22 nt, Human
cccuuccuccucgccugucaga

SEQ ID NO: 123816 - RNA, 22 nt, Human
aaauggaagcuauuuaugauuc

SEQ ID NO: 123817 - RNA, 22 nt, Human
aggcugaggaucguacuuucca

SEQ ID NO: 123818 - RNA, 22 nt, Human
aguggcaguggggcagggcccu

SEQ ID NO: 123819 - RNA, 22 nt, Human
uagccgggugugguggaacucc

SEQ ID NO: 123820 - RNA, 22 nt, Human
cugagcugagccaaaucugucu

SEQ ID NO: 123821 - RNA, 22 nt, Human
gaggggucacaugggcuggcuu

SEQ ID NO: 123822 - RNA, 22 nt, Human
gugcagugacccuggagagcug

SEQ ID NO: 123823 - RNA, 18 nt, Human
cagaggagagacauucag

SEQ ID NO: 123824 - RNA, 22 nt, Human
agugcagaguacauuuguggca

SEQ ID NO: 123825 - RNA, 22 nt, Human
gaggccagaagucugagaucag

SEQ ID NO: 123826 - RNA, 22 nt, Human
ucaccagggagcuuguccucug

SEQ ID NO: 123827 - RNA, 22 nt, Human
uggaagaauaggauagaagaac

SEQ ID NO: 123828 - RNA, 22 nt, Human
auuacaguaaaugcuacaggca

SEQ ID NO: 123829 - RNA, 22 nt, Human
cauggaacuguauaaaggcacu

SEQ ID NO: 123830 - RNA, 22 nt, Human
aaggugugaagagaugggaaga

SEQ ID NO: 123831 - RNA, 22 nt, Human
uuucacaauuuuaaggagcaaa

SEQ ID NO: 123832 - RNA, 22 nt, Human
uucaucuggucuaguuuuuagu

SEQ ID NO: 123833 - RNA, 22 nt, Human
gaugaggcucaugcacccugcg

SEQ ID NO: 123834 - RNA, 22 nt, Human
auaugaauuuggcuggaaaggu

SEQ ID NO: 123835 - RNA, 22 nt, Human
uacaacaguaaucaagguuuuu

SEQ ID NO: 123836 - RNA, 22 nt, Human
aggaaagcucccaguagggcuc

SEQ ID NO: 123837 - RNA, 22 nt, Human
agcugccccaugagaggcaggu

SEQ ID NO: 123838 - RNA, 22 nt, Human
ggcagaggugaaguucacaagg

SEQ ID NO: 123839 - RNA, 22 nt, Human
aguaaacagaaagcaagaugau

SEQ ID NO: 123840 - RNA, 22 nt, Human
aagccacugagauuucacugca

SEQ ID NO: 123841 - RNA, 22 nt, Human
acuaaaugagauacugucuuca

SEQ ID NO: 123842 - RNA, 22 nt, Human
cauguuaaaauauacauucuga

SEQ ID NO: 123843 - RNA, 22 nt, Human
augcacaggaccacacauaaug

SEQ ID NO: 123844 - RNA, 22 nt, Human
acaacauucuuaaauacacuga

SEQ ID NO: 123845 - RNA, 22 nt, Human
gcagccucagggcacucagaug

SEQ ID NO: 123846 - RNA, 22 nt, Human
gucccaggaguugcugggccuu

SEQ ID NO: 123847 - RNA, 22 nt, Human
ccagagagaaaauggagggcca

SEQ ID NO: 123848 - RNA, 22 nt, Human
cauuugcagagggugacacucu

SEQ ID NO: 123849 - RNA, 22 nt, Human
aaagaacaauguggaaucuccu

SEQ ID NO: 123850 - RNA, 22 nt, Human
gagggcuguggggcaugaccag

SEQ ID NO: 123851 - RNA, 22 nt, Human
cagggcagaaggcacucuacuc

SEQ ID NO: 123852 - RNA, 22 nt, Human
ccagagagucgaugggggacac

SEQ ID NO: 123853 - RNA, 22 nt, Human
gcacauaacugaccacaucuaa

SEQ ID NO: 123854 - RNA, 20 nt, Human
aggcucagagcaguaguaca

SEQ ID NO: 123855 - RNA, 20 nt, Human
cugcuguguuauuguagaac

SEQ ID NO: 123856 - RNA, 22 nt, Human
aacccgggaggcagagguugug

SEQ ID NO: 123857 - RNA, 22 nt, Human
uggagagcgugcuuagcacucu

SEQ ID NO: 123858 - RNA, 22 nt, Human
ucugggggaggaggcauggccc

SEQ ID NO: 123859 - RNA, 20 nt, Human
aaacauucauguacaaguga

SEQ ID NO: 123860 - RNA, 22 nt, Human
uggaaauauuugcucauuaucu

SEQ ID NO: 123861 - RNA, 19 nt, Human
gggcggagccugaccuggg

SEQ ID NO: 123862 - RNA, 22 nt, Human
gcuguggcugaccaccaggggg

SEQ ID NO: 123863 - RNA, 22 nt, Human
aggagucagauuguuugaaugu

SEQ ID NO: 123864 - RNA, 22 nt, Human
agauguggccggcuagggagag

SEQ ID NO: 123865 - RNA, 22 nt, Human
uuucugcucgcucucaaucagg

SEQ ID NO: 123866 - RNA, 22 nt, Human
ggcugugccucaaggcuacuca

SEQ ID NO: 123867 - RNA, 22 nt, Human
uucacuguccugcaacucuaga

SEQ ID NO: 123868 - RNA, 22 nt, Human
agauuaugcuggcugcuacaag

SEQ ID NO: 123869 - RNA, 20 nt, Human
uccugggguaagccaugguc

SEQ ID NO: 123870 - RNA, 22 nt, Human
aggcaggccccugagaauagac

SEQ ID NO: 123871 - RNA, 22 nt, Human
aacauguaaauaucauuguacu

SEQ ID NO: 123872 - RNA, 22 nt, Human
cagagcauaauugacaugaggu

SEQ ID NO: 123873 - RNA, 22 nt, Human
caggcagccugcggucugcaca

SEQ ID NO: 123874 - RNA, 22 nt, Human
auggcagggcagccucucagag

SEQ ID NO: 123875 - RNA, 22 nt, Human
acaacaguaggaaaacaugucu

SEQ ID NO: 123876 - RNA, 22 nt, Human
gaggcugggaaguccaagauca

SEQ ID NO: 123877 - RNA, 22 nt, Human
caggcaggucagugaagaagga

SEQ ID NO: 123878 - RNA, 23 nt, Human
gcagaggagcaagcuggacacca

SEQ ID NO: 123879 - RNA, 22 nt, Human
agcuguggcagcagccguggca

SEQ ID NO: 123880 - RNA, 23 nt, Human
cagagcuggcucagagcugccug

SEQ ID NO: 123881 - RNA, 22 nt, Human
cagggcaggaugcugugauuau

SEQ ID NO: 123882 - RNA, 22 nt, Human
caggggaaggagccuugaaacu

SEQ ID NO: 123883 - RNA, 22 nt, Human
ugcagggccuuguugaugugcu

SEQ ID NO: 123884 - RNA, 22 nt, Human
gugagcaggauaggggcucccu

SEQ ID NO: 123885 - RNA, 17 nt, Human
uuagagcuacauguuga

SEQ ID NO: 123886 - RNA, 22 nt, Human
ggcagaguugguggagucaguu

SEQ ID NO: 123887 - RNA, 22 nt, Human
uagggcugugucuccaggacca

SEQ ID NO: 123888 - RNA, 22 nt, Human
auuaaagacagcagauggaugg

SEQ ID NO: 123889 - RNA, 22 nt, Human
gguugguaacucccugugcagu

SEQ ID NO: 123890 - RNA, 22 nt, Human
augcugugccuggaaagcggcu

SEQ ID NO: 123891 - RNA, 22 nt, Human
gcagggcacaaggacgcacagg

SEQ ID NO: 123892 - RNA, 22 nt, Human
uagaggcauuaaugaauaaaca

SEQ ID NO: 123893 - RNA, 22 nt, Human
auucacaaagaagggaaguaca

SEQ ID NO: 123894 - RNA, 22 nt, Human
uuugauucuguaaaauaacagg

SEQ ID NO: 123895 - RNA, 22 nt, Human
gccuuaggggucagacagagcu

SEQ ID NO: 123896 - RNA, 22 nt, Human
gggcaguagcuucguaggcauc

SEQ ID NO: 123897 - RNA, 22 nt, Human
ugcagggcuccuggcuccaauc

SEQ ID NO: 123898 - RNA, 22 nt, Human
cagcaggaccauugaggcauca

SEQ ID NO: 123899 - RNA, 22 nt, Human
acauucauugagcaacaacaau

SEQ ID NO: 123900 - RNA, 22 nt, Human
ccaguggacuucucccuguggu

SEQ ID NO: 123901 - RNA, 22 nt, Human
aaagccagggacagugugcaug

SEQ ID NO: 123902 - RNA, 22 nt, Human
uggcagaggaggcucagauuga

SEQ ID NO: 123903 - RNA, 22 nt, Human
aaauggaaguguauuuaguguu

SEQ ID NO: 123904 - RNA, 22 nt, Human
agggccagcugcagaauuagca

SEQ ID NO: 123905 - RNA, 22 nt, Human
agaauuagaggccauguacuug

SEQ ID NO: 123906 - RNA, 22 nt, Human
ccuggaggcucugggagggcag

SEQ ID NO: 123907 - RNA, 22 nt, Human
uguggcagaaccagaauucaaa

SEQ ID NO: 123908 - RNA, 21 nt, Human
auacauucuauuaagcauuua

SEQ ID NO: 123909 - RNA, 22 nt, Human
agcacccucagccuuauccaga

SEQ ID NO: 123910 - RNA, 22 nt, Human
gggccagguggaccccagccuc

SEQ ID NO: 123911 - RNA, 22 nt, Human
uucacaaagcuggagcauuucc

SEQ ID NO: 123912 - RNA, 22 nt, Human
aaggaaaggaugagcaugcauu

SEQ ID NO: 123913 - RNA, 22 nt, Human
caugucuugcccugauuaguag

SEQ ID NO: 123914 - RNA, 22 nt, Human
uuuguacauccuaauucugagu

SEQ ID NO: 123915 - RNA, 22 nt, Human
acagccuggccugaguuaaggc

SEQ ID NO: 123916 - RNA, 22 nt, Human
ucaaaggcccauugucccguug

SEQ ID NO: 123917 - RNA, 23 nt, Human
agggcugaugccauugcagcucu

SEQ ID NO: 123918 - RNA, 21 nt, Human
gccaaggggguagcuauuccu

SEQ ID NO: 123919 - RNA, 22 nt, Human
ggggccagcuucgcgugcucuu

SEQ ID NO: 123920 - RNA, 22 nt, Human
ucugugcagauguagaccaguu

SEQ ID NO: 123921 - RNA, 22 nt, Human
agugcaugccuuccuguggaug

SEQ ID NO: 123922 - RNA, 22 nt, Human
ugagcuuuguuguuaguauauu

SEQ ID NO: 123923 - RNA, 22 nt, Human
ugaggaagggugugacggcacc

SEQ ID NO: 123924 - RNA, 22 nt, Human
ugcaaauauuuccuuauagcca

SEQ ID NO: 123925 - RNA, 22 nt, Human
aucagaagaaauggaugugacu

SEQ ID NO: 123926 - RNA, 22 nt, Human
acauuucagauucaugaaguga

SEQ ID NO: 123927 - RNA, 22 nt, Human
gagugcaggccugagcaccauc

SEQ ID NO: 123928 - RNA, 23 nt, Human
cagggcccugcucaauuucucca

SEQ ID NO: 123929 - RNA, 22 nt, Human
augaggcaucugcagucacuag

SEQ ID NO: 123930 - RNA, 22 nt, Human
ccagccugaaaugccucauccu

SEQ ID NO: 123931 - RNA, 22 nt, Human
acacacuguugcucauccaggc

SEQ ID NO: 123932 - RNA, 22 nt, Human
agugggaggcggcugacgggcg

SEQ ID NO: 123933 - RNA, 22 nt, Human
cagugcaggcugggggcccugc

SEQ ID NO: 123934 - RNA, 22 nt, Human
augggcaguaacaguggcaguc

SEQ ID NO: 123935 - RNA, 22 nt, Human
auucacaauuagaaguagauaa

SEQ ID NO: 123936 - RNA, 23 nt, Human
gaagccacacaaaggucgccaag

SEQ ID NO: 123937 - RNA, 22 nt, Human
uuugauauccuauacaaguaaa

SEQ ID NO: 123938 - RNA, 22 nt, Human
uacugugcaaaaaugaauauug

SEQ ID NO: 123939 - RNA, 22 nt, Human
cacaucuucuuaacuccaaagu

SEQ ID NO: 123940 - RNA, 22 nt, Human
aaguggagcuauaggcucagau

SEQ ID NO: 123941 - RNA, 22 nt, Human
gcagaaggauccgcaggugcaa

SEQ ID NO: 123942 - RNA, 22 nt, Human
cuuaaauucuuaaugcccucau

SEQ ID NO: 123943 - RNA, 21 nt, Human
agcagaggcugccuggugacu

SEQ ID NO: 123944 - RNA, 22 nt, Human
uucuguuugccauauauaguag

SEQ ID NO: 123945 - RNA, 22 nt, Human
ucucugucccuaggagccuugc

SEQ ID NO: 123946 - RNA, 22 nt, Human
aaacaugagcaucucuucaagc

SEQ ID NO: 123947 - RNA, 22 nt, Human
ucccacugugccuguuguaauc

SEQ ID NO: 123948 - RNA, 22 nt, Human
uggaauuuaguuaauuccauuu

SEQ ID NO: 123949 - RNA, 22 nt, Human
auggaaaugauggaacauuaaa

SEQ ID NO: 123950 - RNA, 22 nt, Human
uaggcugggaagaaagauucuc

SEQ ID NO: 123951 - RNA, 22 nt, Human
uguccuuuuggcugucuauggu

SEQ ID NO: 123952 - RNA, 23 nt, Human
ccucagggucuagcagagagaag

SEQ ID NO: 123953 - RNA, 22 nt, Human
acuauuagcauaucaugaaugg

SEQ ID NO: 123954 - RNA, 22 nt, Human
uuuaaauucugucugccgcuua

SEQ ID NO: 123955 - RNA, 22 nt, Human
uacagguaaaauuaucagaaac

SEQ ID NO: 123956 - RNA, 22 nt, Human
uggagauggguuaauggagaga

SEQ ID NO: 123957 - RNA, 22 nt, Human
auuccaaagacagaagcagcug

SEQ ID NO: 123958 - RNA, 22 nt, Human
ccagggcaauaggaacacuuuu

SEQ ID NO: 123959 - RNA, 21 nt, Human
cagaggcagguccugggacgg

SEQ ID NO: 123960 - RNA, 21 nt, Human
ccauaauuuuguuucagaagu

SEQ ID NO: 123961 - RNA, 22 nt, Human
agcgugaaggcgggcagucggc

SEQ ID NO: 123962 - RNA, 22 nt, Human
augcaagaaacagagacgcuga

SEQ ID NO: 123963 - RNA, 22 nt, Human
ggcagggcaggaaagucaggaa

SEQ ID NO: 123964 - RNA, 18 nt, Human
ugcccagaaaagcaggga

SEQ ID NO: 123965 - RNA, 19 nt, Human
agcuguggaugugggauuu

SEQ ID NO: 123966 - RNA, 22 nt, Human
caggaagcugugaaggagacgg

SEQ ID NO: 123967 - RNA, 22 nt, Human
aggacagguguagugggcucug

SEQ ID NO: 123968 - RNA, 22 nt, Human
cuaacauuuauugagcacuuag

SEQ ID NO: 123969 - RNA, 22 nt, Human
augaaucaagugagaacagcau

SEQ ID NO: 123970 - RNA, 22 nt, Human
ugcagggcagcuagggagcuuu

SEQ ID NO: 123971 - RNA, 22 nt, Human
gaggagcaugggaaggcucugg

SEQ ID NO: 123972 - RNA, 22 nt, Human
aaggcagaaauucaacuacugg

SEQ ID NO: 123973 - RNA, 22 nt, Human
gcugugcaaaucgauuuguugg

SEQ ID NO: 123974 - RNA, 22 nt, Human
uuacaugaauacauaaccauuc

SEQ ID NO: 123975 - RNA, 20 nt, Human
aaagucuguuuaucucugga

SEQ ID NO: 123976 - RNA, 18 nt, Human
ggcaugugagugcugagg

SEQ ID NO: 123977 - RNA, 22 nt, Human
acauuugucuuccuccucagug

SEQ ID NO: 123978 - RNA, 22 nt, Human
gggcaggugccagcucccuguc

SEQ ID NO: 123979 - RNA, 22 nt, Human
cugugaauuaaguauuguuauc

SEQ ID NO: 123980 - RNA, 22 nt, Human
augcagcuucaggauuaugaug

SEQ ID NO: 123981 - RNA, 22 nt, Human
uuucauuacguguuugacuugu

SEQ ID NO: 123982 - RNA, 22 nt, Human
cagagcugggaucccaugggcg

SEQ ID NO: 123983 - RNA, 22 nt, Human
ugaggcagguaagcaaguuuug

SEQ ID NO: 123984 - RNA, 22 nt, Human
uuauauacugugguaguacugu

SEQ ID NO: 123985 - RNA, 18 nt, Human
ucauuuugucugccuuug

SEQ ID NO: 123986 - RNA, 22 nt, Human
cauuuguaggaugcuucuuguu

SEQ ID NO: 123987 - RNA, 22 nt, Human
gaggaaaauauucagggagguu

SEQ ID NO: 123988 - RNA, 20 nt, Human
gugcugagggcugggcaaug

SEQ ID NO: 123989 - RNA, 22 nt, Human
auuauuuuaugugcggccugau

SEQ ID NO: 123990 - RNA, 22 nt, Human
cauuugcauaugaagaaguaag

SEQ ID NO: 123991 - RNA, 22 nt, Human
ggcucaccauggccucccugcu

SEQ ID NO: 123992 - RNA, 22 nt, Human
aggcagagagcaguggccgucu

SEQ ID NO: 123993 - RNA, 22 nt, Human
gagaaggcugauccuuggaguu

SEQ ID NO: 123994 - RNA, 22 nt, Human
agcagggcaguuaaaggguccu

SEQ ID NO: 123995 - RNA, 22 nt, Human
agaguuaagacguacaugagug

SEQ ID NO: 123996 - RNA, 22 nt, Human
agcagggcuuugucucugugaa

SEQ ID NO: 123997 - RNA, 22 nt, Human
aaugguuucaaacacacuaagu

SEQ ID NO: 123998 - RNA, 22 nt, Human
agacaacaugaucagcaguccu

SEQ ID NO: 123999 - RNA, 22 nt, Human
gaauacaagccugccaccugga

SEQ ID NO: 124000 - RNA, 22 nt, Human
aauaacagaaacuugagcauca

SEQ ID NO: 124001 - RNA, 18 nt, Human
uggagcugagugcugugc

SEQ ID NO: 124002 - RNA, 22 nt, Human
agguggcucugacagcucuggu

SEQ ID NO: 124003 - RNA, 21 nt, Human
acauuuucuguuuuaggaagu

SEQ ID NO: 124004 - RNA, 22 nt, Human
ugaagccauaggacagaggaua

SEQ ID NO: 124005 - RNA, 22 nt, Human
agggcugcugaggaagccuugc

SEQ ID NO: 124006 - RNA, 22 nt, Human
ucuguuuaugcauauuuaaaac

SEQ ID NO: 124007 - RNA, 22 nt, Human
uuacuguacuagugagacuagg

SEQ ID NO: 124008 - RNA, 22 nt, Human
auguuuuauauuuugcagcagu

SEQ ID NO: 124009 - RNA, 23 nt, Human
uccuggugacaugccugagcauc

SEQ ID NO: 124010 - RNA, 22 nt, Human
cagggcuggcuguggcaaucuc

SEQ ID NO: 124011 - RNA, 22 nt, Human
ugagccaggaguuugaggcugu

SEQ ID NO: 124012 - RNA, 22 nt, Human
uuuaugcagccucaguaucaga

SEQ ID NO: 124013 - RNA, 22 nt, Human
acacuggaggguccagggaugu

SEQ ID NO: 124014 - RNA, 22 nt, Human
acaguagcuaauauugcauuau

SEQ ID NO: 124015 - RNA, 22 nt, Human
agugccuugugugugggcagcc

SEQ ID NO: 124016 - RNA, 22 nt, Human
aucagaagcuuguagucucucu

SEQ ID NO: 124017 - RNA, 22 nt, Human
cagugcccuuccaggacugcag

SEQ ID NO: 124018 - RNA, 22 nt, Human
uggcagagugcggcauccccug

SEQ ID NO: 124019 - RNA, 22 nt, Human
ugguagggacacuaugcagaaa

SEQ ID NO: 124020 - RNA, 22 nt, Human
uagccaggucacacuguguguu

SEQ ID NO: 124021 - RNA, 18 nt, Human
aaacagugccuaaguguc

SEQ ID NO: 124022 - RNA, 21 nt, Human
agaagccaugugguggagaac

SEQ ID NO: 124023 - RNA, 21 nt, Human
uguaaguuucaucugaauugg

SEQ ID NO: 124024 - RNA, 22 nt, Human
ggcaccaggcugggcauaggcc

SEQ ID NO: 124025 - RNA, 22 nt, Human
gcagagcagcaaauggaaagga

SEQ ID NO: 124026 - RNA, 20 nt, Human
uaacaggaagcauuauuuua

SEQ ID NO: 124027 - RNA, 22 nt, Human
gagaggaguaggcugauggugc

SEQ ID NO: 124028 - RNA, 22 nt, Human
auucacuagguugcaaaacugu

SEQ ID NO: 124029 - RNA, 22 nt, Human
ugccaggcugucaauucaccca

SEQ ID NO: 124030 - RNA, 19 nt, Human
cugggggugcucacgcucu

SEQ ID NO: 124031 - RNA, 22 nt, Human
caguggcagagaacagagaccu

SEQ ID NO: 124032 - RNA, 22 nt, Human
accaugggucagccaccucagc

SEQ ID NO: 124033 - RNA, 22 nt, Human
aagagccagcuagugaagaggc

SEQ ID NO: 124034 - RNA, 19 nt, Human
aggucauugauagugcagg

SEQ ID NO: 124035 - RNA, 22 nt, Human
ugagaucucugccuauauggau

SEQ ID NO: 124036 - RNA, 22 nt, Human
aguaaacaguaucuuuaguguc

SEQ ID NO: 124037 - RNA, 22 nt, Human
ucccaggcuggggccaggugac

SEQ ID NO: 124038 - RNA, 21 nt, Human
uggcugaguggaugcaugaau

SEQ ID NO: 124039 - RNA, 22 nt, Human
ggcugaggcucaugccaucuug

SEQ ID NO: 124040 - RNA, 22 nt, Human
acagugaugagccggcugaggc

SEQ ID NO: 124041 - RNA, 22 nt, Human
ucuugcacuucaugaauauguu

SEQ ID NO: 124042 - RNA, 22 nt, Human
cugaucaugugggaggauaugu

SEQ ID NO: 124043 - RNA, 22 nt, Human
acaugauuugcaugauuuguaa

SEQ ID NO: 124044 - RNA, 22 nt, Human
ugaggcaggaugcuugcacagg

SEQ ID NO: 124045 - RNA, 22 nt, Human
gggagggucugccaugcucccu

SEQ ID NO: 124046 - RNA, 22 nt, Human
ccagggcugcugugggacucca

SEQ ID NO: 124047 - RNA, 22 nt, Human
aauagugcugcuguggacaugg

SEQ ID NO: 124048 - RNA, 22 nt, Human
ucugugcagaaucaaggagcuu

SEQ ID NO: 124049 - RNA, 22 nt, Human
ugagaugcugcuguaacaaaua

SEQ ID NO: 124050 - RNA, 22 nt, Human
agcacccuccaacuucccugua

SEQ ID NO: 124051 - RNA, 22 nt, Human
ggcaguggaggacccugugucu

SEQ ID NO: 124052 - RNA, 22 nt, Human
caggcagaaggaaguaccaggc

SEQ ID NO: 124053 - RNA, 22 nt, Human
ugacauuuaagccucugauuuc

SEQ ID NO: 124054 - RNA, 22 nt, Human
agcugaaucucaggcauccuuu

SEQ ID NO: 124055 - RNA, 22 nt, Human
ucucccaggcugcccuguggac

SEQ ID NO: 124056 - RNA, 22 nt, Human
cuccucuuuacccgcauggucu

SEQ ID NO: 124057 - RNA, 22 nt, Human
auuuccacauaagggaaauaag

SEQ ID NO: 124058 - RNA, 22 nt, Human
ugaggcaguauucuccauucca

SEQ ID NO: 124059 - RNA, 22 nt, Human
acaauuugaggcuacucaauug

SEQ ID NO: 124060 - RNA, 22 nt, Human
gaggcacaucacuuggugcauu

SEQ ID NO: 124061 - RNA, 22 nt, Human
uugauacauagcacaguuuagg

SEQ ID NO: 124062 - RNA, 19 nt, Human
uuuucucagcuucuagcgg

SEQ ID NO: 124063 - RNA, 22 nt, Human
cuauuacauuucuggacauuca

SEQ ID NO: 124064 - RNA, 22 nt, Human
gcacaggcacagagggccacug

SEQ ID NO: 124065 - RNA, 22 nt, Human
ugaaacauuauagaauauuuau

SEQ ID NO: 124066 - RNA, 22 nt, Human
acauaugcucaucugcauuccc

SEQ ID NO: 124067 - RNA, 22 nt, Human
agaguggagagaaacaacucug

SEQ ID NO: 124068 - RNA, 19 nt, Human
uccuggggauguggucacc

SEQ ID NO: 124069 - RNA, 20 nt, Human
agcauuugaaauaugacuau

SEQ ID NO: 124070 - RNA, 22 nt, Human
uggagaaggacagccugagaaa

SEQ ID NO: 124071 - RNA, 22 nt, Human
gugugcagucugcuaggcaggg

SEQ ID NO: 124072 - RNA, 22 nt, Human
aacaggcaacaguugacucuga

SEQ ID NO: 124073 - RNA, 22 nt, Human
aacaugauuggaaaaugcuguc

SEQ ID NO: 124074 - RNA, 22 nt, Human
uuucacaaacugaggagacaau

SEQ ID NO: 124075 - RNA, 21 nt, Human
aagccagcccacagugguuug

SEQ ID NO: 124076 - RNA, 22 nt, Human
gaggggaaagugugaggcugcg

SEQ ID NO: 124077 - RNA, 22 nt, Human
ucaauuacagugucaccuuaag

SEQ ID NO: 124078 - RNA, 20 nt, Human
ugcagggcucugcuucucuc

SEQ ID NO: 124079 - RNA, 22 nt, Human
auacaguaauugcauaggcuuc

SEQ ID NO: 124080 - RNA, 22 nt, Human
uacagucagagugccuuucuaa

SEQ ID NO: 124081 - RNA, 22 nt, Human
aacauuuguuuggcuucaauua

SEQ ID NO: 124082 - RNA, 22 nt, Human
ugucauuaguuucagccauucu

SEQ ID NO: 124083 - RNA, 22 nt, Human
auaggaaagaaaauuauguagg

SEQ ID NO: 124084 - RNA, 22 nt, Human
cagaggcacagcuucuuuuaau

SEQ ID NO: 124085 - RNA, 20 nt, Human
ggggcaguggcucaugccug

SEQ ID NO: 124086 - RNA, 18 nt, Human
acagaggcagacauguau

SEQ ID NO: 124087 - RNA, 22 nt, Human
ucagaggaacacuguuucaugc

SEQ ID NO: 124088 - RNA, 22 nt, Human
ucuuccugaaacccuguuccag

SEQ ID NO: 124089 - RNA, 23 nt, Human
cugcuguguuggucucgauggga

SEQ ID NO: 124090 - RNA, 22 nt, Human
agaggaggcagcuuaacucagu

SEQ ID NO: 124091 - RNA, 22 nt, Human
ccuaggcccuaggcuuccauca

SEQ ID NO: 124092 - RNA, 23 nt, Human
ugagaagccauuagagcaggugg

SEQ ID NO: 124093 - RNA, 22 nt, Human
uggagcagcacaagaaagggga

SEQ ID NO: 124094 - RNA, 22 nt, Human
ugagaacuugugcuauugcaca

SEQ ID NO: 124095 - RNA, 22 nt, Human
cucugugagggucuguacagaa

SEQ ID NO: 124096 - RNA, 22 nt, Human
uguuauacuauuuagagguaca

SEQ ID NO: 124097 - RNA, 22 nt, Human
ggcagugaacagaaaugcagaa

SEQ ID NO: 124098 - RNA, 22 nt, Human
ugggcagcauccuccacaguca

SEQ ID NO: 124099 - RNA, 22 nt, Human
acauucuuucgaugucugauuu

SEQ ID NO: 124100 - RNA, 22 nt, Human
ugcaaauaagcuauuauggaau

SEQ ID NO: 124101 - RNA, 22 nt, Human
cuccagugggggugagccuaga

SEQ ID NO: 124102 - RNA, 19 nt, Human
ugauucaucuaacugccuc

SEQ ID NO: 124103 - RNA, 22 nt, Human
uugaaacaguagcucauagacc

SEQ ID NO: 124104 - RNA, 22 nt, Human
uauaugcagauuuucaucaucg

SEQ ID NO: 124105 - RNA, 21 nt, Human
auuuccaaggguaccuaagau

SEQ ID NO: 124106 - RNA, 22 nt, Human
auggggcugaaacauggaagag

SEQ ID NO: 124107 - RNA, 21 nt, Human
ucagggcagcugcucuucaga

SEQ ID NO: 124108 - RNA, 22 nt, Human
agaugcugucacacacacuguu

SEQ ID NO: 124109 - RNA, 22 nt, Human
auuaaacaauguaaaguucuug

SEQ ID NO: 124110 - RNA, 22 nt, Human
gugccaggcccagggagcgggg

SEQ ID NO: 124111 - RNA, 22 nt, Human
ggagcagggaauuacagcgcag

SEQ ID NO: 124112 - RNA, 22 nt, Human
uuugaucaugaagaggauaaac

SEQ ID NO: 124113 - RNA, 20 nt, Human
ucugugcaccugcuacaagg

SEQ ID NO: 124114 - RNA, 16 nt, Human
gagggcagaggcggaa

SEQ ID NO: 124115 - RNA, 22 nt, Human
gugaauggggcaggaaggaugg

SEQ ID NO: 124116 - RNA, 22 nt, Human
agggcugagcccaggcauguag

SEQ ID NO: 124117 - RNA, 22 nt, Human
ugcagggcccucauuccugucc

SEQ ID NO: 124118 - RNA, 22 nt, Human
uacaucauggugagcaggaggc

SEQ ID NO: 124119 - RNA, 22 nt, Human
uaggcagaaaggaaggcaaguu

SEQ ID NO: 124120 - RNA, 22 nt, Human
augauugaaaaugacauugcca

SEQ ID NO: 124121 - RNA, 22 nt, Human
cugugacuagaccugcaggaga

SEQ ID NO: 124122 - RNA, 22 nt, Human
auacacuaaucaugugcucagu

SEQ ID NO: 124123 - RNA, 22 nt, Human
ucugugcauuucaggaccugaa

SEQ ID NO: 124124 - RNA, 22 nt, Human
gcagaagcugggcagcgaggug

SEQ ID NO: 124125 - RNA, 22 nt, Human
guacauucagcuuagcacuucu

SEQ ID NO: 124126 - RNA, 22 nt, Human
ugggacuuguguggcaguauuu

SEQ ID NO: 124127 - RNA, 22 nt, Human
ucccaaggauaagagagucuga

SEQ ID NO: 124128 - RNA, 22 nt, Human
aaauagcacagcagcugaggcu

SEQ ID NO: 124129 - RNA, 22 nt, Human
auuuaucaacauguaccauugg

SEQ ID NO: 124130 - RNA, 22 nt, Human
cugacucccaaagaggacgcgu

SEQ ID NO: 124131 - RNA, 20 nt, Human
uuucacaucugucccuuuaa

SEQ ID NO: 124132 - RNA, 22 nt, Human
gcagggcagaccuccagccuau

SEQ ID NO: 124133 - RNA, 22 nt, Human
gacaucaugucacuaacugcua

SEQ ID NO: 124134 - RNA, 22 nt, Human
agggaggcaggaaaguugucug

SEQ ID NO: 124135 - RNA, 22 nt, Human
agaagcugagaaugaauuaaga

SEQ ID NO: 124136 - RNA, 22 nt, Human
agccaggcagggcucucgcucu

SEQ ID NO: 124137 - RNA, 17 nt, Human
uggcacagaggugcuau

SEQ ID NO: 124138 - RNA, 22 nt, Human
aaugucugcucuacucaggagg

SEQ ID NO: 124139 - RNA, 22 nt, Human
aagcuggacucugccauuuacu

SEQ ID NO: 124140 - RNA, 22 nt, Human
ugaggcagaguaagauacauga

SEQ ID NO: 124141 - RNA, 22 nt, Human
acaugaagcaagaaagaugcua

SEQ ID NO: 124142 - RNA, 22 nt, Human
cagaaggcauagaugaaggccu

SEQ ID NO: 124143 - RNA, 18 nt, Human
gcaaggcucaggccaggc

SEQ ID NO: 124144 - RNA, 22 nt, Human
gaacauuuggauuuguaaauuu

SEQ ID NO: 124145 - RNA, 22 nt, Human
auuguuaugaaaauaagauguu

SEQ ID NO: 124146 - RNA, 22 nt, Human
gggcugacaaccaucugacaag

SEQ ID NO: 124147 - RNA, 20 nt, Human
ccagguggugccuggagagg

SEQ ID NO: 124148 - RNA, 21 nt, Human
ucucacaauaugaugccagau

SEQ ID NO: 124149 - RNA, 22 nt, Human
gaauucugucgcuuacuagaug

SEQ ID NO: 124150 - RNA, 22 nt, Human
cauguauacaguagaauacuau

SEQ ID NO: 124151 - RNA, 22 nt, Human
uuugacaaaggaaaaaugcaca

SEQ ID NO: 124152 - RNA, 22 nt, Human
aagggcaggcagagaucauaua

SEQ ID NO: 124153 - RNA, 19 nt, Human
aggcagcauucuggggcuu

SEQ ID NO: 124154 - RNA, 22 nt, Human
ugggcagccaucccagccucuc

SEQ ID NO: 124155 - RNA, 17 nt, Human
agccaggcauaugaagu

SEQ ID NO: 124156 - RNA, 22 nt, Human
ggugaggaaagauggugacagu

SEQ ID NO: 124157 - RNA, 22 nt, Human
aggcgcagacauacagggucug

SEQ ID NO: 124158 - RNA, 22 nt, Human
agggaggucuuugaggggcuua

SEQ ID NO: 124159 - RNA, 22 nt, Human
ucaggcugcaucuguaagggug

SEQ ID NO: 124160 - RNA, 22 nt, Human
auggaguucugccagcgcugcu

SEQ ID NO: 124161 - RNA, 22 nt, Human
gaggagaaagcagugauuugug

SEQ ID NO: 124162 - RNA, 22 nt, Human
uugauacaggcucuauuucauc

SEQ ID NO: 124163 - RNA, 22 nt, Human
ugcaaaugggugaggguuagga

SEQ ID NO: 124164 - RNA, 22 nt, Human
cgaggcagacaaaaguuggaag

SEQ ID NO: 124165 - RNA, 23 nt, Human
uuggaaauggggagaacagauuc

SEQ ID NO: 124166 - RNA, 22 nt, Human
cauaauuuuccaugguuugcua

SEQ ID NO: 124167 - RNA, 22 nt, Human
auuccaaacagugcugcagacu

SEQ ID NO: 124168 - RNA, 22 nt, Human
ggagggaguuucauuccugccc

SEQ ID NO: 124169 - RNA, 22 nt, Human
cugcugugcaggugccuaugau

SEQ ID NO: 124170 - RNA, 22 nt, Human
caggaagagaacauggaggcug

SEQ ID NO: 124171 - RNA, 22 nt, Human
uggcaggaggaugaggcggcua

SEQ ID NO: 124172 - RNA, 22 nt, Human
ugcaggaauuuuuugcagaaag

SEQ ID NO: 124173 - RNA, 22 nt, Human
ccagugcccagcugcccaggca

SEQ ID NO: 124174 - RNA, 22 nt, Human
augcauuugacgggauauauuu

SEQ ID NO: 124175 - RNA, 22 nt, Human
cagacagagcucacaagucuuu

SEQ ID NO: 124176 - RNA, 22 nt, Human
aggcucagccugggccuagagc

SEQ ID NO: 124177 - RNA, 23 nt, Human
agcagcaaaaauuuaucuuucug

SEQ ID NO: 124178 - RNA, 22 nt, Human
guggcagagggugagcuggacu

SEQ ID NO: 124179 - RNA, 22 nt, Human
agcagggcagcugaugcgcacg

SEQ ID NO: 124180 - RNA, 22 nt, Human
aaugcaaacuccacuggagcag

SEQ ID NO: 124181 - RNA, 22 nt, Human
gaggcacauauauacagagccc

SEQ ID NO: 124182 - RNA, 22 nt, Human
gugugccaccagucaaggugaa

SEQ ID NO: 124183 - RNA, 22 nt, Human
agcaggaaggucugugugaguc

SEQ ID NO: 124184 - RNA, 22 nt, Human
agugucagcuaauuauucauga

SEQ ID NO: 124185 - RNA, 22 nt, Human
uccuggggaggucgaggcugag

SEQ ID NO: 124186 - RNA, 22 nt, Human
cuggaaguauaggggagaugau

SEQ ID NO: 124187 - RNA, 22 nt, Human
aggcugugagcaagaacaccua

SEQ ID NO: 124188 - RNA, 22 nt, Human
agcuaagcucucagauacuaag

SEQ ID NO: 124189 - RNA, 22 nt, Human
aaagcaaugggucuaagguaaa

SEQ ID NO: 124190 - RNA, 22 nt, Human
cagugaaguuuaaaguguagau

SEQ ID NO: 124191 - RNA, 22 nt, Human
uacagugaggugguuuccuuua

SEQ ID NO: 124192 - RNA, 22 nt, Human
uggcagagcaaaaagauagaau

SEQ ID NO: 124193 - RNA, 22 nt, Human
cauuacaucuuugaugcaguau

SEQ ID NO: 124194 - RNA, 22 nt, Human
ugaucaaagugcuggaauuaca

SEQ ID NO: 124195 - RNA, 22 nt, Human
uagaggcacccuggaggagacu

SEQ ID NO: 124196 - RNA, 22 nt, Human
acacugugacaaaggcuguucu

SEQ ID NO: 124197 - RNA, 22 nt, Human
agucagcagugaaagcacagcc

SEQ ID NO: 124198 - RNA, 20 nt, Human
agcaccagugggggcagccc

SEQ ID NO: 124199 - RNA, 22 nt, Human
ggcaggcaguguggugugaaac

SEQ ID NO: 124200 - RNA, 19 nt, Human
agugagcauggcuugacug

SEQ ID NO: 124201 - RNA, 22 nt, Human
agcagggcuuugcagacuuggg

SEQ ID NO: 124202 - RNA, 20 nt, Human
aagggagaauaaugauugua

SEQ ID NO: 124203 - RNA, 22 nt, Human
gauaacuacacuuaagacaacc

SEQ ID NO: 124204 - RNA, 22 nt, Human
aggaaccagagguugagcaacu

SEQ ID NO: 124205 - RNA, 22 nt, Human
acagccuguguaccagcuggga

SEQ ID NO: 124206 - RNA, 22 nt, Human
aaguggugguaugaaccgaggg

SEQ ID NO: 124207 - RNA, 22 nt, Human
caaaggcuuccacugcauccuu

SEQ ID NO: 124208 - RNA, 22 nt, Human
aggcaggcaaccaccugggaag

SEQ ID NO: 124209 - RNA, 22 nt, Human
cugccaggggccucacaggcca

SEQ ID NO: 124210 - RNA, 20 nt, Human
gcagggcaagggauaugaaa

SEQ ID NO: 124211 - RNA, 22 nt, Human
auuugcaauuuuacuuugcagu

SEQ ID NO: 124212 - RNA, 22 nt, Human
ucugaagggcugaguggaggag

SEQ ID NO: 124213 - RNA, 20 nt, Human
uggcaggaggcagcagugga

SEQ ID NO: 124214 - RNA, 22 nt, Human
ugaggcaguugagcuuccugag

SEQ ID NO: 124215 - RNA, 22 nt, Human
ccugagggcucagcccccagcc

SEQ ID NO: 124216 - RNA, 18 nt, Human
ugaauuaguuugugguuu

SEQ ID NO: 124217 - RNA, 22 nt, Human
gggcagguuggcaucccgggca

SEQ ID NO: 124218 - RNA, 22 nt, Human
cauuuguaucugggcugcugug

SEQ ID NO: 124219 - RNA, 22 nt, Human
uaguggaggccuguugugugca

SEQ ID NO: 124220 - RNA, 22 nt, Human
ugaagacucagaagcuaagaua

SEQ ID NO: 124221 - RNA, 22 nt, Human
ucuggaaguuagaggaggaaag

SEQ ID NO: 124222 - RNA, 22 nt, Human
gcagggcagagggagaaucucu

SEQ ID NO: 124223 - RNA, 21 nt, Human
ugcagaggcacaaacaagccc

SEQ ID NO: 124224 - RNA, 22 nt, Human
ucaaagcuuagauaauuucuuu

SEQ ID NO: 124225 - RNA, 22 nt, Human
ucagcuggauguggaagugcua

SEQ ID NO: 124226 - RNA, 22 nt, Human
cucccagguuacaucugagccu

SEQ ID NO: 124227 - RNA, 22 nt, Human
cuucauuuggagaacugugcuu

SEQ ID NO: 124228 - RNA, 22 nt, Human
auuuuccaaaauaauuguuacu

SEQ ID NO: 124229 - RNA, 22 nt, Human
gaggagggagcuggaagcucuu

SEQ ID NO: 124230 - RNA, 22 nt, Human
ucucugagacaguagccucugc

SEQ ID NO: 124231 - RNA, 22 nt, Human
agcagaggaggauuuaguuagg

SEQ ID NO: 124232 - RNA, 22 nt, Human
uuuguacaugaaugugcaccca

SEQ ID NO: 124233 - RNA, 22 nt, Human
aaaggauucucuugauuucagu

SEQ ID NO: 124234 - RNA, 22 nt, Human
ucugaaggucugagaaccagga

SEQ ID NO: 124235 - RNA, 19 nt, Human
acauuuagaauguacuugc

SEQ ID NO: 124236 - RNA, 22 nt, Human
uaggaaauuugaaauauguggg

SEQ ID NO: 124237 - RNA, 22 nt, Human
ugacauuuaucuucuacaauga

SEQ ID NO: 124238 - RNA, 22 nt, Human
cauccauaugaggcacauuggu

SEQ ID NO: 124239 - RNA, 22 nt, Human
gagcugaaguuuccauuuguac

SEQ ID NO: 124240 - RNA, 22 nt, Human
ugguccugcuacaggggauuag

SEQ ID NO: 124241 - RNA, 22 nt, Human
aggcagaggagaaugaucuucc

SEQ ID NO: 124242 - RNA, 22 nt, Human
gaggaggaggaaguggaaccca

SEQ ID NO: 124243 - RNA, 22 nt, Human
cccaggugggcaccucgaggaa

SEQ ID NO: 124244 - RNA, 22 nt, Human
agggucuguggaugcaucuggg

SEQ ID NO: 124245 - RNA, 22 nt, Human
cgagcaugaugacggcuguggc

SEQ ID NO: 124246 - RNA, 22 nt, Human
aguaaacauaauuuaccuguag

SEQ ID NO: 124247 - RNA, 22 nt, Human
ucagggcacguuucugcaaugc

SEQ ID NO: 124248 - RNA, 19 nt, Human
gagcugagaguagcacugg

SEQ ID NO: 124249 - RNA, 22 nt, Human
ucugugcaccagaaugauauuu

SEQ ID NO: 124250 - RNA, 22 nt, Human
ucaccaggauugggcuguaggc

SEQ ID NO: 124251 - RNA, 22 nt, Human
auacaugauacuuaguacguag

SEQ ID NO: 124252 - RNA, 22 nt, Human
gcagggcaaugaucccgagagg

SEQ ID NO: 124253 - RNA, 22 nt, Human
agggucagguuaagggagucau

SEQ ID NO: 124254 - RNA, 22 nt, Human
agcaggaacgaguucaugggga

SEQ ID NO: 124255 - RNA, 22 nt, Human
aggcucaguucacgucaacuuu

SEQ ID NO: 124256 - RNA, 22 nt, Human
guacaguaguaaaagugaauga

SEQ ID NO: 124257 - RNA, 22 nt, Human
cagggcagcuuccuuuguuagg

SEQ ID NO: 124258 - RNA, 22 nt, Human
aaugcaaacuucuuguuacuug

SEQ ID NO: 124259 - RNA, 22 nt, Human
aaguccagugcuuuagauucca

SEQ ID NO: 124260 - RNA, 22 nt, Human
uugauacagcagccugugaucc

SEQ ID NO: 124261 - RNA, 22 nt, Human
caagcuggaguuccucagagug

SEQ ID NO: 124262 - RNA, 22 nt, Human
cggcagagcccugagucagccu

SEQ ID NO: 124263 - RNA, 22 nt, Human
cagaggaagagauacaagcccu

SEQ ID NO: 124264 - RNA, 22 nt, Human
agaauuagguaaguucaucuga

SEQ ID NO: 124265 - RNA, 22 nt, Human
ugcuacacucaaucagugcuau

SEQ ID NO: 124266 - RNA, 22 nt, Human
ccagaaggcggagauugcagug

SEQ ID NO: 124267 - RNA, 22 nt, Human
aggcagccugguuugaauggaa

SEQ ID NO: 124268 - RNA, 22 nt, Human
caguggagaggcaugcuuggca

SEQ ID NO: 124269 - RNA, 22 nt, Human
aaaugcaugagaaaguauucug

SEQ ID NO: 124270 - RNA, 22 nt, Human
aaacuagaaaucagcaagauag

SEQ ID NO: 124271 - RNA, 22 nt, Human
aagagcugcacauauuuauauc

SEQ ID NO: 124272 - RNA, 22 nt, Human
ugaguccaauaggggccuggaa

SEQ ID NO: 124273 - RNA, 22 nt, Human
auuuauugagagggaggggaau

SEQ ID NO: 124274 - RNA, 22 nt, Human
acugugcaucuauugccauuua

SEQ ID NO: 124275 - RNA, 22 nt, Human
augcagcugugggcaagaaaug

SEQ ID NO: 124276 - RNA, 22 nt, Human
ccuuguccucugguuuccuguu

SEQ ID NO: 124277 - RNA, 22 nt, Human
gcuguggaaaugccuaacauga

SEQ ID NO: 124278 - RNA, 22 nt, Human
ucaggcugccuaucagacugug

SEQ ID NO: 124279 - RNA, 22 nt, Human
aggcagguuucccggcugucaa

SEQ ID NO: 124280 - RNA, 22 nt, Human
cagccagugugaccgaggagga

SEQ ID NO: 124281 - RNA, 17 nt, Human
cuuauacuuuacggaag

SEQ ID NO: 124282 - RNA, 22 nt, Human
aggcugugcacagggcaccugc

SEQ ID NO: 124283 - RNA, 22 nt, Human
ggcugagccaugggcacugcag

SEQ ID NO: 124284 - RNA, 22 nt, Human
ugcauacauaaagugcuaucau

SEQ ID NO: 124285 - RNA, 22 nt, Human
agggucugacugaauggaaaag

SEQ ID NO: 124286 - RNA, 22 nt, Human
cagaggguugucaggcgccuug

SEQ ID NO: 124287 - RNA, 22 nt, Human
uugcacaucuaauaaugcuaga

SEQ ID NO: 124288 - RNA, 22 nt, Human
ggccaccucugcccuacugagu

SEQ ID NO: 124289 - RNA, 22 nt, Human
auuaugcauuccaaccuuauuc

SEQ ID NO: 124290 - RNA, 22 nt, Human
uuacaagugucagguacuggca

SEQ ID NO: 124291 - RNA, 23 nt, Human
gcagauggccccagagugcugcc

SEQ ID NO: 124292 - RNA, 20 nt, Human
uuuauuggccuuucaggaac

SEQ ID NO: 124293 - RNA, 22 nt, Human
acaguggaauggugggccugca

SEQ ID NO: 124294 - RNA, 22 nt, Human
aaagccaaaugaaagaugguuc

SEQ ID NO: 124295 - RNA, 22 nt, Human
cuacccaggcuggagugcagua

SEQ ID NO: 124296 - RNA, 22 nt, Human
cuucuucaguugcauguauugg

SEQ ID NO: 124297 - RNA, 22 nt, Human
ccagggcucaggcucccagugg

SEQ ID NO: 124298 - RNA, 22 nt, Human
acucaguacaucuggaguuggc

SEQ ID NO: 124299 - RNA, 22 nt, Human
acagugaucaguuacugucugu

SEQ ID NO: 124300 - RNA, 22 nt, Human
aggagucacucagggcuucauc

SEQ ID NO: 124301 - RNA, 22 nt, Human
gaaagccaucuggcugcuggga

SEQ ID NO: 124302 - RNA, 22 nt, Human
auguaaacuuuaccagcucuga

SEQ ID NO: 124303 - RNA, 22 nt, Human
aaagccagaguguguuagagac

SEQ ID NO: 124304 - RNA, 22 nt, Human
ugaagccaaucugccaggcaga

SEQ ID NO: 124305 - RNA, 22 nt, Human
gcuccucuucucccacugaaug

SEQ ID NO: 124306 - RNA, 22 nt, Human
ugcccagggauaagccuagaga

SEQ ID NO: 124307 - RNA, 22 nt, Human
agucaccaucuguggcagccug

SEQ ID NO: 124308 - RNA, 22 nt, Human
cccaggaaugagcaggcagggg

SEQ ID NO: 124309 - RNA, 22 nt, Human
uucaucugcuucuugauuuugc

SEQ ID NO: 124310 - RNA, 22 nt, Human
gcagggcaggauuugaacccag

SEQ ID NO: 124311 - RNA, 22 nt, Human
uccugguggugccagcugcagg

SEQ ID NO: 124312 - RNA, 22 nt, Human
aaacacguauaaugugacagag

SEQ ID NO: 124313 - RNA, 22 nt, Human
gagggaggcaucaugaauccag

SEQ ID NO: 124314 - RNA, 22 nt, Human
ggcugaguugagaggauuacuu

SEQ ID NO: 124315 - RNA, 22 nt, Human
augaggcuaugaauggggagau

SEQ ID NO: 124316 - RNA, 22 nt, Human
uuaaagcaguuuguauacaugg

SEQ ID NO: 124317 - RNA, 22 nt, Human
gaaggcugcugggaaguguggu

SEQ ID NO: 124318 - RNA, 22 nt, Human
uaaugguuuuuuggagacugcu

SEQ ID NO: 124319 - RNA, 22 nt, Human
gcugagaguccaggaaaacauc

SEQ ID NO: 124320 - RNA, 22 nt, Human
ggcagaggaaggaugaauucac

SEQ ID NO: 124321 - RNA, 22 nt, Human
gcuguggccuggcgcagagcug

SEQ ID NO: 124322 - RNA, 22 nt, Human
ugauuaaagguggaaggcaggu

SEQ ID NO: 124323 - RNA, 22 nt, Human
agcaggaaggcuuuggggguuc

SEQ ID NO: 124324 - RNA, 22 nt, Human
gggcugagagcuggaaucugag

SEQ ID NO: 124325 - RNA, 22 nt, Human
cagcacaguuugcuuggcagag

SEQ ID NO: 124326 - RNA, 22 nt, Human
acaggcuggugguccuggccau

SEQ ID NO: 124327 - RNA, 22 nt, Human
agggcaugugggagaggagccu

SEQ ID NO: 124328 - RNA, 21 nt, Human
agggucaggaaccaggguacc

SEQ ID NO: 124329 - RNA, 22 nt, Human
uugcacaugauagaugauuucu

SEQ ID NO: 124330 - RNA, 22 nt, Human
uagggcagauucgguggaguuu

SEQ ID NO: 124331 - RNA, 22 nt, Human
uacauguacauugggcauuaau

SEQ ID NO: 124332 - RNA, 22 nt, Human
auggcagggaccaagcugucau

SEQ ID NO: 124333 - RNA, 22 nt, Human
uggcagagacaaggccgggccu

SEQ ID NO: 124334 - RNA, 22 nt, Human
gaagggagaagguugggugacg

SEQ ID NO: 124335 - RNA, 22 nt, Human
ccagugcaggugagcaccaggu

SEQ ID NO: 124336 - RNA, 23 nt, Human
ugggucagcugccuccaggacaa

SEQ ID NO: 124337 - RNA, 22 nt, Human
acagcuguggucuccuuagugu

SEQ ID NO: 124338 - RNA, 19 nt, Human
ggccaggcugacugugguc

SEQ ID NO: 124339 - RNA, 22 nt, Human
agcagggcaaagucaggcuaac

SEQ ID NO: 124340 - RNA, 22 nt, Human
agcugugcuguggucaucuggg

SEQ ID NO: 124341 - RNA, 22 nt, Human
uccagggaagagcagaggcuac

SEQ ID NO: 124342 - RNA, 22 nt, Human
aaggggaauagaguggguugug

SEQ ID NO: 124343 - RNA, 22 nt, Human
auagacauggucuuuugucauu

SEQ ID NO: 124344 - RNA, 22 nt, Human
gagggcugcugccagauaugcc

SEQ ID NO: 124345 - RNA, 22 nt, Human
acagggcagugucuugaaaaau

SEQ ID NO: 124346 - RNA, 18 nt, Human
cugucaccgccaccacac

SEQ ID NO: 124347 - RNA, 22 nt, Human
uucaggauggcggauguugggg

SEQ ID NO: 124348 - RNA, 22 nt, Human
uaguggaggggaugcaaagcuu

SEQ ID NO: 124349 - RNA, 18 nt, Human
guucaaggucaagagaga

SEQ ID NO: 124350 - RNA, 22 nt, Human
uagguacauuauuagaugcaug

SEQ ID NO: 124351 - RNA, 22 nt, Human
ugcaugaaauauuuucuguagg

SEQ ID NO: 124352 - RNA, 22 nt, Human
ugcgcaggagcucugccaggag

SEQ ID NO: 124353 - RNA, 22 nt, Human
cuguacucaagguaaaccagga

SEQ ID NO: 124354 - RNA, 22 nt, Human
uccuccucuaucagacagugcc

SEQ ID NO: 124355 - RNA, 22 nt, Human
agauuuugucucaauacuucug

SEQ ID NO: 124356 - RNA, 22 nt, Human
auaaacaucuguuucucuucug

SEQ ID NO: 124357 - RNA, 22 nt, Human
ucagaggacagcagcuaaauaa

SEQ ID NO: 124358 - RNA, 22 nt, Human
aauggagacccuaaggaagagg

SEQ ID NO: 124359 - RNA, 22 nt, Human
uacaguuccaggaucauagggu

SEQ ID NO: 124360 - RNA, 22 nt, Human
aaggaagagaauccuucucaga

SEQ ID NO: 124361 - RNA, 22 nt, Human
uuugagaaaugggcucugugcu

SEQ ID NO: 124362 - RNA, 22 nt, Human
uagagcuauacacugaguaaaa

SEQ ID NO: 124363 - RNA, 22 nt, Human
auucucaaagccagagucaacg

SEQ ID NO: 124364 - RNA, 22 nt, Human
uuccucuuucucugugcuaugu

SEQ ID NO: 124365 - RNA, 22 nt, Human
ggcacaauugcagcaauaaaca

SEQ ID NO: 124366 - RNA, 20 nt, Human
cuguggcaucugucauggug

SEQ ID NO: 124367 - RNA, 22 nt, Human
agugcacuggcaccaucucagc

SEQ ID NO: 124368 - RNA, 22 nt, Human
agcagggccaacaguaaacacc

SEQ ID NO: 124369 - RNA, 22 nt, Human
cacaucauguuaauucauuaca

SEQ ID NO: 124370 - RNA, 22 nt, Human
uuugucaaucccuugaaaaccu

SEQ ID NO: 124371 - RNA, 22 nt, Human
uaucacuacacuaagauacaga

SEQ ID NO: 124372 - RNA, 20 nt, Human
ggagaugcagcccaggugcc

SEQ ID NO: 124373 - RNA, 22 nt, Human
uauaugcagugugucauucaag

SEQ ID NO: 124374 - RNA, 22 nt, Human
ugaaggagcugauguaaggggu

SEQ ID NO: 124375 - RNA, 22 nt, Human
uggcugagaaaaugguuuuagg

SEQ ID NO: 124376 - RNA, 22 nt, Human
uacagagacuuuauggcacaaa

SEQ ID NO: 124377 - RNA, 22 nt, Human
cuggcuuucugcacagaauugg

SEQ ID NO: 124378 - RNA, 22 nt, Human
caauuugacaaguugcauguuu

SEQ ID NO: 124379 - RNA, 22 nt, Human
gggcaguguggucgugccuuug

SEQ ID NO: 124380 - RNA, 22 nt, Human
acacuucuauucccugcacaaa

SEQ ID NO: 124381 - RNA, 22 nt, Human
uauuugaugguucuaaaacagc

SEQ ID NO: 124382 - RNA, 22 nt, Human
cauuuucagcacccaucugaaa

SEQ ID NO: 124383 - RNA, 22 nt, Human
caggcagccugagggaucuggg

SEQ ID NO: 124384 - RNA, 22 nt, Human
augagcagaugcuccugccucu

SEQ ID NO: 124385 - RNA, 22 nt, Human
gagaagguggaccugaaggagc

SEQ ID NO: 124386 - RNA, 22 nt, Human
gagcugagaucgugccauugca

SEQ ID NO: 124387 - RNA, 22 nt, Human
uggcagagaacacggcugaucu

SEQ ID NO: 124388 - RNA, 22 nt, Human
cagugcagucaaggaagaacca

SEQ ID NO: 124389 - RNA, 22 nt, Human
uagccggguguugugucaugca

SEQ ID NO: 124390 - RNA, 22 nt, Human
gugugcaggccacaggccaggg

SEQ ID NO: 124391 - RNA, 22 nt, Human
acaaaggcagagaauucaacau

SEQ ID NO: 124392 - RNA, 22 nt, Human
uuaugcaaaggggccucuuccu

SEQ ID NO: 124393 - RNA, 22 nt, Human
acuucauauggacagcaaacua

SEQ ID NO: 124394 - RNA, 22 nt, Human
ugaauaaacuaugaggaggaau

SEQ ID NO: 124395 - RNA, 22 nt, Human
gaagaagcaggaguguguagca

SEQ ID NO: 124396 - RNA, 22 nt, Human
ggcuguggccagcggggcugag

SEQ ID NO: 124397 - RNA, 20 nt, Human
ucauacacaugagcaugcag

SEQ ID NO: 124398 - RNA, 23 nt, Human
gccuggagaaaagcugcaguuca

SEQ ID NO: 124399 - RNA, 18 nt, Human
ggcagcaagaagggaggg

SEQ ID NO: 124400 - RNA, 22 nt, Human
acaguaccugcucucaagcaaa

SEQ ID NO: 124401 - RNA, 17 nt, Human
augauuacaucuuuccu

SEQ ID NO: 124402 - RNA, 22 nt, Human
gaggagaaauuauccuuggugu

SEQ ID NO: 124403 - RNA, 22 nt, Human
uuccaggacaagauguuucagg

SEQ ID NO: 124404 - RNA, 22 nt, Human
cagccagggucaggcagcuucu

SEQ ID NO: 124405 - RNA, 22 nt, Human
aauggaaugccucacauguauu

SEQ ID NO: 124406 - RNA, 22 nt, Human
ugaggcucagagaagugcuguu

SEQ ID NO: 124407 - RNA, 22 nt, Human
uggggcagcagaccuuucuugg

SEQ ID NO: 124408 - RNA, 19 nt, Human
ggagaagcaucuagaaaua

SEQ ID NO: 124409 - RNA, 22 nt, Human
uuucucaaggugucauguauuu

SEQ ID NO: 124410 - RNA, 22 nt, Human
cagcacaucugauuauaugacu

SEQ ID NO: 124411 - RNA, 22 nt, Human
auaaaauuugcuacuguuaaau

SEQ ID NO: 124412 - RNA, 22 nt, Human
agcuaagacuuagugacuuagu

SEQ ID NO: 124413 - RNA, 22 nt, Human
aagucuggaagucucaguuuuc

SEQ ID NO: 124414 - RNA, 18 nt, Human
ggcuguggacaagauuag

SEQ ID NO: 124415 - RNA, 22 nt, Human
agaacagucguggugagagaaa

SEQ ID NO: 124416 - RNA, 22 nt, Human
ggggcagcucccgagggcagga

SEQ ID NO: 124417 - RNA, 22 nt, Human
cuaaccuaguucaacaacuguc

SEQ ID NO: 124418 - RNA, 23 nt, Human
uuccuuaacuguuaagauugucu

SEQ ID NO: 124419 - RNA, 22 nt, Human
uuuauaucuuaugucauuucaa

SEQ ID NO: 124420 - RNA, 22 nt, Human
aagaacuuccuaauauauuuuc

SEQ ID NO: 124421 - RNA, 22 nt, Human
ugccaggcuguccugggccugg

SEQ ID NO: 124422 - RNA, 22 nt, Human
ugacauuucuuguugauauaaa

SEQ ID NO: 124423 - RNA, 20 nt, Human
ucugugcaguggaggggcag

SEQ ID NO: 124424 - RNA, 22 nt, Human
cucuggagaugguucucaauug

SEQ ID NO: 124425 - RNA, 23 nt, Human
uggcugagauccuacuguuugcu

SEQ ID NO: 124426 - RNA, 22 nt, Human
cagggcagggauguugcggcag

SEQ ID NO: 124427 - RNA, 22 nt, Human
auuuuaucugcuuacuuucagg

SEQ ID NO: 124428 - RNA, 22 nt, Human
uagggcaggggaggaaucugaa

SEQ ID NO: 124429 - RNA, 22 nt, Human
guaggaaagggagugaagggaa

SEQ ID NO: 124430 - RNA, 22 nt, Human
uggaaguggcagaaaaugaaca

SEQ ID NO: 124431 - RNA, 20 nt, Human
ugaggcaggagaauggcaug

SEQ ID NO: 124432 - RNA, 22 nt, Human
aggcuggggaauugaauuugcu

SEQ ID NO: 124433 - RNA, 22 nt, Human
ucagggcaagauugguuaauaa

SEQ ID NO: 124434 - RNA, 22 nt, Human
acagccugcagccccaggucgc

SEQ ID NO: 124435 - RNA, 22 nt, Human
gccaguggcccucuggagaagg

SEQ ID NO: 124436 - RNA, 22 nt, Human
agcuguggggcaggcagcgagg

SEQ ID NO: 124437 - RNA, 22 nt, Human
aggcugaggcuuuccuuggaga

SEQ ID NO: 124438 - RNA, 22 nt, Human
ugcagggccagacuggguugga

SEQ ID NO: 124439 - RNA, 22 nt, Human
acaguggaugacauccuuuugc

SEQ ID NO: 124440 - RNA, 22 nt, Human
cagggcaguaacgggaacaucu

SEQ ID NO: 124441 - RNA, 20 nt, Human
ucugugcauugccugcuggu

SEQ ID NO: 124442 - RNA, 22 nt, Human
uuuauccauucaccaguugaac

SEQ ID NO: 124443 - RNA, 22 nt, Human
cagcacaguacaaggcacggau

SEQ ID NO: 124444 - RNA, 22 nt, Human
aauaugauccuuaaccuucaug

SEQ ID NO: 124445 - RNA, 22 nt, Human
gcagguggagcaguagucuggu

SEQ ID NO: 124446 - RNA, 21 nt, Human
cccaggucguggucuucccag

SEQ ID NO: 124447 - RNA, 22 nt, Human
auggcagccugagcagaggaau

SEQ ID NO: 124448 - RNA, 22 nt, Human
uggaggcaguaacugagcaaca

SEQ ID NO: 124449 - RNA, 22 nt, Human
aaggaaauacaacauguauuca

SEQ ID NO: 124450 - RNA, 22 nt, Human
uaggaaauugccaauauaugac

SEQ ID NO: 124451 - RNA, 22 nt, Human
augcaaauuaacauauaguaga

SEQ ID NO: 124452 - RNA, 22 nt, Human
ugggggucaggaugaggccuug

SEQ ID NO: 124453 - RNA, 22 nt, Human
uggcugagugaacauguccauu

SEQ ID NO: 124454 - RNA, 22 nt, Human
ucucugagcccaauguagcaau

SEQ ID NO: 124455 - RNA, 22 nt, Human
cuccacagccccuccaguggca

SEQ ID NO: 124456 - RNA, 22 nt, Human
aggcugucucaccucaggaggg

SEQ ID NO: 124457 - RNA, 22 nt, Human
gacaucauggagaggauaaaua

SEQ ID NO: 124458 - RNA, 21 nt, Human
ucauuugugaucugauuucca

SEQ ID NO: 124459 - RNA, 22 nt, Human
auguaaacaagguuauugucca

SEQ ID NO: 124460 - RNA, 22 nt, Human
auuacacuaaugugacaacaau

SEQ ID NO: 124461 - RNA, 22 nt, Human
aguaaacaggcaugauaguguu

SEQ ID NO: 124462 - RNA, 22 nt, Human
ucuugcaggcggcucagcaacc

SEQ ID NO: 124463 - RNA, 22 nt, Human
agggccagagucuguguagaua

SEQ ID NO: 124464 - RNA, 22 nt, Human
ugacuccaaacagaaaacgaau

SEQ ID NO: 124465 - RNA, 17 nt, Human
gcugagaggcagcacag

SEQ ID NO: 124466 - RNA, 22 nt, Human
uuauagcagcaugauuuauaau

SEQ ID NO: 124467 - RNA, 22 nt, Human
aggagcagaacuguuguggagg

SEQ ID NO: 124468 - RNA, 22 nt, Human
caguggaauauauaggggauuu

SEQ ID NO: 124469 - RNA, 22 nt, Human
cccagccucuggguucugccgg

SEQ ID NO: 124470 - RNA, 19 nt, Human
aggauuuauuaugugcuca

SEQ ID NO: 124471 - RNA, 22 nt, Human
aggcugaggcagguggaucacc

SEQ ID NO: 124472 - RNA, 20 nt, Human
gggagaagggcugaugagag

SEQ ID NO: 124473 - RNA, 22 nt, Human
aauauaaauuccugggcccagc

SEQ ID NO: 124474 - RNA, 22 nt, Human
aauuuuguuuaagugaucugcu

SEQ ID NO: 124475 - RNA, 22 nt, Human
acaugauuaaaagauuuuaaag

SEQ ID NO: 124476 - RNA, 20 nt, Human
ggcagggcaucaacagcucu

SEQ ID NO: 124477 - RNA, 22 nt, Human
gagaugcugaaaucugagugua

SEQ ID NO: 124478 - RNA, 22 nt, Human
gagaggagguggcuaugacagc

SEQ ID NO: 124479 - RNA, 22 nt, Human
agguguguauaaacauacauau

SEQ ID NO: 124480 - RNA, 22 nt, Human
aggcucagcccaagguggagag

SEQ ID NO: 124481 - RNA, 22 nt, Human
gaggucaggcuugcagcagggu

SEQ ID NO: 124482 - RNA, 22 nt, Human
aaggugucacugggacaggaaa

SEQ ID NO: 124483 - RNA, 22 nt, Human
gaggcucaguuaugucaucagg

SEQ ID NO: 124484 - RNA, 22 nt, Human
ugaccuauuagauuuccuugcc

SEQ ID NO: 124485 - RNA, 22 nt, Human
cuuaaauuuucaucuacaagaa

SEQ ID NO: 124486 - RNA, 22 nt, Human
gauacauaaaaaugugcucuau

SEQ ID NO: 124487 - RNA, 22 nt, Human
auuacaguaacagcuacaaugc

SEQ ID NO: 124488 - RNA, 22 nt, Human
agaugcugauugaauagauuuc

SEQ ID NO: 124489 - RNA, 22 nt, Human
ucugcucuaguugcuuccugcc

SEQ ID NO: 124490 - RNA, 22 nt, Human
gaaggcaacaccaggaugcacu

SEQ ID NO: 124491 - RNA, 22 nt, Human
agagcugaggauccagcugagc

SEQ ID NO: 124492 - RNA, 22 nt, Human
ggcagaggaagcuggaaguggg

SEQ ID NO: 124493 - RNA, 22 nt, Human
gggaggugauuaggaccaugua

SEQ ID NO: 124494 - RNA, 22 nt, Human
uggggcucaccuaggcuggaag

SEQ ID NO: 124495 - RNA, 22 nt, Human
auuugauuagcuguguaauuuu

SEQ ID NO: 124496 - RNA, 22 nt, Human
aggugucuucagggugagacag

SEQ ID NO: 124497 - RNA, 22 nt, Human
agcagagguguuuauuauggga

SEQ ID NO: 124498 - RNA, 22 nt, Human
gagggccaauggauuucaacug

SEQ ID NO: 124499 - RNA, 22 nt, Human
ucagggcagaauccaaagaauu

SEQ ID NO: 124500 - RNA, 22 nt, Human
acuaaacacaugagauuccugc

SEQ ID NO: 124501 - RNA, 22 nt, Human
ugaggcagaaaauagcaguuca

SEQ ID NO: 124502 - RNA, 22 nt, Human
uggggaggacgggcgccuuccu

SEQ ID NO: 124503 - RNA, 22 nt, Human
caucauacuguuuacacucaaa

SEQ ID NO: 124504 - RNA, 22 nt, Human
gucuucauucucauagcccugg

SEQ ID NO: 124505 - RNA, 22 nt, Human
gcagagugccgagauggaagcg

SEQ ID NO: 124506 - RNA, 22 nt, Human
agggcagcccuucugggagggc

SEQ ID NO: 124507 - RNA, 22 nt, Human
agaagccagaauauucauggau

SEQ ID NO: 124508 - RNA, 22 nt, Human
gcuggggagcaagaguagugag

SEQ ID NO: 124509 - RNA, 22 nt, Human
uccuuuggagcuugacugguag

SEQ ID NO: 124510 - RNA, 22 nt, Human
ugaaaugcuguagagacuguau

SEQ ID NO: 124511 - RNA, 22 nt, Human
uagagauagcaguauugauucg

SEQ ID NO: 124512 - RNA, 22 nt, Human
caccagggacaaugcuaggggu

SEQ ID NO: 124513 - RNA, 22 nt, Human
cuuccccaaccccgacugugug

SEQ ID NO: 124514 - RNA, 22 nt, Human
caguggauuagccagagcugga

SEQ ID NO: 124515 - RNA, 22 nt, Human
cagaaggcaaacaaaaggauuu

SEQ ID NO: 124516 - RNA, 22 nt, Human
cagaggacaauagaauggaaag

SEQ ID NO: 124517 - RNA, 22 nt, Human
aggcaguguguagcuggaagag

SEQ ID NO: 124518 - RNA, 22 nt, Human
augauauagagaguagauuaaa

SEQ ID NO: 124519 - RNA, 22 nt, Human
auccucaguguuucugacaucu

SEQ ID NO: 124520 - RNA, 22 nt, Human
auucauuccaggucagucagac

SEQ ID NO: 124521 - RNA, 22 nt, Human
uggcagggucuugcuguguugc

SEQ ID NO: 124522 - RNA, 20 nt, Human
ucagggcaugggacagcccc

SEQ ID NO: 124523 - RNA, 22 nt, Human
auuacuaugauuugaucauuac

SEQ ID NO: 124524 - RNA, 22 nt, Human
aggaagccuggcauuaaaaagc

SEQ ID NO: 124525 - RNA, 22 nt, Human
caguucaggccggcugacucag

SEQ ID NO: 124526 - RNA, 22 nt, Human
caaaagaagcucuuggggcuag

SEQ ID NO: 124527 - RNA, 22 nt, Human
acaaauggagaaacugaggccc

SEQ ID NO: 124528 - RNA, 18 nt, Human
gagaggagccagaauuuu

SEQ ID NO: 124529 - RNA, 22 nt, Human
gaaagguugggugaauggugga

SEQ ID NO: 124530 - RNA, 22 nt, Human
accaggcuugaugauuugcuua

SEQ ID NO: 124531 - RNA, 19 nt, Human
aaaugugaugguacaauuc

SEQ ID NO: 124532 - RNA, 22 nt, Human
agcugagagccccugcccugug

SEQ ID NO: 124533 - RNA, 22 nt, Human
ugggaguggggcauagaaggua

SEQ ID NO: 124534 - RNA, 22 nt, Human
cuguccccgcgaguccagagcu

SEQ ID NO: 124535 - RNA, 19 nt, Human
aggcugugagggaggacuc

SEQ ID NO: 124536 - RNA, 22 nt, Human
gacaucauguucugcuaauagu

SEQ ID NO: 124537 - RNA, 22 nt, Human
aaagggcuuuauaucagugugu

SEQ ID NO: 124538 - RNA, 22 nt, Human
augcaaauaaagcaacuauaca

SEQ ID NO: 124539 - RNA, 21 nt, Human
aaguggagaagaaaagcugga

SEQ ID NO: 124540 - RNA, 22 nt, Human
ugaggcucagaaauguaaguuu

SEQ ID NO: 124541 - RNA, 22 nt, Human
cugagggaagggguacauggcu

SEQ ID NO: 124542 - RNA, 22 nt, Human
acagggcagaaauguugcaucu

SEQ ID NO: 124543 - RNA, 22 nt, Human
ucaaaggcauugccaauaagua

SEQ ID NO: 124544 - RNA, 22 nt, Human
ucacacacauaaucuaagauua

SEQ ID NO: 124545 - RNA, 18 nt, Human
uguaaacacuuucauucu

SEQ ID NO: 124546 - RNA, 22 nt, Human
uggcaggauuugcccggaagga

SEQ ID NO: 124547 - RNA, 22 nt, Human
agggugucagccacggaauggg

SEQ ID NO: 124548 - RNA, 18 nt, Human
cccagcccaccauuucuc

SEQ ID NO: 124549 - RNA, 22 nt, Human
aggcugaggcagguggaucauu

SEQ ID NO: 124550 - RNA, 23 nt, Human
aggcagagccaaggucaaaaccc

SEQ ID NO: 124551 - RNA, 22 nt, Human
agagcaaagggacauggaagag

SEQ ID NO: 124552 - RNA, 22 nt, Human
caaaggcuucaucucagagcag

SEQ ID NO: 124553 - RNA, 22 nt, Human
ugcugagaucugccaguagaug

SEQ ID NO: 124554 - RNA, 22 nt, Human
gaaacaaucaucaugugauuug

SEQ ID NO: 124555 - RNA, 22 nt, Human
ccugugcauccgguggucauug

SEQ ID NO: 124556 - RNA, 22 nt, Human
ggcuguggcagcuggaaguggu

SEQ ID NO: 124557 - RNA, 18 nt, Human
uuuauauggauagagacc

SEQ ID NO: 124558 - RNA, 22 nt, Human
accagaguaauguguggaaauu

SEQ ID NO: 124559 - RNA, 22 nt, Human
aagggcugcaauccaaaacacu

SEQ ID NO: 124560 - RNA, 22 nt, Human
acagugcagggugggaagaagg

SEQ ID NO: 124561 - RNA, 22 nt, Human
uccauccauguaggaagauggu

SEQ ID NO: 124562 - RNA, 22 nt, Human
cagcugugcugauugcucagua

SEQ ID NO: 124563 - RNA, 22 nt, Human
cauguacauucuguagauggag

SEQ ID NO: 124564 - RNA, 22 nt, Human
ggcaggcagaggcugagacagg

SEQ ID NO: 124565 - RNA, 22 nt, Human
cugagcagccccaccagccauu

SEQ ID NO: 124566 - RNA, 22 nt, Human
gacuucaaaggucaaacaucgc

SEQ ID NO: 124567 - RNA, 22 nt, Human
uguuaaucaacaacaaacagug

SEQ ID NO: 124568 - RNA, 22 nt, Human
ucuucagagugaaagucuguga

SEQ ID NO: 124569 - RNA, 22 nt, Human
gagacgggguuugagacggguu

SEQ ID NO: 124570 - RNA, 22 nt, Human
agggucagagucaggugcagua

SEQ ID NO: 124571 - RNA, 22 nt, Human
agauguggauccuaggguagaa

SEQ ID NO: 124572 - RNA, 22 nt, Human
ugaagccagucaauguuaaguu

SEQ ID NO: 124573 - RNA, 22 nt, Human
cuggccagguuuugaacaguug

SEQ ID NO: 124574 - RNA, 22 nt, Human
aggcugaggugugcugugaucg

SEQ ID NO: 124575 - RNA, 22 nt, Human
gauaaaagaggaaauuuguuca

SEQ ID NO: 124576 - RNA, 22 nt, Human
agagcagagggcucugggacaa

SEQ ID NO: 124577 - RNA, 22 nt, Human
uuacuguagaagagaaugauuc

SEQ ID NO: 124578 - RNA, 22 nt, Human
gauaaacuggaaccauugccuc

SEQ ID NO: 124579 - RNA, 22 nt, Human
cauccacuagaaugacagaguu

SEQ ID NO: 124580 - RNA, 22 nt, Human
augaauaaaacauuuuaaucag

SEQ ID NO: 124581 - RNA, 22 nt, Human
agagugcaugacaugaucuugg

SEQ ID NO: 124582 - RNA, 22 nt, Human
uuccucagccaaggcugggauc

SEQ ID NO: 124583 - RNA, 22 nt, Human
agguggagugaaggaaaggcag

SEQ ID NO: 124584 - RNA, 22 nt, Human
agggccagcuagagcccucgcc

SEQ ID NO: 124585 - RNA, 22 nt, Human
gugagaguguuuggaaauagaa

SEQ ID NO: 124586 - RNA, 22 nt, Human
auccucagaccucagcaaagcc

SEQ ID NO: 124587 - RNA, 22 nt, Human
agaagccauagucugggaggca

SEQ ID NO: 124588 - RNA, 19 nt, Human
acuagcacccagguaaaug

SEQ ID NO: 124589 - RNA, 22 nt, Human
ugcaaacaauuuccuauaaagu

SEQ ID NO: 124590 - RNA, 22 nt, Human
acuaacauuuguguaugucuug

SEQ ID NO: 124591 - RNA, 22 nt, Human
cugagaggcggagcuugcagug

SEQ ID NO: 124592 - RNA, 22 nt, Human
ggaggagacggagugauuagug

SEQ ID NO: 124593 - RNA, 22 nt, Human
uguuagcagagcagcugacaga

SEQ ID NO: 124594 - RNA, 22 nt, Human
uacaucaugaaagcauacauca

SEQ ID NO: 124595 - RNA, 22 nt, Human
acuuucauuuguaauaaacuuc

SEQ ID NO: 124596 - RNA, 22 nt, Human
ucagggcacugucaccugauau

SEQ ID NO: 124597 - RNA, 22 nt, Human
guggcaggagagacacagccau

SEQ ID NO: 124598 - RNA, 22 nt, Human
ugaggcagcccacuuuccuuag

SEQ ID NO: 124599 - RNA, 22 nt, Human
agggcaguucagccacaggcuc

SEQ ID NO: 124600 - RNA, 22 nt, Human
ugccaggcccugcgggguccca

SEQ ID NO: 124601 - RNA, 22 nt, Human
gucucuuuuauggugaguugau

SEQ ID NO: 124602 - RNA, 22 nt, Human
gcagggcagugugucugugggg

SEQ ID NO: 124603 - RNA, 22 nt, Human
ugagaugcugggaacaaggaag

SEQ ID NO: 124604 - RNA, 22 nt, Human
aggcucagauucacauuugguu

SEQ ID NO: 124605 - RNA, 22 nt, Human
caguggcgugaucucugcucac

SEQ ID NO: 124606 - RNA, 22 nt, Human
aacaucauuauguccauuaaug

SEQ ID NO: 124607 - RNA, 22 nt, Human
agggaggaaggauguuccaaag

SEQ ID NO: 124608 - RNA, 22 nt, Human
ucacugggcccugaggugggac

SEQ ID NO: 124609 - RNA, 22 nt, Human
gaauuagguaauagaacuagua

SEQ ID NO: 124610 - RNA, 19 nt, Human
uacagugaaccaggaggag

SEQ ID NO: 124611 - RNA, 22 nt, Human
ugcagagaaaccaguggaggac

SEQ ID NO: 124612 - RNA, 22 nt, Human
uagggcagaguccaggaugggc

SEQ ID NO: 124613 - RNA, 22 nt, Human
uggcugcagaucaagggcaggc

SEQ ID NO: 124614 - RNA, 22 nt, Human
gggggacuaacuggauccugga

SEQ ID NO: 124615 - RNA, 22 nt, Human
ccuguggggcugaaagaggcuu

SEQ ID NO: 124616 - RNA, 22 nt, Human
gaggcucacuuucauccucuuc

SEQ ID NO: 124617 - RNA, 22 nt, Human
caggucagagucccccuguccu

SEQ ID NO: 124618 - RNA, 22 nt, Human
cagaaguggccucagagggagu

SEQ ID NO: 124619 - RNA, 22 nt, Human
aucacaucucaccacugcaacc

SEQ ID NO: 124620 - RNA, 22 nt, Human
augaggcaaggaucagguaagg

SEQ ID NO: 124621 - RNA, 22 nt, Human
agaggcagcagucauacuacag

SEQ ID NO: 124622 - RNA, 22 nt, Human
gaugcaaacugugacauagagu

SEQ ID NO: 124623 - RNA, 22 nt, Human
cuuuccaacucuagugaaauuu

SEQ ID NO: 124624 - RNA, 22 nt, Human
augaggcagcugcuggagaacg

SEQ ID NO: 124625 - RNA, 22 nt, Human
agaaauacuuuguaaaucucac

SEQ ID NO: 124626 - RNA, 22 nt, Human
augccaggaacaaacaguggug

SEQ ID NO: 124627 - RNA, 22 nt, Human
ugaggcaggaggauugcaggau

SEQ ID NO: 124628 - RNA, 21 nt, Human
acagccugucaucucaugguc

SEQ ID NO: 124629 - RNA, 22 nt, Human
gcaguggaagccucuuuaagca

SEQ ID NO: 124630 - RNA, 22 nt, Human
aaacaugaugccuguacuaaga

SEQ ID NO: 124631 - RNA, 22 nt, Human
uacuggcaauuucauauggugc

SEQ ID NO: 124632 - RNA, 22 nt, Human
cugggcagcuguaucagggagu

SEQ ID NO: 124633 - RNA, 21 nt, Human
gggcagaggggccuccugggu

SEQ ID NO: 124634 - RNA, 22 nt, Human
aaauuagucgguuuaggaauuu

SEQ ID NO: 124635 - RNA, 20 nt, Human
agggucagagagcgugagug

SEQ ID NO: 124636 - RNA, 22 nt, Human
ccuccuagaggaaccccagggc

SEQ ID NO: 124637 - RNA, 22 nt, Human
ucugaaggugcuagagaaagcu

SEQ ID NO: 124638 - RNA, 22 nt, Human
aauguggaugauacuaguacuu

SEQ ID NO: 124639 - RNA, 22 nt, Human
cagugcagaggccagggaggau

SEQ ID NO: 124640 - RNA, 22 nt, Human
augggcagcugcagcaguggug

SEQ ID NO: 124641 - RNA, 19 nt, Human
aggugcaggucacagggga

SEQ ID NO: 124642 - RNA, 22 nt, Human
uggcagagccuugccaaacucc

SEQ ID NO: 124643 - RNA, 22 nt, Human
agccagggagguggagguugca

SEQ ID NO: 124644 - RNA, 21 nt, Human
uguggcagauguugggaggca

SEQ ID NO: 124645 - RNA, 21 nt, Human
aggugcaggccucaagcccca

SEQ ID NO: 124646 - RNA, 22 nt, Human
ugcagggccgcuggaggucaug

SEQ ID NO: 124647 - RNA, 22 nt, Human
aggcucagcugguggugaucgc

SEQ ID NO: 124648 - RNA, 22 nt, Human
cgaugcuggaaugacagcugcu

SEQ ID NO: 124649 - RNA, 22 nt, Human
ugcagggccccucugcaugagu

SEQ ID NO: 124650 - RNA, 22 nt, Human
uggcugagccuuuggggcuuuc

SEQ ID NO: 124651 - RNA, 22 nt, Human
acuaaaugcauugguaucuauu

SEQ ID NO: 124652 - RNA, 22 nt, Human
auggcaagcaagcugaagagau

SEQ ID NO: 124653 - RNA, 22 nt, Human
ggggcaggagcccuucuucagc

SEQ ID NO: 124654 - RNA, 22 nt, Human
aauaugcauuauacagacugau

SEQ ID NO: 124655 - RNA, 22 nt, Human
ggaggagcacuucugagcucag

SEQ ID NO: 124656 - RNA, 22 nt, Human
caaggcugugcaggguccauau

SEQ ID NO: 124657 - RNA, 22 nt, Human
ggaggcacuucccgucucagcc

SEQ ID NO: 124658 - RNA, 22 nt, Human
ggccaggagcaagccaggcucu

SEQ ID NO: 124659 - RNA, 22 nt, Human
caggaagcugagcugcacugca

SEQ ID NO: 124660 - RNA, 22 nt, Human
ccagggcaggagaaagacucac

SEQ ID NO: 124661 - RNA, 22 nt, Human
ucaaacaggacuacauucucau

SEQ ID NO: 124662 - RNA, 22 nt, Human
ggcugcagaggcgaucugaggu

SEQ ID NO: 124663 - RNA, 22 nt, Human
caugaauauacauccugauggc

SEQ ID NO: 124664 - RNA, 19 nt, Human
agagaugcuaagagucuuu

SEQ ID NO: 124665 - RNA, 22 nt, Human
gggagggaaagcuugaucuguc

SEQ ID NO: 124666 - RNA, 22 nt, Human
cgcaccacugaauuccagccug

SEQ ID NO: 124667 - RNA, 22 nt, Human
ucccaggcaaaggcagcucauu

SEQ ID NO: 124668 - RNA, 22 nt, Human
ggaggcagaauagagugugggu

SEQ ID NO: 124669 - RNA, 22 nt, Human
acaggcagguugagaaacauuu

SEQ ID NO: 124670 - RNA, 22 nt, Human
ucaguaaccuuuagcacaguug

SEQ ID NO: 124671 - RNA, 22 nt, Human
uacagugagacuggcucaggga

SEQ ID NO: 124672 - RNA, 22 nt, Human
ucucugagcaugccauauugcu

SEQ ID NO: 124673 - RNA, 22 nt, Human
ggcugugaacccuggcagugug

SEQ ID NO: 124674 - RNA, 22 nt, Human
gagcaugguuccauagguuggu

SEQ ID NO: 124675 - RNA, 22 nt, Human
cggcagggcuccaugcauuucu

SEQ ID NO: 124676 - RNA, 22 nt, Human
gccaccuguuucgcuugcccag

SEQ ID NO: 124677 - RNA, 22 nt, Human
caggagcaugcugaugccagaa

SEQ ID NO: 124678 - RNA, 22 nt, Human
ggagcacccugcucagccaagc

SEQ ID NO: 124679 - RNA, 20 nt, Human
accagguggcugaugacacc

SEQ ID NO: 124680 - RNA, 22 nt, Human
uggcagaguuauggguauuuau

SEQ ID NO: 124681 - RNA, 22 nt, Human
gcagaugaggaagcuaaugcug

SEQ ID NO: 124682 - RNA, 22 nt, Human
gcagccacagaggagggaugca

SEQ ID NO: 124683 - RNA, 22 nt, Human
aauuacugaugccuguguucca

SEQ ID NO: 124684 - RNA, 22 nt, Human
gggagagguuacccgagcaacu

SEQ ID NO: 124685 - RNA, 22 nt, Human
ggagagggggcucccugcuugg

SEQ ID NO: 124686 - RNA, 22 nt, Human
caguggaggcucaagugugcuu

SEQ ID NO: 124687 - RNA, 19 nt, Human
ucaaaggcuuuuaggagac

SEQ ID NO: 124688 - RNA, 22 nt, Human
ggugaaggcacaagagggcaag

SEQ ID NO: 124689 - RNA, 22 nt, Human
augcuuuuccaggagaaauaua

SEQ ID NO: 124690 - RNA, 22 nt, Human
ucucccagaggaucccagugga

SEQ ID NO: 124691 - RNA, 22 nt, Human
uaaaggcucacuggcuuggggu

SEQ ID NO: 124692 - RNA, 22 nt, Human
ucucccaggcuggagugcagug

SEQ ID NO: 124693 - RNA, 22 nt, Human
gcugugcauggagggccguuca

SEQ ID NO: 124694 - RNA, 22 nt, Human
cauuuguagcuauuuacuguau

SEQ ID NO: 124695 - RNA, 22 nt, Human
uuugagaagcaucugguccacu

SEQ ID NO: 124696 - RNA, 19 nt, Human
aggcagaggcuuggcuagc

SEQ ID NO: 124697 - RNA, 22 nt, Human
uugggacagaaaaggagaagau

SEQ ID NO: 124698 - RNA, 22 nt, Human
cacugcccagcgucuuaggcac

SEQ ID NO: 124699 - RNA, 22 nt, Human
ugaggcagcuuuuucugugugu

SEQ ID NO: 124700 - RNA, 22 nt, Human
uuugacaugcaaagcacuuuag

SEQ ID NO: 124701 - RNA, 22 nt, Human
ugucauauagauauuagacagg

SEQ ID NO: 124702 - RNA, 22 nt, Human
aggaaggagggcagauauuaag

SEQ ID NO: 124703 - RNA, 22 nt, Human
uuauagcagcaugauuuauagu

SEQ ID NO: 124704 - RNA, 22 nt, Human
ccugggcaacauagggagaccc

SEQ ID NO: 124705 - RNA, 22 nt, Human
aaagucugagcagaauuucuca

SEQ ID NO: 124706 - RNA, 22 nt, Human
ccuguuuauugugaagaaccca

SEQ ID NO: 124707 - RNA, 22 nt, Human
augauauacuuccuagaacagu

SEQ ID NO: 124708 - RNA, 23 nt, Human
uagggcagcugggagggacaugc

SEQ ID NO: 124709 - RNA, 22 nt, Human
aagagaaggauucugagccugg

SEQ ID NO: 124710 - RNA, 22 nt, Human
uuauagugcauaauuaacaugg

SEQ ID NO: 124711 - RNA, 22 nt, Human
gagucugaugucccccaggcca

SEQ ID NO: 124712 - RNA, 22 nt, Human
ccugcccagcuucccgagugca

SEQ ID NO: 124713 - RNA, 22 nt, Human
aggucagcugcugauaggcagc

SEQ ID NO: 124714 - RNA, 22 nt, Human
gacagaggcaagaccagaagcc

SEQ ID NO: 124715 - RNA, 20 nt, Human
agagugagacuccaucucag

SEQ ID NO: 124716 - RNA, 22 nt, Human
gcugagagugagcacuggauau

SEQ ID NO: 124717 - RNA, 22 nt, Human
aggugcagcugguggagucugg

SEQ ID NO: 124718 - RNA, 22 nt, Human
uguguugugacauucuuggaug

SEQ ID NO: 124719 - RNA, 22 nt, Human
ucaccaggauuccuaucaguag

SEQ ID NO: 124720 - RNA, 22 nt, Human
ugauuucucuuggcaauauguu

SEQ ID NO: 124721 - RNA, 22 nt, Human
aacauugaauuuaaaauacagu

SEQ ID NO: 124722 - RNA, 22 nt, Human
agagaaggucacuaaggaccca

SEQ ID NO: 124723 - RNA, 22 nt, Human
uaucuguugucuuuuacaugua

SEQ ID NO: 124724 - RNA, 22 nt, Human
aagacaugcaauuagcaaggaa

SEQ ID NO: 124725 - RNA, 22 nt, Human
caugaauauuuaguauuuacuu

SEQ ID NO: 124726 - RNA, 18 nt, Human
auaauaggagauaaaaau

SEQ ID NO: 124727 - RNA, 22 nt, Human
auuuauugguuugcauggugaa

SEQ ID NO: 124728 - RNA, 22 nt, Human
agccuauuccaggaugagcuca

SEQ ID NO: 124729 - RNA, 22 nt, Human
ugcagugggccggaggccaggg

SEQ ID NO: 124730 - RNA, 22 nt, Human
caccaggcuggagugcagaggu

SEQ ID NO: 124731 - RNA, 22 nt, Human
cagcuguguaugagagcaugcu

SEQ ID NO: 124732 - RNA, 22 nt, Human
ugccgcagugcggggagggccc

SEQ ID NO: 124733 - RNA, 22 nt, Human
augauuacucccauuugauaga

SEQ ID NO: 124734 - RNA, 22 nt, Human
aggccaggaccauuagcccaga

SEQ ID NO: 124735 - RNA, 22 nt, Human
ugggaggucucuugcggccuag

SEQ ID NO: 124736 - RNA, 22 nt, Human
ugaugacaaacuuuccugaugc

SEQ ID NO: 124737 - RNA, 22 nt, Human
gcagccucaaacuccccagcuc

SEQ ID NO: 124738 - RNA, 22 nt, Human
guaaucucagcuacuugggagg

SEQ ID NO: 124739 - RNA, 22 nt, Human
ggagaaggaauauuggaguagg

SEQ ID NO: 124740 - RNA, 22 nt, Human
auacaguagacaaucucaugaa

SEQ ID NO: 124741 - RNA, 22 nt, Human
gccuggaguagcauggcaagcc

SEQ ID NO: 124742 - RNA, 22 nt, Human
uuccucaguuagugccugaggc

SEQ ID NO: 124743 - RNA, 22 nt, Human
auucucaauuuugccaaagggu

SEQ ID NO: 124744 - RNA, 22 nt, Human
gagucugagucuaauggcccca

SEQ ID NO: 124745 - RNA, 19 nt, Human
uggcagaggacaaggacuu

SEQ ID NO: 124746 - RNA, 22 nt, Human
ccaguggaaauguggucaggau

SEQ ID NO: 124747 - RNA, 22 nt, Human
uggagcuggcuuguggaaguug

SEQ ID NO: 124748 - RNA, 22 nt, Human
cuuagaugaagucacagaaccc

SEQ ID NO: 124749 - RNA, 22 nt, Human
ggcaggaggugaguggcgggug

SEQ ID NO: 124750 - RNA, 22 nt, Human
uccuguggaagacaguguuggg

SEQ ID NO: 124751 - RNA, 22 nt, Human
ugaggcuccagccaggccagca

SEQ ID NO: 124752 - RNA, 22 nt, Human
auaaugcaccuuugaguauggc

SEQ ID NO: 124753 - RNA, 22 nt, Human
uuauuuacaacucuucucuucc

SEQ ID NO: 124754 - RNA, 22 nt, Human
ucuguccuguuuccuccugaca

SEQ ID NO: 124755 - RNA, 22 nt, Human
auuccaaaaggauguuagaaug

SEQ ID NO: 124756 - RNA, 22 nt, Human
agaagccagcuucagcugcccg

SEQ ID NO: 124757 - RNA, 22 nt, Human
uagagcuagcuucaaaaugcga

SEQ ID NO: 124758 - RNA, 22 nt, Human
gauggcaggcaggugaguagag

SEQ ID NO: 124759 - RNA, 22 nt, Human
gagcucagggcauugagcaaga

SEQ ID NO: 124760 - RNA, 23 nt, Human
ccacuagcaccuguucaacuucu

SEQ ID NO: 124761 - RNA, 22 nt, Human
aguggcagggcuggcugcugca

SEQ ID NO: 124762 - RNA, 22 nt, Human
caggaccccauauucacugaac

SEQ ID NO: 124763 - RNA, 22 nt, Human
uguaaagcaucucugucauaua

SEQ ID NO: 124764 - RNA, 22 nt, Human
acagggcagcaacuuugugccu

SEQ ID NO: 124765 - RNA, 22 nt, Human
gccaggugggagacagacagca

SEQ ID NO: 124766 - RNA, 22 nt, Human
gggggaggugaaugcaauaagg

SEQ ID NO: 124767 - RNA, 22 nt, Human
auacauacauguacacauaaau

SEQ ID NO: 124768 - RNA, 18 nt, Human
aggcagcagcaucuucuc

SEQ ID NO: 124769 - RNA, 22 nt, Human
augcuuuuaugucacaugguca

SEQ ID NO: 124770 - RNA, 22 nt, Human
aggugcaguggcucaugccugu

SEQ ID NO: 124771 - RNA, 22 nt, Human
uucacuuauagggauguuauug

SEQ ID NO: 124772 - RNA, 22 nt, Human
uuguccaaggucccacaguuag

SEQ ID NO: 124773 - RNA, 20 nt, Human
uaggcagagcugugcagccu

SEQ ID NO: 124774 - RNA, 22 nt, Human
ucacaucauggagaauuauggg

SEQ ID NO: 124775 - RNA, 22 nt, Human
uacugugacagaguacuuaaac

SEQ ID NO: 124776 - RNA, 22 nt, Human
gacagggaggagcagagcuucu

SEQ ID NO: 124777 - RNA, 22 nt, Human
uccugguggcuuucccugccuu

SEQ ID NO: 124778 - RNA, 22 nt, Human
aagacauuuauuugaaucaauu

SEQ ID NO: 124779 - RNA, 22 nt, Human
agagguaugguauauuggaaga

SEQ ID NO: 124780 - RNA, 22 nt, Human
cggggcaggagucccuguagag

SEQ ID NO: 124781 - RNA, 22 nt, Human
ucaucaaagucaaagaaugacu

SEQ ID NO: 124782 - RNA, 22 nt, Human
agugucuuuagcaaguuuaguc

SEQ ID NO: 124783 - RNA, 20 nt, Human
agguuuauauuuagaggugu

SEQ ID NO: 124784 - RNA, 22 nt, Human
guguuuuauuggugcagucaga

SEQ ID NO: 124785 - RNA, 22 nt, Human
ggcugcaggaugcccagccgug

SEQ ID NO: 124786 - RNA, 22 nt, Human
gaggagaagcuaagaaacacag

SEQ ID NO: 124787 - RNA, 22 nt, Human
cugaggaggggccugagugaga

SEQ ID NO: 124788 - RNA, 22 nt, Human
ugccagaguuacaugaggguca

SEQ ID NO: 124789 - RNA, 22 nt, Human
ccagggcagccaacccagaugc

SEQ ID NO: 124790 - RNA, 22 nt, Human
cauuguuauagcauuacacacc

SEQ ID NO: 124791 - RNA, 22 nt, Human
aguggcagaucucuggucugga

SEQ ID NO: 124792 - RNA, 22 nt, Human
ucagaggagaaguugggaaaau

SEQ ID NO: 124793 - RNA, 22 nt, Human
gggcaugagaggcaggcaagug

SEQ ID NO: 124794 - RNA, 22 nt, Barmah Forest virus
auaagauuaguuuguuauguaa

SEQ ID NO: 124795 - RNA, 22 nt, Barmah Forest virus
cuagacucgcuaguacugugau

SEQ ID NO: 124796 - RNA, 22 nt, Barmah Forest virus
gucauaguaaugugagacuaug

SEQ ID NO: 124797 - RNA, 22 nt, Human
agcugugggauuugggugugcc

SEQ ID NO: 124798 - RNA, 20 nt, Human
uggcaggaggcagcagugga

SEQ ID NO: 124799 - RNA, 22 nt, Human
agucaacaaaaauguggagccu

SEQ ID NO: 124800 - RNA, 22 nt, Human
caagauggagaagcagcaaggg

SEQ ID NO: 124801 - RNA, 22 nt, Human
gggccagugaacaaugagggaa

SEQ ID NO: 124802 - RNA, 22 nt, Human
cagagcugagaauguugaugcu

SEQ ID NO: 124803 - RNA, 23 nt, Human
agguucaggagauggaggaacaa

SEQ ID NO: 124804 - RNA, 22 nt, Human
aaggcugccucugccagaggag

SEQ ID NO: 124805 - RNA, 22 nt, Human
ugaaauuccaggagaguuaaaa

SEQ ID NO: 124806 - RNA, 22 nt, Human
gaggcuggcagaaaagcacagg

SEQ ID NO: 124807 - RNA, 22 nt, Human
ugaguccaucgcagggaagugg

SEQ ID NO: 124808 - RNA, 22 nt, Human
cagaagaggacuggguagcuca

SEQ ID NO: 124809 - RNA, 22 nt, Human
agccaggccagcugucuugagu

SEQ ID NO: 124810 - RNA, 22 nt, Human
cugaggcagagggcagaccaga

SEQ ID NO: 124811 - RNA, 22 nt, Human
ccucgcggcacucgggccggau

SEQ ID NO: 124812 - RNA, 22 nt, Human
cauuugcauaugaagaaguaag

SEQ ID NO: 124813 - RNA, 22 nt, Human
agggucuguggaugcaucuggg

SEQ ID NO: 124814 - RNA, 22 nt, Human
gucucuuuuauggugaguugau

SEQ ID NO: 124815 - RNA, 22 nt, Human
aggcuucagaugaccuuagcau

SEQ ID NO: 124816 - RNA, 22 nt, Human
ucccaggaaaacacucgaggac

SEQ ID NO: 124817 - RNA, 22 nt, Human
ugaggcaggacugagcgggaug

SEQ ID NO: 124818 - RNA, 22 nt, Human
cagagcuggggacuguuggaug

SEQ ID NO: 124819 - RNA, 22 nt, Human
gccaguggcaugcggcagggac

SEQ ID NO: 124820 - RNA, 22 nt, Human
ucagggcacauucugcaguggc

SEQ ID NO: 124821 - RNA, 22 nt, Human
guuguacagcauccagugcaga

SEQ ID NO: 124822 - RNA, 22 nt, Human
gccucgaggcugagaaggcaca

SEQ ID NO: 124823 - RNA, 22 nt, Human
ugaagccaaucugccaggcaga

SEQ ID NO: 124824 - RNA, 21 nt, Human
ugaggcucaucuuauguggcu

SEQ ID NO: 124825 - RNA, 22 nt, Human
gaaggagagggucaaggauaau

SEQ ID NO: 124826 - RNA, 22 nt, Human
cugaggcugggcauggggucca

SEQ ID NO: 124827 - RNA, 22 nt, Human
auuuccaaucucugcauauggg

SEQ ID NO: 124828 - RNA, 22 nt, Human
cugugacuguguuggaugcaca

SEQ ID NO: 124829 - RNA, 22 nt, Human
gagagaggccuccauguacuga

SEQ ID NO: 124830 - RNA, 22 nt, Human
uuccucagagggcgcuggggaa

SEQ ID NO: 124831 - RNA, 22 nt, Human
aggcugagcugaccugguuugg

SEQ ID NO: 124832 - RNA, 22 nt, Human
uggaaggagcuaaggaccuggg

SEQ ID NO: 124833 - RNA, 23 nt, Human
uuccuuaacuguuaagauugucu

SEQ ID NO: 124834 - RNA, 22 nt, Human
gagagcugugguuugaccaggc

SEQ ID NO: 124835 - RNA, 22 nt, Human
ugcagggcaguuuguuucggca

SEQ ID NO: 124836 - RNA, 22 nt, Human
gaggcucauugcauugugcauu

SEQ ID NO: 124837 - RNA, 22 nt, Human
agccuccuguagcccucaccca

SEQ ID NO: 124838 - RNA, 23 nt, Human
cagugcagggcaacucagacucc

SEQ ID NO: 124839 - RNA, 22 nt, Human
caccuagggcaucccugcccca

SEQ ID NO: 124840 - RNA, 22 nt, Human
ccagaggagggcucugaugagg

SEQ ID NO: 124841 - RNA, 22 nt, Human
aggcagagcuaggaagaauugu

SEQ ID NO: 124842 - RNA, 22 nt, Human
cugccagguuggcgcucgcucu

SEQ ID NO: 124843 - RNA, 22 nt, Human
gaaggaagucauuagugcagac

SEQ ID NO: 124844 - RNA, 22 nt, Human
agcuaagacuuagugacuuagu

SEQ ID NO: 124845 - RNA, 22 nt, Human
cagagcccagggccuacguccc

SEQ ID NO: 124846 - RNA, 22 nt, Human
ucagaggacuaccuucuccagu

SEQ ID NO: 124847 - RNA, 22 nt, Human
gcaaaggccacuggggcgaugg

SEQ ID NO: 124848 - RNA, 22 nt, Human
aggggaaggccagccuguagag

SEQ ID NO: 124849 - RNA, 19 nt, Human
ucucccagcugagaagggc

SEQ ID NO: 124850 - RNA, 22 nt, Human
ccagugcacagccaggcaggug

SEQ ID NO: 124851 - RNA, 22 nt, Human
gugcaggagguaacauagcaaa

SEQ ID NO: 124852 - RNA, 22 nt, Human
ugacauuuaagccucugauuuc

SEQ ID NO: 124853 - RNA, 22 nt, Human
gugugggcugcagaggcacagc

SEQ ID NO: 124854 - RNA, 22 nt, Human
gaaggcugaguggguacggagg

SEQ ID NO: 124855 - RNA, 22 nt, Human
aggccaggaccauuagcccaga

SEQ ID NO: 124856 - RNA, 22 nt, Human
uugaucagguugcuguggugua

SEQ ID NO: 124857 - RNA, 22 nt, Human
ccagaggaugcuggucagccuc

SEQ ID NO: 124858 - RNA, 20 nt, Human
aguggggagucaggagugcc

SEQ ID NO: 124859 - RNA, 22 nt, Human
ggaagccaguugcuuggugugg

SEQ ID NO: 124860 - RNA, 22 nt, Human
aggcagagaaaaaccagauaug

SEQ ID NO: 124861 - RNA, 22 nt, Human
ucagaggaggcauuuaaacaga

SEQ ID NO: 124862 - RNA, 22 nt, Human
uucucagauccaucagaagucc

SEQ ID NO: 124863 - RNA, 22 nt, Human
uuuucaagggcagggaaaucau

SEQ ID NO: 124864 - RNA, 22 nt, Human
gagggcugauaaaugcgcaugg

SEQ ID NO: 124865 - RNA, 17 nt, Human
gcagccagugcagcagg

SEQ ID NO: 124866 - RNA, 22 nt, Human
ucuccugguuuguuaaauaauu

SEQ ID NO: 124867 - RNA, 22 nt, Human
aaagccagaguguguuagagac

SEQ ID NO: 124868 - RNA, 18 nt, Human
acagaggcagacauguau

SEQ ID NO: 124869 - RNA, 22 nt, Human
aggcugaggaucguacuuucca

SEQ ID NO: 124870 - RNA, 19 nt, Human
accaggccucagaggcccu

SEQ ID NO: 124871 - RNA, 22 nt, Human
acagaguuaauggauaggcagg

SEQ ID NO: 124872 - RNA, 18 nt, Human
cagggcuguggggucacu

SEQ ID NO: 124873 - RNA, 22 nt, Human
ugcaggaauuuuuugcagaaag

SEQ ID NO: 124874 - RNA, 22 nt, Human
ugucagagcaaugagguucagc

SEQ ID NO: 124875 - RNA, 22 nt, Human
gaggcucaccuagggagcacug

SEQ ID NO: 124876 - RNA, 22 nt, Human
agugugagccuacaggccaaag

SEQ ID NO: 124877 - RNA, 22 nt, Human
aaagcagcagcaccugcauuuc

SEQ ID NO: 124878 - RNA, 23 nt, Human
acagccaguucaccucuccuugg

SEQ ID NO: 124879 - RNA, 22 nt, Human
ugaguccaagagccagugggaa

SEQ ID NO: 124880 - RNA, 22 nt, Human
cagagcggccacuagagggcgc

SEQ ID NO: 124881 - RNA, 22 nt, Human
uuacucagucucccauacauug

SEQ ID NO: 124882 - RNA, 22 nt, Human
gggaggaaaugugcagcgaauu

SEQ ID NO: 124883 - RNA, 22 nt, Human
gcuguggaugcuauggaucauc

SEQ ID NO: 124884 - RNA, 22 nt, Human
cagggcuggcuguggcaaucuc

SEQ ID NO: 124885 - RNA, 22 nt, Human
cccaggucugccagccuguggg

SEQ ID NO: 124886 - RNA, 23 nt, Human
acacauuuuucccguucugaggu

SEQ ID NO: 124887 - RNA, 22 nt, Human
ugaggcagcuuuuucugugugu

SEQ ID NO: 124888 - RNA, 22 nt, Human
ccggcucggcgaccaggcugaa

SEQ ID NO: 124889 - RNA, 22 nt, Human
gguucccggaucuccgaguccc

SEQ ID NO: 124890 - RNA, 22 nt, Human
ugaggcagccugcauuaaagag

SEQ ID NO: 124891 - RNA, 22 nt, Human
aggcagcauccagaggagaaug

SEQ ID NO: 124892 - RNA, 22 nt, Human
ucaccaggcuccuguuaagaug

SEQ ID NO: 124893 - RNA, 22 nt, Human
cccagguguuuguggcagaggu

SEQ ID NO: 124894 - RNA, 22 nt, Human
gaggcgagaagcuggagauggu

SEQ ID NO: 124895 - RNA, 22 nt, Human
cuuuccaacucuagugaaauuu

SEQ ID NO: 124896 - RNA, 22 nt, Human
gcugagagugagcacuggauau

SEQ ID NO: 124897 - RNA, 23 nt, Human
ugccagaggcagucacaguggug

SEQ ID NO: 124898 - RNA, 22 nt, Human
gugugcaggccacaggccaggg

SEQ ID NO: 124899 - RNA, 22 nt, Human
agagccaguuacaacuguggag

SEQ ID NO: 124900 - RNA, 22 nt, Human
aggcugagguaggaggaucgcu

SEQ ID NO: 124901 - RNA, 22 nt, Human
ucccaggauguuggcggcaggu

SEQ ID NO: 124902 - RNA, 22 nt, Human
auggcagagggauugaacagcu

SEQ ID NO: 124903 - RNA, 22 nt, Human
uacacacaugcauuugccuuau

SEQ ID NO: 124904 - RNA, 22 nt, Human
uuucauuacguguuugacuugu

SEQ ID NO: 124905 - RNA, 22 nt, Human
caggaaggcgcggcugugccug

SEQ ID NO: 124906 - RNA, 22 nt, Human
uagagcugcuggacuguaacag

SEQ ID NO: 124907 - RNA, 22 nt, Human
cagagcagacguugagauuaag

SEQ ID NO: 124908 - RNA, 22 nt, Human
guggcagggugcucaucaugca

SEQ ID NO: 124909 - RNA, 22 nt, Human
gggggcaguaaccucaaagugu

SEQ ID NO: 124910 - RNA, 22 nt, Human
aaguccagcagugcuuguugau

SEQ ID NO: 124911 - RNA, 22 nt, Human
agcagggcaugaauaaggguuu

SEQ ID NO: 124912 - RNA, 22 nt, Human
cggggcaggagucccuguagag

SEQ ID NO: 124913 - RNA, 22 nt, Human
ucaguggagcuaagcaugagau

SEQ ID NO: 124914 - RNA, 22 nt, Human
augcugugccuggaaagcggcu

SEQ ID NO: 124915 - RNA, 22 nt, Human
agaaugcauuuuguguagcuau

SEQ ID NO: 124916 - RNA, 20 nt, Human
acaguggaaauugaugucug

SEQ ID NO: 124917 - RNA, 19 nt, Human
caguggagauuggaggagg

SEQ ID NO: 124918 - RNA, 22 nt, Human
caccagggcucugagcucugaa

SEQ ID NO: 124919 - RNA, 22 nt, Human
guuucaaagcacagcucacauu

SEQ ID NO: 124920 - RNA, 22 nt, Human
aaagucugagcagaauuucuca

SEQ ID NO: 124921 - RNA, 22 nt, Human
caguggaauauauaggggauuu

SEQ ID NO: 124922 - RNA, 22 nt, Human
cugcugugagugguucuugccu

SEQ ID NO: 124923 - RNA, 22 nt, Human
ugccaggccacguagcuucaag

SEQ ID NO: 124924 - RNA, 22 nt, Human
uagggcaggugaagaaaagcua

SEQ ID NO: 124925 - RNA, 22 nt, Human
gaggcugaauggccagaagcca

SEQ ID NO: 124926 - RNA, 22 nt, Human
aggcugucucaccucaggaggg

SEQ ID NO: 124927 - RNA, 22 nt, Human
gccucccugagucacccaagca

SEQ ID NO: 124928 - RNA, 19 nt, Human
aggcaggugcagagguccc

SEQ ID NO: 124929 - RNA, 16 nt, Human
gcagaggaaaggggag

SEQ ID NO: 124930 - RNA, 22 nt, Human
aggcagcagagguugaggaaag

SEQ ID NO: 124931 - RNA, 22 nt, Human
gaggcacaauacaugucucaag

SEQ ID NO: 124932 - RNA, 22 nt, Human
agggucagguuaagggagucau

SEQ ID NO: 124933 - RNA, 22 nt, Human
acacacuguugcucauccaggc

SEQ ID NO: 124934 - RNA, 22 nt, Human
uggcagguuuccuccucauagu

SEQ ID NO: 124935 - RNA, 22 nt, Human
uugccucccagcaugggcagcu

SEQ ID NO: 124936 - RNA, 22 nt, Human
agcccucugcaaacaccugaua

SEQ ID NO: 124937 - RNA, 22 nt, Human
gcaggagcuggaaagugauguu

SEQ ID NO: 124938 - RNA, 22 nt, Human
uuuaucacagaauaagaaguca

SEQ ID NO: 124939 - RNA, 22 nt, Human
agguggcaggaggucagagaaa

SEQ ID NO: 124940 - RNA, 22 nt, Human
ggaggaagugcaguucuacuac

SEQ ID NO: 124941 - RNA, 22 nt, Human
augaggcaucuaacauugcaaa

SEQ ID NO: 124942 - RNA, 22 nt, Human
ccucccuggccagagcagcagc

SEQ ID NO: 124943 - RNA, 22 nt, Human
gcaggagccaggccgagcuggu

SEQ ID NO: 124944 - RNA, 22 nt, Human
aguggcagagguugacugcagu

SEQ ID NO: 124945 - RNA, 20 nt, Human
aggccaggaaauguaguucu

SEQ ID NO: 124946 - RNA, 22 nt, Human
gcagccugaggcccuuucuggc

SEQ ID NO: 124947 - RNA, 23 nt, Human
agggcaugaagcagaggacgugg

SEQ ID NO: 124948 - RNA, 22 nt, Human
aggcucaggucucaggucuggc

SEQ ID NO: 124949 - RNA, 20 nt, Human
ugaggcaggagaauggcaug

SEQ ID NO: 124950 - RNA, 22 nt, Human
caccaggcuggagugcagaggu

SEQ ID NO: 124951 - RNA, 22 nt, Human
acaaguggguccuacauaaagc

SEQ ID NO: 124952 - RNA, 22 nt, Human
cacaggaaugaacagggaaaga

SEQ ID NO: 124953 - RNA, 22 nt, Human
aggcuucacgaugggugaggug

SEQ ID NO: 124954 - RNA, 22 nt, Human
ggcagaggaagcuggaaguggg

SEQ ID NO: 124955 - RNA, 22 nt, Human
uaaaggcuuuuagugaugguaa

SEQ ID NO: 124956 - RNA, 22 nt, Human
cauuuucagcacccaucugaaa

SEQ ID NO: 124957 - RNA, 22 nt, Human
uggccaccccuuucucugcacu

SEQ ID NO: 124958 - RNA, 17 nt, Human
aggugcagaggcagagc

SEQ ID NO: 124959 - RNA, 22 nt, Human
gaggcagugucgguggcaggau

SEQ ID NO: 124960 - RNA, 22 nt, Human
acaguggaagaagcacugaacu

SEQ ID NO: 124961 - RNA, 23 nt, Human
gccuggagaaaagcugcaguuca

SEQ ID NO: 124962 - RNA, 22 nt, Human
cacugcccagcgucuuaggcac

SEQ ID NO: 124963 - RNA, 20 nt, Human
agugggagagggcagacugc

SEQ ID NO: 124964 - RNA, 19 nt, Human
aggcagcauucuggggcuu

SEQ ID NO: 124965 - RNA, 22 nt, Human
ucccaggcuggcaggcagcagu

SEQ ID NO: 124966 - RNA, 22 nt, Human
uccugaaaaauuacauguucag

SEQ ID NO: 124967 - RNA, 22 nt, Human
ucaggcugcuguacugugaaug

SEQ ID NO: 124968 - RNA, 22 nt, Human
ggcuugggagcaggcaugugac

SEQ ID NO: 124969 - RNA, 22 nt, Human
ucauccaguaccauggaaggca

SEQ ID NO: 124970 - RNA, 22 nt, Human
ggaggagcacuucugagcucag

SEQ ID NO: 124971 - RNA, 22 nt, Human
uuuucaucucugcuuuguaccu

SEQ ID NO: 124972 - RNA, 22 nt, Human
cggcagggcuccaugcauuucu

SEQ ID NO: 124973 - RNA, 22 nt, Human
ugaaggagcugauguaaggggu

SEQ ID NO: 124974 - RNA, 22 nt, Human
aaggaagaagacucuuuacucc

SEQ ID NO: 124975 - RNA, 22 nt, Human
cucugguucagggcucccuggc

SEQ ID NO: 124976 - RNA, 22 nt, Human
ccagaagaggacacagugugga

SEQ ID NO: 124977 - RNA, 22 nt, Human
ccaggcucugagccucacucuu

SEQ ID NO: 124978 - RNA, 22 nt, Human
agcagggcagcugaugcgcacg

SEQ ID NO: 124979 - RNA, 22 nt, Human
uggcaggauuugcccggaagga

SEQ ID NO: 124980 - RNA, 22 nt, Human
ugccaggcugcccuccagucug

SEQ ID NO: 124981 - RNA, 22 nt, Human
agaggcaacauggggaacagau

SEQ ID NO: 124982 - RNA, 22 nt, Human
ugaccuauuagauuuccuugcc

SEQ ID NO: 124983 - RNA, 22 nt, Human
aaugggaagccagaagacaagg

SEQ ID NO: 124984 - RNA, 22 nt, Human
gccaggcugacucccccggccu

SEQ ID NO: 124985 - RNA, 22 nt, Human
uggcagagucucuccuuuccag

SEQ ID NO: 124986 - RNA, 23 nt, Human
aggagacagggaagugccuggcu

SEQ ID NO: 124987 - RNA, 21 nt, Human
aucccagcacccaggagugca

SEQ ID NO: 124988 - RNA, 22 nt, Human
agaguggagagaaacaacucug

SEQ ID NO: 124989 - RNA, 22 nt, Human
augcagaaggagccaugcuugc

SEQ ID NO: 124990 - RNA, 22 nt, Human
ugaggcucagugagcccugcag

SEQ ID NO: 124991 - RNA, 22 nt, Human
uggagaauucuauguugagggg

SEQ ID NO: 124992 - RNA, 22 nt, Human
gcucaaagaauauucagaauga

SEQ ID NO: 124993 - RNA, 22 nt, Human
gagccagggcugugagcugagc

SEQ ID NO: 124994 - RNA, 22 nt, Human
gggcaguggcucacgccuguaa

SEQ ID NO: 124995 - RNA, 22 nt, Human
agucaggauaugccuugugggc

SEQ ID NO: 124996 - RNA, 22 nt, Human
ccaggugugauuuggcaguguc

SEQ ID NO: 124997 - RNA, 22 nt, Human
gcaaaggcuagagacacaggga

SEQ ID NO: 124998 - RNA, 22 nt, Human
ggggccagguccagcuuccaaa

SEQ ID NO: 124999 - RNA, 22 nt, Human
ggaggaguguggggcacucugc

SEQ ID NO: 125000 - RNA, 22 nt, Human
cggcagagcuuccugcucagcg

SEQ ID NO: 125001 - RNA, 22 nt, Human
agcagggcccacuaggggagau

SEQ ID NO: 125002 - RNA, 22 nt, Human
gagggccagcagccucagcaug

SEQ ID NO: 125003 - RNA, 22 nt, Human
gaggagaagcuauuggaaggac

SEQ ID NO: 125004 - RNA, 22 nt, Human
agcagcagaagggagacccagg

SEQ ID NO: 125005 - RNA, 22 nt, Human
guaaucucagcuacuugggagg

SEQ ID NO: 125006 - RNA, 22 nt, Human
gggagccagcagggcauggagc

SEQ ID NO: 125007 - RNA, 22 nt, Human
ggcugagcguggcugccguggg

SEQ ID NO: 125008 - RNA, 22 nt, Human
aggcagcauuucugcuuaucca

SEQ ID NO: 125009 - RNA, 22 nt, Human
uggcugaguuccuggcacacgg

SEQ ID NO: 125010 - RNA, 22 nt, Human
gagaaagggaacuuacagagug

SEQ ID NO: 125011 - RNA, 20 nt, Human
gcaugaggaaucauugcagc

SEQ ID NO: 125012 - RNA, 22 nt, Human
gcccaggauucuuucuuccuua

SEQ ID NO: 125013 - RNA, 22 nt, Human
gcagggcagcugaagcuaggug

SEQ ID NO: 125014 - RNA, 22 nt, Human
ucaccacugaacagaccuuugg

SEQ ID NO: 125015 - RNA, 22 nt, Human
gagcugcuggcuccucagguua

SEQ ID NO: 125016 - RNA, 22 nt, Human
ggucagcagugcagggcagagc

SEQ ID NO: 125017 - RNA, 22 nt, Human
gcaggagagucugugccagguu

SEQ ID NO: 125018 - RNA, 22 nt, Human
cuguccccgcgaguccagagcu

SEQ ID NO: 125019 - RNA, 22 nt, Human
aaguccagacuccuuugcgugg

SEQ ID NO: 125020 - RNA, 22 nt, Human
ugaggcaggagaaucaccggaa

SEQ ID NO: 125021 - RNA, 22 nt, Human
ugaggcucuccaagcagaugag

SEQ ID NO: 125022 - RNA, 22 nt, Human
ggcagugaacagaaaugcagaa

SEQ ID NO: 125023 - RNA, 22 nt, Human
accugccucuaagcagcaggug

SEQ ID NO: 125024 - RNA, 22 nt, Human
gggcugagugggccucuuacuu

SEQ ID NO: 125025 - RNA, 22 nt, Human
auggagugggccaauuuuagug

SEQ ID NO: 125026 - RNA, 22 nt, Human
gcagaggcauuucugacgcugc

SEQ ID NO: 125027 - RNA, 22 nt, Human
guggagcaaucagagggucagu

SEQ ID NO: 125028 - RNA, 22 nt, Human
ugggccacacacagaagaauca

SEQ ID NO: 125029 - RNA, 22 nt, Human
ggcugcaggaugcccagccgug

SEQ ID NO: 125030 - RNA, 19 nt, Human
aggcagucauuggaauaua

SEQ ID NO: 125031 - RNA, 22 nt, Human
augaggcagauguugcaugagg

SEQ ID NO: 125032 - RNA, 22 nt, Human
aggaggaggugggacacaguga

SEQ ID NO: 125033 - RNA, 22 nt, Human
agaagccauaguaucucagggu

SEQ ID NO: 125034 - RNA, 22 nt, Human
acaguggaauggugggccugca

SEQ ID NO: 125035 - RNA, 19 nt, Human
gguguccuagagauaagag

SEQ ID NO: 125036 - RNA, 22 nt, Human
ggagaggcgaugagucacagcc

SEQ ID NO: 125037 - RNA, 22 nt, Human
caguggcaaugggacagagcac

SEQ ID NO: 125038 - RNA, 22 nt, Human
uggagaagucaaagugaacagg

SEQ ID NO: 125039 - RNA, 22 nt, Human
agagcugaaaaagcugacccgg

SEQ ID NO: 125040 - RNA, 19 nt, Human
cugugcaggccgggcugag

SEQ ID NO: 125041 - RNA, 21 nt, Human
ugaggcucuguugugccugca

SEQ ID NO: 125042 - RNA, 22 nt, Human
ggagaugcuauguaguuugguu

SEQ ID NO: 125043 - RNA, 22 nt, Human
uuucacaaacugaggagacaau

SEQ ID NO: 125044 - RNA, 22 nt, Human
agccugcuucccuuugugcccc

SEQ ID NO: 125045 - RNA, 22 nt, Human
ugagccaggaguuugaggcugu

SEQ ID NO: 125046 - RNA, 21 nt, Human
uuuucccacugaaagcuccca

SEQ ID NO: 125047 - RNA, 22 nt, Human
aggcaggcuagucgcuugagcc

SEQ ID NO: 125048 - RNA, 22 nt, Human
agccagggacgcugcaggcuac

SEQ ID NO: 125049 - RNA, 21 nt, Human
ugccaggccugagcugggguc

SEQ ID NO: 125050 - RNA, 22 nt, Human
gcggcaggaagagcgcagcccc

SEQ ID NO: 125051 - RNA, 22 nt, Human
ccugggcagggagaccaggcuc

SEQ ID NO: 125052 - RNA, 22 nt, Human
uucugcaggagcccuaguguau

SEQ ID NO: 125053 - RNA, 22 nt, Human
aggcugagacugugcauuagug

SEQ ID NO: 125054 - RNA, 22 nt, Human
gcagggcuguggacacuuuggu

SEQ ID NO: 125055 - RNA, 22 nt, Human
cugcccucuagaggaggacuga

SEQ ID NO: 125056 - RNA, 22 nt, Human
gacagaggcaagaccagaagcc

SEQ ID NO: 125057 - RNA, 22 nt, Human
agggcagcccuucugggagggc

SEQ ID NO: 125058 - RNA, 22 nt, Human
gcagaggagugauuaugccgug

SEQ ID NO: 125059 - RNA, 22 nt, Human
gggcugagccacagcuuuuguu

SEQ ID NO: 125060 - RNA, 21 nt, Human
uggcagagugcagucuauaca

SEQ ID NO: 125061 - RNA, 22 nt, Human
gggcagguggcagggucucugg

SEQ ID NO: 125062 - RNA, 22 nt, Human
cccagccucagcuuuacuucca

SEQ ID NO: 125063 - RNA, 22 nt, Human
agugcagccgagaucaggugcu

SEQ ID NO: 125064 - RNA, 22 nt, Human
gaggcagagaccuucaggaccu

SEQ ID NO: 125065 - RNA, 22 nt, Human
agggccagaguacaucagggcu

SEQ ID NO: 125066 - RNA, 22 nt, Human
gagaaggcuggucuuaagucga

SEQ ID NO: 125067 - RNA, 22 nt, Human
gaggcucagggaaacagcgcag

SEQ ID NO: 125068 - RNA, 22 nt, Human
agcugacugaugaagaggccuu

SEQ ID NO: 125069 - RNA, 23 nt, Human
ccagcugugccuggcccaggagc

SEQ ID NO: 125070 - RNA, 22 nt, Human
ucaguuaagaggccacggcagu

SEQ ID NO: 125071 - RNA, 22 nt, Human
ucccugcagacguccugcgggu

SEQ ID NO: 125072 - RNA, 22 nt, Human
uaguggaggggaugcaaagcuu

SEQ ID NO: 125073 - RNA, 17 nt, Human
caggcagacauguaagc

SEQ ID NO: 125074 - RNA, 22 nt, Human
gcagggcacaaggacgcacagg

SEQ ID NO: 125075 - RNA, 22 nt, Human
guccucuuagccacuuaauuau

SEQ ID NO: 125076 - RNA, 22 nt, Human
gcaggugauucacccugggccu

SEQ ID NO: 125077 - RNA, 18 nt, Human
cccagcccaccauuucuc

SEQ ID NO: 125078 - RNA, 22 nt, Human
cagggcccagucccugcuguca

SEQ ID NO: 125079 - RNA, 17 nt, Human
aggcaggagauuggaga

SEQ ID NO: 125080 - RNA, 18 nt, Human
gagcugggagaaggaagg

SEQ ID NO: 125081 - RNA, 22 nt, Human
ucaggcuggaaugcaguggggc

SEQ ID NO: 125082 - RNA, 22 nt, Human
uggcagagaacacggcugaucu

SEQ ID NO: 125083 - RNA, 22 nt, Human
cagcacaauuuucaggagucca

SEQ ID NO: 125084 - RNA, 19 nt, Human
ggagaagcaucuagaaaua

SEQ ID NO: 125085 - RNA, 22 nt, Human
gcgagggcacgcgguugaaggc

SEQ ID NO: 125086 - RNA, 22 nt, Human
agggcagccucucagccuaggu

SEQ ID NO: 125087 - RNA, 22 nt, Human
ccagaagacaagaauguucuua

SEQ ID NO: 125088 - RNA, 22 nt, Human
gcagaugaggaagcuaaugcug

SEQ ID NO: 125089 - RNA, 22 nt, Human
aacaggcaaacugugggauccc

SEQ ID NO: 125090 - RNA, 22 nt, Human
ugccaaggagcuggaucagggc

SEQ ID NO: 125091 - RNA, 22 nt, Human
cagggcuggauccuccagacuc

SEQ ID NO: 125092 - RNA, 22 nt, Human
gaaggccuaggaaggaagccuu

SEQ ID NO: 125093 - RNA, 22 nt, Human
acaguggaagcaugaugcuauc

SEQ ID NO: 125094 - RNA, 22 nt, Human
agggaggaguccucaaagucau

SEQ ID NO: 125095 - RNA, 22 nt, Human
cagugcaguugguggcaggggu

SEQ ID NO: 125096 - RNA, 22 nt, Human
agugggggccaacgagggcagc

SEQ ID NO: 125097 - RNA, 22 nt, Human
aggcccaguagugcugccuuua

SEQ ID NO: 125098 - RNA, 22 nt, Human
uggagaugcacgagcaggugga

SEQ ID NO: 125099 - RNA, 22 nt, Human
cagcuguguagaugcaggguca

SEQ ID NO: 125100 - RNA, 22 nt, Human
ggcugagcaauuuugaugacau

SEQ ID NO: 125101 - RNA, 22 nt, Human
gaaaggaaauauucuaagcacu

SEQ ID NO: 125102 - RNA, 22 nt, Human
ggaagccagaaagugagaauau

SEQ ID NO: 125103 - RNA, 22 nt, Human
ucagaggagggacucagaccca

SEQ ID NO: 125104 - RNA, 22 nt, Human
cuggaaguauaggggagaugau

SEQ ID NO: 125105 - RNA, 22 nt, Human
aaggccagaguacuagaggcug

SEQ ID NO: 125106 - RNA, 22 nt, Human
cagcacaguacaaggcacggau

SEQ ID NO: 125107 - RNA, 22 nt, Human
agugagcauucguuuggaaccc

SEQ ID NO: 125108 - RNA, 22 nt, Human
agccaguguuaagugacugguu

SEQ ID NO: 125109 - RNA, 22 nt, Human
uggagaagcuguagguggacuc

SEQ ID NO: 125110 - RNA, 22 nt, Human
agcaguggugugaggagggcuc

SEQ ID NO: 125111 - RNA, 22 nt, Human
gagccagcuacauggucugcaa

SEQ ID NO: 125112 - RNA, 22 nt, Human
ggcaggagaaaggucucuucuu

SEQ ID NO: 125113 - RNA, 21 nt, Human
cacuggaauuuucugugacau

SEQ ID NO: 125114 - RNA, 22 nt, Human
gcuccucugucaaaugagagug

SEQ ID NO: 125115 - RNA, 22 nt, Human
agggagcaugggugaagcaggc

SEQ ID NO: 125116 - RNA, 22 nt, Human
cucccagggccaucgagucacu

SEQ ID NO: 125117 - RNA, 22 nt, Human
cugugaauuaaguauuguuauc

SEQ ID NO: 125118 - RNA, 22 nt, Human
agcagggcuccugaaagccgcg

SEQ ID NO: 125119 - RNA, 22 nt, Human
ugaggaaacuuacaaggcagaa

SEQ ID NO: 125120 - RNA, 23 nt, Human
gaagccacacaaaggucgccaag

SEQ ID NO: 125121 - RNA, 22 nt, Human
agcagggcuuugucucugugaa

SEQ ID NO: 125122 - RNA, 22 nt, Human
gggcaugguggugcacaccugu

SEQ ID NO: 125123 - RNA, 22 nt, Human
caggaaagagcugccaggcagg

SEQ ID NO: 125124 - RNA, 22 nt, Human
gcugaaggcccggaggacaggg

SEQ ID NO: 125125 - RNA, 22 nt, Human
gccuggaggguugagguuuugu

SEQ ID NO: 125126 - RNA, 22 nt, Human
agaagccagaggcaguggguac

SEQ ID NO: 125127 - RNA, 19 nt, Human
gagcugagaguagcacugg

SEQ ID NO: 125128 - RNA, 22 nt, Human
ggggcaggagguguucucuuuu

SEQ ID NO: 125129 - RNA, 22 nt, Human
agugaagaggaaguggggcaca

SEQ ID NO: 125130 - RNA, 22 nt, Human
uccuguggagaggacuggaggu

SEQ ID NO: 125131 - RNA, 22 nt, Human
gggaagggacuuguuuaagguc

SEQ ID NO: 125132 - RNA, 22 nt, Human
agaggcagaaguguucaaaccc

SEQ ID NO: 125133 - RNA, 22 nt, Human
aguggcagagaccccagccagc

SEQ ID NO: 125134 - RNA, 22 nt, Human
ugagaagcugcuugugcuguau

SEQ ID NO: 125135 - RNA, 22 nt, Human
cgcagggccgcgagcgggacca

SEQ ID NO: 125136 - RNA, 22 nt, Human
aggaauucaagaccagcugggc

SEQ ID NO: 125137 - RNA, 22 nt, Human
gauuuucaugauaaacuuguga

SEQ ID NO: 125138 - RNA, 22 nt, Human
ccacugcccaccccgacgucua

SEQ ID NO: 125139 - RNA, 19 nt, Human
gcgaggaagucacuguggc

SEQ ID NO: 125140 - RNA, 22 nt, Human
ugggacuugccucgagggcugc

SEQ ID NO: 125141 - RNA, 22 nt, Human
agggccugcucuaucacucuca

SEQ ID NO: 125142 - RNA, 22 nt, Human
ggaagccagagugcugggcagg

SEQ ID NO: 125143 - RNA, 22 nt, Human
cagaagcaaaugccuugcugag

SEQ ID NO: 125144 - RNA, 22 nt, Human
ccuaggccuuacuuuccugugc

SEQ ID NO: 125145 - RNA, 22 nt, Human
augcugugauuguagaaauauu

SEQ ID NO: 125146 - RNA, 22 nt, Human
uaggcagauguuaacaggaaaa

SEQ ID NO: 125147 - RNA, 22 nt, Human
aggcagugagugugacuucaca

SEQ ID NO: 125148 - RNA, 22 nt, Human
ggagugaaguggcgcgaucucg

SEQ ID NO: 125149 - RNA, 22 nt, Human
uacugugaauacaaaauaaauu

SEQ ID NO: 125150 - RNA, 22 nt, Human
aaguaaaacacacaguccaccg

SEQ ID NO: 125151 - RNA, 22 nt, Human
uuuugaaagaguccugcuacag

SEQ ID NO: 125152 - RNA, 22 nt, Human
uugaccuauguuucuucaucug

SEQ ID NO: 125153 - RNA, 22 nt, Human
agagacuggagaugggcagugu

SEQ ID NO: 125154 - RNA, 22 nt, Human
cuguuuucccuggaguucagca

SEQ ID NO: 125155 - RNA, 22 nt, Human
cgggcagugcccagcggggcag

SEQ ID NO: 125156 - RNA, 22 nt, Human
caggggcaagaaugcugucagc

SEQ ID NO: 125157 - RNA, 22 nt, Human
aggcucagaggugagcaucugc

SEQ ID NO: 125158 - RNA, 22 nt, Human
agggcagcacaaggcauggacu

SEQ ID NO: 125159 - RNA, 22 nt, Human
gugcagugacccuggagagcug

SEQ ID NO: 125160 - RNA, 19 nt, Human
cuggaaugagaacaugccc

SEQ ID NO: 125161 - RNA, 22 nt, Human
agaaagcuuaugaaugggcaag

SEQ ID NO: 125162 - RNA, 22 nt, Human
agugggaccggugcuauuccag

SEQ ID NO: 125163 - RNA, 22 nt, Human
ugaggcaguucuuacuuguauu

SEQ ID NO: 125164 - RNA, 22 nt, Human
uagucucugcuuugcccuuggc

SEQ ID NO: 125165 - RNA, 22 nt, Human
aggaggggcauagaaauguaau

SEQ ID NO: 125166 - RNA, 22 nt, Human
cuccucuuuacccgcauggucu

SEQ ID NO: 125167 - RNA, 22 nt, Human
cgccaggcuugguagcucaugc

SEQ ID NO: 125168 - RNA, 22 nt, Human
ugaagccauuacuguguuaggg

SEQ ID NO: 125169 - RNA, 22 nt, Human
ucucugagguuguuuccagcac

SEQ ID NO: 125170 - RNA, 22 nt, Human
gaggcucagagggacuuucaag

SEQ ID NO: 125171 - RNA, 22 nt, Human
uuacaagugucagguacuggca

SEQ ID NO: 125172 - RNA, 22 nt, Human
aguggcagccgagcaggagaug

SEQ ID NO: 125173 - RNA, 22 nt, Human
cagagcuggagcuugaauggag

SEQ ID NO: 125174 - RNA, 22 nt, Human
ugaagccaucccucagauggcc

SEQ ID NO: 125175 - RNA, 22 nt, Human
gggcagguggcaaagccagagg

SEQ ID NO: 125176 - RNA, 19 nt, Human
gguagaagggaaguguuuu

SEQ ID NO: 125177 - RNA, 22 nt, Human
agaagaaaugugaaggccacug

SEQ ID NO: 125178 - RNA, 22 nt, Human
ugaagaauguugcagugagcau

SEQ ID NO: 125179 - RNA, 22 nt, Human
uggcucagaagaaaagguaaac

SEQ ID NO: 125180 - RNA, 22 nt, Human
gcucccaggaugaggagccagg

SEQ ID NO: 125181 - RNA, 22 nt, Human
agcuguggcaaccuugucagac

SEQ ID NO: 125182 - RNA, 22 nt, Human
ccagaagggcuauugcagugac

SEQ ID NO: 125183 - RNA, 22 nt, Human
accaaagggcagaacaugagca

SEQ ID NO: 125184 - RNA, 22 nt, Human
uggcucagagcagggacucugg

SEQ ID NO: 125185 - RNA, 21 nt, Human
agcagaggggacauguuugau

SEQ ID NO: 125186 - RNA, 22 nt, Human
gaggcagcggcucacagagaaa

SEQ ID NO: 125187 - RNA, 21 nt, Human
ggcaggauggcaguggacccc

SEQ ID NO: 125188 - RNA, 22 nt, Human
agagcugccgagcuggggccau

SEQ ID NO: 125189 - RNA, 22 nt, Human
uccuguggucuggaaggaaugg

SEQ ID NO: 125190 - RNA, 22 nt, Human
caccaggcugaaccagagggga

SEQ ID NO: 125191 - RNA, 22 nt, Human
agggcagaaaucgauuacaccu

SEQ ID NO: 125192 - RNA, 22 nt, Human
uggcagcaaaaccagaaucaga

SEQ ID NO: 125193 - RNA, 21 nt, Human
agcagaggcugccuggugacu

SEQ ID NO: 125194 - RNA, 22 nt, Human
gaauucugguccuguccaaggu

SEQ ID NO: 125195 - RNA, 22 nt, Human
gcagggcagugugucugugggg

SEQ ID NO: 125196 - RNA, 22 nt, Human
aaggaagacuugagaagguucc

SEQ ID NO: 125197 - RNA, 22 nt, Human
ccagagccucgcccggagccuc

SEQ ID NO: 125198 - RNA, 22 nt, Human
uagaggcagaagaaauugacaa

SEQ ID NO: 125199 - RNA, 22 nt, Human
gcagagcucaugccugcaccuc

SEQ ID NO: 125200 - RNA, 22 nt, Human
cuaguucuagaucccugaggaa

SEQ ID NO: 125201 - RNA, 22 nt, Human
ucagggcaggcgagcagcugcu

SEQ ID NO: 125202 - RNA, 22 nt, Human
gccuggagccucagcaaggagg

SEQ ID NO: 125203 - RNA, 22 nt, Human
gccagcugcuggaacagcgcga

SEQ ID NO: 125204 - RNA, 22 nt, Human
aggagucagauuguuugaaugu

SEQ ID NO: 125205 - RNA, 22 nt, Human
cauuugcaagagauaaauguuu

SEQ ID NO: 125206 - RNA, 22 nt, Human
ccagggcugcugugggacucca

SEQ ID NO: 125207 - RNA, 22 nt, Human
gggcagguuauuggaguaggga

SEQ ID NO: 125208 - RNA, 20 nt, Human
agaagccaagugacauguuu

SEQ ID NO: 125209 - RNA, 22 nt, Human
ucagggcagaauccaaagaauu

SEQ ID NO: 125210 - RNA, 22 nt, Human
caggcagaaggaaguaccaggc

SEQ ID NO: 125211 - RNA, 22 nt, Human
gccuucccaagacgccugaguu

SEQ ID NO: 125212 - RNA, 22 nt, Human
gaggcagaggaagguggucucu

SEQ ID NO: 125213 - RNA, 22 nt, Human
cagugaggcucugcugagcggu

SEQ ID NO: 125214 - RNA, 22 nt, Human
ugcagggccccucugcaugagu

SEQ ID NO: 125215 - RNA, 19 nt, Human
ccugugacuaucuuuguaa

SEQ ID NO: 125216 - RNA, 22 nt, Human
gggaaggagguggcuugaagug

SEQ ID NO: 125217 - RNA, 22 nt, Human
cagagugaaauaggggaucaag

SEQ ID NO: 125218 - RNA, 22 nt, Human
uguccuuuucuuuagugcagcu

SEQ ID NO: 125219 - RNA, 22 nt, Human
aggcucagggacggggccccuu

SEQ ID NO: 125220 - RNA, 22 nt, Human
cuaguccagucucaaaaugcua

SEQ ID NO: 125221 - RNA, 22 nt, Human
gcagggcauagaggcacggagg

SEQ ID NO: 125222 - RNA, 22 nt, Human
agggcagacuaggauggaagug

SEQ ID NO: 125223 - RNA, 22 nt, Human
ggcaggagcucuccaguuugcc

SEQ ID NO: 125224 - RNA, 21 nt, Human
gugguucuagagaaacagaau

SEQ ID NO: 125225 - RNA, 22 nt, Human
acagagcuaaauuucaauccca

SEQ ID NO: 125226 - RNA, 22 nt, Human
aauuuuaucucuaagcaggcuu

SEQ ID NO: 125227 - RNA, 17 nt, Human
cugaagauaauggcaac

SEQ ID NO: 125228 - RNA, 23 nt, Human
agggccacugggaaggauuacug

SEQ ID NO: 125229 - RNA, 21 nt, Human
cagaggcagguccugggacgg

SEQ ID NO: 125230 - RNA, 22 nt, Human
ugcagggcuacaggacuacaac

SEQ ID NO: 125231 - RNA, 22 nt, Human
agggcagagaucugagugggca

SEQ ID NO: 125232 - RNA, 22 nt, Human
augaggcaugugaggagaaggg

SEQ ID NO: 125233 - RNA, 22 nt, Human
acagaggccgccucucucacgg

SEQ ID NO: 125234 - RNA, 22 nt, Human
uggcagcauguuauguaaggaa

SEQ ID NO: 125235 - RNA, 22 nt, Human
uggcugagcugcagcguggcuu

SEQ ID NO: 125236 - RNA, 22 nt, Human
cagugcagaggugcaagcaugu

SEQ ID NO: 125237 - RNA, 22 nt, Human
gggucaggcucagcagggcagc

SEQ ID NO: 125238 - RNA, 20 nt, Human
ccagagcugauggcugcccg

SEQ ID NO: 125239 - RNA, 22 nt, Human
uagaggcacccuggaggagacu

SEQ ID NO: 125240 - RNA, 22 nt, Human
acguggagagaauagggcacca

SEQ ID NO: 125241 - RNA, 22 nt, Human
acucccagguugccuggcaggc

SEQ ID NO: 125242 - RNA, 19 nt, Human
uggcaggcccaggauggac

SEQ ID NO: 125243 - RNA, 22 nt, Human
gaggccacgguuuuccuugggg

SEQ ID NO: 125244 - RNA, 22 nt, Human
ccagugcccagcugcccaggca

SEQ ID NO: 125245 - RNA, 22 nt, Human
cagaaggcaaacaaaaggauuu

SEQ ID NO: 125246 - RNA, 22 nt, Human
ugugaaggagcaugcagagggg

SEQ ID NO: 125247 - RNA, 22 nt, Human
agagccugcuaccucauuccag

SEQ ID NO: 125248 - RNA, 22 nt, Human
auuucuacugugagaaacauga

SEQ ID NO: 125249 - RNA, 21 nt, Human
aucaccagcagaagcugcaga

SEQ ID NO: 125250 - RNA, 22 nt, Human
gagggcagaaaauuaugcggug

SEQ ID NO: 125251 - RNA, 22 nt, Human
uaguaugggaagaacuuuguag

SEQ ID NO: 125252 - RNA, 22 nt, Human
cugacucccaaagaggacgcgu

SEQ ID NO: 125253 - RNA, 22 nt, Human
cacagcugaaguagccaugugg

SEQ ID NO: 125254 - RNA, 22 nt, Human
uggcagagugcggcauccccug

SEQ ID NO: 125255 - RNA, 22 nt, Human
aggagugggggcgagaaguuaa

SEQ ID NO: 125256 - RNA, 22 nt, Human
ugggagcaccuugagggcagaa

SEQ ID NO: 125257 - RNA, 22 nt, Human
cgcaccacugaauuccagccug

SEQ ID NO: 125258 - RNA, 22 nt, Human
gugcagauccugauugcaguuc

SEQ ID NO: 125259 - RNA, 20 nt, Human
uggcagaguugucccaccca

SEQ ID NO: 125260 - RNA, 22 nt, Human
cagaggcacaagaaagcaaggc

SEQ ID NO: 125261 - RNA, 22 nt, Human
gcugcugugugggagacaggcg

SEQ ID NO: 125262 - RNA, 22 nt, Human
ggcaggguggcagaggcucaga

SEQ ID NO: 125263 - RNA, 22 nt, Human
ggccaggagauggacaccacau

SEQ ID NO: 125264 - RNA, 22 nt, Human
auguggaaugaacaaaggaggc

SEQ ID NO: 125265 - RNA, 22 nt, Human
gaaaggagaggguuaaggagcu

SEQ ID NO: 125266 - RNA, 22 nt, Human
cugaggcaugaaugugggcuuu

SEQ ID NO: 125267 - RNA, 22 nt, Human
gaaaugcauggaucuuggcaga

SEQ ID NO: 125268 - RNA, 22 nt, Human
ggggccagcacugugccuuugu

SEQ ID NO: 125269 - RNA, 22 nt, Human
aggcucaguuugguuuccauug

SEQ ID NO: 125270 - RNA, 22 nt, Human
cauuucauaguugucacaauaa

SEQ ID NO: 125271 - RNA, 22 nt, Human
aagaagguguggaaagaugcuc

SEQ ID NO: 125272 - RNA, 22 nt, Human
caggcagcgcucguggccuggc

SEQ ID NO: 125273 - RNA, 22 nt, Human
uugcagagugguugugaggauu

SEQ ID NO: 125274 - RNA, 22 nt, Human
gcugcagugagccaagaucgug

SEQ ID NO: 125275 - RNA, 22 nt, Human
agaagccaccagcugaggaaga

SEQ ID NO: 125276 - RNA, 19 nt, Human
aggacccuuauccuggcuu

SEQ ID NO: 125277 - RNA, 22 nt, Human
uggagcuggcuuguggaaguug

SEQ ID NO: 125278 - RNA, 16 nt, Human
ucagggcagaauggca

SEQ ID NO: 125279 - RNA, 22 nt, Human
aggcugagccacggggcuggcu

SEQ ID NO: 125280 - RNA, 22 nt, Human
ugaagugaccuggggcagugua

SEQ ID NO: 125281 - RNA, 19 nt, Human
ggagaggcuggagggaugc

SEQ ID NO: 125282 - RNA, 22 nt, Human
ugcagugugaccuguagcgagc

SEQ ID NO: 125283 - RNA, 19 nt, Human
gcugugggacagcagggug

SEQ ID NO: 125284 - RNA, 22 nt, Human
cuauuauuuccucaucuauaaa

SEQ ID NO: 125285 - RNA, 22 nt, Human
ggaggcagaacuucccgucagu

SEQ ID NO: 125286 - RNA, 22 nt, Human
ugggggacugcacuggcgucag

SEQ ID NO: 125287 - RNA, 22 nt, Human
cugaggcucaagggcagguggg

SEQ ID NO: 125288 - RNA, 22 nt, Human
ucaggaguaaagacagaguucc

SEQ ID NO: 125289 - RNA, 16 nt, Human
gaggcuggcagauguc

SEQ ID NO: 125290 - RNA, 21 nt, Human
acacugugucauaaugcuuaa

SEQ ID NO: 125291 - RNA, 22 nt, Human
gggagccacagugaggugcaug

SEQ ID NO: 125292 - RNA, 22 nt, Human
ccugcucagagcgucuugugug

SEQ ID NO: 125293 - RNA, 22 nt, Human
ggaaggaggggcaaagcaguuc

SEQ ID NO: 125294 - RNA, 22 nt, Human
cagagcuguauuuaucuuucca

SEQ ID NO: 125295 - RNA, 22 nt, Human
agcagggccucuggcacugguc

SEQ ID NO: 125296 - RNA, 22 nt, Human
ggcagauggagaagcagcaggu

SEQ ID NO: 125297 - RNA, 22 nt, Human
cagcugugcuagaagccacgaa

SEQ ID NO: 125298 - RNA, 22 nt, Human
aggagcagaccguaguccugca

SEQ ID NO: 125299 - RNA, 22 nt, Human
agggccaguaccaggugggugg

SEQ ID NO: 125300 - RNA, 22 nt, Human
aaugccucuuggaagaagacuu

SEQ ID NO: 125301 - RNA, 22 nt, Human
ucugccugcaguguggcagggc

SEQ ID NO: 125302 - RNA, 22 nt, Human
ucucccuggagcccugaagcau

SEQ ID NO: 125303 - RNA, 22 nt, Human
aaagcaaugggucuaagguaaa

SEQ ID NO: 125304 - RNA, 22 nt, Human
uggcugagggggcaguucagga

SEQ ID NO: 125305 - RNA, 22 nt, Human
uccagcuuauagguagauuuaa

SEQ ID NO: 125306 - RNA, 22 nt, Human
cugagaauuacucugaugagua

SEQ ID NO: 125307 - RNA, 22 nt, Human
ggcaguggugggaggcucgcuc

SEQ ID NO: 125308 - RNA, 22 nt, Human
uuaaugcuugucuagaucuucu

SEQ ID NO: 125309 - RNA, 22 nt, Human
ccagggcaauuauuuggagggu

SEQ ID NO: 125310 - RNA, 22 nt, Human
ggccaggcugcugggaccccgc

SEQ ID NO: 125311 - RNA, 22 nt, Human
aagagaaggauucugagccugg

SEQ ID NO: 125312 - RNA, 22 nt, Human
ccacccugagccgcaagagcag

SEQ ID NO: 125313 - RNA, 22 nt, Human
gcauccagagguagccacugug

SEQ ID NO: 125314 - RNA, 22 nt, Human
gcuguggaaaugccuaacauga

SEQ ID NO: 125315 - RNA, 22 nt, Human
aagggcugcauuugauguguca

SEQ ID NO: 125316 - RNA, 22 nt, Human
augcuguguccuagugaaagaa

SEQ ID NO: 125317 - RNA, 22 nt, Human
cagcugccuaugaccuagccuc

SEQ ID NO: 125318 - RNA, 22 nt, Human
cagccucuuuccacaucaggca

SEQ ID NO: 125319 - RNA, 22 nt, Human
ugaggaagcaaaggcuugugug

SEQ ID NO: 125320 - RNA, 20 nt, Human
gcagggcaucuuggccccca

SEQ ID NO: 125321 - RNA, 22 nt, Human
agcuggggguuggauaagggua

SEQ ID NO: 125322 - RNA, 22 nt, Human
caggaagcugugaaggagacgg

SEQ ID NO: 125323 - RNA, 20 nt, Human
ggaagccagggugcagggga

SEQ ID NO: 125324 - RNA, 22 nt, Human
gaagagcuccaaaaacagugag

SEQ ID NO: 125325 - RNA, 22 nt, Human
cagugcagucaaggaagaacca

SEQ ID NO: 125326 - RNA, 22 nt, Human
cugaggcuggcguuugaggaag

SEQ ID NO: 125327 - RNA, 22 nt, Human
cccaggaccgcgcggcugagcg

SEQ ID NO: 125328 - RNA, 22 nt, Human
agagccugucugccuuucuacc

SEQ ID NO: 125329 - RNA, 22 nt, Human
aggcugugagcaagaacaccua

SEQ ID NO: 125330 - RNA, 22 nt, Human
gcaggcugggguagccccacuu

SEQ ID NO: 125331 - RNA, 22 nt, Human
uaccucaugcuguacagcacgu

SEQ ID NO: 125332 - RNA, 22 nt, Human
uguuugcucugacuaucuugcg

SEQ ID NO: 125333 - RNA, 22 nt, Human
cgccuggaaccucuaggaccag

SEQ ID NO: 125334 - RNA, 22 nt, Human
aaaaugaacagaacaaugggga

SEQ ID NO: 125335 - RNA, 22 nt, Human
cucuggagaugguucucaauug

SEQ ID NO: 125336 - RNA, 22 nt, Human
auggcaagcaagcugaagagau

SEQ ID NO: 125337 - RNA, 22 nt, Human
agggcagccaugagccuucagg

SEQ ID NO: 125338 - RNA, 22 nt, Human
gggcugagagcuggaaucugag

SEQ ID NO: 125339 - RNA, 22 nt, Human
agggcagagggugccucaccug

SEQ ID NO: 125340 - RNA, 22 nt, Human
agcagggcugugcuccuuccga

SEQ ID NO: 125341 - RNA, 22 nt, Human
uccagcuuugagauuuuaugga

SEQ ID NO: 125342 - RNA, 22 nt, Human
gcucccagacugaccagaggug

SEQ ID NO: 125343 - RNA, 22 nt, Human
cggcugagacggccauagacac

SEQ ID NO: 125344 - RNA, 22 nt, Human
gggagccacaguuuauagugau

SEQ ID NO: 125345 - RNA, 22 nt, Human
uggcaggagacacauggcauag

SEQ ID NO: 125346 - RNA, 21 nt, Human
ggcagcacuaccugaagcaua

SEQ ID NO: 125347 - RNA, 22 nt, Human
caggagccagcugucccaacca

SEQ ID NO: 125348 - RNA, 22 nt, Human
accaaaaauuguggggcugaau

SEQ ID NO: 125349 - RNA, 22 nt, Human
gcagggcagaaggugcugagga

SEQ ID NO: 125350 - RNA, 22 nt, Human
aagggcaggagaagacggauau

SEQ ID NO: 125351 - RNA, 22 nt, Human
uggcagcaguagccaccccagc

SEQ ID NO: 125352 - RNA, 22 nt, Human
ucagaggacaagcucccuggug

SEQ ID NO: 125353 - RNA, 22 nt, Human
uccaucaccacagaggacagag

SEQ ID NO: 125354 - RNA, 22 nt, Human
cuccaggggccagaagccuggc

SEQ ID NO: 125355 - RNA, 22 nt, Human
ggugaaggucagagcaggaaaa

SEQ ID NO: 125356 - RNA, 18 nt, Human
aggcagcagcaucuucuc

SEQ ID NO: 125357 - RNA, 20 nt, Human
ugccaggcugcacgccugcc

SEQ ID NO: 125358 - RNA, 22 nt, Human
gcagccagggagagaaccaggg

SEQ ID NO: 125359 - RNA, 22 nt, Human
aaguggagagcccuggaggucu

SEQ ID NO: 125360 - RNA, 22 nt, Human
gcacaugguaggcauuugaugu

SEQ ID NO: 125361 - RNA, 22 nt, Human
gcagagcugucuaagucacuuc

SEQ ID NO: 125362 - RNA, 20 nt, Human
ucagggcaugggacagcccc

SEQ ID NO: 125363 - RNA, 22 nt, Human
gcaccaggaggcccuucucauc

SEQ ID NO: 125364 - RNA, 22 nt, Human
caguccaggccuggaggagcca

SEQ ID NO: 125365 - RNA, 22 nt, Human
ggcagagguagcuggaaccagg

SEQ ID NO: 125366 - RNA, 22 nt, Human
ggcugcagaggcgaucugaggu

SEQ ID NO: 125367 - RNA, 22 nt, Human
gaggcagcagaacauggaagag

SEQ ID NO: 125368 - RNA, 22 nt, Human
caggucagagucccccuguccu

SEQ ID NO: 125369 - RNA, 20 nt, Human
cagaggcaaggagacuugga

SEQ ID NO: 125370 - RNA, 22 nt, Human
gccagguguccucacagugagg

SEQ ID NO: 125371 - RNA, 22 nt, Human
ugaaggaagaauaggcaguguu

SEQ ID NO: 125372 - RNA, 21 nt, Human
ggacaccagucacacuggauu

SEQ ID NO: 125373 - RNA, 22 nt, Human
agcagugaaacagcugcauaug

SEQ ID NO: 125374 - RNA, 22 nt, Human
ugcagggcccucauuccugucc

SEQ ID NO: 125375 - RNA, 20 nt, Human
ugccaggcacggagugcaug

SEQ ID NO: 125376 - RNA, 22 nt, Human
cggcagagacggcgcuuugaac

SEQ ID NO: 125377 - RNA, 22 nt, Human
aagggugggcccuggcagccau

SEQ ID NO: 125378 - RNA, 22 nt, Human
cagggcagggccacacccccug

SEQ ID NO: 125379 - RNA, 22 nt, Human
uagaaacccauguuuauucagu

SEQ ID NO: 125380 - RNA, 22 nt, Human
agggccagaugaagccacaagc

SEQ ID NO: 125381 - RNA, 22 nt, Human
ugaguccaccuuaguauauggg

SEQ ID NO: 125382 - RNA, 22 nt, Human
gggcagugacaaaggggaugaa

SEQ ID NO: 125383 - RNA, 22 nt, Human
aagccacugagauuucacugca

SEQ ID NO: 125384 - RNA, 22 nt, Human
ccagagagaaaauggagggcca

SEQ ID NO: 125385 - RNA, 22 nt, Human
aggcgcagacauacagggucug

SEQ ID NO: 125386 - RNA, 22 nt, Human
ccacugucuuuuccaggcugaa

SEQ ID NO: 125387 - RNA, 22 nt, Human
gagcuggaagucuguggucaga

SEQ ID NO: 125388 - RNA, 22 nt, Human
uuucacaauuuuaaggagcaaa

SEQ ID NO: 125389 - RNA, 22 nt, Human
caggaugcacuaggaaccaggg

SEQ ID NO: 125390 - RNA, 22 nt, Human
ucccaaggauaagagagucuga

SEQ ID NO: 125391 - RNA, 22 nt, Human
aaagaagguagggcuggugacu

SEQ ID NO: 125392 - RNA, 22 nt, Human
uggaagaaggcagagaggcauu

SEQ ID NO: 125393 - RNA, 22 nt, Human
cggcagagcccugagucagccu

SEQ ID NO: 125394 - RNA, 22 nt, Human
aggcagcagugauaagauagga

SEQ ID NO: 125395 - RNA, 22 nt, Human
cuccucuuuggggauuuacaca

SEQ ID NO: 125396 - RNA, 22 nt, Human
ucucugucccuaggagccuugc

SEQ ID NO: 125397 - RNA, 22 nt, Human
acagggcaccugagguaggaag

SEQ ID NO: 125398 - RNA, 22 nt, Human
cagcugugagcagccaguugcc

SEQ ID NO: 125399 - RNA, 20 nt, Human
uuuacauuuugaaacaguga

SEQ ID NO: 125400 - RNA, 22 nt, Human
ugaggaaguuguuucucuucua

SEQ ID NO: 125401 - RNA, 22 nt, Human
cagggcaggacagauacauuac

SEQ ID NO: 125402 - RNA, 19 nt, Human
gaggaggcuucagcuuucu

SEQ ID NO: 125403 - RNA, 22 nt, Human
aagccaggccauucucugguuc

SEQ ID NO: 125404 - RNA, 18 nt, Human
uggcagagugucuguucu

SEQ ID NO: 125405 - RNA, 22 nt, Human
acagaggcagugugagauacug

SEQ ID NO: 125406 - RNA, 23 nt, Human
ggcaccaggccauggagcgggag

SEQ ID NO: 125407 - RNA, 22 nt, Human
aggugcuagguguguaguggag

SEQ ID NO: 125408 - RNA, 22 nt, Human
aggcuucagguuugcuuugcag

SEQ ID NO: 125409 - RNA, 22 nt, Human
uacaggcacugaaaugcuuauu

SEQ ID NO: 125410 - RNA, 22 nt, Human
ggggaaggauugaguugaccca

SEQ ID NO: 125411 - RNA, 22 nt, Human
gcagggcagaccuccagccuau

SEQ ID NO: 125412 - RNA, 22 nt, Human
uucuccucuguuggccuucccu

SEQ ID NO: 125413 - RNA, 22 nt, Human
aggcgcaggguuuggacccagg

SEQ ID NO: 125414 - RNA, 23 nt, Human
cagagcuggcucagagcugccug

SEQ ID NO: 125415 - RNA, 22 nt, Human
ucaggcagguggcuggcuaugg

SEQ ID NO: 125416 - RNA, 22 nt, Human
agggccaggaucacagccaaga

SEQ ID NO: 125417 - RNA, 22 nt, Human
cagagugaaaacugagcucaaa

SEQ ID NO: 125418 - RNA, 22 nt, Human
cagagcugauuggauccagaga

SEQ ID NO: 125419 - RNA, 22 nt, Human
uugaaaggaauacagaggccua

SEQ ID NO: 125420 - RNA, 21 nt, Human
aggcagccagucaugcucccu

SEQ ID NO: 125421 - RNA, 20 nt, Human
cagggcacacugcagccucg

SEQ ID NO: 125422 - RNA, 22 nt, Human
ggcagugagucccggagaggcc

SEQ ID NO: 125423 - RNA, 22 nt, Human
gggcaggagagaacagucaugg

SEQ ID NO: 125424 - RNA, 20 nt, Human
agcaggaaaagugccagucu

SEQ ID NO: 125425 - RNA, 22 nt, Human
aagggcuggagacugggucuuc

SEQ ID NO: 125426 - RNA, 22 nt, Human
uucuccccugacccugaugagg

SEQ ID NO: 125427 - RNA, 22 nt, Human
ucaggcagguuggcugcagguc

SEQ ID NO: 125428 - RNA, 22 nt, Human
gaggcagagguuguugcaguga

SEQ ID NO: 125429 - RNA, 22 nt, Human
ccacauuuuugauacucucacu

SEQ ID NO: 125430 - RNA, 22 nt, Human
cagggcuggguuaaaagcaggg

SEQ ID NO: 125431 - RNA, 22 nt, Human
ggccugaggccaccagcagccc

SEQ ID NO: 125432 - RNA, 22 nt, Human
uuugggcaauucagugggaccu

SEQ ID NO: 125433 - RNA, 22 nt, Human
gagagaagggggauaugagccu

SEQ ID NO: 125434 - RNA, 22 nt, Human
ccagugccugugggcauggugc

SEQ ID NO: 125435 - RNA, 22 nt, Human
ggguguccugugccaagcuggg

SEQ ID NO: 125436 - RNA, 22 nt, Human
gaagccacagagauuguggggg

SEQ ID NO: 125437 - RNA, 18 nt, Human
uguagagccagguuugcc

SEQ ID NO: 125438 - RNA, 22 nt, Human
acacaccaugauuuauuuaccc

SEQ ID NO: 125439 - RNA, 22 nt, Human
cagagcugcgcuuuuuccuggu

SEQ ID NO: 125440 - RNA, 22 nt, Human
acacacacaagcagguugugga

SEQ ID NO: 125441 - RNA, 22 nt, Human
gaaggcugcugggaaguguggu

SEQ ID NO: 125442 - RNA, 22 nt, Human
gcagaaggauccgcaggugcaa

SEQ ID NO: 125443 - RNA, 22 nt, Human
cagccagugugaccgaggagga

SEQ ID NO: 125444 - RNA, 19 nt, Human
ucaggaguuaguugugcuc

SEQ ID NO: 125445 - RNA, 22 nt, Human
ugaauaaacuaugaggaggaau

SEQ ID NO: 125446 - RNA, 22 nt, Human
uggcagagaaccugggcuuugu

SEQ ID NO: 125447 - RNA, 22 nt, Human
gcucccagcauugcugcugaau

SEQ ID NO: 125448 - RNA, 22 nt, Human
gggcagaggcucuggcccaucc

SEQ ID NO: 125449 - RNA, 22 nt, Human
uggcugagguaacuaugaauaa

SEQ ID NO: 125450 - RNA, 22 nt, Human
augaggcuaugaauggggagau

SEQ ID NO: 125451 - RNA, 22 nt, Human
gggcaguugauggaggucugga

SEQ ID NO: 125452 - RNA, 22 nt, Human
cccagccucuggauucugcccu

SEQ ID NO: 125453 - RNA, 22 nt, Human
ggugaagguggaacgcagagca

SEQ ID NO: 125454 - RNA, 22 nt, Human
gaggaaaauaacaacuaagggc

SEQ ID NO: 125455 - RNA, 22 nt, Human
agaagccauguuuaguaggaug

SEQ ID NO: 125456 - RNA, 20 nt, Human
ggcaccaggcuaggauugga

SEQ ID NO: 125457 - RNA, 22 nt, Human
uggcaggaaaguaacagagcac

SEQ ID NO: 125458 - RNA, 22 nt, Human
ugaggaagggugugacggcacc

SEQ ID NO: 125459 - RNA, 22 nt, Human
caggacagaaauaaggaauaua

SEQ ID NO: 125460 - RNA, 22 nt, Human
uuuauccauaucauuaaaaucu

SEQ ID NO: 125461 - RNA, 22 nt, Human
caguggaaacuaugcugcugga

SEQ ID NO: 125462 - RNA, 22 nt, Human
ccucccacuucuugcugagguc

SEQ ID NO: 125463 - RNA, 18 nt, Human
ggcuuugcugggguuucu

SEQ ID NO: 125464 - RNA, 22 nt, Human
uuauccaacaugacuuaugucc

SEQ ID NO: 125465 - RNA, 22 nt, Human
agggagguaggagcuucuagcu

SEQ ID NO: 125466 - RNA, 22 nt, Human
ccagccuggacugggucuugug

SEQ ID NO: 125467 - RNA, 22 nt, Human
gggcacuguguucagagugcag

SEQ ID NO: 125468 - RNA, 20 nt, Human
aaagucuguuuaucucugga

SEQ ID NO: 125469 - RNA, 22 nt, Human
gaggcucagagagguccacaua

SEQ ID NO: 125470 - RNA, 22 nt, Human
aggcugggaaauguauuccagc

SEQ ID NO: 125471 - RNA, 22 nt, Human
uccuggccgccgcguggggccg

SEQ ID NO: 125472 - RNA, 22 nt, Human
ucagggcaucaucaugaauaua

SEQ ID NO: 125473 - RNA, 22 nt, Human
ugaggcaggacauggacaacug

SEQ ID NO: 125474 - RNA, 22 nt, Human
agggcugacaguaaaaguauga

SEQ ID NO: 125475 - RNA, 22 nt, Human
ccguggaguugugcugaguaug

SEQ ID NO: 125476 - RNA, 22 nt, Human
gaggagcaugggaaggcucugg

SEQ ID NO: 125477 - RNA, 19 nt, Human
cagaaauagcgaaguguaa

SEQ ID NO: 125478 - RNA, 22 nt, Human
gagcugagccuggguggaccgc

SEQ ID NO: 125479 - RNA, 22 nt, Human
uguggcaguauaagagcuagaa

SEQ ID NO: 125480 - RNA, 22 nt, Human
ucucugaguucuccuccagccc

SEQ ID NO: 125481 - RNA, 21 nt, Human
aggcucagagaucaaacagua

SEQ ID NO: 125482 - RNA, 22 nt, Human
ucccugcacagccgagccaugc

SEQ ID NO: 125483 - RNA, 22 nt, Human
ggugaggaaagauggugacagu

SEQ ID NO: 125484 - RNA, 22 nt, Human
ugaggaagaacaagaauuuaga

SEQ ID NO: 125485 - RNA, 22 nt, Human
guguccuuauuucugucucuca

SEQ ID NO: 125486 - RNA, 22 nt, Human
uggcaagagggaugcaagguuu

SEQ ID NO: 125487 - RNA, 22 nt, Human
gagcaggaugggagcuggggcc

SEQ ID NO: 125488 - RNA, 22 nt, Human
ugaagaagccaauugguaggcu

SEQ ID NO: 125489 - RNA, 22 nt, Human
aguuaacaaguuggcaaucaac

SEQ ID NO: 125490 - RNA, 22 nt, Human
auuuuccaaaauaauuguuacu

SEQ ID NO: 125491 - RNA, 22 nt, Human
agcagggcacuggaaggcacug

SEQ ID NO: 125492 - RNA, 19 nt, Human
uggcagaggcaguuuguac

SEQ ID NO: 125493 - RNA, 22 nt, Human
uucugcagcccaacaguaguuu

SEQ ID NO: 125494 - RNA, 19 nt, Human
uagagcugcuuccuggcag

SEQ ID NO: 125495 - RNA, 22 nt, Human
acagggcagagugaaaugcuau

SEQ ID NO: 125496 - RNA, 22 nt, Human
ucccaggcuggggccaggugac

SEQ ID NO: 125497 - RNA, 22 nt, Human
caggagaagucucuagggggug

SEQ ID NO: 125498 - RNA, 22 nt, Human
ugaguccauguggaggggaggu

SEQ ID NO: 125499 - RNA, 22 nt, Human
auccucaguguuucugacaucu

SEQ ID NO: 125500 - RNA, 22 nt, Human
guggaggguuugcaaugugcag

SEQ ID NO: 125501 - RNA, 22 nt, Human
ggcuguggcauuaggugaggcc

SEQ ID NO: 125502 - RNA, 22 nt, Human
cagugcaguggcugagcuggag

SEQ ID NO: 125503 - RNA, 23 nt, Human
uggcugagguccagguaguuuca

SEQ ID NO: 125504 - RNA, 22 nt, Human
gaggaagcugcguggcauuuca

SEQ ID NO: 125505 - RNA, 22 nt, Human
ugccaggcugucaauucaccca

SEQ ID NO: 125506 - RNA, 22 nt, Human
agccaggcggggcagguuuccu

SEQ ID NO: 125507 - RNA, 22 nt, Human
gaggagagaagcuaacggugcu

SEQ ID NO: 125508 - RNA, 22 nt, Human
ccagagcagauguggccuuggu

SEQ ID NO: 125509 - RNA, 22 nt, Human
ccacuggcauccagcugccauc

SEQ ID NO: 125510 - RNA, 22 nt, Human
caguccugugucccuugguggg

SEQ ID NO: 125511 - RNA, 22 nt, Human
caagaaggcuauaugggccagg

SEQ ID NO: 125512 - RNA, 22 nt, Human
aguggcagagugcacucaggca

SEQ ID NO: 125513 - RNA, 22 nt, Human
cucagccccaauucuccccauu

SEQ ID NO: 125514 - RNA, 22 nt, Human
agaggcaguauacaauccgagc

SEQ ID NO: 125515 - RNA, 22 nt, Human
gcugagaguccaggaaaacauc

SEQ ID NO: 125516 - RNA, 22 nt, Human
aaggcugaauucaaggguaggc

SEQ ID NO: 125517 - RNA, 18 nt, Human
ggcagcaagaagggaggg

SEQ ID NO: 125518 - RNA, 22 nt, Human
ugcagggccgcuggaggucaug

SEQ ID NO: 125519 - RNA, 22 nt, Human
agggcugacacaccuuauccuc

SEQ ID NO: 125520 - RNA, 22 nt, Human
gcuggcagacugggggcagaac

SEQ ID NO: 125521 - RNA, 21 nt, Human
gcaggcuggucaaaccucagu

SEQ ID NO: 125522 - RNA, 22 nt, Human
caccaggcugcccaggacaggg

SEQ ID NO: 125523 - RNA, 18 nt, Human
uggaggcagaguucuggc

SEQ ID NO: 125524 - RNA, 23 nt, Human
aggaggaaaaguuaucugcugag

SEQ ID NO: 125525 - RNA, 22 nt, Human
cugcuguguaucauuuuagaug

SEQ ID NO: 125526 - RNA, 22 nt, Human
uagaaaggauauugagaugaau

SEQ ID NO: 125527 - RNA, 22 nt, Human
gcagggcaaugaucccgagagg

SEQ ID NO: 125528 - RNA, 22 nt, Human
ugcagggaacuuggacagcuag

SEQ ID NO: 125529 - RNA, 22 nt, Human
uggccagaaccugcaguaggcc

SEQ ID NO: 125530 - RNA, 22 nt, Human
ccaggaggcagaaguugcagug

SEQ ID NO: 125531 - RNA, 19 nt, Human
cagcugcaccgugaccauc

SEQ ID NO: 125532 - RNA, 22 nt, Human
gggcagugguuacacagcugag

SEQ ID NO: 125533 - RNA, 22 nt, Human
gcucccagggaccgcagggcag

SEQ ID NO: 125534 - RNA, 22 nt, Human
ggcgcaggccuuggauccuggu

SEQ ID NO: 125535 - RNA, 22 nt, Human
caacagagagaccagaaacagg

SEQ ID NO: 125536 - RNA, 22 nt, Human
agccagcaggugagugcagccu

SEQ ID NO: 125537 - RNA, 22 nt, Human
gggcaugagaggcaggcaagug

SEQ ID NO: 125538 - RNA, 22 nt, Human
ucagaggaccuuacugagaacc

SEQ ID NO: 125539 - RNA, 22 nt, Human
agugugaguaauucagggaggg

SEQ ID NO: 125540 - RNA, 22 nt, Human
aagagcuggcucuugcagcagc

SEQ ID NO: 125541 - RNA, 22 nt, Human
ucacauuuauuucaaaguuacu

SEQ ID NO: 125542 - RNA, 21 nt, Human
ugaggcaggggugcuuuuguc

SEQ ID NO: 125543 - RNA, 22 nt, Human
uuucucaaggugucauguauuu

SEQ ID NO: 125544 - RNA, 22 nt, Human
uggcaggaggaugaggcggcua

SEQ ID NO: 125545 - RNA, 22 nt, Human
augcaccugaacuccaucagcu

SEQ ID NO: 125546 - RNA, 22 nt, Human
ggcuguggccagcggggcugag

SEQ ID NO: 125547 - RNA, 22 nt, Human
gggcagauggggcacaggcuga

SEQ ID NO: 125548 - RNA, 22 nt, Human
aaggaagguucauagucaaaga

SEQ ID NO: 125549 - RNA, 22 nt, Human
ugcagagggacagccacagcuc

SEQ ID NO: 125550 - RNA, 22 nt, Human
gggaggagugaagauucaccug

SEQ ID NO: 125551 - RNA, 22 nt, Human
acagcuguauccccagagcuca

SEQ ID NO: 125552 - RNA, 22 nt, Human
caggagcaugcugaugccagaa

SEQ ID NO: 125553 - RNA, 22 nt, Human
uggcugagagaagacggggaag

SEQ ID NO: 125554 - RNA, 22 nt, Human
acccagggaccccgcugacgcc

SEQ ID NO: 125555 - RNA, 22 nt, Human
ccuucccuaaagcgucgcuuag

SEQ ID NO: 125556 - RNA, 22 nt, Human
caguggagugggacuggucuga

SEQ ID NO: 125557 - RNA, 22 nt, Human
ggaggaggggugacugaaugcu

SEQ ID NO: 125558 - RNA, 22 nt, Human
ugccaggcaggacccuagaacc

SEQ ID NO: 125559 - RNA, 22 nt, Human
agggucagagaucggccaugug

SEQ ID NO: 125560 - RNA, 22 nt, Human
gggcaugccugcgcagugcaug

SEQ ID NO: 125561 - RNA, 23 nt, Human
cagcugaagcagccugggcugga

SEQ ID NO: 125562 - RNA, 22 nt, Human
agggccaggaacaccugaaggg

SEQ ID NO: 125563 - RNA, 21 nt, Human
augggcagaggcagagaggcu

SEQ ID NO: 125564 - RNA, 22 nt, Human
aggugcaguggcucaugccugu

SEQ ID NO: 125565 - RNA, 22 nt, Human
augaggcaucugcagucacuag

SEQ ID NO: 125566 - RNA, 22 nt, Human
gucagcacuuuuccgaggcaga

SEQ ID NO: 125567 - RNA, 22 nt, Human
ugcagagguuuccaggcaaguu

SEQ ID NO: 125568 - RNA, 22 nt, Human
agggcagcacagcugugcuccu

SEQ ID NO: 125569 - RNA, 22 nt, Human
aggccagcaagaaagagagucu

SEQ ID NO: 125570 - RNA, 22 nt, Human
gcagggcaaacccagguguuca

SEQ ID NO: 125571 - RNA, 21 nt, Human
gggcaggucucugaugucaac

SEQ ID NO: 125572 - RNA, 22 nt, Human
cgaggcagggaagcugcaaaag

SEQ ID NO: 125573 - RNA, 22 nt, Human
agagccacggcaggccuaggaa

SEQ ID NO: 125574 - RNA, 22 nt, Human
agcaggaaggucugugugaguc

SEQ ID NO: 125575 - RNA, 19 nt, Human
agccacagaacuugcagga

SEQ ID NO: 125576 - RNA, 22 nt, Human
aguucccaggugaugcugaugu

SEQ ID NO: 125577 - RNA, 22 nt, Human
cuggagugauacucagaaugug

SEQ ID NO: 125578 - RNA, 22 nt, Human
gaggcacauauauacagagccc

SEQ ID NO: 125579 - RNA, 22 nt, Human
agugcagaguacauuuguggca

SEQ ID NO: 125580 - RNA, 22 nt, Human
agggccaccucucuggguuccc

SEQ ID NO: 125581 - RNA, 22 nt, Human
cagagcuggagggaacccuggc

SEQ ID NO: 125582 - RNA, 22 nt, Human
uguguccuuuggaggaucagcg

SEQ ID NO: 125583 - RNA, 18 nt, Human
cggcagagugcuucuagc

SEQ ID NO: 125584 - RNA, 19 nt, Human
ccagaggacuguuaaugaa

SEQ ID NO: 125585 - RNA, 22 nt, Human
uccuggugucgccuggucaguu

SEQ ID NO: 125586 - RNA, 19 nt, Human
agccagugagccucugggu

SEQ ID NO: 125587 - RNA, 22 nt, Human
cagggcagggauguugcggcag

SEQ ID NO: 125588 - RNA, 22 nt, Human
agaagccaauucugugugaguc

SEQ ID NO: 125589 - RNA, 22 nt, Human
cccagccucuggguucugccgg

SEQ ID NO: 125590 - RNA, 22 nt, Human
uagccggguguugugucaugca

SEQ ID NO: 125591 - RNA, 22 nt, Human
cagauggaacacagaaaggaga

SEQ ID NO: 125592 - RNA, 22 nt, Human
ucucugagaaguuccuuuguga

SEQ ID NO: 125593 - RNA, 20 nt, Human
aagggcagagggaacagacu

SEQ ID NO: 125594 - RNA, 22 nt, Human
accagagcucuucagcacagga

SEQ ID NO: 125595 - RNA, 22 nt, Human
uugauuuauagaauguucaagc

SEQ ID NO: 125596 - RNA, 22 nt, Human
agggcugagugggagagaguug

SEQ ID NO: 125597 - RNA, 22 nt, Human
uguccuuuaugaaaugguguuu

SEQ ID NO: 125598 - RNA, 22 nt, Human
uguggcagaaccagaauucaaa

SEQ ID NO: 125599 - RNA, 22 nt, Human
ugaggcagcccacuuuccuuag

SEQ ID NO: 125600 - RNA, 22 nt, Human
aagggcagcugacagaugcuua

SEQ ID NO: 125601 - RNA, 22 nt, Human
acacuguguggucucucucgga

SEQ ID NO: 125602 - RNA, 22 nt, Human
aggcucagauucacauuugguu

SEQ ID NO: 125603 - RNA, 22 nt, Human
ugaggcagcaauuguauuguau

SEQ ID NO: 125604 - RNA, 22 nt, Human
ggagccuggcaaugcugcgucc

SEQ ID NO: 125605 - RNA, 22 nt, Human
agugcugucuccuucccccggg

SEQ ID NO: 125606 - RNA, 22 nt, Human
aggcuguccucucuugcucagu

SEQ ID NO: 125607 - RNA, 20 nt, Human
ugggcugaggaucaggugcc

SEQ ID NO: 125608 - RNA, 22 nt, Human
agaagccaaucagcucucugcu

SEQ ID NO: 125609 - RNA, 22 nt, Human
agaggcaggaagagcugauuuu

SEQ ID NO: 125610 - RNA, 22 nt, Human
uaaggguucagaaugcaguggu

SEQ ID NO: 125611 - RNA, 22 nt, Human
agaagccaacagggcaggagag

SEQ ID NO: 125612 - RNA, 19 nt, Human
cuccucagucccagagguc

SEQ ID NO: 125613 - RNA, 22 nt, Human
ugccaggcccagcuccagagcu

SEQ ID NO: 125614 - RNA, 22 nt, Human
ucucccagaaguccucaguaca

SEQ ID NO: 125615 - RNA, 22 nt, Human
ugugggaggaauuagaauggga

SEQ ID NO: 125616 - RNA, 23 nt, Human
agcagugaguaaacagauaggau

SEQ ID NO: 125617 - RNA, 22 nt, Human
gccugugguuugauuaagcauu

SEQ ID NO: 125618 - RNA, 22 nt, Human
agccugguuuaagcauuuuaua

SEQ ID NO: 125619 - RNA, 22 nt, Human
cucagaagaacaaaggcucuac

SEQ ID NO: 125620 - RNA, 22 nt, Human
cugaggcuuggaggggucuggu

SEQ ID NO: 125621 - RNA, 22 nt, Human
ccugggcaacauagugagaccc

SEQ ID NO: 125622 - RNA, 22 nt, Human
gcauggcagugaggauggugcu

SEQ ID NO: 125623 - RNA, 22 nt, Human
ccagaauagaaggcagcuguca

SEQ ID NO: 125624 - RNA, 22 nt, Human
guuauuuuaucucugagagguu

SEQ ID NO: 125625 - RNA, 22 nt, Human
aguuuccaaauauuguuuuagc

SEQ ID NO: 125626 - RNA, 22 nt, Human
ugccaggcucaggaugucccug

SEQ ID NO: 125627 - RNA, 23 nt, Human
uggcugagauccuacuguuugcu

SEQ ID NO: 125628 - RNA, 22 nt, Human
agagggaaugugauugcaccau

SEQ ID NO: 125629 - RNA, 22 nt, Human
gggcugagugaccucaggccaa

SEQ ID NO: 125630 - RNA, 22 nt, Human
agaagccagaauauucauggau

SEQ ID NO: 125631 - RNA, 23 nt, Human
agugagcagcuguagggcaagga

SEQ ID NO: 125632 - RNA, 17 nt, Human
agggacagcaguuuagg

SEQ ID NO: 125633 - RNA, 19 nt, Human
agacagagacugaaauaga

SEQ ID NO: 125634 - RNA, 22 nt, Human
ccagggcaauaggaacacuuuu

SEQ ID NO: 125635 - RNA, 20 nt, Human
uguggcaggaugagggcgga

SEQ ID NO: 125636 - RNA, 22 nt, Human
cagaaguggccucagagggagu

SEQ ID NO: 125637 - RNA, 22 nt, Human
aggaggaauacaauccagcagc

SEQ ID NO: 125638 - RNA, 22 nt, Human
cauccacuagaaugacagaguu

SEQ ID NO: 125639 - RNA, 22 nt, Human
uccgcccgcacguauggagugg

SEQ ID NO: 125640 - RNA, 22 nt, Human
cguagguggcucagcaccuggg

SEQ ID NO: 125641 - RNA, 22 nt, Human
gccagggcucgcggucccucgu

SEQ ID NO: 125642 - RNA, 23 nt, Human
aggugcagcccuggaccugcccc

SEQ ID NO: 125643 - RNA, 22 nt, Human
ggcagccaugucccagggcuuc

SEQ ID NO: 125644 - RNA, 22 nt, Human
aaggagaaaugguagaugugca

SEQ ID NO: 125645 - RNA, 22 nt, Human
auggcagccugagcagaggaau

SEQ ID NO: 125646 - RNA, 22 nt, Human
gccaccagcagaaaaggggcca

SEQ ID NO: 125647 - RNA, 22 nt, Human
gccaguggcuugccaggcagga

SEQ ID NO: 125648 - RNA, 22 nt, Human
cagccugcucucagauguugag

SEQ ID NO: 125649 - RNA, 20 nt, Human
accaggagauggaggcaggg

SEQ ID NO: 125650 - RNA, 22 nt, Human
agggcugcugaggaagccuugc

SEQ ID NO: 125651 - RNA, 22 nt, Human
agggagaagguuuagcugugag

SEQ ID NO: 125652 - RNA, 22 nt, Human
ucaguggauauuucuguggcug

SEQ ID NO: 125653 - RNA, 22 nt, Human
ccagggcaggagaaagacucac

SEQ ID NO: 125654 - RNA, 22 nt, Human
augcugugucaccuuaggauuu

SEQ ID NO: 125655 - RNA, 22 nt, Human
agcugagcuaguaguuccagug

SEQ ID NO: 125656 - RNA, 22 nt, Human
acaguggaugacauccuuuugc

SEQ ID NO: 125657 - RNA, 23 nt, Human
ucccagggaaggugagcgaggcu

SEQ ID NO: 125658 - RNA, 22 nt, Human
uuugagaaaugggcucugugcu

SEQ ID NO: 125659 - RNA, 21 nt, Human
agccaggcaagcacccccacu

SEQ ID NO: 125660 - RNA, 20 nt, Human
ggggcaguggcucaugccug

SEQ ID NO: 125661 - RNA, 22 nt, Human
uccauccauguaggaagauggu

SEQ ID NO: 125662 - RNA, 22 nt, Human
gagagcugcaagguagggcggg

SEQ ID NO: 125663 - RNA, 22 nt, Human
cagaggaaggcucugggaaugu

SEQ ID NO: 125664 - RNA, 22 nt, Human
aacccgggaggcagagguugug

SEQ ID NO: 125665 - RNA, 22 nt, Human
gaggaggaaguucucuguaggc

SEQ ID NO: 125666 - RNA, 22 nt, Human
cuggagugaagucuggcagcuu

SEQ ID NO: 125667 - RNA, 22 nt, Human
aaauauaauuucugccucaaua

SEQ ID NO: 125668 - RNA, 22 nt, Human
cagaggcauauaauugcugggg

SEQ ID NO: 125669 - RNA, 22 nt, Human
acaguggaggccauaugguccu

SEQ ID NO: 125670 - RNA, 22 nt, Human
agcagggcucugccaugggccc

SEQ ID NO: 125671 - RNA, 18 nt, Human
agaaggagcuaugggcag

SEQ ID NO: 125672 - RNA, 22 nt, Human
gaguccagacaccauaccugau

SEQ ID NO: 125673 - RNA, 22 nt, Human
cuccagggagcugcgggagcca

SEQ ID NO: 125674 - RNA, 22 nt, Human
gagggccaacuagcaccacuuu

SEQ ID NO: 125675 - RNA, 22 nt, Human
ggcaggcagaggcugagacagg

SEQ ID NO: 125676 - RNA, 23 nt, Human
aggaaggagguccuaacaguauc

SEQ ID NO: 125677 - RNA, 22 nt, Human
gcagagcugggucuguauccaa

SEQ ID NO: 125678 - RNA, 22 nt, Human
ucuuccugaaacccuguuccag

SEQ ID NO: 125679 - RNA, 23 nt, Human
ccugcucaggcgugugcccugcu

SEQ ID NO: 125680 - RNA, 22 nt, Human
ucuguccauuuuccauuuuggc

SEQ ID NO: 125681 - RNA, 22 nt, Human
uuccucagacccucauugugag

SEQ ID NO: 125682 - RNA, 22 nt, Human
gccgugcgugcgcaggugcugu

SEQ ID NO: 125683 - RNA, 22 nt, Human
caagcugguaucagcuagagcg

SEQ ID NO: 125684 - RNA, 22 nt, Human
caucagagugguggccuggugu

SEQ ID NO: 125685 - RNA, 22 nt, Human
ucagaggauagaaauacuuauu

SEQ ID NO: 125686 - RNA, 22 nt, Human
gggcagguguugucaaucuaau

SEQ ID NO: 125687 - RNA, 22 nt, Human
ucugccuggaugauggcagggc

SEQ ID NO: 125688 - RNA, 22 nt, Human
ccagagcugcauccagcagguu

SEQ ID NO: 125689 - RNA, 22 nt, Human
aaagccagugguaugagagaaa

SEQ ID NO: 125690 - RNA, 22 nt, Human
uggcugaguuacgaacagagca

SEQ ID NO: 125691 - RNA, 22 nt, Human
agcuguggaguaggggguugga

SEQ ID NO: 125692 - RNA, 22 nt, Human
gggagagguuacccgagcaacu

SEQ ID NO: 125693 - RNA, 22 nt, Human
ggcuguggucauuaggagguug

SEQ ID NO: 125694 - RNA, 22 nt, Human
gaagccaguacugugcucugca

SEQ ID NO: 125695 - RNA, 22 nt, Human
ugaagccacuuuccagaaucac

SEQ ID NO: 125696 - RNA, 22 nt, Human
gagggcagugaauuuugaagcu

SEQ ID NO: 125697 - RNA, 21 nt, Human
uggcugagccaggugugugga

SEQ ID NO: 125698 - RNA, 22 nt, Human
augggcagaguggggacaggaa

SEQ ID NO: 125699 - RNA, 22 nt, Human
gcugagccccccugcguggguc

SEQ ID NO: 125700 - RNA, 22 nt, Human
gcugagagaucaaggcaggauu

SEQ ID NO: 125701 - RNA, 22 nt, Human
aagggcagccugacucacgguc

SEQ ID NO: 125702 - RNA, 22 nt, Human
gggcaggaggcuaauucugcau

SEQ ID NO: 125703 - RNA, 22 nt, Human
acaaaggugagcagaagacaca

SEQ ID NO: 125704 - RNA, 22 nt, Human
cauauuucagucuaagaugugu

SEQ ID NO: 125705 - RNA, 20 nt, Human
cuccagggaacagacuggag

SEQ ID NO: 125706 - RNA, 22 nt, Human
ugaaaugcuguagagacuguau

SEQ ID NO: 125707 - RNA, 22 nt, Human
ggagaagcagcuucuugaugaa

SEQ ID NO: 125708 - RNA, 22 nt, Human
augcugaauugaugcgagggag

SEQ ID NO: 125709 - RNA, 22 nt, Human
gaaggagaggauugugaggcug

SEQ ID NO: 125710 - RNA, 22 nt, Human
caggcagcagccacucugguau

SEQ ID NO: 125711 - RNA, 22 nt, Human
auuuucuauucugcugguuuag

SEQ ID NO: 125712 - RNA, 22 nt, Human
uuuugaaagggugauuuggcuu

SEQ ID NO: 125713 - RNA, 19 nt, Human
acagagcucucugcuucug

SEQ ID NO: 125714 - RNA, 22 nt, Human
uggcugagagucauccugugug

SEQ ID NO: 125715 - RNA, 22 nt, Human
gguguccuugcagaaggcggcg

SEQ ID NO: 125716 - RNA, 22 nt, Human
uccugccuugccugggacauca

SEQ ID NO: 125717 - RNA, 22 nt, Human
ccaguuuuuccagugcuuucug

SEQ ID NO: 125718 - RNA, 22 nt, Human
agaaauacuuuguaaaucucac

SEQ ID NO: 125719 - RNA, 22 nt, Human
aggagggcuaggaaaaccagga

SEQ ID NO: 125720 - RNA, 22 nt, Human
gaggaagaaagcauaggugggg

SEQ ID NO: 125721 - RNA, 22 nt, Human
guucagcccacagagggggccg

SEQ ID NO: 125722 - RNA, 22 nt, Human
gcagauggcagcccaggcuggg

SEQ ID NO: 125723 - RNA, 22 nt, Human
ucacacacauuugcugucugau

SEQ ID NO: 125724 - RNA, 22 nt, Human
agcagggcuuugcagacuuggg

SEQ ID NO: 125725 - RNA, 22 nt, Human
gcagaggacagggauuuagauu

SEQ ID NO: 125726 - RNA, 22 nt, Human
gaagucugcugcucaggaguuu

SEQ ID NO: 125727 - RNA, 22 nt, Human
ccagggcaggggcuggaguuca

SEQ ID NO: 125728 - RNA, 22 nt, Human
ugaggcagucacccccuccugc

SEQ ID NO: 125729 - RNA, 22 nt, Human
cuaguccacuguccugccucca

SEQ ID NO: 125730 - RNA, 22 nt, Human
gagggcugugaaggagcggguu

SEQ ID NO: 125731 - RNA, 22 nt, Human
auccaggguguggagagagcuc

SEQ ID NO: 125732 - RNA, 22 nt, Human
cacaaaugacugaaacgacugu

SEQ ID NO: 125733 - RNA, 22 nt, Human
acccaggggcagccuugcugug

SEQ ID NO: 125734 - RNA, 22 nt, Human
acacugugacaaaggcuguucu

SEQ ID NO: 125735 - RNA, 22 nt, Human
ucaggcagagggagaagccaag

SEQ ID NO: 125736 - RNA, 22 nt, Human
ugccaggcuuagagcaggggcu

SEQ ID NO: 125737 - RNA, 22 nt, Human
cagaggaagcuggguguggagu

SEQ ID NO: 125738 - RNA, 22 nt, Human
gcacggcuaauuuuuguauuuu

SEQ ID NO: 125739 - RNA, 22 nt, Human
ggggccagcaauguugaggaau

SEQ ID NO: 125740 - RNA, 22 nt, Human
ugaagccauaggacagaggaua

SEQ ID NO: 125741 - RNA, 22 nt, Human
aggcugagccugggcguggugg

SEQ ID NO: 125742 - RNA, 22 nt, Human
uauuugcaaagaacuacacuag

SEQ ID NO: 125743 - RNA, 22 nt, Human
aaggugaaacuggaagcuggcc

SEQ ID NO: 125744 - RNA, 22 nt, Human
ccagggcagcagaauuggggca

SEQ ID NO: 125745 - RNA, 22 nt, Human
uuugaaguccaucuggcccagu

SEQ ID NO: 125746 - RNA, 22 nt, Human
caugaauauuuaguauuuacuu

SEQ ID NO: 125747 - RNA, 21 nt, Human
aucucacagcccagagaagcc

SEQ ID NO: 125748 - RNA, 22 nt, Human
gcucccaggaagagaagggcca

SEQ ID NO: 125749 - RNA, 22 nt, Human
uggcucagagagggagugugga

SEQ ID NO: 125750 - RNA, 22 nt, Human
agcugccuggagucauuuccug

SEQ ID NO: 125751 - RNA, 22 nt, Human
cagcugugaauugucuuaucua

SEQ ID NO: 125752 - RNA, 22 nt, Human
agcugaggcucugagagggaag

SEQ ID NO: 125753 - RNA, 22 nt, Human
ggagcagccgcgucucagggca

SEQ ID NO: 125754 - RNA, 22 nt, Human
aaggguugaagauaaauaaggu

SEQ ID NO: 125755 - RNA, 22 nt, Human
agggcugaugcaccauguagcc

SEQ ID NO: 125756 - RNA, 22 nt, Human
caggcagcucaaccuugggagc

SEQ ID NO: 125757 - RNA, 21 nt, Human
guuauuuuaagugagcuuugc

SEQ ID NO: 125758 - RNA, 23 nt, Human
ugggcagcuucugcaugcccacc

SEQ ID NO: 125759 - RNA, 22 nt, Human
ggcaggcaguguggugugaaac

SEQ ID NO: 125760 - RNA, 22 nt, Human
uagagcugauaaugaggccaag

SEQ ID NO: 125761 - RNA, 22 nt, Human
aguccccucuaacccaacuuua

SEQ ID NO: 125762 - RNA, 22 nt, Human
aggcugaggcgggaggaucacu

SEQ ID NO: 125763 - RNA, 22 nt, Human
cagcugcaugucuguggugguc

SEQ ID NO: 125764 - RNA, 22 nt, Human
gugcugaguagaaugaaugccu

SEQ ID NO: 125765 - RNA, 22 nt, Human
agcaggugagcacagccaggcu

SEQ ID NO: 125766 - RNA, 22 nt, Human
augcuguguggucaaguuaauu

SEQ ID NO: 125767 - RNA, 22 nt, Human
caugaauauacauccugauggc

SEQ ID NO: 125768 - RNA, 22 nt, Human
cgaggcagacaaaaguuggaag

SEQ ID NO: 125769 - RNA, 23 nt, Human
uccuggugacaugccugagcauc

SEQ ID NO: 125770 - RNA, 22 nt, Human
agggcugacaaauggcagugac

SEQ ID NO: 125771 - RNA, 18 nt, Human
cagaugagaugcaaucuc

SEQ ID NO: 125772 - RNA, 22 nt, Human
uggguaggccaggaagcagugu

SEQ ID NO: 125773 - RNA, 22 nt, Human
gaggaggcacuugagcagaugu

SEQ ID NO: 125774 - RNA, 22 nt, Human
gaauucugguuuugaaaugaau

SEQ ID NO: 125775 - RNA, 22 nt, Human
cagggcaguaccgcccucuggc

SEQ ID NO: 125776 - RNA, 22 nt, Human
uucugugaaucuuuuuucccac

SEQ ID NO: 125777 - RNA, 22 nt, Human
uggcucagauaauucaaggggc

SEQ ID NO: 125778 - RNA, 22 nt, Human
ggugaggaauuggggacugacc

SEQ ID NO: 125779 - RNA, 21 nt, Human
uggcagggguaguaguacagc

SEQ ID NO: 125780 - RNA, 22 nt, Human
cagggcagugaagaacacacgu

SEQ ID NO: 125781 - RNA, 18 nt, Human
cccagccucuccuuucua

SEQ ID NO: 125782 - RNA, 22 nt, Human
aaguggaggccgaguucacgca

SEQ ID NO: 125783 - RNA, 22 nt, Human
uggccuggaaaaaugcagaugg

SEQ ID NO: 125784 - RNA, 22 nt, Human
augggcaguguauuggaaggaa

SEQ ID NO: 125785 - RNA, 22 nt, Human
aggccagcaccagagucaagaa

SEQ ID NO: 125786 - RNA, 22 nt, Human
gagcaugguuccauagguuggu

SEQ ID NO: 125787 - RNA, 23 nt, Human
cagggcccugcucaauuucucca

SEQ ID NO: 125788 - RNA, 21 nt, Human
ccauaauuuuguuucagaagu

SEQ ID NO: 125789 - RNA, 22 nt, Human
ucucaaacuaacaaugauuaua

SEQ ID NO: 125790 - RNA, 22 nt, Human
agucaguuaaccucacagcauc

SEQ ID NO: 125791 - RNA, 22 nt, Human
ggcagcaaauauugucagcugu

SEQ ID NO: 125792 - RNA, 22 nt, Human
acaguggauauauuaaaugaga

SEQ ID NO: 125793 - RNA, 22 nt, Human
agggaggucuuugaggggcuua

SEQ ID NO: 125794 - RNA, 22 nt, Human
uuucccaauugagagguucugu

SEQ ID NO: 125795 - RNA, 22 nt, Human
gcugccucugcacagcucacuc

SEQ ID NO: 125796 - RNA, 22 nt, Human
aagggcaggcacccacccucac

SEQ ID NO: 125797 - RNA, 22 nt, Human
uagggcaguuauaacauuagug

SEQ ID NO: 125798 - RNA, 22 nt, Human
aagggcuguaagccaaguaaag

SEQ ID NO: 125799 - RNA, 22 nt, Human
auggcagauggcuggagcaggu

SEQ ID NO: 125800 - RNA, 21 nt, Human
aucagaaguuuuggucaguag

SEQ ID NO: 125801 - RNA, 22 nt, Human
cucccagguuacaucugagccu

SEQ ID NO: 125802 - RNA, 22 nt, Human
agagccuguaacaucuuucuua

SEQ ID NO: 125803 - RNA, 19 nt, Human
aggugcaggucacagggga

SEQ ID NO: 125804 - RNA, 22 nt, Human
cagggcugaagaaauucaaaag

SEQ ID NO: 125805 - RNA, 22 nt, Human
uggggcagaguaggauuuuggc

SEQ ID NO: 125806 - RNA, 22 nt, Human
ucaggcagaauuaucaaaagau

SEQ ID NO: 125807 - RNA, 22 nt, Human
auuuccacauaagggaaauaag

SEQ ID NO: 125808 - RNA, 22 nt, Human
ugggagaugguucugagacuuu

SEQ ID NO: 125809 - RNA, 18 nt, Human
gccagagggaagcaggug

SEQ ID NO: 125810 - RNA, 22 nt, Human
ucagaggaacacuguuucaugc

SEQ ID NO: 125811 - RNA, 17 nt, Human
ccaggugggaggugggg

SEQ ID NO: 125812 - RNA, 22 nt, Human
ugaggcaggaugcuugcacagg

SEQ ID NO: 125813 - RNA, 22 nt, Human
cacaggagugcugcuauuguug

SEQ ID NO: 125814 - RNA, 22 nt, Human
agggagccuuccuggcuguggu

SEQ ID NO: 125815 - RNA, 22 nt, Human
ccagggcagcgccccuccacgc

SEQ ID NO: 125816 - RNA, 22 nt, Human
cagagccccucagcucucuccc

SEQ ID NO: 125817 - RNA, 21 nt, Human
gaguggaacgcucuucacacc

SEQ ID NO: 125818 - RNA, 22 nt, Human
aaauagcacagcagcugaggcu

SEQ ID NO: 125819 - RNA, 22 nt, Human
gccuuaggggucagacagagcu

SEQ ID NO: 125820 - RNA, 22 nt, Human
gcagauggaaagugcuugaggg

SEQ ID NO: 125821 - RNA, 18 nt, Human
gagcagaggcucaacugg

SEQ ID NO: 125822 - RNA, 22 nt, Human
guguccuuauaagaagagaugc

SEQ ID NO: 125823 - RNA, 22 nt, Human
caggcagagucagauuagacuu

SEQ ID NO: 125824 - RNA, 22 nt, Human
aggaagugcuaagagaacauca

SEQ ID NO: 125825 - RNA, 22 nt, Human
gaagccaguguuugaagaauuu

SEQ ID NO: 125826 - RNA, 22 nt, Human
cagagcaggcccacugcccucc

SEQ ID NO: 125827 - RNA, 22 nt, Human
ggcagaggugaaguucacaagg

SEQ ID NO: 125828 - RNA, 22 nt, Human
aggcaguuguagagagggcucu

SEQ ID NO: 125829 - RNA, 22 nt, Human
ucaggcugaaucauccuagcuu

SEQ ID NO: 125830 - RNA, 22 nt, Human
uggggcaguuaauaaacauucu

SEQ ID NO: 125831 - RNA, 18 nt, Human
uccgaggcaccauaaaaa

SEQ ID NO: 125832 - RNA, 22 nt, Human
ccagggcagaaaaagagggaau

SEQ ID NO: 125833 - RNA, 22 nt, Human
cugcugugcacccaggaaggcu

SEQ ID NO: 125834 - RNA, 22 nt, Human
ggcaguggaggacccugugucu

SEQ ID NO: 125835 - RNA, 22 nt, Human
ggaggccaugaggcucuaggug

SEQ ID NO: 125836 - RNA, 19 nt, Human
aggcagaggcuuggcuagc

SEQ ID NO: 125837 - RNA, 22 nt, Human
uggagccaaugaacauuugcug

SEQ ID NO: 125838 - RNA, 22 nt, Human
cagcacacagugacucgcaccu

SEQ ID NO: 125839 - RNA, 22 nt, Human
aggugcagcugguggagucugg

SEQ ID NO: 125840 - RNA, 22 nt, Human
uacaggcauguagcauggugau

SEQ ID NO: 125841 - RNA, 16 nt, Human
uggcagagguucagcc

SEQ ID NO: 125842 - RNA, 23 nt, Human
agaguccacaagauuuuccagug

SEQ ID NO: 125843 - RNA, 22 nt, Human
acuugguuggucucacccuguu

SEQ ID NO: 125844 - RNA, 22 nt, Human
uaaaggcucacuggcuuggggu

SEQ ID NO: 125845 - RNA, 22 nt, Human
caugggcaccuuaaaaugaggc

SEQ ID NO: 125846 - RNA, 22 nt, Human
ccaggguuuaaauucugacuau

SEQ ID NO: 125847 - RNA, 22 nt, Human
ugggcagguuguuauuugacau

SEQ ID NO: 125848 - RNA, 22 nt, Human
ggcagccauacucagaccuggg

SEQ ID NO: 125849 - RNA, 22 nt, Human
gggcugagagugacuguucugu

SEQ ID NO: 125850 - RNA, 22 nt, Human
uggcagagucugggcuugggca

SEQ ID NO: 125851 - RNA, 22 nt, Human
ucuguccauucagccauccauc

SEQ ID NO: 125852 - RNA, 22 nt, Human
gaggccagcgcgcagcacuuuu

SEQ ID NO: 125853 - RNA, 22 nt, Human
auggcagggaccaagcugucau

SEQ ID NO: 125854 - RNA, 22 nt, Human
agcugccuccauggucaaagau

SEQ ID NO: 125855 - RNA, 22 nt, Human
augaggcagguggaggcugcca

SEQ ID NO: 125856 - RNA, 20 nt, Human
gcuguugccaguacagaugg

SEQ ID NO: 125857 - RNA, 22 nt, Human
gggcacuggaggccaaggagcu

SEQ ID NO: 125858 - RNA, 22 nt, Human
gaaagguugggugaauggugga

SEQ ID NO: 125859 - RNA, 22 nt, Human
acagggcagcaacuuugugccu

SEQ ID NO: 125860 - RNA, 22 nt, Human
acagcuguggggacucuugccc

SEQ ID NO: 125861 - RNA, 22 nt, Human
acacugugucuagcauuuuaca

SEQ ID NO: 125862 - RNA, 22 nt, Human
uuucugcucgcucucaaucagg

SEQ ID NO: 125863 - RNA, 22 nt, Human
cagggcaguuuuacuucucucu

SEQ ID NO: 125864 - RNA, 22 nt, Human
gaggaggcacuaguuagugaca

SEQ ID NO: 125865 - RNA, 22 nt, Human
uggcugaggagagggcggaagu

SEQ ID NO: 125866 - RNA, 22 nt, Human
cugagaguguggcuuccaggcc

SEQ ID NO: 125867 - RNA, 19 nt, Human
ugcagccacgugagagacu

SEQ ID NO: 125868 - RNA, 22 nt, Human
ccaaaggcggaacugagucucu

SEQ ID NO: 125869 - RNA, 22 nt, Human
aggcugagugcuccccuagaug

SEQ ID NO: 125870 - RNA, 22 nt, Human
gaauuaguguugaaaucagggc

SEQ ID NO: 125871 - RNA, 19 nt, Human
ugggcagguucaguaaugg

SEQ ID NO: 125872 - RNA, 22 nt, Human
ccaggugugccagcagggacug

SEQ ID NO: 125873 - RNA, 22 nt, Human
gcacagggcugccaggcggcuu

SEQ ID NO: 125874 - RNA, 22 nt, Human
gcagcuggauuucaagagggag

SEQ ID NO: 125875 - RNA, 22 nt, Human
agugcagagagcaauacucuac

SEQ ID NO: 125876 - RNA, 16 nt, Human
aggcagagauuuaccc

SEQ ID NO: 125877 - RNA, 17 nt, Human
agccaggcauaugaagu

SEQ ID NO: 125878 - RNA, 22 nt, Human
gaggcucagagggagcaugguc

SEQ ID NO: 125879 - RNA, 22 nt, Human
ucagaggagaugguuaccaggg

SEQ ID NO: 125880 - RNA, 18 nt, Human
aggggcagcuugugugga

SEQ ID NO: 125881 - RNA, 22 nt, Human
ucuuuccauggccacacagucu

SEQ ID NO: 125882 - RNA, 22 nt, Human
uccaagaucuacagcaguuuag

SEQ ID NO: 125883 - RNA, 22 nt, Human
aggcugaggcaagaggaucacu

SEQ ID NO: 125884 - RNA, 22 nt, Human
cugggcaguaugaauauucaaa

SEQ ID NO: 125885 - RNA, 22 nt, Human
gcagggcagagggagaaucucu

SEQ ID NO: 125886 - RNA, 22 nt, Human
ucuuugcuccacacucuagaga

SEQ ID NO: 125887 - RNA, 22 nt, Human
augcaguguuuggaagcuuaag

SEQ ID NO: 125888 - RNA, 22 nt, Human
augaggcagcugcuggagaacg

SEQ ID NO: 125889 - RNA, 22 nt, Human
agcagccauagauagcaugcaa

SEQ ID NO: 125890 - RNA, 22 nt, Human
cggcugaggaucuccaggccug

SEQ ID NO: 125891 - RNA, 22 nt, Human
gcagaagaccaugguggaaaga

SEQ ID NO: 125892 - RNA, 22 nt, Human
aaggcagaaagggaugugagug

SEQ ID NO: 125893 - RNA, 22 nt, Human
ccagggcacuuaggcccagccc

SEQ ID NO: 125894 - RNA, 22 nt, Human
cccaguggagauaggagugugg

SEQ ID NO: 125895 - RNA, 22 nt, Human
ggcaggagcucagguugguucc

SEQ ID NO: 125896 - RNA, 22 nt, Human
ccuccacaggagcugcagugcu

SEQ ID NO: 125897 - RNA, 22 nt, Human
agggaggucuggcugcccugag

SEQ ID NO: 125898 - RNA, 23 nt, Human
cuagggcaguauuucacagacac

SEQ ID NO: 125899 - RNA, 22 nt, Human
gugccaggcccagggagcgggg

SEQ ID NO: 125900 - RNA, 22 nt, Human
gggcugagcuguucugaguuua

SEQ ID NO: 125901 - RNA, 22 nt, Human
cagagcugcacauucuaugaug

SEQ ID NO: 125902 - RNA, 22 nt, Human
caggaggcagagguugcaguga

SEQ ID NO: 125903 - RNA, 22 nt, Human
gagaaacuaacaucugaaggug

SEQ ID NO: 125904 - RNA, 22 nt, Human
guuauuuuaacuucucaguaau

SEQ ID NO: 125905 - RNA, 20 nt, Human
accagguggcugaugacacc

SEQ ID NO: 125906 - RNA, 22 nt, Human
ccucccugcgcuccugcggcgg

SEQ ID NO: 125907 - RNA, 22 nt, Human
aggcugaggcagguggaucauu

SEQ ID NO: 125908 - RNA, 22 nt, Human
uaacugauauugaaaaacauca

SEQ ID NO: 125909 - RNA, 22 nt, Human
gcuggggagcaagaguagugag

SEQ ID NO: 125910 - RNA, 22 nt, Human
uagagcugaguugacuccauuu

SEQ ID NO: 125911 - RNA, 22 nt, Human
agagugcaaccgaaacaagcag

SEQ ID NO: 125912 - RNA, 22 nt, Human
uugcagagccaugaggcuggcu

SEQ ID NO: 125913 - RNA, 22 nt, Human
caaggcugugcaggguccauau

SEQ ID NO: 125914 - RNA, 23 nt, Human
caggcaggaugaggacuacacuc

SEQ ID NO: 125915 - RNA, 19 nt, Human
uggcugagcuggacugagg

SEQ ID NO: 125916 - RNA, 22 nt, Human
ccaguggaguuuuuauacccag

SEQ ID NO: 125917 - RNA, 22 nt, Human
ugcaggagacauaauagggacu

SEQ ID NO: 125918 - RNA, 19 nt, Human
ugcagggcugcgccugggg

SEQ ID NO: 125919 - RNA, 23 nt, Human
gcagauggccccagagugcugcc

SEQ ID NO: 125920 - RNA, 22 nt, Human
agggcugcuccuccuucaggcc

SEQ ID NO: 125921 - RNA, 22 nt, Human
acaaaggcauagugaauguuuu

SEQ ID NO: 125922 - RNA, 22 nt, Human
uaggcagagguaugguaaggac

SEQ ID NO: 125923 - RNA, 16 nt, Human
gcacacacaucaauga

SEQ ID NO: 125924 - RNA, 22 nt, Human
gagugcaguaucuucugugucc

SEQ ID NO: 125925 - RNA, 21 nt, Human
agagccugagaucuuccagca

SEQ ID NO: 125926 - RNA, 22 nt, Human
auuuuccagccuuucuagaacu

SEQ ID NO: 125927 - RNA, 22 nt, Human
ggacagaggguugacagaguau

SEQ ID NO: 125928 - RNA, 22 nt, Human
agaugcagaaaaacuaagugau

SEQ ID NO: 125929 - RNA, 22 nt, Human
ucaaaggcuugugguucuggga

SEQ ID NO: 125930 - RNA, 22 nt, Human
gaaggcuggcuuucugagagca

SEQ ID NO: 125931 - RNA, 22 nt, Human
gggcugagauuggugcccuguc

SEQ ID NO: 125932 - RNA, 22 nt, Human
cucucuguuaugcuuucaugaa

SEQ ID NO: 125933 - RNA, 22 nt, Human
gaggcucagagaagucauggua

SEQ ID NO: 125934 - RNA, 22 nt, Human
accaggcugugaagugagacua

SEQ ID NO: 125935 - RNA, 22 nt, Human
gaggaagccccauugaagccag

SEQ ID NO: 125936 - RNA, 22 nt, Human
uccucccugaguggggacagcu

SEQ ID NO: 125937 - RNA, 22 nt, Human
auuuccaaaaccacuuauugcc

SEQ ID NO: 125938 - RNA, 22 nt, Human
aggacagagggaccagagccca

SEQ ID NO: 125939 - RNA, 22 nt, Human
uaaaggcucguauuguugugug

SEQ ID NO: 125940 - RNA, 22 nt, Human
gcucuugucaaaaauuaguuga

SEQ ID NO: 125941 - RNA, 22 nt, Human
ugaggcagcauucuucaagaca

SEQ ID NO: 125942 - RNA, 22 nt, Human
ggcugagccuggagcaucuggu

SEQ ID NO: 125943 - RNA, 22 nt, Human
cagaggguugaugugaggcuua

SEQ ID NO: 125944 - RNA, 18 nt, Human
cgaggcaggcggaucacg

SEQ ID NO: 125945 - RNA, 22 nt, Human
uggcagaguggaccauacucaa

SEQ ID NO: 125946 - RNA, 22 nt, Human
aggagugaguguccucagcaga

SEQ ID NO: 125947 - RNA, 22 nt, Human
ucauccagccucaucaggagcu

SEQ ID NO: 125948 - RNA, 22 nt, Human
aggaagugaaagggaaggaguu

SEQ ID NO: 125949 - RNA, 22 nt, Human
agcagggcagugcuucagcucu

SEQ ID NO: 125950 - RNA, 22 nt, Human
aaagggaggggcgauaagccgg

SEQ ID NO: 125951 - RNA, 18 nt, Human
cccagcuggugggucagu

SEQ ID NO: 125952 - RNA, 22 nt, Human
caaagccaggcuuucuaaugua

SEQ ID NO: 125953 - RNA, 22 nt, Human
cagugagggaagaucucagcac

SEQ ID NO: 125954 - RNA, 22 nt, Human
ggcagccauggacacuggcuag

SEQ ID NO: 125955 - RNA, 22 nt, Human
gggcugagacgauggggucuuc

SEQ ID NO: 125956 - RNA, 22 nt, Human
cacagcuggugacagagcccag

SEQ ID NO: 125957 - RNA, 21 nt, Human
aggcucagagagaaacucuug

SEQ ID NO: 125958 - RNA, 22 nt, Human
uuuauuaugauggacaccuucg

SEQ ID NO: 125959 - RNA, 22 nt, Human
gagagcuggccagcuucaguau

SEQ ID NO: 125960 - RNA, 22 nt, Human
gaggcucaacccacagggguug

SEQ ID NO: 125961 - RNA, 22 nt, Human
cagagcuguugcggggcuuggc

SEQ ID NO: 125962 - RNA, 22 nt, Human
uuaacauuucuuuuccacucau

SEQ ID NO: 125963 - RNA, 22 nt, Human
gaaggcugagcagacaggccaa

SEQ ID NO: 125964 - RNA, 22 nt, Human
uagggcugccuauggcuagaua

SEQ ID NO: 125965 - RNA, 22 nt, Human
agcagggcugcagugugucuuu

SEQ ID NO: 125966 - RNA, 22 nt, Human
caucaucaaaacaaauggaguc

SEQ ID NO: 125967 - RNA, 22 nt, Human
uuggauccaucucaggcauagg

SEQ ID NO: 125968 - RNA, 22 nt, Human
ucugggagagcacguggcugac

SEQ ID NO: 125969 - RNA, 22 nt, Human
uggcugaguguuccaaggagca

SEQ ID NO: 125970 - RNA, 22 nt, Human
gccugagaguugaaguucagug

SEQ ID NO: 125971 - RNA, 22 nt, Human
uaguggaggccuguugugugca

SEQ ID NO: 125972 - RNA, 22 nt, Human
gguggcagaauaauugaagguc

SEQ ID NO: 125973 - RNA, 22 nt, Human
ugaaggagggaagaaggcucug

SEQ ID NO: 125974 - RNA, 22 nt, Human
aaugucugaaaaucagacugca

SEQ ID NO: 125975 - RNA, 22 nt, Human
uccugccuaccuugcggaggug

SEQ ID NO: 125976 - RNA, 22 nt, Human
agccaggccuuagggagaggca

SEQ ID NO: 125977 - RNA, 22 nt, Human
aguggagaauaugcagaaagcc

SEQ ID NO: 125978 - RNA, 22 nt, Human
cccagccucugggcucacccaa

SEQ ID NO: 125979 - RNA, 22 nt, Human
ugucagcagcugguuugcuguu

SEQ ID NO: 125980 - RNA, 22 nt, Human
aggguagggcccggagacagac

SEQ ID NO: 125981 - RNA, 22 nt, Human
agcagugagugggaggaccaug

SEQ ID NO: 125982 - RNA, 22 nt, Human
agcuggcagagcauuuguggcc

SEQ ID NO: 125983 - RNA, 22 nt, Human
uauaauccugcuucacauugaa

SEQ ID NO: 125984 - RNA, 22 nt, Human
cuugucagccaauuguggauuu

SEQ ID NO: 125985 - RNA, 22 nt, Human
gggaggaaagagaaguggucca

SEQ ID NO: 125986 - RNA, 22 nt, Human
ggacaggaugcugaagaugaag

SEQ ID NO: 125987 - RNA, 22 nt, Human
gaggcucaguuauuuuagccug

SEQ ID NO: 125988 - RNA, 22 nt, Human
uuccucaguuagugccugaggc

SEQ ID NO: 125989 - RNA, 22 nt, Human
acacugugcagauucccuguga

SEQ ID NO: 125990 - RNA, 22 nt, Human
cuguggaguggggaguacuggu

SEQ ID NO: 125991 - RNA, 22 nt, Human
gccaggcuccccggaucccugg

SEQ ID NO: 125992 - RNA, 22 nt, Human
aagccaguguuuuugagaguug

SEQ ID NO: 125993 - RNA, 22 nt, Human
gggauggggagcuggaaagggg

SEQ ID NO: 125994 - RNA, 16 nt, Human
aggcucagaggcugga

SEQ ID NO: 125995 - RNA, 22 nt, Human
ggagaaggaauauuggaguagg

SEQ ID NO: 125996 - RNA, 18 nt, Human
ugaauuaguuugugguuu

SEQ ID NO: 125997 - RNA, 22 nt, Human
ggaaagccaggugcucuggugu

SEQ ID NO: 125998 - RNA, 22 nt, Human
ugcagugggccggaggccaggg

SEQ ID NO: 125999 - RNA, 22 nt, Human
acagccugcugccugcuucuug

SEQ ID NO: 126000 - RNA, 22 nt, Human
ucccggcgcugggagguggguc

SEQ ID NO: 126001 - RNA, 22 nt, Human
gggcaagcacagcgagcgugcg

SEQ ID NO: 126002 - RNA, 22 nt, Human
agagcugcaauuucauguggug

SEQ ID NO: 126003 - RNA, 22 nt, Human
agcagugaugcaugacagccua

SEQ ID NO: 126004 - RNA, 22 nt, Human
ugucacaguuuguacuuuauag

SEQ ID NO: 126005 - RNA, 22 nt, Human
agaagccaauccuugucucucu

SEQ ID NO: 126006 - RNA, 22 nt, Human
gagcagagacaguacaacuggc

SEQ ID NO: 126007 - RNA, 22 nt, Human
agaagccaugguaugcaacuac

SEQ ID NO: 126008 - RNA, 22 nt, Human
gcucccagcaauugaggcagcc

SEQ ID NO: 126009 - RNA, 22 nt, Human
caggaggcuuugggauccaagu

SEQ ID NO: 126010 - RNA, 22 nt, Human
gggcugagcacauacugacagc

SEQ ID NO: 126011 - RNA, 22 nt, Human
ggcugugggaugcauaggagcu

SEQ ID NO: 126012 - RNA, 20 nt, Human
ggcagagggccugggagaag

SEQ ID NO: 126013 - RNA, 21 nt, Human
gagagggcauuauaggaagug

SEQ ID NO: 126014 - RNA, 22 nt, Human
aggcaggagugacccugacagg

SEQ ID NO: 126015 - RNA, 21 nt, Human
uggcaggcagcuggaagcuug

SEQ ID NO: 126016 - RNA, 22 nt, Human
ucagagguaguagcagaguuga

SEQ ID NO: 126017 - RNA, 23 nt, Human
uggcagagacccagaaucuacau

SEQ ID NO: 126018 - RNA, 22 nt, Human
uggcagagaacacacaugauuc

SEQ ID NO: 126019 - RNA, 22 nt, Human
gcagaggaucaggcucuggaaa

SEQ ID NO: 126020 - RNA, 22 nt, Human
cuuguagaauugaaauggucuc

SEQ ID NO: 126021 - RNA, 22 nt, Human
aggugcuuggcucgugcacaca

SEQ ID NO: 126022 - RNA, 22 nt, Human
agggucagugaugagggagccc

SEQ ID NO: 126023 - RNA, 22 nt, Human
gcagccucaaacuccccagcuc

SEQ ID NO: 126024 - RNA, 22 nt, Human
acaggcagagaacucagccaga

SEQ ID NO: 126025 - RNA, 22 nt, Human
cagaggguugucaggcgccuug

SEQ ID NO: 126026 - RNA, 22 nt, Human
acugcccuguaacugccaggua

SEQ ID NO: 126027 - RNA, 22 nt, Human
aaucaggaugacugucauuuca

SEQ ID NO: 126028 - RNA, 22 nt, Human
aggaaggagggcagauauuaag

SEQ ID NO: 126029 - RNA, 22 nt, Human
auuccauuguguaaggauaucg

SEQ ID NO: 126030 - RNA, 22 nt, Human
gggcugacaaccaucugacaag

SEQ ID NO: 126031 - RNA, 22 nt, Human
ugagcauggugggugcagagca

SEQ ID NO: 126032 - RNA, 19 nt, Human
ggccaccucucuucccagg

SEQ ID NO: 126033 - RNA, 22 nt, Human
uccagcuugacaaaugauuuua

SEQ ID NO: 126034 - RNA, 22 nt, Human
ugcagggcuuccucuuggaguu

SEQ ID NO: 126035 - RNA, 22 nt, Human
gaggcugguucugaaguacugu

SEQ ID NO: 126036 - RNA, 22 nt, Human
cugggcagguauacaaaaaaug

SEQ ID NO: 126037 - RNA, 22 nt, Human
accaggcuugaugauuugcuua

SEQ ID NO: 126038 - RNA, 22 nt, Human
ugccaggcgugguggugcgcac

SEQ ID NO: 126039 - RNA, 22 nt, Human
uggggcagggaugggaaacuau

SEQ ID NO: 126040 - RNA, 21 nt, Human
uuucacaaaaguaugugacaa

SEQ ID NO: 126041 - RNA, 22 nt, Human
gcaggcagguggcaucuuguga

SEQ ID NO: 126042 - RNA, 22 nt, Human
caggaagagguaucaccgagca

SEQ ID NO: 126043 - RNA, 22 nt, Human
ugagaagcugcugacuuagccu

SEQ ID NO: 126044 - RNA, 22 nt, Human
cagcagcaacaacggaagccuu

SEQ ID NO: 126045 - RNA, 22 nt, Human
aaugucugcucuacucaggagg

SEQ ID NO: 126046 - RNA, 18 nt, Human
agcagggcauuuugccau

SEQ ID NO: 126047 - RNA, 22 nt, Human
ggcagagacuggguuggcagag

SEQ ID NO: 126048 - RNA, 17 nt, Human
aggaagggcaaguuucu

SEQ ID NO: 126049 - RNA, 22 nt, Human
aggcucagugauguaaaauaua

SEQ ID NO: 126050 - RNA, 22 nt, Human
uguccuuuuggcugucuauggu

SEQ ID NO: 126051 - RNA, 22 nt, Human
agaagagccuggggaccauggc

SEQ ID NO: 126052 - RNA, 22 nt, Human
aaagccagagcaagcugucaca

SEQ ID NO: 126053 - RNA, 22 nt, Human
aggagugagcuuuggggucaga

SEQ ID NO: 126054 - RNA, 22 nt, Human
cuggaguguaaagagcauagaa

SEQ ID NO: 126055 - RNA, 22 nt, Human
uggagaaggggcagggucucca

SEQ ID NO: 126056 - RNA, 22 nt, Human
ucagggcaagucucagaagguu

SEQ ID NO: 126057 - RNA, 22 nt, Human
gaggcagaaguugcagugagca

SEQ ID NO: 126058 - RNA, 22 nt, Human
gggagaagaaugugucaauugu

SEQ ID NO: 126059 - RNA, 22 nt, Human
uauuugcaacauaaaacucuga

SEQ ID NO: 126060 - RNA, 22 nt, Human
agggaggaccaaugugugguua

SEQ ID NO: 126061 - RNA, 22 nt, Human
uuguggcagaccaugagucuaa

SEQ ID NO: 126062 - RNA, 22 nt, Human
ugcccaggguggagugcagcgg

SEQ ID NO: 126063 - RNA, 22 nt, Human
caccagguggaaaugucacagc

SEQ ID NO: 126064 - RNA, 22 nt, Human
aguggagaagaggauggucucc

SEQ ID NO: 126065 - RNA, 22 nt, Human
gccuggagcccaguguggggcu

SEQ ID NO: 126066 - RNA, 22 nt, Human
ccugucucuguuaccacauuug

SEQ ID NO: 126067 - RNA, 22 nt, Human
aaggcagaaauucaacuacugg

SEQ ID NO: 126068 - RNA, 22 nt, Human
gagugcaggccugagcaccauc

SEQ ID NO: 126069 - RNA, 22 nt, Human
gcagggcacacaagaaugauaa

SEQ ID NO: 126070 - RNA, 22 nt, Human
agggucagcuggcugucagggg

SEQ ID NO: 126071 - RNA, 22 nt, Human
gcagagugagauaugaacccag

SEQ ID NO: 126072 - RNA, 22 nt, Human
cuggagguaauguuauuuuugu

SEQ ID NO: 126073 - RNA, 18 nt, Human
agggucagugucacuggc

SEQ ID NO: 126074 - RNA, 22 nt, Human
aagggcugcuguagaagcagag

SEQ ID NO: 126075 - RNA, 22 nt, Human
gcagagcagcaaauggaaagga

SEQ ID NO: 126076 - RNA, 22 nt, Human
cagcuguguaugagagcaugcu

SEQ ID NO: 126077 - RNA, 23 nt, Human
gaggccacauuccccugcuugag

SEQ ID NO: 126078 - RNA, 22 nt, Human
uggcacagacagaucaggaguc

SEQ ID NO: 126079 - RNA, 22 nt, Human
uggcugagagcaauugacucug

SEQ ID NO: 126080 - RNA, 22 nt, Human
uagggcaggggaggaaucugaa

SEQ ID NO: 126081 - RNA, 22 nt, Human
ccauggagcgggugagugagug

SEQ ID NO: 126082 - RNA, 22 nt, Human
cagugagggcauucagugcugg

SEQ ID NO: 126083 - RNA, 22 nt, Human
ugaguccaauaggggccuggaa

SEQ ID NO: 126084 - RNA, 22 nt, Human
aggcccagcccguccucgugcu

SEQ ID NO: 126085 - RNA, 22 nt, Human
auacuaaaguauagaacuuagu

SEQ ID NO: 126086 - RNA, 22 nt, Human
gcagagugccgagauggaagcg

SEQ ID NO: 126087 - RNA, 22 nt, Human
aggcagagagcaguggccgucu

SEQ ID NO: 126088 - RNA, 22 nt, Human
ccaggugcucuugccagggcug

SEQ ID NO: 126089 - RNA, 22 nt, Human
uccuggccucacaguccugggu

SEQ ID NO: 126090 - RNA, 22 nt, Human
cagaggaagagauacaagcccu

SEQ ID NO: 126091 - RNA, 19 nt, Human
ggccaggcugacugugguc

SEQ ID NO: 126092 - RNA, 22 nt, Human
guggugaagccccaucucugcu

SEQ ID NO: 126093 - RNA, 22 nt, Human
cuccagggagcuguggagguuu

SEQ ID NO: 126094 - RNA, 22 nt, Human
aguggcagaucucuggucugga

SEQ ID NO: 126095 - RNA, 23 nt, Human
ugagaagccauuagagcaggugg

SEQ ID NO: 126096 - RNA, 22 nt, Human
gaggcucacugggcaaagacuc

SEQ ID NO: 126097 - RNA, 22 nt, Human
uacuguuuucuauaauggcugu

SEQ ID NO: 126098 - RNA, 22 nt, Human
uggcugagaaugggaugaugcc

SEQ ID NO: 126099 - RNA, 22 nt, Human
cccuuccuccucgccugucaga

SEQ ID NO: 126100 - RNA, 22 nt, Human
aaggaagauauaucaagcuuaa

SEQ ID NO: 126101 - RNA, 22 nt, Human
gagucugagucuaauggcccca

SEQ ID NO: 126102 - RNA, 22 nt, Human
ugggcaggauaauaucucaugu

SEQ ID NO: 126103 - RNA, 22 nt, Human
uggcagaggcucugugauguug

SEQ ID NO: 126104 - RNA, 22 nt, Human
cugaggcugaagagggccuacg

SEQ ID NO: 126105 - RNA, 22 nt, Human
gcaggugaaugauggacuagga

SEQ ID NO: 126106 - RNA, 22 nt, Human
uccugaaaauaauuucacaaga

SEQ ID NO: 126107 - RNA, 18 nt, Human
gcugcugguggagggagc

SEQ ID NO: 126108 - RNA, 22 nt, Human
gggcugagucugcugccuguca

SEQ ID NO: 126109 - RNA, 22 nt, Human
cagggcagaaggcacucuacuc

SEQ ID NO: 126110 - RNA, 19 nt, Human
gaaaggcugcugcuaccug

SEQ ID NO: 126111 - RNA, 22 nt, Human
agagcagcuggggcagagacca

SEQ ID NO: 126112 - RNA, 21 nt, Human
ccaaaggcuauguaucuucug

SEQ ID NO: 126113 - RNA, 22 nt, Human
caguggauuagccagagcugga

SEQ ID NO: 126114 - RNA, 22 nt, Human
agaucacaguggcaacucccuu

SEQ ID NO: 126115 - RNA, 22 nt, Human
gcugaggccucagaaggcugag

SEQ ID NO: 126116 - RNA, 22 nt, Human
ucaccagggagcuuguccucug

SEQ ID NO: 126117 - RNA, 22 nt, Human
ugccaggcuccggaacgacagu

SEQ ID NO: 126118 - RNA, 19 nt, Human
ugcaagugucuuggacaag

SEQ ID NO: 126119 - RNA, 22 nt, Human
ugcagggcaucuuugaagugug

SEQ ID NO: 126120 - RNA, 22 nt, Human
cagggcaggaugcugugauuau

SEQ ID NO: 126121 - RNA, 22 nt, Human
agaagccaaaugccagugaccu

SEQ ID NO: 126122 - RNA, 22 nt, Human
agcuguggcagcagccguggca

SEQ ID NO: 126123 - RNA, 22 nt, Human
ggccaggcacugugugagauau

SEQ ID NO: 126124 - RNA, 22 nt, Human
aggugucuuugcggcccgccgc

SEQ ID NO: 126125 - RNA, 22 nt, Human
cuguugucuccucucagauuau

SEQ ID NO: 126126 - RNA, 22 nt, Human
gagggcagagucuaaugaugca

SEQ ID NO: 126127 - RNA, 22 nt, Human
ggcagugaaucugagagccugg

SEQ ID NO: 126128 - RNA, 22 nt, Human
augcuguguuuuaaauggaaau

SEQ ID NO: 126129 - RNA, 22 nt, Human
gaagucuggcugacgagaguua

SEQ ID NO: 126130 - RNA, 22 nt, Human
accaaaggcagagcugaacacu

SEQ ID NO: 126131 - RNA, 22 nt, Human
agggcgaggagacggaggcaca

SEQ ID NO: 126132 - RNA, 22 nt, Human
ggcagugaaugaaacagaggcu

SEQ ID NO: 126133 - RNA, 19 nt, Human
aggagaagacucucucccc

SEQ ID NO: 126134 - RNA, 22 nt, Human
ggagccugacagugcccagcau

SEQ ID NO: 126135 - RNA, 22 nt, Human
cagggcugaacugagcuuguga

SEQ ID NO: 126136 - RNA, 22 nt, Human
cuucuuaaugcauaaacugugu

SEQ ID NO: 126137 - RNA, 22 nt, Human
ucaaaggcgguccaggaauaaa

SEQ ID NO: 126138 - RNA, 22 nt, Human
auuuccuauagauauggugagu

SEQ ID NO: 126139 - RNA, 22 nt, Human
gcugagagugggugcagugcuu

SEQ ID NO: 126140 - RNA, 22 nt, Human
uuucacacuagucagaauacca

SEQ ID NO: 126141 - RNA, 21 nt, Human
uccuguaagcuuggguggcuc

SEQ ID NO: 126142 - RNA, 22 nt, Human
ggcucacgcaauuaucccggcc

SEQ ID NO: 126143 - RNA, 22 nt, Human
aaguccaguuuuuccagguggu

SEQ ID NO: 126144 - RNA, 22 nt, Human
uggcagagagacucuccuugau

SEQ ID NO: 126145 - RNA, 22 nt, Human
caaaugcaggucauaaccugag

SEQ ID NO: 126146 - RNA, 22 nt, Human
aaggaagggaaauagugauguc

SEQ ID NO: 126147 - RNA, 22 nt, Human
ugaggcaggaggauugcaggau

SEQ ID NO: 126148 - RNA, 22 nt, Human
uggcagaggagaauuaagauua

SEQ ID NO: 126149 - RNA, 22 nt, Human
agaggcagccguauuucaaagg

SEQ ID NO: 126150 - RNA, 22 nt, Human
agggaaggagguuagaacccac

SEQ ID NO: 126151 - RNA, 22 nt, Human
aggcagccugguuugaauggaa

SEQ ID NO: 126152 - RNA, 22 nt, Human
uguucccaagauaagauuauga

SEQ ID NO: 126153 - RNA, 22 nt, Human
agagccugggcagcuccucugg

SEQ ID NO: 126154 - RNA, 22 nt, Human
ccagaagaccccguccaccucc

SEQ ID NO: 126155 - RNA, 22 nt, Human
caaaggcuuugcuaugaugcau

SEQ ID NO: 126156 - RNA, 22 nt, Human
agcagggcuugccgcuuguccu

SEQ ID NO: 126157 - RNA, 23 nt, Human
aggaaagcauucauuuuuaccau

SEQ ID NO: 126158 - RNA, 22 nt, Human
caggaagauuagaccaagagcu

SEQ ID NO: 126159 - RNA, 22 nt, Human
gaggccugucgcuaggccucug

SEQ ID NO: 126160 - RNA, 23 nt, Human
guuuucaacacaauaaauguaac

SEQ ID NO: 126161 - RNA, 22 nt, Human
cugcuguggguuaagacacugu

SEQ ID NO: 126162 - RNA, 22 nt, Human
aguggcaguuugggagcuacag

SEQ ID NO: 126163 - RNA, 22 nt, Human
cuggagccggcgagccccagcc

SEQ ID NO: 126164 - RNA, 18 nt, Human
uauauuucacacauauuc

SEQ ID NO: 126165 - RNA, 22 nt, Human
aggcaggagcaagcccuacaag

SEQ ID NO: 126166 - RNA, 18 nt, Human
ggcuguggacaagauuag

SEQ ID NO: 126167 - RNA, 22 nt, Human
ggcugaaguguaguggcucacu

SEQ ID NO: 126168 - RNA, 22 nt, Human
cugaggcuggggaagggaagug

SEQ ID NO: 126169 - RNA, 22 nt, Human
cagggacaauggcagagccuga

SEQ ID NO: 126170 - RNA, 22 nt, Human
acacaucagaaauaugaaugag

SEQ ID NO: 126171 - RNA, 23 nt, Human
cacuccuguuucuaagccagcau

SEQ ID NO: 126172 - RNA, 22 nt, Human
ccagagaggccaaggucguggu

SEQ ID NO: 126173 - RNA, 22 nt, Human
uuccuaaaagaauacacuggau

SEQ ID NO: 126174 - RNA, 22 nt, Human
ucaccaggcuggaaugcagugg

SEQ ID NO: 126175 - RNA, 23 nt, Human
ugaagugaaauuucacaagggac

SEQ ID NO: 126176 - RNA, 22 nt, Human
aagagcuggucacagguccauu

SEQ ID NO: 126177 - RNA, 22 nt, Human
uuucacaacguuguggugagag

SEQ ID NO: 126178 - RNA, 22 nt, Human
aggugucugggcuuuggaguca

SEQ ID NO: 126179 - RNA, 22 nt, Human
ggccaccucugcccuacugagu

SEQ ID NO: 126180 - RNA, 22 nt, Human
aggggcaggugcugcacuuaga

SEQ ID NO: 126181 - RNA, 22 nt, Human
gccagagguaucaaagauagua

SEQ ID NO: 126182 - RNA, 17 nt, Human
uagagcugguucaggag

SEQ ID NO: 126183 - RNA, 22 nt, Human
acaguggagaagcaaaugcagu

SEQ ID NO: 126184 - RNA, 22 nt, Human
aaaaugaauaaguuaacccagg

SEQ ID NO: 126185 - RNA, 22 nt, Human
accaugggucagccaccucagc

SEQ ID NO: 126186 - RNA, 22 nt, Human
cugaguccagggacagaggcgu

SEQ ID NO: 126187 - RNA, 22 nt, Human
gaaaccagcuagaggcagaggg

SEQ ID NO: 126188 - RNA, 22 nt, Human
ccagagggccuuuggaguuauc

SEQ ID NO: 126189 - RNA, 20 nt, Human
ucaaaggcaaaggugggugu

SEQ ID NO: 126190 - RNA, 22 nt, Human
cagcugugggccugacguggca

SEQ ID NO: 126191 - RNA, 22 nt, Human
gggcaguggguggcugcagccu

SEQ ID NO: 126192 - RNA, 22 nt, Human
agggccagcuagagcccucgcc

SEQ ID NO: 126193 - RNA, 22 nt, Human
aggcaggucacaugcuuggcga

SEQ ID NO: 126194 - RNA, 22 nt, Human
ccaggugucaugcgugugaccc

SEQ ID NO: 126195 - RNA, 22 nt, Human
ucagggcauucaagaggccugg

SEQ ID NO: 126196 - RNA, 22 nt, Human
ugcugugggcaguacauaagcu

SEQ ID NO: 126197 - RNA, 21 nt, Human
agaguaauuccugcuggaaag

SEQ ID NO: 126198 - RNA, 22 nt, Human
cggcugagcagugcugauggaa

SEQ ID NO: 126199 - RNA, 22 nt, Human
ggcaggguccacaccugggaaa

SEQ ID NO: 126200 - RNA, 22 nt, Human
agggccagggaaacgaucagca

SEQ ID NO: 126201 - RNA, 22 nt, Human
cagaagcauuccagcaaauagu

SEQ ID NO: 126202 - RNA, 22 nt, Human
caguggaggccuugggaccuuu

SEQ ID NO: 126203 - RNA, 16 nt, Human
agccaggcugccucgg

SEQ ID NO: 126204 - RNA, 22 nt, Human
ccaggcuuucccagccucucca

SEQ ID NO: 126205 - RNA, 22 nt, Human
uccugccugcaaucccagcacu

SEQ ID NO: 126206 - RNA, 22 nt, Human
gcagacaauuuauuagcagauu

SEQ ID NO: 126207 - RNA, 20 nt, Human
gaaauucucguauuaguuua

SEQ ID NO: 126208 - RNA, 22 nt, Human
ugccagagaagacccagucacu

SEQ ID NO: 126209 - RNA, 22 nt, Human
uggcugagguuaugcugguugu

SEQ ID NO: 126210 - RNA, 22 nt, Human
uggcugcagacaccuauggcag

SEQ ID NO: 126211 - RNA, 19 nt, Human
ugggaguggggaagguccu

SEQ ID NO: 126212 - RNA, 22 nt, Human
ggcagggcagcgcugauuaggg

SEQ ID NO: 126213 - RNA, 22 nt, Human
cuguggcauugugaggacugca

SEQ ID NO: 126214 - RNA, 22 nt, Human
ugccaggcaacugcccagccau

SEQ ID NO: 126215 - RNA, 22 nt, Human
gccuguuggguaacagaguuca

SEQ ID NO: 126216 - RNA, 22 nt, Human
gagaagcaaucgugacaucucc

SEQ ID NO: 126217 - RNA, 22 nt, Human
cagagcugcucaugguggccag

SEQ ID NO: 126218 - RNA, 22 nt, Human
ggaagccacccagcuuugauag

SEQ ID NO: 126219 - RNA, 22 nt, Human
gcagccacagaggagggaugca

SEQ ID NO: 126220 - RNA, 22 nt, Human
ugacauuuaucaaagaaauggu

SEQ ID NO: 126221 - RNA, 22 nt, Human
gcucccagguucuugggccuug

SEQ ID NO: 126222 - RNA, 22 nt, Human
gauggcagcagcagccagggau

SEQ ID NO: 126223 - RNA, 23 nt, Human
agggcugaaugcagagaagcaga

SEQ ID NO: 126224 - RNA, 22 nt, Human
gcaccuggacagugacccuagc

SEQ ID NO: 126225 - RNA, 21 nt, Human
agaagccaugugguggagaac

SEQ ID NO: 126226 - RNA, 22 nt, Human
uuguugucauuguagaggauuu

SEQ ID NO: 126227 - RNA, 22 nt, Human
gaaguggaauuacugggucaua

SEQ ID NO: 126228 - RNA, 22 nt, Human
ugaggcucagaagugccaagug

SEQ ID NO: 126229 - RNA, 22 nt, Human
gccaggcauuauuccgaucccu

SEQ ID NO: 126230 - RNA, 22 nt, Human
uaggcugggaagaaagauucuc

SEQ ID NO: 126231 - RNA, 22 nt, Human
augaggcaguacacacaaagcc

SEQ ID NO: 126232 - RNA, 22 nt, Human
gugggcugcccuugaggucagc

SEQ ID NO: 126233 - RNA, 23 nt, Human
cagaggguuccauggagcauggu

SEQ ID NO: 126234 - RNA, 22 nt, Human
ugaggcagauauuuauuggguu

SEQ ID NO: 126235 - RNA, 22 nt, Human
aaggcaggaugcggacccaucu

SEQ ID NO: 126236 - RNA, 22 nt, Human
gagagggcugccuggugugagg

SEQ ID NO: 126237 - RNA, 22 nt, Human
aaguccagugcuuuagauucca

SEQ ID NO: 126238 - RNA, 22 nt, Human
gagagugaggccugggaaucua

SEQ ID NO: 126239 - RNA, 19 nt, Human
aucugaaguaggugcagcu

SEQ ID NO: 126240 - RNA, 21 nt, Human
aagggagauaggaaucaggcc

SEQ ID NO: 126241 - RNA, 22 nt, Human
ucagccuuguggcccugcucca

SEQ ID NO: 126242 - RNA, 22 nt, Human
agggcuggcaagggauugaaau

SEQ ID NO: 126243 - RNA, 22 nt, Human
aggaagagcuggaccagaggac

SEQ ID NO: 126244 - RNA, 23 nt, Human
gcaguggaaugucucuguuugga

SEQ ID NO: 126245 - RNA, 22 nt, Human
aagggcaggugggcauuucugg

SEQ ID NO: 126246 - RNA, 22 nt, Human
ucccaggugaugcugaggccac

SEQ ID NO: 126247 - RNA, 22 nt, Human
agccaggcagacucucuuucuu

SEQ ID NO: 126248 - RNA, 21 nt, Human
accaggcuugugggagggagc

SEQ ID NO: 126249 - RNA, 21 nt, Human
aaagagcccgcugagagguuc

SEQ ID NO: 126250 - RNA, 22 nt, Human
cagugcagaggccagggaggau

SEQ ID NO: 126251 - RNA, 22 nt, Human
aggugucugugaugggagcgau

SEQ ID NO: 126252 - RNA, 22 nt, Human
uagagcuggccgggacagcugg

SEQ ID NO: 126253 - RNA, 22 nt, Human
ugagcagggacuuugaguguag

SEQ ID NO: 126254 - RNA, 22 nt, Human
ccagggaggguccuguggcuuc

SEQ ID NO: 126255 - RNA, 22 nt, Human
gggaagcagcauugugcuggcu

SEQ ID NO: 126256 - RNA, 22 nt, Human
cugaagaggacgcagcagcaag

SEQ ID NO: 126257 - RNA, 22 nt, Human
gaagagcuaaaggcacaggcuu

SEQ ID NO: 126258 - RNA, 22 nt, Human
cccuucucuuucacucacuauu

SEQ ID NO: 126259 - RNA, 22 nt, Human
gccuggagagcacugugcgcuu

SEQ ID NO: 126260 - RNA, 22 nt, Human
ggggcagcucccgagggcagga

SEQ ID NO: 126261 - RNA, 22 nt, Human
gcagggcacagacagugccaag

SEQ ID NO: 126262 - RNA, 22 nt, Human
gccagaagggguggauccaggc

SEQ ID NO: 126263 - RNA, 22 nt, Human
gaauucugucgcuuacuagaug

SEQ ID NO: 126264 - RNA, 22 nt, Human
aguggcaggcggagauguagga

SEQ ID NO: 126265 - RNA, 22 nt, Human
aguggcagagccaagauaugau

SEQ ID NO: 126266 - RNA, 22 nt, Human
cugagggccuuggcuccugccc

SEQ ID NO: 126267 - RNA, 22 nt, Human
caagcuggcugggagaggcacg

SEQ ID NO: 126268 - RNA, 22 nt, Human
gggcugaguuccugccucacuc

SEQ ID NO: 126269 - RNA, 22 nt, Human
agcugggcagacugcagugguu

SEQ ID NO: 126270 - RNA, 23 nt, Human
ugggucagcugccuccaggacaa

SEQ ID NO: 126271 - RNA, 22 nt, Human
caguggcacccacgggcugggc

SEQ ID NO: 126272 - RNA, 22 nt, Human
ccagggcauguccaagacuuag

SEQ ID NO: 126273 - RNA, 22 nt, Human
gugugccaccagucaaggugaa

SEQ ID NO: 126274 - RNA, 22 nt, Human
aggcucagugcaaaucauucug

SEQ ID NO: 126275 - RNA, 22 nt, Human
gggcugaggcuaccacuggucu

SEQ ID NO: 126276 - RNA, 22 nt, Human
ugcagagaaaccaguggaggac

SEQ ID NO: 126277 - RNA, 22 nt, Human
cagugguauuugagagaaugga

SEQ ID NO: 126278 - RNA, 19 nt, Human
acagggcagcaauaggaua

SEQ ID NO: 126279 - RNA, 22 nt, Human
ggccaggcuggucucagacuuc

SEQ ID NO: 126280 - RNA, 22 nt, Human
cucugucccagacccaccucuc

SEQ ID NO: 126281 - RNA, 22 nt, Human
cugggcagcuguaucagggagu

SEQ ID NO: 126282 - RNA, 22 nt, Human
ggaggaagagguuguucucuca

SEQ ID NO: 126283 - RNA, 22 nt, Human
aaggcaggagcuguaucuuauu

SEQ ID NO: 126284 - RNA, 22 nt, Human
cugaggcacagugaacuucucc

SEQ ID NO: 126285 - RNA, 22 nt, Human
ucacacacauggauaguauuuu

SEQ ID NO: 126286 - RNA, 22 nt, Human
ggcugaguugagaggauuacuu

SEQ ID NO: 126287 - RNA, 22 nt, Human
gugagggcagcuuggucagugu

SEQ ID NO: 126288 - RNA, 18 nt, Human
acagggagggcgcugggg

SEQ ID NO: 126289 - RNA, 22 nt, Human
ugggcagggagcuggaaccaca

SEQ ID NO: 126290 - RNA, 22 nt, Human
ugcuaaauaaguggaauagaca

SEQ ID NO: 126291 - RNA, 22 nt, Human
gagaaggacuacacaucuggcc

SEQ ID NO: 126292 - RNA, 22 nt, Human
acagagcuuaggaugacuccca

SEQ ID NO: 126293 - RNA, 22 nt, Human
ugcugaaggcaggggagguggc

SEQ ID NO: 126294 - RNA, 22 nt, Human
acccaggaggcagagguugcag

SEQ ID NO: 126295 - RNA, 22 nt, Human
aucaggaagaagaauguguugg

SEQ ID NO: 126296 - RNA, 22 nt, Human
gggccagguggaccccagccuc

SEQ ID NO: 126297 - RNA, 22 nt, Human
gugaagagcuguugcagagauu

SEQ ID NO: 126298 - RNA, 22 nt, Human
acaguggagcucagaugaaaau

SEQ ID NO: 126299 - RNA, 22 nt, Human
gggaaggacauucugggcucag

SEQ ID NO: 126300 - RNA, 22 nt, Human
caguggaagcuggcugugaaga

SEQ ID NO: 126301 - RNA, 20 nt, Human
uaggcagagcugugcagccu

SEQ ID NO: 126302 - RNA, 22 nt, Human
gucagaggggacaagacacaga

SEQ ID NO: 126303 - RNA, 22 nt, Human
cauaucauaggucuuggauaau

SEQ ID NO: 126304 - RNA, 22 nt, Human
gcaggaagaugagcucagguaa

SEQ ID NO: 126305 - RNA, 22 nt, Human
gugugcagggaugagugcaggu

SEQ ID NO: 126306 - RNA, 22 nt, Human
aacauugcagcuuaauugcagg

SEQ ID NO: 126307 - RNA, 22 nt, Human
gccaccagggggcuccagugag

SEQ ID NO: 126308 - RNA, 22 nt, Human
gccagggcugugcagguuuguu

SEQ ID NO: 126309 - RNA, 19 nt, Human
gaucagagugucagcuugu

SEQ ID NO: 126310 - RNA, 22 nt, Human
gcuucgggguccaagcgcgugu

SEQ ID NO: 126311 - RNA, 23 nt, Human
ccucagggucuagcagagagaag

SEQ ID NO: 126312 - RNA, 22 nt, Human
gaaauucugugucccagagugc

SEQ ID NO: 126313 - RNA, 22 nt, Human
gagggcugcaaugagacagaga

SEQ ID NO: 126314 - RNA, 22 nt, Human
gucaggcugccagucuuuauug

SEQ ID NO: 126315 - RNA, 22 nt, Human
agcucugcaggcacagcugagg

SEQ ID NO: 126316 - RNA, 22 nt, Human
gcagaggacacaggagggcaag

SEQ ID NO: 126317 - RNA, 22 nt, Human
gcagaggcucuuuaaugcuuag

SEQ ID NO: 126318 - RNA, 22 nt, Human
ugccaggcauauggccucuuug

SEQ ID NO: 126319 - RNA, 22 nt, Human
cagucaccaccagguggcagua

SEQ ID NO: 126320 - RNA, 22 nt, Human
cuggagugaggucugggagccu

SEQ ID NO: 126321 - RNA, 22 nt, Human
gagccugccucuagucucuaga

SEQ ID NO: 126322 - RNA, 22 nt, Human
aagaugcacaauguggcaauua

SEQ ID NO: 126323 - RNA, 20 nt, Human
ccugucucacguuccgcccc

SEQ ID NO: 126324 - RNA, 22 nt, Human
uggagaaggacagccugagaaa

SEQ ID NO: 126325 - RNA, 22 nt, Human
ucuucagagugaaagucuguga

SEQ ID NO: 126326 - RNA, 22 nt, Human
aggucagcugcugauaggcagc

SEQ ID NO: 126327 - RNA, 22 nt, Human
ucauuuucaaguuugaacagga

SEQ ID NO: 126328 - RNA, 18 nt, Human
acacacacaccuguguau

SEQ ID NO: 126329 - RNA, 22 nt, Human
gccagaagacuggagucagcug

SEQ ID NO: 126330 - RNA, 22 nt, Human
agccagugggauuagagccucu

SEQ ID NO: 126331 - RNA, 22 nt, Human
ucuauacaugugcacacacauc

SEQ ID NO: 126332 - RNA, 22 nt, Human
ucagaggaaagggaacauaguc

SEQ ID NO: 126333 - RNA, 22 nt, Human
gaggcacaucacuuggugcauu

SEQ ID NO: 126334 - RNA, 22 nt, Human
agugccuugugugugggcagcc

SEQ ID NO: 126335 - RNA, 22 nt, Human
acaguggaguugggguagcccu

SEQ ID NO: 126336 - RNA, 22 nt, Human
aggcaagcauugggaacagggc

SEQ ID NO: 126337 - RNA, 22 nt, Human
ucggggucuuugacacgcucug

SEQ ID NO: 126338 - RNA, 16 nt, Human
gagggcagaggcggaa

SEQ ID NO: 126339 - RNA, 22 nt, Human
aguggcagagccaaguagagcc

SEQ ID NO: 126340 - RNA, 22 nt, Human
gggcuggaggugagcaggacag

SEQ ID NO: 126341 - RNA, 22 nt, Human
aggcucaggcaggaauggcgga

SEQ ID NO: 126342 - RNA, 22 nt, Human
ugggcugagcacugaggaagga

SEQ ID NO: 126343 - RNA, 22 nt, Human
cugcuguguuucacaccucugg

SEQ ID NO: 126344 - RNA, 22 nt, Human
ucgggguagacgccagcucgga

SEQ ID NO: 126345 - RNA, 22 nt, Human
ucugcucuccauacuuccgcac

SEQ ID NO: 126346 - RNA, 22 nt, Human
aggcugcguuagccucacuccc

SEQ ID NO: 126347 - RNA, 22 nt, Human
agaagugccgaaaggaagacag

SEQ ID NO: 126348 - RNA, 22 nt, Human
caccagggacaaugcuaggggu

SEQ ID NO: 126349 - RNA, 22 nt, Human
agggcugaaacauaauccuucu

SEQ ID NO: 126350 - RNA, 22 nt, Human
cagugcccuuccaggacugcag

SEQ ID NO: 126351 - RNA, 22 nt, Human
aguaggaggcgggagcaugaag

SEQ ID NO: 126352 - RNA, 20 nt, Human
gcagggcaagggauaugaaa

SEQ ID NO: 126353 - RNA, 22 nt, Human
caacauauaauauuugaguucu

SEQ ID NO: 126354 - RNA, 22 nt, Human
caggcccagcccagcccuucga

SEQ ID NO: 126355 - RNA, 22 nt, Human
ugggaguggggcauagaaggua

SEQ ID NO: 126356 - RNA, 21 nt, Human
ucagggcagcugcucuucaga

SEQ ID NO: 126357 - RNA, 22 nt, Human
agguggcucugacagcucuggu

SEQ ID NO: 126358 - RNA, 22 nt, Human
caggggcagucugugugcgugg

SEQ ID NO: 126359 - RNA, 22 nt, Human
gggggacuggaccguccugggu

SEQ ID NO: 126360 - RNA, 22 nt, Human
gccaggcuguuuuuauuacugu

SEQ ID NO: 126361 - RNA, 22 nt, Human
uccaggcugggcugaagggugc

SEQ ID NO: 126362 - RNA, 22 nt, Human
aagacauuuauuugaaucaauu

SEQ ID NO: 126363 - RNA, 22 nt, Human
caacaguguugcaaucugaaaa

SEQ ID NO: 126364 - RNA, 22 nt, Human
cacuguuuuauuccaacauagg

SEQ ID NO: 126365 - RNA, 22 nt, Human
gugaaggcuacaagagaucaag

SEQ ID NO: 126366 - RNA, 19 nt, Human
gcgaggaagucacuguggu

SEQ ID NO: 126367 - RNA, 18 nt, Human
ggcaugugagugcugagg

SEQ ID NO: 126368 - RNA, 22 nt, Human
caggugucuaauucucaccccc

SEQ ID NO: 126369 - RNA, 22 nt, Human
gugccagggaguggaggagcuu

SEQ ID NO: 126370 - RNA, 22 nt, Human
aggcaguguguagcuggaagag

SEQ ID NO: 126371 - RNA, 19 nt, Human
ucaggcaguuauucacaaa

SEQ ID NO: 126372 - RNA, 22 nt, Human
gggcugacucaaccuugcaaag

SEQ ID NO: 126373 - RNA, 22 nt, Human
ggccaggcugcccugggagcag

SEQ ID NO: 126374 - RNA, 22 nt, Human
acagcugugagggucacuugua

SEQ ID NO: 126375 - RNA, 22 nt, Human
gcagggcagcucacugugguuc

SEQ ID NO: 126376 - RNA, 22 nt, Human
uggcugagugaacauguccauu

SEQ ID NO: 126377 - RNA, 23 nt, Human
ugugaagguggguccaagggcug

SEQ ID NO: 126378 - RNA, 22 nt, Human
agccaggcgggucuuugcuccu

SEQ ID NO: 126379 - RNA, 22 nt, Human
agaggaggcuggguccagauaa

SEQ ID NO: 126380 - RNA, 22 nt, Human
acaggcuguugggguccagggu

SEQ ID NO: 126381 - RNA, 22 nt, Human
cagagcugcaaaugccccuccg

SEQ ID NO: 126382 - RNA, 22 nt, Human
cugagagaugauauagcuuaau

SEQ ID NO: 126383 - RNA, 22 nt, Human
caggcagaugcugacaagaguu

SEQ ID NO: 126384 - RNA, 22 nt, Human
ugcagggcauaggguccaguuu

SEQ ID NO: 126385 - RNA, 22 nt, Human
cucuguccuccaccugcuuuca

SEQ ID NO: 126386 - RNA, 22 nt, Human
cagagugaacagugggaugugc

SEQ ID NO: 126387 - RNA, 22 nt, Human
gcugaggcuccucgggaggaca

SEQ ID NO: 126388 - RNA, 22 nt, Human
aaggugucaccagauuggcagg

SEQ ID NO: 126389 - RNA, 22 nt, Human
gagcgggaggaacggcucgggc

SEQ ID NO: 126390 - RNA, 22 nt, Human
ucaaaggcaccaaggucacugc

SEQ ID NO: 126391 - RNA, 22 nt, Human
gggcugaggaacauauuuuguu

SEQ ID NO: 126392 - RNA, 22 nt, Human
agaauuagguaaguucaucuga

SEQ ID NO: 126393 - RNA, 22 nt, Human
gugggcagacagugcuuugcag

SEQ ID NO: 126394 - RNA, 22 nt, Human
cugcugugugcuuacuuggguu

SEQ ID NO: 126395 - RNA, 22 nt, Human
aggcucaguauagcuggcaagu

SEQ ID NO: 126396 - RNA, 22 nt, Human
acagggcagagggcaguuggua

SEQ ID NO: 126397 - RNA, 22 nt, Human
cucaggcuugggaggaggccca

SEQ ID NO: 126398 - RNA, 22 nt, Human
ggcagauguuauaugaucugag

SEQ ID NO: 126399 - RNA, 22 nt, Human
agcagagguuuguuggaaaccu

SEQ ID NO: 126400 - RNA, 17 nt, Human
uggcacagaggugcuau

SEQ ID NO: 126401 - RNA, 22 nt, Human
gagaagcagguuuagcagacaa

SEQ ID NO: 126402 - RNA, 22 nt, Human
ugccaggcuuuggucaaaggcu

SEQ ID NO: 126403 - RNA, 22 nt, Human
ugcucccaggcucuguggucug

SEQ ID NO: 126404 - RNA, 22 nt, Human
cuuauuuugcugaugacccagg

SEQ ID NO: 126405 - RNA, 22 nt, Human
agaagccacaggccucgucugg

SEQ ID NO: 126406 - RNA, 22 nt, Human
ugacauuuuaucaauaucacag

SEQ ID NO: 126407 - RNA, 22 nt, Human
ggggcagcuaccggaaguaggg

SEQ ID NO: 126408 - RNA, 22 nt, Human
ccaguggacuucucccuguggu

SEQ ID NO: 126409 - RNA, 22 nt, Human
ugguagggacacuaugcagaaa

SEQ ID NO: 126410 - RNA, 22 nt, Human
guucaagguuuuacagagugua

SEQ ID NO: 126411 - RNA, 22 nt, Human
ggcugagccaugggcacugcag

SEQ ID NO: 126412 - RNA, 22 nt, Human
uguggcagcuggagguggagaa

SEQ ID NO: 126413 - RNA, 22 nt, Human
aggcucagagaugaguaagcac

SEQ ID NO: 126414 - RNA, 22 nt, Human
gagaaggcugauccuuggaguu

SEQ ID NO: 126415 - RNA, 22 nt, Human
agcuguggcagcacuuuggagu

SEQ ID NO: 126416 - RNA, 22 nt, Human
ucagggcaagauugguuaauaa

SEQ ID NO: 126417 - RNA, 19 nt, Human
gucagcaccauggacaggg

SEQ ID NO: 126418 - RNA, 22 nt, Human
uccuggcccggccgggccugcu

SEQ ID NO: 126419 - RNA, 22 nt, Human
gguccagggaacuuugaaggau

SEQ ID NO: 126420 - RNA, 22 nt, Human
gucagaggaggcugaguaggaa

SEQ ID NO: 126421 - RNA, 22 nt, Human
aggcucagucuguucaugcacu

SEQ ID NO: 126422 - RNA, 22 nt, Human
cagagcugugauaaauagauau

SEQ ID NO: 126423 - RNA, 22 nt, Human
agcuguggaagacugucagggu

SEQ ID NO: 126424 - RNA, 22 nt, Human
aggccagggucccacacucgca

SEQ ID NO: 126425 - RNA, 22 nt, Human
gcagaggaggacccaggaauua

SEQ ID NO: 126426 - RNA, 22 nt, Human
gagggcugcuggaaaaaugcag

SEQ ID NO: 126427 - RNA, 22 nt, Human
gaauacaaauaauaccaaggug

SEQ ID NO: 126428 - RNA, 22 nt, Human
aagucuguuugagugucacacu

SEQ ID NO: 126429 - RNA, 22 nt, Human
aggcacaggaaugucauccagu

SEQ ID NO: 126430 - RNA, 21 nt, Human
agccugggaggcggagguugc

SEQ ID NO: 126431 - RNA, 20 nt, Human
ucucugagcuucucuugggg

SEQ ID NO: 126432 - RNA, 22 nt, Human
ugccaggcauuugacagacacu

SEQ ID NO: 126433 - RNA, 22 nt, Human
agaaggcagaugggacggagca

SEQ ID NO: 126434 - RNA, 22 nt, Human
agcagccacacgccuccuucuc

SEQ ID NO: 126435 - RNA, 22 nt, Human
uguacuugaacuugacuguaga

SEQ ID NO: 126436 - RNA, 22 nt, Human
aagggcagagggaaucccacau

SEQ ID NO: 126437 - RNA, 22 nt, Human
gaagcccagcaaacugugauca

SEQ ID NO: 126438 - RNA, 22 nt, Human
agggcccuuacgcaggcccuuc

SEQ ID NO: 126439 - RNA, 22 nt, Human
ccaguggaauuaaaaauaagug

SEQ ID NO: 126440 - RNA, 22 nt, Human
agagggcaugcuugguggccug

SEQ ID NO: 126441 - RNA, 22 nt, Human
cugagccuguguuucucuggca

SEQ ID NO: 126442 - RNA, 22 nt, Human
cggcuggugucgggcacagcaa

SEQ ID NO: 126443 - RNA, 21 nt, Human
ggcagugaugugaagugcauc

SEQ ID NO: 126444 - RNA, 22 nt, Human
caguaggaaggaugcagaaaaa

SEQ ID NO: 126445 - RNA, 20 nt, Human
uccuggccucccuggggcuc

SEQ ID NO: 126446 - RNA, 22 nt, Human
caggcugccgugaagcaggccu

SEQ ID NO: 126447 - RNA, 22 nt, Human
cucuggaguucuucaagcuacu

SEQ ID NO: 126448 - RNA, 22 nt, Human
ggagcagggaauuacagcgcag

SEQ ID NO: 126449 - RNA, 22 nt, Human
ccagagccucaacacagguccu

SEQ ID NO: 126450 - RNA, 22 nt, Human
auucuggccuuggcucugucac

SEQ ID NO: 126451 - RNA, 22 nt, Human
gagaaagggauaauuugaagag

SEQ ID NO: 126452 - RNA, 20 nt, Human
ugcagggcugccucccagcu

SEQ ID NO: 126453 - RNA, 22 nt, Human
cucccagguuccgacgccucuu

SEQ ID NO: 126454 - RNA, 22 nt, Human
gcaccaggcagcugagcaggcc

SEQ ID NO: 126455 - RNA, 22 nt, Human
gcuguggcugaagaugcaggga

SEQ ID NO: 126456 - RNA, 22 nt, Human
ccagagcuaaacacacaggcug

SEQ ID NO: 126457 - RNA, 22 nt, Human
uccaggcuagaagucacaggcc

SEQ ID NO: 126458 - RNA, 22 nt, Human
gcaguggauccaaugguaucuu

SEQ ID NO: 126459 - RNA, 22 nt, Human
agugcacuggcaccaucucagc

SEQ ID NO: 126460 - RNA, 22 nt, Human
agggccaccagagcagggcagu

SEQ ID NO: 126461 - RNA, 22 nt, Human
cagaguaaggagcugucaaacg

SEQ ID NO: 126462 - RNA, 22 nt, Human
cagaggcauuacugaaaaggug

SEQ ID NO: 126463 - RNA, 22 nt, Human
aggcucagucccggcccgcgcc

SEQ ID NO: 126464 - RNA, 22 nt, Human
gugugcagucugcuaggcaggg

SEQ ID NO: 126465 - RNA, 22 nt, Human
ugaggcucagagcaccugcucc

SEQ ID NO: 126466 - RNA, 22 nt, Human
agcugucucugguauuauguga

SEQ ID NO: 126467 - RNA, 22 nt, Human
ucucugagcccagugucccccu

SEQ ID NO: 126468 - RNA, 22 nt, Human
cagugaaguuuaaaguguagau

SEQ ID NO: 126469 - RNA, 22 nt, Human
ugaaggcagcaugcacacuagu

SEQ ID NO: 126470 - RNA, 22 nt, Human
gcagugaacauaacacagaagg

SEQ ID NO: 126471 - RNA, 22 nt, Human
gugaauggggcaggaaggaugg

SEQ ID NO: 126472 - RNA, 18 nt, Human
cugaggcuggcaggagcc

SEQ ID NO: 126473 - RNA, 22 nt, Human
ccuccaguacuccaguccagcg

SEQ ID NO: 126474 - RNA, 22 nt, Human
ugaagccaccgaaccagaagag

SEQ ID NO: 126475 - RNA, 22 nt, Human
ggcgcucaguguugccccagag

SEQ ID NO: 126476 - RNA, 22 nt, Human
agugcaugccuuccuguggaug

SEQ ID NO: 126477 - RNA, 22 nt, Human
caggcaggucagugaagaagga

SEQ ID NO: 126478 - RNA, 22 nt, Human
ccugaagggacuccagagagca

SEQ ID NO: 126479 - RNA, 22 nt, Human
gggggaagaaagaacauggcau

SEQ ID NO: 126480 - RNA, 22 nt, Human
ugccaggcccucccacagauua

SEQ ID NO: 126481 - RNA, 22 nt, Human
cacucacuuauuucuaacagaa

SEQ ID NO: 126482 - RNA, 22 nt, Human
acugucuuguguuaaagaacca

SEQ ID NO: 126483 - RNA, 22 nt, Human
ugugcagcucuagagccaagcc

SEQ ID NO: 126484 - RNA, 22 nt, Human
guggcacagugggagagcccca

SEQ ID NO: 126485 - RNA, 22 nt, Human
ugcccagggauaagccuagaga

SEQ ID NO: 126486 - RNA, 19 nt, Human
auuucaagagguuuauugg

SEQ ID NO: 126487 - RNA, 22 nt, Human
ggccaggcugguuccuugaccu

SEQ ID NO: 126488 - RNA, 20 nt, Human
agaaggcuccuuuugccaag

SEQ ID NO: 126489 - RNA, 22 nt, Human
gggcaguguggucgugccuuug

SEQ ID NO: 126490 - RNA, 22 nt, Human
aguggagacaggacagucgaua

SEQ ID NO: 126491 - RNA, 22 nt, Human
caggcagccugcggucugcaca

SEQ ID NO: 126492 - RNA, 22 nt, Human
uccuuugguuguagacaggaau

SEQ ID NO: 126493 - RNA, 22 nt, Human
ccaggagcaccaggccugugcc

SEQ ID NO: 126494 - RNA, 22 nt, Human
cagugcaguuucccagaugcug

SEQ ID NO: 126495 - RNA, 22 nt, Human
agagccugucaauuguaaagag

SEQ ID NO: 126496 - RNA, 22 nt, Human
uuccucuuucucugugcuaugu

SEQ ID NO: 126497 - RNA, 22 nt, Human
auuuccaagaaagcuuuaggau

SEQ ID NO: 126498 - RNA, 22 nt, Human
gaguggagcaaaagagguagau

SEQ ID NO: 126499 - RNA, 16 nt, Human
gcaggcagaucacaug

SEQ ID NO: 126500 - RNA, 18 nt, Human
uggcaggaaaugcacuuu

SEQ ID NO: 126501 - RNA, 22 nt, Human
ggaagccaggccaaugagaaca

SEQ ID NO: 126502 - RNA, 22 nt, Human
agggucugacugaauggaaaag

SEQ ID NO: 126503 - RNA, 22 nt, Human
agcagccaggaaucugcagagc

SEQ ID NO: 126504 - RNA, 22 nt, Human
uggcaugauaggaggugcagaa

SEQ ID NO: 126505 - RNA, 23 nt, Human
gcagaggagcaagcuggacacca

SEQ ID NO: 126506 - RNA, 22 nt, Human
gagggcaguagccucguacccu

SEQ ID NO: 126507 - RNA, 22 nt, Human
ugaggcagaaaauagcaguuca

SEQ ID NO: 126508 - RNA, 16 nt, Human
ggcaccagugaacaca

SEQ ID NO: 126509 - RNA, 22 nt, Human
ucagccucucugaguccagacc

SEQ ID NO: 126510 - RNA, 22 nt, Human
ugcagggcuaagucagagccug

SEQ ID NO: 126511 - RNA, 22 nt, Human
gaggcuggaggucaaagaugaa

SEQ ID NO: 126512 - RNA, 20 nt, Human
gaagccagaggggaaaggag

SEQ ID NO: 126513 - RNA, 20 nt, Human
acauccuggugacuagaacu

SEQ ID NO: 126514 - RNA, 17 nt, Human
acagggcagaaacagcu

SEQ ID NO: 126515 - RNA, 21 nt, Human
cccaggucguggucuucccag

SEQ ID NO: 126516 - RNA, 18 nt, Human
uggagcugagugcugugc

SEQ ID NO: 126517 - RNA, 22 nt, Human
uccuuugguucucuaagaugcu

SEQ ID NO: 126518 - RNA, 22 nt, Human
ucaguggauugacaugaaaaag

SEQ ID NO: 126519 - RNA, 22 nt, Human
ucagggcauacucuucaagguc

SEQ ID NO: 126520 - RNA, 22 nt, Human
ugcagggcagcuagggagcuuu

SEQ ID NO: 126521 - RNA, 22 nt, Human
gcuggcagguccaagauagagc

SEQ ID NO: 126522 - RNA, 22 nt, Human
agucucuuuugcgaagaguguu

SEQ ID NO: 126523 - RNA, 22 nt, Human
aacauaaauuugaaguggcaaa

SEQ ID NO: 126524 - RNA, 22 nt, Human
aagauuauggcagauaacaauu

SEQ ID NO: 126525 - RNA, 22 nt, Human
cugagcaggauauucacagcag

SEQ ID NO: 126526 - RNA, 22 nt, Human
ucaggcuggagugcaguggcgc

SEQ ID NO: 126527 - RNA, 22 nt, Human
ucagcuggauguggaagugcua

SEQ ID NO: 126528 - RNA, 22 nt, Human
acuguggcgucaggaagaaauu

SEQ ID NO: 126529 - RNA, 22 nt, Human
gcaggagcaaacugcagugugg

SEQ ID NO: 126530 - RNA, 22 nt, Human
ugggacuuguguggcaguauuu

SEQ ID NO: 126531 - RNA, 22 nt, Human
gugugcaggugucagugcagcu

SEQ ID NO: 126532 - RNA, 22 nt, Human
ugugggcacuaaugacaugcag

SEQ ID NO: 126533 - RNA, 22 nt, Human
gcaugagggggguuaggaaguu

SEQ ID NO: 126534 - RNA, 22 nt, Human
agaauucugacaauagaauugg

SEQ ID NO: 126535 - RNA, 22 nt, Human
gcagagugaagcaguauggaaa

SEQ ID NO: 126536 - RNA, 22 nt, Human
ugaggcagaaauuccuguuuuc

SEQ ID NO: 126537 - RNA, 22 nt, Human
ugcaggcaggggaugagcagcc

SEQ ID NO: 126538 - RNA, 22 nt, Human
gcuccucucccagagcugcagg

SEQ ID NO: 126539 - RNA, 22 nt, Human
uuguuaaaaauagauuuccagg

SEQ ID NO: 126540 - RNA, 22 nt, Human
ccagaggacuugggggcugaau

SEQ ID NO: 126541 - RNA, 22 nt, Human
agggccugggauguccuccuag

SEQ ID NO: 126542 - RNA, 22 nt, Human
cucccugggccucaguuucucu

SEQ ID NO: 126543 - RNA, 22 nt, Human
aguggcaguagaugagcugguu

SEQ ID NO: 126544 - RNA, 22 nt, Human
aagggcugagcacagugagcca

SEQ ID NO: 126545 - RNA, 22 nt, Human
auuauucaacacuugagaaauu

SEQ ID NO: 126546 - RNA, 22 nt, Human
ucagggcaaaagggaaaccauu

SEQ ID NO: 126547 - RNA, 22 nt, Human
acaggcagguaauuuacauauu

SEQ ID NO: 126548 - RNA, 23 nt, Human
cagggcugguagggaagagcgug

SEQ ID NO: 126549 - RNA, 22 nt, Human
uccuguguuacugccuggagcg

SEQ ID NO: 126550 - RNA, 22 nt, Human
ugcucugucaagaaaagaugcc

SEQ ID NO: 126551 - RNA, 20 nt, Human
uggcaggaauagggccagag

SEQ ID NO: 126552 - RNA, 22 nt, Human
uuagggcaggcaugagagaacu

SEQ ID NO: 126553 - RNA, 22 nt, Human
gccaggaguucagaugcauguu

SEQ ID NO: 126554 - RNA, 18 nt, Human
cacaggcaggugauaggu

SEQ ID NO: 126555 - RNA, 22 nt, Human
ggccagagucuauaugcagaca

SEQ ID NO: 126556 - RNA, 22 nt, Human
ccagcugucugguuccagagcc

SEQ ID NO: 126557 - RNA, 22 nt, Human
cgagaguuagcuaggagucaca

SEQ ID NO: 126558 - RNA, 22 nt, Human
gaaagcaguaaaugggucccau

SEQ ID NO: 126559 - RNA, 19 nt, Human
ucagggcaguccggucccc

SEQ ID NO: 126560 - RNA, 20 nt, Human
uccaguggccugaaucugga

SEQ ID NO: 126561 - RNA, 22 nt, Human
ggcugaggcucaugccaucuug

SEQ ID NO: 126562 - RNA, 22 nt, Human
uaggugugggcucaggaaugug

SEQ ID NO: 126563 - RNA, 22 nt, Human
aguggcaguggcugggcagagc

SEQ ID NO: 126564 - RNA, 22 nt, Human
gcagagcaccaaagugaaagau

SEQ ID NO: 126565 - RNA, 22 nt, Human
ugcugugguucccagaguggau

SEQ ID NO: 126566 - RNA, 22 nt, Human
gccaguggcccucuggagaagg

SEQ ID NO: 126567 - RNA, 22 nt, Human
guggcagagggugagcuggacu

SEQ ID NO: 126568 - RNA, 22 nt, Human
aggcugaguuucucauucucgc

SEQ ID NO: 126569 - RNA, 22 nt, Human
agaggaggcucugggaucgucc

SEQ ID NO: 126570 - RNA, 22 nt, Human
gugaggcagagaugccaaaacu

SEQ ID NO: 126571 - RNA, 22 nt, Human
gaaggcuguuucugguagugau

SEQ ID NO: 126572 - RNA, 22 nt, Human
uaaaggcuucugcagggacuga

SEQ ID NO: 126573 - RNA, 22 nt, Human
gggaggaaggcuugggugagua

SEQ ID NO: 126574 - RNA, 22 nt, Human
cuguugucccugggagcucagc

SEQ ID NO: 126575 - RNA, 22 nt, Human
uggagauggguuaauggagaga

SEQ ID NO: 126576 - RNA, 22 nt, Human
ccagagggcaaaaugaagcuua

SEQ ID NO: 126577 - RNA, 22 nt, Human
gagcagggagacaacucuggug

SEQ ID NO: 126578 - RNA, 23 nt, Human
ucuggcucuaugugacagcucuc

SEQ ID NO: 126579 - RNA, 22 nt, Human
uccugggguccugacugcuucc

SEQ ID NO: 126580 - RNA, 22 nt, Human
gcauggaauucccuuaugggcc

SEQ ID NO: 126581 - RNA, 22 nt, Human
agauguggccggcuagggagag

SEQ ID NO: 126582 - RNA, 22 nt, Human
uuuauccagaaucaggauuuuu

SEQ ID NO: 126583 - RNA, 22 nt, Human
uggucagacaaaggagaauguu

SEQ ID NO: 126584 - RNA, 22 nt, Human
agaguccauaugugggaggagu

SEQ ID NO: 126585 - RNA, 22 nt, Human
gaguccaguguuuaccaggggu

SEQ ID NO: 126586 - RNA, 22 nt, Human
ucucccaggcuggagugcagug

SEQ ID NO: 126587 - RNA, 22 nt, Human
ccaggguaccccaagggcaggu

SEQ ID NO: 126588 - RNA, 22 nt, Human
uccaggcugauccaugaagaau

SEQ ID NO: 126589 - RNA, 22 nt, Human
agcagggcuccauuucacugcc

SEQ ID NO: 126590 - RNA, 22 nt, Human
gagugcaguuggggugagggga

SEQ ID NO: 126591 - RNA, 19 nt, Human
agggccaggauucuggaac

SEQ ID NO: 126592 - RNA, 22 nt, Human
gaaugcagauggcugguguaug

SEQ ID NO: 126593 - RNA, 22 nt, Human
agggcugaguggugcagucaaa

SEQ ID NO: 126594 - RNA, 20 nt, Human
cagagcugggauuugaacac

SEQ ID NO: 126595 - RNA, 22 nt, Human
gcuccucuccucggagucgggg

SEQ ID NO: 126596 - RNA, 19 nt, Human
cagaggcaccagguauaga

SEQ ID NO: 126597 - RNA, 22 nt, Human
caggucagaggcgcagccccca

SEQ ID NO: 126598 - RNA, 22 nt, Human
aggcuggggaauugaauuugcu

SEQ ID NO: 126599 - RNA, 22 nt, Human
ucugccuguugcuagaauguca

SEQ ID NO: 126600 - RNA, 20 nt, Human
cccaggugucugaagcucug

SEQ ID NO: 126601 - RNA, 22 nt, Human
agucaggagcugcugcauugua

SEQ ID NO: 126602 - RNA, 22 nt, Human
cuaguggaaacuaacuggaauu

SEQ ID NO: 126603 - RNA, 22 nt, Human
aggcagaggagaaugaucuucc

SEQ ID NO: 126604 - RNA, 22 nt, Human
gaauacaagccugccaccugga

SEQ ID NO: 126605 - RNA, 22 nt, Human
gaguccaguuguucacagaggc

SEQ ID NO: 126606 - RNA, 22 nt, Human
ggaagggcaauaaaaucucagg

SEQ ID NO: 126607 - RNA, 22 nt, Human
gacacagggggauguguggacg

SEQ ID NO: 126608 - RNA, 22 nt, Human
agaagcagcuuucaaggugauu

SEQ ID NO: 126609 - RNA, 22 nt, Human
aaagcagcagcacguggaagag

SEQ ID NO: 126610 - RNA, 22 nt, Human
gccucccuguagaggccagccu

SEQ ID NO: 126611 - RNA, 22 nt, Human
cuccugguucagagagcugaga

SEQ ID NO: 126612 - RNA, 22 nt, Human
uagggcagcugcaucaggcacu

SEQ ID NO: 126613 - RNA, 22 nt, Human
auccucagaccucagcaaagcc

SEQ ID NO: 126614 - RNA, 22 nt, Human
uagggcagaguccaggaugggc

SEQ ID NO: 126615 - RNA, 22 nt, Human
ccaggugucuguggccagcccu

SEQ ID NO: 126616 - RNA, 22 nt, Human
cagaggcacagcuucuuuuaau

SEQ ID NO: 126617 - RNA, 18 nt, Human
cagaggagagacauucag

SEQ ID NO: 126618 - RNA, 20 nt, Human
agcaagaguaaggacagcga

SEQ ID NO: 126619 - RNA, 22 nt, Human
ugggcagcauccuccacaguca

SEQ ID NO: 126620 - RNA, 22 nt, Human
aagggcugccagggggugccag

SEQ ID NO: 126621 - RNA, 22 nt, Human
gaagucugacucuuuguaagcu

SEQ ID NO: 126622 - RNA, 22 nt, Human
gaggcucaaaccuggacagagc

SEQ ID NO: 126623 - RNA, 21 nt, Human
agaggcaggcauuaaguacac

SEQ ID NO: 126624 - RNA, 22 nt, Human
ccauguggugggaaggagaaug

SEQ ID NO: 126625 - RNA, 22 nt, Human
ugggcaggggcccugcuuccgu

SEQ ID NO: 126626 - RNA, 22 nt, Human
agcagagguguuuauuauggga

SEQ ID NO: 126627 - RNA, 22 nt, Human
aggugucuggauggguguccuu

SEQ ID NO: 126628 - RNA, 22 nt, Human
acaaaggcaggauugacuuagu

SEQ ID NO: 126629 - RNA, 22 nt, Human
uuucucaaguucagauauuuga

SEQ ID NO: 126630 - RNA, 22 nt, Human
ccagggcaucacauccaguguu

SEQ ID NO: 126631 - RNA, 16 nt, Human
gagaagagcccggcag

SEQ ID NO: 126632 - RNA, 23 nt, Human
agcaggaaaccgagggugauguu

SEQ ID NO: 126633 - RNA, 22 nt, Human
agaggagguccuuuucugaugu

SEQ ID NO: 126634 - RNA, 22 nt, Human
uaggugucugcucuuauuuaac

SEQ ID NO: 126635 - RNA, 22 nt, Human
agcagaggacaguucuuaggaa

SEQ ID NO: 126636 - RNA, 19 nt, Human
aaggcagaaguuggauaug

SEQ ID NO: 126637 - RNA, 22 nt, Human
uggcagagcccagacuccaguc

SEQ ID NO: 126638 - RNA, 21 nt, Human
auuuccaaggguaccuaagau

SEQ ID NO: 126639 - RNA, 22 nt, Human
caccaggugcuggaggacauca

SEQ ID NO: 126640 - RNA, 22 nt, Human
gcuuugcauuguuuaaucagga

SEQ ID NO: 126641 - RNA, 22 nt, Human
gcagaugguggggcaggaaaau

SEQ ID NO: 126642 - RNA, 22 nt, Human
agcccagguugaggcugcagug

SEQ ID NO: 126643 - RNA, 22 nt, Human
aagaggcagcccgcugaggcug

SEQ ID NO: 126644 - RNA, 22 nt, Human
gccaggcuccaggcccuccuga

SEQ ID NO: 126645 - RNA, 22 nt, Human
ugaggcaggaauggggaaaagu

SEQ ID NO: 126646 - RNA, 19 nt, Human
aggcagcaggccagggaug

SEQ ID NO: 126647 - RNA, 21 nt, Human
uggcucaguugcugggcacag

SEQ ID NO: 126648 - RNA, 19 nt, Human
ccagguggaacugagguag

SEQ ID NO: 126649 - RNA, 19 nt, Human
cagugcccgacgcaggucu

SEQ ID NO: 126650 - RNA, 22 nt, Human
gaagccagccuugucugccucu

SEQ ID NO: 126651 - RNA, 22 nt, Human
cagcugggagcuccauuagaua

SEQ ID NO: 126652 - RNA, 18 nt, Human
gguggcaggucagaugcc

SEQ ID NO: 126653 - RNA, 22 nt, Human
guggcgcagaggguggcagaga

SEQ ID NO: 126654 - RNA, 23 nt, Human
uucaaagcuuaagcucuuuccac

SEQ ID NO: 126655 - RNA, 22 nt, Human
uggcugagccacuuguucagau

SEQ ID NO: 126656 - RNA, 22 nt, Human
gugcaugaagacucagaaaguc

SEQ ID NO: 126657 - RNA, 22 nt, Human
gcaccugggcaaggauucagag

SEQ ID NO: 126658 - RNA, 22 nt, Human
aaagccaguucuuagagaaagc

SEQ ID NO: 126659 - RNA, 22 nt, Human
gggaauuauagcugucacaggc

SEQ ID NO: 126660 - RNA, 22 nt, Human
aggcugugcaauuaggguaaga

SEQ ID NO: 126661 - RNA, 22 nt, Human
gagggccaauggauuucaacug

SEQ ID NO: 126662 - RNA, 22 nt, Human
ugaggcaguauucuccauucca

SEQ ID NO: 126663 - RNA, 22 nt, Human
acccaggaugauaauguucaca

SEQ ID NO: 126664 - RNA, 22 nt, Human
agggcagcugugagccacugug

SEQ ID NO: 126665 - RNA, 22 nt, Human
gagcagcugagcuggaaugaga

SEQ ID NO: 126666 - RNA, 22 nt, Human
uagggcugcugcagaugacagg

SEQ ID NO: 126667 - RNA, 22 nt, Human
gccagguggcugagcagcugca

SEQ ID NO: 126668 - RNA, 22 nt, Human
gugagcaggauaggggcucccu

SEQ ID NO: 126669 - RNA, 22 nt, Human
aagggagacaguugugugagga

SEQ ID NO: 126670 - RNA, 22 nt, Human
gaaggcaacaccaggaugcacu

SEQ ID NO: 126671 - RNA, 22 nt, Human
aggcaggugcuuaugacuugcu

SEQ ID NO: 126672 - RNA, 20 nt, Human
ugcagggcucugcuucucuc

SEQ ID NO: 126673 - RNA, 22 nt, Human
gggauuugugggauggccagug

SEQ ID NO: 126674 - RNA, 22 nt, Human
aucagaagcuuguagucucucu

SEQ ID NO: 126675 - RNA, 22 nt, Human
cgcauacauagaaacacacaga

SEQ ID NO: 126676 - RNA, 22 nt, Human
uggcugagaaaaaagagcuaua

SEQ ID NO: 126677 - RNA, 22 nt, Human
ucccaggaucugagggcagaga

SEQ ID NO: 126678 - RNA, 22 nt, Human
cugcugugcaacauugcaccua

SEQ ID NO: 126679 - RNA, 22 nt, Human
caggguuucaccauguuagcag

SEQ ID NO: 126680 - RNA, 22 nt, Human
aggcagcagucaugaggaaaga

SEQ ID NO: 126681 - RNA, 22 nt, Human
gagugggcaccgugggcacacu

SEQ ID NO: 126682 - RNA, 22 nt, Human
gcagaggauagcauaugaaccu

SEQ ID NO: 126683 - RNA, 22 nt, Human
augaggcucucaggggagcugu

SEQ ID NO: 126684 - RNA, 22 nt, Human
cagaggaaaguauuucuggaag

SEQ ID NO: 126685 - RNA, 22 nt, Human
uggcagaggaaaaagucacugg

SEQ ID NO: 126686 - RNA, 20 nt, Human
ggggcagguuuuuauggcua

SEQ ID NO: 126687 - RNA, 22 nt, Human
uguuucauguggacauaguugu

SEQ ID NO: 126688 - RNA, 22 nt, Human
ugggcugaguggcagccagagu

SEQ ID NO: 126689 - RNA, 22 nt, Human
guggggaaaggaguggggcuca

SEQ ID NO: 126690 - RNA, 22 nt, Human
cccucccaagcacucugacaua

SEQ ID NO: 126691 - RNA, 22 nt, Human
cagggcaggaauuugacauugc

SEQ ID NO: 126692 - RNA, 22 nt, Human
gccucccuggcccacagcagcg

SEQ ID NO: 126693 - RNA, 22 nt, Human
ucagggcauccauugccuguug

SEQ ID NO: 126694 - RNA, 22 nt, Human
aguuccagcugugaccagaaaa

SEQ ID NO: 126695 - RNA, 22 nt, Human
caggcagagcaacugguccaga

SEQ ID NO: 126696 - RNA, 22 nt, Human
ugcgcaggagcucugccaggag

SEQ ID NO: 126697 - RNA, 22 nt, Human
agccaggccagacucacacccu

SEQ ID NO: 126698 - RNA, 22 nt, Human
agauguaaacucucaugucauu

SEQ ID NO: 126699 - RNA, 22 nt, Human
guuauuuucauuggcucagacu

SEQ ID NO: 126700 - RNA, 22 nt, Human
gcccagugguaaaagcaggccu

SEQ ID NO: 126701 - RNA, 22 nt, Human
ccagcugucacucagaaaggcc

SEQ ID NO: 126702 - RNA, 22 nt, Human
gaaggcugucagagaggagggc

SEQ ID NO: 126703 - RNA, 22 nt, Human
accaggaggccuggagcacaaa

SEQ ID NO: 126704 - RNA, 22 nt, Human
agaguccaugaagacagcugag

SEQ ID NO: 126705 - RNA, 22 nt, Human
gacccuguuucuacaaauaauu

SEQ ID NO: 126706 - RNA, 22 nt, Human
aggcagcaugggccccagcucc

SEQ ID NO: 126707 - RNA, 22 nt, Human
ugcagggccuugggaugugucc

SEQ ID NO: 126708 - RNA, 22 nt, Human
aucaggaaugaauacuuuugga

SEQ ID NO: 126709 - RNA, 21 nt, Human
uuucccagcugaaaauaaaug

SEQ ID NO: 126710 - RNA, 22 nt, Human
uccagcuugccuggucuuuugg

SEQ ID NO: 126711 - RNA, 22 nt, Human
ggaagccaugagggacaguucu

SEQ ID NO: 126712 - RNA, 22 nt, Human
ccagcucugcagggccuggggu

SEQ ID NO: 126713 - RNA, 22 nt, Human
ugggcaggagagaagcuaaaga

SEQ ID NO: 126714 - RNA, 22 nt, Human
aagggcaggcagagaucauaua

SEQ ID NO: 126715 - RNA, 21 nt, Human
aggcucagcagguguauaaag

SEQ ID NO: 126716 - RNA, 22 nt, Human
agcugugguucugggcagcgac

SEQ ID NO: 126717 - RNA, 22 nt, Human
ucagaggaauuugcuuuucaug

SEQ ID NO: 126718 - RNA, 22 nt, Human
uagagcuggaauuugcagcaag

SEQ ID NO: 126719 - RNA, 22 nt, Human
ugcagggcagauaugacuguag

SEQ ID NO: 126720 - RNA, 22 nt, Human
gccugccacgcaugcagaguca

SEQ ID NO: 126721 - RNA, 22 nt, Human
aggcaguuuauccccagagccu

SEQ ID NO: 126722 - RNA, 22 nt, Human
acaacacagcaaaaccccaucu

SEQ ID NO: 126723 - RNA, 22 nt, Human
auuuucaucauggguuuaacau

SEQ ID NO: 126724 - RNA, 22 nt, Human
cacaggagauugaucuauuggu

SEQ ID NO: 126725 - RNA, 22 nt, Human
ucaccaggauuccuaucaguag

SEQ ID NO: 126726 - RNA, 22 nt, Human
agggcuguuuuuggcaccuggg

SEQ ID NO: 126727 - RNA, 22 nt, Human
cucugugagggucuguacagaa

SEQ ID NO: 126728 - RNA, 22 nt, Human
aagucuggaagucucaguuuuc

SEQ ID NO: 126729 - RNA, 22 nt, Human
acauaugcucaucugcauuccc

SEQ ID NO: 126730 - RNA, 22 nt, Human
ugaggaagccaaacagcuacac

SEQ ID NO: 126731 - RNA, 22 nt, Human
ggcagcaacucggagagaagag

SEQ ID NO: 126732 - RNA, 22 nt, Human
ugcaguggaaucuggagagcag

SEQ ID NO: 126733 - RNA, 22 nt, Human
gaaagccauagcccagcuuuac

SEQ ID NO: 126734 - RNA, 22 nt, Human
aggugcagaaaaaaguccuuua

SEQ ID NO: 126735 - RNA, 22 nt, Human
ugccaggccaaugaaggcaggg

SEQ ID NO: 126736 - RNA, 22 nt, Human
uccaggcuggccucgcgugaca

SEQ ID NO: 126737 - RNA, 22 nt, Human
cagggcagcuuccuuuguuagg

SEQ ID NO: 126738 - RNA, 22 nt, Human
gaagggagaagguugggugacg

SEQ ID NO: 126739 - RNA, 22 nt, Human
uccuggcccgaucccugugaag

SEQ ID NO: 126740 - RNA, 22 nt, Human
uacacacagaggccaugggauu

SEQ ID NO: 126741 - RNA, 21 nt, Human
ccaccaggucuucugcucggg

SEQ ID NO: 126742 - RNA, 22 nt, Human
cauucugcauuuggaaggggca

SEQ ID NO: 126743 - RNA, 22 nt, Human
ucacauuuuaucuauuuuaagu

SEQ ID NO: 126744 - RNA, 22 nt, Human
caggaaagggaugggcugccac

SEQ ID NO: 126745 - RNA, 22 nt, Human
agggcagcuagcuguagaaaga

SEQ ID NO: 126746 - RNA, 22 nt, Human
aaaugcaugagaaaguauucug

SEQ ID NO: 126747 - RNA, 18 nt, Human
ugcccagaaaagcaggga

SEQ ID NO: 126748 - RNA, 20 nt, Human
cugcugugugugccucagcc

SEQ ID NO: 126749 - RNA, 20 nt, Human
uccuuuggccuuagagcugu

SEQ ID NO: 126750 - RNA, 22 nt, Human
uccaugggaagauuuugagugg

SEQ ID NO: 126751 - RNA, 22 nt, Human
gaguccaguuagugaggcuggg

SEQ ID NO: 126752 - RNA, 22 nt, Human
ugcuggagaggaaggugggguc

SEQ ID NO: 126753 - RNA, 21 nt, Human
gcagaugggagucaucaggcu

SEQ ID NO: 126754 - RNA, 22 nt, Human
cuauuauuagauaaucuacuug

SEQ ID NO: 126755 - RNA, 22 nt, Human
gaggcucagagugguuaaauaa

SEQ ID NO: 126756 - RNA, 22 nt, Human
gaagggugcauggagggaaguc

SEQ ID NO: 126757 - RNA, 22 nt, Human
augaggcauucacagaaggcac

SEQ ID NO: 126758 - RNA, 22 nt, Human
agcagggccugagugaccuaac

SEQ ID NO: 126759 - RNA, 22 nt, Human
cuuagaugaagucacagaaccc

SEQ ID NO: 126760 - RNA, 22 nt, Human
uagggcugugucuccaggacca

SEQ ID NO: 126761 - RNA, 22 nt, Human
agccugugugcuuuggacaggg

SEQ ID NO: 126762 - RNA, 22 nt, Human
gcagaggagcaagcuggacacc

SEQ ID NO: 126763 - RNA, 19 nt, Human
uaguggagugacaaguucu

SEQ ID NO: 126764 - RNA, 22 nt, Human
gcaggagcagucaggggcagcu

SEQ ID NO: 126765 - RNA, 22 nt, Human
agucaccaacaugguucccagg

SEQ ID NO: 126766 - RNA, 22 nt, Human
gggcaguuuauucuagaugguu

SEQ ID NO: 126767 - RNA, 22 nt, Human
guggcaggagagacacagccau

SEQ ID NO: 126768 - RNA, 22 nt, Human
cucgcaggacagugcuaggacu

SEQ ID NO: 126769 - RNA, 22 nt, Human
cagaaggcuuuguggaguagac

SEQ ID NO: 126770 - RNA, 22 nt, Human
ucugcucuaguugcuuccugcc

SEQ ID NO: 126771 - RNA, 22 nt, Human
ggccagagagcagccaggauuc

SEQ ID NO: 126772 - RNA, 19 nt, Human
agagaaggauccuaugguu

SEQ ID NO: 126773 - RNA, 22 nt, Human
gcaguggauggccagcaggggc

SEQ ID NO: 126774 - RNA, 22 nt, Human
gaauuagguaauagaacuagua

SEQ ID NO: 126775 - RNA, 22 nt, Human
cagggcugagaauuuagagaca

SEQ ID NO: 126776 - RNA, 20 nt, Human
ggcagggcaucaacagcucu

SEQ ID NO: 126777 - RNA, 22 nt, Human
caagggcagcagccucaagcgg

SEQ ID NO: 126778 - RNA, 22 nt, Human
auggcagagaaagcgagccaca

SEQ ID NO: 126779 - RNA, 22 nt, Human
agcugaagaaaugggaagcauu

SEQ ID NO: 126780 - RNA, 22 nt, Human
cugaggcucccucgggucugcu

SEQ ID NO: 126781 - RNA, 19 nt, Human
uggcagaggacaaggacuu

SEQ ID NO: 126782 - RNA, 22 nt, Human
ugagccagucugucugggugaa

SEQ ID NO: 126783 - RNA, 22 nt, Human
ucccuccuggugagcaggggcu

SEQ ID NO: 126784 - RNA, 22 nt, Human
ugugaagguaaggaggggcaag

SEQ ID NO: 126785 - RNA, 22 nt, Human
agaggccggccgagcccauggg

SEQ ID NO: 126786 - RNA, 22 nt, Human
caguggcagagaacagagaccu

SEQ ID NO: 126787 - RNA, 22 nt, Human
aaagcaaucagauucagauguc

SEQ ID NO: 126788 - RNA, 22 nt, Human
agagugguacuucuuuuucuuc

SEQ ID NO: 126789 - RNA, 22 nt, Human
agagccaggaaguggcgugggg

SEQ ID NO: 126790 - RNA, 22 nt, Human
ugggccaggcaugugaucagca

SEQ ID NO: 126791 - RNA, 22 nt, Human
gcagugaagccagaucugaaau

SEQ ID NO: 126792 - RNA, 22 nt, Human
gggggaagacugggcuagugau

SEQ ID NO: 126793 - RNA, 22 nt, Human
agugggguccucaguaugguuc

SEQ ID NO: 126794 - RNA, 22 nt, Human
gcuggcagccaagugaagaggg

SEQ ID NO: 126795 - RNA, 22 nt, Human
gagccuggacaucucaggccca

SEQ ID NO: 126796 - RNA, 22 nt, Human
gcugagacuggcagcaggaagu

SEQ ID NO: 126797 - RNA, 22 nt, Human
gcagaagcugggcagcgaggug

SEQ ID NO: 126798 - RNA, 22 nt, Human
cgaggcagaggcugaaacggcu

SEQ ID NO: 126799 - RNA, 22 nt, Human
cccuuccuugugacuggugggg

SEQ ID NO: 126800 - RNA, 22 nt, Human
ucucccagugucuggcagucag

SEQ ID NO: 126801 - RNA, 22 nt, Human
aggaaagcucccaguagggcuc

SEQ ID NO: 126802 - RNA, 22 nt, Human
aagccacuauggugauucucaa

SEQ ID NO: 126803 - RNA, 22 nt, Human
ccaguggacaauuucugaggaa

SEQ ID NO: 126804 - RNA, 22 nt, Human
cagggcagccaggccccguggg

SEQ ID NO: 126805 - RNA, 22 nt, Human
cagggcugucuccaaaggcccc

SEQ ID NO: 126806 - RNA, 22 nt, Human
gaagccagcaguggagaaagga

SEQ ID NO: 126807 - RNA, 22 nt, Human
gaugcaggauagcuucacccag

SEQ ID NO: 126808 - RNA, 22 nt, Human
ggugaccucaccuggucccacc

SEQ ID NO: 126809 - RNA, 22 nt, Human
ggcugagacuagagugaggcau

SEQ ID NO: 126810 - RNA, 22 nt, Human
agcaggugggcaugaaagcuga

SEQ ID NO: 126811 - RNA, 22 nt, Human
acaucuguuugagaaaaagaag

SEQ ID NO: 126812 - RNA, 22 nt, Human
aagggcuggcccugggaagagu

SEQ ID NO: 126813 - RNA, 23 nt, Human
agucagagagugugagacaacug

SEQ ID NO: 126814 - RNA, 22 nt, Human
ccagggcauccucacaucgcag

SEQ ID NO: 126815 - RNA, 21 nt, Human
gggcgaggccugauguggcuc

SEQ ID NO: 126816 - RNA, 22 nt, Human
ugaaaaaacaaguuggcccauu

SEQ ID NO: 126817 - RNA, 22 nt, Human
gcaggcuggucugaccaucccu

SEQ ID NO: 126818 - RNA, 22 nt, Human
augaggcacaucacagccaaug

SEQ ID NO: 126819 - RNA, 22 nt, Human
agcaugaagacuucagagcuag

SEQ ID NO: 126820 - RNA, 22 nt, Human
aggcugagucaaguuaggguga

SEQ ID NO: 126821 - RNA, 22 nt, Human
cugauuccaaagccaaagcuau

SEQ ID NO: 126822 - RNA, 22 nt, Human
gggcaguagcuucguaggcauc

SEQ ID NO: 126823 - RNA, 22 nt, Human
aggcugaggagggauguugcuu

SEQ ID NO: 126824 - RNA, 22 nt, Human
uggcugcagaucaagggcaggc

SEQ ID NO: 126825 - RNA, 22 nt, Human
uggagcaggacggggaguggua

SEQ ID NO: 126826 - RNA, 22 nt, Human
cccacacauuuuucacuuaccg

SEQ ID NO: 126827 - RNA, 22 nt, Human
aggaaaaagaguugcugccuuc

SEQ ID NO: 126828 - RNA, 22 nt, Human
ugaggcaggacuugcauaaagu

SEQ ID NO: 126829 - RNA, 22 nt, Human
aaggaaaggaugagcaugcauu

SEQ ID NO: 126830 - RNA, 22 nt, Human
caggaagcugagcugcacugca

SEQ ID NO: 126831 - RNA, 22 nt, Human
ucacauuuguucuugaaucuaa

SEQ ID NO: 126832 - RNA, 22 nt, Human
ucagggcaccaaaaaagaugcc

SEQ ID NO: 126833 - RNA, 19 nt, Human
agcuguggaugugggauuu

SEQ ID NO: 126834 - RNA, 22 nt, Human
gccacucaugggaggugugcaa

SEQ ID NO: 126835 - RNA, 22 nt, Human
agucagcagccuggccaggaga

SEQ ID NO: 126836 - RNA, 20 nt, Human
agccaggccucaaguuaagu

SEQ ID NO: 126837 - RNA, 22 nt, Human
ugaagccaucaggaagccagca

SEQ ID NO: 126838 - RNA, 22 nt, Human
ugggcagccaucccagccucuc

SEQ ID NO: 126839 - RNA, 22 nt, Human
gggcaggucugggucagccuga

SEQ ID NO: 126840 - RNA, 22 nt, Human
caagggcagaggcagggccccg

SEQ ID NO: 126841 - RNA, 18 nt, Human
ccagguggugacagagau

SEQ ID NO: 126842 - RNA, 22 nt, Human
gcugaaggucucuggagagguc

SEQ ID NO: 126843 - RNA, 22 nt, Human
aagggcugaaugaaggguugaa

SEQ ID NO: 126844 - RNA, 20 nt, Human
ucccaagggcugagaggauc

SEQ ID NO: 126845 - RNA, 22 nt, Human
gaggagaaagcagugauuugug

SEQ ID NO: 126846 - RNA, 22 nt, Human
cagagcugacccaaggauugaa

SEQ ID NO: 126847 - RNA, 22 nt, Human
ggagauaguccaggugaaggga

SEQ ID NO: 126848 - RNA, 22 nt, Human
uggagcugguaaacagugacau

SEQ ID NO: 126849 - RNA, 22 nt, Human
aggcagagcugauguucuguga

SEQ ID NO: 126850 - RNA, 22 nt, Human
gggcgccgugggaaacagccgg

SEQ ID NO: 126851 - RNA, 17 nt, Human
agauggcaggaggcaga

SEQ ID NO: 126852 - RNA, 22 nt, Human
ggagccugagcggcccagggcc

SEQ ID NO: 126853 - RNA, 22 nt, Human
cacauggaagagauacagugag

SEQ ID NO: 126854 - RNA, 22 nt, Human
accagagcuggcucugagcacc

SEQ ID NO: 126855 - RNA, 22 nt, Human
ugcaguggaggccgugagacag

SEQ ID NO: 126856 - RNA, 22 nt, Human
caguggaaaucagagugagagu

SEQ ID NO: 126857 - RNA, 22 nt, Human
caagggcauugcuugggaccuu

SEQ ID NO: 126858 - RNA, 22 nt, Human
ucccaggguuacagccagggca

SEQ ID NO: 126859 - RNA, 21 nt, Human
ucacacacguuuccaagggca

SEQ ID NO: 126860 - RNA, 22 nt, Human
agagggcuggacgcagguugga

SEQ ID NO: 126861 - RNA, 22 nt, Human
ugacauuucgguguaugugaug

SEQ ID NO: 126862 - RNA, 22 nt, Human
aaggggaaaaaguguuaggagu

SEQ ID NO: 126863 - RNA, 22 nt, Human
aacucuauuuacccuacuaaac

SEQ ID NO: 126864 - RNA, 22 nt, Human
auaguuguguggggauucuggu

SEQ ID NO: 126865 - RNA, 22 nt, Human
caugucuuauauccugucuuca

SEQ ID NO: 126866 - RNA, 22 nt, Human
gaguucaguguuucuaguagug

SEQ ID NO: 126867 - RNA, 22 nt, Human
gaagaggaugacaggagccggu

SEQ ID NO: 126868 - RNA, 22 nt, Human
gccaccuggacagcugugcccu

SEQ ID NO: 126869 - RNA, 22 nt, Human
gggagggacacaaagaguuccc

SEQ ID NO: 126870 - RNA, 22 nt, Human
cagagcugcuucccaguuugug

SEQ ID NO: 126871 - RNA, 22 nt, Human
acaguggaaaugugggagggga

SEQ ID NO: 126872 - RNA, 22 nt, Human
aggcagcaagauuauuuaaucc

SEQ ID NO: 126873 - RNA, 22 nt, Human
uggcugagaccuucccaaauuc

SEQ ID NO: 126874 - RNA, 22 nt, Human
ccucccagugccuccagagcag

SEQ ID NO: 126875 - RNA, 22 nt, Human
agguaaggcuguaagcuaagcc

SEQ ID NO: 126876 - RNA, 22 nt, Human
aagagcuggagcugcuacagga

SEQ ID NO: 126877 - RNA, 19 nt, Human
acauggcaucccaggaggu

SEQ ID NO: 126878 - RNA, 22 nt, Human
aauuuuauuagaaggcaagggg

SEQ ID NO: 126879 - RNA, 22 nt, Human
gagggcaggggucuugcacggu

SEQ ID NO: 126880 - RNA, 22 nt, Human
caggaggcaguuucagaaguca

SEQ ID NO: 126881 - RNA, 20 nt, Human
gagggcaggcacccauuuca

SEQ ID NO: 126882 - RNA, 22 nt, Human
cauuuuauccucugggaagcua

SEQ ID NO: 126883 - RNA, 20 nt, Human
cauuaugguugggcacagug

SEQ ID NO: 126884 - RNA, 22 nt, Human
ggaagaggcucucauugagggc

SEQ ID NO: 126885 - RNA, 22 nt, Human
agucagcagugaaagcacagcc

SEQ ID NO: 126886 - RNA, 20 nt, Human
uuacucaguuccugccaugc

SEQ ID NO: 126887 - RNA, 22 nt, Human
ugccaggcccagcagggcggcc

SEQ ID NO: 126888 - RNA, 22 nt, Human
ucugggagggagccucagaauc

SEQ ID NO: 126889 - RNA, 21 nt, Human
gggcagaggggccuccugggu

SEQ ID NO: 126890 - RNA, 22 nt, Human
acagccuggccugaguuaaggc

SEQ ID NO: 126891 - RNA, 22 nt, Human
aaguccagguccucauuccauc

SEQ ID NO: 126892 - RNA, 22 nt, Human
ugugaaggagaugaagggagug

SEQ ID NO: 126893 - RNA, 22 nt, Human
ucacaagacagaaaacauuuag

SEQ ID NO: 126894 - RNA, 22 nt, Human
agggccagagucuguguagaua

SEQ ID NO: 126895 - RNA, 22 nt, Human
acaguggagaaggcaugaggcu

SEQ ID NO: 126896 - RNA, 22 nt, Human
caggcugcagcagcaguggccc

SEQ ID NO: 126897 - RNA, 22 nt, Human
ugcagggcaguggagguugagu

SEQ ID NO: 126898 - RNA, 22 nt, Human
agggcuagaguugagaugggga

SEQ ID NO: 126899 - RNA, 22 nt, Human
augcuguguuugagaaccuagg

SEQ ID NO: 126900 - RNA, 22 nt, Human
agcagccacagucugggacagg

SEQ ID NO: 126901 - RNA, 22 nt, Human
uggcucaguuugggggauugaa

SEQ ID NO: 126902 - RNA, 22 nt, Human
gccaccuguuucgcuugcccag

SEQ ID NO: 126903 - RNA, 19 nt, Human
agacagagcucaguggguu

SEQ ID NO: 126904 - RNA, 22 nt, Human
aagggcuggaucucucugagca

SEQ ID NO: 126905 - RNA, 22 nt, Human
gagaggaguagacacuuugguu

SEQ ID NO: 126906 - RNA, 22 nt, Human
cacaugcaucugucauguuugg

SEQ ID NO: 126907 - RNA, 22 nt, Human
ucucccagaggaucccagugga

SEQ ID NO: 126908 - RNA, 22 nt, Human
gagagcugcagccgagaggggg

SEQ ID NO: 126909 - RNA, 22 nt, Human
gagagugagauccuccugggga

SEQ ID NO: 126910 - RNA, 22 nt, Human
gagcagugacuggagcaugaga

SEQ ID NO: 126911 - RNA, 22 nt, Human
aacaggcaacaguugacucuga

SEQ ID NO: 126912 - RNA, 22 nt, Human
cagcugcuguucaguuuuguuu

SEQ ID NO: 126913 - RNA, 22 nt, Human
gggaagggagggccuccaguca

SEQ ID NO: 126914 - RNA, 22 nt, Human
ggcagggcuugucucugugaug

SEQ ID NO: 126915 - RNA, 23 nt, Human
agagccugaaagacuucuggcac

SEQ ID NO: 126916 - RNA, 22 nt, Human
ucucugagcugcuucuugcaua

SEQ ID NO: 126917 - RNA, 22 nt, Human
caggagcagaggguggucagca

SEQ ID NO: 126918 - RNA, 22 nt, Human
aggcucaguucacgucaacuuu

SEQ ID NO: 126919 - RNA, 22 nt, Human
aggcugaggaucccuguguucu

SEQ ID NO: 126920 - RNA, 22 nt, Human
cugcugugcagacagacucucu

SEQ ID NO: 126921 - RNA, 22 nt, Human
aguggcagaagccaagucugca

SEQ ID NO: 126922 - RNA, 22 nt, Human
uagccgggugugguggaacucc

SEQ ID NO: 126923 - RNA, 22 nt, Human
uuugauuuacuggauauucuca

SEQ ID NO: 126924 - RNA, 22 nt, Human
uccaggcuggaaaugucaaacu

SEQ ID NO: 126925 - RNA, 22 nt, Human
gaguccaguaguuaggacagag

SEQ ID NO: 126926 - RNA, 22 nt, Human
agagaagggccuguauguaauc

SEQ ID NO: 126927 - RNA, 22 nt, Human
cuacccaggcuggagugcagua

SEQ ID NO: 126928 - RNA, 22 nt, Human
aguggcagagcaggugcuggaa

SEQ ID NO: 126929 - RNA, 22 nt, Human
gguccccguggaggcuggagcg

SEQ ID NO: 126930 - RNA, 22 nt, Human
gagggcugcugccagauaugcc

SEQ ID NO: 126931 - RNA, 22 nt, Human
guaauuaggaauaaaaugggaa

SEQ ID NO: 126932 - RNA, 22 nt, Human
uguugauuaguguuuagacuua

SEQ ID NO: 126933 - RNA, 19 nt, Human
agggccugcagcucaagcu

SEQ ID NO: 126934 - RNA, 18 nt, Human
uucaccagugugaugggu

SEQ ID NO: 126935 - RNA, 22 nt, Human
agaaauacuaggaauauucaua

SEQ ID NO: 126936 - RNA, 22 nt, Human
cagguggaucucuaaggacuga

SEQ ID NO: 126937 - RNA, 22 nt, Human
ggccaggagcaagccaggcucu

SEQ ID NO: 126938 - RNA, 22 nt, Human
aggagucacucagggcuucauc

SEQ ID NO: 126939 - RNA, 22 nt, Human
aggcugagcggggucccagagc

SEQ ID NO: 126940 - RNA, 22 nt, Human
agcagggcuuuggcuggcuuuc

SEQ ID NO: 126941 - RNA, 22 nt, Human
gccuggaguacuccuugaagug

SEQ ID NO: 126942 - RNA, 22 nt, Human
agcagggcuggauuuggcaaga

SEQ ID NO: 126943 - RNA, 23 nt, Human
agcauggaauaggaaagaggcag

SEQ ID NO: 126944 - RNA, 22 nt, Human
gucccaggaguugcugggccuu

SEQ ID NO: 126945 - RNA, 22 nt, Human
cauggcagugauucagccuuug

SEQ ID NO: 126946 - RNA, 22 nt, Human
guaggaaagggagugaagggaa

SEQ ID NO: 126947 - RNA, 21 nt, Human
aggaggaacccguggcugggc

SEQ ID NO: 126948 - RNA, 22 nt, Human
ucuggagcuggagggcaaggca

SEQ ID NO: 126949 - RNA, 22 nt, Human
ucucccaguccucugugcuuac

SEQ ID NO: 126950 - RNA, 17 nt, Human
uguuuucauucauugcu

SEQ ID NO: 126951 - RNA, 22 nt, Human
acacauaugguugcugcaguga

SEQ ID NO: 126952 - RNA, 20 nt, Human
agggucagagagcgugagug

SEQ ID NO: 126953 - RNA, 22 nt, Human
gagaaagauggaaucuuacagg

SEQ ID NO: 126954 - RNA, 22 nt, Human
ggccaggcgaugaccccuccac

SEQ ID NO: 126955 - RNA, 23 nt, Human
gccauggcugccccacaggccuc

SEQ ID NO: 126956 - RNA, 22 nt, Human
aggcuucagaaagaguaauugg

SEQ ID NO: 126957 - RNA, 22 nt, Human
ucagggcacugucaccugauau

SEQ ID NO: 126958 - RNA, 22 nt, Human
aggcagaggaaggguggauuug

SEQ ID NO: 126959 - RNA, 16 nt, Human
uggcugagagaggguu

SEQ ID NO: 126960 - RNA, 22 nt, Human
uacuguuuuuuagacucauggu

SEQ ID NO: 126961 - RNA, 20 nt, Human
agagugagacuccaucucag

SEQ ID NO: 126962 - RNA, 22 nt, Human
ugaggcagugcugggaagccug

SEQ ID NO: 126963 - RNA, 22 nt, Human
agagugaaaagcuagagcagua

SEQ ID NO: 126964 - RNA, 22 nt, Human
cucccaggguagggagagacua

SEQ ID NO: 126965 - RNA, 22 nt, Human
uggcagagcccagaacugagca

SEQ ID NO: 126966 - RNA, 22 nt, Human
gcaggaguguauuugcauguaa

SEQ ID NO: 126967 - RNA, 19 nt, Human
ucaaaggcaaggaggaacu

SEQ ID NO: 126968 - RNA, 22 nt, Human
ucagggcacguuucugcaaugc

SEQ ID NO: 126969 - RNA, 18 nt, Human
acaaaggucugcaagacc

SEQ ID NO: 126970 - RNA, 19 nt, Human
ugggcagcucccucugucc

SEQ ID NO: 126971 - RNA, 22 nt, Human
cagaggcaggauaagaacugcg

SEQ ID NO: 126972 - RNA, 22 nt, Human
acaugggaucaaugaggcaggc

SEQ ID NO: 126973 - RNA, 22 nt, Human
aggcugaggcuggcagcuccag

SEQ ID NO: 126974 - RNA, 21 nt, Human
ugcaggaaagugcugcgaccc

SEQ ID NO: 126975 - RNA, 22 nt, Human
ugccaggcgauugcuaucagca

SEQ ID NO: 126976 - RNA, 22 nt, Human
uucuugcucaaugucuguuuaa

SEQ ID NO: 126977 - RNA, 22 nt, Human
ucaggcagcauuaaacuucagc

SEQ ID NO: 126978 - RNA, 22 nt, Human
caggagcaguuagaagcccacu

SEQ ID NO: 126979 - RNA, 22 nt, Human
cagagcugucauuugccaguga

SEQ ID NO: 126980 - RNA, 22 nt, Human
cauucacagagggggaagcauc

SEQ ID NO: 126981 - RNA, 22 nt, Human
cuggacagaaaccaguccuggg

SEQ ID NO: 126982 - RNA, 22 nt, Human
caggguugcaugcaucuguggg

SEQ ID NO: 126983 - RNA, 22 nt, Human
cagggccaggcugauggccugg

SEQ ID NO: 126984 - RNA, 22 nt, Human
ucccagauucuucugugugggc

SEQ ID NO: 126985 - RNA, 22 nt, Human
ccugagugcuuccagagucaug

SEQ ID NO: 126986 - RNA, 22 nt, Human
uggcagaguuauggguauuuau

SEQ ID NO: 126987 - RNA, 22 nt, Human
ggcagcacgacaggaguggaag

SEQ ID NO: 126988 - RNA, 23 nt, Human
uuucacaaugagcauuacagaau

SEQ ID NO: 126989 - RNA, 22 nt, Human
auuccaaagcacaucagaacua

SEQ ID NO: 126990 - RNA, 22 nt, Human
ugaggcagcaauugauuauuca

SEQ ID NO: 126991 - RNA, 22 nt, Human
cagagcugguguuacaagucca

SEQ ID NO: 126992 - RNA, 22 nt, Human
ugggcagggucucuguuaucag

SEQ ID NO: 126993 - RNA, 21 nt, Human
gaaggagaaagcaagugcugc

SEQ ID NO: 126994 - RNA, 22 nt, Human
ucucugagcgcauuccuccggc

SEQ ID NO: 126995 - RNA, 22 nt, Human
gaggcagagucacaaagagucu

SEQ ID NO: 126996 - RNA, 22 nt, Human
agggcugacaguggcguggcgu

SEQ ID NO: 126997 - RNA, 22 nt, Human
gggggcaguaaggauauggaaa

SEQ ID NO: 126998 - RNA, 22 nt, Human
ugggccacgugacccuuacccu

SEQ ID NO: 126999 - RNA, 22 nt, Human
gaggcugggaaguccaagauca

SEQ ID NO: 127000 - RNA, 22 nt, Human
ccagggcaugggaagaacugaa

SEQ ID NO: 127001 - RNA, 22 nt, Human
agggcccucuggcaggccaggc

SEQ ID NO: 127002 - RNA, 22 nt, Human
ucaggcaggacaauuauuuagg

SEQ ID NO: 127003 - RNA, 20 nt, Human
ucucccaggcucagggaaga

SEQ ID NO: 127004 - RNA, 22 nt, Human
uccuguggaagacaguguuggg

SEQ ID NO: 127005 - RNA, 22 nt, Human
ggccagagaagucagacccuug

SEQ ID NO: 127006 - RNA, 22 nt, Human
uggcagagucaucacaucugga

SEQ ID NO: 127007 - RNA, 22 nt, Human
ugcagggccagacuggguugga

SEQ ID NO: 127008 - RNA, 22 nt, Human
agggcugagacuaaggccagau

SEQ ID NO: 127009 - RNA, 21 nt, Human
acagggcaugcagcuggcugu

SEQ ID NO: 127010 - RNA, 22 nt, Human
gaggcaggguguugauuacaga

SEQ ID NO: 127011 - RNA, 21 nt, Human
aggugcagagccagggaccag

SEQ ID NO: 127012 - RNA, 22 nt, Human
agaagccagcuucagcugcccg

SEQ ID NO: 127013 - RNA, 22 nt, Human
uaguggagaguuguuuugugca

SEQ ID NO: 127014 - RNA, 21 nt, Human
aaguggagaagaaaagcugga

SEQ ID NO: 127015 - RNA, 22 nt, Human
ccuuguccucugguuuccuguu

SEQ ID NO: 127016 - RNA, 22 nt, Human
cugcuguggaugcaggaccuca

SEQ ID NO: 127017 - RNA, 22 nt, Human
cugugacuagaccugcaggaga

SEQ ID NO: 127018 - RNA, 22 nt, Human
ucuuaagcagagaagaaguuga

SEQ ID NO: 127019 - RNA, 22 nt, Human
aaagaagggacagacugccucu

SEQ ID NO: 127020 - RNA, 22 nt, Human
gcagugauuggaucagagaugg

SEQ ID NO: 127021 - RNA, 22 nt, Human
gccaggcugcuccagggaggcc

SEQ ID NO: 127022 - RNA, 22 nt, Human
ggagaggaaaugccagcacuuc

SEQ ID NO: 127023 - RNA, 22 nt, Human
agccaggcugcaguuggcuggc

SEQ ID NO: 127024 - RNA, 22 nt, Human
gaggcacaguguuuggucagug

SEQ ID NO: 127025 - RNA, 22 nt, Human
cagagcuggguuugggaaaccu

SEQ ID NO: 127026 - RNA, 22 nt, Human
aguccagggcucucugugggau

SEQ ID NO: 127027 - RNA, 22 nt, Human
ggcugugagcaggcagaaugcu

SEQ ID NO: 127028 - RNA, 22 nt, Human
cugcugugcaggugccuaugau

SEQ ID NO: 127029 - RNA, 19 nt, Human
gaagaagcuugagaaguag

SEQ ID NO: 127030 - RNA, 22 nt, Human
gccaccagggggugcaaggucc

SEQ ID NO: 127031 - RNA, 22 nt, Human
acagcuguggucuccuuagugu

SEQ ID NO: 127032 - RNA, 22 nt, Human
aaagaacaauguggaaucuccu

SEQ ID NO: 127033 - RNA, 22 nt, Human
agagcagagggcucugggacaa

SEQ ID NO: 127034 - RNA, 22 nt, Human
caggcagggagcuggaaaggau

SEQ ID NO: 127035 - RNA, 22 nt, Human
gcagggcaucccugagcgggug

SEQ ID NO: 127036 - RNA, 22 nt, Human
ggagggagucagcugauuagaa

SEQ ID NO: 127037 - RNA, 22 nt, Human
aggcucaguucuguggugagcc

SEQ ID NO: 127038 - RNA, 22 nt, Human
ucaggcagaaaaaucacuaauu

SEQ ID NO: 127039 - RNA, 22 nt, Human
aggcgugggaggaucugaggcc

SEQ ID NO: 127040 - RNA, 22 nt, Human
ugccaggcuaaguggaggacuu

SEQ ID NO: 127041 - RNA, 22 nt, Human
agagccuggacuuuucugagcc

SEQ ID NO: 127042 - RNA, 22 nt, Human
aaguggagcuauaggcucagau

SEQ ID NO: 127043 - RNA, 22 nt, Human
cagggagcuggcuggcugugcc

SEQ ID NO: 127044 - RNA, 22 nt, Human
gaggggaagacuucuggacagu

SEQ ID NO: 127045 - RNA, 22 nt, Human
gaggcaggcccugaaugaguca

SEQ ID NO: 127046 - RNA, 22 nt, Human
agggcaugaagcaguggacagc

SEQ ID NO: 127047 - RNA, 22 nt, Human
cccagugccaggcacaggcagc

SEQ ID NO: 127048 - RNA, 22 nt, Human
ggagaaagcuguaguggaaugu

SEQ ID NO: 127049 - RNA, 22 nt, Human
agggcugcuuugcuaaauaugg

SEQ ID NO: 127050 - RNA, 22 nt, Human
cagccagggucaggcagcuucu

SEQ ID NO: 127051 - RNA, 22 nt, Human
cugaggcauguuacaggacaua

SEQ ID NO: 127052 - RNA, 22 nt, Human
gcagggaagacccggagcagcg

SEQ ID NO: 127053 - RNA, 22 nt, Human
ugaggcagugauguuuaagcac

SEQ ID NO: 127054 - RNA, 22 nt, Human
agcagccagaaauccagaggug

SEQ ID NO: 127055 - RNA, 22 nt, Human
ccagugcccagucucccugguc

SEQ ID NO: 127056 - RNA, 22 nt, Human
agggaggaucugcuccuugucu

SEQ ID NO: 127057 - RNA, 22 nt, Human
uggaggaaaaaaccaggcagag

SEQ ID NO: 127058 - RNA, 22 nt, Human
ggcagccagcaaugagaaguuu

SEQ ID NO: 127059 - RNA, 22 nt, Human
cagcccuggcuagggcgagggc

SEQ ID NO: 127060 - RNA, 22 nt, Human
auuccaaagacagaagcagcug

SEQ ID NO: 127061 - RNA, 22 nt, Human
gaggcugcacuggcuaaaggcu

SEQ ID NO: 127062 - RNA, 18 nt, Human
aggaaagaaaggcaggug

SEQ ID NO: 127063 - RNA, 22 nt, Human
gggcagagacucagaaacagaa

SEQ ID NO: 127064 - RNA, 22 nt, Human
uugcagaggcaaaaaugaacuc

SEQ ID NO: 127065 - RNA, 22 nt, Human
cugcugugcuuguggccacccg

SEQ ID NO: 127066 - RNA, 18 nt, Human
aggcaggugcuggaaguc

SEQ ID NO: 127067 - RNA, 22 nt, Human
gcacaggcacagagggccacug

SEQ ID NO: 127068 - RNA, 19 nt, Human
ggagaagcccaggaauccu

SEQ ID NO: 127069 - RNA, 21 nt, Human
ugcagaggcacaaacaagccc

SEQ ID NO: 127070 - RNA, 22 nt, Human
aaggcugugucagaagcucccu

SEQ ID NO: 127071 - RNA, 22 nt, Human
ugagccagaguggagugugccu

SEQ ID NO: 127072 - RNA, 22 nt, Human
cugagucucccggcaguggagg

SEQ ID NO: 127073 - RNA, 22 nt, Human
aaaugcaaggccaugugaagga

SEQ ID NO: 127074 - RNA, 22 nt, Human
ccagaaggcggagauugcagug

SEQ ID NO: 127075 - RNA, 22 nt, Human
gauggcaggcaggugaguagag

SEQ ID NO: 127076 - RNA, 22 nt, Human
gaguccaggcucagaaacccgu

SEQ ID NO: 127077 - RNA, 22 nt, Human
agaugugguaguugaagggaag

SEQ ID NO: 127078 - RNA, 22 nt, Human
cagcugaagagaggugcugagu

SEQ ID NO: 127079 - RNA, 17 nt, Human
ucucuuucccuuucugc

SEQ ID NO: 127080 - RNA, 23 nt, Human
aggcagugucucuuauccugucc

SEQ ID NO: 127081 - RNA, 22 nt, Human
auccagcuuugucuggucuucg

SEQ ID NO: 127082 - RNA, 22 nt, Human
aagggcagcuuaaauugguagc

SEQ ID NO: 127083 - RNA, 22 nt, Human
ggcagggcaggaaagucaggaa

SEQ ID NO: 127084 - RNA, 22 nt, Human
gaggcucaguuaugucaucagg

SEQ ID NO: 127085 - RNA, 22 nt, Human
gggaagccaugcucagagguac

SEQ ID NO: 127086 - RNA, 22 nt, Human
ccaucccuucaccacagcagua

SEQ ID NO: 127087 - RNA, 22 nt, Human
gggcagguggagggcccagcca

SEQ ID NO: 127088 - RNA, 22 nt, Human
gaaguggaagccaucggcaguc

SEQ ID NO: 127089 - RNA, 22 nt, Human
gccaggugggagacagacagca

SEQ ID NO: 127090 - RNA, 22 nt, Human
cgggcagcggcguggccauggu

SEQ ID NO: 127091 - RNA, 22 nt, Human
gaaugcuaagcaugugggaguu

SEQ ID NO: 127092 - RNA, 22 nt, Human
cagggcugugcccaucuucccc

SEQ ID NO: 127093 - RNA, 22 nt, Human
aauauaaauuccugggcccagc

SEQ ID NO: 127094 - RNA, 22 nt, Human
caggugucaaaauacuaagugg

SEQ ID NO: 127095 - RNA, 22 nt, Human
uggcaggaaaaagggccagagg

SEQ ID NO: 127096 - RNA, 23 nt, Human
gcugggcuuacucuuucagugag

SEQ ID NO: 127097 - RNA, 22 nt, Human
agccuggccaggccugcccagg

SEQ ID NO: 127098 - RNA, 19 nt, Human
gaggaggaaaacuagugua

SEQ ID NO: 127099 - RNA, 22 nt, Human
gcacccagaggucagcagugcu

SEQ ID NO: 127100 - RNA, 21 nt, Human
uuugagaauuggucagagugc

SEQ ID NO: 127101 - RNA, 22 nt, Human
augaggcaaggcuggccguguu

SEQ ID NO: 127102 - RNA, 22 nt, Human
gacaauuucucaauauagaaac

SEQ ID NO: 127103 - RNA, 22 nt, Human
ucugccugagcagagggaggcc

SEQ ID NO: 127104 - RNA, 22 nt, Human
gcaccugggacccagaggcacc

SEQ ID NO: 127105 - RNA, 19 nt, Human
cagauguuuucaguucauu

SEQ ID NO: 127106 - RNA, 22 nt, Human
ugcaguggugguaaagaugcuc

SEQ ID NO: 127107 - RNA, 22 nt, Human
ugaggcucaagaaagauuuguu

SEQ ID NO: 127108 - RNA, 22 nt, Human
cagggccaugaggcacaggguc

SEQ ID NO: 127109 - RNA, 22 nt, Human
aagggcagaauagagaagaugg

SEQ ID NO: 127110 - RNA, 22 nt, Human
ucucccaggcugcccuguggac

SEQ ID NO: 127111 - RNA, 22 nt, Human
ugcaggaguccaaucaggagac

SEQ ID NO: 127112 - RNA, 23 nt, Human
cccagaccuugugcugcccuugg

SEQ ID NO: 127113 - RNA, 22 nt, Human
aagcuggacucugccauuuacu

SEQ ID NO: 127114 - RNA, 20 nt, Human
aggcucagcugagcucuugg

SEQ ID NO: 127115 - RNA, 22 nt, Human
cccugcagacgucuugaugccu

SEQ ID NO: 127116 - RNA, 22 nt, Human
ucagggcaucucuuaaguggug

SEQ ID NO: 127117 - RNA, 22 nt, Human
ucaaaggcugcuugucuucugg

SEQ ID NO: 127118 - RNA, 21 nt, Human
uguggcagauguugggaggca

SEQ ID NO: 127119 - RNA, 22 nt, Human
ugaaggugaaugucuaugggga

SEQ ID NO: 127120 - RNA, 22 nt, Human
aaaagcaguuaucugggaggaa

SEQ ID NO: 127121 - RNA, 22 nt, Human
cugaggaggggccugagugaga

SEQ ID NO: 127122 - RNA, 22 nt, Human
ccagugcaggugagcaccaggu

SEQ ID NO: 127123 - RNA, 22 nt, Human
agaagggccagcuggacaccug

SEQ ID NO: 127124 - RNA, 22 nt, Human
gccagucugcucccacaaguuc

SEQ ID NO: 127125 - RNA, 22 nt, Human
ugaggcaggagguugagaacug

SEQ ID NO: 127126 - RNA, 22 nt, Human
cugagccagcgggcucacuuuu

SEQ ID NO: 127127 - RNA, 22 nt, Human
ccagcugcagguguuccagaug

SEQ ID NO: 127128 - RNA, 22 nt, Human
cagggcagaacauauagauagu

SEQ ID NO: 127129 - RNA, 22 nt, Human
uggcagagcuggcugcggauga

SEQ ID NO: 127130 - RNA, 22 nt, Human
agagcugcccacacagcagauu

SEQ ID NO: 127131 - RNA, 22 nt, Human
ugagaagcaguuucaguaagaa

SEQ ID NO: 127132 - RNA, 22 nt, Human
gggagaaggagcuaguucuuga

SEQ ID NO: 127133 - RNA, 22 nt, Human
agggcaugugggagaggagccu

SEQ ID NO: 127134 - RNA, 22 nt, Human
agggcagagagaugaaugggau

SEQ ID NO: 127135 - RNA, 22 nt, Human
cagaggacaauagaauggaaag

SEQ ID NO: 127136 - RNA, 22 nt, Human
uccaucaccauuucugcgagcu

SEQ ID NO: 127137 - RNA, 22 nt, Human
gcagggucuugagaggcagcca

SEQ ID NO: 127138 - RNA, 22 nt, Human
ucagggcagguuaacuugggug

SEQ ID NO: 127139 - RNA, 22 nt, Human
ugggcaggaugcguugauucuu

SEQ ID NO: 127140 - RNA, 22 nt, Human
ccagggcugguggcugcagagg

SEQ ID NO: 127141 - RNA, 22 nt, Human
accaggagccacaggaggagcc

SEQ ID NO: 127142 - RNA, 22 nt, Human
ucgccagggaugcuguaaggaa

SEQ ID NO: 127143 - RNA, 22 nt, Human
agcugacuucuugauccaauga

SEQ ID NO: 127144 - RNA, 22 nt, Human
ucagaggacagcagcuaaauaa

SEQ ID NO: 127145 - RNA, 22 nt, Human
ugaagccacacuagcuuguccu

SEQ ID NO: 127146 - RNA, 22 nt, Human
cagaagaguagcugaacaaguu

SEQ ID NO: 127147 - RNA, 23 nt, Human
ccagggccccuacaccacugucc

SEQ ID NO: 127148 - RNA, 22 nt, Human
gagaggcauggaacagauucuu

SEQ ID NO: 127149 - RNA, 22 nt, Human
cucagggcuggaaagccaggaa

SEQ ID NO: 127150 - RNA, 22 nt, Human
aaagaggauggaguagucagcu

SEQ ID NO: 127151 - RNA, 22 nt, Human
uaguggagaaguggagucugug

SEQ ID NO: 127152 - RNA, 22 nt, Human
ucugccugagggagcugaggaa

SEQ ID NO: 127153 - RNA, 22 nt, Human
ggagaggcuuggcccagccugg

SEQ ID NO: 127154 - RNA, 22 nt, Human
uggcagagacuccuccugggag

SEQ ID NO: 127155 - RNA, 22 nt, Human
gagggcugauguugccaccuca

SEQ ID NO: 127156 - RNA, 22 nt, Human
uggagagcaagucgcagacaug

SEQ ID NO: 127157 - RNA, 18 nt, Human
gugccaggaggcgcagcc

SEQ ID NO: 127158 - RNA, 22 nt, Human
agcaggaaggcuuuggggguuc

SEQ ID NO: 127159 - RNA, 22 nt, Human
ccagggcacguugggacaguac

SEQ ID NO: 127160 - RNA, 22 nt, Human
ggaggaagcacacggcuuguau

SEQ ID NO: 127161 - RNA, 22 nt, Human
aagucagcacuccaggaagcca

SEQ ID NO: 127162 - RNA, 22 nt, Human
cuggagugaagcuuauuuuuca

SEQ ID NO: 127163 - RNA, 22 nt, Human
gggcagagguucaacuucaaca

SEQ ID NO: 127164 - RNA, 18 nt, Human
gagaggagccagaauuuu

SEQ ID NO: 127165 - RNA, 22 nt, Human
ugaggcaggaaguuauauaaug

SEQ ID NO: 127166 - RNA, 20 nt, Human
ugaggcucagagagguugag

SEQ ID NO: 127167 - RNA, 22 nt, Human
cugggcagcugugcaaacaaua

SEQ ID NO: 127168 - RNA, 22 nt, Human
ucagcccugaggacagaggcag

SEQ ID NO: 127169 - RNA, 22 nt, Human
ugcagaggagcuggaaggcugg

SEQ ID NO: 127170 - RNA, 22 nt, Human
accagggcccgggagagcucuc

SEQ ID NO: 127171 - RNA, 22 nt, Human
uagggcagccacccaggcugcu

SEQ ID NO: 127172 - RNA, 22 nt, Human
cagcaggaccauugaggcauca

SEQ ID NO: 127173 - RNA, 22 nt, Human
uugggggaagaggauagacagu

SEQ ID NO: 127174 - RNA, 22 nt, Human
uggagcuggaauuugagcugga

SEQ ID NO: 127175 - RNA, 22 nt, Human
uaggcucagggcugggugacgg

SEQ ID NO: 127176 - RNA, 22 nt, Human
uuguccuuggaugaagcuggga

SEQ ID NO: 127177 - RNA, 22 nt, Human
gagccugcccagcccuguccac

SEQ ID NO: 127178 - RNA, 17 nt, Human
agaggcagauacuugga

SEQ ID NO: 127179 - RNA, 22 nt, Human
ccagccugaaaugccucauccu

SEQ ID NO: 127180 - RNA, 22 nt, Human
ucagaggaaaggucagauggcu

SEQ ID NO: 127181 - RNA, 22 nt, Human
gaguucaguaguuauagucuag

SEQ ID NO: 127182 - RNA, 22 nt, Human
agaggcaggagguugacuugag

SEQ ID NO: 127183 - RNA, 22 nt, Human
gcagaagggaauaaggagcuuu

SEQ ID NO: 127184 - RNA, 22 nt, Human
ggcuguggacacugagcucaga

SEQ ID NO: 127185 - RNA, 22 nt, Human
acccuggacuggggcugaggcu

SEQ ID NO: 127186 - RNA, 22 nt, Human
ugcagggaaugcuugcagcaug

SEQ ID NO: 127187 - RNA, 22 nt, Human
ucuaauccuugcuaccugggug

SEQ ID NO: 127188 - RNA, 22 nt, Human
ugccagucucacccuggguccu

SEQ ID NO: 127189 - RNA, 22 nt, Human
gagcacagggaauagacagaua

SEQ ID NO: 127190 - RNA, 22 nt, Human
ugaggcaggaguuaaugugcuc

SEQ ID NO: 127191 - RNA, 22 nt, Human
agugggcaggcagggugcgcag

SEQ ID NO: 127192 - RNA, 22 nt, Human
ggcugugaacccuggcagugug

SEQ ID NO: 127193 - RNA, 22 nt, Human
uggcugaguucuccaggaguag

SEQ ID NO: 127194 - RNA, 22 nt, Human
uguauuuaagcuuuaccuaaaa

SEQ ID NO: 127195 - RNA, 22 nt, Human
agggccagggaagcuguauuuu

SEQ ID NO: 127196 - RNA, 21 nt, Human
aggcccagagucuugggggga

SEQ ID NO: 127197 - RNA, 22 nt, Human
agagccuguacuuuucugugaa

SEQ ID NO: 127198 - RNA, 22 nt, Human
gcagugaaaaagugcacccugu

SEQ ID NO: 127199 - RNA, 21 nt, Human
uggcagaguugaguaguuaug

SEQ ID NO: 127200 - RNA, 22 nt, Human
agggucaguucugugagguguu

SEQ ID NO: 127201 - RNA, 22 nt, Human
gugugcagggcugccugugccg

SEQ ID NO: 127202 - RNA, 22 nt, Human
gaggcagugaacaauuccugug

SEQ ID NO: 127203 - RNA, 22 nt, Human
cagagcucagagcugccaggca

SEQ ID NO: 127204 - RNA, 22 nt, Human
agguaguguagcugagugggau

SEQ ID NO: 127205 - RNA, 22 nt, Human
gcaccaggcuuagagccccagg

SEQ ID NO: 127206 - RNA, 22 nt, Human
ucccacugugccuguuguaauc

SEQ ID NO: 127207 - RNA, 22 nt, Human
cagaggaaaugggaaggagaua

SEQ ID NO: 127208 - RNA, 23 nt, Human
agcagggccagaauacuugcugu

SEQ ID NO: 127209 - RNA, 21 nt, Human
acagccugucaucucaugguc

SEQ ID NO: 127210 - RNA, 23 nt, Human
gacacaggagcacccagcugagc

SEQ ID NO: 127211 - RNA, 22 nt, Human
ugaggaaguugaucucaucagu

SEQ ID NO: 127212 - RNA, 22 nt, Human
gagucacaaaagaugcccaggg

SEQ ID NO: 127213 - RNA, 22 nt, Human
gcauggcauuaacaagauggaa

SEQ ID NO: 127214 - RNA, 20 nt, Human
agagccuggaaaaagacauc

SEQ ID NO: 127215 - RNA, 18 nt, Human
aggugcagccucugaggc

SEQ ID NO: 127216 - RNA, 22 nt, Human
cacaggagaacccacagauucu

SEQ ID NO: 127217 - RNA, 22 nt, Human
gggcugagggguaucucauggg

SEQ ID NO: 127218 - RNA, 22 nt, Human
uaguggaguagaaaccaaagaa

SEQ ID NO: 127219 - RNA, 22 nt, Human
ucagaaaugaucguuauucauu

SEQ ID NO: 127220 - RNA, 22 nt, Human
acagagcugggaucugaaccca

SEQ ID NO: 127221 - RNA, 22 nt, Human
gcagccacccucaaggcugaau

SEQ ID NO: 127222 - RNA, 22 nt, Human
ccaguggccaugcacgagcagc

SEQ ID NO: 127223 - RNA, 22 nt, Human
agaggcugaaugaugucaucau

SEQ ID NO: 127224 - RNA, 22 nt, Human
ugugaaggcagagccagugaaa

SEQ ID NO: 127225 - RNA, 22 nt, Human
gcauggcaaauaucgagggcag

SEQ ID NO: 127226 - RNA, 22 nt, Human
gcagccuguuguaccagccugu

SEQ ID NO: 127227 - RNA, 22 nt, Human
gaggccagaagucugagaucag

SEQ ID NO: 127228 - RNA, 22 nt, Human
gggcugagggccaauuccuacu

SEQ ID NO: 127229 - RNA, 22 nt, Human
cagaggaggcgguauacacugc

SEQ ID NO: 127230 - RNA, 22 nt, Human
cuuauuuuaagucaguuugggu

SEQ ID NO: 127231 - RNA, 22 nt, Human
aaguggugguaugaaccgaggg

SEQ ID NO: 127232 - RNA, 22 nt, Human
uggaggcaacugaagauguagu

SEQ ID NO: 127233 - RNA, 22 nt, Human
acagagcuaauguugcauaggc

SEQ ID NO: 127234 - RNA, 20 nt, Human
aggcucaggguguuuaggaa

SEQ ID NO: 127235 - RNA, 22 nt, Human
gagggcugauaacaggaauaca

SEQ ID NO: 127236 - RNA, 22 nt, Human
gccuggaguucagccaaguccc

SEQ ID NO: 127237 - RNA, 23 nt, Human
caguggagacucaugcuuccuua

SEQ ID NO: 127238 - RNA, 22 nt, Human
agggccacaguggggccugaga

SEQ ID NO: 127239 - RNA, 22 nt, Human
aaggagucugggccauucagag

SEQ ID NO: 127240 - RNA, 22 nt, Human
cugcaguguucuggaaugcauu

SEQ ID NO: 127241 - RNA, 18 nt, Human
cagcugugcccuguuugg

SEQ ID NO: 127242 - RNA, 22 nt, Human
aaagccagcucugagcugcacc

SEQ ID NO: 127243 - RNA, 22 nt, Human
gaagggugugugugagggacac

SEQ ID NO: 127244 - RNA, 22 nt, Human
acagagcuguacaugugccaug

SEQ ID NO: 127245 - RNA, 22 nt, Human
caggcccagugaucagggcucu

SEQ ID NO: 127246 - RNA, 22 nt, Human
ugggcugaaaugcuguggacua

SEQ ID NO: 127247 - RNA, 22 nt, Human
cacaggcagccuuguagaagaa

SEQ ID NO: 127248 - RNA, 20 nt, Human
aggcugggguguuuugccca

SEQ ID NO: 127249 - RNA, 22 nt, Human
uccuggccuugcuccugaugcc

SEQ ID NO: 127250 - RNA, 22 nt, Human
agccagggagguggagguugca

SEQ ID NO: 127251 - RNA, 23 nt, Human
uuacuuuugcaccaaccuaauau

SEQ ID NO: 127252 - RNA, 22 nt, Human
aaaugcagcagcuaauugaaaa

SEQ ID NO: 127253 - RNA, 22 nt, Human
acaggcugcugggcuccgugcu

SEQ ID NO: 127254 - RNA, 22 nt, Human
uuucccaaguguaaacauggca

SEQ ID NO: 127255 - RNA, 22 nt, Human
ucuugcacuucaugaauauguu

SEQ ID NO: 127256 - RNA, 17 nt, Human
aguggcaggcagauggg

SEQ ID NO: 127257 - RNA, 22 nt, Human
gggugcagggucuccagcagcu

SEQ ID NO: 127258 - RNA, 22 nt, Human
ugaggcagguggauuacaaggu

SEQ ID NO: 127259 - RNA, 22 nt, Human
gaaagccaucuggcugcuggga

SEQ ID NO: 127260 - RNA, 20 nt, Human
agccaggcucaagcuccccc

SEQ ID NO: 127261 - RNA, 22 nt, Human
cagcaucccucaggggccucug

SEQ ID NO: 127262 - RNA, 22 nt, Human
uccugccugagcguggaggagg

SEQ ID NO: 127263 - RNA, 22 nt, Human
uggaggcagucaaaugacugac

SEQ ID NO: 127264 - RNA, 22 nt, Human
aggcagguuucccggcugucaa

SEQ ID NO: 127265 - RNA, 22 nt, Human
agaagugagugugacucagcag

SEQ ID NO: 127266 - RNA, 22 nt, Human
cauccugcggggagcagagggc

SEQ ID NO: 127267 - RNA, 22 nt, Human
uggagaagauuggucaccauuc

SEQ ID NO: 127268 - RNA, 22 nt, Human
acccuguaugcuauaucccuaa

SEQ ID NO: 127269 - RNA, 22 nt, Human
agcaggggcaggguuuugugcu

SEQ ID NO: 127270 - RNA, 22 nt, Human
agcagggcuguguagguaauga

SEQ ID NO: 127271 - RNA, 22 nt, Human
ugggcugaguguggaacuaguu

SEQ ID NO: 127272 - RNA, 19 nt, Human
uggaagaggaagggaaaua

SEQ ID NO: 127273 - RNA, 22 nt, Human
gagugcaguaugagaggcugcu

SEQ ID NO: 127274 - RNA, 22 nt, Human
accaggcuggagugcaguggcg

SEQ ID NO: 127275 - RNA, 21 nt, Human
cacuauuuauauaugccagcu

SEQ ID NO: 127276 - RNA, 22 nt, Human
acacaaacagucuauagcacca

SEQ ID NO: 127277 - RNA, 22 nt, Human
agauguggauccuaggguagaa

SEQ ID NO: 127278 - RNA, 22 nt, Human
ucacauuuguguuuuauuagag

SEQ ID NO: 127279 - RNA, 22 nt, Human
uccugguggugccagcugcagg

SEQ ID NO: 127280 - RNA, 22 nt, Human
gaggaagaagcaaaccagcuaa

SEQ ID NO: 127281 - RNA, 22 nt, Human
aggaggggcaaugauagucugg

SEQ ID NO: 127282 - RNA, 22 nt, Human
caguggcgugaucucugcucac

SEQ ID NO: 127283 - RNA, 22 nt, Human
uggcucaguagcagugugguca

SEQ ID NO: 127284 - RNA, 22 nt, Human
agcagggcaaagucaggcuaac

SEQ ID NO: 127285 - RNA, 22 nt, Human
acagggcagugucuugaaaaau

SEQ ID NO: 127286 - RNA, 22 nt, Human
caguucagcuagaagaaacaaa

SEQ ID NO: 127287 - RNA, 22 nt, Human
gcuucucgggccugaugucguc

SEQ ID NO: 127288 - RNA, 22 nt, Human
uuucuggcagcgggacaggggu

SEQ ID NO: 127289 - RNA, 22 nt, Human
accagggcaaauguuuguacuc

SEQ ID NO: 127290 - RNA, 22 nt, Human
gacaugcaugaaugcaggucuc

SEQ ID NO: 127291 - RNA, 22 nt, Human
cugcuguguuggcauuggauag

SEQ ID NO: 127292 - RNA, 22 nt, Human
aggcucagccugggccuagagc

SEQ ID NO: 127293 - RNA, 18 nt, Human
ugaggcagucagugaugg

SEQ ID NO: 127294 - RNA, 22 nt, Human
ugcacuccaggcugggugacag

SEQ ID NO: 127295 - RNA, 22 nt, Human
cugcugugggcaggguagcugg

SEQ ID NO: 127296 - RNA, 22 nt, Human
agaggcagcagucauacuacag

SEQ ID NO: 127297 - RNA, 22 nt, Human
agccugcuggaccaagcucaug

SEQ ID NO: 127298 - RNA, 22 nt, Human
aggggccauuguucugcccgcu

SEQ ID NO: 127299 - RNA, 16 nt, Human
agcagggcgggaagga

SEQ ID NO: 127300 - RNA, 22 nt, Human
ugccagaguuacaugaggguca

SEQ ID NO: 127301 - RNA, 22 nt, Human
caaggcaguuccccagagggcu

SEQ ID NO: 127302 - RNA, 22 nt, Human
cuggagggggaaauguucauug

SEQ ID NO: 127303 - RNA, 22 nt, Human
caggcagccugagggaucuggg

SEQ ID NO: 127304 - RNA, 22 nt, Human
gaggaaggcuaaggggcuuaga

SEQ ID NO: 127305 - RNA, 22 nt, Human
ucaccaggcaacuauguacucc

SEQ ID NO: 127306 - RNA, 22 nt, Human
ggggcagccuccaggaaagcug

SEQ ID NO: 127307 - RNA, 22 nt, Human
ugcagggccuuguugaugugcu

SEQ ID NO: 127308 - RNA, 22 nt, Human
uuguacuugccauagaacaaca

SEQ ID NO: 127309 - RNA, 23 nt, Human
cagagcugauuaaacuuaaucuc

SEQ ID NO: 127310 - RNA, 22 nt, Human
uugcucugauuagguggaaaca

SEQ ID NO: 127311 - RNA, 20 nt, Human
uucugcuugcaaauaucaag

SEQ ID NO: 127312 - RNA, 22 nt, Human
gggacaggcugagacuugagcu

SEQ ID NO: 127313 - RNA, 22 nt, Human
ugaggcaggagaauggcgggaa

SEQ ID NO: 127314 - RNA, 22 nt, Human
aggcaguggagcuggaauaggc

SEQ ID NO: 127315 - RNA, 23 nt, Human
ucucugaguuguacuuucccuug

SEQ ID NO: 127316 - RNA, 23 nt, Human
ccuggaguacuaaggggauggaa

SEQ ID NO: 127317 - RNA, 22 nt, Human
ucuggaaguuagaggaggaaag

SEQ ID NO: 127318 - RNA, 22 nt, Human
aaggccaggagacuuggaguca

SEQ ID NO: 127319 - RNA, 22 nt, Human
ugcacacacucugcauauacuu

SEQ ID NO: 127320 - RNA, 22 nt, Human
uagaugaccuuguguuaggcaa

SEQ ID NO: 127321 - RNA, 22 nt, Human
aagagcugcacauauuuauauc

SEQ ID NO: 127322 - RNA, 19 nt, Human
ggcuggaguggccaucugu

SEQ ID NO: 127323 - RNA, 22 nt, Human
gcagggcaggauuugaacccag

SEQ ID NO: 127324 - RNA, 22 nt, Human
gccuggagggcucuagagaggc

SEQ ID NO: 127325 - RNA, 22 nt, Human
agaggaggccaggcccacaccu

SEQ ID NO: 127326 - RNA, 22 nt, Human
uacuuguuaucaucuuuuccuu

SEQ ID NO: 127327 - RNA, 22 nt, Human
aagggcagggaguuugugucua

SEQ ID NO: 127328 - RNA, 22 nt, Human
cuagggcacuaggacucaugug

SEQ ID NO: 127329 - RNA, 22 nt, Human
cugagcagccccaccagccauu

SEQ ID NO: 127330 - RNA, 22 nt, Human
accagggcacaggagucugaag

SEQ ID NO: 127331 - RNA, 22 nt, Human
aagagcugugggugguaguccu

SEQ ID NO: 127332 - RNA, 22 nt, Human
ugagaggcagaauggugccugc

SEQ ID NO: 127333 - RNA, 21 nt, Human
gguugguguguccaguggcca

SEQ ID NO: 127334 - RNA, 22 nt, Human
gaggagaaauuauccuuggugu

SEQ ID NO: 127335 - RNA, 21 nt, Human
uagggcaggcauuggaagaga

SEQ ID NO: 127336 - RNA, 22 nt, Human
augggcagcugcagcaguggug

SEQ ID NO: 127337 - RNA, 22 nt, Human
ggcagaguugguggagucaguu

SEQ ID NO: 127338 - RNA, 22 nt, Human
guccaagagucaagaagggggc

SEQ ID NO: 127339 - RNA, 22 nt, Human
guguccuuuuaugugacugguu

SEQ ID NO: 127340 - RNA, 22 nt, Human
ccagaagagaucacaguucuug

SEQ ID NO: 127341 - RNA, 21 nt, Human
gcugcucgagauccagugcuu

SEQ ID NO: 127342 - RNA, 22 nt, Human
ggcagggcccugauuccugggg

SEQ ID NO: 127343 - RNA, 22 nt, Human
cuggccagguuuugaacaguug

SEQ ID NO: 127344 - RNA, 22 nt, Human
agagccugggaauuugcauguu

SEQ ID NO: 127345 - RNA, 22 nt, Human
ucugugaacaucacauugacag

SEQ ID NO: 127346 - RNA, 18 nt, Human
ccucacagacuuccaugu

SEQ ID NO: 127347 - RNA, 22 nt, Human
aggcagccuuuagacagucugc

SEQ ID NO: 127348 - RNA, 18 nt, Human
gugagcagagagcaucac

SEQ ID NO: 127349 - RNA, 22 nt, Human
gcugaggccccagggugauggg

SEQ ID NO: 127350 - RNA, 22 nt, Human
gcagaggagcaaguugcuacag

SEQ ID NO: 127351 - RNA, 19 nt, Human
agcuguggggccuagcacc

SEQ ID NO: 127352 - RNA, 22 nt, Human
uagaggcauuaaugaauaaaca

SEQ ID NO: 127353 - RNA, 22 nt, Human
ugaggcaguugagcuuccugag

SEQ ID NO: 127354 - RNA, 22 nt, Human
uuccucagccagcacuuagggg

SEQ ID NO: 127355 - RNA, 21 nt, Human
cccaagggaggcaggauaagg

SEQ ID NO: 127356 - RNA, 22 nt, Human
acccaggacucucuuccaguag

SEQ ID NO: 127357 - RNA, 22 nt, Human
uuuauccauucaccaguugaac

SEQ ID NO: 127358 - RNA, 22 nt, Human
acagggcagaaauguugcaucu

SEQ ID NO: 127359 - RNA, 22 nt, Human
caguggaggcucaagugugcuu

SEQ ID NO: 127360 - RNA, 17 nt, Human
agccugcugaucucaca

SEQ ID NO: 127361 - RNA, 22 nt, Human
ugaggaaacugaggcacagaug

SEQ ID NO: 127362 - RNA, 22 nt, Human
augaggcaaggaucagguaagg

SEQ ID NO: 127363 - RNA, 22 nt, Human
ugggcaggcaagugaauaccuu

SEQ ID NO: 127364 - RNA, 22 nt, Human
gaggcaguuugccaugccagga

SEQ ID NO: 127365 - RNA, 22 nt, Human
cagcugagcucccaggccauca

SEQ ID NO: 127366 - RNA, 22 nt, Human
ggcagaggaaggaugaauucac

SEQ ID NO: 127367 - RNA, 22 nt, Human
cagaaggcauagaugaaggccu

SEQ ID NO: 127368 - RNA, 22 nt, Human
guauuauuggguaguaugguaa

SEQ ID NO: 127369 - RNA, 22 nt, Human
uagggcagauucgguggaguuu

SEQ ID NO: 127370 - RNA, 20 nt, Human
cagagcuguuauggaugaug

SEQ ID NO: 127371 - RNA, 22 nt, Human
aggugcuggaguagaagaaaaa

SEQ ID NO: 127372 - RNA, 22 nt, Human
ucucugagcccaauguagcaau

SEQ ID NO: 127373 - RNA, 22 nt, Human
cugaggcaguuuaauuuuugaa

SEQ ID NO: 127374 - RNA, 22 nt, Human
ccagagcugaugggcccagggu

SEQ ID NO: 127375 - RNA, 22 nt, Human
aguucaggcauaaggcaugaac

SEQ ID NO: 127376 - RNA, 22 nt, Human
aggguaggguaaaugaugcauc

SEQ ID NO: 127377 - RNA, 21 nt, Human
ugucagcaacaauacuuucuc

SEQ ID NO: 127378 - RNA, 18 nt, Human
cugcugugucgucugggc

SEQ ID NO: 127379 - RNA, 22 nt, Human
uaggcaggcugaauguagauuu

SEQ ID NO: 127380 - RNA, 22 nt, Human
uguggcaggcaagauguacaga

SEQ ID NO: 127381 - RNA, 22 nt, Human
auacaaagcuaaauaugguuuc

SEQ ID NO: 127382 - RNA, 22 nt, Human
gugcuugggggaaguaacagac

SEQ ID NO: 127383 - RNA, 22 nt, Human
uggcagugggaagcuggaaguc

SEQ ID NO: 127384 - RNA, 22 nt, Human
caggggaagaugccaagggaga

SEQ ID NO: 127385 - RNA, 20 nt, Human
gaaggaagggggcaagguga

SEQ ID NO: 127386 - RNA, 22 nt, Human
ugaagggcaaccccaggcccag

SEQ ID NO: 127387 - RNA, 22 nt, Human
ucauccaguaugacuggugucu

SEQ ID NO: 127388 - RNA, 23 nt, Human
gggcagguuuuuauaggcuucag

SEQ ID NO: 127389 - RNA, 22 nt, Human
ggaaagagcuaaaagggugaga

SEQ ID NO: 127390 - RNA, 22 nt, Human
agggccagcccauaaugccaaa

SEQ ID NO: 127391 - RNA, 22 nt, Human
aggcaggccccugagaauagac

SEQ ID NO: 127392 - RNA, 22 nt, Human
gccuggaguggacuuggccccu

SEQ ID NO: 127393 - RNA, 19 nt, Human
ucugugcugggaggcagca

SEQ ID NO: 127394 - RNA, 22 nt, Human
caggaggcaucauggagcggac

SEQ ID NO: 127395 - RNA, 22 nt, Human
uuuuaucaaucauuaagacauu

SEQ ID NO: 127396 - RNA, 22 nt, Human
accagugcuuccugcuggagcu

SEQ ID NO: 127397 - RNA, 22 nt, Human
ggcagaccucuccagccccaca

SEQ ID NO: 127398 - RNA, 22 nt, Human
agcugaggaggaaugaugggua

SEQ ID NO: 127399 - RNA, 19 nt, Human
gcaucagagcagaaggggu

SEQ ID NO: 127400 - RNA, 22 nt, Human
gcaccugguuuauauaaucaua

SEQ ID NO: 127401 - RNA, 22 nt, Human
cauccugguuaccccauaguca

SEQ ID NO: 127402 - RNA, 22 nt, Human
cugccaggccucaucccagcca

SEQ ID NO: 127403 - RNA, 22 nt, Human
acauucuguuuccccaaagaga

SEQ ID NO: 127404 - RNA, 22 nt, Human
agcagggcugcggccccaccac

SEQ ID NO: 127405 - RNA, 22 nt, Human
gccacaugucaugugcucagua

SEQ ID NO: 127406 - RNA, 22 nt, Human
gggcagaggggcgcuucccucu

SEQ ID NO: 127407 - RNA, 22 nt, Human
agggcccuaaggaaggcacaca

SEQ ID NO: 127408 - RNA, 22 nt, Human
agcaugaaagcauaggacaguc

SEQ ID NO: 127409 - RNA, 22 nt, Human
gaggcugguaggaaaggaaaca

SEQ ID NO: 127410 - RNA, 22 nt, Human
agggagguccaucccugcagag

SEQ ID NO: 127411 - RNA, 22 nt, Human
ggagaugccagaauugcaaauu

SEQ ID NO: 127412 - RNA, 22 nt, Human
agagcugcaggguggacccagg

SEQ ID NO: 127413 - RNA, 22 nt, Human
acauuugacauuuaguaucagc

SEQ ID NO: 127414 - RNA, 18 nt, Human
gcaaggcucaggccaggc

SEQ ID NO: 127415 - RNA, 22 nt, Human
ucagggcauguauguuucuuua

SEQ ID NO: 127416 - RNA, 22 nt, Human
aggcagcagacuguuaaucaga

SEQ ID NO: 127417 - RNA, 22 nt, Human
uggagagcgugcuuagcacucu

SEQ ID NO: 127418 - RNA, 22 nt, Human
caaaggcuucaucucagagcag

SEQ ID NO: 127419 - RNA, 22 nt, Human
cagagcauaauugacaugaggu

SEQ ID NO: 127420 - RNA, 22 nt, Human
aguggcagcugucaugcccuag

SEQ ID NO: 127421 - RNA, 22 nt, Human
ugcagggccuucuagaccaugg

SEQ ID NO: 127422 - RNA, 22 nt, Human
cccagccugucuuucccaauga

SEQ ID NO: 127423 - RNA, 22 nt, Human
ucagaggaucaugucccuacuc

SEQ ID NO: 127424 - RNA, 22 nt, Human
augggcaguuaggaggccagga

SEQ ID NO: 127425 - RNA, 22 nt, Human
auccuucagcugcccuguuacc

SEQ ID NO: 127426 - RNA, 22 nt, Human
uggcagagcaaaaagauagaau

SEQ ID NO: 127427 - RNA, 22 nt, Human
ggggcaggagcccuucuucagc

SEQ ID NO: 127428 - RNA, 22 nt, Human
ucaguggauuggaugagaucug

SEQ ID NO: 127429 - RNA, 22 nt, Human
aaggugucacugggacaggaaa

SEQ ID NO: 127430 - RNA, 22 nt, Human
agaagugcuccagugaguuggg

SEQ ID NO: 127431 - RNA, 22 nt, Human
aggaaggguucuuugugaaaga

SEQ ID NO: 127432 - RNA, 22 nt, Human
uggaggaauaacagcaaccuua

SEQ ID NO: 127433 - RNA, 22 nt, Human
acagggcagguggcuacugguc

SEQ ID NO: 127434 - RNA, 22 nt, Human
agcagccacccagcugcucauu

SEQ ID NO: 127435 - RNA, 22 nt, Human
uggcucaggaucuaagcagaau

SEQ ID NO: 127436 - RNA, 17 nt, Human
gcuuuggaaggguagac

SEQ ID NO: 127437 - RNA, 22 nt, Human
guggcaggucccauuggagcag

SEQ ID NO: 127438 - RNA, 22 nt, Human
ugccaggcagugucagauugag

SEQ ID NO: 127439 - RNA, 20 nt, Human
gccaacgcgcuggggcugcc

SEQ ID NO: 127440 - RNA, 22 nt, Human
cugagaggcggagcuugcagug

SEQ ID NO: 127441 - RNA, 22 nt, Human
cagaggaagcagacacaucuug

SEQ ID NO: 127442 - RNA, 22 nt, Human
cuucccacagaauucaaucagu

SEQ ID NO: 127443 - RNA, 22 nt, Human
cggcagagugugugcgugcaug

SEQ ID NO: 127444 - RNA, 22 nt, Human
ucacauuugcaauugcauuguu

SEQ ID NO: 127445 - RNA, 22 nt, Human
agcuggggcugcagagaacagg

SEQ ID NO: 127446 - RNA, 22 nt, Human
agcugccccaugagaggcaggu

SEQ ID NO: 127447 - RNA, 22 nt, Human
uccuccucuaucagacagugcc

SEQ ID NO: 127448 - RNA, 22 nt, Human
ccagaggaguugaggcuuuggg

SEQ ID NO: 127449 - RNA, 22 nt, Human
gccaggcuggccagcaccuucu

SEQ ID NO: 127450 - RNA, 23 nt, Human
aggcagagccaaggucaaaaccc

SEQ ID NO: 127451 - RNA, 22 nt, Human
uccaaaaaacguuugaauaguu

SEQ ID NO: 127452 - RNA, 22 nt, Human
aagcuggaacaucuugaggaag

SEQ ID NO: 127453 - RNA, 22 nt, Human
aguggcagacacaaugugggca

SEQ ID NO: 127454 - RNA, 22 nt, Human
ggccugaggcgucccagcugug

SEQ ID NO: 127455 - RNA, 22 nt, Human
ugaggcagaguaagauacauga

SEQ ID NO: 127456 - RNA, 22 nt, Human
cccaggugggcaccucgaggaa

SEQ ID NO: 127457 - RNA, 22 nt, Human
uggcucagucauggaugaguaa

SEQ ID NO: 127458 - RNA, 22 nt, Human
uggucgaccaguuggaaaguaa

SEQ ID NO: 127459 - RNA, 19 nt, Human
ucugaaguccagggcauac

SEQ ID NO: 127460 - RNA, 21 nt, Human
gcugugcacauaguagaagug

SEQ ID NO: 127461 - RNA, 22 nt, Human
agggcagaaguacagacacuua

SEQ ID NO: 127462 - RNA, 22 nt, Human
aggaagcccaagucucaucuuc

SEQ ID NO: 127463 - RNA, 22 nt, Human
agcagggcuucugugccugugc

SEQ ID NO: 127464 - RNA, 22 nt, Human
gguggaaggccuggaaggaggc

SEQ ID NO: 127465 - RNA, 22 nt, Human
aggcaggcaaccaccugggaag

SEQ ID NO: 127466 - RNA, 22 nt, Human
gaaggcuaaaggggcagagguu

SEQ ID NO: 127467 - RNA, 22 nt, Human
uaucaacauuaauauuuucugg

SEQ ID NO: 127468 - RNA, 18 nt, Human
guucaaggucaagagaga

SEQ ID NO: 127469 - RNA, 22 nt, Human
acagagcuguacuacuuacuga

SEQ ID NO: 127470 - RNA, 22 nt, Human
uaggggaacuggcacagggcag

SEQ ID NO: 127471 - RNA, 20 nt, Human
ucacauccucucccaacaug

SEQ ID NO: 127472 - RNA, 22 nt, Human
gcaggaagccuuaccaagccca

SEQ ID NO: 127473 - RNA, 22 nt, Human
uggaggaaguggacaguugugu

SEQ ID NO: 127474 - RNA, 22 nt, Human
agcagggccaacaguaaacacc

SEQ ID NO: 127475 - RNA, 22 nt, Human
gugccagggggcacugaacaga

SEQ ID NO: 127476 - RNA, 22 nt, Human
cagccagugguugaagaugcag

SEQ ID NO: 127477 - RNA, 22 nt, Human
agggcugagcccaggcauguag

SEQ ID NO: 127478 - RNA, 22 nt, Human
gagagggcucuguguggguacu

SEQ ID NO: 127479 - RNA, 22 nt, Human
aggcucagggacucccucccuc

SEQ ID NO: 127480 - RNA, 23 nt, Human
cugcuguguuggucucgauggga

SEQ ID NO: 127481 - RNA, 22 nt, Human
ucauuuucacacauaaauagca

SEQ ID NO: 127482 - RNA, 22 nt, Human
gaagaaggugcuacacagggca

SEQ ID NO: 127483 - RNA, 22 nt, Human
aguauggggcugugugugcaca

SEQ ID NO: 127484 - RNA, 22 nt, Human
gggcagguuggcaucccgggca

SEQ ID NO: 127485 - RNA, 22 nt, Human
uggcagagaauaaaucuugacu

SEQ ID NO: 127486 - RNA, 22 nt, Human
ugcagggcuauaacuccauucu

SEQ ID NO: 127487 - RNA, 22 nt, Human
cauggcagaaaccugagcugcu

SEQ ID NO: 127488 - RNA, 22 nt, Human
aggcugagggcuccugagggca

SEQ ID NO: 127489 - RNA, 22 nt, Human
gcugugcagauguagggagugg

SEQ ID NO: 127490 - RNA, 22 nt, Human
uggcugagaaaaugguuuuagg

SEQ ID NO: 127491 - RNA, 22 nt, Human
cccaggucccgccccagcucua

SEQ ID NO: 127492 - RNA, 22 nt, Human
ugacuccaaacagaaaacgaau

SEQ ID NO: 127493 - RNA, 22 nt, Human
aggcucagacaggaaaaguaac

SEQ ID NO: 127494 - RNA, 21 nt, Human
ccagagagagggaaguggguu

SEQ ID NO: 127495 - RNA, 18 nt, Human
ucagaggagauaccuaaa

SEQ ID NO: 127496 - RNA, 22 nt, Human
gcuguggcugaccaccaggggg

SEQ ID NO: 127497 - RNA, 22 nt, Human
ucaggcugaaggaggccuaucu

SEQ ID NO: 127498 - RNA, 22 nt, Human
uccaggcucucaggugucagca

SEQ ID NO: 127499 - RNA, 22 nt, Human
aggcagaugguaacugugauau

SEQ ID NO: 127500 - RNA, 22 nt, Human
ugcagggcacacgcacgggugu

SEQ ID NO: 127501 - RNA, 23 nt, Human
aggagaagagauuuccacaugca

SEQ ID NO: 127502 - RNA, 22 nt, Human
ugaguccacuuuaaaaugucag

SEQ ID NO: 127503 - RNA, 22 nt, Human
gaggcucagagacuuuaaguuu

SEQ ID NO: 127504 - RNA, 22 nt, Human
aggcccagacucagcggggcgg

SEQ ID NO: 127505 - RNA, 18 nt, Human
gcagugaagaaagagcuu

SEQ ID NO: 127506 - RNA, 22 nt, Human
ugaggcucagaaauguaaguuu

SEQ ID NO: 127507 - RNA, 22 nt, Human
ugccaggcuguccugggccugg

SEQ ID NO: 127508 - RNA, 22 nt, Human
agggaggcaggaaaguugucug

SEQ ID NO: 127509 - RNA, 22 nt, Human
uggcagagccuugccaaacucc

SEQ ID NO: 127510 - RNA, 22 nt, Human
gcagaagcuguucgaaggccgc

SEQ ID NO: 127511 - RNA, 22 nt, Human
cacagccuugagcgaggacaag

SEQ ID NO: 127512 - RNA, 22 nt, Human
gagucgagcagaaagccgucgg

SEQ ID NO: 127513 - RNA, 22 nt, Human
agaggaaguaaucaggaccugc

SEQ ID NO: 127514 - RNA, 22 nt, Human
cccaguggaaggaguagaagac

SEQ ID NO: 127515 - RNA, 22 nt, Human
ucugaaggugcuagagaaagcu

SEQ ID NO: 127516 - RNA, 22 nt, Human
aucagaagaaauggaugugacu

SEQ ID NO: 127517 - RNA, 22 nt, Human
aaacaucauaggcaugcaugau

SEQ ID NO: 127518 - RNA, 22 nt, Human
agccaggaagaaggucacacca

SEQ ID NO: 127519 - RNA, 22 nt, Human
ggcagugaugucaaacagugaa

SEQ ID NO: 127520 - RNA, 22 nt, Human
aggcaggggagcuggaagggua

SEQ ID NO: 127521 - RNA, 22 nt, Human
ggcccagaauacuuuguaaaau

SEQ ID NO: 127522 - RNA, 22 nt, Human
gagcugaaauaugaagccaauu

SEQ ID NO: 127523 - RNA, 20 nt, Human
caggcaguuugugguuaggg

SEQ ID NO: 127524 - RNA, 22 nt, Human
agucaccaucuguggcagccug

SEQ ID NO: 127525 - RNA, 22 nt, Human
gcagggcagggcaagaacuggg

SEQ ID NO: 127526 - RNA, 22 nt, Human
cagggccacacggaagggaaca

SEQ ID NO: 127527 - RNA, 22 nt, Human
ugggggaagagcuuguuaaagu

SEQ ID NO: 127528 - RNA, 22 nt, Human
gccugagaaggauaggaagcga

SEQ ID NO: 127529 - RNA, 22 nt, Human
caggaggcagaggaugcccagu

SEQ ID NO: 127530 - RNA, 20 nt, Human
aggcugaguucuaugcacuu

SEQ ID NO: 127531 - RNA, 22 nt, Human
uacugugacagaguacuuaaac

SEQ ID NO: 127532 - RNA, 22 nt, Human
auuuuaucugcuuacuuucagg

SEQ ID NO: 127533 - RNA, 22 nt, Human
augaggcagaaaaaagucggag

SEQ ID NO: 127534 - RNA, 22 nt, Human
aggcagguguuaccucugguuu

SEQ ID NO: 127535 - RNA, 22 nt, Human
cggcagagcggcgagccccucc

SEQ ID NO: 127536 - RNA, 22 nt, Human
ccccaccagcacccucucuauc

SEQ ID NO: 127537 - RNA, 22 nt, Human
gggugaagcuccugcaggggcc

SEQ ID NO: 127538 - RNA, 22 nt, Human
gaagccacaacuuuuucuuagc

SEQ ID NO: 127539 - RNA, 23 nt, Human
uagggcagcugggagggacaugc

SEQ ID NO: 127540 - RNA, 20 nt, Human
aacauugcuucaauguaacc

SEQ ID NO: 127541 - RNA, 22 nt, Human
gccuguuggugacuuucuguug

SEQ ID NO: 127542 - RNA, 22 nt, Human
gaguggagaucgugccacugca

SEQ ID NO: 127543 - RNA, 22 nt, Human
aggcucagcugguggugaucgc

SEQ ID NO: 127544 - RNA, 22 nt, Human
ggggccagcuucgcgugcucuu

SEQ ID NO: 127545 - RNA, 22 nt, Human
ccugagugccaugagagcaccc

SEQ ID NO: 127546 - RNA, 22 nt, Human
ccagguguagcacugcucacag

SEQ ID NO: 127547 - RNA, 22 nt, Human
cagagcuguccaaacccugaca

SEQ ID NO: 127548 - RNA, 22 nt, Human
caugucuuuguuaugcucacca

SEQ ID NO: 127549 - RNA, 17 nt, Human
ucaggcugugccuggua

SEQ ID NO: 127550 - RNA, 22 nt, Human
ucaaagcuuagauaauuucuuu

SEQ ID NO: 127551 - RNA, 18 nt, Human
ggaaaccacaggguucug

SEQ ID NO: 127552 - RNA, 22 nt, Human
gcaggaagcauagaagaaugcc

SEQ ID NO: 127553 - RNA, 22 nt, Human
uacagaagcugagacacugaga

SEQ ID NO: 127554 - RNA, 22 nt, Human
uaaaggcuuuuacaggagugca

SEQ ID NO: 127555 - RNA, 22 nt, Human
cagcuguggagauggggugcau

SEQ ID NO: 127556 - RNA, 22 nt, Human
agagccccugguggagugagaa

SEQ ID NO: 127557 - RNA, 22 nt, Human
uggcaggagguuuucuccagga

SEQ ID NO: 127558 - RNA, 22 nt, Human
ccagggcucaggcucccagugg

SEQ ID NO: 127559 - RNA, 19 nt, Human
gaaggcugaaaugaagcac

SEQ ID NO: 127560 - RNA, 22 nt, Human
ggcucaguguuuguggaacaua

SEQ ID NO: 127561 - RNA, 22 nt, Human
agcacccuccaacuucccugua

SEQ ID NO: 127562 - RNA, 22 nt, Human
aggcugaggcagguggaucacu

SEQ ID NO: 127563 - RNA, 22 nt, Human
uuucccaagaaaaauaauugga

SEQ ID NO: 127564 - RNA, 22 nt, Human
auuuucucucaaaccuuaaaau

SEQ ID NO: 127565 - RNA, 22 nt, Human
aaggaagagaauccuucucaga

SEQ ID NO: 127566 - RNA, 22 nt, Human
acacugugagcugaagggcugc

SEQ ID NO: 127567 - RNA, 22 nt, Human
aggcaguuucugggacagcaua

SEQ ID NO: 127568 - RNA, 22 nt, Human
aggcugagaaagugggaagaug

SEQ ID NO: 127569 - RNA, 22 nt, Human
gagggcagagacagugauucac

SEQ ID NO: 127570 - RNA, 22 nt, Human
aguugaagguuggcugauccau

SEQ ID NO: 127571 - RNA, 22 nt, Human
augaggcaggagugcaguggca

SEQ ID NO: 127572 - RNA, 22 nt, Human
gaguccaguucuuuccagcagu

SEQ ID NO: 127573 - RNA, 22 nt, Human
ucagaggagccaaaguucugag

SEQ ID NO: 127574 - RNA, 22 nt, Human
gcagauggcucagacacugggg

SEQ ID NO: 127575 - RNA, 22 nt, Human
gaggcucacuaggcauccuggg

SEQ ID NO: 127576 - RNA, 22 nt, Human
agaauaaacugcuuuagggcag

SEQ ID NO: 127577 - RNA, 22 nt, Human
ucuuuugugauucuucaguuac

SEQ ID NO: 127578 - RNA, 18 nt, Human
cugugcagcaaacugagc

SEQ ID NO: 127579 - RNA, 22 nt, Human
aggcccagagcaggaaaggguu

SEQ ID NO: 127580 - RNA, 22 nt, Human
agccaggcagggcucucgcucu

SEQ ID NO: 127581 - RNA, 22 nt, Human
aauuuuauuaacuggauguagc

SEQ ID NO: 127582 - RNA, 22 nt, Human
ccagcugcccaagaggcauccu

SEQ ID NO: 127583 - RNA, 22 nt, Human
aggcagccaguucagguuucuu

SEQ ID NO: 127584 - RNA, 22 nt, Human
ggcagugagcuggagggaagga

SEQ ID NO: 127585 - RNA, 22 nt, Human
aggcaggaaaaucgcuugaacc

SEQ ID NO: 127586 - RNA, 22 nt, Human
gcugaguugaaagcagaggaua

SEQ ID NO: 127587 - RNA, 19 nt, Human
agugguagaugagcaggag

SEQ ID NO: 127588 - RNA, 22 nt, Human
gaaacaaucaucaugugauuug

SEQ ID NO: 127589 - RNA, 18 nt, Human
cugaggcuuagagagguu

SEQ ID NO: 127590 - RNA, 22 nt, Human
agagggcauuaacucugucuug

SEQ ID NO: 127591 - RNA, 22 nt, Human
guauuuucaugauuucagacca

SEQ ID NO: 127592 - RNA, 22 nt, Human
gaagaagcaggaguguguagca

SEQ ID NO: 127593 - RNA, 21 nt, Human
aggcuguccuuugccagcccu

SEQ ID NO: 127594 - RNA, 22 nt, Human
gcaguaggagaagaggaugcuu

SEQ ID NO: 127595 - RNA, 22 nt, Human
uggagaaggccggccaggagug

SEQ ID NO: 127596 - RNA, 22 nt, Human
uggcagagagagugcagucgac

SEQ ID NO: 127597 - RNA, 22 nt, Human
guuuuccauggaggucugaccu

SEQ ID NO: 127598 - RNA, 21 nt, Human
uggcugaguggaugcaugaau

SEQ ID NO: 127599 - RNA, 20 nt, Human
gggcagccucgggagugggu

SEQ ID NO: 127600 - RNA, 22 nt, Human
cagaaauggagcccaggaaucu

SEQ ID NO: 127601 - RNA, 22 nt, Human
aggcagcaugcucugcuucuac

SEQ ID NO: 127602 - RNA, 22 nt, Human
agggcaugcuggaggagagaca

SEQ ID NO: 127603 - RNA, 22 nt, Human
uggaauggaaacaaacugagga

SEQ ID NO: 127604 - RNA, 22 nt, Human
gcagggcagccacaggcccccu

SEQ ID NO: 127605 - RNA, 22 nt, Human
ucaggcagagcuguggagcucu

SEQ ID NO: 127606 - RNA, 22 nt, Human
agccucaguuucaggccuccuc

SEQ ID NO: 127607 - RNA, 22 nt, Human
agggcugaagggaggugcucau

SEQ ID NO: 127608 - RNA, 22 nt, Human
uuccaggacaagauguuucagg

SEQ ID NO: 127609 - RNA, 22 nt, Human
gcacacacuguuuuccucacau

SEQ ID NO: 127610 - RNA, 19 nt, Human
cucuccagcuccaguagcu

SEQ ID NO: 127611 - RNA, 20 nt, Human
gggcuagaccagggcagagg

SEQ ID NO: 127612 - RNA, 22 nt, Human
ugggagcacccugaggagcuuc

SEQ ID NO: 127613 - RNA, 22 nt, Human
uggcagaguucgcugugccuuu

SEQ ID NO: 127614 - RNA, 22 nt, Human
gaaaauuauugaaaauggcucu

SEQ ID NO: 127615 - RNA, 19 nt, Human
cagagcagugguuccugaa

SEQ ID NO: 127616 - RNA, 22 nt, Human
ugagagugaaaugucacauguc

SEQ ID NO: 127617 - RNA, 22 nt, Human
gcugugcaguaguagguacagu

SEQ ID NO: 127618 - RNA, 22 nt, Human
aaagccagggacagugugcaug

SEQ ID NO: 127619 - RNA, 22 nt, Human
agcagccagagucugaacauua

SEQ ID NO: 127620 - RNA, 22 nt, Human
ccaggggaaacagggagcacuc

SEQ ID NO: 127621 - RNA, 22 nt, Human
caagcuggaguuccucagagug

SEQ ID NO: 127622 - RNA, 22 nt, Human
augccaggaacaaacaguggug

SEQ ID NO: 127623 - RNA, 22 nt, Human
uggagcugagaaguggagcucu

SEQ ID NO: 127624 - RNA, 22 nt, Human
uggcugagugauauuugcaaag

SEQ ID NO: 127625 - RNA, 22 nt, Human
cugugcaguaggucagggcugg

SEQ ID NO: 127626 - RNA, 22 nt, Human
cagggcuggauuucauuucuag

SEQ ID NO: 127627 - RNA, 22 nt, Human
caggaggcagagguugcagcga

SEQ ID NO: 127628 - RNA, 22 nt, Human
ccagggcagggaccacgugucu

SEQ ID NO: 127629 - RNA, 22 nt, Human
accaugccaguggcagccagac

SEQ ID NO: 127630 - RNA, 19 nt, Human
auuuccaagaauuggagag

SEQ ID NO: 127631 - RNA, 22 nt, Human
gcagcugagagaagaacagggc

SEQ ID NO: 127632 - RNA, 22 nt, Human
accaggagccauagagucaggc

SEQ ID NO: 127633 - RNA, 22 nt, Human
ccaggugggaggaaagcagaga

SEQ ID NO: 127634 - RNA, 22 nt, Human
uggcugagcucccuguguguug

SEQ ID NO: 127635 - RNA, 22 nt, Human
uugcagagagguuaggaacuca

SEQ ID NO: 127636 - RNA, 22 nt, Human
ucaguggaacugucugggugag

SEQ ID NO: 127637 - RNA, 22 nt, Human
gcagccucagggcacucagaug

SEQ ID NO: 127638 - RNA, 22 nt, Human
gggcagguguuuccaaggugag

SEQ ID NO: 127639 - RNA, 22 nt, Human
cagaggaaguuccuugaugaga

SEQ ID NO: 127640 - RNA, 22 nt, Human
cagagcugggcauggugaaagg

SEQ ID NO: 127641 - RNA, 20 nt, Human
aggcucagagcaguaguaca

SEQ ID NO: 127642 - RNA, 21 nt, Human
agagacugucacugcaguacc

SEQ ID NO: 127643 - RNA, 17 nt, Human
agccgggcauggaccag

SEQ ID NO: 127644 - RNA, 20 nt, Human
aggaaaaggguggugguaga

SEQ ID NO: 127645 - RNA, 22 nt, Human
gccacccugagcugggccaggg

SEQ ID NO: 127646 - RNA, 22 nt, Human
aagccaguccucuacugggcac

SEQ ID NO: 127647 - RNA, 22 nt, Human
uggaggcaguuuaagucugaga

SEQ ID NO: 127648 - RNA, 22 nt, Human
gagaagguggaccugaaggagc

SEQ ID NO: 127649 - RNA, 22 nt, Human
uagggcuguuuaaaagugaggu

SEQ ID NO: 127650 - RNA, 22 nt, Human
agcagggcagguaaggaucaga

SEQ ID NO: 127651 - RNA, 22 nt, Human
gaggagaagcuaagaaacacag

SEQ ID NO: 127652 - RNA, 22 nt, Human
ugcuguggcaguuuauguauag

SEQ ID NO: 127653 - RNA, 22 nt, Human
aggcccagagagccaguuagug

SEQ ID NO: 127654 - RNA, 22 nt, Human
gcaggcagagucaauuugaucc

SEQ ID NO: 127655 - RNA, 21 nt, Human
ccagcugucuguccuuaggca

SEQ ID NO: 127656 - RNA, 17 nt, Human
gcugagaggcagcacag

SEQ ID NO: 127657 - RNA, 22 nt, Human
agggcagaccacgugcaaggau

SEQ ID NO: 127658 - RNA, 22 nt, Human
agugcaaaauucagaagcaauu

SEQ ID NO: 127659 - RNA, 20 nt, Human
agcaccagugggggcagccc

SEQ ID NO: 127660 - RNA, 22 nt, Human
uccaggcaagggaggagcaugg

SEQ ID NO: 127661 - RNA, 22 nt, Human
agggaggugguuccccagugga

SEQ ID NO: 127662 - RNA, 22 nt, Human
agggaagugaaugacagauauc

SEQ ID NO: 127663 - RNA, 22 nt, Human
ggugucuguugccuccugguua

SEQ ID NO: 127664 - RNA, 22 nt, Human
gagggcuguggggcaugaccag

SEQ ID NO: 127665 - RNA, 22 nt, Human
ggcagccaugcacgcugccugg

SEQ ID NO: 127666 - RNA, 22 nt, Human
gaggaaacauuguagaagcagu

SEQ ID NO: 127667 - RNA, 22 nt, Human
agugcagagaccuggucaggca

SEQ ID NO: 127668 - RNA, 22 nt, Human
ucagggcacaggccuguggguu

SEQ ID NO: 127669 - RNA, 22 nt, Human
cagaggcagaauggagauuugg

SEQ ID NO: 127670 - RNA, 22 nt, Human
gcuccucuucucccacugaaug

SEQ ID NO: 127671 - RNA, 22 nt, Human
gaggcucacgacgggacgaacu

SEQ ID NO: 127672 - RNA, 22 nt, Human
gccaggcauguccucugcagaa

SEQ ID NO: 127673 - RNA, 22 nt, Human
ugaggcuuagagaagaugggau

SEQ ID NO: 127674 - RNA, 22 nt, Human
uaggcuggaggaagcagugccu

SEQ ID NO: 127675 - RNA, 22 nt, Human
cacacacaguuuuguauucugu

SEQ ID NO: 127676 - RNA, 22 nt, Human
acagcuguggccacuugcaucc

SEQ ID NO: 127677 - RNA, 22 nt, Human
caggaggcccaaagggcgcaga

SEQ ID NO: 127678 - RNA, 22 nt, Human
aggcagggugaugauaaugauu

SEQ ID NO: 127679 - RNA, 23 nt, Human
uggcugagcccacuaucuuggcc

SEQ ID NO: 127680 - RNA, 22 nt, Human
ggcaggcaagucugcucuguga

SEQ ID NO: 127681 - RNA, 22 nt, Human
cuccacagccccuccaguggca

SEQ ID NO: 127682 - RNA, 22 nt, Human
gcaggcagucaucuuucauauu

SEQ ID NO: 127683 - RNA, 22 nt, Human
ugccaggcauguaguagacuug

SEQ ID NO: 127684 - RNA, 22 nt, Human
gccaccaggagcccaguccaaa

SEQ ID NO: 127685 - RNA, 22 nt, Human
caggagccgccaggcacguugg

SEQ ID NO: 127686 - RNA, 22 nt, Human
gaggaggaggaaguggaaccca

SEQ ID NO: 127687 - RNA, 22 nt, Human
caaaugcauagaaagaugaaac

SEQ ID NO: 127688 - RNA, 22 nt, Human
cagggcagggagcuuagaauga

SEQ ID NO: 127689 - RNA, 22 nt, Human
ucagggcaaagggcagaguuug

SEQ ID NO: 127690 - RNA, 22 nt, Human
cugugaccuccaggaaggggug

SEQ ID NO: 127691 - RNA, 22 nt, Human
uaagccacuagucuguuaugaa

SEQ ID NO: 127692 - RNA, 22 nt, Human
ucagaggagaccaaggggaaua

SEQ ID NO: 127693 - RNA, 22 nt, Human
aggcaggaacccugugugcgcc

SEQ ID NO: 127694 - RNA, 22 nt, Human
agcaggaacgaguucaugggga

SEQ ID NO: 127695 - RNA, 22 nt, Human
ugaggcaggagaaucacaugaa

SEQ ID NO: 127696 - RNA, 22 nt, Human
aggcucagcaucugauucauau

SEQ ID NO: 127697 - RNA, 22 nt, Human
gcagggcagcuuagucccuguc

SEQ ID NO: 127698 - RNA, 20 nt, Human
cagaggcauuuucagacucu

SEQ ID NO: 127699 - RNA, 22 nt, Human
ucacuccucauugcugcccauu

SEQ ID NO: 127700 - RNA, 22 nt, Human
auucauuccaggucagucagac

SEQ ID NO: 127701 - RNA, 22 nt, Human
uggcugaggcuggagugcagug

SEQ ID NO: 127702 - RNA, 22 nt, Human
gggcagagagcuggaacuccuu

SEQ ID NO: 127703 - RNA, 22 nt, Human
ugccaggcucagccccuaucuu

SEQ ID NO: 127704 - RNA, 22 nt, Human
gaggcaggcagauugcuugagg

SEQ ID NO: 127705 - RNA, 18 nt, Human
uguggcaggggugggaga

SEQ ID NO: 127706 - RNA, 22 nt, Human
aggcgcagaaggccaggggccu

SEQ ID NO: 127707 - RNA, 22 nt, Human
ugcagggcccuugggguugaac

SEQ ID NO: 127708 - RNA, 22 nt, Human
cagggcagagggaaacuccuuu

SEQ ID NO: 127709 - RNA, 22 nt, Human
agggaaggaaaagcugucgcuu

SEQ ID NO: 127710 - RNA, 22 nt, Human
agggaggaaggauguuccaaag

SEQ ID NO: 127711 - RNA, 22 nt, Human
uucacaaagcuggagcauuucc

SEQ ID NO: 127712 - RNA, 22 nt, Human
aggcugaggugugcugugaucg

SEQ ID NO: 127713 - RNA, 22 nt, Human
caguucaggccggcugacucag

SEQ ID NO: 127714 - RNA, 22 nt, Human
uagagcugggcagugcucugag

SEQ ID NO: 127715 - RNA, 22 nt, Human
augggcagacagggagcucacg

SEQ ID NO: 127716 - RNA, 22 nt, Human
uuauuauugugaccugagaaug

SEQ ID NO: 127717 - RNA, 22 nt, Human
aggcugagagcaacgugucaga

SEQ ID NO: 127718 - RNA, 22 nt, Human
ggcugcaggcaggguauccacu

SEQ ID NO: 127719 - RNA, 22 nt, Human
cuccagggcagcauggcagugg

SEQ ID NO: 127720 - RNA, 22 nt, Human
accugagaccuaaucugacugu

SEQ ID NO: 127721 - RNA, 22 nt, Human
gcacacacaugugaguacaugc

SEQ ID NO: 127722 - RNA, 22 nt, Human
acccaggagccgugagagguua

SEQ ID NO: 127723 - RNA, 22 nt, Human
gccagguggagguugcagugag

SEQ ID NO: 127724 - RNA, 22 nt, Human
ugaggcagguaagcaaguuuug

SEQ ID NO: 127725 - RNA, 22 nt, Human
ugucuucaguaaaauacacuau

SEQ ID NO: 127726 - RNA, 22 nt, Human
ugcuggaggcaguggaggugcc

SEQ ID NO: 127727 - RNA, 22 nt, Human
cugccaggggccucacaggcca

SEQ ID NO: 127728 - RNA, 23 nt, Human
agaggcaggaguggcuugcccgg

SEQ ID NO: 127729 - RNA, 22 nt, Human
auccagggauaaaaguaagguu

SEQ ID NO: 127730 - RNA, 22 nt, Human
ugaggcuugucucagauggggg

SEQ ID NO: 127731 - RNA, 22 nt, Human
ucaguggauuguagaaggcuua

SEQ ID NO: 127732 - RNA, 22 nt, Human
agcaugaaaggcgugccaacuu

SEQ ID NO: 127733 - RNA, 22 nt, Human
agaguccagaaaacagugugcu

SEQ ID NO: 127734 - RNA, 22 nt, Human
acaggcugcccgcuccccaccu

SEQ ID NO: 127735 - RNA, 22 nt, Human
uggcagaguucgcuccuauuca

SEQ ID NO: 127736 - RNA, 22 nt, Human
ccuggccagaggcgugccugug

SEQ ID NO: 127737 - RNA, 22 nt, Human
ggagucaccaaguaggagucuu

SEQ ID NO: 127738 - RNA, 22 nt, Human
aggggcaguuccaaguuuugug

SEQ ID NO: 127739 - RNA, 22 nt, Human
caaaugcauaguuuauaagaag

SEQ ID NO: 127740 - RNA, 22 nt, Human
gcuggcagagagcuggugagga

SEQ ID NO: 127741 - RNA, 21 nt, Human
ucagggcagugggagguuccu

SEQ ID NO: 127742 - RNA, 22 nt, Human
ggcucaccauuuucacucucug

SEQ ID NO: 127743 - RNA, 20 nt, Human
uuggucagugguucaguuug

SEQ ID NO: 127744 - RNA, 22 nt, Human
cuuccccaaccccgacugugug

SEQ ID NO: 127745 - RNA, 22 nt, Human
agcuguggggcaggcagcgagg

SEQ ID NO: 127746 - RNA, 22 nt, Human
caucaucaaaagugacagagaa

SEQ ID NO: 127747 - RNA, 22 nt, Human
gaggcucacuuucauccucuuc

SEQ ID NO: 127748 - RNA, 22 nt, Human
uuccagcuaacucacaucccuu

SEQ ID NO: 127749 - RNA, 22 nt, Human
gcauggcauuugaagguagaag

SEQ ID NO: 127750 - RNA, 22 nt, Human
ucacagcuaagcuuggucacug

SEQ ID NO: 127751 - RNA, 22 nt, Human
ccaagggaaaccgagaggcugg

SEQ ID NO: 127752 - RNA, 22 nt, Human
uggaagugcucuucugaccaac

SEQ ID NO: 127753 - RNA, 22 nt, Human
cugagagaaucaugcugcaggu

SEQ ID NO: 127754 - RNA, 22 nt, Human
gaagaaggugccagaggcuuac

SEQ ID NO: 127755 - RNA, 22 nt, Human
acuugguugaugucauaagguu

SEQ ID NO: 127756 - RNA, 22 nt, Human
ccaucccuccuccaccagcuag

SEQ ID NO: 127757 - RNA, 22 nt, Human
ccccuuccuuccucagacagcc

SEQ ID NO: 127758 - RNA, 22 nt, Human
caaaagaagcucuuggggcuag

SEQ ID NO: 127759 - RNA, 22 nt, Human
gaagccacuauagauauucuaa

SEQ ID NO: 127760 - RNA, 18 nt, Human
ccagagcuggcuccucgc

SEQ ID NO: 127761 - RNA, 22 nt, Human
ggagccugcgggagcucccauu

SEQ ID NO: 127762 - RNA, 22 nt, Human
cccaggacucuucacugcagcc

SEQ ID NO: 127763 - RNA, 22 nt, Human
ggcuguggggccggguacagug

SEQ ID NO: 127764 - RNA, 22 nt, Human
aggcugaggcggguagaucacc

SEQ ID NO: 127765 - RNA, 21 nt, Human
ccagccucagaucagggagcu

SEQ ID NO: 127766 - RNA, 22 nt, Human
aagggcuggaauaucucuuaga

SEQ ID NO: 127767 - RNA, 22 nt, Human
uugggacagaaaaggagaagau

SEQ ID NO: 127768 - RNA, 18 nt, Human
agaagccacgaggagucc

SEQ ID NO: 127769 - RNA, 22 nt, Human
uccaggcuaauuuugcauuguu

SEQ ID NO: 127770 - RNA, 22 nt, Human
aggugucuucagggugagacag

SEQ ID NO: 127771 - RNA, 22 nt, Human
caggcagcuagauuuauaacaa

SEQ ID NO: 127772 - RNA, 22 nt, Human
ugcccaggauugugaggucagg

SEQ ID NO: 127773 - RNA, 22 nt, Human
uggcagggucuugcuguguugc

SEQ ID NO: 127774 - RNA, 22 nt, Human
uggcugaggcacagcugccgcc

SEQ ID NO: 127775 - RNA, 22 nt, Human
ucacucagguucaugucuuugu

SEQ ID NO: 127776 - RNA, 22 nt, Human
ugcagggccuugggucuuucuu

SEQ ID NO: 127777 - RNA, 17 nt, Human
ucaggcugggugcagug

SEQ ID NO: 127778 - RNA, 22 nt, Human
ucaggcugcccguucagggcuc

SEQ ID NO: 127779 - RNA, 22 nt, Human
ccucacuggccagccaggggug

SEQ ID NO: 127780 - RNA, 22 nt, Human
cagcuguggagggaggaaaugc

SEQ ID NO: 127781 - RNA, 22 nt, Human
cagagcuggagaaguggauuua

SEQ ID NO: 127782 - RNA, 22 nt, Human
aagggcugggucugguuaaccc

SEQ ID NO: 127783 - RNA, 22 nt, Human
gggcugaaaggccgccucagau

SEQ ID NO: 127784 - RNA, 22 nt, Human
uuccucagccaaggcugggauc

SEQ ID NO: 127785 - RNA, 22 nt, Human
ccaccaggacagcccugagggg

SEQ ID NO: 127786 - RNA, 22 nt, Human
aggcucagauccuuguguccug

SEQ ID NO: 127787 - RNA, 22 nt, Human
aggcucaggugccucauucaca

SEQ ID NO: 127788 - RNA, 22 nt, Human
caggguagacaguaggugucug

SEQ ID NO: 127789 - RNA, 22 nt, Human
uccuggcccuguggccugcagu

SEQ ID NO: 127790 - RNA, 22 nt, Human
cuucaguuuaucccaucaucca

SEQ ID NO: 127791 - RNA, 22 nt, Human
aaggaggagcggaggcuuguug

SEQ ID NO: 127792 - RNA, 22 nt, Human
gccaguggucacugaggaagaa

SEQ ID NO: 127793 - RNA, 22 nt, Human
agccuggcuaaauucucccaug

SEQ ID NO: 127794 - RNA, 22 nt, Human
guggggcaguggccugggagca

SEQ ID NO: 127795 - RNA, 20 nt, Human
ugcagggccuaaaaagggaa

SEQ ID NO: 127796 - RNA, 22 nt, Human
ucugggagauccaagcagaacu

SEQ ID NO: 127797 - RNA, 22 nt, Human
gcagacagccagacugcacugg

SEQ ID NO: 127798 - RNA, 22 nt, Human
accgggaaguccugcacugggc

SEQ ID NO: 127799 - RNA, 22 nt, Human
ggagaagccacacauugggugu

SEQ ID NO: 127800 - RNA, 22 nt, Human
caccagggcagcagccuagucu

SEQ ID NO: 127801 - RNA, 22 nt, Human
ucagggcagccuaaggcaccuc

SEQ ID NO: 127802 - RNA, 22 nt, Human
caggcccauucuaggcuugcua

SEQ ID NO: 127803 - RNA, 22 nt, Human
uauuuccaagcugaauccaaug

SEQ ID NO: 127804 - RNA, 22 nt, Human
gucaccagcaccaaugccacau

SEQ ID NO: 127805 - RNA, 22 nt, Human
agagaaggucacuaaggaccca

SEQ ID NO: 127806 - RNA, 21 nt, Human
caaagccaggcaacucucucc

SEQ ID NO: 127807 - RNA, 22 nt, Human
ugaagccacagagcaucugccu

SEQ ID NO: 127808 - RNA, 22 nt, Human
uaggcagaaaggaaggcaaguu

SEQ ID NO: 127809 - RNA, 22 nt, Human
cagugcaggcugggggcccugc

SEQ ID NO: 127810 - RNA, 22 nt, Human
ccaguggaaauguggucaggau

SEQ ID NO: 127811 - RNA, 22 nt, Human
gccagguguaguggccacaccu

SEQ ID NO: 127812 - RNA, 21 nt, Human
ggagaaggacaauguugagua

SEQ ID NO: 127813 - RNA, 22 nt, Human
gccuggagaagauggaacuagc

SEQ ID NO: 127814 - RNA, 22 nt, Human
ugaccugcagucaagaggggaa

SEQ ID NO: 127815 - RNA, 22 nt, Human
uccuguggcguuaucaugugau

SEQ ID NO: 127816 - RNA, 21 nt, Human
aggaaguggccagauugggaa

SEQ ID NO: 127817 - RNA, 22 nt, Human
ugugaccucaucuuaacuggaa

SEQ ID NO: 127818 - RNA, 22 nt, Human
augcugaagagugcacaggcua

SEQ ID NO: 127819 - RNA, 22 nt, Human
gggagaaggaggacugugcugu

SEQ ID NO: 127820 - RNA, 22 nt, Human
ucugaagggcugaguggaggag

SEQ ID NO: 127821 - RNA, 22 nt, Human
uugcagagcaguaggaauauag

SEQ ID NO: 127822 - RNA, 22 nt, Human
agggcugccugacuccagagcc

SEQ ID NO: 127823 - RNA, 22 nt, Human
cgaggcaggcaggcggaggaua

SEQ ID NO: 127824 - RNA, 22 nt, Human
cagagcugcagauugaaggcau

SEQ ID NO: 127825 - RNA, 22 nt, Human
aggagggagcuuaagccaggca

SEQ ID NO: 127826 - RNA, 22 nt, Human
acagaggaagcauauagcacaa

SEQ ID NO: 127827 - RNA, 18 nt, Human
cugucaccgccaccacac

SEQ ID NO: 127828 - RNA, 22 nt, Human
ccagagcuccagggcuacagaa

SEQ ID NO: 127829 - RNA, 22 nt, Human
uggcagaggaggcucagauuga

SEQ ID NO: 127830 - RNA, 22 nt, Human
acuuccaaauaccaucacauug

SEQ ID NO: 127831 - RNA, 22 nt, Human
ugagcaguaacagcucacaggg

SEQ ID NO: 127832 - RNA, 22 nt, Human
cucccuggcuuuguccugaggc

SEQ ID NO: 127833 - RNA, 22 nt, Human
agguguguauaaacauacauau

SEQ ID NO: 127834 - RNA, 23 nt, Human
uugaaagguagcuggcagcuaga

SEQ ID NO: 127835 - RNA, 22 nt, Human
agcagaggaggauuuaguuagg

SEQ ID NO: 127836 - RNA, 22 nt, Human
aguggcaggcagaagcuucuca

SEQ ID NO: 127837 - RNA, 22 nt, Human
augcugugucaggaauuugaua

SEQ ID NO: 127838 - RNA, 22 nt, Human
uggaggaaguugcuggaaguca

SEQ ID NO: 127839 - RNA, 22 nt, Human
gcaccugggguacacagcuaca

SEQ ID NO: 127840 - RNA, 22 nt, Human
accagaguaauguguggaaauu

SEQ ID NO: 127841 - RNA, 20 nt, Human
cugcccagccacugagggau

SEQ ID NO: 127842 - RNA, 22 nt, Human
ccugcucagccccagcucaccc

SEQ ID NO: 127843 - RNA, 22 nt, Human
cuccagggaggagcacggguuc

SEQ ID NO: 127844 - RNA, 22 nt, Human
auuuccaccggcucaggaaguu

SEQ ID NO: 127845 - RNA, 22 nt, Human
ccagggcuccauugcucauccu

SEQ ID NO: 127846 - RNA, 22 nt, Human
ugcagggcuccuggcuccaauc

SEQ ID NO: 127847 - RNA, 22 nt, Human
aucgagggugaguacagcggac

SEQ ID NO: 127848 - RNA, 22 nt, Human
cgcccagggcaggaggccgcuc

SEQ ID NO: 127849 - RNA, 22 nt, Human
cucagaagaacccaggguccca

SEQ ID NO: 127850 - RNA, 22 nt, Human
aggugcaggagcugugcaggga

SEQ ID NO: 127851 - RNA, 16 nt, Human
gccuggaguggcaggg

SEQ ID NO: 127852 - RNA, 20 nt, Human
aagggagaauaaugauugua

SEQ ID NO: 127853 - RNA, 22 nt, Human
ccugggcagugcuggaguugaa

SEQ ID NO: 127854 - RNA, 22 nt, Human
aaggugucggguuagcucagcc

SEQ ID NO: 127855 - RNA, 22 nt, Human
gcaguggaagccucuuuaagca

SEQ ID NO: 127856 - RNA, 20 nt, Human
ccagguggugccuggagagg

SEQ ID NO: 127857 - RNA, 22 nt, Human
aaggcugcuuuuaacaugcaua

SEQ ID NO: 127858 - RNA, 22 nt, Human
ucaggcugccuaucagacugug

SEQ ID NO: 127859 - RNA, 22 nt, Human
aagugccugaccuagccuggag

SEQ ID NO: 127860 - RNA, 20 nt, Human
aggcugagggugauuguguc

SEQ ID NO: 127861 - RNA, 20 nt, Human
agggcagcuugaggagccgg

SEQ ID NO: 127862 - RNA, 17 nt, Human
gacaggcucagugacga

SEQ ID NO: 127863 - RNA, 22 nt, Human
ccacugcccccugaagaccagg

SEQ ID NO: 127864 - RNA, 22 nt, Human
acacuucuauucccugcacaaa

SEQ ID NO: 127865 - RNA, 22 nt, Human
aggccucaggaagguaaagaag

SEQ ID NO: 127866 - RNA, 20 nt, Human
uccugguggauacugcuuaa

SEQ ID NO: 127867 - RNA, 22 nt, Human
caguggagaggcaugcuuggca

SEQ ID NO: 127868 - RNA, 17 nt, Human
agcugagcuggccaggg

SEQ ID NO: 127869 - RNA, 23 nt, Human
cagugugacgaggugaggcaggc

SEQ ID NO: 127870 - RNA, 22 nt, Human
ggagcugugcugggugaucagg

SEQ ID NO: 127871 - RNA, 22 nt, Human
ggcaggucagguccaugaccaa

SEQ ID NO: 127872 - RNA, 22 nt, Human
caggggaaggagccuugaaacu

SEQ ID NO: 127873 - RNA, 22 nt, Human
ggagaugcuuuccaguggggau

SEQ ID NO: 127874 - RNA, 18 nt, Human
cagcugccagcucaugga

SEQ ID NO: 127875 - RNA, 22 nt, Human
acaguggaauuuguagaugugu

SEQ ID NO: 127876 - RNA, 22 nt, Human
gccagcagccacagaagucacu

SEQ ID NO: 127877 - RNA, 22 nt, Human
ucagaagguggagguugcagug

SEQ ID NO: 127878 - RNA, 22 nt, Human
aggcagagcuggguuuugaaau

SEQ ID NO: 127879 - RNA, 22 nt, Human
agguggagugaaggaaaggcag

SEQ ID NO: 127880 - RNA, 23 nt, Human
aggcagcagguuguccaggguga

SEQ ID NO: 127881 - RNA, 22 nt, Human
ugggcagggaucucuuuugcaa

SEQ ID NO: 127882 - RNA, 22 nt, Human
aagagccagugggaaagucuug

SEQ ID NO: 127883 - RNA, 22 nt, Human
auuccaaaggcuggccuggagg

SEQ ID NO: 127884 - RNA, 22 nt, Human
acaggcagguugagaaacauuu

SEQ ID NO: 127885 - RNA, 22 nt, Human
agccuggcacugccccauccau

SEQ ID NO: 127886 - RNA, 22 nt, Human
uaaaaucauucuggugucagua

SEQ ID NO: 127887 - RNA, 22 nt, Human
cugugcaguggcagcguguggg

SEQ ID NO: 127888 - RNA, 22 nt, Human
gagcugagaucgugccauugca

SEQ ID NO: 127889 - RNA, 22 nt, Human
agggccugggccagcacccuuu

SEQ ID NO: 127890 - RNA, 22 nt, Human
uuuaccaaauagauuaugucag

SEQ ID NO: 127891 - RNA, 22 nt, Human
auggcagggcagccucucagag

SEQ ID NO: 127892 - RNA, 22 nt, Human
acaggcuggugguccuggccau

SEQ ID NO: 127893 - RNA, 22 nt, Human
agggcagugggaaagccugcuc

SEQ ID NO: 127894 - RNA, 22 nt, Human
gguguccucaugauuuucuaga

SEQ ID NO: 127895 - RNA, 22 nt, Human
ggggcagggagguuaucgccga

SEQ ID NO: 127896 - RNA, 22 nt, Human
acuguggcucaucaggcuggug

SEQ ID NO: 127897 - RNA, 22 nt, Human
ccuggaggcucugggagggcag

SEQ ID NO: 127898 - RNA, 22 nt, Human
cagucacuggaauagcugagga

SEQ ID NO: 127899 - RNA, 22 nt, Human
aagcagaauuuaauagaaaggu

SEQ ID NO: 127900 - RNA, 22 nt, Human
acagggcaugugcaagagacau

SEQ ID NO: 127901 - RNA, 22 nt, Human
ggaggcagaauagagugugggu

SEQ ID NO: 127902 - RNA, 22 nt, Human
agcugccucagcaacacagacc

SEQ ID NO: 127903 - RNA, 21 nt, Human
auggagucaggggaaugggcc

SEQ ID NO: 127904 - RNA, 20 nt, Human
aggcucagauacccagggaa

SEQ ID NO: 127905 - RNA, 22 nt, Human
caugagaaguggccuucaaaaa

SEQ ID NO: 127906 - RNA, 22 nt, Human
ccuggccagccagggcuggggu

SEQ ID NO: 127907 - RNA, 23 nt, Human
cuggaagugcuuuuauagcuuug

SEQ ID NO: 127908 - RNA, 22 nt, Human
ggagcagccacgucucagggca

SEQ ID NO: 127909 - RNA, 21 nt, Human
ugacauuuccaauauaaagcc

SEQ ID NO: 127910 - RNA, 22 nt, Human
gggcugagaaguugaucccaag

SEQ ID NO: 127911 - RNA, 20 nt, Human
cuuguacaugauaaagauuu

SEQ ID NO: 127912 - RNA, 22 nt, Human
uggcugagaccaucagggugua

SEQ ID NO: 127913 - RNA, 23 nt, Human
cagaagcaccuguugacugcugc

SEQ ID NO: 127914 - RNA, 22 nt, Human
cagcagugucuccagcaucaca

SEQ ID NO: 127915 - RNA, 22 nt, Human
ggggaggaagcuggaacacggg

SEQ ID NO: 127916 - RNA, 22 nt, Human
ugggcaggugcuauuuuccaug

SEQ ID NO: 127917 - RNA, 23 nt, Human
agugcugaauugaaagcuccagg

SEQ ID NO: 127918 - RNA, 19 nt, Human
aggagaaguagcagaaauu

SEQ ID NO: 127919 - RNA, 22 nt, Human
aucaggaaauacuuauuuauaa

SEQ ID NO: 127920 - RNA, 22 nt, Human
ggcuagaguggaacuggagcgg

SEQ ID NO: 127921 - RNA, 22 nt, Human
gggcaugagagggcagcuggca

SEQ ID NO: 127922 - RNA, 22 nt, Human
uagcagagaggggacaguggca

SEQ ID NO: 127923 - RNA, 22 nt, Human
gcagucaguaaggcagccagaa

SEQ ID NO: 127924 - RNA, 22 nt, Human
uagagcuggaaaacugcaggua

SEQ ID NO: 127925 - RNA, 22 nt, Human
caaaggcugccacuguggcugu

SEQ ID NO: 127926 - RNA, 22 nt, Human
aggacccugaggucuccuguga

SEQ ID NO: 127927 - RNA, 22 nt, Human
cagugcagguuuagggcugggg

SEQ ID NO: 127928 - RNA, 22 nt, Human
ucaccccuacauuucccuugcu

SEQ ID NO: 127929 - RNA, 22 nt, Human
ccuggccaggcauggagucaca

SEQ ID NO: 127930 - RNA, 20 nt, Human
aaaagcagccagagauggua

SEQ ID NO: 127931 - RNA, 22 nt, Human
guggaggacaaaagaagccuuu

SEQ ID NO: 127932 - RNA, 22 nt, Human
ccaggacccugcaaacccuguu

SEQ ID NO: 127933 - RNA, 22 nt, Human
gaggccaggguaccaucaacau

SEQ ID NO: 127934 - RNA, 22 nt, Human
gggcugagugucccaggccgaa

SEQ ID NO: 127935 - RNA, 22 nt, Human
aagggcugcaauccaaaacacu

SEQ ID NO: 127936 - RNA, 22 nt, Human
gggcugagucaucuggggccuc

SEQ ID NO: 127937 - RNA, 21 nt, Human
agggucaggaaccaggguacc

SEQ ID NO: 127938 - RNA, 22 nt, Human
uagcuguguagacacucagagc

SEQ ID NO: 127939 - RNA, 22 nt, Human
guggcagguuauaagcaucuca

SEQ ID NO: 127940 - RNA, 22 nt, Human
ugaguccauugauggauaguga

SEQ ID NO: 127941 - RNA, 22 nt, Human
gcauggcaagaucaggagacca

SEQ ID NO: 127942 - RNA, 22 nt, Human
agcugacucuggccucuggucc

SEQ ID NO: 127943 - RNA, 22 nt, Human
ucagcccugggacccagggaug

SEQ ID NO: 127944 - RNA, 22 nt, Human
aagacaugcaauuagcaaggaa

SEQ ID NO: 127945 - RNA, 22 nt, Human
aaagccagcaaggugaguuuca

SEQ ID NO: 127946 - RNA, 22 nt, Human
agggcaguguggugggacugac

SEQ ID NO: 127947 - RNA, 22 nt, Human
aggcugugcacagggcaccugc

SEQ ID NO: 127948 - RNA, 19 nt, Human
agaggcagucuccaacagg

SEQ ID NO: 127949 - RNA, 22 nt, Human
gagagcuguguucauucuacca

SEQ ID NO: 127950 - RNA, 22 nt, Human
cuguggcauugccgaggcuggc

SEQ ID NO: 127951 - RNA, 22 nt, Human
uggcagagguaauucaaauccc

SEQ ID NO: 127952 - RNA, 20 nt, Human
cgcccaggagggcccaugug

SEQ ID NO: 127953 - RNA, 22 nt, Human
gcaggcagaucaccugucagga

SEQ ID NO: 127954 - RNA, 22 nt, Human
uuguccaaggucccacaguuag

SEQ ID NO: 127955 - RNA, 22 nt, Human
ucccaggcaaaggcagcucauu

SEQ ID NO: 127956 - RNA, 22 nt, Human
agcugcccuuaauaggcauuca

SEQ ID NO: 127957 - RNA, 22 nt, Human
agcagggcucacauuaguggau

SEQ ID NO: 127958 - RNA, 22 nt, Human
uggcugaggcuuuucuuaaaga

SEQ ID NO: 127959 - RNA, 22 nt, Human
ggaggcacuucccgucucagcc

SEQ ID NO: 127960 - RNA, 22 nt, Human
gaagaagguggcccagggguag

SEQ ID NO: 127961 - RNA, 22 nt, Human
uguguugugacauucuuggaug

SEQ ID NO: 127962 - RNA, 22 nt, Human
uaguggagguggucugugaacu

SEQ ID NO: 127963 - RNA, 22 nt, Human
gccuggagaggaagccggugga

SEQ ID NO: 127964 - RNA, 22 nt, Human
cugucuccagggcaggugcagg

SEQ ID NO: 127965 - RNA, 22 nt, Human
aaagccacugcauguguaguau

SEQ ID NO: 127966 - RNA, 22 nt, Human
ccaggugugcucugcaguggau

SEQ ID NO: 127967 - RNA, 21 nt, Human
agaugcugugcuccaggagca

SEQ ID NO: 127968 - RNA, 22 nt, Human
augucuuuuaugauuacgggau

SEQ ID NO: 127969 - RNA, 22 nt, Human
cagggcagagccaggauuucaa

SEQ ID NO: 127970 - RNA, 22 nt, Human
gagaggagguggcuaugacagc

SEQ ID NO: 127971 - RNA, 22 nt, Human
acaaaggcagagaauucaacau

SEQ ID NO: 127972 - RNA, 22 nt, Human
aggagaaguaaggcuagaugau

SEQ ID NO: 127973 - RNA, 22 nt, Human
gccuggaguagcauggcaagcc

SEQ ID NO: 127974 - RNA, 22 nt, Human
ucaaaggcccauugucccguug

SEQ ID NO: 127975 - RNA, 22 nt, Human
ucucccaguggugcagaaagca

SEQ ID NO: 127976 - RNA, 20 nt, Human
cugcuguguuauuguagaac

SEQ ID NO: 127977 - RNA, 22 nt, Human
uagggcagagcuuguacacgau

SEQ ID NO: 127978 - RNA, 22 nt, Human
gcaggguccauggaggcagccc

SEQ ID NO: 127979 - RNA, 22 nt, Human
uuccagaauuuuguucugcuug

SEQ ID NO: 127980 - RNA, 22 nt, Human
aggcugaugcuggcugaggcug

SEQ ID NO: 127981 - RNA, 22 nt, Human
gaaggcugcgaggggagugccg

SEQ ID NO: 127982 - RNA, 22 nt, Human
cagggcaguaacgggaacaucu

SEQ ID NO: 127983 - RNA, 22 nt, Human
agcaggaacucagggaguucuc

SEQ ID NO: 127984 - RNA, 22 nt, Human
agcgugaaggcgggcagucggc

SEQ ID NO: 127985 - RNA, 22 nt, Human
agggaguuccgaucugugcacc

SEQ ID NO: 127986 - RNA, 22 nt, Human
aggcugaggcagguggaucacc

SEQ ID NO: 127987 - RNA, 22 nt, Human
agaggaggcagcuuaacucagu

SEQ ID NO: 127988 - RNA, 22 nt, Human
gaugaggcucaugcacccugcg

SEQ ID NO: 127989 - RNA, 22 nt, Human
gaggcagagacuccaccuucag

SEQ ID NO: 127990 - RNA, 22 nt, Human
aggcccaguccucugccgucug

SEQ ID NO: 127991 - RNA, 22 nt, Human
guucaaggaagggaggaaagcc

SEQ ID NO: 127992 - RNA, 22 nt, Human
gccugagaaggacacagcaggu

SEQ ID NO: 127993 - RNA, 22 nt, Human
gaagccacccuccuuccagccc

SEQ ID NO: 127994 - RNA, 22 nt, Human
gggcugagaauucagcuuuccu

SEQ ID NO: 127995 - RNA, 22 nt, Human
cugagagguaagcagcgcagug

SEQ ID NO: 127996 - RNA, 18 nt, Human
gggaagccgggaagccgg

SEQ ID NO: 127997 - RNA, 22 nt, Human
guguuuggucagacguccgggg

SEQ ID NO: 127998 - RNA, 22 nt, Human
caaaggcuuccacugcauccuu

SEQ ID NO: 127999 - RNA, 22 nt, Human
ugaaggcacuugccuaggggca

SEQ ID NO: 128000 - RNA, 22 nt, Human
agcuggugcucaggggcaugga

SEQ ID NO: 128001 - RNA, 22 nt, Human
agagcugaggauccagcugagc

SEQ ID NO: 128002 - RNA, 22 nt, Human
caggcagagaggagcauuuaau

SEQ ID NO: 128003 - RNA, 22 nt, Human
cagcugagaaauggggaaaggg

SEQ ID NO: 128004 - RNA, 22 nt, Human
gggcuguaggagcuggaauggg

SEQ ID NO: 128005 - RNA, 21 nt, Human
cagagcuguccaaacccugac

SEQ ID NO: 128006 - RNA, 21 nt, Human
agacagagugcagucuacaua

SEQ ID NO: 128007 - RNA, 22 nt, Human
ucaggcugaggucaucugcauc

SEQ ID NO: 128008 - RNA, 22 nt, Human
aaagccacguggccuggggagc

SEQ ID NO: 128009 - RNA, 22 nt, Human
ugccaggcacgugagaguggcc

SEQ ID NO: 128010 - RNA, 21 nt, Human
aagccagcccacagugguuug

SEQ ID NO: 128011 - RNA, 22 nt, Human
caggcugggcuccggagauaaa

SEQ ID NO: 128012 - RNA, 22 nt, Human
agaagccagucgcucucccgca

SEQ ID NO: 128013 - RNA, 22 nt, Human
agggccagcacuccuggcagga

SEQ ID NO: 128014 - RNA, 22 nt, Human
cacagcugugagaagggagccu

SEQ ID NO: 128015 - RNA, 17 nt, Human
cagucgaggaggaccug

SEQ ID NO: 128016 - RNA, 22 nt, Human
cagggccagccauccugcuggg

SEQ ID NO: 128017 - RNA, 22 nt, Human
gacaggcuuccuaagugccaga

SEQ ID NO: 128018 - RNA, 21 nt, Human
aggagggcacaaggccaggaa

SEQ ID NO: 128019 - RNA, 22 nt, Human
aggucaggguauucacgucugu

SEQ ID NO: 128020 - RNA, 22 nt, Human
ggcagaggagcuggaaacaugg

SEQ ID NO: 128021 - RNA, 23 nt, Human
ucagaggaucaucaaacguuuuc

SEQ ID NO: 128022 - RNA, 22 nt, Human
agcugcagcguucauuuuucca

SEQ ID NO: 128023 - RNA, 22 nt, Human
ggcagaggugacagugucuuuu

SEQ ID NO: 128024 - RNA, 22 nt, Human
ggagcugucuguagggcacagg

SEQ ID NO: 128025 - RNA, 22 nt, Human
aucugaagggaaguggaaggca

SEQ ID NO: 128026 - RNA, 22 nt, Human
augaggcaaucaugguccaguu

SEQ ID NO: 128027 - RNA, 22 nt, Human
cuguugucuucauugucauauc

SEQ ID NO: 128028 - RNA, 22 nt, Human
cugcagugcaagcccagaugga

SEQ ID NO: 128029 - RNA, 22 nt, Human
uaggcuggaacuuaggcagagg

SEQ ID NO: 128030 - RNA, 22 nt, Human
caggcagaguuagugauuuagg

SEQ ID NO: 128031 - RNA, 22 nt, Human
gagucugagaacugggcucagu

SEQ ID NO: 128032 - RNA, 22 nt, Human
ucuccccaaaggacucacucuc

SEQ ID NO: 128033 - RNA, 18 nt, Human
aggcacagagcauacaua

SEQ ID NO: 128034 - RNA, 22 nt, Human
ugaggcaguauuuuagugacuu

SEQ ID NO: 128035 - RNA, 22 nt, Human
gagaagucauuugaccaccuag

SEQ ID NO: 128036 - RNA, 22 nt, Human
agagcugagcaccaagcauggu

SEQ ID NO: 128037 - RNA, 23 nt, Human
aggcagugggggccacuuugcuu

SEQ ID NO: 128038 - RNA, 22 nt, Human
ugagaagcagcuuacagguguc

SEQ ID NO: 128039 - RNA, 22 nt, Human
aggcucagcccaagguggagag

SEQ ID NO: 128040 - RNA, 22 nt, Human
auuauuuuaugugcggccugau

SEQ ID NO: 128041 - RNA, 22 nt, Human
gcaggaagaggcucgaagcccc

SEQ ID NO: 128042 - RNA, 22 nt, Human
ugaggcucaagaaucugcauuu

SEQ ID NO: 128043 - RNA, 22 nt, Human
gaggcagcaggcugaggaggau

SEQ ID NO: 128044 - RNA, 21 nt, Human
ccacauucucauucugacugc

SEQ ID NO: 128045 - RNA, 18 nt, Human
cccagugcucacugccuc

SEQ ID NO: 128046 - RNA, 22 nt, Human
cagcuggaggagcagcuuccag

SEQ ID NO: 128047 - RNA, 22 nt, Human
gcagaggccaggccaccagcaa

SEQ ID NO: 128048 - RNA, 22 nt, Human
cagcugggugaucuugggcagg

SEQ ID NO: 128049 - RNA, 22 nt, Human
ccuaggcccuaggcuuccauca

SEQ ID NO: 128050 - RNA, 22 nt, Human
acagccuguguaccagcuggga

SEQ ID NO: 128051 - RNA, 22 nt, Human
agaagccagauuguagugggac

SEQ ID NO: 128052 - RNA, 23 nt, Human
aggcugagcucucccagcuucag

SEQ ID NO: 128053 - RNA, 22 nt, Human
agccaggcuacuccuugcugac

SEQ ID NO: 128054 - RNA, 22 nt, Human
uggaagaauaggauagaagaac

SEQ ID NO: 128055 - RNA, 22 nt, Human
uaguggaggguguagcugcugg

SEQ ID NO: 128056 - RNA, 22 nt, Human
cugggcaguuuauucaguucug

SEQ ID NO: 128057 - RNA, 22 nt, Human
uccugagaaggcacagcuugca

SEQ ID NO: 128058 - RNA, 22 nt, Human
uggcugagggggcucugcucag

SEQ ID NO: 128059 - RNA, 22 nt, Human
ugccaggcugaacagggucuua

SEQ ID NO: 128060 - RNA, 19 nt, Human
agggucaggacaaggacuu

SEQ ID NO: 128061 - RNA, 22 nt, Human
ugaggcucacaaaucugcauuu

SEQ ID NO: 128062 - RNA, 22 nt, Human
gguggcagucuuaagagaucuu

SEQ ID NO: 128063 - RNA, 22 nt, Human
gcagccagguuugaggaccacu

SEQ ID NO: 128064 - RNA, 23 nt, Human
agggcugaugccauugcagcucu

SEQ ID NO: 128065 - RNA, 22 nt, Human
gagccaccuucaacucaggaau

SEQ ID NO: 128066 - RNA, 22 nt, Human
aggagaaggaggccccucacac

SEQ ID NO: 128067 - RNA, 22 nt, Human
agcacccucagccuuauccaga

SEQ ID NO: 128068 - RNA, 22 nt, Human
ugaggcucugcuucuguggcuc

SEQ ID NO: 128069 - RNA, 22 nt, Human
agggcugaccuaagcuccacuu

SEQ ID NO: 128070 - RNA, 23 nt, Human
ugagaagccaggggagcgugagg

SEQ ID NO: 128071 - RNA, 18 nt, Human
gugcugugggcaguggcc

SEQ ID NO: 128072 - RNA, 22 nt, Human
guccuuugaaggcaaaaggaga

SEQ ID NO: 128073 - RNA, 22 nt, Human
augaggcagucuggccugaggg

SEQ ID NO: 128074 - RNA, 22 nt, Human
aagaugcgguugaccauggugu

SEQ ID NO: 128075 - RNA, 22 nt, Human
ucucuuauuuugccuuugacaa

SEQ ID NO: 128076 - RNA, 22 nt, Human
cagagcuggccugugauuuuug

SEQ ID NO: 128077 - RNA, 22 nt, Human
uccugccuuagagcaaggaaaa

SEQ ID NO: 128078 - RNA, 22 nt, Human
aaugggaagucacuacuguuac

SEQ ID NO: 128079 - RNA, 22 nt, Human
ucaguggaguauggaugaaguc

SEQ ID NO: 128080 - RNA, 22 nt, Human
ggaggcaggaaagacagguuca

SEQ ID NO: 128081 - RNA, 22 nt, Human
uggcugagaaguucugguggga

SEQ ID NO: 128082 - RNA, 22 nt, Human
aauuaggaauaaaugaguacuu

SEQ ID NO: 128083 - RNA, 22 nt, Human
ccugggcaauauagugaggccc

SEQ ID NO: 128084 - RNA, 20 nt, Human
ggagaugcagcccaggugcc

SEQ ID NO: 128085 - RNA, 20 nt, Human
ggaagccagcauccuugagg

SEQ ID NO: 128086 - RNA, 22 nt, Human
uagucucuggagacucuagggg

SEQ ID NO: 128087 - RNA, 19 nt, Human
ucaguggagaaaggggaag

SEQ ID NO: 128088 - RNA, 23 nt, Human
acaugggagggacauggaggcug

SEQ ID NO: 128089 - RNA, 16 nt, Human
cagccugcagugguca

SEQ ID NO: 128090 - RNA, 22 nt, Human
uagccaggucacacuguguguu

SEQ ID NO: 128091 - RNA, 22 nt, Human
guuuuccacuggauuguuugga

SEQ ID NO: 128092 - RNA, 22 nt, Human
gagagggccagggugagaacua

SEQ ID NO: 128093 - RNA, 19 nt, Human
ugcagaagacacaguggug

SEQ ID NO: 128094 - RNA, 19 nt, Human
ugagcaugcgagcugagaa

SEQ ID NO: 128095 - RNA, 22 nt, Human
ucaggcaggcucagaggaaaac

SEQ ID NO: 128096 - RNA, 22 nt, Human
agcagggccuggcacuccuggg

SEQ ID NO: 128097 - RNA, 23 nt, Human
ccucccaggcugcgagucccgag

SEQ ID NO: 128098 - RNA, 22 nt, Human
uggcugcaguucacaggagcaa

SEQ ID NO: 128099 - RNA, 22 nt, Human
aguucuagaagacuuuuccauu

SEQ ID NO: 128100 - RNA, 22 nt, Human
aaggaagagucuagaacaggca

SEQ ID NO: 128101 - RNA, 22 nt, Human
ggucugagcuugagcccaugcu

SEQ ID NO: 128102 - RNA, 22 nt, Human
uuuugcuugagugcacaaaaug

SEQ ID NO: 128103 - RNA, 22 nt, Human
ugcccaggcuccucgcagccuu

SEQ ID NO: 128104 - RNA, 22 nt, Human
uccugggagagugggacuguau

SEQ ID NO: 128105 - RNA, 22 nt, Human
cugaggcuuugugugcaugccu

SEQ ID NO: 128106 - RNA, 22 nt, Human
cugccaggcacgugcagcauca

SEQ ID NO: 128107 - RNA, 22 nt, Human
ugcagggacacgaagacaaaua

SEQ ID NO: 128108 - RNA, 22 nt, Human
gguguagcucugugucccacug

SEQ ID NO: 128109 - RNA, 22 nt, Human
auuccaaacagugcugcagacu

SEQ ID NO: 128110 - RNA, 22 nt, Human
ccagggcagugggagaaggugc

SEQ ID NO: 128111 - RNA, 22 nt, Human
ggucucugacuuagagauggau

SEQ ID NO: 128112 - RNA, 22 nt, Human
ggcaggugaccuggccucccag

SEQ ID NO: 128113 - RNA, 17 nt, Human
aaguccagccugcagcu

SEQ ID NO: 128114 - RNA, 22 nt, Human
auagugggaauuacgauauacu

SEQ ID NO: 128115 - RNA, 22 nt, Human
aucaccaggcaaaaugucagag

SEQ ID NO: 128116 - RNA, 22 nt, Human
uuccauaauaggcuuaagugaa

SEQ ID NO: 128117 - RNA, 22 nt, Human
cagggcuggcucaugaaaaguu

SEQ ID NO: 128118 - RNA, 22 nt, Human
gaggucaggcuugcagcagggu

SEQ ID NO: 128119 - RNA, 22 nt, Human
cugcuguguuccuccugcaucu

SEQ ID NO: 128120 - RNA, 22 nt, Human
ucacacacauaaucuaagauua

SEQ ID NO: 128121 - RNA, 22 nt, Human
uggagcagcacaagaaagggga

SEQ ID NO: 128122 - RNA, 22 nt, Human
ugcagggccaugguggcggcug

SEQ ID NO: 128123 - RNA, 22 nt, Human
cagcugugcugauugcucagua

SEQ ID NO: 128124 - RNA, 22 nt, Human
cuggaagugggguuggcuugaa

SEQ ID NO: 128125 - RNA, 22 nt, Human
ccagggagccuggugugucagc

SEQ ID NO: 128126 - RNA, 22 nt, Human
ggcucaccauggccucccugcu

SEQ ID NO: 128127 - RNA, 22 nt, Human
agggccagccaggcccuacaaa

SEQ ID NO: 128128 - RNA, 22 nt, Human
acagccugcagccccaggucgc

SEQ ID NO: 128129 - RNA, 21 nt, Human
aggaaaggccagcacguaggg

SEQ ID NO: 128130 - RNA, 22 nt, Human
cagugcagguggcagaggacag

SEQ ID NO: 128131 - RNA, 22 nt, Human
gagagugaggcaucaggggcag

SEQ ID NO: 128132 - RNA, 22 nt, Human
agggucagagucaggugcagua

SEQ ID NO: 128133 - RNA, 22 nt, Human
ccaaaggccaagcucagguaaa

SEQ ID NO: 128134 - RNA, 17 nt, Human
gcaguggagggguaguu

SEQ ID NO: 128135 - RNA, 20 nt, Human
aggcagagcgcacuuuuaga

SEQ ID NO: 128136 - RNA, 21 nt, Human
ccuggccaaucugauaggguu

SEQ ID NO: 128137 - RNA, 22 nt, Human
cuguggaccugcucuuagagac

SEQ ID NO: 128138 - RNA, 22 nt, Human
cugaggcugggcugaggguaua

SEQ ID NO: 128139 - RNA, 22 nt, Human
aggccacaguacuuugcagacc

SEQ ID NO: 128140 - RNA, 22 nt, Human
agccaggcucaaggccugcucc

SEQ ID NO: 128141 - RNA, 22 nt, Human
gggggucccaagcugggcugcu

SEQ ID NO: 128142 - RNA, 22 nt, Human
gcagggcaugggcccugucugc

SEQ ID NO: 128143 - RNA, 22 nt, Human
agagccugaggaugucccagcu

SEQ ID NO: 128144 - RNA, 22 nt, Human
aaaagcagagacucuggagcua

SEQ ID NO: 128145 - RNA, 22 nt, Human
gcaaaggcuucuuuuauucucc

SEQ ID NO: 128146 - RNA, 18 nt, Human
gaucgggggcgccccaag

SEQ ID NO: 128147 - RNA, 22 nt, Human
gcuguggcuugcagcuggggcu

SEQ ID NO: 128148 - RNA, 22 nt, Human
gaauucugggagagaucugaca

SEQ ID NO: 128149 - RNA, 22 nt, Human
cagugcagccaaggacaggcac

SEQ ID NO: 128150 - RNA, 22 nt, Human
cagcaguggcugcaggcagcug

SEQ ID NO: 128151 - RNA, 22 nt, Human
agaaggcacucacacuggcacg

SEQ ID NO: 128152 - RNA, 22 nt, Human
agggcagcuggaagguggcuuc

SEQ ID NO: 128153 - RNA, 19 nt, Human
cagagcugcuggccucguc

SEQ ID NO: 128154 - RNA, 20 nt, Human
aagagcugacucacaguggu

SEQ ID NO: 128155 - RNA, 22 nt, Human
gaggcuggaauauuagaaaugu

SEQ ID NO: 128156 - RNA, 22 nt, Human
agcagccagaaagggcagucga

SEQ ID NO: 128157 - RNA, 22 nt, Human
ugaggcaggaguucaggcugcg

SEQ ID NO: 128158 - RNA, 22 nt, Human
gacagggaggagcagagcuucu

SEQ ID NO: 128159 - RNA, 22 nt, Human
cagagcuggcggugagaagaca

SEQ ID NO: 128160 - RNA, 22 nt, Human
aggcugaaaacgagauggcaau

SEQ ID NO: 128161 - RNA, 20 nt, Human
ggcagccaaucagcgugccg

SEQ ID NO: 128162 - RNA, 22 nt, Human
uauuuuaucugccagaguggag

SEQ ID NO: 128163 - RNA, 22 nt, Human
caaaugaagggagcugaagucu

SEQ ID NO: 128164 - RNA, 22 nt, Human
ggugaagggccuuaggagacag

SEQ ID NO: 128165 - RNA, 22 nt, Human
aggaguggaauuacuggguucu

SEQ ID NO: 128166 - RNA, 22 nt, Human
ccugggcaacauagugagaccu

SEQ ID NO: 128167 - RNA, 22 nt, Human
auacauacauguacacauaaau

SEQ ID NO: 128168 - RNA, 22 nt, Human
gaggagaaauuuggggaccuga

SEQ ID NO: 128169 - RNA, 19 nt, Human
ucagaggauuuggcuauga

SEQ ID NO: 128170 - RNA, 22 nt, Human
accagggcugacaaucugaugg

SEQ ID NO: 128171 - RNA, 22 nt, Human
ccaucccuucucuggccagcag

SEQ ID NO: 128172 - RNA, 17 nt, Human
ggcaccagacggagagu

SEQ ID NO: 128173 - RNA, 22 nt, Human
uggcagagguauauugggagga

SEQ ID NO: 128174 - RNA, 22 nt, Human
agggccagcugcagaauuagca

SEQ ID NO: 128175 - RNA, 22 nt, Human
gggcagugucggggcccaggga

SEQ ID NO: 128176 - RNA, 22 nt, Human
agggccugggucuguacuccuc

SEQ ID NO: 128177 - RNA, 22 nt, Human
agccagugaugaagacucugga

SEQ ID NO: 128178 - RNA, 22 nt, Human
ucugcagaauucgaggaagaaa

SEQ ID NO: 128179 - RNA, 22 nt, Human
uggaggagggcuggugucugua

SEQ ID NO: 128180 - RNA, 22 nt, Human
gggcuagaaauucugcagugga

SEQ ID NO: 128181 - RNA, 22 nt, Human
gggcugagcuaagcuggguuga

SEQ ID NO: 128182 - RNA, 22 nt, Human
ugcaggcucacccuggagcuga

SEQ ID NO: 128183 - RNA, 22 nt, Human
ugcaggaauagcuacagagcug

SEQ ID NO: 128184 - RNA, 22 nt, Human
ugcaguggaagagguggagauc

SEQ ID NO: 128185 - RNA, 22 nt, Human
gaguccuucuggcuggcaggau

SEQ ID NO: 128186 - RNA, 22 nt, Human
ucugaaggucugagaaccagga

SEQ ID NO: 128187 - RNA, 22 nt, Human
ucaggcugcuggccagcaggcu

SEQ ID NO: 128188 - RNA, 22 nt, Human
aagaugcaugcugaagcuggcu

SEQ ID NO: 128189 - RNA, 22 nt, Human
aggaaccagagguugagcaacu

SEQ ID NO: 128190 - RNA, 22 nt, Human
caggcagaaauuuuguuucauu

SEQ ID NO: 128191 - RNA, 22 nt, Human
uccaggcuccccugcgugcucc

SEQ ID NO: 128192 - RNA, 22 nt, Human
cagagcuguuacuauucaugaa

SEQ ID NO: 128193 - RNA, 22 nt, Human
cagcugaagaaagagugguuag

SEQ ID NO: 128194 - RNA, 22 nt, Human
acaguggaaagaacauggauuu

SEQ ID NO: 128195 - RNA, 22 nt, Human
aggagaaggaagugcaucacua

SEQ ID NO: 128196 - RNA, 22 nt, Human
gggcagugguccaggcuacagc

SEQ ID NO: 128197 - RNA, 22 nt, Human
aagggcagcuauuaucgucauc

SEQ ID NO: 128198 - RNA, 22 nt, Human
agccaggcgcaguggcuuaugc

SEQ ID NO: 128199 - RNA, 17 nt, Human
gcaagggaugggagauu

SEQ ID NO: 128200 - RNA, 22 nt, Human
gugugcagggggccagcgcagc

SEQ ID NO: 128201 - RNA, 22 nt, Human
ucaggcugguggucagauggcu

SEQ ID NO: 128202 - RNA, 22 nt, Human
gaaaucugaacaacagcuguca

SEQ ID NO: 128203 - RNA, 22 nt, Human
cauuauggcagccaggauauug

SEQ ID NO: 128204 - RNA, 22 nt, Human
ugcaggcugggaagagggacaa

SEQ ID NO: 128205 - RNA, 22 nt, Human
aagcagagccaccagcuuugga

SEQ ID NO: 128206 - RNA, 22 nt, Human
uccaugccaggcagucgaugca

SEQ ID NO: 128207 - RNA, 22 nt, Human
cugagcgcaugguugcugggga

SEQ ID NO: 128208 - RNA, 22 nt, Human
gaggaagaagggauuagaacuc

SEQ ID NO: 128209 - RNA, 21 nt, Human
aggugcaggccucaagcccca

SEQ ID NO: 128210 - RNA, 19 nt, Human
ggugugaagugaggaguua

SEQ ID NO: 128211 - RNA, 19 nt, Human
ugcagaggguaggaaggcc

SEQ ID NO: 128212 - RNA, 22 nt, Human
aaggggaauagaguggguugug

SEQ ID NO: 128213 - RNA, 22 nt, Human
aagagccagcuagugaagaggc

SEQ ID NO: 128214 - RNA, 22 nt, Human
gcacccagaauaaggacaggac

SEQ ID NO: 128215 - RNA, 22 nt, Human
ccagggcaacgcugucucagag

SEQ ID NO: 128216 - RNA, 22 nt, Human
aaguggagccagggaaacugaa

SEQ ID NO: 128217 - RNA, 22 nt, Human
ucgggcucgcucuccuagcgga

SEQ ID NO: 128218 - RNA, 22 nt, Human
aaagaaaccuaucagccacaug

SEQ ID NO: 128219 - RNA, 22 nt, Human
cccaggacucggcacucuccuu

SEQ ID NO: 128220 - RNA, 22 nt, Human
cagagcuggcucugcauguaca

SEQ ID NO: 128221 - RNA, 22 nt, Human
cugccaggacugacgucuucag

SEQ ID NO: 128222 - RNA, 22 nt, Human
ucucugagcaugccauauugcu

SEQ ID NO: 128223 - RNA, 22 nt, Human
aagccaggcugcacuugcuggg

SEQ ID NO: 128224 - RNA, 22 nt, Human
ccuggaguuuuuugguugacuc

SEQ ID NO: 128225 - RNA, 22 nt, Human
ugcagggcacggugcgcguggg

SEQ ID NO: 128226 - RNA, 22 nt, Human
ccagggcaaaugagaucauagc

SEQ ID NO: 128227 - RNA, 22 nt, Human
gugcugagcugcagaugcgcuc

SEQ ID NO: 128228 - RNA, 21 nt, Human
ucucacaauaugaugccagau

SEQ ID NO: 128229 - RNA, 22 nt, Human
agcagggcagcuuuuuucagaa

SEQ ID NO: 128230 - RNA, 22 nt, Human
cugcugugaguuuggaggucua

SEQ ID NO: 128231 - RNA, 22 nt, Human
ggaccugaacauaaaacgaggc

SEQ ID NO: 128232 - RNA, 22 nt, Human
cuccagugcgcaggacagcccc

SEQ ID NO: 128233 - RNA, 22 nt, Human
ccagguguaggacaccaaggga

SEQ ID NO: 128234 - RNA, 22 nt, Human
gcagaggagaugaagauacuuu

SEQ ID NO: 128235 - RNA, 22 nt, Human
ggagcacccugcucagccaagc

SEQ ID NO: 128236 - RNA, 22 nt, Human
acuguggccugcuguaugggcu

SEQ ID NO: 128237 - RNA, 22 nt, Human
ggcuguggcagcuggaaguggu

SEQ ID NO: 128238 - RNA, 22 nt, Human
gaggcaguggucugaugcaagg

SEQ ID NO: 128239 - RNA, 22 nt, Human
gaaggccugugguagugagacg

SEQ ID NO: 128240 - RNA, 22 nt, Human
aaugggaaagagacuagaugcu

SEQ ID NO: 128241 - RNA, 22 nt, Human
ucaggcugguccccacagugga

SEQ ID NO: 128242 - RNA, 22 nt, Human
ggagaagcaggugcuuuggguc

SEQ ID NO: 128243 - RNA, 22 nt, Human
cacagcuggggaagcugaggcc

SEQ ID NO: 128244 - RNA, 22 nt, Human
caggaagagaacauggaggcug

SEQ ID NO: 128245 - RNA, 22 nt, Human
aggagguggcugaacuugaggg

SEQ ID NO: 128246 - RNA, 22 nt, Human
ccugggcaacauagggagaccc

SEQ ID NO: 128247 - RNA, 20 nt, Human
ucaggcaguggggaaaggca

SEQ ID NO: 128248 - RNA, 22 nt, Human
aggacugacuuuugccaugaaa

SEQ ID NO: 128249 - RNA, 22 nt, Human
ucagggcaaugucccucagaag

SEQ ID NO: 128250 - RNA, 22 nt, Human
gaggcacaccagggagucuugu

SEQ ID NO: 128251 - RNA, 19 nt, Human
caggccagugucagggggc

SEQ ID NO: 128252 - RNA, 23 nt, Human
agcagcaaaaauuuaucuuucug

SEQ ID NO: 128253 - RNA, 22 nt, Human
cggucaggugcagcguuggcac

SEQ ID NO: 128254 - RNA, 22 nt, Human
gaggagggagcuggaagcucuu

SEQ ID NO: 128255 - RNA, 21 nt, Human
aggcagcaggauccagggaca

SEQ ID NO: 128256 - RNA, 19 nt, Human
aggcugugagggaggacuc

SEQ ID NO: 128257 - RNA, 22 nt, Human
ggugaaggcacaagagggcaag

SEQ ID NO: 128258 - RNA, 22 nt, Human
uggggcagcuccaucuauucca

SEQ ID NO: 128259 - RNA, 22 nt, Human
caaaugcaggucagcagguguc

SEQ ID NO: 128260 - RNA, 22 nt, Human
aaagggagcauggcugcaggga

SEQ ID NO: 128261 - RNA, 22 nt, Human
gggagaaguggaaaucucauua

SEQ ID NO: 128262 - RNA, 22 nt, Human
ucaccaggauugggcuguaggc

SEQ ID NO: 128263 - RNA, 22 nt, Human
agagcugauuugauuacagugc

SEQ ID NO: 128264 - RNA, 22 nt, Human
augagcugggccauccagugau

SEQ ID NO: 128265 - RNA, 23 nt, Human
acucagagaccccgggaagugac

SEQ ID NO: 128266 - RNA, 22 nt, Human
aggggcagccucacaauccucu

SEQ ID NO: 128267 - RNA, 22 nt, Human
cagaggcagaggucaucucugg

SEQ ID NO: 128268 - RNA, 22 nt, Human
agguggagacccagagaaggcg

SEQ ID NO: 128269 - RNA, 22 nt, Human
guggggcaugcacgcugcuccu

SEQ ID NO: 128270 - RNA, 21 nt, Human
gccaaggggguagcuauuccu

SEQ ID NO: 128271 - RNA, 22 nt, Human
cuccagugggggugagccuaga

SEQ ID NO: 128272 - RNA, 22 nt, Human
ugcccauguuucucuguauccc

SEQ ID NO: 128273 - RNA, 22 nt, Human
gccuggaguuguggugaagcca

SEQ ID NO: 128274 - RNA, 22 nt, Human
caugcagugacucagacacagg

SEQ ID NO: 128275 - RNA, 22 nt, Human
ggccaggccaagaggguuggaa

SEQ ID NO: 128276 - RNA, 22 nt, Human
ucagaggagaaguugggaaaau

SEQ ID NO: 128277 - RNA, 22 nt, Human
gugugcagcagagacaggacuc

SEQ ID NO: 128278 - RNA, 22 nt, Human
uggcagagaugaagaguuguuu

SEQ ID NO: 128279 - RNA, 22 nt, Human
ccugcccagcuucccgagugca

SEQ ID NO: 128280 - RNA, 22 nt, Human
agccaggccuuuucucaagguu

SEQ ID NO: 128281 - RNA, 22 nt, Human
acuaaauaguuuugacagaaca

SEQ ID NO: 128282 - RNA, 22 nt, Human
acagggcauuuccucuaugugu

SEQ ID NO: 128283 - RNA, 22 nt, Human
ggcaguggguuccccaaggcac

SEQ ID NO: 128284 - RNA, 22 nt, Human
cuguacucaagguaaaccagga

SEQ ID NO: 128285 - RNA, 22 nt, Human
aauucugugcaggcagagcuau

SEQ ID NO: 128286 - RNA, 22 nt, Human
agccaccaccacugaaagguua

SEQ ID NO: 128287 - RNA, 22 nt, Human
agcugaggcauggacaggcugc

SEQ ID NO: 128288 - RNA, 22 nt, Human
aaggggaaguagcaccagaggu

SEQ ID NO: 128289 - RNA, 22 nt, Human
cagagcugagucuucaagguug

SEQ ID NO: 128290 - RNA, 22 nt, Human
caggacccaaccucccugcucu

SEQ ID NO: 128291 - RNA, 22 nt, Human
aaaugcagauugucauucagga

SEQ ID NO: 128292 - RNA, 18 nt, Human
gugugcaguugcaggggu

SEQ ID NO: 128293 - RNA, 22 nt, Human
ccagagagucgaugggggacac

SEQ ID NO: 128294 - RNA, 23 nt, Human
cagaggcaucggauucaacauca

SEQ ID NO: 128295 - RNA, 22 nt, Human
aggaagccuggcauuaaaaagc

SEQ ID NO: 128296 - RNA, 22 nt, Human
uggcagaguaggauggcccugu

SEQ ID NO: 128297 - RNA, 22 nt, Human
aggcagccuauggggagcucag

SEQ ID NO: 128298 - RNA, 22 nt, Human
caccugggcuaaacuaugcagg

SEQ ID NO: 128299 - RNA, 22 nt, Human
aggcagguguuaacccucugag

SEQ ID NO: 128300 - RNA, 22 nt, Human
agcagguguagggcucuuugua

SEQ ID NO: 128301 - RNA, 22 nt, Human
uggcagagacaaggccgggccu

SEQ ID NO: 128302 - RNA, 22 nt, Human
gggcucagacaucccuccugga

SEQ ID NO: 128303 - RNA, 22 nt, Human
ugacauuuaucuucuacaauga

SEQ ID NO: 128304 - RNA, 22 nt, Human
acuuucuauucccacagagaua

SEQ ID NO: 128305 - RNA, 22 nt, Human
gagggaggcaucaugaauccag

SEQ ID NO: 128306 - RNA, 22 nt, Human
agaagccauagucugggaggca

SEQ ID NO: 128307 - RNA, 22 nt, Human
auuugauuagcuguguaauuuu

SEQ ID NO: 128308 - RNA, 20 nt, Human
cuccaggggaagagccuucc

SEQ ID NO: 128309 - RNA, 22 nt, Human
gagucugaugucccccaggcca

SEQ ID NO: 128310 - RNA, 22 nt, Human
aguggcagggcuggcugcugca

SEQ ID NO: 128311 - RNA, 22 nt, Human
ugccaggccaauucuauuugac

SEQ ID NO: 128312 - RNA, 22 nt, Human
auggaguucugccagcgcugcu

SEQ ID NO: 128313 - RNA, 22 nt, Human
caggagaaacauaauuuucugg

SEQ ID NO: 128314 - RNA, 22 nt, Human
agaagccacuggagguugagau

SEQ ID NO: 128315 - RNA, 22 nt, Human
aggcuuguggauuggagcgagu

SEQ ID NO: 128316 - RNA, 22 nt, Human
gcugagagcaaagcaugucuag

SEQ ID NO: 128317 - RNA, 22 nt, Human
ucaaaggcauugccaauaagua

SEQ ID NO: 128318 - RNA, 22 nt, Human
ggcugagcccccucugcguagg

SEQ ID NO: 128319 - RNA, 22 nt, Human
aguccaaagcagaugagggcca

SEQ ID NO: 128320 - RNA, 22 nt, Human
uggcugaguaaguugugauaug

SEQ ID NO: 128321 - RNA, 22 nt, Human
uccuuuggagcuugacugguag

SEQ ID NO: 128322 - RNA, 22 nt, Human
aggcagcauuugaauccagguc

SEQ ID NO: 128323 - RNA, 22 nt, Human
agcagggcagugaucagaaagg

SEQ ID NO: 128324 - RNA, 22 nt, Human
caccagguuccgggcagagcug

SEQ ID NO: 128325 - RNA, 22 nt, Human
aagggcaggaaaagauggaugu

SEQ ID NO: 128326 - RNA, 22 nt, Human
uggcugaggagggucuucuggu

SEQ ID NO: 128327 - RNA, 22 nt, Human
uggcucagaggggaagugguuu

SEQ ID NO: 128328 - RNA, 19 nt, Human
aguggcagaucuggaagua

SEQ ID NO: 128329 - RNA, 22 nt, Human
gaggaagggcugccugccgggc

SEQ ID NO: 128330 - RNA, 22 nt, Human
ugaggcucaaggucugguggag

SEQ ID NO: 128331 - RNA, 22 nt, Human
gagacguggccuuugccugagc

SEQ ID NO: 128332 - RNA, 22 nt, Human
gggaagguauuuagcugcugaa

SEQ ID NO: 128333 - RNA, 22 nt, Human
guggcagugugaggauccugcu

SEQ ID NO: 128334 - RNA, 22 nt, Human
gcaggcagagguggaggagaca

SEQ ID NO: 128335 - RNA, 20 nt, Human
cugcugugauucccuccucc

SEQ ID NO: 128336 - RNA, 22 nt, Human
caugccaguuuugagaugcacc

SEQ ID NO: 128337 - RNA, 22 nt, Human
ucagaggauugccucagcgagc

SEQ ID NO: 128338 - RNA, 20 nt, Human
cuguggcaucugucauggug

SEQ ID NO: 128339 - RNA, 22 nt, Human
caucccugcccucaugccuaua

SEQ ID NO: 128340 - RNA, 22 nt, Human
cgcagagggcaggcagugcugg

SEQ ID NO: 128341 - RNA, 22 nt, Human
cacaucuucuuaacuccaaagu

SEQ ID NO: 128342 - RNA, 22 nt, Human
caggcagcugcgacaagagagc

SEQ ID NO: 128343 - RNA, 22 nt, Human
acagggcagagaggcaggcuug

SEQ ID NO: 128344 - RNA, 22 nt, Human
ggcugaaggaugaaagcugcag

SEQ ID NO: 128345 - RNA, 22 nt, Human
aggcugagauagguggaucauu

SEQ ID NO: 128346 - RNA, 22 nt, Human
ugccaggcccugugcuggaugc

SEQ ID NO: 128347 - RNA, 22 nt, Human
agggucagggagugaguauuua

SEQ ID NO: 128348 - RNA, 22 nt, Human
aggcugaggggcgagggacccu

SEQ ID NO: 128349 - RNA, 20 nt, Human
caggcagaggaugcugacca

SEQ ID NO: 128350 - RNA, 22 nt, Human
augggcagagcuggugggaggc

SEQ ID NO: 128351 - RNA, 22 nt, Human
uggcugagccuuuggggcuuuc

SEQ ID NO: 128352 - RNA, 22 nt, Human
cagagcagaagcgguccucaca

SEQ ID NO: 128353 - RNA, 22 nt, Human
gcagguggagcaguagucuggu

SEQ ID NO: 128354 - RNA, 22 nt, Human
uggcugagggcacuaugaagcc

SEQ ID NO: 128355 - RNA, 22 nt, Human
uggcugaguuucaugcaucaug

SEQ ID NO: 128356 - RNA, 22 nt, Human
ccagagcagggcagcagggcuc

SEQ ID NO: 128357 - RNA, 22 nt, Human
agcagggcucuguggagggugg

SEQ ID NO: 128358 - RNA, 22 nt, Human
caaagccauagaguagauaaga

SEQ ID NO: 128359 - RNA, 22 nt, Human
ugaggcucagagaagugcuguu

SEQ ID NO: 128360 - RNA, 22 nt, Human
ucucucugccaacucacagcca

SEQ ID NO: 128361 - RNA, 22 nt, Human
ugaggcuccagccaggccagca

SEQ ID NO: 128362 - RNA, 22 nt, Human
cggcugugucuucacaggagcc

SEQ ID NO: 128363 - RNA, 22 nt, Human
cacccuagcugucauuucaguu

SEQ ID NO: 128364 - RNA, 22 nt, Human
agggcugacagugaggagucaa

SEQ ID NO: 128365 - RNA, 22 nt, Human
cagggccagcgcccaggcccag

SEQ ID NO: 128366 - RNA, 22 nt, Human
ggcagggagagcaugcugauaa

SEQ ID NO: 128367 - RNA, 21 nt, Human
acauuuucuguuuuaggaagu

SEQ ID NO: 128368 - RNA, 22 nt, Human
ggcaccaggcugggcauaggcc

SEQ ID NO: 128369 - RNA, 22 nt, Human
ccuccuagaggaaccccagggc

SEQ ID NO: 128370 - RNA, 22 nt, Human
cacccacauggaaauucacagu

SEQ ID NO: 128371 - RNA, 23 nt, Human
gguggcaggaguggaugcugagc

SEQ ID NO: 128372 - RNA, 22 nt, Human
cacagcugcacagaggaggugc

SEQ ID NO: 128373 - RNA, 22 nt, Human
cagcugggcuaagaguagaggc

SEQ ID NO: 128374 - RNA, 19 nt, Human
gggcaguggcacuagggag

SEQ ID NO: 128375 - RNA, 22 nt, Human
gggcugagccauuugaaccuug

SEQ ID NO: 128376 - RNA, 22 nt, Human
ccaaaggccaggcacugagguu

SEQ ID NO: 128377 - RNA, 22 nt, Human
cagcuggacuuuugauagaagu

SEQ ID NO: 128378 - RNA, 22 nt, Human
agaguuaagacguacaugagug

SEQ ID NO: 128379 - RNA, 22 nt, Human
cagagcugguaagugguagagg

SEQ ID NO: 128380 - RNA, 22 nt, Human
uguggcaggaagagcuucugag

SEQ ID NO: 128381 - RNA, 22 nt, Human
aggcaguuguugcugagcagcu

SEQ ID NO: 128382 - RNA, 22 nt, Human
cugccaggccuccgcugucccc

SEQ ID NO: 128383 - RNA, 22 nt, Human
uuuugaaagccagguuuguaug

SEQ ID NO: 128384 - RNA, 22 nt, Human
agauggggcugaaaguuccaau

SEQ ID NO: 128385 - RNA, 22 nt, Human
gauuuucauuauagcuaguuuc

SEQ ID NO: 128386 - RNA, 22 nt, Human
acucaguacaucuggaguuggc

SEQ ID NO: 128387 - RNA, 20 nt, Human
caucagugccugacaggucc

SEQ ID NO: 128388 - RNA, 22 nt, Human
agcagggcuggggcacgagcca

SEQ ID NO: 128389 - RNA, 22 nt, Human
aggaggaggcuggaguacaccc

SEQ ID NO: 128390 - RNA, 22 nt, Human
cagugaggaagcugucuggacc

SEQ ID NO: 128391 - RNA, 22 nt, Human
aggcucaggaggagcugccgga

SEQ ID NO: 128392 - RNA, 22 nt, Human
cucagaaguucagccuagagua

SEQ ID NO: 128393 - RNA, 22 nt, Human
caggaggagcauuagcgucuca

SEQ ID NO: 128394 - RNA, 22 nt, Human
cagaggcaaaagagguggaggu

SEQ ID NO: 128395 - RNA, 22 nt, Human
uagggcaguuucauguuaucuu

SEQ ID NO: 128396 - RNA, 22 nt, Human
cagccaccauacagcagaagcu

SEQ ID NO: 128397 - RNA, 22 nt, Human
aucaggaagccagucuaaugga

SEQ ID NO: 128398 - RNA, 18 nt, Human
aaagaaggauuggagagc

SEQ ID NO: 128399 - RNA, 22 nt, Human
ugcaggagaaaguacggagcgu

SEQ ID NO: 128400 - RNA, 22 nt, Human
cuguggcaggaagggacuagca

SEQ ID NO: 128401 - RNA, 22 nt, Human
agggagaaaauuggaugcacaa

SEQ ID NO: 128402 - RNA, 22 nt, Human
cagugcccaagaugugccaugc

SEQ ID NO: 128403 - RNA, 22 nt, Human
auucacaaagaagggaaguaca

SEQ ID NO: 128404 - RNA, 22 nt, Human
gaggaaaauauucagggagguu

SEQ ID NO: 128405 - RNA, 21 nt, Human
gcagaggaaugguauacauaa

SEQ ID NO: 128406 - RNA, 22 nt, Human
uggcagagugcagaagaggcau

SEQ ID NO: 128407 - RNA, 22 nt, Human
ggcaggaggugaguggcgggug

SEQ ID NO: 128408 - RNA, 22 nt, Human
agggugucagccacggaauggg

SEQ ID NO: 128409 - RNA, 22 nt, Human
cuggagcagcagguggccaggg

SEQ ID NO: 128410 - RNA, 20 nt, Human
gcugaagauucccaugcaag

SEQ ID NO: 128411 - RNA, 22 nt, Human
aagggcagaaagggacgcuuug

SEQ ID NO: 128412 - RNA, 22 nt, Human
gcuguggccuggcgcagagcug

SEQ ID NO: 128413 - RNA, 22 nt, Human
agagccugugauugucaucacc

SEQ ID NO: 128414 - RNA, 22 nt, Human
gugagaguguuuggaaauagaa

SEQ ID NO: 128415 - RNA, 19 nt, Human
agggcuaggcacauagggc

SEQ ID NO: 128416 - RNA, 22 nt, Human
aggaagcaaaaggcagggucua

SEQ ID NO: 128417 - RNA, 22 nt, Human
ucuguuccauguuuuguuccau

SEQ ID NO: 128418 - RNA, 22 nt, Human
ugaggcagugugagauaauaaa

SEQ ID NO: 128419 - RNA, 22 nt, Human
ucagggcaggacaguguaggcc

SEQ ID NO: 128420 - RNA, 22 nt, Human
uugcaagacacuuggaagcaca

SEQ ID NO: 128421 - RNA, 22 nt, Human
aaggcagauauaaagacuagag

SEQ ID NO: 128422 - RNA, 22 nt, Human
agccaggcuaaaugagccauga

SEQ ID NO: 128423 - RNA, 22 nt, Human
ucacagaaggcaucacagaaga

SEQ ID NO: 128424 - RNA, 19 nt, Human
gacucacaccuuccgcugu

SEQ ID NO: 128425 - RNA, 22 nt, Human
augggcaguaacaguggcaguc

SEQ ID NO: 128426 - RNA, 22 nt, Human
ugggcagcagcaaagccagacu

SEQ ID NO: 128427 - RNA, 22 nt, Human
acacuucucccaucuccuguug

SEQ ID NO: 128428 - RNA, 22 nt, Human
cauguuauuuauccauuaaaca

SEQ ID NO: 128429 - RNA, 22 nt, Human
ccagggcagccaacccagaugc

SEQ ID NO: 128430 - RNA, 22 nt, Human
cagggcuguggaaaacuggugc

SEQ ID NO: 128431 - RNA, 22 nt, Human
cagagcugggaucccaugggcg

SEQ ID NO: 128432 - RNA, 22 nt, Human
acagggcaaccucugggagacu

SEQ ID NO: 128433 - RNA, 22 nt, Human
agcagggcaguuaaaggguccu

SEQ ID NO: 128434 - RNA, 22 nt, Human
gagcugcagcggcugacgcaac

SEQ ID NO: 128435 - RNA, 20 nt, Human
agggucaguagcacagagcu

SEQ ID NO: 128436 - RNA, 19 nt, Human
ugagacagggauucaggug

SEQ ID NO: 128437 - RNA, 22 nt, Human
gcucccagucugauggaggaga

SEQ ID NO: 128438 - RNA, 22 nt, Human
gcagggcaguaagagcuagagu

SEQ ID NO: 128439 - RNA, 22 nt, Human
ggaagccaggcugggggaucug

SEQ ID NO: 128440 - RNA, 22 nt, Human
aguggcaguggggcagggcccu

SEQ ID NO: 128441 - RNA, 22 nt, Human
ccaggagccugggccaggcugg

SEQ ID NO: 128442 - RNA, 22 nt, Human
aagggugggcaccgccagguca

SEQ ID NO: 128443 - RNA, 22 nt, Human
ccaaugauggugcccacgauga

SEQ ID NO: 128444 - RNA, 22 nt, Human
caugucuugcccugauuaguag

SEQ ID NO: 128445 - RNA, 22 nt, Human
ucuguccuguuuccuccugaca

SEQ ID NO: 128446 - RNA, 22 nt, Human
gggcagagaaauggacaguugg

SEQ ID NO: 128447 - RNA, 22 nt, Human
acuuucauuuguaauaaacuuc

SEQ ID NO: 128448 - RNA, 22 nt, Human
gaggagcacaugaggcugaggg

SEQ ID NO: 128449 - RNA, 22 nt, Human
uuuacaaguuuacagaaugaug

SEQ ID NO: 128450 - RNA, 22 nt, Human
uguucccauuuucugcauaauc

SEQ ID NO: 128451 - RNA, 22 nt, Human
ugaagccagucaauguuaaguu

SEQ ID NO: 128452 - RNA, 22 nt, Human
ugaggcagggaguuuaauuguc

SEQ ID NO: 128453 - RNA, 22 nt, Human
agugcugacucugggcacagug

SEQ ID NO: 128454 - RNA, 22 nt, Human
aaagccaaaugaaagaugguuc

SEQ ID NO: 128455 - RNA, 22 nt, Human
ggcagaggaggggugaauuugc

SEQ ID NO: 128456 - RNA, 22 nt, Human
agguagaggccuccaggcagca

SEQ ID NO: 128457 - RNA, 21 nt, Human
ucaggcagugcaaauacaugg

SEQ ID NO: 128458 - RNA, 22 nt, Human
ugaggcagggagaguggauaug

SEQ ID NO: 128459 - RNA, 22 nt, Human
auucaguuucauggcacagcua

SEQ ID NO: 128460 - RNA, 23 nt, Human
ggggaaguggcagugagugaggc

SEQ ID NO: 128461 - RNA, 22 nt, Human
agggcaguucagccacaggcuc

SEQ ID NO: 128462 - RNA, 22 nt, Human
ucucccaggucauacacagaga

SEQ ID NO: 128463 - RNA, 22 nt, Human
agaagccauucccuguaggcuc

SEQ ID NO: 128464 - RNA, 20 nt, Human
ggagcugcccugggcuggag

SEQ ID NO: 128465 - RNA, 22 nt, Human
cuccaggguuccccgauccacu

SEQ ID NO: 128466 - RNA, 22 nt, Human
ccagguguggggaggacucaca

SEQ ID NO: 128467 - RNA, 22 nt, Human
uuacaaguauuuaagaugcugu

SEQ ID NO: 128468 - RNA, 22 nt, Human
gcagggcaaauguggaaaggag

SEQ ID NO: 128469 - RNA, 22 nt, Human
gguggcagaggugcaucagccc

SEQ ID NO: 128470 - RNA, 22 nt, Human
ugcaggcuggaggagggacuaa

SEQ ID NO: 128471 - RNA, 22 nt, Human
gaaggcacugaacuccuucugg

SEQ ID NO: 128472 - RNA, 22 nt, Human
acuguggaugccaaaggggagg

SEQ ID NO: 128473 - RNA, 22 nt, Human
ucaguggagagcuuccaggauu

SEQ ID NO: 128474 - RNA, 22 nt, Human
uuuucucaggugcuuaucuaag

SEQ ID NO: 128475 - RNA, 22 nt, Human
aggcucagagagcuguguccau

SEQ ID NO: 128476 - RNA, 22 nt, Human
uuugcuuguucaagauuucugu

SEQ ID NO: 128477 - RNA, 22 nt, Human
ucacauuuuaucugagauugac

SEQ ID NO: 128478 - RNA, 21 nt, Human
cagagcugaaggguguagugu

SEQ ID NO: 128479 - RNA, 19 nt, Human
ucaaaggcuuuuaggagac

SEQ ID NO: 128480 - RNA, 22 nt, Human
ucuggagcuggcagggcccugg

SEQ ID NO: 128481 - RNA, 22 nt, Human
ucucccaggugggugccuggag

SEQ ID NO: 128482 - RNA, 22 nt, Human
aaagagcucacaguccacugga

SEQ ID NO: 128483 - RNA, 22 nt, Human
ugaaggcauugaugaaggaauc

SEQ ID NO: 128484 - RNA, 22 nt, Human
cugcugugugaccauggacagg

SEQ ID NO: 128485 - RNA, 22 nt, Human
aaagggcugucaaauaagcaac

SEQ ID NO: 128486 - RNA, 22 nt, Human
aggcucagccccugggaggaga

SEQ ID NO: 128487 - RNA, 22 nt, Human
acagcugugaagcaagcacucu

SEQ ID NO: 128488 - RNA, 22 nt, Human
agauuaugcuggcugcuacaag

SEQ ID NO: 128489 - RNA, 22 nt, Human
aagagcuggaguuugcagcccu

SEQ ID NO: 128490 - RNA, 22 nt, Human
ccuggagccccucuggccagcc

SEQ ID NO: 128491 - RNA, 22 nt, Human
cccaguuguugccggcucugga

SEQ ID NO: 128492 - RNA, 22 nt, Human
ucagggcauggcugcacuuggc

SEQ ID NO: 128493 - RNA, 22 nt, Human
caggcaggugcagauuccucuu

SEQ ID NO: 128494 - RNA, 22 nt, Human
gaaggcuggaaggcaaguagga

SEQ ID NO: 128495 - RNA, 22 nt, Human
agaauuagaggccauguacuug

SEQ ID NO: 128496 - RNA, 22 nt, Human
gccagaaagaggaggaccuggg

SEQ ID NO: 128497 - RNA, 22 nt, Human
caggaccccauauucacugaac

SEQ ID NO: 128498 - RNA, 22 nt, Human
acucagaggcagcugcucaccc

SEQ ID NO: 128499 - RNA, 22 nt, Human
ucaucaaagucaaagaaugacu

SEQ ID NO: 128500 - RNA, 22 nt, Human
agggcagccugagugcuggccc

SEQ ID NO: 128501 - RNA, 22 nt, Human
ucucugagacaguagccucugc

SEQ ID NO: 128502 - RNA, 17 nt, Human
cagggcugucugccuag

SEQ ID NO: 128503 - RNA, 22 nt, Human
aggcugagcaaagggccuuacc

SEQ ID NO: 128504 - RNA, 22 nt, Human
caggaggaggguacaccaucag

SEQ ID NO: 128505 - RNA, 22 nt, Human
cagggcaguuugugccuaugag

SEQ ID NO: 128506 - RNA, 18 nt, Human
aggaagcaggaggaaggc

SEQ ID NO: 128507 - RNA, 22 nt, Human
agaagcuugaaggagcagugac

SEQ ID NO: 128508 - RNA, 22 nt, Human
aggcugagcuggcccuugaaau

SEQ ID NO: 128509 - RNA, 22 nt, Human
uaauccaggguauucuaguuuc

SEQ ID NO: 128510 - RNA, 22 nt, Human
caugggcaguuggcagggcuca

SEQ ID NO: 128511 - RNA, 22 nt, Human
gcaugggcuuucucagaguucu

SEQ ID NO: 128512 - RNA, 22 nt, Human
aacauugccaugguuaauuuua

SEQ ID NO: 128513 - RNA, 22 nt, Human
caguggagagacuuuuacucuu

SEQ ID NO: 128514 - RNA, 22 nt, Human
gucagcaccucuuuggggagcu

SEQ ID NO: 128515 - RNA, 22 nt, Human
aggcagugugggccaagcuucc

SEQ ID NO: 128516 - RNA, 23 nt, Human
gagugcagaauagacaugcagug

SEQ ID NO: 128517 - RNA, 22 nt, Human
ugccaggccucaggagucucca

SEQ ID NO: 128518 - RNA, 17 nt, Human
ugaagaugcauggcagc

SEQ ID NO: 128519 - RNA, 22 nt, Human
uggcugaggucuggggcuucug

SEQ ID NO: 128520 - RNA, 22 nt, Human
aggcugagucgggaggaucacu

SEQ ID NO: 128521 - RNA, 22 nt, Human
acaguggaaagaaacgaauuag

SEQ ID NO: 128522 - RNA, 22 nt, Human
agagccuggagguucugcugaa

SEQ ID NO: 128523 - RNA, 22 nt, Human
ucaucacauguguagucauccc

SEQ ID NO: 128524 - RNA, 21 nt, Human
uaagccaccaugugaaaccag

SEQ ID NO: 128525 - RNA, 22 nt, Human
gaagccaggggccugacaggca

SEQ ID NO: 128526 - RNA, 22 nt, Human
gggggacuaacuggauccugga

SEQ ID NO: 128527 - RNA, 22 nt, Human
uggcagaguuggagguggaaga

SEQ ID NO: 128528 - RNA, 22 nt, Human
aaggugucggcagagccgcuuc

SEQ ID NO: 128529 - RNA, 20 nt, Human
gggagaagggcugaugagag

SEQ ID NO: 128530 - RNA, 22 nt, Human
uuugagaagcaucugguccacu

SEQ ID NO: 128531 - RNA, 18 nt, Human
gagagcugcuaccuagcu

SEQ ID NO: 128532 - RNA, 22 nt, Human
aggcugagcugguagugaguac

SEQ ID NO: 128533 - RNA, 22 nt, Human
gugggcagugguuugcgcgguc

SEQ ID NO: 128534 - RNA, 22 nt, Human
ucuaguucuagaucccugagga

SEQ ID NO: 128535 - RNA, 22 nt, Human
ggguuggggcccagcagucugc

SEQ ID NO: 128536 - RNA, 22 nt, Human
uccugguggcuuucccugccuu

SEQ ID NO: 128537 - RNA, 20 nt, Human
uuggcucugaucaguggagc

SEQ ID NO: 128538 - RNA, 22 nt, Human
uagggcagccuuauagcuccca

SEQ ID NO: 128539 - RNA, 22 nt, Human
agcugcagugaacuguuuuguc

SEQ ID NO: 128540 - RNA, 22 nt, Human
aagcaguguucccagcuggccc

SEQ ID NO: 128541 - RNA, 22 nt, Human
uucagauguggcuuugucaggc

SEQ ID NO: 128542 - RNA, 22 nt, Human
uuccucaggcuucccuuugucc

SEQ ID NO: 128543 - RNA, 22 nt, Human
auucacaauuagaaguagauaa

SEQ ID NO: 128544 - RNA, 22 nt, Human
uuucacaaucaaauggugaaau

SEQ ID NO: 128545 - RNA, 22 nt, Human
agggccagaaucccucagucua

SEQ ID NO: 128546 - RNA, 22 nt, Human
uggaggcaguaacugagcaaca

SEQ ID NO: 128547 - RNA, 22 nt, Human
gggcaggugcccagggccagag

SEQ ID NO: 128548 - RNA, 22 nt, Human
uaguggagaggauguggagaaa

SEQ ID NO: 128549 - RNA, 22 nt, Human
augaggcaggauuaagcuauca

SEQ ID NO: 128550 - RNA, 22 nt, Human
ucaggcugcaucuguaagggug

SEQ ID NO: 128551 - RNA, 22 nt, Human
uggaaguggcagaaaaugaaca

SEQ ID NO: 128552 - RNA, 22 nt, Human
uugcucugaacccagggcacca

SEQ ID NO: 128553 - RNA, 22 nt, Human
gaggcucagggaguauaugaau

SEQ ID NO: 128554 - RNA, 22 nt, Human
agugcccuggcccagcuggacc

SEQ ID NO: 128555 - RNA, 22 nt, Human
aagccaguguccagaaugggca

SEQ ID NO: 128556 - RNA, 22 nt, Human
cuccagggaaaggggcguccgc

SEQ ID NO: 128557 - RNA, 22 nt, Human
cugagcagcaacccagagccuc

SEQ ID NO: 128558 - RNA, 17 nt, Human
agggucaggugaaguuc

SEQ ID NO: 128559 - RNA, 22 nt, Human
cugagcacugggcacauagcug

SEQ ID NO: 128560 - RNA, 22 nt, Human
uuagagccaguuacaaggucaa

SEQ ID NO: 128561 - RNA, 22 nt, Human
cagagcuggacuuaaauauauu

SEQ ID NO: 128562 - RNA, 22 nt, Human
uggcucaguuucaguccugguu

SEQ ID NO: 128563 - RNA, 20 nt, Human
ucccaggcugggcuccagcu

SEQ ID NO: 128564 - RNA, 21 nt, Human
uuagaagcuaaugcagcuggu

SEQ ID NO: 128565 - RNA, 22 nt, Human
cgagcaugaugacggcuguggc

SEQ ID NO: 128566 - RNA, 22 nt, Human
gagaggaguaggcugauggugc

SEQ ID NO: 128567 - RNA, 22 nt, Human
gaggggaaagugugaggcugcg

SEQ ID NO: 128568 - RNA, 22 nt, Human
aggagggcaggcuggcugccua

SEQ ID NO: 128569 - RNA, 22 nt, Human
ucagaggaugcuguucuuuaau

SEQ ID NO: 128570 - RNA, 19 nt, Human
ucaguggaugaacauguuu

SEQ ID NO: 128571 - RNA, 22 nt, Human
aagaggaagucuccauggagag

SEQ ID NO: 128572 - RNA, 20 nt, Human
caggaggcaaggucaagguc

SEQ ID NO: 128573 - RNA, 22 nt, Human
aaguggagucccuacaaccagc

SEQ ID NO: 128574 - RNA, 23 nt, Human
ugcagggcaaguuagagacccca

SEQ ID NO: 128575 - RNA, 22 nt, Human
aggcugaggcuuuccuuggaga

SEQ ID NO: 128576 - RNA, 23 nt, Human
acagggcauugcuggccucgagg

SEQ ID NO: 128577 - RNA, 22 nt, Human
aggagcagaacuguuguggagg

SEQ ID NO: 128578 - RNA, 22 nt, Human
gaggaagaauugguuauuggag

SEQ ID NO: 128579 - RNA, 22 nt, Human
gacuucaaaggucaaacaucgc

SEQ ID NO: 128580 - RNA, 22 nt, Human
aggcagguccccuggaaggcac

SEQ ID NO: 128581 - RNA, 22 nt, Human
aauggcugccagggcaggaggu

SEQ ID NO: 128582 - RNA, 18 nt, Human
ccgggcuuuggugacaca

SEQ ID NO: 128583 - RNA, 22 nt, Human
acaguggaugugauguccaggu

SEQ ID NO: 128584 - RNA, 22 nt, Human
ggaggagacggagugauuagug

SEQ ID NO: 128585 - RNA, 22 nt, Human
uggcaggaaaaacauuggagau

SEQ ID NO: 128586 - RNA, 22 nt, Human
gcuguggccgucagggaaaugg

SEQ ID NO: 128587 - RNA, 19 nt, Human
aauucuguuucagcagauc

SEQ ID NO: 128588 - RNA, 22 nt, Human
gugaggcagcaggagccucugu

SEQ ID NO: 128589 - RNA, 22 nt, Human
agagucugaaugcucagaguug

SEQ ID NO: 128590 - RNA, 22 nt, Human
gacccuggaguuaguccugugu

SEQ ID NO: 128591 - RNA, 22 nt, Human
accacccucagcagagcugaaa

SEQ ID NO: 128592 - RNA, 22 nt, Human
auuccaaaaggauguuagaaug

SEQ ID NO: 128593 - RNA, 22 nt, Human
ucagaggauuggacuuuuaugu

SEQ ID NO: 128594 - RNA, 22 nt, Human
ccagggcauguaacuaauggug

SEQ ID NO: 128595 - RNA, 22 nt, Human
ucccacuggacgucugugcugg

SEQ ID NO: 128596 - RNA, 17 nt, Human
uggcaagaauggaaaug

SEQ ID NO: 128597 - RNA, 18 nt, Human
uggugaaggguggaggag

SEQ ID NO: 128598 - RNA, 22 nt, Human
cauuuucaugaguuucuguuca

SEQ ID NO: 128599 - RNA, 16 nt, Human
uagggcugggaaggag

SEQ ID NO: 128600 - RNA, 21 nt, Human
agcagaggcagaauguaugca

SEQ ID NO: 128601 - RNA, 22 nt, Human
aaggugugaagagaugggaaga

SEQ ID NO: 128602 - RNA, 22 nt, Human
aaguccagaacuccugugauag

SEQ ID NO: 128603 - RNA, 22 nt, Human
gggcaggugccagcucccuguc

SEQ ID NO: 128604 - RNA, 22 nt, Human
gauuuauuuuuaaucagcaggg

SEQ ID NO: 128605 - RNA, 22 nt, Human
agggcagcaaugcagcugcugc

SEQ ID NO: 128606 - RNA, 22 nt, Human
ucaggcugcagcugucagcagc

SEQ ID NO: 128607 - RNA, 22 nt, Human
uggggcagcagaccuuucuugg

SEQ ID NO: 128608 - RNA, 22 nt, Human
ugccaggcccugcgggguccca

SEQ ID NO: 128609 - RNA, 22 nt, Human
acaaaggcagccaaucaucugc

SEQ ID NO: 128610 - RNA, 19 nt, Human
uugcuucaugucuuuugcu

SEQ ID NO: 128611 - RNA, 22 nt, Human
cugggguuggccagggcccuag

SEQ ID NO: 128612 - RNA, 19 nt, Human
ucucccaugccugugucua

SEQ ID NO: 128613 - RNA, 22 nt, Human
augcaguuagguaauagucuca

SEQ ID NO: 128614 - RNA, 22 nt, Human
cuucauuucaggcugaagaaua

SEQ ID NO: 128615 - RNA, 22 nt, Human
guuauucuauuaaugugauugu

SEQ ID NO: 128616 - RNA, 22 nt, Human
cuggugcuguagccugauugag

SEQ ID NO: 128617 - RNA, 22 nt, Human
caaguaugagaaagcuauuacc

SEQ ID NO: 128618 - RNA, 22 nt, Human
gugagagugguuuauguccaug

SEQ ID NO: 128619 - RNA, 22 nt, Human
uuuuggcucugcagguuugcac

SEQ ID NO: 128620 - RNA, 22 nt, Human
uuccuccagccuggagcacuuc

SEQ ID NO: 128621 - RNA, 23 nt, Human
uugguuacuggauuugaggggcc

SEQ ID NO: 128622 - RNA, 22 nt, Human
auucuugauauagauaguuaau

SEQ ID NO: 128623 - RNA, 22 nt, Human
cacuuggaggaaggccuauuca

SEQ ID NO: 128624 - RNA, 22 nt, Human
aagguggcggcugccagguccu

SEQ ID NO: 128625 - RNA, 22 nt, Human
guauuucuuuacauaugcucau

SEQ ID NO: 128626 - RNA, 22 nt, Human
ugcaugguguaauucuaaugcu

SEQ ID NO: 128627 - RNA, 22 nt, Human
aauucagguuauauuugcaacu

SEQ ID NO: 128628 - RNA, 22 nt, Human
ggcaguggugggaggcucgcuc

SEQ ID NO: 128629 - RNA, 23 nt, Human
ucucaggguggcugggcccaucc

SEQ ID NO: 128630 - RNA, 22 nt, Human
ucuucaugucucugcuugaguc

SEQ ID NO: 128631 - RNA, 22 nt, Human
cacugcccuggggguugccauc

SEQ ID NO: 128632 - RNA, 22 nt, Human
auuguacucuagccucugggca

SEQ ID NO: 128633 - RNA, 22 nt, Human
aucuaugugggaaucauaauag

SEQ ID NO: 128634 - RNA, 21 nt, Human
gucuuuuuaauugcgauuucc

SEQ ID NO: 128635 - RNA, 22 nt, Human
cugaaacuauggggaggggagc

SEQ ID NO: 128636 - RNA, 22 nt, Human
acuuaccagagaggauccgccc

SEQ ID NO: 128637 - RNA, 22 nt, Human
cauuuugugcuagacacuaugg

SEQ ID NO: 128638 - RNA, 22 nt, Human
ccuguacuuguauuaaaggucc

SEQ ID NO: 128639 - RNA, 22 nt, Human
uugggauuacagguguaagcca

SEQ ID NO: 128640 - RNA, 22 nt, Human
uuucccaggcuggaaugcagug

SEQ ID NO: 128641 - RNA, 22 nt, Human
aguucaauuguuuuguaaaagu

SEQ ID NO: 128642 - RNA, 22 nt, Human
uggaucuugaugcuccaagagu

SEQ ID NO: 128643 - RNA, 22 nt, Human
ucucugucucccguguguccgg

SEQ ID NO: 128644 - RNA, 22 nt, Human
guccuuucgagggugagugaaa

SEQ ID NO: 128645 - RNA, 22 nt, Human
auuguuacuggguuaauuugga

SEQ ID NO: 128646 - RNA, 22 nt, Human
gcagccuccgcacugcgagucc

SEQ ID NO: 128647 - RNA, 22 nt, Human
cuuuggaaaaauaccuggcaua

SEQ ID NO: 128648 - RNA, 22 nt, Human
acucaucuuugaauuuucagua

SEQ ID NO: 128649 - RNA, 22 nt, Human
ucaucuccauacggucucgcag

SEQ ID NO: 128650 - RNA, 22 nt, Human
augguuuuguccucuuugguuc

SEQ ID NO: 128651 - RNA, 22 nt, Human
guuuuguucaugaacauugggu

SEQ ID NO: 128652 - RNA, 18 nt, Human
cuggucucccuucgcuuu

SEQ ID NO: 128653 - RNA, 22 nt, Human
aucccugugacgagcaucccua

SEQ ID NO: 128654 - RNA, 22 nt, Human
uuggauggagguucaagcacua

SEQ ID NO: 128655 - RNA, 16 nt, Human
ucucugcuucauaggu

SEQ ID NO: 128656 - RNA, 22 nt, Human
gucaggggccaugggccaagga

SEQ ID NO: 128657 - RNA, 22 nt, Human
auauggcuguugcacaucuaag

SEQ ID NO: 128658 - RNA, 22 nt, Human
augggagugacagggccacugg

SEQ ID NO: 128659 - RNA, 22 nt, Human
cuauacagcagcuuacuaguua

SEQ ID NO: 128660 - RNA, 22 nt, Human
uugacuauacucuggcggaaaa

SEQ ID NO: 128661 - RNA, 22 nt, Human
cauguguauuauucuuguggaa

SEQ ID NO: 128662 - RNA, 22 nt, Human
uccuuagagugguugugcuaug

SEQ ID NO: 128663 - RNA, 22 nt, Human
uucuacauugugaaguucuuua

SEQ ID NO: 128664 - RNA, 18 nt, Human
ucugugggaucagugagg

SEQ ID NO: 128665 - RNA, 22 nt, Human
aggugcugccccgagaaggaug

SEQ ID NO: 128666 - RNA, 22 nt, Human
uacaucucaucugugcucuccg

SEQ ID NO: 128667 - RNA, 22 nt, Human
uacaguaaccagucuacuuaga

SEQ ID NO: 128668 - RNA, 22 nt, Human
uuuugguaauuaaguagauauu

SEQ ID NO: 128669 - RNA, 22 nt, Human
cugcacagucauuuccucucaa

SEQ ID NO: 128670 - RNA, 18 nt, Human
uccuuucaccccuucucu

SEQ ID NO: 128671 - RNA, 22 nt, Human
cggcuucucgggucggauuccg

SEQ ID NO: 128672 - RNA, 22 nt, Human
agggcccuagggaaugagacau

SEQ ID NO: 128673 - RNA, 22 nt, Human
cucuaaauguggucugcagaua

SEQ ID NO: 128674 - RNA, 22 nt, Human
gcagcuuuggagguggaacucu

SEQ ID NO: 128675 - RNA, 22 nt, Human
uuucuacauuuguaaccagauu

SEQ ID NO: 128676 - RNA, 22 nt, Human
gcuguagguaaggauggcaaag

SEQ ID NO: 128677 - RNA, 22 nt, Human
uuccuuucucuggacugcagcc

SEQ ID NO: 128678 - RNA, 22 nt, Human
caggccugugacaccgugucug

SEQ ID NO: 128679 - RNA, 22 nt, Human
guaguucuuucucaauguucaa

SEQ ID NO: 128680 - RNA, 22 nt, Human
ucaucuguuaugggaguuuuug

SEQ ID NO: 128681 - RNA, 22 nt, Human
cuucucuuggguguggugucuu

SEQ ID NO: 128682 - RNA, 22 nt, Human
acauuucuccuacuuguuauuu

SEQ ID NO: 128683 - RNA, 22 nt, Human
uauacuacgcaccaaacaaagg

SEQ ID NO: 128684 - RNA, 22 nt, Human
augcauugaggaugacaugagu

SEQ ID NO: 128685 - RNA, 22 nt, Human
ucugccaucaagaugcucuggc

SEQ ID NO: 128686 - RNA, 22 nt, Human
ggugggugagcccugggagcug

SEQ ID NO: 128687 - RNA, 22 nt, Human
cuucagggaggagcauggguuc

SEQ ID NO: 128688 - RNA, 22 nt, Human
ucacagcugggguuuuggcagc

SEQ ID NO: 128689 - RNA, 22 nt, Human
cuuuggucuccgucaucaauca

SEQ ID NO: 128690 - RNA, 22 nt, Human
uggugcugccaccuccucugcu

SEQ ID NO: 128691 - RNA, 22 nt, Human
ugaggucuguccugucuuugga

SEQ ID NO: 128692 - RNA, 22 nt, Human
guucuucagauuccauuucagu

SEQ ID NO: 128693 - RNA, 22 nt, Human
augcacuaugaugagcuagucu

SEQ ID NO: 128694 - RNA, 22 nt, Human
gucauuuuugacuuugaaguga

SEQ ID NO: 128695 - RNA, 22 nt, Human
uucuucauucccuuacuuccga

SEQ ID NO: 128696 - RNA, 22 nt, Human
uucuguuuauaauuugcaguug

SEQ ID NO: 128697 - RNA, 22 nt, Human
ugggugguugcugaggcuccuu

SEQ ID NO: 128698 - RNA, 15 nt, Human
uggugguguugagac

SEQ ID NO: 128699 - RNA, 22 nt, Human
cuucagggguguuaguuuugug

SEQ ID NO: 128700 - RNA, 19 nt, Human
auucuucucuuccugcugu

SEQ ID NO: 128701 - RNA, 22 nt, Human
cuggcccugucagcacagaauc

SEQ ID NO: 128702 - RNA, 22 nt, Human
uucugugcucaaaacuuuccaa

SEQ ID NO: 128703 - RNA, 18 nt, Human
cuacauucauaggaaagg

SEQ ID NO: 128704 - RNA, 22 nt, Human
ccuuuuggccaggucagugcag

SEQ ID NO: 128705 - RNA, 22 nt, Human
gagcccuuuuccuagauacugu

SEQ ID NO: 128706 - RNA, 22 nt, Human
aucaucaucuaaauugugucgc

SEQ ID NO: 128707 - RNA, 22 nt, Human
uuuggucuggaaucuucagggu

SEQ ID NO: 128708 - RNA, 22 nt, Human
uuucuucucacccaggacagag

SEQ ID NO: 128709 - RNA, 22 nt, Human
ucucucugcagcccgggacacu

SEQ ID NO: 128710 - RNA, 22 nt, Human
uuagacagagcuccuugagggc

SEQ ID NO: 128711 - RNA, 22 nt, Human
uuacaguuuacauaagaauugu

SEQ ID NO: 128712 - RNA, 22 nt, Human
ucuucaugaaauugauugcuua

SEQ ID NO: 128713 - RNA, 19 nt, Human
cauaauacaguggaucuga

SEQ ID NO: 128714 - RNA, 22 nt, Human
ccucuucagcaaaguucggccc

SEQ ID NO: 128715 - RNA, 22 nt, Human
cucuggaucugcccugacgcca

SEQ ID NO: 128716 - RNA, 22 nt, Human
caagucugaccucugggugaag

SEQ ID NO: 128717 - RNA, 22 nt, Human
gcugcuuugucuguaaaaugga

SEQ ID NO: 128718 - RNA, 22 nt, Human
acagcugugggcucugcauaua

SEQ ID NO: 128719 - RNA, 22 nt, Human
uguguuuuggaaggaacaugca

SEQ ID NO: 128720 - RNA, 22 nt, Human
uucucuucacagggaucauccu

SEQ ID NO: 128721 - RNA, 22 nt, Human
uuuggauugcuuggaugcuucg

SEQ ID NO: 128722 - RNA, 22 nt, Human
uaucaguccaggguuuugugac

SEQ ID NO: 128723 - RNA, 22 nt, Human
cuacauuuacacaguuaggcuu

SEQ ID NO: 128724 - RNA, 22 nt, Human
ugucauuggugaucugaugccu

SEQ ID NO: 128725 - RNA, 22 nt, Human
gauggugcaggugaagugcugg

SEQ ID NO: 128726 - RNA, 17 nt, Human
ucugcagggggccgugu

SEQ ID NO: 128727 - RNA, 22 nt, Human
uccucuucaaaauagcucugaa

SEQ ID NO: 128728 - RNA, 22 nt, Human
gccuucugaucgcuggacugac

SEQ ID NO: 128729 - RNA, 22 nt, Human
gccccucuccuugugcaccugc

SEQ ID NO: 128730 - RNA, 22 nt, Human
aaggaggaauguagccagcucc

SEQ ID NO: 128731 - RNA, 22 nt, Human
ugucuucuaccuugacagcauu

SEQ ID NO: 128732 - RNA, 21 nt, Human
cacuccacuuagaacaggguu

SEQ ID NO: 128733 - RNA, 22 nt, Human
ucacacuuuauuuauuucaugc

SEQ ID NO: 128734 - RNA, 22 nt, Human
uuuugucagugagaacagaguu

SEQ ID NO: 128735 - RNA, 22 nt, Human
gccuucugauugcuggacugac

SEQ ID NO: 128736 - RNA, 22 nt, Human
gugcugucguggaacugggcug

SEQ ID NO: 128737 - RNA, 22 nt, Human
gugggaguggagcucagcaugu

SEQ ID NO: 128738 - RNA, 22 nt, Human
gauccacagcugcgguaggaga

SEQ ID NO: 128739 - RNA, 22 nt, Human
ucuggauggucagcucuuccug

SEQ ID NO: 128740 - RNA, 22 nt, Human
augcauaucuccuaucuccuca

SEQ ID NO: 128741 - RNA, 22 nt, Human
auacuaagcucauuacauuuug

SEQ ID NO: 128742 - RNA, 22 nt, Human
auggcauuugaaucugucuuuu

SEQ ID NO: 128743 - RNA, 22 nt, Human
aggauugugccuccagucagaa

SEQ ID NO: 128744 - RNA, 22 nt, Human
cacaucucagggcuacaggcag

SEQ ID NO: 128745 - RNA, 22 nt, Human
gcugucucauacaaggcccugc

SEQ ID NO: 128746 - RNA, 22 nt, Human
aguucugggaggugcacgucca

SEQ ID NO: 128747 - RNA, 22 nt, Human
gucuuuuuuacaccuuacauca

SEQ ID NO: 128748 - RNA, 22 nt, Human
ugguacauggguagguaucucu

SEQ ID NO: 128749 - RNA, 21 nt, Human
uggacauuuacccuucaggga

SEQ ID NO: 128750 - RNA, 22 nt, Human
acuuuggugcgaagucacuuua

SEQ ID NO: 128751 - RNA, 22 nt, Human
gggcuucuugagcugccggccc

SEQ ID NO: 128752 - RNA, 22 nt, Human
auuuuguaucuuacggggacua

SEQ ID NO: 128753 - RNA, 22 nt, Human
uauuacaguucgaguuucuagg

SEQ ID NO: 128754 - RNA, 22 nt, Human
agugaauuagccuauuuguaaa

SEQ ID NO: 128755 - RNA, 22 nt, Human
agugacauuauuuuguguacua

SEQ ID NO: 128756 - RNA, 22 nt, Human
uaauuuugucacagugacaugc

SEQ ID NO: 128757 - RNA, 22 nt, Human
uugugcccucaaagggugcguc

SEQ ID NO: 128758 - RNA, 22 nt, Human
ugcacauggccugagugccuga

SEQ ID NO: 128759 - RNA, 22 nt, Human
augacuuaaucauacuugcauu

SEQ ID NO: 128760 - RNA, 22 nt, Human
uugcuauuuugagagucauagu

SEQ ID NO: 128761 - RNA, 22 nt, Human
uacuguauacuacugcuguucu

SEQ ID NO: 128762 - RNA, 22 nt, Human
acacauggucuacuucuucuca

SEQ ID NO: 128763 - RNA, 22 nt, Human
ugaugggaggugcugcaggacc

SEQ ID NO: 128764 - RNA, 20 nt, Human
uucaugcagugguugcugug

SEQ ID NO: 128765 - RNA, 22 nt, Human
uggcacguuggauugggaguuc

SEQ ID NO: 128766 - RNA, 22 nt, Human
cuugcuuuaucugguuucucau

SEQ ID NO: 128767 - RNA, 22 nt, Human
cuucauuuggcaggcuggccuc

SEQ ID NO: 128768 - RNA, 22 nt, Human
uacuacauacagaauuuagaga

SEQ ID NO: 128769 - RNA, 23 nt, Human
gggugcugccuguagucaugcug

SEQ ID NO: 128770 - RNA, 22 nt, Human
acuucacagauauuuauuuggu

SEQ ID NO: 128771 - RNA, 22 nt, Human
ccugguuuaaugcucacuguug

SEQ ID NO: 128772 - RNA, 22 nt, Human
agucaguaugacuuauaguucu

SEQ ID NO: 128773 - RNA, 22 nt, Human
aucaacuuguccuugauguuaa

SEQ ID NO: 128774 - RNA, 22 nt, Human
uguuggcagugcuacagucagu

SEQ ID NO: 128775 - RNA, 22 nt, Human
auguuguugaacucuuugcaug

SEQ ID NO: 128776 - RNA, 22 nt, Human
ccacugauucugccaggucucu

SEQ ID NO: 128777 - RNA, 22 nt, Human
cuaguucugccauucaguguca

SEQ ID NO: 128778 - RNA, 22 nt, Human
uuugaacuucuaccugucauau

SEQ ID NO: 128779 - RNA, 22 nt, Human
uuucuacacuucgugguguuuu

SEQ ID NO: 128780 - RNA, 22 nt, Human
gucuccugaggcauccauugaa

SEQ ID NO: 128781 - RNA, 22 nt, Human
ucucuccuccacaccgggugcu

SEQ ID NO: 128782 - RNA, 22 nt, Human
ccugugggcgcagcuggaguca

SEQ ID NO: 128783 - RNA, 22 nt, Human
ugucaaguuguuaaguucuggg

SEQ ID NO: 128784 - RNA, 21 nt, Human
ucugaugguagaugagaugug

SEQ ID NO: 128785 - RNA, 22 nt, Human
gagggugguggcuuaaggugcu

SEQ ID NO: 128786 - RNA, 22 nt, Human
cugguuuuuagugcuuaggagu

SEQ ID NO: 128787 - RNA, 21 nt, Human
ugcuggguuugcccaucaggc

SEQ ID NO: 128788 - RNA, 22 nt, Human
caguuuuucaaaauuacaugau

SEQ ID NO: 128789 - RNA, 22 nt, Human
cucuccaggcgagguccuacug

SEQ ID NO: 128790 - RNA, 22 nt, Human
cuauucaguugugggcaacaau

SEQ ID NO: 128791 - RNA, 22 nt, Human
gagguggcugcuugcugggaaa

SEQ ID NO: 128792 - RNA, 22 nt, Human
auggugguagaagcacuaugug

SEQ ID NO: 128793 - RNA, 19 nt, Human
gaugcucauucagguggaa

SEQ ID NO: 128794 - RNA, 22 nt, Human
cuggcccagguggucguugagg

SEQ ID NO: 128795 - RNA, 22 nt, Human
uugcacgcuugcgguuccugcc

SEQ ID NO: 128796 - RNA, 22 nt, Human
uguaauguuagaaacaauugcu

SEQ ID NO: 128797 - RNA, 22 nt, Human
ugugcuauuuuugcauaugugu

SEQ ID NO: 128798 - RNA, 22 nt, Human
uggucccugaagagagaccuug

SEQ ID NO: 128799 - RNA, 22 nt, Human
uaagaaacauuuuuaugacagu

SEQ ID NO: 128800 - RNA, 22 nt, Human
uuccuucuucauuguguuacag

SEQ ID NO: 128801 - RNA, 22 nt, Human
cuucuucagaggccagccucug

SEQ ID NO: 128802 - RNA, 23 nt, Human
ugucuccaucucauuacuugggg

SEQ ID NO: 128803 - RNA, 22 nt, Human
uaaugccuuucuguacuauaug

SEQ ID NO: 128804 - RNA, 22 nt, BK polyomavirus
gugcuugauccauguccagagu

SEQ ID NO: 128805 - RNA, 22 nt, Human
ccugcagcuguaggagaaggcg

SEQ ID NO: 128806 - RNA, 22 nt, Human
ggucauugaaaucagaaggguu

SEQ ID NO: 128807 - RNA, 22 nt, Human
agcuggcuccagaaggagucgu

SEQ ID NO: 128808 - RNA, 22 nt, Human
gggcuggcaucgguugcugaga

SEQ ID NO: 128809 - RNA, 22 nt, Human
auaugucgcuacaucauuagau

SEQ ID NO: 128810 - RNA, 22 nt, Human
uugcugaaaacaguggguauug

SEQ ID NO: 128811 - RNA, 22 nt, Human
augggugugaaaauggucaucu

SEQ ID NO: 128812 - RNA, 22 nt, Human
gcacagggagacagccguggcc

SEQ ID NO: 128813 - RNA, 22 nt, Human
gggaaauugugugagaucuuug

SEQ ID NO: 128814 - RNA, 22 nt, Human
acaggugauucaggcucuggga

SEQ ID NO: 128815 - RNA, 22 nt, Human
uucuucuuuaucucaguauccu

SEQ ID NO: 128816 - RNA, 22 nt, Human
gauauuuuuaguauuucugccu

SEQ ID NO: 128817 - RNA, 22 nt, Human
aggccugacuugaauuuagggc

SEQ ID NO: 128818 - RNA, 22 nt, Human
gucaggaucucccaguacauau

SEQ ID NO: 128819 - RNA, 22 nt, Human
uggcagaggagaauuaagauua

SEQ ID NO: 128820 - RNA, 22 nt, Human
acaggcagggaccuuggcuaag

SEQ ID NO: 128821 - RNA, 22 nt, Human
gcaggcagguggcaucuuguga

SEQ ID NO: 128822 - RNA, 22 nt, Human
cuacaguagagguugucaggga

SEQ ID NO: 128823 - RNA, 22 nt, Human
cagaggcucaccagccuuucac

SEQ ID NO: 128824 - RNA, 22 nt, Human
cuguacauauacauuuuuuucc

SEQ ID NO: 128825 - RNA, 22 nt, Human
ggcugggagcuggacaggccgg

SEQ ID NO: 128826 - RNA, 22 nt, Human
uaugcacacaucgcagcaggaa

SEQ ID NO: 128827 - RNA, 22 nt, Human
uaaauguguuguggaugaaguu

SEQ ID NO: 128828 - RNA, 22 nt, Human
uggcagagcccagacuccaguc

SEQ ID NO: 128829 - RNA, 20 nt, Human
ccugggcuccaggagccccg

SEQ ID NO: 128830 - RNA, 22 nt, Human
aguauauugcucuuaaucauag

SEQ ID NO: 128831 - RNA, 22 nt, Human
ggguggcuccuaugggcauagc

SEQ ID NO: 128832 - RNA, 22 nt, Human
uuugaaauaugaggcauuauga

SEQ ID NO: 128833 - RNA, 15 nt, Human
cuccaugauuuugca

SEQ ID NO: 128834 - RNA, 22 nt, Human
uuugaaagcaccauuugaguag

SEQ ID NO: 128835 - RNA, 22 nt, Human
ccaaaguccauaguuuacauaa

SEQ ID NO: 128836 - RNA, 22 nt, Human
ccugggugaugugcugcccucg

SEQ ID NO: 128837 - RNA, 22 nt, Human
uuugacaaaggaaaaaugcaca

SEQ ID NO: 128838 - RNA, 22 nt, Human
aucugccugcaguggagguggg

SEQ ID NO: 128839 - RNA, 22 nt, Human
uggucucuucuuccaagauggc

SEQ ID NO: 128840 - RNA, 22 nt, Human
ugucaugcagguuuguuauaga

SEQ ID NO: 128841 - RNA, 22 nt, Human
uccuuccugcaggccaaguccu

SEQ ID NO: 128842 - RNA, 22 nt, Human
cuggucugagggcucuugaggc

SEQ ID NO: 128843 - RNA, 22 nt, Human
uuccagcaggcagacaggagau

SEQ ID NO: 128844 - RNA, 22 nt, Human
uuuccaagagcuuauuucugaa

SEQ ID NO: 128845 - RNA, 22 nt, Human
ggcucagguuuaaagugcuuua

SEQ ID NO: 128846 - RNA, 22 nt, Human
gggcagcugccaagugcaucgc

SEQ ID NO: 128847 - RNA, 22 nt, Human
uggccugauuuugcuaagagaa

SEQ ID NO: 128848 - RNA, 22 nt, Human
uuuaaauucugucugccgcuua

SEQ ID NO: 128849 - RNA, 22 nt, Human
gcagcagaggcccuacucuuug

SEQ ID NO: 128850 - RNA, 22 nt, Human
uugaaaggccuguuuauccagc

SEQ ID NO: 128851 - RNA, 22 nt, Human
agagacaggauaucugcucaug

SEQ ID NO: 128852 - RNA, 22 nt, Human
aagagcugauuaagucaugagg

SEQ ID NO: 128853 - RNA, 22 nt, Human
gcccuggaaucucuccauggga

SEQ ID NO: 128854 - RNA, 22 nt, Human
acuuuguucuaauaguaucucu

SEQ ID NO: 128855 - RNA, 22 nt, Human
ugcaagagguaaaaugaaagga

SEQ ID NO: 128856 - RNA, 22 nt, Human
augggaugaacuugaucugcuu

SEQ ID NO: 128857 - RNA, 22 nt, Human
agccacaccuguccugccagcu

SEQ ID NO: 128858 - RNA, 22 nt, Human
uguacaguuuuaacucugaggg

SEQ ID NO: 128859 - RNA, 22 nt, Human
guaucuuugucuucauguugga

SEQ ID NO: 128860 - RNA, 22 nt, Human
agccccacacucucucugagaa

SEQ ID NO: 128861 - RNA, 22 nt, Human
aggauccugcgcuuugggggag

SEQ ID NO: 128862 - RNA, 22 nt, Human
guugaaaguggagaaccugguu

SEQ ID NO: 128863 - RNA, 21 nt, Human
uggcucuguucaauauaugga

SEQ ID NO: 128864 - RNA, 22 nt, Human
gccagcuggagacuggcagggg

SEQ ID NO: 128865 - RNA, 22 nt, Human
aguguaugaguuucaguucuuc

SEQ ID NO: 128866 - RNA, 20 nt, Human
ugacucugcaaccgucucuc

SEQ ID NO: 128867 - RNA, 22 nt, Human
uggggguguccuggugcacaca

SEQ ID NO: 128868 - RNA, 22 nt, Human
agucccagaucuacaggaggga

SEQ ID NO: 128869 - RNA, 22 nt, Human
uauaaaguuucgaaagauguau

SEQ ID NO: 128870 - RNA, 22 nt, Human
uuucaaauggagucgugaaaug

SEQ ID NO: 128871 - RNA, 22 nt, Human
auccuugagccuuaucuuuugu

SEQ ID NO: 128872 - RNA, 23 nt, Human
gaguguucauagcaggcucuugc

SEQ ID NO: 128873 - RNA, 22 nt, Human
uacaaagugugcccaugcugag

SEQ ID NO: 128874 - RNA, 22 nt, Human
gagccuucaucgcagccuuguu

SEQ ID NO: 128875 - RNA, 22 nt, Human
uggaggaaguggcuggccagaa

SEQ ID NO: 128876 - RNA, 22 nt, Human
guguggcuguuuagugacuuuc

SEQ ID NO: 128877 - RNA, 22 nt, Human
agggcagcuagcuguagaaaga

SEQ ID NO: 128878 - RNA, 22 nt, Human
cacauacaaugguguuauuugg

SEQ ID NO: 128879 - RNA, 22 nt, Human
ugagccagucugucugggugaa

SEQ ID NO: 128880 - RNA, 22 nt, Human
auacuaaaguauagaacuuagu

SEQ ID NO: 128881 - RNA, 22 nt, Human
uugugugugagccuucaccaca

SEQ ID NO: 128882 - RNA, 22 nt, Human
agggcagcagcggcccaggccu

SEQ ID NO: 128883 - RNA, 22 nt, Human
cuggcugugugucuucauucag

SEQ ID NO: 128884 - RNA, 22 nt, Human
cuguuuauuacacuggauagca

SEQ ID NO: 128885 - RNA, 20 nt, Human
acuuuacagagaagacugac

SEQ ID NO: 128886 - RNA, 22 nt, Human
uccauggggcccaggaugagag

SEQ ID NO: 128887 - RNA, 22 nt, Human
ggugggugagcccugggagcug

SEQ ID NO: 128888 - RNA, 22 nt, Human
cauacuuuugcccugacauucu

SEQ ID NO: 128889 - RNA, 22 nt, Human
augaccccuaaaauuuacuguc

SEQ ID NO: 128890 - RNA, 23 nt, Human
uuacaaguucugaaauuuccuuc

SEQ ID NO: 128891 - RNA, 22 nt, Human
uggagccaugccuggccuuucc

SEQ ID NO: 128892 - RNA, 22 nt, Human
gaacccaguccaggugcagccu

SEQ ID NO: 128893 - RNA, 22 nt, Human
gccaggcucagcagucaaccug

SEQ ID NO: 128894 - RNA, 22 nt, Human
acaacaggguaaggcaggccau

SEQ ID NO: 128895 - RNA, 22 nt, Human
cagaaauguuuauauguggugu

SEQ ID NO: 128896 - RNA, 22 nt, Human
ugauuuccuagcugacaugaaa

SEQ ID NO: 128897 - RNA, 22 nt, Human
uaauuauaacaguuacaucuua

SEQ ID NO: 128898 - RNA, 22 nt, Human
agagcugaggauccagcugagc

SEQ ID NO: 128899 - RNA, 18 nt, Human
gcucugcccaggcugccc

SEQ ID NO: 128900 - RNA, 22 nt, Human
gucaugugaauaaguguggggu

SEQ ID NO: 128901 - RNA, 22 nt, Human
caaaugugacuuuugggcuucu

SEQ ID NO: 128902 - RNA, 22 nt, Human
uuugaaagaauuuauguacuuu

SEQ ID NO: 128903 - RNA, 22 nt, Human
cuugaaagcacuccuuugacug

SEQ ID NO: 128904 - RNA, 22 nt, Human
ggggcugguggugguuucucca

SEQ ID NO: 128905 - RNA, 22 nt, Human
agcaugaaagcauaggacaguc

SEQ ID NO: 128906 - RNA, 22 nt, Human
ggcugccugcucaggugcggcg

SEQ ID NO: 128907 - RNA, 22 nt, Human
ggaugcugcuaucaggcuucga

SEQ ID NO: 128908 - RNA, 17 nt, Human
agcugccagggagugug

SEQ ID NO: 128909 - RNA, 22 nt, Human
uccuugaauugugccacuuacc

SEQ ID NO: 128910 - RNA, 22 nt, Human
ccagcccuugagauggaaggga

SEQ ID NO: 128911 - RNA, 22 nt, Human
uuuguuaaauauuuauugagug

SEQ ID NO: 128912 - RNA, 22 nt, Human
cauuuguaucugggcugcugug

SEQ ID NO: 128913 - RNA, 22 nt, Human
uuccuggugguggugacagcac

SEQ ID NO: 128914 - RNA, 22 nt, Human
aguuuucuucauuuuguggcca

SEQ ID NO: 128915 - RNA, 22 nt, Human
acuuugcaauacuuaauacaaa

SEQ ID NO: 128916 - RNA, 22 nt, Human
agaauaguggcaaugacugcac

SEQ ID NO: 128917 - RNA, 23 nt, Human
uccugagaugagacagugcugcc

SEQ ID NO: 128918 - RNA, 22 nt, Human
uauuucucagcauuuuacaucc

SEQ ID NO: 128919 - RNA, 22 nt, Human
ugccaggcgugguggugcgcac

SEQ ID NO: 128920 - RNA, 22 nt, Human
agccuccaguagcugaagagac

SEQ ID NO: 128921 - RNA, 22 nt, Human
ggugauuuucgaguuucauguu

SEQ ID NO: 128922 - RNA, 19 nt, Human
auaaggcagugacuuuuuu

SEQ ID NO: 128923 - RNA, 22 nt, Human
gccuggugguauccuggcaaga

SEQ ID NO: 128924 - RNA, 21 nt, Human
gccugcagaccccaccaggcu

SEQ ID NO: 128925 - RNA, 22 nt, Human
auuaguaaaacauuguauaugu

SEQ ID NO: 128926 - RNA, 22 nt, Human
ucccuuaaaacucauguguugu

SEQ ID NO: 128927 - RNA, 22 nt, Human
uguuugugcugccuggugggca

SEQ ID NO: 128928 - RNA, 22 nt, Human
agagcccuuucuccaggcaccu

SEQ ID NO: 128929 - RNA, 22 nt, Human
agacucaagacugcagaagacg

SEQ ID NO: 128930 - RNA, 22 nt, Human
gagguauguaugcuacauucuu

SEQ ID NO: 128931 - RNA, 22 nt, Human
uccacugcagcuucugauggaa

SEQ ID NO: 128932 - RNA, 22 nt, Human
cugacccauauaagaguggagg

SEQ ID NO: 128933 - RNA, 22 nt, Human
uuuucuuggaguggcuguccuu

SEQ ID NO: 128934 - RNA, 22 nt, Human
aucuuuacaguguaagugcaga

SEQ ID NO: 128935 - RNA, 22 nt, Human
uugcucuguaauaaucuggggu

SEQ ID NO: 128936 - RNA, 22 nt, Human
agcuguguagggaaucagagaa

SEQ ID NO: 128937 - RNA, 22 nt, Human
gcugagguaggagguugcagug

SEQ ID NO: 128938 - RNA, 22 nt, Human
acugaaggaaacuuuuguguuu

SEQ ID NO: 128939 - RNA, 22 nt, Human
gcucugggcugcccucuggaca

SEQ ID NO: 128940 - RNA, 22 nt, Human
gccagccccuuagggcucuccc

SEQ ID NO: 128941 - RNA, 20 nt, Human
aaaauauguauaacucuucu

SEQ ID NO: 128942 - RNA, 22 nt, Human
ccagggugugggcgucggcacg

SEQ ID NO: 128943 - RNA, 22 nt, Human
uccugggcuugcuccuccagcu

SEQ ID NO: 128944 - RNA, 22 nt, Human
ugagccugguugcagugucugg

SEQ ID NO: 128945 - RNA, 22 nt, Human
uuucucuaaauagggaggcuua

SEQ ID NO: 128946 - RNA, 17 nt, Human
cucuccuuccucugagg

SEQ ID NO: 128947 - RNA, 20 nt, Human
ucucagcauaagaacccuuc

SEQ ID NO: 128948 - RNA, 22 nt, Human
aaguuaugaaauuuggacagcu

SEQ ID NO: 128949 - RNA, 22 nt, Human
gacaaaggaucagagguuggga

SEQ ID NO: 128950 - RNA, 22 nt, Human
agcugggccugagcuggaagcu

SEQ ID NO: 128951 - RNA, 22 nt, Human
gagggcugauaaaugcgcaugg

SEQ ID NO: 128952 - RNA, 22 nt, Human
ucuggcuccguguccgcuccca

SEQ ID NO: 128953 - RNA, 22 nt, Human
acagaaauauagaagguaggaa

SEQ ID NO: 128954 - RNA, 22 nt, Human
gcucccugcacucugcagcccu

SEQ ID NO: 128955 - RNA, 22 nt, Human
gcugcagcuguaggacacaauu

SEQ ID NO: 128956 - RNA, 23 nt, Human
uucucuuuagauuuacauuacuc

SEQ ID NO: 128957 - RNA, 22 nt, Human
gcugucugacuccaaguuggag

SEQ ID NO: 128958 - RNA, 22 nt, Human
uguacaguaggaacuuguuauu

SEQ ID NO: 128959 - RNA, 22 nt, Human
agucucugcugguugugccuau

SEQ ID NO: 128960 - RNA, 22 nt, Human
acuuuguuguuccuugucuaaa

SEQ ID NO: 128961 - RNA, 22 nt, Human
cagcaggguuaagugacucacc

SEQ ID NO: 128962 - RNA, 22 nt, Human
ucuggcagggguucugcacuug

SEQ ID NO: 128963 - RNA, 20 nt, Human
ugugcccaauguccagguuc

SEQ ID NO: 128964 - RNA, 22 nt, Human
ugcaggagcagagauggcugga

SEQ ID NO: 128965 - RNA, 22 nt, Human
aagucagagcaacugagacauu

SEQ ID NO: 128966 - RNA, 22 nt, Human
ucccaggaucugagggcagaga

SEQ ID NO: 128967 - RNA, 20 nt, Human
auguauauuacuggcuguga

SEQ ID NO: 128968 - RNA, 22 nt, Human
gggcagugguuacacagcugag

SEQ ID NO: 128969 - RNA, 22 nt, Human
cugcccaggcugaaggaacauc

SEQ ID NO: 128970 - RNA, 19 nt, Human
gggcucuggccucaguggg

SEQ ID NO: 128971 - RNA, 22 nt, Human
cugggcugcgggcgccccucca

SEQ ID NO: 128972 - RNA, 22 nt, Human
aggcacugaagugguaaaugua

SEQ ID NO: 128973 - RNA, 22 nt, Human
agcaggguuccaggaguugcag

SEQ ID NO: 128974 - RNA, 22 nt, Human
cuguggaaauaaacaaugcuaa

SEQ ID NO: 128975 - RNA, 22 nt, Human
uagucuuuugagaaguauaucu

SEQ ID NO: 128976 - RNA, 22 nt, Human
aaugaacacagcccucuacuuu

SEQ ID NO: 128977 - RNA, 22 nt, Human
gggcuggcucugucuagaaagg

SEQ ID NO: 128978 - RNA, 22 nt, Human
agugugcugcuuaaacaguugu

SEQ ID NO: 128979 - RNA, 22 nt, Human
acacaugagaaacaucaguugu

SEQ ID NO: 128980 - RNA, 22 nt, Human
uucuggagcuaaaguccacucu

SEQ ID NO: 128981 - RNA, 22 nt, Human
ucaucaaagcgcuuggaguagg

SEQ ID NO: 128982 - RNA, 22 nt, Human
uggagccagagcgcagccuggg

SEQ ID NO: 128983 - RNA, 22 nt, Human
agugugugcaugcauucgugca

SEQ ID NO: 128984 - RNA, 22 nt, Human
ggaggacaggggcugcagcaca

SEQ ID NO: 128985 - RNA, 22 nt, Human
uucaggaucauuuguuuuaucu

SEQ ID NO: 128986 - RNA, 22 nt, Human
uaucuugagagacaacacagca

SEQ ID NO: 128987 - RNA, 22 nt, Human
ccagugggugcugggcucugcc

SEQ ID NO: 128988 - RNA, 22 nt, Human
cagagcucuauguucauggagg

SEQ ID NO: 128989 - RNA, 22 nt, Human
cagaagcauuccagcaaauagu

SEQ ID NO: 128990 - RNA, 20 nt, Human
gugcauuucaccuguacugu

SEQ ID NO: 128991 - RNA, 22 nt, Human
aggcccuguuaugagccacugu

SEQ ID NO: 128992 - RNA, 22 nt, Human
gggagggaggugcugguucacg

SEQ ID NO: 128993 - RNA, 22 nt, Human
aggcuguguaaagugcuuuccc

SEQ ID NO: 128994 - RNA, 22 nt, Human
agagccagcauuugacacuggc

SEQ ID NO: 128995 - RNA, 22 nt, Human
caggggccaggcugucugcugu

SEQ ID NO: 128996 - RNA, 22 nt, Human
ccagcucugccaagcgucagcu

SEQ ID NO: 128997 - RNA, 22 nt, Human
aacagaaaagguagguggcuuu

SEQ ID NO: 128998 - RNA, 22 nt, Human
agaaaauauucauugagaggcu

SEQ ID NO: 128999 - RNA, 22 nt, Human
aauagguagccagauauauaaa

SEQ ID NO: 129000 - RNA, 22 nt, Human
cuugccuguggcuaguuggcuc

SEQ ID NO: 129001 - RNA, 22 nt, Human
ccacagggugucaucagcuuga

SEQ ID NO: 129002 - RNA, 22 nt, Human
cagcugcaggaacaaaaaugug

SEQ ID NO: 129003 - RNA, 22 nt, Human
agcugcccugggucuugcugcu

SEQ ID NO: 129004 - RNA, 18 nt, Human
cucucuuuccacucuuug

SEQ ID NO: 129005 - RNA, 22 nt, Human
uggggcugaggagccucacucu

SEQ ID NO: 129006 - RNA, 18 nt, Human
ucaaagucuggcuccacu

SEQ ID NO: 129007 - RNA, 22 nt, Human
cugaagccaugugcucacuggu

SEQ ID NO: 129008 - RNA, 20 nt, Human
cuuugccuauucucugccug

SEQ ID NO: 129009 - RNA, 22 nt, Human
cagcugccaagaaucuuuucua

SEQ ID NO: 129010 - RNA, 22 nt, Human
aggagagucuugagucacuggu

SEQ ID NO: 129011 - RNA, 22 nt, Human
aaugcugcucucauaauuauag

SEQ ID NO: 129012 - RNA, 22 nt, Human
cagccugcccuggaagcccagc

SEQ ID NO: 129013 - RNA, 22 nt, Human
agcagcauuaagggaacugcag

SEQ ID NO: 129014 - RNA, 22 nt, Human
cuggaaauuggagaugauguuu

SEQ ID NO: 129015 - RNA, 22 nt, Human
acuuugaaacuaaaauucauua

SEQ ID NO: 129016 - RNA, 22 nt, Human
cugcaggaauucaaagugagcu

SEQ ID NO: 129017 - RNA, 22 nt, Human
gcccucagaguuccccacagug

SEQ ID NO: 129018 - RNA, 22 nt, Human
acagacauuuucuguauugccu

SEQ ID NO: 129019 - RNA, 22 nt, Human
aguaacuaugcuugagaaucag

SEQ ID NO: 129020 - RNA, 22 nt, Human
aaaucaguucacguucugaggu

SEQ ID NO: 129021 - RNA, 22 nt, Human
uggcuuccacugugugcccccu

SEQ ID NO: 129022 - RNA, 22 nt, Human
agcuggccuuagugagcaccug

SEQ ID NO: 129023 - RNA, 22 nt, Human
uuauuauaaugagggauaaaaa

SEQ ID NO: 129024 - RNA, 22 nt, Human
uggcucagucuggguugacuga

SEQ ID NO: 129025 - RNA, 22 nt, Human
aguuuucugauguguagugaga

SEQ ID NO: 129026 - RNA, 22 nt, Human
auuuuuucagauugaguguuaa

SEQ ID NO: 129027 - RNA, 22 nt, Human
uuucaguguaagguuuccagga

SEQ ID NO: 129028 - RNA, 22 nt, Human
gggcugcacagaucuucaaggg

SEQ ID NO: 129029 - RNA, 18 nt, Human
guucaaggucaagagaga

SEQ ID NO: 129030 - RNA, 22 nt, Human
uucagucagugacuaagcaguu

SEQ ID NO: 129031 - RNA, 22 nt, Human
acauuucuaauuuaauguaaca

SEQ ID NO: 129032 - RNA, 22 nt, Human
gggguugguuuaaaugcuugag

SEQ ID NO: 129033 - RNA, 22 nt, Human
agggaagaaaauccaucgcugc

SEQ ID NO: 129034 - RNA, 22 nt, Human
ugggccuggaguuuguccagag

SEQ ID NO: 129035 - RNA, 22 nt, Human
ggcucugcccagguggacagca

SEQ ID NO: 129036 - RNA, 22 nt, Human
agugaaaacacuaguucuugcc

SEQ ID NO: 129037 - RNA, 22 nt, Human
agggcaaguugagugugcgugg

SEQ ID NO: 129038 - RNA, 22 nt, Human
cggggcugcucguccuccugug

SEQ ID NO: 129039 - RNA, 20 nt, Human
guccugggagccacagcaca

SEQ ID NO: 129040 - RNA, 22 nt, Human
ccagcugcugugcagggaggcu

SEQ ID NO: 129041 - RNA, 22 nt, Human
accagcuguguccuggcugcag

SEQ ID NO: 129042 - RNA, 22 nt, Human
uuugcauuugcaaauaaugaaa

SEQ ID NO: 129043 - RNA, 22 nt, Human
acuggcugaaguuuacuuuuug

SEQ ID NO: 129044 - RNA, 22 nt, Human
cauaucccauuggccaggacau

SEQ ID NO: 129045 - RNA, 22 nt, Human
uuccaagaguaaauucaaauug

SEQ ID NO: 129046 - RNA, 22 nt, Human
ugguggcaauguccuggagaag

SEQ ID NO: 129047 - RNA, 19 nt, Human
cugcucaggucagucuguc

SEQ ID NO: 129048 - RNA, 22 nt, Human
ggcugccuucagacuccagcuu

SEQ ID NO: 129049 - RNA, 22 nt, Human
auacaguaauuuguaacucauc

SEQ ID NO: 129050 - RNA, 19 nt, Human
auaaggcaggaggaaauuu

SEQ ID NO: 129051 - RNA, 22 nt, Human
guuauuuucauuggcucagacu

SEQ ID NO: 129052 - RNA, 22 nt, Human
aucucuuugauggcuccuguga

SEQ ID NO: 129053 - RNA, 22 nt, Human
ugggcagagaguagaggcaacg

SEQ ID NO: 129054 - RNA, 22 nt, Human
cuacauuuuaauaagcugcuua

SEQ ID NO: 129055 - RNA, 22 nt, Human
aaggcugagggcuguaccuggc

SEQ ID NO: 129056 - RNA, 22 nt, Human
auauuuuuccaugugggacucu

SEQ ID NO: 129057 - RNA, 22 nt, Human
ggcucaggacacagugguuuag

SEQ ID NO: 129058 - RNA, 22 nt, Human
uuauacagggaguuucccugca

SEQ ID NO: 129059 - RNA, 22 nt, Human
ggcugccuucccugagccccgg

SEQ ID NO: 129060 - RNA, 22 nt, Human
gccuuccuuacaccugcucagc

SEQ ID NO: 129061 - RNA, 22 nt, Human
gcuggcaccugcaccaagcagg

SEQ ID NO: 129062 - RNA, 22 nt, Human
ggucccaggaagugcggcggcg

SEQ ID NO: 129063 - RNA, 22 nt, Human
ccucccucuuucagucccacag

SEQ ID NO: 129064 - RNA, 22 nt, Human
cuguggaauugaugcuuagugu

SEQ ID NO: 129065 - RNA, 19 nt, Human
gcuccugggccucacucau

SEQ ID NO: 129066 - RNA, 22 nt, Human
ucauugaauuucacagcuuuau

SEQ ID NO: 129067 - RNA, 22 nt, Human
gaggcucugugaugugccaggc

SEQ ID NO: 129068 - RNA, 22 nt, Human
cugcccugaccugccucagagu

SEQ ID NO: 129069 - RNA, 22 nt, Human
ucagagaugcagugccaccuac

SEQ ID NO: 129070 - RNA, 18 nt, Human
uguuuauuuuucucuuac

SEQ ID NO: 129071 - RNA, 22 nt, Human
cacacaugagucuccccauugg

SEQ ID NO: 129072 - RNA, 22 nt, Human
agcugucagugcugugccugua

SEQ ID NO: 129073 - RNA, 22 nt, Human
gagaagguggaccugaaggagc

SEQ ID NO: 129074 - RNA, 22 nt, Human
auaauuuacaacugcuuuuaau

SEQ ID NO: 129075 - RNA, 22 nt, Human
uuugaaaggguuaugagacuga

SEQ ID NO: 129076 - RNA, 22 nt, Human
gcuccaggagagggaagcagau

SEQ ID NO: 129077 - RNA, 22 nt, Human
ugggcagauguccucugaagug

SEQ ID NO: 129078 - RNA, 22 nt, Human
uggagcaagcuggagagaacau

SEQ ID NO: 129079 - RNA, 18 nt, Human
uggguggcuagggaguuu

SEQ ID NO: 129080 - RNA, 22 nt, Human
aucuuuacuuucagugcugagc

SEQ ID NO: 129081 - RNA, 22 nt, Human
cccagguggguuggccucuguc

SEQ ID NO: 129082 - RNA, 22 nt, Human
gaaggagacccugaagaugcug

SEQ ID NO: 129083 - RNA, 22 nt, Human
gcucucagguacaaagcugugu

SEQ ID NO: 129084 - RNA, 22 nt, Human
aaggugucacugggacaggaaa

SEQ ID NO: 129085 - RNA, 22 nt, Human
ugugcuucaucacuucucaguu

SEQ ID NO: 129086 - RNA, 22 nt, Human
uuaguuuucucaucuaucucac

SEQ ID NO: 129087 - RNA, 22 nt, Human
gcucccuguucucagccaugau

SEQ ID NO: 129088 - RNA, 20 nt, Human
cugugcuuuggaaccuggaa

SEQ ID NO: 129089 - RNA, 22 nt, Human
uucuucaaacaaaaguggcaug

SEQ ID NO: 129090 - RNA, 22 nt, Human
gcagggcacagacagugccaag

SEQ ID NO: 129091 - RNA, 22 nt, Human
uauuuccugcauggugauguaa

SEQ ID NO: 129092 - RNA, 22 nt, Human
acaccagggccuagccagggcg

SEQ ID NO: 129093 - RNA, 22 nt, Human
agggcucugagugggaaagagg

SEQ ID NO: 129094 - RNA, 22 nt, Human
ucugcucagugcuuaucucuaa

SEQ ID NO: 129095 - RNA, 22 nt, Human
aaaaugugcaguuuuuaagcug

SEQ ID NO: 129096 - RNA, 22 nt, Human
acagugucaugucguguucccc

SEQ ID NO: 129097 - RNA, 22 nt, Human
aaaaaucuaugacugcuucucc

SEQ ID NO: 129098 - RNA, 22 nt, Human
agaggcaguauacaauccgagc

SEQ ID NO: 129099 - RNA, 22 nt, Human
auuucagaugaccaaauggaaa

SEQ ID NO: 129100 - RNA, 22 nt, Human
acucugugugaguagagccugu

SEQ ID NO: 129101 - RNA, 22 nt, Human
ccugggcuucugucuagauguu

SEQ ID NO: 129102 - RNA, 22 nt, Human
acacagccaggguaguaaggcu

SEQ ID NO: 129103 - RNA, 18 nt, Human
gagacacaagggccugga

SEQ ID NO: 129104 - RNA, 22 nt, Human
agcagagaagacacaggcuuca

SEQ ID NO: 129105 - RNA, 22 nt, Human
ucagugcagaauagugaugcau

SEQ ID NO: 129106 - RNA, 22 nt, Human
aggcucagcccaagguggagag

SEQ ID NO: 129107 - RNA, 22 nt, Human
gccuggcuccuaaggacuggcu

SEQ ID NO: 129108 - RNA, 22 nt, Human
agggucaggagacacuggcaac

SEQ ID NO: 129109 - RNA, 22 nt, Human
guggcucuccauugacauggaa

SEQ ID NO: 129110 - RNA, 22 nt, Human
uggcagugugugagcuguuauu

SEQ ID NO: 129111 - RNA, 22 nt, Human
uucucuucuguucagugcccaa

SEQ ID NO: 129112 - RNA, 22 nt, Human
gcaaggagacuguagggccaag

SEQ ID NO: 129113 - RNA, 22 nt, Human
ccaccagcuuugccacccugcu

SEQ ID NO: 129114 - RNA, 22 nt, Human
ucuguguaagaccagugcuggg

SEQ ID NO: 129115 - RNA, 22 nt, Human
ggcugccugugcccaggcacac

SEQ ID NO: 129116 - RNA, 22 nt, Human
acauugaucagccucccaugca

SEQ ID NO: 129117 - RNA, 23 nt, Human
ggucccaguggagaggccucacc

SEQ ID NO: 129118 - RNA, 22 nt, Human
acucaggaagaaagcagcuggu

SEQ ID NO: 129119 - RNA, 22 nt, Human
acuuccuguguuggucuugcug

SEQ ID NO: 129120 - RNA, 22 nt, Human
agggcugcaucugccuggugaa

SEQ ID NO: 129121 - RNA, 22 nt, Human
caaaguuaucaacugcaacauu

SEQ ID NO: 129122 - RNA, 22 nt, Human
acaugucaauuuaguacucuua

SEQ ID NO: 129123 - RNA, 22 nt, Human
caucaucaaaagugacagagaa

SEQ ID NO: 129124 - RNA, 22 nt, Human
ucuuuaaggugauuucugcuac

SEQ ID NO: 129125 - RNA, 22 nt, Human
ugggccugacucaccugccucc

SEQ ID NO: 129126 - RNA, 22 nt, Human
cugguguggcggcgcccuguag

SEQ ID NO: 129127 - RNA, 22 nt, Human
ugacacagaaauuaagcuguca

SEQ ID NO: 129128 - RNA, 22 nt, Human
ucaagagagugcugcuuggggu

SEQ ID NO: 129129 - RNA, 22 nt, Human
ugugucugaacuaguugcucuc

SEQ ID NO: 129130 - RNA, 22 nt, Human
gcucccagcauugcuucccagg

SEQ ID NO: 129131 - RNA, 22 nt, Human
aucccuggacggcgccucccca

SEQ ID NO: 129132 - RNA, 22 nt, Human
ggaggccaggaaggcucggaga

SEQ ID NO: 129133 - RNA, 22 nt, Human
ggccaggcuggucucagacuuc

SEQ ID NO: 129134 - RNA, 22 nt, Human
ucucagagcaucauuuucuuag

SEQ ID NO: 129135 - RNA, 22 nt, Human
ucaagagacaggacguguuuca

SEQ ID NO: 129136 - RNA, 21 nt, Human
uaaauaauaaguugcugagau

SEQ ID NO: 129137 - RNA, 22 nt, Human
agcaccugcacaguggaggaaa

SEQ ID NO: 129138 - RNA, 22 nt, Human
cacugcuuuuuuggcuauguac

SEQ ID NO: 129139 - RNA, 22 nt, Human
uaauacuuuugccuuguauuca

SEQ ID NO: 129140 - RNA, 22 nt, Human
agccagccaguucacuaggaaa

SEQ ID NO: 129141 - RNA, 22 nt, Human
gagacacacacaggagguggca

SEQ ID NO: 129142 - RNA, 23 nt, Human
uggugccucagaagcagugggcu

SEQ ID NO: 129143 - RNA, 22 nt, Human
agggcagauggaacuuccccga

SEQ ID NO: 129144 - RNA, 22 nt, Human
agcuucuuggcucagcacuugg

SEQ ID NO: 129145 - RNA, 22 nt, Human
agauaauuugaguaaauuaauu

SEQ ID NO: 129146 - RNA, 22 nt, Human
ugggugggagcacccugucugg

SEQ ID NO: 129147 - RNA, 22 nt, Human
ucuuccaguguagacaucugcc

SEQ ID NO: 129148 - RNA, 22 nt, Human
ggcuggcuggcugguagacaag

SEQ ID NO: 129149 - RNA, 22 nt, Human
uccaguggcacuggagacuaga

SEQ ID NO: 129150 - RNA, 21 nt, Human
cugcuuuacuucagaggaucu

SEQ ID NO: 129151 - RNA, 22 nt, Human
uacauguaggugacauuuuaau

SEQ ID NO: 129152 - RNA, 22 nt, Human
uuauucuucuucucuugccagg

SEQ ID NO: 129153 - RNA, 22 nt, Human
agggcuggagccacagcuggga

SEQ ID NO: 129154 - RNA, 22 nt, Human
cccagggucccugcucucugug

SEQ ID NO: 129155 - RNA, 22 nt, Human
aguuuuucugggaggcacugcu

SEQ ID NO: 129156 - RNA, 23 nt, Human
cauuucugggagauuuauaaaau

SEQ ID NO: 129157 - RNA, 23 nt, Human
gcucugagggcuuaucccuccca

SEQ ID NO: 129158 - RNA, 22 nt, Human
aaggcucucugauggcagcagu

SEQ ID NO: 129159 - RNA, 22 nt, Human
gccuggagcuacuggacacuga

SEQ ID NO: 129160 - RNA, 22 nt, Human
cuggcagcguguuuaugaacau

SEQ ID NO: 129161 - RNA, 20 nt, Human
uucuuucaucuacacguugu

SEQ ID NO: 129162 - RNA, 22 nt, Human
gagaaacuuggaguuauucugg

SEQ ID NO: 129163 - RNA, 22 nt, Human
ggaugcaggggcagcagagccu

SEQ ID NO: 129164 - RNA, 22 nt, Human
ucugucacuauuggccagaaca

SEQ ID NO: 129165 - RNA, 22 nt, Human
ucucccagaggaucccagugga

SEQ ID NO: 129166 - RNA, 22 nt, Human
gcucucugccuuucucaaugac

SEQ ID NO: 129167 - RNA, 22 nt, Human
ucuuuacuuguguauuguauau

SEQ ID NO: 129168 - RNA, 22 nt, Human
aucuggcuccuacacuugaaga

SEQ ID NO: 129169 - RNA, 22 nt, Human
agggacaguuacaucaucagac

SEQ ID NO: 129170 - RNA, 22 nt, Human
gugugcugagugacugucauca

SEQ ID NO: 129171 - RNA, 22 nt, Human
aauugugcuaugauuaugaaag

SEQ ID NO: 129172 - RNA, 22 nt, Human
cuucagggugacgcaggcugca

SEQ ID NO: 129173 - RNA, 22 nt, Human
ccugugugcugaugacgacaga

SEQ ID NO: 129174 - RNA, 22 nt, Human
aaaaaugugaccacaggguguu

SEQ ID NO: 129175 - RNA, 21 nt, Human
ucagggcagugggagguuccu

SEQ ID NO: 129176 - RNA, 22 nt, Human
ugaagcaguucucagaaguggg

SEQ ID NO: 129177 - RNA, 22 nt, Human
uucaucaauguguuuaauaaug

SEQ ID NO: 129178 - RNA, 22 nt, Human
gcuggagcugcagccugggccu

SEQ ID NO: 129179 - RNA, 22 nt, Human
gccuuucaguuccaucaaagga

SEQ ID NO: 129180 - RNA, 22 nt, Human
cugagccaguagucagggacaa

SEQ ID NO: 129181 - RNA, 22 nt, Human
auacauauaugguacuuccugg

SEQ ID NO: 129182 - RNA, 22 nt, Human
cauguauauuuuauguggagag

SEQ ID NO: 129183 - RNA, 22 nt, Human
uggcgugcccuccagacuuggc

SEQ ID NO: 129184 - RNA, 22 nt, Human
ugcuagaaaucugaaacuagca

SEQ ID NO: 129185 - RNA, 22 nt, Human
aguggcuggaauugcaggugcg

SEQ ID NO: 129186 - RNA, 22 nt, Human
aagcugccuagaguugaauguc

SEQ ID NO: 129187 - RNA, 22 nt, Human
guuacaguuugggcuugauuca

SEQ ID NO: 129188 - RNA, 21 nt, Human
aaucauacaaaacaugucagg

SEQ ID NO: 129189 - RNA, 22 nt, Human
auuuacagccuugaaaacagca

SEQ ID NO: 129190 - RNA, 23 nt, Human
gggggcugguugacucucugcag

SEQ ID NO: 129191 - RNA, 22 nt, Human
cugccuuggaaaaugugguaau

SEQ ID NO: 129192 - RNA, 22 nt, Human
gagagugaggccugggaaucua

SEQ ID NO: 129193 - RNA, 22 nt, Human
uccaggagguuuggaggaagca

SEQ ID NO: 129194 - RNA, 22 nt, Human
cuguggcugcagaccuuaaaca

SEQ ID NO: 129195 - RNA, 22 nt, Human
gcccuuccuuagacagcaggau

SEQ ID NO: 129196 - RNA, 22 nt, Human
uuacaguccuuuguauuguuua

SEQ ID NO: 129197 - RNA, 22 nt, Human
uuucuucacaggguauugggug

SEQ ID NO: 129198 - RNA, 22 nt, Human
gucucagaguccuacuuauucc

SEQ ID NO: 129199 - RNA, 22 nt, Human
ccugucugcaugaucccugcca

SEQ ID NO: 129200 - RNA, 22 nt, Human
ucagggcauccauugccuguug

SEQ ID NO: 129201 - RNA, 21 nt, Human
ucagaguguguuacagcaagc

SEQ ID NO: 129202 - RNA, 22 nt, Human
uugucuguaaagacggccacca

SEQ ID NO: 129203 - RNA, 22 nt, Human
gcugucuggguugagggcccug

SEQ ID NO: 129204 - RNA, 22 nt, Human
augcugcacaagccacauguag

SEQ ID NO: 129205 - RNA, 22 nt, Human
cccucagcuucucccugcagcu

SEQ ID NO: 129206 - RNA, 22 nt, Human
ucuuuccacauucucuguuuag

SEQ ID NO: 129207 - RNA, 22 nt, Human
ucucuggaauuuugagagugac

SEQ ID NO: 129208 - RNA, 20 nt, Human
ugugugcacacaugacauuc

SEQ ID NO: 129209 - RNA, 22 nt, Human
cacugaaggacaguaggaaggg

SEQ ID NO: 129210 - RNA, 22 nt, Human
uccuuuccaugcuucuagaggc

SEQ ID NO: 129211 - RNA, 22 nt, Human
gguguguagcauguuuaagacc

SEQ ID NO: 129212 - RNA, 22 nt, Human
acuuccuggcguagcugacauu

SEQ ID NO: 129213 - RNA, 22 nt, Human
caguauuuuuaagcugcuuugu

SEQ ID NO: 129214 - RNA, 22 nt, Human
agcugcugaaugacacugcaag

SEQ ID NO: 129215 - RNA, 22 nt, Human
ucagagaguuggaaagaauuaa

SEQ ID NO: 129216 - RNA, 19 nt, Human
uauauuugagugugcaugc

SEQ ID NO: 129217 - RNA, 22 nt, Human
cugugugugagaagcagguuga

SEQ ID NO: 129218 - RNA, 22 nt, Human
gcagcugggacacugaggccag

SEQ ID NO: 129219 - RNA, 18 nt, Human
acagaacucaggggcacc

SEQ ID NO: 129220 - RNA, 22 nt, Human
acauuugaggauguuaagaaug

SEQ ID NO: 129221 - RNA, 22 nt, Human
aauggacaggagagcauaguca

SEQ ID NO: 129222 - RNA, 22 nt, Human
uugaacaguuuugucagguuca

SEQ ID NO: 129223 - RNA, 22 nt, Human
agggcugccauuucuggcccaa

SEQ ID NO: 129224 - RNA, 22 nt, Human
gcugccucugcgacucugggcg

SEQ ID NO: 129225 - RNA, 22 nt, Human
cugccaaggcuggggaggacaa

SEQ ID NO: 129226 - RNA, 22 nt, Human
cugcagcuguagaggacagugg

SEQ ID NO: 129227 - RNA, 22 nt, Human
guguguccucaguaguggcaug

SEQ ID NO: 129228 - RNA, 22 nt, Human
gagcagaacaggccggguggga

SEQ ID NO: 129229 - RNA, 22 nt, Human
agcuucuguucaucuuccaggc

SEQ ID NO: 129230 - RNA, 22 nt, Human
gugguaauagagcuccaaacua

SEQ ID NO: 129231 - RNA, 20 nt, Human
cacaggcuauaugagagcca

SEQ ID NO: 129232 - RNA, 22 nt, Human
uccaugagacagauacuguaag

SEQ ID NO: 129233 - RNA, 22 nt, Human
guuuucucaggaugguguguac

SEQ ID NO: 129234 - RNA, 22 nt, Human
uugugugguagcuucauugaac

SEQ ID NO: 129235 - RNA, 22 nt, Human
uuucacauaugguuguugauug

SEQ ID NO: 129236 - RNA, 22 nt, Human
ucagagaggcaauacuguuuaa

SEQ ID NO: 129237 - RNA, 22 nt, Human
agaugaagacucaggagcaggu

SEQ ID NO: 129238 - RNA, 22 nt, Human
auuugcuuuaagguauaaaagg

SEQ ID NO: 129239 - RNA, 22 nt, Human
gagagcacaugaacauggagga

SEQ ID NO: 129240 - RNA, 22 nt, Human
ucuggcaggcaaucggcucugg

SEQ ID NO: 129241 - RNA, 22 nt, Human
aaaauguaaagcuugaguguag

SEQ ID NO: 129242 - RNA, 22 nt, Human
gccugagccgccugagcggcgg

SEQ ID NO: 129243 - RNA, 22 nt, Human
aggaggcccuagagcucuagag

SEQ ID NO: 129244 - RNA, 22 nt, Human
auguguauuaguuaguuuaaug

SEQ ID NO: 129245 - RNA, 22 nt, Human
ucccuggagauaacuucuggga

SEQ ID NO: 129246 - RNA, 22 nt, Human
uagccgggugugguggaacucc

SEQ ID NO: 129247 - RNA, 22 nt, Human
agccaggauuggcugagccuua

SEQ ID NO: 129248 - RNA, 23 nt, Human
cccuguagcccaggacaggcuuu

SEQ ID NO: 129249 - RNA, 22 nt, Human
uuuauguacauauccacaagga

SEQ ID NO: 129250 - RNA, 22 nt, Human
auacaguaauugcauaggcuuc

SEQ ID NO: 129251 - RNA, 22 nt, Human
ucaggauguccaaaauccagcc

SEQ ID NO: 129252 - RNA, 22 nt, Human
ggcagaaggccucccagcuccu

SEQ ID NO: 129253 - RNA, 22 nt, Human
gaaaggucaguuccacuuccau

SEQ ID NO: 129254 - RNA, 22 nt, Human
uuugcauucuagaaaaauuucu

SEQ ID NO: 129255 - RNA, 22 nt, Human
gcuggguggaucggaggcucug

SEQ ID NO: 129256 - RNA, 22 nt, Human
gaggucaggcuugcagcagggu

SEQ ID NO: 129257 - RNA, 22 nt, Human
gggcuucucccuaaggacucug

SEQ ID NO: 129258 - RNA, 22 nt, Human
ucacauuuucuacuacuguacg

SEQ ID NO: 129259 - RNA, 22 nt, Human
uuggcuguuuuaucuccuggug

SEQ ID NO: 129260 - RNA, 20 nt, Human
ucaggcaguggggaaaggca

SEQ ID NO: 129261 - RNA, 22 nt, Human
aguagauucucauugaucuggu

SEQ ID NO: 129262 - RNA, 22 nt, Human
ucaccacugaacagaccuuugg

SEQ ID NO: 129263 - RNA, 22 nt, Human
caugggagcuaucuccaucacu

SEQ ID NO: 129264 - RNA, 22 nt, Human
cuggugccauucuguggccuag

SEQ ID NO: 129265 - RNA, 22 nt, Human
ccaggacuuauuacaguauaac

SEQ ID NO: 129266 - RNA, 22 nt, Human
cccagcuaccucugcuaggaga

SEQ ID NO: 129267 - RNA, 22 nt, Human
cagggcaguaccgcccucuggc

SEQ ID NO: 129268 - RNA, 22 nt, Human
acagucuacaaagugaugugug

SEQ ID NO: 129269 - RNA, 19 nt, Human
uuucaauggcuuagagaaa

SEQ ID NO: 129270 - RNA, 22 nt, Human
gcugcagcagaaguucucagag

SEQ ID NO: 129271 - RNA, 22 nt, Human
ccucugggagacugcuacugag

SEQ ID NO: 129272 - RNA, 22 nt, Human
gggaguguugagcgcccugcca

SEQ ID NO: 129273 - RNA, 22 nt, Human
ccucagagccuccagaaggaau

SEQ ID NO: 129274 - RNA, 22 nt, Human
agacaggcagaggcugcagagg

SEQ ID NO: 129275 - RNA, 23 nt, Human
cugucuccugggcuagguggaau

SEQ ID NO: 129276 - RNA, 22 nt, Human
acugagcugugacaaugcuuaa

SEQ ID NO: 129277 - RNA, 22 nt, Human
agcagggggaguuagacuagau

SEQ ID NO: 129278 - RNA, 21 nt, Human
ugagagccuccaaccggcuac

SEQ ID NO: 129279 - RNA, 22 nt, Human
ccuggcugucguuuugugaaau

SEQ ID NO: 129280 - RNA, 22 nt, Human
gcagggacaaggcagguguucu

SEQ ID NO: 129281 - RNA, 22 nt, Human
aucuucaacuugaucauuugaa

SEQ ID NO: 129282 - RNA, 22 nt, Human
ucaugcccagagcaguaaauua

SEQ ID NO: 129283 - RNA, 22 nt, Human
caggaaggcccaccuguccugu

SEQ ID NO: 129284 - RNA, 22 nt, Human
uguauguguggauagauguaua

SEQ ID NO: 129285 - RNA, 22 nt, Human
guguaucaaagcacagacuuca

SEQ ID NO: 129286 - RNA, 22 nt, Human
ugucacuucaggaaugcaggga

SEQ ID NO: 129287 - RNA, 22 nt, Human
aucuuuacaagaaauucuuuua

SEQ ID NO: 129288 - RNA, 22 nt, Human
ucucuguaguugggcagcugcu

SEQ ID NO: 129289 - RNA, 22 nt, Human
aaugucugagucucuguauccc

SEQ ID NO: 129290 - RNA, 22 nt, Human
uucuaugccauguucagcuacu

SEQ ID NO: 129291 - RNA, 22 nt, Human
aucaguuucacuugcuugcaaa

SEQ ID NO: 129292 - RNA, 22 nt, Human
gggcugugagaguggggcugcu

SEQ ID NO: 129293 - RNA, 22 nt, Human
aguauauuuguuaagauuauuc

SEQ ID NO: 129294 - RNA, 22 nt, Human
uuucucaucuggaaacagugcu

SEQ ID NO: 129295 - RNA, 22 nt, Human
cauuuguauguuccuccuuagg

SEQ ID NO: 129296 - RNA, 22 nt, Human
gcagaggccaucaacuuugcca

SEQ ID NO: 129297 - RNA, 22 nt, Human
cugucucuguugccuguaggug

SEQ ID NO: 129298 - RNA, 22 nt, Human
ggcuucagugagcugagcucac

SEQ ID NO: 129299 - RNA, 22 nt, Human
ugacacaggcagcucccagcac

SEQ ID NO: 129300 - RNA, 22 nt, Human
agucaguggcuccgagccuggu

SEQ ID NO: 129301 - RNA, 22 nt, Human
ggagcauguggggugagcaggg

SEQ ID NO: 129302 - RNA, 22 nt, Human
aggucauuggggacuaucuccg

SEQ ID NO: 129303 - RNA, 22 nt, Human
ggcugccaggagggaggccagu

SEQ ID NO: 129304 - RNA, 22 nt, Human
ucauaacagcuaagucccuuuc

SEQ ID NO: 129305 - RNA, 19 nt, Human
agggaguuuauauuugcac

SEQ ID NO: 129306 - RNA, 22 nt, Human
agaggccuccgaaaggugggcu

SEQ ID NO: 129307 - RNA, 22 nt, Human
acagaauucucucugcagaggc

SEQ ID NO: 129308 - RNA, 22 nt, Human
cacagggcagugcugcccacuc

SEQ ID NO: 129309 - RNA, 22 nt, Human
ggcuucccuuuccgagaggaga

SEQ ID NO: 129310 - RNA, 22 nt, Human
ugaggcuggcaaggcugguauu

SEQ ID NO: 129311 - RNA, 22 nt, Human
uuuucaguuugcacugcagugc

SEQ ID NO: 129312 - RNA, 19 nt, Human
gagcugccuuuugaagacc

SEQ ID NO: 129313 - RNA, 22 nt, Human
uacagucagagugccuuucuaa

SEQ ID NO: 129314 - RNA, 22 nt, Human
cacugccugugagcugugugcc

SEQ ID NO: 129315 - RNA, 22 nt, Human
uucaguauucaaauaugucuua

SEQ ID NO: 129316 - RNA, 22 nt, Human
ccagggugugagaaggaaguag

SEQ ID NO: 129317 - RNA, 22 nt, Human
augggcugugagguccggcagg

SEQ ID NO: 129318 - RNA, 22 nt, Human
uuugcauuuccagaguagcaga

SEQ ID NO: 129319 - RNA, 22 nt, Human
cccaggucuaugccagcucuga

SEQ ID NO: 129320 - RNA, 22 nt, Human
uacagcuaugucuugguguucu

SEQ ID NO: 129321 - RNA, 22 nt, Human
aaauuauucucauguguuucuu

SEQ ID NO: 129322 - RNA, 22 nt, Human
gccuggcacucacugaagaggc

SEQ ID NO: 129323 - RNA, 22 nt, Human
uaguaucuauuaguaacaagag

SEQ ID NO: 129324 - RNA, 22 nt, Human
uccugggaagagaccugagcau

SEQ ID NO: 129325 - RNA, 22 nt, Human
ccaggccugcaucugcugcgca

SEQ ID NO: 129326 - RNA, 22 nt, Human
uagcaggguccaaugugaggca

SEQ ID NO: 129327 - RNA, 22 nt, Human
gcuuccugucccucagccauga

SEQ ID NO: 129328 - RNA, 22 nt, Human
auguuaaaugguuuauuauuaa

SEQ ID NO: 129329 - RNA, 22 nt, Human
cacagggccuggggcagcugcu

SEQ ID NO: 129330 - RNA, 22 nt, Human
ucuacagugucaaugugucuug

SEQ ID NO: 129331 - RNA, 23 nt, Human
uugauacagaagaaucaguuugu

SEQ ID NO: 129332 - RNA, 22 nt, Human
ccaguggguaggccauggugag

SEQ ID NO: 129333 - RNA, 22 nt, Human
uauuucuguaugcauaaaagga

SEQ ID NO: 129334 - RNA, 22 nt, Human
agggagguaggagcuucuagcu

SEQ ID NO: 129335 - RNA, 22 nt, Human
uccuucaguuaaagaucucaca

SEQ ID NO: 129336 - RNA, 22 nt, Human
guggcugggcuccgagcggcuu

SEQ ID NO: 129337 - RNA, 22 nt, Human
gggucagcugcugggggcugac

SEQ ID NO: 129338 - RNA, 22 nt, Human
caugcacaaagguaagaugcgu

SEQ ID NO: 129339 - RNA, 22 nt, Human
uggcuuccgccgcgggccucgg

SEQ ID NO: 129340 - RNA, 22 nt, Human
cagagcuguccaaacccugaca

SEQ ID NO: 129341 - RNA, 22 nt, Human
ugcaggcuuuagccccauggcu

SEQ ID NO: 129342 - RNA, 22 nt, Human
augugucaauuuucaaaugcuu

SEQ ID NO: 129343 - RNA, 22 nt, Human
gugaaugcaaacuguuucugau

SEQ ID NO: 129344 - RNA, 22 nt, Human
cugggcuguaauguggcacuga

SEQ ID NO: 129345 - RNA, 17 nt, Human
agcagcuggcacaggag

SEQ ID NO: 129346 - RNA, 22 nt, Human
uggagcuggaauuugagcugga

SEQ ID NO: 129347 - RNA, 22 nt, Human
cagccagggagggcaaaugaga

SEQ ID NO: 129348 - RNA, 22 nt, Human
gccuggagagcacugugcgcuu

SEQ ID NO: 129349 - RNA, 17 nt, Human
ucuucucuuccagucuu

SEQ ID NO: 129350 - RNA, 22 nt, Human
ggccuuggggaggauggugucc

SEQ ID NO: 129351 - RNA, 22 nt, Human
aggcaucugaguuugcaagcuu

SEQ ID NO: 129352 - RNA, 22 nt, Human
uugcacuaggaaaaggcagcca

SEQ ID NO: 129353 - RNA, 22 nt, Human
ugcucuguaacaaauugacaug

SEQ ID NO: 129354 - RNA, 22 nt, Human
ucacaggguguacaucaccuau

SEQ ID NO: 129355 - RNA, 22 nt, Human
agaacuguccuuggaggagagu

SEQ ID NO: 129356 - RNA, 22 nt, Human
acucuuuagagguacaucucuu

SEQ ID NO: 129357 - RNA, 22 nt, Human
ggauggcaggacaaggacccag

SEQ ID NO: 129358 - RNA, 22 nt, Human
agagcugggugaagugccauca

SEQ ID NO: 129359 - RNA, 18 nt, Human
gcuuuuuagugcaucuuc

SEQ ID NO: 129360 - RNA, 22 nt, Human
uccuccuucgggacugcuugac

SEQ ID NO: 129361 - RNA, 23 nt, Human
agcacagacuagaaaggucuuuc

SEQ ID NO: 129362 - RNA, 22 nt, Human
uguugauuaguguuuagacuua

SEQ ID NO: 129363 - RNA, 22 nt, Human
guccaugauucugugacacccu

SEQ ID NO: 129364 - RNA, 22 nt, Human
ugcugccagggcucugcccaca

SEQ ID NO: 129365 - RNA, 22 nt, Human
ugcagaagaauguaggcauaag

SEQ ID NO: 129366 - RNA, 22 nt, Human
gagagugaugaaugguuaaaca

SEQ ID NO: 129367 - RNA, 23 nt, Human
ggccuccuggucuaggcuagacu

SEQ ID NO: 129368 - RNA, 22 nt, Human
agagaauuacagaagaauguca

SEQ ID NO: 129369 - RNA, 22 nt, Human
cuggagccccagacagggagag

SEQ ID NO: 129370 - RNA, 22 nt, Human
agugcauauaugaagaguauga

SEQ ID NO: 129371 - RNA, 22 nt, Human
acagagcaauaacagggagagg

SEQ ID NO: 129372 - RNA, 22 nt, Human
ugugcuucuugcagcuccugua

SEQ ID NO: 129373 - RNA, 22 nt, Human
ggccugggcccacugucaagag

SEQ ID NO: 129374 - RNA, 22 nt, Human
ggguacuuaauauuuacggggu

SEQ ID NO: 129375 - RNA, 22 nt, Human
cugcagagguugguucuaagau

SEQ ID NO: 129376 - RNA, 22 nt, Human
cccuggaggucagaggccuggg

SEQ ID NO: 129377 - RNA, 22 nt, Human
ucuucacauucacguaacauag

SEQ ID NO: 129378 - RNA, 22 nt, Human
ggucccaggauugguugcgcag

SEQ ID NO: 129379 - RNA, 22 nt, Human
cugaaggauucaaaauggcagg

SEQ ID NO: 129380 - RNA, 22 nt, Human
cuuuacacaaugauuuucuuua

SEQ ID NO: 129381 - RNA, 22 nt, Human
aaaggccacugcaagggaaggu

SEQ ID NO: 129382 - RNA, 22 nt, Human
gcucagaggagcaucauaagga

SEQ ID NO: 129383 - RNA, 22 nt, Human
aaauauaguaaaugcauaguuc

SEQ ID NO: 129384 - RNA, 22 nt, Human
cacugccuggaaggagagacau

SEQ ID NO: 129385 - RNA, 22 nt, Human
cacaauguauauguauaucaaa

SEQ ID NO: 129386 - RNA, 22 nt, Human
cuucuucacacuggucugaagc

SEQ ID NO: 129387 - RNA, 22 nt, Human
aggccuuccucggagacaggga

SEQ ID NO: 129388 - RNA, 22 nt, Human
cucugagcagaggccguggcua

SEQ ID NO: 129389 - RNA, 22 nt, Human
uuuuguauccucccuuucacug

SEQ ID NO: 129390 - RNA, 22 nt, Human
cucuccuuucacuaaauauucu

SEQ ID NO: 129391 - RNA, 22 nt, Human
acucccacuccagaguagaagc

SEQ ID NO: 129392 - RNA, 20 nt, Human
caucaucacaugagccaauu

SEQ ID NO: 129393 - RNA, 22 nt, Human
gccaggaguucagaugcauguu

SEQ ID NO: 129394 - RNA, 22 nt, Human
ugauugaacugagcuucaagau

SEQ ID NO: 129395 - RNA, 22 nt, Human
aaaggccagguuggcugguauu

SEQ ID NO: 129396 - RNA, 20 nt, Human
ccaggcacugucccaugcag

SEQ ID NO: 129397 - RNA, 22 nt, Human
uacaguauuacuguguuguuuu

SEQ ID NO: 129398 - RNA, 22 nt, Human
caggaggaggugagguagaacu

SEQ ID NO: 129399 - RNA, 22 nt, Human
aagccagggucaggggccuccu

SEQ ID NO: 129400 - RNA, 22 nt, Human
gcagcaugagcuauacaaagua

SEQ ID NO: 129401 - RNA, 22 nt, Human
aaagagcuucauuuccauuuau

SEQ ID NO: 129402 - RNA, 22 nt, Human
ucucauguauugcccuggugug

SEQ ID NO: 129403 - RNA, 22 nt, Human
uguucucucuggcugccaguac

SEQ ID NO: 129404 - RNA, 22 nt, Human
ggcaggagauaaaauauuaguu

SEQ ID NO: 129405 - RNA, 22 nt, Human
uauguacaucguugaauucaaa

SEQ ID NO: 129406 - RNA, 22 nt, Human
gccagggagucugggccacaga

SEQ ID NO: 129407 - RNA, 22 nt, Human
cugugcaguaggucagggcugg

SEQ ID NO: 129408 - RNA, 21 nt, Human
agauuguauggaggugagagg

SEQ ID NO: 129409 - RNA, 22 nt, Human
ucagaaauacuaucagcuuuug

SEQ ID NO: 129410 - RNA, 19 nt, Human
ccugggaggcggagguugc

SEQ ID NO: 129411 - RNA, 22 nt, Human
agacaaaugguaauuaugucua

SEQ ID NO: 129412 - RNA, 22 nt, Human
agagucuuccaggcagccugag

SEQ ID NO: 129413 - RNA, 22 nt, Human
gaaguucaggugggaauugagc

SEQ ID NO: 129414 - RNA, 21 nt, Human
gcagccagccgagaccaugcc

SEQ ID NO: 129415 - RNA, 22 nt, Human
cagugcagccaaggacaggcac

SEQ ID NO: 129416 - RNA, 22 nt, Human
aaggcugauuagacugauagcu

SEQ ID NO: 129417 - RNA, 22 nt, Human
uggagcagagaugguggccuuc

SEQ ID NO: 129418 - RNA, 22 nt, Human
augauggugagguugagcacag

SEQ ID NO: 129419 - RNA, 21 nt, Human
agccuggcccagggggaggcu

SEQ ID NO: 129420 - RNA, 22 nt, Human
uggccugaggcucggcaugggu

SEQ ID NO: 129421 - RNA, 22 nt, Human
gagagcuguccggcugagcagc

SEQ ID NO: 129422 - RNA, 22 nt, Human
aaggcaguagguguuucaaacu

SEQ ID NO: 129423 - RNA, 22 nt, Human
ugugccagaaaauaugcugagg

SEQ ID NO: 129424 - RNA, 22 nt, Human
gaugaggggucauuggcuggga

SEQ ID NO: 129425 - RNA, 22 nt, Human
aagagcuguaugccauaugauu

SEQ ID NO: 129426 - RNA, 22 nt, Human
cccuggccagcucaugucugag

SEQ ID NO: 129427 - RNA, 22 nt, Human
aaucgguugaacccaggaagug

SEQ ID NO: 129428 - RNA, 22 nt, Human
ccuuuuucaauauagaauugca

SEQ ID NO: 129429 - RNA, 22 nt, Human
ucaugacaacuauauuauucca

SEQ ID NO: 129430 - RNA, 22 nt, Human
agaugauggccauguccucucc

SEQ ID NO: 129431 - RNA, 22 nt, Human
ugaggcagaaauuccuguuuuc

SEQ ID NO: 129432 - RNA, 22 nt, Human
ggcacagggagccgcaguugca

SEQ ID NO: 129433 - RNA, 22 nt, Human
auuacaguaggauuggaaagga

SEQ ID NO: 129434 - RNA, 20 nt, Human
ccugccuguguuugugauga

SEQ ID NO: 129435 - RNA, 20 nt, Human
uaucaguaggauauucugcc

SEQ ID NO: 129436 - RNA, 22 nt, Human
cuccagggggcauccacacagc

SEQ ID NO: 129437 - RNA, 22 nt, Human
acagcagcuaaccccugggcca

SEQ ID NO: 129438 - RNA, 22 nt, Human
gcugugcacuaccuauacaucc

SEQ ID NO: 129439 - RNA, 22 nt, Human
uccuucagaggacggcagccag

SEQ ID NO: 129440 - RNA, 22 nt, Human
gcugggagucgcgucuguggcc

SEQ ID NO: 129441 - RNA, 23 nt, Human
ugcaggggaggcuuaaagcaggu

SEQ ID NO: 129442 - RNA, 18 nt, Human
ucuggcucaggacugaac

SEQ ID NO: 129443 - RNA, 22 nt, Human
caugugugaaucuugugaucau

SEQ ID NO: 129444 - RNA, 22 nt, Human
agcaggagaacacuguggcucu

SEQ ID NO: 129445 - RNA, 22 nt, Human
cugcccugcccaggccuugggc

SEQ ID NO: 129446 - RNA, 19 nt, Human
acccagagcccuuugcagg

SEQ ID NO: 129447 - RNA, 22 nt, Human
ucucagaggucuucagccucug

SEQ ID NO: 129448 - RNA, 21 nt, Human
gcagccacugccuucaacaau

SEQ ID NO: 129449 - RNA, 22 nt, Human
cagggccucuccuccaggaacu

SEQ ID NO: 129450 - RNA, 22 nt, Human
uuauguaauuuguuugcucuuc

SEQ ID NO: 129451 - RNA, 22 nt, Human
gcucucugguuccagucaggaa

SEQ ID NO: 129452 - RNA, 22 nt, Human
uccugucugucuuuggucccuu

SEQ ID NO: 129453 - RNA, 22 nt, Human
agggcugagacuaaggccagau

SEQ ID NO: 129454 - RNA, 22 nt, Human
gccaggcuguggggaacuugaa

SEQ ID NO: 129455 - RNA, 21 nt, Human
uggcucuggguaggagagugc

SEQ ID NO: 129456 - RNA, 22 nt, Human
ucaaaguuuguggcaauuuauu

SEQ ID NO: 129457 - RNA, 22 nt, Human
agccagggagguggagguugca

SEQ ID NO: 129458 - RNA, 22 nt, Human
cagagcugguaagugguagagg

SEQ ID NO: 129459 - RNA, 20 nt, Human
accucugcaucaauccuuug

SEQ ID NO: 129460 - RNA, 22 nt, Human
auugucucugaauuuucagcug

SEQ ID NO: 129461 - RNA, 22 nt, Human
agcugccacaugcccaagggca

SEQ ID NO: 129462 - RNA, 22 nt, Human
ggagggagcauccccuugcuga

SEQ ID NO: 129463 - RNA, 22 nt, Human
cuucccugauaagagccucaga

SEQ ID NO: 129464 - RNA, 21 nt, Human
uucaagauauuuaaaaggugg

SEQ ID NO: 129465 - RNA, 22 nt, Human
uccucaggugacuagguaucuu

SEQ ID NO: 129466 - RNA, 22 nt, Human
ucuucuuccuccacagggccca

SEQ ID NO: 129467 - RNA, 22 nt, Human
ucaucuaagagucuuacauuua

SEQ ID NO: 129468 - RNA, 22 nt, Human
gugccugccccacuccucagca

SEQ ID NO: 129469 - RNA, 22 nt, Human
gcucugagauugagccuuuggu

SEQ ID NO: 129470 - RNA, 18 nt, Human
gagcccugagucugcaca

SEQ ID NO: 129471 - RNA, 21 nt, Human
ugguggagugugcugagcaug

SEQ ID NO: 129472 - RNA, 22 nt, Human
ucacauuuucauauucucugag

SEQ ID NO: 129473 - RNA, 22 nt, Human
ugucagugguagacccagaggu

SEQ ID NO: 129474 - RNA, 22 nt, Human
gcaaggcuuugugaauuuuaaa

SEQ ID NO: 129475 - RNA, 22 nt, Human
gaggcagagugcaccccaggag

SEQ ID NO: 129476 - RNA, 22 nt, Human
ucucacucauuuccuaggucuu

SEQ ID NO: 129477 - RNA, 22 nt, Human
uuaacagauguuuauggagcau

SEQ ID NO: 129478 - RNA, 22 nt, Human
cuugcugggguaagucugugcu

SEQ ID NO: 129479 - RNA, 22 nt, Human
ccagcaggacuuuggaaauaug

SEQ ID NO: 129480 - RNA, 22 nt, Human
uccaugaggcagggaggcuggc

SEQ ID NO: 129481 - RNA, 21 nt, Human
uucuucaugaugauuaauggc

SEQ ID NO: 129482 - RNA, 22 nt, Human
agucccagagaggucggggcca

SEQ ID NO: 129483 - RNA, 22 nt, Human
ggccuguguccuccuugcccug

SEQ ID NO: 129484 - RNA, 22 nt, Human
uaucuguuccaggcacucagcu

SEQ ID NO: 129485 - RNA, 22 nt, Human
agucucugcaugccugcugugc

SEQ ID NO: 129486 - RNA, 22 nt, Human
gccucugcaggugcgguuaucc

SEQ ID NO: 129487 - RNA, 20 nt, Human
acugugugaucuggaaagcu

SEQ ID NO: 129488 - RNA, 22 nt, Human
uucuucaacaaggacacuguua

SEQ ID NO: 129489 - RNA, 22 nt, Human
ugcaagggcuuagggggcugug

SEQ ID NO: 129490 - RNA, 22 nt, Human
ugcuggccaauggcagaggcgg

SEQ ID NO: 129491 - RNA, 22 nt, Human
cagauggccagaggcagcugca

SEQ ID NO: 129492 - RNA, 22 nt, Human
uugauacauuuuuaggauaaac

SEQ ID NO: 129493 - RNA, 22 nt, Human
uacuuacagagcuuauaaguua

SEQ ID NO: 129494 - RNA, 22 nt, Human
agcucacaguguccuuccucaa

SEQ ID NO: 129495 - RNA, 22 nt, Human
gcaucuaaacuugcaucauugu

SEQ ID NO: 129496 - RNA, 22 nt, Human
gugcuguacuucuguguugaag

SEQ ID NO: 129497 - RNA, 22 nt, Human
aggcaguguguagcuggaagag

SEQ ID NO: 129498 - RNA, 22 nt, Human
ugaugugugauucauucucaaa

SEQ ID NO: 129499 - RNA, 22 nt, Human
cuucaggauuuaggaagaugaa

SEQ ID NO: 129500 - RNA, 21 nt, Human
gccacugcacuccagccuggg

SEQ ID NO: 129501 - RNA, 22 nt, Human
uuuauucuaacuugcugcucua

SEQ ID NO: 129502 - RNA, 22 nt, Human
gugucacaugguuuacugcagc

SEQ ID NO: 129503 - RNA, 22 nt, Human
ggcugggcaaacaagacucuuc

SEQ ID NO: 129504 - RNA, 22 nt, Human
agacaaagaaaccguagaagca

SEQ ID NO: 129505 - RNA, 22 nt, Human
ugucccagcagcuggguucucu

SEQ ID NO: 129506 - RNA, 22 nt, Human
agagcagguggcaacucuggga

SEQ ID NO: 129507 - RNA, 22 nt, Human
cuggccuagcucucugcuugaa

SEQ ID NO: 129508 - RNA, 22 nt, Human
aucaggauucaguaucuccagc

SEQ ID NO: 129509 - RNA, 22 nt, Human
cacauguacagaagcaggcugg

SEQ ID NO: 129510 - RNA, 22 nt, Human
ugagaauuacaaaugagucaca

SEQ ID NO: 129511 - RNA, 22 nt, Human
uucuucuuuccaauuacauggu

SEQ ID NO: 129512 - RNA, 22 nt, Human
ccagcugaggcagccacacagg

SEQ ID NO: 129513 - RNA, 22 nt, Human
acaguaccugcucucaagcaaa

SEQ ID NO: 129514 - RNA, 22 nt, Human
uauguguguuucaguggaaaug

SEQ ID NO: 129515 - RNA, 22 nt, Human
cugugccuggggggcagagcug

SEQ ID NO: 129516 - RNA, 22 nt, Human
cccagcccugaccuauuggaaa

SEQ ID NO: 129517 - RNA, 21 nt, Human
gagacagacuuucguccccug

SEQ ID NO: 129518 - RNA, 22 nt, Human
aaaggugacacucugccagcug

SEQ ID NO: 129519 - RNA, 23 nt, Human
auguauuuaaauuucagugauga

SEQ ID NO: 129520 - RNA, 22 nt, Human
aaggagagguuguccguguugu

SEQ ID NO: 129521 - RNA, 20 nt, Human
uguauauuuucugguguaaa

SEQ ID NO: 129522 - RNA, 22 nt, Human
augguacaaaauguauaaaguc

SEQ ID NO: 129523 - RNA, 22 nt, Human
cuggccuuggaagggagcccgu

SEQ ID NO: 129524 - RNA, 22 nt, Human
uccaagaagucaucuaaacugu

SEQ ID NO: 129525 - RNA, 22 nt, Human
aaauacuagaauucagaguuga

SEQ ID NO: 129526 - RNA, 22 nt, Human
guucuucagauuccauuucagu

SEQ ID NO: 129527 - RNA, 23 nt, Human
cagcaggagggugccugggcugc

SEQ ID NO: 129528 - RNA, 22 nt, Human
ugccuggcaaugccagaagcca

SEQ ID NO: 129529 - RNA, 22 nt, Human
augcauguuuauagggugcuuc

SEQ ID NO: 129530 - RNA, 23 nt, Human
gggauauggaccuuggaggaguc

SEQ ID NO: 129531 - RNA, 22 nt, Human
ucuuaacugacaguuuaauggg

SEQ ID NO: 129532 - RNA, 22 nt, Human
uaaaauguuugcaagagaccag

SEQ ID NO: 129533 - RNA, 22 nt, Human
uugcacuccagcccgagcaaca

SEQ ID NO: 129534 - RNA, 22 nt, Human
ccuuagagaguacugggcugcc

SEQ ID NO: 129535 - RNA, 22 nt, Human
gaacaguaucaguagugccagu

SEQ ID NO: 129536 - RNA, 22 nt, Human
uguaugcagcaaaacaauuagu

SEQ ID NO: 129537 - RNA, 22 nt, Human
uagcuuuccuuguugccugugc

SEQ ID NO: 129538 - RNA, 22 nt, Human
gcuguaugaguucauguguaga

SEQ ID NO: 129539 - RNA, 22 nt, Human
cccagacugcagagcgggcaga

SEQ ID NO: 129540 - RNA, 22 nt, Human
cuuugcaaacugucacacuuuc

SEQ ID NO: 129541 - RNA, 22 nt, Human
aaacauugcuaaauaaugcugc

SEQ ID NO: 129542 - RNA, 22 nt, Human
ucugugucacugaggccugugu

SEQ ID NO: 129543 - RNA, 22 nt, Human
gcugcucugaaaaugacuguug

SEQ ID NO: 129544 - RNA, 22 nt, Human
ucucagggaccaugaugaugac

SEQ ID NO: 129545 - RNA, 22 nt, Human
auaaggcauauagucacuuuuu

SEQ ID NO: 129546 - RNA, 22 nt, Human
auccaggguguggagagagcuc

SEQ ID NO: 129547 - RNA, 22 nt, Human
caagggccuccaccuugcucgu

SEQ ID NO: 129548 - RNA, 22 nt, Human
ucccagcagcauagcucagaau

SEQ ID NO: 129549 - RNA, 22 nt, Human
cacucugcgcugggcgccagcg

SEQ ID NO: 129550 - RNA, 22 nt, Human
uauguguaaccuugugauuuau

SEQ ID NO: 129551 - RNA, 22 nt, Human
ucuggcucucaacaaauauuua

SEQ ID NO: 129552 - RNA, 22 nt, Human
gccagcagcccagaaggacuuu

SEQ ID NO: 129553 - RNA, 22 nt, Human
gcaggagccaggccgagcuggu

SEQ ID NO: 129554 - RNA, 22 nt, Human
cagcaggaaguacuagcuuuga

SEQ ID NO: 129555 - RNA, 19 nt, Human
gccugccuggguuucugag

SEQ ID NO: 129556 - RNA, 22 nt, Human
gcaaggcagcgcggaguagcua

SEQ ID NO: 129557 - RNA, 22 nt, Human
ccuguggcugccacuuggguga

SEQ ID NO: 129558 - RNA, 22 nt, Human
auguucuuguucaaaugucagu

SEQ ID NO: 129559 - RNA, 22 nt, Human
uuggcagggccaggcucucucu

SEQ ID NO: 129560 - RNA, 22 nt, Human
cuguggugagcaacugacugaa

SEQ ID NO: 129561 - RNA, 20 nt, Human
cucuggcuccgcgugaccgc

SEQ ID NO: 129562 - RNA, 22 nt, Human
uaagcuauuccugaagaagguu

SEQ ID NO: 129563 - RNA, 22 nt, Human
aggcucaggcaggaauggcgga

SEQ ID NO: 129564 - RNA, 22 nt, Human
aggguggccaugagggagagau

SEQ ID NO: 129565 - RNA, 21 nt, Human
aagggagauaggaaucaggcc

SEQ ID NO: 129566 - RNA, 22 nt, Human
ggcagggguccugguguugacu

SEQ ID NO: 129567 - RNA, 22 nt, Human
ugcagggcccuugggguugaac

SEQ ID NO: 129568 - RNA, 21 nt, Human
gcucccuggcugugugaccug

SEQ ID NO: 129569 - RNA, 22 nt, Human
guccucugggcuuugagcaguc

SEQ ID NO: 129570 - RNA, 23 nt, Human
uagagcagggaaaucugucagag

SEQ ID NO: 129571 - RNA, 22 nt, Human
auacacauguguaugugcaugc

SEQ ID NO: 129572 - RNA, 22 nt, Human
ucccuggacaacagacuucacu

SEQ ID NO: 129573 - RNA, 22 nt, Human
uacaaaugaccauagccacuua

SEQ ID NO: 129574 - RNA, 22 nt, Human
cuuucaaugugccugccuuggg

SEQ ID NO: 129575 - RNA, 22 nt, Human
cuguguaugacuccagagggua

SEQ ID NO: 129576 - RNA, 22 nt, Human
gcugggaggaauuuggggaaua

SEQ ID NO: 129577 - RNA, 22 nt, Human
uacagugaggugguuuccuuua

SEQ ID NO: 129578 - RNA, 22 nt, Human
ggcacugaaguggguguugggu

SEQ ID NO: 129579 - RNA, 22 nt, Human
uggccugccccgagauccuggc

SEQ ID NO: 129580 - RNA, 22 nt, Human
ucaaauaugugauagaagcuaa

SEQ ID NO: 129581 - RNA, 22 nt, Human
aggcugcagugcagguaggauu

SEQ ID NO: 129582 - RNA, 22 nt, Human
gcaggaagaugagcucagguaa

SEQ ID NO: 129583 - RNA, 22 nt, Human
agaucucaccucuguguauuau

SEQ ID NO: 129584 - RNA, 22 nt, Human
guauuauuggguaguaugguaa

SEQ ID NO: 129585 - RNA, 22 nt, Human
cuuucucuucgaaaaccugccc

SEQ ID NO: 129586 - RNA, 20 nt, Human
ucuuuagauuuaucuuaugu

SEQ ID NO: 129587 - RNA, 22 nt, Human
caguggugaagagcaggggcuc

SEQ ID NO: 129588 - RNA, 22 nt, Human
cagcaggcucugaguggcugcc

SEQ ID NO: 129589 - RNA, 20 nt, Human
cucucccagcacagcuuccu

SEQ ID NO: 129590 - RNA, 21 nt, Human
gggccuggcugcgcaggacgg

SEQ ID NO: 129591 - RNA, 22 nt, Human
ggucccaggcucccucuugucc

SEQ ID NO: 129592 - RNA, 22 nt, Human
cagagcuggagggaacccuggc

SEQ ID NO: 129593 - RNA, 22 nt, Human
cagggcuguaaauuagugcuga

SEQ ID NO: 129594 - RNA, 22 nt, Human
uuucugcugugcuuucuugcgu

SEQ ID NO: 129595 - RNA, 22 nt, Human
uguuuacauggagguuuucagc

SEQ ID NO: 129596 - RNA, 22 nt, Human
gaugcagggcuggcaggagcuu

SEQ ID NO: 129597 - RNA, 22 nt, Human
cguguguguaccugcgcauuua

SEQ ID NO: 129598 - RNA, 22 nt, Human
uguggugagaaacugguagauu

SEQ ID NO: 129599 - RNA, 22 nt, Human
cuguccuguagcuccaucaguc

SEQ ID NO: 129600 - RNA, 22 nt, Human
aaggaaagacauauaaaugacu

SEQ ID NO: 129601 - RNA, 22 nt, Human
caaggccaaagggccacuguca

SEQ ID NO: 129602 - RNA, 21 nt, Human
ugccagcauuaaacagucauu

SEQ ID NO: 129603 - RNA, 22 nt, Human
aggugcuuggcucgugcacaca

SEQ ID NO: 129604 - RNA, 22 nt, Human
cugggccugucagggcuuuuug

SEQ ID NO: 129605 - RNA, 22 nt, Human
ccaggcauccauugcuuccucu

SEQ ID NO: 129606 - RNA, 22 nt, Human
guguguggggccuucggguccu

SEQ ID NO: 129607 - RNA, 22 nt, Human
cagggcuguggcuuugugcugu

SEQ ID NO: 129608 - RNA, 18 nt, Human
gagaggcccggcugugcc

SEQ ID NO: 129609 - RNA, 22 nt, Human
cucugagcugaaacaugagcau

SEQ ID NO: 129610 - RNA, 18 nt, Human
gcugugugcaccugauaa

SEQ ID NO: 129611 - RNA, 22 nt, Human
caagcagagacuagauagcugu

SEQ ID NO: 129612 - RNA, 22 nt, Human
gagcucaggagcaucagaagaa

SEQ ID NO: 129613 - RNA, 22 nt, Human
auuuacaguuuagcauuucaag

SEQ ID NO: 129614 - RNA, 22 nt, Human
uguauuagagcaguagaauuau

SEQ ID NO: 129615 - RNA, 22 nt, Human
cagcuuucaucagugacacuca

SEQ ID NO: 129616 - RNA, 22 nt, Human
gauuucaagcccccagagauuc

SEQ ID NO: 129617 - RNA, 22 nt, Human
uaacuuugagaacuuucuggug

SEQ ID NO: 129618 - RNA, 22 nt, Human
cagagcagugaggaguugugua

SEQ ID NO: 129619 - RNA, 22 nt, Human
aaggccagccugagagcuaaca

SEQ ID NO: 129620 - RNA, 22 nt, Human
aaaguuagaaugauaucaacga

SEQ ID NO: 129621 - RNA, 22 nt, Human
uaauacagaaguguauuaaaau

SEQ ID NO: 129622 - RNA, 22 nt, Human
ggucccaguccucucccugcua

SEQ ID NO: 129623 - RNA, 22 nt, Human
gcuuucucuucacugauguuca

SEQ ID NO: 129624 - RNA, 22 nt, Human
acccagaggcggagguugcagu

SEQ ID NO: 129625 - RNA, 22 nt, Human
cagggcagagccaggauuucaa

SEQ ID NO: 129626 - RNA, 22 nt, Human
augggaggaaggaggcccuuga

SEQ ID NO: 129627 - RNA, 22 nt, Human
ggcugccuccugcugggcugga

SEQ ID NO: 129628 - RNA, 22 nt, Human
aaugaaauguagcuuauccaua

SEQ ID NO: 129629 - RNA, 17 nt, Human
uccagagcacagagcuc

SEQ ID NO: 129630 - RNA, 22 nt, Human
uggugugggcguggcaggcaag

SEQ ID NO: 129631 - RNA, 22 nt, Human
aaggcacugaacuuaaauucug

SEQ ID NO: 129632 - RNA, 22 nt, Human
cuuaaaaucuggcaguuagcua

SEQ ID NO: 129633 - RNA, 22 nt, Human
uggcacugccaaccugcuaggu

SEQ ID NO: 129634 - RNA, 22 nt, Human
gccugcaguucugugcuaggca

SEQ ID NO: 129635 - RNA, 22 nt, Human
uguacaguauauuucaaagcca

SEQ ID NO: 129636 - RNA, 22 nt, Human
gcuguccucuuggacucagggc

SEQ ID NO: 129637 - RNA, 22 nt, Human
cagagcugggaucccaugggcg

SEQ ID NO: 129638 - RNA, 22 nt, Human
cucuuaguuuaucuuugacaaa

SEQ ID NO: 129639 - RNA, 22 nt, Human
uggacagguuugggugccuguu

SEQ ID NO: 129640 - RNA, 22 nt, Human
uucuucagucccacuagccaca

SEQ ID NO: 129641 - RNA, 21 nt, Human
aaguaaaucagagaaauaacc

SEQ ID NO: 129642 - RNA, 22 nt, Human
aggccugaggaccagauaaaug

SEQ ID NO: 129643 - RNA, 19 nt, Human
cauuuucucauugugcccc

SEQ ID NO: 129644 - RNA, 18 nt, Human
gggcuguguucaugccca

SEQ ID NO: 129645 - RNA, 22 nt, Human
gcagguggcagaggugggaucu

SEQ ID NO: 129646 - RNA, 22 nt, Human
gccaccagguuagauccagccu

SEQ ID NO: 129647 - RNA, 20 nt, Human
uguuucuuuuaaugagcggc

SEQ ID NO: 129648 - RNA, 19 nt, Human
cugccuguuauggagagaa

SEQ ID NO: 129649 - RNA, 22 nt, Human
cugaggccagcugcagagcucu

SEQ ID NO: 129650 - RNA, 22 nt, Human
ggcagagguagcuggaaccagg

SEQ ID NO: 129651 - RNA, 22 nt, Human
uuuacaaccucauauucugaug

SEQ ID NO: 129652 - RNA, 22 nt, Human
cuuugaaaacuuaaauaacagc

SEQ ID NO: 129653 - RNA, 22 nt, Human
uuacaguacagaaaauaacaga

SEQ ID NO: 129654 - RNA, 22 nt, Human
uuauuuccuaaaucucuuuguu

SEQ ID NO: 129655 - RNA, 22 nt, Human
ugggggagauugugcaucucua

SEQ ID NO: 129656 - RNA, 22 nt, Human
ccaaggagaaugacaccaugga

SEQ ID NO: 129657 - RNA, 22 nt, Human
aauuucaaacuaauaggaacca

SEQ ID NO: 129658 - RNA, 22 nt, Human
gcucacugccauucucuagaug

SEQ ID NO: 129659 - RNA, 22 nt, Human
ggcuucugguaaagaccacacc

SEQ ID NO: 129660 - RNA, 22 nt, Human
ggcacugagaacaggcugacuu

SEQ ID NO: 129661 - RNA, 20 nt, Human
gggcaguggcgcuaucucag

SEQ ID NO: 129662 - RNA, 23 nt, Human
ugggaguguugggaucucugcuc

SEQ ID NO: 129663 - RNA, 22 nt, Human
agggcuggcaagggauugaaau

SEQ ID NO: 129664 - RNA, 22 nt, Human
ccuuuggguucaaucucggucu

SEQ ID NO: 129665 - RNA, 22 nt, Human
agcaggagcccuuaucaccagg

SEQ ID NO: 129666 - RNA, 22 nt, Human
ugugaaggcagcagcucugucc

SEQ ID NO: 129667 - RNA, 22 nt, Human
aacaucuacuaagugccaggca

SEQ ID NO: 129668 - RNA, 20 nt, Human
ggccuuggccucuuugcagc

SEQ ID NO: 129669 - RNA, 22 nt, Human
gaaggcuggcuuucugagagca

SEQ ID NO: 129670 - RNA, 22 nt, Human
cagacacaccaggcccauucug

SEQ ID NO: 129671 - RNA, 22 nt, Human
uggcucaguuucugcccagcug

SEQ ID NO: 129672 - RNA, 22 nt, Human
agggccugagcuggcugaccuc

SEQ ID NO: 129673 - RNA, 22 nt, Human
gcaggaggaucacuugagccca

SEQ ID NO: 129674 - RNA, 22 nt, Human
ccucgaccuccccaggcucagg

SEQ ID NO: 129675 - RNA, 22 nt, Human
uugacaguugaggguugucuaa

SEQ ID NO: 129676 - RNA, 22 nt, Human
cuggcuguauuaguuugauccu

SEQ ID NO: 129677 - RNA, 22 nt, Human
aagaggaagucuccauggagag

SEQ ID NO: 129678 - RNA, 22 nt, Human
uauuaucuaguaacugauagug

SEQ ID NO: 129679 - RNA, 22 nt, Human
gcuguucugcgucccaggcugg

SEQ ID NO: 129680 - RNA, 22 nt, Human
uggagcauauucuggagcuugg

SEQ ID NO: 129681 - RNA, 22 nt, Human
uuguuuuuaugaacauccagga

SEQ ID NO: 129682 - RNA, 21 nt, Human
acaguucaugauaacuccauc

SEQ ID NO: 129683 - RNA, 22 nt, Human
ugccugucuuaauaucuggaaa

SEQ ID NO: 129684 - RNA, 19 nt, Human
ugagaggcuuaaggcagcu

SEQ ID NO: 129685 - RNA, 22 nt, Human
ugcuuuggccacuagaauucag

SEQ ID NO: 129686 - RNA, 22 nt, Human
aaagaaggaccuggaggaggau

SEQ ID NO: 129687 - RNA, 22 nt, Human
cuuggggcugucacucuggcau

SEQ ID NO: 129688 - RNA, 22 nt, Human
gaggugaguggaucacgagguc

SEQ ID NO: 129689 - RNA, 22 nt, Human
uccauuggucucugugcccagg

SEQ ID NO: 129690 - RNA, 22 nt, Human
auuugcuugugcuaugaaaguu

SEQ ID NO: 129691 - RNA, 22 nt, Human
ccaggauggggagcagauagaa

SEQ ID NO: 129692 - RNA, 22 nt, Human
aucaguuuaaaugggcuguugg

SEQ ID NO: 129693 - RNA, 21 nt, Human
ucuuuacauuugccucuugca

SEQ ID NO: 129694 - RNA, 22 nt, Human
ucuccucugugccacagcuugg

SEQ ID NO: 129695 - RNA, 22 nt, Human
cacaaugugguuugucaucuuu

SEQ ID NO: 129696 - RNA, 22 nt, Human
ggcacagagcccagcuuccuag

SEQ ID NO: 129697 - RNA, 22 nt, Human
cuggcagggugggcuuugcuuu

SEQ ID NO: 129698 - RNA, 22 nt, Human
auuucucuaagcauccguuugc

SEQ ID NO: 129699 - RNA, 22 nt, Human
cagcugcccauccugggaaaug

SEQ ID NO: 129700 - RNA, 21 nt, Human
ucuccaguauccuucucugag

SEQ ID NO: 129701 - RNA, 22 nt, Human
cuucugugcaauuguggaggag

SEQ ID NO: 129702 - RNA, 21 nt, Human
uuucuucacuuugccccaugu

SEQ ID NO: 129703 - RNA, 18 nt, Human
gggcugugagaugggaag

SEQ ID NO: 129704 - RNA, 22 nt, Human
ggcauguuucaucacaucaaga

SEQ ID NO: 129705 - RNA, 17 nt, Human
agagagagcaugccacc

SEQ ID NO: 129706 - RNA, 22 nt, Human
auuucagcccaguaugagcccc

SEQ ID NO: 129707 - RNA, 22 nt, Human
auguguaugagugugcuucuuu

SEQ ID NO: 129708 - RNA, 22 nt, Human
cagggcagcuuccuuuguuagg

SEQ ID NO: 129709 - RNA, 22 nt, Human
cugggagucuggccucuggucc

SEQ ID NO: 129710 - RNA, 22 nt, Human
ccugccugauuccaggauggcu

SEQ ID NO: 129711 - RNA, 22 nt, Human
cagcagcaguggcugcagaaca

SEQ ID NO: 129712 - RNA, 22 nt, Human
uauucacauucucaggccuggu

SEQ ID NO: 129713 - RNA, 22 nt, Human
cugggccuuggauugacacugu

SEQ ID NO: 129714 - RNA, 22 nt, Human
auaucacaaacaagucuguacu

SEQ ID NO: 129715 - RNA, 22 nt, Human
auguagagcaguguuguccaau

SEQ ID NO: 129716 - RNA, 23 nt, Human
ugaguguguucccugugagauuu

SEQ ID NO: 129717 - RNA, 22 nt, Human
guaggcagauaggagugcagcc

SEQ ID NO: 129718 - RNA, 22 nt, Human
cucucagacugaagggccugug

SEQ ID NO: 129719 - RNA, 22 nt, Human
accucugcaacccuggaauggg

SEQ ID NO: 129720 - RNA, 22 nt, Human
gcauguguuauuucucuguggg

SEQ ID NO: 129721 - RNA, 22 nt, Human
uagcaguggaaucuuuugucca

SEQ ID NO: 129722 - RNA, 22 nt, Human
ccugggugacccgugagcgucc

SEQ ID NO: 129723 - RNA, 22 nt, Human
gagagugauucccucccauaga

SEQ ID NO: 129724 - RNA, 23 nt, Human
aaccagauaaauggcuccagggc

SEQ ID NO: 129725 - RNA, 22 nt, Human
aaaggcuccuucucccaugacc

SEQ ID NO: 129726 - RNA, 22 nt, Human
uuuaucugggauuuugcagucu

SEQ ID NO: 129727 - RNA, 22 nt, Human
ucugaaaugcaaauuugacuga

SEQ ID NO: 129728 - RNA, 17 nt, Human
uguggccuucugagcuu

SEQ ID NO: 129729 - RNA, 22 nt, Human
agaaagaacgcacuugugcugc

SEQ ID NO: 129730 - RNA, 22 nt, Human
ggcugccugaggcugaggcccg

SEQ ID NO: 129731 - RNA, 22 nt, Human
ucaguuuucaauuucaucagag

SEQ ID NO: 129732 - RNA, 22 nt, Human
cuuacauugucuuaguuuucaa

SEQ ID NO: 129733 - RNA, 22 nt, Human
cagaguucaaagccugcuggga

SEQ ID NO: 129734 - RNA, 22 nt, Human
uuucuuguuucauggugucuca

SEQ ID NO: 129735 - RNA, 22 nt, Human
ccagcuggugacauccccaacc

SEQ ID NO: 129736 - RNA, 22 nt, Human
uaaguucauaagcuuauucuua

SEQ ID NO: 129737 - RNA, 22 nt, Human
gagcugccugugugccaugaug

SEQ ID NO: 129738 - RNA, 21 nt, Human
acagggcaugcagcuggcugu

SEQ ID NO: 129739 - RNA, 22 nt, Human
ugcagaagacacaagguaacgu

SEQ ID NO: 129740 - RNA, 19 nt, Human
augauacaggugaaaauug

SEQ ID NO: 129741 - RNA, 22 nt, Human
cuggcuguuuucaauguugaug

SEQ ID NO: 129742 - RNA, 22 nt, Human
uaaccuuuuuaucuuaccucca

SEQ ID NO: 129743 - RNA, 22 nt, Human
caggcaggagccagggauucca

SEQ ID NO: 129744 - RNA, 22 nt, Human
ucaggcugugggcacuggccau

SEQ ID NO: 129745 - RNA, 22 nt, Human
ucuucacaccgggcagcaggaa

SEQ ID NO: 129746 - RNA, 17 nt, Human
agugaaauuuacauugc

SEQ ID NO: 129747 - RNA, 22 nt, Human
ggccccugcggacugccuagag

SEQ ID NO: 129748 - RNA, 22 nt, Human
gagggcaguagccucguacccu

SEQ ID NO: 129749 - RNA, 22 nt, Human
cccacucuggcucccuucuagu

SEQ ID NO: 129750 - RNA, 22 nt, Human
gcuggcuuugcacugggugcau

SEQ ID NO: 129751 - RNA, 17 nt, Human
gcaaucucagucuccuu

SEQ ID NO: 129752 - RNA, 21 nt, Human
acagcagggcuggcaugacag

SEQ ID NO: 129753 - RNA, 22 nt, Human
ugcugccaugcagagcaacaga

SEQ ID NO: 129754 - RNA, 22 nt, Human
caggcugcagcagcaguggccc

SEQ ID NO: 129755 - RNA, 22 nt, Human
gcugggagcaaguacucaucuu

SEQ ID NO: 129756 - RNA, 22 nt, Human
ugggcagcagcaaagccagacu

SEQ ID NO: 129757 - RNA, 22 nt, Human
gccugccugcugugugcaaguu

SEQ ID NO: 129758 - RNA, 22 nt, Human
ggacacagcugcagccacaccc

SEQ ID NO: 129759 - RNA, 22 nt, Human
ggucucagcccucgccagcagc

SEQ ID NO: 129760 - RNA, 22 nt, Human
aacaggagaguaaauauaugau

SEQ ID NO: 129761 - RNA, 22 nt, Human
gccucugcaccaguacugugcc

SEQ ID NO: 129762 - RNA, 23 nt, Human
uuucucauccagagagucagucc

SEQ ID NO: 129763 - RNA, 22 nt, Human
uucuugauuucaugcaguuaag

SEQ ID NO: 129764 - RNA, 22 nt, Human
ccuagagcucugcuuuaucuaa

SEQ ID NO: 129765 - RNA, 22 nt, Human
ucucuuuuauguacacccugac

SEQ ID NO: 129766 - RNA, 22 nt, Human
agaaguuguagguuugcauauu

SEQ ID NO: 129767 - RNA, 22 nt, Human
ucuuagaaugucaacugauguu

SEQ ID NO: 129768 - RNA, 22 nt, Human
caggaugagguagaggcagaua

SEQ ID NO: 129769 - RNA, 22 nt, Human
ucugucacucuagagauggcag

SEQ ID NO: 129770 - RNA, 22 nt, Human
agccccuuccaguucucagauc

SEQ ID NO: 129771 - RNA, 22 nt, Human
ucuuacagccacucugugaagc

SEQ ID NO: 129772 - RNA, 22 nt, Human
uuagcuuucagccuuucucacc

SEQ ID NO: 129773 - RNA, 23 nt, Human
aucauucuccaaucuggagcagg

SEQ ID NO: 129774 - RNA, 18 nt, Human
cucagggcaucagucugg

SEQ ID NO: 129775 - RNA, 22 nt, Human
ugccucuguggaaauggugguc

SEQ ID NO: 129776 - RNA, 22 nt, Human
uggccucugggaaagcagauuc

SEQ ID NO: 129777 - RNA, 22 nt, Human
gaauguaauagucaguagaaca

SEQ ID NO: 129778 - RNA, 22 nt, Human
aaggcacuagcaagcugccugg

SEQ ID NO: 129779 - RNA, 22 nt, Human
gagauuggccuggcuugccaac

SEQ ID NO: 129780 - RNA, 22 nt, Human
acagaauucuaguauguggcuu

SEQ ID NO: 129781 - RNA, 22 nt, Human
ggcauggcucggagucagaaca

SEQ ID NO: 129782 - RNA, 22 nt, Human
ucccuggaacagagagacaacg

SEQ ID NO: 129783 - RNA, 21 nt, Human
agaugcugugcuccaggagca

SEQ ID NO: 129784 - RNA, 22 nt, Human
caguauauucugcagagccuua

SEQ ID NO: 129785 - RNA, 20 nt, Human
ucucaggccccaguuuucuu

SEQ ID NO: 129786 - RNA, 16 nt, Human
ggagagugucugcaaa

SEQ ID NO: 129787 - RNA, 22 nt, Human
gcagagccccucaagccagccu

SEQ ID NO: 129788 - RNA, 22 nt, Human
ggacccugggcuugcuccuggg

SEQ ID NO: 129789 - RNA, 22 nt, Human
ucaaggcuaaacuuucagagua

SEQ ID NO: 129790 - RNA, 22 nt, Human
ucugggaacucugucauuuccc

SEQ ID NO: 129791 - RNA, 22 nt, Human
uuuacaguccccaggugaggau

SEQ ID NO: 129792 - RNA, 23 nt, Human
ccaggcaguagcuauugaaguga

SEQ ID NO: 129793 - RNA, 22 nt, Human
uuacaguaacauuuucagucug

SEQ ID NO: 129794 - RNA, 22 nt, Human
ugaaggugucuuugugaacauc

SEQ ID NO: 129795 - RNA, 19 nt, Human
ucuggcuccugccaggcug

SEQ ID NO: 129796 - RNA, 21 nt, Human
cuuuucucuccgcaggacauu

SEQ ID NO: 129797 - RNA, 22 nt, Human
uagacagauuucuuguuagaca

SEQ ID NO: 129798 - RNA, 22 nt, Human
auguguauuaccucgauuguga

SEQ ID NO: 129799 - RNA, 22 nt, Human
uauuuucuguggaggaccagau

SEQ ID NO: 129800 - RNA, 22 nt, Human
uacuacauuaauaaaacauuca

SEQ ID NO: 129801 - RNA, 22 nt, Human
gcagcuggggaggucgugggga

SEQ ID NO: 129802 - RNA, 22 nt, Human
guacauuucucuuguucuuauu

SEQ ID NO: 129803 - RNA, 21 nt, Human
aggcugcuggcucaggguccu

SEQ ID NO: 129804 - RNA, 22 nt, Human
aagaauuauugcaauacuagau

SEQ ID NO: 129805 - RNA, 17 nt, Human
aguguggcccugguuaa

SEQ ID NO: 129806 - RNA, 22 nt, Human
gaaggucaccuccccucucugg

SEQ ID NO: 129807 - RNA, 22 nt, Human
aaaguguugggaagaaagugca

SEQ ID NO: 129808 - RNA, 22 nt, Human
agccucugcacgggcacgggug

SEQ ID NO: 129809 - RNA, 22 nt, Human
uagaacagaggguugcccagau

SEQ ID NO: 129810 - RNA, 22 nt, Human
uggcccugacugauguggaggg

SEQ ID NO: 129811 - RNA, 20 nt, Human
gccugcagagaaggucagag

SEQ ID NO: 129812 - RNA, 19 nt, Human
gccucugcuggggacaggc

SEQ ID NO: 129813 - RNA, 22 nt, Human
cugccucugcgucccacagagu

SEQ ID NO: 129814 - RNA, 22 nt, Human
agugcacaccuuaguacaaagu

SEQ ID NO: 129815 - RNA, 22 nt, Human
aaaugugucauauucaaaguca

SEQ ID NO: 129816 - RNA, 22 nt, Human
uuacaaguucagauuuucucau

SEQ ID NO: 129817 - RNA, 22 nt, Human
uggcugaauaauauucuguugu

SEQ ID NO: 129818 - RNA, 22 nt, Human
ugcauccuuaaccagcaucacu

SEQ ID NO: 129819 - RNA, 22 nt, Human
uucaaauacauucuuugccacu

SEQ ID NO: 129820 - RNA, 18 nt, Human
aggcacuggaauuaaggg

SEQ ID NO: 129821 - RNA, 19 nt, Human
cagcugccuuuucuuugca

SEQ ID NO: 129822 - RNA, 22 nt, Human
gugcugugcgcuuuuucuguau

SEQ ID NO: 129823 - RNA, 22 nt, Human
uacaaaaguaauuacgguuuuu

SEQ ID NO: 129824 - RNA, 22 nt, Human
agggccuggaacuggagaccac

SEQ ID NO: 129825 - RNA, 22 nt, Human
augugaggaagaaagagguaag

SEQ ID NO: 129826 - RNA, 22 nt, Human
gcagagcucuguucuuaucucc

SEQ ID NO: 129827 - RNA, 22 nt, Human
cagucccagaagagccugggag

SEQ ID NO: 129828 - RNA, 22 nt, Human
aaauguguuucuuugugaaugg

SEQ ID NO: 129829 - RNA, 20 nt, Human
cucuccuugccgacuuggca

SEQ ID NO: 129830 - RNA, 22 nt, Human
gaggccugguuuccagcauccu

SEQ ID NO: 129831 - RNA, 22 nt, Human
aggcccugggcaguucuguagc

SEQ ID NO: 129832 - RNA, 22 nt, Human
cucuguccuugcacaguuccua

SEQ ID NO: 129833 - RNA, 18 nt, Human
gaaaggagagacaguagg

SEQ ID NO: 129834 - RNA, 22 nt, Human
uuaacugugacaguuucucaga

SEQ ID NO: 129835 - RNA, 22 nt, Human
guauauuuugaucacccucuau

SEQ ID NO: 129836 - RNA, 22 nt, Human
ucuggcugacauccuguaugag

SEQ ID NO: 129837 - RNA, 22 nt, Human
acaugcaugucuaugggcaggu

SEQ ID NO: 129838 - RNA, 23 nt, Human
aggauguaggauguauggcagag

SEQ ID NO: 129839 - RNA, 22 nt, Human
uggggagugaugccucggauaa

SEQ ID NO: 129840 - RNA, 22 nt, Human
gcagagccaggcuggggcaggu

SEQ ID NO: 129841 - RNA, 22 nt, Human
auaauaaaccaggaugggucug

SEQ ID NO: 129842 - RNA, 19 nt, Human
cuguggcugaccucuggcc

SEQ ID NO: 129843 - RNA, 22 nt, Human
ugacccugcuucuuggugcagg

SEQ ID NO: 129844 - RNA, 22 nt, Human
gcugggcagccuggccgcugcc

SEQ ID NO: 129845 - RNA, 22 nt, Human
uccaugagcuagggauucauca

SEQ ID NO: 129846 - RNA, 22 nt, Human
uuucucucuuaaggaguuuaaa

SEQ ID NO: 129847 - RNA, 22 nt, Human
aaggcaguuaauuuggcuagaa

SEQ ID NO: 129848 - RNA, 22 nt, Human
uucauuccuucuguaccuugcc

SEQ ID NO: 129849 - RNA, 22 nt, Human
gcucagccgaacuucagagcag

SEQ ID NO: 129850 - RNA, 22 nt, Human
acaggugugagaacaugccuug

SEQ ID NO: 129851 - RNA, 22 nt, Human
cagagccaggguugcaccccug

SEQ ID NO: 129852 - RNA, 22 nt, Human
auucauaacggcaaaugucacc

SEQ ID NO: 129853 - RNA, 20 nt, Human
ugaaggccauuuguuccaga

SEQ ID NO: 129854 - RNA, 22 nt, Human
aucaggaucacugggagucuug

SEQ ID NO: 129855 - RNA, 22 nt, Human
gugccagcaguuauggugauuu

SEQ ID NO: 129856 - RNA, 22 nt, Human
cuggcagcauggagccugugcu

SEQ ID NO: 129857 - RNA, 22 nt, Human
uuaauaaacaggugcagcugaa

SEQ ID NO: 129858 - RNA, 22 nt, Human
uugucugugaaauggaaauagu

SEQ ID NO: 129859 - RNA, 22 nt, Human
ccugucugagccagggugggca

SEQ ID NO: 129860 - RNA, 23 nt, Human
gcugucaguuguuuuugucucua

SEQ ID NO: 129861 - RNA, 22 nt, Human
ucuacugcacuggugucucauc

SEQ ID NO: 129862 - RNA, 22 nt, Human
uuacaagauaaccugaugcugu

SEQ ID NO: 129863 - RNA, 22 nt, Human
gagcuggcuccgccaugcugcu

SEQ ID NO: 129864 - RNA, 22 nt, Human
ucaggcugaggucaucugcauc

SEQ ID NO: 129865 - RNA, 22 nt, Human
cagagccauccaggugccuguu

SEQ ID NO: 129866 - RNA, 22 nt, Human
ggccuagggaguggccaugccu

SEQ ID NO: 129867 - RNA, 22 nt, Human
uguguguuaacuuauuuaaugu

SEQ ID NO: 129868 - RNA, 22 nt, Human
ggcugccugggagcccuccucu

SEQ ID NO: 129869 - RNA, 22 nt, Human
uaagacauuugaaaugugaucc

SEQ ID NO: 129870 - RNA, 22 nt, Human
gcugcaggcauuuuccugggca

SEQ ID NO: 129871 - RNA, 22 nt, Human
gaaaucugaacucuguauccuu

SEQ ID NO: 129872 - RNA, 22 nt, Human
agcucuggaauaaugaugugau

SEQ ID NO: 129873 - RNA, 22 nt, Human
gcccaggcuggagugcaguagc

SEQ ID NO: 129874 - RNA, 22 nt, Human
uuuagaguaaaaacugugaccu

SEQ ID NO: 129875 - RNA, 22 nt, Human
uuagaaauacaagugagguuga

SEQ ID NO: 129876 - RNA, 19 nt, Human
ucucuggggacacuuucac

SEQ ID NO: 129877 - RNA, 22 nt, Human
ggcugagccuggagcaucuggu

SEQ ID NO: 129878 - RNA, 22 nt, Human
ucuucacauggaacaugaagcu

SEQ ID NO: 129879 - RNA, 22 nt, Human
gcacagagggcagugagccucu

SEQ ID NO: 129880 - RNA, 22 nt, Human
gcuccacuugcagcuaggcuug

SEQ ID NO: 129881 - RNA, 22 nt, Human
cagcugagcucccaggccauca

SEQ ID NO: 129882 - RNA, 22 nt, Human
aagaauguuaguuucugauaca

SEQ ID NO: 129883 - RNA, 22 nt, Human
guggguggaucaccugagguca

SEQ ID NO: 129884 - RNA, 22 nt, Human
cauugcacuccagcuugggcaa

SEQ ID NO: 129885 - RNA, 22 nt, Human
cauggccucaaaggacugcaga

SEQ ID NO: 129886 - RNA, 22 nt, Human
aucagcaagacuaggggaauac

SEQ ID NO: 129887 - RNA, 22 nt, Human
uuuuuguagucauuagaagagg

SEQ ID NO: 129888 - RNA, 22 nt, Human
cugacucagcagcugaugaucc

SEQ ID NO: 129889 - RNA, 22 nt, Human
ucucacugggucacagcagagg

SEQ ID NO: 129890 - RNA, 22 nt, Human
cccagccaaggugcugguguug

SEQ ID NO: 129891 - RNA, 22 nt, Human
ugugugggcaugcuuuuaauuu

SEQ ID NO: 129892 - RNA, 22 nt, Human
aguggacucuucccagugcuug

SEQ ID NO: 129893 - RNA, 22 nt, Human
uguuuuauuucuccaagaggga

SEQ ID NO: 129894 - RNA, 21 nt, Human
ggcuguguucagggcaugcgg

SEQ ID NO: 129895 - RNA, 22 nt, Human
gucccagggaagaaggcagcac

SEQ ID NO: 129896 - RNA, 22 nt, Human
gcccugagggguggugucugua

SEQ ID NO: 129897 - RNA, 22 nt, Human
aucaguauccugcaguuucuau

SEQ ID NO: 129898 - RNA, 22 nt, Human
aucaguuucuaccauguggaau

SEQ ID NO: 129899 - RNA, 22 nt, Human
ggagggugcauuuuacccugug

SEQ ID NO: 129900 - RNA, 22 nt, Human
guuaacuugguagucuaagugu

SEQ ID NO: 129901 - RNA, 22 nt, Human
aaaugaacucuuccugcauccc

SEQ ID NO: 129902 - RNA, 21 nt, Human
gagcugggcgaggcuccgggg

SEQ ID NO: 129903 - RNA, 22 nt, Human
cauugcacgggcgucugucugu

SEQ ID NO: 129904 - RNA, 22 nt, Human
cugccucuauaggaguccacca

SEQ ID NO: 129905 - RNA, 22 nt, Human
ggugaggcagguggcugcugag

SEQ ID NO: 129906 - RNA, 22 nt, Human
ugugccuggcauucugggcuuc

SEQ ID NO: 129907 - RNA, 22 nt, Human
uuuacagucucuauagucaaaa

SEQ ID NO: 129908 - RNA, 22 nt, Human
cuugggaaugcuaacagaugac

SEQ ID NO: 129909 - RNA, 22 nt, Human
auucuucaccugagucagucua

SEQ ID NO: 129910 - RNA, 22 nt, Human
ucaggugguccuaagugccauc

SEQ ID NO: 129911 - RNA, 22 nt, Human
uuuagaguugguccccugugag

SEQ ID NO: 129912 - RNA, 22 nt, Human
ucugguuagccaauaaugccaa

SEQ ID NO: 129913 - RNA, 19 nt, Human
agucucaguguacagaggc

SEQ ID NO: 129914 - RNA, 22 nt, Human
ggaggccuagccagcuccaguu

SEQ ID NO: 129915 - RNA, 22 nt, Human
gcagcccaaaaaagagguagau

SEQ ID NO: 129916 - RNA, 22 nt, Human
uuuuccucuguuauuaguguga

SEQ ID NO: 129917 - RNA, 22 nt, Human
caaaugcaaaauauaacccugu

SEQ ID NO: 129918 - RNA, 22 nt, Human
gagagaaaugugcaguuugggc

SEQ ID NO: 129919 - RNA, 22 nt, Human
cagaguggcagucccaggccca

SEQ ID NO: 129920 - RNA, 22 nt, Human
aguugcagacgcagagauguug

SEQ ID NO: 129921 - RNA, 22 nt, Human
caagagcuacccugugccauau

SEQ ID NO: 129922 - RNA, 22 nt, Human
cugccagcucucuggaggcucu

SEQ ID NO: 129923 - RNA, 22 nt, Human
gagcuuccacucuagaaggagu

SEQ ID NO: 129924 - RNA, 22 nt, Human
gagcucauccccaugguccguc

SEQ ID NO: 129925 - RNA, 22 nt, Human
cagcaggagcagucagacuccu

SEQ ID NO: 129926 - RNA, 23 nt, Human
gagagcugacugucaagacuguu

SEQ ID NO: 129927 - RNA, 22 nt, Human
cuuaagaauauugaaguugugg

SEQ ID NO: 129928 - RNA, 18 nt, Human
ggcucaggcuauccuaac

SEQ ID NO: 129929 - RNA, 22 nt, Human
uggcauguggcuuugagucauc

SEQ ID NO: 129930 - RNA, 22 nt, Human
acagagguguuccagaccuagg

SEQ ID NO: 129931 - RNA, 22 nt, Human
guucccauacaguaucagugcu

SEQ ID NO: 129932 - RNA, 22 nt, Human
gcucccaguucccaaagugacc

SEQ ID NO: 129933 - RNA, 22 nt, Human
auguaacuguuauauuuuguug

SEQ ID NO: 129934 - RNA, 22 nt, Human
agcagccagagucugaacauua

SEQ ID NO: 129935 - RNA, 22 nt, Human
uauuugcuuugcuuuauagaga

SEQ ID NO: 129936 - RNA, 16 nt, Human
ccucucuuauuccucc

SEQ ID NO: 129937 - RNA, 22 nt, Human
uaaugaauaaacuugagaguca

SEQ ID NO: 129938 - RNA, 22 nt, Human
guccucaggaaagcagauaaca

SEQ ID NO: 129939 - RNA, 22 nt, Human
aauguguguucggggcccagag

SEQ ID NO: 129940 - RNA, 22 nt, Human
ugggcacuggaagccugcugug

SEQ ID NO: 129941 - RNA, 22 nt, Human
ucugagcuacgaugccugucac

SEQ ID NO: 129942 - RNA, 22 nt, Human
ugccuuccuggagcugaaggcu

SEQ ID NO: 129943 - RNA, 22 nt, Human
uuugaaauuaagauauugucca

SEQ ID NO: 129944 - RNA, 21 nt, Human
uuaagagcuuagcaguaggcc

SEQ ID NO: 129945 - RNA, 22 nt, Human
augggaggaucacuugaggcca

SEQ ID NO: 129946 - RNA, 19 nt, Human
gagcagcugcacccauuga

SEQ ID NO: 129947 - RNA, 20 nt, Human
uggagcugugguaaggagca

SEQ ID NO: 129948 - RNA, 22 nt, Human
guaucuuuaucccucguuggag

SEQ ID NO: 129949 - RNA, 22 nt, Human
ucccagcgcggggggaggaucc

SEQ ID NO: 129950 - RNA, 22 nt, Human
acugugcacaauucuaaguccu

SEQ ID NO: 129951 - RNA, 22 nt, Human
agccuccaaaugucaggucccg

SEQ ID NO: 129952 - RNA, 22 nt, Human
gcagugggcaacaagagcugga

SEQ ID NO: 129953 - RNA, 22 nt, Human
gccugccugaaggcuguaccag

SEQ ID NO: 129954 - RNA, 22 nt, Human
gcagagccccauugcuggcggg

SEQ ID NO: 129955 - RNA, 22 nt, Human
cugugugugcuacaggcuucca

SEQ ID NO: 129956 - RNA, 22 nt, Human
gagcuggcuaauacugacuuau

SEQ ID NO: 129957 - RNA, 23 nt, Human
uggcucucucagugcugcagagg

SEQ ID NO: 129958 - RNA, 22 nt, Human
cggggcugcgcucuuccugccg

SEQ ID NO: 129959 - RNA, 22 nt, Human
gcucccagcuggagccucaaca

SEQ ID NO: 129960 - RNA, 22 nt, Human
agugaguggacccugcaaggaa

SEQ ID NO: 129961 - RNA, 22 nt, Human
uucucuuuuugcaucucaaccu

SEQ ID NO: 129962 - RNA, 22 nt, Human
ugaaggcauugaugaaggaauc

SEQ ID NO: 129963 - RNA, 22 nt, Human
gcaggcagagagggguuuccag

SEQ ID NO: 129964 - RNA, 21 nt, Human
uguaugcacgcacaugcacac

SEQ ID NO: 129965 - RNA, 22 nt, Human
gacagcagacagaacuaccugc

SEQ ID NO: 129966 - RNA, 22 nt, Human
aucaguuuggaacauucaggcc

SEQ ID NO: 129967 - RNA, 22 nt, Human
ucccucuguguugggcaugccu

SEQ ID NO: 129968 - RNA, 22 nt, Human
uggcucagauaauucaaggggc

SEQ ID NO: 129969 - RNA, 18 nt, Human
auguggcuagugcaacug

SEQ ID NO: 129970 - RNA, 19 nt, Human
ugucccagacuccgugucu

SEQ ID NO: 129971 - RNA, 22 nt, Human
gcuggccauucucuuugagaug

SEQ ID NO: 129972 - RNA, 22 nt, Human
uucauucaucucuaaaaugccu

SEQ ID NO: 129973 - RNA, 22 nt, Human
cccaugagauucugaauuuggc

SEQ ID NO: 129974 - RNA, 22 nt, Human
aagacaauuugauacuaguugc

SEQ ID NO: 129975 - RNA, 22 nt, Human
agcauccaacaggagggaaggg

SEQ ID NO: 129976 - RNA, 22 nt, Human
agucucagcaagcauggcuagu

SEQ ID NO: 129977 - RNA, 22 nt, Human
ccacaggaccagaggagaucac

SEQ ID NO: 129978 - RNA, 22 nt, Human
gaggccuggaauuccagccugg

SEQ ID NO: 129979 - RNA, 22 nt, Human
auucccaucgucaacuucacug

SEQ ID NO: 129980 - RNA, 22 nt, Human
gugcauugcgaugcagacgacc

SEQ ID NO: 129981 - RNA, 22 nt, Human
uauacuuuccugcaacuuugau

SEQ ID NO: 129982 - RNA, 22 nt, Human
cucaggagaugacagaagguau

SEQ ID NO: 129983 - RNA, 22 nt, Human
cagauauaaauggaugugguag

SEQ ID NO: 129984 - RNA, 22 nt, Human
uucaacuuuggagauuuaauaa

SEQ ID NO: 129985 - RNA, 17 nt, Human
ggccuugggcugcucuu

SEQ ID NO: 129986 - RNA, 22 nt, Human
gcagagugggagcccagggcug

SEQ ID NO: 129987 - RNA, 22 nt, Human
auuacaguucugcagguaguuu

SEQ ID NO: 129988 - RNA, 22 nt, Human
gcucugugggugaguagaaucu

SEQ ID NO: 129989 - RNA, 22 nt, Human
gcacacaguauaugcucauuaa

SEQ ID NO: 129990 - RNA, 23 nt, Human
acagaaaucauuuguaagguacc

SEQ ID NO: 129991 - RNA, 22 nt, Human
gcaggccagcugugcagauggg

SEQ ID NO: 129992 - RNA, 22 nt, Human
gcugugugcucuggucuuucuu

SEQ ID NO: 129993 - RNA, 22 nt, Human
aagcccagcugaaagcauuuuu

SEQ ID NO: 129994 - RNA, 22 nt, Human
cauauaaauacaacauguguua

SEQ ID NO: 129995 - RNA, 22 nt, Human
auaugcacauacauacauaggu

SEQ ID NO: 129996 - RNA, 22 nt, Human
caaauccagaucccagucguag

SEQ ID NO: 129997 - RNA, 22 nt, Human
uggcugaaucugcagcaggaag

SEQ ID NO: 129998 - RNA, 22 nt, Human
cggcagcuccgcgccguaggac

SEQ ID NO: 129999 - RNA, 22 nt, Human
ccugugaggucaucugugguaa

SEQ ID NO: 130000 - RNA, 22 nt, Human
aauuuagaauucgcuagcuaau

SEQ ID NO: 130001 - RNA, 22 nt, Human
ucaaugauaguacaaucagccu

SEQ ID NO: 130002 - RNA, 22 nt, Human
uggauaaacucacuguaaguug

SEQ ID NO: 130003 - RNA, 22 nt, Human
agagaggcgaguuaccugugcu

SEQ ID NO: 130004 - RNA, 22 nt, Human
ggaggugguggcagugacaauu

SEQ ID NO: 130005 - RNA, 22 nt, Human
uacacuuuucugguuacucuug

SEQ ID NO: 130006 - RNA, 22 nt, Human
uggcuucugcuuucaguggagg

SEQ ID NO: 130007 - RNA, 22 nt, Human
uaugcacaauaugaucuauuug

SEQ ID NO: 130008 - RNA, 22 nt, Human
gggagucugggcuagacuccuu

SEQ ID NO: 130009 - RNA, 22 nt, Human
gcucugaggcugggagcacucu

SEQ ID NO: 130010 - RNA, 22 nt, Human
agcuggcauacuuugcuaggaa

SEQ ID NO: 130011 - RNA, 22 nt, Human
cagggccaaguuggugccuuuu

SEQ ID NO: 130012 - RNA, 22 nt, Human
cauuguuauagcauuacacacc

SEQ ID NO: 130013 - RNA, 22 nt, Human
ugggacaguuguccuccacucu

SEQ ID NO: 130014 - RNA, 23 nt, Human
aagcuuccuucacgucuccuggg

SEQ ID NO: 130015 - RNA, 22 nt, Human
ugucuuuaguugcuuagauuug

SEQ ID NO: 130016 - RNA, 22 nt, Human
cagggccucauccucagagauu

SEQ ID NO: 130017 - RNA, 22 nt, Human
acauauaugcugggacugugac

SEQ ID NO: 130018 - RNA, 20 nt, Human
guaaaauauggucuuugggu

SEQ ID NO: 130019 - RNA, 22 nt, Human
agcagggcagguaaggaucaga

SEQ ID NO: 130020 - RNA, 23 nt, Human
aggugccaacugagagcugagag

SEQ ID NO: 130021 - RNA, 22 nt, Human
ugcagucuggauguccucagau

SEQ ID NO: 130022 - RNA, 22 nt, Human
uccacagaauguaagauccaca

SEQ ID NO: 130023 - RNA, 22 nt, Human
gcagagcagugcuugcccagcg

SEQ ID NO: 130024 - RNA, 23 nt, Human
uggggagaguuacccuggaagcg

SEQ ID NO: 130025 - RNA, 22 nt, Human
ugcuguagcccugcacagugca

SEQ ID NO: 130026 - RNA, 22 nt, Human
uauuucugaggcccaggaagug

SEQ ID NO: 130027 - RNA, 22 nt, Human
uuaucuguuuucugugcguuuc

SEQ ID NO: 130028 - RNA, 22 nt, Human
cugcccuguggcucugagucau

SEQ ID NO: 130029 - RNA, 22 nt, Human
uauauagaaaagcagauguugg

SEQ ID NO: 130030 - RNA, 22 nt, Human
aguauuucugcucaugaaagag

SEQ ID NO: 130031 - RNA, 19 nt, Human
ucuauguggcagugauggc

SEQ ID NO: 130032 - RNA, 22 nt, Human
gaugccucuuuuggcugaauua

SEQ ID NO: 130033 - RNA, 22 nt, Human
cuucuuuacuuucuagaaauaa

SEQ ID NO: 130034 - RNA, 22 nt, Human
cuuguauuccccuaucucuaaa

SEQ ID NO: 130035 - RNA, 17 nt, Human
cgagggcuugcuggcuc

SEQ ID NO: 130036 - RNA, 22 nt, Human
uccaggacuagcauuucugaua

SEQ ID NO: 130037 - RNA, 22 nt, Human
uggccuggaagagaggucgagg

SEQ ID NO: 130038 - RNA, 22 nt, Human
cuguggcuaggaagcuguggga

SEQ ID NO: 130039 - RNA, 22 nt, Human
caggcagcgcucguggccuggc

SEQ ID NO: 130040 - RNA, 22 nt, Human
ccucuggucccagcucugcugc

SEQ ID NO: 130041 - RNA, 22 nt, Human
acauauuuccaugcagcauguc

SEQ ID NO: 130042 - RNA, 22 nt, Human
agguuauaugucauacugaagu

SEQ ID NO: 130043 - RNA, 22 nt, Human
acacaaguucuaaagauugcgc

SEQ ID NO: 130044 - RNA, 20 nt, Human
cuggcaggagcgagucuacc

SEQ ID NO: 130045 - RNA, 22 nt, Human
gcagugcuuuagucuguccuuu

SEQ ID NO: 130046 - RNA, 21 nt, Human
uaaaugugagcagggcugggc

SEQ ID NO: 130047 - RNA, 22 nt, Human
ggagugggaacaaugacauggu

SEQ ID NO: 130048 - RNA, 22 nt, Human
ccagagcccgggaccuggacuu

SEQ ID NO: 130049 - RNA, 22 nt, Human
auuguaauuuuagagaaagugg

SEQ ID NO: 130050 - RNA, 22 nt, Human
gcugccucccccauggcuggaa

SEQ ID NO: 130051 - RNA, 22 nt, Human
ccucugagagaaggccuucagc

SEQ ID NO: 130052 - RNA, 18 nt, Human
ccuggaccugucuccuuu

SEQ ID NO: 130053 - RNA, 22 nt, Human
uagaaaugauuuugaugcuuca

SEQ ID NO: 130054 - RNA, 22 nt, Human
aggagaaguaaggcuagaugau

SEQ ID NO: 130055 - RNA, 22 nt, Human
uggcucaguagcagugugguca

SEQ ID NO: 130056 - RNA, 18 nt, Human
ccucaggggaccuggcag

SEQ ID NO: 130057 - RNA, 22 nt, Human
aaaguuucaauagaggaagugg

SEQ ID NO: 130058 - RNA, 18 nt, Human
cagcagagacauucaaaa

SEQ ID NO: 130059 - RNA, 22 nt, Human
ucacaguauagaguuauuuugg

SEQ ID NO: 130060 - RNA, 22 nt, Human
agaggccaguggcugugcuguc

SEQ ID NO: 130061 - RNA, 21 nt, Human
ugugugcauaugcauguacau

SEQ ID NO: 130062 - RNA, 22 nt, Human
auauuuucacugaaccaaagua

SEQ ID NO: 130063 - RNA, 22 nt, Human
gccagcagguugucaaggagcu

SEQ ID NO: 130064 - RNA, 21 nt, Human
aaggcagaagcauggaaugag

SEQ ID NO: 130065 - RNA, 22 nt, Human
uacauuguucaugcaugagaaa

SEQ ID NO: 130066 - RNA, 22 nt, Human
uccucuggcucuuucccuagga

SEQ ID NO: 130067 - RNA, 22 nt, Human
ggguacaaagauuucauaagau

SEQ ID NO: 130068 - RNA, 22 nt, Human
ucauccuuuugcaugggaaggc

SEQ ID NO: 130069 - RNA, 22 nt, Human
cagaguguauucugcaguugca

SEQ ID NO: 130070 - RNA, 22 nt, Human
agcaugcugguguucauggcag

SEQ ID NO: 130071 - RNA, 22 nt, Human
gagcagugagugaauguugccu

SEQ ID NO: 130072 - RNA, 22 nt, Human
acccugagggguauagcagaag

SEQ ID NO: 130073 - RNA, 22 nt, Human
ccugccaggagcuggugcugca

SEQ ID NO: 130074 - RNA, 22 nt, Human
aggcuguggcaucacaucagga

SEQ ID NO: 130075 - RNA, 19 nt, Human
ucucagaggaaaaauugcu

SEQ ID NO: 130076 - RNA, 22 nt, Human
ugcaauaaggaguaauaguaaa

SEQ ID NO: 130077 - RNA, 22 nt, Human
cugcuggagguuggagcaugca

SEQ ID NO: 130078 - RNA, 22 nt, Human
gcccaggcuagcguagagugca

SEQ ID NO: 130079 - RNA, 22 nt, Human
cagccucuaagcacagccucuc

SEQ ID NO: 130080 - RNA, 22 nt, Human
auuuacagaugaugcuauuuga

SEQ ID NO: 130081 - RNA, 22 nt, Human
caucagcagucacaugaugcug

SEQ ID NO: 130082 - RNA, 20 nt, Human
cccucccagaugcuucccaa

SEQ ID NO: 130083 - RNA, 22 nt, Human
gcugagcucccagcaguaucug

SEQ ID NO: 130084 - RNA, 22 nt, Human
uccucagggggccaacccagcc

SEQ ID NO: 130085 - RNA, 22 nt, Human
guguuuccaguucagaaagcaa

SEQ ID NO: 130086 - RNA, 22 nt, Human
cacugcuuauaaauucuaggca

SEQ ID NO: 130087 - RNA, 22 nt, Human
ucccagggacugggcuaggcuu

SEQ ID NO: 130088 - RNA, 22 nt, Human
uuucuaucugagaagauaucua

SEQ ID NO: 130089 - RNA, 22 nt, Human
uucugcugguaacuauguuuca

SEQ ID NO: 130090 - RNA, 22 nt, Human
acaguaguccuuuauuuugguu

SEQ ID NO: 130091 - RNA, 22 nt, Human
caggaaauaucuccuggcagag

SEQ ID NO: 130092 - RNA, 19 nt, Human
uggcagugugggguaugaa

SEQ ID NO: 130093 - RNA, 22 nt, Human
uggccuggaaccuggcagggac

SEQ ID NO: 130094 - RNA, 22 nt, Human
uggcagcuugaaugcagucuuu

SEQ ID NO: 130095 - RNA, 22 nt, Human
ugcugugagguugagaaggaag

SEQ ID NO: 130096 - RNA, 22 nt, Human
ucuguuugcuggugcauggguu

SEQ ID NO: 130097 - RNA, 18 nt, Human
uggcagagugucuguucu

SEQ ID NO: 130098 - RNA, 22 nt, Human
uauguacaguccuuaacuuaaa

SEQ ID NO: 130099 - RNA, 20 nt, Human
uuucugugcccaggucuguu

SEQ ID NO: 130100 - RNA, 22 nt, Human
cuucacagucuuuauuuccucc

SEQ ID NO: 130101 - RNA, 22 nt, Human
guggcagcaaaauccugcauuc

SEQ ID NO: 130102 - RNA, 22 nt, Human
caugcuuucuguccaaauguua

SEQ ID NO: 130103 - RNA, 22 nt, Human
cugaaggauuuaguucuuugcu

SEQ ID NO: 130104 - RNA, 22 nt, Human
caguuuuucaaaauuacaugau

SEQ ID NO: 130105 - RNA, 22 nt, Human
ucuggccacccgaggccccugc

SEQ ID NO: 130106 - RNA, 22 nt, Human
uguuuuguuuaugagagcacag

SEQ ID NO: 130107 - RNA, 22 nt, Human
gcuuuacagggcacaaagggag

SEQ ID NO: 130108 - RNA, 22 nt, Human
gccuggguccacugaucaugcu

SEQ ID NO: 130109 - RNA, 22 nt, Human
gcuggugccuuguuguuguuac

SEQ ID NO: 130110 - RNA, 22 nt, Human
aaaguguggagauugaacuaaa

SEQ ID NO: 130111 - RNA, 22 nt, Human
ggugaggcccagugaucugugu

SEQ ID NO: 130112 - RNA, 19 nt, Human
acagaaauguaagugagac

SEQ ID NO: 130113 - RNA, 22 nt, Human
gagaggccauggcugugcagug

SEQ ID NO: 130114 - RNA, 22 nt, Human
ccucucuuggauguggaugggu

SEQ ID NO: 130115 - RNA, 22 nt, Human
gaaccucagugaaacuggaggu

SEQ ID NO: 130116 - RNA, 22 nt, Human
ucaggagcagcaugggugagag

SEQ ID NO: 130117 - RNA, 22 nt, Human
cagagcugcuucccaguuugug

SEQ ID NO: 130118 - RNA, 22 nt, Human
ccagccuucugagcugccugga

SEQ ID NO: 130119 - RNA, 22 nt, Human
ugggaggaucgcuugagcccag

SEQ ID NO: 130120 - RNA, 22 nt, Human
ucccagcauuaaugccugucag

SEQ ID NO: 130121 - RNA, 22 nt, Human
auauauuuugaauagccucugu

SEQ ID NO: 130122 - RNA, 21 nt, Human
cucaggaucuuauauauuagu

SEQ ID NO: 130123 - RNA, 22 nt, Human
uuuagcuugaaucuuguuuaaa

SEQ ID NO: 130124 - RNA, 22 nt, Human
cuccaggccagggaaguggaca

SEQ ID NO: 130125 - RNA, 22 nt, Human
uguaugcaaauuuauuagcaca

SEQ ID NO: 130126 - RNA, 20 nt, Human
uuucaguugguuaauggcau

SEQ ID NO: 130127 - RNA, 22 nt, Human
auacauguaacugcauuguaau

SEQ ID NO: 130128 - RNA, 22 nt, Human
auucuucagcaggggacacuau

SEQ ID NO: 130129 - RNA, 22 nt, Human
ccuggugcuuaccagagcuuuu

SEQ ID NO: 130130 - RNA, 22 nt, Human
cagagccacuuggagaugagaa

SEQ ID NO: 130131 - RNA, 22 nt, Human
ccuggcagacagcacugaagcu

SEQ ID NO: 130132 - RNA, 22 nt, Human
aggccagacagcuagaaacagg

SEQ ID NO: 130133 - RNA, 22 nt, Human
cucugguguccuuuagaauuua

SEQ ID NO: 130134 - RNA, 22 nt, Human
agagcccugaagcagagcuaaa

SEQ ID NO: 130135 - RNA, 22 nt, Human
gugccugugcggacucagggaa

SEQ ID NO: 130136 - RNA, 22 nt, Human
ucucagagauguuagggaagag

SEQ ID NO: 130137 - RNA, 22 nt, Human
ggucucagcuggaguccuuggu

SEQ ID NO: 130138 - RNA, 22 nt, Human
gggauggggucaacauguaccu

SEQ ID NO: 130139 - RNA, 22 nt, Human
cgcagcagccccgugguaggug

SEQ ID NO: 130140 - RNA, 22 nt, Human
auguguauccaucugucuauuu

SEQ ID NO: 130141 - RNA, 22 nt, Human
uccucugcuccaucuuuacugu

SEQ ID NO: 130142 - RNA, 22 nt, Human
cuagaaaugcucaagagaaagu

SEQ ID NO: 130143 - RNA, 22 nt, Human
agaagauuuagguugacgcuau

SEQ ID NO: 130144 - RNA, 22 nt, Human
uccaggcuagguuuacaggaca

SEQ ID NO: 130145 - RNA, 22 nt, Human
auuauaggcuugagccaccgug

SEQ ID NO: 130146 - RNA, 22 nt, Human
cagcaauaacucaaagccauuu

SEQ ID NO: 130147 - RNA, 22 nt, Human
gcuccucugucaaaugagagug

SEQ ID NO: 130148 - RNA, 22 nt, Human
gagcugggacauggguccucuc

SEQ ID NO: 130149 - RNA, 22 nt, Human
uuuacuguuuuauauuguccag

SEQ ID NO: 130150 - RNA, 22 nt, Human
uguauuuugugaggaucacucu

SEQ ID NO: 130151 - RNA, 22 nt, Human
ccagcagagucuaggaaggagg

SEQ ID NO: 130152 - RNA, 22 nt, Human
uaacaauaguguuugcuaguca

SEQ ID NO: 130153 - RNA, 22 nt, Human
gcuggggagggcgucaaggcca

SEQ ID NO: 130154 - RNA, 22 nt, Human
gugcuuccaucuagagggucac

SEQ ID NO: 130155 - RNA, 22 nt, Human
gaaugcacacgugugugcaugc

SEQ ID NO: 130156 - RNA, 22 nt, Human
ugucucugguauuaggugaaaa

SEQ ID NO: 130157 - RNA, 22 nt, Human
agauuuccaucuuuuucaugug

SEQ ID NO: 130158 - RNA, 22 nt, Human
caggugggaccaugauagggca

SEQ ID NO: 130159 - RNA, 22 nt, Human
cagcaggaggugagaugugacc

SEQ ID NO: 130160 - RNA, 22 nt, Human
ggagcugggaauuggaucaucu

SEQ ID NO: 130161 - RNA, 22 nt, Human
uggccugccucccggcuucuuu

SEQ ID NO: 130162 - RNA, 22 nt, Human
ccaggccucccuuuuccagcca

SEQ ID NO: 130163 - RNA, 22 nt, Human
uggcaguguauagguggcuccu

SEQ ID NO: 130164 - RNA, 22 nt, Human
auuguucuaaggguuuaauuaa

SEQ ID NO: 130165 - RNA, 22 nt, Human
acugaguguaggacuuugaguu

SEQ ID NO: 130166 - RNA, 22 nt, Human
aaguauauacuaaauguuaauc

SEQ ID NO: 130167 - RNA, 22 nt, Human
uauucacauguacauaugcuca

SEQ ID NO: 130168 - RNA, 22 nt, Human
uauuucuuguuauucucguuga

SEQ ID NO: 130169 - RNA, 22 nt, Human
ggauaagaaaauuguaauaacu

SEQ ID NO: 130170 - RNA, 22 nt, Human
ccucuggggugagugggccacu

SEQ ID NO: 130171 - RNA, 22 nt, Human
cuuuccagcauuuccuugugaa

SEQ ID NO: 130172 - RNA, 22 nt, Human
ccugggcuuucaaaaccagccu

SEQ ID NO: 130173 - RNA, 22 nt, Human
ucgcugugguuucuguacaugg

SEQ ID NO: 130174 - RNA, 22 nt, Human
aggccugggucucgugccuacc

SEQ ID NO: 130175 - RNA, 22 nt, Human
agaggccagcagugccuaucug

SEQ ID NO: 130176 - RNA, 22 nt, Human
caggugggagcgaggagcuacu

SEQ ID NO: 130177 - RNA, 20 nt, Human
caggccagagguuugauggc

SEQ ID NO: 130178 - RNA, 22 nt, Human
gaggaguguauuccacaccacu

SEQ ID NO: 130179 - RNA, 22 nt, Human
cuuucucuucacugucaugauc

SEQ ID NO: 130180 - RNA, 22 nt, Human
ccugccagugaagcugacgggc

SEQ ID NO: 130181 - RNA, 22 nt, Human
agauaugacuagaagcucauuu

SEQ ID NO: 130182 - RNA, 22 nt, Human
cccucugccugggaccaagucc

SEQ ID NO: 130183 - RNA, 23 nt, Human
acugagccagggccugggucagc

SEQ ID NO: 130184 - RNA, 22 nt, Human
aggaaaugcugaugcuccugga

SEQ ID NO: 130185 - RNA, 19 nt, Human
augucuguugaauuucaua

SEQ ID NO: 130186 - RNA, 22 nt, Human
gcugucuucacuuccugguuuc

SEQ ID NO: 130187 - RNA, 22 nt, Human
guccucuggugaaagcauuccc

SEQ ID NO: 130188 - RNA, 22 nt, Human
ccugagugaauucccucacugu

SEQ ID NO: 130189 - RNA, 19 nt, Human
cugggagguguucagagaa

SEQ ID NO: 130190 - RNA, 22 nt, Human
ccuggcagcgccgaagcuggcc

SEQ ID NO: 130191 - RNA, 22 nt, Human
ugcagccaggaaauauuugcug

SEQ ID NO: 130192 - RNA, 22 nt, Human
aaucagucauuagcucugaccu

SEQ ID NO: 130193 - RNA, 22 nt, Human
cuuuacauuaauuucuacugau

SEQ ID NO: 130194 - RNA, 22 nt, Human
ugaagcaggguggccagauugu

SEQ ID NO: 130195 - RNA, 19 nt, Human
ccagguggaacugagguag

SEQ ID NO: 130196 - RNA, 22 nt, Human
caugucuggguauaugcauaug

SEQ ID NO: 130197 - RNA, 19 nt, Human
ucccagagucuagagguug

SEQ ID NO: 130198 - RNA, 22 nt, Human
ugggcagaucuuugguggcuag

SEQ ID NO: 130199 - RNA, 22 nt, Human
agccaggcugcaguuggcuggc

SEQ ID NO: 130200 - RNA, 22 nt, Human
uuugcaaagugacuauuauaug

SEQ ID NO: 130201 - RNA, 22 nt, Human
cuguggaaaauuuguauguaau

SEQ ID NO: 130202 - RNA, 22 nt, Human
uggcucagaacuacuucuaguu

SEQ ID NO: 130203 - RNA, 22 nt, Human
gcagcccagguguagcucuuug

SEQ ID NO: 130204 - RNA, 22 nt, Human
gguggcugguuuuauaagaggu

SEQ ID NO: 130205 - RNA, 22 nt, Human
uugcaaaggggaauaaagcaau

SEQ ID NO: 130206 - RNA, 22 nt, Human
agcaucuggugagggccuaguu

SEQ ID NO: 130207 - RNA, 20 nt, Human
gcacugaaauucaauguuug

SEQ ID NO: 130208 - RNA, 22 nt, Human
ccugcagagccacgugccagcg

SEQ ID NO: 130209 - RNA, 21 nt, Human
caggaaaagcggaagucuagc

SEQ ID NO: 130210 - RNA, 22 nt, Human
agccucuguagaaagcagugug

SEQ ID NO: 130211 - RNA, 22 nt, Human
gcucagagggaacaaggggcug

SEQ ID NO: 130212 - RNA, 21 nt, Human
agggaaagaaaaugagcuaau

SEQ ID NO: 130213 - RNA, 22 nt, Human
cuggccuggagccucugggugg

SEQ ID NO: 130214 - RNA, 22 nt, Human
gcucucugggugugucuagaua

SEQ ID NO: 130215 - RNA, 23 nt, Human
agagcuuagggaauucacaugag

SEQ ID NO: 130216 - RNA, 22 nt, Human
cuggcuccaucacugggugaug

SEQ ID NO: 130217 - RNA, 19 nt, Human
gcaugcuugguggcuucug

SEQ ID NO: 130218 - RNA, 22 nt, Human
aguuuucugcuaaaccagcuaa

SEQ ID NO: 130219 - RNA, 22 nt, Human
ucucuuucuauugcaccaugcu

SEQ ID NO: 130220 - RNA, 22 nt, Human
auguagcaucuauccugauaaa

SEQ ID NO: 130221 - RNA, 22 nt, Human
aaguuugagagccuuuaguaua

SEQ ID NO: 130222 - RNA, 22 nt, Human
cucugggcacauuuuccaggac

SEQ ID NO: 130223 - RNA, 22 nt, Human
ggcuauguguguccaguguauu

SEQ ID NO: 130224 - RNA, 22 nt, Human
caggggccggcuguccgugccc

SEQ ID NO: 130225 - RNA, 22 nt, Human
acugucugcuggccccugguua

SEQ ID NO: 130226 - RNA, 22 nt, Human
auauguguacgugcaguauaua

SEQ ID NO: 130227 - RNA, 22 nt, Human
uccuugaaaggggcugcagggc

SEQ ID NO: 130228 - RNA, 22 nt, Human
gccaggccugcaagugcuggug

SEQ ID NO: 130229 - RNA, 22 nt, Human
agcuaggacagguagagauggg

SEQ ID NO: 130230 - RNA, 22 nt, Human
cugcagcuauauuuucccacag

SEQ ID NO: 130231 - RNA, 22 nt, Human
uaaaucucacuggguauauugg

SEQ ID NO: 130232 - RNA, 22 nt, Human
acuuuugugcaggucucuccca

SEQ ID NO: 130233 - RNA, 21 nt, Human
cagagcagcguucugcugugg

SEQ ID NO: 130234 - RNA, 22 nt, Human
cauaagaaauaaugaugaugac

SEQ ID NO: 130235 - RNA, 22 nt, Human
cucagcagugacaagagaguau

SEQ ID NO: 130236 - RNA, 22 nt, Human
acagcuuuucaauucugcugag

SEQ ID NO: 130237 - RNA, 22 nt, Human
ugagccuguccugugcauguga

SEQ ID NO: 130238 - RNA, 22 nt, Human
uaauaaaugaaagugcuggcau

SEQ ID NO: 130239 - RNA, 22 nt, Human
augggaguuuucucugaugcuc

SEQ ID NO: 130240 - RNA, 21 nt, Human
ugggggagaauugguugcuuu

SEQ ID NO: 130241 - RNA, 22 nt, Human
auuuucucucaaaccuuaaaau

SEQ ID NO: 130242 - RNA, 22 nt, Human
gucaggauuuuaaaaucccagu

SEQ ID NO: 130243 - RNA, 22 nt, Human
ccagccugguucagaauuggcu

SEQ ID NO: 130244 - RNA, 22 nt, Human
caguggguccuaaguacaguuc

SEQ ID NO: 130245 - RNA, 22 nt, Human
ugcugcucuucaccauggccuc

SEQ ID NO: 130246 - RNA, 22 nt, Human
cagcaggcccagaguuucaugg

SEQ ID NO: 130247 - RNA, 22 nt, Human
aauauuuuugaggcccuguuau

SEQ ID NO: 130248 - RNA, 22 nt, Human
augguuuguguggcccagauga

SEQ ID NO: 130249 - RNA, 22 nt, Human
cugcucugaagccaggauucug

SEQ ID NO: 130250 - RNA, 22 nt, Human
ccagcagggaaaaacccaccaa

SEQ ID NO: 130251 - RNA, 22 nt, Human
ucuucagauugcacugagcaag

SEQ ID NO: 130252 - RNA, 22 nt, Human
uaaggcacccuucugaguagag

SEQ ID NO: 130253 - RNA, 22 nt, Human
agagggcccauguugggcugcu

SEQ ID NO: 130254 - RNA, 22 nt, Human
gggauggcuuuguggcugacuc

SEQ ID NO: 130255 - RNA, 22 nt, Human
cuguggcugcagccuugguccu

SEQ ID NO: 130256 - RNA, 22 nt, Human
ucucagaguuugaaucuggagu

SEQ ID NO: 130257 - RNA, 22 nt, Human
ucaggaaagaagaugcucagug

SEQ ID NO: 130258 - RNA, 22 nt, Human
gcucccacaaccuucuugcucc

SEQ ID NO: 130259 - RNA, 23 nt, Human
uuucauaugguguggaugaagaa

SEQ ID NO: 130260 - RNA, 17 nt, Human
uagcugccccgaaugcu

SEQ ID NO: 130261 - RNA, 22 nt, Human
uuucucucagccuguagaaacu

SEQ ID NO: 130262 - RNA, 22 nt, Human
cugccucucagccugaccgcca

SEQ ID NO: 130263 - RNA, 22 nt, Human
acaugauuggacuccuuccccu

SEQ ID NO: 130264 - RNA, 22 nt, Human
ugucccagucaaggcugucauc

SEQ ID NO: 130265 - RNA, 22 nt, Human
auguuauuaaaguacagauucu

SEQ ID NO: 130266 - RNA, 22 nt, Human
gccuggagaggaagccggugga

SEQ ID NO: 130267 - RNA, 22 nt, Human
agagcugugaaaaugagguuug

SEQ ID NO: 130268 - RNA, 22 nt, Human
ggugggcacccgagacuggauc

SEQ ID NO: 130269 - RNA, 22 nt, Human
uccagccacucagcagggauug

SEQ ID NO: 130270 - RNA, 22 nt, Human
gugccucagcaccgccugcagc

SEQ ID NO: 130271 - RNA, 22 nt, Human
uuugcauuuguucaaguauuga

SEQ ID NO: 130272 - RNA, 17 nt, Human
uggagcugcguguguuc

SEQ ID NO: 130273 - RNA, 22 nt, Human
uucuuuaccacuacucuuccaa

SEQ ID NO: 130274 - RNA, 22 nt, Human
agacagagauacuauguuguca

SEQ ID NO: 130275 - RNA, 22 nt, Human
uccagggagauacuggcugcca

SEQ ID NO: 130276 - RNA, 22 nt, Human
gaaaugugcagaauguguuaga

SEQ ID NO: 130277 - RNA, 22 nt, Human
uuggcugugagggguugcacag

SEQ ID NO: 130278 - RNA, 22 nt, Human
cuuuucucugcgggucuuucau

SEQ ID NO: 130279 - RNA, 20 nt, Human
ugaugguucuuuccggguug

SEQ ID NO: 130280 - RNA, 22 nt, Human
ggugugugaggagucacuuagu

SEQ ID NO: 130281 - RNA, 22 nt, Human
agccccaguccgcugcgggcgg

SEQ ID NO: 130282 - RNA, 22 nt, Human
cuggagaggcugggaacagguu

SEQ ID NO: 130283 - RNA, 20 nt, Human
agugccagggcaggugagag

SEQ ID NO: 130284 - RNA, 22 nt, Human
uggcucaggggucuggcucugu

SEQ ID NO: 130285 - RNA, 22 nt, Human
uggacucagaaguguucuuuua

SEQ ID NO: 130286 - RNA, 18 nt, Human
gcaggugccacugcuguu

SEQ ID NO: 130287 - RNA, 19 nt, Human
agcagccauagacaauaug

SEQ ID NO: 130288 - RNA, 22 nt, Human
uguguugugucaccuaucaugc

SEQ ID NO: 130289 - RNA, 22 nt, Human
accuuuuuucagaacucuaaag

SEQ ID NO: 130290 - RNA, 22 nt, Human
ugggcaaguaucggacucugag

SEQ ID NO: 130291 - RNA, 22 nt, Human
cacagcuugggcucugacaaua

SEQ ID NO: 130292 - RNA, 22 nt, Human
ugugaugguucacugggcauga

SEQ ID NO: 130293 - RNA, 20 nt, Human
auacaguaggugcucaauau

SEQ ID NO: 130294 - RNA, 22 nt, Human
cagugcaugaaacaauaugcag

SEQ ID NO: 130295 - RNA, 22 nt, Human
uuuaaagaaauuccucaucuuu

SEQ ID NO: 130296 - RNA, 22 nt, Human
aguccaaggagagacagcauuu

SEQ ID NO: 130297 - RNA, 22 nt, Human
aggggugugcauccuggaggau

SEQ ID NO: 130298 - RNA, 22 nt, Human
cuuauguauauuuggaacguac

SEQ ID NO: 130299 - RNA, 22 nt, Human
agcugcucaggagagccagguc

SEQ ID NO: 130300 - RNA, 22 nt, Human
ugcugccaccugguggcugaag

SEQ ID NO: 130301 - RNA, 22 nt, Human
aagcuccccgaaacccaccucu

SEQ ID NO: 130302 - RNA, 22 nt, Human
gauauuuucauucggaugcuca

SEQ ID NO: 130303 - RNA, 22 nt, Human
agugccaggagcaaggagcucc

SEQ ID NO: 130304 - RNA, 22 nt, Human
ucucccacagccgugcuucaag

SEQ ID NO: 130305 - RNA, 20 nt, Human
cugugccuaaaccuccgggu

SEQ ID NO: 130306 - RNA, 22 nt, Human
cccugcugucaggugcugggag

SEQ ID NO: 130307 - RNA, 22 nt, Human
uuagauaacaguagaauaucaa

SEQ ID NO: 130308 - RNA, 22 nt, Human
gccugccuagaauugcagcuuu

SEQ ID NO: 130309 - RNA, 22 nt, Human
ugucagaacucuauugaugucc

SEQ ID NO: 130310 - RNA, 22 nt, Human
cugcugccggcgagccucccuu

SEQ ID NO: 130311 - RNA, 22 nt, Human
gugugguggcccuccuucaggc

SEQ ID NO: 130312 - RNA, 22 nt, Human
uuuuacaggugaaaaaugaaga

SEQ ID NO: 130313 - RNA, 18 nt, Human
cauuguacaaugcuuuau

SEQ ID NO: 130314 - RNA, 22 nt, Human
uccuucaguuaucacaguacug

SEQ ID NO: 130315 - RNA, 22 nt, Human
cugcugugggcaggguagcugg

SEQ ID NO: 130316 - RNA, 21 nt, Human
cugcaucucauagaacauguc

SEQ ID NO: 130317 - RNA, 22 nt, Human
gcuggcuguguuucaucucuga

SEQ ID NO: 130318 - RNA, 22 nt, Human
ucacugaauacuugucucaucc

SEQ ID NO: 130319 - RNA, 22 nt, Human
uaauuauuaugacaacaauugc

SEQ ID NO: 130320 - RNA, 22 nt, Human
gccagccuucuguggccugcaa

SEQ ID NO: 130321 - RNA, 17 nt, Human
gguggccugcaguggcu

SEQ ID NO: 130322 - RNA, 18 nt, Human
agagaugguguagaguuu

SEQ ID NO: 130323 - RNA, 22 nt, Human
gggacagcuguagugcuuggcu

SEQ ID NO: 130324 - RNA, 22 nt, Human
cccuggcagaaugucucugggc

SEQ ID NO: 130325 - RNA, 22 nt, Human
gugcuuaauacaugucaauaac

SEQ ID NO: 130326 - RNA, 22 nt, Human
cccaggcagagagcuggugagc

SEQ ID NO: 130327 - RNA, 22 nt, Human
cacagggcagugauuguccaca

SEQ ID NO: 130328 - RNA, 22 nt, Human
caguacuuauuucuauuuaggg

SEQ ID NO: 130329 - RNA, 22 nt, Human
ccaggcagccaagugugugugu

SEQ ID NO: 130330 - RNA, 22 nt, Human
acaaaguuaacaguuggauagu

SEQ ID NO: 130331 - RNA, 22 nt, Human
caguugcuacaguucaagugug

SEQ ID NO: 130332 - RNA, 17 nt, Human
aguggcaggcagauggg

SEQ ID NO: 130333 - RNA, 22 nt, Human
uggcagaguggaccauacucaa

SEQ ID NO: 130334 - RNA, 22 nt, Human
ugcuucuggaaacaguggcugu

SEQ ID NO: 130335 - RNA, 17 nt, Human
acagggcagaaacagcu

SEQ ID NO: 130336 - RNA, 22 nt, Human
uauuucuggcuuugagggugau

SEQ ID NO: 130337 - RNA, 22 nt, Human
ucagagcugcccaugcaagggg

SEQ ID NO: 130338 - RNA, 22 nt, Human
cagguggggagaguguggagca

SEQ ID NO: 130339 - RNA, 22 nt, Human
aaauucuuucauggcuaauaag

SEQ ID NO: 130340 - RNA, 18 nt, Human
uggccuggagacaacucu

SEQ ID NO: 130341 - RNA, 22 nt, Human
cugcuguguugccagugucacc

SEQ ID NO: 130342 - RNA, 22 nt, Human
cucugcagaggcccaaggcuga

SEQ ID NO: 130343 - RNA, 22 nt, Human
gcucaaggcaggcagacaugag

SEQ ID NO: 130344 - RNA, 20 nt, Human
gcugaccccugcugucaugc

SEQ ID NO: 130345 - RNA, 22 nt, Human
aaaugcauugguuucuacuugu

SEQ ID NO: 130346 - RNA, 22 nt, Human
gaggccugaaaggggaccuaug

SEQ ID NO: 130347 - RNA, 22 nt, Human
uucugugaaucuuuuuucccac

SEQ ID NO: 130348 - RNA, 22 nt, Human
gaagaaagauuggcaugcuuca

SEQ ID NO: 130349 - RNA, 22 nt, Human
aggcacaguuucauccccgggc

SEQ ID NO: 130350 - RNA, 18 nt, Human
ugucucaggcugaaacag

SEQ ID NO: 130351 - RNA, 17 nt, Human
uuccugugguuugaucu

SEQ ID NO: 130352 - RNA, 22 nt, Human
gaguguguucuuuaugcuguga

SEQ ID NO: 130353 - RNA, 20 nt, Human
agagccuugaggaagaugau

SEQ ID NO: 130354 - RNA, 22 nt, Human
uggacaggaucugagacugaga

SEQ ID NO: 130355 - RNA, 22 nt, Human
cauagagugauguaagguaugu

SEQ ID NO: 130356 - RNA, 22 nt, Human
guggcuucugcggugugcgcag

SEQ ID NO: 130357 - RNA, 18 nt, Human
cugucuuuuuucucucca

SEQ ID NO: 130358 - RNA, 22 nt, Human
acagaguacauucagagacuau

SEQ ID NO: 130359 - RNA, 22 nt, Human
gcucccuccaugaggcagaccg

SEQ ID NO: 130360 - RNA, 22 nt, Human
cauuugcagagggugacacucu

SEQ ID NO: 130361 - RNA, 22 nt, Human
acccagcuggaugcauggaggc

SEQ ID NO: 130362 - RNA, 19 nt, Human
uugaaagauuagcuuucua

SEQ ID NO: 130363 - RNA, 22 nt, Human
gaugcacaugugaguauagaag

SEQ ID NO: 130364 - RNA, 22 nt, Human
cucucuucccgugaguguugca

SEQ ID NO: 130365 - RNA, 22 nt, Human
ucaauuaugccauugcaauauu

SEQ ID NO: 130366 - RNA, 22 nt, Human
aggagcugagucagcccgacag

SEQ ID NO: 130367 - RNA, 21 nt, Human
guauucuuuaugaagugaaaa

SEQ ID NO: 130368 - RNA, 22 nt, Human
uacagugacuggacuuugucau

SEQ ID NO: 130369 - RNA, 22 nt, Human
ggcucuggucagugaggggccu

SEQ ID NO: 130370 - RNA, 22 nt, Human
cuggcugcaggaaggagugggc

SEQ ID NO: 130371 - RNA, 22 nt, Human
uggcugccuagugucugagcag

SEQ ID NO: 130372 - RNA, 22 nt, Human
agcuguguuauuagaaaccugc

SEQ ID NO: 130373 - RNA, 22 nt, Human
acaguuauauacauguagcugu

SEQ ID NO: 130374 - RNA, 22 nt, Human
acaauucuggguauuuauauag

SEQ ID NO: 130375 - RNA, 22 nt, Human
aaaucaguuagugguaggauug

SEQ ID NO: 130376 - RNA, 18 nt, Human
gcuccuggaccaggucac

SEQ ID NO: 130377 - RNA, 22 nt, Human
ggcagcuccucaaaaaauuaaa

SEQ ID NO: 130378 - RNA, 22 nt, Human
uguguguguuuauaaaucuaaa

SEQ ID NO: 130379 - RNA, 22 nt, Human
ggcucuggugugaagcagccuc

SEQ ID NO: 130380 - RNA, 21 nt, Human
aggucccagguuugggcagca

SEQ ID NO: 130381 - RNA, 22 nt, Human
uggagcaggacugcugcccuca

SEQ ID NO: 130382 - RNA, 20 nt, Human
agaauucuuacccuuugaug

SEQ ID NO: 130383 - RNA, 22 nt, Human
aucaggaugaagcuguagcgaa

SEQ ID NO: 130384 - RNA, 22 nt, Human
uggccuggcugcccugucugga

SEQ ID NO: 130385 - RNA, 22 nt, Human
agaggcugucccuugcuauucc

SEQ ID NO: 130386 - RNA, 22 nt, Human
cagccuguagaauacaguaaau

SEQ ID NO: 130387 - RNA, 22 nt, Human
ucaugccacuuacaaaauaaug

SEQ ID NO: 130388 - RNA, 22 nt, Human
aaggcacucauucaaggagaua

SEQ ID NO: 130389 - RNA, 22 nt, Human
uucuauguuaguaugggucucc

SEQ ID NO: 130390 - RNA, 19 nt, Human
auacacauacguaaacuga

SEQ ID NO: 130391 - RNA, 22 nt, Human
cugaggcucccucgggucugcu

SEQ ID NO: 130392 - RNA, 23 nt, Human
caguauaauguauggauggggca

SEQ ID NO: 130393 - RNA, 22 nt, Human
gucagcaggguccccuugagug

SEQ ID NO: 130394 - RNA, 20 nt, Human
ugcuguguggcccagcauga

SEQ ID NO: 130395 - RNA, 18 nt, Human
gugcugugggcaguggcc

SEQ ID NO: 130396 - RNA, 22 nt, Human
agagccuggucugagauaggac

SEQ ID NO: 130397 - RNA, 22 nt, Human
cugccugggccggccacccucu

SEQ ID NO: 130398 - RNA, 19 nt, Human
uauguguguguauuuacau

SEQ ID NO: 130399 - RNA, 20 nt, Human
gcuuccuucccagcccccac

SEQ ID NO: 130400 - RNA, 22 nt, Human
agccagcuggagaccacuguuu

SEQ ID NO: 130401 - RNA, 22 nt, Human
acagagccacuuuggugccuac

SEQ ID NO: 130402 - RNA, 22 nt, Human
ucucucuucaugcuuuuagaau

SEQ ID NO: 130403 - RNA, 22 nt, Human
uugcauugauguuccuucuugc

SEQ ID NO: 130404 - RNA, 22 nt, Human
ucaaauaccagcaauuucaugu

SEQ ID NO: 130405 - RNA, 22 nt, Human
aaaugucuuucaauagagaaau

SEQ ID NO: 130406 - RNA, 22 nt, Human
cuggcuggucaucagcaguacg

SEQ ID NO: 130407 - RNA, 21 nt, Human
uaauaauuccacuacagagua

SEQ ID NO: 130408 - RNA, 22 nt, Human
auguguguauauauagucauuu

SEQ ID NO: 130409 - RNA, 22 nt, Human
ucagaggaauaaugcugcauuu

SEQ ID NO: 130410 - RNA, 22 nt, Human
uuguguauuuccugaagguaag

SEQ ID NO: 130411 - RNA, 22 nt, Human
uguuuucuauuaccugagauug

SEQ ID NO: 130412 - RNA, 22 nt, Human
ggccagagaauaugccuuacgu

SEQ ID NO: 130413 - RNA, 22 nt, Human
gguguccaucaggcugugcuuc

SEQ ID NO: 130414 - RNA, 19 nt, Human
ggcugggucuggcagguuc

SEQ ID NO: 130415 - RNA, 19 nt, Human
gugaggauacugcucagag

SEQ ID NO: 130416 - RNA, 20 nt, Human
aucuucuuggccagcuugcu

SEQ ID NO: 130417 - RNA, 22 nt, Human
aucauuacuccuguaaaauugu

SEQ ID NO: 130418 - RNA, 22 nt, Human
uacagguagggucuauguuaga

SEQ ID NO: 130419 - RNA, 22 nt, Human
ucuaggagaaccaucagggagg

SEQ ID NO: 130420 - RNA, 22 nt, Human
gugggaugguagguagguaaua

SEQ ID NO: 130421 - RNA, 22 nt, Human
ccaaggaguagagcaggaagcu

SEQ ID NO: 130422 - RNA, 22 nt, Human
cuuccaaagcacuuuauggacc

SEQ ID NO: 130423 - RNA, 22 nt, Human
ggucagguuuuuaggagugacc

SEQ ID NO: 130424 - RNA, 22 nt, Human
ucagcaaugugauacugugcaa

SEQ ID NO: 130425 - RNA, 21 nt, Human
agcugcuccagggagcucagg

SEQ ID NO: 130426 - RNA, 22 nt, Human
ugggcugcagggguugagagcu

SEQ ID NO: 130427 - RNA, 22 nt, Human
uuuacaguaagguggaugguac

SEQ ID NO: 130428 - RNA, 23 nt, Human
auuucuaggggauuuucuggugc

SEQ ID NO: 130429 - RNA, 22 nt, Human
uuacaaagcguugagacaagua

SEQ ID NO: 130430 - RNA, 22 nt, Human
ucugucacccaggcuggagugc

SEQ ID NO: 130431 - RNA, 22 nt, Human
uauuuguauguguguacauaua

SEQ ID NO: 130432 - RNA, 22 nt, Human
uacauggugguggcacuugacu

SEQ ID NO: 130433 - RNA, 22 nt, Human
gcugauguuucaaguauagcuu

SEQ ID NO: 130434 - RNA, 22 nt, Human
cauuucuguacauguuuuggug

SEQ ID NO: 130435 - RNA, 22 nt, Human
aggcacuggucuaccccuuagu

SEQ ID NO: 130436 - RNA, 22 nt, Human
cugaggucucuuuccauaguga

SEQ ID NO: 130437 - RNA, 22 nt, Human
uucaugugaucacagauuguaa

SEQ ID NO: 130438 - RNA, 22 nt, Human
cagcagggggcagcgcagauca

SEQ ID NO: 130439 - RNA, 22 nt, Human
uuucacagcugucuuccgucuc

SEQ ID NO: 130440 - RNA, 22 nt, Human
caggauauuuacguucugcuac

SEQ ID NO: 130441 - RNA, 22 nt, Human
agugaaauaugcccauugcugu

SEQ ID NO: 130442 - RNA, 22 nt, Human
uggcugccuagucccucagccu

SEQ ID NO: 130443 - RNA, 22 nt, Human
guggguggaggcgucgagggca

SEQ ID NO: 130444 - RNA, 22 nt, Human
gcagggcagcuuagucccuguc

SEQ ID NO: 130445 - RNA, 19 nt, Human
ggucacagggguuacaagg

SEQ ID NO: 130446 - RNA, 22 nt, Human
cagggacauugguggccagguu

SEQ ID NO: 130447 - RNA, 20 nt, Human
ccagguggugccuggagagg

SEQ ID NO: 130448 - RNA, 22 nt, Human
uacauguaagacaugagacucu

SEQ ID NO: 130449 - RNA, 22 nt, Human
uggcugccuuucaccucaucuc

SEQ ID NO: 130450 - RNA, 22 nt, Human
ggcugcaggcaggguauccacu

SEQ ID NO: 130451 - RNA, 22 nt, Human
cagucccagcugcucagaaggc

SEQ ID NO: 130452 - RNA, 22 nt, Human
uggcccugaggacccagugugg

SEQ ID NO: 130453 - RNA, 22 nt, Human
ugugugugcacgugcgcgcgag

SEQ ID NO: 130454 - RNA, 22 nt, Human
ugggguggauagaaagugaugu

SEQ ID NO: 130455 - RNA, 22 nt, Human
acugcuuacaaaaggaaagaau

SEQ ID NO: 130456 - RNA, 22 nt, Human
ccucauggaccucagacugucc

SEQ ID NO: 130457 - RNA, 22 nt, Human
ugugagugaaugggucugaagu

SEQ ID NO: 130458 - RNA, 22 nt, Human
ugggcuguccagcaccugggcu

SEQ ID NO: 130459 - RNA, 22 nt, Human
ugucuuuacuuaauaaauauac

SEQ ID NO: 130460 - RNA, 22 nt, Human
uauuugcugugcuuauuccauu

SEQ ID NO: 130461 - RNA, 22 nt, Human
ucaucugucccaggcuuuuuuc

SEQ ID NO: 130462 - RNA, 22 nt, Human
ugggccugaaggagcugcgccc

SEQ ID NO: 130463 - RNA, 22 nt, Human
gcugauguauauagugauugag

SEQ ID NO: 130464 - RNA, 22 nt, Human
ugcuauugugaacagugccaca

SEQ ID NO: 130465 - RNA, 22 nt, Human
uucaagauggcaccagugagug

SEQ ID NO: 130466 - RNA, 22 nt, Human
uuugcauuuuagauuuaggccu

SEQ ID NO: 130467 - RNA, 22 nt, Human
ucugcuguguccccugugcggg

SEQ ID NO: 130468 - RNA, 22 nt, Human
ucagcaaugagaacuggcauuu

SEQ ID NO: 130469 - RNA, 22 nt, Human
gugcgccagcucaaggggaggc

SEQ ID NO: 130470 - RNA, 22 nt, Human
gucauauuauaaauguucuguu

SEQ ID NO: 130471 - RNA, 19 nt, Human
gcuucccaccagccagccc

SEQ ID NO: 130472 - RNA, 22 nt, Human
uagaaaguaaaucaguuuuauu

SEQ ID NO: 130473 - RNA, 22 nt, Human
agaccuggauuccaauccuacc

SEQ ID NO: 130474 - RNA, 22 nt, Human
uccuugaagagugggcggucga

SEQ ID NO: 130475 - RNA, 22 nt, Human
uagucucuggagacucuagggg

SEQ ID NO: 130476 - RNA, 22 nt, Human
auucuucauuguugauucaugu

SEQ ID NO: 130477 - RNA, 22 nt, Human
cugugucuucaauguacuggga

SEQ ID NO: 130478 - RNA, 22 nt, Human
agaggcugggaaggguccccgg

SEQ ID NO: 130479 - RNA, 22 nt, Human
aggcugugaaauguggcaagga

SEQ ID NO: 130480 - RNA, 22 nt, Human
ugcuggcuguauaugugagagu

SEQ ID NO: 130481 - RNA, 21 nt, Human
ggccuuggcgggggccgaauu

SEQ ID NO: 130482 - RNA, 22 nt, Human
aggguagggcccggagacagac

SEQ ID NO: 130483 - RNA, 22 nt, Human
acagggcaugugcaagagacau

SEQ ID NO: 130484 - RNA, 22 nt, Human
cugcacagagcagggcagacac

SEQ ID NO: 130485 - RNA, 22 nt, Human
ucauuacagagauauaaucuac

SEQ ID NO: 130486 - RNA, 22 nt, Human
ggauggcauguugggcucuguu

SEQ ID NO: 130487 - RNA, 22 nt, Human
gcugucacaaauauuucucagc

SEQ ID NO: 130488 - RNA, 22 nt, Human
cucuggaguucucaugaggaac
